United States Patent Application Publication US 2018/0305689 A1 - sequence listing, part 162

SEQ ID NO: 2359151 - RNA, 19 nt, Artificial Sequence
  Description of Artificial Sequence: Synthetic oligonucleotide
  Antisense strand to SEQ ID NO: 2359150
uucuucccuggaagcucgu

SEQ ID NO: 2359152 - RNA, 19 nt, Artificial Sequence
  Description of Artificial Sequence: Synthetic oligonucleotide
  Sense strand starting at position 1129 of SEQ ID NO: 1885666
cggucucuuccagaaacau

SEQ ID NO: 2359153 - RNA, 19 nt, Artificial Sequence
  Description of Artificial Sequence: Synthetic oligonucleotide
  Antisense strand to SEQ ID NO: 2359152
auguuucuggaagagaccg

SEQ ID NO: 2359154 - RNA, 19 nt, Artificial Sequence
  Description of Artificial Sequence: Synthetic oligonucleotide
  Sense strand starting at position 1533 of SEQ ID NO: 1885666
ggcagcauuugauacugaa

SEQ ID NO: 2359155 - RNA, 19 nt, Artificial Sequence
  Description of Artificial Sequence: Synthetic oligonucleotide
  Antisense strand to SEQ ID NO: 2359154
uucaguaucaaaugcugcc

SEQ ID NO: 2359156 - RNA, 19 nt, Artificial Sequence
  Description of Artificial Sequence: Synthetic oligonucleotide
  Sense strand starting at position 1628 of SEQ ID NO: 1885666
agguuucaucccggaaagc

SEQ ID NO: 2359157 - RNA, 19 nt, Artificial Sequence
  Description of Artificial Sequence: Synthetic oligonucleotide
  Antisense strand to SEQ ID NO: 2359156
gcuuuccgggaugaaaccu

SEQ ID NO: 2359158 - RNA, 19 nt, Artificial Sequence
  Description of Artificial Sequence: Synthetic oligonucleotide
  Sense strand starting at position 1629 of SEQ ID NO: 1885666
gguuucaucccggaaagca

SEQ ID NO: 2359159 - RNA, 19 nt, Artificial Sequence
  Description of Artificial Sequence: Synthetic oligonucleotide
  Antisense strand to SEQ ID NO: 2359158
ugcuuuccgggaugaaacc

SEQ ID NO: 2359160 - RNA, 19 nt, Artificial Sequence
  Description of Artificial Sequence: Synthetic oligonucleotide
  Sense strand starting at position 1645 of SEQ ID NO: 1885666
gcacgaaccuaaguacaau

SEQ ID NO: 2359161 - RNA, 19 nt, Artificial Sequence
  Description of Artificial Sequence: Synthetic oligonucleotide
  Antisense strand to SEQ ID NO: 2359160
auuguacuuagguucgugc

SEQ ID NO: 2359162 - RNA, 19 nt, Artificial Sequence
  Description of Artificial Sequence: Synthetic oligonucleotide
  Sense strand starting at position 1784 of SEQ ID NO: 1885666
gugggugguccgcagacau

SEQ ID NO: 2359163 - RNA, 19 nt, Artificial Sequence
  Description of Artificial Sequence: Synthetic oligonucleotide
  Antisense strand to SEQ ID NO: 2359162
augucugcggaccacccac

SEQ ID NO: 2359164 - RNA, 19 nt, Artificial Sequence
  Description of Artificial Sequence: Synthetic oligonucleotide
  Sense strand starting at position 1885 of SEQ ID NO: 1885666
cccugauggugguuucagu

SEQ ID NO: 2359165 - RNA, 19 nt, Artificial Sequence
  Description of Artificial Sequence: Synthetic oligonucleotide
  Antisense strand to SEQ ID NO: 2359164
acugaaaccaccaucaggg

SEQ ID NO: 2359166 - RNA, 19 nt, Artificial Sequence
  Description of Artificial Sequence: Synthetic oligonucleotide
  Sense strand starting at position 1893 of SEQ ID NO: 1885666
gugguuucaguccaggaau

SEQ ID NO: 2359167 - RNA, 19 nt, Artificial Sequence
  Description of Artificial Sequence: Synthetic oligonucleotide
  Antisense strand to SEQ ID NO: 2359166
auuccuggacugaaaccac

SEQ ID NO: 2359168 - RNA, 19 nt, Artificial Sequence
  Description of Artificial Sequence: Synthetic oligonucleotide
  Sense strand starting at position 1895 of SEQ ID NO: 1885666
gguuucaguccaggaaugu

SEQ ID NO: 2359169 - RNA, 19 nt, Artificial Sequence
  Description of Artificial Sequence: Synthetic oligonucleotide
  Antisense strand to SEQ ID NO: 2359168
acauuccuggacugaaacc

SEQ ID NO: 2359170 - RNA, 19 nt, Artificial Sequence
  Description of Artificial Sequence: Synthetic oligonucleotide
  Sense strand starting at position 1904 of SEQ ID NO: 1885666
ccaggaauguuuccaagca

SEQ ID NO: 2359171 - RNA, 19 nt, Artificial Sequence
  Description of Artificial Sequence: Synthetic oligonucleotide
  Antisense strand to SEQ ID NO: 2359170
ugcuuggaaacauuccugg

SEQ ID NO: 2359172 - RNA, 19 nt, Artificial Sequence
  Description of Artificial Sequence: Synthetic oligonucleotide
  Sense strand starting at position 1919 of SEQ ID NO: 1885666
agcagcauuugauacugaa

SEQ ID NO: 2359173 - RNA, 19 nt, Artificial Sequence
  Description of Artificial Sequence: Synthetic oligonucleotide
  Antisense strand to SEQ ID NO: 2359172
uucaguaucaaaugcugcu

SEQ ID NO: 2359174 - RNA, 19 nt, Artificial Sequence
  Description of Artificial Sequence: Synthetic oligonucleotide
  Sense strand starting at position 2135 of SEQ ID NO: 1885666
acgcaugucccaggacaga

SEQ ID NO: 2359175 - RNA, 19 nt, Artificial Sequence
  Description of Artificial Sequence: Synthetic oligonucleotide
  Antisense strand to SEQ ID NO: 2359174
ucuguccugggacaugcgu

SEQ ID NO: 2359176 - RNA, 19 nt, Artificial Sequence
  Description of Artificial Sequence: Synthetic oligonucleotide
  Sense strand starting at position 2556 of SEQ ID NO: 1885666
augucucuucccuaaugga

SEQ ID NO: 2359177 - RNA, 19 nt, Artificial Sequence
  Description of Artificial Sequence: Synthetic oligonucleotide
  Antisense strand to SEQ ID NO: 2359176
uccauuagggaagagacau

SEQ ID NO: 2359178 - RNA, 19 nt, Artificial Sequence
  Description of Artificial Sequence: Synthetic oligonucleotide
  Sense strand starting at position 2585 of SEQ ID NO: 1885666
ucaagagcguuuccaaagu

SEQ ID NO: 2359179 - RNA, 19 nt, Artificial Sequence
  Description of Artificial Sequence: Synthetic oligonucleotide
  Antisense strand to SEQ ID NO: 2359178
acuuuggaaacgcucuuga

SEQ ID NO: 2359180 - RNA, 19 nt, Artificial Sequence
  Description of Artificial Sequence: Synthetic oligonucleotide
  Sense strand starting at position 2680 of SEQ ID NO: 1885666
uagggauucuaugcuuuga

SEQ ID NO: 2359181 - RNA, 19 nt, Artificial Sequence
  Description of Artificial Sequence: Synthetic oligonucleotide
  Antisense strand to SEQ ID NO: 2359180
ucaaagcauagaaucccua

SEQ ID NO: 2359182 - RNA, 19 nt, Artificial Sequence
  Description of Artificial Sequence: Synthetic oligonucleotide
  Sense strand starting at position 2682 of SEQ ID NO: 1885666
gggauucuaugcuuugaau

SEQ ID NO: 2359183 - RNA, 19 nt, Artificial Sequence
  Description of Artificial Sequence: Synthetic oligonucleotide
  Antisense strand to SEQ ID NO: 2359182
auucaaagcauagaauccc

SEQ ID NO: 2359184 - RNA, 19 nt, Artificial Sequence
  Description of Artificial Sequence: Synthetic oligonucleotide
  Sense strand starting at position 2733 of SEQ ID NO: 1885666
ccugucagguuccuaaagu

SEQ ID NO: 2359185 - RNA, 19 nt, Artificial Sequence
  Description of Artificial Sequence: Synthetic oligonucleotide
  Antisense strand to SEQ ID NO: 2359184
acuuuaggaaccugacagg

SEQ ID NO: 2359186 - RNA, 19 nt, Artificial Sequence
  Description of Artificial Sequence: Synthetic oligonucleotide
  Sense strand starting at position 2783 of SEQ ID NO: 1885666
ccuaaugaccaaugucaug

SEQ ID NO: 2359187 - RNA, 19 nt, Artificial Sequence
  Description of Artificial Sequence: Synthetic oligonucleotide
  Antisense strand to SEQ ID NO: 2359186
caugacauuggucauuagg

SEQ ID NO: 2359188 - RNA, 19 nt, Artificial Sequence
  Description of Artificial Sequence: Synthetic oligonucleotide
  Sense strand starting at position 2851 of SEQ ID NO: 1885666
ccaagaaucuuccagagac

SEQ ID NO: 2359189 - RNA, 19 nt, Artificial Sequence
  Description of Artificial Sequence: Synthetic oligonucleotide
  Antisense strand to SEQ ID NO: 2359188
gucucuggaagauucuugg

SEQ ID NO: 2359190 - RNA, 19 nt, Artificial Sequence
  Description of Artificial Sequence: Synthetic oligonucleotide
  Sense strand starting at position 2870 of SEQ ID NO: 1885666
ugaagcuuguguccagaaa

SEQ ID NO: 2359191 - RNA, 19 nt, Artificial Sequence
  Description of Artificial Sequence: Synthetic oligonucleotide
  Antisense strand to SEQ ID NO: 2359190
uuucuggacacaagcuuca

SEQ ID NO: 2359192 - RNA, 19 nt, Artificial Sequence
  Description of Artificial Sequence: Synthetic oligonucleotide
  Sense strand starting at position 2871 of SEQ ID NO: 1885666
gaagcuuguguccagaaag

SEQ ID NO: 2359193 - RNA, 19 nt, Artificial Sequence
  Description of Artificial Sequence: Synthetic oligonucleotide
  Antisense strand to SEQ ID NO: 2359192
cuuucuggacacaagcuuc

SEQ ID NO: 2359194 - RNA, 19 nt, Artificial Sequence
  Description of Artificial Sequence: Synthetic oligonucleotide
  Sense strand starting at position 3563 of SEQ ID NO: 1885666
gaugcagaggcuuacuaaa

SEQ ID NO: 2359195 - RNA, 19 nt, Artificial Sequence
  Description of Artificial Sequence: Synthetic oligonucleotide
  Antisense strand to SEQ ID NO: 2359194
uuuaguaagccucugcauc

SEQ ID NO: 2359196 - RNA, 19 nt, Artificial Sequence
  Description of Artificial Sequence: Synthetic oligonucleotide
  Sense strand starting at position 3862 of SEQ ID NO: 1885666
guuagacauuccuccuacu

SEQ ID NO: 2359197 - RNA, 19 nt, Artificial Sequence
  Description of Artificial Sequence: Synthetic oligonucleotide
  Antisense strand to SEQ ID NO: 2359196
aguaggaggaaugucuaac

SEQ ID NO: 2359198 - RNA, 19 nt, Artificial Sequence
  Description of Artificial Sequence: Synthetic oligonucleotide
  Sense strand starting at position 126 of SEQ ID NO: 1885667
cccagaauguuccuggaug

SEQ ID NO: 2359199 - RNA, 19 nt, Artificial Sequence
  Description of Artificial Sequence: Synthetic oligonucleotide
  Antisense strand to SEQ ID NO: 2359198
cauccaggaacauucuggg

SEQ ID NO: 2359200 - RNA, 19 nt, Artificial Sequence
  Description of Artificial Sequence: Synthetic oligonucleotide
  Sense strand starting at position 155 of SEQ ID NO: 1885667
caucaauagccuuggaagu

SEQ ID NO: 2359201 - RNA, 19 nt, Artificial Sequence
  Description of Artificial Sequence: Synthetic oligonucleotide
  Antisense strand to SEQ ID NO: 2359200
acuuccaaggcuauugaug

SEQ ID NO: 2359202 - RNA, 19 nt, Artificial Sequence
  Description of Artificial Sequence: Synthetic oligonucleotide
  Sense strand starting at position 168 of SEQ ID NO: 1885667
ggaagugugaaaggaaagu

SEQ ID NO: 2359203 - RNA, 19 nt, Artificial Sequence
  Description of Artificial Sequence: Synthetic oligonucleotide
  Antisense strand to SEQ ID NO: 2359202
acuuuccuuucacacuucc

SEQ ID NO: 2359204 - RNA, 19 nt, Artificial Sequence
  Description of Artificial Sequence: Synthetic oligonucleotide
  Sense strand starting at position 224 of SEQ ID NO: 1885667
cuggaagcugcucaggaua

SEQ ID NO: 2359205 - RNA, 19 nt, Artificial Sequence
  Description of Artificial Sequence: Synthetic oligonucleotide
  Antisense strand to SEQ ID NO: 2359204
uauccugagcagcuuccag

SEQ ID NO: 2359206 - RNA, 19 nt, Artificial Sequence
  Description of Artificial Sequence: Synthetic oligonucleotide
  Sense strand starting at position 238 of SEQ ID NO: 1885667
ggauaaaccugccucucau

SEQ ID NO: 2359207 - RNA, 19 nt, Artificial Sequence
  Description of Artificial Sequence: Synthetic oligonucleotide
  Antisense strand to SEQ ID NO: 2359206
augagaggcagguuuaucc

SEQ ID NO: 2359208 - RNA, 19 nt, Artificial Sequence
  Description of Artificial Sequence: Synthetic oligonucleotide
  Sense strand starting at position 285 of SEQ ID NO: 1885667
gagacagaugcguaucuga

SEQ ID NO: 2359209 - RNA, 19 nt, Artificial Sequence
  Description of Artificial Sequence: Synthetic oligonucleotide
  Antisense strand to SEQ ID NO: 2359208
ucagauacgcaucugucuc

SEQ ID NO: 2359210 - RNA, 19 nt, Artificial Sequence
  Description of Artificial Sequence: Synthetic oligonucleotide
  Sense strand starting at position 288 of SEQ ID NO: 1885667
acagaugcguaucugauuu

SEQ ID NO: 2359211 - RNA, 19 nt, Artificial Sequence
  Description of Artificial Sequence: Synthetic oligonucleotide
  Antisense strand to SEQ ID NO: 2359210
aaaucagauacgcaucugu

SEQ ID NO: 2359212 - RNA, 19 nt, Artificial Sequence
  Description of Artificial Sequence: Synthetic oligonucleotide
  Sense strand starting at position 334 of SEQ ID NO: 1885667
cgcgaaagaauguaaucau

SEQ ID NO: 2359213 - RNA, 19 nt, Artificial Sequence
  Description of Artificial Sequence: Synthetic oligonucleotide
  Antisense strand to SEQ ID NO: 2359212
augauuacauucuuucgcg

SEQ ID NO: 2359214 - RNA, 19 nt, Artificial Sequence
  Description of Artificial Sequence: Synthetic oligonucleotide
  Sense strand starting at position 343 of SEQ ID NO: 1885667
auguaaucauuuguguauc

SEQ ID NO: 2359215 - RNA, 19 nt, Artificial Sequence
  Description of Artificial Sequence: Synthetic oligonucleotide
  Antisense strand to SEQ ID NO: 2359214
gauacacaaaugauuacau

SEQ ID NO: 2359216 - RNA, 19 nt, Artificial Sequence
  Description of Artificial Sequence: Synthetic oligonucleotide
  Sense strand starting at position 345 of SEQ ID NO: 1885667
guaaucauuuguguaucac

SEQ ID NO: 2359217 - RNA, 19 nt, Artificial Sequence
  Description of Artificial Sequence: Synthetic oligonucleotide
  Antisense strand to SEQ ID NO: 2359216
gugauacacaaaugauuac

SEQ ID NO: 2359218 - RNA, 19 nt, Artificial Sequence
  Description of Artificial Sequence: Synthetic oligonucleotide
  Sense strand starting at position 443 of SEQ ID NO: 1885667
cuuacaugugcugaaugau

SEQ ID NO: 2359219 - RNA, 19 nt, Artificial Sequence
  Description of Artificial Sequence: Synthetic oligonucleotide
  Antisense strand to SEQ ID NO: 2359218
aucauucagcacauguaag

SEQ ID NO: 2359220 - RNA, 19 nt, Artificial Sequence
  Description of Artificial Sequence: Synthetic oligonucleotide
  Sense strand starting at position 819 of SEQ ID NO: 1885667
ggaagcucucgggaagguu

SEQ ID NO: 2359221 - RNA, 19 nt, Artificial Sequence
  Description of Artificial Sequence: Synthetic oligonucleotide
  Antisense strand to SEQ ID NO: 2359220
aaccuucccgagagcuucc

SEQ ID NO: 2359222 - RNA, 19 nt, Artificial Sequence
  Description of Artificial Sequence: Synthetic oligonucleotide
  Sense strand starting at position 1165 of SEQ ID NO: 1885667
uguucuugucuacaucaaa

SEQ ID NO: 2359223 - RNA, 19 nt, Artificial Sequence
  Description of Artificial Sequence: Synthetic oligonucleotide
  Antisense strand to SEQ ID NO: 2359222
uuugauguagacaagaaca

SEQ ID NO: 2359224 - RNA, 19 nt, Artificial Sequence
  Description of Artificial Sequence: Synthetic oligonucleotide
  Sense strand starting at position 1208 of SEQ ID NO: 1885667
ccgugaauuuccuuccaug

SEQ ID NO: 2359225 - RNA, 19 nt, Artificial Sequence
  Description of Artificial Sequence: Synthetic oligonucleotide
  Antisense strand to SEQ ID NO: 2359224
cauggaaggaaauucacgg

SEQ ID NO: 2359226 - RNA, 19 nt, Artificial Sequence
  Description of Artificial Sequence: Synthetic oligonucleotide
  Sense strand starting at position 1292 of SEQ ID NO: 1885667
auuggauuccucugccaau

SEQ ID NO: 2359227 - RNA, 19 nt, Artificial Sequence
  Description of Artificial Sequence: Synthetic oligonucleotide
  Antisense strand to SEQ ID NO: 2359226
auuggcagaggaauccaau

SEQ ID NO: 2359228 - RNA, 19 nt, Artificial Sequence
  Description of Artificial Sequence: Synthetic oligonucleotide
  Sense strand starting at position 1305 of SEQ ID NO: 1885667
gccaauuuguagucaacug

SEQ ID NO: 2359229 - RNA, 19 nt, Artificial Sequence
  Description of Artificial Sequence: Synthetic oligonucleotide
  Antisense strand to SEQ ID NO: 2359228
caguugacuacaaauuggc

SEQ ID NO: 2359230 - RNA, 19 nt, Artificial Sequence
  Description of Artificial Sequence: Synthetic oligonucleotide
  Sense strand starting at position 1594 of SEQ ID NO: 1885667
uguguauccgcgaggucaa

SEQ ID NO: 2359231 - RNA, 19 nt, Artificial Sequence
  Description of Artificial Sequence: Synthetic oligonucleotide
  Antisense strand to SEQ ID NO: 2359230
uugaccucgcggauacaca

SEQ ID NO: 2359232 - RNA, 19 nt, Artificial Sequence
  Description of Artificial Sequence: Synthetic oligonucleotide
  Sense strand starting at position 2175 of SEQ ID NO: 1885667
ucagaacaugguuggucau

SEQ ID NO: 2359233 - RNA, 19 nt, Artificial Sequence
  Description of Artificial Sequence: Synthetic oligonucleotide
  Antisense strand to SEQ ID NO: 2359232
augaccaaccauguucuga

SEQ ID NO: 2359234 - RNA, 19 nt, Artificial Sequence
  Description of Artificial Sequence: Synthetic oligonucleotide
  Sense strand starting at position 2178 of SEQ ID NO: 1885667
gaacaugguuggucaugga

SEQ ID NO: 2359235 - RNA, 19 nt, Artificial Sequence
  Description of Artificial Sequence: Synthetic oligonucleotide
  Antisense strand to SEQ ID NO: 2359234
uccaugaccaaccauguuc

SEQ ID NO: 2359236 - RNA, 19 nt, Artificial Sequence
  Description of Artificial Sequence: Synthetic oligonucleotide
  Sense strand starting at position 2341 of SEQ ID NO: 1885667
ucuggaagucucugaagca

SEQ ID NO: 2359237 - RNA, 19 nt, Artificial Sequence
  Description of Artificial Sequence: Synthetic oligonucleotide
  Antisense strand to SEQ ID NO: 2359236
ugcuucagagacuuccaga

SEQ ID NO: 2359238 - RNA, 19 nt, Artificial Sequence
  Description of Artificial Sequence: Synthetic oligonucleotide
  Sense strand starting at position 2904 of SEQ ID NO: 1885667
ggcaacauaagguaguaau

SEQ ID NO: 2359239 - RNA, 19 nt, Artificial Sequence
  Description of Artificial Sequence: Synthetic oligonucleotide
  Antisense strand to SEQ ID NO: 2359238
auuacuaccuuauguugcc

SEQ ID NO: 2359240 - RNA, 19 nt, Artificial Sequence
  Description of Artificial Sequence: Synthetic oligonucleotide
  Sense strand starting at position 2975 of SEQ ID NO: 1885667
ggaaaugugucuuuaaaca

SEQ ID NO: 2359241 - RNA, 19 nt, Artificial Sequence
  Description of Artificial Sequence: Synthetic oligonucleotide
  Antisense strand to SEQ ID NO: 2359240
uguuuaaagacacauuucc

SEQ ID NO: 2359242 - RNA, 19 nt, Artificial Sequence
  Description of Artificial Sequence: Synthetic oligonucleotide
  Sense strand starting at position 3030 of SEQ ID NO: 1885667
ccuugcuucccagagguca

SEQ ID NO: 2359243 - RNA, 19 nt, Artificial Sequence
  Description of Artificial Sequence: Synthetic oligonucleotide
  Antisense strand to SEQ ID NO: 2359242
ugaccucugggaagcaagg

SEQ ID NO: 2359244 - RNA, 19 nt, Artificial Sequence
  Description of Artificial Sequence: Synthetic oligonucleotide
  Sense strand starting at position 3061 of SEQ ID NO: 1885667
gguauuugagggcguaaug

SEQ ID NO: 2359245 - RNA, 19 nt, Artificial Sequence
  Description of Artificial Sequence: Synthetic oligonucleotide
  Antisense strand to SEQ ID NO: 2359244
cauuacgcccucaaauacc

SEQ ID NO: 2359246 - RNA, 19 nt, Artificial Sequence
  Description of Artificial Sequence: Synthetic oligonucleotide
  Sense strand starting at position 3071 of SEQ ID NO: 1885667
ggcguaauguggaugucuu

SEQ ID NO: 2359247 - RNA, 19 nt, Artificial Sequence
  Description of Artificial Sequence: Synthetic oligonucleotide
  Antisense strand to SEQ ID NO: 2359246
aagacauccacauuacgcc

SEQ ID NO: 2359248 - RNA, 19 nt, Artificial Sequence
  Description of Artificial Sequence: Synthetic oligonucleotide
  Sense strand starting at position 3100 of SEQ ID NO: 1885667
aggaguuccuuucccuaaa

SEQ ID NO: 2359249 - RNA, 19 nt, Artificial Sequence
  Description of Artificial Sequence: Synthetic oligonucleotide
  Antisense strand to SEQ ID NO: 2359248
uuuagggaaaggaacuccu

SEQ ID NO: 2359250 - RNA, 19 nt, Artificial Sequence
  Description of Artificial Sequence: Synthetic oligonucleotide
  Sense strand starting at position 3101 of SEQ ID NO: 1885667
ggaguuccuuucccuaaag

SEQ ID NO: 2359251 - RNA, 19 nt, Artificial Sequence
  Description of Artificial Sequence: Synthetic oligonucleotide
  Antisense strand to SEQ ID NO: 2359250
cuuuagggaaaggaacucc

SEQ ID NO: 2359252 - RNA, 19 nt, Artificial Sequence
  Description of Artificial Sequence: Synthetic oligonucleotide
  Sense strand starting at position 3169 of SEQ ID NO: 1885667
ugguuuauucacugacgag

SEQ ID NO: 2359253 - RNA, 19 nt, Artificial Sequence
  Description of Artificial Sequence: Synthetic oligonucleotide
  Antisense strand to SEQ ID NO: 2359252
cucgucagugaauaaacca

SEQ ID NO: 2359254 - RNA, 19 nt, Artificial Sequence
  Description of Artificial Sequence: Synthetic oligonucleotide
  Sense strand starting at position 3179 of SEQ ID NO: 1885667
acugacgagucuucaagga

SEQ ID NO: 2359255 - RNA, 19 nt, Artificial Sequence
  Description of Artificial Sequence: Synthetic oligonucleotide
  Antisense strand to SEQ ID NO: 2359254
uccuugaagacucgucagu

SEQ ID NO: 2359256 - RNA, 19 nt, Artificial Sequence
  Description of Artificial Sequence: Synthetic oligonucleotide
  Sense strand starting at position 3255 of SEQ ID NO: 1885667
ccuaaugauggccgggaua

SEQ ID NO: 2359257 - RNA, 19 nt, Artificial Sequence
  Description of Artificial Sequence: Synthetic oligonucleotide
  Antisense strand to SEQ ID NO: 2359256
uaucccggccaucauuagg

SEQ ID NO: 2359258 - RNA, 19 nt, Artificial Sequence
  Description of Artificial Sequence: Synthetic oligonucleotide
  Sense strand starting at position 3257 of SEQ ID NO: 1885667
uaaugauggccgggauaug

SEQ ID NO: 2359259 - RNA, 19 nt, Artificial Sequence
  Description of Artificial Sequence: Synthetic oligonucleotide
  Antisense strand to SEQ ID NO: 2359258
cauaucccggccaucauua

SEQ ID NO: 2359260 - RNA, 19 nt, Artificial Sequence
  Description of Artificial Sequence: Synthetic oligonucleotide
  Sense strand starting at position 3267 of SEQ ID NO: 1885667
cgggauaugagccaaguga

SEQ ID NO: 2359261 - RNA, 19 nt, Artificial Sequence
  Description of Artificial Sequence: Synthetic oligonucleotide
  Antisense strand to SEQ ID NO: 2359260
ucacuuggcucauaucccg

SEQ ID NO: 2359262 - RNA, 19 nt, Artificial Sequence
  Description of Artificial Sequence: Synthetic oligonucleotide
  Sense strand starting at position 3271 of SEQ ID NO: 1885667
auaugagccaagugaugua

SEQ ID NO: 2359263 - RNA, 19 nt, Artificial Sequence
  Description of Artificial Sequence: Synthetic oligonucleotide
  Antisense strand to SEQ ID NO: 2359262
uacaucacuuggcucauau

SEQ ID NO: 2359264 - RNA, 19 nt, Artificial Sequence
  Description of Artificial Sequence: Synthetic oligonucleotide
  Sense strand starting at position 3276 of SEQ ID NO: 1885667
agccaagugauguaaguca

SEQ ID NO: 2359265 - RNA, 19 nt, Artificial Sequence
  Description of Artificial Sequence: Synthetic oligonucleotide
  Antisense strand to SEQ ID NO: 2359264
ugacuuacaucacuuggcu

SEQ ID NO: 2359266 - RNA, 19 nt, Artificial Sequence
  Description of Artificial Sequence: Synthetic oligonucleotide
  Sense strand starting at position 3306 of SEQ ID NO: 1885667
ccugucaugcggaggugau

SEQ ID NO: 2359267 - RNA, 19 nt, Artificial Sequence
  Description of Artificial Sequence: Synthetic oligonucleotide
  Antisense strand to SEQ ID NO: 2359266
aucaccuccgcaugacagg

SEQ ID NO: 2359268 - RNA, 19 nt, Artificial Sequence
  Description of Artificial Sequence: Synthetic oligonucleotide
  Sense strand starting at position 3667 of SEQ ID NO: 1885667
gagcaccaucugugauaca

SEQ ID NO: 2359269 - RNA, 19 nt, Artificial Sequence
  Description of Artificial Sequence: Synthetic oligonucleotide
  Antisense strand to SEQ ID NO: 2359268
uguaucacagauggugcuc

SEQ ID NO: 2359270 - RNA, 19 nt, Artificial Sequence
  Description of Artificial Sequence: Synthetic oligonucleotide
  Sense strand starting at position 3760 of SEQ ID NO: 1885667
gccucuuucgaggaaacug

SEQ ID NO: 2359271 - RNA, 19 nt, Artificial Sequence
  Description of Artificial Sequence: Synthetic oligonucleotide
  Antisense strand to SEQ ID NO: 2359270
caguuuccucgaaagaggc

SEQ ID NO: 2359272 - RNA, 19 nt, Artificial Sequence
  Description of Artificial Sequence: Synthetic oligonucleotide
  Sense strand starting at position 3770 of SEQ ID NO: 1885667
aggaaacugccaugguaag

SEQ ID NO: 2359273 - RNA, 19 nt, Artificial Sequence
  Description of Artificial Sequence: Synthetic oligonucleotide
  Antisense strand to SEQ ID NO: 2359272
cuuaccauggcaguuuccu

SEQ ID NO: 2359274 - RNA, 19 nt, Artificial Sequence
  Description of Artificial Sequence: Synthetic oligonucleotide
  Sense strand starting at position 3937 of SEQ ID NO: 1885667
aagaguccacuauguagga

SEQ ID NO: 2359275 - RNA, 19 nt, Artificial Sequence
  Description of Artificial Sequence: Synthetic oligonucleotide
  Antisense strand to SEQ ID NO: 2359274
uccuacauaguggacucuu

SEQ ID NO: 2359276 - RNA, 19 nt, Artificial Sequence
  Description of Artificial Sequence: Synthetic oligonucleotide
  Sense strand starting at position 3946 of SEQ ID NO: 1885667
cuauguaggauuggucaaa

SEQ ID NO: 2359277 - RNA, 19 nt, Artificial Sequence
  Description of Artificial Sequence: Synthetic oligonucleotide
  Antisense strand to SEQ ID NO: 2359276
uuugaccaauccuacauag

SEQ ID NO: 2359278 - RNA, 19 nt, Artificial Sequence
  Description of Artificial Sequence: Synthetic oligonucleotide
  Sense strand starting at position 43 of SEQ ID NO: 1885668
guguuuggcacugaggaga

SEQ ID NO: 2359279 - RNA, 19 nt, Artificial Sequence
  Description of Artificial Sequence: Synthetic oligonucleotide
  Antisense strand to SEQ ID NO: 2359278
ucuccucagugccaaacac

SEQ ID NO: 2359280 - RNA, 19 nt, Artificial Sequence
  Description of Artificial Sequence: Synthetic oligonucleotide
  Sense strand starting at position 170 of SEQ ID NO: 1885668
aggcuuucuccagggaggu

SEQ ID NO: 2359281 - RNA, 19 nt, Artificial Sequence
  Description of Artificial Sequence: Synthetic oligonucleotide
  Antisense strand to SEQ ID NO: 2359280
accucccuggagaaagccu

SEQ ID NO: 2359282 - RNA, 19 nt, Artificial Sequence
  Description of Artificial Sequence: Synthetic oligonucleotide
  Sense strand starting at position 171 of SEQ ID NO: 1885668
ggcuuucuccagggagguu

SEQ ID NO: 2359283 - RNA, 19 nt, Artificial Sequence
  Description of Artificial Sequence: Synthetic oligonucleotide
  Antisense strand to SEQ ID NO: 2359282
aaccucccuggagaaagcc

SEQ ID NO: 2359284 - RNA, 19 nt, Artificial Sequence
  Description of Artificial Sequence: Synthetic oligonucleotide
  Sense strand starting at position 419 of SEQ ID NO: 1885668
gucauugagcaccauggaa

SEQ ID NO: 2359285 - RNA, 19 nt, Artificial Sequence
  Description of Artificial Sequence: Synthetic oligonucleotide
  Antisense strand to SEQ ID NO: 2359284
uuccauggugcucaaugac

SEQ ID NO: 2359286 - RNA, 19 nt, Artificial Sequence
  Description of Artificial Sequence: Synthetic oligonucleotide
  Sense strand starting at position 516 of SEQ ID NO: 1885668
gagcgagauuaugccauuu

SEQ ID NO: 2359287 - RNA, 19 nt, Artificial Sequence
  Description of Artificial Sequence: Synthetic oligonucleotide
  Antisense strand to SEQ ID NO: 2359286
aaauggcauaaucucgcuc

SEQ ID NO: 2359288 - RNA, 19 nt, Artificial Sequence
  Description of Artificial Sequence: Synthetic oligonucleotide
  Sense strand starting at position 578 of SEQ ID NO: 1885668
ucgggugucauggagaagu

SEQ ID NO: 2359289 - RNA, 19 nt, Artificial Sequence
  Description of Artificial Sequence: Synthetic oligonucleotide
  Antisense strand to SEQ ID NO: 2359288
acuucuccaugacacccga

SEQ ID NO: 2359290 - RNA, 19 nt, Artificial Sequence
  Description of Artificial Sequence: Synthetic oligonucleotide
  Sense strand starting at position 745 of SEQ ID NO: 1885668
cagagaugccgaggacaaa

SEQ ID NO: 2359291 - RNA, 19 nt, Artificial Sequence
  Description of Artificial Sequence: Synthetic oligonucleotide
  Antisense strand to SEQ ID NO: 2359290
uuuguccucggcaucucug

SEQ ID NO: 2359292 - RNA, 19 nt, Artificial Sequence
  Description of Artificial Sequence: Synthetic oligonucleotide
  Sense strand starting at position 896 of SEQ ID NO: 1885668
acaugaaugcucgaagcag

SEQ ID NO: 2359293 - RNA, 19 nt, Artificial Sequence
  Description of Artificial Sequence: Synthetic oligonucleotide
  Antisense strand to SEQ ID NO: 2359292
cugcuucgagcauucaugu

SEQ ID NO: 2359294 - RNA, 19 nt, Artificial Sequence
  Description of Artificial Sequence: Synthetic oligonucleotide
  Sense strand starting at position 1216 of SEQ ID NO: 1885668
accugaggcccagaucuua

SEQ ID NO: 2359295 - RNA, 19 nt, Artificial Sequence
  Description of Artificial Sequence: Synthetic oligonucleotide
  Antisense strand to SEQ ID NO: 2359294
uaagaucugggccucaggu

SEQ ID NO: 2359296 - RNA, 19 nt, Artificial Sequence
  Description of Artificial Sequence: Synthetic oligonucleotide
  Sense strand starting at position 1238 of SEQ ID NO: 1885668
auuagugagcucuagucuu

SEQ ID NO: 2359297 - RNA, 19 nt, Artificial Sequence
  Description of Artificial Sequence: Synthetic oligonucleotide
  Antisense strand to SEQ ID NO: 2359296
aagacuagagcucacuaau

SEQ ID NO: 2359298 - RNA, 19 nt, Artificial Sequence
  Description of Artificial Sequence: Synthetic oligonucleotide
  Sense strand starting at position 1248 of SEQ ID NO: 1885668
ucuagucuugggcauuaaa

SEQ ID NO: 2359299 - RNA, 19 nt, Artificial Sequence
  Description of Artificial Sequence: Synthetic oligonucleotide
  Antisense strand to SEQ ID NO: 2359298
uuuaaugcccaagacuaga

SEQ ID NO: 2359300 - RNA, 19 nt, Artificial Sequence
  Description of Artificial Sequence: Synthetic oligonucleotide
  Sense strand starting at position 1288 of SEQ ID NO: 1885668
ggccauaucugccucaaua

SEQ ID NO: 2359301 - RNA, 19 nt, Artificial Sequence
  Description of Artificial Sequence: Synthetic oligonucleotide
  Antisense strand to SEQ ID NO: 2359300
uauugaggcagauauggcc

SEQ ID NO: 2359302 - RNA, 19 nt, Artificial Sequence
  Description of Artificial Sequence: Synthetic oligonucleotide
  Sense strand starting at position 1326 of SEQ ID NO: 1885668
guccucuuagguuggauua

SEQ ID NO: 2359303 - RNA, 19 nt, Artificial Sequence
  Description of Artificial Sequence: Synthetic oligonucleotide
  Antisense strand to SEQ ID NO: 2359302
uaauccaaccuaagaggac

SEQ ID NO: 2359304 - RNA, 19 nt, Artificial Sequence
  Description of Artificial Sequence: Synthetic oligonucleotide
  Sense strand starting at position 1341 of SEQ ID NO: 1885668
auuagauucugagcaguaa

SEQ ID NO: 2359305 - RNA, 19 nt, Artificial Sequence
  Description of Artificial Sequence: Synthetic oligonucleotide
  Antisense strand to SEQ ID NO: 2359304
uuacugcucagaaucuaau

SEQ ID NO: 2359306 - RNA, 19 nt, Artificial Sequence
  Description of Artificial Sequence: Synthetic oligonucleotide
  Sense strand starting at position 1342 of SEQ ID NO: 1885668
uuagauucugagcaguaac

SEQ ID NO: 2359307 - RNA, 19 nt, Artificial Sequence
  Description of Artificial Sequence: Synthetic oligonucleotide
  Antisense strand to SEQ ID NO: 2359306
guuacugcucagaaucuaa

SEQ ID NO: 2359308 - RNA, 19 nt, Artificial Sequence
  Description of Artificial Sequence: Synthetic oligonucleotide
  Sense strand starting at position 1491 of SEQ ID NO: 1885668
agagguggacauugguaua

SEQ ID NO: 2359309 - RNA, 19 nt, Artificial Sequence
  Description of Artificial Sequence: Synthetic oligonucleotide
  Antisense strand to SEQ ID NO: 2359308
uauaccaauguccaccucu

SEQ ID NO: 2359310 - RNA, 19 nt, Artificial Sequence
  Description of Artificial Sequence: Synthetic oligonucleotide
  Sense strand starting at position 1798 of SEQ ID NO: 1885668
ggccuuguugcacaaguca

SEQ ID NO: 2359311 - RNA, 19 nt, Artificial Sequence
  Description of Artificial Sequence: Synthetic oligonucleotide
  Antisense strand to SEQ ID NO: 2359310
ugacuugugcaacaaggcc

SEQ ID NO: 2359312 - RNA, 19 nt, Artificial Sequence
  Description of Artificial Sequence: Synthetic oligonucleotide
  Sense strand starting at position 1835 of SEQ ID NO: 1885668
cagaaauugccguggagca

SEQ ID NO: 2359313 - RNA, 19 nt, Artificial Sequence
  Description of Artificial Sequence: Synthetic oligonucleotide
  Antisense strand to SEQ ID NO: 2359312
ugcuccacggcaauuucug

SEQ ID NO: 2359314 - RNA, 19 nt, Artificial Sequence
  Description of Artificial Sequence: Synthetic oligonucleotide
  Sense strand starting at position 1915 of SEQ ID NO: 1885668
cgaggauggauuggauacu

SEQ ID NO: 2359315 - RNA, 19 nt, Artificial Sequence
  Description of Artificial Sequence: Synthetic oligonucleotide
  Antisense strand to SEQ ID NO: 2359314
aguauccaauccauccucg

SEQ ID NO: 2359316 - RNA, 19 nt, Artificial Sequence
  Description of Artificial Sequence: Synthetic oligonucleotide
  Sense strand starting at position 1932 of SEQ ID NO: 1885668
cugagaguuaguggaccau

SEQ ID NO: 2359317 - RNA, 19 nt, Artificial Sequence
  Description of Artificial Sequence: Synthetic oligonucleotide
  Antisense strand to SEQ ID NO: 2359316
augguccacuaacucucag

SEQ ID NO: 2359318 - RNA, 19 nt, Artificial Sequence
  Description of Artificial Sequence: Synthetic oligonucleotide
  Sense strand starting at position 2057 of SEQ ID NO: 1885668
gcgucacuuccagaaagcu

SEQ ID NO: 2359319 - RNA, 19 nt, Artificial Sequence
  Description of Artificial Sequence: Synthetic oligonucleotide
  Antisense strand to SEQ ID NO: 2359318
agcuuucuggaagugacgc

SEQ ID NO: 2359320 - RNA, 19 nt, Artificial Sequence
  Description of Artificial Sequence: Synthetic oligonucleotide
  Sense strand starting at position 2073 of SEQ ID NO: 1885668
gcuuucugaggcuggauuu

SEQ ID NO: 2359321 - RNA, 19 nt, Artificial Sequence
  Description of Artificial Sequence: Synthetic oligonucleotide
  Antisense strand to SEQ ID NO: 2359320
aaauccagccucagaaagc

SEQ ID NO: 2359322 - RNA, 19 nt, Artificial Sequence
  Description of Artificial Sequence: Synthetic oligonucleotide
  Sense strand starting at position 2172 of SEQ ID NO: 1885668
ccucuacccuaagugguaa

SEQ ID NO: 2359323 - RNA, 19 nt, Artificial Sequence
  Description of Artificial Sequence: Synthetic oligonucleotide
  Antisense strand to SEQ ID NO: 2359322
uuaccacuuaggguagagg

SEQ ID NO: 2359324 - RNA, 19 nt, Artificial Sequence
  Description of Artificial Sequence: Synthetic oligonucleotide
  Sense strand starting at position 2183 of SEQ ID NO: 1885668
agugguaauuccuccagga

SEQ ID NO: 2359325 - RNA, 19 nt, Artificial Sequence
  Description of Artificial Sequence: Synthetic oligonucleotide
  Antisense strand to SEQ ID NO: 2359324
uccuggaggaauuaccacu

SEQ ID NO: 2359326 - RNA, 19 nt, Artificial Sequence
  Description of Artificial Sequence: Synthetic oligonucleotide
  Sense strand starting at position 2205 of SEQ ID NO: 1885668
ccaugucaacuuggaaaga

SEQ ID NO: 2359327 - RNA, 19 nt, Artificial Sequence
  Description of Artificial Sequence: Synthetic oligonucleotide
  Antisense strand to SEQ ID NO: 2359326
ucuuuccaaguugacaugg

SEQ ID NO: 2359328 - RNA, 19 nt, Artificial Sequence
  Description of Artificial Sequence: Synthetic oligonucleotide
  Sense strand starting at position 2251 of SEQ ID NO: 1885668
gaccaugcuuuggccauua

SEQ ID NO: 2359329 - RNA, 19 nt, Artificial Sequence
  Description of Artificial Sequence: Synthetic oligonucleotide
  Antisense strand to SEQ ID NO: 2359328
uaauggccaaagcaugguc

SEQ ID NO: 2359330 - RNA, 19 nt, Artificial Sequence
  Description of Artificial Sequence: Synthetic oligonucleotide
  Sense strand starting at position 2263 of SEQ ID NO: 1885668
gccauuauguggucaacua

SEQ ID NO: 2359331 - RNA, 19 nt, Artificial Sequence
  Description of Artificial Sequence: Synthetic oligonucleotide
  Antisense strand to SEQ ID NO: 2359330
uaguugaccacauaauggc

SEQ ID NO: 2359332 - RNA, 19 nt, Artificial Sequence
  Description of Artificial Sequence: Synthetic oligonucleotide
  Sense strand starting at position 2264 of SEQ ID NO: 1885668
ccauuauguggucaacuau

SEQ ID NO: 2359333 - RNA, 19 nt, Artificial Sequence
  Description of Artificial Sequence: Synthetic oligonucleotide
  Antisense strand to SEQ ID NO: 2359332
auaguugaccacauaaugg

SEQ ID NO: 2359334 - RNA, 19 nt, Artificial Sequence
  Description of Artificial Sequence: Synthetic oligonucleotide
  Sense strand starting at position 2588 of SEQ ID NO: 1885668
uuuguuagccuccagggaa

SEQ ID NO: 2359335 - RNA, 19 nt, Artificial Sequence
  Description of Artificial Sequence: Synthetic oligonucleotide
  Antisense strand to SEQ ID NO: 2359334
uucccuggaggcuaacaaa

SEQ ID NO: 2359336 - RNA, 19 nt, Artificial Sequence
  Description of Artificial Sequence: Synthetic oligonucleotide
  Sense strand starting at position 2707 of SEQ ID NO: 1885668
aguccuaacuccuuaggaa

SEQ ID NO: 2359337 - RNA, 19 nt, Artificial Sequence
  Description of Artificial Sequence: Synthetic oligonucleotide
  Antisense strand to SEQ ID NO: 2359336
uuccuaaggaguuaggacu

SEQ ID NO: 2359338 - RNA, 19 nt, Artificial Sequence
  Description of Artificial Sequence: Synthetic oligonucleotide
  Sense strand starting at position 2758 of SEQ ID NO: 1885668
ccaagugugagcuagucua

SEQ ID NO: 2359339 - RNA, 19 nt, Artificial Sequence
  Description of Artificial Sequence: Synthetic oligonucleotide
  Antisense strand to SEQ ID NO: 2359338
uagacuagcucacacuugg

SEQ ID NO: 2359340 - RNA, 19 nt, Artificial Sequence
  Description of Artificial Sequence: Synthetic oligonucleotide
  Sense strand starting at position 2766 of SEQ ID NO: 1885668
gagcuagucuagucuaaga

SEQ ID NO: 2359341 - RNA, 19 nt, Artificial Sequence
  Description of Artificial Sequence: Synthetic oligonucleotide
  Antisense strand to SEQ ID NO: 2359340
ucuuagacuagacuagcuc

SEQ ID NO: 2359342 - RNA, 19 nt, Artificial Sequence
  Description of Artificial Sequence: Synthetic oligonucleotide
  Sense strand starting at position 2768 of SEQ ID NO: 1885668
gcuagucuagucuaagaga

SEQ ID NO: 2359343 - RNA, 19 nt, Artificial Sequence
  Description of Artificial Sequence: Synthetic oligonucleotide
  Antisense strand to SEQ ID NO: 2359342
ucucuuagacuagacuagc

SEQ ID NO: 2359344 - RNA, 19 nt, Artificial Sequence
  Description of Artificial Sequence: Synthetic oligonucleotide
  Sense strand starting at position 2999 of SEQ ID NO: 1885668
uggucacucguagaaauaa

SEQ ID NO: 2359345 - RNA, 19 nt, Artificial Sequence
  Description of Artificial Sequence: Synthetic oligonucleotide
  Antisense strand to SEQ ID NO: 2359344
uuauuucuacgagugacca

SEQ ID NO: 2359346 - RNA, 19 nt, Artificial Sequence
  Description of Artificial Sequence: Synthetic oligonucleotide
  Sense strand starting at position 3014 of SEQ ID NO: 1885668
auaaacuuguguuuacuga

SEQ ID NO: 2359347 - RNA, 19 nt, Artificial Sequence
  Description of Artificial Sequence: Synthetic oligonucleotide
  Antisense strand to SEQ ID NO: 2359346
ucaguaaacacaaguuuau

SEQ ID NO: 2359348 - RNA, 19 nt, Artificial Sequence
  Description of Artificial Sequence: Synthetic oligonucleotide
  Sense strand starting at position 3125 of SEQ ID NO: 1885668
guaguuauugcagagaauu

SEQ ID NO: 2359349 - RNA, 19 nt, Artificial Sequence
  Description of Artificial Sequence: Synthetic oligonucleotide
  Antisense strand to SEQ ID NO: 2359348
aauucucugcaauaacuac

SEQ ID NO: 2359350 - RNA, 19 nt, Artificial Sequence
  Description of Artificial Sequence: Synthetic oligonucleotide
  Sense strand starting at position 3405 of SEQ ID NO: 1885668
guaugaacuggauggagua

SEQ ID NO: 2359351 - RNA, 19 nt, Artificial Sequence
  Description of Artificial Sequence: Synthetic oligonucleotide
  Antisense strand to SEQ ID NO: 2359350
uacuccauccaguucauac

SEQ ID NO: 2359352 - RNA, 19 nt, Artificial Sequence
  Description of Artificial Sequence: Synthetic oligonucleotide
  Sense strand starting at position 3534 of SEQ ID NO: 1885668
guguggucuggauggagua

SEQ ID NO: 2359353 - RNA, 19 nt, Artificial Sequence
  Description of Artificial Sequence: Synthetic oligonucleotide
  Antisense strand to SEQ ID NO: 2359352
uacuccauccagaccacac

SEQ ID NO: 2359354 - RNA, 19 nt, Artificial Sequence
  Description of Artificial Sequence: Synthetic oligonucleotide
  Sense strand starting at position 3608 of SEQ ID NO: 1885668
ggugagguguggucuggau

SEQ ID NO: 2359355 - RNA, 19 nt, Artificial Sequence
  Description of Artificial Sequence: Synthetic oligonucleotide
  Antisense strand to SEQ ID NO: 2359354
auccagaccacaccucacc

SEQ ID NO: 2359356 - RNA, 19 nt, Artificial Sequence
  Description of Artificial Sequence: Synthetic oligonucleotide
  Sense strand starting at position 3708 of SEQ ID NO: 1885668
gauacaguguggucuggau

SEQ ID NO: 2359357 - RNA, 19 nt, Artificial Sequence
  Description of Artificial Sequence: Synthetic oligonucleotide
  Antisense strand to SEQ ID NO: 2359356
auccagaccacacuguauc

SEQ ID NO: 2359358 - RNA, 19 nt, Artificial Sequence
  Description of Artificial Sequence: Synthetic oligonucleotide
  Sense strand starting at position 52 of SEQ ID NO: 1885669
cuucgugguuaaccauaga

SEQ ID NO: 2359359 - RNA, 19 nt, Artificial Sequence
  Description of Artificial Sequence: Synthetic oligonucleotide
  Antisense strand to SEQ ID NO: 2359358
ucuaugguuaaccacgaag

SEQ ID NO: 2359360 - RNA, 19 nt, Artificial Sequence
  Description of Artificial Sequence: Synthetic oligonucleotide
  Sense strand starting at position 324 of SEQ ID NO: 1885669
agcguuaguuaguugauuu

SEQ ID NO: 2359361 - RNA, 19 nt, Artificial Sequence
  Description of Artificial Sequence: Synthetic oligonucleotide
  Antisense strand to SEQ ID NO: 2359360
aaaucaacuaacuaacgcu

SEQ ID NO: 2359362 - RNA, 19 nt, Artificial Sequence
  Description of Artificial Sequence: Synthetic oligonucleotide
  Sense strand starting at position 325 of SEQ ID NO: 1885669
gcguuaguuaguugauuug

SEQ ID NO: 2359363 - RNA, 19 nt, Artificial Sequence
  Description of Artificial Sequence: Synthetic oligonucleotide
  Antisense strand to SEQ ID NO: 2359362
caaaucaacuaacuaacgc

SEQ ID NO: 2359364 - RNA, 19 nt, Artificial Sequence
  Description of Artificial Sequence: Synthetic oligonucleotide
  Sense strand starting at position 331 of SEQ ID NO: 1885669
guuaguugauuugccggaa

SEQ ID NO: 2359365 - RNA, 19 nt, Artificial Sequence
  Description of Artificial Sequence: Synthetic oligonucleotide
  Antisense strand to SEQ ID NO: 2359364
uuccggcaaaucaacuaac

SEQ ID NO: 2359366 - RNA, 19 nt, Artificial Sequence
  Description of Artificial Sequence: Synthetic oligonucleotide
  Sense strand starting at position 481 of SEQ ID NO: 1885669
cagcuaucgcguuuagggu

SEQ ID NO: 2359367 - RNA, 19 nt, Artificial Sequence
  Description of Artificial Sequence: Synthetic oligonucleotide
  Antisense strand to SEQ ID NO: 2359366
acccuaaacgcgauagcug

SEQ ID NO: 2359368 - RNA, 19 nt, Artificial Sequence
  Description of Artificial Sequence: Synthetic oligonucleotide
  Sense strand starting at position 671 of SEQ ID NO: 1885669
aggacuuugggaugguaua

SEQ ID NO: 2359369 - RNA, 19 nt, Artificial Sequence
  Description of Artificial Sequence: Synthetic oligonucleotide
  Antisense strand to SEQ ID NO: 2359368
uauaccaucccaaaguccu

SEQ ID NO: 2359370 - RNA, 19 nt, Artificial Sequence
  Description of Artificial Sequence: Synthetic oligonucleotide
  Sense strand starting at position 882 of SEQ ID NO: 1885669
acaccucuuccaggaaguu

SEQ ID NO: 2359371 - RNA, 19 nt, Artificial Sequence
  Description of Artificial Sequence: Synthetic oligonucleotide
  Antisense strand to SEQ ID NO: 2359370
aacuuccuggaagaggugu

SEQ ID NO: 2359372 - RNA, 19 nt, Artificial Sequence
  Description of Artificial Sequence: Synthetic oligonucleotide
  Sense strand starting at position 1081 of SEQ ID NO: 1885669
gugaguuaucgucacacac

SEQ ID NO: 2359373 - RNA, 19 nt, Artificial Sequence
  Description of Artificial Sequence: Synthetic oligonucleotide
  Antisense strand to SEQ ID NO: 2359372
gugugugacgauaacucac

SEQ ID NO: 2359374 - RNA, 19 nt, Artificial Sequence
  Description of Artificial Sequence: Synthetic oligonucleotide
  Sense strand starting at position 1169 of SEQ ID NO: 1885669
ugauguuagcuccaggaaa

SEQ ID NO: 2359375 - RNA, 19 nt, Artificial Sequence
  Description of Artificial Sequence: Synthetic oligonucleotide
  Antisense strand to SEQ ID NO: 2359374
uuuccuggagcuaacauca

SEQ ID NO: 2359376 - RNA, 19 nt, Artificial Sequence
  Description of Artificial Sequence: Synthetic oligonucleotide
  Sense strand starting at position 1346 of SEQ ID NO: 1885669
gaagucuuccaaggcgaga

SEQ ID NO: 2359377 - RNA, 19 nt, Artificial Sequence
  Description of Artificial Sequence: Synthetic oligonucleotide
  Antisense strand to SEQ ID NO: 2359376
ucucgccuuggaagacuuc

SEQ ID NO: 2359378 - RNA, 19 nt, Artificial Sequence
  Description of Artificial Sequence: Synthetic oligonucleotide
  Sense strand starting at position 1355 of SEQ ID NO: 1885669
caaggcgagaugugauauu

SEQ ID NO: 2359379 - RNA, 19 nt, Artificial Sequence
  Description of Artificial Sequence: Synthetic oligonucleotide
  Antisense strand to SEQ ID NO: 2359378
aauaucacaucucgccuug

SEQ ID NO: 2359380 - RNA, 19 nt, Artificial Sequence
  Description of Artificial Sequence: Synthetic oligonucleotide
  Sense strand starting at position 1636 of SEQ ID NO: 1885669
ccaaauggccaauguaaua

SEQ ID NO: 2359381 - RNA, 19 nt, Artificial Sequence
  Description of Artificial Sequence: Synthetic oligonucleotide
  Antisense strand to SEQ ID NO: 2359380
uauuacauuggccauuugg

SEQ ID NO: 2359382 - RNA, 19 nt, Artificial Sequence
  Description of Artificial Sequence: Synthetic oligonucleotide
  Sense strand starting at position 1907 of SEQ ID NO: 1885669
ugggaagcccucuaugacu

SEQ ID NO: 2359383 - RNA, 19 nt, Artificial Sequence
  Description of Artificial Sequence: Synthetic oligonucleotide
  Antisense strand to SEQ ID NO: 2359382
agucauagagggcuuccca

SEQ ID NO: 2359384 - RNA, 19 nt, Artificial Sequence
  Description of Artificial Sequence: Synthetic oligonucleotide
  Sense strand starting at position 1912 of SEQ ID NO: 1885669
agcccucuaugacugaauu

SEQ ID NO: 2359385 - RNA, 19 nt, Artificial Sequence
  Description of Artificial Sequence: Synthetic oligonucleotide
  Antisense strand to SEQ ID NO: 2359384
aauucagucauagagggcu

SEQ ID NO: 2359386 - RNA, 19 nt, Artificial Sequence
  Description of Artificial Sequence: Synthetic oligonucleotide
  Sense strand starting at position 1922 of SEQ ID NO: 1885669
gacugaauuugauauugag

SEQ ID NO: 2359387 - RNA, 19 nt, Artificial Sequence
  Description of Artificial Sequence: Synthetic oligonucleotide
  Antisense strand to SEQ ID NO: 2359386
cucaauaucaaauucaguc

SEQ ID NO: 2359388 - RNA, 19 nt, Artificial Sequence
  Description of Artificial Sequence: Synthetic oligonucleotide
  Sense strand starting at position 1925 of SEQ ID NO: 1885669
ugaauuugauauugagaag

SEQ ID NO: 2359389 - RNA, 19 nt, Artificial Sequence
  Description of Artificial Sequence: Synthetic oligonucleotide
  Antisense strand to SEQ ID NO: 2359388
cuucucaauaucaaauuca

SEQ ID NO: 2359390 - RNA, 19 nt, Artificial Sequence
  Description of Artificial Sequence: Synthetic oligonucleotide
  Sense strand starting at position 2079 of SEQ ID NO: 1885669
ugaggccugauguaguauu

SEQ ID NO: 2359391 - RNA, 19 nt, Artificial Sequence
  Description of Artificial Sequence: Synthetic oligonucleotide
  Antisense strand to SEQ ID NO: 2359390
aauacuacaucaggccuca

SEQ ID NO: 2359392 - RNA, 19 nt, Artificial Sequence
  Description of Artificial Sequence: Synthetic oligonucleotide
  Sense strand starting at position 2112 of SEQ ID NO: 1885669
augcaaugucugccgcaga

SEQ ID NO: 2359393 - RNA, 19 nt, Artificial Sequence
  Description of Artificial Sequence: Synthetic oligonucleotide
  Antisense strand to SEQ ID NO: 2359392
ucugcggcagacauugcau

SEQ ID NO: 2359394 - RNA, 19 nt, Artificial Sequence
  Description of Artificial Sequence: Synthetic oligonucleotide
  Sense strand starting at position 2167 of SEQ ID NO: 1885669
ggagaugaugcuggaacua

SEQ ID NO: 2359395 - RNA, 19 nt, Artificial Sequence
  Description of Artificial Sequence: Synthetic oligonucleotide
  Antisense strand to SEQ ID NO: 2359394
uaguuccagcaucaucucc

SEQ ID NO: 2359396 - RNA, 19 nt, Artificial Sequence
  Description of Artificial Sequence: Synthetic oligonucleotide
  Sense strand starting at position 2180 of SEQ ID NO: 1885669
gaacuagugcuaugacuga

SEQ ID NO: 2359397 - RNA, 19 nt, Artificial Sequence
  Description of Artificial Sequence: Synthetic oligonucleotide
  Antisense strand to SEQ ID NO: 2359396
ucagucauagcacuaguuc

SEQ ID NO: 2359398 - RNA, 19 nt, Artificial Sequence
  Description of Artificial Sequence: Synthetic oligonucleotide
  Sense strand starting at position 2184 of SEQ ID NO: 1885669
uagugcuaugacugacacu

SEQ ID NO: 2359399 - RNA, 19 nt, Artificial Sequence
  Description of Artificial Sequence: Synthetic oligonucleotide
  Antisense strand to SEQ ID NO: 2359398
agugucagucauagcacua

SEQ ID NO: 2359400 - RNA, 19 nt, Artificial Sequence
  Description of Artificial Sequence: Synthetic oligonucleotide
  Sense strand starting at position 2201 of SEQ ID NO: 1885669
cucguuccugccuacagaa

SEQ ID NO: 2359401 - RNA, 19 nt, Artificial Sequence
  Description of Artificial Sequence: Synthetic oligonucleotide
  Antisense strand to SEQ ID NO: 2359400
uucuguaggcaggaacgag

SEQ ID NO: 2359402 - RNA, 19 nt, Artificial Sequence
  Description of Artificial Sequence: Synthetic oligonucleotide
  Sense strand starting at position 2341 of SEQ ID NO: 1885669
gugcuuugucuccuaagcu

SEQ ID NO: 2359403 - RNA, 19 nt, Artificial Sequence
  Description of Artificial Sequence: Synthetic oligonucleotide
  Antisense strand to SEQ ID NO: 2359402
agcuuaggagacaaagcac

SEQ ID NO: 2359404 - RNA, 19 nt, Artificial Sequence
  Description of Artificial Sequence: Synthetic oligonucleotide
  Sense strand starting at position 2375 of SEQ ID NO: 1885669
ggagacuuuccaggcugaa

SEQ ID NO: 2359405 - RNA, 19 nt, Artificial Sequence
  Description of Artificial Sequence: Synthetic oligonucleotide
  Antisense strand to SEQ ID NO: 2359404
uucagccuggaaagucucc

SEQ ID NO: 2359406 - RNA, 19 nt, Artificial Sequence
  Description of Artificial Sequence: Synthetic oligonucleotide
  Sense strand starting at position 2408 of SEQ ID NO: 1885669
agaaguagaccauguuaca

SEQ ID NO: 2359407 - RNA, 19 nt, Artificial Sequence
  Description of Artificial Sequence: Synthetic oligonucleotide
  Antisense strand to SEQ ID NO: 2359406
uguaacauggucuacuucu

SEQ ID NO: 2359408 - RNA, 19 nt, Artificial Sequence
  Description of Artificial Sequence: Synthetic oligonucleotide
  Sense strand starting at position 2589 of SEQ ID NO: 1885669
ggaggcacuuccucuguaa

SEQ ID NO: 2359409 - RNA, 19 nt, Artificial Sequence
  Description of Artificial Sequence: Synthetic oligonucleotide
  Antisense strand to SEQ ID NO: 2359408
uuacagaggaagugccucc

SEQ ID NO: 2359410 - RNA, 19 nt, Artificial Sequence
  Description of Artificial Sequence: Synthetic oligonucleotide
  Sense strand starting at position 2591 of SEQ ID NO: 1885669
aggcacuuccucuguaaac

SEQ ID NO: 2359411 - RNA, 19 nt, Artificial Sequence
  Description of Artificial Sequence: Synthetic oligonucleotide
  Antisense strand to SEQ ID NO: 2359410
guuuacagaggaagugccu

SEQ ID NO: 2359412 - RNA, 19 nt, Artificial Sequence
  Description of Artificial Sequence: Synthetic oligonucleotide
  Sense strand starting at position 2592 of SEQ ID NO: 1885669
ggcacuuccucuguaaaca

SEQ ID NO: 2359413 - RNA, 19 nt, Artificial Sequence
  Description of Artificial Sequence: Synthetic oligonucleotide
  Antisense strand to SEQ ID NO: 2359412
uguuuacagaggaagugcc

SEQ ID NO: 2359414 - RNA, 19 nt, Artificial Sequence
  Description of Artificial Sequence: Synthetic oligonucleotide
  Sense strand starting at position 2677 of SEQ ID NO: 1885669
ccgagauggcuagacuuga

SEQ ID NO: 2359415 - RNA, 19 nt, Artificial Sequence
  Description of Artificial Sequence: Synthetic oligonucleotide
  Antisense strand to SEQ ID NO: 2359414
ucaagucuagccaucucgg

SEQ ID NO: 2359416 - RNA, 19 nt, Artificial Sequence
  Description of Artificial Sequence: Synthetic oligonucleotide
  Sense strand starting at position 2681 of SEQ ID NO: 1885669
gauggcuagacuugagaug

SEQ ID NO: 2359417 - RNA, 19 nt, Artificial Sequence
  Description of Artificial Sequence: Synthetic oligonucleotide
  Antisense strand to SEQ ID NO: 2359416
caucucaagucuagccauc

SEQ ID NO: 2359418 - RNA, 19 nt, Artificial Sequence
  Description of Artificial Sequence: Synthetic oligonucleotide
  Sense strand starting at position 2740 of SEQ ID NO: 1885669
cgagucagugcgucuucaa

SEQ ID NO: 2359419 - RNA, 19 nt, Artificial Sequence
  Description of Artificial Sequence: Synthetic oligonucleotide
  Antisense strand to SEQ ID NO: 2359418
uugaagacgcacugacucg

SEQ ID NO: 2359420 - RNA, 19 nt, Artificial Sequence
  Description of Artificial Sequence: Synthetic oligonucleotide
  Sense strand starting at position 2816 of SEQ ID NO: 1885669
ccugaagucaucugaggag

SEQ ID NO: 2359421 - RNA, 19 nt, Artificial Sequence
  Description of Artificial Sequence: Synthetic oligonucleotide
  Antisense strand to SEQ ID NO: 2359420
cuccucagaugacuucagg

SEQ ID NO: 2359422 - RNA, 19 nt, Artificial Sequence
  Description of Artificial Sequence: Synthetic oligonucleotide
  Sense strand starting at position 2994 of SEQ ID NO: 1885669
guguuuggcacugaggaga

SEQ ID NO: 2359423 - RNA, 19 nt, Artificial Sequence
  Description of Artificial Sequence: Synthetic oligonucleotide
  Antisense strand to SEQ ID NO: 2359422
ucuccucagugccaaacac

SEQ ID NO: 2359424 - RNA, 19 nt, Artificial Sequence
  Description of Artificial Sequence: Synthetic oligonucleotide
  Sense strand starting at position 3121 of SEQ ID NO: 1885669
aggcuuucuccagggaggu

SEQ ID NO: 2359425 - RNA, 19 nt, Artificial Sequence
  Description of Artificial Sequence: Synthetic oligonucleotide
  Antisense strand to SEQ ID NO: 2359424
accucccuggagaaagccu

SEQ ID NO: 2359426 - RNA, 19 nt, Artificial Sequence
  Description of Artificial Sequence: Synthetic oligonucleotide
  Sense strand starting at position 3122 of SEQ ID NO: 1885669
ggcuuucuccagggagguu

SEQ ID NO: 2359427 - RNA, 19 nt, Artificial Sequence
  Description of Artificial Sequence: Synthetic oligonucleotide
  Antisense strand to SEQ ID NO: 2359426
aaccucccuggagaaagcc

SEQ ID NO: 2359428 - RNA, 19 nt, Artificial Sequence
  Description of Artificial Sequence: Synthetic oligonucleotide
  Sense strand starting at position 3370 of SEQ ID NO: 1885669
gucauugagcaccauggaa

SEQ ID NO: 2359429 - RNA, 19 nt, Artificial Sequence
  Description of Artificial Sequence: Synthetic oligonucleotide
  Antisense strand to SEQ ID NO: 2359428
uuccauggugcucaaugac

SEQ ID NO: 2359430 - RNA, 19 nt, Artificial Sequence
  Description of Artificial Sequence: Synthetic oligonucleotide
  Sense strand starting at position 3467 of SEQ ID NO: 1885669
gagcgagauuaugccauuu

SEQ ID NO: 2359431 - RNA, 19 nt, Artificial Sequence
  Description of Artificial Sequence: Synthetic oligonucleotide
  Antisense strand to SEQ ID NO: 2359430
aaauggcauaaucucgcuc

SEQ ID NO: 2359432 - RNA, 19 nt, Artificial Sequence
  Description of Artificial Sequence: Synthetic oligonucleotide
  Sense strand starting at position 3529 of SEQ ID NO: 1885669
ucgggugucauggagaagu

SEQ ID NO: 2359433 - RNA, 19 nt, Artificial Sequence
  Description of Artificial Sequence: Synthetic oligonucleotide
  Antisense strand to SEQ ID NO: 2359432
acuucuccaugacacccga

SEQ ID NO: 2359434 - RNA, 19 nt, Artificial Sequence
  Description of Artificial Sequence: Synthetic oligonucleotide
  Sense strand starting at position 3696 of SEQ ID NO: 1885669
cagagaugccgaggacaaa

SEQ ID NO: 2359435 - RNA, 19 nt, Artificial Sequence
  Description of Artificial Sequence: Synthetic oligonucleotide
  Antisense strand to SEQ ID NO: 2359434
uuuguccucggcaucucug

SEQ ID NO: 2359436 - RNA, 19 nt, Artificial Sequence
  Description of Artificial Sequence: Synthetic oligonucleotide
  Sense strand starting at position 3847 of SEQ ID NO: 1885669
acaugaaugcucgaagcag

SEQ ID NO: 2359437 - RNA, 19 nt, Artificial Sequence
  Description of Artificial Sequence: Synthetic oligonucleotide
  Antisense strand to SEQ ID NO: 2359436
cugcuucgagcauucaugu

SEQ ID NO: 2359438 - RNA, 19 nt, Artificial Sequence
  Description of Artificial Sequence: Synthetic oligonucleotide
  Sense strand starting at position 47 of SEQ ID NO: 1885670
ugggcaucuucuccaaagu

SEQ ID NO: 2359439 - RNA, 19 nt, Artificial Sequence
  Description of Artificial Sequence: Synthetic oligonucleotide
  Antisense strand to SEQ ID NO: 2359438
acuuuggagaagaugccca

SEQ ID NO: 2359440 - RNA, 19 nt, Artificial Sequence
  Description of Artificial Sequence: Synthetic oligonucleotide
  Sense strand starting at position 48 of SEQ ID NO: 1885670
gggcaucuucuccaaaguu

SEQ ID NO: 2359441 - RNA, 19 nt, Artificial Sequence
  Description of Artificial Sequence: Synthetic oligonucleotide
  Antisense strand to SEQ ID NO: 2359440
aacuuuggagaagaugccc

SEQ ID NO: 2359442 - RNA, 19 nt, Artificial Sequence
  Description of Artificial Sequence: Synthetic oligonucleotide
  Sense strand starting at position 68 of SEQ ID NO: 1885670
gugucucuuccagaaaguu

SEQ ID NO: 2359443 - RNA, 19 nt, Artificial Sequence
  Description of Artificial Sequence: Synthetic oligonucleotide
  Antisense strand to SEQ ID NO: 2359442
aacuuucuggaagagacac

SEQ ID NO: 2359444 - RNA, 19 nt, Artificial Sequence
  Description of Artificial Sequence: Synthetic oligonucleotide
  Sense strand starting at position 77 of SEQ ID NO: 1885670
ccagaaaguucuucucagg

SEQ ID NO: 2359445 - RNA, 19 nt, Artificial Sequence
  Description of Artificial Sequence: Synthetic oligonucleotide
  Antisense strand to SEQ ID NO: 2359444
ccugagaagaacuuucugg

SEQ ID NO: 2359446 - RNA, 19 nt, Artificial Sequence
  Description of Artificial Sequence: Synthetic oligonucleotide
  Sense strand starting at position 201 of SEQ ID NO: 1885670
augaucggucccuaagguu

SEQ ID NO: 2359447 - RNA, 19 nt, Artificial Sequence
  Description of Artificial Sequence: Synthetic oligonucleotide
  Antisense strand to SEQ ID NO: 2359446
aaccuuagggaccgaucau

SEQ ID NO: 2359448 - RNA, 19 nt, Artificial Sequence
  Description of Artificial Sequence: Synthetic oligonucleotide
  Sense strand starting at position 247 of SEQ ID NO: 1885670
gaagcaggauuugauaagu

SEQ ID NO: 2359449 - RNA, 19 nt, Artificial Sequence
  Description of Artificial Sequence: Synthetic oligonucleotide
  Antisense strand to SEQ ID NO: 2359448
acuuaucaaauccugcuuc

SEQ ID NO: 2359450 - RNA, 19 nt, Artificial Sequence
  Description of Artificial Sequence: Synthetic oligonucleotide
  Sense strand starting at position 256 of SEQ ID NO: 1885670
uuugauaaguagcuugaau

SEQ ID NO: 2359451 - RNA, 19 nt, Artificial Sequence
  Description of Artificial Sequence: Synthetic oligonucleotide
  Antisense strand to SEQ ID NO: 2359450
auucaagcuacuuaucaaa

SEQ ID NO: 2359452 - RNA, 19 nt, Artificial Sequence
  Description of Artificial Sequence: Synthetic oligonucleotide
  Sense strand starting at position 307 of SEQ ID NO: 1885670
augcaaaucccugauagca

SEQ ID NO: 2359453 - RNA, 19 nt, Artificial Sequence
  Description of Artificial Sequence: Synthetic oligonucleotide
  Antisense strand to SEQ ID NO: 2359452
ugcuaucagggauuugcau

SEQ ID NO: 2359454 - RNA, 19 nt, Artificial Sequence
  Description of Artificial Sequence: Synthetic oligonucleotide
  Sense strand starting at position 464 of SEQ ID NO: 1885670
cgugcaucccuuuacagaa

SEQ ID NO: 2359455 - RNA, 19 nt, Artificial Sequence
  Description of Artificial Sequence: Synthetic oligonucleotide
  Antisense strand to SEQ ID NO: 2359454
uucuguaaagggaugcacg

SEQ ID NO: 2359456 - RNA, 19 nt, Artificial Sequence
  Description of Artificial Sequence: Synthetic oligonucleotide
  Sense strand starting at position 628 of SEQ ID NO: 1885670
aggucuuuggcucaagguu

SEQ ID NO: 2359457 - RNA, 19 nt, Artificial Sequence
  Description of Artificial Sequence: Synthetic oligonucleotide
  Antisense strand to SEQ ID NO: 2359456
aaccuugagccaaagaccu

SEQ ID NO: 2359458 - RNA, 19 nt, Artificial Sequence
  Description of Artificial Sequence: Synthetic oligonucleotide
  Sense strand starting at position 850 of SEQ ID NO: 1885670
cagggacugucucucuuaa

SEQ ID NO: 2359459 - RNA, 19 nt, Artificial Sequence
  Description of Artificial Sequence: Synthetic oligonucleotide
  Antisense strand to SEQ ID NO: 2359458
uuaagagagacagucccug

SEQ ID NO: 2359460 - RNA, 19 nt, Artificial Sequence
  Description of Artificial Sequence: Synthetic oligonucleotide
  Sense strand starting at position 852 of SEQ ID NO: 1885670
gggacugucucucuuaagu

SEQ ID NO: 2359461 - RNA, 19 nt, Artificial Sequence
  Description of Artificial Sequence: Synthetic oligonucleotide
  Antisense strand to SEQ ID NO: 2359460
acuuaagagagacaguccc

SEQ ID NO: 2359462 - RNA, 19 nt, Artificial Sequence
  Description of Artificial Sequence: Synthetic oligonucleotide
  Sense strand starting at position 860 of SEQ ID NO: 1885670
cucucuuaaguggagcaaa

SEQ ID NO: 2359463 - RNA, 19 nt, Artificial Sequence
  Description of Artificial Sequence: Synthetic oligonucleotide
  Antisense strand to SEQ ID NO: 2359462
uuugcuccacuuaagagag

SEQ ID NO: 2359464 - RNA, 19 nt, Artificial Sequence
  Description of Artificial Sequence: Synthetic oligonucleotide
  Sense strand starting at position 911 of SEQ ID NO: 1885670
uguggcauucuguaucaaa

SEQ ID NO: 2359465 - RNA, 19 nt, Artificial Sequence
  Description of Artificial Sequence: Synthetic oligonucleotide
  Antisense strand to SEQ ID NO: 2359464
uuugauacagaaugccaca

SEQ ID NO: 2359466 - RNA, 19 nt, Artificial Sequence
  Description of Artificial Sequence: Synthetic oligonucleotide
  Sense strand starting at position 1021 of SEQ ID NO: 1885670
uuccauacccgaugaagga

SEQ ID NO: 2359467 - RNA, 19 nt, Artificial Sequence
  Description of Artificial Sequence: Synthetic oligonucleotide
  Antisense strand to SEQ ID NO: 2359466
uccuucaucggguauggaa

SEQ ID NO: 2359468 - RNA, 19 nt, Artificial Sequence
  Description of Artificial Sequence: Synthetic oligonucleotide
  Sense strand starting at position 1238 of SEQ ID NO: 1885670
ccaagaaauggacgccaau

SEQ ID NO: 2359469 - RNA, 19 nt, Artificial Sequence
  Description of Artificial Sequence: Synthetic oligonucleotide
  Antisense strand to SEQ ID NO: 2359468
auuggcguccauuucuugg

SEQ ID NO: 2359470 - RNA, 19 nt, Artificial Sequence
  Description of Artificial Sequence: Synthetic oligonucleotide
  Sense strand starting at position 1244 of SEQ ID NO: 1885670
aauggacgccaaugugauu

SEQ ID NO: 2359471 - RNA, 19 nt, Artificial Sequence
  Description of Artificial Sequence: Synthetic oligonucleotide
  Antisense strand to SEQ ID NO: 2359470
aaucacauuggcguccauu

SEQ ID NO: 2359472 - RNA, 19 nt, Artificial Sequence
  Description of Artificial Sequence: Synthetic oligonucleotide
  Sense strand starting at position 1295 of SEQ ID NO: 1885670
cgaugagauccuugcccaa

SEQ ID NO: 2359473 - RNA, 19 nt, Artificial Sequence
  Description of Artificial Sequence: Synthetic oligonucleotide
  Antisense strand to SEQ ID NO: 2359472
uugggcaaggaucucaucg

SEQ ID NO: 2359474 - RNA, 19 nt, Artificial Sequence
  Description of Artificial Sequence: Synthetic oligonucleotide
  Sense strand starting at position 1320 of SEQ ID NO: 1885670
acgguuaguaaaugucaga

SEQ ID NO: 2359475 - RNA, 19 nt, Artificial Sequence
  Description of Artificial Sequence: Synthetic oligonucleotide
  Antisense strand to SEQ ID NO: 2359474
ucugacauuuacuaaccgu

SEQ ID NO: 2359476 - RNA, 19 nt, Artificial Sequence
  Description of Artificial Sequence: Synthetic oligonucleotide
  Sense strand starting at position 1327 of SEQ ID NO: 1885670
guaaaugucagagguggga

SEQ ID NO: 2359477 - RNA, 19 nt, Artificial Sequence
  Description of Artificial Sequence: Synthetic oligonucleotide
  Antisense strand to SEQ ID NO: 2359476
ucccaccucugacauuuac

SEQ ID NO: 2359478 - RNA, 19 nt, Artificial Sequence
  Description of Artificial Sequence: Synthetic oligonucleotide
  Sense strand starting at position 1534 of SEQ ID NO: 1885670
ggaugaauuagaugcugag

SEQ ID NO: 2359479 - RNA, 19 nt, Artificial Sequence
  Description of Artificial Sequence: Synthetic oligonucleotide
  Antisense strand to SEQ ID NO: 2359478
cucagcaucuaauucaucc

SEQ ID NO: 2359480 - RNA, 19 nt, Artificial Sequence
  Description of Artificial Sequence: Synthetic oligonucleotide
  Sense strand starting at position 1538 of SEQ ID NO: 1885670
gaauuagaugcugaggguu

SEQ ID NO: 2359481 - RNA, 19 nt, Artificial Sequence
  Description of Artificial Sequence: Synthetic oligonucleotide
  Antisense strand to SEQ ID NO: 2359480
aacccucagcaucuaauuc

SEQ ID NO: 2359482 - RNA, 19 nt, Artificial Sequence
  Description of Artificial Sequence: Synthetic oligonucleotide
  Sense strand starting at position 1778 of SEQ ID NO: 1885670
ucccuaaagucauccaggu

SEQ ID NO: 2359483 - RNA, 19 nt, Artificial Sequence
  Description of Artificial Sequence: Synthetic oligonucleotide
  Antisense strand to SEQ ID NO: 2359482
accuggaugacuuuaggga

SEQ ID NO: 2359484 - RNA, 19 nt, Artificial Sequence
  Description of Artificial Sequence: Synthetic oligonucleotide
  Sense strand starting at position 1802 of SEQ ID NO: 1885670
ugaaguccucucugugaag

SEQ ID NO: 2359485 - RNA, 19 nt, Artificial Sequence
  Description of Artificial Sequence: Synthetic oligonucleotide
  Antisense strand to SEQ ID NO: 2359484
cuucacagagaggacuuca

SEQ ID NO: 2359486 - RNA, 19 nt, Artificial Sequence
  Description of Artificial Sequence: Synthetic oligonucleotide
  Sense strand starting at position 1828 of SEQ ID NO: 1885670
ccgugaacgauuugccaca

SEQ ID NO: 2359487 - RNA, 19 nt, Artificial Sequence
  Description of Artificial Sequence: Synthetic oligonucleotide
  Antisense strand to SEQ ID NO: 2359486
uguggcaaaucguucacgg

SEQ ID NO: 2359488 - RNA, 19 nt, Artificial Sequence
  Description of Artificial Sequence: Synthetic oligonucleotide
  Sense strand starting at position 1912 of SEQ ID NO: 1885670
caagacaagguuugauacu

SEQ ID NO: 2359489 - RNA, 19 nt, Artificial Sequence
  Description of Artificial Sequence: Synthetic oligonucleotide
  Antisense strand to SEQ ID NO: 2359488
aguaucaaaccuugucuug

SEQ ID NO: 2359490 - RNA, 19 nt, Artificial Sequence
  Description of Artificial Sequence: Synthetic oligonucleotide
  Sense strand starting at position 1918 of SEQ ID NO: 1885670
aagguuugauacucacaga

SEQ ID NO: 2359491 - RNA, 19 nt, Artificial Sequence
  Description of Artificial Sequence: Synthetic oligonucleotide
  Antisense strand to SEQ ID NO: 2359490
ucugugaguaucaaaccuu

SEQ ID NO: 2359492 - RNA, 19 nt, Artificial Sequence
  Description of Artificial Sequence: Synthetic oligonucleotide
  Sense strand starting at position 2016 of SEQ ID NO: 1885670
ugggcagguuccucacuau

SEQ ID NO: 2359493 - RNA, 19 nt, Artificial Sequence
  Description of Artificial Sequence: Synthetic oligonucleotide
  Antisense strand to SEQ ID NO: 2359492
auagugaggaaccugccca

SEQ ID NO: 2359494 - RNA, 19 nt, Artificial Sequence
  Description of Artificial Sequence: Synthetic oligonucleotide
  Sense strand starting at position 2236 of SEQ ID NO: 1885670
auuagaacuuguuccugaa

SEQ ID NO: 2359495 - RNA, 19 nt, Artificial Sequence
  Description of Artificial Sequence: Synthetic oligonucleotide
  Antisense strand to SEQ ID NO: 2359494
uucaggaacaaguucuaau

SEQ ID NO: 2359496 - RNA, 19 nt, Artificial Sequence
  Description of Artificial Sequence: Synthetic oligonucleotide
  Sense strand starting at position 2359 of SEQ ID NO: 1885670
gcaccucuccaggaaguuu

SEQ ID NO: 2359497 - RNA, 19 nt, Artificial Sequence
  Description of Artificial Sequence: Synthetic oligonucleotide
  Antisense strand to SEQ ID NO: 2359496
aaacuuccuggagaggugc

SEQ ID NO: 2359498 - RNA, 19 nt, Artificial Sequence
  Description of Artificial Sequence: Synthetic oligonucleotide
  Sense strand starting at position 2700 of SEQ ID NO: 1885670
cagguuaugugacucauua

SEQ ID NO: 2359499 - RNA, 19 nt, Artificial Sequence
  Description of Artificial Sequence: Synthetic oligonucleotide
  Antisense strand to SEQ ID NO: 2359498
uaaugagucacauaaccug

SEQ ID NO: 2359500 - RNA, 19 nt, Artificial Sequence
  Description of Artificial Sequence: Synthetic oligonucleotide
  Sense strand starting at position 2704 of SEQ ID NO: 1885670
uuaugugacucauuaccca

SEQ ID NO: 2359501 - RNA, 19 nt, Artificial Sequence
  Description of Artificial Sequence: Synthetic oligonucleotide
  Antisense strand to SEQ ID NO: 2359500
uggguaaugagucacauaa

SEQ ID NO: 2359502 - RNA, 19 nt, Artificial Sequence
  Description of Artificial Sequence: Synthetic oligonucleotide
  Sense strand starting at position 2863 of SEQ ID NO: 1885670
caaggagugucuccacaaa

SEQ ID NO: 2359503 - RNA, 19 nt, Artificial Sequence
  Description of Artificial Sequence: Synthetic oligonucleotide
  Antisense strand to SEQ ID NO: 2359502
uuuguggagacacuccuug

SEQ ID NO: 2359504 - RNA, 19 nt, Artificial Sequence
  Description of Artificial Sequence: Synthetic oligonucleotide
  Sense strand starting at position 3358 of SEQ ID NO: 1885670
guguaugacuugguaccaa

SEQ ID NO: 2359505 - RNA, 19 nt, Artificial Sequence
  Description of Artificial Sequence: Synthetic oligonucleotide
  Antisense strand to SEQ ID NO: 2359504
uugguaccaagucauacac

SEQ ID NO: 2359506 - RNA, 19 nt, Artificial Sequence
  Description of Artificial Sequence: Synthetic oligonucleotide
  Sense strand starting at position 3382 of SEQ ID NO: 1885670
ggcagaucaaugugugauu

SEQ ID NO: 2359507 - RNA, 19 nt, Artificial Sequence
  Description of Artificial Sequence: Synthetic oligonucleotide
  Antisense strand to SEQ ID NO: 2359506
aaucacacauugaucugcc

SEQ ID NO: 2359508 - RNA, 19 nt, Artificial Sequence
  Description of Artificial Sequence: Synthetic oligonucleotide
  Sense strand starting at position 3385 of SEQ ID NO: 1885670
agaucaaugugugauuuau

SEQ ID NO: 2359509 - RNA, 19 nt, Artificial Sequence
  Description of Artificial Sequence: Synthetic oligonucleotide
  Antisense strand to SEQ ID NO: 2359508
auaaaucacacauugaucu

SEQ ID NO: 2359510 - RNA, 19 nt, Artificial Sequence
  Description of Artificial Sequence: Synthetic oligonucleotide
  Sense strand starting at position 3592 of SEQ ID NO: 1885670
ggcuuuguccuggagacaa

SEQ ID NO: 2359511 - RNA, 19 nt, Artificial Sequence
  Description of Artificial Sequence: Synthetic oligonucleotide
  Antisense strand to SEQ ID NO: 2359510
uugucuccaggacaaagcc

SEQ ID NO: 2359512 - RNA, 19 nt, Artificial Sequence
  Description of Artificial Sequence: Synthetic oligonucleotide
  Sense strand starting at position 3634 of SEQ ID NO: 1885670
acaguuugauacgcaaaug

SEQ ID NO: 2359513 - RNA, 19 nt, Artificial Sequence
  Description of Artificial Sequence: Synthetic oligonucleotide
  Antisense strand to SEQ ID NO: 2359512
cauuugcguaucaaacugu

SEQ ID NO: 2359514 - RNA, 19 nt, Artificial Sequence
  Description of Artificial Sequence: Synthetic oligonucleotide
  Sense strand starting at position 3756 of SEQ ID NO: 1885670
gggucuuugccggagugga

SEQ ID NO: 2359515 - RNA, 19 nt, Artificial Sequence
  Description of Artificial Sequence: Synthetic oligonucleotide
  Antisense strand to SEQ ID NO: 2359514
uccacuccggcaaagaccc

SEQ ID NO: 2359516 - RNA, 19 nt, Artificial Sequence
  Description of Artificial Sequence: Synthetic oligonucleotide
  Sense strand starting at position 3757 of SEQ ID NO: 1885670
ggucuuugccggaguggac

SEQ ID NO: 2359517 - RNA, 19 nt, Artificial Sequence
  Description of Artificial Sequence: Synthetic oligonucleotide
  Antisense strand to SEQ ID NO: 2359516
guccacuccggcaaagacc

SEQ ID NO: 2359518 - RNA, 19 nt, Artificial Sequence
  Description of Artificial Sequence: Synthetic oligonucleotide
  Sense strand starting at position 87 of SEQ ID NO: 1885671
cagggacugucucucuuaa

SEQ ID NO: 2359519 - RNA, 19 nt, Artificial Sequence
  Description of Artificial Sequence: Synthetic oligonucleotide
  Antisense strand to SEQ ID NO: 2359518
uuaagagagacagucccug

SEQ ID NO: 2359520 - RNA, 19 nt, Artificial Sequence
  Description of Artificial Sequence: Synthetic oligonucleotide
  Sense strand starting at position 89 of SEQ ID NO: 1885671
gggacugucucucuuaagu

SEQ ID NO: 2359521 - RNA, 19 nt, Artificial Sequence
  Description of Artificial Sequence: Synthetic oligonucleotide
  Antisense strand to SEQ ID NO: 2359520
acuuaagagagacaguccc

SEQ ID NO: 2359522 - RNA, 19 nt, Artificial Sequence
  Description of Artificial Sequence: Synthetic oligonucleotide
  Sense strand starting at position 97 of SEQ ID NO: 1885671
cucucuuaaguggagcaaa

SEQ ID NO: 2359523 - RNA, 19 nt, Artificial Sequence
  Description of Artificial Sequence: Synthetic oligonucleotide
  Antisense strand to SEQ ID NO: 2359522
uuugcuccacuuaagagag

SEQ ID NO: 2359524 - RNA, 19 nt, Artificial Sequence
  Description of Artificial Sequence: Synthetic oligonucleotide
  Sense strand starting at position 148 of SEQ ID NO: 1885671
uguggcauucuguaucaaa

SEQ ID NO: 2359525 - RNA, 19 nt, Artificial Sequence
  Description of Artificial Sequence: Synthetic oligonucleotide
  Antisense strand to SEQ ID NO: 2359524
uuugauacagaaugccaca

SEQ ID NO: 2359526 - RNA, 19 nt, Artificial Sequence
  Description of Artificial Sequence: Synthetic oligonucleotide
  Sense strand starting at position 258 of SEQ ID NO: 1885671
uuccauacccgaugaagga

SEQ ID NO: 2359527 - RNA, 19 nt, Artificial Sequence
  Description of Artificial Sequence: Synthetic oligonucleotide
  Antisense strand to SEQ ID NO: 2359526
uccuucaucggguauggaa

SEQ ID NO: 2359528 - RNA, 19 nt, Artificial Sequence
  Description of Artificial Sequence: Synthetic oligonucleotide
  Sense strand starting at position 475 of SEQ ID NO: 1885671
ccaagaaauggacgccaau

SEQ ID NO: 2359529 - RNA, 19 nt, Artificial Sequence
  Description of Artificial Sequence: Synthetic oligonucleotide
  Antisense strand to SEQ ID NO: 2359528
auuggcguccauuucuugg

SEQ ID NO: 2359530 - RNA, 19 nt, Artificial Sequence
  Description of Artificial Sequence: Synthetic oligonucleotide
  Sense strand starting at position 481 of SEQ ID NO: 1885671
aauggacgccaaugugauu

SEQ ID NO: 2359531 - RNA, 19 nt, Artificial Sequence
  Description of Artificial Sequence: Synthetic oligonucleotide
  Antisense strand to SEQ ID NO: 2359530
aaucacauuggcguccauu

SEQ ID NO: 2359532 - RNA, 19 nt, Artificial Sequence
  Description of Artificial Sequence: Synthetic oligonucleotide
  Sense strand starting at position 532 of SEQ ID NO: 1885671
cgaugagauccuugcccaa

SEQ ID NO: 2359533 - RNA, 19 nt, Artificial Sequence
  Description of Artificial Sequence: Synthetic oligonucleotide
  Antisense strand to SEQ ID NO: 2359532
uugggcaaggaucucaucg

SEQ ID NO: 2359534 - RNA, 19 nt, Artificial Sequence
  Description of Artificial Sequence: Synthetic oligonucleotide
  Sense strand starting at position 564 of SEQ ID NO: 1885671
guaaaugucagagguggga

SEQ ID NO: 2359535 - RNA, 19 nt, Artificial Sequence
  Description of Artificial Sequence: Synthetic oligonucleotide
  Antisense strand to SEQ ID NO: 2359534
ucccaccucugacauuuac

SEQ ID NO: 2359536 - RNA, 19 nt, Artificial Sequence
  Description of Artificial Sequence: Synthetic oligonucleotide
  Sense strand starting at position 771 of SEQ ID NO: 1885671
ggaugaauuagaugcugag

SEQ ID NO: 2359537 - RNA, 19 nt, Artificial Sequence
  Description of Artificial Sequence: Synthetic oligonucleotide
  Antisense strand to SEQ ID NO: 2359536
cucagcaucuaauucaucc

SEQ ID NO: 2359538 - RNA, 19 nt, Artificial Sequence
  Description of Artificial Sequence: Synthetic oligonucleotide
  Sense strand starting at position 775 of SEQ ID NO: 1885671
gaauuagaugcugaggguu

SEQ ID NO: 2359539 - RNA, 19 nt, Artificial Sequence
  Description of Artificial Sequence: Synthetic oligonucleotide
  Antisense strand to SEQ ID NO: 2359538
aacccucagcaucuaauuc

SEQ ID NO: 2359540 - RNA, 19 nt, Artificial Sequence
  Description of Artificial Sequence: Synthetic oligonucleotide
  Sense strand starting at position 1015 of SEQ ID NO: 1885671
ucccuaaagucauccaggu

SEQ ID NO: 2359541 - RNA, 19 nt, Artificial Sequence
  Description of Artificial Sequence: Synthetic oligonucleotide
  Antisense strand to SEQ ID NO: 2359540
accuggaugacuuuaggga

SEQ ID NO: 2359542 - RNA, 19 nt, Artificial Sequence
  Description of Artificial Sequence: Synthetic oligonucleotide
  Sense strand starting at position 1039 of SEQ ID NO: 1885671
ugaaguccucucugugaag

SEQ ID NO: 2359543 - RNA, 19 nt, Artificial Sequence
  Description of Artificial Sequence: Synthetic oligonucleotide
  Antisense strand to SEQ ID NO: 2359542
cuucacagagaggacuuca

SEQ ID NO: 2359544 - RNA, 19 nt, Artificial Sequence
  Description of Artificial Sequence: Synthetic oligonucleotide
  Sense strand starting at position 1065 of SEQ ID NO: 1885671
ccgugaacgauuugccaca

SEQ ID NO: 2359545 - RNA, 19 nt, Artificial Sequence
  Description of Artificial Sequence: Synthetic oligonucleotide
  Antisense strand to SEQ ID NO: 2359544
uguggcaaaucguucacgg

SEQ ID NO: 2359546 - RNA, 19 nt, Artificial Sequence
  Description of Artificial Sequence: Synthetic oligonucleotide
  Sense strand starting at position 1149 of SEQ ID NO: 1885671
caagacaagguuugauacu

SEQ ID NO: 2359547 - RNA, 19 nt, Artificial Sequence
  Description of Artificial Sequence: Synthetic oligonucleotide
  Antisense strand to SEQ ID NO: 2359546
aguaucaaaccuugucuug

SEQ ID NO: 2359548 - RNA, 19 nt, Artificial Sequence
  Description of Artificial Sequence: Synthetic oligonucleotide
  Sense strand starting at position 1155 of SEQ ID NO: 1885671
aagguuugauacucacaga

SEQ ID NO: 2359549 - RNA, 19 nt, Artificial Sequence
  Description of Artificial Sequence: Synthetic oligonucleotide
  Antisense strand to SEQ ID NO: 2359548
ucugugaguaucaaaccuu

SEQ ID NO: 2359550 - RNA, 19 nt, Artificial Sequence
  Description of Artificial Sequence: Synthetic oligonucleotide
  Sense strand starting at position 1473 of SEQ ID NO: 1885671
auuagaacuuguuccugaa

SEQ ID NO: 2359551 - RNA, 19 nt, Artificial Sequence
  Description of Artificial Sequence: Synthetic oligonucleotide
  Antisense strand to SEQ ID NO: 2359550
uucaggaacaaguucuaau

SEQ ID NO: 2359552 - RNA, 19 nt, Artificial Sequence
  Description of Artificial Sequence: Synthetic oligonucleotide
  Sense strand starting at position 1596 of SEQ ID NO: 1885671
gcaccucuccaggaaguuu

SEQ ID NO: 2359553 - RNA, 19 nt, Artificial Sequence
  Description of Artificial Sequence: Synthetic oligonucleotide
  Antisense strand to SEQ ID NO: 2359552
aaacuuccuggagaggugc

SEQ ID NO: 2359554 - RNA, 19 nt, Artificial Sequence
  Description of Artificial Sequence: Synthetic oligonucleotide
  Sense strand starting at position 1937 of SEQ ID NO: 1885671
cagguuaugugacucauua

SEQ ID NO: 2359555 - RNA, 19 nt, Artificial Sequence
  Description of Artificial Sequence: Synthetic oligonucleotide
  Antisense strand to SEQ ID NO: 2359554
uaaugagucacauaaccug

SEQ ID NO: 2359556 - RNA, 19 nt, Artificial Sequence
  Description of Artificial Sequence: Synthetic oligonucleotide
  Sense strand starting at position 1941 of SEQ ID NO: 1885671
uuaugugacucauuaccca

SEQ ID NO: 2359557 - RNA, 19 nt, Artificial Sequence
  Description of Artificial Sequence: Synthetic oligonucleotide
  Antisense strand to SEQ ID NO: 2359556
uggguaaugagucacauaa

SEQ ID NO: 2359558 - RNA, 19 nt, Artificial Sequence
  Description of Artificial Sequence: Synthetic oligonucleotide
  Sense strand starting at position 2100 of SEQ ID NO: 1885671
caaggagugucuccacaaa

SEQ ID NO: 2359559 - RNA, 19 nt, Artificial Sequence
  Description of Artificial Sequence: Synthetic oligonucleotide
  Antisense strand to SEQ ID NO: 2359558
uuuguggagacacuccuug

SEQ ID NO: 2359560 - RNA, 19 nt, Artificial Sequence
  Description of Artificial Sequence: Synthetic oligonucleotide
  Sense strand starting at position 2595 of SEQ ID NO: 1885671
guguaugacuugguaccaa

SEQ ID NO: 2359561 - RNA, 19 nt, Artificial Sequence
  Description of Artificial Sequence: Synthetic oligonucleotide
  Antisense strand to SEQ ID NO: 2359560
uugguaccaagucauacac

SEQ ID NO: 2359562 - RNA, 19 nt, Artificial Sequence
  Description of Artificial Sequence: Synthetic oligonucleotide
  Sense strand starting at position 2829 of SEQ ID NO: 1885671
ggcuuuguccuggagacaa

SEQ ID NO: 2359563 - RNA, 19 nt, Artificial Sequence
  Description of Artificial Sequence: Synthetic oligonucleotide
  Antisense strand to SEQ ID NO: 2359562
uugucuccaggacaaagcc

SEQ ID NO: 2359564 - RNA, 19 nt, Artificial Sequence
  Description of Artificial Sequence: Synthetic oligonucleotide
  Sense strand starting at position 2871 of SEQ ID NO: 1885671
acaguuugauacgcaaaug

SEQ ID NO: 2359565 - RNA, 19 nt, Artificial Sequence
  Description of Artificial Sequence: Synthetic oligonucleotide
  Antisense strand to SEQ ID NO: 2359564
cauuugcguaucaaacugu

SEQ ID NO: 2359566 - RNA, 19 nt, Artificial Sequence
  Description of Artificial Sequence: Synthetic oligonucleotide
  Sense strand starting at position 2994 of SEQ ID NO: 1885671
ggucuuugccggaguggac

SEQ ID NO: 2359567 - RNA, 19 nt, Artificial Sequence
  Description of Artificial Sequence: Synthetic oligonucleotide
  Antisense strand to SEQ ID NO: 2359566
guccacuccggcaaagacc

SEQ ID NO: 2359568 - RNA, 19 nt, Artificial Sequence
  Description of Artificial Sequence: Synthetic oligonucleotide
  Sense strand starting at position 3299 of SEQ ID NO: 1885671
ccggcaagacauggaguua

SEQ ID NO: 2359569 - RNA, 19 nt, Artificial Sequence
  Description of Artificial Sequence: Synthetic oligonucleotide
  Antisense strand to SEQ ID NO: 2359568
uaacuccaugucuugccgg

SEQ ID NO: 2359570 - RNA, 19 nt, Artificial Sequence
  Description of Artificial Sequence: Synthetic oligonucleotide
  Sense strand starting at position 3300 of SEQ ID NO: 1885671
cggcaagacauggaguuau

SEQ ID NO: 2359571 - RNA, 19 nt, Artificial Sequence
  Description of Artificial Sequence: Synthetic oligonucleotide
  Antisense strand to SEQ ID NO: 2359570
auaacuccaugucuugccg

SEQ ID NO: 2359572 - RNA, 19 nt, Artificial Sequence
  Description of Artificial Sequence: Synthetic oligonucleotide
  Sense strand starting at position 3387 of SEQ ID NO: 1885671
cugguuguccuagagauga

SEQ ID NO: 2359573 - RNA, 19 nt, Artificial Sequence
  Description of Artificial Sequence: Synthetic oligonucleotide
  Antisense strand to SEQ ID NO: 2359572
ucaucucuaggacaaccag

SEQ ID NO: 2359574 - RNA, 19 nt, Artificial Sequence
  Description of Artificial Sequence: Synthetic oligonucleotide
  Sense strand starting at position 3428 of SEQ ID NO: 1885671
uguaccuaccucgaaacaa

SEQ ID NO: 2359575 - RNA, 19 nt, Artificial Sequence
  Description of Artificial Sequence: Synthetic oligonucleotide
  Antisense strand to SEQ ID NO: 2359574
uuguuucgagguagguaca

SEQ ID NO: 2359576 - RNA, 19 nt, Artificial Sequence
  Description of Artificial Sequence: Synthetic oligonucleotide
  Sense strand starting at position 3525 of SEQ ID NO: 1885671
aggugcaaucacuggacaa

SEQ ID NO: 2359577 - RNA, 19 nt, Artificial Sequence
  Description of Artificial Sequence: Synthetic oligonucleotide
  Antisense strand to SEQ ID NO: 2359576
uuguccagugauugcaccu

SEQ ID NO: 2359578 - RNA, 19 nt, Artificial Sequence
  Description of Artificial Sequence: Synthetic oligonucleotide
  Sense strand starting at position 3526 of SEQ ID NO: 1885671
ggugcaaucacuggacaau

SEQ ID NO: 2359579 - RNA, 19 nt, Artificial Sequence
  Description of Artificial Sequence: Synthetic oligonucleotide
  Antisense strand to SEQ ID NO: 2359578
auuguccagugauugcacc

SEQ ID NO: 2359580 - RNA, 19 nt, Artificial Sequence
  Description of Artificial Sequence: Synthetic oligonucleotide
  Sense strand starting at position 3527 of SEQ ID NO: 1885671
gugcaaucacuggacaaug

SEQ ID NO: 2359581 - RNA, 19 nt, Artificial Sequence
  Description of Artificial Sequence: Synthetic oligonucleotide
  Antisense strand to SEQ ID NO: 2359580
cauuguccagugauugcac

SEQ ID NO: 2359582 - RNA, 19 nt, Artificial Sequence
  Description of Artificial Sequence: Synthetic oligonucleotide
  Sense strand starting at position 3614 of SEQ ID NO: 1885671
accaguaacuugccuuaga

SEQ ID NO: 2359583 - RNA, 19 nt, Artificial Sequence
  Description of Artificial Sequence: Synthetic oligonucleotide
  Antisense strand to SEQ ID NO: 2359582
ucuaaggcaaguuacuggu

SEQ ID NO: 2359584 - RNA, 19 nt, Artificial Sequence
  Description of Artificial Sequence: Synthetic oligonucleotide
  Sense strand starting at position 3615 of SEQ ID NO: 1885671
ccaguaacuugccuuagaa

SEQ ID NO: 2359585 - RNA, 19 nt, Artificial Sequence
  Description of Artificial Sequence: Synthetic oligonucleotide
  Antisense strand to SEQ ID NO: 2359584
uucuaaggcaaguuacugg

SEQ ID NO: 2359586 - RNA, 19 nt, Artificial Sequence
  Description of Artificial Sequence: Synthetic oligonucleotide
  Sense strand starting at position 3617 of SEQ ID NO: 1885671
aguaacuugccuuagaaca

SEQ ID NO: 2359587 - RNA, 19 nt, Artificial Sequence
  Description of Artificial Sequence: Synthetic oligonucleotide
  Antisense strand to SEQ ID NO: 2359586
uguucuaaggcaaguuacu

SEQ ID NO: 2359588 - RNA, 19 nt, Artificial Sequence
  Description of Artificial Sequence: Synthetic oligonucleotide
  Sense strand starting at position 3765 of SEQ ID NO: 1885671
ucguguguccggagaggug

SEQ ID NO: 2359589 - RNA, 19 nt, Artificial Sequence
  Description of Artificial Sequence: Synthetic oligonucleotide
  Antisense strand to SEQ ID NO: 2359588
caccucuccggacacacga

SEQ ID NO: 2359590 - RNA, 19 nt, Artificial Sequence
  Description of Artificial Sequence: Synthetic oligonucleotide
  Sense strand starting at position 3802 of SEQ ID NO: 1885671
caggaagcccucuggguau

SEQ ID NO: 2359591 - RNA, 19 nt, Artificial Sequence
  Description of Artificial Sequence: Synthetic oligonucleotide
  Antisense strand to SEQ ID NO: 2359590
auacccagagggcuuccug

SEQ ID NO: 2359592 - RNA, 19 nt, Artificial Sequence
  Description of Artificial Sequence: Synthetic oligonucleotide
  Sense strand starting at position 3813 of SEQ ID NO: 1885671
cuggguaugacuugguaug

SEQ ID NO: 2359593 - RNA, 19 nt, Artificial Sequence
  Description of Artificial Sequence: Synthetic oligonucleotide
  Antisense strand to SEQ ID NO: 2359592
cauaccaagucauacccag

SEQ ID NO: 2359594 - RNA, 19 nt, Artificial Sequence
  Description of Artificial Sequence: Synthetic oligonucleotide
  Sense strand starting at position 3815 of SEQ ID NO: 1885671
ggguaugacuugguaugga

SEQ ID NO: 2359595 - RNA, 19 nt, Artificial Sequence
  Description of Artificial Sequence: Synthetic oligonucleotide
  Antisense strand to SEQ ID NO: 2359594
uccauaccaagucauaccc

SEQ ID NO: 2359596 - RNA, 19 nt, Artificial Sequence
  Description of Artificial Sequence: Synthetic oligonucleotide
  Sense strand starting at position 3837 of SEQ ID NO: 1885671
gaggcagauccaugugauu

SEQ ID NO: 2359597 - RNA, 19 nt, Artificial Sequence
  Description of Artificial Sequence: Synthetic oligonucleotide
  Antisense strand to SEQ ID NO: 2359596
aaucacauggaucugccuc

SEQ ID NO: 2359598 - RNA, 19 nt, Artificial Sequence
  Description of Artificial Sequence: Synthetic oligonucleotide
  Sense strand starting at position 236 of SEQ ID NO: 1885672
caggauuagugugcacaga

SEQ ID NO: 2359599 - RNA, 19 nt, Artificial Sequence
  Description of Artificial Sequence: Synthetic oligonucleotide
  Antisense strand to SEQ ID NO: 2359598
ucugugcacacuaauccug

SEQ ID NO: 2359600 - RNA, 19 nt, Artificial Sequence
  Description of Artificial Sequence: Synthetic oligonucleotide
  Sense strand starting at position 237 of SEQ ID NO: 1885672
aggauuagugugcacagaa

SEQ ID NO: 2359601 - RNA, 19 nt, Artificial Sequence
  Description of Artificial Sequence: Synthetic oligonucleotide
  Antisense strand to SEQ ID NO: 2359600
uucugugcacacuaauccu

SEQ ID NO: 2359602 - RNA, 19 nt, Artificial Sequence
  Description of Artificial Sequence: Synthetic oligonucleotide
  Sense strand starting at position 416 of SEQ ID NO: 1885672
gaauucucuggagggugua

SEQ ID NO: 2359603 - RNA, 19 nt, Artificial Sequence
  Description of Artificial Sequence: Synthetic oligonucleotide
  Antisense strand to SEQ ID NO: 2359602
uacacccuccagagaauuc

SEQ ID NO: 2359604 - RNA, 19 nt, Artificial Sequence
  Description of Artificial Sequence: Synthetic oligonucleotide
  Sense strand starting at position 522 of SEQ ID NO: 1885672
cuucuagaugcccaagauu

SEQ ID NO: 2359605 - RNA, 19 nt, Artificial Sequence
  Description of Artificial Sequence: Synthetic oligonucleotide
  Antisense strand to SEQ ID NO: 2359604
aaucuugggcaucuagaag

SEQ ID NO: 2359606 - RNA, 19 nt, Artificial Sequence
  Description of Artificial Sequence: Synthetic oligonucleotide
  Sense strand starting at position 548 of SEQ ID NO: 1885672
aagguugaauuugauagga

SEQ ID NO: 2359607 - RNA, 19 nt, Artificial Sequence
  Description of Artificial Sequence: Synthetic oligonucleotide
  Antisense strand to SEQ ID NO: 2359606
uccuaucaaauucaaccuu

SEQ ID NO: 2359608 - RNA, 19 nt, Artificial Sequence
  Description of Artificial Sequence: Synthetic oligonucleotide
  Sense strand starting at position 550 of SEQ ID NO: 1885672
gguugaauuugauaggaau

SEQ ID NO: 2359609 - RNA, 19 nt, Artificial Sequence
  Description of Artificial Sequence: Synthetic oligonucleotide
  Antisense strand to SEQ ID NO: 2359608
auuccuaucaaauucaacc

SEQ ID NO: 2359610 - RNA, 19 nt, Artificial Sequence
  Description of Artificial Sequence: Synthetic oligonucleotide
  Sense strand starting at position 685 of SEQ ID NO: 1885672
cagcuuggacucuaaaguu

SEQ ID NO: 2359611 - RNA, 19 nt, Artificial Sequence
  Description of Artificial Sequence: Synthetic oligonucleotide
  Antisense strand to SEQ ID NO: 2359610
aacuuuagaguccaagcug

SEQ ID NO: 2359612 - RNA, 19 nt, Artificial Sequence
  Description of Artificial Sequence: Synthetic oligonucleotide
  Sense strand starting at position 714 of SEQ ID NO: 1885672
uuacaugcauccucaggaa

SEQ ID NO: 2359613 - RNA, 19 nt, Artificial Sequence
  Description of Artificial Sequence: Synthetic oligonucleotide
  Antisense strand to SEQ ID NO: 2359612
uuccugaggaugcauguaa

SEQ ID NO: 2359614 - RNA, 19 nt, Artificial Sequence
  Description of Artificial Sequence: Synthetic oligonucleotide
  Sense strand starting at position 803 of SEQ ID NO: 1885672
ggcagaauuugacacuaaa

SEQ ID NO: 2359615 - RNA, 19 nt, Artificial Sequence
  Description of Artificial Sequence: Synthetic oligonucleotide
  Antisense strand to SEQ ID NO: 2359614
uuuagugucaaauucugcc

SEQ ID NO: 2359616 - RNA, 19 nt, Artificial Sequence
  Description of Artificial Sequence: Synthetic oligonucleotide
  Sense strand starting at position 907 of SEQ ID NO: 1885672
ugagaaauccauugccucu

SEQ ID NO: 2359617 - RNA, 19 nt, Artificial Sequence
  Description of Artificial Sequence: Synthetic oligonucleotide
  Antisense strand to SEQ ID NO: 2359616
agaggcaauggauuucuca

SEQ ID NO: 2359618 - RNA, 19 nt, Artificial Sequence
  Description of Artificial Sequence: Synthetic oligonucleotide
  Sense strand starting at position 959 of SEQ ID NO: 1885672
guuaggaaugggugggaua

SEQ ID NO: 2359619 - RNA, 19 nt, Artificial Sequence
  Description of Artificial Sequence: Synthetic oligonucleotide
  Antisense strand to SEQ ID NO: 2359618
uaucccacccauuccuaac

SEQ ID NO: 2359620 - RNA, 19 nt, Artificial Sequence
  Description of Artificial Sequence: Synthetic oligonucleotide
  Sense strand starting at position 961 of SEQ ID NO: 1885672
uaggaaugggugggauagu

SEQ ID NO: 2359621 - RNA, 19 nt, Artificial Sequence
  Description of Artificial Sequence: Synthetic oligonucleotide
  Antisense strand to SEQ ID NO: 2359620
acuaucccacccauuccua

SEQ ID NO: 2359622 - RNA, 19 nt, Artificial Sequence
  Description of Artificial Sequence: Synthetic oligonucleotide
  Sense strand starting at position 1212 of SEQ ID NO: 1885672
caggaugcuggguauuaga

SEQ ID NO: 2359623 - RNA, 19 nt, Artificial Sequence
  Description of Artificial Sequence: Synthetic oligonucleotide
  Antisense strand to SEQ ID NO: 2359622
ucuaauacccagcauccug

SEQ ID NO: 2359624 - RNA, 19 nt, Artificial Sequence
  Description of Artificial Sequence: Synthetic oligonucleotide
  Sense strand starting at position 1259 of SEQ ID NO: 1885672
gcacaugcucugggaagaa

SEQ ID NO: 2359625 - RNA, 19 nt, Artificial Sequence
  Description of Artificial Sequence: Synthetic oligonucleotide
  Antisense strand to SEQ ID NO: 2359624
uucuucccagagcaugugc

SEQ ID NO: 2359626 - RNA, 19 nt, Artificial Sequence
  Description of Artificial Sequence: Synthetic oligonucleotide
  Sense strand starting at position 1517 of SEQ ID NO: 1885672
uggaaagucuuccuggagu

SEQ ID NO: 2359627 - RNA, 19 nt, Artificial Sequence
  Description of Artificial Sequence: Synthetic oligonucleotide
  Antisense strand to SEQ ID NO: 2359626
acuccaggaagacuuucca

SEQ ID NO: 2359628 - RNA, 19 nt, Artificial Sequence
  Description of Artificial Sequence: Synthetic oligonucleotide
  Sense strand starting at position 1536 of SEQ ID NO: 1885672
gggagugaugcugaggguu

SEQ ID NO: 2359629 - RNA, 19 nt, Artificial Sequence
  Description of Artificial Sequence: Synthetic oligonucleotide
  Antisense strand to SEQ ID NO: 2359628
aacccucagcaucacuccc

SEQ ID NO: 2359630 - RNA, 19 nt, Artificial Sequence
  Description of Artificial Sequence: Synthetic oligonucleotide
  Sense strand starting at position 1779 of SEQ ID NO: 1885672
ggauuaucgggccagguga

SEQ ID NO: 2359631 - RNA, 19 nt, Artificial Sequence
  Description of Artificial Sequence: Synthetic oligonucleotide
  Antisense strand to SEQ ID NO: 2359630
ucaccuggcccgauaaucc

SEQ ID NO: 2359632 - RNA, 19 nt, Artificial Sequence
  Description of Artificial Sequence: Synthetic oligonucleotide
  Sense strand starting at position 1794 of SEQ ID NO: 1885672
gugacuuacagcuagguca

SEQ ID NO: 2359633 - RNA, 19 nt, Artificial Sequence
  Description of Artificial Sequence: Synthetic oligonucleotide
  Antisense strand to SEQ ID NO: 2359632
ugaccuagcuguaagucac

SEQ ID NO: 2359634 - RNA, 19 nt, Artificial Sequence
  Description of Artificial Sequence: Synthetic oligonucleotide
  Sense strand starting at position 1898 of SEQ ID NO: 1885672
ccaggaaguccuuagaggu

SEQ ID NO: 2359635 - RNA, 19 nt, Artificial Sequence
  Description of Artificial Sequence: Synthetic oligonucleotide
  Antisense strand to SEQ ID NO: 2359634
accucuaaggacuuccugg

SEQ ID NO: 2359636 - RNA, 19 nt, Artificial Sequence
  Description of Artificial Sequence: Synthetic oligonucleotide
  Sense strand starting at position 1904 of SEQ ID NO: 1885672
aguccuuagagguagcauu

SEQ ID NO: 2359637 - RNA, 19 nt, Artificial Sequence
  Description of Artificial Sequence: Synthetic oligonucleotide
  Antisense strand to SEQ ID NO: 2359636
aaugcuaccucuaaggacu

SEQ ID NO: 2359638 - RNA, 19 nt, Artificial Sequence
  Description of Artificial Sequence: Synthetic oligonucleotide
  Sense strand starting at position 2206 of SEQ ID NO: 1885672
uugaaauugugguccugaa

SEQ ID NO: 2359639 - RNA, 19 nt, Artificial Sequence
  Description of Artificial Sequence: Synthetic oligonucleotide
  Antisense strand to SEQ ID NO: 2359638
uucaggaccacaauuucaa

SEQ ID NO: 2359640 - RNA, 19 nt, Artificial Sequence
  Description of Artificial Sequence: Synthetic oligonucleotide
  Sense strand starting at position 2210 of SEQ ID NO: 1885672
aauugugguccugaaucca

SEQ ID NO: 2359641 - RNA, 19 nt, Artificial Sequence
  Description of Artificial Sequence: Synthetic oligonucleotide
  Antisense strand to SEQ ID NO: 2359640
uggauucaggaccacaauu

SEQ ID NO: 2359642 - RNA, 19 nt, Artificial Sequence
  Description of Artificial Sequence: Synthetic oligonucleotide
  Sense strand starting at position 2230 of SEQ ID NO: 1885672
acgcacaagguuuagaaau

SEQ ID NO: 2359643 - RNA, 19 nt, Artificial Sequence
  Description of Artificial Sequence: Synthetic oligonucleotide
  Antisense strand to SEQ ID NO: 2359642
auuucuaaaccuugugcgu

SEQ ID NO: 2359644 - RNA, 19 nt, Artificial Sequence
  Description of Artificial Sequence: Synthetic oligonucleotide
  Sense strand starting at position 2255 of SEQ ID NO: 1885672
agggaagccacuugucaca

SEQ ID NO: 2359645 - RNA, 19 nt, Artificial Sequence
  Description of Artificial Sequence: Synthetic oligonucleotide
  Antisense strand to SEQ ID NO: 2359644
ugugacaaguggcuucccu

SEQ ID NO: 2359646 - RNA, 19 nt, Artificial Sequence
  Description of Artificial Sequence: Synthetic oligonucleotide
  Sense strand starting at position 2347 of SEQ ID NO: 1885672
ugaguuauccaucaagcac

SEQ ID NO: 2359647 - RNA, 19 nt, Artificial Sequence
  Description of Artificial Sequence: Synthetic oligonucleotide
  Antisense strand to SEQ ID NO: 2359646
gugcuugauggauaacuca

SEQ ID NO: 2359648 - RNA, 19 nt, Artificial Sequence
  Description of Artificial Sequence: Synthetic oligonucleotide
  Sense strand starting at position 2507 of SEQ ID NO: 1885672
cuggguagauucucuauca

SEQ ID NO: 2359649 - RNA, 19 nt, Artificial Sequence
  Description of Artificial Sequence: Synthetic oligonucleotide
  Antisense strand to SEQ ID NO: 2359648
ugauagagaaucuacccag

SEQ ID NO: 2359650 - RNA, 19 nt, Artificial Sequence
  Description of Artificial Sequence: Synthetic oligonucleotide
  Sense strand starting at position 2508 of SEQ ID NO: 1885672
uggguagauucucuaucaa

SEQ ID NO: 2359651 - RNA, 19 nt, Artificial Sequence
  Description of Artificial Sequence: Synthetic oligonucleotide
  Antisense strand to SEQ ID NO: 2359650
uugauagagaaucuaccca

SEQ ID NO: 2359652 - RNA, 19 nt, Artificial Sequence
  Description of Artificial Sequence: Synthetic oligonucleotide
  Sense strand starting at position 2533 of SEQ ID NO: 1885672
uguggucagagugaucuuu

SEQ ID NO: 2359653 - RNA, 19 nt, Artificial Sequence
  Description of Artificial Sequence: Synthetic oligonucleotide
  Antisense strand to SEQ ID NO: 2359652
aaagaucacucugaccaca

SEQ ID NO: 2359654 - RNA, 19 nt, Artificial Sequence
  Description of Artificial Sequence: Synthetic oligonucleotide
  Sense strand starting at position 2944 of SEQ ID NO: 1885672
cgucucuuccaccagaaug

SEQ ID NO: 2359655 - RNA, 19 nt, Artificial Sequence
  Description of Artificial Sequence: Synthetic oligonucleotide
  Antisense strand to SEQ ID NO: 2359654
cauucugguggaagagacg

SEQ ID NO: 2359656 - RNA, 19 nt, Artificial Sequence
  Description of Artificial Sequence: Synthetic oligonucleotide
  Sense strand starting at position 3012 of SEQ ID NO: 1885672
gguccagaaucaccuagaa

SEQ ID NO: 2359657 - RNA, 19 nt, Artificial Sequence
  Description of Artificial Sequence: Synthetic oligonucleotide
  Antisense strand to SEQ ID NO: 2359656
uucuaggugauucuggacc

SEQ ID NO: 2359658 - RNA, 19 nt, Artificial Sequence
  Description of Artificial Sequence: Synthetic oligonucleotide
  Sense strand starting at position 3046 of SEQ ID NO: 1885672
aucacuauuuauggaauga

SEQ ID NO: 2359659 - RNA, 19 nt, Artificial Sequence
  Description of Artificial Sequence: Synthetic oligonucleotide
  Antisense strand to SEQ ID NO: 2359658
ucauuccauaaauagugau

SEQ ID NO: 2359660 - RNA, 19 nt, Artificial Sequence
  Description of Artificial Sequence: Synthetic oligonucleotide
  Sense strand starting at position 3068 of SEQ ID NO: 1885672
agucauuccuuguuauuug

SEQ ID NO: 2359661 - RNA, 19 nt, Artificial Sequence
  Description of Artificial Sequence: Synthetic oligonucleotide
  Antisense strand to SEQ ID NO: 2359660
caaauaacaaggaaugacu

SEQ ID NO: 2359662 - RNA, 19 nt, Artificial Sequence
  Description of Artificial Sequence: Synthetic oligonucleotide
  Sense strand starting at position 3091 of SEQ ID NO: 1885672
acucaugaaccauguaguu

SEQ ID NO: 2359663 - RNA, 19 nt, Artificial Sequence
  Description of Artificial Sequence: Synthetic oligonucleotide
  Antisense strand to SEQ ID NO: 2359662
aacuacaugguucaugagu

SEQ ID NO: 2359664 - RNA, 19 nt, Artificial Sequence
  Description of Artificial Sequence: Synthetic oligonucleotide
  Sense strand starting at position 3104 of SEQ ID NO: 1885672
guaguuaugcuauaaacaa

SEQ ID NO: 2359665 - RNA, 19 nt, Artificial Sequence
  Description of Artificial Sequence: Synthetic oligonucleotide
  Antisense strand to SEQ ID NO: 2359664
uuguuuauagcauaacuac

SEQ ID NO: 2359666 - RNA, 19 nt, Artificial Sequence
  Description of Artificial Sequence: Synthetic oligonucleotide
  Sense strand starting at position 3165 of SEQ ID NO: 1885672
aaaucaugguggccaaagu

SEQ ID NO: 2359667 - RNA, 19 nt, Artificial Sequence
  Description of Artificial Sequence: Synthetic oligonucleotide
  Antisense strand to SEQ ID NO: 2359666
acuuuggccaccaugauuu

SEQ ID NO: 2359668 - RNA, 19 nt, Artificial Sequence
  Description of Artificial Sequence: Synthetic oligonucleotide
  Sense strand starting at position 3335 of SEQ ID NO: 1885672
ggcggugcugcuuccagaa

SEQ ID NO: 2359669 - RNA, 19 nt, Artificial Sequence
  Description of Artificial Sequence: Synthetic oligonucleotide
  Antisense strand to SEQ ID NO: 2359668
uucuggaagcagcaccgcc

SEQ ID NO: 2359670 - RNA, 19 nt, Artificial Sequence
  Description of Artificial Sequence: Synthetic oligonucleotide
  Sense strand starting at position 3439 of SEQ ID NO: 1885672
ggcugaugacaguaacacu

SEQ ID NO: 2359671 - RNA, 19 nt, Artificial Sequence
  Description of Artificial Sequence: Synthetic oligonucleotide
  Antisense strand to SEQ ID NO: 2359670
aguguuacugucaucagcc

SEQ ID NO: 2359672 - RNA, 19 nt, Artificial Sequence
  Description of Artificial Sequence: Synthetic oligonucleotide
  Sense strand starting at position 3464 of SEQ ID NO: 1885672
ccagcaugucuccagagau

SEQ ID NO: 2359673 - RNA, 19 nt, Artificial Sequence
  Description of Artificial Sequence: Synthetic oligonucleotide
  Antisense strand to SEQ ID NO: 2359672
aucucuggagacaugcugg

SEQ ID NO: 2359674 - RNA, 19 nt, Artificial Sequence
  Description of Artificial Sequence: Synthetic oligonucleotide
  Sense strand starting at position 3680 of SEQ ID NO: 1885672
cugcgauggcccguucaca

SEQ ID NO: 2359675 - RNA, 19 nt, Artificial Sequence
  Description of Artificial Sequence: Synthetic oligonucleotide
  Antisense strand to SEQ ID NO: 2359674
ugugaacgggccaucgcag

SEQ ID NO: 2359676 - RNA, 19 nt, Artificial Sequence
  Description of Artificial Sequence: Synthetic oligonucleotide
  Sense strand starting at position 3681 of SEQ ID NO: 1885672
ugcgauggcccguucacau

SEQ ID NO: 2359677 - RNA, 19 nt, Artificial Sequence
  Description of Artificial Sequence: Synthetic oligonucleotide
  Antisense strand to SEQ ID NO: 2359676
augugaacgggccaucgca

SEQ ID NO: 2359678 - RNA, 19 nt, Artificial Sequence
  Description of Artificial Sequence: Synthetic oligonucleotide
  Sense strand starting at position 42 of SEQ ID NO: 1885673
ccaggagcucacugaucaa

SEQ ID NO: 2359679 - RNA, 19 nt, Artificial Sequence
  Description of Artificial Sequence: Synthetic oligonucleotide
  Antisense strand to SEQ ID NO: 2359678
uugaucagugagcuccugg

SEQ ID NO: 2359680 - RNA, 19 nt, Artificial Sequence
  Description of Artificial Sequence: Synthetic oligonucleotide
  Sense strand starting at position 45 of SEQ ID NO: 1885673
ggagcucacugaucaacaa

SEQ ID NO: 2359681 - RNA, 19 nt, Artificial Sequence
  Description of Artificial Sequence: Synthetic oligonucleotide
  Antisense strand to SEQ ID NO: 2359680
uuguugaucagugagcucc

SEQ ID NO: 2359682 - RNA, 19 nt, Artificial Sequence
  Description of Artificial Sequence: Synthetic oligonucleotide
  Sense strand starting at position 59 of SEQ ID NO: 1885673
aacaaugagugauaaagga

SEQ ID NO: 2359683 - RNA, 19 nt, Artificial Sequence
  Description of Artificial Sequence: Synthetic oligonucleotide
  Antisense strand to SEQ ID NO: 2359682
uccuuuaucacucauuguu

SEQ ID NO: 2359684 - RNA, 19 nt, Artificial Sequence
  Description of Artificial Sequence: Synthetic oligonucleotide
  Sense strand starting at position 164 of SEQ ID NO: 1885673
ucacuaagucuccagguca

SEQ ID NO: 2359685 - RNA, 19 nt, Artificial Sequence
  Description of Artificial Sequence: Synthetic oligonucleotide
  Antisense strand to SEQ ID NO: 2359684
ugaccuggagacuuaguga

SEQ ID NO: 2359686 - RNA, 19 nt, Artificial Sequence
  Description of Artificial Sequence: Synthetic oligonucleotide
  Sense strand starting at position 495 of SEQ ID NO: 1885673
ggugggauucgauaucgga

SEQ ID NO: 2359687 - RNA, 19 nt, Artificial Sequence
  Description of Artificial Sequence: Synthetic oligonucleotide
  Antisense strand to SEQ ID NO: 2359686
uccgauaucgaaucccacc

SEQ ID NO: 2359688 - RNA, 19 nt, Artificial Sequence
  Description of Artificial Sequence: Synthetic oligonucleotide
  Sense strand starting at position 499 of SEQ ID NO: 1885673
ggauucgauaucggaaaga

SEQ ID NO: 2359689 - RNA, 19 nt, Artificial Sequence
  Description of Artificial Sequence: Synthetic oligonucleotide
  Antisense strand to SEQ ID NO: 2359688
ucuuuccgauaucgaaucc

SEQ ID NO: 2359690 - RNA, 19 nt, Artificial Sequence
  Description of Artificial Sequence: Synthetic oligonucleotide
  Sense strand starting at position 604 of SEQ ID NO: 1885673
ggaggaggcuucuuccaca

SEQ ID NO: 2359691 - RNA, 19 nt, Artificial Sequence
  Description of Artificial Sequence: Synthetic oligonucleotide
  Antisense strand to SEQ ID NO: 2359690
uguggaagaagccuccucc

SEQ ID NO: 2359692 - RNA, 19 nt, Artificial Sequence
  Description of Artificial Sequence: Synthetic oligonucleotide
  Sense strand starting at position 769 of SEQ ID NO: 1885673
gaaucaugcaggugggauc

SEQ ID NO: 2359693 - RNA, 19 nt, Artificial Sequence
  Description of Artificial Sequence: Synthetic oligonucleotide
  Antisense strand to SEQ ID NO: 2359692
gaucccaccugcaugauuc

SEQ ID NO: 2359694 - RNA, 19 nt, Artificial Sequence
  Description of Artificial Sequence: Synthetic oligonucleotide
  Sense strand starting at position 776 of SEQ ID NO: 1885673
gcaggugggaucugauacu

SEQ ID NO: 2359695 - RNA, 19 nt, Artificial Sequence
  Description of Artificial Sequence: Synthetic oligonucleotide
  Antisense strand to SEQ ID NO: 2359694
aguaucagaucccaccugc

SEQ ID NO: 2359696 - RNA, 19 nt, Artificial Sequence
  Description of Artificial Sequence: Synthetic oligonucleotide
  Sense strand starting at position 810 of SEQ ID NO: 1885673
gugucuugugugucaugau

SEQ ID NO: 2359697 - RNA, 19 nt, Artificial Sequence
  Description of Artificial Sequence: Synthetic oligonucleotide
  Antisense strand to SEQ ID NO: 2359696
aucaugacacacaagacac

SEQ ID NO: 2359698 - RNA, 19 nt, Artificial Sequence
  Description of Artificial Sequence: Synthetic oligonucleotide
  Sense strand starting at position 823 of SEQ ID NO: 1885673
caugauuucugugaaugca

SEQ ID NO: 2359699 - RNA, 19 nt, Artificial Sequence
  Description of Artificial Sequence: Synthetic oligonucleotide
  Antisense strand to SEQ ID NO: 2359698
ugcauucacagaaaucaug

SEQ ID NO: 2359700 - RNA, 19 nt, Artificial Sequence
  Description of Artificial Sequence: Synthetic oligonucleotide
  Sense strand starting at position 1048 of SEQ ID NO: 1885673
guccucugccucgaugaca

SEQ ID NO: 2359701 - RNA, 19 nt, Artificial Sequence
  Description of Artificial Sequence: Synthetic oligonucleotide
  Antisense strand to SEQ ID NO: 2359700
ugucaucgaggcagaggac

SEQ ID NO: 2359702 - RNA, 19 nt, Artificial Sequence
  Description of Artificial Sequence: Synthetic oligonucleotide
  Sense strand starting at position 1394 of SEQ ID NO: 1885673
gugccaucggcucaagaac

SEQ ID NO: 2359703 - RNA, 19 nt, Artificial Sequence
  Description of Artificial Sequence: Synthetic oligonucleotide
  Antisense strand to SEQ ID NO: 2359702
guucuugagccgauggcac

SEQ ID NO: 2359704 - RNA, 19 nt, Artificial Sequence
  Description of Artificial Sequence: Synthetic oligonucleotide
  Sense strand starting at position 1610 of SEQ ID NO: 1885673
gguccuccaaggugagauu

SEQ ID NO: 2359705 - RNA, 19 nt, Artificial Sequence
  Description of Artificial Sequence: Synthetic oligonucleotide
  Antisense strand to SEQ ID NO: 2359704
aaucucaccuuggaggacc

SEQ ID NO: 2359706 - RNA, 19 nt, Artificial Sequence
  Description of Artificial Sequence: Synthetic oligonucleotide
  Sense strand starting at position 1623 of SEQ ID NO: 1885673
gagauuugauacugagaaa

SEQ ID NO: 2359707 - RNA, 19 nt, Artificial Sequence
  Description of Artificial Sequence: Synthetic oligonucleotide
  Antisense strand to SEQ ID NO: 2359706
uuucucaguaucaaaucuc

SEQ ID NO: 2359708 - RNA, 19 nt, Artificial Sequence
  Description of Artificial Sequence: Synthetic oligonucleotide
  Sense strand starting at position 1914 of SEQ ID NO: 1885673
gguggaauuugauaccgaa

SEQ ID NO: 2359709 - RNA, 19 nt, Artificial Sequence
  Description of Artificial Sequence: Synthetic oligonucleotide
  Antisense strand to SEQ ID NO: 2359708
uucgguaucaaauuccacc

SEQ ID NO: 2359710 - RNA, 19 nt, Artificial Sequence
  Description of Artificial Sequence: Synthetic oligonucleotide
  Sense strand starting at position 2008 of SEQ ID NO: 1885673
ggcucagaugcucggacua

SEQ ID NO: 2359711 - RNA, 19 nt, Artificial Sequence
  Description of Artificial Sequence: Synthetic oligonucleotide
  Antisense strand to SEQ ID NO: 2359710
uaguccgagcaucugagcc

SEQ ID NO: 2359712 - RNA, 19 nt, Artificial Sequence
  Description of Artificial Sequence: Synthetic oligonucleotide
  Sense strand starting at position 2174 of SEQ ID NO: 1885673
ucuagagacucuucccaga

SEQ ID NO: 2359713 - RNA, 19 nt, Artificial Sequence
  Description of Artificial Sequence: Synthetic oligonucleotide
  Antisense strand to SEQ ID NO: 2359712
ucugggaagagucucuaga

SEQ ID NO: 2359714 - RNA, 19 nt, Artificial Sequence
  Description of Artificial Sequence: Synthetic oligonucleotide
  Sense strand starting at position 2188 of SEQ ID NO: 1885673
ccagaaguugagugcaaga

SEQ ID NO: 2359715 - RNA, 19 nt, Artificial Sequence
  Description of Artificial Sequence: Synthetic oligonucleotide
  Antisense strand to SEQ ID NO: 2359714
ucuugcacucaacuucugg

SEQ ID NO: 2359716 - RNA, 19 nt, Artificial Sequence
  Description of Artificial Sequence: Synthetic oligonucleotide
  Sense strand starting at position 2509 of SEQ ID NO: 1885673
ucugauuagccucauaaag

SEQ ID NO: 2359717 - RNA, 19 nt, Artificial Sequence
  Description of Artificial Sequence: Synthetic oligonucleotide
  Antisense strand to SEQ ID NO: 2359716
cuuuaugaggcuaaucaga

SEQ ID NO: 2359718 - RNA, 19 nt, Artificial Sequence
  Description of Artificial Sequence: Synthetic oligonucleotide
  Sense strand starting at position 2582 of SEQ ID NO: 1885673
aggugagucacagaugucu

SEQ ID NO: 2359719 - RNA, 19 nt, Artificial Sequence
  Description of Artificial Sequence: Synthetic oligonucleotide
  Antisense strand to SEQ ID NO: 2359718
agacaucugugacucaccu

SEQ ID NO: 2359720 - RNA, 19 nt, Artificial Sequence
  Description of Artificial Sequence: Synthetic oligonucleotide
  Sense strand starting at position 2584 of SEQ ID NO: 1885673
gugagucacagaugucuuc

SEQ ID NO: 2359721 - RNA, 19 nt, Artificial Sequence
  Description of Artificial Sequence: Synthetic oligonucleotide
  Antisense strand to SEQ ID NO: 2359720
gaagacaucugugacucac

SEQ ID NO: 2359722 - RNA, 19 nt, Artificial Sequence
  Description of Artificial Sequence: Synthetic oligonucleotide
  Sense strand starting at position 2789 of SEQ ID NO: 1885673
gaauccuuucccugacguu

SEQ ID NO: 2359723 - RNA, 19 nt, Artificial Sequence
  Description of Artificial Sequence: Synthetic oligonucleotide
  Antisense strand to SEQ ID NO: 2359722
aacgucagggaaaggauuc

SEQ ID NO: 2359724 - RNA, 19 nt, Artificial Sequence
  Description of Artificial Sequence: Synthetic oligonucleotide
  Sense strand starting at position 2867 of SEQ ID NO: 1885673
cgaggccugcuguaaagaa

SEQ ID NO: 2359725 - RNA, 19 nt, Artificial Sequence
  Description of Artificial Sequence: Synthetic oligonucleotide
  Antisense strand to SEQ ID NO: 2359724
uucuuuacagcaggccucg

SEQ ID NO: 2359726 - RNA, 19 nt, Artificial Sequence
  Description of Artificial Sequence: Synthetic oligonucleotide
  Sense strand starting at position 2925 of SEQ ID NO: 1885673
ggcacugaccugcaucaga

SEQ ID NO: 2359727 - RNA, 19 nt, Artificial Sequence
  Description of Artificial Sequence: Synthetic oligonucleotide
  Antisense strand to SEQ ID NO: 2359726
ucugaugcaggucagugcc

SEQ ID NO: 2359728 - RNA, 19 nt, Artificial Sequence
  Description of Artificial Sequence: Synthetic oligonucleotide
  Sense strand starting at position 3123 of SEQ ID NO: 1885673
ucuggaaauucuccaggua

SEQ ID NO: 2359729 - RNA, 19 nt, Artificial Sequence
  Description of Artificial Sequence: Synthetic oligonucleotide
  Antisense strand to SEQ ID NO: 2359728
uaccuggagaauuuccaga

SEQ ID NO: 2359730 - RNA, 19 nt, Artificial Sequence
  Description of Artificial Sequence: Synthetic oligonucleotide
  Sense strand starting at position 3376 of SEQ ID NO: 1885673
cccagaauguuccuggaug

SEQ ID NO: 2359731 - RNA, 19 nt, Artificial Sequence
  Description of Artificial Sequence: Synthetic oligonucleotide
  Antisense strand to SEQ ID NO: 2359730
cauccaggaacauucuggg

SEQ ID NO: 2359732 - RNA, 19 nt, Artificial Sequence
  Description of Artificial Sequence: Synthetic oligonucleotide
  Sense strand starting at position 3405 of SEQ ID NO: 1885673
caucaauagccuuggaagu

SEQ ID NO: 2359733 - RNA, 19 nt, Artificial Sequence
  Description of Artificial Sequence: Synthetic oligonucleotide
  Antisense strand to SEQ ID NO: 2359732
acuuccaaggcuauugaug

SEQ ID NO: 2359734 - RNA, 19 nt, Artificial Sequence
  Description of Artificial Sequence: Synthetic oligonucleotide
  Sense strand starting at position 3418 of SEQ ID NO: 1885673
ggaagugugaaaggaaagu

SEQ ID NO: 2359735 - RNA, 19 nt, Artificial Sequence
  Description of Artificial Sequence: Synthetic oligonucleotide
  Antisense strand to SEQ ID NO: 2359734
acuuuccuuucacacuucc

SEQ ID NO: 2359736 - RNA, 19 nt, Artificial Sequence
  Description of Artificial Sequence: Synthetic oligonucleotide
  Sense strand starting at position 3474 of SEQ ID NO: 1885673
cuggaagcugcucaggaua

SEQ ID NO: 2359737 - RNA, 19 nt, Artificial Sequence
  Description of Artificial Sequence: Synthetic oligonucleotide
  Antisense strand to SEQ ID NO: 2359736
uauccugagcagcuuccag

SEQ ID NO: 2359738 - RNA, 19 nt, Artificial Sequence
  Description of Artificial Sequence: Synthetic oligonucleotide
  Sense strand starting at position 3488 of SEQ ID NO: 1885673
ggauaaaccugccucucau

SEQ ID NO: 2359739 - RNA, 19 nt, Artificial Sequence
  Description of Artificial Sequence: Synthetic oligonucleotide
  Antisense strand to SEQ ID NO: 2359738
augagaggcagguuuaucc

SEQ ID NO: 2359740 - RNA, 19 nt, Artificial Sequence
  Description of Artificial Sequence: Synthetic oligonucleotide
  Sense strand starting at position 3535 of SEQ ID NO: 1885673
gagacagaugcguaucuga

SEQ ID NO: 2359741 - RNA, 19 nt, Artificial Sequence
  Description of Artificial Sequence: Synthetic oligonucleotide
  Antisense strand to SEQ ID NO: 2359740
ucagauacgcaucugucuc

SEQ ID NO: 2359742 - RNA, 19 nt, Artificial Sequence
  Description of Artificial Sequence: Synthetic oligonucleotide
  Sense strand starting at position 3538 of SEQ ID NO: 1885673
acagaugcguaucugauuu

SEQ ID NO: 2359743 - RNA, 19 nt, Artificial Sequence
  Description of Artificial Sequence: Synthetic oligonucleotide
  Antisense strand to SEQ ID NO: 2359742
aaaucagauacgcaucugu

SEQ ID NO: 2359744 - RNA, 19 nt, Artificial Sequence
  Description of Artificial Sequence: Synthetic oligonucleotide
  Sense strand starting at position 3584 of SEQ ID NO: 1885673
cgcgaaagaauguaaucau

SEQ ID NO: 2359745 - RNA, 19 nt, Artificial Sequence
  Description of Artificial Sequence: Synthetic oligonucleotide
  Antisense strand to SEQ ID NO: 2359744
augauuacauucuuucgcg

SEQ ID NO: 2359746 - RNA, 19 nt, Artificial Sequence
  Description of Artificial Sequence: Synthetic oligonucleotide
  Sense strand starting at position 3593 of SEQ ID NO: 1885673
auguaaucauuuguguauc

SEQ ID NO: 2359747 - RNA, 19 nt, Artificial Sequence
  Description of Artificial Sequence: Synthetic oligonucleotide
  Antisense strand to SEQ ID NO: 2359746
gauacacaaaugauuacau

SEQ ID NO: 2359748 - RNA, 19 nt, Artificial Sequence
  Description of Artificial Sequence: Synthetic oligonucleotide
  Sense strand starting at position 3595 of SEQ ID NO: 1885673
guaaucauuuguguaucac

SEQ ID NO: 2359749 - RNA, 19 nt, Artificial Sequence
  Description of Artificial Sequence: Synthetic oligonucleotide
  Antisense strand to SEQ ID NO: 2359748
gugauacacaaaugauuac

SEQ ID NO: 2359750 - RNA, 19 nt, Artificial Sequence
  Description of Artificial Sequence: Synthetic oligonucleotide
  Sense strand starting at position 3690 of SEQ ID NO: 1885673
cuucuuacaugugcugaau

SEQ ID NO: 2359751 - RNA, 19 nt, Artificial Sequence
  Description of Artificial Sequence: Synthetic oligonucleotide
  Antisense strand to SEQ ID NO: 2359750
auucagcacauguaagaag

SEQ ID NO: 2359752 - RNA, 19 nt, Artificial Sequence
  Description of Artificial Sequence: Synthetic oligonucleotide
  Sense strand starting at position 3693 of SEQ ID NO: 1885673
cuuacaugugcugaaugau

SEQ ID NO: 2359753 - RNA, 19 nt, Artificial Sequence
  Description of Artificial Sequence: Synthetic oligonucleotide
  Antisense strand to SEQ ID NO: 2359752
aucauucagcacauguaag

SEQ ID NO: 2359754 - RNA, 19 nt, Artificial Sequence
  Description of Artificial Sequence: Synthetic oligonucleotide
  Sense strand starting at position 3702 of SEQ ID NO: 1885673
gcugaaugaugucucaugu

SEQ ID NO: 2359755 - RNA, 19 nt, Artificial Sequence
  Description of Artificial Sequence: Synthetic oligonucleotide
  Antisense strand to SEQ ID NO: 2359754
acaugagacaucauucagc

SEQ ID NO: 2359756 - RNA, 19 nt, Artificial Sequence
  Description of Artificial Sequence: Synthetic oligonucleotide
  Sense strand starting at position 3969 of SEQ ID NO: 1885673
ccugucacuuacguaugaa

SEQ ID NO: 2359757 - RNA, 19 nt, Artificial Sequence
  Description of Artificial Sequence: Synthetic oligonucleotide
  Antisense strand to SEQ ID NO: 2359756
uucauacguaagugacagg

SEQ ID NO: 2359758 - RNA, 19 nt, Artificial Sequence
  Description of Artificial Sequence: Synthetic oligonucleotide
  Sense strand starting at position 326 of SEQ ID NO: 1885674
ggacucugcacuuggaaau

SEQ ID NO: 2359759 - RNA, 19 nt, Artificial Sequence
  Description of Artificial Sequence: Synthetic oligonucleotide
  Antisense strand to SEQ ID NO: 2359758
auuuccaagugcagagucc

SEQ ID NO: 2359760 - RNA, 19 nt, Artificial Sequence
  Description of Artificial Sequence: Synthetic oligonucleotide
  Sense strand starting at position 654 of SEQ ID NO: 1885674
ccaggagcucacugaucaa

SEQ ID NO: 2359761 - RNA, 19 nt, Artificial Sequence
  Description of Artificial Sequence: Synthetic oligonucleotide
  Antisense strand to SEQ ID NO: 2359760
uugaucagugagcuccugg

SEQ ID NO: 2359762 - RNA, 19 nt, Artificial Sequence
  Description of Artificial Sequence: Synthetic oligonucleotide
  Sense strand starting at position 657 of SEQ ID NO: 1885674
ggagcucacugaucaacaa

SEQ ID NO: 2359763 - RNA, 19 nt, Artificial Sequence
  Description of Artificial Sequence: Synthetic oligonucleotide
  Antisense strand to SEQ ID NO: 2359762
uuguugaucagugagcucc

SEQ ID NO: 2359764 - RNA, 19 nt, Artificial Sequence
  Description of Artificial Sequence: Synthetic oligonucleotide
  Sense strand starting at position 671 of SEQ ID NO: 1885674
aacaaugagugauaaagga

SEQ ID NO: 2359765 - RNA, 19 nt, Artificial Sequence
  Description of Artificial Sequence: Synthetic oligonucleotide
  Antisense strand to SEQ ID NO: 2359764
uccuuuaucacucauuguu

SEQ ID NO: 2359766 - RNA, 19 nt, Artificial Sequence
  Description of Artificial Sequence: Synthetic oligonucleotide
  Sense strand starting at position 776 of SEQ ID NO: 1885674
ucacuaagucuccagguca

SEQ ID NO: 2359767 - RNA, 19 nt, Artificial Sequence
  Description of Artificial Sequence: Synthetic oligonucleotide
  Antisense strand to SEQ ID NO: 2359766
ugaccuggagacuuaguga

SEQ ID NO: 2359768 - RNA, 19 nt, Artificial Sequence
  Description of Artificial Sequence: Synthetic oligonucleotide
  Sense strand starting at position 842 of SEQ ID NO: 1885674
gggugcaaauaugacauaa

SEQ ID NO: 2359769 - RNA, 19 nt, Artificial Sequence
  Description of Artificial Sequence: Synthetic oligonucleotide
  Antisense strand to SEQ ID NO: 2359768
uuaugucauauuugcaccc

SEQ ID NO: 2359770 - RNA, 19 nt, Artificial Sequence
  Description of Artificial Sequence: Synthetic oligonucleotide
  Sense strand starting at position 953 of SEQ ID NO: 1885674
augccauucugucacacuu

SEQ ID NO: 2359771 - RNA, 19 nt, Artificial Sequence
  Description of Artificial Sequence: Synthetic oligonucleotide
  Antisense strand to SEQ ID NO: 2359770
aagugugacagaauggcau

SEQ ID NO: 2359772 - RNA, 19 nt, Artificial Sequence
  Description of Artificial Sequence: Synthetic oligonucleotide
  Sense strand starting at position 1107 of SEQ ID NO: 1885674
ggugggauucgauaucgga

SEQ ID NO: 2359773 - RNA, 19 nt, Artificial Sequence
  Description of Artificial Sequence: Synthetic oligonucleotide
  Antisense strand to SEQ ID NO: 2359772
uccgauaucgaaucccacc

SEQ ID NO: 2359774 - RNA, 19 nt, Artificial Sequence
  Description of Artificial Sequence: Synthetic oligonucleotide
  Sense strand starting at position 1110 of SEQ ID NO: 1885674
gggauucgauaucggaaag

SEQ ID NO: 2359775 - RNA, 19 nt, Artificial Sequence
  Description of Artificial Sequence: Synthetic oligonucleotide
  Antisense strand to SEQ ID NO: 2359774
cuuuccgauaucgaauccc

SEQ ID NO: 2359776 - RNA, 19 nt, Artificial Sequence
  Description of Artificial Sequence: Synthetic oligonucleotide
  Sense strand starting at position 1111 of SEQ ID NO: 1885674
ggauucgauaucggaaaga

SEQ ID NO: 2359777 - RNA, 19 nt, Artificial Sequence
  Description of Artificial Sequence: Synthetic oligonucleotide
  Antisense strand to SEQ ID NO: 2359776
ucuuuccgauaucgaaucc

SEQ ID NO: 2359778 - RNA, 19 nt, Artificial Sequence
  Description of Artificial Sequence: Synthetic oligonucleotide
  Sense strand starting at position 1216 of SEQ ID NO: 1885674
ggaggaggcuucuuccaca

SEQ ID NO: 2359779 - RNA, 19 nt, Artificial Sequence
  Description of Artificial Sequence: Synthetic oligonucleotide
  Antisense strand to SEQ ID NO: 2359778
uguggaagaagccuccucc

SEQ ID NO: 2359780 - RNA, 19 nt, Artificial Sequence
  Description of Artificial Sequence: Synthetic oligonucleotide
  Sense strand starting at position 1381 of SEQ ID NO: 1885674
gaaucaugcaggugggauc

SEQ ID NO: 2359781 - RNA, 19 nt, Artificial Sequence
  Description of Artificial Sequence: Synthetic oligonucleotide
  Antisense strand to SEQ ID NO: 2359780
gaucccaccugcaugauuc

SEQ ID NO: 2359782 - RNA, 19 nt, Artificial Sequence
  Description of Artificial Sequence: Synthetic oligonucleotide
  Sense strand starting at position 1388 of SEQ ID NO: 1885674
gcaggugggaucugauacu

SEQ ID NO: 2359783 - RNA, 19 nt, Artificial Sequence
  Description of Artificial Sequence: Synthetic oligonucleotide
  Antisense strand to SEQ ID NO: 2359782
aguaucagaucccaccugc

SEQ ID NO: 2359784 - RNA, 19 nt, Artificial Sequence
  Description of Artificial Sequence: Synthetic oligonucleotide
  Sense strand starting at position 1421 of SEQ ID NO: 1885674
cgugucuugugugucauga

SEQ ID NO: 2359785 - RNA, 19 nt, Artificial Sequence
  Description of Artificial Sequence: Synthetic oligonucleotide
  Antisense strand to SEQ ID NO: 2359784
ucaugacacacaagacacg

SEQ ID NO: 2359786 - RNA, 19 nt, Artificial Sequence
  Description of Artificial Sequence: Synthetic oligonucleotide
  Sense strand starting at position 1422 of SEQ ID NO: 1885674
gugucuugugugucaugau

SEQ ID NO: 2359787 - RNA, 19 nt, Artificial Sequence
  Description of Artificial Sequence: Synthetic oligonucleotide
  Antisense strand to SEQ ID NO: 2359786
aucaugacacacaagacac

SEQ ID NO: 2359788 - RNA, 19 nt, Artificial Sequence
  Description of Artificial Sequence: Synthetic oligonucleotide
  Sense strand starting at position 1425 of SEQ ID NO: 1885674
ucuugugugucaugauuuc

SEQ ID NO: 2359789 - RNA, 19 nt, Artificial Sequence
  Description of Artificial Sequence: Synthetic oligonucleotide
  Antisense strand to SEQ ID NO: 2359788
gaaaucaugacacacaaga

SEQ ID NO: 2359790 - RNA, 19 nt, Artificial Sequence
  Description of Artificial Sequence: Synthetic oligonucleotide
  Sense strand starting at position 1432 of SEQ ID NO: 1885674
ugucaugauuucugugaau

SEQ ID NO: 2359791 - RNA, 19 nt, Artificial Sequence
  Description of Artificial Sequence: Synthetic oligonucleotide
  Antisense strand to SEQ ID NO: 2359790
auucacagaaaucaugaca

SEQ ID NO: 2359792 - RNA, 19 nt, Artificial Sequence
  Description of Artificial Sequence: Synthetic oligonucleotide
  Sense strand starting at position 1435 of SEQ ID NO: 1885674
caugauuucugugaaugca

SEQ ID NO: 2359793 - RNA, 19 nt, Artificial Sequence
  Description of Artificial Sequence: Synthetic oligonucleotide
  Antisense strand to SEQ ID NO: 2359792
ugcauucacagaaaucaug

SEQ ID NO: 2359794 - RNA, 19 nt, Artificial Sequence
  Description of Artificial Sequence: Synthetic oligonucleotide
  Sense strand starting at position 1660 of SEQ ID NO: 1885674
guccucugccucgaugaca

SEQ ID NO: 2359795 - RNA, 19 nt, Artificial Sequence
  Description of Artificial Sequence: Synthetic oligonucleotide
  Antisense strand to SEQ ID NO: 2359794
ugucaucgaggcagaggac

SEQ ID NO: 2359796 - RNA, 19 nt, Artificial Sequence
  Description of Artificial Sequence: Synthetic oligonucleotide
  Sense strand starting at position 2006 of SEQ ID NO: 1885674
gugccaucggcucaagaac

SEQ ID NO: 2359797 - RNA, 19 nt, Artificial Sequence
  Description of Artificial Sequence: Synthetic oligonucleotide
  Antisense strand to SEQ ID NO: 2359796
guucuugagccgauggcac

SEQ ID NO: 2359798 - RNA, 19 nt, Artificial Sequence
  Description of Artificial Sequence: Synthetic oligonucleotide
  Sense strand starting at position 2222 of SEQ ID NO: 1885674
gguccuccaaggugagauu

SEQ ID NO: 2359799 - RNA, 19 nt, Artificial Sequence
  Description of Artificial Sequence: Synthetic oligonucleotide
  Antisense strand to SEQ ID NO: 2359798
aaucucaccuuggaggacc

SEQ ID NO: 2359800 - RNA, 19 nt, Artificial Sequence
  Description of Artificial Sequence: Synthetic oligonucleotide
  Sense strand starting at position 2235 of SEQ ID NO: 1885674
gagauuugauacugagaaa

SEQ ID NO: 2359801 - RNA, 19 nt, Artificial Sequence
  Description of Artificial Sequence: Synthetic oligonucleotide
  Antisense strand to SEQ ID NO: 2359800
uuucucaguaucaaaucuc

SEQ ID NO: 2359802 - RNA, 19 nt, Artificial Sequence
  Description of Artificial Sequence: Synthetic oligonucleotide
  Sense strand starting at position 2526 of SEQ ID NO: 1885674
gguggaauuugauaccgaa

SEQ ID NO: 2359803 - RNA, 19 nt, Artificial Sequence
  Description of Artificial Sequence: Synthetic oligonucleotide
  Antisense strand to SEQ ID NO: 2359802
uucgguaucaaauuccacc

SEQ ID NO: 2359804 - RNA, 19 nt, Artificial Sequence
  Description of Artificial Sequence: Synthetic oligonucleotide
  Sense strand starting at position 2620 of SEQ ID NO: 1885674
ggcucagaugcucggacua

SEQ ID NO: 2359805 - RNA, 19 nt, Artificial Sequence
  Description of Artificial Sequence: Synthetic oligonucleotide
  Antisense strand to SEQ ID NO: 2359804
uaguccgagcaucugagcc

SEQ ID NO: 2359806 - RNA, 19 nt, Artificial Sequence
  Description of Artificial Sequence: Synthetic oligonucleotide
  Sense strand starting at position 2654 of SEQ ID NO: 1885674
ggcggcugugcuugcagaa

SEQ ID NO: 2359807 - RNA, 19 nt, Artificial Sequence
  Description of Artificial Sequence: Synthetic oligonucleotide
  Antisense strand to SEQ ID NO: 2359806
uucugcaagcacagccgcc

SEQ ID NO: 2359808 - RNA, 19 nt, Artificial Sequence
  Description of Artificial Sequence: Synthetic oligonucleotide
  Sense strand starting at position 2786 of SEQ ID NO: 1885674
ucuagagacucuucccaga

SEQ ID NO: 2359809 - RNA, 19 nt, Artificial Sequence
  Description of Artificial Sequence: Synthetic oligonucleotide
  Antisense strand to SEQ ID NO: 2359808
ucugggaagagucucuaga

SEQ ID NO: 2359810 - RNA, 19 nt, Artificial Sequence
  Description of Artificial Sequence: Synthetic oligonucleotide
  Sense strand starting at position 2789 of SEQ ID NO: 1885674
agagacucuucccagaagu

SEQ ID NO: 2359811 - RNA, 19 nt, Artificial Sequence
  Description of Artificial Sequence: Synthetic oligonucleotide
  Antisense strand to SEQ ID NO: 2359810
acuucugggaagagucucu

SEQ ID NO: 2359812 - RNA, 19 nt, Artificial Sequence
  Description of Artificial Sequence: Synthetic oligonucleotide
  Sense strand starting at position 2800 of SEQ ID NO: 1885674
ccagaaguugagugcaaga

SEQ ID NO: 2359813 - RNA, 19 nt, Artificial Sequence
  Description of Artificial Sequence: Synthetic oligonucleotide
  Antisense strand to SEQ ID NO: 2359812
ucuugcacucaacuucugg

SEQ ID NO: 2359814 - RNA, 19 nt, Artificial Sequence
  Description of Artificial Sequence: Synthetic oligonucleotide
  Sense strand starting at position 2859 of SEQ ID NO: 1885674
ugggcaccuugcuaaagau

SEQ ID NO: 2359815 - RNA, 19 nt, Artificial Sequence
  Description of Artificial Sequence: Synthetic oligonucleotide
  Antisense strand to SEQ ID NO: 2359814
aucuuuagcaaggugccca

SEQ ID NO: 2359816 - RNA, 19 nt, Artificial Sequence
  Description of Artificial Sequence: Synthetic oligonucleotide
  Sense strand starting at position 2978 of SEQ ID NO: 1885674
gaggauuccuuuggcggga

SEQ ID NO: 2359817 - RNA, 19 nt, Artificial Sequence
  Description of Artificial Sequence: Synthetic oligonucleotide
  Antisense strand to SEQ ID NO: 2359816
ucccgccaaaggaauccuc

SEQ ID NO: 2359818 - RNA, 19 nt, Artificial Sequence
  Description of Artificial Sequence: Synthetic oligonucleotide
  Sense strand starting at position 3121 of SEQ ID NO: 1885674
ucugauuagccucauaaag

SEQ ID NO: 2359819 - RNA, 19 nt, Artificial Sequence
  Description of Artificial Sequence: Synthetic oligonucleotide
  Antisense strand to SEQ ID NO: 2359818
cuuuaugaggcuaaucaga

SEQ ID NO: 2359820 - RNA, 19 nt, Artificial Sequence
  Description of Artificial Sequence: Synthetic oligonucleotide
  Sense strand starting at position 3123 of SEQ ID NO: 1885674
ugauuagccucauaaagca

SEQ ID NO: 2359821 - RNA, 19 nt, Artificial Sequence
  Description of Artificial Sequence: Synthetic oligonucleotide
  Antisense strand to SEQ ID NO: 2359820
ugcuuuaugaggcuaauca

SEQ ID NO: 2359822 - RNA, 19 nt, Artificial Sequence
  Description of Artificial Sequence: Synthetic oligonucleotide
  Sense strand starting at position 3192 of SEQ ID NO: 1885674
gcaggugagucacagaugu

SEQ ID NO: 2359823 - RNA, 19 nt, Artificial Sequence
  Description of Artificial Sequence: Synthetic oligonucleotide
  Antisense strand to SEQ ID NO: 2359822
acaucugugacucaccugc

SEQ ID NO: 2359824 - RNA, 19 nt, Artificial Sequence
  Description of Artificial Sequence: Synthetic oligonucleotide
  Sense strand starting at position 3194 of SEQ ID NO: 1885674
aggugagucacagaugucu

SEQ ID NO: 2359825 - RNA, 19 nt, Artificial Sequence
  Description of Artificial Sequence: Synthetic oligonucleotide
  Antisense strand to SEQ ID NO: 2359824
agacaucugugacucaccu

SEQ ID NO: 2359826 - RNA, 19 nt, Artificial Sequence
  Description of Artificial Sequence: Synthetic oligonucleotide
  Sense strand starting at position 3196 of SEQ ID NO: 1885674
gugagucacagaugucuuc

SEQ ID NO: 2359827 - RNA, 19 nt, Artificial Sequence
  Description of Artificial Sequence: Synthetic oligonucleotide
  Antisense strand to SEQ ID NO: 2359826
gaagacaucugugacucac

SEQ ID NO: 2359828 - RNA, 19 nt, Artificial Sequence
  Description of Artificial Sequence: Synthetic oligonucleotide
  Sense strand starting at position 3401 of SEQ ID NO: 1885674
gaauccuuucccugacguu

SEQ ID NO: 2359829 - RNA, 19 nt, Artificial Sequence
  Description of Artificial Sequence: Synthetic oligonucleotide
  Antisense strand to SEQ ID NO: 2359828
aacgucagggaaaggauuc

SEQ ID NO: 2359830 - RNA, 19 nt, Artificial Sequence
  Description of Artificial Sequence: Synthetic oligonucleotide
  Sense strand starting at position 3479 of SEQ ID NO: 1885674
cgaggccugcuguaaagaa

SEQ ID NO: 2359831 - RNA, 19 nt, Artificial Sequence
  Description of Artificial Sequence: Synthetic oligonucleotide
  Antisense strand to SEQ ID NO: 2359830
uucuuuacagcaggccucg

SEQ ID NO: 2359832 - RNA, 19 nt, Artificial Sequence
  Description of Artificial Sequence: Synthetic oligonucleotide
  Sense strand starting at position 3537 of SEQ ID NO: 1885674
ggcacugaccugcaucaga

SEQ ID NO: 2359833 - RNA, 19 nt, Artificial Sequence
  Description of Artificial Sequence: Synthetic oligonucleotide
  Antisense strand to SEQ ID NO: 2359832
ucugaugcaggucagugcc

SEQ ID NO: 2359834 - RNA, 19 nt, Artificial Sequence
  Description of Artificial Sequence: Synthetic oligonucleotide
  Sense strand starting at position 3735 of SEQ ID NO: 1885674
ucuggaaauucuccaggua

SEQ ID NO: 2359835 - RNA, 19 nt, Artificial Sequence
  Description of Artificial Sequence: Synthetic oligonucleotide
  Antisense strand to SEQ ID NO: 2359834
uaccuggagaauuuccaga

SEQ ID NO: 2359836 - RNA, 19 nt, Artificial Sequence
  Description of Artificial Sequence: Synthetic oligonucleotide
  Sense strand starting at position 3779 of SEQ ID NO: 1885674
gugcaaugcuggucaccaa

SEQ ID NO: 2359837 - RNA, 19 nt, Artificial Sequence
  Description of Artificial Sequence: Synthetic oligonucleotide
  Antisense strand to SEQ ID NO: 2359836
uuggugaccagcauugcac

SEQ ID NO: 2359838 - RNA, 19 nt, Artificial Sequence
  Description of Artificial Sequence: Synthetic oligonucleotide
  Sense strand starting at position 215 of SEQ ID NO: 1885675
ugggaagcccucuaugacu

SEQ ID NO: 2359839 - RNA, 19 nt, Artificial Sequence
  Description of Artificial Sequence: Synthetic oligonucleotide
  Antisense strand to SEQ ID NO: 2359838
agucauagagggcuuccca

SEQ ID NO: 2359840 - RNA, 19 nt, Artificial Sequence
  Description of Artificial Sequence: Synthetic oligonucleotide
  Sense strand starting at position 220 of SEQ ID NO: 1885675
agcccucuaugacugaauu

SEQ ID NO: 2359841 - RNA, 19 nt, Artificial Sequence
  Description of Artificial Sequence: Synthetic oligonucleotide
  Antisense strand to SEQ ID NO: 2359840
aauucagucauagagggcu

SEQ ID NO: 2359842 - RNA, 19 nt, Artificial Sequence
  Description of Artificial Sequence: Synthetic oligonucleotide
  Sense strand starting at position 230 of SEQ ID NO: 1885675
gacugaauuugauauugag

SEQ ID NO: 2359843 - RNA, 19 nt, Artificial Sequence
  Description of Artificial Sequence: Synthetic oligonucleotide
  Antisense strand to SEQ ID NO: 2359842
cucaauaucaaauucaguc

SEQ ID NO: 2359844 - RNA, 19 nt, Artificial Sequence
  Description of Artificial Sequence: Synthetic oligonucleotide
  Sense strand starting at position 233 of SEQ ID NO: 1885675
ugaauuugauauugagaag

SEQ ID NO: 2359845 - RNA, 19 nt, Artificial Sequence
  Description of Artificial Sequence: Synthetic oligonucleotide
  Antisense strand to SEQ ID NO: 2359844
cuucucaauaucaaauuca

SEQ ID NO: 2359846 - RNA, 19 nt, Artificial Sequence
  Description of Artificial Sequence: Synthetic oligonucleotide
  Sense strand starting at position 387 of SEQ ID NO: 1885675
ugaggccugauguaguauu

SEQ ID NO: 2359847 - RNA, 19 nt, Artificial Sequence
  Description of Artificial Sequence: Synthetic oligonucleotide
  Antisense strand to SEQ ID NO: 2359846
aauacuacaucaggccuca

SEQ ID NO: 2359848 - RNA, 19 nt, Artificial Sequence
  Description of Artificial Sequence: Synthetic oligonucleotide
  Sense strand starting at position 420 of SEQ ID NO: 1885675
augcaaugucugccgcaga

SEQ ID NO: 2359849 - RNA, 19 nt, Artificial Sequence
  Description of Artificial Sequence: Synthetic oligonucleotide
  Antisense strand to SEQ ID NO: 2359848
ucugcggcagacauugcau

SEQ ID NO: 2359850 - RNA, 19 nt, Artificial Sequence
  Description of Artificial Sequence: Synthetic oligonucleotide
  Sense strand starting at position 475 of SEQ ID NO: 1885675
ggagaugaugcuggaacua

SEQ ID NO: 2359851 - RNA, 19 nt, Artificial Sequence
  Description of Artificial Sequence: Synthetic oligonucleotide
  Antisense strand to SEQ ID NO: 2359850
uaguuccagcaucaucucc

SEQ ID NO: 2359852 - RNA, 19 nt, Artificial Sequence
  Description of Artificial Sequence: Synthetic oligonucleotide
  Sense strand starting at position 488 of SEQ ID NO: 1885675
gaacuagugcuaugacuga

SEQ ID NO: 2359853 - RNA, 19 nt, Artificial Sequence
  Description of Artificial Sequence: Synthetic oligonucleotide
  Antisense strand to SEQ ID NO: 2359852
ucagucauagcacuaguuc

SEQ ID NO: 2359854 - RNA, 19 nt, Artificial Sequence
  Description of Artificial Sequence: Synthetic oligonucleotide
  Sense strand starting at position 492 of SEQ ID NO: 1885675
uagugcuaugacugacacu

SEQ ID NO: 2359855 - RNA, 19 nt, Artificial Sequence
  Description of Artificial Sequence: Synthetic oligonucleotide
  Antisense strand to SEQ ID NO: 2359854
agugucagucauagcacua

SEQ ID NO: 2359856 - RNA, 19 nt, Artificial Sequence
  Description of Artificial Sequence: Synthetic oligonucleotide
  Sense strand starting at position 649 of SEQ ID NO: 1885675
gugcuuugucuccuaagcu

SEQ ID NO: 2359857 - RNA, 19 nt, Artificial Sequence
  Description of Artificial Sequence: Synthetic oligonucleotide
  Antisense strand to SEQ ID NO: 2359856
agcuuaggagacaaagcac

SEQ ID NO: 2359858 - RNA, 19 nt, Artificial Sequence
  Description of Artificial Sequence: Synthetic oligonucleotide
  Sense strand starting at position 683 of SEQ ID NO: 1885675
ggagacuuuccaggcugaa

SEQ ID NO: 2359859 - RNA, 19 nt, Artificial Sequence
  Description of Artificial Sequence: Synthetic oligonucleotide
  Antisense strand to SEQ ID NO: 2359858
uucagccuggaaagucucc

SEQ ID NO: 2359860 - RNA, 19 nt, Artificial Sequence
  Description of Artificial Sequence: Synthetic oligonucleotide
  Sense strand starting at position 716 of SEQ ID NO: 1885675
agaaguagaccauguuaca

SEQ ID NO: 2359861 - RNA, 19 nt, Artificial Sequence
  Description of Artificial Sequence: Synthetic oligonucleotide
  Antisense strand to SEQ ID NO: 2359860
uguaacauggucuacuucu

SEQ ID NO: 2359862 - RNA, 19 nt, Artificial Sequence
  Description of Artificial Sequence: Synthetic oligonucleotide
  Sense strand starting at position 897 of SEQ ID NO: 1885675
ggaggcacuuccucuguaa

SEQ ID NO: 2359863 - RNA, 19 nt, Artificial Sequence
  Description of Artificial Sequence: Synthetic oligonucleotide
  Antisense strand to SEQ ID NO: 2359862
uuacagaggaagugccucc

SEQ ID NO: 2359864 - RNA, 19 nt, Artificial Sequence
  Description of Artificial Sequence: Synthetic oligonucleotide
  Sense strand starting at position 900 of SEQ ID NO: 1885675
ggcacuuccucuguaaaca

SEQ ID NO: 2359865 - RNA, 19 nt, Artificial Sequence
  Description of Artificial Sequence: Synthetic oligonucleotide
  Antisense strand to SEQ ID NO: 2359864
uguuuacagaggaagugcc

SEQ ID NO: 2359866 - RNA, 19 nt, Artificial Sequence
  Description of Artificial Sequence: Synthetic oligonucleotide
  Sense strand starting at position 985 of SEQ ID NO: 1885675
ccgagauggcuagacuuga

SEQ ID NO: 2359867 - RNA, 19 nt, Artificial Sequence
  Description of Artificial Sequence: Synthetic oligonucleotide
  Antisense strand to SEQ ID NO: 2359866
ucaagucuagccaucucgg

SEQ ID NO: 2359868 - RNA, 19 nt, Artificial Sequence
  Description of Artificial Sequence: Synthetic oligonucleotide
  Sense strand starting at position 989 of SEQ ID NO: 1885675
gauggcuagacuugagaug

SEQ ID NO: 2359869 - RNA, 19 nt, Artificial Sequence
  Description of Artificial Sequence: Synthetic oligonucleotide
  Antisense strand to SEQ ID NO: 2359868
caucucaagucuagccauc

SEQ ID NO: 2359870 - RNA, 19 nt, Artificial Sequence
  Description of Artificial Sequence: Synthetic oligonucleotide
  Sense strand starting at position 1048 of SEQ ID NO: 1885675
cgagucagugcgucuucaa

SEQ ID NO: 2359871 - RNA, 19 nt, Artificial Sequence
  Description of Artificial Sequence: Synthetic oligonucleotide
  Antisense strand to SEQ ID NO: 2359870
uugaagacgcacugacucg

SEQ ID NO: 2359872 - RNA, 19 nt, Artificial Sequence
  Description of Artificial Sequence: Synthetic oligonucleotide
  Sense strand starting at position 1124 of SEQ ID NO: 1885675
ccugaagucaucugaggag

SEQ ID NO: 2359873 - RNA, 19 nt, Artificial Sequence
  Description of Artificial Sequence: Synthetic oligonucleotide
  Antisense strand to SEQ ID NO: 2359872
cuccucagaugacuucagg

SEQ ID NO: 2359874 - RNA, 19 nt, Artificial Sequence
  Description of Artificial Sequence: Synthetic oligonucleotide
  Sense strand starting at position 1302 of SEQ ID NO: 1885675
guguuuggcacugaggaga

SEQ ID NO: 2359875 - RNA, 19 nt, Artificial Sequence
  Description of Artificial Sequence: Synthetic oligonucleotide
  Antisense strand to SEQ ID NO: 2359874
ucuccucagugccaaacac

SEQ ID NO: 2359876 - RNA, 19 nt, Artificial Sequence
  Description of Artificial Sequence: Synthetic oligonucleotide
  Sense strand starting at position 1429 of SEQ ID NO: 1885675
aggcuuucuccagggaggu

SEQ ID NO: 2359877 - RNA, 19 nt, Artificial Sequence
  Description of Artificial Sequence: Synthetic oligonucleotide
  Antisense strand to SEQ ID NO: 2359876
accucccuggagaaagccu

SEQ ID NO: 2359878 - RNA, 19 nt, Artificial Sequence
  Description of Artificial Sequence: Synthetic oligonucleotide
  Sense strand starting at position 1678 of SEQ ID NO: 1885675
gucauugagcaccauggaa

SEQ ID NO: 2359879 - RNA, 19 nt, Artificial Sequence
  Description of Artificial Sequence: Synthetic oligonucleotide
  Antisense strand to SEQ ID NO: 2359878
uuccauggugcucaaugac

SEQ ID NO: 2359880 - RNA, 19 nt, Artificial Sequence
  Description of Artificial Sequence: Synthetic oligonucleotide
  Sense strand starting at position 1775 of SEQ ID NO: 1885675
gagcgagauuaugccauuu

SEQ ID NO: 2359881 - RNA, 19 nt, Artificial Sequence
  Description of Artificial Sequence: Synthetic oligonucleotide
  Antisense strand to SEQ ID NO: 2359880
aaauggcauaaucucgcuc

SEQ ID NO: 2359882 - RNA, 19 nt, Artificial Sequence
  Description of Artificial Sequence: Synthetic oligonucleotide
  Sense strand starting at position 1837 of SEQ ID NO: 1885675
ucgggugucauggagaagu

SEQ ID NO: 2359883 - RNA, 19 nt, Artificial Sequence
  Description of Artificial Sequence: Synthetic oligonucleotide
  Antisense strand to SEQ ID NO: 2359882
acuucuccaugacacccga

SEQ ID NO: 2359884 - RNA, 19 nt, Artificial Sequence
  Description of Artificial Sequence: Synthetic oligonucleotide
  Sense strand starting at position 2004 of SEQ ID NO: 1885675
cagagaugccgaggacaaa

SEQ ID NO: 2359885 - RNA, 19 nt, Artificial Sequence
  Description of Artificial Sequence: Synthetic oligonucleotide
  Antisense strand to SEQ ID NO: 2359884
uuuguccucggcaucucug

SEQ ID NO: 2359886 - RNA, 19 nt, Artificial Sequence
  Description of Artificial Sequence: Synthetic oligonucleotide
  Sense strand starting at position 2155 of SEQ ID NO: 1885675
acaugaaugcucgaagcag

SEQ ID NO: 2359887 - RNA, 19 nt, Artificial Sequence
  Description of Artificial Sequence: Synthetic oligonucleotide
  Antisense strand to SEQ ID NO: 2359886
cugcuucgagcauucaugu

SEQ ID NO: 2359888 - RNA, 19 nt, Artificial Sequence
  Description of Artificial Sequence: Synthetic oligonucleotide
  Sense strand starting at position 2475 of SEQ ID NO: 1885675
accugaggcccagaucuua

SEQ ID NO: 2359889 - RNA, 19 nt, Artificial Sequence
  Description of Artificial Sequence: Synthetic oligonucleotide
  Antisense strand to SEQ ID NO: 2359888
uaagaucugggccucaggu

SEQ ID NO: 2359890 - RNA, 19 nt, Artificial Sequence
  Description of Artificial Sequence: Synthetic oligonucleotide
  Sense strand starting at position 2497 of SEQ ID NO: 1885675
auuagugagcucuagucuu

SEQ ID NO: 2359891 - RNA, 19 nt, Artificial Sequence
  Description of Artificial Sequence: Synthetic oligonucleotide
  Antisense strand to SEQ ID NO: 2359890
aagacuagagcucacuaau

SEQ ID NO: 2359892 - RNA, 19 nt, Artificial Sequence
  Description of Artificial Sequence: Synthetic oligonucleotide
  Sense strand starting at position 2507 of SEQ ID NO: 1885675
ucuagucuugggcauuaaa

SEQ ID NO: 2359893 - RNA, 19 nt, Artificial Sequence
  Description of Artificial Sequence: Synthetic oligonucleotide
  Antisense strand to SEQ ID NO: 2359892
uuuaaugcccaagacuaga

SEQ ID NO: 2359894 - RNA, 19 nt, Artificial Sequence
  Description of Artificial Sequence: Synthetic oligonucleotide
  Sense strand starting at position 2600 of SEQ ID NO: 1885675
auuagauucugagcaguaa

SEQ ID NO: 2359895 - RNA, 19 nt, Artificial Sequence
  Description of Artificial Sequence: Synthetic oligonucleotide
  Antisense strand to SEQ ID NO: 2359894
uuacugcucagaaucuaau

SEQ ID NO: 2359896 - RNA, 19 nt, Artificial Sequence
  Description of Artificial Sequence: Synthetic oligonucleotide
  Sense strand starting at position 2601 of SEQ ID NO: 1885675
uuagauucugagcaguaac

SEQ ID NO: 2359897 - RNA, 19 nt, Artificial Sequence
  Description of Artificial Sequence: Synthetic oligonucleotide
  Antisense strand to SEQ ID NO: 2359896
guuacugcucagaaucuaa

SEQ ID NO: 2359898 - RNA, 19 nt, Artificial Sequence
  Description of Artificial Sequence: Synthetic oligonucleotide
  Sense strand starting at position 2750 of SEQ ID NO: 1885675
agagguggacauugguaua

SEQ ID NO: 2359899 - RNA, 19 nt, Artificial Sequence
  Description of Artificial Sequence: Synthetic oligonucleotide
  Antisense strand to SEQ ID NO: 2359898
uauaccaauguccaccucu

SEQ ID NO: 2359900 - RNA, 19 nt, Artificial Sequence
  Description of Artificial Sequence: Synthetic oligonucleotide
  Sense strand starting at position 3174 of SEQ ID NO: 1885675
cgaggauggauuggauacu

SEQ ID NO: 2359901 - RNA, 19 nt, Artificial Sequence
  Description of Artificial Sequence: Synthetic oligonucleotide
  Antisense strand to SEQ ID NO: 2359900
aguauccaauccauccucg

SEQ ID NO: 2359902 - RNA, 19 nt, Artificial Sequence
  Description of Artificial Sequence: Synthetic oligonucleotide
  Sense strand starting at position 3191 of SEQ ID NO: 1885675
cugagaguuaguggaccau

SEQ ID NO: 2359903 - RNA, 19 nt, Artificial Sequence
  Description of Artificial Sequence: Synthetic oligonucleotide
  Antisense strand to SEQ ID NO: 2359902
augguccacuaacucucag

SEQ ID NO: 2359904 - RNA, 19 nt, Artificial Sequence
  Description of Artificial Sequence: Synthetic oligonucleotide
  Sense strand starting at position 3332 of SEQ ID NO: 1885675
gcuuucugaggcuggauuu

SEQ ID NO: 2359905 - RNA, 19 nt, Artificial Sequence
  Description of Artificial Sequence: Synthetic oligonucleotide
  Antisense strand to SEQ ID NO: 2359904
aaauccagccucagaaagc

SEQ ID NO: 2359906 - RNA, 19 nt, Artificial Sequence
  Description of Artificial Sequence: Synthetic oligonucleotide
  Sense strand starting at position 3431 of SEQ ID NO: 1885675
ccucuacccuaagugguaa

SEQ ID NO: 2359907 - RNA, 19 nt, Artificial Sequence
  Description of Artificial Sequence: Synthetic oligonucleotide
  Antisense strand to SEQ ID NO: 2359906
uuaccacuuaggguagagg

SEQ ID NO: 2359908 - RNA, 19 nt, Artificial Sequence
  Description of Artificial Sequence: Synthetic oligonucleotide
  Sense strand starting at position 3442 of SEQ ID NO: 1885675
agugguaauuccuccagga

SEQ ID NO: 2359909 - RNA, 19 nt, Artificial Sequence
  Description of Artificial Sequence: Synthetic oligonucleotide
  Antisense strand to SEQ ID NO: 2359908
uccuggaggaauuaccacu

SEQ ID NO: 2359910 - RNA, 19 nt, Artificial Sequence
  Description of Artificial Sequence: Synthetic oligonucleotide
  Sense strand starting at position 3464 of SEQ ID NO: 1885675
ccaugucaacuuggaaaga

SEQ ID NO: 2359911 - RNA, 19 nt, Artificial Sequence
  Description of Artificial Sequence: Synthetic oligonucleotide
  Antisense strand to SEQ ID NO: 2359910
ucuuuccaaguugacaugg

SEQ ID NO: 2359912 - RNA, 19 nt, Artificial Sequence
  Description of Artificial Sequence: Synthetic oligonucleotide
  Sense strand starting at position 3523 of SEQ ID NO: 1885675
ccauuauguggucaacuau

SEQ ID NO: 2359913 - RNA, 19 nt, Artificial Sequence
  Description of Artificial Sequence: Synthetic oligonucleotide
  Antisense strand to SEQ ID NO: 2359912
auaguugaccacauaaugg

SEQ ID NO: 2359914 - RNA, 19 nt, Artificial Sequence
  Description of Artificial Sequence: Synthetic oligonucleotide
  Sense strand starting at position 3847 of SEQ ID NO: 1885675
uuuguuagccuccagggaa

SEQ ID NO: 2359915 - RNA, 19 nt, Artificial Sequence
  Description of Artificial Sequence: Synthetic oligonucleotide
  Antisense strand to SEQ ID NO: 2359914
uucccuggaggcuaacaaa

SEQ ID NO: 2359916 - RNA, 19 nt, Artificial Sequence
  Description of Artificial Sequence: Synthetic oligonucleotide
  Sense strand starting at position 3966 of SEQ ID NO: 1885675
aguccuaacuccuuaggaa

SEQ ID NO: 2359917 - RNA, 19 nt, Artificial Sequence
  Description of Artificial Sequence: Synthetic oligonucleotide
  Antisense strand to SEQ ID NO: 2359916
uuccuaaggaguuaggacu

SEQ ID NO: 2359918 - RNA, 19 nt, Artificial Sequence
  Description of Artificial Sequence: Synthetic oligonucleotide
  Sense strand starting at position 189 of SEQ ID NO: 1885676
ccaggagcucacugaucaa

SEQ ID NO: 2359919 - RNA, 19 nt, Artificial Sequence
  Description of Artificial Sequence: Synthetic oligonucleotide
  Antisense strand to SEQ ID NO: 2359918
uugaucagugagcuccugg

SEQ ID NO: 2359920 - RNA, 19 nt, Artificial Sequence
  Description of Artificial Sequence: Synthetic oligonucleotide
  Sense strand starting at position 192 of SEQ ID NO: 1885676
ggagcucacugaucaacaa

SEQ ID NO: 2359921 - RNA, 19 nt, Artificial Sequence
  Description of Artificial Sequence: Synthetic oligonucleotide
  Antisense strand to SEQ ID NO: 2359920
uuguugaucagugagcucc

SEQ ID NO: 2359922 - RNA, 19 nt, Artificial Sequence
  Description of Artificial Sequence: Synthetic oligonucleotide
  Sense strand starting at position 206 of SEQ ID NO: 1885676
aacaaugagugauaaagga

SEQ ID NO: 2359923 - RNA, 19 nt, Artificial Sequence
  Description of Artificial Sequence: Synthetic oligonucleotide
  Antisense strand to SEQ ID NO: 2359922
uccuuuaucacucauuguu

SEQ ID NO: 2359924 - RNA, 19 nt, Artificial Sequence
  Description of Artificial Sequence: Synthetic oligonucleotide
  Sense strand starting at position 311 of SEQ ID NO: 1885676
ucacuaagucuccagguca

SEQ ID NO: 2359925 - RNA, 19 nt, Artificial Sequence
  Description of Artificial Sequence: Synthetic oligonucleotide
  Antisense strand to SEQ ID NO: 2359924
ugaccuggagacuuaguga

SEQ ID NO: 2359926 - RNA, 19 nt, Artificial Sequence
  Description of Artificial Sequence: Synthetic oligonucleotide
  Sense strand starting at position 642 of SEQ ID NO: 1885676
ggugggauucgauaucgga

SEQ ID NO: 2359927 - RNA, 19 nt, Artificial Sequence
  Description of Artificial Sequence: Synthetic oligonucleotide
  Antisense strand to SEQ ID NO: 2359926
uccgauaucgaaucccacc

SEQ ID NO: 2359928 - RNA, 19 nt, Artificial Sequence
  Description of Artificial Sequence: Synthetic oligonucleotide
  Sense strand starting at position 646 of SEQ ID NO: 1885676
ggauucgauaucggaaaga

SEQ ID NO: 2359929 - RNA, 19 nt, Artificial Sequence
  Description of Artificial Sequence: Synthetic oligonucleotide
  Antisense strand to SEQ ID NO: 2359928
ucuuuccgauaucgaaucc

SEQ ID NO: 2359930 - RNA, 19 nt, Artificial Sequence
  Description of Artificial Sequence: Synthetic oligonucleotide
  Sense strand starting at position 751 of SEQ ID NO: 1885676
ggaggaggcuucuuccaca

SEQ ID NO: 2359931 - RNA, 19 nt, Artificial Sequence
  Description of Artificial Sequence: Synthetic oligonucleotide
  Antisense strand to SEQ ID NO: 2359930
uguggaagaagccuccucc

SEQ ID NO: 2359932 - RNA, 19 nt, Artificial Sequence
  Description of Artificial Sequence: Synthetic oligonucleotide
  Sense strand starting at position 916 of SEQ ID NO: 1885676
gaaucaugcaggugggauc

SEQ ID NO: 2359933 - RNA, 19 nt, Artificial Sequence
  Description of Artificial Sequence: Synthetic oligonucleotide
  Antisense strand to SEQ ID NO: 2359932
gaucccaccugcaugauuc

SEQ ID NO: 2359934 - RNA, 19 nt, Artificial Sequence
  Description of Artificial Sequence: Synthetic oligonucleotide
  Sense strand starting at position 923 of SEQ ID NO: 1885676
gcaggugggaucugauacu

SEQ ID NO: 2359935 - RNA, 19 nt, Artificial Sequence
  Description of Artificial Sequence: Synthetic oligonucleotide
  Antisense strand to SEQ ID NO: 2359934
aguaucagaucccaccugc

SEQ ID NO: 2359936 - RNA, 19 nt, Artificial Sequence
  Description of Artificial Sequence: Synthetic oligonucleotide
  Sense strand starting at position 957 of SEQ ID NO: 1885676
gugucuugugugucaugau

SEQ ID NO: 2359937 - RNA, 19 nt, Artificial Sequence
  Description of Artificial Sequence: Synthetic oligonucleotide
  Antisense strand to SEQ ID NO: 2359936
aucaugacacacaagacac

SEQ ID NO: 2359938 - RNA, 19 nt, Artificial Sequence
  Description of Artificial Sequence: Synthetic oligonucleotide
  Sense strand starting at position 970 of SEQ ID NO: 1885676
caugauuucugugaaugca

SEQ ID NO: 2359939 - RNA, 19 nt, Artificial Sequence
  Description of Artificial Sequence: Synthetic oligonucleotide
  Antisense strand to SEQ ID NO: 2359938
ugcauucacagaaaucaug

SEQ ID NO: 2359940 - RNA, 19 nt, Artificial Sequence
  Description of Artificial Sequence: Synthetic oligonucleotide
  Sense strand starting at position 1195 of SEQ ID NO: 1885676
guccucugccucgaugaca

SEQ ID NO: 2359941 - RNA, 19 nt, Artificial Sequence
  Description of Artificial Sequence: Synthetic oligonucleotide
  Antisense strand to SEQ ID NO: 2359940
ugucaucgaggcagaggac

SEQ ID NO: 2359942 - RNA, 19 nt, Artificial Sequence
  Description of Artificial Sequence: Synthetic oligonucleotide
  Sense strand starting at position 1541 of SEQ ID NO: 1885676
gugccaucggcucaagaac

SEQ ID NO: 2359943 - RNA, 19 nt, Artificial Sequence
  Description of Artificial Sequence: Synthetic oligonucleotide
  Antisense strand to SEQ ID NO: 2359942
guucuugagccgauggcac

SEQ ID NO: 2359944 - RNA, 19 nt, Artificial Sequence
  Description of Artificial Sequence: Synthetic oligonucleotide
  Sense strand starting at position 1757 of SEQ ID NO: 1885676
gguccuccaaggugagauu

SEQ ID NO: 2359945 - RNA, 19 nt, Artificial Sequence
  Description of Artificial Sequence: Synthetic oligonucleotide
  Antisense strand to SEQ ID NO: 2359944
aaucucaccuuggaggacc

SEQ ID NO: 2359946 - RNA, 19 nt, Artificial Sequence
  Description of Artificial Sequence: Synthetic oligonucleotide
  Sense strand starting at position 1770 of SEQ ID NO: 1885676
gagauuugauacugagaaa

SEQ ID NO: 2359947 - RNA, 19 nt, Artificial Sequence
  Description of Artificial Sequence: Synthetic oligonucleotide
  Antisense strand to SEQ ID NO: 2359946
uuucucaguaucaaaucuc

SEQ ID NO: 2359948 - RNA, 19 nt, Artificial Sequence
  Description of Artificial Sequence: Synthetic oligonucleotide
  Sense strand starting at position 2061 of SEQ ID NO: 1885676
gguggaauuugauaccgaa

SEQ ID NO: 2359949 - RNA, 19 nt, Artificial Sequence
  Description of Artificial Sequence: Synthetic oligonucleotide
  Antisense strand to SEQ ID NO: 2359948
uucgguaucaaauuccacc

SEQ ID NO: 2359950 - RNA, 19 nt, Artificial Sequence
  Description of Artificial Sequence: Synthetic oligonucleotide
  Sense strand starting at position 2155 of SEQ ID NO: 1885676
ggcucagaugcucggacua

SEQ ID NO: 2359951 - RNA, 19 nt, Artificial Sequence
  Description of Artificial Sequence: Synthetic oligonucleotide
  Antisense strand to SEQ ID NO: 2359950
uaguccgagcaucugagcc

SEQ ID NO: 2359952 - RNA, 19 nt, Artificial Sequence
  Description of Artificial Sequence: Synthetic oligonucleotide
  Sense strand starting at position 2321 of SEQ ID NO: 1885676
ucuagagacucuucccaga

SEQ ID NO: 2359953 - RNA, 19 nt, Artificial Sequence
  Description of Artificial Sequence: Synthetic oligonucleotide
  Antisense strand to SEQ ID NO: 2359952
ucugggaagagucucuaga

SEQ ID NO: 2359954 - RNA, 19 nt, Artificial Sequence
  Description of Artificial Sequence: Synthetic oligonucleotide
  Sense strand starting at position 2335 of SEQ ID NO: 1885676
ccagaaguugagugcaaga

SEQ ID NO: 2359955 - RNA, 19 nt, Artificial Sequence
  Description of Artificial Sequence: Synthetic oligonucleotide
  Antisense strand to SEQ ID NO: 2359954
ucuugcacucaacuucugg

SEQ ID NO: 2359956 - RNA, 19 nt, Artificial Sequence
  Description of Artificial Sequence: Synthetic oligonucleotide
  Sense strand starting at position 2656 of SEQ ID NO: 1885676
ucugauuagccucauaaag

SEQ ID NO: 2359957 - RNA, 19 nt, Artificial Sequence
  Description of Artificial Sequence: Synthetic oligonucleotide
  Antisense strand to SEQ ID NO: 2359956
cuuuaugaggcuaaucaga

SEQ ID NO: 2359958 - RNA, 19 nt, Artificial Sequence
  Description of Artificial Sequence: Synthetic oligonucleotide
  Sense strand starting at position 2729 of SEQ ID NO: 1885676
aggugagucacagaugucu

SEQ ID NO: 2359959 - RNA, 19 nt, Artificial Sequence
  Description of Artificial Sequence: Synthetic oligonucleotide
  Antisense strand to SEQ ID NO: 2359958
agacaucugugacucaccu

SEQ ID NO: 2359960 - RNA, 19 nt, Artificial Sequence
  Description of Artificial Sequence: Synthetic oligonucleotide
  Sense strand starting at position 2731 of SEQ ID NO: 1885676
gugagucacagaugucuuc

SEQ ID NO: 2359961 - RNA, 19 nt, Artificial Sequence
  Description of Artificial Sequence: Synthetic oligonucleotide
  Antisense strand to SEQ ID NO: 2359960
gaagacaucugugacucac

SEQ ID NO: 2359962 - RNA, 19 nt, Artificial Sequence
  Description of Artificial Sequence: Synthetic oligonucleotide
  Sense strand starting at position 2936 of SEQ ID NO: 1885676
gaauccuuucccugacguu

SEQ ID NO: 2359963 - RNA, 19 nt, Artificial Sequence
  Description of Artificial Sequence: Synthetic oligonucleotide
  Antisense strand to SEQ ID NO: 2359962
aacgucagggaaaggauuc

SEQ ID NO: 2359964 - RNA, 19 nt, Artificial Sequence
  Description of Artificial Sequence: Synthetic oligonucleotide
  Sense strand starting at position 3014 of SEQ ID NO: 1885676
cgaggccugcuguaaagaa

SEQ ID NO: 2359965 - RNA, 19 nt, Artificial Sequence
  Description of Artificial Sequence: Synthetic oligonucleotide
  Antisense strand to SEQ ID NO: 2359964
uucuuuacagcaggccucg

SEQ ID NO: 2359966 - RNA, 19 nt, Artificial Sequence
  Description of Artificial Sequence: Synthetic oligonucleotide
  Sense strand starting at position 3072 of SEQ ID NO: 1885676
ggcacugaccugcaucaga

SEQ ID NO: 2359967 - RNA, 19 nt, Artificial Sequence
  Description of Artificial Sequence: Synthetic oligonucleotide
  Antisense strand to SEQ ID NO: 2359966
ucugaugcaggucagugcc

SEQ ID NO: 2359968 - RNA, 19 nt, Artificial Sequence
  Description of Artificial Sequence: Synthetic oligonucleotide
  Sense strand starting at position 3270 of SEQ ID NO: 1885676
ucuggaaauucuccaggua

SEQ ID NO: 2359969 - RNA, 19 nt, Artificial Sequence
  Description of Artificial Sequence: Synthetic oligonucleotide
  Antisense strand to SEQ ID NO: 2359968
uaccuggagaauuuccaga

SEQ ID NO: 2359970 - RNA, 19 nt, Artificial Sequence
  Description of Artificial Sequence: Synthetic oligonucleotide
  Sense strand starting at position 3314 of SEQ ID NO: 1885676
gugcaaugcuggucaccaa

SEQ ID NO: 2359971 - RNA, 19 nt, Artificial Sequence
  Description of Artificial Sequence: Synthetic oligonucleotide
  Antisense strand to SEQ ID NO: 2359970
uuggugaccagcauugcac

SEQ ID NO: 2359972 - RNA, 19 nt, Artificial Sequence
  Description of Artificial Sequence: Synthetic oligonucleotide
  Sense strand starting at position 3523 of SEQ ID NO: 1885676
cccagaauguuccuggaug

SEQ ID NO: 2359973 - RNA, 19 nt, Artificial Sequence
  Description of Artificial Sequence: Synthetic oligonucleotide
  Antisense strand to SEQ ID NO: 2359972
cauccaggaacauucuggg

SEQ ID NO: 2359974 - RNA, 19 nt, Artificial Sequence
  Description of Artificial Sequence: Synthetic oligonucleotide
  Sense strand starting at position 3552 of SEQ ID NO: 1885676
caucaauagccuuggaagu

SEQ ID NO: 2359975 - RNA, 19 nt, Artificial Sequence
  Description of Artificial Sequence: Synthetic oligonucleotide
  Antisense strand to SEQ ID NO: 2359974
acuuccaaggcuauugaug

SEQ ID NO: 2359976 - RNA, 19 nt, Artificial Sequence
  Description of Artificial Sequence: Synthetic oligonucleotide
  Sense strand starting at position 3565 of SEQ ID NO: 1885676
ggaagugugaaaggaaagu

SEQ ID NO: 2359977 - RNA, 19 nt, Artificial Sequence
  Description of Artificial Sequence: Synthetic oligonucleotide
  Antisense strand to SEQ ID NO: 2359976
acuuuccuuucacacuucc

SEQ ID NO: 2359978 - RNA, 19 nt, Artificial Sequence
  Description of Artificial Sequence: Synthetic oligonucleotide
  Sense strand starting at position 3621 of SEQ ID NO: 1885676
cuggaagcugcucaggaua

SEQ ID NO: 2359979 - RNA, 19 nt, Artificial Sequence
  Description of Artificial Sequence: Synthetic oligonucleotide
  Antisense strand to SEQ ID NO: 2359978
uauccugagcagcuuccag

SEQ ID NO: 2359980 - RNA, 19 nt, Artificial Sequence
  Description of Artificial Sequence: Synthetic oligonucleotide
  Sense strand starting at position 3635 of SEQ ID NO: 1885676
ggauaaaccugccucucau

SEQ ID NO: 2359981 - RNA, 19 nt, Artificial Sequence
  Description of Artificial Sequence: Synthetic oligonucleotide
  Antisense strand to SEQ ID NO: 2359980
augagaggcagguuuaucc

SEQ ID NO: 2359982 - RNA, 19 nt, Artificial Sequence
  Description of Artificial Sequence: Synthetic oligonucleotide
  Sense strand starting at position 3682 of SEQ ID NO: 1885676
gagacagaugcguaucuga

SEQ ID NO: 2359983 - RNA, 19 nt, Artificial Sequence
  Description of Artificial Sequence: Synthetic oligonucleotide
  Antisense strand to SEQ ID NO: 2359982
ucagauacgcaucugucuc

SEQ ID NO: 2359984 - RNA, 19 nt, Artificial Sequence
  Description of Artificial Sequence: Synthetic oligonucleotide
  Sense strand starting at position 3685 of SEQ ID NO: 1885676
acagaugcguaucugauuu

SEQ ID NO: 2359985 - RNA, 19 nt, Artificial Sequence
  Description of Artificial Sequence: Synthetic oligonucleotide
  Antisense strand to SEQ ID NO: 2359984
aaaucagauacgcaucugu

SEQ ID NO: 2359986 - RNA, 19 nt, Artificial Sequence
  Description of Artificial Sequence: Synthetic oligonucleotide
  Sense strand starting at position 3731 of SEQ ID NO: 1885676
cgcgaaagaauguaaucau

SEQ ID NO: 2359987 - RNA, 19 nt, Artificial Sequence
  Description of Artificial Sequence: Synthetic oligonucleotide
  Antisense strand to SEQ ID NO: 2359986
augauuacauucuuucgcg

SEQ ID NO: 2359988 - RNA, 19 nt, Artificial Sequence
  Description of Artificial Sequence: Synthetic oligonucleotide
  Sense strand starting at position 3740 of SEQ ID NO: 1885676
auguaaucauuuguguauc

SEQ ID NO: 2359989 - RNA, 19 nt, Artificial Sequence
  Description of Artificial Sequence: Synthetic oligonucleotide
  Antisense strand to SEQ ID NO: 2359988
gauacacaaaugauuacau

SEQ ID NO: 2359990 - RNA, 19 nt, Artificial Sequence
  Description of Artificial Sequence: Synthetic oligonucleotide
  Sense strand starting at position 3742 of SEQ ID NO: 1885676
guaaucauuuguguaucac

SEQ ID NO: 2359991 - RNA, 19 nt, Artificial Sequence
  Description of Artificial Sequence: Synthetic oligonucleotide
  Antisense strand to SEQ ID NO: 2359990
gugauacacaaaugauuac

SEQ ID NO: 2359992 - RNA, 19 nt, Artificial Sequence
  Description of Artificial Sequence: Synthetic oligonucleotide
  Sense strand starting at position 3837 of SEQ ID NO: 1885676
cuucuuacaugugcugaau

SEQ ID NO: 2359993 - RNA, 19 nt, Artificial Sequence
  Description of Artificial Sequence: Synthetic oligonucleotide
  Antisense strand to SEQ ID NO: 2359992
auucagcacauguaagaag

SEQ ID NO: 2359994 - RNA, 19 nt, Artificial Sequence
  Description of Artificial Sequence: Synthetic oligonucleotide
  Sense strand starting at position 3840 of SEQ ID NO: 1885676
cuuacaugugcugaaugau

SEQ ID NO: 2359995 - RNA, 19 nt, Artificial Sequence
  Description of Artificial Sequence: Synthetic oligonucleotide
  Antisense strand to SEQ ID NO: 2359994
aucauucagcacauguaag

SEQ ID NO: 2359996 - RNA, 19 nt, Artificial Sequence
  Description of Artificial Sequence: Synthetic oligonucleotide
  Sense strand starting at position 3849 of SEQ ID NO: 1885676
gcugaaugaugucucaugu

SEQ ID NO: 2359997 - RNA, 19 nt, Artificial Sequence
  Description of Artificial Sequence: Synthetic oligonucleotide
  Antisense strand to SEQ ID NO: 2359996
acaugagacaucauucagc

SEQ ID NO: 2359998 - RNA, 19 nt, Artificial Sequence
  Description of Artificial Sequence: Synthetic oligonucleotide
  Sense strand starting at position 91 of SEQ ID NO: 1885677
ugugcuaaugcuguaaguu

SEQ ID NO: 2359999 - RNA, 19 nt, Artificial Sequence
  Description of Artificial Sequence: Synthetic oligonucleotide
  Antisense strand to SEQ ID NO: 2359998
aacuuacagcauuagcaca

SEQ ID NO: 2360000 - RNA, 19 nt, Artificial Sequence
  Description of Artificial Sequence: Synthetic oligonucleotide
  Sense strand starting at position 241 of SEQ ID NO: 1885677
uuugauaaaugcuuacagu

SEQ ID NO: 2360001 - RNA, 19 nt, Artificial Sequence
  Description of Artificial Sequence: Synthetic oligonucleotide
  Antisense strand to SEQ ID NO: 2360000
acuguaagcauuuaucaaa

SEQ ID NO: 2360002 - RNA, 19 nt, Artificial Sequence
  Description of Artificial Sequence: Synthetic oligonucleotide
  Sense strand starting at position 242 of SEQ ID NO: 1885677
uugauaaaugcuuacaguc

SEQ ID NO: 2360003 - RNA, 19 nt, Artificial Sequence
  Description of Artificial Sequence: Synthetic oligonucleotide
  Antisense strand to SEQ ID NO: 2360002
gacuguaagcauuuaucaa

SEQ ID NO: 2360004 - RNA, 19 nt, Artificial Sequence
  Description of Artificial Sequence: Synthetic oligonucleotide
  Sense strand starting at position 376 of SEQ ID NO: 1885677
augugcuuuccguuccuau

SEQ ID NO: 2360005 - RNA, 19 nt, Artificial Sequence
  Description of Artificial Sequence: Synthetic oligonucleotide
  Antisense strand to SEQ ID NO: 2360004
auaggaacggaaagcacau

SEQ ID NO: 2360006 - RNA, 19 nt, Artificial Sequence
  Description of Artificial Sequence: Synthetic oligonucleotide
  Sense strand starting at position 377 of SEQ ID NO: 1885677
ugugcuuuccguuccuaua

SEQ ID NO: 2360007 - RNA, 19 nt, Artificial Sequence
  Description of Artificial Sequence: Synthetic oligonucleotide
  Antisense strand to SEQ ID NO: 2360006
uauaggaacggaaagcaca

SEQ ID NO: 2360008 - RNA, 19 nt, Artificial Sequence
  Description of Artificial Sequence: Synthetic oligonucleotide
  Sense strand starting at position 378 of SEQ ID NO: 1885677
gugcuuuccguuccuauau

SEQ ID NO: 2360009 - RNA, 19 nt, Artificial Sequence
  Description of Artificial Sequence: Synthetic oligonucleotide
  Antisense strand to SEQ ID NO: 2360008
auauaggaacggaaagcac

SEQ ID NO: 2360010 - RNA, 19 nt, Artificial Sequence
  Description of Artificial Sequence: Synthetic oligonucleotide
  Sense strand starting at position 405 of SEQ ID NO: 1885677
uccagaaugucauuagaua

SEQ ID NO: 2360011 - RNA, 19 nt, Artificial Sequence
  Description of Artificial Sequence: Synthetic oligonucleotide
  Antisense strand to SEQ ID NO: 2360010
uaucuaaugacauucugga

SEQ ID NO: 2360012 - RNA, 19 nt, Artificial Sequence
  Description of Artificial Sequence: Synthetic oligonucleotide
  Sense strand starting at position 522 of SEQ ID NO: 1885677
ucuauugcugacuaguauu

SEQ ID NO: 2360013 - RNA, 19 nt, Artificial Sequence
  Description of Artificial Sequence: Synthetic oligonucleotide
  Antisense strand to SEQ ID NO: 2360012
aauacuagucagcaauaga

SEQ ID NO: 2360014 - RNA, 19 nt, Artificial Sequence
  Description of Artificial Sequence: Synthetic oligonucleotide
  Sense strand starting at position 544 of SEQ ID NO: 1885677
uuggauguauaugucacua

SEQ ID NO: 2360015 - RNA, 19 nt, Artificial Sequence
  Description of Artificial Sequence: Synthetic oligonucleotide
  Antisense strand to SEQ ID NO: 2360014
uagugacauauacauccaa

SEQ ID NO: 2360016 - RNA, 19 nt, Artificial Sequence
  Description of Artificial Sequence: Synthetic oligonucleotide
  Sense strand starting at position 577 of SEQ ID NO: 1885677
aaugaaggauguuuagguu

SEQ ID NO: 2360017 - RNA, 19 nt, Artificial Sequence
  Description of Artificial Sequence: Synthetic oligonucleotide
  Antisense strand to SEQ ID NO: 2360016
aaccuaaacauccuucauu

SEQ ID NO: 2360018 - RNA, 19 nt, Artificial Sequence
  Description of Artificial Sequence: Synthetic oligonucleotide
  Sense strand starting at position 681 of SEQ ID NO: 1885677
gguuaaauacugugaguag

SEQ ID NO: 2360019 - RNA, 19 nt, Artificial Sequence
  Description of Artificial Sequence: Synthetic oligonucleotide
  Antisense strand to SEQ ID NO: 2360018
cuacucacaguauuuaacc

SEQ ID NO: 2360020 - RNA, 19 nt, Artificial Sequence
  Description of Artificial Sequence: Synthetic oligonucleotide
  Sense strand starting at position 684 of SEQ ID NO: 1885677
uaaauacugugaguaggau

SEQ ID NO: 2360021 - RNA, 19 nt, Artificial Sequence
  Description of Artificial Sequence: Synthetic oligonucleotide
  Antisense strand to SEQ ID NO: 2360020
auccuacucacaguauuua

SEQ ID NO: 2360022 - RNA, 19 nt, Artificial Sequence
  Description of Artificial Sequence: Synthetic oligonucleotide
  Sense strand starting at position 713 of SEQ ID NO: 1885677
ugggcuuauguuuaacuuu

SEQ ID NO: 2360023 - RNA, 19 nt, Artificial Sequence
  Description of Artificial Sequence: Synthetic oligonucleotide
  Antisense strand to SEQ ID NO: 2360022
aaaguuaaacauaagccca

SEQ ID NO: 2360024 - RNA, 19 nt, Artificial Sequence
  Description of Artificial Sequence: Synthetic oligonucleotide
  Sense strand starting at position 840 of SEQ ID NO: 1885677
uugagacucuuauuaugca

SEQ ID NO: 2360025 - RNA, 19 nt, Artificial Sequence
  Description of Artificial Sequence: Synthetic oligonucleotide
  Antisense strand to SEQ ID NO: 2360024
ugcauaauaagagucucaa

SEQ ID NO: 2360026 - RNA, 19 nt, Artificial Sequence
  Description of Artificial Sequence: Synthetic oligonucleotide
  Sense strand starting at position 868 of SEQ ID NO: 1885677
uccauauauguuuggugaa

SEQ ID NO: 2360027 - RNA, 19 nt, Artificial Sequence
  Description of Artificial Sequence: Synthetic oligonucleotide
  Antisense strand to SEQ ID NO: 2360026
uucaccaaacauauaugga

SEQ ID NO: 2360028 - RNA, 19 nt, Artificial Sequence
  Description of Artificial Sequence: Synthetic oligonucleotide
  Sense strand starting at position 870 of SEQ ID NO: 1885677
cauauauguuuggugaaau

SEQ ID NO: 2360029 - RNA, 19 nt, Artificial Sequence
  Description of Artificial Sequence: Synthetic oligonucleotide
  Antisense strand to SEQ ID NO: 2360028
auuucaccaaacauauaug

SEQ ID NO: 2360030 - RNA, 19 nt, Artificial Sequence
  Description of Artificial Sequence: Synthetic oligonucleotide
  Sense strand starting at position 1518 of SEQ ID NO: 1885677
gccuaucugagagggaaau

SEQ ID NO: 2360031 - RNA, 19 nt, Artificial Sequence
  Description of Artificial Sequence: Synthetic oligonucleotide
  Antisense strand to SEQ ID NO: 2360030
auuucccucucagauaggc

SEQ ID NO: 2360032 - RNA, 19 nt, Artificial Sequence
  Description of Artificial Sequence: Synthetic oligonucleotide
  Sense strand starting at position 1544 of SEQ ID NO: 1885677
uuuguagaugauugcuaga

SEQ ID NO: 2360033 - RNA, 19 nt, Artificial Sequence
  Description of Artificial Sequence: Synthetic oligonucleotide
  Antisense strand to SEQ ID NO: 2360032
ucuagcaaucaucuacaaa

SEQ ID NO: 2360034 - RNA, 19 nt, Artificial Sequence
  Description of Artificial Sequence: Synthetic oligonucleotide
  Sense strand starting at position 1546 of SEQ ID NO: 1885677
uguagaugauugcuagaaa

SEQ ID NO: 2360035 - RNA, 19 nt, Artificial Sequence
  Description of Artificial Sequence: Synthetic oligonucleotide
  Antisense strand to SEQ ID NO: 2360034
uuucuagcaaucaucuaca

SEQ ID NO: 2360036 - RNA, 19 nt, Artificial Sequence
  Description of Artificial Sequence: Synthetic oligonucleotide
  Sense strand starting at position 1806 of SEQ ID NO: 1885677
agaaacuuaugggaaauaa

SEQ ID NO: 2360037 - RNA, 19 nt, Artificial Sequence
  Description of Artificial Sequence: Synthetic oligonucleotide
  Antisense strand to SEQ ID NO: 2360036
uuauuucccauaaguuucu

SEQ ID NO: 2360038 - RNA, 19 nt, Artificial Sequence
  Description of Artificial Sequence: Synthetic oligonucleotide
  Sense strand starting at position 1816 of SEQ ID NO: 1885677
gggaaauaaggcugcuaua

SEQ ID NO: 2360039 - RNA, 19 nt, Artificial Sequence
  Description of Artificial Sequence: Synthetic oligonucleotide
  Antisense strand to SEQ ID NO: 2360038
uauagcagccuuauuuccc

SEQ ID NO: 2360040 - RNA, 19 nt, Artificial Sequence
  Description of Artificial Sequence: Synthetic oligonucleotide
  Sense strand starting at position 1909 of SEQ ID NO: 1885677
ggaguauuauggcccugaa

SEQ ID NO: 2360041 - RNA, 19 nt, Artificial Sequence
  Description of Artificial Sequence: Synthetic oligonucleotide
  Antisense strand to SEQ ID NO: 2360040
uucagggccauaauacucc

SEQ ID NO: 2360042 - RNA, 19 nt, Artificial Sequence
  Description of Artificial Sequence: Synthetic oligonucleotide
  Sense strand starting at position 1912 of SEQ ID NO: 1885677
guauuauggcccugaagga

SEQ ID NO: 2360043 - RNA, 19 nt, Artificial Sequence
  Description of Artificial Sequence: Synthetic oligonucleotide
  Antisense strand to SEQ ID NO: 2360042
uccuucagggccauaauac

SEQ ID NO: 2360044 - RNA, 19 nt, Artificial Sequence
  Description of Artificial Sequence: Synthetic oligonucleotide
  Sense strand starting at position 2118 of SEQ ID NO: 1885677
agucacucaucauugaguu

SEQ ID NO: 2360045 - RNA, 19 nt, Artificial Sequence
  Description of Artificial Sequence: Synthetic oligonucleotide
  Antisense strand to SEQ ID NO: 2360044
aacucaaugaugagugacu

SEQ ID NO: 2360046 - RNA, 19 nt, Artificial Sequence
  Description of Artificial Sequence: Synthetic oligonucleotide
  Sense strand starting at position 2126 of SEQ ID NO: 1885677
aucauugaguucuuccaug

SEQ ID NO: 2360047 - RNA, 19 nt, Artificial Sequence
  Description of Artificial Sequence: Synthetic oligonucleotide
  Antisense strand to SEQ ID NO: 2360046
cauggaagaacucaaugau

SEQ ID NO: 2360048 - RNA, 19 nt, Artificial Sequence
  Description of Artificial Sequence: Synthetic oligonucleotide
  Sense strand starting at position 2189 of SEQ ID NO: 1885677
guguauaauaugggcuaaa

SEQ ID NO: 2360049 - RNA, 19 nt, Artificial Sequence
  Description of Artificial Sequence: Synthetic oligonucleotide
  Antisense strand to SEQ ID NO: 2360048
uuuagcccauauuauacac

SEQ ID NO: 2360050 - RNA, 19 nt, Artificial Sequence
  Description of Artificial Sequence: Synthetic oligonucleotide
  Sense strand starting at position 2190 of SEQ ID NO: 1885677
uguauaauaugggcuaaau

SEQ ID NO: 2360051 - RNA, 19 nt, Artificial Sequence
  Description of Artificial Sequence: Synthetic oligonucleotide
  Antisense strand to SEQ ID NO: 2360050
auuuagcccauauuauaca

SEQ ID NO: 2360052 - RNA, 19 nt, Artificial Sequence
  Description of Artificial Sequence: Synthetic oligonucleotide
  Sense strand starting at position 2236 of SEQ ID NO: 1885677
agaagaaugucagcaaacu

SEQ ID NO: 2360053 - RNA, 19 nt, Artificial Sequence
  Description of Artificial Sequence: Synthetic oligonucleotide
  Antisense strand to SEQ ID NO: 2360052
aguuugcugacauucuucu

SEQ ID NO: 2360054 - RNA, 19 nt, Artificial Sequence
  Description of Artificial Sequence: Synthetic oligonucleotide
  Sense strand starting at position 2471 of SEQ ID NO: 1885677
aaguauacgggaggauauu

SEQ ID NO: 2360055 - RNA, 19 nt, Artificial Sequence
  Description of Artificial Sequence: Synthetic oligonucleotide
  Antisense strand to SEQ ID NO: 2360054
aauauccucccguauacuu

SEQ ID NO: 2360056 - RNA, 19 nt, Artificial Sequence
  Description of Artificial Sequence: Synthetic oligonucleotide
  Sense strand starting at position 2483 of SEQ ID NO: 1885677
ggauauugauaaguuacau

SEQ ID NO: 2360057 - RNA, 19 nt, Artificial Sequence
  Description of Artificial Sequence: Synthetic oligonucleotide
  Antisense strand to SEQ ID NO: 2360056
auguaacuuaucaauaucc

SEQ ID NO: 2360058 - RNA, 19 nt, Artificial Sequence
  Description of Artificial Sequence: Synthetic oligonucleotide
  Sense strand starting at position 2559 of SEQ ID NO: 1885677
gggagugauccuggaacca

SEQ ID NO: 2360059 - RNA, 19 nt, Artificial Sequence
  Description of Artificial Sequence: Synthetic oligonucleotide
  Antisense strand to SEQ ID NO: 2360058
ugguuccaggaucacuccc

SEQ ID NO: 2360060 - RNA, 19 nt, Artificial Sequence
  Description of Artificial Sequence: Synthetic oligonucleotide
  Sense strand starting at position 2886 of SEQ ID NO: 1885677
ggaagcuucccacagcaga

SEQ ID NO: 2360061 - RNA, 19 nt, Artificial Sequence
  Description of Artificial Sequence: Synthetic oligonucleotide
  Antisense strand to SEQ ID NO: 2360060
ucugcugugggaagcuucc

SEQ ID NO: 2360062 - RNA, 19 nt, Artificial Sequence
  Description of Artificial Sequence: Synthetic oligonucleotide
  Sense strand starting at position 2948 of SEQ ID NO: 1885677
ccauaucuugguuagccau

SEQ ID NO: 2360063 - RNA, 19 nt, Artificial Sequence
  Description of Artificial Sequence: Synthetic oligonucleotide
  Antisense strand to SEQ ID NO: 2360062
auggcuaaccaagauaugg

SEQ ID NO: 2360064 - RNA, 19 nt, Artificial Sequence
  Description of Artificial Sequence: Synthetic oligonucleotide
  Sense strand starting at position 2950 of SEQ ID NO: 1885677
auaucuugguuagccauaa

SEQ ID NO: 2360065 - RNA, 19 nt, Artificial Sequence
  Description of Artificial Sequence: Synthetic oligonucleotide
  Antisense strand to SEQ ID NO: 2360064
uuauggcuaaccaagauau

SEQ ID NO: 2360066 - RNA, 19 nt, Artificial Sequence
  Description of Artificial Sequence: Synthetic oligonucleotide
  Sense strand starting at position 2954 of SEQ ID NO: 1885677
cuugguuagccauaaagag

SEQ ID NO: 2360067 - RNA, 19 nt, Artificial Sequence
  Description of Artificial Sequence: Synthetic oligonucleotide
  Antisense strand to SEQ ID NO: 2360066
cucuuuauggcuaaccaag

SEQ ID NO: 2360068 - RNA, 19 nt, Artificial Sequence
  Description of Artificial Sequence: Synthetic oligonucleotide
  Sense strand starting at position 3221 of SEQ ID NO: 1885677
ccauguuuauucuugggau

SEQ ID NO: 2360069 - RNA, 19 nt, Artificial Sequence
  Description of Artificial Sequence: Synthetic oligonucleotide
  Antisense strand to SEQ ID NO: 2360068
aucccaagaauaaacaugg

SEQ ID NO: 2360070 - RNA, 19 nt, Artificial Sequence
  Description of Artificial Sequence: Synthetic oligonucleotide
  Sense strand starting at position 3223 of SEQ ID NO: 1885677
auguuuauucuugggauau

SEQ ID NO: 2360071 - RNA, 19 nt, Artificial Sequence
  Description of Artificial Sequence: Synthetic oligonucleotide
  Antisense strand to SEQ ID NO: 2360070
auaucccaagaauaaacau

SEQ ID NO: 2360072 - RNA, 19 nt, Artificial Sequence
  Description of Artificial Sequence: Synthetic oligonucleotide
  Sense strand starting at position 3834 of SEQ ID NO: 1885677
gaaaguaucguggaagccu

SEQ ID NO: 2360073 - RNA, 19 nt, Artificial Sequence
  Description of Artificial Sequence: Synthetic oligonucleotide
  Antisense strand to SEQ ID NO: 2360072
aggcuuccacgauacuuuc

SEQ ID NO: 2360074 - RNA, 19 nt, Artificial Sequence
  Description of Artificial Sequence: Synthetic oligonucleotide
  Sense strand starting at position 3842 of SEQ ID NO: 1885677
cguggaagccuggaagauu

SEQ ID NO: 2360075 - RNA, 19 nt, Artificial Sequence
  Description of Artificial Sequence: Synthetic oligonucleotide
  Antisense strand to SEQ ID NO: 2360074
aaucuuccaggcuuccacg

SEQ ID NO: 2360076 - RNA, 19 nt, Artificial Sequence
  Description of Artificial Sequence: Synthetic oligonucleotide
  Sense strand starting at position 3949 of SEQ ID NO: 1885677
ggaccucauugaguacaau

SEQ ID NO: 2360077 - RNA, 19 nt, Artificial Sequence
  Description of Artificial Sequence: Synthetic oligonucleotide
  Antisense strand to SEQ ID NO: 2360076
auuguacucaaugaggucc

SEQ ID NO: 2360078 - RNA, 19 nt, Artificial Sequence
  Description of Artificial Sequence: Synthetic oligonucleotide
  Sense strand starting at position 316 of SEQ ID NO: 1885678
uaaaguacugcauggugau

SEQ ID NO: 2360079 - RNA, 19 nt, Artificial Sequence
  Description of Artificial Sequence: Synthetic oligonucleotide
  Antisense strand to SEQ ID NO: 2360078
aucaccaugcaguacuuua

SEQ ID NO: 2360080 - RNA, 19 nt, Artificial Sequence
  Description of Artificial Sequence: Synthetic oligonucleotide
  Sense strand starting at position 317 of SEQ ID NO: 1885678
aaaguacugcauggugaua

SEQ ID NO: 2360081 - RNA, 19 nt, Artificial Sequence
  Description of Artificial Sequence: Synthetic oligonucleotide
  Antisense strand to SEQ ID NO: 2360080
uaucaccaugcaguacuuu

SEQ ID NO: 2360082 - RNA, 19 nt, Artificial Sequence
  Description of Artificial Sequence: Synthetic oligonucleotide
  Sense strand starting at position 581 of SEQ ID NO: 1885678
guauaugcuuaucugcaaa

SEQ ID NO: 2360083 - RNA, 19 nt, Artificial Sequence
  Description of Artificial Sequence: Synthetic oligonucleotide
  Antisense strand to SEQ ID NO: 2360082
uuugcagauaagcauauac

SEQ ID NO: 2360084 - RNA, 19 nt, Artificial Sequence
  Description of Artificial Sequence: Synthetic oligonucleotide
  Sense strand starting at position 688 of SEQ ID NO: 1885678
agggaagcaucuuugaaua

SEQ ID NO: 2360085 - RNA, 19 nt, Artificial Sequence
  Description of Artificial Sequence: Synthetic oligonucleotide
  Antisense strand to SEQ ID NO: 2360084
uauucaaagaugcuucccu

SEQ ID NO: 2360086 - RNA, 19 nt, Artificial Sequence
  Description of Artificial Sequence: Synthetic oligonucleotide
  Sense strand starting at position 784 of SEQ ID NO: 1885678
ucuagugauccucauacag

SEQ ID NO: 2360087 - RNA, 19 nt, Artificial Sequence
  Description of Artificial Sequence: Synthetic oligonucleotide
  Antisense strand to SEQ ID NO: 2360086
cuguaugaggaucacuaga

SEQ ID NO: 2360088 - RNA, 19 nt, Artificial Sequence
  Description of Artificial Sequence: Synthetic oligonucleotide
  Sense strand starting at position 921 of SEQ ID NO: 1885678
cugcuauauuuacuuaugu

SEQ ID NO: 2360089 - RNA, 19 nt, Artificial Sequence
  Description of Artificial Sequence: Synthetic oligonucleotide
  Antisense strand to SEQ ID NO: 2360088
acauaaguaaauauagcag

SEQ ID NO: 2360090 - RNA, 19 nt, Artificial Sequence
  Description of Artificial Sequence: Synthetic oligonucleotide
  Sense strand starting at position 962 of SEQ ID NO: 1885678
cuaccaucuguagguaaua

SEQ ID NO: 2360091 - RNA, 19 nt, Artificial Sequence
  Description of Artificial Sequence: Synthetic oligonucleotide
  Antisense strand to SEQ ID NO: 2360090
uauuaccuacagaugguag

SEQ ID NO: 2360092 - RNA, 19 nt, Artificial Sequence
  Description of Artificial Sequence: Synthetic oligonucleotide
  Sense strand starting at position 1017 of SEQ ID NO: 1885678
gccuguuaucagcagcaag

SEQ ID NO: 2360093 - RNA, 19 nt, Artificial Sequence
  Description of Artificial Sequence: Synthetic oligonucleotide
  Antisense strand to SEQ ID NO: 2360092
cuugcugcugauaacaggc

SEQ ID NO: 2360094 - RNA, 19 nt, Artificial Sequence
  Description of Artificial Sequence: Synthetic oligonucleotide
  Sense strand starting at position 1120 of SEQ ID NO: 1885678
aaguuaaagguuugucuac

SEQ ID NO: 2360095 - RNA, 19 nt, Artificial Sequence
  Description of Artificial Sequence: Synthetic oligonucleotide
  Antisense strand to SEQ ID NO: 2360094
guagacaaaccuuuaacuu

SEQ ID NO: 2360096 - RNA, 19 nt, Artificial Sequence
  Description of Artificial Sequence: Synthetic oligonucleotide
  Sense strand starting at position 1121 of SEQ ID NO: 1885678
aguuaaagguuugucuaca

SEQ ID NO: 2360097 - RNA, 19 nt, Artificial Sequence
  Description of Artificial Sequence: Synthetic oligonucleotide
  Antisense strand to SEQ ID NO: 2360096
uguagacaaaccuuuaacu

SEQ ID NO: 2360098 - RNA, 19 nt, Artificial Sequence
  Description of Artificial Sequence: Synthetic oligonucleotide
  Sense strand starting at position 1122 of SEQ ID NO: 1885678
guuaaagguuugucuacaa

SEQ ID NO: 2360099 - RNA, 19 nt, Artificial Sequence
  Description of Artificial Sequence: Synthetic oligonucleotide
  Antisense strand to SEQ ID NO: 2360098
uuguagacaaaccuuuaac

SEQ ID NO: 2360100 - RNA, 19 nt, Artificial Sequence
  Description of Artificial Sequence: Synthetic oligonucleotide
  Sense strand starting at position 1165 of SEQ ID NO: 1885678
agguauaccuuucucaugu

SEQ ID NO: 2360101 - RNA, 19 nt, Artificial Sequence
  Description of Artificial Sequence: Synthetic oligonucleotide
  Antisense strand to SEQ ID NO: 2360100
acaugagaaagguauaccu

SEQ ID NO: 2360102 - RNA, 19 nt, Artificial Sequence
  Description of Artificial Sequence: Synthetic oligonucleotide
  Sense strand starting at position 1220 of SEQ ID NO: 1885678
uggguaacaucccucaagu

SEQ ID NO: 2360103 - RNA, 19 nt, Artificial Sequence
  Description of Artificial Sequence: Synthetic oligonucleotide
  Antisense strand to SEQ ID NO: 2360102
acuugagggauguuaccca

SEQ ID NO: 2360104 - RNA, 19 nt, Artificial Sequence
  Description of Artificial Sequence: Synthetic oligonucleotide
  Sense strand starting at position 1222 of SEQ ID NO: 1885678
gguaacaucccucaaguau

SEQ ID NO: 2360105 - RNA, 19 nt, Artificial Sequence
  Description of Artificial Sequence: Synthetic oligonucleotide
  Antisense strand to SEQ ID NO: 2360104
auacuugagggauguuacc

SEQ ID NO: 2360106 - RNA, 19 nt, Artificial Sequence
  Description of Artificial Sequence: Synthetic oligonucleotide
  Sense strand starting at position 1233 of SEQ ID NO: 1885678
ucaaguauuuagucugcca

SEQ ID NO: 2360107 - RNA, 19 nt, Artificial Sequence
  Description of Artificial Sequence: Synthetic oligonucleotide
  Antisense strand to SEQ ID NO: 2360106
uggcagacuaaauacuuga

SEQ ID NO: 2360108 - RNA, 19 nt, Artificial Sequence
  Description of Artificial Sequence: Synthetic oligonucleotide
  Sense strand starting at position 1236 of SEQ ID NO: 1885678
aguauuuagucugccagac

SEQ ID NO: 2360109 - RNA, 19 nt, Artificial Sequence
  Description of Artificial Sequence: Synthetic oligonucleotide
  Antisense strand to SEQ ID NO: 2360108
gucuggcagacuaaauacu

SEQ ID NO: 2360110 - RNA, 19 nt, Artificial Sequence
  Description of Artificial Sequence: Synthetic oligonucleotide
  Sense strand starting at position 1603 of SEQ ID NO: 1885678
ccaagugcuuauuuaagca

SEQ ID NO: 2360111 - RNA, 19 nt, Artificial Sequence
  Description of Artificial Sequence: Synthetic oligonucleotide
  Antisense strand to SEQ ID NO: 2360110
ugcuuaaauaagcacuugg

SEQ ID NO: 2360112 - RNA, 19 nt, Artificial Sequence
  Description of Artificial Sequence: Synthetic oligonucleotide
  Sense strand starting at position 1607 of SEQ ID NO: 1885678
gugcuuauuuaagcauacu

SEQ ID NO: 2360113 - RNA, 19 nt, Artificial Sequence
  Description of Artificial Sequence: Synthetic oligonucleotide
  Antisense strand to SEQ ID NO: 2360112
aguaugcuuaaauaagcac

SEQ ID NO: 2360114 - RNA, 19 nt, Artificial Sequence
  Description of Artificial Sequence: Synthetic oligonucleotide
  Sense strand starting at position 1615 of SEQ ID NO: 1885678
uuaagcauacuucgaaaca

SEQ ID NO: 2360115 - RNA, 19 nt, Artificial Sequence
  Description of Artificial Sequence: Synthetic oligonucleotide
  Antisense strand to SEQ ID NO: 2360114
uguuucgaaguaugcuuaa

SEQ ID NO: 2360116 - RNA, 19 nt, Artificial Sequence
  Description of Artificial Sequence: Synthetic oligonucleotide
  Sense strand starting at position 1895 of SEQ ID NO: 1885678
cuguuucugcuguggagaa

SEQ ID NO: 2360117 - RNA, 19 nt, Artificial Sequence
  Description of Artificial Sequence: Synthetic oligonucleotide
  Antisense strand to SEQ ID NO: 2360116
uucuccacagcagaaacag

SEQ ID NO: 2360118 - RNA, 19 nt, Artificial Sequence
  Description of Artificial Sequence: Synthetic oligonucleotide
  Sense strand starting at position 2048 of SEQ ID NO: 1885678
acuccagcucucugaggaa

SEQ ID NO: 2360119 - RNA, 19 nt, Artificial Sequence
  Description of Artificial Sequence: Synthetic oligonucleotide
  Antisense strand to SEQ ID NO: 2360118
uuccucagagagcuggagu

SEQ ID NO: 2360120 - RNA, 19 nt, Artificial Sequence
  Description of Artificial Sequence: Synthetic oligonucleotide
  Sense strand starting at position 2116 of SEQ ID NO: 1885678
gaagaugacuuggaacauc

SEQ ID NO: 2360121 - RNA, 19 nt, Artificial Sequence
  Description of Artificial Sequence: Synthetic oligonucleotide
  Antisense strand to SEQ ID NO: 2360120
gauguuccaagucaucuuc

SEQ ID NO: 2360122 - RNA, 19 nt, Artificial Sequence
  Description of Artificial Sequence: Synthetic oligonucleotide
  Sense strand starting at position 2127 of SEQ ID NO: 1885678
ggaacaucugagugagcau

SEQ ID NO: 2360123 - RNA, 19 nt, Artificial Sequence
  Description of Artificial Sequence: Synthetic oligonucleotide
  Antisense strand to SEQ ID NO: 2360122
augcucacucagauguucc

SEQ ID NO: 2360124 - RNA, 19 nt, Artificial Sequence
  Description of Artificial Sequence: Synthetic oligonucleotide
  Sense strand starting at position 2213 of SEQ ID NO: 1885678
gagagaagugccuagggca

SEQ ID NO: 2360125 - RNA, 19 nt, Artificial Sequence
  Description of Artificial Sequence: Synthetic oligonucleotide
  Antisense strand to SEQ ID NO: 2360124
ugcccuaggcacuucucuc

SEQ ID NO: 2360126 - RNA, 19 nt, Artificial Sequence
  Description of Artificial Sequence: Synthetic oligonucleotide
  Sense strand starting at position 2311 of SEQ ID NO: 1885678
gguccagacccucauaguu

SEQ ID NO: 2360127 - RNA, 19 nt, Artificial Sequence
  Description of Artificial Sequence: Synthetic oligonucleotide
  Antisense strand to SEQ ID NO: 2360126
aacuaugagggucuggacc

SEQ ID NO: 2360128 - RNA, 19 nt, Artificial Sequence
  Description of Artificial Sequence: Synthetic oligonucleotide
  Sense strand starting at position 2420 of SEQ ID NO: 1885678
gacacacugggcuauaagu

SEQ ID NO: 2360129 - RNA, 19 nt, Artificial Sequence
  Description of Artificial Sequence: Synthetic oligonucleotide
  Antisense strand to SEQ ID NO: 2360128
acuuauagcccaguguguc

SEQ ID NO: 2360130 - RNA, 19 nt, Artificial Sequence
  Description of Artificial Sequence: Synthetic oligonucleotide
  Sense strand starting at position 2429 of SEQ ID NO: 1885678
ggcuauaaguuucugaguu

SEQ ID NO: 2360131 - RNA, 19 nt, Artificial Sequence
  Description of Artificial Sequence: Synthetic oligonucleotide
  Antisense strand to SEQ ID NO: 2360130
aacucagaaacuuauagcc

SEQ ID NO: 2360132 - RNA, 19 nt, Artificial Sequence
  Description of Artificial Sequence: Synthetic oligonucleotide
  Sense strand starting at position 2433 of SEQ ID NO: 1885678
auaaguuucugaguuaagc

SEQ ID NO: 2360133 - RNA, 19 nt, Artificial Sequence
  Description of Artificial Sequence: Synthetic oligonucleotide
  Antisense strand to SEQ ID NO: 2360132
gcuuaacucagaaacuuau

SEQ ID NO: 2360134 - RNA, 19 nt, Artificial Sequence
  Description of Artificial Sequence: Synthetic oligonucleotide
  Sense strand starting at position 2442 of SEQ ID NO: 1885678
ugaguuaagcauuauaucu

SEQ ID NO: 2360135 - RNA, 19 nt, Artificial Sequence
  Description of Artificial Sequence: Synthetic oligonucleotide
  Antisense strand to SEQ ID NO: 2360134
agauauaaugcuuaacuca

SEQ ID NO: 2360136 - RNA, 19 nt, Artificial Sequence
  Description of Artificial Sequence: Synthetic oligonucleotide
  Sense strand starting at position 2500 of SEQ ID NO: 1885678
ugcacaaagcuggaguuaa

SEQ ID NO: 2360137 - RNA, 19 nt, Artificial Sequence
  Description of Artificial Sequence: Synthetic oligonucleotide
  Antisense strand to SEQ ID NO: 2360136
uuaacuccagcuuugugca

SEQ ID NO: 2360138 - RNA, 19 nt, Artificial Sequence
  Description of Artificial Sequence: Synthetic oligonucleotide
  Sense strand starting at position 2521 of SEQ ID NO: 1885678
auagaucuucuguguuuau

SEQ ID NO: 2360139 - RNA, 19 nt, Artificial Sequence
  Description of Artificial Sequence: Synthetic oligonucleotide
  Antisense strand to SEQ ID NO: 2360138
auaaacacagaagaucuau

SEQ ID NO: 2360140 - RNA, 19 nt, Artificial Sequence
  Description of Artificial Sequence: Synthetic oligonucleotide
  Sense strand starting at position 2551 of SEQ ID NO: 1885678
gucugucuuuacucuauga

SEQ ID NO: 2360141 - RNA, 19 nt, Artificial Sequence
  Description of Artificial Sequence: Synthetic oligonucleotide
  Antisense strand to SEQ ID NO: 2360140
ucauagaguaaagacagac

SEQ ID NO: 2360142 - RNA, 19 nt, Artificial Sequence
  Description of Artificial Sequence: Synthetic oligonucleotide
  Sense strand starting at position 2553 of SEQ ID NO: 1885678
cugucuuuacucuaugauu

SEQ ID NO: 2360143 - RNA, 19 nt, Artificial Sequence
  Description of Artificial Sequence: Synthetic oligonucleotide
  Antisense strand to SEQ ID NO: 2360142
aaucauagaguaaagacag

SEQ ID NO: 2360144 - RNA, 19 nt, Artificial Sequence
  Description of Artificial Sequence: Synthetic oligonucleotide
  Sense strand starting at position 3313 of SEQ ID NO: 1885678
uacacaguuuggguaaacu

SEQ ID NO: 2360145 - RNA, 19 nt, Artificial Sequence
  Description of Artificial Sequence: Synthetic oligonucleotide
  Antisense strand to SEQ ID NO: 2360144
aguuuacccaaacugugua

SEQ ID NO: 2360146 - RNA, 19 nt, Artificial Sequence
  Description of Artificial Sequence: Synthetic oligonucleotide
  Sense strand starting at position 3322 of SEQ ID NO: 1885678
uggguaaacucacaauaaa

SEQ ID NO: 2360147 - RNA, 19 nt, Artificial Sequence
  Description of Artificial Sequence: Synthetic oligonucleotide
  Antisense strand to SEQ ID NO: 2360146
uuuauugugaguuuaccca

SEQ ID NO: 2360148 - RNA, 19 nt, Artificial Sequence
  Description of Artificial Sequence: Synthetic oligonucleotide
  Sense strand starting at position 3362 of SEQ ID NO: 1885678
caguaaauuugggcugcau

SEQ ID NO: 2360149 - RNA, 19 nt, Artificial Sequence
  Description of Artificial Sequence: Synthetic oligonucleotide
  Antisense strand to SEQ ID NO: 2360148
augcagcccaaauuuacug

SEQ ID NO: 2360150 - RNA, 19 nt, Artificial Sequence
  Description of Artificial Sequence: Synthetic oligonucleotide
  Sense strand starting at position 3413 of SEQ ID NO: 1885678
aagcguguagcagaaggau

SEQ ID NO: 2360151 - RNA, 19 nt, Artificial Sequence
  Description of Artificial Sequence: Synthetic oligonucleotide
  Antisense strand to SEQ ID NO: 2360150
auccuucugcuacacgcuu

SEQ ID NO: 2360152 - RNA, 19 nt, Artificial Sequence
  Description of Artificial Sequence: Synthetic oligonucleotide
  Sense strand starting at position 3422 of SEQ ID NO: 1885678
gcagaaggauauguagagu

SEQ ID NO: 2360153 - RNA, 19 nt, Artificial Sequence
  Description of Artificial Sequence: Synthetic oligonucleotide
  Antisense strand to SEQ ID NO: 2360152
acucuacauauccuucugc

SEQ ID NO: 2360154 - RNA, 19 nt, Artificial Sequence
  Description of Artificial Sequence: Synthetic oligonucleotide
  Sense strand starting at position 3698 of SEQ ID NO: 1885678
aggagaaucguuugauucu

SEQ ID NO: 2360155 - RNA, 19 nt, Artificial Sequence
  Description of Artificial Sequence: Synthetic oligonucleotide
  Antisense strand to SEQ ID NO: 2360154
agaaucaaacgauucuccu

SEQ ID NO: 2360156 - RNA, 19 nt, Artificial Sequence
  Description of Artificial Sequence: Synthetic oligonucleotide
  Sense strand starting at position 3981 of SEQ ID NO: 1885678
uauagugguuaccucugua

SEQ ID NO: 2360157 - RNA, 19 nt, Artificial Sequence
  Description of Artificial Sequence: Synthetic oligonucleotide
  Antisense strand to SEQ ID NO: 2360156
uacagagguaaccacuaua

SEQ ID NO: 2360158 - RNA, 19 nt, Artificial Sequence
  Description of Artificial Sequence: Synthetic oligonucleotide
  Sense strand starting at position 394 of SEQ ID NO: 1885679
gacuguggcucaugcguau

SEQ ID NO: 2360159 - RNA, 19 nt, Artificial Sequence
  Description of Artificial Sequence: Synthetic oligonucleotide
  Antisense strand to SEQ ID NO: 2360158
auacgcaugagccacaguc

SEQ ID NO: 2360160 - RNA, 19 nt, Artificial Sequence
  Description of Artificial Sequence: Synthetic oligonucleotide
  Sense strand starting at position 632 of SEQ ID NO: 1885679
gugcucagguggaggaauu

SEQ ID NO: 2360161 - RNA, 19 nt, Artificial Sequence
  Description of Artificial Sequence: Synthetic oligonucleotide
  Antisense strand to SEQ ID NO: 2360160
aauuccuccaccugagcac

SEQ ID NO: 2360162 - RNA, 19 nt, Artificial Sequence
  Description of Artificial Sequence: Synthetic oligonucleotide
  Sense strand starting at position 689 of SEQ ID NO: 1885679
ggaagucagcccuggagau

SEQ ID NO: 2360163 - RNA, 19 nt, Artificial Sequence
  Description of Artificial Sequence: Synthetic oligonucleotide
  Antisense strand to SEQ ID NO: 2360162
aucuccagggcugacuucc

SEQ ID NO: 2360164 - RNA, 19 nt, Artificial Sequence
  Description of Artificial Sequence: Synthetic oligonucleotide
  Sense strand starting at position 707 of SEQ ID NO: 1885679
ucucaauacucacaugugu

SEQ ID NO: 2360165 - RNA, 19 nt, Artificial Sequence
  Description of Artificial Sequence: Synthetic oligonucleotide
  Antisense strand to SEQ ID NO: 2360164
acacaugugaguauugaga

SEQ ID NO: 2360166 - RNA, 19 nt, Artificial Sequence
  Description of Artificial Sequence: Synthetic oligonucleotide
  Sense strand starting at position 839 of SEQ ID NO: 1885679
acauguucccaaugcaaag

SEQ ID NO: 2360167 - RNA, 19 nt, Artificial Sequence
  Description of Artificial Sequence: Synthetic oligonucleotide
  Antisense strand to SEQ ID NO: 2360166
cuuugcauugggaacaugu

SEQ ID NO: 2360168 - RNA, 19 nt, Artificial Sequence
  Description of Artificial Sequence: Synthetic oligonucleotide
  Sense strand starting at position 891 of SEQ ID NO: 1885679
gcagguguccgcuucgaca

SEQ ID NO: 2360169 - RNA, 19 nt, Artificial Sequence
  Description of Artificial Sequence: Synthetic oligonucleotide
  Antisense strand to SEQ ID NO: 2360168
ugucgaagcggacaccugc

SEQ ID NO: 2360170 - RNA, 19 nt, Artificial Sequence
  Description of Artificial Sequence: Synthetic oligonucleotide
  Sense strand starting at position 963 of SEQ ID NO: 1885679
uugugagccgccuuuguuu

SEQ ID NO: 2360171 - RNA, 19 nt, Artificial Sequence
  Description of Artificial Sequence: Synthetic oligonucleotide
  Antisense strand to SEQ ID NO: 2360170
aaacaaaggcggcucacaa

SEQ ID NO: 2360172 - RNA, 19 nt, Artificial Sequence
  Description of Artificial Sequence: Synthetic oligonucleotide
  Sense strand starting at position 1465 of SEQ ID NO: 1885679
gugugugcuuccugcgcau

SEQ ID NO: 2360173 - RNA, 19 nt, Artificial Sequence
  Description of Artificial Sequence: Synthetic oligonucleotide
  Antisense strand to SEQ ID NO: 2360172
augcgcaggaagcacacac

SEQ ID NO: 2360174 - RNA, 19 nt, Artificial Sequence
  Description of Artificial Sequence: Synthetic oligonucleotide
  Sense strand starting at position 1497 of SEQ ID NO: 1885679
gggcguucuuggcaggcau

SEQ ID NO: 2360175 - RNA, 19 nt, Artificial Sequence
  Description of Artificial Sequence: Synthetic oligonucleotide
  Antisense strand to SEQ ID NO: 2360174
augccugccaagaacgccc

SEQ ID NO: 2360176 - RNA, 19 nt, Artificial Sequence
  Description of Artificial Sequence: Synthetic oligonucleotide
  Sense strand starting at position 1724 of SEQ ID NO: 1885679
cuaccuuucgcccaaaggu

SEQ ID NO: 2360177 - RNA, 19 nt, Artificial Sequence
  Description of Artificial Sequence: Synthetic oligonucleotide
  Antisense strand to SEQ ID NO: 2360176
accuuugggcgaaagguag

SEQ ID NO: 2360178 - RNA, 19 nt, Artificial Sequence
  Description of Artificial Sequence: Synthetic oligonucleotide
  Sense strand starting at position 1779 of SEQ ID NO: 1885679
gggccucagucuccauaga

SEQ ID NO: 2360179 - RNA, 19 nt, Artificial Sequence
  Description of Artificial Sequence: Synthetic oligonucleotide
  Antisense strand to SEQ ID NO: 2360178
ucuauggagacugaggccc

SEQ ID NO: 2360180 - RNA, 19 nt, Artificial Sequence
  Description of Artificial Sequence: Synthetic oligonucleotide
  Sense strand starting at position 1780 of SEQ ID NO: 1885679
ggccucagucuccauagaa

SEQ ID NO: 2360181 - RNA, 19 nt, Artificial Sequence
  Description of Artificial Sequence: Synthetic oligonucleotide
  Antisense strand to SEQ ID NO: 2360180
uucuauggagacugaggcc

SEQ ID NO: 2360182 - RNA, 19 nt, Artificial Sequence
  Description of Artificial Sequence: Synthetic oligonucleotide
  Sense strand starting at position 1849 of SEQ ID NO: 1885679
gcacuuuagguccauugaa

SEQ ID NO: 2360183 - RNA, 19 nt, Artificial Sequence
  Description of Artificial Sequence: Synthetic oligonucleotide
  Antisense strand to SEQ ID NO: 2360182
uucaauggaccuaaagugc

SEQ ID NO: 2360184 - RNA, 19 nt, Artificial Sequence
  Description of Artificial Sequence: Synthetic oligonucleotide
  Sense strand starting at position 1900 of SEQ ID NO: 1885679
ucaccucuguccuggguua

SEQ ID NO: 2360185 - RNA, 19 nt, Artificial Sequence
  Description of Artificial Sequence: Synthetic oligonucleotide
  Antisense strand to SEQ ID NO: 2360184
uaacccaggacagagguga

SEQ ID NO: 2360186 - RNA, 19 nt, Artificial Sequence
  Description of Artificial Sequence: Synthetic oligonucleotide
  Sense strand starting at position 1902 of SEQ ID NO: 1885679
accucuguccuggguuaca

SEQ ID NO: 2360187 - RNA, 19 nt, Artificial Sequence
  Description of Artificial Sequence: Synthetic oligonucleotide
  Antisense strand to SEQ ID NO: 2360186
uguaacccaggacagaggu

SEQ ID NO: 2360188 - RNA, 19 nt, Artificial Sequence
  Description of Artificial Sequence: Synthetic oligonucleotide
  Sense strand starting at position 2057 of SEQ ID NO: 1885679
uucuguccuucugugacaa

SEQ ID NO: 2360189 - RNA, 19 nt, Artificial Sequence
  Description of Artificial Sequence: Synthetic oligonucleotide
  Antisense strand to SEQ ID NO: 2360188
uugucacagaaggacagaa

SEQ ID NO: 2360190 - RNA, 19 nt, Artificial Sequence
  Description of Artificial Sequence: Synthetic oligonucleotide
  Sense strand starting at position 2058 of SEQ ID NO: 1885679
ucuguccuucugugacaaa

SEQ ID NO: 2360191 - RNA, 19 nt, Artificial Sequence
  Description of Artificial Sequence: Synthetic oligonucleotide
  Antisense strand to SEQ ID NO: 2360190
uuugucacagaaggacaga

SEQ ID NO: 2360192 - RNA, 19 nt, Artificial Sequence
  Description of Artificial Sequence: Synthetic oligonucleotide
  Sense strand starting at position 2061 of SEQ ID NO: 1885679
guccuucugugacaaagac

SEQ ID NO: 2360193 - RNA, 19 nt, Artificial Sequence
  Description of Artificial Sequence: Synthetic oligonucleotide
  Antisense strand to SEQ ID NO: 2360192
gucuuugucacagaaggac

SEQ ID NO: 2360194 - RNA, 19 nt, Artificial Sequence
  Description of Artificial Sequence: Synthetic oligonucleotide
  Sense strand starting at position 2219 of SEQ ID NO: 1885679
ccugguggcucuuaucagu

SEQ ID NO: 2360195 - RNA, 19 nt, Artificial Sequence
  Description of Artificial Sequence: Synthetic oligonucleotide
  Antisense strand to SEQ ID NO: 2360194
acugauaagagccaccagg

SEQ ID NO: 2360196 - RNA, 19 nt, Artificial Sequence
  Description of Artificial Sequence: Synthetic oligonucleotide
  Sense strand starting at position 2228 of SEQ ID NO: 1885679
ucuuaucagugcccugaga

SEQ ID NO: 2360197 - RNA, 19 nt, Artificial Sequence
  Description of Artificial Sequence: Synthetic oligonucleotide
  Antisense strand to SEQ ID NO: 2360196
ucucagggcacugauaaga

SEQ ID NO: 2360198 - RNA, 19 nt, Artificial Sequence
  Description of Artificial Sequence: Synthetic oligonucleotide
  Sense strand starting at position 2398 of SEQ ID NO: 1885679
gugacaguuuccggugugu

SEQ ID NO: 2360199 - RNA, 19 nt, Artificial Sequence
  Description of Artificial Sequence: Synthetic oligonucleotide
  Antisense strand to SEQ ID NO: 2360198
acacaccggaaacugucac

SEQ ID NO: 2360200 - RNA, 19 nt, Artificial Sequence
  Description of Artificial Sequence: Synthetic oligonucleotide
  Sense strand starting at position 2407 of SEQ ID NO: 1885679
uccgguguguccuccgcaa

SEQ ID NO: 2360201 - RNA, 19 nt, Artificial Sequence
  Description of Artificial Sequence: Synthetic oligonucleotide
  Antisense strand to SEQ ID NO: 2360200
uugcggaggacacaccgga

SEQ ID NO: 2360202 - RNA, 19 nt, Artificial Sequence
  Description of Artificial Sequence: Synthetic oligonucleotide
  Sense strand starting at position 2409 of SEQ ID NO: 1885679
cgguguguccuccgcaaca

SEQ ID NO: 2360203 - RNA, 19 nt, Artificial Sequence
  Description of Artificial Sequence: Synthetic oligonucleotide
  Antisense strand to SEQ ID NO: 2360202
uguugcggaggacacaccg

SEQ ID NO: 2360204 - RNA, 19 nt, Artificial Sequence
  Description of Artificial Sequence: Synthetic oligonucleotide
  Sense strand starting at position 2559 of SEQ ID NO: 1885679
gccugaguccucuagcggu

SEQ ID NO: 2360205 - RNA, 19 nt, Artificial Sequence
  Description of Artificial Sequence: Synthetic oligonucleotide
  Antisense strand to SEQ ID NO: 2360204
accgcuagaggacucaggc

SEQ ID NO: 2360206 - RNA, 19 nt, Artificial Sequence
  Description of Artificial Sequence: Synthetic oligonucleotide
  Sense strand starting at position 2781 of SEQ ID NO: 1885679
gccucagucuucugugugu

SEQ ID NO: 2360207 - RNA, 19 nt, Artificial Sequence
  Description of Artificial Sequence: Synthetic oligonucleotide
  Antisense strand to SEQ ID NO: 2360206
acacacagaagacugaggc

SEQ ID NO: 2360208 - RNA, 19 nt, Artificial Sequence
  Description of Artificial Sequence: Synthetic oligonucleotide
  Sense strand starting at position 2958 of SEQ ID NO: 1885679
guggcauugaguugggaaa

SEQ ID NO: 2360209 - RNA, 19 nt, Artificial Sequence
  Description of Artificial Sequence: Synthetic oligonucleotide
  Antisense strand to SEQ ID NO: 2360208
uuucccaacucaaugccac

SEQ ID NO: 2360210 - RNA, 19 nt, Artificial Sequence
  Description of Artificial Sequence: Synthetic oligonucleotide
  Sense strand starting at position 3176 of SEQ ID NO: 1885679
ggaagugucugugacggga

SEQ ID NO: 2360211 - RNA, 19 nt, Artificial Sequence
  Description of Artificial Sequence: Synthetic oligonucleotide
  Antisense strand to SEQ ID NO: 2360210
ucccgucacagacacuucc

SEQ ID NO: 2360212 - RNA, 19 nt, Artificial Sequence
  Description of Artificial Sequence: Synthetic oligonucleotide
  Sense strand starting at position 3465 of SEQ ID NO: 1885679
cuucccuguggcugaguua

SEQ ID NO: 2360213 - RNA, 19 nt, Artificial Sequence
  Description of Artificial Sequence: Synthetic oligonucleotide
  Antisense strand to SEQ ID NO: 2360212
uaacucagccacagggaag

SEQ ID NO: 2360214 - RNA, 19 nt, Artificial Sequence
  Description of Artificial Sequence: Synthetic oligonucleotide
  Sense strand starting at position 3696 of SEQ ID NO: 1885679
cggcaagugccugaggaaa

SEQ ID NO: 2360215 - RNA, 19 nt, Artificial Sequence
  Description of Artificial Sequence: Synthetic oligonucleotide
  Antisense strand to SEQ ID NO: 2360214
uuuccucaggcacuugccg

SEQ ID NO: 2360216 - RNA, 19 nt, Artificial Sequence
  Description of Artificial Sequence: Synthetic oligonucleotide
  Sense strand starting at position 3698 of SEQ ID NO: 1885679
gcaagugccugaggaaaga

SEQ ID NO: 2360217 - RNA, 19 nt, Artificial Sequence
  Description of Artificial Sequence: Synthetic oligonucleotide
  Antisense strand to SEQ ID NO: 2360216
ucuuuccucaggcacuugc

SEQ ID NO: 2360218 - RNA, 19 nt, Artificial Sequence
  Description of Artificial Sequence: Synthetic oligonucleotide
  Sense strand starting at position 3715 of SEQ ID NO: 1885679
gagggaaagucugaaugca

SEQ ID NO: 2360219 - RNA, 19 nt, Artificial Sequence
  Description of Artificial Sequence: Synthetic oligonucleotide
  Antisense strand to SEQ ID NO: 2360218
ugcauucagacuuucccuc

SEQ ID NO: 2360220 - RNA, 19 nt, Artificial Sequence
  Description of Artificial Sequence: Synthetic oligonucleotide
  Sense strand starting at position 3769 of SEQ ID NO: 1885679
ucacgagaaucccaugaua

SEQ ID NO: 2360221 - RNA, 19 nt, Artificial Sequence
  Description of Artificial Sequence: Synthetic oligonucleotide
  Antisense strand to SEQ ID NO: 2360220
uaucaugggauucucguga

SEQ ID NO: 2360222 - RNA, 19 nt, Artificial Sequence
  Description of Artificial Sequence: Synthetic oligonucleotide
  Sense strand starting at position 3771 of SEQ ID NO: 1885679
acgagaaucccaugauauc

SEQ ID NO: 2360223 - RNA, 19 nt, Artificial Sequence
  Description of Artificial Sequence: Synthetic oligonucleotide
  Antisense strand to SEQ ID NO: 2360222
gauaucaugggauucucgu

SEQ ID NO: 2360224 - RNA, 19 nt, Artificial Sequence
  Description of Artificial Sequence: Synthetic oligonucleotide
  Sense strand starting at position 3870 of SEQ ID NO: 1885679
uuugaagucagaugaguga

SEQ ID NO: 2360225 - RNA, 19 nt, Artificial Sequence
  Description of Artificial Sequence: Synthetic oligonucleotide
  Antisense strand to SEQ ID NO: 2360224
ucacucaucugacuucaaa

SEQ ID NO: 2360226 - RNA, 19 nt, Artificial Sequence
  Description of Artificial Sequence: Synthetic oligonucleotide
  Sense strand starting at position 159 of SEQ ID NO: 1885680
uacagaugauuccggaacu

SEQ ID NO: 2360227 - RNA, 19 nt, Artificial Sequence
  Description of Artificial Sequence: Synthetic oligonucleotide
  Antisense strand to SEQ ID NO: 2360226
aguuccggaaucaucugua

SEQ ID NO: 2360228 - RNA, 19 nt, Artificial Sequence
  Description of Artificial Sequence: Synthetic oligonucleotide
  Sense strand starting at position 160 of SEQ ID NO: 1885680
acagaugauuccggaacug

SEQ ID NO: 2360229 - RNA, 19 nt, Artificial Sequence
  Description of Artificial Sequence: Synthetic oligonucleotide
  Antisense strand to SEQ ID NO: 2360228
caguuccggaaucaucugu

SEQ ID NO: 2360230 - RNA, 19 nt, Artificial Sequence
  Description of Artificial Sequence: Synthetic oligonucleotide
  Sense strand starting at position 172 of SEQ ID NO: 1885680
ggaacuguuugaccaguua

SEQ ID NO: 2360231 - RNA, 19 nt, Artificial Sequence
  Description of Artificial Sequence: Synthetic oligonucleotide
  Antisense strand to SEQ ID NO: 2360230
uaacuggucaaacaguucc

SEQ ID NO: 2360232 - RNA, 19 nt, Artificial Sequence
  Description of Artificial Sequence: Synthetic oligonucleotide
  Sense strand starting at position 228 of SEQ ID NO: 1885680
ggaccauuguggaggaaag

SEQ ID NO: 2360233 - RNA, 19 nt, Artificial Sequence
  Description of Artificial Sequence: Synthetic oligonucleotide
  Antisense strand to SEQ ID NO: 2360232
cuuuccuccacaauggucc

SEQ ID NO: 2360234 - RNA, 19 nt, Artificial Sequence
  Description of Artificial Sequence: Synthetic oligonucleotide
  Sense strand starting at position 262 of SEQ ID NO: 1885680
caccgaagauguguggaaa

SEQ ID NO: 2360235 - RNA, 19 nt, Artificial Sequence
  Description of Artificial Sequence: Synthetic oligonucleotide
  Antisense strand to SEQ ID NO: 2360234
uuuccacacaucuucggug

SEQ ID NO: 2360236 - RNA, 19 nt, Artificial Sequence
  Description of Artificial Sequence: Synthetic oligonucleotide
  Sense strand starting at position 265 of SEQ ID NO: 1885680
cgaagauguguggaaagca

SEQ ID NO: 2360237 - RNA, 19 nt, Artificial Sequence
  Description of Artificial Sequence: Synthetic oligonucleotide
  Antisense strand to SEQ ID NO: 2360236
ugcuuuccacacaucuucg

SEQ ID NO: 2360238 - RNA, 19 nt, Artificial Sequence
  Description of Artificial Sequence: Synthetic oligonucleotide
  Sense strand starting at position 393 of SEQ ID NO: 1885680
gguucuuugugcuuucuua

SEQ ID NO: 2360239 - RNA, 19 nt, Artificial Sequence
  Description of Artificial Sequence: Synthetic oligonucleotide
  Antisense strand to SEQ ID NO: 2360238
uaagaaagcacaaagaacc

SEQ ID NO: 2360240 - RNA, 19 nt, Artificial Sequence
  Description of Artificial Sequence: Synthetic oligonucleotide
  Sense strand starting at position 394 of SEQ ID NO: 1885680
guucuuugugcuuucuuau

SEQ ID NO: 2360241 - RNA, 19 nt, Artificial Sequence
  Description of Artificial Sequence: Synthetic oligonucleotide
  Antisense strand to SEQ ID NO: 2360240
auaagaaagcacaaagaac

SEQ ID NO: 2360242 - RNA, 19 nt, Artificial Sequence
  Description of Artificial Sequence: Synthetic oligonucleotide
  Sense strand starting at position 403 of SEQ ID NO: 1885680
gcuuucuuauggccaggaa

SEQ ID NO: 2360243 - RNA, 19 nt, Artificial Sequence
  Description of Artificial Sequence: Synthetic oligonucleotide
  Antisense strand to SEQ ID NO: 2360242
uuccuggccauaagaaagc

SEQ ID NO: 2360244 - RNA, 19 nt, Artificial Sequence
  Description of Artificial Sequence: Synthetic oligonucleotide
  Sense strand starting at position 426 of SEQ ID NO: 1885680
ugaucuacucaaugaguca

SEQ ID NO: 2360245 - RNA, 19 nt, Artificial Sequence
  Description of Artificial Sequence: Synthetic oligonucleotide
  Antisense strand to SEQ ID NO: 2360244
ugacucauugaguagauca

SEQ ID NO: 2360246 - RNA, 19 nt, Artificial Sequence
  Description of Artificial Sequence: Synthetic oligonucleotide
  Sense strand starting at position 501 of SEQ ID NO: 1885680
ucuacugcucccuggacaa

SEQ ID NO: 2360247 - RNA, 19 nt, Artificial Sequence
  Description of Artificial Sequence: Synthetic oligonucleotide
  Antisense strand to SEQ ID NO: 2360246
uuguccagggagcaguaga

SEQ ID NO: 2360248 - RNA, 19 nt, Artificial Sequence
  Description of Artificial Sequence: Synthetic oligonucleotide
  Sense strand starting at position 588 of SEQ ID NO: 1885680
acaagaacgucaugaccau

SEQ ID NO: 2360249 - RNA, 19 nt, Artificial Sequence
  Description of Artificial Sequence: Synthetic oligonucleotide
  Antisense strand to SEQ ID NO: 2360248
auggucaugacguucuugu

SEQ ID NO: 2360250 - RNA, 19 nt, Artificial Sequence
  Description of Artificial Sequence: Synthetic oligonucleotide
  Sense strand starting at position 592 of SEQ ID NO: 1885680
gaacgucaugaccaucaua

SEQ ID NO: 2360251 - RNA, 19 nt, Artificial Sequence
  Description of Artificial Sequence: Synthetic oligonucleotide
  Antisense strand to SEQ ID NO: 2360250
uaugauggucaugacguuc

SEQ ID NO: 2360252 - RNA, 19 nt, Artificial Sequence
  Description of Artificial Sequence: Synthetic oligonucleotide
  Sense strand starting at position 595 of SEQ ID NO: 1885680
cgucaugaccaucauaaca

SEQ ID NO: 2360253 - RNA, 19 nt, Artificial Sequence
  Description of Artificial Sequence: Synthetic oligonucleotide
  Antisense strand to SEQ ID NO: 2360252
uguuaugauggucaugacg

SEQ ID NO: 2360254 - RNA, 19 nt, Artificial Sequence
  Description of Artificial Sequence: Synthetic oligonucleotide
  Sense strand starting at position 633 of SEQ ID NO: 1885680
ccaagcuaucucugcgaaa

SEQ ID NO: 2360255 - RNA, 19 nt, Artificial Sequence
  Description of Artificial Sequence: Synthetic oligonucleotide
  Antisense strand to SEQ ID NO: 2360254
uuucgcagagauagcuugg

SEQ ID NO: 2360256 - RNA, 19 nt, Artificial Sequence
  Description of Artificial Sequence: Synthetic oligonucleotide
  Sense strand starting at position 636 of SEQ ID NO: 1885680
agcuaucucugcgaaacuu

SEQ ID NO: 2360257 - RNA, 19 nt, Artificial Sequence
  Description of Artificial Sequence: Synthetic oligonucleotide
  Antisense strand to SEQ ID NO: 2360256
aaguuucgcagagauagcu

SEQ ID NO: 2360258 - RNA, 19 nt, Artificial Sequence
  Description of Artificial Sequence: Synthetic oligonucleotide
  Sense strand starting at position 879 of SEQ ID NO: 1885680
acgccucccugauccaaau

SEQ ID NO: 2360259 - RNA, 19 nt, Artificial Sequence
  Description of Artificial Sequence: Synthetic oligonucleotide
  Antisense strand to SEQ ID NO: 2360258
auuuggaucagggaggcgu

SEQ ID NO: 2360260 - RNA, 19 nt, Artificial Sequence
  Description of Artificial Sequence: Synthetic oligonucleotide
  Sense strand starting at position 927 of SEQ ID NO: 1885680
gcgcuuucuacucccgcaa

SEQ ID NO: 2360261 - RNA, 19 nt, Artificial Sequence
  Description of Artificial Sequence: Synthetic oligonucleotide
  Antisense strand to SEQ ID NO: 2360260
uugcgggaguagaaagcgc

SEQ ID NO: 2360262 - RNA, 19 nt, Artificial Sequence
  Description of Artificial Sequence: Synthetic oligonucleotide
  Sense strand starting at position 929 of SEQ ID NO: 1885680
gcuuucuacucccgcaaca

SEQ ID NO: 2360263 - RNA, 19 nt, Artificial Sequence
  Description of Artificial Sequence: Synthetic oligonucleotide
  Antisense strand to SEQ ID NO: 2360262
uguugcgggaguagaaagc

SEQ ID NO: 2360264 - RNA, 19 nt, Artificial Sequence
  Description of Artificial Sequence: Synthetic oligonucleotide
  Sense strand starting at position 959 of SEQ ID NO: 1885680
gagguugaguacucucaag

SEQ ID NO: 2360265 - RNA, 19 nt, Artificial Sequence
  Description of Artificial Sequence: Synthetic oligonucleotide
  Antisense strand to SEQ ID NO: 2360264
cuugagaguacucaaccuc

SEQ ID NO: 2360266 - RNA, 19 nt, Artificial Sequence
  Description of Artificial Sequence: Synthetic oligonucleotide
  Sense strand starting at position 966 of SEQ ID NO: 1885680
aguacucucaagcggagau

SEQ ID NO: 2360267 - RNA, 19 nt, Artificial Sequence
  Description of Artificial Sequence: Synthetic oligonucleotide
  Antisense strand to SEQ ID NO: 2360266
aucuccgcuugagaguacu

SEQ ID NO: 2360268 - RNA, 19 nt, Artificial Sequence
  Description of Artificial Sequence: Synthetic oligonucleotide
  Sense strand starting at position 984 of SEQ ID NO: 1885680
ugaagauucuuccaauacg

SEQ ID NO: 2360269 - RNA, 19 nt, Artificial Sequence
  Description of Artificial Sequence: Synthetic oligonucleotide
  Antisense strand to SEQ ID NO: 2360268
cguauuggaagaaucuuca

SEQ ID NO: 2360270 - RNA, 19 nt, Artificial Sequence
  Description of Artificial Sequence: Synthetic oligonucleotide
  Sense strand starting at position 1194 of SEQ ID NO: 1885680
cucugccaccugugagaaa

SEQ ID NO: 2360271 - RNA, 19 nt, Artificial Sequence
  Description of Artificial Sequence: Synthetic oligonucleotide
  Antisense strand to SEQ ID NO: 2360270
uuucucacagguggcagag

SEQ ID NO: 2360272 - RNA, 19 nt, Artificial Sequence
  Description of Artificial Sequence: Synthetic oligonucleotide
  Sense strand starting at position 1205 of SEQ ID NO: 1885680
gugagaaaccuccggugga

SEQ ID NO: 2360273 - RNA, 19 nt, Artificial Sequence
  Description of Artificial Sequence: Synthetic oligonucleotide
  Antisense strand to SEQ ID NO: 2360272
uccaccggagguuucucac

SEQ ID NO: 2360274 - RNA, 19 nt, Artificial Sequence
  Description of Artificial Sequence: Synthetic oligonucleotide
  Sense strand starting at position 1347 of SEQ ID NO: 1885680
aacagauccuacggcaaga

SEQ ID NO: 2360275 - RNA, 19 nt, Artificial Sequence
  Description of Artificial Sequence: Synthetic oligonucleotide
  Antisense strand to SEQ ID NO: 2360274
ucuugccguaggaucuguu

SEQ ID NO: 2360276 - RNA, 19 nt, Artificial Sequence
  Description of Artificial Sequence: Synthetic oligonucleotide
  Sense strand starting at position 1363 of SEQ ID NO: 1885680
agagcugcuggccaugaua

SEQ ID NO: 2360277 - RNA, 19 nt, Artificial Sequence
  Description of Artificial Sequence: Synthetic oligonucleotide
  Antisense strand to SEQ ID NO: 2360276
uaucauggccagcagcucu

SEQ ID NO: 2360278 - RNA, 19 nt, Artificial Sequence
  Description of Artificial Sequence: Synthetic oligonucleotide
  Sense strand starting at position 1464 of SEQ ID NO: 1885680
gccuccuguacuggaagaa

SEQ ID NO: 2360279 - RNA, 19 nt, Artificial Sequence
  Description of Artificial Sequence: Synthetic oligonucleotide
  Antisense strand to SEQ ID NO: 2360278
uucuuccaguacaggaggc

SEQ ID NO: 2360280 - RNA, 19 nt, Artificial Sequence
  Description of Artificial Sequence: Synthetic oligonucleotide
  Sense strand starting at position 1497 of SEQ ID NO: 1885680
cagccauccucgugcuacu

SEQ ID NO: 2360281 - RNA, 19 nt, Artificial Sequence
  Description of Artificial Sequence: Synthetic oligonucleotide
  Antisense strand to SEQ ID NO: 2360280
aguagcacgaggauggcug

SEQ ID NO: 2360282 - RNA, 19 nt, Artificial Sequence
  Description of Artificial Sequence: Synthetic oligonucleotide
  Sense strand starting at position 1592 of SEQ ID NO: 1885680
cgacucauccuggauucgu

SEQ ID NO: 2360283 - RNA, 19 nt, Artificial Sequence
  Description of Artificial Sequence: Synthetic oligonucleotide
  Antisense strand to SEQ ID NO: 2360282
acgaauccaggaugagucg

SEQ ID NO: 2360284 - RNA, 19 nt, Artificial Sequence
  Description of Artificial Sequence: Synthetic oligonucleotide
  Sense strand starting at position 1740 of SEQ ID NO: 1885680
agcgaaaugcucugcacuc

SEQ ID NO: 2360285 - RNA, 19 nt, Artificial Sequence
  Description of Artificial Sequence: Synthetic oligonucleotide
  Antisense strand to SEQ ID NO: 2360284
gagugcagagcauuucgcu

SEQ ID NO: 2360286 - RNA, 19 nt, Artificial Sequence
  Description of Artificial Sequence: Synthetic oligonucleotide
  Sense strand starting at position 1809 of SEQ ID NO: 1885680
gugaguucuucggugucag

SEQ ID NO: 2360287 - RNA, 19 nt, Artificial Sequence
  Description of Artificial Sequence: Synthetic oligonucleotide
  Antisense strand to SEQ ID NO: 2360286
cugacaccgaagaacucac

SEQ ID NO: 2360288 - RNA, 19 nt, Artificial Sequence
  Description of Artificial Sequence: Synthetic oligonucleotide
  Sense strand starting at position 1810 of SEQ ID NO: 1885680
ugaguucuucggugucaga

SEQ ID NO: 2360289 - RNA, 19 nt, Artificial Sequence
  Description of Artificial Sequence: Synthetic oligonucleotide
  Antisense strand to SEQ ID NO: 2360288
ucugacaccgaagaacuca

SEQ ID NO: 2360290 - RNA, 19 nt, Artificial Sequence
  Description of Artificial Sequence: Synthetic oligonucleotide
  Sense strand starting at position 2178 of SEQ ID NO: 1885680
aguuccugacccugaucua

SEQ ID NO: 2360291 - RNA, 19 nt, Artificial Sequence
  Description of Artificial Sequence: Synthetic oligonucleotide
  Antisense strand to SEQ ID NO: 2360290
uagaucagggucaggaacu

SEQ ID NO: 2360292 - RNA, 19 nt, Artificial Sequence
  Description of Artificial Sequence: Synthetic oligonucleotide
  Sense strand starting at position 2263 of SEQ ID NO: 1885680
gccugaugaggacgaagau

SEQ ID NO: 2360293 - RNA, 19 nt, Artificial Sequence
  Description of Artificial Sequence: Synthetic oligonucleotide
  Antisense strand to SEQ ID NO: 2360292
aucuucguccucaucaggc

SEQ ID NO: 2360294 - RNA, 19 nt, Artificial Sequence
  Description of Artificial Sequence: Synthetic oligonucleotide
  Sense strand starting at position 2279 of SEQ ID NO: 1885680
gaugcuaaccucgacugaa

SEQ ID NO: 2360295 - RNA, 19 nt, Artificial Sequence
  Description of Artificial Sequence: Synthetic oligonucleotide
  Antisense strand to SEQ ID NO: 2360294
uucagucgagguuagcauc

SEQ ID NO: 2360296 - RNA, 19 nt, Artificial Sequence
  Description of Artificial Sequence: Synthetic oligonucleotide
  Sense strand starting at position 3488 of SEQ ID NO: 1885680
acuucuuucugccaugaga

SEQ ID NO: 2360297 - RNA, 19 nt, Artificial Sequence
  Description of Artificial Sequence: Synthetic oligonucleotide
  Antisense strand to SEQ ID NO: 2360296
ucucauggcagaaagaagu

SEQ ID NO: 2360298 - RNA, 19 nt, Artificial Sequence
  Description of Artificial Sequence: Synthetic oligonucleotide
  Sense strand starting at position 3490 of SEQ ID NO: 1885680
uucuuucugccaugagaag

SEQ ID NO: 2360299 - RNA, 19 nt, Artificial Sequence
  Description of Artificial Sequence: Synthetic oligonucleotide
  Antisense strand to SEQ ID NO: 2360298
cuucucauggcagaaagaa

SEQ ID NO: 2360300 - RNA, 19 nt, Artificial Sequence
  Description of Artificial Sequence: Synthetic oligonucleotide
  Sense strand starting at position 3547 of SEQ ID NO: 1885680
cccacaggcucaugucaaa

SEQ ID NO: 2360301 - RNA, 19 nt, Artificial Sequence
  Description of Artificial Sequence: Synthetic oligonucleotide
  Antisense strand to SEQ ID NO: 2360300
uuugacaugagccuguggg

SEQ ID NO: 2360302 - RNA, 19 nt, Artificial Sequence
  Description of Artificial Sequence: Synthetic oligonucleotide
  Sense strand starting at position 3678 of SEQ ID NO: 1885680
gccuccucgccaugugauu

SEQ ID NO: 2360303 - RNA, 19 nt, Artificial Sequence
  Description of Artificial Sequence: Synthetic oligonucleotide
  Antisense strand to SEQ ID NO: 2360302
aaucacauggcgaggaggc

SEQ ID NO: 2360304 - RNA, 19 nt, Artificial Sequence
  Description of Artificial Sequence: Synthetic oligonucleotide
  Sense strand starting at position 48 of SEQ ID NO: 1885681
auauguuuacgcuagaagg

SEQ ID NO: 2360305 - RNA, 19 nt, Artificial Sequence
  Description of Artificial Sequence: Synthetic oligonucleotide
  Antisense strand to SEQ ID NO: 2360304
ccuucuagcguaaacauau

SEQ ID NO: 2360306 - RNA, 19 nt, Artificial Sequence
  Description of Artificial Sequence: Synthetic oligonucleotide
  Sense strand starting at position 59 of SEQ ID NO: 1885681
cuagaagguuuggauuuaa

SEQ ID NO: 2360307 - RNA, 19 nt, Artificial Sequence
  Description of Artificial Sequence: Synthetic oligonucleotide
  Antisense strand to SEQ ID NO: 2360306
uuaaauccaaaccuucuag

SEQ ID NO: 2360308 - RNA, 19 nt, Artificial Sequence
  Description of Artificial Sequence: Synthetic oligonucleotide
  Sense strand starting at position 73 of SEQ ID NO: 1885681
uuuaauauugcagacagua

SEQ ID NO: 2360309 - RNA, 19 nt, Artificial Sequence
  Description of Artificial Sequence: Synthetic oligonucleotide
  Antisense strand to SEQ ID NO: 2360308
uacugucugcaauauuaaa

SEQ ID NO: 2360310 - RNA, 19 nt, Artificial Sequence
  Description of Artificial Sequence: Synthetic oligonucleotide
  Sense strand starting at position 277 of SEQ ID NO: 1885681
gguccaguggcuuagaaga

SEQ ID NO: 2360311 - RNA, 19 nt, Artificial Sequence
  Description of Artificial Sequence: Synthetic oligonucleotide
  Antisense strand to SEQ ID NO: 2360310
ucuucuaagccacuggacc

SEQ ID NO: 2360312 - RNA, 19 nt, Artificial Sequence
  Description of Artificial Sequence: Synthetic oligonucleotide
  Sense strand starting at position 560 of SEQ ID NO: 1885681
agauacaugucuguuggga

SEQ ID NO: 2360313 - RNA, 19 nt, Artificial Sequence
  Description of Artificial Sequence: Synthetic oligonucleotide
  Antisense strand to SEQ ID NO: 2360312
ucccaacagacauguaucu

SEQ ID NO: 2360314 - RNA, 19 nt, Artificial Sequence
  Description of Artificial Sequence: Synthetic oligonucleotide
  Sense strand starting at position 671 of SEQ ID NO: 1885681
uggagaggcgugcagauau

SEQ ID NO: 2360315 - RNA, 19 nt, Artificial Sequence
  Description of Artificial Sequence: Synthetic oligonucleotide
  Antisense strand to SEQ ID NO: 2360314
auaucugcacgccucucca

SEQ ID NO: 2360316 - RNA, 19 nt, Artificial Sequence
  Description of Artificial Sequence: Synthetic oligonucleotide
  Sense strand starting at position 745 of SEQ ID NO: 1885681
agggcaguccugggagagu

SEQ ID NO: 2360317 - RNA, 19 nt, Artificial Sequence
  Description of Artificial Sequence: Synthetic oligonucleotide
  Antisense strand to SEQ ID NO: 2360316
acucucccaggacugcccu

SEQ ID NO: 2360318 - RNA, 19 nt, Artificial Sequence
  Description of Artificial Sequence: Synthetic oligonucleotide
  Sense strand starting at position 761 of SEQ ID NO: 1885681
aguggagauuguaggaaga

SEQ ID NO: 2360319 - RNA, 19 nt, Artificial Sequence
  Description of Artificial Sequence: Synthetic oligonucleotide
  Antisense strand to SEQ ID NO: 2360318
ucuuccuacaaucuccacu

SEQ ID NO: 2360320 - RNA, 19 nt, Artificial Sequence
  Description of Artificial Sequence: Synthetic oligonucleotide
  Sense strand starting at position 903 of SEQ ID NO: 1885681
gcaguuauccagcacauag

SEQ ID NO: 2360321 - RNA, 19 nt, Artificial Sequence
  Description of Artificial Sequence: Synthetic oligonucleotide
  Antisense strand to SEQ ID NO: 2360320
cuaugugcuggauaacugc

SEQ ID NO: 2360322 - RNA, 19 nt, Artificial Sequence
  Description of Artificial Sequence: Synthetic oligonucleotide
  Sense strand starting at position 905 of SEQ ID NO: 1885681
aguuauccagcacauagua

SEQ ID NO: 2360323 - RNA, 19 nt, Artificial Sequence
  Description of Artificial Sequence: Synthetic oligonucleotide
  Antisense strand to SEQ ID NO: 2360322
uacuaugugcuggauaacu

SEQ ID NO: 2360324 - RNA, 19 nt, Artificial Sequence
  Description of Artificial Sequence: Synthetic oligonucleotide
  Sense strand starting at position 917 of SEQ ID NO: 1885681
cauaguagguauguuauaa

SEQ ID NO: 2360325 - RNA, 19 nt, Artificial Sequence
  Description of Artificial Sequence: Synthetic oligonucleotide
  Antisense strand to SEQ ID NO: 2360324
uuauaacauaccuacuaug

SEQ ID NO: 2360326 - RNA, 19 nt, Artificial Sequence
  Description of Artificial Sequence: Synthetic oligonucleotide
  Sense strand starting at position 1103 of SEQ ID NO: 1885681
gcaucuuugcuagagauuc

SEQ ID NO: 2360327 - RNA, 19 nt, Artificial Sequence
  Description of Artificial Sequence: Synthetic oligonucleotide
  Antisense strand to SEQ ID NO: 2360326
gaaucucuagcaaagaugc

SEQ ID NO: 2360328 - RNA, 19 nt, Artificial Sequence
  Description of Artificial Sequence: Synthetic oligonucleotide
  Sense strand starting at position 1208 of SEQ ID NO: 1885681
gugauucucaggugaccaa

SEQ ID NO: 2360329 - RNA, 19 nt, Artificial Sequence
  Description of Artificial Sequence: Synthetic oligonucleotide
  Antisense strand to SEQ ID NO: 2360328
uuggucaccugagaaucac

SEQ ID NO: 2360330 - RNA, 19 nt, Artificial Sequence
  Description of Artificial Sequence: Synthetic oligonucleotide
  Sense strand starting at position 1237 of SEQ ID NO: 1885681
gaggauugaccaggugcau

SEQ ID NO: 2360331 - RNA, 19 nt, Artificial Sequence
  Description of Artificial Sequence: Synthetic oligonucleotide
  Antisense strand to SEQ ID NO: 2360330
augcaccuggucaauccuc

SEQ ID NO: 2360332 - RNA, 19 nt, Artificial Sequence
  Description of Artificial Sequence: Synthetic oligonucleotide
  Sense strand starting at position 1508 of SEQ ID NO: 1885681
ugauuaguugggcaucuga

SEQ ID NO: 2360333 - RNA, 19 nt, Artificial Sequence
  Description of Artificial Sequence: Synthetic oligonucleotide
  Antisense strand to SEQ ID NO: 2360332
ucagaugcccaacuaauca

SEQ ID NO: 2360334 - RNA, 19 nt, Artificial Sequence
  Description of Artificial Sequence: Synthetic oligonucleotide
  Sense strand starting at position 1517 of SEQ ID NO: 1885681
gggcaucugauuuguccuu

SEQ ID NO: 2360335 - RNA, 19 nt, Artificial Sequence
  Description of Artificial Sequence: Synthetic oligonucleotide
  Antisense strand to SEQ ID NO: 2360334
aaggacaaaucagaugccc

SEQ ID NO: 2360336 - RNA, 19 nt, Artificial Sequence
  Description of Artificial Sequence: Synthetic oligonucleotide
  Sense strand starting at position 1519 of SEQ ID NO: 1885681
gcaucugauuuguccuuga

SEQ ID NO: 2360337 - RNA, 19 nt, Artificial Sequence
  Description of Artificial Sequence: Synthetic oligonucleotide
  Antisense strand to SEQ ID NO: 2360336
ucaaggacaaaucagaugc

SEQ ID NO: 2360338 - RNA, 19 nt, Artificial Sequence
  Description of Artificial Sequence: Synthetic oligonucleotide
  Sense strand starting at position 1681 of SEQ ID NO: 1885681
uuuccauccgacgaaauga

SEQ ID NO: 2360339 - RNA, 19 nt, Artificial Sequence
  Description of Artificial Sequence: Synthetic oligonucleotide
  Antisense strand to SEQ ID NO: 2360338
ucauuucgucggauggaaa

SEQ ID NO: 2360340 - RNA, 19 nt, Artificial Sequence
  Description of Artificial Sequence: Synthetic oligonucleotide
  Sense strand starting at position 1893 of SEQ ID NO: 1885681
ggaagagcugcccacugau

SEQ ID NO: 2360341 - RNA, 19 nt, Artificial Sequence
  Description of Artificial Sequence: Synthetic oligonucleotide
  Antisense strand to SEQ ID NO: 2360340
aucagugggcagcucuucc

SEQ ID NO: 2360342 - RNA, 19 nt, Artificial Sequence
  Description of Artificial Sequence: Synthetic oligonucleotide
  Sense strand starting at position 1992 of SEQ ID NO: 1885681
ggaggagucaugcaacggu

SEQ ID NO: 2360343 - RNA, 19 nt, Artificial Sequence
  Description of Artificial Sequence: Synthetic oligonucleotide
  Antisense strand to SEQ ID NO: 2360342
accguugcaugacuccucc

SEQ ID NO: 2360344 - RNA, 19 nt, Artificial Sequence
  Description of Artificial Sequence: Synthetic oligonucleotide
  Sense strand starting at position 2325 of SEQ ID NO: 1885681
cagagaauuccacgaguuc

SEQ ID NO: 2360345 - RNA, 19 nt, Artificial Sequence
  Description of Artificial Sequence: Synthetic oligonucleotide
  Antisense strand to SEQ ID NO: 2360344
gaacucguggaauucucug

SEQ ID NO: 2360346 - RNA, 19 nt, Artificial Sequence
  Description of Artificial Sequence: Synthetic oligonucleotide
  Sense strand starting at position 2369 of SEQ ID NO: 1885681
agagcuacccaagaauguu

SEQ ID NO: 2360347 - RNA, 19 nt, Artificial Sequence
  Description of Artificial Sequence: Synthetic oligonucleotide
  Antisense strand to SEQ ID NO: 2360346
aacauucuuggguagcucu

SEQ ID NO: 2360348 - RNA, 19 nt, Artificial Sequence
  Description of Artificial Sequence: Synthetic oligonucleotide
  Sense strand starting at position 2401 of SEQ ID NO: 1885681
cugagaguuggcuauguca

SEQ ID NO: 2360349 - RNA, 19 nt, Artificial Sequence
  Description of Artificial Sequence: Synthetic oligonucleotide
  Antisense strand to SEQ ID NO: 2360348
ugacauagccaacucucag

SEQ ID NO: 2360350 - RNA, 19 nt, Artificial Sequence
  Description of Artificial Sequence: Synthetic oligonucleotide
  Sense strand starting at position 2409 of SEQ ID NO: 1885681
uggcuaugucaucaaucac

SEQ ID NO: 2360351 - RNA, 19 nt, Artificial Sequence
  Description of Artificial Sequence: Synthetic oligonucleotide
  Antisense strand to SEQ ID NO: 2360350
gugauugaugacauagcca

SEQ ID NO: 2360352 - RNA, 19 nt, Artificial Sequence
  Description of Artificial Sequence: Synthetic oligonucleotide
  Sense strand starting at position 2439 of SEQ ID NO: 1885681
ggcauuagaaugggccaaa

SEQ ID NO: 2360353 - RNA, 19 nt, Artificial Sequence
  Description of Artificial Sequence: Synthetic oligonucleotide
  Antisense strand to SEQ ID NO: 2360352
uuuggcccauucuaaugcc

SEQ ID NO: 2360354 - RNA, 19 nt, Artificial Sequence
  Description of Artificial Sequence: Synthetic oligonucleotide
  Sense strand starting at position 2610 of SEQ ID NO: 1885681
cgaugaguuccagagccug

SEQ ID NO: 2360355 - RNA, 19 nt, Artificial Sequence
  Description of Artificial Sequence: Synthetic oligonucleotide
  Antisense strand to SEQ ID NO: 2360354
caggcucuggaacucaucg

SEQ ID NO: 2360356 - RNA, 19 nt, Artificial Sequence
  Description of Artificial Sequence: Synthetic oligonucleotide
  Sense strand starting at position 2892 of SEQ ID NO: 1885681
aguccauccggacaucaau

SEQ ID NO: 2360357 - RNA, 19 nt, Artificial Sequence
  Description of Artificial Sequence: Synthetic oligonucleotide
  Antisense strand to SEQ ID NO: 2360356
auugauguccggauggacu

SEQ ID NO: 2360358 - RNA, 19 nt, Artificial Sequence
  Description of Artificial Sequence: Synthetic oligonucleotide
  Sense strand starting at position 3009 of SEQ ID NO: 1885681
ggaugagaaguucgcccaa

SEQ ID NO: 2360359 - RNA, 19 nt, Artificial Sequence
  Description of Artificial Sequence: Synthetic oligonucleotide
  Antisense strand to SEQ ID NO: 2360358
uugggcgaacuucucaucc

SEQ ID NO: 2360360 - RNA, 19 nt, Artificial Sequence
  Description of Artificial Sequence: Synthetic oligonucleotide
  Sense strand starting at position 3011 of SEQ ID NO: 1885681
augagaaguucgcccaaga

SEQ ID NO: 2360361 - RNA, 19 nt, Artificial Sequence
  Description of Artificial Sequence: Synthetic oligonucleotide
  Antisense strand to SEQ ID NO: 2360360
ucuugggcgaacuucucau

SEQ ID NO: 2360362 - RNA, 19 nt, Artificial Sequence
  Description of Artificial Sequence: Synthetic oligonucleotide
  Sense strand starting at position 3165 of SEQ ID NO: 1885681
cgaauuugacaucguaccu

SEQ ID NO: 2360363 - RNA, 19 nt, Artificial Sequence
  Description of Artificial Sequence: Synthetic oligonucleotide
  Antisense strand to SEQ ID NO: 2360362
agguacgaugucaaauucg

SEQ ID NO: 2360364 - RNA, 19 nt, Artificial Sequence
  Description of Artificial Sequence: Synthetic oligonucleotide
  Sense strand starting at position 3237 of SEQ ID NO: 1885681
cgaagucgacuggaucaaa

SEQ ID NO: 2360365 - RNA, 19 nt, Artificial Sequence
  Description of Artificial Sequence: Synthetic oligonucleotide
  Antisense strand to SEQ ID NO: 2360364
uuugauccagucgacuucg

SEQ ID NO: 2360366 - RNA, 19 nt, Artificial Sequence
  Description of Artificial Sequence: Synthetic oligonucleotide
  Sense strand starting at position 3275 of SEQ ID NO: 1885681
cucccuacugccugaagaa

SEQ ID NO: 2360367 - RNA, 19 nt, Artificial Sequence
  Description of Artificial Sequence: Synthetic oligonucleotide
  Antisense strand to SEQ ID NO: 2360366
uucuucaggcaguagggag

SEQ ID NO: 2360368 - RNA, 19 nt, Artificial Sequence
  Description of Artificial Sequence: Synthetic oligonucleotide
  Sense strand starting at position 3314 of SEQ ID NO: 1885681
caugcauugcccuagagag

SEQ ID NO: 2360369 - RNA, 19 nt, Artificial Sequence
  Description of Artificial Sequence: Synthetic oligonucleotide
  Antisense strand to SEQ ID NO: 2360368
cucucuagggcaaugcaug

SEQ ID NO: 2360370 - RNA, 19 nt, Artificial Sequence
  Description of Artificial Sequence: Synthetic oligonucleotide
  Sense strand starting at position 3387 of SEQ ID NO: 1885681
cguguuuaacccgaaggaa

SEQ ID NO: 2360371 - RNA, 19 nt, Artificial Sequence
  Description of Artificial Sequence: Synthetic oligonucleotide
  Antisense strand to SEQ ID NO: 2360370
uuccuucggguuaaacacg

SEQ ID NO: 2360372 - RNA, 19 nt, Artificial Sequence
  Description of Artificial Sequence: Synthetic oligonucleotide
  Sense strand starting at position 3648 of SEQ ID NO: 1885681
ggaacuguuugaccaguua

SEQ ID NO: 2360373 - RNA, 19 nt, Artificial Sequence
  Description of Artificial Sequence: Synthetic oligonucleotide
  Antisense strand to SEQ ID NO: 2360372
uaacuggucaaacaguucc

SEQ ID NO: 2360374 - RNA, 19 nt, Artificial Sequence
  Description of Artificial Sequence: Synthetic oligonucleotide
  Sense strand starting at position 3704 of SEQ ID NO: 1885681
ggaccauuguggaggaaag

SEQ ID NO: 2360375 - RNA, 19 nt, Artificial Sequence
  Description of Artificial Sequence: Synthetic oligonucleotide
  Antisense strand to SEQ ID NO: 2360374
cuuuccuccacaauggucc

SEQ ID NO: 2360376 - RNA, 19 nt, Artificial Sequence
  Description of Artificial Sequence: Synthetic oligonucleotide
  Sense strand starting at position 3738 of SEQ ID NO: 1885681
caccgaagauguguggaaa

SEQ ID NO: 2360377 - RNA, 19 nt, Artificial Sequence
  Description of Artificial Sequence: Synthetic oligonucleotide
  Antisense strand to SEQ ID NO: 2360376
uuuccacacaucuucggug

SEQ ID NO: 2360378 - RNA, 19 nt, Artificial Sequence
  Description of Artificial Sequence: Synthetic oligonucleotide
  Sense strand starting at position 3741 of SEQ ID NO: 1885681
cgaagauguguggaaagca

SEQ ID NO: 2360379 - RNA, 19 nt, Artificial Sequence
  Description of Artificial Sequence: Synthetic oligonucleotide
  Antisense strand to SEQ ID NO: 2360378
ugcuuuccacacaucuucg

SEQ ID NO: 2360380 - RNA, 19 nt, Artificial Sequence
  Description of Artificial Sequence: Synthetic oligonucleotide
  Sense strand starting at position 3870 of SEQ ID NO: 1885681
guucuuugugcuuucuuau

SEQ ID NO: 2360381 - RNA, 19 nt, Artificial Sequence
  Description of Artificial Sequence: Synthetic oligonucleotide
  Antisense strand to SEQ ID NO: 2360380
auaagaaagcacaaagaac

SEQ ID NO: 2360382 - RNA, 19 nt, Artificial Sequence
  Description of Artificial Sequence: Synthetic oligonucleotide
  Sense strand starting at position 3902 of SEQ ID NO: 1885681
ugaucuacucaaugaguca

SEQ ID NO: 2360383 - RNA, 19 nt, Artificial Sequence
  Description of Artificial Sequence: Synthetic oligonucleotide
  Antisense strand to SEQ ID NO: 2360382
ugacucauugaguagauca

SEQ ID NO: 2360384 - RNA, 19 nt, Artificial Sequence
  Description of Artificial Sequence: Synthetic oligonucleotide
  Sense strand starting at position 4 of SEQ ID NO: 1885682
ugaguacaucgaugaguuc

SEQ ID NO: 2360385 - RNA, 19 nt, Artificial Sequence
  Description of Artificial Sequence: Synthetic oligonucleotide
  Antisense strand to SEQ ID NO: 2360384
gaacucaucgauguacuca

SEQ ID NO: 2360386 - RNA, 19 nt, Artificial Sequence
  Description of Artificial Sequence: Synthetic oligonucleotide
  Sense strand starting at position 13 of SEQ ID NO: 1885682
cgaugaguuccagagccug

SEQ ID NO: 2360387 - RNA, 19 nt, Artificial Sequence
  Description of Artificial Sequence: Synthetic oligonucleotide
  Antisense strand to SEQ ID NO: 2360386
caggcucuggaacucaucg

SEQ ID NO: 2360388 - RNA, 19 nt, Artificial Sequence
  Description of Artificial Sequence: Synthetic oligonucleotide
  Sense strand starting at position 144 of SEQ ID NO: 1885682
gucugauugugcucauccu

SEQ ID NO: 2360389 - RNA, 19 nt, Artificial Sequence
  Description of Artificial Sequence: Synthetic oligonucleotide
  Antisense strand to SEQ ID NO: 2360388
aggaugagcacaaucagac

SEQ ID NO: 2360390 - RNA, 19 nt, Artificial Sequence
  Description of Artificial Sequence: Synthetic oligonucleotide
  Sense strand starting at position 295 of SEQ ID NO: 1885682
aguccauccggacaucaau

SEQ ID NO: 2360391 - RNA, 19 nt, Artificial Sequence
  Description of Artificial Sequence: Synthetic oligonucleotide
  Antisense strand to SEQ ID NO: 2360390
auugauguccggauggacu

SEQ ID NO: 2360392 - RNA, 19 nt, Artificial Sequence
  Description of Artificial Sequence: Synthetic oligonucleotide
  Sense strand starting at position 412 of SEQ ID NO: 1885682
ggaugagaaguucgcccaa

SEQ ID NO: 2360393 - RNA, 19 nt, Artificial Sequence
  Description of Artificial Sequence: Synthetic oligonucleotide
  Antisense strand to SEQ ID NO: 2360392
uugggcgaacuucucaucc

SEQ ID NO: 2360394 - RNA, 19 nt, Artificial Sequence
  Description of Artificial Sequence: Synthetic oligonucleotide
  Sense strand starting at position 414 of SEQ ID NO: 1885682
augagaaguucgcccaaga

SEQ ID NO: 2360395 - RNA, 19 nt, Artificial Sequence
  Description of Artificial Sequence: Synthetic oligonucleotide
  Antisense strand to SEQ ID NO: 2360394
ucuugggcgaacuucucau

SEQ ID NO: 2360396 - RNA, 19 nt, Artificial Sequence
  Description of Artificial Sequence: Synthetic oligonucleotide
  Sense strand starting at position 565 of SEQ ID NO: 1885682
caucgaauuugacaucgua

SEQ ID NO: 2360397 - RNA, 19 nt, Artificial Sequence
  Description of Artificial Sequence: Synthetic oligonucleotide
  Antisense strand to SEQ ID NO: 2360396
uacgaugucaaauucgaug

SEQ ID NO: 2360398 - RNA, 19 nt, Artificial Sequence
  Description of Artificial Sequence: Synthetic oligonucleotide
  Sense strand starting at position 568 of SEQ ID NO: 1885682
cgaauuugacaucguaccu

SEQ ID NO: 2360399 - RNA, 19 nt, Artificial Sequence
  Description of Artificial Sequence: Synthetic oligonucleotide
  Antisense strand to SEQ ID NO: 2360398
agguacgaugucaaauucg

SEQ ID NO: 2360400 - RNA, 19 nt, Artificial Sequence
  Description of Artificial Sequence: Synthetic oligonucleotide
  Sense strand starting at position 640 of SEQ ID NO: 1885682
cgaagucgacuggaucaaa

SEQ ID NO: 2360401 - RNA, 19 nt, Artificial Sequence
  Description of Artificial Sequence: Synthetic oligonucleotide
  Antisense strand to SEQ ID NO: 2360400
uuugauccagucgacuucg

SEQ ID NO: 2360402 - RNA, 19 nt, Artificial Sequence
  Description of Artificial Sequence: Synthetic oligonucleotide
  Sense strand starting at position 678 of SEQ ID NO: 1885682
cucccuacugccugaagaa

SEQ ID NO: 2360403 - RNA, 19 nt, Artificial Sequence
  Description of Artificial Sequence: Synthetic oligonucleotide
  Antisense strand to SEQ ID NO: 2360402
uucuucaggcaguagggag

SEQ ID NO: 2360404 - RNA, 19 nt, Artificial Sequence
  Description of Artificial Sequence: Synthetic oligonucleotide
  Sense strand starting at position 717 of SEQ ID NO: 1885682
caugcauugcccuagagag

SEQ ID NO: 2360405 - RNA, 19 nt, Artificial Sequence
  Description of Artificial Sequence: Synthetic oligonucleotide
  Antisense strand to SEQ ID NO: 2360404
cucucuagggcaaugcaug

SEQ ID NO: 2360406 - RNA, 19 nt, Artificial Sequence
  Description of Artificial Sequence: Synthetic oligonucleotide
  Sense strand starting at position 789 of SEQ ID NO: 1885682
acguguuuaacccgaagga

SEQ ID NO: 2360407 - RNA, 19 nt, Artificial Sequence
  Description of Artificial Sequence: Synthetic oligonucleotide
  Antisense strand to SEQ ID NO: 2360406
uccuucggguuaaacacgu

SEQ ID NO: 2360408 - RNA, 19 nt, Artificial Sequence
  Description of Artificial Sequence: Synthetic oligonucleotide
  Sense strand starting at position 790 of SEQ ID NO: 1885682
cguguuuaacccgaaggaa

SEQ ID NO: 2360409 - RNA, 19 nt, Artificial Sequence
  Description of Artificial Sequence: Synthetic oligonucleotide
  Antisense strand to SEQ ID NO: 2360408
uuccuucggguuaaacacg

SEQ ID NO: 2360410 - RNA, 19 nt, Artificial Sequence
  Description of Artificial Sequence: Synthetic oligonucleotide
  Sense strand starting at position 1051 of SEQ ID NO: 1885682
ggaacuguuugaccaguua

SEQ ID NO: 2360411 - RNA, 19 nt, Artificial Sequence
  Description of Artificial Sequence: Synthetic oligonucleotide
  Antisense strand to SEQ ID NO: 2360410
uaacuggucaaacaguucc

SEQ ID NO: 2360412 - RNA, 19 nt, Artificial Sequence
  Description of Artificial Sequence: Synthetic oligonucleotide
  Sense strand starting at position 1107 of SEQ ID NO: 1885682
ggaccauuguggaggaaag

SEQ ID NO: 2360413 - RNA, 19 nt, Artificial Sequence
  Description of Artificial Sequence: Synthetic oligonucleotide
  Antisense strand to SEQ ID NO: 2360412
cuuuccuccacaauggucc

SEQ ID NO: 2360414 - RNA, 19 nt, Artificial Sequence
  Description of Artificial Sequence: Synthetic oligonucleotide
  Sense strand starting at position 1141 of SEQ ID NO: 1885682
caccgaagauguguggaaa

SEQ ID NO: 2360415 - RNA, 19 nt, Artificial Sequence
  Description of Artificial Sequence: Synthetic oligonucleotide
  Antisense strand to SEQ ID NO: 2360414
uuuccacacaucuucggug

SEQ ID NO: 2360416 - RNA, 19 nt, Artificial Sequence
  Description of Artificial Sequence: Synthetic oligonucleotide
  Sense strand starting at position 1144 of SEQ ID NO: 1885682
cgaagauguguggaaagca

SEQ ID NO: 2360417 - RNA, 19 nt, Artificial Sequence
  Description of Artificial Sequence: Synthetic oligonucleotide
  Antisense strand to SEQ ID NO: 2360416
ugcuuuccacacaucuucg

SEQ ID NO: 2360418 - RNA, 19 nt, Artificial Sequence
  Description of Artificial Sequence: Synthetic oligonucleotide
  Sense strand starting at position 1272 of SEQ ID NO: 1885682
gguucuuugugcuuucuua

SEQ ID NO: 2360419 - RNA, 19 nt, Artificial Sequence
  Description of Artificial Sequence: Synthetic oligonucleotide
  Antisense strand to SEQ ID NO: 2360418
uaagaaagcacaaagaacc

SEQ ID NO: 2360420 - RNA, 19 nt, Artificial Sequence
  Description of Artificial Sequence: Synthetic oligonucleotide
  Sense strand starting at position 1273 of SEQ ID NO: 1885682
guucuuugugcuuucuuau

SEQ ID NO: 2360421 - RNA, 19 nt, Artificial Sequence
  Description of Artificial Sequence: Synthetic oligonucleotide
  Antisense strand to SEQ ID NO: 2360420
auaagaaagcacaaagaac

SEQ ID NO: 2360422 - RNA, 19 nt, Artificial Sequence
  Description of Artificial Sequence: Synthetic oligonucleotide
  Sense strand starting at position 1282 of SEQ ID NO: 1885682
gcuuucuuauggccaggaa

SEQ ID NO: 2360423 - RNA, 19 nt, Artificial Sequence
  Description of Artificial Sequence: Synthetic oligonucleotide
  Antisense strand to SEQ ID NO: 2360422
uuccuggccauaagaaagc

SEQ ID NO: 2360424 - RNA, 19 nt, Artificial Sequence
  Description of Artificial Sequence: Synthetic oligonucleotide
  Sense strand starting at position 1305 of SEQ ID NO: 1885682
ugaucuacucaaugaguca

SEQ ID NO: 2360425 - RNA, 19 nt, Artificial Sequence
  Description of Artificial Sequence: Synthetic oligonucleotide
  Antisense strand to SEQ ID NO: 2360424
ugacucauugaguagauca

SEQ ID NO: 2360426 - RNA, 19 nt, Artificial Sequence
  Description of Artificial Sequence: Synthetic oligonucleotide
  Sense strand starting at position 1380 of SEQ ID NO: 1885682
ucuacugcucccuggacaa

SEQ ID NO: 2360427 - RNA, 19 nt, Artificial Sequence
  Description of Artificial Sequence: Synthetic oligonucleotide
  Antisense strand to SEQ ID NO: 2360426
uuguccagggagcaguaga

SEQ ID NO: 2360428 - RNA, 19 nt, Artificial Sequence
  Description of Artificial Sequence: Synthetic oligonucleotide
  Sense strand starting at position 1471 of SEQ ID NO: 1885682
gaacgucaugaccaucaua

SEQ ID NO: 2360429 - RNA, 19 nt, Artificial Sequence
  Description of Artificial Sequence: Synthetic oligonucleotide
  Antisense strand to SEQ ID NO: 2360428
uaugauggucaugacguuc

SEQ ID NO: 2360430 - RNA, 19 nt, Artificial Sequence
  Description of Artificial Sequence: Synthetic oligonucleotide
  Sense strand starting at position 1474 of SEQ ID NO: 1885682
cgucaugaccaucauaaca

SEQ ID NO: 2360431 - RNA, 19 nt, Artificial Sequence
  Description of Artificial Sequence: Synthetic oligonucleotide
  Antisense strand to SEQ ID NO: 2360430
uguuaugauggucaugacg

SEQ ID NO: 2360432 - RNA, 19 nt, Artificial Sequence
  Description of Artificial Sequence: Synthetic oligonucleotide
  Sense strand starting at position 1512 of SEQ ID NO: 1885682
ccaagcuaucucugcgaaa

SEQ ID NO: 2360433 - RNA, 19 nt, Artificial Sequence
  Description of Artificial Sequence: Synthetic oligonucleotide
  Antisense strand to SEQ ID NO: 2360432
uuucgcagagauagcuugg

SEQ ID NO: 2360434 - RNA, 19 nt, Artificial Sequence
  Description of Artificial Sequence: Synthetic oligonucleotide
  Sense strand starting at position 1758 of SEQ ID NO: 1885682
acgccucccugauccaaau

SEQ ID NO: 2360435 - RNA, 19 nt, Artificial Sequence
  Description of Artificial Sequence: Synthetic oligonucleotide
  Antisense strand to SEQ ID NO: 2360434
auuuggaucagggaggcgu

SEQ ID NO: 2360436 - RNA, 19 nt, Artificial Sequence
  Description of Artificial Sequence: Synthetic oligonucleotide
  Sense strand starting at position 1806 of SEQ ID NO: 1885682
gcgcuuucuacucccgcaa

SEQ ID NO: 2360437 - RNA, 19 nt, Artificial Sequence
  Description of Artificial Sequence: Synthetic oligonucleotide
  Antisense strand to SEQ ID NO: 2360436
uugcgggaguagaaagcgc

SEQ ID NO: 2360438 - RNA, 19 nt, Artificial Sequence
  Description of Artificial Sequence: Synthetic oligonucleotide
  Sense strand starting at position 1838 of SEQ ID NO: 1885682
gagguugaguacucucaag

SEQ ID NO: 2360439 - RNA, 19 nt, Artificial Sequence
  Description of Artificial Sequence: Synthetic oligonucleotide
  Antisense strand to SEQ ID NO: 2360438
cuugagaguacucaaccuc

SEQ ID NO: 2360440 - RNA, 19 nt, Artificial Sequence
  Description of Artificial Sequence: Synthetic oligonucleotide
  Sense strand starting at position 1845 of SEQ ID NO: 1885682
aguacucucaagcggagau

SEQ ID NO: 2360441 - RNA, 19 nt, Artificial Sequence
  Description of Artificial Sequence: Synthetic oligonucleotide
  Antisense strand to SEQ ID NO: 2360440
aucuccgcuugagaguacu

SEQ ID NO: 2360442 - RNA, 19 nt, Artificial Sequence
  Description of Artificial Sequence: Synthetic oligonucleotide
  Sense strand starting at position 1863 of SEQ ID NO: 1885682
ugaagauucuuccaauacg

SEQ ID NO: 2360443 - RNA, 19 nt, Artificial Sequence
  Description of Artificial Sequence: Synthetic oligonucleotide
  Antisense strand to SEQ ID NO: 2360442
cguauuggaagaaucuuca

SEQ ID NO: 2360444 - RNA, 19 nt, Artificial Sequence
  Description of Artificial Sequence: Synthetic oligonucleotide
  Sense strand starting at position 2073 of SEQ ID NO: 1885682
cucugccaccugugagaaa

SEQ ID NO: 2360445 - RNA, 19 nt, Artificial Sequence
  Description of Artificial Sequence: Synthetic oligonucleotide
  Antisense strand to SEQ ID NO: 2360444
uuucucacagguggcagag

SEQ ID NO: 2360446 - RNA, 19 nt, Artificial Sequence
  Description of Artificial Sequence: Synthetic oligonucleotide
  Sense strand starting at position 2084 of SEQ ID NO: 1885682
gugagaaaccuccggugga

SEQ ID NO: 2360447 - RNA, 19 nt, Artificial Sequence
  Description of Artificial Sequence: Synthetic oligonucleotide
  Antisense strand to SEQ ID NO: 2360446
uccaccggagguuucucac

SEQ ID NO: 2360448 - RNA, 19 nt, Artificial Sequence
  Description of Artificial Sequence: Synthetic oligonucleotide
  Sense strand starting at position 2242 of SEQ ID NO: 1885682
agagcugcuggccaugaua

SEQ ID NO: 2360449 - RNA, 19 nt, Artificial Sequence
  Description of Artificial Sequence: Synthetic oligonucleotide
  Antisense strand to SEQ ID NO: 2360448
uaucauggccagcagcucu

SEQ ID NO: 2360450 - RNA, 19 nt, Artificial Sequence
  Description of Artificial Sequence: Synthetic oligonucleotide
  Sense strand starting at position 2343 of SEQ ID NO: 1885682
gccuccuguacuggaagaa

SEQ ID NO: 2360451 - RNA, 19 nt, Artificial Sequence
  Description of Artificial Sequence: Synthetic oligonucleotide
  Antisense strand to SEQ ID NO: 2360450
uucuuccaguacaggaggc

SEQ ID NO: 2360452 - RNA, 19 nt, Artificial Sequence
  Description of Artificial Sequence: Synthetic oligonucleotide
  Sense strand starting at position 2471 of SEQ ID NO: 1885682
cgacucauccuggauucgu

SEQ ID NO: 2360453 - RNA, 19 nt, Artificial Sequence
  Description of Artificial Sequence: Synthetic oligonucleotide
  Antisense strand to SEQ ID NO: 2360452
acgaauccaggaugagucg

SEQ ID NO: 2360454 - RNA, 19 nt, Artificial Sequence
  Description of Artificial Sequence: Synthetic oligonucleotide
  Sense strand starting at position 2619 of SEQ ID NO: 1885682
agcgaaaugcucugcacuc

SEQ ID NO: 2360455 - RNA, 19 nt, Artificial Sequence
  Description of Artificial Sequence: Synthetic oligonucleotide
  Antisense strand to SEQ ID NO: 2360454
gagugcagagcauuucgcu

SEQ ID NO: 2360456 - RNA, 19 nt, Artificial Sequence
  Description of Artificial Sequence: Synthetic oligonucleotide
  Sense strand starting at position 2689 of SEQ ID NO: 1885682
ugaguucuucggugucaga

SEQ ID NO: 2360457 - RNA, 19 nt, Artificial Sequence
  Description of Artificial Sequence: Synthetic oligonucleotide
  Antisense strand to SEQ ID NO: 2360456
ucugacaccgaagaacuca

SEQ ID NO: 2360458 - RNA, 19 nt, Artificial Sequence
  Description of Artificial Sequence: Synthetic oligonucleotide
  Sense strand starting at position 3057 of SEQ ID NO: 1885682
aguuccugacccugaucua

SEQ ID NO: 2360459 - RNA, 19 nt, Artificial Sequence
  Description of Artificial Sequence: Synthetic oligonucleotide
  Antisense strand to SEQ ID NO: 2360458
uagaucagggucaggaacu

SEQ ID NO: 2360460 - RNA, 19 nt, Artificial Sequence
  Description of Artificial Sequence: Synthetic oligonucleotide
  Sense strand starting at position 3142 of SEQ ID NO: 1885682
gccugaugaggacgaagau

SEQ ID NO: 2360461 - RNA, 19 nt, Artificial Sequence
  Description of Artificial Sequence: Synthetic oligonucleotide
  Antisense strand to SEQ ID NO: 2360460
aucuucguccucaucaggc

SEQ ID NO: 2360462 - RNA, 19 nt, Artificial Sequence
  Description of Artificial Sequence: Synthetic oligonucleotide
  Sense strand starting at position 3158 of SEQ ID NO: 1885682
gaugcuaaccucgacugaa

SEQ ID NO: 2360463 - RNA, 19 nt, Artificial Sequence
  Description of Artificial Sequence: Synthetic oligonucleotide
  Antisense strand to SEQ ID NO: 2360462
uucagucgagguuagcauc

SEQ ID NO: 2360464 - RNA, 19 nt, Artificial Sequence
  Description of Artificial Sequence: Synthetic oligonucleotide
  Sense strand starting at position 246 of SEQ ID NO: 1885683
uuauguuuaggagaugcaa

SEQ ID NO: 2360465 - RNA, 19 nt, Artificial Sequence
  Description of Artificial Sequence: Synthetic oligonucleotide
  Antisense strand to SEQ ID NO: 2360464
uugcaucuccuaaacauaa

SEQ ID NO: 2360466 - RNA, 19 nt, Artificial Sequence
  Description of Artificial Sequence: Synthetic oligonucleotide
  Sense strand starting at position 325 of SEQ ID NO: 1885683
gggaaauacugaguaaguu

SEQ ID NO: 2360467 - RNA, 19 nt, Artificial Sequence
  Description of Artificial Sequence: Synthetic oligonucleotide
  Antisense strand to SEQ ID NO: 2360466
aacuuacucaguauuuccc

SEQ ID NO: 2360468 - RNA, 19 nt, Artificial Sequence
  Description of Artificial Sequence: Synthetic oligonucleotide
  Sense strand starting at position 348 of SEQ ID NO: 1885683
guaugaagcuaaucaauua

SEQ ID NO: 2360469 - RNA, 19 nt, Artificial Sequence
  Description of Artificial Sequence: Synthetic oligonucleotide
  Antisense strand to SEQ ID NO: 2360468
uaauugauuagcuucauac

SEQ ID NO: 2360470 - RNA, 19 nt, Artificial Sequence
  Description of Artificial Sequence: Synthetic oligonucleotide
  Sense strand starting at position 421 of SEQ ID NO: 1885683
cuuauugcacgggaauacu

SEQ ID NO: 2360471 - RNA, 19 nt, Artificial Sequence
  Description of Artificial Sequence: Synthetic oligonucleotide
  Antisense strand to SEQ ID NO: 2360470
aguauucccgugcaauaag

SEQ ID NO: 2360472 - RNA, 19 nt, Artificial Sequence
  Description of Artificial Sequence: Synthetic oligonucleotide
  Sense strand starting at position 455 of SEQ ID NO: 1885683
gcaaauaccuagcugaaga

SEQ ID NO: 2360473 - RNA, 19 nt, Artificial Sequence
  Description of Artificial Sequence: Synthetic oligonucleotide
  Antisense strand to SEQ ID NO: 2360472
ucuucagcuagguauuugc

SEQ ID NO: 2360474 - RNA, 19 nt, Artificial Sequence
  Description of Artificial Sequence: Synthetic oligonucleotide
  Sense strand starting at position 886 of SEQ ID NO: 1885683
gcaaucaauucuguuuaga

SEQ ID NO: 2360475 - RNA, 19 nt, Artificial Sequence
  Description of Artificial Sequence: Synthetic oligonucleotide
  Antisense strand to SEQ ID NO: 2360474
ucuaaacagaauugauugc

SEQ ID NO: 2360476 - RNA, 19 nt, Artificial Sequence
  Description of Artificial Sequence: Synthetic oligonucleotide
  Sense strand starting at position 977 of SEQ ID NO: 1885683
agggauugcugacuaguua

SEQ ID NO: 2360477 - RNA, 19 nt, Artificial Sequence
  Description of Artificial Sequence: Synthetic oligonucleotide
  Antisense strand to SEQ ID NO: 2360476
uaacuagucagcaaucccu

SEQ ID NO: 2360478 - RNA, 19 nt, Artificial Sequence
  Description of Artificial Sequence: Synthetic oligonucleotide
  Sense strand starting at position 1133 of SEQ ID NO: 1885683
ggccucucuuauccacaga

SEQ ID NO: 2360479 - RNA, 19 nt, Artificial Sequence
  Description of Artificial Sequence: Synthetic oligonucleotide
  Antisense strand to SEQ ID NO: 2360478
ucuguggauaagagaggcc

SEQ ID NO: 2360480 - RNA, 19 nt, Artificial Sequence
  Description of Artificial Sequence: Synthetic oligonucleotide
  Sense strand starting at position 1168 of SEQ ID NO: 1885683
aguccuuaugucuaaauau

SEQ ID NO: 2360481 - RNA, 19 nt, Artificial Sequence
  Description of Artificial Sequence: Synthetic oligonucleotide
  Antisense strand to SEQ ID NO: 2360480
auauuuagacauaaggacu

SEQ ID NO: 2360482 - RNA, 19 nt, Artificial Sequence
  Description of Artificial Sequence: Synthetic oligonucleotide
  Sense strand starting at position 1375 of SEQ ID NO: 1885683
cuucuagguuauccagaga

SEQ ID NO: 2360483 - RNA, 19 nt, Artificial Sequence
  Description of Artificial Sequence: Synthetic oligonucleotide
  Antisense strand to SEQ ID NO: 2360482
ucucuggauaaccuagaag

SEQ ID NO: 2360484 - RNA, 19 nt, Artificial Sequence
  Description of Artificial Sequence: Synthetic oligonucleotide
  Sense strand starting at position 1530 of SEQ ID NO: 1885683
cagaguaaacuugggccaa

SEQ ID NO: 2360485 - RNA, 19 nt, Artificial Sequence
  Description of Artificial Sequence: Synthetic oligonucleotide
  Antisense strand to SEQ ID NO: 2360484
uuggcccaaguuuacucug

SEQ ID NO: 2360486 - RNA, 19 nt, Artificial Sequence
  Description of Artificial Sequence: Synthetic oligonucleotide
  Sense strand starting at position 1532 of SEQ ID NO: 1885683
gaguaaacuugggccaaua

SEQ ID NO: 2360487 - RNA, 19 nt, Artificial Sequence
  Description of Artificial Sequence: Synthetic oligonucleotide
  Antisense strand to SEQ ID NO: 2360486
uauuggcccaaguuuacuc

SEQ ID NO: 2360488 - RNA, 19 nt, Artificial Sequence
  Description of Artificial Sequence: Synthetic oligonucleotide
  Sense strand starting at position 1618 of SEQ ID NO: 1885683
cagaucacuuaggucagaa

SEQ ID NO: 2360489 - RNA, 19 nt, Artificial Sequence
  Description of Artificial Sequence: Synthetic oligonucleotide
  Antisense strand to SEQ ID NO: 2360488
uucugaccuaagugaucug

SEQ ID NO: 2360490 - RNA, 19 nt, Artificial Sequence
  Description of Artificial Sequence: Synthetic oligonucleotide
  Sense strand starting at position 1863 of SEQ ID NO: 1885683
aagaaagaaucagaguaga

SEQ ID NO: 2360491 - RNA, 19 nt, Artificial Sequence
  Description of Artificial Sequence: Synthetic oligonucleotide
  Antisense strand to SEQ ID NO: 2360490
ucuacucugauucuuucuu

SEQ ID NO: 2360492 - RNA, 19 nt, Artificial Sequence
  Description of Artificial Sequence: Synthetic oligonucleotide
  Sense strand starting at position 2136 of SEQ ID NO: 1885683
acauguaaauggucacuaa

SEQ ID NO: 2360493 - RNA, 19 nt, Artificial Sequence
  Description of Artificial Sequence: Synthetic oligonucleotide
  Antisense strand to SEQ ID NO: 2360492
uuagugaccauuuacaugu

SEQ ID NO: 2360494 - RNA, 19 nt, Artificial Sequence
  Description of Artificial Sequence: Synthetic oligonucleotide
  Sense strand starting at position 2139 of SEQ ID NO: 1885683
uguaaauggucacuaaaug

SEQ ID NO: 2360495 - RNA, 19 nt, Artificial Sequence
  Description of Artificial Sequence: Synthetic oligonucleotide
  Antisense strand to SEQ ID NO: 2360494
cauuuagugaccauuuaca

SEQ ID NO: 2360496 - RNA, 19 nt, Artificial Sequence
  Description of Artificial Sequence: Synthetic oligonucleotide
  Sense strand starting at position 2140 of SEQ ID NO: 1885683
guaaauggucacuaaaugu

SEQ ID NO: 2360497 - RNA, 19 nt, Artificial Sequence
  Description of Artificial Sequence: Synthetic oligonucleotide
  Antisense strand to SEQ ID NO: 2360496
acauuuagugaccauuuac

SEQ ID NO: 2360498 - RNA, 19 nt, Artificial Sequence
  Description of Artificial Sequence: Synthetic oligonucleotide
  Sense strand starting at position 2157 of SEQ ID NO: 1885683
guaggagucucauccugag

SEQ ID NO: 2360499 - RNA, 19 nt, Artificial Sequence
  Description of Artificial Sequence: Synthetic oligonucleotide
  Antisense strand to SEQ ID NO: 2360498
cucaggaugagacuccuac

SEQ ID NO: 2360500 - RNA, 19 nt, Artificial Sequence
  Description of Artificial Sequence: Synthetic oligonucleotide
  Sense strand starting at position 2161 of SEQ ID NO: 1885683
gagucucauccugagcaag

SEQ ID NO: 2360501 - RNA, 19 nt, Artificial Sequence
  Description of Artificial Sequence: Synthetic oligonucleotide
  Antisense strand to SEQ ID NO: 2360500
cuugcucaggaugagacuc

SEQ ID NO: 2360502 - RNA, 19 nt, Artificial Sequence
  Description of Artificial Sequence: Synthetic oligonucleotide
  Sense strand starting at position 2163 of SEQ ID NO: 1885683
gucucauccugagcaagga

SEQ ID NO: 2360503 - RNA, 19 nt, Artificial Sequence
  Description of Artificial Sequence: Synthetic oligonucleotide
  Antisense strand to SEQ ID NO: 2360502
uccuugcucaggaugagac

SEQ ID NO: 2360504 - RNA, 19 nt, Artificial Sequence
  Description of Artificial Sequence: Synthetic oligonucleotide
  Sense strand starting at position 2213 of SEQ ID NO: 1885683
accgaauaagucuagacuu

SEQ ID NO: 2360505 - RNA, 19 nt, Artificial Sequence
  Description of Artificial Sequence: Synthetic oligonucleotide
  Antisense strand to SEQ ID NO: 2360504
aagucuagacuuauucggu

SEQ ID NO: 2360506 - RNA, 19 nt, Artificial Sequence
  Description of Artificial Sequence: Synthetic oligonucleotide
  Sense strand starting at position 2282 of SEQ ID NO: 1885683
uugggaaugccaugauaaa

SEQ ID NO: 2360507 - RNA, 19 nt, Artificial Sequence
  Description of Artificial Sequence: Synthetic oligonucleotide
  Antisense strand to SEQ ID NO: 2360506
uuuaucauggcauucccaa

SEQ ID NO: 2360508 - RNA, 19 nt, Artificial Sequence
  Description of Artificial Sequence: Synthetic oligonucleotide
  Sense strand starting at position 2532 of SEQ ID NO: 1885683
uuuagaucugguuacucau

SEQ ID NO: 2360509 - RNA, 19 nt, Artificial Sequence
  Description of Artificial Sequence: Synthetic oligonucleotide
  Antisense strand to SEQ ID NO: 2360508
augaguaaccagaucuaaa

SEQ ID NO: 2360510 - RNA, 19 nt, Artificial Sequence
  Description of Artificial Sequence: Synthetic oligonucleotide
  Sense strand starting at position 2535 of SEQ ID NO: 1885683
agaucugguuacucaucua

SEQ ID NO: 2360511 - RNA, 19 nt, Artificial Sequence
  Description of Artificial Sequence: Synthetic oligonucleotide
  Antisense strand to SEQ ID NO: 2360510
uagaugaguaaccagaucu

SEQ ID NO: 2360512 - RNA, 19 nt, Artificial Sequence
  Description of Artificial Sequence: Synthetic oligonucleotide
  Sense strand starting at position 2538 of SEQ ID NO: 1885683
ucugguuacucaucuauca

SEQ ID NO: 2360513 - RNA, 19 nt, Artificial Sequence
  Description of Artificial Sequence: Synthetic oligonucleotide
  Antisense strand to SEQ ID NO: 2360512
ugauagaugaguaaccaga

SEQ ID NO: 2360514 - RNA, 19 nt, Artificial Sequence
  Description of Artificial Sequence: Synthetic oligonucleotide
  Sense strand starting at position 2640 of SEQ ID NO: 1885683
gccucuaucuauuuaguuu

SEQ ID NO: 2360515 - RNA, 19 nt, Artificial Sequence
  Description of Artificial Sequence: Synthetic oligonucleotide
  Antisense strand to SEQ ID NO: 2360514
aaacuaaauagauagaggc

SEQ ID NO: 2360516 - RNA, 19 nt, Artificial Sequence
  Description of Artificial Sequence: Synthetic oligonucleotide
  Sense strand starting at position 2665 of SEQ ID NO: 1885683
aucaauugccuguauuaug

SEQ ID NO: 2360517 - RNA, 19 nt, Artificial Sequence
  Description of Artificial Sequence: Synthetic oligonucleotide
  Antisense strand to SEQ ID NO: 2360516
cauaauacaggcaauugau

SEQ ID NO: 2360518 - RNA, 19 nt, Artificial Sequence
  Description of Artificial Sequence: Synthetic oligonucleotide
  Sense strand starting at position 2704 of SEQ ID NO: 1885683
uuugguuaucaaggguuga

SEQ ID NO: 2360519 - RNA, 19 nt, Artificial Sequence
  Description of Artificial Sequence: Synthetic oligonucleotide
  Antisense strand to SEQ ID NO: 2360518
ucaacccuugauaaccaaa

SEQ ID NO: 2360520 - RNA, 19 nt, Artificial Sequence
  Description of Artificial Sequence: Synthetic oligonucleotide
  Sense strand starting at position 2705 of SEQ ID NO: 1885683
uugguuaucaaggguugaa

SEQ ID NO: 2360521 - RNA, 19 nt, Artificial Sequence
  Description of Artificial Sequence: Synthetic oligonucleotide
  Antisense strand to SEQ ID NO: 2360520
uucaacccuugauaaccaa

SEQ ID NO: 2360522 - RNA, 19 nt, Artificial Sequence
  Description of Artificial Sequence: Synthetic oligonucleotide
  Sense strand starting at position 2708 of SEQ ID NO: 1885683
guuaucaaggguugaauau

SEQ ID NO: 2360523 - RNA, 19 nt, Artificial Sequence
  Description of Artificial Sequence: Synthetic oligonucleotide
  Antisense strand to SEQ ID NO: 2360522
auauucaacccuugauaac

SEQ ID NO: 2360524 - RNA, 19 nt, Artificial Sequence
  Description of Artificial Sequence: Synthetic oligonucleotide
  Sense strand starting at position 3074 of SEQ ID NO: 1885683
gauugugaaguuuauaagu

SEQ ID NO: 2360525 - RNA, 19 nt, Artificial Sequence
  Description of Artificial Sequence: Synthetic oligonucleotide
  Antisense strand to SEQ ID NO: 2360524
acuuauaaacuucacaauc

SEQ ID NO: 2360526 - RNA, 19 nt, Artificial Sequence
  Description of Artificial Sequence: Synthetic oligonucleotide
  Sense strand starting at position 3079 of SEQ ID NO: 1885683
ugaaguuuauaagugguua

SEQ ID NO: 2360527 - RNA, 19 nt, Artificial Sequence
  Description of Artificial Sequence: Synthetic oligonucleotide
  Antisense strand to SEQ ID NO: 2360526
uaaccacuuauaaacuuca

SEQ ID NO: 2360528 - RNA, 19 nt, Artificial Sequence
  Description of Artificial Sequence: Synthetic oligonucleotide
  Sense strand starting at position 3080 of SEQ ID NO: 1885683
gaaguuuauaagugguuag

SEQ ID NO: 2360529 - RNA, 19 nt, Artificial Sequence
  Description of Artificial Sequence: Synthetic oligonucleotide
  Antisense strand to SEQ ID NO: 2360528
cuaaccacuuauaaacuuc

SEQ ID NO: 2360530 - RNA, 19 nt, Artificial Sequence
  Description of Artificial Sequence: Synthetic oligonucleotide
  Sense strand starting at position 3084 of SEQ ID NO: 1885683
uuuauaagugguuagcuca

SEQ ID NO: 2360531 - RNA, 19 nt, Artificial Sequence
  Description of Artificial Sequence: Synthetic oligonucleotide
  Antisense strand to SEQ ID NO: 2360530
ugagcuaaccacuuauaaa

SEQ ID NO: 2360532 - RNA, 19 nt, Artificial Sequence
  Description of Artificial Sequence: Synthetic oligonucleotide
  Sense strand starting at position 3365 of SEQ ID NO: 1885683
cggaaauuaucaucacaau

SEQ ID NO: 2360533 - RNA, 19 nt, Artificial Sequence
  Description of Artificial Sequence: Synthetic oligonucleotide
  Antisense strand to SEQ ID NO: 2360532
auugugaugauaauuuccg

SEQ ID NO: 2360534 - RNA, 19 nt, Artificial Sequence
  Description of Artificial Sequence: Synthetic oligonucleotide
  Sense strand starting at position 3465 of SEQ ID NO: 1885683
uuaauacaugcuuaagugu

SEQ ID NO: 2360535 - RNA, 19 nt, Artificial Sequence
  Description of Artificial Sequence: Synthetic oligonucleotide
  Antisense strand to SEQ ID NO: 2360534
acacuuaagcauguauuaa

SEQ ID NO: 2360536 - RNA, 19 nt, Artificial Sequence
  Description of Artificial Sequence: Synthetic oligonucleotide
  Sense strand starting at position 3473 of SEQ ID NO: 1885683
ugcuuaaguguauauuaug

SEQ ID NO: 2360537 - RNA, 19 nt, Artificial Sequence
  Description of Artificial Sequence: Synthetic oligonucleotide
  Antisense strand to SEQ ID NO: 2360536
cauaauauacacuuaagca

SEQ ID NO: 2360538 - RNA, 19 nt, Artificial Sequence
  Description of Artificial Sequence: Synthetic oligonucleotide
  Sense strand starting at position 3615 of SEQ ID NO: 1885683
guauuagaaacuggagagu

SEQ ID NO: 2360539 - RNA, 19 nt, Artificial Sequence
  Description of Artificial Sequence: Synthetic oligonucleotide
  Antisense strand to SEQ ID NO: 2360538
acucuccaguuucuaauac

SEQ ID NO: 2360540 - RNA, 19 nt, Artificial Sequence
  Description of Artificial Sequence: Synthetic oligonucleotide
  Sense strand starting at position 3817 of SEQ ID NO: 1885683
uguaauuucugccucaugu

SEQ ID NO: 2360541 - RNA, 19 nt, Artificial Sequence
  Description of Artificial Sequence: Synthetic oligonucleotide
  Antisense strand to SEQ ID NO: 2360540
acaugaggcagaaauuaca

SEQ ID NO: 2360542 - RNA, 19 nt, Artificial Sequence
  Description of Artificial Sequence: Synthetic oligonucleotide
  Sense strand starting at position 3933 of SEQ ID NO: 1885683
agaaguccuccuuagcaua

SEQ ID NO: 2360543 - RNA, 19 nt, Artificial Sequence
  Description of Artificial Sequence: Synthetic oligonucleotide
  Antisense strand to SEQ ID NO: 2360542
uaugcuaaggaggacuucu

SEQ ID NO: 2360544 - RNA, 19 nt, Artificial Sequence
  Description of Artificial Sequence: Synthetic oligonucleotide
  Sense strand starting at position 679 of SEQ ID NO: 1885684
gcugcagugaucugugaga

SEQ ID NO: 2360545 - RNA, 19 nt, Artificial Sequence
  Description of Artificial Sequence: Synthetic oligonucleotide
  Antisense strand to SEQ ID NO: 2360544
ucucacagaucacugcagc

SEQ ID NO: 2360546 - RNA, 19 nt, Artificial Sequence
  Description of Artificial Sequence: Synthetic oligonucleotide
  Sense strand starting at position 681 of SEQ ID NO: 1885684
ugcagugaucugugagaua

SEQ ID NO: 2360547 - RNA, 19 nt, Artificial Sequence
  Description of Artificial Sequence: Synthetic oligonucleotide
  Antisense strand to SEQ ID NO: 2360546
uaucucacagaucacugca

SEQ ID NO: 2360548 - RNA, 19 nt, Artificial Sequence
  Description of Artificial Sequence: Synthetic oligonucleotide
  Sense strand starting at position 684 of SEQ ID NO: 1885684
agugaucugugagauagug

SEQ ID NO: 2360549 - RNA, 19 nt, Artificial Sequence
  Description of Artificial Sequence: Synthetic oligonucleotide
  Antisense strand to SEQ ID NO: 2360548
cacuaucucacagaucacu

SEQ ID NO: 2360550 - RNA, 19 nt, Artificial Sequence
  Description of Artificial Sequence: Synthetic oligonucleotide
  Sense strand starting at position 692 of SEQ ID NO: 1885684
gugagauagugccacuaua

SEQ ID NO: 2360551 - RNA, 19 nt, Artificial Sequence
  Description of Artificial Sequence: Synthetic oligonucleotide
  Antisense strand to SEQ ID NO: 2360550
uauaguggcacuaucucac

SEQ ID NO: 2360552 - RNA, 19 nt, Artificial Sequence
  Description of Artificial Sequence: Synthetic oligonucleotide
  Sense strand starting at position 771 of SEQ ID NO: 1885684
ccaauacgcuccuaaauga

SEQ ID NO: 2360553 - RNA, 19 nt, Artificial Sequence
  Description of Artificial Sequence: Synthetic oligonucleotide
  Antisense strand to SEQ ID NO: 2360552
ucauuuaggagcguauugg

SEQ ID NO: 2360554 - RNA, 19 nt, Artificial Sequence
  Description of Artificial Sequence: Synthetic oligonucleotide
  Sense strand starting at position 1082 of SEQ ID NO: 1885684
agauuaaugaaagguuggu

SEQ ID NO: 2360555 - RNA, 19 nt, Artificial Sequence
  Description of Artificial Sequence: Synthetic oligonucleotide
  Antisense strand to SEQ ID NO: 2360554
accaaccuuucauuaaucu

SEQ ID NO: 2360556 - RNA, 19 nt, Artificial Sequence
  Description of Artificial Sequence: Synthetic oligonucleotide
  Sense strand starting at position 1740 of SEQ ID NO: 1885684
ggugacacaucauaucaac

SEQ ID NO: 2360557 - RNA, 19 nt, Artificial Sequence
  Description of Artificial Sequence: Synthetic oligonucleotide
  Antisense strand to SEQ ID NO: 2360556
guugauaugaugugucacc

SEQ ID NO: 2360558 - RNA, 19 nt, Artificial Sequence
  Description of Artificial Sequence: Synthetic oligonucleotide
  Sense strand starting at position 1832 of SEQ ID NO: 1885684
gccaguucagguggauaca

SEQ ID NO: 2360559 - RNA, 19 nt, Artificial Sequence
  Description of Artificial Sequence: Synthetic oligonucleotide
  Antisense strand to SEQ ID NO: 2360558
uguauccaccugaacuggc

SEQ ID NO: 2360560 - RNA, 19 nt, Artificial Sequence
  Description of Artificial Sequence: Synthetic oligonucleotide
  Sense strand starting at position 1944 of SEQ ID NO: 1885684
acaaaugguccaugccaca

SEQ ID NO: 2360561 - RNA, 19 nt, Artificial Sequence
  Description of Artificial Sequence: Synthetic oligonucleotide
  Antisense strand to SEQ ID NO: 2360560
uguggcauggaccauuugu

SEQ ID NO: 2360562 - RNA, 19 nt, Artificial Sequence
  Description of Artificial Sequence: Synthetic oligonucleotide
  Sense strand starting at position 1984 of SEQ ID NO: 1885684
ggaggacauuaucuuaggu

SEQ ID NO: 2360563 - RNA, 19 nt, Artificial Sequence
  Description of Artificial Sequence: Synthetic oligonucleotide
  Antisense strand to SEQ ID NO: 2360562
accuaagauaauguccucc

SEQ ID NO: 2360564 - RNA, 19 nt, Artificial Sequence
  Description of Artificial Sequence: Synthetic oligonucleotide
  Sense strand starting at position 1986 of SEQ ID NO: 1885684
aggacauuaucuuagguga

SEQ ID NO: 2360565 - RNA, 19 nt, Artificial Sequence
  Description of Artificial Sequence: Synthetic oligonucleotide
  Antisense strand to SEQ ID NO: 2360564
ucaccuaagauaauguccu

SEQ ID NO: 2360566 - RNA, 19 nt, Artificial Sequence
  Description of Artificial Sequence: Synthetic oligonucleotide
  Sense strand starting at position 1988 of SEQ ID NO: 1885684
gacauuaucuuaggugaaa

SEQ ID NO: 2360567 - RNA, 19 nt, Artificial Sequence
  Description of Artificial Sequence: Synthetic oligonucleotide
  Antisense strand to SEQ ID NO: 2360566
uuucaccuaagauaauguc

SEQ ID NO: 2360568 - RNA, 19 nt, Artificial Sequence
  Description of Artificial Sequence: Synthetic oligonucleotide
  Sense strand starting at position 2025 of SEQ ID NO: 1885684
auaaauacugcgugaucuc

SEQ ID NO: 2360569 - RNA, 19 nt, Artificial Sequence
  Description of Artificial Sequence: Synthetic oligonucleotide
  Antisense strand to SEQ ID NO: 2360568
gagaucacgcaguauuuau

SEQ ID NO: 2360570 - RNA, 19 nt, Artificial Sequence
  Description of Artificial Sequence: Synthetic oligonucleotide
  Sense strand starting at position 2026 of SEQ ID NO: 1885684
uaaauacugcgugaucuca

SEQ ID NO: 2360571 - RNA, 19 nt, Artificial Sequence
  Description of Artificial Sequence: Synthetic oligonucleotide
  Antisense strand to SEQ ID NO: 2360570
ugagaucacgcaguauuua

SEQ ID NO: 2360572 - RNA, 19 nt, Artificial Sequence
  Description of Artificial Sequence: Synthetic oligonucleotide
  Sense strand starting at position 2171 of SEQ ID NO: 1885684
ucaguuaaguaagaggaau

SEQ ID NO: 2360573 - RNA, 19 nt, Artificial Sequence
  Description of Artificial Sequence: Synthetic oligonucleotide
  Antisense strand to SEQ ID NO: 2360572
auuccucuuacuuaacuga

SEQ ID NO: 2360574 - RNA, 19 nt, Artificial Sequence
  Description of Artificial Sequence: Synthetic oligonucleotide
  Sense strand starting at position 2236 of SEQ ID NO: 1885684
guauuauauucuugaagac

SEQ ID NO: 2360575 - RNA, 19 nt, Artificial Sequence
  Description of Artificial Sequence: Synthetic oligonucleotide
  Antisense strand to SEQ ID NO: 2360574
gucuucaagaauauaauac

SEQ ID NO: 2360576 - RNA, 19 nt, Artificial Sequence
  Description of Artificial Sequence: Synthetic oligonucleotide
  Sense strand starting at position 2246 of SEQ ID NO: 1885684
cuugaagacugcucagaca

SEQ ID NO: 2360577 - RNA, 19 nt, Artificial Sequence
  Description of Artificial Sequence: Synthetic oligonucleotide
  Antisense strand to SEQ ID NO: 2360576
ugucugagcagucuucaag

SEQ ID NO: 2360578 - RNA, 19 nt, Artificial Sequence
  Description of Artificial Sequence: Synthetic oligonucleotide
  Sense strand starting at position 2249 of SEQ ID NO: 1885684
gaagacugcucagacagua

SEQ ID NO: 2360579 - RNA, 19 nt, Artificial Sequence
  Description of Artificial Sequence: Synthetic oligonucleotide
  Antisense strand to SEQ ID NO: 2360578
uacugucugagcagucuuc

SEQ ID NO: 2360580 - RNA, 19 nt, Artificial Sequence
  Description of Artificial Sequence: Synthetic oligonucleotide
  Sense strand starting at position 2267 of SEQ ID NO: 1885684
agauuuaaguguuugcauc

SEQ ID NO: 2360581 - RNA, 19 nt, Artificial Sequence
  Description of Artificial Sequence: Synthetic oligonucleotide
  Antisense strand to SEQ ID NO: 2360580
gaugcaaacacuuaaaucu

SEQ ID NO: 2360582 - RNA, 19 nt, Artificial Sequence
  Description of Artificial Sequence: Synthetic oligonucleotide
  Sense strand starting at position 2268 of SEQ ID NO: 1885684
gauuuaaguguuugcauca

SEQ ID NO: 2360583 - RNA, 19 nt, Artificial Sequence
  Description of Artificial Sequence: Synthetic oligonucleotide
  Antisense strand to SEQ ID NO: 2360582
ugaugcaaacacuuaaauc

SEQ ID NO: 2360584 - RNA, 19 nt, Artificial Sequence
  Description of Artificial Sequence: Synthetic oligonucleotide
  Sense strand starting at position 2302 of SEQ ID NO: 1885684
uaugaaagguaaugcauau

SEQ ID NO: 2360585 - RNA, 19 nt, Artificial Sequence
  Description of Artificial Sequence: Synthetic oligonucleotide
  Antisense strand to SEQ ID NO: 2360584
auaugcauuaccuuucaua

SEQ ID NO: 2360586 - RNA, 19 nt, Artificial Sequence
  Description of Artificial Sequence: Synthetic oligonucleotide
  Sense strand starting at position 2314 of SEQ ID NO: 1885684
ugcauauguuggugagcuu

SEQ ID NO: 2360587 - RNA, 19 nt, Artificial Sequence
  Description of Artificial Sequence: Synthetic oligonucleotide
  Antisense strand to SEQ ID NO: 2360586
aagcucaccaacauaugca

SEQ ID NO: 2360588 - RNA, 19 nt, Artificial Sequence
  Description of Artificial Sequence: Synthetic oligonucleotide
  Sense strand starting at position 2648 of SEQ ID NO: 1885684
cggcccauaacguauacau

SEQ ID NO: 2360589 - RNA, 19 nt, Artificial Sequence
  Description of Artificial Sequence: Synthetic oligonucleotide
  Antisense strand to SEQ ID NO: 2360588
auguauacguuaugggccg

SEQ ID NO: 2360590 - RNA, 19 nt, Artificial Sequence
  Description of Artificial Sequence: Synthetic oligonucleotide
  Sense strand starting at position 3157 of SEQ ID NO: 1885684
ucauuaucacuagggaacu

SEQ ID NO: 2360591 - RNA, 19 nt, Artificial Sequence
  Description of Artificial Sequence: Synthetic oligonucleotide
  Antisense strand to SEQ ID NO: 2360590
aguucccuagugauaauga

SEQ ID NO: 2360592 - RNA, 19 nt, Artificial Sequence
  Description of Artificial Sequence: Synthetic oligonucleotide
  Sense strand starting at position 3263 of SEQ ID NO: 1885684
auuaauuacuggugggaau

SEQ ID NO: 2360593 - RNA, 19 nt, Artificial Sequence
  Description of Artificial Sequence: Synthetic oligonucleotide
  Antisense strand to SEQ ID NO: 2360592
auucccaccaguaauuaau

SEQ ID NO: 2360594 - RNA, 19 nt, Artificial Sequence
  Description of Artificial Sequence: Synthetic oligonucleotide
  Sense strand starting at position 3265 of SEQ ID NO: 1885684
uaauuacuggugggaaugu

SEQ ID NO: 2360595 - RNA, 19 nt, Artificial Sequence
  Description of Artificial Sequence: Synthetic oligonucleotide
  Antisense strand to SEQ ID NO: 2360594
acauucccaccaguaauua

SEQ ID NO: 2360596 - RNA, 19 nt, Artificial Sequence
  Description of Artificial Sequence: Synthetic oligonucleotide
  Sense strand starting at position 3802 of SEQ ID NO: 1885684
gaugauugcucagcucuau

SEQ ID NO: 2360597 - RNA, 19 nt, Artificial Sequence
  Description of Artificial Sequence: Synthetic oligonucleotide
  Antisense strand to SEQ ID NO: 2360596
auagagcugagcaaucauc

SEQ ID NO: 2360598 - RNA, 19 nt, Artificial Sequence
  Description of Artificial Sequence: Synthetic oligonucleotide
  Sense strand starting at position 3855 of SEQ ID NO: 1885684
gggcgaauuguauggugca

SEQ ID NO: 2360599 - RNA, 19 nt, Artificial Sequence
  Description of Artificial Sequence: Synthetic oligonucleotide
  Antisense strand to SEQ ID NO: 2360598
ugcaccauacaauucgccc

SEQ ID NO: 2360600 - RNA, 19 nt, Artificial Sequence
  Description of Artificial Sequence: Synthetic oligonucleotide
  Sense strand starting at position 3856 of SEQ ID NO: 1885684
ggcgaauuguauggugcau

SEQ ID NO: 2360601 - RNA, 19 nt, Artificial Sequence
  Description of Artificial Sequence: Synthetic oligonucleotide
  Antisense strand to SEQ ID NO: 2360600
augcaccauacaauucgcc

SEQ ID NO: 2360602 - RNA, 19 nt, Artificial Sequence
  Description of Artificial Sequence: Synthetic oligonucleotide
  Sense strand starting at position 3858 of SEQ ID NO: 1885684
cgaauuguauggugcauaa

SEQ ID NO: 2360603 - RNA, 19 nt, Artificial Sequence
  Description of Artificial Sequence: Synthetic oligonucleotide
  Antisense strand to SEQ ID NO: 2360602
uuaugcaccauacaauucg

SEQ ID NO: 2360604 - RNA, 19 nt, Artificial Sequence
  Description of Artificial Sequence: Synthetic oligonucleotide
  Sense strand starting at position 3860 of SEQ ID NO: 1885684
aauuguauggugcauaaau

SEQ ID NO: 2360605 - RNA, 19 nt, Artificial Sequence
  Description of Artificial Sequence: Synthetic oligonucleotide
  Antisense strand to SEQ ID NO: 2360604
auuuaugcaccauacaauu

SEQ ID NO: 2360606 - RNA, 19 nt, Artificial Sequence
  Description of Artificial Sequence: Synthetic oligonucleotide
  Sense strand starting at position 3862 of SEQ ID NO: 1885684
uuguauggugcauaaauua

SEQ ID NO: 2360607 - RNA, 19 nt, Artificial Sequence
  Description of Artificial Sequence: Synthetic oligonucleotide
  Antisense strand to SEQ ID NO: 2360606
uaauuuaugcaccauacaa

SEQ ID NO: 2360608 - RNA, 19 nt, Artificial Sequence
  Description of Artificial Sequence: Synthetic oligonucleotide
  Sense strand starting at position 3869 of SEQ ID NO: 1885684
gugcauaaauuauauguca

SEQ ID NO: 2360609 - RNA, 19 nt, Artificial Sequence
  Description of Artificial Sequence: Synthetic oligonucleotide
  Antisense strand to SEQ ID NO: 2360608
ugacauauaauuuaugcac

SEQ ID NO: 2360610 - RNA, 19 nt, Artificial Sequence
  Description of Artificial Sequence: Synthetic oligonucleotide
  Sense strand starting at position 3937 of SEQ ID NO: 1885684
guuauucccuaagauuaga

SEQ ID NO: 2360611 - RNA, 19 nt, Artificial Sequence
  Description of Artificial Sequence: Synthetic oligonucleotide
  Antisense strand to SEQ ID NO: 2360610
ucuaaucuuagggaauaac

SEQ ID NO: 2360612 - RNA, 19 nt, Artificial Sequence
  Description of Artificial Sequence: Synthetic oligonucleotide
  Sense strand starting at position 3942 of SEQ ID NO: 1885684
ucccuaagauuagauuuga

SEQ ID NO: 2360613 - RNA, 19 nt, Artificial Sequence
  Description of Artificial Sequence: Synthetic oligonucleotide
  Antisense strand to SEQ ID NO: 2360612
ucaaaucuaaucuuaggga

SEQ ID NO: 2360614 - RNA, 19 nt, Artificial Sequence
  Description of Artificial Sequence: Synthetic oligonucleotide
  Sense strand starting at position 42 of SEQ ID NO: 1885685
cucggagagucuguuaaua

SEQ ID NO: 2360615 - RNA, 19 nt, Artificial Sequence
  Description of Artificial Sequence: Synthetic oligonucleotide
  Antisense strand to SEQ ID NO: 2360614
uauuaacagacucuccgag

SEQ ID NO: 2360616 - RNA, 19 nt, Artificial Sequence
  Description of Artificial Sequence: Synthetic oligonucleotide
  Sense strand starting at position 67 of SEQ ID NO: 1885685
cauggagaggauugugcau

SEQ ID NO: 2360617 - RNA, 19 nt, Artificial Sequence
  Description of Artificial Sequence: Synthetic oligonucleotide
  Antisense strand to SEQ ID NO: 2360616
augcacaauccucuccaug

SEQ ID NO: 2360618 - RNA, 19 nt, Artificial Sequence
  Description of Artificial Sequence: Synthetic oligonucleotide
  Sense strand starting at position 78 of SEQ ID NO: 1885685
uugugcaugauuuaccgua

SEQ ID NO: 2360619 - RNA, 19 nt, Artificial Sequence
  Description of Artificial Sequence: Synthetic oligonucleotide
  Antisense strand to SEQ ID NO: 2360618
uacgguaaaucaugcacaa

SEQ ID NO: 2360620 - RNA, 19 nt, Artificial Sequence
  Description of Artificial Sequence: Synthetic oligonucleotide
  Sense strand starting at position 109 of SEQ ID NO: 1885685
gagaguuucuuuguggaag

SEQ ID NO: 2360621 - RNA, 19 nt, Artificial Sequence
  Description of Artificial Sequence: Synthetic oligonucleotide
  Antisense strand to SEQ ID NO: 2360620
cuuccacaaagaaacucuc

SEQ ID NO: 2360622 - RNA, 19 nt, Artificial Sequence
  Description of Artificial Sequence: Synthetic oligonucleotide
  Sense strand starting at position 177 of SEQ ID NO: 1885685
cucaauggguuuccaaaca

SEQ ID NO: 2360623 - RNA, 19 nt, Artificial Sequence
  Description of Artificial Sequence: Synthetic oligonucleotide
  Antisense strand to SEQ ID NO: 2360622
uguuuggaaacccauugag

SEQ ID NO: 2360624 - RNA, 19 nt, Artificial Sequence
  Description of Artificial Sequence: Synthetic oligonucleotide
  Sense strand starting at position 219 of SEQ ID NO: 1885685
cuuggugugaaaggaacua

SEQ ID NO: 2360625 - RNA, 19 nt, Artificial Sequence
  Description of Artificial Sequence: Synthetic oligonucleotide
  Antisense strand to SEQ ID NO: 2360624
uaguuccuuucacaccaag

SEQ ID NO: 2360626 - RNA, 19 nt, Artificial Sequence
  Description of Artificial Sequence: Synthetic oligonucleotide
  Sense strand starting at position 380 of SEQ ID NO: 1885685
gccuuauuuggucgcagga

SEQ ID NO: 2360627 - RNA, 19 nt, Artificial Sequence
  Description of Artificial Sequence: Synthetic oligonucleotide
  Antisense strand to SEQ ID NO: 2360626
uccugcgaccaaauaaggc

SEQ ID NO: 2360628 - RNA, 19 nt, Artificial Sequence
  Description of Artificial Sequence: Synthetic oligonucleotide
  Sense strand starting at position 438 of SEQ ID NO: 1885685
gacaguugugcugaugaag

SEQ ID NO: 2360629 - RNA, 19 nt, Artificial Sequence
  Description of Artificial Sequence: Synthetic oligonucleotide
  Antisense strand to SEQ ID NO: 2360628
cuucaucagcacaacuguc

SEQ ID NO: 2360630 - RNA, 19 nt, Artificial Sequence
  Description of Artificial Sequence: Synthetic oligonucleotide
  Sense strand starting at position 528 of SEQ ID NO: 1885685
ccucgaguugugcaauccu

SEQ ID NO: 2360631 - RNA, 19 nt, Artificial Sequence
  Description of Artificial Sequence: Synthetic oligonucleotide
  Antisense strand to SEQ ID NO: 2360630
aggauugcacaacucgagg

SEQ ID NO: 2360632 - RNA, 19 nt, Artificial Sequence
  Description of Artificial Sequence: Synthetic oligonucleotide
  Sense strand starting at position 617 of SEQ ID NO: 1885685
gugagcucaaccgaugagu

SEQ ID NO: 2360633 - RNA, 19 nt, Artificial Sequence
  Description of Artificial Sequence: Synthetic oligonucleotide
  Antisense strand to SEQ ID NO: 2360632
acucaucgguugagcucac

SEQ ID NO: 2360634 - RNA, 19 nt, Artificial Sequence
  Description of Artificial Sequence: Synthetic oligonucleotide
  Sense strand starting at position 619 of SEQ ID NO: 1885685
gagcucaaccgaugaguca

SEQ ID NO: 2360635 - RNA, 19 nt, Artificial Sequence
  Description of Artificial Sequence: Synthetic oligonucleotide
  Antisense strand to SEQ ID NO: 2360634
ugacucaucgguugagcuc

SEQ ID NO: 2360636 - RNA, 19 nt, Artificial Sequence
  Description of Artificial Sequence: Synthetic oligonucleotide
  Sense strand starting at position 2271 of SEQ ID NO: 1885685
ccaggugaucugggaucuu

SEQ ID NO: 2360637 - RNA, 19 nt, Artificial Sequence
  Description of Artificial Sequence: Synthetic oligonucleotide
  Antisense strand to SEQ ID NO: 2360636
aagaucccagaucaccugg

SEQ ID NO: 2360638 - RNA, 19 nt, Artificial Sequence
  Description of Artificial Sequence: Synthetic oligonucleotide
  Sense strand starting at position 2283 of SEQ ID NO: 1885685
ggaucuucuuguuccugua

SEQ ID NO: 2360639 - RNA, 19 nt, Artificial Sequence
  Description of Artificial Sequence: Synthetic oligonucleotide
  Antisense strand to SEQ ID NO: 2360638
uacaggaacaagaagaucc

SEQ ID NO: 2360640 - RNA, 19 nt, Artificial Sequence
  Description of Artificial Sequence: Synthetic oligonucleotide
  Sense strand starting at position 2377 of SEQ ID NO: 1885685
ggagaaaccaccugucuug

SEQ ID NO: 2360641 - RNA, 19 nt, Artificial Sequence
  Description of Artificial Sequence: Synthetic oligonucleotide
  Antisense strand to SEQ ID NO: 2360640
caagacaggugguuucucc

SEQ ID NO: 2360642 - RNA, 19 nt, Artificial Sequence
  Description of Artificial Sequence: Synthetic oligonucleotide
  Sense strand starting at position 2384 of SEQ ID NO: 1885685
ccaccugucuugcucuaga

SEQ ID NO: 2360643 - RNA, 19 nt, Artificial Sequence
  Description of Artificial Sequence: Synthetic oligonucleotide
  Antisense strand to SEQ ID NO: 2360642
ucuagagcaagacaggugg

SEQ ID NO: 2360644 - RNA, 19 nt, Artificial Sequence
  Description of Artificial Sequence: Synthetic oligonucleotide
  Sense strand starting at position 2453 of SEQ ID NO: 1885685
cccuuuccuuggguguuaa

SEQ ID NO: 2360645 - RNA, 19 nt, Artificial Sequence
  Description of Artificial Sequence: Synthetic oligonucleotide
  Antisense strand to SEQ ID NO: 2360644
uuaacacccaaggaaaggg

SEQ ID NO: 2360646 - RNA, 19 nt, Artificial Sequence
  Description of Artificial Sequence: Synthetic oligonucleotide
  Sense strand starting at position 2464 of SEQ ID NO: 1885685
gguguuaaguggcuucaga

SEQ ID NO: 2360647 - RNA, 19 nt, Artificial Sequence
  Description of Artificial Sequence: Synthetic oligonucleotide
  Antisense strand to SEQ ID NO: 2360646
ucugaagccacuuaacacc

SEQ ID NO: 2360648 - RNA, 19 nt, Artificial Sequence
  Description of Artificial Sequence: Synthetic oligonucleotide
  Sense strand starting at position 2501 of SEQ ID NO: 1885685
gccuucccggguugagaau

SEQ ID NO: 2360649 - RNA, 19 nt, Artificial Sequence
  Description of Artificial Sequence: Synthetic oligonucleotide
  Antisense strand to SEQ ID NO: 2360648
auucucaacccgggaaggc

SEQ ID NO: 2360650 - RNA, 19 nt, Artificial Sequence
  Description of Artificial Sequence: Synthetic oligonucleotide
  Sense strand starting at position 2510 of SEQ ID NO: 1885685
gguugagaauucguagguc

SEQ ID NO: 2360651 - RNA, 19 nt, Artificial Sequence
  Description of Artificial Sequence: Synthetic oligonucleotide
  Antisense strand to SEQ ID NO: 2360650
gaccuacgaauucucaacc

SEQ ID NO: 2360652 - RNA, 19 nt, Artificial Sequence
  Description of Artificial Sequence: Synthetic oligonucleotide
  Sense strand starting at position 2513 of SEQ ID NO: 1885685
ugagaauucguaggucuuc

SEQ ID NO: 2360653 - RNA, 19 nt, Artificial Sequence
  Description of Artificial Sequence: Synthetic oligonucleotide
  Antisense strand to SEQ ID NO: 2360652
gaagaccuacgaauucuca

SEQ ID NO: 2360654 - RNA, 19 nt, Artificial Sequence
  Description of Artificial Sequence: Synthetic oligonucleotide
  Sense strand starting at position 2542 of SEQ ID NO: 1885685
ugcucuggacagugaauaa

SEQ ID NO: 2360655 - RNA, 19 nt, Artificial Sequence
  Description of Artificial Sequence: Synthetic oligonucleotide
  Antisense strand to SEQ ID NO: 2360654
uuauucacuguccagagca

SEQ ID NO: 2360656 - RNA, 19 nt, Artificial Sequence
  Description of Artificial Sequence: Synthetic oligonucleotide
  Sense strand starting at position 2555 of SEQ ID NO: 1885685
gaauaauaggagcguaaac

SEQ ID NO: 2360657 - RNA, 19 nt, Artificial Sequence
  Description of Artificial Sequence: Synthetic oligonucleotide
  Antisense strand to SEQ ID NO: 2360656
guuuacgcuccuauuauuc

SEQ ID NO: 2360658 - RNA, 19 nt, Artificial Sequence
  Description of Artificial Sequence: Synthetic oligonucleotide
  Sense strand starting at position 2557 of SEQ ID NO: 1885685
auaauaggagcguaaacau

SEQ ID NO: 2360659 - RNA, 19 nt, Artificial Sequence
  Description of Artificial Sequence: Synthetic oligonucleotide
  Antisense strand to SEQ ID NO: 2360658
auguuuacgcuccuauuau

SEQ ID NO: 2360660 - RNA, 19 nt, Artificial Sequence
  Description of Artificial Sequence: Synthetic oligonucleotide
  Sense strand starting at position 3022 of SEQ ID NO: 1885685
ugccaagaccucugacaga

SEQ ID NO: 2360661 - RNA, 19 nt, Artificial Sequence
  Description of Artificial Sequence: Synthetic oligonucleotide
  Antisense strand to SEQ ID NO: 2360660
ucugucagaggucuuggca

SEQ ID NO: 2360662 - RNA, 19 nt, Artificial Sequence
  Description of Artificial Sequence: Synthetic oligonucleotide
  Sense strand starting at position 3058 of SEQ ID NO: 1885685
ggcccaguccaggaaucuu

SEQ ID NO: 2360663 - RNA, 19 nt, Artificial Sequence
  Description of Artificial Sequence: Synthetic oligonucleotide
  Antisense strand to SEQ ID NO: 2360662
aagauuccuggacugggcc

SEQ ID NO: 2360664 - RNA, 19 nt, Artificial Sequence
  Description of Artificial Sequence: Synthetic oligonucleotide
  Sense strand starting at position 3249 of SEQ ID NO: 1885685
guaguuauuuguguacaua

SEQ ID NO: 2360665 - RNA, 19 nt, Artificial Sequence
  Description of Artificial Sequence: Synthetic oligonucleotide
  Antisense strand to SEQ ID NO: 2360664
uauguacacaaauaacuac

SEQ ID NO: 2360666 - RNA, 19 nt, Artificial Sequence
  Description of Artificial Sequence: Synthetic oligonucleotide
  Sense strand starting at position 3299 of SEQ ID NO: 1885685
gaguuagaguuccuauaca

SEQ ID NO: 2360667 - RNA, 19 nt, Artificial Sequence
  Description of Artificial Sequence: Synthetic oligonucleotide
  Antisense strand to SEQ ID NO: 2360666
uguauaggaacucuaacuc

SEQ ID NO: 2360668 - RNA, 19 nt, Artificial Sequence
  Description of Artificial Sequence: Synthetic oligonucleotide
  Sense strand starting at position 3343 of SEQ ID NO: 1885685
aggauucugugaguuagua

SEQ ID NO: 2360669 - RNA, 19 nt, Artificial Sequence
  Description of Artificial Sequence: Synthetic oligonucleotide
  Antisense strand to SEQ ID NO: 2360668
uacuaacucacagaauccu

SEQ ID NO: 2360670 - RNA, 19 nt, Artificial Sequence
  Description of Artificial Sequence: Synthetic oligonucleotide
  Sense strand starting at position 3424 of SEQ ID NO: 1885685
ugcugcuuggcaucuagua

SEQ ID NO: 2360671 - RNA, 19 nt, Artificial Sequence
  Description of Artificial Sequence: Synthetic oligonucleotide
  Antisense strand to SEQ ID NO: 2360670
uacuagaugccaagcagca

SEQ ID NO: 2360672 - RNA, 19 nt, Artificial Sequence
  Description of Artificial Sequence: Synthetic oligonucleotide
  Sense strand starting at position 3426 of SEQ ID NO: 1885685
cugcuuggcaucuaguaag

SEQ ID NO: 2360673 - RNA, 19 nt, Artificial Sequence
  Description of Artificial Sequence: Synthetic oligonucleotide
  Antisense strand to SEQ ID NO: 2360672
cuuacuagaugccaagcag

SEQ ID NO: 2360674 - RNA, 19 nt, Artificial Sequence
  Description of Artificial Sequence: Synthetic oligonucleotide
  Sense strand starting at position 3432 of SEQ ID NO: 1885685
ggcaucuaguaaguguuua

SEQ ID NO: 2360675 - RNA, 19 nt, Artificial Sequence
  Description of Artificial Sequence: Synthetic oligonucleotide
  Antisense strand to SEQ ID NO: 2360674
uaaacacuuacuagaugcc

SEQ ID NO: 2360676 - RNA, 19 nt, Artificial Sequence
  Description of Artificial Sequence: Synthetic oligonucleotide
  Sense strand starting at position 3433 of SEQ ID NO: 1885685
gcaucuaguaaguguuuag

SEQ ID NO: 2360677 - RNA, 19 nt, Artificial Sequence
  Description of Artificial Sequence: Synthetic oligonucleotide
  Antisense strand to SEQ ID NO: 2360676
cuaaacacuuacuagaugc

SEQ ID NO: 2360678 - RNA, 19 nt, Artificial Sequence
  Description of Artificial Sequence: Synthetic oligonucleotide
  Sense strand starting at position 3437 of SEQ ID NO: 1885685
cuaguaaguguuuaguguu

SEQ ID NO: 2360679 - RNA, 19 nt, Artificial Sequence
  Description of Artificial Sequence: Synthetic oligonucleotide
  Antisense strand to SEQ ID NO: 2360678
aacacuaaacacuuacuag

SEQ ID NO: 2360680 - RNA, 19 nt, Artificial Sequence
  Description of Artificial Sequence: Synthetic oligonucleotide
  Sense strand starting at position 3469 of SEQ ID NO: 1885685
gguuguuagagauaggguc

SEQ ID NO: 2360681 - RNA, 19 nt, Artificial Sequence
  Description of Artificial Sequence: Synthetic oligonucleotide
  Antisense strand to SEQ ID NO: 2360680
gacccuaucucuaacaacc

SEQ ID NO: 2360682 - RNA, 19 nt, Artificial Sequence
  Description of Artificial Sequence: Synthetic oligonucleotide
  Sense strand starting at position 3752 of SEQ ID NO: 1885685
cuggucuuagugcauguua

SEQ ID NO: 2360683 - RNA, 19 nt, Artificial Sequence
  Description of Artificial Sequence: Synthetic oligonucleotide
  Antisense strand to SEQ ID NO: 2360682
uaacaugcacuaagaccag

SEQ ID NO: 2360684 - RNA, 19 nt, Artificial Sequence
  Description of Artificial Sequence: Synthetic oligonucleotide
  Sense strand starting at position 3755 of SEQ ID NO: 1885685
gucuuagugcauguuaguu

SEQ ID NO: 2360685 - RNA, 19 nt, Artificial Sequence
  Description of Artificial Sequence: Synthetic oligonucleotide
  Antisense strand to SEQ ID NO: 2360684
aacuaacaugcacuaagac

SEQ ID NO: 2360686 - RNA, 19 nt, Artificial Sequence
  Description of Artificial Sequence: Synthetic oligonucleotide
  Sense strand starting at position 3760 of SEQ ID NO: 1885685
agugcauguuaguugaaca

SEQ ID NO: 2360687 - RNA, 19 nt, Artificial Sequence
  Description of Artificial Sequence: Synthetic oligonucleotide
  Antisense strand to SEQ ID NO: 2360686
uguucaacuaacaugcacu

SEQ ID NO: 2360688 - RNA, 19 nt, Artificial Sequence
  Description of Artificial Sequence: Synthetic oligonucleotide
  Sense strand starting at position 3761 of SEQ ID NO: 1885685
gugcauguuaguugaacaa

SEQ ID NO: 2360689 - RNA, 19 nt, Artificial Sequence
  Description of Artificial Sequence: Synthetic oligonucleotide
  Antisense strand to SEQ ID NO: 2360688
uuguucaacuaacaugcac

SEQ ID NO: 2360690 - RNA, 19 nt, Artificial Sequence
  Description of Artificial Sequence: Synthetic oligonucleotide
  Sense strand starting at position 3773 of SEQ ID NO: 1885685
ugaacaaauuagugaaaga

SEQ ID NO: 2360691 - RNA, 19 nt, Artificial Sequence
  Description of Artificial Sequence: Synthetic oligonucleotide
  Antisense strand to SEQ ID NO: 2360690
ucuuucacuaauuuguuca

SEQ ID NO: 2360692 - RNA, 19 nt, Artificial Sequence
  Description of Artificial Sequence: Synthetic oligonucleotide
  Sense strand starting at position 3847 of SEQ ID NO: 1885685
ccuggaaccuccucagauu

SEQ ID NO: 2360693 - RNA, 19 nt, Artificial Sequence
  Description of Artificial Sequence: Synthetic oligonucleotide
  Antisense strand to SEQ ID NO: 2360692
aaucugaggagguuccagg

SEQ ID NO: 2360694 - RNA, 19 nt, Artificial Sequence
  Description of Artificial Sequence: Synthetic oligonucleotide
  Sense strand starting at position 148 of SEQ ID NO: 1885686
aaaggacucugguuuguag

SEQ ID NO: 2360695 - RNA, 19 nt, Artificial Sequence
  Description of Artificial Sequence: Synthetic oligonucleotide
  Antisense strand to SEQ ID NO: 2360694
cuacaaaccagaguccuuu

SEQ ID NO: 2360696 - RNA, 19 nt, Artificial Sequence
  Description of Artificial Sequence: Synthetic oligonucleotide
  Sense strand starting at position 221 of SEQ ID NO: 1885686
augugaggucaguaaacac

SEQ ID NO: 2360697 - RNA, 19 nt, Artificial Sequence
  Description of Artificial Sequence: Synthetic oligonucleotide
  Antisense strand to SEQ ID NO: 2360696
guguuuacugaccucacau

SEQ ID NO: 2360698 - RNA, 19 nt, Artificial Sequence
  Description of Artificial Sequence: Synthetic oligonucleotide
  Sense strand starting at position 407 of SEQ ID NO: 1885686
ccagauugcuccuugggaa

SEQ ID NO: 2360699 - RNA, 19 nt, Artificial Sequence
  Description of Artificial Sequence: Synthetic oligonucleotide
  Antisense strand to SEQ ID NO: 2360698
uucccaaggagcaaucugg

SEQ ID NO: 2360700 - RNA, 19 nt, Artificial Sequence
  Description of Artificial Sequence: Synthetic oligonucleotide
  Sense strand starting at position 408 of SEQ ID NO: 1885686
cagauugcuccuugggaac

SEQ ID NO: 2360701 - RNA, 19 nt, Artificial Sequence
  Description of Artificial Sequence: Synthetic oligonucleotide
  Antisense strand to SEQ ID NO: 2360700
guucccaaggagcaaucug

SEQ ID NO: 2360702 - RNA, 19 nt, Artificial Sequence
  Description of Artificial Sequence: Synthetic oligonucleotide
  Sense strand starting at position 496 of SEQ ID NO: 1885686
auuggugcuauuuguguua

SEQ ID NO: 2360703 - RNA, 19 nt, Artificial Sequence
  Description of Artificial Sequence: Synthetic oligonucleotide
  Antisense strand to SEQ ID NO: 2360702
uaacacaaauagcaccaau

SEQ ID NO: 2360704 - RNA, 19 nt, Artificial Sequence
  Description of Artificial Sequence: Synthetic oligonucleotide
  Sense strand starting at position 567 of SEQ ID NO: 1885686
uccuguacucccggaaaua

SEQ ID NO: 2360705 - RNA, 19 nt, Artificial Sequence
  Description of Artificial Sequence: Synthetic oligonucleotide
  Antisense strand to SEQ ID NO: 2360704
uauuuccgggaguacagga

SEQ ID NO: 2360706 - RNA, 19 nt, Artificial Sequence
  Description of Artificial Sequence: Synthetic oligonucleotide
  Sense strand starting at position 568 of SEQ ID NO: 1885686
ccuguacucccggaaauau

SEQ ID NO: 2360707 - RNA, 19 nt, Artificial Sequence
  Description of Artificial Sequence: Synthetic oligonucleotide
  Antisense strand to SEQ ID NO: 2360706
auauuuccgggaguacagg

SEQ ID NO: 2360708 - RNA, 19 nt, Artificial Sequence
  Description of Artificial Sequence: Synthetic oligonucleotide
  Sense strand starting at position 619 of SEQ ID NO: 1885686
auagaauuccuguagcugu

SEQ ID NO: 2360709 - RNA, 19 nt, Artificial Sequence
  Description of Artificial Sequence: Synthetic oligonucleotide
  Antisense strand to SEQ ID NO: 2360708
acagcuacaggaauucuau

SEQ ID NO: 2360710 - RNA, 19 nt, Artificial Sequence
  Description of Artificial Sequence: Synthetic oligonucleotide
  Sense strand starting at position 758 of SEQ ID NO: 1885686
ugagcuguuaagcagauua

SEQ ID NO: 2360711 - RNA, 19 nt, Artificial Sequence
  Description of Artificial Sequence: Synthetic oligonucleotide
  Antisense strand to SEQ ID NO: 2360710
uaaucugcuuaacagcuca

SEQ ID NO: 2360712 - RNA, 19 nt, Artificial Sequence
  Description of Artificial Sequence: Synthetic oligonucleotide
  Sense strand starting at position 760 of SEQ ID NO: 1885686
agcuguuaagcagauuaaa

SEQ ID NO: 2360713 - RNA, 19 nt, Artificial Sequence
  Description of Artificial Sequence: Synthetic oligonucleotide
  Antisense strand to SEQ ID NO: 2360712
uuuaaucugcuuaacagcu

SEQ ID NO: 2360714 - RNA, 19 nt, Artificial Sequence
  Description of Artificial Sequence: Synthetic oligonucleotide
  Sense strand starting at position 889 of SEQ ID NO: 1885686
cccuccuuuccaugggaaa

SEQ ID NO: 2360715 - RNA, 19 nt, Artificial Sequence
  Description of Artificial Sequence: Synthetic oligonucleotide
  Antisense strand to SEQ ID NO: 2360714
uuucccauggaaaggaggg

SEQ ID NO: 2360716 - RNA, 19 nt, Artificial Sequence
  Description of Artificial Sequence: Synthetic oligonucleotide
  Sense strand starting at position 890 of SEQ ID NO: 1885686
ccuccuuuccaugggaaag

SEQ ID NO: 2360717 - RNA, 19 nt, Artificial Sequence
  Description of Artificial Sequence: Synthetic oligonucleotide
  Antisense strand to SEQ ID NO: 2360716
cuuucccauggaaaggagg

SEQ ID NO: 2360718 - RNA, 19 nt, Artificial Sequence
  Description of Artificial Sequence: Synthetic oligonucleotide
  Sense strand starting at position 1676 of SEQ ID NO: 1885686
gagugaaacuccgccugga

SEQ ID NO: 2360719 - RNA, 19 nt, Artificial Sequence
  Description of Artificial Sequence: Synthetic oligonucleotide
  Antisense strand to SEQ ID NO: 2360718
uccaggcggaguuucacuc

SEQ ID NO: 2360720 - RNA, 19 nt, Artificial Sequence
  Description of Artificial Sequence: Synthetic oligonucleotide
  Sense strand starting at position 2005 of SEQ ID NO: 1885686
ggauauucugaugguagag

SEQ ID NO: 2360721 - RNA, 19 nt, Artificial Sequence
  Description of Artificial Sequence: Synthetic oligonucleotide
  Antisense strand to SEQ ID NO: 2360720
cucuaccaucagaauaucc

SEQ ID NO: 2360722 - RNA, 19 nt, Artificial Sequence
  Description of Artificial Sequence: Synthetic oligonucleotide
  Sense strand starting at position 2450 of SEQ ID NO: 1885686
augagacucuguucucuac

SEQ ID NO: 2360723 - RNA, 19 nt, Artificial Sequence
  Description of Artificial Sequence: Synthetic oligonucleotide
  Antisense strand to SEQ ID NO: 2360722
guagagaacagagucucau

SEQ ID NO: 2360724 - RNA, 19 nt, Artificial Sequence
  Description of Artificial Sequence: Synthetic oligonucleotide
  Sense strand starting at position 2554 of SEQ ID NO: 1885686
agcccaggagguugauaua

SEQ ID NO: 2360725 - RNA, 19 nt, Artificial Sequence
  Description of Artificial Sequence: Synthetic oligonucleotide
  Antisense strand to SEQ ID NO: 2360724
uauaucaaccuccugggcu

SEQ ID NO: 2360726 - RNA, 19 nt, Artificial Sequence
  Description of Artificial Sequence: Synthetic oligonucleotide
  Sense strand starting at position 2692 of SEQ ID NO: 1885686
ggaaucaggccuggugaca

SEQ ID NO: 2360727 - RNA, 19 nt, Artificial Sequence
  Description of Artificial Sequence: Synthetic oligonucleotide
  Antisense strand to SEQ ID NO: 2360726
ugucaccaggccugauucc

SEQ ID NO: 2360728 - RNA, 19 nt, Artificial Sequence
  Description of Artificial Sequence: Synthetic oligonucleotide
  Sense strand starting at position 2850 of SEQ ID NO: 1885686
gaugcuugaagaugucagu

SEQ ID NO: 2360729 - RNA, 19 nt, Artificial Sequence
  Description of Artificial Sequence: Synthetic oligonucleotide
  Antisense strand to SEQ ID NO: 2360728
acugacaucuucaagcauc

SEQ ID NO: 2360730 - RNA, 19 nt, Artificial Sequence
  Description of Artificial Sequence: Synthetic oligonucleotide
  Sense strand starting at position 2900 of SEQ ID NO: 1885686
aggucaucucucuaagcau

SEQ ID NO: 2360731 - RNA, 19 nt, Artificial Sequence
  Description of Artificial Sequence: Synthetic oligonucleotide
  Antisense strand to SEQ ID NO: 2360730
augcuuagagagaugaccu

SEQ ID NO: 2360732 - RNA, 19 nt, Artificial Sequence
  Description of Artificial Sequence: Synthetic oligonucleotide
  Sense strand starting at position 2913 of SEQ ID NO: 1885686
aagcauguugcugaucuca

SEQ ID NO: 2360733 - RNA, 19 nt, Artificial Sequence
  Description of Artificial Sequence: Synthetic oligonucleotide
  Antisense strand to SEQ ID NO: 2360732
ugagaucagcaacaugcuu

SEQ ID NO: 2360734 - RNA, 19 nt, Artificial Sequence
  Description of Artificial Sequence: Synthetic oligonucleotide
  Sense strand starting at position 2933 of SEQ ID NO: 1885686
gcuuucugguaauuuauua

SEQ ID NO: 2360735 - RNA, 19 nt, Artificial Sequence
  Description of Artificial Sequence: Synthetic oligonucleotide
  Antisense strand to SEQ ID NO: 2360734
uaauaaauuaccagaaagc

SEQ ID NO: 2360736 - RNA, 19 nt, Artificial Sequence
  Description of Artificial Sequence: Synthetic oligonucleotide
  Sense strand starting at position 2975 of SEQ ID NO: 1885686
uucugauccagcggaaaca

SEQ ID NO: 2360737 - RNA, 19 nt, Artificial Sequence
  Description of Artificial Sequence: Synthetic oligonucleotide
  Antisense strand to SEQ ID NO: 2360736
uguuuccgcuggaucagaa

SEQ ID NO: 2360738 - RNA, 19 nt, Artificial Sequence
  Description of Artificial Sequence: Synthetic oligonucleotide
  Sense strand starting at position 2996 of SEQ ID NO: 1885686
acaggcuuuggcgacagau

SEQ ID NO: 2360739 - RNA, 19 nt, Artificial Sequence
  Description of Artificial Sequence: Synthetic oligonucleotide
  Antisense strand to SEQ ID NO: 2360738
aucugucgccaaagccugu

SEQ ID NO: 2360740 - RNA, 19 nt, Artificial Sequence
  Description of Artificial Sequence: Synthetic oligonucleotide
  Sense strand starting at position 2998 of SEQ ID NO: 1885686
aggcuuuggcgacagauga

SEQ ID NO: 2360741 - RNA, 19 nt, Artificial Sequence
  Description of Artificial Sequence: Synthetic oligonucleotide
  Antisense strand to SEQ ID NO: 2360740
ucaucugucgccaaagccu

SEQ ID NO: 2360742 - RNA, 19 nt, Artificial Sequence
  Description of Artificial Sequence: Synthetic oligonucleotide
  Sense strand starting at position 3002 of SEQ ID NO: 1885686
uuuggcgacagaugagaau

SEQ ID NO: 2360743 - RNA, 19 nt, Artificial Sequence
  Description of Artificial Sequence: Synthetic oligonucleotide
  Antisense strand to SEQ ID NO: 2360742
auucucaucugucgccaaa

SEQ ID NO: 2360744 - RNA, 19 nt, Artificial Sequence
  Description of Artificial Sequence: Synthetic oligonucleotide
  Sense strand starting at position 3013 of SEQ ID NO: 1885686
augagaaucagcugaggca

SEQ ID NO: 2360745 - RNA, 19 nt, Artificial Sequence
  Description of Artificial Sequence: Synthetic oligonucleotide
  Antisense strand to SEQ ID NO: 2360744
ugccucagcugauucucau

SEQ ID NO: 2360746 - RNA, 19 nt, Artificial Sequence
  Description of Artificial Sequence: Synthetic oligonucleotide
  Sense strand starting at position 3014 of SEQ ID NO: 1885686
ugagaaucagcugaggcau

SEQ ID NO: 2360747 - RNA, 19 nt, Artificial Sequence
  Description of Artificial Sequence: Synthetic oligonucleotide
  Antisense strand to SEQ ID NO: 2360746
augccucagcugauucuca

SEQ ID NO: 2360748 - RNA, 19 nt, Artificial Sequence
  Description of Artificial Sequence: Synthetic oligonucleotide
  Sense strand starting at position 3093 of SEQ ID NO: 1885686
aucuguugaccagggauaa

SEQ ID NO: 2360749 - RNA, 19 nt, Artificial Sequence
  Description of Artificial Sequence: Synthetic oligonucleotide
  Antisense strand to SEQ ID NO: 2360748
uuaucccuggucaacagau

SEQ ID NO: 2360750 - RNA, 19 nt, Artificial Sequence
  Description of Artificial Sequence: Synthetic oligonucleotide
  Sense strand starting at position 3094 of SEQ ID NO: 1885686
ucuguugaccagggauaau

SEQ ID NO: 2360751 - RNA, 19 nt, Artificial Sequence
  Description of Artificial Sequence: Synthetic oligonucleotide
  Antisense strand to SEQ ID NO: 2360750
auuaucccuggucaacaga

SEQ ID NO: 2360752 - RNA, 19 nt, Artificial Sequence
  Description of Artificial Sequence: Synthetic oligonucleotide
  Sense strand starting at position 3128 of SEQ ID NO: 1885686
ggguuacugcagggaguaa

SEQ ID NO: 2360753 - RNA, 19 nt, Artificial Sequence
  Description of Artificial Sequence: Synthetic oligonucleotide
  Antisense strand to SEQ ID NO: 2360752
uuacucccugcaguaaccc

SEQ ID NO: 2360754 - RNA, 19 nt, Artificial Sequence
  Description of Artificial Sequence: Synthetic oligonucleotide
  Sense strand starting at position 3129 of SEQ ID NO: 1885686
gguuacugcagggaguaaa

SEQ ID NO: 2360755 - RNA, 19 nt, Artificial Sequence
  Description of Artificial Sequence: Synthetic oligonucleotide
  Antisense strand to SEQ ID NO: 2360754
uuuacucccugcaguaacc

SEQ ID NO: 2360756 - RNA, 19 nt, Artificial Sequence
  Description of Artificial Sequence: Synthetic oligonucleotide
  Sense strand starting at position 3210 of SEQ ID NO: 1885686
ccaguugcucaggauggaa

SEQ ID NO: 2360757 - RNA, 19 nt, Artificial Sequence
  Description of Artificial Sequence: Synthetic oligonucleotide
  Antisense strand to SEQ ID NO: 2360756
uuccauccugagcaacugg

SEQ ID NO: 2360758 - RNA, 19 nt, Artificial Sequence
  Description of Artificial Sequence: Synthetic oligonucleotide
  Sense strand starting at position 3441 of SEQ ID NO: 1885686
uggacagauguuuggaguu

SEQ ID NO: 2360759 - RNA, 19 nt, Artificial Sequence
  Description of Artificial Sequence: Synthetic oligonucleotide
  Antisense strand to SEQ ID NO: 2360758
aacuccaaacaucugucca

SEQ ID NO: 2360760 - RNA, 19 nt, Artificial Sequence
  Description of Artificial Sequence: Synthetic oligonucleotide
  Sense strand starting at position 3447 of SEQ ID NO: 1885686
gauguuuggaguuauugag

SEQ ID NO: 2360761 - RNA, 19 nt, Artificial Sequence
  Description of Artificial Sequence: Synthetic oligonucleotide
  Antisense strand to SEQ ID NO: 2360760
cucaauaacuccaaacauc

SEQ ID NO: 2360762 - RNA, 19 nt, Artificial Sequence
  Description of Artificial Sequence: Synthetic oligonucleotide
  Sense strand starting at position 3451 of SEQ ID NO: 1885686
uuuggaguuauugagguca

SEQ ID NO: 2360763 - RNA, 19 nt, Artificial Sequence
  Description of Artificial Sequence: Synthetic oligonucleotide
  Antisense strand to SEQ ID NO: 2360762
ugaccucaauaacuccaaa

SEQ ID NO: 2360764 - RNA, 19 nt, Artificial Sequence
  Description of Artificial Sequence: Synthetic oligonucleotide
  Sense strand starting at position 3565 of SEQ ID NO: 1885686
agauuuguuccuggcugca

SEQ ID NO: 2360765 - RNA, 19 nt, Artificial Sequence
  Description of Artificial Sequence: Synthetic oligonucleotide
  Antisense strand to SEQ ID NO: 2360764
ugcagccaggaacaaaucu

SEQ ID NO: 2360766 - RNA, 19 nt, Artificial Sequence
  Description of Artificial Sequence: Synthetic oligonucleotide
  Sense strand starting at position 3636 of SEQ ID NO: 1885686
ggaugcuuaccugggcaga

SEQ ID NO: 2360767 - RNA, 19 nt, Artificial Sequence
  Description of Artificial Sequence: Synthetic oligonucleotide
  Antisense strand to SEQ ID NO: 2360766
ucugcccagguaagcaucc

SEQ ID NO: 2360768 - RNA, 19 nt, Artificial Sequence
  Description of Artificial Sequence: Synthetic oligonucleotide
  Sense strand starting at position 3748 of SEQ ID NO: 1885686
cuuggacugugaccaauua

SEQ ID NO: 2360769 - RNA, 19 nt, Artificial Sequence
  Description of Artificial Sequence: Synthetic oligonucleotide
  Antisense strand to SEQ ID NO: 2360768
uaauuggucacaguccaag

SEQ ID NO: 2360770 - RNA, 19 nt, Artificial Sequence
  Description of Artificial Sequence: Synthetic oligonucleotide
  Sense strand starting at position 3874 of SEQ ID NO: 1885686
uuagcaaguccucaacaga

SEQ ID NO: 2360771 - RNA, 19 nt, Artificial Sequence
  Description of Artificial Sequence: Synthetic oligonucleotide
  Antisense strand to SEQ ID NO: 2360770
ucuguugaggacuugcuaa

SEQ ID NO: 2360772 - RNA, 19 nt, Artificial Sequence
  Description of Artificial Sequence: Synthetic oligonucleotide
  Sense strand starting at position 3877 of SEQ ID NO: 1885686
gcaaguccucaacagauuc

SEQ ID NO: 2360773 - RNA, 19 nt, Artificial Sequence
  Description of Artificial Sequence: Synthetic oligonucleotide
  Antisense strand to SEQ ID NO: 2360772
gaaucuguugaggacuugc

SEQ ID NO: 2360774 - RNA, 19 nt, Artificial Sequence
  Description of Artificial Sequence: Synthetic oligonucleotide
  Sense strand starting at position 111 of SEQ ID NO: 1885687
gcugaguggcguucugagu

SEQ ID NO: 2360775 - RNA, 19 nt, Artificial Sequence
  Description of Artificial Sequence: Synthetic oligonucleotide
  Antisense strand to SEQ ID NO: 2360774
acucagaacgccacucagc

SEQ ID NO: 2360776 - RNA, 19 nt, Artificial Sequence
  Description of Artificial Sequence: Synthetic oligonucleotide
  Sense strand starting at position 197 of SEQ ID NO: 1885687
cccagacugucauggcuau

SEQ ID NO: 2360777 - RNA, 19 nt, Artificial Sequence
  Description of Artificial Sequence: Synthetic oligonucleotide
  Antisense strand to SEQ ID NO: 2360776
auagccaugacagucuggg

SEQ ID NO: 2360778 - RNA, 19 nt, Artificial Sequence
  Description of Artificial Sequence: Synthetic oligonucleotide
  Sense strand starting at position 240 of SEQ ID NO: 1885687
gccucaggucuuuguccaa

SEQ ID NO: 2360779 - RNA, 19 nt, Artificial Sequence
  Description of Artificial Sequence: Synthetic oligonucleotide
  Antisense strand to SEQ ID NO: 2360778
uuggacaaagaccugaggc

SEQ ID NO: 2360780 - RNA, 19 nt, Artificial Sequence
  Description of Artificial Sequence: Synthetic oligonucleotide
  Sense strand starting at position 720 of SEQ ID NO: 1885687
agcugaggcuauccaucua

SEQ ID NO: 2360781 - RNA, 19 nt, Artificial Sequence
  Description of Artificial Sequence: Synthetic oligonucleotide
  Antisense strand to SEQ ID NO: 2360780
uagauggauagccucagcu

SEQ ID NO: 2360782 - RNA, 19 nt, Artificial Sequence
  Description of Artificial Sequence: Synthetic oligonucleotide
  Sense strand starting at position 742 of SEQ ID NO: 1885687
ccaacaagaucaugaagau

SEQ ID NO: 2360783 - RNA, 19 nt, Artificial Sequence
  Description of Artificial Sequence: Synthetic oligonucleotide
  Antisense strand to SEQ ID NO: 2360782
aucuucaugaucuuguugg

SEQ ID NO: 2360784 - RNA, 19 nt, Artificial Sequence
  Description of Artificial Sequence: Synthetic oligonucleotide
  Sense strand starting at position 1995 of SEQ ID NO: 1885687
cccagaucagucuggcuca

SEQ ID NO: 2360785 - RNA, 19 nt, Artificial Sequence
  Description of Artificial Sequence: Synthetic oligonucleotide
  Antisense strand to SEQ ID NO: 2360784
ugagccagacugaucuggg

SEQ ID NO: 2360786 - RNA, 19 nt, Artificial Sequence
  Description of Artificial Sequence: Synthetic oligonucleotide
  Sense strand starting at position 1996 of SEQ ID NO: 1885687
ccagaucagucuggcucaa

SEQ ID NO: 2360787 - RNA, 19 nt, Artificial Sequence
  Description of Artificial Sequence: Synthetic oligonucleotide
  Antisense strand to SEQ ID NO: 2360786
uugagccagacugaucugg

SEQ ID NO: 2360788 - RNA, 19 nt, Artificial Sequence
  Description of Artificial Sequence: Synthetic oligonucleotide
  Sense strand starting at position 1998 of SEQ ID NO: 1885687
agaucagucuggcucaacu

SEQ ID NO: 2360789 - RNA, 19 nt, Artificial Sequence
  Description of Artificial Sequence: Synthetic oligonucleotide
  Antisense strand to SEQ ID NO: 2360788
aguugagccagacugaucu

SEQ ID NO: 2360790 - RNA, 19 nt, Artificial Sequence
  Description of Artificial Sequence: Synthetic oligonucleotide
  Sense strand starting at position 2959 of SEQ ID NO: 1885687
cuuggcuuagccugauaca

SEQ ID NO: 2360791 - RNA, 19 nt, Artificial Sequence
  Description of Artificial Sequence: Synthetic oligonucleotide
  Antisense strand to SEQ ID NO: 2360790
uguaucaggcuaagccaag

SEQ ID NO: 2360792 - RNA, 19 nt, Artificial Sequence
  Description of Artificial Sequence: Synthetic oligonucleotide
  Sense strand starting at position 2960 of SEQ ID NO: 1885687
uuggcuuagccugauacaa

SEQ ID NO: 2360793 - RNA, 19 nt, Artificial Sequence
  Description of Artificial Sequence: Synthetic oligonucleotide
  Antisense strand to SEQ ID NO: 2360792
uuguaucaggcuaagccaa

SEQ ID NO: 2360794 - RNA, 19 nt, Artificial Sequence
  Description of Artificial Sequence: Synthetic oligonucleotide
  Sense strand starting at position 178 of SEQ ID NO: 1885688
ccuagaacaugugcuacaa

SEQ ID NO: 2360795 - RNA, 19 nt, Artificial Sequence
  Description of Artificial Sequence: Synthetic oligonucleotide
  Antisense strand to SEQ ID NO: 2360794
uuguagcacauguucuagg

SEQ ID NO: 2360796 - RNA, 19 nt, Artificial Sequence
  Description of Artificial Sequence: Synthetic oligonucleotide
  Sense strand starting at position 245 of SEQ ID NO: 1885688
ccuguuauagcucauucca

SEQ ID NO: 2360797 - RNA, 19 nt, Artificial Sequence
  Description of Artificial Sequence: Synthetic oligonucleotide
  Antisense strand to SEQ ID NO: 2360796
uggaaugagcuauaacagg

SEQ ID NO: 2360798 - RNA, 19 nt, Artificial Sequence
  Description of Artificial Sequence: Synthetic oligonucleotide
  Sense strand starting at position 247 of SEQ ID NO: 1885688
uguuauagcucauuccaca

SEQ ID NO: 2360799 - RNA, 19 nt, Artificial Sequence
  Description of Artificial Sequence: Synthetic oligonucleotide
  Antisense strand to SEQ ID NO: 2360798
uguggaaugagcuauaaca

SEQ ID NO: 2360800 - RNA, 19 nt, Artificial Sequence
  Description of Artificial Sequence: Synthetic oligonucleotide
  Sense strand starting at position 290 of SEQ ID NO: 1885688
gagucuuauccaugccagg

SEQ ID NO: 2360801 - RNA, 19 nt, Artificial Sequence
  Description of Artificial Sequence: Synthetic oligonucleotide
  Antisense strand to SEQ ID NO: 2360800
ccuggcauggauaagacuc

SEQ ID NO: 2360802 - RNA, 19 nt, Artificial Sequence
  Description of Artificial Sequence: Synthetic oligonucleotide
  Sense strand starting at position 723 of SEQ ID NO: 1885688
gggaauuccugacuucccu

SEQ ID NO: 2360803 - RNA, 19 nt, Artificial Sequence
  Description of Artificial Sequence: Synthetic oligonucleotide
  Antisense strand to SEQ ID NO: 2360802
agggaagucaggaauuccc

SEQ ID NO: 2360804 - RNA, 19 nt, Artificial Sequence
  Description of Artificial Sequence: Synthetic oligonucleotide
  Sense strand starting at position 815 of SEQ ID NO: 1885688
aaggguaagugccuuauau

SEQ ID NO: 2360805 - RNA, 19 nt, Artificial Sequence
  Description of Artificial Sequence: Synthetic oligonucleotide
  Antisense strand to SEQ ID NO: 2360804
auauaaggcacuuacccuu

SEQ ID NO: 2360806 - RNA, 19 nt, Artificial Sequence
  Description of Artificial Sequence: Synthetic oligonucleotide
  Sense strand starting at position 883 of SEQ ID NO: 1885688
gacagaggcucugcuuacu

SEQ ID NO: 2360807 - RNA, 19 nt, Artificial Sequence
  Description of Artificial Sequence: Synthetic oligonucleotide
  Antisense strand to SEQ ID NO: 2360806
aguaagcagagccucuguc

SEQ ID NO: 2360808 - RNA, 19 nt, Artificial Sequence
  Description of Artificial Sequence: Synthetic oligonucleotide
  Sense strand starting at position 886 of SEQ ID NO: 1885688
agaggcucugcuuacuuua

SEQ ID NO: 2360809 - RNA, 19 nt, Artificial Sequence
  Description of Artificial Sequence: Synthetic oligonucleotide
  Antisense strand to SEQ ID NO: 2360808
uaaaguaagcagagccucu

SEQ ID NO: 2360810 - RNA, 19 nt, Artificial Sequence
  Description of Artificial Sequence: Synthetic oligonucleotide
  Sense strand starting at position 1509 of SEQ ID NO: 1885688
aaagauggugcaggaguua

SEQ ID NO: 2360811 - RNA, 19 nt, Artificial Sequence
  Description of Artificial Sequence: Synthetic oligonucleotide
  Antisense strand to SEQ ID NO: 2360810
uaacuccugcaccaucuuu

SEQ ID NO: 2360812 - RNA, 19 nt, Artificial Sequence
  Description of Artificial Sequence: Synthetic oligonucleotide
  Sense strand starting at position 1557 of SEQ ID NO: 1885688
gagagaauguucccagacu

SEQ ID NO: 2360813 - RNA, 19 nt, Artificial Sequence
  Description of Artificial Sequence: Synthetic oligonucleotide
  Antisense strand to SEQ ID NO: 2360812
agucugggaacauucucuc

SEQ ID NO: 2360814 - RNA, 19 nt, Artificial Sequence
  Description of Artificial Sequence: Synthetic oligonucleotide
  Sense strand starting at position 2042 of SEQ ID NO: 1885688
agcaaagaaugacacuaaa

SEQ ID NO: 2360815 - RNA, 19 nt, Artificial Sequence
  Description of Artificial Sequence: Synthetic oligonucleotide
  Antisense strand to SEQ ID NO: 2360814
uuuagugucauucuuugcu

SEQ ID NO: 2360816 - RNA, 19 nt, Artificial Sequence
  Description of Artificial Sequence: Synthetic oligonucleotide
  Sense strand starting at position 2180 of SEQ ID NO: 1885688
cuuccagacuuugugagua

SEQ ID NO: 2360817 - RNA, 19 nt, Artificial Sequence
  Description of Artificial Sequence: Synthetic oligonucleotide
  Antisense strand to SEQ ID NO: 2360816
uacucacaaagucuggaag

SEQ ID NO: 2360818 - RNA, 19 nt, Artificial Sequence
  Description of Artificial Sequence: Synthetic oligonucleotide
  Sense strand starting at position 2185 of SEQ ID NO: 1885688
agacuuugugaguagugga

SEQ ID NO: 2360819 - RNA, 19 nt, Artificial Sequence
  Description of Artificial Sequence: Synthetic oligonucleotide
  Antisense strand to SEQ ID NO: 2360818
uccacuacucacaaagucu

SEQ ID NO: 2360820 - RNA, 19 nt, Artificial Sequence
  Description of Artificial Sequence: Synthetic oligonucleotide
  Sense strand starting at position 2192 of SEQ ID NO: 1885688
gugaguaguggagggaaau

SEQ ID NO: 2360821 - RNA, 19 nt, Artificial Sequence
  Description of Artificial Sequence: Synthetic oligonucleotide
  Antisense strand to SEQ ID NO: 2360820
auuucccuccacuacucac

SEQ ID NO: 2360822 - RNA, 19 nt, Artificial Sequence
  Description of Artificial Sequence: Synthetic oligonucleotide
  Sense strand starting at position 2437 of SEQ ID NO: 1885688
acagaaucuccaggaguca

SEQ ID NO: 2360823 - RNA, 19 nt, Artificial Sequence
  Description of Artificial Sequence: Synthetic oligonucleotide
  Antisense strand to SEQ ID NO: 2360822
ugacuccuggagauucugu

SEQ ID NO: 2360824 - RNA, 19 nt, Artificial Sequence
  Description of Artificial Sequence: Synthetic oligonucleotide
  Sense strand starting at position 2448 of SEQ ID NO: 1885688
aggagucaaucugugggau

SEQ ID NO: 2360825 - RNA, 19 nt, Artificial Sequence
  Description of Artificial Sequence: Synthetic oligonucleotide
  Antisense strand to SEQ ID NO: 2360824
aucccacagauugacuccu

SEQ ID NO: 2360826 - RNA, 19 nt, Artificial Sequence
  Description of Artificial Sequence: Synthetic oligonucleotide
  Sense strand starting at position 2449 of SEQ ID NO: 1885688
ggagucaaucugugggaug

SEQ ID NO: 2360827 - RNA, 19 nt, Artificial Sequence
  Description of Artificial Sequence: Synthetic oligonucleotide
  Antisense strand to SEQ ID NO: 2360826
caucccacagauugacucc

SEQ ID NO: 2360828 - RNA, 19 nt, Artificial Sequence
  Description of Artificial Sequence: Synthetic oligonucleotide
  Sense strand starting at position 2451 of SEQ ID NO: 1885688
agucaaucugugggaugga

SEQ ID NO: 2360829 - RNA, 19 nt, Artificial Sequence
  Description of Artificial Sequence: Synthetic oligonucleotide
  Antisense strand to SEQ ID NO: 2360828
uccaucccacagauugacu

SEQ ID NO: 2360830 - RNA, 19 nt, Artificial Sequence
  Description of Artificial Sequence: Synthetic oligonucleotide
  Sense strand starting at position 2591 of SEQ ID NO: 1885688
agcacugaucucugcucaa

SEQ ID NO: 2360831 - RNA, 19 nt, Artificial Sequence
  Description of Artificial Sequence: Synthetic oligonucleotide
  Antisense strand to SEQ ID NO: 2360830
uugagcagagaucagugcu

SEQ ID NO: 2360832 - RNA, 19 nt, Artificial Sequence
  Description of Artificial Sequence: Synthetic oligonucleotide
  Sense strand starting at position 2718 of SEQ ID NO: 1885688
auggcuuaaguuggaaauu

SEQ ID NO: 2360833 - RNA, 19 nt, Artificial Sequence
  Description of Artificial Sequence: Synthetic oligonucleotide
  Antisense strand to SEQ ID NO: 2360832
aauuuccaacuuaagccau

SEQ ID NO: 2360834 - RNA, 19 nt, Artificial Sequence
  Description of Artificial Sequence: Synthetic oligonucleotide
  Sense strand starting at position 2806 of SEQ ID NO: 1885688
aauggaauuugguacuaca

SEQ ID NO: 2360835 - RNA, 19 nt, Artificial Sequence
  Description of Artificial Sequence: Synthetic oligonucleotide
  Antisense strand to SEQ ID NO: 2360834
uguaguaccaaauuccauu

SEQ ID NO: 2360836 - RNA, 19 nt, Artificial Sequence
  Description of Artificial Sequence: Synthetic oligonucleotide
  Sense strand starting at position 3294 of SEQ ID NO: 1885688
cagucuguggcugauauaa

SEQ ID NO: 2360837 - RNA, 19 nt, Artificial Sequence
  Description of Artificial Sequence: Synthetic oligonucleotide
  Antisense strand to SEQ ID NO: 2360836
uuauaucagccacagacug

SEQ ID NO: 2360838 - RNA, 19 nt, Artificial Sequence
  Description of Artificial Sequence: Synthetic oligonucleotide
  Sense strand starting at position 3343 of SEQ ID NO: 1885688
ggucuuggucuugauguca

SEQ ID NO: 2360839 - RNA, 19 nt, Artificial Sequence
  Description of Artificial Sequence: Synthetic oligonucleotide
  Antisense strand to SEQ ID NO: 2360838
ugacaucaagaccaagacc

SEQ ID NO: 2360840 - RNA, 19 nt, Artificial Sequence
  Description of Artificial Sequence: Synthetic oligonucleotide
  Sense strand starting at position 3446 of SEQ ID NO: 1885688
uggguuuggucccucagaa

SEQ ID NO: 2360841 - RNA, 19 nt, Artificial Sequence
  Description of Artificial Sequence: Synthetic oligonucleotide
  Antisense strand to SEQ ID NO: 2360840
uucugagggaccaaaccca

SEQ ID NO: 2360842 - RNA, 19 nt, Artificial Sequence
  Description of Artificial Sequence: Synthetic oligonucleotide
  Sense strand starting at position 3584 of SEQ ID NO: 1885688
gguacuuccuguuucuaga

SEQ ID NO: 2360843 - RNA, 19 nt, Artificial Sequence
  Description of Artificial Sequence: Synthetic oligonucleotide
  Antisense strand to SEQ ID NO: 2360842
ucuagaaacaggaaguacc

SEQ ID NO: 2360844 - RNA, 19 nt, Artificial Sequence
  Description of Artificial Sequence: Synthetic oligonucleotide
  Sense strand starting at position 3597 of SEQ ID NO: 1885688
ucuagagucuuacuaggua

SEQ ID NO: 2360845 - RNA, 19 nt, Artificial Sequence
  Description of Artificial Sequence: Synthetic oligonucleotide
  Antisense strand to SEQ ID NO: 2360844
uaccuaguaagacucuaga

SEQ ID NO: 2360846 - RNA, 19 nt, Artificial Sequence
  Description of Artificial Sequence: Synthetic oligonucleotide
  Sense strand starting at position 3600 of SEQ ID NO: 1885688
agagucuuacuagguaaag

SEQ ID NO: 2360847 - RNA, 19 nt, Artificial Sequence
  Description of Artificial Sequence: Synthetic oligonucleotide
  Antisense strand to SEQ ID NO: 2360846
cuuuaccuaguaagacucu

SEQ ID NO: 2360848 - RNA, 19 nt, Artificial Sequence
  Description of Artificial Sequence: Synthetic oligonucleotide
  Sense strand starting at position 3601 of SEQ ID NO: 1885688
gagucuuacuagguaaagg

SEQ ID NO: 2360849 - RNA, 19 nt, Artificial Sequence
  Description of Artificial Sequence: Synthetic oligonucleotide
  Antisense strand to SEQ ID NO: 2360848
ccuuuaccuaguaagacuc

SEQ ID NO: 2360850 - RNA, 19 nt, Artificial Sequence
  Description of Artificial Sequence: Synthetic oligonucleotide
  Sense strand starting at position 3602 of SEQ ID NO: 1885688
agucuuacuagguaaaggu

SEQ ID NO: 2360851 - RNA, 19 nt, Artificial Sequence
  Description of Artificial Sequence: Synthetic oligonucleotide
  Antisense strand to SEQ ID NO: 2360850
accuuuaccuaguaagacu

SEQ ID NO: 2360852 - RNA, 19 nt, Artificial Sequence
  Description of Artificial Sequence: Synthetic oligonucleotide
  Sense strand starting at position 3674 of SEQ ID NO: 1885688
aaagcuguuguuuagauua

SEQ ID NO: 2360853 - RNA, 19 nt, Artificial Sequence
  Description of Artificial Sequence: Synthetic oligonucleotide
  Antisense strand to SEQ ID NO: 2360852
uaaucuaaacaacagcuuu

SEQ ID NO: 2360854 - RNA, 19 nt, Artificial Sequence
  Description of Artificial Sequence: Synthetic oligonucleotide
  Sense strand starting at position 3782 of SEQ ID NO: 1885688
cuaauauauccucgguuga

SEQ ID NO: 2360855 - RNA, 19 nt, Artificial Sequence
  Description of Artificial Sequence: Synthetic oligonucleotide
  Antisense strand to SEQ ID NO: 2360854
ucaaccgaggauauauuag

SEQ ID NO: 2360856 - RNA, 19 nt, Artificial Sequence
  Description of Artificial Sequence: Synthetic oligonucleotide
  Sense strand starting at position 3783 of SEQ ID NO: 1885688
uaauauauccucgguugau

SEQ ID NO: 2360857 - RNA, 19 nt, Artificial Sequence
  Description of Artificial Sequence: Synthetic oligonucleotide
  Antisense strand to SEQ ID NO: 2360856
aucaaccgaggauauauua

SEQ ID NO: 2360858 - RNA, 19 nt, Artificial Sequence
  Description of Artificial Sequence: Synthetic oligonucleotide
  Sense strand starting at position 3784 of SEQ ID NO: 1885688
aauauauccucgguugauc

SEQ ID NO: 2360859 - RNA, 19 nt, Artificial Sequence
  Description of Artificial Sequence: Synthetic oligonucleotide
  Antisense strand to SEQ ID NO: 2360858
gaucaaccgaggauauauu

SEQ ID NO: 2360860 - RNA, 19 nt, Artificial Sequence
  Description of Artificial Sequence: Synthetic oligonucleotide
  Sense strand starting at position 3789 of SEQ ID NO: 1885688
auccucgguugaucuuaaa

SEQ ID NO: 2360861 - RNA, 19 nt, Artificial Sequence
  Description of Artificial Sequence: Synthetic oligonucleotide
  Antisense strand to SEQ ID NO: 2360860
uuuaagaucaaccgaggau

SEQ ID NO: 2360862 - RNA, 19 nt, Artificial Sequence
  Description of Artificial Sequence: Synthetic oligonucleotide
  Sense strand starting at position 3846 of SEQ ID NO: 1885688
gcauuacucaggcagagag

SEQ ID NO: 2360863 - RNA, 19 nt, Artificial Sequence
  Description of Artificial Sequence: Synthetic oligonucleotide
  Antisense strand to SEQ ID NO: 2360862
cucucugccugaguaaugc

SEQ ID NO: 2360864 - RNA, 19 nt, Artificial Sequence
  Description of Artificial Sequence: Synthetic oligonucleotide
  Sense strand starting at position 3882 of SEQ ID NO: 1885688
gggagucgguuccucauuu

SEQ ID NO: 2360865 - RNA, 19 nt, Artificial Sequence
  Description of Artificial Sequence: Synthetic oligonucleotide
  Antisense strand to SEQ ID NO: 2360864
aaaugaggaaccgacuccc

SEQ ID NO: 2360866 - RNA, 19 nt, Artificial Sequence
  Description of Artificial Sequence: Synthetic oligonucleotide
  Sense strand starting at position 3954 of SEQ ID NO: 1885688
ugccuaagcccauggauuu

SEQ ID NO: 2360867 - RNA, 19 nt, Artificial Sequence
  Description of Artificial Sequence: Synthetic oligonucleotide
  Antisense strand to SEQ ID NO: 2360866
aaauccaugggcuuaggca

SEQ ID NO: 2360868 - RNA, 19 nt, Artificial Sequence
  Description of Artificial Sequence: Synthetic oligonucleotide
  Sense strand starting at position 3966 of SEQ ID NO: 1885688
uggauuuguucuguuuccu

SEQ ID NO: 2360869 - RNA, 19 nt, Artificial Sequence
  Description of Artificial Sequence: Synthetic oligonucleotide
  Antisense strand to SEQ ID NO: 2360868
aggaaacagaacaaaucca

SEQ ID NO: 2360870 - RNA, 19 nt, Artificial Sequence
  Description of Artificial Sequence: Synthetic oligonucleotide
  Sense strand starting at position 3978 of SEQ ID NO: 1885688
guuuccuugggcuauagga

SEQ ID NO: 2360871 - RNA, 19 nt, Artificial Sequence
  Description of Artificial Sequence: Synthetic oligonucleotide
  Antisense strand to SEQ ID NO: 2360870
uccuauagcccaaggaaac

SEQ ID NO: 2360872 - RNA, 19 nt, Artificial Sequence
  Description of Artificial Sequence: Synthetic oligonucleotide
  Sense strand starting at position 3980 of SEQ ID NO: 1885688
uuccuugggcuauaggaau

SEQ ID NO: 2360873 - RNA, 19 nt, Artificial Sequence
  Description of Artificial Sequence: Synthetic oligonucleotide
  Antisense strand to SEQ ID NO: 2360872
auuccuauagcccaaggaa

SEQ ID NO: 2360874 - RNA, 19 nt, Artificial Sequence
  Description of Artificial Sequence: Synthetic oligonucleotide
  Sense strand starting at position 63 of SEQ ID NO: 1885689
acucuuaccuuguugaagu

SEQ ID NO: 2360875 - RNA, 19 nt, Artificial Sequence
  Description of Artificial Sequence: Synthetic oligonucleotide
  Antisense strand to SEQ ID NO: 2360874
acuucaacaagguaagagu

SEQ ID NO: 2360876 - RNA, 19 nt, Artificial Sequence
  Description of Artificial Sequence: Synthetic oligonucleotide
  Sense strand starting at position 137 of SEQ ID NO: 1885689
gggauucuaaucuguggaa

SEQ ID NO: 2360877 - RNA, 19 nt, Artificial Sequence
  Description of Artificial Sequence: Synthetic oligonucleotide
  Antisense strand to SEQ ID NO: 2360876
uuccacagauuagaauccc

SEQ ID NO: 2360878 - RNA, 19 nt, Artificial Sequence
  Description of Artificial Sequence: Synthetic oligonucleotide
  Sense strand starting at position 138 of SEQ ID NO: 1885689
ggauucuaaucuguggaac

SEQ ID NO: 2360879 - RNA, 19 nt, Artificial Sequence
  Description of Artificial Sequence: Synthetic oligonucleotide
  Antisense strand to SEQ ID NO: 2360878
guuccacagauuagaaucc

SEQ ID NO: 2360880 - RNA, 19 nt, Artificial Sequence
  Description of Artificial Sequence: Synthetic oligonucleotide
  Sense strand starting at position 506 of SEQ ID NO: 1885689
cccaguuaugagugaacug

SEQ ID NO: 2360881 - RNA, 19 nt, Artificial Sequence
  Description of Artificial Sequence: Synthetic oligonucleotide
  Antisense strand to SEQ ID NO: 2360880
caguucacucauaacuggg

SEQ ID NO: 2360882 - RNA, 19 nt, Artificial Sequence
  Description of Artificial Sequence: Synthetic oligonucleotide
  Sense strand starting at position 614 of SEQ ID NO: 1885689
uugucuaagaucuguuggu

SEQ ID NO: 2360883 - RNA, 19 nt, Artificial Sequence
  Description of Artificial Sequence: Synthetic oligonucleotide
  Antisense strand to SEQ ID NO: 2360882
accaacagaucuuagacaa

SEQ ID NO: 2360884 - RNA, 19 nt, Artificial Sequence
  Description of Artificial Sequence: Synthetic oligonucleotide
  Sense strand starting at position 615 of SEQ ID NO: 1885689
ugucuaagaucuguuggua

SEQ ID NO: 2360885 - RNA, 19 nt, Artificial Sequence
  Description of Artificial Sequence: Synthetic oligonucleotide
  Antisense strand to SEQ ID NO: 2360884
uaccaacagaucuuagaca

SEQ ID NO: 2360886 - RNA, 19 nt, Artificial Sequence
  Description of Artificial Sequence: Synthetic oligonucleotide
  Sense strand starting at position 618 of SEQ ID NO: 1885689
cuaagaucuguugguaguu

SEQ ID NO: 2360887 - RNA, 19 nt, Artificial Sequence
  Description of Artificial Sequence: Synthetic oligonucleotide
  Antisense strand to SEQ ID NO: 2360886
aacuaccaacagaucuuag

SEQ ID NO: 2360888 - RNA, 19 nt, Artificial Sequence
  Description of Artificial Sequence: Synthetic oligonucleotide
  Sense strand starting at position 619 of SEQ ID NO: 1885689
uaagaucuguugguaguuu

SEQ ID NO: 2360889 - RNA, 19 nt, Artificial Sequence
  Description of Artificial Sequence: Synthetic oligonucleotide
  Antisense strand to SEQ ID NO: 2360888
aaacuaccaacagaucuua

SEQ ID NO: 2360890 - RNA, 19 nt, Artificial Sequence
  Description of Artificial Sequence: Synthetic oligonucleotide
  Sense strand starting at position 769 of SEQ ID NO: 1885689
cagugaggucaguggcaaa

SEQ ID NO: 2360891 - RNA, 19 nt, Artificial Sequence
  Description of Artificial Sequence: Synthetic oligonucleotide
  Antisense strand to SEQ ID NO: 2360890
uuugccacugaccucacug

SEQ ID NO: 2360892 - RNA, 19 nt, Artificial Sequence
  Description of Artificial Sequence: Synthetic oligonucleotide
  Sense strand starting at position 789 of SEQ ID NO: 1885689
gaguaaugcaaagguguaa

SEQ ID NO: 2360893 - RNA, 19 nt, Artificial Sequence
  Description of Artificial Sequence: Synthetic oligonucleotide
  Antisense strand to SEQ ID NO: 2360892
uuacaccuuugcauuacuc

SEQ ID NO: 2360894 - RNA, 19 nt, Artificial Sequence
  Description of Artificial Sequence: Synthetic oligonucleotide
  Sense strand starting at position 801 of SEQ ID NO: 1885689
gguguaauguggcuacaac

SEQ ID NO: 2360895 - RNA, 19 nt, Artificial Sequence
  Description of Artificial Sequence: Synthetic oligonucleotide
  Antisense strand to SEQ ID NO: 2360894
guuguagccacauuacacc

SEQ ID NO: 2360896 - RNA, 19 nt, Artificial Sequence
  Description of Artificial Sequence: Synthetic oligonucleotide
  Sense strand starting at position 1024 of SEQ ID NO: 1885689
ggcauugaagguuauuaug

SEQ ID NO: 2360897 - RNA, 19 nt, Artificial Sequence
  Description of Artificial Sequence: Synthetic oligonucleotide
  Antisense strand to SEQ ID NO: 2360896
cauaauaaccuucaaugcc

SEQ ID NO: 2360898 - RNA, 19 nt, Artificial Sequence
  Description of Artificial Sequence: Synthetic oligonucleotide
  Sense strand starting at position 1026 of SEQ ID NO: 1885689
cauugaagguuauuaugau

SEQ ID NO: 2360899 - RNA, 19 nt, Artificial Sequence
  Description of Artificial Sequence: Synthetic oligonucleotide
  Antisense strand to SEQ ID NO: 2360898
aucauaauaaccuucaaug

SEQ ID NO: 2360900 - RNA, 19 nt, Artificial Sequence
  Description of Artificial Sequence: Synthetic oligonucleotide
  Sense strand starting at position 1069 of SEQ ID NO: 1885689
uuugguuuacucgaucguu

SEQ ID NO: 2360901 - RNA, 19 nt, Artificial Sequence
  Description of Artificial Sequence: Synthetic oligonucleotide
  Antisense strand to SEQ ID NO: 2360900
aacgaucgaguaaaccaaa

SEQ ID NO: 2360902 - RNA, 19 nt, Artificial Sequence
  Description of Artificial Sequence: Synthetic oligonucleotide
  Sense strand starting at position 1157 of SEQ ID NO: 1885689
ggcagaaugcugggacuua

SEQ ID NO: 2360903 - RNA, 19 nt, Artificial Sequence
  Description of Artificial Sequence: Synthetic oligonucleotide
  Antisense strand to SEQ ID NO: 2360902
uaagucccagcauucugcc

SEQ ID NO: 2360904 - RNA, 19 nt, Artificial Sequence
  Description of Artificial Sequence: Synthetic oligonucleotide
  Sense strand starting at position 1264 of SEQ ID NO: 1885689
aacgauuccugccuuggau

SEQ ID NO: 2360905 - RNA, 19 nt, Artificial Sequence
  Description of Artificial Sequence: Synthetic oligonucleotide
  Antisense strand to SEQ ID NO: 2360904
auccaaggcaggaaucguu

SEQ ID NO: 2360906 - RNA, 19 nt, Artificial Sequence
  Description of Artificial Sequence: Synthetic oligonucleotide
  Sense strand starting at position 1266 of SEQ ID NO: 1885689
cgauuccugccuuggauga

SEQ ID NO: 2360907 - RNA, 19 nt, Artificial Sequence
  Description of Artificial Sequence: Synthetic oligonucleotide
  Antisense strand to SEQ ID NO: 2360906
ucauccaaggcaggaaucg

SEQ ID NO: 2360908 - RNA, 19 nt, Artificial Sequence
  Description of Artificial Sequence: Synthetic oligonucleotide
  Sense strand starting at position 1273 of SEQ ID NO: 1885689
ugccuuggaugagacauua

SEQ ID NO: 2360909 - RNA, 19 nt, Artificial Sequence
  Description of Artificial Sequence: Synthetic oligonucleotide
  Antisense strand to SEQ ID NO: 2360908
uaaugucucauccaaggca

SEQ ID NO: 2360910 - RNA, 19 nt, Artificial Sequence
  Description of Artificial Sequence: Synthetic oligonucleotide
  Sense strand starting at position 1304 of SEQ ID NO: 1885689
acaaucgacuugucaacaa

SEQ ID NO: 2360911 - RNA, 19 nt, Artificial Sequence
  Description of Artificial Sequence: Synthetic oligonucleotide
  Antisense strand to SEQ ID NO: 2360910
uuguugacaagucgauugu

SEQ ID NO: 2360912 - RNA, 19 nt, Artificial Sequence
  Description of Artificial Sequence: Synthetic oligonucleotide
  Sense strand starting at position 1325 of SEQ ID NO: 1885689
gccacuacuuaguuaaguu

SEQ ID NO: 2360913 - RNA, 19 nt, Artificial Sequence
  Description of Artificial Sequence: Synthetic oligonucleotide
  Antisense strand to SEQ ID NO: 2360912
aacuuaacuaaguaguggc

SEQ ID NO: 2360914 - RNA, 19 nt, Artificial Sequence
  Description of Artificial Sequence: Synthetic oligonucleotide
  Sense strand starting at position 1355 of SEQ ID NO: 1885689
caauucuguuuaucguuga

SEQ ID NO: 2360915 - RNA, 19 nt, Artificial Sequence
  Description of Artificial Sequence: Synthetic oligonucleotide
  Antisense strand to SEQ ID NO: 2360914
ucaacgauaaacagaauug

SEQ ID NO: 2360916 - RNA, 19 nt, Artificial Sequence
  Description of Artificial Sequence: Synthetic oligonucleotide
  Sense strand starting at position 1358 of SEQ ID NO: 1885689
uucuguuuaucguugaucu

SEQ ID NO: 2360917 - RNA, 19 nt, Artificial Sequence
  Description of Artificial Sequence: Synthetic oligonucleotide
  Antisense strand to SEQ ID NO: 2360916
agaucaacgauaaacagaa

SEQ ID NO: 2360918 - RNA, 19 nt, Artificial Sequence
  Description of Artificial Sequence: Synthetic oligonucleotide
  Sense strand starting at position 1359 of SEQ ID NO: 1885689
ucuguuuaucguugaucua

SEQ ID NO: 2360919 - RNA, 19 nt, Artificial Sequence
  Description of Artificial Sequence: Synthetic oligonucleotide
  Antisense strand to SEQ ID NO: 2360918
uagaucaacgauaaacaga

SEQ ID NO: 2360920 - RNA, 19 nt, Artificial Sequence
  Description of Artificial Sequence: Synthetic oligonucleotide
  Sense strand starting at position 1360 of SEQ ID NO: 1885689
cuguuuaucguugaucuau

SEQ ID NO: 2360921 - RNA, 19 nt, Artificial Sequence
  Description of Artificial Sequence: Synthetic oligonucleotide
  Antisense strand to SEQ ID NO: 2360920
auagaucaacgauaaacag

SEQ ID NO: 2360922 - RNA, 19 nt, Artificial Sequence
  Description of Artificial Sequence: Synthetic oligonucleotide
  Sense strand starting at position 1362 of SEQ ID NO: 1885689
guuuaucguugaucuauga

SEQ ID NO: 2360923 - RNA, 19 nt, Artificial Sequence
  Description of Artificial Sequence: Synthetic oligonucleotide
  Antisense strand to SEQ ID NO: 2360922
ucauagaucaacgauaaac

SEQ ID NO: 2360924 - RNA, 19 nt, Artificial Sequence
  Description of Artificial Sequence: Synthetic oligonucleotide
  Sense strand starting at position 1369 of SEQ ID NO: 1885689
guugaucuaugacugcaaa

SEQ ID NO: 2360925 - RNA, 19 nt, Artificial Sequence
  Description of Artificial Sequence: Synthetic oligonucleotide
  Antisense strand to SEQ ID NO: 2360924
uuugcagucauagaucaac

SEQ ID NO: 2360926 - RNA, 19 nt, Artificial Sequence
  Description of Artificial Sequence: Synthetic oligonucleotide
  Sense strand starting at position 1370 of SEQ ID NO: 1885689
uugaucuaugacugcaaau

SEQ ID NO: 2360927 - RNA, 19 nt, Artificial Sequence
  Description of Artificial Sequence: Synthetic oligonucleotide
  Antisense strand to SEQ ID NO: 2360926
auuugcagucauagaucaa

SEQ ID NO: 2360928 - RNA, 19 nt, Artificial Sequence
  Description of Artificial Sequence: Synthetic oligonucleotide
  Sense strand starting at position 1564 of SEQ ID NO: 1885689
ucugcacucagacguguua

SEQ ID NO: 2360929 - RNA, 19 nt, Artificial Sequence
  Description of Artificial Sequence: Synthetic oligonucleotide
  Antisense strand to SEQ ID NO: 2360928
uaacacgucugagugcaga

SEQ ID NO: 2360930 - RNA, 19 nt, Artificial Sequence
  Description of Artificial Sequence: Synthetic oligonucleotide
  Sense strand starting at position 1566 of SEQ ID NO: 1885689
ugcacucagacguguuaaa

SEQ ID NO: 2360931 - RNA, 19 nt, Artificial Sequence
  Description of Artificial Sequence: Synthetic oligonucleotide
  Antisense strand to SEQ ID NO: 2360930
uuuaacacgucugagugca

SEQ ID NO: 2360932 - RNA, 19 nt, Artificial Sequence
  Description of Artificial Sequence: Synthetic oligonucleotide
  Sense strand starting at position 2672 of SEQ ID NO: 1885689
ggccucguuuaguucuuaa

SEQ ID NO: 2360933 - RNA, 19 nt, Artificial Sequence
  Description of Artificial Sequence: Synthetic oligonucleotide
  Antisense strand to SEQ ID NO: 2360932
uuaagaacuaaacgaggcc

SEQ ID NO: 2360934 - RNA, 19 nt, Artificial Sequence
  Description of Artificial Sequence: Synthetic oligonucleotide
  Sense strand starting at position 2688 of SEQ ID NO: 1885689
uaaagcguccugugagaaa

SEQ ID NO: 2360935 - RNA, 19 nt, Artificial Sequence
  Description of Artificial Sequence: Synthetic oligonucleotide
  Antisense strand to SEQ ID NO: 2360934
uuucucacaggacgcuuua

SEQ ID NO: 2360936 - RNA, 19 nt, Artificial Sequence
  Description of Artificial Sequence: Synthetic oligonucleotide
  Sense strand starting at position 2699 of SEQ ID NO: 1885689
gugagaaagucaccauuau

SEQ ID NO: 2360937 - RNA, 19 nt, Artificial Sequence
  Description of Artificial Sequence: Synthetic oligonucleotide
  Antisense strand to SEQ ID NO: 2360936
auaauggugacuuucucac

SEQ ID NO: 2360938 - RNA, 19 nt, Artificial Sequence
  Description of Artificial Sequence: Synthetic oligonucleotide
  Sense strand starting at position 2782 of SEQ ID NO: 1885689
gucuaaaccugucccaaua

SEQ ID NO: 2360939 - RNA, 19 nt, Artificial Sequence
  Description of Artificial Sequence: Synthetic oligonucleotide
  Antisense strand to SEQ ID NO: 2360938
uauugggacagguuuagac

SEQ ID NO: 2360940 - RNA, 19 nt, Artificial Sequence
  Description of Artificial Sequence: Synthetic oligonucleotide
  Sense strand starting at position 2795 of SEQ ID NO: 1885689
ccaauagcucucggaagga

SEQ ID NO: 2360941 - RNA, 19 nt, Artificial Sequence
  Description of Artificial Sequence: Synthetic oligonucleotide
  Antisense strand to SEQ ID NO: 2360940
uccuuccgagagcuauugg

SEQ ID NO: 2360942 - RNA, 19 nt, Artificial Sequence
  Description of Artificial Sequence: Synthetic oligonucleotide
  Sense strand starting at position 2845 of SEQ ID NO: 1885689
cugcgagucuccucacuaa

SEQ ID NO: 2360943 - RNA, 19 nt, Artificial Sequence
  Description of Artificial Sequence: Synthetic oligonucleotide
  Antisense strand to SEQ ID NO: 2360942
uuagugaggagacucgcag

SEQ ID NO: 2360944 - RNA, 19 nt, Artificial Sequence
  Description of Artificial Sequence: Synthetic oligonucleotide
  Sense strand starting at position 2943 of SEQ ID NO: 1885689
gggucaccuuccucucgaa

SEQ ID NO: 2360945 - RNA, 19 nt, Artificial Sequence
  Description of Artificial Sequence: Synthetic oligonucleotide
  Antisense strand to SEQ ID NO: 2360944
uucgagaggaaggugaccc

SEQ ID NO: 2360946 - RNA, 19 nt, Artificial Sequence
  Description of Artificial Sequence: Synthetic oligonucleotide
  Sense strand starting at position 3256 of SEQ ID NO: 1885689
agcaaucugcccggccaaa

SEQ ID NO: 2360947 - RNA, 19 nt, Artificial Sequence
  Description of Artificial Sequence: Synthetic oligonucleotide
  Antisense strand to SEQ ID NO: 2360946
uuuggccgggcagauugcu

SEQ ID NO: 2360948 - RNA, 19 nt, Artificial Sequence
  Description of Artificial Sequence: Synthetic oligonucleotide
  Sense strand starting at position 3625 of SEQ ID NO: 1885689
cccacaccuucggugaauu

SEQ ID NO: 2360949 - RNA, 19 nt, Artificial Sequence
  Description of Artificial Sequence: Synthetic oligonucleotide
  Antisense strand to SEQ ID NO: 2360948
aauucaccgaagguguggg

SEQ ID NO: 2360950 - RNA, 19 nt, Artificial Sequence
  Description of Artificial Sequence: Synthetic oligonucleotide
  Sense strand starting at position 3626 of SEQ ID NO: 1885689
ccacaccuucggugaauua

SEQ ID NO: 2360951 - RNA, 19 nt, Artificial Sequence
  Description of Artificial Sequence: Synthetic oligonucleotide
  Antisense strand to SEQ ID NO: 2360950
uaauucaccgaaggugugg

SEQ ID NO: 2360952 - RNA, 19 nt, Artificial Sequence
  Description of Artificial Sequence: Synthetic oligonucleotide
  Sense strand starting at position 3627 of SEQ ID NO: 1885689
cacaccuucggugaauuau

SEQ ID NO: 2360953 - RNA, 19 nt, Artificial Sequence
  Description of Artificial Sequence: Synthetic oligonucleotide
  Antisense strand to SEQ ID NO: 2360952
auaauucaccgaaggugug

SEQ ID NO: 2360954 - RNA, 19 nt, Artificial Sequence
  Description of Artificial Sequence: Synthetic oligonucleotide
  Sense strand starting at position 132 of SEQ ID NO: 1885690
ugagcuguuguggaaauua

SEQ ID NO: 2360955 - RNA, 19 nt, Artificial Sequence
  Description of Artificial Sequence: Synthetic oligonucleotide
  Antisense strand to SEQ ID NO: 2360954
uaauuuccacaacagcuca

SEQ ID NO: 2360956 - RNA, 19 nt, Artificial Sequence
  Description of Artificial Sequence: Synthetic oligonucleotide
  Sense strand starting at position 175 of SEQ ID NO: 1885690
ggaagaguacuuggcacau

SEQ ID NO: 2360957 - RNA, 19 nt, Artificial Sequence
  Description of Artificial Sequence: Synthetic oligonucleotide
  Antisense strand to SEQ ID NO: 2360956
augugccaaguacucuucc

SEQ ID NO: 2360958 - RNA, 19 nt, Artificial Sequence
  Description of Artificial Sequence: Synthetic oligonucleotide
  Sense strand starting at position 179 of SEQ ID NO: 1885690
gaguacuuggcacauaaua

SEQ ID NO: 2360959 - RNA, 19 nt, Artificial Sequence
  Description of Artificial Sequence: Synthetic oligonucleotide
  Antisense strand to SEQ ID NO: 2360958
uauuaugugccaaguacuc

SEQ ID NO: 2360960 - RNA, 19 nt, Artificial Sequence
  Description of Artificial Sequence: Synthetic oligonucleotide
  Sense strand starting at position 267 of SEQ ID NO: 1885690
gcgccauuuccuggacaua

SEQ ID NO: 2360961 - RNA, 19 nt, Artificial Sequence
  Description of Artificial Sequence: Synthetic oligonucleotide
  Antisense strand to SEQ ID NO: 2360960
uauguccaggaaauggcgc

SEQ ID NO: 2360962 - RNA, 19 nt, Artificial Sequence
  Description of Artificial Sequence: Synthetic oligonucleotide
  Sense strand starting at position 336 of SEQ ID NO: 1885690
ugucucugagagcaauauu

SEQ ID NO: 2360963 - RNA, 19 nt, Artificial Sequence
  Description of Artificial Sequence: Synthetic oligonucleotide
  Antisense strand to SEQ ID NO: 2360962
aauauugcucucagagaca

SEQ ID NO: 2360964 - RNA, 19 nt, Artificial Sequence
  Description of Artificial Sequence: Synthetic oligonucleotide
  Sense strand starting at position 339 of SEQ ID NO: 1885690
cucugagagcaauauucuu

SEQ ID NO: 2360965 - RNA, 19 nt, Artificial Sequence
  Description of Artificial Sequence: Synthetic oligonucleotide
  Antisense strand to SEQ ID NO: 2360964
aagaauauugcucucagag

SEQ ID NO: 2360966 - RNA, 19 nt, Artificial Sequence
  Description of Artificial Sequence: Synthetic oligonucleotide
  Sense strand starting at position 376 of SEQ ID NO: 1885690
ccagguuuaugccuaauuu

SEQ ID NO: 2360967 - RNA, 19 nt, Artificial Sequence
  Description of Artificial Sequence: Synthetic oligonucleotide
  Antisense strand to SEQ ID NO: 2360966
aaauuaggcauaaaccugg

SEQ ID NO: 2360968 - RNA, 19 nt, Artificial Sequence
  Description of Artificial Sequence: Synthetic oligonucleotide
  Sense strand starting at position 433 of SEQ ID NO: 1885690
acauguuaugaagguaaau

SEQ ID NO: 2360969 - RNA, 19 nt, Artificial Sequence
  Description of Artificial Sequence: Synthetic oligonucleotide
  Antisense strand to SEQ ID NO: 2360968
auuuaccuucauaacaugu

SEQ ID NO: 2360970 - RNA, 19 nt, Artificial Sequence
  Description of Artificial Sequence: Synthetic oligonucleotide
  Sense strand starting at position 836 of SEQ ID NO: 1885690
gcuggugagacccaguaau

SEQ ID NO: 2360971 - RNA, 19 nt, Artificial Sequence
  Description of Artificial Sequence: Synthetic oligonucleotide
  Antisense strand to SEQ ID NO: 2360970
auuacugggucucaccagc

SEQ ID NO: 2360972 - RNA, 19 nt, Artificial Sequence
  Description of Artificial Sequence: Synthetic oligonucleotide
  Sense strand starting at position 846 of SEQ ID NO: 1885690
cccaguaaucuguauucua

SEQ ID NO: 2360973 - RNA, 19 nt, Artificial Sequence
  Description of Artificial Sequence: Synthetic oligonucleotide
  Antisense strand to SEQ ID NO: 2360972
uagaauacagauuacuggg

SEQ ID NO: 2360974 - RNA, 19 nt, Artificial Sequence
  Description of Artificial Sequence: Synthetic oligonucleotide
  Sense strand starting at position 849 of SEQ ID NO: 1885690
aguaaucuguauucuaaca

SEQ ID NO: 2360975 - RNA, 19 nt, Artificial Sequence
  Description of Artificial Sequence: Synthetic oligonucleotide
  Antisense strand to SEQ ID NO: 2360974
uguuagaauacagauuacu

SEQ ID NO: 2360976 - RNA, 19 nt, Artificial Sequence
  Description of Artificial Sequence: Synthetic oligonucleotide
  Sense strand starting at position 875 of SEQ ID NO: 1885690
ugcaaaucucaggaccuuu

SEQ ID NO: 2360977 - RNA, 19 nt, Artificial Sequence
  Description of Artificial Sequence: Synthetic oligonucleotide
  Antisense strand to SEQ ID NO: 2360976
aaagguccugagauuugca

SEQ ID NO: 2360978 - RNA, 19 nt, Artificial Sequence
  Description of Artificial Sequence: Synthetic oligonucleotide
  Sense strand starting at position 886 of SEQ ID NO: 1885690
ggaccuuuggugugaacca

SEQ ID NO: 2360979 - RNA, 19 nt, Artificial Sequence
  Description of Artificial Sequence: Synthetic oligonucleotide
  Antisense strand to SEQ ID NO: 2360978
ugguucacaccaaaggucc

SEQ ID NO: 2360980 - RNA, 19 nt, Artificial Sequence
  Description of Artificial Sequence: Synthetic oligonucleotide
  Sense strand starting at position 1019 of SEQ ID NO: 1885690
gagaccaguucuguauauc

SEQ ID NO: 2360981 - RNA, 19 nt, Artificial Sequence
  Description of Artificial Sequence: Synthetic oligonucleotide
  Antisense strand to SEQ ID NO: 2360980
gauauacagaacuggucuc

SEQ ID NO: 2360982 - RNA, 19 nt, Artificial Sequence
  Description of Artificial Sequence: Synthetic oligonucleotide
  Sense strand starting at position 1020 of SEQ ID NO: 1885690
agaccaguucuguauauca

SEQ ID NO: 2360983 - RNA, 19 nt, Artificial Sequence
  Description of Artificial Sequence: Synthetic oligonucleotide
  Antisense strand to SEQ ID NO: 2360982
ugauauacagaacuggucu

SEQ ID NO: 2360984 - RNA, 19 nt, Artificial Sequence
  Description of Artificial Sequence: Synthetic oligonucleotide
  Sense strand starting at position 1022 of SEQ ID NO: 1885690
accaguucuguauaucaaa

SEQ ID NO: 2360985 - RNA, 19 nt, Artificial Sequence
  Description of Artificial Sequence: Synthetic oligonucleotide
  Antisense strand to SEQ ID NO: 2360984
uuugauauacagaacuggu

SEQ ID NO: 2360986 - RNA, 19 nt, Artificial Sequence
  Description of Artificial Sequence: Synthetic oligonucleotide
  Sense strand starting at position 1194 of SEQ ID NO: 1885690
cuaacuguccuggaagcuu

SEQ ID NO: 2360987 - RNA, 19 nt, Artificial Sequence
  Description of Artificial Sequence: Synthetic oligonucleotide
  Antisense strand to SEQ ID NO: 2360986
aagcuuccaggacaguuag

SEQ ID NO: 2360988 - RNA, 19 nt, Artificial Sequence
  Description of Artificial Sequence: Synthetic oligonucleotide
  Sense strand starting at position 1210 of SEQ ID NO: 1885690
cuucucagaggccaaauau

SEQ ID NO: 2360989 - RNA, 19 nt, Artificial Sequence
  Description of Artificial Sequence: Synthetic oligonucleotide
  Antisense strand to SEQ ID NO: 2360988
auauuuggccucugagaag

SEQ ID NO: 2360990 - RNA, 19 nt, Artificial Sequence
  Description of Artificial Sequence: Synthetic oligonucleotide
  Sense strand starting at position 1454 of SEQ ID NO: 1885690
ggcuuagcgagugcacauu

SEQ ID NO: 2360991 - RNA, 19 nt, Artificial Sequence
  Description of Artificial Sequence: Synthetic oligonucleotide
  Antisense strand to SEQ ID NO: 2360990
aaugugcacucgcuaagcc

SEQ ID NO: 2360992 - RNA, 19 nt, Artificial Sequence
  Description of Artificial Sequence: Synthetic oligonucleotide
  Sense strand starting at position 1606 of SEQ ID NO: 1885690
uggugaacuucuuuaggag

SEQ ID NO: 2360993 - RNA, 19 nt, Artificial Sequence
  Description of Artificial Sequence: Synthetic oligonucleotide
  Antisense strand to SEQ ID NO: 2360992
cuccuaaagaaguucacca

SEQ ID NO: 2360994 - RNA, 19 nt, Artificial Sequence
  Description of Artificial Sequence: Synthetic oligonucleotide
  Sense strand starting at position 1790 of SEQ ID NO: 1885690
cuguuaaggagugaccuuu

SEQ ID NO: 2360995 - RNA, 19 nt, Artificial Sequence
  Description of Artificial Sequence: Synthetic oligonucleotide
  Antisense strand to SEQ ID NO: 2360994
aaaggucacuccuuaacag

SEQ ID NO: 2360996 - RNA, 19 nt, Artificial Sequence
  Description of Artificial Sequence: Synthetic oligonucleotide
  Sense strand starting at position 2086 of SEQ ID NO: 1885690
guauccucccuccaaaugu

SEQ ID NO: 2360997 - RNA, 19 nt, Artificial Sequence
  Description of Artificial Sequence: Synthetic oligonucleotide
  Antisense strand to SEQ ID NO: 2360996
acauuuggagggaggauac

SEQ ID NO: 2360998 - RNA, 19 nt, Artificial Sequence
  Description of Artificial Sequence: Synthetic oligonucleotide
  Sense strand starting at position 2142 of SEQ ID NO: 1885690
ggccuugagcuuuaagacu

SEQ ID NO: 2360999 - RNA, 19 nt, Artificial Sequence
  Description of Artificial Sequence: Synthetic oligonucleotide
  Antisense strand to SEQ ID NO: 2360998
agucuuaaagcucaaggcc

SEQ ID NO: 2361000 - RNA, 19 nt, Artificial Sequence
  Description of Artificial Sequence: Synthetic oligonucleotide
  Sense strand starting at position 2162 of SEQ ID NO: 1885690
agcucuggccuuuaagaau

SEQ ID NO: 2361001 - RNA, 19 nt, Artificial Sequence
  Description of Artificial Sequence: Synthetic oligonucleotide
  Antisense strand to SEQ ID NO: 2361000
auucuuaaaggccagagcu

SEQ ID NO: 2361002 - RNA, 19 nt, Artificial Sequence
  Description of Artificial Sequence: Synthetic oligonucleotide
  Sense strand starting at position 2183 of SEQ ID NO: 1885690
uauguucccguugaagaga

SEQ ID NO: 2361003 - RNA, 19 nt, Artificial Sequence
  Description of Artificial Sequence: Synthetic oligonucleotide
  Antisense strand to SEQ ID NO: 2361002
ucucuucaacgggaacaua

SEQ ID NO: 2361004 - RNA, 19 nt, Artificial Sequence
  Description of Artificial Sequence: Synthetic oligonucleotide
  Sense strand starting at position 2197 of SEQ ID NO: 1885690
agagacaggauguguguaa

SEQ ID NO: 2361005 - RNA, 19 nt, Artificial Sequence
  Description of Artificial Sequence: Synthetic oligonucleotide
  Antisense strand to SEQ ID NO: 2361004
uuacacacauccugucucu

SEQ ID NO: 2361006 - RNA, 19 nt, Artificial Sequence
  Description of Artificial Sequence: Synthetic oligonucleotide
  Sense strand starting at position 2198 of SEQ ID NO: 1885690
gagacaggauguguguaaa

SEQ ID NO: 2361007 - RNA, 19 nt, Artificial Sequence
  Description of Artificial Sequence: Synthetic oligonucleotide
  Antisense strand to SEQ ID NO: 2361006
uuuacacacauccugucuc

SEQ ID NO: 2361008 - RNA, 19 nt, Artificial Sequence
  Description of Artificial Sequence: Synthetic oligonucleotide
  Sense strand starting at position 2201 of SEQ ID NO: 1885690
acaggauguguguaaagau

SEQ ID NO: 2361009 - RNA, 19 nt, Artificial Sequence
  Description of Artificial Sequence: Synthetic oligonucleotide
  Antisense strand to SEQ ID NO: 2361008
aucuuuacacacauccugu

SEQ ID NO: 2361010 - RNA, 19 nt, Artificial Sequence
  Description of Artificial Sequence: Synthetic oligonucleotide
  Sense strand starting at position 2375 of SEQ ID NO: 1885690
gucacacagccaugagaga

SEQ ID NO: 2361011 - RNA, 19 nt, Artificial Sequence
  Description of Artificial Sequence: Synthetic oligonucleotide
  Antisense strand to SEQ ID NO: 2361010
ucucucauggcugugugac

SEQ ID NO: 2361012 - RNA, 19 nt, Artificial Sequence
  Description of Artificial Sequence: Synthetic oligonucleotide
  Sense strand starting at position 2738 of SEQ ID NO: 1885690
ggaacacacguauauaugu

SEQ ID NO: 2361013 - RNA, 19 nt, Artificial Sequence
  Description of Artificial Sequence: Synthetic oligonucleotide
  Antisense strand to SEQ ID NO: 2361012
acauauauacguguguucc

SEQ ID NO: 2361014 - RNA, 19 nt, Artificial Sequence
  Description of Artificial Sequence: Synthetic oligonucleotide
  Sense strand starting at position 2965 of SEQ ID NO: 1885690
agaugagugucagcaaaua

SEQ ID NO: 2361015 - RNA, 19 nt, Artificial Sequence
  Description of Artificial Sequence: Synthetic oligonucleotide
  Antisense strand to SEQ ID NO: 2361014
uauuugcugacacucaucu

SEQ ID NO: 2361016 - RNA, 19 nt, Artificial Sequence
  Description of Artificial Sequence: Synthetic oligonucleotide
  Sense strand starting at position 3033 of SEQ ID NO: 1885690
gcagauuaaggaggguaga

SEQ ID NO: 2361017 - RNA, 19 nt, Artificial Sequence
  Description of Artificial Sequence: Synthetic oligonucleotide
  Antisense strand to SEQ ID NO: 2361016
ucuacccuccuuaaucugc

SEQ ID NO: 2361018 - RNA, 19 nt, Artificial Sequence
  Description of Artificial Sequence: Synthetic oligonucleotide
  Sense strand starting at position 3095 of SEQ ID NO: 1885690
agaagaccucucugguaag

SEQ ID NO: 2361019 - RNA, 19 nt, Artificial Sequence
  Description of Artificial Sequence: Synthetic oligonucleotide
  Antisense strand to SEQ ID NO: 2361018
cuuaccagagaggucuucu

SEQ ID NO: 2361020 - RNA, 19 nt, Artificial Sequence
  Description of Artificial Sequence: Synthetic oligonucleotide
  Sense strand starting at position 3153 of SEQ ID NO: 1885690
ucaucugagucugugaaga

SEQ ID NO: 2361021 - RNA, 19 nt, Artificial Sequence
  Description of Artificial Sequence: Synthetic oligonucleotide
  Antisense strand to SEQ ID NO: 2361020
ucuucacagacucagauga

SEQ ID NO: 2361022 - RNA, 19 nt, Artificial Sequence
  Description of Artificial Sequence: Synthetic oligonucleotide
  Sense strand starting at position 3219 of SEQ ID NO: 1885690
gugugcuuggugaguucua

SEQ ID NO: 2361023 - RNA, 19 nt, Artificial Sequence
  Description of Artificial Sequence: Synthetic oligonucleotide
  Antisense strand to SEQ ID NO: 2361022
uagaacucaccaagcacac

SEQ ID NO: 2361024 - RNA, 19 nt, Artificial Sequence
  Description of Artificial Sequence: Synthetic oligonucleotide
  Sense strand starting at position 3378 of SEQ ID NO: 1885690
gagggcuuugaguagagca

SEQ ID NO: 2361025 - RNA, 19 nt, Artificial Sequence
  Description of Artificial Sequence: Synthetic oligonucleotide
  Antisense strand to SEQ ID NO: 2361024
ugcucuacucaaagcccuc

SEQ ID NO: 2361026 - RNA, 19 nt, Artificial Sequence
  Description of Artificial Sequence: Synthetic oligonucleotide
  Sense strand starting at position 3422 of SEQ ID NO: 1885690
gaaggaucacucugagcau

SEQ ID NO: 2361027 - RNA, 19 nt, Artificial Sequence
  Description of Artificial Sequence: Synthetic oligonucleotide
  Antisense strand to SEQ ID NO: 2361026
augcucagagugauccuuc

SEQ ID NO: 2361028 - RNA, 19 nt, Artificial Sequence
  Description of Artificial Sequence: Synthetic oligonucleotide
  Sense strand starting at position 3425 of SEQ ID NO: 1885690
ggaucacucugagcaugga

SEQ ID NO: 2361029 - RNA, 19 nt, Artificial Sequence
  Description of Artificial Sequence: Synthetic oligonucleotide
  Antisense strand to SEQ ID NO: 2361028
uccaugcucagagugaucc

SEQ ID NO: 2361030 - RNA, 19 nt, Artificial Sequence
  Description of Artificial Sequence: Synthetic oligonucleotide
  Sense strand starting at position 3490 of SEQ ID NO: 1885690
ugcaauaauccgggaugag

SEQ ID NO: 2361031 - RNA, 19 nt, Artificial Sequence
  Description of Artificial Sequence: Synthetic oligonucleotide
  Antisense strand to SEQ ID NO: 2361030
cucaucccggauuauugca

SEQ ID NO: 2361032 - RNA, 19 nt, Artificial Sequence
  Description of Artificial Sequence: Synthetic oligonucleotide
  Sense strand starting at position 3686 of SEQ ID NO: 1885690
uuaaauuuauagcagggau

SEQ ID NO: 2361033 - RNA, 19 nt, Artificial Sequence
  Description of Artificial Sequence: Synthetic oligonucleotide
  Antisense strand to SEQ ID NO: 2361032
aucccugcuauaaauuuaa

SEQ ID NO: 2361034 - RNA, 19 nt, Artificial Sequence
  Description of Artificial Sequence: Synthetic oligonucleotide
  Sense strand starting at position 243 of SEQ ID NO: 1885691
acuagucagcuguaucaaa

SEQ ID NO: 2361035 - RNA, 19 nt, Artificial Sequence
  Description of Artificial Sequence: Synthetic oligonucleotide
  Antisense strand to SEQ ID NO: 2361034
uuugauacagcugacuagu

SEQ ID NO: 2361036 - RNA, 19 nt, Artificial Sequence
  Description of Artificial Sequence: Synthetic oligonucleotide
  Sense strand starting at position 263 of SEQ ID NO: 1885691
ucaauucucccugaaguag

SEQ ID NO: 2361037 - RNA, 19 nt, Artificial Sequence
  Description of Artificial Sequence: Synthetic oligonucleotide
  Antisense strand to SEQ ID NO: 2361036
cuacuucagggagaauuga

SEQ ID NO: 2361038 - RNA, 19 nt, Artificial Sequence
  Description of Artificial Sequence: Synthetic oligonucleotide
  Sense strand starting at position 395 of SEQ ID NO: 1885691
agcuaaauggcaugagaaa

SEQ ID NO: 2361039 - RNA, 19 nt, Artificial Sequence
  Description of Artificial Sequence: Synthetic oligonucleotide
  Antisense strand to SEQ ID NO: 2361038
uuucucaugccauuuagcu

SEQ ID NO: 2361040 - RNA, 19 nt, Artificial Sequence
  Description of Artificial Sequence: Synthetic oligonucleotide
  Sense strand starting at position 472 of SEQ ID NO: 1885691
gaaaguucuugugcacaga

SEQ ID NO: 2361041 - RNA, 19 nt, Artificial Sequence
  Description of Artificial Sequence: Synthetic oligonucleotide
  Antisense strand to SEQ ID NO: 2361040
ucugugcacaagaacuuuc

SEQ ID NO: 2361042 - RNA, 19 nt, Artificial Sequence
  Description of Artificial Sequence: Synthetic oligonucleotide
  Sense strand starting at position 475 of SEQ ID NO: 1885691
aguucuugugcacagagga

SEQ ID NO: 2361043 - RNA, 19 nt, Artificial Sequence
  Description of Artificial Sequence: Synthetic oligonucleotide
  Antisense strand to SEQ ID NO: 2361042
uccucugugcacaagaacu

SEQ ID NO: 2361044 - RNA, 19 nt, Artificial Sequence
  Description of Artificial Sequence: Synthetic oligonucleotide
  Sense strand starting at position 488 of SEQ ID NO: 1885691
agaggauagccucauccuu

SEQ ID NO: 2361045 - RNA, 19 nt, Artificial Sequence
  Description of Artificial Sequence: Synthetic oligonucleotide
  Antisense strand to SEQ ID NO: 2361044
aaggaugaggcuauccucu

SEQ ID NO: 2361046 - RNA, 19 nt, Artificial Sequence
  Description of Artificial Sequence: Synthetic oligonucleotide
  Sense strand starting at position 595 of SEQ ID NO: 1885691
agcuaacauuuagagagua

SEQ ID NO: 2361047 - RNA, 19 nt, Artificial Sequence
  Description of Artificial Sequence: Synthetic oligonucleotide
  Antisense strand to SEQ ID NO: 2361046
uacucucuaaauguuagcu

SEQ ID NO: 2361048 - RNA, 19 nt, Artificial Sequence
  Description of Artificial Sequence: Synthetic oligonucleotide
  Sense strand starting at position 738 of SEQ ID NO: 1885691
ucaagaucacacugguagu

SEQ ID NO: 2361049 - RNA, 19 nt, Artificial Sequence
  Description of Artificial Sequence: Synthetic oligonucleotide
  Antisense strand to SEQ ID NO: 2361048
acuaccagugugaucuuga

SEQ ID NO: 2361050 - RNA, 19 nt, Artificial Sequence
  Description of Artificial Sequence: Synthetic oligonucleotide
  Sense strand starting at position 819 of SEQ ID NO: 1885691
aguuaacagccucaggaau

SEQ ID NO: 2361051 - RNA, 19 nt, Artificial Sequence
  Description of Artificial Sequence: Synthetic oligonucleotide
  Antisense strand to SEQ ID NO: 2361050
auuccugaggcuguuaacu

SEQ ID NO: 2361052 - RNA, 19 nt, Artificial Sequence
  Description of Artificial Sequence: Synthetic oligonucleotide
  Sense strand starting at position 880 of SEQ ID NO: 1885691
gguggacugucacucuaga

SEQ ID NO: 2361053 - RNA, 19 nt, Artificial Sequence
  Description of Artificial Sequence: Synthetic oligonucleotide
  Antisense strand to SEQ ID NO: 2361052
ucuagagugacaguccacc

SEQ ID NO: 2361054 - RNA, 19 nt, Artificial Sequence
  Description of Artificial Sequence: Synthetic oligonucleotide
  Sense strand starting at position 983 of SEQ ID NO: 1885691
uguugauaacuguauuccu

SEQ ID NO: 2361055 - RNA, 19 nt, Artificial Sequence
  Description of Artificial Sequence: Synthetic oligonucleotide
  Antisense strand to SEQ ID NO: 2361054
aggaauacaguuaucaaca

SEQ ID NO: 2361056 - RNA, 19 nt, Artificial Sequence
  Description of Artificial Sequence: Synthetic oligonucleotide
  Sense strand starting at position 986 of SEQ ID NO: 1885691
ugauaacuguauuccugau

SEQ ID NO: 2361057 - RNA, 19 nt, Artificial Sequence
  Description of Artificial Sequence: Synthetic oligonucleotide
  Antisense strand to SEQ ID NO: 2361056
aucaggaauacaguuauca

SEQ ID NO: 2361058 - RNA, 19 nt, Artificial Sequence
  Description of Artificial Sequence: Synthetic oligonucleotide
  Sense strand starting at position 992 of SEQ ID NO: 1885691
cuguauuccugauccauca

SEQ ID NO: 2361059 - RNA, 19 nt, Artificial Sequence
  Description of Artificial Sequence: Synthetic oligonucleotide
  Antisense strand to SEQ ID NO: 2361058
ugauggaucaggaauacag

SEQ ID NO: 2361060 - RNA, 19 nt, Artificial Sequence
  Description of Artificial Sequence: Synthetic oligonucleotide
  Sense strand starting at position 1066 of SEQ ID NO: 1885691
agugaaauuagugggauga

SEQ ID NO: 2361061 - RNA, 19 nt, Artificial Sequence
  Description of Artificial Sequence: Synthetic oligonucleotide
  Antisense strand to SEQ ID NO: 2361060
ucaucccacuaauuucacu

SEQ ID NO: 2361062 - RNA, 19 nt, Artificial Sequence
  Description of Artificial Sequence: Synthetic oligonucleotide
  Sense strand starting at position 1161 of SEQ ID NO: 1885691
ugaccuaagguccauguua

SEQ ID NO: 2361063 - RNA, 19 nt, Artificial Sequence
  Description of Artificial Sequence: Synthetic oligonucleotide
  Antisense strand to SEQ ID NO: 2361062
uaacauggaccuuagguca

SEQ ID NO: 2361064 - RNA, 19 nt, Artificial Sequence
  Description of Artificial Sequence: Synthetic oligonucleotide
  Sense strand starting at position 1163 of SEQ ID NO: 1885691
accuaagguccauguuauu

SEQ ID NO: 2361065 - RNA, 19 nt, Artificial Sequence
  Description of Artificial Sequence: Synthetic oligonucleotide
  Antisense strand to SEQ ID NO: 2361064
aauaacauggaccuuaggu

SEQ ID NO: 2361066 - RNA, 19 nt, Artificial Sequence
  Description of Artificial Sequence: Synthetic oligonucleotide
  Sense strand starting at position 1272 of SEQ ID NO: 1885691
ccaugauuauacuuguacu

SEQ ID NO: 2361067 - RNA, 19 nt, Artificial Sequence
  Description of Artificial Sequence: Synthetic oligonucleotide
  Antisense strand to SEQ ID NO: 2361066
aguacaaguauaaucaugg

SEQ ID NO: 2361068 - RNA, 19 nt, Artificial Sequence
  Description of Artificial Sequence: Synthetic oligonucleotide
  Sense strand starting at position 1536 of SEQ ID NO: 1885691
guauaagauugugucaaau

SEQ ID NO: 2361069 - RNA, 19 nt, Artificial Sequence
  Description of Artificial Sequence: Synthetic oligonucleotide
  Antisense strand to SEQ ID NO: 2361068
auuugacacaaucuuauac

SEQ ID NO: 2361070 - RNA, 19 nt, Artificial Sequence
  Description of Artificial Sequence: Synthetic oligonucleotide
  Sense strand starting at position 1683 of SEQ ID NO: 1885691
augguucuagcagaaugua

SEQ ID NO: 2361071 - RNA, 19 nt, Artificial Sequence
  Description of Artificial Sequence: Synthetic oligonucleotide
  Antisense strand to SEQ ID NO: 2361070
uacauucugcuagaaccau

SEQ ID NO: 2361072 - RNA, 19 nt, Artificial Sequence
  Description of Artificial Sequence: Synthetic oligonucleotide
  Sense strand starting at position 1691 of SEQ ID NO: 1885691
agcagaauguacccugaaa

SEQ ID NO: 2361073 - RNA, 19 nt, Artificial Sequence
  Description of Artificial Sequence: Synthetic oligonucleotide
  Antisense strand to SEQ ID NO: 2361072
uuucaggguacauucugcu

SEQ ID NO: 2361074 - RNA, 19 nt, Artificial Sequence
  Description of Artificial Sequence: Synthetic oligonucleotide
  Sense strand starting at position 2018 of SEQ ID NO: 1885691
ucaagagucucagcagacu

SEQ ID NO: 2361075 - RNA, 19 nt, Artificial Sequence
  Description of Artificial Sequence: Synthetic oligonucleotide
  Antisense strand to SEQ ID NO: 2361074
agucugcugagacucuuga

SEQ ID NO: 2361076 - RNA, 19 nt, Artificial Sequence
  Description of Artificial Sequence: Synthetic oligonucleotide
  Sense strand starting at position 2030 of SEQ ID NO: 1885691
gcagacucauuggccagau

SEQ ID NO: 2361077 - RNA, 19 nt, Artificial Sequence
  Description of Artificial Sequence: Synthetic oligonucleotide
  Antisense strand to SEQ ID NO: 2361076
aucuggccaaugagucugc

SEQ ID NO: 2361078 - RNA, 19 nt, Artificial Sequence
  Description of Artificial Sequence: Synthetic oligonucleotide
  Sense strand starting at position 2076 of SEQ ID NO: 1885691
augagaaaccuguggaugu

SEQ ID NO: 2361079 - RNA, 19 nt, Artificial Sequence
  Description of Artificial Sequence: Synthetic oligonucleotide
  Antisense strand to SEQ ID NO: 2361078
acauccacagguuucucau

SEQ ID NO: 2361080 - RNA, 19 nt, Artificial Sequence
  Description of Artificial Sequence: Synthetic oligonucleotide
  Sense strand starting at position 2132 of SEQ ID NO: 1885691
cuccacugucagggcaaua

SEQ ID NO: 2361081 - RNA, 19 nt, Artificial Sequence
  Description of Artificial Sequence: Synthetic oligonucleotide
  Antisense strand to SEQ ID NO: 2361080
uauugcccugacaguggag

SEQ ID NO: 2361082 - RNA, 19 nt, Artificial Sequence
  Description of Artificial Sequence: Synthetic oligonucleotide
  Sense strand starting at position 2155 of SEQ ID NO: 1885691
uagggcaaguuaucagaca

SEQ ID NO: 2361083 - RNA, 19 nt, Artificial Sequence
  Description of Artificial Sequence: Synthetic oligonucleotide
  Antisense strand to SEQ ID NO: 2361082
ugucugauaacuugcccua

SEQ ID NO: 2361084 - RNA, 19 nt, Artificial Sequence
  Description of Artificial Sequence: Synthetic oligonucleotide
  Sense strand starting at position 2211 of SEQ ID NO: 1885691
ccuuccuuacuccgacaga

SEQ ID NO: 2361085 - RNA, 19 nt, Artificial Sequence
  Description of Artificial Sequence: Synthetic oligonucleotide
  Antisense strand to SEQ ID NO: 2361084
ucugucggaguaaggaagg

SEQ ID NO: 2361086 - RNA, 19 nt, Artificial Sequence
  Description of Artificial Sequence: Synthetic oligonucleotide
  Sense strand starting at position 2653 of SEQ ID NO: 1885691
cuagauguacaguagcaaa

SEQ ID NO: 2361087 - RNA, 19 nt, Artificial Sequence
  Description of Artificial Sequence: Synthetic oligonucleotide
  Antisense strand to SEQ ID NO: 2361086
uuugcuacuguacaucuag

SEQ ID NO: 2361088 - RNA, 19 nt, Artificial Sequence
  Description of Artificial Sequence: Synthetic oligonucleotide
  Sense strand starting at position 2739 of SEQ ID NO: 1885691
gccuuaagagagugaacaa

SEQ ID NO: 2361089 - RNA, 19 nt, Artificial Sequence
  Description of Artificial Sequence: Synthetic oligonucleotide
  Antisense strand to SEQ ID NO: 2361088
uuguucacucucuuaaggc

SEQ ID NO: 2361090 - RNA, 19 nt, Artificial Sequence
  Description of Artificial Sequence: Synthetic oligonucleotide
  Sense strand starting at position 2842 of SEQ ID NO: 1885691
cucuuagaucaauggcaua

SEQ ID NO: 2361091 - RNA, 19 nt, Artificial Sequence
  Description of Artificial Sequence: Synthetic oligonucleotide
  Antisense strand to SEQ ID NO: 2361090
uaugccauugaucuaagag

SEQ ID NO: 2361092 - RNA, 19 nt, Artificial Sequence
  Description of Artificial Sequence: Synthetic oligonucleotide
  Sense strand starting at position 3384 of SEQ ID NO: 1885691
uuagauucuuagguauaag

SEQ ID NO: 2361093 - RNA, 19 nt, Artificial Sequence
  Description of Artificial Sequence: Synthetic oligonucleotide
  Antisense strand to SEQ ID NO: 2361092
cuuauaccuaagaaucuaa

SEQ ID NO: 2361094 - RNA, 19 nt, Artificial Sequence
  Description of Artificial Sequence: Synthetic oligonucleotide
  Sense strand starting at position 3395 of SEQ ID NO: 1885691
gguauaaggaaacguucuu

SEQ ID NO: 2361095 - RNA, 19 nt, Artificial Sequence
  Description of Artificial Sequence: Synthetic oligonucleotide
  Antisense strand to SEQ ID NO: 2361094
aagaacguuuccuuauacc

SEQ ID NO: 2361096 - RNA, 19 nt, Artificial Sequence
  Description of Artificial Sequence: Synthetic oligonucleotide
  Sense strand starting at position 3400 of SEQ ID NO: 1885691
aaggaaacguucuuguuag

SEQ ID NO: 2361097 - RNA, 19 nt, Artificial Sequence
  Description of Artificial Sequence: Synthetic oligonucleotide
  Antisense strand to SEQ ID NO: 2361096
cuaacaagaacguuuccuu

SEQ ID NO: 2361098 - RNA, 19 nt, Artificial Sequence
  Description of Artificial Sequence: Synthetic oligonucleotide
  Sense strand starting at position 3410 of SEQ ID NO: 1885691
ucuuguuagcuagaaaugg

SEQ ID NO: 2361099 - RNA, 19 nt, Artificial Sequence
  Description of Artificial Sequence: Synthetic oligonucleotide
  Antisense strand to SEQ ID NO: 2361098
ccauuucuagcuaacaaga

SEQ ID NO: 2361100 - RNA, 19 nt, Artificial Sequence
  Description of Artificial Sequence: Synthetic oligonucleotide
  Sense strand starting at position 3414 of SEQ ID NO: 1885691
guuagcuagaaauggaaau

SEQ ID NO: 2361101 - RNA, 19 nt, Artificial Sequence
  Description of Artificial Sequence: Synthetic oligonucleotide
  Antisense strand to SEQ ID NO: 2361100
auuuccauuucuagcuaac

SEQ ID NO: 2361102 - RNA, 19 nt, Artificial Sequence
  Description of Artificial Sequence: Synthetic oligonucleotide
  Sense strand starting at position 3559 of SEQ ID NO: 1885691
agaaaucccugccuugacu

SEQ ID NO: 2361103 - RNA, 19 nt, Artificial Sequence
  Description of Artificial Sequence: Synthetic oligonucleotide
  Antisense strand to SEQ ID NO: 2361102
agucaaggcagggauuucu

SEQ ID NO: 2361104 - RNA, 19 nt, Artificial Sequence
  Description of Artificial Sequence: Synthetic oligonucleotide
  Sense strand starting at position 3644 of SEQ ID NO: 1885691
cuuucuuauguggacauua

SEQ ID NO: 2361105 - RNA, 19 nt, Artificial Sequence
  Description of Artificial Sequence: Synthetic oligonucleotide
  Antisense strand to SEQ ID NO: 2361104
uaauguccacauaagaaag

SEQ ID NO: 2361106 - RNA, 19 nt, Artificial Sequence
  Description of Artificial Sequence: Synthetic oligonucleotide
  Sense strand starting at position 3718 of SEQ ID NO: 1885691
ggaacaugugaguggcacu

SEQ ID NO: 2361107 - RNA, 19 nt, Artificial Sequence
  Description of Artificial Sequence: Synthetic oligonucleotide
  Antisense strand to SEQ ID NO: 2361106
agugccacucacauguucc

SEQ ID NO: 2361108 - RNA, 19 nt, Artificial Sequence
  Description of Artificial Sequence: Synthetic oligonucleotide
  Sense strand starting at position 3725 of SEQ ID NO: 1885691
gugaguggcacugauauuc

SEQ ID NO: 2361109 - RNA, 19 nt, Artificial Sequence
  Description of Artificial Sequence: Synthetic oligonucleotide
  Antisense strand to SEQ ID NO: 2361108
gaauaucagugccacucac

SEQ ID NO: 2361110 - RNA, 19 nt, Artificial Sequence
  Description of Artificial Sequence: Synthetic oligonucleotide
  Sense strand starting at position 3813 of SEQ ID NO: 1885691
uaagcaguuugagcuauuu

SEQ ID NO: 2361111 - RNA, 19 nt, Artificial Sequence
  Description of Artificial Sequence: Synthetic oligonucleotide
  Antisense strand to SEQ ID NO: 2361110
aaauagcucaaacugcuua

SEQ ID NO: 2361112 - RNA, 19 nt, Artificial Sequence
  Description of Artificial Sequence: Synthetic oligonucleotide
  Sense strand starting at position 3933 of SEQ ID NO: 1885691
cagacaugcccaugguuau

SEQ ID NO: 2361113 - RNA, 19 nt, Artificial Sequence
  Description of Artificial Sequence: Synthetic oligonucleotide
  Antisense strand to SEQ ID NO: 2361112
auaaccaugggcaugucug

SEQ ID NO: 2361114 - RNA, 19 nt, Artificial Sequence
  Description of Artificial Sequence: Synthetic oligonucleotide
  Sense strand starting at position 41 of SEQ ID NO: 1885692
guguguggguggaagagua

SEQ ID NO: 2361115 - RNA, 19 nt, Artificial Sequence
  Description of Artificial Sequence: Synthetic oligonucleotide
  Antisense strand to SEQ ID NO: 2361114
uacucuuccacccacacac

SEQ ID NO: 2361116 - RNA, 19 nt, Artificial Sequence
  Description of Artificial Sequence: Synthetic oligonucleotide
  Sense strand starting at position 57 of SEQ ID NO: 1885692
guagacagauugguggaua

SEQ ID NO: 2361117 - RNA, 19 nt, Artificial Sequence
  Description of Artificial Sequence: Synthetic oligonucleotide
  Antisense strand to SEQ ID NO: 2361116
uauccaccaaucugucuac

SEQ ID NO: 2361118 - RNA, 19 nt, Artificial Sequence
  Description of Artificial Sequence: Synthetic oligonucleotide
  Sense strand starting at position 117 of SEQ ID NO: 1885692
uggauucaguaagagguuu

SEQ ID NO: 2361119 - RNA, 19 nt, Artificial Sequence
  Description of Artificial Sequence: Synthetic oligonucleotide
  Antisense strand to SEQ ID NO: 2361118
aaaccucuuacugaaucca

SEQ ID NO: 2361120 - RNA, 19 nt, Artificial Sequence
  Description of Artificial Sequence: Synthetic oligonucleotide
  Sense strand starting at position 148 of SEQ ID NO: 1885692
gucuuaaaugcccaaauga

SEQ ID NO: 2361121 - RNA, 19 nt, Artificial Sequence
  Description of Artificial Sequence: Synthetic oligonucleotide
  Antisense strand to SEQ ID NO: 2361120
ucauuugggcauuuaagac

SEQ ID NO: 2361122 - RNA, 19 nt, Artificial Sequence
  Description of Artificial Sequence: Synthetic oligonucleotide
  Sense strand starting at position 242 of SEQ ID NO: 1885692
cgacucuccugcucagauu

SEQ ID NO: 2361123 - RNA, 19 nt, Artificial Sequence
  Description of Artificial Sequence: Synthetic oligonucleotide
  Antisense strand to SEQ ID NO: 2361122
aaucugagcaggagagucg

SEQ ID NO: 2361124 - RNA, 19 nt, Artificial Sequence
  Description of Artificial Sequence: Synthetic oligonucleotide
  Sense strand starting at position 328 of SEQ ID NO: 1885692
aguuauauguccugacaug

SEQ ID NO: 2361125 - RNA, 19 nt, Artificial Sequence
  Description of Artificial Sequence: Synthetic oligonucleotide
  Antisense strand to SEQ ID NO: 2361124
caugucaggacauauaacu

SEQ ID NO: 2361126 - RNA, 19 nt, Artificial Sequence
  Description of Artificial Sequence: Synthetic oligonucleotide
  Sense strand starting at position 329 of SEQ ID NO: 1885692
guuauauguccugacaugg

SEQ ID NO: 2361127 - RNA, 19 nt, Artificial Sequence
  Description of Artificial Sequence: Synthetic oligonucleotide
  Antisense strand to SEQ ID NO: 2361126
ccaugucaggacauauaac

SEQ ID NO: 2361128 - RNA, 19 nt, Artificial Sequence
  Description of Artificial Sequence: Synthetic oligonucleotide
  Sense strand starting at position 370 of SEQ ID NO: 1885692
gggugauucgccugcagac

SEQ ID NO: 2361129 - RNA, 19 nt, Artificial Sequence
  Description of Artificial Sequence: Synthetic oligonucleotide
  Antisense strand to SEQ ID NO: 2361128
gucugcaggcgaaucaccc

SEQ ID NO: 2361130 - RNA, 19 nt, Artificial Sequence
  Description of Artificial Sequence: Synthetic oligonucleotide
  Sense strand starting at position 402 of SEQ ID NO: 1885692
cugccaagauccuugacuu

SEQ ID NO: 2361131 - RNA, 19 nt, Artificial Sequence
  Description of Artificial Sequence: Synthetic oligonucleotide
  Antisense strand to SEQ ID NO: 2361130
aagucaaggaucuuggcag

SEQ ID NO: 2361132 - RNA, 19 nt, Artificial Sequence
  Description of Artificial Sequence: Synthetic oligonucleotide
  Sense strand starting at position 403 of SEQ ID NO: 1885692
ugccaagauccuugacuuc

SEQ ID NO: 2361133 - RNA, 19 nt, Artificial Sequence
  Description of Artificial Sequence: Synthetic oligonucleotide
  Antisense strand to SEQ ID NO: 2361132
gaagucaaggaucuuggca

SEQ ID NO: 2361134 - RNA, 19 nt, Artificial Sequence
  Description of Artificial Sequence: Synthetic oligonucleotide
  Sense strand starting at position 565 of SEQ ID NO: 1885692
uguccagucugacacaagu

SEQ ID NO: 2361135 - RNA, 19 nt, Artificial Sequence
  Description of Artificial Sequence: Synthetic oligonucleotide
  Antisense strand to SEQ ID NO: 2361134
acuugugucagacuggaca

SEQ ID NO: 2361136 - RNA, 19 nt, Artificial Sequence
  Description of Artificial Sequence: Synthetic oligonucleotide
  Sense strand starting at position 580 of SEQ ID NO: 1885692
aagugugucagguggucau

SEQ ID NO: 2361137 - RNA, 19 nt, Artificial Sequence
  Description of Artificial Sequence: Synthetic oligonucleotide
  Antisense strand to SEQ ID NO: 2361136
augaccaccugacacacuu

SEQ ID NO: 2361138 - RNA, 19 nt, Artificial Sequence
  Description of Artificial Sequence: Synthetic oligonucleotide
  Sense strand starting at position 704 of SEQ ID NO: 1885692
cuuguugaaccuuguguuu

SEQ ID NO: 2361139 - RNA, 19 nt, Artificial Sequence
  Description of Artificial Sequence: Synthetic oligonucleotide
  Antisense strand to SEQ ID NO: 2361138
aaacacaagguucaacaag

SEQ ID NO: 2361140 - RNA, 19 nt, Artificial Sequence
  Description of Artificial Sequence: Synthetic oligonucleotide
  Sense strand starting at position 813 of SEQ ID NO: 1885692
caggguuauuccuagggau

SEQ ID NO: 2361141 - RNA, 19 nt, Artificial Sequence
  Description of Artificial Sequence: Synthetic oligonucleotide
  Antisense strand to SEQ ID NO: 2361140
aucccuaggaauaacccug

SEQ ID NO: 2361142 - RNA, 19 nt, Artificial Sequence
  Description of Artificial Sequence: Synthetic oligonucleotide
  Sense strand starting at position 815 of SEQ ID NO: 1885692
ggguuauuccuagggaugg

SEQ ID NO: 2361143 - RNA, 19 nt, Artificial Sequence
  Description of Artificial Sequence: Synthetic oligonucleotide
  Antisense strand to SEQ ID NO: 2361142
ccaucccuaggaauaaccc

SEQ ID NO: 2361144 - RNA, 19 nt, Artificial Sequence
  Description of Artificial Sequence: Synthetic oligonucleotide
  Sense strand starting at position 816 of SEQ ID NO: 1885692
gguuauuccuagggaugga

SEQ ID NO: 2361145 - RNA, 19 nt, Artificial Sequence
  Description of Artificial Sequence: Synthetic oligonucleotide
  Antisense strand to SEQ ID NO: 2361144
uccaucccuaggaauaacc

SEQ ID NO: 2361146 - RNA, 19 nt, Artificial Sequence
  Description of Artificial Sequence: Synthetic oligonucleotide
  Sense strand starting at position 1031 of SEQ ID NO: 1885692
gugacaucagcccaucaau

SEQ ID NO: 2361147 - RNA, 19 nt, Artificial Sequence
  Description of Artificial Sequence: Synthetic oligonucleotide
  Antisense strand to SEQ ID NO: 2361146
auugaugggcugaugucac

SEQ ID NO: 2361148 - RNA, 19 nt, Artificial Sequence
  Description of Artificial Sequence: Synthetic oligonucleotide
  Sense strand starting at position 1111 of SEQ ID NO: 1885692
acuccuguguccuugugaa

SEQ ID NO: 2361149 - RNA, 19 nt, Artificial Sequence
  Description of Artificial Sequence: Synthetic oligonucleotide
  Antisense strand to SEQ ID NO: 2361148
uucacaaggacacaggagu

SEQ ID NO: 2361150 - RNA, 19 nt, Artificial Sequence
  Description of Artificial Sequence: Synthetic oligonucleotide
  Sense strand starting at position 1115 of SEQ ID NO: 1885692
cuguguccuugugaaagag

SEQ ID NO: 2361151 - RNA, 19 nt, Artificial Sequence
  Description of Artificial Sequence: Synthetic oligonucleotide
  Antisense strand to SEQ ID NO: 2361150
cucuuucacaaggacacag

SEQ ID NO: 2361152 - RNA, 19 nt, Artificial Sequence
  Description of Artificial Sequence: Synthetic oligonucleotide
  Sense strand starting at position 1176 of SEQ ID NO: 1885692
caggauuccugcuggauuc

SEQ ID NO: 2361153 - RNA, 19 nt, Artificial Sequence
  Description of Artificial Sequence: Synthetic oligonucleotide
  Antisense strand to SEQ ID NO: 2361152
gaauccagcaggaauccug

SEQ ID NO: 2361154 - RNA, 19 nt, Artificial Sequence
  Description of Artificial Sequence: Synthetic oligonucleotide
  Sense strand starting at position 1186 of SEQ ID NO: 1885692
gcuggauuccgugugucag

SEQ ID NO: 2361155 - RNA, 19 nt, Artificial Sequence
  Description of Artificial Sequence: Synthetic oligonucleotide
  Antisense strand to SEQ ID NO: 2361154
cugacacacggaauccagc

SEQ ID NO: 2361156 - RNA, 19 nt, Artificial Sequence
  Description of Artificial Sequence: Synthetic oligonucleotide
  Sense strand starting at position 1317 of SEQ ID NO: 1885692
gaggucugcuguuacuaga

SEQ ID NO: 2361157 - RNA, 19 nt, Artificial Sequence
  Description of Artificial Sequence: Synthetic oligonucleotide
  Antisense strand to SEQ ID NO: 2361156
ucuaguaacagcagaccuc

SEQ ID NO: 2361158 - RNA, 19 nt, Artificial Sequence
  Description of Artificial Sequence: Synthetic oligonucleotide
  Sense strand starting at position 1463 of SEQ ID NO: 1885692
ggagaaacgugucauucca

SEQ ID NO: 2361159 - RNA, 19 nt, Artificial Sequence
  Description of Artificial Sequence: Synthetic oligonucleotide
  Antisense strand to SEQ ID NO: 2361158
uggaaugacacguuucucc

SEQ ID NO: 2361160 - RNA, 19 nt, Artificial Sequence
  Description of Artificial Sequence: Synthetic oligonucleotide
  Sense strand starting at position 1470 of SEQ ID NO: 1885692
cgugucauuccaggaggac

SEQ ID NO: 2361161 - RNA, 19 nt, Artificial Sequence
  Description of Artificial Sequence: Synthetic oligonucleotide
  Antisense strand to SEQ ID NO: 2361160
guccuccuggaaugacacg

SEQ ID NO: 2361162 - RNA, 19 nt, Artificial Sequence
  Description of Artificial Sequence: Synthetic oligonucleotide
  Sense strand starting at position 1471 of SEQ ID NO: 1885692
gugucauuccaggaggaca

SEQ ID NO: 2361163 - RNA, 19 nt, Artificial Sequence
  Description of Artificial Sequence: Synthetic oligonucleotide
  Antisense strand to SEQ ID NO: 2361162
uguccuccuggaaugacac

SEQ ID NO: 2361164 - RNA, 19 nt, Artificial Sequence
  Description of Artificial Sequence: Synthetic oligonucleotide
  Sense strand starting at position 1739 of SEQ ID NO: 1885692
ggcugaggacuuuguguca

SEQ ID NO: 2361165 - RNA, 19 nt, Artificial Sequence
  Description of Artificial Sequence: Synthetic oligonucleotide
  Antisense strand to SEQ ID NO: 2361164
ugacacaaaguccucagcc

SEQ ID NO: 2361166 - RNA, 19 nt, Artificial Sequence
  Description of Artificial Sequence: Synthetic oligonucleotide
  Sense strand starting at position 1742 of SEQ ID NO: 1885692
ugaggacuuugugucaaug

SEQ ID NO: 2361167 - RNA, 19 nt, Artificial Sequence
  Description of Artificial Sequence: Synthetic oligonucleotide
  Antisense strand to SEQ ID NO: 2361166
cauugacacaaaguccuca

SEQ ID NO: 2361168 - RNA, 19 nt, Artificial Sequence
  Description of Artificial Sequence: Synthetic oligonucleotide
  Sense strand starting at position 1744 of SEQ ID NO: 1885692
aggacuuugugucaauguu

SEQ ID NO: 2361169 - RNA, 19 nt, Artificial Sequence
  Description of Artificial Sequence: Synthetic oligonucleotide
  Antisense strand to SEQ ID NO: 2361168
aacauugacacaaaguccu

SEQ ID NO: 2361170 - RNA, 19 nt, Artificial Sequence
  Description of Artificial Sequence: Synthetic oligonucleotide
  Sense strand starting at position 1956 of SEQ ID NO: 1885692
gagagcugcuucgggaaga

SEQ ID NO: 2361171 - RNA, 19 nt, Artificial Sequence
  Description of Artificial Sequence: Synthetic oligonucleotide
  Antisense strand to SEQ ID NO: 2361170
ucuucccgaagcagcucuc

SEQ ID NO: 2361172 - RNA, 19 nt, Artificial Sequence
  Description of Artificial Sequence: Synthetic oligonucleotide
  Sense strand starting at position 1957 of SEQ ID NO: 1885692
agagcugcuucgggaagaa

SEQ ID NO: 2361173 - RNA, 19 nt, Artificial Sequence
  Description of Artificial Sequence: Synthetic oligonucleotide
  Antisense strand to SEQ ID NO: 2361172
uucuucccgaagcagcucu

SEQ ID NO: 2361174 - RNA, 19 nt, Artificial Sequence
  Description of Artificial Sequence: Synthetic oligonucleotide
  Sense strand starting at position 2135 of SEQ ID NO: 1885692
gguggaaacucugcuuccu

SEQ ID NO: 2361175 - RNA, 19 nt, Artificial Sequence
  Description of Artificial Sequence: Synthetic oligonucleotide
  Antisense strand to SEQ ID NO: 2361174
aggaagcagaguuuccacc

SEQ ID NO: 2361176 - RNA, 19 nt, Artificial Sequence
  Description of Artificial Sequence: Synthetic oligonucleotide
  Sense strand starting at position 2604 of SEQ ID NO: 1885692
aggcuuggcucaugcggaa

SEQ ID NO: 2361177 - RNA, 19 nt, Artificial Sequence
  Description of Artificial Sequence: Synthetic oligonucleotide
  Antisense strand to SEQ ID NO: 2361176
uuccgcaugagccaagccu

SEQ ID NO: 2361178 - RNA, 19 nt, Artificial Sequence
  Description of Artificial Sequence: Synthetic oligonucleotide
  Sense strand starting at position 2649 of SEQ ID NO: 1885692
cggagaaucucugagaaca

SEQ ID NO: 2361179 - RNA, 19 nt, Artificial Sequence
  Description of Artificial Sequence: Synthetic oligonucleotide
  Antisense strand to SEQ ID NO: 2361178
uguucucagagauucuccg

SEQ ID NO: 2361180 - RNA, 19 nt, Artificial Sequence
  Description of Artificial Sequence: Synthetic oligonucleotide
  Sense strand starting at position 3553 of SEQ ID NO: 1885692
aucuguagguugggaguaa

SEQ ID NO: 2361181 - RNA, 19 nt, Artificial Sequence
  Description of Artificial Sequence: Synthetic oligonucleotide
  Antisense strand to SEQ ID NO: 2361180
uuacucccaaccuacagau

SEQ ID NO: 2361182 - RNA, 19 nt, Artificial Sequence
  Description of Artificial Sequence: Synthetic oligonucleotide
  Sense strand starting at position 3554 of SEQ ID NO: 1885692
ucuguagguugggaguaau

SEQ ID NO: 2361183 - RNA, 19 nt, Artificial Sequence
  Description of Artificial Sequence: Synthetic oligonucleotide
  Antisense strand to SEQ ID NO: 2361182
auuacucccaaccuacaga

SEQ ID NO: 2361184 - RNA, 19 nt, Artificial Sequence
  Description of Artificial Sequence: Synthetic oligonucleotide
  Sense strand starting at position 3557 of SEQ ID NO: 1885692
guagguugggaguaaugag

SEQ ID NO: 2361185 - RNA, 19 nt, Artificial Sequence
  Description of Artificial Sequence: Synthetic oligonucleotide
  Antisense strand to SEQ ID NO: 2361184
cucauuacucccaaccuac

SEQ ID NO: 2361186 - RNA, 19 nt, Artificial Sequence
  Description of Artificial Sequence: Synthetic oligonucleotide
  Sense strand starting at position 3729 of SEQ ID NO: 1885692
gccuguccaucuguaagca

SEQ ID NO: 2361187 - RNA, 19 nt, Artificial Sequence
  Description of Artificial Sequence: Synthetic oligonucleotide
  Antisense strand to SEQ ID NO: 2361186
ugcuuacagauggacaggc

SEQ ID NO: 2361188 - RNA, 19 nt, Artificial Sequence
  Description of Artificial Sequence: Synthetic oligonucleotide
  Sense strand starting at position 35 of SEQ ID NO: 1885693
caaaccuuguggucagaaa

SEQ ID NO: 2361189 - RNA, 19 nt, Artificial Sequence
  Description of Artificial Sequence: Synthetic oligonucleotide
  Antisense strand to SEQ ID NO: 2361188
uuucugaccacaagguuug

SEQ ID NO: 2361190 - RNA, 19 nt, Artificial Sequence
  Description of Artificial Sequence: Synthetic oligonucleotide
  Sense strand starting at position 42 of SEQ ID NO: 1885693
uguggucagaaaugaauuc

SEQ ID NO: 2361191 - RNA, 19 nt, Artificial Sequence
  Description of Artificial Sequence: Synthetic oligonucleotide
  Antisense strand to SEQ ID NO: 2361190
gaauucauuucugaccaca

SEQ ID NO: 2361192 - RNA, 19 nt, Artificial Sequence
  Description of Artificial Sequence: Synthetic oligonucleotide
  Sense strand starting at position 327 of SEQ ID NO: 1885693
gugguaaagcgagaaacau

SEQ ID NO: 2361193 - RNA, 19 nt, Artificial Sequence
  Description of Artificial Sequence: Synthetic oligonucleotide
  Antisense strand to SEQ ID NO: 2361192
auguuucucgcuuuaccac

SEQ ID NO: 2361194 - RNA, 19 nt, Artificial Sequence
  Description of Artificial Sequence: Synthetic oligonucleotide
  Sense strand starting at position 492 of SEQ ID NO: 1885693
cagacagguguaugaaauu

SEQ ID NO: 2361195 - RNA, 19 nt, Artificial Sequence
  Description of Artificial Sequence: Synthetic oligonucleotide
  Antisense strand to SEQ ID NO: 2361194
aauuucauacaccugucug

SEQ ID NO: 2361196 - RNA, 19 nt, Artificial Sequence
  Description of Artificial Sequence: Synthetic oligonucleotide
  Sense strand starting at position 510 of SEQ ID NO: 1885693
uucuaaagcccuuaauggu

SEQ ID NO: 2361197 - RNA, 19 nt, Artificial Sequence
  Description of Artificial Sequence: Synthetic oligonucleotide
  Antisense strand to SEQ ID NO: 2361196
accauuaagggcuuuagaa

SEQ ID NO: 2361198 - RNA, 19 nt, Artificial Sequence
  Description of Artificial Sequence: Synthetic oligonucleotide
  Sense strand starting at position 525 of SEQ ID NO: 1885693
ugguuauuucugggugcca

SEQ ID NO: 2361199 - RNA, 19 nt, Artificial Sequence
  Description of Artificial Sequence: Synthetic oligonucleotide
  Antisense strand to SEQ ID NO: 2361198
uggcacccagaaauaacca

SEQ ID NO: 2361200 - RNA, 19 nt, Artificial Sequence
  Description of Artificial Sequence: Synthetic oligonucleotide
  Sense strand starting at position 527 of SEQ ID NO: 1885693
guuauuucugggugccaga

SEQ ID NO: 2361201 - RNA, 19 nt, Artificial Sequence
  Description of Artificial Sequence: Synthetic oligonucleotide
  Antisense strand to SEQ ID NO: 2361200
ucuggcacccagaaauaac

SEQ ID NO: 2361202 - RNA, 19 nt, Artificial Sequence
  Description of Artificial Sequence: Synthetic oligonucleotide
  Sense strand starting at position 582 of SEQ ID NO: 1885693
uuccacaucgcuugaauuu

SEQ ID NO: 2361203 - RNA, 19 nt, Artificial Sequence
  Description of Artificial Sequence: Synthetic oligonucleotide
  Antisense strand to SEQ ID NO: 2361202
aaauucaagcgauguggaa

SEQ ID NO: 2361204 - RNA, 19 nt, Artificial Sequence
  Description of Artificial Sequence: Synthetic oligonucleotide
  Sense strand starting at position 796 of SEQ ID NO: 1885693
uugucaacaugucuaagaa

SEQ ID NO: 2361205 - RNA, 19 nt, Artificial Sequence
  Description of Artificial Sequence: Synthetic oligonucleotide
  Antisense strand to SEQ ID NO: 2361204
uucuuagacauguugacaa

SEQ ID NO: 2361206 - RNA, 19 nt, Artificial Sequence
  Description of Artificial Sequence: Synthetic oligonucleotide
  Sense strand starting at position 816 of SEQ ID NO: 1885693
uccuuccuccaugguaaga

SEQ ID NO: 2361207 - RNA, 19 nt, Artificial Sequence
  Description of Artificial Sequence: Synthetic oligonucleotide
  Antisense strand to SEQ ID NO: 2361206
ucuuaccauggaggaagga

SEQ ID NO: 2361208 - RNA, 19 nt, Artificial Sequence
  Description of Artificial Sequence: Synthetic oligonucleotide
  Sense strand starting at position 821 of SEQ ID NO: 1885693
ccuccaugguaagauuuaa

SEQ ID NO: 2361209 - RNA, 19 nt, Artificial Sequence
  Description of Artificial Sequence: Synthetic oligonucleotide
  Antisense strand to SEQ ID NO: 2361208
uuaaaucuuaccauggagg

SEQ ID NO: 2361210 - RNA, 19 nt, Artificial Sequence
  Description of Artificial Sequence: Synthetic oligonucleotide
  Sense strand starting at position 936 of SEQ ID NO: 1885693
gggucuugagcacagauca

SEQ ID NO: 2361211 - RNA, 19 nt, Artificial Sequence
  Description of Artificial Sequence: Synthetic oligonucleotide
  Antisense strand to SEQ ID NO: 2361210
ugaucugugcucaagaccc

SEQ ID NO: 2361212 - RNA, 19 nt, Artificial Sequence
  Description of Artificial Sequence: Synthetic oligonucleotide
  Sense strand starting at position 1053 of SEQ ID NO: 1885693
guggaaccaacaugaguau

SEQ ID NO: 2361213 - RNA, 19 nt, Artificial Sequence
  Description of Artificial Sequence: Synthetic oligonucleotide
  Antisense strand to SEQ ID NO: 2361212
auacucauguugguuccac

SEQ ID NO: 2361214 - RNA, 19 nt, Artificial Sequence
  Description of Artificial Sequence: Synthetic oligonucleotide
  Sense strand starting at position 1350 of SEQ ID NO: 1885693
aggauuagugugcacagaa

SEQ ID NO: 2361215 - RNA, 19 nt, Artificial Sequence
  Description of Artificial Sequence: Synthetic oligonucleotide
  Antisense strand to SEQ ID NO: 2361214
uucugugcacacuaauccu

SEQ ID NO: 2361216 - RNA, 19 nt, Artificial Sequence
  Description of Artificial Sequence: Synthetic oligonucleotide
  Sense strand starting at position 1529 of SEQ ID NO: 1885693
gaauucucuggagggugua

SEQ ID NO: 2361217 - RNA, 19 nt, Artificial Sequence
  Description of Artificial Sequence: Synthetic oligonucleotide
  Antisense strand to SEQ ID NO: 2361216
uacacccuccagagaauuc

SEQ ID NO: 2361218 - RNA, 19 nt, Artificial Sequence
  Description of Artificial Sequence: Synthetic oligonucleotide
  Sense strand starting at position 1635 of SEQ ID NO: 1885693
cuucuagaugcccaagauu

SEQ ID NO: 2361219 - RNA, 19 nt, Artificial Sequence
  Description of Artificial Sequence: Synthetic oligonucleotide
  Antisense strand to SEQ ID NO: 2361218
aaucuugggcaucuagaag

SEQ ID NO: 2361220 - RNA, 19 nt, Artificial Sequence
  Description of Artificial Sequence: Synthetic oligonucleotide
  Sense strand starting at position 1661 of SEQ ID NO: 1885693
aagguugaauuugauagga

SEQ ID NO: 2361221 - RNA, 19 nt, Artificial Sequence
  Description of Artificial Sequence: Synthetic oligonucleotide
  Antisense strand to SEQ ID NO: 2361220
uccuaucaaauucaaccuu

SEQ ID NO: 2361222 - RNA, 19 nt, Artificial Sequence
  Description of Artificial Sequence: Synthetic oligonucleotide
  Sense strand starting at position 1663 of SEQ ID NO: 1885693
gguugaauuugauaggaau

SEQ ID NO: 2361223 - RNA, 19 nt, Artificial Sequence
  Description of Artificial Sequence: Synthetic oligonucleotide
  Antisense strand to SEQ ID NO: 2361222
auuccuaucaaauucaacc

SEQ ID NO: 2361224 - RNA, 19 nt, Artificial Sequence
  Description of Artificial Sequence: Synthetic oligonucleotide
  Sense strand starting at position 1798 of SEQ ID NO: 1885693
cagcuuggacucuaaaguu

SEQ ID NO: 2361225 - RNA, 19 nt, Artificial Sequence
  Description of Artificial Sequence: Synthetic oligonucleotide
  Antisense strand to SEQ ID NO: 2361224
aacuuuagaguccaagcug

SEQ ID NO: 2361226 - RNA, 19 nt, Artificial Sequence
  Description of Artificial Sequence: Synthetic oligonucleotide
  Sense strand starting at position 1827 of SEQ ID NO: 1885693
uuacaugcauccucaggaa

SEQ ID NO: 2361227 - RNA, 19 nt, Artificial Sequence
  Description of Artificial Sequence: Synthetic oligonucleotide
  Antisense strand to SEQ ID NO: 2361226
uuccugaggaugcauguaa

SEQ ID NO: 2361228 - RNA, 19 nt, Artificial Sequence
  Description of Artificial Sequence: Synthetic oligonucleotide
  Sense strand starting at position 1916 of SEQ ID NO: 1885693
ggcagaauuugacacuaaa

SEQ ID NO: 2361229 - RNA, 19 nt, Artificial Sequence
  Description of Artificial Sequence: Synthetic oligonucleotide
  Antisense strand to SEQ ID NO: 2361228
uuuagugucaaauucugcc

SEQ ID NO: 2361230 - RNA, 19 nt, Artificial Sequence
  Description of Artificial Sequence: Synthetic oligonucleotide
  Sense strand starting at position 2020 of SEQ ID NO: 1885693
ugagaaauccauugccucu

SEQ ID NO: 2361231 - RNA, 19 nt, Artificial Sequence
  Description of Artificial Sequence: Synthetic oligonucleotide
  Antisense strand to SEQ ID NO: 2361230
agaggcaauggauuucuca

SEQ ID NO: 2361232 - RNA, 19 nt, Artificial Sequence
  Description of Artificial Sequence: Synthetic oligonucleotide
  Sense strand starting at position 2072 of SEQ ID NO: 1885693
guuaggaaugggugggaua

SEQ ID NO: 2361233 - RNA, 19 nt, Artificial Sequence
  Description of Artificial Sequence: Synthetic oligonucleotide
  Antisense strand to SEQ ID NO: 2361232
uaucccacccauuccuaac

SEQ ID NO: 2361234 - RNA, 19 nt, Artificial Sequence
  Description of Artificial Sequence: Synthetic oligonucleotide
  Sense strand starting at position 2074 of SEQ ID NO: 1885693
uaggaaugggugggauagu

SEQ ID NO: 2361235 - RNA, 19 nt, Artificial Sequence
  Description of Artificial Sequence: Synthetic oligonucleotide
  Antisense strand to SEQ ID NO: 2361234
acuaucccacccauuccua

SEQ ID NO: 2361236 - RNA, 19 nt, Artificial Sequence
  Description of Artificial Sequence: Synthetic oligonucleotide
  Sense strand starting at position 2325 of SEQ ID NO: 1885693
caggaugcuggguauuaga

SEQ ID NO: 2361237 - RNA, 19 nt, Artificial Sequence
  Description of Artificial Sequence: Synthetic oligonucleotide
  Antisense strand to SEQ ID NO: 2361236
ucuaauacccagcauccug

SEQ ID NO: 2361238 - RNA, 19 nt, Artificial Sequence
  Description of Artificial Sequence: Synthetic oligonucleotide
  Sense strand starting at position 2372 of SEQ ID NO: 1885693
gcacaugcucugggaagaa

SEQ ID NO: 2361239 - RNA, 19 nt, Artificial Sequence
  Description of Artificial Sequence: Synthetic oligonucleotide
  Antisense strand to SEQ ID NO: 2361238
uucuucccagagcaugugc

SEQ ID NO: 2361240 - RNA, 19 nt, Artificial Sequence
  Description of Artificial Sequence: Synthetic oligonucleotide
  Sense strand starting at position 2630 of SEQ ID NO: 1885693
uggaaagucuuccuggagu

SEQ ID NO: 2361241 - RNA, 19 nt, Artificial Sequence
  Description of Artificial Sequence: Synthetic oligonucleotide
  Antisense strand to SEQ ID NO: 2361240
acuccaggaagacuuucca

SEQ ID NO: 2361242 - RNA, 19 nt, Artificial Sequence
  Description of Artificial Sequence: Synthetic oligonucleotide
  Sense strand starting at position 2649 of SEQ ID NO: 1885693
gggagugaugcugaggguu

SEQ ID NO: 2361243 - RNA, 19 nt, Artificial Sequence
  Description of Artificial Sequence: Synthetic oligonucleotide
  Antisense strand to SEQ ID NO: 2361242
aacccucagcaucacuccc

SEQ ID NO: 2361244 - RNA, 19 nt, Artificial Sequence
  Description of Artificial Sequence: Synthetic oligonucleotide
  Sense strand starting at position 2892 of SEQ ID NO: 1885693
ggauuaucgggccagguga

SEQ ID NO: 2361245 - RNA, 19 nt, Artificial Sequence
  Description of Artificial Sequence: Synthetic oligonucleotide
  Antisense strand to SEQ ID NO: 2361244
ucaccuggcccgauaaucc

SEQ ID NO: 2361246 - RNA, 19 nt, Artificial Sequence
  Description of Artificial Sequence: Synthetic oligonucleotide
  Sense strand starting at position 2907 of SEQ ID NO: 1885693
gugacuuacagcuagguca

SEQ ID NO: 2361247 - RNA, 19 nt, Artificial Sequence
  Description of Artificial Sequence: Synthetic oligonucleotide
  Antisense strand to SEQ ID NO: 2361246
ugaccuagcuguaagucac

SEQ ID NO: 2361248 - RNA, 19 nt, Artificial Sequence
  Description of Artificial Sequence: Synthetic oligonucleotide
  Sense strand starting at position 3011 of SEQ ID NO: 1885693
ccaggaaguccuuagaggu

SEQ ID NO: 2361249 - RNA, 19 nt, Artificial Sequence
  Description of Artificial Sequence: Synthetic oligonucleotide
  Antisense strand to SEQ ID NO: 2361248
accucuaaggacuuccugg

SEQ ID NO: 2361250 - RNA, 19 nt, Artificial Sequence
  Description of Artificial Sequence: Synthetic oligonucleotide
  Sense strand starting at position 3017 of SEQ ID NO: 1885693
aguccuuagagguagcauu

SEQ ID NO: 2361251 - RNA, 19 nt, Artificial Sequence
  Description of Artificial Sequence: Synthetic oligonucleotide
  Antisense strand to SEQ ID NO: 2361250
aaugcuaccucuaaggacu

SEQ ID NO: 2361252 - RNA, 19 nt, Artificial Sequence
  Description of Artificial Sequence: Synthetic oligonucleotide
  Sense strand starting at position 3319 of SEQ ID NO: 1885693
uugaaauugugguccugaa

SEQ ID NO: 2361253 - RNA, 19 nt, Artificial Sequence
  Description of Artificial Sequence: Synthetic oligonucleotide
  Antisense strand to SEQ ID NO: 2361252
uucaggaccacaauuucaa

SEQ ID NO: 2361254 - RNA, 19 nt, Artificial Sequence
  Description of Artificial Sequence: Synthetic oligonucleotide
  Sense strand starting at position 3323 of SEQ ID NO: 1885693
aauugugguccugaaucca

SEQ ID NO: 2361255 - RNA, 19 nt, Artificial Sequence
  Description of Artificial Sequence: Synthetic oligonucleotide
  Antisense strand to SEQ ID NO: 2361254
uggauucaggaccacaauu

SEQ ID NO: 2361256 - RNA, 19 nt, Artificial Sequence
  Description of Artificial Sequence: Synthetic oligonucleotide
  Sense strand starting at position 3343 of SEQ ID NO: 1885693
acgcacaagguuuagaaau

SEQ ID NO: 2361257 - RNA, 19 nt, Artificial Sequence
  Description of Artificial Sequence: Synthetic oligonucleotide
  Antisense strand to SEQ ID NO: 2361256
auuucuaaaccuugugcgu

SEQ ID NO: 2361258 - RNA, 19 nt, Artificial Sequence
  Description of Artificial Sequence: Synthetic oligonucleotide
  Sense strand starting at position 3368 of SEQ ID NO: 1885693
agggaagccacuugucaca

SEQ ID NO: 2361259 - RNA, 19 nt, Artificial Sequence
  Description of Artificial Sequence: Synthetic oligonucleotide
  Antisense strand to SEQ ID NO: 2361258
ugugacaaguggcuucccu

SEQ ID NO: 2361260 - RNA, 19 nt, Artificial Sequence
  Description of Artificial Sequence: Synthetic oligonucleotide
  Sense strand starting at position 3460 of SEQ ID NO: 1885693
ugaguuauccaucaagcac

SEQ ID NO: 2361261 - RNA, 19 nt, Artificial Sequence
  Description of Artificial Sequence: Synthetic oligonucleotide
  Antisense strand to SEQ ID NO: 2361260
gugcuugauggauaacuca

SEQ ID NO: 2361262 - RNA, 19 nt, Artificial Sequence
  Description of Artificial Sequence: Synthetic oligonucleotide
  Sense strand starting at position 3620 of SEQ ID NO: 1885693
cuggguagauucucuauca

SEQ ID NO: 2361263 - RNA, 19 nt, Artificial Sequence
  Description of Artificial Sequence: Synthetic oligonucleotide
  Antisense strand to SEQ ID NO: 2361262
ugauagagaaucuacccag

SEQ ID NO: 2361264 - RNA, 19 nt, Artificial Sequence
  Description of Artificial Sequence: Synthetic oligonucleotide
  Sense strand starting at position 3621 of SEQ ID NO: 1885693
uggguagauucucuaucaa

SEQ ID NO: 2361265 - RNA, 19 nt, Artificial Sequence
  Description of Artificial Sequence: Synthetic oligonucleotide
  Antisense strand to SEQ ID NO: 2361264
uugauagagaaucuaccca

SEQ ID NO: 2361266 - RNA, 19 nt, Artificial Sequence
  Description of Artificial Sequence: Synthetic oligonucleotide
  Sense strand starting at position 3646 of SEQ ID NO: 1885693
uguggucagagugaucuuu

SEQ ID NO: 2361267 - RNA, 19 nt, Artificial Sequence
  Description of Artificial Sequence: Synthetic oligonucleotide
  Antisense strand to SEQ ID NO: 2361266
aaagaucacucugaccaca

SEQ ID NO: 2361268 - RNA, 19 nt, Artificial Sequence
  Description of Artificial Sequence: Synthetic oligonucleotide
  Sense strand starting at position 38 of SEQ ID NO: 1885694
ccaggaaguccuuagaggu

SEQ ID NO: 2361269 - RNA, 19 nt, Artificial Sequence
  Description of Artificial Sequence: Synthetic oligonucleotide
  Antisense strand to SEQ ID NO: 2361268
accucuaaggacuuccugg

SEQ ID NO: 2361270 - RNA, 19 nt, Artificial Sequence
  Description of Artificial Sequence: Synthetic oligonucleotide
  Sense strand starting at position 44 of SEQ ID NO: 1885694
aguccuuagagguagcauu

SEQ ID NO: 2361271 - RNA, 19 nt, Artificial Sequence
  Description of Artificial Sequence: Synthetic oligonucleotide
  Antisense strand to SEQ ID NO: 2361270
aaugcuaccucuaaggacu

SEQ ID NO: 2361272 - RNA, 19 nt, Artificial Sequence
  Description of Artificial Sequence: Synthetic oligonucleotide
  Sense strand starting at position 346 of SEQ ID NO: 1885694
uugaaauugugguccugaa

SEQ ID NO: 2361273 - RNA, 19 nt, Artificial Sequence
  Description of Artificial Sequence: Synthetic oligonucleotide
  Antisense strand to SEQ ID NO: 2361272
uucaggaccacaauuucaa

SEQ ID NO: 2361274 - RNA, 19 nt, Artificial Sequence
  Description of Artificial Sequence: Synthetic oligonucleotide
  Sense strand starting at position 350 of SEQ ID NO: 1885694
aauugugguccugaaucca

SEQ ID NO: 2361275 - RNA, 19 nt, Artificial Sequence
  Description of Artificial Sequence: Synthetic oligonucleotide
  Antisense strand to SEQ ID NO: 2361274
uggauucaggaccacaauu

SEQ ID NO: 2361276 - RNA, 19 nt, Artificial Sequence
  Description of Artificial Sequence: Synthetic oligonucleotide
  Sense strand starting at position 370 of SEQ ID NO: 1885694
acgcacaagguuuagaaau

SEQ ID NO: 2361277 - RNA, 19 nt, Artificial Sequence
  Description of Artificial Sequence: Synthetic oligonucleotide
  Antisense strand to SEQ ID NO: 2361276
auuucuaaaccuugugcgu

SEQ ID NO: 2361278 - RNA, 19 nt, Artificial Sequence
  Description of Artificial Sequence: Synthetic oligonucleotide
  Sense strand starting at position 395 of SEQ ID NO: 1885694
agggaagccacuugucaca

SEQ ID NO: 2361279 - RNA, 19 nt, Artificial Sequence
  Description of Artificial Sequence: Synthetic oligonucleotide
  Antisense strand to SEQ ID NO: 2361278
ugugacaaguggcuucccu

SEQ ID NO: 2361280 - RNA, 19 nt, Artificial Sequence
  Description of Artificial Sequence: Synthetic oligonucleotide
  Sense strand starting at position 487 of SEQ ID NO: 1885694
ugaguuauccaucaagcac

SEQ ID NO: 2361281 - RNA, 19 nt, Artificial Sequence
  Description of Artificial Sequence: Synthetic oligonucleotide
  Antisense strand to SEQ ID NO: 2361280
gugcuugauggauaacuca

SEQ ID NO: 2361282 - RNA, 19 nt, Artificial Sequence
  Description of Artificial Sequence: Synthetic oligonucleotide
  Sense strand starting at position 647 of SEQ ID NO: 1885694
cuggguagauucucuauca

SEQ ID NO: 2361283 - RNA, 19 nt, Artificial Sequence
  Description of Artificial Sequence: Synthetic oligonucleotide
  Antisense strand to SEQ ID NO: 2361282
ugauagagaaucuacccag

SEQ ID NO: 2361284 - RNA, 19 nt, Artificial Sequence
  Description of Artificial Sequence: Synthetic oligonucleotide
  Sense strand starting at position 648 of SEQ ID NO: 1885694
uggguagauucucuaucaa

SEQ ID NO: 2361285 - RNA, 19 nt, Artificial Sequence
  Description of Artificial Sequence: Synthetic oligonucleotide
  Antisense strand to SEQ ID NO: 2361284
uugauagagaaucuaccca

SEQ ID NO: 2361286 - RNA, 19 nt, Artificial Sequence
  Description of Artificial Sequence: Synthetic oligonucleotide
  Sense strand starting at position 673 of SEQ ID NO: 1885694
uguggucagagugaucuuu

SEQ ID NO: 2361287 - RNA, 19 nt, Artificial Sequence
  Description of Artificial Sequence: Synthetic oligonucleotide
  Antisense strand to SEQ ID NO: 2361286
aaagaucacucugaccaca

SEQ ID NO: 2361288 - RNA, 19 nt, Artificial Sequence
  Description of Artificial Sequence: Synthetic oligonucleotide
  Sense strand starting at position 1084 of SEQ ID NO: 1885694
cgucucuuccaccagaaug

SEQ ID NO: 2361289 - RNA, 19 nt, Artificial Sequence
  Description of Artificial Sequence: Synthetic oligonucleotide
  Antisense strand to SEQ ID NO: 2361288
cauucugguggaagagacg

SEQ ID NO: 2361290 - RNA, 19 nt, Artificial Sequence
  Description of Artificial Sequence: Synthetic oligonucleotide
  Sense strand starting at position 1152 of SEQ ID NO: 1885694
gguccagaaucaccuagaa

SEQ ID NO: 2361291 - RNA, 19 nt, Artificial Sequence
  Description of Artificial Sequence: Synthetic oligonucleotide
  Antisense strand to SEQ ID NO: 2361290
uucuaggugauucuggacc

SEQ ID NO: 2361292 - RNA, 19 nt, Artificial Sequence
  Description of Artificial Sequence: Synthetic oligonucleotide
  Sense strand starting at position 1176 of SEQ ID NO: 1885694
ugugcacuccaucacuauu

SEQ ID NO: 2361293 - RNA, 19 nt, Artificial Sequence
  Description of Artificial Sequence: Synthetic oligonucleotide
  Antisense strand to SEQ ID NO: 2361292
aauagugauggagugcaca

SEQ ID NO: 2361294 - RNA, 19 nt, Artificial Sequence
  Description of Artificial Sequence: Synthetic oligonucleotide
  Sense strand starting at position 1186 of SEQ ID NO: 1885694
aucacuauuuauggaauga

SEQ ID NO: 2361295 - RNA, 19 nt, Artificial Sequence
  Description of Artificial Sequence: Synthetic oligonucleotide
  Antisense strand to SEQ ID NO: 2361294
ucauuccauaaauagugau

SEQ ID NO: 2361296 - RNA, 19 nt, Artificial Sequence
  Description of Artificial Sequence: Synthetic oligonucleotide
  Sense strand starting at position 1208 of SEQ ID NO: 1885694
agucauuccuuguuauuug

SEQ ID NO: 2361297 - RNA, 19 nt, Artificial Sequence
  Description of Artificial Sequence: Synthetic oligonucleotide
  Antisense strand to SEQ ID NO: 2361296
caaauaacaaggaaugacu

SEQ ID NO: 2361298 - RNA, 19 nt, Artificial Sequence
  Description of Artificial Sequence: Synthetic oligonucleotide
  Sense strand starting at position 1231 of SEQ ID NO: 1885694
acucaugaaccauguaguu

SEQ ID NO: 2361299 - RNA, 19 nt, Artificial Sequence
  Description of Artificial Sequence: Synthetic oligonucleotide
  Antisense strand to SEQ ID NO: 2361298
aacuacaugguucaugagu

SEQ ID NO: 2361300 - RNA, 19 nt, Artificial Sequence
  Description of Artificial Sequence: Synthetic oligonucleotide
  Sense strand starting at position 1244 of SEQ ID NO: 1885694
guaguuaugcuauaaacaa

SEQ ID NO: 2361301 - RNA, 19 nt, Artificial Sequence
  Description of Artificial Sequence: Synthetic oligonucleotide
  Antisense strand to SEQ ID NO: 2361300
uuguuuauagcauaacuac

SEQ ID NO: 2361302 - RNA, 19 nt, Artificial Sequence
  Description of Artificial Sequence: Synthetic oligonucleotide
  Sense strand starting at position 1305 of SEQ ID NO: 1885694
aaaucaugguggccaaagu

SEQ ID NO: 2361303 - RNA, 19 nt, Artificial Sequence
  Description of Artificial Sequence: Synthetic oligonucleotide
  Antisense strand to SEQ ID NO: 2361302
acuuuggccaccaugauuu

SEQ ID NO: 2361304 - RNA, 19 nt, Artificial Sequence
  Description of Artificial Sequence: Synthetic oligonucleotide
  Sense strand starting at position 1475 of SEQ ID NO: 1885694
ggcggugcugcuuccagaa

SEQ ID NO: 2361305 - RNA, 19 nt, Artificial Sequence
  Description of Artificial Sequence: Synthetic oligonucleotide
  Antisense strand to SEQ ID NO: 2361304
uucuggaagcagcaccgcc

SEQ ID NO: 2361306 - RNA, 19 nt, Artificial Sequence
  Description of Artificial Sequence: Synthetic oligonucleotide
  Sense strand starting at position 1579 of SEQ ID NO: 1885694
ggcugaugacaguaacacu

SEQ ID NO: 2361307 - RNA, 19 nt, Artificial Sequence
  Description of Artificial Sequence: Synthetic oligonucleotide
  Antisense strand to SEQ ID NO: 2361306
aguguuacugucaucagcc

SEQ ID NO: 2361308 - RNA, 19 nt, Artificial Sequence
  Description of Artificial Sequence: Synthetic oligonucleotide
  Sense strand starting at position 1604 of SEQ ID NO: 1885694
ccagcaugucuccagagau

SEQ ID NO: 2361309 - RNA, 19 nt, Artificial Sequence
  Description of Artificial Sequence: Synthetic oligonucleotide
  Antisense strand to SEQ ID NO: 2361308
aucucuggagacaugcugg

SEQ ID NO: 2361310 - RNA, 19 nt, Artificial Sequence
  Description of Artificial Sequence: Synthetic oligonucleotide
  Sense strand starting at position 1792 of SEQ ID NO: 1885694
ggcuguggcacaugaagaa

SEQ ID NO: 2361311 - RNA, 19 nt, Artificial Sequence
  Description of Artificial Sequence: Synthetic oligonucleotide
  Antisense strand to SEQ ID NO: 2361310
uucuucaugugccacagcc

SEQ ID NO: 2361312 - RNA, 19 nt, Artificial Sequence
  Description of Artificial Sequence: Synthetic oligonucleotide
  Sense strand starting at position 1820 of SEQ ID NO: 1885694
cugcgauggcccguucaca

SEQ ID NO: 2361313 - RNA, 19 nt, Artificial Sequence
  Description of Artificial Sequence: Synthetic oligonucleotide
  Antisense strand to SEQ ID NO: 2361312
ugugaacgggccaucgcag

SEQ ID NO: 2361314 - RNA, 19 nt, Artificial Sequence
  Description of Artificial Sequence: Synthetic oligonucleotide
  Sense strand starting at position 1821 of SEQ ID NO: 1885694
ugcgauggcccguucacau

SEQ ID NO: 2361315 - RNA, 19 nt, Artificial Sequence
  Description of Artificial Sequence: Synthetic oligonucleotide
  Antisense strand to SEQ ID NO: 2361314
augugaacgggccaucgca

SEQ ID NO: 2361316 - RNA, 19 nt, Artificial Sequence
  Description of Artificial Sequence: Synthetic oligonucleotide
  Sense strand starting at position 2231 of SEQ ID NO: 1885694
ccucaugagacugggcaua

SEQ ID NO: 2361317 - RNA, 19 nt, Artificial Sequence
  Description of Artificial Sequence: Synthetic oligonucleotide
  Antisense strand to SEQ ID NO: 2361316
uaugcccagucucaugagg

SEQ ID NO: 2361318 - RNA, 19 nt, Artificial Sequence
  Description of Artificial Sequence: Synthetic oligonucleotide
  Sense strand starting at position 2233 of SEQ ID NO: 1885694
ucaugagacugggcauaaa

SEQ ID NO: 2361319 - RNA, 19 nt, Artificial Sequence
  Description of Artificial Sequence: Synthetic oligonucleotide
  Antisense strand to SEQ ID NO: 2361318
uuuaugcccagucucauga

SEQ ID NO: 2361320 - RNA, 19 nt, Artificial Sequence
  Description of Artificial Sequence: Synthetic oligonucleotide
  Sense strand starting at position 2345 of SEQ ID NO: 1885694
uccagaagucacuggauag

SEQ ID NO: 2361321 - RNA, 19 nt, Artificial Sequence
  Description of Artificial Sequence: Synthetic oligonucleotide
  Antisense strand to SEQ ID NO: 2361320
cuauccagugacuucugga

SEQ ID NO: 2361322 - RNA, 19 nt, Artificial Sequence
  Description of Artificial Sequence: Synthetic oligonucleotide
  Sense strand starting at position 2607 of SEQ ID NO: 1885694
augugagucuuacuccaau

SEQ ID NO: 2361323 - RNA, 19 nt, Artificial Sequence
  Description of Artificial Sequence: Synthetic oligonucleotide
  Antisense strand to SEQ ID NO: 2361322
auuggaguaagacucacau

SEQ ID NO: 2361324 - RNA, 19 nt, Artificial Sequence
  Description of Artificial Sequence: Synthetic oligonucleotide
  Sense strand starting at position 2613 of SEQ ID NO: 1885694
gucuuacuccaaugaagac

SEQ ID NO: 2361325 - RNA, 19 nt, Artificial Sequence
  Description of Artificial Sequence: Synthetic oligonucleotide
  Antisense strand to SEQ ID NO: 2361324
gucuucauuggaguaagac

SEQ ID NO: 2361326 - RNA, 19 nt, Artificial Sequence
  Description of Artificial Sequence: Synthetic oligonucleotide
  Sense strand starting at position 2644 of SEQ ID NO: 1885694
augggucauccuuacgagu

SEQ ID NO: 2361327 - RNA, 19 nt, Artificial Sequence
  Description of Artificial Sequence: Synthetic oligonucleotide
  Antisense strand to SEQ ID NO: 2361326
acucguaaggaugacccau

SEQ ID NO: 2361328 - RNA, 19 nt, Artificial Sequence
  Description of Artificial Sequence: Synthetic oligonucleotide
  Sense strand starting at position 2872 of SEQ ID NO: 1885694
gugaccuggcuugauaauc

SEQ ID NO: 2361329 - RNA, 19 nt, Artificial Sequence
  Description of Artificial Sequence: Synthetic oligonucleotide
  Antisense strand to SEQ ID NO: 2361328
gauuaucaagccaggucac

SEQ ID NO: 2361330 - RNA, 19 nt, Artificial Sequence
  Description of Artificial Sequence: Synthetic oligonucleotide
  Sense strand starting at position 3022 of SEQ ID NO: 1885694
ugacccauuuaauagguau

SEQ ID NO: 2361331 - RNA, 19 nt, Artificial Sequence
  Description of Artificial Sequence: Synthetic oligonucleotide
  Antisense strand to SEQ ID NO: 2361330
auaccuauuaaauggguca

SEQ ID NO: 2361332 - RNA, 19 nt, Artificial Sequence
  Description of Artificial Sequence: Synthetic oligonucleotide
  Sense strand starting at position 3093 of SEQ ID NO: 1885694
aauggucuugcccagaagu

SEQ ID NO: 2361333 - RNA, 19 nt, Artificial Sequence
  Description of Artificial Sequence: Synthetic oligonucleotide
  Antisense strand to SEQ ID NO: 2361332
acuucugggcaagaccauu

SEQ ID NO: 2361334 - RNA, 19 nt, Artificial Sequence
  Description of Artificial Sequence: Synthetic oligonucleotide
  Sense strand starting at position 3124 of SEQ ID NO: 1885694
gguugcuugggccauugaa

SEQ ID NO: 2361335 - RNA, 19 nt, Artificial Sequence
  Description of Artificial Sequence: Synthetic oligonucleotide
  Antisense strand to SEQ ID NO: 2361334
uucaauggcccaagcaacc

SEQ ID NO: 2361336 - RNA, 19 nt, Artificial Sequence
  Description of Artificial Sequence: Synthetic oligonucleotide
  Sense strand starting at position 3388 of SEQ ID NO: 1885694
uggaaugaauucucugggu

SEQ ID NO: 2361337 - RNA, 19 nt, Artificial Sequence
  Description of Artificial Sequence: Synthetic oligonucleotide
  Antisense strand to SEQ ID NO: 2361336
acccagagaauucauucca

SEQ ID NO: 2361338 - RNA, 19 nt, Artificial Sequence
  Description of Artificial Sequence: Synthetic oligonucleotide
  Sense strand starting at position 3390 of SEQ ID NO: 1885694
gaaugaauucucuggguua

SEQ ID NO: 2361339 - RNA, 19 nt, Artificial Sequence
  Description of Artificial Sequence: Synthetic oligonucleotide
  Antisense strand to SEQ ID NO: 2361338
uaacccagagaauucauuc

SEQ ID NO: 2361340 - RNA, 19 nt, Artificial Sequence
  Description of Artificial Sequence: Synthetic oligonucleotide
  Sense strand starting at position 3403 of SEQ ID NO: 1885694
ggguuagcugugcagagaa

SEQ ID NO: 2361341 - RNA, 19 nt, Artificial Sequence
  Description of Artificial Sequence: Synthetic oligonucleotide
  Antisense strand to SEQ ID NO: 2361340
uucucugcacagcuaaccc

SEQ ID NO: 2361342 - RNA, 19 nt, Artificial Sequence
  Description of Artificial Sequence: Synthetic oligonucleotide
  Sense strand starting at position 3405 of SEQ ID NO: 1885694
guuagcugugcagagaaca

SEQ ID NO: 2361343 - RNA, 19 nt, Artificial Sequence
  Description of Artificial Sequence: Synthetic oligonucleotide
  Antisense strand to SEQ ID NO: 2361342
uguucucugcacagcuaac

SEQ ID NO: 2361344 - RNA, 19 nt, Artificial Sequence
  Description of Artificial Sequence: Synthetic oligonucleotide
  Sense strand starting at position 3417 of SEQ ID NO: 1885694
gagaacacauucgucaaca

SEQ ID NO: 2361345 - RNA, 19 nt, Artificial Sequence
  Description of Artificial Sequence: Synthetic oligonucleotide
  Antisense strand to SEQ ID NO: 2361344
uguugacgaauguguucuc

SEQ ID NO: 2361346 - RNA, 19 nt, Artificial Sequence
  Description of Artificial Sequence: Synthetic oligonucleotide
  Sense strand starting at position 3418 of SEQ ID NO: 1885694
agaacacauucgucaacaa

SEQ ID NO: 2361347 - RNA, 19 nt, Artificial Sequence
  Description of Artificial Sequence: Synthetic oligonucleotide
  Antisense strand to SEQ ID NO: 2361346
uuguugacgaauguguucu

SEQ ID NO: 2361348 - RNA, 19 nt, Artificial Sequence
  Description of Artificial Sequence: Synthetic oligonucleotide
  Sense strand starting at position 47 of SEQ ID NO: 1885695
acaggaaauguacggaguu

SEQ ID NO: 2361349 - RNA, 19 nt, Artificial Sequence
  Description of Artificial Sequence: Synthetic oligonucleotide
  Antisense strand to SEQ ID NO: 2361348
aacuccguacauuuccugu

SEQ ID NO: 2361350 - RNA, 19 nt, Artificial Sequence
  Description of Artificial Sequence: Synthetic oligonucleotide
  Sense strand starting at position 75 of SEQ ID NO: 1885695
guuugcauucccuacagga

SEQ ID NO: 2361351 - RNA, 19 nt, Artificial Sequence
  Description of Artificial Sequence: Synthetic oligonucleotide
  Antisense strand to SEQ ID NO: 2361350
uccuguagggaaugcaaac

SEQ ID NO: 2361352 - RNA, 19 nt, Artificial Sequence
  Description of Artificial Sequence: Synthetic oligonucleotide
  Sense strand starting at position 183 of SEQ ID NO: 1885695
ccggcaucucuccaaggaa

SEQ ID NO: 2361353 - RNA, 19 nt, Artificial Sequence
  Description of Artificial Sequence: Synthetic oligonucleotide
  Antisense strand to SEQ ID NO: 2361352
uuccuuggagagaugccgg

SEQ ID NO: 2361354 - RNA, 19 nt, Artificial Sequence
  Description of Artificial Sequence: Synthetic oligonucleotide
  Sense strand starting at position 186 of SEQ ID NO: 1885695
gcaucucuccaaggaauuc

SEQ ID NO: 2361355 - RNA, 19 nt, Artificial Sequence
  Description of Artificial Sequence: Synthetic oligonucleotide
  Antisense strand to SEQ ID NO: 2361354
gaauuccuuggagagaugc

SEQ ID NO: 2361356 - RNA, 19 nt, Artificial Sequence
  Description of Artificial Sequence: Synthetic oligonucleotide
  Sense strand starting at position 201 of SEQ ID NO: 1885695
auuccucguggcuaagauu

SEQ ID NO: 2361357 - RNA, 19 nt, Artificial Sequence
  Description of Artificial Sequence: Synthetic oligonucleotide
  Antisense strand to SEQ ID NO: 2361356
aaucuuagccacgaggaau

SEQ ID NO: 2361358 - RNA, 19 nt, Artificial Sequence
  Description of Artificial Sequence: Synthetic oligonucleotide
  Sense strand starting at position 315 of SEQ ID NO: 1885695
gcuagcauuuguccaagga

SEQ ID NO: 2361359 - RNA, 19 nt, Artificial Sequence
  Description of Artificial Sequence: Synthetic oligonucleotide
  Antisense strand to SEQ ID NO: 2361358
uccuuggacaaaugcuagc

SEQ ID NO: 2361360 - RNA, 19 nt, Artificial Sequence
  Description of Artificial Sequence: Synthetic oligonucleotide
  Sense strand starting at position 354 of SEQ ID NO: 1885695
uucugagaucacuggauuc

SEQ ID NO: 2361361 - RNA, 19 nt, Artificial Sequence
  Description of Artificial Sequence: Synthetic oligonucleotide
  Antisense strand to SEQ ID NO: 2361360
gaauccagugaucucagaa

SEQ ID NO: 2361362 - RNA, 19 nt, Artificial Sequence
  Description of Artificial Sequence: Synthetic oligonucleotide
  Sense strand starting at position 583 of SEQ ID NO: 1885695
gggcaucuucuccaaaguu

SEQ ID NO: 2361363 - RNA, 19 nt, Artificial Sequence
  Description of Artificial Sequence: Synthetic oligonucleotide
  Antisense strand to SEQ ID NO: 2361362
aacuuuggagaagaugccc

SEQ ID NO: 2361364 - RNA, 19 nt, Artificial Sequence
  Description of Artificial Sequence: Synthetic oligonucleotide
  Sense strand starting at position 603 of SEQ ID NO: 1885695
gugucucuuccagaaaguu

SEQ ID NO: 2361365 - RNA, 19 nt, Artificial Sequence
  Description of Artificial Sequence: Synthetic oligonucleotide
  Antisense strand to SEQ ID NO: 2361364
aacuuucuggaagagacac

SEQ ID NO: 2361366 - RNA, 19 nt, Artificial Sequence
  Description of Artificial Sequence: Synthetic oligonucleotide
  Sense strand starting at position 612 of SEQ ID NO: 1885695
ccagaaaguucuucucagg

SEQ ID NO: 2361367 - RNA, 19 nt, Artificial Sequence
  Description of Artificial Sequence: Synthetic oligonucleotide
  Antisense strand to SEQ ID NO: 2361366
ccugagaagaacuuucugg

SEQ ID NO: 2361368 - RNA, 19 nt, Artificial Sequence
  Description of Artificial Sequence: Synthetic oligonucleotide
  Sense strand starting at position 736 of SEQ ID NO: 1885695
augaucggucccuaagguu

SEQ ID NO: 2361369 - RNA, 19 nt, Artificial Sequence
  Description of Artificial Sequence: Synthetic oligonucleotide
  Antisense strand to SEQ ID NO: 2361368
aaccuuagggaccgaucau

SEQ ID NO: 2361370 - RNA, 19 nt, Artificial Sequence
  Description of Artificial Sequence: Synthetic oligonucleotide
  Sense strand starting at position 782 of SEQ ID NO: 1885695
gaagcaggauuugauaagu

SEQ ID NO: 2361371 - RNA, 19 nt, Artificial Sequence
  Description of Artificial Sequence: Synthetic oligonucleotide
  Antisense strand to SEQ ID NO: 2361370
acuuaucaaauccugcuuc

SEQ ID NO: 2361372 - RNA, 19 nt, Artificial Sequence
  Description of Artificial Sequence: Synthetic oligonucleotide
  Sense strand starting at position 791 of SEQ ID NO: 1885695
uuugauaaguagcuugaau

SEQ ID NO: 2361373 - RNA, 19 nt, Artificial Sequence
  Description of Artificial Sequence: Synthetic oligonucleotide
  Antisense strand to SEQ ID NO: 2361372
auucaagcuacuuaucaaa

SEQ ID NO: 2361374 - RNA, 19 nt, Artificial Sequence
  Description of Artificial Sequence: Synthetic oligonucleotide
  Sense strand starting at position 842 of SEQ ID NO: 1885695
augcaaaucccugauagca

SEQ ID NO: 2361375 - RNA, 19 nt, Artificial Sequence
  Description of Artificial Sequence: Synthetic oligonucleotide
  Antisense strand to SEQ ID NO: 2361374
ugcuaucagggauuugcau

SEQ ID NO: 2361376 - RNA, 19 nt, Artificial Sequence
  Description of Artificial Sequence: Synthetic oligonucleotide
  Sense strand starting at position 999 of SEQ ID NO: 1885695
cgugcaucccuuuacagaa

SEQ ID NO: 2361377 - RNA, 19 nt, Artificial Sequence
  Description of Artificial Sequence: Synthetic oligonucleotide
  Antisense strand to SEQ ID NO: 2361376
uucuguaaagggaugcacg

SEQ ID NO: 2361378 - RNA, 19 nt, Artificial Sequence
  Description of Artificial Sequence: Synthetic oligonucleotide
  Sense strand starting at position 1163 of SEQ ID NO: 1885695
aggucuuuggcucaagguu

SEQ ID NO: 2361379 - RNA, 19 nt, Artificial Sequence
  Description of Artificial Sequence: Synthetic oligonucleotide
  Antisense strand to SEQ ID NO: 2361378
aaccuugagccaaagaccu

SEQ ID NO: 2361380 - RNA, 19 nt, Artificial Sequence
  Description of Artificial Sequence: Synthetic oligonucleotide
  Sense strand starting at position 1385 of SEQ ID NO: 1885695
cagggacugucucucuuaa

SEQ ID NO: 2361381 - RNA, 19 nt, Artificial Sequence
  Description of Artificial Sequence: Synthetic oligonucleotide
  Antisense strand to SEQ ID NO: 2361380
uuaagagagacagucccug

SEQ ID NO: 2361382 - RNA, 19 nt, Artificial Sequence
  Description of Artificial Sequence: Synthetic oligonucleotide
  Sense strand starting at position 1387 of SEQ ID NO: 1885695
gggacugucucucuuaagu

SEQ ID NO: 2361383 - RNA, 19 nt, Artificial Sequence
  Description of Artificial Sequence: Synthetic oligonucleotide
  Antisense strand to SEQ ID NO: 2361382
acuuaagagagacaguccc

SEQ ID NO: 2361384 - RNA, 19 nt, Artificial Sequence
  Description of Artificial Sequence: Synthetic oligonucleotide
  Sense strand starting at position 1395 of SEQ ID NO: 1885695
cucucuuaaguggagcaaa

SEQ ID NO: 2361385 - RNA, 19 nt, Artificial Sequence
  Description of Artificial Sequence: Synthetic oligonucleotide
  Antisense strand to SEQ ID NO: 2361384
uuugcuccacuuaagagag

SEQ ID NO: 2361386 - RNA, 19 nt, Artificial Sequence
  Description of Artificial Sequence: Synthetic oligonucleotide
  Sense strand starting at position 1446 of SEQ ID NO: 1885695
uguggcauucuguaucaaa

SEQ ID NO: 2361387 - RNA, 19 nt, Artificial Sequence
  Description of Artificial Sequence: Synthetic oligonucleotide
  Antisense strand to SEQ ID NO: 2361386
uuugauacagaaugccaca

SEQ ID NO: 2361388 - RNA, 19 nt, Artificial Sequence
  Description of Artificial Sequence: Synthetic oligonucleotide
  Sense strand starting at position 1556 of SEQ ID NO: 1885695
uuccauacccgaugaagga

SEQ ID NO: 2361389 - RNA, 19 nt, Artificial Sequence
  Description of Artificial Sequence: Synthetic oligonucleotide
  Antisense strand to SEQ ID NO: 2361388
uccuucaucggguauggaa

SEQ ID NO: 2361390 - RNA, 19 nt, Artificial Sequence
  Description of Artificial Sequence: Synthetic oligonucleotide
  Sense strand starting at position 1773 of SEQ ID NO: 1885695
ccaagaaauggacgccaau

SEQ ID NO: 2361391 - RNA, 19 nt, Artificial Sequence
  Description of Artificial Sequence: Synthetic oligonucleotide
  Antisense strand to SEQ ID NO: 2361390
auuggcguccauuucuugg

SEQ ID NO: 2361392 - RNA, 19 nt, Artificial Sequence
  Description of Artificial Sequence: Synthetic oligonucleotide
  Sense strand starting at position 1779 of SEQ ID NO: 1885695
aauggacgccaaugugauu

SEQ ID NO: 2361393 - RNA, 19 nt, Artificial Sequence
  Description of Artificial Sequence: Synthetic oligonucleotide
  Antisense strand to SEQ ID NO: 2361392
aaucacauuggcguccauu

SEQ ID NO: 2361394 - RNA, 19 nt, Artificial Sequence
  Description of Artificial Sequence: Synthetic oligonucleotide
  Sense strand starting at position 1830 of SEQ ID NO: 1885695
cgaugagauccuugcccaa

SEQ ID NO: 2361395 - RNA, 19 nt, Artificial Sequence
  Description of Artificial Sequence: Synthetic oligonucleotide
  Antisense strand to SEQ ID NO: 2361394
uugggcaaggaucucaucg

SEQ ID NO: 2361396 - RNA, 19 nt, Artificial Sequence
  Description of Artificial Sequence: Synthetic oligonucleotide
  Sense strand starting at position 1855 of SEQ ID NO: 1885695
acgguuaguaaaugucaga

SEQ ID NO: 2361397 - RNA, 19 nt, Artificial Sequence
  Description of Artificial Sequence: Synthetic oligonucleotide
  Antisense strand to SEQ ID NO: 2361396
ucugacauuuacuaaccgu

SEQ ID NO: 2361398 - RNA, 19 nt, Artificial Sequence
  Description of Artificial Sequence: Synthetic oligonucleotide
  Sense strand starting at position 1862 of SEQ ID NO: 1885695
guaaaugucagagguggga

SEQ ID NO: 2361399 - RNA, 19 nt, Artificial Sequence
  Description of Artificial Sequence: Synthetic oligonucleotide
  Antisense strand to SEQ ID NO: 2361398
ucccaccucugacauuuac

SEQ ID NO: 2361400 - RNA, 19 nt, Artificial Sequence
  Description of Artificial Sequence: Synthetic oligonucleotide
  Sense strand starting at position 2069 of SEQ ID NO: 1885695
ggaugaauuagaugcugag

SEQ ID NO: 2361401 - RNA, 19 nt, Artificial Sequence
  Description of Artificial Sequence: Synthetic oligonucleotide
  Antisense strand to SEQ ID NO: 2361400
cucagcaucuaauucaucc

SEQ ID NO: 2361402 - RNA, 19 nt, Artificial Sequence
  Description of Artificial Sequence: Synthetic oligonucleotide
  Sense strand starting at position 2073 of SEQ ID NO: 1885695
gaauuagaugcugaggguu

SEQ ID NO: 2361403 - RNA, 19 nt, Artificial Sequence
  Description of Artificial Sequence: Synthetic oligonucleotide
  Antisense strand to SEQ ID NO: 2361402
aacccucagcaucuaauuc

SEQ ID NO: 2361404 - RNA, 19 nt, Artificial Sequence
  Description of Artificial Sequence: Synthetic oligonucleotide
  Sense strand starting at position 2313 of SEQ ID NO: 1885695
ucccuaaagucauccaggu

SEQ ID NO: 2361405 - RNA, 19 nt, Artificial Sequence
  Description of Artificial Sequence: Synthetic oligonucleotide
  Antisense strand to SEQ ID NO: 2361404
accuggaugacuuuaggga

SEQ ID NO: 2361406 - RNA, 19 nt, Artificial Sequence
  Description of Artificial Sequence: Synthetic oligonucleotide
  Sense strand starting at position 2337 of SEQ ID NO: 1885695
ugaaguccucucugugaag

SEQ ID NO: 2361407 - RNA, 19 nt, Artificial Sequence
  Description of Artificial Sequence: Synthetic oligonucleotide
  Antisense strand to SEQ ID NO: 2361406
cuucacagagaggacuuca

SEQ ID NO: 2361408 - RNA, 19 nt, Artificial Sequence
  Description of Artificial Sequence: Synthetic oligonucleotide
  Sense strand starting at position 2363 of SEQ ID NO: 1885695
ccgugaacgauuugccaca

SEQ ID NO: 2361409 - RNA, 19 nt, Artificial Sequence
  Description of Artificial Sequence: Synthetic oligonucleotide
  Antisense strand to SEQ ID NO: 2361408
uguggcaaaucguucacgg

SEQ ID NO: 2361410 - RNA, 19 nt, Artificial Sequence
  Description of Artificial Sequence: Synthetic oligonucleotide
  Sense strand starting at position 2447 of SEQ ID NO: 1885695
caagacaagguuugauacu

SEQ ID NO: 2361411 - RNA, 19 nt, Artificial Sequence
  Description of Artificial Sequence: Synthetic oligonucleotide
  Antisense strand to SEQ ID NO: 2361410
aguaucaaaccuugucuug

SEQ ID NO: 2361412 - RNA, 19 nt, Artificial Sequence
  Description of Artificial Sequence: Synthetic oligonucleotide
  Sense strand starting at position 2453 of SEQ ID NO: 1885695
aagguuugauacucacaga

SEQ ID NO: 2361413 - RNA, 19 nt, Artificial Sequence
  Description of Artificial Sequence: Synthetic oligonucleotide
  Antisense strand to SEQ ID NO: 2361412
ucugugaguaucaaaccuu

SEQ ID NO: 2361414 - RNA, 19 nt, Artificial Sequence
  Description of Artificial Sequence: Synthetic oligonucleotide
  Sense strand starting at position 2771 of SEQ ID NO: 1885695
auuagaacuuguuccugaa

SEQ ID NO: 2361415 - RNA, 19 nt, Artificial Sequence
  Description of Artificial Sequence: Synthetic oligonucleotide
  Antisense strand to SEQ ID NO: 2361414
uucaggaacaaguucuaau

SEQ ID NO: 2361416 - RNA, 19 nt, Artificial Sequence
  Description of Artificial Sequence: Synthetic oligonucleotide
  Sense strand starting at position 2894 of SEQ ID NO: 1885695
gcaccucuccaggaaguuu

SEQ ID NO: 2361417 - RNA, 19 nt, Artificial Sequence
  Description of Artificial Sequence: Synthetic oligonucleotide
  Antisense strand to SEQ ID NO: 2361416
aaacuuccuggagaggugc

SEQ ID NO: 2361418 - RNA, 19 nt, Artificial Sequence
  Description of Artificial Sequence: Synthetic oligonucleotide
  Sense strand starting at position 3235 of SEQ ID NO: 1885695
cagguuaugugacucauua

SEQ ID NO: 2361419 - RNA, 19 nt, Artificial Sequence
  Description of Artificial Sequence: Synthetic oligonucleotide
  Antisense strand to SEQ ID NO: 2361418
uaaugagucacauaaccug

SEQ ID NO: 2361420 - RNA, 19 nt, Artificial Sequence
  Description of Artificial Sequence: Synthetic oligonucleotide
  Sense strand starting at position 3239 of SEQ ID NO: 1885695
uuaugugacucauuaccca

SEQ ID NO: 2361421 - RNA, 19 nt, Artificial Sequence
  Description of Artificial Sequence: Synthetic oligonucleotide
  Antisense strand to SEQ ID NO: 2361420
uggguaaugagucacauaa

SEQ ID NO: 2361422 - RNA, 19 nt, Artificial Sequence
  Description of Artificial Sequence: Synthetic oligonucleotide
  Sense strand starting at position 3398 of SEQ ID NO: 1885695
caaggagugucuccacaaa

SEQ ID NO: 2361423 - RNA, 19 nt, Artificial Sequence
  Description of Artificial Sequence: Synthetic oligonucleotide
  Antisense strand to SEQ ID NO: 2361422
uuuguggagacacuccuug

SEQ ID NO: 2361424 - RNA, 19 nt, Artificial Sequence
  Description of Artificial Sequence: Synthetic oligonucleotide
  Sense strand starting at position 3893 of SEQ ID NO: 1885695
guguaugacuugguaccaa

SEQ ID NO: 2361425 - RNA, 19 nt, Artificial Sequence
  Description of Artificial Sequence: Synthetic oligonucleotide
  Antisense strand to SEQ ID NO: 2361424
uugguaccaagucauacac

SEQ ID NO: 2361426 - RNA, 19 nt, Artificial Sequence
  Description of Artificial Sequence: Synthetic oligonucleotide
  Sense strand starting at position 3920 of SEQ ID NO: 1885695
agaucaaugugugauuuau

SEQ ID NO: 2361427 - RNA, 19 nt, Artificial Sequence
  Description of Artificial Sequence: Synthetic oligonucleotide
  Antisense strand to SEQ ID NO: 2361426
auaaaucacacauugaucu

SEQ ID NO: 2361428 - RNA, 19 nt, Artificial Sequence
  Description of Artificial Sequence: Synthetic oligonucleotide
  Sense strand starting at position 81 of SEQ ID NO: 1885696
ucagaaguuucuccagcaa

SEQ ID NO: 2361429 - RNA, 19 nt, Artificial Sequence
  Description of Artificial Sequence: Synthetic oligonucleotide
  Antisense strand to SEQ ID NO: 2361428
uugcuggagaaacuucuga

SEQ ID NO: 2361430 - RNA, 19 nt, Artificial Sequence
  Description of Artificial Sequence: Synthetic oligonucleotide
  Sense strand starting at position 1073 of SEQ ID NO: 1885696
ucuaauucugaacgagaua

SEQ ID NO: 2361431 - RNA, 19 nt, Artificial Sequence
  Description of Artificial Sequence: Synthetic oligonucleotide
  Antisense strand to SEQ ID NO: 2361430
uaucucguucagaauuaga

SEQ ID NO: 2361432 - RNA, 19 nt, Artificial Sequence
  Description of Artificial Sequence: Synthetic oligonucleotide
  Sense strand starting at position 1196 of SEQ ID NO: 1885696
gaauacugagugugcucua

SEQ ID NO: 2361433 - RNA, 19 nt, Artificial Sequence
  Description of Artificial Sequence: Synthetic oligonucleotide
  Antisense strand to SEQ ID NO: 2361432
uagagcacacucaguauuc

SEQ ID NO: 2361434 - RNA, 19 nt, Artificial Sequence
  Description of Artificial Sequence: Synthetic oligonucleotide
  Sense strand starting at position 1295 of SEQ ID NO: 1885696
aucacagguucuuccuaga

SEQ ID NO: 2361435 - RNA, 19 nt, Artificial Sequence
  Description of Artificial Sequence: Synthetic oligonucleotide
  Antisense strand to SEQ ID NO: 2361434
ucuaggaagaaccugugau

SEQ ID NO: 2361436 - RNA, 19 nt, Artificial Sequence
  Description of Artificial Sequence: Synthetic oligonucleotide
  Sense strand starting at position 1298 of SEQ ID NO: 1885696
acagguucuuccuagacac

SEQ ID NO: 2361437 - RNA, 19 nt, Artificial Sequence
  Description of Artificial Sequence: Synthetic oligonucleotide
  Antisense strand to SEQ ID NO: 2361436
gugucuaggaagaaccugu

SEQ ID NO: 2361438 - RNA, 19 nt, Artificial Sequence
  Description of Artificial Sequence: Synthetic oligonucleotide
  Sense strand starting at position 1325 of SEQ ID NO: 1885696
cccagauucuggcuuucca

SEQ ID NO: 2361439 - RNA, 19 nt, Artificial Sequence
  Description of Artificial Sequence: Synthetic oligonucleotide
  Antisense strand to SEQ ID NO: 2361438
uggaaagccagaaucuggg

SEQ ID NO: 2361440 - RNA, 19 nt, Artificial Sequence
  Description of Artificial Sequence: Synthetic oligonucleotide
  Sense strand starting at position 1461 of SEQ ID NO: 1885696
aaacguacaucguuaacaa

SEQ ID NO: 2361441 - RNA, 19 nt, Artificial Sequence
  Description of Artificial Sequence: Synthetic oligonucleotide
  Antisense strand to SEQ ID NO: 2361440
uuguuaacgauguacguuu

SEQ ID NO: 2361442 - RNA, 19 nt, Artificial Sequence
  Description of Artificial Sequence: Synthetic oligonucleotide
  Sense strand starting at position 1462 of SEQ ID NO: 1885696
aacguacaucguuaacaau

SEQ ID NO: 2361443 - RNA, 19 nt, Artificial Sequence
  Description of Artificial Sequence: Synthetic oligonucleotide
  Antisense strand to SEQ ID NO: 2361442
auuguuaacgauguacguu

SEQ ID NO: 2361444 - RNA, 19 nt, Artificial Sequence
  Description of Artificial Sequence: Synthetic oligonucleotide
  Sense strand starting at position 1566 of SEQ ID NO: 1885696
gcaggaaucuugccaagga

SEQ ID NO: 2361445 - RNA, 19 nt, Artificial Sequence
  Description of Artificial Sequence: Synthetic oligonucleotide
  Antisense strand to SEQ ID NO: 2361444
uccuuggcaagauuccugc

SEQ ID NO: 2361446 - RNA, 19 nt, Artificial Sequence
  Description of Artificial Sequence: Synthetic oligonucleotide
  Sense strand starting at position 1632 of SEQ ID NO: 1885696
gcagccauuacugagauga

SEQ ID NO: 2361447 - RNA, 19 nt, Artificial Sequence
  Description of Artificial Sequence: Synthetic oligonucleotide
  Antisense strand to SEQ ID NO: 2361446
ucaucucaguaauggcugc

SEQ ID NO: 2361448 - RNA, 19 nt, Artificial Sequence
  Description of Artificial Sequence: Synthetic oligonucleotide
  Sense strand starting at position 2120 of SEQ ID NO: 1885696
gauggaguccaugguaaca

SEQ ID NO: 2361449 - RNA, 19 nt, Artificial Sequence
  Description of Artificial Sequence: Synthetic oligonucleotide
  Antisense strand to SEQ ID NO: 2361448
uguuaccauggacuccauc

SEQ ID NO: 2361450 - RNA, 19 nt, Artificial Sequence
  Description of Artificial Sequence: Synthetic oligonucleotide
  Sense strand starting at position 2122 of SEQ ID NO: 1885696
uggaguccaugguaacaga

SEQ ID NO: 2361451 - RNA, 19 nt, Artificial Sequence
  Description of Artificial Sequence: Synthetic oligonucleotide
  Antisense strand to SEQ ID NO: 2361450
ucuguuaccauggacucca

SEQ ID NO: 2361452 - RNA, 19 nt, Artificial Sequence
  Description of Artificial Sequence: Synthetic oligonucleotide
  Sense strand starting at position 2207 of SEQ ID NO: 1885696
ccuggaaaccucugagggu

SEQ ID NO: 2361453 - RNA, 19 nt, Artificial Sequence
  Description of Artificial Sequence: Synthetic oligonucleotide
  Antisense strand to SEQ ID NO: 2361452
acccucagagguuuccagg

SEQ ID NO: 2361454 - RNA, 19 nt, Artificial Sequence
  Description of Artificial Sequence: Synthetic oligonucleotide
  Sense strand starting at position 2326 of SEQ ID NO: 1885696
cugugugauccucagagaa

SEQ ID NO: 2361455 - RNA, 19 nt, Artificial Sequence
  Description of Artificial Sequence: Synthetic oligonucleotide
  Antisense strand to SEQ ID NO: 2361454
uucucugaggaucacacag

SEQ ID NO: 2361456 - RNA, 19 nt, Artificial Sequence
  Description of Artificial Sequence: Synthetic oligonucleotide
  Sense strand starting at position 2328 of SEQ ID NO: 1885696
gugugauccucagagaaua

SEQ ID NO: 2361457 - RNA, 19 nt, Artificial Sequence
  Description of Artificial Sequence: Synthetic oligonucleotide
  Antisense strand to SEQ ID NO: 2361456
uauucucugaggaucacac

SEQ ID NO: 2361458 - RNA, 19 nt, Artificial Sequence
  Description of Artificial Sequence: Synthetic oligonucleotide
  Sense strand starting at position 2501 of SEQ ID NO: 1885696
auaggaaguuuacaaaguu

SEQ ID NO: 2361459 - RNA, 19 nt, Artificial Sequence
  Description of Artificial Sequence: Synthetic oligonucleotide
  Antisense strand to SEQ ID NO: 2361458
aacuuuguaaacuuccuau

SEQ ID NO: 2361460 - RNA, 19 nt, Artificial Sequence
  Description of Artificial Sequence: Synthetic oligonucleotide
  Sense strand starting at position 2524 of SEQ ID NO: 1885696
ugagguggccucuggcaua

SEQ ID NO: 2361461 - RNA, 19 nt, Artificial Sequence
  Description of Artificial Sequence: Synthetic oligonucleotide
  Antisense strand to SEQ ID NO: 2361460
uaugccagaggccaccuca

SEQ ID NO: 2361462 - RNA, 19 nt, Artificial Sequence
  Description of Artificial Sequence: Synthetic oligonucleotide
  Sense strand starting at position 2529 of SEQ ID NO: 1885696
uggccucuggcauauacua

SEQ ID NO: 2361463 - RNA, 19 nt, Artificial Sequence
  Description of Artificial Sequence: Synthetic oligonucleotide
  Antisense strand to SEQ ID NO: 2361462
uaguauaugccagaggcca

SEQ ID NO: 2361464 - RNA, 19 nt, Artificial Sequence
  Description of Artificial Sequence: Synthetic oligonucleotide
  Sense strand starting at position 2536 of SEQ ID NO: 1885696
uggcauauacuauagcaua

SEQ ID NO: 2361465 - RNA, 19 nt, Artificial Sequence
  Description of Artificial Sequence: Synthetic oligonucleotide
  Antisense strand to SEQ ID NO: 2361464
uaugcuauaguauaugcca

SEQ ID NO: 2361466 - RNA, 19 nt, Artificial Sequence
  Description of Artificial Sequence: Synthetic oligonucleotide
  Sense strand starting at position 2550 of SEQ ID NO: 1885696
gcauauagaugugacaaau

SEQ ID NO: 2361467 - RNA, 19 nt, Artificial Sequence
  Description of Artificial Sequence: Synthetic oligonucleotide
  Antisense strand to SEQ ID NO: 2361466
auuugucacaucuauaugc

SEQ ID NO: 2361468 - RNA, 19 nt, Artificial Sequence
  Description of Artificial Sequence: Synthetic oligonucleotide
  Sense strand starting at position 2559 of SEQ ID NO: 1885696
ugugacaaaugcuagguau

SEQ ID NO: 2361469 - RNA, 19 nt, Artificial Sequence
  Description of Artificial Sequence: Synthetic oligonucleotide
  Antisense strand to SEQ ID NO: 2361468
auaccuagcauuugucaca

SEQ ID NO: 2361470 - RNA, 19 nt, Artificial Sequence
  Description of Artificial Sequence: Synthetic oligonucleotide
  Sense strand starting at position 2562 of SEQ ID NO: 1885696
gacaaaugcuagguaugga

SEQ ID NO: 2361471 - RNA, 19 nt, Artificial Sequence
  Description of Artificial Sequence: Synthetic oligonucleotide
  Antisense strand to SEQ ID NO: 2361470
uccauaccuagcauuuguc

SEQ ID NO: 2361472 - RNA, 19 nt, Artificial Sequence
  Description of Artificial Sequence: Synthetic oligonucleotide
  Sense strand starting at position 2713 of SEQ ID NO: 1885696
ucaaaucaguguguaaaua

SEQ ID NO: 2361473 - RNA, 19 nt, Artificial Sequence
  Description of Artificial Sequence: Synthetic oligonucleotide
  Antisense strand to SEQ ID NO: 2361472
uauuuacacacugauuuga

SEQ ID NO: 2361474 - RNA, 19 nt, Artificial Sequence
  Description of Artificial Sequence: Synthetic oligonucleotide
  Sense strand starting at position 2725 of SEQ ID NO: 1885696
guaaauaugcagugcaaag

SEQ ID NO: 2361475 - RNA, 19 nt, Artificial Sequence
  Description of Artificial Sequence: Synthetic oligonucleotide
  Antisense strand to SEQ ID NO: 2361474
cuuugcacugcauauuuac

SEQ ID NO: 2361476 - RNA, 19 nt, Artificial Sequence
  Description of Artificial Sequence: Synthetic oligonucleotide
  Sense strand starting at position 2764 of SEQ ID NO: 1885696
uucggaaccucagguagau

SEQ ID NO: 2361477 - RNA, 19 nt, Artificial Sequence
  Description of Artificial Sequence: Synthetic oligonucleotide
  Antisense strand to SEQ ID NO: 2361476
aucuaccugagguuccgaa

SEQ ID NO: 2361478 - RNA, 19 nt, Artificial Sequence
  Description of Artificial Sequence: Synthetic oligonucleotide
  Sense strand starting at position 3274 of SEQ ID NO: 1885696
ccagcugcuuugccaagaa

SEQ ID NO: 2361479 - RNA, 19 nt, Artificial Sequence
  Description of Artificial Sequence: Synthetic oligonucleotide
  Antisense strand to SEQ ID NO: 2361478
uucuuggcaaagcagcugg

SEQ ID NO: 2361480 - RNA, 19 nt, Artificial Sequence
  Description of Artificial Sequence: Synthetic oligonucleotide
  Sense strand starting at position 3341 of SEQ ID NO: 1885696
ggccaagacucucacucuu

SEQ ID NO: 2361481 - RNA, 19 nt, Artificial Sequence
  Description of Artificial Sequence: Synthetic oligonucleotide
  Antisense strand to SEQ ID NO: 2361480
aagagugagagucuuggcc

SEQ ID NO: 2361482 - RNA, 19 nt, Artificial Sequence
  Description of Artificial Sequence: Synthetic oligonucleotide
  Sense strand starting at position 3414 of SEQ ID NO: 1885696
gggauauaggcauggguga

SEQ ID NO: 2361483 - RNA, 19 nt, Artificial Sequence
  Description of Artificial Sequence: Synthetic oligonucleotide
  Antisense strand to SEQ ID NO: 2361482
ucacccaugccuauauccc

SEQ ID NO: 2361484 - RNA, 19 nt, Artificial Sequence
  Description of Artificial Sequence: Synthetic oligonucleotide
  Sense strand starting at position 3766 of SEQ ID NO: 1885696
gcacauacaucugagccua

SEQ ID NO: 2361485 - RNA, 19 nt, Artificial Sequence
  Description of Artificial Sequence: Synthetic oligonucleotide
  Antisense strand to SEQ ID NO: 2361484
uaggcucagauguaugugc

SEQ ID NO: 2361486 - RNA, 19 nt, Artificial Sequence
  Description of Artificial Sequence: Synthetic oligonucleotide
  Sense strand starting at position 46 of SEQ ID NO: 1885697
aagugucugcccugaugga

SEQ ID NO: 2361487 - RNA, 19 nt, Artificial Sequence
  Description of Artificial Sequence: Synthetic oligonucleotide
  Antisense strand to SEQ ID NO: 2361486
uccaucagggcagacacuu

SEQ ID NO: 2361488 - RNA, 19 nt, Artificial Sequence
  Description of Artificial Sequence: Synthetic oligonucleotide
  Sense strand starting at position 72 of SEQ ID NO: 1885697
agccaagggagucgucaua

SEQ ID NO: 2361489 - RNA, 19 nt, Artificial Sequence
  Description of Artificial Sequence: Synthetic oligonucleotide
  Antisense strand to SEQ ID NO: 2361488
uaugacgacucccuuggcu

SEQ ID NO: 2361490 - RNA, 19 nt, Artificial Sequence
  Description of Artificial Sequence: Synthetic oligonucleotide
  Sense strand starting at position 286 of SEQ ID NO: 1885697
ugacuuggugguggcaaau

SEQ ID NO: 2361491 - RNA, 19 nt, Artificial Sequence
  Description of Artificial Sequence: Synthetic oligonucleotide
  Antisense strand to SEQ ID NO: 2361490
auuugccaccaccaaguca

SEQ ID NO: 2361492 - RNA, 19 nt, Artificial Sequence
  Description of Artificial Sequence: Synthetic oligonucleotide
  Sense strand starting at position 377 of SEQ ID NO: 1885697
uuggguucggccguguaau

SEQ ID NO: 2361493 - RNA, 19 nt, Artificial Sequence
  Description of Artificial Sequence: Synthetic oligonucleotide
  Antisense strand to SEQ ID NO: 2361492
auuacacggccgaacccaa

SEQ ID NO: 2361494 - RNA, 19 nt, Artificial Sequence
  Description of Artificial Sequence: Synthetic oligonucleotide
  Sense strand starting at position 393 of SEQ ID NO: 1885697
aauuguucuggucaaugau

SEQ ID NO: 2361495 - RNA, 19 nt, Artificial Sequence
  Description of Artificial Sequence: Synthetic oligonucleotide
  Antisense strand to SEQ ID NO: 2361494
aucauugaccagaacaauu

SEQ ID NO: 2361496 - RNA, 19 nt, Artificial Sequence
  Description of Artificial Sequence: Synthetic oligonucleotide
  Sense strand starting at position 401 of SEQ ID NO: 1885697
uggucaaugaucugugggu

SEQ ID NO: 2361497 - RNA, 19 nt, Artificial Sequence
  Description of Artificial Sequence: Synthetic oligonucleotide
  Antisense strand to SEQ ID NO: 2361496
acccacagaucauugacca

SEQ ID NO: 2361498 - RNA, 19 nt, Artificial Sequence
  Description of Artificial Sequence: Synthetic oligonucleotide
  Sense strand starting at position 402 of SEQ ID NO: 1885697
ggucaaugaucugugggua

SEQ ID NO: 2361499 - RNA, 19 nt, Artificial Sequence
  Description of Artificial Sequence: Synthetic oligonucleotide
  Antisense strand to SEQ ID NO: 2361498
uacccacagaucauugacc

SEQ ID NO: 2361500 - RNA, 19 nt, Artificial Sequence
  Description of Artificial Sequence: Synthetic oligonucleotide
  Sense strand starting at position 403 of SEQ ID NO: 1885697
gucaaugaucuguggguag

SEQ ID NO: 2361501 - RNA, 19 nt, Artificial Sequence
  Description of Artificial Sequence: Synthetic oligonucleotide
  Antisense strand to SEQ ID NO: 2361500
cuacccacagaucauugac

SEQ ID NO: 2361502 - RNA, 19 nt, Artificial Sequence
  Description of Artificial Sequence: Synthetic oligonucleotide
  Sense strand starting at position 405 of SEQ ID NO: 1885697
caaugaucuguggguagaa

SEQ ID NO: 2361503 - RNA, 19 nt, Artificial Sequence
  Description of Artificial Sequence: Synthetic oligonucleotide
  Antisense strand to SEQ ID NO: 2361502
uucuacccacagaucauug

SEQ ID NO: 2361504 - RNA, 19 nt, Artificial Sequence
  Description of Artificial Sequence: Synthetic oligonucleotide
  Sense strand starting at position 406 of SEQ ID NO: 1885697
aaugaucuguggguagaaa

SEQ ID NO: 2361505 - RNA, 19 nt, Artificial Sequence
  Description of Artificial Sequence: Synthetic oligonucleotide
  Antisense strand to SEQ ID NO: 2361504
uuucuacccacagaucauu

SEQ ID NO: 2361506 - RNA, 19 nt, Artificial Sequence
  Description of Artificial Sequence: Synthetic oligonucleotide
  Sense strand starting at position 631 of SEQ ID NO: 1885697
uagaaugucugcucucaga

SEQ ID NO: 2361507 - RNA, 19 nt, Artificial Sequence
  Description of Artificial Sequence: Synthetic oligonucleotide
  Antisense strand to SEQ ID NO: 2361506
ucugagagcagacauucua

SEQ ID NO: 2361508 - RNA, 19 nt, Artificial Sequence
  Description of Artificial Sequence: Synthetic oligonucleotide
  Sense strand starting at position 871 of SEQ ID NO: 1885697
gauucugaguggucccaac

SEQ ID NO: 2361509 - RNA, 19 nt, Artificial Sequence
  Description of Artificial Sequence: Synthetic oligonucleotide
  Antisense strand to SEQ ID NO: 2361508
guugggaccacucagaauc

SEQ ID NO: 2361510 - RNA, 19 nt, Artificial Sequence
  Description of Artificial Sequence: Synthetic oligonucleotide
  Sense strand starting at position 1449 of SEQ ID NO: 1885697
cccacaucuucuccgaagu

SEQ ID NO: 2361511 - RNA, 19 nt, Artificial Sequence
  Description of Artificial Sequence: Synthetic oligonucleotide
  Antisense strand to SEQ ID NO: 2361510
acuucggagaagauguggg

SEQ ID NO: 2361512 - RNA, 19 nt, Artificial Sequence
  Description of Artificial Sequence: Synthetic oligonucleotide
  Sense strand starting at position 1621 of SEQ ID NO: 1885697
guugcuagcguguccagaa

SEQ ID NO: 2361513 - RNA, 19 nt, Artificial Sequence
  Description of Artificial Sequence: Synthetic oligonucleotide
  Antisense strand to SEQ ID NO: 2361512
uucuggacacgcuagcaac

SEQ ID NO: 2361514 - RNA, 19 nt, Artificial Sequence
  Description of Artificial Sequence: Synthetic oligonucleotide
  Sense strand starting at position 1986 of SEQ ID NO: 1885697
cucuccuucgaguaucgaa

SEQ ID NO: 2361515 - RNA, 19 nt, Artificial Sequence
  Description of Artificial Sequence: Synthetic oligonucleotide
  Antisense strand to SEQ ID NO: 2361514
uucgauacucgaaggagag

SEQ ID NO: 2361516 - RNA, 19 nt, Artificial Sequence
  Description of Artificial Sequence: Synthetic oligonucleotide
  Sense strand starting at position 2072 of SEQ ID NO: 1885697
gugucaccuccaggaagau

SEQ ID NO: 2361517 - RNA, 19 nt, Artificial Sequence
  Description of Artificial Sequence: Synthetic oligonucleotide
  Antisense strand to SEQ ID NO: 2361516
aucuuccuggaggugacac

SEQ ID NO: 2361518 - RNA, 19 nt, Artificial Sequence
  Description of Artificial Sequence: Synthetic oligonucleotide
  Sense strand starting at position 2134 of SEQ ID NO: 1885697
cuucuauuugcguguccca

SEQ ID NO: 2361519 - RNA, 19 nt, Artificial Sequence
  Description of Artificial Sequence: Synthetic oligonucleotide
  Antisense strand to SEQ ID NO: 2361518
ugggacacgcaaauagaag

SEQ ID NO: 2361520 - RNA, 19 nt, Artificial Sequence
  Description of Artificial Sequence: Synthetic oligonucleotide
  Sense strand starting at position 2203 of SEQ ID NO: 1885697
agagguugcccgggaaaca

SEQ ID NO: 2361521 - RNA, 19 nt, Artificial Sequence
  Description of Artificial Sequence: Synthetic oligonucleotide
  Antisense strand to SEQ ID NO: 2361520
uguuucccgggcaaccucu

SEQ ID NO: 2361522 - RNA, 19 nt, Artificial Sequence
  Description of Artificial Sequence: Synthetic oligonucleotide
  Sense strand starting at position 2204 of SEQ ID NO: 1885697
gagguugcccgggaaacau

SEQ ID NO: 2361523 - RNA, 19 nt, Artificial Sequence
  Description of Artificial Sequence: Synthetic oligonucleotide
  Antisense strand to SEQ ID NO: 2361522
auguuucccgggcaaccuc

SEQ ID NO: 2361524 - RNA, 19 nt, Artificial Sequence
  Description of Artificial Sequence: Synthetic oligonucleotide
  Sense strand starting at position 2358 of SEQ ID NO: 1885697
aagucagugcgucaagaga

SEQ ID NO: 2361525 - RNA, 19 nt, Artificial Sequence
  Description of Artificial Sequence: Synthetic oligonucleotide
  Antisense strand to SEQ ID NO: 2361524
ucucuugacgcacugacuu

SEQ ID NO: 2361526 - RNA, 19 nt, Artificial Sequence
  Description of Artificial Sequence: Synthetic oligonucleotide
  Sense strand starting at position 2373 of SEQ ID NO: 1885697
gagagcucaugaguaaauc

SEQ ID NO: 2361527 - RNA, 19 nt, Artificial Sequence
  Description of Artificial Sequence: Synthetic oligonucleotide
  Antisense strand to SEQ ID NO: 2361526
gauuuacucaugagcucuc

SEQ ID NO: 2361528 - RNA, 19 nt, Artificial Sequence
  Description of Artificial Sequence: Synthetic oligonucleotide
  Sense strand starting at position 2374 of SEQ ID NO: 1885697
agagcucaugaguaaaucu

SEQ ID NO: 2361529 - RNA, 19 nt, Artificial Sequence
  Description of Artificial Sequence: Synthetic oligonucleotide
  Antisense strand to SEQ ID NO: 2361528
agauuuacucaugagcucu

SEQ ID NO: 2361530 - RNA, 19 nt, Artificial Sequence
  Description of Artificial Sequence: Synthetic oligonucleotide
  Sense strand starting at position 2382 of SEQ ID NO: 1885697
ugaguaaaucucgaauucu

SEQ ID NO: 2361531 - RNA, 19 nt, Artificial Sequence
  Description of Artificial Sequence: Synthetic oligonucleotide
  Antisense strand to SEQ ID NO: 2361530
agaauucgagauuuacuca

SEQ ID NO: 2361532 - RNA, 19 nt, Artificial Sequence
  Description of Artificial Sequence: Synthetic oligonucleotide
  Sense strand starting at position 2393 of SEQ ID NO: 1885697
cgaauucuguggucaagaa

SEQ ID NO: 2361533 - RNA, 19 nt, Artificial Sequence
  Description of Artificial Sequence: Synthetic oligonucleotide
  Antisense strand to SEQ ID NO: 2361532
uucuugaccacagaauucg

SEQ ID NO: 2361534 - RNA, 19 nt, Artificial Sequence
  Description of Artificial Sequence: Synthetic oligonucleotide
  Sense strand starting at position 2511 of SEQ ID NO: 1885697
gauacauggcaccgaggaa

SEQ ID NO: 2361535 - RNA, 19 nt, Artificial Sequence
  Description of Artificial Sequence: Synthetic oligonucleotide
  Antisense strand to SEQ ID NO: 2361534
uuccucggugccauguauc

SEQ ID NO: 2361536 - RNA, 19 nt, Artificial Sequence
  Description of Artificial Sequence: Synthetic oligonucleotide
  Sense strand starting at position 2788 of SEQ ID NO: 1885697
ggaguacuguuaucuccag

SEQ ID NO: 2361537 - RNA, 19 nt, Artificial Sequence
  Description of Artificial Sequence: Synthetic oligonucleotide
  Antisense strand to SEQ ID NO: 2361536
cuggagauaacaguacucc

SEQ ID NO: 2361538 - RNA, 19 nt, Artificial Sequence
  Description of Artificial Sequence: Synthetic oligonucleotide
  Sense strand starting at position 2789 of SEQ ID NO: 1885697
gaguacuguuaucuccaga

SEQ ID NO: 2361539 - RNA, 19 nt, Artificial Sequence
  Description of Artificial Sequence: Synthetic oligonucleotide
  Antisense strand to SEQ ID NO: 2361538
ucuggagauaacaguacuc

SEQ ID NO: 2361540 - RNA, 19 nt, Artificial Sequence
  Description of Artificial Sequence: Synthetic oligonucleotide
  Sense strand starting at position 2794 of SEQ ID NO: 1885697
cuguuaucuccagacucuu

SEQ ID NO: 2361541 - RNA, 19 nt, Artificial Sequence
  Description of Artificial Sequence: Synthetic oligonucleotide
  Antisense strand to SEQ ID NO: 2361540
aagagucuggagauaacag

SEQ ID NO: 2361542 - RNA, 19 nt, Artificial Sequence
  Description of Artificial Sequence: Synthetic oligonucleotide
  Sense strand starting at position 2938 of SEQ ID NO: 1885697
ggagcagaggucugagaag

SEQ ID NO: 2361543 - RNA, 19 nt, Artificial Sequence
  Description of Artificial Sequence: Synthetic oligonucleotide
  Antisense strand to SEQ ID NO: 2361542
cuucucagaccucugcucc

SEQ ID NO: 2361544 - RNA, 19 nt, Artificial Sequence
  Description of Artificial Sequence: Synthetic oligonucleotide
  Sense strand starting at position 3097 of SEQ ID NO: 1885697
gucacauggccuugacaca

SEQ ID NO: 2361545 - RNA, 19 nt, Artificial Sequence
  Description of Artificial Sequence: Synthetic oligonucleotide
  Antisense strand to SEQ ID NO: 2361544
ugugucaaggccaugugac

SEQ ID NO: 2361546 - RNA, 19 nt, Artificial Sequence
  Description of Artificial Sequence: Synthetic oligonucleotide
  Sense strand starting at position 3224 of SEQ ID NO: 1885697
uguucucucugguuauaaa

SEQ ID NO: 2361547 - RNA, 19 nt, Artificial Sequence
  Description of Artificial Sequence: Synthetic oligonucleotide
  Antisense strand to SEQ ID NO: 2361546
uuuauaaccagagagaaca

SEQ ID NO: 2361548 - RNA, 19 nt, Artificial Sequence
  Description of Artificial Sequence: Synthetic oligonucleotide
  Sense strand starting at position 3490 of SEQ ID NO: 1885697
gcauuacugccagacagga

SEQ ID NO: 2361549 - RNA, 19 nt, Artificial Sequence
  Description of Artificial Sequence: Synthetic oligonucleotide
  Antisense strand to SEQ ID NO: 2361548
uccugucuggcaguaaugc

SEQ ID NO: 2361550 - RNA, 19 nt, Artificial Sequence
  Description of Artificial Sequence: Synthetic oligonucleotide
  Sense strand starting at position 3556 of SEQ ID NO: 1885697
gggccugacaacugucuua

SEQ ID NO: 2361551 - RNA, 19 nt, Artificial Sequence
  Description of Artificial Sequence: Synthetic oligonucleotide
  Antisense strand to SEQ ID NO: 2361550
uaagacaguugucaggccc

SEQ ID NO: 2361552 - RNA, 19 nt, Artificial Sequence
  Description of Artificial Sequence: Synthetic oligonucleotide
  Sense strand starting at position 3563 of SEQ ID NO: 1885697
acaacugucuuauccggaa

SEQ ID NO: 2361553 - RNA, 19 nt, Artificial Sequence
  Description of Artificial Sequence: Synthetic oligonucleotide
  Antisense strand to SEQ ID NO: 2361552
uuccggauaagacaguugu

SEQ ID NO: 2361554 - RNA, 19 nt, Artificial Sequence
  Description of Artificial Sequence: Synthetic oligonucleotide
  Sense strand starting at position 3567 of SEQ ID NO: 1885697
cugucuuauccggaagccu

SEQ ID NO: 2361555 - RNA, 19 nt, Artificial Sequence
  Description of Artificial Sequence: Synthetic oligonucleotide
  Antisense strand to SEQ ID NO: 2361554
aggcuuccggauaagacag

SEQ ID NO: 2361556 - RNA, 19 nt, Artificial Sequence
  Description of Artificial Sequence: Synthetic oligonucleotide
  Sense strand starting at position 3588 of SEQ ID NO: 1885697
caaacugguguuugauacu

SEQ ID NO: 2361557 - RNA, 19 nt, Artificial Sequence
  Description of Artificial Sequence: Synthetic oligonucleotide
  Antisense strand to SEQ ID NO: 2361556
aguaucaaacaccaguuug

SEQ ID NO: 2361558 - RNA, 19 nt, Artificial Sequence
  Description of Artificial Sequence: Synthetic oligonucleotide
  Sense strand starting at position 3595 of SEQ ID NO: 1885697
guguuugauacugaagagu

SEQ ID NO: 2361559 - RNA, 19 nt, Artificial Sequence
  Description of Artificial Sequence: Synthetic oligonucleotide
  Antisense strand to SEQ ID NO: 2361558
acucuucaguaucaaacac

SEQ ID NO: 2361560 - RNA, 19 nt, Artificial Sequence
  Description of Artificial Sequence: Synthetic oligonucleotide
  Sense strand starting at position 3657 of SEQ ID NO: 1885697
ggaaaccucuccuugagca

SEQ ID NO: 2361561 - RNA, 19 nt, Artificial Sequence
  Description of Artificial Sequence: Synthetic oligonucleotide
  Antisense strand to SEQ ID NO: 2361560
ugcucaaggagagguuucc

SEQ ID NO: 2361562 - RNA, 19 nt, Artificial Sequence
  Description of Artificial Sequence: Synthetic oligonucleotide
  Sense strand starting at position 3878 of SEQ ID NO: 1885697
ccacaauuccugugagaaa

SEQ ID NO: 2361563 - RNA, 19 nt, Artificial Sequence
  Description of Artificial Sequence: Synthetic oligonucleotide
  Antisense strand to SEQ ID NO: 2361562
uuucucacaggaauugugg

SEQ ID NO: 2361564 - RNA, 19 nt, Artificial Sequence
  Description of Artificial Sequence: Synthetic oligonucleotide
  Sense strand starting at position 3976 of SEQ ID NO: 1885697
gugucauuauauccaggac

SEQ ID NO: 2361565 - RNA, 19 nt, Artificial Sequence
  Description of Artificial Sequence: Synthetic oligonucleotide
  Antisense strand to SEQ ID NO: 2361564
guccuggauauaaugacac

SEQ ID NO: 2361566 - RNA, 19 nt, Artificial Sequence
  Description of Artificial Sequence: Synthetic oligonucleotide
  Sense strand starting at position 67 of SEQ ID NO: 1885698
gcacgugucauauacagac

SEQ ID NO: 2361567 - RNA, 19 nt, Artificial Sequence
  Description of Artificial Sequence: Synthetic oligonucleotide
  Antisense strand to SEQ ID NO: 2361566
gucuguauaugacacgugc

SEQ ID NO: 2361568 - RNA, 19 nt, Artificial Sequence
  Description of Artificial Sequence: Synthetic oligonucleotide
  Sense strand starting at position 153 of SEQ ID NO: 1885698
guggcacucaaaugaguaa

SEQ ID NO: 2361569 - RNA, 19 nt, Artificial Sequence
  Description of Artificial Sequence: Synthetic oligonucleotide
  Antisense strand to SEQ ID NO: 2361568
uuacucauuugagugccac

SEQ ID NO: 2361570 - RNA, 19 nt, Artificial Sequence
  Description of Artificial Sequence: Synthetic oligonucleotide
  Sense strand starting at position 202 of SEQ ID NO: 1885698
acagccuuucuugauggaa

SEQ ID NO: 2361571 - RNA, 19 nt, Artificial Sequence
  Description of Artificial Sequence: Synthetic oligonucleotide
  Antisense strand to SEQ ID NO: 2361570
uuccaucaagaaaggcugu

SEQ ID NO: 2361572 - RNA, 19 nt, Artificial Sequence
  Description of Artificial Sequence: Synthetic oligonucleotide
  Sense strand starting at position 205 of SEQ ID NO: 1885698
gccuuucuugauggaaugu

SEQ ID NO: 2361573 - RNA, 19 nt, Artificial Sequence
  Description of Artificial Sequence: Synthetic oligonucleotide
  Antisense strand to SEQ ID NO: 2361572
acauuccaucaagaaaggc

SEQ ID NO: 2361574 - RNA, 19 nt, Artificial Sequence
  Description of Artificial Sequence: Synthetic oligonucleotide
  Sense strand starting at position 382 of SEQ ID NO: 1885698
guuagcaucuccuuccaga

SEQ ID NO: 2361575 - RNA, 19 nt, Artificial Sequence
  Description of Artificial Sequence: Synthetic oligonucleotide
  Antisense strand to SEQ ID NO: 2361574
ucuggaaggagaugcuaac

SEQ ID NO: 2361576 - RNA, 19 nt, Artificial Sequence
  Description of Artificial Sequence: Synthetic oligonucleotide
  Sense strand starting at position 411 of SEQ ID NO: 1885698
gaccuuucccgauggcaca

SEQ ID NO: 2361577 - RNA, 19 nt, Artificial Sequence
  Description of Artificial Sequence: Synthetic oligonucleotide
  Antisense strand to SEQ ID NO: 2361576
ugugccaucgggaaagguc

SEQ ID NO: 2361578 - RNA, 19 nt, Artificial Sequence
  Description of Artificial Sequence: Synthetic oligonucleotide
  Sense strand starting at position 424 of SEQ ID NO: 1885698
ggcacaugauucucaaaua

SEQ ID NO: 2361579 - RNA, 19 nt, Artificial Sequence
  Description of Artificial Sequence: Synthetic oligonucleotide
  Antisense strand to SEQ ID NO: 2361578
uauuugagaaucaugugcc

SEQ ID NO: 2361580 - RNA, 19 nt, Artificial Sequence
  Description of Artificial Sequence: Synthetic oligonucleotide
  Sense strand starting at position 863 of SEQ ID NO: 1885698
acagcagugucuucgggaa

SEQ ID NO: 2361581 - RNA, 19 nt, Artificial Sequence
  Description of Artificial Sequence: Synthetic oligonucleotide
  Antisense strand to SEQ ID NO: 2361580
uucccgaagacacugcugu

SEQ ID NO: 2361582 - RNA, 19 nt, Artificial Sequence
  Description of Artificial Sequence: Synthetic oligonucleotide
  Sense strand starting at position 867 of SEQ ID NO: 1885698
cagugucuucgggaaggca

SEQ ID NO: 2361583 - RNA, 19 nt, Artificial Sequence
  Description of Artificial Sequence: Synthetic oligonucleotide
  Antisense strand to SEQ ID NO: 2361582
ugccuucccgaagacacug

SEQ ID NO: 2361584 - RNA, 19 nt, Artificial Sequence
  Description of Artificial Sequence: Synthetic oligonucleotide
  Sense strand starting at position 869 of SEQ ID NO: 1885698
gugucuucgggaaggcaug

SEQ ID NO: 2361585 - RNA, 19 nt, Artificial Sequence
  Description of Artificial Sequence: Synthetic oligonucleotide
  Antisense strand to SEQ ID NO: 2361584
caugccuucccgaagacac

SEQ ID NO: 2361586 - RNA, 19 nt, Artificial Sequence
  Description of Artificial Sequence: Synthetic oligonucleotide
  Sense strand starting at position 927 of SEQ ID NO: 1885698
ggcagacaccaaugucaga

SEQ ID NO: 2361587 - RNA, 19 nt, Artificial Sequence
  Description of Artificial Sequence: Synthetic oligonucleotide
  Antisense strand to SEQ ID NO: 2361586
ucugacauuggugucugcc

SEQ ID NO: 2361588 - RNA, 19 nt, Artificial Sequence
  Description of Artificial Sequence: Synthetic oligonucleotide
  Sense strand starting at position 1447 of SEQ ID NO: 1885698
ucaauucuucuguggaggu

SEQ ID NO: 2361589 - RNA, 19 nt, Artificial Sequence
  Description of Artificial Sequence: Synthetic oligonucleotide
  Antisense strand to SEQ ID NO: 2361588
accuccacagaagaauuga

SEQ ID NO: 2361590 - RNA, 19 nt, Artificial Sequence
  Description of Artificial Sequence: Synthetic oligonucleotide
  Sense strand starting at position 1911 of SEQ ID NO: 1885698
ggagauauuugauaccgaa

SEQ ID NO: 2361591 - RNA, 19 nt, Artificial Sequence
  Description of Artificial Sequence: Synthetic oligonucleotide
  Antisense strand to SEQ ID NO: 2361590
uucgguaucaaauaucucc

SEQ ID NO: 2361592 - RNA, 19 nt, Artificial Sequence
  Description of Artificial Sequence: Synthetic oligonucleotide
  Sense strand starting at position 2201 of SEQ ID NO: 1885698
gacagucaucacggauaaa

SEQ ID NO: 2361593 - RNA, 19 nt, Artificial Sequence
  Description of Artificial Sequence: Synthetic oligonucleotide
  Antisense strand to SEQ ID NO: 2361592
uuuauccgugaugacuguc

SEQ ID NO: 2361594 - RNA, 19 nt, Artificial Sequence
  Description of Artificial Sequence: Synthetic oligonucleotide
  Sense strand starting at position 2204 of SEQ ID NO: 1885698
agucaucacggauaaagca

SEQ ID NO: 2361595 - RNA, 19 nt, Artificial Sequence
  Description of Artificial Sequence: Synthetic oligonucleotide
  Antisense strand to SEQ ID NO: 2361594
ugcuuuauccgugaugacu

SEQ ID NO: 2361596 - RNA, 19 nt, Artificial Sequence
  Description of Artificial Sequence: Synthetic oligonucleotide
  Sense strand starting at position 2258 of SEQ ID NO: 1885698
ggaagucuucaugggcaga

SEQ ID NO: 2361597 - RNA, 19 nt, Artificial Sequence
  Description of Artificial Sequence: Synthetic oligonucleotide
  Antisense strand to SEQ ID NO: 2361596
ucugcccaugaagacuucc

SEQ ID NO: 2361598 - RNA, 19 nt, Artificial Sequence
  Description of Artificial Sequence: Synthetic oligonucleotide
  Sense strand starting at position 2302 of SEQ ID NO: 1885698
ucggaauguuuacuaucaa

SEQ ID NO: 2361599 - RNA, 19 nt, Artificial Sequence
  Description of Artificial Sequence: Synthetic oligonucleotide
  Antisense strand to SEQ ID NO: 2361598
uugauaguaaacauuccga

SEQ ID NO: 2361600 - RNA, 19 nt, Artificial Sequence
  Description of Artificial Sequence: Synthetic oligonucleotide
  Sense strand starting at position 2556 of SEQ ID NO: 1885698
gaggcauggcuugguucua

SEQ ID NO: 2361601 - RNA, 19 nt, Artificial Sequence
  Description of Artificial Sequence: Synthetic oligonucleotide
  Antisense strand to SEQ ID NO: 2361600
uagaaccaagccaugccuc

SEQ ID NO: 2361602 - RNA, 19 nt, Artificial Sequence
  Description of Artificial Sequence: Synthetic oligonucleotide
  Sense strand starting at position 2557 of SEQ ID NO: 1885698
aggcauggcuugguucuaa

SEQ ID NO: 2361603 - RNA, 19 nt, Artificial Sequence
  Description of Artificial Sequence: Synthetic oligonucleotide
  Antisense strand to SEQ ID NO: 2361602
uuagaaccaagccaugccu

SEQ ID NO: 2361604 - RNA, 19 nt, Artificial Sequence
  Description of Artificial Sequence: Synthetic oligonucleotide
  Sense strand starting at position 2580 of SEQ ID NO: 1885698
cugacaguuaagugugagu

SEQ ID NO: 2361605 - RNA, 19 nt, Artificial Sequence
  Description of Artificial Sequence: Synthetic oligonucleotide
  Antisense strand to SEQ ID NO: 2361604
acucacacuuaacugucag

SEQ ID NO: 2361606 - RNA, 19 nt, Artificial Sequence
  Description of Artificial Sequence: Synthetic oligonucleotide
  Sense strand starting at position 2582 of SEQ ID NO: 1885698
gacaguuaagugugaguug

SEQ ID NO: 2361607 - RNA, 19 nt, Artificial Sequence
  Description of Artificial Sequence: Synthetic oligonucleotide
  Antisense strand to SEQ ID NO: 2361606
caacucacacuuaacuguc

SEQ ID NO: 2361608 - RNA, 19 nt, Artificial Sequence
  Description of Artificial Sequence: Synthetic oligonucleotide
  Sense strand starting at position 2585 of SEQ ID NO: 1885698
aguuaagugugaguuguga

SEQ ID NO: 2361609 - RNA, 19 nt, Artificial Sequence
  Description of Artificial Sequence: Synthetic oligonucleotide
  Antisense strand to SEQ ID NO: 2361608
ucacaacucacacuuaacu

SEQ ID NO: 2361610 - RNA, 19 nt, Artificial Sequence
  Description of Artificial Sequence: Synthetic oligonucleotide
  Sense strand starting at position 2587 of SEQ ID NO: 1885698
uuaagugugaguugugaca

SEQ ID NO: 2361611 - RNA, 19 nt, Artificial Sequence
  Description of Artificial Sequence: Synthetic oligonucleotide
  Antisense strand to SEQ ID NO: 2361610
ugucacaacucacacuuaa

SEQ ID NO: 2361612 - RNA, 19 nt, Artificial Sequence
  Description of Artificial Sequence: Synthetic oligonucleotide
  Sense strand starting at position 2706 of SEQ ID NO: 1885698
gguggauucgagggagagu

SEQ ID NO: 2361613 - RNA, 19 nt, Artificial Sequence
  Description of Artificial Sequence: Synthetic oligonucleotide
  Antisense strand to SEQ ID NO: 2361612
acucucccucgaauccacc

SEQ ID NO: 2361614 - RNA, 19 nt, Artificial Sequence
  Description of Artificial Sequence: Synthetic oligonucleotide
  Sense strand starting at position 2806 of SEQ ID NO: 1885698
acgguaauugugcaucauu

SEQ ID NO: 2361615 - RNA, 19 nt, Artificial Sequence
  Description of Artificial Sequence: Synthetic oligonucleotide
  Antisense strand to SEQ ID NO: 2361614
aaugaugcacaauuaccgu

SEQ ID NO: 2361616 - RNA, 19 nt, Artificial Sequence
  Description of Artificial Sequence: Synthetic oligonucleotide
  Sense strand starting at position 2809 of SEQ ID NO: 1885698
guaauugugcaucauuugu

SEQ ID NO: 2361617 - RNA, 19 nt, Artificial Sequence
  Description of Artificial Sequence: Synthetic oligonucleotide
  Antisense strand to SEQ ID NO: 2361616
acaaaugaugcacaauuac

SEQ ID NO: 2361618 - RNA, 19 nt, Artificial Sequence
  Description of Artificial Sequence: Synthetic oligonucleotide
  Sense strand starting at position 2815 of SEQ ID NO: 1885698
gugcaucauuugucaacca

SEQ ID NO: 2361619 - RNA, 19 nt, Artificial Sequence
  Description of Artificial Sequence: Synthetic oligonucleotide
  Antisense strand to SEQ ID NO: 2361618
ugguugacaaaugaugcac

SEQ ID NO: 2361620 - RNA, 19 nt, Artificial Sequence
  Description of Artificial Sequence: Synthetic oligonucleotide
  Sense strand starting at position 2930 of SEQ ID NO: 1885698
auaggcaaaccgugagaaa

SEQ ID NO: 2361621 - RNA, 19 nt, Artificial Sequence
  Description of Artificial Sequence: Synthetic oligonucleotide
  Antisense strand to SEQ ID NO: 2361620
uuucucacgguuugccuau

SEQ ID NO: 2361622 - RNA, 19 nt, Artificial Sequence
  Description of Artificial Sequence: Synthetic oligonucleotide
  Sense strand starting at position 3002 of SEQ ID NO: 1885698
gguaucaucuguuuguauu

SEQ ID NO: 2361623 - RNA, 19 nt, Artificial Sequence
  Description of Artificial Sequence: Synthetic oligonucleotide
  Antisense strand to SEQ ID NO: 2361622
aauacaaacagaugauacc

SEQ ID NO: 2361624 - RNA, 19 nt, Artificial Sequence
  Description of Artificial Sequence: Synthetic oligonucleotide
  Sense strand starting at position 3119 of SEQ ID NO: 1885698
ggguuugaucuagggacuc

SEQ ID NO: 2361625 - RNA, 19 nt, Artificial Sequence
  Description of Artificial Sequence: Synthetic oligonucleotide
  Antisense strand to SEQ ID NO: 2361624
gagucccuagaucaaaccc

SEQ ID NO: 2361626 - RNA, 19 nt, Artificial Sequence
  Description of Artificial Sequence: Synthetic oligonucleotide
  Sense strand starting at position 3141 of SEQ ID NO: 1885698
ugauaucauccaggcucuu

SEQ ID NO: 2361627 - RNA, 19 nt, Artificial Sequence
  Description of Artificial Sequence: Synthetic oligonucleotide
  Antisense strand to SEQ ID NO: 2361626
aagagccuggaugauauca

SEQ ID NO: 2361628 - RNA, 19 nt, Artificial Sequence
  Description of Artificial Sequence: Synthetic oligonucleotide
  Sense strand starting at position 3158 of SEQ ID NO: 1885698
uucucuaggucuccaagau

SEQ ID NO: 2361629 - RNA, 19 nt, Artificial Sequence
  Description of Artificial Sequence: Synthetic oligonucleotide
  Antisense strand to SEQ ID NO: 2361628
aucuuggagaccuagagaa

SEQ ID NO: 2361630 - RNA, 19 nt, Artificial Sequence
  Description of Artificial Sequence: Synthetic oligonucleotide
  Sense strand starting at position 3159 of SEQ ID NO: 1885698
ucucuaggucuccaagaug

SEQ ID NO: 2361631 - RNA, 19 nt, Artificial Sequence
  Description of Artificial Sequence: Synthetic oligonucleotide
  Antisense strand to SEQ ID NO: 2361630
caucuuggagaccuagaga

SEQ ID NO: 2361632 - RNA, 19 nt, Artificial Sequence
  Description of Artificial Sequence: Synthetic oligonucleotide
  Sense strand starting at position 3261 of SEQ ID NO: 1885698
cgaagcucacgucaaaguu

SEQ ID NO: 2361633 - RNA, 19 nt, Artificial Sequence
  Description of Artificial Sequence: Synthetic oligonucleotide
  Antisense strand to SEQ ID NO: 2361632
aacuuugacgugagcuucg

SEQ ID NO: 2361634 - RNA, 19 nt, Artificial Sequence
  Description of Artificial Sequence: Synthetic oligonucleotide
  Sense strand starting at position 3348 of SEQ ID NO: 1885698
acaguuucuuucccagaag

SEQ ID NO: 2361635 - RNA, 19 nt, Artificial Sequence
  Description of Artificial Sequence: Synthetic oligonucleotide
  Antisense strand to SEQ ID NO: 2361634
cuucugggaaagaaacugu

SEQ ID NO: 2361636 - RNA, 19 nt, Artificial Sequence
  Description of Artificial Sequence: Synthetic oligonucleotide
  Sense strand starting at position 3412 of SEQ ID NO: 1885698
gggccuauuccggaagcaa

SEQ ID NO: 2361637 - RNA, 19 nt, Artificial Sequence
  Description of Artificial Sequence: Synthetic oligonucleotide
  Antisense strand to SEQ ID NO: 2361636
uugcuuccggaauaggccc

SEQ ID NO: 2361638 - RNA, 19 nt, Artificial Sequence
  Description of Artificial Sequence: Synthetic oligonucleotide
  Sense strand starting at position 3425 of SEQ ID NO: 1885698
aagcaauugcaguggcaaa

SEQ ID NO: 2361639 - RNA, 19 nt, Artificial Sequence
  Description of Artificial Sequence: Synthetic oligonucleotide
  Antisense strand to SEQ ID NO: 2361638
uuugccacugcaauugcuu

SEQ ID NO: 2361640 - RNA, 19 nt, Artificial Sequence
  Description of Artificial Sequence: Synthetic oligonucleotide
  Sense strand starting at position 3454 of SEQ ID NO: 1885698
ucaagagauucgcuuaagc

SEQ ID NO: 2361641 - RNA, 19 nt, Artificial Sequence
  Description of Artificial Sequence: Synthetic oligonucleotide
  Antisense strand to SEQ ID NO: 2361640
gcuuaagcgaaucucuuga

SEQ ID NO: 2361642 - RNA, 19 nt, Artificial Sequence
  Description of Artificial Sequence: Synthetic oligonucleotide
  Sense strand starting at position 3456 of SEQ ID NO: 1885698
aagagauucgcuuaagccu

SEQ ID NO: 2361643 - RNA, 19 nt, Artificial Sequence
  Description of Artificial Sequence: Synthetic oligonucleotide
  Antisense strand to SEQ ID NO: 2361642
aggcuuaagcgaaucucuu

SEQ ID NO: 2361644 - RNA, 19 nt, Artificial Sequence
  Description of Artificial Sequence: Synthetic oligonucleotide
  Sense strand starting at position 3972 of SEQ ID NO: 1885698
ugagcacgauguguucaau

SEQ ID NO: 2361645 - RNA, 19 nt, Artificial Sequence
  Description of Artificial Sequence: Synthetic oligonucleotide
  Antisense strand to SEQ ID NO: 2361644
auugaacacaucgugcuca

SEQ ID NO: 2361646 - RNA, 19 nt, Artificial Sequence
  Description of Artificial Sequence: Synthetic oligonucleotide
  Sense strand starting at position 117 of SEQ ID NO: 1885699
uguguauccgcgaggucaa

SEQ ID NO: 2361647 - RNA, 19 nt, Artificial Sequence
  Description of Artificial Sequence: Synthetic oligonucleotide
  Antisense strand to SEQ ID NO: 2361646
uugaccucgcggauacaca

SEQ ID NO: 2361648 - RNA, 19 nt, Artificial Sequence
  Description of Artificial Sequence: Synthetic oligonucleotide
  Sense strand starting at position 698 of SEQ ID NO: 1885699
ucagaacaugguuggucau

SEQ ID NO: 2361649 - RNA, 19 nt, Artificial Sequence
  Description of Artificial Sequence: Synthetic oligonucleotide
  Antisense strand to SEQ ID NO: 2361648
augaccaaccauguucuga

SEQ ID NO: 2361650 - RNA, 19 nt, Artificial Sequence
  Description of Artificial Sequence: Synthetic oligonucleotide
  Sense strand starting at position 701 of SEQ ID NO: 1885699
gaacaugguuggucaugga

SEQ ID NO: 2361651 - RNA, 19 nt, Artificial Sequence
  Description of Artificial Sequence: Synthetic oligonucleotide
  Antisense strand to SEQ ID NO: 2361650
uccaugaccaaccauguuc

SEQ ID NO: 2361652 - RNA, 19 nt, Artificial Sequence
  Description of Artificial Sequence: Synthetic oligonucleotide
  Sense strand starting at position 864 of SEQ ID NO: 1885699
ucuggaagucucugaagca

SEQ ID NO: 2361653 - RNA, 19 nt, Artificial Sequence
  Description of Artificial Sequence: Synthetic oligonucleotide
  Antisense strand to SEQ ID NO: 2361652
ugcuucagagacuuccaga

SEQ ID NO: 2361654 - RNA, 19 nt, Artificial Sequence
  Description of Artificial Sequence: Synthetic oligonucleotide
  Sense strand starting at position 1427 of SEQ ID NO: 1885699
ggcaacauaagguaguaau

SEQ ID NO: 2361655 - RNA, 19 nt, Artificial Sequence
  Description of Artificial Sequence: Synthetic oligonucleotide
  Antisense strand to SEQ ID NO: 2361654
auuacuaccuuauguugcc

SEQ ID NO: 2361656 - RNA, 19 nt, Artificial Sequence
  Description of Artificial Sequence: Synthetic oligonucleotide
  Sense strand starting at position 1474 of SEQ ID NO: 1885699
guaggaauaaccgagucgu

SEQ ID NO: 2361657 - RNA, 19 nt, Artificial Sequence
  Description of Artificial Sequence: Synthetic oligonucleotide
  Antisense strand to SEQ ID NO: 2361656
acgacucgguuauuccuac

SEQ ID NO: 2361658 - RNA, 19 nt, Artificial Sequence
  Description of Artificial Sequence: Synthetic oligonucleotide
  Sense strand starting at position 1498 of SEQ ID NO: 1885699
ggaaaugugucuuuaaaca

SEQ ID NO: 2361659 - RNA, 19 nt, Artificial Sequence
  Description of Artificial Sequence: Synthetic oligonucleotide
  Antisense strand to SEQ ID NO: 2361658
uguuuaaagacacauuucc

SEQ ID NO: 2361660 - RNA, 19 nt, Artificial Sequence
  Description of Artificial Sequence: Synthetic oligonucleotide
  Sense strand starting at position 1553 of SEQ ID NO: 1885699
ccuugcuucccagagguca

SEQ ID NO: 2361661 - RNA, 19 nt, Artificial Sequence
  Description of Artificial Sequence: Synthetic oligonucleotide
  Antisense strand to SEQ ID NO: 2361660
ugaccucugggaagcaagg

SEQ ID NO: 2361662 - RNA, 19 nt, Artificial Sequence
  Description of Artificial Sequence: Synthetic oligonucleotide
  Sense strand starting at position 1572 of SEQ ID NO: 1885699
cccagaagauaagguauuu

SEQ ID NO: 2361663 - RNA, 19 nt, Artificial Sequence
  Description of Artificial Sequence: Synthetic oligonucleotide
  Antisense strand to SEQ ID NO: 2361662
aaauaccuuaucuucuggg

SEQ ID NO: 2361664 - RNA, 19 nt, Artificial Sequence
  Description of Artificial Sequence: Synthetic oligonucleotide
  Sense strand starting at position 1584 of SEQ ID NO: 1885699
gguauuugagggcguaaug

SEQ ID NO: 2361665 - RNA, 19 nt, Artificial Sequence
  Description of Artificial Sequence: Synthetic oligonucleotide
  Antisense strand to SEQ ID NO: 2361664
cauuacgcccucaaauacc

SEQ ID NO: 2361666 - RNA, 19 nt, Artificial Sequence
  Description of Artificial Sequence: Synthetic oligonucleotide
  Sense strand starting at position 1594 of SEQ ID NO: 1885699
ggcguaauguggaugucuu

SEQ ID NO: 2361667 - RNA, 19 nt, Artificial Sequence
  Description of Artificial Sequence: Synthetic oligonucleotide
  Antisense strand to SEQ ID NO: 2361666
aagacauccacauuacgcc

SEQ ID NO: 2361668 - RNA, 19 nt, Artificial Sequence
  Description of Artificial Sequence: Synthetic oligonucleotide
  Sense strand starting at position 1623 of SEQ ID NO: 1885699
aggaguuccuuucccuaaa

SEQ ID NO: 2361669 - RNA, 19 nt, Artificial Sequence
  Description of Artificial Sequence: Synthetic oligonucleotide
  Antisense strand to SEQ ID NO: 2361668
uuuagggaaaggaacuccu

SEQ ID NO: 2361670 - RNA, 19 nt, Artificial Sequence
  Description of Artificial Sequence: Synthetic oligonucleotide
  Sense strand starting at position 1624 of SEQ ID NO: 1885699
ggaguuccuuucccuaaag

SEQ ID NO: 2361671 - RNA, 19 nt, Artificial Sequence
  Description of Artificial Sequence: Synthetic oligonucleotide
  Antisense strand to SEQ ID NO: 2361670
cuuuagggaaaggaacucc

SEQ ID NO: 2361672 - RNA, 19 nt, Artificial Sequence
  Description of Artificial Sequence: Synthetic oligonucleotide
  Sense strand starting at position 1692 of SEQ ID NO: 1885699
ugguuuauucacugacgag

SEQ ID NO: 2361673 - RNA, 19 nt, Artificial Sequence
  Description of Artificial Sequence: Synthetic oligonucleotide
  Antisense strand to SEQ ID NO: 2361672
cucgucagugaauaaacca

SEQ ID NO: 2361674 - RNA, 19 nt, Artificial Sequence
  Description of Artificial Sequence: Synthetic oligonucleotide
  Sense strand starting at position 1702 of SEQ ID NO: 1885699
acugacgagucuucaagga

SEQ ID NO: 2361675 - RNA, 19 nt, Artificial Sequence
  Description of Artificial Sequence: Synthetic oligonucleotide
  Antisense strand to SEQ ID NO: 2361674
uccuugaagacucgucagu

SEQ ID NO: 2361676 - RNA, 19 nt, Artificial Sequence
  Description of Artificial Sequence: Synthetic oligonucleotide
  Sense strand starting at position 1778 of SEQ ID NO: 1885699
ccuaaugauggccgggaua

SEQ ID NO: 2361677 - RNA, 19 nt, Artificial Sequence
  Description of Artificial Sequence: Synthetic oligonucleotide
  Antisense strand to SEQ ID NO: 2361676
uaucccggccaucauuagg

SEQ ID NO: 2361678 - RNA, 19 nt, Artificial Sequence
  Description of Artificial Sequence: Synthetic oligonucleotide
  Sense strand starting at position 1780 of SEQ ID NO: 1885699
uaaugauggccgggauaug

SEQ ID NO: 2361679 - RNA, 19 nt, Artificial Sequence
  Description of Artificial Sequence: Synthetic oligonucleotide
  Antisense strand to SEQ ID NO: 2361678
cauaucccggccaucauua

SEQ ID NO: 2361680 - RNA, 19 nt, Artificial Sequence
  Description of Artificial Sequence: Synthetic oligonucleotide
  Sense strand starting at position 1790 of SEQ ID NO: 1885699
cgggauaugagccaaguga

SEQ ID NO: 2361681 - RNA, 19 nt, Artificial Sequence
  Description of Artificial Sequence: Synthetic oligonucleotide
  Antisense strand to SEQ ID NO: 2361680
ucacuuggcucauaucccg

SEQ ID NO: 2361682 - RNA, 19 nt, Artificial Sequence
  Description of Artificial Sequence: Synthetic oligonucleotide
  Sense strand starting at position 1794 of SEQ ID NO: 1885699
auaugagccaagugaugua

SEQ ID NO: 2361683 - RNA, 19 nt, Artificial Sequence
  Description of Artificial Sequence: Synthetic oligonucleotide
  Antisense strand to SEQ ID NO: 2361682
uacaucacuuggcucauau

SEQ ID NO: 2361684 - RNA, 19 nt, Artificial Sequence
  Description of Artificial Sequence: Synthetic oligonucleotide
  Sense strand starting at position 1799 of SEQ ID NO: 1885699
agccaagugauguaaguca

SEQ ID NO: 2361685 - RNA, 19 nt, Artificial Sequence
  Description of Artificial Sequence: Synthetic oligonucleotide
  Antisense strand to SEQ ID NO: 2361684
ugacuuacaucacuuggcu

SEQ ID NO: 2361686 - RNA, 19 nt, Artificial Sequence
  Description of Artificial Sequence: Synthetic oligonucleotide
  Sense strand starting at position 1829 of SEQ ID NO: 1885699
ccugucaugcggaggugau

SEQ ID NO: 2361687 - RNA, 19 nt, Artificial Sequence
  Description of Artificial Sequence: Synthetic oligonucleotide
  Antisense strand to SEQ ID NO: 2361686
aucaccuccgcaugacagg

SEQ ID NO: 2361688 - RNA, 19 nt, Artificial Sequence
  Description of Artificial Sequence: Synthetic oligonucleotide
  Sense strand starting at position 2190 of SEQ ID NO: 1885699
gagcaccaucugugauaca

SEQ ID NO: 2361689 - RNA, 19 nt, Artificial Sequence
  Description of Artificial Sequence: Synthetic oligonucleotide
  Antisense strand to SEQ ID NO: 2361688
uguaucacagauggugcuc

SEQ ID NO: 2361690 - RNA, 19 nt, Artificial Sequence
  Description of Artificial Sequence: Synthetic oligonucleotide
  Sense strand starting at position 2283 of SEQ ID NO: 1885699
gccucuuucgaggaaacug

SEQ ID NO: 2361691 - RNA, 19 nt, Artificial Sequence
  Description of Artificial Sequence: Synthetic oligonucleotide
  Antisense strand to SEQ ID NO: 2361690
caguuuccucgaaagaggc

SEQ ID NO: 2361692 - RNA, 19 nt, Artificial Sequence
  Description of Artificial Sequence: Synthetic oligonucleotide
  Sense strand starting at position 2293 of SEQ ID NO: 1885699
aggaaacugccaugguaag

SEQ ID NO: 2361693 - RNA, 19 nt, Artificial Sequence
  Description of Artificial Sequence: Synthetic oligonucleotide
  Antisense strand to SEQ ID NO: 2361692
cuuaccauggcaguuuccu

SEQ ID NO: 2361694 - RNA, 19 nt, Artificial Sequence
  Description of Artificial Sequence: Synthetic oligonucleotide
  Sense strand starting at position 2460 of SEQ ID NO: 1885699
aagaguccacuauguagga

SEQ ID NO: 2361695 - RNA, 19 nt, Artificial Sequence
  Description of Artificial Sequence: Synthetic oligonucleotide
  Antisense strand to SEQ ID NO: 2361694
uccuacauaguggacucuu

SEQ ID NO: 2361696 - RNA, 19 nt, Artificial Sequence
  Description of Artificial Sequence: Synthetic oligonucleotide
  Sense strand starting at position 2469 of SEQ ID NO: 1885699
cuauguaggauuggucaaa

SEQ ID NO: 2361697 - RNA, 19 nt, Artificial Sequence
  Description of Artificial Sequence: Synthetic oligonucleotide
  Antisense strand to SEQ ID NO: 2361696
uuugaccaauccuacauag

SEQ ID NO: 2361698 - RNA, 19 nt, Artificial Sequence
  Description of Artificial Sequence: Synthetic oligonucleotide
  Sense strand starting at position 2573 of SEQ ID NO: 1885699
guggcaccaucucuagaaa

SEQ ID NO: 2361699 - RNA, 19 nt, Artificial Sequence
  Description of Artificial Sequence: Synthetic oligonucleotide
  Antisense strand to SEQ ID NO: 2361698
uuucuagagauggugccac

SEQ ID NO: 2361700 - RNA, 19 nt, Artificial Sequence
  Description of Artificial Sequence: Synthetic oligonucleotide
  Sense strand starting at position 2684 of SEQ ID NO: 1885699
agcugacacccugaaguaa

SEQ ID NO: 2361701 - RNA, 19 nt, Artificial Sequence
  Description of Artificial Sequence: Synthetic oligonucleotide
  Antisense strand to SEQ ID NO: 2361700
uuacuucagggugucagcu

SEQ ID NO: 2361702 - RNA, 19 nt, Artificial Sequence
  Description of Artificial Sequence: Synthetic oligonucleotide
  Sense strand starting at position 2896 of SEQ ID NO: 1885699
aacauugacgguuagcaga

SEQ ID NO: 2361703 - RNA, 19 nt, Artificial Sequence
  Description of Artificial Sequence: Synthetic oligonucleotide
  Antisense strand to SEQ ID NO: 2361702
ucugcuaaccgucaauguu

SEQ ID NO: 2361704 - RNA, 19 nt, Artificial Sequence
  Description of Artificial Sequence: Synthetic oligonucleotide
  Sense strand starting at position 3126 of SEQ ID NO: 1885699
cgaggcugacaguaaugau

SEQ ID NO: 2361705 - RNA, 19 nt, Artificial Sequence
  Description of Artificial Sequence: Synthetic oligonucleotide
  Antisense strand to SEQ ID NO: 2361704
aucauuacugucagccucg

SEQ ID NO: 2361706 - RNA, 19 nt, Artificial Sequence
  Description of Artificial Sequence: Synthetic oligonucleotide
  Sense strand starting at position 3284 of SEQ ID NO: 1885699
ucagaaucauggccucauc

SEQ ID NO: 2361707 - RNA, 19 nt, Artificial Sequence
  Description of Artificial Sequence: Synthetic oligonucleotide
  Antisense strand to SEQ ID NO: 2361706
gaugaggccaugauucuga

SEQ ID NO: 2361708 - RNA, 19 nt, Artificial Sequence
  Description of Artificial Sequence: Synthetic oligonucleotide
  Sense strand starting at position 3303 of SEQ ID NO: 1885699
cccaaaggugagcauaauu

SEQ ID NO: 2361709 - RNA, 19 nt, Artificial Sequence
  Description of Artificial Sequence: Synthetic oligonucleotide
  Antisense strand to SEQ ID NO: 2361708
aauuaugcucaccuuuggg

SEQ ID NO: 2361710 - RNA, 19 nt, Artificial Sequence
  Description of Artificial Sequence: Synthetic oligonucleotide
  Sense strand starting at position 3312 of SEQ ID NO: 1885699
gagcauaauuuccaggaag

SEQ ID NO: 2361711 - RNA, 19 nt, Artificial Sequence
  Description of Artificial Sequence: Synthetic oligonucleotide
  Antisense strand to SEQ ID NO: 2361710
cuuccuggaaauuaugcuc

SEQ ID NO: 2361712 - RNA, 19 nt, Artificial Sequence
  Description of Artificial Sequence: Synthetic oligonucleotide
  Sense strand starting at position 3324 of SEQ ID NO: 1885699
caggaagucuuccuaagga

SEQ ID NO: 2361713 - RNA, 19 nt, Artificial Sequence
  Description of Artificial Sequence: Synthetic oligonucleotide
  Antisense strand to SEQ ID NO: 2361712
uccuuaggaagacuuccug

SEQ ID NO: 2361714 - RNA, 19 nt, Artificial Sequence
  Description of Artificial Sequence: Synthetic oligonucleotide
  Sense strand starting at position 3393 of SEQ ID NO: 1885699
cuuccauuguuagcagaaa

SEQ ID NO: 2361715 - RNA, 19 nt, Artificial Sequence
  Description of Artificial Sequence: Synthetic oligonucleotide
  Antisense strand to SEQ ID NO: 2361714
uuucugcuaacaauggaag

SEQ ID NO: 2361716 - RNA, 19 nt, Artificial Sequence
  Description of Artificial Sequence: Synthetic oligonucleotide
  Sense strand starting at position 3783 of SEQ ID NO: 1885699
aauagugacugagucauaa

SEQ ID NO: 2361717 - RNA, 19 nt, Artificial Sequence
  Description of Artificial Sequence: Synthetic oligonucleotide
  Antisense strand to SEQ ID NO: 2361716
uuaugacucagucacuauu

SEQ ID NO: 2361718 - RNA, 19 nt, Artificial Sequence
  Description of Artificial Sequence: Synthetic oligonucleotide
  Sense strand starting at position 3792 of SEQ ID NO: 1885699
ugagucauaacccgguaaa

SEQ ID NO: 2361719 - RNA, 19 nt, Artificial Sequence
  Description of Artificial Sequence: Synthetic oligonucleotide
  Antisense strand to SEQ ID NO: 2361718
uuuaccggguuaugacuca

SEQ ID NO: 2361720 - RNA, 19 nt, Artificial Sequence
  Description of Artificial Sequence: Synthetic oligonucleotide
  Sense strand starting at position 3793 of SEQ ID NO: 1885699
gagucauaacccgguaaag

SEQ ID NO: 2361721 - RNA, 19 nt, Artificial Sequence
  Description of Artificial Sequence: Synthetic oligonucleotide
  Antisense strand to SEQ ID NO: 2361720
cuuuaccggguuaugacuc

SEQ ID NO: 2361722 - RNA, 19 nt, Artificial Sequence
  Description of Artificial Sequence: Synthetic oligonucleotide
  Sense strand starting at position 3795 of SEQ ID NO: 1885699
gucauaacccgguaaaguc

SEQ ID NO: 2361723 - RNA, 19 nt, Artificial Sequence
  Description of Artificial Sequence: Synthetic oligonucleotide
  Antisense strand to SEQ ID NO: 2361722
gacuuuaccggguuaugac

SEQ ID NO: 2361724 - RNA, 19 nt, Artificial Sequence
  Description of Artificial Sequence: Synthetic oligonucleotide
  Sense strand starting at position 3900 of SEQ ID NO: 1885699
caggcuuguccacagcaau

SEQ ID NO: 2361725 - RNA, 19 nt, Artificial Sequence
  Description of Artificial Sequence: Synthetic oligonucleotide
  Antisense strand to SEQ ID NO: 2361724
auugcuguggacaagccug

SEQ ID NO: 2361726 - RNA, 19 nt, Artificial Sequence
  Description of Artificial Sequence: Synthetic oligonucleotide
  Sense strand starting at position 58 of SEQ ID NO: 1885700
gagggaucugauugauguu

SEQ ID NO: 2361727 - RNA, 19 nt, Artificial Sequence
  Description of Artificial Sequence: Synthetic oligonucleotide
  Antisense strand to SEQ ID NO: 2361726
aacaucaaucagaucccuc

SEQ ID NO: 2361728 - RNA, 19 nt, Artificial Sequence
  Description of Artificial Sequence: Synthetic oligonucleotide
  Sense strand starting at position 253 of SEQ ID NO: 1885700
gagggauccggugguguga

SEQ ID NO: 2361729 - RNA, 19 nt, Artificial Sequence
  Description of Artificial Sequence: Synthetic oligonucleotide
  Antisense strand to SEQ ID NO: 2361728
ucacaccaccggaucccuc

SEQ ID NO: 2361730 - RNA, 19 nt, Artificial Sequence
  Description of Artificial Sequence: Synthetic oligonucleotide
  Sense strand starting at position 267 of SEQ ID NO: 1885700
ugugauguguccucaauuu

SEQ ID NO: 2361731 - RNA, 19 nt, Artificial Sequence
  Description of Artificial Sequence: Synthetic oligonucleotide
  Antisense strand to SEQ ID NO: 2361730
aaauugaggacacaucaca

SEQ ID NO: 2361732 - RNA, 19 nt, Artificial Sequence
  Description of Artificial Sequence: Synthetic oligonucleotide
  Sense strand starting at position 392 of SEQ ID NO: 1885700
ugguuauagcgguaaugaa

SEQ ID NO: 2361733 - RNA, 19 nt, Artificial Sequence
  Description of Artificial Sequence: Synthetic oligonucleotide
  Antisense strand to SEQ ID NO: 2361732
uucauuaccgcuauaacca

SEQ ID NO: 2361734 - RNA, 19 nt, Artificial Sequence
  Description of Artificial Sequence: Synthetic oligonucleotide
  Sense strand starting at position 463 of SEQ ID NO: 1885700
acuggucauagcugagauc

SEQ ID NO: 2361735 - RNA, 19 nt, Artificial Sequence
  Description of Artificial Sequence: Synthetic oligonucleotide
  Antisense strand to SEQ ID NO: 2361734
gaucucagcuaugaccagu

SEQ ID NO: 2361736 - RNA, 19 nt, Artificial Sequence
  Description of Artificial Sequence: Synthetic oligonucleotide
  Sense strand starting at position 562 of SEQ ID NO: 1885700
uggagauggugcuuuccaa

SEQ ID NO: 2361737 - RNA, 19 nt, Artificial Sequence
  Description of Artificial Sequence: Synthetic oligonucleotide
  Antisense strand to SEQ ID NO: 2361736
uuggaaagcaccaucucca

SEQ ID NO: 2361738 - RNA, 19 nt, Artificial Sequence
  Description of Artificial Sequence: Synthetic oligonucleotide
  Sense strand starting at position 621 of SEQ ID NO: 1885700
gcuuauguugcccaggaau

SEQ ID NO: 2361739 - RNA, 19 nt, Artificial Sequence
  Description of Artificial Sequence: Synthetic oligonucleotide
  Antisense strand to SEQ ID NO: 2361738
auuccugggcaacauaagc

SEQ ID NO: 2361740 - RNA, 19 nt, Artificial Sequence
  Description of Artificial Sequence: Synthetic oligonucleotide
  Sense strand starting at position 623 of SEQ ID NO: 1885700
uuauguugcccaggaauag

SEQ ID NO: 2361741 - RNA, 19 nt, Artificial Sequence
  Description of Artificial Sequence: Synthetic oligonucleotide
  Antisense strand to SEQ ID NO: 2361740
cuauuccugggcaacauaa

SEQ ID NO: 2361742 - RNA, 19 nt, Artificial Sequence
  Description of Artificial Sequence: Synthetic oligonucleotide
  Sense strand starting at position 720 of SEQ ID NO: 1885700
ggcagauggcugcauaaag

SEQ ID NO: 2361743 - RNA, 19 nt, Artificial Sequence
  Description of Artificial Sequence: Synthetic oligonucleotide
  Antisense strand to SEQ ID NO: 2361742
cuuuaugcagccaucugcc

SEQ ID NO: 2361744 - RNA, 19 nt, Artificial Sequence
  Description of Artificial Sequence: Synthetic oligonucleotide
  Sense strand starting at position 760 of SEQ ID NO: 1885700
uagguuucugcucagagua

SEQ ID NO: 2361745 - RNA, 19 nt, Artificial Sequence
  Description of Artificial Sequence: Synthetic oligonucleotide
  Antisense strand to SEQ ID NO: 2361744
uacucugagcagaaaccua

SEQ ID NO: 2361746 - RNA, 19 nt, Artificial Sequence
  Description of Artificial Sequence: Synthetic oligonucleotide
  Sense strand starting at position 831 of SEQ ID NO: 1885700
ggugaauucuauucuuaau

SEQ ID NO: 2361747 - RNA, 19 nt, Artificial Sequence
  Description of Artificial Sequence: Synthetic oligonucleotide
  Antisense strand to SEQ ID NO: 2361746
auuaagaauagaauucacc

SEQ ID NO: 2361748 - RNA, 19 nt, Artificial Sequence
  Description of Artificial Sequence: Synthetic oligonucleotide
  Sense strand starting at position 874 of SEQ ID NO: 1885700
cucaucacucuugagaguu

SEQ ID NO: 2361749 - RNA, 19 nt, Artificial Sequence
  Description of Artificial Sequence: Synthetic oligonucleotide
  Antisense strand to SEQ ID NO: 2361748
aacucucaagagugaugag

SEQ ID NO: 2361750 - RNA, 19 nt, Artificial Sequence
  Description of Artificial Sequence: Synthetic oligonucleotide
  Sense strand starting at position 1085 of SEQ ID NO: 1885700
ucuggacuuugauucgaga

SEQ ID NO: 2361751 - RNA, 19 nt, Artificial Sequence
  Description of Artificial Sequence: Synthetic oligonucleotide
  Antisense strand to SEQ ID NO: 2361750
ucucgaaucaaaguccaga

SEQ ID NO: 2361752 - RNA, 19 nt, Artificial Sequence
  Description of Artificial Sequence: Synthetic oligonucleotide
  Sense strand starting at position 1087 of SEQ ID NO: 1885700
uggacuuugauucgagaug

SEQ ID NO: 2361753 - RNA, 19 nt, Artificial Sequence
  Description of Artificial Sequence: Synthetic oligonucleotide
  Antisense strand to SEQ ID NO: 2361752
caucucgaaucaaagucca

SEQ ID NO: 2361754 - RNA, 19 nt, Artificial Sequence
  Description of Artificial Sequence: Synthetic oligonucleotide
  Sense strand starting at position 1092 of SEQ ID NO: 1885700
uuugauucgagauguugga

SEQ ID NO: 2361755 - RNA, 19 nt, Artificial Sequence
  Description of Artificial Sequence: Synthetic oligonucleotide
  Antisense strand to SEQ ID NO: 2361754
uccaacaucucgaaucaaa

SEQ ID NO: 2361756 - RNA, 19 nt, Artificial Sequence
  Description of Artificial Sequence: Synthetic oligonucleotide
  Sense strand starting at position 1483 of SEQ ID NO: 1885700
uagguuguaugucuuuaaa

SEQ ID NO: 2361757 - RNA, 19 nt, Artificial Sequence
  Description of Artificial Sequence: Synthetic oligonucleotide
  Antisense strand to SEQ ID NO: 2361756
uuuaaagacauacaaccua

SEQ ID NO: 2361758 - RNA, 19 nt, Artificial Sequence
  Description of Artificial Sequence: Synthetic oligonucleotide
  Sense strand starting at position 1574 of SEQ ID NO: 1885700
aucuauuuaugacagaagu

SEQ ID NO: 2361759 - RNA, 19 nt, Artificial Sequence
  Description of Artificial Sequence: Synthetic oligonucleotide
  Antisense strand to SEQ ID NO: 2361758
acuucugucauaaauagau

SEQ ID NO: 2361760 - RNA, 19 nt, Artificial Sequence
  Description of Artificial Sequence: Synthetic oligonucleotide
  Sense strand starting at position 1584 of SEQ ID NO: 1885700
gacagaagucuuuguuaua

SEQ ID NO: 2361761 - RNA, 19 nt, Artificial Sequence
  Description of Artificial Sequence: Synthetic oligonucleotide
  Antisense strand to SEQ ID NO: 2361760
uauaacaaagacuucuguc

SEQ ID NO: 2361762 - RNA, 19 nt, Artificial Sequence
  Description of Artificial Sequence: Synthetic oligonucleotide
  Sense strand starting at position 1860 of SEQ ID NO: 1885700
ugauguuaaccauguaaua

SEQ ID NO: 2361763 - RNA, 19 nt, Artificial Sequence
  Description of Artificial Sequence: Synthetic oligonucleotide
  Antisense strand to SEQ ID NO: 2361762
uauuacaugguuaacauca

SEQ ID NO: 2361764 - RNA, 19 nt, Artificial Sequence
  Description of Artificial Sequence: Synthetic oligonucleotide
  Sense strand starting at position 2235 of SEQ ID NO: 1885700
guaucagaguucccaggau

SEQ ID NO: 2361765 - RNA, 19 nt, Artificial Sequence
  Description of Artificial Sequence: Synthetic oligonucleotide
  Antisense strand to SEQ ID NO: 2361764
auccugggaacucugauac

SEQ ID NO: 2361766 - RNA, 19 nt, Artificial Sequence
  Description of Artificial Sequence: Synthetic oligonucleotide
  Sense strand starting at position 2611 of SEQ ID NO: 1885700
ggaggagagcccuggguuu

SEQ ID NO: 2361767 - RNA, 19 nt, Artificial Sequence
  Description of Artificial Sequence: Synthetic oligonucleotide
  Antisense strand to SEQ ID NO: 2361766
aaacccagggcucuccucc

SEQ ID NO: 2361768 - RNA, 19 nt, Artificial Sequence
  Description of Artificial Sequence: Synthetic oligonucleotide
  Sense strand starting at position 2613 of SEQ ID NO: 1885700
aggagagcccuggguuuaa

SEQ ID NO: 2361769 - RNA, 19 nt, Artificial Sequence
  Description of Artificial Sequence: Synthetic oligonucleotide
  Antisense strand to SEQ ID NO: 2361768
uuaaacccagggcucuccu

SEQ ID NO: 2361770 - RNA, 19 nt, Artificial Sequence
  Description of Artificial Sequence: Synthetic oligonucleotide
  Sense strand starting at position 2683 of SEQ ID NO: 1885700
aagagucuacaagguuuau

SEQ ID NO: 2361771 - RNA, 19 nt, Artificial Sequence
  Description of Artificial Sequence: Synthetic oligonucleotide
  Antisense strand to SEQ ID NO: 2361770
auaaaccuuguagacucuu

SEQ ID NO: 2361772 - RNA, 19 nt, Artificial Sequence
  Description of Artificial Sequence: Synthetic oligonucleotide
  Sense strand starting at position 3018 of SEQ ID NO: 1885700
ggcaauuucccaugagugc

SEQ ID NO: 2361773 - RNA, 19 nt, Artificial Sequence
  Description of Artificial Sequence: Synthetic oligonucleotide
  Antisense strand to SEQ ID NO: 2361772
gcacucaugggaaauugcc

SEQ ID NO: 2361774 - RNA, 19 nt, Artificial Sequence
  Description of Artificial Sequence: Synthetic oligonucleotide
  Sense strand starting at position 3203 of SEQ ID NO: 1885700
uuguuuaggucucugaauu

SEQ ID NO: 2361775 - RNA, 19 nt, Artificial Sequence
  Description of Artificial Sequence: Synthetic oligonucleotide
  Antisense strand to SEQ ID NO: 2361774
aauucagagaccuaaacaa

SEQ ID NO: 2361776 - RNA, 19 nt, Artificial Sequence
  Description of Artificial Sequence: Synthetic oligonucleotide
  Sense strand starting at position 3204 of SEQ ID NO: 1885700
uguuuaggucucugaauug

SEQ ID NO: 2361777 - RNA, 19 nt, Artificial Sequence
  Description of Artificial Sequence: Synthetic oligonucleotide
  Antisense strand to SEQ ID NO: 2361776
caauucagagaccuaaaca

SEQ ID NO: 2361778 - RNA, 19 nt, Artificial Sequence
  Description of Artificial Sequence: Synthetic oligonucleotide
  Sense strand starting at position 3230 of SEQ ID NO: 1885700
aacugaagggauugccauu

SEQ ID NO: 2361779 - RNA, 19 nt, Artificial Sequence
  Description of Artificial Sequence: Synthetic oligonucleotide
  Antisense strand to SEQ ID NO: 2361778
aauggcaaucccuucaguu

SEQ ID NO: 2361780 - RNA, 19 nt, Artificial Sequence
  Description of Artificial Sequence: Synthetic oligonucleotide
  Sense strand starting at position 3625 of SEQ ID NO: 1885700
cuggauaagaugcaugcua

SEQ ID NO: 2361781 - RNA, 19 nt, Artificial Sequence
  Description of Artificial Sequence: Synthetic oligonucleotide
  Antisense strand to SEQ ID NO: 2361780
uagcaugcaucuuauccag

SEQ ID NO: 2361782 - RNA, 19 nt, Artificial Sequence
  Description of Artificial Sequence: Synthetic oligonucleotide
  Sense strand starting at position 3627 of SEQ ID NO: 1885700
ggauaagaugcaugcuaag

SEQ ID NO: 2361783 - RNA, 19 nt, Artificial Sequence
  Description of Artificial Sequence: Synthetic oligonucleotide
  Antisense strand to SEQ ID NO: 2361782
cuuagcaugcaucuuaucc

SEQ ID NO: 2361784 - RNA, 19 nt, Artificial Sequence
  Description of Artificial Sequence: Synthetic oligonucleotide
  Sense strand starting at position 3633 of SEQ ID NO: 1885700
gaugcaugcuaagcaauga

SEQ ID NO: 2361785 - RNA, 19 nt, Artificial Sequence
  Description of Artificial Sequence: Synthetic oligonucleotide
  Antisense strand to SEQ ID NO: 2361784
ucauugcuuagcaugcauc

SEQ ID NO: 2361786 - RNA, 19 nt, Artificial Sequence
  Description of Artificial Sequence: Synthetic oligonucleotide
  Sense strand starting at position 3646 of SEQ ID NO: 1885700
caaugaccgucgguaucaa

SEQ ID NO: 2361787 - RNA, 19 nt, Artificial Sequence
  Description of Artificial Sequence: Synthetic oligonucleotide
  Antisense strand to SEQ ID NO: 2361786
uugauaccgacggucauug

SEQ ID NO: 2361788 - RNA, 19 nt, Artificial Sequence
  Description of Artificial Sequence: Synthetic oligonucleotide
  Sense strand starting at position 3769 of SEQ ID NO: 1885700
agagaaacuuuacaugauc

SEQ ID NO: 2361789 - RNA, 19 nt, Artificial Sequence
  Description of Artificial Sequence: Synthetic oligonucleotide
  Antisense strand to SEQ ID NO: 2361788
gaucauguaaaguuucucu

SEQ ID NO: 2361790 - RNA, 19 nt, Artificial Sequence
  Description of Artificial Sequence: Synthetic oligonucleotide
  Sense strand starting at position 3774 of SEQ ID NO: 1885700
aacuuuacaugaucgggau

SEQ ID NO: 2361791 - RNA, 19 nt, Artificial Sequence
  Description of Artificial Sequence: Synthetic oligonucleotide
  Antisense strand to SEQ ID NO: 2361790
aucccgaucauguaaaguu

SEQ ID NO: 2361792 - RNA, 19 nt, Artificial Sequence
  Description of Artificial Sequence: Synthetic oligonucleotide
  Sense strand starting at position 3789 of SEQ ID NO: 1885700
ggauccagugcuugaggaa

SEQ ID NO: 2361793 - RNA, 19 nt, Artificial Sequence
  Description of Artificial Sequence: Synthetic oligonucleotide
  Antisense strand to SEQ ID NO: 2361792
uuccucaagcacuggaucc

SEQ ID NO: 2361794 - RNA, 19 nt, Artificial Sequence
  Description of Artificial Sequence: Synthetic oligonucleotide
  Sense strand starting at position 3802 of SEQ ID NO: 1885700
gaggaaagcugucccauca

SEQ ID NO: 2361795 - RNA, 19 nt, Artificial Sequence
  Description of Artificial Sequence: Synthetic oligonucleotide
  Antisense strand to SEQ ID NO: 2361794
ugaugggacagcuuuccuc

SEQ ID NO: 2361796 - RNA, 19 nt, Artificial Sequence
  Description of Artificial Sequence: Synthetic oligonucleotide
  Sense strand starting at position 3821 of SEQ ID NO: 1885700
gaagcauccuacuugaggu

SEQ ID NO: 2361797 - RNA, 19 nt, Artificial Sequence
  Description of Artificial Sequence: Synthetic oligonucleotide
  Antisense strand to SEQ ID NO: 2361796
accucaaguaggaugcuuc

SEQ ID NO: 2361798 - RNA, 19 nt, Artificial Sequence
  Description of Artificial Sequence: Synthetic oligonucleotide
  Sense strand starting at position 3859 of SEQ ID NO: 1885700
cugugaugugucuauugug

SEQ ID NO: 2361799 - RNA, 19 nt, Artificial Sequence
  Description of Artificial Sequence: Synthetic oligonucleotide
  Antisense strand to SEQ ID NO: 2361798
cacaauagacacaucacag

SEQ ID NO: 2361800 - RNA, 19 nt, Artificial Sequence
  Description of Artificial Sequence: Synthetic oligonucleotide
  Sense strand starting at position 3885 of SEQ ID NO: 1885700
gguccagcaucuucccaaa

SEQ ID NO: 2361801 - RNA, 19 nt, Artificial Sequence
  Description of Artificial Sequence: Synthetic oligonucleotide
  Antisense strand to SEQ ID NO: 2361800
uuugggaagaugcuggacc

SEQ ID NO: 2361802 - RNA, 19 nt, Artificial Sequence
  Description of Artificial Sequence: Synthetic oligonucleotide
  Sense strand starting at position 3938 of SEQ ID NO: 1885700
gagaaucugcuacaucagu

SEQ ID NO: 2361803 - RNA, 19 nt, Artificial Sequence
  Description of Artificial Sequence: Synthetic oligonucleotide
  Antisense strand to SEQ ID NO: 2361802
acugauguagcagauucuc

SEQ ID NO: 2361804 - RNA, 19 nt, Artificial Sequence
  Description of Artificial Sequence: Synthetic oligonucleotide
  Sense strand starting at position 3961 of SEQ ID NO: 1885700
cuccuaguccauuggcuaa

SEQ ID NO: 2361805 - RNA, 19 nt, Artificial Sequence
  Description of Artificial Sequence: Synthetic oligonucleotide
  Antisense strand to SEQ ID NO: 2361804
uuagccaauggacuaggag

SEQ ID NO: 2361806 - RNA, 19 nt, Artificial Sequence
  Description of Artificial Sequence: Synthetic oligonucleotide
  Sense strand starting at position 25 of SEQ ID NO: 1885701
gaaagcuuccuccacggau

SEQ ID NO: 2361807 - RNA, 19 nt, Artificial Sequence
  Description of Artificial Sequence: Synthetic oligonucleotide
  Antisense strand to SEQ ID NO: 2361806
auccguggaggaagcuuuc

SEQ ID NO: 2361808 - RNA, 19 nt, Artificial Sequence
  Description of Artificial Sequence: Synthetic oligonucleotide
  Sense strand starting at position 81 of SEQ ID NO: 1885701
augcaugucagagauaagc

SEQ ID NO: 2361809 - RNA, 19 nt, Artificial Sequence
  Description of Artificial Sequence: Synthetic oligonucleotide
  Antisense strand to SEQ ID NO: 2361808
gcuuaucucugacaugcau

SEQ ID NO: 2361810 - RNA, 19 nt, Artificial Sequence
  Description of Artificial Sequence: Synthetic oligonucleotide
  Sense strand starting at position 83 of SEQ ID NO: 1885701
gcaugucagagauaagcaa

SEQ ID NO: 2361811 - RNA, 19 nt, Artificial Sequence
  Description of Artificial Sequence: Synthetic oligonucleotide
  Antisense strand to SEQ ID NO: 2361810
uugcuuaucucugacaugc

SEQ ID NO: 2361812 - RNA, 19 nt, Artificial Sequence
  Description of Artificial Sequence: Synthetic oligonucleotide
  Sense strand starting at position 113 of SEQ ID NO: 1885701
agaauucuguuuccgauaa

SEQ ID NO: 2361813 - RNA, 19 nt, Artificial Sequence
  Description of Artificial Sequence: Synthetic oligonucleotide
  Antisense strand to SEQ ID NO: 2361812
uuaucggaaacagaauucu

SEQ ID NO: 2361814 - RNA, 19 nt, Artificial Sequence
  Description of Artificial Sequence: Synthetic oligonucleotide
  Sense strand starting at position 139 of SEQ ID NO: 1885701
ugucacugaucccugaaga

SEQ ID NO: 2361815 - RNA, 19 nt, Artificial Sequence
  Description of Artificial Sequence: Synthetic oligonucleotide
  Antisense strand to SEQ ID NO: 2361814
ucuucagggaucagugaca

SEQ ID NO: 2361816 - RNA, 19 nt, Artificial Sequence
  Description of Artificial Sequence: Synthetic oligonucleotide
  Sense strand starting at position 140 of SEQ ID NO: 1885701
gucacugaucccugaagac

SEQ ID NO: 2361817 - RNA, 19 nt, Artificial Sequence
  Description of Artificial Sequence: Synthetic oligonucleotide
  Antisense strand to SEQ ID NO: 2361816
gucuucagggaucagugac

SEQ ID NO: 2361818 - RNA, 19 nt, Artificial Sequence
  Description of Artificial Sequence: Synthetic oligonucleotide
  Sense strand starting at position 242 of SEQ ID NO: 1885701
ggcccagcacaucaauaau

SEQ ID NO: 2361819 - RNA, 19 nt, Artificial Sequence
  Description of Artificial Sequence: Synthetic oligonucleotide
  Antisense strand to SEQ ID NO: 2361818
auuauugaugugcugggcc

SEQ ID NO: 2361820 - RNA, 19 nt, Artificial Sequence
  Description of Artificial Sequence: Synthetic oligonucleotide
  Sense strand starting at position 331 of SEQ ID NO: 1885701
caggucuuguaucugggaa

SEQ ID NO: 2361821 - RNA, 19 nt, Artificial Sequence
  Description of Artificial Sequence: Synthetic oligonucleotide
  Antisense strand to SEQ ID NO: 2361820
uucccagauacaagaccug

SEQ ID NO: 2361822 - RNA, 19 nt, Artificial Sequence
  Description of Artificial Sequence: Synthetic oligonucleotide
  Sense strand starting at position 332 of SEQ ID NO: 1885701
aggucuuguaucugggaag

SEQ ID NO: 2361823 - RNA, 19 nt, Artificial Sequence
  Description of Artificial Sequence: Synthetic oligonucleotide
  Antisense strand to SEQ ID NO: 2361822
cuucccagauacaagaccu

SEQ ID NO: 2361824 - RNA, 19 nt, Artificial Sequence
  Description of Artificial Sequence: Synthetic oligonucleotide
  Sense strand starting at position 349 of SEQ ID NO: 1885701
agcccuuugaggcaugauu

SEQ ID NO: 2361825 - RNA, 19 nt, Artificial Sequence
  Description of Artificial Sequence: Synthetic oligonucleotide
  Antisense strand to SEQ ID NO: 2361824
aaucaugccucaaagggcu

SEQ ID NO: 2361826 - RNA, 19 nt, Artificial Sequence
  Description of Artificial Sequence: Synthetic oligonucleotide
  Sense strand starting at position 391 of SEQ ID NO: 1885701
augcuauuuacgcauguga

SEQ ID NO: 2361827 - RNA, 19 nt, Artificial Sequence
  Description of Artificial Sequence: Synthetic oligonucleotide
  Antisense strand to SEQ ID NO: 2361826
ucacaugcguaaauagcau

SEQ ID NO: 2361828 - RNA, 19 nt, Artificial Sequence
  Description of Artificial Sequence: Synthetic oligonucleotide
  Sense strand starting at position 393 of SEQ ID NO: 1885701
gcuauuuacgcaugugaaa

SEQ ID NO: 2361829 - RNA, 19 nt, Artificial Sequence
  Description of Artificial Sequence: Synthetic oligonucleotide
  Antisense strand to SEQ ID NO: 2361828
uuucacaugcguaaauagc

SEQ ID NO: 2361830 - RNA, 19 nt, Artificial Sequence
  Description of Artificial Sequence: Synthetic oligonucleotide
  Sense strand starting at position 572 of SEQ ID NO: 1885701
guauuagcaucacuugaga

SEQ ID NO: 2361831 - RNA, 19 nt, Artificial Sequence
  Description of Artificial Sequence: Synthetic oligonucleotide
  Antisense strand to SEQ ID NO: 2361830
ucucaagugaugcuaauac

SEQ ID NO: 2361832 - RNA, 19 nt, Artificial Sequence
  Description of Artificial Sequence: Synthetic oligonucleotide
  Sense strand starting at position 780 of SEQ ID NO: 1885701
gucuuauuccaugagaguc

SEQ ID NO: 2361833 - RNA, 19 nt, Artificial Sequence
  Description of Artificial Sequence: Synthetic oligonucleotide
  Antisense strand to SEQ ID NO: 2361832
gacucucauggaauaagac

SEQ ID NO: 2361834 - RNA, 19 nt, Artificial Sequence
  Description of Artificial Sequence: Synthetic oligonucleotide
  Sense strand starting at position 788 of SEQ ID NO: 1885701
ccaugagagucugucuaag

SEQ ID NO: 2361835 - RNA, 19 nt, Artificial Sequence
  Description of Artificial Sequence: Synthetic oligonucleotide
  Antisense strand to SEQ ID NO: 2361834
cuuagacagacucucaugg

SEQ ID NO: 2361836 - RNA, 19 nt, Artificial Sequence
  Description of Artificial Sequence: Synthetic oligonucleotide
  Sense strand starting at position 790 of SEQ ID NO: 1885701
augagagucugucuaagau

SEQ ID NO: 2361837 - RNA, 19 nt, Artificial Sequence
  Description of Artificial Sequence: Synthetic oligonucleotide
  Antisense strand to SEQ ID NO: 2361836
aucuuagacagacucucau

SEQ ID NO: 2361838 - RNA, 19 nt, Artificial Sequence
  Description of Artificial Sequence: Synthetic oligonucleotide
  Sense strand starting at position 913 of SEQ ID NO: 1885701
acaggaaauguacggaguu

SEQ ID NO: 2361839 - RNA, 19 nt, Artificial Sequence
  Description of Artificial Sequence: Synthetic oligonucleotide
  Antisense strand to SEQ ID NO: 2361838
aacuccguacauuuccugu

SEQ ID NO: 2361840 - RNA, 19 nt, Artificial Sequence
  Description of Artificial Sequence: Synthetic oligonucleotide
  Sense strand starting at position 941 of SEQ ID NO: 1885701
guuugcauucccuacagga

SEQ ID NO: 2361841 - RNA, 19 nt, Artificial Sequence
  Description of Artificial Sequence: Synthetic oligonucleotide
  Antisense strand to SEQ ID NO: 2361840
uccuguagggaaugcaaac

SEQ ID NO: 2361842 - RNA, 19 nt, Artificial Sequence
  Description of Artificial Sequence: Synthetic oligonucleotide
  Sense strand starting at position 1049 of SEQ ID NO: 1885701
ccggcaucucuccaaggaa

SEQ ID NO: 2361843 - RNA, 19 nt, Artificial Sequence
  Description of Artificial Sequence: Synthetic oligonucleotide
  Antisense strand to SEQ ID NO: 2361842
uuccuuggagagaugccgg

SEQ ID NO: 2361844 - RNA, 19 nt, Artificial Sequence
  Description of Artificial Sequence: Synthetic oligonucleotide
  Sense strand starting at position 1052 of SEQ ID NO: 1885701
gcaucucuccaaggaauuc

SEQ ID NO: 2361845 - RNA, 19 nt, Artificial Sequence
  Description of Artificial Sequence: Synthetic oligonucleotide
  Antisense strand to SEQ ID NO: 2361844
gaauuccuuggagagaugc

SEQ ID NO: 2361846 - RNA, 19 nt, Artificial Sequence
  Description of Artificial Sequence: Synthetic oligonucleotide
  Sense strand starting at position 1181 of SEQ ID NO: 1885701
gcuagcauuuguccaagga

SEQ ID NO: 2361847 - RNA, 19 nt, Artificial Sequence
  Description of Artificial Sequence: Synthetic oligonucleotide
  Antisense strand to SEQ ID NO: 2361846
uccuuggacaaaugcuagc

SEQ ID NO: 2361848 - RNA, 19 nt, Artificial Sequence
  Description of Artificial Sequence: Synthetic oligonucleotide
  Sense strand starting at position 1220 of SEQ ID NO: 1885701
uucugagaucacuggauuc

SEQ ID NO: 2361849 - RNA, 19 nt, Artificial Sequence
  Description of Artificial Sequence: Synthetic oligonucleotide
  Antisense strand to SEQ ID NO: 2361848
gaauccagugaucucagaa

SEQ ID NO: 2361850 - RNA, 19 nt, Artificial Sequence
  Description of Artificial Sequence: Synthetic oligonucleotide
  Sense strand starting at position 1449 of SEQ ID NO: 1885701
gggcaucuucuccaaaguu

SEQ ID NO: 2361851 - RNA, 19 nt, Artificial Sequence
  Description of Artificial Sequence: Synthetic oligonucleotide
  Antisense strand to SEQ ID NO: 2361850
aacuuuggagaagaugccc

SEQ ID NO: 2361852 - RNA, 19 nt, Artificial Sequence
  Description of Artificial Sequence: Synthetic oligonucleotide
  Sense strand starting at position 1478 of SEQ ID NO: 1885701
ccagaaaguucuucucagg

SEQ ID NO: 2361853 - RNA, 19 nt, Artificial Sequence
  Description of Artificial Sequence: Synthetic oligonucleotide
  Antisense strand to SEQ ID NO: 2361852
ccugagaagaacuuucugg

SEQ ID NO: 2361854 - RNA, 19 nt, Artificial Sequence
  Description of Artificial Sequence: Synthetic oligonucleotide
  Sense strand starting at position 1602 of SEQ ID NO: 1885701
augaucggucccuaagguu

SEQ ID NO: 2361855 - RNA, 19 nt, Artificial Sequence
  Description of Artificial Sequence: Synthetic oligonucleotide
  Antisense strand to SEQ ID NO: 2361854
aaccuuagggaccgaucau

SEQ ID NO: 2361856 - RNA, 19 nt, Artificial Sequence
  Description of Artificial Sequence: Synthetic oligonucleotide
  Sense strand starting at position 1648 of SEQ ID NO: 1885701
gaagcaggauuugauaagu

SEQ ID NO: 2361857 - RNA, 19 nt, Artificial Sequence
  Description of Artificial Sequence: Synthetic oligonucleotide
  Antisense strand to SEQ ID NO: 2361856
acuuaucaaauccugcuuc

SEQ ID NO: 2361858 - RNA, 19 nt, Artificial Sequence
  Description of Artificial Sequence: Synthetic oligonucleotide
  Sense strand starting at position 1657 of SEQ ID NO: 1885701
uuugauaaguagcuugaau

SEQ ID NO: 2361859 - RNA, 19 nt, Artificial Sequence
  Description of Artificial Sequence: Synthetic oligonucleotide
  Antisense strand to SEQ ID NO: 2361858
auucaagcuacuuaucaaa

SEQ ID NO: 2361860 - RNA, 19 nt, Artificial Sequence
  Description of Artificial Sequence: Synthetic oligonucleotide
  Sense strand starting at position 1708 of SEQ ID NO: 1885701
augcaaaucccugauagca

SEQ ID NO: 2361861 - RNA, 19 nt, Artificial Sequence
  Description of Artificial Sequence: Synthetic oligonucleotide
  Antisense strand to SEQ ID NO: 2361860
ugcuaucagggauuugcau

SEQ ID NO: 2361862 - RNA, 19 nt, Artificial Sequence
  Description of Artificial Sequence: Synthetic oligonucleotide
  Sense strand starting at position 2251 of SEQ ID NO: 1885701
cagggacugucucucuuaa

SEQ ID NO: 2361863 - RNA, 19 nt, Artificial Sequence
  Description of Artificial Sequence: Synthetic oligonucleotide
  Antisense strand to SEQ ID NO: 2361862
uuaagagagacagucccug

SEQ ID NO: 2361864 - RNA, 19 nt, Artificial Sequence
  Description of Artificial Sequence: Synthetic oligonucleotide
  Sense strand starting at position 2261 of SEQ ID NO: 1885701
cucucuuaaguggagcaaa

SEQ ID NO: 2361865 - RNA, 19 nt, Artificial Sequence
  Description of Artificial Sequence: Synthetic oligonucleotide
  Antisense strand to SEQ ID NO: 2361864
uuugcuccacuuaagagag

SEQ ID NO: 2361866 - RNA, 19 nt, Artificial Sequence
  Description of Artificial Sequence: Synthetic oligonucleotide
  Sense strand starting at position 2422 of SEQ ID NO: 1885701
uuccauacccgaugaagga

SEQ ID NO: 2361867 - RNA, 19 nt, Artificial Sequence
  Description of Artificial Sequence: Synthetic oligonucleotide
  Antisense strand to SEQ ID NO: 2361866
uccuucaucggguauggaa

SEQ ID NO: 2361868 - RNA, 19 nt, Artificial Sequence
  Description of Artificial Sequence: Synthetic oligonucleotide
  Sense strand starting at position 2639 of SEQ ID NO: 1885701
ccaagaaauggacgccaau

SEQ ID NO: 2361869 - RNA, 19 nt, Artificial Sequence
  Description of Artificial Sequence: Synthetic oligonucleotide
  Antisense strand to SEQ ID NO: 2361868
auuggcguccauuucuugg

SEQ ID NO: 2361870 - RNA, 19 nt, Artificial Sequence
  Description of Artificial Sequence: Synthetic oligonucleotide
  Sense strand starting at position 2728 of SEQ ID NO: 1885701
guaaaugucagagguggga

SEQ ID NO: 2361871 - RNA, 19 nt, Artificial Sequence
  Description of Artificial Sequence: Synthetic oligonucleotide
  Antisense strand to SEQ ID NO: 2361870
ucccaccucugacauuuac

SEQ ID NO: 2361872 - RNA, 19 nt, Artificial Sequence
  Description of Artificial Sequence: Synthetic oligonucleotide
  Sense strand starting at position 2935 of SEQ ID NO: 1885701
ggaugaauuagaugcugag

SEQ ID NO: 2361873 - RNA, 19 nt, Artificial Sequence
  Description of Artificial Sequence: Synthetic oligonucleotide
  Antisense strand to SEQ ID NO: 2361872
cucagcaucuaauucaucc

SEQ ID NO: 2361874 - RNA, 19 nt, Artificial Sequence
  Description of Artificial Sequence: Synthetic oligonucleotide
  Sense strand starting at position 2939 of SEQ ID NO: 1885701
gaauuagaugcugaggguu

SEQ ID NO: 2361875 - RNA, 19 nt, Artificial Sequence
  Description of Artificial Sequence: Synthetic oligonucleotide
  Antisense strand to SEQ ID NO: 2361874
aacccucagcaucuaauuc

SEQ ID NO: 2361876 - RNA, 19 nt, Artificial Sequence
  Description of Artificial Sequence: Synthetic oligonucleotide
  Sense strand starting at position 3229 of SEQ ID NO: 1885701
ccgugaacgauuugccaca

SEQ ID NO: 2361877 - RNA, 19 nt, Artificial Sequence
  Description of Artificial Sequence: Synthetic oligonucleotide
  Antisense strand to SEQ ID NO: 2361876
uguggcaaaucguucacgg

SEQ ID NO: 2361878 - RNA, 19 nt, Artificial Sequence
  Description of Artificial Sequence: Synthetic oligonucleotide
  Sense strand starting at position 3313 of SEQ ID NO: 1885701
caagacaagguuugauacu

SEQ ID NO: 2361879 - RNA, 19 nt, Artificial Sequence
  Description of Artificial Sequence: Synthetic oligonucleotide
  Antisense strand to SEQ ID NO: 2361878
aguaucaaaccuugucuug

SEQ ID NO: 2361880 - RNA, 19 nt, Artificial Sequence
  Description of Artificial Sequence: Synthetic oligonucleotide
  Sense strand starting at position 3319 of SEQ ID NO: 1885701
aagguuugauacucacaga

SEQ ID NO: 2361881 - RNA, 19 nt, Artificial Sequence
  Description of Artificial Sequence: Synthetic oligonucleotide
  Antisense strand to SEQ ID NO: 2361880
ucugugaguaucaaaccuu

SEQ ID NO: 2361882 - RNA, 19 nt, Artificial Sequence
  Description of Artificial Sequence: Synthetic oligonucleotide
  Sense strand starting at position 3637 of SEQ ID NO: 1885701
auuagaacuuguuccugaa

SEQ ID NO: 2361883 - RNA, 19 nt, Artificial Sequence
  Description of Artificial Sequence: Synthetic oligonucleotide
  Antisense strand to SEQ ID NO: 2361882
uucaggaacaaguucuaau

SEQ ID NO: 2361884 - RNA, 19 nt, Artificial Sequence
  Description of Artificial Sequence: Synthetic oligonucleotide
  Sense strand starting at position 3760 of SEQ ID NO: 1885701
gcaccucuccaggaaguuu

SEQ ID NO: 2361885 - RNA, 19 nt, Artificial Sequence
  Description of Artificial Sequence: Synthetic oligonucleotide
  Antisense strand to SEQ ID NO: 2361884
aaacuuccuggagaggugc

SEQ ID NO: 2361886 - RNA, 19 nt, Artificial Sequence
  Description of Artificial Sequence: Synthetic oligonucleotide
  Sense strand starting at position 5 of SEQ ID NO: 1885702
gugucuugugugucaugau

SEQ ID NO: 2361887 - RNA, 19 nt, Artificial Sequence
  Description of Artificial Sequence: Synthetic oligonucleotide
  Antisense strand to SEQ ID NO: 2361886
aucaugacacacaagacac

SEQ ID NO: 2361888 - RNA, 19 nt, Artificial Sequence
  Description of Artificial Sequence: Synthetic oligonucleotide
  Sense strand starting at position 18 of SEQ ID NO: 1885702
caugauuucugugaaugca

SEQ ID NO: 2361889 - RNA, 19 nt, Artificial Sequence
  Description of Artificial Sequence: Synthetic oligonucleotide
  Antisense strand to SEQ ID NO: 2361888
ugcauucacagaaaucaug

SEQ ID NO: 2361890 - RNA, 19 nt, Artificial Sequence
  Description of Artificial Sequence: Synthetic oligonucleotide
  Sense strand starting at position 243 of SEQ ID NO: 1885702
guccucugccucgaugaca

SEQ ID NO: 2361891 - RNA, 19 nt, Artificial Sequence
  Description of Artificial Sequence: Synthetic oligonucleotide
  Antisense strand to SEQ ID NO: 2361890
ugucaucgaggcagaggac

SEQ ID NO: 2361892 - RNA, 19 nt, Artificial Sequence
  Description of Artificial Sequence: Synthetic oligonucleotide
  Sense strand starting at position 589 of SEQ ID NO: 1885702
gugccaucggcucaagaac

SEQ ID NO: 2361893 - RNA, 19 nt, Artificial Sequence
  Description of Artificial Sequence: Synthetic oligonucleotide
  Antisense strand to SEQ ID NO: 2361892
guucuugagccgauggcac

SEQ ID NO: 2361894 - RNA, 19 nt, Artificial Sequence
  Description of Artificial Sequence: Synthetic oligonucleotide
  Sense strand starting at position 805 of SEQ ID NO: 1885702
gguccuccaaggugagauu

SEQ ID NO: 2361895 - RNA, 19 nt, Artificial Sequence
  Description of Artificial Sequence: Synthetic oligonucleotide
  Antisense strand to SEQ ID NO: 2361894
aaucucaccuuggaggacc

SEQ ID NO: 2361896 - RNA, 19 nt, Artificial Sequence
  Description of Artificial Sequence: Synthetic oligonucleotide
  Sense strand starting at position 818 of SEQ ID NO: 1885702
gagauuugauacugagaaa

SEQ ID NO: 2361897 - RNA, 19 nt, Artificial Sequence
  Description of Artificial Sequence: Synthetic oligonucleotide
  Antisense strand to SEQ ID NO: 2361896
uuucucaguaucaaaucuc

SEQ ID NO: 2361898 - RNA, 19 nt, Artificial Sequence
  Description of Artificial Sequence: Synthetic oligonucleotide
  Sense strand starting at position 1109 of SEQ ID NO: 1885702
gguggaauuugauaccgaa

SEQ ID NO: 2361899 - RNA, 19 nt, Artificial Sequence
  Description of Artificial Sequence: Synthetic oligonucleotide
  Antisense strand to SEQ ID NO: 2361898
uucgguaucaaauuccacc

SEQ ID NO: 2361900 - RNA, 19 nt, Artificial Sequence
  Description of Artificial Sequence: Synthetic oligonucleotide
  Sense strand starting at position 1203 of SEQ ID NO: 1885702
ggcucagaugcucggacua

SEQ ID NO: 2361901 - RNA, 19 nt, Artificial Sequence
  Description of Artificial Sequence: Synthetic oligonucleotide
  Antisense strand to SEQ ID NO: 2361900
uaguccgagcaucugagcc

SEQ ID NO: 2361902 - RNA, 19 nt, Artificial Sequence
  Description of Artificial Sequence: Synthetic oligonucleotide
  Sense strand starting at position 1369 of SEQ ID NO: 1885702
ucuagagacucuucccaga

SEQ ID NO: 2361903 - RNA, 19 nt, Artificial Sequence
  Description of Artificial Sequence: Synthetic oligonucleotide
  Antisense strand to SEQ ID NO: 2361902
ucugggaagagucucuaga

SEQ ID NO: 2361904 - RNA, 19 nt, Artificial Sequence
  Description of Artificial Sequence: Synthetic oligonucleotide
  Sense strand starting at position 1383 of SEQ ID NO: 1885702
ccagaaguugagugcaaga

SEQ ID NO: 2361905 - RNA, 19 nt, Artificial Sequence
  Description of Artificial Sequence: Synthetic oligonucleotide
  Antisense strand to SEQ ID NO: 2361904
ucuugcacucaacuucugg

SEQ ID NO: 2361906 - RNA, 19 nt, Artificial Sequence
  Description of Artificial Sequence: Synthetic oligonucleotide
  Sense strand starting at position 1704 of SEQ ID NO: 1885702
ucugauuagccucauaaag

SEQ ID NO: 2361907 - RNA, 19 nt, Artificial Sequence
  Description of Artificial Sequence: Synthetic oligonucleotide
  Antisense strand to SEQ ID NO: 2361906
cuuuaugaggcuaaucaga

SEQ ID NO: 2361908 - RNA, 19 nt, Artificial Sequence
  Description of Artificial Sequence: Synthetic oligonucleotide
  Sense strand starting at position 1777 of SEQ ID NO: 1885702
aggugagucacagaugucu

SEQ ID NO: 2361909 - RNA, 19 nt, Artificial Sequence
  Description of Artificial Sequence: Synthetic oligonucleotide
  Antisense strand to SEQ ID NO: 2361908
agacaucugugacucaccu

SEQ ID NO: 2361910 - RNA, 19 nt, Artificial Sequence
  Description of Artificial Sequence: Synthetic oligonucleotide
  Sense strand starting at position 1779 of SEQ ID NO: 1885702
gugagucacagaugucuuc

SEQ ID NO: 2361911 - RNA, 19 nt, Artificial Sequence
  Description of Artificial Sequence: Synthetic oligonucleotide
  Antisense strand to SEQ ID NO: 2361910
gaagacaucugugacucac

SEQ ID NO: 2361912 - RNA, 19 nt, Artificial Sequence
  Description of Artificial Sequence: Synthetic oligonucleotide
  Sense strand starting at position 1984 of SEQ ID NO: 1885702
gaauccuuucccugacguu

SEQ ID NO: 2361913 - RNA, 19 nt, Artificial Sequence
  Description of Artificial Sequence: Synthetic oligonucleotide
  Antisense strand to SEQ ID NO: 2361912
aacgucagggaaaggauuc

SEQ ID NO: 2361914 - RNA, 19 nt, Artificial Sequence
  Description of Artificial Sequence: Synthetic oligonucleotide
  Sense strand starting at position 2062 of SEQ ID NO: 1885702
cgaggccugcuguaaagaa

SEQ ID NO: 2361915 - RNA, 19 nt, Artificial Sequence
  Description of Artificial Sequence: Synthetic oligonucleotide
  Antisense strand to SEQ ID NO: 2361914
uucuuuacagcaggccucg

SEQ ID NO: 2361916 - RNA, 19 nt, Artificial Sequence
  Description of Artificial Sequence: Synthetic oligonucleotide
  Sense strand starting at position 2120 of SEQ ID NO: 1885702
ggcacugaccugcaucaga

SEQ ID NO: 2361917 - RNA, 19 nt, Artificial Sequence
  Description of Artificial Sequence: Synthetic oligonucleotide
  Antisense strand to SEQ ID NO: 2361916
ucugaugcaggucagugcc

SEQ ID NO: 2361918 - RNA, 19 nt, Artificial Sequence
  Description of Artificial Sequence: Synthetic oligonucleotide
  Sense strand starting at position 2318 of SEQ ID NO: 1885702
ucuggaaauucuccaggua

SEQ ID NO: 2361919 - RNA, 19 nt, Artificial Sequence
  Description of Artificial Sequence: Synthetic oligonucleotide
  Antisense strand to SEQ ID NO: 2361918
uaccuggagaauuuccaga

SEQ ID NO: 2361920 - RNA, 19 nt, Artificial Sequence
  Description of Artificial Sequence: Synthetic oligonucleotide
  Sense strand starting at position 2571 of SEQ ID NO: 1885702
cccagaauguuccuggaug

SEQ ID NO: 2361921 - RNA, 19 nt, Artificial Sequence
  Description of Artificial Sequence: Synthetic oligonucleotide
  Antisense strand to SEQ ID NO: 2361920
cauccaggaacauucuggg

SEQ ID NO: 2361922 - RNA, 19 nt, Artificial Sequence
  Description of Artificial Sequence: Synthetic oligonucleotide
  Sense strand starting at position 2600 of SEQ ID NO: 1885702
caucaauagccuuggaagu

SEQ ID NO: 2361923 - RNA, 19 nt, Artificial Sequence
  Description of Artificial Sequence: Synthetic oligonucleotide
  Antisense strand to SEQ ID NO: 2361922
acuuccaaggcuauugaug

SEQ ID NO: 2361924 - RNA, 19 nt, Artificial Sequence
  Description of Artificial Sequence: Synthetic oligonucleotide
  Sense strand starting at position 2613 of SEQ ID NO: 1885702
ggaagugugaaaggaaagu

SEQ ID NO: 2361925 - RNA, 19 nt, Artificial Sequence
  Description of Artificial Sequence: Synthetic oligonucleotide
  Antisense strand to SEQ ID NO: 2361924
acuuuccuuucacacuucc

SEQ ID NO: 2361926 - RNA, 19 nt, Artificial Sequence
  Description of Artificial Sequence: Synthetic oligonucleotide
  Sense strand starting at position 2669 of SEQ ID NO: 1885702
cuggaagcugcucaggaua

SEQ ID NO: 2361927 - RNA, 19 nt, Artificial Sequence
  Description of Artificial Sequence: Synthetic oligonucleotide
  Antisense strand to SEQ ID NO: 2361926
uauccugagcagcuuccag

SEQ ID NO: 2361928 - RNA, 19 nt, Artificial Sequence
  Description of Artificial Sequence: Synthetic oligonucleotide
  Sense strand starting at position 2683 of SEQ ID NO: 1885702
ggauaaaccugccucucau

SEQ ID NO: 2361929 - RNA, 19 nt, Artificial Sequence
  Description of Artificial Sequence: Synthetic oligonucleotide
  Antisense strand to SEQ ID NO: 2361928
augagaggcagguuuaucc

SEQ ID NO: 2361930 - RNA, 19 nt, Artificial Sequence
  Description of Artificial Sequence: Synthetic oligonucleotide
  Sense strand starting at position 2730 of SEQ ID NO: 1885702
gagacagaugcguaucuga

SEQ ID NO: 2361931 - RNA, 19 nt, Artificial Sequence
  Description of Artificial Sequence: Synthetic oligonucleotide
  Antisense strand to SEQ ID NO: 2361930
ucagauacgcaucugucuc

SEQ ID NO: 2361932 - RNA, 19 nt, Artificial Sequence
  Description of Artificial Sequence: Synthetic oligonucleotide
  Sense strand starting at position 2733 of SEQ ID NO: 1885702
acagaugcguaucugauuu

SEQ ID NO: 2361933 - RNA, 19 nt, Artificial Sequence
  Description of Artificial Sequence: Synthetic oligonucleotide
  Antisense strand to SEQ ID NO: 2361932
aaaucagauacgcaucugu

SEQ ID NO: 2361934 - RNA, 19 nt, Artificial Sequence
  Description of Artificial Sequence: Synthetic oligonucleotide
  Sense strand starting at position 2779 of SEQ ID NO: 1885702
cgcgaaagaauguaaucau

SEQ ID NO: 2361935 - RNA, 19 nt, Artificial Sequence
  Description of Artificial Sequence: Synthetic oligonucleotide
  Antisense strand to SEQ ID NO: 2361934
augauuacauucuuucgcg

SEQ ID NO: 2361936 - RNA, 19 nt, Artificial Sequence
  Description of Artificial Sequence: Synthetic oligonucleotide
  Sense strand starting at position 2788 of SEQ ID NO: 1885702
auguaaucauuuguguauc

SEQ ID NO: 2361937 - RNA, 19 nt, Artificial Sequence
  Description of Artificial Sequence: Synthetic oligonucleotide
  Antisense strand to SEQ ID NO: 2361936
gauacacaaaugauuacau

SEQ ID NO: 2361938 - RNA, 19 nt, Artificial Sequence
  Description of Artificial Sequence: Synthetic oligonucleotide
  Sense strand starting at position 2790 of SEQ ID NO: 1885702
guaaucauuuguguaucac

SEQ ID NO: 2361939 - RNA, 19 nt, Artificial Sequence
  Description of Artificial Sequence: Synthetic oligonucleotide
  Antisense strand to SEQ ID NO: 2361938
gugauacacaaaugauuac

SEQ ID NO: 2361940 - RNA, 19 nt, Artificial Sequence
  Description of Artificial Sequence: Synthetic oligonucleotide
  Sense strand starting at position 2885 of SEQ ID NO: 1885702
cuucuuacaugugcugaau

SEQ ID NO: 2361941 - RNA, 19 nt, Artificial Sequence
  Description of Artificial Sequence: Synthetic oligonucleotide
  Antisense strand to SEQ ID NO: 2361940
auucagcacauguaagaag

SEQ ID NO: 2361942 - RNA, 19 nt, Artificial Sequence
  Description of Artificial Sequence: Synthetic oligonucleotide
  Sense strand starting at position 2888 of SEQ ID NO: 1885702
cuuacaugugcugaaugau

SEQ ID NO: 2361943 - RNA, 19 nt, Artificial Sequence
  Description of Artificial Sequence: Synthetic oligonucleotide
  Antisense strand to SEQ ID NO: 2361942
aucauucagcacauguaag

SEQ ID NO: 2361944 - RNA, 19 nt, Artificial Sequence
  Description of Artificial Sequence: Synthetic oligonucleotide
  Sense strand starting at position 2897 of SEQ ID NO: 1885702
gcugaaugaugucucaugu

SEQ ID NO: 2361945 - RNA, 19 nt, Artificial Sequence
  Description of Artificial Sequence: Synthetic oligonucleotide
  Antisense strand to SEQ ID NO: 2361944
acaugagacaucauucagc

SEQ ID NO: 2361946 - RNA, 19 nt, Artificial Sequence
  Description of Artificial Sequence: Synthetic oligonucleotide
  Sense strand starting at position 3164 of SEQ ID NO: 1885702
ccugucacuuacguaugaa

SEQ ID NO: 2361947 - RNA, 19 nt, Artificial Sequence
  Description of Artificial Sequence: Synthetic oligonucleotide
  Antisense strand to SEQ ID NO: 2361946
uucauacguaagugacagg

SEQ ID NO: 2361948 - RNA, 19 nt, Artificial Sequence
  Description of Artificial Sequence: Synthetic oligonucleotide
  Sense strand starting at position 3264 of SEQ ID NO: 1885702
ggaagcucucgggaagguu

SEQ ID NO: 2361949 - RNA, 19 nt, Artificial Sequence
  Description of Artificial Sequence: Synthetic oligonucleotide
  Antisense strand to SEQ ID NO: 2361948
aaccuucccgagagcuucc

SEQ ID NO: 2361950 - RNA, 19 nt, Artificial Sequence
  Description of Artificial Sequence: Synthetic oligonucleotide
  Sense strand starting at position 3586 of SEQ ID NO: 1885702
gcaugaagauuugauuccu

SEQ ID NO: 2361951 - RNA, 19 nt, Artificial Sequence
  Description of Artificial Sequence: Synthetic oligonucleotide
  Antisense strand to SEQ ID NO: 2361950
aggaaucaaaucuucaugc

SEQ ID NO: 2361952 - RNA, 19 nt, Artificial Sequence
  Description of Artificial Sequence: Synthetic oligonucleotide
  Sense strand starting at position 3596 of SEQ ID NO: 1885702
uugauuccucaauguguuc

SEQ ID NO: 2361953 - RNA, 19 nt, Artificial Sequence
  Description of Artificial Sequence: Synthetic oligonucleotide
  Antisense strand to SEQ ID NO: 2361952
gaacacauugaggaaucaa

SEQ ID NO: 2361954 - RNA, 19 nt, Artificial Sequence
  Description of Artificial Sequence: Synthetic oligonucleotide
  Sense strand starting at position 3608 of SEQ ID NO: 1885702
uguguucuugucuacauca

SEQ ID NO: 2361955 - RNA, 19 nt, Artificial Sequence
  Description of Artificial Sequence: Synthetic oligonucleotide
  Antisense strand to SEQ ID NO: 2361954
ugauguagacaagaacaca

SEQ ID NO: 2361956 - RNA, 19 nt, Artificial Sequence
  Description of Artificial Sequence: Synthetic oligonucleotide
  Sense strand starting at position 3610 of SEQ ID NO: 1885702
uguucuugucuacaucaaa

SEQ ID NO: 2361957 - RNA, 19 nt, Artificial Sequence
  Description of Artificial Sequence: Synthetic oligonucleotide
  Antisense strand to SEQ ID NO: 2361956
uuugauguagacaagaaca

SEQ ID NO: 2361958 - RNA, 19 nt, Artificial Sequence
  Description of Artificial Sequence: Synthetic oligonucleotide
  Sense strand starting at position 3653 of SEQ ID NO: 1885702
ccgugaauuuccuuccaug

SEQ ID NO: 2361959 - RNA, 19 nt, Artificial Sequence
  Description of Artificial Sequence: Synthetic oligonucleotide
  Antisense strand to SEQ ID NO: 2361958
cauggaaggaaauucacgg

SEQ ID NO: 2361960 - RNA, 19 nt, Artificial Sequence
  Description of Artificial Sequence: Synthetic oligonucleotide
  Sense strand starting at position 3737 of SEQ ID NO: 1885702
auuggauuccucugccaau

SEQ ID NO: 2361961 - RNA, 19 nt, Artificial Sequence
  Description of Artificial Sequence: Synthetic oligonucleotide
  Antisense strand to SEQ ID NO: 2361960
auuggcagaggaauccaau

SEQ ID NO: 2361962 - RNA, 19 nt, Artificial Sequence
  Description of Artificial Sequence: Synthetic oligonucleotide
  Sense strand starting at position 3738 of SEQ ID NO: 1885702
uuggauuccucugccaauu

SEQ ID NO: 2361963 - RNA, 19 nt, Artificial Sequence
  Description of Artificial Sequence: Synthetic oligonucleotide
  Antisense strand to SEQ ID NO: 2361962
aauuggcagaggaauccaa

SEQ ID NO: 2361964 - RNA, 19 nt, Artificial Sequence
  Description of Artificial Sequence: Synthetic oligonucleotide
  Sense strand starting at position 3750 of SEQ ID NO: 1885702
gccaauuuguagucaacug

SEQ ID NO: 2361965 - RNA, 19 nt, Artificial Sequence
  Description of Artificial Sequence: Synthetic oligonucleotide
  Antisense strand to SEQ ID NO: 2361964
caguugacuacaaauuggc

SEQ ID NO: 2361966 - RNA, 19 nt, Artificial Sequence
  Description of Artificial Sequence: Synthetic oligonucleotide
  Sense strand starting at position 143 of SEQ ID NO: 1885703
ggagauauuugauaccgaa

SEQ ID NO: 2361967 - RNA, 19 nt, Artificial Sequence
  Description of Artificial Sequence: Synthetic oligonucleotide
  Antisense strand to SEQ ID NO: 2361966
uucgguaucaaauaucucc

SEQ ID NO: 2361968 - RNA, 19 nt, Artificial Sequence
  Description of Artificial Sequence: Synthetic oligonucleotide
  Sense strand starting at position 433 of SEQ ID NO: 1885703
gacagucaucacggauaaa

SEQ ID NO: 2361969 - RNA, 19 nt, Artificial Sequence
  Description of Artificial Sequence: Synthetic oligonucleotide
  Antisense strand to SEQ ID NO: 2361968
uuuauccgugaugacuguc

SEQ ID NO: 2361970 - RNA, 19 nt, Artificial Sequence
  Description of Artificial Sequence: Synthetic oligonucleotide
  Sense strand starting at position 436 of SEQ ID NO: 1885703
agucaucacggauaaagca

SEQ ID NO: 2361971 - RNA, 19 nt, Artificial Sequence
  Description of Artificial Sequence: Synthetic oligonucleotide
  Antisense strand to SEQ ID NO: 2361970
ugcuuuauccgugaugacu

SEQ ID NO: 2361972 - RNA, 19 nt, Artificial Sequence
  Description of Artificial Sequence: Synthetic oligonucleotide
  Sense strand starting at position 490 of SEQ ID NO: 1885703
ggaagucuucaugggcaga

SEQ ID NO: 2361973 - RNA, 19 nt, Artificial Sequence
  Description of Artificial Sequence: Synthetic oligonucleotide
  Antisense strand to SEQ ID NO: 2361972
ucugcccaugaagacuucc

SEQ ID NO: 2361974 - RNA, 19 nt, Artificial Sequence
  Description of Artificial Sequence: Synthetic oligonucleotide
  Sense strand starting at position 534 of SEQ ID NO: 1885703
ucggaauguuuacuaucaa

SEQ ID NO: 2361975 - RNA, 19 nt, Artificial Sequence
  Description of Artificial Sequence: Synthetic oligonucleotide
  Antisense strand to SEQ ID NO: 2361974
uugauaguaaacauuccga

SEQ ID NO: 2361976 - RNA, 19 nt, Artificial Sequence
  Description of Artificial Sequence: Synthetic oligonucleotide
  Sense strand starting at position 812 of SEQ ID NO: 1885703
cugacaguuaagugugagu

SEQ ID NO: 2361977 - RNA, 19 nt, Artificial Sequence
  Description of Artificial Sequence: Synthetic oligonucleotide
  Antisense strand to SEQ ID NO: 2361976
acucacacuuaacugucag

SEQ ID NO: 2361978 - RNA, 19 nt, Artificial Sequence
  Description of Artificial Sequence: Synthetic oligonucleotide
  Sense strand starting at position 814 of SEQ ID NO: 1885703
gacaguuaagugugaguug

SEQ ID NO: 2361979 - RNA, 19 nt, Artificial Sequence
  Description of Artificial Sequence: Synthetic oligonucleotide
  Antisense strand to SEQ ID NO: 2361978
caacucacacuuaacuguc

SEQ ID NO: 2361980 - RNA, 19 nt, Artificial Sequence
  Description of Artificial Sequence: Synthetic oligonucleotide
  Sense strand starting at position 819 of SEQ ID NO: 1885703
uuaagugugaguugugaca

SEQ ID NO: 2361981 - RNA, 19 nt, Artificial Sequence
  Description of Artificial Sequence: Synthetic oligonucleotide
  Antisense strand to SEQ ID NO: 2361980
ugucacaacucacacuuaa

SEQ ID NO: 2361982 - RNA, 19 nt, Artificial Sequence
  Description of Artificial Sequence: Synthetic oligonucleotide
  Sense strand starting at position 938 of SEQ ID NO: 1885703
gguggauucgagggagagu

SEQ ID NO: 2361983 - RNA, 19 nt, Artificial Sequence
  Description of Artificial Sequence: Synthetic oligonucleotide
  Antisense strand to SEQ ID NO: 2361982
acucucccucgaauccacc

SEQ ID NO: 2361984 - RNA, 19 nt, Artificial Sequence
  Description of Artificial Sequence: Synthetic oligonucleotide
  Sense strand starting at position 1038 of SEQ ID NO: 1885703
acgguaauugugcaucauu

SEQ ID NO: 2361985 - RNA, 19 nt, Artificial Sequence
  Description of Artificial Sequence: Synthetic oligonucleotide
  Antisense strand to SEQ ID NO: 2361984
aaugaugcacaauuaccgu

SEQ ID NO: 2361986 - RNA, 19 nt, Artificial Sequence
  Description of Artificial Sequence: Synthetic oligonucleotide
  Sense strand starting at position 1041 of SEQ ID NO: 1885703
guaauugugcaucauuugu

SEQ ID NO: 2361987 - RNA, 19 nt, Artificial Sequence
  Description of Artificial Sequence: Synthetic oligonucleotide
  Antisense strand to SEQ ID NO: 2361986
acaaaugaugcacaauuac

SEQ ID NO: 2361988 - RNA, 19 nt, Artificial Sequence
  Description of Artificial Sequence: Synthetic oligonucleotide
  Sense strand starting at position 1047 of SEQ ID NO: 1885703
gugcaucauuugucaacca

SEQ ID NO: 2361989 - RNA, 19 nt, Artificial Sequence
  Description of Artificial Sequence: Synthetic oligonucleotide
  Antisense strand to SEQ ID NO: 2361988
ugguugacaaaugaugcac

SEQ ID NO: 2361990 - RNA, 19 nt, Artificial Sequence
  Description of Artificial Sequence: Synthetic oligonucleotide
  Sense strand starting at position 1162 of SEQ ID NO: 1885703
auaggcaaaccgugagaaa

SEQ ID NO: 2361991 - RNA, 19 nt, Artificial Sequence
  Description of Artificial Sequence: Synthetic oligonucleotide
  Antisense strand to SEQ ID NO: 2361990
uuucucacgguuugccuau

SEQ ID NO: 2361992 - RNA, 19 nt, Artificial Sequence
  Description of Artificial Sequence: Synthetic oligonucleotide
  Sense strand starting at position 1351 of SEQ ID NO: 1885703
ggguuugaucuagggacuc

SEQ ID NO: 2361993 - RNA, 19 nt, Artificial Sequence
  Description of Artificial Sequence: Synthetic oligonucleotide
  Antisense strand to SEQ ID NO: 2361992
gagucccuagaucaaaccc

SEQ ID NO: 2361994 - RNA, 19 nt, Artificial Sequence
  Description of Artificial Sequence: Synthetic oligonucleotide
  Sense strand starting at position 1373 of SEQ ID NO: 1885703
ugauaucauccaggcucuu

SEQ ID NO: 2361995 - RNA, 19 nt, Artificial Sequence
  Description of Artificial Sequence: Synthetic oligonucleotide
  Antisense strand to SEQ ID NO: 2361994
aagagccuggaugauauca

SEQ ID NO: 2361996 - RNA, 19 nt, Artificial Sequence
  Description of Artificial Sequence: Synthetic oligonucleotide
  Sense strand starting at position 1390 of SEQ ID NO: 1885703
uucucuaggucuccaagau

SEQ ID NO: 2361997 - RNA, 19 nt, Artificial Sequence
  Description of Artificial Sequence: Synthetic oligonucleotide
  Antisense strand to SEQ ID NO: 2361996
aucuuggagaccuagagaa

SEQ ID NO: 2361998 - RNA, 19 nt, Artificial Sequence
  Description of Artificial Sequence: Synthetic oligonucleotide
  Sense strand starting at position 1391 of SEQ ID NO: 1885703
ucucuaggucuccaagaug

SEQ ID NO: 2361999 - RNA, 19 nt, Artificial Sequence
  Description of Artificial Sequence: Synthetic oligonucleotide
  Antisense strand to SEQ ID NO: 2361998
caucuuggagaccuagaga

SEQ ID NO: 2362000 - RNA, 19 nt, Artificial Sequence
  Description of Artificial Sequence: Synthetic oligonucleotide
  Sense strand starting at position 1580 of SEQ ID NO: 1885703
acaguuucuuucccagaag

SEQ ID NO: 2362001 - RNA, 19 nt, Artificial Sequence
  Description of Artificial Sequence: Synthetic oligonucleotide
  Antisense strand to SEQ ID NO: 2362000
cuucugggaaagaaacugu

SEQ ID NO: 2362002 - RNA, 19 nt, Artificial Sequence
  Description of Artificial Sequence: Synthetic oligonucleotide
  Sense strand starting at position 1644 of SEQ ID NO: 1885703
gggccuauuccggaagcaa

SEQ ID NO: 2362003 - RNA, 19 nt, Artificial Sequence
  Description of Artificial Sequence: Synthetic oligonucleotide
  Antisense strand to SEQ ID NO: 2362002
uugcuuccggaauaggccc

SEQ ID NO: 2362004 - RNA, 19 nt, Artificial Sequence
  Description of Artificial Sequence: Synthetic oligonucleotide
  Sense strand starting at position 1657 of SEQ ID NO: 1885703
aagcaauugcaguggcaaa

SEQ ID NO: 2362005 - RNA, 19 nt, Artificial Sequence
  Description of Artificial Sequence: Synthetic oligonucleotide
  Antisense strand to SEQ ID NO: 2362004
uuugccacugcaauugcuu

SEQ ID NO: 2362006 - RNA, 19 nt, Artificial Sequence
  Description of Artificial Sequence: Synthetic oligonucleotide
  Sense strand starting at position 1686 of SEQ ID NO: 1885703
ucaagagauucgcuuaagc

SEQ ID NO: 2362007 - RNA, 19 nt, Artificial Sequence
  Description of Artificial Sequence: Synthetic oligonucleotide
  Antisense strand to SEQ ID NO: 2362006
gcuuaagcgaaucucuuga

SEQ ID NO: 2362008 - RNA, 19 nt, Artificial Sequence
  Description of Artificial Sequence: Synthetic oligonucleotide
  Sense strand starting at position 1688 of SEQ ID NO: 1885703
aagagauucgcuuaagccu

SEQ ID NO: 2362009 - RNA, 19 nt, Artificial Sequence
  Description of Artificial Sequence: Synthetic oligonucleotide
  Antisense strand to SEQ ID NO: 2362008
aggcuuaagcgaaucucuu

SEQ ID NO: 2362010 - RNA, 19 nt, Artificial Sequence
  Description of Artificial Sequence: Synthetic oligonucleotide
  Sense strand starting at position 2397 of SEQ ID NO: 1885703
caaagugucugcccugaug

SEQ ID NO: 2362011 - RNA, 19 nt, Artificial Sequence
  Description of Artificial Sequence: Synthetic oligonucleotide
  Antisense strand to SEQ ID NO: 2362010
caucagggcagacacuuug

SEQ ID NO: 2362012 - RNA, 19 nt, Artificial Sequence
  Description of Artificial Sequence: Synthetic oligonucleotide
  Sense strand starting at position 2399 of SEQ ID NO: 1885703
aagugucugcccugaugga

SEQ ID NO: 2362013 - RNA, 19 nt, Artificial Sequence
  Description of Artificial Sequence: Synthetic oligonucleotide
  Antisense strand to SEQ ID NO: 2362012
uccaucagggcagacacuu

SEQ ID NO: 2362014 - RNA, 19 nt, Artificial Sequence
  Description of Artificial Sequence: Synthetic oligonucleotide
  Sense strand starting at position 2425 of SEQ ID NO: 1885703
agccaagggagucgucaua

SEQ ID NO: 2362015 - RNA, 19 nt, Artificial Sequence
  Description of Artificial Sequence: Synthetic oligonucleotide
  Antisense strand to SEQ ID NO: 2362014
uaugacgacucccuuggcu

SEQ ID NO: 2362016 - RNA, 19 nt, Artificial Sequence
  Description of Artificial Sequence: Synthetic oligonucleotide
  Sense strand starting at position 2639 of SEQ ID NO: 1885703
ugacuuggugguggcaaau

SEQ ID NO: 2362017 - RNA, 19 nt, Artificial Sequence
  Description of Artificial Sequence: Synthetic oligonucleotide
  Antisense strand to SEQ ID NO: 2362016
auuugccaccaccaaguca

SEQ ID NO: 2362018 - RNA, 19 nt, Artificial Sequence
  Description of Artificial Sequence: Synthetic oligonucleotide
  Sense strand starting at position 2730 of SEQ ID NO: 1885703
uuggguucggccguguaau

SEQ ID NO: 2362019 - RNA, 19 nt, Artificial Sequence
  Description of Artificial Sequence: Synthetic oligonucleotide
  Antisense strand to SEQ ID NO: 2362018
auuacacggccgaacccaa

SEQ ID NO: 2362020 - RNA, 19 nt, Artificial Sequence
  Description of Artificial Sequence: Synthetic oligonucleotide
  Sense strand starting at position 2746 of SEQ ID NO: 1885703
aauuguucuggucaaugau

SEQ ID NO: 2362021 - RNA, 19 nt, Artificial Sequence
  Description of Artificial Sequence: Synthetic oligonucleotide
  Antisense strand to SEQ ID NO: 2362020
aucauugaccagaacaauu

SEQ ID NO: 2362022 - RNA, 19 nt, Artificial Sequence
  Description of Artificial Sequence: Synthetic oligonucleotide
  Sense strand starting at position 2754 of SEQ ID NO: 1885703
uggucaaugaucugugggu

SEQ ID NO: 2362023 - RNA, 19 nt, Artificial Sequence
  Description of Artificial Sequence: Synthetic oligonucleotide
  Antisense strand to SEQ ID NO: 2362022
acccacagaucauugacca

SEQ ID NO: 2362024 - RNA, 19 nt, Artificial Sequence
  Description of Artificial Sequence: Synthetic oligonucleotide
  Sense strand starting at position 2755 of SEQ ID NO: 1885703
ggucaaugaucugugggua

SEQ ID NO: 2362025 - RNA, 19 nt, Artificial Sequence
  Description of Artificial Sequence: Synthetic oligonucleotide
  Antisense strand to SEQ ID NO: 2362024
uacccacagaucauugacc

SEQ ID NO: 2362026 - RNA, 19 nt, Artificial Sequence
  Description of Artificial Sequence: Synthetic oligonucleotide
  Sense strand starting at position 2756 of SEQ ID NO: 1885703
gucaaugaucuguggguag

SEQ ID NO: 2362027 - RNA, 19 nt, Artificial Sequence
  Description of Artificial Sequence: Synthetic oligonucleotide
  Antisense strand to SEQ ID NO: 2362026
cuacccacagaucauugac

SEQ ID NO: 2362028 - RNA, 19 nt, Artificial Sequence
  Description of Artificial Sequence: Synthetic oligonucleotide
  Sense strand starting at position 2758 of SEQ ID NO: 1885703
caaugaucuguggguagaa

SEQ ID NO: 2362029 - RNA, 19 nt, Artificial Sequence
  Description of Artificial Sequence: Synthetic oligonucleotide
  Antisense strand to SEQ ID NO: 2362028
uucuacccacagaucauug

SEQ ID NO: 2362030 - RNA, 19 nt, Artificial Sequence
  Description of Artificial Sequence: Synthetic oligonucleotide
  Sense strand starting at position 2759 of SEQ ID NO: 1885703
aaugaucuguggguagaaa

SEQ ID NO: 2362031 - RNA, 19 nt, Artificial Sequence
  Description of Artificial Sequence: Synthetic oligonucleotide
  Antisense strand to SEQ ID NO: 2362030
uuucuacccacagaucauu

SEQ ID NO: 2362032 - RNA, 19 nt, Artificial Sequence
  Description of Artificial Sequence: Synthetic oligonucleotide
  Sense strand starting at position 2984 of SEQ ID NO: 1885703
uagaaugucugcucucaga

SEQ ID NO: 2362033 - RNA, 19 nt, Artificial Sequence
  Description of Artificial Sequence: Synthetic oligonucleotide
  Antisense strand to SEQ ID NO: 2362032
ucugagagcagacauucua

SEQ ID NO: 2362034 - RNA, 19 nt, Artificial Sequence
  Description of Artificial Sequence: Synthetic oligonucleotide
  Sense strand starting at position 3224 of SEQ ID NO: 1885703
gauucugaguggucccaac

SEQ ID NO: 2362035 - RNA, 19 nt, Artificial Sequence
  Description of Artificial Sequence: Synthetic oligonucleotide
  Antisense strand to SEQ ID NO: 2362034
guugggaccacucagaauc

SEQ ID NO: 2362036 - RNA, 19 nt, Artificial Sequence
  Description of Artificial Sequence: Synthetic oligonucleotide
  Sense strand starting at position 3402 of SEQ ID NO: 1885703
cauggcaagcuuugucaga

SEQ ID NO: 2362037 - RNA, 19 nt, Artificial Sequence
  Description of Artificial Sequence: Synthetic oligonucleotide
  Antisense strand to SEQ ID NO: 2362036
ucugacaaagcuugccaug

SEQ ID NO: 2362038 - RNA, 19 nt, Artificial Sequence
  Description of Artificial Sequence: Synthetic oligonucleotide
  Sense strand starting at position 3404 of SEQ ID NO: 1885703
uggcaagcuuugucagaca

SEQ ID NO: 2362039 - RNA, 19 nt, Artificial Sequence
  Description of Artificial Sequence: Synthetic oligonucleotide
  Antisense strand to SEQ ID NO: 2362038
ugucugacaaagcuugcca

SEQ ID NO: 2362040 - RNA, 19 nt, Artificial Sequence
  Description of Artificial Sequence: Synthetic oligonucleotide
  Sense strand starting at position 3802 of SEQ ID NO: 1885703
cccacaucuucuccgaagu

SEQ ID NO: 2362041 - RNA, 19 nt, Artificial Sequence
  Description of Artificial Sequence: Synthetic oligonucleotide
  Antisense strand to SEQ ID NO: 2362040
acuucggagaagauguggg

SEQ ID NO: 2362042 - RNA, 19 nt, Artificial Sequence
  Description of Artificial Sequence: Synthetic oligonucleotide
  Sense strand starting at position 3803 of SEQ ID NO: 1885703
ccacaucuucuccgaaguu

SEQ ID NO: 2362043 - RNA, 19 nt, Artificial Sequence
  Description of Artificial Sequence: Synthetic oligonucleotide
  Antisense strand to SEQ ID NO: 2362042
aacuucggagaagaugugg

SEQ ID NO: 2362044 - RNA, 19 nt, Artificial Sequence
  Description of Artificial Sequence: Synthetic oligonucleotide
  Sense strand starting at position 3974 of SEQ ID NO: 1885703
guugcuagcguguccagaa

SEQ ID NO: 2362045 - RNA, 19 nt, Artificial Sequence
  Description of Artificial Sequence: Synthetic oligonucleotide
  Antisense strand to SEQ ID NO: 2362044
uucuggacacgcuagcaac

SEQ ID NO: 2362046 - RNA, 19 nt, Artificial Sequence
  Description of Artificial Sequence: Synthetic oligonucleotide
  Sense strand starting at position 313 of SEQ ID NO: 1885704
guccguguucuccucucaa

SEQ ID NO: 2362047 - RNA, 19 nt, Artificial Sequence
  Description of Artificial Sequence: Synthetic oligonucleotide
  Antisense strand to SEQ ID NO: 2362046
uugagaggagaacacggac

SEQ ID NO: 2362048 - RNA, 19 nt, Artificial Sequence
  Description of Artificial Sequence: Synthetic oligonucleotide
  Sense strand starting at position 1362 of SEQ ID NO: 1885704
gaaagcuuccuccacggau

SEQ ID NO: 2362049 - RNA, 19 nt, Artificial Sequence
  Description of Artificial Sequence: Synthetic oligonucleotide
  Antisense strand to SEQ ID NO: 2362048
auccguggaggaagcuuuc

SEQ ID NO: 2362050 - RNA, 19 nt, Artificial Sequence
  Description of Artificial Sequence: Synthetic oligonucleotide
  Sense strand starting at position 1392 of SEQ ID NO: 1885704
gggauuugaugacgagaac

SEQ ID NO: 2362051 - RNA, 19 nt, Artificial Sequence
  Description of Artificial Sequence: Synthetic oligonucleotide
  Antisense strand to SEQ ID NO: 2362050
guucucgucaucaaauccc

SEQ ID NO: 2362052 - RNA, 19 nt, Artificial Sequence
  Description of Artificial Sequence: Synthetic oligonucleotide
  Sense strand starting at position 1418 of SEQ ID NO: 1885704
augcaugucagagauaagc

SEQ ID NO: 2362053 - RNA, 19 nt, Artificial Sequence
  Description of Artificial Sequence: Synthetic oligonucleotide
  Antisense strand to SEQ ID NO: 2362052
gcuuaucucugacaugcau

SEQ ID NO: 2362054 - RNA, 19 nt, Artificial Sequence
  Description of Artificial Sequence: Synthetic oligonucleotide
  Sense strand starting at position 1420 of SEQ ID NO: 1885704
gcaugucagagauaagcaa

SEQ ID NO: 2362055 - RNA, 19 nt, Artificial Sequence
  Description of Artificial Sequence: Synthetic oligonucleotide
  Antisense strand to SEQ ID NO: 2362054
uugcuuaucucugacaugc

SEQ ID NO: 2362056 - RNA, 19 nt, Artificial Sequence
  Description of Artificial Sequence: Synthetic oligonucleotide
  Sense strand starting at position 1448 of SEQ ID NO: 1885704
gaagaauucuguuuccgau

SEQ ID NO: 2362057 - RNA, 19 nt, Artificial Sequence
  Description of Artificial Sequence: Synthetic oligonucleotide
  Antisense strand to SEQ ID NO: 2362056
aucggaaacagaauucuuc

SEQ ID NO: 2362058 - RNA, 19 nt, Artificial Sequence
  Description of Artificial Sequence: Synthetic oligonucleotide
  Sense strand starting at position 1450 of SEQ ID NO: 1885704
agaauucuguuuccgauaa

SEQ ID NO: 2362059 - RNA, 19 nt, Artificial Sequence
  Description of Artificial Sequence: Synthetic oligonucleotide
  Antisense strand to SEQ ID NO: 2362058
uuaucggaaacagaauucu

SEQ ID NO: 2362060 - RNA, 19 nt, Artificial Sequence
  Description of Artificial Sequence: Synthetic oligonucleotide
  Sense strand starting at position 1473 of SEQ ID NO: 1885704
gggugucacugaucccuga

SEQ ID NO: 2362061 - RNA, 19 nt, Artificial Sequence
  Description of Artificial Sequence: Synthetic oligonucleotide
  Antisense strand to SEQ ID NO: 2362060
ucagggaucagugacaccc

SEQ ID NO: 2362062 - RNA, 19 nt, Artificial Sequence
  Description of Artificial Sequence: Synthetic oligonucleotide
  Sense strand starting at position 1476 of SEQ ID NO: 1885704
ugucacugaucccugaaga

SEQ ID NO: 2362063 - RNA, 19 nt, Artificial Sequence
  Description of Artificial Sequence: Synthetic oligonucleotide
  Antisense strand to SEQ ID NO: 2362062
ucuucagggaucagugaca

SEQ ID NO: 2362064 - RNA, 19 nt, Artificial Sequence
  Description of Artificial Sequence: Synthetic oligonucleotide
  Sense strand starting at position 1477 of SEQ ID NO: 1885704
gucacugaucccugaagac

SEQ ID NO: 2362065 - RNA, 19 nt, Artificial Sequence
  Description of Artificial Sequence: Synthetic oligonucleotide
  Antisense strand to SEQ ID NO: 2362064
gucuucagggaucagugac

SEQ ID NO: 2362066 - RNA, 19 nt, Artificial Sequence
  Description of Artificial Sequence: Synthetic oligonucleotide
  Sense strand starting at position 1539 of SEQ ID NO: 1885704
cccgaugacugcuuggaaa

SEQ ID NO: 2362067 - RNA, 19 nt, Artificial Sequence
  Description of Artificial Sequence: Synthetic oligonucleotide
  Antisense strand to SEQ ID NO: 2362066
uuuccaagcagucaucggg

SEQ ID NO: 2362068 - RNA, 19 nt, Artificial Sequence
  Description of Artificial Sequence: Synthetic oligonucleotide
  Sense strand starting at position 1579 of SEQ ID NO: 1885704
ggcccagcacaucaauaau

SEQ ID NO: 2362069 - RNA, 19 nt, Artificial Sequence
  Description of Artificial Sequence: Synthetic oligonucleotide
  Antisense strand to SEQ ID NO: 2362068
auuauugaugugcugggcc

SEQ ID NO: 2362070 - RNA, 19 nt, Artificial Sequence
  Description of Artificial Sequence: Synthetic oligonucleotide
  Sense strand starting at position 1668 of SEQ ID NO: 1885704
caggucuuguaucugggaa

SEQ ID NO: 2362071 - RNA, 19 nt, Artificial Sequence
  Description of Artificial Sequence: Synthetic oligonucleotide
  Antisense strand to SEQ ID NO: 2362070
uucccagauacaagaccug

SEQ ID NO: 2362072 - RNA, 19 nt, Artificial Sequence
  Description of Artificial Sequence: Synthetic oligonucleotide
  Sense strand starting at position 1669 of SEQ ID NO: 1885704
aggucuuguaucugggaag

SEQ ID NO: 2362073 - RNA, 19 nt, Artificial Sequence
  Description of Artificial Sequence: Synthetic oligonucleotide
  Antisense strand to SEQ ID NO: 2362072
cuucccagauacaagaccu

SEQ ID NO: 2362074 - RNA, 19 nt, Artificial Sequence
  Description of Artificial Sequence: Synthetic oligonucleotide
  Sense strand starting at position 1686 of SEQ ID NO: 1885704
agcccuuugaggcaugauu

SEQ ID NO: 2362075 - RNA, 19 nt, Artificial Sequence
  Description of Artificial Sequence: Synthetic oligonucleotide
  Antisense strand to SEQ ID NO: 2362074
aaucaugccucaaagggcu

SEQ ID NO: 2362076 - RNA, 19 nt, Artificial Sequence
  Description of Artificial Sequence: Synthetic oligonucleotide
  Sense strand starting at position 1728 of SEQ ID NO: 1885704
augcuauuuacgcauguga

SEQ ID NO: 2362077 - RNA, 19 nt, Artificial Sequence
  Description of Artificial Sequence: Synthetic oligonucleotide
  Antisense strand to SEQ ID NO: 2362076
ucacaugcguaaauagcau

SEQ ID NO: 2362078 - RNA, 19 nt, Artificial Sequence
  Description of Artificial Sequence: Synthetic oligonucleotide
  Sense strand starting at position 1730 of SEQ ID NO: 1885704
gcuauuuacgcaugugaaa

SEQ ID NO: 2362079 - RNA, 19 nt, Artificial Sequence
  Description of Artificial Sequence: Synthetic oligonucleotide
  Antisense strand to SEQ ID NO: 2362078
uuucacaugcguaaauagc

SEQ ID NO: 2362080 - RNA, 19 nt, Artificial Sequence
  Description of Artificial Sequence: Synthetic oligonucleotide
  Sense strand starting at position 1907 of SEQ ID NO: 1885704
cgguauuagcaucacuuga

SEQ ID NO: 2362081 - RNA, 19 nt, Artificial Sequence
  Description of Artificial Sequence: Synthetic oligonucleotide
  Antisense strand to SEQ ID NO: 2362080
ucaagugaugcuaauaccg

SEQ ID NO: 2362082 - RNA, 19 nt, Artificial Sequence
  Description of Artificial Sequence: Synthetic oligonucleotide
  Sense strand starting at position 1909 of SEQ ID NO: 1885704
guauuagcaucacuugaga

SEQ ID NO: 2362083 - RNA, 19 nt, Artificial Sequence
  Description of Artificial Sequence: Synthetic oligonucleotide
  Antisense strand to SEQ ID NO: 2362082
ucucaagugaugcuaauac

SEQ ID NO: 2362084 - RNA, 19 nt, Artificial Sequence
  Description of Artificial Sequence: Synthetic oligonucleotide
  Sense strand starting at position 2117 of SEQ ID NO: 1885704
gucuuauuccaugagaguc

SEQ ID NO: 2362085 - RNA, 19 nt, Artificial Sequence
  Description of Artificial Sequence: Synthetic oligonucleotide
  Antisense strand to SEQ ID NO: 2362084
gacucucauggaauaagac

SEQ ID NO: 2362086 - RNA, 19 nt, Artificial Sequence
  Description of Artificial Sequence: Synthetic oligonucleotide
  Sense strand starting at position 2125 of SEQ ID NO: 1885704
ccaugagagucugucuaag

SEQ ID NO: 2362087 - RNA, 19 nt, Artificial Sequence
  Description of Artificial Sequence: Synthetic oligonucleotide
  Antisense strand to SEQ ID NO: 2362086
cuuagacagacucucaugg

SEQ ID NO: 2362088 - RNA, 19 nt, Artificial Sequence
  Description of Artificial Sequence: Synthetic oligonucleotide
  Sense strand starting at position 2127 of SEQ ID NO: 1885704
augagagucugucuaagau

SEQ ID NO: 2362089 - RNA, 19 nt, Artificial Sequence
  Description of Artificial Sequence: Synthetic oligonucleotide
  Antisense strand to SEQ ID NO: 2362088
aucuuagacagacucucau

SEQ ID NO: 2362090 - RNA, 19 nt, Artificial Sequence
  Description of Artificial Sequence: Synthetic oligonucleotide
  Sense strand starting at position 2250 of SEQ ID NO: 1885704
acaggaaauguacggaguu

SEQ ID NO: 2362091 - RNA, 19 nt, Artificial Sequence
  Description of Artificial Sequence: Synthetic oligonucleotide
  Antisense strand to SEQ ID NO: 2362090
aacuccguacauuuccugu

SEQ ID NO: 2362092 - RNA, 19 nt, Artificial Sequence
  Description of Artificial Sequence: Synthetic oligonucleotide
  Sense strand starting at position 2278 of SEQ ID NO: 1885704
guuugcauucccuacagga

SEQ ID NO: 2362093 - RNA, 19 nt, Artificial Sequence
  Description of Artificial Sequence: Synthetic oligonucleotide
  Antisense strand to SEQ ID NO: 2362092
uccuguagggaaugcaaac

SEQ ID NO: 2362094 - RNA, 19 nt, Artificial Sequence
  Description of Artificial Sequence: Synthetic oligonucleotide
  Sense strand starting at position 2386 of SEQ ID NO: 1885704
ccggcaucucuccaaggaa

SEQ ID NO: 2362095 - RNA, 19 nt, Artificial Sequence
  Description of Artificial Sequence: Synthetic oligonucleotide
  Antisense strand to SEQ ID NO: 2362094
uuccuuggagagaugccgg

SEQ ID NO: 2362096 - RNA, 19 nt, Artificial Sequence
  Description of Artificial Sequence: Synthetic oligonucleotide
  Sense strand starting at position 2389 of SEQ ID NO: 1885704
gcaucucuccaaggaauuc

SEQ ID NO: 2362097 - RNA, 19 nt, Artificial Sequence
  Description of Artificial Sequence: Synthetic oligonucleotide
  Antisense strand to SEQ ID NO: 2362096
gaauuccuuggagagaugc

SEQ ID NO: 2362098 - RNA, 19 nt, Artificial Sequence
  Description of Artificial Sequence: Synthetic oligonucleotide
  Sense strand starting at position 2518 of SEQ ID NO: 1885704
gcuagcauuuguccaagga

SEQ ID NO: 2362099 - RNA, 19 nt, Artificial Sequence
  Description of Artificial Sequence: Synthetic oligonucleotide
  Antisense strand to SEQ ID NO: 2362098
uccuuggacaaaugcuagc

SEQ ID NO: 2362100 - RNA, 19 nt, Artificial Sequence
  Description of Artificial Sequence: Synthetic oligonucleotide
  Sense strand starting at position 2557 of SEQ ID NO: 1885704
uucugagaucacuggauuc

SEQ ID NO: 2362101 - RNA, 19 nt, Artificial Sequence
  Description of Artificial Sequence: Synthetic oligonucleotide
  Antisense strand to SEQ ID NO: 2362100
gaauccagugaucucagaa

SEQ ID NO: 2362102 - RNA, 19 nt, Artificial Sequence
  Description of Artificial Sequence: Synthetic oligonucleotide
  Sense strand starting at position 2786 of SEQ ID NO: 1885704
gggcaucuucuccaaaguu

SEQ ID NO: 2362103 - RNA, 19 nt, Artificial Sequence
  Description of Artificial Sequence: Synthetic oligonucleotide
  Antisense strand to SEQ ID NO: 2362102
aacuuuggagaagaugccc

SEQ ID NO: 2362104 - RNA, 19 nt, Artificial Sequence
  Description of Artificial Sequence: Synthetic oligonucleotide
  Sense strand starting at position 2806 of SEQ ID NO: 1885704
gugucucuuccagaaaguu

SEQ ID NO: 2362105 - RNA, 19 nt, Artificial Sequence
  Description of Artificial Sequence: Synthetic oligonucleotide
  Antisense strand to SEQ ID NO: 2362104
aacuuucuggaagagacac

SEQ ID NO: 2362106 - RNA, 19 nt, Artificial Sequence
  Description of Artificial Sequence: Synthetic oligonucleotide
  Sense strand starting at position 2815 of SEQ ID NO: 1885704
ccagaaaguucuucucagg

SEQ ID NO: 2362107 - RNA, 19 nt, Artificial Sequence
  Description of Artificial Sequence: Synthetic oligonucleotide
  Antisense strand to SEQ ID NO: 2362106
ccugagaagaacuuucugg

SEQ ID NO: 2362108 - RNA, 19 nt, Artificial Sequence
  Description of Artificial Sequence: Synthetic oligonucleotide
  Sense strand starting at position 2939 of SEQ ID NO: 1885704
augaucggucccuaagguu

SEQ ID NO: 2362109 - RNA, 19 nt, Artificial Sequence
  Description of Artificial Sequence: Synthetic oligonucleotide
  Antisense strand to SEQ ID NO: 2362108
aaccuuagggaccgaucau

SEQ ID NO: 2362110 - RNA, 19 nt, Artificial Sequence
  Description of Artificial Sequence: Synthetic oligonucleotide
  Sense strand starting at position 2985 of SEQ ID NO: 1885704
gaagcaggauuugauaagu

SEQ ID NO: 2362111 - RNA, 19 nt, Artificial Sequence
  Description of Artificial Sequence: Synthetic oligonucleotide
  Antisense strand to SEQ ID NO: 2362110
acuuaucaaauccugcuuc

SEQ ID NO: 2362112 - RNA, 19 nt, Artificial Sequence
  Description of Artificial Sequence: Synthetic oligonucleotide
  Sense strand starting at position 2994 of SEQ ID NO: 1885704
uuugauaaguagcuugaau

SEQ ID NO: 2362113 - RNA, 19 nt, Artificial Sequence
  Description of Artificial Sequence: Synthetic oligonucleotide
  Antisense strand to SEQ ID NO: 2362112
auucaagcuacuuaucaaa

SEQ ID NO: 2362114 - RNA, 19 nt, Artificial Sequence
  Description of Artificial Sequence: Synthetic oligonucleotide
  Sense strand starting at position 3045 of SEQ ID NO: 1885704
augcaaaucccugauagca

SEQ ID NO: 2362115 - RNA, 19 nt, Artificial Sequence
  Description of Artificial Sequence: Synthetic oligonucleotide
  Antisense strand to SEQ ID NO: 2362114
ugcuaucagggauuugcau

SEQ ID NO: 2362116 - RNA, 19 nt, Artificial Sequence
  Description of Artificial Sequence: Synthetic oligonucleotide
  Sense strand starting at position 3588 of SEQ ID NO: 1885704
cagggacugucucucuuaa

SEQ ID NO: 2362117 - RNA, 19 nt, Artificial Sequence
  Description of Artificial Sequence: Synthetic oligonucleotide
  Antisense strand to SEQ ID NO: 2362116
uuaagagagacagucccug

SEQ ID NO: 2362118 - RNA, 19 nt, Artificial Sequence
  Description of Artificial Sequence: Synthetic oligonucleotide
  Sense strand starting at position 3598 of SEQ ID NO: 1885704
cucucuuaaguggagcaaa

SEQ ID NO: 2362119 - RNA, 19 nt, Artificial Sequence
  Description of Artificial Sequence: Synthetic oligonucleotide
  Antisense strand to SEQ ID NO: 2362118
uuugcuccacuuaagagag

SEQ ID NO: 2362120 - RNA, 19 nt, Artificial Sequence
  Description of Artificial Sequence: Synthetic oligonucleotide
  Sense strand starting at position 3649 of SEQ ID NO: 1885704
uguggcauucuguaucaaa

SEQ ID NO: 2362121 - RNA, 19 nt, Artificial Sequence
  Description of Artificial Sequence: Synthetic oligonucleotide
  Antisense strand to SEQ ID NO: 2362120
uuugauacagaaugccaca

SEQ ID NO: 2362122 - RNA, 19 nt, Artificial Sequence
  Description of Artificial Sequence: Synthetic oligonucleotide
  Sense strand starting at position 3759 of SEQ ID NO: 1885704
uuccauacccgaugaagga

SEQ ID NO: 2362123 - RNA, 19 nt, Artificial Sequence
  Description of Artificial Sequence: Synthetic oligonucleotide
  Antisense strand to SEQ ID NO: 2362122
uccuucaucggguauggaa

SEQ ID NO: 2362124 - RNA, 19 nt, Artificial Sequence
  Description of Artificial Sequence: Synthetic oligonucleotide
  Sense strand starting at position 3976 of SEQ ID NO: 1885704
ccaagaaauggacgccaau

SEQ ID NO: 2362125 - RNA, 19 nt, Artificial Sequence
  Description of Artificial Sequence: Synthetic oligonucleotide
  Antisense strand to SEQ ID NO: 2362124
auuggcguccauuucuugg

SEQ ID NO: 2362126 - RNA, 19 nt, Artificial Sequence
  Description of Artificial Sequence: Synthetic oligonucleotide
  Sense strand starting at position 114 of SEQ ID NO: 1885705
gcauauuugcugugaguga

SEQ ID NO: 2362127 - RNA, 19 nt, Artificial Sequence
  Description of Artificial Sequence: Synthetic oligonucleotide
  Antisense strand to SEQ ID NO: 2362126
ucacucacagcaaauaugc

SEQ ID NO: 2362128 - RNA, 19 nt, Artificial Sequence
  Description of Artificial Sequence: Synthetic oligonucleotide
  Sense strand starting at position 119 of SEQ ID NO: 1885705
uuugcugugagugauuaaa

SEQ ID NO: 2362129 - RNA, 19 nt, Artificial Sequence
  Description of Artificial Sequence: Synthetic oligonucleotide
  Antisense strand to SEQ ID NO: 2362128
uuuaaucacucacagcaaa

SEQ ID NO: 2362130 - RNA, 19 nt, Artificial Sequence
  Description of Artificial Sequence: Synthetic oligonucleotide
  Sense strand starting at position 166 of SEQ ID NO: 1885705
guccauuaaucugcuuaga

SEQ ID NO: 2362131 - RNA, 19 nt, Artificial Sequence
  Description of Artificial Sequence: Synthetic oligonucleotide
  Antisense strand to SEQ ID NO: 2362130
ucuaagcagauuaauggac

SEQ ID NO: 2362132 - RNA, 19 nt, Artificial Sequence
  Description of Artificial Sequence: Synthetic oligonucleotide
  Sense strand starting at position 174 of SEQ ID NO: 1885705
aucugcuuagauuaugaca

SEQ ID NO: 2362133 - RNA, 19 nt, Artificial Sequence
  Description of Artificial Sequence: Synthetic oligonucleotide
  Antisense strand to SEQ ID NO: 2362132
ugucauaaucuaagcagau

SEQ ID NO: 2362134 - RNA, 19 nt, Artificial Sequence
  Description of Artificial Sequence: Synthetic oligonucleotide
  Sense strand starting at position 465 of SEQ ID NO: 1885705
accuguuucucuguaacaa

SEQ ID NO: 2362135 - RNA, 19 nt, Artificial Sequence
  Description of Artificial Sequence: Synthetic oligonucleotide
  Antisense strand to SEQ ID NO: 2362134
uuguuacagagaaacaggu

SEQ ID NO: 2362136 - RNA, 19 nt, Artificial Sequence
  Description of Artificial Sequence: Synthetic oligonucleotide
  Sense strand starting at position 466 of SEQ ID NO: 1885705
ccuguuucucuguaacaau

SEQ ID NO: 2362137 - RNA, 19 nt, Artificial Sequence
  Description of Artificial Sequence: Synthetic oligonucleotide
  Antisense strand to SEQ ID NO: 2362136
auuguuacagagaaacagg

SEQ ID NO: 2362138 - RNA, 19 nt, Artificial Sequence
  Description of Artificial Sequence: Synthetic oligonucleotide
  Sense strand starting at position 580 of SEQ ID NO: 1885705
ccugauguuugaucaagag

SEQ ID NO: 2362139 - RNA, 19 nt, Artificial Sequence
  Description of Artificial Sequence: Synthetic oligonucleotide
  Antisense strand to SEQ ID NO: 2362138
cucuugaucaaacaucagg

SEQ ID NO: 2362140 - RNA, 19 nt, Artificial Sequence
  Description of Artificial Sequence: Synthetic oligonucleotide
  Sense strand starting at position 586 of SEQ ID NO: 1885705
guuugaucaagagaagccu

SEQ ID NO: 2362141 - RNA, 19 nt, Artificial Sequence
  Description of Artificial Sequence: Synthetic oligonucleotide
  Antisense strand to SEQ ID NO: 2362140
aggcuucucuugaucaaac

SEQ ID NO: 2362142 - RNA, 19 nt, Artificial Sequence
  Description of Artificial Sequence: Synthetic oligonucleotide
  Sense strand starting at position 595 of SEQ ID NO: 1885705
agagaagccuuaucuguuu

SEQ ID NO: 2362143 - RNA, 19 nt, Artificial Sequence
  Description of Artificial Sequence: Synthetic oligonucleotide
  Antisense strand to SEQ ID NO: 2362142
aaacagauaaggcuucucu

SEQ ID NO: 2362144 - RNA, 19 nt, Artificial Sequence
  Description of Artificial Sequence: Synthetic oligonucleotide
  Sense strand starting at position 719 of SEQ ID NO: 1885705
augugaauuugcucuggua

SEQ ID NO: 2362145 - RNA, 19 nt, Artificial Sequence
  Description of Artificial Sequence: Synthetic oligonucleotide
  Antisense strand to SEQ ID NO: 2362144
uaccagagcaaauucacau

SEQ ID NO: 2362146 - RNA, 19 nt, Artificial Sequence
  Description of Artificial Sequence: Synthetic oligonucleotide
  Sense strand starting at position 721 of SEQ ID NO: 1885705
gugaauuugcucugguacc

SEQ ID NO: 2362147 - RNA, 19 nt, Artificial Sequence
  Description of Artificial Sequence: Synthetic oligonucleotide
  Antisense strand to SEQ ID NO: 2362146
gguaccagagcaaauucac

SEQ ID NO: 2362148 - RNA, 19 nt, Artificial Sequence
  Description of Artificial Sequence: Synthetic oligonucleotide
  Sense strand starting at position 776 of SEQ ID NO: 1885705
ccugacuuucugggauaga

SEQ ID NO: 2362149 - RNA, 19 nt, Artificial Sequence
  Description of Artificial Sequence: Synthetic oligonucleotide
  Antisense strand to SEQ ID NO: 2362148
ucuaucccagaaagucagg

SEQ ID NO: 2362150 - RNA, 19 nt, Artificial Sequence
  Description of Artificial Sequence: Synthetic oligonucleotide
  Sense strand starting at position 789 of SEQ ID NO: 1885705
gauagagucaggcagugua

SEQ ID NO: 2362151 - RNA, 19 nt, Artificial Sequence
  Description of Artificial Sequence: Synthetic oligonucleotide
  Antisense strand to SEQ ID NO: 2362150
uacacugccugacucuauc

SEQ ID NO: 2362152 - RNA, 19 nt, Artificial Sequence
  Description of Artificial Sequence: Synthetic oligonucleotide
  Sense strand starting at position 825 of SEQ ID NO: 1885705
cagugaagacccugaauac

SEQ ID NO: 2362153 - RNA, 19 nt, Artificial Sequence
  Description of Artificial Sequence: Synthetic oligonucleotide
  Antisense strand to SEQ ID NO: 2362152
guauucagggucuucacug

SEQ ID NO: 2362154 - RNA, 19 nt, Artificial Sequence
  Description of Artificial Sequence: Synthetic oligonucleotide
  Sense strand starting at position 872 of SEQ ID NO: 1885705
gcaguauugccauacugac

SEQ ID NO: 2362155 - RNA, 19 nt, Artificial Sequence
  Description of Artificial Sequence: Synthetic oligonucleotide
  Antisense strand to SEQ ID NO: 2362154
gucaguauggcaauacugc

SEQ ID NO: 2362156 - RNA, 19 nt, Artificial Sequence
  Description of Artificial Sequence: Synthetic oligonucleotide
  Sense strand starting at position 1363 of SEQ ID NO: 1885705
uuguaugcuaaggguaaua

SEQ ID NO: 2362157 - RNA, 19 nt, Artificial Sequence
  Description of Artificial Sequence: Synthetic oligonucleotide
  Antisense strand to SEQ ID NO: 2362156
uauuacccuuagcauacaa

SEQ ID NO: 2362158 - RNA, 19 nt, Artificial Sequence
  Description of Artificial Sequence: Synthetic oligonucleotide
  Sense strand starting at position 1365 of SEQ ID NO: 1885705
guaugcuaaggguaauaga

SEQ ID NO: 2362159 - RNA, 19 nt, Artificial Sequence
  Description of Artificial Sequence: Synthetic oligonucleotide
  Antisense strand to SEQ ID NO: 2362158
ucuauuacccuuagcauac

SEQ ID NO: 2362160 - RNA, 19 nt, Artificial Sequence
  Description of Artificial Sequence: Synthetic oligonucleotide
  Sense strand starting at position 1491 of SEQ ID NO: 1885705
ugacaucuacagugaagua

SEQ ID NO: 2362161 - RNA, 19 nt, Artificial Sequence
  Description of Artificial Sequence: Synthetic oligonucleotide
  Antisense strand to SEQ ID NO: 2362160
uacuucacuguagauguca

SEQ ID NO: 2362162 - RNA, 19 nt, Artificial Sequence
  Description of Artificial Sequence: Synthetic oligonucleotide
  Sense strand starting at position 1533 of SEQ ID NO: 1885705
cuguuaaaugguggaucaa

SEQ ID NO: 2362163 - RNA, 19 nt, Artificial Sequence
  Description of Artificial Sequence: Synthetic oligonucleotide
  Antisense strand to SEQ ID NO: 2362162
uugauccaccauuuaacag

SEQ ID NO: 2362164 - RNA, 19 nt, Artificial Sequence
  Description of Artificial Sequence: Synthetic oligonucleotide
  Sense strand starting at position 1567 of SEQ ID NO: 1885705
aaugaagacucaguauugu

SEQ ID NO: 2362165 - RNA, 19 nt, Artificial Sequence
  Description of Artificial Sequence: Synthetic oligonucleotide
  Antisense strand to SEQ ID NO: 2362164
acaauacugagucuucauu

SEQ ID NO: 2362166 - RNA, 19 nt, Artificial Sequence
  Description of Artificial Sequence: Synthetic oligonucleotide
  Sense strand starting at position 1907 of SEQ ID NO: 1885705
uuaauauuaggucagugca

SEQ ID NO: 2362167 - RNA, 19 nt, Artificial Sequence
  Description of Artificial Sequence: Synthetic oligonucleotide
  Antisense strand to SEQ ID NO: 2362166
ugcacugaccuaauauuaa

SEQ ID NO: 2362168 - RNA, 19 nt, Artificial Sequence
  Description of Artificial Sequence: Synthetic oligonucleotide
  Sense strand starting at position 2011 of SEQ ID NO: 1885705
gcaaauguuucugcauuug

SEQ ID NO: 2362169 - RNA, 19 nt, Artificial Sequence
  Description of Artificial Sequence: Synthetic oligonucleotide
  Antisense strand to SEQ ID NO: 2362168
caaaugcagaaacauuugc

SEQ ID NO: 2362170 - RNA, 19 nt, Artificial Sequence
  Description of Artificial Sequence: Synthetic oligonucleotide
  Sense strand starting at position 2086 of SEQ ID NO: 1885705
agacaugcacuuggaagau

SEQ ID NO: 2362171 - RNA, 19 nt, Artificial Sequence
  Description of Artificial Sequence: Synthetic oligonucleotide
  Antisense strand to SEQ ID NO: 2362170
aucuuccaagugcaugucu

SEQ ID NO: 2362172 - RNA, 19 nt, Artificial Sequence
  Description of Artificial Sequence: Synthetic oligonucleotide
  Sense strand starting at position 2219 of SEQ ID NO: 1885705
gucaaugaacuuuauacgu

SEQ ID NO: 2362173 - RNA, 19 nt, Artificial Sequence
  Description of Artificial Sequence: Synthetic oligonucleotide
  Antisense strand to SEQ ID NO: 2362172
acguauaaaguucauugac

SEQ ID NO: 2362174 - RNA, 19 nt, Artificial Sequence
  Description of Artificial Sequence: Synthetic oligonucleotide
  Sense strand starting at position 2272 of SEQ ID NO: 1885705
ucgaauggaucuucuaaca

SEQ ID NO: 2362175 - RNA, 19 nt, Artificial Sequence
  Description of Artificial Sequence: Synthetic oligonucleotide
  Antisense strand to SEQ ID NO: 2362174
uguuagaagauccauucga

SEQ ID NO: 2362176 - RNA, 19 nt, Artificial Sequence
  Description of Artificial Sequence: Synthetic oligonucleotide
  Sense strand starting at position 2331 of SEQ ID NO: 1885705
uccugauuagcugaguuag

SEQ ID NO: 2362177 - RNA, 19 nt, Artificial Sequence
  Description of Artificial Sequence: Synthetic oligonucleotide
  Antisense strand to SEQ ID NO: 2362176
cuaacucagcuaaucagga

SEQ ID NO: 2362178 - RNA, 19 nt, Artificial Sequence
  Description of Artificial Sequence: Synthetic oligonucleotide
  Sense strand starting at position 2365 of SEQ ID NO: 1885705
guugacacauugucaauau

SEQ ID NO: 2362179 - RNA, 19 nt, Artificial Sequence
  Description of Artificial Sequence: Synthetic oligonucleotide
  Antisense strand to SEQ ID NO: 2362178
auauugacaaugugucaac

SEQ ID NO: 2362180 - RNA, 19 nt, Artificial Sequence
  Description of Artificial Sequence: Synthetic oligonucleotide
  Sense strand starting at position 2490 of SEQ ID NO: 1885705
aauaguguucugugaauaa

SEQ ID NO: 2362181 - RNA, 19 nt, Artificial Sequence
  Description of Artificial Sequence: Synthetic oligonucleotide
  Antisense strand to SEQ ID NO: 2362180
uuauucacagaacacuauu

SEQ ID NO: 2362182 - RNA, 19 nt, Artificial Sequence
  Description of Artificial Sequence: Synthetic oligonucleotide
  Sense strand starting at position 2793 of SEQ ID NO: 1885705
gggauuaggugcccucaga

SEQ ID NO: 2362183 - RNA, 19 nt, Artificial Sequence
  Description of Artificial Sequence: Synthetic oligonucleotide
  Antisense strand to SEQ ID NO: 2362182
ucugagggcaccuaauccc

SEQ ID NO: 2362184 - RNA, 19 nt, Artificial Sequence
  Description of Artificial Sequence: Synthetic oligonucleotide
  Sense strand starting at position 2874 of SEQ ID NO: 1885705
cgacaaaucucccuuuagg

SEQ ID NO: 2362185 - RNA, 19 nt, Artificial Sequence
  Description of Artificial Sequence: Synthetic oligonucleotide
  Antisense strand to SEQ ID NO: 2362184
ccuaaagggagauuugucg

SEQ ID NO: 2362186 - RNA, 19 nt, Artificial Sequence
  Description of Artificial Sequence: Synthetic oligonucleotide
  Sense strand starting at position 2957 of SEQ ID NO: 1885705
ccaauacuuugauccugga

SEQ ID NO: 2362187 - RNA, 19 nt, Artificial Sequence
  Description of Artificial Sequence: Synthetic oligonucleotide
  Antisense strand to SEQ ID NO: 2362186
uccaggaucaaaguauugg

SEQ ID NO: 2362188 - RNA, 19 nt, Artificial Sequence
  Description of Artificial Sequence: Synthetic oligonucleotide
  Sense strand starting at position 3425 of SEQ ID NO: 1885705
gaaguuuaguguuuauuga

SEQ ID NO: 2362189 - RNA, 19 nt, Artificial Sequence
  Description of Artificial Sequence: Synthetic oligonucleotide
  Antisense strand to SEQ ID NO: 2362188
ucaauaaacacuaaacuuc

SEQ ID NO: 2362190 - RNA, 19 nt, Artificial Sequence
  Description of Artificial Sequence: Synthetic oligonucleotide
  Sense strand starting at position 3435 of SEQ ID NO: 1885705
guuuauugaaaguggaaca

SEQ ID NO: 2362191 - RNA, 19 nt, Artificial Sequence
  Description of Artificial Sequence: Synthetic oligonucleotide
  Antisense strand to SEQ ID NO: 2362190
uguuccacuuucaauaaac

SEQ ID NO: 2362192 - RNA, 19 nt, Artificial Sequence
  Description of Artificial Sequence: Synthetic oligonucleotide
  Sense strand starting at position 3539 of SEQ ID NO: 1885705
gguauuggcauagaaaugu

SEQ ID NO: 2362193 - RNA, 19 nt, Artificial Sequence
  Description of Artificial Sequence: Synthetic oligonucleotide
  Antisense strand to SEQ ID NO: 2362192
acauuucuaugccaauacc

SEQ ID NO: 2362194 - RNA, 19 nt, Artificial Sequence
  Description of Artificial Sequence: Synthetic oligonucleotide
  Sense strand starting at position 3549 of SEQ ID NO: 1885705
uagaaaugugugcaguaca

SEQ ID NO: 2362195 - RNA, 19 nt, Artificial Sequence
  Description of Artificial Sequence: Synthetic oligonucleotide
  Antisense strand to SEQ ID NO: 2362194
uguacugcacacauuucua

SEQ ID NO: 2362196 - RNA, 19 nt, Artificial Sequence
  Description of Artificial Sequence: Synthetic oligonucleotide
  Sense strand starting at position 3609 of SEQ ID NO: 1885705
ugcagcuuuggacaaauca

SEQ ID NO: 2362197 - RNA, 19 nt, Artificial Sequence
  Description of Artificial Sequence: Synthetic oligonucleotide
  Antisense strand to SEQ ID NO: 2362196
ugauuuguccaaagcugca

SEQ ID NO: 2362198 - RNA, 19 nt, Artificial Sequence
  Description of Artificial Sequence: Synthetic oligonucleotide
  Sense strand starting at position 3634 of SEQ ID NO: 1885705
uucucuggccuuuagaacu

SEQ ID NO: 2362199 - RNA, 19 nt, Artificial Sequence
  Description of Artificial Sequence: Synthetic oligonucleotide
  Antisense strand to SEQ ID NO: 2362198
aguucuaaaggccagagaa

SEQ ID NO: 2362200 - RNA, 19 nt, Artificial Sequence
  Description of Artificial Sequence: Synthetic oligonucleotide
  Sense strand starting at position 3710 of SEQ ID NO: 1885705
cuaugacuaucuguaggau

SEQ ID NO: 2362201 - RNA, 19 nt, Artificial Sequence
  Description of Artificial Sequence: Synthetic oligonucleotide
  Antisense strand to SEQ ID NO: 2362200
auccuacagauagucauag

SEQ ID NO: 2362202 - RNA, 19 nt, Artificial Sequence
  Description of Artificial Sequence: Synthetic oligonucleotide
  Sense strand starting at position 3791 of SEQ ID NO: 1885705
ggaauauauuaggaacaaa

SEQ ID NO: 2362203 - RNA, 19 nt, Artificial Sequence
  Description of Artificial Sequence: Synthetic oligonucleotide
  Antisense strand to SEQ ID NO: 2362202
uuuguuccuaauauauucc

SEQ ID NO: 2362204 - RNA, 19 nt, Artificial Sequence
  Description of Artificial Sequence: Synthetic oligonucleotide
  Sense strand starting at position 3971 of SEQ ID NO: 1885705
auccuauagucaucucaga

SEQ ID NO: 2362205 - RNA, 19 nt, Artificial Sequence
  Description of Artificial Sequence: Synthetic oligonucleotide
  Antisense strand to SEQ ID NO: 2362204
ucugagaugacuauaggau

SEQ ID NO: 2362206 - RNA, 19 nt, Artificial Sequence
  Description of Artificial Sequence: Synthetic oligonucleotide
  Sense strand starting at position 98 of SEQ ID NO: 1885706
aguccuauuaauuguggga

SEQ ID NO: 2362207 - RNA, 19 nt, Artificial Sequence
  Description of Artificial Sequence: Synthetic oligonucleotide
  Antisense strand to SEQ ID NO: 2362206
ucccacaauuaauaggacu

SEQ ID NO: 2362208 - RNA, 19 nt, Artificial Sequence
  Description of Artificial Sequence: Synthetic oligonucleotide
  Sense strand starting at position 102 of SEQ ID NO: 1885706
cuauuaauugugggaugga

SEQ ID NO: 2362209 - RNA, 19 nt, Artificial Sequence
  Description of Artificial Sequence: Synthetic oligonucleotide
  Antisense strand to SEQ ID NO: 2362208
uccaucccacaauuaauag

SEQ ID NO: 2362210 - RNA, 19 nt, Artificial Sequence
  Description of Artificial Sequence: Synthetic oligonucleotide
  Sense strand starting at position 105 of SEQ ID NO: 1885706
uuaauugugggauggaauu

SEQ ID NO: 2362211 - RNA, 19 nt, Artificial Sequence
  Description of Artificial Sequence: Synthetic oligonucleotide
  Antisense strand to SEQ ID NO: 2362210
aauuccaucccacaauuaa

SEQ ID NO: 2362212 - RNA, 19 nt, Artificial Sequence
  Description of Artificial Sequence: Synthetic oligonucleotide
  Sense strand starting at position 121 of SEQ ID NO: 1885706
auuagauaggagugugaau

SEQ ID NO: 2362213 - RNA, 19 nt, Artificial Sequence
  Description of Artificial Sequence: Synthetic oligonucleotide
  Antisense strand to SEQ ID NO: 2362212
auucacacuccuaucuaau

SEQ ID NO: 2362214 - RNA, 19 nt, Artificial Sequence
  Description of Artificial Sequence: Synthetic oligonucleotide
  Sense strand starting at position 146 of SEQ ID NO: 1885706
agccaauguuuacuaggaa

SEQ ID NO: 2362215 - RNA, 19 nt, Artificial Sequence
  Description of Artificial Sequence: Synthetic oligonucleotide
  Antisense strand to SEQ ID NO: 2362214
uuccuaguaaacauuggcu

SEQ ID NO: 2362216 - RNA, 19 nt, Artificial Sequence
  Description of Artificial Sequence: Synthetic oligonucleotide
  Sense strand starting at position 169 of SEQ ID NO: 1885706
uugaauguugguuacuaca

SEQ ID NO: 2362217 - RNA, 19 nt, Artificial Sequence
  Description of Artificial Sequence: Synthetic oligonucleotide
  Antisense strand to SEQ ID NO: 2362216
uguaguaaccaacauucaa

SEQ ID NO: 2362218 - RNA, 19 nt, Artificial Sequence
  Description of Artificial Sequence: Synthetic oligonucleotide
  Sense strand starting at position 171 of SEQ ID NO: 1885706
gaauguugguuacuacaga

SEQ ID NO: 2362219 - RNA, 19 nt, Artificial Sequence
  Description of Artificial Sequence: Synthetic oligonucleotide
  Antisense strand to SEQ ID NO: 2362218
ucuguaguaaccaacauuc

SEQ ID NO: 2362220 - RNA, 19 nt, Artificial Sequence
  Description of Artificial Sequence: Synthetic oligonucleotide
  Sense strand starting at position 336 of SEQ ID NO: 1885706
gaaguuuaacauggaccua

SEQ ID NO: 2362221 - RNA, 19 nt, Artificial Sequence
  Description of Artificial Sequence: Synthetic oligonucleotide
  Antisense strand to SEQ ID NO: 2362220
uagguccauguuaaacuuc

SEQ ID NO: 2362222 - RNA, 19 nt, Artificial Sequence
  Description of Artificial Sequence: Synthetic oligonucleotide
  Sense strand starting at position 555 of SEQ ID NO: 1885706
cguaacacucgggaauuca

SEQ ID NO: 2362223 - RNA, 19 nt, Artificial Sequence
  Description of Artificial Sequence: Synthetic oligonucleotide
  Antisense strand to SEQ ID NO: 2362222
ugaauucccgaguguuacg

SEQ ID NO: 2362224 - RNA, 19 nt, Artificial Sequence
  Description of Artificial Sequence: Synthetic oligonucleotide
  Sense strand starting at position 603 of SEQ ID NO: 1885706
accauaucaucuuuguuag

SEQ ID NO: 2362225 - RNA, 19 nt, Artificial Sequence
  Description of Artificial Sequence: Synthetic oligonucleotide
  Antisense strand to SEQ ID NO: 2362224
cuaacaaagaugauauggu

SEQ ID NO: 2362226 - RNA, 19 nt, Artificial Sequence
  Description of Artificial Sequence: Synthetic oligonucleotide
  Sense strand starting at position 617 of SEQ ID NO: 1885706
guuagugagggccaugaga

SEQ ID NO: 2362227 - RNA, 19 nt, Artificial Sequence
  Description of Artificial Sequence: Synthetic oligonucleotide
  Antisense strand to SEQ ID NO: 2362226
ucucauggcccucacuaac

SEQ ID NO: 2362228 - RNA, 19 nt, Artificial Sequence
  Description of Artificial Sequence: Synthetic oligonucleotide
  Sense strand starting at position 741 of SEQ ID NO: 1885706
gugucauuuaucuguggga

SEQ ID NO: 2362229 - RNA, 19 nt, Artificial Sequence
  Description of Artificial Sequence: Synthetic oligonucleotide
  Antisense strand to SEQ ID NO: 2362228
ucccacagauaaaugacac

SEQ ID NO: 2362230 - RNA, 19 nt, Artificial Sequence
  Description of Artificial Sequence: Synthetic oligonucleotide
  Sense strand starting at position 754 of SEQ ID NO: 1885706
gugggaucacauuguugga

SEQ ID NO: 2362231 - RNA, 19 nt, Artificial Sequence
  Description of Artificial Sequence: Synthetic oligonucleotide
  Antisense strand to SEQ ID NO: 2362230
uccaacaaugugaucccac

SEQ ID NO: 2362232 - RNA, 19 nt, Artificial Sequence
  Description of Artificial Sequence: Synthetic oligonucleotide
  Sense strand starting at position 756 of SEQ ID NO: 1885706
gggaucacauuguuggagu

SEQ ID NO: 2362233 - RNA, 19 nt, Artificial Sequence
  Description of Artificial Sequence: Synthetic oligonucleotide
  Antisense strand to SEQ ID NO: 2362232
acuccaacaaugugauccc

SEQ ID NO: 2362234 - RNA, 19 nt, Artificial Sequence
  Description of Artificial Sequence: Synthetic oligonucleotide
  Sense strand starting at position 845 of SEQ ID NO: 1885706
ugagguaugguuuagcuca

SEQ ID NO: 2362235 - RNA, 19 nt, Artificial Sequence
  Description of Artificial Sequence: Synthetic oligonucleotide
  Antisense strand to SEQ ID NO: 2362234
ugagcuaaaccauaccuca

SEQ ID NO: 2362236 - RNA, 19 nt, Artificial Sequence
  Description of Artificial Sequence: Synthetic oligonucleotide
  Sense strand starting at position 1191 of SEQ ID NO: 1885706
cuuuaaauugaaugaagca

SEQ ID NO: 2362237 - RNA, 19 nt, Artificial Sequence
  Description of Artificial Sequence: Synthetic oligonucleotide
  Antisense strand to SEQ ID NO: 2362236
ugcuucauucaauuuaaag

SEQ ID NO: 2362238 - RNA, 19 nt, Artificial Sequence
  Description of Artificial Sequence: Synthetic oligonucleotide
  Sense strand starting at position 1766 of SEQ ID NO: 1885706
ucaggacuucgaugauaga

SEQ ID NO: 2362239 - RNA, 19 nt, Artificial Sequence
  Description of Artificial Sequence: Synthetic oligonucleotide
  Antisense strand to SEQ ID NO: 2362238
ucuaucaucgaaguccuga

SEQ ID NO: 2362240 - RNA, 19 nt, Artificial Sequence
  Description of Artificial Sequence: Synthetic oligonucleotide
  Sense strand starting at position 2215 of SEQ ID NO: 1885706
ccaugagagcacuaacagu

SEQ ID NO: 2362241 - RNA, 19 nt, Artificial Sequence
  Description of Artificial Sequence: Synthetic oligonucleotide
  Antisense strand to SEQ ID NO: 2362240
acuguuagugcucucaugg

SEQ ID NO: 2362242 - RNA, 19 nt, Artificial Sequence
  Description of Artificial Sequence: Synthetic oligonucleotide
  Sense strand starting at position 2336 of SEQ ID NO: 1885706
uccauuguagugggaaaga

SEQ ID NO: 2362243 - RNA, 19 nt, Artificial Sequence
  Description of Artificial Sequence: Synthetic oligonucleotide
  Antisense strand to SEQ ID NO: 2362242
ucuuucccacuacaaugga

SEQ ID NO: 2362244 - RNA, 19 nt, Artificial Sequence
  Description of Artificial Sequence: Synthetic oligonucleotide
  Sense strand starting at position 2395 of SEQ ID NO: 1885706
ccaaauguuguacaucaau

SEQ ID NO: 2362245 - RNA, 19 nt, Artificial Sequence
  Description of Artificial Sequence: Synthetic oligonucleotide
  Antisense strand to SEQ ID NO: 2362244
auugauguacaacauuugg

SEQ ID NO: 2362246 - RNA, 19 nt, Artificial Sequence
  Description of Artificial Sequence: Synthetic oligonucleotide
  Sense strand starting at position 2509 of SEQ ID NO: 1885706
gcauuacuacacgaaauau

SEQ ID NO: 2362247 - RNA, 19 nt, Artificial Sequence
  Description of Artificial Sequence: Synthetic oligonucleotide
  Antisense strand to SEQ ID NO: 2362246
auauuucguguaguaaugc

SEQ ID NO: 2362248 - RNA, 19 nt, Artificial Sequence
  Description of Artificial Sequence: Synthetic oligonucleotide
  Sense strand starting at position 2555 of SEQ ID NO: 1885706
cuccgacacgaugauuaaa

SEQ ID NO: 2362249 - RNA, 19 nt, Artificial Sequence
  Description of Artificial Sequence: Synthetic oligonucleotide
  Antisense strand to SEQ ID NO: 2362248
uuuaaucaucgugucggag

SEQ ID NO: 2362250 - RNA, 19 nt, Artificial Sequence
  Description of Artificial Sequence: Synthetic oligonucleotide
  Sense strand starting at position 2575 of SEQ ID NO: 1885706
agcagauaauucucaacag

SEQ ID NO: 2362251 - RNA, 19 nt, Artificial Sequence
  Description of Artificial Sequence: Synthetic oligonucleotide
  Antisense strand to SEQ ID NO: 2362250
cuguugagaauuaucugcu

SEQ ID NO: 2362252 - RNA, 19 nt, Artificial Sequence
  Description of Artificial Sequence: Synthetic oligonucleotide
  Sense strand starting at position 2972 of SEQ ID NO: 1885706
ugugguugcagggaaauaa

SEQ ID NO: 2362253 - RNA, 19 nt, Artificial Sequence
  Description of Artificial Sequence: Synthetic oligonucleotide
  Antisense strand to SEQ ID NO: 2362252
uuauuucccugcaaccaca

SEQ ID NO: 2362254 - RNA, 19 nt, Artificial Sequence
  Description of Artificial Sequence: Synthetic oligonucleotide
  Sense strand starting at position 3106 of SEQ ID NO: 1885706
uggagcuagccugagacaa

SEQ ID NO: 2362255 - RNA, 19 nt, Artificial Sequence
  Description of Artificial Sequence: Synthetic oligonucleotide
  Antisense strand to SEQ ID NO: 2362254
uugucucaggcuagcucca

SEQ ID NO: 2362256 - RNA, 19 nt, Artificial Sequence
  Description of Artificial Sequence: Synthetic oligonucleotide
  Sense strand starting at position 3138 of SEQ ID NO: 1885706
cauuguguuccagagacua

SEQ ID NO: 2362257 - RNA, 19 nt, Artificial Sequence
  Description of Artificial Sequence: Synthetic oligonucleotide
  Antisense strand to SEQ ID NO: 2362256
uagucucuggaacacaaug

SEQ ID NO: 2362258 - RNA, 19 nt, Artificial Sequence
  Description of Artificial Sequence: Synthetic oligonucleotide
  Sense strand starting at position 3140 of SEQ ID NO: 1885706
uuguguuccagagacuaag

SEQ ID NO: 2362259 - RNA, 19 nt, Artificial Sequence
  Description of Artificial Sequence: Synthetic oligonucleotide
  Antisense strand to SEQ ID NO: 2362258
cuuagucucuggaacacaa

SEQ ID NO: 2362260 - RNA, 19 nt, Artificial Sequence
  Description of Artificial Sequence: Synthetic oligonucleotide
  Sense strand starting at position 3178 of SEQ ID NO: 1885706
gaaaccuggcauuauguca

SEQ ID NO: 2362261 - RNA, 19 nt, Artificial Sequence
  Description of Artificial Sequence: Synthetic oligonucleotide
  Antisense strand to SEQ ID NO: 2362260
ugacauaaugccagguuuc

SEQ ID NO: 2362262 - RNA, 19 nt, Artificial Sequence
  Description of Artificial Sequence: Synthetic oligonucleotide
  Sense strand starting at position 3311 of SEQ ID NO: 1885706
agccauggugagugagaca

SEQ ID NO: 2362263 - RNA, 19 nt, Artificial Sequence
  Description of Artificial Sequence: Synthetic oligonucleotide
  Antisense strand to SEQ ID NO: 2362262
ugucucacucaccauggcu

SEQ ID NO: 2362264 - RNA, 19 nt, Artificial Sequence
  Description of Artificial Sequence: Synthetic oligonucleotide
  Sense strand starting at position 3507 of SEQ ID NO: 1885706
ggccaugcugauuaacaga

SEQ ID NO: 2362265 - RNA, 19 nt, Artificial Sequence
  Description of Artificial Sequence: Synthetic oligonucleotide
  Antisense strand to SEQ ID NO: 2362264
ucuguuaaucagcauggcc

SEQ ID NO: 2362266 - RNA, 19 nt, Artificial Sequence
  Description of Artificial Sequence: Synthetic oligonucleotide
  Sense strand starting at position 3527 of SEQ ID NO: 1885706
acaggagcuuuccuaacau

SEQ ID NO: 2362267 - RNA, 19 nt, Artificial Sequence
  Description of Artificial Sequence: Synthetic oligonucleotide
  Antisense strand to SEQ ID NO: 2362266
auguuaggaaagcuccugu

SEQ ID NO: 2362268 - RNA, 19 nt, Artificial Sequence
  Description of Artificial Sequence: Synthetic oligonucleotide
  Sense strand starting at position 3638 of SEQ ID NO: 1885706
gaaacaaagugagcucuau

SEQ ID NO: 2362269 - RNA, 19 nt, Artificial Sequence
  Description of Artificial Sequence: Synthetic oligonucleotide
  Antisense strand to SEQ ID NO: 2362268
auagagcucacuuuguuuc

SEQ ID NO: 2362270 - RNA, 19 nt, Artificial Sequence
  Description of Artificial Sequence: Synthetic oligonucleotide
  Sense strand starting at position 3653 of SEQ ID NO: 1885706
cuauuaacugccuggaacu

SEQ ID NO: 2362271 - RNA, 19 nt, Artificial Sequence
  Description of Artificial Sequence: Synthetic oligonucleotide
  Antisense strand to SEQ ID NO: 2362270
aguuccaggcaguuaauag

SEQ ID NO: 2362272 - RNA, 19 nt, Artificial Sequence
  Description of Artificial Sequence: Synthetic oligonucleotide
  Sense strand starting at position 3711 of SEQ ID NO: 1885706
ucucacugaguugaguaaa

SEQ ID NO: 2362273 - RNA, 19 nt, Artificial Sequence
  Description of Artificial Sequence: Synthetic oligonucleotide
  Antisense strand to SEQ ID NO: 2362272
uuuacucaacucagugaga

SEQ ID NO: 2362274 - RNA, 19 nt, Artificial Sequence
  Description of Artificial Sequence: Synthetic oligonucleotide
  Sense strand starting at position 3751 of SEQ ID NO: 1885706
acugacuuaccuggaauau

SEQ ID NO: 2362275 - RNA, 19 nt, Artificial Sequence
  Description of Artificial Sequence: Synthetic oligonucleotide
  Antisense strand to SEQ ID NO: 2362274
auauuccagguaagucagu

SEQ ID NO: 2362276 - RNA, 19 nt, Artificial Sequence
  Description of Artificial Sequence: Synthetic oligonucleotide
  Sense strand starting at position 3814 of SEQ ID NO: 1885706
ggaggagcuccaggaauau

SEQ ID NO: 2362277 - RNA, 19 nt, Artificial Sequence
  Description of Artificial Sequence: Synthetic oligonucleotide
  Antisense strand to SEQ ID NO: 2362276
auauuccuggagcuccucc

SEQ ID NO: 2362278 - RNA, 19 nt, Artificial Sequence
  Description of Artificial Sequence: Synthetic oligonucleotide
  Sense strand starting at position 3849 of SEQ ID NO: 1885706
gagaauguucuagguacua

SEQ ID NO: 2362279 - RNA, 19 nt, Artificial Sequence
  Description of Artificial Sequence: Synthetic oligonucleotide
  Antisense strand to SEQ ID NO: 2362278
uaguaccuagaacauucuc

SEQ ID NO: 2362280 - RNA, 19 nt, Artificial Sequence
  Description of Artificial Sequence: Synthetic oligonucleotide
  Sense strand starting at position 3901 of SEQ ID NO: 1885706
ggagcuuuaagcugaagga

SEQ ID NO: 2362281 - RNA, 19 nt, Artificial Sequence
  Description of Artificial Sequence: Synthetic oligonucleotide
  Antisense strand to SEQ ID NO: 2362280
uccuucagcuuaaagcucc

SEQ ID NO: 2362282 - RNA, 19 nt, Artificial Sequence
  Description of Artificial Sequence: Synthetic oligonucleotide
  Sense strand starting at position 3942 of SEQ ID NO: 1885706
gggaaauguuuacuucuga

SEQ ID NO: 2362283 - RNA, 19 nt, Artificial Sequence
  Description of Artificial Sequence: Synthetic oligonucleotide
  Antisense strand to SEQ ID NO: 2362282
ucagaaguaaacauuuccc

SEQ ID NO: 2362284 - RNA, 19 nt, Artificial Sequence
  Description of Artificial Sequence: Synthetic oligonucleotide
  Sense strand starting at position 3943 of SEQ ID NO: 1885706
ggaaauguuuacuucugaa

SEQ ID NO: 2362285 - RNA, 19 nt, Artificial Sequence
  Description of Artificial Sequence: Synthetic oligonucleotide
  Antisense strand to SEQ ID NO: 2362284
uucagaaguaaacauuucc

SEQ ID NO: 2362286 - RNA, 19 nt, Artificial Sequence
  Description of Artificial Sequence: Synthetic oligonucleotide
  Sense strand starting at position 172 of SEQ ID NO: 1885707
gcgcuaaucagauccgucu

SEQ ID NO: 2362287 - RNA, 19 nt, Artificial Sequence
  Description of Artificial Sequence: Synthetic oligonucleotide
  Antisense strand to SEQ ID NO: 2362286
agacggaucugauuagcgc

SEQ ID NO: 2362288 - RNA, 19 nt, Artificial Sequence
  Description of Artificial Sequence: Synthetic oligonucleotide
  Sense strand starting at position 597 of SEQ ID NO: 1885707
gcagguucugggcgaauua

SEQ ID NO: 2362289 - RNA, 19 nt, Artificial Sequence
  Description of Artificial Sequence: Synthetic oligonucleotide
  Antisense strand to SEQ ID NO: 2362288
uaauucgcccagaaccugc

SEQ ID NO: 2362290 - RNA, 19 nt, Artificial Sequence
  Description of Artificial Sequence: Synthetic oligonucleotide
  Sense strand starting at position 598 of SEQ ID NO: 1885707
cagguucugggcgaauuau

SEQ ID NO: 2362291 - RNA, 19 nt, Artificial Sequence
  Description of Artificial Sequence: Synthetic oligonucleotide
  Antisense strand to SEQ ID NO: 2362290
auaauucgcccagaaccug

SEQ ID NO: 2362292 - RNA, 19 nt, Artificial Sequence
  Description of Artificial Sequence: Synthetic oligonucleotide
  Sense strand starting at position 606 of SEQ ID NO: 1885707
gggcgaauuaugcaacgaa

SEQ ID NO: 2362293 - RNA, 19 nt, Artificial Sequence
  Description of Artificial Sequence: Synthetic oligonucleotide
  Antisense strand to SEQ ID NO: 2362292
uucguugcauaauucgccc

SEQ ID NO: 2362294 - RNA, 19 nt, Artificial Sequence
  Description of Artificial Sequence: Synthetic oligonucleotide
  Sense strand starting at position 632 of SEQ ID NO: 1885707
gaauguuugaugcguccca

SEQ ID NO: 2362295 - RNA, 19 nt, Artificial Sequence
  Description of Artificial Sequence: Synthetic oligonucleotide
  Antisense strand to SEQ ID NO: 2362294
ugggacgcaucaaacauuc

SEQ ID NO: 2362296 - RNA, 19 nt, Artificial Sequence
  Description of Artificial Sequence: Synthetic oligonucleotide
  Sense strand starting at position 743 of SEQ ID NO: 1885707
cucugaugugguuacgacu

SEQ ID NO: 2362297 - RNA, 19 nt, Artificial Sequence
  Description of Artificial Sequence: Synthetic oligonucleotide
  Antisense strand to SEQ ID NO: 2362296
agucguaaccacaucagag

SEQ ID NO: 2362298 - RNA, 19 nt, Artificial Sequence
  Description of Artificial Sequence: Synthetic oligonucleotide
  Sense strand starting at position 858 of SEQ ID NO: 1885707
ggugaaaugguaggcuuga

SEQ ID NO: 2362299 - RNA, 19 nt, Artificial Sequence
  Description of Artificial Sequence: Synthetic oligonucleotide
  Antisense strand to SEQ ID NO: 2362298
ucaagccuaccauuucacc

SEQ ID NO: 2362300 - RNA, 19 nt, Artificial Sequence
  Description of Artificial Sequence: Synthetic oligonucleotide
  Sense strand starting at position 859 of SEQ ID NO: 1885707
gugaaaugguaggcuugau

SEQ ID NO: 2362301 - RNA, 19 nt, Artificial Sequence
  Description of Artificial Sequence: Synthetic oligonucleotide
  Antisense strand to SEQ ID NO: 2362300
aucaagccuaccauuucac

SEQ ID NO: 2362302 - RNA, 19 nt, Artificial Sequence
  Description of Artificial Sequence: Synthetic oligonucleotide
  Sense strand starting at position 863 of SEQ ID NO: 1885707
aaugguaggcuugauccaa

SEQ ID NO: 2362303 - RNA, 19 nt, Artificial Sequence
  Description of Artificial Sequence: Synthetic oligonucleotide
  Antisense strand to SEQ ID NO: 2362302
uuggaucaagccuaccauu

SEQ ID NO: 2362304 - RNA, 19 nt, Artificial Sequence
  Description of Artificial Sequence: Synthetic oligonucleotide
  Sense strand starting at position 891 of SEQ ID NO: 1885707
cgagaaucacccuacgacu

SEQ ID NO: 2362305 - RNA, 19 nt, Artificial Sequence
  Description of Artificial Sequence: Synthetic oligonucleotide
  Antisense strand to SEQ ID NO: 2362304
agucguagggugauucucg

SEQ ID NO: 2362306 - RNA, 19 nt, Artificial Sequence
  Description of Artificial Sequence: Synthetic oligonucleotide
  Sense strand starting at position 1040 of SEQ ID NO: 1885707
aagaguuaacgcuggccau

SEQ ID NO: 2362307 - RNA, 19 nt, Artificial Sequence
  Description of Artificial Sequence: Synthetic oligonucleotide
  Antisense strand to SEQ ID NO: 2362306
auggccagcguuaacucuu

SEQ ID NO: 2362308 - RNA, 19 nt, Artificial Sequence
  Description of Artificial Sequence: Synthetic oligonucleotide
  Sense strand starting at position 1041 of SEQ ID NO: 1885707
agaguuaacgcuggccaua

SEQ ID NO: 2362309 - RNA, 19 nt, Artificial Sequence
  Description of Artificial Sequence: Synthetic oligonucleotide
  Antisense strand to SEQ ID NO: 2362308
uauggccagcguuaacucu

SEQ ID NO: 2362310 - RNA, 19 nt, Artificial Sequence
  Description of Artificial Sequence: Synthetic oligonucleotide
  Sense strand starting at position 1102 of SEQ ID NO: 1885707
uuuguuaacuagguauaug

SEQ ID NO: 2362311 - RNA, 19 nt, Artificial Sequence
  Description of Artificial Sequence: Synthetic oligonucleotide
  Antisense strand to SEQ ID NO: 2362310
cauauaccuaguuaacaaa

SEQ ID NO: 2362312 - RNA, 19 nt, Artificial Sequence
  Description of Artificial Sequence: Synthetic oligonucleotide
  Sense strand starting at position 1105 of SEQ ID NO: 1885707
guuaacuagguauaugcaa

SEQ ID NO: 2362313 - RNA, 19 nt, Artificial Sequence
  Description of Artificial Sequence: Synthetic oligonucleotide
  Antisense strand to SEQ ID NO: 2362312
uugcauauaccuaguuaac

SEQ ID NO: 2362314 - RNA, 19 nt, Artificial Sequence
  Description of Artificial Sequence: Synthetic oligonucleotide
  Sense strand starting at position 1267 of SEQ ID NO: 1885707
caguacuggcccuaggaua

SEQ ID NO: 2362315 - RNA, 19 nt, Artificial Sequence
  Description of Artificial Sequence: Synthetic oligonucleotide
  Antisense strand to SEQ ID NO: 2362314
uauccuagggccaguacug

SEQ ID NO: 2362316 - RNA, 19 nt, Artificial Sequence
  Description of Artificial Sequence: Synthetic oligonucleotide
  Sense strand starting at position 1300 of SEQ ID NO: 1885707
uggagaucuacugguuccu

SEQ ID NO: 2362317 - RNA, 19 nt, Artificial Sequence
  Description of Artificial Sequence: Synthetic oligonucleotide
  Antisense strand to SEQ ID NO: 2362316
aggaaccaguagaucucca

SEQ ID NO: 2362318 - RNA, 19 nt, Artificial Sequence
  Description of Artificial Sequence: Synthetic oligonucleotide
  Sense strand starting at position 1302 of SEQ ID NO: 1885707
gagaucuacugguuccuuu

SEQ ID NO: 2362319 - RNA, 19 nt, Artificial Sequence
  Description of Artificial Sequence: Synthetic oligonucleotide
  Antisense strand to SEQ ID NO: 2362318
aaaggaaccaguagaucuc

SEQ ID NO: 2362320 - RNA, 19 nt, Artificial Sequence
  Description of Artificial Sequence: Synthetic oligonucleotide
  Sense strand starting at position 1345 of SEQ ID NO: 1885707
guugcuagaaauugggcaa

SEQ ID NO: 2362321 - RNA, 19 nt, Artificial Sequence
  Description of Artificial Sequence: Synthetic oligonucleotide
  Antisense strand to SEQ ID NO: 2362320
uugcccaauuucuagcaac

SEQ ID NO: 2362322 - RNA, 19 nt, Artificial Sequence
  Description of Artificial Sequence: Synthetic oligonucleotide
  Sense strand starting at position 1503 of SEQ ID NO: 1885707
ggaggaacuguguagucuu

SEQ ID NO: 2362323 - RNA, 19 nt, Artificial Sequence
  Description of Artificial Sequence: Synthetic oligonucleotide
  Antisense strand to SEQ ID NO: 2362322
aagacuacacaguuccucc

SEQ ID NO: 2362324 - RNA, 19 nt, Artificial Sequence
  Description of Artificial Sequence: Synthetic oligonucleotide
  Sense strand starting at position 1699 of SEQ ID NO: 1885707
ccaggagcguauguaagaa

SEQ ID NO: 2362325 - RNA, 19 nt, Artificial Sequence
  Description of Artificial Sequence: Synthetic oligonucleotide
  Antisense strand to SEQ ID NO: 2362324
uucuuacauacgcuccugg

SEQ ID NO: 2362326 - RNA, 19 nt, Artificial Sequence
  Description of Artificial Sequence: Synthetic oligonucleotide
  Sense strand starting at position 1711 of SEQ ID NO: 1885707
guaagaaaguguguacaag

SEQ ID NO: 2362327 - RNA, 19 nt, Artificial Sequence
  Description of Artificial Sequence: Synthetic oligonucleotide
  Antisense strand to SEQ ID NO: 2362326
cuuguacacacuuucuuac

SEQ ID NO: 2362328 - RNA, 19 nt, Artificial Sequence
  Description of Artificial Sequence: Synthetic oligonucleotide
  Sense strand starting at position 2017 of SEQ ID NO: 1885707
gcuuaauuuaguuguuggu

SEQ ID NO: 2362329 - RNA, 19 nt, Artificial Sequence
  Description of Artificial Sequence: Synthetic oligonucleotide
  Antisense strand to SEQ ID NO: 2362328
accaacaacuaaauuaagc

SEQ ID NO: 2362330 - RNA, 19 nt, Artificial Sequence
  Description of Artificial Sequence: Synthetic oligonucleotide
  Sense strand starting at position 2030 of SEQ ID NO: 1885707
guugguggcaaguaagaaa

SEQ ID NO: 2362331 - RNA, 19 nt, Artificial Sequence
  Description of Artificial Sequence: Synthetic oligonucleotide
  Antisense strand to SEQ ID NO: 2362330
uuucuuacuugccaccaac

SEQ ID NO: 2362332 - RNA, 19 nt, Artificial Sequence
  Description of Artificial Sequence: Synthetic oligonucleotide
  Sense strand starting at position 2126 of SEQ ID NO: 1885707
cccuuaacugaggguacau

SEQ ID NO: 2362333 - RNA, 19 nt, Artificial Sequence
  Description of Artificial Sequence: Synthetic oligonucleotide
  Antisense strand to SEQ ID NO: 2362332
auguacccucaguuaaggg

SEQ ID NO: 2362334 - RNA, 19 nt, Artificial Sequence
  Description of Artificial Sequence: Synthetic oligonucleotide
  Sense strand starting at position 2298 of SEQ ID NO: 1885707
acucgagauuucuguauaa

SEQ ID NO: 2362335 - RNA, 19 nt, Artificial Sequence
  Description of Artificial Sequence: Synthetic oligonucleotide
  Antisense strand to SEQ ID NO: 2362334
uuauacagaaaucucgagu

SEQ ID NO: 2362336 - RNA, 19 nt, Artificial Sequence
  Description of Artificial Sequence: Synthetic oligonucleotide
  Sense strand starting at position 2331 of SEQ ID NO: 1885707
cacagugccugcuuagaaa

SEQ ID NO: 2362337 - RNA, 19 nt, Artificial Sequence
  Description of Artificial Sequence: Synthetic oligonucleotide
  Antisense strand to SEQ ID NO: 2362336
uuucuaagcaggcacugug

SEQ ID NO: 2362338 - RNA, 19 nt, Artificial Sequence
  Description of Artificial Sequence: Synthetic oligonucleotide
  Sense strand starting at position 2473 of SEQ ID NO: 1885707
gggaaauucuaucaagugg

SEQ ID NO: 2362339 - RNA, 19 nt, Artificial Sequence
  Description of Artificial Sequence: Synthetic oligonucleotide
  Antisense strand to SEQ ID NO: 2362338
ccacuugauagaauuuccc

SEQ ID NO: 2362340 - RNA, 19 nt, Artificial Sequence
  Description of Artificial Sequence: Synthetic oligonucleotide
  Sense strand starting at position 2762 of SEQ ID NO: 1885707
gauguuaguguacaaauua

SEQ ID NO: 2362341 - RNA, 19 nt, Artificial Sequence
  Description of Artificial Sequence: Synthetic oligonucleotide
  Antisense strand to SEQ ID NO: 2362340
uaauuuguacacuaacauc

SEQ ID NO: 2362342 - RNA, 19 nt, Artificial Sequence
  Description of Artificial Sequence: Synthetic oligonucleotide
  Sense strand starting at position 2798 of SEQ ID NO: 1885707
ucacauugguaccuguaau

SEQ ID NO: 2362343 - RNA, 19 nt, Artificial Sequence
  Description of Artificial Sequence: Synthetic oligonucleotide
  Antisense strand to SEQ ID NO: 2362342
auuacagguaccaauguga

SEQ ID NO: 2362344 - RNA, 19 nt, Artificial Sequence
  Description of Artificial Sequence: Synthetic oligonucleotide
  Sense strand starting at position 2845 of SEQ ID NO: 1885707
agcagagguggguaucauu

SEQ ID NO: 2362345 - RNA, 19 nt, Artificial Sequence
  Description of Artificial Sequence: Synthetic oligonucleotide
  Antisense strand to SEQ ID NO: 2362344
aaugauacccaccucugcu

SEQ ID NO: 2362346 - RNA, 19 nt, Artificial Sequence
  Description of Artificial Sequence: Synthetic oligonucleotide
  Sense strand starting at position 2996 of SEQ ID NO: 1885707
aggcaugugucauccagau

SEQ ID NO: 2362347 - RNA, 19 nt, Artificial Sequence
  Description of Artificial Sequence: Synthetic oligonucleotide
  Antisense strand to SEQ ID NO: 2362346
aucuggaugacacaugccu

SEQ ID NO: 2362348 - RNA, 19 nt, Artificial Sequence
  Description of Artificial Sequence: Synthetic oligonucleotide
  Sense strand starting at position 3000 of SEQ ID NO: 1885707
augugucauccagauggga

SEQ ID NO: 2362349 - RNA, 19 nt, Artificial Sequence
  Description of Artificial Sequence: Synthetic oligonucleotide
  Antisense strand to SEQ ID NO: 2362348
ucccaucuggaugacacau

SEQ ID NO: 2362350 - RNA, 19 nt, Artificial Sequence
  Description of Artificial Sequence: Synthetic oligonucleotide
  Sense strand starting at position 3002 of SEQ ID NO: 1885707
gugucauccagaugggaga

SEQ ID NO: 2362351 - RNA, 19 nt, Artificial Sequence
  Description of Artificial Sequence: Synthetic oligonucleotide
  Antisense strand to SEQ ID NO: 2362350
ucucccaucuggaugacac

SEQ ID NO: 2362352 - RNA, 19 nt, Artificial Sequence
  Description of Artificial Sequence: Synthetic oligonucleotide
  Sense strand starting at position 3373 of SEQ ID NO: 1885707
caaggugaauguuuaggga

SEQ ID NO: 2362353 - RNA, 19 nt, Artificial Sequence
  Description of Artificial Sequence: Synthetic oligonucleotide
  Antisense strand to SEQ ID NO: 2362352
ucccuaaacauucaccuug

SEQ ID NO: 2362354 - RNA, 19 nt, Artificial Sequence
  Description of Artificial Sequence: Synthetic oligonucleotide
  Sense strand starting at position 3376 of SEQ ID NO: 1885707
ggugaauguuuagggauuu

SEQ ID NO: 2362355 - RNA, 19 nt, Artificial Sequence
  Description of Artificial Sequence: Synthetic oligonucleotide
  Antisense strand to SEQ ID NO: 2362354
aaaucccuaaacauucacc

SEQ ID NO: 2362356 - RNA, 19 nt, Artificial Sequence
  Description of Artificial Sequence: Synthetic oligonucleotide
  Sense strand starting at position 3509 of SEQ ID NO: 1885707
ugguguguauaucugucua

SEQ ID NO: 2362357 - RNA, 19 nt, Artificial Sequence
  Description of Artificial Sequence: Synthetic oligonucleotide
  Antisense strand to SEQ ID NO: 2362356
uagacagauauacacacca

SEQ ID NO: 2362358 - RNA, 19 nt, Artificial Sequence
  Description of Artificial Sequence: Synthetic oligonucleotide
  Sense strand starting at position 3513 of SEQ ID NO: 1885707
guguauaucugucuauccu

SEQ ID NO: 2362359 - RNA, 19 nt, Artificial Sequence
  Description of Artificial Sequence: Synthetic oligonucleotide
  Antisense strand to SEQ ID NO: 2362358
aggauagacagauauacac

SEQ ID NO: 2362360 - RNA, 19 nt, Artificial Sequence
  Description of Artificial Sequence: Synthetic oligonucleotide
  Sense strand starting at position 3519 of SEQ ID NO: 1885707
aucugucuauccucaagga

SEQ ID NO: 2362361 - RNA, 19 nt, Artificial Sequence
  Description of Artificial Sequence: Synthetic oligonucleotide
  Antisense strand to SEQ ID NO: 2362360
uccuugaggauagacagau

SEQ ID NO: 2362362 - RNA, 19 nt, Artificial Sequence
  Description of Artificial Sequence: Synthetic oligonucleotide
  Sense strand starting at position 3850 of SEQ ID NO: 1885707
ggcaguucuuauucuucuu

SEQ ID NO: 2362363 - RNA, 19 nt, Artificial Sequence
  Description of Artificial Sequence: Synthetic oligonucleotide
  Antisense strand to SEQ ID NO: 2362362
aagaagaauaagaacugcc

SEQ ID NO: 2362364 - RNA, 19 nt, Artificial Sequence
  Description of Artificial Sequence: Synthetic oligonucleotide
  Sense strand starting at position 3880 of SEQ ID NO: 1885707
gugagugaugcuuagggcu

SEQ ID NO: 2362365 - RNA, 19 nt, Artificial Sequence
  Description of Artificial Sequence: Synthetic oligonucleotide
  Antisense strand to SEQ ID NO: 2362364
agcccuaagcaucacucac

SEQ ID NO: 2362366 - RNA, 19 nt, Artificial Sequence
  Description of Artificial Sequence: Synthetic oligonucleotide
  Sense strand starting at position 116 of SEQ ID NO: 1885708
ggcagaaucuccugaccaa

SEQ ID NO: 2362367 - RNA, 19 nt, Artificial Sequence
  Description of Artificial Sequence: Synthetic oligonucleotide
  Antisense strand to SEQ ID NO: 2362366
uuggucaggagauucugcc

SEQ ID NO: 2362368 - RNA, 19 nt, Artificial Sequence
  Description of Artificial Sequence: Synthetic oligonucleotide
  Sense strand starting at position 424 of SEQ ID NO: 1885708
ucuauauguuuguuacaug

SEQ ID NO: 2362369 - RNA, 19 nt, Artificial Sequence
  Description of Artificial Sequence: Synthetic oligonucleotide
  Antisense strand to SEQ ID NO: 2362368
cauguaacaaacauauaga

SEQ ID NO: 2362370 - RNA, 19 nt, Artificial Sequence
  Description of Artificial Sequence: Synthetic oligonucleotide
  Sense strand starting at position 425 of SEQ ID NO: 1885708
cuauauguuuguuacauga

SEQ ID NO: 2362371 - RNA, 19 nt, Artificial Sequence
  Description of Artificial Sequence: Synthetic oligonucleotide
  Antisense strand to SEQ ID NO: 2362370
ucauguaacaaacauauag

SEQ ID NO: 2362372 - RNA, 19 nt, Artificial Sequence
  Description of Artificial Sequence: Synthetic oligonucleotide
  Sense strand starting at position 427 of SEQ ID NO: 1885708
auauguuuguuacaugagu

SEQ ID NO: 2362373 - RNA, 19 nt, Artificial Sequence
  Description of Artificial Sequence: Synthetic oligonucleotide
  Antisense strand to SEQ ID NO: 2362372
acucauguaacaaacauau

SEQ ID NO: 2362374 - RNA, 19 nt, Artificial Sequence
  Description of Artificial Sequence: Synthetic oligonucleotide
  Sense strand starting at position 509 of SEQ ID NO: 1885708
uggagcuauugagccagua

SEQ ID NO: 2362375 - RNA, 19 nt, Artificial Sequence
  Description of Artificial Sequence: Synthetic oligonucleotide
  Antisense strand to SEQ ID NO: 2362374
uacuggcucaauagcucca

SEQ ID NO: 2362376 - RNA, 19 nt, Artificial Sequence
  Description of Artificial Sequence: Synthetic oligonucleotide
  Sense strand starting at position 878 of SEQ ID NO: 1885708
agaugaccagagugucuua

SEQ ID NO: 2362377 - RNA, 19 nt, Artificial Sequence
  Description of Artificial Sequence: Synthetic oligonucleotide
  Antisense strand to SEQ ID NO: 2362376
uaagacacucuggucaucu

SEQ ID NO: 2362378 - RNA, 19 nt, Artificial Sequence
  Description of Artificial Sequence: Synthetic oligonucleotide
  Sense strand starting at position 881 of SEQ ID NO: 1885708
ugaccagagugucuuauau

SEQ ID NO: 2362379 - RNA, 19 nt, Artificial Sequence
  Description of Artificial Sequence: Synthetic oligonucleotide
  Antisense strand to SEQ ID NO: 2362378
auauaagacacucugguca

SEQ ID NO: 2362380 - RNA, 19 nt, Artificial Sequence
  Description of Artificial Sequence: Synthetic oligonucleotide
  Sense strand starting at position 972 of SEQ ID NO: 1885708
ucagaauacugauaggaac

SEQ ID NO: 2362381 - RNA, 19 nt, Artificial Sequence
  Description of Artificial Sequence: Synthetic oligonucleotide
  Antisense strand to SEQ ID NO: 2362380
guuccuaucaguauucuga

SEQ ID NO: 2362382 - RNA, 19 nt, Artificial Sequence
  Description of Artificial Sequence: Synthetic oligonucleotide
  Sense strand starting at position 1059 of SEQ ID NO: 1885708
uaccgaagcugacagauaa

SEQ ID NO: 2362383 - RNA, 19 nt, Artificial Sequence
  Description of Artificial Sequence: Synthetic oligonucleotide
  Antisense strand to SEQ ID NO: 2362382
uuaucugucagcuucggua

SEQ ID NO: 2362384 - RNA, 19 nt, Artificial Sequence
  Description of Artificial Sequence: Synthetic oligonucleotide
  Sense strand starting at position 1370 of SEQ ID NO: 1885708
caggauaucuucugugaaa

SEQ ID NO: 2362385 - RNA, 19 nt, Artificial Sequence
  Description of Artificial Sequence: Synthetic oligonucleotide
  Antisense strand to SEQ ID NO: 2362384
uuucacagaagauauccug

SEQ ID NO: 2362386 - RNA, 19 nt, Artificial Sequence
  Description of Artificial Sequence: Synthetic oligonucleotide
  Sense strand starting at position 1446 of SEQ ID NO: 1885708
cugcaagauucuccauaag

SEQ ID NO: 2362387 - RNA, 19 nt, Artificial Sequence
  Description of Artificial Sequence: Synthetic oligonucleotide
  Antisense strand to SEQ ID NO: 2362386
cuuauggagaaucuugcag

SEQ ID NO: 2362388 - RNA, 19 nt, Artificial Sequence
  Description of Artificial Sequence: Synthetic oligonucleotide
  Sense strand starting at position 1488 of SEQ ID NO: 1885708
ucagacuuuccagggucaa

SEQ ID NO: 2362389 - RNA, 19 nt, Artificial Sequence
  Description of Artificial Sequence: Synthetic oligonucleotide
  Antisense strand to SEQ ID NO: 2362388
uugacccuggaaagucuga

SEQ ID NO: 2362390 - RNA, 19 nt, Artificial Sequence
  Description of Artificial Sequence: Synthetic oligonucleotide
  Sense strand starting at position 1726 of SEQ ID NO: 1885708
ggagaucauuaccaccaga

SEQ ID NO: 2362391 - RNA, 19 nt, Artificial Sequence
  Description of Artificial Sequence: Synthetic oligonucleotide
  Antisense strand to SEQ ID NO: 2362390
ucuggugguaaugaucucc

SEQ ID NO: 2362392 - RNA, 19 nt, Artificial Sequence
  Description of Artificial Sequence: Synthetic oligonucleotide
  Sense strand starting at position 1756 of SEQ ID NO: 1885708
agagaucuugaacgaagca

SEQ ID NO: 2362393 - RNA, 19 nt, Artificial Sequence
  Description of Artificial Sequence: Synthetic oligonucleotide
  Antisense strand to SEQ ID NO: 2362392
ugcuucguucaagaucucu

SEQ ID NO: 2362394 - RNA, 19 nt, Artificial Sequence
  Description of Artificial Sequence: Synthetic oligonucleotide
  Sense strand starting at position 2279 of SEQ ID NO: 1885708
gcaaguucucaagagaccu

SEQ ID NO: 2362395 - RNA, 19 nt, Artificial Sequence
  Description of Artificial Sequence: Synthetic oligonucleotide
  Antisense strand to SEQ ID NO: 2362394
aggucucuugagaacuugc

SEQ ID NO: 2362396 - RNA, 19 nt, Artificial Sequence
  Description of Artificial Sequence: Synthetic oligonucleotide
  Sense strand starting at position 2516 of SEQ ID NO: 1885708
ccacacaguugguuauaua

SEQ ID NO: 2362397 - RNA, 19 nt, Artificial Sequence
  Description of Artificial Sequence: Synthetic oligonucleotide
  Antisense strand to SEQ ID NO: 2362396
uauauaaccaacugugugg

SEQ ID NO: 2362398 - RNA, 19 nt, Artificial Sequence
  Description of Artificial Sequence: Synthetic oligonucleotide
  Sense strand starting at position 2923 of SEQ ID NO: 1885708
ggcugaauugaaggagauc

SEQ ID NO: 2362399 - RNA, 19 nt, Artificial Sequence
  Description of Artificial Sequence: Synthetic oligonucleotide
  Antisense strand to SEQ ID NO: 2362398
gaucuccuucaauucagcc

SEQ ID NO: 2362400 - RNA, 19 nt, Artificial Sequence
  Description of Artificial Sequence: Synthetic oligonucleotide
  Sense strand starting at position 2972 of SEQ ID NO: 1885708
aauccaagaguugguguuu

SEQ ID NO: 2362401 - RNA, 19 nt, Artificial Sequence
  Description of Artificial Sequence: Synthetic oligonucleotide
  Antisense strand to SEQ ID NO: 2362400
aaacaccaacucuuggauu

SEQ ID NO: 2362402 - RNA, 19 nt, Artificial Sequence
  Description of Artificial Sequence: Synthetic oligonucleotide
  Sense strand starting at position 3322 of SEQ ID NO: 1885708
gcugcauucugccauuaaa

SEQ ID NO: 2362403 - RNA, 19 nt, Artificial Sequence
  Description of Artificial Sequence: Synthetic oligonucleotide
  Antisense strand to SEQ ID NO: 2362402
uuuaauggcagaaugcagc

SEQ ID NO: 2362404 - RNA, 19 nt, Artificial Sequence
  Description of Artificial Sequence: Synthetic oligonucleotide
  Sense strand starting at position 3573 of SEQ ID NO: 1885708
ucaagaaggcuuuaucccu

SEQ ID NO: 2362405 - RNA, 19 nt, Artificial Sequence
  Description of Artificial Sequence: Synthetic oligonucleotide
  Antisense strand to SEQ ID NO: 2362404
agggauaaagccuucuuga

SEQ ID NO: 2362406 - RNA, 19 nt, Artificial Sequence
  Description of Artificial Sequence: Synthetic oligonucleotide
  Sense strand starting at position 3578 of SEQ ID NO: 1885708
aaggcuuuaucccugggau

SEQ ID NO: 2362407 - RNA, 19 nt, Artificial Sequence
  Description of Artificial Sequence: Synthetic oligonucleotide
  Antisense strand to SEQ ID NO: 2362406
aucccagggauaaagccuu

SEQ ID NO: 2362408 - RNA, 19 nt, Artificial Sequence
  Description of Artificial Sequence: Synthetic oligonucleotide
  Sense strand starting at position 3740 of SEQ ID NO: 1885708
uaaacuuuguauugaagga

SEQ ID NO: 2362409 - RNA, 19 nt, Artificial Sequence
  Description of Artificial Sequence: Synthetic oligonucleotide
  Antisense strand to SEQ ID NO: 2362408
uccuucaauacaaaguuua

SEQ ID NO: 2362410 - RNA, 19 nt, Artificial Sequence
  Description of Artificial Sequence: Synthetic oligonucleotide
  Sense strand starting at position 3744 of SEQ ID NO: 1885708
cuuuguauugaaggaacau

SEQ ID NO: 2362411 - RNA, 19 nt, Artificial Sequence
  Description of Artificial Sequence: Synthetic oligonucleotide
  Antisense strand to SEQ ID NO: 2362410
auguuccuucaauacaaag

SEQ ID NO: 2362412 - RNA, 19 nt, Artificial Sequence
  Description of Artificial Sequence: Synthetic oligonucleotide
  Sense strand starting at position 3899 of SEQ ID NO: 1885708
auuggauguccuggccuua

SEQ ID NO: 2362413 - RNA, 19 nt, Artificial Sequence
  Description of Artificial Sequence: Synthetic oligonucleotide
  Antisense strand to SEQ ID NO: 2362412
uaaggccaggacauccaau

SEQ ID NO: 2362414 - RNA, 19 nt, Artificial Sequence
  Description of Artificial Sequence: Synthetic oligonucleotide
  Sense strand starting at position 3911 of SEQ ID NO: 1885708
ggccuuagcacucaggcaa

SEQ ID NO: 2362415 - RNA, 19 nt, Artificial Sequence
  Description of Artificial Sequence: Synthetic oligonucleotide
  Antisense strand to SEQ ID NO: 2362414
uugccugagugcuaaggcc

SEQ ID NO: 2362416 - RNA, 19 nt, Artificial Sequence
  Description of Artificial Sequence: Synthetic oligonucleotide
  Sense strand starting at position 3957 of SEQ ID NO: 1885708
gugugaugccacuagcuuu

SEQ ID NO: 2362417 - RNA, 19 nt, Artificial Sequence
  Description of Artificial Sequence: Synthetic oligonucleotide
  Antisense strand to SEQ ID NO: 2362416
aaagcuaguggcaucacac

SEQ ID NO: 2362418 - RNA, 19 nt, Artificial Sequence
  Description of Artificial Sequence: Synthetic oligonucleotide
  Sense strand starting at position 243 of SEQ ID NO: 1885709
uauuguguuggugaugauc

SEQ ID NO: 2362419 - RNA, 19 nt, Artificial Sequence
  Description of Artificial Sequence: Synthetic oligonucleotide
  Antisense strand to SEQ ID NO: 2362418
gaucaucaccaacacaaua

SEQ ID NO: 2362420 - RNA, 19 nt, Artificial Sequence
  Description of Artificial Sequence: Synthetic oligonucleotide
  Sense strand starting at position 251 of SEQ ID NO: 1885709
uggugaugaucugcacaua

SEQ ID NO: 2362421 - RNA, 19 nt, Artificial Sequence
  Description of Artificial Sequence: Synthetic oligonucleotide
  Antisense strand to SEQ ID NO: 2362420
uaugugcagaucaucacca

SEQ ID NO: 2362422 - RNA, 19 nt, Artificial Sequence
  Description of Artificial Sequence: Synthetic oligonucleotide
  Sense strand starting at position 252 of SEQ ID NO: 1885709
ggugaugaucugcacauac

SEQ ID NO: 2362423 - RNA, 19 nt, Artificial Sequence
  Description of Artificial Sequence: Synthetic oligonucleotide
  Antisense strand to SEQ ID NO: 2362422
guaugugcagaucaucacc

SEQ ID NO: 2362424 - RNA, 19 nt, Artificial Sequence
  Description of Artificial Sequence: Synthetic oligonucleotide
  Sense strand starting at position 293 of SEQ ID NO: 1885709
caggaagucugacuucuuu

SEQ ID NO: 2362425 - RNA, 19 nt, Artificial Sequence
  Description of Artificial Sequence: Synthetic oligonucleotide
  Antisense strand to SEQ ID NO: 2362424
aaagaagucagacuuccug

SEQ ID NO: 2362426 - RNA, 19 nt, Artificial Sequence
  Description of Artificial Sequence: Synthetic oligonucleotide
  Sense strand starting at position 297 of SEQ ID NO: 1885709
aagucugacuucuuugaag

SEQ ID NO: 2362427 - RNA, 19 nt, Artificial Sequence
  Description of Artificial Sequence: Synthetic oligonucleotide
  Antisense strand to SEQ ID NO: 2362426
cuucaaagaagucagacuu

SEQ ID NO: 2362428 - RNA, 19 nt, Artificial Sequence
  Description of Artificial Sequence: Synthetic oligonucleotide
  Sense strand starting at position 306 of SEQ ID NO: 1885709
uucuuugaagcuggguaaa

SEQ ID NO: 2362429 - RNA, 19 nt, Artificial Sequence
  Description of Artificial Sequence: Synthetic oligonucleotide
  Antisense strand to SEQ ID NO: 2362428
uuuacccagcuucaaagaa

SEQ ID NO: 2362430 - RNA, 19 nt, Artificial Sequence
  Description of Artificial Sequence: Synthetic oligonucleotide
  Sense strand starting at position 308 of SEQ ID NO: 1885709
cuuugaagcuggguaaaua

SEQ ID NO: 2362431 - RNA, 19 nt, Artificial Sequence
  Description of Artificial Sequence: Synthetic oligonucleotide
  Antisense strand to SEQ ID NO: 2362430
uauuuacccagcuucaaag

SEQ ID NO: 2362432 - RNA, 19 nt, Artificial Sequence
  Description of Artificial Sequence: Synthetic oligonucleotide
  Sense strand starting at position 309 of SEQ ID NO: 1885709
uuugaagcuggguaaauau

SEQ ID NO: 2362433 - RNA, 19 nt, Artificial Sequence
  Description of Artificial Sequence: Synthetic oligonucleotide
  Antisense strand to SEQ ID NO: 2362432
auauuuacccagcuucaaa

SEQ ID NO: 2362434 - RNA, 19 nt, Artificial Sequence
  Description of Artificial Sequence: Synthetic oligonucleotide
  Sense strand starting at position 349 of SEQ ID NO: 1885709
cuccuugauacggauguaa

SEQ ID NO: 2362435 - RNA, 19 nt, Artificial Sequence
  Description of Artificial Sequence: Synthetic oligonucleotide
  Antisense strand to SEQ ID NO: 2362434
uuacauccguaucaaggag

SEQ ID NO: 2362436 - RNA, 19 nt, Artificial Sequence
  Description of Artificial Sequence: Synthetic oligonucleotide
  Sense strand starting at position 351 of SEQ ID NO: 1885709
ccuugauacggauguaaag

SEQ ID NO: 2362437 - RNA, 19 nt, Artificial Sequence
  Description of Artificial Sequence: Synthetic oligonucleotide
  Antisense strand to SEQ ID NO: 2362436
cuuuacauccguaucaagg

SEQ ID NO: 2362438 - RNA, 19 nt, Artificial Sequence
  Description of Artificial Sequence: Synthetic oligonucleotide
  Sense strand starting at position 353 of SEQ ID NO: 1885709
uugauacggauguaaaguu

SEQ ID NO: 2362439 - RNA, 19 nt, Artificial Sequence
  Description of Artificial Sequence: Synthetic oligonucleotide
  Antisense strand to SEQ ID NO: 2362438
aacuuuacauccguaucaa

SEQ ID NO: 2362440 - RNA, 19 nt, Artificial Sequence
  Description of Artificial Sequence: Synthetic oligonucleotide
  Sense strand starting at position 375 of SEQ ID NO: 1885709
ugaaaugugccuuaggucu

SEQ ID NO: 2362441 - RNA, 19 nt, Artificial Sequence
  Description of Artificial Sequence: Synthetic oligonucleotide
  Antisense strand to SEQ ID NO: 2362440
agaccuaaggcacauuuca

SEQ ID NO: 2362442 - RNA, 19 nt, Artificial Sequence
  Description of Artificial Sequence: Synthetic oligonucleotide
  Sense strand starting at position 403 of SEQ ID NO: 1885709
ggucuauggcucgaauaua

SEQ ID NO: 2362443 - RNA, 19 nt, Artificial Sequence
  Description of Artificial Sequence: Synthetic oligonucleotide
  Antisense strand to SEQ ID NO: 2362442
uauauucgagccauagacc

SEQ ID NO: 2362444 - RNA, 19 nt, Artificial Sequence
  Description of Artificial Sequence: Synthetic oligonucleotide
  Sense strand starting at position 442 of SEQ ID NO: 1885709
ugaaacuguuagcuguaaa

SEQ ID NO: 2362445 - RNA, 19 nt, Artificial Sequence
  Description of Artificial Sequence: Synthetic oligonucleotide
  Antisense strand to SEQ ID NO: 2362444
uuuacagcuaacaguuuca

SEQ ID NO: 2362446 - RNA, 19 nt, Artificial Sequence
  Description of Artificial Sequence: Synthetic oligonucleotide
  Sense strand starting at position 519 of SEQ ID NO: 1885709
ggaucauggccagggcaua

SEQ ID NO: 2362447 - RNA, 19 nt, Artificial Sequence
  Description of Artificial Sequence: Synthetic oligonucleotide
  Antisense strand to SEQ ID NO: 2362446
uaugcccuggccaugaucc

SEQ ID NO: 2362448 - RNA, 19 nt, Artificial Sequence
  Description of Artificial Sequence: Synthetic oligonucleotide
  Sense strand starting at position 1073 of SEQ ID NO: 1885709
gccaauauuccaggaauag

SEQ ID NO: 2362449 - RNA, 19 nt, Artificial Sequence
  Description of Artificial Sequence: Synthetic oligonucleotide
  Antisense strand to SEQ ID NO: 2362448
cuauuccuggaauauuggc

SEQ ID NO: 2362450 - RNA, 19 nt, Artificial Sequence
  Description of Artificial Sequence: Synthetic oligonucleotide
  Sense strand starting at position 1088 of SEQ ID NO: 1885709
auagucaagccaugggaua

SEQ ID NO: 2362451 - RNA, 19 nt, Artificial Sequence
  Description of Artificial Sequence: Synthetic oligonucleotide
  Antisense strand to SEQ ID NO: 2362450
uaucccauggcuugacuau

SEQ ID NO: 2362452 - RNA, 19 nt, Artificial Sequence
  Description of Artificial Sequence: Synthetic oligonucleotide
  Sense strand starting at position 1089 of SEQ ID NO: 1885709
uagucaagccaugggauaa

SEQ ID NO: 2362453 - RNA, 19 nt, Artificial Sequence
  Description of Artificial Sequence: Synthetic oligonucleotide
  Antisense strand to SEQ ID NO: 2362452
uuaucccauggcuugacua

SEQ ID NO: 2362454 - RNA, 19 nt, Artificial Sequence
  Description of Artificial Sequence: Synthetic oligonucleotide
  Sense strand starting at position 1090 of SEQ ID NO: 1885709
agucaagccaugggauaaa

SEQ ID NO: 2362455 - RNA, 19 nt, Artificial Sequence
  Description of Artificial Sequence: Synthetic oligonucleotide
  Antisense strand to SEQ ID NO: 2362454
uuuaucccauggcuugacu

SEQ ID NO: 2362456 - RNA, 19 nt, Artificial Sequence
  Description of Artificial Sequence: Synthetic oligonucleotide
  Sense strand starting at position 1277 of SEQ ID NO: 1885709
cgugcuucucuggcuuaga

SEQ ID NO: 2362457 - RNA, 19 nt, Artificial Sequence
  Description of Artificial Sequence: Synthetic oligonucleotide
  Antisense strand to SEQ ID NO: 2362456
ucuaagccagagaagcacg

SEQ ID NO: 2362458 - RNA, 19 nt, Artificial Sequence
  Description of Artificial Sequence: Synthetic oligonucleotide
  Sense strand starting at position 1280 of SEQ ID NO: 1885709
gcuucucuggcuuagagga

SEQ ID NO: 2362459 - RNA, 19 nt, Artificial Sequence
  Description of Artificial Sequence: Synthetic oligonucleotide
  Antisense strand to SEQ ID NO: 2362458
uccucuaagccagagaagc

SEQ ID NO: 2362460 - RNA, 19 nt, Artificial Sequence
  Description of Artificial Sequence: Synthetic oligonucleotide
  Sense strand starting at position 1348 of SEQ ID NO: 1885709
cagcauaggccagagacau

SEQ ID NO: 2362461 - RNA, 19 nt, Artificial Sequence
  Description of Artificial Sequence: Synthetic oligonucleotide
  Antisense strand to SEQ ID NO: 2362460
augucucuggccuaugcug

SEQ ID NO: 2362462 - RNA, 19 nt, Artificial Sequence
  Description of Artificial Sequence: Synthetic oligonucleotide
  Sense strand starting at position 1379 of SEQ ID NO: 1885709
gaagaugauuugugacaga

SEQ ID NO: 2362463 - RNA, 19 nt, Artificial Sequence
  Description of Artificial Sequence: Synthetic oligonucleotide
  Antisense strand to SEQ ID NO: 2362462
ucugucacaaaucaucuuc

SEQ ID NO: 2362464 - RNA, 19 nt, Artificial Sequence
  Description of Artificial Sequence: Synthetic oligonucleotide
  Sense strand starting at position 1382 of SEQ ID NO: 1885709
gaugauuugugacagacag

SEQ ID NO: 2362465 - RNA, 19 nt, Artificial Sequence
  Description of Artificial Sequence: Synthetic oligonucleotide
  Antisense strand to SEQ ID NO: 2362464
cugucugucacaaaucauc

SEQ ID NO: 2362466 - RNA, 19 nt, Artificial Sequence
  Description of Artificial Sequence: Synthetic oligonucleotide
  Sense strand starting at position 1581 of SEQ ID NO: 1885709
cuccaaugggcucaguaga

SEQ ID NO: 2362467 - RNA, 19 nt, Artificial Sequence
  Description of Artificial Sequence: Synthetic oligonucleotide
  Antisense strand to SEQ ID NO: 2362466
ucuacugagcccauuggag

SEQ ID NO: 2362468 - RNA, 19 nt, Artificial Sequence
  Description of Artificial Sequence: Synthetic oligonucleotide
  Sense strand starting at position 1698 of SEQ ID NO: 1885709
ggauuacuauuugaaucaa

SEQ ID NO: 2362469 - RNA, 19 nt, Artificial Sequence
  Description of Artificial Sequence: Synthetic oligonucleotide
  Antisense strand to SEQ ID NO: 2362468
uugauucaaauaguaaucc

SEQ ID NO: 2362470 - RNA, 19 nt, Artificial Sequence
  Description of Artificial Sequence: Synthetic oligonucleotide
  Sense strand starting at position 1774 of SEQ ID NO: 1885709
ggaggugaggccugaauag

SEQ ID NO: 2362471 - RNA, 19 nt, Artificial Sequence
  Description of Artificial Sequence: Synthetic oligonucleotide
  Antisense strand to SEQ ID NO: 2362470
cuauucaggccucaccucc

SEQ ID NO: 2362472 - RNA, 19 nt, Artificial Sequence
  Description of Artificial Sequence: Synthetic oligonucleotide
  Sense strand starting at position 1974 of SEQ ID NO: 1885709
gagacagucccaugaucug

SEQ ID NO: 2362473 - RNA, 19 nt, Artificial Sequence
  Description of Artificial Sequence: Synthetic oligonucleotide
  Antisense strand to SEQ ID NO: 2362472
cagaucaugggacugucuc

SEQ ID NO: 2362474 - RNA, 19 nt, Artificial Sequence
  Description of Artificial Sequence: Synthetic oligonucleotide
  Sense strand starting at position 1991 of SEQ ID NO: 1885709
ugcaguuggcuauaaauau

SEQ ID NO: 2362475 - RNA, 19 nt, Artificial Sequence
  Description of Artificial Sequence: Synthetic oligonucleotide
  Antisense strand to SEQ ID NO: 2362474
auauuuauagccaacugca

SEQ ID NO: 2362476 - RNA, 19 nt, Artificial Sequence
  Description of Artificial Sequence: Synthetic oligonucleotide
  Sense strand starting at position 2184 of SEQ ID NO: 1885709
augccaauguagucacaaa

SEQ ID NO: 2362477 - RNA, 19 nt, Artificial Sequence
  Description of Artificial Sequence: Synthetic oligonucleotide
  Antisense strand to SEQ ID NO: 2362476
uuugugacuacauuggcau

SEQ ID NO: 2362478 - RNA, 19 nt, Artificial Sequence
  Description of Artificial Sequence: Synthetic oligonucleotide
  Sense strand starting at position 2264 of SEQ ID NO: 1885709
ccaugaaagccaugaugug

SEQ ID NO: 2362479 - RNA, 19 nt, Artificial Sequence
  Description of Artificial Sequence: Synthetic oligonucleotide
  Antisense strand to SEQ ID NO: 2362478
cacaucauggcuuucaugg

SEQ ID NO: 2362480 - RNA, 19 nt, Artificial Sequence
  Description of Artificial Sequence: Synthetic oligonucleotide
  Sense strand starting at position 2398 of SEQ ID NO: 1885709
guggguuggccagaauggu

SEQ ID NO: 2362481 - RNA, 19 nt, Artificial Sequence
  Description of Artificial Sequence: Synthetic oligonucleotide
  Antisense strand to SEQ ID NO: 2362480
accauucuggccaacccac

SEQ ID NO: 2362482 - RNA, 19 nt, Artificial Sequence
  Description of Artificial Sequence: Synthetic oligonucleotide
  Sense strand starting at position 2407 of SEQ ID NO: 1885709
ccagaaugguguuucuacu

SEQ ID NO: 2362483 - RNA, 19 nt, Artificial Sequence
  Description of Artificial Sequence: Synthetic oligonucleotide
  Antisense strand to SEQ ID NO: 2362482
aguagaaacaccauucugg

SEQ ID NO: 2362484 - RNA, 19 nt, Artificial Sequence
  Description of Artificial Sequence: Synthetic oligonucleotide
  Sense strand starting at position 2429 of SEQ ID NO: 1885709
uuccacugaccuugaagaa

SEQ ID NO: 2362485 - RNA, 19 nt, Artificial Sequence
  Description of Artificial Sequence: Synthetic oligonucleotide
  Antisense strand to SEQ ID NO: 2362484
uucuucaaggucaguggaa

SEQ ID NO: 2362486 - RNA, 19 nt, Artificial Sequence
  Description of Artificial Sequence: Synthetic oligonucleotide
  Sense strand starting at position 2438 of SEQ ID NO: 1885709
ccuugaagaagagguuauu

SEQ ID NO: 2362487 - RNA, 19 nt, Artificial Sequence
  Description of Artificial Sequence: Synthetic oligonucleotide
  Antisense strand to SEQ ID NO: 2362486
aauaaccucuucuucaagg

SEQ ID NO: 2362488 - RNA, 19 nt, Artificial Sequence
  Description of Artificial Sequence: Synthetic oligonucleotide
  Sense strand starting at position 2725 of SEQ ID NO: 1885709
gucagauacuguucaggga

SEQ ID NO: 2362489 - RNA, 19 nt, Artificial Sequence
  Description of Artificial Sequence: Synthetic oligonucleotide
  Antisense strand to SEQ ID NO: 2362488
ucccugaacaguaucugac

SEQ ID NO: 2362490 - RNA, 19 nt, Artificial Sequence
  Description of Artificial Sequence: Synthetic oligonucleotide
  Sense strand starting at position 2806 of SEQ ID NO: 1885709
gucagagcugaguacaagu

SEQ ID NO: 2362491 - RNA, 19 nt, Artificial Sequence
  Description of Artificial Sequence: Synthetic oligonucleotide
  Antisense strand to SEQ ID NO: 2362490
acuuguacucagcucugac

SEQ ID NO: 2362492 - RNA, 19 nt, Artificial Sequence
  Description of Artificial Sequence: Synthetic oligonucleotide
  Sense strand starting at position 2842 of SEQ ID NO: 1885709
cuuaauucugccuggauac

SEQ ID NO: 2362493 - RNA, 19 nt, Artificial Sequence
  Description of Artificial Sequence: Synthetic oligonucleotide
  Antisense strand to SEQ ID NO: 2362492
guauccaggcagaauuaag

SEQ ID NO: 2362494 - RNA, 19 nt, Artificial Sequence
  Description of Artificial Sequence: Synthetic oligonucleotide
  Sense strand starting at position 2978 of SEQ ID NO: 1885709
agccaacgacguuauauua

SEQ ID NO: 2362495 - RNA, 19 nt, Artificial Sequence
  Description of Artificial Sequence: Synthetic oligonucleotide
  Antisense strand to SEQ ID NO: 2362494
uaauauaacgucguuggcu

SEQ ID NO: 2362496 - RNA, 19 nt, Artificial Sequence
  Description of Artificial Sequence: Synthetic oligonucleotide
  Sense strand starting at position 3405 of SEQ ID NO: 1885709
guaaauuaagagugccaug

SEQ ID NO: 2362497 - RNA, 19 nt, Artificial Sequence
  Description of Artificial Sequence: Synthetic oligonucleotide
  Antisense strand to SEQ ID NO: 2362496
cauggcacucuuaauuuac

SEQ ID NO: 2362498 - RNA, 19 nt, Artificial Sequence
  Description of Artificial Sequence: Synthetic oligonucleotide
  Sense strand starting at position 27 of SEQ ID NO: 1885710
gucuuaaugcauugaucag

SEQ ID NO: 2362499 - RNA, 19 nt, Artificial Sequence
  Description of Artificial Sequence: Synthetic oligonucleotide
  Antisense strand to SEQ ID NO: 2362498
cugaucaaugcauuaagac

SEQ ID NO: 2362500 - RNA, 19 nt, Artificial Sequence
  Description of Artificial Sequence: Synthetic oligonucleotide
  Sense strand starting at position 42 of SEQ ID NO: 1885710
ucaguacaccuuuaaugua

SEQ ID NO: 2362501 - RNA, 19 nt, Artificial Sequence
  Description of Artificial Sequence: Synthetic oligonucleotide
  Antisense strand to SEQ ID NO: 2362500
uacauuaaagguguacuga

SEQ ID NO: 2362502 - RNA, 19 nt, Artificial Sequence
  Description of Artificial Sequence: Synthetic oligonucleotide
  Sense strand starting at position 207 of SEQ ID NO: 1885710
ccgagcagucgggauuaca

SEQ ID NO: 2362503 - RNA, 19 nt, Artificial Sequence
  Description of Artificial Sequence: Synthetic oligonucleotide
  Antisense strand to SEQ ID NO: 2362502
uguaaucccgacugcucgg

SEQ ID NO: 2362504 - RNA, 19 nt, Artificial Sequence
  Description of Artificial Sequence: Synthetic oligonucleotide
  Sense strand starting at position 698 of SEQ ID NO: 1885710
caacgcugaugaguauaau

SEQ ID NO: 2362505 - RNA, 19 nt, Artificial Sequence
  Description of Artificial Sequence: Synthetic oligonucleotide
  Antisense strand to SEQ ID NO: 2362504
auuauacucaucagcguug

SEQ ID NO: 2362506 - RNA, 19 nt, Artificial Sequence
  Description of Artificial Sequence: Synthetic oligonucleotide
  Sense strand starting at position 701 of SEQ ID NO: 1885710
cgcugaugaguauaauggu

SEQ ID NO: 2362507 - RNA, 19 nt, Artificial Sequence
  Description of Artificial Sequence: Synthetic oligonucleotide
  Antisense strand to SEQ ID NO: 2362506
accauuauacucaucagcg

SEQ ID NO: 2362508 - RNA, 19 nt, Artificial Sequence
  Description of Artificial Sequence: Synthetic oligonucleotide
  Sense strand starting at position 708 of SEQ ID NO: 1885710
gaguauaaugguggcuaua

SEQ ID NO: 2362509 - RNA, 19 nt, Artificial Sequence
  Description of Artificial Sequence: Synthetic oligonucleotide
  Antisense strand to SEQ ID NO: 2362508
uauagccaccauuauacuc

SEQ ID NO: 2362510 - RNA, 19 nt, Artificial Sequence
  Description of Artificial Sequence: Synthetic oligonucleotide
  Sense strand starting at position 710 of SEQ ID NO: 1885710
guauaaugguggcuauaaa

SEQ ID NO: 2362511 - RNA, 19 nt, Artificial Sequence
  Description of Artificial Sequence: Synthetic oligonucleotide
  Antisense strand to SEQ ID NO: 2362510
uuuauagccaccauuauac

SEQ ID NO: 2362512 - RNA, 19 nt, Artificial Sequence
  Description of Artificial Sequence: Synthetic oligonucleotide
  Sense strand starting at position 1027 of SEQ ID NO: 1885710
cagggaauguuguuaagua

SEQ ID NO: 2362513 - RNA, 19 nt, Artificial Sequence
  Description of Artificial Sequence: Synthetic oligonucleotide
  Antisense strand to SEQ ID NO: 2362512
uacuuaacaacauucccug

SEQ ID NO: 2362514 - RNA, 19 nt, Artificial Sequence
  Description of Artificial Sequence: Synthetic oligonucleotide
  Sense strand starting at position 1085 of SEQ ID NO: 1885710
aucguuuaugcauaaauga

SEQ ID NO: 2362515 - RNA, 19 nt, Artificial Sequence
  Description of Artificial Sequence: Synthetic oligonucleotide
  Antisense strand to SEQ ID NO: 2362514
ucauuuaugcauaaacgau

SEQ ID NO: 2362516 - RNA, 19 nt, Artificial Sequence
  Description of Artificial Sequence: Synthetic oligonucleotide
  Sense strand starting at position 1092 of SEQ ID NO: 1885710
augcauaaaugaccugaau

SEQ ID NO: 2362517 - RNA, 19 nt, Artificial Sequence
  Description of Artificial Sequence: Synthetic oligonucleotide
  Antisense strand to SEQ ID NO: 2362516
auucaggucauuuaugcau

SEQ ID NO: 2362518 - RNA, 19 nt, Artificial Sequence
  Description of Artificial Sequence: Synthetic oligonucleotide
  Sense strand starting at position 1373 of SEQ ID NO: 1885710
agaggaagacuccguuuaa

SEQ ID NO: 2362519 - RNA, 19 nt, Artificial Sequence
  Description of Artificial Sequence: Synthetic oligonucleotide
  Antisense strand to SEQ ID NO: 2362518
uuaaacggagucuuccucu

SEQ ID NO: 2362520 - RNA, 19 nt, Artificial Sequence
  Description of Artificial Sequence: Synthetic oligonucleotide
  Sense strand starting at position 1374 of SEQ ID NO: 1885710
gaggaagacuccguuuaaa

SEQ ID NO: 2362521 - RNA, 19 nt, Artificial Sequence
  Description of Artificial Sequence: Synthetic oligonucleotide
  Antisense strand to SEQ ID NO: 2362520
uuuaaacggagucuuccuc

SEQ ID NO: 2362522 - RNA, 19 nt, Artificial Sequence
  Description of Artificial Sequence: Synthetic oligonucleotide
  Sense strand starting at position 1408 of SEQ ID NO: 1885710
agaccugaauguccuuaaa

SEQ ID NO: 2362523 - RNA, 19 nt, Artificial Sequence
  Description of Artificial Sequence: Synthetic oligonucleotide
  Antisense strand to SEQ ID NO: 2362522
uuuaaggacauucaggucu

SEQ ID NO: 2362524 - RNA, 19 nt, Artificial Sequence
  Description of Artificial Sequence: Synthetic oligonucleotide
  Sense strand starting at position 1540 of SEQ ID NO: 1885710
aguuauaugcacuguauaa

SEQ ID NO: 2362525 - RNA, 19 nt, Artificial Sequence
  Description of Artificial Sequence: Synthetic oligonucleotide
  Antisense strand to SEQ ID NO: 2362524
uuauacagugcauauaacu

SEQ ID NO: 2362526 - RNA, 19 nt, Artificial Sequence
  Description of Artificial Sequence: Synthetic oligonucleotide
  Sense strand starting at position 1542 of SEQ ID NO: 1885710
uuauaugcacuguauaaga

SEQ ID NO: 2362527 - RNA, 19 nt, Artificial Sequence
  Description of Artificial Sequence: Synthetic oligonucleotide
  Antisense strand to SEQ ID NO: 2362526
ucuuauacagugcauauaa

SEQ ID NO: 2362528 - RNA, 19 nt, Artificial Sequence
  Description of Artificial Sequence: Synthetic oligonucleotide
  Sense strand starting at position 1544 of SEQ ID NO: 1885710
auaugcacuguauaagaau

SEQ ID NO: 2362529 - RNA, 19 nt, Artificial Sequence
  Description of Artificial Sequence: Synthetic oligonucleotide
  Antisense strand to SEQ ID NO: 2362528
auucuuauacagugcauau

SEQ ID NO: 2362530 - RNA, 19 nt, Artificial Sequence
  Description of Artificial Sequence: Synthetic oligonucleotide
  Sense strand starting at position 1566 of SEQ ID NO: 1885710
cuggaacugucucucuaca

SEQ ID NO: 2362531 - RNA, 19 nt, Artificial Sequence
  Description of Artificial Sequence: Synthetic oligonucleotide
  Antisense strand to SEQ ID NO: 2362530
uguagagagacaguuccag

SEQ ID NO: 2362532 - RNA, 19 nt, Artificial Sequence
  Description of Artificial Sequence: Synthetic oligonucleotide
  Sense strand starting at position 1653 of SEQ ID NO: 1885710
cucagugucuccucagaaa

SEQ ID NO: 2362533 - RNA, 19 nt, Artificial Sequence
  Description of Artificial Sequence: Synthetic oligonucleotide
  Antisense strand to SEQ ID NO: 2362532
uuucugaggagacacugag

SEQ ID NO: 2362534 - RNA, 19 nt, Artificial Sequence
  Description of Artificial Sequence: Synthetic oligonucleotide
  Sense strand starting at position 1707 of SEQ ID NO: 1885710
ggagucucuccagaccuuu

SEQ ID NO: 2362535 - RNA, 19 nt, Artificial Sequence
  Description of Artificial Sequence: Synthetic oligonucleotide
  Antisense strand to SEQ ID NO: 2362534
aaaggucuggagagacucc

SEQ ID NO: 2362536 - RNA, 19 nt, Artificial Sequence
  Description of Artificial Sequence: Synthetic oligonucleotide
  Sense strand starting at position 2114 of SEQ ID NO: 1885710
auguauagguccuuuccau

SEQ ID NO: 2362537 - RNA, 19 nt, Artificial Sequence
  Description of Artificial Sequence: Synthetic oligonucleotide
  Antisense strand to SEQ ID NO: 2362536
auggaaaggaccuauacau

SEQ ID NO: 2362538 - RNA, 19 nt, Artificial Sequence
  Description of Artificial Sequence: Synthetic oligonucleotide
  Sense strand starting at position 2212 of SEQ ID NO: 1885710
gaggaaugguucccaaucu

SEQ ID NO: 2362539 - RNA, 19 nt, Artificial Sequence
  Description of Artificial Sequence: Synthetic oligonucleotide
  Antisense strand to SEQ ID NO: 2362538
agauugggaaccauuccuc

SEQ ID NO: 2362540 - RNA, 19 nt, Artificial Sequence
  Description of Artificial Sequence: Synthetic oligonucleotide
  Sense strand starting at position 2219 of SEQ ID NO: 1885710
gguucccaaucuuuggaau

SEQ ID NO: 2362541 - RNA, 19 nt, Artificial Sequence
  Description of Artificial Sequence: Synthetic oligonucleotide
  Antisense strand to SEQ ID NO: 2362540
auuccaaagauugggaacc

SEQ ID NO: 2362542 - RNA, 19 nt, Artificial Sequence
  Description of Artificial Sequence: Synthetic oligonucleotide
  Sense strand starting at position 2220 of SEQ ID NO: 1885710
guucccaaucuuuggaauu

SEQ ID NO: 2362543 - RNA, 19 nt, Artificial Sequence
  Description of Artificial Sequence: Synthetic oligonucleotide
  Antisense strand to SEQ ID NO: 2362542
aauuccaaagauugggaac

SEQ ID NO: 2362544 - RNA, 19 nt, Artificial Sequence
  Description of Artificial Sequence: Synthetic oligonucleotide
  Sense strand starting at position 2484 of SEQ ID NO: 1885710
gugaacacuuccuuacaga

SEQ ID NO: 2362545 - RNA, 19 nt, Artificial Sequence
  Description of Artificial Sequence: Synthetic oligonucleotide
  Antisense strand to SEQ ID NO: 2362544
ucuguaaggaaguguucac

SEQ ID NO: 2362546 - RNA, 19 nt, Artificial Sequence
  Description of Artificial Sequence: Synthetic oligonucleotide
  Sense strand starting at position 2554 of SEQ ID NO: 1885710
accugacuaugccugagaa

SEQ ID NO: 2362547 - RNA, 19 nt, Artificial Sequence
  Description of Artificial Sequence: Synthetic oligonucleotide
  Antisense strand to SEQ ID NO: 2362546
uucucaggcauagucaggu

SEQ ID NO: 2362548 - RNA, 19 nt, Artificial Sequence
  Description of Artificial Sequence: Synthetic oligonucleotide
  Sense strand starting at position 2657 of SEQ ID NO: 1885710
aggauuucuugagacggag

SEQ ID NO: 2362549 - RNA, 19 nt, Artificial Sequence
  Description of Artificial Sequence: Synthetic oligonucleotide
  Antisense strand to SEQ ID NO: 2362548
cuccgucucaagaaauccu

SEQ ID NO: 2362550 - RNA, 19 nt, Artificial Sequence
  Description of Artificial Sequence: Synthetic oligonucleotide
  Sense strand starting at position 3081 of SEQ ID NO: 1885710
uuuacaaugcuguauguaa

SEQ ID NO: 2362551 - RNA, 19 nt, Artificial Sequence
  Description of Artificial Sequence: Synthetic oligonucleotide
  Antisense strand to SEQ ID NO: 2362550
uuacauacagcauuguaaa

SEQ ID NO: 2362552 - RNA, 19 nt, Artificial Sequence
  Description of Artificial Sequence: Synthetic oligonucleotide
  Sense strand starting at position 3124 of SEQ ID NO: 1885710
ucuguaccuguugagcaau

SEQ ID NO: 2362553 - RNA, 19 nt, Artificial Sequence
  Description of Artificial Sequence: Synthetic oligonucleotide
  Antisense strand to SEQ ID NO: 2362552
auugcucaacagguacaga

SEQ ID NO: 2362554 - RNA, 19 nt, Artificial Sequence
  Description of Artificial Sequence: Synthetic oligonucleotide
  Sense strand starting at position 3296 of SEQ ID NO: 1885710
gugcucauccgugucauag

SEQ ID NO: 2362555 - RNA, 19 nt, Artificial Sequence
  Description of Artificial Sequence: Synthetic oligonucleotide
  Antisense strand to SEQ ID NO: 2362554
cuaugacacggaugagcac

SEQ ID NO: 2362556 - RNA, 19 nt, Artificial Sequence
  Description of Artificial Sequence: Synthetic oligonucleotide
  Sense strand starting at position 3307 of SEQ ID NO: 1885710
ugucauagcagguaucaga

SEQ ID NO: 2362557 - RNA, 19 nt, Artificial Sequence
  Description of Artificial Sequence: Synthetic oligonucleotide
  Antisense strand to SEQ ID NO: 2362556
ucugauaccugcuaugaca

SEQ ID NO: 2362558 - RNA, 19 nt, Artificial Sequence
  Description of Artificial Sequence: Synthetic oligonucleotide
  Sense strand starting at position 3344 of SEQ ID NO: 1885710
gcugaauccuucuccauug

SEQ ID NO: 2362559 - RNA, 19 nt, Artificial Sequence
  Description of Artificial Sequence: Synthetic oligonucleotide
  Antisense strand to SEQ ID NO: 2362558
caauggagaaggauucagc

SEQ ID NO: 2362560 - RNA, 19 nt, Artificial Sequence
  Description of Artificial Sequence: Synthetic oligonucleotide
  Sense strand starting at position 3362 of SEQ ID NO: 1885710
gcaugcauuugccacauuu

SEQ ID NO: 2362561 - RNA, 19 nt, Artificial Sequence
  Description of Artificial Sequence: Synthetic oligonucleotide
  Antisense strand to SEQ ID NO: 2362560
aaauguggcaaaugcaugc

SEQ ID NO: 2362562 - RNA, 19 nt, Artificial Sequence
  Description of Artificial Sequence: Synthetic oligonucleotide
  Sense strand starting at position 3450 of SEQ ID NO: 1885710
cuaugaagguuguuguaca

SEQ ID NO: 2362563 - RNA, 19 nt, Artificial Sequence
  Description of Artificial Sequence: Synthetic oligonucleotide
  Antisense strand to SEQ ID NO: 2362562
uguacaacaaccuucauag

SEQ ID NO: 2362564 - RNA, 19 nt, Artificial Sequence
  Description of Artificial Sequence: Synthetic oligonucleotide
  Sense strand starting at position 3461 of SEQ ID NO: 1885710
guuguacacgcaucuguuu

SEQ ID NO: 2362565 - RNA, 19 nt, Artificial Sequence
  Description of Artificial Sequence: Synthetic oligonucleotide
  Antisense strand to SEQ ID NO: 2362564
aaacagaugcguguacaac

SEQ ID NO: 2362566 - RNA, 19 nt, Artificial Sequence
  Description of Artificial Sequence: Synthetic oligonucleotide
  Sense strand starting at position 3692 of SEQ ID NO: 1885710
uccucauagaugugaagug

SEQ ID NO: 2362567 - RNA, 19 nt, Artificial Sequence
  Description of Artificial Sequence: Synthetic oligonucleotide
  Antisense strand to SEQ ID NO: 2362566
cacuucacaucuaugagga

SEQ ID NO: 2362568 - RNA, 19 nt, Artificial Sequence
  Description of Artificial Sequence: Synthetic oligonucleotide
  Sense strand starting at position 3776 of SEQ ID NO: 1885710
gccuauuggccaucugugu

SEQ ID NO: 2362569 - RNA, 19 nt, Artificial Sequence
  Description of Artificial Sequence: Synthetic oligonucleotide
  Antisense strand to SEQ ID NO: 2362568
acacagauggccaauaggc

SEQ ID NO: 2362570 - RNA, 19 nt, Artificial Sequence
  Description of Artificial Sequence: Synthetic oligonucleotide
  Sense strand starting at position 3885 of SEQ ID NO: 1885710
acauauucuggauaguagu

SEQ ID NO: 2362571 - RNA, 19 nt, Artificial Sequence
  Description of Artificial Sequence: Synthetic oligonucleotide
  Antisense strand to SEQ ID NO: 2362570
acuacuauccagaauaugu

SEQ ID NO: 2362572 - RNA, 19 nt, Artificial Sequence
  Description of Artificial Sequence: Synthetic oligonucleotide
  Sense strand starting at position 3891 of SEQ ID NO: 1885710
ucuggauaguagucccuua

SEQ ID NO: 2362573 - RNA, 19 nt, Artificial Sequence
  Description of Artificial Sequence: Synthetic oligonucleotide
  Antisense strand to SEQ ID NO: 2362572
uaagggacuacuauccaga

SEQ ID NO: 2362574 - RNA, 19 nt, Artificial Sequence
  Description of Artificial Sequence: Synthetic oligonucleotide
  Sense strand starting at position 3898 of SEQ ID NO: 1885710
aguagucccuuaucagaug

SEQ ID NO: 2362575 - RNA, 19 nt, Artificial Sequence
  Description of Artificial Sequence: Synthetic oligonucleotide
  Antisense strand to SEQ ID NO: 2362574
caucugauaagggacuacu

SEQ ID NO: 2362576 - RNA, 19 nt, Artificial Sequence
  Description of Artificial Sequence: Synthetic oligonucleotide
  Sense strand starting at position 3912 of SEQ ID NO: 1885710
agaugugugauuugcaggu

SEQ ID NO: 2362577 - RNA, 19 nt, Artificial Sequence
  Description of Artificial Sequence: Synthetic oligonucleotide
  Antisense strand to SEQ ID NO: 2362576
accugcaaaucacacaucu

SEQ ID NO: 2362578 - RNA, 19 nt, Artificial Sequence
  Description of Artificial Sequence: Synthetic oligonucleotide
  Sense strand starting at position 167 of SEQ ID NO: 1885711
aaguaaggaugcucucuau

SEQ ID NO: 2362579 - RNA, 19 nt, Artificial Sequence
  Description of Artificial Sequence: Synthetic oligonucleotide
  Antisense strand to SEQ ID NO: 2362578
auagagagcauccuuacuu

SEQ ID NO: 2362580 - RNA, 19 nt, Artificial Sequence
  Description of Artificial Sequence: Synthetic oligonucleotide
  Sense strand starting at position 185 of SEQ ID NO: 1885711
uuagcagguuuggaaugau

SEQ ID NO: 2362581 - RNA, 19 nt, Artificial Sequence
  Description of Artificial Sequence: Synthetic oligonucleotide
  Antisense strand to SEQ ID NO: 2362580
aucauuccaaaccugcuaa

SEQ ID NO: 2362582 - RNA, 19 nt, Artificial Sequence
  Description of Artificial Sequence: Synthetic oligonucleotide
  Sense strand starting at position 188 of SEQ ID NO: 1885711
gcagguuuggaaugaucuc

SEQ ID NO: 2362583 - RNA, 19 nt, Artificial Sequence
  Description of Artificial Sequence: Synthetic oligonucleotide
  Antisense strand to SEQ ID NO: 2362582
gagaucauuccaaaccugc

SEQ ID NO: 2362584 - RNA, 19 nt, Artificial Sequence
  Description of Artificial Sequence: Synthetic oligonucleotide
  Sense strand starting at position 204 of SEQ ID NO: 1885711
cucucaacaugugaaauga

SEQ ID NO: 2362585 - RNA, 19 nt, Artificial Sequence
  Description of Artificial Sequence: Synthetic oligonucleotide
  Antisense strand to SEQ ID NO: 2362584
ucauuucacauguugagag

SEQ ID NO: 2362586 - RNA, 19 nt, Artificial Sequence
  Description of Artificial Sequence: Synthetic oligonucleotide
  Sense strand starting at position 389 of SEQ ID NO: 1885711
ggaggcauguuccuguagu

SEQ ID NO: 2362587 - RNA, 19 nt, Artificial Sequence
  Description of Artificial Sequence: Synthetic oligonucleotide
  Antisense strand to SEQ ID NO: 2362586
acuacaggaacaugccucc

SEQ ID NO: 2362588 - RNA, 19 nt, Artificial Sequence
  Description of Artificial Sequence: Synthetic oligonucleotide
  Sense strand starting at position 502 of SEQ ID NO: 1885711
agguuccuguaguuccaaa

SEQ ID NO: 2362589 - RNA, 19 nt, Artificial Sequence
  Description of Artificial Sequence: Synthetic oligonucleotide
  Antisense strand to SEQ ID NO: 2362588
uuuggaacuacaggaaccu

SEQ ID NO: 2362590 - RNA, 19 nt, Artificial Sequence
  Description of Artificial Sequence: Synthetic oligonucleotide
  Sense strand starting at position 665 of SEQ ID NO: 1885711
gguuauauaguuugccaca

SEQ ID NO: 2362591 - RNA, 19 nt, Artificial Sequence
  Description of Artificial Sequence: Synthetic oligonucleotide
  Antisense strand to SEQ ID NO: 2362590
uguggcaaacuauauaacc

SEQ ID NO: 2362592 - RNA, 19 nt, Artificial Sequence
  Description of Artificial Sequence: Synthetic oligonucleotide
  Sense strand starting at position 766 of SEQ ID NO: 1885711
aaaguagucgauuacuaac

SEQ ID NO: 2362593 - RNA, 19 nt, Artificial Sequence
  Description of Artificial Sequence: Synthetic oligonucleotide
  Antisense strand to SEQ ID NO: 2362592
guuaguaaucgacuacuuu

SEQ ID NO: 2362594 - RNA, 19 nt, Artificial Sequence
  Description of Artificial Sequence: Synthetic oligonucleotide
  Sense strand starting at position 768 of SEQ ID NO: 1885711
aguagucgauuacuaacuu

SEQ ID NO: 2362595 - RNA, 19 nt, Artificial Sequence
  Description of Artificial Sequence: Synthetic oligonucleotide
  Antisense strand to SEQ ID NO: 2362594
aaguuaguaaucgacuacu

SEQ ID NO: 2362596 - RNA, 19 nt, Artificial Sequence
  Description of Artificial Sequence: Synthetic oligonucleotide
  Sense strand starting at position 774 of SEQ ID NO: 1885711
cgauuacuaacuuggcagu

SEQ ID NO: 2362597 - RNA, 19 nt, Artificial Sequence
  Description of Artificial Sequence: Synthetic oligonucleotide
  Antisense strand to SEQ ID NO: 2362596
acugccaaguuaguaaucg

SEQ ID NO: 2362598 - RNA, 19 nt, Artificial Sequence
  Description of Artificial Sequence: Synthetic oligonucleotide
  Sense strand starting at position 805 of SEQ ID NO: 1885711
acaggaucauggugaguau

SEQ ID NO: 2362599 - RNA, 19 nt, Artificial Sequence
  Description of Artificial Sequence: Synthetic oligonucleotide
  Antisense strand to SEQ ID NO: 2362598
auacucaccaugauccugu

SEQ ID NO: 2362600 - RNA, 19 nt, Artificial Sequence
  Description of Artificial Sequence: Synthetic oligonucleotide
  Sense strand starting at position 808 of SEQ ID NO: 1885711
ggaucauggugaguauaag

SEQ ID NO: 2362601 - RNA, 19 nt, Artificial Sequence
  Description of Artificial Sequence: Synthetic oligonucleotide
  Antisense strand to SEQ ID NO: 2362600
cuuauacucaccaugaucc

SEQ ID NO: 2362602 - RNA, 19 nt, Artificial Sequence
  Description of Artificial Sequence: Synthetic oligonucleotide
  Sense strand starting at position 814 of SEQ ID NO: 1885711
uggugaguauaagacuuaa

SEQ ID NO: 2362603 - RNA, 19 nt, Artificial Sequence
  Description of Artificial Sequence: Synthetic oligonucleotide
  Antisense strand to SEQ ID NO: 2362602
uuaagucuuauacucacca

SEQ ID NO: 2362604 - RNA, 19 nt, Artificial Sequence
  Description of Artificial Sequence: Synthetic oligonucleotide
  Sense strand starting at position 1181 of SEQ ID NO: 1885711
gacagagugucagucuauu

SEQ ID NO: 2362605 - RNA, 19 nt, Artificial Sequence
  Description of Artificial Sequence: Synthetic oligonucleotide
  Antisense strand to SEQ ID NO: 2362604
aauagacugacacucuguc

SEQ ID NO: 2362606 - RNA, 19 nt, Artificial Sequence
  Description of Artificial Sequence: Synthetic oligonucleotide
  Sense strand starting at position 1276 of SEQ ID NO: 1885711
ccgguuucccgaguagcua

SEQ ID NO: 2362607 - RNA, 19 nt, Artificial Sequence
  Description of Artificial Sequence: Synthetic oligonucleotide
  Antisense strand to SEQ ID NO: 2362606
uagcuacucgggaaaccgg

SEQ ID NO: 2362608 - RNA, 19 nt, Artificial Sequence
  Description of Artificial Sequence: Synthetic oligonucleotide
  Sense strand starting at position 1309 of SEQ ID NO: 1885711
acaccauuguguccagcua

SEQ ID NO: 2362609 - RNA, 19 nt, Artificial Sequence
  Description of Artificial Sequence: Synthetic oligonucleotide
  Antisense strand to SEQ ID NO: 2362608
uagcuggacacaauggugu

SEQ ID NO: 2362610 - RNA, 19 nt, Artificial Sequence
  Description of Artificial Sequence: Synthetic oligonucleotide
  Sense strand starting at position 1447 of SEQ ID NO: 1885711
gccuguaaguguccugaaa

SEQ ID NO: 2362611 - RNA, 19 nt, Artificial Sequence
  Description of Artificial Sequence: Synthetic oligonucleotide
  Antisense strand to SEQ ID NO: 2362610
uuucaggacacuuacaggc

SEQ ID NO: 2362612 - RNA, 19 nt, Artificial Sequence
  Description of Artificial Sequence: Synthetic oligonucleotide
  Sense strand starting at position 1899 of SEQ ID NO: 1885711
gaaaccacuuagguguaau

SEQ ID NO: 2362613 - RNA, 19 nt, Artificial Sequence
  Description of Artificial Sequence: Synthetic oligonucleotide
  Antisense strand to SEQ ID NO: 2362612
auuacaccuaagugguuuc

SEQ ID NO: 2362614 - RNA, 19 nt, Artificial Sequence
  Description of Artificial Sequence: Synthetic oligonucleotide
  Sense strand starting at position 1911 of SEQ ID NO: 1885711
guguaaugcuaucucaagg

SEQ ID NO: 2362615 - RNA, 19 nt, Artificial Sequence
  Description of Artificial Sequence: Synthetic oligonucleotide
  Antisense strand to SEQ ID NO: 2362614
ccuugagauagcauuacac

SEQ ID NO: 2362616 - RNA, 19 nt, Artificial Sequence
  Description of Artificial Sequence: Synthetic oligonucleotide
  Sense strand starting at position 1916 of SEQ ID NO: 1885711
augcuaucucaagguaaua

SEQ ID NO: 2362617 - RNA, 19 nt, Artificial Sequence
  Description of Artificial Sequence: Synthetic oligonucleotide
  Antisense strand to SEQ ID NO: 2362616
uauuaccuugagauagcau

SEQ ID NO: 2362618 - RNA, 19 nt, Artificial Sequence
  Description of Artificial Sequence: Synthetic oligonucleotide
  Sense strand starting at position 1932 of SEQ ID NO: 1885711
auaccaauaccuuguguuu

SEQ ID NO: 2362619 - RNA, 19 nt, Artificial Sequence
  Description of Artificial Sequence: Synthetic oligonucleotide
  Antisense strand to SEQ ID NO: 2362618
aaacacaagguauugguau

SEQ ID NO: 2362620 - RNA, 19 nt, Artificial Sequence
  Description of Artificial Sequence: Synthetic oligonucleotide
  Sense strand starting at position 1977 of SEQ ID NO: 1885711
cugguacuaccuugaaaca

SEQ ID NO: 2362621 - RNA, 19 nt, Artificial Sequence
  Description of Artificial Sequence: Synthetic oligonucleotide
  Antisense strand to SEQ ID NO: 2362620
uguuucaagguaguaccag

SEQ ID NO: 2362622 - RNA, 19 nt, Artificial Sequence
  Description of Artificial Sequence: Synthetic oligonucleotide
  Sense strand starting at position 1995 of SEQ ID NO: 1885711
agcauuauauauuggucaa

SEQ ID NO: 2362623 - RNA, 19 nt, Artificial Sequence
  Description of Artificial Sequence: Synthetic oligonucleotide
  Antisense strand to SEQ ID NO: 2362622
uugaccaauauauaaugcu

SEQ ID NO: 2362624 - RNA, 19 nt, Artificial Sequence
  Description of Artificial Sequence: Synthetic oligonucleotide
  Sense strand starting at position 2416 of SEQ ID NO: 1885711
ucauuaguuuccuugaagg

SEQ ID NO: 2362625 - RNA, 19 nt, Artificial Sequence
  Description of Artificial Sequence: Synthetic oligonucleotide
  Antisense strand to SEQ ID NO: 2362624
ccuucaaggaaacuaauga

SEQ ID NO: 2362626 - RNA, 19 nt, Artificial Sequence
  Description of Artificial Sequence: Synthetic oligonucleotide
  Sense strand starting at position 2418 of SEQ ID NO: 1885711
auuaguuuccuugaagggu

SEQ ID NO: 2362627 - RNA, 19 nt, Artificial Sequence
  Description of Artificial Sequence: Synthetic oligonucleotide
  Antisense strand to SEQ ID NO: 2362626
acccuucaaggaaacuaau

SEQ ID NO: 2362628 - RNA, 19 nt, Artificial Sequence
  Description of Artificial Sequence: Synthetic oligonucleotide
  Sense strand starting at position 2432 of SEQ ID NO: 1885711
aggguauucuguguccagu

SEQ ID NO: 2362629 - RNA, 19 nt, Artificial Sequence
  Description of Artificial Sequence: Synthetic oligonucleotide
  Antisense strand to SEQ ID NO: 2362628
acuggacacagaauacccu

SEQ ID NO: 2362630 - RNA, 19 nt, Artificial Sequence
  Description of Artificial Sequence: Synthetic oligonucleotide
  Sense strand starting at position 2497 of SEQ ID NO: 1885711
cugguuuccacagguauga

SEQ ID NO: 2362631 - RNA, 19 nt, Artificial Sequence
  Description of Artificial Sequence: Synthetic oligonucleotide
  Antisense strand to SEQ ID NO: 2362630
ucauaccuguggaaaccag

SEQ ID NO: 2362632 - RNA, 19 nt, Artificial Sequence
  Description of Artificial Sequence: Synthetic oligonucleotide
  Sense strand starting at position 2499 of SEQ ID NO: 1885711
gguuuccacagguaugagu

SEQ ID NO: 2362633 - RNA, 19 nt, Artificial Sequence
  Description of Artificial Sequence: Synthetic oligonucleotide
  Antisense strand to SEQ ID NO: 2362632
acucauaccuguggaaacc

SEQ ID NO: 2362634 - RNA, 19 nt, Artificial Sequence
  Description of Artificial Sequence: Synthetic oligonucleotide
  Sense strand starting at position 2506 of SEQ ID NO: 1885711
acagguaugaguugcguuu

SEQ ID NO: 2362635 - RNA, 19 nt, Artificial Sequence
  Description of Artificial Sequence: Synthetic oligonucleotide
  Antisense strand to SEQ ID NO: 2362634
aaacgcaacucauaccugu

SEQ ID NO: 2362636 - RNA, 19 nt, Artificial Sequence
  Description of Artificial Sequence: Synthetic oligonucleotide
  Sense strand starting at position 2546 of SEQ ID NO: 1885711
uccguuugccuauguuauu

SEQ ID NO: 2362637 - RNA, 19 nt, Artificial Sequence
  Description of Artificial Sequence: Synthetic oligonucleotide
  Antisense strand to SEQ ID NO: 2362636
aauaacauaggcaaacgga

SEQ ID NO: 2362638 - RNA, 19 nt, Artificial Sequence
  Description of Artificial Sequence: Synthetic oligonucleotide
  Sense strand starting at position 2555 of SEQ ID NO: 1885711
cuauguuauucuuugcuuu

SEQ ID NO: 2362639 - RNA, 19 nt, Artificial Sequence
  Description of Artificial Sequence: Synthetic oligonucleotide
  Antisense strand to SEQ ID NO: 2362638
aaagcaaagaauaacauag

SEQ ID NO: 2362640 - RNA, 19 nt, Artificial Sequence
  Description of Artificial Sequence: Synthetic oligonucleotide
  Sense strand starting at position 2559 of SEQ ID NO: 1885711
guuauucuuugcuuuauac

SEQ ID NO: 2362641 - RNA, 19 nt, Artificial Sequence
  Description of Artificial Sequence: Synthetic oligonucleotide
  Antisense strand to SEQ ID NO: 2362640
guauaaagcaaagaauaac

SEQ ID NO: 2362642 - RNA, 19 nt, Artificial Sequence
  Description of Artificial Sequence: Synthetic oligonucleotide
  Sense strand starting at position 3060 of SEQ ID NO: 1885711
ucuacagaaccuugugaga

SEQ ID NO: 2362643 - RNA, 19 nt, Artificial Sequence
  Description of Artificial Sequence: Synthetic oligonucleotide
  Antisense strand to SEQ ID NO: 2362642
ucucacaagguucuguaga

SEQ ID NO: 2362644 - RNA, 19 nt, Artificial Sequence
  Description of Artificial Sequence: Synthetic oligonucleotide
  Sense strand starting at position 3062 of SEQ ID NO: 1885711
uacagaaccuugugagaca

SEQ ID NO: 2362645 - RNA, 19 nt, Artificial Sequence
  Description of Artificial Sequence: Synthetic oligonucleotide
  Antisense strand to SEQ ID NO: 2362644
ugucucacaagguucugua

SEQ ID NO: 2362646 - RNA, 19 nt, Artificial Sequence
  Description of Artificial Sequence: Synthetic oligonucleotide
  Sense strand starting at position 3118 of SEQ ID NO: 1885711
gugaucauggaucaccgua

SEQ ID NO: 2362647 - RNA, 19 nt, Artificial Sequence
  Description of Artificial Sequence: Synthetic oligonucleotide
  Antisense strand to SEQ ID NO: 2362646
uacggugauccaugaucac

SEQ ID NO: 2362648 - RNA, 19 nt, Artificial Sequence
  Description of Artificial Sequence: Synthetic oligonucleotide
  Sense strand starting at position 3264 of SEQ ID NO: 1885711
gugagauaccacugcauaa

SEQ ID NO: 2362649 - RNA, 19 nt, Artificial Sequence
  Description of Artificial Sequence: Synthetic oligonucleotide
  Antisense strand to SEQ ID NO: 2362648
uuaugcagugguaucucac

SEQ ID NO: 2362650 - RNA, 19 nt, Artificial Sequence
  Description of Artificial Sequence: Synthetic oligonucleotide
  Sense strand starting at position 3400 of SEQ ID NO: 1885711
uguggcaguuucuuacaua

SEQ ID NO: 2362651 - RNA, 19 nt, Artificial Sequence
  Description of Artificial Sequence: Synthetic oligonucleotide
  Antisense strand to SEQ ID NO: 2362650
uauguaagaaacugccaca

SEQ ID NO: 2362652 - RNA, 19 nt, Artificial Sequence
  Description of Artificial Sequence: Synthetic oligonucleotide
  Sense strand starting at position 3403 of SEQ ID NO: 1885711
ggcaguuucuuacauaauu

SEQ ID NO: 2362653 - RNA, 19 nt, Artificial Sequence
  Description of Artificial Sequence: Synthetic oligonucleotide
  Antisense strand to SEQ ID NO: 2362652
aauuauguaagaaacugcc

SEQ ID NO: 2362654 - RNA, 19 nt, Artificial Sequence
  Description of Artificial Sequence: Synthetic oligonucleotide
  Sense strand starting at position 3520 of SEQ ID NO: 1885711
guuuacagccuuuacucau

SEQ ID NO: 2362655 - RNA, 19 nt, Artificial Sequence
  Description of Artificial Sequence: Synthetic oligonucleotide
  Antisense strand to SEQ ID NO: 2362654
augaguaaaggcuguaaac

SEQ ID NO: 2362656 - RNA, 19 nt, Artificial Sequence
  Description of Artificial Sequence: Synthetic oligonucleotide
  Sense strand starting at position 3693 of SEQ ID NO: 1885711
ggcuacauauuauacgauu

SEQ ID NO: 2362657 - RNA, 19 nt, Artificial Sequence
  Description of Artificial Sequence: Synthetic oligonucleotide
  Antisense strand to SEQ ID NO: 2362656
aaucguauaauauguagcc

SEQ ID NO: 2362658 - RNA, 19 nt, Artificial Sequence
  Description of Artificial Sequence: Synthetic oligonucleotide
  Sense strand starting at position 43 of SEQ ID NO: 1885712
gguaaccacaguuauguua

SEQ ID NO: 2362659 - RNA, 19 nt, Artificial Sequence
  Description of Artificial Sequence: Synthetic oligonucleotide
  Antisense strand to SEQ ID NO: 2362658
uaacauaacugugguuacc

SEQ ID NO: 2362660 - RNA, 19 nt, Artificial Sequence
  Description of Artificial Sequence: Synthetic oligonucleotide
  Sense strand starting at position 51 of SEQ ID NO: 1885712
caguuauguuaagaucaug

SEQ ID NO: 2362661 - RNA, 19 nt, Artificial Sequence
  Description of Artificial Sequence: Synthetic oligonucleotide
  Antisense strand to SEQ ID NO: 2362660
caugaucuuaacauaacug

SEQ ID NO: 2362662 - RNA, 19 nt, Artificial Sequence
  Description of Artificial Sequence: Synthetic oligonucleotide
  Sense strand starting at position 315 of SEQ ID NO: 1885712
accuuauucugugcucaua

SEQ ID NO: 2362663 - RNA, 19 nt, Artificial Sequence
  Description of Artificial Sequence: Synthetic oligonucleotide
  Antisense strand to SEQ ID NO: 2362662
uaugagcacagaauaaggu

SEQ ID NO: 2362664 - RNA, 19 nt, Artificial Sequence
  Description of Artificial Sequence: Synthetic oligonucleotide
  Sense strand starting at position 337 of SEQ ID NO: 1885712
auaauuagugggcaaucua

SEQ ID NO: 2362665 - RNA, 19 nt, Artificial Sequence
  Description of Artificial Sequence: Synthetic oligonucleotide
  Antisense strand to SEQ ID NO: 2362664
uagauugcccacuaauuau

SEQ ID NO: 2362666 - RNA, 19 nt, Artificial Sequence
  Description of Artificial Sequence: Synthetic oligonucleotide
  Sense strand starting at position 345 of SEQ ID NO: 1885712
ugggcaaucuacuaauuaa

SEQ ID NO: 2362667 - RNA, 19 nt, Artificial Sequence
  Description of Artificial Sequence: Synthetic oligonucleotide
  Antisense strand to SEQ ID NO: 2362666
uuaauuaguagauugccca

SEQ ID NO: 2362668 - RNA, 19 nt, Artificial Sequence
  Description of Artificial Sequence: Synthetic oligonucleotide
  Sense strand starting at position 374 of SEQ ID NO: 1885712
guaaaugagucaucaaauu

SEQ ID NO: 2362669 - RNA, 19 nt, Artificial Sequence
  Description of Artificial Sequence: Synthetic oligonucleotide
  Antisense strand to SEQ ID NO: 2362668
aauuugaugacucauuuac

SEQ ID NO: 2362670 - RNA, 19 nt, Artificial Sequence
  Description of Artificial Sequence: Synthetic oligonucleotide
  Sense strand starting at position 419 of SEQ ID NO: 1885712
agcauagggcuuuaauaac

SEQ ID NO: 2362671 - RNA, 19 nt, Artificial Sequence
  Description of Artificial Sequence: Synthetic oligonucleotide
  Antisense strand to SEQ ID NO: 2362670
guuauuaaagcccuaugcu

SEQ ID NO: 2362672 - RNA, 19 nt, Artificial Sequence
  Description of Artificial Sequence: Synthetic oligonucleotide
  Sense strand starting at position 443 of SEQ ID NO: 1885712
ucagcaucaucaguauacu

SEQ ID NO: 2362673 - RNA, 19 nt, Artificial Sequence
  Description of Artificial Sequence: Synthetic oligonucleotide
  Antisense strand to SEQ ID NO: 2362672
aguauacugaugaugcuga

SEQ ID NO: 2362674 - RNA, 19 nt, Artificial Sequence
  Description of Artificial Sequence: Synthetic oligonucleotide
  Sense strand starting at position 446 of SEQ ID NO: 1885712
gcaucaucaguauacuuau

SEQ ID NO: 2362675 - RNA, 19 nt, Artificial Sequence
  Description of Artificial Sequence: Synthetic oligonucleotide
  Antisense strand to SEQ ID NO: 2362674
auaaguauacugaugaugc

SEQ ID NO: 2362676 - RNA, 19 nt, Artificial Sequence
  Description of Artificial Sequence: Synthetic oligonucleotide
  Sense strand starting at position 452 of SEQ ID NO: 1885712
ucaguauacuuaucagaag

SEQ ID NO: 2362677 - RNA, 19 nt, Artificial Sequence
  Description of Artificial Sequence: Synthetic oligonucleotide
  Antisense strand to SEQ ID NO: 2362676
cuucugauaaguauacuga

SEQ ID NO: 2362678 - RNA, 19 nt, Artificial Sequence
  Description of Artificial Sequence: Synthetic oligonucleotide
  Sense strand starting at position 475 of SEQ ID NO: 1885712
auuaguaaagccugacaug

SEQ ID NO: 2362679 - RNA, 19 nt, Artificial Sequence
  Description of Artificial Sequence: Synthetic oligonucleotide
  Antisense strand to SEQ ID NO: 2362678
caugucaggcuuuacuaau

SEQ ID NO: 2362680 - RNA, 19 nt, Artificial Sequence
  Description of Artificial Sequence: Synthetic oligonucleotide
  Sense strand starting at position 476 of SEQ ID NO: 1885712
uuaguaaagccugacauga

SEQ ID NO: 2362681 - RNA, 19 nt, Artificial Sequence
  Description of Artificial Sequence: Synthetic oligonucleotide
  Antisense strand to SEQ ID NO: 2362680
ucaugucaggcuuuacuaa

SEQ ID NO: 2362682 - RNA, 19 nt, Artificial Sequence
  Description of Artificial Sequence: Synthetic oligonucleotide
  Sense strand starting at position 594 of SEQ ID NO: 1885712
ugcuguugcccucaaucua

SEQ ID NO: 2362683 - RNA, 19 nt, Artificial Sequence
  Description of Artificial Sequence: Synthetic oligonucleotide
  Antisense strand to SEQ ID NO: 2362682
uagauugagggcaacagca

SEQ ID NO: 2362684 - RNA, 19 nt, Artificial Sequence
  Description of Artificial Sequence: Synthetic oligonucleotide
  Sense strand starting at position 628 of SEQ ID NO: 1885712
uaguaaauagccugagucu

SEQ ID NO: 2362685 - RNA, 19 nt, Artificial Sequence
  Description of Artificial Sequence: Synthetic oligonucleotide
  Antisense strand to SEQ ID NO: 2362684
agacucaggcuauuuacua

SEQ ID NO: 2362686 - RNA, 19 nt, Artificial Sequence
  Description of Artificial Sequence: Synthetic oligonucleotide
  Sense strand starting at position 629 of SEQ ID NO: 1885712
aguaaauagccugagucua

SEQ ID NO: 2362687 - RNA, 19 nt, Artificial Sequence
  Description of Artificial Sequence: Synthetic oligonucleotide
  Antisense strand to SEQ ID NO: 2362686
uagacucaggcuauuuacu

SEQ ID NO: 2362688 - RNA, 19 nt, Artificial Sequence
  Description of Artificial Sequence: Synthetic oligonucleotide
  Sense strand starting at position 659 of SEQ ID NO: 1885712
agaugauugucccuccugu

SEQ ID NO: 2362689 - RNA, 19 nt, Artificial Sequence
  Description of Artificial Sequence: Synthetic oligonucleotide
  Antisense strand to SEQ ID NO: 2362688
acaggagggacaaucaucu

SEQ ID NO: 2362690 - RNA, 19 nt, Artificial Sequence
  Description of Artificial Sequence: Synthetic oligonucleotide
  Sense strand starting at position 902 of SEQ ID NO: 1885712
uucugcuaucaguggaagu

SEQ ID NO: 2362691 - RNA, 19 nt, Artificial Sequence
  Description of Artificial Sequence: Synthetic oligonucleotide
  Antisense strand to SEQ ID NO: 2362690
acuuccacugauagcagaa

SEQ ID NO: 2362692 - RNA, 19 nt, Artificial Sequence
  Description of Artificial Sequence: Synthetic oligonucleotide
  Sense strand starting at position 903 of SEQ ID NO: 1885712
ucugcuaucaguggaagua

SEQ ID NO: 2362693 - RNA, 19 nt, Artificial Sequence
  Description of Artificial Sequence: Synthetic oligonucleotide
  Antisense strand to SEQ ID NO: 2362692
uacuuccacugauagcaga

SEQ ID NO: 2362694 - RNA, 19 nt, Artificial Sequence
  Description of Artificial Sequence: Synthetic oligonucleotide
  Sense strand starting at position 974 of SEQ ID NO: 1885712
ugcagaacugugcgguaaa

SEQ ID NO: 2362695 - RNA, 19 nt, Artificial Sequence
  Description of Artificial Sequence: Synthetic oligonucleotide
  Antisense strand to SEQ ID NO: 2362694
uuuaccgcacaguucugca

SEQ ID NO: 2362696 - RNA, 19 nt, Artificial Sequence
  Description of Artificial Sequence: Synthetic oligonucleotide
  Sense strand starting at position 977 of SEQ ID NO: 1885712
agaacugugcgguaaauca

SEQ ID NO: 2362697 - RNA, 19 nt, Artificial Sequence
  Description of Artificial Sequence: Synthetic oligonucleotide
  Antisense strand to SEQ ID NO: 2362696
ugauuuaccgcacaguucu

SEQ ID NO: 2362698 - RNA, 19 nt, Artificial Sequence
  Description of Artificial Sequence: Synthetic oligonucleotide
  Sense strand starting at position 1097 of SEQ ID NO: 1885712
cuucccucuggagaaguuu

SEQ ID NO: 2362699 - RNA, 19 nt, Artificial Sequence
  Description of Artificial Sequence: Synthetic oligonucleotide
  Antisense strand to SEQ ID NO: 2362698
aaacuucuccagagggaag

SEQ ID NO: 2362700 - RNA, 19 nt, Artificial Sequence
  Description of Artificial Sequence: Synthetic oligonucleotide
  Sense strand starting at position 1214 of SEQ ID NO: 1885712
gauaaaggauacuguaaua

SEQ ID NO: 2362701 - RNA, 19 nt, Artificial Sequence
  Description of Artificial Sequence: Synthetic oligonucleotide
  Antisense strand to SEQ ID NO: 2362700
uauuacaguauccuuuauc

SEQ ID NO: 2362702 - RNA, 19 nt, Artificial Sequence
  Description of Artificial Sequence: Synthetic oligonucleotide
  Sense strand starting at position 1282 of SEQ ID NO: 1885712
uaaguacaguuguaaagag

SEQ ID NO: 2362703 - RNA, 19 nt, Artificial Sequence
  Description of Artificial Sequence: Synthetic oligonucleotide
  Antisense strand to SEQ ID NO: 2362702
cucuuuacaacuguacuua

SEQ ID NO: 2362704 - RNA, 19 nt, Artificial Sequence
  Description of Artificial Sequence: Synthetic oligonucleotide
  Sense strand starting at position 1291 of SEQ ID NO: 1885712
uuguaaagagcuuguaauu

SEQ ID NO: 2362705 - RNA, 19 nt, Artificial Sequence
  Description of Artificial Sequence: Synthetic oligonucleotide
  Antisense strand to SEQ ID NO: 2362704
aauuacaagcucuuuacaa

SEQ ID NO: 2362706 - RNA, 19 nt, Artificial Sequence
  Description of Artificial Sequence: Synthetic oligonucleotide
  Sense strand starting at position 1475 of SEQ ID NO: 1885712
agcagaaguccaggaauac

SEQ ID NO: 2362707 - RNA, 19 nt, Artificial Sequence
  Description of Artificial Sequence: Synthetic oligonucleotide
  Antisense strand to SEQ ID NO: 2362706
guauuccuggacuucugcu

SEQ ID NO: 2362708 - RNA, 19 nt, Artificial Sequence
  Description of Artificial Sequence: Synthetic oligonucleotide
  Sense strand starting at position 1633 of SEQ ID NO: 1885712
agguucucaugguaaagau

SEQ ID NO: 2362709 - RNA, 19 nt, Artificial Sequence
  Description of Artificial Sequence: Synthetic oligonucleotide
  Antisense strand to SEQ ID NO: 2362708
aucuuuaccaugagaaccu

SEQ ID NO: 2362710 - RNA, 19 nt, Artificial Sequence
  Description of Artificial Sequence: Synthetic oligonucleotide
  Sense strand starting at position 1702 of SEQ ID NO: 1885712
ugaaauacgccaggaacuu

SEQ ID NO: 2362711 - RNA, 19 nt, Artificial Sequence
  Description of Artificial Sequence: Synthetic oligonucleotide
  Antisense strand to SEQ ID NO: 2362710
aaguuccuggcguauuuca

SEQ ID NO: 2362712 - RNA, 19 nt, Artificial Sequence
  Description of Artificial Sequence: Synthetic oligonucleotide
  Sense strand starting at position 1703 of SEQ ID NO: 1885712
gaaauacgccaggaacuuu

SEQ ID NO: 2362713 - RNA, 19 nt, Artificial Sequence
  Description of Artificial Sequence: Synthetic oligonucleotide
  Antisense strand to SEQ ID NO: 2362712
aaaguuccuggcguauuuc

SEQ ID NO: 2362714 - RNA, 19 nt, Artificial Sequence
  Description of Artificial Sequence: Synthetic oligonucleotide
  Sense strand starting at position 1857 of SEQ ID NO: 1885712
ccaucuauccuuugaccga

SEQ ID NO: 2362715 - RNA, 19 nt, Artificial Sequence
  Description of Artificial Sequence: Synthetic oligonucleotide
  Antisense strand to SEQ ID NO: 2362714
ucggucaaaggauagaugg

SEQ ID NO: 2362716 - RNA, 19 nt, Artificial Sequence
  Description of Artificial Sequence: Synthetic oligonucleotide
  Sense strand starting at position 1860 of SEQ ID NO: 1885712
ucuauccuuugaccgagaa

SEQ ID NO: 2362717 - RNA, 19 nt, Artificial Sequence
  Description of Artificial Sequence: Synthetic oligonucleotide
  Antisense strand to SEQ ID NO: 2362716
uucucggucaaaggauaga

SEQ ID NO: 2362718 - RNA, 19 nt, Artificial Sequence
  Description of Artificial Sequence: Synthetic oligonucleotide
  Sense strand starting at position 1861 of SEQ ID NO: 1885712
cuauccuuugaccgagaaa

SEQ ID NO: 2362719 - RNA, 19 nt, Artificial Sequence
  Description of Artificial Sequence: Synthetic oligonucleotide
  Antisense strand to SEQ ID NO: 2362718
uuucucggucaaaggauag

SEQ ID NO: 2362720 - RNA, 19 nt, Artificial Sequence
  Description of Artificial Sequence: Synthetic oligonucleotide
  Sense strand starting at position 2151 of SEQ ID NO: 1885712
uagugauggcgguggcuuu

SEQ ID NO: 2362721 - RNA, 19 nt, Artificial Sequence
  Description of Artificial Sequence: Synthetic oligonucleotide
  Antisense strand to SEQ ID NO: 2362720
aaagccaccgccaucacua

SEQ ID NO: 2362722 - RNA, 19 nt, Artificial Sequence
  Description of Artificial Sequence: Synthetic oligonucleotide
  Sense strand starting at position 2923 of SEQ ID NO: 1885712
gagccaagccuggauauca

SEQ ID NO: 2362723 - RNA, 19 nt, Artificial Sequence
  Description of Artificial Sequence: Synthetic oligonucleotide
  Antisense strand to SEQ ID NO: 2362722
ugauauccaggcuuggcuc

SEQ ID NO: 2362724 - RNA, 19 nt, Artificial Sequence
  Description of Artificial Sequence: Synthetic oligonucleotide
  Sense strand starting at position 3341 of SEQ ID NO: 1885712
gagcuaucgucucugcuga

SEQ ID NO: 2362725 - RNA, 19 nt, Artificial Sequence
  Description of Artificial Sequence: Synthetic oligonucleotide
  Antisense strand to SEQ ID NO: 2362724
ucagcagagacgauagcuc

SEQ ID NO: 2362726 - RNA, 19 nt, Artificial Sequence
  Description of Artificial Sequence: Synthetic oligonucleotide
  Sense strand starting at position 3343 of SEQ ID NO: 1885712
gcuaucgucucugcugaga

SEQ ID NO: 2362727 - RNA, 19 nt, Artificial Sequence
  Description of Artificial Sequence: Synthetic oligonucleotide
  Antisense strand to SEQ ID NO: 2362726
ucucagcagagacgauagc

SEQ ID NO: 2362728 - RNA, 19 nt, Artificial Sequence
  Description of Artificial Sequence: Synthetic oligonucleotide
  Sense strand starting at position 3646 of SEQ ID NO: 1885712
cguaacauuugccuccgau

SEQ ID NO: 2362729 - RNA, 19 nt, Artificial Sequence
  Description of Artificial Sequence: Synthetic oligonucleotide
  Antisense strand to SEQ ID NO: 2362728
aucggaggcaaauguuacg

SEQ ID NO: 2362730 - RNA, 19 nt, Artificial Sequence
  Description of Artificial Sequence: Synthetic oligonucleotide
  Sense strand starting at position 3650 of SEQ ID NO: 1885712
acauuugccuccgauacca

SEQ ID NO: 2362731 - RNA, 19 nt, Artificial Sequence
  Description of Artificial Sequence: Synthetic oligonucleotide
  Antisense strand to SEQ ID NO: 2362730
ugguaucggaggcaaaugu

SEQ ID NO: 2362732 - RNA, 19 nt, Artificial Sequence
  Description of Artificial Sequence: Synthetic oligonucleotide
  Sense strand starting at position 3762 of SEQ ID NO: 1885712
gauacauucugucuggcua

SEQ ID NO: 2362733 - RNA, 19 nt, Artificial Sequence
  Description of Artificial Sequence: Synthetic oligonucleotide
  Antisense strand to SEQ ID NO: 2362732
uagccagacagaauguauc

SEQ ID NO: 2362734 - RNA, 19 nt, Artificial Sequence
  Description of Artificial Sequence: Synthetic oligonucleotide
  Sense strand starting at position 3763 of SEQ ID NO: 1885712
auacauucugucuggcuau

SEQ ID NO: 2362735 - RNA, 19 nt, Artificial Sequence
  Description of Artificial Sequence: Synthetic oligonucleotide
  Antisense strand to SEQ ID NO: 2362734
auagccagacagaauguau

SEQ ID NO: 2362736 - RNA, 19 nt, Artificial Sequence
  Description of Artificial Sequence: Synthetic oligonucleotide
  Sense strand starting at position 3766 of SEQ ID NO: 1885712
cauucugucuggcuaugaa

SEQ ID NO: 2362737 - RNA, 19 nt, Artificial Sequence
  Description of Artificial Sequence: Synthetic oligonucleotide
  Antisense strand to SEQ ID NO: 2362736
uucauagccagacagaaug

SEQ ID NO: 2362738 - RNA, 19 nt, Artificial Sequence
  Description of Artificial Sequence: Synthetic oligonucleotide
  Sense strand starting at position 170 of SEQ ID NO: 1885713
cauggaugcuuugugauaa

SEQ ID NO: 2362739 - RNA, 19 nt, Artificial Sequence
  Description of Artificial Sequence: Synthetic oligonucleotide
  Antisense strand to SEQ ID NO: 2362738
uuaucacaaagcauccaug

SEQ ID NO: 2362740 - RNA, 19 nt, Artificial Sequence
  Description of Artificial Sequence: Synthetic oligonucleotide
  Sense strand starting at position 232 of SEQ ID NO: 1885713
uuaaccuauuguguugaga

SEQ ID NO: 2362741 - RNA, 19 nt, Artificial Sequence
  Description of Artificial Sequence: Synthetic oligonucleotide
  Antisense strand to SEQ ID NO: 2362740
ucucaacacaauagguuaa

SEQ ID NO: 2362742 - RNA, 19 nt, Artificial Sequence
  Description of Artificial Sequence: Synthetic oligonucleotide
  Sense strand starting at position 590 of SEQ ID NO: 1885713
gccagcaucucuuccagaa

SEQ ID NO: 2362743 - RNA, 19 nt, Artificial Sequence
  Description of Artificial Sequence: Synthetic oligonucleotide
  Antisense strand to SEQ ID NO: 2362742
uucuggaagagaugcuggc

SEQ ID NO: 2362744 - RNA, 19 nt, Artificial Sequence
  Description of Artificial Sequence: Synthetic oligonucleotide
  Sense strand starting at position 594 of SEQ ID NO: 1885713
gcaucucuuccagaaaguu

SEQ ID NO: 2362745 - RNA, 19 nt, Artificial Sequence
  Description of Artificial Sequence: Synthetic oligonucleotide
  Antisense strand to SEQ ID NO: 2362744
aacuuucuggaagagaugc

SEQ ID NO: 2362746 - RNA, 19 nt, Artificial Sequence
  Description of Artificial Sequence: Synthetic oligonucleotide
  Sense strand starting at position 602 of SEQ ID NO: 1885713
uccagaaaguucuuggaag

SEQ ID NO: 2362747 - RNA, 19 nt, Artificial Sequence
  Description of Artificial Sequence: Synthetic oligonucleotide
  Antisense strand to SEQ ID NO: 2362746
cuuccaagaacuuucugga

SEQ ID NO: 2362748 - RNA, 19 nt, Artificial Sequence
  Description of Artificial Sequence: Synthetic oligonucleotide
  Sense strand starting at position 707 of SEQ ID NO: 1885713
gggcuauccuggccaucua

SEQ ID NO: 2362749 - RNA, 19 nt, Artificial Sequence
  Description of Artificial Sequence: Synthetic oligonucleotide
  Antisense strand to SEQ ID NO: 2362748
uagauggccaggauagccc

SEQ ID NO: 2362750 - RNA, 19 nt, Artificial Sequence
  Description of Artificial Sequence: Synthetic oligonucleotide
  Sense strand starting at position 708 of SEQ ID NO: 1885713
ggcuauccuggccaucuaa

SEQ ID NO: 2362751 - RNA, 19 nt, Artificial Sequence
  Description of Artificial Sequence: Synthetic oligonucleotide
  Antisense strand to SEQ ID NO: 2362750
uuagauggccaggauagcc

SEQ ID NO: 2362752 - RNA, 19 nt, Artificial Sequence
  Description of Artificial Sequence: Synthetic oligonucleotide
  Sense strand starting at position 737 of SEQ ID NO: 1885713
gagucagccuuguucccaa

SEQ ID NO: 2362753 - RNA, 19 nt, Artificial Sequence
  Description of Artificial Sequence: Synthetic oligonucleotide
  Antisense strand to SEQ ID NO: 2362752
uugggaacaaggcugacuc

SEQ ID NO: 2362754 - RNA, 19 nt, Artificial Sequence
  Description of Artificial Sequence: Synthetic oligonucleotide
  Sense strand starting at position 740 of SEQ ID NO: 1885713
ucagccuuguucccaagaa

SEQ ID NO: 2362755 - RNA, 19 nt, Artificial Sequence
  Description of Artificial Sequence: Synthetic oligonucleotide
  Antisense strand to SEQ ID NO: 2362754
uucuugggaacaaggcuga

SEQ ID NO: 2362756 - RNA, 19 nt, Artificial Sequence
  Description of Artificial Sequence: Synthetic oligonucleotide
  Sense strand starting at position 879 of SEQ ID NO: 1885713
gccauuuccucugugacua

SEQ ID NO: 2362757 - RNA, 19 nt, Artificial Sequence
  Description of Artificial Sequence: Synthetic oligonucleotide
  Antisense strand to SEQ ID NO: 2362756
uagucacagaggaaauggc

SEQ ID NO: 2362758 - RNA, 19 nt, Artificial Sequence
  Description of Artificial Sequence: Synthetic oligonucleotide
  Sense strand starting at position 883 of SEQ ID NO: 1885713
uuuccucugugacuaaguu

SEQ ID NO: 2362759 - RNA, 19 nt, Artificial Sequence
  Description of Artificial Sequence: Synthetic oligonucleotide
  Antisense strand to SEQ ID NO: 2362758
aacuuagucacagaggaaa

SEQ ID NO: 2362760 - RNA, 19 nt, Artificial Sequence
  Description of Artificial Sequence: Synthetic oligonucleotide
  Sense strand starting at position 938 of SEQ ID NO: 1885713
ugggaucugcauggugaga

SEQ ID NO: 2362761 - RNA, 19 nt, Artificial Sequence
  Description of Artificial Sequence: Synthetic oligonucleotide
  Antisense strand to SEQ ID NO: 2362760
ucucaccaugcagauccca

SEQ ID NO: 2362762 - RNA, 19 nt, Artificial Sequence
  Description of Artificial Sequence: Synthetic oligonucleotide
  Sense strand starting at position 1058 of SEQ ID NO: 1885713
ucagguauucucuaaggua

SEQ ID NO: 2362763 - RNA, 19 nt, Artificial Sequence
  Description of Artificial Sequence: Synthetic oligonucleotide
  Antisense strand to SEQ ID NO: 2362762
uaccuuagagaauaccuga

SEQ ID NO: 2362764 - RNA, 19 nt, Artificial Sequence
  Description of Artificial Sequence: Synthetic oligonucleotide
  Sense strand starting at position 1073 of SEQ ID NO: 1885713
gguacaacuagucacagua

SEQ ID NO: 2362765 - RNA, 19 nt, Artificial Sequence
  Description of Artificial Sequence: Synthetic oligonucleotide
  Antisense strand to SEQ ID NO: 2362764
uacugugacuaguuguacc

SEQ ID NO: 2362766 - RNA, 19 nt, Artificial Sequence
  Description of Artificial Sequence: Synthetic oligonucleotide
  Sense strand starting at position 1177 of SEQ ID NO: 1885713
agaacacagccuuguaaca

SEQ ID NO: 2362767 - RNA, 19 nt, Artificial Sequence
  Description of Artificial Sequence: Synthetic oligonucleotide
  Antisense strand to SEQ ID NO: 2362766
uguuacaaggcuguguucu

SEQ ID NO: 2362768 - RNA, 19 nt, Artificial Sequence
  Description of Artificial Sequence: Synthetic oligonucleotide
  Sense strand starting at position 1474 of SEQ ID NO: 1885713
accugugcuugagucauca

SEQ ID NO: 2362769 - RNA, 19 nt, Artificial Sequence
  Description of Artificial Sequence: Synthetic oligonucleotide
  Antisense strand to SEQ ID NO: 2362768
ugaugacucaagcacaggu

SEQ ID NO: 2362770 - RNA, 19 nt, Artificial Sequence
  Description of Artificial Sequence: Synthetic oligonucleotide
  Sense strand starting at position 1476 of SEQ ID NO: 1885713
cugugcuugagucaucaga

SEQ ID NO: 2362771 - RNA, 19 nt, Artificial Sequence
  Description of Artificial Sequence: Synthetic oligonucleotide
  Antisense strand to SEQ ID NO: 2362770
ucugaugacucaagcacag

SEQ ID NO: 2362772 - RNA, 19 nt, Artificial Sequence
  Description of Artificial Sequence: Synthetic oligonucleotide
  Sense strand starting at position 1478 of SEQ ID NO: 1885713
gugcuugagucaucagaaa

SEQ ID NO: 2362773 - RNA, 19 nt, Artificial Sequence
  Description of Artificial Sequence: Synthetic oligonucleotide
  Antisense strand to SEQ ID NO: 2362772
uuucugaugacucaagcac

SEQ ID NO: 2362774 - RNA, 19 nt, Artificial Sequence
  Description of Artificial Sequence: Synthetic oligonucleotide
  Sense strand starting at position 1516 of SEQ ID NO: 1885713
acgagcuuccagggaagaa

SEQ ID NO: 2362775 - RNA, 19 nt, Artificial Sequence
  Description of Artificial Sequence: Synthetic oligonucleotide
  Antisense strand to SEQ ID NO: 2362774
uucuucccuggaagcucgu

SEQ ID NO: 2362776 - RNA, 19 nt, Artificial Sequence
  Description of Artificial Sequence: Synthetic oligonucleotide
  Sense strand starting at position 1658 of SEQ ID NO: 1885713
cggucucuuccagaaacau

SEQ ID NO: 2362777 - RNA, 19 nt, Artificial Sequence
  Description of Artificial Sequence: Synthetic oligonucleotide
  Antisense strand to SEQ ID NO: 2362776
auguuucuggaagagaccg

SEQ ID NO: 2362778 - RNA, 19 nt, Artificial Sequence
  Description of Artificial Sequence: Synthetic oligonucleotide
  Sense strand starting at position 1683 of SEQ ID NO: 1885713
agcagcauuugauacugaa

SEQ ID NO: 2362779 - RNA, 19 nt, Artificial Sequence
  Description of Artificial Sequence: Synthetic oligonucleotide
  Antisense strand to SEQ ID NO: 2362778
uucaguaucaaaugcugcu

SEQ ID NO: 2362780 - RNA, 19 nt, Artificial Sequence
  Description of Artificial Sequence: Synthetic oligonucleotide
  Sense strand starting at position 2062 of SEQ ID NO: 1885713
ggcagcauuugauacugaa

SEQ ID NO: 2362781 - RNA, 19 nt, Artificial Sequence
  Description of Artificial Sequence: Synthetic oligonucleotide
  Antisense strand to SEQ ID NO: 2362780
uucaguaucaaaugcugcc

SEQ ID NO: 2362782 - RNA, 19 nt, Artificial Sequence
  Description of Artificial Sequence: Synthetic oligonucleotide
  Sense strand starting at position 2157 of SEQ ID NO: 1885713
agguuucaucccggaaagc

SEQ ID NO: 2362783 - RNA, 19 nt, Artificial Sequence
  Description of Artificial Sequence: Synthetic oligonucleotide
  Antisense strand to SEQ ID NO: 2362782
gcuuuccgggaugaaaccu

SEQ ID NO: 2362784 - RNA, 19 nt, Artificial Sequence
  Description of Artificial Sequence: Synthetic oligonucleotide
  Sense strand starting at position 2158 of SEQ ID NO: 1885713
gguuucaucccggaaagca

SEQ ID NO: 2362785 - RNA, 19 nt, Artificial Sequence
  Description of Artificial Sequence: Synthetic oligonucleotide
  Antisense strand to SEQ ID NO: 2362784
ugcuuuccgggaugaaacc

SEQ ID NO: 2362786 - RNA, 19 nt, Artificial Sequence
  Description of Artificial Sequence: Synthetic oligonucleotide
  Sense strand starting at position 2174 of SEQ ID NO: 1885713
gcacgaaccuaaguacaau

SEQ ID NO: 2362787 - RNA, 19 nt, Artificial Sequence
  Description of Artificial Sequence: Synthetic oligonucleotide
  Antisense strand to SEQ ID NO: 2362786
auuguacuuagguucgugc

SEQ ID NO: 2362788 - RNA, 19 nt, Artificial Sequence
  Description of Artificial Sequence: Synthetic oligonucleotide
  Sense strand starting at position 2313 of SEQ ID NO: 1885713
gugggugguccgcagacau

SEQ ID NO: 2362789 - RNA, 19 nt, Artificial Sequence
  Description of Artificial Sequence: Synthetic oligonucleotide
  Antisense strand to SEQ ID NO: 2362788
augucugcggaccacccac

SEQ ID NO: 2362790 - RNA, 19 nt, Artificial Sequence
  Description of Artificial Sequence: Synthetic oligonucleotide
  Sense strand starting at position 2414 of SEQ ID NO: 1885713
cccugauggugguuucagu

SEQ ID NO: 2362791 - RNA, 19 nt, Artificial Sequence
  Description of Artificial Sequence: Synthetic oligonucleotide
  Antisense strand to SEQ ID NO: 2362790
acugaaaccaccaucaggg

SEQ ID NO: 2362792 - RNA, 19 nt, Artificial Sequence
  Description of Artificial Sequence: Synthetic oligonucleotide
  Sense strand starting at position 2422 of SEQ ID NO: 1885713
gugguuucaguccaggaau

SEQ ID NO: 2362793 - RNA, 19 nt, Artificial Sequence
  Description of Artificial Sequence: Synthetic oligonucleotide
  Antisense strand to SEQ ID NO: 2362792
auuccuggacugaaaccac

SEQ ID NO: 2362794 - RNA, 19 nt, Artificial Sequence
  Description of Artificial Sequence: Synthetic oligonucleotide
  Sense strand starting at position 2424 of SEQ ID NO: 1885713
gguuucaguccaggaaugu

SEQ ID NO: 2362795 - RNA, 19 nt, Artificial Sequence
  Description of Artificial Sequence: Synthetic oligonucleotide
  Antisense strand to SEQ ID NO: 2362794
acauuccuggacugaaacc

SEQ ID NO: 2362796 - RNA, 19 nt, Artificial Sequence
  Description of Artificial Sequence: Synthetic oligonucleotide
  Sense strand starting at position 2433 of SEQ ID NO: 1885713
ccaggaauguuuccaagca

SEQ ID NO: 2362797 - RNA, 19 nt, Artificial Sequence
  Description of Artificial Sequence: Synthetic oligonucleotide
  Antisense strand to SEQ ID NO: 2362796
ugcuuggaaacauuccugg

SEQ ID NO: 2362798 - RNA, 19 nt, Artificial Sequence
  Description of Artificial Sequence: Synthetic oligonucleotide
  Sense strand starting at position 2664 of SEQ ID NO: 1885713
acgcaugucccaggacaga

SEQ ID NO: 2362799 - RNA, 19 nt, Artificial Sequence
  Description of Artificial Sequence: Synthetic oligonucleotide
  Antisense strand to SEQ ID NO: 2362798
ucuguccugggacaugcgu

SEQ ID NO: 2362800 - RNA, 19 nt, Artificial Sequence
  Description of Artificial Sequence: Synthetic oligonucleotide
  Sense strand starting at position 3085 of SEQ ID NO: 1885713
augucucuucccuaaugga

SEQ ID NO: 2362801 - RNA, 19 nt, Artificial Sequence
  Description of Artificial Sequence: Synthetic oligonucleotide
  Antisense strand to SEQ ID NO: 2362800
uccauuagggaagagacau

SEQ ID NO: 2362802 - RNA, 19 nt, Artificial Sequence
  Description of Artificial Sequence: Synthetic oligonucleotide
  Sense strand starting at position 3114 of SEQ ID NO: 1885713
ucaagagcguuuccaaagu

SEQ ID NO: 2362803 - RNA, 19 nt, Artificial Sequence
  Description of Artificial Sequence: Synthetic oligonucleotide
  Antisense strand to SEQ ID NO: 2362802
acuuuggaaacgcucuuga

SEQ ID NO: 2362804 - RNA, 19 nt, Artificial Sequence
  Description of Artificial Sequence: Synthetic oligonucleotide
  Sense strand starting at position 3209 of SEQ ID NO: 1885713
uagggauucuaugcuuuga

SEQ ID NO: 2362805 - RNA, 19 nt, Artificial Sequence
  Description of Artificial Sequence: Synthetic oligonucleotide
  Antisense strand to SEQ ID NO: 2362804
ucaaagcauagaaucccua

SEQ ID NO: 2362806 - RNA, 19 nt, Artificial Sequence
  Description of Artificial Sequence: Synthetic oligonucleotide
  Sense strand starting at position 3211 of SEQ ID NO: 1885713
gggauucuaugcuuugaau

SEQ ID NO: 2362807 - RNA, 19 nt, Artificial Sequence
  Description of Artificial Sequence: Synthetic oligonucleotide
  Antisense strand to SEQ ID NO: 2362806
auucaaagcauagaauccc

SEQ ID NO: 2362808 - RNA, 19 nt, Artificial Sequence
  Description of Artificial Sequence: Synthetic oligonucleotide
  Sense strand starting at position 3262 of SEQ ID NO: 1885713
ccugucagguuccuaaagu

SEQ ID NO: 2362809 - RNA, 19 nt, Artificial Sequence
  Description of Artificial Sequence: Synthetic oligonucleotide
  Antisense strand to SEQ ID NO: 2362808
acuuuaggaaccugacagg

SEQ ID NO: 2362810 - RNA, 19 nt, Artificial Sequence
  Description of Artificial Sequence: Synthetic oligonucleotide
  Sense strand starting at position 3312 of SEQ ID NO: 1885713
ccuaaugaccaaugucaug

SEQ ID NO: 2362811 - RNA, 19 nt, Artificial Sequence
  Description of Artificial Sequence: Synthetic oligonucleotide
  Antisense strand to SEQ ID NO: 2362810
caugacauuggucauuagg

SEQ ID NO: 2362812 - RNA, 19 nt, Artificial Sequence
  Description of Artificial Sequence: Synthetic oligonucleotide
  Sense strand starting at position 3380 of SEQ ID NO: 1885713
ccaagaaucuuccagagac

SEQ ID NO: 2362813 - RNA, 19 nt, Artificial Sequence
  Description of Artificial Sequence: Synthetic oligonucleotide
  Antisense strand to SEQ ID NO: 2362812
gucucuggaagauucuugg

SEQ ID NO: 2362814 - RNA, 19 nt, Artificial Sequence
  Description of Artificial Sequence: Synthetic oligonucleotide
  Sense strand starting at position 3399 of SEQ ID NO: 1885713
ugaagcuuguguccagaaa

SEQ ID NO: 2362815 - RNA, 19 nt, Artificial Sequence
  Description of Artificial Sequence: Synthetic oligonucleotide
  Antisense strand to SEQ ID NO: 2362814
uuucuggacacaagcuuca

SEQ ID NO: 2362816 - RNA, 19 nt, Artificial Sequence
  Description of Artificial Sequence: Synthetic oligonucleotide
  Sense strand starting at position 3400 of SEQ ID NO: 1885713
gaagcuuguguccagaaag

SEQ ID NO: 2362817 - RNA, 19 nt, Artificial Sequence
  Description of Artificial Sequence: Synthetic oligonucleotide
  Antisense strand to SEQ ID NO: 2362816
cuuucuggacacaagcuuc

SEQ ID NO: 2362818 - RNA, 19 nt, Artificial Sequence
  Description of Artificial Sequence: Synthetic oligonucleotide
  Sense strand starting at position 126 of SEQ ID NO: 1885714
ugacccauuuaauagguau

SEQ ID NO: 2362819 - RNA, 19 nt, Artificial Sequence
  Description of Artificial Sequence: Synthetic oligonucleotide
  Antisense strand to SEQ ID NO: 2362818
auaccuauuaaauggguca

SEQ ID NO: 2362820 - RNA, 19 nt, Artificial Sequence
  Description of Artificial Sequence: Synthetic oligonucleotide
  Sense strand starting at position 197 of SEQ ID NO: 1885714
aauggucuugcccagaagu

SEQ ID NO: 2362821 - RNA, 19 nt, Artificial Sequence
  Description of Artificial Sequence: Synthetic oligonucleotide
  Antisense strand to SEQ ID NO: 2362820
acuucugggcaagaccauu

SEQ ID NO: 2362822 - RNA, 19 nt, Artificial Sequence
  Description of Artificial Sequence: Synthetic oligonucleotide
  Sense strand starting at position 492 of SEQ ID NO: 1885714
uggaaugaauucucugggu

SEQ ID NO: 2362823 - RNA, 19 nt, Artificial Sequence
  Description of Artificial Sequence: Synthetic oligonucleotide
  Antisense strand to SEQ ID NO: 2362822
acccagagaauucauucca

SEQ ID NO: 2362824 - RNA, 19 nt, Artificial Sequence
  Description of Artificial Sequence: Synthetic oligonucleotide
  Sense strand starting at position 494 of SEQ ID NO: 1885714
gaaugaauucucuggguua

SEQ ID NO: 2362825 - RNA, 19 nt, Artificial Sequence
  Description of Artificial Sequence: Synthetic oligonucleotide
  Antisense strand to SEQ ID NO: 2362824
uaacccagagaauucauuc

SEQ ID NO: 2362826 - RNA, 19 nt, Artificial Sequence
  Description of Artificial Sequence: Synthetic oligonucleotide
  Sense strand starting at position 507 of SEQ ID NO: 1885714
ggguuagcugugcagagaa

SEQ ID NO: 2362827 - RNA, 19 nt, Artificial Sequence
  Description of Artificial Sequence: Synthetic oligonucleotide
  Antisense strand to SEQ ID NO: 2362826
uucucugcacagcuaaccc

SEQ ID NO: 2362828 - RNA, 19 nt, Artificial Sequence
  Description of Artificial Sequence: Synthetic oligonucleotide
  Sense strand starting at position 521 of SEQ ID NO: 1885714
gagaacacauucgucaaca

SEQ ID NO: 2362829 - RNA, 19 nt, Artificial Sequence
  Description of Artificial Sequence: Synthetic oligonucleotide
  Antisense strand to SEQ ID NO: 2362828
uguugacgaauguguucuc

SEQ ID NO: 2362830 - RNA, 19 nt, Artificial Sequence
  Description of Artificial Sequence: Synthetic oligonucleotide
  Sense strand starting at position 522 of SEQ ID NO: 1885714
agaacacauucgucaacaa

SEQ ID NO: 2362831 - RNA, 19 nt, Artificial Sequence
  Description of Artificial Sequence: Synthetic oligonucleotide
  Antisense strand to SEQ ID NO: 2362830
uuguugacgaauguguucu

SEQ ID NO: 2362832 - RNA, 19 nt, Artificial Sequence
  Description of Artificial Sequence: Synthetic oligonucleotide
  Sense strand starting at position 1205 of SEQ ID NO: 1885714
guccguguucuccucucaa

SEQ ID NO: 2362833 - RNA, 19 nt, Artificial Sequence
  Description of Artificial Sequence: Synthetic oligonucleotide
  Antisense strand to SEQ ID NO: 2362832
uugagaggagaacacggac

SEQ ID NO: 2362834 - RNA, 19 nt, Artificial Sequence
  Description of Artificial Sequence: Synthetic oligonucleotide
  Sense strand starting at position 2254 of SEQ ID NO: 1885714
gaaagcuuccuccacggau

SEQ ID NO: 2362835 - RNA, 19 nt, Artificial Sequence
  Description of Artificial Sequence: Synthetic oligonucleotide
  Antisense strand to SEQ ID NO: 2362834
auccguggaggaagcuuuc

SEQ ID NO: 2362836 - RNA, 19 nt, Artificial Sequence
  Description of Artificial Sequence: Synthetic oligonucleotide
  Sense strand starting at position 2284 of SEQ ID NO: 1885714
gggauuugaugacgagaac

SEQ ID NO: 2362837 - RNA, 19 nt, Artificial Sequence
  Description of Artificial Sequence: Synthetic oligonucleotide
  Antisense strand to SEQ ID NO: 2362836
guucucgucaucaaauccc

SEQ ID NO: 2362838 - RNA, 19 nt, Artificial Sequence
  Description of Artificial Sequence: Synthetic oligonucleotide
  Sense strand starting at position 2310 of SEQ ID NO: 1885714
augcaugucagagauaagc

SEQ ID NO: 2362839 - RNA, 19 nt, Artificial Sequence
  Description of Artificial Sequence: Synthetic oligonucleotide
  Antisense strand to SEQ ID NO: 2362838
gcuuaucucugacaugcau

SEQ ID NO: 2362840 - RNA, 19 nt, Artificial Sequence
  Description of Artificial Sequence: Synthetic oligonucleotide
  Sense strand starting at position 2312 of SEQ ID NO: 1885714
gcaugucagagauaagcaa

SEQ ID NO: 2362841 - RNA, 19 nt, Artificial Sequence
  Description of Artificial Sequence: Synthetic oligonucleotide
  Antisense strand to SEQ ID NO: 2362840
uugcuuaucucugacaugc

SEQ ID NO: 2362842 - RNA, 19 nt, Artificial Sequence
  Description of Artificial Sequence: Synthetic oligonucleotide
  Sense strand starting at position 2340 of SEQ ID NO: 1885714
gaagaauucuguuuccgau

SEQ ID NO: 2362843 - RNA, 19 nt, Artificial Sequence
  Description of Artificial Sequence: Synthetic oligonucleotide
  Antisense strand to SEQ ID NO: 2362842
aucggaaacagaauucuuc

SEQ ID NO: 2362844 - RNA, 19 nt, Artificial Sequence
  Description of Artificial Sequence: Synthetic oligonucleotide
  Sense strand starting at position 2342 of SEQ ID NO: 1885714
agaauucuguuuccgauaa

SEQ ID NO: 2362845 - RNA, 19 nt, Artificial Sequence
  Description of Artificial Sequence: Synthetic oligonucleotide
  Antisense strand to SEQ ID NO: 2362844
uuaucggaaacagaauucu

SEQ ID NO: 2362846 - RNA, 19 nt, Artificial Sequence
  Description of Artificial Sequence: Synthetic oligonucleotide
  Sense strand starting at position 2368 of SEQ ID NO: 1885714
ugucacugaucccugaaga

SEQ ID NO: 2362847 - RNA, 19 nt, Artificial Sequence
  Description of Artificial Sequence: Synthetic oligonucleotide
  Antisense strand to SEQ ID NO: 2362846
ucuucagggaucagugaca

SEQ ID NO: 2362848 - RNA, 19 nt, Artificial Sequence
  Description of Artificial Sequence: Synthetic oligonucleotide
  Sense strand starting at position 2369 of SEQ ID NO: 1885714
gucacugaucccugaagac

SEQ ID NO: 2362849 - RNA, 19 nt, Artificial Sequence
  Description of Artificial Sequence: Synthetic oligonucleotide
  Antisense strand to SEQ ID NO: 2362848
gucuucagggaucagugac

SEQ ID NO: 2362850 - RNA, 19 nt, Artificial Sequence
  Description of Artificial Sequence: Synthetic oligonucleotide
  Sense strand starting at position 2431 of SEQ ID NO: 1885714
cccgaugacugcuuggaaa

SEQ ID NO: 2362851 - RNA, 19 nt, Artificial Sequence
  Description of Artificial Sequence: Synthetic oligonucleotide
  Antisense strand to SEQ ID NO: 2362850
uuuccaagcagucaucggg

SEQ ID NO: 2362852 - RNA, 19 nt, Artificial Sequence
  Description of Artificial Sequence: Synthetic oligonucleotide
  Sense strand starting at position 2471 of SEQ ID NO: 1885714
ggcccagcacaucaauaau

SEQ ID NO: 2362853 - RNA, 19 nt, Artificial Sequence
  Description of Artificial Sequence: Synthetic oligonucleotide
  Antisense strand to SEQ ID NO: 2362852
auuauugaugugcugggcc

SEQ ID NO: 2362854 - RNA, 19 nt, Artificial Sequence
  Description of Artificial Sequence: Synthetic oligonucleotide
  Sense strand starting at position 2560 of SEQ ID NO: 1885714
caggucuuguaucugggaa

SEQ ID NO: 2362855 - RNA, 19 nt, Artificial Sequence
  Description of Artificial Sequence: Synthetic oligonucleotide
  Antisense strand to SEQ ID NO: 2362854
uucccagauacaagaccug

SEQ ID NO: 2362856 - RNA, 19 nt, Artificial Sequence
  Description of Artificial Sequence: Synthetic oligonucleotide
  Sense strand starting at position 2561 of SEQ ID NO: 1885714
aggucuuguaucugggaag

SEQ ID NO: 2362857 - RNA, 19 nt, Artificial Sequence
  Description of Artificial Sequence: Synthetic oligonucleotide
  Antisense strand to SEQ ID NO: 2362856
cuucccagauacaagaccu

SEQ ID NO: 2362858 - RNA, 19 nt, Artificial Sequence
  Description of Artificial Sequence: Synthetic oligonucleotide
  Sense strand starting at position 2578 of SEQ ID NO: 1885714
agcccuuugaggcaugauu

SEQ ID NO: 2362859 - RNA, 19 nt, Artificial Sequence
  Description of Artificial Sequence: Synthetic oligonucleotide
  Antisense strand to SEQ ID NO: 2362858
aaucaugccucaaagggcu

SEQ ID NO: 2362860 - RNA, 19 nt, Artificial Sequence
  Description of Artificial Sequence: Synthetic oligonucleotide
  Sense strand starting at position 2620 of SEQ ID NO: 1885714
augcuauuuacgcauguga

SEQ ID NO: 2362861 - RNA, 19 nt, Artificial Sequence
  Description of Artificial Sequence: Synthetic oligonucleotide
  Antisense strand to SEQ ID NO: 2362860
ucacaugcguaaauagcau

SEQ ID NO: 2362862 - RNA, 19 nt, Artificial Sequence
  Description of Artificial Sequence: Synthetic oligonucleotide
  Sense strand starting at position 2622 of SEQ ID NO: 1885714
gcuauuuacgcaugugaaa

SEQ ID NO: 2362863 - RNA, 19 nt, Artificial Sequence
  Description of Artificial Sequence: Synthetic oligonucleotide
  Antisense strand to SEQ ID NO: 2362862
uuucacaugcguaaauagc

SEQ ID NO: 2362864 - RNA, 19 nt, Artificial Sequence
  Description of Artificial Sequence: Synthetic oligonucleotide
  Sense strand starting at position 2799 of SEQ ID NO: 1885714
cgguauuagcaucacuuga

SEQ ID NO: 2362865 - RNA, 19 nt, Artificial Sequence
  Description of Artificial Sequence: Synthetic oligonucleotide
  Antisense strand to SEQ ID NO: 2362864
ucaagugaugcuaauaccg

SEQ ID NO: 2362866 - RNA, 19 nt, Artificial Sequence
  Description of Artificial Sequence: Synthetic oligonucleotide
  Sense strand starting at position 2801 of SEQ ID NO: 1885714
guauuagcaucacuugaga

SEQ ID NO: 2362867 - RNA, 19 nt, Artificial Sequence
  Description of Artificial Sequence: Synthetic oligonucleotide
  Antisense strand to SEQ ID NO: 2362866
ucucaagugaugcuaauac

SEQ ID NO: 2362868 - RNA, 19 nt, Artificial Sequence
  Description of Artificial Sequence: Synthetic oligonucleotide
  Sense strand starting at position 3009 of SEQ ID NO: 1885714
gucuuauuccaugagaguc

SEQ ID NO: 2362869 - RNA, 19 nt, Artificial Sequence
  Description of Artificial Sequence: Synthetic oligonucleotide
  Antisense strand to SEQ ID NO: 2362868
gacucucauggaauaagac

SEQ ID NO: 2362870 - RNA, 19 nt, Artificial Sequence
  Description of Artificial Sequence: Synthetic oligonucleotide
  Sense strand starting at position 3017 of SEQ ID NO: 1885714
ccaugagagucugucuaag

SEQ ID NO: 2362871 - RNA, 19 nt, Artificial Sequence
  Description of Artificial Sequence: Synthetic oligonucleotide
  Antisense strand to SEQ ID NO: 2362870
cuuagacagacucucaugg

SEQ ID NO: 2362872 - RNA, 19 nt, Artificial Sequence
  Description of Artificial Sequence: Synthetic oligonucleotide
  Sense strand starting at position 3019 of SEQ ID NO: 1885714
augagagucugucuaagau

SEQ ID NO: 2362873 - RNA, 19 nt, Artificial Sequence
  Description of Artificial Sequence: Synthetic oligonucleotide
  Antisense strand to SEQ ID NO: 2362872
aucuuagacagacucucau

SEQ ID NO: 2362874 - RNA, 19 nt, Artificial Sequence
  Description of Artificial Sequence: Synthetic oligonucleotide
  Sense strand starting at position 3142 of SEQ ID NO: 1885714
acaggaaauguacggaguu

SEQ ID NO: 2362875 - RNA, 19 nt, Artificial Sequence
  Description of Artificial Sequence: Synthetic oligonucleotide
  Antisense strand to SEQ ID NO: 2362874
aacuccguacauuuccugu

SEQ ID NO: 2362876 - RNA, 19 nt, Artificial Sequence
  Description of Artificial Sequence: Synthetic oligonucleotide
  Sense strand starting at position 3170 of SEQ ID NO: 1885714
guuugcauucccuacagga

SEQ ID NO: 2362877 - RNA, 19 nt, Artificial Sequence
  Description of Artificial Sequence: Synthetic oligonucleotide
  Antisense strand to SEQ ID NO: 2362876
uccuguagggaaugcaaac

SEQ ID NO: 2362878 - RNA, 19 nt, Artificial Sequence
  Description of Artificial Sequence: Synthetic oligonucleotide
  Sense strand starting at position 3278 of SEQ ID NO: 1885714
ccggcaucucuccaaggaa

SEQ ID NO: 2362879 - RNA, 19 nt, Artificial Sequence
  Description of Artificial Sequence: Synthetic oligonucleotide
  Antisense strand to SEQ ID NO: 2362878
uuccuuggagagaugccgg

SEQ ID NO: 2362880 - RNA, 19 nt, Artificial Sequence
  Description of Artificial Sequence: Synthetic oligonucleotide
  Sense strand starting at position 3281 of SEQ ID NO: 1885714
gcaucucuccaaggaauuc

SEQ ID NO: 2362881 - RNA, 19 nt, Artificial Sequence
  Description of Artificial Sequence: Synthetic oligonucleotide
  Antisense strand to SEQ ID NO: 2362880
gaauuccuuggagagaugc

SEQ ID NO: 2362882 - RNA, 19 nt, Artificial Sequence
  Description of Artificial Sequence: Synthetic oligonucleotide
  Sense strand starting at position 3410 of SEQ ID NO: 1885714
gcuagcauuuguccaagga

SEQ ID NO: 2362883 - RNA, 19 nt, Artificial Sequence
  Description of Artificial Sequence: Synthetic oligonucleotide
  Antisense strand to SEQ ID NO: 2362882
uccuuggacaaaugcuagc

SEQ ID NO: 2362884 - RNA, 19 nt, Artificial Sequence
  Description of Artificial Sequence: Synthetic oligonucleotide
  Sense strand starting at position 3449 of SEQ ID NO: 1885714
uucugagaucacuggauuc

SEQ ID NO: 2362885 - RNA, 19 nt, Artificial Sequence
  Description of Artificial Sequence: Synthetic oligonucleotide
  Antisense strand to SEQ ID NO: 2362884
gaauccagugaucucagaa

SEQ ID NO: 2362886 - RNA, 19 nt, Artificial Sequence
  Description of Artificial Sequence: Synthetic oligonucleotide
  Sense strand starting at position 3678 of SEQ ID NO: 1885714
gggcaucuucuccaaaguu

SEQ ID NO: 2362887 - RNA, 19 nt, Artificial Sequence
  Description of Artificial Sequence: Synthetic oligonucleotide
  Antisense strand to SEQ ID NO: 2362886
aacuuuggagaagaugccc

SEQ ID NO: 2362888 - RNA, 19 nt, Artificial Sequence
  Description of Artificial Sequence: Synthetic oligonucleotide
  Sense strand starting at position 3707 of SEQ ID NO: 1885714
ccagaaaguucuucucagg

SEQ ID NO: 2362889 - RNA, 19 nt, Artificial Sequence
  Description of Artificial Sequence: Synthetic oligonucleotide
  Antisense strand to SEQ ID NO: 2362888
ccugagaagaacuuucugg

SEQ ID NO: 2362890 - RNA, 19 nt, Artificial Sequence
  Description of Artificial Sequence: Synthetic oligonucleotide
  Sense strand starting at position 3831 of SEQ ID NO: 1885714
augaucggucccuaagguu

SEQ ID NO: 2362891 - RNA, 19 nt, Artificial Sequence
  Description of Artificial Sequence: Synthetic oligonucleotide
  Antisense strand to SEQ ID NO: 2362890
aaccuuagggaccgaucau

SEQ ID NO: 2362892 - RNA, 19 nt, Artificial Sequence
  Description of Artificial Sequence: Synthetic oligonucleotide
  Sense strand starting at position 3877 of SEQ ID NO: 1885714
gaagcaggauuugauaagu

SEQ ID NO: 2362893 - RNA, 19 nt, Artificial Sequence
  Description of Artificial Sequence: Synthetic oligonucleotide
  Antisense strand to SEQ ID NO: 2362892
acuuaucaaauccugcuuc

SEQ ID NO: 2362894 - RNA, 19 nt, Artificial Sequence
  Description of Artificial Sequence: Synthetic oligonucleotide
  Sense strand starting at position 3886 of SEQ ID NO: 1885714
uuugauaaguagcuugaau

SEQ ID NO: 2362895 - RNA, 19 nt, Artificial Sequence
  Description of Artificial Sequence: Synthetic oligonucleotide
  Antisense strand to SEQ ID NO: 2362894
auucaagcuacuuaucaaa

SEQ ID NO: 2362896 - RNA, 19 nt, Artificial Sequence
  Description of Artificial Sequence: Synthetic oligonucleotide
  Sense strand starting at position 3937 of SEQ ID NO: 1885714
augcaaaucccugauagca

SEQ ID NO: 2362897 - RNA, 19 nt, Artificial Sequence
  Description of Artificial Sequence: Synthetic oligonucleotide
  Antisense strand to SEQ ID NO: 2362896
ugcuaucagggauuugcau

SEQ ID NO: 2362898 - RNA, 19 nt, Artificial Sequence
  Description of Artificial Sequence: Synthetic oligonucleotide
  Sense strand starting at position 63 of SEQ ID NO: 1885715
caaagauguguagaugcau

SEQ ID NO: 2362899 - RNA, 19 nt, Artificial Sequence
  Description of Artificial Sequence: Synthetic oligonucleotide
  Antisense strand to SEQ ID NO: 2362898
augcaucuacacaucuuug

SEQ ID NO: 2362900 - RNA, 19 nt, Artificial Sequence
  Description of Artificial Sequence: Synthetic oligonucleotide
  Sense strand starting at position 535 of SEQ ID NO: 1885715
ggacuccauuagucaauca

SEQ ID NO: 2362901 - RNA, 19 nt, Artificial Sequence
  Description of Artificial Sequence: Synthetic oligonucleotide
  Antisense strand to SEQ ID NO: 2362900
ugauugacuaauggagucc

SEQ ID NO: 2362902 - RNA, 19 nt, Artificial Sequence
  Description of Artificial Sequence: Synthetic oligonucleotide
  Sense strand starting at position 635 of SEQ ID NO: 1885715
agaaauuucugccaaugag

SEQ ID NO: 2362903 - RNA, 19 nt, Artificial Sequence
  Description of Artificial Sequence: Synthetic oligonucleotide
  Antisense strand to SEQ ID NO: 2362902
cucauuggcagaaauuucu

SEQ ID NO: 2362904 - RNA, 19 nt, Artificial Sequence
  Description of Artificial Sequence: Synthetic oligonucleotide
  Sense strand starting at position 650 of SEQ ID NO: 1885715
ugagaaaucucacagucua

SEQ ID NO: 2362905 - RNA, 19 nt, Artificial Sequence
  Description of Artificial Sequence: Synthetic oligonucleotide
  Antisense strand to SEQ ID NO: 2362904
uagacugugagauuucuca

SEQ ID NO: 2362906 - RNA, 19 nt, Artificial Sequence
  Description of Artificial Sequence: Synthetic oligonucleotide
  Sense strand starting at position 712 of SEQ ID NO: 1885715
acuguaagcuaggaagaaa

SEQ ID NO: 2362907 - RNA, 19 nt, Artificial Sequence
  Description of Artificial Sequence: Synthetic oligonucleotide
  Antisense strand to SEQ ID NO: 2362906
uuucuuccuagcuuacagu

SEQ ID NO: 2362908 - RNA, 19 nt, Artificial Sequence
  Description of Artificial Sequence: Synthetic oligonucleotide
  Sense strand starting at position 748 of SEQ ID NO: 1885715
gguagaaugugauagggaa

SEQ ID NO: 2362909 - RNA, 19 nt, Artificial Sequence
  Description of Artificial Sequence: Synthetic oligonucleotide
  Antisense strand to SEQ ID NO: 2362908
uucccuaucacauucuacc

SEQ ID NO: 2362910 - RNA, 19 nt, Artificial Sequence
  Description of Artificial Sequence: Synthetic oligonucleotide
  Sense strand starting at position 785 of SEQ ID NO: 1885715
uuuauaggguuaucaggga

SEQ ID NO: 2362911 - RNA, 19 nt, Artificial Sequence
  Description of Artificial Sequence: Synthetic oligonucleotide
  Antisense strand to SEQ ID NO: 2362910
ucccugauaacccuauaaa

SEQ ID NO: 2362912 - RNA, 19 nt, Artificial Sequence
  Description of Artificial Sequence: Synthetic oligonucleotide
  Sense strand starting at position 789 of SEQ ID NO: 1885715
uaggguuaucagggaugac

SEQ ID NO: 2362913 - RNA, 19 nt, Artificial Sequence
  Description of Artificial Sequence: Synthetic oligonucleotide
  Antisense strand to SEQ ID NO: 2362912
gucaucccugauaacccua

SEQ ID NO: 2362914 - RNA, 19 nt, Artificial Sequence
  Description of Artificial Sequence: Synthetic oligonucleotide
  Sense strand starting at position 792 of SEQ ID NO: 1885715
gguuaucagggaugaccuu

SEQ ID NO: 2362915 - RNA, 19 nt, Artificial Sequence
  Description of Artificial Sequence: Synthetic oligonucleotide
  Antisense strand to SEQ ID NO: 2362914
aaggucaucccugauaacc

SEQ ID NO: 2362916 - RNA, 19 nt, Artificial Sequence
  Description of Artificial Sequence: Synthetic oligonucleotide
  Sense strand starting at position 798 of SEQ ID NO: 1885715
cagggaugaccuugcugaa

SEQ ID NO: 2362917 - RNA, 19 nt, Artificial Sequence
  Description of Artificial Sequence: Synthetic oligonucleotide
  Antisense strand to SEQ ID NO: 2362916
uucagcaaggucaucccug

SEQ ID NO: 2362918 - RNA, 19 nt, Artificial Sequence
  Description of Artificial Sequence: Synthetic oligonucleotide
  Sense strand starting at position 801 of SEQ ID NO: 1885715
ggaugaccuugcugaacaa

SEQ ID NO: 2362919 - RNA, 19 nt, Artificial Sequence
  Description of Artificial Sequence: Synthetic oligonucleotide
  Antisense strand to SEQ ID NO: 2362918
uuguucagcaaggucaucc

SEQ ID NO: 2362920 - RNA, 19 nt, Artificial Sequence
  Description of Artificial Sequence: Synthetic oligonucleotide
  Sense strand starting at position 1138 of SEQ ID NO: 1885715
ggacucugcacuuggaaau

SEQ ID NO: 2362921 - RNA, 19 nt, Artificial Sequence
  Description of Artificial Sequence: Synthetic oligonucleotide
  Antisense strand to SEQ ID NO: 2362920
auuuccaagugcagagucc

SEQ ID NO: 2362922 - RNA, 19 nt, Artificial Sequence
  Description of Artificial Sequence: Synthetic oligonucleotide
  Sense strand starting at position 1466 of SEQ ID NO: 1885715
ccaggagcucacugaucaa

SEQ ID NO: 2362923 - RNA, 19 nt, Artificial Sequence
  Description of Artificial Sequence: Synthetic oligonucleotide
  Antisense strand to SEQ ID NO: 2362922
uugaucagugagcuccugg

SEQ ID NO: 2362924 - RNA, 19 nt, Artificial Sequence
  Description of Artificial Sequence: Synthetic oligonucleotide
  Sense strand starting at position 1469 of SEQ ID NO: 1885715
ggagcucacugaucaacaa

SEQ ID NO: 2362925 - RNA, 19 nt, Artificial Sequence
  Description of Artificial Sequence: Synthetic oligonucleotide
  Antisense strand to SEQ ID NO: 2362924
uuguugaucagugagcucc

SEQ ID NO: 2362926 - RNA, 19 nt, Artificial Sequence
  Description of Artificial Sequence: Synthetic oligonucleotide
  Sense strand starting at position 1483 of SEQ ID NO: 1885715
aacaaugagugauaaagga

SEQ ID NO: 2362927 - RNA, 19 nt, Artificial Sequence
  Description of Artificial Sequence: Synthetic oligonucleotide
  Antisense strand to SEQ ID NO: 2362926
uccuuuaucacucauuguu

SEQ ID NO: 2362928 - RNA, 19 nt, Artificial Sequence
  Description of Artificial Sequence: Synthetic oligonucleotide
  Sense strand starting at position 1588 of SEQ ID NO: 1885715
ucacuaagucuccagguca

SEQ ID NO: 2362929 - RNA, 19 nt, Artificial Sequence
  Description of Artificial Sequence: Synthetic oligonucleotide
  Antisense strand to SEQ ID NO: 2362928
ugaccuggagacuuaguga

SEQ ID NO: 2362930 - RNA, 19 nt, Artificial Sequence
  Description of Artificial Sequence: Synthetic oligonucleotide
  Sense strand starting at position 1654 of SEQ ID NO: 1885715
gggugcaaauaugacauaa

SEQ ID NO: 2362931 - RNA, 19 nt, Artificial Sequence
  Description of Artificial Sequence: Synthetic oligonucleotide
  Antisense strand to SEQ ID NO: 2362930
uuaugucauauuugcaccc

SEQ ID NO: 2362932 - RNA, 19 nt, Artificial Sequence
  Description of Artificial Sequence: Synthetic oligonucleotide
  Sense strand starting at position 1919 of SEQ ID NO: 1885715
ggugggauucgauaucgga

SEQ ID NO: 2362933 - RNA, 19 nt, Artificial Sequence
  Description of Artificial Sequence: Synthetic oligonucleotide
  Antisense strand to SEQ ID NO: 2362932
uccgauaucgaaucccacc

SEQ ID NO: 2362934 - RNA, 19 nt, Artificial Sequence
  Description of Artificial Sequence: Synthetic oligonucleotide
  Sense strand starting at position 1922 of SEQ ID NO: 1885715
gggauucgauaucggaaag

SEQ ID NO: 2362935 - RNA, 19 nt, Artificial Sequence
  Description of Artificial Sequence: Synthetic oligonucleotide
  Antisense strand to SEQ ID NO: 2362934
cuuuccgauaucgaauccc

SEQ ID NO: 2362936 - RNA, 19 nt, Artificial Sequence
  Description of Artificial Sequence: Synthetic oligonucleotide
  Sense strand starting at position 1923 of SEQ ID NO: 1885715
ggauucgauaucggaaaga

SEQ ID NO: 2362937 - RNA, 19 nt, Artificial Sequence
  Description of Artificial Sequence: Synthetic oligonucleotide
  Antisense strand to SEQ ID NO: 2362936
ucuuuccgauaucgaaucc

SEQ ID NO: 2362938 - RNA, 19 nt, Artificial Sequence
  Description of Artificial Sequence: Synthetic oligonucleotide
  Sense strand starting at position 2028 of SEQ ID NO: 1885715
ggaggaggcuucuuccaca

SEQ ID NO: 2362939 - RNA, 19 nt, Artificial Sequence
  Description of Artificial Sequence: Synthetic oligonucleotide
  Antisense strand to SEQ ID NO: 2362938
uguggaagaagccuccucc

SEQ ID NO: 2362940 - RNA, 19 nt, Artificial Sequence
  Description of Artificial Sequence: Synthetic oligonucleotide
  Sense strand starting at position 2193 of SEQ ID NO: 1885715
gaaucaugcaggugggauc

SEQ ID NO: 2362941 - RNA, 19 nt, Artificial Sequence
  Description of Artificial Sequence: Synthetic oligonucleotide
  Antisense strand to SEQ ID NO: 2362940
gaucccaccugcaugauuc

SEQ ID NO: 2362942 - RNA, 19 nt, Artificial Sequence
  Description of Artificial Sequence: Synthetic oligonucleotide
  Sense strand starting at position 2200 of SEQ ID NO: 1885715
gcaggugggaucugauacu

SEQ ID NO: 2362943 - RNA, 19 nt, Artificial Sequence
  Description of Artificial Sequence: Synthetic oligonucleotide
  Antisense strand to SEQ ID NO: 2362942
aguaucagaucccaccugc

SEQ ID NO: 2362944 - RNA, 19 nt, Artificial Sequence
  Description of Artificial Sequence: Synthetic oligonucleotide
  Sense strand starting at position 2233 of SEQ ID NO: 1885715
cgugucuugugugucauga

SEQ ID NO: 2362945 - RNA, 19 nt, Artificial Sequence
  Description of Artificial Sequence: Synthetic oligonucleotide
  Antisense strand to SEQ ID NO: 2362944
ucaugacacacaagacacg

SEQ ID NO: 2362946 - RNA, 19 nt, Artificial Sequence
  Description of Artificial Sequence: Synthetic oligonucleotide
  Sense strand starting at position 2234 of SEQ ID NO: 1885715
gugucuugugugucaugau

SEQ ID NO: 2362947 - RNA, 19 nt, Artificial Sequence
  Description of Artificial Sequence: Synthetic oligonucleotide
  Antisense strand to SEQ ID NO: 2362946
aucaugacacacaagacac

SEQ ID NO: 2362948 - RNA, 19 nt, Artificial Sequence
  Description of Artificial Sequence: Synthetic oligonucleotide
  Sense strand starting at position 2237 of SEQ ID NO: 1885715
ucuugugugucaugauuuc

SEQ ID NO: 2362949 - RNA, 19 nt, Artificial Sequence
  Description of Artificial Sequence: Synthetic oligonucleotide
  Antisense strand to SEQ ID NO: 2362948
gaaaucaugacacacaaga

SEQ ID NO: 2362950 - RNA, 19 nt, Artificial Sequence
  Description of Artificial Sequence: Synthetic oligonucleotide
  Sense strand starting at position 2244 of SEQ ID NO: 1885715
ugucaugauuucugugaau

SEQ ID NO: 2362951 - RNA, 19 nt, Artificial Sequence
  Description of Artificial Sequence: Synthetic oligonucleotide
  Antisense strand to SEQ ID NO: 2362950
auucacagaaaucaugaca

SEQ ID NO: 2362952 - RNA, 19 nt, Artificial Sequence
  Description of Artificial Sequence: Synthetic oligonucleotide
  Sense strand starting at position 2247 of SEQ ID NO: 1885715
caugauuucugugaaugca

SEQ ID NO: 2362953 - RNA, 19 nt, Artificial Sequence
  Description of Artificial Sequence: Synthetic oligonucleotide
  Antisense strand to SEQ ID NO: 2362952
ugcauucacagaaaucaug

SEQ ID NO: 2362954 - RNA, 19 nt, Artificial Sequence
  Description of Artificial Sequence: Synthetic oligonucleotide
  Sense strand starting at position 2472 of SEQ ID NO: 1885715
guccucugccucgaugaca

SEQ ID NO: 2362955 - RNA, 19 nt, Artificial Sequence
  Description of Artificial Sequence: Synthetic oligonucleotide
  Antisense strand to SEQ ID NO: 2362954
ugucaucgaggcagaggac

SEQ ID NO: 2362956 - RNA, 19 nt, Artificial Sequence
  Description of Artificial Sequence: Synthetic oligonucleotide
  Sense strand starting at position 2818 of SEQ ID NO: 1885715
gugccaucggcucaagaac

SEQ ID NO: 2362957 - RNA, 19 nt, Artificial Sequence
  Description of Artificial Sequence: Synthetic oligonucleotide
  Antisense strand to SEQ ID NO: 2362956
guucuugagccgauggcac

SEQ ID NO: 2362958 - RNA, 19 nt, Artificial Sequence
  Description of Artificial Sequence: Synthetic oligonucleotide
  Sense strand starting at position 3034 of SEQ ID NO: 1885715
gguccuccaaggugagauu

SEQ ID NO: 2362959 - RNA, 19 nt, Artificial Sequence
  Description of Artificial Sequence: Synthetic oligonucleotide
  Antisense strand to SEQ ID NO: 2362958
aaucucaccuuggaggacc

SEQ ID NO: 2362960 - RNA, 19 nt, Artificial Sequence
  Description of Artificial Sequence: Synthetic oligonucleotide
  Sense strand starting at position 3047 of SEQ ID NO: 1885715
gagauuugauacugagaaa

SEQ ID NO: 2362961 - RNA, 19 nt, Artificial Sequence
  Description of Artificial Sequence: Synthetic oligonucleotide
  Antisense strand to SEQ ID NO: 2362960
uuucucaguaucaaaucuc

SEQ ID NO: 2362962 - RNA, 19 nt, Artificial Sequence
  Description of Artificial Sequence: Synthetic oligonucleotide
  Sense strand starting at position 3338 of SEQ ID NO: 1885715
gguggaauuugauaccgaa

SEQ ID NO: 2362963 - RNA, 19 nt, Artificial Sequence
  Description of Artificial Sequence: Synthetic oligonucleotide
  Antisense strand to SEQ ID NO: 2362962
uucgguaucaaauuccacc

SEQ ID NO: 2362964 - RNA, 19 nt, Artificial Sequence
  Description of Artificial Sequence: Synthetic oligonucleotide
  Sense strand starting at position 3432 of SEQ ID NO: 1885715
ggcucagaugcucggacua

SEQ ID NO: 2362965 - RNA, 19 nt, Artificial Sequence
  Description of Artificial Sequence: Synthetic oligonucleotide
  Antisense strand to SEQ ID NO: 2362964
uaguccgagcaucugagcc

SEQ ID NO: 2362966 - RNA, 19 nt, Artificial Sequence
  Description of Artificial Sequence: Synthetic oligonucleotide
  Sense strand starting at position 3598 of SEQ ID NO: 1885715
ucuagagacucuucccaga

SEQ ID NO: 2362967 - RNA, 19 nt, Artificial Sequence
  Description of Artificial Sequence: Synthetic oligonucleotide
  Antisense strand to SEQ ID NO: 2362966
ucugggaagagucucuaga

SEQ ID NO: 2362968 - RNA, 19 nt, Artificial Sequence
  Description of Artificial Sequence: Synthetic oligonucleotide
  Sense strand starting at position 3601 of SEQ ID NO: 1885715
agagacucuucccagaagu

SEQ ID NO: 2362969 - RNA, 19 nt, Artificial Sequence
  Description of Artificial Sequence: Synthetic oligonucleotide
  Antisense strand to SEQ ID NO: 2362968
acuucugggaagagucucu

SEQ ID NO: 2362970 - RNA, 19 nt, Artificial Sequence
  Description of Artificial Sequence: Synthetic oligonucleotide
  Sense strand starting at position 3612 of SEQ ID NO: 1885715
ccagaaguugagugcaaga

SEQ ID NO: 2362971 - RNA, 19 nt, Artificial Sequence
  Description of Artificial Sequence: Synthetic oligonucleotide
  Antisense strand to SEQ ID NO: 2362970
ucuugcacucaacuucugg

SEQ ID NO: 2362972 - RNA, 19 nt, Artificial Sequence
  Description of Artificial Sequence: Synthetic oligonucleotide
  Sense strand starting at position 3671 of SEQ ID NO: 1885715
ugggcaccuugcuaaagau

SEQ ID NO: 2362973 - RNA, 19 nt, Artificial Sequence
  Description of Artificial Sequence: Synthetic oligonucleotide
  Antisense strand to SEQ ID NO: 2362972
aucuuuagcaaggugccca

SEQ ID NO: 2362974 - RNA, 19 nt, Artificial Sequence
  Description of Artificial Sequence: Synthetic oligonucleotide
  Sense strand starting at position 3933 of SEQ ID NO: 1885715
ucugauuagccucauaaag

SEQ ID NO: 2362975 - RNA, 19 nt, Artificial Sequence
  Description of Artificial Sequence: Synthetic oligonucleotide
  Antisense strand to SEQ ID NO: 2362974
cuuuaugaggcuaaucaga

SEQ ID NO: 2362976 - RNA, 19 nt, Artificial Sequence
  Description of Artificial Sequence: Synthetic oligonucleotide
  Sense strand starting at position 3935 of SEQ ID NO: 1885715
ugauuagccucauaaagca

SEQ ID NO: 2362977 - RNA, 19 nt, Artificial Sequence
  Description of Artificial Sequence: Synthetic oligonucleotide
  Antisense strand to SEQ ID NO: 2362976
ugcuuuaugaggcuaauca

SEQ ID NO: 2362978 - RNA, 19 nt, Artificial Sequence
  Description of Artificial Sequence: Synthetic oligonucleotide
  Sense strand starting at position 11 of SEQ ID NO: 1885716
cagagaauuuaccagcagu

SEQ ID NO: 2362979 - RNA, 19 nt, Artificial Sequence
  Description of Artificial Sequence: Synthetic oligonucleotide
  Antisense strand to SEQ ID NO: 2362978
acugcugguaaauucucug

SEQ ID NO: 2362980 - RNA, 19 nt, Artificial Sequence
  Description of Artificial Sequence: Synthetic oligonucleotide
  Sense strand starting at position 76 of SEQ ID NO: 1885716
aagcguauuuauccacagu

SEQ ID NO: 2362981 - RNA, 19 nt, Artificial Sequence
  Description of Artificial Sequence: Synthetic oligonucleotide
  Antisense strand to SEQ ID NO: 2362980
acuguggauaaauacgcuu

SEQ ID NO: 2362982 - RNA, 19 nt, Artificial Sequence
  Description of Artificial Sequence: Synthetic oligonucleotide
  Sense strand starting at position 212 of SEQ ID NO: 1885716
gcagguuuaguuuacagag

SEQ ID NO: 2362983 - RNA, 19 nt, Artificial Sequence
  Description of Artificial Sequence: Synthetic oligonucleotide
  Antisense strand to SEQ ID NO: 2362982
cucuguaaacuaaaccugc

SEQ ID NO: 2362984 - RNA, 19 nt, Artificial Sequence
  Description of Artificial Sequence: Synthetic oligonucleotide
  Sense strand starting at position 214 of SEQ ID NO: 1885716
agguuuaguuuacagagaa

SEQ ID NO: 2362985 - RNA, 19 nt, Artificial Sequence
  Description of Artificial Sequence: Synthetic oligonucleotide
  Antisense strand to SEQ ID NO: 2362984
uucucuguaaacuaaaccu

SEQ ID NO: 2362986 - RNA, 19 nt, Artificial Sequence
  Description of Artificial Sequence: Synthetic oligonucleotide
  Sense strand starting at position 257 of SEQ ID NO: 1885716
gagaacuacugauaaagug

SEQ ID NO: 2362987 - RNA, 19 nt, Artificial Sequence
  Description of Artificial Sequence: Synthetic oligonucleotide
  Antisense strand to SEQ ID NO: 2362986
cacuuuaucaguaguucuc

SEQ ID NO: 2362988 - RNA, 19 nt, Artificial Sequence
  Description of Artificial Sequence: Synthetic oligonucleotide
  Sense strand starting at position 362 of SEQ ID NO: 1885716
gugaugggugcacgagaau

SEQ ID NO: 2362989 - RNA, 19 nt, Artificial Sequence
  Description of Artificial Sequence: Synthetic oligonucleotide
  Antisense strand to SEQ ID NO: 2362988
auucucgugcacccaucac

SEQ ID NO: 2362990 - RNA, 19 nt, Artificial Sequence
  Description of Artificial Sequence: Synthetic oligonucleotide
  Sense strand starting at position 373 of SEQ ID NO: 1885716
acgagaaucucacaaauca

SEQ ID NO: 2362991 - RNA, 19 nt, Artificial Sequence
  Description of Artificial Sequence: Synthetic oligonucleotide
  Antisense strand to SEQ ID NO: 2362990
ugauuugugagauucucgu

SEQ ID NO: 2362992 - RNA, 19 nt, Artificial Sequence
  Description of Artificial Sequence: Synthetic oligonucleotide
  Sense strand starting at position 504 of SEQ ID NO: 1885716
aaggaagguuaauguuaaa

SEQ ID NO: 2362993 - RNA, 19 nt, Artificial Sequence
  Description of Artificial Sequence: Synthetic oligonucleotide
  Antisense strand to SEQ ID NO: 2362992
uuuaacauuaaccuuccuu

SEQ ID NO: 2362994 - RNA, 19 nt, Artificial Sequence
  Description of Artificial Sequence: Synthetic oligonucleotide
  Sense strand starting at position 520 of SEQ ID NO: 1885716
aaaugucaugcuggguuau

SEQ ID NO: 2362995 - RNA, 19 nt, Artificial Sequence
  Description of Artificial Sequence: Synthetic oligonucleotide
  Antisense strand to SEQ ID NO: 2362994
auaacccagcaugacauuu

SEQ ID NO: 2362996 - RNA, 19 nt, Artificial Sequence
  Description of Artificial Sequence: Synthetic oligonucleotide
  Sense strand starting at position 522 of SEQ ID NO: 1885716
augucaugcuggguuauga

SEQ ID NO: 2362997 - RNA, 19 nt, Artificial Sequence
  Description of Artificial Sequence: Synthetic oligonucleotide
  Antisense strand to SEQ ID NO: 2362996
ucauaacccagcaugacau

SEQ ID NO: 2362998 - RNA, 19 nt, Artificial Sequence
  Description of Artificial Sequence: Synthetic oligonucleotide
  Sense strand starting at position 728 of SEQ ID NO: 1885716
ugcugagucuuguccauca

SEQ ID NO: 2362999 - RNA, 19 nt, Artificial Sequence
  Description of Artificial Sequence: Synthetic oligonucleotide
  Antisense strand to SEQ ID NO: 2362998
ugauggacaagacucagca

SEQ ID NO: 2363000 - RNA, 19 nt, Artificial Sequence
  Description of Artificial Sequence: Synthetic oligonucleotide
  Sense strand starting at position 730 of SEQ ID NO: 1885716
cugagucuuguccaucaac

SEQ ID NO: 2363001 - RNA, 19 nt, Artificial Sequence
  Description of Artificial Sequence: Synthetic oligonucleotide
  Antisense strand to SEQ ID NO: 2363000
guugauggacaagacucag

SEQ ID NO: 2363002 - RNA, 19 nt, Artificial Sequence
  Description of Artificial Sequence: Synthetic oligonucleotide
  Sense strand starting at position 1123 of SEQ ID NO: 1885716
cgacaagacccuugucaug

SEQ ID NO: 2363003 - RNA, 19 nt, Artificial Sequence
  Description of Artificial Sequence: Synthetic oligonucleotide
  Antisense strand to SEQ ID NO: 2363002
caugacaagggucuugucg

SEQ ID NO: 2363004 - RNA, 19 nt, Artificial Sequence
  Description of Artificial Sequence: Synthetic oligonucleotide
  Sense strand starting at position 1197 of SEQ ID NO: 1885716
cuguccaccugucugagau

SEQ ID NO: 2363005 - RNA, 19 nt, Artificial Sequence
  Description of Artificial Sequence: Synthetic oligonucleotide
  Antisense strand to SEQ ID NO: 2363004
aucucagacagguggacag

SEQ ID NO: 2363006 - RNA, 19 nt, Artificial Sequence
  Description of Artificial Sequence: Synthetic oligonucleotide
  Sense strand starting at position 1630 of SEQ ID NO: 1885716
ggcugucguggcuuguuaa

SEQ ID NO: 2363007 - RNA, 19 nt, Artificial Sequence
  Description of Artificial Sequence: Synthetic oligonucleotide
  Antisense strand to SEQ ID NO: 2363006
uuaacaagccacgacagcc

SEQ ID NO: 2363008 - RNA, 19 nt, Artificial Sequence
  Description of Artificial Sequence: Synthetic oligonucleotide
  Sense strand starting at position 2249 of SEQ ID NO: 1885716
gggcauaguucccugccaa

SEQ ID NO: 2363009 - RNA, 19 nt, Artificial Sequence
  Description of Artificial Sequence: Synthetic oligonucleotide
  Antisense strand to SEQ ID NO: 2363008
uuggcagggaacuaugccc

SEQ ID NO: 2363010 - RNA, 19 nt, Artificial Sequence
  Description of Artificial Sequence: Synthetic oligonucleotide
  Sense strand starting at position 2250 of SEQ ID NO: 1885716
ggcauaguucccugccaag

SEQ ID NO: 2363011 - RNA, 19 nt, Artificial Sequence
  Description of Artificial Sequence: Synthetic oligonucleotide
  Antisense strand to SEQ ID NO: 2363010
cuuggcagggaacuaugcc

SEQ ID NO: 2363012 - RNA, 19 nt, Artificial Sequence
  Description of Artificial Sequence: Synthetic oligonucleotide
  Sense strand starting at position 2814 of SEQ ID NO: 1885716
gggagacaggccugauucu

SEQ ID NO: 2363013 - RNA, 19 nt, Artificial Sequence
  Description of Artificial Sequence: Synthetic oligonucleotide
  Antisense strand to SEQ ID NO: 2363012
agaaucaggccugucuccc

SEQ ID NO: 2363014 - RNA, 19 nt, Artificial Sequence
  Description of Artificial Sequence: Synthetic oligonucleotide
  Sense strand starting at position 2837 of SEQ ID NO: 1885716
caggucugugaguggacau

SEQ ID NO: 2363015 - RNA, 19 nt, Artificial Sequence
  Description of Artificial Sequence: Synthetic oligonucleotide
  Antisense strand to SEQ ID NO: 2363014
auguccacucacagaccug

SEQ ID NO: 2363016 - RNA, 19 nt, Artificial Sequence
  Description of Artificial Sequence: Synthetic oligonucleotide
  Sense strand starting at position 2883 of SEQ ID NO: 1885716
cuuugacucccugguacuu

SEQ ID NO: 2363017 - RNA, 19 nt, Artificial Sequence
  Description of Artificial Sequence: Synthetic oligonucleotide
  Antisense strand to SEQ ID NO: 2363016
aaguaccagggagucaaag

SEQ ID NO: 2363018 - RNA, 19 nt, Artificial Sequence
  Description of Artificial Sequence: Synthetic oligonucleotide
  Sense strand starting at position 2924 of SEQ ID NO: 1885716
ugugaaauggguugcaaca

SEQ ID NO: 2363019 - RNA, 19 nt, Artificial Sequence
  Description of Artificial Sequence: Synthetic oligonucleotide
  Antisense strand to SEQ ID NO: 2363018
uguugcaacccauuucaca

SEQ ID NO: 2363020 - RNA, 19 nt, Artificial Sequence
  Description of Artificial Sequence: Synthetic oligonucleotide
  Sense strand starting at position 2989 of SEQ ID NO: 1885716
ucaagaauuucccagagac

SEQ ID NO: 2363021 - RNA, 19 nt, Artificial Sequence
  Description of Artificial Sequence: Synthetic oligonucleotide
  Antisense strand to SEQ ID NO: 2363020
gucucugggaaauucuuga

SEQ ID NO: 2363022 - RNA, 19 nt, Artificial Sequence
  Description of Artificial Sequence: Synthetic oligonucleotide
  Sense strand starting at position 3066 of SEQ ID NO: 1885716
agcugaaggcucuggaguu

SEQ ID NO: 2363023 - RNA, 19 nt, Artificial Sequence
  Description of Artificial Sequence: Synthetic oligonucleotide
  Antisense strand to SEQ ID NO: 2363022
aacuccagagccuucagcu

SEQ ID NO: 2363024 - RNA, 19 nt, Artificial Sequence
  Description of Artificial Sequence: Synthetic oligonucleotide
  Sense strand starting at position 3119 of SEQ ID NO: 1885716
uauggugauaguugcagau

SEQ ID NO: 2363025 - RNA, 19 nt, Artificial Sequence
  Description of Artificial Sequence: Synthetic oligonucleotide
  Antisense strand to SEQ ID NO: 2363024
aucugcaacuaucaccaua

SEQ ID NO: 2363026 - RNA, 19 nt, Artificial Sequence
  Description of Artificial Sequence: Synthetic oligonucleotide
  Sense strand starting at position 3123 of SEQ ID NO: 1885716
gugauaguugcagauaucu

SEQ ID NO: 2363027 - RNA, 19 nt, Artificial Sequence
  Description of Artificial Sequence: Synthetic oligonucleotide
  Antisense strand to SEQ ID NO: 2363026
agauaucugcaacuaucac

SEQ ID NO: 2363028 - RNA, 19 nt, Artificial Sequence
  Description of Artificial Sequence: Synthetic oligonucleotide
  Sense strand starting at position 3129 of SEQ ID NO: 1885716
guugcagauaucugugaau

SEQ ID NO: 2363029 - RNA, 19 nt, Artificial Sequence
  Description of Artificial Sequence: Synthetic oligonucleotide
  Antisense strand to SEQ ID NO: 2363028
auucacagauaucugcaac

SEQ ID NO: 2363030 - RNA, 19 nt, Artificial Sequence
  Description of Artificial Sequence: Synthetic oligonucleotide
  Sense strand starting at position 3160 of SEQ ID NO: 1885716
cuucgcugugagcuuuaau

SEQ ID NO: 2363031 - RNA, 19 nt, Artificial Sequence
  Description of Artificial Sequence: Synthetic oligonucleotide
  Antisense strand to SEQ ID NO: 2363030
auuaaagcucacagcgaag

SEQ ID NO: 2363032 - RNA, 19 nt, Artificial Sequence
  Description of Artificial Sequence: Synthetic oligonucleotide
  Sense strand starting at position 3169 of SEQ ID NO: 1885716
gagcuuuaaugggcggauu

SEQ ID NO: 2363033 - RNA, 19 nt, Artificial Sequence
  Description of Artificial Sequence: Synthetic oligonucleotide
  Antisense strand to SEQ ID NO: 2363032
aauccgcccauuaaagcuc

SEQ ID NO: 2363034 - RNA, 19 nt, Artificial Sequence
  Description of Artificial Sequence: Synthetic oligonucleotide
  Sense strand starting at position 3171 of SEQ ID NO: 1885716
gcuuuaaugggcggauugu

SEQ ID NO: 2363035 - RNA, 19 nt, Artificial Sequence
  Description of Artificial Sequence: Synthetic oligonucleotide
  Antisense strand to SEQ ID NO: 2363034
acaauccgcccauuaaagc

SEQ ID NO: 2363036 - RNA, 19 nt, Artificial Sequence
  Description of Artificial Sequence: Synthetic oligonucleotide
  Sense strand starting at position 3182 of SEQ ID NO: 1885716
cggauuguguguaugugga

SEQ ID NO: 2363037 - RNA, 19 nt, Artificial Sequence
  Description of Artificial Sequence: Synthetic oligonucleotide
  Antisense strand to SEQ ID NO: 2363036
uccacauacacacaauccg

SEQ ID NO: 2363038 - RNA, 19 nt, Artificial Sequence
  Description of Artificial Sequence: Synthetic oligonucleotide
  Sense strand starting at position 3184 of SEQ ID NO: 1885716
gauuguguguauguggauu

SEQ ID NO: 2363039 - RNA, 19 nt, Artificial Sequence
  Description of Artificial Sequence: Synthetic oligonucleotide
  Antisense strand to SEQ ID NO: 2363038
aauccacauacacacaauc

SEQ ID NO: 2363040 - RNA, 19 nt, Artificial Sequence
  Description of Artificial Sequence: Synthetic oligonucleotide
  Sense strand starting at position 3234 of SEQ ID NO: 1885716
uuccuuuguucuuugacau

SEQ ID NO: 2363041 - RNA, 19 nt, Artificial Sequence
  Description of Artificial Sequence: Synthetic oligonucleotide
  Antisense strand to SEQ ID NO: 2363040
augucaaagaacaaaggaa

SEQ ID NO: 2363042 - RNA, 19 nt, Artificial Sequence
  Description of Artificial Sequence: Synthetic oligonucleotide
  Sense strand starting at position 3235 of SEQ ID NO: 1885716
uccuuuguucuuugacauc

SEQ ID NO: 2363043 - RNA, 19 nt, Artificial Sequence
  Description of Artificial Sequence: Synthetic oligonucleotide
  Antisense strand to SEQ ID NO: 2363042
gaugucaaagaacaaagga

SEQ ID NO: 2363044 - RNA, 19 nt, Artificial Sequence
  Description of Artificial Sequence: Synthetic oligonucleotide
  Sense strand starting at position 3360 of SEQ ID NO: 1885716
aaauaucugugaguaaaug

SEQ ID NO: 2363045 - RNA, 19 nt, Artificial Sequence
  Description of Artificial Sequence: Synthetic oligonucleotide
  Antisense strand to SEQ ID NO: 2363044
cauuuacucacagauauuu

SEQ ID NO: 2363046 - RNA, 19 nt, Artificial Sequence
  Description of Artificial Sequence: Synthetic oligonucleotide
  Sense strand starting at position 3368 of SEQ ID NO: 1885716
gugaguaaaugaccugaua

SEQ ID NO: 2363047 - RNA, 19 nt, Artificial Sequence
  Description of Artificial Sequence: Synthetic oligonucleotide
  Antisense strand to SEQ ID NO: 2363046
uaucaggucauuuacucac

SEQ ID NO: 2363048 - RNA, 19 nt, Artificial Sequence
  Description of Artificial Sequence: Synthetic oligonucleotide
  Sense strand starting at position 3389 of SEQ ID NO: 1885716
auaacauucucugaaagag

SEQ ID NO: 2363049 - RNA, 19 nt, Artificial Sequence
  Description of Artificial Sequence: Synthetic oligonucleotide
  Antisense strand to SEQ ID NO: 2363048
cucuuucagagaauguuau

SEQ ID NO: 2363050 - RNA, 19 nt, Artificial Sequence
  Description of Artificial Sequence: Synthetic oligonucleotide
  Sense strand starting at position 3779 of SEQ ID NO: 1885716
guuggugugacacaucagu

SEQ ID NO: 2363051 - RNA, 19 nt, Artificial Sequence
  Description of Artificial Sequence: Synthetic oligonucleotide
  Antisense strand to SEQ ID NO: 2363050
acugaugugucacaccaac

SEQ ID NO: 2363052 - RNA, 19 nt, Artificial Sequence
  Description of Artificial Sequence: Synthetic oligonucleotide
  Sense strand starting at position 3887 of SEQ ID NO: 1885716
ggaaggucucugggugaug

SEQ ID NO: 2363053 - RNA, 19 nt, Artificial Sequence
  Description of Artificial Sequence: Synthetic oligonucleotide
  Antisense strand to SEQ ID NO: 2363052
caucacccagagaccuucc

SEQ ID NO: 2363054 - RNA, 19 nt, Artificial Sequence
  Description of Artificial Sequence: Synthetic oligonucleotide
  Sense strand starting at position 3890 of SEQ ID NO: 1885716
aggucucugggugaugcau

SEQ ID NO: 2363055 - RNA, 19 nt, Artificial Sequence
  Description of Artificial Sequence: Synthetic oligonucleotide
  Antisense strand to SEQ ID NO: 2363054
augcaucacccagagaccu

SEQ ID NO: 2363056 - RNA, 19 nt, Artificial Sequence
  Description of Artificial Sequence: Synthetic oligonucleotide
  Sense strand starting at position 3950 of SEQ ID NO: 1885716
gugacacauuaguagggaa

SEQ ID NO: 2363057 - RNA, 19 nt, Artificial Sequence
  Description of Artificial Sequence: Synthetic oligonucleotide
  Antisense strand to SEQ ID NO: 2363056
uucccuacuaaugugucac

SEQ ID NO: 2363058 - RNA, 19 nt, Artificial Sequence
  Description of Artificial Sequence: Synthetic oligonucleotide
  Sense strand starting at position 166 of SEQ ID NO: 1885717
gugguaaagcgagaaacau

SEQ ID NO: 2363059 - RNA, 19 nt, Artificial Sequence
  Description of Artificial Sequence: Synthetic oligonucleotide
  Antisense strand to SEQ ID NO: 2363058
auguuucucgcuuuaccac

SEQ ID NO: 2363060 - RNA, 19 nt, Artificial Sequence
  Description of Artificial Sequence: Synthetic oligonucleotide
  Sense strand starting at position 331 of SEQ ID NO: 1885717
cagacagguguaugaaauu

SEQ ID NO: 2363061 - RNA, 19 nt, Artificial Sequence
  Description of Artificial Sequence: Synthetic oligonucleotide
  Antisense strand to SEQ ID NO: 2363060
aauuucauacaccugucug

SEQ ID NO: 2363062 - RNA, 19 nt, Artificial Sequence
  Description of Artificial Sequence: Synthetic oligonucleotide
  Sense strand starting at position 349 of SEQ ID NO: 1885717
uucuaaagcccuuaauggu

SEQ ID NO: 2363063 - RNA, 19 nt, Artificial Sequence
  Description of Artificial Sequence: Synthetic oligonucleotide
  Antisense strand to SEQ ID NO: 2363062
accauuaagggcuuuagaa

SEQ ID NO: 2363064 - RNA, 19 nt, Artificial Sequence
  Description of Artificial Sequence: Synthetic oligonucleotide
  Sense strand starting at position 364 of SEQ ID NO: 1885717
ugguuauuucugggugcca

SEQ ID NO: 2363065 - RNA, 19 nt, Artificial Sequence
  Description of Artificial Sequence: Synthetic oligonucleotide
  Antisense strand to SEQ ID NO: 2363064
uggcacccagaaauaacca

SEQ ID NO: 2363066 - RNA, 19 nt, Artificial Sequence
  Description of Artificial Sequence: Synthetic oligonucleotide
  Sense strand starting at position 366 of SEQ ID NO: 1885717
guuauuucugggugccaga

SEQ ID NO: 2363067 - RNA, 19 nt, Artificial Sequence
  Description of Artificial Sequence: Synthetic oligonucleotide
  Antisense strand to SEQ ID NO: 2363066
ucuggcacccagaaauaac

SEQ ID NO: 2363068 - RNA, 19 nt, Artificial Sequence
  Description of Artificial Sequence: Synthetic oligonucleotide
  Sense strand starting at position 421 of SEQ ID NO: 1885717
uuccacaucgcuugaauuu

SEQ ID NO: 2363069 - RNA, 19 nt, Artificial Sequence
  Description of Artificial Sequence: Synthetic oligonucleotide
  Antisense strand to SEQ ID NO: 2363068
aaauucaagcgauguggaa

SEQ ID NO: 2363070 - RNA, 19 nt, Artificial Sequence
  Description of Artificial Sequence: Synthetic oligonucleotide
  Sense strand starting at position 635 of SEQ ID NO: 1885717
uugucaacaugucuaagaa

SEQ ID NO: 2363071 - RNA, 19 nt, Artificial Sequence
  Description of Artificial Sequence: Synthetic oligonucleotide
  Antisense strand to SEQ ID NO: 2363070
uucuuagacauguugacaa

SEQ ID NO: 2363072 - RNA, 19 nt, Artificial Sequence
  Description of Artificial Sequence: Synthetic oligonucleotide
  Sense strand starting at position 655 of SEQ ID NO: 1885717
uccuuccuccaugguaaga

SEQ ID NO: 2363073 - RNA, 19 nt, Artificial Sequence
  Description of Artificial Sequence: Synthetic oligonucleotide
  Antisense strand to SEQ ID NO: 2363072
ucuuaccauggaggaagga

SEQ ID NO: 2363074 - RNA, 19 nt, Artificial Sequence
  Description of Artificial Sequence: Synthetic oligonucleotide
  Sense strand starting at position 660 of SEQ ID NO: 1885717
ccuccaugguaagauuuaa

SEQ ID NO: 2363075 - RNA, 19 nt, Artificial Sequence
  Description of Artificial Sequence: Synthetic oligonucleotide
  Antisense strand to SEQ ID NO: 2363074
uuaaaucuuaccauggagg

SEQ ID NO: 2363076 - RNA, 19 nt, Artificial Sequence
  Description of Artificial Sequence: Synthetic oligonucleotide
  Sense strand starting at position 775 of SEQ ID NO: 1885717
gggucuugagcacagauca

SEQ ID NO: 2363077 - RNA, 19 nt, Artificial Sequence
  Description of Artificial Sequence: Synthetic oligonucleotide
  Antisense strand to SEQ ID NO: 2363076
ugaucugugcucaagaccc

SEQ ID NO: 2363078 - RNA, 19 nt, Artificial Sequence
  Description of Artificial Sequence: Synthetic oligonucleotide
  Sense strand starting at position 892 of SEQ ID NO: 1885717
guggaaccaacaugaguau

SEQ ID NO: 2363079 - RNA, 19 nt, Artificial Sequence
  Description of Artificial Sequence: Synthetic oligonucleotide
  Antisense strand to SEQ ID NO: 2363078
auacucauguugguuccac

SEQ ID NO: 2363080 - RNA, 19 nt, Artificial Sequence
  Description of Artificial Sequence: Synthetic oligonucleotide
  Sense strand starting at position 1189 of SEQ ID NO: 1885717
aggauuagugugcacagaa

SEQ ID NO: 2363081 - RNA, 19 nt, Artificial Sequence
  Description of Artificial Sequence: Synthetic oligonucleotide
  Antisense strand to SEQ ID NO: 2363080
uucugugcacacuaauccu

SEQ ID NO: 2363082 - RNA, 19 nt, Artificial Sequence
  Description of Artificial Sequence: Synthetic oligonucleotide
  Sense strand starting at position 1368 of SEQ ID NO: 1885717
gaauucucuggagggugua

SEQ ID NO: 2363083 - RNA, 19 nt, Artificial Sequence
  Description of Artificial Sequence: Synthetic oligonucleotide
  Antisense strand to SEQ ID NO: 2363082
uacacccuccagagaauuc

SEQ ID NO: 2363084 - RNA, 19 nt, Artificial Sequence
  Description of Artificial Sequence: Synthetic oligonucleotide
  Sense strand starting at position 1474 of SEQ ID NO: 1885717
cuucuagaugcccaagauu

SEQ ID NO: 2363085 - RNA, 19 nt, Artificial Sequence
  Description of Artificial Sequence: Synthetic oligonucleotide
  Antisense strand to SEQ ID NO: 2363084
aaucuugggcaucuagaag

SEQ ID NO: 2363086 - RNA, 19 nt, Artificial Sequence
  Description of Artificial Sequence: Synthetic oligonucleotide
  Sense strand starting at position 1500 of SEQ ID NO: 1885717
aagguugaauuugauagga

SEQ ID NO: 2363087 - RNA, 19 nt, Artificial Sequence
  Description of Artificial Sequence: Synthetic oligonucleotide
  Antisense strand to SEQ ID NO: 2363086
uccuaucaaauucaaccuu

SEQ ID NO: 2363088 - RNA, 19 nt, Artificial Sequence
  Description of Artificial Sequence: Synthetic oligonucleotide
  Sense strand starting at position 1502 of SEQ ID NO: 1885717
gguugaauuugauaggaau

SEQ ID NO: 2363089 - RNA, 19 nt, Artificial Sequence
  Description of Artificial Sequence: Synthetic oligonucleotide
  Antisense strand to SEQ ID NO: 2363088
auuccuaucaaauucaacc

SEQ ID NO: 2363090 - RNA, 19 nt, Artificial Sequence
  Description of Artificial Sequence: Synthetic oligonucleotide
  Sense strand starting at position 1637 of SEQ ID NO: 1885717
cagcuuggacucuaaaguu

SEQ ID NO: 2363091 - RNA, 19 nt, Artificial Sequence
  Description of Artificial Sequence: Synthetic oligonucleotide
  Antisense strand to SEQ ID NO: 2363090
aacuuuagaguccaagcug

SEQ ID NO: 2363092 - RNA, 19 nt, Artificial Sequence
  Description of Artificial Sequence: Synthetic oligonucleotide
  Sense strand starting at position 1666 of SEQ ID NO: 1885717
uuacaugcauccucaggaa

SEQ ID NO: 2363093 - RNA, 19 nt, Artificial Sequence
  Description of Artificial Sequence: Synthetic oligonucleotide
  Antisense strand to SEQ ID NO: 2363092
uuccugaggaugcauguaa

SEQ ID NO: 2363094 - RNA, 19 nt, Artificial Sequence
  Description of Artificial Sequence: Synthetic oligonucleotide
  Sense strand starting at position 1755 of SEQ ID NO: 1885717
ggcagaauuugacacuaaa

SEQ ID NO: 2363095 - RNA, 19 nt, Artificial Sequence
  Description of Artificial Sequence: Synthetic oligonucleotide
  Antisense strand to SEQ ID NO: 2363094
uuuagugucaaauucugcc

SEQ ID NO: 2363096 - RNA, 19 nt, Artificial Sequence
  Description of Artificial Sequence: Synthetic oligonucleotide
  Sense strand starting at position 1859 of SEQ ID NO: 1885717
ugagaaauccauugccucu

SEQ ID NO: 2363097 - RNA, 19 nt, Artificial Sequence
  Description of Artificial Sequence: Synthetic oligonucleotide
  Antisense strand to SEQ ID NO: 2363096
agaggcaauggauuucuca

SEQ ID NO: 2363098 - RNA, 19 nt, Artificial Sequence
  Description of Artificial Sequence: Synthetic oligonucleotide
  Sense strand starting at position 1911 of SEQ ID NO: 1885717
guuaggaaugggugggaua

SEQ ID NO: 2363099 - RNA, 19 nt, Artificial Sequence
  Description of Artificial Sequence: Synthetic oligonucleotide
  Antisense strand to SEQ ID NO: 2363098
uaucccacccauuccuaac

SEQ ID NO: 2363100 - RNA, 19 nt, Artificial Sequence
  Description of Artificial Sequence: Synthetic oligonucleotide
  Sense strand starting at position 1913 of SEQ ID NO: 1885717
uaggaaugggugggauagu

SEQ ID NO: 2363101 - RNA, 19 nt, Artificial Sequence
  Description of Artificial Sequence: Synthetic oligonucleotide
  Antisense strand to SEQ ID NO: 2363100
acuaucccacccauuccua

SEQ ID NO: 2363102 - RNA, 19 nt, Artificial Sequence
  Description of Artificial Sequence: Synthetic oligonucleotide
  Sense strand starting at position 2164 of SEQ ID NO: 1885717
caggaugcuggguauuaga

SEQ ID NO: 2363103 - RNA, 19 nt, Artificial Sequence
  Description of Artificial Sequence: Synthetic oligonucleotide
  Antisense strand to SEQ ID NO: 2363102
ucuaauacccagcauccug

SEQ ID NO: 2363104 - RNA, 19 nt, Artificial Sequence
  Description of Artificial Sequence: Synthetic oligonucleotide
  Sense strand starting at position 2211 of SEQ ID NO: 1885717
gcacaugcucugggaagaa

SEQ ID NO: 2363105 - RNA, 19 nt, Artificial Sequence
  Description of Artificial Sequence: Synthetic oligonucleotide
  Antisense strand to SEQ ID NO: 2363104
uucuucccagagcaugugc

SEQ ID NO: 2363106 - RNA, 19 nt, Artificial Sequence
  Description of Artificial Sequence: Synthetic oligonucleotide
  Sense strand starting at position 2469 of SEQ ID NO: 1885717
uggaaagucuuccuggagu

SEQ ID NO: 2363107 - RNA, 19 nt, Artificial Sequence
  Description of Artificial Sequence: Synthetic oligonucleotide
  Antisense strand to SEQ ID NO: 2363106
acuccaggaagacuuucca

SEQ ID NO: 2363108 - RNA, 19 nt, Artificial Sequence
  Description of Artificial Sequence: Synthetic oligonucleotide
  Sense strand starting at position 2488 of SEQ ID NO: 1885717
gggagugaugcugaggguu

SEQ ID NO: 2363109 - RNA, 19 nt, Artificial Sequence
  Description of Artificial Sequence: Synthetic oligonucleotide
  Antisense strand to SEQ ID NO: 2363108
aacccucagcaucacuccc

SEQ ID NO: 2363110 - RNA, 19 nt, Artificial Sequence
  Description of Artificial Sequence: Synthetic oligonucleotide
  Sense strand starting at position 2731 of SEQ ID NO: 1885717
ggauuaucgggccagguga

SEQ ID NO: 2363111 - RNA, 19 nt, Artificial Sequence
  Description of Artificial Sequence: Synthetic oligonucleotide
  Antisense strand to SEQ ID NO: 2363110
ucaccuggcccgauaaucc

SEQ ID NO: 2363112 - RNA, 19 nt, Artificial Sequence
  Description of Artificial Sequence: Synthetic oligonucleotide
  Sense strand starting at position 2746 of SEQ ID NO: 1885717
gugacuuacagcuagguca

SEQ ID NO: 2363113 - RNA, 19 nt, Artificial Sequence
  Description of Artificial Sequence: Synthetic oligonucleotide
  Antisense strand to SEQ ID NO: 2363112
ugaccuagcuguaagucac

SEQ ID NO: 2363114 - RNA, 19 nt, Artificial Sequence
  Description of Artificial Sequence: Synthetic oligonucleotide
  Sense strand starting at position 2850 of SEQ ID NO: 1885717
ccaggaaguccuuagaggu

SEQ ID NO: 2363115 - RNA, 19 nt, Artificial Sequence
  Description of Artificial Sequence: Synthetic oligonucleotide
  Antisense strand to SEQ ID NO: 2363114
accucuaaggacuuccugg

SEQ ID NO: 2363116 - RNA, 19 nt, Artificial Sequence
  Description of Artificial Sequence: Synthetic oligonucleotide
  Sense strand starting at position 2856 of SEQ ID NO: 1885717
aguccuuagagguagcauu

SEQ ID NO: 2363117 - RNA, 19 nt, Artificial Sequence
  Description of Artificial Sequence: Synthetic oligonucleotide
  Antisense strand to SEQ ID NO: 2363116
aaugcuaccucuaaggacu

SEQ ID NO: 2363118 - RNA, 19 nt, Artificial Sequence
  Description of Artificial Sequence: Synthetic oligonucleotide
  Sense strand starting at position 3158 of SEQ ID NO: 1885717
uugaaauugugguccugaa

SEQ ID NO: 2363119 - RNA, 19 nt, Artificial Sequence
  Description of Artificial Sequence: Synthetic oligonucleotide
  Antisense strand to SEQ ID NO: 2363118
uucaggaccacaauuucaa

SEQ ID NO: 2363120 - RNA, 19 nt, Artificial Sequence
  Description of Artificial Sequence: Synthetic oligonucleotide
  Sense strand starting at position 3162 of SEQ ID NO: 1885717
aauugugguccugaaucca

SEQ ID NO: 2363121 - RNA, 19 nt, Artificial Sequence
  Description of Artificial Sequence: Synthetic oligonucleotide
  Antisense strand to SEQ ID NO: 2363120
uggauucaggaccacaauu

SEQ ID NO: 2363122 - RNA, 19 nt, Artificial Sequence
  Description of Artificial Sequence: Synthetic oligonucleotide
  Sense strand starting at position 3182 of SEQ ID NO: 1885717
acgcacaagguuuagaaau

SEQ ID NO: 2363123 - RNA, 19 nt, Artificial Sequence
  Description of Artificial Sequence: Synthetic oligonucleotide
  Antisense strand to SEQ ID NO: 2363122
auuucuaaaccuugugcgu

SEQ ID NO: 2363124 - RNA, 19 nt, Artificial Sequence
  Description of Artificial Sequence: Synthetic oligonucleotide
  Sense strand starting at position 3207 of SEQ ID NO: 1885717
agggaagccacuugucaca

SEQ ID NO: 2363125 - RNA, 19 nt, Artificial Sequence
  Description of Artificial Sequence: Synthetic oligonucleotide
  Antisense strand to SEQ ID NO: 2363124
ugugacaaguggcuucccu

SEQ ID NO: 2363126 - RNA, 19 nt, Artificial Sequence
  Description of Artificial Sequence: Synthetic oligonucleotide
  Sense strand starting at position 3299 of SEQ ID NO: 1885717
ugaguuauccaucaagcac

SEQ ID NO: 2363127 - RNA, 19 nt, Artificial Sequence
  Description of Artificial Sequence: Synthetic oligonucleotide
  Antisense strand to SEQ ID NO: 2363126
gugcuugauggauaacuca

SEQ ID NO: 2363128 - RNA, 19 nt, Artificial Sequence
  Description of Artificial Sequence: Synthetic oligonucleotide
  Sense strand starting at position 3459 of SEQ ID NO: 1885717
cuggguagauucucuauca

SEQ ID NO: 2363129 - RNA, 19 nt, Artificial Sequence
  Description of Artificial Sequence: Synthetic oligonucleotide
  Antisense strand to SEQ ID NO: 2363128
ugauagagaaucuacccag

SEQ ID NO: 2363130 - RNA, 19 nt, Artificial Sequence
  Description of Artificial Sequence: Synthetic oligonucleotide
  Sense strand starting at position 3460 of SEQ ID NO: 1885717
uggguagauucucuaucaa

SEQ ID NO: 2363131 - RNA, 19 nt, Artificial Sequence
  Description of Artificial Sequence: Synthetic oligonucleotide
  Antisense strand to SEQ ID NO: 2363130
uugauagagaaucuaccca

SEQ ID NO: 2363132 - RNA, 19 nt, Artificial Sequence
  Description of Artificial Sequence: Synthetic oligonucleotide
  Sense strand starting at position 3485 of SEQ ID NO: 1885717
uguggucagagugaucuuu

SEQ ID NO: 2363133 - RNA, 19 nt, Artificial Sequence
  Description of Artificial Sequence: Synthetic oligonucleotide
  Antisense strand to SEQ ID NO: 2363132
aaagaucacucugaccaca

SEQ ID NO: 2363134 - RNA, 19 nt, Artificial Sequence
  Description of Artificial Sequence: Synthetic oligonucleotide
  Sense strand starting at position 3896 of SEQ ID NO: 1885717
cgucucuuccaccagaaug

SEQ ID NO: 2363135 - RNA, 19 nt, Artificial Sequence
  Description of Artificial Sequence: Synthetic oligonucleotide
  Antisense strand to SEQ ID NO: 2363134
cauucugguggaagagacg

SEQ ID NO: 2363136 - RNA, 19 nt, Artificial Sequence
  Description of Artificial Sequence: Synthetic oligonucleotide
  Sense strand starting at position 3964 of SEQ ID NO: 1885717
gguccagaaucaccuagaa

SEQ ID NO: 2363137 - RNA, 19 nt, Artificial Sequence
  Description of Artificial Sequence: Synthetic oligonucleotide
  Antisense strand to SEQ ID NO: 2363136
uucuaggugauucuggacc

SEQ ID NO: 2363138 - RNA, 19 nt, Artificial Sequence
  Description of Artificial Sequence: Synthetic oligonucleotide
  Sense strand starting at position 105 of SEQ ID NO: 1885718
aggucuaucugguuccuca

SEQ ID NO: 2363139 - RNA, 19 nt, Artificial Sequence
  Description of Artificial Sequence: Synthetic oligonucleotide
  Antisense strand to SEQ ID NO: 2363138
ugaggaaccagauagaccu

SEQ ID NO: 2363140 - RNA, 19 nt, Artificial Sequence
  Description of Artificial Sequence: Synthetic oligonucleotide
  Sense strand starting at position 109 of SEQ ID NO: 1885718
cuaucugguuccucaggga

SEQ ID NO: 2363141 - RNA, 19 nt, Artificial Sequence
  Description of Artificial Sequence: Synthetic oligonucleotide
  Antisense strand to SEQ ID NO: 2363140
ucccugaggaaccagauag

SEQ ID NO: 2363142 - RNA, 19 nt, Artificial Sequence
  Description of Artificial Sequence: Synthetic oligonucleotide
  Sense strand starting at position 113 of SEQ ID NO: 1885718
cugguuccucagggauuau

SEQ ID NO: 2363143 - RNA, 19 nt, Artificial Sequence
  Description of Artificial Sequence: Synthetic oligonucleotide
  Antisense strand to SEQ ID NO: 2363142
auaaucccugaggaaccag

SEQ ID NO: 2363144 - RNA, 19 nt, Artificial Sequence
  Description of Artificial Sequence: Synthetic oligonucleotide
  Sense strand starting at position 153 of SEQ ID NO: 1885718
cugacuuucugaucagaga

SEQ ID NO: 2363145 - RNA, 19 nt, Artificial Sequence
  Description of Artificial Sequence: Synthetic oligonucleotide
  Antisense strand to SEQ ID NO: 2363144
ucucugaucagaaagucag

SEQ ID NO: 2363146 - RNA, 19 nt, Artificial Sequence
  Description of Artificial Sequence: Synthetic oligonucleotide
  Sense strand starting at position 242 of SEQ ID NO: 1885718
uguugacucuggccaauuu

SEQ ID NO: 2363147 - RNA, 19 nt, Artificial Sequence
  Description of Artificial Sequence: Synthetic oligonucleotide
  Antisense strand to SEQ ID NO: 2363146
aaauuggccagagucaaca

SEQ ID NO: 2363148 - RNA, 19 nt, Artificial Sequence
  Description of Artificial Sequence: Synthetic oligonucleotide
  Sense strand starting at position 377 of SEQ ID NO: 1885718
ucuccuugugcuggaaaga

SEQ ID NO: 2363149 - RNA, 19 nt, Artificial Sequence
  Description of Artificial Sequence: Synthetic oligonucleotide
  Antisense strand to SEQ ID NO: 2363148
ucuuuccagcacaaggaga

SEQ ID NO: 2363150 - RNA, 19 nt, Artificial Sequence
  Description of Artificial Sequence: Synthetic oligonucleotide
  Sense strand starting at position 450 of SEQ ID NO: 1885718
aagggaucaugucugcaag

SEQ ID NO: 2363151 - RNA, 19 nt, Artificial Sequence
  Description of Artificial Sequence: Synthetic oligonucleotide
  Antisense strand to SEQ ID NO: 2363150
cuugcagacaugaucccuu

SEQ ID NO: 2363152 - RNA, 19 nt, Artificial Sequence
  Description of Artificial Sequence: Synthetic oligonucleotide
  Sense strand starting at position 453 of SEQ ID NO: 1885718
ggaucaugucugcaagcug

SEQ ID NO: 2363153 - RNA, 19 nt, Artificial Sequence
  Description of Artificial Sequence: Synthetic oligonucleotide
  Antisense strand to SEQ ID NO: 2363152
cagcuugcagacaugaucc

SEQ ID NO: 2363154 - RNA, 19 nt, Artificial Sequence
  Description of Artificial Sequence: Synthetic oligonucleotide
  Sense strand starting at position 753 of SEQ ID NO: 1885718
cugcauguccucgaacuga

SEQ ID NO: 2363155 - RNA, 19 nt, Artificial Sequence
  Description of Artificial Sequence: Synthetic oligonucleotide
  Antisense strand to SEQ ID NO: 2363154
ucaguucgaggacaugcag

SEQ ID NO: 2363156 - RNA, 19 nt, Artificial Sequence
  Description of Artificial Sequence: Synthetic oligonucleotide
  Sense strand starting at position 990 of SEQ ID NO: 1885718
gaaugaagguccuuacagu

SEQ ID NO: 2363157 - RNA, 19 nt, Artificial Sequence
  Description of Artificial Sequence: Synthetic oligonucleotide
  Antisense strand to SEQ ID NO: 2363156
acuguaaggaccuucauuc

SEQ ID NO: 2363158 - RNA, 19 nt, Artificial Sequence
  Description of Artificial Sequence: Synthetic oligonucleotide
  Sense strand starting at position 991 of SEQ ID NO: 1885718
aaugaagguccuuacaguu

SEQ ID NO: 2363159 - RNA, 19 nt, Artificial Sequence
  Description of Artificial Sequence: Synthetic oligonucleotide
  Antisense strand to SEQ ID NO: 2363158
aacuguaaggaccuucauu

SEQ ID NO: 2363160 - RNA, 19 nt, Artificial Sequence
  Description of Artificial Sequence: Synthetic oligonucleotide
  Sense strand starting at position 1018 of SEQ ID NO: 1885718
caucgugguagguaaggau

SEQ ID NO: 2363161 - RNA, 19 nt, Artificial Sequence
  Description of Artificial Sequence: Synthetic oligonucleotide
  Antisense strand to SEQ ID NO: 2363160
auccuuaccuaccacgaug

SEQ ID NO: 2363162 - RNA, 19 nt, Artificial Sequence
  Description of Artificial Sequence: Synthetic oligonucleotide
  Sense strand starting at position 1060 of SEQ ID NO: 1885718
ugccauagacagugaaagu

SEQ ID NO: 2363163 - RNA, 19 nt, Artificial Sequence
  Description of Artificial Sequence: Synthetic oligonucleotide
  Antisense strand to SEQ ID NO: 2363162
acuuucacugucuauggca

SEQ ID NO: 2363164 - RNA, 19 nt, Artificial Sequence
  Description of Artificial Sequence: Synthetic oligonucleotide
  Sense strand starting at position 1102 of SEQ ID NO: 1885718
cagagugagucugcaggaa

SEQ ID NO: 2363165 - RNA, 19 nt, Artificial Sequence
  Description of Artificial Sequence: Synthetic oligonucleotide
  Antisense strand to SEQ ID NO: 2363164
uuccugcagacucacucug

SEQ ID NO: 2363166 - RNA, 19 nt, Artificial Sequence
  Description of Artificial Sequence: Synthetic oligonucleotide
  Sense strand starting at position 1270 of SEQ ID NO: 1885718
gaagaugaguuugaggaua

SEQ ID NO: 2363167 - RNA, 19 nt, Artificial Sequence
  Description of Artificial Sequence: Synthetic oligonucleotide
  Antisense strand to SEQ ID NO: 2363166
uauccucaaacucaucuuc

SEQ ID NO: 2363168 - RNA, 19 nt, Artificial Sequence
  Description of Artificial Sequence: Synthetic oligonucleotide
  Sense strand starting at position 1492 of SEQ ID NO: 1885718
ggaggauucgggcagcuaa

SEQ ID NO: 2363169 - RNA, 19 nt, Artificial Sequence
  Description of Artificial Sequence: Synthetic oligonucleotide
  Antisense strand to SEQ ID NO: 2363168
uuagcugcccgaauccucc

SEQ ID NO: 2363170 - RNA, 19 nt, Artificial Sequence
  Description of Artificial Sequence: Synthetic oligonucleotide
  Sense strand starting at position 1635 of SEQ ID NO: 1885718
gaaagagauugacaaagag

SEQ ID NO: 2363171 - RNA, 19 nt, Artificial Sequence
  Description of Artificial Sequence: Synthetic oligonucleotide
  Antisense strand to SEQ ID NO: 2363170
cucuuugucaaucucuuuc

SEQ ID NO: 2363172 - RNA, 19 nt, Artificial Sequence
  Description of Artificial Sequence: Synthetic oligonucleotide
  Sense strand starting at position 1665 of SEQ ID NO: 1885718
ggaugaagguuaguguagu

SEQ ID NO: 2363173 - RNA, 19 nt, Artificial Sequence
  Description of Artificial Sequence: Synthetic oligonucleotide
  Antisense strand to SEQ ID NO: 2363172
acuacacuaaccuucaucc

SEQ ID NO: 2363174 - RNA, 19 nt, Artificial Sequence
  Description of Artificial Sequence: Synthetic oligonucleotide
  Sense strand starting at position 1675 of SEQ ID NO: 1885718
uaguguagugacgagacaa

SEQ ID NO: 2363175 - RNA, 19 nt, Artificial Sequence
  Description of Artificial Sequence: Synthetic oligonucleotide
  Antisense strand to SEQ ID NO: 2363174
uugucucgucacuacacua

SEQ ID NO: 2363176 - RNA, 19 nt, Artificial Sequence
  Description of Artificial Sequence: Synthetic oligonucleotide
  Sense strand starting at position 1746 of SEQ ID NO: 1885718
agcaguggugugaguuaga

SEQ ID NO: 2363177 - RNA, 19 nt, Artificial Sequence
  Description of Artificial Sequence: Synthetic oligonucleotide
  Antisense strand to SEQ ID NO: 2363176
ucuaacucacaccacugcu

SEQ ID NO: 2363178 - RNA, 19 nt, Artificial Sequence
  Description of Artificial Sequence: Synthetic oligonucleotide
  Sense strand starting at position 1749 of SEQ ID NO: 1885718
aguggugugaguuagaaua

SEQ ID NO: 2363179 - RNA, 19 nt, Artificial Sequence
  Description of Artificial Sequence: Synthetic oligonucleotide
  Antisense strand to SEQ ID NO: 2363178
uauucuaacucacaccacu

SEQ ID NO: 2363180 - RNA, 19 nt, Artificial Sequence
  Description of Artificial Sequence: Synthetic oligonucleotide
  Sense strand starting at position 1762 of SEQ ID NO: 1885718
agaauaagaucaguacgcu

SEQ ID NO: 2363181 - RNA, 19 nt, Artificial Sequence
  Description of Artificial Sequence: Synthetic oligonucleotide
  Antisense strand to SEQ ID NO: 2363180
agcguacugaucuuauucu

SEQ ID NO: 2363182 - RNA, 19 nt, Artificial Sequence
  Description of Artificial Sequence: Synthetic oligonucleotide
  Sense strand starting at position 1763 of SEQ ID NO: 1885718
gaauaagaucaguacgcuu

SEQ ID NO: 2363183 - RNA, 19 nt, Artificial Sequence
  Description of Artificial Sequence: Synthetic oligonucleotide
  Antisense strand to SEQ ID NO: 2363182
aagcguacugaucuuauuc

SEQ ID NO: 2363184 - RNA, 19 nt, Artificial Sequence
  Description of Artificial Sequence: Synthetic oligonucleotide
  Sense strand starting at position 1805 of SEQ ID NO: 1885718
ugcuuagaggucuggaauu

SEQ ID NO: 2363185 - RNA, 19 nt, Artificial Sequence
  Description of Artificial Sequence: Synthetic oligonucleotide
  Antisense strand to SEQ ID NO: 2363184
aauuccagaccucuaagca

SEQ ID NO: 2363186 - RNA, 19 nt, Artificial Sequence
  Description of Artificial Sequence: Synthetic oligonucleotide
  Sense strand starting at position 1835 of SEQ ID NO: 1885718
gucaaacggucucuaauaa

SEQ ID NO: 2363187 - RNA, 19 nt, Artificial Sequence
  Description of Artificial Sequence: Synthetic oligonucleotide
  Antisense strand to SEQ ID NO: 2363186
uuauuagagaccguuugac

SEQ ID NO: 2363188 - RNA, 19 nt, Artificial Sequence
  Description of Artificial Sequence: Synthetic oligonucleotide
  Sense strand starting at position 1958 of SEQ ID NO: 1885718
cugggaaguugucucuaca

SEQ ID NO: 2363189 - RNA, 19 nt, Artificial Sequence
  Description of Artificial Sequence: Synthetic oligonucleotide
  Antisense strand to SEQ ID NO: 2363188
uguagagacaacuucccag

SEQ ID NO: 2363190 - RNA, 19 nt, Artificial Sequence
  Description of Artificial Sequence: Synthetic oligonucleotide
  Sense strand starting at position 2049 of SEQ ID NO: 1885718
guugaagacuacucuagaa

SEQ ID NO: 2363191 - RNA, 19 nt, Artificial Sequence
  Description of Artificial Sequence: Synthetic oligonucleotide
  Antisense strand to SEQ ID NO: 2363190
uucuagaguagucuucaac

SEQ ID NO: 2363192 - RNA, 19 nt, Artificial Sequence
  Description of Artificial Sequence: Synthetic oligonucleotide
  Sense strand starting at position 2106 of SEQ ID NO: 1885718
ggcugaucgguggaagcuu

SEQ ID NO: 2363193 - RNA, 19 nt, Artificial Sequence
  Description of Artificial Sequence: Synthetic oligonucleotide
  Antisense strand to SEQ ID NO: 2363192
aagcuuccaccgaucagcc

SEQ ID NO: 2363194 - RNA, 19 nt, Artificial Sequence
  Description of Artificial Sequence: Synthetic oligonucleotide
  Sense strand starting at position 2240 of SEQ ID NO: 1885718
gcagaaguguagcucagau

SEQ ID NO: 2363195 - RNA, 19 nt, Artificial Sequence
  Description of Artificial Sequence: Synthetic oligonucleotide
  Antisense strand to SEQ ID NO: 2363194
aucugagcuacacuucugc

SEQ ID NO: 2363196 - RNA, 19 nt, Artificial Sequence
  Description of Artificial Sequence: Synthetic oligonucleotide
  Sense strand starting at position 2252 of SEQ ID NO: 1885718
cucagauuucucgggcuau

SEQ ID NO: 2363197 - RNA, 19 nt, Artificial Sequence
  Description of Artificial Sequence: Synthetic oligonucleotide
  Antisense strand to SEQ ID NO: 2363196
auagcccgagaaaucugag

SEQ ID NO: 2363198 - RNA, 19 nt, Artificial Sequence
  Description of Artificial Sequence: Synthetic oligonucleotide
  Sense strand starting at position 2300 of SEQ ID NO: 1885718
gggagugaaacuuguagcu

SEQ ID NO: 2363199 - RNA, 19 nt, Artificial Sequence
  Description of Artificial Sequence: Synthetic oligonucleotide
  Antisense strand to SEQ ID NO: 2363198
agcuacaaguuucacuccc

SEQ ID NO: 2363200 - RNA, 19 nt, Artificial Sequence
  Description of Artificial Sequence: Synthetic oligonucleotide
  Sense strand starting at position 2315 of SEQ ID NO: 1885718
agcucagugacugaguauu

SEQ ID NO: 2363201 - RNA, 19 nt, Artificial Sequence
  Description of Artificial Sequence: Synthetic oligonucleotide
  Antisense strand to SEQ ID NO: 2363200
aauacucagucacugagcu

SEQ ID NO: 2363202 - RNA, 19 nt, Artificial Sequence
  Description of Artificial Sequence: Synthetic oligonucleotide
  Sense strand starting at position 2321 of SEQ ID NO: 1885718
gugacugaguauucuaaag

SEQ ID NO: 2363203 - RNA, 19 nt, Artificial Sequence
  Description of Artificial Sequence: Synthetic oligonucleotide
  Antisense strand to SEQ ID NO: 2363202
cuuuagaauacucagucac

SEQ ID NO: 2363204 - RNA, 19 nt, Artificial Sequence
  Description of Artificial Sequence: Synthetic oligonucleotide
  Sense strand starting at position 2542 of SEQ ID NO: 1885718
cugaauaaacuccgcaagu

SEQ ID NO: 2363205 - RNA, 19 nt, Artificial Sequence
  Description of Artificial Sequence: Synthetic oligonucleotide
  Antisense strand to SEQ ID NO: 2363204
acuugcggaguuuauucag

SEQ ID NO: 2363206 - RNA, 19 nt, Artificial Sequence
  Description of Artificial Sequence: Synthetic oligonucleotide
  Sense strand starting at position 2543 of SEQ ID NO: 1885718
ugaauaaacuccgcaaguu

SEQ ID NO: 2363207 - RNA, 19 nt, Artificial Sequence
  Description of Artificial Sequence: Synthetic oligonucleotide
  Antisense strand to SEQ ID NO: 2363206
aacuugcggaguuuauuca

SEQ ID NO: 2363208 - RNA, 19 nt, Artificial Sequence
  Description of Artificial Sequence: Synthetic oligonucleotide
  Sense strand starting at position 2562 of SEQ ID NO: 1885718
caacauuagugggugagga

SEQ ID NO: 2363209 - RNA, 19 nt, Artificial Sequence
  Description of Artificial Sequence: Synthetic oligonucleotide
  Antisense strand to SEQ ID NO: 2363208
uccucacccacuaauguug

SEQ ID NO: 2363210 - RNA, 19 nt, Artificial Sequence
  Description of Artificial Sequence: Synthetic oligonucleotide
  Sense strand starting at position 2657 of SEQ ID NO: 1885718
gcuggaugcagugggauua

SEQ ID NO: 2363211 - RNA, 19 nt, Artificial Sequence
  Description of Artificial Sequence: Synthetic oligonucleotide
  Antisense strand to SEQ ID NO: 2363210
uaaucccacugcauccagc

SEQ ID NO: 2363212 - RNA, 19 nt, Artificial Sequence
  Description of Artificial Sequence: Synthetic oligonucleotide
  Sense strand starting at position 2946 of SEQ ID NO: 1885718
ugcugauguggagguaaga

SEQ ID NO: 2363213 - RNA, 19 nt, Artificial Sequence
  Description of Artificial Sequence: Synthetic oligonucleotide
  Antisense strand to SEQ ID NO: 2363212
ucuuaccuccacaucagca

SEQ ID NO: 2363214 - RNA, 19 nt, Artificial Sequence
  Description of Artificial Sequence: Synthetic oligonucleotide
  Sense strand starting at position 3028 of SEQ ID NO: 1885718
cccaguuaguuacuacauu

SEQ ID NO: 2363215 - RNA, 19 nt, Artificial Sequence
  Description of Artificial Sequence: Synthetic oligonucleotide
  Antisense strand to SEQ ID NO: 2363214
aauguaguaacuaacuggg

SEQ ID NO: 2363216 - RNA, 19 nt, Artificial Sequence
  Description of Artificial Sequence: Synthetic oligonucleotide
  Sense strand starting at position 3108 of SEQ ID NO: 1885718
uuugacagcucuccaguaa

SEQ ID NO: 2363217 - RNA, 19 nt, Artificial Sequence
  Description of Artificial Sequence: Synthetic oligonucleotide
  Antisense strand to SEQ ID NO: 2363216
uuacuggagagcugucaaa

SEQ ID NO: 2363218 - RNA, 19 nt, Artificial Sequence
  Description of Artificial Sequence: Synthetic oligonucleotide
  Sense strand starting at position 13 of SEQ ID NO: 1885719
gacaaugggcuauguguuu

SEQ ID NO: 2363219 - RNA, 19 nt, Artificial Sequence
  Description of Artificial Sequence: Synthetic oligonucleotide
  Antisense strand to SEQ ID NO: 2363218
aaacacauagcccauuguc

SEQ ID NO: 2363220 - RNA, 19 nt, Artificial Sequence
  Description of Artificial Sequence: Synthetic oligonucleotide
  Sense strand starting at position 46 of SEQ ID NO: 1885719
ccuggccauuuguaaauaa

SEQ ID NO: 2363221 - RNA, 19 nt, Artificial Sequence
  Description of Artificial Sequence: Synthetic oligonucleotide
  Antisense strand to SEQ ID NO: 2363220
uuauuuacaaauggccagg

SEQ ID NO: 2363222 - RNA, 19 nt, Artificial Sequence
  Description of Artificial Sequence: Synthetic oligonucleotide
  Sense strand starting at position 67 of SEQ ID NO: 1885719
cucggauauuagcuaguuu

SEQ ID NO: 2363223 - RNA, 19 nt, Artificial Sequence
  Description of Artificial Sequence: Synthetic oligonucleotide
  Antisense strand to SEQ ID NO: 2363222
aaacuagcuaauauccgag

SEQ ID NO: 2363224 - RNA, 19 nt, Artificial Sequence
  Description of Artificial Sequence: Synthetic oligonucleotide
  Sense strand starting at position 71 of SEQ ID NO: 1885719
gauauuagcuaguuuguca

SEQ ID NO: 2363225 - RNA, 19 nt, Artificial Sequence
  Description of Artificial Sequence: Synthetic oligonucleotide
  Antisense strand to SEQ ID NO: 2363224
ugacaaacuagcuaauauc

SEQ ID NO: 2363226 - RNA, 19 nt, Artificial Sequence
  Description of Artificial Sequence: Synthetic oligonucleotide
  Sense strand starting at position 74 of SEQ ID NO: 1885719
auuagcuaguuugucauuu

SEQ ID NO: 2363227 - RNA, 19 nt, Artificial Sequence
  Description of Artificial Sequence: Synthetic oligonucleotide
  Antisense strand to SEQ ID NO: 2363226
aaaugacaaacuagcuaau

SEQ ID NO: 2363228 - RNA, 19 nt, Artificial Sequence
  Description of Artificial Sequence: Synthetic oligonucleotide
  Sense strand starting at position 78 of SEQ ID NO: 1885719
gcuaguuugucauuuaucu

SEQ ID NO: 2363229 - RNA, 19 nt, Artificial Sequence
  Description of Artificial Sequence: Synthetic oligonucleotide
  Antisense strand to SEQ ID NO: 2363228
agauaaaugacaaacuagc

SEQ ID NO: 2363230 - RNA, 19 nt, Artificial Sequence
  Description of Artificial Sequence: Synthetic oligonucleotide
  Sense strand starting at position 82 of SEQ ID NO: 1885719
guuugucauuuaucuugca

SEQ ID NO: 2363231 - RNA, 19 nt, Artificial Sequence
  Description of Artificial Sequence: Synthetic oligonucleotide
  Antisense strand to SEQ ID NO: 2363230
ugcaagauaaaugacaaac

SEQ ID NO: 2363232 - RNA, 19 nt, Artificial Sequence
  Description of Artificial Sequence: Synthetic oligonucleotide
  Sense strand starting at position 134 of SEQ ID NO: 1885719
auguuugcacuuugaauaa

SEQ ID NO: 2363233 - RNA, 19 nt, Artificial Sequence
  Description of Artificial Sequence: Synthetic oligonucleotide
  Antisense strand to SEQ ID NO: 2363232
uuauucaaagugcaaacau

SEQ ID NO: 2363234 - RNA, 19 nt, Artificial Sequence
  Description of Artificial Sequence: Synthetic oligonucleotide
  Sense strand starting at position 190 of SEQ ID NO: 1885719
ucucaagucuguuauuuga

SEQ ID NO: 2363235 - RNA, 19 nt, Artificial Sequence
  Description of Artificial Sequence: Synthetic oligonucleotide
  Antisense strand to SEQ ID NO: 2363234
ucaaauaacagacuugaga

SEQ ID NO: 2363236 - RNA, 19 nt, Artificial Sequence
  Description of Artificial Sequence: Synthetic oligonucleotide
  Sense strand starting at position 229 of SEQ ID NO: 1885719
ucguacauuuaagagguua

SEQ ID NO: 2363237 - RNA, 19 nt, Artificial Sequence
  Description of Artificial Sequence: Synthetic oligonucleotide
  Antisense strand to SEQ ID NO: 2363236
uaaccucuuaaauguacga

SEQ ID NO: 2363238 - RNA, 19 nt, Artificial Sequence
  Description of Artificial Sequence: Synthetic oligonucleotide
  Sense strand starting at position 258 of SEQ ID NO: 1885719
gguacucauugagcagaau

SEQ ID NO: 2363239 - RNA, 19 nt, Artificial Sequence
  Description of Artificial Sequence: Synthetic oligonucleotide
  Antisense strand to SEQ ID NO: 2363238
auucugcucaaugaguacc

SEQ ID NO: 2363240 - RNA, 19 nt, Artificial Sequence
  Description of Artificial Sequence: Synthetic oligonucleotide
  Sense strand starting at position 259 of SEQ ID NO: 1885719
guacucauugagcagaauu

SEQ ID NO: 2363241 - RNA, 19 nt, Artificial Sequence
  Description of Artificial Sequence: Synthetic oligonucleotide
  Antisense strand to SEQ ID NO: 2363240
aauucugcucaaugaguac

SEQ ID NO: 2363242 - RNA, 19 nt, Artificial Sequence
  Description of Artificial Sequence: Synthetic oligonucleotide
  Sense strand starting at position 286 of SEQ ID NO: 1885719
aucuaaucaccuugccgau

SEQ ID NO: 2363243 - RNA, 19 nt, Artificial Sequence
  Description of Artificial Sequence: Synthetic oligonucleotide
  Antisense strand to SEQ ID NO: 2363242
aucggcaaggugauuagau

SEQ ID NO: 2363244 - RNA, 19 nt, Artificial Sequence
  Description of Artificial Sequence: Synthetic oligonucleotide
  Sense strand starting at position 313 of SEQ ID NO: 1885719
aguguccauuuagaaacau

SEQ ID NO: 2363245 - RNA, 19 nt, Artificial Sequence
  Description of Artificial Sequence: Synthetic oligonucleotide
  Antisense strand to SEQ ID NO: 2363244
auguuucuaaauggacacu

SEQ ID NO: 2363246 - RNA, 19 nt, Artificial Sequence
  Description of Artificial Sequence: Synthetic oligonucleotide
  Sense strand starting at position 1936 of SEQ ID NO: 1885719
gugcacugucaaggaaaga

SEQ ID NO: 2363247 - RNA, 19 nt, Artificial Sequence
  Description of Artificial Sequence: Synthetic oligonucleotide
  Antisense strand to SEQ ID NO: 2363246
ucuuuccuugacagugcac

SEQ ID NO: 2363248 - RNA, 19 nt, Artificial Sequence
  Description of Artificial Sequence: Synthetic oligonucleotide
  Sense strand starting at position 2005 of SEQ ID NO: 1885719
cucacugcuuugcuagaga

SEQ ID NO: 2363249 - RNA, 19 nt, Artificial Sequence
  Description of Artificial Sequence: Synthetic oligonucleotide
  Antisense strand to SEQ ID NO: 2363248
ucucuagcaaagcagugag

SEQ ID NO: 2363250 - RNA, 19 nt, Artificial Sequence
  Description of Artificial Sequence: Synthetic oligonucleotide
  Sense strand starting at position 2063 of SEQ ID NO: 1885719
cugggugaacuuuguggau

SEQ ID NO: 2363251 - RNA, 19 nt, Artificial Sequence
  Description of Artificial Sequence: Synthetic oligonucleotide
  Antisense strand to SEQ ID NO: 2363250
auccacaaaguucacccag

SEQ ID NO: 2363252 - RNA, 19 nt, Artificial Sequence
  Description of Artificial Sequence: Synthetic oligonucleotide
  Sense strand starting at position 2067 of SEQ ID NO: 1885719
gugaacuuuguggauauag

SEQ ID NO: 2363253 - RNA, 19 nt, Artificial Sequence
  Description of Artificial Sequence: Synthetic oligonucleotide
  Antisense strand to SEQ ID NO: 2363252
cuauauccacaaaguucac

SEQ ID NO: 2363254 - RNA, 19 nt, Artificial Sequence
  Description of Artificial Sequence: Synthetic oligonucleotide
  Sense strand starting at position 2069 of SEQ ID NO: 1885719
gaacuuuguggauauaguc

SEQ ID NO: 2363255 - RNA, 19 nt, Artificial Sequence
  Description of Artificial Sequence: Synthetic oligonucleotide
  Antisense strand to SEQ ID NO: 2363254
gacuauauccacaaaguuc

SEQ ID NO: 2363256 - RNA, 19 nt, Artificial Sequence
  Description of Artificial Sequence: Synthetic oligonucleotide
  Sense strand starting at position 2165 of SEQ ID NO: 1885719
uggcaagucuuccuaaaug

SEQ ID NO: 2363257 - RNA, 19 nt, Artificial Sequence
  Description of Artificial Sequence: Synthetic oligonucleotide
  Antisense strand to SEQ ID NO: 2363256
cauuuaggaagacuugcca

SEQ ID NO: 2363258 - RNA, 19 nt, Artificial Sequence
  Description of Artificial Sequence: Synthetic oligonucleotide
  Sense strand starting at position 2192 of SEQ ID NO: 1885719
aguccuagugcugcuguaa

SEQ ID NO: 2363259 - RNA, 19 nt, Artificial Sequence
  Description of Artificial Sequence: Synthetic oligonucleotide
  Antisense strand to SEQ ID NO: 2363258
uuacagcagcacuaggacu

SEQ ID NO: 2363260 - RNA, 19 nt, Artificial Sequence
  Description of Artificial Sequence: Synthetic oligonucleotide
  Sense strand starting at position 2193 of SEQ ID NO: 1885719
guccuagugcugcuguaaa

SEQ ID NO: 2363261 - RNA, 19 nt, Artificial Sequence
  Description of Artificial Sequence: Synthetic oligonucleotide
  Antisense strand to SEQ ID NO: 2363260
uuuacagcagcacuaggac

SEQ ID NO: 2363262 - RNA, 19 nt, Artificial Sequence
  Description of Artificial Sequence: Synthetic oligonucleotide
  Sense strand starting at position 2206 of SEQ ID NO: 1885719
uguaaacauuuccaacagu

SEQ ID NO: 2363263 - RNA, 19 nt, Artificial Sequence
  Description of Artificial Sequence: Synthetic oligonucleotide
  Antisense strand to SEQ ID NO: 2363262
acuguuggaaauguuuaca

SEQ ID NO: 2363264 - RNA, 19 nt, Artificial Sequence
  Description of Artificial Sequence: Synthetic oligonucleotide
  Sense strand starting at position 2246 of SEQ ID NO: 1885719
ucuggugucaguugucaaa

SEQ ID NO: 2363265 - RNA, 19 nt, Artificial Sequence
  Description of Artificial Sequence: Synthetic oligonucleotide
  Antisense strand to SEQ ID NO: 2363264
uuugacaacugacaccaga

SEQ ID NO: 2363266 - RNA, 19 nt, Artificial Sequence
  Description of Artificial Sequence: Synthetic oligonucleotide
  Sense strand starting at position 2404 of SEQ ID NO: 1885719
uccuguaaugaaugaagua

SEQ ID NO: 2363267 - RNA, 19 nt, Artificial Sequence
  Description of Artificial Sequence: Synthetic oligonucleotide
  Antisense strand to SEQ ID NO: 2363266
uacuucauucauuacagga

SEQ ID NO: 2363268 - RNA, 19 nt, Artificial Sequence
  Description of Artificial Sequence: Synthetic oligonucleotide
  Sense strand starting at position 2581 of SEQ ID NO: 1885719
guuucucaccaaggaguaa

SEQ ID NO: 2363269 - RNA, 19 nt, Artificial Sequence
  Description of Artificial Sequence: Synthetic oligonucleotide
  Antisense strand to SEQ ID NO: 2363268
uuacuccuuggugagaaac

SEQ ID NO: 2363270 - RNA, 19 nt, Artificial Sequence
  Description of Artificial Sequence: Synthetic oligonucleotide
  Sense strand starting at position 2596 of SEQ ID NO: 1885719
guaauaagacccugagucu

SEQ ID NO: 2363271 - RNA, 19 nt, Artificial Sequence
  Description of Artificial Sequence: Synthetic oligonucleotide
  Antisense strand to SEQ ID NO: 2363270
agacucagggucuuauuac

SEQ ID NO: 2363272 - RNA, 19 nt, Artificial Sequence
  Description of Artificial Sequence: Synthetic oligonucleotide
  Sense strand starting at position 2878 of SEQ ID NO: 1885719
gagaaagcagcuuagaagu

SEQ ID NO: 2363273 - RNA, 19 nt, Artificial Sequence
  Description of Artificial Sequence: Synthetic oligonucleotide
  Antisense strand to SEQ ID NO: 2363272
acuucuaagcugcuuucuc

SEQ ID NO: 2363274 - RNA, 19 nt, Artificial Sequence
  Description of Artificial Sequence: Synthetic oligonucleotide
  Sense strand starting at position 2994 of SEQ ID NO: 1885719
uuaguauuacgguagaaca

SEQ ID NO: 2363275 - RNA, 19 nt, Artificial Sequence
  Description of Artificial Sequence: Synthetic oligonucleotide
  Antisense strand to SEQ ID NO: 2363274
uguucuaccguaauacuaa

SEQ ID NO: 2363276 - RNA, 19 nt, Artificial Sequence
  Description of Artificial Sequence: Synthetic oligonucleotide
  Sense strand starting at position 2996 of SEQ ID NO: 1885719
aguauuacgguagaacauu

SEQ ID NO: 2363277 - RNA, 19 nt, Artificial Sequence
  Description of Artificial Sequence: Synthetic oligonucleotide
  Antisense strand to SEQ ID NO: 2363276
aauguucuaccguaauacu

SEQ ID NO: 2363278 - RNA, 19 nt, Artificial Sequence
  Description of Artificial Sequence: Synthetic oligonucleotide
  Sense strand starting at position 3309 of SEQ ID NO: 1885719
gcaacaauggacugucauu

SEQ ID NO: 2363279 - RNA, 19 nt, Artificial Sequence
  Description of Artificial Sequence: Synthetic oligonucleotide
  Antisense strand to SEQ ID NO: 2363278
aaugacaguccauuguugc

SEQ ID NO: 2363280 - RNA, 19 nt, Artificial Sequence
  Description of Artificial Sequence: Synthetic oligonucleotide
  Sense strand starting at position 3500 of SEQ ID NO: 1885719
ggauguguggcgcucgaga

SEQ ID NO: 2363281 - RNA, 19 nt, Artificial Sequence
  Description of Artificial Sequence: Synthetic oligonucleotide
  Antisense strand to SEQ ID NO: 2363280
ucucgagcgccacacaucc

SEQ ID NO: 2363282 - RNA, 19 nt, Artificial Sequence
  Description of Artificial Sequence: Synthetic oligonucleotide
  Sense strand starting at position 3516 of SEQ ID NO: 1885719
agaagcauguccucaacaa

SEQ ID NO: 2363283 - RNA, 19 nt, Artificial Sequence
  Description of Artificial Sequence: Synthetic oligonucleotide
  Antisense strand to SEQ ID NO: 2363282
uuguugaggacaugcuucu

SEQ ID NO: 2363284 - RNA, 19 nt, Artificial Sequence
  Description of Artificial Sequence: Synthetic oligonucleotide
  Sense strand starting at position 3546 of SEQ ID NO: 1885719
guuguugcccaguaaugga

SEQ ID NO: 2363285 - RNA, 19 nt, Artificial Sequence
  Description of Artificial Sequence: Synthetic oligonucleotide
  Antisense strand to SEQ ID NO: 2363284
uccauuacugggcaacaac

SEQ ID NO: 2363286 - RNA, 19 nt, Artificial Sequence
  Description of Artificial Sequence: Synthetic oligonucleotide
  Sense strand starting at position 3773 of SEQ ID NO: 1885719
aguauuauguguccauuau

SEQ ID NO: 2363287 - RNA, 19 nt, Artificial Sequence
  Description of Artificial Sequence: Synthetic oligonucleotide
  Antisense strand to SEQ ID NO: 2363286
auaauggacacauaauacu

SEQ ID NO: 2363288 - RNA, 19 nt, Artificial Sequence
  Description of Artificial Sequence: Synthetic oligonucleotide
  Sense strand starting at position 3774 of SEQ ID NO: 1885719
guauuauguguccauuaua

SEQ ID NO: 2363289 - RNA, 19 nt, Artificial Sequence
  Description of Artificial Sequence: Synthetic oligonucleotide
  Antisense strand to SEQ ID NO: 2363288
uauaauggacacauaauac

SEQ ID NO: 2363290 - RNA, 19 nt, Artificial Sequence
  Description of Artificial Sequence: Synthetic oligonucleotide
  Sense strand starting at position 3777 of SEQ ID NO: 1885719
uuauguguccauuauaaag

SEQ ID NO: 2363291 - RNA, 19 nt, Artificial Sequence
  Description of Artificial Sequence: Synthetic oligonucleotide
  Antisense strand to SEQ ID NO: 2363290
cuuuauaauggacacauaa

SEQ ID NO: 2363292 - RNA, 19 nt, Artificial Sequence
  Description of Artificial Sequence: Synthetic oligonucleotide
  Sense strand starting at position 3808 of SEQ ID NO: 1885719
aagcuaaagggauggcaua

SEQ ID NO: 2363293 - RNA, 19 nt, Artificial Sequence
  Description of Artificial Sequence: Synthetic oligonucleotide
  Antisense strand to SEQ ID NO: 2363292
uaugccaucccuuuagcuu

SEQ ID NO: 2363294 - RNA, 19 nt, Artificial Sequence
  Description of Artificial Sequence: Synthetic oligonucleotide
  Sense strand starting at position 3856 of SEQ ID NO: 1885719
cuuguuauuucggcccuaa

SEQ ID NO: 2363295 - RNA, 19 nt, Artificial Sequence
  Description of Artificial Sequence: Synthetic oligonucleotide
  Antisense strand to SEQ ID NO: 2363294
uuagggccgaaauaacaag

SEQ ID NO: 2363296 - RNA, 19 nt, Artificial Sequence
  Description of Artificial Sequence: Synthetic oligonucleotide
  Sense strand starting at position 3869 of SEQ ID NO: 1885719
cccuaauggagauacguuu

SEQ ID NO: 2363297 - RNA, 19 nt, Artificial Sequence
  Description of Artificial Sequence: Synthetic oligonucleotide
  Antisense strand to SEQ ID NO: 2363296
aaacguaucuccauuaggg

SEQ ID NO: 2363298 - RNA, 19 nt, Artificial Sequence
  Description of Artificial Sequence: Synthetic oligonucleotide
  Sense strand starting at position 79 of SEQ ID NO: 1885720
ggcaguaggugccaguaaa

SEQ ID NO: 2363299 - RNA, 19 nt, Artificial Sequence
  Description of Artificial Sequence: Synthetic oligonucleotide
  Antisense strand to SEQ ID NO: 2363298
uuuacuggcaccuacugcc

SEQ ID NO: 2363300 - RNA, 19 nt, Artificial Sequence
  Description of Artificial Sequence: Synthetic oligonucleotide
  Sense strand starting at position 345 of SEQ ID NO: 1885720
agcaguucuugccaccaaa

SEQ ID NO: 2363301 - RNA, 19 nt, Artificial Sequence
  Description of Artificial Sequence: Synthetic oligonucleotide
  Antisense strand to SEQ ID NO: 2363300
uuugguggcaagaacugcu

SEQ ID NO: 2363302 - RNA, 19 nt, Artificial Sequence
  Description of Artificial Sequence: Synthetic oligonucleotide
  Sense strand starting at position 387 of SEQ ID NO: 1885720
agucacccuccagguuaua

SEQ ID NO: 2363303 - RNA, 19 nt, Artificial Sequence
  Description of Artificial Sequence: Synthetic oligonucleotide
  Antisense strand to SEQ ID NO: 2363302
uauaaccuggagggugacu

SEQ ID NO: 2363304 - RNA, 19 nt, Artificial Sequence
  Description of Artificial Sequence: Synthetic oligonucleotide
  Sense strand starting at position 428 of SEQ ID NO: 1885720
gggcuuggcucacaaaggu

SEQ ID NO: 2363305 - RNA, 19 nt, Artificial Sequence
  Description of Artificial Sequence: Synthetic oligonucleotide
  Antisense strand to SEQ ID NO: 2363304
accuuugugagccaagccc

SEQ ID NO: 2363306 - RNA, 19 nt, Artificial Sequence
  Description of Artificial Sequence: Synthetic oligonucleotide
  Sense strand starting at position 524 of SEQ ID NO: 1885720
uguccauacgaagguagau

SEQ ID NO: 2363307 - RNA, 19 nt, Artificial Sequence
  Description of Artificial Sequence: Synthetic oligonucleotide
  Antisense strand to SEQ ID NO: 2363306
aucuaccuucguauggaca

SEQ ID NO: 2363308 - RNA, 19 nt, Artificial Sequence
  Description of Artificial Sequence: Synthetic oligonucleotide
  Sense strand starting at position 1315 of SEQ ID NO: 1885720
gagcaucagcccugagaga

SEQ ID NO: 2363309 - RNA, 19 nt, Artificial Sequence
  Description of Artificial Sequence: Synthetic oligonucleotide
  Antisense strand to SEQ ID NO: 2363308
ucucucagggcugaugcuc

SEQ ID NO: 2363310 - RNA, 19 nt, Artificial Sequence
  Description of Artificial Sequence: Synthetic oligonucleotide
  Sense strand starting at position 1369 of SEQ ID NO: 1885720
guguauaccucuccaccau

SEQ ID NO: 2363311 - RNA, 19 nt, Artificial Sequence
  Description of Artificial Sequence: Synthetic oligonucleotide
  Antisense strand to SEQ ID NO: 2363310
augguggagagguauacac

SEQ ID NO: 2363312 - RNA, 19 nt, Artificial Sequence
  Description of Artificial Sequence: Synthetic oligonucleotide
  Sense strand starting at position 2154 of SEQ ID NO: 1885720
ccgggaugcaaucacagua

SEQ ID NO: 2363313 - RNA, 19 nt, Artificial Sequence
  Description of Artificial Sequence: Synthetic oligonucleotide
  Antisense strand to SEQ ID NO: 2363312
uacugugauugcaucccgg

SEQ ID NO: 2363314 - RNA, 19 nt, Artificial Sequence
  Description of Artificial Sequence: Synthetic oligonucleotide
  Sense strand starting at position 2230 of SEQ ID NO: 1885720
cucauuggcgucugugaaa

SEQ ID NO: 2363315 - RNA, 19 nt, Artificial Sequence
  Description of Artificial Sequence: Synthetic oligonucleotide
  Antisense strand to SEQ ID NO: 2363314
uuucacagacgccaaugag

SEQ ID NO: 2363316 - RNA, 19 nt, Artificial Sequence
  Description of Artificial Sequence: Synthetic oligonucleotide
  Sense strand starting at position 2564 of SEQ ID NO: 1885720
cagugugagccgugggaau

SEQ ID NO: 2363317 - RNA, 19 nt, Artificial Sequence
  Description of Artificial Sequence: Synthetic oligonucleotide
  Antisense strand to SEQ ID NO: 2363316
auucccacggcucacacug

SEQ ID NO: 2363318 - RNA, 19 nt, Artificial Sequence
  Description of Artificial Sequence: Synthetic oligonucleotide
  Sense strand starting at position 2565 of SEQ ID NO: 1885720
agugugagccgugggaaua

SEQ ID NO: 2363319 - RNA, 19 nt, Artificial Sequence
  Description of Artificial Sequence: Synthetic oligonucleotide
  Antisense strand to SEQ ID NO: 2363318
uauucccacggcucacacu

SEQ ID NO: 2363320 - RNA, 19 nt, Artificial Sequence
  Description of Artificial Sequence: Synthetic oligonucleotide
  Sense strand starting at position 2566 of SEQ ID NO: 1885720
gugugagccgugggaauaa

SEQ ID NO: 2363321 - RNA, 19 nt, Artificial Sequence
  Description of Artificial Sequence: Synthetic oligonucleotide
  Antisense strand to SEQ ID NO: 2363320
uuauucccacggcucacac

SEQ ID NO: 2363322 - RNA, 19 nt, Artificial Sequence
  Description of Artificial Sequence: Synthetic oligonucleotide
  Sense strand starting at position 2625 of SEQ ID NO: 1885720
ugccauuuguccucgccaa

SEQ ID NO: 2363323 - RNA, 19 nt, Artificial Sequence
  Description of Artificial Sequence: Synthetic oligonucleotide
  Antisense strand to SEQ ID NO: 2363322
uuggcgaggacaaauggca

SEQ ID NO: 2363324 - RNA, 19 nt, Artificial Sequence
  Description of Artificial Sequence: Synthetic oligonucleotide
  Sense strand starting at position 2626 of SEQ ID NO: 1885720
gccauuuguccucgccaag

SEQ ID NO: 2363325 - RNA, 19 nt, Artificial Sequence
  Description of Artificial Sequence: Synthetic oligonucleotide
  Antisense strand to SEQ ID NO: 2363324
cuuggcgaggacaaauggc

SEQ ID NO: 2363326 - RNA, 19 nt, Artificial Sequence
  Description of Artificial Sequence: Synthetic oligonucleotide
  Sense strand starting at position 2864 of SEQ ID NO: 1885720
aggcgugcucagcuguaga

SEQ ID NO: 2363327 - RNA, 19 nt, Artificial Sequence
  Description of Artificial Sequence: Synthetic oligonucleotide
  Antisense strand to SEQ ID NO: 2363326
ucuacagcugagcacgccu

SEQ ID NO: 2363328 - RNA, 19 nt, Artificial Sequence
  Description of Artificial Sequence: Synthetic oligonucleotide
  Sense strand starting at position 3080 of SEQ ID NO: 1885720
cacaguuccugcccgagua

SEQ ID NO: 2363329 - RNA, 19 nt, Artificial Sequence
  Description of Artificial Sequence: Synthetic oligonucleotide
  Antisense strand to SEQ ID NO: 2363328
uacucgggcaggaacugug

SEQ ID NO: 2363330 - RNA, 19 nt, Artificial Sequence
  Description of Artificial Sequence: Synthetic oligonucleotide
  Sense strand starting at position 3290 of SEQ ID NO: 1885720
ccacuaccuuugucacaga

SEQ ID NO: 2363331 - RNA, 19 nt, Artificial Sequence
  Description of Artificial Sequence: Synthetic oligonucleotide
  Antisense strand to SEQ ID NO: 2363330
ucugugacaaagguagugg

SEQ ID NO: 2363332 - RNA, 19 nt, Artificial Sequence
  Description of Artificial Sequence: Synthetic oligonucleotide
  Sense strand starting at position 3318 of SEQ ID NO: 1885720
cccaguuggucucacaguu

SEQ ID NO: 2363333 - RNA, 19 nt, Artificial Sequence
  Description of Artificial Sequence: Synthetic oligonucleotide
  Antisense strand to SEQ ID NO: 2363332
aacugugagaccaacuggg

SEQ ID NO: 2363334 - RNA, 19 nt, Artificial Sequence
  Description of Artificial Sequence: Synthetic oligonucleotide
  Sense strand starting at position 3384 of SEQ ID NO: 1885720
ggacacacucaucgcagaa

SEQ ID NO: 2363335 - RNA, 19 nt, Artificial Sequence
  Description of Artificial Sequence: Synthetic oligonucleotide
  Antisense strand to SEQ ID NO: 2363334
uucugcgaugagugugucc

SEQ ID NO: 2363336 - RNA, 19 nt, Artificial Sequence
  Description of Artificial Sequence: Synthetic oligonucleotide
  Sense strand starting at position 3652 of SEQ ID NO: 1885720
gucacuccucccugagcua

SEQ ID NO: 2363337 - RNA, 19 nt, Artificial Sequence
  Description of Artificial Sequence: Synthetic oligonucleotide
  Antisense strand to SEQ ID NO: 2363336
uagcucagggaggagugac

SEQ ID NO: 2363338 - RNA, 19 nt, Artificial Sequence
  Description of Artificial Sequence: Synthetic oligonucleotide
  Sense strand starting at position 3675 of SEQ ID NO: 1885720
gggauucacccgugagcug

SEQ ID NO: 2363339 - RNA, 19 nt, Artificial Sequence
  Description of Artificial Sequence: Synthetic oligonucleotide
  Antisense strand to SEQ ID NO: 2363338
cagcucacgggugaauccc

SEQ ID NO: 2363340 - RNA, 19 nt, Artificial Sequence
  Description of Artificial Sequence: Synthetic oligonucleotide
  Sense strand starting at position 3902 of SEQ ID NO: 1885720
uucgcucgcucccaguaaa

SEQ ID NO: 2363341 - RNA, 19 nt, Artificial Sequence
  Description of Artificial Sequence: Synthetic oligonucleotide
  Antisense strand to SEQ ID NO: 2363340
uuuacugggagcgagcgaa

SEQ ID NO: 2363342 - RNA, 19 nt, Artificial Sequence
  Description of Artificial Sequence: Synthetic oligonucleotide
  Sense strand starting at position 3915 of SEQ ID NO: 1885720
aguaaagucccacaaggua

SEQ ID NO: 2363343 - RNA, 19 nt, Artificial Sequence
  Description of Artificial Sequence: Synthetic oligonucleotide
  Antisense strand to SEQ ID NO: 2363342
uaccuugugggacuuuacu

SEQ ID NO: 2363344 - RNA, 19 nt, Artificial Sequence
  Description of Artificial Sequence: Synthetic oligonucleotide
  Sense strand starting at position 43 of SEQ ID NO: 1885721
ggaaaccucuccuugagca

SEQ ID NO: 2363345 - RNA, 19 nt, Artificial Sequence
  Description of Artificial Sequence: Synthetic oligonucleotide
  Antisense strand to SEQ ID NO: 2363344
ugcucaaggagagguuucc

SEQ ID NO: 2363346 - RNA, 19 nt, Artificial Sequence
  Description of Artificial Sequence: Synthetic oligonucleotide
  Sense strand starting at position 264 of SEQ ID NO: 1885721
ccacaauuccugugagaaa

SEQ ID NO: 2363347 - RNA, 19 nt, Artificial Sequence
  Description of Artificial Sequence: Synthetic oligonucleotide
  Antisense strand to SEQ ID NO: 2363346
uuucucacaggaauugugg

SEQ ID NO: 2363348 - RNA, 19 nt, Artificial Sequence
  Description of Artificial Sequence: Synthetic oligonucleotide
  Sense strand starting at position 362 of SEQ ID NO: 1885721
gugucauuauauccaggac

SEQ ID NO: 2363349 - RNA, 19 nt, Artificial Sequence
  Description of Artificial Sequence: Synthetic oligonucleotide
  Antisense strand to SEQ ID NO: 2363348
guccuggauauaaugacac

SEQ ID NO: 2363350 - RNA, 19 nt, Artificial Sequence
  Description of Artificial Sequence: Synthetic oligonucleotide
  Sense strand starting at position 538 of SEQ ID NO: 1885721
gccgaaagagccugaauua

SEQ ID NO: 2363351 - RNA, 19 nt, Artificial Sequence
  Description of Artificial Sequence: Synthetic oligonucleotide
  Antisense strand to SEQ ID NO: 2363350
uaauucaggcucuuucggc

SEQ ID NO: 2363352 - RNA, 19 nt, Artificial Sequence
  Description of Artificial Sequence: Synthetic oligonucleotide
  Sense strand starting at position 539 of SEQ ID NO: 1885721
ccgaaagagccugaauuac

SEQ ID NO: 2363353 - RNA, 19 nt, Artificial Sequence
  Description of Artificial Sequence: Synthetic oligonucleotide
  Antisense strand to SEQ ID NO: 2363352
guaauucaggcucuuucgg

SEQ ID NO: 2363354 - RNA, 19 nt, Artificial Sequence
  Description of Artificial Sequence: Synthetic oligonucleotide
  Sense strand starting at position 696 of SEQ ID NO: 1885721
gaggguuagcgcaaucggu

SEQ ID NO: 2363355 - RNA, 19 nt, Artificial Sequence
  Description of Artificial Sequence: Synthetic oligonucleotide
  Antisense strand to SEQ ID NO: 2363354
accgauugcgcuaacccuc

SEQ ID NO: 2363356 - RNA, 19 nt, Artificial Sequence
  Description of Artificial Sequence: Synthetic oligonucleotide
  Sense strand starting at position 759 of SEQ ID NO: 1885721
gcucgugucuccuuauuua

SEQ ID NO: 2363357 - RNA, 19 nt, Artificial Sequence
  Description of Artificial Sequence: Synthetic oligonucleotide
  Antisense strand to SEQ ID NO: 2363356
uaaauaaggagacacgagc

SEQ ID NO: 2363358 - RNA, 19 nt, Artificial Sequence
  Description of Artificial Sequence: Synthetic oligonucleotide
  Sense strand starting at position 762 of SEQ ID NO: 1885721
cgugucuccuuauuuaugu

SEQ ID NO: 2363359 - RNA, 19 nt, Artificial Sequence
  Description of Artificial Sequence: Synthetic oligonucleotide
  Antisense strand to SEQ ID NO: 2363358
acauaaauaaggagacacg

SEQ ID NO: 2363360 - RNA, 19 nt, Artificial Sequence
  Description of Artificial Sequence: Synthetic oligonucleotide
  Sense strand starting at position 982 of SEQ ID NO: 1885721
aguccuguuaaauacggau

SEQ ID NO: 2363361 - RNA, 19 nt, Artificial Sequence
  Description of Artificial Sequence: Synthetic oligonucleotide
  Antisense strand to SEQ ID NO: 2363360
auccguauuuaacaggacu

SEQ ID NO: 2363362 - RNA, 19 nt, Artificial Sequence
  Description of Artificial Sequence: Synthetic oligonucleotide
  Sense strand starting at position 1055 of SEQ ID NO: 1885721
cuucgugguuaaccauaga

SEQ ID NO: 2363363 - RNA, 19 nt, Artificial Sequence
  Description of Artificial Sequence: Synthetic oligonucleotide
  Antisense strand to SEQ ID NO: 2363362
ucuaugguuaaccacgaag

SEQ ID NO: 2363364 - RNA, 19 nt, Artificial Sequence
  Description of Artificial Sequence: Synthetic oligonucleotide
  Sense strand starting at position 1327 of SEQ ID NO: 1885721
agcguuaguuaguugauuu

SEQ ID NO: 2363365 - RNA, 19 nt, Artificial Sequence
  Description of Artificial Sequence: Synthetic oligonucleotide
  Antisense strand to SEQ ID NO: 2363364
aaaucaacuaacuaacgcu

SEQ ID NO: 2363366 - RNA, 19 nt, Artificial Sequence
  Description of Artificial Sequence: Synthetic oligonucleotide
  Sense strand starting at position 1328 of SEQ ID NO: 1885721
gcguuaguuaguugauuug

SEQ ID NO: 2363367 - RNA, 19 nt, Artificial Sequence
  Description of Artificial Sequence: Synthetic oligonucleotide
  Antisense strand to SEQ ID NO: 2363366
caaaucaacuaacuaacgc

SEQ ID NO: 2363368 - RNA, 19 nt, Artificial Sequence
  Description of Artificial Sequence: Synthetic oligonucleotide
  Sense strand starting at position 1334 of SEQ ID NO: 1885721
guuaguugauuugccggaa

SEQ ID NO: 2363369 - RNA, 19 nt, Artificial Sequence
  Description of Artificial Sequence: Synthetic oligonucleotide
  Antisense strand to SEQ ID NO: 2363368
uuccggcaaaucaacuaac

SEQ ID NO: 2363370 - RNA, 19 nt, Artificial Sequence
  Description of Artificial Sequence: Synthetic oligonucleotide
  Sense strand starting at position 1484 of SEQ ID NO: 1885721
cagcuaucgcguuuagggu

SEQ ID NO: 2363371 - RNA, 19 nt, Artificial Sequence
  Description of Artificial Sequence: Synthetic oligonucleotide
  Antisense strand to SEQ ID NO: 2363370
acccuaaacgcgauagcug

SEQ ID NO: 2363372 - RNA, 19 nt, Artificial Sequence
  Description of Artificial Sequence: Synthetic oligonucleotide
  Sense strand starting at position 1674 of SEQ ID NO: 1885721
aggacuuugggaugguaua

SEQ ID NO: 2363373 - RNA, 19 nt, Artificial Sequence
  Description of Artificial Sequence: Synthetic oligonucleotide
  Antisense strand to SEQ ID NO: 2363372
uauaccaucccaaaguccu

SEQ ID NO: 2363374 - RNA, 19 nt, Artificial Sequence
  Description of Artificial Sequence: Synthetic oligonucleotide
  Sense strand starting at position 1885 of SEQ ID NO: 1885721
acaccucuuccaggaaguu

SEQ ID NO: 2363375 - RNA, 19 nt, Artificial Sequence
  Description of Artificial Sequence: Synthetic oligonucleotide
  Antisense strand to SEQ ID NO: 2363374
aacuuccuggaagaggugu

SEQ ID NO: 2363376 - RNA, 19 nt, Artificial Sequence
  Description of Artificial Sequence: Synthetic oligonucleotide
  Sense strand starting at position 2084 of SEQ ID NO: 1885721
gugaguuaucgucacacac

SEQ ID NO: 2363377 - RNA, 19 nt, Artificial Sequence
  Description of Artificial Sequence: Synthetic oligonucleotide
  Antisense strand to SEQ ID NO: 2363376
gugugugacgauaacucac

SEQ ID NO: 2363378 - RNA, 19 nt, Artificial Sequence
  Description of Artificial Sequence: Synthetic oligonucleotide
  Sense strand starting at position 2172 of SEQ ID NO: 1885721
ugauguuagcuccaggaaa

SEQ ID NO: 2363379 - RNA, 19 nt, Artificial Sequence
  Description of Artificial Sequence: Synthetic oligonucleotide
  Antisense strand to SEQ ID NO: 2363378
uuuccuggagcuaacauca

SEQ ID NO: 2363380 - RNA, 19 nt, Artificial Sequence
  Description of Artificial Sequence: Synthetic oligonucleotide
  Sense strand starting at position 2349 of SEQ ID NO: 1885721
gaagucuuccaaggcgaga

SEQ ID NO: 2363381 - RNA, 19 nt, Artificial Sequence
  Description of Artificial Sequence: Synthetic oligonucleotide
  Antisense strand to SEQ ID NO: 2363380
ucucgccuuggaagacuuc

SEQ ID NO: 2363382 - RNA, 19 nt, Artificial Sequence
  Description of Artificial Sequence: Synthetic oligonucleotide
  Sense strand starting at position 2358 of SEQ ID NO: 1885721
caaggcgagaugugauauu

SEQ ID NO: 2363383 - RNA, 19 nt, Artificial Sequence
  Description of Artificial Sequence: Synthetic oligonucleotide
  Antisense strand to SEQ ID NO: 2363382
aauaucacaucucgccuug

SEQ ID NO: 2363384 - RNA, 19 nt, Artificial Sequence
  Description of Artificial Sequence: Synthetic oligonucleotide
  Sense strand starting at position 2639 of SEQ ID NO: 1885721
ccaaauggccaauguaaua

SEQ ID NO: 2363385 - RNA, 19 nt, Artificial Sequence
  Description of Artificial Sequence: Synthetic oligonucleotide
  Antisense strand to SEQ ID NO: 2363384
uauuacauuggccauuugg

SEQ ID NO: 2363386 - RNA, 19 nt, Artificial Sequence
  Description of Artificial Sequence: Synthetic oligonucleotide
  Sense strand starting at position 2910 of SEQ ID NO: 1885721
ugggaagcccucuaugacu

SEQ ID NO: 2363387 - RNA, 19 nt, Artificial Sequence
  Description of Artificial Sequence: Synthetic oligonucleotide
  Antisense strand to SEQ ID NO: 2363386
agucauagagggcuuccca

SEQ ID NO: 2363388 - RNA, 19 nt, Artificial Sequence
  Description of Artificial Sequence: Synthetic oligonucleotide
  Sense strand starting at position 2915 of SEQ ID NO: 1885721
agcccucuaugacugaauu

SEQ ID NO: 2363389 - RNA, 19 nt, Artificial Sequence
  Description of Artificial Sequence: Synthetic oligonucleotide
  Antisense strand to SEQ ID NO: 2363388
aauucagucauagagggcu

SEQ ID NO: 2363390 - RNA, 19 nt, Artificial Sequence
  Description of Artificial Sequence: Synthetic oligonucleotide
  Sense strand starting at position 2925 of SEQ ID NO: 1885721
gacugaauuugauauugag

SEQ ID NO: 2363391 - RNA, 19 nt, Artificial Sequence
  Description of Artificial Sequence: Synthetic oligonucleotide
  Antisense strand to SEQ ID NO: 2363390
cucaauaucaaauucaguc

SEQ ID NO: 2363392 - RNA, 19 nt, Artificial Sequence
  Description of Artificial Sequence: Synthetic oligonucleotide
  Sense strand starting at position 2928 of SEQ ID NO: 1885721
ugaauuugauauugagaag

SEQ ID NO: 2363393 - RNA, 19 nt, Artificial Sequence
  Description of Artificial Sequence: Synthetic oligonucleotide
  Antisense strand to SEQ ID NO: 2363392
cuucucaauaucaaauuca

SEQ ID NO: 2363394 - RNA, 19 nt, Artificial Sequence
  Description of Artificial Sequence: Synthetic oligonucleotide
  Sense strand starting at position 3082 of SEQ ID NO: 1885721
ugaggccugauguaguauu

SEQ ID NO: 2363395 - RNA, 19 nt, Artificial Sequence
  Description of Artificial Sequence: Synthetic oligonucleotide
  Antisense strand to SEQ ID NO: 2363394
aauacuacaucaggccuca

SEQ ID NO: 2363396 - RNA, 19 nt, Artificial Sequence
  Description of Artificial Sequence: Synthetic oligonucleotide
  Sense strand starting at position 3115 of SEQ ID NO: 1885721
augcaaugucugccgcaga

SEQ ID NO: 2363397 - RNA, 19 nt, Artificial Sequence
  Description of Artificial Sequence: Synthetic oligonucleotide
  Antisense strand to SEQ ID NO: 2363396
ucugcggcagacauugcau

SEQ ID NO: 2363398 - RNA, 19 nt, Artificial Sequence
  Description of Artificial Sequence: Synthetic oligonucleotide
  Sense strand starting at position 3170 of SEQ ID NO: 1885721
ggagaugaugcuggaacua

SEQ ID NO: 2363399 - RNA, 19 nt, Artificial Sequence
  Description of Artificial Sequence: Synthetic oligonucleotide
  Antisense strand to SEQ ID NO: 2363398
uaguuccagcaucaucucc

SEQ ID NO: 2363400 - RNA, 19 nt, Artificial Sequence
  Description of Artificial Sequence: Synthetic oligonucleotide
  Sense strand starting at position 3183 of SEQ ID NO: 1885721
gaacuagugcuaugacuga

SEQ ID NO: 2363401 - RNA, 19 nt, Artificial Sequence
  Description of Artificial Sequence: Synthetic oligonucleotide
  Antisense strand to SEQ ID NO: 2363400
ucagucauagcacuaguuc

SEQ ID NO: 2363402 - RNA, 19 nt, Artificial Sequence
  Description of Artificial Sequence: Synthetic oligonucleotide
  Sense strand starting at position 3187 of SEQ ID NO: 1885721
uagugcuaugacugacacu

SEQ ID NO: 2363403 - RNA, 19 nt, Artificial Sequence
  Description of Artificial Sequence: Synthetic oligonucleotide
  Antisense strand to SEQ ID NO: 2363402
agugucagucauagcacua

SEQ ID NO: 2363404 - RNA, 19 nt, Artificial Sequence
  Description of Artificial Sequence: Synthetic oligonucleotide
  Sense strand starting at position 3344 of SEQ ID NO: 1885721
gugcuuugucuccuaagcu

SEQ ID NO: 2363405 - RNA, 19 nt, Artificial Sequence
  Description of Artificial Sequence: Synthetic oligonucleotide
  Antisense strand to SEQ ID NO: 2363404
agcuuaggagacaaagcac

SEQ ID NO: 2363406 - RNA, 19 nt, Artificial Sequence
  Description of Artificial Sequence: Synthetic oligonucleotide
  Sense strand starting at position 3378 of SEQ ID NO: 1885721
ggagacuuuccaggcugaa

SEQ ID NO: 2363407 - RNA, 19 nt, Artificial Sequence
  Description of Artificial Sequence: Synthetic oligonucleotide
  Antisense strand to SEQ ID NO: 2363406
uucagccuggaaagucucc

SEQ ID NO: 2363408 - RNA, 19 nt, Artificial Sequence
  Description of Artificial Sequence: Synthetic oligonucleotide
  Sense strand starting at position 3411 of SEQ ID NO: 1885721
agaaguagaccauguuaca

SEQ ID NO: 2363409 - RNA, 19 nt, Artificial Sequence
  Description of Artificial Sequence: Synthetic oligonucleotide
  Antisense strand to SEQ ID NO: 2363408
uguaacauggucuacuucu

SEQ ID NO: 2363410 - RNA, 19 nt, Artificial Sequence
  Description of Artificial Sequence: Synthetic oligonucleotide
  Sense strand starting at position 3592 of SEQ ID NO: 1885721
ggaggcacuuccucuguaa

SEQ ID NO: 2363411 - RNA, 19 nt, Artificial Sequence
  Description of Artificial Sequence: Synthetic oligonucleotide
  Antisense strand to SEQ ID NO: 2363410
uuacagaggaagugccucc

SEQ ID NO: 2363412 - RNA, 19 nt, Artificial Sequence
  Description of Artificial Sequence: Synthetic oligonucleotide
  Sense strand starting at position 3594 of SEQ ID NO: 1885721
aggcacuuccucuguaaac

SEQ ID NO: 2363413 - RNA, 19 nt, Artificial Sequence
  Description of Artificial Sequence: Synthetic oligonucleotide
  Antisense strand to SEQ ID NO: 2363412
guuuacagaggaagugccu

SEQ ID NO: 2363414 - RNA, 19 nt, Artificial Sequence
  Description of Artificial Sequence: Synthetic oligonucleotide
  Sense strand starting at position 3595 of SEQ ID NO: 1885721
ggcacuuccucuguaaaca

SEQ ID NO: 2363415 - RNA, 19 nt, Artificial Sequence
  Description of Artificial Sequence: Synthetic oligonucleotide
  Antisense strand to SEQ ID NO: 2363414
uguuuacagaggaagugcc

SEQ ID NO: 2363416 - RNA, 19 nt, Artificial Sequence
  Description of Artificial Sequence: Synthetic oligonucleotide
  Sense strand starting at position 3680 of SEQ ID NO: 1885721
ccgagauggcuagacuuga

SEQ ID NO: 2363417 - RNA, 19 nt, Artificial Sequence
  Description of Artificial Sequence: Synthetic oligonucleotide
  Antisense strand to SEQ ID NO: 2363416
ucaagucuagccaucucgg

SEQ ID NO: 2363418 - RNA, 19 nt, Artificial Sequence
  Description of Artificial Sequence: Synthetic oligonucleotide
  Sense strand starting at position 3684 of SEQ ID NO: 1885721
gauggcuagacuugagaug

SEQ ID NO: 2363419 - RNA, 19 nt, Artificial Sequence
  Description of Artificial Sequence: Synthetic oligonucleotide
  Antisense strand to SEQ ID NO: 2363418
caucucaagucuagccauc

SEQ ID NO: 2363420 - RNA, 19 nt, Artificial Sequence
  Description of Artificial Sequence: Synthetic oligonucleotide
  Sense strand starting at position 3743 of SEQ ID NO: 1885721
cgagucagugcgucuucaa

SEQ ID NO: 2363421 - RNA, 19 nt, Artificial Sequence
  Description of Artificial Sequence: Synthetic oligonucleotide
  Antisense strand to SEQ ID NO: 2363420
uugaagacgcacugacucg

SEQ ID NO: 2363422 - RNA, 19 nt, Artificial Sequence
  Description of Artificial Sequence: Synthetic oligonucleotide
  Sense strand starting at position 3819 of SEQ ID NO: 1885721
ccugaagucaucugaggag

SEQ ID NO: 2363423 - RNA, 19 nt, Artificial Sequence
  Description of Artificial Sequence: Synthetic oligonucleotide
  Antisense strand to SEQ ID NO: 2363422
cuccucagaugacuucagg

SEQ ID NO: 2363424 - RNA, 19 nt, Artificial Sequence
  Description of Artificial Sequence: Synthetic oligonucleotide
  Sense strand starting at position 87 of SEQ ID NO: 1885722
gguuaaauguggucauaau

SEQ ID NO: 2363425 - RNA, 19 nt, Artificial Sequence
  Description of Artificial Sequence: Synthetic oligonucleotide
  Antisense strand to SEQ ID NO: 2363424
auuaugaccacauuuaacc

SEQ ID NO: 2363426 - RNA, 19 nt, Artificial Sequence
  Description of Artificial Sequence: Synthetic oligonucleotide
  Sense strand starting at position 88 of SEQ ID NO: 1885722
guuaaauguggucauaauu

SEQ ID NO: 2363427 - RNA, 19 nt, Artificial Sequence
  Description of Artificial Sequence: Synthetic oligonucleotide
  Antisense strand to SEQ ID NO: 2363426
aauuaugaccacauuuaac

SEQ ID NO: 2363428 - RNA, 19 nt, Artificial Sequence
  Description of Artificial Sequence: Synthetic oligonucleotide
  Sense strand starting at position 94 of SEQ ID NO: 1885722
uguggucauaauuguaaga

SEQ ID NO: 2363429 - RNA, 19 nt, Artificial Sequence
  Description of Artificial Sequence: Synthetic oligonucleotide
  Antisense strand to SEQ ID NO: 2363428
ucuuacaauuaugaccaca

SEQ ID NO: 2363430 - RNA, 19 nt, Artificial Sequence
  Description of Artificial Sequence: Synthetic oligonucleotide
  Sense strand starting at position 104 of SEQ ID NO: 1885722
auuguaagacccuaaugca

SEQ ID NO: 2363431 - RNA, 19 nt, Artificial Sequence
  Description of Artificial Sequence: Synthetic oligonucleotide
  Antisense strand to SEQ ID NO: 2363430
ugcauuagggucuuacaau

SEQ ID NO: 2363432 - RNA, 19 nt, Artificial Sequence
  Description of Artificial Sequence: Synthetic oligonucleotide
  Sense strand starting at position 383 of SEQ ID NO: 1885722
accacauaacucuguuagu

SEQ ID NO: 2363433 - RNA, 19 nt, Artificial Sequence
  Description of Artificial Sequence: Synthetic oligonucleotide
  Antisense strand to SEQ ID NO: 2363432
acuaacagaguuauguggu

SEQ ID NO: 2363434 - RNA, 19 nt, Artificial Sequence
  Description of Artificial Sequence: Synthetic oligonucleotide
  Sense strand starting at position 384 of SEQ ID NO: 1885722
ccacauaacucuguuagug

SEQ ID NO: 2363435 - RNA, 19 nt, Artificial Sequence
  Description of Artificial Sequence: Synthetic oligonucleotide
  Antisense strand to SEQ ID NO: 2363434
cacuaacagaguuaugugg

SEQ ID NO: 2363436 - RNA, 19 nt, Artificial Sequence
  Description of Artificial Sequence: Synthetic oligonucleotide
  Sense strand starting at position 567 of SEQ ID NO: 1885722
agaccauauguuuguggga

SEQ ID NO: 2363437 - RNA, 19 nt, Artificial Sequence
  Description of Artificial Sequence: Synthetic oligonucleotide
  Antisense strand to SEQ ID NO: 2363436
ucccacaaacauauggucu

SEQ ID NO: 2363438 - RNA, 19 nt, Artificial Sequence
  Description of Artificial Sequence: Synthetic oligonucleotide
  Sense strand starting at position 583 of SEQ ID NO: 1885722
ggacucuaaccguggaauc

SEQ ID NO: 2363439 - RNA, 19 nt, Artificial Sequence
  Description of Artificial Sequence: Synthetic oligonucleotide
  Antisense strand to SEQ ID NO: 2363438
gauuccacgguuagagucc

SEQ ID NO: 2363440 - RNA, 19 nt, Artificial Sequence
  Description of Artificial Sequence: Synthetic oligonucleotide
  Sense strand starting at position 584 of SEQ ID NO: 1885722
gacucuaaccguggaaucu

SEQ ID NO: 2363441 - RNA, 19 nt, Artificial Sequence
  Description of Artificial Sequence: Synthetic oligonucleotide
  Antisense strand to SEQ ID NO: 2363440
agauuccacgguuagaguc

SEQ ID NO: 2363442 - RNA, 19 nt, Artificial Sequence
  Description of Artificial Sequence: Synthetic oligonucleotide
  Sense strand starting at position 585 of SEQ ID NO: 1885722
acucuaaccguggaaucua

SEQ ID NO: 2363443 - RNA, 19 nt, Artificial Sequence
  Description of Artificial Sequence: Synthetic oligonucleotide
  Antisense strand to SEQ ID NO: 2363442
uagauuccacgguuagagu

SEQ ID NO: 2363444 - RNA, 19 nt, Artificial Sequence
  Description of Artificial Sequence: Synthetic oligonucleotide
  Sense strand starting at position 608 of SEQ ID NO: 1885722
auugcucuagcagaaucaa

SEQ ID NO: 2363445 - RNA, 19 nt, Artificial Sequence
  Description of Artificial Sequence: Synthetic oligonucleotide
  Antisense strand to SEQ ID NO: 2363444
uugauucugcuagagcaau

SEQ ID NO: 2363446 - RNA, 19 nt, Artificial Sequence
  Description of Artificial Sequence: Synthetic oligonucleotide
  Sense strand starting at position 680 of SEQ ID NO: 1885722
uguuaacauucuguccaga

SEQ ID NO: 2363447 - RNA, 19 nt, Artificial Sequence
  Description of Artificial Sequence: Synthetic oligonucleotide
  Antisense strand to SEQ ID NO: 2363446
ucuggacagaauguuaaca

SEQ ID NO: 2363448 - RNA, 19 nt, Artificial Sequence
  Description of Artificial Sequence: Synthetic oligonucleotide
  Sense strand starting at position 696 of SEQ ID NO: 1885722
agaaucugugcucacaaac

SEQ ID NO: 2363449 - RNA, 19 nt, Artificial Sequence
  Description of Artificial Sequence: Synthetic oligonucleotide
  Antisense strand to SEQ ID NO: 2363448
guuugugagcacagauucu

SEQ ID NO: 2363450 - RNA, 19 nt, Artificial Sequence
  Description of Artificial Sequence: Synthetic oligonucleotide
  Sense strand starting at position 963 of SEQ ID NO: 1885722
gagcuaugugagcaacaag

SEQ ID NO: 2363451 - RNA, 19 nt, Artificial Sequence
  Description of Artificial Sequence: Synthetic oligonucleotide
  Antisense strand to SEQ ID NO: 2363450
cuuguugcucacauagcuc

SEQ ID NO: 2363452 - RNA, 19 nt, Artificial Sequence
  Description of Artificial Sequence: Synthetic oligonucleotide
  Sense strand starting at position 1359 of SEQ ID NO: 1885722
ugcauaugaguguaugauu

SEQ ID NO: 2363453 - RNA, 19 nt, Artificial Sequence
  Description of Artificial Sequence: Synthetic oligonucleotide
  Antisense strand to SEQ ID NO: 2363452
aaucauacacucauaugca

SEQ ID NO: 2363454 - RNA, 19 nt, Artificial Sequence
  Description of Artificial Sequence: Synthetic oligonucleotide
  Sense strand starting at position 1364 of SEQ ID NO: 1885722
augaguguaugauuagaaa

SEQ ID NO: 2363455 - RNA, 19 nt, Artificial Sequence
  Description of Artificial Sequence: Synthetic oligonucleotide
  Antisense strand to SEQ ID NO: 2363454
uuucuaaucauacacucau

SEQ ID NO: 2363456 - RNA, 19 nt, Artificial Sequence
  Description of Artificial Sequence: Synthetic oligonucleotide
  Sense strand starting at position 1450 of SEQ ID NO: 1885722
cuuguucguaaggacuaau

SEQ ID NO: 2363457 - RNA, 19 nt, Artificial Sequence
  Description of Artificial Sequence: Synthetic oligonucleotide
  Antisense strand to SEQ ID NO: 2363456
auuaguccuuacgaacaag

SEQ ID NO: 2363458 - RNA, 19 nt, Artificial Sequence
  Description of Artificial Sequence: Synthetic oligonucleotide
  Sense strand starting at position 1470 of SEQ ID NO: 1885722
cccuguaauuacuugagga

SEQ ID NO: 2363459 - RNA, 19 nt, Artificial Sequence
  Description of Artificial Sequence: Synthetic oligonucleotide
  Antisense strand to SEQ ID NO: 2363458
uccucaaguaauuacaggg

SEQ ID NO: 2363460 - RNA, 19 nt, Artificial Sequence
  Description of Artificial Sequence: Synthetic oligonucleotide
  Sense strand starting at position 1866 of SEQ ID NO: 1885722
ucaacaguaugguuaaauu

SEQ ID NO: 2363461 - RNA, 19 nt, Artificial Sequence
  Description of Artificial Sequence: Synthetic oligonucleotide
  Antisense strand to SEQ ID NO: 2363460
aauuuaaccauacuguuga

SEQ ID NO: 2363462 - RNA, 19 nt, Artificial Sequence
  Description of Artificial Sequence: Synthetic oligonucleotide
  Sense strand starting at position 1883 of SEQ ID NO: 1885722
uucucauauggugaguaaa

SEQ ID NO: 2363463 - RNA, 19 nt, Artificial Sequence
  Description of Artificial Sequence: Synthetic oligonucleotide
  Antisense strand to SEQ ID NO: 2363462
uuuacucaccauaugagaa

SEQ ID NO: 2363464 - RNA, 19 nt, Artificial Sequence
  Description of Artificial Sequence: Synthetic oligonucleotide
  Sense strand starting at position 2278 of SEQ ID NO: 1885722
acuguaacguguguaauuu

SEQ ID NO: 2363465 - RNA, 19 nt, Artificial Sequence
  Description of Artificial Sequence: Synthetic oligonucleotide
  Antisense strand to SEQ ID NO: 2363464
aaauuacacacguuacagu

SEQ ID NO: 2363466 - RNA, 19 nt, Artificial Sequence
  Description of Artificial Sequence: Synthetic oligonucleotide
  Sense strand starting at position 2282 of SEQ ID NO: 1885722
uaacguguguaauuuggua

SEQ ID NO: 2363467 - RNA, 19 nt, Artificial Sequence
  Description of Artificial Sequence: Synthetic oligonucleotide
  Antisense strand to SEQ ID NO: 2363466
uaccaaauuacacacguua

SEQ ID NO: 2363468 - RNA, 19 nt, Artificial Sequence
  Description of Artificial Sequence: Synthetic oligonucleotide
  Sense strand starting at position 2284 of SEQ ID NO: 1885722
acguguguaauuugguaga

SEQ ID NO: 2363469 - RNA, 19 nt, Artificial Sequence
  Description of Artificial Sequence: Synthetic oligonucleotide
  Antisense strand to SEQ ID NO: 2363468
ucuaccaaauuacacacgu

SEQ ID NO: 2363470 - RNA, 19 nt, Artificial Sequence
  Description of Artificial Sequence: Synthetic oligonucleotide
  Sense strand starting at position 2503 of SEQ ID NO: 1885722
accugaguuuggguaacuu

SEQ ID NO: 2363471 - RNA, 19 nt, Artificial Sequence
  Description of Artificial Sequence: Synthetic oligonucleotide
  Antisense strand to SEQ ID NO: 2363470
aaguuacccaaacucaggu

SEQ ID NO: 2363472 - RNA, 19 nt, Artificial Sequence
  Description of Artificial Sequence: Synthetic oligonucleotide
  Sense strand starting at position 2507 of SEQ ID NO: 1885722
gaguuuggguaacuuauaa

SEQ ID NO: 2363473 - RNA, 19 nt, Artificial Sequence
  Description of Artificial Sequence: Synthetic oligonucleotide
  Antisense strand to SEQ ID NO: 2363472
uuauaaguuacccaaacuc

SEQ ID NO: 2363474 - RNA, 19 nt, Artificial Sequence
  Description of Artificial Sequence: Synthetic oligonucleotide
  Sense strand starting at position 2531 of SEQ ID NO: 1885722
auagguuauugacucauag

SEQ ID NO: 2363475 - RNA, 19 nt, Artificial Sequence
  Description of Artificial Sequence: Synthetic oligonucleotide
  Antisense strand to SEQ ID NO: 2363474
cuaugagucaauaaccuau

SEQ ID NO: 2363476 - RNA, 19 nt, Artificial Sequence
  Description of Artificial Sequence: Synthetic oligonucleotide
  Sense strand starting at position 2933 of SEQ ID NO: 1885722
aggccaagauaucucaacu

SEQ ID NO: 2363477 - RNA, 19 nt, Artificial Sequence
  Description of Artificial Sequence: Synthetic oligonucleotide
  Antisense strand to SEQ ID NO: 2363476
aguugagauaucuuggccu

SEQ ID NO: 2363478 - RNA, 19 nt, Artificial Sequence
  Description of Artificial Sequence: Synthetic oligonucleotide
  Sense strand starting at position 2964 of SEQ ID NO: 1885722
ggaugugauguuggauggu

SEQ ID NO: 2363479 - RNA, 19 nt, Artificial Sequence
  Description of Artificial Sequence: Synthetic oligonucleotide
  Antisense strand to SEQ ID NO: 2363478
accauccaacaucacaucc

SEQ ID NO: 2363480 - RNA, 19 nt, Artificial Sequence
  Description of Artificial Sequence: Synthetic oligonucleotide
  Sense strand starting at position 3022 of SEQ ID NO: 1885722
aucucuauucuagacgugu

SEQ ID NO: 2363481 - RNA, 19 nt, Artificial Sequence
  Description of Artificial Sequence: Synthetic oligonucleotide
  Antisense strand to SEQ ID NO: 2363480
acacgucuagaauagagau

SEQ ID NO: 2363482 - RNA, 19 nt, Artificial Sequence
  Description of Artificial Sequence: Synthetic oligonucleotide
  Sense strand starting at position 3056 of SEQ ID NO: 1885722
caguucucucaggaaagug

SEQ ID NO: 2363483 - RNA, 19 nt, Artificial Sequence
  Description of Artificial Sequence: Synthetic oligonucleotide
  Antisense strand to SEQ ID NO: 2363482
cacuuuccugagagaacug

SEQ ID NO: 2363484 - RNA, 19 nt, Artificial Sequence
  Description of Artificial Sequence: Synthetic oligonucleotide
  Sense strand starting at position 3158 of SEQ ID NO: 1885722
ggguuuauagggugggaaa

SEQ ID NO: 2363485 - RNA, 19 nt, Artificial Sequence
  Description of Artificial Sequence: Synthetic oligonucleotide
  Antisense strand to SEQ ID NO: 2363484
uuucccacccuauaaaccc

SEQ ID NO: 2363486 - RNA, 19 nt, Artificial Sequence
  Description of Artificial Sequence: Synthetic oligonucleotide
  Sense strand starting at position 3159 of SEQ ID NO: 1885722
gguuuauagggugggaaac

SEQ ID NO: 2363487 - RNA, 19 nt, Artificial Sequence
  Description of Artificial Sequence: Synthetic oligonucleotide
  Antisense strand to SEQ ID NO: 2363486
guuucccacccuauaaacc

SEQ ID NO: 2363488 - RNA, 19 nt, Artificial Sequence
  Description of Artificial Sequence: Synthetic oligonucleotide
  Sense strand starting at position 3207 of SEQ ID NO: 1885722
gugauucuggaccgauauu

SEQ ID NO: 2363489 - RNA, 19 nt, Artificial Sequence
  Description of Artificial Sequence: Synthetic oligonucleotide
  Antisense strand to SEQ ID NO: 2363488
aauaucgguccagaaucac

SEQ ID NO: 2363490 - RNA, 19 nt, Artificial Sequence
  Description of Artificial Sequence: Synthetic oligonucleotide
  Sense strand starting at position 3391 of SEQ ID NO: 1885722
aaaugagaugaguguuuau

SEQ ID NO: 2363491 - RNA, 19 nt, Artificial Sequence
  Description of Artificial Sequence: Synthetic oligonucleotide
  Antisense strand to SEQ ID NO: 2363490
auaaacacucaucucauuu

SEQ ID NO: 2363492 - RNA, 19 nt, Artificial Sequence
  Description of Artificial Sequence: Synthetic oligonucleotide
  Sense strand starting at position 3394 of SEQ ID NO: 1885722
ugagaugaguguuuauaag

SEQ ID NO: 2363493 - RNA, 19 nt, Artificial Sequence
  Description of Artificial Sequence: Synthetic oligonucleotide
  Antisense strand to SEQ ID NO: 2363492
cuuauaaacacucaucuca

SEQ ID NO: 2363494 - RNA, 19 nt, Artificial Sequence
  Description of Artificial Sequence: Synthetic oligonucleotide
  Sense strand starting at position 3400 of SEQ ID NO: 1885722
gaguguuuauaagucaaag

SEQ ID NO: 2363495 - RNA, 19 nt, Artificial Sequence
  Description of Artificial Sequence: Synthetic oligonucleotide
  Antisense strand to SEQ ID NO: 2363494
cuuugacuuauaaacacuc

SEQ ID NO: 2363496 - RNA, 19 nt, Artificial Sequence
  Description of Artificial Sequence: Synthetic oligonucleotide
  Sense strand starting at position 3504 of SEQ ID NO: 1885722
uaaggauuaucagcuuagu

SEQ ID NO: 2363497 - RNA, 19 nt, Artificial Sequence
  Description of Artificial Sequence: Synthetic oligonucleotide
  Antisense strand to SEQ ID NO: 2363496
acuaagcugauaauccuua

SEQ ID NO: 2363498 - RNA, 19 nt, Artificial Sequence
  Description of Artificial Sequence: Synthetic oligonucleotide
  Sense strand starting at position 3537 of SEQ ID NO: 1885722
ucagcuaucuguuuaaaga

SEQ ID NO: 2363499 - RNA, 19 nt, Artificial Sequence
  Description of Artificial Sequence: Synthetic oligonucleotide
  Antisense strand to SEQ ID NO: 2363498
ucuuuaaacagauagcuga

SEQ ID NO: 2363500 - RNA, 19 nt, Artificial Sequence
  Description of Artificial Sequence: Synthetic oligonucleotide
  Sense strand starting at position 3576 of SEQ ID NO: 1885722
cuuugaggaugcucagauu

SEQ ID NO: 2363501 - RNA, 19 nt, Artificial Sequence
  Description of Artificial Sequence: Synthetic oligonucleotide
  Antisense strand to SEQ ID NO: 2363500
aaucugagcauccucaaag

SEQ ID NO: 2363502 - RNA, 19 nt, Artificial Sequence
  Description of Artificial Sequence: Synthetic oligonucleotide
  Sense strand starting at position 3782 of SEQ ID NO: 1885722
cucccaguagcugauauua

SEQ ID NO: 2363503 - RNA, 19 nt, Artificial Sequence
  Description of Artificial Sequence: Synthetic oligonucleotide
  Antisense strand to SEQ ID NO: 2363502
uaauaucagcuacugggag

SEQ ID NO: 2363504 - RNA, 19 nt, Artificial Sequence
  Description of Artificial Sequence: Synthetic oligonucleotide
  Sense strand starting at position 320 of SEQ ID NO: 1885723
ugcagaaaucaggaguuuc

SEQ ID NO: 2363505 - RNA, 19 nt, Artificial Sequence
  Description of Artificial Sequence: Synthetic oligonucleotide
  Antisense strand to SEQ ID NO: 2363504
gaaacuccugauuucugca

SEQ ID NO: 2363506 - RNA, 19 nt, Artificial Sequence
  Description of Artificial Sequence: Synthetic oligonucleotide
  Sense strand starting at position 467 of SEQ ID NO: 1885723
ucaacuccucucuggagaa

SEQ ID NO: 2363507 - RNA, 19 nt, Artificial Sequence
  Description of Artificial Sequence: Synthetic oligonucleotide
  Antisense strand to SEQ ID NO: 2363506
uucuccagagaggaguuga

SEQ ID NO: 2363508 - RNA, 19 nt, Artificial Sequence
  Description of Artificial Sequence: Synthetic oligonucleotide
  Sense strand starting at position 816 of SEQ ID NO: 1885723
cccuuagcucuguagaauc

SEQ ID NO: 2363509 - RNA, 19 nt, Artificial Sequence
  Description of Artificial Sequence: Synthetic oligonucleotide
  Antisense strand to SEQ ID NO: 2363508
gauucuacagagcuaaggg

SEQ ID NO: 2363510 - RNA, 19 nt, Artificial Sequence
  Description of Artificial Sequence: Synthetic oligonucleotide
  Sense strand starting at position 818 of SEQ ID NO: 1885723
cuuagcucuguagaaucaa

SEQ ID NO: 2363511 - RNA, 19 nt, Artificial Sequence
  Description of Artificial Sequence: Synthetic oligonucleotide
  Antisense strand to SEQ ID NO: 2363510
uugauucuacagagcuaag

SEQ ID NO: 2363512 - RNA, 19 nt, Artificial Sequence
  Description of Artificial Sequence: Synthetic oligonucleotide
  Sense strand starting at position 844 of SEQ ID NO: 1885723
gagauauuccacuggguua

SEQ ID NO: 2363513 - RNA, 19 nt, Artificial Sequence
  Description of Artificial Sequence: Synthetic oligonucleotide
  Antisense strand to SEQ ID NO: 2363512
uaacccaguggaauaucuc

SEQ ID NO: 2363514 - RNA, 19 nt, Artificial Sequence
  Description of Artificial Sequence: Synthetic oligonucleotide
  Sense strand starting at position 846 of SEQ ID NO: 1885723
gauauuccacuggguuaac

SEQ ID NO: 2363515 - RNA, 19 nt, Artificial Sequence
  Description of Artificial Sequence: Synthetic oligonucleotide
  Antisense strand to SEQ ID NO: 2363514
guuaacccaguggaauauc

SEQ ID NO: 2363516 - RNA, 19 nt, Artificial Sequence
  Description of Artificial Sequence: Synthetic oligonucleotide
  Sense strand starting at position 855 of SEQ ID NO: 1885723
cuggguuaacuugggaaug

SEQ ID NO: 2363517 - RNA, 19 nt, Artificial Sequence
  Description of Artificial Sequence: Synthetic oligonucleotide
  Antisense strand to SEQ ID NO: 2363516
cauucccaaguuaacccag

SEQ ID NO: 2363518 - RNA, 19 nt, Artificial Sequence
  Description of Artificial Sequence: Synthetic oligonucleotide
  Sense strand starting at position 933 of SEQ ID NO: 1885723
accuuaacccuauggugau

SEQ ID NO: 2363519 - RNA, 19 nt, Artificial Sequence
  Description of Artificial Sequence: Synthetic oligonucleotide
  Antisense strand to SEQ ID NO: 2363518
aucaccauaggguuaaggu

SEQ ID NO: 2363520 - RNA, 19 nt, Artificial Sequence
  Description of Artificial Sequence: Synthetic oligonucleotide
  Sense strand starting at position 977 of SEQ ID NO: 1885723
uuaaucauccuugauggca

SEQ ID NO: 2363521 - RNA, 19 nt, Artificial Sequence
  Description of Artificial Sequence: Synthetic oligonucleotide
  Antisense strand to SEQ ID NO: 2363520
ugccaucaaggaugauuaa

SEQ ID NO: 2363522 - RNA, 19 nt, Artificial Sequence
  Description of Artificial Sequence: Synthetic oligonucleotide
  Sense strand starting at position 1079 of SEQ ID NO: 1885723
uuaacagcauuguuggaaa

SEQ ID NO: 2363523 - RNA, 19 nt, Artificial Sequence
  Description of Artificial Sequence: Synthetic oligonucleotide
  Antisense strand to SEQ ID NO: 2363522
uuuccaacaaugcuguuaa

SEQ ID NO: 2363524 - RNA, 19 nt, Artificial Sequence
  Description of Artificial Sequence: Synthetic oligonucleotide
  Sense strand starting at position 1379 of SEQ ID NO: 1885723
cugggauacuuccuggaau

SEQ ID NO: 2363525 - RNA, 19 nt, Artificial Sequence
  Description of Artificial Sequence: Synthetic oligonucleotide
  Antisense strand to SEQ ID NO: 2363524
auuccaggaaguaucccag

SEQ ID NO: 2363526 - RNA, 19 nt, Artificial Sequence
  Description of Artificial Sequence: Synthetic oligonucleotide
  Sense strand starting at position 1582 of SEQ ID NO: 1885723
ggcgauuaccuuuauugau

SEQ ID NO: 2363527 - RNA, 19 nt, Artificial Sequence
  Description of Artificial Sequence: Synthetic oligonucleotide
  Antisense strand to SEQ ID NO: 2363526
aucaauaaagguaaucgcc

SEQ ID NO: 2363528 - RNA, 19 nt, Artificial Sequence
  Description of Artificial Sequence: Synthetic oligonucleotide
  Sense strand starting at position 1584 of SEQ ID NO: 1885723
cgauuaccuuuauugauga

SEQ ID NO: 2363529 - RNA, 19 nt, Artificial Sequence
  Description of Artificial Sequence: Synthetic oligonucleotide
  Antisense strand to SEQ ID NO: 2363528
ucaucaauaaagguaaucg

SEQ ID NO: 2363530 - RNA, 19 nt, Artificial Sequence
  Description of Artificial Sequence: Synthetic oligonucleotide
  Sense strand starting at position 1775 of SEQ ID NO: 1885723
agcacuucuuaucugagaa

SEQ ID NO: 2363531 - RNA, 19 nt, Artificial Sequence
  Description of Artificial Sequence: Synthetic oligonucleotide
  Antisense strand to SEQ ID NO: 2363530
uucucagauaagaagugcu

SEQ ID NO: 2363532 - RNA, 19 nt, Artificial Sequence
  Description of Artificial Sequence: Synthetic oligonucleotide
  Sense strand starting at position 1885 of SEQ ID NO: 1885723
agcccaaaccuaugaaagu

SEQ ID NO: 2363533 - RNA, 19 nt, Artificial Sequence
  Description of Artificial Sequence: Synthetic oligonucleotide
  Antisense strand to SEQ ID NO: 2363532
acuuucauagguuugggcu

SEQ ID NO: 2363534 - RNA, 19 nt, Artificial Sequence
  Description of Artificial Sequence: Synthetic oligonucleotide
  Sense strand starting at position 1903 of SEQ ID NO: 1885723
uuaugagacuugucaaagg

SEQ ID NO: 2363535 - RNA, 19 nt, Artificial Sequence
  Description of Artificial Sequence: Synthetic oligonucleotide
  Antisense strand to SEQ ID NO: 2363534
ccuuugacaagucucauaa

SEQ ID NO: 2363536 - RNA, 19 nt, Artificial Sequence
  Description of Artificial Sequence: Synthetic oligonucleotide
  Sense strand starting at position 1908 of SEQ ID NO: 1885723
agacuugucaaaggguaca

SEQ ID NO: 2363537 - RNA, 19 nt, Artificial Sequence
  Description of Artificial Sequence: Synthetic oligonucleotide
  Antisense strand to SEQ ID NO: 2363536
uguacccuuugacaagucu

SEQ ID NO: 2363538 - RNA, 19 nt, Artificial Sequence
  Description of Artificial Sequence: Synthetic oligonucleotide
  Sense strand starting at position 1928 of SEQ ID NO: 1885723
agcagaucuagcgacagua

SEQ ID NO: 2363539 - RNA, 19 nt, Artificial Sequence
  Description of Artificial Sequence: Synthetic oligonucleotide
  Antisense strand to SEQ ID NO: 2363538
uacugucgcuagaucugcu

SEQ ID NO: 2363540 - RNA, 19 nt, Artificial Sequence
  Description of Artificial Sequence: Synthetic oligonucleotide
  Sense strand starting at position 1930 of SEQ ID NO: 1885723
cagaucuagcgacaguauu

SEQ ID NO: 2363541 - RNA, 19 nt, Artificial Sequence
  Description of Artificial Sequence: Synthetic oligonucleotide
  Antisense strand to SEQ ID NO: 2363540
aauacugucgcuagaucug

SEQ ID NO: 2363542 - RNA, 19 nt, Artificial Sequence
  Description of Artificial Sequence: Synthetic oligonucleotide
  Sense strand starting at position 2149 of SEQ ID NO: 1885723
gcaugagaaucuucuccuc

SEQ ID NO: 2363543 - RNA, 19 nt, Artificial Sequence
  Description of Artificial Sequence: Synthetic oligonucleotide
  Antisense strand to SEQ ID NO: 2363542
gaggagaagauucucaugc

SEQ ID NO: 2363544 - RNA, 19 nt, Artificial Sequence
  Description of Artificial Sequence: Synthetic oligonucleotide
  Sense strand starting at position 2183 of SEQ ID NO: 1885723
ucaguuaacugacugguca

SEQ ID NO: 2363545 - RNA, 19 nt, Artificial Sequence
  Description of Artificial Sequence: Synthetic oligonucleotide
  Antisense strand to SEQ ID NO: 2363544
ugaccagucaguuaacuga

SEQ ID NO: 2363546 - RNA, 19 nt, Artificial Sequence
  Description of Artificial Sequence: Synthetic oligonucleotide
  Sense strand starting at position 2184 of SEQ ID NO: 1885723
caguuaacugacuggucau

SEQ ID NO: 2363547 - RNA, 19 nt, Artificial Sequence
  Description of Artificial Sequence: Synthetic oligonucleotide
  Antisense strand to SEQ ID NO: 2363546
augaccagucaguuaacug

SEQ ID NO: 2363548 - RNA, 19 nt, Artificial Sequence
  Description of Artificial Sequence: Synthetic oligonucleotide
  Sense strand starting at position 2187 of SEQ ID NO: 1885723
uuaacugacuggucaucuu

SEQ ID NO: 2363549 - RNA, 19 nt, Artificial Sequence
  Description of Artificial Sequence: Synthetic oligonucleotide
  Antisense strand to SEQ ID NO: 2363548
aagaugaccagucaguuaa

SEQ ID NO: 2363550 - RNA, 19 nt, Artificial Sequence
  Description of Artificial Sequence: Synthetic oligonucleotide
  Sense strand starting at position 2190 of SEQ ID NO: 1885723
acugacuggucaucuuaau

SEQ ID NO: 2363551 - RNA, 19 nt, Artificial Sequence
  Description of Artificial Sequence: Synthetic oligonucleotide
  Antisense strand to SEQ ID NO: 2363550
auuaagaugaccagucagu

SEQ ID NO: 2363552 - RNA, 19 nt, Artificial Sequence
  Description of Artificial Sequence: Synthetic oligonucleotide
  Sense strand starting at position 2288 of SEQ ID NO: 1885723
acaggacagaugugucagu

SEQ ID NO: 2363553 - RNA, 19 nt, Artificial Sequence
  Description of Artificial Sequence: Synthetic oligonucleotide
  Antisense strand to SEQ ID NO: 2363552
acugacacaucuguccugu

SEQ ID NO: 2363554 - RNA, 19 nt, Artificial Sequence
  Description of Artificial Sequence: Synthetic oligonucleotide
  Sense strand starting at position 2293 of SEQ ID NO: 1885723
acagaugugucagugaaac

SEQ ID NO: 2363555 - RNA, 19 nt, Artificial Sequence
  Description of Artificial Sequence: Synthetic oligonucleotide
  Antisense strand to SEQ ID NO: 2363554
guuucacugacacaucugu

SEQ ID NO: 2363556 - RNA, 19 nt, Artificial Sequence
  Description of Artificial Sequence: Synthetic oligonucleotide
  Sense strand starting at position 2295 of SEQ ID NO: 1885723
agaugugucagugaaacag

SEQ ID NO: 2363557 - RNA, 19 nt, Artificial Sequence
  Description of Artificial Sequence: Synthetic oligonucleotide
  Antisense strand to SEQ ID NO: 2363556
cuguuucacugacacaucu

SEQ ID NO: 2363558 - RNA, 19 nt, Artificial Sequence
  Description of Artificial Sequence: Synthetic oligonucleotide
  Sense strand starting at position 2301 of SEQ ID NO: 1885723
gucagugaaacaggaaauu

SEQ ID NO: 2363559 - RNA, 19 nt, Artificial Sequence
  Description of Artificial Sequence: Synthetic oligonucleotide
  Antisense strand to SEQ ID NO: 2363558
aauuuccuguuucacugac

SEQ ID NO: 2363560 - RNA, 19 nt, Artificial Sequence
  Description of Artificial Sequence: Synthetic oligonucleotide
  Sense strand starting at position 2556 of SEQ ID NO: 1885723
uguuuaacagcucaauaga

SEQ ID NO: 2363561 - RNA, 19 nt, Artificial Sequence
  Description of Artificial Sequence: Synthetic oligonucleotide
  Antisense strand to SEQ ID NO: 2363560
ucuauugagcuguuaaaca

SEQ ID NO: 2363562 - RNA, 19 nt, Artificial Sequence
  Description of Artificial Sequence: Synthetic oligonucleotide
  Sense strand starting at position 2958 of SEQ ID NO: 1885723
gcaauauuccagcaggaaa

SEQ ID NO: 2363563 - RNA, 19 nt, Artificial Sequence
  Description of Artificial Sequence: Synthetic oligonucleotide
  Antisense strand to SEQ ID NO: 2363562
uuuccugcuggaauauugc

SEQ ID NO: 2363564 - RNA, 19 nt, Artificial Sequence
  Description of Artificial Sequence: Synthetic oligonucleotide
  Sense strand starting at position 3233 of SEQ ID NO: 1885723
gguacacaggcuuggaaau

SEQ ID NO: 2363565 - RNA, 19 nt, Artificial Sequence
  Description of Artificial Sequence: Synthetic oligonucleotide
  Antisense strand to SEQ ID NO: 2363564
auuuccaagccuguguacc

SEQ ID NO: 2363566 - RNA, 19 nt, Artificial Sequence
  Description of Artificial Sequence: Synthetic oligonucleotide
  Sense strand starting at position 3246 of SEQ ID NO: 1885723
ggaaaugcauucuuuagag

SEQ ID NO: 2363567 - RNA, 19 nt, Artificial Sequence
  Description of Artificial Sequence: Synthetic oligonucleotide
  Antisense strand to SEQ ID NO: 2363566
cucuaaagaaugcauuucc

SEQ ID NO: 2363568 - RNA, 19 nt, Artificial Sequence
  Description of Artificial Sequence: Synthetic oligonucleotide
  Sense strand starting at position 3356 of SEQ ID NO: 1885723
cuugguggugguuaaauau

SEQ ID NO: 2363569 - RNA, 19 nt, Artificial Sequence
  Description of Artificial Sequence: Synthetic oligonucleotide
  Antisense strand to SEQ ID NO: 2363568
auauuuaaccaccaccaag

SEQ ID NO: 2363570 - RNA, 19 nt, Artificial Sequence
  Description of Artificial Sequence: Synthetic oligonucleotide
  Sense strand starting at position 3586 of SEQ ID NO: 1885723
guaacugugguauaauaaa

SEQ ID NO: 2363571 - RNA, 19 nt, Artificial Sequence
  Description of Artificial Sequence: Synthetic oligonucleotide
  Antisense strand to SEQ ID NO: 2363570
uuuauuauaccacaguuac

SEQ ID NO: 2363572 - RNA, 19 nt, Artificial Sequence
  Description of Artificial Sequence: Synthetic oligonucleotide
  Sense strand starting at position 3716 of SEQ ID NO: 1885723
accagaguuuaugcuaaug

SEQ ID NO: 2363573 - RNA, 19 nt, Artificial Sequence
  Description of Artificial Sequence: Synthetic oligonucleotide
  Antisense strand to SEQ ID NO: 2363572
cauuagcauaaacucuggu

SEQ ID NO: 2363574 - RNA, 19 nt, Artificial Sequence
  Description of Artificial Sequence: Synthetic oligonucleotide
  Sense strand starting at position 3726 of SEQ ID NO: 1885723
augcuaaugaggugacaua

SEQ ID NO: 2363575 - RNA, 19 nt, Artificial Sequence
  Description of Artificial Sequence: Synthetic oligonucleotide
  Antisense strand to SEQ ID NO: 2363574
uaugucaccucauuagcau

SEQ ID NO: 2363576 - RNA, 19 nt, Artificial Sequence
  Description of Artificial Sequence: Synthetic oligonucleotide
  Sense strand starting at position 3840 of SEQ ID NO: 1885723
cagggaguuuaugcuaaug

SEQ ID NO: 2363577 - RNA, 19 nt, Artificial Sequence
  Description of Artificial Sequence: Synthetic oligonucleotide
  Antisense strand to SEQ ID NO: 2363576
cauuagcauaaacucccug

SEQ ID NO: 2363578 - RNA, 19 nt, Artificial Sequence
  Description of Artificial Sequence: Synthetic oligonucleotide
  Sense strand starting at position 3913 of SEQ ID NO: 1885723
agaucauggauucgaacuu

SEQ ID NO: 2363579 - RNA, 19 nt, Artificial Sequence
  Description of Artificial Sequence: Synthetic oligonucleotide
  Antisense strand to SEQ ID NO: 2363578
aaguucgaauccaugaucu

SEQ ID NO: 2363580 - RNA, 19 nt, Artificial Sequence
  Description of Artificial Sequence: Synthetic oligonucleotide
  Sense strand starting at position 3919 of SEQ ID NO: 1885723
uggauucgaacuuggaaau

SEQ ID NO: 2363581 - RNA, 19 nt, Artificial Sequence
  Description of Artificial Sequence: Synthetic oligonucleotide
  Antisense strand to SEQ ID NO: 2363580
auuuccaaguucgaaucca

SEQ ID NO: 2363582 - RNA, 19 nt, Artificial Sequence
  Description of Artificial Sequence: Synthetic oligonucleotide
  Sense strand starting at position 3925 of SEQ ID NO: 1885723
cgaacuuggaaauguacaa

SEQ ID NO: 2363583 - RNA, 19 nt, Artificial Sequence
  Description of Artificial Sequence: Synthetic oligonucleotide
  Antisense strand to SEQ ID NO: 2363582
uuguacauuuccaaguucg

SEQ ID NO: 2363584 - RNA, 19 nt, Artificial Sequence
  Description of Artificial Sequence: Synthetic oligonucleotide
  Sense strand starting at position 170 of SEQ ID NO: 1885724
ugucauaacguuuaucaca

SEQ ID NO: 2363585 - RNA, 19 nt, Artificial Sequence
  Description of Artificial Sequence: Synthetic oligonucleotide
  Antisense strand to SEQ ID NO: 2363584
ugugauaaacguuaugaca

SEQ ID NO: 2363586 - RNA, 19 nt, Artificial Sequence
  Description of Artificial Sequence: Synthetic oligonucleotide
  Sense strand starting at position 352 of SEQ ID NO: 1885724
ggaggaaagcgucgacuca

SEQ ID NO: 2363587 - RNA, 19 nt, Artificial Sequence
  Description of Artificial Sequence: Synthetic oligonucleotide
  Antisense strand to SEQ ID NO: 2363586
ugagucgacgcuuuccucc

SEQ ID NO: 2363588 - RNA, 19 nt, Artificial Sequence
  Description of Artificial Sequence: Synthetic oligonucleotide
  Sense strand starting at position 353 of SEQ ID NO: 1885724
gaggaaagcgucgacucaa

SEQ ID NO: 2363589 - RNA, 19 nt, Artificial Sequence
  Description of Artificial Sequence: Synthetic oligonucleotide
  Antisense strand to SEQ ID NO: 2363588
uugagucgacgcuuuccuc

SEQ ID NO: 2363590 - RNA, 19 nt, Artificial Sequence
  Description of Artificial Sequence: Synthetic oligonucleotide
  Sense strand starting at position 373 of SEQ ID NO: 1885724
ucaggugaaaugugcugau

SEQ ID NO: 2363591 - RNA, 19 nt, Artificial Sequence
  Description of Artificial Sequence: Synthetic oligonucleotide
  Antisense strand to SEQ ID NO: 2363590
aucagcacauuucaccuga

SEQ ID NO: 2363592 - RNA, 19 nt, Artificial Sequence
  Description of Artificial Sequence: Synthetic oligonucleotide
  Sense strand starting at position 377 of SEQ ID NO: 1885724
gugaaaugugcugauacau

SEQ ID NO: 2363593 - RNA, 19 nt, Artificial Sequence
  Description of Artificial Sequence: Synthetic oligonucleotide
  Antisense strand to SEQ ID NO: 2363592
auguaucagcacauuucac

SEQ ID NO: 2363594 - RNA, 19 nt, Artificial Sequence
  Description of Artificial Sequence: Synthetic oligonucleotide
  Sense strand starting at position 404 of SEQ ID NO: 1885724
gguuauacacaucauagcu

SEQ ID NO: 2363595 - RNA, 19 nt, Artificial Sequence
  Description of Artificial Sequence: Synthetic oligonucleotide
  Antisense strand to SEQ ID NO: 2363594
agcuaugauguguauaacc

SEQ ID NO: 2363596 - RNA, 19 nt, Artificial Sequence
  Description of Artificial Sequence: Synthetic oligonucleotide
  Sense strand starting at position 637 of SEQ ID NO: 1885724
uagggaguucugugugaag

SEQ ID NO: 2363597 - RNA, 19 nt, Artificial Sequence
  Description of Artificial Sequence: Synthetic oligonucleotide
  Antisense strand to SEQ ID NO: 2363596
cuucacacagaacucccua

SEQ ID NO: 2363598 - RNA, 19 nt, Artificial Sequence
  Description of Artificial Sequence: Synthetic oligonucleotide
  Sense strand starting at position 655 of SEQ ID NO: 1885724
guauuaugccaaggaucag

SEQ ID NO: 2363599 - RNA, 19 nt, Artificial Sequence
  Description of Artificial Sequence: Synthetic oligonucleotide
  Antisense strand to SEQ ID NO: 2363598
cugauccuuggcauaauac

SEQ ID NO: 2363600 - RNA, 19 nt, Artificial Sequence
  Description of Artificial Sequence: Synthetic oligonucleotide
  Sense strand starting at position 672 of SEQ ID NO: 1885724
agccauuaagccugcauuu

SEQ ID NO: 2363601 - RNA, 19 nt, Artificial Sequence
  Description of Artificial Sequence: Synthetic oligonucleotide
  Antisense strand to SEQ ID NO: 2363600
aaaugcaggcuuaauggcu

SEQ ID NO: 2363602 - RNA, 19 nt, Artificial Sequence
  Description of Artificial Sequence: Synthetic oligonucleotide
  Sense strand starting at position 691 of SEQ ID NO: 1885724
aagacagucugguauauuu

SEQ ID NO: 2363603 - RNA, 19 nt, Artificial Sequence
  Description of Artificial Sequence: Synthetic oligonucleotide
  Antisense strand to SEQ ID NO: 2363602
aaauauaccagacugucuu

SEQ ID NO: 2363604 - RNA, 19 nt, Artificial Sequence
  Description of Artificial Sequence: Synthetic oligonucleotide
  Sense strand starting at position 698 of SEQ ID NO: 1885724
ucugguauauuucuggcau

SEQ ID NO: 2363605 - RNA, 19 nt, Artificial Sequence
  Description of Artificial Sequence: Synthetic oligonucleotide
  Antisense strand to SEQ ID NO: 2363604
augccagaaauauaccaga

SEQ ID NO: 2363606 - RNA, 19 nt, Artificial Sequence
  Description of Artificial Sequence: Synthetic oligonucleotide
  Sense strand starting at position 700 of SEQ ID NO: 1885724
ugguauauuucuggcauuu

SEQ ID NO: 2363607 - RNA, 19 nt, Artificial Sequence
  Description of Artificial Sequence: Synthetic oligonucleotide
  Antisense strand to SEQ ID NO: 2363606
aaaugccagaaauauacca

SEQ ID NO: 2363608 - RNA, 19 nt, Artificial Sequence
  Description of Artificial Sequence: Synthetic oligonucleotide
  Sense strand starting at position 750 of SEQ ID NO: 1885724
ugaucugaguuuccucuua

SEQ ID NO: 2363609 - RNA, 19 nt, Artificial Sequence
  Description of Artificial Sequence: Synthetic oligonucleotide
  Antisense strand to SEQ ID NO: 2363608
uaagaggaaacucagauca

SEQ ID NO: 2363610 - RNA, 19 nt, Artificial Sequence
  Description of Artificial Sequence: Synthetic oligonucleotide
  Sense strand starting at position 752 of SEQ ID NO: 1885724
aucugaguuuccucuuauu

SEQ ID NO: 2363611 - RNA, 19 nt, Artificial Sequence
  Description of Artificial Sequence: Synthetic oligonucleotide
  Antisense strand to SEQ ID NO: 2363610
aauaagaggaaacucagau

SEQ ID NO: 2363612 - RNA, 19 nt, Artificial Sequence
  Description of Artificial Sequence: Synthetic oligonucleotide
  Sense strand starting at position 881 of SEQ ID NO: 1885724
ccgagaaacucucaaauuu

SEQ ID NO: 2363613 - RNA, 19 nt, Artificial Sequence
  Description of Artificial Sequence: Synthetic oligonucleotide
  Antisense strand to SEQ ID NO: 2363612
aaauuugagaguuucucgg

SEQ ID NO: 2363614 - RNA, 19 nt, Artificial Sequence
  Description of Artificial Sequence: Synthetic oligonucleotide
  Sense strand starting at position 1051 of SEQ ID NO: 1885724
cugaaagauucgcucuacu

SEQ ID NO: 2363615 - RNA, 19 nt, Artificial Sequence
  Description of Artificial Sequence: Synthetic oligonucleotide
  Antisense strand to SEQ ID NO: 2363614
aguagagcgaaucuuucag

SEQ ID NO: 2363616 - RNA, 19 nt, Artificial Sequence
  Description of Artificial Sequence: Synthetic oligonucleotide
  Sense strand starting at position 1084 of SEQ ID NO: 1885724
uaauauugguaagugauag

SEQ ID NO: 2363617 - RNA, 19 nt, Artificial Sequence
  Description of Artificial Sequence: Synthetic oligonucleotide
  Antisense strand to SEQ ID NO: 2363616
cuaucacuuaccaauauua

SEQ ID NO: 2363618 - RNA, 19 nt, Artificial Sequence
  Description of Artificial Sequence: Synthetic oligonucleotide
  Sense strand starting at position 1107 of SEQ ID NO: 1885724
agagaucaauagcaaagaa

SEQ ID NO: 2363619 - RNA, 19 nt, Artificial Sequence
  Description of Artificial Sequence: Synthetic oligonucleotide
  Antisense strand to SEQ ID NO: 2363618
uucuuugcuauugaucucu

SEQ ID NO: 2363620 - RNA, 19 nt, Artificial Sequence
  Description of Artificial Sequence: Synthetic oligonucleotide
  Sense strand starting at position 1813 of SEQ ID NO: 1885724
cgaccagccuaaucauaga

SEQ ID NO: 2363621 - RNA, 19 nt, Artificial Sequence
  Description of Artificial Sequence: Synthetic oligonucleotide
  Antisense strand to SEQ ID NO: 2363620
ucuaugauuaggcuggucg

SEQ ID NO: 2363622 - RNA, 19 nt, Artificial Sequence
  Description of Artificial Sequence: Synthetic oligonucleotide
  Sense strand starting at position 1915 of SEQ ID NO: 1885724
agauaugugcaacaaguau

SEQ ID NO: 2363623 - RNA, 19 nt, Artificial Sequence
  Description of Artificial Sequence: Synthetic oligonucleotide
  Antisense strand to SEQ ID NO: 2363622
auacuuguugcacauaucu

SEQ ID NO: 2363624 - RNA, 19 nt, Artificial Sequence
  Description of Artificial Sequence: Synthetic oligonucleotide
  Sense strand starting at position 2010 of SEQ ID NO: 1885724
aggagcauucaggguggua

SEQ ID NO: 2363625 - RNA, 19 nt, Artificial Sequence
  Description of Artificial Sequence: Synthetic oligonucleotide
  Antisense strand to SEQ ID NO: 2363624
uaccacccugaaugcuccu

SEQ ID NO: 2363626 - RNA, 19 nt, Artificial Sequence
  Description of Artificial Sequence: Synthetic oligonucleotide
  Sense strand starting at position 2123 of SEQ ID NO: 1885724
ggcuuaagacauugauagg

SEQ ID NO: 2363627 - RNA, 19 nt, Artificial Sequence
  Description of Artificial Sequence: Synthetic oligonucleotide
  Antisense strand to SEQ ID NO: 2363626
ccuaucaaugucuuaagcc

SEQ ID NO: 2363628 - RNA, 19 nt, Artificial Sequence
  Description of Artificial Sequence: Synthetic oligonucleotide
  Sense strand starting at position 2256 of SEQ ID NO: 1885724
acguguuggcaagaaagua

SEQ ID NO: 2363629 - RNA, 19 nt, Artificial Sequence
  Description of Artificial Sequence: Synthetic oligonucleotide
  Antisense strand to SEQ ID NO: 2363628
uacuuucuugccaacacgu

SEQ ID NO: 2363630 - RNA, 19 nt, Artificial Sequence
  Description of Artificial Sequence: Synthetic oligonucleotide
  Sense strand starting at position 2352 of SEQ ID NO: 1885724
ucuacuaaagccgaagaua

SEQ ID NO: 2363631 - RNA, 19 nt, Artificial Sequence
  Description of Artificial Sequence: Synthetic oligonucleotide
  Antisense strand to SEQ ID NO: 2363630
uaucuucggcuuuaguaga

SEQ ID NO: 2363632 - RNA, 19 nt, Artificial Sequence
  Description of Artificial Sequence: Synthetic oligonucleotide
  Sense strand starting at position 2413 of SEQ ID NO: 1885724
aacugaagugcuuguacau

SEQ ID NO: 2363633 - RNA, 19 nt, Artificial Sequence
  Description of Artificial Sequence: Synthetic oligonucleotide
  Antisense strand to SEQ ID NO: 2363632
auguacaagcacuucaguu

SEQ ID NO: 2363634 - RNA, 19 nt, Artificial Sequence
  Description of Artificial Sequence: Synthetic oligonucleotide
  Sense strand starting at position 2426 of SEQ ID NO: 1885724
guacaugugcaccaagaga

SEQ ID NO: 2363635 - RNA, 19 nt, Artificial Sequence
  Description of Artificial Sequence: Synthetic oligonucleotide
  Antisense strand to SEQ ID NO: 2363634
ucucuuggugcacauguac

SEQ ID NO: 2363636 - RNA, 19 nt, Artificial Sequence
  Description of Artificial Sequence: Synthetic oligonucleotide
  Sense strand starting at position 2448 of SEQ ID NO: 1885724
guauaagaauguucguaag

SEQ ID NO: 2363637 - RNA, 19 nt, Artificial Sequence
  Description of Artificial Sequence: Synthetic oligonucleotide
  Antisense strand to SEQ ID NO: 2363636
cuuacgaacauucuuauac

SEQ ID NO: 2363638 - RNA, 19 nt, Artificial Sequence
  Description of Artificial Sequence: Synthetic oligonucleotide
  Sense strand starting at position 2450 of SEQ ID NO: 1885724
auaagaauguucguaagua

SEQ ID NO: 2363639 - RNA, 19 nt, Artificial Sequence
  Description of Artificial Sequence: Synthetic oligonucleotide
  Antisense strand to SEQ ID NO: 2363638
uacuuacgaacauucuuau

SEQ ID NO: 2363640 - RNA, 19 nt, Artificial Sequence
  Description of Artificial Sequence: Synthetic oligonucleotide
  Sense strand starting at position 2797 of SEQ ID NO: 1885724
augagcuuaggugguaaga

SEQ ID NO: 2363641 - RNA, 19 nt, Artificial Sequence
  Description of Artificial Sequence: Synthetic oligonucleotide
  Antisense strand to SEQ ID NO: 2363640
ucuuaccaccuaagcucau

SEQ ID NO: 2363642 - RNA, 19 nt, Artificial Sequence
  Description of Artificial Sequence: Synthetic oligonucleotide
  Sense strand starting at position 2826 of SEQ ID NO: 1885724
gagagucaugauuguaaca

SEQ ID NO: 2363643 - RNA, 19 nt, Artificial Sequence
  Description of Artificial Sequence: Synthetic oligonucleotide
  Antisense strand to SEQ ID NO: 2363642
uguuacaaucaugacucuc

SEQ ID NO: 2363644 - RNA, 19 nt, Artificial Sequence
  Description of Artificial Sequence: Synthetic oligonucleotide
  Sense strand starting at position 2962 of SEQ ID NO: 1885724
uguaauaaaucacugagcu

SEQ ID NO: 2363645 - RNA, 19 nt, Artificial Sequence
  Description of Artificial Sequence: Synthetic oligonucleotide
  Antisense strand to SEQ ID NO: 2363644
agcucagugauuuauuaca

SEQ ID NO: 2363646 - RNA, 19 nt, Artificial Sequence
  Description of Artificial Sequence: Synthetic oligonucleotide
  Sense strand starting at position 2963 of SEQ ID NO: 1885724
guaauaaaucacugagcug

SEQ ID NO: 2363647 - RNA, 19 nt, Artificial Sequence
  Description of Artificial Sequence: Synthetic oligonucleotide
  Antisense strand to SEQ ID NO: 2363646
cagcucagugauuuauuac

SEQ ID NO: 2363648 - RNA, 19 nt, Artificial Sequence
  Description of Artificial Sequence: Synthetic oligonucleotide
  Sense strand starting at position 3127 of SEQ ID NO: 1885724
uuguaauucucuguauaac

SEQ ID NO: 2363649 - RNA, 19 nt, Artificial Sequence
  Description of Artificial Sequence: Synthetic oligonucleotide
  Antisense strand to SEQ ID NO: 2363648
guuauacagagaauuacaa

SEQ ID NO: 2363650 - RNA, 19 nt, Artificial Sequence
  Description of Artificial Sequence: Synthetic oligonucleotide
  Sense strand starting at position 3128 of SEQ ID NO: 1885724
uguaauucucuguauaaca

SEQ ID NO: 2363651 - RNA, 19 nt, Artificial Sequence
  Description of Artificial Sequence: Synthetic oligonucleotide
  Antisense strand to SEQ ID NO: 2363650
uguuauacagagaauuaca

SEQ ID NO: 2363652 - RNA, 19 nt, Artificial Sequence
  Description of Artificial Sequence: Synthetic oligonucleotide
  Sense strand starting at position 3144 of SEQ ID NO: 1885724
acaacauuguggucaacua

SEQ ID NO: 2363653 - RNA, 19 nt, Artificial Sequence
  Description of Artificial Sequence: Synthetic oligonucleotide
  Antisense strand to SEQ ID NO: 2363652
uaguugaccacaauguugu

SEQ ID NO: 2363654 - RNA, 19 nt, Artificial Sequence
  Description of Artificial Sequence: Synthetic oligonucleotide
  Sense strand starting at position 3221 of SEQ ID NO: 1885724
ggucuagugacauggcaau

SEQ ID NO: 2363655 - RNA, 19 nt, Artificial Sequence
  Description of Artificial Sequence: Synthetic oligonucleotide
  Antisense strand to SEQ ID NO: 2363654
auugccaugucacuagacc

SEQ ID NO: 2363656 - RNA, 19 nt, Artificial Sequence
  Description of Artificial Sequence: Synthetic oligonucleotide
  Sense strand starting at position 3227 of SEQ ID NO: 1885724
gugacauggcaaugauugu

SEQ ID NO: 2363657 - RNA, 19 nt, Artificial Sequence
  Description of Artificial Sequence: Synthetic oligonucleotide
  Antisense strand to SEQ ID NO: 2363656
acaaucauugccaugucac

SEQ ID NO: 2363658 - RNA, 19 nt, Artificial Sequence
  Description of Artificial Sequence: Synthetic oligonucleotide
  Sense strand starting at position 3233 of SEQ ID NO: 1885724
uggcaaugauugucaucaa

SEQ ID NO: 2363659 - RNA, 19 nt, Artificial Sequence
  Description of Artificial Sequence: Synthetic oligonucleotide
  Antisense strand to SEQ ID NO: 2363658
uugaugacaaucauugcca

SEQ ID NO: 2363660 - RNA, 19 nt, Artificial Sequence
  Description of Artificial Sequence: Synthetic oligonucleotide
  Sense strand starting at position 3240 of SEQ ID NO: 1885724
gauugucaucaagauacgu

SEQ ID NO: 2363661 - RNA, 19 nt, Artificial Sequence
  Description of Artificial Sequence: Synthetic oligonucleotide
  Antisense strand to SEQ ID NO: 2363660
acguaucuugaugacaauc

SEQ ID NO: 2363662 - RNA, 19 nt, Artificial Sequence
  Description of Artificial Sequence: Synthetic oligonucleotide
  Sense strand starting at position 3956 of SEQ ID NO: 1885724
ccuauacaggugugauaug

SEQ ID NO: 2363663 - RNA, 19 nt, Artificial Sequence
  Description of Artificial Sequence: Synthetic oligonucleotide
  Antisense strand to SEQ ID NO: 2363662
cauaucacaccuguauagg

SEQ ID NO: 2363664 - RNA, 19 nt, Artificial Sequence
  Description of Artificial Sequence: Synthetic oligonucleotide
  Sense strand starting at position 506 of SEQ ID NO: 1885726
aggauuuaaugagauaugu

SEQ ID NO: 2363665 - RNA, 19 nt, Artificial Sequence
  Description of Artificial Sequence: Synthetic oligonucleotide
  Antisense strand to SEQ ID NO: 2363664
acauaucucauuaaauccu

SEQ ID NO: 2363666 - RNA, 19 nt, Artificial Sequence
  Description of Artificial Sequence: Synthetic oligonucleotide
  Sense strand starting at position 549 of SEQ ID NO: 1885726
uagugcuucgcagcacauu

SEQ ID NO: 2363667 - RNA, 19 nt, Artificial Sequence
  Description of Artificial Sequence: Synthetic oligonucleotide
  Antisense strand to SEQ ID NO: 2363666
aaugugcugcgaagcacua

SEQ ID NO: 2363668 - RNA, 19 nt, Artificial Sequence
  Description of Artificial Sequence: Synthetic oligonucleotide
  Sense strand starting at position 588 of SEQ ID NO: 1885726
aggauaaggcccugaauua

SEQ ID NO: 2363669 - RNA, 19 nt, Artificial Sequence
  Description of Artificial Sequence: Synthetic oligonucleotide
  Antisense strand to SEQ ID NO: 2363668
uaauucagggccuuauccu

SEQ ID NO: 2363670 - RNA, 19 nt, Artificial Sequence
  Description of Artificial Sequence: Synthetic oligonucleotide
  Sense strand starting at position 608 of SEQ ID NO: 1885726
agaacaaucccauggaguu

SEQ ID NO: 2363671 - RNA, 19 nt, Artificial Sequence
  Description of Artificial Sequence: Synthetic oligonucleotide
  Antisense strand to SEQ ID NO: 2363670
aacuccaugggauuguucu

SEQ ID NO: 2363672 - RNA, 19 nt, Artificial Sequence
  Description of Artificial Sequence: Synthetic oligonucleotide
  Sense strand starting at position 609 of SEQ ID NO: 1885726
gaacaaucccauggaguuu

SEQ ID NO: 2363673 - RNA, 19 nt, Artificial Sequence
  Description of Artificial Sequence: Synthetic oligonucleotide
  Antisense strand to SEQ ID NO: 2363672
aaacuccaugggauuguuc

SEQ ID NO: 2363674 - RNA, 19 nt, Artificial Sequence
  Description of Artificial Sequence: Synthetic oligonucleotide
  Sense strand starting at position 620 of SEQ ID NO: 1885726
uggaguuuacagcaagauc

SEQ ID NO: 2363675 - RNA, 19 nt, Artificial Sequence
  Description of Artificial Sequence: Synthetic oligonucleotide
  Antisense strand to SEQ ID NO: 2363674
gaucuugcuguaaacucca

SEQ ID NO: 2363676 - RNA, 19 nt, Artificial Sequence
  Description of Artificial Sequence: Synthetic oligonucleotide
  Sense strand starting at position 770 of SEQ ID NO: 1885726
aauguccugcgauguauuu

SEQ ID NO: 2363677 - RNA, 19 nt, Artificial Sequence
  Description of Artificial Sequence: Synthetic oligonucleotide
  Antisense strand to SEQ ID NO: 2363676
aaauacaucgcaggacauu

SEQ ID NO: 2363678 - RNA, 19 nt, Artificial Sequence
  Description of Artificial Sequence: Synthetic oligonucleotide
  Sense strand starting at position 1238 of SEQ ID NO: 1885726
ugaugaggauucuuucuuu

SEQ ID NO: 2363679 - RNA, 19 nt, Artificial Sequence
  Description of Artificial Sequence: Synthetic oligonucleotide
  Antisense strand to SEQ ID NO: 2363678
aaagaaagaauccucauca

SEQ ID NO: 2363680 - RNA, 19 nt, Artificial Sequence
  Description of Artificial Sequence: Synthetic oligonucleotide
  Sense strand starting at position 1263 of SEQ ID NO: 1885726
uccugauguugaccacaga

SEQ ID NO: 2363681 - RNA, 19 nt, Artificial Sequence
  Description of Artificial Sequence: Synthetic oligonucleotide
  Antisense strand to SEQ ID NO: 2363680
ucuguggucaacaucagga

SEQ ID NO: 2363682 - RNA, 19 nt, Artificial Sequence
  Description of Artificial Sequence: Synthetic oligonucleotide
  Sense strand starting at position 1295 of SEQ ID NO: 1885726
guauccaaagccugauuau

SEQ ID NO: 2363683 - RNA, 19 nt, Artificial Sequence
  Description of Artificial Sequence: Synthetic oligonucleotide
  Antisense strand to SEQ ID NO: 2363682
auaaucaggcuuuggauac

SEQ ID NO: 2363684 - RNA, 19 nt, Artificial Sequence
  Description of Artificial Sequence: Synthetic oligonucleotide
  Sense strand starting at position 1304 of SEQ ID NO: 1885726
gccugauuauucccauaag

SEQ ID NO: 2363685 - RNA, 19 nt, Artificial Sequence
  Description of Artificial Sequence: Synthetic oligonucleotide
  Antisense strand to SEQ ID NO: 2363684
cuuaugggaauaaucaggc

SEQ ID NO: 2363686 - RNA, 19 nt, Artificial Sequence
  Description of Artificial Sequence: Synthetic oligonucleotide
  Sense strand starting at position 1307 of SEQ ID NO: 1885726
ugauuauucccauaagggc

SEQ ID NO: 2363687 - RNA, 19 nt, Artificial Sequence
  Description of Artificial Sequence: Synthetic oligonucleotide
  Antisense strand to SEQ ID NO: 2363686
gcccuuaugggaauaauca

SEQ ID NO: 2363688 - RNA, 19 nt, Artificial Sequence
  Description of Artificial Sequence: Synthetic oligonucleotide
  Sense strand starting at position 1355 of SEQ ID NO: 1885726
uccugagaccucuggauga

SEQ ID NO: 2363689 - RNA, 19 nt, Artificial Sequence
  Description of Artificial Sequence: Synthetic oligonucleotide
  Antisense strand to SEQ ID NO: 2363688
ucauccagaggucucagga

SEQ ID NO: 2363690 - RNA, 19 nt, Artificial Sequence
  Description of Artificial Sequence: Synthetic oligonucleotide
  Sense strand starting at position 1455 of SEQ ID NO: 1885726
ggugaaggacuuggacuau

SEQ ID NO: 2363691 - RNA, 19 nt, Artificial Sequence
  Description of Artificial Sequence: Synthetic oligonucleotide
  Antisense strand to SEQ ID NO: 2363690
auaguccaaguccuucacc

SEQ ID NO: 2363692 - RNA, 19 nt, Artificial Sequence
  Description of Artificial Sequence: Synthetic oligonucleotide
  Sense strand starting at position 1665 of SEQ ID NO: 1885726
ucaagauuacagugggcau

SEQ ID NO: 2363693 - RNA, 19 nt, Artificial Sequence
  Description of Artificial Sequence: Synthetic oligonucleotide
  Antisense strand to SEQ ID NO: 2363692
augcccacuguaaucuuga

SEQ ID NO: 2363694 - RNA, 19 nt, Artificial Sequence
  Description of Artificial Sequence: Synthetic oligonucleotide
  Sense strand starting at position 1838 of SEQ ID NO: 1885726
ccggguucaguacauagau

SEQ ID NO: 2363695 - RNA, 19 nt, Artificial Sequence
  Description of Artificial Sequence: Synthetic oligonucleotide
  Antisense strand to SEQ ID NO: 2363694
aucuauguacugaacccgg

SEQ ID NO: 2363696 - RNA, 19 nt, Artificial Sequence
  Description of Artificial Sequence: Synthetic oligonucleotide
  Sense strand starting at position 1867 of SEQ ID NO: 1885726
cacccuuuggguugacaau

SEQ ID NO: 2363697 - RNA, 19 nt, Artificial Sequence
  Description of Artificial Sequence: Synthetic oligonucleotide
  Antisense strand to SEQ ID NO: 2363696
auugucaacccaaagggug

SEQ ID NO: 2363698 - RNA, 19 nt, Artificial Sequence
  Description of Artificial Sequence: Synthetic oligonucleotide
  Sense strand starting at position 1868 of SEQ ID NO: 1885726
acccuuuggguugacaauu

SEQ ID NO: 2363699 - RNA, 19 nt, Artificial Sequence
  Description of Artificial Sequence: Synthetic oligonucleotide
  Antisense strand to SEQ ID NO: 2363698
aauugucaacccaaagggu

SEQ ID NO: 2363700 - RNA, 19 nt, Artificial Sequence
  Description of Artificial Sequence: Synthetic oligonucleotide
  Sense strand starting at position 1892 of SEQ ID NO: 1885726
cagguugcugcugaugaua

SEQ ID NO: 2363701 - RNA, 19 nt, Artificial Sequence
  Description of Artificial Sequence: Synthetic oligonucleotide
  Antisense strand to SEQ ID NO: 2363700
uaucaucagcagcaaccug

SEQ ID NO: 2363702 - RNA, 19 nt, Artificial Sequence
  Description of Artificial Sequence: Synthetic oligonucleotide
  Sense strand starting at position 2069 of SEQ ID NO: 1885726
gccucaucucgcucaugca

SEQ ID NO: 2363703 - RNA, 19 nt, Artificial Sequence
  Description of Artificial Sequence: Synthetic oligonucleotide
  Antisense strand to SEQ ID NO: 2363702
ugcaugagcgagaugaggc

SEQ ID NO: 2363704 - RNA, 19 nt, Artificial Sequence
  Description of Artificial Sequence: Synthetic oligonucleotide
  Sense strand starting at position 2219 of SEQ ID NO: 1885726
gaaauaggaucccaaagga

SEQ ID NO: 2363705 - RNA, 19 nt, Artificial Sequence
  Description of Artificial Sequence: Synthetic oligonucleotide
  Antisense strand to SEQ ID NO: 2363704
uccuuugggauccuauuuc

SEQ ID NO: 2363706 - RNA, 19 nt, Artificial Sequence
  Description of Artificial Sequence: Synthetic oligonucleotide
  Sense strand starting at position 2409 of SEQ ID NO: 1885726
cuacaugagucuccuugga

SEQ ID NO: 2363707 - RNA, 19 nt, Artificial Sequence
  Description of Artificial Sequence: Synthetic oligonucleotide
  Antisense strand to SEQ ID NO: 2363706
uccaaggagacucauguag

SEQ ID NO: 2363708 - RNA, 19 nt, Artificial Sequence
  Description of Artificial Sequence: Synthetic oligonucleotide
  Sense strand starting at position 2454 of SEQ ID NO: 1885726
cugagaaguaccugccaga

SEQ ID NO: 2363709 - RNA, 19 nt, Artificial Sequence
  Description of Artificial Sequence: Synthetic oligonucleotide
  Antisense strand to SEQ ID NO: 2363708
ucuggcagguacuucucag

SEQ ID NO: 2363710 - RNA, 19 nt, Artificial Sequence
  Description of Artificial Sequence: Synthetic oligonucleotide
  Sense strand starting at position 2489 of SEQ ID NO: 1885726
aggaaugaguguucaggga

SEQ ID NO: 2363711 - RNA, 19 nt, Artificial Sequence
  Description of Artificial Sequence: Synthetic oligonucleotide
  Antisense strand to SEQ ID NO: 2363710
ucccugaacacucauuccu

SEQ ID NO: 2363712 - RNA, 19 nt, Artificial Sequence
  Description of Artificial Sequence: Synthetic oligonucleotide
  Sense strand starting at position 2628 of SEQ ID NO: 1885726
uggaaaugguugucuggaa

SEQ ID NO: 2363713 - RNA, 19 nt, Artificial Sequence
  Description of Artificial Sequence: Synthetic oligonucleotide
  Antisense strand to SEQ ID NO: 2363712
uuccagacaaccauuucca

SEQ ID NO: 2363714 - RNA, 19 nt, Artificial Sequence
  Description of Artificial Sequence: Synthetic oligonucleotide
  Sense strand starting at position 2629 of SEQ ID NO: 1885726
ggaaaugguugucuggaaa

SEQ ID NO: 2363715 - RNA, 19 nt, Artificial Sequence
  Description of Artificial Sequence: Synthetic oligonucleotide
  Antisense strand to SEQ ID NO: 2363714
uuuccagacaaccauuucc

SEQ ID NO: 2363716 - RNA, 19 nt, Artificial Sequence
  Description of Artificial Sequence: Synthetic oligonucleotide
  Sense strand starting at position 2632 of SEQ ID NO: 1885726
aaugguugucuggaaagcu

SEQ ID NO: 2363717 - RNA, 19 nt, Artificial Sequence
  Description of Artificial Sequence: Synthetic oligonucleotide
  Antisense strand to SEQ ID NO: 2363716
agcuuuccagacaaccauu

SEQ ID NO: 2363718 - RNA, 19 nt, Artificial Sequence
  Description of Artificial Sequence: Synthetic oligonucleotide
  Sense strand starting at position 2905 of SEQ ID NO: 1885726
uguguuaagagguaucaug

SEQ ID NO: 2363719 - RNA, 19 nt, Artificial Sequence
  Description of Artificial Sequence: Synthetic oligonucleotide
  Antisense strand to SEQ ID NO: 2363718
caugauaccucuuaacaca

SEQ ID NO: 2363720 - RNA, 19 nt, Artificial Sequence
  Description of Artificial Sequence: Synthetic oligonucleotide
  Sense strand starting at position 3078 of SEQ ID NO: 1885726
guacccauuuaacagauga

SEQ ID NO: 2363721 - RNA, 19 nt, Artificial Sequence
  Description of Artificial Sequence: Synthetic oligonucleotide
  Antisense strand to SEQ ID NO: 2363720
ucaucuguuaaauggguac

SEQ ID NO: 2363722 - RNA, 19 nt, Artificial Sequence
  Description of Artificial Sequence: Synthetic oligonucleotide
  Sense strand starting at position 3103 of SEQ ID NO: 1885726
ugagucacagaaugucuaa

SEQ ID NO: 2363723 - RNA, 19 nt, Artificial Sequence
  Description of Artificial Sequence: Synthetic oligonucleotide
  Antisense strand to SEQ ID NO: 2363722
uuagacauucugugacuca

SEQ ID NO: 2363724 - RNA, 19 nt, Artificial Sequence
  Description of Artificial Sequence: Synthetic oligonucleotide
  Sense strand starting at position 3110 of SEQ ID NO: 1885726
cagaaugucuaagugacuu

SEQ ID NO: 2363725 - RNA, 19 nt, Artificial Sequence
  Description of Artificial Sequence: Synthetic oligonucleotide
  Antisense strand to SEQ ID NO: 2363724
aagucacuuagacauucug

SEQ ID NO: 2363726 - RNA, 19 nt, Artificial Sequence
  Description of Artificial Sequence: Synthetic oligonucleotide
  Sense strand starting at position 3114 of SEQ ID NO: 1885726
augucuaagugacuuacuu

SEQ ID NO: 2363727 - RNA, 19 nt, Artificial Sequence
  Description of Artificial Sequence: Synthetic oligonucleotide
  Antisense strand to SEQ ID NO: 2363726
aaguaagucacuuagacau

SEQ ID NO: 2363728 - RNA, 19 nt, Artificial Sequence
  Description of Artificial Sequence: Synthetic oligonucleotide
  Sense strand starting at position 3316 of SEQ ID NO: 1885726
ugugauaagagaggucuaa

SEQ ID NO: 2363729 - RNA, 19 nt, Artificial Sequence
  Description of Artificial Sequence: Synthetic oligonucleotide
  Antisense strand to SEQ ID NO: 2363728
uuagaccucucuuaucaca

SEQ ID NO: 2363730 - RNA, 19 nt, Artificial Sequence
  Description of Artificial Sequence: Synthetic oligonucleotide
  Sense strand starting at position 3395 of SEQ ID NO: 1885726
ggacuaggucucuguauga

SEQ ID NO: 2363731 - RNA, 19 nt, Artificial Sequence
  Description of Artificial Sequence: Synthetic oligonucleotide
  Antisense strand to SEQ ID NO: 2363730
ucauacagagaccuagucc

SEQ ID NO: 2363732 - RNA, 19 nt, Artificial Sequence
  Description of Artificial Sequence: Synthetic oligonucleotide
  Sense strand starting at position 3399 of SEQ ID NO: 1885726
uaggucucuguaugaagga

SEQ ID NO: 2363733 - RNA, 19 nt, Artificial Sequence
  Description of Artificial Sequence: Synthetic oligonucleotide
  Antisense strand to SEQ ID NO: 2363732
uccuucauacagagaccua

SEQ ID NO: 2363734 - RNA, 19 nt, Artificial Sequence
  Description of Artificial Sequence: Synthetic oligonucleotide
  Sense strand starting at position 3408 of SEQ ID NO: 1885726
guaugaaggacuuguaucu

SEQ ID NO: 2363735 - RNA, 19 nt, Artificial Sequence
  Description of Artificial Sequence: Synthetic oligonucleotide
  Antisense strand to SEQ ID NO: 2363734
agauacaaguccuucauac

SEQ ID NO: 2363736 - RNA, 19 nt, Artificial Sequence
  Description of Artificial Sequence: Synthetic oligonucleotide
  Sense strand starting at position 3418 of SEQ ID NO: 1885726
cuuguaucuacggaggagu

SEQ ID NO: 2363737 - RNA, 19 nt, Artificial Sequence
  Description of Artificial Sequence: Synthetic oligonucleotide
  Antisense strand to SEQ ID NO: 2363736
acuccuccguagauacaag

SEQ ID NO: 2363738 - RNA, 19 nt, Artificial Sequence
  Description of Artificial Sequence: Synthetic oligonucleotide
  Sense strand starting at position 3498 of SEQ ID NO: 1885726
ugcauuucucuuugagagu

SEQ ID NO: 2363739 - RNA, 19 nt, Artificial Sequence
  Description of Artificial Sequence: Synthetic oligonucleotide
  Antisense strand to SEQ ID NO: 2363738
acucucaaagagaaaugca

SEQ ID NO: 2363740 - RNA, 19 nt, Artificial Sequence
  Description of Artificial Sequence: Synthetic oligonucleotide
  Sense strand starting at position 3580 of SEQ ID NO: 1885726
acacuuauggacugugaga

SEQ ID NO: 2363741 - RNA, 19 nt, Artificial Sequence
  Description of Artificial Sequence: Synthetic oligonucleotide
  Antisense strand to SEQ ID NO: 2363740
ucucacaguccauaagugu

SEQ ID NO: 2363742 - RNA, 19 nt, Artificial Sequence
  Description of Artificial Sequence: Synthetic oligonucleotide
  Sense strand starting at position 3766 of SEQ ID NO: 1885726
cuucuccauuggguuuaua

SEQ ID NO: 2363743 - RNA, 19 nt, Artificial Sequence
  Description of Artificial Sequence: Synthetic oligonucleotide
  Antisense strand to SEQ ID NO: 2363742
uauaaacccaauggagaag

SEQ ID NO: 2363744 - RNA, 19 nt, Artificial Sequence
  Description of Artificial Sequence: Synthetic oligonucleotide
  Sense strand starting at position 34 of SEQ ID NO: 1885727
ugaggcuuuccuggaacaa

SEQ ID NO: 2363745 - RNA, 19 nt, Artificial Sequence
  Description of Artificial Sequence: Synthetic oligonucleotide
  Antisense strand to SEQ ID NO: 2363744
uuguuccaggaaagccuca

SEQ ID NO: 2363746 - RNA, 19 nt, Artificial Sequence
  Description of Artificial Sequence: Synthetic oligonucleotide
  Sense strand starting at position 139 of SEQ ID NO: 1885727
cugaaaugguuuccacuga

SEQ ID NO: 2363747 - RNA, 19 nt, Artificial Sequence
  Description of Artificial Sequence: Synthetic oligonucleotide
  Antisense strand to SEQ ID NO: 2363746
ucaguggaaaccauuucag

SEQ ID NO: 2363748 - RNA, 19 nt, Artificial Sequence
  Description of Artificial Sequence: Synthetic oligonucleotide
  Sense strand starting at position 143 of SEQ ID NO: 1885727
aaugguuuccacugaugaa

SEQ ID NO: 2363749 - RNA, 19 nt, Artificial Sequence
  Description of Artificial Sequence: Synthetic oligonucleotide
  Antisense strand to SEQ ID NO: 2363748
uucaucaguggaaaccauu

SEQ ID NO: 2363750 - RNA, 19 nt, Artificial Sequence
  Description of Artificial Sequence: Synthetic oligonucleotide
  Sense strand starting at position 147 of SEQ ID NO: 1885727
guuuccacugaugaacuua

SEQ ID NO: 2363751 - RNA, 19 nt, Artificial Sequence
  Description of Artificial Sequence: Synthetic oligonucleotide
  Antisense strand to SEQ ID NO: 2363750
uaaguucaucaguggaaac

SEQ ID NO: 2363752 - RNA, 19 nt, Artificial Sequence
  Description of Artificial Sequence: Synthetic oligonucleotide
  Sense strand starting at position 213 of SEQ ID NO: 1885727
guguuaauaggucaggcaa

SEQ ID NO: 2363753 - RNA, 19 nt, Artificial Sequence
  Description of Artificial Sequence: Synthetic oligonucleotide
  Antisense strand to SEQ ID NO: 2363752
uugccugaccuauuaacac

SEQ ID NO: 2363754 - RNA, 19 nt, Artificial Sequence
  Description of Artificial Sequence: Synthetic oligonucleotide
  Sense strand starting at position 586 of SEQ ID NO: 1885727
cccugaugccacuacauga

SEQ ID NO: 2363755 - RNA, 19 nt, Artificial Sequence
  Description of Artificial Sequence: Synthetic oligonucleotide
  Antisense strand to SEQ ID NO: 2363754
ucauguaguggcaucaggg

SEQ ID NO: 2363756 - RNA, 19 nt, Artificial Sequence
  Description of Artificial Sequence: Synthetic oligonucleotide
  Sense strand starting at position 607 of SEQ ID NO: 1885727
ugcaaagaccauggagauu

SEQ ID NO: 2363757 - RNA, 19 nt, Artificial Sequence
  Description of Artificial Sequence: Synthetic oligonucleotide
  Antisense strand to SEQ ID NO: 2363756
aaucuccauggucuuugca

SEQ ID NO: 2363758 - RNA, 19 nt, Artificial Sequence
  Description of Artificial Sequence: Synthetic oligonucleotide
  Sense strand starting at position 633 of SEQ ID NO: 1885727
caucaaagguguuccuaug

SEQ ID NO: 2363759 - RNA, 19 nt, Artificial Sequence
  Description of Artificial Sequence: Synthetic oligonucleotide
  Antisense strand to SEQ ID NO: 2363758
cauaggaacaccuuugaug

SEQ ID NO: 2363760 - RNA, 19 nt, Artificial Sequence
  Description of Artificial Sequence: Synthetic oligonucleotide
  Sense strand starting at position 643 of SEQ ID NO: 1885727
guuccuauggugcagaaca

SEQ ID NO: 2363761 - RNA, 19 nt, Artificial Sequence
  Description of Artificial Sequence: Synthetic oligonucleotide
  Antisense strand to SEQ ID NO: 2363760
uguucugcaccauaggaac

SEQ ID NO: 2363762 - RNA, 19 nt, Artificial Sequence
  Description of Artificial Sequence: Synthetic oligonucleotide
  Sense strand starting at position 787 of SEQ ID NO: 1885727
ugaggcuauucugugaaau

SEQ ID NO: 2363763 - RNA, 19 nt, Artificial Sequence
  Description of Artificial Sequence: Synthetic oligonucleotide
  Antisense strand to SEQ ID NO: 2363762
auuucacagaauagccuca

SEQ ID NO: 2363764 - RNA, 19 nt, Artificial Sequence
  Description of Artificial Sequence: Synthetic oligonucleotide
  Sense strand starting at position 788 of SEQ ID NO: 1885727
gaggcuauucugugaaaug

SEQ ID NO: 2363765 - RNA, 19 nt, Artificial Sequence
  Description of Artificial Sequence: Synthetic oligonucleotide
  Antisense strand to SEQ ID NO: 2363764
cauuucacagaauagccuc

SEQ ID NO: 2363766 - RNA, 19 nt, Artificial Sequence
  Description of Artificial Sequence: Synthetic oligonucleotide
  Sense strand starting at position 925 of SEQ ID NO: 1885727
acucauuccugguugagaa

SEQ ID NO: 2363767 - RNA, 19 nt, Artificial Sequence
  Description of Artificial Sequence: Synthetic oligonucleotide
  Antisense strand to SEQ ID NO: 2363766
uucucaaccaggaaugagu

SEQ ID NO: 2363768 - RNA, 19 nt, Artificial Sequence
  Description of Artificial Sequence: Synthetic oligonucleotide
  Sense strand starting at position 926 of SEQ ID NO: 1885727
cucauuccugguugagaac

SEQ ID NO: 2363769 - RNA, 19 nt, Artificial Sequence
  Description of Artificial Sequence: Synthetic oligonucleotide
  Antisense strand to SEQ ID NO: 2363768
guucucaaccaggaaugag

SEQ ID NO: 2363770 - RNA, 19 nt, Artificial Sequence
  Description of Artificial Sequence: Synthetic oligonucleotide
  Sense strand starting at position 979 of SEQ ID NO: 1885727
gugagacccuuugucaaau

SEQ ID NO: 2363771 - RNA, 19 nt, Artificial Sequence
  Description of Artificial Sequence: Synthetic oligonucleotide
  Antisense strand to SEQ ID NO: 2363770
auuugacaaagggucucac

SEQ ID NO: 2363772 - RNA, 19 nt, Artificial Sequence
  Description of Artificial Sequence: Synthetic oligonucleotide
  Sense strand starting at position 990 of SEQ ID NO: 1885727
ugucaaaucuaguugggau

SEQ ID NO: 2363773 - RNA, 19 nt, Artificial Sequence
  Description of Artificial Sequence: Synthetic oligonucleotide
  Antisense strand to SEQ ID NO: 2363772
aucccaacuagauuugaca

SEQ ID NO: 2363774 - RNA, 19 nt, Artificial Sequence
  Description of Artificial Sequence: Synthetic oligonucleotide
  Sense strand starting at position 991 of SEQ ID NO: 1885727
gucaaaucuaguugggauc

SEQ ID NO: 2363775 - RNA, 19 nt, Artificial Sequence
  Description of Artificial Sequence: Synthetic oligonucleotide
  Antisense strand to SEQ ID NO: 2363774
gaucccaacuagauuugac

SEQ ID NO: 2363776 - RNA, 19 nt, Artificial Sequence
  Description of Artificial Sequence: Synthetic oligonucleotide
  Sense strand starting at position 992 of SEQ ID NO: 1885727
ucaaaucuaguugggauca

SEQ ID NO: 2363777 - RNA, 19 nt, Artificial Sequence
  Description of Artificial Sequence: Synthetic oligonucleotide
  Antisense strand to SEQ ID NO: 2363776
ugaucccaacuagauuuga

SEQ ID NO: 2363778 - RNA, 19 nt, Artificial Sequence
  Description of Artificial Sequence: Synthetic oligonucleotide
  Sense strand starting at position 997 of SEQ ID NO: 1885727
ucuaguugggaucaaguga

SEQ ID NO: 2363779 - RNA, 19 nt, Artificial Sequence
  Description of Artificial Sequence: Synthetic oligonucleotide
  Antisense strand to SEQ ID NO: 2363778
ucacuugaucccaacuaga

SEQ ID NO: 2363780 - RNA, 19 nt, Artificial Sequence
  Description of Artificial Sequence: Synthetic oligonucleotide
  Sense strand starting at position 1005 of SEQ ID NO: 1885727
ggaucaagugauggcauca

SEQ ID NO: 2363781 - RNA, 19 nt, Artificial Sequence
  Description of Artificial Sequence: Synthetic oligonucleotide
  Antisense strand to SEQ ID NO: 2363780
ugaugccaucacuugaucc

SEQ ID NO: 2363782 - RNA, 19 nt, Artificial Sequence
  Description of Artificial Sequence: Synthetic oligonucleotide
  Sense strand starting at position 1049 of SEQ ID NO: 1885727
ggcaguguccuggaaucau

SEQ ID NO: 2363783 - RNA, 19 nt, Artificial Sequence
  Description of Artificial Sequence: Synthetic oligonucleotide
  Antisense strand to SEQ ID NO: 2363782
augauuccaggacacugcc

SEQ ID NO: 2363784 - RNA, 19 nt, Artificial Sequence
  Description of Artificial Sequence: Synthetic oligonucleotide
  Sense strand starting at position 1067 of SEQ ID NO: 1885727
uaaagacuaucuguguaag

SEQ ID NO: 2363785 - RNA, 19 nt, Artificial Sequence
  Description of Artificial Sequence: Synthetic oligonucleotide
  Antisense strand to SEQ ID NO: 2363784
cuuacacagauagucuuua

SEQ ID NO: 2363786 - RNA, 19 nt, Artificial Sequence
  Description of Artificial Sequence: Synthetic oligonucleotide
  Sense strand starting at position 1068 of SEQ ID NO: 1885727
aaagacuaucuguguaaga

SEQ ID NO: 2363787 - RNA, 19 nt, Artificial Sequence
  Description of Artificial Sequence: Synthetic oligonucleotide
  Antisense strand to SEQ ID NO: 2363786
ucuuacacagauagucuuu

SEQ ID NO: 2363788 - RNA, 19 nt, Artificial Sequence
  Description of Artificial Sequence: Synthetic oligonucleotide
  Sense strand starting at position 1069 of SEQ ID NO: 1885727
aagacuaucuguguaagaa

SEQ ID NO: 2363789 - RNA, 19 nt, Artificial Sequence
  Description of Artificial Sequence: Synthetic oligonucleotide
  Antisense strand to SEQ ID NO: 2363788
uucuuacacagauagucuu

SEQ ID NO: 2363790 - RNA, 19 nt, Artificial Sequence
  Description of Artificial Sequence: Synthetic oligonucleotide
  Sense strand starting at position 1112 of SEQ ID NO: 1885727
uggagaaacugagccaauu

SEQ ID NO: 2363791 - RNA, 19 nt, Artificial Sequence
  Description of Artificial Sequence: Synthetic oligonucleotide
  Antisense strand to SEQ ID NO: 2363790
aauuggcucaguuucucca

SEQ ID NO: 2363792 - RNA, 19 nt, Artificial Sequence
  Description of Artificial Sequence: Synthetic oligonucleotide
  Sense strand starting at position 1180 of SEQ ID NO: 1885727
uggguuucagagugaagac

SEQ ID NO: 2363793 - RNA, 19 nt, Artificial Sequence
  Description of Artificial Sequence: Synthetic oligonucleotide
  Antisense strand to SEQ ID NO: 2363792
gucuucacucugaaaccca

SEQ ID NO: 2363794 - RNA, 19 nt, Artificial Sequence
  Description of Artificial Sequence: Synthetic oligonucleotide
  Sense strand starting at position 1219 of SEQ ID NO: 1885727
ugaagaggcauauguugaa

SEQ ID NO: 2363795 - RNA, 19 nt, Artificial Sequence
  Description of Artificial Sequence: Synthetic oligonucleotide
  Antisense strand to SEQ ID NO: 2363794
uucaacauaugccucuuca

SEQ ID NO: 2363796 - RNA, 19 nt, Artificial Sequence
  Description of Artificial Sequence: Synthetic oligonucleotide
  Sense strand starting at position 1300 of SEQ ID NO: 1885727
guauuugccucuguuuaau

SEQ ID NO: 2363797 - RNA, 19 nt, Artificial Sequence
  Description of Artificial Sequence: Synthetic oligonucleotide
  Antisense strand to SEQ ID NO: 2363796
auuaaacagaggcaaauac

SEQ ID NO: 2363798 - RNA, 19 nt, Artificial Sequence
  Description of Artificial Sequence: Synthetic oligonucleotide
  Sense strand starting at position 1590 of SEQ ID NO: 1885727
gaaacaugacgugguggaa

SEQ ID NO: 2363799 - RNA, 19 nt, Artificial Sequence
  Description of Artificial Sequence: Synthetic oligonucleotide
  Antisense strand to SEQ ID NO: 2363798
uuccaccacgucauguuuc

SEQ ID NO: 2363800 - RNA, 19 nt, Artificial Sequence
  Description of Artificial Sequence: Synthetic oligonucleotide
  Sense strand starting at position 1716 of SEQ ID NO: 1885727
agagaaaugucuuuggagc

SEQ ID NO: 2363801 - RNA, 19 nt, Artificial Sequence
  Description of Artificial Sequence: Synthetic oligonucleotide
  Antisense strand to SEQ ID NO: 2363800
gcuccaaagacauuucucu

SEQ ID NO: 2363802 - RNA, 19 nt, Artificial Sequence
  Description of Artificial Sequence: Synthetic oligonucleotide
  Sense strand starting at position 2356 of SEQ ID NO: 1885727
aaagcagucguguuucuuu

SEQ ID NO: 2363803 - RNA, 19 nt, Artificial Sequence
  Description of Artificial Sequence: Synthetic oligonucleotide
  Antisense strand to SEQ ID NO: 2363802
aaagaaacacgacugcuuu

SEQ ID NO: 2363804 - RNA, 19 nt, Artificial Sequence
  Description of Artificial Sequence: Synthetic oligonucleotide
  Sense strand starting at position 2358 of SEQ ID NO: 1885727
agcagucguguuucuuuau

SEQ ID NO: 2363805 - RNA, 19 nt, Artificial Sequence
  Description of Artificial Sequence: Synthetic oligonucleotide
  Antisense strand to SEQ ID NO: 2363804
auaaagaaacacgacugcu

SEQ ID NO: 2363806 - RNA, 19 nt, Artificial Sequence
  Description of Artificial Sequence: Synthetic oligonucleotide
  Sense strand starting at position 2368 of SEQ ID NO: 1885727
uuucuuuauccagagucca

SEQ ID NO: 2363807 - RNA, 19 nt, Artificial Sequence
  Description of Artificial Sequence: Synthetic oligonucleotide
  Antisense strand to SEQ ID NO: 2363806
uggacucuggauaaagaaa

SEQ ID NO: 2363808 - RNA, 19 nt, Artificial Sequence
  Description of Artificial Sequence: Synthetic oligonucleotide
  Sense strand starting at position 2585 of SEQ ID NO: 1885727
ccaucugcuggugagagua

SEQ ID NO: 2363809 - RNA, 19 nt, Artificial Sequence
  Description of Artificial Sequence: Synthetic oligonucleotide
  Antisense strand to SEQ ID NO: 2363808
uacucucaccagcagaugg

SEQ ID NO: 2363810 - RNA, 19 nt, Artificial Sequence
  Description of Artificial Sequence: Synthetic oligonucleotide
  Sense strand starting at position 2635 of SEQ ID NO: 1885727
gucugaccaguaggugaaa

SEQ ID NO: 2363811 - RNA, 19 nt, Artificial Sequence
  Description of Artificial Sequence: Synthetic oligonucleotide
  Antisense strand to SEQ ID NO: 2363810
uuucaccuacuggucagac

SEQ ID NO: 2363812 - RNA, 19 nt, Artificial Sequence
  Description of Artificial Sequence: Synthetic oligonucleotide
  Sense strand starting at position 2716 of SEQ ID NO: 1885727
gucaaauguccagagacga

SEQ ID NO: 2363813 - RNA, 19 nt, Artificial Sequence
  Description of Artificial Sequence: Synthetic oligonucleotide
  Antisense strand to SEQ ID NO: 2363812
ucgucucuggacauuugac

SEQ ID NO: 2363814 - RNA, 19 nt, Artificial Sequence
  Description of Artificial Sequence: Synthetic oligonucleotide
  Sense strand starting at position 2886 of SEQ ID NO: 1885727
ggaugacaccugggugauu

SEQ ID NO: 2363815 - RNA, 19 nt, Artificial Sequence
  Description of Artificial Sequence: Synthetic oligonucleotide
  Antisense strand to SEQ ID NO: 2363814
aaucacccaggugucaucc

SEQ ID NO: 2363816 - RNA, 19 nt, Artificial Sequence
  Description of Artificial Sequence: Synthetic oligonucleotide
  Sense strand starting at position 3114 of SEQ ID NO: 1885727
accggagcugauggaaaua

SEQ ID NO: 2363817 - RNA, 19 nt, Artificial Sequence
  Description of Artificial Sequence: Synthetic oligonucleotide
  Antisense strand to SEQ ID NO: 2363816
uauuuccaucagcuccggu

SEQ ID NO: 2363818 - RNA, 19 nt, Artificial Sequence
  Description of Artificial Sequence: Synthetic oligonucleotide
  Sense strand starting at position 3618 of SEQ ID NO: 1885727
ggguaacauucccuagaca

SEQ ID NO: 2363819 - RNA, 19 nt, Artificial Sequence
  Description of Artificial Sequence: Synthetic oligonucleotide
  Antisense strand to SEQ ID NO: 2363818
ugucuagggaauguuaccc

SEQ ID NO: 2363820 - RNA, 19 nt, Artificial Sequence
  Description of Artificial Sequence: Synthetic oligonucleotide
  Sense strand starting at position 3784 of SEQ ID NO: 1885727
ugaggaaccuuugugucaa

SEQ ID NO: 2363821 - RNA, 19 nt, Artificial Sequence
  Description of Artificial Sequence: Synthetic oligonucleotide
  Antisense strand to SEQ ID NO: 2363820
uugacacaaagguuccuca

SEQ ID NO: 2363822 - RNA, 19 nt, Artificial Sequence
  Description of Artificial Sequence: Synthetic oligonucleotide
  Sense strand starting at position 3786 of SEQ ID NO: 1885727
aggaaccuuugugucaauu

SEQ ID NO: 2363823 - RNA, 19 nt, Artificial Sequence
  Description of Artificial Sequence: Synthetic oligonucleotide
  Antisense strand to SEQ ID NO: 2363822
aauugacacaaagguuccu

SEQ ID NO: 2363824 - RNA, 19 nt, Artificial Sequence
  Description of Artificial Sequence: Synthetic oligonucleotide
  Sense strand starting at position 64 of SEQ ID NO: 1885728
ggacuuguccacugggcaa

SEQ ID NO: 2363825 - RNA, 19 nt, Artificial Sequence
  Description of Artificial Sequence: Synthetic oligonucleotide
  Antisense strand to SEQ ID NO: 2363824
uugcccaguggacaagucc

SEQ ID NO: 2363826 - RNA, 19 nt, Artificial Sequence
  Description of Artificial Sequence: Synthetic oligonucleotide
  Sense strand starting at position 143 of SEQ ID NO: 1885728
agugguucuguccauccaa

SEQ ID NO: 2363827 - RNA, 19 nt, Artificial Sequence
  Description of Artificial Sequence: Synthetic oligonucleotide
  Antisense strand to SEQ ID NO: 2363826
uuggauggacagaaccacu

SEQ ID NO: 2363828 - RNA, 19 nt, Artificial Sequence
  Description of Artificial Sequence: Synthetic oligonucleotide
  Sense strand starting at position 183 of SEQ ID NO: 1885728
ccuggaccacugugaucau

SEQ ID NO: 2363829 - RNA, 19 nt, Artificial Sequence
  Description of Artificial Sequence: Synthetic oligonucleotide
  Antisense strand to SEQ ID NO: 2363828
augaucacagugguccagg

SEQ ID NO: 2363830 - RNA, 19 nt, Artificial Sequence
  Description of Artificial Sequence: Synthetic oligonucleotide
  Sense strand starting at position 186 of SEQ ID NO: 1885728
ggaccacugugaucaucuu

SEQ ID NO: 2363831 - RNA, 19 nt, Artificial Sequence
  Description of Artificial Sequence: Synthetic oligonucleotide
  Antisense strand to SEQ ID NO: 2363830
aagaugaucacaguggucc

SEQ ID NO: 2363832 - RNA, 19 nt, Artificial Sequence
  Description of Artificial Sequence: Synthetic oligonucleotide
  Sense strand starting at position 450 of SEQ ID NO: 1885728
cguucuguacugucagcaa

SEQ ID NO: 2363833 - RNA, 19 nt, Artificial Sequence
  Description of Artificial Sequence: Synthetic oligonucleotide
  Antisense strand to SEQ ID NO: 2363832
uugcugacaguacagaacg

SEQ ID NO: 2363834 - RNA, 19 nt, Artificial Sequence
  Description of Artificial Sequence: Synthetic oligonucleotide
  Sense strand starting at position 461 of SEQ ID NO: 1885728
gucagcaagcuuuaggaca

SEQ ID NO: 2363835 - RNA, 19 nt, Artificial Sequence
  Description of Artificial Sequence: Synthetic oligonucleotide
  Antisense strand to SEQ ID NO: 2363834
uguccuaaagcuugcugac

SEQ ID NO: 2363836 - RNA, 19 nt, Artificial Sequence
  Description of Artificial Sequence: Synthetic oligonucleotide
  Sense strand starting at position 687 of SEQ ID NO: 1885728
gucguugauccagagagug

SEQ ID NO: 2363837 - RNA, 19 nt, Artificial Sequence
  Description of Artificial Sequence: Synthetic oligonucleotide
  Antisense strand to SEQ ID NO: 2363836
cacucucuggaucaacgac

SEQ ID NO: 2363838 - RNA, 19 nt, Artificial Sequence
  Description of Artificial Sequence: Synthetic oligonucleotide
  Sense strand starting at position 717 of SEQ ID NO: 1885728
uaaagagugggcugacuau

SEQ ID NO: 2363839 - RNA, 19 nt, Artificial Sequence
  Description of Artificial Sequence: Synthetic oligonucleotide
  Antisense strand to SEQ ID NO: 2363838
auagucagcccacucuuua

SEQ ID NO: 2363840 - RNA, 19 nt, Artificial Sequence
  Description of Artificial Sequence: Synthetic oligonucleotide
  Sense strand starting at position 726 of SEQ ID NO: 1885728
ggcugacuaucccugagua

SEQ ID NO: 2363841 - RNA, 19 nt, Artificial Sequence
  Description of Artificial Sequence: Synthetic oligonucleotide
  Antisense strand to SEQ ID NO: 2363840
uacucagggauagucagcc

SEQ ID NO: 2363842 - RNA, 19 nt, Artificial Sequence
  Description of Artificial Sequence: Synthetic oligonucleotide
  Sense strand starting at position 728 of SEQ ID NO: 1885728
cugacuaucccugaguaua

SEQ ID NO: 2363843 - RNA, 19 nt, Artificial Sequence
  Description of Artificial Sequence: Synthetic oligonucleotide
  Antisense strand to SEQ ID NO: 2363842
uauacucagggauagucag

SEQ ID NO: 2363844 - RNA, 19 nt, Artificial Sequence
  Description of Artificial Sequence: Synthetic oligonucleotide
  Sense strand starting at position 939 of SEQ ID NO: 1885728
gguguagaccagggauacu

SEQ ID NO: 2363845 - RNA, 19 nt, Artificial Sequence
  Description of Artificial Sequence: Synthetic oligonucleotide
  Antisense strand to SEQ ID NO: 2363844
aguaucccuggucuacacc

SEQ ID NO: 2363846 - RNA, 19 nt, Artificial Sequence
  Description of Artificial Sequence: Synthetic oligonucleotide
  Sense strand starting at position 1020 of SEQ ID NO: 1885728
gaguguuuacuggauaggu

SEQ ID NO: 2363847 - RNA, 19 nt, Artificial Sequence
  Description of Artificial Sequence: Synthetic oligonucleotide
  Antisense strand to SEQ ID NO: 2363846
accuauccaguaaacacuc

SEQ ID NO: 2363848 - RNA, 19 nt, Artificial Sequence
  Description of Artificial Sequence: Synthetic oligonucleotide
  Sense strand starting at position 1094 of SEQ ID NO: 1885728
aauguuauuugaggaagaa

SEQ ID NO: 2363849 - RNA, 19 nt, Artificial Sequence
  Description of Artificial Sequence: Synthetic oligonucleotide
  Antisense strand to SEQ ID NO: 2363848
uucuuccucaaauaacauu

SEQ ID NO: 2363850 - RNA, 19 nt, Artificial Sequence
  Description of Artificial Sequence: Synthetic oligonucleotide
  Sense strand starting at position 1138 of SEQ ID NO: 1885728
aaaguugucugggcugaga

SEQ ID NO: 2363851 - RNA, 19 nt, Artificial Sequence
  Description of Artificial Sequence: Synthetic oligonucleotide
  Antisense strand to SEQ ID NO: 2363850
ucucagcccagacaacuuu

SEQ ID NO: 2363852 - RNA, 19 nt, Artificial Sequence
  Description of Artificial Sequence: Synthetic oligonucleotide
  Sense strand starting at position 1140 of SEQ ID NO: 1885728
aguugucugggcugagaga

SEQ ID NO: 2363853 - RNA, 19 nt, Artificial Sequence
  Description of Artificial Sequence: Synthetic oligonucleotide
  Antisense strand to SEQ ID NO: 2363852
ucucucagcccagacaacu

SEQ ID NO: 2363854 - RNA, 19 nt, Artificial Sequence
  Description of Artificial Sequence: Synthetic oligonucleotide
  Sense strand starting at position 1141 of SEQ ID NO: 1885728
guugucugggcugagagaa

SEQ ID NO: 2363855 - RNA, 19 nt, Artificial Sequence
  Description of Artificial Sequence: Synthetic oligonucleotide
  Antisense strand to SEQ ID NO: 2363854
uucucucagcccagacaac

SEQ ID NO: 2363856 - RNA, 19 nt, Artificial Sequence
  Description of Artificial Sequence: Synthetic oligonucleotide
  Sense strand starting at position 1159 of SEQ ID NO: 1885728
aaaggaguaugacaagaaa

SEQ ID NO: 2363857 - RNA, 19 nt, Artificial Sequence
  Description of Artificial Sequence: Synthetic oligonucleotide
  Antisense strand to SEQ ID NO: 2363856
uuucuugucauacuccuuu

SEQ ID NO: 2363858 - RNA, 19 nt, Artificial Sequence
  Description of Artificial Sequence: Synthetic oligonucleotide
  Sense strand starting at position 1194 of SEQ ID NO: 1885728
ccauuccauguagaaagua

SEQ ID NO: 2363859 - RNA, 19 nt, Artificial Sequence
  Description of Artificial Sequence: Synthetic oligonucleotide
  Antisense strand to SEQ ID NO: 2363858
uacuuucuacauggaaugg

SEQ ID NO: 2363860 - RNA, 19 nt, Artificial Sequence
  Description of Artificial Sequence: Synthetic oligonucleotide
  Sense strand starting at position 1530 of SEQ ID NO: 1885728
gggugugacacaggucaca

SEQ ID NO: 2363861 - RNA, 19 nt, Artificial Sequence
  Description of Artificial Sequence: Synthetic oligonucleotide
  Antisense strand to SEQ ID NO: 2363860
ugugaccugugucacaccc

SEQ ID NO: 2363862 - RNA, 19 nt, Artificial Sequence
  Description of Artificial Sequence: Synthetic oligonucleotide
  Sense strand starting at position 1573 of SEQ ID NO: 1885728
gguccuaggugauucuaaa

SEQ ID NO: 2363863 - RNA, 19 nt, Artificial Sequence
  Description of Artificial Sequence: Synthetic oligonucleotide
  Antisense strand to SEQ ID NO: 2363862
uuuagaaucaccuaggacc

SEQ ID NO: 2363864 - RNA, 19 nt, Artificial Sequence
  Description of Artificial Sequence: Synthetic oligonucleotide
  Sense strand starting at position 1638 of SEQ ID NO: 1885728
acagguuaaggaugacuuu

SEQ ID NO: 2363865 - RNA, 19 nt, Artificial Sequence
  Description of Artificial Sequence: Synthetic oligonucleotide
  Antisense strand to SEQ ID NO: 2363864
aaagucauccuuaaccugu

SEQ ID NO: 2363866 - RNA, 19 nt, Artificial Sequence
  Description of Artificial Sequence: Synthetic oligonucleotide
  Sense strand starting at position 1748 of SEQ ID NO: 1885728
gcucuugagcuagaaagga

SEQ ID NO: 2363867 - RNA, 19 nt, Artificial Sequence
  Description of Artificial Sequence: Synthetic oligonucleotide
  Antisense strand to SEQ ID NO: 2363866
uccuuucuagcucaagagc

SEQ ID NO: 2363868 - RNA, 19 nt, Artificial Sequence
  Description of Artificial Sequence: Synthetic oligonucleotide
  Sense strand starting at position 1761 of SEQ ID NO: 1885728
aaaggaucccuguggacuu

SEQ ID NO: 2363869 - RNA, 19 nt, Artificial Sequence
  Description of Artificial Sequence: Synthetic oligonucleotide
  Antisense strand to SEQ ID NO: 2363868
aaguccacagggauccuuu

SEQ ID NO: 2363870 - RNA, 19 nt, Artificial Sequence
  Description of Artificial Sequence: Synthetic oligonucleotide
  Sense strand starting at position 1789 of SEQ ID NO: 1885728
agggaacucugcuucuaga

SEQ ID NO: 2363871 - RNA, 19 nt, Artificial Sequence
  Description of Artificial Sequence: Synthetic oligonucleotide
  Antisense strand to SEQ ID NO: 2363870
ucuagaagcagaguucccu

SEQ ID NO: 2363872 - RNA, 19 nt, Artificial Sequence
  Description of Artificial Sequence: Synthetic oligonucleotide
  Sense strand starting at position 1856 of SEQ ID NO: 1885728
ggcaguucuggaggaaguu

SEQ ID NO: 2363873 - RNA, 19 nt, Artificial Sequence
  Description of Artificial Sequence: Synthetic oligonucleotide
  Antisense strand to SEQ ID NO: 2363872
aacuuccuccagaacugcc

SEQ ID NO: 2363874 - RNA, 19 nt, Artificial Sequence
  Description of Artificial Sequence: Synthetic oligonucleotide
  Sense strand starting at position 1865 of SEQ ID NO: 1885728
ggaggaaguucuguagcuc

SEQ ID NO: 2363875 - RNA, 19 nt, Artificial Sequence
  Description of Artificial Sequence: Synthetic oligonucleotide
  Antisense strand to SEQ ID NO: 2363874
gagcuacagaacuuccucc

SEQ ID NO: 2363876 - RNA, 19 nt, Artificial Sequence
  Description of Artificial Sequence: Synthetic oligonucleotide
  Sense strand starting at position 1887 of SEQ ID NO: 1885728
guugucucucaguaggaca

SEQ ID NO: 2363877 - RNA, 19 nt, Artificial Sequence
  Description of Artificial Sequence: Synthetic oligonucleotide
  Antisense strand to SEQ ID NO: 2363876
uguccuacugagagacaac

SEQ ID NO: 2363878 - RNA, 19 nt, Artificial Sequence
  Description of Artificial Sequence: Synthetic oligonucleotide
  Sense strand starting at position 2055 of SEQ ID NO: 1885728
gggaguaccuguccucaau

SEQ ID NO: 2363879 - RNA, 19 nt, Artificial Sequence
  Description of Artificial Sequence: Synthetic oligonucleotide
  Antisense strand to SEQ ID NO: 2363878
auugaggacagguacuccc

SEQ ID NO: 2363880 - RNA, 19 nt, Artificial Sequence
  Description of Artificial Sequence: Synthetic oligonucleotide
  Sense strand starting at position 2092 of SEQ ID NO: 1885728
gaucuugucugaguauagg

SEQ ID NO: 2363881 - RNA, 19 nt, Artificial Sequence
  Description of Artificial Sequence: Synthetic oligonucleotide
  Antisense strand to SEQ ID NO: 2363880
ccuauacucagacaagauc

SEQ ID NO: 2363882 - RNA, 19 nt, Artificial Sequence
  Description of Artificial Sequence: Synthetic oligonucleotide
  Sense strand starting at position 2164 of SEQ ID NO: 1885728
ccgguuguucuccauagac

SEQ ID NO: 2363883 - RNA, 19 nt, Artificial Sequence
  Description of Artificial Sequence: Synthetic oligonucleotide
  Antisense strand to SEQ ID NO: 2363882
gucuauggagaacaaccgg

SEQ ID NO: 2363884 - RNA, 19 nt, Artificial Sequence
  Description of Artificial Sequence: Synthetic oligonucleotide
  Sense strand starting at position 2244 of SEQ ID NO: 1885728
ccaagugagccagagugua

SEQ ID NO: 2363885 - RNA, 19 nt, Artificial Sequence
  Description of Artificial Sequence: Synthetic oligonucleotide
  Antisense strand to SEQ ID NO: 2363884
uacacucuggcucacuugg

SEQ ID NO: 2363886 - RNA, 19 nt, Artificial Sequence
  Description of Artificial Sequence: Synthetic oligonucleotide
  Sense strand starting at position 2259 of SEQ ID NO: 1885728
uguauuccuguuggaacaa

SEQ ID NO: 2363887 - RNA, 19 nt, Artificial Sequence
  Description of Artificial Sequence: Synthetic oligonucleotide
  Antisense strand to SEQ ID NO: 2363886
uuguuccaacaggaauaca

SEQ ID NO: 2363888 - RNA, 19 nt, Artificial Sequence
  Description of Artificial Sequence: Synthetic oligonucleotide
  Sense strand starting at position 2503 of SEQ ID NO: 1885728
uucucuagccucugauaga

SEQ ID NO: 2363889 - RNA, 19 nt, Artificial Sequence
  Description of Artificial Sequence: Synthetic oligonucleotide
  Antisense strand to SEQ ID NO: 2363888
ucuaucagaggcuagagaa

SEQ ID NO: 2363890 - RNA, 19 nt, Artificial Sequence
  Description of Artificial Sequence: Synthetic oligonucleotide
  Sense strand starting at position 2617 of SEQ ID NO: 1885728
agaguaauguggucccuga

SEQ ID NO: 2363891 - RNA, 19 nt, Artificial Sequence
  Description of Artificial Sequence: Synthetic oligonucleotide
  Antisense strand to SEQ ID NO: 2363890
ucagggaccacauuacucu

SEQ ID NO: 2363892 - RNA, 19 nt, Artificial Sequence
  Description of Artificial Sequence: Synthetic oligonucleotide
  Sense strand starting at position 2667 of SEQ ID NO: 1885728
gagcuacugcccugagaga

SEQ ID NO: 2363893 - RNA, 19 nt, Artificial Sequence
  Description of Artificial Sequence: Synthetic oligonucleotide
  Antisense strand to SEQ ID NO: 2363892
ucucucagggcaguagcuc

SEQ ID NO: 2363894 - RNA, 19 nt, Artificial Sequence
  Description of Artificial Sequence: Synthetic oligonucleotide
  Sense strand starting at position 3284 of SEQ ID NO: 1885728
cugacaacuuccucuggau

SEQ ID NO: 2363895 - RNA, 19 nt, Artificial Sequence
  Description of Artificial Sequence: Synthetic oligonucleotide
  Antisense strand to SEQ ID NO: 2363894
auccagaggaaguugucag

SEQ ID NO: 2363896 - RNA, 19 nt, Artificial Sequence
  Description of Artificial Sequence: Synthetic oligonucleotide
  Sense strand starting at position 3578 of SEQ ID NO: 1885728
cccacagacuuuguaugau

SEQ ID NO: 2363897 - RNA, 19 nt, Artificial Sequence
  Description of Artificial Sequence: Synthetic oligonucleotide
  Antisense strand to SEQ ID NO: 2363896
aucauacaaagucuguggg

SEQ ID NO: 2363898 - RNA, 19 nt, Artificial Sequence
  Description of Artificial Sequence: Synthetic oligonucleotide
  Sense strand starting at position 3623 of SEQ ID NO: 1885728
cgaaguguaggugagcaaa

SEQ ID NO: 2363899 - RNA, 19 nt, Artificial Sequence
  Description of Artificial Sequence: Synthetic oligonucleotide
  Antisense strand to SEQ ID NO: 2363898
uuugcucaccuacacuucg

SEQ ID NO: 2363900 - RNA, 19 nt, Artificial Sequence
  Description of Artificial Sequence: Synthetic oligonucleotide
  Sense strand starting at position 3747 of SEQ ID NO: 1885728
gaaagcaaagucuaugcau

SEQ ID NO: 2363901 - RNA, 19 nt, Artificial Sequence
  Description of Artificial Sequence: Synthetic oligonucleotide
  Antisense strand to SEQ ID NO: 2363900
augcauagacuuugcuuuc

SEQ ID NO: 2363902 - RNA, 19 nt, Artificial Sequence
  Description of Artificial Sequence: Synthetic oligonucleotide
  Sense strand starting at position 3919 of SEQ ID NO: 1885728
ucuccuagggccugaaaga

SEQ ID NO: 2363903 - RNA, 19 nt, Artificial Sequence
  Description of Artificial Sequence: Synthetic oligonucleotide
  Antisense strand to SEQ ID NO: 2363902
ucuuucaggcccuaggaga

SEQ ID NO: 2363904 - RNA, 19 nt, Artificial Sequence
  Description of Artificial Sequence: Synthetic oligonucleotide
  Sense strand starting at position 904 of SEQ ID NO: 1885729
gacguugucuucuguguua

SEQ ID NO: 2363905 - RNA, 19 nt, Artificial Sequence
  Description of Artificial Sequence: Synthetic oligonucleotide
  Antisense strand to SEQ ID NO: 2363904
uaacacagaagacaacguc

SEQ ID NO: 2363906 - RNA, 19 nt, Artificial Sequence
  Description of Artificial Sequence: Synthetic oligonucleotide
  Sense strand starting at position 906 of SEQ ID NO: 1885729
cguugucuucuguguuauc

SEQ ID NO: 2363907 - RNA, 19 nt, Artificial Sequence
  Description of Artificial Sequence: Synthetic oligonucleotide
  Antisense strand to SEQ ID NO: 2363906
gauaacacagaagacaacg

SEQ ID NO: 2363908 - RNA, 19 nt, Artificial Sequence
  Description of Artificial Sequence: Synthetic oligonucleotide
  Sense strand starting at position 911 of SEQ ID NO: 1885729
ucuucuguguuauccacau

SEQ ID NO: 2363909 - RNA, 19 nt, Artificial Sequence
  Description of Artificial Sequence: Synthetic oligonucleotide
  Antisense strand to SEQ ID NO: 2363908
auguggauaacacagaaga

SEQ ID NO: 2363910 - RNA, 19 nt, Artificial Sequence
  Description of Artificial Sequence: Synthetic oligonucleotide
  Sense strand starting at position 915 of SEQ ID NO: 1885729
cuguguuauccacaugcug

SEQ ID NO: 2363911 - RNA, 19 nt, Artificial Sequence
  Description of Artificial Sequence: Synthetic oligonucleotide
  Antisense strand to SEQ ID NO: 2363910
cagcauguggauaacacag

SEQ ID NO: 2363912 - RNA, 19 nt, Artificial Sequence
  Description of Artificial Sequence: Synthetic oligonucleotide
  Sense strand starting at position 917 of SEQ ID NO: 1885729
guguuauccacaugcuguc

SEQ ID NO: 2363913 - RNA, 19 nt, Artificial Sequence
  Description of Artificial Sequence: Synthetic oligonucleotide
  Antisense strand to SEQ ID NO: 2363912
gacagcauguggauaacac

SEQ ID NO: 2363914 - RNA, 19 nt, Artificial Sequence
  Description of Artificial Sequence: Synthetic oligonucleotide
  Sense strand starting at position 1575 of SEQ ID NO: 1885729
caggcaugguuuccagaug

SEQ ID NO: 2363915 - RNA, 19 nt, Artificial Sequence
  Description of Artificial Sequence: Synthetic oligonucleotide
  Antisense strand to SEQ ID NO: 2363914
caucuggaaaccaugccug

SEQ ID NO: 2363916 - RNA, 19 nt, Artificial Sequence
  Description of Artificial Sequence: Synthetic oligonucleotide
  Sense strand starting at position 3487 of SEQ ID NO: 1885729
ggugaaaccugguguguga

SEQ ID NO: 2363917 - RNA, 19 nt, Artificial Sequence
  Description of Artificial Sequence: Synthetic oligonucleotide
  Antisense strand to SEQ ID NO: 2363916
ucacacaccagguuucacc

SEQ ID NO: 2363918 - RNA, 19 nt, Artificial Sequence
  Description of Artificial Sequence: Synthetic oligonucleotide
  Sense strand starting at position 3489 of SEQ ID NO: 1885729
ugaaaccuggugugugauu

SEQ ID NO: 2363919 - RNA, 19 nt, Artificial Sequence
  Description of Artificial Sequence: Synthetic oligonucleotide
  Antisense strand to SEQ ID NO: 2363918
aaucacacaccagguuuca

SEQ ID NO: 2363920 - RNA, 19 nt, Artificial Sequence
  Description of Artificial Sequence: Synthetic oligonucleotide
  Sense strand starting at position 463 of SEQ ID NO: 1885730
cccacaugucccugacacu

SEQ ID NO: 2363921 - RNA, 19 nt, Artificial Sequence
  Description of Artificial Sequence: Synthetic oligonucleotide
  Antisense strand to SEQ ID NO: 2363920
agugucagggacauguggg

SEQ ID NO: 2363922 - RNA, 19 nt, Artificial Sequence
  Description of Artificial Sequence: Synthetic oligonucleotide
  Sense strand starting at position 527 of SEQ ID NO: 1885730
ugucuugaccugugcccaa

SEQ ID NO: 2363923 - RNA, 19 nt, Artificial Sequence
  Description of Artificial Sequence: Synthetic oligonucleotide
  Antisense strand to SEQ ID NO: 2363922
uugggcacaggucaagaca

SEQ ID NO: 2363924 - RNA, 19 nt, Artificial Sequence
  Description of Artificial Sequence: Synthetic oligonucleotide
  Sense strand starting at position 955 of SEQ ID NO: 1885730
ucgucugugcuguccacau

SEQ ID NO: 2363925 - RNA, 19 nt, Artificial Sequence
  Description of Artificial Sequence: Synthetic oligonucleotide
  Antisense strand to SEQ ID NO: 2363924
auguggacagcacagacga

SEQ ID NO: 2363926 - RNA, 19 nt, Artificial Sequence
  Description of Artificial Sequence: Synthetic oligonucleotide
  Sense strand starting at position 987 of SEQ ID NO: 1885730
uggcucuguucuccaaguu

SEQ ID NO: 2363927 - RNA, 19 nt, Artificial Sequence
  Description of Artificial Sequence: Synthetic oligonucleotide
  Antisense strand to SEQ ID NO: 2363926
aacuuggagaacagagcca

SEQ ID NO: 2363928 - RNA, 19 nt, Artificial Sequence
  Description of Artificial Sequence: Synthetic oligonucleotide
  Sense strand starting at position 2307 of SEQ ID NO: 1885730
gugcccguguucuugugaa

SEQ ID NO: 2363929 - RNA, 19 nt, Artificial Sequence
  Description of Artificial Sequence: Synthetic oligonucleotide
  Antisense strand to SEQ ID NO: 2363928
uucacaagaacacgggcac

SEQ ID NO: 2363930 - RNA, 19 nt, Artificial Sequence
  Description of Artificial Sequence: Synthetic oligonucleotide
  Sense strand starting at position 904 of SEQ ID NO: 1885731
gacguugucuucuguguua

SEQ ID NO: 2363931 - RNA, 19 nt, Artificial Sequence
  Description of Artificial Sequence: Synthetic oligonucleotide
  Antisense strand to SEQ ID NO: 2363930
uaacacagaagacaacguc

SEQ ID NO: 2363932 - RNA, 19 nt, Artificial Sequence
  Description of Artificial Sequence: Synthetic oligonucleotide
  Sense strand starting at position 906 of SEQ ID NO: 1885731
cguugucuucuguguuauc

SEQ ID NO: 2363933 - RNA, 19 nt, Artificial Sequence
  Description of Artificial Sequence: Synthetic oligonucleotide
  Antisense strand to SEQ ID NO: 2363932
gauaacacagaagacaacg

SEQ ID NO: 2363934 - RNA, 19 nt, Artificial Sequence
  Description of Artificial Sequence: Synthetic oligonucleotide
  Sense strand starting at position 911 of SEQ ID NO: 1885731
ucuucuguguuauccacau

SEQ ID NO: 2363935 - RNA, 19 nt, Artificial Sequence
  Description of Artificial Sequence: Synthetic oligonucleotide
  Antisense strand to SEQ ID NO: 2363934
auguggauaacacagaaga

SEQ ID NO: 2363936 - RNA, 19 nt, Artificial Sequence
  Description of Artificial Sequence: Synthetic oligonucleotide
  Sense strand starting at position 915 of SEQ ID NO: 1885731
cuguguuauccacaugcug

SEQ ID NO: 2363937 - RNA, 19 nt, Artificial Sequence
  Description of Artificial Sequence: Synthetic oligonucleotide
  Antisense strand to SEQ ID NO: 2363936
cagcauguggauaacacag

SEQ ID NO: 2363938 - RNA, 19 nt, Artificial Sequence
  Description of Artificial Sequence: Synthetic oligonucleotide
  Sense strand starting at position 917 of SEQ ID NO: 1885731
guguuauccacaugcuguc

SEQ ID NO: 2363939 - RNA, 19 nt, Artificial Sequence
  Description of Artificial Sequence: Synthetic oligonucleotide
  Antisense strand to SEQ ID NO: 2363938
gacagcauguggauaacac

SEQ ID NO: 2363940 - RNA, 19 nt, Artificial Sequence
  Description of Artificial Sequence: Synthetic oligonucleotide
  Sense strand starting at position 1575 of SEQ ID NO: 1885731
caggcaugguuuccagaug

SEQ ID NO: 2363941 - RNA, 19 nt, Artificial Sequence
  Description of Artificial Sequence: Synthetic oligonucleotide
  Antisense strand to SEQ ID NO: 2363940
caucuggaaaccaugccug

SEQ ID NO: 2363942 - RNA, 19 nt, Artificial Sequence
  Description of Artificial Sequence: Synthetic oligonucleotide
  Sense strand starting at position 3487 of SEQ ID NO: 1885731
ggugaaaccugguguguga

SEQ ID NO: 2363943 - RNA, 19 nt, Artificial Sequence
  Description of Artificial Sequence: Synthetic oligonucleotide
  Antisense strand to SEQ ID NO: 2363942
ucacacaccagguuucacc

SEQ ID NO: 2363944 - RNA, 19 nt, Artificial Sequence
  Description of Artificial Sequence: Synthetic oligonucleotide
  Sense strand starting at position 3489 of SEQ ID NO: 1885731
ugaaaccuggugugugauu

SEQ ID NO: 2363945 - RNA, 19 nt, Artificial Sequence
  Description of Artificial Sequence: Synthetic oligonucleotide
  Antisense strand to SEQ ID NO: 2363944
aaucacacaccagguuuca

SEQ ID NO: 2363946 - RNA, 19 nt, Artificial Sequence
  Description of Artificial Sequence: Synthetic oligonucleotide
  Sense strand starting at position 463 of SEQ ID NO: 1885732
cccacaugucccugacacu

SEQ ID NO: 2363947 - RNA, 19 nt, Artificial Sequence
  Description of Artificial Sequence: Synthetic oligonucleotide
  Antisense strand to SEQ ID NO: 2363946
agugucagggacauguggg

SEQ ID NO: 2363948 - RNA, 19 nt, Artificial Sequence
  Description of Artificial Sequence: Synthetic oligonucleotide
  Sense strand starting at position 527 of SEQ ID NO: 1885732
ugucuugaccugugcccaa

SEQ ID NO: 2363949 - RNA, 19 nt, Artificial Sequence
  Description of Artificial Sequence: Synthetic oligonucleotide
  Antisense strand to SEQ ID NO: 2363948
uugggcacaggucaagaca

SEQ ID NO: 2363950 - RNA, 19 nt, Artificial Sequence
  Description of Artificial Sequence: Synthetic oligonucleotide
  Sense strand starting at position 955 of SEQ ID NO: 1885732
ucgucugugcuguccacau

SEQ ID NO: 2363951 - RNA, 19 nt, Artificial Sequence
  Description of Artificial Sequence: Synthetic oligonucleotide
  Antisense strand to SEQ ID NO: 2363950
auguggacagcacagacga

SEQ ID NO: 2363952 - RNA, 19 nt, Artificial Sequence
  Description of Artificial Sequence: Synthetic oligonucleotide
  Sense strand starting at position 987 of SEQ ID NO: 1885732
uggcucuguucuccaaguu

SEQ ID NO: 2363953 - RNA, 19 nt, Artificial Sequence
  Description of Artificial Sequence: Synthetic oligonucleotide
  Antisense strand to SEQ ID NO: 2363952
aacuuggagaacagagcca

SEQ ID NO: 2363954 - RNA, 19 nt, Artificial Sequence
  Description of Artificial Sequence: Synthetic oligonucleotide
  Sense strand starting at position 2307 of SEQ ID NO: 1885732
gugcccguguucuugugaa

SEQ ID NO: 2363955 - RNA, 19 nt, Artificial Sequence
  Description of Artificial Sequence: Synthetic oligonucleotide
  Antisense strand to SEQ ID NO: 2363954
uucacaagaacacgggcac

SEQ ID NO: 2363956 - RNA, 19 nt, Artificial Sequence
  Description of Artificial Sequence: Synthetic oligonucleotide
  Sense strand starting at position 605 of SEQ ID NO: 1885733
gaaagcuuccuccacggau

SEQ ID NO: 2363957 - RNA, 19 nt, Artificial Sequence
  Description of Artificial Sequence: Synthetic oligonucleotide
  Antisense strand to SEQ ID NO: 2363956
auccguggaggaagcuuuc

SEQ ID NO: 2363958 - RNA, 19 nt, Artificial Sequence
  Description of Artificial Sequence: Synthetic oligonucleotide
  Sense strand starting at position 661 of SEQ ID NO: 1885733
augcaugucagagauaagc

SEQ ID NO: 2363959 - RNA, 19 nt, Artificial Sequence
  Description of Artificial Sequence: Synthetic oligonucleotide
  Antisense strand to SEQ ID NO: 2363958
gcuuaucucugacaugcau

SEQ ID NO: 2363960 - RNA, 19 nt, Artificial Sequence
  Description of Artificial Sequence: Synthetic oligonucleotide
  Sense strand starting at position 663 of SEQ ID NO: 1885733
gcaugucagagauaagcaa

SEQ ID NO: 2363961 - RNA, 19 nt, Artificial Sequence
  Description of Artificial Sequence: Synthetic oligonucleotide
  Antisense strand to SEQ ID NO: 2363960
uugcuuaucucugacaugc

SEQ ID NO: 2363962 - RNA, 19 nt, Artificial Sequence
  Description of Artificial Sequence: Synthetic oligonucleotide
  Sense strand starting at position 691 of SEQ ID NO: 1885733
gaagaauucuguuuccgau

SEQ ID NO: 2363963 - RNA, 19 nt, Artificial Sequence
  Description of Artificial Sequence: Synthetic oligonucleotide
  Antisense strand to SEQ ID NO: 2363962
aucggaaacagaauucuuc

SEQ ID NO: 2363964 - RNA, 19 nt, Artificial Sequence
  Description of Artificial Sequence: Synthetic oligonucleotide
  Sense strand starting at position 693 of SEQ ID NO: 1885733
agaauucuguuuccgauaa

SEQ ID NO: 2363965 - RNA, 19 nt, Artificial Sequence
  Description of Artificial Sequence: Synthetic oligonucleotide
  Antisense strand to SEQ ID NO: 2363964
uuaucggaaacagaauucu

SEQ ID NO: 2363966 - RNA, 19 nt, Artificial Sequence
  Description of Artificial Sequence: Synthetic oligonucleotide
  Sense strand starting at position 719 of SEQ ID NO: 1885733
ugucacugaucccugaaga

SEQ ID NO: 2363967 - RNA, 19 nt, Artificial Sequence
  Description of Artificial Sequence: Synthetic oligonucleotide
  Antisense strand to SEQ ID NO: 2363966
ucuucagggaucagugaca

SEQ ID NO: 2363968 - RNA, 19 nt, Artificial Sequence
  Description of Artificial Sequence: Synthetic oligonucleotide
  Sense strand starting at position 720 of SEQ ID NO: 1885733
gucacugaucccugaagac

SEQ ID NO: 2363969 - RNA, 19 nt, Artificial Sequence
  Description of Artificial Sequence: Synthetic oligonucleotide
  Antisense strand to SEQ ID NO: 2363968
gucuucagggaucagugac

SEQ ID NO: 2363970 - RNA, 19 nt, Artificial Sequence
  Description of Artificial Sequence: Synthetic oligonucleotide
  Sense strand starting at position 782 of SEQ ID NO: 1885733
cccgaugacugcuuggaaa

SEQ ID NO: 2363971 - RNA, 19 nt, Artificial Sequence
  Description of Artificial Sequence: Synthetic oligonucleotide
  Antisense strand to SEQ ID NO: 2363970
uuuccaagcagucaucggg

SEQ ID NO: 2363972 - RNA, 19 nt, Artificial Sequence
  Description of Artificial Sequence: Synthetic oligonucleotide
  Sense strand starting at position 822 of SEQ ID NO: 1885733
ggcccagcacaucaauaau

SEQ ID NO: 2363973 - RNA, 19 nt, Artificial Sequence
  Description of Artificial Sequence: Synthetic oligonucleotide
  Antisense strand to SEQ ID NO: 2363972
auuauugaugugcugggcc

SEQ ID NO: 2363974 - RNA, 19 nt, Artificial Sequence
  Description of Artificial Sequence: Synthetic oligonucleotide
  Sense strand starting at position 911 of SEQ ID NO: 1885733
caggucuuguaucugggaa

SEQ ID NO: 2363975 - RNA, 19 nt, Artificial Sequence
  Description of Artificial Sequence: Synthetic oligonucleotide
  Antisense strand to SEQ ID NO: 2363974
uucccagauacaagaccug

SEQ ID NO: 2363976 - RNA, 19 nt, Artificial Sequence
  Description of Artificial Sequence: Synthetic oligonucleotide
  Sense strand starting at position 912 of SEQ ID NO: 1885733
aggucuuguaucugggaag

SEQ ID NO: 2363977 - RNA, 19 nt, Artificial Sequence
  Description of Artificial Sequence: Synthetic oligonucleotide
  Antisense strand to SEQ ID NO: 2363976
cuucccagauacaagaccu

SEQ ID NO: 2363978 - RNA, 19 nt, Artificial Sequence
  Description of Artificial Sequence: Synthetic oligonucleotide
  Sense strand starting at position 929 of SEQ ID NO: 1885733
agcccuuugaggcaugauu

SEQ ID NO: 2363979 - RNA, 19 nt, Artificial Sequence
  Description of Artificial Sequence: Synthetic oligonucleotide
  Antisense strand to SEQ ID NO: 2363978
aaucaugccucaaagggcu

SEQ ID NO: 2363980 - RNA, 19 nt, Artificial Sequence
  Description of Artificial Sequence: Synthetic oligonucleotide
  Sense strand starting at position 971 of SEQ ID NO: 1885733
augcuauuuacgcauguga

SEQ ID NO: 2363981 - RNA, 19 nt, Artificial Sequence
  Description of Artificial Sequence: Synthetic oligonucleotide
  Antisense strand to SEQ ID NO: 2363980
ucacaugcguaaauagcau

SEQ ID NO: 2363982 - RNA, 19 nt, Artificial Sequence
  Description of Artificial Sequence: Synthetic oligonucleotide
  Sense strand starting at position 973 of SEQ ID NO: 1885733
gcuauuuacgcaugugaaa

SEQ ID NO: 2363983 - RNA, 19 nt, Artificial Sequence
  Description of Artificial Sequence: Synthetic oligonucleotide
  Antisense strand to SEQ ID NO: 2363982
uuucacaugcguaaauagc

SEQ ID NO: 2363984 - RNA, 19 nt, Artificial Sequence
  Description of Artificial Sequence: Synthetic oligonucleotide
  Sense strand starting at position 1152 of SEQ ID NO: 1885733
guauuagcaucacuugaga

SEQ ID NO: 2363985 - RNA, 19 nt, Artificial Sequence
  Description of Artificial Sequence: Synthetic oligonucleotide
  Antisense strand to SEQ ID NO: 2363984
ucucaagugaugcuaauac

SEQ ID NO: 2363986 - RNA, 19 nt, Artificial Sequence
  Description of Artificial Sequence: Synthetic oligonucleotide
  Sense strand starting at position 1360 of SEQ ID NO: 1885733
gucuuauuccaugagaguc

SEQ ID NO: 2363987 - RNA, 19 nt, Artificial Sequence
  Description of Artificial Sequence: Synthetic oligonucleotide
  Antisense strand to SEQ ID NO: 2363986
gacucucauggaauaagac

SEQ ID NO: 2363988 - RNA, 19 nt, Artificial Sequence
  Description of Artificial Sequence: Synthetic oligonucleotide
  Sense strand starting at position 1368 of SEQ ID NO: 1885733
ccaugagagucugucuaag

SEQ ID NO: 2363989 - RNA, 19 nt, Artificial Sequence
  Description of Artificial Sequence: Synthetic oligonucleotide
  Antisense strand to SEQ ID NO: 2363988
cuuagacagacucucaugg

SEQ ID NO: 2363990 - RNA, 19 nt, Artificial Sequence
  Description of Artificial Sequence: Synthetic oligonucleotide
  Sense strand starting at position 1370 of SEQ ID NO: 1885733
augagagucugucuaagau

SEQ ID NO: 2363991 - RNA, 19 nt, Artificial Sequence
  Description of Artificial Sequence: Synthetic oligonucleotide
  Antisense strand to SEQ ID NO: 2363990
aucuuagacagacucucau

SEQ ID NO: 2363992 - RNA, 19 nt, Artificial Sequence
  Description of Artificial Sequence: Synthetic oligonucleotide
  Sense strand starting at position 1493 of SEQ ID NO: 1885733
acaggaaauguacggaguu

SEQ ID NO: 2363993 - RNA, 19 nt, Artificial Sequence
  Description of Artificial Sequence: Synthetic oligonucleotide
  Antisense strand to SEQ ID NO: 2363992
aacuccguacauuuccugu

SEQ ID NO: 2363994 - RNA, 19 nt, Artificial Sequence
  Description of Artificial Sequence: Synthetic oligonucleotide
  Sense strand starting at position 1521 of SEQ ID NO: 1885733
guuugcauucccuacagga

SEQ ID NO: 2363995 - RNA, 19 nt, Artificial Sequence
  Description of Artificial Sequence: Synthetic oligonucleotide
  Antisense strand to SEQ ID NO: 2363994
uccuguagggaaugcaaac

SEQ ID NO: 2363996 - RNA, 19 nt, Artificial Sequence
  Description of Artificial Sequence: Synthetic oligonucleotide
  Sense strand starting at position 1629 of SEQ ID NO: 1885733
ccggcaucucuccaaggaa

SEQ ID NO: 2363997 - RNA, 19 nt, Artificial Sequence
  Description of Artificial Sequence: Synthetic oligonucleotide
  Antisense strand to SEQ ID NO: 2363996
uuccuuggagagaugccgg

SEQ ID NO: 2363998 - RNA, 19 nt, Artificial Sequence
  Description of Artificial Sequence: Synthetic oligonucleotide
  Sense strand starting at position 1632 of SEQ ID NO: 1885733
gcaucucuccaaggaauuc

SEQ ID NO: 2363999 - RNA, 19 nt, Artificial Sequence
  Description of Artificial Sequence: Synthetic oligonucleotide
  Antisense strand to SEQ ID NO: 2363998
gaauuccuuggagagaugc

SEQ ID NO: 2364000 - RNA, 19 nt, Artificial Sequence
  Description of Artificial Sequence: Synthetic oligonucleotide
  Sense strand starting at position 1761 of SEQ ID NO: 1885733
gcuagcauuuguccaagga

SEQ ID NO: 2364001 - RNA, 19 nt, Artificial Sequence
  Description of Artificial Sequence: Synthetic oligonucleotide
  Antisense strand to SEQ ID NO: 2364000
uccuuggacaaaugcuagc

SEQ ID NO: 2364002 - RNA, 19 nt, Artificial Sequence
  Description of Artificial Sequence: Synthetic oligonucleotide
  Sense strand starting at position 1800 of SEQ ID NO: 1885733
uucugagaucacuggauuc

SEQ ID NO: 2364003 - RNA, 19 nt, Artificial Sequence
  Description of Artificial Sequence: Synthetic oligonucleotide
  Antisense strand to SEQ ID NO: 2364002
gaauccagugaucucagaa

SEQ ID NO: 2364004 - RNA, 19 nt, Artificial Sequence
  Description of Artificial Sequence: Synthetic oligonucleotide
  Sense strand starting at position 2029 of SEQ ID NO: 1885733
gggcaucuucuccaaaguu

SEQ ID NO: 2364005 - RNA, 19 nt, Artificial Sequence
  Description of Artificial Sequence: Synthetic oligonucleotide
  Antisense strand to SEQ ID NO: 2364004
aacuuuggagaagaugccc

SEQ ID NO: 2364006 - RNA, 19 nt, Artificial Sequence
  Description of Artificial Sequence: Synthetic oligonucleotide
  Sense strand starting at position 2058 of SEQ ID NO: 1885733
ccagaaaguucuucucagg

SEQ ID NO: 2364007 - RNA, 19 nt, Artificial Sequence
  Description of Artificial Sequence: Synthetic oligonucleotide
  Antisense strand to SEQ ID NO: 2364006
ccugagaagaacuuucugg

SEQ ID NO: 2364008 - RNA, 19 nt, Artificial Sequence
  Description of Artificial Sequence: Synthetic oligonucleotide
  Sense strand starting at position 2182 of SEQ ID NO: 1885733
augaucggucccuaagguu

SEQ ID NO: 2364009 - RNA, 19 nt, Artificial Sequence
  Description of Artificial Sequence: Synthetic oligonucleotide
  Antisense strand to SEQ ID NO: 2364008
aaccuuagggaccgaucau

SEQ ID NO: 2364010 - RNA, 19 nt, Artificial Sequence
  Description of Artificial Sequence: Synthetic oligonucleotide
  Sense strand starting at position 2228 of SEQ ID NO: 1885733
gaagcaggauuugauaagu

SEQ ID NO: 2364011 - RNA, 19 nt, Artificial Sequence
  Description of Artificial Sequence: Synthetic oligonucleotide
  Antisense strand to SEQ ID NO: 2364010
acuuaucaaauccugcuuc

SEQ ID NO: 2364012 - RNA, 19 nt, Artificial Sequence
  Description of Artificial Sequence: Synthetic oligonucleotide
  Sense strand starting at position 2237 of SEQ ID NO: 1885733
uuugauaaguagcuugaau

SEQ ID NO: 2364013 - RNA, 19 nt, Artificial Sequence
  Description of Artificial Sequence: Synthetic oligonucleotide
  Antisense strand to SEQ ID NO: 2364012
auucaagcuacuuaucaaa

SEQ ID NO: 2364014 - RNA, 19 nt, Artificial Sequence
  Description of Artificial Sequence: Synthetic oligonucleotide
  Sense strand starting at position 2288 of SEQ ID NO: 1885733
augcaaaucccugauagca

SEQ ID NO: 2364015 - RNA, 19 nt, Artificial Sequence
  Description of Artificial Sequence: Synthetic oligonucleotide
  Antisense strand to SEQ ID NO: 2364014
ugcuaucagggauuugcau

SEQ ID NO: 2364016 - RNA, 19 nt, Artificial Sequence
  Description of Artificial Sequence: Synthetic oligonucleotide
  Sense strand starting at position 2831 of SEQ ID NO: 1885733
cagggacugucucucuuaa

SEQ ID NO: 2364017 - RNA, 19 nt, Artificial Sequence
  Description of Artificial Sequence: Synthetic oligonucleotide
  Antisense strand to SEQ ID NO: 2364016
uuaagagagacagucccug

SEQ ID NO: 2364018 - RNA, 19 nt, Artificial Sequence
  Description of Artificial Sequence: Synthetic oligonucleotide
  Sense strand starting at position 2841 of SEQ ID NO: 1885733
cucucuuaaguggagcaaa

SEQ ID NO: 2364019 - RNA, 19 nt, Artificial Sequence
  Description of Artificial Sequence: Synthetic oligonucleotide
  Antisense strand to SEQ ID NO: 2364018
uuugcuccacuuaagagag

SEQ ID NO: 2364020 - RNA, 19 nt, Artificial Sequence
  Description of Artificial Sequence: Synthetic oligonucleotide
  Sense strand starting at position 3002 of SEQ ID NO: 1885733
uuccauacccgaugaagga

SEQ ID NO: 2364021 - RNA, 19 nt, Artificial Sequence
  Description of Artificial Sequence: Synthetic oligonucleotide
  Antisense strand to SEQ ID NO: 2364020
uccuucaucggguauggaa

SEQ ID NO: 2364022 - RNA, 19 nt, Artificial Sequence
  Description of Artificial Sequence: Synthetic oligonucleotide
  Sense strand starting at position 3219 of SEQ ID NO: 1885733
ccaagaaauggacgccaau

SEQ ID NO: 2364023 - RNA, 19 nt, Artificial Sequence
  Description of Artificial Sequence: Synthetic oligonucleotide
  Antisense strand to SEQ ID NO: 2364022
auuggcguccauuucuugg

SEQ ID NO: 2364024 - RNA, 19 nt, Artificial Sequence
  Description of Artificial Sequence: Synthetic oligonucleotide
  Sense strand starting at position 3308 of SEQ ID NO: 1885733
guaaaugucagagguggga

SEQ ID NO: 2364025 - RNA, 19 nt, Artificial Sequence
  Description of Artificial Sequence: Synthetic oligonucleotide
  Antisense strand to SEQ ID NO: 2364024
ucccaccucugacauuuac

SEQ ID NO: 2364026 - RNA, 19 nt, Artificial Sequence
  Description of Artificial Sequence: Synthetic oligonucleotide
  Sense strand starting at position 3515 of SEQ ID NO: 1885733
ggaugaauuagaugcugag

SEQ ID NO: 2364027 - RNA, 19 nt, Artificial Sequence
  Description of Artificial Sequence: Synthetic oligonucleotide
  Antisense strand to SEQ ID NO: 2364026
cucagcaucuaauucaucc

SEQ ID NO: 2364028 - RNA, 19 nt, Artificial Sequence
  Description of Artificial Sequence: Synthetic oligonucleotide
  Sense strand starting at position 3519 of SEQ ID NO: 1885733
gaauuagaugcugaggguu

SEQ ID NO: 2364029 - RNA, 19 nt, Artificial Sequence
  Description of Artificial Sequence: Synthetic oligonucleotide
  Antisense strand to SEQ ID NO: 2364028
aacccucagcaucuaauuc

SEQ ID NO: 2364030 - RNA, 19 nt, Artificial Sequence
  Description of Artificial Sequence: Synthetic oligonucleotide
  Sense strand starting at position 3809 of SEQ ID NO: 1885733
ccgugaacgauuugccaca

SEQ ID NO: 2364031 - RNA, 19 nt, Artificial Sequence
  Description of Artificial Sequence: Synthetic oligonucleotide
  Antisense strand to SEQ ID NO: 2364030
uguggcaaaucguucacgg

SEQ ID NO: 2364032 - RNA, 19 nt, Artificial Sequence
  Description of Artificial Sequence: Synthetic oligonucleotide
  Sense strand starting at position 3893 of SEQ ID NO: 1885733
caagacaagguuugauacu

SEQ ID NO: 2364033 - RNA, 19 nt, Artificial Sequence
  Description of Artificial Sequence: Synthetic oligonucleotide
  Antisense strand to SEQ ID NO: 2364032
aguaucaaaccuugucuug

SEQ ID NO: 2364034 - RNA, 19 nt, Artificial Sequence
  Description of Artificial Sequence: Synthetic oligonucleotide
  Sense strand starting at position 3899 of SEQ ID NO: 1885733
aagguuugauacucacaga

SEQ ID NO: 2364035 - RNA, 19 nt, Artificial Sequence
  Description of Artificial Sequence: Synthetic oligonucleotide
  Antisense strand to SEQ ID NO: 2364034
ucugugaguaucaaaccuu

SEQ ID NO: 2364036 - RNA, 19 nt, Artificial Sequence
  Description of Artificial Sequence: Synthetic oligonucleotide
  Sense strand starting at position 211 of SEQ ID NO: 1885734
ugucauauaugcucuguca

SEQ ID NO: 2364037 - RNA, 19 nt, Artificial Sequence
  Description of Artificial Sequence: Synthetic oligonucleotide
  Antisense strand to SEQ ID NO: 2364036
ugacagagcauauaugaca

SEQ ID NO: 2364038 - RNA, 19 nt, Artificial Sequence
  Description of Artificial Sequence: Synthetic oligonucleotide
  Sense strand starting at position 387 of SEQ ID NO: 1885734
ggaggcauuuccuaccucu

SEQ ID NO: 2364039 - RNA, 19 nt, Artificial Sequence
  Description of Artificial Sequence: Synthetic oligonucleotide
  Antisense strand to SEQ ID NO: 2364038
agagguaggaaaugccucc

SEQ ID NO: 2364040 - RNA, 19 nt, Artificial Sequence
  Description of Artificial Sequence: Synthetic oligonucleotide
  Sense strand starting at position 816 of SEQ ID NO: 1885734
gauucucaauuaggagagu

SEQ ID NO: 2364041 - RNA, 19 nt, Artificial Sequence
  Description of Artificial Sequence: Synthetic oligonucleotide
  Antisense strand to SEQ ID NO: 2364040
acucuccuaauugagaauc

SEQ ID NO: 2364042 - RNA, 19 nt, Artificial Sequence
  Description of Artificial Sequence: Synthetic oligonucleotide
  Sense strand starting at position 817 of SEQ ID NO: 1885734
auucucaauuaggagagua

SEQ ID NO: 2364043 - RNA, 19 nt, Artificial Sequence
  Description of Artificial Sequence: Synthetic oligonucleotide
  Antisense strand to SEQ ID NO: 2364042
uacucuccuaauugagaau

SEQ ID NO: 2364044 - RNA, 19 nt, Artificial Sequence
  Description of Artificial Sequence: Synthetic oligonucleotide
  Sense strand starting at position 1010 of SEQ ID NO: 1885734
gaggccaagccuggugaau

SEQ ID NO: 2364045 - RNA, 19 nt, Artificial Sequence
  Description of Artificial Sequence: Synthetic oligonucleotide
  Antisense strand to SEQ ID NO: 2364044
auucaccaggcuuggccuc

SEQ ID NO: 2364046 - RNA, 19 nt, Artificial Sequence
  Description of Artificial Sequence: Synthetic oligonucleotide
  Sense strand starting at position 1012 of SEQ ID NO: 1885734
ggccaagccuggugaauca

SEQ ID NO: 2364047 - RNA, 19 nt, Artificial Sequence
  Description of Artificial Sequence: Synthetic oligonucleotide
  Antisense strand to SEQ ID NO: 2364046
ugauucaccaggcuuggcc

SEQ ID NO: 2364048 - RNA, 19 nt, Artificial Sequence
  Description of Artificial Sequence: Synthetic oligonucleotide
  Sense strand starting at position 1686 of SEQ ID NO: 1885734
cagggacgcgcgugacauu

SEQ ID NO: 2364049 - RNA, 19 nt, Artificial Sequence
  Description of Artificial Sequence: Synthetic oligonucleotide
  Antisense strand to SEQ ID NO: 2364048
aaugucacgcgcgucccug

SEQ ID NO: 2364050 - RNA, 19 nt, Artificial Sequence
  Description of Artificial Sequence: Synthetic oligonucleotide
  Sense strand starting at position 1994 of SEQ ID NO: 1885734
caggaauagucuucucuug

SEQ ID NO: 2364051 - RNA, 19 nt, Artificial Sequence
  Description of Artificial Sequence: Synthetic oligonucleotide
  Antisense strand to SEQ ID NO: 2364050
caagagaagacuauuccug

SEQ ID NO: 2364052 - RNA, 19 nt, Artificial Sequence
  Description of Artificial Sequence: Synthetic oligonucleotide
  Sense strand starting at position 1996 of SEQ ID NO: 1885734
ggaauagucuucucuuggu

SEQ ID NO: 2364053 - RNA, 19 nt, Artificial Sequence
  Description of Artificial Sequence: Synthetic oligonucleotide
  Antisense strand to SEQ ID NO: 2364052
accaagagaagacuauucc

SEQ ID NO: 2364054 - RNA, 19 nt, Artificial Sequence
  Description of Artificial Sequence: Synthetic oligonucleotide
  Sense strand starting at position 1999 of SEQ ID NO: 1885734
auagucuucucuugguguu

SEQ ID NO: 2364055 - RNA, 19 nt, Artificial Sequence
  Description of Artificial Sequence: Synthetic oligonucleotide
  Antisense strand to SEQ ID NO: 2364054
aacaccaagagaagacuau

SEQ ID NO: 2364056 - RNA, 19 nt, Artificial Sequence
  Description of Artificial Sequence: Synthetic oligonucleotide
  Sense strand starting at position 2000 of SEQ ID NO: 1885734
uagucuucucuugguguuu

SEQ ID NO: 2364057 - RNA, 19 nt, Artificial Sequence
  Description of Artificial Sequence: Synthetic oligonucleotide
  Antisense strand to SEQ ID NO: 2364056
aaacaccaagagaagacua

SEQ ID NO: 2364058 - RNA, 19 nt, Artificial Sequence
  Description of Artificial Sequence: Synthetic oligonucleotide
  Sense strand starting at position 2189 of SEQ ID NO: 1885734
cuccuuaucugugucucua

SEQ ID NO: 2364059 - RNA, 19 nt, Artificial Sequence
  Description of Artificial Sequence: Synthetic oligonucleotide
  Antisense strand to SEQ ID NO: 2364058
uagagacacagauaaggag

SEQ ID NO: 2364060 - RNA, 19 nt, Artificial Sequence
  Description of Artificial Sequence: Synthetic oligonucleotide
  Sense strand starting at position 2333 of SEQ ID NO: 1885734
accuaagugucuucgccaa

SEQ ID NO: 2364061 - RNA, 19 nt, Artificial Sequence
  Description of Artificial Sequence: Synthetic oligonucleotide
  Antisense strand to SEQ ID NO: 2364060
uuggcgaagacacuuaggu

SEQ ID NO: 2364062 - RNA, 19 nt, Artificial Sequence
  Description of Artificial Sequence: Synthetic oligonucleotide
  Sense strand starting at position 2335 of SEQ ID NO: 1885734
cuaagugucuucgccaaca

SEQ ID NO: 2364063 - RNA, 19 nt, Artificial Sequence
  Description of Artificial Sequence: Synthetic oligonucleotide
  Antisense strand to SEQ ID NO: 2364062
uguuggcgaagacacuuag

SEQ ID NO: 2364064 - RNA, 19 nt, Artificial Sequence
  Description of Artificial Sequence: Synthetic oligonucleotide
  Sense strand starting at position 2376 of SEQ ID NO: 1885734
cgauaaugguucuaaacag

SEQ ID NO: 2364065 - RNA, 19 nt, Artificial Sequence
  Description of Artificial Sequence: Synthetic oligonucleotide
  Antisense strand to SEQ ID NO: 2364064
cuguuuagaaccauuaucg

SEQ ID NO: 2364066 - RNA, 19 nt, Artificial Sequence
  Description of Artificial Sequence: Synthetic oligonucleotide
  Sense strand starting at position 2796 of SEQ ID NO: 1885734
acaauuuccucuuaaggag

SEQ ID NO: 2364067 - RNA, 19 nt, Artificial Sequence
  Description of Artificial Sequence: Synthetic oligonucleotide
  Antisense strand to SEQ ID NO: 2364066
cuccuuaagaggaaauugu

SEQ ID NO: 2364068 - RNA, 19 nt, Artificial Sequence
  Description of Artificial Sequence: Synthetic oligonucleotide
  Sense strand starting at position 2829 of SEQ ID NO: 1885734
aggcuuagccaagguuaau

SEQ ID NO: 2364069 - RNA, 19 nt, Artificial Sequence
  Description of Artificial Sequence: Synthetic oligonucleotide
  Antisense strand to SEQ ID NO: 2364068
auuaaccuuggcuaagccu

SEQ ID NO: 2364070 - RNA, 19 nt, Artificial Sequence
  Description of Artificial Sequence: Synthetic oligonucleotide
  Sense strand starting at position 2870 of SEQ ID NO: 1885734
ucucccaaaucaguguuua

SEQ ID NO: 2364071 - RNA, 19 nt, Artificial Sequence
  Description of Artificial Sequence: Synthetic oligonucleotide
  Antisense strand to SEQ ID NO: 2364070
uaaacacugauuugggaga

SEQ ID NO: 2364072 - RNA, 19 nt, Artificial Sequence
  Description of Artificial Sequence: Synthetic oligonucleotide
  Sense strand starting at position 2871 of SEQ ID NO: 1885734
cucccaaaucaguguuuag

SEQ ID NO: 2364073 - RNA, 19 nt, Artificial Sequence
  Description of Artificial Sequence: Synthetic oligonucleotide
  Antisense strand to SEQ ID NO: 2364072
cuaaacacugauuugggag

SEQ ID NO: 2364074 - RNA, 19 nt, Artificial Sequence
  Description of Artificial Sequence: Synthetic oligonucleotide
  Sense strand starting at position 3276 of SEQ ID NO: 1885734
uacuucuagcgccggaaau

SEQ ID NO: 2364075 - RNA, 19 nt, Artificial Sequence
  Description of Artificial Sequence: Synthetic oligonucleotide
  Antisense strand to SEQ ID NO: 2364074
auuuccggcgcuagaagua

SEQ ID NO: 2364076 - RNA, 19 nt, Artificial Sequence
  Description of Artificial Sequence: Synthetic oligonucleotide
  Sense strand starting at position 3453 of SEQ ID NO: 1885734
ccagaucuucuuggcuuua

SEQ ID NO: 2364077 - RNA, 19 nt, Artificial Sequence
  Description of Artificial Sequence: Synthetic oligonucleotide
  Antisense strand to SEQ ID NO: 2364076
uaaagccaagaagaucugg

SEQ ID NO: 2364078 - RNA, 19 nt, Artificial Sequence
  Description of Artificial Sequence: Synthetic oligonucleotide
  Sense strand starting at position 3466 of SEQ ID NO: 1885734
gcuuuagcggcugaagacu

SEQ ID NO: 2364079 - RNA, 19 nt, Artificial Sequence
  Description of Artificial Sequence: Synthetic oligonucleotide
  Antisense strand to SEQ ID NO: 2364078
agucuucagccgcuaaagc

SEQ ID NO: 2364080 - RNA, 19 nt, Artificial Sequence
  Description of Artificial Sequence: Synthetic oligonucleotide
  Sense strand starting at position 3623 of SEQ ID NO: 1885734
ccacaauuguggguauuga

SEQ ID NO: 2364081 - RNA, 19 nt, Artificial Sequence
  Description of Artificial Sequence: Synthetic oligonucleotide
  Antisense strand to SEQ ID NO: 2364080
ucaauacccacaauugugg

SEQ ID NO: 2364082 - RNA, 19 nt, Artificial Sequence
  Description of Artificial Sequence: Synthetic oligonucleotide
  Sense strand starting at position 3740 of SEQ ID NO: 1885734
cucccuuauuagguggaga

SEQ ID NO: 2364083 - RNA, 19 nt, Artificial Sequence
  Description of Artificial Sequence: Synthetic oligonucleotide
  Antisense strand to SEQ ID NO: 2364082
ucuccaccuaauaagggag

SEQ ID NO: 2364084 - RNA, 19 nt, Artificial Sequence
  Description of Artificial Sequence: Synthetic oligonucleotide
  Sense strand starting at position 274 of SEQ ID NO: 1885735
uuucuugcucgucggauga

SEQ ID NO: 2364085 - RNA, 19 nt, Artificial Sequence
  Description of Artificial Sequence: Synthetic oligonucleotide
  Antisense strand to SEQ ID NO: 2364084
ucauccgacgagcaagaaa

SEQ ID NO: 2364086 - RNA, 19 nt, Artificial Sequence
  Description of Artificial Sequence: Synthetic oligonucleotide
  Sense strand starting at position 276 of SEQ ID NO: 1885735
ucuugcucgucggaugaga

SEQ ID NO: 2364087 - RNA, 19 nt, Artificial Sequence
  Description of Artificial Sequence: Synthetic oligonucleotide
  Antisense strand to SEQ ID NO: 2364086
ucucauccgacgagcaaga

SEQ ID NO: 2364088 - RNA, 19 nt, Artificial Sequence
  Description of Artificial Sequence: Synthetic oligonucleotide
  Sense strand starting at position 389 of SEQ ID NO: 1885735
uuugguuauucccgggaag

SEQ ID NO: 2364089 - RNA, 19 nt, Artificial Sequence
  Description of Artificial Sequence: Synthetic oligonucleotide
  Antisense strand to SEQ ID NO: 2364088
cuucccgggaauaaccaaa

SEQ ID NO: 2364090 - RNA, 19 nt, Artificial Sequence
  Description of Artificial Sequence: Synthetic oligonucleotide
  Sense strand starting at position 391 of SEQ ID NO: 1885735
ugguuauucccgggaagca

SEQ ID NO: 2364091 - RNA, 19 nt, Artificial Sequence
  Description of Artificial Sequence: Synthetic oligonucleotide
  Antisense strand to SEQ ID NO: 2364090
ugcuucccgggaauaacca

SEQ ID NO: 2364092 - RNA, 19 nt, Artificial Sequence
  Description of Artificial Sequence: Synthetic oligonucleotide
  Sense strand starting at position 392 of SEQ ID NO: 1885735
gguuauucccgggaagcaa

SEQ ID NO: 2364093 - RNA, 19 nt, Artificial Sequence
  Description of Artificial Sequence: Synthetic oligonucleotide
  Antisense strand to SEQ ID NO: 2364092
uugcuucccgggaauaacc

SEQ ID NO: 2364094 - RNA, 19 nt, Artificial Sequence
  Description of Artificial Sequence: Synthetic oligonucleotide
  Sense strand starting at position 645 of SEQ ID NO: 1885735
cugugauguccucggaaag

SEQ ID NO: 2364095 - RNA, 19 nt, Artificial Sequence
  Description of Artificial Sequence: Synthetic oligonucleotide
  Antisense strand to SEQ ID NO: 2364094
cuuuccgaggacaucacag

SEQ ID NO: 2364096 - RNA, 19 nt, Artificial Sequence
  Description of Artificial Sequence: Synthetic oligonucleotide
  Sense strand starting at position 646 of SEQ ID NO: 1885735
ugugauguccucggaaagu

SEQ ID NO: 2364097 - RNA, 19 nt, Artificial Sequence
  Description of Artificial Sequence: Synthetic oligonucleotide
  Antisense strand to SEQ ID NO: 2364096
acuuuccgaggacaucaca

SEQ ID NO: 2364098 - RNA, 19 nt, Artificial Sequence
  Description of Artificial Sequence: Synthetic oligonucleotide
  Sense strand starting at position 1108 of SEQ ID NO: 1885735
cgcucauuuguuggcgacu

SEQ ID NO: 2364099 - RNA, 19 nt, Artificial Sequence
  Description of Artificial Sequence: Synthetic oligonucleotide
  Antisense strand to SEQ ID NO: 2364098
agucgccaacaaaugagcg

SEQ ID NO: 2364100 - RNA, 19 nt, Artificial Sequence
  Description of Artificial Sequence: Synthetic oligonucleotide
  Sense strand starting at position 1298 of SEQ ID NO: 1885735
auuggaaagugguuccacu

SEQ ID NO: 2364101 - RNA, 19 nt, Artificial Sequence
  Description of Artificial Sequence: Synthetic oligonucleotide
  Antisense strand to SEQ ID NO: 2364100
aguggaaccacuuuccaau

SEQ ID NO: 2364102 - RNA, 19 nt, Artificial Sequence
  Description of Artificial Sequence: Synthetic oligonucleotide
  Sense strand starting at position 1306 of SEQ ID NO: 1885735
gugguuccacuuuguaacu

SEQ ID NO: 2364103 - RNA, 19 nt, Artificial Sequence
  Description of Artificial Sequence: Synthetic oligonucleotide
  Antisense strand to SEQ ID NO: 2364102
aguuacaaaguggaaccac

SEQ ID NO: 2364104 - RNA, 19 nt, Artificial Sequence
  Description of Artificial Sequence: Synthetic oligonucleotide
  Sense strand starting at position 1315 of SEQ ID NO: 1885735
cuuuguaacuccgcaaguu

SEQ ID NO: 2364105 - RNA, 19 nt, Artificial Sequence
  Description of Artificial Sequence: Synthetic oligonucleotide
  Antisense strand to SEQ ID NO: 2364104
aacuugcggaguuacaaag

SEQ ID NO: 2364106 - RNA, 19 nt, Artificial Sequence
  Description of Artificial Sequence: Synthetic oligonucleotide
  Sense strand starting at position 1579 of SEQ ID NO: 1885735
gugaaacuuaaagguguuu

SEQ ID NO: 2364107 - RNA, 19 nt, Artificial Sequence
  Description of Artificial Sequence: Synthetic oligonucleotide
  Antisense strand to SEQ ID NO: 2364106
aaacaccuuuaaguuucac

SEQ ID NO: 2364108 - RNA, 19 nt, Artificial Sequence
  Description of Artificial Sequence: Synthetic oligonucleotide
  Sense strand starting at position 1588 of SEQ ID NO: 1885735
aaagguguuuaccuuguca

SEQ ID NO: 2364109 - RNA, 19 nt, Artificial Sequence
  Description of Artificial Sequence: Synthetic oligonucleotide
  Antisense strand to SEQ ID NO: 2364108
ugacaagguaaacaccuuu

SEQ ID NO: 2364110 - RNA, 19 nt, Artificial Sequence
  Description of Artificial Sequence: Synthetic oligonucleotide
  Sense strand starting at position 1590 of SEQ ID NO: 1885735
agguguuuaccuugucauc

SEQ ID NO: 2364111 - RNA, 19 nt, Artificial Sequence
  Description of Artificial Sequence: Synthetic oligonucleotide
  Antisense strand to SEQ ID NO: 2364110
gaugacaagguaaacaccu

SEQ ID NO: 2364112 - RNA, 19 nt, Artificial Sequence
  Description of Artificial Sequence: Synthetic oligonucleotide
  Sense strand starting at position 1592 of SEQ ID NO: 1885735
guguuuaccuugucaucag

SEQ ID NO: 2364113 - RNA, 19 nt, Artificial Sequence
  Description of Artificial Sequence: Synthetic oligonucleotide
  Antisense strand to SEQ ID NO: 2364112
cugaugacaagguaaacac

SEQ ID NO: 2364114 - RNA, 19 nt, Artificial Sequence
  Description of Artificial Sequence: Synthetic oligonucleotide
  Sense strand starting at position 1595 of SEQ ID NO: 1885735
uuuaccuugucaucagcau

SEQ ID NO: 2364115 - RNA, 19 nt, Artificial Sequence
  Description of Artificial Sequence: Synthetic oligonucleotide
  Antisense strand to SEQ ID NO: 2364114
augcugaugacaagguaaa

SEQ ID NO: 2364116 - RNA, 19 nt, Artificial Sequence
  Description of Artificial Sequence: Synthetic oligonucleotide
  Sense strand starting at position 3044 of SEQ ID NO: 1885735
ggcugugagcgcuccagua

SEQ ID NO: 2364117 - RNA, 19 nt, Artificial Sequence
  Description of Artificial Sequence: Synthetic oligonucleotide
  Antisense strand to SEQ ID NO: 2364116
uacuggagcgcucacagcc

SEQ ID NO: 2364118 - RNA, 19 nt, Artificial Sequence
  Description of Artificial Sequence: Synthetic oligonucleotide
  Sense strand starting at position 3046 of SEQ ID NO: 1885735
cugugagcgcuccaguaca

SEQ ID NO: 2364119 - RNA, 19 nt, Artificial Sequence
  Description of Artificial Sequence: Synthetic oligonucleotide
  Antisense strand to SEQ ID NO: 2364118
uguacuggagcgcucacag

SEQ ID NO: 2364120 - RNA, 19 nt, Artificial Sequence
  Description of Artificial Sequence: Synthetic oligonucleotide
  Sense strand starting at position 3241 of SEQ ID NO: 1885735
ugcguuugucgcuuacagu

SEQ ID NO: 2364121 - RNA, 19 nt, Artificial Sequence
  Description of Artificial Sequence: Synthetic oligonucleotide
  Antisense strand to SEQ ID NO: 2364120
acuguaagcgacaaacgca

SEQ ID NO: 2364122 - RNA, 19 nt, Artificial Sequence
  Description of Artificial Sequence: Synthetic oligonucleotide
  Sense strand starting at position 3662 of SEQ ID NO: 1885735
ggugccgguccuggugaaa

SEQ ID NO: 2364123 - RNA, 19 nt, Artificial Sequence
  Description of Artificial Sequence: Synthetic oligonucleotide
  Antisense strand to SEQ ID NO: 2364122
uuucaccaggaccggcacc

SEQ ID NO: 2364124 - RNA, 19 nt, Artificial Sequence
  Description of Artificial Sequence: Synthetic oligonucleotide
  Sense strand starting at position 15 of SEQ ID NO: 1885737
accuguauugugugaacaa

SEQ ID NO: 2364125 - RNA, 19 nt, Artificial Sequence
  Description of Artificial Sequence: Synthetic oligonucleotide
  Antisense strand to SEQ ID NO: 2364124
uuguucacacaauacaggu

SEQ ID NO: 2364126 - RNA, 19 nt, Artificial Sequence
  Description of Artificial Sequence: Synthetic oligonucleotide
  Sense strand starting at position 84 of SEQ ID NO: 1885737
ccaaguuacugucauuuac

SEQ ID NO: 2364127 - RNA, 19 nt, Artificial Sequence
  Description of Artificial Sequence: Synthetic oligonucleotide
  Antisense strand to SEQ ID NO: 2364126
guaaaugacaguaacuugg

SEQ ID NO: 2364128 - RNA, 19 nt, Artificial Sequence
  Description of Artificial Sequence: Synthetic oligonucleotide
  Sense strand starting at position 153 of SEQ ID NO: 1885737
uucugauagcaauaguaga

SEQ ID NO: 2364129 - RNA, 19 nt, Artificial Sequence
  Description of Artificial Sequence: Synthetic oligonucleotide
  Antisense strand to SEQ ID NO: 2364128
ucuacuauugcuaucagaa

SEQ ID NO: 2364130 - RNA, 19 nt, Artificial Sequence
  Description of Artificial Sequence: Synthetic oligonucleotide
  Sense strand starting at position 163 of SEQ ID NO: 1885737
aauaguagauguguaguuu

SEQ ID NO: 2364131 - RNA, 19 nt, Artificial Sequence
  Description of Artificial Sequence: Synthetic oligonucleotide
  Antisense strand to SEQ ID NO: 2364130
aaacuacacaucuacuauu

SEQ ID NO: 2364132 - RNA, 19 nt, Artificial Sequence
  Description of Artificial Sequence: Synthetic oligonucleotide
  Sense strand starting at position 247 of SEQ ID NO: 1885737
ggccacagguuguuaauua

SEQ ID NO: 2364133 - RNA, 19 nt, Artificial Sequence
  Description of Artificial Sequence: Synthetic oligonucleotide
  Antisense strand to SEQ ID NO: 2364132
uaauuaacaaccuguggcc

SEQ ID NO: 2364134 - RNA, 19 nt, Artificial Sequence
  Description of Artificial Sequence: Synthetic oligonucleotide
  Sense strand starting at position 277 of SEQ ID NO: 1885737
uucuuauguucggcuacuu

SEQ ID NO: 2364135 - RNA, 19 nt, Artificial Sequence
  Description of Artificial Sequence: Synthetic oligonucleotide
  Antisense strand to SEQ ID NO: 2364134
aaguagccgaacauaagaa

SEQ ID NO: 2364136 - RNA, 19 nt, Artificial Sequence
  Description of Artificial Sequence: Synthetic oligonucleotide
  Sense strand starting at position 358 of SEQ ID NO: 1885737
ugauuccuguugucagcua

SEQ ID NO: 2364137 - RNA, 19 nt, Artificial Sequence
  Description of Artificial Sequence: Synthetic oligonucleotide
  Antisense strand to SEQ ID NO: 2364136
uagcugacaacaggaauca

SEQ ID NO: 2364138 - RNA, 19 nt, Artificial Sequence
  Description of Artificial Sequence: Synthetic oligonucleotide
  Sense strand starting at position 424 of SEQ ID NO: 1885737
gggugaaagcaaggugaau

SEQ ID NO: 2364139 - RNA, 19 nt, Artificial Sequence
  Description of Artificial Sequence: Synthetic oligonucleotide
  Antisense strand to SEQ ID NO: 2364138
auucaccuugcuuucaccc

SEQ ID NO: 2364140 - RNA, 19 nt, Artificial Sequence
  Description of Artificial Sequence: Synthetic oligonucleotide
  Sense strand starting at position 430 of SEQ ID NO: 1885737
aagcaaggugaaugaauau

SEQ ID NO: 2364141 - RNA, 19 nt, Artificial Sequence
  Description of Artificial Sequence: Synthetic oligonucleotide
  Antisense strand to SEQ ID NO: 2364140
auauucauucaccuugcuu

SEQ ID NO: 2364142 - RNA, 19 nt, Artificial Sequence
  Description of Artificial Sequence: Synthetic oligonucleotide
  Sense strand starting at position 468 of SEQ ID NO: 1885737
ggacucaccugauaaguug

SEQ ID NO: 2364143 - RNA, 19 nt, Artificial Sequence
  Description of Artificial Sequence: Synthetic oligonucleotide
  Antisense strand to SEQ ID NO: 2364142
caacuuaucaggugagucc

SEQ ID NO: 2364144 - RNA, 19 nt, Artificial Sequence
  Description of Artificial Sequence: Synthetic oligonucleotide
  Sense strand starting at position 647 of SEQ ID NO: 1885737
guagaaauuugcuucccuc

SEQ ID NO: 2364145 - RNA, 19 nt, Artificial Sequence
  Description of Artificial Sequence: Synthetic oligonucleotide
  Antisense strand to SEQ ID NO: 2364144
gagggaagcaaauuucuac

SEQ ID NO: 2364146 - RNA, 19 nt, Artificial Sequence
  Description of Artificial Sequence: Synthetic oligonucleotide
  Sense strand starting at position 743 of SEQ ID NO: 1885737
gcuaguggguuagcgaauu

SEQ ID NO: 2364147 - RNA, 19 nt, Artificial Sequence
  Description of Artificial Sequence: Synthetic oligonucleotide
  Antisense strand to SEQ ID NO: 2364146
aauucgcuaacccacuagc

SEQ ID NO: 2364148 - RNA, 19 nt, Artificial Sequence
  Description of Artificial Sequence: Synthetic oligonucleotide
  Sense strand starting at position 749 of SEQ ID NO: 1885737
ggguuagcgaauugcuaug

SEQ ID NO: 2364149 - RNA, 19 nt, Artificial Sequence
  Description of Artificial Sequence: Synthetic oligonucleotide
  Antisense strand to SEQ ID NO: 2364148
cauagcaauucgcuaaccc

SEQ ID NO: 2364150 - RNA, 19 nt, Artificial Sequence
  Description of Artificial Sequence: Synthetic oligonucleotide
  Sense strand starting at position 1989 of SEQ ID NO: 1885737
gggcaagucauaugcaaau

SEQ ID NO: 2364151 - RNA, 19 nt, Artificial Sequence
  Description of Artificial Sequence: Synthetic oligonucleotide
  Antisense strand to SEQ ID NO: 2364150
auuugcauaugacuugccc

SEQ ID NO: 2364152 - RNA, 19 nt, Artificial Sequence
  Description of Artificial Sequence: Synthetic oligonucleotide
  Sense strand starting at position 2009 of SEQ ID NO: 1885737
gcgcacucccgagagcaaa

SEQ ID NO: 2364153 - RNA, 19 nt, Artificial Sequence
  Description of Artificial Sequence: Synthetic oligonucleotide
  Antisense strand to SEQ ID NO: 2364152
uuugcucucgggagugcgc

SEQ ID NO: 2364154 - RNA, 19 nt, Artificial Sequence
  Description of Artificial Sequence: Synthetic oligonucleotide
  Sense strand starting at position 2311 of SEQ ID NO: 1885737
ucucacaauuucggaggaa

SEQ ID NO: 2364155 - RNA, 19 nt, Artificial Sequence
  Description of Artificial Sequence: Synthetic oligonucleotide
  Antisense strand to SEQ ID NO: 2364154
uuccuccgaaauugugaga

SEQ ID NO: 2364156 - RNA, 19 nt, Artificial Sequence
  Description of Artificial Sequence: Synthetic oligonucleotide
  Sense strand starting at position 2312 of SEQ ID NO: 1885737
cucacaauuucggaggaaa

SEQ ID NO: 2364157 - RNA, 19 nt, Artificial Sequence
  Description of Artificial Sequence: Synthetic oligonucleotide
  Antisense strand to SEQ ID NO: 2364156
uuuccuccgaaauugugag

SEQ ID NO: 2364158 - RNA, 19 nt, Artificial Sequence
  Description of Artificial Sequence: Synthetic oligonucleotide
  Sense strand starting at position 2525 of SEQ ID NO: 1885737
gggcgaaugaugggaaucu

SEQ ID NO: 2364159 - RNA, 19 nt, Artificial Sequence
  Description of Artificial Sequence: Synthetic oligonucleotide
  Antisense strand to SEQ ID NO: 2364158
agauucccaucauucgccc

SEQ ID NO: 2364160 - RNA, 19 nt, Artificial Sequence
  Description of Artificial Sequence: Synthetic oligonucleotide
  Sense strand starting at position 2596 of SEQ ID NO: 1885737
ggugaagggcuccgugauu

SEQ ID NO: 2364161 - RNA, 19 nt, Artificial Sequence
  Description of Artificial Sequence: Synthetic oligonucleotide
  Antisense strand to SEQ ID NO: 2364160
aaucacggagcccuucacc

SEQ ID NO: 2364162 - RNA, 19 nt, Artificial Sequence
  Description of Artificial Sequence: Synthetic oligonucleotide
  Sense strand starting at position 2658 of SEQ ID NO: 1885737
ggacacuguugggauucaa

SEQ ID NO: 2364163 - RNA, 19 nt, Artificial Sequence
  Description of Artificial Sequence: Synthetic oligonucleotide
  Antisense strand to SEQ ID NO: 2364162
uugaaucccaacagugucc

SEQ ID NO: 2364164 - RNA, 19 nt, Artificial Sequence
  Description of Artificial Sequence: Synthetic oligonucleotide
  Sense strand starting at position 2698 of SEQ ID NO: 1885737
gccuguaguccugaucaaa

SEQ ID NO: 2364165 - RNA, 19 nt, Artificial Sequence
  Description of Artificial Sequence: Synthetic oligonucleotide
  Antisense strand to SEQ ID NO: 2364164
uuugaucaggacuacaggc

SEQ ID NO: 2364166 - RNA, 19 nt, Artificial Sequence
  Description of Artificial Sequence: Synthetic oligonucleotide
  Sense strand starting at position 2847 of SEQ ID NO: 1885737
cgguguuuaccucacgacu

SEQ ID NO: 2364167 - RNA, 19 nt, Artificial Sequence
  Description of Artificial Sequence: Synthetic oligonucleotide
  Antisense strand to SEQ ID NO: 2364166
agucgugagguaaacaccg

SEQ ID NO: 2364168 - RNA, 19 nt, Artificial Sequence
  Description of Artificial Sequence: Synthetic oligonucleotide
  Sense strand starting at position 2850 of SEQ ID NO: 1885737
uguuuaccucacgacugaa

SEQ ID NO: 2364169 - RNA, 19 nt, Artificial Sequence
  Description of Artificial Sequence: Synthetic oligonucleotide
  Antisense strand to SEQ ID NO: 2364168
uucagucgugagguaaaca

SEQ ID NO: 2364170 - RNA, 19 nt, Artificial Sequence
  Description of Artificial Sequence: Synthetic oligonucleotide
  Sense strand starting at position 3050 of SEQ ID NO: 1885737
gguuguuguccacacaggu

SEQ ID NO: 2364171 - RNA, 19 nt, Artificial Sequence
  Description of Artificial Sequence: Synthetic oligonucleotide
  Antisense strand to SEQ ID NO: 2364170
accuguguggacaacaacc

SEQ ID NO: 2364172 - RNA, 19 nt, Artificial Sequence
  Description of Artificial Sequence: Synthetic oligonucleotide
  Sense strand starting at position 3149 of SEQ ID NO: 1885737
gaacaauacuugcugguua

SEQ ID NO: 2364173 - RNA, 19 nt, Artificial Sequence
  Description of Artificial Sequence: Synthetic oligonucleotide
  Antisense strand to SEQ ID NO: 2364172
uaaccagcaaguauuguuc

SEQ ID NO: 2364174 - RNA, 19 nt, Artificial Sequence
  Description of Artificial Sequence: Synthetic oligonucleotide
  Sense strand starting at position 3151 of SEQ ID NO: 1885737
acaauacuugcugguuaaa

SEQ ID NO: 2364175 - RNA, 19 nt, Artificial Sequence
  Description of Artificial Sequence: Synthetic oligonucleotide
  Antisense strand to SEQ ID NO: 2364174
uuuaaccagcaaguauugu

SEQ ID NO: 2364176 - RNA, 19 nt, Artificial Sequence
  Description of Artificial Sequence: Synthetic oligonucleotide
  Sense strand starting at position 3179 of SEQ ID NO: 1885737
uguuguauuuaggaggcuu

SEQ ID NO: 2364177 - RNA, 19 nt, Artificial Sequence
  Description of Artificial Sequence: Synthetic oligonucleotide
  Antisense strand to SEQ ID NO: 2364176
aagccuccuaaauacaaca

SEQ ID NO: 2364178 - RNA, 19 nt, Artificial Sequence
  Description of Artificial Sequence: Synthetic oligonucleotide
  Sense strand starting at position 3322 of SEQ ID NO: 1885737
acagcauuaugucucucua

SEQ ID NO: 2364179 - RNA, 19 nt, Artificial Sequence
  Description of Artificial Sequence: Synthetic oligonucleotide
  Antisense strand to SEQ ID NO: 2364178
uagagagacauaaugcugu

SEQ ID NO: 2364180 - RNA, 19 nt, Artificial Sequence
  Description of Artificial Sequence: Synthetic oligonucleotide
  Sense strand starting at position 3406 of SEQ ID NO: 1885737
auggcagugaacugguauu

SEQ ID NO: 2364181 - RNA, 19 nt, Artificial Sequence
  Description of Artificial Sequence: Synthetic oligonucleotide
  Antisense strand to SEQ ID NO: 2364180
aauaccaguucacugccau

SEQ ID NO: 2364182 - RNA, 19 nt, Artificial Sequence
  Description of Artificial Sequence: Synthetic oligonucleotide
  Sense strand starting at position 3432 of SEQ ID NO: 1885737
ugaaauugguguccuccaa

SEQ ID NO: 2364183 - RNA, 19 nt, Artificial Sequence
  Description of Artificial Sequence: Synthetic oligonucleotide
  Antisense strand to SEQ ID NO: 2364182
uuggaggacaccaauuuca

SEQ ID NO: 2364184 - RNA, 19 nt, Artificial Sequence
  Description of Artificial Sequence: Synthetic oligonucleotide
  Sense strand starting at position 3456 of SEQ ID NO: 1885737
ucaagcugcccguaguaaa

SEQ ID NO: 2364185 - RNA, 19 nt, Artificial Sequence
  Description of Artificial Sequence: Synthetic oligonucleotide
  Antisense strand to SEQ ID NO: 2364184
uuuacuacgggcagcuuga

SEQ ID NO: 2364186 - RNA, 19 nt, Artificial Sequence
  Description of Artificial Sequence: Synthetic oligonucleotide
  Sense strand starting at position 3463 of SEQ ID NO: 1885737
gcccguaguaaaugaugca

SEQ ID NO: 2364187 - RNA, 19 nt, Artificial Sequence
  Description of Artificial Sequence: Synthetic oligonucleotide
  Antisense strand to SEQ ID NO: 2364186
ugcaucauuuacuacgggc

SEQ ID NO: 2364188 - RNA, 19 nt, Artificial Sequence
  Description of Artificial Sequence: Synthetic oligonucleotide
  Sense strand starting at position 3503 of SEQ ID NO: 1885737
ggcucucauuuguaagggu

SEQ ID NO: 2364189 - RNA, 19 nt, Artificial Sequence
  Description of Artificial Sequence: Synthetic oligonucleotide
  Antisense strand to SEQ ID NO: 2364188
acccuuacaaaugagagcc

SEQ ID NO: 2364190 - RNA, 19 nt, Artificial Sequence
  Description of Artificial Sequence: Synthetic oligonucleotide
  Sense strand starting at position 3648 of SEQ ID NO: 1885737
gugguuuauggacauucca

SEQ ID NO: 2364191 - RNA, 19 nt, Artificial Sequence
  Description of Artificial Sequence: Synthetic oligonucleotide
  Antisense strand to SEQ ID NO: 2364190
uggaauguccauaaaccac

SEQ ID NO: 2364192 - RNA, 19 nt, Artificial Sequence
  Description of Artificial Sequence: Synthetic oligonucleotide
  Sense strand starting at position 3656 of SEQ ID NO: 1885737
uggacauuccauugaaacc

SEQ ID NO: 2364193 - RNA, 19 nt, Artificial Sequence
  Description of Artificial Sequence: Synthetic oligonucleotide
  Antisense strand to SEQ ID NO: 2364192
gguuucaauggaaugucca

SEQ ID NO: 2364194 - RNA, 19 nt, Artificial Sequence
  Description of Artificial Sequence: Synthetic oligonucleotide
  Sense strand starting at position 3779 of SEQ ID NO: 1885737
uggcaauauucuuugucca

SEQ ID NO: 2364195 - RNA, 19 nt, Artificial Sequence
  Description of Artificial Sequence: Synthetic oligonucleotide
  Antisense strand to SEQ ID NO: 2364194
uggacaaagaauauugcca

SEQ ID NO: 2364196 - RNA, 19 nt, Artificial Sequence
  Description of Artificial Sequence: Synthetic oligonucleotide
  Sense strand starting at position 3780 of SEQ ID NO: 1885737
ggcaauauucuuuguccac

SEQ ID NO: 2364197 - RNA, 19 nt, Artificial Sequence
  Description of Artificial Sequence: Synthetic oligonucleotide
  Antisense strand to SEQ ID NO: 2364196
guggacaaagaauauugcc

SEQ ID NO: 2364198 - RNA, 19 nt, Artificial Sequence
  Description of Artificial Sequence: Synthetic oligonucleotide
  Sense strand starting at position 3784 of SEQ ID NO: 1885737
auauucuuuguccacuaga

SEQ ID NO: 2364199 - RNA, 19 nt, Artificial Sequence
  Description of Artificial Sequence: Synthetic oligonucleotide
  Antisense strand to SEQ ID NO: 2364198
ucuaguggacaaagaauau

SEQ ID NO: 2364200 - RNA, 19 nt, Artificial Sequence
  Description of Artificial Sequence: Synthetic oligonucleotide
  Sense strand starting at position 3861 of SEQ ID NO: 1885737
augcuauuauugcuagaaa

SEQ ID NO: 2364201 - RNA, 19 nt, Artificial Sequence
  Description of Artificial Sequence: Synthetic oligonucleotide
  Antisense strand to SEQ ID NO: 2364200
uuucuagcaauaauagcau

SEQ ID NO: 2364202 - RNA, 19 nt, Artificial Sequence
  Description of Artificial Sequence: Synthetic oligonucleotide
  Sense strand starting at position 3959 of SEQ ID NO: 1885737
guggauuuccacugcacuu

SEQ ID NO: 2364203 - RNA, 19 nt, Artificial Sequence
  Description of Artificial Sequence: Synthetic oligonucleotide
  Antisense strand to SEQ ID NO: 2364202
aagugcaguggaaauccac

SEQ ID NO: 2364204 - RNA, 19 nt, Artificial Sequence
  Description of Artificial Sequence: Synthetic oligonucleotide
  Sense strand starting at position 20 of SEQ ID NO: 1885736
gcagaagcccuugaacgau

SEQ ID NO: 2364205 - RNA, 19 nt, Artificial Sequence
  Description of Artificial Sequence: Synthetic oligonucleotide
  Antisense strand to SEQ ID NO: 2364204
aucguucaagggcuucugc

SEQ ID NO: 2364206 - RNA, 19 nt, Artificial Sequence
  Description of Artificial Sequence: Synthetic oligonucleotide
  Sense strand starting at position 26 of SEQ ID NO: 1885736
gcccuugaacgaugaagga

SEQ ID NO: 2364207 - RNA, 19 nt, Artificial Sequence
  Description of Artificial Sequence: Synthetic oligonucleotide
  Antisense strand to SEQ ID NO: 2364206
uccuucaucguucaagggc

SEQ ID NO: 2364208 - RNA, 19 nt, Artificial Sequence
  Description of Artificial Sequence: Synthetic oligonucleotide
  Sense strand starting at position 122 of SEQ ID NO: 1885736
uagacuauccuggguacca

SEQ ID NO: 2364209 - RNA, 19 nt, Artificial Sequence
  Description of Artificial Sequence: Synthetic oligonucleotide
  Antisense strand to SEQ ID NO: 2364208
ugguacccaggauagucua

SEQ ID NO: 2364210 - RNA, 19 nt, Artificial Sequence
  Description of Artificial Sequence: Synthetic oligonucleotide
  Sense strand starting at position 123 of SEQ ID NO: 1885736
agacuauccuggguaccaa

SEQ ID NO: 2364211 - RNA, 19 nt, Artificial Sequence
  Description of Artificial Sequence: Synthetic oligonucleotide
  Antisense strand to SEQ ID NO: 2364210
uugguacccaggauagucu

SEQ ID NO: 2364212 - RNA, 19 nt, Artificial Sequence
  Description of Artificial Sequence: Synthetic oligonucleotide
  Sense strand starting at position 525 of SEQ ID NO: 1885736
cccaauaaugguuagcaaa

SEQ ID NO: 2364213 - RNA, 19 nt, Artificial Sequence
  Description of Artificial Sequence: Synthetic oligonucleotide
  Antisense strand to SEQ ID NO: 2364212
uuugcuaaccauuauuggg

SEQ ID NO: 2364214 - RNA, 19 nt, Artificial Sequence
  Description of Artificial Sequence: Synthetic oligonucleotide
  Sense strand starting at position 639 of SEQ ID NO: 1885736
aaguaaucacaggguaagu

SEQ ID NO: 2364215 - RNA, 19 nt, Artificial Sequence
  Description of Artificial Sequence: Synthetic oligonucleotide
  Antisense strand to SEQ ID NO: 2364214
acuuacccugugauuacuu

SEQ ID NO: 2364216 - RNA, 19 nt, Artificial Sequence
  Description of Artificial Sequence: Synthetic oligonucleotide
  Sense strand starting at position 691 of SEQ ID NO: 1885736
uuacaucacuggccuaaga

SEQ ID NO: 2364217 - RNA, 19 nt, Artificial Sequence
  Description of Artificial Sequence: Synthetic oligonucleotide
  Antisense strand to SEQ ID NO: 2364216
ucuuaggccagugauguaa

SEQ ID NO: 2364218 - RNA, 19 nt, Artificial Sequence
  Description of Artificial Sequence: Synthetic oligonucleotide
  Sense strand starting at position 743 of SEQ ID NO: 1885736
uugucaucaggaugauguu

SEQ ID NO: 2364219 - RNA, 19 nt, Artificial Sequence
  Description of Artificial Sequence: Synthetic oligonucleotide
  Antisense strand to SEQ ID NO: 2364218
aacaucauccugaugacaa

SEQ ID NO: 2364220 - RNA, 19 nt, Artificial Sequence
  Description of Artificial Sequence: Synthetic oligonucleotide
  Sense strand starting at position 860 of SEQ ID NO: 1885736
gcuuuaaggucacugagag

SEQ ID NO: 2364221 - RNA, 19 nt, Artificial Sequence
  Description of Artificial Sequence: Synthetic oligonucleotide
  Antisense strand to SEQ ID NO: 2364220
cucucagugaccuuaaagc

SEQ ID NO: 2364222 - RNA, 19 nt, Artificial Sequence
  Description of Artificial Sequence: Synthetic oligonucleotide
  Sense strand starting at position 966 of SEQ ID NO: 1885736
ggaggaagauucccuugua

SEQ ID NO: 2364223 - RNA, 19 nt, Artificial Sequence
  Description of Artificial Sequence: Synthetic oligonucleotide
  Antisense strand to SEQ ID NO: 2364222
uacaagggaaucuuccucc

SEQ ID NO: 2364224 - RNA, 19 nt, Artificial Sequence
  Description of Artificial Sequence: Synthetic oligonucleotide
  Sense strand starting at position 967 of SEQ ID NO: 1885736
gaggaagauucccuuguaa

SEQ ID NO: 2364225 - RNA, 19 nt, Artificial Sequence
  Description of Artificial Sequence: Synthetic oligonucleotide
  Antisense strand to SEQ ID NO: 2364224
uuacaagggaaucuuccuc

SEQ ID NO: 2364226 - RNA, 19 nt, Artificial Sequence
  Description of Artificial Sequence: Synthetic oligonucleotide
  Sense strand starting at position 969 of SEQ ID NO: 1885736
ggaagauucccuuguaacc

SEQ ID NO: 2364227 - RNA, 19 nt, Artificial Sequence
  Description of Artificial Sequence: Synthetic oligonucleotide
  Antisense strand to SEQ ID NO: 2364226
gguuacaagggaaucuucc

SEQ ID NO: 2364228 - RNA, 19 nt, Artificial Sequence
  Description of Artificial Sequence: Synthetic oligonucleotide
  Sense strand starting at position 1194 of SEQ ID NO: 1885736
uagggaaaucccugucuca

SEQ ID NO: 2364229 - RNA, 19 nt, Artificial Sequence
  Description of Artificial Sequence: Synthetic oligonucleotide
  Antisense strand to SEQ ID NO: 2364228
ugagacagggauuucccua

SEQ ID NO: 2364230 - RNA, 19 nt, Artificial Sequence
  Description of Artificial Sequence: Synthetic oligonucleotide
  Sense strand starting at position 1197 of SEQ ID NO: 1885736
ggaaaucccugucucaauu

SEQ ID NO: 2364231 - RNA, 19 nt, Artificial Sequence
  Description of Artificial Sequence: Synthetic oligonucleotide
  Antisense strand to SEQ ID NO: 2364230
aauugagacagggauuucc

SEQ ID NO: 2364232 - RNA, 19 nt, Artificial Sequence
  Description of Artificial Sequence: Synthetic oligonucleotide
  Sense strand starting at position 1227 of SEQ ID NO: 1885736
ucuugugauccucagagug

SEQ ID NO: 2364233 - RNA, 19 nt, Artificial Sequence
  Description of Artificial Sequence: Synthetic oligonucleotide
  Antisense strand to SEQ ID NO: 2364232
cacucugaggaucacaaga

SEQ ID NO: 2364234 - RNA, 19 nt, Artificial Sequence
  Description of Artificial Sequence: Synthetic oligonucleotide
  Sense strand starting at position 1548 of SEQ ID NO: 1885736
ggcucauggauacaguauu

SEQ ID NO: 2364235 - RNA, 19 nt, Artificial Sequence
  Description of Artificial Sequence: Synthetic oligonucleotide
  Antisense strand to SEQ ID NO: 2364234
aauacuguauccaugagcc

SEQ ID NO: 2364236 - RNA, 19 nt, Artificial Sequence
  Description of Artificial Sequence: Synthetic oligonucleotide
  Sense strand starting at position 1620 of SEQ ID NO: 1885736
ggagcaaccucuucccaga

SEQ ID NO: 2364237 - RNA, 19 nt, Artificial Sequence
  Description of Artificial Sequence: Synthetic oligonucleotide
  Antisense strand to SEQ ID NO: 2364236
ucugggaagagguugcucc

SEQ ID NO: 2364238 - RNA, 19 nt, Artificial Sequence
  Description of Artificial Sequence: Synthetic oligonucleotide
  Sense strand starting at position 1644 of SEQ ID NO: 1885736
caagaaccuugaguuguuu

SEQ ID NO: 2364239 - RNA, 19 nt, Artificial Sequence
  Description of Artificial Sequence: Synthetic oligonucleotide
  Antisense strand to SEQ ID NO: 2364238
aaacaacucaagguucuug

SEQ ID NO: 2364240 - RNA, 19 nt, Artificial Sequence
  Description of Artificial Sequence: Synthetic oligonucleotide
  Sense strand starting at position 2224 of SEQ ID NO: 1885736
agaggagaguucuucccua

SEQ ID NO: 2364241 - RNA, 19 nt, Artificial Sequence
  Description of Artificial Sequence: Synthetic oligonucleotide
  Antisense strand to SEQ ID NO: 2364240
uagggaagaacucuccucu

SEQ ID NO: 2364242 - RNA, 19 nt, Artificial Sequence
  Description of Artificial Sequence: Synthetic oligonucleotide
  Sense strand starting at position 2228 of SEQ ID NO: 1885736
gagaguucuucccuagaau

SEQ ID NO: 2364243 - RNA, 19 nt, Artificial Sequence
  Description of Artificial Sequence: Synthetic oligonucleotide
  Antisense strand to SEQ ID NO: 2364242
auucuagggaagaacucuc

SEQ ID NO: 2364244 - RNA, 19 nt, Artificial Sequence
  Description of Artificial Sequence: Synthetic oligonucleotide
  Sense strand starting at position 2229 of SEQ ID NO: 1885736
agaguucuucccuagaauc

SEQ ID NO: 2364245 - RNA, 19 nt, Artificial Sequence
  Description of Artificial Sequence: Synthetic oligonucleotide
  Antisense strand to SEQ ID NO: 2364244
gauucuagggaagaacucu

SEQ ID NO: 2364246 - RNA, 19 nt, Artificial Sequence
  Description of Artificial Sequence: Synthetic oligonucleotide
  Sense strand starting at position 2231 of SEQ ID NO: 1885736
aguucuucccuagaaucag

SEQ ID NO: 2364247 - RNA, 19 nt, Artificial Sequence
  Description of Artificial Sequence: Synthetic oligonucleotide
  Antisense strand to SEQ ID NO: 2364246
cugauucuagggaagaacu

SEQ ID NO: 2364248 - RNA, 19 nt, Artificial Sequence
  Description of Artificial Sequence: Synthetic oligonucleotide
  Sense strand starting at position 3014 of SEQ ID NO: 1885736
guuugugcuauuugacagu

SEQ ID NO: 2364249 - RNA, 19 nt, Artificial Sequence
  Description of Artificial Sequence: Synthetic oligonucleotide
  Antisense strand to SEQ ID NO: 2364248
acugucaaauagcacaaac

SEQ ID NO: 2364250 - RNA, 19 nt, Artificial Sequence
  Description of Artificial Sequence: Synthetic oligonucleotide
  Sense strand starting at position 3180 of SEQ ID NO: 1885736
caaggaugguaguucuuau

SEQ ID NO: 2364251 - RNA, 19 nt, Artificial Sequence
  Description of Artificial Sequence: Synthetic oligonucleotide
  Antisense strand to SEQ ID NO: 2364250
auaagaacuaccauccuug

SEQ ID NO: 2364252 - RNA, 19 nt, Artificial Sequence
  Description of Artificial Sequence: Synthetic oligonucleotide
  Sense strand starting at position 3276 of SEQ ID NO: 1885736
cggcaucaugcucaugaga

SEQ ID NO: 2364253 - RNA, 19 nt, Artificial Sequence
  Description of Artificial Sequence: Synthetic oligonucleotide
  Antisense strand to SEQ ID NO: 2364252
ucucaugagcaugaugccg

SEQ ID NO: 2364254 - RNA, 19 nt, Artificial Sequence
  Description of Artificial Sequence: Synthetic oligonucleotide
  Sense strand starting at position 3302 of SEQ ID NO: 1885736
ugaaucuaucaaggucuga

SEQ ID NO: 2364255 - RNA, 19 nt, Artificial Sequence
  Description of Artificial Sequence: Synthetic oligonucleotide
  Antisense strand to SEQ ID NO: 2364254
ucagaccuugauagauuca

SEQ ID NO: 2364256 - RNA, 19 nt, Artificial Sequence
  Description of Artificial Sequence: Synthetic oligonucleotide
  Sense strand starting at position 3348 of SEQ ID NO: 1885736
ggaggacagaaauguguuu

SEQ ID NO: 2364257 - RNA, 19 nt, Artificial Sequence
  Description of Artificial Sequence: Synthetic oligonucleotide
  Antisense strand to SEQ ID NO: 2364256
aaacacauuucuguccucc

SEQ ID NO: 2364258 - RNA, 19 nt, Artificial Sequence
  Description of Artificial Sequence: Synthetic oligonucleotide
  Sense strand starting at position 3353 of SEQ ID NO: 1885736
acagaaauguguuucuaua

SEQ ID NO: 2364259 - RNA, 19 nt, Artificial Sequence
  Description of Artificial Sequence: Synthetic oligonucleotide
  Antisense strand to SEQ ID NO: 2364258
uauagaaacacauuucugu

SEQ ID NO: 2364260 - RNA, 19 nt, Artificial Sequence
  Description of Artificial Sequence: Synthetic oligonucleotide
  Sense strand starting at position 3389 of SEQ ID NO: 1885736
ucaugagagcaauguaaag

SEQ ID NO: 2364261 - RNA, 19 nt, Artificial Sequence
  Description of Artificial Sequence: Synthetic oligonucleotide
  Antisense strand to SEQ ID NO: 2364260
cuuuacauugcucucauga

SEQ ID NO: 2364262 - RNA, 19 nt, Artificial Sequence
  Description of Artificial Sequence: Synthetic oligonucleotide
  Sense strand starting at position 3405 of SEQ ID NO: 1885736
aaggaagcucuaugggauu

SEQ ID NO: 2364263 - RNA, 19 nt, Artificial Sequence
  Description of Artificial Sequence: Synthetic oligonucleotide
  Antisense strand to SEQ ID NO: 2364262
aaucccauagagcuuccuu

SEQ ID NO: 2364264 - RNA, 19 nt, Artificial Sequence
  Description of Artificial Sequence: Synthetic oligonucleotide
  Sense strand starting at position 3407 of SEQ ID NO: 1885736
ggaagcucuaugggauugu

SEQ ID NO: 2364265 - RNA, 19 nt, Artificial Sequence
  Description of Artificial Sequence: Synthetic oligonucleotide
  Antisense strand to SEQ ID NO: 2364264
acaaucccauagagcuucc

SEQ ID NO: 2364266 - RNA, 19 nt, Artificial Sequence
  Description of Artificial Sequence: Synthetic oligonucleotide
  Sense strand starting at position 3417 of SEQ ID NO: 1885736
ugggauugucgauaagcaa

SEQ ID NO: 2364267 - RNA, 19 nt, Artificial Sequence
  Description of Artificial Sequence: Synthetic oligonucleotide
  Antisense strand to SEQ ID NO: 2364266
uugcuuaucgacaauccca

SEQ ID NO: 2364268 - RNA, 19 nt, Artificial Sequence
  Description of Artificial Sequence: Synthetic oligonucleotide
  Sense strand starting at position 3425 of SEQ ID NO: 1885736
ucgauaagcaagugauuaa

SEQ ID NO: 2364269 - RNA, 19 nt, Artificial Sequence
  Description of Artificial Sequence: Synthetic oligonucleotide
  Antisense strand to SEQ ID NO: 2364268
uuaaucacuugcuuaucga

SEQ ID NO: 2364270 - RNA, 19 nt, Artificial Sequence
  Description of Artificial Sequence: Synthetic oligonucleotide
  Sense strand starting at position 3426 of SEQ ID NO: 1885736
cgauaagcaagugauuaau

SEQ ID NO: 2364271 - RNA, 19 nt, Artificial Sequence
  Description of Artificial Sequence: Synthetic oligonucleotide
  Antisense strand to SEQ ID NO: 2364270
auuaaucacuugcuuaucg

SEQ ID NO: 2364272 - RNA, 19 nt, Artificial Sequence
  Description of Artificial Sequence: Synthetic oligonucleotide
  Sense strand starting at position 3429 of SEQ ID NO: 1885736
uaagcaagugauuaauugu

SEQ ID NO: 2364273 - RNA, 19 nt, Artificial Sequence
  Description of Artificial Sequence: Synthetic oligonucleotide
  Antisense strand to SEQ ID NO: 2364272
acaauuaaucacuugcuua

SEQ ID NO: 2364274 - RNA, 19 nt, Artificial Sequence
  Description of Artificial Sequence: Synthetic oligonucleotide
  Sense strand starting at position 3461 of SEQ ID NO: 1885736
gggauaucaaggcaagcuu

SEQ ID NO: 2364275 - RNA, 19 nt, Artificial Sequence
  Description of Artificial Sequence: Synthetic oligonucleotide
  Antisense strand to SEQ ID NO: 2364274
aagcuugccuugauauccc

SEQ ID NO: 2364276 - RNA, 19 nt, Artificial Sequence
  Description of Artificial Sequence: Synthetic oligonucleotide
  Sense strand starting at position 3472 of SEQ ID NO: 1885736
gcaagcuugguggacuaaa

SEQ ID NO: 2364277 - RNA, 19 nt, Artificial Sequence
  Description of Artificial Sequence: Synthetic oligonucleotide
  Antisense strand to SEQ ID NO: 2364276
uuuaguccaccaagcuugc

SEQ ID NO: 2364278 - RNA, 19 nt, Artificial Sequence
  Description of Artificial Sequence: Synthetic oligonucleotide
  Sense strand starting at position 3762 of SEQ ID NO: 1885736
cuagaagucucuguaccaa

SEQ ID NO: 2364279 - RNA, 19 nt, Artificial Sequence
  Description of Artificial Sequence: Synthetic oligonucleotide
  Antisense strand to SEQ ID NO: 2364278
uugguacagagacuucuag

SEQ ID NO: 2364280 - RNA, 19 nt, Artificial Sequence
  Description of Artificial Sequence: Synthetic oligonucleotide
  Sense strand starting at position 3825 of SEQ ID NO: 1885736
augggauugcucuagaugu

SEQ ID NO: 2364281 - RNA, 19 nt, Artificial Sequence
  Description of Artificial Sequence: Synthetic oligonucleotide
  Antisense strand to SEQ ID NO: 2364280
acaucuagagcaaucccau

SEQ ID NO: 2364282 - RNA, 19 nt, Artificial Sequence
  Description of Artificial Sequence: Synthetic oligonucleotide
  Sense strand starting at position 3827 of SEQ ID NO: 1885736
gggauugcucuagauguca

SEQ ID NO: 2364283 - RNA, 19 nt, Artificial Sequence
  Description of Artificial Sequence: Synthetic oligonucleotide
  Antisense strand to SEQ ID NO: 2364282
ugacaucuagagcaauccc

SEQ ID NO: 2364284 - RNA, 19 nt, Artificial Sequence
  Description of Artificial Sequence: Synthetic oligonucleotide
  Sense strand starting at position 364 of SEQ ID NO: 1885738
auggauuagugauccacca

SEQ ID NO: 2364285 - RNA, 19 nt, Artificial Sequence
  Description of Artificial Sequence: Synthetic oligonucleotide
  Antisense strand to SEQ ID NO: 2364284
ugguggaucacuaauccau

SEQ ID NO: 2364286 - RNA, 19 nt, Artificial Sequence
  Description of Artificial Sequence: Synthetic oligonucleotide
  Sense strand starting at position 844 of SEQ ID NO: 1885738
acacuaagcuaagugguua

SEQ ID NO: 2364287 - RNA, 19 nt, Artificial Sequence
  Description of Artificial Sequence: Synthetic oligonucleotide
  Antisense strand to SEQ ID NO: 2364286
uaaccacuuagcuuagugu

SEQ ID NO: 2364288 - RNA, 19 nt, Artificial Sequence
  Description of Artificial Sequence: Synthetic oligonucleotide
  Sense strand starting at position 857 of SEQ ID NO: 1885738
ugguuagcuugugcaauuu

SEQ ID NO: 2364289 - RNA, 19 nt, Artificial Sequence
  Description of Artificial Sequence: Synthetic oligonucleotide
  Antisense strand to SEQ ID NO: 2364288
aaauugcacaagcuaacca

SEQ ID NO: 2364290 - RNA, 19 nt, Artificial Sequence
  Description of Artificial Sequence: Synthetic oligonucleotide
  Sense strand starting at position 914 of SEQ ID NO: 1885738
aguuaagugaacugaagau

SEQ ID NO: 2364291 - RNA, 19 nt, Artificial Sequence
  Description of Artificial Sequence: Synthetic oligonucleotide
  Antisense strand to SEQ ID NO: 2364290
aucuucaguucacuuaacu

SEQ ID NO: 2364292 - RNA, 19 nt, Artificial Sequence
  Description of Artificial Sequence: Synthetic oligonucleotide
  Sense strand starting at position 1113 of SEQ ID NO: 1885738
ugcacuugucuguuggcau

SEQ ID NO: 2364293 - RNA, 19 nt, Artificial Sequence
  Description of Artificial Sequence: Synthetic oligonucleotide
  Antisense strand to SEQ ID NO: 2364292
augccaacagacaagugca

SEQ ID NO: 2364294 - RNA, 19 nt, Artificial Sequence
  Description of Artificial Sequence: Synthetic oligonucleotide
  Sense strand starting at position 1126 of SEQ ID NO: 1885738
uggcauaaguucuuaauca

SEQ ID NO: 2364295 - RNA, 19 nt, Artificial Sequence
  Description of Artificial Sequence: Synthetic oligonucleotide
  Antisense strand to SEQ ID NO: 2364294
ugauuaagaacuuaugcca

SEQ ID NO: 2364296 - RNA, 19 nt, Artificial Sequence
  Description of Artificial Sequence: Synthetic oligonucleotide
  Sense strand starting at position 1516 of SEQ ID NO: 1885738
gcaggauacgcugaacguu

SEQ ID NO: 2364297 - RNA, 19 nt, Artificial Sequence
  Description of Artificial Sequence: Synthetic oligonucleotide
  Antisense strand to SEQ ID NO: 2364296
aacguucagcguauccugc

SEQ ID NO: 2364298 - RNA, 19 nt, Artificial Sequence
  Description of Artificial Sequence: Synthetic oligonucleotide
  Sense strand starting at position 1552 of SEQ ID NO: 1885738
ugccucuuuacggagauaa

SEQ ID NO: 2364299 - RNA, 19 nt, Artificial Sequence
  Description of Artificial Sequence: Synthetic oligonucleotide
  Antisense strand to SEQ ID NO: 2364298
uuaucuccguaaagaggca

SEQ ID NO: 2364300 - RNA, 19 nt, Artificial Sequence
  Description of Artificial Sequence: Synthetic oligonucleotide
  Sense strand starting at position 1622 of SEQ ID NO: 1885738
ccaagaaagcaauguagaa

SEQ ID NO: 2364301 - RNA, 19 nt, Artificial Sequence
  Description of Artificial Sequence: Synthetic oligonucleotide
  Antisense strand to SEQ ID NO: 2364300
uucuacauugcuuucuugg

SEQ ID NO: 2364302 - RNA, 19 nt, Artificial Sequence
  Description of Artificial Sequence: Synthetic oligonucleotide
  Sense strand starting at position 1748 of SEQ ID NO: 1885738
agucuuuggcaagaagcaa

SEQ ID NO: 2364303 - RNA, 19 nt, Artificial Sequence
  Description of Artificial Sequence: Synthetic oligonucleotide
  Antisense strand to SEQ ID NO: 2364302
uugcuucuugccaaagacu

SEQ ID NO: 2364304 - RNA, 19 nt, Artificial Sequence
  Description of Artificial Sequence: Synthetic oligonucleotide
  Sense strand starting at position 2126 of SEQ ID NO: 1885738
uuacuaaacguuugugaag

SEQ ID NO: 2364305 - RNA, 19 nt, Artificial Sequence
  Description of Artificial Sequence: Synthetic oligonucleotide
  Antisense strand to SEQ ID NO: 2364304
cuucacaaacguuuaguaa

SEQ ID NO: 2364306 - RNA, 19 nt, Artificial Sequence
  Description of Artificial Sequence: Synthetic oligonucleotide
  Sense strand starting at position 2127 of SEQ ID NO: 1885738
uacuaaacguuugugaagu

SEQ ID NO: 2364307 - RNA, 19 nt, Artificial Sequence
  Description of Artificial Sequence: Synthetic oligonucleotide
  Antisense strand to SEQ ID NO: 2364306
acuucacaaacguuuagua

SEQ ID NO: 2364308 - RNA, 19 nt, Artificial Sequence
  Description of Artificial Sequence: Synthetic oligonucleotide
  Sense strand starting at position 2307 of SEQ ID NO: 1885738
aggauuucuuacuaagcag

SEQ ID NO: 2364309 - RNA, 19 nt, Artificial Sequence
  Description of Artificial Sequence: Synthetic oligonucleotide
  Antisense strand to SEQ ID NO: 2364308
cugcuuaguaagaaauccu

SEQ ID NO: 2364310 - RNA, 19 nt, Artificial Sequence
  Description of Artificial Sequence: Synthetic oligonucleotide
  Sense strand starting at position 2388 of SEQ ID NO: 1885738
ugugaucuacagugagagu

SEQ ID NO: 2364311 - RNA, 19 nt, Artificial Sequence
  Description of Artificial Sequence: Synthetic oligonucleotide
  Antisense strand to SEQ ID NO: 2364310
acucucacuguagaucaca

SEQ ID NO: 2364312 - RNA, 19 nt, Artificial Sequence
  Description of Artificial Sequence: Synthetic oligonucleotide
  Sense strand starting at position 2437 of SEQ ID NO: 1885738
ugcugacaguucccugaaa

SEQ ID NO: 2364313 - RNA, 19 nt, Artificial Sequence
  Description of Artificial Sequence: Synthetic oligonucleotide
  Antisense strand to SEQ ID NO: 2364312
uuucagggaacugucagca

SEQ ID NO: 2364314 - RNA, 19 nt, Artificial Sequence
  Description of Artificial Sequence: Synthetic oligonucleotide
  Sense strand starting at position 2438 of SEQ ID NO: 1885738
gcugacaguucccugaaag

SEQ ID NO: 2364315 - RNA, 19 nt, Artificial Sequence
  Description of Artificial Sequence: Synthetic oligonucleotide
  Antisense strand to SEQ ID NO: 2364314
cuuucagggaacugucagc

SEQ ID NO: 2364316 - RNA, 19 nt, Artificial Sequence
  Description of Artificial Sequence: Synthetic oligonucleotide
  Sense strand starting at position 2439 of SEQ ID NO: 1885738
cugacaguucccugaaaga

SEQ ID NO: 2364317 - RNA, 19 nt, Artificial Sequence
  Description of Artificial Sequence: Synthetic oligonucleotide
  Antisense strand to SEQ ID NO: 2364316
ucuuucagggaacugucag

SEQ ID NO: 2364318 - RNA, 19 nt, Artificial Sequence
  Description of Artificial Sequence: Synthetic oligonucleotide
  Sense strand starting at position 2485 of SEQ ID NO: 1885738
gguaaagaacuuugcaagu

SEQ ID NO: 2364319 - RNA, 19 nt, Artificial Sequence
  Description of Artificial Sequence: Synthetic oligonucleotide
  Antisense strand to SEQ ID NO: 2364318
acuugcaaaguucuuuacc

SEQ ID NO: 2364320 - RNA, 19 nt, Artificial Sequence
  Description of Artificial Sequence: Synthetic oligonucleotide
  Sense strand starting at position 2494 of SEQ ID NO: 1885738
cuuugcaaguucuuccaga

SEQ ID NO: 2364321 - RNA, 19 nt, Artificial Sequence
  Description of Artificial Sequence: Synthetic oligonucleotide
  Antisense strand to SEQ ID NO: 2364320
ucuggaagaacuugcaaag

SEQ ID NO: 2364322 - RNA, 19 nt, Artificial Sequence
  Description of Artificial Sequence: Synthetic oligonucleotide
  Sense strand starting at position 2531 of SEQ ID NO: 1885738
aacaaauauucguugagca

SEQ ID NO: 2364323 - RNA, 19 nt, Artificial Sequence
  Description of Artificial Sequence: Synthetic oligonucleotide
  Antisense strand to SEQ ID NO: 2364322
ugcucaacgaauauuuguu

SEQ ID NO: 2364324 - RNA, 19 nt, Artificial Sequence
  Description of Artificial Sequence: Synthetic oligonucleotide
  Sense strand starting at position 2532 of SEQ ID NO: 1885738
acaaauauucguugagcaa

SEQ ID NO: 2364325 - RNA, 19 nt, Artificial Sequence
  Description of Artificial Sequence: Synthetic oligonucleotide
  Antisense strand to SEQ ID NO: 2364324
uugcucaacgaauauuugu

SEQ ID NO: 2364326 - RNA, 19 nt, Artificial Sequence
  Description of Artificial Sequence: Synthetic oligonucleotide
  Sense strand starting at position 2533 of SEQ ID NO: 1885738
caaauauucguugagcaac

SEQ ID NO: 2364327 - RNA, 19 nt, Artificial Sequence
  Description of Artificial Sequence: Synthetic oligonucleotide
  Antisense strand to SEQ ID NO: 2364326
guugcucaacgaauauuug

SEQ ID NO: 2364328 - RNA, 19 nt, Artificial Sequence
  Description of Artificial Sequence: Synthetic oligonucleotide
  Sense strand starting at position 2535 of SEQ ID NO: 1885738
aauauucguugagcaacua

SEQ ID NO: 2364329 - RNA, 19 nt, Artificial Sequence
  Description of Artificial Sequence: Synthetic oligonucleotide
  Antisense strand to SEQ ID NO: 2364328
uaguugcucaacgaauauu

SEQ ID NO: 2364330 - RNA, 19 nt, Artificial Sequence
  Description of Artificial Sequence: Synthetic oligonucleotide
  Sense strand starting at position 2554 of SEQ ID NO: 1885738
cuauguaccgaguacuaca

SEQ ID NO: 2364331 - RNA, 19 nt, Artificial Sequence
  Description of Artificial Sequence: Synthetic oligonucleotide
  Antisense strand to SEQ ID NO: 2364330
uguaguacucgguacauag

SEQ ID NO: 2364332 - RNA, 19 nt, Artificial Sequence
  Description of Artificial Sequence: Synthetic oligonucleotide
  Sense strand starting at position 2562 of SEQ ID NO: 1885738
cgaguacuacaguagacuu

SEQ ID NO: 2364333 - RNA, 19 nt, Artificial Sequence
  Description of Artificial Sequence: Synthetic oligonucleotide
  Antisense strand to SEQ ID NO: 2364332
aagucuacuguaguacucg

SEQ ID NO: 2364334 - RNA, 19 nt, Artificial Sequence
  Description of Artificial Sequence: Synthetic oligonucleotide
  Sense strand starting at position 2589 of SEQ ID NO: 1885738
cagcauugagaccgacaua

SEQ ID NO: 2364335 - RNA, 19 nt, Artificial Sequence
  Description of Artificial Sequence: Synthetic oligonucleotide
  Antisense strand to SEQ ID NO: 2364334
uaugucggucucaaugcug

SEQ ID NO: 2364336 - RNA, 19 nt, Artificial Sequence
  Description of Artificial Sequence: Synthetic oligonucleotide
  Sense strand starting at position 2669 of SEQ ID NO: 1885738
ugcgguauaauaugauaag

SEQ ID NO: 2364337 - RNA, 19 nt, Artificial Sequence
  Description of Artificial Sequence: Synthetic oligonucleotide
  Antisense strand to SEQ ID NO: 2364336
cuuaucauauuauaccgca

SEQ ID NO: 2364338 - RNA, 19 nt, Artificial Sequence
  Description of Artificial Sequence: Synthetic oligonucleotide
  Sense strand starting at position 2779 of SEQ ID NO: 1885738
gguaauaucuaagcugaau

SEQ ID NO: 2364339 - RNA, 19 nt, Artificial Sequence
  Description of Artificial Sequence: Synthetic oligonucleotide
  Antisense strand to SEQ ID NO: 2364338
auucagcuuagauauuacc

SEQ ID NO: 2364340 - RNA, 19 nt, Artificial Sequence
  Description of Artificial Sequence: Synthetic oligonucleotide
  Sense strand starting at position 2798 of SEQ ID NO: 1885738
gcugaaucugaauaaugug

SEQ ID NO: 2364341 - RNA, 19 nt, Artificial Sequence
  Description of Artificial Sequence: Synthetic oligonucleotide
  Antisense strand to SEQ ID NO: 2364340
cacauuauucagauucagc

SEQ ID NO: 2364342 - RNA, 19 nt, Artificial Sequence
  Description of Artificial Sequence: Synthetic oligonucleotide
  Sense strand starting at position 2804 of SEQ ID NO: 1885738
ucugaauaauguguagaag

SEQ ID NO: 2364343 - RNA, 19 nt, Artificial Sequence
  Description of Artificial Sequence: Synthetic oligonucleotide
  Antisense strand to SEQ ID NO: 2364342
cuucuacacauuauucaga

SEQ ID NO: 2364344 - RNA, 19 nt, Artificial Sequence
  Description of Artificial Sequence: Synthetic oligonucleotide
  Sense strand starting at position 2805 of SEQ ID NO: 1885738
cugaauaauguguagaagu

SEQ ID NO: 2364345 - RNA, 19 nt, Artificial Sequence
  Description of Artificial Sequence: Synthetic oligonucleotide
  Antisense strand to SEQ ID NO: 2364344
acuucuacacauuauucag

SEQ ID NO: 2364346 - RNA, 19 nt, Artificial Sequence
  Description of Artificial Sequence: Synthetic oligonucleotide
  Sense strand starting at position 2816 of SEQ ID NO: 1885738
guagaaguuagcugggaga

SEQ ID NO: 2364347 - RNA, 19 nt, Artificial Sequence
  Description of Artificial Sequence: Synthetic oligonucleotide
  Antisense strand to SEQ ID NO: 2364346
ucucccagcuaacuucuac

SEQ ID NO: 2364348 - RNA, 19 nt, Artificial Sequence
  Description of Artificial Sequence: Synthetic oligonucleotide
  Sense strand starting at position 2818 of SEQ ID NO: 1885738
agaaguuagcugggagaau

SEQ ID NO: 2364349 - RNA, 19 nt, Artificial Sequence
  Description of Artificial Sequence: Synthetic oligonucleotide
  Antisense strand to SEQ ID NO: 2364348
auucucccagcuaacuucu

SEQ ID NO: 2364350 - RNA, 19 nt, Artificial Sequence
  Description of Artificial Sequence: Synthetic oligonucleotide
  Sense strand starting at position 2836 of SEQ ID NO: 1885738
uggcaaggagauuguugua

SEQ ID NO: 2364351 - RNA, 19 nt, Artificial Sequence
  Description of Artificial Sequence: Synthetic oligonucleotide
  Antisense strand to SEQ ID NO: 2364350
uacaacaaucuccuugcca

SEQ ID NO: 2364352 - RNA, 19 nt, Artificial Sequence
  Description of Artificial Sequence: Synthetic oligonucleotide
  Sense strand starting at position 2842 of SEQ ID NO: 1885738
ggagauuguuguaaagagg

SEQ ID NO: 2364353 - RNA, 19 nt, Artificial Sequence
  Description of Artificial Sequence: Synthetic oligonucleotide
  Antisense strand to SEQ ID NO: 2364352
ccucuuuacaacaaucucc

SEQ ID NO: 2364354 - RNA, 19 nt, Artificial Sequence
  Description of Artificial Sequence: Synthetic oligonucleotide
  Sense strand starting at position 2845 of SEQ ID NO: 1885738
gauuguuguaaagagguua

SEQ ID NO: 2364355 - RNA, 19 nt, Artificial Sequence
  Description of Artificial Sequence: Synthetic oligonucleotide
  Antisense strand to SEQ ID NO: 2364354
uaaccucuuuacaacaauc

SEQ ID NO: 2364356 - RNA, 19 nt, Artificial Sequence
  Description of Artificial Sequence: Synthetic oligonucleotide
  Sense strand starting at position 2861 of SEQ ID NO: 1885738
uuagaaauggacugcuaag

SEQ ID NO: 2364357 - RNA, 19 nt, Artificial Sequence
  Description of Artificial Sequence: Synthetic oligonucleotide
  Antisense strand to SEQ ID NO: 2364356
cuuagcaguccauuucuaa

SEQ ID NO: 2364358 - RNA, 19 nt, Artificial Sequence
  Description of Artificial Sequence: Synthetic oligonucleotide
  Sense strand starting at position 3009 of SEQ ID NO: 1885738
agugacaccuugucagaag

SEQ ID NO: 2364359 - RNA, 19 nt, Artificial Sequence
  Description of Artificial Sequence: Synthetic oligonucleotide
  Antisense strand to SEQ ID NO: 2364358
cuucugacaaggugucacu

SEQ ID NO: 2364360 - RNA, 19 nt, Artificial Sequence
  Description of Artificial Sequence: Synthetic oligonucleotide
  Sense strand starting at position 3970 of SEQ ID NO: 1885738
uguaaaugaucugugcaac

SEQ ID NO: 2364361 - RNA, 19 nt, Artificial Sequence
  Description of Artificial Sequence: Synthetic oligonucleotide
  Antisense strand to SEQ ID NO: 2364360
guugcacagaucauuuaca

SEQ ID NO: 2364362 - RNA, 19 nt, Artificial Sequence
  Description of Artificial Sequence: Synthetic oligonucleotide
  Sense strand starting at position 3971 of SEQ ID NO: 1885738
guaaaugaucugugcaacu

SEQ ID NO: 2364363 - RNA, 19 nt, Artificial Sequence
  Description of Artificial Sequence: Synthetic oligonucleotide
  Antisense strand to SEQ ID NO: 2364362
aguugcacagaucauuuac

SEQ ID NO: 2364364 - RNA, 19 nt, Artificial Sequence
  Description of Artificial Sequence: Synthetic oligonucleotide
  Sense strand starting at position 28 of SEQ ID NO: 1885740
gaggaagaaacgugccaaa

SEQ ID NO: 2364365 - RNA, 19 nt, Artificial Sequence
  Description of Artificial Sequence: Synthetic oligonucleotide
  Antisense strand to SEQ ID NO: 2364364
uuuggcacguuucuuccuc

SEQ ID NO: 2364366 - RNA, 19 nt, Artificial Sequence
  Description of Artificial Sequence: Synthetic oligonucleotide
  Sense strand starting at position 46 of SEQ ID NO: 1885740
aaggguuggccuugacuau

SEQ ID NO: 2364367 - RNA, 19 nt, Artificial Sequence
  Description of Artificial Sequence: Synthetic oligonucleotide
  Antisense strand to SEQ ID NO: 2364366
auagucaaggccaacccuu

SEQ ID NO: 2364368 - RNA, 19 nt, Artificial Sequence
  Description of Artificial Sequence: Synthetic oligonucleotide
  Sense strand starting at position 47 of SEQ ID NO: 1885740
aggguuggccuugacuauu

SEQ ID NO: 2364369 - RNA, 19 nt, Artificial Sequence
  Description of Artificial Sequence: Synthetic oligonucleotide
  Antisense strand to SEQ ID NO: 2364368
aauagucaaggccaacccu

SEQ ID NO: 2364370 - RNA, 19 nt, Artificial Sequence
  Description of Artificial Sequence: Synthetic oligonucleotide
  Sense strand starting at position 50 of SEQ ID NO: 1885740
guuggccuugacuauuaau

SEQ ID NO: 2364371 - RNA, 19 nt, Artificial Sequence
  Description of Artificial Sequence: Synthetic oligonucleotide
  Antisense strand to SEQ ID NO: 2364370
auuaauagucaaggccaac

SEQ ID NO: 2364372 - RNA, 19 nt, Artificial Sequence
  Description of Artificial Sequence: Synthetic oligonucleotide
  Sense strand starting at position 62 of SEQ ID NO: 1885740
uauuaauuaucguugggag

SEQ ID NO: 2364373 - RNA, 19 nt, Artificial Sequence
  Description of Artificial Sequence: Synthetic oligonucleotide
  Antisense strand to SEQ ID NO: 2364372
cucccaacgauaauuaaua

SEQ ID NO: 2364374 - RNA, 19 nt, Artificial Sequence
  Description of Artificial Sequence: Synthetic oligonucleotide
  Sense strand starting at position 63 of SEQ ID NO: 1885740
auuaauuaucguugggaga

SEQ ID NO: 2364375 - RNA, 19 nt, Artificial Sequence
  Description of Artificial Sequence: Synthetic oligonucleotide
  Antisense strand to SEQ ID NO: 2364374
ucucccaacgauaauuaau

SEQ ID NO: 2364376 - RNA, 19 nt, Artificial Sequence
  Description of Artificial Sequence: Synthetic oligonucleotide
  Sense strand starting at position 64 of SEQ ID NO: 1885740
uuaauuaucguugggagaa

SEQ ID NO: 2364377 - RNA, 19 nt, Artificial Sequence
  Description of Artificial Sequence: Synthetic oligonucleotide
  Antisense strand to SEQ ID NO: 2364376
uucucccaacgauaauuaa

SEQ ID NO: 2364378 - RNA, 19 nt, Artificial Sequence
  Description of Artificial Sequence: Synthetic oligonucleotide
  Sense strand starting at position 192 of SEQ ID NO: 1885740
cgagcugagcaggagaaau

SEQ ID NO: 2364379 - RNA, 19 nt, Artificial Sequence
  Description of Artificial Sequence: Synthetic oligonucleotide
  Antisense strand to SEQ ID NO: 2364378
auuucuccugcucagcucg

SEQ ID NO: 2364380 - RNA, 19 nt, Artificial Sequence
  Description of Artificial Sequence: Synthetic oligonucleotide
  Sense strand starting at position 239 of SEQ ID NO: 1885740
gagaauuucuaggagcgac

SEQ ID NO: 2364381 - RNA, 19 nt, Artificial Sequence
  Description of Artificial Sequence: Synthetic oligonucleotide
  Antisense strand to SEQ ID NO: 2364380
gucgcuccuagaaauucuc

SEQ ID NO: 2364382 - RNA, 19 nt, Artificial Sequence
  Description of Artificial Sequence: Synthetic oligonucleotide
  Sense strand starting at position 328 of SEQ ID NO: 1885740
caguucuaucugugaagga

SEQ ID NO: 2364383 - RNA, 19 nt, Artificial Sequence
  Description of Artificial Sequence: Synthetic oligonucleotide
  Antisense strand to SEQ ID NO: 2364382
uccuucacagauagaacug

SEQ ID NO: 2364384 - RNA, 19 nt, Artificial Sequence
  Description of Artificial Sequence: Synthetic oligonucleotide
  Sense strand starting at position 403 of SEQ ID NO: 1885740
cccgaaaucgggcaucgau

SEQ ID NO: 2364385 - RNA, 19 nt, Artificial Sequence
  Description of Artificial Sequence: Synthetic oligonucleotide
  Antisense strand to SEQ ID NO: 2364384
aucgaugcccgauuucggg

SEQ ID NO: 2364386 - RNA, 19 nt, Artificial Sequence
  Description of Artificial Sequence: Synthetic oligonucleotide
  Sense strand starting at position 449 of SEQ ID NO: 1885740
cgaagacuucuugggaguu

SEQ ID NO: 2364387 - RNA, 19 nt, Artificial Sequence
  Description of Artificial Sequence: Synthetic oligonucleotide
  Antisense strand to SEQ ID NO: 2364386
aacucccaagaagucuucg

SEQ ID NO: 2364388 - RNA, 19 nt, Artificial Sequence
  Description of Artificial Sequence: Synthetic oligonucleotide
  Sense strand starting at position 1482 of SEQ ID NO: 1885740
cgcucucaucucuagauca

SEQ ID NO: 2364389 - RNA, 19 nt, Artificial Sequence
  Description of Artificial Sequence: Synthetic oligonucleotide
  Antisense strand to SEQ ID NO: 2364388
ugaucuagagaugagagcg

SEQ ID NO: 2364390 - RNA, 19 nt, Artificial Sequence
  Description of Artificial Sequence: Synthetic oligonucleotide
  Sense strand starting at position 1513 of SEQ ID NO: 1885740
ugcaacgaucguuauuaca

SEQ ID NO: 2364391 - RNA, 19 nt, Artificial Sequence
  Description of Artificial Sequence: Synthetic oligonucleotide
  Antisense strand to SEQ ID NO: 2364390
uguaauaacgaucguugca

SEQ ID NO: 2364392 - RNA, 19 nt, Artificial Sequence
  Description of Artificial Sequence: Synthetic oligonucleotide
  Sense strand starting at position 1848 of SEQ ID NO: 1885740
gaggaaggcggcuagaguu

SEQ ID NO: 2364393 - RNA, 19 nt, Artificial Sequence
  Description of Artificial Sequence: Synthetic oligonucleotide
  Antisense strand to SEQ ID NO: 2364392
aacucuagccgccuuccuc

SEQ ID NO: 2364394 - RNA, 19 nt, Artificial Sequence
  Description of Artificial Sequence: Synthetic oligonucleotide
  Sense strand starting at position 1981 of SEQ ID NO: 1885740
ucccgcucucagggagauu

SEQ ID NO: 2364395 - RNA, 19 nt, Artificial Sequence
  Description of Artificial Sequence: Synthetic oligonucleotide
  Antisense strand to SEQ ID NO: 2364394
aaucucccugagagcggga

SEQ ID NO: 2364396 - RNA, 19 nt, Artificial Sequence
  Description of Artificial Sequence: Synthetic oligonucleotide
  Sense strand starting at position 2171 of SEQ ID NO: 1885740
ccgacauuaccagaauguu

SEQ ID NO: 2364397 - RNA, 19 nt, Artificial Sequence
  Description of Artificial Sequence: Synthetic oligonucleotide
  Antisense strand to SEQ ID NO: 2364396
aacauucugguaaugucgg

SEQ ID NO: 2364398 - RNA, 19 nt, Artificial Sequence
  Description of Artificial Sequence: Synthetic oligonucleotide
  Sense strand starting at position 2179 of SEQ ID NO: 1885740
accagaauguucuuuaaag

SEQ ID NO: 2364399 - RNA, 19 nt, Artificial Sequence
  Description of Artificial Sequence: Synthetic oligonucleotide
  Antisense strand to SEQ ID NO: 2364398
cuuuaaagaacauucuggu

SEQ ID NO: 2364400 - RNA, 19 nt, Artificial Sequence
  Description of Artificial Sequence: Synthetic oligonucleotide
  Sense strand starting at position 2180 of SEQ ID NO: 1885740
ccagaauguucuuuaaaga

SEQ ID NO: 2364401 - RNA, 19 nt, Artificial Sequence
  Description of Artificial Sequence: Synthetic oligonucleotide
  Antisense strand to SEQ ID NO: 2364400
ucuuuaaagaacauucugg

SEQ ID NO: 2364402 - RNA, 19 nt, Artificial Sequence
  Description of Artificial Sequence: Synthetic oligonucleotide
  Sense strand starting at position 2221 of SEQ ID NO: 1885740
acauuaugggccggagcau

SEQ ID NO: 2364403 - RNA, 19 nt, Artificial Sequence
  Description of Artificial Sequence: Synthetic oligonucleotide
  Antisense strand to SEQ ID NO: 2364402
augcuccggcccauaaugu

SEQ ID NO: 2364404 - RNA, 19 nt, Artificial Sequence
  Description of Artificial Sequence: Synthetic oligonucleotide
  Sense strand starting at position 2422 of SEQ ID NO: 1885740
uaaguaaaugcuggagaau

SEQ ID NO: 2364405 - RNA, 19 nt, Artificial Sequence
  Description of Artificial Sequence: Synthetic oligonucleotide
  Antisense strand to SEQ ID NO: 2364404
auucuccagcauuuacuua

SEQ ID NO: 2364406 - RNA, 19 nt, Artificial Sequence
  Description of Artificial Sequence: Synthetic oligonucleotide
  Sense strand starting at position 2448 of SEQ ID NO: 1885740
uagggagugacuggguuau

SEQ ID NO: 2364407 - RNA, 19 nt, Artificial Sequence
  Description of Artificial Sequence: Synthetic oligonucleotide
  Antisense strand to SEQ ID NO: 2364406
auaacccagucacucccua

SEQ ID NO: 2364408 - RNA, 19 nt, Artificial Sequence
  Description of Artificial Sequence: Synthetic oligonucleotide
  Sense strand starting at position 2450 of SEQ ID NO: 1885740
gggagugacuggguuauca

SEQ ID NO: 2364409 - RNA, 19 nt, Artificial Sequence
  Description of Artificial Sequence: Synthetic oligonucleotide
  Antisense strand to SEQ ID NO: 2364408
ugauaacccagucacuccc

SEQ ID NO: 2364410 - RNA, 19 nt, Artificial Sequence
  Description of Artificial Sequence: Synthetic oligonucleotide
  Sense strand starting at position 2452 of SEQ ID NO: 1885740
gagugacuggguuaucaca

SEQ ID NO: 2364411 - RNA, 19 nt, Artificial Sequence
  Description of Artificial Sequence: Synthetic oligonucleotide
  Antisense strand to SEQ ID NO: 2364410
ugugauaacccagucacuc

SEQ ID NO: 2364412 - RNA, 19 nt, Artificial Sequence
  Description of Artificial Sequence: Synthetic oligonucleotide
  Sense strand starting at position 2454 of SEQ ID NO: 1885740
gugacuggguuaucacauu

SEQ ID NO: 2364413 - RNA, 19 nt, Artificial Sequence
  Description of Artificial Sequence: Synthetic oligonucleotide
  Antisense strand to SEQ ID NO: 2364412
aaugugauaacccagucac

SEQ ID NO: 2364414 - RNA, 19 nt, Artificial Sequence
  Description of Artificial Sequence: Synthetic oligonucleotide
  Sense strand starting at position 2481 of SEQ ID NO: 1885740
gcaauaaguguguggauga

SEQ ID NO: 2364415 - RNA, 19 nt, Artificial Sequence
  Description of Artificial Sequence: Synthetic oligonucleotide
  Antisense strand to SEQ ID NO: 2364414
ucauccacacacuuauugc

SEQ ID NO: 2364416 - RNA, 19 nt, Artificial Sequence
  Description of Artificial Sequence: Synthetic oligonucleotide
  Sense strand starting at position 2891 of SEQ ID NO: 1885740
gagugugaggucgacaaga

SEQ ID NO: 2364417 - RNA, 19 nt, Artificial Sequence
  Description of Artificial Sequence: Synthetic oligonucleotide
  Antisense strand to SEQ ID NO: 2364416
ucuugucgaccucacacuc

SEQ ID NO: 2364418 - RNA, 19 nt, Artificial Sequence
  Description of Artificial Sequence: Synthetic oligonucleotide
  Sense strand starting at position 2893 of SEQ ID NO: 1885740
gugugaggucgacaagaua

SEQ ID NO: 2364419 - RNA, 19 nt, Artificial Sequence
  Description of Artificial Sequence: Synthetic oligonucleotide
  Antisense strand to SEQ ID NO: 2364418
uaucuugucgaccucacac

SEQ ID NO: 2364420 - RNA, 19 nt, Artificial Sequence
  Description of Artificial Sequence: Synthetic oligonucleotide
  Sense strand starting at position 2945 of SEQ ID NO: 1885740
uggaaacaguuucuguguu

SEQ ID NO: 2364421 - RNA, 19 nt, Artificial Sequence
  Description of Artificial Sequence: Synthetic oligonucleotide
  Antisense strand to SEQ ID NO: 2364420
aacacagaaacuguuucca

SEQ ID NO: 2364422 - RNA, 19 nt, Artificial Sequence
  Description of Artificial Sequence: Synthetic oligonucleotide
  Sense strand starting at position 2947 of SEQ ID NO: 1885740
gaaacaguuucuguguuag

SEQ ID NO: 2364423 - RNA, 19 nt, Artificial Sequence
  Description of Artificial Sequence: Synthetic oligonucleotide
  Antisense strand to SEQ ID NO: 2364422
cuaacacagaaacuguuuc

SEQ ID NO: 2364424 - RNA, 19 nt, Artificial Sequence
  Description of Artificial Sequence: Synthetic oligonucleotide
  Sense strand starting at position 2949 of SEQ ID NO: 1885740
aacaguuucuguguuagaa

SEQ ID NO: 2364425 - RNA, 19 nt, Artificial Sequence
  Description of Artificial Sequence: Synthetic oligonucleotide
  Antisense strand to SEQ ID NO: 2364424
uucuaacacagaaacuguu

SEQ ID NO: 2364426 - RNA, 19 nt, Artificial Sequence
  Description of Artificial Sequence: Synthetic oligonucleotide
  Sense strand starting at position 3152 of SEQ ID NO: 1885740
ggauccgagucccuagaaa

SEQ ID NO: 2364427 - RNA, 19 nt, Artificial Sequence
  Description of Artificial Sequence: Synthetic oligonucleotide
  Antisense strand to SEQ ID NO: 2364426
uuucuagggacucggaucc

SEQ ID NO: 2364428 - RNA, 19 nt, Artificial Sequence
  Description of Artificial Sequence: Synthetic oligonucleotide
  Sense strand starting at position 3419 of SEQ ID NO: 1885740
uguuaaugaaguugguaau

SEQ ID NO: 2364429 - RNA, 19 nt, Artificial Sequence
  Description of Artificial Sequence: Synthetic oligonucleotide
  Antisense strand to SEQ ID NO: 2364428
auuaccaacuucauuaaca

SEQ ID NO: 2364430 - RNA, 19 nt, Artificial Sequence
  Description of Artificial Sequence: Synthetic oligonucleotide
  Sense strand starting at position 3420 of SEQ ID NO: 1885740
guuaaugaaguugguaauu

SEQ ID NO: 2364431 - RNA, 19 nt, Artificial Sequence
  Description of Artificial Sequence: Synthetic oligonucleotide
  Antisense strand to SEQ ID NO: 2364430
aauuaccaacuucauuaac

SEQ ID NO: 2364432 - RNA, 19 nt, Artificial Sequence
  Description of Artificial Sequence: Synthetic oligonucleotide
  Sense strand starting at position 3435 of SEQ ID NO: 1885740
aauuaauucgucgcuuugu

SEQ ID NO: 2364433 - RNA, 19 nt, Artificial Sequence
  Description of Artificial Sequence: Synthetic oligonucleotide
  Antisense strand to SEQ ID NO: 2364432
acaaagcgacgaauuaauu

SEQ ID NO: 2364434 - RNA, 19 nt, Artificial Sequence
  Description of Artificial Sequence: Synthetic oligonucleotide
  Sense strand starting at position 3448 of SEQ ID NO: 1885740
cuuuguugucgguucuuau

SEQ ID NO: 2364435 - RNA, 19 nt, Artificial Sequence
  Description of Artificial Sequence: Synthetic oligonucleotide
  Antisense strand to SEQ ID NO: 2364434
auaagaaccgacaacaaag

SEQ ID NO: 2364436 - RNA, 19 nt, Artificial Sequence
  Description of Artificial Sequence: Synthetic oligonucleotide
  Sense strand starting at position 3468 of SEQ ID NO: 1885740
cuguauguguacucaaaug

SEQ ID NO: 2364437 - RNA, 19 nt, Artificial Sequence
  Description of Artificial Sequence: Synthetic oligonucleotide
  Antisense strand to SEQ ID NO: 2364436
cauuugaguacacauacag

SEQ ID NO: 2364438 - RNA, 19 nt, Artificial Sequence
  Description of Artificial Sequence: Synthetic oligonucleotide
  Sense strand starting at position 3937 of SEQ ID NO: 1885740
gugcgcuuggucagaguca

SEQ ID NO: 2364439 - RNA, 19 nt, Artificial Sequence
  Description of Artificial Sequence: Synthetic oligonucleotide
  Antisense strand to SEQ ID NO: 2364438
ugacucugaccaagcgcac

SEQ ID NO: 2364440 - RNA, 19 nt, Artificial Sequence
  Description of Artificial Sequence: Synthetic oligonucleotide
  Sense strand starting at position 3939 of SEQ ID NO: 1885740
gcgcuuggucagagucaug

SEQ ID NO: 2364441 - RNA, 19 nt, Artificial Sequence
  Description of Artificial Sequence: Synthetic oligonucleotide
  Antisense strand to SEQ ID NO: 2364440
caugacucugaccaagcgc

SEQ ID NO: 2364442 - RNA, 19 nt, Artificial Sequence
  Description of Artificial Sequence: Synthetic oligonucleotide
  Sense strand starting at position 3956 of SEQ ID NO: 1885740
ugaugcuuucgaugaagga

SEQ ID NO: 2364443 - RNA, 19 nt, Artificial Sequence
  Description of Artificial Sequence: Synthetic oligonucleotide
  Antisense strand to SEQ ID NO: 2364442
uccuucaucgaaagcauca

SEQ ID NO: 2364444 - RNA, 19 nt, Artificial Sequence
  Description of Artificial Sequence: Synthetic oligonucleotide
  Sense strand starting at position 118 of SEQ ID NO: 1885739
aguuaugaccuugagcaag

SEQ ID NO: 2364445 - RNA, 19 nt, Artificial Sequence
  Description of Artificial Sequence: Synthetic oligonucleotide
  Antisense strand to SEQ ID NO: 2364444
cuugcucaaggucauaacu

SEQ ID NO: 2364446 - RNA, 19 nt, Artificial Sequence
  Description of Artificial Sequence: Synthetic oligonucleotide
  Sense strand starting at position 171 of SEQ ID NO: 1885739
uggacuguccaagagcuaa

SEQ ID NO: 2364447 - RNA, 19 nt, Artificial Sequence
  Description of Artificial Sequence: Synthetic oligonucleotide
  Antisense strand to SEQ ID NO: 2364446
uuagcucuuggacagucca

SEQ ID NO: 2364448 - RNA, 19 nt, Artificial Sequence
  Description of Artificial Sequence: Synthetic oligonucleotide
  Sense strand starting at position 202 of SEQ ID NO: 1885739
cguacaaguccaugagaau

SEQ ID NO: 2364449 - RNA, 19 nt, Artificial Sequence
  Description of Artificial Sequence: Synthetic oligonucleotide
  Antisense strand to SEQ ID NO: 2364448
auucucauggacuuguacg

SEQ ID NO: 2364450 - RNA, 19 nt, Artificial Sequence
  Description of Artificial Sequence: Synthetic oligonucleotide
  Sense strand starting at position 262 of SEQ ID NO: 1885739
ccacgugacuacucuugaa

SEQ ID NO: 2364451 - RNA, 19 nt, Artificial Sequence
  Description of Artificial Sequence: Synthetic oligonucleotide
  Antisense strand to SEQ ID NO: 2364450
uucaagaguagucacgugg

SEQ ID NO: 2364452 - RNA, 19 nt, Artificial Sequence
  Description of Artificial Sequence: Synthetic oligonucleotide
  Sense strand starting at position 266 of SEQ ID NO: 1885739
gugacuacucuugaaaccu

SEQ ID NO: 2364453 - RNA, 19 nt, Artificial Sequence
  Description of Artificial Sequence: Synthetic oligonucleotide
  Antisense strand to SEQ ID NO: 2364452
agguuucaagaguagucac

SEQ ID NO: 2364454 - RNA, 19 nt, Artificial Sequence
  Description of Artificial Sequence: Synthetic oligonucleotide
  Sense strand starting at position 275 of SEQ ID NO: 1885739
cuugaaaccugcucaagga

SEQ ID NO: 2364455 - RNA, 19 nt, Artificial Sequence
  Description of Artificial Sequence: Synthetic oligonucleotide
  Antisense strand to SEQ ID NO: 2364454
uccuugagcagguuucaag

SEQ ID NO: 2364456 - RNA, 19 nt, Artificial Sequence
  Description of Artificial Sequence: Synthetic oligonucleotide
  Sense strand starting at position 572 of SEQ ID NO: 1885739
gcaugaagaugucugggua

SEQ ID NO: 2364457 - RNA, 19 nt, Artificial Sequence
  Description of Artificial Sequence: Synthetic oligonucleotide
  Antisense strand to SEQ ID NO: 2364456
uacccagacaucuucaugc

SEQ ID NO: 2364458 - RNA, 19 nt, Artificial Sequence
  Description of Artificial Sequence: Synthetic oligonucleotide
  Sense strand starting at position 900 of SEQ ID NO: 1885739
uugagauugcuccaaucag

SEQ ID NO: 2364459 - RNA, 19 nt, Artificial Sequence
  Description of Artificial Sequence: Synthetic oligonucleotide
  Antisense strand to SEQ ID NO: 2364458
cugauuggagcaaucucaa

SEQ ID NO: 2364460 - RNA, 19 nt, Artificial Sequence
  Description of Artificial Sequence: Synthetic oligonucleotide
  Sense strand starting at position 917 of SEQ ID NO: 1885739
agagcaucacuuggaaagu

SEQ ID NO: 2364461 - RNA, 19 nt, Artificial Sequence
  Description of Artificial Sequence: Synthetic oligonucleotide
  Antisense strand to SEQ ID NO: 2364460
acuuuccaagugaugcucu

SEQ ID NO: 2364462 - RNA, 19 nt, Artificial Sequence
  Description of Artificial Sequence: Synthetic oligonucleotide
  Sense strand starting at position 1009 of SEQ ID NO: 1885739
aggcuauuccaagaaguca

SEQ ID NO: 2364463 - RNA, 19 nt, Artificial Sequence
  Description of Artificial Sequence: Synthetic oligonucleotide
  Antisense strand to SEQ ID NO: 2364462
ugacuucuuggaauagccu

SEQ ID NO: 2364464 - RNA, 19 nt, Artificial Sequence
  Description of Artificial Sequence: Synthetic oligonucleotide
  Sense strand starting at position 1216 of SEQ ID NO: 1885739
gccucuugggauuaaagca

SEQ ID NO: 2364465 - RNA, 19 nt, Artificial Sequence
  Description of Artificial Sequence: Synthetic oligonucleotide
  Antisense strand to SEQ ID NO: 2364464
ugcuuuaaucccaagaggc

SEQ ID NO: 2364466 - RNA, 19 nt, Artificial Sequence
  Description of Artificial Sequence: Synthetic oligonucleotide
  Sense strand starting at position 1341 of SEQ ID NO: 1885739
uucugaggaauuggucauu

SEQ ID NO: 2364467 - RNA, 19 nt, Artificial Sequence
  Description of Artificial Sequence: Synthetic oligonucleotide
  Antisense strand to SEQ ID NO: 2364466
aaugaccaauuccucagaa

SEQ ID NO: 2364468 - RNA, 19 nt, Artificial Sequence
  Description of Artificial Sequence: Synthetic oligonucleotide
  Sense strand starting at position 1352 of SEQ ID NO: 1885739
uggucauugagauaugggu

SEQ ID NO: 2364469 - RNA, 19 nt, Artificial Sequence
  Description of Artificial Sequence: Synthetic oligonucleotide
  Antisense strand to SEQ ID NO: 2364468
acccauaucucaaugacca

SEQ ID NO: 2364470 - RNA, 19 nt, Artificial Sequence
  Description of Artificial Sequence: Synthetic oligonucleotide
  Sense strand starting at position 1354 of SEQ ID NO: 1885739
gucauugagauauggguag

SEQ ID NO: 2364471 - RNA, 19 nt, Artificial Sequence
  Description of Artificial Sequence: Synthetic oligonucleotide
  Antisense strand to SEQ ID NO: 2364470
cuacccauaucucaaugac

SEQ ID NO: 2364472 - RNA, 19 nt, Artificial Sequence
  Description of Artificial Sequence: Synthetic oligonucleotide
  Sense strand starting at position 1523 of SEQ ID NO: 1885739
caguaaaugcccugggacu

SEQ ID NO: 2364473 - RNA, 19 nt, Artificial Sequence
  Description of Artificial Sequence: Synthetic oligonucleotide
  Antisense strand to SEQ ID NO: 2364472
agucccagggcauuuacug

SEQ ID NO: 2364474 - RNA, 19 nt, Artificial Sequence
  Description of Artificial Sequence: Synthetic oligonucleotide
  Sense strand starting at position 1535 of SEQ ID NO: 1885739
ugggacugcuuccucagaa

SEQ ID NO: 2364475 - RNA, 19 nt, Artificial Sequence
  Description of Artificial Sequence: Synthetic oligonucleotide
  Antisense strand to SEQ ID NO: 2364474
uucugaggaagcaguccca

SEQ ID NO: 2364476 - RNA, 19 nt, Artificial Sequence
  Description of Artificial Sequence: Synthetic oligonucleotide
  Sense strand starting at position 1536 of SEQ ID NO: 1885739
gggacugcuuccucagaag

SEQ ID NO: 2364477 - RNA, 19 nt, Artificial Sequence
  Description of Artificial Sequence: Synthetic oligonucleotide
  Antisense strand to SEQ ID NO: 2364476
cuucugaggaagcaguccc

SEQ ID NO: 2364478 - RNA, 19 nt, Artificial Sequence
  Description of Artificial Sequence: Synthetic oligonucleotide
  Sense strand starting at position 2327 of SEQ ID NO: 1885739
agaacucuuuggcuaaaua

SEQ ID NO: 2364479 - RNA, 19 nt, Artificial Sequence
  Description of Artificial Sequence: Synthetic oligonucleotide
  Antisense strand to SEQ ID NO: 2364478
uauuuagccaaagaguucu

SEQ ID NO: 2364480 - RNA, 19 nt, Artificial Sequence
  Description of Artificial Sequence: Synthetic oligonucleotide
  Sense strand starting at position 2599 of SEQ ID NO: 1885739
uaauuaguagucuggguaa

SEQ ID NO: 2364481 - RNA, 19 nt, Artificial Sequence
  Description of Artificial Sequence: Synthetic oligonucleotide
  Antisense strand to SEQ ID NO: 2364480
uuacccagacuacuaauua

SEQ ID NO: 2364482 - RNA, 19 nt, Artificial Sequence
  Description of Artificial Sequence: Synthetic oligonucleotide
  Sense strand starting at position 2602 of SEQ ID NO: 1885739
uuaguagucuggguaauua

SEQ ID NO: 2364483 - RNA, 19 nt, Artificial Sequence
  Description of Artificial Sequence: Synthetic oligonucleotide
  Antisense strand to SEQ ID NO: 2364482
uaauuacccagacuacuaa

SEQ ID NO: 2364484 - RNA, 19 nt, Artificial Sequence
  Description of Artificial Sequence: Synthetic oligonucleotide
  Sense strand starting at position 2606 of SEQ ID NO: 1885739
uagucuggguaauuagauu

SEQ ID NO: 2364485 - RNA, 19 nt, Artificial Sequence
  Description of Artificial Sequence: Synthetic oligonucleotide
  Antisense strand to SEQ ID NO: 2364484
aaucuaauuacccagacua

SEQ ID NO: 2364486 - RNA, 19 nt, Artificial Sequence
  Description of Artificial Sequence: Synthetic oligonucleotide
  Sense strand starting at position 2615 of SEQ ID NO: 1885739
uaauuagauuucgagguaa

SEQ ID NO: 2364487 - RNA, 19 nt, Artificial Sequence
  Description of Artificial Sequence: Synthetic oligonucleotide
  Antisense strand to SEQ ID NO: 2364486
uuaccucgaaaucuaauua

SEQ ID NO: 2364488 - RNA, 19 nt, Artificial Sequence
  Description of Artificial Sequence: Synthetic oligonucleotide
  Sense strand starting at position 2623 of SEQ ID NO: 1885739
uuucgagguaaguaacaga

SEQ ID NO: 2364489 - RNA, 19 nt, Artificial Sequence
  Description of Artificial Sequence: Synthetic oligonucleotide
  Antisense strand to SEQ ID NO: 2364488
ucuguuacuuaccucgaaa

SEQ ID NO: 2364490 - RNA, 19 nt, Artificial Sequence
  Description of Artificial Sequence: Synthetic oligonucleotide
  Sense strand starting at position 2664 of SEQ ID NO: 1885739
uugauuauaugugucuaag

SEQ ID NO: 2364491 - RNA, 19 nt, Artificial Sequence
  Description of Artificial Sequence: Synthetic oligonucleotide
  Antisense strand to SEQ ID NO: 2364490
cuuagacacauauaaucaa

SEQ ID NO: 2364492 - RNA, 19 nt, Artificial Sequence
  Description of Artificial Sequence: Synthetic oligonucleotide
  Sense strand starting at position 2666 of SEQ ID NO: 1885739
gauuauaugugucuaagga

SEQ ID NO: 2364493 - RNA, 19 nt, Artificial Sequence
  Description of Artificial Sequence: Synthetic oligonucleotide
  Antisense strand to SEQ ID NO: 2364492
uccuuagacacauauaauc

SEQ ID NO: 2364494 - RNA, 19 nt, Artificial Sequence
  Description of Artificial Sequence: Synthetic oligonucleotide
  Sense strand starting at position 2772 of SEQ ID NO: 1885739
cagggcuugccagaaauug

SEQ ID NO: 2364495 - RNA, 19 nt, Artificial Sequence
  Description of Artificial Sequence: Synthetic oligonucleotide
  Antisense strand to SEQ ID NO: 2364494
caauuucuggcaagcccug

SEQ ID NO: 2364496 - RNA, 19 nt, Artificial Sequence
  Description of Artificial Sequence: Synthetic oligonucleotide
  Sense strand starting at position 3171 of SEQ ID NO: 1885739
guuaauauagacuggcagu

SEQ ID NO: 2364497 - RNA, 19 nt, Artificial Sequence
  Description of Artificial Sequence: Synthetic oligonucleotide
  Antisense strand to SEQ ID NO: 2364496
acugccagucuauauuaac

SEQ ID NO: 2364498 - RNA, 19 nt, Artificial Sequence
  Description of Artificial Sequence: Synthetic oligonucleotide
  Sense strand starting at position 3222 of SEQ ID NO: 1885739
ggcacuuauaugcaaggau

SEQ ID NO: 2364499 - RNA, 19 nt, Artificial Sequence
  Description of Artificial Sequence: Synthetic oligonucleotide
  Antisense strand to SEQ ID NO: 2364498
auccuugcauauaagugcc

SEQ ID NO: 2364500 - RNA, 19 nt, Artificial Sequence
  Description of Artificial Sequence: Synthetic oligonucleotide
  Sense strand starting at position 3231 of SEQ ID NO: 1885739
augcaaggaucucuacuuu

SEQ ID NO: 2364501 - RNA, 19 nt, Artificial Sequence
  Description of Artificial Sequence: Synthetic oligonucleotide
  Antisense strand to SEQ ID NO: 2364500
aaaguagagauccuugcau

SEQ ID NO: 2364502 - RNA, 19 nt, Artificial Sequence
  Description of Artificial Sequence: Synthetic oligonucleotide
  Sense strand starting at position 3237 of SEQ ID NO: 1885739
ggaucucuacuuugaaacu

SEQ ID NO: 2364503 - RNA, 19 nt, Artificial Sequence
  Description of Artificial Sequence: Synthetic oligonucleotide
  Antisense strand to SEQ ID NO: 2364502
aguuucaaaguagagaucc

SEQ ID NO: 2364504 - RNA, 19 nt, Artificial Sequence
  Description of Artificial Sequence: Synthetic oligonucleotide
  Sense strand starting at position 3300 of SEQ ID NO: 1885739
aggucucacugacuuuaaa

SEQ ID NO: 2364505 - RNA, 19 nt, Artificial Sequence
  Description of Artificial Sequence: Synthetic oligonucleotide
  Antisense strand to SEQ ID NO: 2364504
uuuaaagucagugagaccu

SEQ ID NO: 2364506 - RNA, 19 nt, Artificial Sequence
  Description of Artificial Sequence: Synthetic oligonucleotide
  Sense strand starting at position 3332 of SEQ ID NO: 1885739
ucauauuuacguugcuuaa

SEQ ID NO: 2364507 - RNA, 19 nt, Artificial Sequence
  Description of Artificial Sequence: Synthetic oligonucleotide
  Antisense strand to SEQ ID NO: 2364506
uuaagcaacguaaauauga

SEQ ID NO: 2364508 - RNA, 19 nt, Artificial Sequence
  Description of Artificial Sequence: Synthetic oligonucleotide
  Sense strand starting at position 3491 of SEQ ID NO: 1885739
uuguauuauccucaguaca

SEQ ID NO: 2364509 - RNA, 19 nt, Artificial Sequence
  Description of Artificial Sequence: Synthetic oligonucleotide
  Antisense strand to SEQ ID NO: 2364508
uguacugaggauaauacaa

SEQ ID NO: 2364510 - RNA, 19 nt, Artificial Sequence
  Description of Artificial Sequence: Synthetic oligonucleotide
  Sense strand starting at position 3493 of SEQ ID NO: 1885739
guauuauccucaguacaac

SEQ ID NO: 2364511 - RNA, 19 nt, Artificial Sequence
  Description of Artificial Sequence: Synthetic oligonucleotide
  Antisense strand to SEQ ID NO: 2364510
guuguacugaggauaauac

SEQ ID NO: 2364512 - RNA, 19 nt, Artificial Sequence
  Description of Artificial Sequence: Synthetic oligonucleotide
  Sense strand starting at position 3614 of SEQ ID NO: 1885739
cuuagaggcuguuuaaaca

SEQ ID NO: 2364513 - RNA, 19 nt, Artificial Sequence
  Description of Artificial Sequence: Synthetic oligonucleotide
  Antisense strand to SEQ ID NO: 2364512
uguuuaaacagccucuaag

SEQ ID NO: 2364514 - RNA, 19 nt, Artificial Sequence
  Description of Artificial Sequence: Synthetic oligonucleotide
  Sense strand starting at position 3630 of SEQ ID NO: 1885739
acacauaugcgacagcuuu

SEQ ID NO: 2364515 - RNA, 19 nt, Artificial Sequence
  Description of Artificial Sequence: Synthetic oligonucleotide
  Antisense strand to SEQ ID NO: 2364514
aaagcugucgcauaugugu

SEQ ID NO: 2364516 - RNA, 19 nt, Artificial Sequence
  Description of Artificial Sequence: Synthetic oligonucleotide
  Sense strand starting at position 3659 of SEQ ID NO: 1885739
uguauauguguuuaaacag

SEQ ID NO: 2364517 - RNA, 19 nt, Artificial Sequence
  Description of Artificial Sequence: Synthetic oligonucleotide
  Antisense strand to SEQ ID NO: 2364516
cuguuuaaacacauauaca

SEQ ID NO: 2364518 - RNA, 19 nt, Artificial Sequence
  Description of Artificial Sequence: Synthetic oligonucleotide
  Sense strand starting at position 3731 of SEQ ID NO: 1885739
ucugaacuacagugcuaua

SEQ ID NO: 2364519 - RNA, 19 nt, Artificial Sequence
  Description of Artificial Sequence: Synthetic oligonucleotide
  Antisense strand to SEQ ID NO: 2364518
uauagcacuguaguucaga

SEQ ID NO: 2364520 - RNA, 19 nt, Artificial Sequence
  Description of Artificial Sequence: Synthetic oligonucleotide
  Sense strand starting at position 3789 of SEQ ID NO: 1885739
auggaaauguucuuacaug

SEQ ID NO: 2364521 - RNA, 19 nt, Artificial Sequence
  Description of Artificial Sequence: Synthetic oligonucleotide
  Antisense strand to SEQ ID NO: 2364520
cauguaagaacauuuccau

SEQ ID NO: 2364522 - RNA, 19 nt, Artificial Sequence
  Description of Artificial Sequence: Synthetic oligonucleotide
  Sense strand starting at position 3823 of SEQ ID NO: 1885739
auuagaaaugccugacaca

SEQ ID NO: 2364523 - RNA, 19 nt, Artificial Sequence
  Description of Artificial Sequence: Synthetic oligonucleotide
  Antisense strand to SEQ ID NO: 2364522
ugugucaggcauuucuaau

SEQ ID NO: 2364524 - RNA, 19 nt, Artificial Sequence
  Description of Artificial Sequence: Synthetic oligonucleotide
  Sense strand starting at position 29 of SEQ ID NO: 1885741
aagucugucgugcccauau

SEQ ID NO: 2364525 - RNA, 19 nt, Artificial Sequence
  Description of Artificial Sequence: Synthetic oligonucleotide
  Antisense strand to SEQ ID NO: 2364524
auaugggcacgacagacuu

SEQ ID NO: 2364526 - RNA, 19 nt, Artificial Sequence
  Description of Artificial Sequence: Synthetic oligonucleotide
  Sense strand starting at position 230 of SEQ ID NO: 1885741
gauauuggacuguaauggu

SEQ ID NO: 2364527 - RNA, 19 nt, Artificial Sequence
  Description of Artificial Sequence: Synthetic oligonucleotide
  Antisense strand to SEQ ID NO: 2364526
accauuacaguccaauauc

SEQ ID NO: 2364528 - RNA, 19 nt, Artificial Sequence
  Description of Artificial Sequence: Synthetic oligonucleotide
  Sense strand starting at position 786 of SEQ ID NO: 1885741
gugaucuguugccuuauuu

SEQ ID NO: 2364529 - RNA, 19 nt, Artificial Sequence
  Description of Artificial Sequence: Synthetic oligonucleotide
  Antisense strand to SEQ ID NO: 2364528
aaauaaggcaacagaucac

SEQ ID NO: 2364530 - RNA, 19 nt, Artificial Sequence
  Description of Artificial Sequence: Synthetic oligonucleotide
  Sense strand starting at position 832 of SEQ ID NO: 1885741
agucuuaaauccuuguuaa

SEQ ID NO: 2364531 - RNA, 19 nt, Artificial Sequence
  Description of Artificial Sequence: Synthetic oligonucleotide
  Antisense strand to SEQ ID NO: 2364530
uuaacaaggauuuaagacu

SEQ ID NO: 2364532 - RNA, 19 nt, Artificial Sequence
  Description of Artificial Sequence: Synthetic oligonucleotide
  Sense strand starting at position 833 of SEQ ID NO: 1885741
gucuuaaauccuuguuaaa

SEQ ID NO: 2364533 - RNA, 19 nt, Artificial Sequence
  Description of Artificial Sequence: Synthetic oligonucleotide
  Antisense strand to SEQ ID NO: 2364532
uuuaacaaggauuuaagac

SEQ ID NO: 2364534 - RNA, 19 nt, Artificial Sequence
  Description of Artificial Sequence: Synthetic oligonucleotide
  Sense strand starting at position 859 of SEQ ID NO: 1885741
agguuaaucuccucaaagu

SEQ ID NO: 2364535 - RNA, 19 nt, Artificial Sequence
  Description of Artificial Sequence: Synthetic oligonucleotide
  Antisense strand to SEQ ID NO: 2364534
acuuugaggagauuaaccu

SEQ ID NO: 2364536 - RNA, 19 nt, Artificial Sequence
  Description of Artificial Sequence: Synthetic oligonucleotide
  Sense strand starting at position 860 of SEQ ID NO: 1885741
gguuaaucuccucaaaguu

SEQ ID NO: 2364537 - RNA, 19 nt, Artificial Sequence
  Description of Artificial Sequence: Synthetic oligonucleotide
  Antisense strand to SEQ ID NO: 2364536
aacuuugaggagauuaacc

SEQ ID NO: 2364538 - RNA, 19 nt, Artificial Sequence
  Description of Artificial Sequence: Synthetic oligonucleotide
  Sense strand starting at position 917 of SEQ ID NO: 1885741
acuucuuucuagguauuau

SEQ ID NO: 2364539 - RNA, 19 nt, Artificial Sequence
  Description of Artificial Sequence: Synthetic oligonucleotide
  Antisense strand to SEQ ID NO: 2364538
auaauaccuagaaagaagu

SEQ ID NO: 2364540 - RNA, 19 nt, Artificial Sequence
  Description of Artificial Sequence: Synthetic oligonucleotide
  Sense strand starting at position 929 of SEQ ID NO: 1885741
guauuauggugcuucuaag

SEQ ID NO: 2364541 - RNA, 19 nt, Artificial Sequence
  Description of Artificial Sequence: Synthetic oligonucleotide
  Antisense strand to SEQ ID NO: 2364540
cuuagaagcaccauaauac

SEQ ID NO: 2364542 - RNA, 19 nt, Artificial Sequence
  Description of Artificial Sequence: Synthetic oligonucleotide
  Sense strand starting at position 962 of SEQ ID NO: 1885741
cucacuguccagugaauug

SEQ ID NO: 2364543 - RNA, 19 nt, Artificial Sequence
  Description of Artificial Sequence: Synthetic oligonucleotide
  Antisense strand to SEQ ID NO: 2364542
caauucacuggacagugag

SEQ ID NO: 2364544 - RNA, 19 nt, Artificial Sequence
  Description of Artificial Sequence: Synthetic oligonucleotide
  Sense strand starting at position 967 of SEQ ID NO: 1885741
uguccagugaauugcugaa

SEQ ID NO: 2364545 - RNA, 19 nt, Artificial Sequence
  Description of Artificial Sequence: Synthetic oligonucleotide
  Antisense strand to SEQ ID NO: 2364544
uucagcaauucacuggaca

SEQ ID NO: 2364546 - RNA, 19 nt, Artificial Sequence
  Description of Artificial Sequence: Synthetic oligonucleotide
  Sense strand starting at position 1056 of SEQ ID NO: 1885741
aaggcuauguucucacgga

SEQ ID NO: 2364547 - RNA, 19 nt, Artificial Sequence
  Description of Artificial Sequence: Synthetic oligonucleotide
  Antisense strand to SEQ ID NO: 2364546
uccgugagaacauagccuu

SEQ ID NO: 2364548 - RNA, 19 nt, Artificial Sequence
  Description of Artificial Sequence: Synthetic oligonucleotide
  Sense strand starting at position 1060 of SEQ ID NO: 1885741
cuauguucucacggaauau

SEQ ID NO: 2364549 - RNA, 19 nt, Artificial Sequence
  Description of Artificial Sequence: Synthetic oligonucleotide
  Antisense strand to SEQ ID NO: 2364548
auauuccgugagaacauag

SEQ ID NO: 2364550 - RNA, 19 nt, Artificial Sequence
  Description of Artificial Sequence: Synthetic oligonucleotide
  Sense strand starting at position 1096 of SEQ ID NO: 1885741
uuuaauuagccuggaagaa

SEQ ID NO: 2364551 - RNA, 19 nt, Artificial Sequence
  Description of Artificial Sequence: Synthetic oligonucleotide
  Antisense strand to SEQ ID NO: 2364550
uucuuccaggcuaauuaaa

SEQ ID NO: 2364552 - RNA, 19 nt, Artificial Sequence
  Description of Artificial Sequence: Synthetic oligonucleotide
  Sense strand starting at position 1108 of SEQ ID NO: 1885741
ggaagaaucccgggauguc

SEQ ID NO: 2364553 - RNA, 19 nt, Artificial Sequence
  Description of Artificial Sequence: Synthetic oligonucleotide
  Antisense strand to SEQ ID NO: 2364552
gacaucccgggauucuucc

SEQ ID NO: 2364554 - RNA, 19 nt, Artificial Sequence
  Description of Artificial Sequence: Synthetic oligonucleotide
  Sense strand starting at position 1109 of SEQ ID NO: 1885741
gaagaaucccgggaugucu

SEQ ID NO: 2364555 - RNA, 19 nt, Artificial Sequence
  Description of Artificial Sequence: Synthetic oligonucleotide
  Antisense strand to SEQ ID NO: 2364554
agacaucccgggauucuuc

SEQ ID NO: 2364556 - RNA, 19 nt, Artificial Sequence
  Description of Artificial Sequence: Synthetic oligonucleotide
  Sense strand starting at position 1165 of SEQ ID NO: 1885741
uuaauaaacuuggaggaaa

SEQ ID NO: 2364557 - RNA, 19 nt, Artificial Sequence
  Description of Artificial Sequence: Synthetic oligonucleotide
  Antisense strand to SEQ ID NO: 2364556
uuuccuccaaguuuauuaa

SEQ ID NO: 2364558 - RNA, 19 nt, Artificial Sequence
  Description of Artificial Sequence: Synthetic oligonucleotide
  Sense strand starting at position 1177 of SEQ ID NO: 1885741
gaggaaaguuuggaauauu

SEQ ID NO: 2364559 - RNA, 19 nt, Artificial Sequence
  Description of Artificial Sequence: Synthetic oligonucleotide
  Antisense strand to SEQ ID NO: 2364558
aauauuccaaacuuuccuc

SEQ ID NO: 2364560 - RNA, 19 nt, Artificial Sequence
  Description of Artificial Sequence: Synthetic oligonucleotide
  Sense strand starting at position 1209 of SEQ ID NO: 1885741
gcuugugcgguggagaaau

SEQ ID NO: 2364561 - RNA, 19 nt, Artificial Sequence
  Description of Artificial Sequence: Synthetic oligonucleotide
  Antisense strand to SEQ ID NO: 2364560
auuucuccaccgcacaagc

SEQ ID NO: 2364562 - RNA, 19 nt, Artificial Sequence
  Description of Artificial Sequence: Synthetic oligonucleotide
  Sense strand starting at position 1219 of SEQ ID NO: 1885741
uggagaaauugagccuagu

SEQ ID NO: 2364563 - RNA, 19 nt, Artificial Sequence
  Description of Artificial Sequence: Synthetic oligonucleotide
  Antisense strand to SEQ ID NO: 2364562
acuaggcucaauuucucca

SEQ ID NO: 2364564 - RNA, 19 nt, Artificial Sequence
  Description of Artificial Sequence: Synthetic oligonucleotide
  Sense strand starting at position 1234 of SEQ ID NO: 1885741
uaguuagugccacacauga

SEQ ID NO: 2364565 - RNA, 19 nt, Artificial Sequence
  Description of Artificial Sequence: Synthetic oligonucleotide
  Antisense strand to SEQ ID NO: 2364564
ucauguguggcacuaacua

SEQ ID NO: 2364566 - RNA, 19 nt, Artificial Sequence
  Description of Artificial Sequence: Synthetic oligonucleotide
  Sense strand starting at position 1296 of SEQ ID NO: 1885741
gcacacaagcucugacaaa

SEQ ID NO: 2364567 - RNA, 19 nt, Artificial Sequence
  Description of Artificial Sequence: Synthetic oligonucleotide
  Antisense strand to SEQ ID NO: 2364566
uuugucagagcuugugugc

SEQ ID NO: 2364568 - RNA, 19 nt, Artificial Sequence
  Description of Artificial Sequence: Synthetic oligonucleotide
  Sense strand starting at position 1348 of SEQ ID NO: 1885741
uuagcuucugaaugcuuau

SEQ ID NO: 2364569 - RNA, 19 nt, Artificial Sequence
  Description of Artificial Sequence: Synthetic oligonucleotide
  Antisense strand to SEQ ID NO: 2364568
auaagcauucagaagcuaa

SEQ ID NO: 2364570 - RNA, 19 nt, Artificial Sequence
  Description of Artificial Sequence: Synthetic oligonucleotide
  Sense strand starting at position 1351 of SEQ ID NO: 1885741
gcuucugaaugcuuauauc

SEQ ID NO: 2364571 - RNA, 19 nt, Artificial Sequence
  Description of Artificial Sequence: Synthetic oligonucleotide
  Antisense strand to SEQ ID NO: 2364570
gauauaagcauucagaagc

SEQ ID NO: 2364572 - RNA, 19 nt, Artificial Sequence
  Description of Artificial Sequence: Synthetic oligonucleotide
  Sense strand starting at position 1367 of SEQ ID NO: 1885741
aucucauaugcguagcaaa

SEQ ID NO: 2364573 - RNA, 19 nt, Artificial Sequence
  Description of Artificial Sequence: Synthetic oligonucleotide
  Antisense strand to SEQ ID NO: 2364572
uuugcuacgcauaugagau

SEQ ID NO: 2364574 - RNA, 19 nt, Artificial Sequence
  Description of Artificial Sequence: Synthetic oligonucleotide
  Sense strand starting at position 1992 of SEQ ID NO: 1885741
gcacauugcuaagcuaaag

SEQ ID NO: 2364575 - RNA, 19 nt, Artificial Sequence
  Description of Artificial Sequence: Synthetic oligonucleotide
  Antisense strand to SEQ ID NO: 2364574
cuuuagcuuagcaaugugc

SEQ ID NO: 2364576 - RNA, 19 nt, Artificial Sequence
  Description of Artificial Sequence: Synthetic oligonucleotide
  Sense strand starting at position 2128 of SEQ ID NO: 1885741
uuuaccaaaccgugacaaa

SEQ ID NO: 2364577 - RNA, 19 nt, Artificial Sequence
  Description of Artificial Sequence: Synthetic oligonucleotide
  Antisense strand to SEQ ID NO: 2364576
uuugucacgguuugguaaa

SEQ ID NO: 2364578 - RNA, 19 nt, Artificial Sequence
  Description of Artificial Sequence: Synthetic oligonucleotide
  Sense strand starting at position 2236 of SEQ ID NO: 1885741
guuuauuggcccuguauuu

SEQ ID NO: 2364579 - RNA, 19 nt, Artificial Sequence
  Description of Artificial Sequence: Synthetic oligonucleotide
  Antisense strand to SEQ ID NO: 2364578
aaauacagggccaauaaac

SEQ ID NO: 2364580 - RNA, 19 nt, Artificial Sequence
  Description of Artificial Sequence: Synthetic oligonucleotide
  Sense strand starting at position 2243 of SEQ ID NO: 1885741
ggcccuguauuucugcgaa

SEQ ID NO: 2364581 - RNA, 19 nt, Artificial Sequence
  Description of Artificial Sequence: Synthetic oligonucleotide
  Antisense strand to SEQ ID NO: 2364580
uucgcagaaauacagggcc

SEQ ID NO: 2364582 - RNA, 19 nt, Artificial Sequence
  Description of Artificial Sequence: Synthetic oligonucleotide
  Sense strand starting at position 2245 of SEQ ID NO: 1885741
cccuguauuucugcgaagu

SEQ ID NO: 2364583 - RNA, 19 nt, Artificial Sequence
  Description of Artificial Sequence: Synthetic oligonucleotide
  Antisense strand to SEQ ID NO: 2364582
acuucgcagaaauacaggg

SEQ ID NO: 2364584 - RNA, 19 nt, Artificial Sequence
  Description of Artificial Sequence: Synthetic oligonucleotide
  Sense strand starting at position 2246 of SEQ ID NO: 1885741
ccuguauuucugcgaaguu

SEQ ID NO: 2364585 - RNA, 19 nt, Artificial Sequence
  Description of Artificial Sequence: Synthetic oligonucleotide
  Antisense strand to SEQ ID NO: 2364584
aacuucgcagaaauacagg

SEQ ID NO: 2364586 - RNA, 19 nt, Artificial Sequence
  Description of Artificial Sequence: Synthetic oligonucleotide
  Sense strand starting at position 2446 of SEQ ID NO: 1885741
aaagguuacccuggacacu

SEQ ID NO: 2364587 - RNA, 19 nt, Artificial Sequence
  Description of Artificial Sequence: Synthetic oligonucleotide
  Antisense strand to SEQ ID NO: 2364586
aguguccaggguaaccuuu

SEQ ID NO: 2364588 - RNA, 19 nt, Artificial Sequence
  Description of Artificial Sequence: Synthetic oligonucleotide
  Sense strand starting at position 2708 of SEQ ID NO: 1885741
ucaggugaucgagguggau

SEQ ID NO: 2364589 - RNA, 19 nt, Artificial Sequence
  Description of Artificial Sequence: Synthetic oligonucleotide
  Antisense strand to SEQ ID NO: 2364588
auccaccucgaucaccuga

SEQ ID NO: 2364590 - RNA, 19 nt, Artificial Sequence
  Description of Artificial Sequence: Synthetic oligonucleotide
  Sense strand starting at position 3252 of SEQ ID NO: 1885741
acaacaaagcgacgaauua

SEQ ID NO: 2364591 - RNA, 19 nt, Artificial Sequence
  Description of Artificial Sequence: Synthetic oligonucleotide
  Antisense strand to SEQ ID NO: 2364590
uaauucgucgcuuuguugu

SEQ ID NO: 2364592 - RNA, 19 nt, Artificial Sequence
  Description of Artificial Sequence: Synthetic oligonucleotide
  Sense strand starting at position 3434 of SEQ ID NO: 1885741
gcaagagcugucuucugcu

SEQ ID NO: 2364593 - RNA, 19 nt, Artificial Sequence
  Description of Artificial Sequence: Synthetic oligonucleotide
  Antisense strand to SEQ ID NO: 2364592
agcagaagacagcucuugc

SEQ ID NO: 2364594 - RNA, 19 nt, Artificial Sequence
  Description of Artificial Sequence: Synthetic oligonucleotide
  Sense strand starting at position 3545 of SEQ ID NO: 1885741
ggacucggauccguuugaa

SEQ ID NO: 2364595 - RNA, 19 nt, Artificial Sequence
  Description of Artificial Sequence: Synthetic oligonucleotide
  Antisense strand to SEQ ID NO: 2364594
uucaaacggauccgagucc

SEQ ID NO: 2364596 - RNA, 19 nt, Artificial Sequence
  Description of Artificial Sequence: Synthetic oligonucleotide
  Sense strand starting at position 3783 of SEQ ID NO: 1885741
gcucucuuccacgauaucu

SEQ ID NO: 2364597 - RNA, 19 nt, Artificial Sequence
  Description of Artificial Sequence: Synthetic oligonucleotide
  Antisense strand to SEQ ID NO: 2364596
agauaucguggaagagagc

SEQ ID NO: 2364598 - RNA, 19 nt, Artificial Sequence
  Description of Artificial Sequence: Synthetic oligonucleotide
  Sense strand starting at position 3792 of SEQ ID NO: 1885741
cacgauaucuugucgaccu

SEQ ID NO: 2364599 - RNA, 19 nt, Artificial Sequence
  Description of Artificial Sequence: Synthetic oligonucleotide
  Antisense strand to SEQ ID NO: 2364598
aggucgacaagauaucgug

SEQ ID NO: 2364600 - RNA, 19 nt, Artificial Sequence
  Description of Artificial Sequence: Synthetic oligonucleotide
  Sense strand starting at position 3794 of SEQ ID NO: 1885741
cgauaucuugucgaccuca

SEQ ID NO: 2364601 - RNA, 19 nt, Artificial Sequence
  Description of Artificial Sequence: Synthetic oligonucleotide
  Antisense strand to SEQ ID NO: 2364600
ugaggucgacaagauaucg

SEQ ID NO: 2364602 - RNA, 19 nt, Artificial Sequence
  Description of Artificial Sequence: Synthetic oligonucleotide
  Sense strand starting at position 3855 of SEQ ID NO: 1885741
cuaaaugggcccugagauu

SEQ ID NO: 2364603 - RNA, 19 nt, Artificial Sequence
  Description of Artificial Sequence: Synthetic oligonucleotide
  Antisense strand to SEQ ID NO: 2364602
aaucucagggcccauuuag

SEQ ID NO: 2364604 - RNA, 19 nt, Artificial Sequence
  Description of Artificial Sequence: Synthetic oligonucleotide
  Sense strand starting at position 325 of SEQ ID NO: 1885742
agcgcuaaauuccuacaua

SEQ ID NO: 2364605 - RNA, 19 nt, Artificial Sequence
  Description of Artificial Sequence: Synthetic oligonucleotide
  Antisense strand to SEQ ID NO: 2364604
uauguaggaauuuagcgcu

SEQ ID NO: 2364606 - RNA, 19 nt, Artificial Sequence
  Description of Artificial Sequence: Synthetic oligonucleotide
  Sense strand starting at position 326 of SEQ ID NO: 1885742
gcgcuaaauuccuacauau

SEQ ID NO: 2364607 - RNA, 19 nt, Artificial Sequence
  Description of Artificial Sequence: Synthetic oligonucleotide
  Antisense strand to SEQ ID NO: 2364606
auauguaggaauuuagcgc

SEQ ID NO: 2364608 - RNA, 19 nt, Artificial Sequence
  Description of Artificial Sequence: Synthetic oligonucleotide
  Sense strand starting at position 337 of SEQ ID NO: 1885742
cuacauauauuucgguauu

SEQ ID NO: 2364609 - RNA, 19 nt, Artificial Sequence
  Description of Artificial Sequence: Synthetic oligonucleotide
  Antisense strand to SEQ ID NO: 2364608
aauaccgaaauauauguag

SEQ ID NO: 2364610 - RNA, 19 nt, Artificial Sequence
  Description of Artificial Sequence: Synthetic oligonucleotide
  Sense strand starting at position 1161 of SEQ ID NO: 1885742
cgacaauguugcgaguuaa

SEQ ID NO: 2364611 - RNA, 19 nt, Artificial Sequence
  Description of Artificial Sequence: Synthetic oligonucleotide
  Antisense strand to SEQ ID NO: 2364610
uuaacucgcaacauugucg

SEQ ID NO: 2364612 - RNA, 19 nt, Artificial Sequence
  Description of Artificial Sequence: Synthetic oligonucleotide
  Sense strand starting at position 1194 of SEQ ID NO: 1885742
gucuauuaguguucuagga

SEQ ID NO: 2364613 - RNA, 19 nt, Artificial Sequence
  Description of Artificial Sequence: Synthetic oligonucleotide
  Antisense strand to SEQ ID NO: 2364612
uccuagaacacuaauagac

SEQ ID NO: 2364614 - RNA, 19 nt, Artificial Sequence
  Description of Artificial Sequence: Synthetic oligonucleotide
  Sense strand starting at position 1196 of SEQ ID NO: 1885742
cuauuaguguucuaggagg

SEQ ID NO: 2364615 - RNA, 19 nt, Artificial Sequence
  Description of Artificial Sequence: Synthetic oligonucleotide
  Antisense strand to SEQ ID NO: 2364614
ccuccuagaacacuaauag

SEQ ID NO: 2364616 - RNA, 19 nt, Artificial Sequence
  Description of Artificial Sequence: Synthetic oligonucleotide
  Sense strand starting at position 1198 of SEQ ID NO: 1885742
auuaguguucuaggaggga

SEQ ID NO: 2364617 - RNA, 19 nt, Artificial Sequence
  Description of Artificial Sequence: Synthetic oligonucleotide
  Antisense strand to SEQ ID NO: 2364616
ucccuccuagaacacuaau

SEQ ID NO: 2364618 - RNA, 19 nt, Artificial Sequence
  Description of Artificial Sequence: Synthetic oligonucleotide
  Sense strand starting at position 1201 of SEQ ID NO: 1885742
aguguucuaggagggaaau

SEQ ID NO: 2364619 - RNA, 19 nt, Artificial Sequence
  Description of Artificial Sequence: Synthetic oligonucleotide
  Antisense strand to SEQ ID NO: 2364618
auuucccuccuagaacacu

SEQ ID NO: 2364620 - RNA, 19 nt, Artificial Sequence
  Description of Artificial Sequence: Synthetic oligonucleotide
  Sense strand starting at position 1202 of SEQ ID NO: 1885742
guguucuaggagggaaauu

SEQ ID NO: 2364621 - RNA, 19 nt, Artificial Sequence
  Description of Artificial Sequence: Synthetic oligonucleotide
  Antisense strand to SEQ ID NO: 2364620
aauuucccuccuagaacac

SEQ ID NO: 2364622 - RNA, 19 nt, Artificial Sequence
  Description of Artificial Sequence: Synthetic oligonucleotide
  Sense strand starting at position 1255 of SEQ ID NO: 1885742
uuguguugcugcucauaaa

SEQ ID NO: 2364623 - RNA, 19 nt, Artificial Sequence
  Description of Artificial Sequence: Synthetic oligonucleotide
  Antisense strand to SEQ ID NO: 2364622
uuuaugagcagcaacacaa

SEQ ID NO: 2364624 - RNA, 19 nt, Artificial Sequence
  Description of Artificial Sequence: Synthetic oligonucleotide
  Sense strand starting at position 1284 of SEQ ID NO: 1885742
cccugaacucucugagguu

SEQ ID NO: 2364625 - RNA, 19 nt, Artificial Sequence
  Description of Artificial Sequence: Synthetic oligonucleotide
  Antisense strand to SEQ ID NO: 2364624
aaccucagagaguucaggg

SEQ ID NO: 2364626 - RNA, 19 nt, Artificial Sequence
  Description of Artificial Sequence: Synthetic oligonucleotide
  Sense strand starting at position 1285 of SEQ ID NO: 1885742
ccugaacucucugagguuu

SEQ ID NO: 2364627 - RNA, 19 nt, Artificial Sequence
  Description of Artificial Sequence: Synthetic oligonucleotide
  Antisense strand to SEQ ID NO: 2364626
aaaccucagagaguucagg

SEQ ID NO: 2364628 - RNA, 19 nt, Artificial Sequence
  Description of Artificial Sequence: Synthetic oligonucleotide
  Sense strand starting at position 1452 of SEQ ID NO: 1885742
augucaguguccuugagca

SEQ ID NO: 2364629 - RNA, 19 nt, Artificial Sequence
  Description of Artificial Sequence: Synthetic oligonucleotide
  Antisense strand to SEQ ID NO: 2364628
ugcucaaggacacugacau

SEQ ID NO: 2364630 - RNA, 19 nt, Artificial Sequence
  Description of Artificial Sequence: Synthetic oligonucleotide
  Sense strand starting at position 1454 of SEQ ID NO: 1885742
gucaguguccuugagcaug

SEQ ID NO: 2364631 - RNA, 19 nt, Artificial Sequence
  Description of Artificial Sequence: Synthetic oligonucleotide
  Antisense strand to SEQ ID NO: 2364630
caugcucaaggacacugac

SEQ ID NO: 2364632 - RNA, 19 nt, Artificial Sequence
  Description of Artificial Sequence: Synthetic oligonucleotide
  Sense strand starting at position 1550 of SEQ ID NO: 1885742
guaccucggcuccaugaaa

SEQ ID NO: 2364633 - RNA, 19 nt, Artificial Sequence
  Description of Artificial Sequence: Synthetic oligonucleotide
  Antisense strand to SEQ ID NO: 2364632
uuucauggagccgagguac

SEQ ID NO: 2364634 - RNA, 19 nt, Artificial Sequence
  Description of Artificial Sequence: Synthetic oligonucleotide
  Sense strand starting at position 1790 of SEQ ID NO: 1885742
agcagaaucgucguggucu

SEQ ID NO: 2364635 - RNA, 19 nt, Artificial Sequence
  Description of Artificial Sequence: Synthetic oligonucleotide
  Antisense strand to SEQ ID NO: 2364634
agaccacgacgauucugcu

SEQ ID NO: 2364636 - RNA, 19 nt, Artificial Sequence
  Description of Artificial Sequence: Synthetic oligonucleotide
  Sense strand starting at position 1879 of SEQ ID NO: 1885742
ucuugcuucugagaccaaa

SEQ ID NO: 2364637 - RNA, 19 nt, Artificial Sequence
  Description of Artificial Sequence: Synthetic oligonucleotide
  Antisense strand to SEQ ID NO: 2364636
uuuggucucagaagcaaga

SEQ ID NO: 2364638 - RNA, 19 nt, Artificial Sequence
  Description of Artificial Sequence: Synthetic oligonucleotide
  Sense strand starting at position 2018 of SEQ ID NO: 1885742
agcagauaacuccggguuu

SEQ ID NO: 2364639 - RNA, 19 nt, Artificial Sequence
  Description of Artificial Sequence: Synthetic oligonucleotide
  Antisense strand to SEQ ID NO: 2364638
aaacccggaguuaucugcu

SEQ ID NO: 2364640 - RNA, 19 nt, Artificial Sequence
  Description of Artificial Sequence: Synthetic oligonucleotide
  Sense strand starting at position 2020 of SEQ ID NO: 1885742
cagauaacuccggguuucu

SEQ ID NO: 2364641 - RNA, 19 nt, Artificial Sequence
  Description of Artificial Sequence: Synthetic oligonucleotide
  Antisense strand to SEQ ID NO: 2364640
agaaacccggaguuaucug

SEQ ID NO: 2364642 - RNA, 19 nt, Artificial Sequence
  Description of Artificial Sequence: Synthetic oligonucleotide
  Sense strand starting at position 2029 of SEQ ID NO: 1885742
ccggguuucuaaucuguuu

SEQ ID NO: 2364643 - RNA, 19 nt, Artificial Sequence
  Description of Artificial Sequence: Synthetic oligonucleotide
  Antisense strand to SEQ ID NO: 2364642
aaacagauuagaaacccgg

SEQ ID NO: 2364644 - RNA, 19 nt, Artificial Sequence
  Description of Artificial Sequence: Synthetic oligonucleotide
  Sense strand starting at position 2031 of SEQ ID NO: 1885742
ggguuucuaaucuguuuga

SEQ ID NO: 2364645 - RNA, 19 nt, Artificial Sequence
  Description of Artificial Sequence: Synthetic oligonucleotide
  Antisense strand to SEQ ID NO: 2364644
ucaaacagauuagaaaccc

SEQ ID NO: 2364646 - RNA, 19 nt, Artificial Sequence
  Description of Artificial Sequence: Synthetic oligonucleotide
  Sense strand starting at position 2032 of SEQ ID NO: 1885742
gguuucuaaucuguuugaa

SEQ ID NO: 2364647 - RNA, 19 nt, Artificial Sequence
  Description of Artificial Sequence: Synthetic oligonucleotide
  Antisense strand to SEQ ID NO: 2364646
uucaaacagauuagaaacc

SEQ ID NO: 2364648 - RNA, 19 nt, Artificial Sequence
  Description of Artificial Sequence: Synthetic oligonucleotide
  Sense strand starting at position 2034 of SEQ ID NO: 1885742
uuucuaaucuguuugaaga

SEQ ID NO: 2364649 - RNA, 19 nt, Artificial Sequence
  Description of Artificial Sequence: Synthetic oligonucleotide
  Antisense strand to SEQ ID NO: 2364648
ucuucaaacagauuagaaa

SEQ ID NO: 2364650 - RNA, 19 nt, Artificial Sequence
  Description of Artificial Sequence: Synthetic oligonucleotide
  Sense strand starting at position 2035 of SEQ ID NO: 1885742
uucuaaucuguuugaagag

SEQ ID NO: 2364651 - RNA, 19 nt, Artificial Sequence
  Description of Artificial Sequence: Synthetic oligonucleotide
  Antisense strand to SEQ ID NO: 2364650
cucuucaaacagauuagaa

SEQ ID NO: 2364652 - RNA, 19 nt, Artificial Sequence
  Description of Artificial Sequence: Synthetic oligonucleotide
  Sense strand starting at position 2036 of SEQ ID NO: 1885742
ucuaaucuguuugaagaga

SEQ ID NO: 2364653 - RNA, 19 nt, Artificial Sequence
  Description of Artificial Sequence: Synthetic oligonucleotide
  Antisense strand to SEQ ID NO: 2364652
ucucuucaaacagauuaga

SEQ ID NO: 2364654 - RNA, 19 nt, Artificial Sequence
  Description of Artificial Sequence: Synthetic oligonucleotide
  Sense strand starting at position 2246 of SEQ ID NO: 1885742
ggucaaguccagcaaagua

SEQ ID NO: 2364655 - RNA, 19 nt, Artificial Sequence
  Description of Artificial Sequence: Synthetic oligonucleotide
  Antisense strand to SEQ ID NO: 2364654
uacuuugcuggacuugacc

SEQ ID NO: 2364656 - RNA, 19 nt, Artificial Sequence
  Description of Artificial Sequence: Synthetic oligonucleotide
  Sense strand starting at position 2256 of SEQ ID NO: 1885742
agcaaaguaacgugacaga

SEQ ID NO: 2364657 - RNA, 19 nt, Artificial Sequence
  Description of Artificial Sequence: Synthetic oligonucleotide
  Antisense strand to SEQ ID NO: 2364656
ucugucacguuacuuugcu

SEQ ID NO: 2364658 - RNA, 19 nt, Artificial Sequence
  Description of Artificial Sequence: Synthetic oligonucleotide
  Sense strand starting at position 2279 of SEQ ID NO: 1885742
acgucaguccaaggaagaa

SEQ ID NO: 2364659 - RNA, 19 nt, Artificial Sequence
  Description of Artificial Sequence: Synthetic oligonucleotide
  Antisense strand to SEQ ID NO: 2364658
uucuuccuuggacugacgu

SEQ ID NO: 2364660 - RNA, 19 nt, Artificial Sequence
  Description of Artificial Sequence: Synthetic oligonucleotide
  Sense strand starting at position 2392 of SEQ ID NO: 1885742
gcgcaugccgacuguuaca

SEQ ID NO: 2364661 - RNA, 19 nt, Artificial Sequence
  Description of Artificial Sequence: Synthetic oligonucleotide
  Antisense strand to SEQ ID NO: 2364660
uguaacagucggcaugcgc

SEQ ID NO: 2364662 - RNA, 19 nt, Artificial Sequence
  Description of Artificial Sequence: Synthetic oligonucleotide
  Sense strand starting at position 2826 of SEQ ID NO: 1885742
gguguuucccggcaaacuu

SEQ ID NO: 2364663 - RNA, 19 nt, Artificial Sequence
  Description of Artificial Sequence: Synthetic oligonucleotide
  Antisense strand to SEQ ID NO: 2364662
aaguuugccgggaaacacc

SEQ ID NO: 2364664 - RNA, 19 nt, Artificial Sequence
  Description of Artificial Sequence: Synthetic oligonucleotide
  Sense strand starting at position 2835 of SEQ ID NO: 1885742
cggcaaacuuccugggagu

SEQ ID NO: 2364665 - RNA, 19 nt, Artificial Sequence
  Description of Artificial Sequence: Synthetic oligonucleotide
  Antisense strand to SEQ ID NO: 2364664
acucccaggaaguuugccg

SEQ ID NO: 2364666 - RNA, 19 nt, Artificial Sequence
  Description of Artificial Sequence: Synthetic oligonucleotide
  Sense strand starting at position 2837 of SEQ ID NO: 1885742
gcaaacuuccugggaguca

SEQ ID NO: 2364667 - RNA, 19 nt, Artificial Sequence
  Description of Artificial Sequence: Synthetic oligonucleotide
  Antisense strand to SEQ ID NO: 2364666
ugacucccaggaaguuugc

SEQ ID NO: 2364668 - RNA, 19 nt, Artificial Sequence
  Description of Artificial Sequence: Synthetic oligonucleotide
  Sense strand starting at position 2876 of SEQ ID NO: 1885742
agaagccucuggugaaaga

SEQ ID NO: 2364669 - RNA, 19 nt, Artificial Sequence
  Description of Artificial Sequence: Synthetic oligonucleotide
  Antisense strand to SEQ ID NO: 2364668
ucuuucaccagaggcuucu

SEQ ID NO: 2364670 - RNA, 19 nt, Artificial Sequence
  Description of Artificial Sequence: Synthetic oligonucleotide
  Sense strand starting at position 3063 of SEQ ID NO: 1885742
cggagcauguucucacuca

SEQ ID NO: 2364671 - RNA, 19 nt, Artificial Sequence
  Description of Artificial Sequence: Synthetic oligonucleotide
  Antisense strand to SEQ ID NO: 2364670
ugagugagaacaugcuccg

SEQ ID NO: 2364672 - RNA, 19 nt, Artificial Sequence
  Description of Artificial Sequence: Synthetic oligonucleotide
  Sense strand starting at position 3634 of SEQ ID NO: 1885742
cgugcagauccugagaaca

SEQ ID NO: 2364673 - RNA, 19 nt, Artificial Sequence
  Description of Artificial Sequence: Synthetic oligonucleotide
  Antisense strand to SEQ ID NO: 2364672
uguucucaggaucugcacg

SEQ ID NO: 2364674 - RNA, 19 nt, Artificial Sequence
  Description of Artificial Sequence: Synthetic oligonucleotide
  Sense strand starting at position 3804 of SEQ ID NO: 1885742
aauggauucugagccugga

SEQ ID NO: 2364675 - RNA, 19 nt, Artificial Sequence
  Description of Artificial Sequence: Synthetic oligonucleotide
  Antisense strand to SEQ ID NO: 2364674
uccaggcucagaauccauu

SEQ ID NO: 2364676 - RNA, 19 nt, Artificial Sequence
  Description of Artificial Sequence: Synthetic oligonucleotide
  Sense strand starting at position 3901 of SEQ ID NO: 1885742
acugaaaucuugccugaua

SEQ ID NO: 2364677 - RNA, 19 nt, Artificial Sequence
  Description of Artificial Sequence: Synthetic oligonucleotide
  Antisense strand to SEQ ID NO: 2364676
uaucaggcaagauuucagu

SEQ ID NO: 2364678 - RNA, 19 nt, Artificial Sequence
  Description of Artificial Sequence: Synthetic oligonucleotide
  Sense strand starting at position 3902 of SEQ ID NO: 1885742
cugaaaucuugccugauau

SEQ ID NO: 2364679 - RNA, 19 nt, Artificial Sequence
  Description of Artificial Sequence: Synthetic oligonucleotide
  Antisense strand to SEQ ID NO: 2364678
auaucaggcaagauuucag

SEQ ID NO: 2364680 - RNA, 19 nt, Artificial Sequence
  Description of Artificial Sequence: Synthetic oligonucleotide
  Sense strand starting at position 3912 of SEQ ID NO: 1885742
gccugauaugcaggguuaa

SEQ ID NO: 2364681 - RNA, 19 nt, Artificial Sequence
  Description of Artificial Sequence: Synthetic oligonucleotide
  Antisense strand to SEQ ID NO: 2364680
uuaacccugcauaucaggc

SEQ ID NO: 2364682 - RNA, 19 nt, Artificial Sequence
  Description of Artificial Sequence: Synthetic oligonucleotide
  Sense strand starting at position 3913 of SEQ ID NO: 1885742
ccugauaugcaggguuaag

SEQ ID NO: 2364683 - RNA, 19 nt, Artificial Sequence
  Description of Artificial Sequence: Synthetic oligonucleotide
  Antisense strand to SEQ ID NO: 2364682
cuuaacccugcauaucagg

SEQ ID NO: 2364684 - RNA, 19 nt, Artificial Sequence
  Description of Artificial Sequence: Synthetic oligonucleotide
  Sense strand starting at position 266 of SEQ ID NO: 1885743
ugugaaucaaagcgaaaug

SEQ ID NO: 2364685 - RNA, 19 nt, Artificial Sequence
  Description of Artificial Sequence: Synthetic oligonucleotide
  Antisense strand to SEQ ID NO: 2364684
cauuucgcuuugauucaca

SEQ ID NO: 2364686 - RNA, 19 nt, Artificial Sequence
  Description of Artificial Sequence: Synthetic oligonucleotide
  Sense strand starting at position 366 of SEQ ID NO: 1885743
auaacauguuuggugcaaa

SEQ ID NO: 2364687 - RNA, 19 nt, Artificial Sequence
  Description of Artificial Sequence: Synthetic oligonucleotide
  Antisense strand to SEQ ID NO: 2364686
uuugcaccaaacauguuau

SEQ ID NO: 2364688 - RNA, 19 nt, Artificial Sequence
  Description of Artificial Sequence: Synthetic oligonucleotide
  Sense strand starting at position 413 of SEQ ID NO: 1885743
gacagaaugucagcuugcu

SEQ ID NO: 2364689 - RNA, 19 nt, Artificial Sequence
  Description of Artificial Sequence: Synthetic oligonucleotide
  Antisense strand to SEQ ID NO: 2364688
agcaagcugacauucuguc

SEQ ID NO: 2364690 - RNA, 19 nt, Artificial Sequence
  Description of Artificial Sequence: Synthetic oligonucleotide
  Sense strand starting at position 478 of SEQ ID NO: 1885743
ccaugucagccggaauuga

SEQ ID NO: 2364691 - RNA, 19 nt, Artificial Sequence
  Description of Artificial Sequence: Synthetic oligonucleotide
  Antisense strand to SEQ ID NO: 2364690
ucaauuccggcugacaugg

SEQ ID NO: 2364692 - RNA, 19 nt, Artificial Sequence
  Description of Artificial Sequence: Synthetic oligonucleotide
  Sense strand starting at position 486 of SEQ ID NO: 1885743
gccggaauugaacaucaau

SEQ ID NO: 2364693 - RNA, 19 nt, Artificial Sequence
  Description of Artificial Sequence: Synthetic oligonucleotide
  Antisense strand to SEQ ID NO: 2364692
auugauguucaauuccggc

SEQ ID NO: 2364694 - RNA, 19 nt, Artificial Sequence
  Description of Artificial Sequence: Synthetic oligonucleotide
  Sense strand starting at position 557 of SEQ ID NO: 1885743
gaaggcucauugguccaaa

SEQ ID NO: 2364695 - RNA, 19 nt, Artificial Sequence
  Description of Artificial Sequence: Synthetic oligonucleotide
  Antisense strand to SEQ ID NO: 2364694
uuuggaccaaugagccuuc

SEQ ID NO: 2364696 - RNA, 19 nt, Artificial Sequence
  Description of Artificial Sequence: Synthetic oligonucleotide
  Sense strand starting at position 560 of SEQ ID NO: 1885743
ggcucauugguccaaacca

SEQ ID NO: 2364697 - RNA, 19 nt, Artificial Sequence
  Description of Artificial Sequence: Synthetic oligonucleotide
  Antisense strand to SEQ ID NO: 2364696
ugguuuggaccaaugagcc

SEQ ID NO: 2364698 - RNA, 19 nt, Artificial Sequence
  Description of Artificial Sequence: Synthetic oligonucleotide
  Sense strand starting at position 660 of SEQ ID NO: 1885743
augagauauuuaggaauac

SEQ ID NO: 2364699 - RNA, 19 nt, Artificial Sequence
  Description of Artificial Sequence: Synthetic oligonucleotide
  Antisense strand to SEQ ID NO: 2364698
guauuccuaaauaucucau

SEQ ID NO: 2364700 - RNA, 19 nt, Artificial Sequence
  Description of Artificial Sequence: Synthetic oligonucleotide
  Sense strand starting at position 859 of SEQ ID NO: 1885743
cauaaaguuuaggaagaga

SEQ ID NO: 2364701 - RNA, 19 nt, Artificial Sequence
  Description of Artificial Sequence: Synthetic oligonucleotide
  Antisense strand to SEQ ID NO: 2364700
ucucuuccuaaacuuuaug

SEQ ID NO: 2364702 - RNA, 19 nt, Artificial Sequence
  Description of Artificial Sequence: Synthetic oligonucleotide
  Sense strand starting at position 1108 of SEQ ID NO: 1885743
gucacaugcccucgauuua

SEQ ID NO: 2364703 - RNA, 19 nt, Artificial Sequence
  Description of Artificial Sequence: Synthetic oligonucleotide
  Antisense strand to SEQ ID NO: 2364702
uaaaucgagggcaugugac

SEQ ID NO: 2364704 - RNA, 19 nt, Artificial Sequence
  Description of Artificial Sequence: Synthetic oligonucleotide
  Sense strand starting at position 1182 of SEQ ID NO: 1885743
ugcagaauguacucauaag

SEQ ID NO: 2364705 - RNA, 19 nt, Artificial Sequence
  Description of Artificial Sequence: Synthetic oligonucleotide
  Antisense strand to SEQ ID NO: 2364704
cuuaugaguacauucugca

SEQ ID NO: 2364706 - RNA, 19 nt, Artificial Sequence
  Description of Artificial Sequence: Synthetic oligonucleotide
  Sense strand starting at position 1188 of SEQ ID NO: 1885743
auguacucauaaguggaua

SEQ ID NO: 2364707 - RNA, 19 nt, Artificial Sequence
  Description of Artificial Sequence: Synthetic oligonucleotide
  Antisense strand to SEQ ID NO: 2364706
uauccacuuaugaguacau

SEQ ID NO: 2364708 - RNA, 19 nt, Artificial Sequence
  Description of Artificial Sequence: Synthetic oligonucleotide
  Sense strand starting at position 1196 of SEQ ID NO: 1885743
auaaguggauaggauaaua

SEQ ID NO: 2364709 - RNA, 19 nt, Artificial Sequence
  Description of Artificial Sequence: Synthetic oligonucleotide
  Antisense strand to SEQ ID NO: 2364708
uauuauccuauccacuuau

SEQ ID NO: 2364710 - RNA, 19 nt, Artificial Sequence
  Description of Artificial Sequence: Synthetic oligonucleotide
  Sense strand starting at position 1418 of SEQ ID NO: 1885743
agugaauuacuuuagguua

SEQ ID NO: 2364711 - RNA, 19 nt, Artificial Sequence
  Description of Artificial Sequence: Synthetic oligonucleotide
  Antisense strand to SEQ ID NO: 2364710
uaaccuaaaguaauucacu

SEQ ID NO: 2364712 - RNA, 19 nt, Artificial Sequence
  Description of Artificial Sequence: Synthetic oligonucleotide
  Sense strand starting at position 1421 of SEQ ID NO: 1885743
gaauuacuuuagguuaguu

SEQ ID NO: 2364713 - RNA, 19 nt, Artificial Sequence
  Description of Artificial Sequence: Synthetic oligonucleotide
  Antisense strand to SEQ ID NO: 2364712
aacuaaccuaaaguaauuc

SEQ ID NO: 2364714 - RNA, 19 nt, Artificial Sequence
  Description of Artificial Sequence: Synthetic oligonucleotide
  Sense strand starting at position 2255 of SEQ ID NO: 1885743
ggcucagcagauuaucaua

SEQ ID NO: 2364715 - RNA, 19 nt, Artificial Sequence
  Description of Artificial Sequence: Synthetic oligonucleotide
  Antisense strand to SEQ ID NO: 2364714
uaugauaaucugcugagcc

SEQ ID NO: 2364716 - RNA, 19 nt, Artificial Sequence
  Description of Artificial Sequence: Synthetic oligonucleotide
  Sense strand starting at position 2311 of SEQ ID NO: 1885743
uaugcuaccugauuguaga

SEQ ID NO: 2364717 - RNA, 19 nt, Artificial Sequence
  Description of Artificial Sequence: Synthetic oligonucleotide
  Antisense strand to SEQ ID NO: 2364716
ucuacaaucagguagcaua

SEQ ID NO: 2364718 - RNA, 19 nt, Artificial Sequence
  Description of Artificial Sequence: Synthetic oligonucleotide
  Sense strand starting at position 2631 of SEQ ID NO: 1885743
gagacaggagcuuguuauu

SEQ ID NO: 2364719 - RNA, 19 nt, Artificial Sequence
  Description of Artificial Sequence: Synthetic oligonucleotide
  Antisense strand to SEQ ID NO: 2364718
aauaacaagcuccugucuc

SEQ ID NO: 2364720 - RNA, 19 nt, Artificial Sequence
  Description of Artificial Sequence: Synthetic oligonucleotide
  Sense strand starting at position 2883 of SEQ ID NO: 1885743
cgagguuguguguuugcca

SEQ ID NO: 2364721 - RNA, 19 nt, Artificial Sequence
  Description of Artificial Sequence: Synthetic oligonucleotide
  Antisense strand to SEQ ID NO: 2364720
uggcaaacacacaaccucg

SEQ ID NO: 2364722 - RNA, 19 nt, Artificial Sequence
  Description of Artificial Sequence: Synthetic oligonucleotide
  Sense strand starting at position 2910 of SEQ ID NO: 1885743
aucuaaugagauugucugu

SEQ ID NO: 2364723 - RNA, 19 nt, Artificial Sequence
  Description of Artificial Sequence: Synthetic oligonucleotide
  Antisense strand to SEQ ID NO: 2364722
acagacaaucucauuagau

SEQ ID NO: 2364724 - RNA, 19 nt, Artificial Sequence
  Description of Artificial Sequence: Synthetic oligonucleotide
  Sense strand starting at position 2913 of SEQ ID NO: 1885743
uaaugagauugucuguuug

SEQ ID NO: 2364725 - RNA, 19 nt, Artificial Sequence
  Description of Artificial Sequence: Synthetic oligonucleotide
  Antisense strand to SEQ ID NO: 2364724
caaacagacaaucucauua

SEQ ID NO: 2364726 - RNA, 19 nt, Artificial Sequence
  Description of Artificial Sequence: Synthetic oligonucleotide
  Sense strand starting at position 2917 of SEQ ID NO: 1885743
gagauugucuguuuggcag

SEQ ID NO: 2364727 - RNA, 19 nt, Artificial Sequence
  Description of Artificial Sequence: Synthetic oligonucleotide
  Antisense strand to SEQ ID NO: 2364726
cugccaaacagacaaucuc

SEQ ID NO: 2364728 - RNA, 19 nt, Artificial Sequence
  Description of Artificial Sequence: Synthetic oligonucleotide
  Sense strand starting at position 2920 of SEQ ID NO: 1885743
auugucuguuuggcagaaa

SEQ ID NO: 2364729 - RNA, 19 nt, Artificial Sequence
  Description of Artificial Sequence: Synthetic oligonucleotide
  Antisense strand to SEQ ID NO: 2364728
uuucugccaaacagacaau

SEQ ID NO: 2364730 - RNA, 19 nt, Artificial Sequence
  Description of Artificial Sequence: Synthetic oligonucleotide
  Sense strand starting at position 2923 of SEQ ID NO: 1885743
gucuguuuggcagaaagag

SEQ ID NO: 2364731 - RNA, 19 nt, Artificial Sequence
  Description of Artificial Sequence: Synthetic oligonucleotide
  Antisense strand to SEQ ID NO: 2364730
cucuuucugccaaacagac

SEQ ID NO: 2364732 - RNA, 19 nt, Artificial Sequence
  Description of Artificial Sequence: Synthetic oligonucleotide
  Sense strand starting at position 2971 of SEQ ID NO: 1885743
ugaacuuugcagggauucu

SEQ ID NO: 2364733 - RNA, 19 nt, Artificial Sequence
  Description of Artificial Sequence: Synthetic oligonucleotide
  Antisense strand to SEQ ID NO: 2364732
agaaucccugcaaaguuca

SEQ ID NO: 2364734 - RNA, 19 nt, Artificial Sequence
  Description of Artificial Sequence: Synthetic oligonucleotide
  Sense strand starting at position 2980 of SEQ ID NO: 1885743
cagggauucugagcaauuc

SEQ ID NO: 2364735 - RNA, 19 nt, Artificial Sequence
  Description of Artificial Sequence: Synthetic oligonucleotide
  Antisense strand to SEQ ID NO: 2364734
gaauugcucagaaucccug

SEQ ID NO: 2364736 - RNA, 19 nt, Artificial Sequence
  Description of Artificial Sequence: Synthetic oligonucleotide
  Sense strand starting at position 3042 of SEQ ID NO: 1885743
ugaggugaauacucagcua

SEQ ID NO: 2364737 - RNA, 19 nt, Artificial Sequence
  Description of Artificial Sequence: Synthetic oligonucleotide
  Antisense strand to SEQ ID NO: 2364736
uagcugaguauucaccuca

SEQ ID NO: 2364738 - RNA, 19 nt, Artificial Sequence
  Description of Artificial Sequence: Synthetic oligonucleotide
  Sense strand starting at position 3045 of SEQ ID NO: 1885743
ggugaauacucagcuaagg

SEQ ID NO: 2364739 - RNA, 19 nt, Artificial Sequence
  Description of Artificial Sequence: Synthetic oligonucleotide
  Antisense strand to SEQ ID NO: 2364738
ccuuagcugaguauucacc

SEQ ID NO: 2364740 - RNA, 19 nt, Artificial Sequence
  Description of Artificial Sequence: Synthetic oligonucleotide
  Sense strand starting at position 3122 of SEQ ID NO: 1885743
augggaaguuuaccaggua

SEQ ID NO: 2364741 - RNA, 19 nt, Artificial Sequence
  Description of Artificial Sequence: Synthetic oligonucleotide
  Antisense strand to SEQ ID NO: 2364740
uaccugguaaacuucccau

SEQ ID NO: 2364742 - RNA, 19 nt, Artificial Sequence
  Description of Artificial Sequence: Synthetic oligonucleotide
  Sense strand starting at position 3125 of SEQ ID NO: 1885743
ggaaguuuaccagguagaa

SEQ ID NO: 2364743 - RNA, 19 nt, Artificial Sequence
  Description of Artificial Sequence: Synthetic oligonucleotide
  Antisense strand to SEQ ID NO: 2364742
uucuaccugguaaacuucc

SEQ ID NO: 2364744 - RNA, 19 nt, Artificial Sequence
  Description of Artificial Sequence: Synthetic oligonucleotide
  Sense strand starting at position 3304 of SEQ ID NO: 1885743
aagggcuuccuguaauauu

SEQ ID NO: 2364745 - RNA, 19 nt, Artificial Sequence
  Description of Artificial Sequence: Synthetic oligonucleotide
  Antisense strand to SEQ ID NO: 2364744
aauauuacaggaagcccuu

SEQ ID NO: 2364746 - RNA, 19 nt, Artificial Sequence
  Description of Artificial Sequence: Synthetic oligonucleotide
  Sense strand starting at position 3625 of SEQ ID NO: 1885743
aggacuaggugggaaauau

SEQ ID NO: 2364747 - RNA, 19 nt, Artificial Sequence
  Description of Artificial Sequence: Synthetic oligonucleotide
  Antisense strand to SEQ ID NO: 2364746
auauuucccaccuaguccu

SEQ ID NO: 2364748 - RNA, 19 nt, Artificial Sequence
  Description of Artificial Sequence: Synthetic oligonucleotide
  Sense strand starting at position 3702 of SEQ ID NO: 1885743
ugugaaagccaccagaauu

SEQ ID NO: 2364749 - RNA, 19 nt, Artificial Sequence
  Description of Artificial Sequence: Synthetic oligonucleotide
  Antisense strand to SEQ ID NO: 2364748
aauucugguggcuuucaca

SEQ ID NO: 2364750 - RNA, 19 nt, Artificial Sequence
  Description of Artificial Sequence: Synthetic oligonucleotide
  Sense strand starting at position 3713 of SEQ ID NO: 1885743
ccagaauuauauguaagca

SEQ ID NO: 2364751 - RNA, 19 nt, Artificial Sequence
  Description of Artificial Sequence: Synthetic oligonucleotide
  Antisense strand to SEQ ID NO: 2364750
ugcuuacauauaauucugg

SEQ ID NO: 2364752 - RNA, 19 nt, Artificial Sequence
  Description of Artificial Sequence: Synthetic oligonucleotide
  Sense strand starting at position 3771 of SEQ ID NO: 1885743
ugccauaaugcagauugga

SEQ ID NO: 2364753 - RNA, 19 nt, Artificial Sequence
  Description of Artificial Sequence: Synthetic oligonucleotide
  Antisense strand to SEQ ID NO: 2364752
uccaaucugcauuauggca

SEQ ID NO: 2364754 - RNA, 19 nt, Artificial Sequence
  Description of Artificial Sequence: Synthetic oligonucleotide
  Sense strand starting at position 3786 of SEQ ID NO: 1885743
uggauuuagucuguagccu

SEQ ID NO: 2364755 - RNA, 19 nt, Artificial Sequence
  Description of Artificial Sequence: Synthetic oligonucleotide
  Antisense strand to SEQ ID NO: 2364754
aggcuacagacuaaaucca

SEQ ID NO: 2364756 - RNA, 19 nt, Artificial Sequence
  Description of Artificial Sequence: Synthetic oligonucleotide
  Sense strand starting at position 3822 of SEQ ID NO: 1885743
auggaagguucuuuacuau

SEQ ID NO: 2364757 - RNA, 19 nt, Artificial Sequence
  Description of Artificial Sequence: Synthetic oligonucleotide
  Antisense strand to SEQ ID NO: 2364756
auaguaaagaaccuuccau

SEQ ID NO: 2364758 - RNA, 19 nt, Artificial Sequence
  Description of Artificial Sequence: Synthetic oligonucleotide
  Sense strand starting at position 3828 of SEQ ID NO: 1885743
gguucuuuacuauguaaag

SEQ ID NO: 2364759 - RNA, 19 nt, Artificial Sequence
  Description of Artificial Sequence: Synthetic oligonucleotide
  Antisense strand to SEQ ID NO: 2364758
cuuuacauaguaaagaacc

SEQ ID NO: 2364760 - RNA, 19 nt, Artificial Sequence
  Description of Artificial Sequence: Synthetic oligonucleotide
  Sense strand starting at position 3829 of SEQ ID NO: 1885743
guucuuuacuauguaaaga

SEQ ID NO: 2364761 - RNA, 19 nt, Artificial Sequence
  Description of Artificial Sequence: Synthetic oligonucleotide
  Antisense strand to SEQ ID NO: 2364760
ucuuuacauaguaaagaac

SEQ ID NO: 2364762 - RNA, 19 nt, Artificial Sequence
  Description of Artificial Sequence: Synthetic oligonucleotide
  Sense strand starting at position 3885 of SEQ ID NO: 1885743
augguuuccuugucauaca

SEQ ID NO: 2364763 - RNA, 19 nt, Artificial Sequence
  Description of Artificial Sequence: Synthetic oligonucleotide
  Antisense strand to SEQ ID NO: 2364762
uguaugacaaggaaaccau

SEQ ID NO: 2364764 - RNA, 19 nt, Artificial Sequence
  Description of Artificial Sequence: Synthetic oligonucleotide
  Sense strand starting at position 77 of SEQ ID NO: 1885744
uuuaacccucucgaguuau

SEQ ID NO: 2364765 - RNA, 19 nt, Artificial Sequence
  Description of Artificial Sequence: Synthetic oligonucleotide
  Antisense strand to SEQ ID NO: 2364764
auaacucgagaggguuaaa

SEQ ID NO: 2364766 - RNA, 19 nt, Artificial Sequence
  Description of Artificial Sequence: Synthetic oligonucleotide
  Sense strand starting at position 607 of SEQ ID NO: 1885744
aucuuauuuguacguugua

SEQ ID NO: 2364767 - RNA, 19 nt, Artificial Sequence
  Description of Artificial Sequence: Synthetic oligonucleotide
  Antisense strand to SEQ ID NO: 2364766
uacaacguacaaauaagau

SEQ ID NO: 2364768 - RNA, 19 nt, Artificial Sequence
  Description of Artificial Sequence: Synthetic oligonucleotide
  Sense strand starting at position 608 of SEQ ID NO: 1885744
ucuuauuuguacguuguaa

SEQ ID NO: 2364769 - RNA, 19 nt, Artificial Sequence
  Description of Artificial Sequence: Synthetic oligonucleotide
  Antisense strand to SEQ ID NO: 2364768
uuacaacguacaaauaaga

SEQ ID NO: 2364770 - RNA, 19 nt, Artificial Sequence
  Description of Artificial Sequence: Synthetic oligonucleotide
  Sense strand starting at position 641 of SEQ ID NO: 1885744
uuuccauucggguauguga

SEQ ID NO: 2364771 - RNA, 19 nt, Artificial Sequence
  Description of Artificial Sequence: Synthetic oligonucleotide
  Antisense strand to SEQ ID NO: 2364770
ucacauacccgaauggaaa

SEQ ID NO: 2364772 - RNA, 19 nt, Artificial Sequence
  Description of Artificial Sequence: Synthetic oligonucleotide
  Sense strand starting at position 766 of SEQ ID NO: 1885744
acgauauauagguagcuuu

SEQ ID NO: 2364773 - RNA, 19 nt, Artificial Sequence
  Description of Artificial Sequence: Synthetic oligonucleotide
  Antisense strand to SEQ ID NO: 2364772
aaagcuaccuauauaucgu

SEQ ID NO: 2364774 - RNA, 19 nt, Artificial Sequence
  Description of Artificial Sequence: Synthetic oligonucleotide
  Sense strand starting at position 808 of SEQ ID NO: 1885744
gcccgaggcccagaauaaa

SEQ ID NO: 2364775 - RNA, 19 nt, Artificial Sequence
  Description of Artificial Sequence: Synthetic oligonucleotide
  Antisense strand to SEQ ID NO: 2364774
uuuauucugggccucgggc

SEQ ID NO: 2364776 - RNA, 19 nt, Artificial Sequence
  Description of Artificial Sequence: Synthetic oligonucleotide
  Sense strand starting at position 1216 of SEQ ID NO: 1885744
gagugaaugagagguauca

SEQ ID NO: 2364777 - RNA, 19 nt, Artificial Sequence
  Description of Artificial Sequence: Synthetic oligonucleotide
  Antisense strand to SEQ ID NO: 2364776
ugauaccucucauucacuc

SEQ ID NO: 2364778 - RNA, 19 nt, Artificial Sequence
  Description of Artificial Sequence: Synthetic oligonucleotide
  Sense strand starting at position 1405 of SEQ ID NO: 1885744
gggacuaaguuaccuugaa

SEQ ID NO: 2364779 - RNA, 19 nt, Artificial Sequence
  Description of Artificial Sequence: Synthetic oligonucleotide
  Antisense strand to SEQ ID NO: 2364778
uucaagguaacuuaguccc

SEQ ID NO: 2364780 - RNA, 19 nt, Artificial Sequence
  Description of Artificial Sequence: Synthetic oligonucleotide
  Sense strand starting at position 1406 of SEQ ID NO: 1885744
ggacuaaguuaccuugaag

SEQ ID NO: 2364781 - RNA, 19 nt, Artificial Sequence
  Description of Artificial Sequence: Synthetic oligonucleotide
  Antisense strand to SEQ ID NO: 2364780
cuucaagguaacuuagucc

SEQ ID NO: 2364782 - RNA, 19 nt, Artificial Sequence
  Description of Artificial Sequence: Synthetic oligonucleotide
  Sense strand starting at position 1409 of SEQ ID NO: 1885744
cuaaguuaccuugaagcuu

SEQ ID NO: 2364783 - RNA, 19 nt, Artificial Sequence
  Description of Artificial Sequence: Synthetic oligonucleotide
  Antisense strand to SEQ ID NO: 2364782
aagcuucaagguaacuuag

SEQ ID NO: 2364784 - RNA, 19 nt, Artificial Sequence
  Description of Artificial Sequence: Synthetic oligonucleotide
  Sense strand starting at position 1441 of SEQ ID NO: 1885744
caaagaugaucuguggcuu

SEQ ID NO: 2364785 - RNA, 19 nt, Artificial Sequence
  Description of Artificial Sequence: Synthetic oligonucleotide
  Antisense strand to SEQ ID NO: 2364784
aagccacagaucaucuuug

SEQ ID NO: 2364786 - RNA, 19 nt, Artificial Sequence
  Description of Artificial Sequence: Synthetic oligonucleotide
  Sense strand starting at position 2169 of SEQ ID NO: 1885744
gagagaaggucgaggauug

SEQ ID NO: 2364787 - RNA, 19 nt, Artificial Sequence
  Description of Artificial Sequence: Synthetic oligonucleotide
  Antisense strand to SEQ ID NO: 2364786
caauccucgaccuucucuc

SEQ ID NO: 2364788 - RNA, 19 nt, Artificial Sequence
  Description of Artificial Sequence: Synthetic oligonucleotide
  Sense strand starting at position 2180 of SEQ ID NO: 1885744
gaggauugggccgaagcuu

SEQ ID NO: 2364789 - RNA, 19 nt, Artificial Sequence
  Description of Artificial Sequence: Synthetic oligonucleotide
  Antisense strand to SEQ ID NO: 2364788
aagcuucggcccaauccuc

SEQ ID NO: 2364790 - RNA, 19 nt, Artificial Sequence
  Description of Artificial Sequence: Synthetic oligonucleotide
  Sense strand starting at position 2299 of SEQ ID NO: 1885744
ucuuuaauuccgggaggug

SEQ ID NO: 2364791 - RNA, 19 nt, Artificial Sequence
  Description of Artificial Sequence: Synthetic oligonucleotide
  Antisense strand to SEQ ID NO: 2364790
caccucccggaauuaaaga

SEQ ID NO: 2364792 - RNA, 19 nt, Artificial Sequence
  Description of Artificial Sequence: Synthetic oligonucleotide
  Sense strand starting at position 2300 of SEQ ID NO: 1885744
cuuuaauuccgggaggugu

SEQ ID NO: 2364793 - RNA, 19 nt, Artificial Sequence
  Description of Artificial Sequence: Synthetic oligonucleotide
  Antisense strand to SEQ ID NO: 2364792
acaccucccggaauuaaag

SEQ ID NO: 2364794 - RNA, 19 nt, Artificial Sequence
  Description of Artificial Sequence: Synthetic oligonucleotide
  Sense strand starting at position 2377 of SEQ ID NO: 1885744
cgucuuggaccggaggauu

SEQ ID NO: 2364795 - RNA, 19 nt, Artificial Sequence
  Description of Artificial Sequence: Synthetic oligonucleotide
  Antisense strand to SEQ ID NO: 2364794
aauccuccgguccaagacg

SEQ ID NO: 2364796 - RNA, 19 nt, Artificial Sequence
  Description of Artificial Sequence: Synthetic oligonucleotide
  Sense strand starting at position 2545 of SEQ ID NO: 1885744
gugccacugcuuguguaaa

SEQ ID NO: 2364797 - RNA, 19 nt, Artificial Sequence
  Description of Artificial Sequence: Synthetic oligonucleotide
  Antisense strand to SEQ ID NO: 2364796
uuuacacaagcaguggcac

SEQ ID NO: 2364798 - RNA, 19 nt, Artificial Sequence
  Description of Artificial Sequence: Synthetic oligonucleotide
  Sense strand starting at position 2679 of SEQ ID NO: 1885744
aagccagcgcucguuuaau

SEQ ID NO: 2364799 - RNA, 19 nt, Artificial Sequence
  Description of Artificial Sequence: Synthetic oligonucleotide
  Antisense strand to SEQ ID NO: 2364798
auuaaacgagcgcuggcuu

SEQ ID NO: 2364800 - RNA, 19 nt, Artificial Sequence
  Description of Artificial Sequence: Synthetic oligonucleotide
  Sense strand starting at position 2681 of SEQ ID NO: 1885744
gccagcgcucguuuaauua

SEQ ID NO: 2364801 - RNA, 19 nt, Artificial Sequence
  Description of Artificial Sequence: Synthetic oligonucleotide
  Antisense strand to SEQ ID NO: 2364800
uaauuaaacgagcgcuggc

SEQ ID NO: 2364802 - RNA, 19 nt, Artificial Sequence
  Description of Artificial Sequence: Synthetic oligonucleotide
  Sense strand starting at position 2693 of SEQ ID NO: 1885744
uuaauuaaugcagguggga

SEQ ID NO: 2364803 - RNA, 19 nt, Artificial Sequence
  Description of Artificial Sequence: Synthetic oligonucleotide
  Antisense strand to SEQ ID NO: 2364802
ucccaccugcauuaauuaa

SEQ ID NO: 2364804 - RNA, 19 nt, Artificial Sequence
  Description of Artificial Sequence: Synthetic oligonucleotide
  Sense strand starting at position 2824 of SEQ ID NO: 1885744
gcaaguuggacccgaaaga

SEQ ID NO: 2364805 - RNA, 19 nt, Artificial Sequence
  Description of Artificial Sequence: Synthetic oligonucleotide
  Antisense strand to SEQ ID NO: 2364804
ucuuucggguccaacuugc

SEQ ID NO: 2364806 - RNA, 19 nt, Artificial Sequence
  Description of Artificial Sequence: Synthetic oligonucleotide
  Sense strand starting at position 2883 of SEQ ID NO: 1885744
augagauauuuggagaugu

SEQ ID NO: 2364807 - RNA, 19 nt, Artificial Sequence
  Description of Artificial Sequence: Synthetic oligonucleotide
  Antisense strand to SEQ ID NO: 2364806
acaucuccaaauaucucau

SEQ ID NO: 2364808 - RNA, 19 nt, Artificial Sequence
  Description of Artificial Sequence: Synthetic oligonucleotide
  Sense strand starting at position 2933 of SEQ ID NO: 1885744
augguacauuuccagauaa

SEQ ID NO: 2364809 - RNA, 19 nt, Artificial Sequence
  Description of Artificial Sequence: Synthetic oligonucleotide
  Antisense strand to SEQ ID NO: 2364808
uuaucuggaaauguaccau

SEQ ID NO: 2364810 - RNA, 19 nt, Artificial Sequence
  Description of Artificial Sequence: Synthetic oligonucleotide
  Sense strand starting at position 3032 of SEQ ID NO: 1885744
aacuacaaacgucagagua

SEQ ID NO: 2364811 - RNA, 19 nt, Artificial Sequence
  Description of Artificial Sequence: Synthetic oligonucleotide
  Antisense strand to SEQ ID NO: 2364810
uacucugacguuuguaguu

SEQ ID NO: 2364812 - RNA, 19 nt, Artificial Sequence
  Description of Artificial Sequence: Synthetic oligonucleotide
  Sense strand starting at position 3229 of SEQ ID NO: 1885744
uuucgauacgguuagggaa

SEQ ID NO: 2364813 - RNA, 19 nt, Artificial Sequence
  Description of Artificial Sequence: Synthetic oligonucleotide
  Antisense strand to SEQ ID NO: 2364812
uucccuaaccguaucgaaa

SEQ ID NO: 2364814 - RNA, 19 nt, Artificial Sequence
  Description of Artificial Sequence: Synthetic oligonucleotide
  Sense strand starting at position 3275 of SEQ ID NO: 1885744
guaccauauguacaaguga

SEQ ID NO: 2364815 - RNA, 19 nt, Artificial Sequence
  Description of Artificial Sequence: Synthetic oligonucleotide
  Antisense strand to SEQ ID NO: 2364814
ucacuuguacauaugguac

SEQ ID NO: 2364816 - RNA, 19 nt, Artificial Sequence
  Description of Artificial Sequence: Synthetic oligonucleotide
  Sense strand starting at position 3325 of SEQ ID NO: 1885744
uguguuguuaaacacuaga

SEQ ID NO: 2364817 - RNA, 19 nt, Artificial Sequence
  Description of Artificial Sequence: Synthetic oligonucleotide
  Antisense strand to SEQ ID NO: 2364816
ucuaguguuuaacaacaca

SEQ ID NO: 2364818 - RNA, 19 nt, Artificial Sequence
  Description of Artificial Sequence: Synthetic oligonucleotide
  Sense strand starting at position 3328 of SEQ ID NO: 1885744
guuguuaaacacuagaguu

SEQ ID NO: 2364819 - RNA, 19 nt, Artificial Sequence
  Description of Artificial Sequence: Synthetic oligonucleotide
  Antisense strand to SEQ ID NO: 2364818
aacucuaguguuuaacaac

SEQ ID NO: 2364820 - RNA, 19 nt, Artificial Sequence
  Description of Artificial Sequence: Synthetic oligonucleotide
  Sense strand starting at position 3374 of SEQ ID NO: 1885744
aauggcucuugaguggaaa

SEQ ID NO: 2364821 - RNA, 19 nt, Artificial Sequence
  Description of Artificial Sequence: Synthetic oligonucleotide
  Antisense strand to SEQ ID NO: 2364820
uuuccacucaagagccauu

SEQ ID NO: 2364822 - RNA, 19 nt, Artificial Sequence
  Description of Artificial Sequence: Synthetic oligonucleotide
  Sense strand starting at position 3566 of SEQ ID NO: 1885744
auagaauaccagcagucua

SEQ ID NO: 2364823 - RNA, 19 nt, Artificial Sequence
  Description of Artificial Sequence: Synthetic oligonucleotide
  Antisense strand to SEQ ID NO: 2364822
uagacugcugguauucuau

SEQ ID NO: 2364824 - RNA, 19 nt, Artificial Sequence
  Description of Artificial Sequence: Synthetic oligonucleotide
  Sense strand starting at position 3678 of SEQ ID NO: 1885744
ucaaucuuugauugagggu

SEQ ID NO: 2364825 - RNA, 19 nt, Artificial Sequence
  Description of Artificial Sequence: Synthetic oligonucleotide
  Antisense strand to SEQ ID NO: 2364824
acccucaaucaaagauuga

SEQ ID NO: 2364826 - RNA, 19 nt, Artificial Sequence
  Description of Artificial Sequence: Synthetic oligonucleotide
  Sense strand starting at position 3794 of SEQ ID NO: 1885744
acagcuguugcuuagaaca

SEQ ID NO: 2364827 - RNA, 19 nt, Artificial Sequence
  Description of Artificial Sequence: Synthetic oligonucleotide
  Antisense strand to SEQ ID NO: 2364826
uguucuaagcaacagcugu

SEQ ID NO: 2364828 - RNA, 19 nt, Artificial Sequence
  Description of Artificial Sequence: Synthetic oligonucleotide
  Sense strand starting at position 3930 of SEQ ID NO: 1885744
auggaaacauccuugccua

SEQ ID NO: 2364829 - RNA, 19 nt, Artificial Sequence
  Description of Artificial Sequence: Synthetic oligonucleotide
  Antisense strand to SEQ ID NO: 2364828
uaggcaaggauguuuccau

SEQ ID NO: 2364830 - RNA, 19 nt, Artificial Sequence
  Description of Artificial Sequence: Synthetic oligonucleotide
  Sense strand starting at position 3931 of SEQ ID NO: 1885744
uggaaacauccuugccuau

SEQ ID NO: 2364831 - RNA, 19 nt, Artificial Sequence
  Description of Artificial Sequence: Synthetic oligonucleotide
  Antisense strand to SEQ ID NO: 2364830
auaggcaaggauguuucca

SEQ ID NO: 2364832 - RNA, 19 nt, Artificial Sequence
  Description of Artificial Sequence: Synthetic oligonucleotide
  Sense strand starting at position 3938 of SEQ ID NO: 1885744
auccuugccuaugugagaa

SEQ ID NO: 2364833 - RNA, 19 nt, Artificial Sequence
  Description of Artificial Sequence: Synthetic oligonucleotide
  Antisense strand to SEQ ID NO: 2364832
uucucacauaggcaaggau

SEQ ID NO: 2364834 - RNA, 19 nt, Artificial Sequence
  Description of Artificial Sequence: Synthetic oligonucleotide
  Sense strand starting at position 3950 of SEQ ID NO: 1885744
gugagaaauuguucucugg

SEQ ID NO: 2364835 - RNA, 19 nt, Artificial Sequence
  Description of Artificial Sequence: Synthetic oligonucleotide
  Antisense strand to SEQ ID NO: 2364834
ccagagaacaauuucucac

SEQ ID NO: 2364836 - RNA, 19 nt, Artificial Sequence
  Description of Artificial Sequence: Synthetic oligonucleotide
  Sense strand starting at position 3952 of SEQ ID NO: 1885744
gagaaauuguucucuggac

SEQ ID NO: 2364837 - RNA, 19 nt, Artificial Sequence
  Description of Artificial Sequence: Synthetic oligonucleotide
  Antisense strand to SEQ ID NO: 2364836
guccagagaacaauuucuc

SEQ ID NO: 2364838 - RNA, 19 nt, Artificial Sequence
  Description of Artificial Sequence: Synthetic oligonucleotide
  Sense strand starting at position 3954 of SEQ ID NO: 1885744
gaaauuguucucuggacca

SEQ ID NO: 2364839 - RNA, 19 nt, Artificial Sequence
  Description of Artificial Sequence: Synthetic oligonucleotide
  Antisense strand to SEQ ID NO: 2364838
ugguccagagaacaauuuc

SEQ ID NO: 2364840 - RNA, 19 nt, Artificial Sequence
  Description of Artificial Sequence: Synthetic oligonucleotide
  Sense strand starting at position 3956 of SEQ ID NO: 1885744
aauuguucucuggaccagu

SEQ ID NO: 2364841 - RNA, 19 nt, Artificial Sequence
  Description of Artificial Sequence: Synthetic oligonucleotide
  Antisense strand to SEQ ID NO: 2364840
acugguccagagaacaauu

SEQ ID NO: 2364842 - RNA, 19 nt, Artificial Sequence
  Description of Artificial Sequence: Synthetic oligonucleotide
  Sense strand starting at position 3959 of SEQ ID NO: 1885744
uguucucuggaccaguaau

SEQ ID NO: 2364843 - RNA, 19 nt, Artificial Sequence
  Description of Artificial Sequence: Synthetic oligonucleotide
  Antisense strand to SEQ ID NO: 2364842
auuacugguccagagaaca

SEQ ID NO: 2364844 - RNA, 19 nt, Artificial Sequence
  Description of Artificial Sequence: Synthetic oligonucleotide
  Sense strand starting at position 27 of SEQ ID NO: 1885745
uguucuaauugucuaucuu

SEQ ID NO: 2364845 - RNA, 19 nt, Artificial Sequence
  Description of Artificial Sequence: Synthetic oligonucleotide
  Antisense strand to SEQ ID NO: 2364844
aagauagacaauuagaaca

SEQ ID NO: 2364846 - RNA, 19 nt, Artificial Sequence
  Description of Artificial Sequence: Synthetic oligonucleotide
  Sense strand starting at position 28 of SEQ ID NO: 1885745
guucuaauugucuaucuuc

SEQ ID NO: 2364847 - RNA, 19 nt, Artificial Sequence
  Description of Artificial Sequence: Synthetic oligonucleotide
  Antisense strand to SEQ ID NO: 2364846
gaagauagacaauuagaac

SEQ ID NO: 2364848 - RNA, 19 nt, Artificial Sequence
  Description of Artificial Sequence: Synthetic oligonucleotide
  Sense strand starting at position 72 of SEQ ID NO: 1885745
uucucuugccuguagaguu

SEQ ID NO: 2364849 - RNA, 19 nt, Artificial Sequence
  Description of Artificial Sequence: Synthetic oligonucleotide
  Antisense strand to SEQ ID NO: 2364848
aacucuacaggcaagagaa

SEQ ID NO: 2364850 - RNA, 19 nt, Artificial Sequence
  Description of Artificial Sequence: Synthetic oligonucleotide
  Sense strand starting at position 80 of SEQ ID NO: 1885745
ccuguagaguucuuugcuu

SEQ ID NO: 2364851 - RNA, 19 nt, Artificial Sequence
  Description of Artificial Sequence: Synthetic oligonucleotide
  Antisense strand to SEQ ID NO: 2364850
aagcaaagaacucuacagg

SEQ ID NO: 2364852 - RNA, 19 nt, Artificial Sequence
  Description of Artificial Sequence: Synthetic oligonucleotide
  Sense strand starting at position 84 of SEQ ID NO: 1885745
uagaguucuuugcuugucu

SEQ ID NO: 2364853 - RNA, 19 nt, Artificial Sequence
  Description of Artificial Sequence: Synthetic oligonucleotide
  Antisense strand to SEQ ID NO: 2364852
agacaagcaaagaacucua

SEQ ID NO: 2364854 - RNA, 19 nt, Artificial Sequence
  Description of Artificial Sequence: Synthetic oligonucleotide
  Sense strand starting at position 86 of SEQ ID NO: 1885745
gaguucuuugcuugucucu

SEQ ID NO: 2364855 - RNA, 19 nt, Artificial Sequence
  Description of Artificial Sequence: Synthetic oligonucleotide
  Antisense strand to SEQ ID NO: 2364854
agagacaagcaaagaacuc

SEQ ID NO: 2364856 - RNA, 19 nt, Artificial Sequence
  Description of Artificial Sequence: Synthetic oligonucleotide
  Sense strand starting at position 180 of SEQ ID NO: 1885745
cuagguuaguguucccuuu

SEQ ID NO: 2364857 - RNA, 19 nt, Artificial Sequence
  Description of Artificial Sequence: Synthetic oligonucleotide
  Antisense strand to SEQ ID NO: 2364856
aaagggaacacuaaccuag

SEQ ID NO: 2364858 - RNA, 19 nt, Artificial Sequence
  Description of Artificial Sequence: Synthetic oligonucleotide
  Sense strand starting at position 246 of SEQ ID NO: 1885745
cuuugauuauuuguguucu

SEQ ID NO: 2364859 - RNA, 19 nt, Artificial Sequence
  Description of Artificial Sequence: Synthetic oligonucleotide
  Antisense strand to SEQ ID NO: 2364858
agaacacaaauaaucaaag

SEQ ID NO: 2364860 - RNA, 19 nt, Artificial Sequence
  Description of Artificial Sequence: Synthetic oligonucleotide
  Sense strand starting at position 252 of SEQ ID NO: 1885745
uuauuuguguucugauagg

SEQ ID NO: 2364861 - RNA, 19 nt, Artificial Sequence
  Description of Artificial Sequence: Synthetic oligonucleotide
  Antisense strand to SEQ ID NO: 2364860
ccuaucagaacacaaauaa

SEQ ID NO: 2364862 - RNA, 19 nt, Artificial Sequence
  Description of Artificial Sequence: Synthetic oligonucleotide
  Sense strand starting at position 282 of SEQ ID NO: 1885745
uuucaugaggguugggaca

SEQ ID NO: 2364863 - RNA, 19 nt, Artificial Sequence
  Description of Artificial Sequence: Synthetic oligonucleotide
  Antisense strand to SEQ ID NO: 2364862
ugucccaacccucaugaaa

SEQ ID NO: 2364864 - RNA, 19 nt, Artificial Sequence
  Description of Artificial Sequence: Synthetic oligonucleotide
  Sense strand starting at position 295 of SEQ ID NO: 1885745
gggacagucuugucauguu

SEQ ID NO: 2364865 - RNA, 19 nt, Artificial Sequence
  Description of Artificial Sequence: Synthetic oligonucleotide
  Antisense strand to SEQ ID NO: 2364864
aacaugacaagacuguccc

SEQ ID NO: 2364866 - RNA, 19 nt, Artificial Sequence
  Description of Artificial Sequence: Synthetic oligonucleotide
  Sense strand starting at position 302 of SEQ ID NO: 1885745
ucuugucauguuuaucauu

SEQ ID NO: 2364867 - RNA, 19 nt, Artificial Sequence
  Description of Artificial Sequence: Synthetic oligonucleotide
  Antisense strand to SEQ ID NO: 2364866
aaugauaaacaugacaaga

SEQ ID NO: 2364868 - RNA, 19 nt, Artificial Sequence
  Description of Artificial Sequence: Synthetic oligonucleotide
  Sense strand starting at position 2156 of SEQ ID NO: 1885745
cuaagacgcauuugaguuu

SEQ ID NO: 2364869 - RNA, 19 nt, Artificial Sequence
  Description of Artificial Sequence: Synthetic oligonucleotide
  Antisense strand to SEQ ID NO: 2364868
aaacucaaaugcgucuuag

SEQ ID NO: 2364870 - RNA, 19 nt, Artificial Sequence
  Description of Artificial Sequence: Synthetic oligonucleotide
  Sense strand starting at position 2167 of SEQ ID NO: 1885745
uugaguuugcuccacccau

SEQ ID NO: 2364871 - RNA, 19 nt, Artificial Sequence
  Description of Artificial Sequence: Synthetic oligonucleotide
  Antisense strand to SEQ ID NO: 2364870
auggguggagcaaacucaa

SEQ ID NO: 2364872 - RNA, 19 nt, Artificial Sequence
  Description of Artificial Sequence: Synthetic oligonucleotide
  Sense strand starting at position 2188 of SEQ ID NO: 1885745
uuaggacuuuagccaauga

SEQ ID NO: 2364873 - RNA, 19 nt, Artificial Sequence
  Description of Artificial Sequence: Synthetic oligonucleotide
  Antisense strand to SEQ ID NO: 2364872
ucauuggcuaaaguccuaa

SEQ ID NO: 2364874 - RNA, 19 nt, Artificial Sequence
  Description of Artificial Sequence: Synthetic oligonucleotide
  Sense strand starting at position 2229 of SEQ ID NO: 1885745
ccgcgaaaccagugagguu

SEQ ID NO: 2364875 - RNA, 19 nt, Artificial Sequence
  Description of Artificial Sequence: Synthetic oligonucleotide
  Antisense strand to SEQ ID NO: 2364874
aaccucacugguuucgcgg

SEQ ID NO: 2364876 - RNA, 19 nt, Artificial Sequence
  Description of Artificial Sequence: Synthetic oligonucleotide
  Sense strand starting at position 2230 of SEQ ID NO: 1885745
cgcgaaaccagugagguua

SEQ ID NO: 2364877 - RNA, 19 nt, Artificial Sequence
  Description of Artificial Sequence: Synthetic oligonucleotide
  Antisense strand to SEQ ID NO: 2364876
uaaccucacugguuucgcg

SEQ ID NO: 2364878 - RNA, 19 nt, Artificial Sequence
  Description of Artificial Sequence: Synthetic oligonucleotide
  Sense strand starting at position 2367 of SEQ ID NO: 1885745
ccuagacucuaggaacuau

SEQ ID NO: 2364879 - RNA, 19 nt, Artificial Sequence
  Description of Artificial Sequence: Synthetic oligonucleotide
  Antisense strand to SEQ ID NO: 2364878
auaguuccuagagucuagg

SEQ ID NO: 2364880 - RNA, 19 nt, Artificial Sequence
  Description of Artificial Sequence: Synthetic oligonucleotide
  Sense strand starting at position 2611 of SEQ ID NO: 1885745
cuggaaguguuagcuacuu

SEQ ID NO: 2364881 - RNA, 19 nt, Artificial Sequence
  Description of Artificial Sequence: Synthetic oligonucleotide
  Antisense strand to SEQ ID NO: 2364880
aaguagcuaacacuuccag

SEQ ID NO: 2364882 - RNA, 19 nt, Artificial Sequence
  Description of Artificial Sequence: Synthetic oligonucleotide
  Sense strand starting at position 2613 of SEQ ID NO: 1885745
ggaaguguuagcuacuuaa

SEQ ID NO: 2364883 - RNA, 19 nt, Artificial Sequence
  Description of Artificial Sequence: Synthetic oligonucleotide
  Antisense strand to SEQ ID NO: 2364882
uuaaguagcuaacacuucc

SEQ ID NO: 2364884 - RNA, 19 nt, Artificial Sequence
  Description of Artificial Sequence: Synthetic oligonucleotide
  Sense strand starting at position 2616 of SEQ ID NO: 1885745
aguguuagcuacuuaaaug

SEQ ID NO: 2364885 - RNA, 19 nt, Artificial Sequence
  Description of Artificial Sequence: Synthetic oligonucleotide
  Antisense strand to SEQ ID NO: 2364884
cauuuaaguagcuaacacu

SEQ ID NO: 2364886 - RNA, 19 nt, Artificial Sequence
  Description of Artificial Sequence: Synthetic oligonucleotide
  Sense strand starting at position 2617 of SEQ ID NO: 1885745
guguuagcuacuuaaaugu

SEQ ID NO: 2364887 - RNA, 19 nt, Artificial Sequence
  Description of Artificial Sequence: Synthetic oligonucleotide
  Antisense strand to SEQ ID NO: 2364886
acauuuaaguagcuaacac

SEQ ID NO: 2364888 - RNA, 19 nt, Artificial Sequence
  Description of Artificial Sequence: Synthetic oligonucleotide
  Sense strand starting at position 2676 of SEQ ID NO: 1885745
uguaucuugcaccgauaaa

SEQ ID NO: 2364889 - RNA, 19 nt, Artificial Sequence
  Description of Artificial Sequence: Synthetic oligonucleotide
  Antisense strand to SEQ ID NO: 2364888
uuuaucggugcaagauaca

SEQ ID NO: 2364890 - RNA, 19 nt, Artificial Sequence
  Description of Artificial Sequence: Synthetic oligonucleotide
  Sense strand starting at position 2677 of SEQ ID NO: 1885745
guaucuugcaccgauaaag

SEQ ID NO: 2364891 - RNA, 19 nt, Artificial Sequence
  Description of Artificial Sequence: Synthetic oligonucleotide
  Antisense strand to SEQ ID NO: 2364890
cuuuaucggugcaagauac

SEQ ID NO: 2364892 - RNA, 19 nt, Artificial Sequence
  Description of Artificial Sequence: Synthetic oligonucleotide
  Sense strand starting at position 2873 of SEQ ID NO: 1885745
caaucucuagucugucgaa

SEQ ID NO: 2364893 - RNA, 19 nt, Artificial Sequence
  Description of Artificial Sequence: Synthetic oligonucleotide
  Antisense strand to SEQ ID NO: 2364892
uucgacagacuagagauug

SEQ ID NO: 2364894 - RNA, 19 nt, Artificial Sequence
  Description of Artificial Sequence: Synthetic oligonucleotide
  Sense strand starting at position 2901 of SEQ ID NO: 1885745
ucacuauguugaccuuuau

SEQ ID NO: 2364895 - RNA, 19 nt, Artificial Sequence
  Description of Artificial Sequence: Synthetic oligonucleotide
  Antisense strand to SEQ ID NO: 2364894
auaaaggucaacauaguga

SEQ ID NO: 2364896 - RNA, 19 nt, Artificial Sequence
  Description of Artificial Sequence: Synthetic oligonucleotide
  Sense strand starting at position 2984 of SEQ ID NO: 1885745
aagauugagcccugggaca

SEQ ID NO: 2364897 - RNA, 19 nt, Artificial Sequence
  Description of Artificial Sequence: Synthetic oligonucleotide
  Antisense strand to SEQ ID NO: 2364896
ugucccagggcucaaucuu

SEQ ID NO: 2364898 - RNA, 19 nt, Artificial Sequence
  Description of Artificial Sequence: Synthetic oligonucleotide
  Sense strand starting at position 3068 of SEQ ID NO: 1885745
gcggagugucgcuuuguca

SEQ ID NO: 2364899 - RNA, 19 nt, Artificial Sequence
  Description of Artificial Sequence: Synthetic oligonucleotide
  Antisense strand to SEQ ID NO: 2364898
ugacaaagcgacacuccgc

SEQ ID NO: 2364900 - RNA, 19 nt, Artificial Sequence
  Description of Artificial Sequence: Synthetic oligonucleotide
  Sense strand starting at position 3449 of SEQ ID NO: 1885745
gguguuugugcccagcuaa

SEQ ID NO: 2364901 - RNA, 19 nt, Artificial Sequence
  Description of Artificial Sequence: Synthetic oligonucleotide
  Antisense strand to SEQ ID NO: 2364900
uuagcugggcacaaacacc

SEQ ID NO: 2364902 - RNA, 19 nt, Artificial Sequence
  Description of Artificial Sequence: Synthetic oligonucleotide
  Sense strand starting at position 3517 of SEQ ID NO: 1885745
uuucgugaauucuucccga

SEQ ID NO: 2364903 - RNA, 19 nt, Artificial Sequence
  Description of Artificial Sequence: Synthetic oligonucleotide
  Antisense strand to SEQ ID NO: 2364902
ucgggaagaauucacgaaa

SEQ ID NO: 2364904 - RNA, 19 nt, Artificial Sequence
  Description of Artificial Sequence: Synthetic oligonucleotide
  Sense strand starting at position 3520 of SEQ ID NO: 1885745
cgugaauucuucccgaauu

SEQ ID NO: 2364905 - RNA, 19 nt, Artificial Sequence
  Description of Artificial Sequence: Synthetic oligonucleotide
  Antisense strand to SEQ ID NO: 2364904
aauucgggaagaauucacg

SEQ ID NO: 2364906 - RNA, 19 nt, Artificial Sequence
  Description of Artificial Sequence: Synthetic oligonucleotide
  Sense strand starting at position 3531 of SEQ ID NO: 1885745
cccgaauuggucugacagu

SEQ ID NO: 2364907 - RNA, 19 nt, Artificial Sequence
  Description of Artificial Sequence: Synthetic oligonucleotide
  Antisense strand to SEQ ID NO: 2364906
acugucagaccaauucggg

SEQ ID NO: 2364908 - RNA, 19 nt, Artificial Sequence
  Description of Artificial Sequence: Synthetic oligonucleotide
  Sense strand starting at position 3550 of SEQ ID NO: 1885745
gguucucucugcuccuuua

SEQ ID NO: 2364909 - RNA, 19 nt, Artificial Sequence
  Description of Artificial Sequence: Synthetic oligonucleotide
  Antisense strand to SEQ ID NO: 2364908
uaaaggagcagagagaacc

SEQ ID NO: 2364910 - RNA, 19 nt, Artificial Sequence
  Description of Artificial Sequence: Synthetic oligonucleotide
  Sense strand starting at position 3609 of SEQ ID NO: 1885745
uaggaacugacgugauugu

SEQ ID NO: 2364911 - RNA, 19 nt, Artificial Sequence
  Description of Artificial Sequence: Synthetic oligonucleotide
  Antisense strand to SEQ ID NO: 2364910
acaaucacgucaguuccua

SEQ ID NO: 2364912 - RNA, 19 nt, Artificial Sequence
  Description of Artificial Sequence: Synthetic oligonucleotide
  Sense strand starting at position 3618 of SEQ ID NO: 1885745
acgugauugugggucucua

SEQ ID NO: 2364913 - RNA, 19 nt, Artificial Sequence
  Description of Artificial Sequence: Synthetic oligonucleotide
  Antisense strand to SEQ ID NO: 2364912
uagagacccacaaucacgu

SEQ ID NO: 2364914 - RNA, 19 nt, Artificial Sequence
  Description of Artificial Sequence: Synthetic oligonucleotide
  Sense strand starting at position 3622 of SEQ ID NO: 1885745
gauugugggucucuaauac

SEQ ID NO: 2364915 - RNA, 19 nt, Artificial Sequence
  Description of Artificial Sequence: Synthetic oligonucleotide
  Antisense strand to SEQ ID NO: 2364914
guauuagagacccacaauc

SEQ ID NO: 2364916 - RNA, 19 nt, Artificial Sequence
  Description of Artificial Sequence: Synthetic oligonucleotide
  Sense strand starting at position 3670 of SEQ ID NO: 1885745
acucuauguggaugagauu

SEQ ID NO: 2364917 - RNA, 19 nt, Artificial Sequence
  Description of Artificial Sequence: Synthetic oligonucleotide
  Antisense strand to SEQ ID NO: 2364916
aaucucauccacauagagu

SEQ ID NO: 2364918 - RNA, 19 nt, Artificial Sequence
  Description of Artificial Sequence: Synthetic oligonucleotide
  Sense strand starting at position 3681 of SEQ ID NO: 1885745
augagauugaguggaccuu

SEQ ID NO: 2364919 - RNA, 19 nt, Artificial Sequence
  Description of Artificial Sequence: Synthetic oligonucleotide
  Antisense strand to SEQ ID NO: 2364918
aagguccacucaaucucau

SEQ ID NO: 2364920 - RNA, 19 nt, Artificial Sequence
  Description of Artificial Sequence: Synthetic oligonucleotide
  Sense strand starting at position 3700 of SEQ ID NO: 1885745
gacccauaaguugggacau

SEQ ID NO: 2364921 - RNA, 19 nt, Artificial Sequence
  Description of Artificial Sequence: Synthetic oligonucleotide
  Antisense strand to SEQ ID NO: 2364920
augucccaacuuauggguc

SEQ ID NO: 2364922 - RNA, 19 nt, Artificial Sequence
  Description of Artificial Sequence: Synthetic oligonucleotide
  Sense strand starting at position 3702 of SEQ ID NO: 1885745
cccauaaguugggacauga

SEQ ID NO: 2364923 - RNA, 19 nt, Artificial Sequence
  Description of Artificial Sequence: Synthetic oligonucleotide
  Antisense strand to SEQ ID NO: 2364922
ucaugucccaacuuauggg

SEQ ID NO: 2364924 - RNA, 19 nt, Artificial Sequence
  Description of Artificial Sequence: Synthetic oligonucleotide
  Sense strand starting at position 428 of SEQ ID NO: 1885746
ugguucugggaguaaagua

SEQ ID NO: 2364925 - RNA, 19 nt, Artificial Sequence
  Description of Artificial Sequence: Synthetic oligonucleotide
  Antisense strand to SEQ ID NO: 2364924
uacuuuacucccagaacca

SEQ ID NO: 2364926 - RNA, 19 nt, Artificial Sequence
  Description of Artificial Sequence: Synthetic oligonucleotide
  Sense strand starting at position 498 of SEQ ID NO: 1885746
agcugaagacuguaguaga

SEQ ID NO: 2364927 - RNA, 19 nt, Artificial Sequence
  Description of Artificial Sequence: Synthetic oligonucleotide
  Antisense strand to SEQ ID NO: 2364926
ucuacuacagucuucagcu

SEQ ID NO: 2364928 - RNA, 19 nt, Artificial Sequence
  Description of Artificial Sequence: Synthetic oligonucleotide
  Sense strand starting at position 564 of SEQ ID NO: 1885746
gcaguacgaaaugacuauu

SEQ ID NO: 2364929 - RNA, 19 nt, Artificial Sequence
  Description of Artificial Sequence: Synthetic oligonucleotide
  Antisense strand to SEQ ID NO: 2364928
aauagucauuucguacugc

SEQ ID NO: 2364930 - RNA, 19 nt, Artificial Sequence
  Description of Artificial Sequence: Synthetic oligonucleotide
  Sense strand starting at position 592 of SEQ ID NO: 1885746
agugaacagacaugucaag

SEQ ID NO: 2364931 - RNA, 19 nt, Artificial Sequence
  Description of Artificial Sequence: Synthetic oligonucleotide
  Antisense strand to SEQ ID NO: 2364930
cuugacaugucuguucacu

SEQ ID NO: 2364932 - RNA, 19 nt, Artificial Sequence
  Description of Artificial Sequence: Synthetic oligonucleotide
  Sense strand starting at position 631 of SEQ ID NO: 1885746
ucuggaguucuugggagaa

SEQ ID NO: 2364933 - RNA, 19 nt, Artificial Sequence
  Description of Artificial Sequence: Synthetic oligonucleotide
  Antisense strand to SEQ ID NO: 2364932
uucucccaagaacuccaga

SEQ ID NO: 2364934 - RNA, 19 nt, Artificial Sequence
  Description of Artificial Sequence: Synthetic oligonucleotide
  Sense strand starting at position 782 of SEQ ID NO: 1885746
agguuuguagaaugaaaua

SEQ ID NO: 2364935 - RNA, 19 nt, Artificial Sequence
  Description of Artificial Sequence: Synthetic oligonucleotide
  Antisense strand to SEQ ID NO: 2364934
uauuucauucuacaaaccu

SEQ ID NO: 2364936 - RNA, 19 nt, Artificial Sequence
  Description of Artificial Sequence: Synthetic oligonucleotide
  Sense strand starting at position 887 of SEQ ID NO: 1885746
auggcagaacuuuagcauu

SEQ ID NO: 2364937 - RNA, 19 nt, Artificial Sequence
  Description of Artificial Sequence: Synthetic oligonucleotide
  Antisense strand to SEQ ID NO: 2364936
aaugcuaaaguucugccau

SEQ ID NO: 2364938 - RNA, 19 nt, Artificial Sequence
  Description of Artificial Sequence: Synthetic oligonucleotide
  Sense strand starting at position 932 of SEQ ID NO: 1885746
agacauaaguugccuauua

SEQ ID NO: 2364939 - RNA, 19 nt, Artificial Sequence
  Description of Artificial Sequence: Synthetic oligonucleotide
  Antisense strand to SEQ ID NO: 2364938
uaauaggcaacuuaugucu

SEQ ID NO: 2364940 - RNA, 19 nt, Artificial Sequence
  Description of Artificial Sequence: Synthetic oligonucleotide
  Sense strand starting at position 979 of SEQ ID NO: 1885746
uaaggcugagcaugagaau

SEQ ID NO: 2364941 - RNA, 19 nt, Artificial Sequence
  Description of Artificial Sequence: Synthetic oligonucleotide
  Antisense strand to SEQ ID NO: 2364940
auucucaugcucagccuua

SEQ ID NO: 2364942 - RNA, 19 nt, Artificial Sequence
  Description of Artificial Sequence: Synthetic oligonucleotide
  Sense strand starting at position 1112 of SEQ ID NO: 1885746
ggaguaaacugacugcaca

SEQ ID NO: 2364943 - RNA, 19 nt, Artificial Sequence
  Description of Artificial Sequence: Synthetic oligonucleotide
  Antisense strand to SEQ ID NO: 2364942
ugugcagucaguuuacucc

SEQ ID NO: 2364944 - RNA, 19 nt, Artificial Sequence
  Description of Artificial Sequence: Synthetic oligonucleotide
  Sense strand starting at position 1113 of SEQ ID NO: 1885746
gaguaaacugacugcacau

SEQ ID NO: 2364945 - RNA, 19 nt, Artificial Sequence
  Description of Artificial Sequence: Synthetic oligonucleotide
  Antisense strand to SEQ ID NO: 2364944
augugcagucaguuuacuc

SEQ ID NO: 2364946 - RNA, 19 nt, Artificial Sequence
  Description of Artificial Sequence: Synthetic oligonucleotide
  Sense strand starting at position 1115 of SEQ ID NO: 1885746
guaaacugacugcacauau

SEQ ID NO: 2364947 - RNA, 19 nt, Artificial Sequence
  Description of Artificial Sequence: Synthetic oligonucleotide
  Antisense strand to SEQ ID NO: 2364946
auaugugcagucaguuuac

SEQ ID NO: 2364948 - RNA, 19 nt, Artificial Sequence
  Description of Artificial Sequence: Synthetic oligonucleotide
  Sense strand starting at position 1132 of SEQ ID NO: 1885746
augcaauacguuuaacaaa

SEQ ID NO: 2364949 - RNA, 19 nt, Artificial Sequence
  Description of Artificial Sequence: Synthetic oligonucleotide
  Antisense strand to SEQ ID NO: 2364948
uuuguuaaacguauugcau

SEQ ID NO: 2364950 - RNA, 19 nt, Artificial Sequence
  Description of Artificial Sequence: Synthetic oligonucleotide
  Sense strand starting at position 1269 of SEQ ID NO: 1885746
gcuguuagguaauuuguau

SEQ ID NO: 2364951 - RNA, 19 nt, Artificial Sequence
  Description of Artificial Sequence: Synthetic oligonucleotide
  Antisense strand to SEQ ID NO: 2364950
auacaaauuaccuaacagc

SEQ ID NO: 2364952 - RNA, 19 nt, Artificial Sequence
  Description of Artificial Sequence: Synthetic oligonucleotide
  Sense strand starting at position 1393 of SEQ ID NO: 1885746
gucaaugaucugcacacuu

SEQ ID NO: 2364953 - RNA, 19 nt, Artificial Sequence
  Description of Artificial Sequence: Synthetic oligonucleotide
  Antisense strand to SEQ ID NO: 2364952
aagugugcagaucauugac

SEQ ID NO: 2364954 - RNA, 19 nt, Artificial Sequence
  Description of Artificial Sequence: Synthetic oligonucleotide
  Sense strand starting at position 1418 of SEQ ID NO: 1885746
agagaaggccugugaauca

SEQ ID NO: 2364955 - RNA, 19 nt, Artificial Sequence
  Description of Artificial Sequence: Synthetic oligonucleotide
  Antisense strand to SEQ ID NO: 2364954
ugauucacaggccuucucu

SEQ ID NO: 2364956 - RNA, 19 nt, Artificial Sequence
  Description of Artificial Sequence: Synthetic oligonucleotide
  Sense strand starting at position 1570 of SEQ ID NO: 1885746
ucccuaaguggcugaagaa

SEQ ID NO: 2364957 - RNA, 19 nt, Artificial Sequence
  Description of Artificial Sequence: Synthetic oligonucleotide
  Antisense strand to SEQ ID NO: 2364956
uucuucagccacuuaggga

SEQ ID NO: 2364958 - RNA, 19 nt, Artificial Sequence
  Description of Artificial Sequence: Synthetic oligonucleotide
  Sense strand starting at position 1790 of SEQ ID NO: 1885746
ccauguggucuguccgagu

SEQ ID NO: 2364959 - RNA, 19 nt, Artificial Sequence
  Description of Artificial Sequence: Synthetic oligonucleotide
  Antisense strand to SEQ ID NO: 2364958
acucggacagaccacaugg

SEQ ID NO: 2364960 - RNA, 19 nt, Artificial Sequence
  Description of Artificial Sequence: Synthetic oligonucleotide
  Sense strand starting at position 2166 of SEQ ID NO: 1885746
ggcgucgugguaucugaga

SEQ ID NO: 2364961 - RNA, 19 nt, Artificial Sequence
  Description of Artificial Sequence: Synthetic oligonucleotide
  Antisense strand to SEQ ID NO: 2364960
ucucagauaccacgacgcc

SEQ ID NO: 2364962 - RNA, 19 nt, Artificial Sequence
  Description of Artificial Sequence: Synthetic oligonucleotide
  Sense strand starting at position 2269 of SEQ ID NO: 1885746
gggagagaugcugguauac

SEQ ID NO: 2364963 - RNA, 19 nt, Artificial Sequence
  Description of Artificial Sequence: Synthetic oligonucleotide
  Antisense strand to SEQ ID NO: 2364962
guauaccagcaucucuccc

SEQ ID NO: 2364964 - RNA, 19 nt, Artificial Sequence
  Description of Artificial Sequence: Synthetic oligonucleotide
  Sense strand starting at position 2315 of SEQ ID NO: 1885746
gcgcgaaguaaccugucuu

SEQ ID NO: 2364965 - RNA, 19 nt, Artificial Sequence
  Description of Artificial Sequence: Synthetic oligonucleotide
  Antisense strand to SEQ ID NO: 2364964
aagacagguuacuucgcgc

SEQ ID NO: 2364966 - RNA, 19 nt, Artificial Sequence
  Description of Artificial Sequence: Synthetic oligonucleotide
  Sense strand starting at position 2388 of SEQ ID NO: 1885746
gugcucaggcucucgugaa

SEQ ID NO: 2364967 - RNA, 19 nt, Artificial Sequence
  Description of Artificial Sequence: Synthetic oligonucleotide
  Antisense strand to SEQ ID NO: 2364966
uucacgagagccugagcac

SEQ ID NO: 2364968 - RNA, 19 nt, Artificial Sequence
  Description of Artificial Sequence: Synthetic oligonucleotide
  Sense strand starting at position 2498 of SEQ ID NO: 1885746
aguuaaagauaagucugau

SEQ ID NO: 2364969 - RNA, 19 nt, Artificial Sequence
  Description of Artificial Sequence: Synthetic oligonucleotide
  Antisense strand to SEQ ID NO: 2364968
aucagacuuaucuuuaacu

SEQ ID NO: 2364970 - RNA, 19 nt, Artificial Sequence
  Description of Artificial Sequence: Synthetic oligonucleotide
  Sense strand starting at position 2691 of SEQ ID NO: 1885746
ggcagugugcucagggaau

SEQ ID NO: 2364971 - RNA, 19 nt, Artificial Sequence
  Description of Artificial Sequence: Synthetic oligonucleotide
  Antisense strand to SEQ ID NO: 2364970
auucccugagcacacugcc

SEQ ID NO: 2364972 - RNA, 19 nt, Artificial Sequence
  Description of Artificial Sequence: Synthetic oligonucleotide
  Sense strand starting at position 2704 of SEQ ID NO: 1885746
gggaaugacuuucugagug

SEQ ID NO: 2364973 - RNA, 19 nt, Artificial Sequence
  Description of Artificial Sequence: Synthetic oligonucleotide
  Antisense strand to SEQ ID NO: 2364972
cacucagaaagucauuccc

SEQ ID NO: 2364974 - RNA, 19 nt, Artificial Sequence
  Description of Artificial Sequence: Synthetic oligonucleotide
  Sense strand starting at position 2708 of SEQ ID NO: 1885746
augacuuucugagugagug

SEQ ID NO: 2364975 - RNA, 19 nt, Artificial Sequence
  Description of Artificial Sequence: Synthetic oligonucleotide
  Antisense strand to SEQ ID NO: 2364974
cacucacucagaaagucau

SEQ ID NO: 2364976 - RNA, 19 nt, Artificial Sequence
  Description of Artificial Sequence: Synthetic oligonucleotide
  Sense strand starting at position 2709 of SEQ ID NO: 1885746
ugacuuucugagugaguga

SEQ ID NO: 2364977 - RNA, 19 nt, Artificial Sequence
  Description of Artificial Sequence: Synthetic oligonucleotide
  Antisense strand to SEQ ID NO: 2364976
ucacucacucagaaaguca

SEQ ID NO: 2364978 - RNA, 19 nt, Artificial Sequence
  Description of Artificial Sequence: Synthetic oligonucleotide
  Sense strand starting at position 2710 of SEQ ID NO: 1885746
gacuuucugagugagugau

SEQ ID NO: 2364979 - RNA, 19 nt, Artificial Sequence
  Description of Artificial Sequence: Synthetic oligonucleotide
  Antisense strand to SEQ ID NO: 2364978
aucacucacucagaaaguc

SEQ ID NO: 2364980 - RNA, 19 nt, Artificial Sequence
  Description of Artificial Sequence: Synthetic oligonucleotide
  Sense strand starting at position 2997 of SEQ ID NO: 1885746
gacacaguauuauugugaa

SEQ ID NO: 2364981 - RNA, 19 nt, Artificial Sequence
  Description of Artificial Sequence: Synthetic oligonucleotide
  Antisense strand to SEQ ID NO: 2364980
uucacaauaauacuguguc

SEQ ID NO: 2364982 - RNA, 19 nt, Artificial Sequence
  Description of Artificial Sequence: Synthetic oligonucleotide
  Sense strand starting at position 3071 of SEQ ID NO: 1885746
uuugguaaauggcccaaua

SEQ ID NO: 2364983 - RNA, 19 nt, Artificial Sequence
  Description of Artificial Sequence: Synthetic oligonucleotide
  Antisense strand to SEQ ID NO: 2364982
uauugggccauuuaccaaa

SEQ ID NO: 2364984 - RNA, 19 nt, Artificial Sequence
  Description of Artificial Sequence: Synthetic oligonucleotide
  Sense strand starting at position 3073 of SEQ ID NO: 1885746
ugguaaauggcccaauaau

SEQ ID NO: 2364985 - RNA, 19 nt, Artificial Sequence
  Description of Artificial Sequence: Synthetic oligonucleotide
  Antisense strand to SEQ ID NO: 2364984
auuauugggccauuuacca

SEQ ID NO: 2364986 - RNA, 19 nt, Artificial Sequence
  Description of Artificial Sequence: Synthetic oligonucleotide
  Sense strand starting at position 3335 of SEQ ID NO: 1885746
augucagagcauuacauua

SEQ ID NO: 2364987 - RNA, 19 nt, Artificial Sequence
  Description of Artificial Sequence: Synthetic oligonucleotide
  Antisense strand to SEQ ID NO: 2364986
uaauguaaugcucugacau

SEQ ID NO: 2364988 - RNA, 19 nt, Artificial Sequence
  Description of Artificial Sequence: Synthetic oligonucleotide
  Sense strand starting at position 3399 of SEQ ID NO: 1885746
ugaucacuugcugaagauu

SEQ ID NO: 2364989 - RNA, 19 nt, Artificial Sequence
  Description of Artificial Sequence: Synthetic oligonucleotide
  Antisense strand to SEQ ID NO: 2364988
aaucuucagcaagugauca

SEQ ID NO: 2364990 - RNA, 19 nt, Artificial Sequence
  Description of Artificial Sequence: Synthetic oligonucleotide
  Sense strand starting at position 3473 of SEQ ID NO: 1885746
cuuugagaauauguacaca

SEQ ID NO: 2364991 - RNA, 19 nt, Artificial Sequence
  Description of Artificial Sequence: Synthetic oligonucleotide
  Antisense strand to SEQ ID NO: 2364990
uguguacauauucucaaag

SEQ ID NO: 2364992 - RNA, 19 nt, Artificial Sequence
  Description of Artificial Sequence: Synthetic oligonucleotide
  Sense strand starting at position 3559 of SEQ ID NO: 1885746
uuacaaugguugccaaaug

SEQ ID NO: 2364993 - RNA, 19 nt, Artificial Sequence
  Description of Artificial Sequence: Synthetic oligonucleotide
  Antisense strand to SEQ ID NO: 2364992
cauuuggcaaccauuguaa

SEQ ID NO: 2364994 - RNA, 19 nt, Artificial Sequence
  Description of Artificial Sequence: Synthetic oligonucleotide
  Sense strand starting at position 3741 of SEQ ID NO: 1885746
gggauacuaguuggaaagu

SEQ ID NO: 2364995 - RNA, 19 nt, Artificial Sequence
  Description of Artificial Sequence: Synthetic oligonucleotide
  Antisense strand to SEQ ID NO: 2364994
acuuuccaacuaguauccc

SEQ ID NO: 2364996 - RNA, 19 nt, Artificial Sequence
  Description of Artificial Sequence: Synthetic oligonucleotide
  Sense strand starting at position 3772 of SEQ ID NO: 1885746
gugagcuagcaguaaugga

SEQ ID NO: 2364997 - RNA, 19 nt, Artificial Sequence
  Description of Artificial Sequence: Synthetic oligonucleotide
  Antisense strand to SEQ ID NO: 2364996
uccauuacugcuagcucac

SEQ ID NO: 2364998 - RNA, 19 nt, Artificial Sequence
  Description of Artificial Sequence: Synthetic oligonucleotide
  Sense strand starting at position 3779 of SEQ ID NO: 1885746
agcaguaauggagagugau

SEQ ID NO: 2364999 - RNA, 19 nt, Artificial Sequence
  Description of Artificial Sequence: Synthetic oligonucleotide
  Antisense strand to SEQ ID NO: 2364998
aucacucuccauuacugcu

SEQ ID NO: 2365000 - RNA, 19 nt, Artificial Sequence
  Description of Artificial Sequence: Synthetic oligonucleotide
  Sense strand starting at position 3789 of SEQ ID NO: 1885746
gagagugauuuggacuaaa

SEQ ID NO: 2365001 - RNA, 19 nt, Artificial Sequence
  Description of Artificial Sequence: Synthetic oligonucleotide
  Antisense strand to SEQ ID NO: 2365000
uuuaguccaaaucacucuc

SEQ ID NO: 2365002 - RNA, 19 nt, Artificial Sequence
  Description of Artificial Sequence: Synthetic oligonucleotide
  Sense strand starting at position 3958 of SEQ ID NO: 1885746
gggcacuauggaugaauga

SEQ ID NO: 2365003 - RNA, 19 nt, Artificial Sequence
  Description of Artificial Sequence: Synthetic oligonucleotide
  Antisense strand to SEQ ID NO: 2365002
ucauucauccauagugccc

SEQ ID NO: 2365004 - RNA, 19 nt, Artificial Sequence
  Description of Artificial Sequence: Synthetic oligonucleotide
  Sense strand starting at position 237 of SEQ ID NO: 1885747
uuuaaacuuugaucguaga

SEQ ID NO: 2365005 - RNA, 19 nt, Artificial Sequence
  Description of Artificial Sequence: Synthetic oligonucleotide
  Antisense strand to SEQ ID NO: 2365004
ucuacgaucaaaguuuaaa

SEQ ID NO: 2365006 - RNA, 19 nt, Artificial Sequence
  Description of Artificial Sequence: Synthetic oligonucleotide
  Sense strand starting at position 238 of SEQ ID NO: 1885747
uuaaacuuugaucguagaa

SEQ ID NO: 2365007 - RNA, 19 nt, Artificial Sequence
  Description of Artificial Sequence: Synthetic oligonucleotide
  Antisense strand to SEQ ID NO: 2365006
uucuacgaucaaaguuuaa

SEQ ID NO: 2365008 - RNA, 19 nt, Artificial Sequence
  Description of Artificial Sequence: Synthetic oligonucleotide
  Sense strand starting at position 250 of SEQ ID NO: 1885747
cguagaauuauggaugcuu

SEQ ID NO: 2365009 - RNA, 19 nt, Artificial Sequence
  Description of Artificial Sequence: Synthetic oligonucleotide
  Antisense strand to SEQ ID NO: 2365008
aagcauccauaauucuacg

SEQ ID NO: 2365010 - RNA, 19 nt, Artificial Sequence
  Description of Artificial Sequence: Synthetic oligonucleotide
  Sense strand starting at position 557 of SEQ ID NO: 1885747
ccacguaaauggguaaaca

SEQ ID NO: 2365011 - RNA, 19 nt, Artificial Sequence
  Description of Artificial Sequence: Synthetic oligonucleotide
  Antisense strand to SEQ ID NO: 2365010
uguuuacccauuuacgugg

SEQ ID NO: 2365012 - RNA, 19 nt, Artificial Sequence
  Description of Artificial Sequence: Synthetic oligonucleotide
  Sense strand starting at position 576 of SEQ ID NO: 1885747
aguccauaaggauguccua

SEQ ID NO: 2365013 - RNA, 19 nt, Artificial Sequence
  Description of Artificial Sequence: Synthetic oligonucleotide
  Antisense strand to SEQ ID NO: 2365012
uaggacauccuuauggacu

SEQ ID NO: 2365014 - RNA, 19 nt, Artificial Sequence
  Description of Artificial Sequence: Synthetic oligonucleotide
  Sense strand starting at position 579 of SEQ ID NO: 1885747
ccauaaggauguccuaauu

SEQ ID NO: 2365015 - RNA, 19 nt, Artificial Sequence
  Description of Artificial Sequence: Synthetic oligonucleotide
  Antisense strand to SEQ ID NO: 2365014
aauuaggacauccuuaugg

SEQ ID NO: 2365016 - RNA, 19 nt, Artificial Sequence
  Description of Artificial Sequence: Synthetic oligonucleotide
  Sense strand starting at position 766 of SEQ ID NO: 1885747
cuuuaugacucaccucagu

SEQ ID NO: 2365017 - RNA, 19 nt, Artificial Sequence
  Description of Artificial Sequence: Synthetic oligonucleotide
  Antisense strand to SEQ ID NO: 2365016
acugaggugagucauaaag

SEQ ID NO: 2365018 - RNA, 19 nt, Artificial Sequence
  Description of Artificial Sequence: Synthetic oligonucleotide
  Sense strand starting at position 779 of SEQ ID NO: 1885747
cucaguaaucacugagaug

SEQ ID NO: 2365019 - RNA, 19 nt, Artificial Sequence
  Description of Artificial Sequence: Synthetic oligonucleotide
  Antisense strand to SEQ ID NO: 2365018
caucucagugauuacugag

SEQ ID NO: 2365020 - RNA, 19 nt, Artificial Sequence
  Description of Artificial Sequence: Synthetic oligonucleotide
  Sense strand starting at position 876 of SEQ ID NO: 1885747
ccaauauagcaguaggguu

SEQ ID NO: 2365021 - RNA, 19 nt, Artificial Sequence
  Description of Artificial Sequence: Synthetic oligonucleotide
  Antisense strand to SEQ ID NO: 2365020
aacccuacugcuauauugg

SEQ ID NO: 2365022 - RNA, 19 nt, Artificial Sequence
  Description of Artificial Sequence: Synthetic oligonucleotide
  Sense strand starting at position 901 of SEQ ID NO: 1885747
agagguauugaggguaacu

SEQ ID NO: 2365023 - RNA, 19 nt, Artificial Sequence
  Description of Artificial Sequence: Synthetic oligonucleotide
  Antisense strand to SEQ ID NO: 2365022
aguuacccucaauaccucu

SEQ ID NO: 2365024 - RNA, 19 nt, Artificial Sequence
  Description of Artificial Sequence: Synthetic oligonucleotide
  Sense strand starting at position 924 of SEQ ID NO: 1885747
ggaucuauccagugugacu

SEQ ID NO: 2365025 - RNA, 19 nt, Artificial Sequence
  Description of Artificial Sequence: Synthetic oligonucleotide
  Antisense strand to SEQ ID NO: 2365024
agucacacuggauagaucc

SEQ ID NO: 2365026 - RNA, 19 nt, Artificial Sequence
  Description of Artificial Sequence: Synthetic oligonucleotide
  Sense strand starting at position 937 of SEQ ID NO: 1885747
gugacuaggucacucacua

SEQ ID NO: 2365027 - RNA, 19 nt, Artificial Sequence
  Description of Artificial Sequence: Synthetic oligonucleotide
  Antisense strand to SEQ ID NO: 2365026
uagugagugaccuagucac

SEQ ID NO: 2365028 - RNA, 19 nt, Artificial Sequence
  Description of Artificial Sequence: Synthetic oligonucleotide
  Sense strand starting at position 941 of SEQ ID NO: 1885747
cuaggucacucacuagaaa

SEQ ID NO: 2365029 - RNA, 19 nt, Artificial Sequence
  Description of Artificial Sequence: Synthetic oligonucleotide
  Antisense strand to SEQ ID NO: 2365028
uuucuagugagugaccuag

SEQ ID NO: 2365030 - RNA, 19 nt, Artificial Sequence
  Description of Artificial Sequence: Synthetic oligonucleotide
  Sense strand starting at position 1069 of SEQ ID NO: 1885747
uggauuacugacgauaugu

SEQ ID NO: 2365031 - RNA, 19 nt, Artificial Sequence
  Description of Artificial Sequence: Synthetic oligonucleotide
  Antisense strand to SEQ ID NO: 2365030
acauaucgucaguaaucca

SEQ ID NO: 2365032 - RNA, 19 nt, Artificial Sequence
  Description of Artificial Sequence: Synthetic oligonucleotide
  Sense strand starting at position 1071 of SEQ ID NO: 1885747
gauuacugacgauauguca

SEQ ID NO: 2365033 - RNA, 19 nt, Artificial Sequence
  Description of Artificial Sequence: Synthetic oligonucleotide
  Antisense strand to SEQ ID NO: 2365032
ugacauaucgucaguaauc

SEQ ID NO: 2365034 - RNA, 19 nt, Artificial Sequence
  Description of Artificial Sequence: Synthetic oligonucleotide
  Sense strand starting at position 1300 of SEQ ID NO: 1885747
gugacagacccuugucuaa

SEQ ID NO: 2365035 - RNA, 19 nt, Artificial Sequence
  Description of Artificial Sequence: Synthetic oligonucleotide
  Antisense strand to SEQ ID NO: 2365034
uuagacaagggucugucac

SEQ ID NO: 2365036 - RNA, 19 nt, Artificial Sequence
  Description of Artificial Sequence: Synthetic oligonucleotide
  Sense strand starting at position 1336 of SEQ ID NO: 1885747
cugcgcuggcaaguaaauu

SEQ ID NO: 2365037 - RNA, 19 nt, Artificial Sequence
  Description of Artificial Sequence: Synthetic oligonucleotide
  Antisense strand to SEQ ID NO: 2365036
aauuuacuugccagcgcag

SEQ ID NO: 2365038 - RNA, 19 nt, Artificial Sequence
  Description of Artificial Sequence: Synthetic oligonucleotide
  Sense strand starting at position 1418 of SEQ ID NO: 1885747
cgcggaaaccucuacccau

SEQ ID NO: 2365039 - RNA, 19 nt, Artificial Sequence
  Description of Artificial Sequence: Synthetic oligonucleotide
  Antisense strand to SEQ ID NO: 2365038
auggguagagguuuccgcg

SEQ ID NO: 2365040 - RNA, 19 nt, Artificial Sequence
  Description of Artificial Sequence: Synthetic oligonucleotide
  Sense strand starting at position 1496 of SEQ ID NO: 1885747
gugccaaucagguggagaa

SEQ ID NO: 2365041 - RNA, 19 nt, Artificial Sequence
  Description of Artificial Sequence: Synthetic oligonucleotide
  Antisense strand to SEQ ID NO: 2365040
uucuccaccugauuggcac

SEQ ID NO: 2365042 - RNA, 19 nt, Artificial Sequence
  Description of Artificial Sequence: Synthetic oligonucleotide
  Sense strand starting at position 1550 of SEQ ID NO: 1885747
gaaagauugcagugggaca

SEQ ID NO: 2365043 - RNA, 19 nt, Artificial Sequence
  Description of Artificial Sequence: Synthetic oligonucleotide
  Antisense strand to SEQ ID NO: 2365042
ugucccacugcaaucuuuc

SEQ ID NO: 2365044 - RNA, 19 nt, Artificial Sequence
  Description of Artificial Sequence: Synthetic oligonucleotide
  Sense strand starting at position 1785 of SEQ ID NO: 1885747
cagucaaucggacaaccau

SEQ ID NO: 2365045 - RNA, 19 nt, Artificial Sequence
  Description of Artificial Sequence: Synthetic oligonucleotide
  Antisense strand to SEQ ID NO: 2365044
augguuguccgauugacug

SEQ ID NO: 2365046 - RNA, 19 nt, Artificial Sequence
  Description of Artificial Sequence: Synthetic oligonucleotide
  Sense strand starting at position 1820 of SEQ ID NO: 1885747
uucugacagcucugagacu

SEQ ID NO: 2365047 - RNA, 19 nt, Artificial Sequence
  Description of Artificial Sequence: Synthetic oligonucleotide
  Antisense strand to SEQ ID NO: 2365046
agucucagagcugucagaa

SEQ ID NO: 2365048 - RNA, 19 nt, Artificial Sequence
  Description of Artificial Sequence: Synthetic oligonucleotide
  Sense strand starting at position 1854 of SEQ ID NO: 1885747
aggugcuguccuggaggaa

SEQ ID NO: 2365049 - RNA, 19 nt, Artificial Sequence
  Description of Artificial Sequence: Synthetic oligonucleotide
  Antisense strand to SEQ ID NO: 2365048
uuccuccaggacagcaccu

SEQ ID NO: 2365050 - RNA, 19 nt, Artificial Sequence
  Description of Artificial Sequence: Synthetic oligonucleotide
  Sense strand starting at position 1855 of SEQ ID NO: 1885747
ggugcuguccuggaggaaa

SEQ ID NO: 2365051 - RNA, 19 nt, Artificial Sequence
  Description of Artificial Sequence: Synthetic oligonucleotide
  Antisense strand to SEQ ID NO: 2365050
uuuccuccaggacagcacc

SEQ ID NO: 2365052 - RNA, 19 nt, Artificial Sequence
  Description of Artificial Sequence: Synthetic oligonucleotide
  Sense strand starting at position 1924 of SEQ ID NO: 1885747
cccuucucgccagaaacau

SEQ ID NO: 2365053 - RNA, 19 nt, Artificial Sequence
  Description of Artificial Sequence: Synthetic oligonucleotide
  Antisense strand to SEQ ID NO: 2365052
auguuucuggcgagaaggg

SEQ ID NO: 2365054 - RNA, 19 nt, Artificial Sequence
  Description of Artificial Sequence: Synthetic oligonucleotide
  Sense strand starting at position 2185 of SEQ ID NO: 1885747
ucaggacuugcuuacucaa

SEQ ID NO: 2365055 - RNA, 19 nt, Artificial Sequence
  Description of Artificial Sequence: Synthetic oligonucleotide
  Antisense strand to SEQ ID NO: 2365054
uugaguaagcaaguccuga

SEQ ID NO: 2365056 - RNA, 19 nt, Artificial Sequence
  Description of Artificial Sequence: Synthetic oligonucleotide
  Sense strand starting at position 2187 of SEQ ID NO: 1885747
aggacuugcuuacucaaua

SEQ ID NO: 2365057 - RNA, 19 nt, Artificial Sequence
  Description of Artificial Sequence: Synthetic oligonucleotide
  Antisense strand to SEQ ID NO: 2365056
uauugaguaagcaaguccu

SEQ ID NO: 2365058 - RNA, 19 nt, Artificial Sequence
  Description of Artificial Sequence: Synthetic oligonucleotide
  Sense strand starting at position 2188 of SEQ ID NO: 1885747
ggacuugcuuacucaauaa

SEQ ID NO: 2365059 - RNA, 19 nt, Artificial Sequence
  Description of Artificial Sequence: Synthetic oligonucleotide
  Antisense strand to SEQ ID NO: 2365058
uuauugaguaagcaagucc

SEQ ID NO: 2365060 - RNA, 19 nt, Artificial Sequence
  Description of Artificial Sequence: Synthetic oligonucleotide
  Sense strand starting at position 2240 of SEQ ID NO: 1885747
gccaaucauaaguggaaga

SEQ ID NO: 2365061 - RNA, 19 nt, Artificial Sequence
  Description of Artificial Sequence: Synthetic oligonucleotide
  Antisense strand to SEQ ID NO: 2365060
ucuuccacuuaugauuggc

SEQ ID NO: 2365062 - RNA, 19 nt, Artificial Sequence
  Description of Artificial Sequence: Synthetic oligonucleotide
  Sense strand starting at position 3368 of SEQ ID NO: 1885747
ggagcuaucuguccuggag

SEQ ID NO: 2365063 - RNA, 19 nt, Artificial Sequence
  Description of Artificial Sequence: Synthetic oligonucleotide
  Antisense strand to SEQ ID NO: 2365062
cuccaggacagauagcucc

SEQ ID NO: 2365064 - RNA, 19 nt, Artificial Sequence
  Description of Artificial Sequence: Synthetic oligonucleotide
  Sense strand starting at position 3788 of SEQ ID NO: 1885747
cguggaaugucauuuguuu

SEQ ID NO: 2365065 - RNA, 19 nt, Artificial Sequence
  Description of Artificial Sequence: Synthetic oligonucleotide
  Antisense strand to SEQ ID NO: 2365064
aaacaaaugacauuccacg

SEQ ID NO: 2365066 - RNA, 19 nt, Artificial Sequence
  Description of Artificial Sequence: Synthetic oligonucleotide
  Sense strand starting at position 3849 of SEQ ID NO: 1885747
auaggaggauguguugaau

SEQ ID NO: 2365067 - RNA, 19 nt, Artificial Sequence
  Description of Artificial Sequence: Synthetic oligonucleotide
  Antisense strand to SEQ ID NO: 2365066
auucaacacauccuccuau

SEQ ID NO: 2365068 - RNA, 19 nt, Artificial Sequence
  Description of Artificial Sequence: Synthetic oligonucleotide
  Sense strand starting at position 3853 of SEQ ID NO: 1885747
gaggauguguugaaugggu

SEQ ID NO: 2365069 - RNA, 19 nt, Artificial Sequence
  Description of Artificial Sequence: Synthetic oligonucleotide
  Antisense strand to SEQ ID NO: 2365068
acccauucaacacauccuc

SEQ ID NO: 2365070 - RNA, 19 nt, Artificial Sequence
  Description of Artificial Sequence: Synthetic oligonucleotide
  Sense strand starting at position 3855 of SEQ ID NO: 1885747
ggauguguugaauggguga

SEQ ID NO: 2365071 - RNA, 19 nt, Artificial Sequence
  Description of Artificial Sequence: Synthetic oligonucleotide
  Antisense strand to SEQ ID NO: 2365070
ucacccauucaacacaucc

SEQ ID NO: 2365072 - RNA, 19 nt, Artificial Sequence
  Description of Artificial Sequence: Synthetic oligonucleotide
  Sense strand starting at position 3857 of SEQ ID NO: 1885747
auguguugaaugggugaaa

SEQ ID NO: 2365073 - RNA, 19 nt, Artificial Sequence
  Description of Artificial Sequence: Synthetic oligonucleotide
  Antisense strand to SEQ ID NO: 2365072
uuucacccauucaacacau

SEQ ID NO: 2365074 - RNA, 19 nt, Artificial Sequence
  Description of Artificial Sequence: Synthetic oligonucleotide
  Sense strand starting at position 3875 of SEQ ID NO: 1885747
aaaugaucugugugucuaa

SEQ ID NO: 2365075 - RNA, 19 nt, Artificial Sequence
  Description of Artificial Sequence: Synthetic oligonucleotide
  Antisense strand to SEQ ID NO: 2365074
uuagacacacagaucauuu

SEQ ID NO: 2365076 - RNA, 19 nt, Artificial Sequence
  Description of Artificial Sequence: Synthetic oligonucleotide
  Sense strand starting at position 3876 of SEQ ID NO: 1885747
aaugaucugugugucuaaa

SEQ ID NO: 2365077 - RNA, 19 nt, Artificial Sequence
  Description of Artificial Sequence: Synthetic oligonucleotide
  Antisense strand to SEQ ID NO: 2365076
uuuagacacacagaucauu

SEQ ID NO: 2365078 - RNA, 19 nt, Artificial Sequence
  Description of Artificial Sequence: Synthetic oligonucleotide
  Sense strand starting at position 3887 of SEQ ID NO: 1885747
ugucuaaaugcggaguuua

SEQ ID NO: 2365079 - RNA, 19 nt, Artificial Sequence
  Description of Artificial Sequence: Synthetic oligonucleotide
  Antisense strand to SEQ ID NO: 2365078
uaaacuccgcauuuagaca

SEQ ID NO: 2365080 - RNA, 19 nt, Artificial Sequence
  Description of Artificial Sequence: Synthetic oligonucleotide
  Sense strand starting at position 3916 of SEQ ID NO: 1885747
guagcaguacuuuggaaag

SEQ ID NO: 2365081 - RNA, 19 nt, Artificial Sequence
  Description of Artificial Sequence: Synthetic oligonucleotide
  Antisense strand to SEQ ID NO: 2365080
cuuuccaaaguacugcuac

SEQ ID NO: 2365082 - RNA, 19 nt, Artificial Sequence
  Description of Artificial Sequence: Synthetic oligonucleotide
  Sense strand starting at position 3957 of SEQ ID NO: 1885747
uguccauucggauaguauu

SEQ ID NO: 2365083 - RNA, 19 nt, Artificial Sequence
  Description of Artificial Sequence: Synthetic oligonucleotide
  Antisense strand to SEQ ID NO: 2365082
aauacuauccgaauggaca

SEQ ID NO: 2365084 - RNA, 19 nt, Artificial Sequence
  Description of Artificial Sequence: Synthetic oligonucleotide
  Sense strand starting at position 281 of SEQ ID NO: 1885748
ucauucugucuagauaaug

SEQ ID NO: 2365085 - RNA, 19 nt, Artificial Sequence
  Description of Artificial Sequence: Synthetic oligonucleotide
  Antisense strand to SEQ ID NO: 2365084
cauuaucuagacagaauga

SEQ ID NO: 2365086 - RNA, 19 nt, Artificial Sequence
  Description of Artificial Sequence: Synthetic oligonucleotide
  Sense strand starting at position 375 of SEQ ID NO: 1885748
ucaccaaaucugggaagca

SEQ ID NO: 2365087 - RNA, 19 nt, Artificial Sequence
  Description of Artificial Sequence: Synthetic oligonucleotide
  Antisense strand to SEQ ID NO: 2365086
ugcuucccagauuugguga

SEQ ID NO: 2365088 - RNA, 19 nt, Artificial Sequence
  Description of Artificial Sequence: Synthetic oligonucleotide
  Sense strand starting at position 390 of SEQ ID NO: 1885748
agcauuaacgauuaugcuu

SEQ ID NO: 2365089 - RNA, 19 nt, Artificial Sequence
  Description of Artificial Sequence: Synthetic oligonucleotide
  Antisense strand to SEQ ID NO: 2365088
aagcauaaucguuaaugcu

SEQ ID NO: 2365090 - RNA, 19 nt, Artificial Sequence
  Description of Artificial Sequence: Synthetic oligonucleotide
  Sense strand starting at position 449 of SEQ ID NO: 1885748
aaggucucagagugacuuu

SEQ ID NO: 2365091 - RNA, 19 nt, Artificial Sequence
  Description of Artificial Sequence: Synthetic oligonucleotide
  Antisense strand to SEQ ID NO: 2365090
aaagucacucugagaccuu

SEQ ID NO: 2365092 - RNA, 19 nt, Artificial Sequence
  Description of Artificial Sequence: Synthetic oligonucleotide
  Sense strand starting at position 575 of SEQ ID NO: 1885748
aggauacaguuaucucuuu

SEQ ID NO: 2365093 - RNA, 19 nt, Artificial Sequence
  Description of Artificial Sequence: Synthetic oligonucleotide
  Antisense strand to SEQ ID NO: 2365092
aaagagauaacuguauccu

SEQ ID NO: 2365094 - RNA, 19 nt, Artificial Sequence
  Description of Artificial Sequence: Synthetic oligonucleotide
  Sense strand starting at position 661 of SEQ ID NO: 1885748
uguuucuugcuacauuaua

SEQ ID NO: 2365095 - RNA, 19 nt, Artificial Sequence
  Description of Artificial Sequence: Synthetic oligonucleotide
  Antisense strand to SEQ ID NO: 2365094
uauaauguagcaagaaaca

SEQ ID NO: 2365096 - RNA, 19 nt, Artificial Sequence
  Description of Artificial Sequence: Synthetic oligonucleotide
  Sense strand starting at position 806 of SEQ ID NO: 1885748
auuauauuacugugcaaga

SEQ ID NO: 2365097 - RNA, 19 nt, Artificial Sequence
  Description of Artificial Sequence: Synthetic oligonucleotide
  Antisense strand to SEQ ID NO: 2365096
ucuugcacaguaauauaau

SEQ ID NO: 2365098 - RNA, 19 nt, Artificial Sequence
  Description of Artificial Sequence: Synthetic oligonucleotide
  Sense strand starting at position 807 of SEQ ID NO: 1885748
uuauauuacugugcaagac

SEQ ID NO: 2365099 - RNA, 19 nt, Artificial Sequence
  Description of Artificial Sequence: Synthetic oligonucleotide
  Antisense strand to SEQ ID NO: 2365098
gucuugcacaguaauauaa

SEQ ID NO: 2365100 - RNA, 19 nt, Artificial Sequence
  Description of Artificial Sequence: Synthetic oligonucleotide
  Sense strand starting at position 894 of SEQ ID NO: 1885748
cuaaauucucuaugguaag

SEQ ID NO: 2365101 - RNA, 19 nt, Artificial Sequence
  Description of Artificial Sequence: Synthetic oligonucleotide
  Antisense strand to SEQ ID NO: 2365100
cuuaccauagagaauuuag

SEQ ID NO: 2365102 - RNA, 19 nt, Artificial Sequence
  Description of Artificial Sequence: Synthetic oligonucleotide
  Sense strand starting at position 913 of SEQ ID NO: 1885748
agaucaagggucuggcuua

SEQ ID NO: 2365103 - RNA, 19 nt, Artificial Sequence
  Description of Artificial Sequence: Synthetic oligonucleotide
  Antisense strand to SEQ ID NO: 2365102
uaagccagacccuugaucu

SEQ ID NO: 2365104 - RNA, 19 nt, Artificial Sequence
  Description of Artificial Sequence: Synthetic oligonucleotide
  Sense strand starting at position 918 of SEQ ID NO: 1885748
aagggucuggcuuauaauc

SEQ ID NO: 2365105 - RNA, 19 nt, Artificial Sequence
  Description of Artificial Sequence: Synthetic oligonucleotide
  Antisense strand to SEQ ID NO: 2365104
gauuauaagccagacccuu

SEQ ID NO: 2365106 - RNA, 19 nt, Artificial Sequence
  Description of Artificial Sequence: Synthetic oligonucleotide
  Sense strand starting at position 962 of SEQ ID NO: 1885748
agcgcaauacauuacuauu

SEQ ID NO: 2365107 - RNA, 19 nt, Artificial Sequence
  Description of Artificial Sequence: Synthetic oligonucleotide
  Antisense strand to SEQ ID NO: 2365106
aauaguaauguauugcgcu

SEQ ID NO: 2365108 - RNA, 19 nt, Artificial Sequence
  Description of Artificial Sequence: Synthetic oligonucleotide
  Sense strand starting at position 968 of SEQ ID NO: 1885748
auacauuacuauuccgagu

SEQ ID NO: 2365109 - RNA, 19 nt, Artificial Sequence
  Description of Artificial Sequence: Synthetic oligonucleotide
  Antisense strand to SEQ ID NO: 2365108
acucggaauaguaauguau

SEQ ID NO: 2365110 - RNA, 19 nt, Artificial Sequence
  Description of Artificial Sequence: Synthetic oligonucleotide
  Sense strand starting at position 974 of SEQ ID NO: 1885748
uacuauuccgaguaacuga

SEQ ID NO: 2365111 - RNA, 19 nt, Artificial Sequence
  Description of Artificial Sequence: Synthetic oligonucleotide
  Antisense strand to SEQ ID NO: 2365110
ucaguuacucggaauagua

SEQ ID NO: 2365112 - RNA, 19 nt, Artificial Sequence
  Description of Artificial Sequence: Synthetic oligonucleotide
  Sense strand starting at position 979 of SEQ ID NO: 1885748
uuccgaguaacugauaguu

SEQ ID NO: 2365113 - RNA, 19 nt, Artificial Sequence
  Description of Artificial Sequence: Synthetic oligonucleotide
  Antisense strand to SEQ ID NO: 2365112
aacuaucaguuacucggaa

SEQ ID NO: 2365114 - RNA, 19 nt, Artificial Sequence
  Description of Artificial Sequence: Synthetic oligonucleotide
  Sense strand starting at position 995 of SEQ ID NO: 1885748
guuucuuuccacuacaggu

SEQ ID NO: 2365115 - RNA, 19 nt, Artificial Sequence
  Description of Artificial Sequence: Synthetic oligonucleotide
  Antisense strand to SEQ ID NO: 2365114
accuguaguggaaagaaac

SEQ ID NO: 2365116 - RNA, 19 nt, Artificial Sequence
  Description of Artificial Sequence: Synthetic oligonucleotide
  Sense strand starting at position 1120 of SEQ ID NO: 1885748
agagcagcucuagaauuga

SEQ ID NO: 2365117 - RNA, 19 nt, Artificial Sequence
  Description of Artificial Sequence: Synthetic oligonucleotide
  Antisense strand to SEQ ID NO: 2365116
ucaauucuagagcugcucu

SEQ ID NO: 2365118 - RNA, 19 nt, Artificial Sequence
  Description of Artificial Sequence: Synthetic oligonucleotide
  Sense strand starting at position 1131 of SEQ ID NO: 1885748
agaauugagucacucauuc

SEQ ID NO: 2365119 - RNA, 19 nt, Artificial Sequence
  Description of Artificial Sequence: Synthetic oligonucleotide
  Antisense strand to SEQ ID NO: 2365118
gaaugagugacucaauucu

SEQ ID NO: 2365120 - RNA, 19 nt, Artificial Sequence
  Description of Artificial Sequence: Synthetic oligonucleotide
  Sense strand starting at position 1135 of SEQ ID NO: 1885748
uugagucacucauucuauc

SEQ ID NO: 2365121 - RNA, 19 nt, Artificial Sequence
  Description of Artificial Sequence: Synthetic oligonucleotide
  Antisense strand to SEQ ID NO: 2365120
gauagaaugagugacucaa

SEQ ID NO: 2365122 - RNA, 19 nt, Artificial Sequence
  Description of Artificial Sequence: Synthetic oligonucleotide
  Sense strand starting at position 1158 of SEQ ID NO: 1885748
ucccaaagaugucuugaac

SEQ ID NO: 2365123 - RNA, 19 nt, Artificial Sequence
  Description of Artificial Sequence: Synthetic oligonucleotide
  Antisense strand to SEQ ID NO: 2365122
guucaagacaucuuuggga

SEQ ID NO: 2365124 - RNA, 19 nt, Artificial Sequence
  Description of Artificial Sequence: Synthetic oligonucleotide
  Sense strand starting at position 1169 of SEQ ID NO: 1885748
ucuugaacucuguagauau

SEQ ID NO: 2365125 - RNA, 19 nt, Artificial Sequence
  Description of Artificial Sequence: Synthetic oligonucleotide
  Antisense strand to SEQ ID NO: 2365124
auaucuacagaguucaaga

SEQ ID NO: 2365126 - RNA, 19 nt, Artificial Sequence
  Description of Artificial Sequence: Synthetic oligonucleotide
  Sense strand starting at position 1714 of SEQ ID NO: 1885748
guaccaugacagggcaauu

SEQ ID NO: 2365127 - RNA, 19 nt, Artificial Sequence
  Description of Artificial Sequence: Synthetic oligonucleotide
  Antisense strand to SEQ ID NO: 2365126
aauugcccugucaugguac

SEQ ID NO: 2365128 - RNA, 19 nt, Artificial Sequence
  Description of Artificial Sequence: Synthetic oligonucleotide
  Sense strand starting at position 2082 of SEQ ID NO: 1885748
caggccucuugaguggaua

SEQ ID NO: 2365129 - RNA, 19 nt, Artificial Sequence
  Description of Artificial Sequence: Synthetic oligonucleotide
  Antisense strand to SEQ ID NO: 2365128
uauccacucaagaggccug

SEQ ID NO: 2365130 - RNA, 19 nt, Artificial Sequence
  Description of Artificial Sequence: Synthetic oligonucleotide
  Sense strand starting at position 2084 of SEQ ID NO: 1885748
ggccucuugaguggauaga

SEQ ID NO: 2365131 - RNA, 19 nt, Artificial Sequence
  Description of Artificial Sequence: Synthetic oligonucleotide
  Antisense strand to SEQ ID NO: 2365130
ucuauccacucaagaggcc

SEQ ID NO: 2365132 - RNA, 19 nt, Artificial Sequence
  Description of Artificial Sequence: Synthetic oligonucleotide
  Sense strand starting at position 2093 of SEQ ID NO: 1885748
aguggauagacgugaaacu

SEQ ID NO: 2365133 - RNA, 19 nt, Artificial Sequence
  Description of Artificial Sequence: Synthetic oligonucleotide
  Antisense strand to SEQ ID NO: 2365132
aguuucacgucuauccacu

SEQ ID NO: 2365134 - RNA, 19 nt, Artificial Sequence
  Description of Artificial Sequence: Synthetic oligonucleotide
  Sense strand starting at position 2094 of SEQ ID NO: 1885748
guggauagacgugaaacuu

SEQ ID NO: 2365135 - RNA, 19 nt, Artificial Sequence
  Description of Artificial Sequence: Synthetic oligonucleotide
  Antisense strand to SEQ ID NO: 2365134
aaguuucacgucuauccac

SEQ ID NO: 2365136 - RNA, 19 nt, Artificial Sequence
  Description of Artificial Sequence: Synthetic oligonucleotide
  Sense strand starting at position 2189 of SEQ ID NO: 1885748
agaauagcgauuugccuau

SEQ ID NO: 2365137 - RNA, 19 nt, Artificial Sequence
  Description of Artificial Sequence: Synthetic oligonucleotide
  Antisense strand to SEQ ID NO: 2365136
auaggcaaaucgcuauucu

SEQ ID NO: 2365138 - RNA, 19 nt, Artificial Sequence
  Description of Artificial Sequence: Synthetic oligonucleotide
  Sense strand starting at position 2193 of SEQ ID NO: 1885748
uagcgauuugccuaucagu

SEQ ID NO: 2365139 - RNA, 19 nt, Artificial Sequence
  Description of Artificial Sequence: Synthetic oligonucleotide
  Antisense strand to SEQ ID NO: 2365138
acugauaggcaaaucgcua

SEQ ID NO: 2365140 - RNA, 19 nt, Artificial Sequence
  Description of Artificial Sequence: Synthetic oligonucleotide
  Sense strand starting at position 2204 of SEQ ID NO: 1885748
cuaucagugugaccuaaau

SEQ ID NO: 2365141 - RNA, 19 nt, Artificial Sequence
  Description of Artificial Sequence: Synthetic oligonucleotide
  Antisense strand to SEQ ID NO: 2365140
auuuaggucacacugauag

SEQ ID NO: 2365142 - RNA, 19 nt, Artificial Sequence
  Description of Artificial Sequence: Synthetic oligonucleotide
  Sense strand starting at position 2215 of SEQ ID NO: 1885748
accuaaauagaacguguaa

SEQ ID NO: 2365143 - RNA, 19 nt, Artificial Sequence
  Description of Artificial Sequence: Synthetic oligonucleotide
  Antisense strand to SEQ ID NO: 2365142
uuacacguucuauuuaggu

SEQ ID NO: 2365144 - RNA, 19 nt, Artificial Sequence
  Description of Artificial Sequence: Synthetic oligonucleotide
  Sense strand starting at position 2222 of SEQ ID NO: 1885748
uagaacguguaauuaacaa

SEQ ID NO: 2365145 - RNA, 19 nt, Artificial Sequence
  Description of Artificial Sequence: Synthetic oligonucleotide
  Antisense strand to SEQ ID NO: 2365144
uuguuaauuacacguucua

SEQ ID NO: 2365146 - RNA, 19 nt, Artificial Sequence
  Description of Artificial Sequence: Synthetic oligonucleotide
  Sense strand starting at position 2347 of SEQ ID NO: 1885748
gcagcugcagccguuaaau

SEQ ID NO: 2365147 - RNA, 19 nt, Artificial Sequence
  Description of Artificial Sequence: Synthetic oligonucleotide
  Antisense strand to SEQ ID NO: 2365146
auuuaacggcugcagcugc

SEQ ID NO: 2365148 - RNA, 19 nt, Artificial Sequence
  Description of Artificial Sequence: Synthetic oligonucleotide
  Sense strand starting at position 2349 of SEQ ID NO: 1885748
agcugcagccguuaaauuu

SEQ ID NO: 2365149 - RNA, 19 nt, Artificial Sequence
  Description of Artificial Sequence: Synthetic oligonucleotide
  Antisense strand to SEQ ID NO: 2365148
aaauuuaacggcugcagcu

SEQ ID NO: 2365150 - RNA, 19 nt, Artificial Sequence
  Description of Artificial Sequence: Synthetic oligonucleotide
  Sense strand starting at position 3333 of SEQ ID NO: 1885748
gagguugaaauacgaguaa

SEQ ID NO: 2365151 - RNA, 19 nt, Artificial Sequence
  Description of Artificial Sequence: Synthetic oligonucleotide
  Antisense strand to SEQ ID NO: 2365150
uuacucguauuucaaccuc

SEQ ID NO: 2365152 - RNA, 19 nt, Artificial Sequence
  Description of Artificial Sequence: Synthetic oligonucleotide
  Sense strand starting at position 3496 of SEQ ID NO: 1885748
ucgcaaauuugugccuauu

SEQ ID NO: 2365153 - RNA, 19 nt, Artificial Sequence
  Description of Artificial Sequence: Synthetic oligonucleotide
  Antisense strand to SEQ ID NO: 2365152
aauaggcacaaauuugcga

SEQ ID NO: 2365154 - RNA, 19 nt, Artificial Sequence
  Description of Artificial Sequence: Synthetic oligonucleotide
  Sense strand starting at position 3594 of SEQ ID NO: 1885748
agauaaagaugguuugugu

SEQ ID NO: 2365155 - RNA, 19 nt, Artificial Sequence
  Description of Artificial Sequence: Synthetic oligonucleotide
  Antisense strand to SEQ ID NO: 2365154
acacaaaccaucuuuaucu

SEQ ID NO: 2365156 - RNA, 19 nt, Artificial Sequence
  Description of Artificial Sequence: Synthetic oligonucleotide
  Sense strand starting at position 3597 of SEQ ID NO: 1885748
uaaagaugguuuguguaca

SEQ ID NO: 2365157 - RNA, 19 nt, Artificial Sequence
  Description of Artificial Sequence: Synthetic oligonucleotide
  Antisense strand to SEQ ID NO: 2365156
uguacacaaaccaucuuua

SEQ ID NO: 2365158 - RNA, 19 nt, Artificial Sequence
  Description of Artificial Sequence: Synthetic oligonucleotide
  Sense strand starting at position 3602 of SEQ ID NO: 1885748
augguuuguguacaaggaa

SEQ ID NO: 2365159 - RNA, 19 nt, Artificial Sequence
  Description of Artificial Sequence: Synthetic oligonucleotide
  Antisense strand to SEQ ID NO: 2365158
uuccuuguacacaaaccau

SEQ ID NO: 2365160 - RNA, 19 nt, Artificial Sequence
  Description of Artificial Sequence: Synthetic oligonucleotide
  Sense strand starting at position 3674 of SEQ ID NO: 1885748
agggauucuuacuccuuua

SEQ ID NO: 2365161 - RNA, 19 nt, Artificial Sequence
  Description of Artificial Sequence: Synthetic oligonucleotide
  Antisense strand to SEQ ID NO: 2365160
uaaaggaguaagaaucccu

SEQ ID NO: 2365162 - RNA, 19 nt, Artificial Sequence
  Description of Artificial Sequence: Synthetic oligonucleotide
  Sense strand starting at position 3893 of SEQ ID NO: 1885748
ucccaaguggacugauaaa

SEQ ID NO: 2365163 - RNA, 19 nt, Artificial Sequence
  Description of Artificial Sequence: Synthetic oligonucleotide
  Antisense strand to SEQ ID NO: 2365162
uuuaucaguccacuuggga

SEQ ID NO: 2365164 - RNA, 19 nt, Artificial Sequence
  Description of Artificial Sequence: Synthetic oligonucleotide
  Sense strand starting at position 1 of SEQ ID NO: 1885749
aguauagaucuguggacag

SEQ ID NO: 2365165 - RNA, 19 nt, Artificial Sequence
  Description of Artificial Sequence: Synthetic oligonucleotide
  Antisense strand to SEQ ID NO: 2365164
cuguccacagaucuauacu

SEQ ID NO: 2365166 - RNA, 19 nt, Artificial Sequence
  Description of Artificial Sequence: Synthetic oligonucleotide
  Sense strand starting at position 147 of SEQ ID NO: 1885749
gggcauauuccuuaauccu

SEQ ID NO: 2365167 - RNA, 19 nt, Artificial Sequence
  Description of Artificial Sequence: Synthetic oligonucleotide
  Antisense strand to SEQ ID NO: 2365166
aggauuaaggaauaugccc

SEQ ID NO: 2365168 - RNA, 19 nt, Artificial Sequence
  Description of Artificial Sequence: Synthetic oligonucleotide
  Sense strand starting at position 245 of SEQ ID NO: 1885749
gggccagaacucugacauc

SEQ ID NO: 2365169 - RNA, 19 nt, Artificial Sequence
  Description of Artificial Sequence: Synthetic oligonucleotide
  Antisense strand to SEQ ID NO: 2365168
gaugucagaguucuggccc

SEQ ID NO: 2365170 - RNA, 19 nt, Artificial Sequence
  Description of Artificial Sequence: Synthetic oligonucleotide
  Sense strand starting at position 299 of SEQ ID NO: 1885749
cuagaaucuugguuccacu

SEQ ID NO: 2365171 - RNA, 19 nt, Artificial Sequence
  Description of Artificial Sequence: Synthetic oligonucleotide
  Antisense strand to SEQ ID NO: 2365170
aguggaaccaagauucuag

SEQ ID NO: 2365172 - RNA, 19 nt, Artificial Sequence
  Description of Artificial Sequence: Synthetic oligonucleotide
  Sense strand starting at position 569 of SEQ ID NO: 1885749
aggaaauugucuccaggca

SEQ ID NO: 2365173 - RNA, 19 nt, Artificial Sequence
  Description of Artificial Sequence: Synthetic oligonucleotide
  Antisense strand to SEQ ID NO: 2365172
ugccuggagacaauuuccu

SEQ ID NO: 2365174 - RNA, 19 nt, Artificial Sequence
  Description of Artificial Sequence: Synthetic oligonucleotide
  Sense strand starting at position 739 of SEQ ID NO: 1885749
aucccauuaugguuagaga

SEQ ID NO: 2365175 - RNA, 19 nt, Artificial Sequence
  Description of Artificial Sequence: Synthetic oligonucleotide
  Antisense strand to SEQ ID NO: 2365174
ucucuaaccauaaugggau

SEQ ID NO: 2365176 - RNA, 19 nt, Artificial Sequence
  Description of Artificial Sequence: Synthetic oligonucleotide
  Sense strand starting at position 746 of SEQ ID NO: 1885749
uaugguuagagauggaagu

SEQ ID NO: 2365177 - RNA, 19 nt, Artificial Sequence
  Description of Artificial Sequence: Synthetic oligonucleotide
  Antisense strand to SEQ ID NO: 2365176
acuuccaucucuaaccaua

SEQ ID NO: 2365178 - RNA, 19 nt, Artificial Sequence
  Description of Artificial Sequence: Synthetic oligonucleotide
  Sense strand starting at position 747 of SEQ ID NO: 1885749
augguuagagauggaaguu

SEQ ID NO: 2365179 - RNA, 19 nt, Artificial Sequence
  Description of Artificial Sequence: Synthetic oligonucleotide
  Antisense strand to SEQ ID NO: 2365178
aacuuccaucucuaaccau

SEQ ID NO: 2365180 - RNA, 19 nt, Artificial Sequence
  Description of Artificial Sequence: Synthetic oligonucleotide
  Sense strand starting at position 767 of SEQ ID NO: 1885749
aggagucaguaucuugauu

SEQ ID NO: 2365181 - RNA, 19 nt, Artificial Sequence
  Description of Artificial Sequence: Synthetic oligonucleotide
  Antisense strand to SEQ ID NO: 2365180
aaucaagauacugacuccu

SEQ ID NO: 2365182 - RNA, 19 nt, Artificial Sequence
  Description of Artificial Sequence: Synthetic oligonucleotide
  Sense strand starting at position 936 of SEQ ID NO: 1885749
cccgauaugcccgacagaa

SEQ ID NO: 2365183 - RNA, 19 nt, Artificial Sequence
  Description of Artificial Sequence: Synthetic oligonucleotide
  Antisense strand to SEQ ID NO: 2365182
uucugucgggcauaucggg

SEQ ID NO: 2365184 - RNA, 19 nt, Artificial Sequence
  Description of Artificial Sequence: Synthetic oligonucleotide
  Sense strand starting at position 1026 of SEQ ID NO: 1885749
aguuaugacuuaucuacca

SEQ ID NO: 2365185 - RNA, 19 nt, Artificial Sequence
  Description of Artificial Sequence: Synthetic oligonucleotide
  Antisense strand to SEQ ID NO: 2365184
ugguagauaagucauaacu

SEQ ID NO: 2365186 - RNA, 19 nt, Artificial Sequence
  Description of Artificial Sequence: Synthetic oligonucleotide
  Sense strand starting at position 1159 of SEQ ID NO: 1885749
uugauuauguccucugaaa

SEQ ID NO: 2365187 - RNA, 19 nt, Artificial Sequence
  Description of Artificial Sequence: Synthetic oligonucleotide
  Antisense strand to SEQ ID NO: 2365186
uuucagaggacauaaucaa

SEQ ID NO: 2365188 - RNA, 19 nt, Artificial Sequence
  Description of Artificial Sequence: Synthetic oligonucleotide
  Sense strand starting at position 1161 of SEQ ID NO: 1885749
gauuauguccucugaaaga

SEQ ID NO: 2365189 - RNA, 19 nt, Artificial Sequence
  Description of Artificial Sequence: Synthetic oligonucleotide
  Antisense strand to SEQ ID NO: 2365188
ucuuucagaggacauaauc

SEQ ID NO: 2365190 - RNA, 19 nt, Artificial Sequence
  Description of Artificial Sequence: Synthetic oligonucleotide
  Sense strand starting at position 1288 of SEQ ID NO: 1885749
agagcuuuauucccauaag

SEQ ID NO: 2365191 - RNA, 19 nt, Artificial Sequence
  Description of Artificial Sequence: Synthetic oligonucleotide
  Antisense strand to SEQ ID NO: 2365190
cuuaugggaauaaagcucu

SEQ ID NO: 2365192 - RNA, 19 nt, Artificial Sequence
  Description of Artificial Sequence: Synthetic oligonucleotide
  Sense strand starting at position 1297 of SEQ ID NO: 1885749
uucccauaaguguauuaaa

SEQ ID NO: 2365193 - RNA, 19 nt, Artificial Sequence
  Description of Artificial Sequence: Synthetic oligonucleotide
  Antisense strand to SEQ ID NO: 2365192
uuuaauacacuuaugggaa

SEQ ID NO: 2365194 - RNA, 19 nt, Artificial Sequence
  Description of Artificial Sequence: Synthetic oligonucleotide
  Sense strand starting at position 1347 of SEQ ID NO: 1885749
agacaaauguggguagcaa

SEQ ID NO: 2365195 - RNA, 19 nt, Artificial Sequence
  Description of Artificial Sequence: Synthetic oligonucleotide
  Antisense strand to SEQ ID NO: 2365194
uugcuacccacauuugucu

SEQ ID NO: 2365196 - RNA, 19 nt, Artificial Sequence
  Description of Artificial Sequence: Synthetic oligonucleotide
  Sense strand starting at position 1447 of SEQ ID NO: 1885749
ugucaugugagugauuaaa

SEQ ID NO: 2365197 - RNA, 19 nt, Artificial Sequence
  Description of Artificial Sequence: Synthetic oligonucleotide
  Antisense strand to SEQ ID NO: 2365196
uuuaaucacucacaugaca

SEQ ID NO: 2365198 - RNA, 19 nt, Artificial Sequence
  Description of Artificial Sequence: Synthetic oligonucleotide
  Sense strand starting at position 1449 of SEQ ID NO: 1885749
ucaugugagugauuaaacu

SEQ ID NO: 2365199 - RNA, 19 nt, Artificial Sequence
  Description of Artificial Sequence: Synthetic oligonucleotide
  Antisense strand to SEQ ID NO: 2365198
aguuuaaucacucacauga

SEQ ID NO: 2365200 - RNA, 19 nt, Artificial Sequence
  Description of Artificial Sequence: Synthetic oligonucleotide
  Sense strand starting at position 1468 of SEQ ID NO: 1885749
guccuuucuccagagagca

SEQ ID NO: 2365201 - RNA, 19 nt, Artificial Sequence
  Description of Artificial Sequence: Synthetic oligonucleotide
  Antisense strand to SEQ ID NO: 2365200
ugcucucuggagaaaggac

SEQ ID NO: 2365202 - RNA, 19 nt, Artificial Sequence
  Description of Artificial Sequence: Synthetic oligonucleotide
  Sense strand starting at position 1530 of SEQ ID NO: 1885749
uaauuauaccuuuggguga

SEQ ID NO: 2365203 - RNA, 19 nt, Artificial Sequence
  Description of Artificial Sequence: Synthetic oligonucleotide
  Antisense strand to SEQ ID NO: 2365202
ucacccaaagguauaauua

SEQ ID NO: 2365204 - RNA, 19 nt, Artificial Sequence
  Description of Artificial Sequence: Synthetic oligonucleotide
  Sense strand starting at position 1534 of SEQ ID NO: 1885749
uauaccuuugggugaaaca

SEQ ID NO: 2365205 - RNA, 19 nt, Artificial Sequence
  Description of Artificial Sequence: Synthetic oligonucleotide
  Antisense strand to SEQ ID NO: 2365204
uguuucacccaaagguaua

SEQ ID NO: 2365206 - RNA, 19 nt, Artificial Sequence
  Description of Artificial Sequence: Synthetic oligonucleotide
  Sense strand starting at position 1963 of SEQ ID NO: 1885749
uugagaugucuugaguacu

SEQ ID NO: 2365207 - RNA, 19 nt, Artificial Sequence
  Description of Artificial Sequence: Synthetic oligonucleotide
  Antisense strand to SEQ ID NO: 2365206
aguacucaagacaucucaa

SEQ ID NO: 2365208 - RNA, 19 nt, Artificial Sequence
  Description of Artificial Sequence: Synthetic oligonucleotide
  Sense strand starting at position 2017 of SEQ ID NO: 1885749
uccgauauuucugcuggau

SEQ ID NO: 2365209 - RNA, 19 nt, Artificial Sequence
  Description of Artificial Sequence: Synthetic oligonucleotide
  Antisense strand to SEQ ID NO: 2365208
auccagcagaaauaucgga

SEQ ID NO: 2365210 - RNA, 19 nt, Artificial Sequence
  Description of Artificial Sequence: Synthetic oligonucleotide
  Sense strand starting at position 2083 of SEQ ID NO: 1885749
caaggaauuucuggaacug

SEQ ID NO: 2365211 - RNA, 19 nt, Artificial Sequence
  Description of Artificial Sequence: Synthetic oligonucleotide
  Antisense strand to SEQ ID NO: 2365210
caguuccagaaauuccuug

SEQ ID NO: 2365212 - RNA, 19 nt, Artificial Sequence
  Description of Artificial Sequence: Synthetic oligonucleotide
  Sense strand starting at position 2213 of SEQ ID NO: 1885749
caaugaagucuuuggguac

SEQ ID NO: 2365213 - RNA, 19 nt, Artificial Sequence
  Description of Artificial Sequence: Synthetic oligonucleotide
  Antisense strand to SEQ ID NO: 2365212
guacccaaagacuucauug

SEQ ID NO: 2365214 - RNA, 19 nt, Artificial Sequence
  Description of Artificial Sequence: Synthetic oligonucleotide
  Sense strand starting at position 2242 of SEQ ID NO: 1885749
uugaauguugcauaaucac

SEQ ID NO: 2365215 - RNA, 19 nt, Artificial Sequence
  Description of Artificial Sequence: Synthetic oligonucleotide
  Antisense strand to SEQ ID NO: 2365214
gugauuaugcaacauucaa

SEQ ID NO: 2365216 - RNA, 19 nt, Artificial Sequence
  Description of Artificial Sequence: Synthetic oligonucleotide
  Sense strand starting at position 2294 of SEQ ID NO: 1885749
gugaauauacacgaggcuu

SEQ ID NO: 2365217 - RNA, 19 nt, Artificial Sequence
  Description of Artificial Sequence: Synthetic oligonucleotide
  Antisense strand to SEQ ID NO: 2365216
aagccucguguauauucac

SEQ ID NO: 2365218 - RNA, 19 nt, Artificial Sequence
  Description of Artificial Sequence: Synthetic oligonucleotide
  Sense strand starting at position 2376 of SEQ ID NO: 1885749
gugcccauuucucugacau

SEQ ID NO: 2365219 - RNA, 19 nt, Artificial Sequence
  Description of Artificial Sequence: Synthetic oligonucleotide
  Antisense strand to SEQ ID NO: 2365218
augucagagaaaugggcac

SEQ ID NO: 2365220 - RNA, 19 nt, Artificial Sequence
  Description of Artificial Sequence: Synthetic oligonucleotide
  Sense strand starting at position 2389 of SEQ ID NO: 1885749
ugacauacaucauugcuga

SEQ ID NO: 2365221 - RNA, 19 nt, Artificial Sequence
  Description of Artificial Sequence: Synthetic oligonucleotide
  Antisense strand to SEQ ID NO: 2365220
ucagcaaugauguauguca

SEQ ID NO: 2365222 - RNA, 19 nt, Artificial Sequence
  Description of Artificial Sequence: Synthetic oligonucleotide
  Sense strand starting at position 2527 of SEQ ID NO: 1885749
cccuaaauugugggaaguc

SEQ ID NO: 2365223 - RNA, 19 nt, Artificial Sequence
  Description of Artificial Sequence: Synthetic oligonucleotide
  Antisense strand to SEQ ID NO: 2365222
gacuucccacaauuuaggg

SEQ ID NO: 2365224 - RNA, 19 nt, Artificial Sequence
  Description of Artificial Sequence: Synthetic oligonucleotide
  Sense strand starting at position 2570 of SEQ ID NO: 1885749
agauucuagaguugagacu

SEQ ID NO: 2365225 - RNA, 19 nt, Artificial Sequence
  Description of Artificial Sequence: Synthetic oligonucleotide
  Antisense strand to SEQ ID NO: 2365224
agucucaacucuagaaucu

SEQ ID NO: 2365226 - RNA, 19 nt, Artificial Sequence
  Description of Artificial Sequence: Synthetic oligonucleotide
  Sense strand starting at position 2769 of SEQ ID NO: 1885749
uuauaugagcaauguagag

SEQ ID NO: 2365227 - RNA, 19 nt, Artificial Sequence
  Description of Artificial Sequence: Synthetic oligonucleotide
  Antisense strand to SEQ ID NO: 2365226
cucuacauugcucauauaa

SEQ ID NO: 2365228 - RNA, 19 nt, Artificial Sequence
  Description of Artificial Sequence: Synthetic oligonucleotide
  Sense strand starting at position 2820 of SEQ ID NO: 1885749
auugaauccuggucacacu

SEQ ID NO: 2365229 - RNA, 19 nt, Artificial Sequence
  Description of Artificial Sequence: Synthetic oligonucleotide
  Antisense strand to SEQ ID NO: 2365228
agugugaccaggauucaau

SEQ ID NO: 2365230 - RNA, 19 nt, Artificial Sequence
  Description of Artificial Sequence: Synthetic oligonucleotide
  Sense strand starting at position 2821 of SEQ ID NO: 1885749
uugaauccuggucacacua

SEQ ID NO: 2365231 - RNA, 19 nt, Artificial Sequence
  Description of Artificial Sequence: Synthetic oligonucleotide
  Antisense strand to SEQ ID NO: 2365230
uagugugaccaggauucaa

SEQ ID NO: 2365232 - RNA, 19 nt, Artificial Sequence
  Description of Artificial Sequence: Synthetic oligonucleotide
  Sense strand starting at position 3034 of SEQ ID NO: 1885749
agagaaacuuggcucucuu

SEQ ID NO: 2365233 - RNA, 19 nt, Artificial Sequence
  Description of Artificial Sequence: Synthetic oligonucleotide
  Antisense strand to SEQ ID NO: 2365232
aagagagccaaguuucucu

SEQ ID NO: 2365234 - RNA, 19 nt, Artificial Sequence
  Description of Artificial Sequence: Synthetic oligonucleotide
  Sense strand starting at position 3145 of SEQ ID NO: 1885749
gcucuuuaagaggaauucu

SEQ ID NO: 2365235 - RNA, 19 nt, Artificial Sequence
  Description of Artificial Sequence: Synthetic oligonucleotide
  Antisense strand to SEQ ID NO: 2365234
agaauuccucuuaaagagc

SEQ ID NO: 2365236 - RNA, 19 nt, Artificial Sequence
  Description of Artificial Sequence: Synthetic oligonucleotide
  Sense strand starting at position 3322 of SEQ ID NO: 1885749
gguaauucuaaaugaggca

SEQ ID NO: 2365237 - RNA, 19 nt, Artificial Sequence
  Description of Artificial Sequence: Synthetic oligonucleotide
  Antisense strand to SEQ ID NO: 2365236
ugccucauuuagaauuacc

SEQ ID NO: 2365238 - RNA, 19 nt, Artificial Sequence
  Description of Artificial Sequence: Synthetic oligonucleotide
  Sense strand starting at position 3399 of SEQ ID NO: 1885749
ccgcaauguguggaagaga

SEQ ID NO: 2365239 - RNA, 19 nt, Artificial Sequence
  Description of Artificial Sequence: Synthetic oligonucleotide
  Antisense strand to SEQ ID NO: 2365238
ucucuuccacacauugcgg

SEQ ID NO: 2365240 - RNA, 19 nt, Artificial Sequence
  Description of Artificial Sequence: Synthetic oligonucleotide
  Sense strand starting at position 3795 of SEQ ID NO: 1885749
ggagcagagccauaaucca

SEQ ID NO: 2365241 - RNA, 19 nt, Artificial Sequence
  Description of Artificial Sequence: Synthetic oligonucleotide
  Antisense strand to SEQ ID NO: 2365240
uggauuauggcucugcucc

SEQ ID NO: 2365242 - RNA, 19 nt, Artificial Sequence
  Description of Artificial Sequence: Synthetic oligonucleotide
  Sense strand starting at position 3868 of SEQ ID NO: 1885749
cucauauuccaggaacgca

SEQ ID NO: 2365243 - RNA, 19 nt, Artificial Sequence
  Description of Artificial Sequence: Synthetic oligonucleotide
  Antisense strand to SEQ ID NO: 2365242
ugcguuccuggaauaugag

SEQ ID NO: 2365244 - RNA, 19 nt, Artificial Sequence
  Description of Artificial Sequence: Synthetic oligonucleotide
  Sense strand starting at position 62 of SEQ ID NO: 1885750
gucugaacucaaugccacu

SEQ ID NO: 2365245 - RNA, 19 nt, Artificial Sequence
  Description of Artificial Sequence: Synthetic oligonucleotide
  Antisense strand to SEQ ID NO: 2365244
aguggcauugaguucagac

SEQ ID NO: 2365246 - RNA, 19 nt, Artificial Sequence
  Description of Artificial Sequence: Synthetic oligonucleotide
  Sense strand starting at position 93 of SEQ ID NO: 1885750
gcugccuauuugcuccaau

SEQ ID NO: 2365247 - RNA, 19 nt, Artificial Sequence
  Description of Artificial Sequence: Synthetic oligonucleotide
  Antisense strand to SEQ ID NO: 2365246
auuggagcaaauaggcagc

SEQ ID NO: 2365248 - RNA, 19 nt, Artificial Sequence
  Description of Artificial Sequence: Synthetic oligonucleotide
  Sense strand starting at position 254 of SEQ ID NO: 1885750
uagcaauguuagguuaaug

SEQ ID NO: 2365249 - RNA, 19 nt, Artificial Sequence
  Description of Artificial Sequence: Synthetic oligonucleotide
  Antisense strand to SEQ ID NO: 2365248
cauuaaccuaacauugcua

SEQ ID NO: 2365250 - RNA, 19 nt, Artificial Sequence
  Description of Artificial Sequence: Synthetic oligonucleotide
  Sense strand starting at position 271 of SEQ ID NO: 1885750
ugcuuaaauuugguuaggu

SEQ ID NO: 2365251 - RNA, 19 nt, Artificial Sequence
  Description of Artificial Sequence: Synthetic oligonucleotide
  Antisense strand to SEQ ID NO: 2365250
accuaaccaaauuuaagca

SEQ ID NO: 2365252 - RNA, 19 nt, Artificial Sequence
  Description of Artificial Sequence: Synthetic oligonucleotide
  Sense strand starting at position 394 of SEQ ID NO: 1885750
uuugcaauuccagauguuu

SEQ ID NO: 2365253 - RNA, 19 nt, Artificial Sequence
  Description of Artificial Sequence: Synthetic oligonucleotide
  Antisense strand to SEQ ID NO: 2365252
aaacaucuggaauugcaaa

SEQ ID NO: 2365254 - RNA, 19 nt, Artificial Sequence
  Description of Artificial Sequence: Synthetic oligonucleotide
  Sense strand starting at position 711 of SEQ ID NO: 1885750
ccuaucgcaaagugagaau

SEQ ID NO: 2365255 - RNA, 19 nt, Artificial Sequence
  Description of Artificial Sequence: Synthetic oligonucleotide
  Antisense strand to SEQ ID NO: 2365254
auucucacuuugcgauagg

SEQ ID NO: 2365256 - RNA, 19 nt, Artificial Sequence
  Description of Artificial Sequence: Synthetic oligonucleotide
  Sense strand starting at position 720 of SEQ ID NO: 1885750
aagugagaauucgcucaau

SEQ ID NO: 2365257 - RNA, 19 nt, Artificial Sequence
  Description of Artificial Sequence: Synthetic oligonucleotide
  Antisense strand to SEQ ID NO: 2365256
auugagcgaauucucacuu

SEQ ID NO: 2365258 - RNA, 19 nt, Artificial Sequence
  Description of Artificial Sequence: Synthetic oligonucleotide
  Sense strand starting at position 723 of SEQ ID NO: 1885750
ugagaauucgcucaauauu

SEQ ID NO: 2365259 - RNA, 19 nt, Artificial Sequence
  Description of Artificial Sequence: Synthetic oligonucleotide
  Antisense strand to SEQ ID NO: 2365258
aauauugagcgaauucuca

SEQ ID NO: 2365260 - RNA, 19 nt, Artificial Sequence
  Description of Artificial Sequence: Synthetic oligonucleotide
  Sense strand starting at position 806 of SEQ ID NO: 1885750
cuaaauaaauccguuagga

SEQ ID NO: 2365261 - RNA, 19 nt, Artificial Sequence
  Description of Artificial Sequence: Synthetic oligonucleotide
  Antisense strand to SEQ ID NO: 2365260
uccuaacggauuuauuuag

SEQ ID NO: 2365262 - RNA, 19 nt, Artificial Sequence
  Description of Artificial Sequence: Synthetic oligonucleotide
  Sense strand starting at position 910 of SEQ ID NO: 1885750
cugcauuugcauggcaaga

SEQ ID NO: 2365263 - RNA, 19 nt, Artificial Sequence
  Description of Artificial Sequence: Synthetic oligonucleotide
  Antisense strand to SEQ ID NO: 2365262
ucuugccaugcaaaugcag

SEQ ID NO: 2365264 - RNA, 19 nt, Artificial Sequence
  Description of Artificial Sequence: Synthetic oligonucleotide
  Sense strand starting at position 1007 of SEQ ID NO: 1885750
ggccaugccuuaucacaaa

SEQ ID NO: 2365265 - RNA, 19 nt, Artificial Sequence
  Description of Artificial Sequence: Synthetic oligonucleotide
  Antisense strand to SEQ ID NO: 2365264
uuugugauaaggcauggcc

SEQ ID NO: 2365266 - RNA, 19 nt, Artificial Sequence
  Description of Artificial Sequence: Synthetic oligonucleotide
  Sense strand starting at position 1018 of SEQ ID NO: 1885750
aucacaaacgugugggaaa

SEQ ID NO: 2365267 - RNA, 19 nt, Artificial Sequence
  Description of Artificial Sequence: Synthetic oligonucleotide
  Antisense strand to SEQ ID NO: 2365266
uuucccacacguuugugau

SEQ ID NO: 2365268 - RNA, 19 nt, Artificial Sequence
  Description of Artificial Sequence: Synthetic oligonucleotide
  Sense strand starting at position 1025 of SEQ ID NO: 1885750
acgugugggaaagguuaau

SEQ ID NO: 2365269 - RNA, 19 nt, Artificial Sequence
  Description of Artificial Sequence: Synthetic oligonucleotide
  Antisense strand to SEQ ID NO: 2365268
auuaaccuuucccacacgu

SEQ ID NO: 2365270 - RNA, 19 nt, Artificial Sequence
  Description of Artificial Sequence: Synthetic oligonucleotide
  Sense strand starting at position 1264 of SEQ ID NO: 1885750
uuaugcuuucgugggauuu

SEQ ID NO: 2365271 - RNA, 19 nt, Artificial Sequence
  Description of Artificial Sequence: Synthetic oligonucleotide
  Antisense strand to SEQ ID NO: 2365270
aaaucccacgaaagcauaa

SEQ ID NO: 2365272 - RNA, 19 nt, Artificial Sequence
  Description of Artificial Sequence: Synthetic oligonucleotide
  Sense strand starting at position 1418 of SEQ ID NO: 1885750
uuaacauaaguuuggacua

SEQ ID NO: 2365273 - RNA, 19 nt, Artificial Sequence
  Description of Artificial Sequence: Synthetic oligonucleotide
  Antisense strand to SEQ ID NO: 2365272
uaguccaaacuuauguuaa

SEQ ID NO: 2365274 - RNA, 19 nt, Artificial Sequence
  Description of Artificial Sequence: Synthetic oligonucleotide
  Sense strand starting at position 1423 of SEQ ID NO: 1885750
auaaguuuggacuaguuua

SEQ ID NO: 2365275 - RNA, 19 nt, Artificial Sequence
  Description of Artificial Sequence: Synthetic oligonucleotide
  Antisense strand to SEQ ID NO: 2365274
uaaacuaguccaaacuuau

SEQ ID NO: 2365276 - RNA, 19 nt, Artificial Sequence
  Description of Artificial Sequence: Synthetic oligonucleotide
  Sense strand starting at position 1428 of SEQ ID NO: 1885750
uuuggacuaguuuaaagua

SEQ ID NO: 2365277 - RNA, 19 nt, Artificial Sequence
  Description of Artificial Sequence: Synthetic oligonucleotide
  Antisense strand to SEQ ID NO: 2365276
uacuuuaaacuaguccaaa

SEQ ID NO: 2365278 - RNA, 19 nt, Artificial Sequence
  Description of Artificial Sequence: Synthetic oligonucleotide
  Sense strand starting at position 1497 of SEQ ID NO: 1885750
uuagcaauuuagcuaguca

SEQ ID NO: 2365279 - RNA, 19 nt, Artificial Sequence
  Description of Artificial Sequence: Synthetic oligonucleotide
  Antisense strand to SEQ ID NO: 2365278
ugacuagcuaaauugcuaa

SEQ ID NO: 2365280 - RNA, 19 nt, Artificial Sequence
  Description of Artificial Sequence: Synthetic oligonucleotide
  Sense strand starting at position 1501 of SEQ ID NO: 1885750
caauuuagcuagucagguu

SEQ ID NO: 2365281 - RNA, 19 nt, Artificial Sequence
  Description of Artificial Sequence: Synthetic oligonucleotide
  Antisense strand to SEQ ID NO: 2365280
aaccugacuagcuaaauug

SEQ ID NO: 2365282 - RNA, 19 nt, Artificial Sequence
  Description of Artificial Sequence: Synthetic oligonucleotide
  Sense strand starting at position 1519 of SEQ ID NO: 1885750
uuuaucaucuguucuggaa

SEQ ID NO: 2365283 - RNA, 19 nt, Artificial Sequence
  Description of Artificial Sequence: Synthetic oligonucleotide
  Antisense strand to SEQ ID NO: 2365282
uuccagaacagaugauaaa

SEQ ID NO: 2365284 - RNA, 19 nt, Artificial Sequence
  Description of Artificial Sequence: Synthetic oligonucleotide
  Sense strand starting at position 1579 of SEQ ID NO: 1885750
ggaaccgcuuaucuguaaa

SEQ ID NO: 2365285 - RNA, 19 nt, Artificial Sequence
  Description of Artificial Sequence: Synthetic oligonucleotide
  Antisense strand to SEQ ID NO: 2365284
uuuacagauaagcgguucc

SEQ ID NO: 2365286 - RNA, 19 nt, Artificial Sequence
  Description of Artificial Sequence: Synthetic oligonucleotide
  Sense strand starting at position 1582 of SEQ ID NO: 1885750
accgcuuaucuguaaacug

SEQ ID NO: 2365287 - RNA, 19 nt, Artificial Sequence
  Description of Artificial Sequence: Synthetic oligonucleotide
  Antisense strand to SEQ ID NO: 2365286
caguuuacagauaagcggu

SEQ ID NO: 2365288 - RNA, 19 nt, Artificial Sequence
  Description of Artificial Sequence: Synthetic oligonucleotide
  Sense strand starting at position 1855 of SEQ ID NO: 1885750
ugugucuccgaugaugaua

SEQ ID NO: 2365289 - RNA, 19 nt, Artificial Sequence
  Description of Artificial Sequence: Synthetic oligonucleotide
  Antisense strand to SEQ ID NO: 2365288
uaucaucaucggagacaca

SEQ ID NO: 2365290 - RNA, 19 nt, Artificial Sequence
  Description of Artificial Sequence: Synthetic oligonucleotide
  Sense strand starting at position 1931 of SEQ ID NO: 1885750
cgacuucuauagccacuua

SEQ ID NO: 2365291 - RNA, 19 nt, Artificial Sequence
  Description of Artificial Sequence: Synthetic oligonucleotide
  Antisense strand to SEQ ID NO: 2365290
uaaguggcuauagaagucg

SEQ ID NO: 2365292 - RNA, 19 nt, Artificial Sequence
  Description of Artificial Sequence: Synthetic oligonucleotide
  Sense strand starting at position 2037 of SEQ ID NO: 1885750
agaucacgucucuauugca

SEQ ID NO: 2365293 - RNA, 19 nt, Artificial Sequence
  Description of Artificial Sequence: Synthetic oligonucleotide
  Antisense strand to SEQ ID NO: 2365292
ugcaauagagacgugaucu

SEQ ID NO: 2365294 - RNA, 19 nt, Artificial Sequence
  Description of Artificial Sequence: Synthetic oligonucleotide
  Sense strand starting at position 2060 of SEQ ID NO: 1885750
ccggaaucauccuuagguc

SEQ ID NO: 2365295 - RNA, 19 nt, Artificial Sequence
  Description of Artificial Sequence: Synthetic oligonucleotide
  Antisense strand to SEQ ID NO: 2365294
gaccuaaggaugauuccgg

SEQ ID NO: 2365296 - RNA, 19 nt, Artificial Sequence
  Description of Artificial Sequence: Synthetic oligonucleotide
  Sense strand starting at position 2067 of SEQ ID NO: 1885750
cauccuuaggucgggagua

SEQ ID NO: 2365297 - RNA, 19 nt, Artificial Sequence
  Description of Artificial Sequence: Synthetic oligonucleotide
  Antisense strand to SEQ ID NO: 2365296
uacucccgaccuaaggaug

SEQ ID NO: 2365298 - RNA, 19 nt, Artificial Sequence
  Description of Artificial Sequence: Synthetic oligonucleotide
  Sense strand starting at position 2437 of SEQ ID NO: 1885750
ucagaaugucagggucaaa

SEQ ID NO: 2365299 - RNA, 19 nt, Artificial Sequence
  Description of Artificial Sequence: Synthetic oligonucleotide
  Antisense strand to SEQ ID NO: 2365298
uuugacccugacauucuga

SEQ ID NO: 2365300 - RNA, 19 nt, Artificial Sequence
  Description of Artificial Sequence: Synthetic oligonucleotide
  Sense strand starting at position 2518 of SEQ ID NO: 1885750
uccaguuucccggaggaaa

SEQ ID NO: 2365301 - RNA, 19 nt, Artificial Sequence
  Description of Artificial Sequence: Synthetic oligonucleotide
  Antisense strand to SEQ ID NO: 2365300
uuuccuccgggaaacugga

SEQ ID NO: 2365302 - RNA, 19 nt, Artificial Sequence
  Description of Artificial Sequence: Synthetic oligonucleotide
  Sense strand starting at position 2701 of SEQ ID NO: 1885750
gcaauugguguuuagagaa

SEQ ID NO: 2365303 - RNA, 19 nt, Artificial Sequence
  Description of Artificial Sequence: Synthetic oligonucleotide
  Antisense strand to SEQ ID NO: 2365302
uucucuaaacaccaauugc

SEQ ID NO: 2365304 - RNA, 19 nt, Artificial Sequence
  Description of Artificial Sequence: Synthetic oligonucleotide
  Sense strand starting at position 2772 of SEQ ID NO: 1885750
aguugcugucaucagaaag

SEQ ID NO: 2365305 - RNA, 19 nt, Artificial Sequence
  Description of Artificial Sequence: Synthetic oligonucleotide
  Antisense strand to SEQ ID NO: 2365304
cuuucugaugacagcaacu

SEQ ID NO: 2365306 - RNA, 19 nt, Artificial Sequence
  Description of Artificial Sequence: Synthetic oligonucleotide
  Sense strand starting at position 2854 of SEQ ID NO: 1885750
ggaauugucuccuuucucu

SEQ ID NO: 2365307 - RNA, 19 nt, Artificial Sequence
  Description of Artificial Sequence: Synthetic oligonucleotide
  Antisense strand to SEQ ID NO: 2365306
agagaaaggagacaauucc

SEQ ID NO: 2365308 - RNA, 19 nt, Artificial Sequence
  Description of Artificial Sequence: Synthetic oligonucleotide
  Sense strand starting at position 3375 of SEQ ID NO: 1885750
uugaguaggacauguguuu

SEQ ID NO: 2365309 - RNA, 19 nt, Artificial Sequence
  Description of Artificial Sequence: Synthetic oligonucleotide
  Antisense strand to SEQ ID NO: 2365308
aaacacauguccuacucaa

SEQ ID NO: 2365310 - RNA, 19 nt, Artificial Sequence
  Description of Artificial Sequence: Synthetic oligonucleotide
  Sense strand starting at position 3460 of SEQ ID NO: 1885750
gucaaacagcuguaauuau

SEQ ID NO: 2365311 - RNA, 19 nt, Artificial Sequence
  Description of Artificial Sequence: Synthetic oligonucleotide
  Antisense strand to SEQ ID NO: 2365310
auaauuacagcuguuugac

SEQ ID NO: 2365312 - RNA, 19 nt, Artificial Sequence
  Description of Artificial Sequence: Synthetic oligonucleotide
  Sense strand starting at position 3572 of SEQ ID NO: 1885750
agauauguaucacuuguuu

SEQ ID NO: 2365313 - RNA, 19 nt, Artificial Sequence
  Description of Artificial Sequence: Synthetic oligonucleotide
  Antisense strand to SEQ ID NO: 2365312
aaacaagugauacauaucu

SEQ ID NO: 2365314 - RNA, 19 nt, Artificial Sequence
  Description of Artificial Sequence: Synthetic oligonucleotide
  Sense strand starting at position 3576 of SEQ ID NO: 1885750
auguaucacuuguuuggga

SEQ ID NO: 2365315 - RNA, 19 nt, Artificial Sequence
  Description of Artificial Sequence: Synthetic oligonucleotide
  Antisense strand to SEQ ID NO: 2365314
ucccaaacaagugauacau

SEQ ID NO: 2365316 - RNA, 19 nt, Artificial Sequence
  Description of Artificial Sequence: Synthetic oligonucleotide
  Sense strand starting at position 3578 of SEQ ID NO: 1885750
guaucacuuguuugggaga

SEQ ID NO: 2365317 - RNA, 19 nt, Artificial Sequence
  Description of Artificial Sequence: Synthetic oligonucleotide
  Antisense strand to SEQ ID NO: 2365316
ucucccaaacaagugauac

SEQ ID NO: 2365318 - RNA, 19 nt, Artificial Sequence
  Description of Artificial Sequence: Synthetic oligonucleotide
  Sense strand starting at position 3583 of SEQ ID NO: 1885750
acuuguuugggagaggcaa

SEQ ID NO: 2365319 - RNA, 19 nt, Artificial Sequence
  Description of Artificial Sequence: Synthetic oligonucleotide
  Antisense strand to SEQ ID NO: 2365318
uugccucucccaaacaagu

SEQ ID NO: 2365320 - RNA, 19 nt, Artificial Sequence
  Description of Artificial Sequence: Synthetic oligonucleotide
  Sense strand starting at position 3732 of SEQ ID NO: 1885750
caagaauugucaguggcug

SEQ ID NO: 2365321 - RNA, 19 nt, Artificial Sequence
  Description of Artificial Sequence: Synthetic oligonucleotide
  Antisense strand to SEQ ID NO: 2365320
cagccacugacaauucuug

SEQ ID NO: 2365322 - RNA, 19 nt, Artificial Sequence
  Description of Artificial Sequence: Synthetic oligonucleotide
  Sense strand starting at position 3757 of SEQ ID NO: 1885750
gggcuuauccuauaauccu

SEQ ID NO: 2365323 - RNA, 19 nt, Artificial Sequence
  Description of Artificial Sequence: Synthetic oligonucleotide
  Antisense strand to SEQ ID NO: 2365322
aggauuauaggauaagccc

SEQ ID NO: 2365324 - RNA, 19 nt, Artificial Sequence
  Description of Artificial Sequence: Synthetic oligonucleotide
  Sense strand starting at position 75 of SEQ ID NO: 1885751
cuugauaaacaccgaguua

SEQ ID NO: 2365325 - RNA, 19 nt, Artificial Sequence
  Description of Artificial Sequence: Synthetic oligonucleotide
  Antisense strand to SEQ ID NO: 2365324
uaacucgguguuuaucaag

SEQ ID NO: 2365326 - RNA, 19 nt, Artificial Sequence
  Description of Artificial Sequence: Synthetic oligonucleotide
  Sense strand starting at position 165 of SEQ ID NO: 1885751
ggugucacauuaucuuaaa

SEQ ID NO: 2365327 - RNA, 19 nt, Artificial Sequence
  Description of Artificial Sequence: Synthetic oligonucleotide
  Antisense strand to SEQ ID NO: 2365326
uuuaagauaaugugacacc

SEQ ID NO: 2365328 - RNA, 19 nt, Artificial Sequence
  Description of Artificial Sequence: Synthetic oligonucleotide
  Sense strand starting at position 283 of SEQ ID NO: 1885751
ucagauuaagauuguugaa

SEQ ID NO: 2365329 - RNA, 19 nt, Artificial Sequence
  Description of Artificial Sequence: Synthetic oligonucleotide
  Antisense strand to SEQ ID NO: 2365328
uucaacaaucuuaaucuga

SEQ ID NO: 2365330 - RNA, 19 nt, Artificial Sequence
  Description of Artificial Sequence: Synthetic oligonucleotide
  Sense strand starting at position 285 of SEQ ID NO: 1885751
agauuaagauuguugaagu

SEQ ID NO: 2365331 - RNA, 19 nt, Artificial Sequence
  Description of Artificial Sequence: Synthetic oligonucleotide
  Antisense strand to SEQ ID NO: 2365330
acuucaacaaucuuaaucu

SEQ ID NO: 2365332 - RNA, 19 nt, Artificial Sequence
  Description of Artificial Sequence: Synthetic oligonucleotide
  Sense strand starting at position 361 of SEQ ID NO: 1885751
ggcccaaaggcuuauauau

SEQ ID NO: 2365333 - RNA, 19 nt, Artificial Sequence
  Description of Artificial Sequence: Synthetic oligonucleotide
  Antisense strand to SEQ ID NO: 2365332
auauauaagccuuugggcc

SEQ ID NO: 2365334 - RNA, 19 nt, Artificial Sequence
  Description of Artificial Sequence: Synthetic oligonucleotide
  Sense strand starting at position 411 of SEQ ID NO: 1885751
ucagaaccacuguaauguu

SEQ ID NO: 2365335 - RNA, 19 nt, Artificial Sequence
  Description of Artificial Sequence: Synthetic oligonucleotide
  Antisense strand to SEQ ID NO: 2365334
aacauuacagugguucuga

SEQ ID NO: 2365336 - RNA, 19 nt, Artificial Sequence
  Description of Artificial Sequence: Synthetic oligonucleotide
  Sense strand starting at position 521 of SEQ ID NO: 1885751
acacauuagugacugauau

SEQ ID NO: 2365337 - RNA, 19 nt, Artificial Sequence
  Description of Artificial Sequence: Synthetic oligonucleotide
  Antisense strand to SEQ ID NO: 2365336
auaucagucacuaaugugu

SEQ ID NO: 2365338 - RNA, 19 nt, Artificial Sequence
  Description of Artificial Sequence: Synthetic oligonucleotide
  Sense strand starting at position 569 of SEQ ID NO: 1885751
auuggaucuugcccaauga

SEQ ID NO: 2365339 - RNA, 19 nt, Artificial Sequence
  Description of Artificial Sequence: Synthetic oligonucleotide
  Antisense strand to SEQ ID NO: 2365338
ucauugggcaagauccaau

SEQ ID NO: 2365340 - RNA, 19 nt, Artificial Sequence
  Description of Artificial Sequence: Synthetic oligonucleotide
  Sense strand starting at position 772 of SEQ ID NO: 1885751
guaccucgaacuggaauua

SEQ ID NO: 2365341 - RNA, 19 nt, Artificial Sequence
  Description of Artificial Sequence: Synthetic oligonucleotide
  Antisense strand to SEQ ID NO: 2365340
uaauuccaguucgagguac

SEQ ID NO: 2365342 - RNA, 19 nt, Artificial Sequence
  Description of Artificial Sequence: Synthetic oligonucleotide
  Sense strand starting at position 851 of SEQ ID NO: 1885751
uuuccuuagcuguacauau

SEQ ID NO: 2365343 - RNA, 19 nt, Artificial Sequence
  Description of Artificial Sequence: Synthetic oligonucleotide
  Antisense strand to SEQ ID NO: 2365342
auauguacagcuaaggaaa

SEQ ID NO: 2365344 - RNA, 19 nt, Artificial Sequence
  Description of Artificial Sequence: Synthetic oligonucleotide
  Sense strand starting at position 893 of SEQ ID NO: 1885751
uguugaagucuuggagaua

SEQ ID NO: 2365345 - RNA, 19 nt, Artificial Sequence
  Description of Artificial Sequence: Synthetic oligonucleotide
  Antisense strand to SEQ ID NO: 2365344
uaucuccaagacuucaaca

SEQ ID NO: 2365346 - RNA, 19 nt, Artificial Sequence
  Description of Artificial Sequence: Synthetic oligonucleotide
  Sense strand starting at position 913 of SEQ ID NO: 1885751
uccuguuucccacagauua

SEQ ID NO: 2365347 - RNA, 19 nt, Artificial Sequence
  Description of Artificial Sequence: Synthetic oligonucleotide
  Antisense strand to SEQ ID NO: 2365346
uaaucugugggaaacagga

SEQ ID NO: 2365348 - RNA, 19 nt, Artificial Sequence
  Description of Artificial Sequence: Synthetic oligonucleotide
  Sense strand starting at position 1015 of SEQ ID NO: 1885751
cuaacuuaaugauugggua

SEQ ID NO: 2365349 - RNA, 19 nt, Artificial Sequence
  Description of Artificial Sequence: Synthetic oligonucleotide
  Antisense strand to SEQ ID NO: 2365348
uacccaaucauuaaguuag

SEQ ID NO: 2365350 - RNA, 19 nt, Artificial Sequence
  Description of Artificial Sequence: Synthetic oligonucleotide
  Sense strand starting at position 1209 of SEQ ID NO: 1885751
auggaauguagguaucuuu

SEQ ID NO: 2365351 - RNA, 19 nt, Artificial Sequence
  Description of Artificial Sequence: Synthetic oligonucleotide
  Antisense strand to SEQ ID NO: 2365350
aaagauaccuacauuccau

SEQ ID NO: 2365352 - RNA, 19 nt, Artificial Sequence
  Description of Artificial Sequence: Synthetic oligonucleotide
  Sense strand starting at position 1231 of SEQ ID NO: 1885751
cagaaauucguuuauugac

SEQ ID NO: 2365353 - RNA, 19 nt, Artificial Sequence
  Description of Artificial Sequence: Synthetic oligonucleotide
  Antisense strand to SEQ ID NO: 2365352
gucaauaaacgaauuucug

SEQ ID NO: 2365354 - RNA, 19 nt, Artificial Sequence
  Description of Artificial Sequence: Synthetic oligonucleotide
  Sense strand starting at position 1233 of SEQ ID NO: 1885751
gaaauucguuuauugacau

SEQ ID NO: 2365355 - RNA, 19 nt, Artificial Sequence
  Description of Artificial Sequence: Synthetic oligonucleotide
  Antisense strand to SEQ ID NO: 2365354
augucaauaaacgaauuuc

SEQ ID NO: 2365356 - RNA, 19 nt, Artificial Sequence
  Description of Artificial Sequence: Synthetic oligonucleotide
  Sense strand starting at position 1434 of SEQ ID NO: 1885751
cuuggaggagugugucaaa

SEQ ID NO: 2365357 - RNA, 19 nt, Artificial Sequence
  Description of Artificial Sequence: Synthetic oligonucleotide
  Antisense strand to SEQ ID NO: 2365356
uuugacacacuccuccaag

SEQ ID NO: 2365358 - RNA, 19 nt, Artificial Sequence
  Description of Artificial Sequence: Synthetic oligonucleotide
  Sense strand starting at position 1506 of SEQ ID NO: 1885751
uugacucgugaucauuaca

SEQ ID NO: 2365359 - RNA, 19 nt, Artificial Sequence
  Description of Artificial Sequence: Synthetic oligonucleotide
  Antisense strand to SEQ ID NO: 2365358
uguaaugaucacgagucaa

SEQ ID NO: 2365360 - RNA, 19 nt, Artificial Sequence
  Description of Artificial Sequence: Synthetic oligonucleotide
  Sense strand starting at position 1509 of SEQ ID NO: 1885751
acucgugaucauuacagcu

SEQ ID NO: 2365361 - RNA, 19 nt, Artificial Sequence
  Description of Artificial Sequence: Synthetic oligonucleotide
  Antisense strand to SEQ ID NO: 2365360
agcuguaaugaucacgagu

SEQ ID NO: 2365362 - RNA, 19 nt, Artificial Sequence
  Description of Artificial Sequence: Synthetic oligonucleotide
  Sense strand starting at position 2067 of SEQ ID NO: 1885751
ccacaacgccucuaagauu

SEQ ID NO: 2365363 - RNA, 19 nt, Artificial Sequence
  Description of Artificial Sequence: Synthetic oligonucleotide
  Antisense strand to SEQ ID NO: 2365362
aaucuuagaggcguugugg

SEQ ID NO: 2365364 - RNA, 19 nt, Artificial Sequence
  Description of Artificial Sequence: Synthetic oligonucleotide
  Sense strand starting at position 2144 of SEQ ID NO: 1885751
acugcauucuggguaaacu

SEQ ID NO: 2365365 - RNA, 19 nt, Artificial Sequence
  Description of Artificial Sequence: Synthetic oligonucleotide
  Antisense strand to SEQ ID NO: 2365364
aguuuacccagaaugcagu

SEQ ID NO: 2365366 - RNA, 19 nt, Artificial Sequence
  Description of Artificial Sequence: Synthetic oligonucleotide
  Sense strand starting at position 2145 of SEQ ID NO: 1885751
cugcauucuggguaaacug

SEQ ID NO: 2365367 - RNA, 19 nt, Artificial Sequence
  Description of Artificial Sequence: Synthetic oligonucleotide
  Antisense strand to SEQ ID NO: 2365366
caguuuacccagaaugcag

SEQ ID NO: 2365368 - RNA, 19 nt, Artificial Sequence
  Description of Artificial Sequence: Synthetic oligonucleotide
  Sense strand starting at position 2287 of SEQ ID NO: 1885751
cucgcucuuggugagaaau

SEQ ID NO: 2365369 - RNA, 19 nt, Artificial Sequence
  Description of Artificial Sequence: Synthetic oligonucleotide
  Antisense strand to SEQ ID NO: 2365368
auuucucaccaagagcgag

SEQ ID NO: 2365370 - RNA, 19 nt, Artificial Sequence
  Description of Artificial Sequence: Synthetic oligonucleotide
  Sense strand starting at position 2298 of SEQ ID NO: 1885751
ugagaaauaguuugugauu

SEQ ID NO: 2365371 - RNA, 19 nt, Artificial Sequence
  Description of Artificial Sequence: Synthetic oligonucleotide
  Antisense strand to SEQ ID NO: 2365370
aaucacaaacuauuucuca

SEQ ID NO: 2365372 - RNA, 19 nt, Artificial Sequence
  Description of Artificial Sequence: Synthetic oligonucleotide
  Sense strand starting at position 2336 of SEQ ID NO: 1885751
gagcgcuaggcugcuuaaa

SEQ ID NO: 2365373 - RNA, 19 nt, Artificial Sequence
  Description of Artificial Sequence: Synthetic oligonucleotide
  Antisense strand to SEQ ID NO: 2365372
uuuaagcagccuagcgcuc

SEQ ID NO: 2365374 - RNA, 19 nt, Artificial Sequence
  Description of Artificial Sequence: Synthetic oligonucleotide
  Sense strand starting at position 2460 of SEQ ID NO: 1885751
ggguaguagccgucugagu

SEQ ID NO: 2365375 - RNA, 19 nt, Artificial Sequence
  Description of Artificial Sequence: Synthetic oligonucleotide
  Antisense strand to SEQ ID NO: 2365374
acucagacggcuacuaccc

SEQ ID NO: 2365376 - RNA, 19 nt, Artificial Sequence
  Description of Artificial Sequence: Synthetic oligonucleotide
  Sense strand starting at position 2553 of SEQ ID NO: 1885751
cggucugauccggaaauau

SEQ ID NO: 2365377 - RNA, 19 nt, Artificial Sequence
  Description of Artificial Sequence: Synthetic oligonucleotide
  Antisense strand to SEQ ID NO: 2365376
auauuuccggaucagaccg

SEQ ID NO: 2365378 - RNA, 19 nt, Artificial Sequence
  Description of Artificial Sequence: Synthetic oligonucleotide
  Sense strand starting at position 2645 of SEQ ID NO: 1885751
ggcguacuccauguuguuu

SEQ ID NO: 2365379 - RNA, 19 nt, Artificial Sequence
  Description of Artificial Sequence: Synthetic oligonucleotide
  Antisense strand to SEQ ID NO: 2365378
aaacaacauggaguacgcc

SEQ ID NO: 2365380 - RNA, 19 nt, Artificial Sequence
  Description of Artificial Sequence: Synthetic oligonucleotide
  Sense strand starting at position 2710 of SEQ ID NO: 1885751
gacagaucuucccuggagu

SEQ ID NO: 2365381 - RNA, 19 nt, Artificial Sequence
  Description of Artificial Sequence: Synthetic oligonucleotide
  Antisense strand to SEQ ID NO: 2365380
acuccagggaagaucuguc

SEQ ID NO: 2365382 - RNA, 19 nt, Artificial Sequence
  Description of Artificial Sequence: Synthetic oligonucleotide
  Sense strand starting at position 2711 of SEQ ID NO: 1885751
acagaucuucccuggagug

SEQ ID NO: 2365383 - RNA, 19 nt, Artificial Sequence
  Description of Artificial Sequence: Synthetic oligonucleotide
  Antisense strand to SEQ ID NO: 2365382
cacuccagggaagaucugu

SEQ ID NO: 2365384 - RNA, 19 nt, Artificial Sequence
  Description of Artificial Sequence: Synthetic oligonucleotide
  Sense strand starting at position 2729 of SEQ ID NO: 1885751
gguaauucugagcauucga

SEQ ID NO: 2365385 - RNA, 19 nt, Artificial Sequence
  Description of Artificial Sequence: Synthetic oligonucleotide
  Antisense strand to SEQ ID NO: 2365384
ucgaaugcucagaauuacc

SEQ ID NO: 2365386 - RNA, 19 nt, Artificial Sequence
  Description of Artificial Sequence: Synthetic oligonucleotide
  Sense strand starting at position 2740 of SEQ ID NO: 1885751
gcauucgaccaagagcuuu

SEQ ID NO: 2365387 - RNA, 19 nt, Artificial Sequence
  Description of Artificial Sequence: Synthetic oligonucleotide
  Antisense strand to SEQ ID NO: 2365386
aaagcucuuggucgaaugc

SEQ ID NO: 2365388 - RNA, 19 nt, Artificial Sequence
  Description of Artificial Sequence: Synthetic oligonucleotide
  Sense strand starting at position 2828 of SEQ ID NO: 1885751
aggugaaggacuuagucuu

SEQ ID NO: 2365389 - RNA, 19 nt, Artificial Sequence
  Description of Artificial Sequence: Synthetic oligonucleotide
  Antisense strand to SEQ ID NO: 2365388
aagacuaaguccuucaccu

SEQ ID NO: 2365390 - RNA, 19 nt, Artificial Sequence
  Description of Artificial Sequence: Synthetic oligonucleotide
  Sense strand starting at position 3504 of SEQ ID NO: 1885751
guuugaaagcgucauacac

SEQ ID NO: 2365391 - RNA, 19 nt, Artificial Sequence
  Description of Artificial Sequence: Synthetic oligonucleotide
  Antisense strand to SEQ ID NO: 2365390
guguaugacgcuuucaaac

SEQ ID NO: 2365392 - RNA, 19 nt, Artificial Sequence
  Description of Artificial Sequence: Synthetic oligonucleotide
  Sense strand starting at position 3546 of SEQ ID NO: 1885751
ccggaaagacauuguuaag

SEQ ID NO: 2365393 - RNA, 19 nt, Artificial Sequence
  Description of Artificial Sequence: Synthetic oligonucleotide
  Antisense strand to SEQ ID NO: 2365392
cuuaacaaugucuuuccgg

SEQ ID NO: 2365394 - RNA, 19 nt, Artificial Sequence
  Description of Artificial Sequence: Synthetic oligonucleotide
  Sense strand starting at position 3584 of SEQ ID NO: 1885751
gccauuuagugcuucuauc

SEQ ID NO: 2365395 - RNA, 19 nt, Artificial Sequence
  Description of Artificial Sequence: Synthetic oligonucleotide
  Antisense strand to SEQ ID NO: 2365394
gauagaagcacuaaauggc

SEQ ID NO: 2365396 - RNA, 19 nt, Artificial Sequence
  Description of Artificial Sequence: Synthetic oligonucleotide
  Sense strand starting at position 3600 of SEQ ID NO: 1885751
aucucuugaucaucuuagu

SEQ ID NO: 2365397 - RNA, 19 nt, Artificial Sequence
  Description of Artificial Sequence: Synthetic oligonucleotide
  Antisense strand to SEQ ID NO: 2365396
acuaagaugaucaagagau

SEQ ID NO: 2365398 - RNA, 19 nt, Artificial Sequence
  Description of Artificial Sequence: Synthetic oligonucleotide
  Sense strand starting at position 3619 of SEQ ID NO: 1885751
caagcuaguguuuauauga

SEQ ID NO: 2365399 - RNA, 19 nt, Artificial Sequence
  Description of Artificial Sequence: Synthetic oligonucleotide
  Antisense strand to SEQ ID NO: 2365398
ucauauaaacacuagcuug

SEQ ID NO: 2365400 - RNA, 19 nt, Artificial Sequence
  Description of Artificial Sequence: Synthetic oligonucleotide
  Sense strand starting at position 3721 of SEQ ID NO: 1885751
auuauuggcucuuugagau

SEQ ID NO: 2365401 - RNA, 19 nt, Artificial Sequence
  Description of Artificial Sequence: Synthetic oligonucleotide
  Antisense strand to SEQ ID NO: 2365400
aucucaaagagccaauaau

SEQ ID NO: 2365402 - RNA, 19 nt, Artificial Sequence
  Description of Artificial Sequence: Synthetic oligonucleotide
  Sense strand starting at position 3780 of SEQ ID NO: 1885751
aguacuguucuauaaugau

SEQ ID NO: 2365403 - RNA, 19 nt, Artificial Sequence
  Description of Artificial Sequence: Synthetic oligonucleotide
  Antisense strand to SEQ ID NO: 2365402
aucauuauagaacaguacu

SEQ ID NO: 2365404 - RNA, 19 nt, Artificial Sequence
  Description of Artificial Sequence: Synthetic oligonucleotide
  Sense strand starting at position 282 of SEQ ID NO: 1885752
agaccuauuccaugugguu

SEQ ID NO: 2365405 - RNA, 19 nt, Artificial Sequence
  Description of Artificial Sequence: Synthetic oligonucleotide
  Antisense strand to SEQ ID NO: 2365404
aaccacauggaauaggucu

SEQ ID NO: 2365406 - RNA, 19 nt, Artificial Sequence
  Description of Artificial Sequence: Synthetic oligonucleotide
  Sense strand starting at position 416 of SEQ ID NO: 1885752
ggaauacaauuagcuuuau

SEQ ID NO: 2365407 - RNA, 19 nt, Artificial Sequence
  Description of Artificial Sequence: Synthetic oligonucleotide
  Antisense strand to SEQ ID NO: 2365406
auaaagcuaauuguauucc

SEQ ID NO: 2365408 - RNA, 19 nt, Artificial Sequence
  Description of Artificial Sequence: Synthetic oligonucleotide
  Sense strand starting at position 501 of SEQ ID NO: 1885752
ugcuuagagucuuuaaacu

SEQ ID NO: 2365409 - RNA, 19 nt, Artificial Sequence
  Description of Artificial Sequence: Synthetic oligonucleotide
  Antisense strand to SEQ ID NO: 2365408
aguuuaaagacucuaagca

SEQ ID NO: 2365410 - RNA, 19 nt, Artificial Sequence
  Description of Artificial Sequence: Synthetic oligonucleotide
  Sense strand starting at position 520 of SEQ ID NO: 1885752
cccaguagauuaucagauu

SEQ ID NO: 2365411 - RNA, 19 nt, Artificial Sequence
  Description of Artificial Sequence: Synthetic oligonucleotide
  Antisense strand to SEQ ID NO: 2365410
aaucugauaaucuacuggg

SEQ ID NO: 2365412 - RNA, 19 nt, Artificial Sequence
  Description of Artificial Sequence: Synthetic oligonucleotide
  Sense strand starting at position 547 of SEQ ID NO: 1885752
gacugaugugaaugcuuaa

SEQ ID NO: 2365413 - RNA, 19 nt, Artificial Sequence
  Description of Artificial Sequence: Synthetic oligonucleotide
  Antisense strand to SEQ ID NO: 2365412
uuaagcauucacaucaguc

SEQ ID NO: 2365414 - RNA, 19 nt, Artificial Sequence
  Description of Artificial Sequence: Synthetic oligonucleotide
  Sense strand starting at position 550 of SEQ ID NO: 1885752
ugaugugaaugcuuaacca

SEQ ID NO: 2365415 - RNA, 19 nt, Artificial Sequence
  Description of Artificial Sequence: Synthetic oligonucleotide
  Antisense strand to SEQ ID NO: 2365414
ugguuaagcauucacauca

SEQ ID NO: 2365416 - RNA, 19 nt, Artificial Sequence
  Description of Artificial Sequence: Synthetic oligonucleotide
  Sense strand starting at position 554 of SEQ ID NO: 1885752
gugaaugcuuaaccaguuu

SEQ ID NO: 2365417 - RNA, 19 nt, Artificial Sequence
  Description of Artificial Sequence: Synthetic oligonucleotide
  Antisense strand to SEQ ID NO: 2365416
aaacugguuaagcauucac

SEQ ID NO: 2365418 - RNA, 19 nt, Artificial Sequence
  Description of Artificial Sequence: Synthetic oligonucleotide
  Sense strand starting at position 589 of SEQ ID NO: 1885752
gccugaauuuaacaguaag

SEQ ID NO: 2365419 - RNA, 19 nt, Artificial Sequence
  Description of Artificial Sequence: Synthetic oligonucleotide
  Antisense strand to SEQ ID NO: 2365418
cuuacuguuaaauucaggc

SEQ ID NO: 2365420 - RNA, 19 nt, Artificial Sequence
  Description of Artificial Sequence: Synthetic oligonucleotide
  Sense strand starting at position 884 of SEQ ID NO: 1885752
uggcaauccgacggagaga

SEQ ID NO: 2365421 - RNA, 19 nt, Artificial Sequence
  Description of Artificial Sequence: Synthetic oligonucleotide
  Antisense strand to SEQ ID NO: 2365420
ucucuccgucggauugcca

SEQ ID NO: 2365422 - RNA, 19 nt, Artificial Sequence
  Description of Artificial Sequence: Synthetic oligonucleotide
  Sense strand starting at position 977 of SEQ ID NO: 1885752
guuccucugagaggaguuu

SEQ ID NO: 2365423 - RNA, 19 nt, Artificial Sequence
  Description of Artificial Sequence: Synthetic oligonucleotide
  Antisense strand to SEQ ID NO: 2365422
aaacuccucucagaggaac

SEQ ID NO: 2365424 - RNA, 19 nt, Artificial Sequence
  Description of Artificial Sequence: Synthetic oligonucleotide
  Sense strand starting at position 1018 of SEQ ID NO: 1885752
ugggauuccucuucggaag

SEQ ID NO: 2365425 - RNA, 19 nt, Artificial Sequence
  Description of Artificial Sequence: Synthetic oligonucleotide
  Antisense strand to SEQ ID NO: 2365424
cuuccgaagaggaauccca

SEQ ID NO: 2365426 - RNA, 19 nt, Artificial Sequence
  Description of Artificial Sequence: Synthetic oligonucleotide
  Sense strand starting at position 1019 of SEQ ID NO: 1885752
gggauuccucuucggaaga

SEQ ID NO: 2365427 - RNA, 19 nt, Artificial Sequence
  Description of Artificial Sequence: Synthetic oligonucleotide
  Antisense strand to SEQ ID NO: 2365426
ucuuccgaagaggaauccc

SEQ ID NO: 2365428 - RNA, 19 nt, Artificial Sequence
  Description of Artificial Sequence: Synthetic oligonucleotide
  Sense strand starting at position 1099 of SEQ ID NO: 1885752
gucuuuggucuauagcauu

SEQ ID NO: 2365429 - RNA, 19 nt, Artificial Sequence
  Description of Artificial Sequence: Synthetic oligonucleotide
  Antisense strand to SEQ ID NO: 2365428
aaugcuauagaccaaagac

SEQ ID NO: 2365430 - RNA, 19 nt, Artificial Sequence
  Description of Artificial Sequence: Synthetic oligonucleotide
  Sense strand starting at position 1152 of SEQ ID NO: 1885752
gaaggugacauccgugaca

SEQ ID NO: 2365431 - RNA, 19 nt, Artificial Sequence
  Description of Artificial Sequence: Synthetic oligonucleotide
  Antisense strand to SEQ ID NO: 2365430
ugucacggaugucaccuuc

SEQ ID NO: 2365432 - RNA, 19 nt, Artificial Sequence
  Description of Artificial Sequence: Synthetic oligonucleotide
  Sense strand starting at position 1155 of SEQ ID NO: 1885752
ggugacauccgugacagga

SEQ ID NO: 2365433 - RNA, 19 nt, Artificial Sequence
  Description of Artificial Sequence: Synthetic oligonucleotide
  Antisense strand to SEQ ID NO: 2365432
uccugucacggaugucacc

SEQ ID NO: 2365434 - RNA, 19 nt, Artificial Sequence
  Description of Artificial Sequence: Synthetic oligonucleotide
  Sense strand starting at position 1208 of SEQ ID NO: 1885752
gggaauaauguugguaacu

SEQ ID NO: 2365435 - RNA, 19 nt, Artificial Sequence
  Description of Artificial Sequence: Synthetic oligonucleotide
  Antisense strand to SEQ ID NO: 2365434
aguuaccaacauuauuccc

SEQ ID NO: 2365436 - RNA, 19 nt, Artificial Sequence
  Description of Artificial Sequence: Synthetic oligonucleotide
  Sense strand starting at position 1209 of SEQ ID NO: 1885752
ggaauaauguugguaacug

SEQ ID NO: 2365437 - RNA, 19 nt, Artificial Sequence
  Description of Artificial Sequence: Synthetic oligonucleotide
  Antisense strand to SEQ ID NO: 2365436
caguuaccaacauuauucc

SEQ ID NO: 2365438 - RNA, 19 nt, Artificial Sequence
  Description of Artificial Sequence: Synthetic oligonucleotide
  Sense strand starting at position 1249 of SEQ ID NO: 1885752
gcgggaagaacuuggaaau

SEQ ID NO: 2365439 - RNA, 19 nt, Artificial Sequence
  Description of Artificial Sequence: Synthetic oligonucleotide
  Antisense strand to SEQ ID NO: 2365438
auuuccaaguucuucccgc

SEQ ID NO: 2365440 - RNA, 19 nt, Artificial Sequence
  Description of Artificial Sequence: Synthetic oligonucleotide
  Sense strand starting at position 1414 of SEQ ID NO: 1885752
gcgaugaggcgguugcaaa

SEQ ID NO: 2365441 - RNA, 19 nt, Artificial Sequence
  Description of Artificial Sequence: Synthetic oligonucleotide
  Antisense strand to SEQ ID NO: 2365440
uuugcaaccgccucaucgc

SEQ ID NO: 2365442 - RNA, 19 nt, Artificial Sequence
  Description of Artificial Sequence: Synthetic oligonucleotide
  Sense strand starting at position 1455 of SEQ ID NO: 1885752
gugagcuuucgcgcugaag

SEQ ID NO: 2365443 - RNA, 19 nt, Artificial Sequence
  Description of Artificial Sequence: Synthetic oligonucleotide
  Antisense strand to SEQ ID NO: 2365442
cuucagcgcgaaagcucac

SEQ ID NO: 2365444 - RNA, 19 nt, Artificial Sequence
  Description of Artificial Sequence: Synthetic oligonucleotide
  Sense strand starting at position 1489 of SEQ ID NO: 1885752
ggauaaauauaagagugga

SEQ ID NO: 2365445 - RNA, 19 nt, Artificial Sequence
  Description of Artificial Sequence: Synthetic oligonucleotide
  Antisense strand to SEQ ID NO: 2365444
uccacucuuauauuuaucc

SEQ ID NO: 2365446 - RNA, 19 nt, Artificial Sequence
  Description of Artificial Sequence: Synthetic oligonucleotide
  Sense strand starting at position 1573 of SEQ ID NO: 1885752
gaggacucgucuuuaaaug

SEQ ID NO: 2365447 - RNA, 19 nt, Artificial Sequence
  Description of Artificial Sequence: Synthetic oligonucleotide
  Antisense strand to SEQ ID NO: 2365446
cauuuaaagacgaguccuc

SEQ ID NO: 2365448 - RNA, 19 nt, Artificial Sequence
  Description of Artificial Sequence: Synthetic oligonucleotide
  Sense strand starting at position 1574 of SEQ ID NO: 1885752
aggacucgucuuuaaaugu

SEQ ID NO: 2365449 - RNA, 19 nt, Artificial Sequence
  Description of Artificial Sequence: Synthetic oligonucleotide
  Antisense strand to SEQ ID NO: 2365448
acauuuaaagacgaguccu

SEQ ID NO: 2365450 - RNA, 19 nt, Artificial Sequence
  Description of Artificial Sequence: Synthetic oligonucleotide
  Sense strand starting at position 1584 of SEQ ID NO: 1885752
uuuaaaugugcacauuagu

SEQ ID NO: 2365451 - RNA, 19 nt, Artificial Sequence
  Description of Artificial Sequence: Synthetic oligonucleotide
  Antisense strand to SEQ ID NO: 2365450
acuaaugugcacauuuaaa

SEQ ID NO: 2365452 - RNA, 19 nt, Artificial Sequence
  Description of Artificial Sequence: Synthetic oligonucleotide
  Sense strand starting at position 1605 of SEQ ID NO: 1885752
guuucuuaauacguaugaa

SEQ ID NO: 2365453 - RNA, 19 nt, Artificial Sequence
  Description of Artificial Sequence: Synthetic oligonucleotide
  Antisense strand to SEQ ID NO: 2365452
uucauacguauuaagaaac

SEQ ID NO: 2365454 - RNA, 19 nt, Artificial Sequence
  Description of Artificial Sequence: Synthetic oligonucleotide
  Sense strand starting at position 2233 of SEQ ID NO: 1885752
cacguuccugcuuaacaga

SEQ ID NO: 2365455 - RNA, 19 nt, Artificial Sequence
  Description of Artificial Sequence: Synthetic oligonucleotide
  Antisense strand to SEQ ID NO: 2365454
ucuguuaagcaggaacgug

SEQ ID NO: 2365456 - RNA, 19 nt, Artificial Sequence
  Description of Artificial Sequence: Synthetic oligonucleotide
  Sense strand starting at position 2246 of SEQ ID NO: 1885752
aacagaaauuggucaguau

SEQ ID NO: 2365457 - RNA, 19 nt, Artificial Sequence
  Description of Artificial Sequence: Synthetic oligonucleotide
  Antisense strand to SEQ ID NO: 2365456
auacugaccaauuucuguu

SEQ ID NO: 2365458 - RNA, 19 nt, Artificial Sequence
  Description of Artificial Sequence: Synthetic oligonucleotide
  Sense strand starting at position 2522 of SEQ ID NO: 1885752
ucacuauucgaacgaagga

SEQ ID NO: 2365459 - RNA, 19 nt, Artificial Sequence
  Description of Artificial Sequence: Synthetic oligonucleotide
  Antisense strand to SEQ ID NO: 2365458
uccuucguucgaauaguga

SEQ ID NO: 2365460 - RNA, 19 nt, Artificial Sequence
  Description of Artificial Sequence: Synthetic oligonucleotide
  Sense strand starting at position 2662 of SEQ ID NO: 1885752
uugcgacaagcuuagguua

SEQ ID NO: 2365461 - RNA, 19 nt, Artificial Sequence
  Description of Artificial Sequence: Synthetic oligonucleotide
  Antisense strand to SEQ ID NO: 2365460
uaaccuaagcuugucgcaa

SEQ ID NO: 2365462 - RNA, 19 nt, Artificial Sequence
  Description of Artificial Sequence: Synthetic oligonucleotide
  Sense strand starting at position 2721 of SEQ ID NO: 1885752
cauaguagaucugcgaaag

SEQ ID NO: 2365463 - RNA, 19 nt, Artificial Sequence
  Description of Artificial Sequence: Synthetic oligonucleotide
  Antisense strand to SEQ ID NO: 2365462
cuuucgcagaucuacuaug

SEQ ID NO: 2365464 - RNA, 19 nt, Artificial Sequence
  Description of Artificial Sequence: Synthetic oligonucleotide
  Sense strand starting at position 2911 of SEQ ID NO: 1885752
cugcucuguccgcucuaaa

SEQ ID NO: 2365465 - RNA, 19 nt, Artificial Sequence
  Description of Artificial Sequence: Synthetic oligonucleotide
  Antisense strand to SEQ ID NO: 2365464
uuuagagcggacagagcag

SEQ ID NO: 2365466 - RNA, 19 nt, Artificial Sequence
  Description of Artificial Sequence: Synthetic oligonucleotide
  Sense strand starting at position 2912 of SEQ ID NO: 1885752
ugcucuguccgcucuaaau

SEQ ID NO: 2365467 - RNA, 19 nt, Artificial Sequence
  Description of Artificial Sequence: Synthetic oligonucleotide
  Antisense strand to SEQ ID NO: 2365466
auuuagagcggacagagca

SEQ ID NO: 2365468 - RNA, 19 nt, Artificial Sequence
  Description of Artificial Sequence: Synthetic oligonucleotide
  Sense strand starting at position 2914 of SEQ ID NO: 1885752
cucuguccgcucuaaauuu

SEQ ID NO: 2365469 - RNA, 19 nt, Artificial Sequence
  Description of Artificial Sequence: Synthetic oligonucleotide
  Antisense strand to SEQ ID NO: 2365468
aaauuuagagcggacagag

SEQ ID NO: 2365470 - RNA, 19 nt, Artificial Sequence
  Description of Artificial Sequence: Synthetic oligonucleotide
  Sense strand starting at position 3126 of SEQ ID NO: 1885752
aaugaaaucugucuguugu

SEQ ID NO: 2365471 - RNA, 19 nt, Artificial Sequence
  Description of Artificial Sequence: Synthetic oligonucleotide
  Antisense strand to SEQ ID NO: 2365470
acaacagacagauuucauu

SEQ ID NO: 2365472 - RNA, 19 nt, Artificial Sequence
  Description of Artificial Sequence: Synthetic oligonucleotide
  Sense strand starting at position 3152 of SEQ ID NO: 1885752
gcugcacuucuugaaacca

SEQ ID NO: 2365473 - RNA, 19 nt, Artificial Sequence
  Description of Artificial Sequence: Synthetic oligonucleotide
  Antisense strand to SEQ ID NO: 2365472
ugguuucaagaagugcagc

SEQ ID NO: 2365474 - RNA, 19 nt, Artificial Sequence
  Description of Artificial Sequence: Synthetic oligonucleotide
  Sense strand starting at position 3271 of SEQ ID NO: 1885752
uccuaauuggcaggucuaa

SEQ ID NO: 2365475 - RNA, 19 nt, Artificial Sequence
  Description of Artificial Sequence: Synthetic oligonucleotide
  Antisense strand to SEQ ID NO: 2365474
uuagaccugccaauuagga

SEQ ID NO: 2365476 - RNA, 19 nt, Artificial Sequence
  Description of Artificial Sequence: Synthetic oligonucleotide
  Sense strand starting at position 3298 of SEQ ID NO: 1885752
uucugacauaggugaugua

SEQ ID NO: 2365477 - RNA, 19 nt, Artificial Sequence
  Description of Artificial Sequence: Synthetic oligonucleotide
  Antisense strand to SEQ ID NO: 2365476
uacaucaccuaugucagaa

SEQ ID NO: 2365478 - RNA, 19 nt, Artificial Sequence
  Description of Artificial Sequence: Synthetic oligonucleotide
  Sense strand starting at position 3487 of SEQ ID NO: 1885752
cguguucuucaugagugau

SEQ ID NO: 2365479 - RNA, 19 nt, Artificial Sequence
  Description of Artificial Sequence: Synthetic oligonucleotide
  Antisense strand to SEQ ID NO: 2365478
aucacucaugaagaacacg

SEQ ID NO: 2365480 - RNA, 19 nt, Artificial Sequence
  Description of Artificial Sequence: Synthetic oligonucleotide
  Sense strand starting at position 3526 of SEQ ID NO: 1885752
ucaaaucuguaguuccaau

SEQ ID NO: 2365481 - RNA, 19 nt, Artificial Sequence
  Description of Artificial Sequence: Synthetic oligonucleotide
  Antisense strand to SEQ ID NO: 2365480
auuggaacuacagauuuga

SEQ ID NO: 2365482 - RNA, 19 nt, Artificial Sequence
  Description of Artificial Sequence: Synthetic oligonucleotide
  Sense strand starting at position 3543 of SEQ ID NO: 1885752
aucugaugcuguuuccaga

SEQ ID NO: 2365483 - RNA, 19 nt, Artificial Sequence
  Description of Artificial Sequence: Synthetic oligonucleotide
  Antisense strand to SEQ ID NO: 2365482
ucuggaaacagcaucagau

SEQ ID NO: 2365484 - RNA, 19 nt, Artificial Sequence
  Description of Artificial Sequence: Synthetic oligonucleotide
  Sense strand starting at position 653 of SEQ ID NO: 1885753
cugggaaggcuuggacaua

SEQ ID NO: 2365485 - RNA, 19 nt, Artificial Sequence
  Description of Artificial Sequence: Synthetic oligonucleotide
  Antisense strand to SEQ ID NO: 2365484
uauguccaagccuucccag

SEQ ID NO: 2365486 - RNA, 19 nt, Artificial Sequence
  Description of Artificial Sequence: Synthetic oligonucleotide
  Sense strand starting at position 1428 of SEQ ID NO: 1885753
accucuaagccggauacuu

SEQ ID NO: 2365487 - RNA, 19 nt, Artificial Sequence
  Description of Artificial Sequence: Synthetic oligonucleotide
  Antisense strand to SEQ ID NO: 2365486
aaguauccggcuuagaggu

SEQ ID NO: 2365488 - RNA, 19 nt, Artificial Sequence
  Description of Artificial Sequence: Synthetic oligonucleotide
  Sense strand starting at position 1438 of SEQ ID NO: 1885753
cggauacuucccuggacca

SEQ ID NO: 2365489 - RNA, 19 nt, Artificial Sequence
  Description of Artificial Sequence: Synthetic oligonucleotide
  Antisense strand to SEQ ID NO: 2365488
ugguccagggaaguauccg

SEQ ID NO: 2365490 - RNA, 19 nt, Artificial Sequence
  Description of Artificial Sequence: Synthetic oligonucleotide
  Sense strand starting at position 1487 of SEQ ID NO: 1885753
ucguuucugccagcgguua

SEQ ID NO: 2365491 - RNA, 19 nt, Artificial Sequence
  Description of Artificial Sequence: Synthetic oligonucleotide
  Antisense strand to SEQ ID NO: 2365490
uaaccgcuggcagaaacga

SEQ ID NO: 2365492 - RNA, 19 nt, Artificial Sequence
  Description of Artificial Sequence: Synthetic oligonucleotide
  Sense strand starting at position 1506 of SEQ ID NO: 1885753
ccaagacccugggauauuu

SEQ ID NO: 2365493 - RNA, 19 nt, Artificial Sequence
  Description of Artificial Sequence: Synthetic oligonucleotide
  Antisense strand to SEQ ID NO: 2365492
aaauaucccagggucuugg

SEQ ID NO: 2365494 - RNA, 19 nt, Artificial Sequence
  Description of Artificial Sequence: Synthetic oligonucleotide
  Sense strand starting at position 1591 of SEQ ID NO: 1885753
ggcuuuggccuggagaaag

SEQ ID NO: 2365495 - RNA, 19 nt, Artificial Sequence
  Description of Artificial Sequence: Synthetic oligonucleotide
  Antisense strand to SEQ ID NO: 2365494
cuuucuccaggccaaagcc

SEQ ID NO: 2365496 - RNA, 19 nt, Artificial Sequence
  Description of Artificial Sequence: Synthetic oligonucleotide
  Sense strand starting at position 1631 of SEQ ID NO: 1885753
cgacaauacccuggagaac

SEQ ID NO: 2365497 - RNA, 19 nt, Artificial Sequence
  Description of Artificial Sequence: Synthetic oligonucleotide
  Antisense strand to SEQ ID NO: 2365496
guucuccaggguauugucg

SEQ ID NO: 2365498 - RNA, 19 nt, Artificial Sequence
  Description of Artificial Sequence: Synthetic oligonucleotide
  Sense strand starting at position 1662 of SEQ ID NO: 1885753
uauaauuggcgcguuacua

SEQ ID NO: 2365499 - RNA, 19 nt, Artificial Sequence
  Description of Artificial Sequence: Synthetic oligonucleotide
  Antisense strand to SEQ ID NO: 2365498
uaguaacgcgccaauuaua

SEQ ID NO: 2365500 - RNA, 19 nt, Artificial Sequence
  Description of Artificial Sequence: Synthetic oligonucleotide
  Sense strand starting at position 2869 of SEQ ID NO: 1885753
cagaaacggcuguaacuaa

SEQ ID NO: 2365501 - RNA, 19 nt, Artificial Sequence
  Description of Artificial Sequence: Synthetic oligonucleotide
  Antisense strand to SEQ ID NO: 2365500
uuaguuacagccguuucug

SEQ ID NO: 2365502 - RNA, 19 nt, Artificial Sequence
  Description of Artificial Sequence: Synthetic oligonucleotide
  Sense strand starting at position 3480 of SEQ ID NO: 1885753
ugagauauucuauguaauc

SEQ ID NO: 2365503 - RNA, 19 nt, Artificial Sequence
  Description of Artificial Sequence: Synthetic oligonucleotide
  Antisense strand to SEQ ID NO: 2365502
gauuacauagaauaucuca

SEQ ID NO: 2365504 - RNA, 19 nt, Artificial Sequence
  Description of Artificial Sequence: Synthetic oligonucleotide
  Sense strand starting at position 3525 of SEQ ID NO: 1885753
uggugagucguccucgauu

SEQ ID NO: 2365505 - RNA, 19 nt, Artificial Sequence
  Description of Artificial Sequence: Synthetic oligonucleotide
  Antisense strand to SEQ ID NO: 2365504
aaucgaggacgacucacca

SEQ ID NO: 2365506 - RNA, 19 nt, Artificial Sequence
  Description of Artificial Sequence: Synthetic oligonucleotide
  Sense strand starting at position 3839 of SEQ ID NO: 1885753
cugagaaguuucuuaucuu

SEQ ID NO: 2365507 - RNA, 19 nt, Artificial Sequence
  Description of Artificial Sequence: Synthetic oligonucleotide
  Antisense strand to SEQ ID NO: 2365506
aagauaagaaacuucucag

SEQ ID NO: 2365508 - RNA, 19 nt, Artificial Sequence
  Description of Artificial Sequence: Synthetic oligonucleotide
  Sense strand starting at position 35 of SEQ ID NO: 1885754
auuaaagagaguuguauga

SEQ ID NO: 2365509 - RNA, 19 nt, Artificial Sequence
  Description of Artificial Sequence: Synthetic oligonucleotide
  Antisense strand to SEQ ID NO: 2365508
ucauacaacucucuuuaau

SEQ ID NO: 2365510 - RNA, 19 nt, Artificial Sequence
  Description of Artificial Sequence: Synthetic oligonucleotide
  Sense strand starting at position 49 of SEQ ID NO: 1885754
uaugaaaugucagucacag

SEQ ID NO: 2365511 - RNA, 19 nt, Artificial Sequence
  Description of Artificial Sequence: Synthetic oligonucleotide
  Antisense strand to SEQ ID NO: 2365510
cugugacugacauuucaua

SEQ ID NO: 2365512 - RNA, 19 nt, Artificial Sequence
  Description of Artificial Sequence: Synthetic oligonucleotide
  Sense strand starting at position 96 of SEQ ID NO: 1885754
gggucuuguagacaccaca

SEQ ID NO: 2365513 - RNA, 19 nt, Artificial Sequence
  Description of Artificial Sequence: Synthetic oligonucleotide
  Antisense strand to SEQ ID NO: 2365512
uguggugucuacaagaccc

SEQ ID NO: 2365514 - RNA, 19 nt, Artificial Sequence
  Description of Artificial Sequence: Synthetic oligonucleotide
  Sense strand starting at position 120 of SEQ ID NO: 1885754
gcuuuaaaucugggugaac

SEQ ID NO: 2365515 - RNA, 19 nt, Artificial Sequence
  Description of Artificial Sequence: Synthetic oligonucleotide
  Antisense strand to SEQ ID NO: 2365514
guucacccagauuuaaagc

SEQ ID NO: 2365516 - RNA, 19 nt, Artificial Sequence
  Description of Artificial Sequence: Synthetic oligonucleotide
  Sense strand starting at position 122 of SEQ ID NO: 1885754
uuuaaaucugggugaacca

SEQ ID NO: 2365517 - RNA, 19 nt, Artificial Sequence
  Description of Artificial Sequence: Synthetic oligonucleotide
  Antisense strand to SEQ ID NO: 2365516
ugguucacccagauuuaaa

SEQ ID NO: 2365518 - RNA, 19 nt, Artificial Sequence
  Description of Artificial Sequence: Synthetic oligonucleotide
  Sense strand starting at position 230 of SEQ ID NO: 1885754
caagaugauguuggcucaa

SEQ ID NO: 2365519 - RNA, 19 nt, Artificial Sequence
  Description of Artificial Sequence: Synthetic oligonucleotide
  Antisense strand to SEQ ID NO: 2365518
uugagccaacaucaucuug

SEQ ID NO: 2365520 - RNA, 19 nt, Artificial Sequence
  Description of Artificial Sequence: Synthetic oligonucleotide
  Sense strand starting at position 232 of SEQ ID NO: 1885754
agaugauguuggcucaaac

SEQ ID NO: 2365521 - RNA, 19 nt, Artificial Sequence
  Description of Artificial Sequence: Synthetic oligonucleotide
  Antisense strand to SEQ ID NO: 2365520
guuugagccaacaucaucu

SEQ ID NO: 2365522 - RNA, 19 nt, Artificial Sequence
  Description of Artificial Sequence: Synthetic oligonucleotide
  Sense strand starting at position 241 of SEQ ID NO: 1885754
uggcucaaaccagguuaaa

SEQ ID NO: 2365523 - RNA, 19 nt, Artificial Sequence
  Description of Artificial Sequence: Synthetic oligonucleotide
  Antisense strand to SEQ ID NO: 2365522
uuuaaccugguuugagcca

SEQ ID NO: 2365524 - RNA, 19 nt, Artificial Sequence
  Description of Artificial Sequence: Synthetic oligonucleotide
  Sense strand starting at position 252 of SEQ ID NO: 1885754
agguuaaaccacuggguaa

SEQ ID NO: 2365525 - RNA, 19 nt, Artificial Sequence
  Description of Artificial Sequence: Synthetic oligonucleotide
  Antisense strand to SEQ ID NO: 2365524
uuacccagugguuuaaccu

SEQ ID NO: 2365526 - RNA, 19 nt, Artificial Sequence
  Description of Artificial Sequence: Synthetic oligonucleotide
  Sense strand starting at position 253 of SEQ ID NO: 1885754
gguuaaaccacuggguaaa

SEQ ID NO: 2365527 - RNA, 19 nt, Artificial Sequence
  Description of Artificial Sequence: Synthetic oligonucleotide
  Antisense strand to SEQ ID NO: 2365526
uuuacccagugguuuaacc

SEQ ID NO: 2365528 - RNA, 19 nt, Artificial Sequence
  Description of Artificial Sequence: Synthetic oligonucleotide
  Sense strand starting at position 254 of SEQ ID NO: 1885754
guuaaaccacuggguaaau

SEQ ID NO: 2365529 - RNA, 19 nt, Artificial Sequence
  Description of Artificial Sequence: Synthetic oligonucleotide
  Antisense strand to SEQ ID NO: 2365528
auuuacccagugguuuaac

SEQ ID NO: 2365530 - RNA, 19 nt, Artificial Sequence
  Description of Artificial Sequence: Synthetic oligonucleotide
  Sense strand starting at position 325 of SEQ ID NO: 1885754
uucugaugccuguaacaac

SEQ ID NO: 2365531 - RNA, 19 nt, Artificial Sequence
  Description of Artificial Sequence: Synthetic oligonucleotide
  Antisense strand to SEQ ID NO: 2365530
guuguuacaggcaucagaa

SEQ ID NO: 2365532 - RNA, 19 nt, Artificial Sequence
  Description of Artificial Sequence: Synthetic oligonucleotide
  Sense strand starting at position 346 of SEQ ID NO: 1885754
ucacauucuccucaagcga

SEQ ID NO: 2365533 - RNA, 19 nt, Artificial Sequence
  Description of Artificial Sequence: Synthetic oligonucleotide
  Antisense strand to SEQ ID NO: 2365532
ucgcuugaggagaauguga

SEQ ID NO: 2365534 - RNA, 19 nt, Artificial Sequence
  Description of Artificial Sequence: Synthetic oligonucleotide
  Sense strand starting at position 471 of SEQ ID NO: 1885754
guauuaagugcugaugaag

SEQ ID NO: 2365535 - RNA, 19 nt, Artificial Sequence
  Description of Artificial Sequence: Synthetic oligonucleotide
  Antisense strand to SEQ ID NO: 2365534
cuucaucagcacuuaauac

SEQ ID NO: 2365536 - RNA, 19 nt, Artificial Sequence
  Description of Artificial Sequence: Synthetic oligonucleotide
  Sense strand starting at position 504 of SEQ ID NO: 1885754
uuugcaacucugugauuuc

SEQ ID NO: 2365537 - RNA, 19 nt, Artificial Sequence
  Description of Artificial Sequence: Synthetic oligonucleotide
  Antisense strand to SEQ ID NO: 2365536
gaaaucacagaguugcaaa

SEQ ID NO: 2365538 - RNA, 19 nt, Artificial Sequence
  Description of Artificial Sequence: Synthetic oligonucleotide
  Sense strand starting at position 507 of SEQ ID NO: 1885754
gcaacucugugauuucucu

SEQ ID NO: 2365539 - RNA, 19 nt, Artificial Sequence
  Description of Artificial Sequence: Synthetic oligonucleotide
  Antisense strand to SEQ ID NO: 2365538
agagaaaucacagaguugc

SEQ ID NO: 2365540 - RNA, 19 nt, Artificial Sequence
  Description of Artificial Sequence: Synthetic oligonucleotide
  Sense strand starting at position 511 of SEQ ID NO: 1885754
cucugugauuucucuguag

SEQ ID NO: 2365541 - RNA, 19 nt, Artificial Sequence
  Description of Artificial Sequence: Synthetic oligonucleotide
  Antisense strand to SEQ ID NO: 2365540
cuacagagaaaucacagag

SEQ ID NO: 2365542 - RNA, 19 nt, Artificial Sequence
  Description of Artificial Sequence: Synthetic oligonucleotide
  Sense strand starting at position 1427 of SEQ ID NO: 1885754
accucuaagccggauacuu

SEQ ID NO: 2365543 - RNA, 19 nt, Artificial Sequence
  Description of Artificial Sequence: Synthetic oligonucleotide
  Antisense strand to SEQ ID NO: 2365542
aaguauccggcuuagaggu

SEQ ID NO: 2365544 - RNA, 19 nt, Artificial Sequence
  Description of Artificial Sequence: Synthetic oligonucleotide
  Sense strand starting at position 1437 of SEQ ID NO: 1885754
cggauacuucccuggacca

SEQ ID NO: 2365545 - RNA, 19 nt, Artificial Sequence
  Description of Artificial Sequence: Synthetic oligonucleotide
  Antisense strand to SEQ ID NO: 2365544
ugguccagggaaguauccg

SEQ ID NO: 2365546 - RNA, 19 nt, Artificial Sequence
  Description of Artificial Sequence: Synthetic oligonucleotide
  Sense strand starting at position 1486 of SEQ ID NO: 1885754
ucguuucugccagcgguua

SEQ ID NO: 2365547 - RNA, 19 nt, Artificial Sequence
  Description of Artificial Sequence: Synthetic oligonucleotide
  Antisense strand to SEQ ID NO: 2365546
uaaccgcuggcagaaacga

SEQ ID NO: 2365548 - RNA, 19 nt, Artificial Sequence
  Description of Artificial Sequence: Synthetic oligonucleotide
  Sense strand starting at position 1505 of SEQ ID NO: 1885754
ccaagacccugggauauuu

SEQ ID NO: 2365549 - RNA, 19 nt, Artificial Sequence
  Description of Artificial Sequence: Synthetic oligonucleotide
  Antisense strand to SEQ ID NO: 2365548
aaauaucccagggucuugg

SEQ ID NO: 2365550 - RNA, 19 nt, Artificial Sequence
  Description of Artificial Sequence: Synthetic oligonucleotide
  Sense strand starting at position 1590 of SEQ ID NO: 1885754
ggcuuuggccuggagaaag

SEQ ID NO: 2365551 - RNA, 19 nt, Artificial Sequence
  Description of Artificial Sequence: Synthetic oligonucleotide
  Antisense strand to SEQ ID NO: 2365550
cuuucuccaggccaaagcc

SEQ ID NO: 2365552 - RNA, 19 nt, Artificial Sequence
  Description of Artificial Sequence: Synthetic oligonucleotide
  Sense strand starting at position 1630 of SEQ ID NO: 1885754
cgacaauacccuggagaac

SEQ ID NO: 2365553 - RNA, 19 nt, Artificial Sequence
  Description of Artificial Sequence: Synthetic oligonucleotide
  Antisense strand to SEQ ID NO: 2365552
guucuccaggguauugucg

SEQ ID NO: 2365554 - RNA, 19 nt, Artificial Sequence
  Description of Artificial Sequence: Synthetic oligonucleotide
  Sense strand starting at position 1661 of SEQ ID NO: 1885754
uauaauuggcgcguuacua

SEQ ID NO: 2365555 - RNA, 19 nt, Artificial Sequence
  Description of Artificial Sequence: Synthetic oligonucleotide
  Antisense strand to SEQ ID NO: 2365554
uaguaacgcgccaauuaua

SEQ ID NO: 2365556 - RNA, 19 nt, Artificial Sequence
  Description of Artificial Sequence: Synthetic oligonucleotide
  Sense strand starting at position 2868 of SEQ ID NO: 1885754
cagaaacggcuguaacuaa

SEQ ID NO: 2365557 - RNA, 19 nt, Artificial Sequence
  Description of Artificial Sequence: Synthetic oligonucleotide
  Antisense strand to SEQ ID NO: 2365556
uuaguuacagccguuucug

SEQ ID NO: 2365558 - RNA, 19 nt, Artificial Sequence
  Description of Artificial Sequence: Synthetic oligonucleotide
  Sense strand starting at position 3485 of SEQ ID NO: 1885754
ugagauauucuauguaauc

SEQ ID NO: 2365559 - RNA, 19 nt, Artificial Sequence
  Description of Artificial Sequence: Synthetic oligonucleotide
  Antisense strand to SEQ ID NO: 2365558
gauuacauagaauaucuca

SEQ ID NO: 2365560 - RNA, 19 nt, Artificial Sequence
  Description of Artificial Sequence: Synthetic oligonucleotide
  Sense strand starting at position 3530 of SEQ ID NO: 1885754
uggugagucguccucgauu

SEQ ID NO: 2365561 - RNA, 19 nt, Artificial Sequence
  Description of Artificial Sequence: Synthetic oligonucleotide
  Antisense strand to SEQ ID NO: 2365560
aaucgaggacgacucacca

SEQ ID NO: 2365562 - RNA, 19 nt, Artificial Sequence
  Description of Artificial Sequence: Synthetic oligonucleotide
  Sense strand starting at position 3844 of SEQ ID NO: 1885754
cugagaaguuucuuaucuu

SEQ ID NO: 2365563 - RNA, 19 nt, Artificial Sequence
  Description of Artificial Sequence: Synthetic oligonucleotide
  Antisense strand to SEQ ID NO: 2365562
aagauaagaaacuucucag

SEQ ID NO: 2365564 - RNA, 19 nt, Artificial Sequence
  Description of Artificial Sequence: Synthetic oligonucleotide
  Sense strand starting at position 653 of SEQ ID NO: 1885755
cugggaaggcuuggacaua

SEQ ID NO: 2365565 - RNA, 19 nt, Artificial Sequence
  Description of Artificial Sequence: Synthetic oligonucleotide
  Antisense strand to SEQ ID NO: 2365564
uauguccaagccuucccag

SEQ ID NO: 2365566 - RNA, 19 nt, Artificial Sequence
  Description of Artificial Sequence: Synthetic oligonucleotide
  Sense strand starting at position 1428 of SEQ ID NO: 1885755
accucuaagccggauacuu

SEQ ID NO: 2365567 - RNA, 19 nt, Artificial Sequence
  Description of Artificial Sequence: Synthetic oligonucleotide
  Antisense strand to SEQ ID NO: 2365566
aaguauccggcuuagaggu

SEQ ID NO: 2365568 - RNA, 19 nt, Artificial Sequence
  Description of Artificial Sequence: Synthetic oligonucleotide
  Sense strand starting at position 1438 of SEQ ID NO: 1885755
cggauacuucccuggacca

SEQ ID NO: 2365569 - RNA, 19 nt, Artificial Sequence
  Description of Artificial Sequence: Synthetic oligonucleotide
  Antisense strand to SEQ ID NO: 2365568
ugguccagggaaguauccg

SEQ ID NO: 2365570 - RNA, 19 nt, Artificial Sequence
  Description of Artificial Sequence: Synthetic oligonucleotide
  Sense strand starting at position 1487 of SEQ ID NO: 1885755
ucguuucugccagcgguua

SEQ ID NO: 2365571 - RNA, 19 nt, Artificial Sequence
  Description of Artificial Sequence: Synthetic oligonucleotide
  Antisense strand to SEQ ID NO: 2365570
uaaccgcuggcagaaacga

SEQ ID NO: 2365572 - RNA, 19 nt, Artificial Sequence
  Description of Artificial Sequence: Synthetic oligonucleotide
  Sense strand starting at position 1506 of SEQ ID NO: 1885755
ccaagacccugggauauuu

SEQ ID NO: 2365573 - RNA, 19 nt, Artificial Sequence
  Description of Artificial Sequence: Synthetic oligonucleotide
  Antisense strand to SEQ ID NO: 2365572
aaauaucccagggucuugg

SEQ ID NO: 2365574 - RNA, 19 nt, Artificial Sequence
  Description of Artificial Sequence: Synthetic oligonucleotide
  Sense strand starting at position 1591 of SEQ ID NO: 1885755
ggcuuuggccuggagaaag

SEQ ID NO: 2365575 - RNA, 19 nt, Artificial Sequence
  Description of Artificial Sequence: Synthetic oligonucleotide
  Antisense strand to SEQ ID NO: 2365574
cuuucuccaggccaaagcc

SEQ ID NO: 2365576 - RNA, 19 nt, Artificial Sequence
  Description of Artificial Sequence: Synthetic oligonucleotide
  Sense strand starting at position 1631 of SEQ ID NO: 1885755
cgacaauacccuggagaac

SEQ ID NO: 2365577 - RNA, 19 nt, Artificial Sequence
  Description of Artificial Sequence: Synthetic oligonucleotide
  Antisense strand to SEQ ID NO: 2365576
guucuccaggguauugucg

SEQ ID NO: 2365578 - RNA, 19 nt, Artificial Sequence
  Description of Artificial Sequence: Synthetic oligonucleotide
  Sense strand starting at position 1662 of SEQ ID NO: 1885755
uauaauuggcgcguuacua

SEQ ID NO: 2365579 - RNA, 19 nt, Artificial Sequence
  Description of Artificial Sequence: Synthetic oligonucleotide
  Antisense strand to SEQ ID NO: 2365578
uaguaacgcgccaauuaua

SEQ ID NO: 2365580 - RNA, 19 nt, Artificial Sequence
  Description of Artificial Sequence: Synthetic oligonucleotide
  Sense strand starting at position 2869 of SEQ ID NO: 1885755
cagaaacggcuguaacuaa

SEQ ID NO: 2365581 - RNA, 19 nt, Artificial Sequence
  Description of Artificial Sequence: Synthetic oligonucleotide
  Antisense strand to SEQ ID NO: 2365580
uuaguuacagccguuucug

SEQ ID NO: 2365582 - RNA, 19 nt, Artificial Sequence
  Description of Artificial Sequence: Synthetic oligonucleotide
  Sense strand starting at position 3480 of SEQ ID NO: 1885755
ugagauauucuauguaauc

SEQ ID NO: 2365583 - RNA, 19 nt, Artificial Sequence
  Description of Artificial Sequence: Synthetic oligonucleotide
  Antisense strand to SEQ ID NO: 2365582
gauuacauagaauaucuca

SEQ ID NO: 2365584 - RNA, 19 nt, Artificial Sequence
  Description of Artificial Sequence: Synthetic oligonucleotide
  Sense strand starting at position 3525 of SEQ ID NO: 1885755
uggugagucguccucgauu

SEQ ID NO: 2365585 - RNA, 19 nt, Artificial Sequence
  Description of Artificial Sequence: Synthetic oligonucleotide
  Antisense strand to SEQ ID NO: 2365584
aaucgaggacgacucacca

SEQ ID NO: 2365586 - RNA, 19 nt, Artificial Sequence
  Description of Artificial Sequence: Synthetic oligonucleotide
  Sense strand starting at position 3839 of SEQ ID NO: 1885755
cugagaaguuucuuaucuu

SEQ ID NO: 2365587 - RNA, 19 nt, Artificial Sequence
  Description of Artificial Sequence: Synthetic oligonucleotide
  Antisense strand to SEQ ID NO: 2365586
aagauaagaaacuucucag

SEQ ID NO: 2365588 - RNA, 19 nt, Artificial Sequence
  Description of Artificial Sequence: Synthetic oligonucleotide
  Sense strand starting at position 35 of SEQ ID NO: 1885756
auuaaagagaguuguauga

SEQ ID NO: 2365589 - RNA, 19 nt, Artificial Sequence
  Description of Artificial Sequence: Synthetic oligonucleotide
  Antisense strand to SEQ ID NO: 2365588
ucauacaacucucuuuaau

SEQ ID NO: 2365590 - RNA, 19 nt, Artificial Sequence
  Description of Artificial Sequence: Synthetic oligonucleotide
  Sense strand starting at position 49 of SEQ ID NO: 1885756
uaugaaaugucagucacag

SEQ ID NO: 2365591 - RNA, 19 nt, Artificial Sequence
  Description of Artificial Sequence: Synthetic oligonucleotide
  Antisense strand to SEQ ID NO: 2365590
cugugacugacauuucaua

SEQ ID NO: 2365592 - RNA, 19 nt, Artificial Sequence
  Description of Artificial Sequence: Synthetic oligonucleotide
  Sense strand starting at position 96 of SEQ ID NO: 1885756
gggucuuguagacaccaca

SEQ ID NO: 2365593 - RNA, 19 nt, Artificial Sequence
  Description of Artificial Sequence: Synthetic oligonucleotide
  Antisense strand to SEQ ID NO: 2365592
uguggugucuacaagaccc

SEQ ID NO: 2365594 - RNA, 19 nt, Artificial Sequence
  Description of Artificial Sequence: Synthetic oligonucleotide
  Sense strand starting at position 120 of SEQ ID NO: 1885756
gcuuuaaaucugggugaac

SEQ ID NO: 2365595 - RNA, 19 nt, Artificial Sequence
  Description of Artificial Sequence: Synthetic oligonucleotide
  Antisense strand to SEQ ID NO: 2365594
guucacccagauuuaaagc

SEQ ID NO: 2365596 - RNA, 19 nt, Artificial Sequence
  Description of Artificial Sequence: Synthetic oligonucleotide
  Sense strand starting at position 122 of SEQ ID NO: 1885756
uuuaaaucugggugaacca

SEQ ID NO: 2365597 - RNA, 19 nt, Artificial Sequence
  Description of Artificial Sequence: Synthetic oligonucleotide
  Antisense strand to SEQ ID NO: 2365596
ugguucacccagauuuaaa

SEQ ID NO: 2365598 - RNA, 19 nt, Artificial Sequence
  Description of Artificial Sequence: Synthetic oligonucleotide
  Sense strand starting at position 230 of SEQ ID NO: 1885756
caagaugauguuggcucaa

SEQ ID NO: 2365599 - RNA, 19 nt, Artificial Sequence
  Description of Artificial Sequence: Synthetic oligonucleotide
  Antisense strand to SEQ ID NO: 2365598
uugagccaacaucaucuug

SEQ ID NO: 2365600 - RNA, 19 nt, Artificial Sequence
  Description of Artificial Sequence: Synthetic oligonucleotide
  Sense strand starting at position 232 of SEQ ID NO: 1885756
agaugauguuggcucaaac

SEQ ID NO: 2365601 - RNA, 19 nt, Artificial Sequence
  Description of Artificial Sequence: Synthetic oligonucleotide
  Antisense strand to SEQ ID NO: 2365600
guuugagccaacaucaucu

SEQ ID NO: 2365602 - RNA, 19 nt, Artificial Sequence
  Description of Artificial Sequence: Synthetic oligonucleotide
  Sense strand starting at position 241 of SEQ ID NO: 1885756
uggcucaaaccagguuaaa

SEQ ID NO: 2365603 - RNA, 19 nt, Artificial Sequence
  Description of Artificial Sequence: Synthetic oligonucleotide
  Antisense strand to SEQ ID NO: 2365602
uuuaaccugguuugagcca

SEQ ID NO: 2365604 - RNA, 19 nt, Artificial Sequence
  Description of Artificial Sequence: Synthetic oligonucleotide
  Sense strand starting at position 252 of SEQ ID NO: 1885756
agguuaaaccacuggguaa

SEQ ID NO: 2365605 - RNA, 19 nt, Artificial Sequence
  Description of Artificial Sequence: Synthetic oligonucleotide
  Antisense strand to SEQ ID NO: 2365604
uuacccagugguuuaaccu

SEQ ID NO: 2365606 - RNA, 19 nt, Artificial Sequence
  Description of Artificial Sequence: Synthetic oligonucleotide
  Sense strand starting at position 253 of SEQ ID NO: 1885756
gguuaaaccacuggguaaa

SEQ ID NO: 2365607 - RNA, 19 nt, Artificial Sequence
  Description of Artificial Sequence: Synthetic oligonucleotide
  Antisense strand to SEQ ID NO: 2365606
uuuacccagugguuuaacc

SEQ ID NO: 2365608 - RNA, 19 nt, Artificial Sequence
  Description of Artificial Sequence: Synthetic oligonucleotide
  Sense strand starting at position 254 of SEQ ID NO: 1885756
guuaaaccacuggguaaau

SEQ ID NO: 2365609 - RNA, 19 nt, Artificial Sequence
  Description of Artificial Sequence: Synthetic oligonucleotide
  Antisense strand to SEQ ID NO: 2365608
auuuacccagugguuuaac

SEQ ID NO: 2365610 - RNA, 19 nt, Artificial Sequence
  Description of Artificial Sequence: Synthetic oligonucleotide
  Sense strand starting at position 325 of SEQ ID NO: 1885756
uucugaugccuguaacaac

SEQ ID NO: 2365611 - RNA, 19 nt, Artificial Sequence
  Description of Artificial Sequence: Synthetic oligonucleotide
  Antisense strand to SEQ ID NO: 2365610
guuguuacaggcaucagaa

SEQ ID NO: 2365612 - RNA, 19 nt, Artificial Sequence
  Description of Artificial Sequence: Synthetic oligonucleotide
  Sense strand starting at position 346 of SEQ ID NO: 1885756
ucacauucuccucaagcga

SEQ ID NO: 2365613 - RNA, 19 nt, Artificial Sequence
  Description of Artificial Sequence: Synthetic oligonucleotide
  Antisense strand to SEQ ID NO: 2365612
ucgcuugaggagaauguga

SEQ ID NO: 2365614 - RNA, 19 nt, Artificial Sequence
  Description of Artificial Sequence: Synthetic oligonucleotide
  Sense strand starting at position 471 of SEQ ID NO: 1885756
guauuaagugcugaugaag

SEQ ID NO: 2365615 - RNA, 19 nt, Artificial Sequence
  Description of Artificial Sequence: Synthetic oligonucleotide
  Antisense strand to SEQ ID NO: 2365614
cuucaucagcacuuaauac

SEQ ID NO: 2365616 - RNA, 19 nt, Artificial Sequence
  Description of Artificial Sequence: Synthetic oligonucleotide
  Sense strand starting at position 504 of SEQ ID NO: 1885756
uuugcaacucugugauuuc

SEQ ID NO: 2365617 - RNA, 19 nt, Artificial Sequence
  Description of Artificial Sequence: Synthetic oligonucleotide
  Antisense strand to SEQ ID NO: 2365616
gaaaucacagaguugcaaa

SEQ ID NO: 2365618 - RNA, 19 nt, Artificial Sequence
  Description of Artificial Sequence: Synthetic oligonucleotide
  Sense strand starting at position 507 of SEQ ID NO: 1885756
gcaacucugugauuucucu

SEQ ID NO: 2365619 - RNA, 19 nt, Artificial Sequence
  Description of Artificial Sequence: Synthetic oligonucleotide
  Antisense strand to SEQ ID NO: 2365618
agagaaaucacagaguugc

SEQ ID NO: 2365620 - RNA, 19 nt, Artificial Sequence
  Description of Artificial Sequence: Synthetic oligonucleotide
  Sense strand starting at position 511 of SEQ ID NO: 1885756
cucugugauuucucuguag

SEQ ID NO: 2365621 - RNA, 19 nt, Artificial Sequence
  Description of Artificial Sequence: Synthetic oligonucleotide
  Antisense strand to SEQ ID NO: 2365620
cuacagagaaaucacagag

SEQ ID NO: 2365622 - RNA, 19 nt, Artificial Sequence
  Description of Artificial Sequence: Synthetic oligonucleotide
  Sense strand starting at position 1427 of SEQ ID NO: 1885756
accucuaagccggauacuu

SEQ ID NO: 2365623 - RNA, 19 nt, Artificial Sequence
  Description of Artificial Sequence: Synthetic oligonucleotide
  Antisense strand to SEQ ID NO: 2365622
aaguauccggcuuagaggu

SEQ ID NO: 2365624 - RNA, 19 nt, Artificial Sequence
  Description of Artificial Sequence: Synthetic oligonucleotide
  Sense strand starting at position 1437 of SEQ ID NO: 1885756
cggauacuucccuggacca

SEQ ID NO: 2365625 - RNA, 19 nt, Artificial Sequence
  Description of Artificial Sequence: Synthetic oligonucleotide
  Antisense strand to SEQ ID NO: 2365624
ugguccagggaaguauccg

SEQ ID NO: 2365626 - RNA, 19 nt, Artificial Sequence
  Description of Artificial Sequence: Synthetic oligonucleotide
  Sense strand starting at position 1486 of SEQ ID NO: 1885756
ucguuucugccagcgguua

SEQ ID NO: 2365627 - RNA, 19 nt, Artificial Sequence
  Description of Artificial Sequence: Synthetic oligonucleotide
  Antisense strand to SEQ ID NO: 2365626
uaaccgcuggcagaaacga

SEQ ID NO: 2365628 - RNA, 19 nt, Artificial Sequence
  Description of Artificial Sequence: Synthetic oligonucleotide
  Sense strand starting at position 1505 of SEQ ID NO: 1885756
ccaagacccugggauauuu

SEQ ID NO: 2365629 - RNA, 19 nt, Artificial Sequence
  Description of Artificial Sequence: Synthetic oligonucleotide
  Antisense strand to SEQ ID NO: 2365628
aaauaucccagggucuugg

SEQ ID NO: 2365630 - RNA, 19 nt, Artificial Sequence
  Description of Artificial Sequence: Synthetic oligonucleotide
  Sense strand starting at position 1590 of SEQ ID NO: 1885756
ggcuuuggccuggagaaag

SEQ ID NO: 2365631 - RNA, 19 nt, Artificial Sequence
  Description of Artificial Sequence: Synthetic oligonucleotide
  Antisense strand to SEQ ID NO: 2365630
cuuucuccaggccaaagcc

SEQ ID NO: 2365632 - RNA, 19 nt, Artificial Sequence
  Description of Artificial Sequence: Synthetic oligonucleotide
  Sense strand starting at position 1630 of SEQ ID NO: 1885756
cgacaauacccuggagaac

SEQ ID NO: 2365633 - RNA, 19 nt, Artificial Sequence
  Description of Artificial Sequence: Synthetic oligonucleotide
  Antisense strand to SEQ ID NO: 2365632
guucuccaggguauugucg

SEQ ID NO: 2365634 - RNA, 19 nt, Artificial Sequence
  Description of Artificial Sequence: Synthetic oligonucleotide
  Sense strand starting at position 1661 of SEQ ID NO: 1885756
uauaauuggcgcguuacua

SEQ ID NO: 2365635 - RNA, 19 nt, Artificial Sequence
  Description of Artificial Sequence: Synthetic oligonucleotide
  Antisense strand to SEQ ID NO: 2365634
uaguaacgcgccaauuaua

SEQ ID NO: 2365636 - RNA, 19 nt, Artificial Sequence
  Description of Artificial Sequence: Synthetic oligonucleotide
  Sense strand starting at position 2868 of SEQ ID NO: 1885756
cagaaacggcuguaacuaa

SEQ ID NO: 2365637 - RNA, 19 nt, Artificial Sequence
  Description of Artificial Sequence: Synthetic oligonucleotide
  Antisense strand to SEQ ID NO: 2365636
uuaguuacagccguuucug

SEQ ID NO: 2365638 - RNA, 19 nt, Artificial Sequence
  Description of Artificial Sequence: Synthetic oligonucleotide
  Sense strand starting at position 3485 of SEQ ID NO: 1885756
ugagauauucuauguaauc

SEQ ID NO: 2365639 - RNA, 19 nt, Artificial Sequence
  Description of Artificial Sequence: Synthetic oligonucleotide
  Antisense strand to SEQ ID NO: 2365638
gauuacauagaauaucuca

SEQ ID NO: 2365640 - RNA, 19 nt, Artificial Sequence
  Description of Artificial Sequence: Synthetic oligonucleotide
  Sense strand starting at position 3530 of SEQ ID NO: 1885756
uggugagucguccucgauu

SEQ ID NO: 2365641 - RNA, 19 nt, Artificial Sequence
  Description of Artificial Sequence: Synthetic oligonucleotide
  Antisense strand to SEQ ID NO: 2365640
aaucgaggacgacucacca

SEQ ID NO: 2365642 - RNA, 19 nt, Artificial Sequence
  Description of Artificial Sequence: Synthetic oligonucleotide
  Sense strand starting at position 3844 of SEQ ID NO: 1885756
cugagaaguuucuuaucuu

SEQ ID NO: 2365643 - RNA, 19 nt, Artificial Sequence
  Description of Artificial Sequence: Synthetic oligonucleotide
  Antisense strand to SEQ ID NO: 2365642
aagauaagaaacuucucag

SEQ ID NO: 2365644 - RNA, 19 nt, Artificial Sequence
  Description of Artificial Sequence: Synthetic oligonucleotide
  Sense strand starting at position 653 of SEQ ID NO: 1885757
cugggaaggcuuggacaua

SEQ ID NO: 2365645 - RNA, 19 nt, Artificial Sequence
  Description of Artificial Sequence: Synthetic oligonucleotide
  Antisense strand to SEQ ID NO: 2365644
uauguccaagccuucccag

SEQ ID NO: 2365646 - RNA, 19 nt, Artificial Sequence
  Description of Artificial Sequence: Synthetic oligonucleotide
  Sense strand starting at position 1428 of SEQ ID NO: 1885757
accucuaagccggauacuu

SEQ ID NO: 2365647 - RNA, 19 nt, Artificial Sequence
  Description of Artificial Sequence: Synthetic oligonucleotide
  Antisense strand to SEQ ID NO: 2365646
aaguauccggcuuagaggu

SEQ ID NO: 2365648 - RNA, 19 nt, Artificial Sequence
  Description of Artificial Sequence: Synthetic oligonucleotide
  Sense strand starting at position 1438 of SEQ ID NO: 1885757
cggauacuucccuggacca

SEQ ID NO: 2365649 - RNA, 19 nt, Artificial Sequence
  Description of Artificial Sequence: Synthetic oligonucleotide
  Antisense strand to SEQ ID NO: 2365648
ugguccagggaaguauccg

SEQ ID NO: 2365650 - RNA, 19 nt, Artificial Sequence
  Description of Artificial Sequence: Synthetic oligonucleotide
  Sense strand starting at position 1487 of SEQ ID NO: 1885757
ucguuucugccagcgguua

SEQ ID NO: 2365651 - RNA, 19 nt, Artificial Sequence
  Description of Artificial Sequence: Synthetic oligonucleotide
  Antisense strand to SEQ ID NO: 2365650
uaaccgcuggcagaaacga

SEQ ID NO: 2365652 - RNA, 19 nt, Artificial Sequence
  Description of Artificial Sequence: Synthetic oligonucleotide
  Sense strand starting at position 1506 of SEQ ID NO: 1885757
ccaagacccugggauauuu

SEQ ID NO: 2365653 - RNA, 19 nt, Artificial Sequence
  Description of Artificial Sequence: Synthetic oligonucleotide
  Antisense strand to SEQ ID NO: 2365652
aaauaucccagggucuugg

SEQ ID NO: 2365654 - RNA, 19 nt, Artificial Sequence
  Description of Artificial Sequence: Synthetic oligonucleotide
  Sense strand starting at position 1591 of SEQ ID NO: 1885757
ggcuuuggccuggagaaag

SEQ ID NO: 2365655 - RNA, 19 nt, Artificial Sequence
  Description of Artificial Sequence: Synthetic oligonucleotide
  Antisense strand to SEQ ID NO: 2365654
cuuucuccaggccaaagcc

SEQ ID NO: 2365656 - RNA, 19 nt, Artificial Sequence
  Description of Artificial Sequence: Synthetic oligonucleotide
  Sense strand starting at position 1631 of SEQ ID NO: 1885757
cgacaauacccuggagaac

SEQ ID NO: 2365657 - RNA, 19 nt, Artificial Sequence
  Description of Artificial Sequence: Synthetic oligonucleotide
  Antisense strand to SEQ ID NO: 2365656
guucuccaggguauugucg

SEQ ID NO: 2365658 - RNA, 19 nt, Artificial Sequence
  Description of Artificial Sequence: Synthetic oligonucleotide
  Sense strand starting at position 1662 of SEQ ID NO: 1885757
uauaauuggcgcguuacua

SEQ ID NO: 2365659 - RNA, 19 nt, Artificial Sequence
  Description of Artificial Sequence: Synthetic oligonucleotide
  Antisense strand to SEQ ID NO: 2365658
uaguaacgcgccaauuaua

SEQ ID NO: 2365660 - RNA, 19 nt, Artificial Sequence
  Description of Artificial Sequence: Synthetic oligonucleotide
  Sense strand starting at position 2869 of SEQ ID NO: 1885757
cagaaacggcuguaacuaa

SEQ ID NO: 2365661 - RNA, 19 nt, Artificial Sequence
  Description of Artificial Sequence: Synthetic oligonucleotide
  Antisense strand to SEQ ID NO: 2365660
uuaguuacagccguuucug

SEQ ID NO: 2365662 - RNA, 19 nt, Artificial Sequence
  Description of Artificial Sequence: Synthetic oligonucleotide
  Sense strand starting at position 3480 of SEQ ID NO: 1885757
ugagauauucuauguaauc

SEQ ID NO: 2365663 - RNA, 19 nt, Artificial Sequence
  Description of Artificial Sequence: Synthetic oligonucleotide
  Antisense strand to SEQ ID NO: 2365662
gauuacauagaauaucuca

SEQ ID NO: 2365664 - RNA, 19 nt, Artificial Sequence
  Description of Artificial Sequence: Synthetic oligonucleotide
  Sense strand starting at position 3525 of SEQ ID NO: 1885757
uggugagucguccucgauu

SEQ ID NO: 2365665 - RNA, 19 nt, Artificial Sequence
  Description of Artificial Sequence: Synthetic oligonucleotide
  Antisense strand to SEQ ID NO: 2365664
aaucgaggacgacucacca

SEQ ID NO: 2365666 - RNA, 19 nt, Artificial Sequence
  Description of Artificial Sequence: Synthetic oligonucleotide
  Sense strand starting at position 3839 of SEQ ID NO: 1885757
cugagaaguuucuuaucuu

SEQ ID NO: 2365667 - RNA, 19 nt, Artificial Sequence
  Description of Artificial Sequence: Synthetic oligonucleotide
  Antisense strand to SEQ ID NO: 2365666
aagauaagaaacuucucag

SEQ ID NO: 2365668 - RNA, 19 nt, Artificial Sequence
  Description of Artificial Sequence: Synthetic oligonucleotide
  Sense strand starting at position 35 of SEQ ID NO: 1885758
auuaaagagaguuguauga

SEQ ID NO: 2365669 - RNA, 19 nt, Artificial Sequence
  Description of Artificial Sequence: Synthetic oligonucleotide
  Antisense strand to SEQ ID NO: 2365668
ucauacaacucucuuuaau

SEQ ID NO: 2365670 - RNA, 19 nt, Artificial Sequence
  Description of Artificial Sequence: Synthetic oligonucleotide
  Sense strand starting at position 49 of SEQ ID NO: 1885758
uaugaaaugucagucacag

SEQ ID NO: 2365671 - RNA, 19 nt, Artificial Sequence
  Description of Artificial Sequence: Synthetic oligonucleotide
  Antisense strand to SEQ ID NO: 2365670
cugugacugacauuucaua

SEQ ID NO: 2365672 - RNA, 19 nt, Artificial Sequence
  Description of Artificial Sequence: Synthetic oligonucleotide
  Sense strand starting at position 96 of SEQ ID NO: 1885758
gggucuuguagacaccaca

SEQ ID NO: 2365673 - RNA, 19 nt, Artificial Sequence
  Description of Artificial Sequence: Synthetic oligonucleotide
  Antisense strand to SEQ ID NO: 2365672
uguggugucuacaagaccc

SEQ ID NO: 2365674 - RNA, 19 nt, Artificial Sequence
  Description of Artificial Sequence: Synthetic oligonucleotide
  Sense strand starting at position 120 of SEQ ID NO: 1885758
gcuuuaaaucugggugaac

SEQ ID NO: 2365675 - RNA, 19 nt, Artificial Sequence
  Description of Artificial Sequence: Synthetic oligonucleotide
  Antisense strand to SEQ ID NO: 2365674
guucacccagauuuaaagc

SEQ ID NO: 2365676 - RNA, 19 nt, Artificial Sequence
  Description of Artificial Sequence: Synthetic oligonucleotide
  Sense strand starting at position 122 of SEQ ID NO: 1885758
uuuaaaucugggugaacca

SEQ ID NO: 2365677 - RNA, 19 nt, Artificial Sequence
  Description of Artificial Sequence: Synthetic oligonucleotide
  Antisense strand to SEQ ID NO: 2365676
ugguucacccagauuuaaa

SEQ ID NO: 2365678 - RNA, 19 nt, Artificial Sequence
  Description of Artificial Sequence: Synthetic oligonucleotide
  Sense strand starting at position 230 of SEQ ID NO: 1885758
caagaugauguuggcucaa

SEQ ID NO: 2365679 - RNA, 19 nt, Artificial Sequence
  Description of Artificial Sequence: Synthetic oligonucleotide
  Antisense strand to SEQ ID NO: 2365678
uugagccaacaucaucuug

SEQ ID NO: 2365680 - RNA, 19 nt, Artificial Sequence
  Description of Artificial Sequence: Synthetic oligonucleotide
  Sense strand starting at position 232 of SEQ ID NO: 1885758
agaugauguuggcucaaac

SEQ ID NO: 2365681 - RNA, 19 nt, Artificial Sequence
  Description of Artificial Sequence: Synthetic oligonucleotide
  Antisense strand to SEQ ID NO: 2365680
guuugagccaacaucaucu

SEQ ID NO: 2365682 - RNA, 19 nt, Artificial Sequence
  Description of Artificial Sequence: Synthetic oligonucleotide
  Sense strand starting at position 241 of SEQ ID NO: 1885758
uggcucaaaccagguuaaa

SEQ ID NO: 2365683 - RNA, 19 nt, Artificial Sequence
  Description of Artificial Sequence: Synthetic oligonucleotide
  Antisense strand to SEQ ID NO: 2365682
uuuaaccugguuugagcca

SEQ ID NO: 2365684 - RNA, 19 nt, Artificial Sequence
  Description of Artificial Sequence: Synthetic oligonucleotide
  Sense strand starting at position 252 of SEQ ID NO: 1885758
agguuaaaccacuggguaa

SEQ ID NO: 2365685 - RNA, 19 nt, Artificial Sequence
  Description of Artificial Sequence: Synthetic oligonucleotide
  Antisense strand to SEQ ID NO: 2365684
uuacccagugguuuaaccu

SEQ ID NO: 2365686 - RNA, 19 nt, Artificial Sequence
  Description of Artificial Sequence: Synthetic oligonucleotide
  Sense strand starting at position 253 of SEQ ID NO: 1885758
gguuaaaccacuggguaaa

SEQ ID NO: 2365687 - RNA, 19 nt, Artificial Sequence
  Description of Artificial Sequence: Synthetic oligonucleotide
  Antisense strand to SEQ ID NO: 2365686
uuuacccagugguuuaacc

SEQ ID NO: 2365688 - RNA, 19 nt, Artificial Sequence
  Description of Artificial Sequence: Synthetic oligonucleotide
  Sense strand starting at position 254 of SEQ ID NO: 1885758
guuaaaccacuggguaaau

SEQ ID NO: 2365689 - RNA, 19 nt, Artificial Sequence
  Description of Artificial Sequence: Synthetic oligonucleotide
  Antisense strand to SEQ ID NO: 2365688
auuuacccagugguuuaac

SEQ ID NO: 2365690 - RNA, 19 nt, Artificial Sequence
  Description of Artificial Sequence: Synthetic oligonucleotide
  Sense strand starting at position 325 of SEQ ID NO: 1885758
uucugaugccuguaacaac

SEQ ID NO: 2365691 - RNA, 19 nt, Artificial Sequence
  Description of Artificial Sequence: Synthetic oligonucleotide
  Antisense strand to SEQ ID NO: 2365690
guuguuacaggcaucagaa

SEQ ID NO: 2365692 - RNA, 19 nt, Artificial Sequence
  Description of Artificial Sequence: Synthetic oligonucleotide
  Sense strand starting at position 346 of SEQ ID NO: 1885758
ucacauucuccucaagcga

SEQ ID NO: 2365693 - RNA, 19 nt, Artificial Sequence
  Description of Artificial Sequence: Synthetic oligonucleotide
  Antisense strand to SEQ ID NO: 2365692
ucgcuugaggagaauguga

SEQ ID NO: 2365694 - RNA, 19 nt, Artificial Sequence
  Description of Artificial Sequence: Synthetic oligonucleotide
  Sense strand starting at position 471 of SEQ ID NO: 1885758
guauuaagugcugaugaag

SEQ ID NO: 2365695 - RNA, 19 nt, Artificial Sequence
  Description of Artificial Sequence: Synthetic oligonucleotide
  Antisense strand to SEQ ID NO: 2365694
cuucaucagcacuuaauac

SEQ ID NO: 2365696 - RNA, 19 nt, Artificial Sequence
  Description of Artificial Sequence: Synthetic oligonucleotide
  Sense strand starting at position 504 of SEQ ID NO: 1885758
uuugcaacucugugauuuc

SEQ ID NO: 2365697 - RNA, 19 nt, Artificial Sequence
  Description of Artificial Sequence: Synthetic oligonucleotide
  Antisense strand to SEQ ID NO: 2365696
gaaaucacagaguugcaaa

SEQ ID NO: 2365698 - RNA, 19 nt, Artificial Sequence
  Description of Artificial Sequence: Synthetic oligonucleotide
  Sense strand starting at position 507 of SEQ ID NO: 1885758
gcaacucugugauuucucu

SEQ ID NO: 2365699 - RNA, 19 nt, Artificial Sequence
  Description of Artificial Sequence: Synthetic oligonucleotide
  Antisense strand to SEQ ID NO: 2365698
agagaaaucacagaguugc

SEQ ID NO: 2365700 - RNA, 19 nt, Artificial Sequence
  Description of Artificial Sequence: Synthetic oligonucleotide
  Sense strand starting at position 511 of SEQ ID NO: 1885758
cucugugauuucucuguag

SEQ ID NO: 2365701 - RNA, 19 nt, Artificial Sequence
  Description of Artificial Sequence: Synthetic oligonucleotide
  Antisense strand to SEQ ID NO: 2365700
cuacagagaaaucacagag

SEQ ID NO: 2365702 - RNA, 19 nt, Artificial Sequence
  Description of Artificial Sequence: Synthetic oligonucleotide
  Sense strand starting at position 1427 of SEQ ID NO: 1885758
accucuaagccggauacuu

SEQ ID NO: 2365703 - RNA, 19 nt, Artificial Sequence
  Description of Artificial Sequence: Synthetic oligonucleotide
  Antisense strand to SEQ ID NO: 2365702
aaguauccggcuuagaggu

SEQ ID NO: 2365704 - RNA, 19 nt, Artificial Sequence
  Description of Artificial Sequence: Synthetic oligonucleotide
  Sense strand starting at position 1437 of SEQ ID NO: 1885758
cggauacuucccuggacca

SEQ ID NO: 2365705 - RNA, 19 nt, Artificial Sequence
  Description of Artificial Sequence: Synthetic oligonucleotide
  Antisense strand to SEQ ID NO: 2365704
ugguccagggaaguauccg

SEQ ID NO: 2365706 - RNA, 19 nt, Artificial Sequence
  Description of Artificial Sequence: Synthetic oligonucleotide
  Sense strand starting at position 1486 of SEQ ID NO: 1885758
ucguuucugccagcgguua

SEQ ID NO: 2365707 - RNA, 19 nt, Artificial Sequence
  Description of Artificial Sequence: Synthetic oligonucleotide
  Antisense strand to SEQ ID NO: 2365706
uaaccgcuggcagaaacga

SEQ ID NO: 2365708 - RNA, 19 nt, Artificial Sequence
  Description of Artificial Sequence: Synthetic oligonucleotide
  Sense strand starting at position 1505 of SEQ ID NO: 1885758
ccaagacccugggauauuu

SEQ ID NO: 2365709 - RNA, 19 nt, Artificial Sequence
  Description of Artificial Sequence: Synthetic oligonucleotide
  Antisense strand to SEQ ID NO: 2365708
aaauaucccagggucuugg

SEQ ID NO: 2365710 - RNA, 19 nt, Artificial Sequence
  Description of Artificial Sequence: Synthetic oligonucleotide
  Sense strand starting at position 1590 of SEQ ID NO: 1885758
ggcuuuggccuggagaaag

SEQ ID NO: 2365711 - RNA, 19 nt, Artificial Sequence
  Description of Artificial Sequence: Synthetic oligonucleotide
  Antisense strand to SEQ ID NO: 2365710
cuuucuccaggccaaagcc

SEQ ID NO: 2365712 - RNA, 19 nt, Artificial Sequence
  Description of Artificial Sequence: Synthetic oligonucleotide
  Sense strand starting at position 1630 of SEQ ID NO: 1885758
cgacaauacccuggagaac

SEQ ID NO: 2365713 - RNA, 19 nt, Artificial Sequence
  Description of Artificial Sequence: Synthetic oligonucleotide
  Antisense strand to SEQ ID NO: 2365712
guucuccaggguauugucg

SEQ ID NO: 2365714 - RNA, 19 nt, Artificial Sequence
  Description of Artificial Sequence: Synthetic oligonucleotide
  Sense strand starting at position 1661 of SEQ ID NO: 1885758
uauaauuggcgcguuacua

SEQ ID NO: 2365715 - RNA, 19 nt, Artificial Sequence
  Description of Artificial Sequence: Synthetic oligonucleotide
  Antisense strand to SEQ ID NO: 2365714
uaguaacgcgccaauuaua

SEQ ID NO: 2365716 - RNA, 19 nt, Artificial Sequence
  Description of Artificial Sequence: Synthetic oligonucleotide
  Sense strand starting at position 2868 of SEQ ID NO: 1885758
cagaaacggcuguaacuaa

SEQ ID NO: 2365717 - RNA, 19 nt, Artificial Sequence
  Description of Artificial Sequence: Synthetic oligonucleotide
  Antisense strand to SEQ ID NO: 2365716
uuaguuacagccguuucug

SEQ ID NO: 2365718 - RNA, 19 nt, Artificial Sequence
  Description of Artificial Sequence: Synthetic oligonucleotide
  Sense strand starting at position 3485 of SEQ ID NO: 1885758
ugagauauucuauguaauc

SEQ ID NO: 2365719 - RNA, 19 nt, Artificial Sequence
  Description of Artificial Sequence: Synthetic oligonucleotide
  Antisense strand to SEQ ID NO: 2365718
gauuacauagaauaucuca

SEQ ID NO: 2365720 - RNA, 19 nt, Artificial Sequence
  Description of Artificial Sequence: Synthetic oligonucleotide
  Sense strand starting at position 3530 of SEQ ID NO: 1885758
uggugagucguccucgauu

SEQ ID NO: 2365721 - RNA, 19 nt, Artificial Sequence
  Description of Artificial Sequence: Synthetic oligonucleotide
  Antisense strand to SEQ ID NO: 2365720
aaucgaggacgacucacca

SEQ ID NO: 2365722 - RNA, 19 nt, Artificial Sequence
  Description of Artificial Sequence: Synthetic oligonucleotide
  Sense strand starting at position 3844 of SEQ ID NO: 1885758
cugagaaguuucuuaucuu

SEQ ID NO: 2365723 - RNA, 19 nt, Artificial Sequence
  Description of Artificial Sequence: Synthetic oligonucleotide
  Antisense strand to SEQ ID NO: 2365722
aagauaagaaacuucucag

SEQ ID NO: 2365724 - RNA, 19 nt, Artificial Sequence
  Description of Artificial Sequence: Synthetic oligonucleotide
  Sense strand starting at position 653 of SEQ ID NO: 1885759
cugggaaggcuuggacaua

SEQ ID NO: 2365725 - RNA, 19 nt, Artificial Sequence
  Description of Artificial Sequence: Synthetic oligonucleotide
  Antisense strand to SEQ ID NO: 2365724
uauguccaagccuucccag

SEQ ID NO: 2365726 - RNA, 19 nt, Artificial Sequence
  Description of Artificial Sequence: Synthetic oligonucleotide
  Sense strand starting at position 1428 of SEQ ID NO: 1885759
accucuaagccggauacuu

SEQ ID NO: 2365727 - RNA, 19 nt, Artificial Sequence
  Description of Artificial Sequence: Synthetic oligonucleotide
  Antisense strand to SEQ ID NO: 2365726
aaguauccggcuuagaggu

SEQ ID NO: 2365728 - RNA, 19 nt, Artificial Sequence
  Description of Artificial Sequence: Synthetic oligonucleotide
  Sense strand starting at position 1438 of SEQ ID NO: 1885759
cggauacuucccuggacca

SEQ ID NO: 2365729 - RNA, 19 nt, Artificial Sequence
  Description of Artificial Sequence: Synthetic oligonucleotide
  Antisense strand to SEQ ID NO: 2365728
ugguccagggaaguauccg

SEQ ID NO: 2365730 - RNA, 19 nt, Artificial Sequence
  Description of Artificial Sequence: Synthetic oligonucleotide
  Sense strand starting at position 1487 of SEQ ID NO: 1885759
ucguuucugccagcgguua

SEQ ID NO: 2365731 - RNA, 19 nt, Artificial Sequence
  Description of Artificial Sequence: Synthetic oligonucleotide
  Antisense strand to SEQ ID NO: 2365730
uaaccgcuggcagaaacga

SEQ ID NO: 2365732 - RNA, 19 nt, Artificial Sequence
  Description of Artificial Sequence: Synthetic oligonucleotide
  Sense strand starting at position 1506 of SEQ ID NO: 1885759
ccaagacccugggauauuu

SEQ ID NO: 2365733 - RNA, 19 nt, Artificial Sequence
  Description of Artificial Sequence: Synthetic oligonucleotide
  Antisense strand to SEQ ID NO: 2365732
aaauaucccagggucuugg

SEQ ID NO: 2365734 - RNA, 19 nt, Artificial Sequence
  Description of Artificial Sequence: Synthetic oligonucleotide
  Sense strand starting at position 1591 of SEQ ID NO: 1885759
ggcuuuggccuggagaaag

SEQ ID NO: 2365735 - RNA, 19 nt, Artificial Sequence
  Description of Artificial Sequence: Synthetic oligonucleotide
  Antisense strand to SEQ ID NO: 2365734
cuuucuccaggccaaagcc

SEQ ID NO: 2365736 - RNA, 19 nt, Artificial Sequence
  Description of Artificial Sequence: Synthetic oligonucleotide
  Sense strand starting at position 1631 of SEQ ID NO: 1885759
cgacaauacccuggagaac

SEQ ID NO: 2365737 - RNA, 19 nt, Artificial Sequence
  Description of Artificial Sequence: Synthetic oligonucleotide
  Antisense strand to SEQ ID NO: 2365736
guucuccaggguauugucg

SEQ ID NO: 2365738 - RNA, 19 nt, Artificial Sequence
  Description of Artificial Sequence: Synthetic oligonucleotide
  Sense strand starting at position 1662 of SEQ ID NO: 1885759
uauaauuggcgcguuacua

SEQ ID NO: 2365739 - RNA, 19 nt, Artificial Sequence
  Description of Artificial Sequence: Synthetic oligonucleotide
  Antisense strand to SEQ ID NO: 2365738
uaguaacgcgccaauuaua

SEQ ID NO: 2365740 - RNA, 19 nt, Artificial Sequence
  Description of Artificial Sequence: Synthetic oligonucleotide
  Sense strand starting at position 2869 of SEQ ID NO: 1885759
cagaaacggcuguaacuaa

SEQ ID NO: 2365741 - RNA, 19 nt, Artificial Sequence
  Description of Artificial Sequence: Synthetic oligonucleotide
  Antisense strand to SEQ ID NO: 2365740
uuaguuacagccguuucug

SEQ ID NO: 2365742 - RNA, 19 nt, Artificial Sequence
  Description of Artificial Sequence: Synthetic oligonucleotide
  Sense strand starting at position 3480 of SEQ ID NO: 1885759
ugagauauucuauguaauc

SEQ ID NO: 2365743 - RNA, 19 nt, Artificial Sequence
  Description of Artificial Sequence: Synthetic oligonucleotide
  Antisense strand to SEQ ID NO: 2365742
gauuacauagaauaucuca

SEQ ID NO: 2365744 - RNA, 19 nt, Artificial Sequence
  Description of Artificial Sequence: Synthetic oligonucleotide
  Sense strand starting at position 3525 of SEQ ID NO: 1885759
uggugagucguccucgauu

SEQ ID NO: 2365745 - RNA, 19 nt, Artificial Sequence
  Description of Artificial Sequence: Synthetic oligonucleotide
  Antisense strand to SEQ ID NO: 2365744
aaucgaggacgacucacca

SEQ ID NO: 2365746 - RNA, 19 nt, Artificial Sequence
  Description of Artificial Sequence: Synthetic oligonucleotide
  Sense strand starting at position 3839 of SEQ ID NO: 1885759
cugagaaguuucuuaucuu

SEQ ID NO: 2365747 - RNA, 19 nt, Artificial Sequence
  Description of Artificial Sequence: Synthetic oligonucleotide
  Antisense strand to SEQ ID NO: 2365746
aagauaagaaacuucucag

SEQ ID NO: 2365748 - RNA, 19 nt, Artificial Sequence
  Description of Artificial Sequence: Synthetic oligonucleotide
  Sense strand starting at position 35 of SEQ ID NO: 1885760
auuaaagagaguuguauga

SEQ ID NO: 2365749 - RNA, 19 nt, Artificial Sequence
  Description of Artificial Sequence: Synthetic oligonucleotide
  Antisense strand to SEQ ID NO: 2365748
ucauacaacucucuuuaau

SEQ ID NO: 2365750 - RNA, 19 nt, Artificial Sequence
  Description of Artificial Sequence: Synthetic oligonucleotide
  Sense strand starting at position 49 of SEQ ID NO: 1885760
uaugaaaugucagucacag

SEQ ID NO: 2365751 - RNA, 19 nt, Artificial Sequence
  Description of Artificial Sequence: Synthetic oligonucleotide
  Antisense strand to SEQ ID NO: 2365750
cugugacugacauuucaua

SEQ ID NO: 2365752 - RNA, 19 nt, Artificial Sequence
  Description of Artificial Sequence: Synthetic oligonucleotide
  Sense strand starting at position 96 of SEQ ID NO: 1885760
gggucuuguagacaccaca

SEQ ID NO: 2365753 - RNA, 19 nt, Artificial Sequence
  Description of Artificial Sequence: Synthetic oligonucleotide
  Antisense strand to SEQ ID NO: 2365752
uguggugucuacaagaccc

SEQ ID NO: 2365754 - RNA, 19 nt, Artificial Sequence
  Description of Artificial Sequence: Synthetic oligonucleotide
  Sense strand starting at position 120 of SEQ ID NO: 1885760
gcuuuaaaucugggugaac

SEQ ID NO: 2365755 - RNA, 19 nt, Artificial Sequence
  Description of Artificial Sequence: Synthetic oligonucleotide
  Antisense strand to SEQ ID NO: 2365754
guucacccagauuuaaagc

SEQ ID NO: 2365756 - RNA, 19 nt, Artificial Sequence
  Description of Artificial Sequence: Synthetic oligonucleotide
  Sense strand starting at position 122 of SEQ ID NO: 1885760
uuuaaaucugggugaacca

SEQ ID NO: 2365757 - RNA, 19 nt, Artificial Sequence
  Description of Artificial Sequence: Synthetic oligonucleotide
  Antisense strand to SEQ ID NO: 2365756
ugguucacccagauuuaaa

SEQ ID NO: 2365758 - RNA, 19 nt, Artificial Sequence
  Description of Artificial Sequence: Synthetic oligonucleotide
  Sense strand starting at position 230 of SEQ ID NO: 1885760
caagaugauguuggcucaa

SEQ ID NO: 2365759 - RNA, 19 nt, Artificial Sequence
  Description of Artificial Sequence: Synthetic oligonucleotide
  Antisense strand to SEQ ID NO: 2365758
uugagccaacaucaucuug

SEQ ID NO: 2365760 - RNA, 19 nt, Artificial Sequence
  Description of Artificial Sequence: Synthetic oligonucleotide
  Sense strand starting at position 232 of SEQ ID NO: 1885760
agaugauguuggcucaaac

SEQ ID NO: 2365761 - RNA, 19 nt, Artificial Sequence
  Description of Artificial Sequence: Synthetic oligonucleotide
  Antisense strand to SEQ ID NO: 2365760
guuugagccaacaucaucu

SEQ ID NO: 2365762 - RNA, 19 nt, Artificial Sequence
  Description of Artificial Sequence: Synthetic oligonucleotide
  Sense strand starting at position 241 of SEQ ID NO: 1885760
uggcucaaaccagguuaaa

SEQ ID NO: 2365763 - RNA, 19 nt, Artificial Sequence
  Description of Artificial Sequence: Synthetic oligonucleotide
  Antisense strand to SEQ ID NO: 2365762
uuuaaccugguuugagcca

SEQ ID NO: 2365764 - RNA, 19 nt, Artificial Sequence
  Description of Artificial Sequence: Synthetic oligonucleotide
  Sense strand starting at position 252 of SEQ ID NO: 1885760
agguuaaaccacuggguaa

SEQ ID NO: 2365765 - RNA, 19 nt, Artificial Sequence
  Description of Artificial Sequence: Synthetic oligonucleotide
  Antisense strand to SEQ ID NO: 2365764
uuacccagugguuuaaccu

SEQ ID NO: 2365766 - RNA, 19 nt, Artificial Sequence
  Description of Artificial Sequence: Synthetic oligonucleotide
  Sense strand starting at position 253 of SEQ ID NO: 1885760
gguuaaaccacuggguaaa

SEQ ID NO: 2365767 - RNA, 19 nt, Artificial Sequence
  Description of Artificial Sequence: Synthetic oligonucleotide
  Antisense strand to SEQ ID NO: 2365766
uuuacccagugguuuaacc

SEQ ID NO: 2365768 - RNA, 19 nt, Artificial Sequence
  Description of Artificial Sequence: Synthetic oligonucleotide
  Sense strand starting at position 254 of SEQ ID NO: 1885760
guuaaaccacuggguaaau

SEQ ID NO: 2365769 - RNA, 19 nt, Artificial Sequence
  Description of Artificial Sequence: Synthetic oligonucleotide
  Antisense strand to SEQ ID NO: 2365768
auuuacccagugguuuaac

SEQ ID NO: 2365770 - RNA, 19 nt, Artificial Sequence
  Description of Artificial Sequence: Synthetic oligonucleotide
  Sense strand starting at position 325 of SEQ ID NO: 1885760
uucugaugccuguaacaac

SEQ ID NO: 2365771 - RNA, 19 nt, Artificial Sequence
  Description of Artificial Sequence: Synthetic oligonucleotide
  Antisense strand to SEQ ID NO: 2365770
guuguuacaggcaucagaa

SEQ ID NO: 2365772 - RNA, 19 nt, Artificial Sequence
  Description of Artificial Sequence: Synthetic oligonucleotide
  Sense strand starting at position 346 of SEQ ID NO: 1885760
ucacauucuccucaagcga

SEQ ID NO: 2365773 - RNA, 19 nt, Artificial Sequence
  Description of Artificial Sequence: Synthetic oligonucleotide
  Antisense strand to SEQ ID NO: 2365772
ucgcuugaggagaauguga

SEQ ID NO: 2365774 - RNA, 19 nt, Artificial Sequence
  Description of Artificial Sequence: Synthetic oligonucleotide
  Sense strand starting at position 471 of SEQ ID NO: 1885760
guauuaagugcugaugaag

SEQ ID NO: 2365775 - RNA, 19 nt, Artificial Sequence
  Description of Artificial Sequence: Synthetic oligonucleotide
  Antisense strand to SEQ ID NO: 2365774
cuucaucagcacuuaauac

SEQ ID NO: 2365776 - RNA, 19 nt, Artificial Sequence
  Description of Artificial Sequence: Synthetic oligonucleotide
  Sense strand starting at position 504 of SEQ ID NO: 1885760
uuugcaacucugugauuuc

SEQ ID NO: 2365777 - RNA, 19 nt, Artificial Sequence
  Description of Artificial Sequence: Synthetic oligonucleotide
  Antisense strand to SEQ ID NO: 2365776
gaaaucacagaguugcaaa

SEQ ID NO: 2365778 - RNA, 19 nt, Artificial Sequence
  Description of Artificial Sequence: Synthetic oligonucleotide
  Sense strand starting at position 507 of SEQ ID NO: 1885760
gcaacucugugauuucucu

SEQ ID NO: 2365779 - RNA, 19 nt, Artificial Sequence
  Description of Artificial Sequence: Synthetic oligonucleotide
  Antisense strand to SEQ ID NO: 2365778
agagaaaucacagaguugc

SEQ ID NO: 2365780 - RNA, 19 nt, Artificial Sequence
  Description of Artificial Sequence: Synthetic oligonucleotide
  Sense strand starting at position 511 of SEQ ID NO: 1885760
cucugugauuucucuguag

SEQ ID NO: 2365781 - RNA, 19 nt, Artificial Sequence
  Description of Artificial Sequence: Synthetic oligonucleotide
  Antisense strand to SEQ ID NO: 2365780
cuacagagaaaucacagag

SEQ ID NO: 2365782 - RNA, 19 nt, Artificial Sequence
  Description of Artificial Sequence: Synthetic oligonucleotide
  Sense strand starting at position 1427 of SEQ ID NO: 1885760
accucuaagccggauacuu

SEQ ID NO: 2365783 - RNA, 19 nt, Artificial Sequence
  Description of Artificial Sequence: Synthetic oligonucleotide
  Antisense strand to SEQ ID NO: 2365782
aaguauccggcuuagaggu

SEQ ID NO: 2365784 - RNA, 19 nt, Artificial Sequence
  Description of Artificial Sequence: Synthetic oligonucleotide
  Sense strand starting at position 1437 of SEQ ID NO: 1885760
cggauacuucccuggacca

SEQ ID NO: 2365785 - RNA, 19 nt, Artificial Sequence
  Description of Artificial Sequence: Synthetic oligonucleotide
  Antisense strand to SEQ ID NO: 2365784
ugguccagggaaguauccg

SEQ ID NO: 2365786 - RNA, 19 nt, Artificial Sequence
  Description of Artificial Sequence: Synthetic oligonucleotide
  Sense strand starting at position 1486 of SEQ ID NO: 1885760
ucguuucugccagcgguua

SEQ ID NO: 2365787 - RNA, 19 nt, Artificial Sequence
  Description of Artificial Sequence: Synthetic oligonucleotide
  Antisense strand to SEQ ID NO: 2365786
uaaccgcuggcagaaacga

SEQ ID NO: 2365788 - RNA, 19 nt, Artificial Sequence
  Description of Artificial Sequence: Synthetic oligonucleotide
  Sense strand starting at position 1505 of SEQ ID NO: 1885760
ccaagacccugggauauuu

SEQ ID NO: 2365789 - RNA, 19 nt, Artificial Sequence
  Description of Artificial Sequence: Synthetic oligonucleotide
  Antisense strand to SEQ ID NO: 2365788
aaauaucccagggucuugg

SEQ ID NO: 2365790 - RNA, 19 nt, Artificial Sequence
  Description of Artificial Sequence: Synthetic oligonucleotide
  Sense strand starting at position 1590 of SEQ ID NO: 1885760
ggcuuuggccuggagaaag

SEQ ID NO: 2365791 - RNA, 19 nt, Artificial Sequence
  Description of Artificial Sequence: Synthetic oligonucleotide
  Antisense strand to SEQ ID NO: 2365790
cuuucuccaggccaaagcc

SEQ ID NO: 2365792 - RNA, 19 nt, Artificial Sequence
  Description of Artificial Sequence: Synthetic oligonucleotide
  Sense strand starting at position 1630 of SEQ ID NO: 1885760
cgacaauacccuggagaac

SEQ ID NO: 2365793 - RNA, 19 nt, Artificial Sequence
  Description of Artificial Sequence: Synthetic oligonucleotide
  Antisense strand to SEQ ID NO: 2365792
guucuccaggguauugucg

SEQ ID NO: 2365794 - RNA, 19 nt, Artificial Sequence
  Description of Artificial Sequence: Synthetic oligonucleotide
  Sense strand starting at position 1661 of SEQ ID NO: 1885760
uauaauuggcgcguuacua

SEQ ID NO: 2365795 - RNA, 19 nt, Artificial Sequence
  Description of Artificial Sequence: Synthetic oligonucleotide
  Antisense strand to SEQ ID NO: 2365794
uaguaacgcgccaauuaua

SEQ ID NO: 2365796 - RNA, 19 nt, Artificial Sequence
  Description of Artificial Sequence: Synthetic oligonucleotide
  Sense strand starting at position 2868 of SEQ ID NO: 1885760
cagaaacggcuguaacuaa

SEQ ID NO: 2365797 - RNA, 19 nt, Artificial Sequence
  Description of Artificial Sequence: Synthetic oligonucleotide
  Antisense strand to SEQ ID NO: 2365796
uuaguuacagccguuucug

SEQ ID NO: 2365798 - RNA, 19 nt, Artificial Sequence
  Description of Artificial Sequence: Synthetic oligonucleotide
  Sense strand starting at position 3485 of SEQ ID NO: 1885760
ugagauauucuauguaauc

SEQ ID NO: 2365799 - RNA, 19 nt, Artificial Sequence
  Description of Artificial Sequence: Synthetic oligonucleotide
  Antisense strand to SEQ ID NO: 2365798
gauuacauagaauaucuca

SEQ ID NO: 2365800 - RNA, 19 nt, Artificial Sequence
  Description of Artificial Sequence: Synthetic oligonucleotide
  Sense strand starting at position 3530 of SEQ ID NO: 1885760
uggugagucguccucgauu

SEQ ID NO: 2365801 - RNA, 19 nt, Artificial Sequence
  Description of Artificial Sequence: Synthetic oligonucleotide
  Antisense strand to SEQ ID NO: 2365800
aaucgaggacgacucacca

SEQ ID NO: 2365802 - RNA, 19 nt, Artificial Sequence
  Description of Artificial Sequence: Synthetic oligonucleotide
  Sense strand starting at position 3844 of SEQ ID NO: 1885760
cugagaaguuucuuaucuu

SEQ ID NO: 2365803 - RNA, 19 nt, Artificial Sequence
  Description of Artificial Sequence: Synthetic oligonucleotide
  Antisense strand to SEQ ID NO: 2365802
aagauaagaaacuucucag

SEQ ID NO: 2365804 - RNA, 19 nt, Artificial Sequence
  Description of Artificial Sequence: Synthetic oligonucleotide
  Sense strand starting at position 653 of SEQ ID NO: 1885761
cugggaaggcuuggacaua

SEQ ID NO: 2365805 - RNA, 19 nt, Artificial Sequence
  Description of Artificial Sequence: Synthetic oligonucleotide
  Antisense strand to SEQ ID NO: 2365804
uauguccaagccuucccag

SEQ ID NO: 2365806 - RNA, 19 nt, Artificial Sequence
  Description of Artificial Sequence: Synthetic oligonucleotide
  Sense strand starting at position 1428 of SEQ ID NO: 1885761
accucuaagccggauacuu

SEQ ID NO: 2365807 - RNA, 19 nt, Artificial Sequence
  Description of Artificial Sequence: Synthetic oligonucleotide
  Antisense strand to SEQ ID NO: 2365806
aaguauccggcuuagaggu

SEQ ID NO: 2365808 - RNA, 19 nt, Artificial Sequence
  Description of Artificial Sequence: Synthetic oligonucleotide
  Sense strand starting at position 1438 of SEQ ID NO: 1885761
cggauacuucccuggacca

SEQ ID NO: 2365809 - RNA, 19 nt, Artificial Sequence
  Description of Artificial Sequence: Synthetic oligonucleotide
  Antisense strand to SEQ ID NO: 2365808
ugguccagggaaguauccg

SEQ ID NO: 2365810 - RNA, 19 nt, Artificial Sequence
  Description of Artificial Sequence: Synthetic oligonucleotide
  Sense strand starting at position 1487 of SEQ ID NO: 1885761
ucguuucugccagcgguua

SEQ ID NO: 2365811 - RNA, 19 nt, Artificial Sequence
  Description of Artificial Sequence: Synthetic oligonucleotide
  Antisense strand to SEQ ID NO: 2365810
uaaccgcuggcagaaacga

SEQ ID NO: 2365812 - RNA, 19 nt, Artificial Sequence
  Description of Artificial Sequence: Synthetic oligonucleotide
  Sense strand starting at position 1506 of SEQ ID NO: 1885761
ccaagacccugggauauuu

SEQ ID NO: 2365813 - RNA, 19 nt, Artificial Sequence
  Description of Artificial Sequence: Synthetic oligonucleotide
  Antisense strand to SEQ ID NO: 2365812
aaauaucccagggucuugg

SEQ ID NO: 2365814 - RNA, 19 nt, Artificial Sequence
  Description of Artificial Sequence: Synthetic oligonucleotide
  Sense strand starting at position 1591 of SEQ ID NO: 1885761
ggcuuuggccuggagaaag

SEQ ID NO: 2365815 - RNA, 19 nt, Artificial Sequence
  Description of Artificial Sequence: Synthetic oligonucleotide
  Antisense strand to SEQ ID NO: 2365814
cuuucuccaggccaaagcc

SEQ ID NO: 2365816 - RNA, 19 nt, Artificial Sequence
  Description of Artificial Sequence: Synthetic oligonucleotide
  Sense strand starting at position 1631 of SEQ ID NO: 1885761
cgacaauacccuggagaac

SEQ ID NO: 2365817 - RNA, 19 nt, Artificial Sequence
  Description of Artificial Sequence: Synthetic oligonucleotide
  Antisense strand to SEQ ID NO: 2365816
guucuccaggguauugucg

SEQ ID NO: 2365818 - RNA, 19 nt, Artificial Sequence
  Description of Artificial Sequence: Synthetic oligonucleotide
  Sense strand starting at position 1662 of SEQ ID NO: 1885761
uauaauuggcgcguuacua

SEQ ID NO: 2365819 - RNA, 19 nt, Artificial Sequence
  Description of Artificial Sequence: Synthetic oligonucleotide
  Antisense strand to SEQ ID NO: 2365818
uaguaacgcgccaauuaua

SEQ ID NO: 2365820 - RNA, 19 nt, Artificial Sequence
  Description of Artificial Sequence: Synthetic oligonucleotide
  Sense strand starting at position 2869 of SEQ ID NO: 1885761
cagaaacggcuguaacuaa

SEQ ID NO: 2365821 - RNA, 19 nt, Artificial Sequence
  Description of Artificial Sequence: Synthetic oligonucleotide
  Antisense strand to SEQ ID NO: 2365820
uuaguuacagccguuucug

SEQ ID NO: 2365822 - RNA, 19 nt, Artificial Sequence
  Description of Artificial Sequence: Synthetic oligonucleotide
  Sense strand starting at position 3480 of SEQ ID NO: 1885761
ugagauauucuauguaauc

SEQ ID NO: 2365823 - RNA, 19 nt, Artificial Sequence
  Description of Artificial Sequence: Synthetic oligonucleotide
  Antisense strand to SEQ ID NO: 2365822
gauuacauagaauaucuca

SEQ ID NO: 2365824 - RNA, 19 nt, Artificial Sequence
  Description of Artificial Sequence: Synthetic oligonucleotide
  Sense strand starting at position 3525 of SEQ ID NO: 1885761
uggugagucguccucgauu

SEQ ID NO: 2365825 - RNA, 19 nt, Artificial Sequence
  Description of Artificial Sequence: Synthetic oligonucleotide
  Antisense strand to SEQ ID NO: 2365824
aaucgaggacgacucacca

SEQ ID NO: 2365826 - RNA, 19 nt, Artificial Sequence
  Description of Artificial Sequence: Synthetic oligonucleotide
  Sense strand starting at position 3839 of SEQ ID NO: 1885761
cugagaaguuucuuaucuu

SEQ ID NO: 2365827 - RNA, 19 nt, Artificial Sequence
  Description of Artificial Sequence: Synthetic oligonucleotide
  Antisense strand to SEQ ID NO: 2365826
aagauaagaaacuucucag

SEQ ID NO: 2365828 - RNA, 19 nt, Artificial Sequence
  Description of Artificial Sequence: Synthetic oligonucleotide
  Sense strand starting at position 35 of SEQ ID NO: 1885762
auuaaagagaguuguauga

SEQ ID NO: 2365829 - RNA, 19 nt, Artificial Sequence
  Description of Artificial Sequence: Synthetic oligonucleotide
  Antisense strand to SEQ ID NO: 2365828
ucauacaacucucuuuaau

SEQ ID NO: 2365830 - RNA, 19 nt, Artificial Sequence
  Description of Artificial Sequence: Synthetic oligonucleotide
  Sense strand starting at position 49 of SEQ ID NO: 1885762
uaugaaaugucagucacag

SEQ ID NO: 2365831 - RNA, 19 nt, Artificial Sequence
  Description of Artificial Sequence: Synthetic oligonucleotide
  Antisense strand to SEQ ID NO: 2365830
cugugacugacauuucaua

SEQ ID NO: 2365832 - RNA, 19 nt, Artificial Sequence
  Description of Artificial Sequence: Synthetic oligonucleotide
  Sense strand starting at position 96 of SEQ ID NO: 1885762
gggucuuguagacaccaca

SEQ ID NO: 2365833 - RNA, 19 nt, Artificial Sequence
  Description of Artificial Sequence: Synthetic oligonucleotide
  Antisense strand to SEQ ID NO: 2365832
uguggugucuacaagaccc

SEQ ID NO: 2365834 - RNA, 19 nt, Artificial Sequence
  Description of Artificial Sequence: Synthetic oligonucleotide
  Sense strand starting at position 120 of SEQ ID NO: 1885762
gcuuuaaaucugggugaac

SEQ ID NO: 2365835 - RNA, 19 nt, Artificial Sequence
  Description of Artificial Sequence: Synthetic oligonucleotide
  Antisense strand to SEQ ID NO: 2365834
guucacccagauuuaaagc

SEQ ID NO: 2365836 - RNA, 19 nt, Artificial Sequence
  Description of Artificial Sequence: Synthetic oligonucleotide
  Sense strand starting at position 122 of SEQ ID NO: 1885762
uuuaaaucugggugaacca

SEQ ID NO: 2365837 - RNA, 19 nt, Artificial Sequence
  Description of Artificial Sequence: Synthetic oligonucleotide
  Antisense strand to SEQ ID NO: 2365836
ugguucacccagauuuaaa

SEQ ID NO: 2365838 - RNA, 19 nt, Artificial Sequence
  Description of Artificial Sequence: Synthetic oligonucleotide
  Sense strand starting at position 230 of SEQ ID NO: 1885762
caagaugauguuggcucaa

SEQ ID NO: 2365839 - RNA, 19 nt, Artificial Sequence
  Description of Artificial Sequence: Synthetic oligonucleotide
  Antisense strand to SEQ ID NO: 2365838
uugagccaacaucaucuug

SEQ ID NO: 2365840 - RNA, 19 nt, Artificial Sequence
  Description of Artificial Sequence: Synthetic oligonucleotide
  Sense strand starting at position 232 of SEQ ID NO: 1885762
agaugauguuggcucaaac

SEQ ID NO: 2365841 - RNA, 19 nt, Artificial Sequence
  Description of Artificial Sequence: Synthetic oligonucleotide
  Antisense strand to SEQ ID NO: 2365840
guuugagccaacaucaucu

SEQ ID NO: 2365842 - RNA, 19 nt, Artificial Sequence
  Description of Artificial Sequence: Synthetic oligonucleotide
  Sense strand starting at position 241 of SEQ ID NO: 1885762
uggcucaaaccagguuaaa

SEQ ID NO: 2365843 - RNA, 19 nt, Artificial Sequence
  Description of Artificial Sequence: Synthetic oligonucleotide
  Antisense strand to SEQ ID NO: 2365842
uuuaaccugguuugagcca

SEQ ID NO: 2365844 - RNA, 19 nt, Artificial Sequence
  Description of Artificial Sequence: Synthetic oligonucleotide
  Sense strand starting at position 252 of SEQ ID NO: 1885762
agguuaaaccacuggguaa

SEQ ID NO: 2365845 - RNA, 19 nt, Artificial Sequence
  Description of Artificial Sequence: Synthetic oligonucleotide
  Antisense strand to SEQ ID NO: 2365844
uuacccagugguuuaaccu

SEQ ID NO: 2365846 - RNA, 19 nt, Artificial Sequence
  Description of Artificial Sequence: Synthetic oligonucleotide
  Sense strand starting at position 253 of SEQ ID NO: 1885762
gguuaaaccacuggguaaa

SEQ ID NO: 2365847 - RNA, 19 nt, Artificial Sequence
  Description of Artificial Sequence: Synthetic oligonucleotide
  Antisense strand to SEQ ID NO: 2365846
uuuacccagugguuuaacc

SEQ ID NO: 2365848 - RNA, 19 nt, Artificial Sequence
  Description of Artificial Sequence: Synthetic oligonucleotide
  Sense strand starting at position 254 of SEQ ID NO: 1885762
guuaaaccacuggguaaau

SEQ ID NO: 2365849 - RNA, 19 nt, Artificial Sequence
  Description of Artificial Sequence: Synthetic oligonucleotide
  Antisense strand to SEQ ID NO: 2365848
auuuacccagugguuuaac

SEQ ID NO: 2365850 - RNA, 19 nt, Artificial Sequence
  Description of Artificial Sequence: Synthetic oligonucleotide
  Sense strand starting at position 325 of SEQ ID NO: 1885762
uucugaugccuguaacaac

SEQ ID NO: 2365851 - RNA, 19 nt, Artificial Sequence
  Description of Artificial Sequence: Synthetic oligonucleotide
  Antisense strand to SEQ ID NO: 2365850
guuguuacaggcaucagaa

SEQ ID NO: 2365852 - RNA, 19 nt, Artificial Sequence
  Description of Artificial Sequence: Synthetic oligonucleotide
  Sense strand starting at position 346 of SEQ ID NO: 1885762
ucacauucuccucaagcga

SEQ ID NO: 2365853 - RNA, 19 nt, Artificial Sequence
  Description of Artificial Sequence: Synthetic oligonucleotide
  Antisense strand to SEQ ID NO: 2365852
ucgcuugaggagaauguga

SEQ ID NO: 2365854 - RNA, 19 nt, Artificial Sequence
  Description of Artificial Sequence: Synthetic oligonucleotide
  Sense strand starting at position 471 of SEQ ID NO: 1885762
guauuaagugcugaugaag

SEQ ID NO: 2365855 - RNA, 19 nt, Artificial Sequence
  Description of Artificial Sequence: Synthetic oligonucleotide
  Antisense strand to SEQ ID NO: 2365854
cuucaucagcacuuaauac

SEQ ID NO: 2365856 - RNA, 19 nt, Artificial Sequence
  Description of Artificial Sequence: Synthetic oligonucleotide
  Sense strand starting at position 504 of SEQ ID NO: 1885762
uuugcaacucugugauuuc

SEQ ID NO: 2365857 - RNA, 19 nt, Artificial Sequence
  Description of Artificial Sequence: Synthetic oligonucleotide
  Antisense strand to SEQ ID NO: 2365856
gaaaucacagaguugcaaa

SEQ ID NO: 2365858 - RNA, 19 nt, Artificial Sequence
  Description of Artificial Sequence: Synthetic oligonucleotide
  Sense strand starting at position 507 of SEQ ID NO: 1885762
gcaacucugugauuucucu

SEQ ID NO: 2365859 - RNA, 19 nt, Artificial Sequence
  Description of Artificial Sequence: Synthetic oligonucleotide
  Antisense strand to SEQ ID NO: 2365858
agagaaaucacagaguugc

SEQ ID NO: 2365860 - RNA, 19 nt, Artificial Sequence
  Description of Artificial Sequence: Synthetic oligonucleotide
  Sense strand starting at position 511 of SEQ ID NO: 1885762
cucugugauuucucuguag

SEQ ID NO: 2365861 - RNA, 19 nt, Artificial Sequence
  Description of Artificial Sequence: Synthetic oligonucleotide
  Antisense strand to SEQ ID NO: 2365860
cuacagagaaaucacagag

SEQ ID NO: 2365862 - RNA, 19 nt, Artificial Sequence
  Description of Artificial Sequence: Synthetic oligonucleotide
  Sense strand starting at position 1427 of SEQ ID NO: 1885762
accucuaagccggauacuu

SEQ ID NO: 2365863 - RNA, 19 nt, Artificial Sequence
  Description of Artificial Sequence: Synthetic oligonucleotide
  Antisense strand to SEQ ID NO: 2365862
aaguauccggcuuagaggu

SEQ ID NO: 2365864 - RNA, 19 nt, Artificial Sequence
  Description of Artificial Sequence: Synthetic oligonucleotide
  Sense strand starting at position 1437 of SEQ ID NO: 1885762
cggauacuucccuggacca

SEQ ID NO: 2365865 - RNA, 19 nt, Artificial Sequence
  Description of Artificial Sequence: Synthetic oligonucleotide
  Antisense strand to SEQ ID NO: 2365864
ugguccagggaaguauccg

SEQ ID NO: 2365866 - RNA, 19 nt, Artificial Sequence
  Description of Artificial Sequence: Synthetic oligonucleotide
  Sense strand starting at position 1486 of SEQ ID NO: 1885762
ucguuucugccagcgguua

SEQ ID NO: 2365867 - RNA, 19 nt, Artificial Sequence
  Description of Artificial Sequence: Synthetic oligonucleotide
  Antisense strand to SEQ ID NO: 2365866
uaaccgcuggcagaaacga

SEQ ID NO: 2365868 - RNA, 19 nt, Artificial Sequence
  Description of Artificial Sequence: Synthetic oligonucleotide
  Sense strand starting at position 1505 of SEQ ID NO: 1885762
ccaagacccugggauauuu

SEQ ID NO: 2365869 - RNA, 19 nt, Artificial Sequence
  Description of Artificial Sequence: Synthetic oligonucleotide
  Antisense strand to SEQ ID NO: 2365868
aaauaucccagggucuugg

SEQ ID NO: 2365870 - RNA, 19 nt, Artificial Sequence
  Description of Artificial Sequence: Synthetic oligonucleotide
  Sense strand starting at position 1590 of SEQ ID NO: 1885762
ggcuuuggccuggagaaag

SEQ ID NO: 2365871 - RNA, 19 nt, Artificial Sequence
  Description of Artificial Sequence: Synthetic oligonucleotide
  Antisense strand to SEQ ID NO: 2365870
cuuucuccaggccaaagcc

SEQ ID NO: 2365872 - RNA, 19 nt, Artificial Sequence
  Description of Artificial Sequence: Synthetic oligonucleotide
  Sense strand starting at position 1630 of SEQ ID NO: 1885762
cgacaauacccuggagaac

SEQ ID NO: 2365873 - RNA, 19 nt, Artificial Sequence
  Description of Artificial Sequence: Synthetic oligonucleotide
  Antisense strand to SEQ ID NO: 2365872
guucuccaggguauugucg

SEQ ID NO: 2365874 - RNA, 19 nt, Artificial Sequence
  Description of Artificial Sequence: Synthetic oligonucleotide
  Sense strand starting at position 1661 of SEQ ID NO: 1885762
uauaauuggcgcguuacua

SEQ ID NO: 2365875 - RNA, 19 nt, Artificial Sequence
  Description of Artificial Sequence: Synthetic oligonucleotide
  Antisense strand to SEQ ID NO: 2365874
uaguaacgcgccaauuaua

SEQ ID NO: 2365876 - RNA, 19 nt, Artificial Sequence
  Description of Artificial Sequence: Synthetic oligonucleotide
  Sense strand starting at position 2868 of SEQ ID NO: 1885762
cagaaacggcuguaacuaa

SEQ ID NO: 2365877 - RNA, 19 nt, Artificial Sequence
  Description of Artificial Sequence: Synthetic oligonucleotide
  Antisense strand to SEQ ID NO: 2365876
uuaguuacagccguuucug

SEQ ID NO: 2365878 - RNA, 19 nt, Artificial Sequence
  Description of Artificial Sequence: Synthetic oligonucleotide
  Sense strand starting at position 3485 of SEQ ID NO: 1885762
ugagauauucuauguaauc

SEQ ID NO: 2365879 - RNA, 19 nt, Artificial Sequence
  Description of Artificial Sequence: Synthetic oligonucleotide
  Antisense strand to SEQ ID NO: 2365878
gauuacauagaauaucuca

SEQ ID NO: 2365880 - RNA, 19 nt, Artificial Sequence
  Description of Artificial Sequence: Synthetic oligonucleotide
  Sense strand starting at position 3530 of SEQ ID NO: 1885762
uggugagucguccucgauu

SEQ ID NO: 2365881 - RNA, 19 nt, Artificial Sequence
  Description of Artificial Sequence: Synthetic oligonucleotide
  Antisense strand to SEQ ID NO: 2365880
aaucgaggacgacucacca

SEQ ID NO: 2365882 - RNA, 19 nt, Artificial Sequence
  Description of Artificial Sequence: Synthetic oligonucleotide
  Sense strand starting at position 3844 of SEQ ID NO: 1885762
cugagaaguuucuuaucuu

SEQ ID NO: 2365883 - RNA, 19 nt, Artificial Sequence
  Description of Artificial Sequence: Synthetic oligonucleotide
  Antisense strand to SEQ ID NO: 2365882
aagauaagaaacuucucag

SEQ ID NO: 2365884 - RNA, 19 nt, Artificial Sequence
  Description of Artificial Sequence: Synthetic oligonucleotide
  Sense strand starting at position 653 of SEQ ID NO: 1885763
cugggaaggcuuggacaua

SEQ ID NO: 2365885 - RNA, 19 nt, Artificial Sequence
  Description of Artificial Sequence: Synthetic oligonucleotide
  Antisense strand to SEQ ID NO: 2365884
uauguccaagccuucccag

SEQ ID NO: 2365886 - RNA, 19 nt, Artificial Sequence
  Description of Artificial Sequence: Synthetic oligonucleotide
  Sense strand starting at position 1428 of SEQ ID NO: 1885763
accucuaagccggauacuu

SEQ ID NO: 2365887 - RNA, 19 nt, Artificial Sequence
  Description of Artificial Sequence: Synthetic oligonucleotide
  Antisense strand to SEQ ID NO: 2365886
aaguauccggcuuagaggu

SEQ ID NO: 2365888 - RNA, 19 nt, Artificial Sequence
  Description of Artificial Sequence: Synthetic oligonucleotide
  Sense strand starting at position 1438 of SEQ ID NO: 1885763
cggauacuucccuggacca

SEQ ID NO: 2365889 - RNA, 19 nt, Artificial Sequence
  Description of Artificial Sequence: Synthetic oligonucleotide
  Antisense strand to SEQ ID NO: 2365888
ugguccagggaaguauccg

SEQ ID NO: 2365890 - RNA, 19 nt, Artificial Sequence
  Description of Artificial Sequence: Synthetic oligonucleotide
  Sense strand starting at position 1487 of SEQ ID NO: 1885763
ucguuucugccagcgguua

SEQ ID NO: 2365891 - RNA, 19 nt, Artificial Sequence
  Description of Artificial Sequence: Synthetic oligonucleotide
  Antisense strand to SEQ ID NO: 2365890
uaaccgcuggcagaaacga

SEQ ID NO: 2365892 - RNA, 19 nt, Artificial Sequence
  Description of Artificial Sequence: Synthetic oligonucleotide
  Sense strand starting at position 1506 of SEQ ID NO: 1885763
ccaagacccugggauauuu

SEQ ID NO: 2365893 - RNA, 19 nt, Artificial Sequence
  Description of Artificial Sequence: Synthetic oligonucleotide
  Antisense strand to SEQ ID NO: 2365892
aaauaucccagggucuugg

SEQ ID NO: 2365894 - RNA, 19 nt, Artificial Sequence
  Description of Artificial Sequence: Synthetic oligonucleotide
  Sense strand starting at position 1591 of SEQ ID NO: 1885763
ggcuuuggccuggagaaag

SEQ ID NO: 2365895 - RNA, 19 nt, Artificial Sequence
  Description of Artificial Sequence: Synthetic oligonucleotide
  Antisense strand to SEQ ID NO: 2365894
cuuucuccaggccaaagcc

SEQ ID NO: 2365896 - RNA, 19 nt, Artificial Sequence
  Description of Artificial Sequence: Synthetic oligonucleotide
  Sense strand starting at position 1631 of SEQ ID NO: 1885763
cgacaauacccuggagaac

SEQ ID NO: 2365897 - RNA, 19 nt, Artificial Sequence
  Description of Artificial Sequence: Synthetic oligonucleotide
  Antisense strand to SEQ ID NO: 2365896
guucuccaggguauugucg

SEQ ID NO: 2365898 - RNA, 19 nt, Artificial Sequence
  Description of Artificial Sequence: Synthetic oligonucleotide
  Sense strand starting at position 1662 of SEQ ID NO: 1885763
uauaauuggcgcguuacua

SEQ ID NO: 2365899 - RNA, 19 nt, Artificial Sequence
  Description of Artificial Sequence: Synthetic oligonucleotide
  Antisense strand to SEQ ID NO: 2365898
uaguaacgcgccaauuaua

SEQ ID NO: 2365900 - RNA, 19 nt, Artificial Sequence
  Description of Artificial Sequence: Synthetic oligonucleotide
  Sense strand starting at position 2869 of SEQ ID NO: 1885763
cagaaacggcuguaacuaa

SEQ ID NO: 2365901 - RNA, 19 nt, Artificial Sequence
  Description of Artificial Sequence: Synthetic oligonucleotide
  Antisense strand to SEQ ID NO: 2365900
uuaguuacagccguuucug

SEQ ID NO: 2365902 - RNA, 19 nt, Artificial Sequence
  Description of Artificial Sequence: Synthetic oligonucleotide
  Sense strand starting at position 3480 of SEQ ID NO: 1885763
ugagauauucuauguaauc

SEQ ID NO: 2365903 - RNA, 19 nt, Artificial Sequence
  Description of Artificial Sequence: Synthetic oligonucleotide
  Antisense strand to SEQ ID NO: 2365902
gauuacauagaauaucuca

SEQ ID NO: 2365904 - RNA, 19 nt, Artificial Sequence
  Description of Artificial Sequence: Synthetic oligonucleotide
  Sense strand starting at position 3525 of SEQ ID NO: 1885763
uggugagucguccucgauu

SEQ ID NO: 2365905 - RNA, 19 nt, Artificial Sequence
  Description of Artificial Sequence: Synthetic oligonucleotide
  Antisense strand to SEQ ID NO: 2365904
aaucgaggacgacucacca

SEQ ID NO: 2365906 - RNA, 19 nt, Artificial Sequence
  Description of Artificial Sequence: Synthetic oligonucleotide
  Sense strand starting at position 3839 of SEQ ID NO: 1885763
cugagaaguuucuuaucuu

SEQ ID NO: 2365907 - RNA, 19 nt, Artificial Sequence
  Description of Artificial Sequence: Synthetic oligonucleotide
  Antisense strand to SEQ ID NO: 2365906
aagauaagaaacuucucag

SEQ ID NO: 2365908 - RNA, 19 nt, Artificial Sequence
  Description of Artificial Sequence: Synthetic oligonucleotide
  Sense strand starting at position 35 of SEQ ID NO: 1885764
auuaaagagaguuguauga

SEQ ID NO: 2365909 - RNA, 19 nt, Artificial Sequence
  Description of Artificial Sequence: Synthetic oligonucleotide
  Antisense strand to SEQ ID NO: 2365908
ucauacaacucucuuuaau

SEQ ID NO: 2365910 - RNA, 19 nt, Artificial Sequence
  Description of Artificial Sequence: Synthetic oligonucleotide
  Sense strand starting at position 49 of SEQ ID NO: 1885764
uaugaaaugucagucacag

SEQ ID NO: 2365911 - RNA, 19 nt, Artificial Sequence
  Description of Artificial Sequence: Synthetic oligonucleotide
  Antisense strand to SEQ ID NO: 2365910
cugugacugacauuucaua

SEQ ID NO: 2365912 - RNA, 19 nt, Artificial Sequence
  Description of Artificial Sequence: Synthetic oligonucleotide
  Sense strand starting at position 96 of SEQ ID NO: 1885764
gggucuuguagacaccaca

SEQ ID NO: 2365913 - RNA, 19 nt, Artificial Sequence
  Description of Artificial Sequence: Synthetic oligonucleotide
  Antisense strand to SEQ ID NO: 2365912
uguggugucuacaagaccc

SEQ ID NO: 2365914 - RNA, 19 nt, Artificial Sequence
  Description of Artificial Sequence: Synthetic oligonucleotide
  Sense strand starting at position 120 of SEQ ID NO: 1885764
gcuuuaaaucugggugaac

SEQ ID NO: 2365915 - RNA, 19 nt, Artificial Sequence
  Description of Artificial Sequence: Synthetic oligonucleotide
  Antisense strand to SEQ ID NO: 2365914
guucacccagauuuaaagc

SEQ ID NO: 2365916 - RNA, 19 nt, Artificial Sequence
  Description of Artificial Sequence: Synthetic oligonucleotide
  Sense strand starting at position 122 of SEQ ID NO: 1885764
uuuaaaucugggugaacca

SEQ ID NO: 2365917 - RNA, 19 nt, Artificial Sequence
  Description of Artificial Sequence: Synthetic oligonucleotide
  Antisense strand to SEQ ID NO: 2365916
ugguucacccagauuuaaa

SEQ ID NO: 2365918 - RNA, 19 nt, Artificial Sequence
  Description of Artificial Sequence: Synthetic oligonucleotide
  Sense strand starting at position 230 of SEQ ID NO: 1885764
caagaugauguuggcucaa

SEQ ID NO: 2365919 - RNA, 19 nt, Artificial Sequence
  Description of Artificial Sequence: Synthetic oligonucleotide
  Antisense strand to SEQ ID NO: 2365918
uugagccaacaucaucuug

SEQ ID NO: 2365920 - RNA, 19 nt, Artificial Sequence
  Description of Artificial Sequence: Synthetic oligonucleotide
  Sense strand starting at position 232 of SEQ ID NO: 1885764
agaugauguuggcucaaac

SEQ ID NO: 2365921 - RNA, 19 nt, Artificial Sequence
  Description of Artificial Sequence: Synthetic oligonucleotide
  Antisense strand to SEQ ID NO: 2365920
guuugagccaacaucaucu

SEQ ID NO: 2365922 - RNA, 19 nt, Artificial Sequence
  Description of Artificial Sequence: Synthetic oligonucleotide
  Sense strand starting at position 241 of SEQ ID NO: 1885764
uggcucaaaccagguuaaa

SEQ ID NO: 2365923 - RNA, 19 nt, Artificial Sequence
  Description of Artificial Sequence: Synthetic oligonucleotide
  Antisense strand to SEQ ID NO: 2365922
uuuaaccugguuugagcca

SEQ ID NO: 2365924 - RNA, 19 nt, Artificial Sequence
  Description of Artificial Sequence: Synthetic oligonucleotide
  Sense strand starting at position 252 of SEQ ID NO: 1885764
agguuaaaccacuggguaa

SEQ ID NO: 2365925 - RNA, 19 nt, Artificial Sequence
  Description of Artificial Sequence: Synthetic oligonucleotide
  Antisense strand to SEQ ID NO: 2365924
uuacccagugguuuaaccu

SEQ ID NO: 2365926 - RNA, 19 nt, Artificial Sequence
  Description of Artificial Sequence: Synthetic oligonucleotide
  Sense strand starting at position 253 of SEQ ID NO: 1885764
gguuaaaccacuggguaaa

SEQ ID NO: 2365927 - RNA, 19 nt, Artificial Sequence
  Description of Artificial Sequence: Synthetic oligonucleotide
  Antisense strand to SEQ ID NO: 2365926
uuuacccagugguuuaacc

SEQ ID NO: 2365928 - RNA, 19 nt, Artificial Sequence
  Description of Artificial Sequence: Synthetic oligonucleotide
  Sense strand starting at position 254 of SEQ ID NO: 1885764
guuaaaccacuggguaaau

SEQ ID NO: 2365929 - RNA, 19 nt, Artificial Sequence
  Description of Artificial Sequence: Synthetic oligonucleotide
  Antisense strand to SEQ ID NO: 2365928
auuuacccagugguuuaac

SEQ ID NO: 2365930 - RNA, 19 nt, Artificial Sequence
  Description of Artificial Sequence: Synthetic oligonucleotide
  Sense strand starting at position 325 of SEQ ID NO: 1885764
uucugaugccuguaacaac

SEQ ID NO: 2365931 - RNA, 19 nt, Artificial Sequence
  Description of Artificial Sequence: Synthetic oligonucleotide
  Antisense strand to SEQ ID NO: 2365930
guuguuacaggcaucagaa

SEQ ID NO: 2365932 - RNA, 19 nt, Artificial Sequence
  Description of Artificial Sequence: Synthetic oligonucleotide
  Sense strand starting at position 346 of SEQ ID NO: 1885764
ucacauucuccucaagcga

SEQ ID NO: 2365933 - RNA, 19 nt, Artificial Sequence
  Description of Artificial Sequence: Synthetic oligonucleotide
  Antisense strand to SEQ ID NO: 2365932
ucgcuugaggagaauguga

SEQ ID NO: 2365934 - RNA, 19 nt, Artificial Sequence
  Description of Artificial Sequence: Synthetic oligonucleotide
  Sense strand starting at position 471 of SEQ ID NO: 1885764
guauuaagugcugaugaag

SEQ ID NO: 2365935 - RNA, 19 nt, Artificial Sequence
  Description of Artificial Sequence: Synthetic oligonucleotide
  Antisense strand to SEQ ID NO: 2365934
cuucaucagcacuuaauac

SEQ ID NO: 2365936 - RNA, 19 nt, Artificial Sequence
  Description of Artificial Sequence: Synthetic oligonucleotide
  Sense strand starting at position 504 of SEQ ID NO: 1885764
uuugcaacucugugauuuc

SEQ ID NO: 2365937 - RNA, 19 nt, Artificial Sequence
  Description of Artificial Sequence: Synthetic oligonucleotide
  Antisense strand to SEQ ID NO: 2365936
gaaaucacagaguugcaaa

SEQ ID NO: 2365938 - RNA, 19 nt, Artificial Sequence
  Description of Artificial Sequence: Synthetic oligonucleotide
  Sense strand starting at position 507 of SEQ ID NO: 1885764
gcaacucugugauuucucu

SEQ ID NO: 2365939 - RNA, 19 nt, Artificial Sequence
  Description of Artificial Sequence: Synthetic oligonucleotide
  Antisense strand to SEQ ID NO: 2365938
agagaaaucacagaguugc

SEQ ID NO: 2365940 - RNA, 19 nt, Artificial Sequence
  Description of Artificial Sequence: Synthetic oligonucleotide
  Sense strand starting at position 511 of SEQ ID NO: 1885764
cucugugauuucucuguag

SEQ ID NO: 2365941 - RNA, 19 nt, Artificial Sequence
  Description of Artificial Sequence: Synthetic oligonucleotide
  Antisense strand to SEQ ID NO: 2365940
cuacagagaaaucacagag

SEQ ID NO: 2365942 - RNA, 19 nt, Artificial Sequence
  Description of Artificial Sequence: Synthetic oligonucleotide
  Sense strand starting at position 1427 of SEQ ID NO: 1885764
accucuaagccggauacuu

SEQ ID NO: 2365943 - RNA, 19 nt, Artificial Sequence
  Description of Artificial Sequence: Synthetic oligonucleotide
  Antisense strand to SEQ ID NO: 2365942
aaguauccggcuuagaggu

SEQ ID NO: 2365944 - RNA, 19 nt, Artificial Sequence
  Description of Artificial Sequence: Synthetic oligonucleotide
  Sense strand starting at position 1437 of SEQ ID NO: 1885764
cggauacuucccuggacca

SEQ ID NO: 2365945 - RNA, 19 nt, Artificial Sequence
  Description of Artificial Sequence: Synthetic oligonucleotide
  Antisense strand to SEQ ID NO: 2365944
ugguccagggaaguauccg

SEQ ID NO: 2365946 - RNA, 19 nt, Artificial Sequence
  Description of Artificial Sequence: Synthetic oligonucleotide
  Sense strand starting at position 1486 of SEQ ID NO: 1885764
ucguuucugccagcgguua

SEQ ID NO: 2365947 - RNA, 19 nt, Artificial Sequence
  Description of Artificial Sequence: Synthetic oligonucleotide
  Antisense strand to SEQ ID NO: 2365946
uaaccgcuggcagaaacga

SEQ ID NO: 2365948 - RNA, 19 nt, Artificial Sequence
  Description of Artificial Sequence: Synthetic oligonucleotide
  Sense strand starting at position 1505 of SEQ ID NO: 1885764
ccaagacccugggauauuu

SEQ ID NO: 2365949 - RNA, 19 nt, Artificial Sequence
  Description of Artificial Sequence: Synthetic oligonucleotide
  Antisense strand to SEQ ID NO: 2365948
aaauaucccagggucuugg

SEQ ID NO: 2365950 - RNA, 19 nt, Artificial Sequence
  Description of Artificial Sequence: Synthetic oligonucleotide
  Sense strand starting at position 1590 of SEQ ID NO: 1885764
ggcuuuggccuggagaaag

SEQ ID NO: 2365951 - RNA, 19 nt, Artificial Sequence
  Description of Artificial Sequence: Synthetic oligonucleotide
  Antisense strand to SEQ ID NO: 2365950
cuuucuccaggccaaagcc

SEQ ID NO: 2365952 - RNA, 19 nt, Artificial Sequence
  Description of Artificial Sequence: Synthetic oligonucleotide
  Sense strand starting at position 1630 of SEQ ID NO: 1885764
cgacaauacccuggagaac

SEQ ID NO: 2365953 - RNA, 19 nt, Artificial Sequence
  Description of Artificial Sequence: Synthetic oligonucleotide
  Antisense strand to SEQ ID NO: 2365952
guucuccaggguauugucg

SEQ ID NO: 2365954 - RNA, 19 nt, Artificial Sequence
  Description of Artificial Sequence: Synthetic oligonucleotide
  Sense strand starting at position 1661 of SEQ ID NO: 1885764
uauaauuggcgcguuacua

SEQ ID NO: 2365955 - RNA, 19 nt, Artificial Sequence
  Description of Artificial Sequence: Synthetic oligonucleotide
  Antisense strand to SEQ ID NO: 2365954
uaguaacgcgccaauuaua

SEQ ID NO: 2365956 - RNA, 19 nt, Artificial Sequence
  Description of Artificial Sequence: Synthetic oligonucleotide
  Sense strand starting at position 2868 of SEQ ID NO: 1885764
cagaaacggcuguaacuaa

SEQ ID NO: 2365957 - RNA, 19 nt, Artificial Sequence
  Description of Artificial Sequence: Synthetic oligonucleotide
  Antisense strand to SEQ ID NO: 2365956
uuaguuacagccguuucug

SEQ ID NO: 2365958 - RNA, 19 nt, Artificial Sequence
  Description of Artificial Sequence: Synthetic oligonucleotide
  Sense strand starting at position 3485 of SEQ ID NO: 1885764
ugagauauucuauguaauc

SEQ ID NO: 2365959 - RNA, 19 nt, Artificial Sequence
  Description of Artificial Sequence: Synthetic oligonucleotide
  Antisense strand to SEQ ID NO: 2365958
gauuacauagaauaucuca

SEQ ID NO: 2365960 - RNA, 19 nt, Artificial Sequence
  Description of Artificial Sequence: Synthetic oligonucleotide
  Sense strand starting at position 3530 of SEQ ID NO: 1885764
uggugagucguccucgauu

SEQ ID NO: 2365961 - RNA, 19 nt, Artificial Sequence
  Description of Artificial Sequence: Synthetic oligonucleotide
  Antisense strand to SEQ ID NO: 2365960
aaucgaggacgacucacca

SEQ ID NO: 2365962 - RNA, 19 nt, Artificial Sequence
  Description of Artificial Sequence: Synthetic oligonucleotide
  Sense strand starting at position 3844 of SEQ ID NO: 1885764
cugagaaguuucuuaucuu

SEQ ID NO: 2365963 - RNA, 19 nt, Artificial Sequence
  Description of Artificial Sequence: Synthetic oligonucleotide
  Antisense strand to SEQ ID NO: 2365962
aagauaagaaacuucucag

SEQ ID NO: 2365964 - RNA, 19 nt, Artificial Sequence
  Description of Artificial Sequence: Synthetic oligonucleotide
  Sense strand starting at position 53 of SEQ ID NO: 1885765
auacgaaugacgugaagaa

SEQ ID NO: 2365965 - RNA, 19 nt, Artificial Sequence
  Description of Artificial Sequence: Synthetic oligonucleotide
  Antisense strand to SEQ ID NO: 2365964
uucuucacgucauucguau

SEQ ID NO: 2365966 - RNA, 19 nt, Artificial Sequence
  Description of Artificial Sequence: Synthetic oligonucleotide
  Sense strand starting at position 144 of SEQ ID NO: 1885765
uuuggaucucuaugacaau

SEQ ID NO: 2365967 - RNA, 19 nt, Artificial Sequence
  Description of Artificial Sequence: Synthetic oligonucleotide
  Antisense strand to SEQ ID NO: 2365966
auugucauagagauccaaa

SEQ ID NO: 2365968 - RNA, 19 nt, Artificial Sequence
  Description of Artificial Sequence: Synthetic oligonucleotide
  Sense strand starting at position 156 of SEQ ID NO: 1885765
ugacaauucgacuguaaua

SEQ ID NO: 2365969 - RNA, 19 nt, Artificial Sequence
  Description of Artificial Sequence: Synthetic oligonucleotide
  Antisense strand to SEQ ID NO: 2365968
uauuacagucgaauuguca

SEQ ID NO: 2365970 - RNA, 19 nt, Artificial Sequence
  Description of Artificial Sequence: Synthetic oligonucleotide
  Sense strand starting at position 615 of SEQ ID NO: 1885765
cggucagagcaccaaacau

SEQ ID NO: 2365971 - RNA, 19 nt, Artificial Sequence
  Description of Artificial Sequence: Synthetic oligonucleotide
  Antisense strand to SEQ ID NO: 2365970
auguuuggugcucugaccg

SEQ ID NO: 2365972 - RNA, 19 nt, Artificial Sequence
  Description of Artificial Sequence: Synthetic oligonucleotide
  Sense strand starting at position 658 of SEQ ID NO: 1885765
gcaugaaauucucccaaag

SEQ ID NO: 2365973 - RNA, 19 nt, Artificial Sequence
  Description of Artificial Sequence: Synthetic oligonucleotide
  Antisense strand to SEQ ID NO: 2365972
cuuugggagaauuucaugc

SEQ ID NO: 2365974 - RNA, 19 nt, Artificial Sequence
  Description of Artificial Sequence: Synthetic oligonucleotide
  Sense strand starting at position 708 of SEQ ID NO: 1885765
ggucaccguaaguagaaua

SEQ ID NO: 2365975 - RNA, 19 nt, Artificial Sequence
  Description of Artificial Sequence: Synthetic oligonucleotide
  Antisense strand to SEQ ID NO: 2365974
uauucuacuuacggugacc

SEQ ID NO: 2365976 - RNA, 19 nt, Artificial Sequence
  Description of Artificial Sequence: Synthetic oligonucleotide
  Sense strand starting at position 715 of SEQ ID NO: 1885765
guaaguagaauaggugaaa

SEQ ID NO: 2365977 - RNA, 19 nt, Artificial Sequence
  Description of Artificial Sequence: Synthetic oligonucleotide
  Antisense strand to SEQ ID NO: 2365976
uuucaccuauucuacuuac

SEQ ID NO: 2365978 - RNA, 19 nt, Artificial Sequence
  Description of Artificial Sequence: Synthetic oligonucleotide
  Sense strand starting at position 926 of SEQ ID NO: 1885765
aaggaaacagugugaaucu

SEQ ID NO: 2365979 - RNA, 19 nt, Artificial Sequence
  Description of Artificial Sequence: Synthetic oligonucleotide
  Antisense strand to SEQ ID NO: 2365978
agauucacacuguuuccuu

SEQ ID NO: 2365980 - RNA, 19 nt, Artificial Sequence
  Description of Artificial Sequence: Synthetic oligonucleotide
  Sense strand starting at position 999 of SEQ ID NO: 1885765
uugugaaaucuaugaagug

SEQ ID NO: 2365981 - RNA, 19 nt, Artificial Sequence
  Description of Artificial Sequence: Synthetic oligonucleotide
  Antisense strand to SEQ ID NO: 2365980
cacuucauagauuucacaa

SEQ ID NO: 2365982 - RNA, 19 nt, Artificial Sequence
  Description of Artificial Sequence: Synthetic oligonucleotide
  Sense strand starting at position 1029 of SEQ ID NO: 1885765
gagucacccgaggaauguu

SEQ ID NO: 2365983 - RNA, 19 nt, Artificial Sequence
  Description of Artificial Sequence: Synthetic oligonucleotide
  Antisense strand to SEQ ID NO: 2365982
aacauuccucgggugacuc

SEQ ID NO: 2365984 - RNA, 19 nt, Artificial Sequence
  Description of Artificial Sequence: Synthetic oligonucleotide
  Sense strand starting at position 1463 of SEQ ID NO: 1885765
ugugaauacuggccacaag

SEQ ID NO: 2365985 - RNA, 19 nt, Artificial Sequence
  Description of Artificial Sequence: Synthetic oligonucleotide
  Antisense strand to SEQ ID NO: 2365984
cuuguggccaguauucaca

SEQ ID NO: 2365986 - RNA, 19 nt, Artificial Sequence
  Description of Artificial Sequence: Synthetic oligonucleotide
  Sense strand starting at position 1464 of SEQ ID NO: 1885765
gugaauacuggccacaagu

SEQ ID NO: 2365987 - RNA, 19 nt, Artificial Sequence
  Description of Artificial Sequence: Synthetic oligonucleotide
  Antisense strand to SEQ ID NO: 2365986
acuuguggccaguauucac

SEQ ID NO: 2365988 - RNA, 19 nt, Artificial Sequence
  Description of Artificial Sequence: Synthetic oligonucleotide
  Sense strand starting at position 1589 of SEQ ID NO: 1885765
gaaauuugauuaggaggaa

SEQ ID NO: 2365989 - RNA, 19 nt, Artificial Sequence
  Description of Artificial Sequence: Synthetic oligonucleotide
  Antisense strand to SEQ ID NO: 2365988
uuccuccuaaucaaauuuc

SEQ ID NO: 2365990 - RNA, 19 nt, Artificial Sequence
  Description of Artificial Sequence: Synthetic oligonucleotide
  Sense strand starting at position 1671 of SEQ ID NO: 1885765
gaggaucaccuagguaacu

SEQ ID NO: 2365991 - RNA, 19 nt, Artificial Sequence
  Description of Artificial Sequence: Synthetic oligonucleotide
  Antisense strand to SEQ ID NO: 2365990
aguuaccuaggugauccuc

SEQ ID NO: 2365992 - RNA, 19 nt, Artificial Sequence
  Description of Artificial Sequence: Synthetic oligonucleotide
  Sense strand starting at position 2516 of SEQ ID NO: 1885765
acagacuuugcugaaguga

SEQ ID NO: 2365993 - RNA, 19 nt, Artificial Sequence
  Description of Artificial Sequence: Synthetic oligonucleotide
  Antisense strand to SEQ ID NO: 2365992
ucacuucagcaaagucugu

SEQ ID NO: 2365994 - RNA, 19 nt, Artificial Sequence
  Description of Artificial Sequence: Synthetic oligonucleotide
  Sense strand starting at position 2875 of SEQ ID NO: 1885765
agagguggauuugaggaau

SEQ ID NO: 2365995 - RNA, 19 nt, Artificial Sequence
  Description of Artificial Sequence: Synthetic oligonucleotide
  Antisense strand to SEQ ID NO: 2365994
auuccucaaauccaccucu

SEQ ID NO: 2365996 - RNA, 19 nt, Artificial Sequence
  Description of Artificial Sequence: Synthetic oligonucleotide
  Sense strand starting at position 3371 of SEQ ID NO: 1885765
ugugaaaucauauacgagu

SEQ ID NO: 2365997 - RNA, 19 nt, Artificial Sequence
  Description of Artificial Sequence: Synthetic oligonucleotide
  Antisense strand to SEQ ID NO: 2365996
acucguauaugauuucaca

SEQ ID NO: 2365998 - RNA, 19 nt, Artificial Sequence
  Description of Artificial Sequence: Synthetic oligonucleotide
  Sense strand starting at position 3560 of SEQ ID NO: 1885765
gacauuccuguugaguuaa

SEQ ID NO: 2365999 - RNA, 19 nt, Artificial Sequence
  Description of Artificial Sequence: Synthetic oligonucleotide
  Antisense strand to SEQ ID NO: 2365998
uuaacucaacaggaauguc

SEQ ID NO: 2366000 - RNA, 19 nt, Artificial Sequence
  Description of Artificial Sequence: Synthetic oligonucleotide
  Sense strand starting at position 3642 of SEQ ID NO: 1885765
agcuauuucugcuuuguga

SEQ ID NO: 2366001 - RNA, 19 nt, Artificial Sequence
  Description of Artificial Sequence: Synthetic oligonucleotide
  Antisense strand to SEQ ID NO: 2366000
ucacaaagcagaaauagcu

SEQ ID NO: 2366002 - RNA, 19 nt, Artificial Sequence
  Description of Artificial Sequence: Synthetic oligonucleotide
  Sense strand starting at position 3644 of SEQ ID NO: 1885765
cuauuucugcuuugugacu

SEQ ID NO: 2366003 - RNA, 19 nt, Artificial Sequence
  Description of Artificial Sequence: Synthetic oligonucleotide
  Antisense strand to SEQ ID NO: 2366002
agucacaaagcagaaauag

SEQ ID NO: 2366004 - RNA, 19 nt, Artificial Sequence
  Description of Artificial Sequence: Synthetic oligonucleotide
  Sense strand starting at position 3808 of SEQ ID NO: 1885765
aucagaguuacagggucau

SEQ ID NO: 2366005 - RNA, 19 nt, Artificial Sequence
  Description of Artificial Sequence: Synthetic oligonucleotide
  Antisense strand to SEQ ID NO: 2366004
augacccuguaacucugau

SEQ ID NO: 2366006 - RNA, 19 nt, Artificial Sequence
  Description of Artificial Sequence: Synthetic oligonucleotide
  Sense strand starting at position 895 of SEQ ID NO: 1885766
aaggucguugggcaagaua

SEQ ID NO: 2366007 - RNA, 19 nt, Artificial Sequence
  Description of Artificial Sequence: Synthetic oligonucleotide
  Antisense strand to SEQ ID NO: 2366006
uaucuugcccaacgaccuu

SEQ ID NO: 2366008 - RNA, 19 nt, Artificial Sequence
  Description of Artificial Sequence: Synthetic oligonucleotide
  Sense strand starting at position 915 of SEQ ID NO: 1885766
ggugguguuccuagagguu

SEQ ID NO: 2366009 - RNA, 19 nt, Artificial Sequence
  Description of Artificial Sequence: Synthetic oligonucleotide
  Antisense strand to SEQ ID NO: 2366008
aaccucuaggaacaccacc

SEQ ID NO: 2366010 - RNA, 19 nt, Artificial Sequence
  Description of Artificial Sequence: Synthetic oligonucleotide
  Sense strand starting at position 1067 of SEQ ID NO: 1885766
cgccuaguuacguuacuau

SEQ ID NO: 2366011 - RNA, 19 nt, Artificial Sequence
  Description of Artificial Sequence: Synthetic oligonucleotide
  Antisense strand to SEQ ID NO: 2366010
auaguaacguaacuaggcg

SEQ ID NO: 2366012 - RNA, 19 nt, Artificial Sequence
  Description of Artificial Sequence: Synthetic oligonucleotide
  Sense strand starting at position 1104 of SEQ ID NO: 1885766
cucguaucugcguccaaau

SEQ ID NO: 2366013 - RNA, 19 nt, Artificial Sequence
  Description of Artificial Sequence: Synthetic oligonucleotide
  Antisense strand to SEQ ID NO: 2366012
auuuggacgcagauacgag

SEQ ID NO: 2366014 - RNA, 19 nt, Artificial Sequence
  Description of Artificial Sequence: Synthetic oligonucleotide
  Sense strand starting at position 1320 of SEQ ID NO: 1885766
ccuggagcucuugaaucua

SEQ ID NO: 2366015 - RNA, 19 nt, Artificial Sequence
  Description of Artificial Sequence: Synthetic oligonucleotide
  Antisense strand to SEQ ID NO: 2366014
uagauucaagagcuccagg

SEQ ID NO: 2366016 - RNA, 19 nt, Artificial Sequence
  Description of Artificial Sequence: Synthetic oligonucleotide
  Sense strand starting at position 1626 of SEQ ID NO: 1885766
gagacaagaccguaagucu

SEQ ID NO: 2366017 - RNA, 19 nt, Artificial Sequence
  Description of Artificial Sequence: Synthetic oligonucleotide
  Antisense strand to SEQ ID NO: 2366016
agacuuacggucuugucuc

SEQ ID NO: 2366018 - RNA, 19 nt, Artificial Sequence
  Description of Artificial Sequence: Synthetic oligonucleotide
  Sense strand starting at position 1997 of SEQ ID NO: 1885766
gcacguugagaagaaguca

SEQ ID NO: 2366019 - RNA, 19 nt, Artificial Sequence
  Description of Artificial Sequence: Synthetic oligonucleotide
  Antisense strand to SEQ ID NO: 2366018
ugacuucuucucaacgugc

SEQ ID NO: 2366020 - RNA, 19 nt, Artificial Sequence
  Description of Artificial Sequence: Synthetic oligonucleotide
  Sense strand starting at position 2470 of SEQ ID NO: 1885766
acuuccucugaugaguaau

SEQ ID NO: 2366021 - RNA, 19 nt, Artificial Sequence
  Description of Artificial Sequence: Synthetic oligonucleotide
  Antisense strand to SEQ ID NO: 2366020
auuacucaucagaggaagu

SEQ ID NO: 2366022 - RNA, 19 nt, Artificial Sequence
  Description of Artificial Sequence: Synthetic oligonucleotide
  Sense strand starting at position 2612 of SEQ ID NO: 1885766
cgaauugucauagagaucc

SEQ ID NO: 2366023 - RNA, 19 nt, Artificial Sequence
  Description of Artificial Sequence: Synthetic oligonucleotide
  Antisense strand to SEQ ID NO: 2366022
ggaucucuaugacaauucg

SEQ ID NO: 2366024 - RNA, 19 nt, Artificial Sequence
  Description of Artificial Sequence: Synthetic oligonucleotide
  Sense strand starting at position 2644 of SEQ ID NO: 1885766
gguuguauucgguugcuac

SEQ ID NO: 2366025 - RNA, 19 nt, Artificial Sequence
  Description of Artificial Sequence: Synthetic oligonucleotide
  Antisense strand to SEQ ID NO: 2366024
guagcaaccgaauacaacc

SEQ ID NO: 2366026 - RNA, 19 nt, Artificial Sequence
  Description of Artificial Sequence: Synthetic oligonucleotide
  Sense strand starting at position 2751 of SEQ ID NO: 1885766
gucgcagaucuugggauuu

SEQ ID NO: 2366027 - RNA, 19 nt, Artificial Sequence
  Description of Artificial Sequence: Synthetic oligonucleotide
  Antisense strand to SEQ ID NO: 2366026
aaaucccaagaucugcgac

SEQ ID NO: 2366028 - RNA, 19 nt, Artificial Sequence
  Description of Artificial Sequence: Synthetic oligonucleotide
  Sense strand starting at position 3174 of SEQ ID NO: 1885766
gcaauuugauguuucgaua

SEQ ID NO: 2366029 - RNA, 19 nt, Artificial Sequence
  Description of Artificial Sequence: Synthetic oligonucleotide
  Antisense strand to SEQ ID NO: 2366028
uaucgaaacaucaaauugc

SEQ ID NO: 2366030 - RNA, 19 nt, Artificial Sequence
  Description of Artificial Sequence: Synthetic oligonucleotide
  Sense strand starting at position 3196 of SEQ ID NO: 1885766
aucuauguuguauaacgau

SEQ ID NO: 2366031 - RNA, 19 nt, Artificial Sequence
  Description of Artificial Sequence: Synthetic oligonucleotide
  Antisense strand to SEQ ID NO: 2366030
aucguuauacaacauagau

SEQ ID NO: 2366032 - RNA, 19 nt, Artificial Sequence
  Description of Artificial Sequence: Synthetic oligonucleotide
  Sense strand starting at position 3340 of SEQ ID NO: 1885766
gcaauagagcaucagaauu

SEQ ID NO: 2366033 - RNA, 19 nt, Artificial Sequence
  Description of Artificial Sequence: Synthetic oligonucleotide
  Antisense strand to SEQ ID NO: 2366032
aauucugaugcucuauugc

SEQ ID NO: 2366034 - RNA, 19 nt, Artificial Sequence
  Description of Artificial Sequence: Synthetic oligonucleotide
  Sense strand starting at position 3440 of SEQ ID NO: 1885766
uuacuugugaguuauaagg

SEQ ID NO: 2366035 - RNA, 19 nt, Artificial Sequence
  Description of Artificial Sequence: Synthetic oligonucleotide
  Antisense strand to SEQ ID NO: 2366034
ccuuauaacucacaaguaa

SEQ ID NO: 2366036 - RNA, 19 nt, Artificial Sequence
  Description of Artificial Sequence: Synthetic oligonucleotide
  Sense strand starting at position 3487 of SEQ ID NO: 1885766
uucuguaucccauggaaga

SEQ ID NO: 2366037 - RNA, 19 nt, Artificial Sequence
  Description of Artificial Sequence: Synthetic oligonucleotide
  Antisense strand to SEQ ID NO: 2366036
ucuuccaugggauacagaa

SEQ ID NO: 2366038 - RNA, 19 nt, Artificial Sequence
  Description of Artificial Sequence: Synthetic oligonucleotide
  Sense strand starting at position 3488 of SEQ ID NO: 1885766
ucuguaucccauggaagag

SEQ ID NO: 2366039 - RNA, 19 nt, Artificial Sequence
  Description of Artificial Sequence: Synthetic oligonucleotide
  Antisense strand to SEQ ID NO: 2366038
cucuuccaugggauacaga

SEQ ID NO: 2366040 - RNA, 19 nt, Artificial Sequence
  Description of Artificial Sequence: Synthetic oligonucleotide
  Sense strand starting at position 3551 of SEQ ID NO: 1885766
guugaugucauuugagucu

SEQ ID NO: 2366041 - RNA, 19 nt, Artificial Sequence
  Description of Artificial Sequence: Synthetic oligonucleotide
  Antisense strand to SEQ ID NO: 2366040
agacucaaaugacaucaac

SEQ ID NO: 2366042 - RNA, 19 nt, Artificial Sequence
  Description of Artificial Sequence: Synthetic oligonucleotide
  Sense strand starting at position 3811 of SEQ ID NO: 1885766
guguuaguacccgugguua

SEQ ID NO: 2366043 - RNA, 19 nt, Artificial Sequence
  Description of Artificial Sequence: Synthetic oligonucleotide
  Antisense strand to SEQ ID NO: 2366042
uaaccacggguacuaacac

SEQ ID NO: 2366044 - RNA, 19 nt, Artificial Sequence
  Description of Artificial Sequence: Synthetic oligonucleotide
  Sense strand starting at position 53 of SEQ ID NO: 1885767
auacgaaugacgugaagaa

SEQ ID NO: 2366045 - RNA, 19 nt, Artificial Sequence
  Description of Artificial Sequence: Synthetic oligonucleotide
  Antisense strand to SEQ ID NO: 2366044
uucuucacgucauucguau

SEQ ID NO: 2366046 - RNA, 19 nt, Artificial Sequence
  Description of Artificial Sequence: Synthetic oligonucleotide
  Sense strand starting at position 144 of SEQ ID NO: 1885767
uuuggaucucuaugacaau

SEQ ID NO: 2366047 - RNA, 19 nt, Artificial Sequence
  Description of Artificial Sequence: Synthetic oligonucleotide
  Antisense strand to SEQ ID NO: 2366046
auugucauagagauccaaa

SEQ ID NO: 2366048 - RNA, 19 nt, Artificial Sequence
  Description of Artificial Sequence: Synthetic oligonucleotide
  Sense strand starting at position 156 of SEQ ID NO: 1885767
ugacaauucgacuguaaua

SEQ ID NO: 2366049 - RNA, 19 nt, Artificial Sequence
  Description of Artificial Sequence: Synthetic oligonucleotide
  Antisense strand to SEQ ID NO: 2366048
uauuacagucgaauuguca

SEQ ID NO: 2366050 - RNA, 19 nt, Artificial Sequence
  Description of Artificial Sequence: Synthetic oligonucleotide
  Sense strand starting at position 615 of SEQ ID NO: 1885767
cggucagagcaccaaacau

SEQ ID NO: 2366051 - RNA, 19 nt, Artificial Sequence
  Description of Artificial Sequence: Synthetic oligonucleotide
  Antisense strand to SEQ ID NO: 2366050
auguuuggugcucugaccg

SEQ ID NO: 2366052 - RNA, 19 nt, Artificial Sequence
  Description of Artificial Sequence: Synthetic oligonucleotide
  Sense strand starting at position 658 of SEQ ID NO: 1885767
gcaugaaauucucccaaag

SEQ ID NO: 2366053 - RNA, 19 nt, Artificial Sequence
  Description of Artificial Sequence: Synthetic oligonucleotide
  Antisense strand to SEQ ID NO: 2366052
cuuugggagaauuucaugc

SEQ ID NO: 2366054 - RNA, 19 nt, Artificial Sequence
  Description of Artificial Sequence: Synthetic oligonucleotide
  Sense strand starting at position 708 of SEQ ID NO: 1885767
ggucaccguaaguagaaua

SEQ ID NO: 2366055 - RNA, 19 nt, Artificial Sequence
  Description of Artificial Sequence: Synthetic oligonucleotide
  Antisense strand to SEQ ID NO: 2366054
uauucuacuuacggugacc

SEQ ID NO: 2366056 - RNA, 19 nt, Artificial Sequence
  Description of Artificial Sequence: Synthetic oligonucleotide
  Sense strand starting at position 715 of SEQ ID NO: 1885767
guaaguagaauaggugaaa

SEQ ID NO: 2366057 - RNA, 19 nt, Artificial Sequence
  Description of Artificial Sequence: Synthetic oligonucleotide
  Antisense strand to SEQ ID NO: 2366056
uuucaccuauucuacuuac

SEQ ID NO: 2366058 - RNA, 19 nt, Artificial Sequence
  Description of Artificial Sequence: Synthetic oligonucleotide
  Sense strand starting at position 926 of SEQ ID NO: 1885767
aaggaaacagugugaaucu

SEQ ID NO: 2366059 - RNA, 19 nt, Artificial Sequence
  Description of Artificial Sequence: Synthetic oligonucleotide
  Antisense strand to SEQ ID NO: 2366058
agauucacacuguuuccuu

SEQ ID NO: 2366060 - RNA, 19 nt, Artificial Sequence
  Description of Artificial Sequence: Synthetic oligonucleotide
  Sense strand starting at position 999 of SEQ ID NO: 1885767
uugugaaaucuaugaagug

SEQ ID NO: 2366061 - RNA, 19 nt, Artificial Sequence
  Description of Artificial Sequence: Synthetic oligonucleotide
  Antisense strand to SEQ ID NO: 2366060
cacuucauagauuucacaa

SEQ ID NO: 2366062 - RNA, 19 nt, Artificial Sequence
  Description of Artificial Sequence: Synthetic oligonucleotide
  Sense strand starting at position 1029 of SEQ ID NO: 1885767
gagucacccgaggaauguu

SEQ ID NO: 2366063 - RNA, 19 nt, Artificial Sequence
  Description of Artificial Sequence: Synthetic oligonucleotide
  Antisense strand to SEQ ID NO: 2366062
aacauuccucgggugacuc

SEQ ID NO: 2366064 - RNA, 19 nt, Artificial Sequence
  Description of Artificial Sequence: Synthetic oligonucleotide
  Sense strand starting at position 1463 of SEQ ID NO: 1885767
ugugaauacuggccacaag

SEQ ID NO: 2366065 - RNA, 19 nt, Artificial Sequence
  Description of Artificial Sequence: Synthetic oligonucleotide
  Antisense strand to SEQ ID NO: 2366064
cuuguggccaguauucaca

SEQ ID NO: 2366066 - RNA, 19 nt, Artificial Sequence
  Description of Artificial Sequence: Synthetic oligonucleotide
  Sense strand starting at position 1464 of SEQ ID NO: 1885767
gugaauacuggccacaagu

SEQ ID NO: 2366067 - RNA, 19 nt, Artificial Sequence
  Description of Artificial Sequence: Synthetic oligonucleotide
  Antisense strand to SEQ ID NO: 2366066
acuuguggccaguauucac

SEQ ID NO: 2366068 - RNA, 19 nt, Artificial Sequence
  Description of Artificial Sequence: Synthetic oligonucleotide
  Sense strand starting at position 1589 of SEQ ID NO: 1885767
gaaauuugauuaggaggaa

SEQ ID NO: 2366069 - RNA, 19 nt, Artificial Sequence
  Description of Artificial Sequence: Synthetic oligonucleotide
  Antisense strand to SEQ ID NO: 2366068
uuccuccuaaucaaauuuc

SEQ ID NO: 2366070 - RNA, 19 nt, Artificial Sequence
  Description of Artificial Sequence: Synthetic oligonucleotide
  Sense strand starting at position 1671 of SEQ ID NO: 1885767
gaggaucaccuagguaacu

SEQ ID NO: 2366071 - RNA, 19 nt, Artificial Sequence
  Description of Artificial Sequence: Synthetic oligonucleotide
  Antisense strand to SEQ ID NO: 2366070
aguuaccuaggugauccuc

SEQ ID NO: 2366072 - RNA, 19 nt, Artificial Sequence
  Description of Artificial Sequence: Synthetic oligonucleotide
  Sense strand starting at position 2516 of SEQ ID NO: 1885767
acagacuuugcugaaguga

SEQ ID NO: 2366073 - RNA, 19 nt, Artificial Sequence
  Description of Artificial Sequence: Synthetic oligonucleotide
  Antisense strand to SEQ ID NO: 2366072
ucacuucagcaaagucugu

SEQ ID NO: 2366074 - RNA, 19 nt, Artificial Sequence
  Description of Artificial Sequence: Synthetic oligonucleotide
  Sense strand starting at position 2875 of SEQ ID NO: 1885767
agagguggauuugaggaau

SEQ ID NO: 2366075 - RNA, 19 nt, Artificial Sequence
  Description of Artificial Sequence: Synthetic oligonucleotide
  Antisense strand to SEQ ID NO: 2366074
auuccucaaauccaccucu

SEQ ID NO: 2366076 - RNA, 19 nt, Artificial Sequence
  Description of Artificial Sequence: Synthetic oligonucleotide
  Sense strand starting at position 3371 of SEQ ID NO: 1885767
ugugaaaucauauacgagu

SEQ ID NO: 2366077 - RNA, 19 nt, Artificial Sequence
  Description of Artificial Sequence: Synthetic oligonucleotide
  Antisense strand to SEQ ID NO: 2366076
acucguauaugauuucaca

SEQ ID NO: 2366078 - RNA, 19 nt, Artificial Sequence
  Description of Artificial Sequence: Synthetic oligonucleotide
  Sense strand starting at position 3560 of SEQ ID NO: 1885767
gacauuccuguugaguuaa

SEQ ID NO: 2366079 - RNA, 19 nt, Artificial Sequence
  Description of Artificial Sequence: Synthetic oligonucleotide
  Antisense strand to SEQ ID NO: 2366078
uuaacucaacaggaauguc

SEQ ID NO: 2366080 - RNA, 19 nt, Artificial Sequence
  Description of Artificial Sequence: Synthetic oligonucleotide
  Sense strand starting at position 3642 of SEQ ID NO: 1885767
agcuauuucugcuuuguga

SEQ ID NO: 2366081 - RNA, 19 nt, Artificial Sequence
  Description of Artificial Sequence: Synthetic oligonucleotide
  Antisense strand to SEQ ID NO: 2366080
ucacaaagcagaaauagcu

SEQ ID NO: 2366082 - RNA, 19 nt, Artificial Sequence
  Description of Artificial Sequence: Synthetic oligonucleotide
  Sense strand starting at position 3644 of SEQ ID NO: 1885767
cuauuucugcuuugugacu

SEQ ID NO: 2366083 - RNA, 19 nt, Artificial Sequence
  Description of Artificial Sequence: Synthetic oligonucleotide
  Antisense strand to SEQ ID NO: 2366082
agucacaaagcagaaauag

SEQ ID NO: 2366084 - RNA, 19 nt, Artificial Sequence
  Description of Artificial Sequence: Synthetic oligonucleotide
  Sense strand starting at position 3808 of SEQ ID NO: 1885767
aucagaguuacagggucau

SEQ ID NO: 2366085 - RNA, 19 nt, Artificial Sequence
  Description of Artificial Sequence: Synthetic oligonucleotide
  Antisense strand to SEQ ID NO: 2366084
augacccuguaacucugau

SEQ ID NO: 2366086 - RNA, 19 nt, Artificial Sequence
  Description of Artificial Sequence: Synthetic oligonucleotide
  Sense strand starting at position 895 of SEQ ID NO: 1885768
aaggucguugggcaagaua

SEQ ID NO: 2366087 - RNA, 19 nt, Artificial Sequence
  Description of Artificial Sequence: Synthetic oligonucleotide
  Antisense strand to SEQ ID NO: 2366086
uaucuugcccaacgaccuu

SEQ ID NO: 2366088 - RNA, 19 nt, Artificial Sequence
  Description of Artificial Sequence: Synthetic oligonucleotide
  Sense strand starting at position 915 of SEQ ID NO: 1885768
ggugguguuccuagagguu

SEQ ID NO: 2366089 - RNA, 19 nt, Artificial Sequence
  Description of Artificial Sequence: Synthetic oligonucleotide
  Antisense strand to SEQ ID NO: 2366088
aaccucuaggaacaccacc

SEQ ID NO: 2366090 - RNA, 19 nt, Artificial Sequence
  Description of Artificial Sequence: Synthetic oligonucleotide
  Sense strand starting at position 1067 of SEQ ID NO: 1885768
cgccuaguuacguuacuau

SEQ ID NO: 2366091 - RNA, 19 nt, Artificial Sequence
  Description of Artificial Sequence: Synthetic oligonucleotide
  Antisense strand to SEQ ID NO: 2366090
auaguaacguaacuaggcg

SEQ ID NO: 2366092 - RNA, 19 nt, Artificial Sequence
  Description of Artificial Sequence: Synthetic oligonucleotide
  Sense strand starting at position 1104 of SEQ ID NO: 1885768
cucguaucugcguccaaau

SEQ ID NO: 2366093 - RNA, 19 nt, Artificial Sequence
  Description of Artificial Sequence: Synthetic oligonucleotide
  Antisense strand to SEQ ID NO: 2366092
auuuggacgcagauacgag

SEQ ID NO: 2366094 - RNA, 19 nt, Artificial Sequence
  Description of Artificial Sequence: Synthetic oligonucleotide
  Sense strand starting at position 1320 of SEQ ID NO: 1885768
ccuggagcucuugaaucua

SEQ ID NO: 2366095 - RNA, 19 nt, Artificial Sequence
  Description of Artificial Sequence: Synthetic oligonucleotide
  Antisense strand to SEQ ID NO: 2366094
uagauucaagagcuccagg

SEQ ID NO: 2366096 - RNA, 19 nt, Artificial Sequence
  Description of Artificial Sequence: Synthetic oligonucleotide
  Sense strand starting at position 1626 of SEQ ID NO: 1885768
gagacaagaccguaagucu

SEQ ID NO: 2366097 - RNA, 19 nt, Artificial Sequence
  Description of Artificial Sequence: Synthetic oligonucleotide
  Antisense strand to SEQ ID NO: 2366096
agacuuacggucuugucuc

SEQ ID NO: 2366098 - RNA, 19 nt, Artificial Sequence
  Description of Artificial Sequence: Synthetic oligonucleotide
  Sense strand starting at position 1997 of SEQ ID NO: 1885768
gcacguugagaagaaguca

SEQ ID NO: 2366099 - RNA, 19 nt, Artificial Sequence
  Description of Artificial Sequence: Synthetic oligonucleotide
  Antisense strand to SEQ ID NO: 2366098
ugacuucuucucaacgugc

SEQ ID NO: 2366100 - RNA, 19 nt, Artificial Sequence
  Description of Artificial Sequence: Synthetic oligonucleotide
  Sense strand starting at position 2470 of SEQ ID NO: 1885768
acuuccucugaugaguaau

SEQ ID NO: 2366101 - RNA, 19 nt, Artificial Sequence
  Description of Artificial Sequence: Synthetic oligonucleotide
  Antisense strand to SEQ ID NO: 2366100
auuacucaucagaggaagu

SEQ ID NO: 2366102 - RNA, 19 nt, Artificial Sequence
  Description of Artificial Sequence: Synthetic oligonucleotide
  Sense strand starting at position 2612 of SEQ ID NO: 1885768
cgaauugucauagagaucc

SEQ ID NO: 2366103 - RNA, 19 nt, Artificial Sequence
  Description of Artificial Sequence: Synthetic oligonucleotide
  Antisense strand to SEQ ID NO: 2366102
ggaucucuaugacaauucg

SEQ ID NO: 2366104 - RNA, 19 nt, Artificial Sequence
  Description of Artificial Sequence: Synthetic oligonucleotide
  Sense strand starting at position 2644 of SEQ ID NO: 1885768
gguuguauucgguugcuac

SEQ ID NO: 2366105 - RNA, 19 nt, Artificial Sequence
  Description of Artificial Sequence: Synthetic oligonucleotide
  Antisense strand to SEQ ID NO: 2366104
guagcaaccgaauacaacc

SEQ ID NO: 2366106 - RNA, 19 nt, Artificial Sequence
  Description of Artificial Sequence: Synthetic oligonucleotide
  Sense strand starting at position 2751 of SEQ ID NO: 1885768
gucgcagaucuugggauuu

SEQ ID NO: 2366107 - RNA, 19 nt, Artificial Sequence
  Description of Artificial Sequence: Synthetic oligonucleotide
  Antisense strand to SEQ ID NO: 2366106
aaaucccaagaucugcgac

SEQ ID NO: 2366108 - RNA, 19 nt, Artificial Sequence
  Description of Artificial Sequence: Synthetic oligonucleotide
  Sense strand starting at position 3174 of SEQ ID NO: 1885768
gcaauuugauguuucgaua

SEQ ID NO: 2366109 - RNA, 19 nt, Artificial Sequence
  Description of Artificial Sequence: Synthetic oligonucleotide
  Antisense strand to SEQ ID NO: 2366108
uaucgaaacaucaaauugc

SEQ ID NO: 2366110 - RNA, 19 nt, Artificial Sequence
  Description of Artificial Sequence: Synthetic oligonucleotide
  Sense strand starting at position 3196 of SEQ ID NO: 1885768
aucuauguuguauaacgau

SEQ ID NO: 2366111 - RNA, 19 nt, Artificial Sequence
  Description of Artificial Sequence: Synthetic oligonucleotide
  Antisense strand to SEQ ID NO: 2366110
aucguuauacaacauagau

SEQ ID NO: 2366112 - RNA, 19 nt, Artificial Sequence
  Description of Artificial Sequence: Synthetic oligonucleotide
  Sense strand starting at position 3340 of SEQ ID NO: 1885768
gcaauagagcaucagaauu

SEQ ID NO: 2366113 - RNA, 19 nt, Artificial Sequence
  Description of Artificial Sequence: Synthetic oligonucleotide
  Antisense strand to SEQ ID NO: 2366112
aauucugaugcucuauugc

SEQ ID NO: 2366114 - RNA, 19 nt, Artificial Sequence
  Description of Artificial Sequence: Synthetic oligonucleotide
  Sense strand starting at position 3440 of SEQ ID NO: 1885768
uuacuugugaguuauaagg

SEQ ID NO: 2366115 - RNA, 19 nt, Artificial Sequence
  Description of Artificial Sequence: Synthetic oligonucleotide
  Antisense strand to SEQ ID NO: 2366114
ccuuauaacucacaaguaa

SEQ ID NO: 2366116 - RNA, 19 nt, Artificial Sequence
  Description of Artificial Sequence: Synthetic oligonucleotide
  Sense strand starting at position 3487 of SEQ ID NO: 1885768
uucuguaucccauggaaga

SEQ ID NO: 2366117 - RNA, 19 nt, Artificial Sequence
  Description of Artificial Sequence: Synthetic oligonucleotide
  Antisense strand to SEQ ID NO: 2366116
ucuuccaugggauacagaa

SEQ ID NO: 2366118 - RNA, 19 nt, Artificial Sequence
  Description of Artificial Sequence: Synthetic oligonucleotide
  Sense strand starting at position 3488 of SEQ ID NO: 1885768
ucuguaucccauggaagag

SEQ ID NO: 2366119 - RNA, 19 nt, Artificial Sequence
  Description of Artificial Sequence: Synthetic oligonucleotide
  Antisense strand to SEQ ID NO: 2366118
cucuuccaugggauacaga

SEQ ID NO: 2366120 - RNA, 19 nt, Artificial Sequence
  Description of Artificial Sequence: Synthetic oligonucleotide
  Sense strand starting at position 3551 of SEQ ID NO: 1885768
guugaugucauuugagucu

SEQ ID NO: 2366121 - RNA, 19 nt, Artificial Sequence
  Description of Artificial Sequence: Synthetic oligonucleotide
  Antisense strand to SEQ ID NO: 2366120
agacucaaaugacaucaac

SEQ ID NO: 2366122 - RNA, 19 nt, Artificial Sequence
  Description of Artificial Sequence: Synthetic oligonucleotide
  Sense strand starting at position 3811 of SEQ ID NO: 1885768
guguuaguacccgugguua

SEQ ID NO: 2366123 - RNA, 19 nt, Artificial Sequence
  Description of Artificial Sequence: Synthetic oligonucleotide
  Antisense strand to SEQ ID NO: 2366122
uaaccacggguacuaacac

SEQ ID NO: 2366124 - RNA, 19 nt, Artificial Sequence
  Description of Artificial Sequence: Synthetic oligonucleotide
  Sense strand starting at position 53 of SEQ ID NO: 1885769
auacgaaugacgugaagaa

SEQ ID NO: 2366125 - RNA, 19 nt, Artificial Sequence
  Description of Artificial Sequence: Synthetic oligonucleotide
  Antisense strand to SEQ ID NO: 2366124
uucuucacgucauucguau

SEQ ID NO: 2366126 - RNA, 19 nt, Artificial Sequence
  Description of Artificial Sequence: Synthetic oligonucleotide
  Sense strand starting at position 144 of SEQ ID NO: 1885769
uuuggaucucuaugacaau

SEQ ID NO: 2366127 - RNA, 19 nt, Artificial Sequence
  Description of Artificial Sequence: Synthetic oligonucleotide
  Antisense strand to SEQ ID NO: 2366126
auugucauagagauccaaa

SEQ ID NO: 2366128 - RNA, 19 nt, Artificial Sequence
  Description of Artificial Sequence: Synthetic oligonucleotide
  Sense strand starting at position 156 of SEQ ID NO: 1885769
ugacaauucgacuguaaua

SEQ ID NO: 2366129 - RNA, 19 nt, Artificial Sequence
  Description of Artificial Sequence: Synthetic oligonucleotide
  Antisense strand to SEQ ID NO: 2366128
uauuacagucgaauuguca

SEQ ID NO: 2366130 - RNA, 19 nt, Artificial Sequence
  Description of Artificial Sequence: Synthetic oligonucleotide
  Sense strand starting at position 615 of SEQ ID NO: 1885769
cggucagagcaccaaacau

SEQ ID NO: 2366131 - RNA, 19 nt, Artificial Sequence
  Description of Artificial Sequence: Synthetic oligonucleotide
  Antisense strand to SEQ ID NO: 2366130
auguuuggugcucugaccg

SEQ ID NO: 2366132 - RNA, 19 nt, Artificial Sequence
  Description of Artificial Sequence: Synthetic oligonucleotide
  Sense strand starting at position 658 of SEQ ID NO: 1885769
gcaugaaauucucccaaag

SEQ ID NO: 2366133 - RNA, 19 nt, Artificial Sequence
  Description of Artificial Sequence: Synthetic oligonucleotide
  Antisense strand to SEQ ID NO: 2366132
cuuugggagaauuucaugc

SEQ ID NO: 2366134 - RNA, 19 nt, Artificial Sequence
  Description of Artificial Sequence: Synthetic oligonucleotide
  Sense strand starting at position 708 of SEQ ID NO: 1885769
ggucaccguaaguagaaua

SEQ ID NO: 2366135 - RNA, 19 nt, Artificial Sequence
  Description of Artificial Sequence: Synthetic oligonucleotide
  Antisense strand to SEQ ID NO: 2366134
uauucuacuuacggugacc

SEQ ID NO: 2366136 - RNA, 19 nt, Artificial Sequence
  Description of Artificial Sequence: Synthetic oligonucleotide
  Sense strand starting at position 715 of SEQ ID NO: 1885769
guaaguagaauaggugaaa

SEQ ID NO: 2366137 - RNA, 19 nt, Artificial Sequence
  Description of Artificial Sequence: Synthetic oligonucleotide
  Antisense strand to SEQ ID NO: 2366136
uuucaccuauucuacuuac

SEQ ID NO: 2366138 - RNA, 19 nt, Artificial Sequence
  Description of Artificial Sequence: Synthetic oligonucleotide
  Sense strand starting at position 926 of SEQ ID NO: 1885769
aaggaaacagugugaaucu

SEQ ID NO: 2366139 - RNA, 19 nt, Artificial Sequence
  Description of Artificial Sequence: Synthetic oligonucleotide
  Antisense strand to SEQ ID NO: 2366138
agauucacacuguuuccuu

SEQ ID NO: 2366140 - RNA, 19 nt, Artificial Sequence
  Description of Artificial Sequence: Synthetic oligonucleotide
  Sense strand starting at position 999 of SEQ ID NO: 1885769
uugugaaaucuaugaagug

SEQ ID NO: 2366141 - RNA, 19 nt, Artificial Sequence
  Description of Artificial Sequence: Synthetic oligonucleotide
  Antisense strand to SEQ ID NO: 2366140
cacuucauagauuucacaa

SEQ ID NO: 2366142 - RNA, 19 nt, Artificial Sequence
  Description of Artificial Sequence: Synthetic oligonucleotide
  Sense strand starting at position 1029 of SEQ ID NO: 1885769
gagucacccgaggaauguu

SEQ ID NO: 2366143 - RNA, 19 nt, Artificial Sequence
  Description of Artificial Sequence: Synthetic oligonucleotide
  Antisense strand to SEQ ID NO: 2366142
aacauuccucgggugacuc

SEQ ID NO: 2366144 - RNA, 19 nt, Artificial Sequence
  Description of Artificial Sequence: Synthetic oligonucleotide
  Sense strand starting at position 1463 of SEQ ID NO: 1885769
ugugaauacuggccacaag

SEQ ID NO: 2366145 - RNA, 19 nt, Artificial Sequence
  Description of Artificial Sequence: Synthetic oligonucleotide
  Antisense strand to SEQ ID NO: 2366144
cuuguggccaguauucaca

SEQ ID NO: 2366146 - RNA, 19 nt, Artificial Sequence
  Description of Artificial Sequence: Synthetic oligonucleotide
  Sense strand starting at position 1464 of SEQ ID NO: 1885769
gugaauacuggccacaagu

SEQ ID NO: 2366147 - RNA, 19 nt, Artificial Sequence
  Description of Artificial Sequence: Synthetic oligonucleotide
  Antisense strand to SEQ ID NO: 2366146
acuuguggccaguauucac

SEQ ID NO: 2366148 - RNA, 19 nt, Artificial Sequence
  Description of Artificial Sequence: Synthetic oligonucleotide
  Sense strand starting at position 1589 of SEQ ID NO: 1885769
gaaauuugauuaggaggaa

SEQ ID NO: 2366149 - RNA, 19 nt, Artificial Sequence
  Description of Artificial Sequence: Synthetic oligonucleotide
  Antisense strand to SEQ ID NO: 2366148
uuccuccuaaucaaauuuc

SEQ ID NO: 2366150 - RNA, 19 nt, Artificial Sequence
  Description of Artificial Sequence: Synthetic oligonucleotide
  Sense strand starting at position 1671 of SEQ ID NO: 1885769
gaggaucaccuagguaacu

SEQ ID NO: 2366151 - RNA, 19 nt, Artificial Sequence
  Description of Artificial Sequence: Synthetic oligonucleotide
  Antisense strand to SEQ ID NO: 2366150
aguuaccuaggugauccuc

SEQ ID NO: 2366152 - RNA, 19 nt, Artificial Sequence
  Description of Artificial Sequence: Synthetic oligonucleotide
  Sense strand starting at position 2516 of SEQ ID NO: 1885769
acagacuuugcugaaguga

SEQ ID NO: 2366153 - RNA, 19 nt, Artificial Sequence
  Description of Artificial Sequence: Synthetic oligonucleotide
  Antisense strand to SEQ ID NO: 2366152
ucacuucagcaaagucugu

SEQ ID NO: 2366154 - RNA, 19 nt, Artificial Sequence
  Description of Artificial Sequence: Synthetic oligonucleotide
  Sense strand starting at position 2875 of SEQ ID NO: 1885769
agagguggauuugaggaau

SEQ ID NO: 2366155 - RNA, 19 nt, Artificial Sequence
  Description of Artificial Sequence: Synthetic oligonucleotide
  Antisense strand to SEQ ID NO: 2366154
auuccucaaauccaccucu

SEQ ID NO: 2366156 - RNA, 19 nt, Artificial Sequence
  Description of Artificial Sequence: Synthetic oligonucleotide
  Sense strand starting at position 3371 of SEQ ID NO: 1885769
ugugaaaucauauacgagu

SEQ ID NO: 2366157 - RNA, 19 nt, Artificial Sequence
  Description of Artificial Sequence: Synthetic oligonucleotide
  Antisense strand to SEQ ID NO: 2366156
acucguauaugauuucaca

SEQ ID NO: 2366158 - RNA, 19 nt, Artificial Sequence
  Description of Artificial Sequence: Synthetic oligonucleotide
  Sense strand starting at position 3560 of SEQ ID NO: 1885769
gacauuccuguugaguuaa

SEQ ID NO: 2366159 - RNA, 19 nt, Artificial Sequence
  Description of Artificial Sequence: Synthetic oligonucleotide
  Antisense strand to SEQ ID NO: 2366158
uuaacucaacaggaauguc

SEQ ID NO: 2366160 - RNA, 19 nt, Artificial Sequence
  Description of Artificial Sequence: Synthetic oligonucleotide
  Sense strand starting at position 3642 of SEQ ID NO: 1885769
agcuauuucugcuuuguga

SEQ ID NO: 2366161 - RNA, 19 nt, Artificial Sequence
  Description of Artificial Sequence: Synthetic oligonucleotide
  Antisense strand to SEQ ID NO: 2366160
ucacaaagcagaaauagcu

SEQ ID NO: 2366162 - RNA, 19 nt, Artificial Sequence
  Description of Artificial Sequence: Synthetic oligonucleotide
  Sense strand starting at position 3644 of SEQ ID NO: 1885769
cuauuucugcuuugugacu

SEQ ID NO: 2366163 - RNA, 19 nt, Artificial Sequence
  Description of Artificial Sequence: Synthetic oligonucleotide
  Antisense strand to SEQ ID NO: 2366162
agucacaaagcagaaauag

SEQ ID NO: 2366164 - RNA, 19 nt, Artificial Sequence
  Description of Artificial Sequence: Synthetic oligonucleotide
  Sense strand starting at position 3808 of SEQ ID NO: 1885769
aucagaguuacagggucau

SEQ ID NO: 2366165 - RNA, 19 nt, Artificial Sequence
  Description of Artificial Sequence: Synthetic oligonucleotide
  Antisense strand to SEQ ID NO: 2366164
augacccuguaacucugau

SEQ ID NO: 2366166 - RNA, 19 nt, Artificial Sequence
  Description of Artificial Sequence: Synthetic oligonucleotide
  Sense strand starting at position 895 of SEQ ID NO: 1885770
aaggucguugggcaagaua

SEQ ID NO: 2366167 - RNA, 19 nt, Artificial Sequence
  Description of Artificial Sequence: Synthetic oligonucleotide
  Antisense strand to SEQ ID NO: 2366166
uaucuugcccaacgaccuu

SEQ ID NO: 2366168 - RNA, 19 nt, Artificial Sequence
  Description of Artificial Sequence: Synthetic oligonucleotide
  Sense strand starting at position 915 of SEQ ID NO: 1885770
ggugguguuccuagagguu

SEQ ID NO: 2366169 - RNA, 19 nt, Artificial Sequence
  Description of Artificial Sequence: Synthetic oligonucleotide
  Antisense strand to SEQ ID NO: 2366168
aaccucuaggaacaccacc

SEQ ID NO: 2366170 - RNA, 19 nt, Artificial Sequence
  Description of Artificial Sequence: Synthetic oligonucleotide
  Sense strand starting at position 1067 of SEQ ID NO: 1885770
cgccuaguuacguuacuau

SEQ ID NO: 2366171 - RNA, 19 nt, Artificial Sequence
  Description of Artificial Sequence: Synthetic oligonucleotide
  Antisense strand to SEQ ID NO: 2366170
auaguaacguaacuaggcg

SEQ ID NO: 2366172 - RNA, 19 nt, Artificial Sequence
  Description of Artificial Sequence: Synthetic oligonucleotide
  Sense strand starting at position 1104 of SEQ ID NO: 1885770
cucguaucugcguccaaau

SEQ ID NO: 2366173 - RNA, 19 nt, Artificial Sequence
  Description of Artificial Sequence: Synthetic oligonucleotide
  Antisense strand to SEQ ID NO: 2366172
auuuggacgcagauacgag

SEQ ID NO: 2366174 - RNA, 19 nt, Artificial Sequence
  Description of Artificial Sequence: Synthetic oligonucleotide
  Sense strand starting at position 1320 of SEQ ID NO: 1885770
ccuggagcucuugaaucua

SEQ ID NO: 2366175 - RNA, 19 nt, Artificial Sequence
  Description of Artificial Sequence: Synthetic oligonucleotide
  Antisense strand to SEQ ID NO: 2366174
uagauucaagagcuccagg

SEQ ID NO: 2366176 - RNA, 19 nt, Artificial Sequence
  Description of Artificial Sequence: Synthetic oligonucleotide
  Sense strand starting at position 1626 of SEQ ID NO: 1885770
gagacaagaccguaagucu

SEQ ID NO: 2366177 - RNA, 19 nt, Artificial Sequence
  Description of Artificial Sequence: Synthetic oligonucleotide
  Antisense strand to SEQ ID NO: 2366176
agacuuacggucuugucuc

SEQ ID NO: 2366178 - RNA, 19 nt, Artificial Sequence
  Description of Artificial Sequence: Synthetic oligonucleotide
  Sense strand starting at position 1997 of SEQ ID NO: 1885770
gcacguugagaagaaguca

SEQ ID NO: 2366179 - RNA, 19 nt, Artificial Sequence
  Description of Artificial Sequence: Synthetic oligonucleotide
  Antisense strand to SEQ ID NO: 2366178
ugacuucuucucaacgugc

SEQ ID NO: 2366180 - RNA, 19 nt, Artificial Sequence
  Description of Artificial Sequence: Synthetic oligonucleotide
  Sense strand starting at position 2470 of SEQ ID NO: 1885770
acuuccucugaugaguaau

SEQ ID NO: 2366181 - RNA, 19 nt, Artificial Sequence
  Description of Artificial Sequence: Synthetic oligonucleotide
  Antisense strand to SEQ ID NO: 2366180
auuacucaucagaggaagu

SEQ ID NO: 2366182 - RNA, 19 nt, Artificial Sequence
  Description of Artificial Sequence: Synthetic oligonucleotide
  Sense strand starting at position 2612 of SEQ ID NO: 1885770
cgaauugucauagagaucc

SEQ ID NO: 2366183 - RNA, 19 nt, Artificial Sequence
  Description of Artificial Sequence: Synthetic oligonucleotide
  Antisense strand to SEQ ID NO: 2366182
ggaucucuaugacaauucg

SEQ ID NO: 2366184 - RNA, 19 nt, Artificial Sequence
  Description of Artificial Sequence: Synthetic oligonucleotide
  Sense strand starting at position 2644 of SEQ ID NO: 1885770
gguuguauucgguugcuac

SEQ ID NO: 2366185 - RNA, 19 nt, Artificial Sequence
  Description of Artificial Sequence: Synthetic oligonucleotide
  Antisense strand to SEQ ID NO: 2366184
guagcaaccgaauacaacc

SEQ ID NO: 2366186 - RNA, 19 nt, Artificial Sequence
  Description of Artificial Sequence: Synthetic oligonucleotide
  Sense strand starting at position 2751 of SEQ ID NO: 1885770
gucgcagaucuugggauuu

SEQ ID NO: 2366187 - RNA, 19 nt, Artificial Sequence
  Description of Artificial Sequence: Synthetic oligonucleotide
  Antisense strand to SEQ ID NO: 2366186
aaaucccaagaucugcgac

SEQ ID NO: 2366188 - RNA, 19 nt, Artificial Sequence
  Description of Artificial Sequence: Synthetic oligonucleotide
  Sense strand starting at position 3174 of SEQ ID NO: 1885770
gcaauuugauguuucgaua

SEQ ID NO: 2366189 - RNA, 19 nt, Artificial Sequence
  Description of Artificial Sequence: Synthetic oligonucleotide
  Antisense strand to SEQ ID NO: 2366188
uaucgaaacaucaaauugc

SEQ ID NO: 2366190 - RNA, 19 nt, Artificial Sequence
  Description of Artificial Sequence: Synthetic oligonucleotide
  Sense strand starting at position 3196 of SEQ ID NO: 1885770
aucuauguuguauaacgau

SEQ ID NO: 2366191 - RNA, 19 nt, Artificial Sequence
  Description of Artificial Sequence: Synthetic oligonucleotide
  Antisense strand to SEQ ID NO: 2366190
aucguuauacaacauagau

SEQ ID NO: 2366192 - RNA, 19 nt, Artificial Sequence
  Description of Artificial Sequence: Synthetic oligonucleotide
  Sense strand starting at position 3340 of SEQ ID NO: 1885770
gcaauagagcaucagaauu

SEQ ID NO: 2366193 - RNA, 19 nt, Artificial Sequence
  Description of Artificial Sequence: Synthetic oligonucleotide
  Antisense strand to SEQ ID NO: 2366192
aauucugaugcucuauugc

SEQ ID NO: 2366194 - RNA, 19 nt, Artificial Sequence
  Description of Artificial Sequence: Synthetic oligonucleotide
  Sense strand starting at position 3440 of SEQ ID NO: 1885770
uuacuugugaguuauaagg

SEQ ID NO: 2366195 - RNA, 19 nt, Artificial Sequence
  Description of Artificial Sequence: Synthetic oligonucleotide
  Antisense strand to SEQ ID NO: 2366194
ccuuauaacucacaaguaa

SEQ ID NO: 2366196 - RNA, 19 nt, Artificial Sequence
  Description of Artificial Sequence: Synthetic oligonucleotide
  Sense strand starting at position 3487 of SEQ ID NO: 1885770
uucuguaucccauggaaga

SEQ ID NO: 2366197 - RNA, 19 nt, Artificial Sequence
  Description of Artificial Sequence: Synthetic oligonucleotide
  Antisense strand to SEQ ID NO: 2366196
ucuuccaugggauacagaa

SEQ ID NO: 2366198 - RNA, 19 nt, Artificial Sequence
  Description of Artificial Sequence: Synthetic oligonucleotide
  Sense strand starting at position 3488 of SEQ ID NO: 1885770
ucuguaucccauggaagag

SEQ ID NO: 2366199 - RNA, 19 nt, Artificial Sequence
  Description of Artificial Sequence: Synthetic oligonucleotide
  Antisense strand to SEQ ID NO: 2366198
cucuuccaugggauacaga

SEQ ID NO: 2366200 - RNA, 19 nt, Artificial Sequence
  Description of Artificial Sequence: Synthetic oligonucleotide
  Sense strand starting at position 3551 of SEQ ID NO: 1885770
guugaugucauuugagucu

SEQ ID NO: 2366201 - RNA, 19 nt, Artificial Sequence
  Description of Artificial Sequence: Synthetic oligonucleotide
  Antisense strand to SEQ ID NO: 2366200
agacucaaaugacaucaac

SEQ ID NO: 2366202 - RNA, 19 nt, Artificial Sequence
  Description of Artificial Sequence: Synthetic oligonucleotide
  Sense strand starting at position 3811 of SEQ ID NO: 1885770
guguuaguacccgugguua

SEQ ID NO: 2366203 - RNA, 19 nt, Artificial Sequence
  Description of Artificial Sequence: Synthetic oligonucleotide
  Antisense strand to SEQ ID NO: 2366202
uaaccacggguacuaacac

SEQ ID NO: 2366204 - RNA, 19 nt, Artificial Sequence
  Description of Artificial Sequence: Synthetic oligonucleotide
  Sense strand starting at position 53 of SEQ ID NO: 1885771
auacgaaugacgugaagaa

SEQ ID NO: 2366205 - RNA, 19 nt, Artificial Sequence
  Description of Artificial Sequence: Synthetic oligonucleotide
  Antisense strand to SEQ ID NO: 2366204
uucuucacgucauucguau

SEQ ID NO: 2366206 - RNA, 19 nt, Artificial Sequence
  Description of Artificial Sequence: Synthetic oligonucleotide
  Sense strand starting at position 144 of SEQ ID NO: 1885771
uuuggaucucuaugacaau

SEQ ID NO: 2366207 - RNA, 19 nt, Artificial Sequence
  Description of Artificial Sequence: Synthetic oligonucleotide
  Antisense strand to SEQ ID NO: 2366206
auugucauagagauccaaa

SEQ ID NO: 2366208 - RNA, 19 nt, Artificial Sequence
  Description of Artificial Sequence: Synthetic oligonucleotide
  Sense strand starting at position 156 of SEQ ID NO: 1885771
ugacaauucgacuguaaua

SEQ ID NO: 2366209 - RNA, 19 nt, Artificial Sequence
  Description of Artificial Sequence: Synthetic oligonucleotide
  Antisense strand to SEQ ID NO: 2366208
uauuacagucgaauuguca

SEQ ID NO: 2366210 - RNA, 19 nt, Artificial Sequence
  Description of Artificial Sequence: Synthetic oligonucleotide
  Sense strand starting at position 615 of SEQ ID NO: 1885771
cggucagagcaccaaacau

SEQ ID NO: 2366211 - RNA, 19 nt, Artificial Sequence
  Description of Artificial Sequence: Synthetic oligonucleotide
  Antisense strand to SEQ ID NO: 2366210
auguuuggugcucugaccg

SEQ ID NO: 2366212 - RNA, 19 nt, Artificial Sequence
  Description of Artificial Sequence: Synthetic oligonucleotide
  Sense strand starting at position 658 of SEQ ID NO: 1885771
gcaugaaauucucccaaag

SEQ ID NO: 2366213 - RNA, 19 nt, Artificial Sequence
  Description of Artificial Sequence: Synthetic oligonucleotide
  Antisense strand to SEQ ID NO: 2366212
cuuugggagaauuucaugc

SEQ ID NO: 2366214 - RNA, 19 nt, Artificial Sequence
  Description of Artificial Sequence: Synthetic oligonucleotide
  Sense strand starting at position 708 of SEQ ID NO: 1885771
ggucaccguaaguagaaua

SEQ ID NO: 2366215 - RNA, 19 nt, Artificial Sequence
  Description of Artificial Sequence: Synthetic oligonucleotide
  Antisense strand to SEQ ID NO: 2366214
uauucuacuuacggugacc

SEQ ID NO: 2366216 - RNA, 19 nt, Artificial Sequence
  Description of Artificial Sequence: Synthetic oligonucleotide
  Sense strand starting at position 715 of SEQ ID NO: 1885771
guaaguagaauaggugaaa

SEQ ID NO: 2366217 - RNA, 19 nt, Artificial Sequence
  Description of Artificial Sequence: Synthetic oligonucleotide
  Antisense strand to SEQ ID NO: 2366216
uuucaccuauucuacuuac

SEQ ID NO: 2366218 - RNA, 19 nt, Artificial Sequence
  Description of Artificial Sequence: Synthetic oligonucleotide
  Sense strand starting at position 926 of SEQ ID NO: 1885771
aaggaaacagugugaaucu

SEQ ID NO: 2366219 - RNA, 19 nt, Artificial Sequence
  Description of Artificial Sequence: Synthetic oligonucleotide
  Antisense strand to SEQ ID NO: 2366218
agauucacacuguuuccuu

SEQ ID NO: 2366220 - RNA, 19 nt, Artificial Sequence
  Description of Artificial Sequence: Synthetic oligonucleotide
  Sense strand starting at position 999 of SEQ ID NO: 1885771
uugugaaaucuaugaagug

SEQ ID NO: 2366221 - RNA, 19 nt, Artificial Sequence
  Description of Artificial Sequence: Synthetic oligonucleotide
  Antisense strand to SEQ ID NO: 2366220
cacuucauagauuucacaa

SEQ ID NO: 2366222 - RNA, 19 nt, Artificial Sequence
  Description of Artificial Sequence: Synthetic oligonucleotide
  Sense strand starting at position 1029 of SEQ ID NO: 1885771
gagucacccgaggaauguu

SEQ ID NO: 2366223 - RNA, 19 nt, Artificial Sequence
  Description of Artificial Sequence: Synthetic oligonucleotide
  Antisense strand to SEQ ID NO: 2366222
aacauuccucgggugacuc

SEQ ID NO: 2366224 - RNA, 19 nt, Artificial Sequence
  Description of Artificial Sequence: Synthetic oligonucleotide
  Sense strand starting at position 1463 of SEQ ID NO: 1885771
ugugaauacuggccacaag

SEQ ID NO: 2366225 - RNA, 19 nt, Artificial Sequence
  Description of Artificial Sequence: Synthetic oligonucleotide
  Antisense strand to SEQ ID NO: 2366224
cuuguggccaguauucaca

SEQ ID NO: 2366226 - RNA, 19 nt, Artificial Sequence
  Description of Artificial Sequence: Synthetic oligonucleotide
  Sense strand starting at position 1464 of SEQ ID NO: 1885771
gugaauacuggccacaagu

SEQ ID NO: 2366227 - RNA, 19 nt, Artificial Sequence
  Description of Artificial Sequence: Synthetic oligonucleotide
  Antisense strand to SEQ ID NO: 2366226
acuuguggccaguauucac

SEQ ID NO: 2366228 - RNA, 19 nt, Artificial Sequence
  Description of Artificial Sequence: Synthetic oligonucleotide
  Sense strand starting at position 1589 of SEQ ID NO: 1885771
gaaauuugauuaggaggaa

SEQ ID NO: 2366229 - RNA, 19 nt, Artificial Sequence
  Description of Artificial Sequence: Synthetic oligonucleotide
  Antisense strand to SEQ ID NO: 2366228
uuccuccuaaucaaauuuc

SEQ ID NO: 2366230 - RNA, 19 nt, Artificial Sequence
  Description of Artificial Sequence: Synthetic oligonucleotide
  Sense strand starting at position 1671 of SEQ ID NO: 1885771
gaggaucaccuagguaacu

SEQ ID NO: 2366231 - RNA, 19 nt, Artificial Sequence
  Description of Artificial Sequence: Synthetic oligonucleotide
  Antisense strand to SEQ ID NO: 2366230
aguuaccuaggugauccuc

SEQ ID NO: 2366232 - RNA, 19 nt, Artificial Sequence
  Description of Artificial Sequence: Synthetic oligonucleotide
  Sense strand starting at position 2516 of SEQ ID NO: 1885771
acagacuuugcugaaguga

SEQ ID NO: 2366233 - RNA, 19 nt, Artificial Sequence
  Description of Artificial Sequence: Synthetic oligonucleotide
  Antisense strand to SEQ ID NO: 2366232
ucacuucagcaaagucugu

SEQ ID NO: 2366234 - RNA, 19 nt, Artificial Sequence
  Description of Artificial Sequence: Synthetic oligonucleotide
  Sense strand starting at position 2875 of SEQ ID NO: 1885771
agagguggauuugaggaau

SEQ ID NO: 2366235 - RNA, 19 nt, Artificial Sequence
  Description of Artificial Sequence: Synthetic oligonucleotide
  Antisense strand to SEQ ID NO: 2366234
auuccucaaauccaccucu

SEQ ID NO: 2366236 - RNA, 19 nt, Artificial Sequence
  Description of Artificial Sequence: Synthetic oligonucleotide
  Sense strand starting at position 3371 of SEQ ID NO: 1885771
ugugaaaucauauacgagu

SEQ ID NO: 2366237 - RNA, 19 nt, Artificial Sequence
  Description of Artificial Sequence: Synthetic oligonucleotide
  Antisense strand to SEQ ID NO: 2366236
acucguauaugauuucaca

SEQ ID NO: 2366238 - RNA, 19 nt, Artificial Sequence
  Description of Artificial Sequence: Synthetic oligonucleotide
  Sense strand starting at position 3560 of SEQ ID NO: 1885771
gacauuccuguugaguuaa

SEQ ID NO: 2366239 - RNA, 19 nt, Artificial Sequence
  Description of Artificial Sequence: Synthetic oligonucleotide
  Antisense strand to SEQ ID NO: 2366238
uuaacucaacaggaauguc

SEQ ID NO: 2366240 - RNA, 19 nt, Artificial Sequence
  Description of Artificial Sequence: Synthetic oligonucleotide
  Sense strand starting at position 3642 of SEQ ID NO: 1885771
agcuauuucugcuuuguga

SEQ ID NO: 2366241 - RNA, 19 nt, Artificial Sequence
  Description of Artificial Sequence: Synthetic oligonucleotide
  Antisense strand to SEQ ID NO: 2366240
ucacaaagcagaaauagcu

SEQ ID NO: 2366242 - RNA, 19 nt, Artificial Sequence
  Description of Artificial Sequence: Synthetic oligonucleotide
  Sense strand starting at position 3644 of SEQ ID NO: 1885771
cuauuucugcuuugugacu

SEQ ID NO: 2366243 - RNA, 19 nt, Artificial Sequence
  Description of Artificial Sequence: Synthetic oligonucleotide
  Antisense strand to SEQ ID NO: 2366242
agucacaaagcagaaauag

SEQ ID NO: 2366244 - RNA, 19 nt, Artificial Sequence
  Description of Artificial Sequence: Synthetic oligonucleotide
  Sense strand starting at position 3808 of SEQ ID NO: 1885771
aucagaguuacagggucau

SEQ ID NO: 2366245 - RNA, 19 nt, Artificial Sequence
  Description of Artificial Sequence: Synthetic oligonucleotide
  Antisense strand to SEQ ID NO: 2366244
augacccuguaacucugau

SEQ ID NO: 2366246 - RNA, 19 nt, Artificial Sequence
  Description of Artificial Sequence: Synthetic oligonucleotide
  Sense strand starting at position 895 of SEQ ID NO: 1885772
aaggucguugggcaagaua

SEQ ID NO: 2366247 - RNA, 19 nt, Artificial Sequence
  Description of Artificial Sequence: Synthetic oligonucleotide
  Antisense strand to SEQ ID NO: 2366246
uaucuugcccaacgaccuu

SEQ ID NO: 2366248 - RNA, 19 nt, Artificial Sequence
  Description of Artificial Sequence: Synthetic oligonucleotide
  Sense strand starting at position 915 of SEQ ID NO: 1885772
ggugguguuccuagagguu

SEQ ID NO: 2366249 - RNA, 19 nt, Artificial Sequence
  Description of Artificial Sequence: Synthetic oligonucleotide
  Antisense strand to SEQ ID NO: 2366248
aaccucuaggaacaccacc

SEQ ID NO: 2366250 - RNA, 19 nt, Artificial Sequence
  Description of Artificial Sequence: Synthetic oligonucleotide
  Sense strand starting at position 1067 of SEQ ID NO: 1885772
cgccuaguuacguuacuau

SEQ ID NO: 2366251 - RNA, 19 nt, Artificial Sequence
  Description of Artificial Sequence: Synthetic oligonucleotide
  Antisense strand to SEQ ID NO: 2366250
auaguaacguaacuaggcg

SEQ ID NO: 2366252 - RNA, 19 nt, Artificial Sequence
  Description of Artificial Sequence: Synthetic oligonucleotide
  Sense strand starting at position 1104 of SEQ ID NO: 1885772
cucguaucugcguccaaau

SEQ ID NO: 2366253 - RNA, 19 nt, Artificial Sequence
  Description of Artificial Sequence: Synthetic oligonucleotide
  Antisense strand to SEQ ID NO: 2366252
auuuggacgcagauacgag

SEQ ID NO: 2366254 - RNA, 19 nt, Artificial Sequence
  Description of Artificial Sequence: Synthetic oligonucleotide
  Sense strand starting at position 1320 of SEQ ID NO: 1885772
ccuggagcucuugaaucua

SEQ ID NO: 2366255 - RNA, 19 nt, Artificial Sequence
  Description of Artificial Sequence: Synthetic oligonucleotide
  Antisense strand to SEQ ID NO: 2366254
uagauucaagagcuccagg

SEQ ID NO: 2366256 - RNA, 19 nt, Artificial Sequence
  Description of Artificial Sequence: Synthetic oligonucleotide
  Sense strand starting at position 1626 of SEQ ID NO: 1885772
gagacaagaccguaagucu

SEQ ID NO: 2366257 - RNA, 19 nt, Artificial Sequence
  Description of Artificial Sequence: Synthetic oligonucleotide
  Antisense strand to SEQ ID NO: 2366256
agacuuacggucuugucuc

SEQ ID NO: 2366258 - RNA, 19 nt, Artificial Sequence
  Description of Artificial Sequence: Synthetic oligonucleotide
  Sense strand starting at position 1997 of SEQ ID NO: 1885772
gcacguugagaagaaguca

SEQ ID NO: 2366259 - RNA, 19 nt, Artificial Sequence
  Description of Artificial Sequence: Synthetic oligonucleotide
  Antisense strand to SEQ ID NO: 2366258
ugacuucuucucaacgugc

SEQ ID NO: 2366260 - RNA, 19 nt, Artificial Sequence
  Description of Artificial Sequence: Synthetic oligonucleotide
  Sense strand starting at position 2470 of SEQ ID NO: 1885772
acuuccucugaugaguaau

SEQ ID NO: 2366261 - RNA, 19 nt, Artificial Sequence
  Description of Artificial Sequence: Synthetic oligonucleotide
  Antisense strand to SEQ ID NO: 2366260
auuacucaucagaggaagu

SEQ ID NO: 2366262 - RNA, 19 nt, Artificial Sequence
  Description of Artificial Sequence: Synthetic oligonucleotide
  Sense strand starting at position 2612 of SEQ ID NO: 1885772
cgaauugucauagagaucc

SEQ ID NO: 2366263 - RNA, 19 nt, Artificial Sequence
  Description of Artificial Sequence: Synthetic oligonucleotide
  Antisense strand to SEQ ID NO: 2366262
ggaucucuaugacaauucg

SEQ ID NO: 2366264 - RNA, 19 nt, Artificial Sequence
  Description of Artificial Sequence: Synthetic oligonucleotide
  Sense strand starting at position 2644 of SEQ ID NO: 1885772
gguuguauucgguugcuac

SEQ ID NO: 2366265 - RNA, 19 nt, Artificial Sequence
  Description of Artificial Sequence: Synthetic oligonucleotide
  Antisense strand to SEQ ID NO: 2366264
guagcaaccgaauacaacc

SEQ ID NO: 2366266 - RNA, 19 nt, Artificial Sequence
  Description of Artificial Sequence: Synthetic oligonucleotide
  Sense strand starting at position 2751 of SEQ ID NO: 1885772
gucgcagaucuugggauuu

SEQ ID NO: 2366267 - RNA, 19 nt, Artificial Sequence
  Description of Artificial Sequence: Synthetic oligonucleotide
  Antisense strand to SEQ ID NO: 2366266
aaaucccaagaucugcgac

SEQ ID NO: 2366268 - RNA, 19 nt, Artificial Sequence
  Description of Artificial Sequence: Synthetic oligonucleotide
  Sense strand starting at position 3174 of SEQ ID NO: 1885772
gcaauuugauguuucgaua

SEQ ID NO: 2366269 - RNA, 19 nt, Artificial Sequence
  Description of Artificial Sequence: Synthetic oligonucleotide
  Antisense strand to SEQ ID NO: 2366268
uaucgaaacaucaaauugc

SEQ ID NO: 2366270 - RNA, 19 nt, Artificial Sequence
  Description of Artificial Sequence: Synthetic oligonucleotide
  Sense strand starting at position 3196 of SEQ ID NO: 1885772
aucuauguuguauaacgau

SEQ ID NO: 2366271 - RNA, 19 nt, Artificial Sequence
  Description of Artificial Sequence: Synthetic oligonucleotide
  Antisense strand to SEQ ID NO: 2366270
aucguuauacaacauagau

SEQ ID NO: 2366272 - RNA, 19 nt, Artificial Sequence
  Description of Artificial Sequence: Synthetic oligonucleotide
  Sense strand starting at position 3340 of SEQ ID NO: 1885772
gcaauagagcaucagaauu

SEQ ID NO: 2366273 - RNA, 19 nt, Artificial Sequence
  Description of Artificial Sequence: Synthetic oligonucleotide
  Antisense strand to SEQ ID NO: 2366272
aauucugaugcucuauugc

SEQ ID NO: 2366274 - RNA, 19 nt, Artificial Sequence
  Description of Artificial Sequence: Synthetic oligonucleotide
  Sense strand starting at position 3440 of SEQ ID NO: 1885772
uuacuugugaguuauaagg

SEQ ID NO: 2366275 - RNA, 19 nt, Artificial Sequence
  Description of Artificial Sequence: Synthetic oligonucleotide
  Antisense strand to SEQ ID NO: 2366274
ccuuauaacucacaaguaa

SEQ ID NO: 2366276 - RNA, 19 nt, Artificial Sequence
  Description of Artificial Sequence: Synthetic oligonucleotide
  Sense strand starting at position 3487 of SEQ ID NO: 1885772
uucuguaucccauggaaga

SEQ ID NO: 2366277 - RNA, 19 nt, Artificial Sequence
  Description of Artificial Sequence: Synthetic oligonucleotide
  Antisense strand to SEQ ID NO: 2366276
ucuuccaugggauacagaa

SEQ ID NO: 2366278 - RNA, 19 nt, Artificial Sequence
  Description of Artificial Sequence: Synthetic oligonucleotide
  Sense strand starting at position 3488 of SEQ ID NO: 1885772
ucuguaucccauggaagag

SEQ ID NO: 2366279 - RNA, 19 nt, Artificial Sequence
  Description of Artificial Sequence: Synthetic oligonucleotide
  Antisense strand to SEQ ID NO: 2366278
cucuuccaugggauacaga

SEQ ID NO: 2366280 - RNA, 19 nt, Artificial Sequence
  Description of Artificial Sequence: Synthetic oligonucleotide
  Sense strand starting at position 3551 of SEQ ID NO: 1885772
guugaugucauuugagucu

SEQ ID NO: 2366281 - RNA, 19 nt, Artificial Sequence
  Description of Artificial Sequence: Synthetic oligonucleotide
  Antisense strand to SEQ ID NO: 2366280
agacucaaaugacaucaac

SEQ ID NO: 2366282 - RNA, 19 nt, Artificial Sequence
  Description of Artificial Sequence: Synthetic oligonucleotide
  Sense strand starting at position 3811 of SEQ ID NO: 1885772
guguuaguacccgugguua

SEQ ID NO: 2366283 - RNA, 19 nt, Artificial Sequence
  Description of Artificial Sequence: Synthetic oligonucleotide
  Antisense strand to SEQ ID NO: 2366282
uaaccacggguacuaacac

SEQ ID NO: 2366284 - RNA, 19 nt, Artificial Sequence
  Description of Artificial Sequence: Synthetic oligonucleotide
  Sense strand starting at position 53 of SEQ ID NO: 1885773
auacgaaugacgugaagaa

SEQ ID NO: 2366285 - RNA, 19 nt, Artificial Sequence
  Description of Artificial Sequence: Synthetic oligonucleotide
  Antisense strand to SEQ ID NO: 2366284
uucuucacgucauucguau

SEQ ID NO: 2366286 - RNA, 19 nt, Artificial Sequence
  Description of Artificial Sequence: Synthetic oligonucleotide
  Sense strand starting at position 144 of SEQ ID NO: 1885773
uuuggaucucuaugacaau

SEQ ID NO: 2366287 - RNA, 19 nt, Artificial Sequence
  Description of Artificial Sequence: Synthetic oligonucleotide
  Antisense strand to SEQ ID NO: 2366286
auugucauagagauccaaa

SEQ ID NO: 2366288 - RNA, 19 nt, Artificial Sequence
  Description of Artificial Sequence: Synthetic oligonucleotide
  Sense strand starting at position 156 of SEQ ID NO: 1885773
ugacaauucgacuguaaua

SEQ ID NO: 2366289 - RNA, 19 nt, Artificial Sequence
  Description of Artificial Sequence: Synthetic oligonucleotide
  Antisense strand to SEQ ID NO: 2366288
uauuacagucgaauuguca

SEQ ID NO: 2366290 - RNA, 19 nt, Artificial Sequence
  Description of Artificial Sequence: Synthetic oligonucleotide
  Sense strand starting at position 615 of SEQ ID NO: 1885773
cggucagagcaccaaacau

SEQ ID NO: 2366291 - RNA, 19 nt, Artificial Sequence
  Description of Artificial Sequence: Synthetic oligonucleotide
  Antisense strand to SEQ ID NO: 2366290
auguuuggugcucugaccg

SEQ ID NO: 2366292 - RNA, 19 nt, Artificial Sequence
  Description of Artificial Sequence: Synthetic oligonucleotide
  Sense strand starting at position 658 of SEQ ID NO: 1885773
gcaugaaauucucccaaag

SEQ ID NO: 2366293 - RNA, 19 nt, Artificial Sequence
  Description of Artificial Sequence: Synthetic oligonucleotide
  Antisense strand to SEQ ID NO: 2366292
cuuugggagaauuucaugc

SEQ ID NO: 2366294 - RNA, 19 nt, Artificial Sequence
  Description of Artificial Sequence: Synthetic oligonucleotide
  Sense strand starting at position 708 of SEQ ID NO: 1885773
ggucaccguaaguagaaua

SEQ ID NO: 2366295 - RNA, 19 nt, Artificial Sequence
  Description of Artificial Sequence: Synthetic oligonucleotide
  Antisense strand to SEQ ID NO: 2366294
uauucuacuuacggugacc

SEQ ID NO: 2366296 - RNA, 19 nt, Artificial Sequence
  Description of Artificial Sequence: Synthetic oligonucleotide
  Sense strand starting at position 715 of SEQ ID NO: 1885773
guaaguagaauaggugaaa

SEQ ID NO: 2366297 - RNA, 19 nt, Artificial Sequence
  Description of Artificial Sequence: Synthetic oligonucleotide
  Antisense strand to SEQ ID NO: 2366296
uuucaccuauucuacuuac

SEQ ID NO: 2366298 - RNA, 19 nt, Artificial Sequence
  Description of Artificial Sequence: Synthetic oligonucleotide
  Sense strand starting at position 926 of SEQ ID NO: 1885773
aaggaaacagugugaaucu

SEQ ID NO: 2366299 - RNA, 19 nt, Artificial Sequence
  Description of Artificial Sequence: Synthetic oligonucleotide
  Antisense strand to SEQ ID NO: 2366298
agauucacacuguuuccuu

SEQ ID NO: 2366300 - RNA, 19 nt, Artificial Sequence
  Description of Artificial Sequence: Synthetic oligonucleotide
  Sense strand starting at position 999 of SEQ ID NO: 1885773
uugugaaaucuaugaagug

SEQ ID NO: 2366301 - RNA, 19 nt, Artificial Sequence
  Description of Artificial Sequence: Synthetic oligonucleotide
  Antisense strand to SEQ ID NO: 2366300
cacuucauagauuucacaa

SEQ ID NO: 2366302 - RNA, 19 nt, Artificial Sequence
  Description of Artificial Sequence: Synthetic oligonucleotide
  Sense strand starting at position 1029 of SEQ ID NO: 1885773
gagucacccgaggaauguu

SEQ ID NO: 2366303 - RNA, 19 nt, Artificial Sequence
  Description of Artificial Sequence: Synthetic oligonucleotide
  Antisense strand to SEQ ID NO: 2366302
aacauuccucgggugacuc

SEQ ID NO: 2366304 - RNA, 19 nt, Artificial Sequence
  Description of Artificial Sequence: Synthetic oligonucleotide
  Sense strand starting at position 1463 of SEQ ID NO: 1885773
ugugaauacuggccacaag

SEQ ID NO: 2366305 - RNA, 19 nt, Artificial Sequence
  Description of Artificial Sequence: Synthetic oligonucleotide
  Antisense strand to SEQ ID NO: 2366304
cuuguggccaguauucaca

SEQ ID NO: 2366306 - RNA, 19 nt, Artificial Sequence
  Description of Artificial Sequence: Synthetic oligonucleotide
  Sense strand starting at position 1464 of SEQ ID NO: 1885773
gugaauacuggccacaagu

SEQ ID NO: 2366307 - RNA, 19 nt, Artificial Sequence
  Description of Artificial Sequence: Synthetic oligonucleotide
  Antisense strand to SEQ ID NO: 2366306
acuuguggccaguauucac

SEQ ID NO: 2366308 - RNA, 19 nt, Artificial Sequence
  Description of Artificial Sequence: Synthetic oligonucleotide
  Sense strand starting at position 1589 of SEQ ID NO: 1885773
gaaauuugauuaggaggaa

SEQ ID NO: 2366309 - RNA, 19 nt, Artificial Sequence
  Description of Artificial Sequence: Synthetic oligonucleotide
  Antisense strand to SEQ ID NO: 2366308
uuccuccuaaucaaauuuc

SEQ ID NO: 2366310 - RNA, 19 nt, Artificial Sequence
  Description of Artificial Sequence: Synthetic oligonucleotide
  Sense strand starting at position 1671 of SEQ ID NO: 1885773
gaggaucaccuagguaacu

SEQ ID NO: 2366311 - RNA, 19 nt, Artificial Sequence
  Description of Artificial Sequence: Synthetic oligonucleotide
  Antisense strand to SEQ ID NO: 2366310
aguuaccuaggugauccuc

SEQ ID NO: 2366312 - RNA, 19 nt, Artificial Sequence
  Description of Artificial Sequence: Synthetic oligonucleotide
  Sense strand starting at position 2516 of SEQ ID NO: 1885773
acagacuuugcugaaguga

SEQ ID NO: 2366313 - RNA, 19 nt, Artificial Sequence
  Description of Artificial Sequence: Synthetic oligonucleotide
  Antisense strand to SEQ ID NO: 2366312
ucacuucagcaaagucugu

SEQ ID NO: 2366314 - RNA, 19 nt, Artificial Sequence
  Description of Artificial Sequence: Synthetic oligonucleotide
  Sense strand starting at position 2875 of SEQ ID NO: 1885773
agagguggauuugaggaau

SEQ ID NO: 2366315 - RNA, 19 nt, Artificial Sequence
  Description of Artificial Sequence: Synthetic oligonucleotide
  Antisense strand to SEQ ID NO: 2366314
auuccucaaauccaccucu

SEQ ID NO: 2366316 - RNA, 19 nt, Artificial Sequence
  Description of Artificial Sequence: Synthetic oligonucleotide
  Sense strand starting at position 3371 of SEQ ID NO: 1885773
ugugaaaucauauacgagu

SEQ ID NO: 2366317 - RNA, 19 nt, Artificial Sequence
  Description of Artificial Sequence: Synthetic oligonucleotide
  Antisense strand to SEQ ID NO: 2366316
acucguauaugauuucaca

SEQ ID NO: 2366318 - RNA, 19 nt, Artificial Sequence
  Description of Artificial Sequence: Synthetic oligonucleotide
  Sense strand starting at position 3560 of SEQ ID NO: 1885773
gacauuccuguugaguuaa

SEQ ID NO: 2366319 - RNA, 19 nt, Artificial Sequence
  Description of Artificial Sequence: Synthetic oligonucleotide
  Antisense strand to SEQ ID NO: 2366318
uuaacucaacaggaauguc

SEQ ID NO: 2366320 - RNA, 19 nt, Artificial Sequence
  Description of Artificial Sequence: Synthetic oligonucleotide
  Sense strand starting at position 3642 of SEQ ID NO: 1885773
agcuauuucugcuuuguga

SEQ ID NO: 2366321 - RNA, 19 nt, Artificial Sequence
  Description of Artificial Sequence: Synthetic oligonucleotide
  Antisense strand to SEQ ID NO: 2366320
ucacaaagcagaaauagcu

SEQ ID NO: 2366322 - RNA, 19 nt, Artificial Sequence
  Description of Artificial Sequence: Synthetic oligonucleotide
  Sense strand starting at position 3644 of SEQ ID NO: 1885773
cuauuucugcuuugugacu

SEQ ID NO: 2366323 - RNA, 19 nt, Artificial Sequence
  Description of Artificial Sequence: Synthetic oligonucleotide
  Antisense strand to SEQ ID NO: 2366322
agucacaaagcagaaauag

SEQ ID NO: 2366324 - RNA, 19 nt, Artificial Sequence
  Description of Artificial Sequence: Synthetic oligonucleotide
  Sense strand starting at position 3808 of SEQ ID NO: 1885773
aucagaguuacagggucau

SEQ ID NO: 2366325 - RNA, 19 nt, Artificial Sequence
  Description of Artificial Sequence: Synthetic oligonucleotide
  Antisense strand to SEQ ID NO: 2366324
augacccuguaacucugau

SEQ ID NO: 2366326 - RNA, 19 nt, Artificial Sequence
  Description of Artificial Sequence: Synthetic oligonucleotide
  Sense strand starting at position 895 of SEQ ID NO: 1885774
aaggucguugggcaagaua

SEQ ID NO: 2366327 - RNA, 19 nt, Artificial Sequence
  Description of Artificial Sequence: Synthetic oligonucleotide
  Antisense strand to SEQ ID NO: 2366326
uaucuugcccaacgaccuu

SEQ ID NO: 2366328 - RNA, 19 nt, Artificial Sequence
  Description of Artificial Sequence: Synthetic oligonucleotide
  Sense strand starting at position 915 of SEQ ID NO: 1885774
ggugguguuccuagagguu

SEQ ID NO: 2366329 - RNA, 19 nt, Artificial Sequence
  Description of Artificial Sequence: Synthetic oligonucleotide
  Antisense strand to SEQ ID NO: 2366328
aaccucuaggaacaccacc

SEQ ID NO: 2366330 - RNA, 19 nt, Artificial Sequence
  Description of Artificial Sequence: Synthetic oligonucleotide
  Sense strand starting at position 1067 of SEQ ID NO: 1885774
cgccuaguuacguuacuau

SEQ ID NO: 2366331 - RNA, 19 nt, Artificial Sequence
  Description of Artificial Sequence: Synthetic oligonucleotide
  Antisense strand to SEQ ID NO: 2366330
auaguaacguaacuaggcg

SEQ ID NO: 2366332 - RNA, 19 nt, Artificial Sequence
  Description of Artificial Sequence: Synthetic oligonucleotide
  Sense strand starting at position 1104 of SEQ ID NO: 1885774
cucguaucugcguccaaau

SEQ ID NO: 2366333 - RNA, 19 nt, Artificial Sequence
  Description of Artificial Sequence: Synthetic oligonucleotide
  Antisense strand to SEQ ID NO: 2366332
auuuggacgcagauacgag

SEQ ID NO: 2366334 - RNA, 19 nt, Artificial Sequence
  Description of Artificial Sequence: Synthetic oligonucleotide
  Sense strand starting at position 1320 of SEQ ID NO: 1885774
ccuggagcucuugaaucua

SEQ ID NO: 2366335 - RNA, 19 nt, Artificial Sequence
  Description of Artificial Sequence: Synthetic oligonucleotide
  Antisense strand to SEQ ID NO: 2366334
uagauucaagagcuccagg

SEQ ID NO: 2366336 - RNA, 19 nt, Artificial Sequence
  Description of Artificial Sequence: Synthetic oligonucleotide
  Sense strand starting at position 1626 of SEQ ID NO: 1885774
gagacaagaccguaagucu

SEQ ID NO: 2366337 - RNA, 19 nt, Artificial Sequence
  Description of Artificial Sequence: Synthetic oligonucleotide
  Antisense strand to SEQ ID NO: 2366336
agacuuacggucuugucuc

SEQ ID NO: 2366338 - RNA, 19 nt, Artificial Sequence
  Description of Artificial Sequence: Synthetic oligonucleotide
  Sense strand starting at position 1997 of SEQ ID NO: 1885774
gcacguugagaagaaguca

SEQ ID NO: 2366339 - RNA, 19 nt, Artificial Sequence
  Description of Artificial Sequence: Synthetic oligonucleotide
  Antisense strand to SEQ ID NO: 2366338
ugacuucuucucaacgugc

SEQ ID NO: 2366340 - RNA, 19 nt, Artificial Sequence
  Description of Artificial Sequence: Synthetic oligonucleotide
  Sense strand starting at position 2470 of SEQ ID NO: 1885774
acuuccucugaugaguaau

SEQ ID NO: 2366341 - RNA, 19 nt, Artificial Sequence
  Description of Artificial Sequence: Synthetic oligonucleotide
  Antisense strand to SEQ ID NO: 2366340
auuacucaucagaggaagu

SEQ ID NO: 2366342 - RNA, 19 nt, Artificial Sequence
  Description of Artificial Sequence: Synthetic oligonucleotide
  Sense strand starting at position 2612 of SEQ ID NO: 1885774
cgaauugucauagagaucc

SEQ ID NO: 2366343 - RNA, 19 nt, Artificial Sequence
  Description of Artificial Sequence: Synthetic oligonucleotide
  Antisense strand to SEQ ID NO: 2366342
ggaucucuaugacaauucg

SEQ ID NO: 2366344 - RNA, 19 nt, Artificial Sequence
  Description of Artificial Sequence: Synthetic oligonucleotide
  Sense strand starting at position 2644 of SEQ ID NO: 1885774
gguuguauucgguugcuac

SEQ ID NO: 2366345 - RNA, 19 nt, Artificial Sequence
  Description of Artificial Sequence: Synthetic oligonucleotide
  Antisense strand to SEQ ID NO: 2366344
guagcaaccgaauacaacc

SEQ ID NO: 2366346 - RNA, 19 nt, Artificial Sequence
  Description of Artificial Sequence: Synthetic oligonucleotide
  Sense strand starting at position 2751 of SEQ ID NO: 1885774
gucgcagaucuugggauuu

SEQ ID NO: 2366347 - RNA, 19 nt, Artificial Sequence
  Description of Artificial Sequence: Synthetic oligonucleotide
  Antisense strand to SEQ ID NO: 2366346
aaaucccaagaucugcgac

SEQ ID NO: 2366348 - RNA, 19 nt, Artificial Sequence
  Description of Artificial Sequence: Synthetic oligonucleotide
  Sense strand starting at position 3174 of SEQ ID NO: 1885774
gcaauuugauguuucgaua

SEQ ID NO: 2366349 - RNA, 19 nt, Artificial Sequence
  Description of Artificial Sequence: Synthetic oligonucleotide
  Antisense strand to SEQ ID NO: 2366348
uaucgaaacaucaaauugc

SEQ ID NO: 2366350 - RNA, 19 nt, Artificial Sequence
  Description of Artificial Sequence: Synthetic oligonucleotide
  Sense strand starting at position 3196 of SEQ ID NO: 1885774
aucuauguuguauaacgau

SEQ ID NO: 2366351 - RNA, 19 nt, Artificial Sequence
  Description of Artificial Sequence: Synthetic oligonucleotide
  Antisense strand to SEQ ID NO: 2366350
aucguuauacaacauagau

SEQ ID NO: 2366352 - RNA, 19 nt, Artificial Sequence
  Description of Artificial Sequence: Synthetic oligonucleotide
  Sense strand starting at position 3340 of SEQ ID NO: 1885774
gcaauagagcaucagaauu

SEQ ID NO: 2366353 - RNA, 19 nt, Artificial Sequence
  Description of Artificial Sequence: Synthetic oligonucleotide
  Antisense strand to SEQ ID NO: 2366352
aauucugaugcucuauugc

SEQ ID NO: 2366354 - RNA, 19 nt, Artificial Sequence
  Description of Artificial Sequence: Synthetic oligonucleotide
  Sense strand starting at position 3440 of SEQ ID NO: 1885774
uuacuugugaguuauaagg

SEQ ID NO: 2366355 - RNA, 19 nt, Artificial Sequence
  Description of Artificial Sequence: Synthetic oligonucleotide
  Antisense strand to SEQ ID NO: 2366354
ccuuauaacucacaaguaa

SEQ ID NO: 2366356 - RNA, 19 nt, Artificial Sequence
  Description of Artificial Sequence: Synthetic oligonucleotide
  Sense strand starting at position 3487 of SEQ ID NO: 1885774
uucuguaucccauggaaga

SEQ ID NO: 2366357 - RNA, 19 nt, Artificial Sequence
  Description of Artificial Sequence: Synthetic oligonucleotide
  Antisense strand to SEQ ID NO: 2366356
ucuuccaugggauacagaa

SEQ ID NO: 2366358 - RNA, 19 nt, Artificial Sequence
  Description of Artificial Sequence: Synthetic oligonucleotide
  Sense strand starting at position 3488 of SEQ ID NO: 1885774
ucuguaucccauggaagag

SEQ ID NO: 2366359 - RNA, 19 nt, Artificial Sequence
  Description of Artificial Sequence: Synthetic oligonucleotide
  Antisense strand to SEQ ID NO: 2366358
cucuuccaugggauacaga

SEQ ID NO: 2366360 - RNA, 19 nt, Artificial Sequence
  Description of Artificial Sequence: Synthetic oligonucleotide
  Sense strand starting at position 3551 of SEQ ID NO: 1885774
guugaugucauuugagucu

SEQ ID NO: 2366361 - RNA, 19 nt, Artificial Sequence
  Description of Artificial Sequence: Synthetic oligonucleotide
  Antisense strand to SEQ ID NO: 2366360
agacucaaaugacaucaac

SEQ ID NO: 2366362 - RNA, 19 nt, Artificial Sequence
  Description of Artificial Sequence: Synthetic oligonucleotide
  Sense strand starting at position 3811 of SEQ ID NO: 1885774
guguuaguacccgugguua

SEQ ID NO: 2366363 - RNA, 19 nt, Artificial Sequence
  Description of Artificial Sequence: Synthetic oligonucleotide
  Antisense strand to SEQ ID NO: 2366362
uaaccacggguacuaacac

SEQ ID NO: 2366364 - RNA, 19 nt, Artificial Sequence
  Description of Artificial Sequence: Synthetic oligonucleotide
  Sense strand starting at position 653 of SEQ ID NO: 1885775
cugggaaggcuuggacaua

SEQ ID NO: 2366365 - RNA, 19 nt, Artificial Sequence
  Description of Artificial Sequence: Synthetic oligonucleotide
  Antisense strand to SEQ ID NO: 2366364
uauguccaagccuucccag

SEQ ID NO: 2366366 - RNA, 19 nt, Artificial Sequence
  Description of Artificial Sequence: Synthetic oligonucleotide
  Sense strand starting at position 1428 of SEQ ID NO: 1885775
accucuaagccggauacuu

SEQ ID NO: 2366367 - RNA, 19 nt, Artificial Sequence
  Description of Artificial Sequence: Synthetic oligonucleotide
  Antisense strand to SEQ ID NO: 2366366
aaguauccggcuuagaggu

SEQ ID NO: 2366368 - RNA, 19 nt, Artificial Sequence
  Description of Artificial Sequence: Synthetic oligonucleotide
  Sense strand starting at position 1438 of SEQ ID NO: 1885775
cggauacuucccuggacca

SEQ ID NO: 2366369 - RNA, 19 nt, Artificial Sequence
  Description of Artificial Sequence: Synthetic oligonucleotide
  Antisense strand to SEQ ID NO: 2366368
ugguccagggaaguauccg

SEQ ID NO: 2366370 - RNA, 19 nt, Artificial Sequence
  Description of Artificial Sequence: Synthetic oligonucleotide
  Sense strand starting at position 1487 of SEQ ID NO: 1885775
ucguuucugccagcgguua

SEQ ID NO: 2366371 - RNA, 19 nt, Artificial Sequence
  Description of Artificial Sequence: Synthetic oligonucleotide
  Antisense strand to SEQ ID NO: 2366370
uaaccgcuggcagaaacga

SEQ ID NO: 2366372 - RNA, 19 nt, Artificial Sequence
  Description of Artificial Sequence: Synthetic oligonucleotide
  Sense strand starting at position 1506 of SEQ ID NO: 1885775
ccaagacccugggauauuu

SEQ ID NO: 2366373 - RNA, 19 nt, Artificial Sequence
  Description of Artificial Sequence: Synthetic oligonucleotide
  Antisense strand to SEQ ID NO: 2366372
aaauaucccagggucuugg

SEQ ID NO: 2366374 - RNA, 19 nt, Artificial Sequence
  Description of Artificial Sequence: Synthetic oligonucleotide
  Sense strand starting at position 1591 of SEQ ID NO: 1885775
ggcuuuggccuggagaaag

SEQ ID NO: 2366375 - RNA, 19 nt, Artificial Sequence
  Description of Artificial Sequence: Synthetic oligonucleotide
  Antisense strand to SEQ ID NO: 2366374
cuuucuccaggccaaagcc

SEQ ID NO: 2366376 - RNA, 19 nt, Artificial Sequence
  Description of Artificial Sequence: Synthetic oligonucleotide
  Sense strand starting at position 1631 of SEQ ID NO: 1885775
cgacaauacccuggagaac

SEQ ID NO: 2366377 - RNA, 19 nt, Artificial Sequence
  Description of Artificial Sequence: Synthetic oligonucleotide
  Antisense strand to SEQ ID NO: 2366376
guucuccaggguauugucg

SEQ ID NO: 2366378 - RNA, 19 nt, Artificial Sequence
  Description of Artificial Sequence: Synthetic oligonucleotide
  Sense strand starting at position 1662 of SEQ ID NO: 1885775
uauaauuggcgcguuacua

SEQ ID NO: 2366379 - RNA, 19 nt, Artificial Sequence
  Description of Artificial Sequence: Synthetic oligonucleotide
  Antisense strand to SEQ ID NO: 2366378
uaguaacgcgccaauuaua

SEQ ID NO: 2366380 - RNA, 19 nt, Artificial Sequence
  Description of Artificial Sequence: Synthetic oligonucleotide
  Sense strand starting at position 2869 of SEQ ID NO: 1885775
cagaaacggcuguaacuaa

SEQ ID NO: 2366381 - RNA, 19 nt, Artificial Sequence
  Description of Artificial Sequence: Synthetic oligonucleotide
  Antisense strand to SEQ ID NO: 2366380
uuaguuacagccguuucug

SEQ ID NO: 2366382 - RNA, 19 nt, Artificial Sequence
  Description of Artificial Sequence: Synthetic oligonucleotide
  Sense strand starting at position 3480 of SEQ ID NO: 1885775
ugagauauucuauguaauc

SEQ ID NO: 2366383 - RNA, 19 nt, Artificial Sequence
  Description of Artificial Sequence: Synthetic oligonucleotide
  Antisense strand to SEQ ID NO: 2366382
gauuacauagaauaucuca

SEQ ID NO: 2366384 - RNA, 19 nt, Artificial Sequence
  Description of Artificial Sequence: Synthetic oligonucleotide
  Sense strand starting at position 3525 of SEQ ID NO: 1885775
uggugagucguccucgauu

SEQ ID NO: 2366385 - RNA, 19 nt, Artificial Sequence
  Description of Artificial Sequence: Synthetic oligonucleotide
  Antisense strand to SEQ ID NO: 2366384
aaucgaggacgacucacca

SEQ ID NO: 2366386 - RNA, 19 nt, Artificial Sequence
  Description of Artificial Sequence: Synthetic oligonucleotide
  Sense strand starting at position 3839 of SEQ ID NO: 1885775
cugagaaguuucuuaucuu

SEQ ID NO: 2366387 - RNA, 19 nt, Artificial Sequence
  Description of Artificial Sequence: Synthetic oligonucleotide
  Antisense strand to SEQ ID NO: 2366386
aagauaagaaacuucucag

SEQ ID NO: 2366388 - RNA, 19 nt, Artificial Sequence
  Description of Artificial Sequence: Synthetic oligonucleotide
  Sense strand starting at position 35 of SEQ ID NO: 1885776
auuaaagagaguuguauga

SEQ ID NO: 2366389 - RNA, 19 nt, Artificial Sequence
  Description of Artificial Sequence: Synthetic oligonucleotide
  Antisense strand to SEQ ID NO: 2366388
ucauacaacucucuuuaau

SEQ ID NO: 2366390 - RNA, 19 nt, Artificial Sequence
  Description of Artificial Sequence: Synthetic oligonucleotide
  Sense strand starting at position 49 of SEQ ID NO: 1885776
uaugaaaugucagucacag

SEQ ID NO: 2366391 - RNA, 19 nt, Artificial Sequence
  Description of Artificial Sequence: Synthetic oligonucleotide
  Antisense strand to SEQ ID NO: 2366390
cugugacugacauuucaua

SEQ ID NO: 2366392 - RNA, 19 nt, Artificial Sequence
  Description of Artificial Sequence: Synthetic oligonucleotide
  Sense strand starting at position 96 of SEQ ID NO: 1885776
gggucuuguagacaccaca

SEQ ID NO: 2366393 - RNA, 19 nt, Artificial Sequence
  Description of Artificial Sequence: Synthetic oligonucleotide
  Antisense strand to SEQ ID NO: 2366392
uguggugucuacaagaccc

SEQ ID NO: 2366394 - RNA, 19 nt, Artificial Sequence
  Description of Artificial Sequence: Synthetic oligonucleotide
  Sense strand starting at position 120 of SEQ ID NO: 1885776
gcuuuaaaucugggugaac

SEQ ID NO: 2366395 - RNA, 19 nt, Artificial Sequence
  Description of Artificial Sequence: Synthetic oligonucleotide
  Antisense strand to SEQ ID NO: 2366394
guucacccagauuuaaagc

SEQ ID NO: 2366396 - RNA, 19 nt, Artificial Sequence
  Description of Artificial Sequence: Synthetic oligonucleotide
  Sense strand starting at position 122 of SEQ ID NO: 1885776
uuuaaaucugggugaacca

SEQ ID NO: 2366397 - RNA, 19 nt, Artificial Sequence
  Description of Artificial Sequence: Synthetic oligonucleotide
  Antisense strand to SEQ ID NO: 2366396
ugguucacccagauuuaaa

SEQ ID NO: 2366398 - RNA, 19 nt, Artificial Sequence
  Description of Artificial Sequence: Synthetic oligonucleotide
  Sense strand starting at position 230 of SEQ ID NO: 1885776
caagaugauguuggcucaa

SEQ ID NO: 2366399 - RNA, 19 nt, Artificial Sequence
  Description of Artificial Sequence: Synthetic oligonucleotide
  Antisense strand to SEQ ID NO: 2366398
uugagccaacaucaucuug

SEQ ID NO: 2366400 - RNA, 19 nt, Artificial Sequence
  Description of Artificial Sequence: Synthetic oligonucleotide
  Sense strand starting at position 232 of SEQ ID NO: 1885776
agaugauguuggcucaaac

SEQ ID NO: 2366401 - RNA, 19 nt, Artificial Sequence
  Description of Artificial Sequence: Synthetic oligonucleotide
  Antisense strand to SEQ ID NO: 2366400
guuugagccaacaucaucu

SEQ ID NO: 2366402 - RNA, 19 nt, Artificial Sequence
  Description of Artificial Sequence: Synthetic oligonucleotide
  Sense strand starting at position 241 of SEQ ID NO: 1885776
uggcucaaaccagguuaaa

SEQ ID NO: 2366403 - RNA, 19 nt, Artificial Sequence
  Description of Artificial Sequence: Synthetic oligonucleotide
  Antisense strand to SEQ ID NO: 2366402
uuuaaccugguuugagcca

SEQ ID NO: 2366404 - RNA, 19 nt, Artificial Sequence
  Description of Artificial Sequence: Synthetic oligonucleotide
  Sense strand starting at position 252 of SEQ ID NO: 1885776
agguuaaaccacuggguaa

SEQ ID NO: 2366405 - RNA, 19 nt, Artificial Sequence
  Description of Artificial Sequence: Synthetic oligonucleotide
  Antisense strand to SEQ ID NO: 2366404
uuacccagugguuuaaccu

SEQ ID NO: 2366406 - RNA, 19 nt, Artificial Sequence
  Description of Artificial Sequence: Synthetic oligonucleotide
  Sense strand starting at position 253 of SEQ ID NO: 1885776
gguuaaaccacuggguaaa

SEQ ID NO: 2366407 - RNA, 19 nt, Artificial Sequence
  Description of Artificial Sequence: Synthetic oligonucleotide
  Antisense strand to SEQ ID NO: 2366406
uuuacccagugguuuaacc

SEQ ID NO: 2366408 - RNA, 19 nt, Artificial Sequence
  Description of Artificial Sequence: Synthetic oligonucleotide
  Sense strand starting at position 254 of SEQ ID NO: 1885776
guuaaaccacuggguaaau

SEQ ID NO: 2366409 - RNA, 19 nt, Artificial Sequence
  Description of Artificial Sequence: Synthetic oligonucleotide
  Antisense strand to SEQ ID NO: 2366408
auuuacccagugguuuaac

SEQ ID NO: 2366410 - RNA, 19 nt, Artificial Sequence
  Description of Artificial Sequence: Synthetic oligonucleotide
  Sense strand starting at position 325 of SEQ ID NO: 1885776
uucugaugccuguaacaac

SEQ ID NO: 2366411 - RNA, 19 nt, Artificial Sequence
  Description of Artificial Sequence: Synthetic oligonucleotide
  Antisense strand to SEQ ID NO: 2366410
guuguuacaggcaucagaa

SEQ ID NO: 2366412 - RNA, 19 nt, Artificial Sequence
  Description of Artificial Sequence: Synthetic oligonucleotide
  Sense strand starting at position 346 of SEQ ID NO: 1885776
ucacauucuccucaagcga

SEQ ID NO: 2366413 - RNA, 19 nt, Artificial Sequence
  Description of Artificial Sequence: Synthetic oligonucleotide
  Antisense strand to SEQ ID NO: 2366412
ucgcuugaggagaauguga

SEQ ID NO: 2366414 - RNA, 19 nt, Artificial Sequence
  Description of Artificial Sequence: Synthetic oligonucleotide
  Sense strand starting at position 471 of SEQ ID NO: 1885776
guauuaagugcugaugaag

SEQ ID NO: 2366415 - RNA, 19 nt, Artificial Sequence
  Description of Artificial Sequence: Synthetic oligonucleotide
  Antisense strand to SEQ ID NO: 2366414
cuucaucagcacuuaauac

SEQ ID NO: 2366416 - RNA, 19 nt, Artificial Sequence
  Description of Artificial Sequence: Synthetic oligonucleotide
  Sense strand starting at position 504 of SEQ ID NO: 1885776
uuugcaacucugugauuuc

SEQ ID NO: 2366417 - RNA, 19 nt, Artificial Sequence
  Description of Artificial Sequence: Synthetic oligonucleotide
  Antisense strand to SEQ ID NO: 2366416
gaaaucacagaguugcaaa

SEQ ID NO: 2366418 - RNA, 19 nt, Artificial Sequence
  Description of Artificial Sequence: Synthetic oligonucleotide
  Sense strand starting at position 507 of SEQ ID NO: 1885776
gcaacucugugauuucucu

SEQ ID NO: 2366419 - RNA, 19 nt, Artificial Sequence
  Description of Artificial Sequence: Synthetic oligonucleotide
  Antisense strand to SEQ ID NO: 2366418
agagaaaucacagaguugc

SEQ ID NO: 2366420 - RNA, 19 nt, Artificial Sequence
  Description of Artificial Sequence: Synthetic oligonucleotide
  Sense strand starting at position 511 of SEQ ID NO: 1885776
cucugugauuucucuguag

SEQ ID NO: 2366421 - RNA, 19 nt, Artificial Sequence
  Description of Artificial Sequence: Synthetic oligonucleotide
  Antisense strand to SEQ ID NO: 2366420
cuacagagaaaucacagag

SEQ ID NO: 2366422 - RNA, 19 nt, Artificial Sequence
  Description of Artificial Sequence: Synthetic oligonucleotide
  Sense strand starting at position 1427 of SEQ ID NO: 1885776
accucuaagccggauacuu

SEQ ID NO: 2366423 - RNA, 19 nt, Artificial Sequence
  Description of Artificial Sequence: Synthetic oligonucleotide
  Antisense strand to SEQ ID NO: 2366422
aaguauccggcuuagaggu

SEQ ID NO: 2366424 - RNA, 19 nt, Artificial Sequence
  Description of Artificial Sequence: Synthetic oligonucleotide
  Sense strand starting at position 1437 of SEQ ID NO: 1885776
cggauacuucccuggacca

SEQ ID NO: 2366425 - RNA, 19 nt, Artificial Sequence
  Description of Artificial Sequence: Synthetic oligonucleotide
  Antisense strand to SEQ ID NO: 2366424
ugguccagggaaguauccg

SEQ ID NO: 2366426 - RNA, 19 nt, Artificial Sequence
  Description of Artificial Sequence: Synthetic oligonucleotide
  Sense strand starting at position 1486 of SEQ ID NO: 1885776
ucguuucugccagcgguua

SEQ ID NO: 2366427 - RNA, 19 nt, Artificial Sequence
  Description of Artificial Sequence: Synthetic oligonucleotide
  Antisense strand to SEQ ID NO: 2366426
uaaccgcuggcagaaacga

SEQ ID NO: 2366428 - RNA, 19 nt, Artificial Sequence
  Description of Artificial Sequence: Synthetic oligonucleotide
  Sense strand starting at position 1505 of SEQ ID NO: 1885776
ccaagacccugggauauuu

SEQ ID NO: 2366429 - RNA, 19 nt, Artificial Sequence
  Description of Artificial Sequence: Synthetic oligonucleotide
  Antisense strand to SEQ ID NO: 2366428
aaauaucccagggucuugg

SEQ ID NO: 2366430 - RNA, 19 nt, Artificial Sequence
  Description of Artificial Sequence: Synthetic oligonucleotide
  Sense strand starting at position 1590 of SEQ ID NO: 1885776
ggcuuuggccuggagaaag

SEQ ID NO: 2366431 - RNA, 19 nt, Artificial Sequence
  Description of Artificial Sequence: Synthetic oligonucleotide
  Antisense strand to SEQ ID NO: 2366430
cuuucuccaggccaaagcc

SEQ ID NO: 2366432 - RNA, 19 nt, Artificial Sequence
  Description of Artificial Sequence: Synthetic oligonucleotide
  Sense strand starting at position 1630 of SEQ ID NO: 1885776
cgacaauacccuggagaac

SEQ ID NO: 2366433 - RNA, 19 nt, Artificial Sequence
  Description of Artificial Sequence: Synthetic oligonucleotide
  Antisense strand to SEQ ID NO: 2366432
guucuccaggguauugucg

SEQ ID NO: 2366434 - RNA, 19 nt, Artificial Sequence
  Description of Artificial Sequence: Synthetic oligonucleotide
  Sense strand starting at position 1661 of SEQ ID NO: 1885776
uauaauuggcgcguuacua

SEQ ID NO: 2366435 - RNA, 19 nt, Artificial Sequence
  Description of Artificial Sequence: Synthetic oligonucleotide
  Antisense strand to SEQ ID NO: 2366434
uaguaacgcgccaauuaua

SEQ ID NO: 2366436 - RNA, 19 nt, Artificial Sequence
  Description of Artificial Sequence: Synthetic oligonucleotide
  Sense strand starting at position 2868 of SEQ ID NO: 1885776
cagaaacggcuguaacuaa

SEQ ID NO: 2366437 - RNA, 19 nt, Artificial Sequence
  Description of Artificial Sequence: Synthetic oligonucleotide
  Antisense strand to SEQ ID NO: 2366436
uuaguuacagccguuucug

SEQ ID NO: 2366438 - RNA, 19 nt, Artificial Sequence
  Description of Artificial Sequence: Synthetic oligonucleotide
  Sense strand starting at position 3485 of SEQ ID NO: 1885776
ugagauauucuauguaauc

SEQ ID NO: 2366439 - RNA, 19 nt, Artificial Sequence
  Description of Artificial Sequence: Synthetic oligonucleotide
  Antisense strand to SEQ ID NO: 2366438
gauuacauagaauaucuca

SEQ ID NO: 2366440 - RNA, 19 nt, Artificial Sequence
  Description of Artificial Sequence: Synthetic oligonucleotide
  Sense strand starting at position 3530 of SEQ ID NO: 1885776
uggugagucguccucgauu

SEQ ID NO: 2366441 - RNA, 19 nt, Artificial Sequence
  Description of Artificial Sequence: Synthetic oligonucleotide
  Antisense strand to SEQ ID NO: 2366440
aaucgaggacgacucacca

SEQ ID NO: 2366442 - RNA, 19 nt, Artificial Sequence
  Description of Artificial Sequence: Synthetic oligonucleotide
  Sense strand starting at position 3844 of SEQ ID NO: 1885776
cugagaaguuucuuaucuu

SEQ ID NO: 2366443 - RNA, 19 nt, Artificial Sequence
  Description of Artificial Sequence: Synthetic oligonucleotide
  Antisense strand to SEQ ID NO: 2366442
aagauaagaaacuucucag

SEQ ID NO: 2366444 - RNA, 19 nt, Artificial Sequence
  Description of Artificial Sequence: Synthetic oligonucleotide
  Sense strand starting at position 51 of SEQ ID NO: 1885777
ucagauucuuuggacauau

SEQ ID NO: 2366445 - RNA, 19 nt, Artificial Sequence
  Description of Artificial Sequence: Synthetic oligonucleotide
  Antisense strand to SEQ ID NO: 2366444
auauguccaaagaaucuga

SEQ ID NO: 2366446 - RNA, 19 nt, Artificial Sequence
  Description of Artificial Sequence: Synthetic oligonucleotide
  Sense strand starting at position 61 of SEQ ID NO: 1885777
uggacauauacgcauguau

SEQ ID NO: 2366447 - RNA, 19 nt, Artificial Sequence
  Description of Artificial Sequence: Synthetic oligonucleotide
  Antisense strand to SEQ ID NO: 2366446
auacaugcguauaugucca

SEQ ID NO: 2366448 - RNA, 19 nt, Artificial Sequence
  Description of Artificial Sequence: Synthetic oligonucleotide
  Sense strand starting at position 63 of SEQ ID NO: 1885777
gacauauacgcauguauca

SEQ ID NO: 2366449 - RNA, 19 nt, Artificial Sequence
  Description of Artificial Sequence: Synthetic oligonucleotide
  Antisense strand to SEQ ID NO: 2366448
ugauacaugcguauauguc

SEQ ID NO: 2366450 - RNA, 19 nt, Artificial Sequence
  Description of Artificial Sequence: Synthetic oligonucleotide
  Sense strand starting at position 245 of SEQ ID NO: 1885777
aggagaaaugccuagcgaa

SEQ ID NO: 2366451 - RNA, 19 nt, Artificial Sequence
  Description of Artificial Sequence: Synthetic oligonucleotide
  Antisense strand to SEQ ID NO: 2366450
uucgcuaggcauuucuccu

SEQ ID NO: 2366452 - RNA, 19 nt, Artificial Sequence
  Description of Artificial Sequence: Synthetic oligonucleotide
  Sense strand starting at position 365 of SEQ ID NO: 1885777
ccugguaucucccuugaaa

SEQ ID NO: 2366453 - RNA, 19 nt, Artificial Sequence
  Description of Artificial Sequence: Synthetic oligonucleotide
  Antisense strand to SEQ ID NO: 2366452
uuucaagggagauaccagg

SEQ ID NO: 2366454 - RNA, 19 nt, Artificial Sequence
  Description of Artificial Sequence: Synthetic oligonucleotide
  Sense strand starting at position 367 of SEQ ID NO: 1885777
ugguaucucccuugaaaca

SEQ ID NO: 2366455 - RNA, 19 nt, Artificial Sequence
  Description of Artificial Sequence: Synthetic oligonucleotide
  Antisense strand to SEQ ID NO: 2366454
uguuucaagggagauacca

SEQ ID NO: 2366456 - RNA, 19 nt, Artificial Sequence
  Description of Artificial Sequence: Synthetic oligonucleotide
  Sense strand starting at position 2220 of SEQ ID NO: 1885777
cuuaucauuuguuugaugu

SEQ ID NO: 2366457 - RNA, 19 nt, Artificial Sequence
  Description of Artificial Sequence: Synthetic oligonucleotide
  Antisense strand to SEQ ID NO: 2366456
acaucaaacaaaugauaag

SEQ ID NO: 2366458 - RNA, 19 nt, Artificial Sequence
  Description of Artificial Sequence: Synthetic oligonucleotide
  Sense strand starting at position 2221 of SEQ ID NO: 1885777
uuaucauuuguuugauguc

SEQ ID NO: 2366459 - RNA, 19 nt, Artificial Sequence
  Description of Artificial Sequence: Synthetic oligonucleotide
  Antisense strand to SEQ ID NO: 2366458
gacaucaaacaaaugauaa

SEQ ID NO: 2366460 - RNA, 19 nt, Artificial Sequence
  Description of Artificial Sequence: Synthetic oligonucleotide
  Sense strand starting at position 2241 of SEQ ID NO: 1885777
gucuccuacccuuagaaug

SEQ ID NO: 2366461 - RNA, 19 nt, Artificial Sequence
  Description of Artificial Sequence: Synthetic oligonucleotide
  Antisense strand to SEQ ID NO: 2366460
cauucuaaggguaggagac

SEQ ID NO: 2366462 - RNA, 19 nt, Artificial Sequence
  Description of Artificial Sequence: Synthetic oligonucleotide
  Sense strand starting at position 2246 of SEQ ID NO: 1885777
cuacccuuagaauguaagu

SEQ ID NO: 2366463 - RNA, 19 nt, Artificial Sequence
  Description of Artificial Sequence: Synthetic oligonucleotide
  Antisense strand to SEQ ID NO: 2366462
acuuacauucuaaggguag

SEQ ID NO: 2366464 - RNA, 19 nt, Artificial Sequence
  Description of Artificial Sequence: Synthetic oligonucleotide
  Sense strand starting at position 2311 of SEQ ID NO: 1885777
gucgaagggucuaagaaga

SEQ ID NO: 2366465 - RNA, 19 nt, Artificial Sequence
  Description of Artificial Sequence: Synthetic oligonucleotide
  Antisense strand to SEQ ID NO: 2366464
ucuucuuagacccuucgac

SEQ ID NO: 2366466 - RNA, 19 nt, Artificial Sequence
  Description of Artificial Sequence: Synthetic oligonucleotide
  Sense strand starting at position 2417 of SEQ ID NO: 1885777
uguguuuccucccuguaaa

SEQ ID NO: 2366467 - RNA, 19 nt, Artificial Sequence
  Description of Artificial Sequence: Synthetic oligonucleotide
  Antisense strand to SEQ ID NO: 2366466
uuuacagggaggaaacaca

SEQ ID NO: 2366468 - RNA, 19 nt, Artificial Sequence
  Description of Artificial Sequence: Synthetic oligonucleotide
  Sense strand starting at position 2418 of SEQ ID NO: 1885777
guguuuccucccuguaaag

SEQ ID NO: 2366469 - RNA, 19 nt, Artificial Sequence
  Description of Artificial Sequence: Synthetic oligonucleotide
  Antisense strand to SEQ ID NO: 2366468
cuuuacagggaggaaacac

SEQ ID NO: 2366470 - RNA, 19 nt, Artificial Sequence
  Description of Artificial Sequence: Synthetic oligonucleotide
  Sense strand starting at position 2420 of SEQ ID NO: 1885777
guuuccucccuguaaagca

SEQ ID NO: 2366471 - RNA, 19 nt, Artificial Sequence
  Description of Artificial Sequence: Synthetic oligonucleotide
  Antisense strand to SEQ ID NO: 2366470
ugcuuuacagggaggaaac

SEQ ID NO: 2366472 - RNA, 19 nt, Artificial Sequence
  Description of Artificial Sequence: Synthetic oligonucleotide
  Sense strand starting at position 2429 of SEQ ID NO: 1885777
cuguaaagcagaugagaua

SEQ ID NO: 2366473 - RNA, 19 nt, Artificial Sequence
  Description of Artificial Sequence: Synthetic oligonucleotide
  Antisense strand to SEQ ID NO: 2366472
uaucucaucugcuuuacag

SEQ ID NO: 2366474 - RNA, 19 nt, Artificial Sequence
  Description of Artificial Sequence: Synthetic oligonucleotide
  Sense strand starting at position 2508 of SEQ ID NO: 1885777
ugguauagugucuauuauu

SEQ ID NO: 2366475 - RNA, 19 nt, Artificial Sequence
  Description of Artificial Sequence: Synthetic oligonucleotide
  Antisense strand to SEQ ID NO: 2366474
aauaauagacacuauacca

SEQ ID NO: 2366476 - RNA, 19 nt, Artificial Sequence
  Description of Artificial Sequence: Synthetic oligonucleotide
  Sense strand starting at position 2722 of SEQ ID NO: 1885777
cuuuauuugccuggaaugu

SEQ ID NO: 2366477 - RNA, 19 nt, Artificial Sequence
  Description of Artificial Sequence: Synthetic oligonucleotide
  Antisense strand to SEQ ID NO: 2366476
acauuccaggcaaauaaag

SEQ ID NO: 2366478 - RNA, 19 nt, Artificial Sequence
  Description of Artificial Sequence: Synthetic oligonucleotide
  Sense strand starting at position 2731 of SEQ ID NO: 1885777
ccuggaaugucucuuucua

SEQ ID NO: 2366479 - RNA, 19 nt, Artificial Sequence
  Description of Artificial Sequence: Synthetic oligonucleotide
  Antisense strand to SEQ ID NO: 2366478
uagaaagagacauuccagg

SEQ ID NO: 2366480 - RNA, 19 nt, Artificial Sequence
  Description of Artificial Sequence: Synthetic oligonucleotide
  Sense strand starting at position 2738 of SEQ ID NO: 1885777
ugucucuuucuaggcuaaa

SEQ ID NO: 2366481 - RNA, 19 nt, Artificial Sequence
  Description of Artificial Sequence: Synthetic oligonucleotide
  Antisense strand to SEQ ID NO: 2366480
uuuagccuagaaagagaca

SEQ ID NO: 2366482 - RNA, 19 nt, Artificial Sequence
  Description of Artificial Sequence: Synthetic oligonucleotide
  Sense strand starting at position 2739 of SEQ ID NO: 1885777
gucucuuucuaggcuaaac

SEQ ID NO: 2366483 - RNA, 19 nt, Artificial Sequence
  Description of Artificial Sequence: Synthetic oligonucleotide
  Antisense strand to SEQ ID NO: 2366482
guuuagccuagaaagagac

SEQ ID NO: 2366484 - RNA, 19 nt, Artificial Sequence
  Description of Artificial Sequence: Synthetic oligonucleotide
  Sense strand starting at position 2967 of SEQ ID NO: 1885777
uccacaccuggcuaagauu

SEQ ID NO: 2366485 - RNA, 19 nt, Artificial Sequence
  Description of Artificial Sequence: Synthetic oligonucleotide
  Antisense strand to SEQ ID NO: 2366484
aaucuuagccaggugugga

SEQ ID NO: 2366486 - RNA, 19 nt, Artificial Sequence
  Description of Artificial Sequence: Synthetic oligonucleotide
  Sense strand starting at position 2970 of SEQ ID NO: 1885777
acaccuggcuaagauuauu

SEQ ID NO: 2366487 - RNA, 19 nt, Artificial Sequence
  Description of Artificial Sequence: Synthetic oligonucleotide
  Antisense strand to SEQ ID NO: 2366486
aauaaucuuagccaggugu

SEQ ID NO: 2366488 - RNA, 19 nt, Artificial Sequence
  Description of Artificial Sequence: Synthetic oligonucleotide
  Sense strand starting at position 3028 of SEQ ID NO: 1885777
ggaucuuauuguuucuguu

SEQ ID NO: 2366489 - RNA, 19 nt, Artificial Sequence
  Description of Artificial Sequence: Synthetic oligonucleotide
  Antisense strand to SEQ ID NO: 2366488
aacagaaacaauaagaucc

SEQ ID NO: 2366490 - RNA, 19 nt, Artificial Sequence
  Description of Artificial Sequence: Synthetic oligonucleotide
  Sense strand starting at position 3032 of SEQ ID NO: 1885777
cuuauuguuucuguuauga

SEQ ID NO: 2366491 - RNA, 19 nt, Artificial Sequence
  Description of Artificial Sequence: Synthetic oligonucleotide
  Antisense strand to SEQ ID NO: 2366490
ucauaacagaaacaauaag

SEQ ID NO: 2366492 - RNA, 19 nt, Artificial Sequence
  Description of Artificial Sequence: Synthetic oligonucleotide
  Sense strand starting at position 3057 of SEQ ID NO: 1885777
cuuucugucuuauuguagu

SEQ ID NO: 2366493 - RNA, 19 nt, Artificial Sequence
  Description of Artificial Sequence: Synthetic oligonucleotide
  Antisense strand to SEQ ID NO: 2366492
acuacaauaagacagaaag

SEQ ID NO: 2366494 - RNA, 19 nt, Artificial Sequence
  Description of Artificial Sequence: Synthetic oligonucleotide
  Sense strand starting at position 3063 of SEQ ID NO: 1885777
gucuuauuguaguuccuuu

SEQ ID NO: 2366495 - RNA, 19 nt, Artificial Sequence
  Description of Artificial Sequence: Synthetic oligonucleotide
  Antisense strand to SEQ ID NO: 2366494
aaaggaacuacaauaagac

SEQ ID NO: 2366496 - RNA, 19 nt, Artificial Sequence
  Description of Artificial Sequence: Synthetic oligonucleotide
  Sense strand starting at position 3210 of SEQ ID NO: 1885777
cagugaguuucuguaucua

SEQ ID NO: 2366497 - RNA, 19 nt, Artificial Sequence
  Description of Artificial Sequence: Synthetic oligonucleotide
  Antisense strand to SEQ ID NO: 2366496
uagauacagaaacucacug

SEQ ID NO: 2366498 - RNA, 19 nt, Artificial Sequence
  Description of Artificial Sequence: Synthetic oligonucleotide
  Sense strand starting at position 3222 of SEQ ID NO: 1885777
guaucuauggcuugauguc

SEQ ID NO: 2366499 - RNA, 19 nt, Artificial Sequence
  Description of Artificial Sequence: Synthetic oligonucleotide
  Antisense strand to SEQ ID NO: 2366498
gacaucaagccauagauac

SEQ ID NO: 2366500 - RNA, 19 nt, Artificial Sequence
  Description of Artificial Sequence: Synthetic oligonucleotide
  Sense strand starting at position 3303 of SEQ ID NO: 1885777
ugcauucccuuguuaaaug

SEQ ID NO: 2366501 - RNA, 19 nt, Artificial Sequence
  Description of Artificial Sequence: Synthetic oligonucleotide
  Antisense strand to SEQ ID NO: 2366500
cauuuaacaagggaaugca

SEQ ID NO: 2366502 - RNA, 19 nt, Artificial Sequence
  Description of Artificial Sequence: Synthetic oligonucleotide
  Sense strand starting at position 3461 of SEQ ID NO: 1885777
ugugucuuauuugcuguua

SEQ ID NO: 2366503 - RNA, 19 nt, Artificial Sequence
  Description of Artificial Sequence: Synthetic oligonucleotide
  Antisense strand to SEQ ID NO: 2366502
uaacagcaaauaagacaca

SEQ ID NO: 2366504 - RNA, 19 nt, Artificial Sequence
  Description of Artificial Sequence: Synthetic oligonucleotide
  Sense strand starting at position 3462 of SEQ ID NO: 1885777
gugucuuauuugcuguuaa

SEQ ID NO: 2366505 - RNA, 19 nt, Artificial Sequence
  Description of Artificial Sequence: Synthetic oligonucleotide
  Antisense strand to SEQ ID NO: 2366504
uuaacagcaaauaagacac

SEQ ID NO: 2366506 - RNA, 19 nt, Artificial Sequence
  Description of Artificial Sequence: Synthetic oligonucleotide
  Sense strand starting at position 3588 of SEQ ID NO: 1885777
ugucauguauucucuugaa

SEQ ID NO: 2366507 - RNA, 19 nt, Artificial Sequence
  Description of Artificial Sequence: Synthetic oligonucleotide
  Antisense strand to SEQ ID NO: 2366506
uucaagagaauacaugaca

SEQ ID NO: 2366508 - RNA, 19 nt, Artificial Sequence
  Description of Artificial Sequence: Synthetic oligonucleotide
  Sense strand starting at position 3646 of SEQ ID NO: 1885777
uccggugucugggucauuu

SEQ ID NO: 2366509 - RNA, 19 nt, Artificial Sequence
  Description of Artificial Sequence: Synthetic oligonucleotide
  Antisense strand to SEQ ID NO: 2366508
aaaugacccagacaccgga

SEQ ID NO: 2366510 - RNA, 19 nt, Artificial Sequence
  Description of Artificial Sequence: Synthetic oligonucleotide
  Sense strand starting at position 3720 of SEQ ID NO: 1885777
uugaaugcugaauauugua

SEQ ID NO: 2366511 - RNA, 19 nt, Artificial Sequence
  Description of Artificial Sequence: Synthetic oligonucleotide
  Antisense strand to SEQ ID NO: 2366510
uacaauauucagcauucaa

SEQ ID NO: 2366512 - RNA, 19 nt, Artificial Sequence
  Description of Artificial Sequence: Synthetic oligonucleotide
  Sense strand starting at position 3725 of SEQ ID NO: 1885777
ugcugaauauuguacauga

SEQ ID NO: 2366513 - RNA, 19 nt, Artificial Sequence
  Description of Artificial Sequence: Synthetic oligonucleotide
  Antisense strand to SEQ ID NO: 2366512
ucauguacaauauucagca

SEQ ID NO: 2366514 - RNA, 19 nt, Artificial Sequence
  Description of Artificial Sequence: Synthetic oligonucleotide
  Sense strand starting at position 3750 of SEQ ID NO: 1885777
guagaagcucuacauuaua

SEQ ID NO: 2366515 - RNA, 19 nt, Artificial Sequence
  Description of Artificial Sequence: Synthetic oligonucleotide
  Antisense strand to SEQ ID NO: 2366514
uauaauguagagcuucuac

SEQ ID NO: 2366516 - RNA, 19 nt, Artificial Sequence
  Description of Artificial Sequence: Synthetic oligonucleotide
  Sense strand starting at position 3849 of SEQ ID NO: 1885777
caugguucccaacguagaa

SEQ ID NO: 2366517 - RNA, 19 nt, Artificial Sequence
  Description of Artificial Sequence: Synthetic oligonucleotide
  Antisense strand to SEQ ID NO: 2366516
uucuacguugggaaccaug

SEQ ID NO: 2366518 - RNA, 19 nt, Artificial Sequence
  Description of Artificial Sequence: Synthetic oligonucleotide
  Sense strand starting at position 3872 of SEQ ID NO: 1885777
guauguuuccuguggcuau

SEQ ID NO: 2366519 - RNA, 19 nt, Artificial Sequence
  Description of Artificial Sequence: Synthetic oligonucleotide
  Antisense strand to SEQ ID NO: 2366518
auagccacaggaaacauac

SEQ ID NO: 2366520 - RNA, 19 nt, Artificial Sequence
  Description of Artificial Sequence: Synthetic oligonucleotide
  Sense strand starting at position 3882 of SEQ ID NO: 1885777
uguggcuauuccuucuuga

SEQ ID NO: 2366521 - RNA, 19 nt, Artificial Sequence
  Description of Artificial Sequence: Synthetic oligonucleotide
  Antisense strand to SEQ ID NO: 2366520
ucaagaaggaauagccaca

SEQ ID NO: 2366522 - RNA, 19 nt, Artificial Sequence
  Description of Artificial Sequence: Synthetic oligonucleotide
  Sense strand starting at position 3896 of SEQ ID NO: 1885777
cuugaugggcccugaaaug

SEQ ID NO: 2366523 - RNA, 19 nt, Artificial Sequence
  Description of Artificial Sequence: Synthetic oligonucleotide
  Antisense strand to SEQ ID NO: 2366522
cauuucagggcccaucaag

SEQ ID NO: 2366524 - RNA, 19 nt, Artificial Sequence
  Description of Artificial Sequence: Synthetic oligonucleotide
  Sense strand starting at position 29 of SEQ ID NO: 1885778
gaauuacgacaauguaugu

SEQ ID NO: 2366525 - RNA, 19 nt, Artificial Sequence
  Description of Artificial Sequence: Synthetic oligonucleotide
  Antisense strand to SEQ ID NO: 2366524
acauacauugucguaauuc

SEQ ID NO: 2366526 - RNA, 19 nt, Artificial Sequence
  Description of Artificial Sequence: Synthetic oligonucleotide
  Sense strand starting at position 34 of SEQ ID NO: 1885778
acgacaauguauguaguua

SEQ ID NO: 2366527 - RNA, 19 nt, Artificial Sequence
  Description of Artificial Sequence: Synthetic oligonucleotide
  Antisense strand to SEQ ID NO: 2366526
uaacuacauacauugucgu

SEQ ID NO: 2366528 - RNA, 19 nt, Artificial Sequence
  Description of Artificial Sequence: Synthetic oligonucleotide
  Sense strand starting at position 35 of SEQ ID NO: 1885778
cgacaauguauguaguuau

SEQ ID NO: 2366529 - RNA, 19 nt, Artificial Sequence
  Description of Artificial Sequence: Synthetic oligonucleotide
  Antisense strand to SEQ ID NO: 2366528
auaacuacauacauugucg

SEQ ID NO: 2366530 - RNA, 19 nt, Artificial Sequence
  Description of Artificial Sequence: Synthetic oligonucleotide
  Sense strand starting at position 61 of SEQ ID NO: 1885778
cuagcaauacacuguguga

SEQ ID NO: 2366531 - RNA, 19 nt, Artificial Sequence
  Description of Artificial Sequence: Synthetic oligonucleotide
  Antisense strand to SEQ ID NO: 2366530
ucacacaguguauugcuag

SEQ ID NO: 2366532 - RNA, 19 nt, Artificial Sequence
  Description of Artificial Sequence: Synthetic oligonucleotide
  Sense strand starting at position 63 of SEQ ID NO: 1885778
agcaauacacugugugauc

SEQ ID NO: 2366533 - RNA, 19 nt, Artificial Sequence
  Description of Artificial Sequence: Synthetic oligonucleotide
  Antisense strand to SEQ ID NO: 2366532
gaucacacaguguauugcu

SEQ ID NO: 2366534 - RNA, 19 nt, Artificial Sequence
  Description of Artificial Sequence: Synthetic oligonucleotide
  Sense strand starting at position 68 of SEQ ID NO: 1885778
uacacugugugaucuugaa

SEQ ID NO: 2366535 - RNA, 19 nt, Artificial Sequence
  Description of Artificial Sequence: Synthetic oligonucleotide
  Antisense strand to SEQ ID NO: 2366534
uucaagaucacacagugua

SEQ ID NO: 2366536 - RNA, 19 nt, Artificial Sequence
  Description of Artificial Sequence: Synthetic oligonucleotide
  Sense strand starting at position 177 of SEQ ID NO: 1885778
guauguaaagcucauagca

SEQ ID NO: 2366537 - RNA, 19 nt, Artificial Sequence
  Description of Artificial Sequence: Synthetic oligonucleotide
  Antisense strand to SEQ ID NO: 2366536
ugcuaugagcuuuacauac

SEQ ID NO: 2366538 - RNA, 19 nt, Artificial Sequence
  Description of Artificial Sequence: Synthetic oligonucleotide
  Sense strand starting at position 217 of SEQ ID NO: 1885778
uggcuauuauucuuaugaa

SEQ ID NO: 2366539 - RNA, 19 nt, Artificial Sequence
  Description of Artificial Sequence: Synthetic oligonucleotide
  Antisense strand to SEQ ID NO: 2366538
uucauaagaauaauagcca

SEQ ID NO: 2366540 - RNA, 19 nt, Artificial Sequence
  Description of Artificial Sequence: Synthetic oligonucleotide
  Sense strand starting at position 237 of SEQ ID NO: 1885778
auuaaaugagguuaugcau

SEQ ID NO: 2366541 - RNA, 19 nt, Artificial Sequence
  Description of Artificial Sequence: Synthetic oligonucleotide
  Antisense strand to SEQ ID NO: 2366540
augcauaaccucauuuaau

SEQ ID NO: 2366542 - RNA, 19 nt, Artificial Sequence
  Description of Artificial Sequence: Synthetic oligonucleotide
  Sense strand starting at position 240 of SEQ ID NO: 1885778
aaaugagguuaugcaugua

SEQ ID NO: 2366543 - RNA, 19 nt, Artificial Sequence
  Description of Artificial Sequence: Synthetic oligonucleotide
  Antisense strand to SEQ ID NO: 2366542
uacaugcauaaccucauuu

SEQ ID NO: 2366544 - RNA, 19 nt, Artificial Sequence
  Description of Artificial Sequence: Synthetic oligonucleotide
  Sense strand starting at position 243 of SEQ ID NO: 1885778
ugagguuaugcauguaaag

SEQ ID NO: 2366545 - RNA, 19 nt, Artificial Sequence
  Description of Artificial Sequence: Synthetic oligonucleotide
  Antisense strand to SEQ ID NO: 2366544
cuuuacaugcauaaccuca

SEQ ID NO: 2366546 - RNA, 19 nt, Artificial Sequence
  Description of Artificial Sequence: Synthetic oligonucleotide
  Sense strand starting at position 245 of SEQ ID NO: 1885778
agguuaugcauguaaagca

SEQ ID NO: 2366547 - RNA, 19 nt, Artificial Sequence
  Description of Artificial Sequence: Synthetic oligonucleotide
  Antisense strand to SEQ ID NO: 2366546
ugcuuuacaugcauaaccu

SEQ ID NO: 2366548 - RNA, 19 nt, Artificial Sequence
  Description of Artificial Sequence: Synthetic oligonucleotide
  Sense strand starting at position 395 of SEQ ID NO: 1885778
ugucauaauuaagucagau

SEQ ID NO: 2366549 - RNA, 19 nt, Artificial Sequence
  Description of Artificial Sequence: Synthetic oligonucleotide
  Antisense strand to SEQ ID NO: 2366548
aucugacuuaauuaugaca

SEQ ID NO: 2366550 - RNA, 19 nt, Artificial Sequence
  Description of Artificial Sequence: Synthetic oligonucleotide
  Sense strand starting at position 1002 of SEQ ID NO: 1885778
cagguugcucuauaacaga

SEQ ID NO: 2366551 - RNA, 19 nt, Artificial Sequence
  Description of Artificial Sequence: Synthetic oligonucleotide
  Antisense strand to SEQ ID NO: 2366550
ucuguuauagagcaaccug

SEQ ID NO: 2366552 - RNA, 19 nt, Artificial Sequence
  Description of Artificial Sequence: Synthetic oligonucleotide
  Sense strand starting at position 1129 of SEQ ID NO: 1885778
gaauuugcuuaaguaugca

SEQ ID NO: 2366553 - RNA, 19 nt, Artificial Sequence
  Description of Artificial Sequence: Synthetic oligonucleotide
  Antisense strand to SEQ ID NO: 2366552
ugcauacuuaagcaaauuc

SEQ ID NO: 2366554 - RNA, 19 nt, Artificial Sequence
  Description of Artificial Sequence: Synthetic oligonucleotide
  Sense strand starting at position 1667 of SEQ ID NO: 1885778
ggaggagaguagucugaau

SEQ ID NO: 2366555 - RNA, 19 nt, Artificial Sequence
  Description of Artificial Sequence: Synthetic oligonucleotide
  Antisense strand to SEQ ID NO: 2366554
auucagacuacucuccucc

SEQ ID NO: 2366556 - RNA, 19 nt, Artificial Sequence
  Description of Artificial Sequence: Synthetic oligonucleotide
  Sense strand starting at position 1669 of SEQ ID NO: 1885778
aggagaguagucugaauug

SEQ ID NO: 2366557 - RNA, 19 nt, Artificial Sequence
  Description of Artificial Sequence: Synthetic oligonucleotide
  Antisense strand to SEQ ID NO: 2366556
caauucagacuacucuccu

SEQ ID NO: 2366558 - RNA, 19 nt, Artificial Sequence
  Description of Artificial Sequence: Synthetic oligonucleotide
  Sense strand starting at position 1674 of SEQ ID NO: 1885778
aguagucugaauuggguua

SEQ ID NO: 2366559 - RNA, 19 nt, Artificial Sequence
  Description of Artificial Sequence: Synthetic oligonucleotide
  Antisense strand to SEQ ID NO: 2366558
uaacccaauucagacuacu

SEQ ID NO: 2366560 - RNA, 19 nt, Artificial Sequence
  Description of Artificial Sequence: Synthetic oligonucleotide
  Sense strand starting at position 1675 of SEQ ID NO: 1885778
guagucugaauuggguuau

SEQ ID NO: 2366561 - RNA, 19 nt, Artificial Sequence
  Description of Artificial Sequence: Synthetic oligonucleotide
  Antisense strand to SEQ ID NO: 2366560
auaacccaauucagacuac

SEQ ID NO: 2366562 - RNA, 19 nt, Artificial Sequence
  Description of Artificial Sequence: Synthetic oligonucleotide
  Sense strand starting at position 2057 of SEQ ID NO: 1885778
cguuuauggugauuuccca

SEQ ID NO: 2366563 - RNA, 19 nt, Artificial Sequence
  Description of Artificial Sequence: Synthetic oligonucleotide
  Antisense strand to SEQ ID NO: 2366562
ugggaaaucaccauaaacg

SEQ ID NO: 2366564 - RNA, 19 nt, Artificial Sequence
  Description of Artificial Sequence: Synthetic oligonucleotide
  Sense strand starting at position 2085 of SEQ ID NO: 1885778
gcgacaugcaaauauugca

SEQ ID NO: 2366565 - RNA, 19 nt, Artificial Sequence
  Description of Artificial Sequence: Synthetic oligonucleotide
  Antisense strand to SEQ ID NO: 2366564
ugcaauauuugcaugucgc

SEQ ID NO: 2366566 - RNA, 19 nt, Artificial Sequence
  Description of Artificial Sequence: Synthetic oligonucleotide
  Sense strand starting at position 2159 of SEQ ID NO: 1885778
ggguguucccgccuaguga

SEQ ID NO: 2366567 - RNA, 19 nt, Artificial Sequence
  Description of Artificial Sequence: Synthetic oligonucleotide
  Antisense strand to SEQ ID NO: 2366566
ucacuaggcgggaacaccc

SEQ ID NO: 2366568 - RNA, 19 nt, Artificial Sequence
  Description of Artificial Sequence: Synthetic oligonucleotide
  Sense strand starting at position 2442 of SEQ ID NO: 1885778
gggauuacauaauugugca

SEQ ID NO: 2366569 - RNA, 19 nt, Artificial Sequence
  Description of Artificial Sequence: Synthetic oligonucleotide
  Antisense strand to SEQ ID NO: 2366568
ugcacaauuauguaauccc

SEQ ID NO: 2366570 - RNA, 19 nt, Artificial Sequence
  Description of Artificial Sequence: Synthetic oligonucleotide
  Sense strand starting at position 2591 of SEQ ID NO: 1885778
ggugaacugugauucacug

SEQ ID NO: 2366571 - RNA, 19 nt, Artificial Sequence
  Description of Artificial Sequence: Synthetic oligonucleotide
  Antisense strand to SEQ ID NO: 2366570
cagugaaucacaguucacc

SEQ ID NO: 2366572 - RNA, 19 nt, Artificial Sequence
  Description of Artificial Sequence: Synthetic oligonucleotide
  Sense strand starting at position 2634 of SEQ ID NO: 1885778
aucccaguuccagagagua

SEQ ID NO: 2366573 - RNA, 19 nt, Artificial Sequence
  Description of Artificial Sequence: Synthetic oligonucleotide
  Antisense strand to SEQ ID NO: 2366572
uacucucuggaacugggau

SEQ ID NO: 2366574 - RNA, 19 nt, Artificial Sequence
  Description of Artificial Sequence: Synthetic oligonucleotide
  Sense strand starting at position 2669 of SEQ ID NO: 1885778
ccuauugagauacgguauu

SEQ ID NO: 2366575 - RNA, 19 nt, Artificial Sequence
  Description of Artificial Sequence: Synthetic oligonucleotide
  Antisense strand to SEQ ID NO: 2366574
aauaccguaucucaauagg

SEQ ID NO: 2366576 - RNA, 19 nt, Artificial Sequence
  Description of Artificial Sequence: Synthetic oligonucleotide
  Sense strand starting at position 2681 of SEQ ID NO: 1885778
cgguauuauguguauaaug

SEQ ID NO: 2366577 - RNA, 19 nt, Artificial Sequence
  Description of Artificial Sequence: Synthetic oligonucleotide
  Antisense strand to SEQ ID NO: 2366576
cauuauacacauaauaccg

SEQ ID NO: 2366578 - RNA, 19 nt, Artificial Sequence
  Description of Artificial Sequence: Synthetic oligonucleotide
  Sense strand starting at position 2711 of SEQ ID NO: 1885778
auaggugcacccuauaaau

SEQ ID NO: 2366579 - RNA, 19 nt, Artificial Sequence
  Description of Artificial Sequence: Synthetic oligonucleotide
  Antisense strand to SEQ ID NO: 2366578
auuuauagggugcaccuau

SEQ ID NO: 2366580 - RNA, 19 nt, Artificial Sequence
  Description of Artificial Sequence: Synthetic oligonucleotide
  Sense strand starting at position 2713 of SEQ ID NO: 1885778
aggugcacccuauaaauua

SEQ ID NO: 2366581 - RNA, 19 nt, Artificial Sequence
  Description of Artificial Sequence: Synthetic oligonucleotide
  Antisense strand to SEQ ID NO: 2366580
uaauuuauagggugcaccu

SEQ ID NO: 2366582 - RNA, 19 nt, Artificial Sequence
  Description of Artificial Sequence: Synthetic oligonucleotide
  Sense strand starting at position 2738 of SEQ ID NO: 1885778
auuguacuucucuagaagu

SEQ ID NO: 2366583 - RNA, 19 nt, Artificial Sequence
  Description of Artificial Sequence: Synthetic oligonucleotide
  Antisense strand to SEQ ID NO: 2366582
acuucuagagaaguacaau

SEQ ID NO: 2366584 - RNA, 19 nt, Artificial Sequence
  Description of Artificial Sequence: Synthetic oligonucleotide
  Sense strand starting at position 2740 of SEQ ID NO: 1885778
uguacuucucuagaaguac

SEQ ID NO: 2366585 - RNA, 19 nt, Artificial Sequence
  Description of Artificial Sequence: Synthetic oligonucleotide
  Antisense strand to SEQ ID NO: 2366584
guacuucuagagaaguaca

SEQ ID NO: 2366586 - RNA, 19 nt, Artificial Sequence
  Description of Artificial Sequence: Synthetic oligonucleotide
  Sense strand starting at position 2746 of SEQ ID NO: 1885778
ucucuagaaguacaguauu

SEQ ID NO: 2366587 - RNA, 19 nt, Artificial Sequence
  Description of Artificial Sequence: Synthetic oligonucleotide
  Antisense strand to SEQ ID NO: 2366586
aauacuguacuucuagaga

SEQ ID NO: 2366588 - RNA, 19 nt, Artificial Sequence
  Description of Artificial Sequence: Synthetic oligonucleotide
  Sense strand starting at position 2749 of SEQ ID NO: 1885778
cuagaaguacaguauugua

SEQ ID NO: 2366589 - RNA, 19 nt, Artificial Sequence
  Description of Artificial Sequence: Synthetic oligonucleotide
  Antisense strand to SEQ ID NO: 2366588
uacaauacuguacuucuag

SEQ ID NO: 2366590 - RNA, 19 nt, Artificial Sequence
  Description of Artificial Sequence: Synthetic oligonucleotide
  Sense strand starting at position 2843 of SEQ ID NO: 1885778
agagcuaggcucuaaauua

SEQ ID NO: 2366591 - RNA, 19 nt, Artificial Sequence
  Description of Artificial Sequence: Synthetic oligonucleotide
  Antisense strand to SEQ ID NO: 2366590
uaauuuagagccuagcucu

SEQ ID NO: 2366592 - RNA, 19 nt, Artificial Sequence
  Description of Artificial Sequence: Synthetic oligonucleotide
  Sense strand starting at position 2851 of SEQ ID NO: 1885778
gcucuaaauuaggcacaga

SEQ ID NO: 2366593 - RNA, 19 nt, Artificial Sequence
  Description of Artificial Sequence: Synthetic oligonucleotide
  Antisense strand to SEQ ID NO: 2366592
ucugugccuaauuuagagc

SEQ ID NO: 2366594 - RNA, 19 nt, Artificial Sequence
  Description of Artificial Sequence: Synthetic oligonucleotide
  Sense strand starting at position 2896 of SEQ ID NO: 1885778
cccauacggccucauguau

SEQ ID NO: 2366595 - RNA, 19 nt, Artificial Sequence
  Description of Artificial Sequence: Synthetic oligonucleotide
  Antisense strand to SEQ ID NO: 2366594
auacaugaggccguauggg

SEQ ID NO: 2366596 - RNA, 19 nt, Artificial Sequence
  Description of Artificial Sequence: Synthetic oligonucleotide
  Sense strand starting at position 2907 of SEQ ID NO: 1885778
ucauguaugagguggguau

SEQ ID NO: 2366597 - RNA, 19 nt, Artificial Sequence
  Description of Artificial Sequence: Synthetic oligonucleotide
  Antisense strand to SEQ ID NO: 2366596
auacccaccucauacauga

SEQ ID NO: 2366598 - RNA, 19 nt, Artificial Sequence
  Description of Artificial Sequence: Synthetic oligonucleotide
  Sense strand starting at position 2908 of SEQ ID NO: 1885778
cauguaugagguggguauu

SEQ ID NO: 2366599 - RNA, 19 nt, Artificial Sequence
  Description of Artificial Sequence: Synthetic oligonucleotide
  Antisense strand to SEQ ID NO: 2366598
aauacccaccucauacaug

SEQ ID NO: 2366600 - RNA, 19 nt, Artificial Sequence
  Description of Artificial Sequence: Synthetic oligonucleotide
  Sense strand starting at position 3032 of SEQ ID NO: 1885778
auagcaauuuaggaagaau

SEQ ID NO: 2366601 - RNA, 19 nt, Artificial Sequence
  Description of Artificial Sequence: Synthetic oligonucleotide
  Antisense strand to SEQ ID NO: 2366600
auucuuccuaaauugcuau

SEQ ID NO: 2366602 - RNA, 19 nt, Artificial Sequence
  Description of Artificial Sequence: Synthetic oligonucleotide
  Sense strand starting at position 3965 of SEQ ID NO: 1885778
cuaucugucuuuccucaga

SEQ ID NO: 2366603 - RNA, 19 nt, Artificial Sequence
  Description of Artificial Sequence: Synthetic oligonucleotide
  Antisense strand to SEQ ID NO: 2366602
ucugaggaaagacagauag

SEQ ID NO: 2366604 - RNA, 19 nt, Artificial Sequence
  Description of Artificial Sequence: Synthetic oligonucleotide
  Sense strand starting at position 65 of SEQ ID NO: 1885780
cgggcagugagccaagauu

SEQ ID NO: 2366605 - RNA, 19 nt, Artificial Sequence
  Description of Artificial Sequence: Synthetic oligonucleotide
  Antisense strand to SEQ ID NO: 2366604
aaucuuggcucacugcccg

SEQ ID NO: 2366606 - RNA, 19 nt, Artificial Sequence
  Description of Artificial Sequence: Synthetic oligonucleotide
  Sense strand starting at position 287 of SEQ ID NO: 1885780
gcacuuauuuaugcuaggu

SEQ ID NO: 2366607 - RNA, 19 nt, Artificial Sequence
  Description of Artificial Sequence: Synthetic oligonucleotide
  Antisense strand to SEQ ID NO: 2366606
accuagcauaaauaagugc

SEQ ID NO: 2366608 - RNA, 19 nt, Artificial Sequence
  Description of Artificial Sequence: Synthetic oligonucleotide
  Sense strand starting at position 518 of SEQ ID NO: 1885780
uacuguuggguguaucaac

SEQ ID NO: 2366609 - RNA, 19 nt, Artificial Sequence
  Description of Artificial Sequence: Synthetic oligonucleotide
  Antisense strand to SEQ ID NO: 2366608
guugauacacccaacagua

SEQ ID NO: 2366610 - RNA, 19 nt, Artificial Sequence
  Description of Artificial Sequence: Synthetic oligonucleotide
  Sense strand starting at position 529 of SEQ ID NO: 1885780
guaucaacuguaugcuaaa

SEQ ID NO: 2366611 - RNA, 19 nt, Artificial Sequence
  Description of Artificial Sequence: Synthetic oligonucleotide
  Antisense strand to SEQ ID NO: 2366610
uuuagcauacaguugauac

SEQ ID NO: 2366612 - RNA, 19 nt, Artificial Sequence
  Description of Artificial Sequence: Synthetic oligonucleotide
  Sense strand starting at position 608 of SEQ ID NO: 1885780
acugacaaguauguccaaa

SEQ ID NO: 2366613 - RNA, 19 nt, Artificial Sequence
  Description of Artificial Sequence: Synthetic oligonucleotide
  Antisense strand to SEQ ID NO: 2366612
uuuggacauacuugucagu

SEQ ID NO: 2366614 - RNA, 19 nt, Artificial Sequence
  Description of Artificial Sequence: Synthetic oligonucleotide
  Sense strand starting at position 758 of SEQ ID NO: 1885780
agcccugagcauuaggaaa

SEQ ID NO: 2366615 - RNA, 19 nt, Artificial Sequence
  Description of Artificial Sequence: Synthetic oligonucleotide
  Antisense strand to SEQ ID NO: 2366614
uuuccuaaugcucagggcu

SEQ ID NO: 2366616 - RNA, 19 nt, Artificial Sequence
  Description of Artificial Sequence: Synthetic oligonucleotide
  Sense strand starting at position 766 of SEQ ID NO: 1885780
gcauuaggaaauugaaguu

SEQ ID NO: 2366617 - RNA, 19 nt, Artificial Sequence
  Description of Artificial Sequence: Synthetic oligonucleotide
  Antisense strand to SEQ ID NO: 2366616
aacuucaauuuccuaaugc

SEQ ID NO: 2366618 - RNA, 19 nt, Artificial Sequence
  Description of Artificial Sequence: Synthetic oligonucleotide
  Sense strand starting at position 863 of SEQ ID NO: 1885780
ugucacuuaacggaauguu

SEQ ID NO: 2366619 - RNA, 19 nt, Artificial Sequence
  Description of Artificial Sequence: Synthetic oligonucleotide
  Antisense strand to SEQ ID NO: 2366618
aacauuccguuaagugaca

SEQ ID NO: 2366620 - RNA, 19 nt, Artificial Sequence
  Description of Artificial Sequence: Synthetic oligonucleotide
  Sense strand starting at position 866 of SEQ ID NO: 1885780
cacuuaacggaauguuaca

SEQ ID NO: 2366621 - RNA, 19 nt, Artificial Sequence
  Description of Artificial Sequence: Synthetic oligonucleotide
  Antisense strand to SEQ ID NO: 2366620
uguaacauuccguuaagug

SEQ ID NO: 2366622 - RNA, 19 nt, Artificial Sequence
  Description of Artificial Sequence: Synthetic oligonucleotide
  Sense strand starting at position 951 of SEQ ID NO: 1885780
aaaugauaugcauguagua

SEQ ID NO: 2366623 - RNA, 19 nt, Artificial Sequence
  Description of Artificial Sequence: Synthetic oligonucleotide
  Antisense strand to SEQ ID NO: 2366622
uacuacaugcauaucauuu

SEQ ID NO: 2366624 - RNA, 19 nt, Artificial Sequence
  Description of Artificial Sequence: Synthetic oligonucleotide
  Sense strand starting at position 963 of SEQ ID NO: 1885780
uguaguaacagguguauuu

SEQ ID NO: 2366625 - RNA, 19 nt, Artificial Sequence
  Description of Artificial Sequence: Synthetic oligonucleotide
  Antisense strand to SEQ ID NO: 2366624
aaauacaccuguuacuaca

SEQ ID NO: 2366626 - RNA, 19 nt, Artificial Sequence
  Description of Artificial Sequence: Synthetic oligonucleotide
  Sense strand starting at position 1301 of SEQ ID NO: 1885780
ugaggacguuacuuagcaa

SEQ ID NO: 2366627 - RNA, 19 nt, Artificial Sequence
  Description of Artificial Sequence: Synthetic oligonucleotide
  Antisense strand to SEQ ID NO: 2366626
uugcuaaguaacguccuca

SEQ ID NO: 2366628 - RNA, 19 nt, Artificial Sequence
  Description of Artificial Sequence: Synthetic oligonucleotide
  Sense strand starting at position 1698 of SEQ ID NO: 1885780
cgagacauucccggguaga

SEQ ID NO: 2366629 - RNA, 19 nt, Artificial Sequence
  Description of Artificial Sequence: Synthetic oligonucleotide
  Antisense strand to SEQ ID NO: 2366628
ucuacccgggaaugucucg

SEQ ID NO: 2366630 - RNA, 19 nt, Artificial Sequence
  Description of Artificial Sequence: Synthetic oligonucleotide
  Sense strand starting at position 1699 of SEQ ID NO: 1885780
gagacauucccggguagag

SEQ ID NO: 2366631 - RNA, 19 nt, Artificial Sequence
  Description of Artificial Sequence: Synthetic oligonucleotide
  Antisense strand to SEQ ID NO: 2366630
cucuacccgggaaugucuc

SEQ ID NO: 2366632 - RNA, 19 nt, Artificial Sequence
  Description of Artificial Sequence: Synthetic oligonucleotide
  Sense strand starting at position 1840 of SEQ ID NO: 1885780
uguucuucuuucccagaga

SEQ ID NO: 2366633 - RNA, 19 nt, Artificial Sequence
  Description of Artificial Sequence: Synthetic oligonucleotide
  Antisense strand to SEQ ID NO: 2366632
ucucugggaaagaagaaca

SEQ ID NO: 2366634 - RNA, 19 nt, Artificial Sequence
  Description of Artificial Sequence: Synthetic oligonucleotide
  Sense strand starting at position 2237 of SEQ ID NO: 1885780
ucugauaugcccugauuau

SEQ ID NO: 2366635 - RNA, 19 nt, Artificial Sequence
  Description of Artificial Sequence: Synthetic oligonucleotide
  Antisense strand to SEQ ID NO: 2366634
auaaucagggcauaucaga

SEQ ID NO: 2366636 - RNA, 19 nt, Artificial Sequence
  Description of Artificial Sequence: Synthetic oligonucleotide
  Sense strand starting at position 2238 of SEQ ID NO: 1885780
cugauaugcccugauuaug

SEQ ID NO: 2366637 - RNA, 19 nt, Artificial Sequence
  Description of Artificial Sequence: Synthetic oligonucleotide
  Antisense strand to SEQ ID NO: 2366636
cauaaucagggcauaucag

SEQ ID NO: 2366638 - RNA, 19 nt, Artificial Sequence
  Description of Artificial Sequence: Synthetic oligonucleotide
  Sense strand starting at position 2246 of SEQ ID NO: 1885780
cccugauuaugaguaauau

SEQ ID NO: 2366639 - RNA, 19 nt, Artificial Sequence
  Description of Artificial Sequence: Synthetic oligonucleotide
  Antisense strand to SEQ ID NO: 2366638
auauuacucauaaucaggg

SEQ ID NO: 2366640 - RNA, 19 nt, Artificial Sequence
  Description of Artificial Sequence: Synthetic oligonucleotide
  Sense strand starting at position 2258 of SEQ ID NO: 1885780
guaauauauguauagcucu

SEQ ID NO: 2366641 - RNA, 19 nt, Artificial Sequence
  Description of Artificial Sequence: Synthetic oligonucleotide
  Antisense strand to SEQ ID NO: 2366640
agagcuauacauauauuac

SEQ ID NO: 2366642 - RNA, 19 nt, Artificial Sequence
  Description of Artificial Sequence: Synthetic oligonucleotide
  Sense strand starting at position 2317 of SEQ ID NO: 1885780
auguuauaacucugagaug

SEQ ID NO: 2366643 - RNA, 19 nt, Artificial Sequence
  Description of Artificial Sequence: Synthetic oligonucleotide
  Antisense strand to SEQ ID NO: 2366642
caucucagaguuauaacau

SEQ ID NO: 2366644 - RNA, 19 nt, Artificial Sequence
  Description of Artificial Sequence: Synthetic oligonucleotide
  Sense strand starting at position 2364 of SEQ ID NO: 1885780
auagcugagucccuuuaua

SEQ ID NO: 2366645 - RNA, 19 nt, Artificial Sequence
  Description of Artificial Sequence: Synthetic oligonucleotide
  Antisense strand to SEQ ID NO: 2366644
uauaaagggacucagcuau

SEQ ID NO: 2366646 - RNA, 19 nt, Artificial Sequence
  Description of Artificial Sequence: Synthetic oligonucleotide
  Sense strand starting at position 2430 of SEQ ID NO: 1885780
acagcugugauguaucaga

SEQ ID NO: 2366647 - RNA, 19 nt, Artificial Sequence
  Description of Artificial Sequence: Synthetic oligonucleotide
  Antisense strand to SEQ ID NO: 2366646
ucugauacaucacagcugu

SEQ ID NO: 2366648 - RNA, 19 nt, Artificial Sequence
  Description of Artificial Sequence: Synthetic oligonucleotide
  Sense strand starting at position 2473 of SEQ ID NO: 1885780
cugacaguagccuaacauu

SEQ ID NO: 2366649 - RNA, 19 nt, Artificial Sequence
  Description of Artificial Sequence: Synthetic oligonucleotide
  Antisense strand to SEQ ID NO: 2366648
aauguuaggcuacugucag

SEQ ID NO: 2366650 - RNA, 19 nt, Artificial Sequence
  Description of Artificial Sequence: Synthetic oligonucleotide
  Sense strand starting at position 2490 of SEQ ID NO: 1885780
uuguuuccucuauaucagu

SEQ ID NO: 2366651 - RNA, 19 nt, Artificial Sequence
  Description of Artificial Sequence: Synthetic oligonucleotide
  Antisense strand to SEQ ID NO: 2366650
acugauauagaggaaacaa

SEQ ID NO: 2366652 - RNA, 19 nt, Artificial Sequence
  Description of Artificial Sequence: Synthetic oligonucleotide
  Sense strand starting at position 3052 of SEQ ID NO: 1885780
acaauacacuguuuggcaa

SEQ ID NO: 2366653 - RNA, 19 nt, Artificial Sequence
  Description of Artificial Sequence: Synthetic oligonucleotide
  Antisense strand to SEQ ID NO: 2366652
uugccaaacaguguauugu

SEQ ID NO: 2366654 - RNA, 19 nt, Artificial Sequence
  Description of Artificial Sequence: Synthetic oligonucleotide
  Sense strand starting at position 3136 of SEQ ID NO: 1885780
ugauguuccuaccuauauu

SEQ ID NO: 2366655 - RNA, 19 nt, Artificial Sequence
  Description of Artificial Sequence: Synthetic oligonucleotide
  Antisense strand to SEQ ID NO: 2366654
aauauagguaggaacauca

SEQ ID NO: 2366656 - RNA, 19 nt, Artificial Sequence
  Description of Artificial Sequence: Synthetic oligonucleotide
  Sense strand starting at position 3167 of SEQ ID NO: 1885780
agcuacugggcauagaaua

SEQ ID NO: 2366657 - RNA, 19 nt, Artificial Sequence
  Description of Artificial Sequence: Synthetic oligonucleotide
  Antisense strand to SEQ ID NO: 2366656
uauucuaugcccaguagcu

SEQ ID NO: 2366658 - RNA, 19 nt, Artificial Sequence
  Description of Artificial Sequence: Synthetic oligonucleotide
  Sense strand starting at position 3175 of SEQ ID NO: 1885780
ggcauagaauauucuggau

SEQ ID NO: 2366659 - RNA, 19 nt, Artificial Sequence
  Description of Artificial Sequence: Synthetic oligonucleotide
  Antisense strand to SEQ ID NO: 2366658
auccagaauauucuaugcc

SEQ ID NO: 2366660 - RNA, 19 nt, Artificial Sequence
  Description of Artificial Sequence: Synthetic oligonucleotide
  Sense strand starting at position 3252 of SEQ ID NO: 1885780
uauucuucuggcugagaua

SEQ ID NO: 2366661 - RNA, 19 nt, Artificial Sequence
  Description of Artificial Sequence: Synthetic oligonucleotide
  Antisense strand to SEQ ID NO: 2366660
uaucucagccagaagaaua

SEQ ID NO: 2366662 - RNA, 19 nt, Artificial Sequence
  Description of Artificial Sequence: Synthetic oligonucleotide
  Sense strand starting at position 3253 of SEQ ID NO: 1885780
auucuucuggcugagauag

SEQ ID NO: 2366663 - RNA, 19 nt, Artificial Sequence
  Description of Artificial Sequence: Synthetic oligonucleotide
  Antisense strand to SEQ ID NO: 2366662
cuaucucagccagaagaau

SEQ ID NO: 2366664 - RNA, 19 nt, Artificial Sequence
  Description of Artificial Sequence: Synthetic oligonucleotide
  Sense strand starting at position 3494 of SEQ ID NO: 1885780
gcuagugauaauugaagca

SEQ ID NO: 2366665 - RNA, 19 nt, Artificial Sequence
  Description of Artificial Sequence: Synthetic oligonucleotide
  Antisense strand to SEQ ID NO: 2366664
ugcuucaauuaucacuagc

SEQ ID NO: 2366666 - RNA, 19 nt, Artificial Sequence
  Description of Artificial Sequence: Synthetic oligonucleotide
  Sense strand starting at position 3645 of SEQ ID NO: 1885780
acucuuguugcugacauua

SEQ ID NO: 2366667 - RNA, 19 nt, Artificial Sequence
  Description of Artificial Sequence: Synthetic oligonucleotide
  Antisense strand to SEQ ID NO: 2366666
uaaugucagcaacaagagu

SEQ ID NO: 2366668 - RNA, 19 nt, Artificial Sequence
  Description of Artificial Sequence: Synthetic oligonucleotide
  Sense strand starting at position 3650 of SEQ ID NO: 1885780
uguugcugacauuauguaa

SEQ ID NO: 2366669 - RNA, 19 nt, Artificial Sequence
  Description of Artificial Sequence: Synthetic oligonucleotide
  Antisense strand to SEQ ID NO: 2366668
uuacauaaugucagcaaca

SEQ ID NO: 2366670 - RNA, 19 nt, Artificial Sequence
  Description of Artificial Sequence: Synthetic oligonucleotide
  Sense strand starting at position 3713 of SEQ ID NO: 1885780
uuacuagaccauuguagga

SEQ ID NO: 2366671 - RNA, 19 nt, Artificial Sequence
  Description of Artificial Sequence: Synthetic oligonucleotide
  Antisense strand to SEQ ID NO: 2366670
uccuacaauggucuaguaa

SEQ ID NO: 2366672 - RNA, 19 nt, Artificial Sequence
  Description of Artificial Sequence: Synthetic oligonucleotide
  Sense strand starting at position 3762 of SEQ ID NO: 1885780
cugauuccuccguggaaua

SEQ ID NO: 2366673 - RNA, 19 nt, Artificial Sequence
  Description of Artificial Sequence: Synthetic oligonucleotide
  Antisense strand to SEQ ID NO: 2366672
uauuccacggaggaaucag

SEQ ID NO: 2366674 - RNA, 19 nt, Artificial Sequence
  Description of Artificial Sequence: Synthetic oligonucleotide
  Sense strand starting at position 3763 of SEQ ID NO: 1885780
ugauuccuccguggaauag

SEQ ID NO: 2366675 - RNA, 19 nt, Artificial Sequence
  Description of Artificial Sequence: Synthetic oligonucleotide
  Antisense strand to SEQ ID NO: 2366674
cuauuccacggaggaauca

SEQ ID NO: 2366676 - RNA, 19 nt, Artificial Sequence
  Description of Artificial Sequence: Synthetic oligonucleotide
  Sense strand starting at position 3764 of SEQ ID NO: 1885780
gauuccuccguggaauaga

SEQ ID NO: 2366677 - RNA, 19 nt, Artificial Sequence
  Description of Artificial Sequence: Synthetic oligonucleotide
  Antisense strand to SEQ ID NO: 2366676
ucuauuccacggaggaauc

SEQ ID NO: 2366678 - RNA, 19 nt, Artificial Sequence
  Description of Artificial Sequence: Synthetic oligonucleotide
  Sense strand starting at position 3821 of SEQ ID NO: 1885780
uuuauuuccuuccaggaag

SEQ ID NO: 2366679 - RNA, 19 nt, Artificial Sequence
  Description of Artificial Sequence: Synthetic oligonucleotide
  Antisense strand to SEQ ID NO: 2366678
cuuccuggaaggaaauaaa

SEQ ID NO: 2366680 - RNA, 19 nt, Artificial Sequence
  Description of Artificial Sequence: Synthetic oligonucleotide
  Sense strand starting at position 3872 of SEQ ID NO: 1885780
uucucaggagucugaaauc

SEQ ID NO: 2366681 - RNA, 19 nt, Artificial Sequence
  Description of Artificial Sequence: Synthetic oligonucleotide
  Antisense strand to SEQ ID NO: 2366680
gauuucagacuccugagaa

SEQ ID NO: 2366682 - RNA, 19 nt, Artificial Sequence
  Description of Artificial Sequence: Synthetic oligonucleotide
  Sense strand starting at position 3884 of SEQ ID NO: 1885780
ugaaaucuccaagggagca

SEQ ID NO: 2366683 - RNA, 19 nt, Artificial Sequence
  Description of Artificial Sequence: Synthetic oligonucleotide
  Antisense strand to SEQ ID NO: 2366682
ugcucccuuggagauuuca

SEQ ID NO: 2366684 - RNA, 19 nt, Artificial Sequence
  Description of Artificial Sequence: Synthetic oligonucleotide
  Sense strand starting at position 46 of SEQ ID NO: 1885779
ucacgaugccgguggaaau

SEQ ID NO: 2366685 - RNA, 19 nt, Artificial Sequence
  Description of Artificial Sequence: Synthetic oligonucleotide
  Antisense strand to SEQ ID NO: 2366684
auuuccaccggcaucguga

SEQ ID NO: 2366686 - RNA, 19 nt, Artificial Sequence
  Description of Artificial Sequence: Synthetic oligonucleotide
  Sense strand starting at position 59 of SEQ ID NO: 1885779
ggaaaugcacuuugagguu

SEQ ID NO: 2366687 - RNA, 19 nt, Artificial Sequence
  Description of Artificial Sequence: Synthetic oligonucleotide
  Antisense strand to SEQ ID NO: 2366686
aaccucaaagugcauuucc

SEQ ID NO: 2366688 - RNA, 19 nt, Artificial Sequence
  Description of Artificial Sequence: Synthetic oligonucleotide
  Sense strand starting at position 158 of SEQ ID NO: 1885779
gggcacugucacugccaaa

SEQ ID NO: 2366689 - RNA, 19 nt, Artificial Sequence
  Description of Artificial Sequence: Synthetic oligonucleotide
  Antisense strand to SEQ ID NO: 2366688
uuuggcagugacagugccc

SEQ ID NO: 2366690 - RNA, 19 nt, Artificial Sequence
  Description of Artificial Sequence: Synthetic oligonucleotide
  Sense strand starting at position 170 of SEQ ID NO: 1885779
ugccaaauacuuuggcaca

SEQ ID NO: 2366691 - RNA, 19 nt, Artificial Sequence
  Description of Artificial Sequence: Synthetic oligonucleotide
  Antisense strand to SEQ ID NO: 2366690
ugugccaaaguauuuggca

SEQ ID NO: 2366692 - RNA, 19 nt, Artificial Sequence
  Description of Artificial Sequence: Synthetic oligonucleotide
  Sense strand starting at position 172 of SEQ ID NO: 1885779
ccaaauacuuuggcacaga

SEQ ID NO: 2366693 - RNA, 19 nt, Artificial Sequence
  Description of Artificial Sequence: Synthetic oligonucleotide
  Antisense strand to SEQ ID NO: 2366692
ucugugccaaaguauuugg

SEQ ID NO: 2366694 - RNA, 19 nt, Artificial Sequence
  Description of Artificial Sequence: Synthetic oligonucleotide
  Sense strand starting at position 549 of SEQ ID NO: 1885779
ggaagaugccagugucuug

SEQ ID NO: 2366695 - RNA, 19 nt, Artificial Sequence
  Description of Artificial Sequence: Synthetic oligonucleotide
  Antisense strand to SEQ ID NO: 2366694
caagacacuggcaucuucc

SEQ ID NO: 2366696 - RNA, 19 nt, Artificial Sequence
  Description of Artificial Sequence: Synthetic oligonucleotide
  Sense strand starting at position 717 of SEQ ID NO: 1885779
cucagucaucugcaucuga

SEQ ID NO: 2366697 - RNA, 19 nt, Artificial Sequence
  Description of Artificial Sequence: Synthetic oligonucleotide
  Antisense strand to SEQ ID NO: 2366696
ucagaugcagaugacugag

SEQ ID NO: 2366698 - RNA, 19 nt, Artificial Sequence
  Description of Artificial Sequence: Synthetic oligonucleotide
  Sense strand starting at position 721 of SEQ ID NO: 1885779
gucaucugcaucugaugga

SEQ ID NO: 2366699 - RNA, 19 nt, Artificial Sequence
  Description of Artificial Sequence: Synthetic oligonucleotide
  Antisense strand to SEQ ID NO: 2366698
uccaucagaugcagaugac

SEQ ID NO: 2366700 - RNA, 19 nt, Artificial Sequence
  Description of Artificial Sequence: Synthetic oligonucleotide
  Sense strand starting at position 757 of SEQ ID NO: 1885779
acccguagcucuuccaaga

SEQ ID NO: 2366701 - RNA, 19 nt, Artificial Sequence
  Description of Artificial Sequence: Synthetic oligonucleotide
  Antisense strand to SEQ ID NO: 2366700
ucuuggaagagcuacgggu

SEQ ID NO: 2366702 - RNA, 19 nt, Artificial Sequence
  Description of Artificial Sequence: Synthetic oligonucleotide
  Sense strand starting at position 848 of SEQ ID NO: 1885779
gggucgauucuggagguaa

SEQ ID NO: 2366703 - RNA, 19 nt, Artificial Sequence
  Description of Artificial Sequence: Synthetic oligonucleotide
  Antisense strand to SEQ ID NO: 2366702
uuaccuccagaaucgaccc

SEQ ID NO: 2366704 - RNA, 19 nt, Artificial Sequence
  Description of Artificial Sequence: Synthetic oligonucleotide
  Sense strand starting at position 849 of SEQ ID NO: 1885779
ggucgauucuggagguaau

SEQ ID NO: 2366705 - RNA, 19 nt, Artificial Sequence
  Description of Artificial Sequence: Synthetic oligonucleotide
  Antisense strand to SEQ ID NO: 2366704
auuaccuccagaaucgacc

SEQ ID NO: 2366706 - RNA, 19 nt, Artificial Sequence
  Description of Artificial Sequence: Synthetic oligonucleotide
  Sense strand starting at position 850 of SEQ ID NO: 1885779
gucgauucuggagguaaug

SEQ ID NO: 2366707 - RNA, 19 nt, Artificial Sequence
  Description of Artificial Sequence: Synthetic oligonucleotide
  Antisense strand to SEQ ID NO: 2366706
cauuaccuccagaaucgac

SEQ ID NO: 2366708 - RNA, 19 nt, Artificial Sequence
  Description of Artificial Sequence: Synthetic oligonucleotide
  Sense strand starting at position 942 of SEQ ID NO: 1885779
caggaaaugcccugaagac

SEQ ID NO: 2366709 - RNA, 19 nt, Artificial Sequence
  Description of Artificial Sequence: Synthetic oligonucleotide
  Antisense strand to SEQ ID NO: 2366708
gucuucagggcauuuccug

SEQ ID NO: 2366710 - RNA, 19 nt, Artificial Sequence
  Description of Artificial Sequence: Synthetic oligonucleotide
  Sense strand starting at position 1039 of SEQ ID NO: 1885779
guguccaugaccugaggau

SEQ ID NO: 2366711 - RNA, 19 nt, Artificial Sequence
  Description of Artificial Sequence: Synthetic oligonucleotide
  Antisense strand to SEQ ID NO: 2366710
auccucaggucauggacac

SEQ ID NO: 2366712 - RNA, 19 nt, Artificial Sequence
  Description of Artificial Sequence: Synthetic oligonucleotide
  Sense strand starting at position 1054 of SEQ ID NO: 1885779
ggauuauugugacccucag

SEQ ID NO: 2366713 - RNA, 19 nt, Artificial Sequence
  Description of Artificial Sequence: Synthetic oligonucleotide
  Antisense strand to SEQ ID NO: 2366712
cugagggucacaauaaucc

SEQ ID NO: 2366714 - RNA, 19 nt, Artificial Sequence
  Description of Artificial Sequence: Synthetic oligonucleotide
  Sense strand starting at position 1177 of SEQ ID NO: 1885779
ucaguugggucagugaauu

SEQ ID NO: 2366715 - RNA, 19 nt, Artificial Sequence
  Description of Artificial Sequence: Synthetic oligonucleotide
  Antisense strand to SEQ ID NO: 2366714
aauucacugacccaacuga

SEQ ID NO: 2366716 - RNA, 19 nt, Artificial Sequence
  Description of Artificial Sequence: Synthetic oligonucleotide
  Sense strand starting at position 1222 of SEQ ID NO: 1885779
gggugauccuccucgcuag

SEQ ID NO: 2366717 - RNA, 19 nt, Artificial Sequence
  Description of Artificial Sequence: Synthetic oligonucleotide
  Antisense strand to SEQ ID NO: 2366716
cuagcgaggaggaucaccc

SEQ ID NO: 2366718 - RNA, 19 nt, Artificial Sequence
  Description of Artificial Sequence: Synthetic oligonucleotide
  Sense strand starting at position 1373 of SEQ ID NO: 1885779
ugcagaagucuagagcuca

SEQ ID NO: 2366719 - RNA, 19 nt, Artificial Sequence
  Description of Artificial Sequence: Synthetic oligonucleotide
  Antisense strand to SEQ ID NO: 2366718
ugagcucuagacuucugca

SEQ ID NO: 2366720 - RNA, 19 nt, Artificial Sequence
  Description of Artificial Sequence: Synthetic oligonucleotide
  Sense strand starting at position 1512 of SEQ ID NO: 1885779
aagcgaguucacggaauag

SEQ ID NO: 2366721 - RNA, 19 nt, Artificial Sequence
  Description of Artificial Sequence: Synthetic oligonucleotide
  Antisense strand to SEQ ID NO: 2366720
cuauuccgugaacucgcuu

SEQ ID NO: 2366722 - RNA, 19 nt, Artificial Sequence
  Description of Artificial Sequence: Synthetic oligonucleotide
  Sense strand starting at position 1544 of SEQ ID NO: 1885779
ggccuacgcagagaaucau

SEQ ID NO: 2366723 - RNA, 19 nt, Artificial Sequence
  Description of Artificial Sequence: Synthetic oligonucleotide
  Antisense strand to SEQ ID NO: 2366722
augauucucugcguaggcc

SEQ ID NO: 2366724 - RNA, 19 nt, Artificial Sequence
  Description of Artificial Sequence: Synthetic oligonucleotide
  Sense strand starting at position 2048 of SEQ ID NO: 1885779
cucagagcucgggagaguu

SEQ ID NO: 2366725 - RNA, 19 nt, Artificial Sequence
  Description of Artificial Sequence: Synthetic oligonucleotide
  Antisense strand to SEQ ID NO: 2366724
aacucucccgagcucugag

SEQ ID NO: 2366726 - RNA, 19 nt, Artificial Sequence
  Description of Artificial Sequence: Synthetic oligonucleotide
  Sense strand starting at position 2060 of SEQ ID NO: 1885779
gagaguuuccggaggcgca

SEQ ID NO: 2366727 - RNA, 19 nt, Artificial Sequence
  Description of Artificial Sequence: Synthetic oligonucleotide
  Antisense strand to SEQ ID NO: 2366726
ugcgccuccggaaacucuc

SEQ ID NO: 2366728 - RNA, 19 nt, Artificial Sequence
  Description of Artificial Sequence: Synthetic oligonucleotide
  Sense strand starting at position 2305 of SEQ ID NO: 1885779
cagagagggucgucugauc

SEQ ID NO: 2366729 - RNA, 19 nt, Artificial Sequence
  Description of Artificial Sequence: Synthetic oligonucleotide
  Antisense strand to SEQ ID NO: 2366728
gaucagacgacccucucug

SEQ ID NO: 2366730 - RNA, 19 nt, Artificial Sequence
  Description of Artificial Sequence: Synthetic oligonucleotide
  Sense strand starting at position 2313 of SEQ ID NO: 1885779
gucgucugaucuccucaga

SEQ ID NO: 2366731 - RNA, 19 nt, Artificial Sequence
  Description of Artificial Sequence: Synthetic oligonucleotide
  Antisense strand to SEQ ID NO: 2366730
ucugaggagaucagacgac

SEQ ID NO: 2366732 - RNA, 19 nt, Artificial Sequence
  Description of Artificial Sequence: Synthetic oligonucleotide
  Sense strand starting at position 2483 of SEQ ID NO: 1885779
gcggcugcaagguagaauu

SEQ ID NO: 2366733 - RNA, 19 nt, Artificial Sequence
  Description of Artificial Sequence: Synthetic oligonucleotide
  Antisense strand to SEQ ID NO: 2366732
aauucuaccuugcagccgc

SEQ ID NO: 2366734 - RNA, 19 nt, Artificial Sequence
  Description of Artificial Sequence: Synthetic oligonucleotide
  Sense strand starting at position 2520 of SEQ ID NO: 1885779
ggacucucugcggaacacu

SEQ ID NO: 2366735 - RNA, 19 nt, Artificial Sequence
  Description of Artificial Sequence: Synthetic oligonucleotide
  Antisense strand to SEQ ID NO: 2366734
aguguuccgcagagagucc

SEQ ID NO: 2366736 - RNA, 19 nt, Artificial Sequence
  Description of Artificial Sequence: Synthetic oligonucleotide
  Sense strand starting at position 2570 of SEQ ID NO: 1885779
ugaauaauagcugaaugca

SEQ ID NO: 2366737 - RNA, 19 nt, Artificial Sequence
  Description of Artificial Sequence: Synthetic oligonucleotide
  Antisense strand to SEQ ID NO: 2366736
ugcauucagcuauuauuca

SEQ ID NO: 2366738 - RNA, 19 nt, Artificial Sequence
  Description of Artificial Sequence: Synthetic oligonucleotide
  Sense strand starting at position 3058 of SEQ ID NO: 1885779
gaccacaaguccuugguuu

SEQ ID NO: 2366739 - RNA, 19 nt, Artificial Sequence
  Description of Artificial Sequence: Synthetic oligonucleotide
  Antisense strand to SEQ ID NO: 2366738
aaaccaaggacuugugguc

SEQ ID NO: 2366740 - RNA, 19 nt, Artificial Sequence
  Description of Artificial Sequence: Synthetic oligonucleotide
  Sense strand starting at position 3148 of SEQ ID NO: 1885779
cugagacaugguggucagu

SEQ ID NO: 2366741 - RNA, 19 nt, Artificial Sequence
  Description of Artificial Sequence: Synthetic oligonucleotide
  Antisense strand to SEQ ID NO: 2366740
acugaccaccaugucucag

SEQ ID NO: 2366742 - RNA, 19 nt, Artificial Sequence
  Description of Artificial Sequence: Synthetic oligonucleotide
  Sense strand starting at position 3150 of SEQ ID NO: 1885779
gagacaugguggucaguca

SEQ ID NO: 2366743 - RNA, 19 nt, Artificial Sequence
  Description of Artificial Sequence: Synthetic oligonucleotide
  Antisense strand to SEQ ID NO: 2366742
ugacugaccaccaugucuc

SEQ ID NO: 2366744 - RNA, 19 nt, Artificial Sequence
  Description of Artificial Sequence: Synthetic oligonucleotide
  Sense strand starting at position 3162 of SEQ ID NO: 1885779
ucagucacaccauguuaua

SEQ ID NO: 2366745 - RNA, 19 nt, Artificial Sequence
  Description of Artificial Sequence: Synthetic oligonucleotide
  Antisense strand to SEQ ID NO: 2366744
uauaacauggugugacuga

SEQ ID NO: 2366746 - RNA, 19 nt, Artificial Sequence
  Description of Artificial Sequence: Synthetic oligonucleotide
  Sense strand starting at position 3759 of SEQ ID NO: 1885779
auauguacaugugagauuu

SEQ ID NO: 2366747 - RNA, 19 nt, Artificial Sequence
  Description of Artificial Sequence: Synthetic oligonucleotide
  Antisense strand to SEQ ID NO: 2366746
aaaucucacauguacauau

SEQ ID NO: 2366748 - RNA, 19 nt, Artificial Sequence
  Description of Artificial Sequence: Synthetic oligonucleotide
  Sense strand starting at position 3817 of SEQ ID NO: 1885779
uuuacauugucaguagcaa

SEQ ID NO: 2366749 - RNA, 19 nt, Artificial Sequence
  Description of Artificial Sequence: Synthetic oligonucleotide
  Antisense strand to SEQ ID NO: 2366748
uugcuacugacaauguaaa

SEQ ID NO: 2366750 - RNA, 19 nt, Artificial Sequence
  Description of Artificial Sequence: Synthetic oligonucleotide
  Sense strand starting at position 3818 of SEQ ID NO: 1885779
uuacauugucaguagcaaa

SEQ ID NO: 2366751 - RNA, 19 nt, Artificial Sequence
  Description of Artificial Sequence: Synthetic oligonucleotide
  Antisense strand to SEQ ID NO: 2366750
uuugcuacugacaauguaa

SEQ ID NO: 2366752 - RNA, 19 nt, Artificial Sequence
  Description of Artificial Sequence: Synthetic oligonucleotide
  Sense strand starting at position 3903 of SEQ ID NO: 1885779
cuuauuaauuucugaggua

SEQ ID NO: 2366753 - RNA, 19 nt, Artificial Sequence
  Description of Artificial Sequence: Synthetic oligonucleotide
  Antisense strand to SEQ ID NO: 2366752
uaccucagaaauuaauaag

SEQ ID NO: 2366754 - RNA, 19 nt, Artificial Sequence
  Description of Artificial Sequence: Synthetic oligonucleotide
  Sense strand starting at position 3906 of SEQ ID NO: 1885779
auuaauuucugagguaaga

SEQ ID NO: 2366755 - RNA, 19 nt, Artificial Sequence
  Description of Artificial Sequence: Synthetic oligonucleotide
  Antisense strand to SEQ ID NO: 2366754
ucuuaccucagaaauuaau

SEQ ID NO: 2366756 - RNA, 19 nt, Artificial Sequence
  Description of Artificial Sequence: Synthetic oligonucleotide
  Sense strand starting at position 3917 of SEQ ID NO: 1885779
agguaagauauuggcuaau

SEQ ID NO: 2366757 - RNA, 19 nt, Artificial Sequence
  Description of Artificial Sequence: Synthetic oligonucleotide
  Antisense strand to SEQ ID NO: 2366756
auuagccaauaucuuaccu

SEQ ID NO: 2366758 - RNA, 19 nt, Artificial Sequence
  Description of Artificial Sequence: Synthetic oligonucleotide
  Sense strand starting at position 3919 of SEQ ID NO: 1885779
guaagauauuggcuaauau

SEQ ID NO: 2366759 - RNA, 19 nt, Artificial Sequence
  Description of Artificial Sequence: Synthetic oligonucleotide
  Antisense strand to SEQ ID NO: 2366758
auauuagccaauaucuuac

SEQ ID NO: 2366760 - RNA, 19 nt, Artificial Sequence
  Description of Artificial Sequence: Synthetic oligonucleotide
  Sense strand starting at position 3928 of SEQ ID NO: 1885779
uggcuaauaucagcagcau

SEQ ID NO: 2366761 - RNA, 19 nt, Artificial Sequence
  Description of Artificial Sequence: Synthetic oligonucleotide
  Antisense strand to SEQ ID NO: 2366760
augcugcugauauuagcca

SEQ ID NO: 2366762 - RNA, 19 nt, Artificial Sequence
  Description of Artificial Sequence: Synthetic oligonucleotide
  Sense strand starting at position 3929 of SEQ ID NO: 1885779
ggcuaauaucagcagcaua

SEQ ID NO: 2366763 - RNA, 19 nt, Artificial Sequence
  Description of Artificial Sequence: Synthetic oligonucleotide
  Antisense strand to SEQ ID NO: 2366762
uaugcugcugauauuagcc

SEQ ID NO: 2366764 - RNA, 19 nt, Artificial Sequence
  Description of Artificial Sequence: Synthetic oligonucleotide
  Sense strand starting at position 49 of SEQ ID NO: 1885781
cugucucuucuccaaugga

SEQ ID NO: 2366765 - RNA, 19 nt, Artificial Sequence
  Description of Artificial Sequence: Synthetic oligonucleotide
  Antisense strand to SEQ ID NO: 2366764
uccauuggagaagagacag

SEQ ID NO: 2366766 - RNA, 19 nt, Artificial Sequence
  Description of Artificial Sequence: Synthetic oligonucleotide
  Sense strand starting at position 52 of SEQ ID NO: 1885781
ucucuucuccaauggaguu

SEQ ID NO: 2366767 - RNA, 19 nt, Artificial Sequence
  Description of Artificial Sequence: Synthetic oligonucleotide
  Antisense strand to SEQ ID NO: 2366766
aacuccauuggagaagaga

SEQ ID NO: 2366768 - RNA, 19 nt, Artificial Sequence
  Description of Artificial Sequence: Synthetic oligonucleotide
  Sense strand starting at position 112 of SEQ ID NO: 1885781
cccaguucucagcagauag

SEQ ID NO: 2366769 - RNA, 19 nt, Artificial Sequence
  Description of Artificial Sequence: Synthetic oligonucleotide
  Antisense strand to SEQ ID NO: 2366768
cuaucugcugagaacuggg

SEQ ID NO: 2366770 - RNA, 19 nt, Artificial Sequence
  Description of Artificial Sequence: Synthetic oligonucleotide
  Sense strand starting at position 376 of SEQ ID NO: 1885781
acuuaagcuuaccugaagu

SEQ ID NO: 2366771 - RNA, 19 nt, Artificial Sequence
  Description of Artificial Sequence: Synthetic oligonucleotide
  Antisense strand to SEQ ID NO: 2366770
acuucagguaagcuuaagu

SEQ ID NO: 2366772 - RNA, 19 nt, Artificial Sequence
  Description of Artificial Sequence: Synthetic oligonucleotide
  Sense strand starting at position 414 of SEQ ID NO: 1885781
aaguaugguuaggugauau

SEQ ID NO: 2366773 - RNA, 19 nt, Artificial Sequence
  Description of Artificial Sequence: Synthetic oligonucleotide
  Antisense strand to SEQ ID NO: 2366772
auaucaccuaaccauacuu

SEQ ID NO: 2366774 - RNA, 19 nt, Artificial Sequence
  Description of Artificial Sequence: Synthetic oligonucleotide
  Sense strand starting at position 424 of SEQ ID NO: 1885781
aggugauauuggguacucu

SEQ ID NO: 2366775 - RNA, 19 nt, Artificial Sequence
  Description of Artificial Sequence: Synthetic oligonucleotide
  Antisense strand to SEQ ID NO: 2366774
agaguacccaauaucaccu

SEQ ID NO: 2366776 - RNA, 19 nt, Artificial Sequence
  Description of Artificial Sequence: Synthetic oligonucleotide
  Sense strand starting at position 602 of SEQ ID NO: 1885781
gcuaacuuagaagaucagu

SEQ ID NO: 2366777 - RNA, 19 nt, Artificial Sequence
  Description of Artificial Sequence: Synthetic oligonucleotide
  Antisense strand to SEQ ID NO: 2366776
acugaucuucuaaguuagc

SEQ ID NO: 2366778 - RNA, 19 nt, Artificial Sequence
  Description of Artificial Sequence: Synthetic oligonucleotide
  Sense strand starting at position 650 of SEQ ID NO: 1885781
aguagaaacacucguggau

SEQ ID NO: 2366779 - RNA, 19 nt, Artificial Sequence
  Description of Artificial Sequence: Synthetic oligonucleotide
  Antisense strand to SEQ ID NO: 2366778
auccacgaguguuucuacu

SEQ ID NO: 2366780 - RNA, 19 nt, Artificial Sequence
  Description of Artificial Sequence: Synthetic oligonucleotide
  Sense strand starting at position 653 of SEQ ID NO: 1885781
agaaacacucguggauuaa

SEQ ID NO: 2366781 - RNA, 19 nt, Artificial Sequence
  Description of Artificial Sequence: Synthetic oligonucleotide
  Antisense strand to SEQ ID NO: 2366780
uuaauccacgaguguuucu

SEQ ID NO: 2366782 - RNA, 19 nt, Artificial Sequence
  Description of Artificial Sequence: Synthetic oligonucleotide
  Sense strand starting at position 766 of SEQ ID NO: 1885781
guagaaacauucuuuggug

SEQ ID NO: 2366783 - RNA, 19 nt, Artificial Sequence
  Description of Artificial Sequence: Synthetic oligonucleotide
  Antisense strand to SEQ ID NO: 2366782
caccaaagaauguuucuac

SEQ ID NO: 2366784 - RNA, 19 nt, Artificial Sequence
  Description of Artificial Sequence: Synthetic oligonucleotide
  Sense strand starting at position 818 of SEQ ID NO: 1885781
gguuuaagaccugagcuga

SEQ ID NO: 2366785 - RNA, 19 nt, Artificial Sequence
  Description of Artificial Sequence: Synthetic oligonucleotide
  Antisense strand to SEQ ID NO: 2366784
ucagcucaggucuuaaacc

SEQ ID NO: 2366786 - RNA, 19 nt, Artificial Sequence
  Description of Artificial Sequence: Synthetic oligonucleotide
  Sense strand starting at position 833 of SEQ ID NO: 1885781
cugauaugcaugugggaua

SEQ ID NO: 2366787 - RNA, 19 nt, Artificial Sequence
  Description of Artificial Sequence: Synthetic oligonucleotide
  Antisense strand to SEQ ID NO: 2366786
uaucccacaugcauaucag

SEQ ID NO: 2366788 - RNA, 19 nt, Artificial Sequence
  Description of Artificial Sequence: Synthetic oligonucleotide
  Sense strand starting at position 893 of SEQ ID NO: 1885781
gacauaagccauuaagugu

SEQ ID NO: 2366789 - RNA, 19 nt, Artificial Sequence
  Description of Artificial Sequence: Synthetic oligonucleotide
  Antisense strand to SEQ ID NO: 2366788
acacuuaauggcuuauguc

SEQ ID NO: 2366790 - RNA, 19 nt, Artificial Sequence
  Description of Artificial Sequence: Synthetic oligonucleotide
  Sense strand starting at position 908 of SEQ ID NO: 1885781
gugucaggauucuuaaaga

SEQ ID NO: 2366791 - RNA, 19 nt, Artificial Sequence
  Description of Artificial Sequence: Synthetic oligonucleotide
  Antisense strand to SEQ ID NO: 2366790
ucuuuaagaauccugacac

SEQ ID NO: 2366792 - RNA, 19 nt, Artificial Sequence
  Description of Artificial Sequence: Synthetic oligonucleotide
  Sense strand starting at position 1115 of SEQ ID NO: 1885781
uaauuugaguugccaguuu

SEQ ID NO: 2366793 - RNA, 19 nt, Artificial Sequence
  Description of Artificial Sequence: Synthetic oligonucleotide
  Antisense strand to SEQ ID NO: 2366792
aaacuggcaacucaaauua

SEQ ID NO: 2366794 - RNA, 19 nt, Artificial Sequence
  Description of Artificial Sequence: Synthetic oligonucleotide
  Sense strand starting at position 1392 of SEQ ID NO: 1885781
cauguaugagggugagaug

SEQ ID NO: 2366795 - RNA, 19 nt, Artificial Sequence
  Description of Artificial Sequence: Synthetic oligonucleotide
  Antisense strand to SEQ ID NO: 2366794
caucucacccucauacaug

SEQ ID NO: 2366796 - RNA, 19 nt, Artificial Sequence
  Description of Artificial Sequence: Synthetic oligonucleotide
  Sense strand starting at position 1444 of SEQ ID NO: 1885781
ccuuuaaaucaaggaggua

SEQ ID NO: 2366797 - RNA, 19 nt, Artificial Sequence
  Description of Artificial Sequence: Synthetic oligonucleotide
  Antisense strand to SEQ ID NO: 2366796
uaccuccuugauuuaaagg

SEQ ID NO: 2366798 - RNA, 19 nt, Artificial Sequence
  Description of Artificial Sequence: Synthetic oligonucleotide
  Sense strand starting at position 1477 of SEQ ID NO: 1885781
agcauuagcucuguauuua

SEQ ID NO: 2366799 - RNA, 19 nt, Artificial Sequence
  Description of Artificial Sequence: Synthetic oligonucleotide
  Antisense strand to SEQ ID NO: 2366798
uaaauacagagcuaaugcu

SEQ ID NO: 2366800 - RNA, 19 nt, Artificial Sequence
  Description of Artificial Sequence: Synthetic oligonucleotide
  Sense strand starting at position 1478 of SEQ ID NO: 1885781
gcauuagcucuguauuuau

SEQ ID NO: 2366801 - RNA, 19 nt, Artificial Sequence
  Description of Artificial Sequence: Synthetic oligonucleotide
  Antisense strand to SEQ ID NO: 2366800
auaaauacagagcuaaugc

SEQ ID NO: 2366802 - RNA, 19 nt, Artificial Sequence
  Description of Artificial Sequence: Synthetic oligonucleotide
  Sense strand starting at position 1502 of SEQ ID NO: 1885781
augccuuggagaugaaagu

SEQ ID NO: 2366803 - RNA, 19 nt, Artificial Sequence
  Description of Artificial Sequence: Synthetic oligonucleotide
  Antisense strand to SEQ ID NO: 2366802
acuuucaucuccaaggcau

SEQ ID NO: 2366804 - RNA, 19 nt, Artificial Sequence
  Description of Artificial Sequence: Synthetic oligonucleotide
  Sense strand starting at position 1557 of SEQ ID NO: 1885781
agaucaacaugccuuagua

SEQ ID NO: 2366805 - RNA, 19 nt, Artificial Sequence
  Description of Artificial Sequence: Synthetic oligonucleotide
  Antisense strand to SEQ ID NO: 2366804
uacuaaggcauguugaucu

SEQ ID NO: 2366806 - RNA, 19 nt, Artificial Sequence
  Description of Artificial Sequence: Synthetic oligonucleotide
  Sense strand starting at position 1565 of SEQ ID NO: 1885781
augccuuaguaucuaugaa

SEQ ID NO: 2366807 - RNA, 19 nt, Artificial Sequence
  Description of Artificial Sequence: Synthetic oligonucleotide
  Antisense strand to SEQ ID NO: 2366806
uucauagauacuaaggcau

SEQ ID NO: 2366808 - RNA, 19 nt, Artificial Sequence
  Description of Artificial Sequence: Synthetic oligonucleotide
  Sense strand starting at position 1618 of SEQ ID NO: 1885781
uucagauauguguggugaa

SEQ ID NO: 2366809 - RNA, 19 nt, Artificial Sequence
  Description of Artificial Sequence: Synthetic oligonucleotide
  Antisense strand to SEQ ID NO: 2366808
uucaccacacauaucugaa

SEQ ID NO: 2366810 - RNA, 19 nt, Artificial Sequence
  Description of Artificial Sequence: Synthetic oligonucleotide
  Sense strand starting at position 1643 of SEQ ID NO: 1885781
cuaugcauugcagauguua

SEQ ID NO: 2366811 - RNA, 19 nt, Artificial Sequence
  Description of Artificial Sequence: Synthetic oligonucleotide
  Antisense strand to SEQ ID NO: 2366810
uaacaucugcaaugcauag

SEQ ID NO: 2366812 - RNA, 19 nt, Artificial Sequence
  Description of Artificial Sequence: Synthetic oligonucleotide
  Sense strand starting at position 1856 of SEQ ID NO: 1885781
aguauaucuccugauuccu

SEQ ID NO: 2366813 - RNA, 19 nt, Artificial Sequence
  Description of Artificial Sequence: Synthetic oligonucleotide
  Antisense strand to SEQ ID NO: 2366812
aggaaucaggagauauacu

SEQ ID NO: 2366814 - RNA, 19 nt, Artificial Sequence
  Description of Artificial Sequence: Synthetic oligonucleotide
  Sense strand starting at position 2015 of SEQ ID NO: 1885781
aaaucagucugguugaaga

SEQ ID NO: 2366815 - RNA, 19 nt, Artificial Sequence
  Description of Artificial Sequence: Synthetic oligonucleotide
  Antisense strand to SEQ ID NO: 2366814
ucuucaaccagacugauuu

SEQ ID NO: 2366816 - RNA, 19 nt, Artificial Sequence
  Description of Artificial Sequence: Synthetic oligonucleotide
  Sense strand starting at position 2017 of SEQ ID NO: 1885781
aucagucugguugaagauu

SEQ ID NO: 2366817 - RNA, 19 nt, Artificial Sequence
  Description of Artificial Sequence: Synthetic oligonucleotide
  Antisense strand to SEQ ID NO: 2366816
aaucuucaaccagacugau

SEQ ID NO: 2366818 - RNA, 19 nt, Artificial Sequence
  Description of Artificial Sequence: Synthetic oligonucleotide
  Sense strand starting at position 2386 of SEQ ID NO: 1885781
ggaugcucaacaugauuga

SEQ ID NO: 2366819 - RNA, 19 nt, Artificial Sequence
  Description of Artificial Sequence: Synthetic oligonucleotide
  Antisense strand to SEQ ID NO: 2366818
ucaaucauguugagcaucc

SEQ ID NO: 2366820 - RNA, 19 nt, Artificial Sequence
  Description of Artificial Sequence: Synthetic oligonucleotide
  Sense strand starting at position 2390 of SEQ ID NO: 1885781
gcucaacaugauugacuua

SEQ ID NO: 2366821 - RNA, 19 nt, Artificial Sequence
  Description of Artificial Sequence: Synthetic oligonucleotide
  Antisense strand to SEQ ID NO: 2366820
uaagucaaucauguugagc

SEQ ID NO: 2366822 - RNA, 19 nt, Artificial Sequence
  Description of Artificial Sequence: Synthetic oligonucleotide
  Sense strand starting at position 2456 of SEQ ID NO: 1885781
gaaauuccuguuggaguag

SEQ ID NO: 2366823 - RNA, 19 nt, Artificial Sequence
  Description of Artificial Sequence: Synthetic oligonucleotide
  Antisense strand to SEQ ID NO: 2366822
cuacuccaacaggaauuuc

SEQ ID NO: 2366824 - RNA, 19 nt, Artificial Sequence
  Description of Artificial Sequence: Synthetic oligonucleotide
  Sense strand starting at position 2535 of SEQ ID NO: 1885781
guugaaaucuaccugaguu

SEQ ID NO: 2366825 - RNA, 19 nt, Artificial Sequence
  Description of Artificial Sequence: Synthetic oligonucleotide
  Antisense strand to SEQ ID NO: 2366824
aacucagguagauuucaac

SEQ ID NO: 2366826 - RNA, 19 nt, Artificial Sequence
  Description of Artificial Sequence: Synthetic oligonucleotide
  Sense strand starting at position 2599 of SEQ ID NO: 1885781
augagaaugccucauucuc

SEQ ID NO: 2366827 - RNA, 19 nt, Artificial Sequence
  Description of Artificial Sequence: Synthetic oligonucleotide
  Antisense strand to SEQ ID NO: 2366826
gagaaugaggcauucucau

SEQ ID NO: 2366828 - RNA, 19 nt, Artificial Sequence
  Description of Artificial Sequence: Synthetic oligonucleotide
  Sense strand starting at position 2694 of SEQ ID NO: 1885781
guaagauguuccuuccaac

SEQ ID NO: 2366829 - RNA, 19 nt, Artificial Sequence
  Description of Artificial Sequence: Synthetic oligonucleotide
  Antisense strand to SEQ ID NO: 2366828
guuggaaggaacaucuuac

SEQ ID NO: 2366830 - RNA, 19 nt, Artificial Sequence
  Description of Artificial Sequence: Synthetic oligonucleotide
  Sense strand starting at position 2797 of SEQ ID NO: 1885781
gaguuaauuuguuugcuga

SEQ ID NO: 2366831 - RNA, 19 nt, Artificial Sequence
  Description of Artificial Sequence: Synthetic oligonucleotide
  Antisense strand to SEQ ID NO: 2366830
ucagcaaacaaauuaacuc

SEQ ID NO: 2366832 - RNA, 19 nt, Artificial Sequence
  Description of Artificial Sequence: Synthetic oligonucleotide
  Sense strand starting at position 2798 of SEQ ID NO: 1885781
aguuaauuuguuugcugau

SEQ ID NO: 2366833 - RNA, 19 nt, Artificial Sequence
  Description of Artificial Sequence: Synthetic oligonucleotide
  Antisense strand to SEQ ID NO: 2366832
aucagcaaacaaauuaacu

SEQ ID NO: 2366834 - RNA, 19 nt, Artificial Sequence
  Description of Artificial Sequence: Synthetic oligonucleotide
  Sense strand starting at position 2799 of SEQ ID NO: 1885781
guuaauuuguuugcugaua

SEQ ID NO: 2366835 - RNA, 19 nt, Artificial Sequence
  Description of Artificial Sequence: Synthetic oligonucleotide
  Antisense strand to SEQ ID NO: 2366834
uaucagcaaacaaauuaac

SEQ ID NO: 2366836 - RNA, 19 nt, Artificial Sequence
  Description of Artificial Sequence: Synthetic oligonucleotide
  Sense strand starting at position 3042 of SEQ ID NO: 1885781
ccuggauguucccucaaac

SEQ ID NO: 2366837 - RNA, 19 nt, Artificial Sequence
  Description of Artificial Sequence: Synthetic oligonucleotide
  Antisense strand to SEQ ID NO: 2366836
guuugagggaacauccagg

SEQ ID NO: 2366838 - RNA, 19 nt, Artificial Sequence
  Description of Artificial Sequence: Synthetic oligonucleotide
  Sense strand starting at position 3131 of SEQ ID NO: 1885781
aaaggagccuucucggauu

SEQ ID NO: 2366839 - RNA, 19 nt, Artificial Sequence
  Description of Artificial Sequence: Synthetic oligonucleotide
  Antisense strand to SEQ ID NO: 2366838
aauccgagaaggcuccuuu

SEQ ID NO: 2366840 - RNA, 19 nt, Artificial Sequence
  Description of Artificial Sequence: Synthetic oligonucleotide
  Sense strand starting at position 3133 of SEQ ID NO: 1885781
aggagccuucucggauuga

SEQ ID NO: 2366841 - RNA, 19 nt, Artificial Sequence
  Description of Artificial Sequence: Synthetic oligonucleotide
  Antisense strand to SEQ ID NO: 2366840
ucaauccgagaaggcuccu

SEQ ID NO: 2366842 - RNA, 19 nt, Artificial Sequence
  Description of Artificial Sequence: Synthetic oligonucleotide
  Sense strand starting at position 3365 of SEQ ID NO: 1885781
ccacguuaaaucgugucuu

SEQ ID NO: 2366843 - RNA, 19 nt, Artificial Sequence
  Description of Artificial Sequence: Synthetic oligonucleotide
  Antisense strand to SEQ ID NO: 2366842
aagacacgauuuaacgugg

SEQ ID NO: 2366844 - RNA, 19 nt, Artificial Sequence
  Description of Artificial Sequence: Synthetic oligonucleotide
  Sense strand starting at position 35 of SEQ ID NO: 1885782
ucagaaguuccugaguacu

SEQ ID NO: 2366845 - RNA, 19 nt, Artificial Sequence
  Description of Artificial Sequence: Synthetic oligonucleotide
  Antisense strand to SEQ ID NO: 2366844
aguacucaggaacuucuga

SEQ ID NO: 2366846 - RNA, 19 nt, Artificial Sequence
  Description of Artificial Sequence: Synthetic oligonucleotide
  Sense strand starting at position 37 of SEQ ID NO: 1885782
agaaguuccugaguacuuc

SEQ ID NO: 2366847 - RNA, 19 nt, Artificial Sequence
  Description of Artificial Sequence: Synthetic oligonucleotide
  Antisense strand to SEQ ID NO: 2366846
gaaguacucaggaacuucu

SEQ ID NO: 2366848 - RNA, 19 nt, Artificial Sequence
  Description of Artificial Sequence: Synthetic oligonucleotide
  Sense strand starting at position 144 of SEQ ID NO: 1885782
gucauagaugcagacugau

SEQ ID NO: 2366849 - RNA, 19 nt, Artificial Sequence
  Description of Artificial Sequence: Synthetic oligonucleotide
  Antisense strand to SEQ ID NO: 2366848
aucagucugcaucuaugac

SEQ ID NO: 2366850 - RNA, 19 nt, Artificial Sequence
  Description of Artificial Sequence: Synthetic oligonucleotide
  Sense strand starting at position 259 of SEQ ID NO: 1885782
ugauacuuuggacgaagua

SEQ ID NO: 2366851 - RNA, 19 nt, Artificial Sequence
  Description of Artificial Sequence: Synthetic oligonucleotide
  Antisense strand to SEQ ID NO: 2366850
uacuucguccaaaguauca

SEQ ID NO: 2366852 - RNA, 19 nt, Artificial Sequence
  Description of Artificial Sequence: Synthetic oligonucleotide
  Sense strand starting at position 298 of SEQ ID NO: 1885782
gcuucuuaagaucacugau

SEQ ID NO: 2366853 - RNA, 19 nt, Artificial Sequence
  Description of Artificial Sequence: Synthetic oligonucleotide
  Antisense strand to SEQ ID NO: 2366852
aucagugaucuuaagaagc

SEQ ID NO: 2366854 - RNA, 19 nt, Artificial Sequence
  Description of Artificial Sequence: Synthetic oligonucleotide
  Sense strand starting at position 300 of SEQ ID NO: 1885782
uucuuaagaucacugaugu

SEQ ID NO: 2366855 - RNA, 19 nt, Artificial Sequence
  Description of Artificial Sequence: Synthetic oligonucleotide
  Antisense strand to SEQ ID NO: 2366854
acaucagugaucuuaagaa

SEQ ID NO: 2366856 - RNA, 19 nt, Artificial Sequence
  Description of Artificial Sequence: Synthetic oligonucleotide
  Sense strand starting at position 301 of SEQ ID NO: 1885782
ucuuaagaucacugauguu

SEQ ID NO: 2366857 - RNA, 19 nt, Artificial Sequence
  Description of Artificial Sequence: Synthetic oligonucleotide
  Antisense strand to SEQ ID NO: 2366856
aacaucagugaucuuaaga

SEQ ID NO: 2366858 - RNA, 19 nt, Artificial Sequence
  Description of Artificial Sequence: Synthetic oligonucleotide
  Sense strand starting at position 399 of SEQ ID NO: 1885782
ucagauacaugaucuguuu

SEQ ID NO: 2366859 - RNA, 19 nt, Artificial Sequence
  Description of Artificial Sequence: Synthetic oligonucleotide
  Antisense strand to SEQ ID NO: 2366858
aaacagaucauguaucuga

SEQ ID NO: 2366860 - RNA, 19 nt, Artificial Sequence
  Description of Artificial Sequence: Synthetic oligonucleotide
  Sense strand starting at position 711 of SEQ ID NO: 1885782
ucugucucaggauauaagu

SEQ ID NO: 2366861 - RNA, 19 nt, Artificial Sequence
  Description of Artificial Sequence: Synthetic oligonucleotide
  Antisense strand to SEQ ID NO: 2366860
acuuauauccugagacaga

SEQ ID NO: 2366862 - RNA, 19 nt, Artificial Sequence
  Description of Artificial Sequence: Synthetic oligonucleotide
  Sense strand starting at position 719 of SEQ ID NO: 1885782
aggauauaaguuugcaaau

SEQ ID NO: 2366863 - RNA, 19 nt, Artificial Sequence
  Description of Artificial Sequence: Synthetic oligonucleotide
  Antisense strand to SEQ ID NO: 2366862
auuugcaaacuuauauccu

SEQ ID NO: 2366864 - RNA, 19 nt, Artificial Sequence
  Description of Artificial Sequence: Synthetic oligonucleotide
  Sense strand starting at position 720 of SEQ ID NO: 1885782
ggauauaaguuugcaaauu

SEQ ID NO: 2366865 - RNA, 19 nt, Artificial Sequence
  Description of Artificial Sequence: Synthetic oligonucleotide
  Antisense strand to SEQ ID NO: 2366864
aauuugcaaacuuauaucc

SEQ ID NO: 2366866 - RNA, 19 nt, Artificial Sequence
  Description of Artificial Sequence: Synthetic oligonucleotide
  Sense strand starting at position 773 of SEQ ID NO: 1885782
uacaguuuagagugggcaa

SEQ ID NO: 2366867 - RNA, 19 nt, Artificial Sequence
  Description of Artificial Sequence: Synthetic oligonucleotide
  Antisense strand to SEQ ID NO: 2366866
uugcccacucuaaacugua

SEQ ID NO: 2366868 - RNA, 19 nt, Artificial Sequence
  Description of Artificial Sequence: Synthetic oligonucleotide
  Sense strand starting at position 774 of SEQ ID NO: 1885782
acaguuuagagugggcaau

SEQ ID NO: 2366869 - RNA, 19 nt, Artificial Sequence
  Description of Artificial Sequence: Synthetic oligonucleotide
  Antisense strand to SEQ ID NO: 2366868
auugcccacucuaaacugu

SEQ ID NO: 2366870 - RNA, 19 nt, Artificial Sequence
  Description of Artificial Sequence: Synthetic oligonucleotide
  Sense strand starting at position 833 of SEQ ID NO: 1885782
agaguucgcaagcauaaau

SEQ ID NO: 2366871 - RNA, 19 nt, Artificial Sequence
  Description of Artificial Sequence: Synthetic oligonucleotide
  Antisense strand to SEQ ID NO: 2366870
auuuaugcuugcgaacucu

SEQ ID NO: 2366872 - RNA, 19 nt, Artificial Sequence
  Description of Artificial Sequence: Synthetic oligonucleotide
  Sense strand starting at position 844 of SEQ ID NO: 1885782
gcauaaaugccugauagca

SEQ ID NO: 2366873 - RNA, 19 nt, Artificial Sequence
  Description of Artificial Sequence: Synthetic oligonucleotide
  Antisense strand to SEQ ID NO: 2366872
ugcuaucaggcauuuaugc

SEQ ID NO: 2366874 - RNA, 19 nt, Artificial Sequence
  Description of Artificial Sequence: Synthetic oligonucleotide
  Sense strand starting at position 1096 of SEQ ID NO: 1885782
uuaacuaucgcaugcauuu

SEQ ID NO: 2366875 - RNA, 19 nt, Artificial Sequence
  Description of Artificial Sequence: Synthetic oligonucleotide
  Antisense strand to SEQ ID NO: 2366874
aaaugcaugcgauaguuaa

SEQ ID NO: 2366876 - RNA, 19 nt, Artificial Sequence
  Description of Artificial Sequence: Synthetic oligonucleotide
  Sense strand starting at position 1168 of SEQ ID NO: 1885782
cucucuguucguuauuuaa

SEQ ID NO: 2366877 - RNA, 19 nt, Artificial Sequence
  Description of Artificial Sequence: Synthetic oligonucleotide
  Antisense strand to SEQ ID NO: 2366876
uuaaauaacgaacagagag

SEQ ID NO: 2366878 - RNA, 19 nt, Artificial Sequence
  Description of Artificial Sequence: Synthetic oligonucleotide
  Sense strand starting at position 1170 of SEQ ID NO: 1885782
cucuguucguuauuuaagu

SEQ ID NO: 2366879 - RNA, 19 nt, Artificial Sequence
  Description of Artificial Sequence: Synthetic oligonucleotide
  Antisense strand to SEQ ID NO: 2366878
acuuaaauaacgaacagag

SEQ ID NO: 2366880 - RNA, 19 nt, Artificial Sequence
  Description of Artificial Sequence: Synthetic oligonucleotide
  Sense strand starting at position 1171 of SEQ ID NO: 1885782
ucuguucguuauuuaaguu

SEQ ID NO: 2366881 - RNA, 19 nt, Artificial Sequence
  Description of Artificial Sequence: Synthetic oligonucleotide
  Antisense strand to SEQ ID NO: 2366880
aacuuaaauaacgaacaga

SEQ ID NO: 2366882 - RNA, 19 nt, Artificial Sequence
  Description of Artificial Sequence: Synthetic oligonucleotide
  Sense strand starting at position 1175 of SEQ ID NO: 1885782
uucguuauuuaaguugaca

SEQ ID NO: 2366883 - RNA, 19 nt, Artificial Sequence
  Description of Artificial Sequence: Synthetic oligonucleotide
  Antisense strand to SEQ ID NO: 2366882
ugucaacuuaaauaacgaa

SEQ ID NO: 2366884 - RNA, 19 nt, Artificial Sequence
  Description of Artificial Sequence: Synthetic oligonucleotide
  Sense strand starting at position 1269 of SEQ ID NO: 1885782
guaggaacaacagguuauu

SEQ ID NO: 2366885 - RNA, 19 nt, Artificial Sequence
  Description of Artificial Sequence: Synthetic oligonucleotide
  Antisense strand to SEQ ID NO: 2366884
aauaaccuguuguuccuac

SEQ ID NO: 2366886 - RNA, 19 nt, Artificial Sequence
  Description of Artificial Sequence: Synthetic oligonucleotide
  Sense strand starting at position 1312 of SEQ ID NO: 1885782
uauuguuaagugcaccaga

SEQ ID NO: 2366887 - RNA, 19 nt, Artificial Sequence
  Description of Artificial Sequence: Synthetic oligonucleotide
  Antisense strand to SEQ ID NO: 2366886
ucuggugcacuuaacaaua

SEQ ID NO: 2366888 - RNA, 19 nt, Artificial Sequence
  Description of Artificial Sequence: Synthetic oligonucleotide
  Sense strand starting at position 1451 of SEQ ID NO: 1885782
cuuuaagcaccugguaaau

SEQ ID NO: 2366889 - RNA, 19 nt, Artificial Sequence
  Description of Artificial Sequence: Synthetic oligonucleotide
  Antisense strand to SEQ ID NO: 2366888
auuuaccaggugcuuaaag

SEQ ID NO: 2366890 - RNA, 19 nt, Artificial Sequence
  Description of Artificial Sequence: Synthetic oligonucleotide
  Sense strand starting at position 1535 of SEQ ID NO: 1885782
gagacuuucggguaaugug

SEQ ID NO: 2366891 - RNA, 19 nt, Artificial Sequence
  Description of Artificial Sequence: Synthetic oligonucleotide
  Antisense strand to SEQ ID NO: 2366890
cacauuacccgaaagucuc

SEQ ID NO: 2366892 - RNA, 19 nt, Artificial Sequence
  Description of Artificial Sequence: Synthetic oligonucleotide
  Sense strand starting at position 1542 of SEQ ID NO: 1885782
ucggguaaugugccgaguu

SEQ ID NO: 2366893 - RNA, 19 nt, Artificial Sequence
  Description of Artificial Sequence: Synthetic oligonucleotide
  Antisense strand to SEQ ID NO: 2366892
aacucggcacauuacccga

SEQ ID NO: 2366894 - RNA, 19 nt, Artificial Sequence
  Description of Artificial Sequence: Synthetic oligonucleotide
  Sense strand starting at position 1584 of SEQ ID NO: 1885782
agguuucaugccgaaggau

SEQ ID NO: 2366895 - RNA, 19 nt, Artificial Sequence
  Description of Artificial Sequence: Synthetic oligonucleotide
  Antisense strand to SEQ ID NO: 2366894
auccuucggcaugaaaccu

SEQ ID NO: 2366896 - RNA, 19 nt, Artificial Sequence
  Description of Artificial Sequence: Synthetic oligonucleotide
  Sense strand starting at position 1801 of SEQ ID NO: 1885782
acuguuggcggauagauaa

SEQ ID NO: 2366897 - RNA, 19 nt, Artificial Sequence
  Description of Artificial Sequence: Synthetic oligonucleotide
  Antisense strand to SEQ ID NO: 2366896
uuaucuauccgccaacagu

SEQ ID NO: 2366898 - RNA, 19 nt, Artificial Sequence
  Description of Artificial Sequence: Synthetic oligonucleotide
  Sense strand starting at position 2079 of SEQ ID NO: 1885782
guccuaggcacugaggaua

SEQ ID NO: 2366899 - RNA, 19 nt, Artificial Sequence
  Description of Artificial Sequence: Synthetic oligonucleotide
  Antisense strand to SEQ ID NO: 2366898
uauccucagugccuaggac

SEQ ID NO: 2366900 - RNA, 19 nt, Artificial Sequence
  Description of Artificial Sequence: Synthetic oligonucleotide
  Sense strand starting at position 2143 of SEQ ID NO: 1885782
gcuaguaaauaacuguaua

SEQ ID NO: 2366901 - RNA, 19 nt, Artificial Sequence
  Description of Artificial Sequence: Synthetic oligonucleotide
  Antisense strand to SEQ ID NO: 2366900
uauacaguuauuuacuagc

SEQ ID NO: 2366902 - RNA, 19 nt, Artificial Sequence
  Description of Artificial Sequence: Synthetic oligonucleotide
  Sense strand starting at position 2259 of SEQ ID NO: 1885782
gcuucucauuucucacgau

SEQ ID NO: 2366903 - RNA, 19 nt, Artificial Sequence
  Description of Artificial Sequence: Synthetic oligonucleotide
  Antisense strand to SEQ ID NO: 2366902
aucgugagaaaugagaagc

SEQ ID NO: 2366904 - RNA, 19 nt, Artificial Sequence
  Description of Artificial Sequence: Synthetic oligonucleotide
  Sense strand starting at position 2296 of SEQ ID NO: 1885782
ccaggucucccuggacauu

SEQ ID NO: 2366905 - RNA, 19 nt, Artificial Sequence
  Description of Artificial Sequence: Synthetic oligonucleotide
  Antisense strand to SEQ ID NO: 2366904
aauguccagggagaccugg

SEQ ID NO: 2366906 - RNA, 19 nt, Artificial Sequence
  Description of Artificial Sequence: Synthetic oligonucleotide
  Sense strand starting at position 3283 of SEQ ID NO: 1885782
gcaacaugauugguggaau

SEQ ID NO: 2366907 - RNA, 19 nt, Artificial Sequence
  Description of Artificial Sequence: Synthetic oligonucleotide
  Antisense strand to SEQ ID NO: 2366906
auuccaccaaucauguugc

SEQ ID NO: 2366908 - RNA, 19 nt, Artificial Sequence
  Description of Artificial Sequence: Synthetic oligonucleotide
  Sense strand starting at position 3291 of SEQ ID NO: 1885782
auugguggaaucgaguaau

SEQ ID NO: 2366909 - RNA, 19 nt, Artificial Sequence
  Description of Artificial Sequence: Synthetic oligonucleotide
  Antisense strand to SEQ ID NO: 2366908
auuacucgauuccaccaau

SEQ ID NO: 2366910 - RNA, 19 nt, Artificial Sequence
  Description of Artificial Sequence: Synthetic oligonucleotide
  Sense strand starting at position 3294 of SEQ ID NO: 1885782
gguggaaucgaguaauuac

SEQ ID NO: 2366911 - RNA, 19 nt, Artificial Sequence
  Description of Artificial Sequence: Synthetic oligonucleotide
  Antisense strand to SEQ ID NO: 2366910
guaauuacucgauuccacc

SEQ ID NO: 2366912 - RNA, 19 nt, Artificial Sequence
  Description of Artificial Sequence: Synthetic oligonucleotide
  Sense strand starting at position 3297 of SEQ ID NO: 1885782
ggaaucgaguaauuacuga

SEQ ID NO: 2366913 - RNA, 19 nt, Artificial Sequence
  Description of Artificial Sequence: Synthetic oligonucleotide
  Antisense strand to SEQ ID NO: 2366912
ucaguaauuacucgauucc

SEQ ID NO: 2366914 - RNA, 19 nt, Artificial Sequence
  Description of Artificial Sequence: Synthetic oligonucleotide
  Sense strand starting at position 3302 of SEQ ID NO: 1885782
cgaguaauuacugaucagu

SEQ ID NO: 2366915 - RNA, 19 nt, Artificial Sequence
  Description of Artificial Sequence: Synthetic oligonucleotide
  Antisense strand to SEQ ID NO: 2366914
acugaucaguaauuacucg

SEQ ID NO: 2366916 - RNA, 19 nt, Artificial Sequence
  Description of Artificial Sequence: Synthetic oligonucleotide
  Sense strand starting at position 3304 of SEQ ID NO: 1885782
aguaauuacugaucaguau

SEQ ID NO: 2366917 - RNA, 19 nt, Artificial Sequence
  Description of Artificial Sequence: Synthetic oligonucleotide
  Antisense strand to SEQ ID NO: 2366916
auacugaucaguaauuacu

SEQ ID NO: 2366918 - RNA, 19 nt, Artificial Sequence
  Description of Artificial Sequence: Synthetic oligonucleotide
  Sense strand starting at position 3305 of SEQ ID NO: 1885782
guaauuacugaucaguauu

SEQ ID NO: 2366919 - RNA, 19 nt, Artificial Sequence
  Description of Artificial Sequence: Synthetic oligonucleotide
  Antisense strand to SEQ ID NO: 2366918
aauacugaucaguaauuac

SEQ ID NO: 2366920 - RNA, 19 nt, Artificial Sequence
  Description of Artificial Sequence: Synthetic oligonucleotide
  Sense strand starting at position 3313 of SEQ ID NO: 1885782
ugaucaguauuguccaauc

SEQ ID NO: 2366921 - RNA, 19 nt, Artificial Sequence
  Description of Artificial Sequence: Synthetic oligonucleotide
  Antisense strand to SEQ ID NO: 2366920
gauuggacaauacugauca

SEQ ID NO: 2366922 - RNA, 19 nt, Artificial Sequence
  Description of Artificial Sequence: Synthetic oligonucleotide
  Sense strand starting at position 3933 of SEQ ID NO: 1885782
ggguguaguugauuucacu

SEQ ID NO: 2366923 - RNA, 19 nt, Artificial Sequence
  Description of Artificial Sequence: Synthetic oligonucleotide
  Antisense strand to SEQ ID NO: 2366922
agugaaaucaacuacaccc

SEQ ID NO: 2366924 - RNA, 19 nt, Artificial Sequence
  Description of Artificial Sequence: Synthetic oligonucleotide
  Sense strand starting at position 99 of SEQ ID NO: 1885783
cugaguccugaaugagaac

SEQ ID NO: 2366925 - RNA, 19 nt, Artificial Sequence
  Description of Artificial Sequence: Synthetic oligonucleotide
  Antisense strand to SEQ ID NO: 2366924
guucucauucaggacucag

SEQ ID NO: 2366926 - RNA, 19 nt, Artificial Sequence
  Description of Artificial Sequence: Synthetic oligonucleotide
  Sense strand starting at position 207 of SEQ ID NO: 1885783
guugaaugucaugaccgua

SEQ ID NO: 2366927 - RNA, 19 nt, Artificial Sequence
  Description of Artificial Sequence: Synthetic oligonucleotide
  Antisense strand to SEQ ID NO: 2366926
uacggucaugacauucaac

SEQ ID NO: 2366928 - RNA, 19 nt, Artificial Sequence
  Description of Artificial Sequence: Synthetic oligonucleotide
  Sense strand starting at position 210 of SEQ ID NO: 1885783
gaaugucaugaccguauua

SEQ ID NO: 2366929 - RNA, 19 nt, Artificial Sequence
  Description of Artificial Sequence: Synthetic oligonucleotide
  Antisense strand to SEQ ID NO: 2366928
uaauacggucaugacauuc

SEQ ID NO: 2366930 - RNA, 19 nt, Artificial Sequence
  Description of Artificial Sequence: Synthetic oligonucleotide
  Sense strand starting at position 212 of SEQ ID NO: 1885783
augucaugaccguauuauu

SEQ ID NO: 2366931 - RNA, 19 nt, Artificial Sequence
  Description of Artificial Sequence: Synthetic oligonucleotide
  Antisense strand to SEQ ID NO: 2366930
aauaauacggucaugacau

SEQ ID NO: 2366932 - RNA, 19 nt, Artificial Sequence
  Description of Artificial Sequence: Synthetic oligonucleotide
  Sense strand starting at position 302 of SEQ ID NO: 1885783
uuaggauucuuccugcucu

SEQ ID NO: 2366933 - RNA, 19 nt, Artificial Sequence
  Description of Artificial Sequence: Synthetic oligonucleotide
  Antisense strand to SEQ ID NO: 2366932
agagcaggaagaauccuaa

SEQ ID NO: 2366934 - RNA, 19 nt, Artificial Sequence
  Description of Artificial Sequence: Synthetic oligonucleotide
  Sense strand starting at position 382 of SEQ ID NO: 1885783
cuucuagaguugcucaaag

SEQ ID NO: 2366935 - RNA, 19 nt, Artificial Sequence
  Description of Artificial Sequence: Synthetic oligonucleotide
  Antisense strand to SEQ ID NO: 2366934
cuuugagcaacucuagaag

SEQ ID NO: 2366936 - RNA, 19 nt, Artificial Sequence
  Description of Artificial Sequence: Synthetic oligonucleotide
  Sense strand starting at position 407 of SEQ ID NO: 1885783
ucagccuuccauuagcaga

SEQ ID NO: 2366937 - RNA, 19 nt, Artificial Sequence
  Description of Artificial Sequence: Synthetic oligonucleotide
  Antisense strand to SEQ ID NO: 2366936
ucugcuaauggaaggcuga

SEQ ID NO: 2366938 - RNA, 19 nt, Artificial Sequence
  Description of Artificial Sequence: Synthetic oligonucleotide
  Sense strand starting at position 409 of SEQ ID NO: 1885783
agccuuccauuagcagaau

SEQ ID NO: 2366939 - RNA, 19 nt, Artificial Sequence
  Description of Artificial Sequence: Synthetic oligonucleotide
  Antisense strand to SEQ ID NO: 2366938
auucugcuaauggaaggcu

SEQ ID NO: 2366940 - RNA, 19 nt, Artificial Sequence
  Description of Artificial Sequence: Synthetic oligonucleotide
  Sense strand starting at position 509 of SEQ ID NO: 1885783
uuaggauagguacgagaua

SEQ ID NO: 2366941 - RNA, 19 nt, Artificial Sequence
  Description of Artificial Sequence: Synthetic oligonucleotide
  Antisense strand to SEQ ID NO: 2366940
uaucucguaccuauccuaa

SEQ ID NO: 2366942 - RNA, 19 nt, Artificial Sequence
  Description of Artificial Sequence: Synthetic oligonucleotide
  Sense strand starting at position 518 of SEQ ID NO: 1885783
guacgagauaccugcauuu

SEQ ID NO: 2366943 - RNA, 19 nt, Artificial Sequence
  Description of Artificial Sequence: Synthetic oligonucleotide
  Antisense strand to SEQ ID NO: 2366942
aaaugcagguaucucguac

SEQ ID NO: 2366944 - RNA, 19 nt, Artificial Sequence
  Description of Artificial Sequence: Synthetic oligonucleotide
  Sense strand starting at position 539 of SEQ ID NO: 1885783
gcaaacucucuagagaguu

SEQ ID NO: 2366945 - RNA, 19 nt, Artificial Sequence
  Description of Artificial Sequence: Synthetic oligonucleotide
  Antisense strand to SEQ ID NO: 2366944
aacucucuagagaguuugc

SEQ ID NO: 2366946 - RNA, 19 nt, Artificial Sequence
  Description of Artificial Sequence: Synthetic oligonucleotide
  Sense strand starting at position 692 of SEQ ID NO: 1885783
caccgagugucaucuauau

SEQ ID NO: 2366947 - RNA, 19 nt, Artificial Sequence
  Description of Artificial Sequence: Synthetic oligonucleotide
  Antisense strand to SEQ ID NO: 2366946
auauagaugacacucggug

SEQ ID NO: 2366948 - RNA, 19 nt, Artificial Sequence
  Description of Artificial Sequence: Synthetic oligonucleotide
  Sense strand starting at position 780 of SEQ ID NO: 1885783
cugggauucugagaaggag

SEQ ID NO: 2366949 - RNA, 19 nt, Artificial Sequence
  Description of Artificial Sequence: Synthetic oligonucleotide
  Antisense strand to SEQ ID NO: 2366948
cuccuucucagaaucccag

SEQ ID NO: 2366950 - RNA, 19 nt, Artificial Sequence
  Description of Artificial Sequence: Synthetic oligonucleotide
  Sense strand starting at position 1447 of SEQ ID NO: 1885783
ggacaacagcaaugucaau

SEQ ID NO: 2366951 - RNA, 19 nt, Artificial Sequence
  Description of Artificial Sequence: Synthetic oligonucleotide
  Antisense strand to SEQ ID NO: 2366950
auugacauugcuguugucc

SEQ ID NO: 2366952 - RNA, 19 nt, Artificial Sequence
  Description of Artificial Sequence: Synthetic oligonucleotide
  Sense strand starting at position 1453 of SEQ ID NO: 1885783
cagcaaugucaaugguaau

SEQ ID NO: 2366953 - RNA, 19 nt, Artificial Sequence
  Description of Artificial Sequence: Synthetic oligonucleotide
  Antisense strand to SEQ ID NO: 2366952
auuaccauugacauugcug

SEQ ID NO: 2366954 - RNA, 19 nt, Artificial Sequence
  Description of Artificial Sequence: Synthetic oligonucleotide
  Sense strand starting at position 1454 of SEQ ID NO: 1885783
agcaaugucaaugguaaug

SEQ ID NO: 2366955 - RNA, 19 nt, Artificial Sequence
  Description of Artificial Sequence: Synthetic oligonucleotide
  Antisense strand to SEQ ID NO: 2366954
cauuaccauugacauugcu

SEQ ID NO: 2366956 - RNA, 19 nt, Artificial Sequence
  Description of Artificial Sequence: Synthetic oligonucleotide
  Sense strand starting at position 1471 of SEQ ID NO: 1885783
ugauaaugacaauguguga

SEQ ID NO: 2366957 - RNA, 19 nt, Artificial Sequence
  Description of Artificial Sequence: Synthetic oligonucleotide
  Antisense strand to SEQ ID NO: 2366956
ucacacauugucauuauca

SEQ ID NO: 2366958 - RNA, 19 nt, Artificial Sequence
  Description of Artificial Sequence: Synthetic oligonucleotide
  Sense strand starting at position 1474 of SEQ ID NO: 1885783
uaaugacaaugugugauau

SEQ ID NO: 2366959 - RNA, 19 nt, Artificial Sequence
  Description of Artificial Sequence: Synthetic oligonucleotide
  Antisense strand to SEQ ID NO: 2366958
auaucacacauugucauua

SEQ ID NO: 2366960 - RNA, 19 nt, Artificial Sequence
  Description of Artificial Sequence: Synthetic oligonucleotide
  Sense strand starting at position 1475 of SEQ ID NO: 1885783
aaugacaaugugugauauu

SEQ ID NO: 2366961 - RNA, 19 nt, Artificial Sequence
  Description of Artificial Sequence: Synthetic oligonucleotide
  Antisense strand to SEQ ID NO: 2366960
aauaucacacauugucauu

SEQ ID NO: 2366962 - RNA, 19 nt, Artificial Sequence
  Description of Artificial Sequence: Synthetic oligonucleotide
  Sense strand starting at position 2013 of SEQ ID NO: 1885783
cuuccaguggucugacuca

SEQ ID NO: 2366963 - RNA, 19 nt, Artificial Sequence
  Description of Artificial Sequence: Synthetic oligonucleotide
  Antisense strand to SEQ ID NO: 2366962
ugagucagaccacuggaag

SEQ ID NO: 2366964 - RNA, 19 nt, Artificial Sequence
  Description of Artificial Sequence: Synthetic oligonucleotide
  Sense strand starting at position 2150 of SEQ ID NO: 1885783
ggagacuuccaaugacccu

SEQ ID NO: 2366965 - RNA, 19 nt, Artificial Sequence
  Description of Artificial Sequence: Synthetic oligonucleotide
  Antisense strand to SEQ ID NO: 2366964
agggucauuggaagucucc

SEQ ID NO: 2366966 - RNA, 19 nt, Artificial Sequence
  Description of Artificial Sequence: Synthetic oligonucleotide
  Sense strand starting at position 2179 of SEQ ID NO: 1885783
agagaaaucccguguuucu

SEQ ID NO: 2366967 - RNA, 19 nt, Artificial Sequence
  Description of Artificial Sequence: Synthetic oligonucleotide
  Antisense strand to SEQ ID NO: 2366966
agaaacacgggauuucucu

SEQ ID NO: 2366968 - RNA, 19 nt, Artificial Sequence
  Description of Artificial Sequence: Synthetic oligonucleotide
  Sense strand starting at position 2614 of SEQ ID NO: 1885783
ccuucuugcuagucuagaa

SEQ ID NO: 2366969 - RNA, 19 nt, Artificial Sequence
  Description of Artificial Sequence: Synthetic oligonucleotide
  Antisense strand to SEQ ID NO: 2366968
uucuagacuagcaagaagg

SEQ ID NO: 2366970 - RNA, 19 nt, Artificial Sequence
  Description of Artificial Sequence: Synthetic oligonucleotide
  Sense strand starting at position 2618 of SEQ ID NO: 1885783
cuugcuagucuagaacuua

SEQ ID NO: 2366971 - RNA, 19 nt, Artificial Sequence
  Description of Artificial Sequence: Synthetic oligonucleotide
  Antisense strand to SEQ ID NO: 2366970
uaaguucuagacuagcaag

SEQ ID NO: 2366972 - RNA, 19 nt, Artificial Sequence
  Description of Artificial Sequence: Synthetic oligonucleotide
  Sense strand starting at position 2830 of SEQ ID NO: 1885783
aggacauguuugucugguu

SEQ ID NO: 2366973 - RNA, 19 nt, Artificial Sequence
  Description of Artificial Sequence: Synthetic oligonucleotide
  Antisense strand to SEQ ID NO: 2366972
aaccagacaaacauguccu

SEQ ID NO: 2366974 - RNA, 19 nt, Artificial Sequence
  Description of Artificial Sequence: Synthetic oligonucleotide
  Sense strand starting at position 2989 of SEQ ID NO: 1885783
agccuuuaccuagagcaca

SEQ ID NO: 2366975 - RNA, 19 nt, Artificial Sequence
  Description of Artificial Sequence: Synthetic oligonucleotide
  Antisense strand to SEQ ID NO: 2366974
ugugcucuagguaaaggcu

SEQ ID NO: 2366976 - RNA, 19 nt, Artificial Sequence
  Description of Artificial Sequence: Synthetic oligonucleotide
  Sense strand starting at position 3196 of SEQ ID NO: 1885783
gagcuuccucaucagugua

SEQ ID NO: 2366977 - RNA, 19 nt, Artificial Sequence
  Description of Artificial Sequence: Synthetic oligonucleotide
  Antisense strand to SEQ ID NO: 2366976
uacacugaugaggaagcuc

SEQ ID NO: 2366978 - RNA, 19 nt, Artificial Sequence
  Description of Artificial Sequence: Synthetic oligonucleotide
  Sense strand starting at position 3199 of SEQ ID NO: 1885783
cuuccucaucaguguaaga

SEQ ID NO: 2366979 - RNA, 19 nt, Artificial Sequence
  Description of Artificial Sequence: Synthetic oligonucleotide
  Antisense strand to SEQ ID NO: 2366978
ucuuacacugaugaggaag

SEQ ID NO: 2366980 - RNA, 19 nt, Artificial Sequence
  Description of Artificial Sequence: Synthetic oligonucleotide
  Sense strand starting at position 3201 of SEQ ID NO: 1885783
uccucaucaguguaagaaa

SEQ ID NO: 2366981 - RNA, 19 nt, Artificial Sequence
  Description of Artificial Sequence: Synthetic oligonucleotide
  Antisense strand to SEQ ID NO: 2366980
uuucuuacacugaugagga

SEQ ID NO: 2366982 - RNA, 19 nt, Artificial Sequence
  Description of Artificial Sequence: Synthetic oligonucleotide
  Sense strand starting at position 3300 of SEQ ID NO: 1885783
ugcccauuugccugguaau

SEQ ID NO: 2366983 - RNA, 19 nt, Artificial Sequence
  Description of Artificial Sequence: Synthetic oligonucleotide
  Antisense strand to SEQ ID NO: 2366982
auuaccaggcaaaugggca

SEQ ID NO: 2366984 - RNA, 19 nt, Artificial Sequence
  Description of Artificial Sequence: Synthetic oligonucleotide
  Sense strand starting at position 3301 of SEQ ID NO: 1885783
gcccauuugccugguaauc

SEQ ID NO: 2366985 - RNA, 19 nt, Artificial Sequence
  Description of Artificial Sequence: Synthetic oligonucleotide
  Antisense strand to SEQ ID NO: 2366984
gauuaccaggcaaaugggc

SEQ ID NO: 2366986 - RNA, 19 nt, Artificial Sequence
  Description of Artificial Sequence: Synthetic oligonucleotide
  Sense strand starting at position 3315 of SEQ ID NO: 1885783
uaaucugcuuuggugaaua

SEQ ID NO: 2366987 - RNA, 19 nt, Artificial Sequence
  Description of Artificial Sequence: Synthetic oligonucleotide
  Antisense strand to SEQ ID NO: 2366986
uauucaccaaagcagauua

SEQ ID NO: 2366988 - RNA, 19 nt, Artificial Sequence
  Description of Artificial Sequence: Synthetic oligonucleotide
  Sense strand starting at position 3432 of SEQ ID NO: 1885783
gcuacaugucaggacuuga

SEQ ID NO: 2366989 - RNA, 19 nt, Artificial Sequence
  Description of Artificial Sequence: Synthetic oligonucleotide
  Antisense strand to SEQ ID NO: 2366988
ucaaguccugacauguagc

SEQ ID NO: 2366990 - RNA, 19 nt, Artificial Sequence
  Description of Artificial Sequence: Synthetic oligonucleotide
  Sense strand starting at position 3468 of SEQ ID NO: 1885783
caagaugagugagacacaa

SEQ ID NO: 2366991 - RNA, 19 nt, Artificial Sequence
  Description of Artificial Sequence: Synthetic oligonucleotide
  Antisense strand to SEQ ID NO: 2366990
uugugucucacucaucuug

SEQ ID NO: 2366992 - RNA, 19 nt, Artificial Sequence
  Description of Artificial Sequence: Synthetic oligonucleotide
  Sense strand starting at position 3508 of SEQ ID NO: 1885783
gguccugugggacagacau

SEQ ID NO: 2366993 - RNA, 19 nt, Artificial Sequence
  Description of Artificial Sequence: Synthetic oligonucleotide
  Antisense strand to SEQ ID NO: 2366992
augucugucccacaggacc

SEQ ID NO: 2366994 - RNA, 19 nt, Artificial Sequence
  Description of Artificial Sequence: Synthetic oligonucleotide
  Sense strand starting at position 3718 of SEQ ID NO: 1885783
aaaggaugcccugguccaa

SEQ ID NO: 2366995 - RNA, 19 nt, Artificial Sequence
  Description of Artificial Sequence: Synthetic oligonucleotide
  Antisense strand to SEQ ID NO: 2366994
uuggaccagggcauccuuu

SEQ ID NO: 2366996 - RNA, 19 nt, Artificial Sequence
  Description of Artificial Sequence: Synthetic oligonucleotide
  Sense strand starting at position 3876 of SEQ ID NO: 1885783
cagugaucgcagggaaaug

SEQ ID NO: 2366997 - RNA, 19 nt, Artificial Sequence
  Description of Artificial Sequence: Synthetic oligonucleotide
  Antisense strand to SEQ ID NO: 2366996
cauuucccugcgaucacug

SEQ ID NO: 2366998 - RNA, 19 nt, Artificial Sequence
  Description of Artificial Sequence: Synthetic oligonucleotide
  Sense strand starting at position 3877 of SEQ ID NO: 1885783
agugaucgcagggaaaugu

SEQ ID NO: 2366999 - RNA, 19 nt, Artificial Sequence
  Description of Artificial Sequence: Synthetic oligonucleotide
  Antisense strand to SEQ ID NO: 2366998
acauuucccugcgaucacu

SEQ ID NO: 2367000 - RNA, 19 nt, Artificial Sequence
  Description of Artificial Sequence: Synthetic oligonucleotide
  Sense strand starting at position 3904 of SEQ ID NO: 1885783
gauuacagcucagugagga

SEQ ID NO: 2367001 - RNA, 19 nt, Artificial Sequence
  Description of Artificial Sequence: Synthetic oligonucleotide
  Antisense strand to SEQ ID NO: 2367000
uccucacugagcuguaauc

SEQ ID NO: 2367002 - RNA, 19 nt, Artificial Sequence
  Description of Artificial Sequence: Synthetic oligonucleotide
  Sense strand starting at position 3905 of SEQ ID NO: 1885783
auuacagcucagugaggaa

SEQ ID NO: 2367003 - RNA, 19 nt, Artificial Sequence
  Description of Artificial Sequence: Synthetic oligonucleotide
  Antisense strand to SEQ ID NO: 2367002
uuccucacugagcuguaau

SEQ ID NO: 2367004 - RNA, 19 nt, Artificial Sequence
  Description of Artificial Sequence: Synthetic oligonucleotide
  Sense strand starting at position 51 of SEQ ID NO: 1885784
uugugagaaucaccugaag

SEQ ID NO: 2367005 - RNA, 19 nt, Artificial Sequence
  Description of Artificial Sequence: Synthetic oligonucleotide
  Antisense strand to SEQ ID NO: 2367004
cuucaggugauucucacaa

SEQ ID NO: 2367006 - RNA, 19 nt, Artificial Sequence
  Description of Artificial Sequence: Synthetic oligonucleotide
  Sense strand starting at position 142 of SEQ ID NO: 1885784
auauuuggcucuguuuauu

SEQ ID NO: 2367007 - RNA, 19 nt, Artificial Sequence
  Description of Artificial Sequence: Synthetic oligonucleotide
  Antisense strand to SEQ ID NO: 2367006
aauaaacagagccaaauau

SEQ ID NO: 2367008 - RNA, 19 nt, Artificial Sequence
  Description of Artificial Sequence: Synthetic oligonucleotide
  Sense strand starting at position 236 of SEQ ID NO: 1885784
ggaggcuucugaucucaug

SEQ ID NO: 2367009 - RNA, 19 nt, Artificial Sequence
  Description of Artificial Sequence: Synthetic oligonucleotide
  Antisense strand to SEQ ID NO: 2367008
caugagaucagaagccucc

SEQ ID NO: 2367010 - RNA, 19 nt, Artificial Sequence
  Description of Artificial Sequence: Synthetic oligonucleotide
  Sense strand starting at position 307 of SEQ ID NO: 1885784
gaggccuuucccuggauga

SEQ ID NO: 2367011 - RNA, 19 nt, Artificial Sequence
  Description of Artificial Sequence: Synthetic oligonucleotide
  Antisense strand to SEQ ID NO: 2367010
ucauccagggaaaggccuc

SEQ ID NO: 2367012 - RNA, 19 nt, Artificial Sequence
  Description of Artificial Sequence: Synthetic oligonucleotide
  Sense strand starting at position 429 of SEQ ID NO: 1885784
ucagcuuucucauuggaca

SEQ ID NO: 2367013 - RNA, 19 nt, Artificial Sequence
  Description of Artificial Sequence: Synthetic oligonucleotide
  Antisense strand to SEQ ID NO: 2367012
uguccaaugagaaagcuga

SEQ ID NO: 2367014 - RNA, 19 nt, Artificial Sequence
  Description of Artificial Sequence: Synthetic oligonucleotide
  Sense strand starting at position 956 of SEQ ID NO: 1885784
ggacacuagggucgucuaa

SEQ ID NO: 2367015 - RNA, 19 nt, Artificial Sequence
  Description of Artificial Sequence: Synthetic oligonucleotide
  Antisense strand to SEQ ID NO: 2367014
uuagacgacccuagugucc

SEQ ID NO: 2367016 - RNA, 19 nt, Artificial Sequence
  Description of Artificial Sequence: Synthetic oligonucleotide
  Sense strand starting at position 958 of SEQ ID NO: 1885784
acacuagggucgucuaaag

SEQ ID NO: 2367017 - RNA, 19 nt, Artificial Sequence
  Description of Artificial Sequence: Synthetic oligonucleotide
  Antisense strand to SEQ ID NO: 2367016
cuuuagacgacccuagugu

SEQ ID NO: 2367018 - RNA, 19 nt, Artificial Sequence
  Description of Artificial Sequence: Synthetic oligonucleotide
  Sense strand starting at position 1108 of SEQ ID NO: 1885784
cugacaaggucuguagaga

SEQ ID NO: 2367019 - RNA, 19 nt, Artificial Sequence
  Description of Artificial Sequence: Synthetic oligonucleotide
  Antisense strand to SEQ ID NO: 2367018
ucucuacagaccuugucag

SEQ ID NO: 2367020 - RNA, 19 nt, Artificial Sequence
  Description of Artificial Sequence: Synthetic oligonucleotide
  Sense strand starting at position 1164 of SEQ ID NO: 1885784
aaucuuguuugaucaugga

SEQ ID NO: 2367021 - RNA, 19 nt, Artificial Sequence
  Description of Artificial Sequence: Synthetic oligonucleotide
  Antisense strand to SEQ ID NO: 2367020
uccaugaucaaacaagauu

SEQ ID NO: 2367022 - RNA, 19 nt, Artificial Sequence
  Description of Artificial Sequence: Synthetic oligonucleotide
  Sense strand starting at position 1168 of SEQ ID NO: 1885784
uuguuugaucauggaaagu

SEQ ID NO: 2367023 - RNA, 19 nt, Artificial Sequence
  Description of Artificial Sequence: Synthetic oligonucleotide
  Antisense strand to SEQ ID NO: 2367022
acuuuccaugaucaaacaa

SEQ ID NO: 2367024 - RNA, 19 nt, Artificial Sequence
  Description of Artificial Sequence: Synthetic oligonucleotide
  Sense strand starting at position 1245 of SEQ ID NO: 1885784
cauaguacauugucuagga

SEQ ID NO: 2367025 - RNA, 19 nt, Artificial Sequence
  Description of Artificial Sequence: Synthetic oligonucleotide
  Antisense strand to SEQ ID NO: 2367024
uccuagacaauguacuaug

SEQ ID NO: 2367026 - RNA, 19 nt, Artificial Sequence
  Description of Artificial Sequence: Synthetic oligonucleotide
  Sense strand starting at position 1246 of SEQ ID NO: 1885784
auaguacauugucuaggaa

SEQ ID NO: 2367027 - RNA, 19 nt, Artificial Sequence
  Description of Artificial Sequence: Synthetic oligonucleotide
  Antisense strand to SEQ ID NO: 2367026
uuccuagacaauguacuau

SEQ ID NO: 2367028 - RNA, 19 nt, Artificial Sequence
  Description of Artificial Sequence: Synthetic oligonucleotide
  Sense strand starting at position 1275 of SEQ ID NO: 1885784
cuaguaauuugagaauaug

SEQ ID NO: 2367029 - RNA, 19 nt, Artificial Sequence
  Description of Artificial Sequence: Synthetic oligonucleotide
  Antisense strand to SEQ ID NO: 2367028
cauauucucaaauuacuag

SEQ ID NO: 2367030 - RNA, 19 nt, Artificial Sequence
  Description of Artificial Sequence: Synthetic oligonucleotide
  Sense strand starting at position 1284 of SEQ ID NO: 1885784
ugagaauauguuuggauua

SEQ ID NO: 2367031 - RNA, 19 nt, Artificial Sequence
  Description of Artificial Sequence: Synthetic oligonucleotide
  Antisense strand to SEQ ID NO: 2367030
uaauccaaacauauucuca

SEQ ID NO: 2367032 - RNA, 19 nt, Artificial Sequence
  Description of Artificial Sequence: Synthetic oligonucleotide
  Sense strand starting at position 1333 of SEQ ID NO: 1885784
cuaccuuaccgugaaagga

SEQ ID NO: 2367033 - RNA, 19 nt, Artificial Sequence
  Description of Artificial Sequence: Synthetic oligonucleotide
  Antisense strand to SEQ ID NO: 2367032
uccuuucacgguaagguag

SEQ ID NO: 2367034 - RNA, 19 nt, Artificial Sequence
  Description of Artificial Sequence: Synthetic oligonucleotide
  Sense strand starting at position 1342 of SEQ ID NO: 1885784
cgugaaaggaaauguaauc

SEQ ID NO: 2367035 - RNA, 19 nt, Artificial Sequence
  Description of Artificial Sequence: Synthetic oligonucleotide
  Antisense strand to SEQ ID NO: 2367034
gauuacauuuccuuucacg

SEQ ID NO: 2367036 - RNA, 19 nt, Artificial Sequence
  Description of Artificial Sequence: Synthetic oligonucleotide
  Sense strand starting at position 1387 of SEQ ID NO: 1885784
ucagguguuugaccaaauc

SEQ ID NO: 2367037 - RNA, 19 nt, Artificial Sequence
  Description of Artificial Sequence: Synthetic oligonucleotide
  Antisense strand to SEQ ID NO: 2367036
gauuuggucaaacaccuga

SEQ ID NO: 2367038 - RNA, 19 nt, Artificial Sequence
  Description of Artificial Sequence: Synthetic oligonucleotide
  Sense strand starting at position 1616 of SEQ ID NO: 1885784
gagaacuugcuggaagcau

SEQ ID NO: 2367039 - RNA, 19 nt, Artificial Sequence
  Description of Artificial Sequence: Synthetic oligonucleotide
  Antisense strand to SEQ ID NO: 2367038
augcuuccagcaaguucuc

SEQ ID NO: 2367040 - RNA, 19 nt, Artificial Sequence
  Description of Artificial Sequence: Synthetic oligonucleotide
  Sense strand starting at position 1628 of SEQ ID NO: 1885784
gaagcauucguggaucuug

SEQ ID NO: 2367041 - RNA, 19 nt, Artificial Sequence
  Description of Artificial Sequence: Synthetic oligonucleotide
  Antisense strand to SEQ ID NO: 2367040
caagauccacgaaugcuuc

SEQ ID NO: 2367042 - RNA, 19 nt, Artificial Sequence
  Description of Artificial Sequence: Synthetic oligonucleotide
  Sense strand starting at position 1653 of SEQ ID NO: 1885784
ggcgucucugugagguuga

SEQ ID NO: 2367043 - RNA, 19 nt, Artificial Sequence
  Description of Artificial Sequence: Synthetic oligonucleotide
  Antisense strand to SEQ ID NO: 2367042
ucaaccucacagagacgcc

SEQ ID NO: 2367044 - RNA, 19 nt, Artificial Sequence
  Description of Artificial Sequence: Synthetic oligonucleotide
  Sense strand starting at position 1871 of SEQ ID NO: 1885784
uugaucauggugggaugua

SEQ ID NO: 2367045 - RNA, 19 nt, Artificial Sequence
  Description of Artificial Sequence: Synthetic oligonucleotide
  Antisense strand to SEQ ID NO: 2367044
uacaucccaccaugaucaa

SEQ ID NO: 2367046 - RNA, 19 nt, Artificial Sequence
  Description of Artificial Sequence: Synthetic oligonucleotide
  Sense strand starting at position 1992 of SEQ ID NO: 1885784
gguauuguccugcaagaca

SEQ ID NO: 2367047 - RNA, 19 nt, Artificial Sequence
  Description of Artificial Sequence: Synthetic oligonucleotide
  Antisense strand to SEQ ID NO: 2367046
ugucuugcaggacaauacc

SEQ ID NO: 2367048 - RNA, 19 nt, Artificial Sequence
  Description of Artificial Sequence: Synthetic oligonucleotide
  Sense strand starting at position 2065 of SEQ ID NO: 1885784
gacugacauugugugauug

SEQ ID NO: 2367049 - RNA, 19 nt, Artificial Sequence
  Description of Artificial Sequence: Synthetic oligonucleotide
  Antisense strand to SEQ ID NO: 2367048
caaucacacaaugucaguc

SEQ ID NO: 2367050 - RNA, 19 nt, Artificial Sequence
  Description of Artificial Sequence: Synthetic oligonucleotide
  Sense strand starting at position 2193 of SEQ ID NO: 1885784
agcuuaugccaagaacugu

SEQ ID NO: 2367051 - RNA, 19 nt, Artificial Sequence
  Description of Artificial Sequence: Synthetic oligonucleotide
  Antisense strand to SEQ ID NO: 2367050
acaguucuuggcauaagcu

SEQ ID NO: 2367052 - RNA, 19 nt, Artificial Sequence
  Description of Artificial Sequence: Synthetic oligonucleotide
  Sense strand starting at position 2246 of SEQ ID NO: 1885784
guaacaauccugugaggug

SEQ ID NO: 2367053 - RNA, 19 nt, Artificial Sequence
  Description of Artificial Sequence: Synthetic oligonucleotide
  Antisense strand to SEQ ID NO: 2367052
caccucacaggauuguuac

SEQ ID NO: 2367054 - RNA, 19 nt, Artificial Sequence
  Description of Artificial Sequence: Synthetic oligonucleotide
  Sense strand starting at position 2251 of SEQ ID NO: 1885784
aauccugugaggugguaau

SEQ ID NO: 2367055 - RNA, 19 nt, Artificial Sequence
  Description of Artificial Sequence: Synthetic oligonucleotide
  Antisense strand to SEQ ID NO: 2367054
auuaccaccucacaggauu

SEQ ID NO: 2367056 - RNA, 19 nt, Artificial Sequence
  Description of Artificial Sequence: Synthetic oligonucleotide
  Sense strand starting at position 2414 of SEQ ID NO: 1885784
cuguaaugaccuugaggug

SEQ ID NO: 2367057 - RNA, 19 nt, Artificial Sequence
  Description of Artificial Sequence: Synthetic oligonucleotide
  Antisense strand to SEQ ID NO: 2367056
caccucaaggucauuacag

SEQ ID NO: 2367058 - RNA, 19 nt, Artificial Sequence
  Description of Artificial Sequence: Synthetic oligonucleotide
  Sense strand starting at position 2419 of SEQ ID NO: 1885784
augaccuugaggugcaaau

SEQ ID NO: 2367059 - RNA, 19 nt, Artificial Sequence
  Description of Artificial Sequence: Synthetic oligonucleotide
  Antisense strand to SEQ ID NO: 2367058
auuugcaccucaaggucau

SEQ ID NO: 2367060 - RNA, 19 nt, Artificial Sequence
  Description of Artificial Sequence: Synthetic oligonucleotide
  Sense strand starting at position 2826 of SEQ ID NO: 1885784
uuaagucaggaucagcaau

SEQ ID NO: 2367061 - RNA, 19 nt, Artificial Sequence
  Description of Artificial Sequence: Synthetic oligonucleotide
  Antisense strand to SEQ ID NO: 2367060
auugcugauccugacuuaa

SEQ ID NO: 2367062 - RNA, 19 nt, Artificial Sequence
  Description of Artificial Sequence: Synthetic oligonucleotide
  Sense strand starting at position 2858 of SEQ ID NO: 1885784
cacaacaguccuuggagau

SEQ ID NO: 2367063 - RNA, 19 nt, Artificial Sequence
  Description of Artificial Sequence: Synthetic oligonucleotide
  Antisense strand to SEQ ID NO: 2367062
aucuccaaggacuguugug

SEQ ID NO: 2367064 - RNA, 19 nt, Artificial Sequence
  Description of Artificial Sequence: Synthetic oligonucleotide
  Sense strand starting at position 2859 of SEQ ID NO: 1885784
acaacaguccuuggagauc

SEQ ID NO: 2367065 - RNA, 19 nt, Artificial Sequence
  Description of Artificial Sequence: Synthetic oligonucleotide
  Antisense strand to SEQ ID NO: 2367064
gaucuccaaggacuguugu

SEQ ID NO: 2367066 - RNA, 19 nt, Artificial Sequence
  Description of Artificial Sequence: Synthetic oligonucleotide
  Sense strand starting at position 3127 of SEQ ID NO: 1885784
gggaaugcugcugauuaaa

SEQ ID NO: 2367067 - RNA, 19 nt, Artificial Sequence
  Description of Artificial Sequence: Synthetic oligonucleotide
  Antisense strand to SEQ ID NO: 2367066
uuuaaucagcagcauuccc

SEQ ID NO: 2367068 - RNA, 19 nt, Artificial Sequence
  Description of Artificial Sequence: Synthetic oligonucleotide
  Sense strand starting at position 3239 of SEQ ID NO: 1885784
gugaacucagagugguuca

SEQ ID NO: 2367069 - RNA, 19 nt, Artificial Sequence
  Description of Artificial Sequence: Synthetic oligonucleotide
  Antisense strand to SEQ ID NO: 2367068
ugaaccacucugaguucac

SEQ ID NO: 2367070 - RNA, 19 nt, Artificial Sequence
  Description of Artificial Sequence: Synthetic oligonucleotide
  Sense strand starting at position 3321 of SEQ ID NO: 1885784
uggccaagugcuuugcgua

SEQ ID NO: 2367071 - RNA, 19 nt, Artificial Sequence
  Description of Artificial Sequence: Synthetic oligonucleotide
  Antisense strand to SEQ ID NO: 2367070
uacgcaaagcacuuggcca

SEQ ID NO: 2367072 - RNA, 19 nt, Artificial Sequence
  Description of Artificial Sequence: Synthetic oligonucleotide
  Sense strand starting at position 3480 of SEQ ID NO: 1885784
auccuaggauguuugacaa

SEQ ID NO: 2367073 - RNA, 19 nt, Artificial Sequence
  Description of Artificial Sequence: Synthetic oligonucleotide
  Antisense strand to SEQ ID NO: 2367072
uugucaaacauccuaggau

SEQ ID NO: 2367074 - RNA, 19 nt, Artificial Sequence
  Description of Artificial Sequence: Synthetic oligonucleotide
  Sense strand starting at position 3522 of SEQ ID NO: 1885784
uguagugacccucaacuca

SEQ ID NO: 2367075 - RNA, 19 nt, Artificial Sequence
  Description of Artificial Sequence: Synthetic oligonucleotide
  Antisense strand to SEQ ID NO: 2367074
ugaguugagggucacuaca

SEQ ID NO: 2367076 - RNA, 19 nt, Artificial Sequence
  Description of Artificial Sequence: Synthetic oligonucleotide
  Sense strand starting at position 3689 of SEQ ID NO: 1885784
aagugaggcccaugugaau

SEQ ID NO: 2367077 - RNA, 19 nt, Artificial Sequence
  Description of Artificial Sequence: Synthetic oligonucleotide
  Antisense strand to SEQ ID NO: 2367076
auucacaugggccucacuu

SEQ ID NO: 2367078 - RNA, 19 nt, Artificial Sequence
  Description of Artificial Sequence: Synthetic oligonucleotide
  Sense strand starting at position 3733 of SEQ ID NO: 1885784
uguccauuccucugggaug

SEQ ID NO: 2367079 - RNA, 19 nt, Artificial Sequence
  Description of Artificial Sequence: Synthetic oligonucleotide
  Antisense strand to SEQ ID NO: 2367078
caucccagaggaauggaca

SEQ ID NO: 2367080 - RNA, 19 nt, Artificial Sequence
  Description of Artificial Sequence: Synthetic oligonucleotide
  Sense strand starting at position 3817 of SEQ ID NO: 1885784
ccgaucuccucacugacau

SEQ ID NO: 2367081 - RNA, 19 nt, Artificial Sequence
  Description of Artificial Sequence: Synthetic oligonucleotide
  Antisense strand to SEQ ID NO: 2367080
augucagugaggagaucgg

SEQ ID NO: 2367082 - RNA, 19 nt, Artificial Sequence
  Description of Artificial Sequence: Synthetic oligonucleotide
  Sense strand starting at position 3852 of SEQ ID NO: 1885784
ccauaagguuccucccuga

SEQ ID NO: 2367083 - RNA, 19 nt, Artificial Sequence
  Description of Artificial Sequence: Synthetic oligonucleotide
  Antisense strand to SEQ ID NO: 2367082
ucagggaggaaccuuaugg

SEQ ID NO: 2367084 - RNA, 19 nt, Artificial Sequence
  Description of Artificial Sequence: Synthetic oligonucleotide
  Sense strand starting at position 1 of SEQ ID NO: 1885785
ggcuuugauccacagaagu

SEQ ID NO: 2367085 - RNA, 19 nt, Artificial Sequence
  Description of Artificial Sequence: Synthetic oligonucleotide
  Antisense strand to SEQ ID NO: 2367084
acuucuguggaucaaagcc

SEQ ID NO: 2367086 - RNA, 19 nt, Artificial Sequence
  Description of Artificial Sequence: Synthetic oligonucleotide
  Sense strand starting at position 106 of SEQ ID NO: 1885785
uggugaaggugaccagaau

SEQ ID NO: 2367087 - RNA, 19 nt, Artificial Sequence
  Description of Artificial Sequence: Synthetic oligonucleotide
  Antisense strand to SEQ ID NO: 2367086
auucuggucaccuucacca

SEQ ID NO: 2367088 - RNA, 19 nt, Artificial Sequence
  Description of Artificial Sequence: Synthetic oligonucleotide
  Sense strand starting at position 178 of SEQ ID NO: 1885785
uguugaucucuagagguga

SEQ ID NO: 2367089 - RNA, 19 nt, Artificial Sequence
  Description of Artificial Sequence: Synthetic oligonucleotide
  Antisense strand to SEQ ID NO: 2367088
ucaccucuagagaucaaca

SEQ ID NO: 2367090 - RNA, 19 nt, Artificial Sequence
  Description of Artificial Sequence: Synthetic oligonucleotide
  Sense strand starting at position 192 of SEQ ID NO: 1885785
ggugaagcuaccgacucau

SEQ ID NO: 2367091 - RNA, 19 nt, Artificial Sequence
  Description of Artificial Sequence: Synthetic oligonucleotide
  Antisense strand to SEQ ID NO: 2367090
augagucgguagcuucacc

SEQ ID NO: 2367092 - RNA, 19 nt, Artificial Sequence
  Description of Artificial Sequence: Synthetic oligonucleotide
  Sense strand starting at position 235 of SEQ ID NO: 1885785
aucucaaagcccugaggau

SEQ ID NO: 2367093 - RNA, 19 nt, Artificial Sequence
  Description of Artificial Sequence: Synthetic oligonucleotide
  Antisense strand to SEQ ID NO: 2367092
auccucagggcuuugagau

SEQ ID NO: 2367094 - RNA, 19 nt, Artificial Sequence
  Description of Artificial Sequence: Synthetic oligonucleotide
  Sense strand starting at position 333 of SEQ ID NO: 1885785
gguuacugggucugaggau

SEQ ID NO: 2367095 - RNA, 19 nt, Artificial Sequence
  Description of Artificial Sequence: Synthetic oligonucleotide
  Antisense strand to SEQ ID NO: 2367094
auccucagacccaguaacc

SEQ ID NO: 2367096 - RNA, 19 nt, Artificial Sequence
  Description of Artificial Sequence: Synthetic oligonucleotide
  Sense strand starting at position 345 of SEQ ID NO: 1885785
ugaggauauugucuuugga

SEQ ID NO: 2367097 - RNA, 19 nt, Artificial Sequence
  Description of Artificial Sequence: Synthetic oligonucleotide
  Antisense strand to SEQ ID NO: 2367096
uccaaagacaauauccuca

SEQ ID NO: 2367098 - RNA, 19 nt, Artificial Sequence
  Description of Artificial Sequence: Synthetic oligonucleotide
  Sense strand starting at position 347 of SEQ ID NO: 1885785
aggauauugucuuuggaga

SEQ ID NO: 2367099 - RNA, 19 nt, Artificial Sequence
  Description of Artificial Sequence: Synthetic oligonucleotide
  Antisense strand to SEQ ID NO: 2367098
ucuccaaagacaauauccu

SEQ ID NO: 2367100 - RNA, 19 nt, Artificial Sequence
  Description of Artificial Sequence: Synthetic oligonucleotide
  Sense strand starting at position 348 of SEQ ID NO: 1885785
ggauauugucuuuggagau

SEQ ID NO: 2367101 - RNA, 19 nt, Artificial Sequence
  Description of Artificial Sequence: Synthetic oligonucleotide
  Antisense strand to SEQ ID NO: 2367100
aucuccaaagacaauaucc

SEQ ID NO: 2367102 - RNA, 19 nt, Artificial Sequence
  Description of Artificial Sequence: Synthetic oligonucleotide
  Sense strand starting at position 352 of SEQ ID NO: 1885785
auugucuuuggagauaguu

SEQ ID NO: 2367103 - RNA, 19 nt, Artificial Sequence
  Description of Artificial Sequence: Synthetic oligonucleotide
  Antisense strand to SEQ ID NO: 2367102
aacuaucuccaaagacaau

SEQ ID NO: 2367104 - RNA, 19 nt, Artificial Sequence
  Description of Artificial Sequence: Synthetic oligonucleotide
  Sense strand starting at position 354 of SEQ ID NO: 1885785
ugucuuuggagauaguuag

SEQ ID NO: 2367105 - RNA, 19 nt, Artificial Sequence
  Description of Artificial Sequence: Synthetic oligonucleotide
  Antisense strand to SEQ ID NO: 2367104
cuaacuaucuccaaagaca

SEQ ID NO: 2367106 - RNA, 19 nt, Artificial Sequence
  Description of Artificial Sequence: Synthetic oligonucleotide
  Sense strand starting at position 358 of SEQ ID NO: 1885785
uuuggagauaguuaguuga

SEQ ID NO: 2367107 - RNA, 19 nt, Artificial Sequence
  Description of Artificial Sequence: Synthetic oligonucleotide
  Antisense strand to SEQ ID NO: 2367106
ucaacuaacuaucuccaaa

SEQ ID NO: 2367108 - RNA, 19 nt, Artificial Sequence
  Description of Artificial Sequence: Synthetic oligonucleotide
  Sense strand starting at position 360 of SEQ ID NO: 1885785
uggagauaguuaguugacu

SEQ ID NO: 2367109 - RNA, 19 nt, Artificial Sequence
  Description of Artificial Sequence: Synthetic oligonucleotide
  Antisense strand to SEQ ID NO: 2367108
agucaacuaacuaucucca

SEQ ID NO: 2367110 - RNA, 19 nt, Artificial Sequence
  Description of Artificial Sequence: Synthetic oligonucleotide
  Sense strand starting at position 361 of SEQ ID NO: 1885785
ggagauaguuaguugacuu

SEQ ID NO: 2367111 - RNA, 19 nt, Artificial Sequence
  Description of Artificial Sequence: Synthetic oligonucleotide
  Antisense strand to SEQ ID NO: 2367110
aagucaacuaacuaucucc

SEQ ID NO: 2367112 - RNA, 19 nt, Artificial Sequence
  Description of Artificial Sequence: Synthetic oligonucleotide
  Sense strand starting at position 362 of SEQ ID NO: 1885785
gagauaguuaguugacuug

SEQ ID NO: 2367113 - RNA, 19 nt, Artificial Sequence
  Description of Artificial Sequence: Synthetic oligonucleotide
  Antisense strand to SEQ ID NO: 2367112
caagucaacuaacuaucuc

SEQ ID NO: 2367114 - RNA, 19 nt, Artificial Sequence
  Description of Artificial Sequence: Synthetic oligonucleotide
  Sense strand starting at position 409 of SEQ ID NO: 1885785
gguaauuuguuugugaagu

SEQ ID NO: 2367115 - RNA, 19 nt, Artificial Sequence
  Description of Artificial Sequence: Synthetic oligonucleotide
  Antisense strand to SEQ ID NO: 2367114
acuucacaaacaaauuacc

SEQ ID NO: 2367116 - RNA, 19 nt, Artificial Sequence
  Description of Artificial Sequence: Synthetic oligonucleotide
  Sense strand starting at position 417 of SEQ ID NO: 1885785
guuugugaaguugaacuau

SEQ ID NO: 2367117 - RNA, 19 nt, Artificial Sequence
  Description of Artificial Sequence: Synthetic oligonucleotide
  Antisense strand to SEQ ID NO: 2367116
auaguucaacuucacaaac

SEQ ID NO: 2367118 - RNA, 19 nt, Artificial Sequence
  Description of Artificial Sequence: Synthetic oligonucleotide
  Sense strand starting at position 431 of SEQ ID NO: 1885785
acuauugaucagugggaau

SEQ ID NO: 2367119 - RNA, 19 nt, Artificial Sequence
  Description of Artificial Sequence: Synthetic oligonucleotide
  Antisense strand to SEQ ID NO: 2367118
auucccacugaucaauagu

SEQ ID NO: 2367120 - RNA, 19 nt, Artificial Sequence
  Description of Artificial Sequence: Synthetic oligonucleotide
  Sense strand starting at position 539 of SEQ ID NO: 1885785
ggaugagacuauucucuuu

SEQ ID NO: 2367121 - RNA, 19 nt, Artificial Sequence
  Description of Artificial Sequence: Synthetic oligonucleotide
  Antisense strand to SEQ ID NO: 2367120
aaagagaauagucucaucc

SEQ ID NO: 2367122 - RNA, 19 nt, Artificial Sequence
  Description of Artificial Sequence: Synthetic oligonucleotide
  Sense strand starting at position 542 of SEQ ID NO: 1885785
ugagacuauucucuuugga

SEQ ID NO: 2367123 - RNA, 19 nt, Artificial Sequence
  Description of Artificial Sequence: Synthetic oligonucleotide
  Antisense strand to SEQ ID NO: 2367122
uccaaagagaauagucuca

SEQ ID NO: 2367124 - RNA, 19 nt, Artificial Sequence
  Description of Artificial Sequence: Synthetic oligonucleotide
  Sense strand starting at position 544 of SEQ ID NO: 1885785
agacuauucucuuuggaga

SEQ ID NO: 2367125 - RNA, 19 nt, Artificial Sequence
  Description of Artificial Sequence: Synthetic oligonucleotide
  Antisense strand to SEQ ID NO: 2367124
ucuccaaagagaauagucu

SEQ ID NO: 2367126 - RNA, 19 nt, Artificial Sequence
  Description of Artificial Sequence: Synthetic oligonucleotide
  Sense strand starting at position 545 of SEQ ID NO: 1885785
gacuauucucuuuggagau

SEQ ID NO: 2367127 - RNA, 19 nt, Artificial Sequence
  Description of Artificial Sequence: Synthetic oligonucleotide
  Antisense strand to SEQ ID NO: 2367126
aucuccaaagagaauaguc

SEQ ID NO: 2367128 - RNA, 19 nt, Artificial Sequence
  Description of Artificial Sequence: Synthetic oligonucleotide
  Sense strand starting at position 590 of SEQ ID NO: 1885785
ccacuaauuagugggaaug

SEQ ID NO: 2367129 - RNA, 19 nt, Artificial Sequence
  Description of Artificial Sequence: Synthetic oligonucleotide
  Antisense strand to SEQ ID NO: 2367128
cauucccacuaauuagugg

SEQ ID NO: 2367130 - RNA, 19 nt, Artificial Sequence
  Description of Artificial Sequence: Synthetic oligonucleotide
  Sense strand starting at position 619 of SEQ ID NO: 1885785
uccauagaggucgagucau

SEQ ID NO: 2367131 - RNA, 19 nt, Artificial Sequence
  Description of Artificial Sequence: Synthetic oligonucleotide
  Antisense strand to SEQ ID NO: 2367130
augacucgaccucuaugga

SEQ ID NO: 2367132 - RNA, 19 nt, Artificial Sequence
  Description of Artificial Sequence: Synthetic oligonucleotide
  Sense strand starting at position 672 of SEQ ID NO: 1885785
cuugauggagagugaaguu

SEQ ID NO: 2367133 - RNA, 19 nt, Artificial Sequence
  Description of Artificial Sequence: Synthetic oligonucleotide
  Antisense strand to SEQ ID NO: 2367132
aacuucacucuccaucaag

SEQ ID NO: 2367134 - RNA, 19 nt, Artificial Sequence
  Description of Artificial Sequence: Synthetic oligonucleotide
  Sense strand starting at position 1078 of SEQ ID NO: 1885785
gucccaauccuugaggcaa

SEQ ID NO: 2367135 - RNA, 19 nt, Artificial Sequence
  Description of Artificial Sequence: Synthetic oligonucleotide
  Antisense strand to SEQ ID NO: 2367134
uugccucaaggauugggac

SEQ ID NO: 2367136 - RNA, 19 nt, Artificial Sequence
  Description of Artificial Sequence: Synthetic oligonucleotide
  Sense strand starting at position 1756 of SEQ ID NO: 1885785
ucuacaguguugucgauuu

SEQ ID NO: 2367137 - RNA, 19 nt, Artificial Sequence
  Description of Artificial Sequence: Synthetic oligonucleotide
  Antisense strand to SEQ ID NO: 2367136
aaaucgacaacacuguaga

SEQ ID NO: 2367138 - RNA, 19 nt, Artificial Sequence
  Description of Artificial Sequence: Synthetic oligonucleotide
  Sense strand starting at position 2049 of SEQ ID NO: 1885785
cagacucuucgucagagag

SEQ ID NO: 2367139 - RNA, 19 nt, Artificial Sequence
  Description of Artificial Sequence: Synthetic oligonucleotide
  Antisense strand to SEQ ID NO: 2367138
cucucugacgaagagucug

SEQ ID NO: 2367140 - RNA, 19 nt, Artificial Sequence
  Description of Artificial Sequence: Synthetic oligonucleotide
  Sense strand starting at position 2186 of SEQ ID NO: 1885785
gcagaugccagagauucuu

SEQ ID NO: 2367141 - RNA, 19 nt, Artificial Sequence
  Description of Artificial Sequence: Synthetic oligonucleotide
  Antisense strand to SEQ ID NO: 2367140
aagaaucucuggcaucugc

SEQ ID NO: 2367142 - RNA, 19 nt, Artificial Sequence
  Description of Artificial Sequence: Synthetic oligonucleotide
  Sense strand starting at position 2292 of SEQ ID NO: 1885785
caggacuugcacuagacuu

SEQ ID NO: 2367143 - RNA, 19 nt, Artificial Sequence
  Description of Artificial Sequence: Synthetic oligonucleotide
  Antisense strand to SEQ ID NO: 2367142
aagucuagugcaaguccug

SEQ ID NO: 2367144 - RNA, 19 nt, Artificial Sequence
  Description of Artificial Sequence: Synthetic oligonucleotide
  Sense strand starting at position 2294 of SEQ ID NO: 1885785
ggacuugcacuagacuuua

SEQ ID NO: 2367145 - RNA, 19 nt, Artificial Sequence
  Description of Artificial Sequence: Synthetic oligonucleotide
  Antisense strand to SEQ ID NO: 2367144
uaaagucuagugcaagucc

SEQ ID NO: 2367146 - RNA, 19 nt, Artificial Sequence
  Description of Artificial Sequence: Synthetic oligonucleotide
  Sense strand starting at position 2347 of SEQ ID NO: 1885785
ccuuuacuccagggagaca

SEQ ID NO: 2367147 - RNA, 19 nt, Artificial Sequence
  Description of Artificial Sequence: Synthetic oligonucleotide
  Antisense strand to SEQ ID NO: 2367146
ugucucccuggaguaaagg

SEQ ID NO: 2367148 - RNA, 19 nt, Artificial Sequence
  Description of Artificial Sequence: Synthetic oligonucleotide
  Sense strand starting at position 2369 of SEQ ID NO: 1885785
auguaaacuggcuauuaca

SEQ ID NO: 2367149 - RNA, 19 nt, Artificial Sequence
  Description of Artificial Sequence: Synthetic oligonucleotide
  Antisense strand to SEQ ID NO: 2367148
uguaauagccaguuuacau

SEQ ID NO: 2367150 - RNA, 19 nt, Artificial Sequence
  Description of Artificial Sequence: Synthetic oligonucleotide
  Sense strand starting at position 2377 of SEQ ID NO: 1885785
uggcuauuacaguacaacu

SEQ ID NO: 2367151 - RNA, 19 nt, Artificial Sequence
  Description of Artificial Sequence: Synthetic oligonucleotide
  Antisense strand to SEQ ID NO: 2367150
aguuguacuguaauagcca

SEQ ID NO: 2367152 - RNA, 19 nt, Artificial Sequence
  Description of Artificial Sequence: Synthetic oligonucleotide
  Sense strand starting at position 2707 of SEQ ID NO: 1885785
gucuguauugguagugaug

SEQ ID NO: 2367153 - RNA, 19 nt, Artificial Sequence
  Description of Artificial Sequence: Synthetic oligonucleotide
  Antisense strand to SEQ ID NO: 2367152
caucacuaccaauacagac

SEQ ID NO: 2367154 - RNA, 19 nt, Artificial Sequence
  Description of Artificial Sequence: Synthetic oligonucleotide
  Sense strand starting at position 2756 of SEQ ID NO: 1885785
ccgucuguaucauuuagac

SEQ ID NO: 2367155 - RNA, 19 nt, Artificial Sequence
  Description of Artificial Sequence: Synthetic oligonucleotide
  Antisense strand to SEQ ID NO: 2367154
gucuaaaugauacagacgg

SEQ ID NO: 2367156 - RNA, 19 nt, Artificial Sequence
  Description of Artificial Sequence: Synthetic oligonucleotide
  Sense strand starting at position 2940 of SEQ ID NO: 1885785
uucugagcuccagaccuau

SEQ ID NO: 2367157 - RNA, 19 nt, Artificial Sequence
  Description of Artificial Sequence: Synthetic oligonucleotide
  Antisense strand to SEQ ID NO: 2367156
auaggucuggagcucagaa

SEQ ID NO: 2367158 - RNA, 19 nt, Artificial Sequence
  Description of Artificial Sequence: Synthetic oligonucleotide
  Sense strand starting at position 3454 of SEQ ID NO: 1885785
ccucauacaugguucuaca

SEQ ID NO: 2367159 - RNA, 19 nt, Artificial Sequence
  Description of Artificial Sequence: Synthetic oligonucleotide
  Antisense strand to SEQ ID NO: 2367158
uguagaaccauguaugagg

SEQ ID NO: 2367160 - RNA, 19 nt, Artificial Sequence
  Description of Artificial Sequence: Synthetic oligonucleotide
  Sense strand starting at position 3663 of SEQ ID NO: 1885785
aggagucuucccuaaccuc

SEQ ID NO: 2367161 - RNA, 19 nt, Artificial Sequence
  Description of Artificial Sequence: Synthetic oligonucleotide
  Antisense strand to SEQ ID NO: 2367160
gagguuagggaagacuccu

SEQ ID NO: 2367162 - RNA, 19 nt, Artificial Sequence
  Description of Artificial Sequence: Synthetic oligonucleotide
  Sense strand starting at position 3915 of SEQ ID NO: 1885785
auugucagccgggaaaucu

SEQ ID NO: 2367163 - RNA, 19 nt, Artificial Sequence
  Description of Artificial Sequence: Synthetic oligonucleotide
  Antisense strand to SEQ ID NO: 2367162
agauuucccggcugacaau

SEQ ID NO: 2367164 - RNA, 19 nt, Artificial Sequence
  Description of Artificial Sequence: Synthetic oligonucleotide
  Sense strand starting at position 22 of SEQ ID NO: 1885786
uucuaugagcucugaaauu

SEQ ID NO: 2367165 - RNA, 19 nt, Artificial Sequence
  Description of Artificial Sequence: Synthetic oligonucleotide
  Antisense strand to SEQ ID NO: 2367164
aauuucagagcucauagaa

SEQ ID NO: 2367166 - RNA, 19 nt, Artificial Sequence
  Description of Artificial Sequence: Synthetic oligonucleotide
  Sense strand starting at position 135 of SEQ ID NO: 1885786
ucugaaagauauugcucaa

SEQ ID NO: 2367167 - RNA, 19 nt, Artificial Sequence
  Description of Artificial Sequence: Synthetic oligonucleotide
  Antisense strand to SEQ ID NO: 2367166
uugagcaauaucuuucaga

SEQ ID NO: 2367168 - RNA, 19 nt, Artificial Sequence
  Description of Artificial Sequence: Synthetic oligonucleotide
  Sense strand starting at position 1995 of SEQ ID NO: 1885786
guccguuccuagccuguaa

SEQ ID NO: 2367169 - RNA, 19 nt, Artificial Sequence
  Description of Artificial Sequence: Synthetic oligonucleotide
  Antisense strand to SEQ ID NO: 2367168
uuacaggcuaggaacggac

SEQ ID NO: 2367170 - RNA, 19 nt, Artificial Sequence
  Description of Artificial Sequence: Synthetic oligonucleotide
  Sense strand starting at position 1999 of SEQ ID NO: 1885786
guuccuagccuguaaagca

SEQ ID NO: 2367171 - RNA, 19 nt, Artificial Sequence
  Description of Artificial Sequence: Synthetic oligonucleotide
  Antisense strand to SEQ ID NO: 2367170
ugcuuuacaggcuaggaac

SEQ ID NO: 2367172 - RNA, 19 nt, Artificial Sequence
  Description of Artificial Sequence: Synthetic oligonucleotide
  Sense strand starting at position 2090 of SEQ ID NO: 1885786
uccaguucggucugacuua

SEQ ID NO: 2367173 - RNA, 19 nt, Artificial Sequence
  Description of Artificial Sequence: Synthetic oligonucleotide
  Antisense strand to SEQ ID NO: 2367172
uaagucagaccgaacugga

SEQ ID NO: 2367174 - RNA, 19 nt, Artificial Sequence
  Description of Artificial Sequence: Synthetic oligonucleotide
  Sense strand starting at position 2112 of SEQ ID NO: 1885786
uuaucaauuguagagucuu

SEQ ID NO: 2367175 - RNA, 19 nt, Artificial Sequence
  Description of Artificial Sequence: Synthetic oligonucleotide
  Antisense strand to SEQ ID NO: 2367174
aagacucuacaauugauaa

SEQ ID NO: 2367176 - RNA, 19 nt, Artificial Sequence
  Description of Artificial Sequence: Synthetic oligonucleotide
  Sense strand starting at position 2229 of SEQ ID NO: 1885786
ggauauucgugccuuaaau

SEQ ID NO: 2367177 - RNA, 19 nt, Artificial Sequence
  Description of Artificial Sequence: Synthetic oligonucleotide
  Antisense strand to SEQ ID NO: 2367176
auuuaaggcacgaauaucc

SEQ ID NO: 2367178 - RNA, 19 nt, Artificial Sequence
  Description of Artificial Sequence: Synthetic oligonucleotide
  Sense strand starting at position 2231 of SEQ ID NO: 1885786
auauucgugccuuaaauaa

SEQ ID NO: 2367179 - RNA, 19 nt, Artificial Sequence
  Description of Artificial Sequence: Synthetic oligonucleotide
  Antisense strand to SEQ ID NO: 2367178
uuauuuaaggcacgaauau

SEQ ID NO: 2367180 - RNA, 19 nt, Artificial Sequence
  Description of Artificial Sequence: Synthetic oligonucleotide
  Sense strand starting at position 2238 of SEQ ID NO: 1885786
ugccuuaaauaaggauauu

SEQ ID NO: 2367181 - RNA, 19 nt, Artificial Sequence
  Description of Artificial Sequence: Synthetic oligonucleotide
  Antisense strand to SEQ ID NO: 2367180
aauauccuuauuuaaggca

SEQ ID NO: 2367182 - RNA, 19 nt, Artificial Sequence
  Description of Artificial Sequence: Synthetic oligonucleotide
  Sense strand starting at position 2295 of SEQ ID NO: 1885786
auauaaugggcucacguua

SEQ ID NO: 2367183 - RNA, 19 nt, Artificial Sequence
  Description of Artificial Sequence: Synthetic oligonucleotide
  Antisense strand to SEQ ID NO: 2367182
uaacgugagcccauuauau

SEQ ID NO: 2367184 - RNA, 19 nt, Artificial Sequence
  Description of Artificial Sequence: Synthetic oligonucleotide
  Sense strand starting at position 2307 of SEQ ID NO: 1885786
cacguuaauuuauagaguu

SEQ ID NO: 2367185 - RNA, 19 nt, Artificial Sequence
  Description of Artificial Sequence: Synthetic oligonucleotide
  Antisense strand to SEQ ID NO: 2367184
aacucuauaaauuaacgug

SEQ ID NO: 2367186 - RNA, 19 nt, Artificial Sequence
  Description of Artificial Sequence: Synthetic oligonucleotide
  Sense strand starting at position 2386 of SEQ ID NO: 1885786
uuuaaauguagcuggagaa

SEQ ID NO: 2367187 - RNA, 19 nt, Artificial Sequence
  Description of Artificial Sequence: Synthetic oligonucleotide
  Antisense strand to SEQ ID NO: 2367186
uucuccagcuacauuuaaa

SEQ ID NO: 2367188 - RNA, 19 nt, Artificial Sequence
  Description of Artificial Sequence: Synthetic oligonucleotide
  Sense strand starting at position 2390 of SEQ ID NO: 1885786
aauguagcuggagaaaguu

SEQ ID NO: 2367189 - RNA, 19 nt, Artificial Sequence
  Description of Artificial Sequence: Synthetic oligonucleotide
  Antisense strand to SEQ ID NO: 2367188
aacuuucuccagcuacauu

SEQ ID NO: 2367190 - RNA, 19 nt, Artificial Sequence
  Description of Artificial Sequence: Synthetic oligonucleotide
  Sense strand starting at position 2419 of SEQ ID NO: 1885786
acauguguuaugugcaagu

SEQ ID NO: 2367191 - RNA, 19 nt, Artificial Sequence
  Description of Artificial Sequence: Synthetic oligonucleotide
  Antisense strand to SEQ ID NO: 2367190
acuugcacauaacacaugu

SEQ ID NO: 2367192 - RNA, 19 nt, Artificial Sequence
  Description of Artificial Sequence: Synthetic oligonucleotide
  Sense strand starting at position 2421 of SEQ ID NO: 1885786
auguguuaugugcaaguau

SEQ ID NO: 2367193 - RNA, 19 nt, Artificial Sequence
  Description of Artificial Sequence: Synthetic oligonucleotide
  Antisense strand to SEQ ID NO: 2367192
auacuugcacauaacacau

SEQ ID NO: 2367194 - RNA, 19 nt, Artificial Sequence
  Description of Artificial Sequence: Synthetic oligonucleotide
  Sense strand starting at position 2486 of SEQ ID NO: 1885786
aucuuacagucaugcauuu

SEQ ID NO: 2367195 - RNA, 19 nt, Artificial Sequence
  Description of Artificial Sequence: Synthetic oligonucleotide
  Antisense strand to SEQ ID NO: 2367194
aaaugcaugacuguaagau

SEQ ID NO: 2367196 - RNA, 19 nt, Artificial Sequence
  Description of Artificial Sequence: Synthetic oligonucleotide
  Sense strand starting at position 2531 of SEQ ID NO: 1885786
uugccauaauuggcucaua

SEQ ID NO: 2367197 - RNA, 19 nt, Artificial Sequence
  Description of Artificial Sequence: Synthetic oligonucleotide
  Antisense strand to SEQ ID NO: 2367196
uaugagccaauuauggcaa

SEQ ID NO: 2367198 - RNA, 19 nt, Artificial Sequence
  Description of Artificial Sequence: Synthetic oligonucleotide
  Sense strand starting at position 2532 of SEQ ID NO: 1885786
ugccauaauuggcucauaa

SEQ ID NO: 2367199 - RNA, 19 nt, Artificial Sequence
  Description of Artificial Sequence: Synthetic oligonucleotide
  Antisense strand to SEQ ID NO: 2367198
uuaugagccaauuauggca

SEQ ID NO: 2367200 - RNA, 19 nt, Artificial Sequence
  Description of Artificial Sequence: Synthetic oligonucleotide
  Sense strand starting at position 2644 of SEQ ID NO: 1885786
uuuaacuucgacuaguaaa

SEQ ID NO: 2367201 - RNA, 19 nt, Artificial Sequence
  Description of Artificial Sequence: Synthetic oligonucleotide
  Antisense strand to SEQ ID NO: 2367200
uuuacuagucgaaguuaaa

SEQ ID NO: 2367202 - RNA, 19 nt, Artificial Sequence
  Description of Artificial Sequence: Synthetic oligonucleotide
  Sense strand starting at position 2709 of SEQ ID NO: 1885786
ugcaaauuaugacugguua

SEQ ID NO: 2367203 - RNA, 19 nt, Artificial Sequence
  Description of Artificial Sequence: Synthetic oligonucleotide
  Antisense strand to SEQ ID NO: 2367202
uaaccagucauaauuugca

SEQ ID NO: 2367204 - RNA, 19 nt, Artificial Sequence
  Description of Artificial Sequence: Synthetic oligonucleotide
  Sense strand starting at position 2710 of SEQ ID NO: 1885786
gcaaauuaugacugguuau

SEQ ID NO: 2367205 - RNA, 19 nt, Artificial Sequence
  Description of Artificial Sequence: Synthetic oligonucleotide
  Antisense strand to SEQ ID NO: 2367204
auaaccagucauaauuugc

SEQ ID NO: 2367206 - RNA, 19 nt, Artificial Sequence
  Description of Artificial Sequence: Synthetic oligonucleotide
  Sense strand starting at position 2720 of SEQ ID NO: 1885786
acugguuaucauuauguca

SEQ ID NO: 2367207 - RNA, 19 nt, Artificial Sequence
  Description of Artificial Sequence: Synthetic oligonucleotide
  Antisense strand to SEQ ID NO: 2367206
ugacauaaugauaaccagu

SEQ ID NO: 2367208 - RNA, 19 nt, Artificial Sequence
  Description of Artificial Sequence: Synthetic oligonucleotide
  Sense strand starting at position 2723 of SEQ ID NO: 1885786
gguuaucauuaugucauga

SEQ ID NO: 2367209 - RNA, 19 nt, Artificial Sequence
  Description of Artificial Sequence: Synthetic oligonucleotide
  Antisense strand to SEQ ID NO: 2367208
ucaugacauaaugauaacc

SEQ ID NO: 2367210 - RNA, 19 nt, Artificial Sequence
  Description of Artificial Sequence: Synthetic oligonucleotide
  Sense strand starting at position 2725 of SEQ ID NO: 1885786
uuaucauuaugucaugauc

SEQ ID NO: 2367211 - RNA, 19 nt, Artificial Sequence
  Description of Artificial Sequence: Synthetic oligonucleotide
  Antisense strand to SEQ ID NO: 2367210
gaucaugacauaaugauaa

SEQ ID NO: 2367212 - RNA, 19 nt, Artificial Sequence
  Description of Artificial Sequence: Synthetic oligonucleotide
  Sense strand starting at position 2728 of SEQ ID NO: 1885786
ucauuaugucaugaucuac

SEQ ID NO: 2367213 - RNA, 19 nt, Artificial Sequence
  Description of Artificial Sequence: Synthetic oligonucleotide
  Antisense strand to SEQ ID NO: 2367212
guagaucaugacauaauga

SEQ ID NO: 2367214 - RNA, 19 nt, Artificial Sequence
  Description of Artificial Sequence: Synthetic oligonucleotide
  Sense strand starting at position 2746 of SEQ ID NO: 1885786
cuugcaucucaggaguaac

SEQ ID NO: 2367215 - RNA, 19 nt, Artificial Sequence
  Description of Artificial Sequence: Synthetic oligonucleotide
  Antisense strand to SEQ ID NO: 2367214
guuacuccugagaugcaag

SEQ ID NO: 2367216 - RNA, 19 nt, Artificial Sequence
  Description of Artificial Sequence: Synthetic oligonucleotide
  Sense strand starting at position 2749 of SEQ ID NO: 1885786
gcaucucaggaguaacgua

SEQ ID NO: 2367217 - RNA, 19 nt, Artificial Sequence
  Description of Artificial Sequence: Synthetic oligonucleotide
  Antisense strand to SEQ ID NO: 2367216
uacguuacuccugagaugc

SEQ ID NO: 2367218 - RNA, 19 nt, Artificial Sequence
  Description of Artificial Sequence: Synthetic oligonucleotide
  Sense strand starting at position 3052 of SEQ ID NO: 1885786
uggaauuaccgaugcgcau

SEQ ID NO: 2367219 - RNA, 19 nt, Artificial Sequence
  Description of Artificial Sequence: Synthetic oligonucleotide
  Antisense strand to SEQ ID NO: 2367218
augcgcaucgguaauucca

SEQ ID NO: 2367220 - RNA, 19 nt, Artificial Sequence
  Description of Artificial Sequence: Synthetic oligonucleotide
  Sense strand starting at position 3367 of SEQ ID NO: 1885786
gccaccacccguuauuaua

SEQ ID NO: 2367221 - RNA, 19 nt, Artificial Sequence
  Description of Artificial Sequence: Synthetic oligonucleotide
  Antisense strand to SEQ ID NO: 2367220
uauaauaacgggugguggc

SEQ ID NO: 2367222 - RNA, 19 nt, Artificial Sequence
  Description of Artificial Sequence: Synthetic oligonucleotide
  Sense strand starting at position 3375 of SEQ ID NO: 1885786
ccguuauuauaauugcagu

SEQ ID NO: 2367223 - RNA, 19 nt, Artificial Sequence
  Description of Artificial Sequence: Synthetic oligonucleotide
  Antisense strand to SEQ ID NO: 2367222
acugcaauuauaauaacgg

SEQ ID NO: 2367224 - RNA, 19 nt, Artificial Sequence
  Description of Artificial Sequence: Synthetic oligonucleotide
  Sense strand starting at position 3419 of SEQ ID NO: 1885786
uuccaauugugaugaugaa

SEQ ID NO: 2367225 - RNA, 19 nt, Artificial Sequence
  Description of Artificial Sequence: Synthetic oligonucleotide
  Antisense strand to SEQ ID NO: 2367224
uucaucaucacaauuggaa

SEQ ID NO: 2367226 - RNA, 19 nt, Artificial Sequence
  Description of Artificial Sequence: Synthetic oligonucleotide
  Sense strand starting at position 3488 of SEQ ID NO: 1885786
uucugucuucuguaccuga

SEQ ID NO: 2367227 - RNA, 19 nt, Artificial Sequence
  Description of Artificial Sequence: Synthetic oligonucleotide
  Antisense strand to SEQ ID NO: 2367226
ucagguacagaagacagaa

SEQ ID NO: 2367228 - RNA, 19 nt, Artificial Sequence
  Description of Artificial Sequence: Synthetic oligonucleotide
  Sense strand starting at position 3499 of SEQ ID NO: 1885786
guaccugacucguugauuu

SEQ ID NO: 2367229 - RNA, 19 nt, Artificial Sequence
  Description of Artificial Sequence: Synthetic oligonucleotide
  Antisense strand to SEQ ID NO: 2367228
aaaucaacgagucagguac

SEQ ID NO: 2367230 - RNA, 19 nt, Artificial Sequence
  Description of Artificial Sequence: Synthetic oligonucleotide
  Sense strand starting at position 3507 of SEQ ID NO: 1885786
cucguugauuuguagucua

SEQ ID NO: 2367231 - RNA, 19 nt, Artificial Sequence
  Description of Artificial Sequence: Synthetic oligonucleotide
  Antisense strand to SEQ ID NO: 2367230
uagacuacaaaucaacgag

SEQ ID NO: 2367232 - RNA, 19 nt, Artificial Sequence
  Description of Artificial Sequence: Synthetic oligonucleotide
  Sense strand starting at position 3520 of SEQ ID NO: 1885786
agucuaugacccugaugaa

SEQ ID NO: 2367233 - RNA, 19 nt, Artificial Sequence
  Description of Artificial Sequence: Synthetic oligonucleotide
  Antisense strand to SEQ ID NO: 2367232
uucaucagggucauagacu

SEQ ID NO: 2367234 - RNA, 19 nt, Artificial Sequence
  Description of Artificial Sequence: Synthetic oligonucleotide
  Sense strand starting at position 3523 of SEQ ID NO: 1885786
cuaugacccugaugaaaga

SEQ ID NO: 2367235 - RNA, 19 nt, Artificial Sequence
  Description of Artificial Sequence: Synthetic oligonucleotide
  Antisense strand to SEQ ID NO: 2367234
ucuuucaucagggucauag

SEQ ID NO: 2367236 - RNA, 19 nt, Artificial Sequence
  Description of Artificial Sequence: Synthetic oligonucleotide
  Sense strand starting at position 3591 of SEQ ID NO: 1885786
agcuaagacugaugacuca

SEQ ID NO: 2367237 - RNA, 19 nt, Artificial Sequence
  Description of Artificial Sequence: Synthetic oligonucleotide
  Antisense strand to SEQ ID NO: 2367236
ugagucaucagucuuagcu

SEQ ID NO: 2367238 - RNA, 19 nt, Artificial Sequence
  Description of Artificial Sequence: Synthetic oligonucleotide
  Sense strand starting at position 3613 of SEQ ID NO: 1885786
gcaccuguaugcuaauuua

SEQ ID NO: 2367239 - RNA, 19 nt, Artificial Sequence
  Description of Artificial Sequence: Synthetic oligonucleotide
  Antisense strand to SEQ ID NO: 2367238
uaaauuagcauacaggugc

SEQ ID NO: 2367240 - RNA, 19 nt, Artificial Sequence
  Description of Artificial Sequence: Synthetic oligonucleotide
  Sense strand starting at position 3634 of SEQ ID NO: 1885786
ugaucauacuauguauuag

SEQ ID NO: 2367241 - RNA, 19 nt, Artificial Sequence
  Description of Artificial Sequence: Synthetic oligonucleotide
  Antisense strand to SEQ ID NO: 2367240
cuaauacauaguaugauca

SEQ ID NO: 2367242 - RNA, 19 nt, Artificial Sequence
  Description of Artificial Sequence: Synthetic oligonucleotide
  Sense strand starting at position 3644 of SEQ ID NO: 1885786
auguauuaggcacagcuaa

SEQ ID NO: 2367243 - RNA, 19 nt, Artificial Sequence
  Description of Artificial Sequence: Synthetic oligonucleotide
  Antisense strand to SEQ ID NO: 2367242
uuagcugugccuaauacau

SEQ ID NO: 2367244 - RNA, 19 nt, Artificial Sequence
  Description of Artificial Sequence: Synthetic oligonucleotide
  Sense strand starting at position 97 of SEQ ID NO: 1885787
acagaauauccaggauugu

SEQ ID NO: 2367245 - RNA, 19 nt, Artificial Sequence
  Description of Artificial Sequence: Synthetic oligonucleotide
  Antisense strand to SEQ ID NO: 2367244
acaauccuggauauucugu

SEQ ID NO: 2367246 - RNA, 19 nt, Artificial Sequence
  Description of Artificial Sequence: Synthetic oligonucleotide
  Sense strand starting at position 190 of SEQ ID NO: 1885787
ggccucugaaagugaaaua

SEQ ID NO: 2367247 - RNA, 19 nt, Artificial Sequence
  Description of Artificial Sequence: Synthetic oligonucleotide
  Antisense strand to SEQ ID NO: 2367246
uauuucacuuucagaggcc

SEQ ID NO: 2367248 - RNA, 19 nt, Artificial Sequence
  Description of Artificial Sequence: Synthetic oligonucleotide
  Sense strand starting at position 284 of SEQ ID NO: 1885787
uuuggaaguuaaucugcau

SEQ ID NO: 2367249 - RNA, 19 nt, Artificial Sequence
  Description of Artificial Sequence: Synthetic oligonucleotide
  Antisense strand to SEQ ID NO: 2367248
augcagauuaacuuccaaa

SEQ ID NO: 2367250 - RNA, 19 nt, Artificial Sequence
  Description of Artificial Sequence: Synthetic oligonucleotide
  Sense strand starting at position 288 of SEQ ID NO: 1885787
gaaguuaaucugcauggcu

SEQ ID NO: 2367251 - RNA, 19 nt, Artificial Sequence
  Description of Artificial Sequence: Synthetic oligonucleotide
  Antisense strand to SEQ ID NO: 2367250
agccaugcagauuaacuuc

SEQ ID NO: 2367252 - RNA, 19 nt, Artificial Sequence
  Description of Artificial Sequence: Synthetic oligonucleotide
  Sense strand starting at position 313 of SEQ ID NO: 1885787
cacuuuggccaaggagaua

SEQ ID NO: 2367253 - RNA, 19 nt, Artificial Sequence
  Description of Artificial Sequence: Synthetic oligonucleotide
  Antisense strand to SEQ ID NO: 2367252
uaucuccuuggccaaagug

SEQ ID NO: 2367254 - RNA, 19 nt, Artificial Sequence
  Description of Artificial Sequence: Synthetic oligonucleotide
  Sense strand starting at position 437 of SEQ ID NO: 1885787
guaguagcccuccaaggua

SEQ ID NO: 2367255 - RNA, 19 nt, Artificial Sequence
  Description of Artificial Sequence: Synthetic oligonucleotide
  Antisense strand to SEQ ID NO: 2367254
uaccuuggagggcuacuac

SEQ ID NO: 2367256 - RNA, 19 nt, Artificial Sequence
  Description of Artificial Sequence: Synthetic oligonucleotide
  Sense strand starting at position 547 of SEQ ID NO: 1885787
ucuacuucuccguauauua

SEQ ID NO: 2367257 - RNA, 19 nt, Artificial Sequence
  Description of Artificial Sequence: Synthetic oligonucleotide
  Antisense strand to SEQ ID NO: 2367256
uaauauacggagaaguaga

SEQ ID NO: 2367258 - RNA, 19 nt, Artificial Sequence
  Description of Artificial Sequence: Synthetic oligonucleotide
  Sense strand starting at position 768 of SEQ ID NO: 1885787
aaauguuuggacggugaag

SEQ ID NO: 2367259 - RNA, 19 nt, Artificial Sequence
  Description of Artificial Sequence: Synthetic oligonucleotide
  Antisense strand to SEQ ID NO: 2367258
cuucaccguccaaacauuu

SEQ ID NO: 2367260 - RNA, 19 nt, Artificial Sequence
  Description of Artificial Sequence: Synthetic oligonucleotide
  Sense strand starting at position 861 of SEQ ID NO: 1885787
acacucguugcuuaaccaa

SEQ ID NO: 2367261 - RNA, 19 nt, Artificial Sequence
  Description of Artificial Sequence: Synthetic oligonucleotide
  Antisense strand to SEQ ID NO: 2367260
uugguuaagcaacgagugu

SEQ ID NO: 2367262 - RNA, 19 nt, Artificial Sequence
  Description of Artificial Sequence: Synthetic oligonucleotide
  Sense strand starting at position 1001 of SEQ ID NO: 1885787
uaaccuugugacugcaaga

SEQ ID NO: 2367263 - RNA, 19 nt, Artificial Sequence
  Description of Artificial Sequence: Synthetic oligonucleotide
  Antisense strand to SEQ ID NO: 2367262
ucuugcagucacaagguua

SEQ ID NO: 2367264 - RNA, 19 nt, Artificial Sequence
  Description of Artificial Sequence: Synthetic oligonucleotide
  Sense strand starting at position 1059 of SEQ ID NO: 1885787
gggauaaggccucagcuca

SEQ ID NO: 2367265 - RNA, 19 nt, Artificial Sequence
  Description of Artificial Sequence: Synthetic oligonucleotide
  Antisense strand to SEQ ID NO: 2367264
ugagcugaggccuuauccc

SEQ ID NO: 2367266 - RNA, 19 nt, Artificial Sequence
  Description of Artificial Sequence: Synthetic oligonucleotide
  Sense strand starting at position 1072 of SEQ ID NO: 1885787
agcucaugugauuacuaaa

SEQ ID NO: 2367267 - RNA, 19 nt, Artificial Sequence
  Description of Artificial Sequence: Synthetic oligonucleotide
  Antisense strand to SEQ ID NO: 2367266
uuuaguaaucacaugagcu

SEQ ID NO: 2367268 - RNA, 19 nt, Artificial Sequence
  Description of Artificial Sequence: Synthetic oligonucleotide
  Sense strand starting at position 1253 of SEQ ID NO: 1885787
cacguuguucuggcaguau

SEQ ID NO: 2367269 - RNA, 19 nt, Artificial Sequence
  Description of Artificial Sequence: Synthetic oligonucleotide
  Antisense strand to SEQ ID NO: 2367268
auacugccagaacaacgug

SEQ ID NO: 2367270 - RNA, 19 nt, Artificial Sequence
  Description of Artificial Sequence: Synthetic oligonucleotide
  Sense strand starting at position 1328 of SEQ ID NO: 1885787
ugucuaggacucgaguuaa

SEQ ID NO: 2367271 - RNA, 19 nt, Artificial Sequence
  Description of Artificial Sequence: Synthetic oligonucleotide
  Antisense strand to SEQ ID NO: 2367270
uuaacucgaguccuagaca

SEQ ID NO: 2367272 - RNA, 19 nt, Artificial Sequence
  Description of Artificial Sequence: Synthetic oligonucleotide
  Sense strand starting at position 1415 of SEQ ID NO: 1885787
ccauucuaccgcuaagaau

SEQ ID NO: 2367273 - RNA, 19 nt, Artificial Sequence
  Description of Artificial Sequence: Synthetic oligonucleotide
  Antisense strand to SEQ ID NO: 2367272
auucuuagcgguagaaugg

SEQ ID NO: 2367274 - RNA, 19 nt, Artificial Sequence
  Description of Artificial Sequence: Synthetic oligonucleotide
  Sense strand starting at position 1424 of SEQ ID NO: 1885787
cgcuaagaauuucuguauu

SEQ ID NO: 2367275 - RNA, 19 nt, Artificial Sequence
  Description of Artificial Sequence: Synthetic oligonucleotide
  Antisense strand to SEQ ID NO: 2367274
aauacagaaauucuuagcg

SEQ ID NO: 2367276 - RNA, 19 nt, Artificial Sequence
  Description of Artificial Sequence: Synthetic oligonucleotide
  Sense strand starting at position 1468 of SEQ ID NO: 1885787
ccaugacuaagucggaaga

SEQ ID NO: 2367277 - RNA, 19 nt, Artificial Sequence
  Description of Artificial Sequence: Synthetic oligonucleotide
  Antisense strand to SEQ ID NO: 2367276
ucuuccgacuuagucaugg

SEQ ID NO: 2367278 - RNA, 19 nt, Artificial Sequence
  Description of Artificial Sequence: Synthetic oligonucleotide
  Sense strand starting at position 2421 of SEQ ID NO: 1885787
cgagguucuggauaguaag

SEQ ID NO: 2367279 - RNA, 19 nt, Artificial Sequence
  Description of Artificial Sequence: Synthetic oligonucleotide
  Antisense strand to SEQ ID NO: 2367278
cuuacuauccagaaccucg

SEQ ID NO: 2367280 - RNA, 19 nt, Artificial Sequence
  Description of Artificial Sequence: Synthetic oligonucleotide
  Sense strand starting at position 2484 of SEQ ID NO: 1885787
cgagacuuauaguaauuua

SEQ ID NO: 2367281 - RNA, 19 nt, Artificial Sequence
  Description of Artificial Sequence: Synthetic oligonucleotide
  Antisense strand to SEQ ID NO: 2367280
uaaauuacuauaagucucg

SEQ ID NO: 2367282 - RNA, 19 nt, Artificial Sequence
  Description of Artificial Sequence: Synthetic oligonucleotide
  Sense strand starting at position 2542 of SEQ ID NO: 1885787
gaucucugacggugaaguu

SEQ ID NO: 2367283 - RNA, 19 nt, Artificial Sequence
  Description of Artificial Sequence: Synthetic oligonucleotide
  Antisense strand to SEQ ID NO: 2367282
aacuucaccgucagagauc

SEQ ID NO: 2367284 - RNA, 19 nt, Artificial Sequence
  Description of Artificial Sequence: Synthetic oligonucleotide
  Sense strand starting at position 2543 of SEQ ID NO: 1885787
aucucugacggugaaguua

SEQ ID NO: 2367285 - RNA, 19 nt, Artificial Sequence
  Description of Artificial Sequence: Synthetic oligonucleotide
  Antisense strand to SEQ ID NO: 2367284
uaacuucaccgucagagau

SEQ ID NO: 2367286 - RNA, 19 nt, Artificial Sequence
  Description of Artificial Sequence: Synthetic oligonucleotide
  Sense strand starting at position 2551 of SEQ ID NO: 1885787
cggugaaguuagacuucgu

SEQ ID NO: 2367287 - RNA, 19 nt, Artificial Sequence
  Description of Artificial Sequence: Synthetic oligonucleotide
  Antisense strand to SEQ ID NO: 2367286
acgaagucuaacuucaccg

SEQ ID NO: 2367288 - RNA, 19 nt, Artificial Sequence
  Description of Artificial Sequence: Synthetic oligonucleotide
  Sense strand starting at position 2607 of SEQ ID NO: 1885787
acaaguaaauucuuuggua

SEQ ID NO: 2367289 - RNA, 19 nt, Artificial Sequence
  Description of Artificial Sequence: Synthetic oligonucleotide
  Antisense strand to SEQ ID NO: 2367288
uaccaaagaauuuacuugu

SEQ ID NO: 2367290 - RNA, 19 nt, Artificial Sequence
  Description of Artificial Sequence: Synthetic oligonucleotide
  Sense strand starting at position 2814 of SEQ ID NO: 1885787
ccacuuaucagcugggaga

SEQ ID NO: 2367291 - RNA, 19 nt, Artificial Sequence
  Description of Artificial Sequence: Synthetic oligonucleotide
  Antisense strand to SEQ ID NO: 2367290
ucucccagcugauaagugg

SEQ ID NO: 2367292 - RNA, 19 nt, Artificial Sequence
  Description of Artificial Sequence: Synthetic oligonucleotide
  Sense strand starting at position 2828 of SEQ ID NO: 1885787
ggagacuuuggguggguua

SEQ ID NO: 2367293 - RNA, 19 nt, Artificial Sequence
  Description of Artificial Sequence: Synthetic oligonucleotide
  Antisense strand to SEQ ID NO: 2367292
uaacccacccaaagucucc

SEQ ID NO: 2367294 - RNA, 19 nt, Artificial Sequence
  Description of Artificial Sequence: Synthetic oligonucleotide
  Sense strand starting at position 2990 of SEQ ID NO: 1885787
acuaguaauggucauguau

SEQ ID NO: 2367295 - RNA, 19 nt, Artificial Sequence
  Description of Artificial Sequence: Synthetic oligonucleotide
  Antisense strand to SEQ ID NO: 2367294
auacaugaccauuacuagu

SEQ ID NO: 2367296 - RNA, 19 nt, Artificial Sequence
  Description of Artificial Sequence: Synthetic oligonucleotide
  Sense strand starting at position 3098 of SEQ ID NO: 1885787
gaucauugaguauggcuaa

SEQ ID NO: 2367297 - RNA, 19 nt, Artificial Sequence
  Description of Artificial Sequence: Synthetic oligonucleotide
  Antisense strand to SEQ ID NO: 2367296
uuagccauacucaaugauc

SEQ ID NO: 2367298 - RNA, 19 nt, Artificial Sequence
  Description of Artificial Sequence: Synthetic oligonucleotide
  Sense strand starting at position 3148 of SEQ ID NO: 1885787
auggguugaagguguaaau

SEQ ID NO: 2367299 - RNA, 19 nt, Artificial Sequence
  Description of Artificial Sequence: Synthetic oligonucleotide
  Antisense strand to SEQ ID NO: 2367298
auuuacaccuucaacccau

SEQ ID NO: 2367300 - RNA, 19 nt, Artificial Sequence
  Description of Artificial Sequence: Synthetic oligonucleotide
  Sense strand starting at position 3199 of SEQ ID NO: 1885787
cgacuuccugaagaaguca

SEQ ID NO: 2367301 - RNA, 19 nt, Artificial Sequence
  Description of Artificial Sequence: Synthetic oligonucleotide
  Antisense strand to SEQ ID NO: 2367300
ugacuucuucaggaagucg

SEQ ID NO: 2367302 - RNA, 19 nt, Artificial Sequence
  Description of Artificial Sequence: Synthetic oligonucleotide
  Sense strand starting at position 3212 of SEQ ID NO: 1885787
aagucauccuagucuggaa

SEQ ID NO: 2367303 - RNA, 19 nt, Artificial Sequence
  Description of Artificial Sequence: Synthetic oligonucleotide
  Antisense strand to SEQ ID NO: 2367302
uuccagacuaggaugacuu

SEQ ID NO: 2367304 - RNA, 19 nt, Artificial Sequence
  Description of Artificial Sequence: Synthetic oligonucleotide
  Sense strand starting at position 3273 of SEQ ID NO: 1885787
cagcauuuagcccguuauu

SEQ ID NO: 2367305 - RNA, 19 nt, Artificial Sequence
  Description of Artificial Sequence: Synthetic oligonucleotide
  Antisense strand to SEQ ID NO: 2367304
aauaacgggcuaaaugcug

SEQ ID NO: 2367306 - RNA, 19 nt, Artificial Sequence
  Description of Artificial Sequence: Synthetic oligonucleotide
  Sense strand starting at position 3361 of SEQ ID NO: 1885787
ggaucuuauggaggccauu

SEQ ID NO: 2367307 - RNA, 19 nt, Artificial Sequence
  Description of Artificial Sequence: Synthetic oligonucleotide
  Antisense strand to SEQ ID NO: 2367306
aauggccuccauaagaucc

SEQ ID NO: 2367308 - RNA, 19 nt, Artificial Sequence
  Description of Artificial Sequence: Synthetic oligonucleotide
  Sense strand starting at position 3404 of SEQ ID NO: 1885787
acuggaaagccauagcaua

SEQ ID NO: 2367309 - RNA, 19 nt, Artificial Sequence
  Description of Artificial Sequence: Synthetic oligonucleotide
  Antisense strand to SEQ ID NO: 2367308
uaugcuauggcuuuccagu

SEQ ID NO: 2367310 - RNA, 19 nt, Artificial Sequence
  Description of Artificial Sequence: Synthetic oligonucleotide
  Sense strand starting at position 3451 of SEQ ID NO: 1885787
cuuggacaucccugacaca

SEQ ID NO: 2367311 - RNA, 19 nt, Artificial Sequence
  Description of Artificial Sequence: Synthetic oligonucleotide
  Antisense strand to SEQ ID NO: 2367310
ugugucagggauguccaag

SEQ ID NO: 2367312 - RNA, 19 nt, Artificial Sequence
  Description of Artificial Sequence: Synthetic oligonucleotide
  Sense strand starting at position 3476 of SEQ ID NO: 1885787
uuuggaagcaccugguauu

SEQ ID NO: 2367313 - RNA, 19 nt, Artificial Sequence
  Description of Artificial Sequence: Synthetic oligonucleotide
  Antisense strand to SEQ ID NO: 2367312
aauaccaggugcuuccaaa

SEQ ID NO: 2367314 - RNA, 19 nt, Artificial Sequence
  Description of Artificial Sequence: Synthetic oligonucleotide
  Sense strand starting at position 3583 of SEQ ID NO: 1885787
auguccgaggcaugacaaa

SEQ ID NO: 2367315 - RNA, 19 nt, Artificial Sequence
  Description of Artificial Sequence: Synthetic oligonucleotide
  Antisense strand to SEQ ID NO: 2367314
uuugucaugccucggacau

SEQ ID NO: 2367316 - RNA, 19 nt, Artificial Sequence
  Description of Artificial Sequence: Synthetic oligonucleotide
  Sense strand starting at position 3718 of SEQ ID NO: 1885787
uaagacgugugauugaaga

SEQ ID NO: 2367317 - RNA, 19 nt, Artificial Sequence
  Description of Artificial Sequence: Synthetic oligonucleotide
  Antisense strand to SEQ ID NO: 2367316
ucuucaaucacacgucuua

SEQ ID NO: 2367318 - RNA, 19 nt, Artificial Sequence
  Description of Artificial Sequence: Synthetic oligonucleotide
  Sense strand starting at position 3720 of SEQ ID NO: 1885787
agacgugugauugaagauc

SEQ ID NO: 2367319 - RNA, 19 nt, Artificial Sequence
  Description of Artificial Sequence: Synthetic oligonucleotide
  Antisense strand to SEQ ID NO: 2367318
gaucuucaaucacacgucu

SEQ ID NO: 2367320 - RNA, 19 nt, Artificial Sequence
  Description of Artificial Sequence: Synthetic oligonucleotide
  Sense strand starting at position 3789 of SEQ ID NO: 1885787
acucaugauuccuuugaga

SEQ ID NO: 2367321 - RNA, 19 nt, Artificial Sequence
  Description of Artificial Sequence: Synthetic oligonucleotide
  Antisense strand to SEQ ID NO: 2367320
ucucaaaggaaucaugagu

SEQ ID NO: 2367322 - RNA, 19 nt, Artificial Sequence
  Description of Artificial Sequence: Synthetic oligonucleotide
  Sense strand starting at position 3791 of SEQ ID NO: 1885787
ucaugauuccuuugagaaa

SEQ ID NO: 2367323 - RNA, 19 nt, Artificial Sequence
  Description of Artificial Sequence: Synthetic oligonucleotide
  Antisense strand to SEQ ID NO: 2367322
uuucucaaaggaaucauga

SEQ ID NO: 2367324 - RNA, 19 nt, Artificial Sequence
  Description of Artificial Sequence: Synthetic oligonucleotide
  Sense strand starting at position 221 of SEQ ID NO: 1885788
ggcacucauucgccagaga

SEQ ID NO: 2367325 - RNA, 19 nt, Artificial Sequence
  Description of Artificial Sequence: Synthetic oligonucleotide
  Antisense strand to SEQ ID NO: 2367324
ucucuggcgaaugagugcc

SEQ ID NO: 2367326 - RNA, 19 nt, Artificial Sequence
  Description of Artificial Sequence: Synthetic oligonucleotide
  Sense strand starting at position 222 of SEQ ID NO: 1885788
gcacucauucgccagagag

SEQ ID NO: 2367327 - RNA, 19 nt, Artificial Sequence
  Description of Artificial Sequence: Synthetic oligonucleotide
  Antisense strand to SEQ ID NO: 2367326
cucucuggcgaaugagugc

SEQ ID NO: 2367328 - RNA, 19 nt, Artificial Sequence
  Description of Artificial Sequence: Synthetic oligonucleotide
  Sense strand starting at position 224 of SEQ ID NO: 1885788
acucauucgccagagagaa

SEQ ID NO: 2367329 - RNA, 19 nt, Artificial Sequence
  Description of Artificial Sequence: Synthetic oligonucleotide
  Antisense strand to SEQ ID NO: 2367328
uucucucuggcgaaugagu

SEQ ID NO: 2367330 - RNA, 19 nt, Artificial Sequence
  Description of Artificial Sequence: Synthetic oligonucleotide
  Sense strand starting at position 237 of SEQ ID NO: 1885788
agagaaaggaucugucucu

SEQ ID NO: 2367331 - RNA, 19 nt, Artificial Sequence
  Description of Artificial Sequence: Synthetic oligonucleotide
  Antisense strand to SEQ ID NO: 2367330
agagacagauccuuucucu

SEQ ID NO: 2367332 - RNA, 19 nt, Artificial Sequence
  Description of Artificial Sequence: Synthetic oligonucleotide
  Sense strand starting at position 250 of SEQ ID NO: 1885788
gucucucaucauuaggaca

SEQ ID NO: 2367333 - RNA, 19 nt, Artificial Sequence
  Description of Artificial Sequence: Synthetic oligonucleotide
  Antisense strand to SEQ ID NO: 2367332
uguccuaaugaugagagac

SEQ ID NO: 2367334 - RNA, 19 nt, Artificial Sequence
  Description of Artificial Sequence: Synthetic oligonucleotide
  Sense strand starting at position 624 of SEQ ID NO: 1885788
aaauguugguucucucuga

SEQ ID NO: 2367335 - RNA, 19 nt, Artificial Sequence
  Description of Artificial Sequence: Synthetic oligonucleotide
  Antisense strand to SEQ ID NO: 2367334
ucagagagaaccaacauuu

SEQ ID NO: 2367336 - RNA, 19 nt, Artificial Sequence
  Description of Artificial Sequence: Synthetic oligonucleotide
  Sense strand starting at position 634 of SEQ ID NO: 1885788
ucucucugagccugcuaua

SEQ ID NO: 2367337 - RNA, 19 nt, Artificial Sequence
  Description of Artificial Sequence: Synthetic oligonucleotide
  Antisense strand to SEQ ID NO: 2367336
uauagcaggcucagagaga

SEQ ID NO: 2367338 - RNA, 19 nt, Artificial Sequence
  Description of Artificial Sequence: Synthetic oligonucleotide
  Sense strand starting at position 639 of SEQ ID NO: 1885788
cugagccugcuauaauaca

SEQ ID NO: 2367339 - RNA, 19 nt, Artificial Sequence
  Description of Artificial Sequence: Synthetic oligonucleotide
  Antisense strand to SEQ ID NO: 2367338
uguauuauagcaggcucag

SEQ ID NO: 2367340 - RNA, 19 nt, Artificial Sequence
  Description of Artificial Sequence: Synthetic oligonucleotide
  Sense strand starting at position 856 of SEQ ID NO: 1885788
ggacucuacgucugccaaa

SEQ ID NO: 2367341 - RNA, 19 nt, Artificial Sequence
  Description of Artificial Sequence: Synthetic oligonucleotide
  Antisense strand to SEQ ID NO: 2367340
uuuggcagacguagagucc

SEQ ID NO: 2367342 - RNA, 19 nt, Artificial Sequence
  Description of Artificial Sequence: Synthetic oligonucleotide
  Sense strand starting at position 1031 of SEQ ID NO: 1885788
uuucccauucucugguauu

SEQ ID NO: 2367343 - RNA, 19 nt, Artificial Sequence
  Description of Artificial Sequence: Synthetic oligonucleotide
  Antisense strand to SEQ ID NO: 2367342
aauaccagagaaugggaaa

SEQ ID NO: 2367344 - RNA, 19 nt, Artificial Sequence
  Description of Artificial Sequence: Synthetic oligonucleotide
  Sense strand starting at position 1073 of SEQ ID NO: 1885788
ucacaucagcaucguugaa

SEQ ID NO: 2367345 - RNA, 19 nt, Artificial Sequence
  Description of Artificial Sequence: Synthetic oligonucleotide
  Antisense strand to SEQ ID NO: 2367344
uucaacgaugcugauguga

SEQ ID NO: 2367346 - RNA, 19 nt, Artificial Sequence
  Description of Artificial Sequence: Synthetic oligonucleotide
  Sense strand starting at position 1075 of SEQ ID NO: 1885788
acaucagcaucguugaauc

SEQ ID NO: 2367347 - RNA, 19 nt, Artificial Sequence
  Description of Artificial Sequence: Synthetic oligonucleotide
  Antisense strand to SEQ ID NO: 2367346
gauucaacgaugcugaugu

SEQ ID NO: 2367348 - RNA, 19 nt, Artificial Sequence
  Description of Artificial Sequence: Synthetic oligonucleotide
  Sense strand starting at position 1120 of SEQ ID NO: 1885788
ggcgauccaauguaccaua

SEQ ID NO: 2367349 - RNA, 19 nt, Artificial Sequence
  Description of Artificial Sequence: Synthetic oligonucleotide
  Antisense strand to SEQ ID NO: 2367348
uaugguacauuggaucgcc

SEQ ID NO: 2367350 - RNA, 19 nt, Artificial Sequence
  Description of Artificial Sequence: Synthetic oligonucleotide
  Sense strand starting at position 1184 of SEQ ID NO: 1885788
agaguugcugcuggagaga

SEQ ID NO: 2367351 - RNA, 19 nt, Artificial Sequence
  Description of Artificial Sequence: Synthetic oligonucleotide
  Antisense strand to SEQ ID NO: 2367350
ucucuccagcagcaacucu

SEQ ID NO: 2367352 - RNA, 19 nt, Artificial Sequence
  Description of Artificial Sequence: Synthetic oligonucleotide
  Sense strand starting at position 1187 of SEQ ID NO: 1885788
guugcugcuggagagauau

SEQ ID NO: 2367353 - RNA, 19 nt, Artificial Sequence
  Description of Artificial Sequence: Synthetic oligonucleotide
  Antisense strand to SEQ ID NO: 2367352
auaucucuccagcagcaac

SEQ ID NO: 2367354 - RNA, 19 nt, Artificial Sequence
  Description of Artificial Sequence: Synthetic oligonucleotide
  Sense strand starting at position 1377 of SEQ ID NO: 1885788
gaggguuagcaagguaagu

SEQ ID NO: 2367355 - RNA, 19 nt, Artificial Sequence
  Description of Artificial Sequence: Synthetic oligonucleotide
  Antisense strand to SEQ ID NO: 2367354
acuuaccuugcuaacccuc

SEQ ID NO: 2367356 - RNA, 19 nt, Artificial Sequence
  Description of Artificial Sequence: Synthetic oligonucleotide
  Sense strand starting at position 1427 of SEQ ID NO: 1885788
cuccuugguccuggauaua

SEQ ID NO: 2367357 - RNA, 19 nt, Artificial Sequence
  Description of Artificial Sequence: Synthetic oligonucleotide
  Antisense strand to SEQ ID NO: 2367356
uauauccaggaccaaggag

SEQ ID NO: 2367358 - RNA, 19 nt, Artificial Sequence
  Description of Artificial Sequence: Synthetic oligonucleotide
  Sense strand starting at position 1496 of SEQ ID NO: 1885788
caggaucuguggucugaug

SEQ ID NO: 2367359 - RNA, 19 nt, Artificial Sequence
  Description of Artificial Sequence: Synthetic oligonucleotide
  Antisense strand to SEQ ID NO: 2367358
caucagaccacagauccug

SEQ ID NO: 2367360 - RNA, 19 nt, Artificial Sequence
  Description of Artificial Sequence: Synthetic oligonucleotide
  Sense strand starting at position 1552 of SEQ ID NO: 1885788
acaaaugccuauggauuua

SEQ ID NO: 2367361 - RNA, 19 nt, Artificial Sequence
  Description of Artificial Sequence: Synthetic oligonucleotide
  Antisense strand to SEQ ID NO: 2367360
uaaauccauaggcauuugu

SEQ ID NO: 2367362 - RNA, 19 nt, Artificial Sequence
  Description of Artificial Sequence: Synthetic oligonucleotide
  Sense strand starting at position 1708 of SEQ ID NO: 1885788
ucagcacuuucugugauaa

SEQ ID NO: 2367363 - RNA, 19 nt, Artificial Sequence
  Description of Artificial Sequence: Synthetic oligonucleotide
  Antisense strand to SEQ ID NO: 2367362
uuaucacagaaagugcuga

SEQ ID NO: 2367364 - RNA, 19 nt, Artificial Sequence
  Description of Artificial Sequence: Synthetic oligonucleotide
  Sense strand starting at position 1709 of SEQ ID NO: 1885788
cagcacuuucugugauaag

SEQ ID NO: 2367365 - RNA, 19 nt, Artificial Sequence
  Description of Artificial Sequence: Synthetic oligonucleotide
  Antisense strand to SEQ ID NO: 2367364
cuuaucacagaaagugcug

SEQ ID NO: 2367366 - RNA, 19 nt, Artificial Sequence
  Description of Artificial Sequence: Synthetic oligonucleotide
  Sense strand starting at position 1712 of SEQ ID NO: 1885788
cacuuucugugauaagaag

SEQ ID NO: 2367367 - RNA, 19 nt, Artificial Sequence
  Description of Artificial Sequence: Synthetic oligonucleotide
  Antisense strand to SEQ ID NO: 2367366
cuucuuaucacagaaagug

SEQ ID NO: 2367368 - RNA, 19 nt, Artificial Sequence
  Description of Artificial Sequence: Synthetic oligonucleotide
  Sense strand starting at position 1723 of SEQ ID NO: 1885788
auaagaaggugcucucuca

SEQ ID NO: 2367369 - RNA, 19 nt, Artificial Sequence
  Description of Artificial Sequence: Synthetic oligonucleotide
  Antisense strand to SEQ ID NO: 2367368
ugagagagcaccuucuuau

SEQ ID NO: 2367370 - RNA, 19 nt, Artificial Sequence
  Description of Artificial Sequence: Synthetic oligonucleotide
  Sense strand starting at position 1739 of SEQ ID NO: 1885788
ucaggaaucuccuuuguca

SEQ ID NO: 2367371 - RNA, 19 nt, Artificial Sequence
  Description of Artificial Sequence: Synthetic oligonucleotide
  Antisense strand to SEQ ID NO: 2367370
ugacaaaggagauuccuga

SEQ ID NO: 2367372 - RNA, 19 nt, Artificial Sequence
  Description of Artificial Sequence: Synthetic oligonucleotide
  Sense strand starting at position 2038 of SEQ ID NO: 1885788
gugacuggguguucuaaga

SEQ ID NO: 2367373 - RNA, 19 nt, Artificial Sequence
  Description of Artificial Sequence: Synthetic oligonucleotide
  Antisense strand to SEQ ID NO: 2367372
ucuuagaacacccagucac

SEQ ID NO: 2367374 - RNA, 19 nt, Artificial Sequence
  Description of Artificial Sequence: Synthetic oligonucleotide
  Sense strand starting at position 2045 of SEQ ID NO: 1885788
gguguucuaagagaacucu

SEQ ID NO: 2367375 - RNA, 19 nt, Artificial Sequence
  Description of Artificial Sequence: Synthetic oligonucleotide
  Antisense strand to SEQ ID NO: 2367374
agaguucucuuagaacacc

SEQ ID NO: 2367376 - RNA, 19 nt, Artificial Sequence
  Description of Artificial Sequence: Synthetic oligonucleotide
  Sense strand starting at position 2125 of SEQ ID NO: 1885788
aagucugagccucagacua

SEQ ID NO: 2367377 - RNA, 19 nt, Artificial Sequence
  Description of Artificial Sequence: Synthetic oligonucleotide
  Antisense strand to SEQ ID NO: 2367376
uagucugaggcucagacuu

SEQ ID NO: 2367378 - RNA, 19 nt, Artificial Sequence
  Description of Artificial Sequence: Synthetic oligonucleotide
  Sense strand starting at position 2230 of SEQ ID NO: 1885788
caagaucucugggauaagc

SEQ ID NO: 2367379 - RNA, 19 nt, Artificial Sequence
  Description of Artificial Sequence: Synthetic oligonucleotide
  Antisense strand to SEQ ID NO: 2367378
gcuuaucccagagaucuug

SEQ ID NO: 2367380 - RNA, 19 nt, Artificial Sequence
  Description of Artificial Sequence: Synthetic oligonucleotide
  Sense strand starting at position 2658 of SEQ ID NO: 1885788
cugaauucuguuggacaga

SEQ ID NO: 2367381 - RNA, 19 nt, Artificial Sequence
  Description of Artificial Sequence: Synthetic oligonucleotide
  Antisense strand to SEQ ID NO: 2367380
ucuguccaacagaauucag

SEQ ID NO: 2367382 - RNA, 19 nt, Artificial Sequence
  Description of Artificial Sequence: Synthetic oligonucleotide
  Sense strand starting at position 2659 of SEQ ID NO: 1885788
ugaauucuguuggacagac

SEQ ID NO: 2367383 - RNA, 19 nt, Artificial Sequence
  Description of Artificial Sequence: Synthetic oligonucleotide
  Antisense strand to SEQ ID NO: 2367382
gucuguccaacagaauuca

SEQ ID NO: 2367384 - RNA, 19 nt, Artificial Sequence
  Description of Artificial Sequence: Synthetic oligonucleotide
  Sense strand starting at position 2752 of SEQ ID NO: 1885788
uaaaucugguauucugagu

SEQ ID NO: 2367385 - RNA, 19 nt, Artificial Sequence
  Description of Artificial Sequence: Synthetic oligonucleotide
  Antisense strand to SEQ ID NO: 2367384
acucagaauaccagauuua

SEQ ID NO: 2367386 - RNA, 19 nt, Artificial Sequence
  Description of Artificial Sequence: Synthetic oligonucleotide
  Sense strand starting at position 2843 of SEQ ID NO: 1885788
acccucuuugguuauucua

SEQ ID NO: 2367387 - RNA, 19 nt, Artificial Sequence
  Description of Artificial Sequence: Synthetic oligonucleotide
  Antisense strand to SEQ ID NO: 2367386
uagaauaaccaaagagggu

SEQ ID NO: 2367388 - RNA, 19 nt, Artificial Sequence
  Description of Artificial Sequence: Synthetic oligonucleotide
  Sense strand starting at position 2845 of SEQ ID NO: 1885788
ccucuuugguuauucuaca

SEQ ID NO: 2367389 - RNA, 19 nt, Artificial Sequence
  Description of Artificial Sequence: Synthetic oligonucleotide
  Antisense strand to SEQ ID NO: 2367388
uguagaauaaccaaagagg

SEQ ID NO: 2367390 - RNA, 19 nt, Artificial Sequence
  Description of Artificial Sequence: Synthetic oligonucleotide
  Sense strand starting at position 2966 of SEQ ID NO: 1885788
gugugagcguucccagaga

SEQ ID NO: 2367391 - RNA, 19 nt, Artificial Sequence
  Description of Artificial Sequence: Synthetic oligonucleotide
  Antisense strand to SEQ ID NO: 2367390
ucucugggaacgcucacac

SEQ ID NO: 2367392 - RNA, 19 nt, Artificial Sequence
  Description of Artificial Sequence: Synthetic oligonucleotide
  Sense strand starting at position 2971 of SEQ ID NO: 1885788
agcguucccagagaucaug

SEQ ID NO: 2367393 - RNA, 19 nt, Artificial Sequence
  Description of Artificial Sequence: Synthetic oligonucleotide
  Antisense strand to SEQ ID NO: 2367392
caugaucucugggaacgcu

SEQ ID NO: 2367394 - RNA, 19 nt, Artificial Sequence
  Description of Artificial Sequence: Synthetic oligonucleotide
  Sense strand starting at position 2982 of SEQ ID NO: 1885788
agaucaugcuucucccaag

SEQ ID NO: 2367395 - RNA, 19 nt, Artificial Sequence
  Description of Artificial Sequence: Synthetic oligonucleotide
  Antisense strand to SEQ ID NO: 2367394
cuugggagaagcaugaucu

SEQ ID NO: 2367396 - RNA, 19 nt, Artificial Sequence
  Description of Artificial Sequence: Synthetic oligonucleotide
  Sense strand starting at position 3004 of SEQ ID NO: 1885788
ggcucacaaugaucugaaa

SEQ ID NO: 2367397 - RNA, 19 nt, Artificial Sequence
  Description of Artificial Sequence: Synthetic oligonucleotide
  Antisense strand to SEQ ID NO: 2367396
uuucagaucauugugagcc

SEQ ID NO: 2367398 - RNA, 19 nt, Artificial Sequence
  Description of Artificial Sequence: Synthetic oligonucleotide
  Sense strand starting at position 3074 of SEQ ID NO: 1885788
ugcuaucacuuauugagca

SEQ ID NO: 2367399 - RNA, 19 nt, Artificial Sequence
  Description of Artificial Sequence: Synthetic oligonucleotide
  Antisense strand to SEQ ID NO: 2367398
ugcucaauaagugauagca

SEQ ID NO: 2367400 - RNA, 19 nt, Artificial Sequence
  Description of Artificial Sequence: Synthetic oligonucleotide
  Sense strand starting at position 3387 of SEQ ID NO: 1885788
aggauuacaccuggcuaau

SEQ ID NO: 2367401 - RNA, 19 nt, Artificial Sequence
  Description of Artificial Sequence: Synthetic oligonucleotide
  Antisense strand to SEQ ID NO: 2367400
auuagccagguguaauccu

SEQ ID NO: 2367402 - RNA, 19 nt, Artificial Sequence
  Description of Artificial Sequence: Synthetic oligonucleotide
  Sense strand starting at position 3983 of SEQ ID NO: 1885788
gucuauagccuagacgaaa

SEQ ID NO: 2367403 - RNA, 19 nt, Artificial Sequence
  Description of Artificial Sequence: Synthetic oligonucleotide
  Antisense strand to SEQ ID NO: 2367402
uuucgucuaggcuauagac

SEQ ID NO: 2367404 - RNA, 19 nt, Artificial Sequence
  Description of Artificial Sequence: Synthetic oligonucleotide
  Sense strand starting at position 41 of SEQ ID NO: 1885789
ugggucugucaccaagaca

SEQ ID NO: 2367405 - RNA, 19 nt, Artificial Sequence
  Description of Artificial Sequence: Synthetic oligonucleotide
  Antisense strand to SEQ ID NO: 2367404
ugucuuggugacagaccca

SEQ ID NO: 2367406 - RNA, 19 nt, Artificial Sequence
  Description of Artificial Sequence: Synthetic oligonucleotide
  Sense strand starting at position 136 of SEQ ID NO: 1885789
acaguuaugccucagaaac

SEQ ID NO: 2367407 - RNA, 19 nt, Artificial Sequence
  Description of Artificial Sequence: Synthetic oligonucleotide
  Antisense strand to SEQ ID NO: 2367406
guuucugaggcauaacugu

SEQ ID NO: 2367408 - RNA, 19 nt, Artificial Sequence
  Description of Artificial Sequence: Synthetic oligonucleotide
  Sense strand starting at position 154 of SEQ ID NO: 1885789
ccaagaaaggugcauccau

SEQ ID NO: 2367409 - RNA, 19 nt, Artificial Sequence
  Description of Artificial Sequence: Synthetic oligonucleotide
  Antisense strand to SEQ ID NO: 2367408
auggaugcaccuuucuugg

SEQ ID NO: 2367410 - RNA, 19 nt, Artificial Sequence
  Description of Artificial Sequence: Synthetic oligonucleotide
  Sense strand starting at position 257 of SEQ ID NO: 1885789
gucacauguucccuccaaa

SEQ ID NO: 2367411 - RNA, 19 nt, Artificial Sequence
  Description of Artificial Sequence: Synthetic oligonucleotide
  Antisense strand to SEQ ID NO: 2367410
uuuggagggaacaugugac

SEQ ID NO: 2367412 - RNA, 19 nt, Artificial Sequence
  Description of Artificial Sequence: Synthetic oligonucleotide
  Sense strand starting at position 443 of SEQ ID NO: 1885789
uguccagacuugccaaagu

SEQ ID NO: 2367413 - RNA, 19 nt, Artificial Sequence
  Description of Artificial Sequence: Synthetic oligonucleotide
  Antisense strand to SEQ ID NO: 2367412
acuuuggcaagucuggaca

SEQ ID NO: 2367414 - RNA, 19 nt, Artificial Sequence
  Description of Artificial Sequence: Synthetic oligonucleotide
  Sense strand starting at position 652 of SEQ ID NO: 1885789
ugacgccacuuuguagaaa

SEQ ID NO: 2367415 - RNA, 19 nt, Artificial Sequence
  Description of Artificial Sequence: Synthetic oligonucleotide
  Antisense strand to SEQ ID NO: 2367414
uuucuacaaaguggcguca

SEQ ID NO: 2367416 - RNA, 19 nt, Artificial Sequence
  Description of Artificial Sequence: Synthetic oligonucleotide
  Sense strand starting at position 1115 of SEQ ID NO: 1885789
uuuccagaucuaggaggua

SEQ ID NO: 2367417 - RNA, 19 nt, Artificial Sequence
  Description of Artificial Sequence: Synthetic oligonucleotide
  Antisense strand to SEQ ID NO: 2367416
uaccuccuagaucuggaaa

SEQ ID NO: 2367418 - RNA, 19 nt, Artificial Sequence
  Description of Artificial Sequence: Synthetic oligonucleotide
  Sense strand starting at position 1180 of SEQ ID NO: 1885789
aggccuguuugaccucuaa

SEQ ID NO: 2367419 - RNA, 19 nt, Artificial Sequence
  Description of Artificial Sequence: Synthetic oligonucleotide
  Antisense strand to SEQ ID NO: 2367418
uuagaggucaaacaggccu

SEQ ID NO: 2367420 - RNA, 19 nt, Artificial Sequence
  Description of Artificial Sequence: Synthetic oligonucleotide
  Sense strand starting at position 1184 of SEQ ID NO: 1885789
cuguuugaccucuaacgca

SEQ ID NO: 2367421 - RNA, 19 nt, Artificial Sequence
  Description of Artificial Sequence: Synthetic oligonucleotide
  Antisense strand to SEQ ID NO: 2367420
ugcguuagaggucaaacag

SEQ ID NO: 2367422 - RNA, 19 nt, Artificial Sequence
  Description of Artificial Sequence: Synthetic oligonucleotide
  Sense strand starting at position 1258 of SEQ ID NO: 1885789
agucuuuccucgucaaaga

SEQ ID NO: 2367423 - RNA, 19 nt, Artificial Sequence
  Description of Artificial Sequence: Synthetic oligonucleotide
  Antisense strand to SEQ ID NO: 2367422
ucuuugacgaggaaagacu

SEQ ID NO: 2367424 - RNA, 19 nt, Artificial Sequence
  Description of Artificial Sequence: Synthetic oligonucleotide
  Sense strand starting at position 1259 of SEQ ID NO: 1885789
gucuuuccucgucaaagac

SEQ ID NO: 2367425 - RNA, 19 nt, Artificial Sequence
  Description of Artificial Sequence: Synthetic oligonucleotide
  Antisense strand to SEQ ID NO: 2367424
gucuuugacgaggaaagac

SEQ ID NO: 2367426 - RNA, 19 nt, Artificial Sequence
  Description of Artificial Sequence: Synthetic oligonucleotide
  Sense strand starting at position 1408 of SEQ ID NO: 1885789
auuauaaaguccuuccgca

SEQ ID NO: 2367427 - RNA, 19 nt, Artificial Sequence
  Description of Artificial Sequence: Synthetic oligonucleotide
  Antisense strand to SEQ ID NO: 2367426
ugcggaaggacuuuauaau

SEQ ID NO: 2367428 - RNA, 19 nt, Artificial Sequence
  Description of Artificial Sequence: Synthetic oligonucleotide
  Sense strand starting at position 1429 of SEQ ID NO: 1885789
uggauuauuguacauguaa

SEQ ID NO: 2367429 - RNA, 19 nt, Artificial Sequence
  Description of Artificial Sequence: Synthetic oligonucleotide
  Antisense strand to SEQ ID NO: 2367428
uuacauguacaauaaucca

SEQ ID NO: 2367430 - RNA, 19 nt, Artificial Sequence
  Description of Artificial Sequence: Synthetic oligonucleotide
  Sense strand starting at position 1472 of SEQ ID NO: 1885789
cauauaacuugacugguga

SEQ ID NO: 2367431 - RNA, 19 nt, Artificial Sequence
  Description of Artificial Sequence: Synthetic oligonucleotide
  Antisense strand to SEQ ID NO: 2367430
ucaccagucaaguuauaug

SEQ ID NO: 2367432 - RNA, 19 nt, Artificial Sequence
  Description of Artificial Sequence: Synthetic oligonucleotide
  Sense strand starting at position 1473 of SEQ ID NO: 1885789
auauaacuugacuggugaa

SEQ ID NO: 2367433 - RNA, 19 nt, Artificial Sequence
  Description of Artificial Sequence: Synthetic oligonucleotide
  Antisense strand to SEQ ID NO: 2367432
uucaccagucaaguuauau

SEQ ID NO: 2367434 - RNA, 19 nt, Artificial Sequence
  Description of Artificial Sequence: Synthetic oligonucleotide
  Sense strand starting at position 1639 of SEQ ID NO: 1885789
acagaucuugccuaucgca

SEQ ID NO: 2367435 - RNA, 19 nt, Artificial Sequence
  Description of Artificial Sequence: Synthetic oligonucleotide
  Antisense strand to SEQ ID NO: 2367434
ugcgauaggcaagaucugu

SEQ ID NO: 2367436 - RNA, 19 nt, Artificial Sequence
  Description of Artificial Sequence: Synthetic oligonucleotide
  Sense strand starting at position 2004 of SEQ ID NO: 1885789
guauuuagcucagccaaga

SEQ ID NO: 2367437 - RNA, 19 nt, Artificial Sequence
  Description of Artificial Sequence: Synthetic oligonucleotide
  Antisense strand to SEQ ID NO: 2367436
ucuuggcugagcuaaauac

SEQ ID NO: 2367438 - RNA, 19 nt, Artificial Sequence
  Description of Artificial Sequence: Synthetic oligonucleotide
  Sense strand starting at position 2236 of SEQ ID NO: 1885789
accaauucucagggcugau

SEQ ID NO: 2367439 - RNA, 19 nt, Artificial Sequence
  Description of Artificial Sequence: Synthetic oligonucleotide
  Antisense strand to SEQ ID NO: 2367438
aucagcccugagaauuggu

SEQ ID NO: 2367440 - RNA, 19 nt, Artificial Sequence
  Description of Artificial Sequence: Synthetic oligonucleotide
  Sense strand starting at position 2279 of SEQ ID NO: 1885789
ggaugagaauggguucugu

SEQ ID NO: 2367441 - RNA, 19 nt, Artificial Sequence
  Description of Artificial Sequence: Synthetic oligonucleotide
  Antisense strand to SEQ ID NO: 2367440
acagaacccauucucaucc

SEQ ID NO: 2367442 - RNA, 19 nt, Artificial Sequence
  Description of Artificial Sequence: Synthetic oligonucleotide
  Sense strand starting at position 2500 of SEQ ID NO: 1885789
gguagcuuguacuuaaacu

SEQ ID NO: 2367443 - RNA, 19 nt, Artificial Sequence
  Description of Artificial Sequence: Synthetic oligonucleotide
  Antisense strand to SEQ ID NO: 2367442
aguuuaaguacaagcuacc

SEQ ID NO: 2367444 - RNA, 19 nt, Artificial Sequence
  Description of Artificial Sequence: Synthetic oligonucleotide
  Sense strand starting at position 2859 of SEQ ID NO: 1885789
ggaacacuuugugaauuug

SEQ ID NO: 2367445 - RNA, 19 nt, Artificial Sequence
  Description of Artificial Sequence: Synthetic oligonucleotide
  Antisense strand to SEQ ID NO: 2367444
caaauucacaaaguguucc

SEQ ID NO: 2367446 - RNA, 19 nt, Artificial Sequence
  Description of Artificial Sequence: Synthetic oligonucleotide
  Sense strand starting at position 2929 of SEQ ID NO: 1885789
uuaguauaugugccgcuaa

SEQ ID NO: 2367447 - RNA, 19 nt, Artificial Sequence
  Description of Artificial Sequence: Synthetic oligonucleotide
  Antisense strand to SEQ ID NO: 2367446
uuagcggcacauauacuaa

SEQ ID NO: 2367448 - RNA, 19 nt, Artificial Sequence
  Description of Artificial Sequence: Synthetic oligonucleotide
  Sense strand starting at position 2932 of SEQ ID NO: 1885789
guauaugugccgcuaaagu

SEQ ID NO: 2367449 - RNA, 19 nt, Artificial Sequence
  Description of Artificial Sequence: Synthetic oligonucleotide
  Antisense strand to SEQ ID NO: 2367448
acuuuagcggcacauauac

SEQ ID NO: 2367450 - RNA, 19 nt, Artificial Sequence
  Description of Artificial Sequence: Synthetic oligonucleotide
  Sense strand starting at position 3052 of SEQ ID NO: 1885789
uguucuuagguaugugaua

SEQ ID NO: 2367451 - RNA, 19 nt, Artificial Sequence
  Description of Artificial Sequence: Synthetic oligonucleotide
  Antisense strand to SEQ ID NO: 2367450
uaucacauaccuaagaaca

SEQ ID NO: 2367452 - RNA, 19 nt, Artificial Sequence
  Description of Artificial Sequence: Synthetic oligonucleotide
  Sense strand starting at position 3053 of SEQ ID NO: 1885789
guucuuagguaugugauau

SEQ ID NO: 2367453 - RNA, 19 nt, Artificial Sequence
  Description of Artificial Sequence: Synthetic oligonucleotide
  Antisense strand to SEQ ID NO: 2367452
auaucacauaccuaagaac

SEQ ID NO: 2367454 - RNA, 19 nt, Artificial Sequence
  Description of Artificial Sequence: Synthetic oligonucleotide
  Sense strand starting at position 3113 of SEQ ID NO: 1885789
acaauuaaugggugacuuu

SEQ ID NO: 2367455 - RNA, 19 nt, Artificial Sequence
  Description of Artificial Sequence: Synthetic oligonucleotide
  Antisense strand to SEQ ID NO: 2367454
aaagucacccauuaauugu

SEQ ID NO: 2367456 - RNA, 19 nt, Artificial Sequence
  Description of Artificial Sequence: Synthetic oligonucleotide
  Sense strand starting at position 3116 of SEQ ID NO: 1885789
auuaaugggugacuuuauu

SEQ ID NO: 2367457 - RNA, 19 nt, Artificial Sequence
  Description of Artificial Sequence: Synthetic oligonucleotide
  Antisense strand to SEQ ID NO: 2367456
aauaaagucacccauuaau

SEQ ID NO: 2367458 - RNA, 19 nt, Artificial Sequence
  Description of Artificial Sequence: Synthetic oligonucleotide
  Sense strand starting at position 3167 of SEQ ID NO: 1885789
caaagugauccuugacagu

SEQ ID NO: 2367459 - RNA, 19 nt, Artificial Sequence
  Description of Artificial Sequence: Synthetic oligonucleotide
  Antisense strand to SEQ ID NO: 2367458
acugucaaggaucacuuug

SEQ ID NO: 2367460 - RNA, 19 nt, Artificial Sequence
  Description of Artificial Sequence: Synthetic oligonucleotide
  Sense strand starting at position 3208 of SEQ ID NO: 1885789
uuaaguuucuaggcuggua

SEQ ID NO: 2367461 - RNA, 19 nt, Artificial Sequence
  Description of Artificial Sequence: Synthetic oligonucleotide
  Antisense strand to SEQ ID NO: 2367460
uaccagccuagaaacuuaa

SEQ ID NO: 2367462 - RNA, 19 nt, Artificial Sequence
  Description of Artificial Sequence: Synthetic oligonucleotide
  Sense strand starting at position 3331 of SEQ ID NO: 1885789
guagacauauucccagaac

SEQ ID NO: 2367463 - RNA, 19 nt, Artificial Sequence
  Description of Artificial Sequence: Synthetic oligonucleotide
  Antisense strand to SEQ ID NO: 2367462
guucugggaauaugucuac

SEQ ID NO: 2367464 - RNA, 19 nt, Artificial Sequence
  Description of Artificial Sequence: Synthetic oligonucleotide
  Sense strand starting at position 3404 of SEQ ID NO: 1885789
agaacuucugucugagagu

SEQ ID NO: 2367465 - RNA, 19 nt, Artificial Sequence
  Description of Artificial Sequence: Synthetic oligonucleotide
  Antisense strand to SEQ ID NO: 2367464
acucucagacagaaguucu

SEQ ID NO: 2367466 - RNA, 19 nt, Artificial Sequence
  Description of Artificial Sequence: Synthetic oligonucleotide
  Sense strand starting at position 3511 of SEQ ID NO: 1885789
aaggcugacuucucaggua

SEQ ID NO: 2367467 - RNA, 19 nt, Artificial Sequence
  Description of Artificial Sequence: Synthetic oligonucleotide
  Antisense strand to SEQ ID NO: 2367466
uaccugagaagucagccuu

SEQ ID NO: 2367468 - RNA, 19 nt, Artificial Sequence
  Description of Artificial Sequence: Synthetic oligonucleotide
  Sense strand starting at position 3540 of SEQ ID NO: 1885789
ucugccauuguagacauaa

SEQ ID NO: 2367469 - RNA, 19 nt, Artificial Sequence
  Description of Artificial Sequence: Synthetic oligonucleotide
  Antisense strand to SEQ ID NO: 2367468
uuaugucuacaauggcaga

SEQ ID NO: 2367470 - RNA, 19 nt, Artificial Sequence
  Description of Artificial Sequence: Synthetic oligonucleotide
  Sense strand starting at position 3596 of SEQ ID NO: 1885789
gcaagucuuaaguguugaa

SEQ ID NO: 2367471 - RNA, 19 nt, Artificial Sequence
  Description of Artificial Sequence: Synthetic oligonucleotide
  Antisense strand to SEQ ID NO: 2367470
uucaacacuuaagacuugc

SEQ ID NO: 2367472 - RNA, 19 nt, Artificial Sequence
  Description of Artificial Sequence: Synthetic oligonucleotide
  Sense strand starting at position 3600 of SEQ ID NO: 1885789
gucuuaaguguugaagagu

SEQ ID NO: 2367473 - RNA, 19 nt, Artificial Sequence
  Description of Artificial Sequence: Synthetic oligonucleotide
  Antisense strand to SEQ ID NO: 2367472
acucuucaacacuuaagac

SEQ ID NO: 2367474 - RNA, 19 nt, Artificial Sequence
  Description of Artificial Sequence: Synthetic oligonucleotide
  Sense strand starting at position 3709 of SEQ ID NO: 1885789
gacccaguguuguccuuga

SEQ ID NO: 2367475 - RNA, 19 nt, Artificial Sequence
  Description of Artificial Sequence: Synthetic oligonucleotide
  Antisense strand to SEQ ID NO: 2367474
ucaaggacaacacuggguc

SEQ ID NO: 2367476 - RNA, 19 nt, Artificial Sequence
  Description of Artificial Sequence: Synthetic oligonucleotide
  Sense strand starting at position 3713 of SEQ ID NO: 1885789
caguguuguccuugauuua

SEQ ID NO: 2367477 - RNA, 19 nt, Artificial Sequence
  Description of Artificial Sequence: Synthetic oligonucleotide
  Antisense strand to SEQ ID NO: 2367476
uaaaucaaggacaacacug

SEQ ID NO: 2367478 - RNA, 19 nt, Artificial Sequence
  Description of Artificial Sequence: Synthetic oligonucleotide
  Sense strand starting at position 3716 of SEQ ID NO: 1885789
uguuguccuugauuuacuu

SEQ ID NO: 2367479 - RNA, 19 nt, Artificial Sequence
  Description of Artificial Sequence: Synthetic oligonucleotide
  Antisense strand to SEQ ID NO: 2367478
aaguaaaucaaggacaaca

SEQ ID NO: 2367480 - RNA, 19 nt, Artificial Sequence
  Description of Artificial Sequence: Synthetic oligonucleotide
  Sense strand starting at position 3861 of SEQ ID NO: 1885789
acaugauagucaucugcaa

SEQ ID NO: 2367481 - RNA, 19 nt, Artificial Sequence
  Description of Artificial Sequence: Synthetic oligonucleotide
  Antisense strand to SEQ ID NO: 2367480
uugcagaugacuaucaugu

SEQ ID NO: 2367482 - RNA, 19 nt, Artificial Sequence
  Description of Artificial Sequence: Synthetic oligonucleotide
  Sense strand starting at position 3865 of SEQ ID NO: 1885789
gauagucaucugcaaucug

SEQ ID NO: 2367483 - RNA, 19 nt, Artificial Sequence
  Description of Artificial Sequence: Synthetic oligonucleotide
  Antisense strand to SEQ ID NO: 2367482
cagauugcagaugacuauc

SEQ ID NO: 2367484 - RNA, 19 nt, Artificial Sequence
  Description of Artificial Sequence: Synthetic oligonucleotide
  Sense strand starting at position 84 of SEQ ID NO: 1885790
ugcagucugcguuucugau

SEQ ID NO: 2367485 - RNA, 19 nt, Artificial Sequence
  Description of Artificial Sequence: Synthetic oligonucleotide
  Antisense strand to SEQ ID NO: 2367484
aucagaaacgcagacugca

SEQ ID NO: 2367486 - RNA, 19 nt, Artificial Sequence
  Description of Artificial Sequence: Synthetic oligonucleotide
  Sense strand starting at position 85 of SEQ ID NO: 1885790
gcagucugcguuucugaua

SEQ ID NO: 2367487 - RNA, 19 nt, Artificial Sequence
  Description of Artificial Sequence: Synthetic oligonucleotide
  Antisense strand to SEQ ID NO: 2367486
uaucagaaacgcagacugc

SEQ ID NO: 2367488 - RNA, 19 nt, Artificial Sequence
  Description of Artificial Sequence: Synthetic oligonucleotide
  Sense strand starting at position 120 of SEQ ID NO: 1885790
aauucuucugcccgggaga

SEQ ID NO: 2367489 - RNA, 19 nt, Artificial Sequence
  Description of Artificial Sequence: Synthetic oligonucleotide
  Antisense strand to SEQ ID NO: 2367488
ucucccgggcagaagaauu

SEQ ID NO: 2367490 - RNA, 19 nt, Artificial Sequence
  Description of Artificial Sequence: Synthetic oligonucleotide
  Sense strand starting at position 149 of SEQ ID NO: 1885790
gaaugcguucggagguaug

SEQ ID NO: 2367491 - RNA, 19 nt, Artificial Sequence
  Description of Artificial Sequence: Synthetic oligonucleotide
  Antisense strand to SEQ ID NO: 2367490
cauaccuccgaacgcauuc

SEQ ID NO: 2367492 - RNA, 19 nt, Artificial Sequence
  Description of Artificial Sequence: Synthetic oligonucleotide
  Sense strand starting at position 151 of SEQ ID NO: 1885790
augcguucggagguauguu

SEQ ID NO: 2367493 - RNA, 19 nt, Artificial Sequence
  Description of Artificial Sequence: Synthetic oligonucleotide
  Antisense strand to SEQ ID NO: 2367492
aacauaccuccgaacgcau

SEQ ID NO: 2367494 - RNA, 19 nt, Artificial Sequence
  Description of Artificial Sequence: Synthetic oligonucleotide
  Sense strand starting at position 300 of SEQ ID NO: 1885790
ggguaaauuuaugguacug

SEQ ID NO: 2367495 - RNA, 19 nt, Artificial Sequence
  Description of Artificial Sequence: Synthetic oligonucleotide
  Antisense strand to SEQ ID NO: 2367494
caguaccauaaauuuaccc

SEQ ID NO: 2367496 - RNA, 19 nt, Artificial Sequence
  Description of Artificial Sequence: Synthetic oligonucleotide
  Sense strand starting at position 514 of SEQ ID NO: 1885790
gaaucagggcuuugacugu

SEQ ID NO: 2367497 - RNA, 19 nt, Artificial Sequence
  Description of Artificial Sequence: Synthetic oligonucleotide
  Antisense strand to SEQ ID NO: 2367496
acagucaaagcccugauuc

SEQ ID NO: 2367498 - RNA, 19 nt, Artificial Sequence
  Description of Artificial Sequence: Synthetic oligonucleotide
  Sense strand starting at position 602 of SEQ ID NO: 1885790
gaggguuaguuauauauuu

SEQ ID NO: 2367499 - RNA, 19 nt, Artificial Sequence
  Description of Artificial Sequence: Synthetic oligonucleotide
  Antisense strand to SEQ ID NO: 2367498
aaauauauaacuaacccuc

SEQ ID NO: 2367500 - RNA, 19 nt, Artificial Sequence
  Description of Artificial Sequence: Synthetic oligonucleotide
  Sense strand starting at position 903 of SEQ ID NO: 1885790
cacauaugccgacaugcau

SEQ ID NO: 2367501 - RNA, 19 nt, Artificial Sequence
  Description of Artificial Sequence: Synthetic oligonucleotide
  Antisense strand to SEQ ID NO: 2367500
augcaugucggcauaugug

SEQ ID NO: 2367502 - RNA, 19 nt, Artificial Sequence
  Description of Artificial Sequence: Synthetic oligonucleotide
  Sense strand starting at position 1587 of SEQ ID NO: 1885790
gguccuuccgcacggauuu

SEQ ID NO: 2367503 - RNA, 19 nt, Artificial Sequence
  Description of Artificial Sequence: Synthetic oligonucleotide
  Antisense strand to SEQ ID NO: 2367502
aaauccgugcggaaggacc

SEQ ID NO: 2367504 - RNA, 19 nt, Artificial Sequence
  Description of Artificial Sequence: Synthetic oligonucleotide
  Sense strand starting at position 1899 of SEQ ID NO: 1885790
cggagagcuuugcccauua

SEQ ID NO: 2367505 - RNA, 19 nt, Artificial Sequence
  Description of Artificial Sequence: Synthetic oligonucleotide
  Antisense strand to SEQ ID NO: 2367504
uaaugggcaaagcucuccg

SEQ ID NO: 2367506 - RNA, 19 nt, Artificial Sequence
  Description of Artificial Sequence: Synthetic oligonucleotide
  Sense strand starting at position 1901 of SEQ ID NO: 1885790
gagagcuuugcccauuaag

SEQ ID NO: 2367507 - RNA, 19 nt, Artificial Sequence
  Description of Artificial Sequence: Synthetic oligonucleotide
  Antisense strand to SEQ ID NO: 2367506
cuuaaugggcaaagcucuc

SEQ ID NO: 2367508 - RNA, 19 nt, Artificial Sequence
  Description of Artificial Sequence: Synthetic oligonucleotide
  Sense strand starting at position 1913 of SEQ ID NO: 1885790
cauuaagcugccggaagaa

SEQ ID NO: 2367509 - RNA, 19 nt, Artificial Sequence
  Description of Artificial Sequence: Synthetic oligonucleotide
  Antisense strand to SEQ ID NO: 2367508
uucuuccggcagcuuaaug

SEQ ID NO: 2367510 - RNA, 19 nt, Artificial Sequence
  Description of Artificial Sequence: Synthetic oligonucleotide
  Sense strand starting at position 2008 of SEQ ID NO: 1885790
ugacaagccgcgcauauuu

SEQ ID NO: 2367511 - RNA, 19 nt, Artificial Sequence
  Description of Artificial Sequence: Synthetic oligonucleotide
  Antisense strand to SEQ ID NO: 2367510
aaauaugcgcggcuuguca

SEQ ID NO: 2367512 - RNA, 19 nt, Artificial Sequence
  Description of Artificial Sequence: Synthetic oligonucleotide
  Sense strand starting at position 2364 of SEQ ID NO: 1885790
uuaaauauagcagggaacu

SEQ ID NO: 2367513 - RNA, 19 nt, Artificial Sequence
  Description of Artificial Sequence: Synthetic oligonucleotide
  Antisense strand to SEQ ID NO: 2367512
aguucccugcuauauuuaa

SEQ ID NO: 2367514 - RNA, 19 nt, Artificial Sequence
  Description of Artificial Sequence: Synthetic oligonucleotide
  Sense strand starting at position 2532 of SEQ ID NO: 1885790
caaacaacaguuugugaga

SEQ ID NO: 2367515 - RNA, 19 nt, Artificial Sequence
  Description of Artificial Sequence: Synthetic oligonucleotide
  Antisense strand to SEQ ID NO: 2367514
ucucacaaacuguuguuug

SEQ ID NO: 2367516 - RNA, 19 nt, Artificial Sequence
  Description of Artificial Sequence: Synthetic oligonucleotide
  Sense strand starting at position 2657 of SEQ ID NO: 1885790
gagagcugguccuuugaug

SEQ ID NO: 2367517 - RNA, 19 nt, Artificial Sequence
  Description of Artificial Sequence: Synthetic oligonucleotide
  Antisense strand to SEQ ID NO: 2367516
caucaaaggaccagcucuc

SEQ ID NO: 2367518 - RNA, 19 nt, Artificial Sequence
  Description of Artificial Sequence: Synthetic oligonucleotide
  Sense strand starting at position 2709 of SEQ ID NO: 1885790
ggcgaaguguacacacgua

SEQ ID NO: 2367519 - RNA, 19 nt, Artificial Sequence
  Description of Artificial Sequence: Synthetic oligonucleotide
  Antisense strand to SEQ ID NO: 2367518
uacguguguacacuucgcc

SEQ ID NO: 2367520 - RNA, 19 nt, Artificial Sequence
  Description of Artificial Sequence: Synthetic oligonucleotide
  Sense strand starting at position 2753 of SEQ ID NO: 1885790
cugcuauauuugucaggcu

SEQ ID NO: 2367521 - RNA, 19 nt, Artificial Sequence
  Description of Artificial Sequence: Synthetic oligonucleotide
  Antisense strand to SEQ ID NO: 2367520
agccugacaaauauagcag

SEQ ID NO: 2367522 - RNA, 19 nt, Artificial Sequence
  Description of Artificial Sequence: Synthetic oligonucleotide
  Sense strand starting at position 2841 of SEQ ID NO: 1885790
uggcauuaggcagaucuaa

SEQ ID NO: 2367523 - RNA, 19 nt, Artificial Sequence
  Description of Artificial Sequence: Synthetic oligonucleotide
  Antisense strand to SEQ ID NO: 2367522
uuagaucugccuaaugcca

SEQ ID NO: 2367524 - RNA, 19 nt, Artificial Sequence
  Description of Artificial Sequence: Synthetic oligonucleotide
  Sense strand starting at position 2920 of SEQ ID NO: 1885790
gcaggaaguuguucucuuu

SEQ ID NO: 2367525 - RNA, 19 nt, Artificial Sequence
  Description of Artificial Sequence: Synthetic oligonucleotide
  Antisense strand to SEQ ID NO: 2367524
aaagagaacaacuuccugc

SEQ ID NO: 2367526 - RNA, 19 nt, Artificial Sequence
  Description of Artificial Sequence: Synthetic oligonucleotide
  Sense strand starting at position 3041 of SEQ ID NO: 1885790
auuugauuguauuaccuca

SEQ ID NO: 2367527 - RNA, 19 nt, Artificial Sequence
  Description of Artificial Sequence: Synthetic oligonucleotide
  Antisense strand to SEQ ID NO: 2367526
ugagguaauacaaucaaau

SEQ ID NO: 2367528 - RNA, 19 nt, Artificial Sequence
  Description of Artificial Sequence: Synthetic oligonucleotide
  Sense strand starting at position 3046 of SEQ ID NO: 1885790
auuguauuaccucaugcca

SEQ ID NO: 2367529 - RNA, 19 nt, Artificial Sequence
  Description of Artificial Sequence: Synthetic oligonucleotide
  Antisense strand to SEQ ID NO: 2367528
uggcaugagguaauacaau

SEQ ID NO: 2367530 - RNA, 19 nt, Artificial Sequence
  Description of Artificial Sequence: Synthetic oligonucleotide
  Sense strand starting at position 3076 of SEQ ID NO: 1885790
cucugugagcuagguacaa

SEQ ID NO: 2367531 - RNA, 19 nt, Artificial Sequence
  Description of Artificial Sequence: Synthetic oligonucleotide
  Antisense strand to SEQ ID NO: 2367530
uuguaccuagcucacagag

SEQ ID NO: 2367532 - RNA, 19 nt, Artificial Sequence
  Description of Artificial Sequence: Synthetic oligonucleotide
  Sense strand starting at position 3078 of SEQ ID NO: 1885790
cugugagcuagguacaauu

SEQ ID NO: 2367533 - RNA, 19 nt, Artificial Sequence
  Description of Artificial Sequence: Synthetic oligonucleotide
  Antisense strand to SEQ ID NO: 2367532
aauuguaccuagcucacag

SEQ ID NO: 2367534 - RNA, 19 nt, Artificial Sequence
  Description of Artificial Sequence: Synthetic oligonucleotide
  Sense strand starting at position 3120 of SEQ ID NO: 1885790
gaaauugagccuuagguua

SEQ ID NO: 2367535 - RNA, 19 nt, Artificial Sequence
  Description of Artificial Sequence: Synthetic oligonucleotide
  Antisense strand to SEQ ID NO: 2367534
uaaccuaaggcucaauuuc

SEQ ID NO: 2367536 - RNA, 19 nt, Artificial Sequence
  Description of Artificial Sequence: Synthetic oligonucleotide
  Sense strand starting at position 3125 of SEQ ID NO: 1885790
ugagccuuagguuaaauaa

SEQ ID NO: 2367537 - RNA, 19 nt, Artificial Sequence
  Description of Artificial Sequence: Synthetic oligonucleotide
  Antisense strand to SEQ ID NO: 2367536
uuauuuaaccuaaggcuca

SEQ ID NO: 2367538 - RNA, 19 nt, Artificial Sequence
  Description of Artificial Sequence: Synthetic oligonucleotide
  Sense strand starting at position 3199 of SEQ ID NO: 1885790
ggaguugugcugagacguc

SEQ ID NO: 2367539 - RNA, 19 nt, Artificial Sequence
  Description of Artificial Sequence: Synthetic oligonucleotide
  Antisense strand to SEQ ID NO: 2367538
gacgucucagcacaacucc

SEQ ID NO: 2367540 - RNA, 19 nt, Artificial Sequence
  Description of Artificial Sequence: Synthetic oligonucleotide
  Sense strand starting at position 3268 of SEQ ID NO: 1885790
ggagcaaggcuugguucaa

SEQ ID NO: 2367541 - RNA, 19 nt, Artificial Sequence
  Description of Artificial Sequence: Synthetic oligonucleotide
  Antisense strand to SEQ ID NO: 2367540
uugaaccaagccuugcucc

SEQ ID NO: 2367542 - RNA, 19 nt, Artificial Sequence
  Description of Artificial Sequence: Synthetic oligonucleotide
  Sense strand starting at position 3350 of SEQ ID NO: 1885790
gguccuuugacucaguguu

SEQ ID NO: 2367543 - RNA, 19 nt, Artificial Sequence
  Description of Artificial Sequence: Synthetic oligonucleotide
  Antisense strand to SEQ ID NO: 2367542
aacacugagucaaaggacc

SEQ ID NO: 2367544 - RNA, 19 nt, Artificial Sequence
  Description of Artificial Sequence: Synthetic oligonucleotide
  Sense strand starting at position 3360 of SEQ ID NO: 1885790
cucaguguuccguuagcaa

SEQ ID NO: 2367545 - RNA, 19 nt, Artificial Sequence
  Description of Artificial Sequence: Synthetic oligonucleotide
  Antisense strand to SEQ ID NO: 2367544
uugcuaacggaacacugag

SEQ ID NO: 2367546 - RNA, 19 nt, Artificial Sequence
  Description of Artificial Sequence: Synthetic oligonucleotide
  Sense strand starting at position 3463 of SEQ ID NO: 1885790
gaaccuuuaugggucuuga

SEQ ID NO: 2367547 - RNA, 19 nt, Artificial Sequence
  Description of Artificial Sequence: Synthetic oligonucleotide
  Antisense strand to SEQ ID NO: 2367546
ucaagacccauaaagguuc

SEQ ID NO: 2367548 - RNA, 19 nt, Artificial Sequence
  Description of Artificial Sequence: Synthetic oligonucleotide
  Sense strand starting at position 3541 of SEQ ID NO: 1885790
gugggaucucaggauaugu

SEQ ID NO: 2367549 - RNA, 19 nt, Artificial Sequence
  Description of Artificial Sequence: Synthetic oligonucleotide
  Antisense strand to SEQ ID NO: 2367548
acauauccugagaucccac

SEQ ID NO: 2367550 - RNA, 19 nt, Artificial Sequence
  Description of Artificial Sequence: Synthetic oligonucleotide
  Sense strand starting at position 3550 of SEQ ID NO: 1885790
caggauaugucaguuacug

SEQ ID NO: 2367551 - RNA, 19 nt, Artificial Sequence
  Description of Artificial Sequence: Synthetic oligonucleotide
  Antisense strand to SEQ ID NO: 2367550
caguaacugacauauccug

SEQ ID NO: 2367552 - RNA, 19 nt, Artificial Sequence
  Description of Artificial Sequence: Synthetic oligonucleotide
  Sense strand starting at position 3580 of SEQ ID NO: 1885790
gugucugcucccguggaga

SEQ ID NO: 2367553 - RNA, 19 nt, Artificial Sequence
  Description of Artificial Sequence: Synthetic oligonucleotide
  Antisense strand to SEQ ID NO: 2367552
ucuccacgggagcagacac

SEQ ID NO: 2367554 - RNA, 19 nt, Artificial Sequence
  Description of Artificial Sequence: Synthetic oligonucleotide
  Sense strand starting at position 3600 of SEQ ID NO: 1885790
ucacaaugcugagucuaca

SEQ ID NO: 2367555 - RNA, 19 nt, Artificial Sequence
  Description of Artificial Sequence: Synthetic oligonucleotide
  Antisense strand to SEQ ID NO: 2367554
uguagacucagcauuguga

SEQ ID NO: 2367556 - RNA, 19 nt, Artificial Sequence
  Description of Artificial Sequence: Synthetic oligonucleotide
  Sense strand starting at position 3610 of SEQ ID NO: 1885790
gagucuacacauugagagu

SEQ ID NO: 2367557 - RNA, 19 nt, Artificial Sequence
  Description of Artificial Sequence: Synthetic oligonucleotide
  Antisense strand to SEQ ID NO: 2367556
acucucaauguguagacuc

SEQ ID NO: 2367558 - RNA, 19 nt, Artificial Sequence
  Description of Artificial Sequence: Synthetic oligonucleotide
  Sense strand starting at position 3756 of SEQ ID NO: 1885790
agaaauuuauucuauggca

SEQ ID NO: 2367559 - RNA, 19 nt, Artificial Sequence
  Description of Artificial Sequence: Synthetic oligonucleotide
  Antisense strand to SEQ ID NO: 2367558
ugccauagaauaaauuucu

SEQ ID NO: 2367560 - RNA, 19 nt, Artificial Sequence
  Description of Artificial Sequence: Synthetic oligonucleotide
  Sense strand starting at position 3876 of SEQ ID NO: 1885790
uggugaaguaaacauguuu

SEQ ID NO: 2367561 - RNA, 19 nt, Artificial Sequence
  Description of Artificial Sequence: Synthetic oligonucleotide
  Antisense strand to SEQ ID NO: 2367560
aaacauguuuacuucacca

SEQ ID NO: 2367562 - RNA, 19 nt, Artificial Sequence
  Description of Artificial Sequence: Synthetic oligonucleotide
  Sense strand starting at position 3946 of SEQ ID NO: 1885790
uguguacugguguggaaag

SEQ ID NO: 2367563 - RNA, 19 nt, Artificial Sequence
  Description of Artificial Sequence: Synthetic oligonucleotide
  Antisense strand to SEQ ID NO: 2367562
cuuuccacaccaguacaca

SEQ ID NO: 2367564 - RNA, 19 nt, Artificial Sequence
  Description of Artificial Sequence: Synthetic oligonucleotide
  Sense strand starting at position 12 of SEQ ID NO: 1885791
ucuauuuaguucuccuagu

SEQ ID NO: 2367565 - RNA, 19 nt, Artificial Sequence
  Description of Artificial Sequence: Synthetic oligonucleotide
  Antisense strand to SEQ ID NO: 2367564
acuaggagaacuaaauaga

SEQ ID NO: 2367566 - RNA, 19 nt, Artificial Sequence
  Description of Artificial Sequence: Synthetic oligonucleotide
  Sense strand starting at position 13 of SEQ ID NO: 1885791
cuauuuaguucuccuaguu

SEQ ID NO: 2367567 - RNA, 19 nt, Artificial Sequence
  Description of Artificial Sequence: Synthetic oligonucleotide
  Antisense strand to SEQ ID NO: 2367566
aacuaggagaacuaaauag

SEQ ID NO: 2367568 - RNA, 19 nt, Artificial Sequence
  Description of Artificial Sequence: Synthetic oligonucleotide
  Sense strand starting at position 58 of SEQ ID NO: 1885791
ugccuauauuuguucuaag

SEQ ID NO: 2367569 - RNA, 19 nt, Artificial Sequence
  Description of Artificial Sequence: Synthetic oligonucleotide
  Antisense strand to SEQ ID NO: 2367568
cuuagaacaaauauaggca

SEQ ID NO: 2367570 - RNA, 19 nt, Artificial Sequence
  Description of Artificial Sequence: Synthetic oligonucleotide
  Sense strand starting at position 59 of SEQ ID NO: 1885791
gccuauauuuguucuaagu

SEQ ID NO: 2367571 - RNA, 19 nt, Artificial Sequence
  Description of Artificial Sequence: Synthetic oligonucleotide
  Antisense strand to SEQ ID NO: 2367570
acuuagaacaaauauaggc

SEQ ID NO: 2367572 - RNA, 19 nt, Artificial Sequence
  Description of Artificial Sequence: Synthetic oligonucleotide
  Sense strand starting at position 125 of SEQ ID NO: 1885791
cuauguuuacagugaccaa

SEQ ID NO: 2367573 - RNA, 19 nt, Artificial Sequence
  Description of Artificial Sequence: Synthetic oligonucleotide
  Antisense strand to SEQ ID NO: 2367572
uuggucacuguaaacauag

SEQ ID NO: 2367574 - RNA, 19 nt, Artificial Sequence
  Description of Artificial Sequence: Synthetic oligonucleotide
  Sense strand starting at position 128 of SEQ ID NO: 1885791
uguuuacagugaccaauaa

SEQ ID NO: 2367575 - RNA, 19 nt, Artificial Sequence
  Description of Artificial Sequence: Synthetic oligonucleotide
  Antisense strand to SEQ ID NO: 2367574
uuauuggucacuguaaaca

SEQ ID NO: 2367576 - RNA, 19 nt, Artificial Sequence
  Description of Artificial Sequence: Synthetic oligonucleotide
  Sense strand starting at position 147 of SEQ ID NO: 1885791
acagcagggccucaauauu

SEQ ID NO: 2367577 - RNA, 19 nt, Artificial Sequence
  Description of Artificial Sequence: Synthetic oligonucleotide
  Antisense strand to SEQ ID NO: 2367576
aauauugaggcccugcugu

SEQ ID NO: 2367578 - RNA, 19 nt, Artificial Sequence
  Description of Artificial Sequence: Synthetic oligonucleotide
  Sense strand starting at position 156 of SEQ ID NO: 1885791
ccucaauauuggcuaaaug

SEQ ID NO: 2367579 - RNA, 19 nt, Artificial Sequence
  Description of Artificial Sequence: Synthetic oligonucleotide
  Antisense strand to SEQ ID NO: 2367578
cauuuagccaauauugagg

SEQ ID NO: 2367580 - RNA, 19 nt, Artificial Sequence
  Description of Artificial Sequence: Synthetic oligonucleotide
  Sense strand starting at position 230 of SEQ ID NO: 1885791
ggcucuaaugguuaaguca

SEQ ID NO: 2367581 - RNA, 19 nt, Artificial Sequence
  Description of Artificial Sequence: Synthetic oligonucleotide
  Antisense strand to SEQ ID NO: 2367580
ugacuuaaccauuagagcc

SEQ ID NO: 2367582 - RNA, 19 nt, Artificial Sequence
  Description of Artificial Sequence: Synthetic oligonucleotide
  Sense strand starting at position 496 of SEQ ID NO: 1885791
aagagaaacuguuucgaag

SEQ ID NO: 2367583 - RNA, 19 nt, Artificial Sequence
  Description of Artificial Sequence: Synthetic oligonucleotide
  Antisense strand to SEQ ID NO: 2367582
cuucgaaacaguuucucuu

SEQ ID NO: 2367584 - RNA, 19 nt, Artificial Sequence
  Description of Artificial Sequence: Synthetic oligonucleotide
  Sense strand starting at position 555 of SEQ ID NO: 1885791
cccuuuauugucuggaaac

SEQ ID NO: 2367585 - RNA, 19 nt, Artificial Sequence
  Description of Artificial Sequence: Synthetic oligonucleotide
  Antisense strand to SEQ ID NO: 2367584
guuuccagacaauaaaggg

SEQ ID NO: 2367586 - RNA, 19 nt, Artificial Sequence
  Description of Artificial Sequence: Synthetic oligonucleotide
  Sense strand starting at position 557 of SEQ ID NO: 1885791
cuuuauugucuggaaacuu

SEQ ID NO: 2367587 - RNA, 19 nt, Artificial Sequence
  Description of Artificial Sequence: Synthetic oligonucleotide
  Antisense strand to SEQ ID NO: 2367586
aaguuuccagacaauaaag

SEQ ID NO: 2367588 - RNA, 19 nt, Artificial Sequence
  Description of Artificial Sequence: Synthetic oligonucleotide
  Sense strand starting at position 806 of SEQ ID NO: 1885791
aagagugaccacgaauguu

SEQ ID NO: 2367589 - RNA, 19 nt, Artificial Sequence
  Description of Artificial Sequence: Synthetic oligonucleotide
  Antisense strand to SEQ ID NO: 2367588
aacauucguggucacucuu

SEQ ID NO: 2367590 - RNA, 19 nt, Artificial Sequence
  Description of Artificial Sequence: Synthetic oligonucleotide
  Sense strand starting at position 826 of SEQ ID NO: 1885791
acauguugguaagcaaaua

SEQ ID NO: 2367591 - RNA, 19 nt, Artificial Sequence
  Description of Artificial Sequence: Synthetic oligonucleotide
  Antisense strand to SEQ ID NO: 2367590
uauuugcuuaccaacaugu

SEQ ID NO: 2367592 - RNA, 19 nt, Artificial Sequence
  Description of Artificial Sequence: Synthetic oligonucleotide
  Sense strand starting at position 991 of SEQ ID NO: 1885791
guacuuacacuguaucuaa

SEQ ID NO: 2367593 - RNA, 19 nt, Artificial Sequence
  Description of Artificial Sequence: Synthetic oligonucleotide
  Antisense strand to SEQ ID NO: 2367592
uuagauacaguguaaguac

SEQ ID NO: 2367594 - RNA, 19 nt, Artificial Sequence
  Description of Artificial Sequence: Synthetic oligonucleotide
  Sense strand starting at position 1047 of SEQ ID NO: 1885791
ucaacaauccuaugaguug

SEQ ID NO: 2367595 - RNA, 19 nt, Artificial Sequence
  Description of Artificial Sequence: Synthetic oligonucleotide
  Antisense strand to SEQ ID NO: 2367594
caacucauaggauuguuga

SEQ ID NO: 2367596 - RNA, 19 nt, Artificial Sequence
  Description of Artificial Sequence: Synthetic oligonucleotide
  Sense strand starting at position 1056 of SEQ ID NO: 1885791
cuaugaguuggguauuauu

SEQ ID NO: 2367597 - RNA, 19 nt, Artificial Sequence
  Description of Artificial Sequence: Synthetic oligonucleotide
  Antisense strand to SEQ ID NO: 2367596
aauaauacccaacucauag

SEQ ID NO: 2367598 - RNA, 19 nt, Artificial Sequence
  Description of Artificial Sequence: Synthetic oligonucleotide
  Sense strand starting at position 1065 of SEQ ID NO: 1885791
ggguauuauugacuccauu

SEQ ID NO: 2367599 - RNA, 19 nt, Artificial Sequence
  Description of Artificial Sequence: Synthetic oligonucleotide
  Antisense strand to SEQ ID NO: 2367598
aauggagucaauaauaccc

SEQ ID NO: 2367600 - RNA, 19 nt, Artificial Sequence
  Description of Artificial Sequence: Synthetic oligonucleotide
  Sense strand starting at position 1241 of SEQ ID NO: 1885791
guccaauugccugacggaa

SEQ ID NO: 2367601 - RNA, 19 nt, Artificial Sequence
  Description of Artificial Sequence: Synthetic oligonucleotide
  Antisense strand to SEQ ID NO: 2367600
uuccgucaggcaauuggac

SEQ ID NO: 2367602 - RNA, 19 nt, Artificial Sequence
  Description of Artificial Sequence: Synthetic oligonucleotide
  Sense strand starting at position 1262 of SEQ ID NO: 1885791
cucacaaguuucucaaagu

SEQ ID NO: 2367603 - RNA, 19 nt, Artificial Sequence
  Description of Artificial Sequence: Synthetic oligonucleotide
  Antisense strand to SEQ ID NO: 2367602
acuuugagaaacuugugag

SEQ ID NO: 2367604 - RNA, 19 nt, Artificial Sequence
  Description of Artificial Sequence: Synthetic oligonucleotide
  Sense strand starting at position 1602 of SEQ ID NO: 1885791
uuguaaaucuugguuacca

SEQ ID NO: 2367605 - RNA, 19 nt, Artificial Sequence
  Description of Artificial Sequence: Synthetic oligonucleotide
  Antisense strand to SEQ ID NO: 2367604
ugguaaccaagauuuacaa

SEQ ID NO: 2367606 - RNA, 19 nt, Artificial Sequence
  Description of Artificial Sequence: Synthetic oligonucleotide
  Sense strand starting at position 1603 of SEQ ID NO: 1885791
uguaaaucuugguuaccaa

SEQ ID NO: 2367607 - RNA, 19 nt, Artificial Sequence
  Description of Artificial Sequence: Synthetic oligonucleotide
  Antisense strand to SEQ ID NO: 2367606
uugguaaccaagauuuaca

SEQ ID NO: 2367608 - RNA, 19 nt, Artificial Sequence
  Description of Artificial Sequence: Synthetic oligonucleotide
  Sense strand starting at position 1604 of SEQ ID NO: 1885791
guaaaucuugguuaccaag

SEQ ID NO: 2367609 - RNA, 19 nt, Artificial Sequence
  Description of Artificial Sequence: Synthetic oligonucleotide
  Antisense strand to SEQ ID NO: 2367608
cuugguaaccaagauuuac

SEQ ID NO: 2367610 - RNA, 19 nt, Artificial Sequence
  Description of Artificial Sequence: Synthetic oligonucleotide
  Sense strand starting at position 2028 of SEQ ID NO: 1885791
gagagaaucugcuuccgga

SEQ ID NO: 2367611 - RNA, 19 nt, Artificial Sequence
  Description of Artificial Sequence: Synthetic oligonucleotide
  Antisense strand to SEQ ID NO: 2367610
uccggaagcagauucucuc

SEQ ID NO: 2367612 - RNA, 19 nt, Artificial Sequence
  Description of Artificial Sequence: Synthetic oligonucleotide
  Sense strand starting at position 2344 of SEQ ID NO: 1885791
ccgauuguuauugaacgau

SEQ ID NO: 2367613 - RNA, 19 nt, Artificial Sequence
  Description of Artificial Sequence: Synthetic oligonucleotide
  Antisense strand to SEQ ID NO: 2367612
aucguucaauaacaaucgg

SEQ ID NO: 2367614 - RNA, 19 nt, Artificial Sequence
  Description of Artificial Sequence: Synthetic oligonucleotide
  Sense strand starting at position 2486 of SEQ ID NO: 1885791
gggaauccguguuuauuuc

SEQ ID NO: 2367615 - RNA, 19 nt, Artificial Sequence
  Description of Artificial Sequence: Synthetic oligonucleotide
  Antisense strand to SEQ ID NO: 2367614
gaaauaaacacggauuccc

SEQ ID NO: 2367616 - RNA, 19 nt, Artificial Sequence
  Description of Artificial Sequence: Synthetic oligonucleotide
  Sense strand starting at position 3092 of SEQ ID NO: 1885791
ccacuuuaacguugaggau

SEQ ID NO: 2367617 - RNA, 19 nt, Artificial Sequence
  Description of Artificial Sequence: Synthetic oligonucleotide
  Antisense strand to SEQ ID NO: 2367616
auccucaacguuaaagugg

SEQ ID NO: 2367618 - RNA, 19 nt, Artificial Sequence
  Description of Artificial Sequence: Synthetic oligonucleotide
  Sense strand starting at position 3093 of SEQ ID NO: 1885791
cacuuuaacguugaggaua

SEQ ID NO: 2367619 - RNA, 19 nt, Artificial Sequence
  Description of Artificial Sequence: Synthetic oligonucleotide
  Antisense strand to SEQ ID NO: 2367618
uauccucaacguuaaagug

SEQ ID NO: 2367620 - RNA, 19 nt, Artificial Sequence
  Description of Artificial Sequence: Synthetic oligonucleotide
  Sense strand starting at position 3476 of SEQ ID NO: 1885791
guauguguugaguacauga

SEQ ID NO: 2367621 - RNA, 19 nt, Artificial Sequence
  Description of Artificial Sequence: Synthetic oligonucleotide
  Antisense strand to SEQ ID NO: 2367620
ucauguacucaacacauac

SEQ ID NO: 2367622 - RNA, 19 nt, Artificial Sequence
  Description of Artificial Sequence: Synthetic oligonucleotide
  Sense strand starting at position 3478 of SEQ ID NO: 1885791
auguguugaguacaugaaa

SEQ ID NO: 2367623 - RNA, 19 nt, Artificial Sequence
  Description of Artificial Sequence: Synthetic oligonucleotide
  Antisense strand to SEQ ID NO: 2367622
uuucauguacucaacacau

SEQ ID NO: 2367624 - RNA, 19 nt, Artificial Sequence
  Description of Artificial Sequence: Synthetic oligonucleotide
  Sense strand starting at position 3481 of SEQ ID NO: 1885791
uguugaguacaugaaagcu

SEQ ID NO: 2367625 - RNA, 19 nt, Artificial Sequence
  Description of Artificial Sequence: Synthetic oligonucleotide
  Antisense strand to SEQ ID NO: 2367624
agcuuucauguacucaaca

SEQ ID NO: 2367626 - RNA, 19 nt, Artificial Sequence
  Description of Artificial Sequence: Synthetic oligonucleotide
  Sense strand starting at position 3586 of SEQ ID NO: 1885791
gaaaguggugguuaacagu

SEQ ID NO: 2367627 - RNA, 19 nt, Artificial Sequence
  Description of Artificial Sequence: Synthetic oligonucleotide
  Antisense strand to SEQ ID NO: 2367626
acuguuaaccaccacuuuc

SEQ ID NO: 2367628 - RNA, 19 nt, Artificial Sequence
  Description of Artificial Sequence: Synthetic oligonucleotide
  Sense strand starting at position 3647 of SEQ ID NO: 1885791
ggugucguucaguuuagca

SEQ ID NO: 2367629 - RNA, 19 nt, Artificial Sequence
  Description of Artificial Sequence: Synthetic oligonucleotide
  Antisense strand to SEQ ID NO: 2367628
ugcuaaacugaacgacacc

SEQ ID NO: 2367630 - RNA, 19 nt, Artificial Sequence
  Description of Artificial Sequence: Synthetic oligonucleotide
  Sense strand starting at position 3708 of SEQ ID NO: 1885791
ugaauuauagugcaguauu

SEQ ID NO: 2367631 - RNA, 19 nt, Artificial Sequence
  Description of Artificial Sequence: Synthetic oligonucleotide
  Antisense strand to SEQ ID NO: 2367630
aauacugcacuauaauuca

SEQ ID NO: 2367632 - RNA, 19 nt, Artificial Sequence
  Description of Artificial Sequence: Synthetic oligonucleotide
  Sense strand starting at position 3711 of SEQ ID NO: 1885791
auuauagugcaguauuaag

SEQ ID NO: 2367633 - RNA, 19 nt, Artificial Sequence
  Description of Artificial Sequence: Synthetic oligonucleotide
  Antisense strand to SEQ ID NO: 2367632
cuuaauacugcacuauaau

SEQ ID NO: 2367634 - RNA, 19 nt, Artificial Sequence
  Description of Artificial Sequence: Synthetic oligonucleotide
  Sense strand starting at position 3725 of SEQ ID NO: 1885791
uuaaguauggccuauuaaa

SEQ ID NO: 2367635 - RNA, 19 nt, Artificial Sequence
  Description of Artificial Sequence: Synthetic oligonucleotide
  Antisense strand to SEQ ID NO: 2367634
uuuaauaggccauacuuaa

SEQ ID NO: 2367636 - RNA, 19 nt, Artificial Sequence
  Description of Artificial Sequence: Synthetic oligonucleotide
  Sense strand starting at position 3840 of SEQ ID NO: 1885791
uauuauagagacugguuau

SEQ ID NO: 2367637 - RNA, 19 nt, Artificial Sequence
  Description of Artificial Sequence: Synthetic oligonucleotide
  Antisense strand to SEQ ID NO: 2367636
auaaccagucucuauaaua

SEQ ID NO: 2367638 - RNA, 19 nt, Artificial Sequence
  Description of Artificial Sequence: Synthetic oligonucleotide
  Sense strand starting at position 3843 of SEQ ID NO: 1885791
uauagagacugguuauaca

SEQ ID NO: 2367639 - RNA, 19 nt, Artificial Sequence
  Description of Artificial Sequence: Synthetic oligonucleotide
  Antisense strand to SEQ ID NO: 2367638
uguauaaccagucucuaua

SEQ ID NO: 2367640 - RNA, 19 nt, Artificial Sequence
  Description of Artificial Sequence: Synthetic oligonucleotide
  Sense strand starting at position 3851 of SEQ ID NO: 1885791
cugguuauacaucagcaaa

SEQ ID NO: 2367641 - RNA, 19 nt, Artificial Sequence
  Description of Artificial Sequence: Synthetic oligonucleotide
  Antisense strand to SEQ ID NO: 2367640
uuugcugauguauaaccag

SEQ ID NO: 2367642 - RNA, 19 nt, Artificial Sequence
  Description of Artificial Sequence: Synthetic oligonucleotide
  Sense strand starting at position 3853 of SEQ ID NO: 1885791
gguuauacaucagcaaacu

SEQ ID NO: 2367643 - RNA, 19 nt, Artificial Sequence
  Description of Artificial Sequence: Synthetic oligonucleotide
  Antisense strand to SEQ ID NO: 2367642
aguuugcugauguauaacc

SEQ ID NO: 2367644 - RNA, 19 nt, Artificial Sequence
  Description of Artificial Sequence: Synthetic oligonucleotide
  Sense strand starting at position 26 of SEQ ID NO: 1885792
guaggaacaacagguuauu

SEQ ID NO: 2367645 - RNA, 19 nt, Artificial Sequence
  Description of Artificial Sequence: Synthetic oligonucleotide
  Antisense strand to SEQ ID NO: 2367644
aauaaccuguuguuccuac

SEQ ID NO: 2367646 - RNA, 19 nt, Artificial Sequence
  Description of Artificial Sequence: Synthetic oligonucleotide
  Sense strand starting at position 69 of SEQ ID NO: 1885792
uauuguuaagugcaccaga

SEQ ID NO: 2367647 - RNA, 19 nt, Artificial Sequence
  Description of Artificial Sequence: Synthetic oligonucleotide
  Antisense strand to SEQ ID NO: 2367646
ucuggugcacuuaacaaua

SEQ ID NO: 2367648 - RNA, 19 nt, Artificial Sequence
  Description of Artificial Sequence: Synthetic oligonucleotide
  Sense strand starting at position 208 of SEQ ID NO: 1885792
cuuuaagcaccugguaaau

SEQ ID NO: 2367649 - RNA, 19 nt, Artificial Sequence
  Description of Artificial Sequence: Synthetic oligonucleotide
  Antisense strand to SEQ ID NO: 2367648
auuuaccaggugcuuaaag

SEQ ID NO: 2367650 - RNA, 19 nt, Artificial Sequence
  Description of Artificial Sequence: Synthetic oligonucleotide
  Sense strand starting at position 292 of SEQ ID NO: 1885792
gagacuuucggguaaugug

SEQ ID NO: 2367651 - RNA, 19 nt, Artificial Sequence
  Description of Artificial Sequence: Synthetic oligonucleotide
  Antisense strand to SEQ ID NO: 2367650
cacauuacccgaaagucuc

SEQ ID NO: 2367652 - RNA, 19 nt, Artificial Sequence
  Description of Artificial Sequence: Synthetic oligonucleotide
  Sense strand starting at position 299 of SEQ ID NO: 1885792
ucggguaaugugccgaguu

SEQ ID NO: 2367653 - RNA, 19 nt, Artificial Sequence
  Description of Artificial Sequence: Synthetic oligonucleotide
  Antisense strand to SEQ ID NO: 2367652
aacucggcacauuacccga

SEQ ID NO: 2367654 - RNA, 19 nt, Artificial Sequence
  Description of Artificial Sequence: Synthetic oligonucleotide
  Sense strand starting at position 341 of SEQ ID NO: 1885792
agguuucaugccgaaggau

SEQ ID NO: 2367655 - RNA, 19 nt, Artificial Sequence
  Description of Artificial Sequence: Synthetic oligonucleotide
  Antisense strand to SEQ ID NO: 2367654
auccuucggcaugaaaccu

SEQ ID NO: 2367656 - RNA, 19 nt, Artificial Sequence
  Description of Artificial Sequence: Synthetic oligonucleotide
  Sense strand starting at position 558 of SEQ ID NO: 1885792
acuguuggcggauagauaa

SEQ ID NO: 2367657 - RNA, 19 nt, Artificial Sequence
  Description of Artificial Sequence: Synthetic oligonucleotide
  Antisense strand to SEQ ID NO: 2367656
uuaucuauccgccaacagu

SEQ ID NO: 2367658 - RNA, 19 nt, Artificial Sequence
  Description of Artificial Sequence: Synthetic oligonucleotide
  Sense strand starting at position 613 of SEQ ID NO: 1885792
accagaaacuaucagagga

SEQ ID NO: 2367659 - RNA, 19 nt, Artificial Sequence
  Description of Artificial Sequence: Synthetic oligonucleotide
  Antisense strand to SEQ ID NO: 2367658
uccucugauaguuucuggu

SEQ ID NO: 2367660 - RNA, 19 nt, Artificial Sequence
  Description of Artificial Sequence: Synthetic oligonucleotide
  Sense strand starting at position 836 of SEQ ID NO: 1885792
guccuaggcacugaggaua

SEQ ID NO: 2367661 - RNA, 19 nt, Artificial Sequence
  Description of Artificial Sequence: Synthetic oligonucleotide
  Antisense strand to SEQ ID NO: 2367660
uauccucagugccuaggac

SEQ ID NO: 2367662 - RNA, 19 nt, Artificial Sequence
  Description of Artificial Sequence: Synthetic oligonucleotide
  Sense strand starting at position 900 of SEQ ID NO: 1885792
gcuaguaaauaacuguaua

SEQ ID NO: 2367663 - RNA, 19 nt, Artificial Sequence
  Description of Artificial Sequence: Synthetic oligonucleotide
  Antisense strand to SEQ ID NO: 2367662
uauacaguuauuuacuagc

SEQ ID NO: 2367664 - RNA, 19 nt, Artificial Sequence
  Description of Artificial Sequence: Synthetic oligonucleotide
  Sense strand starting at position 1016 of SEQ ID NO: 1885792
gcuucucauuucucacgau

SEQ ID NO: 2367665 - RNA, 19 nt, Artificial Sequence
  Description of Artificial Sequence: Synthetic oligonucleotide
  Antisense strand to SEQ ID NO: 2367664
aucgugagaaaugagaagc

SEQ ID NO: 2367666 - RNA, 19 nt, Artificial Sequence
  Description of Artificial Sequence: Synthetic oligonucleotide
  Sense strand starting at position 1053 of SEQ ID NO: 1885792
ccaggucucccuggacauu

SEQ ID NO: 2367667 - RNA, 19 nt, Artificial Sequence
  Description of Artificial Sequence: Synthetic oligonucleotide
  Antisense strand to SEQ ID NO: 2367666
aauguccagggagaccugg

SEQ ID NO: 2367668 - RNA, 19 nt, Artificial Sequence
  Description of Artificial Sequence: Synthetic oligonucleotide
  Sense strand starting at position 2040 of SEQ ID NO: 1885792
gcaacaugauugguggaau

SEQ ID NO: 2367669 - RNA, 19 nt, Artificial Sequence
  Description of Artificial Sequence: Synthetic oligonucleotide
  Antisense strand to SEQ ID NO: 2367668
auuccaccaaucauguugc

SEQ ID NO: 2367670 - RNA, 19 nt, Artificial Sequence
  Description of Artificial Sequence: Synthetic oligonucleotide
  Sense strand starting at position 2048 of SEQ ID NO: 1885792
auugguggaaucgaguaau

SEQ ID NO: 2367671 - RNA, 19 nt, Artificial Sequence
  Description of Artificial Sequence: Synthetic oligonucleotide
  Antisense strand to SEQ ID NO: 2367670
auuacucgauuccaccaau

SEQ ID NO: 2367672 - RNA, 19 nt, Artificial Sequence
  Description of Artificial Sequence: Synthetic oligonucleotide
  Sense strand starting at position 2051 of SEQ ID NO: 1885792
gguggaaucgaguaauuac

SEQ ID NO: 2367673 - RNA, 19 nt, Artificial Sequence
  Description of Artificial Sequence: Synthetic oligonucleotide
  Antisense strand to SEQ ID NO: 2367672
guaauuacucgauuccacc

SEQ ID NO: 2367674 - RNA, 19 nt, Artificial Sequence
  Description of Artificial Sequence: Synthetic oligonucleotide
  Sense strand starting at position 2054 of SEQ ID NO: 1885792
ggaaucgaguaauuacuga

SEQ ID NO: 2367675 - RNA, 19 nt, Artificial Sequence
  Description of Artificial Sequence: Synthetic oligonucleotide
  Antisense strand to SEQ ID NO: 2367674
ucaguaauuacucgauucc

SEQ ID NO: 2367676 - RNA, 19 nt, Artificial Sequence
  Description of Artificial Sequence: Synthetic oligonucleotide
  Sense strand starting at position 2059 of SEQ ID NO: 1885792
cgaguaauuacugaucagu

SEQ ID NO: 2367677 - RNA, 19 nt, Artificial Sequence
  Description of Artificial Sequence: Synthetic oligonucleotide
  Antisense strand to SEQ ID NO: 2367676
acugaucaguaauuacucg

SEQ ID NO: 2367678 - RNA, 19 nt, Artificial Sequence
  Description of Artificial Sequence: Synthetic oligonucleotide
  Sense strand starting at position 2061 of SEQ ID NO: 1885792
aguaauuacugaucaguau

SEQ ID NO: 2367679 - RNA, 19 nt, Artificial Sequence
  Description of Artificial Sequence: Synthetic oligonucleotide
  Antisense strand to SEQ ID NO: 2367678
auacugaucaguaauuacu

SEQ ID NO: 2367680 - RNA, 19 nt, Artificial Sequence
  Description of Artificial Sequence: Synthetic oligonucleotide
  Sense strand starting at position 2062 of SEQ ID NO: 1885792
guaauuacugaucaguauu

SEQ ID NO: 2367681 - RNA, 19 nt, Artificial Sequence
  Description of Artificial Sequence: Synthetic oligonucleotide
  Antisense strand to SEQ ID NO: 2367680
aauacugaucaguaauuac

SEQ ID NO: 2367682 - RNA, 19 nt, Artificial Sequence
  Description of Artificial Sequence: Synthetic oligonucleotide
  Sense strand starting at position 2070 of SEQ ID NO: 1885792
ugaucaguauuguccaauc

SEQ ID NO: 2367683 - RNA, 19 nt, Artificial Sequence
  Description of Artificial Sequence: Synthetic oligonucleotide
  Antisense strand to SEQ ID NO: 2367682
gauuggacaauacugauca

SEQ ID NO: 2367684 - RNA, 19 nt, Artificial Sequence
  Description of Artificial Sequence: Synthetic oligonucleotide
  Sense strand starting at position 2690 of SEQ ID NO: 1885792
ggguguaguugauuucacu

SEQ ID NO: 2367685 - RNA, 19 nt, Artificial Sequence
  Description of Artificial Sequence: Synthetic oligonucleotide
  Antisense strand to SEQ ID NO: 2367684
agugaaaucaacuacaccc

SEQ ID NO: 2367686 - RNA, 19 nt, Artificial Sequence
  Description of Artificial Sequence: Synthetic oligonucleotide
  Sense strand starting at position 2742 of SEQ ID NO: 1885792
caacuugagcaguagguaa

SEQ ID NO: 2367687 - RNA, 19 nt, Artificial Sequence
  Description of Artificial Sequence: Synthetic oligonucleotide
  Antisense strand to SEQ ID NO: 2367686
uuaccuacugcucaaguug

SEQ ID NO: 2367688 - RNA, 19 nt, Artificial Sequence
  Description of Artificial Sequence: Synthetic oligonucleotide
  Sense strand starting at position 3111 of SEQ ID NO: 1885792
gaccuuagucgggaucuau

SEQ ID NO: 2367689 - RNA, 19 nt, Artificial Sequence
  Description of Artificial Sequence: Synthetic oligonucleotide
  Antisense strand to SEQ ID NO: 2367688
auagaucccgacuaagguc

SEQ ID NO: 2367690 - RNA, 19 nt, Artificial Sequence
  Description of Artificial Sequence: Synthetic oligonucleotide
  Sense strand starting at position 3156 of SEQ ID NO: 1885792
ggcuuuagauacucaagca

SEQ ID NO: 2367691 - RNA, 19 nt, Artificial Sequence
  Description of Artificial Sequence: Synthetic oligonucleotide
  Antisense strand to SEQ ID NO: 2367690
ugcuugaguaucuaaagcc

SEQ ID NO: 2367692 - RNA, 19 nt, Artificial Sequence
  Description of Artificial Sequence: Synthetic oligonucleotide
  Sense strand starting at position 3179 of SEQ ID NO: 1885792
gcugaauuuaugugggcca

SEQ ID NO: 2367693 - RNA, 19 nt, Artificial Sequence
  Description of Artificial Sequence: Synthetic oligonucleotide
  Antisense strand to SEQ ID NO: 2367692
uggcccacauaaauucagc

SEQ ID NO: 2367694 - RNA, 19 nt, Artificial Sequence
  Description of Artificial Sequence: Synthetic oligonucleotide
  Sense strand starting at position 3304 of SEQ ID NO: 1885792
gauggauuaggccgggaga

SEQ ID NO: 2367695 - RNA, 19 nt, Artificial Sequence
  Description of Artificial Sequence: Synthetic oligonucleotide
  Antisense strand to SEQ ID NO: 2367694
ucucccggccuaauccauc

SEQ ID NO: 2367696 - RNA, 19 nt, Artificial Sequence
  Description of Artificial Sequence: Synthetic oligonucleotide
  Sense strand starting at position 3365 of SEQ ID NO: 1885792
gugcauucgccagucuuau

SEQ ID NO: 2367697 - RNA, 19 nt, Artificial Sequence
  Description of Artificial Sequence: Synthetic oligonucleotide
  Antisense strand to SEQ ID NO: 2367696
auaagacuggcgaaugcac

SEQ ID NO: 2367698 - RNA, 19 nt, Artificial Sequence
  Description of Artificial Sequence: Synthetic oligonucleotide
  Sense strand starting at position 3366 of SEQ ID NO: 1885792
ugcauucgccagucuuauc

SEQ ID NO: 2367699 - RNA, 19 nt, Artificial Sequence
  Description of Artificial Sequence: Synthetic oligonucleotide
  Antisense strand to SEQ ID NO: 2367698
gauaagacuggcgaaugca

SEQ ID NO: 2367700 - RNA, 19 nt, Artificial Sequence
  Description of Artificial Sequence: Synthetic oligonucleotide
  Sense strand starting at position 3478 of SEQ ID NO: 1885792
ccuucuagagagugacuua

SEQ ID NO: 2367701 - RNA, 19 nt, Artificial Sequence
  Description of Artificial Sequence: Synthetic oligonucleotide
  Antisense strand to SEQ ID NO: 2367700
uaagucacucucuagaagg

SEQ ID NO: 2367702 - RNA, 19 nt, Artificial Sequence
  Description of Artificial Sequence: Synthetic oligonucleotide
  Sense strand starting at position 3614 of SEQ ID NO: 1885792
cgaaauuacuaaucauagu

SEQ ID NO: 2367703 - RNA, 19 nt, Artificial Sequence
  Description of Artificial Sequence: Synthetic oligonucleotide
  Antisense strand to SEQ ID NO: 2367702
acuaugauuaguaauuucg

SEQ ID NO: 2367704 - RNA, 19 nt, Artificial Sequence
  Description of Artificial Sequence: Synthetic oligonucleotide
  Sense strand starting at position 3628 of SEQ ID NO: 1885792
auagucauugcuuacaaug

SEQ ID NO: 2367705 - RNA, 19 nt, Artificial Sequence
  Description of Artificial Sequence: Synthetic oligonucleotide
  Antisense strand to SEQ ID NO: 2367704
cauuguaagcaaugacuau

SEQ ID NO: 2367706 - RNA, 19 nt, Artificial Sequence
  Description of Artificial Sequence: Synthetic oligonucleotide
  Sense strand starting at position 3652 of SEQ ID NO: 1885792
acaggcugguguuuggaaa

SEQ ID NO: 2367707 - RNA, 19 nt, Artificial Sequence
  Description of Artificial Sequence: Synthetic oligonucleotide
  Antisense strand to SEQ ID NO: 2367706
uuuccaaacaccagccugu

SEQ ID NO: 2367708 - RNA, 19 nt, Artificial Sequence
  Description of Artificial Sequence: Synthetic oligonucleotide
  Sense strand starting at position 3669 of SEQ ID NO: 1885792
aaagcuuuggguugacauc

SEQ ID NO: 2367709 - RNA, 19 nt, Artificial Sequence
  Description of Artificial Sequence: Synthetic oligonucleotide
  Antisense strand to SEQ ID NO: 2367708
gaugucaacccaaagcuuu

SEQ ID NO: 2367710 - RNA, 19 nt, Artificial Sequence
  Description of Artificial Sequence: Synthetic oligonucleotide
  Sense strand starting at position 3746 of SEQ ID NO: 1885792
gagacaauuuggcaaaguu

SEQ ID NO: 2367711 - RNA, 19 nt, Artificial Sequence
  Description of Artificial Sequence: Synthetic oligonucleotide
  Antisense strand to SEQ ID NO: 2367710
aacuuugccaaauugucuc

SEQ ID NO: 2367712 - RNA, 19 nt, Artificial Sequence
  Description of Artificial Sequence: Synthetic oligonucleotide
  Sense strand starting at position 3766 of SEQ ID NO: 1885792
guguuaggaagccaaagua

SEQ ID NO: 2367713 - RNA, 19 nt, Artificial Sequence
  Description of Artificial Sequence: Synthetic oligonucleotide
  Antisense strand to SEQ ID NO: 2367712
uacuuuggcuuccuaacac

SEQ ID NO: 2367714 - RNA, 19 nt, Artificial Sequence
  Description of Artificial Sequence: Synthetic oligonucleotide
  Sense strand starting at position 3820 of SEQ ID NO: 1885792
cagaaagcacccgguaaau

SEQ ID NO: 2367715 - RNA, 19 nt, Artificial Sequence
  Description of Artificial Sequence: Synthetic oligonucleotide
  Antisense strand to SEQ ID NO: 2367714
auuuaccgggugcuuucug

SEQ ID NO: 2367716 - RNA, 19 nt, Artificial Sequence
  Description of Artificial Sequence: Synthetic oligonucleotide
  Sense strand starting at position 3852 of SEQ ID NO: 1885792
guauuagcacuugaugguu

SEQ ID NO: 2367717 - RNA, 19 nt, Artificial Sequence
  Description of Artificial Sequence: Synthetic oligonucleotide
  Antisense strand to SEQ ID NO: 2367716
aaccaucaagugcuaauac

SEQ ID NO: 2367718 - RNA, 19 nt, Artificial Sequence
  Description of Artificial Sequence: Synthetic oligonucleotide
  Sense strand starting at position 3932 of SEQ ID NO: 1885792
ccauuugcuguaggugaua

SEQ ID NO: 2367719 - RNA, 19 nt, Artificial Sequence
  Description of Artificial Sequence: Synthetic oligonucleotide
  Antisense strand to SEQ ID NO: 2367718
uaucaccuacagcaaaugg

SEQ ID NO: 2367720 - RNA, 19 nt, Artificial Sequence
  Description of Artificial Sequence: Synthetic oligonucleotide
  Sense strand starting at position 3934 of SEQ ID NO: 1885792
auuugcuguaggugauagu

SEQ ID NO: 2367721 - RNA, 19 nt, Artificial Sequence
  Description of Artificial Sequence: Synthetic oligonucleotide
  Antisense strand to SEQ ID NO: 2367720
acuaucaccuacagcaaau

SEQ ID NO: 2367722 - RNA, 19 nt, Artificial Sequence
  Description of Artificial Sequence: Synthetic oligonucleotide
  Sense strand starting at position 3975 of SEQ ID NO: 1885792
gcauguugaguugaggagu

SEQ ID NO: 2367723 - RNA, 19 nt, Artificial Sequence
  Description of Artificial Sequence: Synthetic oligonucleotide
  Antisense strand to SEQ ID NO: 2367722
acuccucaacucaacaugc

SEQ ID NO: 2367724 - RNA, 19 nt, Artificial Sequence
  Description of Artificial Sequence: Synthetic oligonucleotide
  Sense strand starting at position 2 of SEQ ID NO: 1885793
ugggcagacuucucuuauu

SEQ ID NO: 2367725 - RNA, 19 nt, Artificial Sequence
  Description of Artificial Sequence: Synthetic oligonucleotide
  Antisense strand to SEQ ID NO: 2367724
aauaagagaagucugccca

SEQ ID NO: 2367726 - RNA, 19 nt, Artificial Sequence
  Description of Artificial Sequence: Synthetic oligonucleotide
  Sense strand starting at position 321 of SEQ ID NO: 1885793
uccuauguaggcuaacaau

SEQ ID NO: 2367727 - RNA, 19 nt, Artificial Sequence
  Description of Artificial Sequence: Synthetic oligonucleotide
  Antisense strand to SEQ ID NO: 2367726
auuguuagccuacauagga

SEQ ID NO: 2367728 - RNA, 19 nt, Artificial Sequence
  Description of Artificial Sequence: Synthetic oligonucleotide
  Sense strand starting at position 327 of SEQ ID NO: 1885793
guaggcuaacaaugucaau

SEQ ID NO: 2367729 - RNA, 19 nt, Artificial Sequence
  Description of Artificial Sequence: Synthetic oligonucleotide
  Antisense strand to SEQ ID NO: 2367728
auugacauuguuagccuac

SEQ ID NO: 2367730 - RNA, 19 nt, Artificial Sequence
  Description of Artificial Sequence: Synthetic oligonucleotide
  Sense strand starting at position 690 of SEQ ID NO: 1885793
ugucaucauugguccagga

SEQ ID NO: 2367731 - RNA, 19 nt, Artificial Sequence
  Description of Artificial Sequence: Synthetic oligonucleotide
  Antisense strand to SEQ ID NO: 2367730
uccuggaccaaugaugaca

SEQ ID NO: 2367732 - RNA, 19 nt, Artificial Sequence
  Description of Artificial Sequence: Synthetic oligonucleotide
  Sense strand starting at position 1041 of SEQ ID NO: 1885793
uugagacauucuuugcauc

SEQ ID NO: 2367733 - RNA, 19 nt, Artificial Sequence
  Description of Artificial Sequence: Synthetic oligonucleotide
  Antisense strand to SEQ ID NO: 2367732
gaugcaaagaaugucucaa

SEQ ID NO: 2367734 - RNA, 19 nt, Artificial Sequence
  Description of Artificial Sequence: Synthetic oligonucleotide
  Sense strand starting at position 1042 of SEQ ID NO: 1885793
ugagacauucuuugcauca

SEQ ID NO: 2367735 - RNA, 19 nt, Artificial Sequence
  Description of Artificial Sequence: Synthetic oligonucleotide
  Antisense strand to SEQ ID NO: 2367734
ugaugcaaagaaugucuca

SEQ ID NO: 2367736 - RNA, 19 nt, Artificial Sequence
  Description of Artificial Sequence: Synthetic oligonucleotide
  Sense strand starting at position 1452 of SEQ ID NO: 1885793
accagaucccauuguauug

SEQ ID NO: 2367737 - RNA, 19 nt, Artificial Sequence
  Description of Artificial Sequence: Synthetic oligonucleotide
  Antisense strand to SEQ ID NO: 2367736
caauacaaugggaucuggu

SEQ ID NO: 2367738 - RNA, 19 nt, Artificial Sequence
  Description of Artificial Sequence: Synthetic oligonucleotide
  Sense strand starting at position 1464 of SEQ ID NO: 1885793
uguauuggaccucagaguu

SEQ ID NO: 2367739 - RNA, 19 nt, Artificial Sequence
  Description of Artificial Sequence: Synthetic oligonucleotide
  Antisense strand to SEQ ID NO: 2367738
aacucugagguccaauaca

SEQ ID NO: 2367740 - RNA, 19 nt, Artificial Sequence
  Description of Artificial Sequence: Synthetic oligonucleotide
  Sense strand starting at position 1697 of SEQ ID NO: 1885793
auuaacugagcucaauguu

SEQ ID NO: 2367741 - RNA, 19 nt, Artificial Sequence
  Description of Artificial Sequence: Synthetic oligonucleotide
  Antisense strand to SEQ ID NO: 2367740
aacauugagcucaguuaau

SEQ ID NO: 2367742 - RNA, 19 nt, Artificial Sequence
  Description of Artificial Sequence: Synthetic oligonucleotide
  Sense strand starting at position 2079 of SEQ ID NO: 1885793
ugaacacuuugugcaacuu

SEQ ID NO: 2367743 - RNA, 19 nt, Artificial Sequence
  Description of Artificial Sequence: Synthetic oligonucleotide
  Antisense strand to SEQ ID NO: 2367742
aaguugcacaaaguguuca

SEQ ID NO: 2367744 - RNA, 19 nt, Artificial Sequence
  Description of Artificial Sequence: Synthetic oligonucleotide
  Sense strand starting at position 2105 of SEQ ID NO: 1885793
cccagagguugaccauuau

SEQ ID NO: 2367745 - RNA, 19 nt, Artificial Sequence
  Description of Artificial Sequence: Synthetic oligonucleotide
  Antisense strand to SEQ ID NO: 2367744
auaauggucaaccucuggg

SEQ ID NO: 2367746 - RNA, 19 nt, Artificial Sequence
  Description of Artificial Sequence: Synthetic oligonucleotide
  Sense strand starting at position 2111 of SEQ ID NO: 1885793
gguugaccauuaucuauaa

SEQ ID NO: 2367747 - RNA, 19 nt, Artificial Sequence
  Description of Artificial Sequence: Synthetic oligonucleotide
  Antisense strand to SEQ ID NO: 2367746
uuauagauaauggucaacc

SEQ ID NO: 2367748 - RNA, 19 nt, Artificial Sequence
  Description of Artificial Sequence: Synthetic oligonucleotide
  Sense strand starting at position 2136 of SEQ ID NO: 1885793
ccuguaucauccuuaguca

SEQ ID NO: 2367749 - RNA, 19 nt, Artificial Sequence
  Description of Artificial Sequence: Synthetic oligonucleotide
  Antisense strand to SEQ ID NO: 2367748
ugacuaaggaugauacagg

SEQ ID NO: 2367750 - RNA, 19 nt, Artificial Sequence
  Description of Artificial Sequence: Synthetic oligonucleotide
  Sense strand starting at position 2137 of SEQ ID NO: 1885793
cuguaucauccuuagucaa

SEQ ID NO: 2367751 - RNA, 19 nt, Artificial Sequence
  Description of Artificial Sequence: Synthetic oligonucleotide
  Antisense strand to SEQ ID NO: 2367750
uugacuaaggaugauacag

SEQ ID NO: 2367752 - RNA, 19 nt, Artificial Sequence
  Description of Artificial Sequence: Synthetic oligonucleotide
  Sense strand starting at position 2139 of SEQ ID NO: 1885793
guaucauccuuagucaaag

SEQ ID NO: 2367753 - RNA, 19 nt, Artificial Sequence
  Description of Artificial Sequence: Synthetic oligonucleotide
  Antisense strand to SEQ ID NO: 2367752
cuuugacuaaggaugauac

SEQ ID NO: 2367754 - RNA, 19 nt, Artificial Sequence
  Description of Artificial Sequence: Synthetic oligonucleotide
  Sense strand starting at position 2389 of SEQ ID NO: 1885793
guacauguauacguauaaa

SEQ ID NO: 2367755 - RNA, 19 nt, Artificial Sequence
  Description of Artificial Sequence: Synthetic oligonucleotide
  Antisense strand to SEQ ID NO: 2367754
uuuauacguauacauguac

SEQ ID NO: 2367756 - RNA, 19 nt, Artificial Sequence
  Description of Artificial Sequence: Synthetic oligonucleotide
  Sense strand starting at position 2427 of SEQ ID NO: 1885793
auaauaauacagugaagug

SEQ ID NO: 2367757 - RNA, 19 nt, Artificial Sequence
  Description of Artificial Sequence: Synthetic oligonucleotide
  Antisense strand to SEQ ID NO: 2367756
cacuucacuguauuauuau

SEQ ID NO: 2367758 - RNA, 19 nt, Artificial Sequence
  Description of Artificial Sequence: Synthetic oligonucleotide
  Sense strand starting at position 2491 of SEQ ID NO: 1885793
ucaccugaaucagaaggaa

SEQ ID NO: 2367759 - RNA, 19 nt, Artificial Sequence
  Description of Artificial Sequence: Synthetic oligonucleotide
  Antisense strand to SEQ ID NO: 2367758
uuccuucugauucagguga

SEQ ID NO: 2367760 - RNA, 19 nt, Artificial Sequence
  Description of Artificial Sequence: Synthetic oligonucleotide
  Sense strand starting at position 2621 of SEQ ID NO: 1885793
uucuaccuugucuauugau

SEQ ID NO: 2367761 - RNA, 19 nt, Artificial Sequence
  Description of Artificial Sequence: Synthetic oligonucleotide
  Antisense strand to SEQ ID NO: 2367760
aucaauagacaagguagaa

SEQ ID NO: 2367762 - RNA, 19 nt, Artificial Sequence
  Description of Artificial Sequence: Synthetic oligonucleotide
  Sense strand starting at position 2628 of SEQ ID NO: 1885793
uugucuauugauuauguca

SEQ ID NO: 2367763 - RNA, 19 nt, Artificial Sequence
  Description of Artificial Sequence: Synthetic oligonucleotide
  Antisense strand to SEQ ID NO: 2367762
ugacauaaucaauagacaa

SEQ ID NO: 2367764 - RNA, 19 nt, Artificial Sequence
  Description of Artificial Sequence: Synthetic oligonucleotide
  Sense strand starting at position 2701 of SEQ ID NO: 1885793
cuugauauucccuaucagu

SEQ ID NO: 2367765 - RNA, 19 nt, Artificial Sequence
  Description of Artificial Sequence: Synthetic oligonucleotide
  Antisense strand to SEQ ID NO: 2367764
acugauagggaauaucaag

SEQ ID NO: 2367766 - RNA, 19 nt, Artificial Sequence
  Description of Artificial Sequence: Synthetic oligonucleotide
  Sense strand starting at position 2827 of SEQ ID NO: 1885793
gccaucuuugacuguauuu

SEQ ID NO: 2367767 - RNA, 19 nt, Artificial Sequence
  Description of Artificial Sequence: Synthetic oligonucleotide
  Antisense strand to SEQ ID NO: 2367766
aaauacagucaaagauggc

SEQ ID NO: 2367768 - RNA, 19 nt, Artificial Sequence
  Description of Artificial Sequence: Synthetic oligonucleotide
  Sense strand starting at position 2860 of SEQ ID NO: 1885793
auacguugauuacucuuaa

SEQ ID NO: 2367769 - RNA, 19 nt, Artificial Sequence
  Description of Artificial Sequence: Synthetic oligonucleotide
  Antisense strand to SEQ ID NO: 2367768
uuaagaguaaucaacguau

SEQ ID NO: 2367770 - RNA, 19 nt, Artificial Sequence
  Description of Artificial Sequence: Synthetic oligonucleotide
  Sense strand starting at position 2896 of SEQ ID NO: 1885793
agguaaggacuuugacuau

SEQ ID NO: 2367771 - RNA, 19 nt, Artificial Sequence
  Description of Artificial Sequence: Synthetic oligonucleotide
  Antisense strand to SEQ ID NO: 2367770
auagucaaaguccuuaccu

SEQ ID NO: 2367772 - RNA, 19 nt, Artificial Sequence
  Description of Artificial Sequence: Synthetic oligonucleotide
  Sense strand starting at position 2962 of SEQ ID NO: 1885793
guaugugaccuuggaggca

SEQ ID NO: 2367773 - RNA, 19 nt, Artificial Sequence
  Description of Artificial Sequence: Synthetic oligonucleotide
  Antisense strand to SEQ ID NO: 2367772
ugccuccaaggucacauac

SEQ ID NO: 2367774 - RNA, 19 nt, Artificial Sequence
  Description of Artificial Sequence: Synthetic oligonucleotide
  Sense strand starting at position 3004 of SEQ ID NO: 1885793
ccauucugaugaguacaga

SEQ ID NO: 2367775 - RNA, 19 nt, Artificial Sequence
  Description of Artificial Sequence: Synthetic oligonucleotide
  Antisense strand to SEQ ID NO: 2367774
ucuguacucaucagaaugg

SEQ ID NO: 2367776 - RNA, 19 nt, Artificial Sequence
  Description of Artificial Sequence: Synthetic oligonucleotide
  Sense strand starting at position 3097 of SEQ ID NO: 1885793
gcaaucguuauuuggacuu

SEQ ID NO: 2367777 - RNA, 19 nt, Artificial Sequence
  Description of Artificial Sequence: Synthetic oligonucleotide
  Antisense strand to SEQ ID NO: 2367776
aaguccaaauaacgauugc

SEQ ID NO: 2367778 - RNA, 19 nt, Artificial Sequence
  Description of Artificial Sequence: Synthetic oligonucleotide
  Sense strand starting at position 3247 of SEQ ID NO: 1885793
gcuauaucaucauuggcca

SEQ ID NO: 2367779 - RNA, 19 nt, Artificial Sequence
  Description of Artificial Sequence: Synthetic oligonucleotide
  Antisense strand to SEQ ID NO: 2367778
uggccaaugaugauauagc

SEQ ID NO: 2367780 - RNA, 19 nt, Artificial Sequence
  Description of Artificial Sequence: Synthetic oligonucleotide
  Sense strand starting at position 3329 of SEQ ID NO: 1885793
uguuucuugccucacuaca

SEQ ID NO: 2367781 - RNA, 19 nt, Artificial Sequence
  Description of Artificial Sequence: Synthetic oligonucleotide
  Antisense strand to SEQ ID NO: 2367780
uguagugaggcaagaaaca

SEQ ID NO: 2367782 - RNA, 19 nt, Artificial Sequence
  Description of Artificial Sequence: Synthetic oligonucleotide
  Sense strand starting at position 3351 of SEQ ID NO: 1885793
uuuaauaauugggcaauga

SEQ ID NO: 2367783 - RNA, 19 nt, Artificial Sequence
  Description of Artificial Sequence: Synthetic oligonucleotide
  Antisense strand to SEQ ID NO: 2367782
ucauugcccaauuauuaaa

SEQ ID NO: 2367784 - RNA, 19 nt, Artificial Sequence
  Description of Artificial Sequence: Synthetic oligonucleotide
  Sense strand starting at position 3355 of SEQ ID NO: 1885793
auaauugggcaaugauuaa

SEQ ID NO: 2367785 - RNA, 19 nt, Artificial Sequence
  Description of Artificial Sequence: Synthetic oligonucleotide
  Antisense strand to SEQ ID NO: 2367784
uuaaucauugcccaauuau

SEQ ID NO: 2367786 - RNA, 19 nt, Artificial Sequence
  Description of Artificial Sequence: Synthetic oligonucleotide
  Sense strand starting at position 3410 of SEQ ID NO: 1885793
auauauagguucucacauu

SEQ ID NO: 2367787 - RNA, 19 nt, Artificial Sequence
  Description of Artificial Sequence: Synthetic oligonucleotide
  Antisense strand to SEQ ID NO: 2367786
aaugugagaaccuauauau

SEQ ID NO: 2367788 - RNA, 19 nt, Artificial Sequence
  Description of Artificial Sequence: Synthetic oligonucleotide
  Sense strand starting at position 3416 of SEQ ID NO: 1885793
agguucucacauugagcaa

SEQ ID NO: 2367789 - RNA, 19 nt, Artificial Sequence
  Description of Artificial Sequence: Synthetic oligonucleotide
  Antisense strand to SEQ ID NO: 2367788
uugcucaaugugagaaccu

SEQ ID NO: 2367790 - RNA, 19 nt, Artificial Sequence
  Description of Artificial Sequence: Synthetic oligonucleotide
  Sense strand starting at position 3685 of SEQ ID NO: 1885793
acuaauaagucucuauggu

SEQ ID NO: 2367791 - RNA, 19 nt, Artificial Sequence
  Description of Artificial Sequence: Synthetic oligonucleotide
  Antisense strand to SEQ ID NO: 2367790
accauagagacuuauuagu

SEQ ID NO: 2367792 - RNA, 19 nt, Artificial Sequence
  Description of Artificial Sequence: Synthetic oligonucleotide
  Sense strand starting at position 3686 of SEQ ID NO: 1885793
cuaauaagucucuaugguu

SEQ ID NO: 2367793 - RNA, 19 nt, Artificial Sequence
  Description of Artificial Sequence: Synthetic oligonucleotide
  Antisense strand to SEQ ID NO: 2367792
aaccauagagacuuauuag

SEQ ID NO: 2367794 - RNA, 19 nt, Artificial Sequence
  Description of Artificial Sequence: Synthetic oligonucleotide
  Sense strand starting at position 3727 of SEQ ID NO: 1885793
cuggauguuccauaucugu

SEQ ID NO: 2367795 - RNA, 19 nt, Artificial Sequence
  Description of Artificial Sequence: Synthetic oligonucleotide
  Antisense strand to SEQ ID NO: 2367794
acagauauggaacauccag

SEQ ID NO: 2367796 - RNA, 19 nt, Artificial Sequence
  Description of Artificial Sequence: Synthetic oligonucleotide
  Sense strand starting at position 3733 of SEQ ID NO: 1885793
guuccauaucuguaucuag

SEQ ID NO: 2367797 - RNA, 19 nt, Artificial Sequence
  Description of Artificial Sequence: Synthetic oligonucleotide
  Antisense strand to SEQ ID NO: 2367796
cuagauacagauauggaac

SEQ ID NO: 2367798 - RNA, 19 nt, Artificial Sequence
  Description of Artificial Sequence: Synthetic oligonucleotide
  Sense strand starting at position 3800 of SEQ ID NO: 1885793
ucaucuaugcauuaucagu

SEQ ID NO: 2367799 - RNA, 19 nt, Artificial Sequence
  Description of Artificial Sequence: Synthetic oligonucleotide
  Antisense strand to SEQ ID NO: 2367798
acugauaaugcauagauga

SEQ ID NO: 2367800 - RNA, 19 nt, Artificial Sequence
  Description of Artificial Sequence: Synthetic oligonucleotide
  Sense strand starting at position 3802 of SEQ ID NO: 1885793
aucuaugcauuaucaguau

SEQ ID NO: 2367801 - RNA, 19 nt, Artificial Sequence
  Description of Artificial Sequence: Synthetic oligonucleotide
  Antisense strand to SEQ ID NO: 2367800
auacugauaaugcauagau

SEQ ID NO: 2367802 - RNA, 19 nt, Artificial Sequence
  Description of Artificial Sequence: Synthetic oligonucleotide
  Sense strand starting at position 3838 of SEQ ID NO: 1885793
ucauaucuaucauugggau

SEQ ID NO: 2367803 - RNA, 19 nt, Artificial Sequence
  Description of Artificial Sequence: Synthetic oligonucleotide
  Antisense strand to SEQ ID NO: 2367802
aucccaaugauagauauga

SEQ ID NO: 2367804 - RNA, 19 nt, Artificial Sequence
  Description of Artificial Sequence: Synthetic oligonucleotide
  Sense strand starting at position 231 of SEQ ID NO: 1885794
cggccuggaucuuucuuaa

SEQ ID NO: 2367805 - RNA, 19 nt, Artificial Sequence
  Description of Artificial Sequence: Synthetic oligonucleotide
  Antisense strand to SEQ ID NO: 2367804
uuaagaaagauccaggccg

SEQ ID NO: 2367806 - RNA, 19 nt, Artificial Sequence
  Description of Artificial Sequence: Synthetic oligonucleotide
  Sense strand starting at position 258 of SEQ ID NO: 1885794
gcaaucaaguguccuaagu

SEQ ID NO: 2367807 - RNA, 19 nt, Artificial Sequence
  Description of Artificial Sequence: Synthetic oligonucleotide
  Antisense strand to SEQ ID NO: 2367806
acuuaggacacuugauugc

SEQ ID NO: 2367808 - RNA, 19 nt, Artificial Sequence
  Description of Artificial Sequence: Synthetic oligonucleotide
  Sense strand starting at position 331 of SEQ ID NO: 1885794
uggaauuugcuguguugag

SEQ ID NO: 2367809 - RNA, 19 nt, Artificial Sequence
  Description of Artificial Sequence: Synthetic oligonucleotide
  Antisense strand to SEQ ID NO: 2367808
cucaacacagcaaauucca

SEQ ID NO: 2367810 - RNA, 19 nt, Artificial Sequence
  Description of Artificial Sequence: Synthetic oligonucleotide
  Sense strand starting at position 458 of SEQ ID NO: 1885794
gcucaaugaggcuggaaau

SEQ ID NO: 2367811 - RNA, 19 nt, Artificial Sequence
  Description of Artificial Sequence: Synthetic oligonucleotide
  Antisense strand to SEQ ID NO: 2367810
auuuccagccucauugagc

SEQ ID NO: 2367812 - RNA, 19 nt, Artificial Sequence
  Description of Artificial Sequence: Synthetic oligonucleotide
  Sense strand starting at position 459 of SEQ ID NO: 1885794
cucaaugaggcuggaaauu

SEQ ID NO: 2367813 - RNA, 19 nt, Artificial Sequence
  Description of Artificial Sequence: Synthetic oligonucleotide
  Antisense strand to SEQ ID NO: 2367812
aauuuccagccucauugag

SEQ ID NO: 2367814 - RNA, 19 nt, Artificial Sequence
  Description of Artificial Sequence: Synthetic oligonucleotide
  Sense strand starting at position 475 of SEQ ID NO: 1885794
auugguaggacuuguuaaa

SEQ ID NO: 2367815 - RNA, 19 nt, Artificial Sequence
  Description of Artificial Sequence: Synthetic oligonucleotide
  Antisense strand to SEQ ID NO: 2367814
uuuaacaaguccuaccaau

SEQ ID NO: 2367816 - RNA, 19 nt, Artificial Sequence
  Description of Artificial Sequence: Synthetic oligonucleotide
  Sense strand starting at position 544 of SEQ ID NO: 1885794
uucaguaagcucggugaga

SEQ ID NO: 2367817 - RNA, 19 nt, Artificial Sequence
  Description of Artificial Sequence: Synthetic oligonucleotide
  Antisense strand to SEQ ID NO: 2367816
ucucaccgagcuuacugaa

SEQ ID NO: 2367818 - RNA, 19 nt, Artificial Sequence
  Description of Artificial Sequence: Synthetic oligonucleotide
  Sense strand starting at position 545 of SEQ ID NO: 1885794
ucaguaagcucggugagaa

SEQ ID NO: 2367819 - RNA, 19 nt, Artificial Sequence
  Description of Artificial Sequence: Synthetic oligonucleotide
  Antisense strand to SEQ ID NO: 2367818
uucucaccgagcuuacuga

SEQ ID NO: 2367820 - RNA, 19 nt, Artificial Sequence
  Description of Artificial Sequence: Synthetic oligonucleotide
  Sense strand starting at position 546 of SEQ ID NO: 1885794
caguaagcucggugagaaa

SEQ ID NO: 2367821 - RNA, 19 nt, Artificial Sequence
  Description of Artificial Sequence: Synthetic oligonucleotide
  Antisense strand to SEQ ID NO: 2367820
uuucucaccgagcuuacug

SEQ ID NO: 2367822 - RNA, 19 nt, Artificial Sequence
  Description of Artificial Sequence: Synthetic oligonucleotide
  Sense strand starting at position 621 of SEQ ID NO: 1885794
ccaugaguuucucuuucug

SEQ ID NO: 2367823 - RNA, 19 nt, Artificial Sequence
  Description of Artificial Sequence: Synthetic oligonucleotide
  Antisense strand to SEQ ID NO: 2367822
cagaaagagaaacucaugg

SEQ ID NO: 2367824 - RNA, 19 nt, Artificial Sequence
  Description of Artificial Sequence: Synthetic oligonucleotide
  Sense strand starting at position 1289 of SEQ ID NO: 1885794
gcuguagugagccauacuu

SEQ ID NO: 2367825 - RNA, 19 nt, Artificial Sequence
  Description of Artificial Sequence: Synthetic oligonucleotide
  Antisense strand to SEQ ID NO: 2367824
aaguauggcucacuacagc

SEQ ID NO: 2367826 - RNA, 19 nt, Artificial Sequence
  Description of Artificial Sequence: Synthetic oligonucleotide
  Sense strand starting at position 1291 of SEQ ID NO: 1885794
uguagugagccauacuugu

SEQ ID NO: 2367827 - RNA, 19 nt, Artificial Sequence
  Description of Artificial Sequence: Synthetic oligonucleotide
  Antisense strand to SEQ ID NO: 2367826
acaaguauggcucacuaca

SEQ ID NO: 2367828 - RNA, 19 nt, Artificial Sequence
  Description of Artificial Sequence: Synthetic oligonucleotide
  Sense strand starting at position 1374 of SEQ ID NO: 1885794
gaguaucaucaaggccuga

SEQ ID NO: 2367829 - RNA, 19 nt, Artificial Sequence
  Description of Artificial Sequence: Synthetic oligonucleotide
  Antisense strand to SEQ ID NO: 2367828
ucaggccuugaugauacuc

SEQ ID NO: 2367830 - RNA, 19 nt, Artificial Sequence
  Description of Artificial Sequence: Synthetic oligonucleotide
  Sense strand starting at position 1385 of SEQ ID NO: 1885794
aggccugacugagaagaau

SEQ ID NO: 2367831 - RNA, 19 nt, Artificial Sequence
  Description of Artificial Sequence: Synthetic oligonucleotide
  Antisense strand to SEQ ID NO: 2367830
auucuucucagucaggccu

SEQ ID NO: 2367832 - RNA, 19 nt, Artificial Sequence
  Description of Artificial Sequence: Synthetic oligonucleotide
  Sense strand starting at position 1452 of SEQ ID NO: 1885794
gguguugcauuucuggaau

SEQ ID NO: 2367833 - RNA, 19 nt, Artificial Sequence
  Description of Artificial Sequence: Synthetic oligonucleotide
  Antisense strand to SEQ ID NO: 2367832
auuccagaaaugcaacacc

SEQ ID NO: 2367834 - RNA, 19 nt, Artificial Sequence
  Description of Artificial Sequence: Synthetic oligonucleotide
  Sense strand starting at position 1466 of SEQ ID NO: 1885794
ggaauuguuuauguggaaa

SEQ ID NO: 2367835 - RNA, 19 nt, Artificial Sequence
  Description of Artificial Sequence: Synthetic oligonucleotide
  Antisense strand to SEQ ID NO: 2367834
uuuccacauaaacaauucc

SEQ ID NO: 2367836 - RNA, 19 nt, Artificial Sequence
  Description of Artificial Sequence: Synthetic oligonucleotide
  Sense strand starting at position 1633 of SEQ ID NO: 1885794
cgggucuuuguagaugcaa

SEQ ID NO: 2367837 - RNA, 19 nt, Artificial Sequence
  Description of Artificial Sequence: Synthetic oligonucleotide
  Antisense strand to SEQ ID NO: 2367836
uugcaucuacaaagacccg

SEQ ID NO: 2367838 - RNA, 19 nt, Artificial Sequence
  Description of Artificial Sequence: Synthetic oligonucleotide
  Sense strand starting at position 1641 of SEQ ID NO: 1885794
uguagaugcaauuaaguga

SEQ ID NO: 2367839 - RNA, 19 nt, Artificial Sequence
  Description of Artificial Sequence: Synthetic oligonucleotide
  Antisense strand to SEQ ID NO: 2367838
ucacuuaauugcaucuaca

SEQ ID NO: 2367840 - RNA, 19 nt, Artificial Sequence
  Description of Artificial Sequence: Synthetic oligonucleotide
  Sense strand starting at position 1669 of SEQ ID NO: 1885794
agaugagauuauuauggau

SEQ ID NO: 2367841 - RNA, 19 nt, Artificial Sequence
  Description of Artificial Sequence: Synthetic oligonucleotide
  Antisense strand to SEQ ID NO: 2367840
auccauaauaaucucaucu

SEQ ID NO: 2367842 - RNA, 19 nt, Artificial Sequence
  Description of Artificial Sequence: Synthetic oligonucleotide
  Sense strand starting at position 2157 of SEQ ID NO: 1885794
gaucauucccuagaggcau

SEQ ID NO: 2367843 - RNA, 19 nt, Artificial Sequence
  Description of Artificial Sequence: Synthetic oligonucleotide
  Antisense strand to SEQ ID NO: 2367842
augccucuagggaaugauc

SEQ ID NO: 2367844 - RNA, 19 nt, Artificial Sequence
  Description of Artificial Sequence: Synthetic oligonucleotide
  Sense strand starting at position 2265 of SEQ ID NO: 1885794
caaguaaguugggauuugu

SEQ ID NO: 2367845 - RNA, 19 nt, Artificial Sequence
  Description of Artificial Sequence: Synthetic oligonucleotide
  Antisense strand to SEQ ID NO: 2367844
acaaaucccaacuuacuug

SEQ ID NO: 2367846 - RNA, 19 nt, Artificial Sequence
  Description of Artificial Sequence: Synthetic oligonucleotide
  Sense strand starting at position 2302 of SEQ ID NO: 1885794
ccauuacgugcccagcaaa

SEQ ID NO: 2367847 - RNA, 19 nt, Artificial Sequence
  Description of Artificial Sequence: Synthetic oligonucleotide
  Antisense strand to SEQ ID NO: 2367846
uuugcugggcacguaaugg

SEQ ID NO: 2367848 - RNA, 19 nt, Artificial Sequence
  Description of Artificial Sequence: Synthetic oligonucleotide
  Sense strand starting at position 2369 of SEQ ID NO: 1885794
agaccuaggugacaaucaa

SEQ ID NO: 2367849 - RNA, 19 nt, Artificial Sequence
  Description of Artificial Sequence: Synthetic oligonucleotide
  Antisense strand to SEQ ID NO: 2367848
uugauugucaccuaggucu

SEQ ID NO: 2367850 - RNA, 19 nt, Artificial Sequence
  Description of Artificial Sequence: Synthetic oligonucleotide
  Sense strand starting at position 2409 of SEQ ID NO: 1885794
caaugcuuggguugaggau

SEQ ID NO: 2367851 - RNA, 19 nt, Artificial Sequence
  Description of Artificial Sequence: Synthetic oligonucleotide
  Antisense strand to SEQ ID NO: 2367850
auccucaacccaagcauug

SEQ ID NO: 2367852 - RNA, 19 nt, Artificial Sequence
  Description of Artificial Sequence: Synthetic oligonucleotide
  Sense strand starting at position 2455 of SEQ ID NO: 1885794
gaguuauccuuugaauuug

SEQ ID NO: 2367853 - RNA, 19 nt, Artificial Sequence
  Description of Artificial Sequence: Synthetic oligonucleotide
  Antisense strand to SEQ ID NO: 2367852
caaauucaaaggauaacuc

SEQ ID NO: 2367854 - RNA, 19 nt, Artificial Sequence
  Description of Artificial Sequence: Synthetic oligonucleotide
  Sense strand starting at position 2771 of SEQ ID NO: 1885794
uguauagcugucgggaaag

SEQ ID NO: 2367855 - RNA, 19 nt, Artificial Sequence
  Description of Artificial Sequence: Synthetic oligonucleotide
  Antisense strand to SEQ ID NO: 2367854
cuuucccgacagcuauaca

SEQ ID NO: 2367856 - RNA, 19 nt, Artificial Sequence
  Description of Artificial Sequence: Synthetic oligonucleotide
  Sense strand starting at position 2773 of SEQ ID NO: 1885794
uauagcugucgggaaagaa

SEQ ID NO: 2367857 - RNA, 19 nt, Artificial Sequence
  Description of Artificial Sequence: Synthetic oligonucleotide
  Antisense strand to SEQ ID NO: 2367856
uucuuucccgacagcuaua

SEQ ID NO: 2367858 - RNA, 19 nt, Artificial Sequence
  Description of Artificial Sequence: Synthetic oligonucleotide
  Sense strand starting at position 2872 of SEQ ID NO: 1885794
agagcuggcucgagaagga

SEQ ID NO: 2367859 - RNA, 19 nt, Artificial Sequence
  Description of Artificial Sequence: Synthetic oligonucleotide
  Antisense strand to SEQ ID NO: 2367858
uccuucucgagccagcucu

SEQ ID NO: 2367860 - RNA, 19 nt, Artificial Sequence
  Description of Artificial Sequence: Synthetic oligonucleotide
  Sense strand starting at position 2982 of SEQ ID NO: 1885794
acaguucuaucucuggaca

SEQ ID NO: 2367861 - RNA, 19 nt, Artificial Sequence
  Description of Artificial Sequence: Synthetic oligonucleotide
  Antisense strand to SEQ ID NO: 2367860
uguccagagauagaacugu

SEQ ID NO: 2367862 - RNA, 19 nt, Artificial Sequence
  Description of Artificial Sequence: Synthetic oligonucleotide
  Sense strand starting at position 2985 of SEQ ID NO: 1885794
guucuaucucuggacaaac

SEQ ID NO: 2367863 - RNA, 19 nt, Artificial Sequence
  Description of Artificial Sequence: Synthetic oligonucleotide
  Antisense strand to SEQ ID NO: 2367862
guuuguccagagauagaac

SEQ ID NO: 2367864 - RNA, 19 nt, Artificial Sequence
  Description of Artificial Sequence: Synthetic oligonucleotide
  Sense strand starting at position 3019 of SEQ ID NO: 1885794
cagaucuaucucugggcuu

SEQ ID NO: 2367865 - RNA, 19 nt, Artificial Sequence
  Description of Artificial Sequence: Synthetic oligonucleotide
  Antisense strand to SEQ ID NO: 2367864
aagcccagagauagaucug

SEQ ID NO: 2367866 - RNA, 19 nt, Artificial Sequence
  Description of Artificial Sequence: Synthetic oligonucleotide
  Sense strand starting at position 3117 of SEQ ID NO: 1885794
caaguacguguuugaaaug

SEQ ID NO: 2367867 - RNA, 19 nt, Artificial Sequence
  Description of Artificial Sequence: Synthetic oligonucleotide
  Antisense strand to SEQ ID NO: 2367866
cauuucaaacacguacuug

SEQ ID NO: 2367868 - RNA, 19 nt, Artificial Sequence
  Description of Artificial Sequence: Synthetic oligonucleotide
  Sense strand starting at position 3149 of SEQ ID NO: 1885794
gccguaaagaaauaguacu

SEQ ID NO: 2367869 - RNA, 19 nt, Artificial Sequence
  Description of Artificial Sequence: Synthetic oligonucleotide
  Antisense strand to SEQ ID NO: 2367868
aguacuauuucuuuacggc

SEQ ID NO: 2367870 - RNA, 19 nt, Artificial Sequence
  Description of Artificial Sequence: Synthetic oligonucleotide
  Sense strand starting at position 3345 of SEQ ID NO: 1885794
uccuguauuugucccaauu

SEQ ID NO: 2367871 - RNA, 19 nt, Artificial Sequence
  Description of Artificial Sequence: Synthetic oligonucleotide
  Antisense strand to SEQ ID NO: 2367870
aauugggacaaauacagga

SEQ ID NO: 2367872 - RNA, 19 nt, Artificial Sequence
  Description of Artificial Sequence: Synthetic oligonucleotide
  Sense strand starting at position 3781 of SEQ ID NO: 1885794
gcugauuuguuucugauua

SEQ ID NO: 2367873 - RNA, 19 nt, Artificial Sequence
  Description of Artificial Sequence: Synthetic oligonucleotide
  Antisense strand to SEQ ID NO: 2367872
uaaucagaaacaaaucagc

SEQ ID NO: 2367874 - RNA, 19 nt, Artificial Sequence
  Description of Artificial Sequence: Synthetic oligonucleotide
  Sense strand starting at position 3783 of SEQ ID NO: 1885794
ugauuuguuucugauuaac

SEQ ID NO: 2367875 - RNA, 19 nt, Artificial Sequence
  Description of Artificial Sequence: Synthetic oligonucleotide
  Antisense strand to SEQ ID NO: 2367874
guuaaucagaaacaaauca

SEQ ID NO: 2367876 - RNA, 19 nt, Artificial Sequence
  Description of Artificial Sequence: Synthetic oligonucleotide
  Sense strand starting at position 3789 of SEQ ID NO: 1885794
guuucugauuaaccacaga

SEQ ID NO: 2367877 - RNA, 19 nt, Artificial Sequence
  Description of Artificial Sequence: Synthetic oligonucleotide
  Antisense strand to SEQ ID NO: 2367876
ucugugguuaaucagaaac

SEQ ID NO: 2367878 - RNA, 19 nt, Artificial Sequence
  Description of Artificial Sequence: Synthetic oligonucleotide
  Sense strand starting at position 3803 of SEQ ID NO: 1885794
acagaaucagagugaguua

SEQ ID NO: 2367879 - RNA, 19 nt, Artificial Sequence
  Description of Artificial Sequence: Synthetic oligonucleotide
  Antisense strand to SEQ ID NO: 2367878
uaacucacucugauucugu

SEQ ID NO: 2367880 - RNA, 19 nt, Artificial Sequence
  Description of Artificial Sequence: Synthetic oligonucleotide
  Sense strand starting at position 3806 of SEQ ID NO: 1885794
gaaucagagugaguuacaa

SEQ ID NO: 2367881 - RNA, 19 nt, Artificial Sequence
  Description of Artificial Sequence: Synthetic oligonucleotide
  Antisense strand to SEQ ID NO: 2367880
uuguaacucacucugauuc

SEQ ID NO: 2367882 - RNA, 19 nt, Artificial Sequence
  Description of Artificial Sequence: Synthetic oligonucleotide
  Sense strand starting at position 3898 of SEQ ID NO: 1885794
cagagaacucgugguugaa

SEQ ID NO: 2367883 - RNA, 19 nt, Artificial Sequence
  Description of Artificial Sequence: Synthetic oligonucleotide
  Antisense strand to SEQ ID NO: 2367882
uucaaccacgaguucucug

SEQ ID NO: 2367884 - RNA, 19 nt, Artificial Sequence
  Description of Artificial Sequence: Synthetic oligonucleotide
  Sense strand starting at position 217 of SEQ ID NO: 1885795
aauagacaccuugguguua

SEQ ID NO: 2367885 - RNA, 19 nt, Artificial Sequence
  Description of Artificial Sequence: Synthetic oligonucleotide
  Antisense strand to SEQ ID NO: 2367884
uaacaccaaggugucuauu

SEQ ID NO: 2367886 - RNA, 19 nt, Artificial Sequence
  Description of Artificial Sequence: Synthetic oligonucleotide
  Sense strand starting at position 218 of SEQ ID NO: 1885795
auagacaccuugguguuaa

SEQ ID NO: 2367887 - RNA, 19 nt, Artificial Sequence
  Description of Artificial Sequence: Synthetic oligonucleotide
  Antisense strand to SEQ ID NO: 2367886
uuaacaccaaggugucuau

SEQ ID NO: 2367888 - RNA, 19 nt, Artificial Sequence
  Description of Artificial Sequence: Synthetic oligonucleotide
  Sense strand starting at position 250 of SEQ ID NO: 1885795
guguucuaaguugacaacu

SEQ ID NO: 2367889 - RNA, 19 nt, Artificial Sequence
  Description of Artificial Sequence: Synthetic oligonucleotide
  Antisense strand to SEQ ID NO: 2367888
aguugucaacuuagaacac

SEQ ID NO: 2367890 - RNA, 19 nt, Artificial Sequence
  Description of Artificial Sequence: Synthetic oligonucleotide
  Sense strand starting at position 278 of SEQ ID NO: 1885795
aaauaagagugucugcaag

SEQ ID NO: 2367891 - RNA, 19 nt, Artificial Sequence
  Description of Artificial Sequence: Synthetic oligonucleotide
  Antisense strand to SEQ ID NO: 2367890
cuugcagacacucuuauuu

SEQ ID NO: 2367892 - RNA, 19 nt, Artificial Sequence
  Description of Artificial Sequence: Synthetic oligonucleotide
  Sense strand starting at position 280 of SEQ ID NO: 1885795
auaagagugucugcaagug

SEQ ID NO: 2367893 - RNA, 19 nt, Artificial Sequence
  Description of Artificial Sequence: Synthetic oligonucleotide
  Antisense strand to SEQ ID NO: 2367892
cacuugcagacacucuuau

SEQ ID NO: 2367894 - RNA, 19 nt, Artificial Sequence
  Description of Artificial Sequence: Synthetic oligonucleotide
  Sense strand starting at position 296 of SEQ ID NO: 1885795
gugcauggcccauaccaua

SEQ ID NO: 2367895 - RNA, 19 nt, Artificial Sequence
  Description of Artificial Sequence: Synthetic oligonucleotide
  Antisense strand to SEQ ID NO: 2367894
uaugguaugggccaugcac

SEQ ID NO: 2367896 - RNA, 19 nt, Artificial Sequence
  Description of Artificial Sequence: Synthetic oligonucleotide
  Sense strand starting at position 353 of SEQ ID NO: 1885795
uuuguaagggccuagguau

SEQ ID NO: 2367897 - RNA, 19 nt, Artificial Sequence
  Description of Artificial Sequence: Synthetic oligonucleotide
  Antisense strand to SEQ ID NO: 2367896
auaccuaggcccuuacaaa

SEQ ID NO: 2367898 - RNA, 19 nt, Artificial Sequence
  Description of Artificial Sequence: Synthetic oligonucleotide
  Sense strand starting at position 394 of SEQ ID NO: 1885795
cuuguaaggugggucaauu

SEQ ID NO: 2367899 - RNA, 19 nt, Artificial Sequence
  Description of Artificial Sequence: Synthetic oligonucleotide
  Antisense strand to SEQ ID NO: 2367898
aauugacccaccuuacaag

SEQ ID NO: 2367900 - RNA, 19 nt, Artificial Sequence
  Description of Artificial Sequence: Synthetic oligonucleotide
  Sense strand starting at position 744 of SEQ ID NO: 1885795
cagucccugcucugaugaa

SEQ ID NO: 2367901 - RNA, 19 nt, Artificial Sequence
  Description of Artificial Sequence: Synthetic oligonucleotide
  Antisense strand to SEQ ID NO: 2367900
uucaucagagcagggacug

SEQ ID NO: 2367902 - RNA, 19 nt, Artificial Sequence
  Description of Artificial Sequence: Synthetic oligonucleotide
  Sense strand starting at position 748 of SEQ ID NO: 1885795
cccugcucugaugaacaua

SEQ ID NO: 2367903 - RNA, 19 nt, Artificial Sequence
  Description of Artificial Sequence: Synthetic oligonucleotide
  Antisense strand to SEQ ID NO: 2367902
uauguucaucagagcaggg

SEQ ID NO: 2367904 - RNA, 19 nt, Artificial Sequence
  Description of Artificial Sequence: Synthetic oligonucleotide
  Sense strand starting at position 785 of SEQ ID NO: 1885795
gcaguugugacacauagug

SEQ ID NO: 2367905 - RNA, 19 nt, Artificial Sequence
  Description of Artificial Sequence: Synthetic oligonucleotide
  Antisense strand to SEQ ID NO: 2367904
cacuaugugucacaacugc

SEQ ID NO: 2367906 - RNA, 19 nt, Artificial Sequence
  Description of Artificial Sequence: Synthetic oligonucleotide
  Sense strand starting at position 793 of SEQ ID NO: 1885795
gacacauagugccuggaau

SEQ ID NO: 2367907 - RNA, 19 nt, Artificial Sequence
  Description of Artificial Sequence: Synthetic oligonucleotide
  Antisense strand to SEQ ID NO: 2367906
auuccaggcacuauguguc

SEQ ID NO: 2367908 - RNA, 19 nt, Artificial Sequence
  Description of Artificial Sequence: Synthetic oligonucleotide
  Sense strand starting at position 794 of SEQ ID NO: 1885795
acacauagugccuggaauc

SEQ ID NO: 2367909 - RNA, 19 nt, Artificial Sequence
  Description of Artificial Sequence: Synthetic oligonucleotide
  Antisense strand to SEQ ID NO: 2367908
gauuccaggcacuaugugu

SEQ ID NO: 2367910 - RNA, 19 nt, Artificial Sequence
  Description of Artificial Sequence: Synthetic oligonucleotide
  Sense strand starting at position 795 of SEQ ID NO: 1885795
cacauagugccuggaauca

SEQ ID NO: 2367911 - RNA, 19 nt, Artificial Sequence
  Description of Artificial Sequence: Synthetic oligonucleotide
  Antisense strand to SEQ ID NO: 2367910
ugauuccaggcacuaugug

SEQ ID NO: 2367912 - RNA, 19 nt, Artificial Sequence
  Description of Artificial Sequence: Synthetic oligonucleotide
  Sense strand starting at position 849 of SEQ ID NO: 1885795
aaagucgugcauuagagua

SEQ ID NO: 2367913 - RNA, 19 nt, Artificial Sequence
  Description of Artificial Sequence: Synthetic oligonucleotide
  Antisense strand to SEQ ID NO: 2367912
uacucuaaugcacgacuuu

SEQ ID NO: 2367914 - RNA, 19 nt, Artificial Sequence
  Description of Artificial Sequence: Synthetic oligonucleotide
  Sense strand starting at position 854 of SEQ ID NO: 1885795
cgugcauuagaguaauccu

SEQ ID NO: 2367915 - RNA, 19 nt, Artificial Sequence
  Description of Artificial Sequence: Synthetic oligonucleotide
  Antisense strand to SEQ ID NO: 2367914
aggauuacucuaaugcacg

SEQ ID NO: 2367916 - RNA, 19 nt, Artificial Sequence
  Description of Artificial Sequence: Synthetic oligonucleotide
  Sense strand starting at position 857 of SEQ ID NO: 1885795
gcauuagaguaauccuaau

SEQ ID NO: 2367917 - RNA, 19 nt, Artificial Sequence
  Description of Artificial Sequence: Synthetic oligonucleotide
  Antisense strand to SEQ ID NO: 2367916
auuaggauuacucuaaugc

SEQ ID NO: 2367918 - RNA, 19 nt, Artificial Sequence
  Description of Artificial Sequence: Synthetic oligonucleotide
  Sense strand starting at position 1259 of SEQ ID NO: 1885795
uccacaauauuaguguauu

SEQ ID NO: 2367919 - RNA, 19 nt, Artificial Sequence
  Description of Artificial Sequence: Synthetic oligonucleotide
  Antisense strand to SEQ ID NO: 2367918
aauacacuaauauugugga

SEQ ID NO: 2367920 - RNA, 19 nt, Artificial Sequence
  Description of Artificial Sequence: Synthetic oligonucleotide
  Sense strand starting at position 1375 of SEQ ID NO: 1885795
caccauuguauguggagga

SEQ ID NO: 2367921 - RNA, 19 nt, Artificial Sequence
  Description of Artificial Sequence: Synthetic oligonucleotide
  Antisense strand to SEQ ID NO: 2367920
uccuccacauacaauggug

SEQ ID NO: 2367922 - RNA, 19 nt, Artificial Sequence
  Description of Artificial Sequence: Synthetic oligonucleotide
  Sense strand starting at position 1512 of SEQ ID NO: 1885795
ugucacuauucucuacaga

SEQ ID NO: 2367923 - RNA, 19 nt, Artificial Sequence
  Description of Artificial Sequence: Synthetic oligonucleotide
  Antisense strand to SEQ ID NO: 2367922
ucuguagagaauagugaca

SEQ ID NO: 2367924 - RNA, 19 nt, Artificial Sequence
  Description of Artificial Sequence: Synthetic oligonucleotide
  Sense strand starting at position 1700 of SEQ ID NO: 1885795
guaagaauguuagucuaag

SEQ ID NO: 2367925 - RNA, 19 nt, Artificial Sequence
  Description of Artificial Sequence: Synthetic oligonucleotide
  Antisense strand to SEQ ID NO: 2367924
cuuagacuaacauucuuac

SEQ ID NO: 2367926 - RNA, 19 nt, Artificial Sequence
  Description of Artificial Sequence: Synthetic oligonucleotide
  Sense strand starting at position 1701 of SEQ ID NO: 1885795
uaagaauguuagucuaaga

SEQ ID NO: 2367927 - RNA, 19 nt, Artificial Sequence
  Description of Artificial Sequence: Synthetic oligonucleotide
  Antisense strand to SEQ ID NO: 2367926
ucuuagacuaacauucuua

SEQ ID NO: 2367928 - RNA, 19 nt, Artificial Sequence
  Description of Artificial Sequence: Synthetic oligonucleotide
  Sense strand starting at position 1742 of SEQ ID NO: 1885795
ggguauuguaacugcuaag

SEQ ID NO: 2367929 - RNA, 19 nt, Artificial Sequence
  Description of Artificial Sequence: Synthetic oligonucleotide
  Antisense strand to SEQ ID NO: 2367928
cuuagcaguuacaauaccc

SEQ ID NO: 2367930 - RNA, 19 nt, Artificial Sequence
  Description of Artificial Sequence: Synthetic oligonucleotide
  Sense strand starting at position 1774 of SEQ ID NO: 1885795
aagugaugaugccuccacu

SEQ ID NO: 2367931 - RNA, 19 nt, Artificial Sequence
  Description of Artificial Sequence: Synthetic oligonucleotide
  Antisense strand to SEQ ID NO: 2367930
aguggaggcaucaucacuu

SEQ ID NO: 2367932 - RNA, 19 nt, Artificial Sequence
  Description of Artificial Sequence: Synthetic oligonucleotide
  Sense strand starting at position 1805 of SEQ ID NO: 1885795
cccuaaggaucccugucau

SEQ ID NO: 2367933 - RNA, 19 nt, Artificial Sequence
  Description of Artificial Sequence: Synthetic oligonucleotide
  Antisense strand to SEQ ID NO: 2367932
augacagggauccuuaggg

SEQ ID NO: 2367934 - RNA, 19 nt, Artificial Sequence
  Description of Artificial Sequence: Synthetic oligonucleotide
  Sense strand starting at position 1869 of SEQ ID NO: 1885795
guggaacacuguuuaaguc

SEQ ID NO: 2367935 - RNA, 19 nt, Artificial Sequence
  Description of Artificial Sequence: Synthetic oligonucleotide
  Antisense strand to SEQ ID NO: 2367934
gacuuaaacaguguuccac

SEQ ID NO: 2367936 - RNA, 19 nt, Artificial Sequence
  Description of Artificial Sequence: Synthetic oligonucleotide
  Sense strand starting at position 2065 of SEQ ID NO: 1885795
cuggguuuccagcagaauu

SEQ ID NO: 2367937 - RNA, 19 nt, Artificial Sequence
  Description of Artificial Sequence: Synthetic oligonucleotide
  Antisense strand to SEQ ID NO: 2367936
aauucugcuggaaacccag

SEQ ID NO: 2367938 - RNA, 19 nt, Artificial Sequence
  Description of Artificial Sequence: Synthetic oligonucleotide
  Sense strand starting at position 2121 of SEQ ID NO: 1885795
auugauauggcacaguuua

SEQ ID NO: 2367939 - RNA, 19 nt, Artificial Sequence
  Description of Artificial Sequence: Synthetic oligonucleotide
  Antisense strand to SEQ ID NO: 2367938
uaaacugugccauaucaau

SEQ ID NO: 2367940 - RNA, 19 nt, Artificial Sequence
  Description of Artificial Sequence: Synthetic oligonucleotide
  Sense strand starting at position 2185 of SEQ ID NO: 1885795
uuugaaagaugucuuagau

SEQ ID NO: 2367941 - RNA, 19 nt, Artificial Sequence
  Description of Artificial Sequence: Synthetic oligonucleotide
  Antisense strand to SEQ ID NO: 2367940
aucuaagacaucuuucaaa

SEQ ID NO: 2367942 - RNA, 19 nt, Artificial Sequence
  Description of Artificial Sequence: Synthetic oligonucleotide
  Sense strand starting at position 2935 of SEQ ID NO: 1885795
gugacuuagcgguaucaca

SEQ ID NO: 2367943 - RNA, 19 nt, Artificial Sequence
  Description of Artificial Sequence: Synthetic oligonucleotide
  Antisense strand to SEQ ID NO: 2367942
ugugauaccgcuaagucac

SEQ ID NO: 2367944 - RNA, 19 nt, Artificial Sequence
  Description of Artificial Sequence: Synthetic oligonucleotide
  Sense strand starting at position 3159 of SEQ ID NO: 1885795
aauauuuggugggaucuau

SEQ ID NO: 2367945 - RNA, 19 nt, Artificial Sequence
  Description of Artificial Sequence: Synthetic oligonucleotide
  Antisense strand to SEQ ID NO: 2367944
auagaucccaccaaauauu

SEQ ID NO: 2367946 - RNA, 19 nt, Artificial Sequence
  Description of Artificial Sequence: Synthetic oligonucleotide
  Sense strand starting at position 3168 of SEQ ID NO: 1885795
ugggaucuauuugaaugaa

SEQ ID NO: 2367947 - RNA, 19 nt, Artificial Sequence
  Description of Artificial Sequence: Synthetic oligonucleotide
  Antisense strand to SEQ ID NO: 2367946
uucauucaaauagauccca

SEQ ID NO: 2367948 - RNA, 19 nt, Artificial Sequence
  Description of Artificial Sequence: Synthetic oligonucleotide
  Sense strand starting at position 3189 of SEQ ID NO: 1885795
aggaguuuggaucguuaca

SEQ ID NO: 2367949 - RNA, 19 nt, Artificial Sequence
  Description of Artificial Sequence: Synthetic oligonucleotide
  Antisense strand to SEQ ID NO: 2367948
uguaacgauccaaacuccu

SEQ ID NO: 2367950 - RNA, 19 nt, Artificial Sequence
  Description of Artificial Sequence: Synthetic oligonucleotide
  Sense strand starting at position 3209 of SEQ ID NO: 1885795
uuaacuagaucucuggcua

SEQ ID NO: 2367951 - RNA, 19 nt, Artificial Sequence
  Description of Artificial Sequence: Synthetic oligonucleotide
  Antisense strand to SEQ ID NO: 2367950
uagccagagaucuaguuaa

SEQ ID NO: 2367952 - RNA, 19 nt, Artificial Sequence
  Description of Artificial Sequence: Synthetic oligonucleotide
  Sense strand starting at position 3213 of SEQ ID NO: 1885795
cuagaucucuggcuacuca

SEQ ID NO: 2367953 - RNA, 19 nt, Artificial Sequence
  Description of Artificial Sequence: Synthetic oligonucleotide
  Antisense strand to SEQ ID NO: 2367952
ugaguagccagagaucuag

SEQ ID NO: 2367954 - RNA, 19 nt, Artificial Sequence
  Description of Artificial Sequence: Synthetic oligonucleotide
  Sense strand starting at position 3626 of SEQ ID NO: 1885795
cuuguaagguaauuagcua

SEQ ID NO: 2367955 - RNA, 19 nt, Artificial Sequence
  Description of Artificial Sequence: Synthetic oligonucleotide
  Antisense strand to SEQ ID NO: 2367954
uagcuaauuaccuuacaag

SEQ ID NO: 2367956 - RNA, 19 nt, Artificial Sequence
  Description of Artificial Sequence: Synthetic oligonucleotide
  Sense strand starting at position 3630 of SEQ ID NO: 1885795
uaagguaauuagcuagcau

SEQ ID NO: 2367957 - RNA, 19 nt, Artificial Sequence
  Description of Artificial Sequence: Synthetic oligonucleotide
  Antisense strand to SEQ ID NO: 2367956
augcuagcuaauuaccuua

SEQ ID NO: 2367958 - RNA, 19 nt, Artificial Sequence
  Description of Artificial Sequence: Synthetic oligonucleotide
  Sense strand starting at position 3670 of SEQ ID NO: 1885795
gcucaaagacuuugaagac

SEQ ID NO: 2367959 - RNA, 19 nt, Artificial Sequence
  Description of Artificial Sequence: Synthetic oligonucleotide
  Antisense strand to SEQ ID NO: 2367958
gucuucaaagucuuugagc

SEQ ID NO: 2367960 - RNA, 19 nt, Artificial Sequence
  Description of Artificial Sequence: Synthetic oligonucleotide
  Sense strand starting at position 3697 of SEQ ID NO: 1885795
uaauaugcccuguggacuu

SEQ ID NO: 2367961 - RNA, 19 nt, Artificial Sequence
  Description of Artificial Sequence: Synthetic oligonucleotide
  Antisense strand to SEQ ID NO: 2367960
aaguccacagggcauauua

SEQ ID NO: 2367962 - RNA, 19 nt, Artificial Sequence
  Description of Artificial Sequence: Synthetic oligonucleotide
  Sense strand starting at position 3908 of SEQ ID NO: 1885795
aguuuauuaccuuggcaau

SEQ ID NO: 2367963 - RNA, 19 nt, Artificial Sequence
  Description of Artificial Sequence: Synthetic oligonucleotide
  Antisense strand to SEQ ID NO: 2367962
auugccaagguaauaaacu

SEQ ID NO: 2367964 - RNA, 19 nt, Artificial Sequence
  Description of Artificial Sequence: Synthetic oligonucleotide
  Sense strand starting at position 206 of SEQ ID NO: 1885796
uuguaaaguuuaguggaua

SEQ ID NO: 2367965 - RNA, 19 nt, Artificial Sequence
  Description of Artificial Sequence: Synthetic oligonucleotide
  Antisense strand to SEQ ID NO: 2367964
uauccacuaaacuuuacaa

SEQ ID NO: 2367966 - RNA, 19 nt, Artificial Sequence
  Description of Artificial Sequence: Synthetic oligonucleotide
  Sense strand starting at position 217 of SEQ ID NO: 1885796
aguggauaguccucagaaa

SEQ ID NO: 2367967 - RNA, 19 nt, Artificial Sequence
  Description of Artificial Sequence: Synthetic oligonucleotide
  Antisense strand to SEQ ID NO: 2367966
uuucugaggacuauccacu

SEQ ID NO: 2367968 - RNA, 19 nt, Artificial Sequence
  Description of Artificial Sequence: Synthetic oligonucleotide
  Sense strand starting at position 311 of SEQ ID NO: 1885796
cuauacuaugguuaaguca

SEQ ID NO: 2367969 - RNA, 19 nt, Artificial Sequence
  Description of Artificial Sequence: Synthetic oligonucleotide
  Antisense strand to SEQ ID NO: 2367968
ugacuuaaccauaguauag

SEQ ID NO: 2367970 - RNA, 19 nt, Artificial Sequence
  Description of Artificial Sequence: Synthetic oligonucleotide
  Sense strand starting at position 436 of SEQ ID NO: 1885796
auuacuaggucuccugaaa

SEQ ID NO: 2367971 - RNA, 19 nt, Artificial Sequence
  Description of Artificial Sequence: Synthetic oligonucleotide
  Antisense strand to SEQ ID NO: 2367970
uuucaggagaccuaguaau

SEQ ID NO: 2367972 - RNA, 19 nt, Artificial Sequence
  Description of Artificial Sequence: Synthetic oligonucleotide
  Sense strand starting at position 456 of SEQ ID NO: 1885796
agaaccauacuuggcauua

SEQ ID NO: 2367973 - RNA, 19 nt, Artificial Sequence
  Description of Artificial Sequence: Synthetic oligonucleotide
  Antisense strand to SEQ ID NO: 2367972
uaaugccaaguaugguucu

SEQ ID NO: 2367974 - RNA, 19 nt, Artificial Sequence
  Description of Artificial Sequence: Synthetic oligonucleotide
  Sense strand starting at position 580 of SEQ ID NO: 1885796
gaaccuuaaugucuaggua

SEQ ID NO: 2367975 - RNA, 19 nt, Artificial Sequence
  Description of Artificial Sequence: Synthetic oligonucleotide
  Antisense strand to SEQ ID NO: 2367974
uaccuagacauuaagguuc

SEQ ID NO: 2367976 - RNA, 19 nt, Artificial Sequence
  Description of Artificial Sequence: Synthetic oligonucleotide
  Sense strand starting at position 583 of SEQ ID NO: 1885796
ccuuaaugucuagguacca

SEQ ID NO: 2367977 - RNA, 19 nt, Artificial Sequence
  Description of Artificial Sequence: Synthetic oligonucleotide
  Antisense strand to SEQ ID NO: 2367976
ugguaccuagacauuaagg

SEQ ID NO: 2367978 - RNA, 19 nt, Artificial Sequence
  Description of Artificial Sequence: Synthetic oligonucleotide
  Sense strand starting at position 584 of SEQ ID NO: 1885796
cuuaaugucuagguaccaa

SEQ ID NO: 2367979 - RNA, 19 nt, Artificial Sequence
  Description of Artificial Sequence: Synthetic oligonucleotide
  Antisense strand to SEQ ID NO: 2367978
uugguaccuagacauuaag

SEQ ID NO: 2367980 - RNA, 19 nt, Artificial Sequence
  Description of Artificial Sequence: Synthetic oligonucleotide
  Sense strand starting at position 701 of SEQ ID NO: 1885796
auuacaauguggguuagaa

SEQ ID NO: 2367981 - RNA, 19 nt, Artificial Sequence
  Description of Artificial Sequence: Synthetic oligonucleotide
  Antisense strand to SEQ ID NO: 2367980
uucuaacccacauuguaau

SEQ ID NO: 2367982 - RNA, 19 nt, Artificial Sequence
  Description of Artificial Sequence: Synthetic oligonucleotide
  Sense strand starting at position 709 of SEQ ID NO: 1885796
guggguuagaauuaaguac

SEQ ID NO: 2367983 - RNA, 19 nt, Artificial Sequence
  Description of Artificial Sequence: Synthetic oligonucleotide
  Antisense strand to SEQ ID NO: 2367982
guacuuaauucuaacccac

SEQ ID NO: 2367984 - RNA, 19 nt, Artificial Sequence
  Description of Artificial Sequence: Synthetic oligonucleotide
  Sense strand starting at position 1347 of SEQ ID NO: 1885796
aguagugaguuaccuuaac

SEQ ID NO: 2367985 - RNA, 19 nt, Artificial Sequence
  Description of Artificial Sequence: Synthetic oligonucleotide
  Antisense strand to SEQ ID NO: 2367984
guuaagguaacucacuacu

SEQ ID NO: 2367986 - RNA, 19 nt, Artificial Sequence
  Description of Artificial Sequence: Synthetic oligonucleotide
  Sense strand starting at position 1427 of SEQ ID NO: 1885796
gucuuaacucaagguuaac

SEQ ID NO: 2367987 - RNA, 19 nt, Artificial Sequence
  Description of Artificial Sequence: Synthetic oligonucleotide
  Antisense strand to SEQ ID NO: 2367986
guuaaccuugaguuaagac

SEQ ID NO: 2367988 - RNA, 19 nt, Artificial Sequence
  Description of Artificial Sequence: Synthetic oligonucleotide
  Sense strand starting at position 1470 of SEQ ID NO: 1885796
cuguuacaaugaguuacua

SEQ ID NO: 2367989 - RNA, 19 nt, Artificial Sequence
  Description of Artificial Sequence: Synthetic oligonucleotide
  Antisense strand to SEQ ID NO: 2367988
uaguaacucauuguaacag

SEQ ID NO: 2367990 - RNA, 19 nt, Artificial Sequence
  Description of Artificial Sequence: Synthetic oligonucleotide
  Sense strand starting at position 1710 of SEQ ID NO: 1885796
cugaucagguguccaaaua

SEQ ID NO: 2367991 - RNA, 19 nt, Artificial Sequence
  Description of Artificial Sequence: Synthetic oligonucleotide
  Antisense strand to SEQ ID NO: 2367990
uauuuggacaccugaucag

SEQ ID NO: 2367992 - RNA, 19 nt, Artificial Sequence
  Description of Artificial Sequence: Synthetic oligonucleotide
  Sense strand starting at position 1776 of SEQ ID NO: 1885796
uugccugaagagugguaaa

SEQ ID NO: 2367993 - RNA, 19 nt, Artificial Sequence
  Description of Artificial Sequence: Synthetic oligonucleotide
  Antisense strand to SEQ ID NO: 2367992
uuuaccacucuucaggcaa

SEQ ID NO: 2367994 - RNA, 19 nt, Artificial Sequence
  Description of Artificial Sequence: Synthetic oligonucleotide
  Sense strand starting at position 1855 of SEQ ID NO: 1885796
ggaauuacauguuugauuc

SEQ ID NO: 2367995 - RNA, 19 nt, Artificial Sequence
  Description of Artificial Sequence: Synthetic oligonucleotide
  Antisense strand to SEQ ID NO: 2367994
gaaucaaacauguaauucc

SEQ ID NO: 2367996 - RNA, 19 nt, Artificial Sequence
  Description of Artificial Sequence: Synthetic oligonucleotide
  Sense strand starting at position 1905 of SEQ ID NO: 1885796
uccuaauauucucugagug

SEQ ID NO: 2367997 - RNA, 19 nt, Artificial Sequence
  Description of Artificial Sequence: Synthetic oligonucleotide
  Antisense strand to SEQ ID NO: 2367996
cacucagagaauauuagga

SEQ ID NO: 2367998 - RNA, 19 nt, Artificial Sequence
  Description of Artificial Sequence: Synthetic oligonucleotide
  Sense strand starting at position 1906 of SEQ ID NO: 1885796
ccuaauauucucugaguga

SEQ ID NO: 2367999 - RNA, 19 nt, Artificial Sequence
  Description of Artificial Sequence: Synthetic oligonucleotide
  Antisense strand to SEQ ID NO: 2367998
ucacucagagaauauuagg

SEQ ID NO: 2368000 - RNA, 19 nt, Artificial Sequence
  Description of Artificial Sequence: Synthetic oligonucleotide
  Sense strand starting at position 1909 of SEQ ID NO: 1885796
aauauucucugagugaaga

SEQ ID NO: 2368001 - RNA, 19 nt, Artificial Sequence
  Description of Artificial Sequence: Synthetic oligonucleotide
  Antisense strand to SEQ ID NO: 2368000
ucuucacucagagaauauu

SEQ ID NO: 2368002 - RNA, 19 nt, Artificial Sequence
  Description of Artificial Sequence: Synthetic oligonucleotide
  Sense strand starting at position 1910 of SEQ ID NO: 1885796
auauucucugagugaagaa

SEQ ID NO: 2368003 - RNA, 19 nt, Artificial Sequence
  Description of Artificial Sequence: Synthetic oligonucleotide
  Antisense strand to SEQ ID NO: 2368002
uucuucacucagagaauau

SEQ ID NO: 2368004 - RNA, 19 nt, Artificial Sequence
  Description of Artificial Sequence: Synthetic oligonucleotide
  Sense strand starting at position 2155 of SEQ ID NO: 1885796
gcaaaugaguaacuaaaug

SEQ ID NO: 2368005 - RNA, 19 nt, Artificial Sequence
  Description of Artificial Sequence: Synthetic oligonucleotide
  Antisense strand to SEQ ID NO: 2368004
cauuuaguuacucauuugc

SEQ ID NO: 2368006 - RNA, 19 nt, Artificial Sequence
  Description of Artificial Sequence: Synthetic oligonucleotide
  Sense strand starting at position 2237 of SEQ ID NO: 1885796
uagaaugcucaggaaguuu

SEQ ID NO: 2368007 - RNA, 19 nt, Artificial Sequence
  Description of Artificial Sequence: Synthetic oligonucleotide
  Antisense strand to SEQ ID NO: 2368006
aaacuuccugagcauucua

SEQ ID NO: 2368008 - RNA, 19 nt, Artificial Sequence
  Description of Artificial Sequence: Synthetic oligonucleotide
  Sense strand starting at position 2261 of SEQ ID NO: 1885796
cugaauagauguuugucau

SEQ ID NO: 2368009 - RNA, 19 nt, Artificial Sequence
  Description of Artificial Sequence: Synthetic oligonucleotide
  Antisense strand to SEQ ID NO: 2368008
augacaaacaucuauucag

SEQ ID NO: 2368010 - RNA, 19 nt, Artificial Sequence
  Description of Artificial Sequence: Synthetic oligonucleotide
  Sense strand starting at position 2262 of SEQ ID NO: 1885796
ugaauagauguuugucaug

SEQ ID NO: 2368011 - RNA, 19 nt, Artificial Sequence
  Description of Artificial Sequence: Synthetic oligonucleotide
  Antisense strand to SEQ ID NO: 2368010
caugacaaacaucuauuca

SEQ ID NO: 2368012 - RNA, 19 nt, Artificial Sequence
  Description of Artificial Sequence: Synthetic oligonucleotide
  Sense strand starting at position 2264 of SEQ ID NO: 1885796
aauagauguuugucaugag

SEQ ID NO: 2368013 - RNA, 19 nt, Artificial Sequence
  Description of Artificial Sequence: Synthetic oligonucleotide
  Antisense strand to SEQ ID NO: 2368012
cucaugacaaacaucuauu

SEQ ID NO: 2368014 - RNA, 19 nt, Artificial Sequence
  Description of Artificial Sequence: Synthetic oligonucleotide
  Sense strand starting at position 2373 of SEQ ID NO: 1885796
auaagaugccagugaaaca

SEQ ID NO: 2368015 - RNA, 19 nt, Artificial Sequence
  Description of Artificial Sequence: Synthetic oligonucleotide
  Antisense strand to SEQ ID NO: 2368014
uguuucacuggcaucuuau

SEQ ID NO: 2368016 - RNA, 19 nt, Artificial Sequence
  Description of Artificial Sequence: Synthetic oligonucleotide
  Sense strand starting at position 2384 of SEQ ID NO: 1885796
gugaaacaguaucuauaaa

SEQ ID NO: 2368017 - RNA, 19 nt, Artificial Sequence
  Description of Artificial Sequence: Synthetic oligonucleotide
  Antisense strand to SEQ ID NO: 2368016
uuuauagauacuguuucac

SEQ ID NO: 2368018 - RNA, 19 nt, Artificial Sequence
  Description of Artificial Sequence: Synthetic oligonucleotide
  Sense strand starting at position 2429 of SEQ ID NO: 1885796
ggacacagucuaugaauau

SEQ ID NO: 2368019 - RNA, 19 nt, Artificial Sequence
  Description of Artificial Sequence: Synthetic oligonucleotide
  Antisense strand to SEQ ID NO: 2368018
auauucauagacugugucc

SEQ ID NO: 2368020 - RNA, 19 nt, Artificial Sequence
  Description of Artificial Sequence: Synthetic oligonucleotide
  Sense strand starting at position 2628 of SEQ ID NO: 1885796
ucugaaacaugucuuugaa

SEQ ID NO: 2368021 - RNA, 19 nt, Artificial Sequence
  Description of Artificial Sequence: Synthetic oligonucleotide
  Antisense strand to SEQ ID NO: 2368020
uucaaagacauguuucaga

SEQ ID NO: 2368022 - RNA, 19 nt, Artificial Sequence
  Description of Artificial Sequence: Synthetic oligonucleotide
  Sense strand starting at position 2630 of SEQ ID NO: 1885796
ugaaacaugucuuugaaag

SEQ ID NO: 2368023 - RNA, 19 nt, Artificial Sequence
  Description of Artificial Sequence: Synthetic oligonucleotide
  Antisense strand to SEQ ID NO: 2368022
cuuucaaagacauguuuca

SEQ ID NO: 2368024 - RNA, 19 nt, Artificial Sequence
  Description of Artificial Sequence: Synthetic oligonucleotide
  Sense strand starting at position 2723 of SEQ ID NO: 1885796
agauuuaacuuaggaaauc

SEQ ID NO: 2368025 - RNA, 19 nt, Artificial Sequence
  Description of Artificial Sequence: Synthetic oligonucleotide
  Antisense strand to SEQ ID NO: 2368024
gauuuccuaaguuaaaucu

SEQ ID NO: 2368026 - RNA, 19 nt, Artificial Sequence
  Description of Artificial Sequence: Synthetic oligonucleotide
  Sense strand starting at position 2811 of SEQ ID NO: 1885796
guaaauuacuugucuacca

SEQ ID NO: 2368027 - RNA, 19 nt, Artificial Sequence
  Description of Artificial Sequence: Synthetic oligonucleotide
  Antisense strand to SEQ ID NO: 2368026
ugguagacaaguaauuuac

SEQ ID NO: 2368028 - RNA, 19 nt, Artificial Sequence
  Description of Artificial Sequence: Synthetic oligonucleotide
  Sense strand starting at position 3066 of SEQ ID NO: 1885796
cuugcugugaugcaggaau

SEQ ID NO: 2368029 - RNA, 19 nt, Artificial Sequence
  Description of Artificial Sequence: Synthetic oligonucleotide
  Antisense strand to SEQ ID NO: 2368028
auuccugcaucacagcaag

SEQ ID NO: 2368030 - RNA, 19 nt, Artificial Sequence
  Description of Artificial Sequence: Synthetic oligonucleotide
  Sense strand starting at position 3212 of SEQ ID NO: 1885796
ugcucuucugaaugaaauc

SEQ ID NO: 2368031 - RNA, 19 nt, Artificial Sequence
  Description of Artificial Sequence: Synthetic oligonucleotide
  Antisense strand to SEQ ID NO: 2368030
gauuucauucagaagagca

SEQ ID NO: 2368032 - RNA, 19 nt, Artificial Sequence
  Description of Artificial Sequence: Synthetic oligonucleotide
  Sense strand starting at position 3466 of SEQ ID NO: 1885796
gccacaucagaguacugaa

SEQ ID NO: 2368033 - RNA, 19 nt, Artificial Sequence
  Description of Artificial Sequence: Synthetic oligonucleotide
  Antisense strand to SEQ ID NO: 2368032
uucaguacucugauguggc

SEQ ID NO: 2368034 - RNA, 19 nt, Artificial Sequence
  Description of Artificial Sequence: Synthetic oligonucleotide
  Sense strand starting at position 3543 of SEQ ID NO: 1885796
aguuauuauuaagcgauga

SEQ ID NO: 2368035 - RNA, 19 nt, Artificial Sequence
  Description of Artificial Sequence: Synthetic oligonucleotide
  Antisense strand to SEQ ID NO: 2368034
ucaucgcuuaauaauaacu

SEQ ID NO: 2368036 - RNA, 19 nt, Artificial Sequence
  Description of Artificial Sequence: Synthetic oligonucleotide
  Sense strand starting at position 3545 of SEQ ID NO: 1885796
uuauuauuaagcgaugagu

SEQ ID NO: 2368037 - RNA, 19 nt, Artificial Sequence
  Description of Artificial Sequence: Synthetic oligonucleotide
  Antisense strand to SEQ ID NO: 2368036
acucaucgcuuaauaauaa

SEQ ID NO: 2368038 - RNA, 19 nt, Artificial Sequence
  Description of Artificial Sequence: Synthetic oligonucleotide
  Sense strand starting at position 3548 of SEQ ID NO: 1885796
uuauuaagcgaugaguuuc

SEQ ID NO: 2368039 - RNA, 19 nt, Artificial Sequence
  Description of Artificial Sequence: Synthetic oligonucleotide
  Antisense strand to SEQ ID NO: 2368038
gaaacucaucgcuuaauaa

SEQ ID NO: 2368040 - RNA, 19 nt, Artificial Sequence
  Description of Artificial Sequence: Synthetic oligonucleotide
  Sense strand starting at position 3832 of SEQ ID NO: 1885796
ggucuuaguaguuauccca

SEQ ID NO: 2368041 - RNA, 19 nt, Artificial Sequence
  Description of Artificial Sequence: Synthetic oligonucleotide
  Antisense strand to SEQ ID NO: 2368040
ugggauaacuacuaagacc

SEQ ID NO: 2368042 - RNA, 19 nt, Artificial Sequence
  Description of Artificial Sequence: Synthetic oligonucleotide
  Sense strand starting at position 3882 of SEQ ID NO: 1885796
cuuccauuacgccaauuga

SEQ ID NO: 2368043 - RNA, 19 nt, Artificial Sequence
  Description of Artificial Sequence: Synthetic oligonucleotide
  Antisense strand to SEQ ID NO: 2368042
ucaauuggcguaauggaag

SEQ ID NO: 2368044 - RNA, 19 nt, Artificial Sequence
  Description of Artificial Sequence: Synthetic oligonucleotide
  Sense strand starting at position 140 of SEQ ID NO: 1885797
ugcguuauuuccucauuga

SEQ ID NO: 2368045 - RNA, 19 nt, Artificial Sequence
  Description of Artificial Sequence: Synthetic oligonucleotide
  Antisense strand to SEQ ID NO: 2368044
ucaaugaggaaauaacgca

SEQ ID NO: 2368046 - RNA, 19 nt, Artificial Sequence
  Description of Artificial Sequence: Synthetic oligonucleotide
  Sense strand starting at position 155 of SEQ ID NO: 1885797
uugagaucucaauagcccu

SEQ ID NO: 2368047 - RNA, 19 nt, Artificial Sequence
  Description of Artificial Sequence: Synthetic oligonucleotide
  Antisense strand to SEQ ID NO: 2368046
agggcuauugagaucucaa

SEQ ID NO: 2368048 - RNA, 19 nt, Artificial Sequence
  Description of Artificial Sequence: Synthetic oligonucleotide
  Sense strand starting at position 180 of SEQ ID NO: 1885797
gagagauuaugaguccuuu

SEQ ID NO: 2368049 - RNA, 19 nt, Artificial Sequence
  Description of Artificial Sequence: Synthetic oligonucleotide
  Antisense strand to SEQ ID NO: 2368048
aaaggacucauaaucucuc

SEQ ID NO: 2368050 - RNA, 19 nt, Artificial Sequence
  Description of Artificial Sequence: Synthetic oligonucleotide
  Sense strand starting at position 464 of SEQ ID NO: 1885797
gaauaugacucggucccaa

SEQ ID NO: 2368051 - RNA, 19 nt, Artificial Sequence
  Description of Artificial Sequence: Synthetic oligonucleotide
  Antisense strand to SEQ ID NO: 2368050
uugggaccgagucauauuc

SEQ ID NO: 2368052 - RNA, 19 nt, Artificial Sequence
  Description of Artificial Sequence: Synthetic oligonucleotide
  Sense strand starting at position 1409 of SEQ ID NO: 1885797
gcuuuaaagcaagacagua

SEQ ID NO: 2368053 - RNA, 19 nt, Artificial Sequence
  Description of Artificial Sequence: Synthetic oligonucleotide
  Antisense strand to SEQ ID NO: 2368052
uacugucuugcuuuaaagc

SEQ ID NO: 2368054 - RNA, 19 nt, Artificial Sequence
  Description of Artificial Sequence: Synthetic oligonucleotide
  Sense strand starting at position 1533 of SEQ ID NO: 1885797
cgaggauguguuuacagau

SEQ ID NO: 2368055 - RNA, 19 nt, Artificial Sequence
  Description of Artificial Sequence: Synthetic oligonucleotide
  Antisense strand to SEQ ID NO: 2368054
aucuguaaacacauccucg

SEQ ID NO: 2368056 - RNA, 19 nt, Artificial Sequence
  Description of Artificial Sequence: Synthetic oligonucleotide
  Sense strand starting at position 1627 of SEQ ID NO: 1885797
cgggcauuaguugagcaga

SEQ ID NO: 2368057 - RNA, 19 nt, Artificial Sequence
  Description of Artificial Sequence: Synthetic oligonucleotide
  Antisense strand to SEQ ID NO: 2368056
ucugcucaacuaaugcccg

SEQ ID NO: 2368058 - RNA, 19 nt, Artificial Sequence
  Description of Artificial Sequence: Synthetic oligonucleotide
  Sense strand starting at position 1630 of SEQ ID NO: 1885797
gcauuaguugagcagaauc

SEQ ID NO: 2368059 - RNA, 19 nt, Artificial Sequence
  Description of Artificial Sequence: Synthetic oligonucleotide
  Antisense strand to SEQ ID NO: 2368058
gauucugcucaacuaaugc

SEQ ID NO: 2368060 - RNA, 19 nt, Artificial Sequence
  Description of Artificial Sequence: Synthetic oligonucleotide
  Sense strand starting at position 1683 of SEQ ID NO: 1885797
cucacugaucugcauuaag

SEQ ID NO: 2368061 - RNA, 19 nt, Artificial Sequence
  Description of Artificial Sequence: Synthetic oligonucleotide
  Antisense strand to SEQ ID NO: 2368060
cuuaaugcagaucagugag

SEQ ID NO: 2368062 - RNA, 19 nt, Artificial Sequence
  Description of Artificial Sequence: Synthetic oligonucleotide
  Sense strand starting at position 1830 of SEQ ID NO: 1885797
acaguagaagaguguaauc

SEQ ID NO: 2368063 - RNA, 19 nt, Artificial Sequence
  Description of Artificial Sequence: Synthetic oligonucleotide
  Antisense strand to SEQ ID NO: 2368062
gauuacacucuucuacugu

SEQ ID NO: 2368064 - RNA, 19 nt, Artificial Sequence
  Description of Artificial Sequence: Synthetic oligonucleotide
  Sense strand starting at position 1839 of SEQ ID NO: 1885797
gaguguaaucaacaauggu

SEQ ID NO: 2368065 - RNA, 19 nt, Artificial Sequence
  Description of Artificial Sequence: Synthetic oligonucleotide
  Antisense strand to SEQ ID NO: 2368064
accauuguugauuacacuc

SEQ ID NO: 2368066 - RNA, 19 nt, Artificial Sequence
  Description of Artificial Sequence: Synthetic oligonucleotide
  Sense strand starting at position 1858 of SEQ ID NO: 1885797
gcauacauaccguggaaua

SEQ ID NO: 2368067 - RNA, 19 nt, Artificial Sequence
  Description of Artificial Sequence: Synthetic oligonucleotide
  Antisense strand to SEQ ID NO: 2368066
uauuccacgguauguaugc

SEQ ID NO: 2368068 - RNA, 19 nt, Artificial Sequence
  Description of Artificial Sequence: Synthetic oligonucleotide
  Sense strand starting at position 1859 of SEQ ID NO: 1885797
cauacauaccguggaauau

SEQ ID NO: 2368069 - RNA, 19 nt, Artificial Sequence
  Description of Artificial Sequence: Synthetic oligonucleotide
  Antisense strand to SEQ ID NO: 2368068
auauuccacgguauguaug

SEQ ID NO: 2368070 - RNA, 19 nt, Artificial Sequence
  Description of Artificial Sequence: Synthetic oligonucleotide
  Sense strand starting at position 1860 of SEQ ID NO: 1885797
auacauaccguggaauauu

SEQ ID NO: 2368071 - RNA, 19 nt, Artificial Sequence
  Description of Artificial Sequence: Synthetic oligonucleotide
  Antisense strand to SEQ ID NO: 2368070
aauauuccacgguauguau

SEQ ID NO: 2368072 - RNA, 19 nt, Artificial Sequence
  Description of Artificial Sequence: Synthetic oligonucleotide
  Sense strand starting at position 1985 of SEQ ID NO: 1885797
gucucaucauugguccaga

SEQ ID NO: 2368073 - RNA, 19 nt, Artificial Sequence
  Description of Artificial Sequence: Synthetic oligonucleotide
  Antisense strand to SEQ ID NO: 2368072
ucuggaccaaugaugagac

SEQ ID NO: 2368074 - RNA, 19 nt, Artificial Sequence
  Description of Artificial Sequence: Synthetic oligonucleotide
  Sense strand starting at position 1986 of SEQ ID NO: 1885797
ucucaucauugguccagaa

SEQ ID NO: 2368075 - RNA, 19 nt, Artificial Sequence
  Description of Artificial Sequence: Synthetic oligonucleotide
  Antisense strand to SEQ ID NO: 2368074
uucuggaccaaugaugaga

SEQ ID NO: 2368076 - RNA, 19 nt, Artificial Sequence
  Description of Artificial Sequence: Synthetic oligonucleotide
  Sense strand starting at position 2207 of SEQ ID NO: 1885797
cagcaaggugguuaaauaa

SEQ ID NO: 2368077 - RNA, 19 nt, Artificial Sequence
  Description of Artificial Sequence: Synthetic oligonucleotide
  Antisense strand to SEQ ID NO: 2368076
uuauuuaaccaccuugcug

SEQ ID NO: 2368078 - RNA, 19 nt, Artificial Sequence
  Description of Artificial Sequence: Synthetic oligonucleotide
  Sense strand starting at position 2247 of SEQ ID NO: 1885797
aggauacugagguguuguu

SEQ ID NO: 2368079 - RNA, 19 nt, Artificial Sequence
  Description of Artificial Sequence: Synthetic oligonucleotide
  Antisense strand to SEQ ID NO: 2368078
aacaacaccucaguauccu

SEQ ID NO: 2368080 - RNA, 19 nt, Artificial Sequence
  Description of Artificial Sequence: Synthetic oligonucleotide
  Sense strand starting at position 2259 of SEQ ID NO: 1885797
uguuguuauaaggaauagu

SEQ ID NO: 2368081 - RNA, 19 nt, Artificial Sequence
  Description of Artificial Sequence: Synthetic oligonucleotide
  Antisense strand to SEQ ID NO: 2368080
acuauuccuuauaacaaca

SEQ ID NO: 2368082 - RNA, 19 nt, Artificial Sequence
  Description of Artificial Sequence: Synthetic oligonucleotide
  Sense strand starting at position 2262 of SEQ ID NO: 1885797
uguuauaaggaauaguguu

SEQ ID NO: 2368083 - RNA, 19 nt, Artificial Sequence
  Description of Artificial Sequence: Synthetic oligonucleotide
  Antisense strand to SEQ ID NO: 2368082
aacacuauuccuuauaaca

SEQ ID NO: 2368084 - RNA, 19 nt, Artificial Sequence
  Description of Artificial Sequence: Synthetic oligonucleotide
  Sense strand starting at position 2269 of SEQ ID NO: 1885797
aggaauaguguugaucuuu

SEQ ID NO: 2368085 - RNA, 19 nt, Artificial Sequence
  Description of Artificial Sequence: Synthetic oligonucleotide
  Antisense strand to SEQ ID NO: 2368084
aaagaucaacacuauuccu

SEQ ID NO: 2368086 - RNA, 19 nt, Artificial Sequence
  Description of Artificial Sequence: Synthetic oligonucleotide
  Sense strand starting at position 2275 of SEQ ID NO: 1885797
aguguugaucuuuauuauc

SEQ ID NO: 2368087 - RNA, 19 nt, Artificial Sequence
  Description of Artificial Sequence: Synthetic oligonucleotide
  Antisense strand to SEQ ID NO: 2368086
gauaauaaagaucaacacu

SEQ ID NO: 2368088 - RNA, 19 nt, Artificial Sequence
  Description of Artificial Sequence: Synthetic oligonucleotide
  Sense strand starting at position 2439 of SEQ ID NO: 1885797
gaaccagacgccugaaacu

SEQ ID NO: 2368089 - RNA, 19 nt, Artificial Sequence
  Description of Artificial Sequence: Synthetic oligonucleotide
  Antisense strand to SEQ ID NO: 2368088
aguuucaggcgucugguuc

SEQ ID NO: 2368090 - RNA, 19 nt, Artificial Sequence
  Description of Artificial Sequence: Synthetic oligonucleotide
  Sense strand starting at position 2506 of SEQ ID NO: 1885797
agcauuaaagauggcuuua

SEQ ID NO: 2368091 - RNA, 19 nt, Artificial Sequence
  Description of Artificial Sequence: Synthetic oligonucleotide
  Antisense strand to SEQ ID NO: 2368090
uaaagccaucuuuaaugcu

SEQ ID NO: 2368092 - RNA, 19 nt, Artificial Sequence
  Description of Artificial Sequence: Synthetic oligonucleotide
  Sense strand starting at position 2519 of SEQ ID NO: 1885797
gcuuuaucugcaguguuug

SEQ ID NO: 2368093 - RNA, 19 nt, Artificial Sequence
  Description of Artificial Sequence: Synthetic oligonucleotide
  Antisense strand to SEQ ID NO: 2368092
caaacacugcagauaaagc

SEQ ID NO: 2368094 - RNA, 19 nt, Artificial Sequence
  Description of Artificial Sequence: Synthetic oligonucleotide
  Sense strand starting at position 2719 of SEQ ID NO: 1885797
gagcaaguucugcagacac

SEQ ID NO: 2368095 - RNA, 19 nt, Artificial Sequence
  Description of Artificial Sequence: Synthetic oligonucleotide
  Antisense strand to SEQ ID NO: 2368094
gugucugcagaacuugcuc

SEQ ID NO: 2368096 - RNA, 19 nt, Artificial Sequence
  Description of Artificial Sequence: Synthetic oligonucleotide
  Sense strand starting at position 2721 of SEQ ID NO: 1885797
gcaaguucugcagacacag

SEQ ID NO: 2368097 - RNA, 19 nt, Artificial Sequence
  Description of Artificial Sequence: Synthetic oligonucleotide
  Antisense strand to SEQ ID NO: 2368096
cugugucugcagaacuugc

SEQ ID NO: 2368098 - RNA, 19 nt, Artificial Sequence
  Description of Artificial Sequence: Synthetic oligonucleotide
  Sense strand starting at position 2973 of SEQ ID NO: 1885797
uggagauuagccgagugga

SEQ ID NO: 2368099 - RNA, 19 nt, Artificial Sequence
  Description of Artificial Sequence: Synthetic oligonucleotide
  Antisense strand to SEQ ID NO: 2368098
uccacucggcuaaucucca

SEQ ID NO: 2368100 - RNA, 19 nt, Artificial Sequence
  Description of Artificial Sequence: Synthetic oligonucleotide
  Sense strand starting at position 2976 of SEQ ID NO: 1885797
agauuagccgaguggaaug

SEQ ID NO: 2368101 - RNA, 19 nt, Artificial Sequence
  Description of Artificial Sequence: Synthetic oligonucleotide
  Antisense strand to SEQ ID NO: 2368100
cauuccacucggcuaaucu

SEQ ID NO: 2368102 - RNA, 19 nt, Artificial Sequence
  Description of Artificial Sequence: Synthetic oligonucleotide
  Sense strand starting at position 3165 of SEQ ID NO: 1885797
auguuucuucccgacucua

SEQ ID NO: 2368103 - RNA, 19 nt, Artificial Sequence
  Description of Artificial Sequence: Synthetic oligonucleotide
  Antisense strand to SEQ ID NO: 2368102
uagagucgggaagaaacau

SEQ ID NO: 2368104 - RNA, 19 nt, Artificial Sequence
  Description of Artificial Sequence: Synthetic oligonucleotide
  Sense strand starting at position 3408 of SEQ ID NO: 1885797
gugugacaaggaugugaca

SEQ ID NO: 2368105 - RNA, 19 nt, Artificial Sequence
  Description of Artificial Sequence: Synthetic oligonucleotide
  Antisense strand to SEQ ID NO: 2368104
ugucacauccuugucacac

SEQ ID NO: 2368106 - RNA, 19 nt, Artificial Sequence
  Description of Artificial Sequence: Synthetic oligonucleotide
  Sense strand starting at position 3432 of SEQ ID NO: 1885797
acucccaucuacguagaaa

SEQ ID NO: 2368107 - RNA, 19 nt, Artificial Sequence
  Description of Artificial Sequence: Synthetic oligonucleotide
  Antisense strand to SEQ ID NO: 2368106
uuucuacguagaugggagu

SEQ ID NO: 2368108 - RNA, 19 nt, Artificial Sequence
  Description of Artificial Sequence: Synthetic oligonucleotide
  Sense strand starting at position 3543 of SEQ ID NO: 1885797
acagaucacuaauugguua

SEQ ID NO: 2368109 - RNA, 19 nt, Artificial Sequence
  Description of Artificial Sequence: Synthetic oligonucleotide
  Antisense strand to SEQ ID NO: 2368108
uaaccaauuagugaucugu

SEQ ID NO: 2368110 - RNA, 19 nt, Artificial Sequence
  Description of Artificial Sequence: Synthetic oligonucleotide
  Sense strand starting at position 3555 of SEQ ID NO: 1885797
uugguuaauugguuaaaug

SEQ ID NO: 2368111 - RNA, 19 nt, Artificial Sequence
  Description of Artificial Sequence: Synthetic oligonucleotide
  Antisense strand to SEQ ID NO: 2368110
cauuuaaccaauuaaccaa

SEQ ID NO: 2368112 - RNA, 19 nt, Artificial Sequence
  Description of Artificial Sequence: Synthetic oligonucleotide
  Sense strand starting at position 3556 of SEQ ID NO: 1885797
ugguuaauugguuaaaugu

SEQ ID NO: 2368113 - RNA, 19 nt, Artificial Sequence
  Description of Artificial Sequence: Synthetic oligonucleotide
  Antisense strand to SEQ ID NO: 2368112
acauuuaaccaauuaacca

SEQ ID NO: 2368114 - RNA, 19 nt, Artificial Sequence
  Description of Artificial Sequence: Synthetic oligonucleotide
  Sense strand starting at position 3599 of SEQ ID NO: 1885797
gacagaggccuucgagaac

SEQ ID NO: 2368115 - RNA, 19 nt, Artificial Sequence
  Description of Artificial Sequence: Synthetic oligonucleotide
  Antisense strand to SEQ ID NO: 2368114
guucucgaaggccucuguc

SEQ ID NO: 2368116 - RNA, 19 nt, Artificial Sequence
  Description of Artificial Sequence: Synthetic oligonucleotide
  Sense strand starting at position 3610 of SEQ ID NO: 1885797
ucgagaacuucuuuacccu

SEQ ID NO: 2368117 - RNA, 19 nt, Artificial Sequence
  Description of Artificial Sequence: Synthetic oligonucleotide
  Antisense strand to SEQ ID NO: 2368116
aggguaaagaaguucucga

SEQ ID NO: 2368118 - RNA, 19 nt, Artificial Sequence
  Description of Artificial Sequence: Synthetic oligonucleotide
  Sense strand starting at position 3657 of SEQ ID NO: 1885797
ugacuuugugcggaagaaa

SEQ ID NO: 2368119 - RNA, 19 nt, Artificial Sequence
  Description of Artificial Sequence: Synthetic oligonucleotide
  Antisense strand to SEQ ID NO: 2368118
uuucuuccgcacaaaguca

SEQ ID NO: 2368120 - RNA, 19 nt, Artificial Sequence
  Description of Artificial Sequence: Synthetic oligonucleotide
  Sense strand starting at position 3666 of SEQ ID NO: 1885797
gcggaagaaaucugagaca

SEQ ID NO: 2368121 - RNA, 19 nt, Artificial Sequence
  Description of Artificial Sequence: Synthetic oligonucleotide
  Antisense strand to SEQ ID NO: 2368120
ugucucagauuucuuccgc

SEQ ID NO: 2368122 - RNA, 19 nt, Artificial Sequence
  Description of Artificial Sequence: Synthetic oligonucleotide
  Sense strand starting at position 3778 of SEQ ID NO: 1885797
ugaguuugauuccugugaa

SEQ ID NO: 2368123 - RNA, 19 nt, Artificial Sequence
  Description of Artificial Sequence: Synthetic oligonucleotide
  Antisense strand to SEQ ID NO: 2368122
uucacaggaaucaaacuca

SEQ ID NO: 2368124 - RNA, 19 nt, Artificial Sequence
  Description of Artificial Sequence: Synthetic oligonucleotide
  Sense strand starting at position 216 of SEQ ID NO: 1885798
aggcaagaucuuuagcauu

SEQ ID NO: 2368125 - RNA, 19 nt, Artificial Sequence
  Description of Artificial Sequence: Synthetic oligonucleotide
  Antisense strand to SEQ ID NO: 2368124
aaugcuaaagaucuugccu

SEQ ID NO: 2368126 - RNA, 19 nt, Artificial Sequence
  Description of Artificial Sequence: Synthetic oligonucleotide
  Sense strand starting at position 218 of SEQ ID NO: 1885798
gcaagaucuuuagcauuag

SEQ ID NO: 2368127 - RNA, 19 nt, Artificial Sequence
  Description of Artificial Sequence: Synthetic oligonucleotide
  Antisense strand to SEQ ID NO: 2368126
cuaaugcuaaagaucuugc

SEQ ID NO: 2368128 - RNA, 19 nt, Artificial Sequence
  Description of Artificial Sequence: Synthetic oligonucleotide
  Sense strand starting at position 266 of SEQ ID NO: 1885798
ugugcucauuuggugaagu

SEQ ID NO: 2368129 - RNA, 19 nt, Artificial Sequence
  Description of Artificial Sequence: Synthetic oligonucleotide
  Antisense strand to SEQ ID NO: 2368128
acuucaccaaaugagcaca

SEQ ID NO: 2368130 - RNA, 19 nt, Artificial Sequence
  Description of Artificial Sequence: Synthetic oligonucleotide
  Sense strand starting at position 349 of SEQ ID NO: 1885798
gcaguauuagauuaaucau

SEQ ID NO: 2368131 - RNA, 19 nt, Artificial Sequence
  Description of Artificial Sequence: Synthetic oligonucleotide
  Antisense strand to SEQ ID NO: 2368130
augauuaaucuaauacugc

SEQ ID NO: 2368132 - RNA, 19 nt, Artificial Sequence
  Description of Artificial Sequence: Synthetic oligonucleotide
  Sense strand starting at position 364 of SEQ ID NO: 1885798
ucauaaacuucggucaucu

SEQ ID NO: 2368133 - RNA, 19 nt, Artificial Sequence
  Description of Artificial Sequence: Synthetic oligonucleotide
  Antisense strand to SEQ ID NO: 2368132
agaugaccgaaguuuauga

SEQ ID NO: 2368134 - RNA, 19 nt, Artificial Sequence
  Description of Artificial Sequence: Synthetic oligonucleotide
  Sense strand starting at position 366 of SEQ ID NO: 1885798
auaaacuucggucaucuca

SEQ ID NO: 2368135 - RNA, 19 nt, Artificial Sequence
  Description of Artificial Sequence: Synthetic oligonucleotide
  Antisense strand to SEQ ID NO: 2368134
ugagaugaccgaaguuuau

SEQ ID NO: 2368136 - RNA, 19 nt, Artificial Sequence
  Description of Artificial Sequence: Synthetic oligonucleotide
  Sense strand starting at position 523 of SEQ ID NO: 1885798
ccagauaggugaucacuuu

SEQ ID NO: 2368137 - RNA, 19 nt, Artificial Sequence
  Description of Artificial Sequence: Synthetic oligonucleotide
  Antisense strand to SEQ ID NO: 2368136
aaagugaucaccuaucugg

SEQ ID NO: 2368138 - RNA, 19 nt, Artificial Sequence
  Description of Artificial Sequence: Synthetic oligonucleotide
  Sense strand starting at position 592 of SEQ ID NO: 1885798
ggcauauucucauuaauga

SEQ ID NO: 2368139 - RNA, 19 nt, Artificial Sequence
  Description of Artificial Sequence: Synthetic oligonucleotide
  Antisense strand to SEQ ID NO: 2368138
ucauuaaugagaauaugcc

SEQ ID NO: 2368140 - RNA, 19 nt, Artificial Sequence
  Description of Artificial Sequence: Synthetic oligonucleotide
  Sense strand starting at position 794 of SEQ ID NO: 1885798
uggaguaaucauuaucuuu

SEQ ID NO: 2368141 - RNA, 19 nt, Artificial Sequence
  Description of Artificial Sequence: Synthetic oligonucleotide
  Antisense strand to SEQ ID NO: 2368140
aaagauaaugauuacucca

SEQ ID NO: 2368142 - RNA, 19 nt, Artificial Sequence
  Description of Artificial Sequence: Synthetic oligonucleotide
  Sense strand starting at position 946 of SEQ ID NO: 1885798
cugucaauaucugucuaca

SEQ ID NO: 2368143 - RNA, 19 nt, Artificial Sequence
  Description of Artificial Sequence: Synthetic oligonucleotide
  Antisense strand to SEQ ID NO: 2368142
uguagacagauauugacag

SEQ ID NO: 2368144 - RNA, 19 nt, Artificial Sequence
  Description of Artificial Sequence: Synthetic oligonucleotide
  Sense strand starting at position 948 of SEQ ID NO: 1885798
gucaauaucugucuacaua

SEQ ID NO: 2368145 - RNA, 19 nt, Artificial Sequence
  Description of Artificial Sequence: Synthetic oligonucleotide
  Antisense strand to SEQ ID NO: 2368144
uauguagacagauauugac

SEQ ID NO: 2368146 - RNA, 19 nt, Artificial Sequence
  Description of Artificial Sequence: Synthetic oligonucleotide
  Sense strand starting at position 1234 of SEQ ID NO: 1885798
guagaacgggauuagucau

SEQ ID NO: 2368147 - RNA, 19 nt, Artificial Sequence
  Description of Artificial Sequence: Synthetic oligonucleotide
  Antisense strand to SEQ ID NO: 2368146
augacuaaucccguucuac

SEQ ID NO: 2368148 - RNA, 19 nt, Artificial Sequence
  Description of Artificial Sequence: Synthetic oligonucleotide
  Sense strand starting at position 1288 of SEQ ID NO: 1885798
agaguuggcccuugagaua

SEQ ID NO: 2368149 - RNA, 19 nt, Artificial Sequence
  Description of Artificial Sequence: Synthetic oligonucleotide
  Antisense strand to SEQ ID NO: 2368148
uaucucaagggccaacucu

SEQ ID NO: 2368150 - RNA, 19 nt, Artificial Sequence
  Description of Artificial Sequence: Synthetic oligonucleotide
  Sense strand starting at position 1476 of SEQ ID NO: 1885798
acuggugucauguaacaca

SEQ ID NO: 2368151 - RNA, 19 nt, Artificial Sequence
  Description of Artificial Sequence: Synthetic oligonucleotide
  Antisense strand to SEQ ID NO: 2368150
uguguuacaugacaccagu

SEQ ID NO: 2368152 - RNA, 19 nt, Artificial Sequence
  Description of Artificial Sequence: Synthetic oligonucleotide
  Sense strand starting at position 1778 of SEQ ID NO: 1885798
auaugacagucuuuaucuu

SEQ ID NO: 2368153 - RNA, 19 nt, Artificial Sequence
  Description of Artificial Sequence: Synthetic oligonucleotide
  Antisense strand to SEQ ID NO: 2368152
aagauaaagacugucauau

SEQ ID NO: 2368154 - RNA, 19 nt, Artificial Sequence
  Description of Artificial Sequence: Synthetic oligonucleotide
  Sense strand starting at position 1911 of SEQ ID NO: 1885798
agagcaaggucucuuucua

SEQ ID NO: 2368155 - RNA, 19 nt, Artificial Sequence
  Description of Artificial Sequence: Synthetic oligonucleotide
  Antisense strand to SEQ ID NO: 2368154
uagaaagagaccuugcucu

SEQ ID NO: 2368156 - RNA, 19 nt, Artificial Sequence
  Description of Artificial Sequence: Synthetic oligonucleotide
  Sense strand starting at position 2020 of SEQ ID NO: 1885798
augcacuguuuauugauua

SEQ ID NO: 2368157 - RNA, 19 nt, Artificial Sequence
  Description of Artificial Sequence: Synthetic oligonucleotide
  Antisense strand to SEQ ID NO: 2368156
uaaucaauaaacagugcau

SEQ ID NO: 2368158 - RNA, 19 nt, Artificial Sequence
  Description of Artificial Sequence: Synthetic oligonucleotide
  Sense strand starting at position 2024 of SEQ ID NO: 1885798
acuguuuauugauuaugca

SEQ ID NO: 2368159 - RNA, 19 nt, Artificial Sequence
  Description of Artificial Sequence: Synthetic oligonucleotide
  Antisense strand to SEQ ID NO: 2368158
ugcauaaucaauaaacagu

SEQ ID NO: 2368160 - RNA, 19 nt, Artificial Sequence
  Description of Artificial Sequence: Synthetic oligonucleotide
  Sense strand starting at position 2025 of SEQ ID NO: 1885798
cuguuuauugauuaugcau

SEQ ID NO: 2368161 - RNA, 19 nt, Artificial Sequence
  Description of Artificial Sequence: Synthetic oligonucleotide
  Antisense strand to SEQ ID NO: 2368160
augcauaaucaauaaacag

SEQ ID NO: 2368162 - RNA, 19 nt, Artificial Sequence
  Description of Artificial Sequence: Synthetic oligonucleotide
  Sense strand starting at position 2131 of SEQ ID NO: 1885798
augcuauuuccaggcuugu

SEQ ID NO: 2368163 - RNA, 19 nt, Artificial Sequence
  Description of Artificial Sequence: Synthetic oligonucleotide
  Antisense strand to SEQ ID NO: 2368162
acaagccuggaaauagcau

SEQ ID NO: 2368164 - RNA, 19 nt, Artificial Sequence
  Description of Artificial Sequence: Synthetic oligonucleotide
  Sense strand starting at position 2141 of SEQ ID NO: 1885798
caggcuuguuucccacaga

SEQ ID NO: 2368165 - RNA, 19 nt, Artificial Sequence
  Description of Artificial Sequence: Synthetic oligonucleotide
  Antisense strand to SEQ ID NO: 2368164
ucugugggaaacaagccug

SEQ ID NO: 2368166 - RNA, 19 nt, Artificial Sequence
  Description of Artificial Sequence: Synthetic oligonucleotide
  Sense strand starting at position 2191 of SEQ ID NO: 1885798
cucagacugugccuauaau

SEQ ID NO: 2368167 - RNA, 19 nt, Artificial Sequence
  Description of Artificial Sequence: Synthetic oligonucleotide
  Antisense strand to SEQ ID NO: 2368166
auuauaggcacagucugag

SEQ ID NO: 2368168 - RNA, 19 nt, Artificial Sequence
  Description of Artificial Sequence: Synthetic oligonucleotide
  Sense strand starting at position 2192 of SEQ ID NO: 1885798
ucagacugugccuauaauu

SEQ ID NO: 2368169 - RNA, 19 nt, Artificial Sequence
  Description of Artificial Sequence: Synthetic oligonucleotide
  Antisense strand to SEQ ID NO: 2368168
aauuauaggcacagucuga

SEQ ID NO: 2368170 - RNA, 19 nt, Artificial Sequence
  Description of Artificial Sequence: Synthetic oligonucleotide
  Sense strand starting at position 2201 of SEQ ID NO: 1885798
gccuauaauuaaucgauaa

SEQ ID NO: 2368171 - RNA, 19 nt, Artificial Sequence
  Description of Artificial Sequence: Synthetic oligonucleotide
  Antisense strand to SEQ ID NO: 2368170
uuaucgauuaauuauaggc

SEQ ID NO: 2368172 - RNA, 19 nt, Artificial Sequence
  Description of Artificial Sequence: Synthetic oligonucleotide
  Sense strand starting at position 2258 of SEQ ID NO: 1885798
cucaaucgucuuucgcuua

SEQ ID NO: 2368173 - RNA, 19 nt, Artificial Sequence
  Description of Artificial Sequence: Synthetic oligonucleotide
  Antisense strand to SEQ ID NO: 2368172
uaagcgaaagacgauugag

SEQ ID NO: 2368174 - RNA, 19 nt, Artificial Sequence
  Description of Artificial Sequence: Synthetic oligonucleotide
  Sense strand starting at position 2263 of SEQ ID NO: 1885798
ucgucuuucgcuuaauuua

SEQ ID NO: 2368175 - RNA, 19 nt, Artificial Sequence
  Description of Artificial Sequence: Synthetic oligonucleotide
  Antisense strand to SEQ ID NO: 2368174
uaaauuaagcgaaagacga

SEQ ID NO: 2368176 - RNA, 19 nt, Artificial Sequence
  Description of Artificial Sequence: Synthetic oligonucleotide
  Sense strand starting at position 2288 of SEQ ID NO: 1885798
acuuaauagcaguacaaug

SEQ ID NO: 2368177 - RNA, 19 nt, Artificial Sequence
  Description of Artificial Sequence: Synthetic oligonucleotide
  Antisense strand to SEQ ID NO: 2368176
cauuguacugcuauuaagu

SEQ ID NO: 2368178 - RNA, 19 nt, Artificial Sequence
  Description of Artificial Sequence: Synthetic oligonucleotide
  Sense strand starting at position 2480 of SEQ ID NO: 1885798
cuccaauuauguuuguaag

SEQ ID NO: 2368179 - RNA, 19 nt, Artificial Sequence
  Description of Artificial Sequence: Synthetic oligonucleotide
  Antisense strand to SEQ ID NO: 2368178
cuuacaaacauaauuggag

SEQ ID NO: 2368180 - RNA, 19 nt, Artificial Sequence
  Description of Artificial Sequence: Synthetic oligonucleotide
  Sense strand starting at position 2710 of SEQ ID NO: 1885798
uacauugucggaugacuaa

SEQ ID NO: 2368181 - RNA, 19 nt, Artificial Sequence
  Description of Artificial Sequence: Synthetic oligonucleotide
  Antisense strand to SEQ ID NO: 2368180
uuagucauccgacaaugua

SEQ ID NO: 2368182 - RNA, 19 nt, Artificial Sequence
  Description of Artificial Sequence: Synthetic oligonucleotide
  Sense strand starting at position 2818 of SEQ ID NO: 1885798
ucuauuuauguuuguggua

SEQ ID NO: 2368183 - RNA, 19 nt, Artificial Sequence
  Description of Artificial Sequence: Synthetic oligonucleotide
  Antisense strand to SEQ ID NO: 2368182
uaccacaaacauaaauaga

SEQ ID NO: 2368184 - RNA, 19 nt, Artificial Sequence
  Description of Artificial Sequence: Synthetic oligonucleotide
  Sense strand starting at position 2955 of SEQ ID NO: 1885798
ugaucuccaucauuggaua

SEQ ID NO: 2368185 - RNA, 19 nt, Artificial Sequence
  Description of Artificial Sequence: Synthetic oligonucleotide
  Antisense strand to SEQ ID NO: 2368184
uauccaaugauggagauca

SEQ ID NO: 2368186 - RNA, 19 nt, Artificial Sequence
  Description of Artificial Sequence: Synthetic oligonucleotide
  Sense strand starting at position 3306 of SEQ ID NO: 1885798
auaggucuuccuugauuag

SEQ ID NO: 2368187 - RNA, 19 nt, Artificial Sequence
  Description of Artificial Sequence: Synthetic oligonucleotide
  Antisense strand to SEQ ID NO: 2368186
cuaaucaaggaagaccuau

SEQ ID NO: 2368188 - RNA, 19 nt, Artificial Sequence
  Description of Artificial Sequence: Synthetic oligonucleotide
  Sense strand starting at position 3307 of SEQ ID NO: 1885798
uaggucuuccuugauuaga

SEQ ID NO: 2368189 - RNA, 19 nt, Artificial Sequence
  Description of Artificial Sequence: Synthetic oligonucleotide
  Antisense strand to SEQ ID NO: 2368188
ucuaaucaaggaagaccua

SEQ ID NO: 2368190 - RNA, 19 nt, Artificial Sequence
  Description of Artificial Sequence: Synthetic oligonucleotide
  Sense strand starting at position 3309 of SEQ ID NO: 1885798
ggucuuccuugauuagaau

SEQ ID NO: 2368191 - RNA, 19 nt, Artificial Sequence
  Description of Artificial Sequence: Synthetic oligonucleotide
  Antisense strand to SEQ ID NO: 2368190
auucuaaucaaggaagacc

SEQ ID NO: 2368192 - RNA, 19 nt, Artificial Sequence
  Description of Artificial Sequence: Synthetic oligonucleotide
  Sense strand starting at position 3310 of SEQ ID NO: 1885798
gucuuccuugauuagaauu

SEQ ID NO: 2368193 - RNA, 19 nt, Artificial Sequence
  Description of Artificial Sequence: Synthetic oligonucleotide
  Antisense strand to SEQ ID NO: 2368192
aauucuaaucaaggaagac

SEQ ID NO: 2368194 - RNA, 19 nt, Artificial Sequence
  Description of Artificial Sequence: Synthetic oligonucleotide
  Sense strand starting at position 3363 of SEQ ID NO: 1885798
ucaccaaugguccauguuu

SEQ ID NO: 2368195 - RNA, 19 nt, Artificial Sequence
  Description of Artificial Sequence: Synthetic oligonucleotide
  Antisense strand to SEQ ID NO: 2368194
aaacauggaccauugguga

SEQ ID NO: 2368196 - RNA, 19 nt, Artificial Sequence
  Description of Artificial Sequence: Synthetic oligonucleotide
  Sense strand starting at position 3365 of SEQ ID NO: 1885798
accaaugguccauguuuga

SEQ ID NO: 2368197 - RNA, 19 nt, Artificial Sequence
  Description of Artificial Sequence: Synthetic oligonucleotide
  Antisense strand to SEQ ID NO: 2368196
ucaaacauggaccauuggu

SEQ ID NO: 2368198 - RNA, 19 nt, Artificial Sequence
  Description of Artificial Sequence: Synthetic oligonucleotide
  Sense strand starting at position 3372 of SEQ ID NO: 1885798
guccauguuugauccuaau

SEQ ID NO: 2368199 - RNA, 19 nt, Artificial Sequence
  Description of Artificial Sequence: Synthetic oligonucleotide
  Antisense strand to SEQ ID NO: 2368198
auuaggaucaaacauggac

SEQ ID NO: 2368200 - RNA, 19 nt, Artificial Sequence
  Description of Artificial Sequence: Synthetic oligonucleotide
  Sense strand starting at position 3829 of SEQ ID NO: 1885798
acguucaugcauggauaga

SEQ ID NO: 2368201 - RNA, 19 nt, Artificial Sequence
  Description of Artificial Sequence: Synthetic oligonucleotide
  Antisense strand to SEQ ID NO: 2368200
ucuauccaugcaugaacgu

SEQ ID NO: 2368202 - RNA, 19 nt, Artificial Sequence
  Description of Artificial Sequence: Synthetic oligonucleotide
  Sense strand starting at position 3919 of SEQ ID NO: 1885798
aucaucauucuucgcagaa

SEQ ID NO: 2368203 - RNA, 19 nt, Artificial Sequence
  Description of Artificial Sequence: Synthetic oligonucleotide
  Antisense strand to SEQ ID NO: 2368202
uucugcgaagaaugaugau

SEQ ID NO: 2368204 - RNA, 19 nt, Artificial Sequence
  Description of Artificial Sequence: Synthetic oligonucleotide
  Sense strand starting at position 129 of SEQ ID NO: 1885799
caguaagccucuccuggau

SEQ ID NO: 2368205 - RNA, 19 nt, Artificial Sequence
  Description of Artificial Sequence: Synthetic oligonucleotide
  Antisense strand to SEQ ID NO: 2368204
auccaggagaggcuuacug

SEQ ID NO: 2368206 - RNA, 19 nt, Artificial Sequence
  Description of Artificial Sequence: Synthetic oligonucleotide
  Sense strand starting at position 318 of SEQ ID NO: 1885799
ucugcuucucccuagagga

SEQ ID NO: 2368207 - RNA, 19 nt, Artificial Sequence
  Description of Artificial Sequence: Synthetic oligonucleotide
  Antisense strand to SEQ ID NO: 2368206
uccucuagggagaagcaga

SEQ ID NO: 2368208 - RNA, 19 nt, Artificial Sequence
  Description of Artificial Sequence: Synthetic oligonucleotide
  Sense strand starting at position 320 of SEQ ID NO: 1885799
ugcuucucccuagaggagu

SEQ ID NO: 2368209 - RNA, 19 nt, Artificial Sequence
  Description of Artificial Sequence: Synthetic oligonucleotide
  Antisense strand to SEQ ID NO: 2368208
acuccucuagggagaagca

SEQ ID NO: 2368210 - RNA, 19 nt, Artificial Sequence
  Description of Artificial Sequence: Synthetic oligonucleotide
  Sense strand starting at position 333 of SEQ ID NO: 1885799
aggagugaauagccuugau

SEQ ID NO: 2368211 - RNA, 19 nt, Artificial Sequence
  Description of Artificial Sequence: Synthetic oligonucleotide
  Antisense strand to SEQ ID NO: 2368210
aucaaggcuauucacuccu

SEQ ID NO: 2368212 - RNA, 19 nt, Artificial Sequence
  Description of Artificial Sequence: Synthetic oligonucleotide
  Sense strand starting at position 336 of SEQ ID NO: 1885799
agugaauagccuugaucuu

SEQ ID NO: 2368213 - RNA, 19 nt, Artificial Sequence
  Description of Artificial Sequence: Synthetic oligonucleotide
  Antisense strand to SEQ ID NO: 2368212
aagaucaaggcuauucacu

SEQ ID NO: 2368214 - RNA, 19 nt, Artificial Sequence
  Description of Artificial Sequence: Synthetic oligonucleotide
  Sense strand starting at position 337 of SEQ ID NO: 1885799
gugaauagccuugaucuuu

SEQ ID NO: 2368215 - RNA, 19 nt, Artificial Sequence
  Description of Artificial Sequence: Synthetic oligonucleotide
  Antisense strand to SEQ ID NO: 2368214
aaagaucaaggcuauucac

SEQ ID NO: 2368216 - RNA, 19 nt, Artificial Sequence
  Description of Artificial Sequence: Synthetic oligonucleotide
  Sense strand starting at position 362 of SEQ ID NO: 1885799
aaagaaauguguguaaauc

SEQ ID NO: 2368217 - RNA, 19 nt, Artificial Sequence
  Description of Artificial Sequence: Synthetic oligonucleotide
  Antisense strand to SEQ ID NO: 2368216
gauuuacacacauuucuuu

SEQ ID NO: 2368218 - RNA, 19 nt, Artificial Sequence
  Description of Artificial Sequence: Synthetic oligonucleotide
  Sense strand starting at position 436 of SEQ ID NO: 1885799
cuccaucauuuguaaugga

SEQ ID NO: 2368219 - RNA, 19 nt, Artificial Sequence
  Description of Artificial Sequence: Synthetic oligonucleotide
  Antisense strand to SEQ ID NO: 2368218
uccauuacaaaugauggag

SEQ ID NO: 2368220 - RNA, 19 nt, Artificial Sequence
  Description of Artificial Sequence: Synthetic oligonucleotide
  Sense strand starting at position 445 of SEQ ID NO: 1885799
uuguaauggaccuaaguug

SEQ ID NO: 2368221 - RNA, 19 nt, Artificial Sequence
  Description of Artificial Sequence: Synthetic oligonucleotide
  Antisense strand to SEQ ID NO: 2368220
caacuuagguccauuacaa

SEQ ID NO: 2368222 - RNA, 19 nt, Artificial Sequence
  Description of Artificial Sequence: Synthetic oligonucleotide
  Sense strand starting at position 453 of SEQ ID NO: 1885799
gaccuaaguugggcugaau

SEQ ID NO: 2368223 - RNA, 19 nt, Artificial Sequence
  Description of Artificial Sequence: Synthetic oligonucleotide
  Antisense strand to SEQ ID NO: 2368222
auucagcccaacuuagguc

SEQ ID NO: 2368224 - RNA, 19 nt, Artificial Sequence
  Description of Artificial Sequence: Synthetic oligonucleotide
  Sense strand starting at position 456 of SEQ ID NO: 1885799
cuaaguugggcugaauuaa

SEQ ID NO: 2368225 - RNA, 19 nt, Artificial Sequence
  Description of Artificial Sequence: Synthetic oligonucleotide
  Antisense strand to SEQ ID NO: 2368224
uuaauucagcccaacuuag

SEQ ID NO: 2368226 - RNA, 19 nt, Artificial Sequence
  Description of Artificial Sequence: Synthetic oligonucleotide
  Sense strand starting at position 542 of SEQ ID NO: 1885799
uauuuagcgguuuauucuu

SEQ ID NO: 2368227 - RNA, 19 nt, Artificial Sequence
  Description of Artificial Sequence: Synthetic oligonucleotide
  Antisense strand to SEQ ID NO: 2368226
aagaauaaaccgcuaaaua

SEQ ID NO: 2368228 - RNA, 19 nt, Artificial Sequence
  Description of Artificial Sequence: Synthetic oligonucleotide
  Sense strand starting at position 659 of SEQ ID NO: 1885799
acaccaaugucuuuauugu

SEQ ID NO: 2368229 - RNA, 19 nt, Artificial Sequence
  Description of Artificial Sequence: Synthetic oligonucleotide
  Antisense strand to SEQ ID NO: 2368228
acaauaaagacauuggugu

SEQ ID NO: 2368230 - RNA, 19 nt, Artificial Sequence
  Description of Artificial Sequence: Synthetic oligonucleotide
  Sense strand starting at position 699 of SEQ ID NO: 1885799
auguucauugugugaagga

SEQ ID NO: 2368231 - RNA, 19 nt, Artificial Sequence
  Description of Artificial Sequence: Synthetic oligonucleotide
  Antisense strand to SEQ ID NO: 2368230
uccuucacacaaugaacau

SEQ ID NO: 2368232 - RNA, 19 nt, Artificial Sequence
  Description of Artificial Sequence: Synthetic oligonucleotide
  Sense strand starting at position 1396 of SEQ ID NO: 1885799
ugacuaauaucuguuugua

SEQ ID NO: 2368233 - RNA, 19 nt, Artificial Sequence
  Description of Artificial Sequence: Synthetic oligonucleotide
  Antisense strand to SEQ ID NO: 2368232
uacaaacagauauuaguca

SEQ ID NO: 2368234 - RNA, 19 nt, Artificial Sequence
  Description of Artificial Sequence: Synthetic oligonucleotide
  Sense strand starting at position 1398 of SEQ ID NO: 1885799
acuaauaucuguuuguaug

SEQ ID NO: 2368235 - RNA, 19 nt, Artificial Sequence
  Description of Artificial Sequence: Synthetic oligonucleotide
  Antisense strand to SEQ ID NO: 2368234
cauacaaacagauauuagu

SEQ ID NO: 2368236 - RNA, 19 nt, Artificial Sequence
  Description of Artificial Sequence: Synthetic oligonucleotide
  Sense strand starting at position 1501 of SEQ ID NO: 1885799
auggucauauucucaguau

SEQ ID NO: 2368237 - RNA, 19 nt, Artificial Sequence
  Description of Artificial Sequence: Synthetic oligonucleotide
  Antisense strand to SEQ ID NO: 2368236
auacugagaauaugaccau

SEQ ID NO: 2368238 - RNA, 19 nt, Artificial Sequence
  Description of Artificial Sequence: Synthetic oligonucleotide
  Sense strand starting at position 1504 of SEQ ID NO: 1885799
gucauauucucaguauuag

SEQ ID NO: 2368239 - RNA, 19 nt, Artificial Sequence
  Description of Artificial Sequence: Synthetic oligonucleotide
  Antisense strand to SEQ ID NO: 2368238
cuaauacugagaauaugac

SEQ ID NO: 2368240 - RNA, 19 nt, Artificial Sequence
  Description of Artificial Sequence: Synthetic oligonucleotide
  Sense strand starting at position 1505 of SEQ ID NO: 1885799
ucauauucucaguauuagu

SEQ ID NO: 2368241 - RNA, 19 nt, Artificial Sequence
  Description of Artificial Sequence: Synthetic oligonucleotide
  Antisense strand to SEQ ID NO: 2368240
acuaauacugagaauauga

SEQ ID NO: 2368242 - RNA, 19 nt, Artificial Sequence
  Description of Artificial Sequence: Synthetic oligonucleotide
  Sense strand starting at position 1647 of SEQ ID NO: 1885799
cgugaaauuagauaugucu

SEQ ID NO: 2368243 - RNA, 19 nt, Artificial Sequence
  Description of Artificial Sequence: Synthetic oligonucleotide
  Antisense strand to SEQ ID NO: 2368242
agacauaucuaauuucacg

SEQ ID NO: 2368244 - RNA, 19 nt, Artificial Sequence
  Description of Artificial Sequence: Synthetic oligonucleotide
  Sense strand starting at position 1851 of SEQ ID NO: 1885799
agaaucagaucuuuggcua

SEQ ID NO: 2368245 - RNA, 19 nt, Artificial Sequence
  Description of Artificial Sequence: Synthetic oligonucleotide
  Antisense strand to SEQ ID NO: 2368244
uagccaaagaucugauucu

SEQ ID NO: 2368246 - RNA, 19 nt, Artificial Sequence
  Description of Artificial Sequence: Synthetic oligonucleotide
  Sense strand starting at position 1905 of SEQ ID NO: 1885799
cgaaauaacuaguuucuuu

SEQ ID NO: 2368247 - RNA, 19 nt, Artificial Sequence
  Description of Artificial Sequence: Synthetic oligonucleotide
  Antisense strand to SEQ ID NO: 2368246
aaagaaacuaguuauuucg

SEQ ID NO: 2368248 - RNA, 19 nt, Artificial Sequence
  Description of Artificial Sequence: Synthetic oligonucleotide
  Sense strand starting at position 1986 of SEQ ID NO: 1885799
acuaaugauuggcuauacu

SEQ ID NO: 2368249 - RNA, 19 nt, Artificial Sequence
  Description of Artificial Sequence: Synthetic oligonucleotide
  Antisense strand to SEQ ID NO: 2368248
aguauagccaaucauuagu

SEQ ID NO: 2368250 - RNA, 19 nt, Artificial Sequence
  Description of Artificial Sequence: Synthetic oligonucleotide
  Sense strand starting at position 2118 of SEQ ID NO: 1885799
uuguauauauguccauuga

SEQ ID NO: 2368251 - RNA, 19 nt, Artificial Sequence
  Description of Artificial Sequence: Synthetic oligonucleotide
  Antisense strand to SEQ ID NO: 2368250
ucaauggacauauauacaa

SEQ ID NO: 2368252 - RNA, 19 nt, Artificial Sequence
  Description of Artificial Sequence: Synthetic oligonucleotide
  Sense strand starting at position 2119 of SEQ ID NO: 1885799
uguauauauguccauugac

SEQ ID NO: 2368253 - RNA, 19 nt, Artificial Sequence
  Description of Artificial Sequence: Synthetic oligonucleotide
  Antisense strand to SEQ ID NO: 2368252
gucaauggacauauauaca

SEQ ID NO: 2368254 - RNA, 19 nt, Artificial Sequence
  Description of Artificial Sequence: Synthetic oligonucleotide
  Sense strand starting at position 2141 of SEQ ID NO: 1885799
agagcuaauagauggaagu

SEQ ID NO: 2368255 - RNA, 19 nt, Artificial Sequence
  Description of Artificial Sequence: Synthetic oligonucleotide
  Antisense strand to SEQ ID NO: 2368254
acuuccaucuauuagcucu

SEQ ID NO: 2368256 - RNA, 19 nt, Artificial Sequence
  Description of Artificial Sequence: Synthetic oligonucleotide
  Sense strand starting at position 2441 of SEQ ID NO: 1885799
acugaaucacaacgcaaua

SEQ ID NO: 2368257 - RNA, 19 nt, Artificial Sequence
  Description of Artificial Sequence: Synthetic oligonucleotide
  Antisense strand to SEQ ID NO: 2368256
uauugcguugugauucagu

SEQ ID NO: 2368258 - RNA, 19 nt, Artificial Sequence
  Description of Artificial Sequence: Synthetic oligonucleotide
  Sense strand starting at position 2737 of SEQ ID NO: 1885799
aggcaagaucuuuagcauu

SEQ ID NO: 2368259 - RNA, 19 nt, Artificial Sequence
  Description of Artificial Sequence: Synthetic oligonucleotide
  Antisense strand to SEQ ID NO: 2368258
aaugcuaaagaucuugccu

SEQ ID NO: 2368260 - RNA, 19 nt, Artificial Sequence
  Description of Artificial Sequence: Synthetic oligonucleotide
  Sense strand starting at position 2739 of SEQ ID NO: 1885799
gcaagaucuuuagcauuag

SEQ ID NO: 2368261 - RNA, 19 nt, Artificial Sequence
  Description of Artificial Sequence: Synthetic oligonucleotide
  Antisense strand to SEQ ID NO: 2368260
cuaaugcuaaagaucuugc

SEQ ID NO: 2368262 - RNA, 19 nt, Artificial Sequence
  Description of Artificial Sequence: Synthetic oligonucleotide
  Sense strand starting at position 2787 of SEQ ID NO: 1885799
ugugcucauuuggugaagu

SEQ ID NO: 2368263 - RNA, 19 nt, Artificial Sequence
  Description of Artificial Sequence: Synthetic oligonucleotide
  Antisense strand to SEQ ID NO: 2368262
acuucaccaaaugagcaca

SEQ ID NO: 2368264 - RNA, 19 nt, Artificial Sequence
  Description of Artificial Sequence: Synthetic oligonucleotide
  Sense strand starting at position 2870 of SEQ ID NO: 1885799
gcaguauuagauuaaucau

SEQ ID NO: 2368265 - RNA, 19 nt, Artificial Sequence
  Description of Artificial Sequence: Synthetic oligonucleotide
  Antisense strand to SEQ ID NO: 2368264
augauuaaucuaauacugc

SEQ ID NO: 2368266 - RNA, 19 nt, Artificial Sequence
  Description of Artificial Sequence: Synthetic oligonucleotide
  Sense strand starting at position 2885 of SEQ ID NO: 1885799
ucauaaacuucggucaucu

SEQ ID NO: 2368267 - RNA, 19 nt, Artificial Sequence
  Description of Artificial Sequence: Synthetic oligonucleotide
  Antisense strand to SEQ ID NO: 2368266
agaugaccgaaguuuauga

SEQ ID NO: 2368268 - RNA, 19 nt, Artificial Sequence
  Description of Artificial Sequence: Synthetic oligonucleotide
  Sense strand starting at position 2887 of SEQ ID NO: 1885799
auaaacuucggucaucuca

SEQ ID NO: 2368269 - RNA, 19 nt, Artificial Sequence
  Description of Artificial Sequence: Synthetic oligonucleotide
  Antisense strand to SEQ ID NO: 2368268
ugagaugaccgaaguuuau

SEQ ID NO: 2368270 - RNA, 19 nt, Artificial Sequence
  Description of Artificial Sequence: Synthetic oligonucleotide
  Sense strand starting at position 3044 of SEQ ID NO: 1885799
ccagauaggugaucacuuu

SEQ ID NO: 2368271 - RNA, 19 nt, Artificial Sequence
  Description of Artificial Sequence: Synthetic oligonucleotide
  Antisense strand to SEQ ID NO: 2368270
aaagugaucaccuaucugg

SEQ ID NO: 2368272 - RNA, 19 nt, Artificial Sequence
  Description of Artificial Sequence: Synthetic oligonucleotide
  Sense strand starting at position 3113 of SEQ ID NO: 1885799
ggcauauucucauuaauga

SEQ ID NO: 2368273 - RNA, 19 nt, Artificial Sequence
  Description of Artificial Sequence: Synthetic oligonucleotide
  Antisense strand to SEQ ID NO: 2368272
ucauuaaugagaauaugcc

SEQ ID NO: 2368274 - RNA, 19 nt, Artificial Sequence
  Description of Artificial Sequence: Synthetic oligonucleotide
  Sense strand starting at position 3315 of SEQ ID NO: 1885799
uggaguaaucauuaucuuu

SEQ ID NO: 2368275 - RNA, 19 nt, Artificial Sequence
  Description of Artificial Sequence: Synthetic oligonucleotide
  Antisense strand to SEQ ID NO: 2368274
aaagauaaugauuacucca

SEQ ID NO: 2368276 - RNA, 19 nt, Artificial Sequence
  Description of Artificial Sequence: Synthetic oligonucleotide
  Sense strand starting at position 3467 of SEQ ID NO: 1885799
cugucaauaucugucuaca

SEQ ID NO: 2368277 - RNA, 19 nt, Artificial Sequence
  Description of Artificial Sequence: Synthetic oligonucleotide
  Antisense strand to SEQ ID NO: 2368276
uguagacagauauugacag

SEQ ID NO: 2368278 - RNA, 19 nt, Artificial Sequence
  Description of Artificial Sequence: Synthetic oligonucleotide
  Sense strand starting at position 3469 of SEQ ID NO: 1885799
gucaauaucugucuacaua

SEQ ID NO: 2368279 - RNA, 19 nt, Artificial Sequence
  Description of Artificial Sequence: Synthetic oligonucleotide
  Antisense strand to SEQ ID NO: 2368278
uauguagacagauauugac

SEQ ID NO: 2368280 - RNA, 19 nt, Artificial Sequence
  Description of Artificial Sequence: Synthetic oligonucleotide
  Sense strand starting at position 3755 of SEQ ID NO: 1885799
guagaacgggauuagucau

SEQ ID NO: 2368281 - RNA, 19 nt, Artificial Sequence
  Description of Artificial Sequence: Synthetic oligonucleotide
  Antisense strand to SEQ ID NO: 2368280
augacuaaucccguucuac

SEQ ID NO: 2368282 - RNA, 19 nt, Artificial Sequence
  Description of Artificial Sequence: Synthetic oligonucleotide
  Sense strand starting at position 3809 of SEQ ID NO: 1885799
agaguuggcccuugagaua

SEQ ID NO: 2368283 - RNA, 19 nt, Artificial Sequence
  Description of Artificial Sequence: Synthetic oligonucleotide
  Antisense strand to SEQ ID NO: 2368282
uaucucaagggccaacucu

SEQ ID NO: 2368284 - RNA, 19 nt, Artificial Sequence
  Description of Artificial Sequence: Synthetic oligonucleotide
  Sense strand starting at position 123 of SEQ ID NO: 1885800
gaggaaauauaaguuagcu

SEQ ID NO: 2368285 - RNA, 19 nt, Artificial Sequence
  Description of Artificial Sequence: Synthetic oligonucleotide
  Antisense strand to SEQ ID NO: 2368284
agcuaacuuauauuuccuc

SEQ ID NO: 2368286 - RNA, 19 nt, Artificial Sequence
  Description of Artificial Sequence: Synthetic oligonucleotide
  Sense strand starting at position 220 of SEQ ID NO: 1885800
cucaguugugucgaaugga

SEQ ID NO: 2368287 - RNA, 19 nt, Artificial Sequence
  Description of Artificial Sequence: Synthetic oligonucleotide
  Antisense strand to SEQ ID NO: 2368286
uccauucgacacaacugag

SEQ ID NO: 2368288 - RNA, 19 nt, Artificial Sequence
  Description of Artificial Sequence: Synthetic oligonucleotide
  Sense strand starting at position 544 of SEQ ID NO: 1885800
ucagguauggugcaucuau

SEQ ID NO: 2368289 - RNA, 19 nt, Artificial Sequence
  Description of Artificial Sequence: Synthetic oligonucleotide
  Antisense strand to SEQ ID NO: 2368288
auagaugcaccauaccuga

SEQ ID NO: 2368290 - RNA, 19 nt, Artificial Sequence
  Description of Artificial Sequence: Synthetic oligonucleotide
  Sense strand starting at position 555 of SEQ ID NO: 1885800
gcaucuauuguguaaagua

SEQ ID NO: 2368291 - RNA, 19 nt, Artificial Sequence
  Description of Artificial Sequence: Synthetic oligonucleotide
  Antisense strand to SEQ ID NO: 2368290
uacuuuacacaauagaugc

SEQ ID NO: 2368292 - RNA, 19 nt, Artificial Sequence
  Description of Artificial Sequence: Synthetic oligonucleotide
  Sense strand starting at position 619 of SEQ ID NO: 1885800
aagggacauuuguaggaca

SEQ ID NO: 2368293 - RNA, 19 nt, Artificial Sequence
  Description of Artificial Sequence: Synthetic oligonucleotide
  Antisense strand to SEQ ID NO: 2368292
uguccuacaaaugucccuu

SEQ ID NO: 2368294 - RNA, 19 nt, Artificial Sequence
  Description of Artificial Sequence: Synthetic oligonucleotide
  Sense strand starting at position 622 of SEQ ID NO: 1885800
ggacauuuguaggacagua

SEQ ID NO: 2368295 - RNA, 19 nt, Artificial Sequence
  Description of Artificial Sequence: Synthetic oligonucleotide
  Antisense strand to SEQ ID NO: 2368294
uacuguccuacaaaugucc

SEQ ID NO: 2368296 - RNA, 19 nt, Artificial Sequence
  Description of Artificial Sequence: Synthetic oligonucleotide
  Sense strand starting at position 816 of SEQ ID NO: 1885800
ggaucucauuuauacagua

SEQ ID NO: 2368297 - RNA, 19 nt, Artificial Sequence
  Description of Artificial Sequence: Synthetic oligonucleotide
  Antisense strand to SEQ ID NO: 2368296
uacuguauaaaugagaucc

SEQ ID NO: 2368298 - RNA, 19 nt, Artificial Sequence
  Description of Artificial Sequence: Synthetic oligonucleotide
  Sense strand starting at position 945 of SEQ ID NO: 1885800
uuuaguaaguacucaugaa

SEQ ID NO: 2368299 - RNA, 19 nt, Artificial Sequence
  Description of Artificial Sequence: Synthetic oligonucleotide
  Antisense strand to SEQ ID NO: 2368298
uucaugaguacuuacuaaa

SEQ ID NO: 2368300 - RNA, 19 nt, Artificial Sequence
  Description of Artificial Sequence: Synthetic oligonucleotide
  Sense strand starting at position 993 of SEQ ID NO: 1885800
guaugaucagcccaucaac

SEQ ID NO: 2368301 - RNA, 19 nt, Artificial Sequence
  Description of Artificial Sequence: Synthetic oligonucleotide
  Antisense strand to SEQ ID NO: 2368300
guugaugggcugaucauac

SEQ ID NO: 2368302 - RNA, 19 nt, Artificial Sequence
  Description of Artificial Sequence: Synthetic oligonucleotide
  Sense strand starting at position 1235 of SEQ ID NO: 1885800
uuugccaaagucugaagaa

SEQ ID NO: 2368303 - RNA, 19 nt, Artificial Sequence
  Description of Artificial Sequence: Synthetic oligonucleotide
  Antisense strand to SEQ ID NO: 2368302
uucuucagacuuuggcaaa

SEQ ID NO: 2368304 - RNA, 19 nt, Artificial Sequence
  Description of Artificial Sequence: Synthetic oligonucleotide
  Sense strand starting at position 1247 of SEQ ID NO: 1885800
ugaagaaauguuugaucgu

SEQ ID NO: 2368305 - RNA, 19 nt, Artificial Sequence
  Description of Artificial Sequence: Synthetic oligonucleotide
  Antisense strand to SEQ ID NO: 2368304
acgaucaaacauuucuuca

SEQ ID NO: 2368306 - RNA, 19 nt, Artificial Sequence
  Description of Artificial Sequence: Synthetic oligonucleotide
  Sense strand starting at position 1250 of SEQ ID NO: 1885800
agaaauguuugaucgucac

SEQ ID NO: 2368307 - RNA, 19 nt, Artificial Sequence
  Description of Artificial Sequence: Synthetic oligonucleotide
  Antisense strand to SEQ ID NO: 2368306
gugacgaucaaacauuucu

SEQ ID NO: 2368308 - RNA, 19 nt, Artificial Sequence
  Description of Artificial Sequence: Synthetic oligonucleotide
  Sense strand starting at position 1279 of SEQ ID NO: 1885800
gggucaacauuggcaucua

SEQ ID NO: 2368309 - RNA, 19 nt, Artificial Sequence
  Description of Artificial Sequence: Synthetic oligonucleotide
  Antisense strand to SEQ ID NO: 2368308
uagaugccaauguugaccc

SEQ ID NO: 2368310 - RNA, 19 nt, Artificial Sequence
  Description of Artificial Sequence: Synthetic oligonucleotide
  Sense strand starting at position 1288 of SEQ ID NO: 1885800
uuggcaucuacugaguaga

SEQ ID NO: 2368311 - RNA, 19 nt, Artificial Sequence
  Description of Artificial Sequence: Synthetic oligonucleotide
  Antisense strand to SEQ ID NO: 2368310
ucuacucaguagaugccaa

SEQ ID NO: 2368312 - RNA, 19 nt, Artificial Sequence
  Description of Artificial Sequence: Synthetic oligonucleotide
  Sense strand starting at position 1301 of SEQ ID NO: 1885800
aguagaagccaaugaaguu

SEQ ID NO: 2368313 - RNA, 19 nt, Artificial Sequence
  Description of Artificial Sequence: Synthetic oligonucleotide
  Antisense strand to SEQ ID NO: 2368312
aacuucauuggcuucuacu

SEQ ID NO: 2368314 - RNA, 19 nt, Artificial Sequence
  Description of Artificial Sequence: Synthetic oligonucleotide
  Sense strand starting at position 1302 of SEQ ID NO: 1885800
guagaagccaaugaaguua

SEQ ID NO: 2368315 - RNA, 19 nt, Artificial Sequence
  Description of Artificial Sequence: Synthetic oligonucleotide
  Antisense strand to SEQ ID NO: 2368314
uaacuucauuggcuucuac

SEQ ID NO: 2368316 - RNA, 19 nt, Artificial Sequence
  Description of Artificial Sequence: Synthetic oligonucleotide
  Sense strand starting at position 1495 of SEQ ID NO: 1885800
cagaaauaugaauggcguu

SEQ ID NO: 2368317 - RNA, 19 nt, Artificial Sequence
  Description of Artificial Sequence: Synthetic oligonucleotide
  Antisense strand to SEQ ID NO: 2368316
aacgccauucauauuucug

SEQ ID NO: 2368318 - RNA, 19 nt, Artificial Sequence
  Description of Artificial Sequence: Synthetic oligonucleotide
  Sense strand starting at position 1496 of SEQ ID NO: 1885800
agaaauaugaauggcguua

SEQ ID NO: 2368319 - RNA, 19 nt, Artificial Sequence
  Description of Artificial Sequence: Synthetic oligonucleotide
  Antisense strand to SEQ ID NO: 2368318
uaacgccauucauauuucu

SEQ ID NO: 2368320 - RNA, 19 nt, Artificial Sequence
  Description of Artificial Sequence: Synthetic oligonucleotide
  Sense strand starting at position 1517 of SEQ ID NO: 1885800
accugucauuugcucauga

SEQ ID NO: 2368321 - RNA, 19 nt, Artificial Sequence
  Description of Artificial Sequence: Synthetic oligonucleotide
  Antisense strand to SEQ ID NO: 2368320
ucaugagcaaaugacaggu

SEQ ID NO: 2368322 - RNA, 19 nt, Artificial Sequence
  Description of Artificial Sequence: Synthetic oligonucleotide
  Sense strand starting at position 1518 of SEQ ID NO: 1885800
ccugucauuugcucaugau

SEQ ID NO: 2368323 - RNA, 19 nt, Artificial Sequence
  Description of Artificial Sequence: Synthetic oligonucleotide
  Antisense strand to SEQ ID NO: 2368322
aucaugagcaaaugacagg

SEQ ID NO: 2368324 - RNA, 19 nt, Artificial Sequence
  Description of Artificial Sequence: Synthetic oligonucleotide
  Sense strand starting at position 1527 of SEQ ID NO: 1885800
ugcucaugauucccagacu

SEQ ID NO: 2368325 - RNA, 19 nt, Artificial Sequence
  Description of Artificial Sequence: Synthetic oligonucleotide
  Antisense strand to SEQ ID NO: 2368324
agucugggaaucaugagca

SEQ ID NO: 2368326 - RNA, 19 nt, Artificial Sequence
  Description of Artificial Sequence: Synthetic oligonucleotide
  Sense strand starting at position 1649 of SEQ ID NO: 1885800
ccaaauagguaucagauuu

SEQ ID NO: 2368327 - RNA, 19 nt, Artificial Sequence
  Description of Artificial Sequence: Synthetic oligonucleotide
  Antisense strand to SEQ ID NO: 2368326
aaaucugauaccuauuugg

SEQ ID NO: 2368328 - RNA, 19 nt, Artificial Sequence
  Description of Artificial Sequence: Synthetic oligonucleotide
  Sense strand starting at position 2128 of SEQ ID NO: 1885800
ugagaucuauaagcuuauu

SEQ ID NO: 2368329 - RNA, 19 nt, Artificial Sequence
  Description of Artificial Sequence: Synthetic oligonucleotide
  Antisense strand to SEQ ID NO: 2368328
aauaagcuuauagaucuca

SEQ ID NO: 2368330 - RNA, 19 nt, Artificial Sequence
  Description of Artificial Sequence: Synthetic oligonucleotide
  Sense strand starting at position 2407 of SEQ ID NO: 1885800
uguggaaaugaugguguau

SEQ ID NO: 2368331 - RNA, 19 nt, Artificial Sequence
  Description of Artificial Sequence: Synthetic oligonucleotide
  Antisense strand to SEQ ID NO: 2368330
auacaccaucauuuccaca

SEQ ID NO: 2368332 - RNA, 19 nt, Artificial Sequence
  Description of Artificial Sequence: Synthetic oligonucleotide
  Sense strand starting at position 2422 of SEQ ID NO: 1885800
guaugacuucuggagcuag

SEQ ID NO: 2368333 - RNA, 19 nt, Artificial Sequence
  Description of Artificial Sequence: Synthetic oligonucleotide
  Antisense strand to SEQ ID NO: 2368332
cuagcuccagaagucauac

SEQ ID NO: 2368334 - RNA, 19 nt, Artificial Sequence
  Description of Artificial Sequence: Synthetic oligonucleotide
  Sense strand starting at position 2529 of SEQ ID NO: 1885800
agcaguccugaggaagagu

SEQ ID NO: 2368335 - RNA, 19 nt, Artificial Sequence
  Description of Artificial Sequence: Synthetic oligonucleotide
  Antisense strand to SEQ ID NO: 2368334
acucuuccucaggacugcu

SEQ ID NO: 2368336 - RNA, 19 nt, Artificial Sequence
  Description of Artificial Sequence: Synthetic oligonucleotide
  Sense strand starting at position 2544 of SEQ ID NO: 1885800
gagucuauuugugaagaaa

SEQ ID NO: 2368337 - RNA, 19 nt, Artificial Sequence
  Description of Artificial Sequence: Synthetic oligonucleotide
  Antisense strand to SEQ ID NO: 2368336
uuucuucacaaauagacuc

SEQ ID NO: 2368338 - RNA, 19 nt, Artificial Sequence
  Description of Artificial Sequence: Synthetic oligonucleotide
  Sense strand starting at position 2895 of SEQ ID NO: 1885800
ucugcuucucccuagagga

SEQ ID NO: 2368339 - RNA, 19 nt, Artificial Sequence
  Description of Artificial Sequence: Synthetic oligonucleotide
  Antisense strand to SEQ ID NO: 2368338
uccucuagggagaagcaga

SEQ ID NO: 2368340 - RNA, 19 nt, Artificial Sequence
  Description of Artificial Sequence: Synthetic oligonucleotide
  Sense strand starting at position 2897 of SEQ ID NO: 1885800
ugcuucucccuagaggagu

SEQ ID NO: 2368341 - RNA, 19 nt, Artificial Sequence
  Description of Artificial Sequence: Synthetic oligonucleotide
  Antisense strand to SEQ ID NO: 2368340
acuccucuagggagaagca

SEQ ID NO: 2368342 - RNA, 19 nt, Artificial Sequence
  Description of Artificial Sequence: Synthetic oligonucleotide
  Sense strand starting at position 2910 of SEQ ID NO: 1885800
aggagugaauagccuugau

SEQ ID NO: 2368343 - RNA, 19 nt, Artificial Sequence
  Description of Artificial Sequence: Synthetic oligonucleotide
  Antisense strand to SEQ ID NO: 2368342
aucaaggcuauucacuccu

SEQ ID NO: 2368344 - RNA, 19 nt, Artificial Sequence
  Description of Artificial Sequence: Synthetic oligonucleotide
  Sense strand starting at position 2913 of SEQ ID NO: 1885800
agugaauagccuugaucuu

SEQ ID NO: 2368345 - RNA, 19 nt, Artificial Sequence
  Description of Artificial Sequence: Synthetic oligonucleotide
  Antisense strand to SEQ ID NO: 2368344
aagaucaaggcuauucacu

SEQ ID NO: 2368346 - RNA, 19 nt, Artificial Sequence
  Description of Artificial Sequence: Synthetic oligonucleotide
  Sense strand starting at position 2914 of SEQ ID NO: 1885800
gugaauagccuugaucuuu

SEQ ID NO: 2368347 - RNA, 19 nt, Artificial Sequence
  Description of Artificial Sequence: Synthetic oligonucleotide
  Antisense strand to SEQ ID NO: 2368346
aaagaucaaggcuauucac

SEQ ID NO: 2368348 - RNA, 19 nt, Artificial Sequence
  Description of Artificial Sequence: Synthetic oligonucleotide
  Sense strand starting at position 2939 of SEQ ID NO: 1885800
aaagaaauguguguaaauc

SEQ ID NO: 2368349 - RNA, 19 nt, Artificial Sequence
  Description of Artificial Sequence: Synthetic oligonucleotide
  Antisense strand to SEQ ID NO: 2368348
gauuuacacacauuucuuu

SEQ ID NO: 2368350 - RNA, 19 nt, Artificial Sequence
  Description of Artificial Sequence: Synthetic oligonucleotide
  Sense strand starting at position 3022 of SEQ ID NO: 1885800
uuguaauggaccuaaguug

SEQ ID NO: 2368351 - RNA, 19 nt, Artificial Sequence
  Description of Artificial Sequence: Synthetic oligonucleotide
  Antisense strand to SEQ ID NO: 2368350
caacuuagguccauuacaa

SEQ ID NO: 2368352 - RNA, 19 nt, Artificial Sequence
  Description of Artificial Sequence: Synthetic oligonucleotide
  Sense strand starting at position 3030 of SEQ ID NO: 1885800
gaccuaaguugggcugaau

SEQ ID NO: 2368353 - RNA, 19 nt, Artificial Sequence
  Description of Artificial Sequence: Synthetic oligonucleotide
  Antisense strand to SEQ ID NO: 2368352
auucagcccaacuuagguc

SEQ ID NO: 2368354 - RNA, 19 nt, Artificial Sequence
  Description of Artificial Sequence: Synthetic oligonucleotide
  Sense strand starting at position 3033 of SEQ ID NO: 1885800
cuaaguugggcugaauuaa

SEQ ID NO: 2368355 - RNA, 19 nt, Artificial Sequence
  Description of Artificial Sequence: Synthetic oligonucleotide
  Antisense strand to SEQ ID NO: 2368354
uuaauucagcccaacuuag

SEQ ID NO: 2368356 - RNA, 19 nt, Artificial Sequence
  Description of Artificial Sequence: Synthetic oligonucleotide
  Sense strand starting at position 3119 of SEQ ID NO: 1885800
uauuuagcgguuuauucuu

SEQ ID NO: 2368357 - RNA, 19 nt, Artificial Sequence
  Description of Artificial Sequence: Synthetic oligonucleotide
  Antisense strand to SEQ ID NO: 2368356
aagaauaaaccgcuaaaua

SEQ ID NO: 2368358 - RNA, 19 nt, Artificial Sequence
  Description of Artificial Sequence: Synthetic oligonucleotide
  Sense strand starting at position 3276 of SEQ ID NO: 1885800
auguucauugugugaagga

SEQ ID NO: 2368359 - RNA, 19 nt, Artificial Sequence
  Description of Artificial Sequence: Synthetic oligonucleotide
  Antisense strand to SEQ ID NO: 2368358
uccuucacacaaugaacau

SEQ ID NO: 2368360 - RNA, 19 nt, Artificial Sequence
  Description of Artificial Sequence: Synthetic oligonucleotide
  Sense strand starting at position 3973 of SEQ ID NO: 1885800
ugacuaauaucuguuugua

SEQ ID NO: 2368361 - RNA, 19 nt, Artificial Sequence
  Description of Artificial Sequence: Synthetic oligonucleotide
  Antisense strand to SEQ ID NO: 2368360
uacaaacagauauuaguca

SEQ ID NO: 2368362 - RNA, 19 nt, Artificial Sequence
  Description of Artificial Sequence: Synthetic oligonucleotide
  Sense strand starting at position 3975 of SEQ ID NO: 1885800
acuaauaucuguuuguaug

SEQ ID NO: 2368363 - RNA, 19 nt, Artificial Sequence
  Description of Artificial Sequence: Synthetic oligonucleotide
  Antisense strand to SEQ ID NO: 2368362
cauacaaacagauauuagu

SEQ ID NO: 2368364 - RNA, 19 nt, Artificial Sequence
  Description of Artificial Sequence: Synthetic oligonucleotide
  Sense strand starting at position 85 of SEQ ID NO: 1885801
uucucuauuuacgcauuga

SEQ ID NO: 2368365 - RNA, 19 nt, Artificial Sequence
  Description of Artificial Sequence: Synthetic oligonucleotide
  Antisense strand to SEQ ID NO: 2368364
ucaaugcguaaauagagaa

SEQ ID NO: 2368366 - RNA, 19 nt, Artificial Sequence
  Description of Artificial Sequence: Synthetic oligonucleotide
  Sense strand starting at position 203 of SEQ ID NO: 1885801
aauauaggcugguucucau

SEQ ID NO: 2368367 - RNA, 19 nt, Artificial Sequence
  Description of Artificial Sequence: Synthetic oligonucleotide
  Antisense strand to SEQ ID NO: 2368366
augagaaccagccuauauu

SEQ ID NO: 2368368 - RNA, 19 nt, Artificial Sequence
  Description of Artificial Sequence: Synthetic oligonucleotide
  Sense strand starting at position 494 of SEQ ID NO: 1885801
ugugaucaaccucaaguuu

SEQ ID NO: 2368369 - RNA, 19 nt, Artificial Sequence
  Description of Artificial Sequence: Synthetic oligonucleotide
  Antisense strand to SEQ ID NO: 2368368
aaacuugagguugaucaca

SEQ ID NO: 2368370 - RNA, 19 nt, Artificial Sequence
  Description of Artificial Sequence: Synthetic oligonucleotide
  Sense strand starting at position 531 of SEQ ID NO: 1885801
gcgacucugcugcauuuaa

SEQ ID NO: 2368371 - RNA, 19 nt, Artificial Sequence
  Description of Artificial Sequence: Synthetic oligonucleotide
  Antisense strand to SEQ ID NO: 2368370
uuaaaugcagcagagucgc

SEQ ID NO: 2368372 - RNA, 19 nt, Artificial Sequence
  Description of Artificial Sequence: Synthetic oligonucleotide
  Sense strand starting at position 604 of SEQ ID NO: 1885801
ucauuaaugugauugcaaa

SEQ ID NO: 2368373 - RNA, 19 nt, Artificial Sequence
  Description of Artificial Sequence: Synthetic oligonucleotide
  Antisense strand to SEQ ID NO: 2368372
uuugcaaucacauuaauga

SEQ ID NO: 2368374 - RNA, 19 nt, Artificial Sequence
  Description of Artificial Sequence: Synthetic oligonucleotide
  Sense strand starting at position 612 of SEQ ID NO: 1885801
gugauugcaaaccauggau

SEQ ID NO: 2368375 - RNA, 19 nt, Artificial Sequence
  Description of Artificial Sequence: Synthetic oligonucleotide
  Antisense strand to SEQ ID NO: 2368374
auccaugguuugcaaucac

SEQ ID NO: 2368376 - RNA, 19 nt, Artificial Sequence
  Description of Artificial Sequence: Synthetic oligonucleotide
  Sense strand starting at position 615 of SEQ ID NO: 1885801
auugcaaaccauggaucua

SEQ ID NO: 2368377 - RNA, 19 nt, Artificial Sequence
  Description of Artificial Sequence: Synthetic oligonucleotide
  Antisense strand to SEQ ID NO: 2368376
uagauccaugguuugcaau

SEQ ID NO: 2368378 - RNA, 19 nt, Artificial Sequence
  Description of Artificial Sequence: Synthetic oligonucleotide
  Sense strand starting at position 712 of SEQ ID NO: 1885801
augucuguccgugaaggaa

SEQ ID NO: 2368379 - RNA, 19 nt, Artificial Sequence
  Description of Artificial Sequence: Synthetic oligonucleotide
  Antisense strand to SEQ ID NO: 2368378
uuccuucacggacagacau

SEQ ID NO: 2368380 - RNA, 19 nt, Artificial Sequence
  Description of Artificial Sequence: Synthetic oligonucleotide
  Sense strand starting at position 721 of SEQ ID NO: 1885801
cgugaaggaauauguuaag

SEQ ID NO: 2368381 - RNA, 19 nt, Artificial Sequence
  Description of Artificial Sequence: Synthetic oligonucleotide
  Antisense strand to SEQ ID NO: 2368380
cuuaacauauuccuucacg

SEQ ID NO: 2368382 - RNA, 19 nt, Artificial Sequence
  Description of Artificial Sequence: Synthetic oligonucleotide
  Sense strand starting at position 727 of SEQ ID NO: 1885801
ggaauauguuaagcaacua

SEQ ID NO: 2368383 - RNA, 19 nt, Artificial Sequence
  Description of Artificial Sequence: Synthetic oligonucleotide
  Antisense strand to SEQ ID NO: 2368382
uaguugcuuaacauauucc

SEQ ID NO: 2368384 - RNA, 19 nt, Artificial Sequence
  Description of Artificial Sequence: Synthetic oligonucleotide
  Sense strand starting at position 945 of SEQ ID NO: 1885801
guggguucccaugaaugaa

SEQ ID NO: 2368385 - RNA, 19 nt, Artificial Sequence
  Description of Artificial Sequence: Synthetic oligonucleotide
  Antisense strand to SEQ ID NO: 2368384
uucauucaugggaacccac

SEQ ID NO: 2368386 - RNA, 19 nt, Artificial Sequence
  Description of Artificial Sequence: Synthetic oligonucleotide
  Sense strand starting at position 1171 of SEQ ID NO: 1885801
agaaacuacuuggaaagaa

SEQ ID NO: 2368387 - RNA, 19 nt, Artificial Sequence
  Description of Artificial Sequence: Synthetic oligonucleotide
  Antisense strand to SEQ ID NO: 2368386
uucuuuccaaguaguuucu

SEQ ID NO: 2368388 - RNA, 19 nt, Artificial Sequence
  Description of Artificial Sequence: Synthetic oligonucleotide
  Sense strand starting at position 1181 of SEQ ID NO: 1885801
uggaaagaaccauguaugu

SEQ ID NO: 2368389 - RNA, 19 nt, Artificial Sequence
  Description of Artificial Sequence: Synthetic oligonucleotide
  Antisense strand to SEQ ID NO: 2368388
acauacaugguucuuucca

SEQ ID NO: 2368390 - RNA, 19 nt, Artificial Sequence
  Description of Artificial Sequence: Synthetic oligonucleotide
  Sense strand starting at position 1295 of SEQ ID NO: 1885801
uccuaauugguccaugguu

SEQ ID NO: 2368391 - RNA, 19 nt, Artificial Sequence
  Description of Artificial Sequence: Synthetic oligonucleotide
  Antisense strand to SEQ ID NO: 2368390
aaccauggaccaauuagga

SEQ ID NO: 2368392 - RNA, 19 nt, Artificial Sequence
  Description of Artificial Sequence: Synthetic oligonucleotide
  Sense strand starting at position 1308 of SEQ ID NO: 1885801
augguuugcugacucuaaa

SEQ ID NO: 2368393 - RNA, 19 nt, Artificial Sequence
  Description of Artificial Sequence: Synthetic oligonucleotide
  Antisense strand to SEQ ID NO: 2368392
uuuagagucagcaaaccau

SEQ ID NO: 2368394 - RNA, 19 nt, Artificial Sequence
  Description of Artificial Sequence: Synthetic oligonucleotide
  Sense strand starting at position 1372 of SEQ ID NO: 1885801
agacaucaguaucugugau

SEQ ID NO: 2368395 - RNA, 19 nt, Artificial Sequence
  Description of Artificial Sequence: Synthetic oligonucleotide
  Antisense strand to SEQ ID NO: 2368394
aucacagauacugaugucu

SEQ ID NO: 2368396 - RNA, 19 nt, Artificial Sequence
  Description of Artificial Sequence: Synthetic oligonucleotide
  Sense strand starting at position 1374 of SEQ ID NO: 1885801
acaucaguaucugugaucu

SEQ ID NO: 2368397 - RNA, 19 nt, Artificial Sequence
  Description of Artificial Sequence: Synthetic oligonucleotide
  Antisense strand to SEQ ID NO: 2368396
agaucacagauacugaugu

SEQ ID NO: 2368398 - RNA, 19 nt, Artificial Sequence
  Description of Artificial Sequence: Synthetic oligonucleotide
  Sense strand starting at position 1423 of SEQ ID NO: 1885801
uuuacaucugucuagaguu

SEQ ID NO: 2368399 - RNA, 19 nt, Artificial Sequence
  Description of Artificial Sequence: Synthetic oligonucleotide
  Antisense strand to SEQ ID NO: 2368398
aacucuagacagauguaaa

SEQ ID NO: 2368400 - RNA, 19 nt, Artificial Sequence
  Description of Artificial Sequence: Synthetic oligonucleotide
  Sense strand starting at position 1438 of SEQ ID NO: 1885801
aguuauugcccucaggaag

SEQ ID NO: 2368401 - RNA, 19 nt, Artificial Sequence
  Description of Artificial Sequence: Synthetic oligonucleotide
  Antisense strand to SEQ ID NO: 2368400
cuuccugagggcaauaacu

SEQ ID NO: 2368402 - RNA, 19 nt, Artificial Sequence
  Description of Artificial Sequence: Synthetic oligonucleotide
  Sense strand starting at position 1452 of SEQ ID NO: 1885801
ggaagaauagacuguguuu

SEQ ID NO: 2368403 - RNA, 19 nt, Artificial Sequence
  Description of Artificial Sequence: Synthetic oligonucleotide
  Antisense strand to SEQ ID NO: 2368402
aaacacagucuauucuucc

SEQ ID NO: 2368404 - RNA, 19 nt, Artificial Sequence
  Description of Artificial Sequence: Synthetic oligonucleotide
  Sense strand starting at position 1454 of SEQ ID NO: 1885801
aagaauagacuguguuucu

SEQ ID NO: 2368405 - RNA, 19 nt, Artificial Sequence
  Description of Artificial Sequence: Synthetic oligonucleotide
  Antisense strand to SEQ ID NO: 2368404
agaaacacagucuauucuu

SEQ ID NO: 2368406 - RNA, 19 nt, Artificial Sequence
  Description of Artificial Sequence: Synthetic oligonucleotide
  Sense strand starting at position 1455 of SEQ ID NO: 1885801
agaauagacuguguuucuu

SEQ ID NO: 2368407 - RNA, 19 nt, Artificial Sequence
  Description of Artificial Sequence: Synthetic oligonucleotide
  Antisense strand to SEQ ID NO: 2368406
aagaaacacagucuauucu

SEQ ID NO: 2368408 - RNA, 19 nt, Artificial Sequence
  Description of Artificial Sequence: Synthetic oligonucleotide
  Sense strand starting at position 1670 of SEQ ID NO: 1885801
uccuuaccagaaugguaga

SEQ ID NO: 2368409 - RNA, 19 nt, Artificial Sequence
  Description of Artificial Sequence: Synthetic oligonucleotide
  Antisense strand to SEQ ID NO: 2368408
ucuaccauucugguaagga

SEQ ID NO: 2368410 - RNA, 19 nt, Artificial Sequence
  Description of Artificial Sequence: Synthetic oligonucleotide
  Sense strand starting at position 1686 of SEQ ID NO: 1885801
agaagccuuggguauuaau

SEQ ID NO: 2368411 - RNA, 19 nt, Artificial Sequence
  Description of Artificial Sequence: Synthetic oligonucleotide
  Antisense strand to SEQ ID NO: 2368410
auuaauacccaaggcuucu

SEQ ID NO: 2368412 - RNA, 19 nt, Artificial Sequence
  Description of Artificial Sequence: Synthetic oligonucleotide
  Sense strand starting at position 1710 of SEQ ID NO: 1885801
gggagucucagauaaguuu

SEQ ID NO: 2368413 - RNA, 19 nt, Artificial Sequence
  Description of Artificial Sequence: Synthetic oligonucleotide
  Antisense strand to SEQ ID NO: 2368412
aaacuuaucugagacuccc

SEQ ID NO: 2368414 - RNA, 19 nt, Artificial Sequence
  Description of Artificial Sequence: Synthetic oligonucleotide
  Sense strand starting at position 2100 of SEQ ID NO: 1885801
ggcucucucccugaagacu

SEQ ID NO: 2368415 - RNA, 19 nt, Artificial Sequence
  Description of Artificial Sequence: Synthetic oligonucleotide
  Antisense strand to SEQ ID NO: 2368414
agucuucagggagagagcc

SEQ ID NO: 2368416 - RNA, 19 nt, Artificial Sequence
  Description of Artificial Sequence: Synthetic oligonucleotide
  Sense strand starting at position 2142 of SEQ ID NO: 1885801
cagagaacaugugugauua

SEQ ID NO: 2368417 - RNA, 19 nt, Artificial Sequence
  Description of Artificial Sequence: Synthetic oligonucleotide
  Antisense strand to SEQ ID NO: 2368416
uaaucacacauguucucug

SEQ ID NO: 2368418 - RNA, 19 nt, Artificial Sequence
  Description of Artificial Sequence: Synthetic oligonucleotide
  Sense strand starting at position 2143 of SEQ ID NO: 1885801
agagaacaugugugauuaa

SEQ ID NO: 2368419 - RNA, 19 nt, Artificial Sequence
  Description of Artificial Sequence: Synthetic oligonucleotide
  Antisense strand to SEQ ID NO: 2368418
uuaaucacacauguucucu

SEQ ID NO: 2368420 - RNA, 19 nt, Artificial Sequence
  Description of Artificial Sequence: Synthetic oligonucleotide
  Sense strand starting at position 2146 of SEQ ID NO: 1885801
gaacaugugugauuaauua

SEQ ID NO: 2368421 - RNA, 19 nt, Artificial Sequence
  Description of Artificial Sequence: Synthetic oligonucleotide
  Antisense strand to SEQ ID NO: 2368420
uaauuaaucacacauguuc

SEQ ID NO: 2368422 - RNA, 19 nt, Artificial Sequence
  Description of Artificial Sequence: Synthetic oligonucleotide
  Sense strand starting at position 2364 of SEQ ID NO: 1885801
uaaaucauuugagguagaa

SEQ ID NO: 2368423 - RNA, 19 nt, Artificial Sequence
  Description of Artificial Sequence: Synthetic oligonucleotide
  Antisense strand to SEQ ID NO: 2368422
uucuaccucaaaugauuua

SEQ ID NO: 2368424 - RNA, 19 nt, Artificial Sequence
  Description of Artificial Sequence: Synthetic oligonucleotide
  Sense strand starting at position 2690 of SEQ ID NO: 1885801
gguuguuacguggaagaaa

SEQ ID NO: 2368425 - RNA, 19 nt, Artificial Sequence
  Description of Artificial Sequence: Synthetic oligonucleotide
  Antisense strand to SEQ ID NO: 2368424
uuucuuccacguaacaacc

SEQ ID NO: 2368426 - RNA, 19 nt, Artificial Sequence
  Description of Artificial Sequence: Synthetic oligonucleotide
  Sense strand starting at position 2768 of SEQ ID NO: 1885801
aggugagauugucucuauu

SEQ ID NO: 2368427 - RNA, 19 nt, Artificial Sequence
  Description of Artificial Sequence: Synthetic oligonucleotide
  Antisense strand to SEQ ID NO: 2368426
aauagagacaaucucaccu

SEQ ID NO: 2368428 - RNA, 19 nt, Artificial Sequence
  Description of Artificial Sequence: Synthetic oligonucleotide
  Sense strand starting at position 2774 of SEQ ID NO: 1885801
gauugucucuauuugcuga

SEQ ID NO: 2368429 - RNA, 19 nt, Artificial Sequence
  Description of Artificial Sequence: Synthetic oligonucleotide
  Antisense strand to SEQ ID NO: 2368428
ucagcaaauagagacaauc

SEQ ID NO: 2368430 - RNA, 19 nt, Artificial Sequence
  Description of Artificial Sequence: Synthetic oligonucleotide
  Sense strand starting at position 3074 of SEQ ID NO: 1885801
ggaaauauacccuguguuc

SEQ ID NO: 2368431 - RNA, 19 nt, Artificial Sequence
  Description of Artificial Sequence: Synthetic oligonucleotide
  Antisense strand to SEQ ID NO: 2368430
gaacacaggguauauuucc

SEQ ID NO: 2368432 - RNA, 19 nt, Artificial Sequence
  Description of Artificial Sequence: Synthetic oligonucleotide
  Sense strand starting at position 3288 of SEQ ID NO: 1885801
ggcauuacaucccugacuu

SEQ ID NO: 2368433 - RNA, 19 nt, Artificial Sequence
  Description of Artificial Sequence: Synthetic oligonucleotide
  Antisense strand to SEQ ID NO: 2368432
aagucagggauguaaugcc

SEQ ID NO: 2368434 - RNA, 19 nt, Artificial Sequence
  Description of Artificial Sequence: Synthetic oligonucleotide
  Sense strand starting at position 3370 of SEQ ID NO: 1885801
cagccaauggagcagaauu

SEQ ID NO: 2368435 - RNA, 19 nt, Artificial Sequence
  Description of Artificial Sequence: Synthetic oligonucleotide
  Antisense strand to SEQ ID NO: 2368434
aauucugcuccauuggcug

SEQ ID NO: 2368436 - RNA, 19 nt, Artificial Sequence
  Description of Artificial Sequence: Synthetic oligonucleotide
  Sense strand starting at position 3691 of SEQ ID NO: 1885801
agacaaguagaaugucauc

SEQ ID NO: 2368437 - RNA, 19 nt, Artificial Sequence
  Description of Artificial Sequence: Synthetic oligonucleotide
  Antisense strand to SEQ ID NO: 2368436
gaugacauucuacuugucu

SEQ ID NO: 2368438 - RNA, 19 nt, Artificial Sequence
  Description of Artificial Sequence: Synthetic oligonucleotide
  Sense strand starting at position 3696 of SEQ ID NO: 1885801
aguagaaugucaucaaauu

SEQ ID NO: 2368439 - RNA, 19 nt, Artificial Sequence
  Description of Artificial Sequence: Synthetic oligonucleotide
  Antisense strand to SEQ ID NO: 2368438
aauuugaugacauucuacu

SEQ ID NO: 2368440 - RNA, 19 nt, Artificial Sequence
  Description of Artificial Sequence: Synthetic oligonucleotide
  Sense strand starting at position 3874 of SEQ ID NO: 1885801
gacacaugauuuggacaga

SEQ ID NO: 2368441 - RNA, 19 nt, Artificial Sequence
  Description of Artificial Sequence: Synthetic oligonucleotide
  Antisense strand to SEQ ID NO: 2368440
ucuguccaaaucauguguc

SEQ ID NO: 2368442 - RNA, 19 nt, Artificial Sequence
  Description of Artificial Sequence: Synthetic oligonucleotide
  Sense strand starting at position 3875 of SEQ ID NO: 1885801
acacaugauuuggacagau

SEQ ID NO: 2368443 - RNA, 19 nt, Artificial Sequence
  Description of Artificial Sequence: Synthetic oligonucleotide
  Antisense strand to SEQ ID NO: 2368442
aucuguccaaaucaugugu

SEQ ID NO: 2368444 - RNA, 19 nt, Artificial Sequence
  Description of Artificial Sequence: Synthetic oligonucleotide
  Sense strand starting at position 103 of SEQ ID NO: 1885802
ugaauuaaucaugaguguc

SEQ ID NO: 2368445 - RNA, 19 nt, Artificial Sequence
  Description of Artificial Sequence: Synthetic oligonucleotide
  Antisense strand to SEQ ID NO: 2368444
gacacucaugauuaauuca

SEQ ID NO: 2368446 - RNA, 19 nt, Artificial Sequence
  Description of Artificial Sequence: Synthetic oligonucleotide
  Sense strand starting at position 267 of SEQ ID NO: 1885802
cagucuugugcacagauga

SEQ ID NO: 2368447 - RNA, 19 nt, Artificial Sequence
  Description of Artificial Sequence: Synthetic oligonucleotide
  Antisense strand to SEQ ID NO: 2368446
ucaucugugcacaagacug

SEQ ID NO: 2368448 - RNA, 19 nt, Artificial Sequence
  Description of Artificial Sequence: Synthetic oligonucleotide
  Sense strand starting at position 324 of SEQ ID NO: 1885802
cuaauuuauugggacuaag

SEQ ID NO: 2368449 - RNA, 19 nt, Artificial Sequence
  Description of Artificial Sequence: Synthetic oligonucleotide
  Antisense strand to SEQ ID NO: 2368448
cuuagucccaauaaauuag

SEQ ID NO: 2368450 - RNA, 19 nt, Artificial Sequence
  Description of Artificial Sequence: Synthetic oligonucleotide
  Sense strand starting at position 534 of SEQ ID NO: 1885802
agaauaaagaggugucucu

SEQ ID NO: 2368451 - RNA, 19 nt, Artificial Sequence
  Description of Artificial Sequence: Synthetic oligonucleotide
  Antisense strand to SEQ ID NO: 2368450
agagacaccucuuuauucu

SEQ ID NO: 2368452 - RNA, 19 nt, Artificial Sequence
  Description of Artificial Sequence: Synthetic oligonucleotide
  Sense strand starting at position 731 of SEQ ID NO: 1885802
ggcccauagagcuagacua

SEQ ID NO: 2368453 - RNA, 19 nt, Artificial Sequence
  Description of Artificial Sequence: Synthetic oligonucleotide
  Antisense strand to SEQ ID NO: 2368452
uagucuagcucuaugggcc

SEQ ID NO: 2368454 - RNA, 19 nt, Artificial Sequence
  Description of Artificial Sequence: Synthetic oligonucleotide
  Sense strand starting at position 759 of SEQ ID NO: 1885802
ggccaugacacguaaaggu

SEQ ID NO: 2368455 - RNA, 19 nt, Artificial Sequence
  Description of Artificial Sequence: Synthetic oligonucleotide
  Antisense strand to SEQ ID NO: 2368454
accuuuacgugucauggcc

SEQ ID NO: 2368456 - RNA, 19 nt, Artificial Sequence
  Description of Artificial Sequence: Synthetic oligonucleotide
  Sense strand starting at position 780 of SEQ ID NO: 1885802
acaugugaauuggucaaug

SEQ ID NO: 2368457 - RNA, 19 nt, Artificial Sequence
  Description of Artificial Sequence: Synthetic oligonucleotide
  Antisense strand to SEQ ID NO: 2368456
cauugaccaauucacaugu

SEQ ID NO: 2368458 - RNA, 19 nt, Artificial Sequence
  Description of Artificial Sequence: Synthetic oligonucleotide
  Sense strand starting at position 1013 of SEQ ID NO: 1885802
cugcucugagaauaaguua

SEQ ID NO: 2368459 - RNA, 19 nt, Artificial Sequence
  Description of Artificial Sequence: Synthetic oligonucleotide
  Antisense strand to SEQ ID NO: 2368458
uaacuuauucucagagcag

SEQ ID NO: 2368460 - RNA, 19 nt, Artificial Sequence
  Description of Artificial Sequence: Synthetic oligonucleotide
  Sense strand starting at position 1016 of SEQ ID NO: 1885802
cucugagaauaaguuaacu

SEQ ID NO: 2368461 - RNA, 19 nt, Artificial Sequence
  Description of Artificial Sequence: Synthetic oligonucleotide
  Antisense strand to SEQ ID NO: 2368460
aguuaacuuauucucagag

SEQ ID NO: 2368462 - RNA, 19 nt, Artificial Sequence
  Description of Artificial Sequence: Synthetic oligonucleotide
  Sense strand starting at position 1048 of SEQ ID NO: 1885802
auaaucaacucaguuguga

SEQ ID NO: 2368463 - RNA, 19 nt, Artificial Sequence
  Description of Artificial Sequence: Synthetic oligonucleotide
  Antisense strand to SEQ ID NO: 2368462
ucacaacugaguugauuau

SEQ ID NO: 2368464 - RNA, 19 nt, Artificial Sequence
  Description of Artificial Sequence: Synthetic oligonucleotide
  Sense strand starting at position 1148 of SEQ ID NO: 1885802
uguagacauugauuccuuu

SEQ ID NO: 2368465 - RNA, 19 nt, Artificial Sequence
  Description of Artificial Sequence: Synthetic oligonucleotide
  Antisense strand to SEQ ID NO: 2368464
aaaggaaucaaugucuaca

SEQ ID NO: 2368466 - RNA, 19 nt, Artificial Sequence
  Description of Artificial Sequence: Synthetic oligonucleotide
  Sense strand starting at position 1232 of SEQ ID NO: 1885802
uuauauuugucucuaugcu

SEQ ID NO: 2368467 - RNA, 19 nt, Artificial Sequence
  Description of Artificial Sequence: Synthetic oligonucleotide
  Antisense strand to SEQ ID NO: 2368466
agcauagagacaaauauaa

SEQ ID NO: 2368468 - RNA, 19 nt, Artificial Sequence
  Description of Artificial Sequence: Synthetic oligonucleotide
  Sense strand starting at position 1260 of SEQ ID NO: 1885802
ggauaacaguucuuucuua

SEQ ID NO: 2368469 - RNA, 19 nt, Artificial Sequence
  Description of Artificial Sequence: Synthetic oligonucleotide
  Antisense strand to SEQ ID NO: 2368468
uaagaaagaacuguuaucc

SEQ ID NO: 2368470 - RNA, 19 nt, Artificial Sequence
  Description of Artificial Sequence: Synthetic oligonucleotide
  Sense strand starting at position 1320 of SEQ ID NO: 1885802
aaggcagauuuagaauaga

SEQ ID NO: 2368471 - RNA, 19 nt, Artificial Sequence
  Description of Artificial Sequence: Synthetic oligonucleotide
  Antisense strand to SEQ ID NO: 2368470
ucuauucuaaaucugccuu

SEQ ID NO: 2368472 - RNA, 19 nt, Artificial Sequence
  Description of Artificial Sequence: Synthetic oligonucleotide
  Sense strand starting at position 1545 of SEQ ID NO: 1885802
uggauuucuggcugaugca

SEQ ID NO: 2368473 - RNA, 19 nt, Artificial Sequence
  Description of Artificial Sequence: Synthetic oligonucleotide
  Antisense strand to SEQ ID NO: 2368472
ugcaucagccagaaaucca

SEQ ID NO: 2368474 - RNA, 19 nt, Artificial Sequence
  Description of Artificial Sequence: Synthetic oligonucleotide
  Sense strand starting at position 1619 of SEQ ID NO: 1885802
gucucaacugcagauacaa

SEQ ID NO: 2368475 - RNA, 19 nt, Artificial Sequence
  Description of Artificial Sequence: Synthetic oligonucleotide
  Antisense strand to SEQ ID NO: 2368474
uuguaucugcaguugagac

SEQ ID NO: 2368476 - RNA, 19 nt, Artificial Sequence
  Description of Artificial Sequence: Synthetic oligonucleotide
  Sense strand starting at position 1781 of SEQ ID NO: 1885802
uucucuauuuacgcauuga

SEQ ID NO: 2368477 - RNA, 19 nt, Artificial Sequence
  Description of Artificial Sequence: Synthetic oligonucleotide
  Antisense strand to SEQ ID NO: 2368476
ucaaugcguaaauagagaa

SEQ ID NO: 2368478 - RNA, 19 nt, Artificial Sequence
  Description of Artificial Sequence: Synthetic oligonucleotide
  Sense strand starting at position 2190 of SEQ ID NO: 1885802
ugugaucaaccucaaguuu

SEQ ID NO: 2368479 - RNA, 19 nt, Artificial Sequence
  Description of Artificial Sequence: Synthetic oligonucleotide
  Antisense strand to SEQ ID NO: 2368478
aaacuugagguugaucaca

SEQ ID NO: 2368480 - RNA, 19 nt, Artificial Sequence
  Description of Artificial Sequence: Synthetic oligonucleotide
  Sense strand starting at position 2227 of SEQ ID NO: 1885802
gcgacucugcugcauuuaa

SEQ ID NO: 2368481 - RNA, 19 nt, Artificial Sequence
  Description of Artificial Sequence: Synthetic oligonucleotide
  Antisense strand to SEQ ID NO: 2368480
uuaaaugcagcagagucgc

SEQ ID NO: 2368482 - RNA, 19 nt, Artificial Sequence
  Description of Artificial Sequence: Synthetic oligonucleotide
  Sense strand starting at position 2300 of SEQ ID NO: 1885802
ucauuaaugugauugcaaa

SEQ ID NO: 2368483 - RNA, 19 nt, Artificial Sequence
  Description of Artificial Sequence: Synthetic oligonucleotide
  Antisense strand to SEQ ID NO: 2368482
uuugcaaucacauuaauga

SEQ ID NO: 2368484 - RNA, 19 nt, Artificial Sequence
  Description of Artificial Sequence: Synthetic oligonucleotide
  Sense strand starting at position 2308 of SEQ ID NO: 1885802
gugauugcaaaccauggau

SEQ ID NO: 2368485 - RNA, 19 nt, Artificial Sequence
  Description of Artificial Sequence: Synthetic oligonucleotide
  Antisense strand to SEQ ID NO: 2368484
auccaugguuugcaaucac

SEQ ID NO: 2368486 - RNA, 19 nt, Artificial Sequence
  Description of Artificial Sequence: Synthetic oligonucleotide
  Sense strand starting at position 2311 of SEQ ID NO: 1885802
auugcaaaccauggaucua

SEQ ID NO: 2368487 - RNA, 19 nt, Artificial Sequence
  Description of Artificial Sequence: Synthetic oligonucleotide
  Antisense strand to SEQ ID NO: 2368486
uagauccaugguuugcaau

SEQ ID NO: 2368488 - RNA, 19 nt, Artificial Sequence
  Description of Artificial Sequence: Synthetic oligonucleotide
  Sense strand starting at position 2417 of SEQ ID NO: 1885802
cgugaaggaauauguuaag

SEQ ID NO: 2368489 - RNA, 19 nt, Artificial Sequence
  Description of Artificial Sequence: Synthetic oligonucleotide
  Antisense strand to SEQ ID NO: 2368488
cuuaacauauuccuucacg

SEQ ID NO: 2368490 - RNA, 19 nt, Artificial Sequence
  Description of Artificial Sequence: Synthetic oligonucleotide
  Sense strand starting at position 2423 of SEQ ID NO: 1885802
ggaauauguuaagcaacua

SEQ ID NO: 2368491 - RNA, 19 nt, Artificial Sequence
  Description of Artificial Sequence: Synthetic oligonucleotide
  Antisense strand to SEQ ID NO: 2368490
uaguugcuuaacauauucc

SEQ ID NO: 2368492 - RNA, 19 nt, Artificial Sequence
  Description of Artificial Sequence: Synthetic oligonucleotide
  Sense strand starting at position 2641 of SEQ ID NO: 1885802
guggguucccaugaaugaa

SEQ ID NO: 2368493 - RNA, 19 nt, Artificial Sequence
  Description of Artificial Sequence: Synthetic oligonucleotide
  Antisense strand to SEQ ID NO: 2368492
uucauucaugggaacccac

SEQ ID NO: 2368494 - RNA, 19 nt, Artificial Sequence
  Description of Artificial Sequence: Synthetic oligonucleotide
  Sense strand starting at position 2877 of SEQ ID NO: 1885802
uggaaagaaccauguaugu

SEQ ID NO: 2368495 - RNA, 19 nt, Artificial Sequence
  Description of Artificial Sequence: Synthetic oligonucleotide
  Antisense strand to SEQ ID NO: 2368494
acauacaugguucuuucca

SEQ ID NO: 2368496 - RNA, 19 nt, Artificial Sequence
  Description of Artificial Sequence: Synthetic oligonucleotide
  Sense strand starting at position 2991 of SEQ ID NO: 1885802
uccuaauugguccaugguu

SEQ ID NO: 2368497 - RNA, 19 nt, Artificial Sequence
  Description of Artificial Sequence: Synthetic oligonucleotide
  Antisense strand to SEQ ID NO: 2368496
aaccauggaccaauuagga

SEQ ID NO: 2368498 - RNA, 19 nt, Artificial Sequence
  Description of Artificial Sequence: Synthetic oligonucleotide
  Sense strand starting at position 3068 of SEQ ID NO: 1885802
agacaucaguaucugugau

SEQ ID NO: 2368499 - RNA, 19 nt, Artificial Sequence
  Description of Artificial Sequence: Synthetic oligonucleotide
  Antisense strand to SEQ ID NO: 2368498
aucacagauacugaugucu

SEQ ID NO: 2368500 - RNA, 19 nt, Artificial Sequence
  Description of Artificial Sequence: Synthetic oligonucleotide
  Sense strand starting at position 3119 of SEQ ID NO: 1885802
uuuacaucugucuagaguu

SEQ ID NO: 2368501 - RNA, 19 nt, Artificial Sequence
  Description of Artificial Sequence: Synthetic oligonucleotide
  Antisense strand to SEQ ID NO: 2368500
aacucuagacagauguaaa

SEQ ID NO: 2368502 - RNA, 19 nt, Artificial Sequence
  Description of Artificial Sequence: Synthetic oligonucleotide
  Sense strand starting at position 3134 of SEQ ID NO: 1885802
aguuauugcccucaggaag

SEQ ID NO: 2368503 - RNA, 19 nt, Artificial Sequence
  Description of Artificial Sequence: Synthetic oligonucleotide
  Antisense strand to SEQ ID NO: 2368502
cuuccugagggcaauaacu

SEQ ID NO: 2368504 - RNA, 19 nt, Artificial Sequence
  Description of Artificial Sequence: Synthetic oligonucleotide
  Sense strand starting at position 3148 of SEQ ID NO: 1885802
ggaagaauagacuguguuu

SEQ ID NO: 2368505 - RNA, 19 nt, Artificial Sequence
  Description of Artificial Sequence: Synthetic oligonucleotide
  Antisense strand to SEQ ID NO: 2368504
aaacacagucuauucuucc

SEQ ID NO: 2368506 - RNA, 19 nt, Artificial Sequence
  Description of Artificial Sequence: Synthetic oligonucleotide
  Sense strand starting at position 3150 of SEQ ID NO: 1885802
aagaauagacuguguuucu

SEQ ID NO: 2368507 - RNA, 19 nt, Artificial Sequence
  Description of Artificial Sequence: Synthetic oligonucleotide
  Antisense strand to SEQ ID NO: 2368506
agaaacacagucuauucuu

SEQ ID NO: 2368508 - RNA, 19 nt, Artificial Sequence
  Description of Artificial Sequence: Synthetic oligonucleotide
  Sense strand starting at position 3151 of SEQ ID NO: 1885802
agaauagacuguguuucuu

SEQ ID NO: 2368509 - RNA, 19 nt, Artificial Sequence
  Description of Artificial Sequence: Synthetic oligonucleotide
  Antisense strand to SEQ ID NO: 2368508
aagaaacacagucuauucu

SEQ ID NO: 2368510 - RNA, 19 nt, Artificial Sequence
  Description of Artificial Sequence: Synthetic oligonucleotide
  Sense strand starting at position 3366 of SEQ ID NO: 1885802
uccuuaccagaaugguaga

SEQ ID NO: 2368511 - RNA, 19 nt, Artificial Sequence
  Description of Artificial Sequence: Synthetic oligonucleotide
  Antisense strand to SEQ ID NO: 2368510
ucuaccauucugguaagga

SEQ ID NO: 2368512 - RNA, 19 nt, Artificial Sequence
  Description of Artificial Sequence: Synthetic oligonucleotide
  Sense strand starting at position 3382 of SEQ ID NO: 1885802
agaagccuuggguauuaau

SEQ ID NO: 2368513 - RNA, 19 nt, Artificial Sequence
  Description of Artificial Sequence: Synthetic oligonucleotide
  Antisense strand to SEQ ID NO: 2368512
auuaauacccaaggcuucu

SEQ ID NO: 2368514 - RNA, 19 nt, Artificial Sequence
  Description of Artificial Sequence: Synthetic oligonucleotide
  Sense strand starting at position 3406 of SEQ ID NO: 1885802
gggagucucagauaaguuu

SEQ ID NO: 2368515 - RNA, 19 nt, Artificial Sequence
  Description of Artificial Sequence: Synthetic oligonucleotide
  Antisense strand to SEQ ID NO: 2368514
aaacuuaucugagacuccc

SEQ ID NO: 2368516 - RNA, 19 nt, Artificial Sequence
  Description of Artificial Sequence: Synthetic oligonucleotide
  Sense strand starting at position 3796 of SEQ ID NO: 1885802
ggcucucucccugaagacu

SEQ ID NO: 2368517 - RNA, 19 nt, Artificial Sequence
  Description of Artificial Sequence: Synthetic oligonucleotide
  Antisense strand to SEQ ID NO: 2368516
agucuucagggagagagcc

SEQ ID NO: 2368518 - RNA, 19 nt, Artificial Sequence
  Description of Artificial Sequence: Synthetic oligonucleotide
  Sense strand starting at position 3838 of SEQ ID NO: 1885802
cagagaacaugugugauua

SEQ ID NO: 2368519 - RNA, 19 nt, Artificial Sequence
  Description of Artificial Sequence: Synthetic oligonucleotide
  Antisense strand to SEQ ID NO: 2368518
uaaucacacauguucucug

SEQ ID NO: 2368520 - RNA, 19 nt, Artificial Sequence
  Description of Artificial Sequence: Synthetic oligonucleotide
  Sense strand starting at position 3839 of SEQ ID NO: 1885802
agagaacaugugugauuaa

SEQ ID NO: 2368521 - RNA, 19 nt, Artificial Sequence
  Description of Artificial Sequence: Synthetic oligonucleotide
  Antisense strand to SEQ ID NO: 2368520
uuaaucacacauguucucu

SEQ ID NO: 2368522 - RNA, 19 nt, Artificial Sequence
  Description of Artificial Sequence: Synthetic oligonucleotide
  Sense strand starting at position 3842 of SEQ ID NO: 1885802
gaacaugugugauuaauua

SEQ ID NO: 2368523 - RNA, 19 nt, Artificial Sequence
  Description of Artificial Sequence: Synthetic oligonucleotide
  Antisense strand to SEQ ID NO: 2368522
uaauuaaucacacauguuc

SEQ ID NO: 2368524 - RNA, 19 nt, Artificial Sequence
  Description of Artificial Sequence: Synthetic oligonucleotide
  Sense strand starting at position 215 of SEQ ID NO: 1885803
ccuugucuuuauuuguauu

SEQ ID NO: 2368525 - RNA, 19 nt, Artificial Sequence
  Description of Artificial Sequence: Synthetic oligonucleotide
  Antisense strand to SEQ ID NO: 2368524
aauacaaauaaagacaagg

SEQ ID NO: 2368526 - RNA, 19 nt, Artificial Sequence
  Description of Artificial Sequence: Synthetic oligonucleotide
  Sense strand starting at position 539 of SEQ ID NO: 1885803
agaaguaacuaugucugua

SEQ ID NO: 2368527 - RNA, 19 nt, Artificial Sequence
  Description of Artificial Sequence: Synthetic oligonucleotide
  Antisense strand to SEQ ID NO: 2368526
uacagacauaguuacuucu

SEQ ID NO: 2368528 - RNA, 19 nt, Artificial Sequence
  Description of Artificial Sequence: Synthetic oligonucleotide
  Sense strand starting at position 542 of SEQ ID NO: 1885803
aguaacuaugucuguaaga

SEQ ID NO: 2368529 - RNA, 19 nt, Artificial Sequence
  Description of Artificial Sequence: Synthetic oligonucleotide
  Antisense strand to SEQ ID NO: 2368528
ucuuacagacauaguuacu

SEQ ID NO: 2368530 - RNA, 19 nt, Artificial Sequence
  Description of Artificial Sequence: Synthetic oligonucleotide
  Sense strand starting at position 543 of SEQ ID NO: 1885803
guaacuaugucuguaagau

SEQ ID NO: 2368531 - RNA, 19 nt, Artificial Sequence
  Description of Artificial Sequence: Synthetic oligonucleotide
  Antisense strand to SEQ ID NO: 2368530
aucuuacagacauaguuac

SEQ ID NO: 2368532 - RNA, 19 nt, Artificial Sequence
  Description of Artificial Sequence: Synthetic oligonucleotide
  Sense strand starting at position 596 of SEQ ID NO: 1885803
uguaaugagccucaguauu

SEQ ID NO: 2368533 - RNA, 19 nt, Artificial Sequence
  Description of Artificial Sequence: Synthetic oligonucleotide
  Antisense strand to SEQ ID NO: 2368532
aauacugaggcucauuaca

SEQ ID NO: 2368534 - RNA, 19 nt, Artificial Sequence
  Description of Artificial Sequence: Synthetic oligonucleotide
  Sense strand starting at position 718 of SEQ ID NO: 1885803
cguuacuaugguuauauca

SEQ ID NO: 2368535 - RNA, 19 nt, Artificial Sequence
  Description of Artificial Sequence: Synthetic oligonucleotide
  Antisense strand to SEQ ID NO: 2368534
ugauauaaccauaguaacg

SEQ ID NO: 2368536 - RNA, 19 nt, Artificial Sequence
  Description of Artificial Sequence: Synthetic oligonucleotide
  Sense strand starting at position 726 of SEQ ID NO: 1885803
ugguuauaucaugguauaa

SEQ ID NO: 2368537 - RNA, 19 nt, Artificial Sequence
  Description of Artificial Sequence: Synthetic oligonucleotide
  Antisense strand to SEQ ID NO: 2368536
uuauaccaugauauaacca

SEQ ID NO: 2368538 - RNA, 19 nt, Artificial Sequence
  Description of Artificial Sequence: Synthetic oligonucleotide
  Sense strand starting at position 737 of SEQ ID NO: 1885803
ugguauaaccaccaaguua

SEQ ID NO: 2368539 - RNA, 19 nt, Artificial Sequence
  Description of Artificial Sequence: Synthetic oligonucleotide
  Antisense strand to SEQ ID NO: 2368538
uaacuuggugguuauacca

SEQ ID NO: 2368540 - RNA, 19 nt, Artificial Sequence
  Description of Artificial Sequence: Synthetic oligonucleotide
  Sense strand starting at position 919 of SEQ ID NO: 1885803
uaaugaauuucguugugcu

SEQ ID NO: 2368541 - RNA, 19 nt, Artificial Sequence
  Description of Artificial Sequence: Synthetic oligonucleotide
  Antisense strand to SEQ ID NO: 2368540
agcacaacgaaauucauua

SEQ ID NO: 2368542 - RNA, 19 nt, Artificial Sequence
  Description of Artificial Sequence: Synthetic oligonucleotide
  Sense strand starting at position 920 of SEQ ID NO: 1885803
aaugaauuucguugugcug

SEQ ID NO: 2368543 - RNA, 19 nt, Artificial Sequence
  Description of Artificial Sequence: Synthetic oligonucleotide
  Antisense strand to SEQ ID NO: 2368542
cagcacaacgaaauucauu

SEQ ID NO: 2368544 - RNA, 19 nt, Artificial Sequence
  Description of Artificial Sequence: Synthetic oligonucleotide
  Sense strand starting at position 923 of SEQ ID NO: 1885803
gaauuucguugugcugaaa

SEQ ID NO: 2368545 - RNA, 19 nt, Artificial Sequence
  Description of Artificial Sequence: Synthetic oligonucleotide
  Antisense strand to SEQ ID NO: 2368544
uuucagcacaacgaaauuc

SEQ ID NO: 2368546 - RNA, 19 nt, Artificial Sequence
  Description of Artificial Sequence: Synthetic oligonucleotide
  Sense strand starting at position 932 of SEQ ID NO: 1885803
ugugcugaaauggauuaau

SEQ ID NO: 2368547 - RNA, 19 nt, Artificial Sequence
  Description of Artificial Sequence: Synthetic oligonucleotide
  Antisense strand to SEQ ID NO: 2368546
auuaauccauuucagcaca

SEQ ID NO: 2368548 - RNA, 19 nt, Artificial Sequence
  Description of Artificial Sequence: Synthetic oligonucleotide
  Sense strand starting at position 1256 of SEQ ID NO: 1885803
aucauagcucuguaguaaa

SEQ ID NO: 2368549 - RNA, 19 nt, Artificial Sequence
  Description of Artificial Sequence: Synthetic oligonucleotide
  Antisense strand to SEQ ID NO: 2368548
uuuacuacagagcuaugau

SEQ ID NO: 2368550 - RNA, 19 nt, Artificial Sequence
  Description of Artificial Sequence: Synthetic oligonucleotide
  Sense strand starting at position 1472 of SEQ ID NO: 1885803
ugaauuaaucaugaguguc

SEQ ID NO: 2368551 - RNA, 19 nt, Artificial Sequence
  Description of Artificial Sequence: Synthetic oligonucleotide
  Antisense strand to SEQ ID NO: 2368550
gacacucaugauuaauuca

SEQ ID NO: 2368552 - RNA, 19 nt, Artificial Sequence
  Description of Artificial Sequence: Synthetic oligonucleotide
  Sense strand starting at position 1636 of SEQ ID NO: 1885803
cagucuugugcacagauga

SEQ ID NO: 2368553 - RNA, 19 nt, Artificial Sequence
  Description of Artificial Sequence: Synthetic oligonucleotide
  Antisense strand to SEQ ID NO: 2368552
ucaucugugcacaagacug

SEQ ID NO: 2368554 - RNA, 19 nt, Artificial Sequence
  Description of Artificial Sequence: Synthetic oligonucleotide
  Sense strand starting at position 1692 of SEQ ID NO: 1885803
acuaauuuauugggacuaa

SEQ ID NO: 2368555 - RNA, 19 nt, Artificial Sequence
  Description of Artificial Sequence: Synthetic oligonucleotide
  Antisense strand to SEQ ID NO: 2368554
uuagucccaauaaauuagu

SEQ ID NO: 2368556 - RNA, 19 nt, Artificial Sequence
  Description of Artificial Sequence: Synthetic oligonucleotide
  Sense strand starting at position 1693 of SEQ ID NO: 1885803
cuaauuuauugggacuaag

SEQ ID NO: 2368557 - RNA, 19 nt, Artificial Sequence
  Description of Artificial Sequence: Synthetic oligonucleotide
  Antisense strand to SEQ ID NO: 2368556
cuuagucccaauaaauuag

SEQ ID NO: 2368558 - RNA, 19 nt, Artificial Sequence
  Description of Artificial Sequence: Synthetic oligonucleotide
  Sense strand starting at position 1903 of SEQ ID NO: 1885803
agaauaaagaggugucucu

SEQ ID NO: 2368559 - RNA, 19 nt, Artificial Sequence
  Description of Artificial Sequence: Synthetic oligonucleotide
  Antisense strand to SEQ ID NO: 2368558
agagacaccucuuuauucu

SEQ ID NO: 2368560 - RNA, 19 nt, Artificial Sequence
  Description of Artificial Sequence: Synthetic oligonucleotide
  Sense strand starting at position 2100 of SEQ ID NO: 1885803
ggcccauagagcuagacua

SEQ ID NO: 2368561 - RNA, 19 nt, Artificial Sequence
  Description of Artificial Sequence: Synthetic oligonucleotide
  Antisense strand to SEQ ID NO: 2368560
uagucuagcucuaugggcc

SEQ ID NO: 2368562 - RNA, 19 nt, Artificial Sequence
  Description of Artificial Sequence: Synthetic oligonucleotide
  Sense strand starting at position 2128 of SEQ ID NO: 1885803
ggccaugacacguaaaggu

SEQ ID NO: 2368563 - RNA, 19 nt, Artificial Sequence
  Description of Artificial Sequence: Synthetic oligonucleotide
  Antisense strand to SEQ ID NO: 2368562
accuuuacgugucauggcc

SEQ ID NO: 2368564 - RNA, 19 nt, Artificial Sequence
  Description of Artificial Sequence: Synthetic oligonucleotide
  Sense strand starting at position 2149 of SEQ ID NO: 1885803
acaugugaauuggucaaug

SEQ ID NO: 2368565 - RNA, 19 nt, Artificial Sequence
  Description of Artificial Sequence: Synthetic oligonucleotide
  Antisense strand to SEQ ID NO: 2368564
cauugaccaauucacaugu

SEQ ID NO: 2368566 - RNA, 19 nt, Artificial Sequence
  Description of Artificial Sequence: Synthetic oligonucleotide
  Sense strand starting at position 2382 of SEQ ID NO: 1885803
cugcucugagaauaaguua

SEQ ID NO: 2368567 - RNA, 19 nt, Artificial Sequence
  Description of Artificial Sequence: Synthetic oligonucleotide
  Antisense strand to SEQ ID NO: 2368566
uaacuuauucucagagcag

SEQ ID NO: 2368568 - RNA, 19 nt, Artificial Sequence
  Description of Artificial Sequence: Synthetic oligonucleotide
  Sense strand starting at position 2385 of SEQ ID NO: 1885803
cucugagaauaaguuaacu

SEQ ID NO: 2368569 - RNA, 19 nt, Artificial Sequence
  Description of Artificial Sequence: Synthetic oligonucleotide
  Antisense strand to SEQ ID NO: 2368568
aguuaacuuauucucagag

SEQ ID NO: 2368570 - RNA, 19 nt, Artificial Sequence
  Description of Artificial Sequence: Synthetic oligonucleotide
  Sense strand starting at position 2417 of SEQ ID NO: 1885803
auaaucaacucaguuguga

SEQ ID NO: 2368571 - RNA, 19 nt, Artificial Sequence
  Description of Artificial Sequence: Synthetic oligonucleotide
  Antisense strand to SEQ ID NO: 2368570
ucacaacugaguugauuau

SEQ ID NO: 2368572 - RNA, 19 nt, Artificial Sequence
  Description of Artificial Sequence: Synthetic oligonucleotide
  Sense strand starting at position 2431 of SEQ ID NO: 1885803
ugugacgauuuagauuaaa

SEQ ID NO: 2368573 - RNA, 19 nt, Artificial Sequence
  Description of Artificial Sequence: Synthetic oligonucleotide
  Antisense strand to SEQ ID NO: 2368572
uuuaaucuaaaucgucaca

SEQ ID NO: 2368574 - RNA, 19 nt, Artificial Sequence
  Description of Artificial Sequence: Synthetic oligonucleotide
  Sense strand starting at position 2517 of SEQ ID NO: 1885803
uguagacauugauuccuuu

SEQ ID NO: 2368575 - RNA, 19 nt, Artificial Sequence
  Description of Artificial Sequence: Synthetic oligonucleotide
  Antisense strand to SEQ ID NO: 2368574
aaaggaaucaaugucuaca

SEQ ID NO: 2368576 - RNA, 19 nt, Artificial Sequence
  Description of Artificial Sequence: Synthetic oligonucleotide
  Sense strand starting at position 2601 of SEQ ID NO: 1885803
uuauauuugucucuaugcu

SEQ ID NO: 2368577 - RNA, 19 nt, Artificial Sequence
  Description of Artificial Sequence: Synthetic oligonucleotide
  Antisense strand to SEQ ID NO: 2368576
agcauagagacaaauauaa

SEQ ID NO: 2368578 - RNA, 19 nt, Artificial Sequence
  Description of Artificial Sequence: Synthetic oligonucleotide
  Sense strand starting at position 2629 of SEQ ID NO: 1885803
ggauaacaguucuuucuua

SEQ ID NO: 2368579 - RNA, 19 nt, Artificial Sequence
  Description of Artificial Sequence: Synthetic oligonucleotide
  Antisense strand to SEQ ID NO: 2368578
uaagaaagaacuguuaucc

SEQ ID NO: 2368580 - RNA, 19 nt, Artificial Sequence
  Description of Artificial Sequence: Synthetic oligonucleotide
  Sense strand starting at position 2689 of SEQ ID NO: 1885803
aaggcagauuuagaauaga

SEQ ID NO: 2368581 - RNA, 19 nt, Artificial Sequence
  Description of Artificial Sequence: Synthetic oligonucleotide
  Antisense strand to SEQ ID NO: 2368580
ucuauucuaaaucugccuu

SEQ ID NO: 2368582 - RNA, 19 nt, Artificial Sequence
  Description of Artificial Sequence: Synthetic oligonucleotide
  Sense strand starting at position 2722 of SEQ ID NO: 1885803
aauggauguuagucaagca

SEQ ID NO: 2368583 - RNA, 19 nt, Artificial Sequence
  Description of Artificial Sequence: Synthetic oligonucleotide
  Antisense strand to SEQ ID NO: 2368582
ugcuugacuaacauccauu

SEQ ID NO: 2368584 - RNA, 19 nt, Artificial Sequence
  Description of Artificial Sequence: Synthetic oligonucleotide
  Sense strand starting at position 2914 of SEQ ID NO: 1885803
uggauuucuggcugaugca

SEQ ID NO: 2368585 - RNA, 19 nt, Artificial Sequence
  Description of Artificial Sequence: Synthetic oligonucleotide
  Antisense strand to SEQ ID NO: 2368584
ugcaucagccagaaaucca

SEQ ID NO: 2368586 - RNA, 19 nt, Artificial Sequence
  Description of Artificial Sequence: Synthetic oligonucleotide
  Sense strand starting at position 2988 of SEQ ID NO: 1885803
gucucaacugcagauacaa

SEQ ID NO: 2368587 - RNA, 19 nt, Artificial Sequence
  Description of Artificial Sequence: Synthetic oligonucleotide
  Antisense strand to SEQ ID NO: 2368586
uuguaucugcaguugagac

SEQ ID NO: 2368588 - RNA, 19 nt, Artificial Sequence
  Description of Artificial Sequence: Synthetic oligonucleotide
  Sense strand starting at position 3268 of SEQ ID NO: 1885803
aauauaggcugguucucau

SEQ ID NO: 2368589 - RNA, 19 nt, Artificial Sequence
  Description of Artificial Sequence: Synthetic oligonucleotide
  Antisense strand to SEQ ID NO: 2368588
augagaaccagccuauauu

SEQ ID NO: 2368590 - RNA, 19 nt, Artificial Sequence
  Description of Artificial Sequence: Synthetic oligonucleotide
  Sense strand starting at position 3559 of SEQ ID NO: 1885803
ugugaucaaccucaaguuu

SEQ ID NO: 2368591 - RNA, 19 nt, Artificial Sequence
  Description of Artificial Sequence: Synthetic oligonucleotide
  Antisense strand to SEQ ID NO: 2368590
aaacuugagguugaucaca

SEQ ID NO: 2368592 - RNA, 19 nt, Artificial Sequence
  Description of Artificial Sequence: Synthetic oligonucleotide
  Sense strand starting at position 3596 of SEQ ID NO: 1885803
gcgacucugcugcauuuaa

SEQ ID NO: 2368593 - RNA, 19 nt, Artificial Sequence
  Description of Artificial Sequence: Synthetic oligonucleotide
  Antisense strand to SEQ ID NO: 2368592
uuaaaugcagcagagucgc

SEQ ID NO: 2368594 - RNA, 19 nt, Artificial Sequence
  Description of Artificial Sequence: Synthetic oligonucleotide
  Sense strand starting at position 3669 of SEQ ID NO: 1885803
ucauuaaugugauugcaaa

SEQ ID NO: 2368595 - RNA, 19 nt, Artificial Sequence
  Description of Artificial Sequence: Synthetic oligonucleotide
  Antisense strand to SEQ ID NO: 2368594
uuugcaaucacauuaauga

SEQ ID NO: 2368596 - RNA, 19 nt, Artificial Sequence
  Description of Artificial Sequence: Synthetic oligonucleotide
  Sense strand starting at position 3677 of SEQ ID NO: 1885803
gugauugcaaaccauggau

SEQ ID NO: 2368597 - RNA, 19 nt, Artificial Sequence
  Description of Artificial Sequence: Synthetic oligonucleotide
  Antisense strand to SEQ ID NO: 2368596
auccaugguuugcaaucac

SEQ ID NO: 2368598 - RNA, 19 nt, Artificial Sequence
  Description of Artificial Sequence: Synthetic oligonucleotide
  Sense strand starting at position 3777 of SEQ ID NO: 1885803
augucuguccgugaaggaa

SEQ ID NO: 2368599 - RNA, 19 nt, Artificial Sequence
  Description of Artificial Sequence: Synthetic oligonucleotide
  Antisense strand to SEQ ID NO: 2368598
uuccuucacggacagacau

SEQ ID NO: 2368600 - RNA, 19 nt, Artificial Sequence
  Description of Artificial Sequence: Synthetic oligonucleotide
  Sense strand starting at position 3786 of SEQ ID NO: 1885803
cgugaaggaauauguuaag

SEQ ID NO: 2368601 - RNA, 19 nt, Artificial Sequence
  Description of Artificial Sequence: Synthetic oligonucleotide
  Antisense strand to SEQ ID NO: 2368600
cuuaacauauuccuucacg

SEQ ID NO: 2368602 - RNA, 19 nt, Artificial Sequence
  Description of Artificial Sequence: Synthetic oligonucleotide
  Sense strand starting at position 3792 of SEQ ID NO: 1885803
ggaauauguuaagcaacua

SEQ ID NO: 2368603 - RNA, 19 nt, Artificial Sequence
  Description of Artificial Sequence: Synthetic oligonucleotide
  Antisense strand to SEQ ID NO: 2368602
uaguugcuuaacauauucc

SEQ ID NO: 2368604 - RNA, 19 nt, Artificial Sequence
  Description of Artificial Sequence: Synthetic oligonucleotide
  Sense strand starting at position 42 of SEQ ID NO: 1885804
ucagguauggcgcagaaau

SEQ ID NO: 2368605 - RNA, 19 nt, Artificial Sequence
  Description of Artificial Sequence: Synthetic oligonucleotide
  Antisense strand to SEQ ID NO: 2368604
auuucugcgccauaccuga

SEQ ID NO: 2368606 - RNA, 19 nt, Artificial Sequence
  Description of Artificial Sequence: Synthetic oligonucleotide
  Sense strand starting at position 426 of SEQ ID NO: 1885804
aguagaaguuaguucucca

SEQ ID NO: 2368607 - RNA, 19 nt, Artificial Sequence
  Description of Artificial Sequence: Synthetic oligonucleotide
  Antisense strand to SEQ ID NO: 2368606
uggagaacuaacuucuacu

SEQ ID NO: 2368608 - RNA, 19 nt, Artificial Sequence
  Description of Artificial Sequence: Synthetic oligonucleotide
  Sense strand starting at position 429 of SEQ ID NO: 1885804
agaaguuaguucuccauua

SEQ ID NO: 2368609 - RNA, 19 nt, Artificial Sequence
  Description of Artificial Sequence: Synthetic oligonucleotide
  Antisense strand to SEQ ID NO: 2368608
uaauggagaacuaacuucu

SEQ ID NO: 2368610 - RNA, 19 nt, Artificial Sequence
  Description of Artificial Sequence: Synthetic oligonucleotide
  Sense strand starting at position 434 of SEQ ID NO: 1885804
uuaguucuccauuacugga

SEQ ID NO: 2368611 - RNA, 19 nt, Artificial Sequence
  Description of Artificial Sequence: Synthetic oligonucleotide
  Antisense strand to SEQ ID NO: 2368610
uccaguaauggagaacuaa

SEQ ID NO: 2368612 - RNA, 19 nt, Artificial Sequence
  Description of Artificial Sequence: Synthetic oligonucleotide
  Sense strand starting at position 441 of SEQ ID NO: 1885804
uccauuacuggauggauca

SEQ ID NO: 2368613 - RNA, 19 nt, Artificial Sequence
  Description of Artificial Sequence: Synthetic oligonucleotide
  Antisense strand to SEQ ID NO: 2368612
ugauccauccaguaaugga

SEQ ID NO: 2368614 - RNA, 19 nt, Artificial Sequence
  Description of Artificial Sequence: Synthetic oligonucleotide
  Sense strand starting at position 442 of SEQ ID NO: 1885804
ccauuacuggauggaucau

SEQ ID NO: 2368615 - RNA, 19 nt, Artificial Sequence
  Description of Artificial Sequence: Synthetic oligonucleotide
  Antisense strand to SEQ ID NO: 2368614
augauccauccaguaaugg

SEQ ID NO: 2368616 - RNA, 19 nt, Artificial Sequence
  Description of Artificial Sequence: Synthetic oligonucleotide
  Sense strand starting at position 461 of SEQ ID NO: 1885804
aaacauugguuugugucaa

SEQ ID NO: 2368617 - RNA, 19 nt, Artificial Sequence
  Description of Artificial Sequence: Synthetic oligonucleotide
  Antisense strand to SEQ ID NO: 2368616
uugacacaaaccaauguuu

SEQ ID NO: 2368618 - RNA, 19 nt, Artificial Sequence
  Description of Artificial Sequence: Synthetic oligonucleotide
  Sense strand starting at position 593 of SEQ ID NO: 1885804
ucaauaucugccuagguau

SEQ ID NO: 2368619 - RNA, 19 nt, Artificial Sequence
  Description of Artificial Sequence: Synthetic oligonucleotide
  Antisense strand to SEQ ID NO: 2368618
auaccuaggcagauauuga

SEQ ID NO: 2368620 - RNA, 19 nt, Artificial Sequence
  Description of Artificial Sequence: Synthetic oligonucleotide
  Sense strand starting at position 932 of SEQ ID NO: 1885804
uucugaaaugguggucacu

SEQ ID NO: 2368621 - RNA, 19 nt, Artificial Sequence
  Description of Artificial Sequence: Synthetic oligonucleotide
  Antisense strand to SEQ ID NO: 2368620
agugaccaccauuucagaa

SEQ ID NO: 2368622 - RNA, 19 nt, Artificial Sequence
  Description of Artificial Sequence: Synthetic oligonucleotide
  Sense strand starting at position 934 of SEQ ID NO: 1885804
cugaaaugguggucacuug

SEQ ID NO: 2368623 - RNA, 19 nt, Artificial Sequence
  Description of Artificial Sequence: Synthetic oligonucleotide
  Antisense strand to SEQ ID NO: 2368622
caagugaccaccauuucag

SEQ ID NO: 2368624 - RNA, 19 nt, Artificial Sequence
  Description of Artificial Sequence: Synthetic oligonucleotide
  Sense strand starting at position 1162 of SEQ ID NO: 1885804
uucucacuaguccaugauu

SEQ ID NO: 2368625 - RNA, 19 nt, Artificial Sequence
  Description of Artificial Sequence: Synthetic oligonucleotide
  Antisense strand to SEQ ID NO: 2368624
aaucauggacuagugagaa

SEQ ID NO: 2368626 - RNA, 19 nt, Artificial Sequence
  Description of Artificial Sequence: Synthetic oligonucleotide
  Sense strand starting at position 1512 of SEQ ID NO: 1885804
auguguuuagcaugauuug

SEQ ID NO: 2368627 - RNA, 19 nt, Artificial Sequence
  Description of Artificial Sequence: Synthetic oligonucleotide
  Antisense strand to SEQ ID NO: 2368626
caaaucaugcuaaacacau

SEQ ID NO: 2368628 - RNA, 19 nt, Artificial Sequence
  Description of Artificial Sequence: Synthetic oligonucleotide
  Sense strand starting at position 1515 of SEQ ID NO: 1885804
uguuuagcaugauuugcaa

SEQ ID NO: 2368629 - RNA, 19 nt, Artificial Sequence
  Description of Artificial Sequence: Synthetic oligonucleotide
  Antisense strand to SEQ ID NO: 2368628
uugcaaaucaugcuaaaca

SEQ ID NO: 2368630 - RNA, 19 nt, Artificial Sequence
  Description of Artificial Sequence: Synthetic oligonucleotide
  Sense strand starting at position 1678 of SEQ ID NO: 1885804
ucggaacacugagugcaua

SEQ ID NO: 2368631 - RNA, 19 nt, Artificial Sequence
  Description of Artificial Sequence: Synthetic oligonucleotide
  Antisense strand to SEQ ID NO: 2368630
uaugcacucaguguuccga

SEQ ID NO: 2368632 - RNA, 19 nt, Artificial Sequence
  Description of Artificial Sequence: Synthetic oligonucleotide
  Sense strand starting at position 1686 of SEQ ID NO: 1885804
cugagugcauaucuaucua

SEQ ID NO: 2368633 - RNA, 19 nt, Artificial Sequence
  Description of Artificial Sequence: Synthetic oligonucleotide
  Antisense strand to SEQ ID NO: 2368632
uagauagauaugcacucag

SEQ ID NO: 2368634 - RNA, 19 nt, Artificial Sequence
  Description of Artificial Sequence: Synthetic oligonucleotide
  Sense strand starting at position 1785 of SEQ ID NO: 1885804
ccuugucuuuauuuguauu

SEQ ID NO: 2368635 - RNA, 19 nt, Artificial Sequence
  Description of Artificial Sequence: Synthetic oligonucleotide
  Antisense strand to SEQ ID NO: 2368634
aauacaaauaaagacaagg

SEQ ID NO: 2368636 - RNA, 19 nt, Artificial Sequence
  Description of Artificial Sequence: Synthetic oligonucleotide
  Sense strand starting at position 2109 of SEQ ID NO: 1885804
agaaguaacuaugucugua

SEQ ID NO: 2368637 - RNA, 19 nt, Artificial Sequence
  Description of Artificial Sequence: Synthetic oligonucleotide
  Antisense strand to SEQ ID NO: 2368636
uacagacauaguuacuucu

SEQ ID NO: 2368638 - RNA, 19 nt, Artificial Sequence
  Description of Artificial Sequence: Synthetic oligonucleotide
  Sense strand starting at position 2112 of SEQ ID NO: 1885804
aguaacuaugucuguaaga

SEQ ID NO: 2368639 - RNA, 19 nt, Artificial Sequence
  Description of Artificial Sequence: Synthetic oligonucleotide
  Antisense strand to SEQ ID NO: 2368638
ucuuacagacauaguuacu

SEQ ID NO: 2368640 - RNA, 19 nt, Artificial Sequence
  Description of Artificial Sequence: Synthetic oligonucleotide
  Sense strand starting at position 2113 of SEQ ID NO: 1885804
guaacuaugucuguaagau

SEQ ID NO: 2368641 - RNA, 19 nt, Artificial Sequence
  Description of Artificial Sequence: Synthetic oligonucleotide
  Antisense strand to SEQ ID NO: 2368640
aucuuacagacauaguuac

SEQ ID NO: 2368642 - RNA, 19 nt, Artificial Sequence
  Description of Artificial Sequence: Synthetic oligonucleotide
  Sense strand starting at position 2166 of SEQ ID NO: 1885804
uguaaugagccucaguauu

SEQ ID NO: 2368643 - RNA, 19 nt, Artificial Sequence
  Description of Artificial Sequence: Synthetic oligonucleotide
  Antisense strand to SEQ ID NO: 2368642
aauacugaggcucauuaca

SEQ ID NO: 2368644 - RNA, 19 nt, Artificial Sequence
  Description of Artificial Sequence: Synthetic oligonucleotide
  Sense strand starting at position 2288 of SEQ ID NO: 1885804
cguuacuaugguuauauca

SEQ ID NO: 2368645 - RNA, 19 nt, Artificial Sequence
  Description of Artificial Sequence: Synthetic oligonucleotide
  Antisense strand to SEQ ID NO: 2368644
ugauauaaccauaguaacg

SEQ ID NO: 2368646 - RNA, 19 nt, Artificial Sequence
  Description of Artificial Sequence: Synthetic oligonucleotide
  Sense strand starting at position 2296 of SEQ ID NO: 1885804
ugguuauaucaugguauaa

SEQ ID NO: 2368647 - RNA, 19 nt, Artificial Sequence
  Description of Artificial Sequence: Synthetic oligonucleotide
  Antisense strand to SEQ ID NO: 2368646
uuauaccaugauauaacca

SEQ ID NO: 2368648 - RNA, 19 nt, Artificial Sequence
  Description of Artificial Sequence: Synthetic oligonucleotide
  Sense strand starting at position 2307 of SEQ ID NO: 1885804
ugguauaaccaccaaguua

SEQ ID NO: 2368649 - RNA, 19 nt, Artificial Sequence
  Description of Artificial Sequence: Synthetic oligonucleotide
  Antisense strand to SEQ ID NO: 2368648
uaacuuggugguuauacca

SEQ ID NO: 2368650 - RNA, 19 nt, Artificial Sequence
  Description of Artificial Sequence: Synthetic oligonucleotide
  Sense strand starting at position 2489 of SEQ ID NO: 1885804
uaaugaauuucguugugcu

SEQ ID NO: 2368651 - RNA, 19 nt, Artificial Sequence
  Description of Artificial Sequence: Synthetic oligonucleotide
  Antisense strand to SEQ ID NO: 2368650
agcacaacgaaauucauua

SEQ ID NO: 2368652 - RNA, 19 nt, Artificial Sequence
  Description of Artificial Sequence: Synthetic oligonucleotide
  Sense strand starting at position 2490 of SEQ ID NO: 1885804
aaugaauuucguugugcug

SEQ ID NO: 2368653 - RNA, 19 nt, Artificial Sequence
  Description of Artificial Sequence: Synthetic oligonucleotide
  Antisense strand to SEQ ID NO: 2368652
cagcacaacgaaauucauu

SEQ ID NO: 2368654 - RNA, 19 nt, Artificial Sequence
  Description of Artificial Sequence: Synthetic oligonucleotide
  Sense strand starting at position 2493 of SEQ ID NO: 1885804
gaauuucguugugcugaaa

SEQ ID NO: 2368655 - RNA, 19 nt, Artificial Sequence
  Description of Artificial Sequence: Synthetic oligonucleotide
  Antisense strand to SEQ ID NO: 2368654
uuucagcacaacgaaauuc

SEQ ID NO: 2368656 - RNA, 19 nt, Artificial Sequence
  Description of Artificial Sequence: Synthetic oligonucleotide
  Sense strand starting at position 2502 of SEQ ID NO: 1885804
ugugcugaaauggauuaau

SEQ ID NO: 2368657 - RNA, 19 nt, Artificial Sequence
  Description of Artificial Sequence: Synthetic oligonucleotide
  Antisense strand to SEQ ID NO: 2368656
auuaauccauuucagcaca

SEQ ID NO: 2368658 - RNA, 19 nt, Artificial Sequence
  Description of Artificial Sequence: Synthetic oligonucleotide
  Sense strand starting at position 2826 of SEQ ID NO: 1885804
aucauagcucuguaguaaa

SEQ ID NO: 2368659 - RNA, 19 nt, Artificial Sequence
  Description of Artificial Sequence: Synthetic oligonucleotide
  Antisense strand to SEQ ID NO: 2368658
uuuacuacagagcuaugau

SEQ ID NO: 2368660 - RNA, 19 nt, Artificial Sequence
  Description of Artificial Sequence: Synthetic oligonucleotide
  Sense strand starting at position 2874 of SEQ ID NO: 1885804
cugaacacuugagaagaga

SEQ ID NO: 2368661 - RNA, 19 nt, Artificial Sequence
  Description of Artificial Sequence: Synthetic oligonucleotide
  Antisense strand to SEQ ID NO: 2368660
ucucuucucaaguguucag

SEQ ID NO: 2368662 - RNA, 19 nt, Artificial Sequence
  Description of Artificial Sequence: Synthetic oligonucleotide
  Sense strand starting at position 3042 of SEQ ID NO: 1885804
ugaauuaaucaugaguguc

SEQ ID NO: 2368663 - RNA, 19 nt, Artificial Sequence
  Description of Artificial Sequence: Synthetic oligonucleotide
  Antisense strand to SEQ ID NO: 2368662
gacacucaugauuaauuca

SEQ ID NO: 2368664 - RNA, 19 nt, Artificial Sequence
  Description of Artificial Sequence: Synthetic oligonucleotide
  Sense strand starting at position 3206 of SEQ ID NO: 1885804
cagucuugugcacagauga

SEQ ID NO: 2368665 - RNA, 19 nt, Artificial Sequence
  Description of Artificial Sequence: Synthetic oligonucleotide
  Antisense strand to SEQ ID NO: 2368664
ucaucugugcacaagacug

SEQ ID NO: 2368666 - RNA, 19 nt, Artificial Sequence
  Description of Artificial Sequence: Synthetic oligonucleotide
  Sense strand starting at position 3262 of SEQ ID NO: 1885804
acuaauuuauugggacuaa

SEQ ID NO: 2368667 - RNA, 19 nt, Artificial Sequence
  Description of Artificial Sequence: Synthetic oligonucleotide
  Antisense strand to SEQ ID NO: 2368666
uuagucccaauaaauuagu

SEQ ID NO: 2368668 - RNA, 19 nt, Artificial Sequence
  Description of Artificial Sequence: Synthetic oligonucleotide
  Sense strand starting at position 3263 of SEQ ID NO: 1885804
cuaauuuauugggacuaag

SEQ ID NO: 2368669 - RNA, 19 nt, Artificial Sequence
  Description of Artificial Sequence: Synthetic oligonucleotide
  Antisense strand to SEQ ID NO: 2368668
cuuagucccaauaaauuag

SEQ ID NO: 2368670 - RNA, 19 nt, Artificial Sequence
  Description of Artificial Sequence: Synthetic oligonucleotide
  Sense strand starting at position 3473 of SEQ ID NO: 1885804
agaauaaagaggugucucu

SEQ ID NO: 2368671 - RNA, 19 nt, Artificial Sequence
  Description of Artificial Sequence: Synthetic oligonucleotide
  Antisense strand to SEQ ID NO: 2368670
agagacaccucuuuauucu

SEQ ID NO: 2368672 - RNA, 19 nt, Artificial Sequence
  Description of Artificial Sequence: Synthetic oligonucleotide
  Sense strand starting at position 3670 of SEQ ID NO: 1885804
ggcccauagagcuagacua

SEQ ID NO: 2368673 - RNA, 19 nt, Artificial Sequence
  Description of Artificial Sequence: Synthetic oligonucleotide
  Antisense strand to SEQ ID NO: 2368672
uagucuagcucuaugggcc

SEQ ID NO: 2368674 - RNA, 19 nt, Artificial Sequence
  Description of Artificial Sequence: Synthetic oligonucleotide
  Sense strand starting at position 3698 of SEQ ID NO: 1885804
ggccaugacacguaaaggu

SEQ ID NO: 2368675 - RNA, 19 nt, Artificial Sequence
  Description of Artificial Sequence: Synthetic oligonucleotide
  Antisense strand to SEQ ID NO: 2368674
accuuuacgugucauggcc

SEQ ID NO: 2368676 - RNA, 19 nt, Artificial Sequence
  Description of Artificial Sequence: Synthetic oligonucleotide
  Sense strand starting at position 3717 of SEQ ID NO: 1885804
gcacaugugaauuggucaa

SEQ ID NO: 2368677 - RNA, 19 nt, Artificial Sequence
  Description of Artificial Sequence: Synthetic oligonucleotide
  Antisense strand to SEQ ID NO: 2368676
uugaccaauucacaugugc

SEQ ID NO: 2368678 - RNA, 19 nt, Artificial Sequence
  Description of Artificial Sequence: Synthetic oligonucleotide
  Sense strand starting at position 3719 of SEQ ID NO: 1885804
acaugugaauuggucaaug

SEQ ID NO: 2368679 - RNA, 19 nt, Artificial Sequence
  Description of Artificial Sequence: Synthetic oligonucleotide
  Antisense strand to SEQ ID NO: 2368678
cauugaccaauucacaugu

SEQ ID NO: 2368680 - RNA, 19 nt, Artificial Sequence
  Description of Artificial Sequence: Synthetic oligonucleotide
  Sense strand starting at position 3952 of SEQ ID NO: 1885804
cugcucugagaauaaguua

SEQ ID NO: 2368681 - RNA, 19 nt, Artificial Sequence
  Description of Artificial Sequence: Synthetic oligonucleotide
  Antisense strand to SEQ ID NO: 2368680
uaacuuauucucagagcag

SEQ ID NO: 2368682 - RNA, 19 nt, Artificial Sequence
  Description of Artificial Sequence: Synthetic oligonucleotide
  Sense strand starting at position 3955 of SEQ ID NO: 1885804
cucugagaauaaguuaacu

SEQ ID NO: 2368683 - RNA, 19 nt, Artificial Sequence
  Description of Artificial Sequence: Synthetic oligonucleotide
  Antisense strand to SEQ ID NO: 2368682
aguuaacuuauucucagag

SEQ ID NO: 2368684 - RNA, 19 nt, Artificial Sequence
  Description of Artificial Sequence: Synthetic oligonucleotide
  Sense strand starting at position 106 of SEQ ID NO: 1885805
cuaacaggacuuugcauau

SEQ ID NO: 2368685 - RNA, 19 nt, Artificial Sequence
  Description of Artificial Sequence: Synthetic oligonucleotide
  Antisense strand to SEQ ID NO: 2368684
auaugcaaaguccuguuag

SEQ ID NO: 2368686 - RNA, 19 nt, Artificial Sequence
  Description of Artificial Sequence: Synthetic oligonucleotide
  Sense strand starting at position 606 of SEQ ID NO: 1885805
aucagcagagacugauuaa

SEQ ID NO: 2368687 - RNA, 19 nt, Artificial Sequence
  Description of Artificial Sequence: Synthetic oligonucleotide
  Antisense strand to SEQ ID NO: 2368686
uuaaucagucucugcugau

SEQ ID NO: 2368688 - RNA, 19 nt, Artificial Sequence
  Description of Artificial Sequence: Synthetic oligonucleotide
  Sense strand starting at position 642 of SEQ ID NO: 1885805
uucuguggaguugaauaca

SEQ ID NO: 2368689 - RNA, 19 nt, Artificial Sequence
  Description of Artificial Sequence: Synthetic oligonucleotide
  Antisense strand to SEQ ID NO: 2368688
uguauucaacuccacagaa

SEQ ID NO: 2368690 - RNA, 19 nt, Artificial Sequence
  Description of Artificial Sequence: Synthetic oligonucleotide
  Sense strand starting at position 705 of SEQ ID NO: 1885805
gacauuaguugugugauau

SEQ ID NO: 2368691 - RNA, 19 nt, Artificial Sequence
  Description of Artificial Sequence: Synthetic oligonucleotide
  Antisense strand to SEQ ID NO: 2368690
auaucacacaacuaauguc

SEQ ID NO: 2368692 - RNA, 19 nt, Artificial Sequence
  Description of Artificial Sequence: Synthetic oligonucleotide
  Sense strand starting at position 871 of SEQ ID NO: 1885805
gcacacaucugucuauaga

SEQ ID NO: 2368693 - RNA, 19 nt, Artificial Sequence
  Description of Artificial Sequence: Synthetic oligonucleotide
  Antisense strand to SEQ ID NO: 2368692
ucuauagacagaugugugc

SEQ ID NO: 2368694 - RNA, 19 nt, Artificial Sequence
  Description of Artificial Sequence: Synthetic oligonucleotide
  Sense strand starting at position 933 of SEQ ID NO: 1885805
ggacucaacauguguagaa

SEQ ID NO: 2368695 - RNA, 19 nt, Artificial Sequence
  Description of Artificial Sequence: Synthetic oligonucleotide
  Antisense strand to SEQ ID NO: 2368694
uucuacacauguugagucc

SEQ ID NO: 2368696 - RNA, 19 nt, Artificial Sequence
  Description of Artificial Sequence: Synthetic oligonucleotide
  Sense strand starting at position 934 of SEQ ID NO: 1885805
gacucaacauguguagaaa

SEQ ID NO: 2368697 - RNA, 19 nt, Artificial Sequence
  Description of Artificial Sequence: Synthetic oligonucleotide
  Antisense strand to SEQ ID NO: 2368696
uuucuacacauguugaguc

SEQ ID NO: 2368698 - RNA, 19 nt, Artificial Sequence
  Description of Artificial Sequence: Synthetic oligonucleotide
  Sense strand starting at position 980 of SEQ ID NO: 1885805
gcauauuaucaccaauggu

SEQ ID NO: 2368699 - RNA, 19 nt, Artificial Sequence
  Description of Artificial Sequence: Synthetic oligonucleotide
  Antisense strand to SEQ ID NO: 2368698
accauuggugauaauaugc

SEQ ID NO: 2368700 - RNA, 19 nt, Artificial Sequence
  Description of Artificial Sequence: Synthetic oligonucleotide
  Sense strand starting at position 995 of SEQ ID NO: 1885805
ugguaaaugcuuuacccua

SEQ ID NO: 2368701 - RNA, 19 nt, Artificial Sequence
  Description of Artificial Sequence: Synthetic oligonucleotide
  Antisense strand to SEQ ID NO: 2368700
uaggguaaagcauuuacca

SEQ ID NO: 2368702 - RNA, 19 nt, Artificial Sequence
  Description of Artificial Sequence: Synthetic oligonucleotide
  Sense strand starting at position 1051 of SEQ ID NO: 1885805
uguuaugacgcauggaaua

SEQ ID NO: 2368703 - RNA, 19 nt, Artificial Sequence
  Description of Artificial Sequence: Synthetic oligonucleotide
  Antisense strand to SEQ ID NO: 2368702
uauuccaugcgucauaaca

SEQ ID NO: 2368704 - RNA, 19 nt, Artificial Sequence
  Description of Artificial Sequence: Synthetic oligonucleotide
  Sense strand starting at position 1053 of SEQ ID NO: 1885805
uuaugacgcauggaauauu

SEQ ID NO: 2368705 - RNA, 19 nt, Artificial Sequence
  Description of Artificial Sequence: Synthetic oligonucleotide
  Antisense strand to SEQ ID NO: 2368704
aauauuccaugcgucauaa

SEQ ID NO: 2368706 - RNA, 19 nt, Artificial Sequence
  Description of Artificial Sequence: Synthetic oligonucleotide
  Sense strand starting at position 1204 of SEQ ID NO: 1885805
aagacagcaucaguaguuu

SEQ ID NO: 2368707 - RNA, 19 nt, Artificial Sequence
  Description of Artificial Sequence: Synthetic oligonucleotide
  Antisense strand to SEQ ID NO: 2368706
aaacuacugaugcugucuu

SEQ ID NO: 2368708 - RNA, 19 nt, Artificial Sequence
  Description of Artificial Sequence: Synthetic oligonucleotide
  Sense strand starting at position 1369 of SEQ ID NO: 1885805
auauuaugucuccauaugu

SEQ ID NO: 2368709 - RNA, 19 nt, Artificial Sequence
  Description of Artificial Sequence: Synthetic oligonucleotide
  Antisense strand to SEQ ID NO: 2368708
acauauggagacauaauau

SEQ ID NO: 2368710 - RNA, 19 nt, Artificial Sequence
  Description of Artificial Sequence: Synthetic oligonucleotide
  Sense strand starting at position 1377 of SEQ ID NO: 1885805
ucuccauauguccauuaug

SEQ ID NO: 2368711 - RNA, 19 nt, Artificial Sequence
  Description of Artificial Sequence: Synthetic oligonucleotide
  Antisense strand to SEQ ID NO: 2368710
cauaauggacauauggaga

SEQ ID NO: 2368712 - RNA, 19 nt, Artificial Sequence
  Description of Artificial Sequence: Synthetic oligonucleotide
  Sense strand starting at position 1380 of SEQ ID NO: 1885805
ccauauguccauuaugcua

SEQ ID NO: 2368713 - RNA, 19 nt, Artificial Sequence
  Description of Artificial Sequence: Synthetic oligonucleotide
  Antisense strand to SEQ ID NO: 2368712
uagcauaauggacauaugg

SEQ ID NO: 2368714 - RNA, 19 nt, Artificial Sequence
  Description of Artificial Sequence: Synthetic oligonucleotide
  Sense strand starting at position 1448 of SEQ ID NO: 1885805
aguacagaguuggauuuau

SEQ ID NO: 2368715 - RNA, 19 nt, Artificial Sequence
  Description of Artificial Sequence: Synthetic oligonucleotide
  Antisense strand to SEQ ID NO: 2368714
auaaauccaacucuguacu

SEQ ID NO: 2368716 - RNA, 19 nt, Artificial Sequence
  Description of Artificial Sequence: Synthetic oligonucleotide
  Sense strand starting at position 1624 of SEQ ID NO: 1885805
gcauacaucuguccacaua

SEQ ID NO: 2368717 - RNA, 19 nt, Artificial Sequence
  Description of Artificial Sequence: Synthetic oligonucleotide
  Antisense strand to SEQ ID NO: 2368716
uauguggacagauguaugc

SEQ ID NO: 2368718 - RNA, 19 nt, Artificial Sequence
  Description of Artificial Sequence: Synthetic oligonucleotide
  Sense strand starting at position 1658 of SEQ ID NO: 1885805
ggcaacagccucuaucauu

SEQ ID NO: 2368719 - RNA, 19 nt, Artificial Sequence
  Description of Artificial Sequence: Synthetic oligonucleotide
  Antisense strand to SEQ ID NO: 2368718
aaugauagaggcuguugcc

SEQ ID NO: 2368720 - RNA, 19 nt, Artificial Sequence
  Description of Artificial Sequence: Synthetic oligonucleotide
  Sense strand starting at position 1695 of SEQ ID NO: 1885805
gugcuaucgaagcauauaa

SEQ ID NO: 2368721 - RNA, 19 nt, Artificial Sequence
  Description of Artificial Sequence: Synthetic oligonucleotide
  Antisense strand to SEQ ID NO: 2368720
uuauaugcuucgauagcac

SEQ ID NO: 2368722 - RNA, 19 nt, Artificial Sequence
  Description of Artificial Sequence: Synthetic oligonucleotide
  Sense strand starting at position 1697 of SEQ ID NO: 1885805
gcuaucgaagcauauaaua

SEQ ID NO: 2368723 - RNA, 19 nt, Artificial Sequence
  Description of Artificial Sequence: Synthetic oligonucleotide
  Antisense strand to SEQ ID NO: 2368722
uauuauaugcuucgauagc

SEQ ID NO: 2368724 - RNA, 19 nt, Artificial Sequence
  Description of Artificial Sequence: Synthetic oligonucleotide
  Sense strand starting at position 1719 of SEQ ID NO: 1885805
auccauucgucauuacaua

SEQ ID NO: 2368725 - RNA, 19 nt, Artificial Sequence
  Description of Artificial Sequence: Synthetic oligonucleotide
  Antisense strand to SEQ ID NO: 2368724
uauguaaugacgaauggau

SEQ ID NO: 2368726 - RNA, 19 nt, Artificial Sequence
  Description of Artificial Sequence: Synthetic oligonucleotide
  Sense strand starting at position 1868 of SEQ ID NO: 1885805
uucugaacuuguguuauaa

SEQ ID NO: 2368727 - RNA, 19 nt, Artificial Sequence
  Description of Artificial Sequence: Synthetic oligonucleotide
  Antisense strand to SEQ ID NO: 2368726
uuauaacacaaguucagaa

SEQ ID NO: 2368728 - RNA, 19 nt, Artificial Sequence
  Description of Artificial Sequence: Synthetic oligonucleotide
  Sense strand starting at position 2124 of SEQ ID NO: 1885805
acuagaucucagugccaca

SEQ ID NO: 2368729 - RNA, 19 nt, Artificial Sequence
  Description of Artificial Sequence: Synthetic oligonucleotide
  Antisense strand to SEQ ID NO: 2368728
uguggcacugagaucuagu

SEQ ID NO: 2368730 - RNA, 19 nt, Artificial Sequence
  Description of Artificial Sequence: Synthetic oligonucleotide
  Sense strand starting at position 2185 of SEQ ID NO: 1885805
acaugaauggccgaugacu

SEQ ID NO: 2368731 - RNA, 19 nt, Artificial Sequence
  Description of Artificial Sequence: Synthetic oligonucleotide
  Antisense strand to SEQ ID NO: 2368730
agucaucggccauucaugu

SEQ ID NO: 2368732 - RNA, 19 nt, Artificial Sequence
  Description of Artificial Sequence: Synthetic oligonucleotide
  Sense strand starting at position 2307 of SEQ ID NO: 1885805
acaagagcuucuccugaac

SEQ ID NO: 2368733 - RNA, 19 nt, Artificial Sequence
  Description of Artificial Sequence: Synthetic oligonucleotide
  Antisense strand to SEQ ID NO: 2368732
guucaggagaagcucuugu

SEQ ID NO: 2368734 - RNA, 19 nt, Artificial Sequence
  Description of Artificial Sequence: Synthetic oligonucleotide
  Sense strand starting at position 2310 of SEQ ID NO: 1885805
agagcuucuccugaacagu

SEQ ID NO: 2368735 - RNA, 19 nt, Artificial Sequence
  Description of Artificial Sequence: Synthetic oligonucleotide
  Antisense strand to SEQ ID NO: 2368734
acuguucaggagaagcucu

SEQ ID NO: 2368736 - RNA, 19 nt, Artificial Sequence
  Description of Artificial Sequence: Synthetic oligonucleotide
  Sense strand starting at position 2313 of SEQ ID NO: 1885805
gcuucuccugaacaguuaa

SEQ ID NO: 2368737 - RNA, 19 nt, Artificial Sequence
  Description of Artificial Sequence: Synthetic oligonucleotide
  Antisense strand to SEQ ID NO: 2368736
uuaacuguucaggagaagc

SEQ ID NO: 2368738 - RNA, 19 nt, Artificial Sequence
  Description of Artificial Sequence: Synthetic oligonucleotide
  Sense strand starting at position 2367 of SEQ ID NO: 1885805
ucagguauggcgcagaaau

SEQ ID NO: 2368739 - RNA, 19 nt, Artificial Sequence
  Description of Artificial Sequence: Synthetic oligonucleotide
  Antisense strand to SEQ ID NO: 2368738
auuucugcgccauaccuga

SEQ ID NO: 2368740 - RNA, 19 nt, Artificial Sequence
  Description of Artificial Sequence: Synthetic oligonucleotide
  Sense strand starting at position 2751 of SEQ ID NO: 1885805
aguagaaguuaguucucca

SEQ ID NO: 2368741 - RNA, 19 nt, Artificial Sequence
  Description of Artificial Sequence: Synthetic oligonucleotide
  Antisense strand to SEQ ID NO: 2368740
uggagaacuaacuucuacu

SEQ ID NO: 2368742 - RNA, 19 nt, Artificial Sequence
  Description of Artificial Sequence: Synthetic oligonucleotide
  Sense strand starting at position 2754 of SEQ ID NO: 1885805
agaaguuaguucuccauua

SEQ ID NO: 2368743 - RNA, 19 nt, Artificial Sequence
  Description of Artificial Sequence: Synthetic oligonucleotide
  Antisense strand to SEQ ID NO: 2368742
uaauggagaacuaacuucu

SEQ ID NO: 2368744 - RNA, 19 nt, Artificial Sequence
  Description of Artificial Sequence: Synthetic oligonucleotide
  Sense strand starting at position 2759 of SEQ ID NO: 1885805
uuaguucuccauuacugga

SEQ ID NO: 2368745 - RNA, 19 nt, Artificial Sequence
  Description of Artificial Sequence: Synthetic oligonucleotide
  Antisense strand to SEQ ID NO: 2368744
uccaguaauggagaacuaa

SEQ ID NO: 2368746 - RNA, 19 nt, Artificial Sequence
  Description of Artificial Sequence: Synthetic oligonucleotide
  Sense strand starting at position 2766 of SEQ ID NO: 1885805
uccauuacuggauggauca

SEQ ID NO: 2368747 - RNA, 19 nt, Artificial Sequence
  Description of Artificial Sequence: Synthetic oligonucleotide
  Antisense strand to SEQ ID NO: 2368746
ugauccauccaguaaugga

SEQ ID NO: 2368748 - RNA, 19 nt, Artificial Sequence
  Description of Artificial Sequence: Synthetic oligonucleotide
  Sense strand starting at position 2767 of SEQ ID NO: 1885805
ccauuacuggauggaucau

SEQ ID NO: 2368749 - RNA, 19 nt, Artificial Sequence
  Description of Artificial Sequence: Synthetic oligonucleotide
  Antisense strand to SEQ ID NO: 2368748
augauccauccaguaaugg

SEQ ID NO: 2368750 - RNA, 19 nt, Artificial Sequence
  Description of Artificial Sequence: Synthetic oligonucleotide
  Sense strand starting at position 2786 of SEQ ID NO: 1885805
aaacauugguuugugucaa

SEQ ID NO: 2368751 - RNA, 19 nt, Artificial Sequence
  Description of Artificial Sequence: Synthetic oligonucleotide
  Antisense strand to SEQ ID NO: 2368750
uugacacaaaccaauguuu

SEQ ID NO: 2368752 - RNA, 19 nt, Artificial Sequence
  Description of Artificial Sequence: Synthetic oligonucleotide
  Sense strand starting at position 2918 of SEQ ID NO: 1885805
ucaauaucugccuagguau

SEQ ID NO: 2368753 - RNA, 19 nt, Artificial Sequence
  Description of Artificial Sequence: Synthetic oligonucleotide
  Antisense strand to SEQ ID NO: 2368752
auaccuaggcagauauuga

SEQ ID NO: 2368754 - RNA, 19 nt, Artificial Sequence
  Description of Artificial Sequence: Synthetic oligonucleotide
  Sense strand starting at position 3257 of SEQ ID NO: 1885805
uucugaaaugguggucacu

SEQ ID NO: 2368755 - RNA, 19 nt, Artificial Sequence
  Description of Artificial Sequence: Synthetic oligonucleotide
  Antisense strand to SEQ ID NO: 2368754
agugaccaccauuucagaa

SEQ ID NO: 2368756 - RNA, 19 nt, Artificial Sequence
  Description of Artificial Sequence: Synthetic oligonucleotide
  Sense strand starting at position 3259 of SEQ ID NO: 1885805
cugaaaugguggucacuug

SEQ ID NO: 2368757 - RNA, 19 nt, Artificial Sequence
  Description of Artificial Sequence: Synthetic oligonucleotide
  Antisense strand to SEQ ID NO: 2368756
caagugaccaccauuucag

SEQ ID NO: 2368758 - RNA, 19 nt, Artificial Sequence
  Description of Artificial Sequence: Synthetic oligonucleotide
  Sense strand starting at position 3487 of SEQ ID NO: 1885805
uucucacuaguccaugauu

SEQ ID NO: 2368759 - RNA, 19 nt, Artificial Sequence
  Description of Artificial Sequence: Synthetic oligonucleotide
  Antisense strand to SEQ ID NO: 2368758
aaucauggacuagugagaa

SEQ ID NO: 2368760 - RNA, 19 nt, Artificial Sequence
  Description of Artificial Sequence: Synthetic oligonucleotide
  Sense strand starting at position 3837 of SEQ ID NO: 1885805
auguguuuagcaugauuug

SEQ ID NO: 2368761 - RNA, 19 nt, Artificial Sequence
  Description of Artificial Sequence: Synthetic oligonucleotide
  Antisense strand to SEQ ID NO: 2368760
caaaucaugcuaaacacau

SEQ ID NO: 2368762 - RNA, 19 nt, Artificial Sequence
  Description of Artificial Sequence: Synthetic oligonucleotide
  Sense strand starting at position 3840 of SEQ ID NO: 1885805
uguuuagcaugauuugcaa

SEQ ID NO: 2368763 - RNA, 19 nt, Artificial Sequence
  Description of Artificial Sequence: Synthetic oligonucleotide
  Antisense strand to SEQ ID NO: 2368762
uugcaaaucaugcuaaaca

SEQ ID NO: 2368764 - RNA, 19 nt, Artificial Sequence
  Description of Artificial Sequence: Synthetic oligonucleotide
  Sense strand starting at position 59 of SEQ ID NO: 1885806
gaagauagaucccuuugug

SEQ ID NO: 2368765 - RNA, 19 nt, Artificial Sequence
  Description of Artificial Sequence: Synthetic oligonucleotide
  Antisense strand to SEQ ID NO: 2368764
cacaaagggaucuaucuuc

SEQ ID NO: 2368766 - RNA, 19 nt, Artificial Sequence
  Description of Artificial Sequence: Synthetic oligonucleotide
  Sense strand starting at position 102 of SEQ ID NO: 1885806
gcagauuaaugaccauauc

SEQ ID NO: 2368767 - RNA, 19 nt, Artificial Sequence
  Description of Artificial Sequence: Synthetic oligonucleotide
  Antisense strand to SEQ ID NO: 2368766
gauauggucauuaaucugc

SEQ ID NO: 2368768 - RNA, 19 nt, Artificial Sequence
  Description of Artificial Sequence: Synthetic oligonucleotide
  Sense strand starting at position 141 of SEQ ID NO: 1885806
cucuuaauuggucaaggcu

SEQ ID NO: 2368769 - RNA, 19 nt, Artificial Sequence
  Description of Artificial Sequence: Synthetic oligonucleotide
  Antisense strand to SEQ ID NO: 2368768
agccuugaccaauuaagag

SEQ ID NO: 2368770 - RNA, 19 nt, Artificial Sequence
  Description of Artificial Sequence: Synthetic oligonucleotide
  Sense strand starting at position 250 of SEQ ID NO: 1885806
uccaucuuggaaugugaau

SEQ ID NO: 2368771 - RNA, 19 nt, Artificial Sequence
  Description of Artificial Sequence: Synthetic oligonucleotide
  Antisense strand to SEQ ID NO: 2368770
auucacauuccaagaugga

SEQ ID NO: 2368772 - RNA, 19 nt, Artificial Sequence
  Description of Artificial Sequence: Synthetic oligonucleotide
  Sense strand starting at position 267 of SEQ ID NO: 1885806
auaagcugucuuuauagag

SEQ ID NO: 2368773 - RNA, 19 nt, Artificial Sequence
  Description of Artificial Sequence: Synthetic oligonucleotide
  Antisense strand to SEQ ID NO: 2368772
cucuauaaagacagcuuau

SEQ ID NO: 2368774 - RNA, 19 nt, Artificial Sequence
  Description of Artificial Sequence: Synthetic oligonucleotide
  Sense strand starting at position 274 of SEQ ID NO: 1885806
gucuuuauagagggagguu

SEQ ID NO: 2368775 - RNA, 19 nt, Artificial Sequence
  Description of Artificial Sequence: Synthetic oligonucleotide
  Antisense strand to SEQ ID NO: 2368774
aaccucccucuauaaagac

SEQ ID NO: 2368776 - RNA, 19 nt, Artificial Sequence
  Description of Artificial Sequence: Synthetic oligonucleotide
  Sense strand starting at position 404 of SEQ ID NO: 1885806
cacagaugugcugaaugau

SEQ ID NO: 2368777 - RNA, 19 nt, Artificial Sequence
  Description of Artificial Sequence: Synthetic oligonucleotide
  Antisense strand to SEQ ID NO: 2368776
aucauucagcacaucugug

SEQ ID NO: 2368778 - RNA, 19 nt, Artificial Sequence
  Description of Artificial Sequence: Synthetic oligonucleotide
  Sense strand starting at position 576 of SEQ ID NO: 1885806
ucuuccucgcuggagaaua

SEQ ID NO: 2368779 - RNA, 19 nt, Artificial Sequence
  Description of Artificial Sequence: Synthetic oligonucleotide
  Antisense strand to SEQ ID NO: 2368778
uauucuccagcgaggaaga

SEQ ID NO: 2368780 - RNA, 19 nt, Artificial Sequence
  Description of Artificial Sequence: Synthetic oligonucleotide
  Sense strand starting at position 578 of SEQ ID NO: 1885806
uuccucgcuggagaauaau

SEQ ID NO: 2368781 - RNA, 19 nt, Artificial Sequence
  Description of Artificial Sequence: Synthetic oligonucleotide
  Antisense strand to SEQ ID NO: 2368780
auuauucuccagcgaggaa

SEQ ID NO: 2368782 - RNA, 19 nt, Artificial Sequence
  Description of Artificial Sequence: Synthetic oligonucleotide
  Sense strand starting at position 584 of SEQ ID NO: 1885806
gcuggagaauaauugaauc

SEQ ID NO: 2368783 - RNA, 19 nt, Artificial Sequence
  Description of Artificial Sequence: Synthetic oligonucleotide
  Antisense strand to SEQ ID NO: 2368782
gauucaauuauucuccagc

SEQ ID NO: 2368784 - RNA, 19 nt, Artificial Sequence
  Description of Artificial Sequence: Synthetic oligonucleotide
  Sense strand starting at position 631 of SEQ ID NO: 1885806
gugaauauaauagguagau

SEQ ID NO: 2368785 - RNA, 19 nt, Artificial Sequence
  Description of Artificial Sequence: Synthetic oligonucleotide
  Antisense strand to SEQ ID NO: 2368784
aucuaccuauuauauucac

SEQ ID NO: 2368786 - RNA, 19 nt, Artificial Sequence
  Description of Artificial Sequence: Synthetic oligonucleotide
  Sense strand starting at position 759 of SEQ ID NO: 1885806
cugguacuugucguguauu

SEQ ID NO: 2368787 - RNA, 19 nt, Artificial Sequence
  Description of Artificial Sequence: Synthetic oligonucleotide
  Antisense strand to SEQ ID NO: 2368786
aauacacgacaaguaccag

SEQ ID NO: 2368788 - RNA, 19 nt, Artificial Sequence
  Description of Artificial Sequence: Synthetic oligonucleotide
  Sense strand starting at position 762 of SEQ ID NO: 1885806
guacuugucguguauuuaa

SEQ ID NO: 2368789 - RNA, 19 nt, Artificial Sequence
  Description of Artificial Sequence: Synthetic oligonucleotide
  Antisense strand to SEQ ID NO: 2368788
uuaaauacacgacaaguac

SEQ ID NO: 2368790 - RNA, 19 nt, Artificial Sequence
  Description of Artificial Sequence: Synthetic oligonucleotide
  Sense strand starting at position 802 of SEQ ID NO: 1885806
uugacuaauugacucaagu

SEQ ID NO: 2368791 - RNA, 19 nt, Artificial Sequence
  Description of Artificial Sequence: Synthetic oligonucleotide
  Antisense strand to SEQ ID NO: 2368790
acuugagucaauuagucaa

SEQ ID NO: 2368792 - RNA, 19 nt, Artificial Sequence
  Description of Artificial Sequence: Synthetic oligonucleotide
  Sense strand starting at position 810 of SEQ ID NO: 1885806
uugacucaaguaugaaauu

SEQ ID NO: 2368793 - RNA, 19 nt, Artificial Sequence
  Description of Artificial Sequence: Synthetic oligonucleotide
  Antisense strand to SEQ ID NO: 2368792
aauuucauacuugagucaa

SEQ ID NO: 2368794 - RNA, 19 nt, Artificial Sequence
  Description of Artificial Sequence: Synthetic oligonucleotide
  Sense strand starting at position 811 of SEQ ID NO: 1885806
ugacucaaguaugaaauuu

SEQ ID NO: 2368795 - RNA, 19 nt, Artificial Sequence
  Description of Artificial Sequence: Synthetic oligonucleotide
  Antisense strand to SEQ ID NO: 2368794
aaauuucauacuugaguca

SEQ ID NO: 2368796 - RNA, 19 nt, Artificial Sequence
  Description of Artificial Sequence: Synthetic oligonucleotide
  Sense strand starting at position 976 of SEQ ID NO: 1885806
ccuggauucgaguacauuc

SEQ ID NO: 2368797 - RNA, 19 nt, Artificial Sequence
  Description of Artificial Sequence: Synthetic oligonucleotide
  Antisense strand to SEQ ID NO: 2368796
gaauguacucgaauccagg

SEQ ID NO: 2368798 - RNA, 19 nt, Artificial Sequence
  Description of Artificial Sequence: Synthetic oligonucleotide
  Sense strand starting at position 983 of SEQ ID NO: 1885806
ucgaguacauucucaacaa

SEQ ID NO: 2368799 - RNA, 19 nt, Artificial Sequence
  Description of Artificial Sequence: Synthetic oligonucleotide
  Antisense strand to SEQ ID NO: 2368798
uuguugagaauguacucga

SEQ ID NO: 2368800 - RNA, 19 nt, Artificial Sequence
  Description of Artificial Sequence: Synthetic oligonucleotide
  Sense strand starting at position 987 of SEQ ID NO: 1885806
guacauucucaacaauugu

SEQ ID NO: 2368801 - RNA, 19 nt, Artificial Sequence
  Description of Artificial Sequence: Synthetic oligonucleotide
  Antisense strand to SEQ ID NO: 2368800
acaauuguugagaauguac

SEQ ID NO: 2368802 - RNA, 19 nt, Artificial Sequence
  Description of Artificial Sequence: Synthetic oligonucleotide
  Sense strand starting at position 1002 of SEQ ID NO: 1885806
uuguguaugcgugcauaca

SEQ ID NO: 2368803 - RNA, 19 nt, Artificial Sequence
  Description of Artificial Sequence: Synthetic oligonucleotide
  Antisense strand to SEQ ID NO: 2368802
uguaugcacgcauacacaa

SEQ ID NO: 2368804 - RNA, 19 nt, Artificial Sequence
  Description of Artificial Sequence: Synthetic oligonucleotide
  Sense strand starting at position 1202 of SEQ ID NO: 1885806
guuguauggaacuggauua

SEQ ID NO: 2368805 - RNA, 19 nt, Artificial Sequence
  Description of Artificial Sequence: Synthetic oligonucleotide
  Antisense strand to SEQ ID NO: 2368804
uaauccaguuccauacaac

SEQ ID NO: 2368806 - RNA, 19 nt, Artificial Sequence
  Description of Artificial Sequence: Synthetic oligonucleotide
  Sense strand starting at position 1203 of SEQ ID NO: 1885806
uuguauggaacuggauuaa

SEQ ID NO: 2368807 - RNA, 19 nt, Artificial Sequence
  Description of Artificial Sequence: Synthetic oligonucleotide
  Antisense strand to SEQ ID NO: 2368806
uuaauccaguuccauacaa

SEQ ID NO: 2368808 - RNA, 19 nt, Artificial Sequence
  Description of Artificial Sequence: Synthetic oligonucleotide
  Sense strand starting at position 1249 of SEQ ID NO: 1885806
cccucauugguccaugauu

SEQ ID NO: 2368809 - RNA, 19 nt, Artificial Sequence
  Description of Artificial Sequence: Synthetic oligonucleotide
  Antisense strand to SEQ ID NO: 2368808
aaucauggaccaaugaggg

SEQ ID NO: 2368810 - RNA, 19 nt, Artificial Sequence
  Description of Artificial Sequence: Synthetic oligonucleotide
  Sense strand starting at position 1258 of SEQ ID NO: 1885806
guccaugauuuggccuuau

SEQ ID NO: 2368811 - RNA, 19 nt, Artificial Sequence
  Description of Artificial Sequence: Synthetic oligonucleotide
  Antisense strand to SEQ ID NO: 2368810
auaaggccaaaucauggac

SEQ ID NO: 2368812 - RNA, 19 nt, Artificial Sequence
  Description of Artificial Sequence: Synthetic oligonucleotide
  Sense strand starting at position 1358 of SEQ ID NO: 1885806
ggacaauaucaaugcccau

SEQ ID NO: 2368813 - RNA, 19 nt, Artificial Sequence
  Description of Artificial Sequence: Synthetic oligonucleotide
  Antisense strand to SEQ ID NO: 2368812
augggcauugauauugucc

SEQ ID NO: 2368814 - RNA, 19 nt, Artificial Sequence
  Description of Artificial Sequence: Synthetic oligonucleotide
  Sense strand starting at position 1421 of SEQ ID NO: 1885806
cguaaauuaaacugaggaa

SEQ ID NO: 2368815 - RNA, 19 nt, Artificial Sequence
  Description of Artificial Sequence: Synthetic oligonucleotide
  Antisense strand to SEQ ID NO: 2368814
uuccucaguuuaauuuacg

SEQ ID NO: 2368816 - RNA, 19 nt, Artificial Sequence
  Description of Artificial Sequence: Synthetic oligonucleotide
  Sense strand starting at position 1500 of SEQ ID NO: 1885806
aagauagauccauguguaa

SEQ ID NO: 2368817 - RNA, 19 nt, Artificial Sequence
  Description of Artificial Sequence: Synthetic oligonucleotide
  Antisense strand to SEQ ID NO: 2368816
uuacacauggaucuaucuu

SEQ ID NO: 2368818 - RNA, 19 nt, Artificial Sequence
  Description of Artificial Sequence: Synthetic oligonucleotide
  Sense strand starting at position 1503 of SEQ ID NO: 1885806
auagauccauguguaaacu

SEQ ID NO: 2368819 - RNA, 19 nt, Artificial Sequence
  Description of Artificial Sequence: Synthetic oligonucleotide
  Antisense strand to SEQ ID NO: 2368818
aguuuacacauggaucuau

SEQ ID NO: 2368820 - RNA, 19 nt, Artificial Sequence
  Description of Artificial Sequence: Synthetic oligonucleotide
  Sense strand starting at position 1661 of SEQ ID NO: 1885806
aagggucagcuuugauuaa

SEQ ID NO: 2368821 - RNA, 19 nt, Artificial Sequence
  Description of Artificial Sequence: Synthetic oligonucleotide
  Antisense strand to SEQ ID NO: 2368820
uuaaucaaagcugacccuu

SEQ ID NO: 2368822 - RNA, 19 nt, Artificial Sequence
  Description of Artificial Sequence: Synthetic oligonucleotide
  Sense strand starting at position 1691 of SEQ ID NO: 1885806
gggacuuagugcuucagaa

SEQ ID NO: 2368823 - RNA, 19 nt, Artificial Sequence
  Description of Artificial Sequence: Synthetic oligonucleotide
  Antisense strand to SEQ ID NO: 2368822
uucugaagcacuaaguccc

SEQ ID NO: 2368824 - RNA, 19 nt, Artificial Sequence
  Description of Artificial Sequence: Synthetic oligonucleotide
  Sense strand starting at position 1706 of SEQ ID NO: 1885806
agaaacguauuaguaauga

SEQ ID NO: 2368825 - RNA, 19 nt, Artificial Sequence
  Description of Artificial Sequence: Synthetic oligonucleotide
  Antisense strand to SEQ ID NO: 2368824
ucauuacuaauacguuucu

SEQ ID NO: 2368826 - RNA, 19 nt, Artificial Sequence
  Description of Artificial Sequence: Synthetic oligonucleotide
  Sense strand starting at position 2304 of SEQ ID NO: 1885806
cuaacaggacuuugcauau

SEQ ID NO: 2368827 - RNA, 19 nt, Artificial Sequence
  Description of Artificial Sequence: Synthetic oligonucleotide
  Antisense strand to SEQ ID NO: 2368826
auaugcaaaguccuguuag

SEQ ID NO: 2368828 - RNA, 19 nt, Artificial Sequence
  Description of Artificial Sequence: Synthetic oligonucleotide
  Sense strand starting at position 2804 of SEQ ID NO: 1885806
aucagcagagacugauuaa

SEQ ID NO: 2368829 - RNA, 19 nt, Artificial Sequence
  Description of Artificial Sequence: Synthetic oligonucleotide
  Antisense strand to SEQ ID NO: 2368828
uuaaucagucucugcugau

SEQ ID NO: 2368830 - RNA, 19 nt, Artificial Sequence
  Description of Artificial Sequence: Synthetic oligonucleotide
  Sense strand starting at position 3131 of SEQ ID NO: 1885806
ggacucaacauguguagaa

SEQ ID NO: 2368831 - RNA, 19 nt, Artificial Sequence
  Description of Artificial Sequence: Synthetic oligonucleotide
  Antisense strand to SEQ ID NO: 2368830
uucuacacauguugagucc

SEQ ID NO: 2368832 - RNA, 19 nt, Artificial Sequence
  Description of Artificial Sequence: Synthetic oligonucleotide
  Sense strand starting at position 3132 of SEQ ID NO: 1885806
gacucaacauguguagaaa

SEQ ID NO: 2368833 - RNA, 19 nt, Artificial Sequence
  Description of Artificial Sequence: Synthetic oligonucleotide
  Antisense strand to SEQ ID NO: 2368832
uuucuacacauguugaguc

SEQ ID NO: 2368834 - RNA, 19 nt, Artificial Sequence
  Description of Artificial Sequence: Synthetic oligonucleotide
  Sense strand starting at position 3178 of SEQ ID NO: 1885806
gcauauuaucaccaauggu

SEQ ID NO: 2368835 - RNA, 19 nt, Artificial Sequence
  Description of Artificial Sequence: Synthetic oligonucleotide
  Antisense strand to SEQ ID NO: 2368834
accauuggugauaauaugc

SEQ ID NO: 2368836 - RNA, 19 nt, Artificial Sequence
  Description of Artificial Sequence: Synthetic oligonucleotide
  Sense strand starting at position 3193 of SEQ ID NO: 1885806
ugguaaaugcuuuacccua

SEQ ID NO: 2368837 - RNA, 19 nt, Artificial Sequence
  Description of Artificial Sequence: Synthetic oligonucleotide
  Antisense strand to SEQ ID NO: 2368836
uaggguaaagcauuuacca

SEQ ID NO: 2368838 - RNA, 19 nt, Artificial Sequence
  Description of Artificial Sequence: Synthetic oligonucleotide
  Sense strand starting at position 3251 of SEQ ID NO: 1885806
uuaugacgcauggaauauu

SEQ ID NO: 2368839 - RNA, 19 nt, Artificial Sequence
  Description of Artificial Sequence: Synthetic oligonucleotide
  Antisense strand to SEQ ID NO: 2368838
aauauuccaugcgucauaa

SEQ ID NO: 2368840 - RNA, 19 nt, Artificial Sequence
  Description of Artificial Sequence: Synthetic oligonucleotide
  Sense strand starting at position 3567 of SEQ ID NO: 1885806
auauuaugucuccauaugu

SEQ ID NO: 2368841 - RNA, 19 nt, Artificial Sequence
  Description of Artificial Sequence: Synthetic oligonucleotide
  Antisense strand to SEQ ID NO: 2368840
acauauggagacauaauau

SEQ ID NO: 2368842 - RNA, 19 nt, Artificial Sequence
  Description of Artificial Sequence: Synthetic oligonucleotide
  Sense strand starting at position 3895 of SEQ ID NO: 1885806
gcuaucgaagcauauaaua

SEQ ID NO: 2368843 - RNA, 19 nt, Artificial Sequence
  Description of Artificial Sequence: Synthetic oligonucleotide
  Antisense strand to SEQ ID NO: 2368842
uauuauaugcuucgauagc

SEQ ID NO: 2368844 - RNA, 19 nt, Artificial Sequence
  Description of Artificial Sequence: Synthetic oligonucleotide
  Sense strand starting at position 169 of SEQ ID NO: 1885807
auuaaucauccacaguguu

SEQ ID NO: 2368845 - RNA, 19 nt, Artificial Sequence
  Description of Artificial Sequence: Synthetic oligonucleotide
  Antisense strand to SEQ ID NO: 2368844
aacacuguggaugauuaau

SEQ ID NO: 2368846 - RNA, 19 nt, Artificial Sequence
  Description of Artificial Sequence: Synthetic oligonucleotide
  Sense strand starting at position 248 of SEQ ID NO: 1885807
uggcuuucuuugguuauuu

SEQ ID NO: 2368847 - RNA, 19 nt, Artificial Sequence
  Description of Artificial Sequence: Synthetic oligonucleotide
  Antisense strand to SEQ ID NO: 2368846
aaauaaccaaagaaagcca

SEQ ID NO: 2368848 - RNA, 19 nt, Artificial Sequence
  Description of Artificial Sequence: Synthetic oligonucleotide
  Sense strand starting at position 249 of SEQ ID NO: 1885807
ggcuuucuuugguuauuua

SEQ ID NO: 2368849 - RNA, 19 nt, Artificial Sequence
  Description of Artificial Sequence: Synthetic oligonucleotide
  Antisense strand to SEQ ID NO: 2368848
uaaauaaccaaagaaagcc

SEQ ID NO: 2368850 - RNA, 19 nt, Artificial Sequence
  Description of Artificial Sequence: Synthetic oligonucleotide
  Sense strand starting at position 666 of SEQ ID NO: 1885807
uuuguaauuggacaguacu

SEQ ID NO: 2368851 - RNA, 19 nt, Artificial Sequence
  Description of Artificial Sequence: Synthetic oligonucleotide
  Antisense strand to SEQ ID NO: 2368850
aguacuguccaauuacaaa

SEQ ID NO: 2368852 - RNA, 19 nt, Artificial Sequence
  Description of Artificial Sequence: Synthetic oligonucleotide
  Sense strand starting at position 983 of SEQ ID NO: 1885807
uaaaucugucuauagggua

SEQ ID NO: 2368853 - RNA, 19 nt, Artificial Sequence
  Description of Artificial Sequence: Synthetic oligonucleotide
  Antisense strand to SEQ ID NO: 2368852
uacccuauagacagauuua

SEQ ID NO: 2368854 - RNA, 19 nt, Artificial Sequence
  Description of Artificial Sequence: Synthetic oligonucleotide
  Sense strand starting at position 1020 of SEQ ID NO: 1885807
cagagucaucauugacuga

SEQ ID NO: 2368855 - RNA, 19 nt, Artificial Sequence
  Description of Artificial Sequence: Synthetic oligonucleotide
  Antisense strand to SEQ ID NO: 2368854
ucagucaaugaugacucug

SEQ ID NO: 2368856 - RNA, 19 nt, Artificial Sequence
  Description of Artificial Sequence: Synthetic oligonucleotide
  Sense strand starting at position 1023 of SEQ ID NO: 1885807
agucaucauugacugaaga

SEQ ID NO: 2368857 - RNA, 19 nt, Artificial Sequence
  Description of Artificial Sequence: Synthetic oligonucleotide
  Antisense strand to SEQ ID NO: 2368856
ucuucagucaaugaugacu

SEQ ID NO: 2368858 - RNA, 19 nt, Artificial Sequence
  Description of Artificial Sequence: Synthetic oligonucleotide
  Sense strand starting at position 1024 of SEQ ID NO: 1885807
gucaucauugacugaagac

SEQ ID NO: 2368859 - RNA, 19 nt, Artificial Sequence
  Description of Artificial Sequence: Synthetic oligonucleotide
  Antisense strand to SEQ ID NO: 2368858
gucuucagucaaugaugac

SEQ ID NO: 2368860 - RNA, 19 nt, Artificial Sequence
  Description of Artificial Sequence: Synthetic oligonucleotide
  Sense strand starting at position 1147 of SEQ ID NO: 1885807
uguauagcucucuauagga

SEQ ID NO: 2368861 - RNA, 19 nt, Artificial Sequence
  Description of Artificial Sequence: Synthetic oligonucleotide
  Antisense strand to SEQ ID NO: 2368860
uccuauagagagcuauaca

SEQ ID NO: 2368862 - RNA, 19 nt, Artificial Sequence
  Description of Artificial Sequence: Synthetic oligonucleotide
  Sense strand starting at position 1238 of SEQ ID NO: 1885807
auggcaaugccauaauuac

SEQ ID NO: 2368863 - RNA, 19 nt, Artificial Sequence
  Description of Artificial Sequence: Synthetic oligonucleotide
  Antisense strand to SEQ ID NO: 2368862
guaauuauggcauugccau

SEQ ID NO: 2368864 - RNA, 19 nt, Artificial Sequence
  Description of Artificial Sequence: Synthetic oligonucleotide
  Sense strand starting at position 1278 of SEQ ID NO: 1885807
uuggauuaucuguaauguu

SEQ ID NO: 2368865 - RNA, 19 nt, Artificial Sequence
  Description of Artificial Sequence: Synthetic oligonucleotide
  Antisense strand to SEQ ID NO: 2368864
aacauuacagauaauccaa

SEQ ID NO: 2368866 - RNA, 19 nt, Artificial Sequence
  Description of Artificial Sequence: Synthetic oligonucleotide
  Sense strand starting at position 1480 of SEQ ID NO: 1885807
uggaaauauucuguccauu

SEQ ID NO: 2368867 - RNA, 19 nt, Artificial Sequence
  Description of Artificial Sequence: Synthetic oligonucleotide
  Antisense strand to SEQ ID NO: 2368866
aauggacagaauauuucca

SEQ ID NO: 2368868 - RNA, 19 nt, Artificial Sequence
  Description of Artificial Sequence: Synthetic oligonucleotide
  Sense strand starting at position 1603 of SEQ ID NO: 1885807
ccucacauacguuauuauu

SEQ ID NO: 2368869 - RNA, 19 nt, Artificial Sequence
  Description of Artificial Sequence: Synthetic oligonucleotide
  Antisense strand to SEQ ID NO: 2368868
aauaauaacguaugugagg

SEQ ID NO: 2368870 - RNA, 19 nt, Artificial Sequence
  Description of Artificial Sequence: Synthetic oligonucleotide
  Sense strand starting at position 1654 of SEQ ID NO: 1885807
gaguaauaccucugaguca

SEQ ID NO: 2368871 - RNA, 19 nt, Artificial Sequence
  Description of Artificial Sequence: Synthetic oligonucleotide
  Antisense strand to SEQ ID NO: 2368870
ugacucagagguauuacuc

SEQ ID NO: 2368872 - RNA, 19 nt, Artificial Sequence
  Description of Artificial Sequence: Synthetic oligonucleotide
  Sense strand starting at position 1885 of SEQ ID NO: 1885807
ugucuaucccuaggauaga

SEQ ID NO: 2368873 - RNA, 19 nt, Artificial Sequence
  Description of Artificial Sequence: Synthetic oligonucleotide
  Antisense strand to SEQ ID NO: 2368872
ucuauccuagggauagaca

SEQ ID NO: 2368874 - RNA, 19 nt, Artificial Sequence
  Description of Artificial Sequence: Synthetic oligonucleotide
  Sense strand starting at position 1997 of SEQ ID NO: 1885807
guccaagauugacucuauc

SEQ ID NO: 2368875 - RNA, 19 nt, Artificial Sequence
  Description of Artificial Sequence: Synthetic oligonucleotide
  Antisense strand to SEQ ID NO: 2368874
gauagagucaaucuuggac

SEQ ID NO: 2368876 - RNA, 19 nt, Artificial Sequence
  Description of Artificial Sequence: Synthetic oligonucleotide
  Sense strand starting at position 2064 of SEQ ID NO: 1885807
uuaauagugcuguaaucau

SEQ ID NO: 2368877 - RNA, 19 nt, Artificial Sequence
  Description of Artificial Sequence: Synthetic oligonucleotide
  Antisense strand to SEQ ID NO: 2368876
augauuacagcacuauuaa

SEQ ID NO: 2368878 - RNA, 19 nt, Artificial Sequence
  Description of Artificial Sequence: Synthetic oligonucleotide
  Sense strand starting at position 2122 of SEQ ID NO: 1885807
uuuguacuuagguagugaa

SEQ ID NO: 2368879 - RNA, 19 nt, Artificial Sequence
  Description of Artificial Sequence: Synthetic oligonucleotide
  Antisense strand to SEQ ID NO: 2368878
uucacuaccuaaguacaaa

SEQ ID NO: 2368880 - RNA, 19 nt, Artificial Sequence
  Description of Artificial Sequence: Synthetic oligonucleotide
  Sense strand starting at position 2236 of SEQ ID NO: 1885807
acaagagucuuccugugac

SEQ ID NO: 2368881 - RNA, 19 nt, Artificial Sequence
  Description of Artificial Sequence: Synthetic oligonucleotide
  Antisense strand to SEQ ID NO: 2368880
gucacaggaagacucuugu

SEQ ID NO: 2368882 - RNA, 19 nt, Artificial Sequence
  Description of Artificial Sequence: Synthetic oligonucleotide
  Sense strand starting at position 2284 of SEQ ID NO: 1885807
auugcacagugauuaaauc

SEQ ID NO: 2368883 - RNA, 19 nt, Artificial Sequence
  Description of Artificial Sequence: Synthetic oligonucleotide
  Antisense strand to SEQ ID NO: 2368882
gauuuaaucacugugcaau

SEQ ID NO: 2368884 - RNA, 19 nt, Artificial Sequence
  Description of Artificial Sequence: Synthetic oligonucleotide
  Sense strand starting at position 2285 of SEQ ID NO: 1885807
uugcacagugauuaaauca

SEQ ID NO: 2368885 - RNA, 19 nt, Artificial Sequence
  Description of Artificial Sequence: Synthetic oligonucleotide
  Antisense strand to SEQ ID NO: 2368884
ugauuuaaucacugugcaa

SEQ ID NO: 2368886 - RNA, 19 nt, Artificial Sequence
  Description of Artificial Sequence: Synthetic oligonucleotide
  Sense strand starting at position 2538 of SEQ ID NO: 1885807
aguagcaugcuugauacau

SEQ ID NO: 2368887 - RNA, 19 nt, Artificial Sequence
  Description of Artificial Sequence: Synthetic oligonucleotide
  Antisense strand to SEQ ID NO: 2368886
auguaucaagcaugcuacu

SEQ ID NO: 2368888 - RNA, 19 nt, Artificial Sequence
  Description of Artificial Sequence: Synthetic oligonucleotide
  Sense strand starting at position 2671 of SEQ ID NO: 1885807
guuuguuggauuugucauu

SEQ ID NO: 2368889 - RNA, 19 nt, Artificial Sequence
  Description of Artificial Sequence: Synthetic oligonucleotide
  Antisense strand to SEQ ID NO: 2368888
aaugacaaauccaacaaac

SEQ ID NO: 2368890 - RNA, 19 nt, Artificial Sequence
  Description of Artificial Sequence: Synthetic oligonucleotide
  Sense strand starting at position 2885 of SEQ ID NO: 1885807
gaaugaaaccacugugauu

SEQ ID NO: 2368891 - RNA, 19 nt, Artificial Sequence
  Description of Artificial Sequence: Synthetic oligonucleotide
  Antisense strand to SEQ ID NO: 2368890
aaucacagugguuucauuc

SEQ ID NO: 2368892 - RNA, 19 nt, Artificial Sequence
  Description of Artificial Sequence: Synthetic oligonucleotide
  Sense strand starting at position 2904 of SEQ ID NO: 1885807
uuucuuucuguuuauggau

SEQ ID NO: 2368893 - RNA, 19 nt, Artificial Sequence
  Description of Artificial Sequence: Synthetic oligonucleotide
  Antisense strand to SEQ ID NO: 2368892
auccauaaacagaaagaaa

SEQ ID NO: 2368894 - RNA, 19 nt, Artificial Sequence
  Description of Artificial Sequence: Synthetic oligonucleotide
  Sense strand starting at position 2928 of SEQ ID NO: 1885807
guguuacuggauuaauuga

SEQ ID NO: 2368895 - RNA, 19 nt, Artificial Sequence
  Description of Artificial Sequence: Synthetic oligonucleotide
  Antisense strand to SEQ ID NO: 2368894
ucaauuaauccaguaacac

SEQ ID NO: 2368896 - RNA, 19 nt, Artificial Sequence
  Description of Artificial Sequence: Synthetic oligonucleotide
  Sense strand starting at position 2982 of SEQ ID NO: 1885807
uaugauugccuaugacuag

SEQ ID NO: 2368897 - RNA, 19 nt, Artificial Sequence
  Description of Artificial Sequence: Synthetic oligonucleotide
  Antisense strand to SEQ ID NO: 2368896
cuagucauaggcaaucaua

SEQ ID NO: 2368898 - RNA, 19 nt, Artificial Sequence
  Description of Artificial Sequence: Synthetic oligonucleotide
  Sense strand starting at position 2991 of SEQ ID NO: 1885807
cuaugacuagcucaaaguu

SEQ ID NO: 2368899 - RNA, 19 nt, Artificial Sequence
  Description of Artificial Sequence: Synthetic oligonucleotide
  Antisense strand to SEQ ID NO: 2368898
aacuuugagcuagucauag

SEQ ID NO: 2368900 - RNA, 19 nt, Artificial Sequence
  Description of Artificial Sequence: Synthetic oligonucleotide
  Sense strand starting at position 3186 of SEQ ID NO: 1885807
ucaucaauggucuacggua

SEQ ID NO: 2368901 - RNA, 19 nt, Artificial Sequence
  Description of Artificial Sequence: Synthetic oligonucleotide
  Antisense strand to SEQ ID NO: 2368900
uaccguagaccauugauga

SEQ ID NO: 2368902 - RNA, 19 nt, Artificial Sequence
  Description of Artificial Sequence: Synthetic oligonucleotide
  Sense strand starting at position 3200 of SEQ ID NO: 1885807
cgguaucccuuauuuaugu

SEQ ID NO: 2368903 - RNA, 19 nt, Artificial Sequence
  Description of Artificial Sequence: Synthetic oligonucleotide
  Antisense strand to SEQ ID NO: 2368902
acauaaauaagggauaccg

SEQ ID NO: 2368904 - RNA, 19 nt, Artificial Sequence
  Description of Artificial Sequence: Synthetic oligonucleotide
  Sense strand starting at position 3219 of SEQ ID NO: 1885807
auacaucaguuuguauaca

SEQ ID NO: 2368905 - RNA, 19 nt, Artificial Sequence
  Description of Artificial Sequence: Synthetic oligonucleotide
  Antisense strand to SEQ ID NO: 2368904
uguauacaaacugauguau

SEQ ID NO: 2368906 - RNA, 19 nt, Artificial Sequence
  Description of Artificial Sequence: Synthetic oligonucleotide
  Sense strand starting at position 3230 of SEQ ID NO: 1885807
uguauacaucuguaucuau

SEQ ID NO: 2368907 - RNA, 19 nt, Artificial Sequence
  Description of Artificial Sequence: Synthetic oligonucleotide
  Antisense strand to SEQ ID NO: 2368906
auagauacagauguauaca

SEQ ID NO: 2368908 - RNA, 19 nt, Artificial Sequence
  Description of Artificial Sequence: Synthetic oligonucleotide
  Sense strand starting at position 3245 of SEQ ID NO: 1885807
cuauguauuugugucugua

SEQ ID NO: 2368909 - RNA, 19 nt, Artificial Sequence
  Description of Artificial Sequence: Synthetic oligonucleotide
  Antisense strand to SEQ ID NO: 2368908
uacagacacaaauacauag

SEQ ID NO: 2368910 - RNA, 19 nt, Artificial Sequence
  Description of Artificial Sequence: Synthetic oligonucleotide
  Sense strand starting at position 3247 of SEQ ID NO: 1885807
auguauuugugucuguacu

SEQ ID NO: 2368911 - RNA, 19 nt, Artificial Sequence
  Description of Artificial Sequence: Synthetic oligonucleotide
  Antisense strand to SEQ ID NO: 2368910
aguacagacacaaauacau

SEQ ID NO: 2368912 - RNA, 19 nt, Artificial Sequence
  Description of Artificial Sequence: Synthetic oligonucleotide
  Sense strand starting at position 3258 of SEQ ID NO: 1885807
ucuguacuuccuuauggau

SEQ ID NO: 2368913 - RNA, 19 nt, Artificial Sequence
  Description of Artificial Sequence: Synthetic oligonucleotide
  Antisense strand to SEQ ID NO: 2368912
auccauaaggaaguacaga

SEQ ID NO: 2368914 - RNA, 19 nt, Artificial Sequence
  Description of Artificial Sequence: Synthetic oligonucleotide
  Sense strand starting at position 3385 of SEQ ID NO: 1885807
uggacagagccuugaaauu

SEQ ID NO: 2368915 - RNA, 19 nt, Artificial Sequence
  Description of Artificial Sequence: Synthetic oligonucleotide
  Antisense strand to SEQ ID NO: 2368914
aauuucaaggcucugucca

SEQ ID NO: 2368916 - RNA, 19 nt, Artificial Sequence
  Description of Artificial Sequence: Synthetic oligonucleotide
  Sense strand starting at position 3480 of SEQ ID NO: 1885807
uaguuaguggguuaaucuu

SEQ ID NO: 2368917 - RNA, 19 nt, Artificial Sequence
  Description of Artificial Sequence: Synthetic oligonucleotide
  Antisense strand to SEQ ID NO: 2368916
aagauuaacccacuaacua

SEQ ID NO: 2368918 - RNA, 19 nt, Artificial Sequence
  Description of Artificial Sequence: Synthetic oligonucleotide
  Sense strand starting at position 3841 of SEQ ID NO: 1885807
auucuauaugcccacagua

SEQ ID NO: 2368919 - RNA, 19 nt, Artificial Sequence
  Description of Artificial Sequence: Synthetic oligonucleotide
  Antisense strand to SEQ ID NO: 2368918
uacugugggcauauagaau

SEQ ID NO: 2368920 - RNA, 19 nt, Artificial Sequence
  Description of Artificial Sequence: Synthetic oligonucleotide
  Sense strand starting at position 3843 of SEQ ID NO: 1885807
ucuauaugcccacaguaga

SEQ ID NO: 2368921 - RNA, 19 nt, Artificial Sequence
  Description of Artificial Sequence: Synthetic oligonucleotide
  Antisense strand to SEQ ID NO: 2368920
ucuacugugggcauauaga

SEQ ID NO: 2368922 - RNA, 19 nt, Artificial Sequence
  Description of Artificial Sequence: Synthetic oligonucleotide
  Sense strand starting at position 3879 of SEQ ID NO: 1885807
ucuacauuagugcacugau

SEQ ID NO: 2368923 - RNA, 19 nt, Artificial Sequence
  Description of Artificial Sequence: Synthetic oligonucleotide
  Antisense strand to SEQ ID NO: 2368922
aucagugcacuaauguaga

SEQ ID NO: 2368924 - RNA, 19 nt, Artificial Sequence
  Description of Artificial Sequence: Synthetic oligonucleotide
  Sense strand starting at position 441 of SEQ ID NO: 1885808
uugagacauucuuugcauc

SEQ ID NO: 2368925 - RNA, 19 nt, Artificial Sequence
  Description of Artificial Sequence: Synthetic oligonucleotide
  Antisense strand to SEQ ID NO: 2368924
gaugcaaagaaugucucaa

SEQ ID NO: 2368926 - RNA, 19 nt, Artificial Sequence
  Description of Artificial Sequence: Synthetic oligonucleotide
  Sense strand starting at position 442 of SEQ ID NO: 1885808
ugagacauucuuugcauca

SEQ ID NO: 2368927 - RNA, 19 nt, Artificial Sequence
  Description of Artificial Sequence: Synthetic oligonucleotide
  Antisense strand to SEQ ID NO: 2368926
ugaugcaaagaaugucuca

SEQ ID NO: 2368928 - RNA, 19 nt, Artificial Sequence
  Description of Artificial Sequence: Synthetic oligonucleotide
  Sense strand starting at position 852 of SEQ ID NO: 1885808
accagaucccauuguauug

SEQ ID NO: 2368929 - RNA, 19 nt, Artificial Sequence
  Description of Artificial Sequence: Synthetic oligonucleotide
  Antisense strand to SEQ ID NO: 2368928
caauacaaugggaucuggu

SEQ ID NO: 2368930 - RNA, 19 nt, Artificial Sequence
  Description of Artificial Sequence: Synthetic oligonucleotide
  Sense strand starting at position 864 of SEQ ID NO: 1885808
uguauuggaccucagaguu

SEQ ID NO: 2368931 - RNA, 19 nt, Artificial Sequence
  Description of Artificial Sequence: Synthetic oligonucleotide
  Antisense strand to SEQ ID NO: 2368930
aacucugagguccaauaca

SEQ ID NO: 2368932 - RNA, 19 nt, Artificial Sequence
  Description of Artificial Sequence: Synthetic oligonucleotide
  Sense strand starting at position 1097 of SEQ ID NO: 1885808
auuaacugagcucaauguu

SEQ ID NO: 2368933 - RNA, 19 nt, Artificial Sequence
  Description of Artificial Sequence: Synthetic oligonucleotide
  Antisense strand to SEQ ID NO: 2368932
aacauugagcucaguuaau

SEQ ID NO: 2368934 - RNA, 19 nt, Artificial Sequence
  Description of Artificial Sequence: Synthetic oligonucleotide
  Sense strand starting at position 1479 of SEQ ID NO: 1885808
ugaacacuuugugcaacuu

SEQ ID NO: 2368935 - RNA, 19 nt, Artificial Sequence
  Description of Artificial Sequence: Synthetic oligonucleotide
  Antisense strand to SEQ ID NO: 2368934
aaguugcacaaaguguuca

SEQ ID NO: 2368936 - RNA, 19 nt, Artificial Sequence
  Description of Artificial Sequence: Synthetic oligonucleotide
  Sense strand starting at position 1505 of SEQ ID NO: 1885808
cccagagguugaccauuau

SEQ ID NO: 2368937 - RNA, 19 nt, Artificial Sequence
  Description of Artificial Sequence: Synthetic oligonucleotide
  Antisense strand to SEQ ID NO: 2368936
auaauggucaaccucuggg

SEQ ID NO: 2368938 - RNA, 19 nt, Artificial Sequence
  Description of Artificial Sequence: Synthetic oligonucleotide
  Sense strand starting at position 1511 of SEQ ID NO: 1885808
gguugaccauuaucuauaa

SEQ ID NO: 2368939 - RNA, 19 nt, Artificial Sequence
  Description of Artificial Sequence: Synthetic oligonucleotide
  Antisense strand to SEQ ID NO: 2368938
uuauagauaauggucaacc

SEQ ID NO: 2368940 - RNA, 19 nt, Artificial Sequence
  Description of Artificial Sequence: Synthetic oligonucleotide
  Sense strand starting at position 1537 of SEQ ID NO: 1885808
cuguaucauccuuagucaa

SEQ ID NO: 2368941 - RNA, 19 nt, Artificial Sequence
  Description of Artificial Sequence: Synthetic oligonucleotide
  Antisense strand to SEQ ID NO: 2368940
uugacuaaggaugauacag

SEQ ID NO: 2368942 - RNA, 19 nt, Artificial Sequence
  Description of Artificial Sequence: Synthetic oligonucleotide
  Sense strand starting at position 1539 of SEQ ID NO: 1885808
guaucauccuuagucaaag

SEQ ID NO: 2368943 - RNA, 19 nt, Artificial Sequence
  Description of Artificial Sequence: Synthetic oligonucleotide
  Antisense strand to SEQ ID NO: 2368942
cuuugacuaaggaugauac

SEQ ID NO: 2368944 - RNA, 19 nt, Artificial Sequence
  Description of Artificial Sequence: Synthetic oligonucleotide
  Sense strand starting at position 1789 of SEQ ID NO: 1885808
guacauguauacguauaaa

SEQ ID NO: 2368945 - RNA, 19 nt, Artificial Sequence
  Description of Artificial Sequence: Synthetic oligonucleotide
  Antisense strand to SEQ ID NO: 2368944
uuuauacguauacauguac

SEQ ID NO: 2368946 - RNA, 19 nt, Artificial Sequence
  Description of Artificial Sequence: Synthetic oligonucleotide
  Sense strand starting at position 1827 of SEQ ID NO: 1885808
auaauaauacagugaagug

SEQ ID NO: 2368947 - RNA, 19 nt, Artificial Sequence
  Description of Artificial Sequence: Synthetic oligonucleotide
  Antisense strand to SEQ ID NO: 2368946
cacuucacuguauuauuau

SEQ ID NO: 2368948 - RNA, 19 nt, Artificial Sequence
  Description of Artificial Sequence: Synthetic oligonucleotide
  Sense strand starting at position 1891 of SEQ ID NO: 1885808
ucaccugaaucagaaggaa

SEQ ID NO: 2368949 - RNA, 19 nt, Artificial Sequence
  Description of Artificial Sequence: Synthetic oligonucleotide
  Antisense strand to SEQ ID NO: 2368948
uuccuucugauucagguga

SEQ ID NO: 2368950 - RNA, 19 nt, Artificial Sequence
  Description of Artificial Sequence: Synthetic oligonucleotide
  Sense strand starting at position 2021 of SEQ ID NO: 1885808
uucuaccuugucuauugau

SEQ ID NO: 2368951 - RNA, 19 nt, Artificial Sequence
  Description of Artificial Sequence: Synthetic oligonucleotide
  Antisense strand to SEQ ID NO: 2368950
aucaauagacaagguagaa

SEQ ID NO: 2368952 - RNA, 19 nt, Artificial Sequence
  Description of Artificial Sequence: Synthetic oligonucleotide
  Sense strand starting at position 2028 of SEQ ID NO: 1885808
uugucuauugauuauguca

SEQ ID NO: 2368953 - RNA, 19 nt, Artificial Sequence
  Description of Artificial Sequence: Synthetic oligonucleotide
  Antisense strand to SEQ ID NO: 2368952
ugacauaaucaauagacaa

SEQ ID NO: 2368954 - RNA, 19 nt, Artificial Sequence
  Description of Artificial Sequence: Synthetic oligonucleotide
  Sense strand starting at position 2101 of SEQ ID NO: 1885808
cuugauauucccuaucagu

SEQ ID NO: 2368955 - RNA, 19 nt, Artificial Sequence
  Description of Artificial Sequence: Synthetic oligonucleotide
  Antisense strand to SEQ ID NO: 2368954
acugauagggaauaucaag

SEQ ID NO: 2368956 - RNA, 19 nt, Artificial Sequence
  Description of Artificial Sequence: Synthetic oligonucleotide
  Sense strand starting at position 2227 of SEQ ID NO: 1885808
gccaucuuugacuguauuu

SEQ ID NO: 2368957 - RNA, 19 nt, Artificial Sequence
  Description of Artificial Sequence: Synthetic oligonucleotide
  Antisense strand to SEQ ID NO: 2368956
aaauacagucaaagauggc

SEQ ID NO: 2368958 - RNA, 19 nt, Artificial Sequence
  Description of Artificial Sequence: Synthetic oligonucleotide
  Sense strand starting at position 2260 of SEQ ID NO: 1885808
auacguugauuacucuuaa

SEQ ID NO: 2368959 - RNA, 19 nt, Artificial Sequence
  Description of Artificial Sequence: Synthetic oligonucleotide
  Antisense strand to SEQ ID NO: 2368958
uuaagaguaaucaacguau

SEQ ID NO: 2368960 - RNA, 19 nt, Artificial Sequence
  Description of Artificial Sequence: Synthetic oligonucleotide
  Sense strand starting at position 2296 of SEQ ID NO: 1885808
agguaaggacuuugacuau

SEQ ID NO: 2368961 - RNA, 19 nt, Artificial Sequence
  Description of Artificial Sequence: Synthetic oligonucleotide
  Antisense strand to SEQ ID NO: 2368960
auagucaaaguccuuaccu

SEQ ID NO: 2368962 - RNA, 19 nt, Artificial Sequence
  Description of Artificial Sequence: Synthetic oligonucleotide
  Sense strand starting at position 2362 of SEQ ID NO: 1885808
guaugugaccuuggaggca

SEQ ID NO: 2368963 - RNA, 19 nt, Artificial Sequence
  Description of Artificial Sequence: Synthetic oligonucleotide
  Antisense strand to SEQ ID NO: 2368962
ugccuccaaggucacauac

SEQ ID NO: 2368964 - RNA, 19 nt, Artificial Sequence
  Description of Artificial Sequence: Synthetic oligonucleotide
  Sense strand starting at position 2404 of SEQ ID NO: 1885808
ccauucugaugaguacaga

SEQ ID NO: 2368965 - RNA, 19 nt, Artificial Sequence
  Description of Artificial Sequence: Synthetic oligonucleotide
  Antisense strand to SEQ ID NO: 2368964
ucuguacucaucagaaugg

SEQ ID NO: 2368966 - RNA, 19 nt, Artificial Sequence
  Description of Artificial Sequence: Synthetic oligonucleotide
  Sense strand starting at position 2497 of SEQ ID NO: 1885808
gcaaucguuauuuggacuu

SEQ ID NO: 2368967 - RNA, 19 nt, Artificial Sequence
  Description of Artificial Sequence: Synthetic oligonucleotide
  Antisense strand to SEQ ID NO: 2368966
aaguccaaauaacgauugc

SEQ ID NO: 2368968 - RNA, 19 nt, Artificial Sequence
  Description of Artificial Sequence: Synthetic oligonucleotide
  Sense strand starting at position 2729 of SEQ ID NO: 1885808
uguuucuugccucacuaca

SEQ ID NO: 2368969 - RNA, 19 nt, Artificial Sequence
  Description of Artificial Sequence: Synthetic oligonucleotide
  Antisense strand to SEQ ID NO: 2368968
uguagugaggcaagaaaca

SEQ ID NO: 2368970 - RNA, 19 nt, Artificial Sequence
  Description of Artificial Sequence: Synthetic oligonucleotide
  Sense strand starting at position 2751 of SEQ ID NO: 1885808
uuuaauaauugggcaauga

SEQ ID NO: 2368971 - RNA, 19 nt, Artificial Sequence
  Description of Artificial Sequence: Synthetic oligonucleotide
  Antisense strand to SEQ ID NO: 2368970
ucauugcccaauuauuaaa

SEQ ID NO: 2368972 - RNA, 19 nt, Artificial Sequence
  Description of Artificial Sequence: Synthetic oligonucleotide
  Sense strand starting at position 2755 of SEQ ID NO: 1885808
auaauugggcaaugauuaa

SEQ ID NO: 2368973 - RNA, 19 nt, Artificial Sequence
  Description of Artificial Sequence: Synthetic oligonucleotide
  Antisense strand to SEQ ID NO: 2368972
uuaaucauugcccaauuau

SEQ ID NO: 2368974 - RNA, 19 nt, Artificial Sequence
  Description of Artificial Sequence: Synthetic oligonucleotide
  Sense strand starting at position 2810 of SEQ ID NO: 1885808
auauauagguucucacauu

SEQ ID NO: 2368975 - RNA, 19 nt, Artificial Sequence
  Description of Artificial Sequence: Synthetic oligonucleotide
  Antisense strand to SEQ ID NO: 2368974
aaugugagaaccuauauau

SEQ ID NO: 2368976 - RNA, 19 nt, Artificial Sequence
  Description of Artificial Sequence: Synthetic oligonucleotide
  Sense strand starting at position 2816 of SEQ ID NO: 1885808
agguucucacauugagcaa

SEQ ID NO: 2368977 - RNA, 19 nt, Artificial Sequence
  Description of Artificial Sequence: Synthetic oligonucleotide
  Antisense strand to SEQ ID NO: 2368976
uugcucaaugugagaaccu

SEQ ID NO: 2368978 - RNA, 19 nt, Artificial Sequence
  Description of Artificial Sequence: Synthetic oligonucleotide
  Sense strand starting at position 3085 of SEQ ID NO: 1885808
acuaauaagucucuauggu

SEQ ID NO: 2368979 - RNA, 19 nt, Artificial Sequence
  Description of Artificial Sequence: Synthetic oligonucleotide
  Antisense strand to SEQ ID NO: 2368978
accauagagacuuauuagu

SEQ ID NO: 2368980 - RNA, 19 nt, Artificial Sequence
  Description of Artificial Sequence: Synthetic oligonucleotide
  Sense strand starting at position 3086 of SEQ ID NO: 1885808
cuaauaagucucuaugguu

SEQ ID NO: 2368981 - RNA, 19 nt, Artificial Sequence
  Description of Artificial Sequence: Synthetic oligonucleotide
  Antisense strand to SEQ ID NO: 2368980
aaccauagagacuuauuag

SEQ ID NO: 2368982 - RNA, 19 nt, Artificial Sequence
  Description of Artificial Sequence: Synthetic oligonucleotide
  Sense strand starting at position 3127 of SEQ ID NO: 1885808
cuggauguuccauaucugu

SEQ ID NO: 2368983 - RNA, 19 nt, Artificial Sequence
  Description of Artificial Sequence: Synthetic oligonucleotide
  Antisense strand to SEQ ID NO: 2368982
acagauauggaacauccag

SEQ ID NO: 2368984 - RNA, 19 nt, Artificial Sequence
  Description of Artificial Sequence: Synthetic oligonucleotide
  Sense strand starting at position 3133 of SEQ ID NO: 1885808
guuccauaucuguaucuag

SEQ ID NO: 2368985 - RNA, 19 nt, Artificial Sequence
  Description of Artificial Sequence: Synthetic oligonucleotide
  Antisense strand to SEQ ID NO: 2368984
cuagauacagauauggaac

SEQ ID NO: 2368986 - RNA, 19 nt, Artificial Sequence
  Description of Artificial Sequence: Synthetic oligonucleotide
  Sense strand starting at position 3200 of SEQ ID NO: 1885808
ucaucuaugcauuaucagu

SEQ ID NO: 2368987 - RNA, 19 nt, Artificial Sequence
  Description of Artificial Sequence: Synthetic oligonucleotide
  Antisense strand to SEQ ID NO: 2368986
acugauaaugcauagauga

SEQ ID NO: 2368988 - RNA, 19 nt, Artificial Sequence
  Description of Artificial Sequence: Synthetic oligonucleotide
  Sense strand starting at position 3202 of SEQ ID NO: 1885808
aucuaugcauuaucaguau

SEQ ID NO: 2368989 - RNA, 19 nt, Artificial Sequence
  Description of Artificial Sequence: Synthetic oligonucleotide
  Antisense strand to SEQ ID NO: 2368988
auacugauaaugcauagau

SEQ ID NO: 2368990 - RNA, 19 nt, Artificial Sequence
  Description of Artificial Sequence: Synthetic oligonucleotide
  Sense strand starting at position 3238 of SEQ ID NO: 1885808
ucauaucuaucauugggau

SEQ ID NO: 2368991 - RNA, 19 nt, Artificial Sequence
  Description of Artificial Sequence: Synthetic oligonucleotide
  Antisense strand to SEQ ID NO: 2368990
aucccaaugauagauauga

SEQ ID NO: 2368992 - RNA, 19 nt, Artificial Sequence
  Description of Artificial Sequence: Synthetic oligonucleotide
  Sense strand starting at position 3933 of SEQ ID NO: 1885808
cuaacuaugucaucauugu

SEQ ID NO: 2368993 - RNA, 19 nt, Artificial Sequence
  Description of Artificial Sequence: Synthetic oligonucleotide
  Antisense strand to SEQ ID NO: 2368992
acaaugaugacauaguuag

SEQ ID NO: 2368994 - RNA, 19 nt, Artificial Sequence
  Description of Artificial Sequence: Synthetic oligonucleotide
  Sense strand starting at position 3937 of SEQ ID NO: 1885808
cuaugucaucauuguccaa

SEQ ID NO: 2368995 - RNA, 19 nt, Artificial Sequence
  Description of Artificial Sequence: Synthetic oligonucleotide
  Antisense strand to SEQ ID NO: 2368994
uuggacaaugaugacauag

SEQ ID NO: 2368996 - RNA, 19 nt, Artificial Sequence
  Description of Artificial Sequence: Synthetic oligonucleotide
  Sense strand starting at position 3939 of SEQ ID NO: 1885808
augucaucauuguccaaag

SEQ ID NO: 2368997 - RNA, 19 nt, Artificial Sequence
  Description of Artificial Sequence: Synthetic oligonucleotide
  Antisense strand to SEQ ID NO: 2368996
cuuuggacaaugaugacau

SEQ ID NO: 2368998 - RNA, 19 nt, Artificial Sequence
  Description of Artificial Sequence: Synthetic oligonucleotide
  Sense strand starting at position 3940 of SEQ ID NO: 1885808
ugucaucauuguccaaaga

SEQ ID NO: 2368999 - RNA, 19 nt, Artificial Sequence
  Description of Artificial Sequence: Synthetic oligonucleotide
  Antisense strand to SEQ ID NO: 2368998
ucuuuggacaaugaugaca

SEQ ID NO: 2369000 - RNA, 19 nt, Artificial Sequence
  Description of Artificial Sequence: Synthetic oligonucleotide
  Sense strand starting at position 3941 of SEQ ID NO: 1885808
gucaucauuguccaaagag

SEQ ID NO: 2369001 - RNA, 19 nt, Artificial Sequence
  Description of Artificial Sequence: Synthetic oligonucleotide
  Antisense strand to SEQ ID NO: 2369000
cucuuuggacaaugaugac

SEQ ID NO: 2369002 - RNA, 19 nt, Artificial Sequence
  Description of Artificial Sequence: Synthetic oligonucleotide
  Sense strand starting at position 3960 of SEQ ID NO: 1885808
gugacaggcauguaccauu

SEQ ID NO: 2369003 - RNA, 19 nt, Artificial Sequence
  Description of Artificial Sequence: Synthetic oligonucleotide
  Antisense strand to SEQ ID NO: 2369002
aaugguacaugccugucac

SEQ ID NO: 2369004 - RNA, 19 nt, Artificial Sequence
  Description of Artificial Sequence: Synthetic oligonucleotide
  Sense strand starting at position 102 of SEQ ID NO: 1885809
cugauaucuguccauugga

SEQ ID NO: 2369005 - RNA, 19 nt, Artificial Sequence
  Description of Artificial Sequence: Synthetic oligonucleotide
  Antisense strand to SEQ ID NO: 2369004
uccaauggacagauaucag

SEQ ID NO: 2369006 - RNA, 19 nt, Artificial Sequence
  Description of Artificial Sequence: Synthetic oligonucleotide
  Sense strand starting at position 140 of SEQ ID NO: 1885809
uggacuagaucccauuugu

SEQ ID NO: 2369007 - RNA, 19 nt, Artificial Sequence
  Description of Artificial Sequence: Synthetic oligonucleotide
  Antisense strand to SEQ ID NO: 2369006
acaaaugggaucuagucca

SEQ ID NO: 2369008 - RNA, 19 nt, Artificial Sequence
  Description of Artificial Sequence: Synthetic oligonucleotide
  Sense strand starting at position 218 of SEQ ID NO: 1885809
ggucaucacugguccagga

SEQ ID NO: 2369009 - RNA, 19 nt, Artificial Sequence
  Description of Artificial Sequence: Synthetic oligonucleotide
  Antisense strand to SEQ ID NO: 2369008
uccuggaccagugaugacc

SEQ ID NO: 2369010 - RNA, 19 nt, Artificial Sequence
  Description of Artificial Sequence: Synthetic oligonucleotide
  Sense strand starting at position 461 of SEQ ID NO: 1885809
ugggcagacuucucuuauu

SEQ ID NO: 2369011 - RNA, 19 nt, Artificial Sequence
  Description of Artificial Sequence: Synthetic oligonucleotide
  Antisense strand to SEQ ID NO: 2369010
aauaagagaagucugccca

SEQ ID NO: 2369012 - RNA, 19 nt, Artificial Sequence
  Description of Artificial Sequence: Synthetic oligonucleotide
  Sense strand starting at position 464 of SEQ ID NO: 1885809
gcagacuucucuuauuuga

SEQ ID NO: 2369013 - RNA, 19 nt, Artificial Sequence
  Description of Artificial Sequence: Synthetic oligonucleotide
  Antisense strand to SEQ ID NO: 2369012
ucaaauaagagaagucugc

SEQ ID NO: 2369014 - RNA, 19 nt, Artificial Sequence
  Description of Artificial Sequence: Synthetic oligonucleotide
  Sense strand starting at position 728 of SEQ ID NO: 1885809
uccaguuagucagucauac

SEQ ID NO: 2369015 - RNA, 19 nt, Artificial Sequence
  Description of Artificial Sequence: Synthetic oligonucleotide
  Antisense strand to SEQ ID NO: 2369014
guaugacugacuaacugga

SEQ ID NO: 2369016 - RNA, 19 nt, Artificial Sequence
  Description of Artificial Sequence: Synthetic oligonucleotide
  Sense strand starting at position 780 of SEQ ID NO: 1885809
uccuauguaggcuaacaau

SEQ ID NO: 2369017 - RNA, 19 nt, Artificial Sequence
  Description of Artificial Sequence: Synthetic oligonucleotide
  Antisense strand to SEQ ID NO: 2369016
auuguuagccuacauagga

SEQ ID NO: 2369018 - RNA, 19 nt, Artificial Sequence
  Description of Artificial Sequence: Synthetic oligonucleotide
  Sense strand starting at position 786 of SEQ ID NO: 1885809
guaggcuaacaaugucaau

SEQ ID NO: 2369019 - RNA, 19 nt, Artificial Sequence
  Description of Artificial Sequence: Synthetic oligonucleotide
  Antisense strand to SEQ ID NO: 2369018
auugacauuguuagccuac

SEQ ID NO: 2369020 - RNA, 19 nt, Artificial Sequence
  Description of Artificial Sequence: Synthetic oligonucleotide
  Sense strand starting at position 1500 of SEQ ID NO: 1885809
uugagacauucuuugcauc

SEQ ID NO: 2369021 - RNA, 19 nt, Artificial Sequence
  Description of Artificial Sequence: Synthetic oligonucleotide
  Antisense strand to SEQ ID NO: 2369020
gaugcaaagaaugucucaa

SEQ ID NO: 2369022 - RNA, 19 nt, Artificial Sequence
  Description of Artificial Sequence: Synthetic oligonucleotide
  Sense strand starting at position 1501 of SEQ ID NO: 1885809
ugagacauucuuugcauca

SEQ ID NO: 2369023 - RNA, 19 nt, Artificial Sequence
  Description of Artificial Sequence: Synthetic oligonucleotide
  Antisense strand to SEQ ID NO: 2369022
ugaugcaaagaaugucuca

SEQ ID NO: 2369024 - RNA, 19 nt, Artificial Sequence
  Description of Artificial Sequence: Synthetic oligonucleotide
  Sense strand starting at position 1911 of SEQ ID NO: 1885809
accagaucccauuguauug

SEQ ID NO: 2369025 - RNA, 19 nt, Artificial Sequence
  Description of Artificial Sequence: Synthetic oligonucleotide
  Antisense strand to SEQ ID NO: 2369024
caauacaaugggaucuggu

SEQ ID NO: 2369026 - RNA, 19 nt, Artificial Sequence
  Description of Artificial Sequence: Synthetic oligonucleotide
  Sense strand starting at position 1923 of SEQ ID NO: 1885809
uguauuggaccucagaguu

SEQ ID NO: 2369027 - RNA, 19 nt, Artificial Sequence
  Description of Artificial Sequence: Synthetic oligonucleotide
  Antisense strand to SEQ ID NO: 2369026
aacucugagguccaauaca

SEQ ID NO: 2369028 - RNA, 19 nt, Artificial Sequence
  Description of Artificial Sequence: Synthetic oligonucleotide
  Sense strand starting at position 2156 of SEQ ID NO: 1885809
auuaacugagcucaauguu

SEQ ID NO: 2369029 - RNA, 19 nt, Artificial Sequence
  Description of Artificial Sequence: Synthetic oligonucleotide
  Antisense strand to SEQ ID NO: 2369028
aacauugagcucaguuaau

SEQ ID NO: 2369030 - RNA, 19 nt, Artificial Sequence
  Description of Artificial Sequence: Synthetic oligonucleotide
  Sense strand starting at position 2446 of SEQ ID NO: 1885809
ccuccaugaucuguguuua

SEQ ID NO: 2369031 - RNA, 19 nt, Artificial Sequence
  Description of Artificial Sequence: Synthetic oligonucleotide
  Antisense strand to SEQ ID NO: 2369030
uaaacacagaucauggagg

SEQ ID NO: 2369032 - RNA, 19 nt, Artificial Sequence
  Description of Artificial Sequence: Synthetic oligonucleotide
  Sense strand starting at position 2447 of SEQ ID NO: 1885809
cuccaugaucuguguuuau

SEQ ID NO: 2369033 - RNA, 19 nt, Artificial Sequence
  Description of Artificial Sequence: Synthetic oligonucleotide
  Antisense strand to SEQ ID NO: 2369032
auaaacacagaucauggag

SEQ ID NO: 2369034 - RNA, 19 nt, Artificial Sequence
  Description of Artificial Sequence: Synthetic oligonucleotide
  Sense strand starting at position 2538 of SEQ ID NO: 1885809
ugaacacuuugugcaacuu

SEQ ID NO: 2369035 - RNA, 19 nt, Artificial Sequence
  Description of Artificial Sequence: Synthetic oligonucleotide
  Antisense strand to SEQ ID NO: 2369034
aaguugcacaaaguguuca

SEQ ID NO: 2369036 - RNA, 19 nt, Artificial Sequence
  Description of Artificial Sequence: Synthetic oligonucleotide
  Sense strand starting at position 2564 of SEQ ID NO: 1885809
cccagagguugaccauuau

SEQ ID NO: 2369037 - RNA, 19 nt, Artificial Sequence
  Description of Artificial Sequence: Synthetic oligonucleotide
  Antisense strand to SEQ ID NO: 2369036
auaauggucaaccucuggg

SEQ ID NO: 2369038 - RNA, 19 nt, Artificial Sequence
  Description of Artificial Sequence: Synthetic oligonucleotide
  Sense strand starting at position 2570 of SEQ ID NO: 1885809
gguugaccauuaucuauaa

SEQ ID NO: 2369039 - RNA, 19 nt, Artificial Sequence
  Description of Artificial Sequence: Synthetic oligonucleotide
  Antisense strand to SEQ ID NO: 2369038
uuauagauaauggucaacc

SEQ ID NO: 2369040 - RNA, 19 nt, Artificial Sequence
  Description of Artificial Sequence: Synthetic oligonucleotide
  Sense strand starting at position 2595 of SEQ ID NO: 1885809
ccuguaucauccuuaguca

SEQ ID NO: 2369041 - RNA, 19 nt, Artificial Sequence
  Description of Artificial Sequence: Synthetic oligonucleotide
  Antisense strand to SEQ ID NO: 2369040
ugacuaaggaugauacagg

SEQ ID NO: 2369042 - RNA, 19 nt, Artificial Sequence
  Description of Artificial Sequence: Synthetic oligonucleotide
  Sense strand starting at position 2596 of SEQ ID NO: 1885809
cuguaucauccuuagucaa

SEQ ID NO: 2369043 - RNA, 19 nt, Artificial Sequence
  Description of Artificial Sequence: Synthetic oligonucleotide
  Antisense strand to SEQ ID NO: 2369042
uugacuaaggaugauacag

SEQ ID NO: 2369044 - RNA, 19 nt, Artificial Sequence
  Description of Artificial Sequence: Synthetic oligonucleotide
  Sense strand starting at position 2598 of SEQ ID NO: 1885809
guaucauccuuagucaaag

SEQ ID NO: 2369045 - RNA, 19 nt, Artificial Sequence
  Description of Artificial Sequence: Synthetic oligonucleotide
  Antisense strand to SEQ ID NO: 2369044
cuuugacuaaggaugauac

SEQ ID NO: 2369046 - RNA, 19 nt, Artificial Sequence
  Description of Artificial Sequence: Synthetic oligonucleotide
  Sense strand starting at position 2848 of SEQ ID NO: 1885809
guacauguauacguauaaa

SEQ ID NO: 2369047 - RNA, 19 nt, Artificial Sequence
  Description of Artificial Sequence: Synthetic oligonucleotide
  Antisense strand to SEQ ID NO: 2369046
uuuauacguauacauguac

SEQ ID NO: 2369048 - RNA, 19 nt, Artificial Sequence
  Description of Artificial Sequence: Synthetic oligonucleotide
  Sense strand starting at position 2886 of SEQ ID NO: 1885809
auaauaauacagugaagug

SEQ ID NO: 2369049 - RNA, 19 nt, Artificial Sequence
  Description of Artificial Sequence: Synthetic oligonucleotide
  Antisense strand to SEQ ID NO: 2369048
cacuucacuguauuauuau

SEQ ID NO: 2369050 - RNA, 19 nt, Artificial Sequence
  Description of Artificial Sequence: Synthetic oligonucleotide
  Sense strand starting at position 2950 of SEQ ID NO: 1885809
ucaccugaaucagaaggaa

SEQ ID NO: 2369051 - RNA, 19 nt, Artificial Sequence
  Description of Artificial Sequence: Synthetic oligonucleotide
  Antisense strand to SEQ ID NO: 2369050
uuccuucugauucagguga

SEQ ID NO: 2369052 - RNA, 19 nt, Artificial Sequence
  Description of Artificial Sequence: Synthetic oligonucleotide
  Sense strand starting at position 3080 of SEQ ID NO: 1885809
uucuaccuugucuauugau

SEQ ID NO: 2369053 - RNA, 19 nt, Artificial Sequence
  Description of Artificial Sequence: Synthetic oligonucleotide
  Antisense strand to SEQ ID NO: 2369052
aucaauagacaagguagaa

SEQ ID NO: 2369054 - RNA, 19 nt, Artificial Sequence
  Description of Artificial Sequence: Synthetic oligonucleotide
  Sense strand starting at position 3087 of SEQ ID NO: 1885809
uugucuauugauuauguca

SEQ ID NO: 2369055 - RNA, 19 nt, Artificial Sequence
  Description of Artificial Sequence: Synthetic oligonucleotide
  Antisense strand to SEQ ID NO: 2369054
ugacauaaucaauagacaa

SEQ ID NO: 2369056 - RNA, 19 nt, Artificial Sequence
  Description of Artificial Sequence: Synthetic oligonucleotide
  Sense strand starting at position 3160 of SEQ ID NO: 1885809
cuugauauucccuaucagu

SEQ ID NO: 2369057 - RNA, 19 nt, Artificial Sequence
  Description of Artificial Sequence: Synthetic oligonucleotide
  Antisense strand to SEQ ID NO: 2369056
acugauagggaauaucaag

SEQ ID NO: 2369058 - RNA, 19 nt, Artificial Sequence
  Description of Artificial Sequence: Synthetic oligonucleotide
  Sense strand starting at position 3285 of SEQ ID NO: 1885809
ggccaucuuugacuguauu

SEQ ID NO: 2369059 - RNA, 19 nt, Artificial Sequence
  Description of Artificial Sequence: Synthetic oligonucleotide
  Antisense strand to SEQ ID NO: 2369058
aauacagucaaagauggcc

SEQ ID NO: 2369060 - RNA, 19 nt, Artificial Sequence
  Description of Artificial Sequence: Synthetic oligonucleotide
  Sense strand starting at position 3286 of SEQ ID NO: 1885809
gccaucuuugacuguauuu

SEQ ID NO: 2369061 - RNA, 19 nt, Artificial Sequence
  Description of Artificial Sequence: Synthetic oligonucleotide
  Antisense strand to SEQ ID NO: 2369060
aaauacagucaaagauggc

SEQ ID NO: 2369062 - RNA, 19 nt, Artificial Sequence
  Description of Artificial Sequence: Synthetic oligonucleotide
  Sense strand starting at position 3319 of SEQ ID NO: 1885809
auacguugauuacucuuaa

SEQ ID NO: 2369063 - RNA, 19 nt, Artificial Sequence
  Description of Artificial Sequence: Synthetic oligonucleotide
  Antisense strand to SEQ ID NO: 2369062
uuaagaguaaucaacguau

SEQ ID NO: 2369064 - RNA, 19 nt, Artificial Sequence
  Description of Artificial Sequence: Synthetic oligonucleotide
  Sense strand starting at position 3355 of SEQ ID NO: 1885809
agguaaggacuuugacuau

SEQ ID NO: 2369065 - RNA, 19 nt, Artificial Sequence
  Description of Artificial Sequence: Synthetic oligonucleotide
  Antisense strand to SEQ ID NO: 2369064
auagucaaaguccuuaccu

SEQ ID NO: 2369066 - RNA, 19 nt, Artificial Sequence
  Description of Artificial Sequence: Synthetic oligonucleotide
  Sense strand starting at position 3421 of SEQ ID NO: 1885809
guaugugaccuuggaggca

SEQ ID NO: 2369067 - RNA, 19 nt, Artificial Sequence
  Description of Artificial Sequence: Synthetic oligonucleotide
  Antisense strand to SEQ ID NO: 2369066
ugccuccaaggucacauac

SEQ ID NO: 2369068 - RNA, 19 nt, Artificial Sequence
  Description of Artificial Sequence: Synthetic oligonucleotide
  Sense strand starting at position 3463 of SEQ ID NO: 1885809
ccauucugaugaguacaga

SEQ ID NO: 2369069 - RNA, 19 nt, Artificial Sequence
  Description of Artificial Sequence: Synthetic oligonucleotide
  Antisense strand to SEQ ID NO: 2369068
ucuguacucaucagaaugg

SEQ ID NO: 2369070 - RNA, 19 nt, Artificial Sequence
  Description of Artificial Sequence: Synthetic oligonucleotide
  Sense strand starting at position 3556 of SEQ ID NO: 1885809
gcaaucguuauuuggacuu

SEQ ID NO: 2369071 - RNA, 19 nt, Artificial Sequence
  Description of Artificial Sequence: Synthetic oligonucleotide
  Antisense strand to SEQ ID NO: 2369070
aaguccaaauaacgauugc

SEQ ID NO: 2369072 - RNA, 19 nt, Artificial Sequence
  Description of Artificial Sequence: Synthetic oligonucleotide
  Sense strand starting at position 3706 of SEQ ID NO: 1885809
gcuauaucaucauuggcca

SEQ ID NO: 2369073 - RNA, 19 nt, Artificial Sequence
  Description of Artificial Sequence: Synthetic oligonucleotide
  Antisense strand to SEQ ID NO: 2369072
uggccaaugaugauauagc

SEQ ID NO: 2369074 - RNA, 19 nt, Artificial Sequence
  Description of Artificial Sequence: Synthetic oligonucleotide
  Sense strand starting at position 3788 of SEQ ID NO: 1885809
uguuucuugccucacuaca

SEQ ID NO: 2369075 - RNA, 19 nt, Artificial Sequence
  Description of Artificial Sequence: Synthetic oligonucleotide
  Antisense strand to SEQ ID NO: 2369074
uguagugaggcaagaaaca

SEQ ID NO: 2369076 - RNA, 19 nt, Artificial Sequence
  Description of Artificial Sequence: Synthetic oligonucleotide
  Sense strand starting at position 3810 of SEQ ID NO: 1885809
uuuaauaauugggcaauga

SEQ ID NO: 2369077 - RNA, 19 nt, Artificial Sequence
  Description of Artificial Sequence: Synthetic oligonucleotide
  Antisense strand to SEQ ID NO: 2369076
ucauugcccaauuauuaaa

SEQ ID NO: 2369078 - RNA, 19 nt, Artificial Sequence
  Description of Artificial Sequence: Synthetic oligonucleotide
  Sense strand starting at position 3814 of SEQ ID NO: 1885809
auaauugggcaaugauuaa

SEQ ID NO: 2369079 - RNA, 19 nt, Artificial Sequence
  Description of Artificial Sequence: Synthetic oligonucleotide
  Antisense strand to SEQ ID NO: 2369078
uuaaucauugcccaauuau

SEQ ID NO: 2369080 - RNA, 19 nt, Artificial Sequence
  Description of Artificial Sequence: Synthetic oligonucleotide
  Sense strand starting at position 3869 of SEQ ID NO: 1885809
auauauagguucucacauu

SEQ ID NO: 2369081 - RNA, 19 nt, Artificial Sequence
  Description of Artificial Sequence: Synthetic oligonucleotide
  Antisense strand to SEQ ID NO: 2369080
aaugugagaaccuauauau

SEQ ID NO: 2369082 - RNA, 19 nt, Artificial Sequence
  Description of Artificial Sequence: Synthetic oligonucleotide
  Sense strand starting at position 3875 of SEQ ID NO: 1885809
agguucucacauugagcaa

SEQ ID NO: 2369083 - RNA, 19 nt, Artificial Sequence
  Description of Artificial Sequence: Synthetic oligonucleotide
  Antisense strand to SEQ ID NO: 2369082
uugcucaaugugagaaccu

SEQ ID NO: 2369084 - RNA, 19 nt, Artificial Sequence
  Description of Artificial Sequence: Synthetic oligonucleotide
  Sense strand starting at position 28 of SEQ ID NO: 1885810
accauugggccaugguuaa

SEQ ID NO: 2369085 - RNA, 19 nt, Artificial Sequence
  Description of Artificial Sequence: Synthetic oligonucleotide
  Antisense strand to SEQ ID NO: 2369084
uuaaccauggcccaauggu

SEQ ID NO: 2369086 - RNA, 19 nt, Artificial Sequence
  Description of Artificial Sequence: Synthetic oligonucleotide
  Sense strand starting at position 80 of SEQ ID NO: 1885810
ugaauaccuuuagacaagu

SEQ ID NO: 2369087 - RNA, 19 nt, Artificial Sequence
  Description of Artificial Sequence: Synthetic oligonucleotide
  Antisense strand to SEQ ID NO: 2369086
acuugucuaaagguauuca

SEQ ID NO: 2369088 - RNA, 19 nt, Artificial Sequence
  Description of Artificial Sequence: Synthetic oligonucleotide
  Sense strand starting at position 274 of SEQ ID NO: 1885810
uuccacuauucguuuguau

SEQ ID NO: 2369089 - RNA, 19 nt, Artificial Sequence
  Description of Artificial Sequence: Synthetic oligonucleotide
  Antisense strand to SEQ ID NO: 2369088
auacaaacgaauaguggaa

SEQ ID NO: 2369090 - RNA, 19 nt, Artificial Sequence
  Description of Artificial Sequence: Synthetic oligonucleotide
  Sense strand starting at position 276 of SEQ ID NO: 1885810
ccacuauucguuuguauca

SEQ ID NO: 2369091 - RNA, 19 nt, Artificial Sequence
  Description of Artificial Sequence: Synthetic oligonucleotide
  Antisense strand to SEQ ID NO: 2369090
ugauacaaacgaauagugg

SEQ ID NO: 2369092 - RNA, 19 nt, Artificial Sequence
  Description of Artificial Sequence: Synthetic oligonucleotide
  Sense strand starting at position 307 of SEQ ID NO: 1885810
uuaauaauuuaugggacca

SEQ ID NO: 2369093 - RNA, 19 nt, Artificial Sequence
  Description of Artificial Sequence: Synthetic oligonucleotide
  Antisense strand to SEQ ID NO: 2369092
uggucccauaaauuauuaa

SEQ ID NO: 2369094 - RNA, 19 nt, Artificial Sequence
  Description of Artificial Sequence: Synthetic oligonucleotide
  Sense strand starting at position 675 of SEQ ID NO: 1885810
acauguaacugagaguaau

SEQ ID NO: 2369095 - RNA, 19 nt, Artificial Sequence
  Description of Artificial Sequence: Synthetic oligonucleotide
  Antisense strand to SEQ ID NO: 2369094
auuacucucaguuacaugu

SEQ ID NO: 2369096 - RNA, 19 nt, Artificial Sequence
  Description of Artificial Sequence: Synthetic oligonucleotide
  Sense strand starting at position 939 of SEQ ID NO: 1885810
cugauaucuguccauugga

SEQ ID NO: 2369097 - RNA, 19 nt, Artificial Sequence
  Description of Artificial Sequence: Synthetic oligonucleotide
  Antisense strand to SEQ ID NO: 2369096
uccaauggacagauaucag

SEQ ID NO: 2369098 - RNA, 19 nt, Artificial Sequence
  Description of Artificial Sequence: Synthetic oligonucleotide
  Sense strand starting at position 977 of SEQ ID NO: 1885810
uggacuagaucccauuugu

SEQ ID NO: 2369099 - RNA, 19 nt, Artificial Sequence
  Description of Artificial Sequence: Synthetic oligonucleotide
  Antisense strand to SEQ ID NO: 2369098
acaaaugggaucuagucca

SEQ ID NO: 2369100 - RNA, 19 nt, Artificial Sequence
  Description of Artificial Sequence: Synthetic oligonucleotide
  Sense strand starting at position 1055 of SEQ ID NO: 1885810
ggucaucacugguccagga

SEQ ID NO: 2369101 - RNA, 19 nt, Artificial Sequence
  Description of Artificial Sequence: Synthetic oligonucleotide
  Antisense strand to SEQ ID NO: 2369100
uccuggaccagugaugacc

SEQ ID NO: 2369102 - RNA, 19 nt, Artificial Sequence
  Description of Artificial Sequence: Synthetic oligonucleotide
  Sense strand starting at position 1275 of SEQ ID NO: 1885810
ucauaucaaugugauauug

SEQ ID NO: 2369103 - RNA, 19 nt, Artificial Sequence
  Description of Artificial Sequence: Synthetic oligonucleotide
  Antisense strand to SEQ ID NO: 2369102
caauaucacauugauauga

SEQ ID NO: 2369104 - RNA, 19 nt, Artificial Sequence
  Description of Artificial Sequence: Synthetic oligonucleotide
  Sense strand starting at position 1298 of SEQ ID NO: 1885810
ugggcagacuucucuuauu

SEQ ID NO: 2369105 - RNA, 19 nt, Artificial Sequence
  Description of Artificial Sequence: Synthetic oligonucleotide
  Antisense strand to SEQ ID NO: 2369104
aauaagagaagucugccca

SEQ ID NO: 2369106 - RNA, 19 nt, Artificial Sequence
  Description of Artificial Sequence: Synthetic oligonucleotide
  Sense strand starting at position 1301 of SEQ ID NO: 1885810
gcagacuucucuuauuuga

SEQ ID NO: 2369107 - RNA, 19 nt, Artificial Sequence
  Description of Artificial Sequence: Synthetic oligonucleotide
  Antisense strand to SEQ ID NO: 2369106
ucaaauaagagaagucugc

SEQ ID NO: 2369108 - RNA, 19 nt, Artificial Sequence
  Description of Artificial Sequence: Synthetic oligonucleotide
  Sense strand starting at position 1365 of SEQ ID NO: 1885810
acugcuggauuugguauaa

SEQ ID NO: 2369109 - RNA, 19 nt, Artificial Sequence
  Description of Artificial Sequence: Synthetic oligonucleotide
  Antisense strand to SEQ ID NO: 2369108
uuauaccaaauccagcagu

SEQ ID NO: 2369110 - RNA, 19 nt, Artificial Sequence
  Description of Artificial Sequence: Synthetic oligonucleotide
  Sense strand starting at position 1565 of SEQ ID NO: 1885810
uccaguuagucagucauac

SEQ ID NO: 2369111 - RNA, 19 nt, Artificial Sequence
  Description of Artificial Sequence: Synthetic oligonucleotide
  Antisense strand to SEQ ID NO: 2369110
guaugacugacuaacugga

SEQ ID NO: 2369112 - RNA, 19 nt, Artificial Sequence
  Description of Artificial Sequence: Synthetic oligonucleotide
  Sense strand starting at position 1569 of SEQ ID NO: 1885810
guuagucagucauacauaa

SEQ ID NO: 2369113 - RNA, 19 nt, Artificial Sequence
  Description of Artificial Sequence: Synthetic oligonucleotide
  Antisense strand to SEQ ID NO: 2369112
uuauguaugacugacuaac

SEQ ID NO: 2369114 - RNA, 19 nt, Artificial Sequence
  Description of Artificial Sequence: Synthetic oligonucleotide
  Sense strand starting at position 1617 of SEQ ID NO: 1885810
uccuauguaggcuaacaau

SEQ ID NO: 2369115 - RNA, 19 nt, Artificial Sequence
  Description of Artificial Sequence: Synthetic oligonucleotide
  Antisense strand to SEQ ID NO: 2369114
auuguuagccuacauagga

SEQ ID NO: 2369116 - RNA, 19 nt, Artificial Sequence
  Description of Artificial Sequence: Synthetic oligonucleotide
  Sense strand starting at position 1623 of SEQ ID NO: 1885810
guaggcuaacaaugucaau

SEQ ID NO: 2369117 - RNA, 19 nt, Artificial Sequence
  Description of Artificial Sequence: Synthetic oligonucleotide
  Antisense strand to SEQ ID NO: 2369116
auugacauuguuagccuac

SEQ ID NO: 2369118 - RNA, 19 nt, Artificial Sequence
  Description of Artificial Sequence: Synthetic oligonucleotide
  Sense strand starting at position 2212 of SEQ ID NO: 1885810
ggcuguuacucacacugga

SEQ ID NO: 2369119 - RNA, 19 nt, Artificial Sequence
  Description of Artificial Sequence: Synthetic oligonucleotide
  Antisense strand to SEQ ID NO: 2369118
uccagugugaguaacagcc

SEQ ID NO: 2369120 - RNA, 19 nt, Artificial Sequence
  Description of Artificial Sequence: Synthetic oligonucleotide
  Sense strand starting at position 2337 of SEQ ID NO: 1885810
uugagacauucuuugcauc

SEQ ID NO: 2369121 - RNA, 19 nt, Artificial Sequence
  Description of Artificial Sequence: Synthetic oligonucleotide
  Antisense strand to SEQ ID NO: 2369120
gaugcaaagaaugucucaa

SEQ ID NO: 2369122 - RNA, 19 nt, Artificial Sequence
  Description of Artificial Sequence: Synthetic oligonucleotide
  Sense strand starting at position 2338 of SEQ ID NO: 1885810
ugagacauucuuugcauca

SEQ ID NO: 2369123 - RNA, 19 nt, Artificial Sequence
  Description of Artificial Sequence: Synthetic oligonucleotide
  Antisense strand to SEQ ID NO: 2369122
ugaugcaaagaaugucuca

SEQ ID NO: 2369124 - RNA, 19 nt, Artificial Sequence
  Description of Artificial Sequence: Synthetic oligonucleotide
  Sense strand starting at position 2445 of SEQ ID NO: 1885810
gcaacuaacugacaguaau

SEQ ID NO: 2369125 - RNA, 19 nt, Artificial Sequence
  Description of Artificial Sequence: Synthetic oligonucleotide
  Antisense strand to SEQ ID NO: 2369124
auuacugucaguuaguugc

SEQ ID NO: 2369126 - RNA, 19 nt, Artificial Sequence
  Description of Artificial Sequence: Synthetic oligonucleotide
  Sense strand starting at position 2681 of SEQ ID NO: 1885810
gcacgaagaucaugaagaa

SEQ ID NO: 2369127 - RNA, 19 nt, Artificial Sequence
  Description of Artificial Sequence: Synthetic oligonucleotide
  Antisense strand to SEQ ID NO: 2369126
uucuucaugaucuucgugc

SEQ ID NO: 2369128 - RNA, 19 nt, Artificial Sequence
  Description of Artificial Sequence: Synthetic oligonucleotide
  Sense strand starting at position 2713 of SEQ ID NO: 1885810
ccuguauccugacaucuau

SEQ ID NO: 2369129 - RNA, 19 nt, Artificial Sequence
  Description of Artificial Sequence: Synthetic oligonucleotide
  Antisense strand to SEQ ID NO: 2369128
auagaugucaggauacagg

SEQ ID NO: 2369130 - RNA, 19 nt, Artificial Sequence
  Description of Artificial Sequence: Synthetic oligonucleotide
  Sense strand starting at position 2748 of SEQ ID NO: 1885810
accagaucccauuguauug

SEQ ID NO: 2369131 - RNA, 19 nt, Artificial Sequence
  Description of Artificial Sequence: Synthetic oligonucleotide
  Antisense strand to SEQ ID NO: 2369130
caauacaaugggaucuggu

SEQ ID NO: 2369132 - RNA, 19 nt, Artificial Sequence
  Description of Artificial Sequence: Synthetic oligonucleotide
  Sense strand starting at position 2760 of SEQ ID NO: 1885810
uguauuggaccucagaguu

SEQ ID NO: 2369133 - RNA, 19 nt, Artificial Sequence
  Description of Artificial Sequence: Synthetic oligonucleotide
  Antisense strand to SEQ ID NO: 2369132
aacucugagguccaauaca

SEQ ID NO: 2369134 - RNA, 19 nt, Artificial Sequence
  Description of Artificial Sequence: Synthetic oligonucleotide
  Sense strand starting at position 2993 of SEQ ID NO: 1885810
auuaacugagcucaauguu

SEQ ID NO: 2369135 - RNA, 19 nt, Artificial Sequence
  Description of Artificial Sequence: Synthetic oligonucleotide
  Antisense strand to SEQ ID NO: 2369134
aacauugagcucaguuaau

SEQ ID NO: 2369136 - RNA, 19 nt, Artificial Sequence
  Description of Artificial Sequence: Synthetic oligonucleotide
  Sense strand starting at position 3283 of SEQ ID NO: 1885810
ccuccaugaucuguguuua

SEQ ID NO: 2369137 - RNA, 19 nt, Artificial Sequence
  Description of Artificial Sequence: Synthetic oligonucleotide
  Antisense strand to SEQ ID NO: 2369136
uaaacacagaucauggagg

SEQ ID NO: 2369138 - RNA, 19 nt, Artificial Sequence
  Description of Artificial Sequence: Synthetic oligonucleotide
  Sense strand starting at position 3284 of SEQ ID NO: 1885810
cuccaugaucuguguuuau

SEQ ID NO: 2369139 - RNA, 19 nt, Artificial Sequence
  Description of Artificial Sequence: Synthetic oligonucleotide
  Antisense strand to SEQ ID NO: 2369138
auaaacacagaucauggag

SEQ ID NO: 2369140 - RNA, 19 nt, Artificial Sequence
  Description of Artificial Sequence: Synthetic oligonucleotide
  Sense strand starting at position 3375 of SEQ ID NO: 1885810
ugaacacuuugugcaacuu

SEQ ID NO: 2369141 - RNA, 19 nt, Artificial Sequence
  Description of Artificial Sequence: Synthetic oligonucleotide
  Antisense strand to SEQ ID NO: 2369140
aaguugcacaaaguguuca

SEQ ID NO: 2369142 - RNA, 19 nt, Artificial Sequence
  Description of Artificial Sequence: Synthetic oligonucleotide
  Sense strand starting at position 3401 of SEQ ID NO: 1885810
cccagagguugaccauuau

SEQ ID NO: 2369143 - RNA, 19 nt, Artificial Sequence
  Description of Artificial Sequence: Synthetic oligonucleotide
  Antisense strand to SEQ ID NO: 2369142
auaauggucaaccucuggg

SEQ ID NO: 2369144 - RNA, 19 nt, Artificial Sequence
  Description of Artificial Sequence: Synthetic oligonucleotide
  Sense strand starting at position 3407 of SEQ ID NO: 1885810
gguugaccauuaucuauaa

SEQ ID NO: 2369145 - RNA, 19 nt, Artificial Sequence
  Description of Artificial Sequence: Synthetic oligonucleotide
  Antisense strand to SEQ ID NO: 2369144
uuauagauaauggucaacc

SEQ ID NO: 2369146 - RNA, 19 nt, Artificial Sequence
  Description of Artificial Sequence: Synthetic oligonucleotide
  Sense strand starting at position 3432 of SEQ ID NO: 1885810
ccuguaucauccuuaguca

SEQ ID NO: 2369147 - RNA, 19 nt, Artificial Sequence
  Description of Artificial Sequence: Synthetic oligonucleotide
  Antisense strand to SEQ ID NO: 2369146
ugacuaaggaugauacagg

SEQ ID NO: 2369148 - RNA, 19 nt, Artificial Sequence
  Description of Artificial Sequence: Synthetic oligonucleotide
  Sense strand starting at position 3433 of SEQ ID NO: 1885810
cuguaucauccuuagucaa

SEQ ID NO: 2369149 - RNA, 19 nt, Artificial Sequence
  Description of Artificial Sequence: Synthetic oligonucleotide
  Antisense strand to SEQ ID NO: 2369148
uugacuaaggaugauacag

SEQ ID NO: 2369150 - RNA, 19 nt, Artificial Sequence
  Description of Artificial Sequence: Synthetic oligonucleotide
  Sense strand starting at position 3435 of SEQ ID NO: 1885810
guaucauccuuagucaaag

SEQ ID NO: 2369151 - RNA, 19 nt, Artificial Sequence
  Description of Artificial Sequence: Synthetic oligonucleotide
  Antisense strand to SEQ ID NO: 2369150
cuuugacuaaggaugauac

SEQ ID NO: 2369152 - RNA, 19 nt, Artificial Sequence
  Description of Artificial Sequence: Synthetic oligonucleotide
  Sense strand starting at position 3684 of SEQ ID NO: 1885810
cguacauguauacguauaa

SEQ ID NO: 2369153 - RNA, 19 nt, Artificial Sequence
  Description of Artificial Sequence: Synthetic oligonucleotide
  Antisense strand to SEQ ID NO: 2369152
uuauacguauacauguacg

SEQ ID NO: 2369154 - RNA, 19 nt, Artificial Sequence
  Description of Artificial Sequence: Synthetic oligonucleotide
  Sense strand starting at position 3685 of SEQ ID NO: 1885810
guacauguauacguauaaa

SEQ ID NO: 2369155 - RNA, 19 nt, Artificial Sequence
  Description of Artificial Sequence: Synthetic oligonucleotide
  Antisense strand to SEQ ID NO: 2369154
uuuauacguauacauguac

SEQ ID NO: 2369156 - RNA, 19 nt, Artificial Sequence
  Description of Artificial Sequence: Synthetic oligonucleotide
  Sense strand starting at position 3723 of SEQ ID NO: 1885810
auaauaauacagugaagug

SEQ ID NO: 2369157 - RNA, 19 nt, Artificial Sequence
  Description of Artificial Sequence: Synthetic oligonucleotide
  Antisense strand to SEQ ID NO: 2369156
cacuucacuguauuauuau

SEQ ID NO: 2369158 - RNA, 19 nt, Artificial Sequence
  Description of Artificial Sequence: Synthetic oligonucleotide
  Sense strand starting at position 3787 of SEQ ID NO: 1885810
ucaccugaaucagaaggaa

SEQ ID NO: 2369159 - RNA, 19 nt, Artificial Sequence
  Description of Artificial Sequence: Synthetic oligonucleotide
  Antisense strand to SEQ ID NO: 2369158
uuccuucugauucagguga

SEQ ID NO: 2369160 - RNA, 19 nt, Artificial Sequence
  Description of Artificial Sequence: Synthetic oligonucleotide
  Sense strand starting at position 3917 of SEQ ID NO: 1885810
uucuaccuugucuauugau

SEQ ID NO: 2369161 - RNA, 19 nt, Artificial Sequence
  Description of Artificial Sequence: Synthetic oligonucleotide
  Antisense strand to SEQ ID NO: 2369160
aucaauagacaagguagaa

SEQ ID NO: 2369162 - RNA, 19 nt, Artificial Sequence
  Description of Artificial Sequence: Synthetic oligonucleotide
  Sense strand starting at position 3924 of SEQ ID NO: 1885810
uugucuauugauuauguca

SEQ ID NO: 2369163 - RNA, 19 nt, Artificial Sequence
  Description of Artificial Sequence: Synthetic oligonucleotide
  Antisense strand to SEQ ID NO: 2369162
ugacauaaucaauagacaa

SEQ ID NO: 2369164 - RNA, 19 nt, Artificial Sequence
  Description of Artificial Sequence: Synthetic oligonucleotide
  Sense strand starting at position 144 of SEQ ID NO: 1885811
ucauaaccaugggagaauu

SEQ ID NO: 2369165 - RNA, 19 nt, Artificial Sequence
  Description of Artificial Sequence: Synthetic oligonucleotide
  Antisense strand to SEQ ID NO: 2369164
aauucucccaugguuauga

SEQ ID NO: 2369166 - RNA, 19 nt, Artificial Sequence
  Description of Artificial Sequence: Synthetic oligonucleotide
  Sense strand starting at position 178 of SEQ ID NO: 1885811
auggguccagugugagaaa

SEQ ID NO: 2369167 - RNA, 19 nt, Artificial Sequence
  Description of Artificial Sequence: Synthetic oligonucleotide
  Antisense strand to SEQ ID NO: 2369166
uuucucacacuggacccau

SEQ ID NO: 2369168 - RNA, 19 nt, Artificial Sequence
  Description of Artificial Sequence: Synthetic oligonucleotide
  Sense strand starting at position 241 of SEQ ID NO: 1885811
cugagacguucucuccauu

SEQ ID NO: 2369169 - RNA, 19 nt, Artificial Sequence
  Description of Artificial Sequence: Synthetic oligonucleotide
  Antisense strand to SEQ ID NO: 2369168
aauggagagaacgucucag

SEQ ID NO: 2369170 - RNA, 19 nt, Artificial Sequence
  Description of Artificial Sequence: Synthetic oligonucleotide
  Sense strand starting at position 244 of SEQ ID NO: 1885811
agacguucucuccauuaau

SEQ ID NO: 2369171 - RNA, 19 nt, Artificial Sequence
  Description of Artificial Sequence: Synthetic oligonucleotide
  Antisense strand to SEQ ID NO: 2369170
auuaauggagagaacgucu

SEQ ID NO: 2369172 - RNA, 19 nt, Artificial Sequence
  Description of Artificial Sequence: Synthetic oligonucleotide
  Sense strand starting at position 350 of SEQ ID NO: 1885811
gccaucuauccagaacaug

SEQ ID NO: 2369173 - RNA, 19 nt, Artificial Sequence
  Description of Artificial Sequence: Synthetic oligonucleotide
  Antisense strand to SEQ ID NO: 2369172
cauguucuggauagauggc

SEQ ID NO: 2369174 - RNA, 19 nt, Artificial Sequence
  Description of Artificial Sequence: Synthetic oligonucleotide
  Sense strand starting at position 366 of SEQ ID NO: 1885811
augaacagugucuguaagu

SEQ ID NO: 2369175 - RNA, 19 nt, Artificial Sequence
  Description of Artificial Sequence: Synthetic oligonucleotide
  Antisense strand to SEQ ID NO: 2369174
acuuacagacacuguucau

SEQ ID NO: 2369176 - RNA, 19 nt, Artificial Sequence
  Description of Artificial Sequence: Synthetic oligonucleotide
  Sense strand starting at position 367 of SEQ ID NO: 1885811
ugaacagugucuguaaguu

SEQ ID NO: 2369177 - RNA, 19 nt, Artificial Sequence
  Description of Artificial Sequence: Synthetic oligonucleotide
  Antisense strand to SEQ ID NO: 2369176
aacuuacagacacuguuca

SEQ ID NO: 2369178 - RNA, 19 nt, Artificial Sequence
  Description of Artificial Sequence: Synthetic oligonucleotide
  Sense strand starting at position 373 of SEQ ID NO: 1885811
gugucuguaaguuauacca

SEQ ID NO: 2369179 - RNA, 19 nt, Artificial Sequence
  Description of Artificial Sequence: Synthetic oligonucleotide
  Antisense strand to SEQ ID NO: 2369178
ugguauaacuuacagacac

SEQ ID NO: 2369180 - RNA, 19 nt, Artificial Sequence
  Description of Artificial Sequence: Synthetic oligonucleotide
  Sense strand starting at position 440 of SEQ ID NO: 1885811
caaauuagaguuuaguguu

SEQ ID NO: 2369181 - RNA, 19 nt, Artificial Sequence
  Description of Artificial Sequence: Synthetic oligonucleotide
  Antisense strand to SEQ ID NO: 2369180
aacacuaaacucuaauuug

SEQ ID NO: 2369182 - RNA, 19 nt, Artificial Sequence
  Description of Artificial Sequence: Synthetic oligonucleotide
  Sense strand starting at position 475 of SEQ ID NO: 1885811
aguguuucuuugcucacua

SEQ ID NO: 2369183 - RNA, 19 nt, Artificial Sequence
  Description of Artificial Sequence: Synthetic oligonucleotide
  Antisense strand to SEQ ID NO: 2369182
uagugagcaaagaaacacu

SEQ ID NO: 2369184 - RNA, 19 nt, Artificial Sequence
  Description of Artificial Sequence: Synthetic oligonucleotide
  Sense strand starting at position 477 of SEQ ID NO: 1885811
uguuucuuugcucacuaca

SEQ ID NO: 2369185 - RNA, 19 nt, Artificial Sequence
  Description of Artificial Sequence: Synthetic oligonucleotide
  Antisense strand to SEQ ID NO: 2369184
uguagugagcaaagaaaca

SEQ ID NO: 2369186 - RNA, 19 nt, Artificial Sequence
  Description of Artificial Sequence: Synthetic oligonucleotide
  Sense strand starting at position 601 of SEQ ID NO: 1885811
agcccaagauccucggaua

SEQ ID NO: 2369187 - RNA, 19 nt, Artificial Sequence
  Description of Artificial Sequence: Synthetic oligonucleotide
  Antisense strand to SEQ ID NO: 2369186
uauccgaggaucuugggcu

SEQ ID NO: 2369188 - RNA, 19 nt, Artificial Sequence
  Description of Artificial Sequence: Synthetic oligonucleotide
  Sense strand starting at position 602 of SEQ ID NO: 1885811
gcccaagauccucggauau

SEQ ID NO: 2369189 - RNA, 19 nt, Artificial Sequence
  Description of Artificial Sequence: Synthetic oligonucleotide
  Antisense strand to SEQ ID NO: 2369188
auauccgaggaucuugggc

SEQ ID NO: 2369190 - RNA, 19 nt, Artificial Sequence
  Description of Artificial Sequence: Synthetic oligonucleotide
  Sense strand starting at position 633 of SEQ ID NO: 1885811
ccuagaggaugccuuauau

SEQ ID NO: 2369191 - RNA, 19 nt, Artificial Sequence
  Description of Artificial Sequence: Synthetic oligonucleotide
  Antisense strand to SEQ ID NO: 2369190
auauaaggcauccucuagg

SEQ ID NO: 2369192 - RNA, 19 nt, Artificial Sequence
  Description of Artificial Sequence: Synthetic oligonucleotide
  Sense strand starting at position 637 of SEQ ID NO: 1885811
gaggaugccuuauaucaag

SEQ ID NO: 2369193 - RNA, 19 nt, Artificial Sequence
  Description of Artificial Sequence: Synthetic oligonucleotide
  Antisense strand to SEQ ID NO: 2369192
cuugauauaaggcauccuc

SEQ ID NO: 2369194 - RNA, 19 nt, Artificial Sequence
  Description of Artificial Sequence: Synthetic oligonucleotide
  Sense strand starting at position 726 of SEQ ID NO: 1885811
cgccaucauuggucucaau

SEQ ID NO: 2369195 - RNA, 19 nt, Artificial Sequence
  Description of Artificial Sequence: Synthetic oligonucleotide
  Antisense strand to SEQ ID NO: 2369194
auugagaccaaugauggcg

SEQ ID NO: 2369196 - RNA, 19 nt, Artificial Sequence
  Description of Artificial Sequence: Synthetic oligonucleotide
  Sense strand starting at position 828 of SEQ ID NO: 1885811
ugaacaugaugccagacau

SEQ ID NO: 2369197 - RNA, 19 nt, Artificial Sequence
  Description of Artificial Sequence: Synthetic oligonucleotide
  Antisense strand to SEQ ID NO: 2369196
augucuggcaucauguuca

SEQ ID NO: 2369198 - RNA, 19 nt, Artificial Sequence
  Description of Artificial Sequence: Synthetic oligonucleotide
  Sense strand starting at position 848 of SEQ ID NO: 1885811
ccaagcaucugucuacaga

SEQ ID NO: 2369199 - RNA, 19 nt, Artificial Sequence
  Description of Artificial Sequence: Synthetic oligonucleotide
  Antisense strand to SEQ ID NO: 2369198
ucuguagacagaugcuugg

SEQ ID NO: 2369200 - RNA, 19 nt, Artificial Sequence
  Description of Artificial Sequence: Synthetic oligonucleotide
  Sense strand starting at position 908 of SEQ ID NO: 1885811
cucuguguggcacauuauu

SEQ ID NO: 2369201 - RNA, 19 nt, Artificial Sequence
  Description of Artificial Sequence: Synthetic oligonucleotide
  Antisense strand to SEQ ID NO: 2369200
aauaaugugccacacagag

SEQ ID NO: 2369202 - RNA, 19 nt, Artificial Sequence
  Description of Artificial Sequence: Synthetic oligonucleotide
  Sense strand starting at position 913 of SEQ ID NO: 1885811
uguggcacauuauugauua

SEQ ID NO: 2369203 - RNA, 19 nt, Artificial Sequence
  Description of Artificial Sequence: Synthetic oligonucleotide
  Antisense strand to SEQ ID NO: 2369202
uaaucaauaaugugccaca

SEQ ID NO: 2369204 - RNA, 19 nt, Artificial Sequence
  Description of Artificial Sequence: Synthetic oligonucleotide
  Sense strand starting at position 959 of SEQ ID NO: 1885811
accauugggccaugguuaa

SEQ ID NO: 2369205 - RNA, 19 nt, Artificial Sequence
  Description of Artificial Sequence: Synthetic oligonucleotide
  Antisense strand to SEQ ID NO: 2369204
uuaaccauggcccaauggu

SEQ ID NO: 2369206 - RNA, 19 nt, Artificial Sequence
  Description of Artificial Sequence: Synthetic oligonucleotide
  Sense strand starting at position 1011 of SEQ ID NO: 1885811
ugaauaccuuuagacaagu

SEQ ID NO: 2369207 - RNA, 19 nt, Artificial Sequence
  Description of Artificial Sequence: Synthetic oligonucleotide
  Antisense strand to SEQ ID NO: 2369206
acuugucuaaagguauuca

SEQ ID NO: 2369208 - RNA, 19 nt, Artificial Sequence
  Description of Artificial Sequence: Synthetic oligonucleotide
  Sense strand starting at position 1205 of SEQ ID NO: 1885811
uuccacuauucguuuguau

SEQ ID NO: 2369209 - RNA, 19 nt, Artificial Sequence
  Description of Artificial Sequence: Synthetic oligonucleotide
  Antisense strand to SEQ ID NO: 2369208
auacaaacgaauaguggaa

SEQ ID NO: 2369210 - RNA, 19 nt, Artificial Sequence
  Description of Artificial Sequence: Synthetic oligonucleotide
  Sense strand starting at position 1207 of SEQ ID NO: 1885811
ccacuauucguuuguauca

SEQ ID NO: 2369211 - RNA, 19 nt, Artificial Sequence
  Description of Artificial Sequence: Synthetic oligonucleotide
  Antisense strand to SEQ ID NO: 2369210
ugauacaaacgaauagugg

SEQ ID NO: 2369212 - RNA, 19 nt, Artificial Sequence
  Description of Artificial Sequence: Synthetic oligonucleotide
  Sense strand starting at position 1238 of SEQ ID NO: 1885811
uuaauaauuuaugggacca

SEQ ID NO: 2369213 - RNA, 19 nt, Artificial Sequence
  Description of Artificial Sequence: Synthetic oligonucleotide
  Antisense strand to SEQ ID NO: 2369212
uggucccauaaauuauuaa

SEQ ID NO: 2369214 - RNA, 19 nt, Artificial Sequence
  Description of Artificial Sequence: Synthetic oligonucleotide
  Sense strand starting at position 1606 of SEQ ID NO: 1885811
acauguaacugagaguaau

SEQ ID NO: 2369215 - RNA, 19 nt, Artificial Sequence
  Description of Artificial Sequence: Synthetic oligonucleotide
  Antisense strand to SEQ ID NO: 2369214
auuacucucaguuacaugu

SEQ ID NO: 2369216 - RNA, 19 nt, Artificial Sequence
  Description of Artificial Sequence: Synthetic oligonucleotide
  Sense strand starting at position 1870 of SEQ ID NO: 1885811
cugauaucuguccauugga

SEQ ID NO: 2369217 - RNA, 19 nt, Artificial Sequence
  Description of Artificial Sequence: Synthetic oligonucleotide
  Antisense strand to SEQ ID NO: 2369216
uccaauggacagauaucag

SEQ ID NO: 2369218 - RNA, 19 nt, Artificial Sequence
  Description of Artificial Sequence: Synthetic oligonucleotide
  Sense strand starting at position 1908 of SEQ ID NO: 1885811
uggacuagaucccauuugu

SEQ ID NO: 2369219 - RNA, 19 nt, Artificial Sequence
  Description of Artificial Sequence: Synthetic oligonucleotide
  Antisense strand to SEQ ID NO: 2369218
acaaaugggaucuagucca

SEQ ID NO: 2369220 - RNA, 19 nt, Artificial Sequence
  Description of Artificial Sequence: Synthetic oligonucleotide
  Sense strand starting at position 1986 of SEQ ID NO: 1885811
ggucaucacugguccagga

SEQ ID NO: 2369221 - RNA, 19 nt, Artificial Sequence
  Description of Artificial Sequence: Synthetic oligonucleotide
  Antisense strand to SEQ ID NO: 2369220
uccuggaccagugaugacc

SEQ ID NO: 2369222 - RNA, 19 nt, Artificial Sequence
  Description of Artificial Sequence: Synthetic oligonucleotide
  Sense strand starting at position 2229 of SEQ ID NO: 1885811
ugggcagacuucucuuauu

SEQ ID NO: 2369223 - RNA, 19 nt, Artificial Sequence
  Description of Artificial Sequence: Synthetic oligonucleotide
  Antisense strand to SEQ ID NO: 2369222
aauaagagaagucugccca

SEQ ID NO: 2369224 - RNA, 19 nt, Artificial Sequence
  Description of Artificial Sequence: Synthetic oligonucleotide
  Sense strand starting at position 2232 of SEQ ID NO: 1885811
gcagacuucucuuauuuga

SEQ ID NO: 2369225 - RNA, 19 nt, Artificial Sequence
  Description of Artificial Sequence: Synthetic oligonucleotide
  Antisense strand to SEQ ID NO: 2369224
ucaaauaagagaagucugc

SEQ ID NO: 2369226 - RNA, 19 nt, Artificial Sequence
  Description of Artificial Sequence: Synthetic oligonucleotide
  Sense strand starting at position 2296 of SEQ ID NO: 1885811
acugcuggauuugguauaa

SEQ ID NO: 2369227 - RNA, 19 nt, Artificial Sequence
  Description of Artificial Sequence: Synthetic oligonucleotide
  Antisense strand to SEQ ID NO: 2369226
uuauaccaaauccagcagu

SEQ ID NO: 2369228 - RNA, 19 nt, Artificial Sequence
  Description of Artificial Sequence: Synthetic oligonucleotide
  Sense strand starting at position 2496 of SEQ ID NO: 1885811
uccaguuagucagucauac

SEQ ID NO: 2369229 - RNA, 19 nt, Artificial Sequence
  Description of Artificial Sequence: Synthetic oligonucleotide
  Antisense strand to SEQ ID NO: 2369228
guaugacugacuaacugga

SEQ ID NO: 2369230 - RNA, 19 nt, Artificial Sequence
  Description of Artificial Sequence: Synthetic oligonucleotide
  Sense strand starting at position 2548 of SEQ ID NO: 1885811
uccuauguaggcuaacaau

SEQ ID NO: 2369231 - RNA, 19 nt, Artificial Sequence
  Description of Artificial Sequence: Synthetic oligonucleotide
  Antisense strand to SEQ ID NO: 2369230
auuguuagccuacauagga

SEQ ID NO: 2369232 - RNA, 19 nt, Artificial Sequence
  Description of Artificial Sequence: Synthetic oligonucleotide
  Sense strand starting at position 2554 of SEQ ID NO: 1885811
guaggcuaacaaugucaau

SEQ ID NO: 2369233 - RNA, 19 nt, Artificial Sequence
  Description of Artificial Sequence: Synthetic oligonucleotide
  Antisense strand to SEQ ID NO: 2369232
auugacauuguuagccuac

SEQ ID NO: 2369234 - RNA, 19 nt, Artificial Sequence
  Description of Artificial Sequence: Synthetic oligonucleotide
  Sense strand starting at position 3268 of SEQ ID NO: 1885811
uugagacauucuuugcauc

SEQ ID NO: 2369235 - RNA, 19 nt, Artificial Sequence
  Description of Artificial Sequence: Synthetic oligonucleotide
  Antisense strand to SEQ ID NO: 2369234
gaugcaaagaaugucucaa

SEQ ID NO: 2369236 - RNA, 19 nt, Artificial Sequence
  Description of Artificial Sequence: Synthetic oligonucleotide
  Sense strand starting at position 3269 of SEQ ID NO: 1885811
ugagacauucuuugcauca

SEQ ID NO: 2369237 - RNA, 19 nt, Artificial Sequence
  Description of Artificial Sequence: Synthetic oligonucleotide
  Antisense strand to SEQ ID NO: 2369236
ugaugcaaagaaugucuca

SEQ ID NO: 2369238 - RNA, 19 nt, Artificial Sequence
  Description of Artificial Sequence: Synthetic oligonucleotide
  Sense strand starting at position 3679 of SEQ ID NO: 1885811
accagaucccauuguauug

SEQ ID NO: 2369239 - RNA, 19 nt, Artificial Sequence
  Description of Artificial Sequence: Synthetic oligonucleotide
  Antisense strand to SEQ ID NO: 2369238
caauacaaugggaucuggu

SEQ ID NO: 2369240 - RNA, 19 nt, Artificial Sequence
  Description of Artificial Sequence: Synthetic oligonucleotide
  Sense strand starting at position 3691 of SEQ ID NO: 1885811
uguauuggaccucagaguu

SEQ ID NO: 2369241 - RNA, 19 nt, Artificial Sequence
  Description of Artificial Sequence: Synthetic oligonucleotide
  Antisense strand to SEQ ID NO: 2369240
aacucugagguccaauaca

SEQ ID NO: 2369242 - RNA, 19 nt, Artificial Sequence
  Description of Artificial Sequence: Synthetic oligonucleotide
  Sense strand starting at position 3924 of SEQ ID NO: 1885811
auuaacugagcucaauguu

SEQ ID NO: 2369243 - RNA, 19 nt, Artificial Sequence
  Description of Artificial Sequence: Synthetic oligonucleotide
  Antisense strand to SEQ ID NO: 2369242
aacauugagcucaguuaau

SEQ ID NO: 2369244 - RNA, 19 nt, Artificial Sequence
  Description of Artificial Sequence: Synthetic oligonucleotide
  Sense strand starting at position 6 of SEQ ID NO: 1885812
uugagauguucucuccauu

SEQ ID NO: 2369245 - RNA, 19 nt, Artificial Sequence
  Description of Artificial Sequence: Synthetic oligonucleotide
  Antisense strand to SEQ ID NO: 2369244
aauggagagaacaucucaa

SEQ ID NO: 2369246 - RNA, 19 nt, Artificial Sequence
  Description of Artificial Sequence: Synthetic oligonucleotide
  Sense strand starting at position 9 of SEQ ID NO: 1885812
agauguucucuccauugau

SEQ ID NO: 2369247 - RNA, 19 nt, Artificial Sequence
  Description of Artificial Sequence: Synthetic oligonucleotide
  Antisense strand to SEQ ID NO: 2369246
aucaauggagagaacaucu

SEQ ID NO: 2369248 - RNA, 19 nt, Artificial Sequence
  Description of Artificial Sequence: Synthetic oligonucleotide
  Sense strand starting at position 12 of SEQ ID NO: 1885812
uguucucuccauugaucca

SEQ ID NO: 2369249 - RNA, 19 nt, Artificial Sequence
  Description of Artificial Sequence: Synthetic oligonucleotide
  Antisense strand to SEQ ID NO: 2369248
uggaucaauggagagaaca

SEQ ID NO: 2369250 - RNA, 19 nt, Artificial Sequence
  Description of Artificial Sequence: Synthetic oligonucleotide
  Sense strand starting at position 149 of SEQ ID NO: 1885812
ccuauuacagucuauguca

SEQ ID NO: 2369251 - RNA, 19 nt, Artificial Sequence
  Description of Artificial Sequence: Synthetic oligonucleotide
  Antisense strand to SEQ ID NO: 2369250
ugacauagacuguaauagg

SEQ ID NO: 2369252 - RNA, 19 nt, Artificial Sequence
  Description of Artificial Sequence: Synthetic oligonucleotide
  Sense strand starting at position 160 of SEQ ID NO: 1885812
cuaugucauccuuagucca

SEQ ID NO: 2369253 - RNA, 19 nt, Artificial Sequence
  Description of Artificial Sequence: Synthetic oligonucleotide
  Antisense strand to SEQ ID NO: 2369252
uggacuaaggaugacauag

SEQ ID NO: 2369254 - RNA, 19 nt, Artificial Sequence
  Description of Artificial Sequence: Synthetic oligonucleotide
  Sense strand starting at position 163 of SEQ ID NO: 1885812
ugucauccuuaguccaaga

SEQ ID NO: 2369255 - RNA, 19 nt, Artificial Sequence
  Description of Artificial Sequence: Synthetic oligonucleotide
  Antisense strand to SEQ ID NO: 2369254
ucuuggacuaaggaugaca

SEQ ID NO: 2369256 - RNA, 19 nt, Artificial Sequence
  Description of Artificial Sequence: Synthetic oligonucleotide
  Sense strand starting at position 312 of SEQ ID NO: 1885812
ccuugauucguuuacaaua

SEQ ID NO: 2369257 - RNA, 19 nt, Artificial Sequence
  Description of Artificial Sequence: Synthetic oligonucleotide
  Antisense strand to SEQ ID NO: 2369256
uauuguaaacgaaucaagg

SEQ ID NO: 2369258 - RNA, 19 nt, Artificial Sequence
  Description of Artificial Sequence: Synthetic oligonucleotide
  Sense strand starting at position 370 of SEQ ID NO: 1885812
guccucauauauucugaca

SEQ ID NO: 2369259 - RNA, 19 nt, Artificial Sequence
  Description of Artificial Sequence: Synthetic oligonucleotide
  Antisense strand to SEQ ID NO: 2369258
ugucagaauauaugaggac

SEQ ID NO: 2369260 - RNA, 19 nt, Artificial Sequence
  Description of Artificial Sequence: Synthetic oligonucleotide
  Sense strand starting at position 381 of SEQ ID NO: 1885812
uucugacaucugugcauaa

SEQ ID NO: 2369261 - RNA, 19 nt, Artificial Sequence
  Description of Artificial Sequence: Synthetic oligonucleotide
  Antisense strand to SEQ ID NO: 2369260
uuaugcacagaugucagaa

SEQ ID NO: 2369262 - RNA, 19 nt, Artificial Sequence
  Description of Artificial Sequence: Synthetic oligonucleotide
  Sense strand starting at position 383 of SEQ ID NO: 1885812
cugacaucugugcauaaga

SEQ ID NO: 2369263 - RNA, 19 nt, Artificial Sequence
  Description of Artificial Sequence: Synthetic oligonucleotide
  Antisense strand to SEQ ID NO: 2369262
ucuuaugcacagaugucag

SEQ ID NO: 2369264 - RNA, 19 nt, Artificial Sequence
  Description of Artificial Sequence: Synthetic oligonucleotide
  Sense strand starting at position 385 of SEQ ID NO: 1885812
gacaucugugcauaagauc

SEQ ID NO: 2369265 - RNA, 19 nt, Artificial Sequence
  Description of Artificial Sequence: Synthetic oligonucleotide
  Antisense strand to SEQ ID NO: 2369264
gaucuuaugcacagauguc

SEQ ID NO: 2369266 - RNA, 19 nt, Artificial Sequence
  Description of Artificial Sequence: Synthetic oligonucleotide
  Sense strand starting at position 494 of SEQ ID NO: 1885812
agucauaauugguccagga

SEQ ID NO: 2369267 - RNA, 19 nt, Artificial Sequence
  Description of Artificial Sequence: Synthetic oligonucleotide
  Antisense strand to SEQ ID NO: 2369266
uccuggaccaauuaugacu

SEQ ID NO: 2369268 - RNA, 19 nt, Artificial Sequence
  Description of Artificial Sequence: Synthetic oligonucleotide
  Sense strand starting at position 498 of SEQ ID NO: 1885812
auaauugguccaggauauc

SEQ ID NO: 2369269 - RNA, 19 nt, Artificial Sequence
  Description of Artificial Sequence: Synthetic oligonucleotide
  Antisense strand to SEQ ID NO: 2369268
gauauccuggaccaauuau

SEQ ID NO: 2369270 - RNA, 19 nt, Artificial Sequence
  Description of Artificial Sequence: Synthetic oligonucleotide
  Sense strand starting at position 504 of SEQ ID NO: 1885812
gguccaggauaucuuugau

SEQ ID NO: 2369271 - RNA, 19 nt, Artificial Sequence
  Description of Artificial Sequence: Synthetic oligonucleotide
  Antisense strand to SEQ ID NO: 2369270
aucaaagauauccuggacc

SEQ ID NO: 2369272 - RNA, 19 nt, Artificial Sequence
  Description of Artificial Sequence: Synthetic oligonucleotide
  Sense strand starting at position 678 of SEQ ID NO: 1885812
ugaccuucuuugguccaua

SEQ ID NO: 2369273 - RNA, 19 nt, Artificial Sequence
  Description of Artificial Sequence: Synthetic oligonucleotide
  Antisense strand to SEQ ID NO: 2369272
uauggaccaaagaagguca

SEQ ID NO: 2369274 - RNA, 19 nt, Artificial Sequence
  Description of Artificial Sequence: Synthetic oligonucleotide
  Sense strand starting at position 681 of SEQ ID NO: 1885812
ccuucuuugguccauauau

SEQ ID NO: 2369275 - RNA, 19 nt, Artificial Sequence
  Description of Artificial Sequence: Synthetic oligonucleotide
  Antisense strand to SEQ ID NO: 2369274
auauauggaccaaagaagg

SEQ ID NO: 2369276 - RNA, 19 nt, Artificial Sequence
  Description of Artificial Sequence: Synthetic oligonucleotide
  Sense strand starting at position 683 of SEQ ID NO: 1885812
uucuuugguccauauauug

SEQ ID NO: 2369277 - RNA, 19 nt, Artificial Sequence
  Description of Artificial Sequence: Synthetic oligonucleotide
  Antisense strand to SEQ ID NO: 2369276
caauauauggaccaaagaa

SEQ ID NO: 2369278 - RNA, 19 nt, Artificial Sequence
  Description of Artificial Sequence: Synthetic oligonucleotide
  Sense strand starting at position 824 of SEQ ID NO: 1885812
agacaagagcauugacuau

SEQ ID NO: 2369279 - RNA, 19 nt, Artificial Sequence
  Description of Artificial Sequence: Synthetic oligonucleotide
  Antisense strand to SEQ ID NO: 2369278
auagucaaugcucuugucu

SEQ ID NO: 2369280 - RNA, 19 nt, Artificial Sequence
  Description of Artificial Sequence: Synthetic oligonucleotide
  Sense strand starting at position 928 of SEQ ID NO: 1885812
aucuguucugaggaguaca

SEQ ID NO: 2369281 - RNA, 19 nt, Artificial Sequence
  Description of Artificial Sequence: Synthetic oligonucleotide
  Antisense strand to SEQ ID NO: 2369280
uguacuccucagaacagau

SEQ ID NO: 2369282 - RNA, 19 nt, Artificial Sequence
  Description of Artificial Sequence: Synthetic oligonucleotide
  Sense strand starting at position 1026 of SEQ ID NO: 1885812
ggcaaucauuacuuggagu

SEQ ID NO: 2369283 - RNA, 19 nt, Artificial Sequence
  Description of Artificial Sequence: Synthetic oligonucleotide
  Antisense strand to SEQ ID NO: 2369282
acuccaaguaaugauugcc

SEQ ID NO: 2369284 - RNA, 19 nt, Artificial Sequence
  Description of Artificial Sequence: Synthetic oligonucleotide
  Sense strand starting at position 1359 of SEQ ID NO: 1885812
ugugaaggaccucagaguu

SEQ ID NO: 2369285 - RNA, 19 nt, Artificial Sequence
  Description of Artificial Sequence: Synthetic oligonucleotide
  Antisense strand to SEQ ID NO: 2369284
aacucugagguccuucaca

SEQ ID NO: 2369286 - RNA, 19 nt, Artificial Sequence
  Description of Artificial Sequence: Synthetic oligonucleotide
  Sense strand starting at position 1829 of SEQ ID NO: 1885812
ucgagauuaucacucugag

SEQ ID NO: 2369287 - RNA, 19 nt, Artificial Sequence
  Description of Artificial Sequence: Synthetic oligonucleotide
  Antisense strand to SEQ ID NO: 2369286
cucagagugauaaucucga

SEQ ID NO: 2369288 - RNA, 19 nt, Artificial Sequence
  Description of Artificial Sequence: Synthetic oligonucleotide
  Sense strand starting at position 1895 of SEQ ID NO: 1885812
acugauccuugcuuauuga

SEQ ID NO: 2369289 - RNA, 19 nt, Artificial Sequence
  Description of Artificial Sequence: Synthetic oligonucleotide
  Antisense strand to SEQ ID NO: 2369288
ucaauaagcaaggaucagu

SEQ ID NO: 2369290 - RNA, 19 nt, Artificial Sequence
  Description of Artificial Sequence: Synthetic oligonucleotide
  Sense strand starting at position 1923 of SEQ ID NO: 1885812
uauguuggaccucagaguu

SEQ ID NO: 2369291 - RNA, 19 nt, Artificial Sequence
  Description of Artificial Sequence: Synthetic oligonucleotide
  Antisense strand to SEQ ID NO: 2369290
aacucugagguccaacaua

SEQ ID NO: 2369292 - RNA, 19 nt, Artificial Sequence
  Description of Artificial Sequence: Synthetic oligonucleotide
  Sense strand starting at position 2113 of SEQ ID NO: 1885812
ccaauuuguuagguagcca

SEQ ID NO: 2369293 - RNA, 19 nt, Artificial Sequence
  Description of Artificial Sequence: Synthetic oligonucleotide
  Antisense strand to SEQ ID NO: 2369292
uggcuaccuaacaaauugg

SEQ ID NO: 2369294 - RNA, 19 nt, Artificial Sequence
  Description of Artificial Sequence: Synthetic oligonucleotide
  Sense strand starting at position 2121 of SEQ ID NO: 1885812
uuagguagccaucauuauu

SEQ ID NO: 2369295 - RNA, 19 nt, Artificial Sequence
  Description of Artificial Sequence: Synthetic oligonucleotide
  Antisense strand to SEQ ID NO: 2369294
aauaaugauggcuaccuaa

SEQ ID NO: 2369296 - RNA, 19 nt, Artificial Sequence
  Description of Artificial Sequence: Synthetic oligonucleotide
  Sense strand starting at position 2219 of SEQ ID NO: 1885812
cccaaauuacgauguuuac

SEQ ID NO: 2369297 - RNA, 19 nt, Artificial Sequence
  Description of Artificial Sequence: Synthetic oligonucleotide
  Antisense strand to SEQ ID NO: 2369296
guaaacaucguaauuuggg

SEQ ID NO: 2369298 - RNA, 19 nt, Artificial Sequence
  Description of Artificial Sequence: Synthetic oligonucleotide
  Sense strand starting at position 2402 of SEQ ID NO: 1885812
auggguccagugugagaaa

SEQ ID NO: 2369299 - RNA, 19 nt, Artificial Sequence
  Description of Artificial Sequence: Synthetic oligonucleotide
  Antisense strand to SEQ ID NO: 2369298
uuucucacacuggacccau

SEQ ID NO: 2369300 - RNA, 19 nt, Artificial Sequence
  Description of Artificial Sequence: Synthetic oligonucleotide
  Sense strand starting at position 2468 of SEQ ID NO: 1885812
agacguucucuccauuaau

SEQ ID NO: 2369301 - RNA, 19 nt, Artificial Sequence
  Description of Artificial Sequence: Synthetic oligonucleotide
  Antisense strand to SEQ ID NO: 2369300
auuaauggagagaacgucu

SEQ ID NO: 2369302 - RNA, 19 nt, Artificial Sequence
  Description of Artificial Sequence: Synthetic oligonucleotide
  Sense strand starting at position 2574 of SEQ ID NO: 1885812
gccaucuauccagaacaug

SEQ ID NO: 2369303 - RNA, 19 nt, Artificial Sequence
  Description of Artificial Sequence: Synthetic oligonucleotide
  Antisense strand to SEQ ID NO: 2369302
cauguucuggauagauggc

SEQ ID NO: 2369304 - RNA, 19 nt, Artificial Sequence
  Description of Artificial Sequence: Synthetic oligonucleotide
  Sense strand starting at position 2597 of SEQ ID NO: 1885812
gugucuguaaguuauacca

SEQ ID NO: 2369305 - RNA, 19 nt, Artificial Sequence
  Description of Artificial Sequence: Synthetic oligonucleotide
  Antisense strand to SEQ ID NO: 2369304
ugguauaacuuacagacac

SEQ ID NO: 2369306 - RNA, 19 nt, Artificial Sequence
  Description of Artificial Sequence: Synthetic oligonucleotide
  Sense strand starting at position 2664 of SEQ ID NO: 1885812
caaauuagaguuuaguguu

SEQ ID NO: 2369307 - RNA, 19 nt, Artificial Sequence
  Description of Artificial Sequence: Synthetic oligonucleotide
  Antisense strand to SEQ ID NO: 2369306
aacacuaaacucuaauuug

SEQ ID NO: 2369308 - RNA, 19 nt, Artificial Sequence
  Description of Artificial Sequence: Synthetic oligonucleotide
  Sense strand starting at position 2701 of SEQ ID NO: 1885812
uguuucuuugcucacuaca

SEQ ID NO: 2369309 - RNA, 19 nt, Artificial Sequence
  Description of Artificial Sequence: Synthetic oligonucleotide
  Antisense strand to SEQ ID NO: 2369308
uguagugagcaaagaaaca

SEQ ID NO: 2369310 - RNA, 19 nt, Artificial Sequence
  Description of Artificial Sequence: Synthetic oligonucleotide
  Sense strand starting at position 2825 of SEQ ID NO: 1885812
agcccaagauccucggaua

SEQ ID NO: 2369311 - RNA, 19 nt, Artificial Sequence
  Description of Artificial Sequence: Synthetic oligonucleotide
  Antisense strand to SEQ ID NO: 2369310
uauccgaggaucuugggcu

SEQ ID NO: 2369312 - RNA, 19 nt, Artificial Sequence
  Description of Artificial Sequence: Synthetic oligonucleotide
  Sense strand starting at position 2826 of SEQ ID NO: 1885812
gcccaagauccucggauau

SEQ ID NO: 2369313 - RNA, 19 nt, Artificial Sequence
  Description of Artificial Sequence: Synthetic oligonucleotide
  Antisense strand to SEQ ID NO: 2369312
auauccgaggaucuugggc

SEQ ID NO: 2369314 - RNA, 19 nt, Artificial Sequence
  Description of Artificial Sequence: Synthetic oligonucleotide
  Sense strand starting at position 2857 of SEQ ID NO: 1885812
ccuagaggaugccuuauau

SEQ ID NO: 2369315 - RNA, 19 nt, Artificial Sequence
  Description of Artificial Sequence: Synthetic oligonucleotide
  Antisense strand to SEQ ID NO: 2369314
auauaaggcauccucuagg

SEQ ID NO: 2369316 - RNA, 19 nt, Artificial Sequence
  Description of Artificial Sequence: Synthetic oligonucleotide
  Sense strand starting at position 3072 of SEQ ID NO: 1885812
ccaagcaucugucuacaga

SEQ ID NO: 2369317 - RNA, 19 nt, Artificial Sequence
  Description of Artificial Sequence: Synthetic oligonucleotide
  Antisense strand to SEQ ID NO: 2369316
ucuguagacagaugcuugg

SEQ ID NO: 2369318 - RNA, 19 nt, Artificial Sequence
  Description of Artificial Sequence: Synthetic oligonucleotide
  Sense strand starting at position 3137 of SEQ ID NO: 1885812
uguggcacauuauugauua

SEQ ID NO: 2369319 - RNA, 19 nt, Artificial Sequence
  Description of Artificial Sequence: Synthetic oligonucleotide
  Antisense strand to SEQ ID NO: 2369318
uaaucaauaaugugccaca

SEQ ID NO: 2369320 - RNA, 19 nt, Artificial Sequence
  Description of Artificial Sequence: Synthetic oligonucleotide
  Sense strand starting at position 3183 of SEQ ID NO: 1885812
accauugggccaugguuaa

SEQ ID NO: 2369321 - RNA, 19 nt, Artificial Sequence
  Description of Artificial Sequence: Synthetic oligonucleotide
  Antisense strand to SEQ ID NO: 2369320
uuaaccauggcccaauggu

SEQ ID NO: 2369322 - RNA, 19 nt, Artificial Sequence
  Description of Artificial Sequence: Synthetic oligonucleotide
  Sense strand starting at position 3462 of SEQ ID NO: 1885812
uuaauaauuuaugggacca

SEQ ID NO: 2369323 - RNA, 19 nt, Artificial Sequence
  Description of Artificial Sequence: Synthetic oligonucleotide
  Antisense strand to SEQ ID NO: 2369322
uggucccauaaauuauuaa

SEQ ID NO: 2369324 - RNA, 19 nt, Artificial Sequence
  Description of Artificial Sequence: Synthetic oligonucleotide
  Sense strand starting at position 40 of SEQ ID NO: 1885813
cucaauguugcacaugaga

SEQ ID NO: 2369325 - RNA, 19 nt, Artificial Sequence
  Description of Artificial Sequence: Synthetic oligonucleotide
  Antisense strand to SEQ ID NO: 2369324
ucucaugugcaacauugag

SEQ ID NO: 2369326 - RNA, 19 nt, Artificial Sequence
  Description of Artificial Sequence: Synthetic oligonucleotide
  Sense strand starting at position 90 of SEQ ID NO: 1885813
auuauugagcagugguuaa

SEQ ID NO: 2369327 - RNA, 19 nt, Artificial Sequence
  Description of Artificial Sequence: Synthetic oligonucleotide
  Antisense strand to SEQ ID NO: 2369326
uuaaccacugcucaauaau

SEQ ID NO: 2369328 - RNA, 19 nt, Artificial Sequence
  Description of Artificial Sequence: Synthetic oligonucleotide
  Sense strand starting at position 102 of SEQ ID NO: 1885813
ugguuaacuguguauuaau

SEQ ID NO: 2369329 - RNA, 19 nt, Artificial Sequence
  Description of Artificial Sequence: Synthetic oligonucleotide
  Antisense strand to SEQ ID NO: 2369328
auuaauacacaguuaacca

SEQ ID NO: 2369330 - RNA, 19 nt, Artificial Sequence
  Description of Artificial Sequence: Synthetic oligonucleotide
  Sense strand starting at position 573 of SEQ ID NO: 1885813
uugagauguucucuccauu

SEQ ID NO: 2369331 - RNA, 19 nt, Artificial Sequence
  Description of Artificial Sequence: Synthetic oligonucleotide
  Antisense strand to SEQ ID NO: 2369330
aauggagagaacaucucaa

SEQ ID NO: 2369332 - RNA, 19 nt, Artificial Sequence
  Description of Artificial Sequence: Synthetic oligonucleotide
  Sense strand starting at position 576 of SEQ ID NO: 1885813
agauguucucuccauugau

SEQ ID NO: 2369333 - RNA, 19 nt, Artificial Sequence
  Description of Artificial Sequence: Synthetic oligonucleotide
  Antisense strand to SEQ ID NO: 2369332
aucaauggagagaacaucu

SEQ ID NO: 2369334 - RNA, 19 nt, Artificial Sequence
  Description of Artificial Sequence: Synthetic oligonucleotide
  Sense strand starting at position 579 of SEQ ID NO: 1885813
uguucucuccauugaucca

SEQ ID NO: 2369335 - RNA, 19 nt, Artificial Sequence
  Description of Artificial Sequence: Synthetic oligonucleotide
  Antisense strand to SEQ ID NO: 2369334
uggaucaauggagagaaca

SEQ ID NO: 2369336 - RNA, 19 nt, Artificial Sequence
  Description of Artificial Sequence: Synthetic oligonucleotide
  Sense strand starting at position 716 of SEQ ID NO: 1885813
ccuauuacagucuauguca

SEQ ID NO: 2369337 - RNA, 19 nt, Artificial Sequence
  Description of Artificial Sequence: Synthetic oligonucleotide
  Antisense strand to SEQ ID NO: 2369336
ugacauagacuguaauagg

SEQ ID NO: 2369338 - RNA, 19 nt, Artificial Sequence
  Description of Artificial Sequence: Synthetic oligonucleotide
  Sense strand starting at position 727 of SEQ ID NO: 1885813
cuaugucauccuuagucca

SEQ ID NO: 2369339 - RNA, 19 nt, Artificial Sequence
  Description of Artificial Sequence: Synthetic oligonucleotide
  Antisense strand to SEQ ID NO: 2369338
uggacuaaggaugacauag

SEQ ID NO: 2369340 - RNA, 19 nt, Artificial Sequence
  Description of Artificial Sequence: Synthetic oligonucleotide
  Sense strand starting at position 730 of SEQ ID NO: 1885813
ugucauccuuaguccaaga

SEQ ID NO: 2369341 - RNA, 19 nt, Artificial Sequence
  Description of Artificial Sequence: Synthetic oligonucleotide
  Antisense strand to SEQ ID NO: 2369340
ucuuggacuaaggaugaca

SEQ ID NO: 2369342 - RNA, 19 nt, Artificial Sequence
  Description of Artificial Sequence: Synthetic oligonucleotide
  Sense strand starting at position 879 of SEQ ID NO: 1885813
ccuugauucguuuacaaua

SEQ ID NO: 2369343 - RNA, 19 nt, Artificial Sequence
  Description of Artificial Sequence: Synthetic oligonucleotide
  Antisense strand to SEQ ID NO: 2369342
uauuguaaacgaaucaagg

SEQ ID NO: 2369344 - RNA, 19 nt, Artificial Sequence
  Description of Artificial Sequence: Synthetic oligonucleotide
  Sense strand starting at position 937 of SEQ ID NO: 1885813
guccucauauauucugaca

SEQ ID NO: 2369345 - RNA, 19 nt, Artificial Sequence
  Description of Artificial Sequence: Synthetic oligonucleotide
  Antisense strand to SEQ ID NO: 2369344
ugucagaauauaugaggac

SEQ ID NO: 2369346 - RNA, 19 nt, Artificial Sequence
  Description of Artificial Sequence: Synthetic oligonucleotide
  Sense strand starting at position 948 of SEQ ID NO: 1885813
uucugacaucugugcauaa

SEQ ID NO: 2369347 - RNA, 19 nt, Artificial Sequence
  Description of Artificial Sequence: Synthetic oligonucleotide
  Antisense strand to SEQ ID NO: 2369346
uuaugcacagaugucagaa

SEQ ID NO: 2369348 - RNA, 19 nt, Artificial Sequence
  Description of Artificial Sequence: Synthetic oligonucleotide
  Sense strand starting at position 950 of SEQ ID NO: 1885813
cugacaucugugcauaaga

SEQ ID NO: 2369349 - RNA, 19 nt, Artificial Sequence
  Description of Artificial Sequence: Synthetic oligonucleotide
  Antisense strand to SEQ ID NO: 2369348
ucuuaugcacagaugucag

SEQ ID NO: 2369350 - RNA, 19 nt, Artificial Sequence
  Description of Artificial Sequence: Synthetic oligonucleotide
  Sense strand starting at position 952 of SEQ ID NO: 1885813
gacaucugugcauaagauc

SEQ ID NO: 2369351 - RNA, 19 nt, Artificial Sequence
  Description of Artificial Sequence: Synthetic oligonucleotide
  Antisense strand to SEQ ID NO: 2369350
gaucuuaugcacagauguc

SEQ ID NO: 2369352 - RNA, 19 nt, Artificial Sequence
  Description of Artificial Sequence: Synthetic oligonucleotide
  Sense strand starting at position 1061 of SEQ ID NO: 1885813
agucauaauugguccagga

SEQ ID NO: 2369353 - RNA, 19 nt, Artificial Sequence
  Description of Artificial Sequence: Synthetic oligonucleotide
  Antisense strand to SEQ ID NO: 2369352
uccuggaccaauuaugacu

SEQ ID NO: 2369354 - RNA, 19 nt, Artificial Sequence
  Description of Artificial Sequence: Synthetic oligonucleotide
  Sense strand starting at position 1065 of SEQ ID NO: 1885813
auaauugguccaggauauc

SEQ ID NO: 2369355 - RNA, 19 nt, Artificial Sequence
  Description of Artificial Sequence: Synthetic oligonucleotide
  Antisense strand to SEQ ID NO: 2369354
gauauccuggaccaauuau

SEQ ID NO: 2369356 - RNA, 19 nt, Artificial Sequence
  Description of Artificial Sequence: Synthetic oligonucleotide
  Sense strand starting at position 1071 of SEQ ID NO: 1885813
gguccaggauaucuuugau

SEQ ID NO: 2369357 - RNA, 19 nt, Artificial Sequence
  Description of Artificial Sequence: Synthetic oligonucleotide
  Antisense strand to SEQ ID NO: 2369356
aucaaagauauccuggacc

SEQ ID NO: 2369358 - RNA, 19 nt, Artificial Sequence
  Description of Artificial Sequence: Synthetic oligonucleotide
  Sense strand starting at position 1245 of SEQ ID NO: 1885813
ugaccuucuuugguccaua

SEQ ID NO: 2369359 - RNA, 19 nt, Artificial Sequence
  Description of Artificial Sequence: Synthetic oligonucleotide
  Antisense strand to SEQ ID NO: 2369358
uauggaccaaagaagguca

SEQ ID NO: 2369360 - RNA, 19 nt, Artificial Sequence
  Description of Artificial Sequence: Synthetic oligonucleotide
  Sense strand starting at position 1248 of SEQ ID NO: 1885813
ccuucuuugguccauauau

SEQ ID NO: 2369361 - RNA, 19 nt, Artificial Sequence
  Description of Artificial Sequence: Synthetic oligonucleotide
  Antisense strand to SEQ ID NO: 2369360
auauauggaccaaagaagg

SEQ ID NO: 2369362 - RNA, 19 nt, Artificial Sequence
  Description of Artificial Sequence: Synthetic oligonucleotide
  Sense strand starting at position 1250 of SEQ ID NO: 1885813
uucuuugguccauauauug

SEQ ID NO: 2369363 - RNA, 19 nt, Artificial Sequence
  Description of Artificial Sequence: Synthetic oligonucleotide
  Antisense strand to SEQ ID NO: 2369362
caauauauggaccaaagaa

SEQ ID NO: 2369364 - RNA, 19 nt, Artificial Sequence
  Description of Artificial Sequence: Synthetic oligonucleotide
  Sense strand starting at position 1391 of SEQ ID NO: 1885813
agacaagagcauugacuau

SEQ ID NO: 2369365 - RNA, 19 nt, Artificial Sequence
  Description of Artificial Sequence: Synthetic oligonucleotide
  Antisense strand to SEQ ID NO: 2369364
auagucaaugcucuugucu

SEQ ID NO: 2369366 - RNA, 19 nt, Artificial Sequence
  Description of Artificial Sequence: Synthetic oligonucleotide
  Sense strand starting at position 1495 of SEQ ID NO: 1885813
aucuguucugaggaguaca

SEQ ID NO: 2369367 - RNA, 19 nt, Artificial Sequence
  Description of Artificial Sequence: Synthetic oligonucleotide
  Antisense strand to SEQ ID NO: 2369366
uguacuccucagaacagau

SEQ ID NO: 2369368 - RNA, 19 nt, Artificial Sequence
  Description of Artificial Sequence: Synthetic oligonucleotide
  Sense strand starting at position 1593 of SEQ ID NO: 1885813
ggcaaucauuacuuggagu

SEQ ID NO: 2369369 - RNA, 19 nt, Artificial Sequence
  Description of Artificial Sequence: Synthetic oligonucleotide
  Antisense strand to SEQ ID NO: 2369368
acuccaaguaaugauugcc

SEQ ID NO: 2369370 - RNA, 19 nt, Artificial Sequence
  Description of Artificial Sequence: Synthetic oligonucleotide
  Sense strand starting at position 1926 of SEQ ID NO: 1885813
ugugaaggaccucagaguu

SEQ ID NO: 2369371 - RNA, 19 nt, Artificial Sequence
  Description of Artificial Sequence: Synthetic oligonucleotide
  Antisense strand to SEQ ID NO: 2369370
aacucugagguccuucaca

SEQ ID NO: 2369372 - RNA, 19 nt, Artificial Sequence
  Description of Artificial Sequence: Synthetic oligonucleotide
  Sense strand starting at position 2396 of SEQ ID NO: 1885813
ucgagauuaucacucugag

SEQ ID NO: 2369373 - RNA, 19 nt, Artificial Sequence
  Description of Artificial Sequence: Synthetic oligonucleotide
  Antisense strand to SEQ ID NO: 2369372
cucagagugauaaucucga

SEQ ID NO: 2369374 - RNA, 19 nt, Artificial Sequence
  Description of Artificial Sequence: Synthetic oligonucleotide
  Sense strand starting at position 2462 of SEQ ID NO: 1885813
acugauccuugcuuauuga

SEQ ID NO: 2369375 - RNA, 19 nt, Artificial Sequence
  Description of Artificial Sequence: Synthetic oligonucleotide
  Antisense strand to SEQ ID NO: 2369374
ucaauaagcaaggaucagu

SEQ ID NO: 2369376 - RNA, 19 nt, Artificial Sequence
  Description of Artificial Sequence: Synthetic oligonucleotide
  Sense strand starting at position 2490 of SEQ ID NO: 1885813
uauguuggaccucagaguu

SEQ ID NO: 2369377 - RNA, 19 nt, Artificial Sequence
  Description of Artificial Sequence: Synthetic oligonucleotide
  Antisense strand to SEQ ID NO: 2369376
aacucugagguccaacaua

SEQ ID NO: 2369378 - RNA, 19 nt, Artificial Sequence
  Description of Artificial Sequence: Synthetic oligonucleotide
  Sense strand starting at position 2688 of SEQ ID NO: 1885813
uuagguagccaucauuauu

SEQ ID NO: 2369379 - RNA, 19 nt, Artificial Sequence
  Description of Artificial Sequence: Synthetic oligonucleotide
  Antisense strand to SEQ ID NO: 2369378
aauaaugauggcuaccuaa

SEQ ID NO: 2369380 - RNA, 19 nt, Artificial Sequence
  Description of Artificial Sequence: Synthetic oligonucleotide
  Sense strand starting at position 2786 of SEQ ID NO: 1885813
cccaaauuacgauguuuac

SEQ ID NO: 2369381 - RNA, 19 nt, Artificial Sequence
  Description of Artificial Sequence: Synthetic oligonucleotide
  Antisense strand to SEQ ID NO: 2369380
guaaacaucguaauuuggg

SEQ ID NO: 2369382 - RNA, 19 nt, Artificial Sequence
  Description of Artificial Sequence: Synthetic oligonucleotide
  Sense strand starting at position 2969 of SEQ ID NO: 1885813
auggguccagugugagaaa

SEQ ID NO: 2369383 - RNA, 19 nt, Artificial Sequence
  Description of Artificial Sequence: Synthetic oligonucleotide
  Antisense strand to SEQ ID NO: 2369382
uuucucacacuggacccau

SEQ ID NO: 2369384 - RNA, 19 nt, Artificial Sequence
  Description of Artificial Sequence: Synthetic oligonucleotide
  Sense strand starting at position 3035 of SEQ ID NO: 1885813
agacguucucuccauuaau

SEQ ID NO: 2369385 - RNA, 19 nt, Artificial Sequence
  Description of Artificial Sequence: Synthetic oligonucleotide
  Antisense strand to SEQ ID NO: 2369384
auuaauggagagaacgucu

SEQ ID NO: 2369386 - RNA, 19 nt, Artificial Sequence
  Description of Artificial Sequence: Synthetic oligonucleotide
  Sense strand starting at position 3141 of SEQ ID NO: 1885813
gccaucuauccagaacaug

SEQ ID NO: 2369387 - RNA, 19 nt, Artificial Sequence
  Description of Artificial Sequence: Synthetic oligonucleotide
  Antisense strand to SEQ ID NO: 2369386
cauguucuggauagauggc

SEQ ID NO: 2369388 - RNA, 19 nt, Artificial Sequence
  Description of Artificial Sequence: Synthetic oligonucleotide
  Sense strand starting at position 3164 of SEQ ID NO: 1885813
gugucuguaaguuauacca

SEQ ID NO: 2369389 - RNA, 19 nt, Artificial Sequence
  Description of Artificial Sequence: Synthetic oligonucleotide
  Antisense strand to SEQ ID NO: 2369388
ugguauaacuuacagacac

SEQ ID NO: 2369390 - RNA, 19 nt, Artificial Sequence
  Description of Artificial Sequence: Synthetic oligonucleotide
  Sense strand starting at position 3231 of SEQ ID NO: 1885813
caaauuagaguuuaguguu

SEQ ID NO: 2369391 - RNA, 19 nt, Artificial Sequence
  Description of Artificial Sequence: Synthetic oligonucleotide
  Antisense strand to SEQ ID NO: 2369390
aacacuaaacucuaauuug

SEQ ID NO: 2369392 - RNA, 19 nt, Artificial Sequence
  Description of Artificial Sequence: Synthetic oligonucleotide
  Sense strand starting at position 3392 of SEQ ID NO: 1885813
agcccaagauccucggaua

SEQ ID NO: 2369393 - RNA, 19 nt, Artificial Sequence
  Description of Artificial Sequence: Synthetic oligonucleotide
  Antisense strand to SEQ ID NO: 2369392
uauccgaggaucuugggcu

SEQ ID NO: 2369394 - RNA, 19 nt, Artificial Sequence
  Description of Artificial Sequence: Synthetic oligonucleotide
  Sense strand starting at position 3393 of SEQ ID NO: 1885813
gcccaagauccucggauau

SEQ ID NO: 2369395 - RNA, 19 nt, Artificial Sequence
  Description of Artificial Sequence: Synthetic oligonucleotide
  Antisense strand to SEQ ID NO: 2369394
auauccgaggaucuugggc

SEQ ID NO: 2369396 - RNA, 19 nt, Artificial Sequence
  Description of Artificial Sequence: Synthetic oligonucleotide
  Sense strand starting at position 3424 of SEQ ID NO: 1885813
ccuagaggaugccuuauau

SEQ ID NO: 2369397 - RNA, 19 nt, Artificial Sequence
  Description of Artificial Sequence: Synthetic oligonucleotide
  Antisense strand to SEQ ID NO: 2369396
auauaaggcauccucuagg

SEQ ID NO: 2369398 - RNA, 19 nt, Artificial Sequence
  Description of Artificial Sequence: Synthetic oligonucleotide
  Sense strand starting at position 3639 of SEQ ID NO: 1885813
ccaagcaucugucuacaga

SEQ ID NO: 2369399 - RNA, 19 nt, Artificial Sequence
  Description of Artificial Sequence: Synthetic oligonucleotide
  Antisense strand to SEQ ID NO: 2369398
ucuguagacagaugcuugg

SEQ ID NO: 2369400 - RNA, 19 nt, Artificial Sequence
  Description of Artificial Sequence: Synthetic oligonucleotide
  Sense strand starting at position 3704 of SEQ ID NO: 1885813
uguggcacauuauugauua

SEQ ID NO: 2369401 - RNA, 19 nt, Artificial Sequence
  Description of Artificial Sequence: Synthetic oligonucleotide
  Antisense strand to SEQ ID NO: 2369400
uaaucaauaaugugccaca

SEQ ID NO: 2369402 - RNA, 19 nt, Artificial Sequence
  Description of Artificial Sequence: Synthetic oligonucleotide
  Sense strand starting at position 3750 of SEQ ID NO: 1885813
accauugggccaugguuaa

SEQ ID NO: 2369403 - RNA, 19 nt, Artificial Sequence
  Description of Artificial Sequence: Synthetic oligonucleotide
  Antisense strand to SEQ ID NO: 2369402
uuaaccauggcccaauggu

SEQ ID NO: 2369404 - RNA, 19 nt, Artificial Sequence
  Description of Artificial Sequence: Synthetic oligonucleotide
  Sense strand starting at position 272 of SEQ ID NO: 1885814
cuaggucauuuagguauuu

SEQ ID NO: 2369405 - RNA, 19 nt, Artificial Sequence
  Description of Artificial Sequence: Synthetic oligonucleotide
  Antisense strand to SEQ ID NO: 2369404
aaauaccuaaaugaccuag

SEQ ID NO: 2369406 - RNA, 19 nt, Artificial Sequence
  Description of Artificial Sequence: Synthetic oligonucleotide
  Sense strand starting at position 461 of SEQ ID NO: 1885814
uuuguaaaugaaugucagu

SEQ ID NO: 2369407 - RNA, 19 nt, Artificial Sequence
  Description of Artificial Sequence: Synthetic oligonucleotide
  Antisense strand to SEQ ID NO: 2369406
acugacauucauuuacaaa

SEQ ID NO: 2369408 - RNA, 19 nt, Artificial Sequence
  Description of Artificial Sequence: Synthetic oligonucleotide
  Sense strand starting at position 466 of SEQ ID NO: 1885814
aaaugaaugucagugcuuu

SEQ ID NO: 2369409 - RNA, 19 nt, Artificial Sequence
  Description of Artificial Sequence: Synthetic oligonucleotide
  Antisense strand to SEQ ID NO: 2369408
aaagcacugacauucauuu

SEQ ID NO: 2369410 - RNA, 19 nt, Artificial Sequence
  Description of Artificial Sequence: Synthetic oligonucleotide
  Sense strand starting at position 467 of SEQ ID NO: 1885814
aaugaaugucagugcuuua

SEQ ID NO: 2369411 - RNA, 19 nt, Artificial Sequence
  Description of Artificial Sequence: Synthetic oligonucleotide
  Antisense strand to SEQ ID NO: 2369410
uaaagcacugacauucauu

SEQ ID NO: 2369412 - RNA, 19 nt, Artificial Sequence
  Description of Artificial Sequence: Synthetic oligonucleotide
  Sense strand starting at position 470 of SEQ ID NO: 1885814
gaaugucagugcuuuaaau

SEQ ID NO: 2369413 - RNA, 19 nt, Artificial Sequence
  Description of Artificial Sequence: Synthetic oligonucleotide
  Antisense strand to SEQ ID NO: 2369412
auuuaaagcacugacauuc

SEQ ID NO: 2369414 - RNA, 19 nt, Artificial Sequence
  Description of Artificial Sequence: Synthetic oligonucleotide
  Sense strand starting at position 583 of SEQ ID NO: 1885814
uggaucuaucauugaucca

SEQ ID NO: 2369415 - RNA, 19 nt, Artificial Sequence
  Description of Artificial Sequence: Synthetic oligonucleotide
  Antisense strand to SEQ ID NO: 2369414
uggaucaaugauagaucca

SEQ ID NO: 2369416 - RNA, 19 nt, Artificial Sequence
  Description of Artificial Sequence: Synthetic oligonucleotide
  Sense strand starting at position 777 of SEQ ID NO: 1885814
ucaucauugguccaugauu

SEQ ID NO: 2369417 - RNA, 19 nt, Artificial Sequence
  Description of Artificial Sequence: Synthetic oligonucleotide
  Antisense strand to SEQ ID NO: 2369416
aaucauggaccaaugauga

SEQ ID NO: 2369418 - RNA, 19 nt, Artificial Sequence
  Description of Artificial Sequence: Synthetic oligonucleotide
  Sense strand starting at position 889 of SEQ ID NO: 1885814
ccaacaaggucuuugaaua

SEQ ID NO: 2369419 - RNA, 19 nt, Artificial Sequence
  Description of Artificial Sequence: Synthetic oligonucleotide
  Antisense strand to SEQ ID NO: 2369418
uauucaaagaccuuguugg

SEQ ID NO: 2369420 - RNA, 19 nt, Artificial Sequence
  Description of Artificial Sequence: Synthetic oligonucleotide
  Sense strand starting at position 965 of SEQ ID NO: 1885814
cucaauguugcacaugaga

SEQ ID NO: 2369421 - RNA, 19 nt, Artificial Sequence
  Description of Artificial Sequence: Synthetic oligonucleotide
  Antisense strand to SEQ ID NO: 2369420
ucucaugugcaacauugag

SEQ ID NO: 2369422 - RNA, 19 nt, Artificial Sequence
  Description of Artificial Sequence: Synthetic oligonucleotide
  Sense strand starting at position 1015 of SEQ ID NO: 1885814
auuauugagcagugguuaa

SEQ ID NO: 2369423 - RNA, 19 nt, Artificial Sequence
  Description of Artificial Sequence: Synthetic oligonucleotide
  Antisense strand to SEQ ID NO: 2369422
uuaaccacugcucaauaau

SEQ ID NO: 2369424 - RNA, 19 nt, Artificial Sequence
  Description of Artificial Sequence: Synthetic oligonucleotide
  Sense strand starting at position 1027 of SEQ ID NO: 1885814
ugguuaacuguguauuaau

SEQ ID NO: 2369425 - RNA, 19 nt, Artificial Sequence
  Description of Artificial Sequence: Synthetic oligonucleotide
  Antisense strand to SEQ ID NO: 2369424
auuaauacacaguuaacca

SEQ ID NO: 2369426 - RNA, 19 nt, Artificial Sequence
  Description of Artificial Sequence: Synthetic oligonucleotide
  Sense strand starting at position 1498 of SEQ ID NO: 1885814
uugagauguucucuccauu

SEQ ID NO: 2369427 - RNA, 19 nt, Artificial Sequence
  Description of Artificial Sequence: Synthetic oligonucleotide
  Antisense strand to SEQ ID NO: 2369426
aauggagagaacaucucaa

SEQ ID NO: 2369428 - RNA, 19 nt, Artificial Sequence
  Description of Artificial Sequence: Synthetic oligonucleotide
  Sense strand starting at position 1501 of SEQ ID NO: 1885814
agauguucucuccauugau

SEQ ID NO: 2369429 - RNA, 19 nt, Artificial Sequence
  Description of Artificial Sequence: Synthetic oligonucleotide
  Antisense strand to SEQ ID NO: 2369428
aucaauggagagaacaucu

SEQ ID NO: 2369430 - RNA, 19 nt, Artificial Sequence
  Description of Artificial Sequence: Synthetic oligonucleotide
  Sense strand starting at position 1504 of SEQ ID NO: 1885814
uguucucuccauugaucca

SEQ ID NO: 2369431 - RNA, 19 nt, Artificial Sequence
  Description of Artificial Sequence: Synthetic oligonucleotide
  Antisense strand to SEQ ID NO: 2369430
uggaucaauggagagaaca

SEQ ID NO: 2369432 - RNA, 19 nt, Artificial Sequence
  Description of Artificial Sequence: Synthetic oligonucleotide
  Sense strand starting at position 1652 of SEQ ID NO: 1885814
cuaugucauccuuagucca

SEQ ID NO: 2369433 - RNA, 19 nt, Artificial Sequence
  Description of Artificial Sequence: Synthetic oligonucleotide
  Antisense strand to SEQ ID NO: 2369432
uggacuaaggaugacauag

SEQ ID NO: 2369434 - RNA, 19 nt, Artificial Sequence
  Description of Artificial Sequence: Synthetic oligonucleotide
  Sense strand starting at position 1655 of SEQ ID NO: 1885814
ugucauccuuaguccaaga

SEQ ID NO: 2369435 - RNA, 19 nt, Artificial Sequence
  Description of Artificial Sequence: Synthetic oligonucleotide
  Antisense strand to SEQ ID NO: 2369434
ucuuggacuaaggaugaca

SEQ ID NO: 2369436 - RNA, 19 nt, Artificial Sequence
  Description of Artificial Sequence: Synthetic oligonucleotide
  Sense strand starting at position 1804 of SEQ ID NO: 1885814
ccuugauucguuuacaaua

SEQ ID NO: 2369437 - RNA, 19 nt, Artificial Sequence
  Description of Artificial Sequence: Synthetic oligonucleotide
  Antisense strand to SEQ ID NO: 2369436
uauuguaaacgaaucaagg

SEQ ID NO: 2369438 - RNA, 19 nt, Artificial Sequence
  Description of Artificial Sequence: Synthetic oligonucleotide
  Sense strand starting at position 1862 of SEQ ID NO: 1885814
guccucauauauucugaca

SEQ ID NO: 2369439 - RNA, 19 nt, Artificial Sequence
  Description of Artificial Sequence: Synthetic oligonucleotide
  Antisense strand to SEQ ID NO: 2369438
ugucagaauauaugaggac

SEQ ID NO: 2369440 - RNA, 19 nt, Artificial Sequence
  Description of Artificial Sequence: Synthetic oligonucleotide
  Sense strand starting at position 1873 of SEQ ID NO: 1885814
uucugacaucugugcauaa

SEQ ID NO: 2369441 - RNA, 19 nt, Artificial Sequence
  Description of Artificial Sequence: Synthetic oligonucleotide
  Antisense strand to SEQ ID NO: 2369440
uuaugcacagaugucagaa

SEQ ID NO: 2369442 - RNA, 19 nt, Artificial Sequence
  Description of Artificial Sequence: Synthetic oligonucleotide
  Sense strand starting at position 1875 of SEQ ID NO: 1885814
cugacaucugugcauaaga

SEQ ID NO: 2369443 - RNA, 19 nt, Artificial Sequence
  Description of Artificial Sequence: Synthetic oligonucleotide
  Antisense strand to SEQ ID NO: 2369442
ucuuaugcacagaugucag

SEQ ID NO: 2369444 - RNA, 19 nt, Artificial Sequence
  Description of Artificial Sequence: Synthetic oligonucleotide
  Sense strand starting at position 1877 of SEQ ID NO: 1885814
gacaucugugcauaagauc

SEQ ID NO: 2369445 - RNA, 19 nt, Artificial Sequence
  Description of Artificial Sequence: Synthetic oligonucleotide
  Antisense strand to SEQ ID NO: 2369444
gaucuuaugcacagauguc

SEQ ID NO: 2369446 - RNA, 19 nt, Artificial Sequence
  Description of Artificial Sequence: Synthetic oligonucleotide
  Sense strand starting at position 1986 of SEQ ID NO: 1885814
agucauaauugguccagga

SEQ ID NO: 2369447 - RNA, 19 nt, Artificial Sequence
  Description of Artificial Sequence: Synthetic oligonucleotide
  Antisense strand to SEQ ID NO: 2369446
uccuggaccaauuaugacu

SEQ ID NO: 2369448 - RNA, 19 nt, Artificial Sequence
  Description of Artificial Sequence: Synthetic oligonucleotide
  Sense strand starting at position 1990 of SEQ ID NO: 1885814
auaauugguccaggauauc

SEQ ID NO: 2369449 - RNA, 19 nt, Artificial Sequence
  Description of Artificial Sequence: Synthetic oligonucleotide
  Antisense strand to SEQ ID NO: 2369448
gauauccuggaccaauuau

SEQ ID NO: 2369450 - RNA, 19 nt, Artificial Sequence
  Description of Artificial Sequence: Synthetic oligonucleotide
  Sense strand starting at position 1996 of SEQ ID NO: 1885814
gguccaggauaucuuugau

SEQ ID NO: 2369451 - RNA, 19 nt, Artificial Sequence
  Description of Artificial Sequence: Synthetic oligonucleotide
  Antisense strand to SEQ ID NO: 2369450
aucaaagauauccuggacc

SEQ ID NO: 2369452 - RNA, 19 nt, Artificial Sequence
  Description of Artificial Sequence: Synthetic oligonucleotide
  Sense strand starting at position 2170 of SEQ ID NO: 1885814
ugaccuucuuugguccaua

SEQ ID NO: 2369453 - RNA, 19 nt, Artificial Sequence
  Description of Artificial Sequence: Synthetic oligonucleotide
  Antisense strand to SEQ ID NO: 2369452
uauggaccaaagaagguca

SEQ ID NO: 2369454 - RNA, 19 nt, Artificial Sequence
  Description of Artificial Sequence: Synthetic oligonucleotide
  Sense strand starting at position 2173 of SEQ ID NO: 1885814
ccuucuuugguccauauau

SEQ ID NO: 2369455 - RNA, 19 nt, Artificial Sequence
  Description of Artificial Sequence: Synthetic oligonucleotide
  Antisense strand to SEQ ID NO: 2369454
auauauggaccaaagaagg

SEQ ID NO: 2369456 - RNA, 19 nt, Artificial Sequence
  Description of Artificial Sequence: Synthetic oligonucleotide
  Sense strand starting at position 2175 of SEQ ID NO: 1885814
uucuuugguccauauauug

SEQ ID NO: 2369457 - RNA, 19 nt, Artificial Sequence
  Description of Artificial Sequence: Synthetic oligonucleotide
  Antisense strand to SEQ ID NO: 2369456
caauauauggaccaaagaa

SEQ ID NO: 2369458 - RNA, 19 nt, Artificial Sequence
  Description of Artificial Sequence: Synthetic oligonucleotide
  Sense strand starting at position 2244 of SEQ ID NO: 1885814
gggucucuuugguuauauu

SEQ ID NO: 2369459 - RNA, 19 nt, Artificial Sequence
  Description of Artificial Sequence: Synthetic oligonucleotide
  Antisense strand to SEQ ID NO: 2369458
aauauaaccaaagagaccc

SEQ ID NO: 2369460 - RNA, 19 nt, Artificial Sequence
  Description of Artificial Sequence: Synthetic oligonucleotide
  Sense strand starting at position 2316 of SEQ ID NO: 1885814
agacaagagcauugacuau

SEQ ID NO: 2369461 - RNA, 19 nt, Artificial Sequence
  Description of Artificial Sequence: Synthetic oligonucleotide
  Antisense strand to SEQ ID NO: 2369460
auagucaaugcucuugucu

SEQ ID NO: 2369462 - RNA, 19 nt, Artificial Sequence
  Description of Artificial Sequence: Synthetic oligonucleotide
  Sense strand starting at position 2420 of SEQ ID NO: 1885814
aucuguucugaggaguaca

SEQ ID NO: 2369463 - RNA, 19 nt, Artificial Sequence
  Description of Artificial Sequence: Synthetic oligonucleotide
  Antisense strand to SEQ ID NO: 2369462
uguacuccucagaacagau

SEQ ID NO: 2369464 - RNA, 19 nt, Artificial Sequence
  Description of Artificial Sequence: Synthetic oligonucleotide
  Sense strand starting at position 2518 of SEQ ID NO: 1885814
ggcaaucauuacuuggagu

SEQ ID NO: 2369465 - RNA, 19 nt, Artificial Sequence
  Description of Artificial Sequence: Synthetic oligonucleotide
  Antisense strand to SEQ ID NO: 2369464
acuccaaguaaugauugcc

SEQ ID NO: 2369466 - RNA, 19 nt, Artificial Sequence
  Description of Artificial Sequence: Synthetic oligonucleotide
  Sense strand starting at position 2851 of SEQ ID NO: 1885814
ugugaaggaccucagaguu

SEQ ID NO: 2369467 - RNA, 19 nt, Artificial Sequence
  Description of Artificial Sequence: Synthetic oligonucleotide
  Antisense strand to SEQ ID NO: 2369466
aacucugagguccuucaca

SEQ ID NO: 2369468 - RNA, 19 nt, Artificial Sequence
  Description of Artificial Sequence: Synthetic oligonucleotide
  Sense strand starting at position 3159 of SEQ ID NO: 1885814
ggccuuaugugauuauauu

SEQ ID NO: 2369469 - RNA, 19 nt, Artificial Sequence
  Description of Artificial Sequence: Synthetic oligonucleotide
  Antisense strand to SEQ ID NO: 2369468
aauauaaucacauaaggcc

SEQ ID NO: 2369470 - RNA, 19 nt, Artificial Sequence
  Description of Artificial Sequence: Synthetic oligonucleotide
  Sense strand starting at position 3321 of SEQ ID NO: 1885814
ucgagauuaucacucugag

SEQ ID NO: 2369471 - RNA, 19 nt, Artificial Sequence
  Description of Artificial Sequence: Synthetic oligonucleotide
  Antisense strand to SEQ ID NO: 2369470
cucagagugauaaucucga

SEQ ID NO: 2369472 - RNA, 19 nt, Artificial Sequence
  Description of Artificial Sequence: Synthetic oligonucleotide
  Sense strand starting at position 3387 of SEQ ID NO: 1885814
acugauccuugcuuauuga

SEQ ID NO: 2369473 - RNA, 19 nt, Artificial Sequence
  Description of Artificial Sequence: Synthetic oligonucleotide
  Antisense strand to SEQ ID NO: 2369472
ucaauaagcaaggaucagu

SEQ ID NO: 2369474 - RNA, 19 nt, Artificial Sequence
  Description of Artificial Sequence: Synthetic oligonucleotide
  Sense strand starting at position 3415 of SEQ ID NO: 1885814
uauguuggaccucagaguu

SEQ ID NO: 2369475 - RNA, 19 nt, Artificial Sequence
  Description of Artificial Sequence: Synthetic oligonucleotide
  Antisense strand to SEQ ID NO: 2369474
aacucugagguccaacaua

SEQ ID NO: 2369476 - RNA, 19 nt, Artificial Sequence
  Description of Artificial Sequence: Synthetic oligonucleotide
  Sense strand starting at position 3613 of SEQ ID NO: 1885814
uuagguagccaucauuauu

SEQ ID NO: 2369477 - RNA, 19 nt, Artificial Sequence
  Description of Artificial Sequence: Synthetic oligonucleotide
  Antisense strand to SEQ ID NO: 2369476
aauaaugauggcuaccuaa

SEQ ID NO: 2369478 - RNA, 19 nt, Artificial Sequence
  Description of Artificial Sequence: Synthetic oligonucleotide
  Sense strand starting at position 3711 of SEQ ID NO: 1885814
cccaaauuacgauguuuac

SEQ ID NO: 2369479 - RNA, 19 nt, Artificial Sequence
  Description of Artificial Sequence: Synthetic oligonucleotide
  Antisense strand to SEQ ID NO: 2369478
guaaacaucguaauuuggg

SEQ ID NO: 2369480 - RNA, 19 nt, Artificial Sequence
  Description of Artificial Sequence: Synthetic oligonucleotide
  Sense strand starting at position 3894 of SEQ ID NO: 1885814
auggguccagugugagaaa

SEQ ID NO: 2369481 - RNA, 19 nt, Artificial Sequence
  Description of Artificial Sequence: Synthetic oligonucleotide
  Antisense strand to SEQ ID NO: 2369480
uuucucacacuggacccau

SEQ ID NO: 2369482 - RNA, 19 nt, Artificial Sequence
  Description of Artificial Sequence: Synthetic oligonucleotide
  Sense strand starting at position 3960 of SEQ ID NO: 1885814
agacguucucuccauuaau

SEQ ID NO: 2369483 - RNA, 19 nt, Artificial Sequence
  Description of Artificial Sequence: Synthetic oligonucleotide
  Antisense strand to SEQ ID NO: 2369482
auuaauggagagaacgucu

SEQ ID NO: 2369484 - RNA, 19 nt, Artificial Sequence
  Description of Artificial Sequence: Synthetic oligonucleotide
  Sense strand starting at position 8 of SEQ ID NO: 1885815
agacucagagcaugaacau

SEQ ID NO: 2369485 - RNA, 19 nt, Artificial Sequence
  Description of Artificial Sequence: Synthetic oligonucleotide
  Antisense strand to SEQ ID NO: 2369484
auguucaugcucugagucu

SEQ ID NO: 2369486 - RNA, 19 nt, Artificial Sequence
  Description of Artificial Sequence: Synthetic oligonucleotide
  Sense strand starting at position 15 of SEQ ID NO: 1885815
gagcaugaacauugucuau

SEQ ID NO: 2369487 - RNA, 19 nt, Artificial Sequence
  Description of Artificial Sequence: Synthetic oligonucleotide
  Antisense strand to SEQ ID NO: 2369486
auagacaauguucaugcuc

SEQ ID NO: 2369488 - RNA, 19 nt, Artificial Sequence
  Description of Artificial Sequence: Synthetic oligonucleotide
  Sense strand starting at position 17 of SEQ ID NO: 1885815
gcaugaacauugucuauaa

SEQ ID NO: 2369489 - RNA, 19 nt, Artificial Sequence
  Description of Artificial Sequence: Synthetic oligonucleotide
  Antisense strand to SEQ ID NO: 2369488
uuauagacaauguucaugc

SEQ ID NO: 2369490 - RNA, 19 nt, Artificial Sequence
  Description of Artificial Sequence: Synthetic oligonucleotide
  Sense strand starting at position 44 of SEQ ID NO: 1885815
gugcaucauuagccaaaga

SEQ ID NO: 2369491 - RNA, 19 nt, Artificial Sequence
  Description of Artificial Sequence: Synthetic oligonucleotide
  Antisense strand to SEQ ID NO: 2369490
ucuuuggcuaaugaugcac

SEQ ID NO: 2369492 - RNA, 19 nt, Artificial Sequence
  Description of Artificial Sequence: Synthetic oligonucleotide
  Sense strand starting at position 145 of SEQ ID NO: 1885815
uuucuauauuuggacaaug

SEQ ID NO: 2369493 - RNA, 19 nt, Artificial Sequence
  Description of Artificial Sequence: Synthetic oligonucleotide
  Antisense strand to SEQ ID NO: 2369492
cauuguccaaauauagaaa

SEQ ID NO: 2369494 - RNA, 19 nt, Artificial Sequence
  Description of Artificial Sequence: Synthetic oligonucleotide
  Sense strand starting at position 155 of SEQ ID NO: 1885815
uggacaaugccucaucuau

SEQ ID NO: 2369495 - RNA, 19 nt, Artificial Sequence
  Description of Artificial Sequence: Synthetic oligonucleotide
  Antisense strand to SEQ ID NO: 2369494
auagaugaggcauugucca

SEQ ID NO: 2369496 - RNA, 19 nt, Artificial Sequence
  Description of Artificial Sequence: Synthetic oligonucleotide
  Sense strand starting at position 420 of SEQ ID NO: 1885815
gcaagagauuuauaucccu

SEQ ID NO: 2369497 - RNA, 19 nt, Artificial Sequence
  Description of Artificial Sequence: Synthetic oligonucleotide
  Antisense strand to SEQ ID NO: 2369496
agggauauaaaucucuugc

SEQ ID NO: 2369498 - RNA, 19 nt, Artificial Sequence
  Description of Artificial Sequence: Synthetic oligonucleotide
  Sense strand starting at position 601 of SEQ ID NO: 1885815
agugacugcccauaaacaa

SEQ ID NO: 2369499 - RNA, 19 nt, Artificial Sequence
  Description of Artificial Sequence: Synthetic oligonucleotide
  Antisense strand to SEQ ID NO: 2369498
uuguuuaugggcagucacu

SEQ ID NO: 2369500 - RNA, 19 nt, Artificial Sequence
  Description of Artificial Sequence: Synthetic oligonucleotide
  Sense strand starting at position 695 of SEQ ID NO: 1885815
gcuugugaccaaggaggaa

SEQ ID NO: 2369501 - RNA, 19 nt, Artificial Sequence
  Description of Artificial Sequence: Synthetic oligonucleotide
  Antisense strand to SEQ ID NO: 2369500
uuccuccuuggucacaagc

SEQ ID NO: 2369502 - RNA, 19 nt, Artificial Sequence
  Description of Artificial Sequence: Synthetic oligonucleotide
  Sense strand starting at position 882 of SEQ ID NO: 1885815
cagaguaaaugagcuacau

SEQ ID NO: 2369503 - RNA, 19 nt, Artificial Sequence
  Description of Artificial Sequence: Synthetic oligonucleotide
  Antisense strand to SEQ ID NO: 2369502
auguagcucauuuacucug

SEQ ID NO: 2369504 - RNA, 19 nt, Artificial Sequence
  Description of Artificial Sequence: Synthetic oligonucleotide
  Sense strand starting at position 967 of SEQ ID NO: 1885815
agucaucacugaucuagga

SEQ ID NO: 2369505 - RNA, 19 nt, Artificial Sequence
  Description of Artificial Sequence: Synthetic oligonucleotide
  Antisense strand to SEQ ID NO: 2369504
uccuagaucagugaugacu

SEQ ID NO: 2369506 - RNA, 19 nt, Artificial Sequence
  Description of Artificial Sequence: Synthetic oligonucleotide
  Sense strand starting at position 1401 of SEQ ID NO: 1885815
ggguaugaagcagagcaaa

SEQ ID NO: 2369507 - RNA, 19 nt, Artificial Sequence
  Description of Artificial Sequence: Synthetic oligonucleotide
  Antisense strand to SEQ ID NO: 2369506
uuugcucugcuucauaccc

SEQ ID NO: 2369508 - RNA, 19 nt, Artificial Sequence
  Description of Artificial Sequence: Synthetic oligonucleotide
  Sense strand starting at position 1483 of SEQ ID NO: 1885815
cuaggucauuuagguauuu

SEQ ID NO: 2369509 - RNA, 19 nt, Artificial Sequence
  Description of Artificial Sequence: Synthetic oligonucleotide
  Antisense strand to SEQ ID NO: 2369508
aaauaccuaaaugaccuag

SEQ ID NO: 2369510 - RNA, 19 nt, Artificial Sequence
  Description of Artificial Sequence: Synthetic oligonucleotide
  Sense strand starting at position 1672 of SEQ ID NO: 1885815
uuuguaaaugaaugucagu

SEQ ID NO: 2369511 - RNA, 19 nt, Artificial Sequence
  Description of Artificial Sequence: Synthetic oligonucleotide
  Antisense strand to SEQ ID NO: 2369510
acugacauucauuuacaaa

SEQ ID NO: 2369512 - RNA, 19 nt, Artificial Sequence
  Description of Artificial Sequence: Synthetic oligonucleotide
  Sense strand starting at position 1677 of SEQ ID NO: 1885815
aaaugaaugucagugcuuu

SEQ ID NO: 2369513 - RNA, 19 nt, Artificial Sequence
  Description of Artificial Sequence: Synthetic oligonucleotide
  Antisense strand to SEQ ID NO: 2369512
aaagcacugacauucauuu

SEQ ID NO: 2369514 - RNA, 19 nt, Artificial Sequence
  Description of Artificial Sequence: Synthetic oligonucleotide
  Sense strand starting at position 1794 of SEQ ID NO: 1885815
uggaucuaucauugaucca

SEQ ID NO: 2369515 - RNA, 19 nt, Artificial Sequence
  Description of Artificial Sequence: Synthetic oligonucleotide
  Antisense strand to SEQ ID NO: 2369514
uggaucaaugauagaucca

SEQ ID NO: 2369516 - RNA, 19 nt, Artificial Sequence
  Description of Artificial Sequence: Synthetic oligonucleotide
  Sense strand starting at position 1988 of SEQ ID NO: 1885815
ucaucauugguccaugauu

SEQ ID NO: 2369517 - RNA, 19 nt, Artificial Sequence
  Description of Artificial Sequence: Synthetic oligonucleotide
  Antisense strand to SEQ ID NO: 2369516
aaucauggaccaaugauga

SEQ ID NO: 2369518 - RNA, 19 nt, Artificial Sequence
  Description of Artificial Sequence: Synthetic oligonucleotide
  Sense strand starting at position 2100 of SEQ ID NO: 1885815
ccaacaaggucuuugaaua

SEQ ID NO: 2369519 - RNA, 19 nt, Artificial Sequence
  Description of Artificial Sequence: Synthetic oligonucleotide
  Antisense strand to SEQ ID NO: 2369518
uauucaaagaccuuguugg

SEQ ID NO: 2369520 - RNA, 19 nt, Artificial Sequence
  Description of Artificial Sequence: Synthetic oligonucleotide
  Sense strand starting at position 2176 of SEQ ID NO: 1885815
cucaauguugcacaugaga

SEQ ID NO: 2369521 - RNA, 19 nt, Artificial Sequence
  Description of Artificial Sequence: Synthetic oligonucleotide
  Antisense strand to SEQ ID NO: 2369520
ucucaugugcaacauugag

SEQ ID NO: 2369522 - RNA, 19 nt, Artificial Sequence
  Description of Artificial Sequence: Synthetic oligonucleotide
  Sense strand starting at position 2226 of SEQ ID NO: 1885815
auuauugagcagugguuaa

SEQ ID NO: 2369523 - RNA, 19 nt, Artificial Sequence
  Description of Artificial Sequence: Synthetic oligonucleotide
  Antisense strand to SEQ ID NO: 2369522
uuaaccacugcucaauaau

SEQ ID NO: 2369524 - RNA, 19 nt, Artificial Sequence
  Description of Artificial Sequence: Synthetic oligonucleotide
  Sense strand starting at position 2238 of SEQ ID NO: 1885815
ugguuaacuguguauuaau

SEQ ID NO: 2369525 - RNA, 19 nt, Artificial Sequence
  Description of Artificial Sequence: Synthetic oligonucleotide
  Antisense strand to SEQ ID NO: 2369524
auuaauacacaguuaacca

SEQ ID NO: 2369526 - RNA, 19 nt, Artificial Sequence
  Description of Artificial Sequence: Synthetic oligonucleotide
  Sense strand starting at position 2709 of SEQ ID NO: 1885815
uugagauguucucuccauu

SEQ ID NO: 2369527 - RNA, 19 nt, Artificial Sequence
  Description of Artificial Sequence: Synthetic oligonucleotide
  Antisense strand to SEQ ID NO: 2369526
aauggagagaacaucucaa

SEQ ID NO: 2369528 - RNA, 19 nt, Artificial Sequence
  Description of Artificial Sequence: Synthetic oligonucleotide
  Sense strand starting at position 2712 of SEQ ID NO: 1885815
agauguucucuccauugau

SEQ ID NO: 2369529 - RNA, 19 nt, Artificial Sequence
  Description of Artificial Sequence: Synthetic oligonucleotide
  Antisense strand to SEQ ID NO: 2369528
aucaauggagagaacaucu

SEQ ID NO: 2369530 - RNA, 19 nt, Artificial Sequence
  Description of Artificial Sequence: Synthetic oligonucleotide
  Sense strand starting at position 2715 of SEQ ID NO: 1885815
uguucucuccauugaucca

SEQ ID NO: 2369531 - RNA, 19 nt, Artificial Sequence
  Description of Artificial Sequence: Synthetic oligonucleotide
  Antisense strand to SEQ ID NO: 2369530
uggaucaauggagagaaca

SEQ ID NO: 2369532 - RNA, 19 nt, Artificial Sequence
  Description of Artificial Sequence: Synthetic oligonucleotide
  Sense strand starting at position 2852 of SEQ ID NO: 1885815
ccuauuacagucuauguca

SEQ ID NO: 2369533 - RNA, 19 nt, Artificial Sequence
  Description of Artificial Sequence: Synthetic oligonucleotide
  Antisense strand to SEQ ID NO: 2369532
ugacauagacuguaauagg

SEQ ID NO: 2369534 - RNA, 19 nt, Artificial Sequence
  Description of Artificial Sequence: Synthetic oligonucleotide
  Sense strand starting at position 2863 of SEQ ID NO: 1885815
cuaugucauccuuagucca

SEQ ID NO: 2369535 - RNA, 19 nt, Artificial Sequence
  Description of Artificial Sequence: Synthetic oligonucleotide
  Antisense strand to SEQ ID NO: 2369534
uggacuaaggaugacauag

SEQ ID NO: 2369536 - RNA, 19 nt, Artificial Sequence
  Description of Artificial Sequence: Synthetic oligonucleotide
  Sense strand starting at position 2866 of SEQ ID NO: 1885815
ugucauccuuaguccaaga

SEQ ID NO: 2369537 - RNA, 19 nt, Artificial Sequence
  Description of Artificial Sequence: Synthetic oligonucleotide
  Antisense strand to SEQ ID NO: 2369536
ucuuggacuaaggaugaca

SEQ ID NO: 2369538 - RNA, 19 nt, Artificial Sequence
  Description of Artificial Sequence: Synthetic oligonucleotide
  Sense strand starting at position 3015 of SEQ ID NO: 1885815
ccuugauucguuuacaaua

SEQ ID NO: 2369539 - RNA, 19 nt, Artificial Sequence
  Description of Artificial Sequence: Synthetic oligonucleotide
  Antisense strand to SEQ ID NO: 2369538
uauuguaaacgaaucaagg

SEQ ID NO: 2369540 - RNA, 19 nt, Artificial Sequence
  Description of Artificial Sequence: Synthetic oligonucleotide
  Sense strand starting at position 3073 of SEQ ID NO: 1885815
guccucauauauucugaca

SEQ ID NO: 2369541 - RNA, 19 nt, Artificial Sequence
  Description of Artificial Sequence: Synthetic oligonucleotide
  Antisense strand to SEQ ID NO: 2369540
ugucagaauauaugaggac

SEQ ID NO: 2369542 - RNA, 19 nt, Artificial Sequence
  Description of Artificial Sequence: Synthetic oligonucleotide
  Sense strand starting at position 3086 of SEQ ID NO: 1885815
cugacaucugugcauaaga

SEQ ID NO: 2369543 - RNA, 19 nt, Artificial Sequence
  Description of Artificial Sequence: Synthetic oligonucleotide
  Antisense strand to SEQ ID NO: 2369542
ucuuaugcacagaugucag

SEQ ID NO: 2369544 - RNA, 19 nt, Artificial Sequence
  Description of Artificial Sequence: Synthetic oligonucleotide
  Sense strand starting at position 3088 of SEQ ID NO: 1885815
gacaucugugcauaagauc

SEQ ID NO: 2369545 - RNA, 19 nt, Artificial Sequence
  Description of Artificial Sequence: Synthetic oligonucleotide
  Antisense strand to SEQ ID NO: 2369544
gaucuuaugcacagauguc

SEQ ID NO: 2369546 - RNA, 19 nt, Artificial Sequence
  Description of Artificial Sequence: Synthetic oligonucleotide
  Sense strand starting at position 3197 of SEQ ID NO: 1885815
agucauaauugguccagga

SEQ ID NO: 2369547 - RNA, 19 nt, Artificial Sequence
  Description of Artificial Sequence: Synthetic oligonucleotide
  Antisense strand to SEQ ID NO: 2369546
uccuggaccaauuaugacu

SEQ ID NO: 2369548 - RNA, 19 nt, Artificial Sequence
  Description of Artificial Sequence: Synthetic oligonucleotide
  Sense strand starting at position 3201 of SEQ ID NO: 1885815
auaauugguccaggauauc

SEQ ID NO: 2369549 - RNA, 19 nt, Artificial Sequence
  Description of Artificial Sequence: Synthetic oligonucleotide
  Antisense strand to SEQ ID NO: 2369548
gauauccuggaccaauuau

SEQ ID NO: 2369550 - RNA, 19 nt, Artificial Sequence
  Description of Artificial Sequence: Synthetic oligonucleotide
  Sense strand starting at position 3207 of SEQ ID NO: 1885815
gguccaggauaucuuugau

SEQ ID NO: 2369551 - RNA, 19 nt, Artificial Sequence
  Description of Artificial Sequence: Synthetic oligonucleotide
  Antisense strand to SEQ ID NO: 2369550
aucaaagauauccuggacc

SEQ ID NO: 2369552 - RNA, 19 nt, Artificial Sequence
  Description of Artificial Sequence: Synthetic oligonucleotide
  Sense strand starting at position 3381 of SEQ ID NO: 1885815
ugaccuucuuugguccaua

SEQ ID NO: 2369553 - RNA, 19 nt, Artificial Sequence
  Description of Artificial Sequence: Synthetic oligonucleotide
  Antisense strand to SEQ ID NO: 2369552
uauggaccaaagaagguca

SEQ ID NO: 2369554 - RNA, 19 nt, Artificial Sequence
  Description of Artificial Sequence: Synthetic oligonucleotide
  Sense strand starting at position 3384 of SEQ ID NO: 1885815
ccuucuuugguccauauau

SEQ ID NO: 2369555 - RNA, 19 nt, Artificial Sequence
  Description of Artificial Sequence: Synthetic oligonucleotide
  Antisense strand to SEQ ID NO: 2369554
auauauggaccaaagaagg

SEQ ID NO: 2369556 - RNA, 19 nt, Artificial Sequence
  Description of Artificial Sequence: Synthetic oligonucleotide
  Sense strand starting at position 3386 of SEQ ID NO: 1885815
uucuuugguccauauauug

SEQ ID NO: 2369557 - RNA, 19 nt, Artificial Sequence
  Description of Artificial Sequence: Synthetic oligonucleotide
  Antisense strand to SEQ ID NO: 2369556
caauauauggaccaaagaa

SEQ ID NO: 2369558 - RNA, 19 nt, Artificial Sequence
  Description of Artificial Sequence: Synthetic oligonucleotide
  Sense strand starting at position 3527 of SEQ ID NO: 1885815
agacaagagcauugacuau

SEQ ID NO: 2369559 - RNA, 19 nt, Artificial Sequence
  Description of Artificial Sequence: Synthetic oligonucleotide
  Antisense strand to SEQ ID NO: 2369558
auagucaaugcucuugucu

SEQ ID NO: 2369560 - RNA, 19 nt, Artificial Sequence
  Description of Artificial Sequence: Synthetic oligonucleotide
  Sense strand starting at position 3631 of SEQ ID NO: 1885815
aucuguucugaggaguaca

SEQ ID NO: 2369561 - RNA, 19 nt, Artificial Sequence
  Description of Artificial Sequence: Synthetic oligonucleotide
  Antisense strand to SEQ ID NO: 2369560
uguacuccucagaacagau

SEQ ID NO: 2369562 - RNA, 19 nt, Artificial Sequence
  Description of Artificial Sequence: Synthetic oligonucleotide
  Sense strand starting at position 3729 of SEQ ID NO: 1885815
ggcaaucauuacuuggagu

SEQ ID NO: 2369563 - RNA, 19 nt, Artificial Sequence
  Description of Artificial Sequence: Synthetic oligonucleotide
  Antisense strand to SEQ ID NO: 2369562
acuccaaguaaugauugcc

SEQ ID NO: 2369564 - RNA, 19 nt, Artificial Sequence
  Description of Artificial Sequence: Synthetic oligonucleotide
  Sense strand starting at position 176 of SEQ ID NO: 1885816
gcacaugccauggaagagu

SEQ ID NO: 2369565 - RNA, 19 nt, Artificial Sequence
  Description of Artificial Sequence: Synthetic oligonucleotide
  Antisense strand to SEQ ID NO: 2369564
acucuuccauggcaugugc

SEQ ID NO: 2369566 - RNA, 19 nt, Artificial Sequence
  Description of Artificial Sequence: Synthetic oligonucleotide
  Sense strand starting at position 185 of SEQ ID NO: 1885816
auggaagagugcuuauauc

SEQ ID NO: 2369567 - RNA, 19 nt, Artificial Sequence
  Description of Artificial Sequence: Synthetic oligonucleotide
  Antisense strand to SEQ ID NO: 2369566
gauauaagcacucuuccau

SEQ ID NO: 2369568 - RNA, 19 nt, Artificial Sequence
  Description of Artificial Sequence: Synthetic oligonucleotide
  Sense strand starting at position 215 of SEQ ID NO: 1885816
ggccauucugaggaguaua

SEQ ID NO: 2369569 - RNA, 19 nt, Artificial Sequence
  Description of Artificial Sequence: Synthetic oligonucleotide
  Antisense strand to SEQ ID NO: 2369568
uauacuccucagaauggcc

SEQ ID NO: 2369570 - RNA, 19 nt, Artificial Sequence
  Description of Artificial Sequence: Synthetic oligonucleotide
  Sense strand starting at position 421 of SEQ ID NO: 1885816
ucaucaucauugguccaga

SEQ ID NO: 2369571 - RNA, 19 nt, Artificial Sequence
  Description of Artificial Sequence: Synthetic oligonucleotide
  Antisense strand to SEQ ID NO: 2369570
ucuggaccaaugaugauga

SEQ ID NO: 2369572 - RNA, 19 nt, Artificial Sequence
  Description of Artificial Sequence: Synthetic oligonucleotide
  Sense strand starting at position 435 of SEQ ID NO: 1885816
ccagaaauggcccaucuuu

SEQ ID NO: 2369573 - RNA, 19 nt, Artificial Sequence
  Description of Artificial Sequence: Synthetic oligonucleotide
  Antisense strand to SEQ ID NO: 2369572
aaagaugggccauuucugg

SEQ ID NO: 2369574 - RNA, 19 nt, Artificial Sequence
  Description of Artificial Sequence: Synthetic oligonucleotide
  Sense strand starting at position 510 of SEQ ID NO: 1885816
uuuaaagugcuauaaugca

SEQ ID NO: 2369575 - RNA, 19 nt, Artificial Sequence
  Description of Artificial Sequence: Synthetic oligonucleotide
  Antisense strand to SEQ ID NO: 2369574
ugcauuauagcacuuuaaa

SEQ ID NO: 2369576 - RNA, 19 nt, Artificial Sequence
  Description of Artificial Sequence: Synthetic oligonucleotide
  Sense strand starting at position 545 of SEQ ID NO: 1885816
ccucgaugucccuaauaug

SEQ ID NO: 2369577 - RNA, 19 nt, Artificial Sequence
  Description of Artificial Sequence: Synthetic oligonucleotide
  Antisense strand to SEQ ID NO: 2369576
cauauuagggacaucgagg

SEQ ID NO: 2369578 - RNA, 19 nt, Artificial Sequence
  Description of Artificial Sequence: Synthetic oligonucleotide
  Sense strand starting at position 553 of SEQ ID NO: 1885816
ucccuaauauguguauaga

SEQ ID NO: 2369579 - RNA, 19 nt, Artificial Sequence
  Description of Artificial Sequence: Synthetic oligonucleotide
  Antisense strand to SEQ ID NO: 2369578
ucuauacacauauuaggga

SEQ ID NO: 2369580 - RNA, 19 nt, Artificial Sequence
  Description of Artificial Sequence: Synthetic oligonucleotide
  Sense strand starting at position 554 of SEQ ID NO: 1885816
cccuaauauguguauagaa

SEQ ID NO: 2369581 - RNA, 19 nt, Artificial Sequence
  Description of Artificial Sequence: Synthetic oligonucleotide
  Antisense strand to SEQ ID NO: 2369580
uucuauacacauauuaggg

SEQ ID NO: 2369582 - RNA, 19 nt, Artificial Sequence
  Description of Artificial Sequence: Synthetic oligonucleotide
  Sense strand starting at position 556 of SEQ ID NO: 1885816
cuaauauguguauagaauc

SEQ ID NO: 2369583 - RNA, 19 nt, Artificial Sequence
  Description of Artificial Sequence: Synthetic oligonucleotide
  Antisense strand to SEQ ID NO: 2369582
gauucuauacacauauuag

SEQ ID NO: 2369584 - RNA, 19 nt, Artificial Sequence
  Description of Artificial Sequence: Synthetic oligonucleotide
  Sense strand starting at position 564 of SEQ ID NO: 1885816
uguauagaaucauucucag

SEQ ID NO: 2369585 - RNA, 19 nt, Artificial Sequence
  Description of Artificial Sequence: Synthetic oligonucleotide
  Antisense strand to SEQ ID NO: 2369584
cugagaaugauucuauaca

SEQ ID NO: 2369586 - RNA, 19 nt, Artificial Sequence
  Description of Artificial Sequence: Synthetic oligonucleotide
  Sense strand starting at position 567 of SEQ ID NO: 1885816
auagaaucauucucagguc

SEQ ID NO: 2369587 - RNA, 19 nt, Artificial Sequence
  Description of Artificial Sequence: Synthetic oligonucleotide
  Antisense strand to SEQ ID NO: 2369586
gaccugagaaugauucuau

SEQ ID NO: 2369588 - RNA, 19 nt, Artificial Sequence
  Description of Artificial Sequence: Synthetic oligonucleotide
  Sense strand starting at position 573 of SEQ ID NO: 1885816
ucauucucaggucaaugua

SEQ ID NO: 2369589 - RNA, 19 nt, Artificial Sequence
  Description of Artificial Sequence: Synthetic oligonucleotide
  Antisense strand to SEQ ID NO: 2369588
uacauugaccugagaauga

SEQ ID NO: 2369590 - RNA, 19 nt, Artificial Sequence
  Description of Artificial Sequence: Synthetic oligonucleotide
  Sense strand starting at position 576 of SEQ ID NO: 1885816
uucucaggucaauguaacu

SEQ ID NO: 2369591 - RNA, 19 nt, Artificial Sequence
  Description of Artificial Sequence: Synthetic oligonucleotide
  Antisense strand to SEQ ID NO: 2369590
aguuacauugaccugagaa

SEQ ID NO: 2369592 - RNA, 19 nt, Artificial Sequence
  Description of Artificial Sequence: Synthetic oligonucleotide
  Sense strand starting at position 729 of SEQ ID NO: 1885816
uguaguaacuauccuuuaa

SEQ ID NO: 2369593 - RNA, 19 nt, Artificial Sequence
  Description of Artificial Sequence: Synthetic oligonucleotide
  Antisense strand to SEQ ID NO: 2369592
uuaaaggauaguuacuaca

SEQ ID NO: 2369594 - RNA, 19 nt, Artificial Sequence
  Description of Artificial Sequence: Synthetic oligonucleotide
  Sense strand starting at position 759 of SEQ ID NO: 1885816
agccaagaacauugacuau

SEQ ID NO: 2369595 - RNA, 19 nt, Artificial Sequence
  Description of Artificial Sequence: Synthetic oligonucleotide
  Antisense strand to SEQ ID NO: 2369594
auagucaauguucuuggcu

SEQ ID NO: 2369596 - RNA, 19 nt, Artificial Sequence
  Description of Artificial Sequence: Synthetic oligonucleotide
  Sense strand starting at position 976 of SEQ ID NO: 1885816
uugggaggauauuacauuu

SEQ ID NO: 2369597 - RNA, 19 nt, Artificial Sequence
  Description of Artificial Sequence: Synthetic oligonucleotide
  Antisense strand to SEQ ID NO: 2369596
aaauguaauauccucccaa

SEQ ID NO: 2369598 - RNA, 19 nt, Artificial Sequence
  Description of Artificial Sequence: Synthetic oligonucleotide
  Sense strand starting at position 1027 of SEQ ID NO: 1885816
agacucagagcaugaacau

SEQ ID NO: 2369599 - RNA, 19 nt, Artificial Sequence
  Description of Artificial Sequence: Synthetic oligonucleotide
  Antisense strand to SEQ ID NO: 2369598
auguucaugcucugagucu

SEQ ID NO: 2369600 - RNA, 19 nt, Artificial Sequence
  Description of Artificial Sequence: Synthetic oligonucleotide
  Sense strand starting at position 1034 of SEQ ID NO: 1885816
gagcaugaacauugucuau

SEQ ID NO: 2369601 - RNA, 19 nt, Artificial Sequence
  Description of Artificial Sequence: Synthetic oligonucleotide
  Antisense strand to SEQ ID NO: 2369600
auagacaauguucaugcuc

SEQ ID NO: 2369602 - RNA, 19 nt, Artificial Sequence
  Description of Artificial Sequence: Synthetic oligonucleotide
  Sense strand starting at position 1036 of SEQ ID NO: 1885816
gcaugaacauugucuauaa

SEQ ID NO: 2369603 - RNA, 19 nt, Artificial Sequence
  Description of Artificial Sequence: Synthetic oligonucleotide
  Antisense strand to SEQ ID NO: 2369602
uuauagacaauguucaugc

SEQ ID NO: 2369604 - RNA, 19 nt, Artificial Sequence
  Description of Artificial Sequence: Synthetic oligonucleotide
  Sense strand starting at position 1164 of SEQ ID NO: 1885816
uuucuauauuuggacaaug

SEQ ID NO: 2369605 - RNA, 19 nt, Artificial Sequence
  Description of Artificial Sequence: Synthetic oligonucleotide
  Antisense strand to SEQ ID NO: 2369604
cauuguccaaauauagaaa

SEQ ID NO: 2369606 - RNA, 19 nt, Artificial Sequence
  Description of Artificial Sequence: Synthetic oligonucleotide
  Sense strand starting at position 1174 of SEQ ID NO: 1885816
uggacaaugccucaucuau

SEQ ID NO: 2369607 - RNA, 19 nt, Artificial Sequence
  Description of Artificial Sequence: Synthetic oligonucleotide
  Antisense strand to SEQ ID NO: 2369606
auagaugaggcauugucca

SEQ ID NO: 2369608 - RNA, 19 nt, Artificial Sequence
  Description of Artificial Sequence: Synthetic oligonucleotide
  Sense strand starting at position 1439 of SEQ ID NO: 1885816
gcaagagauuuauaucccu

SEQ ID NO: 2369609 - RNA, 19 nt, Artificial Sequence
  Description of Artificial Sequence: Synthetic oligonucleotide
  Antisense strand to SEQ ID NO: 2369608
agggauauaaaucucuugc

SEQ ID NO: 2369610 - RNA, 19 nt, Artificial Sequence
  Description of Artificial Sequence: Synthetic oligonucleotide
  Sense strand starting at position 1620 of SEQ ID NO: 1885816
agugacugcccauaaacaa

SEQ ID NO: 2369611 - RNA, 19 nt, Artificial Sequence
  Description of Artificial Sequence: Synthetic oligonucleotide
  Antisense strand to SEQ ID NO: 2369610
uuguuuaugggcagucacu

SEQ ID NO: 2369612 - RNA, 19 nt, Artificial Sequence
  Description of Artificial Sequence: Synthetic oligonucleotide
  Sense strand starting at position 1714 of SEQ ID NO: 1885816
gcuugugaccaaggaggaa

SEQ ID NO: 2369613 - RNA, 19 nt, Artificial Sequence
  Description of Artificial Sequence: Synthetic oligonucleotide
  Antisense strand to SEQ ID NO: 2369612
uuccuccuuggucacaagc

SEQ ID NO: 2369614 - RNA, 19 nt, Artificial Sequence
  Description of Artificial Sequence: Synthetic oligonucleotide
  Sense strand starting at position 1901 of SEQ ID NO: 1885816
cagaguaaaugagcuacau

SEQ ID NO: 2369615 - RNA, 19 nt, Artificial Sequence
  Description of Artificial Sequence: Synthetic oligonucleotide
  Antisense strand to SEQ ID NO: 2369614
auguagcucauuuacucug

SEQ ID NO: 2369616 - RNA, 19 nt, Artificial Sequence
  Description of Artificial Sequence: Synthetic oligonucleotide
  Sense strand starting at position 1986 of SEQ ID NO: 1885816
agucaucacugaucuagga

SEQ ID NO: 2369617 - RNA, 19 nt, Artificial Sequence
  Description of Artificial Sequence: Synthetic oligonucleotide
  Antisense strand to SEQ ID NO: 2369616
uccuagaucagugaugacu

SEQ ID NO: 2369618 - RNA, 19 nt, Artificial Sequence
  Description of Artificial Sequence: Synthetic oligonucleotide
  Sense strand starting at position 2420 of SEQ ID NO: 1885816
ggguaugaagcagagcaaa

SEQ ID NO: 2369619 - RNA, 19 nt, Artificial Sequence
  Description of Artificial Sequence: Synthetic oligonucleotide
  Antisense strand to SEQ ID NO: 2369618
uuugcucugcuucauaccc

SEQ ID NO: 2369620 - RNA, 19 nt, Artificial Sequence
  Description of Artificial Sequence: Synthetic oligonucleotide
  Sense strand starting at position 2502 of SEQ ID NO: 1885816
cuaggucauuuagguauuu

SEQ ID NO: 2369621 - RNA, 19 nt, Artificial Sequence
  Description of Artificial Sequence: Synthetic oligonucleotide
  Antisense strand to SEQ ID NO: 2369620
aaauaccuaaaugaccuag

SEQ ID NO: 2369622 - RNA, 19 nt, Artificial Sequence
  Description of Artificial Sequence: Synthetic oligonucleotide
  Sense strand starting at position 2691 of SEQ ID NO: 1885816
uuuguaaaugaaugucagu

SEQ ID NO: 2369623 - RNA, 19 nt, Artificial Sequence
  Description of Artificial Sequence: Synthetic oligonucleotide
  Antisense strand to SEQ ID NO: 2369622
acugacauucauuuacaaa

SEQ ID NO: 2369624 - RNA, 19 nt, Artificial Sequence
  Description of Artificial Sequence: Synthetic oligonucleotide
  Sense strand starting at position 2813 of SEQ ID NO: 1885816
uggaucuaucauugaucca

SEQ ID NO: 2369625 - RNA, 19 nt, Artificial Sequence
  Description of Artificial Sequence: Synthetic oligonucleotide
  Antisense strand to SEQ ID NO: 2369624
uggaucaaugauagaucca

SEQ ID NO: 2369626 - RNA, 19 nt, Artificial Sequence
  Description of Artificial Sequence: Synthetic oligonucleotide
  Sense strand starting at position 3007 of SEQ ID NO: 1885816
ucaucauugguccaugauu

SEQ ID NO: 2369627 - RNA, 19 nt, Artificial Sequence
  Description of Artificial Sequence: Synthetic oligonucleotide
  Antisense strand to SEQ ID NO: 2369626
aaucauggaccaaugauga

SEQ ID NO: 2369628 - RNA, 19 nt, Artificial Sequence
  Description of Artificial Sequence: Synthetic oligonucleotide
  Sense strand starting at position 3119 of SEQ ID NO: 1885816
ccaacaaggucuuugaaua

SEQ ID NO: 2369629 - RNA, 19 nt, Artificial Sequence
  Description of Artificial Sequence: Synthetic oligonucleotide
  Antisense strand to SEQ ID NO: 2369628
uauucaaagaccuuguugg

SEQ ID NO: 2369630 - RNA, 19 nt, Artificial Sequence
  Description of Artificial Sequence: Synthetic oligonucleotide
  Sense strand starting at position 3195 of SEQ ID NO: 1885816
cucaauguugcacaugaga

SEQ ID NO: 2369631 - RNA, 19 nt, Artificial Sequence
  Description of Artificial Sequence: Synthetic oligonucleotide
  Antisense strand to SEQ ID NO: 2369630
ucucaugugcaacauugag

SEQ ID NO: 2369632 - RNA, 19 nt, Artificial Sequence
  Description of Artificial Sequence: Synthetic oligonucleotide
  Sense strand starting at position 3257 of SEQ ID NO: 1885816
ugguuaacuguguauuaau

SEQ ID NO: 2369633 - RNA, 19 nt, Artificial Sequence
  Description of Artificial Sequence: Synthetic oligonucleotide
  Antisense strand to SEQ ID NO: 2369632
auuaauacacaguuaacca

SEQ ID NO: 2369634 - RNA, 19 nt, Artificial Sequence
  Description of Artificial Sequence: Synthetic oligonucleotide
  Sense strand starting at position 3728 of SEQ ID NO: 1885816
uugagauguucucuccauu

SEQ ID NO: 2369635 - RNA, 19 nt, Artificial Sequence
  Description of Artificial Sequence: Synthetic oligonucleotide
  Antisense strand to SEQ ID NO: 2369634
aauggagagaacaucucaa

SEQ ID NO: 2369636 - RNA, 19 nt, Artificial Sequence
  Description of Artificial Sequence: Synthetic oligonucleotide
  Sense strand starting at position 3731 of SEQ ID NO: 1885816
agauguucucuccauugau

SEQ ID NO: 2369637 - RNA, 19 nt, Artificial Sequence
  Description of Artificial Sequence: Synthetic oligonucleotide
  Antisense strand to SEQ ID NO: 2369636
aucaauggagagaacaucu

SEQ ID NO: 2369638 - RNA, 19 nt, Artificial Sequence
  Description of Artificial Sequence: Synthetic oligonucleotide
  Sense strand starting at position 3871 of SEQ ID NO: 1885816
ccuauuacagucuauguca

SEQ ID NO: 2369639 - RNA, 19 nt, Artificial Sequence
  Description of Artificial Sequence: Synthetic oligonucleotide
  Antisense strand to SEQ ID NO: 2369638
ugacauagacuguaauagg

SEQ ID NO: 2369640 - RNA, 19 nt, Artificial Sequence
  Description of Artificial Sequence: Synthetic oligonucleotide
  Sense strand starting at position 3882 of SEQ ID NO: 1885816
cuaugucauccuuagucca

SEQ ID NO: 2369641 - RNA, 19 nt, Artificial Sequence
  Description of Artificial Sequence: Synthetic oligonucleotide
  Antisense strand to SEQ ID NO: 2369640
uggacuaaggaugacauag

SEQ ID NO: 2369642 - RNA, 19 nt, Artificial Sequence
  Description of Artificial Sequence: Synthetic oligonucleotide
  Sense strand starting at position 3885 of SEQ ID NO: 1885816
ugucauccuuaguccaaga

SEQ ID NO: 2369643 - RNA, 19 nt, Artificial Sequence
  Description of Artificial Sequence: Synthetic oligonucleotide
  Antisense strand to SEQ ID NO: 2369642
ucuuggacuaaggaugaca

SEQ ID NO: 2369644 - RNA, 19 nt, Artificial Sequence
  Description of Artificial Sequence: Synthetic oligonucleotide
  Sense strand starting at position 130 of SEQ ID NO: 1885817
cucuaucagugauuccuua

SEQ ID NO: 2369645 - RNA, 19 nt, Artificial Sequence
  Description of Artificial Sequence: Synthetic oligonucleotide
  Antisense strand to SEQ ID NO: 2369644
uaaggaaucacugauagag

SEQ ID NO: 2369646 - RNA, 19 nt, Artificial Sequence
  Description of Artificial Sequence: Synthetic oligonucleotide
  Sense strand starting at position 360 of SEQ ID NO: 1885817
acaugaaauugauaugaag

SEQ ID NO: 2369647 - RNA, 19 nt, Artificial Sequence
  Description of Artificial Sequence: Synthetic oligonucleotide
  Antisense strand to SEQ ID NO: 2369646
cuucauaucaauuucaugu

SEQ ID NO: 2369648 - RNA, 19 nt, Artificial Sequence
  Description of Artificial Sequence: Synthetic oligonucleotide
  Sense strand starting at position 423 of SEQ ID NO: 1885817
gaggauauuuaguaaagga

SEQ ID NO: 2369649 - RNA, 19 nt, Artificial Sequence
  Description of Artificial Sequence: Synthetic oligonucleotide
  Antisense strand to SEQ ID NO: 2369648
uccuuuacuaaauauccuc

SEQ ID NO: 2369650 - RNA, 19 nt, Artificial Sequence
  Description of Artificial Sequence: Synthetic oligonucleotide
  Sense strand starting at position 442 of SEQ ID NO: 1885817
gguacauugaccugagaau

SEQ ID NO: 2369651 - RNA, 19 nt, Artificial Sequence
  Description of Artificial Sequence: Synthetic oligonucleotide
  Antisense strand to SEQ ID NO: 2369650
auucucaggucaauguacc

SEQ ID NO: 2369652 - RNA, 19 nt, Artificial Sequence
  Description of Artificial Sequence: Synthetic oligonucleotide
  Sense strand starting at position 606 of SEQ ID NO: 1885817
ugaugaugccugggaggca

SEQ ID NO: 2369653 - RNA, 19 nt, Artificial Sequence
  Description of Artificial Sequence: Synthetic oligonucleotide
  Antisense strand to SEQ ID NO: 2369652
ugccucccaggcaucauca

SEQ ID NO: 2369654 - RNA, 19 nt, Artificial Sequence
  Description of Artificial Sequence: Synthetic oligonucleotide
  Sense strand starting at position 828 of SEQ ID NO: 1885817
gcacaugccauggaagagu

SEQ ID NO: 2369655 - RNA, 19 nt, Artificial Sequence
  Description of Artificial Sequence: Synthetic oligonucleotide
  Antisense strand to SEQ ID NO: 2369654
acucuuccauggcaugugc

SEQ ID NO: 2369656 - RNA, 19 nt, Artificial Sequence
  Description of Artificial Sequence: Synthetic oligonucleotide
  Sense strand starting at position 837 of SEQ ID NO: 1885817
auggaagagugcuuauauc

SEQ ID NO: 2369657 - RNA, 19 nt, Artificial Sequence
  Description of Artificial Sequence: Synthetic oligonucleotide
  Antisense strand to SEQ ID NO: 2369656
gauauaagcacucuuccau

SEQ ID NO: 2369658 - RNA, 19 nt, Artificial Sequence
  Description of Artificial Sequence: Synthetic oligonucleotide
  Sense strand starting at position 867 of SEQ ID NO: 1885817
ggccauucugaggaguaua

SEQ ID NO: 2369659 - RNA, 19 nt, Artificial Sequence
  Description of Artificial Sequence: Synthetic oligonucleotide
  Antisense strand to SEQ ID NO: 2369658
uauacuccucagaauggcc

SEQ ID NO: 2369660 - RNA, 19 nt, Artificial Sequence
  Description of Artificial Sequence: Synthetic oligonucleotide
  Sense strand starting at position 1073 of SEQ ID NO: 1885817
ucaucaucauugguccaga

SEQ ID NO: 2369661 - RNA, 19 nt, Artificial Sequence
  Description of Artificial Sequence: Synthetic oligonucleotide
  Antisense strand to SEQ ID NO: 2369660
ucuggaccaaugaugauga

SEQ ID NO: 2369662 - RNA, 19 nt, Artificial Sequence
  Description of Artificial Sequence: Synthetic oligonucleotide
  Sense strand starting at position 1087 of SEQ ID NO: 1885817
ccagaaauggcccaucuuu

SEQ ID NO: 2369663 - RNA, 19 nt, Artificial Sequence
  Description of Artificial Sequence: Synthetic oligonucleotide
  Antisense strand to SEQ ID NO: 2369662
aaagaugggccauuucugg

SEQ ID NO: 2369664 - RNA, 19 nt, Artificial Sequence
  Description of Artificial Sequence: Synthetic oligonucleotide
  Sense strand starting at position 1162 of SEQ ID NO: 1885817
uuuaaagugcuauaaugca

SEQ ID NO: 2369665 - RNA, 19 nt, Artificial Sequence
  Description of Artificial Sequence: Synthetic oligonucleotide
  Antisense strand to SEQ ID NO: 2369664
ugcauuauagcacuuuaaa

SEQ ID NO: 2369666 - RNA, 19 nt, Artificial Sequence
  Description of Artificial Sequence: Synthetic oligonucleotide
  Sense strand starting at position 1197 of SEQ ID NO: 1885817
ccucgaugucccuaauaug

SEQ ID NO: 2369667 - RNA, 19 nt, Artificial Sequence
  Description of Artificial Sequence: Synthetic oligonucleotide
  Antisense strand to SEQ ID NO: 2369666
cauauuagggacaucgagg

SEQ ID NO: 2369668 - RNA, 19 nt, Artificial Sequence
  Description of Artificial Sequence: Synthetic oligonucleotide
  Sense strand starting at position 1205 of SEQ ID NO: 1885817
ucccuaauauguguauaga

SEQ ID NO: 2369669 - RNA, 19 nt, Artificial Sequence
  Description of Artificial Sequence: Synthetic oligonucleotide
  Antisense strand to SEQ ID NO: 2369668
ucuauacacauauuaggga

SEQ ID NO: 2369670 - RNA, 19 nt, Artificial Sequence
  Description of Artificial Sequence: Synthetic oligonucleotide
  Sense strand starting at position 1206 of SEQ ID NO: 1885817
cccuaauauguguauagaa

SEQ ID NO: 2369671 - RNA, 19 nt, Artificial Sequence
  Description of Artificial Sequence: Synthetic oligonucleotide
  Antisense strand to SEQ ID NO: 2369670
uucuauacacauauuaggg

SEQ ID NO: 2369672 - RNA, 19 nt, Artificial Sequence
  Description of Artificial Sequence: Synthetic oligonucleotide
  Sense strand starting at position 1208 of SEQ ID NO: 1885817
cuaauauguguauagaauc

SEQ ID NO: 2369673 - RNA, 19 nt, Artificial Sequence
  Description of Artificial Sequence: Synthetic oligonucleotide
  Antisense strand to SEQ ID NO: 2369672
gauucuauacacauauuag

SEQ ID NO: 2369674 - RNA, 19 nt, Artificial Sequence
  Description of Artificial Sequence: Synthetic oligonucleotide
  Sense strand starting at position 1216 of SEQ ID NO: 1885817
uguauagaaucauucucag

SEQ ID NO: 2369675 - RNA, 19 nt, Artificial Sequence
  Description of Artificial Sequence: Synthetic oligonucleotide
  Antisense strand to SEQ ID NO: 2369674
cugagaaugauucuauaca

SEQ ID NO: 2369676 - RNA, 19 nt, Artificial Sequence
  Description of Artificial Sequence: Synthetic oligonucleotide
  Sense strand starting at position 1219 of SEQ ID NO: 1885817
auagaaucauucucagguc

SEQ ID NO: 2369677 - RNA, 19 nt, Artificial Sequence
  Description of Artificial Sequence: Synthetic oligonucleotide
  Antisense strand to SEQ ID NO: 2369676
gaccugagaaugauucuau

SEQ ID NO: 2369678 - RNA, 19 nt, Artificial Sequence
  Description of Artificial Sequence: Synthetic oligonucleotide
  Sense strand starting at position 1225 of SEQ ID NO: 1885817
ucauucucaggucaaugua

SEQ ID NO: 2369679 - RNA, 19 nt, Artificial Sequence
  Description of Artificial Sequence: Synthetic oligonucleotide
  Antisense strand to SEQ ID NO: 2369678
uacauugaccugagaauga

SEQ ID NO: 2369680 - RNA, 19 nt, Artificial Sequence
  Description of Artificial Sequence: Synthetic oligonucleotide
  Sense strand starting at position 1228 of SEQ ID NO: 1885817
uucucaggucaauguaacu

SEQ ID NO: 2369681 - RNA, 19 nt, Artificial Sequence
  Description of Artificial Sequence: Synthetic oligonucleotide
  Antisense strand to SEQ ID NO: 2369680
aguuacauugaccugagaa

SEQ ID NO: 2369682 - RNA, 19 nt, Artificial Sequence
  Description of Artificial Sequence: Synthetic oligonucleotide
  Sense strand starting at position 1381 of SEQ ID NO: 1885817
uguaguaacuauccuuuaa

SEQ ID NO: 2369683 - RNA, 19 nt, Artificial Sequence
  Description of Artificial Sequence: Synthetic oligonucleotide
  Antisense strand to SEQ ID NO: 2369682
uuaaaggauaguuacuaca

SEQ ID NO: 2369684 - RNA, 19 nt, Artificial Sequence
  Description of Artificial Sequence: Synthetic oligonucleotide
  Sense strand starting at position 1411 of SEQ ID NO: 1885817
agccaagaacauugacuau

SEQ ID NO: 2369685 - RNA, 19 nt, Artificial Sequence
  Description of Artificial Sequence: Synthetic oligonucleotide
  Antisense strand to SEQ ID NO: 2369684
auagucaauguucuuggcu

SEQ ID NO: 2369686 - RNA, 19 nt, Artificial Sequence
  Description of Artificial Sequence: Synthetic oligonucleotide
  Sense strand starting at position 1628 of SEQ ID NO: 1885817
uugggaggauauuacauuu

SEQ ID NO: 2369687 - RNA, 19 nt, Artificial Sequence
  Description of Artificial Sequence: Synthetic oligonucleotide
  Antisense strand to SEQ ID NO: 2369686
aaauguaauauccucccaa

SEQ ID NO: 2369688 - RNA, 19 nt, Artificial Sequence
  Description of Artificial Sequence: Synthetic oligonucleotide
  Sense strand starting at position 1679 of SEQ ID NO: 1885817
agacucagagcaugaacau

SEQ ID NO: 2369689 - RNA, 19 nt, Artificial Sequence
  Description of Artificial Sequence: Synthetic oligonucleotide
  Antisense strand to SEQ ID NO: 2369688
auguucaugcucugagucu

SEQ ID NO: 2369690 - RNA, 19 nt, Artificial Sequence
  Description of Artificial Sequence: Synthetic oligonucleotide
  Sense strand starting at position 1686 of SEQ ID NO: 1885817
gagcaugaacauugucuau

SEQ ID NO: 2369691 - RNA, 19 nt, Artificial Sequence
  Description of Artificial Sequence: Synthetic oligonucleotide
  Antisense strand to SEQ ID NO: 2369690
auagacaauguucaugcuc

SEQ ID NO: 2369692 - RNA, 19 nt, Artificial Sequence
  Description of Artificial Sequence: Synthetic oligonucleotide
  Sense strand starting at position 1688 of SEQ ID NO: 1885817
gcaugaacauugucuauaa

SEQ ID NO: 2369693 - RNA, 19 nt, Artificial Sequence
  Description of Artificial Sequence: Synthetic oligonucleotide
  Antisense strand to SEQ ID NO: 2369692
uuauagacaauguucaugc

SEQ ID NO: 2369694 - RNA, 19 nt, Artificial Sequence
  Description of Artificial Sequence: Synthetic oligonucleotide
  Sense strand starting at position 1816 of SEQ ID NO: 1885817
uuucuauauuuggacaaug

SEQ ID NO: 2369695 - RNA, 19 nt, Artificial Sequence
  Description of Artificial Sequence: Synthetic oligonucleotide
  Antisense strand to SEQ ID NO: 2369694
cauuguccaaauauagaaa

SEQ ID NO: 2369696 - RNA, 19 nt, Artificial Sequence
  Description of Artificial Sequence: Synthetic oligonucleotide
  Sense strand starting at position 1826 of SEQ ID NO: 1885817
uggacaaugccucaucuau

SEQ ID NO: 2369697 - RNA, 19 nt, Artificial Sequence
  Description of Artificial Sequence: Synthetic oligonucleotide
  Antisense strand to SEQ ID NO: 2369696
auagaugaggcauugucca

SEQ ID NO: 2369698 - RNA, 19 nt, Artificial Sequence
  Description of Artificial Sequence: Synthetic oligonucleotide
  Sense strand starting at position 2091 of SEQ ID NO: 1885817
gcaagagauuuauaucccu

SEQ ID NO: 2369699 - RNA, 19 nt, Artificial Sequence
  Description of Artificial Sequence: Synthetic oligonucleotide
  Antisense strand to SEQ ID NO: 2369698
agggauauaaaucucuugc

SEQ ID NO: 2369700 - RNA, 19 nt, Artificial Sequence
  Description of Artificial Sequence: Synthetic oligonucleotide
  Sense strand starting at position 2272 of SEQ ID NO: 1885817
agugacugcccauaaacaa

SEQ ID NO: 2369701 - RNA, 19 nt, Artificial Sequence
  Description of Artificial Sequence: Synthetic oligonucleotide
  Antisense strand to SEQ ID NO: 2369700
uuguuuaugggcagucacu

SEQ ID NO: 2369702 - RNA, 19 nt, Artificial Sequence
  Description of Artificial Sequence: Synthetic oligonucleotide
  Sense strand starting at position 2366 of SEQ ID NO: 1885817
gcuugugaccaaggaggaa

SEQ ID NO: 2369703 - RNA, 19 nt, Artificial Sequence
  Description of Artificial Sequence: Synthetic oligonucleotide
  Antisense strand to SEQ ID NO: 2369702
uuccuccuuggucacaagc

SEQ ID NO: 2369704 - RNA, 19 nt, Artificial Sequence
  Description of Artificial Sequence: Synthetic oligonucleotide
  Sense strand starting at position 2553 of SEQ ID NO: 1885817
cagaguaaaugagcuacau

SEQ ID NO: 2369705 - RNA, 19 nt, Artificial Sequence
  Description of Artificial Sequence: Synthetic oligonucleotide
  Antisense strand to SEQ ID NO: 2369704
auguagcucauuuacucug

SEQ ID NO: 2369706 - RNA, 19 nt, Artificial Sequence
  Description of Artificial Sequence: Synthetic oligonucleotide
  Sense strand starting at position 2638 of SEQ ID NO: 1885817
agucaucacugaucuagga

SEQ ID NO: 2369707 - RNA, 19 nt, Artificial Sequence
  Description of Artificial Sequence: Synthetic oligonucleotide
  Antisense strand to SEQ ID NO: 2369706
uccuagaucagugaugacu

SEQ ID NO: 2369708 - RNA, 19 nt, Artificial Sequence
  Description of Artificial Sequence: Synthetic oligonucleotide
  Sense strand starting at position 3072 of SEQ ID NO: 1885817
ggguaugaagcagagcaaa

SEQ ID NO: 2369709 - RNA, 19 nt, Artificial Sequence
  Description of Artificial Sequence: Synthetic oligonucleotide
  Antisense strand to SEQ ID NO: 2369708
uuugcucugcuucauaccc

SEQ ID NO: 2369710 - RNA, 19 nt, Artificial Sequence
  Description of Artificial Sequence: Synthetic oligonucleotide
  Sense strand starting at position 3154 of SEQ ID NO: 1885817
cuaggucauuuagguauuu

SEQ ID NO: 2369711 - RNA, 19 nt, Artificial Sequence
  Description of Artificial Sequence: Synthetic oligonucleotide
  Antisense strand to SEQ ID NO: 2369710
aaauaccuaaaugaccuag

SEQ ID NO: 2369712 - RNA, 19 nt, Artificial Sequence
  Description of Artificial Sequence: Synthetic oligonucleotide
  Sense strand starting at position 3343 of SEQ ID NO: 1885817
uuuguaaaugaaugucagu

SEQ ID NO: 2369713 - RNA, 19 nt, Artificial Sequence
  Description of Artificial Sequence: Synthetic oligonucleotide
  Antisense strand to SEQ ID NO: 2369712
acugacauucauuuacaaa

SEQ ID NO: 2369714 - RNA, 19 nt, Artificial Sequence
  Description of Artificial Sequence: Synthetic oligonucleotide
  Sense strand starting at position 3465 of SEQ ID NO: 1885817
uggaucuaucauugaucca

SEQ ID NO: 2369715 - RNA, 19 nt, Artificial Sequence
  Description of Artificial Sequence: Synthetic oligonucleotide
  Antisense strand to SEQ ID NO: 2369714
uggaucaaugauagaucca

SEQ ID NO: 2369716 - RNA, 19 nt, Artificial Sequence
  Description of Artificial Sequence: Synthetic oligonucleotide
  Sense strand starting at position 3659 of SEQ ID NO: 1885817
ucaucauugguccaugauu

SEQ ID NO: 2369717 - RNA, 19 nt, Artificial Sequence
  Description of Artificial Sequence: Synthetic oligonucleotide
  Antisense strand to SEQ ID NO: 2369716
aaucauggaccaaugauga

SEQ ID NO: 2369718 - RNA, 19 nt, Artificial Sequence
  Description of Artificial Sequence: Synthetic oligonucleotide
  Sense strand starting at position 3771 of SEQ ID NO: 1885817
ccaacaaggucuuugaaua

SEQ ID NO: 2369719 - RNA, 19 nt, Artificial Sequence
  Description of Artificial Sequence: Synthetic oligonucleotide
  Antisense strand to SEQ ID NO: 2369718
uauucaaagaccuuguugg

SEQ ID NO: 2369720 - RNA, 19 nt, Artificial Sequence
  Description of Artificial Sequence: Synthetic oligonucleotide
  Sense strand starting at position 3847 of SEQ ID NO: 1885817
cucaauguugcacaugaga

SEQ ID NO: 2369721 - RNA, 19 nt, Artificial Sequence
  Description of Artificial Sequence: Synthetic oligonucleotide
  Antisense strand to SEQ ID NO: 2369720
ucucaugugcaacauugag

SEQ ID NO: 2369722 - RNA, 19 nt, Artificial Sequence
  Description of Artificial Sequence: Synthetic oligonucleotide
  Sense strand starting at position 3909 of SEQ ID NO: 1885817
ugguuaacuguguauuaau

SEQ ID NO: 2369723 - RNA, 19 nt, Artificial Sequence
  Description of Artificial Sequence: Synthetic oligonucleotide
  Antisense strand to SEQ ID NO: 2369722
auuaauacacaguuaacca

SEQ ID NO: 2369724 - RNA, 19 nt, Artificial Sequence
  Description of Artificial Sequence: Synthetic oligonucleotide
  Sense strand starting at position 115 of SEQ ID NO: 1885818
gcugauacucaugauccau

SEQ ID NO: 2369725 - RNA, 19 nt, Artificial Sequence
  Description of Artificial Sequence: Synthetic oligonucleotide
  Antisense strand to SEQ ID NO: 2369724
auggaucaugaguaucagc

SEQ ID NO: 2369726 - RNA, 19 nt, Artificial Sequence
  Description of Artificial Sequence: Synthetic oligonucleotide
  Sense strand starting at position 385 of SEQ ID NO: 1885818
agaauaugaucuuugcaca

SEQ ID NO: 2369727 - RNA, 19 nt, Artificial Sequence
  Description of Artificial Sequence: Synthetic oligonucleotide
  Antisense strand to SEQ ID NO: 2369726
ugugcaaagaucauauucu

SEQ ID NO: 2369728 - RNA, 19 nt, Artificial Sequence
  Description of Artificial Sequence: Synthetic oligonucleotide
  Sense strand starting at position 430 of SEQ ID NO: 1885818
ucuguuggaccucagaguu

SEQ ID NO: 2369729 - RNA, 19 nt, Artificial Sequence
  Description of Artificial Sequence: Synthetic oligonucleotide
  Antisense strand to SEQ ID NO: 2369728
aacucugagguccaacaga

SEQ ID NO: 2369730 - RNA, 19 nt, Artificial Sequence
  Description of Artificial Sequence: Synthetic oligonucleotide
  Sense strand starting at position 495 of SEQ ID NO: 1885818
ucaucauugguccauguuu

SEQ ID NO: 2369731 - RNA, 19 nt, Artificial Sequence
  Description of Artificial Sequence: Synthetic oligonucleotide
  Antisense strand to SEQ ID NO: 2369730
aaacauggaccaaugauga

SEQ ID NO: 2369732 - RNA, 19 nt, Artificial Sequence
  Description of Artificial Sequence: Synthetic oligonucleotide
  Sense strand starting at position 677 of SEQ ID NO: 1885818
ugcucacaucuguauaagu

SEQ ID NO: 2369733 - RNA, 19 nt, Artificial Sequence
  Description of Artificial Sequence: Synthetic oligonucleotide
  Antisense strand to SEQ ID NO: 2369732
acuuauacagaugugagca

SEQ ID NO: 2369734 - RNA, 19 nt, Artificial Sequence
  Description of Artificial Sequence: Synthetic oligonucleotide
  Sense strand starting at position 679 of SEQ ID NO: 1885818
cucacaucuguauaaguuc

SEQ ID NO: 2369735 - RNA, 19 nt, Artificial Sequence
  Description of Artificial Sequence: Synthetic oligonucleotide
  Antisense strand to SEQ ID NO: 2369734
gaacuuauacagaugugag

SEQ ID NO: 2369736 - RNA, 19 nt, Artificial Sequence
  Description of Artificial Sequence: Synthetic oligonucleotide
  Sense strand starting at position 799 of SEQ ID NO: 1885818
uugugugcuggauauauac

SEQ ID NO: 2369737 - RNA, 19 nt, Artificial Sequence
  Description of Artificial Sequence: Synthetic oligonucleotide
  Antisense strand to SEQ ID NO: 2369736
guauauauccagcacacaa

SEQ ID NO: 2369738 - RNA, 19 nt, Artificial Sequence
  Description of Artificial Sequence: Synthetic oligonucleotide
  Sense strand starting at position 805 of SEQ ID NO: 1885818
gcuggauauauacguauuu

SEQ ID NO: 2369739 - RNA, 19 nt, Artificial Sequence
  Description of Artificial Sequence: Synthetic oligonucleotide
  Antisense strand to SEQ ID NO: 2369738
aaauacguauauauccagc

SEQ ID NO: 2369740 - RNA, 19 nt, Artificial Sequence
  Description of Artificial Sequence: Synthetic oligonucleotide
  Sense strand starting at position 858 of SEQ ID NO: 1885818
guuaaucuaccuggaaaga

SEQ ID NO: 2369741 - RNA, 19 nt, Artificial Sequence
  Description of Artificial Sequence: Synthetic oligonucleotide
  Antisense strand to SEQ ID NO: 2369740
ucuuuccagguagauuaac

SEQ ID NO: 2369742 - RNA, 19 nt, Artificial Sequence
  Description of Artificial Sequence: Synthetic oligonucleotide
  Sense strand starting at position 906 of SEQ ID NO: 1885818
auccauuaggucugaagca

SEQ ID NO: 2369743 - RNA, 19 nt, Artificial Sequence
  Description of Artificial Sequence: Synthetic oligonucleotide
  Antisense strand to SEQ ID NO: 2369742
ugcuucagaccuaauggau

SEQ ID NO: 2369744 - RNA, 19 nt, Artificial Sequence
  Description of Artificial Sequence: Synthetic oligonucleotide
  Sense strand starting at position 1061 of SEQ ID NO: 1885818
ggcgcuggucucccuaauu

SEQ ID NO: 2369745 - RNA, 19 nt, Artificial Sequence
  Description of Artificial Sequence: Synthetic oligonucleotide
  Antisense strand to SEQ ID NO: 2369744
aauuagggagaccagcgcc

SEQ ID NO: 2369746 - RNA, 19 nt, Artificial Sequence
  Description of Artificial Sequence: Synthetic oligonucleotide
  Sense strand starting at position 1224 of SEQ ID NO: 1885818
ccucaaaggugauuaauca

SEQ ID NO: 2369747 - RNA, 19 nt, Artificial Sequence
  Description of Artificial Sequence: Synthetic oligonucleotide
  Antisense strand to SEQ ID NO: 2369746
ugauuaaucaccuuugagg

SEQ ID NO: 2369748 - RNA, 19 nt, Artificial Sequence
  Description of Artificial Sequence: Synthetic oligonucleotide
  Sense strand starting at position 1317 of SEQ ID NO: 1885818
ucaaauaaagaguguaugu

SEQ ID NO: 2369749 - RNA, 19 nt, Artificial Sequence
  Description of Artificial Sequence: Synthetic oligonucleotide
  Antisense strand to SEQ ID NO: 2369748
acauacacucuuuauuuga

SEQ ID NO: 2369750 - RNA, 19 nt, Artificial Sequence
  Description of Artificial Sequence: Synthetic oligonucleotide
  Sense strand starting at position 1324 of SEQ ID NO: 1885818
aagaguguauguccacaaa

SEQ ID NO: 2369751 - RNA, 19 nt, Artificial Sequence
  Description of Artificial Sequence: Synthetic oligonucleotide
  Antisense strand to SEQ ID NO: 2369750
uuuguggacauacacucuu

SEQ ID NO: 2369752 - RNA, 19 nt, Artificial Sequence
  Description of Artificial Sequence: Synthetic oligonucleotide
  Sense strand starting at position 1525 of SEQ ID NO: 1885818
ucacuuagguguuuauuaa

SEQ ID NO: 2369753 - RNA, 19 nt, Artificial Sequence
  Description of Artificial Sequence: Synthetic oligonucleotide
  Antisense strand to SEQ ID NO: 2369752
uuaauaaacaccuaaguga

SEQ ID NO: 2369754 - RNA, 19 nt, Artificial Sequence
  Description of Artificial Sequence: Synthetic oligonucleotide
  Sense strand starting at position 1591 of SEQ ID NO: 1885818
ugguuugaaccacaguaau

SEQ ID NO: 2369755 - RNA, 19 nt, Artificial Sequence
  Description of Artificial Sequence: Synthetic oligonucleotide
  Antisense strand to SEQ ID NO: 2369754
auuacugugguucaaacca

SEQ ID NO: 2369756 - RNA, 19 nt, Artificial Sequence
  Description of Artificial Sequence: Synthetic oligonucleotide
  Sense strand starting at position 1624 of SEQ ID NO: 1885818
uuuaucagugucuauauga

SEQ ID NO: 2369757 - RNA, 19 nt, Artificial Sequence
  Description of Artificial Sequence: Synthetic oligonucleotide
  Antisense strand to SEQ ID NO: 2369756
ucauauagacacugauaaa

SEQ ID NO: 2369758 - RNA, 19 nt, Artificial Sequence
  Description of Artificial Sequence: Synthetic oligonucleotide
  Sense strand starting at position 1631 of SEQ ID NO: 1885818
gugucuauaugaucauuaa

SEQ ID NO: 2369759 - RNA, 19 nt, Artificial Sequence
  Description of Artificial Sequence: Synthetic oligonucleotide
  Antisense strand to SEQ ID NO: 2369758
uuaaugaucauauagacac

SEQ ID NO: 2369760 - RNA, 19 nt, Artificial Sequence
  Description of Artificial Sequence: Synthetic oligonucleotide
  Sense strand starting at position 1649 of SEQ ID NO: 1885818
aggguaacacuuugaucca

SEQ ID NO: 2369761 - RNA, 19 nt, Artificial Sequence
  Description of Artificial Sequence: Synthetic oligonucleotide
  Antisense strand to SEQ ID NO: 2369760
uggaucaaaguguuacccu

SEQ ID NO: 2369762 - RNA, 19 nt, Artificial Sequence
  Description of Artificial Sequence: Synthetic oligonucleotide
  Sense strand starting at position 1671 of SEQ ID NO: 1885818
auuucuuaaugggaauagu

SEQ ID NO: 2369763 - RNA, 19 nt, Artificial Sequence
  Description of Artificial Sequence: Synthetic oligonucleotide
  Antisense strand to SEQ ID NO: 2369762
acuauucccauuaagaaau

SEQ ID NO: 2369764 - RNA, 19 nt, Artificial Sequence
  Description of Artificial Sequence: Synthetic oligonucleotide
  Sense strand starting at position 1674 of SEQ ID NO: 1885818
ucuuaaugggaauaguguu

SEQ ID NO: 2369765 - RNA, 19 nt, Artificial Sequence
  Description of Artificial Sequence: Synthetic oligonucleotide
  Antisense strand to SEQ ID NO: 2369764
aacacuauucccauuaaga

SEQ ID NO: 2369766 - RNA, 19 nt, Artificial Sequence
  Description of Artificial Sequence: Synthetic oligonucleotide
  Sense strand starting at position 1884 of SEQ ID NO: 1885818
ggauuuccaucagaguaau

SEQ ID NO: 2369767 - RNA, 19 nt, Artificial Sequence
  Description of Artificial Sequence: Synthetic oligonucleotide
  Antisense strand to SEQ ID NO: 2369766
auuacucugauggaaaucc

SEQ ID NO: 2369768 - RNA, 19 nt, Artificial Sequence
  Description of Artificial Sequence: Synthetic oligonucleotide
  Sense strand starting at position 1890 of SEQ ID NO: 1885818
ccaucagaguaauuagacu

SEQ ID NO: 2369769 - RNA, 19 nt, Artificial Sequence
  Description of Artificial Sequence: Synthetic oligonucleotide
  Antisense strand to SEQ ID NO: 2369768
agucuaauuacucugaugg

SEQ ID NO: 2369770 - RNA, 19 nt, Artificial Sequence
  Description of Artificial Sequence: Synthetic oligonucleotide
  Sense strand starting at position 2192 of SEQ ID NO: 1885818
auuaaucauccacaguguu

SEQ ID NO: 2369771 - RNA, 19 nt, Artificial Sequence
  Description of Artificial Sequence: Synthetic oligonucleotide
  Antisense strand to SEQ ID NO: 2369770
aacacuguggaugauuaau

SEQ ID NO: 2369772 - RNA, 19 nt, Artificial Sequence
  Description of Artificial Sequence: Synthetic oligonucleotide
  Sense strand starting at position 2271 of SEQ ID NO: 1885818
uggcuuucuuugguuauuu

SEQ ID NO: 2369773 - RNA, 19 nt, Artificial Sequence
  Description of Artificial Sequence: Synthetic oligonucleotide
  Antisense strand to SEQ ID NO: 2369772
aaauaaccaaagaaagcca

SEQ ID NO: 2369774 - RNA, 19 nt, Artificial Sequence
  Description of Artificial Sequence: Synthetic oligonucleotide
  Sense strand starting at position 2272 of SEQ ID NO: 1885818
ggcuuucuuugguuauuua

SEQ ID NO: 2369775 - RNA, 19 nt, Artificial Sequence
  Description of Artificial Sequence: Synthetic oligonucleotide
  Antisense strand to SEQ ID NO: 2369774
uaaauaaccaaagaaagcc

SEQ ID NO: 2369776 - RNA, 19 nt, Artificial Sequence
  Description of Artificial Sequence: Synthetic oligonucleotide
  Sense strand starting at position 2417 of SEQ ID NO: 1885818
gcagaaggccuguaaguac

SEQ ID NO: 2369777 - RNA, 19 nt, Artificial Sequence
  Description of Artificial Sequence: Synthetic oligonucleotide
  Antisense strand to SEQ ID NO: 2369776
guacuuacaggccuucugc

SEQ ID NO: 2369778 - RNA, 19 nt, Artificial Sequence
  Description of Artificial Sequence: Synthetic oligonucleotide
  Sense strand starting at position 2689 of SEQ ID NO: 1885818
uuuguaauuggacaguacu

SEQ ID NO: 2369779 - RNA, 19 nt, Artificial Sequence
  Description of Artificial Sequence: Synthetic oligonucleotide
  Antisense strand to SEQ ID NO: 2369778
aguacuguccaauuacaaa

SEQ ID NO: 2369780 - RNA, 19 nt, Artificial Sequence
  Description of Artificial Sequence: Synthetic oligonucleotide
  Sense strand starting at position 3006 of SEQ ID NO: 1885818
uaaaucugucuauagggua

SEQ ID NO: 2369781 - RNA, 19 nt, Artificial Sequence
  Description of Artificial Sequence: Synthetic oligonucleotide
  Antisense strand to SEQ ID NO: 2369780
uacccuauagacagauuua

SEQ ID NO: 2369782 - RNA, 19 nt, Artificial Sequence
  Description of Artificial Sequence: Synthetic oligonucleotide
  Sense strand starting at position 3043 of SEQ ID NO: 1885818
cagagucaucauugacuga

SEQ ID NO: 2369783 - RNA, 19 nt, Artificial Sequence
  Description of Artificial Sequence: Synthetic oligonucleotide
  Antisense strand to SEQ ID NO: 2369782
ucagucaaugaugacucug

SEQ ID NO: 2369784 - RNA, 19 nt, Artificial Sequence
  Description of Artificial Sequence: Synthetic oligonucleotide
  Sense strand starting at position 3046 of SEQ ID NO: 1885818
agucaucauugacugaaga

SEQ ID NO: 2369785 - RNA, 19 nt, Artificial Sequence
  Description of Artificial Sequence: Synthetic oligonucleotide
  Antisense strand to SEQ ID NO: 2369784
ucuucagucaaugaugacu

SEQ ID NO: 2369786 - RNA, 19 nt, Artificial Sequence
  Description of Artificial Sequence: Synthetic oligonucleotide
  Sense strand starting at position 3047 of SEQ ID NO: 1885818
gucaucauugacugaagac

SEQ ID NO: 2369787 - RNA, 19 nt, Artificial Sequence
  Description of Artificial Sequence: Synthetic oligonucleotide
  Antisense strand to SEQ ID NO: 2369786
gucuucagucaaugaugac

SEQ ID NO: 2369788 - RNA, 19 nt, Artificial Sequence
  Description of Artificial Sequence: Synthetic oligonucleotide
  Sense strand starting at position 3170 of SEQ ID NO: 1885818
uguauagcucucuauagga

SEQ ID NO: 2369789 - RNA, 19 nt, Artificial Sequence
  Description of Artificial Sequence: Synthetic oligonucleotide
  Antisense strand to SEQ ID NO: 2369788
uccuauagagagcuauaca

SEQ ID NO: 2369790 - RNA, 19 nt, Artificial Sequence
  Description of Artificial Sequence: Synthetic oligonucleotide
  Sense strand starting at position 3261 of SEQ ID NO: 1885818
auggcaaugccauaauuac

SEQ ID NO: 2369791 - RNA, 19 nt, Artificial Sequence
  Description of Artificial Sequence: Synthetic oligonucleotide
  Antisense strand to SEQ ID NO: 2369790
guaauuauggcauugccau

SEQ ID NO: 2369792 - RNA, 19 nt, Artificial Sequence
  Description of Artificial Sequence: Synthetic oligonucleotide
  Sense strand starting at position 3301 of SEQ ID NO: 1885818
uuggauuaucuguaauguu

SEQ ID NO: 2369793 - RNA, 19 nt, Artificial Sequence
  Description of Artificial Sequence: Synthetic oligonucleotide
  Antisense strand to SEQ ID NO: 2369792
aacauuacagauaauccaa

SEQ ID NO: 2369794 - RNA, 19 nt, Artificial Sequence
  Description of Artificial Sequence: Synthetic oligonucleotide
  Sense strand starting at position 3459 of SEQ ID NO: 1885818
gaggguguucauugugaga

SEQ ID NO: 2369795 - RNA, 19 nt, Artificial Sequence
  Description of Artificial Sequence: Synthetic oligonucleotide
  Antisense strand to SEQ ID NO: 2369794
ucucacaaugaacacccuc

SEQ ID NO: 2369796 - RNA, 19 nt, Artificial Sequence
  Description of Artificial Sequence: Synthetic oligonucleotide
  Sense strand starting at position 3503 of SEQ ID NO: 1885818
uggaaauauucuguccauu

SEQ ID NO: 2369797 - RNA, 19 nt, Artificial Sequence
  Description of Artificial Sequence: Synthetic oligonucleotide
  Antisense strand to SEQ ID NO: 2369796
aauggacagaauauuucca

SEQ ID NO: 2369798 - RNA, 19 nt, Artificial Sequence
  Description of Artificial Sequence: Synthetic oligonucleotide
  Sense strand starting at position 3626 of SEQ ID NO: 1885818
ccucacauacguuauuauu

SEQ ID NO: 2369799 - RNA, 19 nt, Artificial Sequence
  Description of Artificial Sequence: Synthetic oligonucleotide
  Antisense strand to SEQ ID NO: 2369798
aauaauaacguaugugagg

SEQ ID NO: 2369800 - RNA, 19 nt, Artificial Sequence
  Description of Artificial Sequence: Synthetic oligonucleotide
  Sense strand starting at position 3677 of SEQ ID NO: 1885818
gaguaauaccucugaguca

SEQ ID NO: 2369801 - RNA, 19 nt, Artificial Sequence
  Description of Artificial Sequence: Synthetic oligonucleotide
  Antisense strand to SEQ ID NO: 2369800
ugacucagagguauuacuc

SEQ ID NO: 2369802 - RNA, 19 nt, Artificial Sequence
  Description of Artificial Sequence: Synthetic oligonucleotide
  Sense strand starting at position 3908 of SEQ ID NO: 1885818
ugucuaucccuaggauaga

SEQ ID NO: 2369803 - RNA, 19 nt, Artificial Sequence
  Description of Artificial Sequence: Synthetic oligonucleotide
  Antisense strand to SEQ ID NO: 2369802
ucuauccuagggauagaca

SEQ ID NO: 2369804 - RNA, 19 nt, Artificial Sequence
  Description of Artificial Sequence: Synthetic oligonucleotide
  Sense strand starting at position 74 of SEQ ID NO: 1885819
gauccagaauguguccuau

SEQ ID NO: 2369805 - RNA, 19 nt, Artificial Sequence
  Description of Artificial Sequence: Synthetic oligonucleotide
  Antisense strand to SEQ ID NO: 2369804
auaggacacauucuggauc

SEQ ID NO: 2369806 - RNA, 19 nt, Artificial Sequence
  Description of Artificial Sequence: Synthetic oligonucleotide
  Sense strand starting at position 175 of SEQ ID NO: 1885819
gccucagaacagcauuaau

SEQ ID NO: 2369807 - RNA, 19 nt, Artificial Sequence
  Description of Artificial Sequence: Synthetic oligonucleotide
  Antisense strand to SEQ ID NO: 2369806
auuaaugcuguucugaggc

SEQ ID NO: 2369808 - RNA, 19 nt, Artificial Sequence
  Description of Artificial Sequence: Synthetic oligonucleotide
  Sense strand starting at position 404 of SEQ ID NO: 1885819
gaacuugauuacucacgua

SEQ ID NO: 2369809 - RNA, 19 nt, Artificial Sequence
  Description of Artificial Sequence: Synthetic oligonucleotide
  Antisense strand to SEQ ID NO: 2369808
uacgugaguaaucaaguuc

SEQ ID NO: 2369810 - RNA, 19 nt, Artificial Sequence
  Description of Artificial Sequence: Synthetic oligonucleotide
  Sense strand starting at position 681 of SEQ ID NO: 1885819
ucuguaauuuauucugucu

SEQ ID NO: 2369811 - RNA, 19 nt, Artificial Sequence
  Description of Artificial Sequence: Synthetic oligonucleotide
  Antisense strand to SEQ ID NO: 2369810
agacagaauaaauuacaga

SEQ ID NO: 2369812 - RNA, 19 nt, Artificial Sequence
  Description of Artificial Sequence: Synthetic oligonucleotide
  Sense strand starting at position 849 of SEQ ID NO: 1885819
ugauucuugcauuagaaug

SEQ ID NO: 2369813 - RNA, 19 nt, Artificial Sequence
  Description of Artificial Sequence: Synthetic oligonucleotide
  Antisense strand to SEQ ID NO: 2369812
cauucuaaugcaagaauca

SEQ ID NO: 2369814 - RNA, 19 nt, Artificial Sequence
  Description of Artificial Sequence: Synthetic oligonucleotide
  Sense strand starting at position 955 of SEQ ID NO: 1885819
ugugguggaccucagaguu

SEQ ID NO: 2369815 - RNA, 19 nt, Artificial Sequence
  Description of Artificial Sequence: Synthetic oligonucleotide
  Antisense strand to SEQ ID NO: 2369814
aacucugagguccaccaca

SEQ ID NO: 2369816 - RNA, 19 nt, Artificial Sequence
  Description of Artificial Sequence: Synthetic oligonucleotide
  Sense strand starting at position 1015 of SEQ ID NO: 1885819
ggucaucauugauccagga

SEQ ID NO: 2369817 - RNA, 19 nt, Artificial Sequence
  Description of Artificial Sequence: Synthetic oligonucleotide
  Antisense strand to SEQ ID NO: 2369816
uccuggaucaaugaugacc

SEQ ID NO: 2369818 - RNA, 19 nt, Artificial Sequence
  Description of Artificial Sequence: Synthetic oligonucleotide
  Sense strand starting at position 1148 of SEQ ID NO: 1885819
ucugaucuguauccagaau

SEQ ID NO: 2369819 - RNA, 19 nt, Artificial Sequence
  Description of Artificial Sequence: Synthetic oligonucleotide
  Antisense strand to SEQ ID NO: 2369818
auucuggauacagaucaga

SEQ ID NO: 2369820 - RNA, 19 nt, Artificial Sequence
  Description of Artificial Sequence: Synthetic oligonucleotide
  Sense strand starting at position 1236 of SEQ ID NO: 1885819
caugucuaccaucgggaua

SEQ ID NO: 2369821 - RNA, 19 nt, Artificial Sequence
  Description of Artificial Sequence: Synthetic oligonucleotide
  Antisense strand to SEQ ID NO: 2369820
uaucccgaugguagacaug

SEQ ID NO: 2369822 - RNA, 19 nt, Artificial Sequence
  Description of Artificial Sequence: Synthetic oligonucleotide
  Sense strand starting at position 1237 of SEQ ID NO: 1885819
augucuaccaucgggauaa

SEQ ID NO: 2369823 - RNA, 19 nt, Artificial Sequence
  Description of Artificial Sequence: Synthetic oligonucleotide
  Antisense strand to SEQ ID NO: 2369822
uuaucccgaugguagacau

SEQ ID NO: 2369824 - RNA, 19 nt, Artificial Sequence
  Description of Artificial Sequence: Synthetic oligonucleotide
  Sense strand starting at position 1239 of SEQ ID NO: 1885819
gucuaccaucgggauaaca

SEQ ID NO: 2369825 - RNA, 19 nt, Artificial Sequence
  Description of Artificial Sequence: Synthetic oligonucleotide
  Antisense strand to SEQ ID NO: 2369824
uguuaucccgaugguagac

SEQ ID NO: 2369826 - RNA, 19 nt, Artificial Sequence
  Description of Artificial Sequence: Synthetic oligonucleotide
  Sense strand starting at position 1247 of SEQ ID NO: 1885819
ucgggauaacauugaccau

SEQ ID NO: 2369827 - RNA, 19 nt, Artificial Sequence
  Description of Artificial Sequence: Synthetic oligonucleotide
  Antisense strand to SEQ ID NO: 2369826
auggucaauguuaucccga

SEQ ID NO: 2369828 - RNA, 19 nt, Artificial Sequence
  Description of Artificial Sequence: Synthetic oligonucleotide
  Sense strand starting at position 1653 of SEQ ID NO: 1885819
gugacagacacguaccauu

SEQ ID NO: 2369829 - RNA, 19 nt, Artificial Sequence
  Description of Artificial Sequence: Synthetic oligonucleotide
  Antisense strand to SEQ ID NO: 2369828
aaugguacgugucugucac

SEQ ID NO: 2369830 - RNA, 19 nt, Artificial Sequence
  Description of Artificial Sequence: Synthetic oligonucleotide
  Sense strand starting at position 1785 of SEQ ID NO: 1885819
guuuauugauucucacauu

SEQ ID NO: 2369831 - RNA, 19 nt, Artificial Sequence
  Description of Artificial Sequence: Synthetic oligonucleotide
  Antisense strand to SEQ ID NO: 2369830
aaugugagaaucaauaaac

SEQ ID NO: 2369832 - RNA, 19 nt, Artificial Sequence
  Description of Artificial Sequence: Synthetic oligonucleotide
  Sense strand starting at position 2233 of SEQ ID NO: 1885819
cuagaauacuacucgacau

SEQ ID NO: 2369833 - RNA, 19 nt, Artificial Sequence
  Description of Artificial Sequence: Synthetic oligonucleotide
  Antisense strand to SEQ ID NO: 2369832
augucgaguaguauucuag

SEQ ID NO: 2369834 - RNA, 19 nt, Artificial Sequence
  Description of Artificial Sequence: Synthetic oligonucleotide
  Sense strand starting at position 2243 of SEQ ID NO: 1885819
acucgacaucuuugauuau

SEQ ID NO: 2369835 - RNA, 19 nt, Artificial Sequence
  Description of Artificial Sequence: Synthetic oligonucleotide
  Antisense strand to SEQ ID NO: 2369834
auaaucaaagaugucgagu

SEQ ID NO: 2369836 - RNA, 19 nt, Artificial Sequence
  Description of Artificial Sequence: Synthetic oligonucleotide
  Sense strand starting at position 2622 of SEQ ID NO: 1885819
acucuuagugucuauauga

SEQ ID NO: 2369837 - RNA, 19 nt, Artificial Sequence
  Description of Artificial Sequence: Synthetic oligonucleotide
  Antisense strand to SEQ ID NO: 2369836
ucauauagacacuaagagu

SEQ ID NO: 2369838 - RNA, 19 nt, Artificial Sequence
  Description of Artificial Sequence: Synthetic oligonucleotide
  Sense strand starting at position 2629 of SEQ ID NO: 1885819
gugucuauaugaucuuaag

SEQ ID NO: 2369839 - RNA, 19 nt, Artificial Sequence
  Description of Artificial Sequence: Synthetic oligonucleotide
  Antisense strand to SEQ ID NO: 2369838
cuuaagaucauauagacac

SEQ ID NO: 2369840 - RNA, 19 nt, Artificial Sequence
  Description of Artificial Sequence: Synthetic oligonucleotide
  Sense strand starting at position 2635 of SEQ ID NO: 1885819
auaugaucuuaagccaaag

SEQ ID NO: 2369841 - RNA, 19 nt, Artificial Sequence
  Description of Artificial Sequence: Synthetic oligonucleotide
  Antisense strand to SEQ ID NO: 2369840
cuuuggcuuaagaucauau

SEQ ID NO: 2369842 - RNA, 19 nt, Artificial Sequence
  Description of Artificial Sequence: Synthetic oligonucleotide
  Sense strand starting at position 2681 of SEQ ID NO: 1885819
auucuuaauggaugucagu

SEQ ID NO: 2369843 - RNA, 19 nt, Artificial Sequence
  Description of Artificial Sequence: Synthetic oligonucleotide
  Antisense strand to SEQ ID NO: 2369842
acugacauccauuaagaau

SEQ ID NO: 2369844 - RNA, 19 nt, Artificial Sequence
  Description of Artificial Sequence: Synthetic oligonucleotide
  Sense strand starting at position 2856 of SEQ ID NO: 1885819
auaagaacauggucuuuau

SEQ ID NO: 2369845 - RNA, 19 nt, Artificial Sequence
  Description of Artificial Sequence: Synthetic oligonucleotide
  Antisense strand to SEQ ID NO: 2369844
auaaagaccauguucuuau

SEQ ID NO: 2369846 - RNA, 19 nt, Artificial Sequence
  Description of Artificial Sequence: Synthetic oligonucleotide
  Sense strand starting at position 2881 of SEQ ID NO: 1885819
caaacaucugucuguagga

SEQ ID NO: 2369847 - RNA, 19 nt, Artificial Sequence
  Description of Artificial Sequence: Synthetic oligonucleotide
  Antisense strand to SEQ ID NO: 2369846
uccuacagacagauguuug

SEQ ID NO: 2369848 - RNA, 19 nt, Artificial Sequence
  Description of Artificial Sequence: Synthetic oligonucleotide
  Sense strand starting at position 2882 of SEQ ID NO: 1885819
aaacaucugucuguaggau

SEQ ID NO: 2369849 - RNA, 19 nt, Artificial Sequence
  Description of Artificial Sequence: Synthetic oligonucleotide
  Antisense strand to SEQ ID NO: 2369848
auccuacagacagauguuu

SEQ ID NO: 2369850 - RNA, 19 nt, Artificial Sequence
  Description of Artificial Sequence: Synthetic oligonucleotide
  Sense strand starting at position 2883 of SEQ ID NO: 1885819
aacaucugucuguaggauu

SEQ ID NO: 2369851 - RNA, 19 nt, Artificial Sequence
  Description of Artificial Sequence: Synthetic oligonucleotide
  Antisense strand to SEQ ID NO: 2369850
aauccuacagacagauguu

SEQ ID NO: 2369852 - RNA, 19 nt, Artificial Sequence
  Description of Artificial Sequence: Synthetic oligonucleotide
  Sense strand starting at position 2891 of SEQ ID NO: 1885819
ucuguaggauuauuccaaa

SEQ ID NO: 2369853 - RNA, 19 nt, Artificial Sequence
  Description of Artificial Sequence: Synthetic oligonucleotide
  Antisense strand to SEQ ID NO: 2369852
uuuggaauaauccuacaga

SEQ ID NO: 2369854 - RNA, 19 nt, Artificial Sequence
  Description of Artificial Sequence: Synthetic oligonucleotide
  Sense strand starting at position 2995 of SEQ ID NO: 1885819
auuuguuaucguuguucua

SEQ ID NO: 2369855 - RNA, 19 nt, Artificial Sequence
  Description of Artificial Sequence: Synthetic oligonucleotide
  Antisense strand to SEQ ID NO: 2369854
uagaacaacgauaacaaau

SEQ ID NO: 2369856 - RNA, 19 nt, Artificial Sequence
  Description of Artificial Sequence: Synthetic oligonucleotide
  Sense strand starting at position 2996 of SEQ ID NO: 1885819
uuuguuaucguuguucuau

SEQ ID NO: 2369857 - RNA, 19 nt, Artificial Sequence
  Description of Artificial Sequence: Synthetic oligonucleotide
  Antisense strand to SEQ ID NO: 2369856
auagaacaacgauaacaaa

SEQ ID NO: 2369858 - RNA, 19 nt, Artificial Sequence
  Description of Artificial Sequence: Synthetic oligonucleotide
  Sense strand starting at position 3047 of SEQ ID NO: 1885819
aucuuacauuugcagagaa

SEQ ID NO: 2369859 - RNA, 19 nt, Artificial Sequence
  Description of Artificial Sequence: Synthetic oligonucleotide
  Antisense strand to SEQ ID NO: 2369858
uucucugcaaauguaagau

SEQ ID NO: 2369860 - RNA, 19 nt, Artificial Sequence
  Description of Artificial Sequence: Synthetic oligonucleotide
  Sense strand starting at position 3231 of SEQ ID NO: 1885819
uuguuauugggccauaaau

SEQ ID NO: 2369861 - RNA, 19 nt, Artificial Sequence
  Description of Artificial Sequence: Synthetic oligonucleotide
  Antisense strand to SEQ ID NO: 2369860
auuuauggcccaauaacaa

SEQ ID NO: 2369862 - RNA, 19 nt, Artificial Sequence
  Description of Artificial Sequence: Synthetic oligonucleotide
  Sense strand starting at position 3233 of SEQ ID NO: 1885819
guuauugggccauaaauaa

SEQ ID NO: 2369863 - RNA, 19 nt, Artificial Sequence
  Description of Artificial Sequence: Synthetic oligonucleotide
  Antisense strand to SEQ ID NO: 2369862
uuauuuauggcccaauaac

SEQ ID NO: 2369864 - RNA, 19 nt, Artificial Sequence
  Description of Artificial Sequence: Synthetic oligonucleotide
  Sense strand starting at position 3362 of SEQ ID NO: 1885819
acaugagaaacuugaucgu

SEQ ID NO: 2369865 - RNA, 19 nt, Artificial Sequence
  Description of Artificial Sequence: Synthetic oligonucleotide
  Antisense strand to SEQ ID NO: 2369864
acgaucaaguuucucaugu

SEQ ID NO: 2369866 - RNA, 19 nt, Artificial Sequence
  Description of Artificial Sequence: Synthetic oligonucleotide
  Sense strand starting at position 3498 of SEQ ID NO: 1885819
ccuagucauuuagguauuu

SEQ ID NO: 2369867 - RNA, 19 nt, Artificial Sequence
  Description of Artificial Sequence: Synthetic oligonucleotide
  Antisense strand to SEQ ID NO: 2369866
aaauaccuaaaugacuagg

SEQ ID NO: 2369868 - RNA, 19 nt, Artificial Sequence
  Description of Artificial Sequence: Synthetic oligonucleotide
  Sense strand starting at position 3582 of SEQ ID NO: 1885819
gcaauaacuggcuauuacu

SEQ ID NO: 2369869 - RNA, 19 nt, Artificial Sequence
  Description of Artificial Sequence: Synthetic oligonucleotide
  Antisense strand to SEQ ID NO: 2369868
aguaauagccaguuauugc

SEQ ID NO: 2369870 - RNA, 19 nt, Artificial Sequence
  Description of Artificial Sequence: Synthetic oligonucleotide
  Sense strand starting at position 3766 of SEQ ID NO: 1885819
guacauguauuugcuuauu

SEQ ID NO: 2369871 - RNA, 19 nt, Artificial Sequence
  Description of Artificial Sequence: Synthetic oligonucleotide
  Antisense strand to SEQ ID NO: 2369870
aauaagcaaauacauguac

SEQ ID NO: 2369872 - RNA, 19 nt, Artificial Sequence
  Description of Artificial Sequence: Synthetic oligonucleotide
  Sense strand starting at position 3768 of SEQ ID NO: 1885819
acauguauuugcuuauucu

SEQ ID NO: 2369873 - RNA, 19 nt, Artificial Sequence
  Description of Artificial Sequence: Synthetic oligonucleotide
  Antisense strand to SEQ ID NO: 2369872
agaauaagcaaauacaugu

SEQ ID NO: 2369874 - RNA, 19 nt, Artificial Sequence
  Description of Artificial Sequence: Synthetic oligonucleotide
  Sense strand starting at position 3772 of SEQ ID NO: 1885819
guauuugcuuauucugcua

SEQ ID NO: 2369875 - RNA, 19 nt, Artificial Sequence
  Description of Artificial Sequence: Synthetic oligonucleotide
  Antisense strand to SEQ ID NO: 2369874
uagcagaauaagcaaauac

SEQ ID NO: 2369876 - RNA, 19 nt, Artificial Sequence
  Description of Artificial Sequence: Synthetic oligonucleotide
  Sense strand starting at position 3845 of SEQ ID NO: 1885819
ccuuguauauuuccgguau

SEQ ID NO: 2369877 - RNA, 19 nt, Artificial Sequence
  Description of Artificial Sequence: Synthetic oligonucleotide
  Antisense strand to SEQ ID NO: 2369876
auaccggaaauauacaagg

SEQ ID NO: 2369878 - RNA, 19 nt, Artificial Sequence
  Description of Artificial Sequence: Synthetic oligonucleotide
  Sense strand starting at position 3849 of SEQ ID NO: 1885819
guauauuuccgguaucugu

SEQ ID NO: 2369879 - RNA, 19 nt, Artificial Sequence
  Description of Artificial Sequence: Synthetic oligonucleotide
  Antisense strand to SEQ ID NO: 2369878
acagauaccggaaauauac

SEQ ID NO: 2369880 - RNA, 19 nt, Artificial Sequence
  Description of Artificial Sequence: Synthetic oligonucleotide
  Sense strand starting at position 3911 of SEQ ID NO: 1885819
guguuuggaccucaaaguu

SEQ ID NO: 2369881 - RNA, 19 nt, Artificial Sequence
  Description of Artificial Sequence: Synthetic oligonucleotide
  Antisense strand to SEQ ID NO: 2369880
aacuuugagguccaaacac

SEQ ID NO: 2369882 - RNA, 19 nt, Artificial Sequence
  Description of Artificial Sequence: Synthetic oligonucleotide
  Sense strand starting at position 3982 of SEQ ID NO: 1885819
accacuugucaucaacagu

SEQ ID NO: 2369883 - RNA, 19 nt, Artificial Sequence
  Description of Artificial Sequence: Synthetic oligonucleotide
  Antisense strand to SEQ ID NO: 2369882
acuguugaugacaaguggu

SEQ ID NO: 2369884 - RNA, 19 nt, Artificial Sequence
  Description of Artificial Sequence: Synthetic oligonucleotide
  Sense strand starting at position 12 of SEQ ID NO: 1885820
uuccauugugauggacgau

SEQ ID NO: 2369885 - RNA, 19 nt, Artificial Sequence
  Description of Artificial Sequence: Synthetic oligonucleotide
  Antisense strand to SEQ ID NO: 2369884
aucguccaucacaauggaa

SEQ ID NO: 2369886 - RNA, 19 nt, Artificial Sequence
  Description of Artificial Sequence: Synthetic oligonucleotide
  Sense strand starting at position 15 of SEQ ID NO: 1885820
cauugugauggacgaugga

SEQ ID NO: 2369887 - RNA, 19 nt, Artificial Sequence
  Description of Artificial Sequence: Synthetic oligonucleotide
  Antisense strand to SEQ ID NO: 2369886
uccaucguccaucacaaug

SEQ ID NO: 2369888 - RNA, 19 nt, Artificial Sequence
  Description of Artificial Sequence: Synthetic oligonucleotide
  Sense strand starting at position 25 of SEQ ID NO: 1885820
gacgauggaccucagaguu

SEQ ID NO: 2369889 - RNA, 19 nt, Artificial Sequence
  Description of Artificial Sequence: Synthetic oligonucleotide
  Antisense strand to SEQ ID NO: 2369888
aacucugagguccaucguc

SEQ ID NO: 2369890 - RNA, 19 nt, Artificial Sequence
  Description of Artificial Sequence: Synthetic oligonucleotide
  Sense strand starting at position 367 of SEQ ID NO: 1885820
ugauaauacccugaguccu

SEQ ID NO: 2369891 - RNA, 19 nt, Artificial Sequence
  Description of Artificial Sequence: Synthetic oligonucleotide
  Antisense strand to SEQ ID NO: 2369890
aggacucaggguauuauca

SEQ ID NO: 2369892 - RNA, 19 nt, Artificial Sequence
  Description of Artificial Sequence: Synthetic oligonucleotide
  Sense strand starting at position 394 of SEQ ID NO: 1885820
aaccauucgggccaagaua

SEQ ID NO: 2369893 - RNA, 19 nt, Artificial Sequence
  Description of Artificial Sequence: Synthetic oligonucleotide
  Antisense strand to SEQ ID NO: 2369892
uaucuuggcccgaaugguu

SEQ ID NO: 2369894 - RNA, 19 nt, Artificial Sequence
  Description of Artificial Sequence: Synthetic oligonucleotide
  Sense strand starting at position 418 of SEQ ID NO: 1885820
guugauuacuacucacauu

SEQ ID NO: 2369895 - RNA, 19 nt, Artificial Sequence
  Description of Artificial Sequence: Synthetic oligonucleotide
  Antisense strand to SEQ ID NO: 2369894
aaugugaguaguaaucaac

SEQ ID NO: 2369896 - RNA, 19 nt, Artificial Sequence
  Description of Artificial Sequence: Synthetic oligonucleotide
  Sense strand starting at position 722 of SEQ ID NO: 1885820
cgccauuuaugucuuucua

SEQ ID NO: 2369897 - RNA, 19 nt, Artificial Sequence
  Description of Artificial Sequence: Synthetic oligonucleotide
  Antisense strand to SEQ ID NO: 2369896
uagaaagacauaaauggcg

SEQ ID NO: 2369898 - RNA, 19 nt, Artificial Sequence
  Description of Artificial Sequence: Synthetic oligonucleotide
  Sense strand starting at position 793 of SEQ ID NO: 1885820
uuuauaauugggcaguguu

SEQ ID NO: 2369899 - RNA, 19 nt, Artificial Sequence
  Description of Artificial Sequence: Synthetic oligonucleotide
  Antisense strand to SEQ ID NO: 2369898
aacacugcccaauuauaaa

SEQ ID NO: 2369900 - RNA, 19 nt, Artificial Sequence
  Description of Artificial Sequence: Synthetic oligonucleotide
  Sense strand starting at position 923 of SEQ ID NO: 1885820
uuuaaaucugucuguaaca

SEQ ID NO: 2369901 - RNA, 19 nt, Artificial Sequence
  Description of Artificial Sequence: Synthetic oligonucleotide
  Antisense strand to SEQ ID NO: 2369900
uguuacagacagauuuaaa

SEQ ID NO: 2369902 - RNA, 19 nt, Artificial Sequence
  Description of Artificial Sequence: Synthetic oligonucleotide
  Sense strand starting at position 924 of SEQ ID NO: 1885820
uuaaaucugucuguaacac

SEQ ID NO: 2369903 - RNA, 19 nt, Artificial Sequence
  Description of Artificial Sequence: Synthetic oligonucleotide
  Antisense strand to SEQ ID NO: 2369902
guguuacagacagauuuaa

SEQ ID NO: 2369904 - RNA, 19 nt, Artificial Sequence
  Description of Artificial Sequence: Synthetic oligonucleotide
  Sense strand starting at position 1045 of SEQ ID NO: 1885820
gauccagaauguguccuau

SEQ ID NO: 2369905 - RNA, 19 nt, Artificial Sequence
  Description of Artificial Sequence: Synthetic oligonucleotide
  Antisense strand to SEQ ID NO: 2369904
auaggacacauucuggauc

SEQ ID NO: 2369906 - RNA, 19 nt, Artificial Sequence
  Description of Artificial Sequence: Synthetic oligonucleotide
  Sense strand starting at position 1146 of SEQ ID NO: 1885820
gccucagaacagcauuaau

SEQ ID NO: 2369907 - RNA, 19 nt, Artificial Sequence
  Description of Artificial Sequence: Synthetic oligonucleotide
  Antisense strand to SEQ ID NO: 2369906
auuaaugcuguucugaggc

SEQ ID NO: 2369908 - RNA, 19 nt, Artificial Sequence
  Description of Artificial Sequence: Synthetic oligonucleotide
  Sense strand starting at position 1375 of SEQ ID NO: 1885820
gaacuugauuacucacgua

SEQ ID NO: 2369909 - RNA, 19 nt, Artificial Sequence
  Description of Artificial Sequence: Synthetic oligonucleotide
  Antisense strand to SEQ ID NO: 2369908
uacgugaguaaucaaguuc

SEQ ID NO: 2369910 - RNA, 19 nt, Artificial Sequence
  Description of Artificial Sequence: Synthetic oligonucleotide
  Sense strand starting at position 1380 of SEQ ID NO: 1885820
ugauuacucacguaggucu

SEQ ID NO: 2369911 - RNA, 19 nt, Artificial Sequence
  Description of Artificial Sequence: Synthetic oligonucleotide
  Antisense strand to SEQ ID NO: 2369910
agaccuacgugaguaauca

SEQ ID NO: 2369912 - RNA, 19 nt, Artificial Sequence
  Description of Artificial Sequence: Synthetic oligonucleotide
  Sense strand starting at position 1652 of SEQ ID NO: 1885820
ucuguaauuuauucugucu

SEQ ID NO: 2369913 - RNA, 19 nt, Artificial Sequence
  Description of Artificial Sequence: Synthetic oligonucleotide
  Antisense strand to SEQ ID NO: 2369912
agacagaauaaauuacaga

SEQ ID NO: 2369914 - RNA, 19 nt, Artificial Sequence
  Description of Artificial Sequence: Synthetic oligonucleotide
  Sense strand starting at position 1820 of SEQ ID NO: 1885820
ugauucuugcauuagaaug

SEQ ID NO: 2369915 - RNA, 19 nt, Artificial Sequence
  Description of Artificial Sequence: Synthetic oligonucleotide
  Antisense strand to SEQ ID NO: 2369914
cauucuaaugcaagaauca

SEQ ID NO: 2369916 - RNA, 19 nt, Artificial Sequence
  Description of Artificial Sequence: Synthetic oligonucleotide
  Sense strand starting at position 1926 of SEQ ID NO: 1885820
ugugguggaccucagaguu

SEQ ID NO: 2369917 - RNA, 19 nt, Artificial Sequence
  Description of Artificial Sequence: Synthetic oligonucleotide
  Antisense strand to SEQ ID NO: 2369916
aacucugagguccaccaca

SEQ ID NO: 2369918 - RNA, 19 nt, Artificial Sequence
  Description of Artificial Sequence: Synthetic oligonucleotide
  Sense strand starting at position 1986 of SEQ ID NO: 1885820
ggucaucauugauccagga

SEQ ID NO: 2369919 - RNA, 19 nt, Artificial Sequence
  Description of Artificial Sequence: Synthetic oligonucleotide
  Antisense strand to SEQ ID NO: 2369918
uccuggaucaaugaugacc

SEQ ID NO: 2369920 - RNA, 19 nt, Artificial Sequence
  Description of Artificial Sequence: Synthetic oligonucleotide
  Sense strand starting at position 2119 of SEQ ID NO: 1885820
ucugaucuguauccagaau

SEQ ID NO: 2369921 - RNA, 19 nt, Artificial Sequence
  Description of Artificial Sequence: Synthetic oligonucleotide
  Antisense strand to SEQ ID NO: 2369920
auucuggauacagaucaga

SEQ ID NO: 2369922 - RNA, 19 nt, Artificial Sequence
  Description of Artificial Sequence: Synthetic oligonucleotide
  Sense strand starting at position 2207 of SEQ ID NO: 1885820
caugucuaccaucgggaua

SEQ ID NO: 2369923 - RNA, 19 nt, Artificial Sequence
  Description of Artificial Sequence: Synthetic oligonucleotide
  Antisense strand to SEQ ID NO: 2369922
uaucccgaugguagacaug

SEQ ID NO: 2369924 - RNA, 19 nt, Artificial Sequence
  Description of Artificial Sequence: Synthetic oligonucleotide
  Sense strand starting at position 2208 of SEQ ID NO: 1885820
augucuaccaucgggauaa

SEQ ID NO: 2369925 - RNA, 19 nt, Artificial Sequence
  Description of Artificial Sequence: Synthetic oligonucleotide
  Antisense strand to SEQ ID NO: 2369924
uuaucccgaugguagacau

SEQ ID NO: 2369926 - RNA, 19 nt, Artificial Sequence
  Description of Artificial Sequence: Synthetic oligonucleotide
  Sense strand starting at position 2210 of SEQ ID NO: 1885820
gucuaccaucgggauaaca

SEQ ID NO: 2369927 - RNA, 19 nt, Artificial Sequence
  Description of Artificial Sequence: Synthetic oligonucleotide
  Antisense strand to SEQ ID NO: 2369926
uguuaucccgaugguagac

SEQ ID NO: 2369928 - RNA, 19 nt, Artificial Sequence
  Description of Artificial Sequence: Synthetic oligonucleotide
  Sense strand starting at position 2218 of SEQ ID NO: 1885820
ucgggauaacauugaccau

SEQ ID NO: 2369929 - RNA, 19 nt, Artificial Sequence
  Description of Artificial Sequence: Synthetic oligonucleotide
  Antisense strand to SEQ ID NO: 2369928
auggucaauguuaucccga

SEQ ID NO: 2369930 - RNA, 19 nt, Artificial Sequence
  Description of Artificial Sequence: Synthetic oligonucleotide
  Sense strand starting at position 2624 of SEQ ID NO: 1885820
gugacagacacguaccauu

SEQ ID NO: 2369931 - RNA, 19 nt, Artificial Sequence
  Description of Artificial Sequence: Synthetic oligonucleotide
  Antisense strand to SEQ ID NO: 2369930
aaugguacgugucugucac

SEQ ID NO: 2369932 - RNA, 19 nt, Artificial Sequence
  Description of Artificial Sequence: Synthetic oligonucleotide
  Sense strand starting at position 2756 of SEQ ID NO: 1885820
guuuauugauucucacauu

SEQ ID NO: 2369933 - RNA, 19 nt, Artificial Sequence
  Description of Artificial Sequence: Synthetic oligonucleotide
  Antisense strand to SEQ ID NO: 2369932
aaugugagaaucaauaaac

SEQ ID NO: 2369934 - RNA, 19 nt, Artificial Sequence
  Description of Artificial Sequence: Synthetic oligonucleotide
  Sense strand starting at position 3204 of SEQ ID NO: 1885820
cuagaauacuacucgacau

SEQ ID NO: 2369935 - RNA, 19 nt, Artificial Sequence
  Description of Artificial Sequence: Synthetic oligonucleotide
  Antisense strand to SEQ ID NO: 2369934
augucgaguaguauucuag

SEQ ID NO: 2369936 - RNA, 19 nt, Artificial Sequence
  Description of Artificial Sequence: Synthetic oligonucleotide
  Sense strand starting at position 3214 of SEQ ID NO: 1885820
acucgacaucuuugauuau

SEQ ID NO: 2369937 - RNA, 19 nt, Artificial Sequence
  Description of Artificial Sequence: Synthetic oligonucleotide
  Antisense strand to SEQ ID NO: 2369936
auaaucaaagaugucgagu

SEQ ID NO: 2369938 - RNA, 19 nt, Artificial Sequence
  Description of Artificial Sequence: Synthetic oligonucleotide
  Sense strand starting at position 3217 of SEQ ID NO: 1885820
cgacaucuuugauuauagu

SEQ ID NO: 2369939 - RNA, 19 nt, Artificial Sequence
  Description of Artificial Sequence: Synthetic oligonucleotide
  Antisense strand to SEQ ID NO: 2369938
acuauaaucaaagaugucg

SEQ ID NO: 2369940 - RNA, 19 nt, Artificial Sequence
  Description of Artificial Sequence: Synthetic oligonucleotide
  Sense strand starting at position 3583 of SEQ ID NO: 1885820
auugauucuuacucuuagu

SEQ ID NO: 2369941 - RNA, 19 nt, Artificial Sequence
  Description of Artificial Sequence: Synthetic oligonucleotide
  Antisense strand to SEQ ID NO: 2369940
acuaagaguaagaaucaau

SEQ ID NO: 2369942 - RNA, 19 nt, Artificial Sequence
  Description of Artificial Sequence: Synthetic oligonucleotide
  Sense strand starting at position 3593 of SEQ ID NO: 1885820
acucuuagugucuauauga

SEQ ID NO: 2369943 - RNA, 19 nt, Artificial Sequence
  Description of Artificial Sequence: Synthetic oligonucleotide
  Antisense strand to SEQ ID NO: 2369942
ucauauagacacuaagagu

SEQ ID NO: 2369944 - RNA, 19 nt, Artificial Sequence
  Description of Artificial Sequence: Synthetic oligonucleotide
  Sense strand starting at position 3600 of SEQ ID NO: 1885820
gugucuauaugaucuuaag

SEQ ID NO: 2369945 - RNA, 19 nt, Artificial Sequence
  Description of Artificial Sequence: Synthetic oligonucleotide
  Antisense strand to SEQ ID NO: 2369944
cuuaagaucauauagacac

SEQ ID NO: 2369946 - RNA, 19 nt, Artificial Sequence
  Description of Artificial Sequence: Synthetic oligonucleotide
  Sense strand starting at position 3606 of SEQ ID NO: 1885820
auaugaucuuaagccaaag

SEQ ID NO: 2369947 - RNA, 19 nt, Artificial Sequence
  Description of Artificial Sequence: Synthetic oligonucleotide
  Antisense strand to SEQ ID NO: 2369946
cuuuggcuuaagaucauau

SEQ ID NO: 2369948 - RNA, 19 nt, Artificial Sequence
  Description of Artificial Sequence: Synthetic oligonucleotide
  Sense strand starting at position 3652 of SEQ ID NO: 1885820
auucuuaauggaugucagu

SEQ ID NO: 2369949 - RNA, 19 nt, Artificial Sequence
  Description of Artificial Sequence: Synthetic oligonucleotide
  Antisense strand to SEQ ID NO: 2369948
acugacauccauuaagaau

SEQ ID NO: 2369950 - RNA, 19 nt, Artificial Sequence
  Description of Artificial Sequence: Synthetic oligonucleotide
  Sense strand starting at position 3827 of SEQ ID NO: 1885820
auaagaacauggucuuuau

SEQ ID NO: 2369951 - RNA, 19 nt, Artificial Sequence
  Description of Artificial Sequence: Synthetic oligonucleotide
  Antisense strand to SEQ ID NO: 2369950
auaaagaccauguucuuau

SEQ ID NO: 2369952 - RNA, 19 nt, Artificial Sequence
  Description of Artificial Sequence: Synthetic oligonucleotide
  Sense strand starting at position 3852 of SEQ ID NO: 1885820
caaacaucugucuguagga

SEQ ID NO: 2369953 - RNA, 19 nt, Artificial Sequence
  Description of Artificial Sequence: Synthetic oligonucleotide
  Antisense strand to SEQ ID NO: 2369952
uccuacagacagauguuug

SEQ ID NO: 2369954 - RNA, 19 nt, Artificial Sequence
  Description of Artificial Sequence: Synthetic oligonucleotide
  Sense strand starting at position 3853 of SEQ ID NO: 1885820
aaacaucugucuguaggau

SEQ ID NO: 2369955 - RNA, 19 nt, Artificial Sequence
  Description of Artificial Sequence: Synthetic oligonucleotide
  Antisense strand to SEQ ID NO: 2369954
auccuacagacagauguuu

SEQ ID NO: 2369956 - RNA, 19 nt, Artificial Sequence
  Description of Artificial Sequence: Synthetic oligonucleotide
  Sense strand starting at position 3854 of SEQ ID NO: 1885820
aacaucugucuguaggauu

SEQ ID NO: 2369957 - RNA, 19 nt, Artificial Sequence
  Description of Artificial Sequence: Synthetic oligonucleotide
  Antisense strand to SEQ ID NO: 2369956
aauccuacagacagauguu

SEQ ID NO: 2369958 - RNA, 19 nt, Artificial Sequence
  Description of Artificial Sequence: Synthetic oligonucleotide
  Sense strand starting at position 3862 of SEQ ID NO: 1885820
ucuguaggauuauuccaaa

SEQ ID NO: 2369959 - RNA, 19 nt, Artificial Sequence
  Description of Artificial Sequence: Synthetic oligonucleotide
  Antisense strand to SEQ ID NO: 2369958
uuuggaauaauccuacaga

SEQ ID NO: 2369960 - RNA, 19 nt, Artificial Sequence
  Description of Artificial Sequence: Synthetic oligonucleotide
  Sense strand starting at position 3966 of SEQ ID NO: 1885820
auuuguuaucguuguucua

SEQ ID NO: 2369961 - RNA, 19 nt, Artificial Sequence
  Description of Artificial Sequence: Synthetic oligonucleotide
  Antisense strand to SEQ ID NO: 2369960
uagaacaacgauaacaaau

SEQ ID NO: 2369962 - RNA, 19 nt, Artificial Sequence
  Description of Artificial Sequence: Synthetic oligonucleotide
  Sense strand starting at position 3967 of SEQ ID NO: 1885820
uuuguuaucguuguucuau

SEQ ID NO: 2369963 - RNA, 19 nt, Artificial Sequence
  Description of Artificial Sequence: Synthetic oligonucleotide
  Antisense strand to SEQ ID NO: 2369962
auagaacaacgauaacaaa

SEQ ID NO: 2369964 - RNA, 19 nt, Artificial Sequence
  Description of Artificial Sequence: Synthetic oligonucleotide
  Sense strand starting at position 66 of SEQ ID NO: 1885821
gauuucuucugugacagac

SEQ ID NO: 2369965 - RNA, 19 nt, Artificial Sequence
  Description of Artificial Sequence: Synthetic oligonucleotide
  Antisense strand to SEQ ID NO: 2369964
gucugucacagaagaaauc

SEQ ID NO: 2369966 - RNA, 19 nt, Artificial Sequence
  Description of Artificial Sequence: Synthetic oligonucleotide
  Sense strand starting at position 149 of SEQ ID NO: 1885821
caggauggaucaucuguuu

SEQ ID NO: 2369967 - RNA, 19 nt, Artificial Sequence
  Description of Artificial Sequence: Synthetic oligonucleotide
  Antisense strand to SEQ ID NO: 2369966
aaacagaugauccauccug

SEQ ID NO: 2369968 - RNA, 19 nt, Artificial Sequence
  Description of Artificial Sequence: Synthetic oligonucleotide
  Sense strand starting at position 180 of SEQ ID NO: 1885821
cugccucauuuguugauua

SEQ ID NO: 2369969 - RNA, 19 nt, Artificial Sequence
  Description of Artificial Sequence: Synthetic oligonucleotide
  Antisense strand to SEQ ID NO: 2369968
uaaucaacaaaugaggcag

SEQ ID NO: 2369970 - RNA, 19 nt, Artificial Sequence
  Description of Artificial Sequence: Synthetic oligonucleotide
  Sense strand starting at position 249 of SEQ ID NO: 1885821
uauggagagcuguauacgu

SEQ ID NO: 2369971 - RNA, 19 nt, Artificial Sequence
  Description of Artificial Sequence: Synthetic oligonucleotide
  Antisense strand to SEQ ID NO: 2369970
acguauacagcucuccaua

SEQ ID NO: 2369972 - RNA, 19 nt, Artificial Sequence
  Description of Artificial Sequence: Synthetic oligonucleotide
  Sense strand starting at position 257 of SEQ ID NO: 1885821
gcuguauacgucuaaauaa

SEQ ID NO: 2369973 - RNA, 19 nt, Artificial Sequence
  Description of Artificial Sequence: Synthetic oligonucleotide
  Antisense strand to SEQ ID NO: 2369972
uuauuuagacguauacagc

SEQ ID NO: 2369974 - RNA, 19 nt, Artificial Sequence
  Description of Artificial Sequence: Synthetic oligonucleotide
  Sense strand starting at position 384 of SEQ ID NO: 1885821
uugggauagaguuggccau

SEQ ID NO: 2369975 - RNA, 19 nt, Artificial Sequence
  Description of Artificial Sequence: Synthetic oligonucleotide
  Antisense strand to SEQ ID NO: 2369974
auggccaacucuaucccaa

SEQ ID NO: 2369976 - RNA, 19 nt, Artificial Sequence
  Description of Artificial Sequence: Synthetic oligonucleotide
  Sense strand starting at position 388 of SEQ ID NO: 1885821
gauagaguuggccaucuuu

SEQ ID NO: 2369977 - RNA, 19 nt, Artificial Sequence
  Description of Artificial Sequence: Synthetic oligonucleotide
  Antisense strand to SEQ ID NO: 2369976
aaagauggccaacucuauc

SEQ ID NO: 2369978 - RNA, 19 nt, Artificial Sequence
  Description of Artificial Sequence: Synthetic oligonucleotide
  Sense strand starting at position 394 of SEQ ID NO: 1885821
guuggccaucuuuaauuau

SEQ ID NO: 2369979 - RNA, 19 nt, Artificial Sequence
  Description of Artificial Sequence: Synthetic oligonucleotide
  Antisense strand to SEQ ID NO: 2369978
auaauuaaagauggccaac

SEQ ID NO: 2369980 - RNA, 19 nt, Artificial Sequence
  Description of Artificial Sequence: Synthetic oligonucleotide
  Sense strand starting at position 604 of SEQ ID NO: 1885821
ugauaacaauaugagacau

SEQ ID NO: 2369981 - RNA, 19 nt, Artificial Sequence
  Description of Artificial Sequence: Synthetic oligonucleotide
  Antisense strand to SEQ ID NO: 2369980
augucucauauuguuauca

SEQ ID NO: 2369982 - RNA, 19 nt, Artificial Sequence
  Description of Artificial Sequence: Synthetic oligonucleotide
  Sense strand starting at position 963 of SEQ ID NO: 1885821
uuccauugugauggacgau

SEQ ID NO: 2369983 - RNA, 19 nt, Artificial Sequence
  Description of Artificial Sequence: Synthetic oligonucleotide
  Antisense strand to SEQ ID NO: 2369982
aucguccaucacaauggaa

SEQ ID NO: 2369984 - RNA, 19 nt, Artificial Sequence
  Description of Artificial Sequence: Synthetic oligonucleotide
  Sense strand starting at position 966 of SEQ ID NO: 1885821
cauugugauggacgaugga

SEQ ID NO: 2369985 - RNA, 19 nt, Artificial Sequence
  Description of Artificial Sequence: Synthetic oligonucleotide
  Antisense strand to SEQ ID NO: 2369984
uccaucguccaucacaaug

SEQ ID NO: 2369986 - RNA, 19 nt, Artificial Sequence
  Description of Artificial Sequence: Synthetic oligonucleotide
  Sense strand starting at position 976 of SEQ ID NO: 1885821
gacgauggaccucagaguu

SEQ ID NO: 2369987 - RNA, 19 nt, Artificial Sequence
  Description of Artificial Sequence: Synthetic oligonucleotide
  Antisense strand to SEQ ID NO: 2369986
aacucugagguccaucguc

SEQ ID NO: 2369988 - RNA, 19 nt, Artificial Sequence
  Description of Artificial Sequence: Synthetic oligonucleotide
  Sense strand starting at position 1318 of SEQ ID NO: 1885821
ugauaauacccugaguccu

SEQ ID NO: 2369989 - RNA, 19 nt, Artificial Sequence
  Description of Artificial Sequence: Synthetic oligonucleotide
  Antisense strand to SEQ ID NO: 2369988
aggacucaggguauuauca

SEQ ID NO: 2369990 - RNA, 19 nt, Artificial Sequence
  Description of Artificial Sequence: Synthetic oligonucleotide
  Sense strand starting at position 1345 of SEQ ID NO: 1885821
aaccauucgggccaagaua

SEQ ID NO: 2369991 - RNA, 19 nt, Artificial Sequence
  Description of Artificial Sequence: Synthetic oligonucleotide
  Antisense strand to SEQ ID NO: 2369990
uaucuuggcccgaaugguu

SEQ ID NO: 2369992 - RNA, 19 nt, Artificial Sequence
  Description of Artificial Sequence: Synthetic oligonucleotide
  Sense strand starting at position 1369 of SEQ ID NO: 1885821
guugauuacuacucacauu

SEQ ID NO: 2369993 - RNA, 19 nt, Artificial Sequence
  Description of Artificial Sequence: Synthetic oligonucleotide
  Antisense strand to SEQ ID NO: 2369992
aaugugaguaguaaucaac

SEQ ID NO: 2369994 - RNA, 19 nt, Artificial Sequence
  Description of Artificial Sequence: Synthetic oligonucleotide
  Sense strand starting at position 1673 of SEQ ID NO: 1885821
cgccauuuaugucuuucua

SEQ ID NO: 2369995 - RNA, 19 nt, Artificial Sequence
  Description of Artificial Sequence: Synthetic oligonucleotide
  Antisense strand to SEQ ID NO: 2369994
uagaaagacauaaauggcg

SEQ ID NO: 2369996 - RNA, 19 nt, Artificial Sequence
  Description of Artificial Sequence: Synthetic oligonucleotide
  Sense strand starting at position 1744 of SEQ ID NO: 1885821
uuuauaauugggcaguguu

SEQ ID NO: 2369997 - RNA, 19 nt, Artificial Sequence
  Description of Artificial Sequence: Synthetic oligonucleotide
  Antisense strand to SEQ ID NO: 2369996
aacacugcccaauuauaaa

SEQ ID NO: 2369998 - RNA, 19 nt, Artificial Sequence
  Description of Artificial Sequence: Synthetic oligonucleotide
  Sense strand starting at position 1791 of SEQ ID NO: 1885821
guuuccugauucucacauu

SEQ ID NO: 2369999 - RNA, 19 nt, Artificial Sequence
  Description of Artificial Sequence: Synthetic oligonucleotide
  Antisense strand to SEQ ID NO: 2369998
aaugugagaaucaggaaac

SEQ ID NO: 2370000 - RNA, 19 nt, Artificial Sequence
  Description of Artificial Sequence: Synthetic oligonucleotide
  Sense strand starting at position 1874 of SEQ ID NO: 1885821
uuuaaaucugucuguaaca

SEQ ID NO: 2370001 - RNA, 19 nt, Artificial Sequence
  Description of Artificial Sequence: Synthetic oligonucleotide
  Antisense strand to SEQ ID NO: 2370000
uguuacagacagauuuaaa

SEQ ID NO: 2370002 - RNA, 19 nt, Artificial Sequence
  Description of Artificial Sequence: Synthetic oligonucleotide
  Sense strand starting at position 1875 of SEQ ID NO: 1885821
uuaaaucugucuguaacac

SEQ ID NO: 2370003 - RNA, 19 nt, Artificial Sequence
  Description of Artificial Sequence: Synthetic oligonucleotide
  Antisense strand to SEQ ID NO: 2370002
guguuacagacagauuuaa

SEQ ID NO: 2370004 - RNA, 19 nt, Artificial Sequence
  Description of Artificial Sequence: Synthetic oligonucleotide
  Sense strand starting at position 1995 of SEQ ID NO: 1885821
cgauccagaauguguccua

SEQ ID NO: 2370005 - RNA, 19 nt, Artificial Sequence
  Description of Artificial Sequence: Synthetic oligonucleotide
  Antisense strand to SEQ ID NO: 2370004
uaggacacauucuggaucg

SEQ ID NO: 2370006 - RNA, 19 nt, Artificial Sequence
  Description of Artificial Sequence: Synthetic oligonucleotide
  Sense strand starting at position 1996 of SEQ ID NO: 1885821
gauccagaauguguccuau

SEQ ID NO: 2370007 - RNA, 19 nt, Artificial Sequence
  Description of Artificial Sequence: Synthetic oligonucleotide
  Antisense strand to SEQ ID NO: 2370006
auaggacacauucuggauc

SEQ ID NO: 2370008 - RNA, 19 nt, Artificial Sequence
  Description of Artificial Sequence: Synthetic oligonucleotide
  Sense strand starting at position 2097 of SEQ ID NO: 1885821
gccucagaacagcauuaau

SEQ ID NO: 2370009 - RNA, 19 nt, Artificial Sequence
  Description of Artificial Sequence: Synthetic oligonucleotide
  Antisense strand to SEQ ID NO: 2370008
auuaaugcuguucugaggc

SEQ ID NO: 2370010 - RNA, 19 nt, Artificial Sequence
  Description of Artificial Sequence: Synthetic oligonucleotide
  Sense strand starting at position 2326 of SEQ ID NO: 1885821
gaacuugauuacucacgua

SEQ ID NO: 2370011 - RNA, 19 nt, Artificial Sequence
  Description of Artificial Sequence: Synthetic oligonucleotide
  Antisense strand to SEQ ID NO: 2370010
uacgugaguaaucaaguuc

SEQ ID NO: 2370012 - RNA, 19 nt, Artificial Sequence
  Description of Artificial Sequence: Synthetic oligonucleotide
  Sense strand starting at position 2331 of SEQ ID NO: 1885821
ugauuacucacguaggucu

SEQ ID NO: 2370013 - RNA, 19 nt, Artificial Sequence
  Description of Artificial Sequence: Synthetic oligonucleotide
  Antisense strand to SEQ ID NO: 2370012
agaccuacgugaguaauca

SEQ ID NO: 2370014 - RNA, 19 nt, Artificial Sequence
  Description of Artificial Sequence: Synthetic oligonucleotide
  Sense strand starting at position 2603 of SEQ ID NO: 1885821
ucuguaauuuauucugucu

SEQ ID NO: 2370015 - RNA, 19 nt, Artificial Sequence
  Description of Artificial Sequence: Synthetic oligonucleotide
  Antisense strand to SEQ ID NO: 2370014
agacagaauaaauuacaga

SEQ ID NO: 2370016 - RNA, 19 nt, Artificial Sequence
  Description of Artificial Sequence: Synthetic oligonucleotide
  Sense strand starting at position 2653 of SEQ ID NO: 1885821
uguacaauaucucuuugua

SEQ ID NO: 2370017 - RNA, 19 nt, Artificial Sequence
  Description of Artificial Sequence: Synthetic oligonucleotide
  Antisense strand to SEQ ID NO: 2370016
uacaaagagauauuguaca

SEQ ID NO: 2370018 - RNA, 19 nt, Artificial Sequence
  Description of Artificial Sequence: Synthetic oligonucleotide
  Sense strand starting at position 2771 of SEQ ID NO: 1885821
ugauucuugcauuagaaug

SEQ ID NO: 2370019 - RNA, 19 nt, Artificial Sequence
  Description of Artificial Sequence: Synthetic oligonucleotide
  Antisense strand to SEQ ID NO: 2370018
cauucuaaugcaagaauca

SEQ ID NO: 2370020 - RNA, 19 nt, Artificial Sequence
  Description of Artificial Sequence: Synthetic oligonucleotide
  Sense strand starting at position 2877 of SEQ ID NO: 1885821
ugugguggaccucagaguu

SEQ ID NO: 2370021 - RNA, 19 nt, Artificial Sequence
  Description of Artificial Sequence: Synthetic oligonucleotide
  Antisense strand to SEQ ID NO: 2370020
aacucugagguccaccaca

SEQ ID NO: 2370022 - RNA, 19 nt, Artificial Sequence
  Description of Artificial Sequence: Synthetic oligonucleotide
  Sense strand starting at position 2937 of SEQ ID NO: 1885821
ggucaucauugauccagga

SEQ ID NO: 2370023 - RNA, 19 nt, Artificial Sequence
  Description of Artificial Sequence: Synthetic oligonucleotide
  Antisense strand to SEQ ID NO: 2370022
uccuggaucaaugaugacc

SEQ ID NO: 2370024 - RNA, 19 nt, Artificial Sequence
  Description of Artificial Sequence: Synthetic oligonucleotide
  Sense strand starting at position 2994 of SEQ ID NO: 1885821
uugguugccucauuaaauc

SEQ ID NO: 2370025 - RNA, 19 nt, Artificial Sequence
  Description of Artificial Sequence: Synthetic oligonucleotide
  Antisense strand to SEQ ID NO: 2370024
gauuuaaugaggcaaccaa

SEQ ID NO: 2370026 - RNA, 19 nt, Artificial Sequence
  Description of Artificial Sequence: Synthetic oligonucleotide
  Sense strand starting at position 3070 of SEQ ID NO: 1885821
ucugaucuguauccagaau

SEQ ID NO: 2370027 - RNA, 19 nt, Artificial Sequence
  Description of Artificial Sequence: Synthetic oligonucleotide
  Antisense strand to SEQ ID NO: 2370026
auucuggauacagaucaga

SEQ ID NO: 2370028 - RNA, 19 nt, Artificial Sequence
  Description of Artificial Sequence: Synthetic oligonucleotide
  Sense strand starting at position 3158 of SEQ ID NO: 1885821
caugucuaccaucgggaua

SEQ ID NO: 2370029 - RNA, 19 nt, Artificial Sequence
  Description of Artificial Sequence: Synthetic oligonucleotide
  Antisense strand to SEQ ID NO: 2370028
uaucccgaugguagacaug

SEQ ID NO: 2370030 - RNA, 19 nt, Artificial Sequence
  Description of Artificial Sequence: Synthetic oligonucleotide
  Sense strand starting at position 3159 of SEQ ID NO: 1885821
augucuaccaucgggauaa

SEQ ID NO: 2370031 - RNA, 19 nt, Artificial Sequence
  Description of Artificial Sequence: Synthetic oligonucleotide
  Antisense strand to SEQ ID NO: 2370030
uuaucccgaugguagacau

SEQ ID NO: 2370032 - RNA, 19 nt, Artificial Sequence
  Description of Artificial Sequence: Synthetic oligonucleotide
  Sense strand starting at position 3161 of SEQ ID NO: 1885821
gucuaccaucgggauaaca

SEQ ID NO: 2370033 - RNA, 19 nt, Artificial Sequence
  Description of Artificial Sequence: Synthetic oligonucleotide
  Antisense strand to SEQ ID NO: 2370032
uguuaucccgaugguagac

SEQ ID NO: 2370034 - RNA, 19 nt, Artificial Sequence
  Description of Artificial Sequence: Synthetic oligonucleotide
  Sense strand starting at position 3169 of SEQ ID NO: 1885821
ucgggauaacauugaccau

SEQ ID NO: 2370035 - RNA, 19 nt, Artificial Sequence
  Description of Artificial Sequence: Synthetic oligonucleotide
  Antisense strand to SEQ ID NO: 2370034
auggucaauguuaucccga

SEQ ID NO: 2370036 - RNA, 19 nt, Artificial Sequence
  Description of Artificial Sequence: Synthetic oligonucleotide
  Sense strand starting at position 3347 of SEQ ID NO: 1885821
guccguucugaggaguaca

SEQ ID NO: 2370037 - RNA, 19 nt, Artificial Sequence
  Description of Artificial Sequence: Synthetic oligonucleotide
  Antisense strand to SEQ ID NO: 2370036
uguacuccucagaacggac

SEQ ID NO: 2370038 - RNA, 19 nt, Artificial Sequence
  Description of Artificial Sequence: Synthetic oligonucleotide
  Sense strand starting at position 3575 of SEQ ID NO: 1885821
gugacagacacguaccauu

SEQ ID NO: 2370039 - RNA, 19 nt, Artificial Sequence
  Description of Artificial Sequence: Synthetic oligonucleotide
  Antisense strand to SEQ ID NO: 2370038
aaugguacgugucugucac

SEQ ID NO: 2370040 - RNA, 19 nt, Artificial Sequence
  Description of Artificial Sequence: Synthetic oligonucleotide
  Sense strand starting at position 3707 of SEQ ID NO: 1885821
guuuauugauucucacauu

SEQ ID NO: 2370041 - RNA, 19 nt, Artificial Sequence
  Description of Artificial Sequence: Synthetic oligonucleotide
  Antisense strand to SEQ ID NO: 2370040
aaugugagaaucaauaaac

SEQ ID NO: 2370042 - RNA, 19 nt, Artificial Sequence
  Description of Artificial Sequence: Synthetic oligonucleotide
  Sense strand starting at position 3848 of SEQ ID NO: 1885821
ugugacagaccucagaguu

SEQ ID NO: 2370043 - RNA, 19 nt, Artificial Sequence
  Description of Artificial Sequence: Synthetic oligonucleotide
  Antisense strand to SEQ ID NO: 2370042
aacucugaggucugucaca

SEQ ID NO: 2370044 - RNA, 19 nt, Artificial Sequence
  Description of Artificial Sequence: Synthetic oligonucleotide
  Sense strand starting at position 10 of SEQ ID NO: 1885822
acaucaggcccauguuuau

SEQ ID NO: 2370045 - RNA, 19 nt, Artificial Sequence
  Description of Artificial Sequence: Synthetic oligonucleotide
  Antisense strand to SEQ ID NO: 2370044
auaaacaugggccugaugu

SEQ ID NO: 2370046 - RNA, 19 nt, Artificial Sequence
  Description of Artificial Sequence: Synthetic oligonucleotide
  Sense strand starting at position 214 of SEQ ID NO: 1885822
gcaaucauucuagggaaua

SEQ ID NO: 2370047 - RNA, 19 nt, Artificial Sequence
  Description of Artificial Sequence: Synthetic oligonucleotide
  Antisense strand to SEQ ID NO: 2370046
uauucccuagaaugauugc

SEQ ID NO: 2370048 - RNA, 19 nt, Artificial Sequence
  Description of Artificial Sequence: Synthetic oligonucleotide
  Sense strand starting at position 287 of SEQ ID NO: 1885822
ugucaccuaucauuaguua

SEQ ID NO: 2370049 - RNA, 19 nt, Artificial Sequence
  Description of Artificial Sequence: Synthetic oligonucleotide
  Antisense strand to SEQ ID NO: 2370048
uaacuaaugauaggugaca

SEQ ID NO: 2370050 - RNA, 19 nt, Artificial Sequence
  Description of Artificial Sequence: Synthetic oligonucleotide
  Sense strand starting at position 365 of SEQ ID NO: 1885822
ugaaauugucguugaccca

SEQ ID NO: 2370051 - RNA, 19 nt, Artificial Sequence
  Description of Artificial Sequence: Synthetic oligonucleotide
  Antisense strand to SEQ ID NO: 2370050
ugggucaacgacaauuuca

SEQ ID NO: 2370052 - RNA, 19 nt, Artificial Sequence
  Description of Artificial Sequence: Synthetic oligonucleotide
  Sense strand starting at position 368 of SEQ ID NO: 1885822
aauugucguugacccagaa

SEQ ID NO: 2370053 - RNA, 19 nt, Artificial Sequence
  Description of Artificial Sequence: Synthetic oligonucleotide
  Antisense strand to SEQ ID NO: 2370052
uucugggucaacgacaauu

SEQ ID NO: 2370054 - RNA, 19 nt, Artificial Sequence
  Description of Artificial Sequence: Synthetic oligonucleotide
  Sense strand starting at position 372 of SEQ ID NO: 1885822
gucguugacccagaaauug

SEQ ID NO: 2370055 - RNA, 19 nt, Artificial Sequence
  Description of Artificial Sequence: Synthetic oligonucleotide
  Antisense strand to SEQ ID NO: 2370054
caauuucugggucaacgac

SEQ ID NO: 2370056 - RNA, 19 nt, Artificial Sequence
  Description of Artificial Sequence: Synthetic oligonucleotide
  Sense strand starting at position 486 of SEQ ID NO: 1885822
agauauuaagagugcuucu

SEQ ID NO: 2370057 - RNA, 19 nt, Artificial Sequence
  Description of Artificial Sequence: Synthetic oligonucleotide
  Antisense strand to SEQ ID NO: 2370056
agaagcacucuuaauaucu

SEQ ID NO: 2370058 - RNA, 19 nt, Artificial Sequence
  Description of Artificial Sequence: Synthetic oligonucleotide
  Sense strand starting at position 831 of SEQ ID NO: 1885822
auuguuauacuuggccaau

SEQ ID NO: 2370059 - RNA, 19 nt, Artificial Sequence
  Description of Artificial Sequence: Synthetic oligonucleotide
  Antisense strand to SEQ ID NO: 2370058
auuggccaaguauaacaau

SEQ ID NO: 2370060 - RNA, 19 nt, Artificial Sequence
  Description of Artificial Sequence: Synthetic oligonucleotide
  Sense strand starting at position 832 of SEQ ID NO: 1885822
uuguuauacuuggccaaug

SEQ ID NO: 2370061 - RNA, 19 nt, Artificial Sequence
  Description of Artificial Sequence: Synthetic oligonucleotide
  Antisense strand to SEQ ID NO: 2370060
cauuggccaaguauaacaa

SEQ ID NO: 2370062 - RNA, 19 nt, Artificial Sequence
  Description of Artificial Sequence: Synthetic oligonucleotide
  Sense strand starting at position 896 of SEQ ID NO: 1885822
ccuugcauugaccaguuau

SEQ ID NO: 2370063 - RNA, 19 nt, Artificial Sequence
  Description of Artificial Sequence: Synthetic oligonucleotide
  Antisense strand to SEQ ID NO: 2370062
auaacuggucaaugcaagg

SEQ ID NO: 2370064 - RNA, 19 nt, Artificial Sequence
  Description of Artificial Sequence: Synthetic oligonucleotide
  Sense strand starting at position 1016 of SEQ ID NO: 1885822
gauuucuucugugacagac

SEQ ID NO: 2370065 - RNA, 19 nt, Artificial Sequence
  Description of Artificial Sequence: Synthetic oligonucleotide
  Antisense strand to SEQ ID NO: 2370064
gucugucacagaagaaauc

SEQ ID NO: 2370066 - RNA, 19 nt, Artificial Sequence
  Description of Artificial Sequence: Synthetic oligonucleotide
  Sense strand starting at position 1099 of SEQ ID NO: 1885822
caggauggaucaucuguuu

SEQ ID NO: 2370067 - RNA, 19 nt, Artificial Sequence
  Description of Artificial Sequence: Synthetic oligonucleotide
  Antisense strand to SEQ ID NO: 2370066
aaacagaugauccauccug

SEQ ID NO: 2370068 - RNA, 19 nt, Artificial Sequence
  Description of Artificial Sequence: Synthetic oligonucleotide
  Sense strand starting at position 1130 of SEQ ID NO: 1885822
cugccucauuuguugauua

SEQ ID NO: 2370069 - RNA, 19 nt, Artificial Sequence
  Description of Artificial Sequence: Synthetic oligonucleotide
  Antisense strand to SEQ ID NO: 2370068
uaaucaacaaaugaggcag

SEQ ID NO: 2370070 - RNA, 19 nt, Artificial Sequence
  Description of Artificial Sequence: Synthetic oligonucleotide
  Sense strand starting at position 1199 of SEQ ID NO: 1885822
uauggagagcuguauacgu

SEQ ID NO: 2370071 - RNA, 19 nt, Artificial Sequence
  Description of Artificial Sequence: Synthetic oligonucleotide
  Antisense strand to SEQ ID NO: 2370070
acguauacagcucuccaua

SEQ ID NO: 2370072 - RNA, 19 nt, Artificial Sequence
  Description of Artificial Sequence: Synthetic oligonucleotide
  Sense strand starting at position 1207 of SEQ ID NO: 1885822
gcuguauacgucuaaauaa

SEQ ID NO: 2370073 - RNA, 19 nt, Artificial Sequence
  Description of Artificial Sequence: Synthetic oligonucleotide
  Antisense strand to SEQ ID NO: 2370072
uuauuuagacguauacagc

SEQ ID NO: 2370074 - RNA, 19 nt, Artificial Sequence
  Description of Artificial Sequence: Synthetic oligonucleotide
  Sense strand starting at position 1334 of SEQ ID NO: 1885822
uugggauagaguuggccau

SEQ ID NO: 2370075 - RNA, 19 nt, Artificial Sequence
  Description of Artificial Sequence: Synthetic oligonucleotide
  Antisense strand to SEQ ID NO: 2370074
auggccaacucuaucccaa

SEQ ID NO: 2370076 - RNA, 19 nt, Artificial Sequence
  Description of Artificial Sequence: Synthetic oligonucleotide
  Sense strand starting at position 1338 of SEQ ID NO: 1885822
gauagaguuggccaucuuu

SEQ ID NO: 2370077 - RNA, 19 nt, Artificial Sequence
  Description of Artificial Sequence: Synthetic oligonucleotide
  Antisense strand to SEQ ID NO: 2370076
aaagauggccaacucuauc

SEQ ID NO: 2370078 - RNA, 19 nt, Artificial Sequence
  Description of Artificial Sequence: Synthetic oligonucleotide
  Sense strand starting at position 1344 of SEQ ID NO: 1885822
guuggccaucuuuaauuau

SEQ ID NO: 2370079 - RNA, 19 nt, Artificial Sequence
  Description of Artificial Sequence: Synthetic oligonucleotide
  Antisense strand to SEQ ID NO: 2370078
auaauuaaagauggccaac

SEQ ID NO: 2370080 - RNA, 19 nt, Artificial Sequence
  Description of Artificial Sequence: Synthetic oligonucleotide
  Sense strand starting at position 1554 of SEQ ID NO: 1885822
ugauaacaauaugagacau

SEQ ID NO: 2370081 - RNA, 19 nt, Artificial Sequence
  Description of Artificial Sequence: Synthetic oligonucleotide
  Antisense strand to SEQ ID NO: 2370080
augucucauauuguuauca

SEQ ID NO: 2370082 - RNA, 19 nt, Artificial Sequence
  Description of Artificial Sequence: Synthetic oligonucleotide
  Sense strand starting at position 1913 of SEQ ID NO: 1885822
uuccauugugauggacgau

SEQ ID NO: 2370083 - RNA, 19 nt, Artificial Sequence
  Description of Artificial Sequence: Synthetic oligonucleotide
  Antisense strand to SEQ ID NO: 2370082
aucguccaucacaauggaa

SEQ ID NO: 2370084 - RNA, 19 nt, Artificial Sequence
  Description of Artificial Sequence: Synthetic oligonucleotide
  Sense strand starting at position 1916 of SEQ ID NO: 1885822
cauugugauggacgaugga

SEQ ID NO: 2370085 - RNA, 19 nt, Artificial Sequence
  Description of Artificial Sequence: Synthetic oligonucleotide
  Antisense strand to SEQ ID NO: 2370084
uccaucguccaucacaaug

SEQ ID NO: 2370086 - RNA, 19 nt, Artificial Sequence
  Description of Artificial Sequence: Synthetic oligonucleotide
  Sense strand starting at position 1926 of SEQ ID NO: 1885822
gacgauggaccucagaguu

SEQ ID NO: 2370087 - RNA, 19 nt, Artificial Sequence
  Description of Artificial Sequence: Synthetic oligonucleotide
  Antisense strand to SEQ ID NO: 2370086
aacucugagguccaucguc

SEQ ID NO: 2370088 - RNA, 19 nt, Artificial Sequence
  Description of Artificial Sequence: Synthetic oligonucleotide
  Sense strand starting at position 2268 of SEQ ID NO: 1885822
ugauaauacccugaguccu

SEQ ID NO: 2370089 - RNA, 19 nt, Artificial Sequence
  Description of Artificial Sequence: Synthetic oligonucleotide
  Antisense strand to SEQ ID NO: 2370088
aggacucaggguauuauca

SEQ ID NO: 2370090 - RNA, 19 nt, Artificial Sequence
  Description of Artificial Sequence: Synthetic oligonucleotide
  Sense strand starting at position 2295 of SEQ ID NO: 1885822
aaccauucgggccaagaua

SEQ ID NO: 2370091 - RNA, 19 nt, Artificial Sequence
  Description of Artificial Sequence: Synthetic oligonucleotide
  Antisense strand to SEQ ID NO: 2370090
uaucuuggcccgaaugguu

SEQ ID NO: 2370092 - RNA, 19 nt, Artificial Sequence
  Description of Artificial Sequence: Synthetic oligonucleotide
  Sense strand starting at position 2319 of SEQ ID NO: 1885822
guugauuacuacucacauu

SEQ ID NO: 2370093 - RNA, 19 nt, Artificial Sequence
  Description of Artificial Sequence: Synthetic oligonucleotide
  Antisense strand to SEQ ID NO: 2370092
aaugugaguaguaaucaac

SEQ ID NO: 2370094 - RNA, 19 nt, Artificial Sequence
  Description of Artificial Sequence: Synthetic oligonucleotide
  Sense strand starting at position 2623 of SEQ ID NO: 1885822
cgccauuuaugucuuucua

SEQ ID NO: 2370095 - RNA, 19 nt, Artificial Sequence
  Description of Artificial Sequence: Synthetic oligonucleotide
  Antisense strand to SEQ ID NO: 2370094
uagaaagacauaaauggcg

SEQ ID NO: 2370096 - RNA, 19 nt, Artificial Sequence
  Description of Artificial Sequence: Synthetic oligonucleotide
  Sense strand starting at position 2694 of SEQ ID NO: 1885822
uuuauaauugggcaguguu

SEQ ID NO: 2370097 - RNA, 19 nt, Artificial Sequence
  Description of Artificial Sequence: Synthetic oligonucleotide
  Antisense strand to SEQ ID NO: 2370096
aacacugcccaauuauaaa

SEQ ID NO: 2370098 - RNA, 19 nt, Artificial Sequence
  Description of Artificial Sequence: Synthetic oligonucleotide
  Sense strand starting at position 2741 of SEQ ID NO: 1885822
guuuccugauucucacauu

SEQ ID NO: 2370099 - RNA, 19 nt, Artificial Sequence
  Description of Artificial Sequence: Synthetic oligonucleotide
  Antisense strand to SEQ ID NO: 2370098
aaugugagaaucaggaaac

SEQ ID NO: 2370100 - RNA, 19 nt, Artificial Sequence
  Description of Artificial Sequence: Synthetic oligonucleotide
  Sense strand starting at position 2824 of SEQ ID NO: 1885822
uuuaaaucugucuguaaca

SEQ ID NO: 2370101 - RNA, 19 nt, Artificial Sequence
  Description of Artificial Sequence: Synthetic oligonucleotide
  Antisense strand to SEQ ID NO: 2370100
uguuacagacagauuuaaa

SEQ ID NO: 2370102 - RNA, 19 nt, Artificial Sequence
  Description of Artificial Sequence: Synthetic oligonucleotide
  Sense strand starting at position 2825 of SEQ ID NO: 1885822
uuaaaucugucuguaacac

SEQ ID NO: 2370103 - RNA, 19 nt, Artificial Sequence
  Description of Artificial Sequence: Synthetic oligonucleotide
  Antisense strand to SEQ ID NO: 2370102
guguuacagacagauuuaa

SEQ ID NO: 2370104 - RNA, 19 nt, Artificial Sequence
  Description of Artificial Sequence: Synthetic oligonucleotide
  Sense strand starting at position 2945 of SEQ ID NO: 1885822
cgauccagaauguguccua

SEQ ID NO: 2370105 - RNA, 19 nt, Artificial Sequence
  Description of Artificial Sequence: Synthetic oligonucleotide
  Antisense strand to SEQ ID NO: 2370104
uaggacacauucuggaucg

SEQ ID NO: 2370106 - RNA, 19 nt, Artificial Sequence
  Description of Artificial Sequence: Synthetic oligonucleotide
  Sense strand starting at position 2946 of SEQ ID NO: 1885822
gauccagaauguguccuau

SEQ ID NO: 2370107 - RNA, 19 nt, Artificial Sequence
  Description of Artificial Sequence: Synthetic oligonucleotide
  Antisense strand to SEQ ID NO: 2370106
auaggacacauucuggauc

SEQ ID NO: 2370108 - RNA, 19 nt, Artificial Sequence
  Description of Artificial Sequence: Synthetic oligonucleotide
  Sense strand starting at position 3047 of SEQ ID NO: 1885822
gccucagaacagcauuaau

SEQ ID NO: 2370109 - RNA, 19 nt, Artificial Sequence
  Description of Artificial Sequence: Synthetic oligonucleotide
  Antisense strand to SEQ ID NO: 2370108
auuaaugcuguucugaggc

SEQ ID NO: 2370110 - RNA, 19 nt, Artificial Sequence
  Description of Artificial Sequence: Synthetic oligonucleotide
  Sense strand starting at position 3276 of SEQ ID NO: 1885822
gaacuugauuacucacgua

SEQ ID NO: 2370111 - RNA, 19 nt, Artificial Sequence
  Description of Artificial Sequence: Synthetic oligonucleotide
  Antisense strand to SEQ ID NO: 2370110
uacgugaguaaucaaguuc

SEQ ID NO: 2370112 - RNA, 19 nt, Artificial Sequence
  Description of Artificial Sequence: Synthetic oligonucleotide
  Sense strand starting at position 3281 of SEQ ID NO: 1885822
ugauuacucacguaggucu

SEQ ID NO: 2370113 - RNA, 19 nt, Artificial Sequence
  Description of Artificial Sequence: Synthetic oligonucleotide
  Antisense strand to SEQ ID NO: 2370112
agaccuacgugaguaauca

SEQ ID NO: 2370114 - RNA, 19 nt, Artificial Sequence
  Description of Artificial Sequence: Synthetic oligonucleotide
  Sense strand starting at position 3553 of SEQ ID NO: 1885822
ucuguaauuuauucugucu

SEQ ID NO: 2370115 - RNA, 19 nt, Artificial Sequence
  Description of Artificial Sequence: Synthetic oligonucleotide
  Antisense strand to SEQ ID NO: 2370114
agacagaauaaauuacaga

SEQ ID NO: 2370116 - RNA, 19 nt, Artificial Sequence
  Description of Artificial Sequence: Synthetic oligonucleotide
  Sense strand starting at position 3603 of SEQ ID NO: 1885822
uguacaauaucucuuugua

SEQ ID NO: 2370117 - RNA, 19 nt, Artificial Sequence
  Description of Artificial Sequence: Synthetic oligonucleotide
  Antisense strand to SEQ ID NO: 2370116
uacaaagagauauuguaca

SEQ ID NO: 2370118 - RNA, 19 nt, Artificial Sequence
  Description of Artificial Sequence: Synthetic oligonucleotide
  Sense strand starting at position 3721 of SEQ ID NO: 1885822
ugauucuugcauuagaaug

SEQ ID NO: 2370119 - RNA, 19 nt, Artificial Sequence
  Description of Artificial Sequence: Synthetic oligonucleotide
  Antisense strand to SEQ ID NO: 2370118
cauucuaaugcaagaauca

SEQ ID NO: 2370120 - RNA, 19 nt, Artificial Sequence
  Description of Artificial Sequence: Synthetic oligonucleotide
  Sense strand starting at position 3827 of SEQ ID NO: 1885822
ugugguggaccucagaguu

SEQ ID NO: 2370121 - RNA, 19 nt, Artificial Sequence
  Description of Artificial Sequence: Synthetic oligonucleotide
  Antisense strand to SEQ ID NO: 2370120
aacucugagguccaccaca

SEQ ID NO: 2370122 - RNA, 19 nt, Artificial Sequence
  Description of Artificial Sequence: Synthetic oligonucleotide
  Sense strand starting at position 3887 of SEQ ID NO: 1885822
ggucaucauugauccagga

SEQ ID NO: 2370123 - RNA, 19 nt, Artificial Sequence
  Description of Artificial Sequence: Synthetic oligonucleotide
  Antisense strand to SEQ ID NO: 2370122
uccuggaucaaugaugacc

SEQ ID NO: 2370124 - RNA, 19 nt, Artificial Sequence
  Description of Artificial Sequence: Synthetic oligonucleotide
  Sense strand starting at position 15 of SEQ ID NO: 1885823
uugaguccuguuuagcaaa

SEQ ID NO: 2370125 - RNA, 19 nt, Artificial Sequence
  Description of Artificial Sequence: Synthetic oligonucleotide
  Antisense strand to SEQ ID NO: 2370124
uuugcuaaacaggacucaa

SEQ ID NO: 2370126 - RNA, 19 nt, Artificial Sequence
  Description of Artificial Sequence: Synthetic oligonucleotide
  Sense strand starting at position 92 of SEQ ID NO: 1885823
ccaagcaugguguacaaau

SEQ ID NO: 2370127 - RNA, 19 nt, Artificial Sequence
  Description of Artificial Sequence: Synthetic oligonucleotide
  Antisense strand to SEQ ID NO: 2370126
auuuguacaccaugcuugg

SEQ ID NO: 2370128 - RNA, 19 nt, Artificial Sequence
  Description of Artificial Sequence: Synthetic oligonucleotide
  Sense strand starting at position 392 of SEQ ID NO: 1885823
ccguuuauuucucugugga

SEQ ID NO: 2370129 - RNA, 19 nt, Artificial Sequence
  Description of Artificial Sequence: Synthetic oligonucleotide
  Antisense strand to SEQ ID NO: 2370128
uccacagagaaauaaacgg

SEQ ID NO: 2370130 - RNA, 19 nt, Artificial Sequence
  Description of Artificial Sequence: Synthetic oligonucleotide
  Sense strand starting at position 393 of SEQ ID NO: 1885823
cguuuauuucucuguggau

SEQ ID NO: 2370131 - RNA, 19 nt, Artificial Sequence
  Description of Artificial Sequence: Synthetic oligonucleotide
  Antisense strand to SEQ ID NO: 2370130
auccacagagaaauaaacg

SEQ ID NO: 2370132 - RNA, 19 nt, Artificial Sequence
  Description of Artificial Sequence: Synthetic oligonucleotide
  Sense strand starting at position 395 of SEQ ID NO: 1885823
uuuauuucucuguggaugu

SEQ ID NO: 2370133 - RNA, 19 nt, Artificial Sequence
  Description of Artificial Sequence: Synthetic oligonucleotide
  Antisense strand to SEQ ID NO: 2370132
acauccacagagaaauaaa

SEQ ID NO: 2370134 - RNA, 19 nt, Artificial Sequence
  Description of Artificial Sequence: Synthetic oligonucleotide
  Sense strand starting at position 406 of SEQ ID NO: 1885823
guggaugucgcuguuucau

SEQ ID NO: 2370135 - RNA, 19 nt, Artificial Sequence
  Description of Artificial Sequence: Synthetic oligonucleotide
  Antisense strand to SEQ ID NO: 2370134
augaaacagcgacauccac

SEQ ID NO: 2370136 - RNA, 19 nt, Artificial Sequence
  Description of Artificial Sequence: Synthetic oligonucleotide
  Sense strand starting at position 466 of SEQ ID NO: 1885823
auuggacaaugcucgaauu

SEQ ID NO: 2370137 - RNA, 19 nt, Artificial Sequence
  Description of Artificial Sequence: Synthetic oligonucleotide
  Antisense strand to SEQ ID NO: 2370136
aauucgagcauuguccaau

SEQ ID NO: 2370138 - RNA, 19 nt, Artificial Sequence
  Description of Artificial Sequence: Synthetic oligonucleotide
  Sense strand starting at position 582 of SEQ ID NO: 1885823
uucuauacuccugacaguu

SEQ ID NO: 2370139 - RNA, 19 nt, Artificial Sequence
  Description of Artificial Sequence: Synthetic oligonucleotide
  Antisense strand to SEQ ID NO: 2370138
aacugucaggaguauagaa

SEQ ID NO: 2370140 - RNA, 19 nt, Artificial Sequence
  Description of Artificial Sequence: Synthetic oligonucleotide
  Sense strand starting at position 817 of SEQ ID NO: 1885823
ccacaagaauagccaugau

SEQ ID NO: 2370141 - RNA, 19 nt, Artificial Sequence
  Description of Artificial Sequence: Synthetic oligonucleotide
  Antisense strand to SEQ ID NO: 2370140
aucauggcuauucuugugg

SEQ ID NO: 2370142 - RNA, 19 nt, Artificial Sequence
  Description of Artificial Sequence: Synthetic oligonucleotide
  Sense strand starting at position 911 of SEQ ID NO: 1885823
acaucaggcccauguuuau

SEQ ID NO: 2370143 - RNA, 19 nt, Artificial Sequence
  Description of Artificial Sequence: Synthetic oligonucleotide
  Antisense strand to SEQ ID NO: 2370142
auaaacaugggccugaugu

SEQ ID NO: 2370144 - RNA, 19 nt, Artificial Sequence
  Description of Artificial Sequence: Synthetic oligonucleotide
  Sense strand starting at position 1115 of SEQ ID NO: 1885823
gcaaucauucuagggaaua

SEQ ID NO: 2370145 - RNA, 19 nt, Artificial Sequence
  Description of Artificial Sequence: Synthetic oligonucleotide
  Antisense strand to SEQ ID NO: 2370144
uauucccuagaaugauugc

SEQ ID NO: 2370146 - RNA, 19 nt, Artificial Sequence
  Description of Artificial Sequence: Synthetic oligonucleotide
  Sense strand starting at position 1188 of SEQ ID NO: 1885823
ugucaccuaucauuaguua

SEQ ID NO: 2370147 - RNA, 19 nt, Artificial Sequence
  Description of Artificial Sequence: Synthetic oligonucleotide
  Antisense strand to SEQ ID NO: 2370146
uaacuaaugauaggugaca

SEQ ID NO: 2370148 - RNA, 19 nt, Artificial Sequence
  Description of Artificial Sequence: Synthetic oligonucleotide
  Sense strand starting at position 1269 of SEQ ID NO: 1885823
aauugucguugacccagaa

SEQ ID NO: 2370149 - RNA, 19 nt, Artificial Sequence
  Description of Artificial Sequence: Synthetic oligonucleotide
  Antisense strand to SEQ ID NO: 2370148
uucugggucaacgacaauu

SEQ ID NO: 2370150 - RNA, 19 nt, Artificial Sequence
  Description of Artificial Sequence: Synthetic oligonucleotide
  Sense strand starting at position 1273 of SEQ ID NO: 1885823
gucguugacccagaaauug

SEQ ID NO: 2370151 - RNA, 19 nt, Artificial Sequence
  Description of Artificial Sequence: Synthetic oligonucleotide
  Antisense strand to SEQ ID NO: 2370150
caauuucugggucaacgac

SEQ ID NO: 2370152 - RNA, 19 nt, Artificial Sequence
  Description of Artificial Sequence: Synthetic oligonucleotide
  Sense strand starting at position 1387 of SEQ ID NO: 1885823
agauauuaagagugcuucu

SEQ ID NO: 2370153 - RNA, 19 nt, Artificial Sequence
  Description of Artificial Sequence: Synthetic oligonucleotide
  Antisense strand to SEQ ID NO: 2370152
agaagcacucuuaauaucu

SEQ ID NO: 2370154 - RNA, 19 nt, Artificial Sequence
  Description of Artificial Sequence: Synthetic oligonucleotide
  Sense strand starting at position 1732 of SEQ ID NO: 1885823
auuguuauacuuggccaau

SEQ ID NO: 2370155 - RNA, 19 nt, Artificial Sequence
  Description of Artificial Sequence: Synthetic oligonucleotide
  Antisense strand to SEQ ID NO: 2370154
auuggccaaguauaacaau

SEQ ID NO: 2370156 - RNA, 19 nt, Artificial Sequence
  Description of Artificial Sequence: Synthetic oligonucleotide
  Sense strand starting at position 1733 of SEQ ID NO: 1885823
uuguuauacuuggccaaug

SEQ ID NO: 2370157 - RNA, 19 nt, Artificial Sequence
  Description of Artificial Sequence: Synthetic oligonucleotide
  Antisense strand to SEQ ID NO: 2370156
cauuggccaaguauaacaa

SEQ ID NO: 2370158 - RNA, 19 nt, Artificial Sequence
  Description of Artificial Sequence: Synthetic oligonucleotide
  Sense strand starting at position 1797 of SEQ ID NO: 1885823
ccuugcauugaccaguuau

SEQ ID NO: 2370159 - RNA, 19 nt, Artificial Sequence
  Description of Artificial Sequence: Synthetic oligonucleotide
  Antisense strand to SEQ ID NO: 2370158
auaacuggucaaugcaagg

SEQ ID NO: 2370160 - RNA, 19 nt, Artificial Sequence
  Description of Artificial Sequence: Synthetic oligonucleotide
  Sense strand starting at position 1917 of SEQ ID NO: 1885823
gauuucuucugugacagac

SEQ ID NO: 2370161 - RNA, 19 nt, Artificial Sequence
  Description of Artificial Sequence: Synthetic oligonucleotide
  Antisense strand to SEQ ID NO: 2370160
gucugucacagaagaaauc

SEQ ID NO: 2370162 - RNA, 19 nt, Artificial Sequence
  Description of Artificial Sequence: Synthetic oligonucleotide
  Sense strand starting at position 2000 of SEQ ID NO: 1885823
caggauggaucaucuguuu

SEQ ID NO: 2370163 - RNA, 19 nt, Artificial Sequence
  Description of Artificial Sequence: Synthetic oligonucleotide
  Antisense strand to SEQ ID NO: 2370162
aaacagaugauccauccug

SEQ ID NO: 2370164 - RNA, 19 nt, Artificial Sequence
  Description of Artificial Sequence: Synthetic oligonucleotide
  Sense strand starting at position 2031 of SEQ ID NO: 1885823
cugccucauuuguugauua

SEQ ID NO: 2370165 - RNA, 19 nt, Artificial Sequence
  Description of Artificial Sequence: Synthetic oligonucleotide
  Antisense strand to SEQ ID NO: 2370164
uaaucaacaaaugaggcag

SEQ ID NO: 2370166 - RNA, 19 nt, Artificial Sequence
  Description of Artificial Sequence: Synthetic oligonucleotide
  Sense strand starting at position 2100 of SEQ ID NO: 1885823
uauggagagcuguauacgu

SEQ ID NO: 2370167 - RNA, 19 nt, Artificial Sequence
  Description of Artificial Sequence: Synthetic oligonucleotide
  Antisense strand to SEQ ID NO: 2370166
acguauacagcucuccaua

SEQ ID NO: 2370168 - RNA, 19 nt, Artificial Sequence
  Description of Artificial Sequence: Synthetic oligonucleotide
  Sense strand starting at position 2108 of SEQ ID NO: 1885823
gcuguauacgucuaaauaa

SEQ ID NO: 2370169 - RNA, 19 nt, Artificial Sequence
  Description of Artificial Sequence: Synthetic oligonucleotide
  Antisense strand to SEQ ID NO: 2370168
uuauuuagacguauacagc

SEQ ID NO: 2370170 - RNA, 19 nt, Artificial Sequence
  Description of Artificial Sequence: Synthetic oligonucleotide
  Sense strand starting at position 2235 of SEQ ID NO: 1885823
uugggauagaguuggccau

SEQ ID NO: 2370171 - RNA, 19 nt, Artificial Sequence
  Description of Artificial Sequence: Synthetic oligonucleotide
  Antisense strand to SEQ ID NO: 2370170
auggccaacucuaucccaa

SEQ ID NO: 2370172 - RNA, 19 nt, Artificial Sequence
  Description of Artificial Sequence: Synthetic oligonucleotide
  Sense strand starting at position 2239 of SEQ ID NO: 1885823
gauagaguuggccaucuuu

SEQ ID NO: 2370173 - RNA, 19 nt, Artificial Sequence
  Description of Artificial Sequence: Synthetic oligonucleotide
  Antisense strand to SEQ ID NO: 2370172
aaagauggccaacucuauc

SEQ ID NO: 2370174 - RNA, 19 nt, Artificial Sequence
  Description of Artificial Sequence: Synthetic oligonucleotide
  Sense strand starting at position 2245 of SEQ ID NO: 1885823
guuggccaucuuuaauuau

SEQ ID NO: 2370175 - RNA, 19 nt, Artificial Sequence
  Description of Artificial Sequence: Synthetic oligonucleotide
  Antisense strand to SEQ ID NO: 2370174
auaauuaaagauggccaac

SEQ ID NO: 2370176 - RNA, 19 nt, Artificial Sequence
  Description of Artificial Sequence: Synthetic oligonucleotide
  Sense strand starting at position 2455 of SEQ ID NO: 1885823
ugauaacaauaugagacau

SEQ ID NO: 2370177 - RNA, 19 nt, Artificial Sequence
  Description of Artificial Sequence: Synthetic oligonucleotide
  Antisense strand to SEQ ID NO: 2370176
augucucauauuguuauca

SEQ ID NO: 2370178 - RNA, 19 nt, Artificial Sequence
  Description of Artificial Sequence: Synthetic oligonucleotide
  Sense strand starting at position 2814 of SEQ ID NO: 1885823
uuccauugugauggacgau

SEQ ID NO: 2370179 - RNA, 19 nt, Artificial Sequence
  Description of Artificial Sequence: Synthetic oligonucleotide
  Antisense strand to SEQ ID NO: 2370178
aucguccaucacaauggaa

SEQ ID NO: 2370180 - RNA, 19 nt, Artificial Sequence
  Description of Artificial Sequence: Synthetic oligonucleotide
  Sense strand starting at position 2817 of SEQ ID NO: 1885823
cauugugauggacgaugga

SEQ ID NO: 2370181 - RNA, 19 nt, Artificial Sequence
  Description of Artificial Sequence: Synthetic oligonucleotide
  Antisense strand to SEQ ID NO: 2370180
uccaucguccaucacaaug

SEQ ID NO: 2370182 - RNA, 19 nt, Artificial Sequence
  Description of Artificial Sequence: Synthetic oligonucleotide
  Sense strand starting at position 2827 of SEQ ID NO: 1885823
gacgauggaccucagaguu

SEQ ID NO: 2370183 - RNA, 19 nt, Artificial Sequence
  Description of Artificial Sequence: Synthetic oligonucleotide
  Antisense strand to SEQ ID NO: 2370182
aacucugagguccaucguc

SEQ ID NO: 2370184 - RNA, 19 nt, Artificial Sequence
  Description of Artificial Sequence: Synthetic oligonucleotide
  Sense strand starting at position 3169 of SEQ ID NO: 1885823
ugauaauacccugaguccu

SEQ ID NO: 2370185 - RNA, 19 nt, Artificial Sequence
  Description of Artificial Sequence: Synthetic oligonucleotide
  Antisense strand to SEQ ID NO: 2370184
aggacucaggguauuauca

SEQ ID NO: 2370186 - RNA, 19 nt, Artificial Sequence
  Description of Artificial Sequence: Synthetic oligonucleotide
  Sense strand starting at position 3196 of SEQ ID NO: 1885823
aaccauucgggccaagaua

SEQ ID NO: 2370187 - RNA, 19 nt, Artificial Sequence
  Description of Artificial Sequence: Synthetic oligonucleotide
  Antisense strand to SEQ ID NO: 2370186
uaucuuggcccgaaugguu

SEQ ID NO: 2370188 - RNA, 19 nt, Artificial Sequence
  Description of Artificial Sequence: Synthetic oligonucleotide
  Sense strand starting at position 3220 of SEQ ID NO: 1885823
guugauuacuacucacauu

SEQ ID NO: 2370189 - RNA, 19 nt, Artificial Sequence
  Description of Artificial Sequence: Synthetic oligonucleotide
  Antisense strand to SEQ ID NO: 2370188
aaugugaguaguaaucaac

SEQ ID NO: 2370190 - RNA, 19 nt, Artificial Sequence
  Description of Artificial Sequence: Synthetic oligonucleotide
  Sense strand starting at position 3524 of SEQ ID NO: 1885823
cgccauuuaugucuuucua

SEQ ID NO: 2370191 - RNA, 19 nt, Artificial Sequence
  Description of Artificial Sequence: Synthetic oligonucleotide
  Antisense strand to SEQ ID NO: 2370190
uagaaagacauaaauggcg

SEQ ID NO: 2370192 - RNA, 19 nt, Artificial Sequence
  Description of Artificial Sequence: Synthetic oligonucleotide
  Sense strand starting at position 3595 of SEQ ID NO: 1885823
uuuauaauugggcaguguu

SEQ ID NO: 2370193 - RNA, 19 nt, Artificial Sequence
  Description of Artificial Sequence: Synthetic oligonucleotide
  Antisense strand to SEQ ID NO: 2370192
aacacugcccaauuauaaa

SEQ ID NO: 2370194 - RNA, 19 nt, Artificial Sequence
  Description of Artificial Sequence: Synthetic oligonucleotide
  Sense strand starting at position 3642 of SEQ ID NO: 1885823
guuuccugauucucacauu

SEQ ID NO: 2370195 - RNA, 19 nt, Artificial Sequence
  Description of Artificial Sequence: Synthetic oligonucleotide
  Antisense strand to SEQ ID NO: 2370194
aaugugagaaucaggaaac

SEQ ID NO: 2370196 - RNA, 19 nt, Artificial Sequence
  Description of Artificial Sequence: Synthetic oligonucleotide
  Sense strand starting at position 3725 of SEQ ID NO: 1885823
uuuaaaucugucuguaaca

SEQ ID NO: 2370197 - RNA, 19 nt, Artificial Sequence
  Description of Artificial Sequence: Synthetic oligonucleotide
  Antisense strand to SEQ ID NO: 2370196
uguuacagacagauuuaaa

SEQ ID NO: 2370198 - RNA, 19 nt, Artificial Sequence
  Description of Artificial Sequence: Synthetic oligonucleotide
  Sense strand starting at position 3726 of SEQ ID NO: 1885823
uuaaaucugucuguaacac

SEQ ID NO: 2370199 - RNA, 19 nt, Artificial Sequence
  Description of Artificial Sequence: Synthetic oligonucleotide
  Antisense strand to SEQ ID NO: 2370198
guguuacagacagauuuaa

SEQ ID NO: 2370200 - RNA, 19 nt, Artificial Sequence
  Description of Artificial Sequence: Synthetic oligonucleotide
  Sense strand starting at position 3847 of SEQ ID NO: 1885823
gauccagaauguguccuau

SEQ ID NO: 2370201 - RNA, 19 nt, Artificial Sequence
  Description of Artificial Sequence: Synthetic oligonucleotide
  Antisense strand to SEQ ID NO: 2370200
auaggacacauucuggauc

SEQ ID NO: 2370202 - RNA, 19 nt, Artificial Sequence
  Description of Artificial Sequence: Synthetic oligonucleotide
  Sense strand starting at position 3948 of SEQ ID NO: 1885823
gccucagaacagcauuaau

SEQ ID NO: 2370203 - RNA, 19 nt, Artificial Sequence
  Description of Artificial Sequence: Synthetic oligonucleotide
  Antisense strand to SEQ ID NO: 2370202
auuaaugcuguucugaggc

SEQ ID NO: 2370204 - RNA, 19 nt, Artificial Sequence
  Description of Artificial Sequence: Synthetic oligonucleotide
  Sense strand starting at position 402 of SEQ ID NO: 1885824
agacaagagcuuugaccau

SEQ ID NO: 2370205 - RNA, 19 nt, Artificial Sequence
  Description of Artificial Sequence: Synthetic oligonucleotide
  Antisense strand to SEQ ID NO: 2370204
auggucaaagcucuugucu

SEQ ID NO: 2370206 - RNA, 19 nt, Artificial Sequence
  Description of Artificial Sequence: Synthetic oligonucleotide
  Sense strand starting at position 508 of SEQ ID NO: 1885824
guccauucugaugagugca

SEQ ID NO: 2370207 - RNA, 19 nt, Artificial Sequence
  Description of Artificial Sequence: Synthetic oligonucleotide
  Antisense strand to SEQ ID NO: 2370206
ugcacucaucagaauggac

SEQ ID NO: 2370208 - RNA, 19 nt, Artificial Sequence
  Description of Artificial Sequence: Synthetic oligonucleotide
  Sense strand starting at position 510 of SEQ ID NO: 1885824
ccauucugaugagugcaga

SEQ ID NO: 2370209 - RNA, 19 nt, Artificial Sequence
  Description of Artificial Sequence: Synthetic oligonucleotide
  Antisense strand to SEQ ID NO: 2370208
ucugcacucaucagaaugg

SEQ ID NO: 2370210 - RNA, 19 nt, Artificial Sequence
  Description of Artificial Sequence: Synthetic oligonucleotide
  Sense strand starting at position 581 of SEQ ID NO: 1885824
uuuaccuaucuguaguuaa

SEQ ID NO: 2370211 - RNA, 19 nt, Artificial Sequence
  Description of Artificial Sequence: Synthetic oligonucleotide
  Antisense strand to SEQ ID NO: 2370210
uuaacuacagauagguaaa

SEQ ID NO: 2370212 - RNA, 19 nt, Artificial Sequence
  Description of Artificial Sequence: Synthetic oligonucleotide
  Sense strand starting at position 584 of SEQ ID NO: 1885824
accuaucuguaguuaaaca

SEQ ID NO: 2370213 - RNA, 19 nt, Artificial Sequence
  Description of Artificial Sequence: Synthetic oligonucleotide
  Antisense strand to SEQ ID NO: 2370212
uguuuaacuacagauaggu

SEQ ID NO: 2370214 - RNA, 19 nt, Artificial Sequence
  Description of Artificial Sequence: Synthetic oligonucleotide
  Sense strand starting at position 607 of SEQ ID NO: 1885824
ggcaaucguuauuugaagu

SEQ ID NO: 2370215 - RNA, 19 nt, Artificial Sequence
  Description of Artificial Sequence: Synthetic oligonucleotide
  Antisense strand to SEQ ID NO: 2370214
acuucaaauaacgauugcc

SEQ ID NO: 2370216 - RNA, 19 nt, Artificial Sequence
  Description of Artificial Sequence: Synthetic oligonucleotide
  Sense strand starting at position 608 of SEQ ID NO: 1885824
gcaaucguuauuugaagua

SEQ ID NO: 2370217 - RNA, 19 nt, Artificial Sequence
  Description of Artificial Sequence: Synthetic oligonucleotide
  Antisense strand to SEQ ID NO: 2370216
uacuucaaauaacgauugc

SEQ ID NO: 2370218 - RNA, 19 nt, Artificial Sequence
  Description of Artificial Sequence: Synthetic oligonucleotide
  Sense strand starting at position 705 of SEQ ID NO: 1885824
aaagguuagguauguuaga

SEQ ID NO: 2370219 - RNA, 19 nt, Artificial Sequence
  Description of Artificial Sequence: Synthetic oligonucleotide
  Antisense strand to SEQ ID NO: 2370218
ucuaacauaccuaaccuuu

SEQ ID NO: 2370220 - RNA, 19 nt, Artificial Sequence
  Description of Artificial Sequence: Synthetic oligonucleotide
  Sense strand starting at position 706 of SEQ ID NO: 1885824
aagguuagguauguuagau

SEQ ID NO: 2370221 - RNA, 19 nt, Artificial Sequence
  Description of Artificial Sequence: Synthetic oligonucleotide
  Antisense strand to SEQ ID NO: 2370220
aucuaacauaccuaaccuu

SEQ ID NO: 2370222 - RNA, 19 nt, Artificial Sequence
  Description of Artificial Sequence: Synthetic oligonucleotide
  Sense strand starting at position 890 of SEQ ID NO: 1885824
cuugucaucuaucuacaga

SEQ ID NO: 2370223 - RNA, 19 nt, Artificial Sequence
  Description of Artificial Sequence: Synthetic oligonucleotide
  Antisense strand to SEQ ID NO: 2370222
ucuguagauagaugacaag

SEQ ID NO: 2370224 - RNA, 19 nt, Artificial Sequence
  Description of Artificial Sequence: Synthetic oligonucleotide
  Sense strand starting at position 893 of SEQ ID NO: 1885824
gucaucuaucuacagaguu

SEQ ID NO: 2370225 - RNA, 19 nt, Artificial Sequence
  Description of Artificial Sequence: Synthetic oligonucleotide
  Antisense strand to SEQ ID NO: 2370224
aacucuguagauagaugac

SEQ ID NO: 2370226 - RNA, 19 nt, Artificial Sequence
  Description of Artificial Sequence: Synthetic oligonucleotide
  Sense strand starting at position 901 of SEQ ID NO: 1885824
ucuacagaguuaguugaaa

SEQ ID NO: 2370227 - RNA, 19 nt, Artificial Sequence
  Description of Artificial Sequence: Synthetic oligonucleotide
  Antisense strand to SEQ ID NO: 2370226
uuucaacuaacucuguaga

SEQ ID NO: 2370228 - RNA, 19 nt, Artificial Sequence
  Description of Artificial Sequence: Synthetic oligonucleotide
  Sense strand starting at position 927 of SEQ ID NO: 1885824
aacugacuucugcgaugga

SEQ ID NO: 2370229 - RNA, 19 nt, Artificial Sequence
  Description of Artificial Sequence: Synthetic oligonucleotide
  Antisense strand to SEQ ID NO: 2370228
uccaucgcagaagucaguu

SEQ ID NO: 2370230 - RNA, 19 nt, Artificial Sequence
  Description of Artificial Sequence: Synthetic oligonucleotide
  Sense strand starting at position 937 of SEQ ID NO: 1885824
ugcgauggaccucagaguu

SEQ ID NO: 2370231 - RNA, 19 nt, Artificial Sequence
  Description of Artificial Sequence: Synthetic oligonucleotide
  Antisense strand to SEQ ID NO: 2370230
aacucugagguccaucgca

SEQ ID NO: 2370232 - RNA, 19 nt, Artificial Sequence
  Description of Artificial Sequence: Synthetic oligonucleotide
  Sense strand starting at position 1243 of SEQ ID NO: 1885824
cugggacauaguugaccau

SEQ ID NO: 2370233 - RNA, 19 nt, Artificial Sequence
  Description of Artificial Sequence: Synthetic oligonucleotide
  Antisense strand to SEQ ID NO: 2370232
auggucaacuaugucccag

SEQ ID NO: 2370234 - RNA, 19 nt, Artificial Sequence
  Description of Artificial Sequence: Synthetic oligonucleotide
  Sense strand starting at position 1246 of SEQ ID NO: 1885824
ggacauaguugaccauagu

SEQ ID NO: 2370235 - RNA, 19 nt, Artificial Sequence
  Description of Artificial Sequence: Synthetic oligonucleotide
  Antisense strand to SEQ ID NO: 2370234
acuauggucaacuaugucc

SEQ ID NO: 2370236 - RNA, 19 nt, Artificial Sequence
  Description of Artificial Sequence: Synthetic oligonucleotide
  Sense strand starting at position 1247 of SEQ ID NO: 1885824
gacauaguugaccauaguu

SEQ ID NO: 2370237 - RNA, 19 nt, Artificial Sequence
  Description of Artificial Sequence: Synthetic oligonucleotide
  Antisense strand to SEQ ID NO: 2370236
aacuauggucaacuauguc

SEQ ID NO: 2370238 - RNA, 19 nt, Artificial Sequence
  Description of Artificial Sequence: Synthetic oligonucleotide
  Sense strand starting at position 1249 of SEQ ID NO: 1885824
cauaguugaccauaguuga

SEQ ID NO: 2370239 - RNA, 19 nt, Artificial Sequence
  Description of Artificial Sequence: Synthetic oligonucleotide
  Antisense strand to SEQ ID NO: 2370238
ucaacuauggucaacuaug

SEQ ID NO: 2370240 - RNA, 19 nt, Artificial Sequence
  Description of Artificial Sequence: Synthetic oligonucleotide
  Sense strand starting at position 1295 of SEQ ID NO: 1885824
uugaguccuguuuagcaaa

SEQ ID NO: 2370241 - RNA, 19 nt, Artificial Sequence
  Description of Artificial Sequence: Synthetic oligonucleotide
  Antisense strand to SEQ ID NO: 2370240
uuugcuaaacaggacucaa

SEQ ID NO: 2370242 - RNA, 19 nt, Artificial Sequence
  Description of Artificial Sequence: Synthetic oligonucleotide
  Sense strand starting at position 1372 of SEQ ID NO: 1885824
ccaagcaugguguacaaau

SEQ ID NO: 2370243 - RNA, 19 nt, Artificial Sequence
  Description of Artificial Sequence: Synthetic oligonucleotide
  Antisense strand to SEQ ID NO: 2370242
auuuguacaccaugcuugg

SEQ ID NO: 2370244 - RNA, 19 nt, Artificial Sequence
  Description of Artificial Sequence: Synthetic oligonucleotide
  Sense strand starting at position 1672 of SEQ ID NO: 1885824
ccguuuauuucucugugga

SEQ ID NO: 2370245 - RNA, 19 nt, Artificial Sequence
  Description of Artificial Sequence: Synthetic oligonucleotide
  Antisense strand to SEQ ID NO: 2370244
uccacagagaaauaaacgg

SEQ ID NO: 2370246 - RNA, 19 nt, Artificial Sequence
  Description of Artificial Sequence: Synthetic oligonucleotide
  Sense strand starting at position 1673 of SEQ ID NO: 1885824
cguuuauuucucuguggau

SEQ ID NO: 2370247 - RNA, 19 nt, Artificial Sequence
  Description of Artificial Sequence: Synthetic oligonucleotide
  Antisense strand to SEQ ID NO: 2370246
auccacagagaaauaaacg

SEQ ID NO: 2370248 - RNA, 19 nt, Artificial Sequence
  Description of Artificial Sequence: Synthetic oligonucleotide
  Sense strand starting at position 1675 of SEQ ID NO: 1885824
uuuauuucucuguggaugu

SEQ ID NO: 2370249 - RNA, 19 nt, Artificial Sequence
  Description of Artificial Sequence: Synthetic oligonucleotide
  Antisense strand to SEQ ID NO: 2370248
acauccacagagaaauaaa

SEQ ID NO: 2370250 - RNA, 19 nt, Artificial Sequence
  Description of Artificial Sequence: Synthetic oligonucleotide
  Sense strand starting at position 1686 of SEQ ID NO: 1885824
guggaugucgcuguuucau

SEQ ID NO: 2370251 - RNA, 19 nt, Artificial Sequence
  Description of Artificial Sequence: Synthetic oligonucleotide
  Antisense strand to SEQ ID NO: 2370250
augaaacagcgacauccac

SEQ ID NO: 2370252 - RNA, 19 nt, Artificial Sequence
  Description of Artificial Sequence: Synthetic oligonucleotide
  Sense strand starting at position 1746 of SEQ ID NO: 1885824
auuggacaaugcucgaauu

SEQ ID NO: 2370253 - RNA, 19 nt, Artificial Sequence
  Description of Artificial Sequence: Synthetic oligonucleotide
  Antisense strand to SEQ ID NO: 2370252
aauucgagcauuguccaau

SEQ ID NO: 2370254 - RNA, 19 nt, Artificial Sequence
  Description of Artificial Sequence: Synthetic oligonucleotide
  Sense strand starting at position 1862 of SEQ ID NO: 1885824
uucuauacuccugacaguu

SEQ ID NO: 2370255 - RNA, 19 nt, Artificial Sequence
  Description of Artificial Sequence: Synthetic oligonucleotide
  Antisense strand to SEQ ID NO: 2370254
aacugucaggaguauagaa

SEQ ID NO: 2370256 - RNA, 19 nt, Artificial Sequence
  Description of Artificial Sequence: Synthetic oligonucleotide
  Sense strand starting at position 2097 of SEQ ID NO: 1885824
ccacaagaauagccaugau

SEQ ID NO: 2370257 - RNA, 19 nt, Artificial Sequence
  Description of Artificial Sequence: Synthetic oligonucleotide
  Antisense strand to SEQ ID NO: 2370256
aucauggcuauucuugugg

SEQ ID NO: 2370258 - RNA, 19 nt, Artificial Sequence
  Description of Artificial Sequence: Synthetic oligonucleotide
  Sense strand starting at position 2395 of SEQ ID NO: 1885824
gcaaucauucuagggaaua

SEQ ID NO: 2370259 - RNA, 19 nt, Artificial Sequence
  Description of Artificial Sequence: Synthetic oligonucleotide
  Antisense strand to SEQ ID NO: 2370258
uauucccuagaaugauugc

SEQ ID NO: 2370260 - RNA, 19 nt, Artificial Sequence
  Description of Artificial Sequence: Synthetic oligonucleotide
  Sense strand starting at position 2468 of SEQ ID NO: 1885824
ugucaccuaucauuaguua

SEQ ID NO: 2370261 - RNA, 19 nt, Artificial Sequence
  Description of Artificial Sequence: Synthetic oligonucleotide
  Antisense strand to SEQ ID NO: 2370260
uaacuaaugauaggugaca

SEQ ID NO: 2370262 - RNA, 19 nt, Artificial Sequence
  Description of Artificial Sequence: Synthetic oligonucleotide
  Sense strand starting at position 2549 of SEQ ID NO: 1885824
aauugucguugacccagaa

SEQ ID NO: 2370263 - RNA, 19 nt, Artificial Sequence
  Description of Artificial Sequence: Synthetic oligonucleotide
  Antisense strand to SEQ ID NO: 2370262
uucugggucaacgacaauu

SEQ ID NO: 2370264 - RNA, 19 nt, Artificial Sequence
  Description of Artificial Sequence: Synthetic oligonucleotide
  Sense strand starting at position 2553 of SEQ ID NO: 1885824
gucguugacccagaaauug

SEQ ID NO: 2370265 - RNA, 19 nt, Artificial Sequence
  Description of Artificial Sequence: Synthetic oligonucleotide
  Antisense strand to SEQ ID NO: 2370264
caauuucugggucaacgac

SEQ ID NO: 2370266 - RNA, 19 nt, Artificial Sequence
  Description of Artificial Sequence: Synthetic oligonucleotide
  Sense strand starting at position 2667 of SEQ ID NO: 1885824
agauauuaagagugcuucu

SEQ ID NO: 2370267 - RNA, 19 nt, Artificial Sequence
  Description of Artificial Sequence: Synthetic oligonucleotide
  Antisense strand to SEQ ID NO: 2370266
agaagcacucuuaauaucu

SEQ ID NO: 2370268 - RNA, 19 nt, Artificial Sequence
  Description of Artificial Sequence: Synthetic oligonucleotide
  Sense strand starting at position 3077 of SEQ ID NO: 1885824
ccuugcauugaccaguuau

SEQ ID NO: 2370269 - RNA, 19 nt, Artificial Sequence
  Description of Artificial Sequence: Synthetic oligonucleotide
  Antisense strand to SEQ ID NO: 2370268
auaacuggucaaugcaagg

SEQ ID NO: 2370270 - RNA, 19 nt, Artificial Sequence
  Description of Artificial Sequence: Synthetic oligonucleotide
  Sense strand starting at position 3280 of SEQ ID NO: 1885824
caggauggaucaucuguuu

SEQ ID NO: 2370271 - RNA, 19 nt, Artificial Sequence
  Description of Artificial Sequence: Synthetic oligonucleotide
  Antisense strand to SEQ ID NO: 2370270
aaacagaugauccauccug

SEQ ID NO: 2370272 - RNA, 19 nt, Artificial Sequence
  Description of Artificial Sequence: Synthetic oligonucleotide
  Sense strand starting at position 3311 of SEQ ID NO: 1885824
cugccucauuuguugauua

SEQ ID NO: 2370273 - RNA, 19 nt, Artificial Sequence
  Description of Artificial Sequence: Synthetic oligonucleotide
  Antisense strand to SEQ ID NO: 2370272
uaaucaacaaaugaggcag

SEQ ID NO: 2370274 - RNA, 19 nt, Artificial Sequence
  Description of Artificial Sequence: Synthetic oligonucleotide
  Sense strand starting at position 3380 of SEQ ID NO: 1885824
uauggagagcuguauacgu

SEQ ID NO: 2370275 - RNA, 19 nt, Artificial Sequence
  Description of Artificial Sequence: Synthetic oligonucleotide
  Antisense strand to SEQ ID NO: 2370274
acguauacagcucuccaua

SEQ ID NO: 2370276 - RNA, 19 nt, Artificial Sequence
  Description of Artificial Sequence: Synthetic oligonucleotide
  Sense strand starting at position 3388 of SEQ ID NO: 1885824
gcuguauacgucuaaauaa

SEQ ID NO: 2370277 - RNA, 19 nt, Artificial Sequence
  Description of Artificial Sequence: Synthetic oligonucleotide
  Antisense strand to SEQ ID NO: 2370276
uuauuuagacguauacagc

SEQ ID NO: 2370278 - RNA, 19 nt, Artificial Sequence
  Description of Artificial Sequence: Synthetic oligonucleotide
  Sense strand starting at position 3515 of SEQ ID NO: 1885824
uugggauagaguuggccau

SEQ ID NO: 2370279 - RNA, 19 nt, Artificial Sequence
  Description of Artificial Sequence: Synthetic oligonucleotide
  Antisense strand to SEQ ID NO: 2370278
auggccaacucuaucccaa

SEQ ID NO: 2370280 - RNA, 19 nt, Artificial Sequence
  Description of Artificial Sequence: Synthetic oligonucleotide
  Sense strand starting at position 3519 of SEQ ID NO: 1885824
gauagaguuggccaucuuu

SEQ ID NO: 2370281 - RNA, 19 nt, Artificial Sequence
  Description of Artificial Sequence: Synthetic oligonucleotide
  Antisense strand to SEQ ID NO: 2370280
aaagauggccaacucuauc

SEQ ID NO: 2370282 - RNA, 19 nt, Artificial Sequence
  Description of Artificial Sequence: Synthetic oligonucleotide
  Sense strand starting at position 3525 of SEQ ID NO: 1885824
guuggccaucuuuaauuau

SEQ ID NO: 2370283 - RNA, 19 nt, Artificial Sequence
  Description of Artificial Sequence: Synthetic oligonucleotide
  Antisense strand to SEQ ID NO: 2370282
auaauuaaagauggccaac

SEQ ID NO: 2370284 - RNA, 19 nt, Artificial Sequence
  Description of Artificial Sequence: Synthetic oligonucleotide
  Sense strand starting at position 160 of SEQ ID NO: 1885825
ggcggacaucuuugauaau

SEQ ID NO: 2370285 - RNA, 19 nt, Artificial Sequence
  Description of Artificial Sequence: Synthetic oligonucleotide
  Antisense strand to SEQ ID NO: 2370284
auuaucaaagauguccgcc

SEQ ID NO: 2370286 - RNA, 19 nt, Artificial Sequence
  Description of Artificial Sequence: Synthetic oligonucleotide
  Sense strand starting at position 257 of SEQ ID NO: 1885825
auuagucauccggagccua

SEQ ID NO: 2370287 - RNA, 19 nt, Artificial Sequence
  Description of Artificial Sequence: Synthetic oligonucleotide
  Antisense strand to SEQ ID NO: 2370286
uaggcuccggaugacuaau

SEQ ID NO: 2370288 - RNA, 19 nt, Artificial Sequence
  Description of Artificial Sequence: Synthetic oligonucleotide
  Sense strand starting at position 332 of SEQ ID NO: 1885825
auccauucugcagagcaca

SEQ ID NO: 2370289 - RNA, 19 nt, Artificial Sequence
  Description of Artificial Sequence: Synthetic oligonucleotide
  Antisense strand to SEQ ID NO: 2370288
ugugcucugcagaauggau

SEQ ID NO: 2370290 - RNA, 19 nt, Artificial Sequence
  Description of Artificial Sequence: Synthetic oligonucleotide
  Sense strand starting at position 516 of SEQ ID NO: 1885825
guuuauacugucuacacua

SEQ ID NO: 2370291 - RNA, 19 nt, Artificial Sequence
  Description of Artificial Sequence: Synthetic oligonucleotide
  Antisense strand to SEQ ID NO: 2370290
uaguguagacaguauaaac

SEQ ID NO: 2370292 - RNA, 19 nt, Artificial Sequence
  Description of Artificial Sequence: Synthetic oligonucleotide
  Sense strand starting at position 607 of SEQ ID NO: 1885825
gugcuugcugccucaucaa

SEQ ID NO: 2370293 - RNA, 19 nt, Artificial Sequence
  Description of Artificial Sequence: Synthetic oligonucleotide
  Antisense strand to SEQ ID NO: 2370292
uugaugaggcagcaagcac

SEQ ID NO: 2370294 - RNA, 19 nt, Artificial Sequence
  Description of Artificial Sequence: Synthetic oligonucleotide
  Sense strand starting at position 634 of SEQ ID NO: 1885825
auaauuggacaaugcuuaa

SEQ ID NO: 2370295 - RNA, 19 nt, Artificial Sequence
  Description of Artificial Sequence: Synthetic oligonucleotide
  Antisense strand to SEQ ID NO: 2370294
uuaagcauuguccaauuau

SEQ ID NO: 2370296 - RNA, 19 nt, Artificial Sequence
  Description of Artificial Sequence: Synthetic oligonucleotide
  Sense strand starting at position 683 of SEQ ID NO: 1885825
gcuuauugauucucacuga

SEQ ID NO: 2370297 - RNA, 19 nt, Artificial Sequence
  Description of Artificial Sequence: Synthetic oligonucleotide
  Antisense strand to SEQ ID NO: 2370296
ucagugagaaucaauaagc

SEQ ID NO: 2370298 - RNA, 19 nt, Artificial Sequence
  Description of Artificial Sequence: Synthetic oligonucleotide
  Sense strand starting at position 758 of SEQ ID NO: 1885825
gucuguauuccugacaucu

SEQ ID NO: 2370299 - RNA, 19 nt, Artificial Sequence
  Description of Artificial Sequence: Synthetic oligonucleotide
  Antisense strand to SEQ ID NO: 2370298
agaugucaggaauacagac

SEQ ID NO: 2370300 - RNA, 19 nt, Artificial Sequence
  Description of Artificial Sequence: Synthetic oligonucleotide
  Sense strand starting at position 813 of SEQ ID NO: 1885825
ucugaugggccucagaguu

SEQ ID NO: 2370301 - RNA, 19 nt, Artificial Sequence
  Description of Artificial Sequence: Synthetic oligonucleotide
  Antisense strand to SEQ ID NO: 2370300
aacucugaggcccaucaga

SEQ ID NO: 2370302 - RNA, 19 nt, Artificial Sequence
  Description of Artificial Sequence: Synthetic oligonucleotide
  Sense strand starting at position 979 of SEQ ID NO: 1885825
auccaagagcuuugauauu

SEQ ID NO: 2370303 - RNA, 19 nt, Artificial Sequence
  Description of Artificial Sequence: Synthetic oligonucleotide
  Antisense strand to SEQ ID NO: 2370302
aauaucaaagcucuuggau

SEQ ID NO: 2370304 - RNA, 19 nt, Artificial Sequence
  Description of Artificial Sequence: Synthetic oligonucleotide
  Sense strand starting at position 1391 of SEQ ID NO: 1885825
agacaagagcuuugaccau

SEQ ID NO: 2370305 - RNA, 19 nt, Artificial Sequence
  Description of Artificial Sequence: Synthetic oligonucleotide
  Antisense strand to SEQ ID NO: 2370304
auggucaaagcucuugucu

SEQ ID NO: 2370306 - RNA, 19 nt, Artificial Sequence
  Description of Artificial Sequence: Synthetic oligonucleotide
  Sense strand starting at position 1497 of SEQ ID NO: 1885825
guccauucugaugagugca

SEQ ID NO: 2370307 - RNA, 19 nt, Artificial Sequence
  Description of Artificial Sequence: Synthetic oligonucleotide
  Antisense strand to SEQ ID NO: 2370306
ugcacucaucagaauggac

SEQ ID NO: 2370308 - RNA, 19 nt, Artificial Sequence
  Description of Artificial Sequence: Synthetic oligonucleotide
  Sense strand starting at position 1499 of SEQ ID NO: 1885825
ccauucugaugagugcaga

SEQ ID NO: 2370309 - RNA, 19 nt, Artificial Sequence
  Description of Artificial Sequence: Synthetic oligonucleotide
  Antisense strand to SEQ ID NO: 2370308
ucugcacucaucagaaugg

SEQ ID NO: 2370310 - RNA, 19 nt, Artificial Sequence
  Description of Artificial Sequence: Synthetic oligonucleotide
  Sense strand starting at position 1570 of SEQ ID NO: 1885825
uuuaccuaucuguaguuaa

SEQ ID NO: 2370311 - RNA, 19 nt, Artificial Sequence
  Description of Artificial Sequence: Synthetic oligonucleotide
  Antisense strand to SEQ ID NO: 2370310
uuaacuacagauagguaaa

SEQ ID NO: 2370312 - RNA, 19 nt, Artificial Sequence
  Description of Artificial Sequence: Synthetic oligonucleotide
  Sense strand starting at position 1573 of SEQ ID NO: 1885825
accuaucuguaguuaaaca

SEQ ID NO: 2370313 - RNA, 19 nt, Artificial Sequence
  Description of Artificial Sequence: Synthetic oligonucleotide
  Antisense strand to SEQ ID NO: 2370312
uguuuaacuacagauaggu

SEQ ID NO: 2370314 - RNA, 19 nt, Artificial Sequence
  Description of Artificial Sequence: Synthetic oligonucleotide
  Sense strand starting at position 1596 of SEQ ID NO: 1885825
ggcaaucguuauuugaagu

SEQ ID NO: 2370315 - RNA, 19 nt, Artificial Sequence
  Description of Artificial Sequence: Synthetic oligonucleotide
  Antisense strand to SEQ ID NO: 2370314
acuucaaauaacgauugcc

SEQ ID NO: 2370316 - RNA, 19 nt, Artificial Sequence
  Description of Artificial Sequence: Synthetic oligonucleotide
  Sense strand starting at position 1597 of SEQ ID NO: 1885825
gcaaucguuauuugaagua

SEQ ID NO: 2370317 - RNA, 19 nt, Artificial Sequence
  Description of Artificial Sequence: Synthetic oligonucleotide
  Antisense strand to SEQ ID NO: 2370316
uacuucaaauaacgauugc

SEQ ID NO: 2370318 - RNA, 19 nt, Artificial Sequence
  Description of Artificial Sequence: Synthetic oligonucleotide
  Sense strand starting at position 1694 of SEQ ID NO: 1885825
aaagguuagguauguuaga

SEQ ID NO: 2370319 - RNA, 19 nt, Artificial Sequence
  Description of Artificial Sequence: Synthetic oligonucleotide
  Antisense strand to SEQ ID NO: 2370318
ucuaacauaccuaaccuuu

SEQ ID NO: 2370320 - RNA, 19 nt, Artificial Sequence
  Description of Artificial Sequence: Synthetic oligonucleotide
  Sense strand starting at position 1695 of SEQ ID NO: 1885825
aagguuagguauguuagau

SEQ ID NO: 2370321 - RNA, 19 nt, Artificial Sequence
  Description of Artificial Sequence: Synthetic oligonucleotide
  Antisense strand to SEQ ID NO: 2370320
aucuaacauaccuaaccuu

SEQ ID NO: 2370322 - RNA, 19 nt, Artificial Sequence
  Description of Artificial Sequence: Synthetic oligonucleotide
  Sense strand starting at position 1879 of SEQ ID NO: 1885825
cuugucaucuaucuacaga

SEQ ID NO: 2370323 - RNA, 19 nt, Artificial Sequence
  Description of Artificial Sequence: Synthetic oligonucleotide
  Antisense strand to SEQ ID NO: 2370322
ucuguagauagaugacaag

SEQ ID NO: 2370324 - RNA, 19 nt, Artificial Sequence
  Description of Artificial Sequence: Synthetic oligonucleotide
  Sense strand starting at position 1882 of SEQ ID NO: 1885825
gucaucuaucuacagaguu

SEQ ID NO: 2370325 - RNA, 19 nt, Artificial Sequence
  Description of Artificial Sequence: Synthetic oligonucleotide
  Antisense strand to SEQ ID NO: 2370324
aacucuguagauagaugac

SEQ ID NO: 2370326 - RNA, 19 nt, Artificial Sequence
  Description of Artificial Sequence: Synthetic oligonucleotide
  Sense strand starting at position 1890 of SEQ ID NO: 1885825
ucuacagaguuaguugaaa

SEQ ID NO: 2370327 - RNA, 19 nt, Artificial Sequence
  Description of Artificial Sequence: Synthetic oligonucleotide
  Antisense strand to SEQ ID NO: 2370326
uuucaacuaacucuguaga

SEQ ID NO: 2370328 - RNA, 19 nt, Artificial Sequence
  Description of Artificial Sequence: Synthetic oligonucleotide
  Sense strand starting at position 1916 of SEQ ID NO: 1885825
aacugacuucugcgaugga

SEQ ID NO: 2370329 - RNA, 19 nt, Artificial Sequence
  Description of Artificial Sequence: Synthetic oligonucleotide
  Antisense strand to SEQ ID NO: 2370328
uccaucgcagaagucaguu

SEQ ID NO: 2370330 - RNA, 19 nt, Artificial Sequence
  Description of Artificial Sequence: Synthetic oligonucleotide
  Sense strand starting at position 1926 of SEQ ID NO: 1885825
ugcgauggaccucagaguu

SEQ ID NO: 2370331 - RNA, 19 nt, Artificial Sequence
  Description of Artificial Sequence: Synthetic oligonucleotide
  Antisense strand to SEQ ID NO: 2370330
aacucugagguccaucgca

SEQ ID NO: 2370332 - RNA, 19 nt, Artificial Sequence
  Description of Artificial Sequence: Synthetic oligonucleotide
  Sense strand starting at position 2232 of SEQ ID NO: 1885825
cugggacauaguugaccau

SEQ ID NO: 2370333 - RNA, 19 nt, Artificial Sequence
  Description of Artificial Sequence: Synthetic oligonucleotide
  Antisense strand to SEQ ID NO: 2370332
auggucaacuaugucccag

SEQ ID NO: 2370334 - RNA, 19 nt, Artificial Sequence
  Description of Artificial Sequence: Synthetic oligonucleotide
  Sense strand starting at position 2235 of SEQ ID NO: 1885825
ggacauaguugaccauagu

SEQ ID NO: 2370335 - RNA, 19 nt, Artificial Sequence
  Description of Artificial Sequence: Synthetic oligonucleotide
  Antisense strand to SEQ ID NO: 2370334
acuauggucaacuaugucc

SEQ ID NO: 2370336 - RNA, 19 nt, Artificial Sequence
  Description of Artificial Sequence: Synthetic oligonucleotide
  Sense strand starting at position 2236 of SEQ ID NO: 1885825
gacauaguugaccauaguu

SEQ ID NO: 2370337 - RNA, 19 nt, Artificial Sequence
  Description of Artificial Sequence: Synthetic oligonucleotide
  Antisense strand to SEQ ID NO: 2370336
aacuauggucaacuauguc

SEQ ID NO: 2370338 - RNA, 19 nt, Artificial Sequence
  Description of Artificial Sequence: Synthetic oligonucleotide
  Sense strand starting at position 2238 of SEQ ID NO: 1885825
cauaguugaccauaguuga

SEQ ID NO: 2370339 - RNA, 19 nt, Artificial Sequence
  Description of Artificial Sequence: Synthetic oligonucleotide
  Antisense strand to SEQ ID NO: 2370338
ucaacuauggucaacuaug

SEQ ID NO: 2370340 - RNA, 19 nt, Artificial Sequence
  Description of Artificial Sequence: Synthetic oligonucleotide
  Sense strand starting at position 2284 of SEQ ID NO: 1885825
uugaguccuguuuagcaaa

SEQ ID NO: 2370341 - RNA, 19 nt, Artificial Sequence
  Description of Artificial Sequence: Synthetic oligonucleotide
  Antisense strand to SEQ ID NO: 2370340
uuugcuaaacaggacucaa

SEQ ID NO: 2370342 - RNA, 19 nt, Artificial Sequence
  Description of Artificial Sequence: Synthetic oligonucleotide
  Sense strand starting at position 2361 of SEQ ID NO: 1885825
ccaagcaugguguacaaau

SEQ ID NO: 2370343 - RNA, 19 nt, Artificial Sequence
  Description of Artificial Sequence: Synthetic oligonucleotide
  Antisense strand to SEQ ID NO: 2370342
auuuguacaccaugcuugg

SEQ ID NO: 2370344 - RNA, 19 nt, Artificial Sequence
  Description of Artificial Sequence: Synthetic oligonucleotide
  Sense strand starting at position 2661 of SEQ ID NO: 1885825
ccguuuauuucucugugga

SEQ ID NO: 2370345 - RNA, 19 nt, Artificial Sequence
  Description of Artificial Sequence: Synthetic oligonucleotide
  Antisense strand to SEQ ID NO: 2370344
uccacagagaaauaaacgg

SEQ ID NO: 2370346 - RNA, 19 nt, Artificial Sequence
  Description of Artificial Sequence: Synthetic oligonucleotide
  Sense strand starting at position 2662 of SEQ ID NO: 1885825
cguuuauuucucuguggau

SEQ ID NO: 2370347 - RNA, 19 nt, Artificial Sequence
  Description of Artificial Sequence: Synthetic oligonucleotide
  Antisense strand to SEQ ID NO: 2370346
auccacagagaaauaaacg

SEQ ID NO: 2370348 - RNA, 19 nt, Artificial Sequence
  Description of Artificial Sequence: Synthetic oligonucleotide
  Sense strand starting at position 2664 of SEQ ID NO: 1885825
uuuauuucucuguggaugu

SEQ ID NO: 2370349 - RNA, 19 nt, Artificial Sequence
  Description of Artificial Sequence: Synthetic oligonucleotide
  Antisense strand to SEQ ID NO: 2370348
acauccacagagaaauaaa

SEQ ID NO: 2370350 - RNA, 19 nt, Artificial Sequence
  Description of Artificial Sequence: Synthetic oligonucleotide
  Sense strand starting at position 2675 of SEQ ID NO: 1885825
guggaugucgcuguuucau

SEQ ID NO: 2370351 - RNA, 19 nt, Artificial Sequence
  Description of Artificial Sequence: Synthetic oligonucleotide
  Antisense strand to SEQ ID NO: 2370350
augaaacagcgacauccac

SEQ ID NO: 2370352 - RNA, 19 nt, Artificial Sequence
  Description of Artificial Sequence: Synthetic oligonucleotide
  Sense strand starting at position 2735 of SEQ ID NO: 1885825
auuggacaaugcucgaauu

SEQ ID NO: 2370353 - RNA, 19 nt, Artificial Sequence
  Description of Artificial Sequence: Synthetic oligonucleotide
  Antisense strand to SEQ ID NO: 2370352
aauucgagcauuguccaau

SEQ ID NO: 2370354 - RNA, 19 nt, Artificial Sequence
  Description of Artificial Sequence: Synthetic oligonucleotide
  Sense strand starting at position 2851 of SEQ ID NO: 1885825
uucuauacuccugacaguu

SEQ ID NO: 2370355 - RNA, 19 nt, Artificial Sequence
  Description of Artificial Sequence: Synthetic oligonucleotide
  Antisense strand to SEQ ID NO: 2370354
aacugucaggaguauagaa

SEQ ID NO: 2370356 - RNA, 19 nt, Artificial Sequence
  Description of Artificial Sequence: Synthetic oligonucleotide
  Sense strand starting at position 3086 of SEQ ID NO: 1885825
ccacaagaauagccaugau

SEQ ID NO: 2370357 - RNA, 19 nt, Artificial Sequence
  Description of Artificial Sequence: Synthetic oligonucleotide
  Antisense strand to SEQ ID NO: 2370356
aucauggcuauucuugugg

SEQ ID NO: 2370358 - RNA, 19 nt, Artificial Sequence
  Description of Artificial Sequence: Synthetic oligonucleotide
  Sense strand starting at position 3384 of SEQ ID NO: 1885825
gcaaucauucuagggaaua

SEQ ID NO: 2370359 - RNA, 19 nt, Artificial Sequence
  Description of Artificial Sequence: Synthetic oligonucleotide
  Antisense strand to SEQ ID NO: 2370358
uauucccuagaaugauugc

SEQ ID NO: 2370360 - RNA, 19 nt, Artificial Sequence
  Description of Artificial Sequence: Synthetic oligonucleotide
  Sense strand starting at position 3542 of SEQ ID NO: 1885825
gucguugacccagaaauug

SEQ ID NO: 2370361 - RNA, 19 nt, Artificial Sequence
  Description of Artificial Sequence: Synthetic oligonucleotide
  Antisense strand to SEQ ID NO: 2370360
caauuucugggucaacgac

SEQ ID NO: 2370362 - RNA, 19 nt, Artificial Sequence
  Description of Artificial Sequence: Synthetic oligonucleotide
  Sense strand starting at position 3656 of SEQ ID NO: 1885825
agauauuaagagugcuucu

SEQ ID NO: 2370363 - RNA, 19 nt, Artificial Sequence
  Description of Artificial Sequence: Synthetic oligonucleotide
  Antisense strand to SEQ ID NO: 2370362
agaagcacucuuaauaucu

SEQ ID NO: 2370364 - RNA, 19 nt, Artificial Sequence
  Description of Artificial Sequence: Synthetic oligonucleotide
  Sense strand starting at position 538 of SEQ ID NO: 1885826
aucauuaguuagucaucua

SEQ ID NO: 2370365 - RNA, 19 nt, Artificial Sequence
  Description of Artificial Sequence: Synthetic oligonucleotide
  Antisense strand to SEQ ID NO: 2370364
uagaugacuaacuaaugau

SEQ ID NO: 2370366 - RNA, 19 nt, Artificial Sequence
  Description of Artificial Sequence: Synthetic oligonucleotide
  Sense strand starting at position 683 of SEQ ID NO: 1885826
aggugacagacauguacau

SEQ ID NO: 2370367 - RNA, 19 nt, Artificial Sequence
  Description of Artificial Sequence: Synthetic oligonucleotide
  Antisense strand to SEQ ID NO: 2370366
auguacaugucugucaccu

SEQ ID NO: 2370368 - RNA, 19 nt, Artificial Sequence
  Description of Artificial Sequence: Synthetic oligonucleotide
  Sense strand starting at position 1275 of SEQ ID NO: 1885826
ggcggacaucuuugauaau

SEQ ID NO: 2370369 - RNA, 19 nt, Artificial Sequence
  Description of Artificial Sequence: Synthetic oligonucleotide
  Antisense strand to SEQ ID NO: 2370368
auuaucaaagauguccgcc

SEQ ID NO: 2370370 - RNA, 19 nt, Artificial Sequence
  Description of Artificial Sequence: Synthetic oligonucleotide
  Sense strand starting at position 1372 of SEQ ID NO: 1885826
auuagucauccggagccua

SEQ ID NO: 2370371 - RNA, 19 nt, Artificial Sequence
  Description of Artificial Sequence: Synthetic oligonucleotide
  Antisense strand to SEQ ID NO: 2370370
uaggcuccggaugacuaau

SEQ ID NO: 2370372 - RNA, 19 nt, Artificial Sequence
  Description of Artificial Sequence: Synthetic oligonucleotide
  Sense strand starting at position 1447 of SEQ ID NO: 1885826
auccauucugcagagcaca

SEQ ID NO: 2370373 - RNA, 19 nt, Artificial Sequence
  Description of Artificial Sequence: Synthetic oligonucleotide
  Antisense strand to SEQ ID NO: 2370372
ugugcucugcagaauggau

SEQ ID NO: 2370374 - RNA, 19 nt, Artificial Sequence
  Description of Artificial Sequence: Synthetic oligonucleotide
  Sense strand starting at position 1496 of SEQ ID NO: 1885826
gacuuucucgcucaugauu

SEQ ID NO: 2370375 - RNA, 19 nt, Artificial Sequence
  Description of Artificial Sequence: Synthetic oligonucleotide
  Antisense strand to SEQ ID NO: 2370374
aaucaugagcgagaaaguc

SEQ ID NO: 2370376 - RNA, 19 nt, Artificial Sequence
  Description of Artificial Sequence: Synthetic oligonucleotide
  Sense strand starting at position 1631 of SEQ ID NO: 1885826
guuuauacugucuacacua

SEQ ID NO: 2370377 - RNA, 19 nt, Artificial Sequence
  Description of Artificial Sequence: Synthetic oligonucleotide
  Antisense strand to SEQ ID NO: 2370376
uaguguagacaguauaaac

SEQ ID NO: 2370378 - RNA, 19 nt, Artificial Sequence
  Description of Artificial Sequence: Synthetic oligonucleotide
  Sense strand starting at position 1722 of SEQ ID NO: 1885826
gugcuugcugccucaucaa

SEQ ID NO: 2370379 - RNA, 19 nt, Artificial Sequence
  Description of Artificial Sequence: Synthetic oligonucleotide
  Antisense strand to SEQ ID NO: 2370378
uugaugaggcagcaagcac

SEQ ID NO: 2370380 - RNA, 19 nt, Artificial Sequence
  Description of Artificial Sequence: Synthetic oligonucleotide
  Sense strand starting at position 1749 of SEQ ID NO: 1885826
auaauuggacaaugcuuaa

SEQ ID NO: 2370381 - RNA, 19 nt, Artificial Sequence
  Description of Artificial Sequence: Synthetic oligonucleotide
  Antisense strand to SEQ ID NO: 2370380
uuaagcauuguccaauuau

SEQ ID NO: 2370382 - RNA, 19 nt, Artificial Sequence
  Description of Artificial Sequence: Synthetic oligonucleotide
  Sense strand starting at position 1798 of SEQ ID NO: 1885826
gcuuauugauucucacuga

SEQ ID NO: 2370383 - RNA, 19 nt, Artificial Sequence
  Description of Artificial Sequence: Synthetic oligonucleotide
  Antisense strand to SEQ ID NO: 2370382
ucagugagaaucaauaagc

SEQ ID NO: 2370384 - RNA, 19 nt, Artificial Sequence
  Description of Artificial Sequence: Synthetic oligonucleotide
  Sense strand starting at position 1871 of SEQ ID NO: 1885826
gagucuguauuccugacau

SEQ ID NO: 2370385 - RNA, 19 nt, Artificial Sequence
  Description of Artificial Sequence: Synthetic oligonucleotide
  Antisense strand to SEQ ID NO: 2370384
augucaggaauacagacuc

SEQ ID NO: 2370386 - RNA, 19 nt, Artificial Sequence
  Description of Artificial Sequence: Synthetic oligonucleotide
  Sense strand starting at position 1873 of SEQ ID NO: 1885826
gucuguauuccugacaucu

SEQ ID NO: 2370387 - RNA, 19 nt, Artificial Sequence
  Description of Artificial Sequence: Synthetic oligonucleotide
  Antisense strand to SEQ ID NO: 2370386
agaugucaggaauacagac

SEQ ID NO: 2370388 - RNA, 19 nt, Artificial Sequence
  Description of Artificial Sequence: Synthetic oligonucleotide
  Sense strand starting at position 1928 of SEQ ID NO: 1885826
ucugaugggccucagaguu

SEQ ID NO: 2370389 - RNA, 19 nt, Artificial Sequence
  Description of Artificial Sequence: Synthetic oligonucleotide
  Antisense strand to SEQ ID NO: 2370388
aacucugaggcccaucaga

SEQ ID NO: 2370390 - RNA, 19 nt, Artificial Sequence
  Description of Artificial Sequence: Synthetic oligonucleotide
  Sense strand starting at position 2094 of SEQ ID NO: 1885826
auccaagagcuuugauauu

SEQ ID NO: 2370391 - RNA, 19 nt, Artificial Sequence
  Description of Artificial Sequence: Synthetic oligonucleotide
  Antisense strand to SEQ ID NO: 2370390
aauaucaaagcucuuggau

SEQ ID NO: 2370392 - RNA, 19 nt, Artificial Sequence
  Description of Artificial Sequence: Synthetic oligonucleotide
  Sense strand starting at position 2506 of SEQ ID NO: 1885826
agacaagagcuuugaccau

SEQ ID NO: 2370393 - RNA, 19 nt, Artificial Sequence
  Description of Artificial Sequence: Synthetic oligonucleotide
  Antisense strand to SEQ ID NO: 2370392
auggucaaagcucuugucu

SEQ ID NO: 2370394 - RNA, 19 nt, Artificial Sequence
  Description of Artificial Sequence: Synthetic oligonucleotide
  Sense strand starting at position 2612 of SEQ ID NO: 1885826
guccauucugaugagugca

SEQ ID NO: 2370395 - RNA, 19 nt, Artificial Sequence
  Description of Artificial Sequence: Synthetic oligonucleotide
  Antisense strand to SEQ ID NO: 2370394
ugcacucaucagaauggac

SEQ ID NO: 2370396 - RNA, 19 nt, Artificial Sequence
  Description of Artificial Sequence: Synthetic oligonucleotide
  Sense strand starting at position 2614 of SEQ ID NO: 1885826
ccauucugaugagugcaga

SEQ ID NO: 2370397 - RNA, 19 nt, Artificial Sequence
  Description of Artificial Sequence: Synthetic oligonucleotide
  Antisense strand to SEQ ID NO: 2370396
ucugcacucaucagaaugg

SEQ ID NO: 2370398 - RNA, 19 nt, Artificial Sequence
  Description of Artificial Sequence: Synthetic oligonucleotide
  Sense strand starting at position 2685 of SEQ ID NO: 1885826
uuuaccuaucuguaguuaa

SEQ ID NO: 2370399 - RNA, 19 nt, Artificial Sequence
  Description of Artificial Sequence: Synthetic oligonucleotide
  Antisense strand to SEQ ID NO: 2370398
uuaacuacagauagguaaa

SEQ ID NO: 2370400 - RNA, 19 nt, Artificial Sequence
  Description of Artificial Sequence: Synthetic oligonucleotide
  Sense strand starting at position 2688 of SEQ ID NO: 1885826
accuaucuguaguuaaaca

SEQ ID NO: 2370401 - RNA, 19 nt, Artificial Sequence
  Description of Artificial Sequence: Synthetic oligonucleotide
  Antisense strand to SEQ ID NO: 2370400
uguuuaacuacagauaggu

SEQ ID NO: 2370402 - RNA, 19 nt, Artificial Sequence
  Description of Artificial Sequence: Synthetic oligonucleotide
  Sense strand starting at position 2711 of SEQ ID NO: 1885826
ggcaaucguuauuugaagu

SEQ ID NO: 2370403 - RNA, 19 nt, Artificial Sequence
  Description of Artificial Sequence: Synthetic oligonucleotide
  Antisense strand to SEQ ID NO: 2370402
acuucaaauaacgauugcc

SEQ ID NO: 2370404 - RNA, 19 nt, Artificial Sequence
  Description of Artificial Sequence: Synthetic oligonucleotide
  Sense strand starting at position 2712 of SEQ ID NO: 1885826
gcaaucguuauuugaagua

SEQ ID NO: 2370405 - RNA, 19 nt, Artificial Sequence
  Description of Artificial Sequence: Synthetic oligonucleotide
  Antisense strand to SEQ ID NO: 2370404
uacuucaaauaacgauugc

SEQ ID NO: 2370406 - RNA, 19 nt, Artificial Sequence
  Description of Artificial Sequence: Synthetic oligonucleotide
  Sense strand starting at position 2809 of SEQ ID NO: 1885826
aaagguuagguauguuaga

SEQ ID NO: 2370407 - RNA, 19 nt, Artificial Sequence
  Description of Artificial Sequence: Synthetic oligonucleotide
  Antisense strand to SEQ ID NO: 2370406
ucuaacauaccuaaccuuu

SEQ ID NO: 2370408 - RNA, 19 nt, Artificial Sequence
  Description of Artificial Sequence: Synthetic oligonucleotide
  Sense strand starting at position 2810 of SEQ ID NO: 1885826
aagguuagguauguuagau

SEQ ID NO: 2370409 - RNA, 19 nt, Artificial Sequence
  Description of Artificial Sequence: Synthetic oligonucleotide
  Antisense strand to SEQ ID NO: 2370408
aucuaacauaccuaaccuu

SEQ ID NO: 2370410 - RNA, 19 nt, Artificial Sequence
  Description of Artificial Sequence: Synthetic oligonucleotide
  Sense strand starting at position 2994 of SEQ ID NO: 1885826
cuugucaucuaucuacaga

SEQ ID NO: 2370411 - RNA, 19 nt, Artificial Sequence
  Description of Artificial Sequence: Synthetic oligonucleotide
  Antisense strand to SEQ ID NO: 2370410
ucuguagauagaugacaag

SEQ ID NO: 2370412 - RNA, 19 nt, Artificial Sequence
  Description of Artificial Sequence: Synthetic oligonucleotide
  Sense strand starting at position 2997 of SEQ ID NO: 1885826
gucaucuaucuacagaguu

SEQ ID NO: 2370413 - RNA, 19 nt, Artificial Sequence
  Description of Artificial Sequence: Synthetic oligonucleotide
  Antisense strand to SEQ ID NO: 2370412
aacucuguagauagaugac

SEQ ID NO: 2370414 - RNA, 19 nt, Artificial Sequence
  Description of Artificial Sequence: Synthetic oligonucleotide
  Sense strand starting at position 3005 of SEQ ID NO: 1885826
ucuacagaguuaguugaaa

SEQ ID NO: 2370415 - RNA, 19 nt, Artificial Sequence
  Description of Artificial Sequence: Synthetic oligonucleotide
  Antisense strand to SEQ ID NO: 2370414
uuucaacuaacucuguaga

SEQ ID NO: 2370416 - RNA, 19 nt, Artificial Sequence
  Description of Artificial Sequence: Synthetic oligonucleotide
  Sense strand starting at position 3031 of SEQ ID NO: 1885826
aacugacuucugcgaugga

SEQ ID NO: 2370417 - RNA, 19 nt, Artificial Sequence
  Description of Artificial Sequence: Synthetic oligonucleotide
  Antisense strand to SEQ ID NO: 2370416
uccaucgcagaagucaguu

SEQ ID NO: 2370418 - RNA, 19 nt, Artificial Sequence
  Description of Artificial Sequence: Synthetic oligonucleotide
  Sense strand starting at position 3041 of SEQ ID NO: 1885826
ugcgauggaccucagaguu

SEQ ID NO: 2370419 - RNA, 19 nt, Artificial Sequence
  Description of Artificial Sequence: Synthetic oligonucleotide
  Antisense strand to SEQ ID NO: 2370418
aacucugagguccaucgca

SEQ ID NO: 2370420 - RNA, 19 nt, Artificial Sequence
  Description of Artificial Sequence: Synthetic oligonucleotide
  Sense strand starting at position 3347 of SEQ ID NO: 1885826
cugggacauaguugaccau

SEQ ID NO: 2370421 - RNA, 19 nt, Artificial Sequence
  Description of Artificial Sequence: Synthetic oligonucleotide
  Antisense strand to SEQ ID NO: 2370420
auggucaacuaugucccag

SEQ ID NO: 2370422 - RNA, 19 nt, Artificial Sequence
  Description of Artificial Sequence: Synthetic oligonucleotide
  Sense strand starting at position 3350 of SEQ ID NO: 1885826
ggacauaguugaccauagu

SEQ ID NO: 2370423 - RNA, 19 nt, Artificial Sequence
  Description of Artificial Sequence: Synthetic oligonucleotide
  Antisense strand to SEQ ID NO: 2370422
acuauggucaacuaugucc

SEQ ID NO: 2370424 - RNA, 19 nt, Artificial Sequence
  Description of Artificial Sequence: Synthetic oligonucleotide
  Sense strand starting at position 3351 of SEQ ID NO: 1885826
gacauaguugaccauaguu

SEQ ID NO: 2370425 - RNA, 19 nt, Artificial Sequence
  Description of Artificial Sequence: Synthetic oligonucleotide
  Antisense strand to SEQ ID NO: 2370424
aacuauggucaacuauguc

SEQ ID NO: 2370426 - RNA, 19 nt, Artificial Sequence
  Description of Artificial Sequence: Synthetic oligonucleotide
  Sense strand starting at position 3353 of SEQ ID NO: 1885826
cauaguugaccauaguuga

SEQ ID NO: 2370427 - RNA, 19 nt, Artificial Sequence
  Description of Artificial Sequence: Synthetic oligonucleotide
  Antisense strand to SEQ ID NO: 2370426
ucaacuauggucaacuaug

SEQ ID NO: 2370428 - RNA, 19 nt, Artificial Sequence
  Description of Artificial Sequence: Synthetic oligonucleotide
  Sense strand starting at position 3399 of SEQ ID NO: 1885826
uugaguccuguuuagcaaa

SEQ ID NO: 2370429 - RNA, 19 nt, Artificial Sequence
  Description of Artificial Sequence: Synthetic oligonucleotide
  Antisense strand to SEQ ID NO: 2370428
uuugcuaaacaggacucaa

SEQ ID NO: 2370430 - RNA, 19 nt, Artificial Sequence
  Description of Artificial Sequence: Synthetic oligonucleotide
  Sense strand starting at position 3476 of SEQ ID NO: 1885826
ccaagcaugguguacaaau

SEQ ID NO: 2370431 - RNA, 19 nt, Artificial Sequence
  Description of Artificial Sequence: Synthetic oligonucleotide
  Antisense strand to SEQ ID NO: 2370430
auuuguacaccaugcuugg

SEQ ID NO: 2370432 - RNA, 19 nt, Artificial Sequence
  Description of Artificial Sequence: Synthetic oligonucleotide
  Sense strand starting at position 3776 of SEQ ID NO: 1885826
ccguuuauuucucugugga

SEQ ID NO: 2370433 - RNA, 19 nt, Artificial Sequence
  Description of Artificial Sequence: Synthetic oligonucleotide
  Antisense strand to SEQ ID NO: 2370432
uccacagagaaauaaacgg

SEQ ID NO: 2370434 - RNA, 19 nt, Artificial Sequence
  Description of Artificial Sequence: Synthetic oligonucleotide
  Sense strand starting at position 3777 of SEQ ID NO: 1885826
cguuuauuucucuguggau

SEQ ID NO: 2370435 - RNA, 19 nt, Artificial Sequence
  Description of Artificial Sequence: Synthetic oligonucleotide
  Antisense strand to SEQ ID NO: 2370434
auccacagagaaauaaacg

SEQ ID NO: 2370436 - RNA, 19 nt, Artificial Sequence
  Description of Artificial Sequence: Synthetic oligonucleotide
  Sense strand starting at position 3779 of SEQ ID NO: 1885826
uuuauuucucuguggaugu

SEQ ID NO: 2370437 - RNA, 19 nt, Artificial Sequence
  Description of Artificial Sequence: Synthetic oligonucleotide
  Antisense strand to SEQ ID NO: 2370436
acauccacagagaaauaaa

SEQ ID NO: 2370438 - RNA, 19 nt, Artificial Sequence
  Description of Artificial Sequence: Synthetic oligonucleotide
  Sense strand starting at position 3790 of SEQ ID NO: 1885826
guggaugucgcuguuucau

SEQ ID NO: 2370439 - RNA, 19 nt, Artificial Sequence
  Description of Artificial Sequence: Synthetic oligonucleotide
  Antisense strand to SEQ ID NO: 2370438
augaaacagcgacauccac

SEQ ID NO: 2370440 - RNA, 19 nt, Artificial Sequence
  Description of Artificial Sequence: Synthetic oligonucleotide
  Sense strand starting at position 3850 of SEQ ID NO: 1885826
auuggacaaugcucgaauu

SEQ ID NO: 2370441 - RNA, 19 nt, Artificial Sequence
  Description of Artificial Sequence: Synthetic oligonucleotide
  Antisense strand to SEQ ID NO: 2370440
aauucgagcauuguccaau

SEQ ID NO: 2370442 - RNA, 19 nt, Artificial Sequence
  Description of Artificial Sequence: Synthetic oligonucleotide
  Sense strand starting at position 3966 of SEQ ID NO: 1885826
uucuauacuccugacaguu

SEQ ID NO: 2370443 - RNA, 19 nt, Artificial Sequence
  Description of Artificial Sequence: Synthetic oligonucleotide
  Antisense strand to SEQ ID NO: 2370442
aacugucaggaguauagaa

SEQ ID NO: 2370444 - RNA, 19 nt, Artificial Sequence
  Description of Artificial Sequence: Synthetic oligonucleotide
  Sense strand starting at position 316 of SEQ ID NO: 1885827
uggaauugucccugaccca

SEQ ID NO: 2370445 - RNA, 19 nt, Artificial Sequence
  Description of Artificial Sequence: Synthetic oligonucleotide
  Antisense strand to SEQ ID NO: 2370444
ugggucagggacaauucca

SEQ ID NO: 2370446 - RNA, 19 nt, Artificial Sequence
  Description of Artificial Sequence: Synthetic oligonucleotide
  Sense strand starting at position 381 of SEQ ID NO: 1885827
gguaacagguaugcaagau

SEQ ID NO: 2370447 - RNA, 19 nt, Artificial Sequence
  Description of Artificial Sequence: Synthetic oligonucleotide
  Antisense strand to SEQ ID NO: 2370446
aucuugcauaccuguuacc

SEQ ID NO: 2370448 - RNA, 19 nt, Artificial Sequence
  Description of Artificial Sequence: Synthetic oligonucleotide
  Sense strand starting at position 382 of SEQ ID NO: 1885827
guaacagguaugcaagauu

SEQ ID NO: 2370449 - RNA, 19 nt, Artificial Sequence
  Description of Artificial Sequence: Synthetic oligonucleotide
  Antisense strand to SEQ ID NO: 2370448
aaucuugcauaccuguuac

SEQ ID NO: 2370450 - RNA, 19 nt, Artificial Sequence
  Description of Artificial Sequence: Synthetic oligonucleotide
  Sense strand starting at position 401 of SEQ ID NO: 1885827
ucucuuuaguuguuaccaa

SEQ ID NO: 2370451 - RNA, 19 nt, Artificial Sequence
  Description of Artificial Sequence: Synthetic oligonucleotide
  Antisense strand to SEQ ID NO: 2370450
uugguaacaacuaaagaga

SEQ ID NO: 2370452 - RNA, 19 nt, Artificial Sequence
  Description of Artificial Sequence: Synthetic oligonucleotide
  Sense strand starting at position 468 of SEQ ID NO: 1885827
guuggacaauccuuaaucu

SEQ ID NO: 2370453 - RNA, 19 nt, Artificial Sequence
  Description of Artificial Sequence: Synthetic oligonucleotide
  Antisense strand to SEQ ID NO: 2370452
agauuaaggauuguccaac

SEQ ID NO: 2370454 - RNA, 19 nt, Artificial Sequence
  Description of Artificial Sequence: Synthetic oligonucleotide
  Sense strand starting at position 625 of SEQ ID NO: 1885827
cacccaaguccucggauua

SEQ ID NO: 2370455 - RNA, 19 nt, Artificial Sequence
  Description of Artificial Sequence: Synthetic oligonucleotide
  Antisense strand to SEQ ID NO: 2370454
uaauccgaggacuugggug

SEQ ID NO: 2370456 - RNA, 19 nt, Artificial Sequence
  Description of Artificial Sequence: Synthetic oligonucleotide
  Sense strand starting at position 725 of SEQ ID NO: 1885827
aucuccugucaucaaguga

SEQ ID NO: 2370457 - RNA, 19 nt, Artificial Sequence
  Description of Artificial Sequence: Synthetic oligonucleotide
  Antisense strand to SEQ ID NO: 2370456
ucacuugaugacaggagau

SEQ ID NO: 2370458 - RNA, 19 nt, Artificial Sequence
  Description of Artificial Sequence: Synthetic oligonucleotide
  Sense strand starting at position 835 of SEQ ID NO: 1885827
ugauucucugauugagcca

SEQ ID NO: 2370459 - RNA, 19 nt, Artificial Sequence
  Description of Artificial Sequence: Synthetic oligonucleotide
  Antisense strand to SEQ ID NO: 2370458
uggcucaaucagagaauca

SEQ ID NO: 2370460 - RNA, 19 nt, Artificial Sequence
  Description of Artificial Sequence: Synthetic oligonucleotide
  Sense strand starting at position 928 of SEQ ID NO: 1885827
guaggaucauuugaaacag

SEQ ID NO: 2370461 - RNA, 19 nt, Artificial Sequence
  Description of Artificial Sequence: Synthetic oligonucleotide
  Antisense strand to SEQ ID NO: 2370460
cuguuucaaaugauccuac

SEQ ID NO: 2370462 - RNA, 19 nt, Artificial Sequence
  Description of Artificial Sequence: Synthetic oligonucleotide
  Sense strand starting at position 1430 of SEQ ID NO: 1885827
cguccauucuaaguacaga

SEQ ID NO: 2370463 - RNA, 19 nt, Artificial Sequence
  Description of Artificial Sequence: Synthetic oligonucleotide
  Antisense strand to SEQ ID NO: 2370462
ucuguacuuagaauggacg

SEQ ID NO: 2370464 - RNA, 19 nt, Artificial Sequence
  Description of Artificial Sequence: Synthetic oligonucleotide
  Sense strand starting at position 1507 of SEQ ID NO: 1885827
aucauuaguuagucaucua

SEQ ID NO: 2370465 - RNA, 19 nt, Artificial Sequence
  Description of Artificial Sequence: Synthetic oligonucleotide
  Antisense strand to SEQ ID NO: 2370464
uagaugacuaacuaaugau

SEQ ID NO: 2370466 - RNA, 19 nt, Artificial Sequence
  Description of Artificial Sequence: Synthetic oligonucleotide
  Sense strand starting at position 1652 of SEQ ID NO: 1885827
aggugacagacauguacau

SEQ ID NO: 2370467 - RNA, 19 nt, Artificial Sequence
  Description of Artificial Sequence: Synthetic oligonucleotide
  Antisense strand to SEQ ID NO: 2370466
auguacaugucugucaccu

SEQ ID NO: 2370468 - RNA, 19 nt, Artificial Sequence
  Description of Artificial Sequence: Synthetic oligonucleotide
  Sense strand starting at position 1707 of SEQ ID NO: 1885827
uuaauaguguuucuuaccu

SEQ ID NO: 2370469 - RNA, 19 nt, Artificial Sequence
  Description of Artificial Sequence: Synthetic oligonucleotide
  Antisense strand to SEQ ID NO: 2370468
agguaagaaacacuauuaa

SEQ ID NO: 2370470 - RNA, 19 nt, Artificial Sequence
  Description of Artificial Sequence: Synthetic oligonucleotide
  Sense strand starting at position 1917 of SEQ ID NO: 1885827
gauuucuucugugauggac

SEQ ID NO: 2370471 - RNA, 19 nt, Artificial Sequence
  Description of Artificial Sequence: Synthetic oligonucleotide
  Antisense strand to SEQ ID NO: 2370470
guccaucacagaagaaauc

SEQ ID NO: 2370472 - RNA, 19 nt, Artificial Sequence
  Description of Artificial Sequence: Synthetic oligonucleotide
  Sense strand starting at position 2244 of SEQ ID NO: 1885827
ggcggacaucuuugauaau

SEQ ID NO: 2370473 - RNA, 19 nt, Artificial Sequence
  Description of Artificial Sequence: Synthetic oligonucleotide
  Antisense strand to SEQ ID NO: 2370472
auuaucaaagauguccgcc

SEQ ID NO: 2370474 - RNA, 19 nt, Artificial Sequence
  Description of Artificial Sequence: Synthetic oligonucleotide
  Sense strand starting at position 2341 of SEQ ID NO: 1885827
auuagucauccggagccua

SEQ ID NO: 2370475 - RNA, 19 nt, Artificial Sequence
  Description of Artificial Sequence: Synthetic oligonucleotide
  Antisense strand to SEQ ID NO: 2370474
uaggcuccggaugacuaau

SEQ ID NO: 2370476 - RNA, 19 nt, Artificial Sequence
  Description of Artificial Sequence: Synthetic oligonucleotide
  Sense strand starting at position 2416 of SEQ ID NO: 1885827
auccauucugcagagcaca

SEQ ID NO: 2370477 - RNA, 19 nt, Artificial Sequence
  Description of Artificial Sequence: Synthetic oligonucleotide
  Antisense strand to SEQ ID NO: 2370476
ugugcucugcagaauggau

SEQ ID NO: 2370478 - RNA, 19 nt, Artificial Sequence
  Description of Artificial Sequence: Synthetic oligonucleotide
  Sense strand starting at position 2463 of SEQ ID NO: 1885827
gggacuuucucgcucauga

SEQ ID NO: 2370479 - RNA, 19 nt, Artificial Sequence
  Description of Artificial Sequence: Synthetic oligonucleotide
  Antisense strand to SEQ ID NO: 2370478
ucaugagcgagaaaguccc

SEQ ID NO: 2370480 - RNA, 19 nt, Artificial Sequence
  Description of Artificial Sequence: Synthetic oligonucleotide
  Sense strand starting at position 2465 of SEQ ID NO: 1885827
gacuuucucgcucaugauu

SEQ ID NO: 2370481 - RNA, 19 nt, Artificial Sequence
  Description of Artificial Sequence: Synthetic oligonucleotide
  Antisense strand to SEQ ID NO: 2370480
aaucaugagcgagaaaguc

SEQ ID NO: 2370482 - RNA, 19 nt, Artificial Sequence
  Description of Artificial Sequence: Synthetic oligonucleotide
  Sense strand starting at position 2599 of SEQ ID NO: 1885827
aguuuauacugucuacacu

SEQ ID NO: 2370483 - RNA, 19 nt, Artificial Sequence
  Description of Artificial Sequence: Synthetic oligonucleotide
  Antisense strand to SEQ ID NO: 2370482
aguguagacaguauaaacu

SEQ ID NO: 2370484 - RNA, 19 nt, Artificial Sequence
  Description of Artificial Sequence: Synthetic oligonucleotide
  Sense strand starting at position 2600 of SEQ ID NO: 1885827
guuuauacugucuacacua

SEQ ID NO: 2370485 - RNA, 19 nt, Artificial Sequence
  Description of Artificial Sequence: Synthetic oligonucleotide
  Antisense strand to SEQ ID NO: 2370484
uaguguagacaguauaaac

SEQ ID NO: 2370486 - RNA, 19 nt, Artificial Sequence
  Description of Artificial Sequence: Synthetic oligonucleotide
  Sense strand starting at position 2691 of SEQ ID NO: 1885827
gugcuugcugccucaucaa

SEQ ID NO: 2370487 - RNA, 19 nt, Artificial Sequence
  Description of Artificial Sequence: Synthetic oligonucleotide
  Antisense strand to SEQ ID NO: 2370486
uugaugaggcagcaagcac

SEQ ID NO: 2370488 - RNA, 19 nt, Artificial Sequence
  Description of Artificial Sequence: Synthetic oligonucleotide
  Sense strand starting at position 2718 of SEQ ID NO: 1885827
auaauuggacaaugcuuaa

SEQ ID NO: 2370489 - RNA, 19 nt, Artificial Sequence
  Description of Artificial Sequence: Synthetic oligonucleotide
  Antisense strand to SEQ ID NO: 2370488
uuaagcauuguccaauuau

SEQ ID NO: 2370490 - RNA, 19 nt, Artificial Sequence
  Description of Artificial Sequence: Synthetic oligonucleotide
  Sense strand starting at position 2767 of SEQ ID NO: 1885827
gcuuauugauucucacuga

SEQ ID NO: 2370491 - RNA, 19 nt, Artificial Sequence
  Description of Artificial Sequence: Synthetic oligonucleotide
  Antisense strand to SEQ ID NO: 2370490
ucagugagaaucaauaagc

SEQ ID NO: 2370492 - RNA, 19 nt, Artificial Sequence
  Description of Artificial Sequence: Synthetic oligonucleotide
  Sense strand starting at position 2840 of SEQ ID NO: 1885827
gagucuguauuccugacau

SEQ ID NO: 2370493 - RNA, 19 nt, Artificial Sequence
  Description of Artificial Sequence: Synthetic oligonucleotide
  Antisense strand to SEQ ID NO: 2370492
augucaggaauacagacuc

SEQ ID NO: 2370494 - RNA, 19 nt, Artificial Sequence
  Description of Artificial Sequence: Synthetic oligonucleotide
  Sense strand starting at position 2842 of SEQ ID NO: 1885827
gucuguauuccugacaucu

SEQ ID NO: 2370495 - RNA, 19 nt, Artificial Sequence
  Description of Artificial Sequence: Synthetic oligonucleotide
  Antisense strand to SEQ ID NO: 2370494
agaugucaggaauacagac

SEQ ID NO: 2370496 - RNA, 19 nt, Artificial Sequence
  Description of Artificial Sequence: Synthetic oligonucleotide
  Sense strand starting at position 2897 of SEQ ID NO: 1885827
ucugaugggccucagaguu

SEQ ID NO: 2370497 - RNA, 19 nt, Artificial Sequence
  Description of Artificial Sequence: Synthetic oligonucleotide
  Antisense strand to SEQ ID NO: 2370496
aacucugaggcccaucaga

SEQ ID NO: 2370498 - RNA, 19 nt, Artificial Sequence
  Description of Artificial Sequence: Synthetic oligonucleotide
  Sense strand starting at position 3063 of SEQ ID NO: 1885827
auccaagagcuuugauauu

SEQ ID NO: 2370499 - RNA, 19 nt, Artificial Sequence
  Description of Artificial Sequence: Synthetic oligonucleotide
  Antisense strand to SEQ ID NO: 2370498
aauaucaaagcucuuggau

SEQ ID NO: 2370500 - RNA, 19 nt, Artificial Sequence
  Description of Artificial Sequence: Synthetic oligonucleotide
  Sense strand starting at position 3475 of SEQ ID NO: 1885827
agacaagagcuuugaccau

SEQ ID NO: 2370501 - RNA, 19 nt, Artificial Sequence
  Description of Artificial Sequence: Synthetic oligonucleotide
  Antisense strand to SEQ ID NO: 2370500
auggucaaagcucuugucu

SEQ ID NO: 2370502 - RNA, 19 nt, Artificial Sequence
  Description of Artificial Sequence: Synthetic oligonucleotide
  Sense strand starting at position 3581 of SEQ ID NO: 1885827
guccauucugaugagugca

SEQ ID NO: 2370503 - RNA, 19 nt, Artificial Sequence
  Description of Artificial Sequence: Synthetic oligonucleotide
  Antisense strand to SEQ ID NO: 2370502
ugcacucaucagaauggac

SEQ ID NO: 2370504 - RNA, 19 nt, Artificial Sequence
  Description of Artificial Sequence: Synthetic oligonucleotide
  Sense strand starting at position 3583 of SEQ ID NO: 1885827
ccauucugaugagugcaga

SEQ ID NO: 2370505 - RNA, 19 nt, Artificial Sequence
  Description of Artificial Sequence: Synthetic oligonucleotide
  Antisense strand to SEQ ID NO: 2370504
ucugcacucaucagaaugg

SEQ ID NO: 2370506 - RNA, 19 nt, Artificial Sequence
  Description of Artificial Sequence: Synthetic oligonucleotide
  Sense strand starting at position 3654 of SEQ ID NO: 1885827
uuuaccuaucuguaguuaa

SEQ ID NO: 2370507 - RNA, 19 nt, Artificial Sequence
  Description of Artificial Sequence: Synthetic oligonucleotide
  Antisense strand to SEQ ID NO: 2370506
uuaacuacagauagguaaa

SEQ ID NO: 2370508 - RNA, 19 nt, Artificial Sequence
  Description of Artificial Sequence: Synthetic oligonucleotide
  Sense strand starting at position 3657 of SEQ ID NO: 1885827
accuaucuguaguuaaaca

SEQ ID NO: 2370509 - RNA, 19 nt, Artificial Sequence
  Description of Artificial Sequence: Synthetic oligonucleotide
  Antisense strand to SEQ ID NO: 2370508
uguuuaacuacagauaggu

SEQ ID NO: 2370510 - RNA, 19 nt, Artificial Sequence
  Description of Artificial Sequence: Synthetic oligonucleotide
  Sense strand starting at position 3680 of SEQ ID NO: 1885827
ggcaaucguuauuugaagu

SEQ ID NO: 2370511 - RNA, 19 nt, Artificial Sequence
  Description of Artificial Sequence: Synthetic oligonucleotide
  Antisense strand to SEQ ID NO: 2370510
acuucaaauaacgauugcc

SEQ ID NO: 2370512 - RNA, 19 nt, Artificial Sequence
  Description of Artificial Sequence: Synthetic oligonucleotide
  Sense strand starting at position 3681 of SEQ ID NO: 1885827
gcaaucguuauuugaagua

SEQ ID NO: 2370513 - RNA, 19 nt, Artificial Sequence
  Description of Artificial Sequence: Synthetic oligonucleotide
  Antisense strand to SEQ ID NO: 2370512
uacuucaaauaacgauugc

SEQ ID NO: 2370514 - RNA, 19 nt, Artificial Sequence
  Description of Artificial Sequence: Synthetic oligonucleotide
  Sense strand starting at position 3778 of SEQ ID NO: 1885827
aaagguuagguauguuaga

SEQ ID NO: 2370515 - RNA, 19 nt, Artificial Sequence
  Description of Artificial Sequence: Synthetic oligonucleotide
  Antisense strand to SEQ ID NO: 2370514
ucuaacauaccuaaccuuu

SEQ ID NO: 2370516 - RNA, 19 nt, Artificial Sequence
  Description of Artificial Sequence: Synthetic oligonucleotide
  Sense strand starting at position 3779 of SEQ ID NO: 1885827
aagguuagguauguuagau

SEQ ID NO: 2370517 - RNA, 19 nt, Artificial Sequence
  Description of Artificial Sequence: Synthetic oligonucleotide
  Antisense strand to SEQ ID NO: 2370516
aucuaacauaccuaaccuu

SEQ ID NO: 2370518 - RNA, 19 nt, Artificial Sequence
  Description of Artificial Sequence: Synthetic oligonucleotide
  Sense strand starting at position 3963 of SEQ ID NO: 1885827
cuugucaucuaucuacaga

SEQ ID NO: 2370519 - RNA, 19 nt, Artificial Sequence
  Description of Artificial Sequence: Synthetic oligonucleotide
  Antisense strand to SEQ ID NO: 2370518
ucuguagauagaugacaag

SEQ ID NO: 2370520 - RNA, 19 nt, Artificial Sequence
  Description of Artificial Sequence: Synthetic oligonucleotide
  Sense strand starting at position 3966 of SEQ ID NO: 1885827
gucaucuaucuacagaguu

SEQ ID NO: 2370521 - RNA, 19 nt, Artificial Sequence
  Description of Artificial Sequence: Synthetic oligonucleotide
  Antisense strand to SEQ ID NO: 2370520
aacucuguagauagaugac

SEQ ID NO: 2370522 - RNA, 19 nt, Artificial Sequence
  Description of Artificial Sequence: Synthetic oligonucleotide
  Sense strand starting at position 3974 of SEQ ID NO: 1885827
ucuacagaguuaguugaaa

SEQ ID NO: 2370523 - RNA, 19 nt, Artificial Sequence
  Description of Artificial Sequence: Synthetic oligonucleotide
  Antisense strand to SEQ ID NO: 2370522
uuucaacuaacucuguaga

SEQ ID NO: 2370524 - RNA, 19 nt, Artificial Sequence
  Description of Artificial Sequence: Synthetic oligonucleotide
  Sense strand starting at position 158 of SEQ ID NO: 1885828
agucaugauugauccagga

SEQ ID NO: 2370525 - RNA, 19 nt, Artificial Sequence
  Description of Artificial Sequence: Synthetic oligonucleotide
  Antisense strand to SEQ ID NO: 2370524
uccuggaucaaucaugacu

SEQ ID NO: 2370526 - RNA, 19 nt, Artificial Sequence
  Description of Artificial Sequence: Synthetic oligonucleotide
  Sense strand starting at position 371 of SEQ ID NO: 1885828
auaagcaucccucagugua

SEQ ID NO: 2370527 - RNA, 19 nt, Artificial Sequence
  Description of Artificial Sequence: Synthetic oligonucleotide
  Antisense strand to SEQ ID NO: 2370526
uacacugagggaugcuuau

SEQ ID NO: 2370528 - RNA, 19 nt, Artificial Sequence
  Description of Artificial Sequence: Synthetic oligonucleotide
  Sense strand starting at position 374 of SEQ ID NO: 1885828
agcaucccucaguguaaca

SEQ ID NO: 2370529 - RNA, 19 nt, Artificial Sequence
  Description of Artificial Sequence: Synthetic oligonucleotide
  Antisense strand to SEQ ID NO: 2370528
uguuacacugagggaugcu

SEQ ID NO: 2370530 - RNA, 19 nt, Artificial Sequence
  Description of Artificial Sequence: Synthetic oligonucleotide
  Sense strand starting at position 424 of SEQ ID NO: 1885828
uacucauggccuuauugga

SEQ ID NO: 2370531 - RNA, 19 nt, Artificial Sequence
  Description of Artificial Sequence: Synthetic oligonucleotide
  Antisense strand to SEQ ID NO: 2370530
uccaauaaggccaugagua

SEQ ID NO: 2370532 - RNA, 19 nt, Artificial Sequence
  Description of Artificial Sequence: Synthetic oligonucleotide
  Sense strand starting at position 536 of SEQ ID NO: 1885828
cagcuucuagcacagagau

SEQ ID NO: 2370533 - RNA, 19 nt, Artificial Sequence
  Description of Artificial Sequence: Synthetic oligonucleotide
  Antisense strand to SEQ ID NO: 2370532
aucucugugcuagaagcug

SEQ ID NO: 2370534 - RNA, 19 nt, Artificial Sequence
  Description of Artificial Sequence: Synthetic oligonucleotide
  Sense strand starting at position 594 of SEQ ID NO: 1885828
cuuccauucugaguacaga

SEQ ID NO: 2370535 - RNA, 19 nt, Artificial Sequence
  Description of Artificial Sequence: Synthetic oligonucleotide
  Antisense strand to SEQ ID NO: 2370534
ucuguacucagaauggaag

SEQ ID NO: 2370536 - RNA, 19 nt, Artificial Sequence
  Description of Artificial Sequence: Synthetic oligonucleotide
  Sense strand starting at position 748 of SEQ ID NO: 1885828
augaauaacuggccagaug

SEQ ID NO: 2370537 - RNA, 19 nt, Artificial Sequence
  Description of Artificial Sequence: Synthetic oligonucleotide
  Antisense strand to SEQ ID NO: 2370536
caucuggccaguuauucau

SEQ ID NO: 2370538 - RNA, 19 nt, Artificial Sequence
  Description of Artificial Sequence: Synthetic oligonucleotide
  Sense strand starting at position 749 of SEQ ID NO: 1885828
ugaauaacuggccagaugu

SEQ ID NO: 2370539 - RNA, 19 nt, Artificial Sequence
  Description of Artificial Sequence: Synthetic oligonucleotide
  Antisense strand to SEQ ID NO: 2370538
acaucuggccaguuauuca

SEQ ID NO: 2370540 - RNA, 19 nt, Artificial Sequence
  Description of Artificial Sequence: Synthetic oligonucleotide
  Sense strand starting at position 1277 of SEQ ID NO: 1885828
uggaauugucccugaccca

SEQ ID NO: 2370541 - RNA, 19 nt, Artificial Sequence
  Description of Artificial Sequence: Synthetic oligonucleotide
  Antisense strand to SEQ ID NO: 2370540
ugggucagggacaauucca

SEQ ID NO: 2370542 - RNA, 19 nt, Artificial Sequence
  Description of Artificial Sequence: Synthetic oligonucleotide
  Sense strand starting at position 1342 of SEQ ID NO: 1885828
gguaacagguaugcaagau

SEQ ID NO: 2370543 - RNA, 19 nt, Artificial Sequence
  Description of Artificial Sequence: Synthetic oligonucleotide
  Antisense strand to SEQ ID NO: 2370542
aucuugcauaccuguuacc

SEQ ID NO: 2370544 - RNA, 19 nt, Artificial Sequence
  Description of Artificial Sequence: Synthetic oligonucleotide
  Sense strand starting at position 1343 of SEQ ID NO: 1885828
guaacagguaugcaagauu

SEQ ID NO: 2370545 - RNA, 19 nt, Artificial Sequence
  Description of Artificial Sequence: Synthetic oligonucleotide
  Antisense strand to SEQ ID NO: 2370544
aaucuugcauaccuguuac

SEQ ID NO: 2370546 - RNA, 19 nt, Artificial Sequence
  Description of Artificial Sequence: Synthetic oligonucleotide
  Sense strand starting at position 1362 of SEQ ID NO: 1885828
ucucuuuaguuguuaccaa

SEQ ID NO: 2370547 - RNA, 19 nt, Artificial Sequence
  Description of Artificial Sequence: Synthetic oligonucleotide
  Antisense strand to SEQ ID NO: 2370546
uugguaacaacuaaagaga

SEQ ID NO: 2370548 - RNA, 19 nt, Artificial Sequence
  Description of Artificial Sequence: Synthetic oligonucleotide
  Sense strand starting at position 1429 of SEQ ID NO: 1885828
guuggacaauccuuaaucu

SEQ ID NO: 2370549 - RNA, 19 nt, Artificial Sequence
  Description of Artificial Sequence: Synthetic oligonucleotide
  Antisense strand to SEQ ID NO: 2370548
agauuaaggauuguccaac

SEQ ID NO: 2370550 - RNA, 19 nt, Artificial Sequence
  Description of Artificial Sequence: Synthetic oligonucleotide
  Sense strand starting at position 1586 of SEQ ID NO: 1885828
cacccaaguccucggauua

SEQ ID NO: 2370551 - RNA, 19 nt, Artificial Sequence
  Description of Artificial Sequence: Synthetic oligonucleotide
  Antisense strand to SEQ ID NO: 2370550
uaauccgaggacuugggug

SEQ ID NO: 2370552 - RNA, 19 nt, Artificial Sequence
  Description of Artificial Sequence: Synthetic oligonucleotide
  Sense strand starting at position 1686 of SEQ ID NO: 1885828
aucuccugucaucaaguga

SEQ ID NO: 2370553 - RNA, 19 nt, Artificial Sequence
  Description of Artificial Sequence: Synthetic oligonucleotide
  Antisense strand to SEQ ID NO: 2370552
ucacuugaugacaggagau

SEQ ID NO: 2370554 - RNA, 19 nt, Artificial Sequence
  Description of Artificial Sequence: Synthetic oligonucleotide
  Sense strand starting at position 1796 of SEQ ID NO: 1885828
ugauucucugauugagcca

SEQ ID NO: 2370555 - RNA, 19 nt, Artificial Sequence
  Description of Artificial Sequence: Synthetic oligonucleotide
  Antisense strand to SEQ ID NO: 2370554
uggcucaaucagagaauca

SEQ ID NO: 2370556 - RNA, 19 nt, Artificial Sequence
  Description of Artificial Sequence: Synthetic oligonucleotide
  Sense strand starting at position 1889 of SEQ ID NO: 1885828
guaggaucauuugaaacag

SEQ ID NO: 2370557 - RNA, 19 nt, Artificial Sequence
  Description of Artificial Sequence: Synthetic oligonucleotide
  Antisense strand to SEQ ID NO: 2370556
cuguuucaaaugauccuac

SEQ ID NO: 2370558 - RNA, 19 nt, Artificial Sequence
  Description of Artificial Sequence: Synthetic oligonucleotide
  Sense strand starting at position 2029 of SEQ ID NO: 1885828
uucuacauugucuguugau

SEQ ID NO: 2370559 - RNA, 19 nt, Artificial Sequence
  Description of Artificial Sequence: Synthetic oligonucleotide
  Antisense strand to SEQ ID NO: 2370558
aucaacagacaauguagaa

SEQ ID NO: 2370560 - RNA, 19 nt, Artificial Sequence
  Description of Artificial Sequence: Synthetic oligonucleotide
  Sense strand starting at position 2030 of SEQ ID NO: 1885828
ucuacauugucuguugauu

SEQ ID NO: 2370561 - RNA, 19 nt, Artificial Sequence
  Description of Artificial Sequence: Synthetic oligonucleotide
  Antisense strand to SEQ ID NO: 2370560
aaucaacagacaauguaga

SEQ ID NO: 2370562 - RNA, 19 nt, Artificial Sequence
  Description of Artificial Sequence: Synthetic oligonucleotide
  Sense strand starting at position 2391 of SEQ ID NO: 1885828
cguccauucuaaguacaga

SEQ ID NO: 2370563 - RNA, 19 nt, Artificial Sequence
  Description of Artificial Sequence: Synthetic oligonucleotide
  Antisense strand to SEQ ID NO: 2370562
ucuguacuuagaauggacg

SEQ ID NO: 2370564 - RNA, 19 nt, Artificial Sequence
  Description of Artificial Sequence: Synthetic oligonucleotide
  Sense strand starting at position 2468 of SEQ ID NO: 1885828
aucauuaguuagucaucua

SEQ ID NO: 2370565 - RNA, 19 nt, Artificial Sequence
  Description of Artificial Sequence: Synthetic oligonucleotide
  Antisense strand to SEQ ID NO: 2370564
uagaugacuaacuaaugau

SEQ ID NO: 2370566 - RNA, 19 nt, Artificial Sequence
  Description of Artificial Sequence: Synthetic oligonucleotide
  Sense strand starting at position 2471 of SEQ ID NO: 1885828
auuaguuagucaucuaagc

SEQ ID NO: 2370567 - RNA, 19 nt, Artificial Sequence
  Description of Artificial Sequence: Synthetic oligonucleotide
  Antisense strand to SEQ ID NO: 2370566
gcuuagaugacuaacuaau

SEQ ID NO: 2370568 - RNA, 19 nt, Artificial Sequence
  Description of Artificial Sequence: Synthetic oligonucleotide
  Sense strand starting at position 2489 of SEQ ID NO: 1885828
cuaucauuauuuggaguaa

SEQ ID NO: 2370569 - RNA, 19 nt, Artificial Sequence
  Description of Artificial Sequence: Synthetic oligonucleotide
  Antisense strand to SEQ ID NO: 2370568
uuacuccaaauaaugauag

SEQ ID NO: 2370570 - RNA, 19 nt, Artificial Sequence
  Description of Artificial Sequence: Synthetic oligonucleotide
  Sense strand starting at position 2613 of SEQ ID NO: 1885828
aggugacagacauguacau

SEQ ID NO: 2370571 - RNA, 19 nt, Artificial Sequence
  Description of Artificial Sequence: Synthetic oligonucleotide
  Antisense strand to SEQ ID NO: 2370570
auguacaugucugucaccu

SEQ ID NO: 2370572 - RNA, 19 nt, Artificial Sequence
  Description of Artificial Sequence: Synthetic oligonucleotide
  Sense strand starting at position 2668 of SEQ ID NO: 1885828
uuaauaguguuucuuaccu

SEQ ID NO: 2370573 - RNA, 19 nt, Artificial Sequence
  Description of Artificial Sequence: Synthetic oligonucleotide
  Antisense strand to SEQ ID NO: 2370572
agguaagaaacacuauuaa

SEQ ID NO: 2370574 - RNA, 19 nt, Artificial Sequence
  Description of Artificial Sequence: Synthetic oligonucleotide
  Sense strand starting at position 2829 of SEQ ID NO: 1885828
auuccugaugccugucuaa

SEQ ID NO: 2370575 - RNA, 19 nt, Artificial Sequence
  Description of Artificial Sequence: Synthetic oligonucleotide
  Antisense strand to SEQ ID NO: 2370574
uuagacaggcaucaggaau

SEQ ID NO: 2370576 - RNA, 19 nt, Artificial Sequence
  Description of Artificial Sequence: Synthetic oligonucleotide
  Sense strand starting at position 2878 of SEQ ID NO: 1885828
gauuucuucugugauggac

SEQ ID NO: 2370577 - RNA, 19 nt, Artificial Sequence
  Description of Artificial Sequence: Synthetic oligonucleotide
  Antisense strand to SEQ ID NO: 2370576
guccaucacagaagaaauc

SEQ ID NO: 2370578 - RNA, 19 nt, Artificial Sequence
  Description of Artificial Sequence: Synthetic oligonucleotide
  Sense strand starting at position 3205 of SEQ ID NO: 1885828
ggcggacaucuuugauaau

SEQ ID NO: 2370579 - RNA, 19 nt, Artificial Sequence
  Description of Artificial Sequence: Synthetic oligonucleotide
  Antisense strand to SEQ ID NO: 2370578
auuaucaaagauguccgcc

SEQ ID NO: 2370580 - RNA, 19 nt, Artificial Sequence
  Description of Artificial Sequence: Synthetic oligonucleotide
  Sense strand starting at position 3302 of SEQ ID NO: 1885828
auuagucauccggagccua

SEQ ID NO: 2370581 - RNA, 19 nt, Artificial Sequence
  Description of Artificial Sequence: Synthetic oligonucleotide
  Antisense strand to SEQ ID NO: 2370580
uaggcuccggaugacuaau

SEQ ID NO: 2370582 - RNA, 19 nt, Artificial Sequence
  Description of Artificial Sequence: Synthetic oligonucleotide
  Sense strand starting at position 3377 of SEQ ID NO: 1885828
auccauucugcagagcaca

SEQ ID NO: 2370583 - RNA, 19 nt, Artificial Sequence
  Description of Artificial Sequence: Synthetic oligonucleotide
  Antisense strand to SEQ ID NO: 2370582
ugugcucugcagaauggau

SEQ ID NO: 2370584 - RNA, 19 nt, Artificial Sequence
  Description of Artificial Sequence: Synthetic oligonucleotide
  Sense strand starting at position 3424 of SEQ ID NO: 1885828
gggacuuucucgcucauga

SEQ ID NO: 2370585 - RNA, 19 nt, Artificial Sequence
  Description of Artificial Sequence: Synthetic oligonucleotide
  Antisense strand to SEQ ID NO: 2370584
ucaugagcgagaaaguccc

SEQ ID NO: 2370586 - RNA, 19 nt, Artificial Sequence
  Description of Artificial Sequence: Synthetic oligonucleotide
  Sense strand starting at position 3426 of SEQ ID NO: 1885828
gacuuucucgcucaugauu

SEQ ID NO: 2370587 - RNA, 19 nt, Artificial Sequence
  Description of Artificial Sequence: Synthetic oligonucleotide
  Antisense strand to SEQ ID NO: 2370586
aaucaugagcgagaaaguc

SEQ ID NO: 2370588 - RNA, 19 nt, Artificial Sequence
  Description of Artificial Sequence: Synthetic oligonucleotide
  Sense strand starting at position 3560 of SEQ ID NO: 1885828
aguuuauacugucuacacu

SEQ ID NO: 2370589 - RNA, 19 nt, Artificial Sequence
  Description of Artificial Sequence: Synthetic oligonucleotide
  Antisense strand to SEQ ID NO: 2370588
aguguagacaguauaaacu

SEQ ID NO: 2370590 - RNA, 19 nt, Artificial Sequence
  Description of Artificial Sequence: Synthetic oligonucleotide
  Sense strand starting at position 3561 of SEQ ID NO: 1885828
guuuauacugucuacacua

SEQ ID NO: 2370591 - RNA, 19 nt, Artificial Sequence
  Description of Artificial Sequence: Synthetic oligonucleotide
  Antisense strand to SEQ ID NO: 2370590
uaguguagacaguauaaac

SEQ ID NO: 2370592 - RNA, 19 nt, Artificial Sequence
  Description of Artificial Sequence: Synthetic oligonucleotide
  Sense strand starting at position 3652 of SEQ ID NO: 1885828
gugcuugcugccucaucaa

SEQ ID NO: 2370593 - RNA, 19 nt, Artificial Sequence
  Description of Artificial Sequence: Synthetic oligonucleotide
  Antisense strand to SEQ ID NO: 2370592
uugaugaggcagcaagcac

SEQ ID NO: 2370594 - RNA, 19 nt, Artificial Sequence
  Description of Artificial Sequence: Synthetic oligonucleotide
  Sense strand starting at position 3679 of SEQ ID NO: 1885828
auaauuggacaaugcuuaa

SEQ ID NO: 2370595 - RNA, 19 nt, Artificial Sequence
  Description of Artificial Sequence: Synthetic oligonucleotide
  Antisense strand to SEQ ID NO: 2370594
uuaagcauuguccaauuau

SEQ ID NO: 2370596 - RNA, 19 nt, Artificial Sequence
  Description of Artificial Sequence: Synthetic oligonucleotide
  Sense strand starting at position 3728 of SEQ ID NO: 1885828
gcuuauugauucucacuga

SEQ ID NO: 2370597 - RNA, 19 nt, Artificial Sequence
  Description of Artificial Sequence: Synthetic oligonucleotide
  Antisense strand to SEQ ID NO: 2370596
ucagugagaaucaauaagc

SEQ ID NO: 2370598 - RNA, 19 nt, Artificial Sequence
  Description of Artificial Sequence: Synthetic oligonucleotide
  Sense strand starting at position 3801 of SEQ ID NO: 1885828
gagucuguauuccugacau

SEQ ID NO: 2370599 - RNA, 19 nt, Artificial Sequence
  Description of Artificial Sequence: Synthetic oligonucleotide
  Antisense strand to SEQ ID NO: 2370598
augucaggaauacagacuc

SEQ ID NO: 2370600 - RNA, 19 nt, Artificial Sequence
  Description of Artificial Sequence: Synthetic oligonucleotide
  Sense strand starting at position 3803 of SEQ ID NO: 1885828
gucuguauuccugacaucu

SEQ ID NO: 2370601 - RNA, 19 nt, Artificial Sequence
  Description of Artificial Sequence: Synthetic oligonucleotide
  Antisense strand to SEQ ID NO: 2370600
agaugucaggaauacagac

SEQ ID NO: 2370602 - RNA, 19 nt, Artificial Sequence
  Description of Artificial Sequence: Synthetic oligonucleotide
  Sense strand starting at position 3858 of SEQ ID NO: 1885828
ucugaugggccucagaguu

SEQ ID NO: 2370603 - RNA, 19 nt, Artificial Sequence
  Description of Artificial Sequence: Synthetic oligonucleotide
  Antisense strand to SEQ ID NO: 2370602
aacucugaggcccaucaga

SEQ ID NO: 2370604 - RNA, 19 nt, Artificial Sequence
  Description of Artificial Sequence: Synthetic oligonucleotide
  Sense strand starting at position 106 of SEQ ID NO: 1885829
cuaguaucugucuacauaa

SEQ ID NO: 2370605 - RNA, 19 nt, Artificial Sequence
  Description of Artificial Sequence: Synthetic oligonucleotide
  Antisense strand to SEQ ID NO: 2370604
uuauguagacagauacuag

SEQ ID NO: 2370606 - RNA, 19 nt, Artificial Sequence
  Description of Artificial Sequence: Synthetic oligonucleotide
  Sense strand starting at position 108 of SEQ ID NO: 1885829
aguaucugucuacauaauc

SEQ ID NO: 2370607 - RNA, 19 nt, Artificial Sequence
  Description of Artificial Sequence: Synthetic oligonucleotide
  Antisense strand to SEQ ID NO: 2370606
gauuauguagacagauacu

SEQ ID NO: 2370608 - RNA, 19 nt, Artificial Sequence
  Description of Artificial Sequence: Synthetic oligonucleotide
  Sense strand starting at position 220 of SEQ ID NO: 1885829
auacguauccuugggacau

SEQ ID NO: 2370609 - RNA, 19 nt, Artificial Sequence
  Description of Artificial Sequence: Synthetic oligonucleotide
  Antisense strand to SEQ ID NO: 2370608
augucccaaggauacguau

SEQ ID NO: 2370610 - RNA, 19 nt, Artificial Sequence
  Description of Artificial Sequence: Synthetic oligonucleotide
  Sense strand starting at position 241 of SEQ ID NO: 1885829
cuggccuuccuugauuaua

SEQ ID NO: 2370611 - RNA, 19 nt, Artificial Sequence
  Description of Artificial Sequence: Synthetic oligonucleotide
  Antisense strand to SEQ ID NO: 2370610
uauaaucaaggaaggccag

SEQ ID NO: 2370612 - RNA, 19 nt, Artificial Sequence
  Description of Artificial Sequence: Synthetic oligonucleotide
  Sense strand starting at position 608 of SEQ ID NO: 1885829
ugcuuaugucauccguagu

SEQ ID NO: 2370613 - RNA, 19 nt, Artificial Sequence
  Description of Artificial Sequence: Synthetic oligonucleotide
  Antisense strand to SEQ ID NO: 2370612
acuacggaugacauaagca

SEQ ID NO: 2370614 - RNA, 19 nt, Artificial Sequence
  Description of Artificial Sequence: Synthetic oligonucleotide
  Sense strand starting at position 615 of SEQ ID NO: 1885829
gucauccguagucaaagau

SEQ ID NO: 2370615 - RNA, 19 nt, Artificial Sequence
  Description of Artificial Sequence: Synthetic oligonucleotide
  Antisense strand to SEQ ID NO: 2370614
aucuuugacuacggaugac

SEQ ID NO: 2370616 - RNA, 19 nt, Artificial Sequence
  Description of Artificial Sequence: Synthetic oligonucleotide
  Sense strand starting at position 622 of SEQ ID NO: 1885829
guagucaaagauuacacuu

SEQ ID NO: 2370617 - RNA, 19 nt, Artificial Sequence
  Description of Artificial Sequence: Synthetic oligonucleotide
  Antisense strand to SEQ ID NO: 2370616
aaguguaaucuuugacuac

SEQ ID NO: 2370618 - RNA, 19 nt, Artificial Sequence
  Description of Artificial Sequence: Synthetic oligonucleotide
  Sense strand starting at position 693 of SEQ ID NO: 1885829
ucuguugucucaccauuua

SEQ ID NO: 2370619 - RNA, 19 nt, Artificial Sequence
  Description of Artificial Sequence: Synthetic oligonucleotide
  Antisense strand to SEQ ID NO: 2370618
uaaauggugagacaacaga

SEQ ID NO: 2370620 - RNA, 19 nt, Artificial Sequence
  Description of Artificial Sequence: Synthetic oligonucleotide
  Sense strand starting at position 751 of SEQ ID NO: 1885829
uuuacauguguacauugau

SEQ ID NO: 2370621 - RNA, 19 nt, Artificial Sequence
  Description of Artificial Sequence: Synthetic oligonucleotide
  Antisense strand to SEQ ID NO: 2370620
aucaauguacacauguaaa

SEQ ID NO: 2370622 - RNA, 19 nt, Artificial Sequence
  Description of Artificial Sequence: Synthetic oligonucleotide
  Sense strand starting at position 754 of SEQ ID NO: 1885829
acauguguacauugauuau

SEQ ID NO: 2370623 - RNA, 19 nt, Artificial Sequence
  Description of Artificial Sequence: Synthetic oligonucleotide
  Antisense strand to SEQ ID NO: 2370622
auaaucaauguacacaugu

SEQ ID NO: 2370624 - RNA, 19 nt, Artificial Sequence
  Description of Artificial Sequence: Synthetic oligonucleotide
  Sense strand starting at position 758 of SEQ ID NO: 1885829
guguacauugauuauuaca

SEQ ID NO: 2370625 - RNA, 19 nt, Artificial Sequence
  Description of Artificial Sequence: Synthetic oligonucleotide
  Antisense strand to SEQ ID NO: 2370624
uguaauaaucaauguacac

SEQ ID NO: 2370626 - RNA, 19 nt, Artificial Sequence
  Description of Artificial Sequence: Synthetic oligonucleotide
  Sense strand starting at position 760 of SEQ ID NO: 1885829
guacauugauuauuacauc

SEQ ID NO: 2370627 - RNA, 19 nt, Artificial Sequence
  Description of Artificial Sequence: Synthetic oligonucleotide
  Antisense strand to SEQ ID NO: 2370626
gauguaauaaucaauguac

SEQ ID NO: 2370628 - RNA, 19 nt, Artificial Sequence
  Description of Artificial Sequence: Synthetic oligonucleotide
  Sense strand starting at position 898 of SEQ ID NO: 1885829
ucuauugaaccucagaguu

SEQ ID NO: 2370629 - RNA, 19 nt, Artificial Sequence
  Description of Artificial Sequence: Synthetic oligonucleotide
  Antisense strand to SEQ ID NO: 2370628
aacucugagguucaauaga

SEQ ID NO: 2370630 - RNA, 19 nt, Artificial Sequence
  Description of Artificial Sequence: Synthetic oligonucleotide
  Sense strand starting at position 1378 of SEQ ID NO: 1885829
gcauccauucugcagaaua

SEQ ID NO: 2370631 - RNA, 19 nt, Artificial Sequence
  Description of Artificial Sequence: Synthetic oligonucleotide
  Antisense strand to SEQ ID NO: 2370630
uauucugcagaauggaugc

SEQ ID NO: 2370632 - RNA, 19 nt, Artificial Sequence
  Description of Artificial Sequence: Synthetic oligonucleotide
  Sense strand starting at position 1608 of SEQ ID NO: 1885829
gcugauacucaugauccau

SEQ ID NO: 2370633 - RNA, 19 nt, Artificial Sequence
  Description of Artificial Sequence: Synthetic oligonucleotide
  Antisense strand to SEQ ID NO: 2370632
auggaucaugaguaucagc

SEQ ID NO: 2370634 - RNA, 19 nt, Artificial Sequence
  Description of Artificial Sequence: Synthetic oligonucleotide
  Sense strand starting at position 1878 of SEQ ID NO: 1885829
agaauaugaucuuugcaca

SEQ ID NO: 2370635 - RNA, 19 nt, Artificial Sequence
  Description of Artificial Sequence: Synthetic oligonucleotide
  Antisense strand to SEQ ID NO: 2370634
ugugcaaagaucauauucu

SEQ ID NO: 2370636 - RNA, 19 nt, Artificial Sequence
  Description of Artificial Sequence: Synthetic oligonucleotide
  Sense strand starting at position 1923 of SEQ ID NO: 1885829
ucuguuggaccucagaguu

SEQ ID NO: 2370637 - RNA, 19 nt, Artificial Sequence
  Description of Artificial Sequence: Synthetic oligonucleotide
  Antisense strand to SEQ ID NO: 2370636
aacucugagguccaacaga

SEQ ID NO: 2370638 - RNA, 19 nt, Artificial Sequence
  Description of Artificial Sequence: Synthetic oligonucleotide
  Sense strand starting at position 1988 of SEQ ID NO: 1885829
ucaucauugguccauguuu

SEQ ID NO: 2370639 - RNA, 19 nt, Artificial Sequence
  Description of Artificial Sequence: Synthetic oligonucleotide
  Antisense strand to SEQ ID NO: 2370638
aaacauggaccaaugauga

SEQ ID NO: 2370640 - RNA, 19 nt, Artificial Sequence
  Description of Artificial Sequence: Synthetic oligonucleotide
  Sense strand starting at position 2172 of SEQ ID NO: 1885829
cucacaucuguauaaguuc

SEQ ID NO: 2370641 - RNA, 19 nt, Artificial Sequence
  Description of Artificial Sequence: Synthetic oligonucleotide
  Antisense strand to SEQ ID NO: 2370640
gaacuuauacagaugugag

SEQ ID NO: 2370642 - RNA, 19 nt, Artificial Sequence
  Description of Artificial Sequence: Synthetic oligonucleotide
  Sense strand starting at position 2292 of SEQ ID NO: 1885829
uugugugcuggauauauac

SEQ ID NO: 2370643 - RNA, 19 nt, Artificial Sequence
  Description of Artificial Sequence: Synthetic oligonucleotide
  Antisense strand to SEQ ID NO: 2370642
guauauauccagcacacaa

SEQ ID NO: 2370644 - RNA, 19 nt, Artificial Sequence
  Description of Artificial Sequence: Synthetic oligonucleotide
  Sense strand starting at position 2298 of SEQ ID NO: 1885829
gcuggauauauacguauuu

SEQ ID NO: 2370645 - RNA, 19 nt, Artificial Sequence
  Description of Artificial Sequence: Synthetic oligonucleotide
  Antisense strand to SEQ ID NO: 2370644
aaauacguauauauccagc

SEQ ID NO: 2370646 - RNA, 19 nt, Artificial Sequence
  Description of Artificial Sequence: Synthetic oligonucleotide
  Sense strand starting at position 2351 of SEQ ID NO: 1885829
guuaaucuaccuggaaaga

SEQ ID NO: 2370647 - RNA, 19 nt, Artificial Sequence
  Description of Artificial Sequence: Synthetic oligonucleotide
  Antisense strand to SEQ ID NO: 2370646
ucuuuccagguagauuaac

SEQ ID NO: 2370648 - RNA, 19 nt, Artificial Sequence
  Description of Artificial Sequence: Synthetic oligonucleotide
  Sense strand starting at position 2399 of SEQ ID NO: 1885829
auccauuaggucugaagca

SEQ ID NO: 2370649 - RNA, 19 nt, Artificial Sequence
  Description of Artificial Sequence: Synthetic oligonucleotide
  Antisense strand to SEQ ID NO: 2370648
ugcuucagaccuaauggau

SEQ ID NO: 2370650 - RNA, 19 nt, Artificial Sequence
  Description of Artificial Sequence: Synthetic oligonucleotide
  Sense strand starting at position 2554 of SEQ ID NO: 1885829
ggcgcuggucucccuaauu

SEQ ID NO: 2370651 - RNA, 19 nt, Artificial Sequence
  Description of Artificial Sequence: Synthetic oligonucleotide
  Antisense strand to SEQ ID NO: 2370650
aauuagggagaccagcgcc

SEQ ID NO: 2370652 - RNA, 19 nt, Artificial Sequence
  Description of Artificial Sequence: Synthetic oligonucleotide
  Sense strand starting at position 2717 of SEQ ID NO: 1885829
ccucaaaggugauuaauca

SEQ ID NO: 2370653 - RNA, 19 nt, Artificial Sequence
  Description of Artificial Sequence: Synthetic oligonucleotide
  Antisense strand to SEQ ID NO: 2370652
ugauuaaucaccuuugagg

SEQ ID NO: 2370654 - RNA, 19 nt, Artificial Sequence
  Description of Artificial Sequence: Synthetic oligonucleotide
  Sense strand starting at position 2810 of SEQ ID NO: 1885829
ucaaauaaagaguguaugu

SEQ ID NO: 2370655 - RNA, 19 nt, Artificial Sequence
  Description of Artificial Sequence: Synthetic oligonucleotide
  Antisense strand to SEQ ID NO: 2370654
acauacacucuuuauuuga

SEQ ID NO: 2370656 - RNA, 19 nt, Artificial Sequence
  Description of Artificial Sequence: Synthetic oligonucleotide
  Sense strand starting at position 2817 of SEQ ID NO: 1885829
aagaguguauguccacaaa

SEQ ID NO: 2370657 - RNA, 19 nt, Artificial Sequence
  Description of Artificial Sequence: Synthetic oligonucleotide
  Antisense strand to SEQ ID NO: 2370656
uuuguggacauacacucuu

SEQ ID NO: 2370658 - RNA, 19 nt, Artificial Sequence
  Description of Artificial Sequence: Synthetic oligonucleotide
  Sense strand starting at position 3018 of SEQ ID NO: 1885829
ucacuuagguguuuauuaa

SEQ ID NO: 2370659 - RNA, 19 nt, Artificial Sequence
  Description of Artificial Sequence: Synthetic oligonucleotide
  Antisense strand to SEQ ID NO: 2370658
uuaauaaacaccuaaguga

SEQ ID NO: 2370660 - RNA, 19 nt, Artificial Sequence
  Description of Artificial Sequence: Synthetic oligonucleotide
  Sense strand starting at position 3084 of SEQ ID NO: 1885829
ugguuugaaccacaguaau

SEQ ID NO: 2370661 - RNA, 19 nt, Artificial Sequence
  Description of Artificial Sequence: Synthetic oligonucleotide
  Antisense strand to SEQ ID NO: 2370660
auuacugugguucaaacca

SEQ ID NO: 2370662 - RNA, 19 nt, Artificial Sequence
  Description of Artificial Sequence: Synthetic oligonucleotide
  Sense strand starting at position 3117 of SEQ ID NO: 1885829
uuuaucagugucuauauga

SEQ ID NO: 2370663 - RNA, 19 nt, Artificial Sequence
  Description of Artificial Sequence: Synthetic oligonucleotide
  Antisense strand to SEQ ID NO: 2370662
ucauauagacacugauaaa

SEQ ID NO: 2370664 - RNA, 19 nt, Artificial Sequence
  Description of Artificial Sequence: Synthetic oligonucleotide
  Sense strand starting at position 3124 of SEQ ID NO: 1885829
gugucuauaugaucauuaa

SEQ ID NO: 2370665 - RNA, 19 nt, Artificial Sequence
  Description of Artificial Sequence: Synthetic oligonucleotide
  Antisense strand to SEQ ID NO: 2370664
uuaaugaucauauagacac

SEQ ID NO: 2370666 - RNA, 19 nt, Artificial Sequence
  Description of Artificial Sequence: Synthetic oligonucleotide
  Sense strand starting at position 3142 of SEQ ID NO: 1885829
aggguaacacuuugaucca

SEQ ID NO: 2370667 - RNA, 19 nt, Artificial Sequence
  Description of Artificial Sequence: Synthetic oligonucleotide
  Antisense strand to SEQ ID NO: 2370666
uggaucaaaguguuacccu

SEQ ID NO: 2370668 - RNA, 19 nt, Artificial Sequence
  Description of Artificial Sequence: Synthetic oligonucleotide
  Sense strand starting at position 3164 of SEQ ID NO: 1885829
auuucuuaaugggaauagu

SEQ ID NO: 2370669 - RNA, 19 nt, Artificial Sequence
  Description of Artificial Sequence: Synthetic oligonucleotide
  Antisense strand to SEQ ID NO: 2370668
acuauucccauuaagaaau

SEQ ID NO: 2370670 - RNA, 19 nt, Artificial Sequence
  Description of Artificial Sequence: Synthetic oligonucleotide
  Sense strand starting at position 3167 of SEQ ID NO: 1885829
ucuuaaugggaauaguguu

SEQ ID NO: 2370671 - RNA, 19 nt, Artificial Sequence
  Description of Artificial Sequence: Synthetic oligonucleotide
  Antisense strand to SEQ ID NO: 2370670
aacacuauucccauuaaga

SEQ ID NO: 2370672 - RNA, 19 nt, Artificial Sequence
  Description of Artificial Sequence: Synthetic oligonucleotide
  Sense strand starting at position 3377 of SEQ ID NO: 1885829
ggauuuccaucagaguaau

SEQ ID NO: 2370673 - RNA, 19 nt, Artificial Sequence
  Description of Artificial Sequence: Synthetic oligonucleotide
  Antisense strand to SEQ ID NO: 2370672
auuacucugauggaaaucc

SEQ ID NO: 2370674 - RNA, 19 nt, Artificial Sequence
  Description of Artificial Sequence: Synthetic oligonucleotide
  Sense strand starting at position 3383 of SEQ ID NO: 1885829
ccaucagaguaauuagacu

SEQ ID NO: 2370675 - RNA, 19 nt, Artificial Sequence
  Description of Artificial Sequence: Synthetic oligonucleotide
  Antisense strand to SEQ ID NO: 2370674
agucuaauuacucugaugg

SEQ ID NO: 2370676 - RNA, 19 nt, Artificial Sequence
  Description of Artificial Sequence: Synthetic oligonucleotide
  Sense strand starting at position 3685 of SEQ ID NO: 1885829
auuaaucauccacaguguu

SEQ ID NO: 2370677 - RNA, 19 nt, Artificial Sequence
  Description of Artificial Sequence: Synthetic oligonucleotide
  Antisense strand to SEQ ID NO: 2370676
aacacuguggaugauuaau

SEQ ID NO: 2370678 - RNA, 19 nt, Artificial Sequence
  Description of Artificial Sequence: Synthetic oligonucleotide
  Sense strand starting at position 3764 of SEQ ID NO: 1885829
uggcuuucuuugguuauuu

SEQ ID NO: 2370679 - RNA, 19 nt, Artificial Sequence
  Description of Artificial Sequence: Synthetic oligonucleotide
  Antisense strand to SEQ ID NO: 2370678
aaauaaccaaagaaagcca

SEQ ID NO: 2370680 - RNA, 19 nt, Artificial Sequence
  Description of Artificial Sequence: Synthetic oligonucleotide
  Sense strand starting at position 3765 of SEQ ID NO: 1885829
ggcuuucuuugguuauuua

SEQ ID NO: 2370681 - RNA, 19 nt, Artificial Sequence
  Description of Artificial Sequence: Synthetic oligonucleotide
  Antisense strand to SEQ ID NO: 2370680
uaaauaaccaaagaaagcc

SEQ ID NO: 2370682 - RNA, 19 nt, Artificial Sequence
  Description of Artificial Sequence: Synthetic oligonucleotide
  Sense strand starting at position 3910 of SEQ ID NO: 1885829
gcagaaggccuguaaguac

SEQ ID NO: 2370683 - RNA, 19 nt, Artificial Sequence
  Description of Artificial Sequence: Synthetic oligonucleotide
  Antisense strand to SEQ ID NO: 2370682
guacuuacaggccuucugc

SEQ ID NO: 2370684 - RNA, 19 nt, Artificial Sequence
  Description of Artificial Sequence: Synthetic oligonucleotide
  Sense strand starting at position 8 of SEQ ID NO: 1885830
cucacauuugucuguaggu

SEQ ID NO: 2370685 - RNA, 19 nt, Artificial Sequence
  Description of Artificial Sequence: Synthetic oligonucleotide
  Antisense strand to SEQ ID NO: 2370684
accuacagacaaaugugag

SEQ ID NO: 2370686 - RNA, 19 nt, Artificial Sequence
  Description of Artificial Sequence: Synthetic oligonucleotide
  Sense strand starting at position 9 of SEQ ID NO: 1885830
ucacauuugucuguagguu

SEQ ID NO: 2370687 - RNA, 19 nt, Artificial Sequence
  Description of Artificial Sequence: Synthetic oligonucleotide
  Antisense strand to SEQ ID NO: 2370686
aaccuacagacaaauguga

SEQ ID NO: 2370688 - RNA, 19 nt, Artificial Sequence
  Description of Artificial Sequence: Synthetic oligonucleotide
  Sense strand starting at position 46 of SEQ ID NO: 1885830
gcaaguggucauggcagaa

SEQ ID NO: 2370689 - RNA, 19 nt, Artificial Sequence
  Description of Artificial Sequence: Synthetic oligonucleotide
  Antisense strand to SEQ ID NO: 2370688
uucugccaugaccacuugc

SEQ ID NO: 2370690 - RNA, 19 nt, Artificial Sequence
  Description of Artificial Sequence: Synthetic oligonucleotide
  Sense strand starting at position 84 of SEQ ID NO: 1885830
uucugaggauuacaaggaa

SEQ ID NO: 2370691 - RNA, 19 nt, Artificial Sequence
  Description of Artificial Sequence: Synthetic oligonucleotide
  Antisense strand to SEQ ID NO: 2370690
uuccuuguaauccucagaa

SEQ ID NO: 2370692 - RNA, 19 nt, Artificial Sequence
  Description of Artificial Sequence: Synthetic oligonucleotide
  Sense strand starting at position 155 of SEQ ID NO: 1885830
uuccauuuacucugucagu

SEQ ID NO: 2370693 - RNA, 19 nt, Artificial Sequence
  Description of Artificial Sequence: Synthetic oligonucleotide
  Antisense strand to SEQ ID NO: 2370692
acugacagaguaaauggaa

SEQ ID NO: 2370694 - RNA, 19 nt, Artificial Sequence
  Description of Artificial Sequence: Synthetic oligonucleotide
  Sense strand starting at position 156 of SEQ ID NO: 1885830
uccauuuacucugucaguu

SEQ ID NO: 2370695 - RNA, 19 nt, Artificial Sequence
  Description of Artificial Sequence: Synthetic oligonucleotide
  Antisense strand to SEQ ID NO: 2370694
aacugacagaguaaaugga

SEQ ID NO: 2370696 - RNA, 19 nt, Artificial Sequence
  Description of Artificial Sequence: Synthetic oligonucleotide
  Sense strand starting at position 164 of SEQ ID NO: 1885830
cucugucaguugguauuua

SEQ ID NO: 2370697 - RNA, 19 nt, Artificial Sequence
  Description of Artificial Sequence: Synthetic oligonucleotide
  Antisense strand to SEQ ID NO: 2370696
uaaauaccaacugacagag

SEQ ID NO: 2370698 - RNA, 19 nt, Artificial Sequence
  Description of Artificial Sequence: Synthetic oligonucleotide
  Sense strand starting at position 324 of SEQ ID NO: 1885830
cuaugauucuuagccagag

SEQ ID NO: 2370699 - RNA, 19 nt, Artificial Sequence
  Description of Artificial Sequence: Synthetic oligonucleotide
  Antisense strand to SEQ ID NO: 2370698
cucuggcuaagaaucauag

SEQ ID NO: 2370700 - RNA, 19 nt, Artificial Sequence
  Description of Artificial Sequence: Synthetic oligonucleotide
  Sense strand starting at position 325 of SEQ ID NO: 1885830
uaugauucuuagccagaga

SEQ ID NO: 2370701 - RNA, 19 nt, Artificial Sequence
  Description of Artificial Sequence: Synthetic oligonucleotide
  Antisense strand to SEQ ID NO: 2370700
ucucuggcuaagaaucaua

SEQ ID NO: 2370702 - RNA, 19 nt, Artificial Sequence
  Description of Artificial Sequence: Synthetic oligonucleotide
  Sense strand starting at position 328 of SEQ ID NO: 1885830
gauucuuagccagagaguu

SEQ ID NO: 2370703 - RNA, 19 nt, Artificial Sequence
  Description of Artificial Sequence: Synthetic oligonucleotide
  Antisense strand to SEQ ID NO: 2370702
aacucucuggcuaagaauc

SEQ ID NO: 2370704 - RNA, 19 nt, Artificial Sequence
  Description of Artificial Sequence: Synthetic oligonucleotide
  Sense strand starting at position 533 of SEQ ID NO: 1885830
agcaaacagccuugauauc

SEQ ID NO: 2370705 - RNA, 19 nt, Artificial Sequence
  Description of Artificial Sequence: Synthetic oligonucleotide
  Antisense strand to SEQ ID NO: 2370704
gauaucaaggcuguuugcu

SEQ ID NO: 2370706 - RNA, 19 nt, Artificial Sequence
  Description of Artificial Sequence: Synthetic oligonucleotide
  Sense strand starting at position 534 of SEQ ID NO: 1885830
gcaaacagccuugauauca

SEQ ID NO: 2370707 - RNA, 19 nt, Artificial Sequence
  Description of Artificial Sequence: Synthetic oligonucleotide
  Antisense strand to SEQ ID NO: 2370706
ugauaucaaggcuguuugc

SEQ ID NO: 2370708 - RNA, 19 nt, Artificial Sequence
  Description of Artificial Sequence: Synthetic oligonucleotide
  Sense strand starting at position 668 of SEQ ID NO: 1885830
cugucaucgcuugcucaag

SEQ ID NO: 2370709 - RNA, 19 nt, Artificial Sequence
  Description of Artificial Sequence: Synthetic oligonucleotide
  Antisense strand to SEQ ID NO: 2370708
cuugagcaagcgaugacag

SEQ ID NO: 2370710 - RNA, 19 nt, Artificial Sequence
  Description of Artificial Sequence: Synthetic oligonucleotide
  Sense strand starting at position 701 of SEQ ID NO: 1885830
ucuuaauucgugucuacgu

SEQ ID NO: 2370711 - RNA, 19 nt, Artificial Sequence
  Description of Artificial Sequence: Synthetic oligonucleotide
  Antisense strand to SEQ ID NO: 2370710
acguagacacgaauuaaga

SEQ ID NO: 2370712 - RNA, 19 nt, Artificial Sequence
  Description of Artificial Sequence: Synthetic oligonucleotide
  Sense strand starting at position 808 of SEQ ID NO: 1885830
cuuauaucugucuauguca

SEQ ID NO: 2370713 - RNA, 19 nt, Artificial Sequence
  Description of Artificial Sequence: Synthetic oligonucleotide
  Antisense strand to SEQ ID NO: 2370712
ugacauagacagauauaag

SEQ ID NO: 2370714 - RNA, 19 nt, Artificial Sequence
  Description of Artificial Sequence: Synthetic oligonucleotide
  Sense strand starting at position 816 of SEQ ID NO: 1885830
ugucuaugucaauauuacu

SEQ ID NO: 2370715 - RNA, 19 nt, Artificial Sequence
  Description of Artificial Sequence: Synthetic oligonucleotide
  Antisense strand to SEQ ID NO: 2370714
aguaauauugacauagaca

SEQ ID NO: 2370716 - RNA, 19 nt, Artificial Sequence
  Description of Artificial Sequence: Synthetic oligonucleotide
  Sense strand starting at position 943 of SEQ ID NO: 1885830
uuacaaaugggccagaguu

SEQ ID NO: 2370717 - RNA, 19 nt, Artificial Sequence
  Description of Artificial Sequence: Synthetic oligonucleotide
  Antisense strand to SEQ ID NO: 2370716
aacucuggcccauuuguaa

SEQ ID NO: 2370718 - RNA, 19 nt, Artificial Sequence
  Description of Artificial Sequence: Synthetic oligonucleotide
  Sense strand starting at position 1032 of SEQ ID NO: 1885830
aagaauguugacugucacu

SEQ ID NO: 2370719 - RNA, 19 nt, Artificial Sequence
  Description of Artificial Sequence: Synthetic oligonucleotide
  Antisense strand to SEQ ID NO: 2370718
agugacagucaacauucuu

SEQ ID NO: 2370720 - RNA, 19 nt, Artificial Sequence
  Description of Artificial Sequence: Synthetic oligonucleotide
  Sense strand starting at position 1037 of SEQ ID NO: 1885830
uguugacugucacucacau

SEQ ID NO: 2370721 - RNA, 19 nt, Artificial Sequence
  Description of Artificial Sequence: Synthetic oligonucleotide
  Antisense strand to SEQ ID NO: 2370720
augugagugacagucaaca

SEQ ID NO: 2370722 - RNA, 19 nt, Artificial Sequence
  Description of Artificial Sequence: Synthetic oligonucleotide
  Sense strand starting at position 1050 of SEQ ID NO: 1885830
ucacauuggucuccacaca

SEQ ID NO: 2370723 - RNA, 19 nt, Artificial Sequence
  Description of Artificial Sequence: Synthetic oligonucleotide
  Antisense strand to SEQ ID NO: 2370722
uguguggagaccaauguga

SEQ ID NO: 2370724 - RNA, 19 nt, Artificial Sequence
  Description of Artificial Sequence: Synthetic oligonucleotide
  Sense strand starting at position 1236 of SEQ ID NO: 1885830
uagguuauuugagauaaca

SEQ ID NO: 2370725 - RNA, 19 nt, Artificial Sequence
  Description of Artificial Sequence: Synthetic oligonucleotide
  Antisense strand to SEQ ID NO: 2370724
uguuaucucaaauaaccua

SEQ ID NO: 2370726 - RNA, 19 nt, Artificial Sequence
  Description of Artificial Sequence: Synthetic oligonucleotide
  Sense strand starting at position 1748 of SEQ ID NO: 1885830
cgcuuagucgcauccaaca

SEQ ID NO: 2370727 - RNA, 19 nt, Artificial Sequence
  Description of Artificial Sequence: Synthetic oligonucleotide
  Antisense strand to SEQ ID NO: 2370726
uguuggaugcgacuaagcg

SEQ ID NO: 2370728 - RNA, 19 nt, Artificial Sequence
  Description of Artificial Sequence: Synthetic oligonucleotide
  Sense strand starting at position 1986 of SEQ ID NO: 1885830
agucaugauugauccagga

SEQ ID NO: 2370729 - RNA, 19 nt, Artificial Sequence
  Description of Artificial Sequence: Synthetic oligonucleotide
  Antisense strand to SEQ ID NO: 2370728
uccuggaucaaucaugacu

SEQ ID NO: 2370730 - RNA, 19 nt, Artificial Sequence
  Description of Artificial Sequence: Synthetic oligonucleotide
  Sense strand starting at position 2199 of SEQ ID NO: 1885830
auaagcaucccucagugua

SEQ ID NO: 2370731 - RNA, 19 nt, Artificial Sequence
  Description of Artificial Sequence: Synthetic oligonucleotide
  Antisense strand to SEQ ID NO: 2370730
uacacugagggaugcuuau

SEQ ID NO: 2370732 - RNA, 19 nt, Artificial Sequence
  Description of Artificial Sequence: Synthetic oligonucleotide
  Sense strand starting at position 2202 of SEQ ID NO: 1885830
agcaucccucaguguaaca

SEQ ID NO: 2370733 - RNA, 19 nt, Artificial Sequence
  Description of Artificial Sequence: Synthetic oligonucleotide
  Antisense strand to SEQ ID NO: 2370732
uguuacacugagggaugcu

SEQ ID NO: 2370734 - RNA, 19 nt, Artificial Sequence
  Description of Artificial Sequence: Synthetic oligonucleotide
  Sense strand starting at position 2252 of SEQ ID NO: 1885830
uacucauggccuuauugga

SEQ ID NO: 2370735 - RNA, 19 nt, Artificial Sequence
  Description of Artificial Sequence: Synthetic oligonucleotide
  Antisense strand to SEQ ID NO: 2370734
uccaauaaggccaugagua

SEQ ID NO: 2370736 - RNA, 19 nt, Artificial Sequence
  Description of Artificial Sequence: Synthetic oligonucleotide
  Sense strand starting at position 2364 of SEQ ID NO: 1885830
cagcuucuagcacagagau

SEQ ID NO: 2370737 - RNA, 19 nt, Artificial Sequence
  Description of Artificial Sequence: Synthetic oligonucleotide
  Antisense strand to SEQ ID NO: 2370736
aucucugugcuagaagcug

SEQ ID NO: 2370738 - RNA, 19 nt, Artificial Sequence
  Description of Artificial Sequence: Synthetic oligonucleotide
  Sense strand starting at position 2422 of SEQ ID NO: 1885830
cuuccauucugaguacaga

SEQ ID NO: 2370739 - RNA, 19 nt, Artificial Sequence
  Description of Artificial Sequence: Synthetic oligonucleotide
  Antisense strand to SEQ ID NO: 2370738
ucuguacucagaauggaag

SEQ ID NO: 2370740 - RNA, 19 nt, Artificial Sequence
  Description of Artificial Sequence: Synthetic oligonucleotide
  Sense strand starting at position 2576 of SEQ ID NO: 1885830
augaauaacuggccagaug

SEQ ID NO: 2370741 - RNA, 19 nt, Artificial Sequence
  Description of Artificial Sequence: Synthetic oligonucleotide
  Antisense strand to SEQ ID NO: 2370740
caucuggccaguuauucau

SEQ ID NO: 2370742 - RNA, 19 nt, Artificial Sequence
  Description of Artificial Sequence: Synthetic oligonucleotide
  Sense strand starting at position 2577 of SEQ ID NO: 1885830
ugaauaacuggccagaugu

SEQ ID NO: 2370743 - RNA, 19 nt, Artificial Sequence
  Description of Artificial Sequence: Synthetic oligonucleotide
  Antisense strand to SEQ ID NO: 2370742
acaucuggccaguuauuca

SEQ ID NO: 2370744 - RNA, 19 nt, Artificial Sequence
  Description of Artificial Sequence: Synthetic oligonucleotide
  Sense strand starting at position 3105 of SEQ ID NO: 1885830
uggaauugucccugaccca

SEQ ID NO: 2370745 - RNA, 19 nt, Artificial Sequence
  Description of Artificial Sequence: Synthetic oligonucleotide
  Antisense strand to SEQ ID NO: 2370744
ugggucagggacaauucca

SEQ ID NO: 2370746 - RNA, 19 nt, Artificial Sequence
  Description of Artificial Sequence: Synthetic oligonucleotide
  Sense strand starting at position 3170 of SEQ ID NO: 1885830
gguaacagguaugcaagau

SEQ ID NO: 2370747 - RNA, 19 nt, Artificial Sequence
  Description of Artificial Sequence: Synthetic oligonucleotide
  Antisense strand to SEQ ID NO: 2370746
aucuugcauaccuguuacc

SEQ ID NO: 2370748 - RNA, 19 nt, Artificial Sequence
  Description of Artificial Sequence: Synthetic oligonucleotide
  Sense strand starting at position 3171 of SEQ ID NO: 1885830
guaacagguaugcaagauu

SEQ ID NO: 2370749 - RNA, 19 nt, Artificial Sequence
  Description of Artificial Sequence: Synthetic oligonucleotide
  Antisense strand to SEQ ID NO: 2370748
aaucuugcauaccuguuac

SEQ ID NO: 2370750 - RNA, 19 nt, Artificial Sequence
  Description of Artificial Sequence: Synthetic oligonucleotide
  Sense strand starting at position 3190 of SEQ ID NO: 1885830
ucucuuuaguuguuaccaa

SEQ ID NO: 2370751 - RNA, 19 nt, Artificial Sequence
  Description of Artificial Sequence: Synthetic oligonucleotide
  Antisense strand to SEQ ID NO: 2370750
uugguaacaacuaaagaga

SEQ ID NO: 2370752 - RNA, 19 nt, Artificial Sequence
  Description of Artificial Sequence: Synthetic oligonucleotide
  Sense strand starting at position 3257 of SEQ ID NO: 1885830
guuggacaauccuuaaucu

SEQ ID NO: 2370753 - RNA, 19 nt, Artificial Sequence
  Description of Artificial Sequence: Synthetic oligonucleotide
  Antisense strand to SEQ ID NO: 2370752
agauuaaggauuguccaac

SEQ ID NO: 2370754 - RNA, 19 nt, Artificial Sequence
  Description of Artificial Sequence: Synthetic oligonucleotide
  Sense strand starting at position 3414 of SEQ ID NO: 1885830
cacccaaguccucggauua

SEQ ID NO: 2370755 - RNA, 19 nt, Artificial Sequence
  Description of Artificial Sequence: Synthetic oligonucleotide
  Antisense strand to SEQ ID NO: 2370754
uaauccgaggacuugggug

SEQ ID NO: 2370756 - RNA, 19 nt, Artificial Sequence
  Description of Artificial Sequence: Synthetic oligonucleotide
  Sense strand starting at position 3514 of SEQ ID NO: 1885830
aucuccugucaucaaguga

SEQ ID NO: 2370757 - RNA, 19 nt, Artificial Sequence
  Description of Artificial Sequence: Synthetic oligonucleotide
  Antisense strand to SEQ ID NO: 2370756
ucacuugaugacaggagau

SEQ ID NO: 2370758 - RNA, 19 nt, Artificial Sequence
  Description of Artificial Sequence: Synthetic oligonucleotide
  Sense strand starting at position 3624 of SEQ ID NO: 1885830
ugauucucugauugagcca

SEQ ID NO: 2370759 - RNA, 19 nt, Artificial Sequence
  Description of Artificial Sequence: Synthetic oligonucleotide
  Antisense strand to SEQ ID NO: 2370758
uggcucaaucagagaauca

SEQ ID NO: 2370760 - RNA, 19 nt, Artificial Sequence
  Description of Artificial Sequence: Synthetic oligonucleotide
  Sense strand starting at position 3717 of SEQ ID NO: 1885830
guaggaucauuugaaacag

SEQ ID NO: 2370761 - RNA, 19 nt, Artificial Sequence
  Description of Artificial Sequence: Synthetic oligonucleotide
  Antisense strand to SEQ ID NO: 2370760
cuguuucaaaugauccuac

SEQ ID NO: 2370762 - RNA, 19 nt, Artificial Sequence
  Description of Artificial Sequence: Synthetic oligonucleotide
  Sense strand starting at position 3858 of SEQ ID NO: 1885830
ucuacauugucuguugauu

SEQ ID NO: 2370763 - RNA, 19 nt, Artificial Sequence
  Description of Artificial Sequence: Synthetic oligonucleotide
  Antisense strand to SEQ ID NO: 2370762
aaucaacagacaauguaga

SEQ ID NO: 2370764 - RNA, 19 nt, Artificial Sequence
  Description of Artificial Sequence: Synthetic oligonucleotide
  Sense strand starting at position 107 of SEQ ID NO: 1885831
aguugaucauuaccaaagu

SEQ ID NO: 2370765 - RNA, 19 nt, Artificial Sequence
  Description of Artificial Sequence: Synthetic oligonucleotide
  Antisense strand to SEQ ID NO: 2370764
acuuugguaaugaucaacu

SEQ ID NO: 2370766 - RNA, 19 nt, Artificial Sequence
  Description of Artificial Sequence: Synthetic oligonucleotide
  Sense strand starting at position 294 of SEQ ID NO: 1885831
auggacagcucauacauuu

SEQ ID NO: 2370767 - RNA, 19 nt, Artificial Sequence
  Description of Artificial Sequence: Synthetic oligonucleotide
  Antisense strand to SEQ ID NO: 2370766
aaauguaugagcuguccau

SEQ ID NO: 2370768 - RNA, 19 nt, Artificial Sequence
  Description of Artificial Sequence: Synthetic oligonucleotide
  Sense strand starting at position 317 of SEQ ID NO: 1885831
acauguuucucauucugag

SEQ ID NO: 2370769 - RNA, 19 nt, Artificial Sequence
  Description of Artificial Sequence: Synthetic oligonucleotide
  Antisense strand to SEQ ID NO: 2370768
cucagaaugagaaacaugu

SEQ ID NO: 2370770 - RNA, 19 nt, Artificial Sequence
  Description of Artificial Sequence: Synthetic oligonucleotide
  Sense strand starting at position 362 of SEQ ID NO: 1885831
cucccugagcaauagauca

SEQ ID NO: 2370771 - RNA, 19 nt, Artificial Sequence
  Description of Artificial Sequence: Synthetic oligonucleotide
  Antisense strand to SEQ ID NO: 2370770
ugaucuauugcucagggag

SEQ ID NO: 2370772 - RNA, 19 nt, Artificial Sequence
  Description of Artificial Sequence: Synthetic oligonucleotide
  Sense strand starting at position 367 of SEQ ID NO: 1885831
ugagcaauagaucaguacu

SEQ ID NO: 2370773 - RNA, 19 nt, Artificial Sequence
  Description of Artificial Sequence: Synthetic oligonucleotide
  Antisense strand to SEQ ID NO: 2370772
aguacugaucuauugcuca

SEQ ID NO: 2370774 - RNA, 19 nt, Artificial Sequence
  Description of Artificial Sequence: Synthetic oligonucleotide
  Sense strand starting at position 369 of SEQ ID NO: 1885831
agcaauagaucaguacugu

SEQ ID NO: 2370775 - RNA, 19 nt, Artificial Sequence
  Description of Artificial Sequence: Synthetic oligonucleotide
  Antisense strand to SEQ ID NO: 2370774
acaguacugaucuauugcu

SEQ ID NO: 2370776 - RNA, 19 nt, Artificial Sequence
  Description of Artificial Sequence: Synthetic oligonucleotide
  Sense strand starting at position 370 of SEQ ID NO: 1885831
gcaauagaucaguacugug

SEQ ID NO: 2370777 - RNA, 19 nt, Artificial Sequence
  Description of Artificial Sequence: Synthetic oligonucleotide
  Antisense strand to SEQ ID NO: 2370776
cacaguacugaucuauugc

SEQ ID NO: 2370778 - RNA, 19 nt, Artificial Sequence
  Description of Artificial Sequence: Synthetic oligonucleotide
  Sense strand starting at position 375 of SEQ ID NO: 1885831
agaucaguacugugacuug

SEQ ID NO: 2370779 - RNA, 19 nt, Artificial Sequence
  Description of Artificial Sequence: Synthetic oligonucleotide
  Antisense strand to SEQ ID NO: 2370778
caagucacaguacugaucu

SEQ ID NO: 2370780 - RNA, 19 nt, Artificial Sequence
  Description of Artificial Sequence: Synthetic oligonucleotide
  Sense strand starting at position 487 of SEQ ID NO: 1885831
cgugaauuacaagagcaca

SEQ ID NO: 2370781 - RNA, 19 nt, Artificial Sequence
  Description of Artificial Sequence: Synthetic oligonucleotide
  Antisense strand to SEQ ID NO: 2370780
ugugcucuuguaauucacg

SEQ ID NO: 2370782 - RNA, 19 nt, Artificial Sequence
  Description of Artificial Sequence: Synthetic oligonucleotide
  Sense strand starting at position 878 of SEQ ID NO: 1885831
acugaucaauaggcuagau

SEQ ID NO: 2370783 - RNA, 19 nt, Artificial Sequence
  Description of Artificial Sequence: Synthetic oligonucleotide
  Antisense strand to SEQ ID NO: 2370782
aucuagccuauugaucagu

SEQ ID NO: 2370784 - RNA, 19 nt, Artificial Sequence
  Description of Artificial Sequence: Synthetic oligonucleotide
  Sense strand starting at position 948 of SEQ ID NO: 1885831
gacucauacccacgaguca

SEQ ID NO: 2370785 - RNA, 19 nt, Artificial Sequence
  Description of Artificial Sequence: Synthetic oligonucleotide
  Antisense strand to SEQ ID NO: 2370784
ugacucguggguaugaguc

SEQ ID NO: 2370786 - RNA, 19 nt, Artificial Sequence
  Description of Artificial Sequence: Synthetic oligonucleotide
  Sense strand starting at position 949 of SEQ ID NO: 1885831
acucauacccacgagucau

SEQ ID NO: 2370787 - RNA, 19 nt, Artificial Sequence
  Description of Artificial Sequence: Synthetic oligonucleotide
  Antisense strand to SEQ ID NO: 2370786
augacucguggguaugagu

SEQ ID NO: 2370788 - RNA, 19 nt, Artificial Sequence
  Description of Artificial Sequence: Synthetic oligonucleotide
  Sense strand starting at position 1142 of SEQ ID NO: 1885831
uuagacauguuucuugaac

SEQ ID NO: 2370789 - RNA, 19 nt, Artificial Sequence
  Description of Artificial Sequence: Synthetic oligonucleotide
  Antisense strand to SEQ ID NO: 2370788
guucaagaaacaugucuaa

SEQ ID NO: 2370790 - RNA, 19 nt, Artificial Sequence
  Description of Artificial Sequence: Synthetic oligonucleotide
  Sense strand starting at position 1314 of SEQ ID NO: 1885831
uuugacgauuacucacauu

SEQ ID NO: 2370791 - RNA, 19 nt, Artificial Sequence
  Description of Artificial Sequence: Synthetic oligonucleotide
  Antisense strand to SEQ ID NO: 2370790
aaugugaguaaucgucaaa

SEQ ID NO: 2370792 - RNA, 19 nt, Artificial Sequence
  Description of Artificial Sequence: Synthetic oligonucleotide
  Sense strand starting at position 1325 of SEQ ID NO: 1885831
cucacauuugucuguaggu

SEQ ID NO: 2370793 - RNA, 19 nt, Artificial Sequence
  Description of Artificial Sequence: Synthetic oligonucleotide
  Antisense strand to SEQ ID NO: 2370792
accuacagacaaaugugag

SEQ ID NO: 2370794 - RNA, 19 nt, Artificial Sequence
  Description of Artificial Sequence: Synthetic oligonucleotide
  Sense strand starting at position 1326 of SEQ ID NO: 1885831
ucacauuugucuguagguu

SEQ ID NO: 2370795 - RNA, 19 nt, Artificial Sequence
  Description of Artificial Sequence: Synthetic oligonucleotide
  Antisense strand to SEQ ID NO: 2370794
aaccuacagacaaauguga

SEQ ID NO: 2370796 - RNA, 19 nt, Artificial Sequence
  Description of Artificial Sequence: Synthetic oligonucleotide
  Sense strand starting at position 1472 of SEQ ID NO: 1885831
uuccauuuacucugucagu

SEQ ID NO: 2370797 - RNA, 19 nt, Artificial Sequence
  Description of Artificial Sequence: Synthetic oligonucleotide
  Antisense strand to SEQ ID NO: 2370796
acugacagaguaaauggaa

SEQ ID NO: 2370798 - RNA, 19 nt, Artificial Sequence
  Description of Artificial Sequence: Synthetic oligonucleotide
  Sense strand starting at position 1473 of SEQ ID NO: 1885831
uccauuuacucugucaguu

SEQ ID NO: 2370799 - RNA, 19 nt, Artificial Sequence
  Description of Artificial Sequence: Synthetic oligonucleotide
  Antisense strand to SEQ ID NO: 2370798
aacugacagaguaaaugga

SEQ ID NO: 2370800 - RNA, 19 nt, Artificial Sequence
  Description of Artificial Sequence: Synthetic oligonucleotide
  Sense strand starting at position 1481 of SEQ ID NO: 1885831
cucugucaguugguauuua

SEQ ID NO: 2370801 - RNA, 19 nt, Artificial Sequence
  Description of Artificial Sequence: Synthetic oligonucleotide
  Antisense strand to SEQ ID NO: 2370800
uaaauaccaacugacagag

SEQ ID NO: 2370802 - RNA, 19 nt, Artificial Sequence
  Description of Artificial Sequence: Synthetic oligonucleotide
  Sense strand starting at position 1641 of SEQ ID NO: 1885831
cuaugauucuuagccagag

SEQ ID NO: 2370803 - RNA, 19 nt, Artificial Sequence
  Description of Artificial Sequence: Synthetic oligonucleotide
  Antisense strand to SEQ ID NO: 2370802
cucuggcuaagaaucauag

SEQ ID NO: 2370804 - RNA, 19 nt, Artificial Sequence
  Description of Artificial Sequence: Synthetic oligonucleotide
  Sense strand starting at position 1642 of SEQ ID NO: 1885831
uaugauucuuagccagaga

SEQ ID NO: 2370805 - RNA, 19 nt, Artificial Sequence
  Description of Artificial Sequence: Synthetic oligonucleotide
  Antisense strand to SEQ ID NO: 2370804
ucucuggcuaagaaucaua

SEQ ID NO: 2370806 - RNA, 19 nt, Artificial Sequence
  Description of Artificial Sequence: Synthetic oligonucleotide
  Sense strand starting at position 1645 of SEQ ID NO: 1885831
gauucuuagccagagaguu

SEQ ID NO: 2370807 - RNA, 19 nt, Artificial Sequence
  Description of Artificial Sequence: Synthetic oligonucleotide
  Antisense strand to SEQ ID NO: 2370806
aacucucuggcuaagaauc

SEQ ID NO: 2370808 - RNA, 19 nt, Artificial Sequence
  Description of Artificial Sequence: Synthetic oligonucleotide
  Sense strand starting at position 1850 of SEQ ID NO: 1885831
agcaaacagccuugauauc

SEQ ID NO: 2370809 - RNA, 19 nt, Artificial Sequence
  Description of Artificial Sequence: Synthetic oligonucleotide
  Antisense strand to SEQ ID NO: 2370808
gauaucaaggcuguuugcu

SEQ ID NO: 2370810 - RNA, 19 nt, Artificial Sequence
  Description of Artificial Sequence: Synthetic oligonucleotide
  Sense strand starting at position 1851 of SEQ ID NO: 1885831
gcaaacagccuugauauca

SEQ ID NO: 2370811 - RNA, 19 nt, Artificial Sequence
  Description of Artificial Sequence: Synthetic oligonucleotide
  Antisense strand to SEQ ID NO: 2370810
ugauaucaaggcuguuugc

SEQ ID NO: 2370812 - RNA, 19 nt, Artificial Sequence
  Description of Artificial Sequence: Synthetic oligonucleotide
  Sense strand starting at position 1985 of SEQ ID NO: 1885831
cugucaucgcuugcucaag

SEQ ID NO: 2370813 - RNA, 19 nt, Artificial Sequence
  Description of Artificial Sequence: Synthetic oligonucleotide
  Antisense strand to SEQ ID NO: 2370812
cuugagcaagcgaugacag

SEQ ID NO: 2370814 - RNA, 19 nt, Artificial Sequence
  Description of Artificial Sequence: Synthetic oligonucleotide
  Sense strand starting at position 2018 of SEQ ID NO: 1885831
ucuuaauucgugucuacgu

SEQ ID NO: 2370815 - RNA, 19 nt, Artificial Sequence
  Description of Artificial Sequence: Synthetic oligonucleotide
  Antisense strand to SEQ ID NO: 2370814
acguagacacgaauuaaga

SEQ ID NO: 2370816 - RNA, 19 nt, Artificial Sequence
  Description of Artificial Sequence: Synthetic oligonucleotide
  Sense strand starting at position 2125 of SEQ ID NO: 1885831
cuuauaucugucuauguca

SEQ ID NO: 2370817 - RNA, 19 nt, Artificial Sequence
  Description of Artificial Sequence: Synthetic oligonucleotide
  Antisense strand to SEQ ID NO: 2370816
ugacauagacagauauaag

SEQ ID NO: 2370818 - RNA, 19 nt, Artificial Sequence
  Description of Artificial Sequence: Synthetic oligonucleotide
  Sense strand starting at position 2133 of SEQ ID NO: 1885831
ugucuaugucaauauuacu

SEQ ID NO: 2370819 - RNA, 19 nt, Artificial Sequence
  Description of Artificial Sequence: Synthetic oligonucleotide
  Antisense strand to SEQ ID NO: 2370818
aguaauauugacauagaca

SEQ ID NO: 2370820 - RNA, 19 nt, Artificial Sequence
  Description of Artificial Sequence: Synthetic oligonucleotide
  Sense strand starting at position 2260 of SEQ ID NO: 1885831
uuacaaaugggccagaguu

SEQ ID NO: 2370821 - RNA, 19 nt, Artificial Sequence
  Description of Artificial Sequence: Synthetic oligonucleotide
  Antisense strand to SEQ ID NO: 2370820
aacucuggcccauuuguaa

SEQ ID NO: 2370822 - RNA, 19 nt, Artificial Sequence
  Description of Artificial Sequence: Synthetic oligonucleotide
  Sense strand starting at position 2349 of SEQ ID NO: 1885831
aagaauguugacugucacu

SEQ ID NO: 2370823 - RNA, 19 nt, Artificial Sequence
  Description of Artificial Sequence: Synthetic oligonucleotide
  Antisense strand to SEQ ID NO: 2370822
agugacagucaacauucuu

SEQ ID NO: 2370824 - RNA, 19 nt, Artificial Sequence
  Description of Artificial Sequence: Synthetic oligonucleotide
  Sense strand starting at position 2367 of SEQ ID NO: 1885831
ucacauuggucuccacaca

SEQ ID NO: 2370825 - RNA, 19 nt, Artificial Sequence
  Description of Artificial Sequence: Synthetic oligonucleotide
  Antisense strand to SEQ ID NO: 2370824
uguguggagaccaauguga

SEQ ID NO: 2370826 - RNA, 19 nt, Artificial Sequence
  Description of Artificial Sequence: Synthetic oligonucleotide
  Sense strand starting at position 2553 of SEQ ID NO: 1885831
uagguuauuugagauaaca

SEQ ID NO: 2370827 - RNA, 19 nt, Artificial Sequence
  Description of Artificial Sequence: Synthetic oligonucleotide
  Antisense strand to SEQ ID NO: 2370826
uguuaucucaaauaaccua

SEQ ID NO: 2370828 - RNA, 19 nt, Artificial Sequence
  Description of Artificial Sequence: Synthetic oligonucleotide
  Sense strand starting at position 3065 of SEQ ID NO: 1885831
cgcuuagucgcauccaaca

SEQ ID NO: 2370829 - RNA, 19 nt, Artificial Sequence
  Description of Artificial Sequence: Synthetic oligonucleotide
  Antisense strand to SEQ ID NO: 2370828
uguuggaugcgacuaagcg

SEQ ID NO: 2370830 - RNA, 19 nt, Artificial Sequence
  Description of Artificial Sequence: Synthetic oligonucleotide
  Sense strand starting at position 3303 of SEQ ID NO: 1885831
agucaugauugauccagga

SEQ ID NO: 2370831 - RNA, 19 nt, Artificial Sequence
  Description of Artificial Sequence: Synthetic oligonucleotide
  Antisense strand to SEQ ID NO: 2370830
uccuggaucaaucaugacu

SEQ ID NO: 2370832 - RNA, 19 nt, Artificial Sequence
  Description of Artificial Sequence: Synthetic oligonucleotide
  Sense strand starting at position 3516 of SEQ ID NO: 1885831
auaagcaucccucagugua

SEQ ID NO: 2370833 - RNA, 19 nt, Artificial Sequence
  Description of Artificial Sequence: Synthetic oligonucleotide
  Antisense strand to SEQ ID NO: 2370832
uacacugagggaugcuuau

SEQ ID NO: 2370834 - RNA, 19 nt, Artificial Sequence
  Description of Artificial Sequence: Synthetic oligonucleotide
  Sense strand starting at position 3569 of SEQ ID NO: 1885831
uacucauggccuuauugga

SEQ ID NO: 2370835 - RNA, 19 nt, Artificial Sequence
  Description of Artificial Sequence: Synthetic oligonucleotide
  Antisense strand to SEQ ID NO: 2370834
uccaauaaggccaugagua

SEQ ID NO: 2370836 - RNA, 19 nt, Artificial Sequence
  Description of Artificial Sequence: Synthetic oligonucleotide
  Sense strand starting at position 3681 of SEQ ID NO: 1885831
cagcuucuagcacagagau

SEQ ID NO: 2370837 - RNA, 19 nt, Artificial Sequence
  Description of Artificial Sequence: Synthetic oligonucleotide
  Antisense strand to SEQ ID NO: 2370836
aucucugugcuagaagcug

SEQ ID NO: 2370838 - RNA, 19 nt, Artificial Sequence
  Description of Artificial Sequence: Synthetic oligonucleotide
  Sense strand starting at position 3739 of SEQ ID NO: 1885831
cuuccauucugaguacaga

SEQ ID NO: 2370839 - RNA, 19 nt, Artificial Sequence
  Description of Artificial Sequence: Synthetic oligonucleotide
  Antisense strand to SEQ ID NO: 2370838
ucuguacucagaauggaag

SEQ ID NO: 2370840 - RNA, 19 nt, Artificial Sequence
  Description of Artificial Sequence: Synthetic oligonucleotide
  Sense strand starting at position 3893 of SEQ ID NO: 1885831
augaauaacuggccagaug

SEQ ID NO: 2370841 - RNA, 19 nt, Artificial Sequence
  Description of Artificial Sequence: Synthetic oligonucleotide
  Antisense strand to SEQ ID NO: 2370840
caucuggccaguuauucau

SEQ ID NO: 2370842 - RNA, 19 nt, Artificial Sequence
  Description of Artificial Sequence: Synthetic oligonucleotide
  Sense strand starting at position 3894 of SEQ ID NO: 1885831
ugaauaacuggccagaugu

SEQ ID NO: 2370843 - RNA, 19 nt, Artificial Sequence
  Description of Artificial Sequence: Synthetic oligonucleotide
  Antisense strand to SEQ ID NO: 2370842
acaucuggccaguuauuca

SEQ ID NO: 2370844 - RNA, 19 nt, Artificial Sequence
  Description of Artificial Sequence: Synthetic oligonucleotide
  Sense strand starting at position 291 of SEQ ID NO: 1885832
gcacauugucauuaagcca

SEQ ID NO: 2370845 - RNA, 19 nt, Artificial Sequence
  Description of Artificial Sequence: Synthetic oligonucleotide
  Antisense strand to SEQ ID NO: 2370844
uggcuuaaugacaaugugc

SEQ ID NO: 2370846 - RNA, 19 nt, Artificial Sequence
  Description of Artificial Sequence: Synthetic oligonucleotide
  Sense strand starting at position 413 of SEQ ID NO: 1885832
gcaacauagccuugaucac

SEQ ID NO: 2370847 - RNA, 19 nt, Artificial Sequence
  Description of Artificial Sequence: Synthetic oligonucleotide
  Antisense strand to SEQ ID NO: 2370846
gugaucaaggcuauguugc

SEQ ID NO: 2370848 - RNA, 19 nt, Artificial Sequence
  Description of Artificial Sequence: Synthetic oligonucleotide
  Sense strand starting at position 618 of SEQ ID NO: 1885832
ucuauaugauccuuaguca

SEQ ID NO: 2370849 - RNA, 19 nt, Artificial Sequence
  Description of Artificial Sequence: Synthetic oligonucleotide
  Antisense strand to SEQ ID NO: 2370848
ugacuaaggaucauauaga

SEQ ID NO: 2370850 - RNA, 19 nt, Artificial Sequence
  Description of Artificial Sequence: Synthetic oligonucleotide
  Sense strand starting at position 621 of SEQ ID NO: 1885832
auaugauccuuagucaaag

SEQ ID NO: 2370851 - RNA, 19 nt, Artificial Sequence
  Description of Artificial Sequence: Synthetic oligonucleotide
  Antisense strand to SEQ ID NO: 2370850
cuuugacuaaggaucauau

SEQ ID NO: 2370852 - RNA, 19 nt, Artificial Sequence
  Description of Artificial Sequence: Synthetic oligonucleotide
  Sense strand starting at position 850 of SEQ ID NO: 1885832
gacaucugucuacaggagu

SEQ ID NO: 2370853 - RNA, 19 nt, Artificial Sequence
  Description of Artificial Sequence: Synthetic oligonucleotide
  Antisense strand to SEQ ID NO: 2370852
acuccuguagacagauguc

SEQ ID NO: 2370854 - RNA, 19 nt, Artificial Sequence
  Description of Artificial Sequence: Synthetic oligonucleotide
  Sense strand starting at position 890 of SEQ ID NO: 1885832
cuagauacugcuugugaug

SEQ ID NO: 2370855 - RNA, 19 nt, Artificial Sequence
  Description of Artificial Sequence: Synthetic oligonucleotide
  Antisense strand to SEQ ID NO: 2370854
caucacaagcaguaucuag

SEQ ID NO: 2370856 - RNA, 19 nt, Artificial Sequence
  Description of Artificial Sequence: Synthetic oligonucleotide
  Sense strand starting at position 1089 of SEQ ID NO: 1885832
ccuuaaguauuccuaguau

SEQ ID NO: 2370857 - RNA, 19 nt, Artificial Sequence
  Description of Artificial Sequence: Synthetic oligonucleotide
  Antisense strand to SEQ ID NO: 2370856
auacuaggaauacuuaagg

SEQ ID NO: 2370858 - RNA, 19 nt, Artificial Sequence
  Description of Artificial Sequence: Synthetic oligonucleotide
  Sense strand starting at position 1100 of SEQ ID NO: 1885832
ccuaguaucugucuacaua

SEQ ID NO: 2370859 - RNA, 19 nt, Artificial Sequence
  Description of Artificial Sequence: Synthetic oligonucleotide
  Antisense strand to SEQ ID NO: 2370858
uauguagacagauacuagg

SEQ ID NO: 2370860 - RNA, 19 nt, Artificial Sequence
  Description of Artificial Sequence: Synthetic oligonucleotide
  Sense strand starting at position 1101 of SEQ ID NO: 1885832
cuaguaucugucuacauaa

SEQ ID NO: 2370861 - RNA, 19 nt, Artificial Sequence
  Description of Artificial Sequence: Synthetic oligonucleotide
  Antisense strand to SEQ ID NO: 2370860
uuauguagacagauacuag

SEQ ID NO: 2370862 - RNA, 19 nt, Artificial Sequence
  Description of Artificial Sequence: Synthetic oligonucleotide
  Sense strand starting at position 1103 of SEQ ID NO: 1885832
aguaucugucuacauaauc

SEQ ID NO: 2370863 - RNA, 19 nt, Artificial Sequence
  Description of Artificial Sequence: Synthetic oligonucleotide
  Antisense strand to SEQ ID NO: 2370862
gauuauguagacagauacu

SEQ ID NO: 2370864 - RNA, 19 nt, Artificial Sequence
  Description of Artificial Sequence: Synthetic oligonucleotide
  Sense strand starting at position 1204 of SEQ ID NO: 1885832
augucaaguccauacguau

SEQ ID NO: 2370865 - RNA, 19 nt, Artificial Sequence
  Description of Artificial Sequence: Synthetic oligonucleotide
  Antisense strand to SEQ ID NO: 2370864
auacguauggacuugacau

SEQ ID NO: 2370866 - RNA, 19 nt, Artificial Sequence
  Description of Artificial Sequence: Synthetic oligonucleotide
  Sense strand starting at position 1215 of SEQ ID NO: 1885832
auacguauccuugggacau

SEQ ID NO: 2370867 - RNA, 19 nt, Artificial Sequence
  Description of Artificial Sequence: Synthetic oligonucleotide
  Antisense strand to SEQ ID NO: 2370866
augucccaaggauacguau

SEQ ID NO: 2370868 - RNA, 19 nt, Artificial Sequence
  Description of Artificial Sequence: Synthetic oligonucleotide
  Sense strand starting at position 1236 of SEQ ID NO: 1885832
cuggccuuccuugauuaua

SEQ ID NO: 2370869 - RNA, 19 nt, Artificial Sequence
  Description of Artificial Sequence: Synthetic oligonucleotide
  Antisense strand to SEQ ID NO: 2370868
uauaaucaaggaaggccag

SEQ ID NO: 2370870 - RNA, 19 nt, Artificial Sequence
  Description of Artificial Sequence: Synthetic oligonucleotide
  Sense strand starting at position 1238 of SEQ ID NO: 1885832
ggccuuccuugauuauauu

SEQ ID NO: 2370871 - RNA, 19 nt, Artificial Sequence
  Description of Artificial Sequence: Synthetic oligonucleotide
  Antisense strand to SEQ ID NO: 2370870
aauauaaucaaggaaggcc

SEQ ID NO: 2370872 - RNA, 19 nt, Artificial Sequence
  Description of Artificial Sequence: Synthetic oligonucleotide
  Sense strand starting at position 1560 of SEQ ID NO: 1885832
acagcacacuuguucugau

SEQ ID NO: 2370873 - RNA, 19 nt, Artificial Sequence
  Description of Artificial Sequence: Synthetic oligonucleotide
  Antisense strand to SEQ ID NO: 2370872
aucagaacaagugugcugu

SEQ ID NO: 2370874 - RNA, 19 nt, Artificial Sequence
  Description of Artificial Sequence: Synthetic oligonucleotide
  Sense strand starting at position 1603 of SEQ ID NO: 1885832
ugcuuaugucauccguagu

SEQ ID NO: 2370875 - RNA, 19 nt, Artificial Sequence
  Description of Artificial Sequence: Synthetic oligonucleotide
  Antisense strand to SEQ ID NO: 2370874
acuacggaugacauaagca

SEQ ID NO: 2370876 - RNA, 19 nt, Artificial Sequence
  Description of Artificial Sequence: Synthetic oligonucleotide
  Sense strand starting at position 1610 of SEQ ID NO: 1885832
gucauccguagucaaagau

SEQ ID NO: 2370877 - RNA, 19 nt, Artificial Sequence
  Description of Artificial Sequence: Synthetic oligonucleotide
  Antisense strand to SEQ ID NO: 2370876
aucuuugacuacggaugac

SEQ ID NO: 2370878 - RNA, 19 nt, Artificial Sequence
  Description of Artificial Sequence: Synthetic oligonucleotide
  Sense strand starting at position 1617 of SEQ ID NO: 1885832
guagucaaagauuacacuu

SEQ ID NO: 2370879 - RNA, 19 nt, Artificial Sequence
  Description of Artificial Sequence: Synthetic oligonucleotide
  Antisense strand to SEQ ID NO: 2370878
aaguguaaucuuugacuac

SEQ ID NO: 2370880 - RNA, 19 nt, Artificial Sequence
  Description of Artificial Sequence: Synthetic oligonucleotide
  Sense strand starting at position 1688 of SEQ ID NO: 1885832
ucuguugucucaccauuua

SEQ ID NO: 2370881 - RNA, 19 nt, Artificial Sequence
  Description of Artificial Sequence: Synthetic oligonucleotide
  Antisense strand to SEQ ID NO: 2370880
uaaauggugagacaacaga

SEQ ID NO: 2370882 - RNA, 19 nt, Artificial Sequence
  Description of Artificial Sequence: Synthetic oligonucleotide
  Sense strand starting at position 1746 of SEQ ID NO: 1885832
uuuacauguguacauugau

SEQ ID NO: 2370883 - RNA, 19 nt, Artificial Sequence
  Description of Artificial Sequence: Synthetic oligonucleotide
  Antisense strand to SEQ ID NO: 2370882
aucaauguacacauguaaa

SEQ ID NO: 2370884 - RNA, 19 nt, Artificial Sequence
  Description of Artificial Sequence: Synthetic oligonucleotide
  Sense strand starting at position 1749 of SEQ ID NO: 1885832
acauguguacauugauuau

SEQ ID NO: 2370885 - RNA, 19 nt, Artificial Sequence
  Description of Artificial Sequence: Synthetic oligonucleotide
  Antisense strand to SEQ ID NO: 2370884
auaaucaauguacacaugu

SEQ ID NO: 2370886 - RNA, 19 nt, Artificial Sequence
  Description of Artificial Sequence: Synthetic oligonucleotide
  Sense strand starting at position 1753 of SEQ ID NO: 1885832
guguacauugauuauuaca

SEQ ID NO: 2370887 - RNA, 19 nt, Artificial Sequence
  Description of Artificial Sequence: Synthetic oligonucleotide
  Antisense strand to SEQ ID NO: 2370886
uguaauaaucaauguacac

SEQ ID NO: 2370888 - RNA, 19 nt, Artificial Sequence
  Description of Artificial Sequence: Synthetic oligonucleotide
  Sense strand starting at position 1755 of SEQ ID NO: 1885832
guacauugauuauuacauc

SEQ ID NO: 2370889 - RNA, 19 nt, Artificial Sequence
  Description of Artificial Sequence: Synthetic oligonucleotide
  Antisense strand to SEQ ID NO: 2370888
gauguaauaaucaauguac

SEQ ID NO: 2370890 - RNA, 19 nt, Artificial Sequence
  Description of Artificial Sequence: Synthetic oligonucleotide
  Sense strand starting at position 1893 of SEQ ID NO: 1885832
ucuauugaaccucagaguu

SEQ ID NO: 2370891 - RNA, 19 nt, Artificial Sequence
  Description of Artificial Sequence: Synthetic oligonucleotide
  Antisense strand to SEQ ID NO: 2370890
aacucugagguucaauaga

SEQ ID NO: 2370892 - RNA, 19 nt, Artificial Sequence
  Description of Artificial Sequence: Synthetic oligonucleotide
  Sense strand starting at position 2373 of SEQ ID NO: 1885832
gcauccauucugcagaaua

SEQ ID NO: 2370893 - RNA, 19 nt, Artificial Sequence
  Description of Artificial Sequence: Synthetic oligonucleotide
  Antisense strand to SEQ ID NO: 2370892
uauucugcagaauggaugc

SEQ ID NO: 2370894 - RNA, 19 nt, Artificial Sequence
  Description of Artificial Sequence: Synthetic oligonucleotide
  Sense strand starting at position 2603 of SEQ ID NO: 1885832
gcugauacucaugauccau

SEQ ID NO: 2370895 - RNA, 19 nt, Artificial Sequence
  Description of Artificial Sequence: Synthetic oligonucleotide
  Antisense strand to SEQ ID NO: 2370894
auggaucaugaguaucagc

SEQ ID NO: 2370896 - RNA, 19 nt, Artificial Sequence
  Description of Artificial Sequence: Synthetic oligonucleotide
  Sense strand starting at position 2873 of SEQ ID NO: 1885832
agaauaugaucuuugcaca

SEQ ID NO: 2370897 - RNA, 19 nt, Artificial Sequence
  Description of Artificial Sequence: Synthetic oligonucleotide
  Antisense strand to SEQ ID NO: 2370896
ugugcaaagaucauauucu

SEQ ID NO: 2370898 - RNA, 19 nt, Artificial Sequence
  Description of Artificial Sequence: Synthetic oligonucleotide
  Sense strand starting at position 2918 of SEQ ID NO: 1885832
ucuguuggaccucagaguu

SEQ ID NO: 2370899 - RNA, 19 nt, Artificial Sequence
  Description of Artificial Sequence: Synthetic oligonucleotide
  Antisense strand to SEQ ID NO: 2370898
aacucugagguccaacaga

SEQ ID NO: 2370900 - RNA, 19 nt, Artificial Sequence
  Description of Artificial Sequence: Synthetic oligonucleotide
  Sense strand starting at position 2983 of SEQ ID NO: 1885832
ucaucauugguccauguuu

SEQ ID NO: 2370901 - RNA, 19 nt, Artificial Sequence
  Description of Artificial Sequence: Synthetic oligonucleotide
  Antisense strand to SEQ ID NO: 2370900
aaacauggaccaaugauga

SEQ ID NO: 2370902 - RNA, 19 nt, Artificial Sequence
  Description of Artificial Sequence: Synthetic oligonucleotide
  Sense strand starting at position 3165 of SEQ ID NO: 1885832
ugcucacaucuguauaagu

SEQ ID NO: 2370903 - RNA, 19 nt, Artificial Sequence
  Description of Artificial Sequence: Synthetic oligonucleotide
  Antisense strand to SEQ ID NO: 2370902
acuuauacagaugugagca

SEQ ID NO: 2370904 - RNA, 19 nt, Artificial Sequence
  Description of Artificial Sequence: Synthetic oligonucleotide
  Sense strand starting at position 3167 of SEQ ID NO: 1885832
cucacaucuguauaaguuc

SEQ ID NO: 2370905 - RNA, 19 nt, Artificial Sequence
  Description of Artificial Sequence: Synthetic oligonucleotide
  Antisense strand to SEQ ID NO: 2370904
gaacuuauacagaugugag

SEQ ID NO: 2370906 - RNA, 19 nt, Artificial Sequence
  Description of Artificial Sequence: Synthetic oligonucleotide
  Sense strand starting at position 3287 of SEQ ID NO: 1885832
uugugugcuggauauauac

SEQ ID NO: 2370907 - RNA, 19 nt, Artificial Sequence
  Description of Artificial Sequence: Synthetic oligonucleotide
  Antisense strand to SEQ ID NO: 2370906
guauauauccagcacacaa

SEQ ID NO: 2370908 - RNA, 19 nt, Artificial Sequence
  Description of Artificial Sequence: Synthetic oligonucleotide
  Sense strand starting at position 3293 of SEQ ID NO: 1885832
gcuggauauauacguauuu

SEQ ID NO: 2370909 - RNA, 19 nt, Artificial Sequence
  Description of Artificial Sequence: Synthetic oligonucleotide
  Antisense strand to SEQ ID NO: 2370908
aaauacguauauauccagc

SEQ ID NO: 2370910 - RNA, 19 nt, Artificial Sequence
  Description of Artificial Sequence: Synthetic oligonucleotide
  Sense strand starting at position 3346 of SEQ ID NO: 1885832
guuaaucuaccuggaaaga

SEQ ID NO: 2370911 - RNA, 19 nt, Artificial Sequence
  Description of Artificial Sequence: Synthetic oligonucleotide
  Antisense strand to SEQ ID NO: 2370910
ucuuuccagguagauuaac

SEQ ID NO: 2370912 - RNA, 19 nt, Artificial Sequence
  Description of Artificial Sequence: Synthetic oligonucleotide
  Sense strand starting at position 3394 of SEQ ID NO: 1885832
auccauuaggucugaagca

SEQ ID NO: 2370913 - RNA, 19 nt, Artificial Sequence
  Description of Artificial Sequence: Synthetic oligonucleotide
  Antisense strand to SEQ ID NO: 2370912
ugcuucagaccuaauggau

SEQ ID NO: 2370914 - RNA, 19 nt, Artificial Sequence
  Description of Artificial Sequence: Synthetic oligonucleotide
  Sense strand starting at position 3549 of SEQ ID NO: 1885832
ggcgcuggucucccuaauu

SEQ ID NO: 2370915 - RNA, 19 nt, Artificial Sequence
  Description of Artificial Sequence: Synthetic oligonucleotide
  Antisense strand to SEQ ID NO: 2370914
aauuagggagaccagcgcc

SEQ ID NO: 2370916 - RNA, 19 nt, Artificial Sequence
  Description of Artificial Sequence: Synthetic oligonucleotide
  Sense strand starting at position 3712 of SEQ ID NO: 1885832
ccucaaaggugauuaauca

SEQ ID NO: 2370917 - RNA, 19 nt, Artificial Sequence
  Description of Artificial Sequence: Synthetic oligonucleotide
  Antisense strand to SEQ ID NO: 2370916
ugauuaaucaccuuugagg

SEQ ID NO: 2370918 - RNA, 19 nt, Artificial Sequence
  Description of Artificial Sequence: Synthetic oligonucleotide
  Sense strand starting at position 3805 of SEQ ID NO: 1885832
ucaaauaaagaguguaugu

SEQ ID NO: 2370919 - RNA, 19 nt, Artificial Sequence
  Description of Artificial Sequence: Synthetic oligonucleotide
  Antisense strand to SEQ ID NO: 2370918
acauacacucuuuauuuga

SEQ ID NO: 2370920 - RNA, 19 nt, Artificial Sequence
  Description of Artificial Sequence: Synthetic oligonucleotide
  Sense strand starting at position 3812 of SEQ ID NO: 1885832
aagaguguauguccacaaa

SEQ ID NO: 2370921 - RNA, 19 nt, Artificial Sequence
  Description of Artificial Sequence: Synthetic oligonucleotide
  Antisense strand to SEQ ID NO: 2370920
uuuguggacauacacucuu

SEQ ID NO: 2370922 - RNA, 19 nt, Artificial Sequence
  Description of Artificial Sequence: Synthetic oligonucleotide
  Sense strand starting at position 3938 of SEQ ID NO: 1885832
agcagagcauuugauuaaa

SEQ ID NO: 2370923 - RNA, 19 nt, Artificial Sequence
  Description of Artificial Sequence: Synthetic oligonucleotide
  Antisense strand to SEQ ID NO: 2370922
uuuaaucaaaugcucugcu

SEQ ID NO: 2370924 - RNA, 19 nt, Artificial Sequence
  Description of Artificial Sequence: Synthetic oligonucleotide
  Sense strand starting at position 109 of SEQ ID NO: 1885833
ggcaauaaccuagauuccu

SEQ ID NO: 2370925 - RNA, 19 nt, Artificial Sequence
  Description of Artificial Sequence: Synthetic oligonucleotide
  Antisense strand to SEQ ID NO: 2370924
aggaaucuagguuauugcc

SEQ ID NO: 2370926 - RNA, 19 nt, Artificial Sequence
  Description of Artificial Sequence: Synthetic oligonucleotide
  Sense strand starting at position 130 of SEQ ID NO: 1885833
cuucuuggaccucagaguu

SEQ ID NO: 2370927 - RNA, 19 nt, Artificial Sequence
  Description of Artificial Sequence: Synthetic oligonucleotide
  Antisense strand to SEQ ID NO: 2370926
aacucugagguccaagaag

SEQ ID NO: 2370928 - RNA, 19 nt, Artificial Sequence
  Description of Artificial Sequence: Synthetic oligonucleotide
  Sense strand starting at position 320 of SEQ ID NO: 1885833
cuaacaucugccuauggaa

SEQ ID NO: 2370929 - RNA, 19 nt, Artificial Sequence
  Description of Artificial Sequence: Synthetic oligonucleotide
  Antisense strand to SEQ ID NO: 2370928
uuccauaggcagauguuag

SEQ ID NO: 2370930 - RNA, 19 nt, Artificial Sequence
  Description of Artificial Sequence: Synthetic oligonucleotide
  Sense strand starting at position 361 of SEQ ID NO: 1885833
ucuaacaucugccuguaga

SEQ ID NO: 2370931 - RNA, 19 nt, Artificial Sequence
  Description of Artificial Sequence: Synthetic oligonucleotide
  Antisense strand to SEQ ID NO: 2370930
ucuacaggcagauguuaga

SEQ ID NO: 2370932 - RNA, 19 nt, Artificial Sequence
  Description of Artificial Sequence: Synthetic oligonucleotide
  Sense strand starting at position 362 of SEQ ID NO: 1885833
cuaacaucugccuguagau

SEQ ID NO: 2370933 - RNA, 19 nt, Artificial Sequence
  Description of Artificial Sequence: Synthetic oligonucleotide
  Antisense strand to SEQ ID NO: 2370932
aucuacaggcagauguuag

SEQ ID NO: 2370934 - RNA, 19 nt, Artificial Sequence
  Description of Artificial Sequence: Synthetic oligonucleotide
  Sense strand starting at position 439 of SEQ ID NO: 1885833
ggcagucacugauuacauu

SEQ ID NO: 2370935 - RNA, 19 nt, Artificial Sequence
  Description of Artificial Sequence: Synthetic oligonucleotide
  Antisense strand to SEQ ID NO: 2370934
aauguaaucagugacugcc

SEQ ID NO: 2370936 - RNA, 19 nt, Artificial Sequence
  Description of Artificial Sequence: Synthetic oligonucleotide
  Sense strand starting at position 548 of SEQ ID NO: 1885833
ggcaaccacugaucucaua

SEQ ID NO: 2370937 - RNA, 19 nt, Artificial Sequence
  Description of Artificial Sequence: Synthetic oligonucleotide
  Antisense strand to SEQ ID NO: 2370936
uaugagaucagugguugcc

SEQ ID NO: 2370938 - RNA, 19 nt, Artificial Sequence
  Description of Artificial Sequence: Synthetic oligonucleotide
  Sense strand starting at position 634 of SEQ ID NO: 1885833
gagaccuaaucucuguuga

SEQ ID NO: 2370939 - RNA, 19 nt, Artificial Sequence
  Description of Artificial Sequence: Synthetic oligonucleotide
  Antisense strand to SEQ ID NO: 2370938
ucaacagagauuaggucuc

SEQ ID NO: 2370940 - RNA, 19 nt, Artificial Sequence
  Description of Artificial Sequence: Synthetic oligonucleotide
  Sense strand starting at position 635 of SEQ ID NO: 1885833
agaccuaaucucuguugau

SEQ ID NO: 2370941 - RNA, 19 nt, Artificial Sequence
  Description of Artificial Sequence: Synthetic oligonucleotide
  Antisense strand to SEQ ID NO: 2370940
aucaacagagauuaggucu

SEQ ID NO: 2370942 - RNA, 19 nt, Artificial Sequence
  Description of Artificial Sequence: Synthetic oligonucleotide
  Sense strand starting at position 823 of SEQ ID NO: 1885833
ccauuucuuugauaagagg

SEQ ID NO: 2370943 - RNA, 19 nt, Artificial Sequence
  Description of Artificial Sequence: Synthetic oligonucleotide
  Antisense strand to SEQ ID NO: 2370942
ccucuuaucaaagaaaugg

SEQ ID NO: 2370944 - RNA, 19 nt, Artificial Sequence
  Description of Artificial Sequence: Synthetic oligonucleotide
  Sense strand starting at position 896 of SEQ ID NO: 1885833
uggacacuguagcuuaaau

SEQ ID NO: 2370945 - RNA, 19 nt, Artificial Sequence
  Description of Artificial Sequence: Synthetic oligonucleotide
  Antisense strand to SEQ ID NO: 2370944
auuuaagcuacagugucca

SEQ ID NO: 2370946 - RNA, 19 nt, Artificial Sequence
  Description of Artificial Sequence: Synthetic oligonucleotide
  Sense strand starting at position 1317 of SEQ ID NO: 1885833
gcacauugucauuaagcca

SEQ ID NO: 2370947 - RNA, 19 nt, Artificial Sequence
  Description of Artificial Sequence: Synthetic oligonucleotide
  Antisense strand to SEQ ID NO: 2370946
uggcuuaaugacaaugugc

SEQ ID NO: 2370948 - RNA, 19 nt, Artificial Sequence
  Description of Artificial Sequence: Synthetic oligonucleotide
  Sense strand starting at position 1439 of SEQ ID NO: 1885833
gcaacauagccuugaucac

SEQ ID NO: 2370949 - RNA, 19 nt, Artificial Sequence
  Description of Artificial Sequence: Synthetic oligonucleotide
  Antisense strand to SEQ ID NO: 2370948
gugaucaaggcuauguugc

SEQ ID NO: 2370950 - RNA, 19 nt, Artificial Sequence
  Description of Artificial Sequence: Synthetic oligonucleotide
  Sense strand starting at position 1644 of SEQ ID NO: 1885833
ucuauaugauccuuaguca

SEQ ID NO: 2370951 - RNA, 19 nt, Artificial Sequence
  Description of Artificial Sequence: Synthetic oligonucleotide
  Antisense strand to SEQ ID NO: 2370950
ugacuaaggaucauauaga

SEQ ID NO: 2370952 - RNA, 19 nt, Artificial Sequence
  Description of Artificial Sequence: Synthetic oligonucleotide
  Sense strand starting at position 1647 of SEQ ID NO: 1885833
auaugauccuuagucaaag

SEQ ID NO: 2370953 - RNA, 19 nt, Artificial Sequence
  Description of Artificial Sequence: Synthetic oligonucleotide
  Antisense strand to SEQ ID NO: 2370952
cuuugacuaaggaucauau

SEQ ID NO: 2370954 - RNA, 19 nt, Artificial Sequence
  Description of Artificial Sequence: Synthetic oligonucleotide
  Sense strand starting at position 1667 of SEQ ID NO: 1885833
uguauuacacuugguccau

SEQ ID NO: 2370955 - RNA, 19 nt, Artificial Sequence
  Description of Artificial Sequence: Synthetic oligonucleotide
  Antisense strand to SEQ ID NO: 2370954
auggaccaaguguaauaca

SEQ ID NO: 2370956 - RNA, 19 nt, Artificial Sequence
  Description of Artificial Sequence: Synthetic oligonucleotide
  Sense strand starting at position 1876 of SEQ ID NO: 1885833
gacaucugucuacaggagu

SEQ ID NO: 2370957 - RNA, 19 nt, Artificial Sequence
  Description of Artificial Sequence: Synthetic oligonucleotide
  Antisense strand to SEQ ID NO: 2370956
acuccuguagacagauguc

SEQ ID NO: 2370958 - RNA, 19 nt, Artificial Sequence
  Description of Artificial Sequence: Synthetic oligonucleotide
  Sense strand starting at position 1916 of SEQ ID NO: 1885833
cuagauacugcuugugaug

SEQ ID NO: 2370959 - RNA, 19 nt, Artificial Sequence
  Description of Artificial Sequence: Synthetic oligonucleotide
  Antisense strand to SEQ ID NO: 2370958
caucacaagcaguaucuag

SEQ ID NO: 2370960 - RNA, 19 nt, Artificial Sequence
  Description of Artificial Sequence: Synthetic oligonucleotide
  Sense strand starting at position 2115 of SEQ ID NO: 1885833
ccuuaaguauuccuaguau

SEQ ID NO: 2370961 - RNA, 19 nt, Artificial Sequence
  Description of Artificial Sequence: Synthetic oligonucleotide
  Antisense strand to SEQ ID NO: 2370960
auacuaggaauacuuaagg

SEQ ID NO: 2370962 - RNA, 19 nt, Artificial Sequence
  Description of Artificial Sequence: Synthetic oligonucleotide
  Sense strand starting at position 2126 of SEQ ID NO: 1885833
ccuaguaucugucuacaua

SEQ ID NO: 2370963 - RNA, 19 nt, Artificial Sequence
  Description of Artificial Sequence: Synthetic oligonucleotide
  Antisense strand to SEQ ID NO: 2370962
uauguagacagauacuagg

SEQ ID NO: 2370964 - RNA, 19 nt, Artificial Sequence
  Description of Artificial Sequence: Synthetic oligonucleotide
  Sense strand starting at position 2127 of SEQ ID NO: 1885833
cuaguaucugucuacauaa

SEQ ID NO: 2370965 - RNA, 19 nt, Artificial Sequence
  Description of Artificial Sequence: Synthetic oligonucleotide
  Antisense strand to SEQ ID NO: 2370964
uuauguagacagauacuag

SEQ ID NO: 2370966 - RNA, 19 nt, Artificial Sequence
  Description of Artificial Sequence: Synthetic oligonucleotide
  Sense strand starting at position 2129 of SEQ ID NO: 1885833
aguaucugucuacauaauc

SEQ ID NO: 2370967 - RNA, 19 nt, Artificial Sequence
  Description of Artificial Sequence: Synthetic oligonucleotide
  Antisense strand to SEQ ID NO: 2370966
gauuauguagacagauacu

SEQ ID NO: 2370968 - RNA, 19 nt, Artificial Sequence
  Description of Artificial Sequence: Synthetic oligonucleotide
  Sense strand starting at position 2230 of SEQ ID NO: 1885833
augucaaguccauacguau

SEQ ID NO: 2370969 - RNA, 19 nt, Artificial Sequence
  Description of Artificial Sequence: Synthetic oligonucleotide
  Antisense strand to SEQ ID NO: 2370968
auacguauggacuugacau

SEQ ID NO: 2370970 - RNA, 19 nt, Artificial Sequence
  Description of Artificial Sequence: Synthetic oligonucleotide
  Sense strand starting at position 2241 of SEQ ID NO: 1885833
auacguauccuugggacau

SEQ ID NO: 2370971 - RNA, 19 nt, Artificial Sequence
  Description of Artificial Sequence: Synthetic oligonucleotide
  Antisense strand to SEQ ID NO: 2370970
augucccaaggauacguau

SEQ ID NO: 2370972 - RNA, 19 nt, Artificial Sequence
  Description of Artificial Sequence: Synthetic oligonucleotide
  Sense strand starting at position 2262 of SEQ ID NO: 1885833
cuggccuuccuugauuaua

SEQ ID NO: 2370973 - RNA, 19 nt, Artificial Sequence
  Description of Artificial Sequence: Synthetic oligonucleotide
  Antisense strand to SEQ ID NO: 2370972
uauaaucaaggaaggccag

SEQ ID NO: 2370974 - RNA, 19 nt, Artificial Sequence
  Description of Artificial Sequence: Synthetic oligonucleotide
  Sense strand starting at position 2264 of SEQ ID NO: 1885833
ggccuuccuugauuauauu

SEQ ID NO: 2370975 - RNA, 19 nt, Artificial Sequence
  Description of Artificial Sequence: Synthetic oligonucleotide
  Antisense strand to SEQ ID NO: 2370974
aauauaaucaaggaaggcc

SEQ ID NO: 2370976 - RNA, 19 nt, Artificial Sequence
  Description of Artificial Sequence: Synthetic oligonucleotide
  Sense strand starting at position 2586 of SEQ ID NO: 1885833
acagcacacuuguucugau

SEQ ID NO: 2370977 - RNA, 19 nt, Artificial Sequence
  Description of Artificial Sequence: Synthetic oligonucleotide
  Antisense strand to SEQ ID NO: 2370976
aucagaacaagugugcugu

SEQ ID NO: 2370978 - RNA, 19 nt, Artificial Sequence
  Description of Artificial Sequence: Synthetic oligonucleotide
  Sense strand starting at position 2629 of SEQ ID NO: 1885833
ugcuuaugucauccguagu

SEQ ID NO: 2370979 - RNA, 19 nt, Artificial Sequence
  Description of Artificial Sequence: Synthetic oligonucleotide
  Antisense strand to SEQ ID NO: 2370978
acuacggaugacauaagca

SEQ ID NO: 2370980 - RNA, 19 nt, Artificial Sequence
  Description of Artificial Sequence: Synthetic oligonucleotide
  Sense strand starting at position 2636 of SEQ ID NO: 1885833
gucauccguagucaaagau

SEQ ID NO: 2370981 - RNA, 19 nt, Artificial Sequence
  Description of Artificial Sequence: Synthetic oligonucleotide
  Antisense strand to SEQ ID NO: 2370980
aucuuugacuacggaugac

SEQ ID NO: 2370982 - RNA, 19 nt, Artificial Sequence
  Description of Artificial Sequence: Synthetic oligonucleotide
  Sense strand starting at position 2643 of SEQ ID NO: 1885833
guagucaaagauuacacuu

SEQ ID NO: 2370983 - RNA, 19 nt, Artificial Sequence
  Description of Artificial Sequence: Synthetic oligonucleotide
  Antisense strand to SEQ ID NO: 2370982
aaguguaaucuuugacuac

SEQ ID NO: 2370984 - RNA, 19 nt, Artificial Sequence
  Description of Artificial Sequence: Synthetic oligonucleotide
  Sense strand starting at position 2714 of SEQ ID NO: 1885833
ucuguugucucaccauuua

SEQ ID NO: 2370985 - RNA, 19 nt, Artificial Sequence
  Description of Artificial Sequence: Synthetic oligonucleotide
  Antisense strand to SEQ ID NO: 2370984
uaaauggugagacaacaga

SEQ ID NO: 2370986 - RNA, 19 nt, Artificial Sequence
  Description of Artificial Sequence: Synthetic oligonucleotide
  Sense strand starting at position 2772 of SEQ ID NO: 1885833
uuuacauguguacauugau

SEQ ID NO: 2370987 - RNA, 19 nt, Artificial Sequence
  Description of Artificial Sequence: Synthetic oligonucleotide
  Antisense strand to SEQ ID NO: 2370986
aucaauguacacauguaaa

SEQ ID NO: 2370988 - RNA, 19 nt, Artificial Sequence
  Description of Artificial Sequence: Synthetic oligonucleotide
  Sense strand starting at position 2775 of SEQ ID NO: 1885833
acauguguacauugauuau

SEQ ID NO: 2370989 - RNA, 19 nt, Artificial Sequence
  Description of Artificial Sequence: Synthetic oligonucleotide
  Antisense strand to SEQ ID NO: 2370988
auaaucaauguacacaugu

SEQ ID NO: 2370990 - RNA, 19 nt, Artificial Sequence
  Description of Artificial Sequence: Synthetic oligonucleotide
  Sense strand starting at position 2779 of SEQ ID NO: 1885833
guguacauugauuauuaca

SEQ ID NO: 2370991 - RNA, 19 nt, Artificial Sequence
  Description of Artificial Sequence: Synthetic oligonucleotide
  Antisense strand to SEQ ID NO: 2370990
uguaauaaucaauguacac

SEQ ID NO: 2370992 - RNA, 19 nt, Artificial Sequence
  Description of Artificial Sequence: Synthetic oligonucleotide
  Sense strand starting at position 2781 of SEQ ID NO: 1885833
guacauugauuauuacauc

SEQ ID NO: 2370993 - RNA, 19 nt, Artificial Sequence
  Description of Artificial Sequence: Synthetic oligonucleotide
  Antisense strand to SEQ ID NO: 2370992
gauguaauaaucaauguac

SEQ ID NO: 2370994 - RNA, 19 nt, Artificial Sequence
  Description of Artificial Sequence: Synthetic oligonucleotide
  Sense strand starting at position 2919 of SEQ ID NO: 1885833
ucuauugaaccucagaguu

SEQ ID NO: 2370995 - RNA, 19 nt, Artificial Sequence
  Description of Artificial Sequence: Synthetic oligonucleotide
  Antisense strand to SEQ ID NO: 2370994
aacucugagguucaauaga

SEQ ID NO: 2370996 - RNA, 19 nt, Artificial Sequence
  Description of Artificial Sequence: Synthetic oligonucleotide
  Sense strand starting at position 3399 of SEQ ID NO: 1885833
gcauccauucugcagaaua

SEQ ID NO: 2370997 - RNA, 19 nt, Artificial Sequence
  Description of Artificial Sequence: Synthetic oligonucleotide
  Antisense strand to SEQ ID NO: 2370996
uauucugcagaauggaugc

SEQ ID NO: 2370998 - RNA, 19 nt, Artificial Sequence
  Description of Artificial Sequence: Synthetic oligonucleotide
  Sense strand starting at position 3629 of SEQ ID NO: 1885833
gcugauacucaugauccau

SEQ ID NO: 2370999 - RNA, 19 nt, Artificial Sequence
  Description of Artificial Sequence: Synthetic oligonucleotide
  Antisense strand to SEQ ID NO: 2370998
auggaucaugaguaucagc

SEQ ID NO: 2371000 - RNA, 19 nt, Artificial Sequence
  Description of Artificial Sequence: Synthetic oligonucleotide
  Sense strand starting at position 3899 of SEQ ID NO: 1885833
agaauaugaucuuugcaca

SEQ ID NO: 2371001 - RNA, 19 nt, Artificial Sequence
  Description of Artificial Sequence: Synthetic oligonucleotide
  Antisense strand to SEQ ID NO: 2371000
ugugcaaagaucauauucu

SEQ ID NO: 2371002 - RNA, 19 nt, Artificial Sequence
  Description of Artificial Sequence: Synthetic oligonucleotide
  Sense strand starting at position 3944 of SEQ ID NO: 1885833
ucuguuggaccucagaguu

SEQ ID NO: 2371003 - RNA, 19 nt, Artificial Sequence
  Description of Artificial Sequence: Synthetic oligonucleotide
  Antisense strand to SEQ ID NO: 2371002
aacucugagguccaacaga

SEQ ID NO: 2371004 - RNA, 19 nt, Artificial Sequence
  Description of Artificial Sequence: Synthetic oligonucleotide
  Sense strand starting at position 14 of SEQ ID NO: 1885834
ucacaagcuuggucuauuu

SEQ ID NO: 2371005 - RNA, 19 nt, Artificial Sequence
  Description of Artificial Sequence: Synthetic oligonucleotide
  Antisense strand to SEQ ID NO: 2371004
aaauagaccaagcuuguga

SEQ ID NO: 2371006 - RNA, 19 nt, Artificial Sequence
  Description of Artificial Sequence: Synthetic oligonucleotide
  Sense strand starting at position 133 of SEQ ID NO: 1885834
cuuacaagauguuuaugca

SEQ ID NO: 2371007 - RNA, 19 nt, Artificial Sequence
  Description of Artificial Sequence: Synthetic oligonucleotide
  Antisense strand to SEQ ID NO: 2371006
ugcauaaacaucuuguaag

SEQ ID NO: 2371008 - RNA, 19 nt, Artificial Sequence
  Description of Artificial Sequence: Synthetic oligonucleotide
  Sense strand starting at position 134 of SEQ ID NO: 1885834
uuacaagauguuuaugcau

SEQ ID NO: 2371009 - RNA, 19 nt, Artificial Sequence
  Description of Artificial Sequence: Synthetic oligonucleotide
  Antisense strand to SEQ ID NO: 2371008
augcauaaacaucuuguaa

SEQ ID NO: 2371010 - RNA, 19 nt, Artificial Sequence
  Description of Artificial Sequence: Synthetic oligonucleotide
  Sense strand starting at position 204 of SEQ ID NO: 1885834
cuaagcaaguuucuugaau

SEQ ID NO: 2371011 - RNA, 19 nt, Artificial Sequence
  Description of Artificial Sequence: Synthetic oligonucleotide
  Antisense strand to SEQ ID NO: 2371010
auucaagaaacuugcuuag

SEQ ID NO: 2371012 - RNA, 19 nt, Artificial Sequence
  Description of Artificial Sequence: Synthetic oligonucleotide
  Sense strand starting at position 224 of SEQ ID NO: 1885834
gucuuaauaucugucaaug

SEQ ID NO: 2371013 - RNA, 19 nt, Artificial Sequence
  Description of Artificial Sequence: Synthetic oligonucleotide
  Antisense strand to SEQ ID NO: 2371012
cauugacagauauuaagac

SEQ ID NO: 2371014 - RNA, 19 nt, Artificial Sequence
  Description of Artificial Sequence: Synthetic oligonucleotide
  Sense strand starting at position 334 of SEQ ID NO: 1885834
auaaucauguuugucuaga

SEQ ID NO: 2371015 - RNA, 19 nt, Artificial Sequence
  Description of Artificial Sequence: Synthetic oligonucleotide
  Antisense strand to SEQ ID NO: 2371014
ucuagacaaacaugauuau

SEQ ID NO: 2371016 - RNA, 19 nt, Artificial Sequence
  Description of Artificial Sequence: Synthetic oligonucleotide
  Sense strand starting at position 421 of SEQ ID NO: 1885834
uaacaauaagccggaagaa

SEQ ID NO: 2371017 - RNA, 19 nt, Artificial Sequence
  Description of Artificial Sequence: Synthetic oligonucleotide
  Antisense strand to SEQ ID NO: 2371016
uucuuccggcuuauuguua

SEQ ID NO: 2371018 - RNA, 19 nt, Artificial Sequence
  Description of Artificial Sequence: Synthetic oligonucleotide
  Sense strand starting at position 431 of SEQ ID NO: 1885834
ccggaagaauauuccacuu

SEQ ID NO: 2371019 - RNA, 19 nt, Artificial Sequence
  Description of Artificial Sequence: Synthetic oligonucleotide
  Antisense strand to SEQ ID NO: 2371018
aaguggaauauucuuccgg

SEQ ID NO: 2371020 - RNA, 19 nt, Artificial Sequence
  Description of Artificial Sequence: Synthetic oligonucleotide
  Sense strand starting at position 511 of SEQ ID NO: 1885834
agacuaggcuaucuagcaa

SEQ ID NO: 2371021 - RNA, 19 nt, Artificial Sequence
  Description of Artificial Sequence: Synthetic oligonucleotide
  Antisense strand to SEQ ID NO: 2371020
uugcuagauagccuagucu

SEQ ID NO: 2371022 - RNA, 19 nt, Artificial Sequence
  Description of Artificial Sequence: Synthetic oligonucleotide
  Sense strand starting at position 518 of SEQ ID NO: 1885834
gcuaucuagcaauauagga

SEQ ID NO: 2371023 - RNA, 19 nt, Artificial Sequence
  Description of Artificial Sequence: Synthetic oligonucleotide
  Antisense strand to SEQ ID NO: 2371022
uccuauauugcuagauagc

SEQ ID NO: 2371024 - RNA, 19 nt, Artificial Sequence
  Description of Artificial Sequence: Synthetic oligonucleotide
  Sense strand starting at position 726 of SEQ ID NO: 1885834
uuagguauguggccauuua

SEQ ID NO: 2371025 - RNA, 19 nt, Artificial Sequence
  Description of Artificial Sequence: Synthetic oligonucleotide
  Antisense strand to SEQ ID NO: 2371024
uaaauggccacauaccuaa

SEQ ID NO: 2371026 - RNA, 19 nt, Artificial Sequence
  Description of Artificial Sequence: Synthetic oligonucleotide
  Sense strand starting at position 869 of SEQ ID NO: 1885834
ucgcuacaggaugaucaau

SEQ ID NO: 2371027 - RNA, 19 nt, Artificial Sequence
  Description of Artificial Sequence: Synthetic oligonucleotide
  Antisense strand to SEQ ID NO: 2371026
auugaucauccuguagcga

SEQ ID NO: 2371028 - RNA, 19 nt, Artificial Sequence
  Description of Artificial Sequence: Synthetic oligonucleotide
  Sense strand starting at position 913 of SEQ ID NO: 1885834
guacaaaguagauguuaca

SEQ ID NO: 2371029 - RNA, 19 nt, Artificial Sequence
  Description of Artificial Sequence: Synthetic oligonucleotide
  Antisense strand to SEQ ID NO: 2371028
uguaacaucuacuuuguac

SEQ ID NO: 2371030 - RNA, 19 nt, Artificial Sequence
  Description of Artificial Sequence: Synthetic oligonucleotide
  Sense strand starting at position 920 of SEQ ID NO: 1885834
guagauguuacagguaaga

SEQ ID NO: 2371031 - RNA, 19 nt, Artificial Sequence
  Description of Artificial Sequence: Synthetic oligonucleotide
  Antisense strand to SEQ ID NO: 2371030
ucuuaccuguaacaucuac

SEQ ID NO: 2371032 - RNA, 19 nt, Artificial Sequence
  Description of Artificial Sequence: Synthetic oligonucleotide
  Sense strand starting at position 1200 of SEQ ID NO: 1885834
uuagcuuugcuuuacagaa

SEQ ID NO: 2371033 - RNA, 19 nt, Artificial Sequence
  Description of Artificial Sequence: Synthetic oligonucleotide
  Antisense strand to SEQ ID NO: 2371032
uucuguaaagcaaagcuaa

SEQ ID NO: 2371034 - RNA, 19 nt, Artificial Sequence
  Description of Artificial Sequence: Synthetic oligonucleotide
  Sense strand starting at position 1262 of SEQ ID NO: 1885834
uggucaguucuugaucuuu

SEQ ID NO: 2371035 - RNA, 19 nt, Artificial Sequence
  Description of Artificial Sequence: Synthetic oligonucleotide
  Antisense strand to SEQ ID NO: 2371034
aaagaucaagaacugacca

SEQ ID NO: 2371036 - RNA, 19 nt, Artificial Sequence
  Description of Artificial Sequence: Synthetic oligonucleotide
  Sense strand starting at position 1473 of SEQ ID NO: 1885834
aggacauacuuaguccaua

SEQ ID NO: 2371037 - RNA, 19 nt, Artificial Sequence
  Description of Artificial Sequence: Synthetic oligonucleotide
  Antisense strand to SEQ ID NO: 2371036
uauggacuaaguauguccu

SEQ ID NO: 2371038 - RNA, 19 nt, Artificial Sequence
  Description of Artificial Sequence: Synthetic oligonucleotide
  Sense strand starting at position 1474 of SEQ ID NO: 1885834
ggacauacuuaguccauac

SEQ ID NO: 2371039 - RNA, 19 nt, Artificial Sequence
  Description of Artificial Sequence: Synthetic oligonucleotide
  Antisense strand to SEQ ID NO: 2371038
guauggacuaaguaugucc

SEQ ID NO: 2371040 - RNA, 19 nt, Artificial Sequence
  Description of Artificial Sequence: Synthetic oligonucleotide
  Sense strand starting at position 1529 of SEQ ID NO: 1885834
uugguuauuugugcacuaa

SEQ ID NO: 2371041 - RNA, 19 nt, Artificial Sequence
  Description of Artificial Sequence: Synthetic oligonucleotide
  Antisense strand to SEQ ID NO: 2371040
uuagugcacaaauaaccaa

SEQ ID NO: 2371042 - RNA, 19 nt, Artificial Sequence
  Description of Artificial Sequence: Synthetic oligonucleotide
  Sense strand starting at position 1559 of SEQ ID NO: 1885834
agauauaaucgauagcuac

SEQ ID NO: 2371043 - RNA, 19 nt, Artificial Sequence
  Description of Artificial Sequence: Synthetic oligonucleotide
  Antisense strand to SEQ ID NO: 2371042
guagcuaucgauuauaucu

SEQ ID NO: 2371044 - RNA, 19 nt, Artificial Sequence
  Description of Artificial Sequence: Synthetic oligonucleotide
  Sense strand starting at position 1565 of SEQ ID NO: 1885834
aaucgauagcuacgaaaca

SEQ ID NO: 2371045 - RNA, 19 nt, Artificial Sequence
  Description of Artificial Sequence: Synthetic oligonucleotide
  Antisense strand to SEQ ID NO: 2371044
uguuucguagcuaucgauu

SEQ ID NO: 2371046 - RNA, 19 nt, Artificial Sequence
  Description of Artificial Sequence: Synthetic oligonucleotide
  Sense strand starting at position 1620 of SEQ ID NO: 1885834
gcuauuauuuauguuaccu

SEQ ID NO: 2371047 - RNA, 19 nt, Artificial Sequence
  Description of Artificial Sequence: Synthetic oligonucleotide
  Antisense strand to SEQ ID NO: 2371046
agguaacauaaauaauagc

SEQ ID NO: 2371048 - RNA, 19 nt, Artificial Sequence
  Description of Artificial Sequence: Synthetic oligonucleotide
  Sense strand starting at position 1624 of SEQ ID NO: 1885834
uuauuuauguuaccugcau

SEQ ID NO: 2371049 - RNA, 19 nt, Artificial Sequence
  Description of Artificial Sequence: Synthetic oligonucleotide
  Antisense strand to SEQ ID NO: 2371048
augcagguaacauaaauaa

SEQ ID NO: 2371050 - RNA, 19 nt, Artificial Sequence
  Description of Artificial Sequence: Synthetic oligonucleotide
  Sense strand starting at position 1628 of SEQ ID NO: 1885834
uuauguuaccugcaugauu

SEQ ID NO: 2371051 - RNA, 19 nt, Artificial Sequence
  Description of Artificial Sequence: Synthetic oligonucleotide
  Antisense strand to SEQ ID NO: 2371050
aaucaugcagguaacauaa

SEQ ID NO: 2371052 - RNA, 19 nt, Artificial Sequence
  Description of Artificial Sequence: Synthetic oligonucleotide
  Sense strand starting at position 1656 of SEQ ID NO: 1885834
guguaacagccugaaccau

SEQ ID NO: 2371053 - RNA, 19 nt, Artificial Sequence
  Description of Artificial Sequence: Synthetic oligonucleotide
  Antisense strand to SEQ ID NO: 2371052
augguucaggcuguuacac

SEQ ID NO: 2371054 - RNA, 19 nt, Artificial Sequence
  Description of Artificial Sequence: Synthetic oligonucleotide
  Sense strand starting at position 1905 of SEQ ID NO: 1885834
ggcaauaaccuagauuccu

SEQ ID NO: 2371055 - RNA, 19 nt, Artificial Sequence
  Description of Artificial Sequence: Synthetic oligonucleotide
  Antisense strand to SEQ ID NO: 2371054
aggaaucuagguuauugcc

SEQ ID NO: 2371056 - RNA, 19 nt, Artificial Sequence
  Description of Artificial Sequence: Synthetic oligonucleotide
  Sense strand starting at position 1926 of SEQ ID NO: 1885834
cuucuuggaccucagaguu

SEQ ID NO: 2371057 - RNA, 19 nt, Artificial Sequence
  Description of Artificial Sequence: Synthetic oligonucleotide
  Antisense strand to SEQ ID NO: 2371056
aacucugagguccaagaag

SEQ ID NO: 2371058 - RNA, 19 nt, Artificial Sequence
  Description of Artificial Sequence: Synthetic oligonucleotide
  Sense strand starting at position 2116 of SEQ ID NO: 1885834
cuaacaucugccuauggaa

SEQ ID NO: 2371059 - RNA, 19 nt, Artificial Sequence
  Description of Artificial Sequence: Synthetic oligonucleotide
  Antisense strand to SEQ ID NO: 2371058
uuccauaggcagauguuag

SEQ ID NO: 2371060 - RNA, 19 nt, Artificial Sequence
  Description of Artificial Sequence: Synthetic oligonucleotide
  Sense strand starting at position 2235 of SEQ ID NO: 1885834
ggcagucacugauuacauu

SEQ ID NO: 2371061 - RNA, 19 nt, Artificial Sequence
  Description of Artificial Sequence: Synthetic oligonucleotide
  Antisense strand to SEQ ID NO: 2371060
aauguaaucagugacugcc

SEQ ID NO: 2371062 - RNA, 19 nt, Artificial Sequence
  Description of Artificial Sequence: Synthetic oligonucleotide
  Sense strand starting at position 2344 of SEQ ID NO: 1885834
ggcaaccacugaucucaua

SEQ ID NO: 2371063 - RNA, 19 nt, Artificial Sequence
  Description of Artificial Sequence: Synthetic oligonucleotide
  Antisense strand to SEQ ID NO: 2371062
uaugagaucagugguugcc

SEQ ID NO: 2371064 - RNA, 19 nt, Artificial Sequence
  Description of Artificial Sequence: Synthetic oligonucleotide
  Sense strand starting at position 2430 of SEQ ID NO: 1885834
gagaccuaaucucuguuga

SEQ ID NO: 2371065 - RNA, 19 nt, Artificial Sequence
  Description of Artificial Sequence: Synthetic oligonucleotide
  Antisense strand to SEQ ID NO: 2371064
ucaacagagauuaggucuc

SEQ ID NO: 2371066 - RNA, 19 nt, Artificial Sequence
  Description of Artificial Sequence: Synthetic oligonucleotide
  Sense strand starting at position 2431 of SEQ ID NO: 1885834
agaccuaaucucuguugau

SEQ ID NO: 2371067 - RNA, 19 nt, Artificial Sequence
  Description of Artificial Sequence: Synthetic oligonucleotide
  Antisense strand to SEQ ID NO: 2371066
aucaacagagauuaggucu

SEQ ID NO: 2371068 - RNA, 19 nt, Artificial Sequence
  Description of Artificial Sequence: Synthetic oligonucleotide
  Sense strand starting at position 2619 of SEQ ID NO: 1885834
ccauuucuuugauaagagg

SEQ ID NO: 2371069 - RNA, 19 nt, Artificial Sequence
  Description of Artificial Sequence: Synthetic oligonucleotide
  Antisense strand to SEQ ID NO: 2371068
ccucuuaucaaagaaaugg

SEQ ID NO: 2371070 - RNA, 19 nt, Artificial Sequence
  Description of Artificial Sequence: Synthetic oligonucleotide
  Sense strand starting at position 2692 of SEQ ID NO: 1885834
uggacacuguagcuuaaau

SEQ ID NO: 2371071 - RNA, 19 nt, Artificial Sequence
  Description of Artificial Sequence: Synthetic oligonucleotide
  Antisense strand to SEQ ID NO: 2371070
auuuaagcuacagugucca

SEQ ID NO: 2371072 - RNA, 19 nt, Artificial Sequence
  Description of Artificial Sequence: Synthetic oligonucleotide
  Sense strand starting at position 3113 of SEQ ID NO: 1885834
gcacauugucauuaagcca

SEQ ID NO: 2371073 - RNA, 19 nt, Artificial Sequence
  Description of Artificial Sequence: Synthetic oligonucleotide
  Antisense strand to SEQ ID NO: 2371072
uggcuuaaugacaaugugc

SEQ ID NO: 2371074 - RNA, 19 nt, Artificial Sequence
  Description of Artificial Sequence: Synthetic oligonucleotide
  Sense strand starting at position 3440 of SEQ ID NO: 1885834
ucuauaugauccuuaguca

SEQ ID NO: 2371075 - RNA, 19 nt, Artificial Sequence
  Description of Artificial Sequence: Synthetic oligonucleotide
  Antisense strand to SEQ ID NO: 2371074
ugacuaaggaucauauaga

SEQ ID NO: 2371076 - RNA, 19 nt, Artificial Sequence
  Description of Artificial Sequence: Synthetic oligonucleotide
  Sense strand starting at position 3443 of SEQ ID NO: 1885834
auaugauccuuagucaaag

SEQ ID NO: 2371077 - RNA, 19 nt, Artificial Sequence
  Description of Artificial Sequence: Synthetic oligonucleotide
  Antisense strand to SEQ ID NO: 2371076
cuuugacuaaggaucauau

SEQ ID NO: 2371078 - RNA, 19 nt, Artificial Sequence
  Description of Artificial Sequence: Synthetic oligonucleotide
  Sense strand starting at position 3672 of SEQ ID NO: 1885834
gacaucugucuacaggagu

SEQ ID NO: 2371079 - RNA, 19 nt, Artificial Sequence
  Description of Artificial Sequence: Synthetic oligonucleotide
  Antisense strand to SEQ ID NO: 2371078
acuccuguagacagauguc

SEQ ID NO: 2371080 - RNA, 19 nt, Artificial Sequence
  Description of Artificial Sequence: Synthetic oligonucleotide
  Sense strand starting at position 3923 of SEQ ID NO: 1885834
cuaguaucugucuacauaa

SEQ ID NO: 2371081 - RNA, 19 nt, Artificial Sequence
  Description of Artificial Sequence: Synthetic oligonucleotide
  Antisense strand to SEQ ID NO: 2371080
uuauguagacagauacuag

SEQ ID NO: 2371082 - RNA, 19 nt, Artificial Sequence
  Description of Artificial Sequence: Synthetic oligonucleotide
  Sense strand starting at position 3925 of SEQ ID NO: 1885834
aguaucugucuacauaauc

SEQ ID NO: 2371083 - RNA, 19 nt, Artificial Sequence
  Description of Artificial Sequence: Synthetic oligonucleotide
  Antisense strand to SEQ ID NO: 2371082
gauuauguagacagauacu

SEQ ID NO: 2371084 - RNA, 19 nt, Artificial Sequence
  Description of Artificial Sequence: Synthetic oligonucleotide
  Sense strand starting at position 178 of SEQ ID NO: 1885835
gagaaugggccauguaucu

SEQ ID NO: 2371085 - RNA, 19 nt, Artificial Sequence
  Description of Artificial Sequence: Synthetic oligonucleotide
  Antisense strand to SEQ ID NO: 2371084
agauacauggcccauucuc

SEQ ID NO: 2371086 - RNA, 19 nt, Artificial Sequence
  Description of Artificial Sequence: Synthetic oligonucleotide
  Sense strand starting at position 377 of SEQ ID NO: 1885835
ggagaaacuugauauuucu

SEQ ID NO: 2371087 - RNA, 19 nt, Artificial Sequence
  Description of Artificial Sequence: Synthetic oligonucleotide
  Antisense strand to SEQ ID NO: 2371086
agaaauaucaaguuucucc

SEQ ID NO: 2371088 - RNA, 19 nt, Artificial Sequence
  Description of Artificial Sequence: Synthetic oligonucleotide
  Sense strand starting at position 507 of SEQ ID NO: 1885835
auuggucuucuuugauuau

SEQ ID NO: 2371089 - RNA, 19 nt, Artificial Sequence
  Description of Artificial Sequence: Synthetic oligonucleotide
  Antisense strand to SEQ ID NO: 2371088
auaaucaaagaagaccaau

SEQ ID NO: 2371090 - RNA, 19 nt, Artificial Sequence
  Description of Artificial Sequence: Synthetic oligonucleotide
  Sense strand starting at position 510 of SEQ ID NO: 1885835
ggucuucuuugauuauaau

SEQ ID NO: 2371091 - RNA, 19 nt, Artificial Sequence
  Description of Artificial Sequence: Synthetic oligonucleotide
  Antisense strand to SEQ ID NO: 2371090
auuauaaucaaagaagacc

SEQ ID NO: 2371092 - RNA, 19 nt, Artificial Sequence
  Description of Artificial Sequence: Synthetic oligonucleotide
  Sense strand starting at position 590 of SEQ ID NO: 1885835
agaagcaaacuuugaugau

SEQ ID NO: 2371093 - RNA, 19 nt, Artificial Sequence
  Description of Artificial Sequence: Synthetic oligonucleotide
  Antisense strand to SEQ ID NO: 2371092
aucaucaaaguuugcuucu

SEQ ID NO: 2371094 - RNA, 19 nt, Artificial Sequence
  Description of Artificial Sequence: Synthetic oligonucleotide
  Sense strand starting at position 594 of SEQ ID NO: 1885835
gcaaacuuugaugauuacu

SEQ ID NO: 2371095 - RNA, 19 nt, Artificial Sequence
  Description of Artificial Sequence: Synthetic oligonucleotide
  Antisense strand to SEQ ID NO: 2371094
aguaaucaucaaaguuugc

SEQ ID NO: 2371096 - RNA, 19 nt, Artificial Sequence
  Description of Artificial Sequence: Synthetic oligonucleotide
  Sense strand starting at position 674 of SEQ ID NO: 1885835
gugcuuaaaucaguuuaag

SEQ ID NO: 2371097 - RNA, 19 nt, Artificial Sequence
  Description of Artificial Sequence: Synthetic oligonucleotide
  Antisense strand to SEQ ID NO: 2371096
cuuaaacugauuuaagcac

SEQ ID NO: 2371098 - RNA, 19 nt, Artificial Sequence
  Description of Artificial Sequence: Synthetic oligonucleotide
  Sense strand starting at position 683 of SEQ ID NO: 1885835
ucaguuuaagagcauccau

SEQ ID NO: 2371099 - RNA, 19 nt, Artificial Sequence
  Description of Artificial Sequence: Synthetic oligonucleotide
  Antisense strand to SEQ ID NO: 2371098
auggaugcucuuaaacuga

SEQ ID NO: 2371100 - RNA, 19 nt, Artificial Sequence
  Description of Artificial Sequence: Synthetic oligonucleotide
  Sense strand starting at position 738 of SEQ ID NO: 1885835
ugaagaccuuaucuguauu

SEQ ID NO: 2371101 - RNA, 19 nt, Artificial Sequence
  Description of Artificial Sequence: Synthetic oligonucleotide
  Antisense strand to SEQ ID NO: 2371100
aauacagauaaggucuuca

SEQ ID NO: 2371102 - RNA, 19 nt, Artificial Sequence
  Description of Artificial Sequence: Synthetic oligonucleotide
  Sense strand starting at position 958 of SEQ ID NO: 1885835
ugcauuuggcccuguuuga

SEQ ID NO: 2371103 - RNA, 19 nt, Artificial Sequence
  Description of Artificial Sequence: Synthetic oligonucleotide
  Antisense strand to SEQ ID NO: 2371102
ucaaacagggccaaaugca

SEQ ID NO: 2371104 - RNA, 19 nt, Artificial Sequence
  Description of Artificial Sequence: Synthetic oligonucleotide
  Sense strand starting at position 1177 of SEQ ID NO: 1885835
ucacguaaauguuuacuaa

SEQ ID NO: 2371105 - RNA, 19 nt, Artificial Sequence
  Description of Artificial Sequence: Synthetic oligonucleotide
  Antisense strand to SEQ ID NO: 2371104
uuaguaaacauuuacguga

SEQ ID NO: 2371106 - RNA, 19 nt, Artificial Sequence
  Description of Artificial Sequence: Synthetic oligonucleotide
  Sense strand starting at position 1180 of SEQ ID NO: 1885835
cguaaauguuuacuaauug

SEQ ID NO: 2371107 - RNA, 19 nt, Artificial Sequence
  Description of Artificial Sequence: Synthetic oligonucleotide
  Antisense strand to SEQ ID NO: 2371106
caauuaguaaacauuuacg

SEQ ID NO: 2371108 - RNA, 19 nt, Artificial Sequence
  Description of Artificial Sequence: Synthetic oligonucleotide
  Sense strand starting at position 1201 of SEQ ID NO: 1885835
guuauuauuugucucuucu

SEQ ID NO: 2371109 - RNA, 19 nt, Artificial Sequence
  Description of Artificial Sequence: Synthetic oligonucleotide
  Antisense strand to SEQ ID NO: 2371108
agaagagacaaauaauaac

SEQ ID NO: 2371110 - RNA, 19 nt, Artificial Sequence
  Description of Artificial Sequence: Synthetic oligonucleotide
  Sense strand starting at position 1243 of SEQ ID NO: 1885835
gccauugaugcagaacaau

SEQ ID NO: 2371111 - RNA, 19 nt, Artificial Sequence
  Description of Artificial Sequence: Synthetic oligonucleotide
  Antisense strand to SEQ ID NO: 2371110
auuguucugcaucaauggc

SEQ ID NO: 2371112 - RNA, 19 nt, Artificial Sequence
  Description of Artificial Sequence: Synthetic oligonucleotide
  Sense strand starting at position 1423 of SEQ ID NO: 1885835
aguagcaugugaccuugau

SEQ ID NO: 2371113 - RNA, 19 nt, Artificial Sequence
  Description of Artificial Sequence: Synthetic oligonucleotide
  Antisense strand to SEQ ID NO: 2371112
aucaaggucacaugcuacu

SEQ ID NO: 2371114 - RNA, 19 nt, Artificial Sequence
  Description of Artificial Sequence: Synthetic oligonucleotide
  Sense strand starting at position 1651 of SEQ ID NO: 1885835
aggugacacccuugaucca

SEQ ID NO: 2371115 - RNA, 19 nt, Artificial Sequence
  Description of Artificial Sequence: Synthetic oligonucleotide
  Antisense strand to SEQ ID NO: 2371114
uggaucaagggugucaccu

SEQ ID NO: 2371116 - RNA, 19 nt, Artificial Sequence
  Description of Artificial Sequence: Synthetic oligonucleotide
  Sense strand starting at position 1794 of SEQ ID NO: 1885835
auugauugcuuuguaacaa

SEQ ID NO: 2371117 - RNA, 19 nt, Artificial Sequence
  Description of Artificial Sequence: Synthetic oligonucleotide
  Antisense strand to SEQ ID NO: 2371116
uuguuacaaagcaaucaau

SEQ ID NO: 2371118 - RNA, 19 nt, Artificial Sequence
  Description of Artificial Sequence: Synthetic oligonucleotide
  Sense strand starting at position 1850 of SEQ ID NO: 1885835
aucaccuuuguguauaacu

SEQ ID NO: 2371119 - RNA, 19 nt, Artificial Sequence
  Description of Artificial Sequence: Synthetic oligonucleotide
  Antisense strand to SEQ ID NO: 2371118
aguuauacacaaaggugau

SEQ ID NO: 2371120 - RNA, 19 nt, Artificial Sequence
  Description of Artificial Sequence: Synthetic oligonucleotide
  Sense strand starting at position 1855 of SEQ ID NO: 1885835
cuuuguguauaacuaauca

SEQ ID NO: 2371121 - RNA, 19 nt, Artificial Sequence
  Description of Artificial Sequence: Synthetic oligonucleotide
  Antisense strand to SEQ ID NO: 2371120
ugauuaguuauacacaaag

SEQ ID NO: 2371122 - RNA, 19 nt, Artificial Sequence
  Description of Artificial Sequence: Synthetic oligonucleotide
  Sense strand starting at position 1859 of SEQ ID NO: 1885835
guguauaacuaaucauccu

SEQ ID NO: 2371123 - RNA, 19 nt, Artificial Sequence
  Description of Artificial Sequence: Synthetic oligonucleotide
  Antisense strand to SEQ ID NO: 2371122
aggaugauuaguuauacac

SEQ ID NO: 2371124 - RNA, 19 nt, Artificial Sequence
  Description of Artificial Sequence: Synthetic oligonucleotide
  Sense strand starting at position 1904 of SEQ ID NO: 1885835
agacuagaucucugucuag

SEQ ID NO: 2371125 - RNA, 19 nt, Artificial Sequence
  Description of Artificial Sequence: Synthetic oligonucleotide
  Antisense strand to SEQ ID NO: 2371124
cuagacagagaucuagucu

SEQ ID NO: 2371126 - RNA, 19 nt, Artificial Sequence
  Description of Artificial Sequence: Synthetic oligonucleotide
  Sense strand starting at position 1907 of SEQ ID NO: 1885835
cuagaucucugucuaggua

SEQ ID NO: 2371127 - RNA, 19 nt, Artificial Sequence
  Description of Artificial Sequence: Synthetic oligonucleotide
  Antisense strand to SEQ ID NO: 2371126
uaccuagacagagaucuag

SEQ ID NO: 2371128 - RNA, 19 nt, Artificial Sequence
  Description of Artificial Sequence: Synthetic oligonucleotide
  Sense strand starting at position 1910 of SEQ ID NO: 1885835
gaucucugucuagguacua

SEQ ID NO: 2371129 - RNA, 19 nt, Artificial Sequence
  Description of Artificial Sequence: Synthetic oligonucleotide
  Antisense strand to SEQ ID NO: 2371128
uaguaccuagacagagauc

SEQ ID NO: 2371130 - RNA, 19 nt, Artificial Sequence
  Description of Artificial Sequence: Synthetic oligonucleotide
  Sense strand starting at position 1911 of SEQ ID NO: 1885835
aucucugucuagguacuaa

SEQ ID NO: 2371131 - RNA, 19 nt, Artificial Sequence
  Description of Artificial Sequence: Synthetic oligonucleotide
  Antisense strand to SEQ ID NO: 2371130
uuaguaccuagacagagau

SEQ ID NO: 2371132 - RNA, 19 nt, Artificial Sequence
  Description of Artificial Sequence: Synthetic oligonucleotide
  Sense strand starting at position 2106 of SEQ ID NO: 1885835
agaacaguauucuuaagua

SEQ ID NO: 2371133 - RNA, 19 nt, Artificial Sequence
  Description of Artificial Sequence: Synthetic oligonucleotide
  Antisense strand to SEQ ID NO: 2371132
uacuuaagaauacuguucu

SEQ ID NO: 2371134 - RNA, 19 nt, Artificial Sequence
  Description of Artificial Sequence: Synthetic oligonucleotide
  Sense strand starting at position 2184 of SEQ ID NO: 1885835
uguuguauauauccacuaa

SEQ ID NO: 2371135 - RNA, 19 nt, Artificial Sequence
  Description of Artificial Sequence: Synthetic oligonucleotide
  Antisense strand to SEQ ID NO: 2371134
uuaguggauauauacaaca

SEQ ID NO: 2371136 - RNA, 19 nt, Artificial Sequence
  Description of Artificial Sequence: Synthetic oligonucleotide
  Sense strand starting at position 2323 of SEQ ID NO: 1885835
acucuuacauugguuucua

SEQ ID NO: 2371137 - RNA, 19 nt, Artificial Sequence
  Description of Artificial Sequence: Synthetic oligonucleotide
  Antisense strand to SEQ ID NO: 2371136
uagaaaccaauguaagagu

SEQ ID NO: 2371138 - RNA, 19 nt, Artificial Sequence
  Description of Artificial Sequence: Synthetic oligonucleotide
  Sense strand starting at position 2324 of SEQ ID NO: 1885835
cucuuacauugguuucuau

SEQ ID NO: 2371139 - RNA, 19 nt, Artificial Sequence
  Description of Artificial Sequence: Synthetic oligonucleotide
  Antisense strand to SEQ ID NO: 2371138
auagaaaccaauguaagag

SEQ ID NO: 2371140 - RNA, 19 nt, Artificial Sequence
  Description of Artificial Sequence: Synthetic oligonucleotide
  Sense strand starting at position 2367 of SEQ ID NO: 1885835
gccacaguagaaugcuuaa

SEQ ID NO: 2371141 - RNA, 19 nt, Artificial Sequence
  Description of Artificial Sequence: Synthetic oligonucleotide
  Antisense strand to SEQ ID NO: 2371140
uuaagcauucuacuguggc

SEQ ID NO: 2371142 - RNA, 19 nt, Artificial Sequence
  Description of Artificial Sequence: Synthetic oligonucleotide
  Sense strand starting at position 2378 of SEQ ID NO: 1885835
augcuuaaaucaccuagga

SEQ ID NO: 2371143 - RNA, 19 nt, Artificial Sequence
  Description of Artificial Sequence: Synthetic oligonucleotide
  Antisense strand to SEQ ID NO: 2371142
uccuaggugauuuaagcau

SEQ ID NO: 2371144 - RNA, 19 nt, Artificial Sequence
  Description of Artificial Sequence: Synthetic oligonucleotide
  Sense strand starting at position 2476 of SEQ ID NO: 1885835
uuccuuugcucagucauuu

SEQ ID NO: 2371145 - RNA, 19 nt, Artificial Sequence
  Description of Artificial Sequence: Synthetic oligonucleotide
  Antisense strand to SEQ ID NO: 2371144
aaaugacugagcaaaggaa

SEQ ID NO: 2371146 - RNA, 19 nt, Artificial Sequence
  Description of Artificial Sequence: Synthetic oligonucleotide
  Sense strand starting at position 2484 of SEQ ID NO: 1885835
cucagucauuuagguauuu

SEQ ID NO: 2371147 - RNA, 19 nt, Artificial Sequence
  Description of Artificial Sequence: Synthetic oligonucleotide
  Antisense strand to SEQ ID NO: 2371146
aaauaccuaaaugacugag

SEQ ID NO: 2371148 - RNA, 19 nt, Artificial Sequence
  Description of Artificial Sequence: Synthetic oligonucleotide
  Sense strand starting at position 2840 of SEQ ID NO: 1885835
cugagaaccugauuccuga

SEQ ID NO: 2371149 - RNA, 19 nt, Artificial Sequence
  Description of Artificial Sequence: Synthetic oligonucleotide
  Antisense strand to SEQ ID NO: 2371148
ucaggaaucagguucucag

SEQ ID NO: 2371150 - RNA, 19 nt, Artificial Sequence
  Description of Artificial Sequence: Synthetic oligonucleotide
  Sense strand starting at position 2866 of SEQ ID NO: 1885835
ugaaaucuaucuguaggca

SEQ ID NO: 2371151 - RNA, 19 nt, Artificial Sequence
  Description of Artificial Sequence: Synthetic oligonucleotide
  Antisense strand to SEQ ID NO: 2371150
ugccuacagauagauuuca

SEQ ID NO: 2371152 - RNA, 19 nt, Artificial Sequence
  Description of Artificial Sequence: Synthetic oligonucleotide
  Sense strand starting at position 2867 of SEQ ID NO: 1885835
gaaaucuaucuguaggcau

SEQ ID NO: 2371153 - RNA, 19 nt, Artificial Sequence
  Description of Artificial Sequence: Synthetic oligonucleotide
  Antisense strand to SEQ ID NO: 2371152
augccuacagauagauuuc

SEQ ID NO: 2371154 - RNA, 19 nt, Artificial Sequence
  Description of Artificial Sequence: Synthetic oligonucleotide
  Sense strand starting at position 3168 of SEQ ID NO: 1885835
agcaauuugugauagggac

SEQ ID NO: 2371155 - RNA, 19 nt, Artificial Sequence
  Description of Artificial Sequence: Synthetic oligonucleotide
  Antisense strand to SEQ ID NO: 2371154
gucccuaucacaaauugcu

SEQ ID NO: 2371156 - RNA, 19 nt, Artificial Sequence
  Description of Artificial Sequence: Synthetic oligonucleotide
  Sense strand starting at position 3176 of SEQ ID NO: 1885835
gugauagggacuugaucuu

SEQ ID NO: 2371157 - RNA, 19 nt, Artificial Sequence
  Description of Artificial Sequence: Synthetic oligonucleotide
  Antisense strand to SEQ ID NO: 2371156
aagaucaagucccuaucac

SEQ ID NO: 2371158 - RNA, 19 nt, Artificial Sequence
  Description of Artificial Sequence: Synthetic oligonucleotide
  Sense strand starting at position 3265 of SEQ ID NO: 1885835
gcuuguccuuguuugauuu

SEQ ID NO: 2371159 - RNA, 19 nt, Artificial Sequence
  Description of Artificial Sequence: Synthetic oligonucleotide
  Antisense strand to SEQ ID NO: 2371158
aaaucaaacaaggacaagc

SEQ ID NO: 2371160 - RNA, 19 nt, Artificial Sequence
  Description of Artificial Sequence: Synthetic oligonucleotide
  Sense strand starting at position 3352 of SEQ ID NO: 1885835
ggacaaagacugugccaau

SEQ ID NO: 2371161 - RNA, 19 nt, Artificial Sequence
  Description of Artificial Sequence: Synthetic oligonucleotide
  Antisense strand to SEQ ID NO: 2371160
auuggcacagucuuugucc

SEQ ID NO: 2371162 - RNA, 19 nt, Artificial Sequence
  Description of Artificial Sequence: Synthetic oligonucleotide
  Sense strand starting at position 3353 of SEQ ID NO: 1885835
gacaaagacugugccaauu

SEQ ID NO: 2371163 - RNA, 19 nt, Artificial Sequence
  Description of Artificial Sequence: Synthetic oligonucleotide
  Antisense strand to SEQ ID NO: 2371162
aauuggcacagucuuuguc

SEQ ID NO: 2371164 - RNA, 19 nt, Artificial Sequence
  Description of Artificial Sequence: Synthetic oligonucleotide
  Sense strand starting at position 25 of SEQ ID NO: 1885836
agguaaggacuuugacuau

SEQ ID NO: 2371165 - RNA, 19 nt, Artificial Sequence
  Description of Artificial Sequence: Synthetic oligonucleotide
  Antisense strand to SEQ ID NO: 2371164
auagucaaaguccuuaccu

SEQ ID NO: 2371166 - RNA, 19 nt, Artificial Sequence
  Description of Artificial Sequence: Synthetic oligonucleotide
  Sense strand starting at position 133 of SEQ ID NO: 1885836
ccauucugaugaguacaga

SEQ ID NO: 2371167 - RNA, 19 nt, Artificial Sequence
  Description of Artificial Sequence: Synthetic oligonucleotide
  Antisense strand to SEQ ID NO: 2371166
ucuguacucaucagaaugg

SEQ ID NO: 2371168 - RNA, 19 nt, Artificial Sequence
  Description of Artificial Sequence: Synthetic oligonucleotide
  Sense strand starting at position 226 of SEQ ID NO: 1885836
gcaaucguuauuuggacuu

SEQ ID NO: 2371169 - RNA, 19 nt, Artificial Sequence
  Description of Artificial Sequence: Synthetic oligonucleotide
  Antisense strand to SEQ ID NO: 2371168
aaguccaaauaacgauugc

SEQ ID NO: 2371170 - RNA, 19 nt, Artificial Sequence
  Description of Artificial Sequence: Synthetic oligonucleotide
  Sense strand starting at position 480 of SEQ ID NO: 1885836
uuuaauaauugggcaauga

SEQ ID NO: 2371171 - RNA, 19 nt, Artificial Sequence
  Description of Artificial Sequence: Synthetic oligonucleotide
  Antisense strand to SEQ ID NO: 2371170
ucauugcccaauuauuaaa

SEQ ID NO: 2371172 - RNA, 19 nt, Artificial Sequence
  Description of Artificial Sequence: Synthetic oligonucleotide
  Sense strand starting at position 484 of SEQ ID NO: 1885836
auaauugggcaaugauuaa

SEQ ID NO: 2371173 - RNA, 19 nt, Artificial Sequence
  Description of Artificial Sequence: Synthetic oligonucleotide
  Antisense strand to SEQ ID NO: 2371172
uuaaucauugcccaauuau

SEQ ID NO: 2371174 - RNA, 19 nt, Artificial Sequence
  Description of Artificial Sequence: Synthetic oligonucleotide
  Sense strand starting at position 539 of SEQ ID NO: 1885836
auauauagguucucacauu

SEQ ID NO: 2371175 - RNA, 19 nt, Artificial Sequence
  Description of Artificial Sequence: Synthetic oligonucleotide
  Antisense strand to SEQ ID NO: 2371174
aaugugagaaccuauauau

SEQ ID NO: 2371176 - RNA, 19 nt, Artificial Sequence
  Description of Artificial Sequence: Synthetic oligonucleotide
  Sense strand starting at position 545 of SEQ ID NO: 1885836
agguucucacauugagcaa

SEQ ID NO: 2371177 - RNA, 19 nt, Artificial Sequence
  Description of Artificial Sequence: Synthetic oligonucleotide
  Antisense strand to SEQ ID NO: 2371176
uugcucaaugugagaaccu

SEQ ID NO: 2371178 - RNA, 19 nt, Artificial Sequence
  Description of Artificial Sequence: Synthetic oligonucleotide
  Sense strand starting at position 814 of SEQ ID NO: 1885836
acuaauaagucucuauggu

SEQ ID NO: 2371179 - RNA, 19 nt, Artificial Sequence
  Description of Artificial Sequence: Synthetic oligonucleotide
  Antisense strand to SEQ ID NO: 2371178
accauagagacuuauuagu

SEQ ID NO: 2371180 - RNA, 19 nt, Artificial Sequence
  Description of Artificial Sequence: Synthetic oligonucleotide
  Sense strand starting at position 815 of SEQ ID NO: 1885836
cuaauaagucucuaugguu

SEQ ID NO: 2371181 - RNA, 19 nt, Artificial Sequence
  Description of Artificial Sequence: Synthetic oligonucleotide
  Antisense strand to SEQ ID NO: 2371180
aaccauagagacuuauuag

SEQ ID NO: 2371182 - RNA, 19 nt, Artificial Sequence
  Description of Artificial Sequence: Synthetic oligonucleotide
  Sense strand starting at position 856 of SEQ ID NO: 1885836
cuggauguuccauaucugu

SEQ ID NO: 2371183 - RNA, 19 nt, Artificial Sequence
  Description of Artificial Sequence: Synthetic oligonucleotide
  Antisense strand to SEQ ID NO: 2371182
acagauauggaacauccag

SEQ ID NO: 2371184 - RNA, 19 nt, Artificial Sequence
  Description of Artificial Sequence: Synthetic oligonucleotide
  Sense strand starting at position 862 of SEQ ID NO: 1885836
guuccauaucuguaucuag

SEQ ID NO: 2371185 - RNA, 19 nt, Artificial Sequence
  Description of Artificial Sequence: Synthetic oligonucleotide
  Antisense strand to SEQ ID NO: 2371184
cuagauacagauauggaac

SEQ ID NO: 2371186 - RNA, 19 nt, Artificial Sequence
  Description of Artificial Sequence: Synthetic oligonucleotide
  Sense strand starting at position 929 of SEQ ID NO: 1885836
ucaucuaugcauuaucagu

SEQ ID NO: 2371187 - RNA, 19 nt, Artificial Sequence
  Description of Artificial Sequence: Synthetic oligonucleotide
  Antisense strand to SEQ ID NO: 2371186
acugauaaugcauagauga

SEQ ID NO: 2371188 - RNA, 19 nt, Artificial Sequence
  Description of Artificial Sequence: Synthetic oligonucleotide
  Sense strand starting at position 931 of SEQ ID NO: 1885836
aucuaugcauuaucaguau

SEQ ID NO: 2371189 - RNA, 19 nt, Artificial Sequence
  Description of Artificial Sequence: Synthetic oligonucleotide
  Antisense strand to SEQ ID NO: 2371188
auacugauaaugcauagau

SEQ ID NO: 2371190 - RNA, 19 nt, Artificial Sequence
  Description of Artificial Sequence: Synthetic oligonucleotide
  Sense strand starting at position 967 of SEQ ID NO: 1885836
ucauaucuaucauugggau

SEQ ID NO: 2371191 - RNA, 19 nt, Artificial Sequence
  Description of Artificial Sequence: Synthetic oligonucleotide
  Antisense strand to SEQ ID NO: 2371190
aucccaaugauagauauga

SEQ ID NO: 2371192 - RNA, 19 nt, Artificial Sequence
  Description of Artificial Sequence: Synthetic oligonucleotide
  Sense strand starting at position 1668 of SEQ ID NO: 1885836
augucaucauuguccaaag

SEQ ID NO: 2371193 - RNA, 19 nt, Artificial Sequence
  Description of Artificial Sequence: Synthetic oligonucleotide
  Antisense strand to SEQ ID NO: 2371192
cuuuggacaaugaugacau

SEQ ID NO: 2371194 - RNA, 19 nt, Artificial Sequence
  Description of Artificial Sequence: Synthetic oligonucleotide
  Sense strand starting at position 1669 of SEQ ID NO: 1885836
ugucaucauuguccaaaga

SEQ ID NO: 2371195 - RNA, 19 nt, Artificial Sequence
  Description of Artificial Sequence: Synthetic oligonucleotide
  Antisense strand to SEQ ID NO: 2371194
ucuuuggacaaugaugaca

SEQ ID NO: 2371196 - RNA, 19 nt, Artificial Sequence
  Description of Artificial Sequence: Synthetic oligonucleotide
  Sense strand starting at position 1670 of SEQ ID NO: 1885836
gucaucauuguccaaagag

SEQ ID NO: 2371197 - RNA, 19 nt, Artificial Sequence
  Description of Artificial Sequence: Synthetic oligonucleotide
  Antisense strand to SEQ ID NO: 2371196
cucuuuggacaaugaugac

SEQ ID NO: 2371198 - RNA, 19 nt, Artificial Sequence
  Description of Artificial Sequence: Synthetic oligonucleotide
  Sense strand starting at position 1689 of SEQ ID NO: 1885836
gugacaggcauguaccauu

SEQ ID NO: 2371199 - RNA, 19 nt, Artificial Sequence
  Description of Artificial Sequence: Synthetic oligonucleotide
  Antisense strand to SEQ ID NO: 2371198
aaugguacaugccugucac

SEQ ID NO: 2371200 - RNA, 19 nt, Artificial Sequence
  Description of Artificial Sequence: Synthetic oligonucleotide
  Sense strand starting at position 1905 of SEQ ID NO: 1885836
gagaaugggccauguaucu

SEQ ID NO: 2371201 - RNA, 19 nt, Artificial Sequence
  Description of Artificial Sequence: Synthetic oligonucleotide
  Antisense strand to SEQ ID NO: 2371200
agauacauggcccauucuc

SEQ ID NO: 2371202 - RNA, 19 nt, Artificial Sequence
  Description of Artificial Sequence: Synthetic oligonucleotide
  Sense strand starting at position 2104 of SEQ ID NO: 1885836
ggagaaacuugauauuucu

SEQ ID NO: 2371203 - RNA, 19 nt, Artificial Sequence
  Description of Artificial Sequence: Synthetic oligonucleotide
  Antisense strand to SEQ ID NO: 2371202
agaaauaucaaguuucucc

SEQ ID NO: 2371204 - RNA, 19 nt, Artificial Sequence
  Description of Artificial Sequence: Synthetic oligonucleotide
  Sense strand starting at position 2234 of SEQ ID NO: 1885836
auuggucuucuuugauuau

SEQ ID NO: 2371205 - RNA, 19 nt, Artificial Sequence
  Description of Artificial Sequence: Synthetic oligonucleotide
  Antisense strand to SEQ ID NO: 2371204
auaaucaaagaagaccaau

SEQ ID NO: 2371206 - RNA, 19 nt, Artificial Sequence
  Description of Artificial Sequence: Synthetic oligonucleotide
  Sense strand starting at position 2237 of SEQ ID NO: 1885836
ggucuucuuugauuauaau

SEQ ID NO: 2371207 - RNA, 19 nt, Artificial Sequence
  Description of Artificial Sequence: Synthetic oligonucleotide
  Antisense strand to SEQ ID NO: 2371206
auuauaaucaaagaagacc

SEQ ID NO: 2371208 - RNA, 19 nt, Artificial Sequence
  Description of Artificial Sequence: Synthetic oligonucleotide
  Sense strand starting at position 2317 of SEQ ID NO: 1885836
agaagcaaacuuugaugau

SEQ ID NO: 2371209 - RNA, 19 nt, Artificial Sequence
  Description of Artificial Sequence: Synthetic oligonucleotide
  Antisense strand to SEQ ID NO: 2371208
aucaucaaaguuugcuucu

SEQ ID NO: 2371210 - RNA, 19 nt, Artificial Sequence
  Description of Artificial Sequence: Synthetic oligonucleotide
  Sense strand starting at position 2321 of SEQ ID NO: 1885836
gcaaacuuugaugauuacu

SEQ ID NO: 2371211 - RNA, 19 nt, Artificial Sequence
  Description of Artificial Sequence: Synthetic oligonucleotide
  Antisense strand to SEQ ID NO: 2371210
aguaaucaucaaaguuugc

SEQ ID NO: 2371212 - RNA, 19 nt, Artificial Sequence
  Description of Artificial Sequence: Synthetic oligonucleotide
  Sense strand starting at position 2410 of SEQ ID NO: 1885836
ucaguuuaagagcauccau

SEQ ID NO: 2371213 - RNA, 19 nt, Artificial Sequence
  Description of Artificial Sequence: Synthetic oligonucleotide
  Antisense strand to SEQ ID NO: 2371212
auggaugcucuuaaacuga

SEQ ID NO: 2371214 - RNA, 19 nt, Artificial Sequence
  Description of Artificial Sequence: Synthetic oligonucleotide
  Sense strand starting at position 2465 of SEQ ID NO: 1885836
ugaagaccuuaucuguauu

SEQ ID NO: 2371215 - RNA, 19 nt, Artificial Sequence
  Description of Artificial Sequence: Synthetic oligonucleotide
  Antisense strand to SEQ ID NO: 2371214
aauacagauaaggucuuca

SEQ ID NO: 2371216 - RNA, 19 nt, Artificial Sequence
  Description of Artificial Sequence: Synthetic oligonucleotide
  Sense strand starting at position 2685 of SEQ ID NO: 1885836
ugcauuuggcccuguuuga

SEQ ID NO: 2371217 - RNA, 19 nt, Artificial Sequence
  Description of Artificial Sequence: Synthetic oligonucleotide
  Antisense strand to SEQ ID NO: 2371216
ucaaacagggccaaaugca

SEQ ID NO: 2371218 - RNA, 19 nt, Artificial Sequence
  Description of Artificial Sequence: Synthetic oligonucleotide
  Sense strand starting at position 2928 of SEQ ID NO: 1885836
guuauuauuugucucuucu

SEQ ID NO: 2371219 - RNA, 19 nt, Artificial Sequence
  Description of Artificial Sequence: Synthetic oligonucleotide
  Antisense strand to SEQ ID NO: 2371218
agaagagacaaauaauaac

SEQ ID NO: 2371220 - RNA, 19 nt, Artificial Sequence
  Description of Artificial Sequence: Synthetic oligonucleotide
  Sense strand starting at position 2970 of SEQ ID NO: 1885836
gccauugaugcagaacaau

SEQ ID NO: 2371221 - RNA, 19 nt, Artificial Sequence
  Description of Artificial Sequence: Synthetic oligonucleotide
  Antisense strand to SEQ ID NO: 2371220
auuguucugcaucaauggc

SEQ ID NO: 2371222 - RNA, 19 nt, Artificial Sequence
  Description of Artificial Sequence: Synthetic oligonucleotide
  Sense strand starting at position 3378 of SEQ ID NO: 1885836
aggugacacccuugaucca

SEQ ID NO: 2371223 - RNA, 19 nt, Artificial Sequence
  Description of Artificial Sequence: Synthetic oligonucleotide
  Antisense strand to SEQ ID NO: 2371222
uggaucaagggugucaccu

SEQ ID NO: 2371224 - RNA, 19 nt, Artificial Sequence
  Description of Artificial Sequence: Synthetic oligonucleotide
  Sense strand starting at position 3521 of SEQ ID NO: 1885836
auugauugcuuuguaacaa

SEQ ID NO: 2371225 - RNA, 19 nt, Artificial Sequence
  Description of Artificial Sequence: Synthetic oligonucleotide
  Antisense strand to SEQ ID NO: 2371224
uuguuacaaagcaaucaau

SEQ ID NO: 2371226 - RNA, 19 nt, Artificial Sequence
  Description of Artificial Sequence: Synthetic oligonucleotide
  Sense strand starting at position 3577 of SEQ ID NO: 1885836
aucaccuuuguguauaacu

SEQ ID NO: 2371227 - RNA, 19 nt, Artificial Sequence
  Description of Artificial Sequence: Synthetic oligonucleotide
  Antisense strand to SEQ ID NO: 2371226
aguuauacacaaaggugau

SEQ ID NO: 2371228 - RNA, 19 nt, Artificial Sequence
  Description of Artificial Sequence: Synthetic oligonucleotide
  Sense strand starting at position 3582 of SEQ ID NO: 1885836
cuuuguguauaacuaauca

SEQ ID NO: 2371229 - RNA, 19 nt, Artificial Sequence
  Description of Artificial Sequence: Synthetic oligonucleotide
  Antisense strand to SEQ ID NO: 2371228
ugauuaguuauacacaaag

SEQ ID NO: 2371230 - RNA, 19 nt, Artificial Sequence
  Description of Artificial Sequence: Synthetic oligonucleotide
  Sense strand starting at position 3586 of SEQ ID NO: 1885836
guguauaacuaaucauccu

SEQ ID NO: 2371231 - RNA, 19 nt, Artificial Sequence
  Description of Artificial Sequence: Synthetic oligonucleotide
  Antisense strand to SEQ ID NO: 2371230
aggaugauuaguuauacac

SEQ ID NO: 2371232 - RNA, 19 nt, Artificial Sequence
  Description of Artificial Sequence: Synthetic oligonucleotide
  Sense strand starting at position 3631 of SEQ ID NO: 1885836
agacuagaucucugucuag

SEQ ID NO: 2371233 - RNA, 19 nt, Artificial Sequence
  Description of Artificial Sequence: Synthetic oligonucleotide
  Antisense strand to SEQ ID NO: 2371232
cuagacagagaucuagucu

SEQ ID NO: 2371234 - RNA, 19 nt, Artificial Sequence
  Description of Artificial Sequence: Synthetic oligonucleotide
  Sense strand starting at position 3634 of SEQ ID NO: 1885836
cuagaucucugucuaggua

SEQ ID NO: 2371235 - RNA, 19 nt, Artificial Sequence
  Description of Artificial Sequence: Synthetic oligonucleotide
  Antisense strand to SEQ ID NO: 2371234
uaccuagacagagaucuag

SEQ ID NO: 2371236 - RNA, 19 nt, Artificial Sequence
  Description of Artificial Sequence: Synthetic oligonucleotide
  Sense strand starting at position 3637 of SEQ ID NO: 1885836
gaucucugucuagguacua

SEQ ID NO: 2371237 - RNA, 19 nt, Artificial Sequence
  Description of Artificial Sequence: Synthetic oligonucleotide
  Antisense strand to SEQ ID NO: 2371236
uaguaccuagacagagauc

SEQ ID NO: 2371238 - RNA, 19 nt, Artificial Sequence
  Description of Artificial Sequence: Synthetic oligonucleotide
  Sense strand starting at position 3638 of SEQ ID NO: 1885836
aucucugucuagguacuaa

SEQ ID NO: 2371239 - RNA, 19 nt, Artificial Sequence
  Description of Artificial Sequence: Synthetic oligonucleotide
  Antisense strand to SEQ ID NO: 2371238
uuaguaccuagacagagau

SEQ ID NO: 2371240 - RNA, 19 nt, Artificial Sequence
  Description of Artificial Sequence: Synthetic oligonucleotide
  Sense strand starting at position 3833 of SEQ ID NO: 1885836
agaacaguauucuuaagua

SEQ ID NO: 2371241 - RNA, 19 nt, Artificial Sequence
  Description of Artificial Sequence: Synthetic oligonucleotide
  Antisense strand to SEQ ID NO: 2371240
uacuuaagaauacuguucu

SEQ ID NO: 2371242 - RNA, 19 nt, Artificial Sequence
  Description of Artificial Sequence: Synthetic oligonucleotide
  Sense strand starting at position 3911 of SEQ ID NO: 1885836
uguuguauauauccacuaa

SEQ ID NO: 2371243 - RNA, 19 nt, Artificial Sequence
  Description of Artificial Sequence: Synthetic oligonucleotide
  Antisense strand to SEQ ID NO: 2371242
uuaguggauauauacaaca

SEQ ID NO: 2371244 - RNA, 19 nt, Artificial Sequence
  Description of Artificial Sequence: Synthetic oligonucleotide
  Sense strand starting at position 74 of SEQ ID NO: 1885837
auuaacugagcucaauguu

SEQ ID NO: 2371245 - RNA, 19 nt, Artificial Sequence
  Description of Artificial Sequence: Synthetic oligonucleotide
  Antisense strand to SEQ ID NO: 2371244
aacauugagcucaguuaau

SEQ ID NO: 2371246 - RNA, 19 nt, Artificial Sequence
  Description of Artificial Sequence: Synthetic oligonucleotide
  Sense strand starting at position 456 of SEQ ID NO: 1885837
ugaacacuuugugcaacuu

SEQ ID NO: 2371247 - RNA, 19 nt, Artificial Sequence
  Description of Artificial Sequence: Synthetic oligonucleotide
  Antisense strand to SEQ ID NO: 2371246
aaguugcacaaaguguuca

SEQ ID NO: 2371248 - RNA, 19 nt, Artificial Sequence
  Description of Artificial Sequence: Synthetic oligonucleotide
  Sense strand starting at position 482 of SEQ ID NO: 1885837
cccagagguugaccauuau

SEQ ID NO: 2371249 - RNA, 19 nt, Artificial Sequence
  Description of Artificial Sequence: Synthetic oligonucleotide
  Antisense strand to SEQ ID NO: 2371248
auaauggucaaccucuggg

SEQ ID NO: 2371250 - RNA, 19 nt, Artificial Sequence
  Description of Artificial Sequence: Synthetic oligonucleotide
  Sense strand starting at position 488 of SEQ ID NO: 1885837
gguugaccauuaucuauaa

SEQ ID NO: 2371251 - RNA, 19 nt, Artificial Sequence
  Description of Artificial Sequence: Synthetic oligonucleotide
  Antisense strand to SEQ ID NO: 2371250
uuauagauaauggucaacc

SEQ ID NO: 2371252 - RNA, 19 nt, Artificial Sequence
  Description of Artificial Sequence: Synthetic oligonucleotide
  Sense strand starting at position 514 of SEQ ID NO: 1885837
cuguaucauccuuagucaa

SEQ ID NO: 2371253 - RNA, 19 nt, Artificial Sequence
  Description of Artificial Sequence: Synthetic oligonucleotide
  Antisense strand to SEQ ID NO: 2371252
uugacuaaggaugauacag

SEQ ID NO: 2371254 - RNA, 19 nt, Artificial Sequence
  Description of Artificial Sequence: Synthetic oligonucleotide
  Sense strand starting at position 516 of SEQ ID NO: 1885837
guaucauccuuagucaaag

SEQ ID NO: 2371255 - RNA, 19 nt, Artificial Sequence
  Description of Artificial Sequence: Synthetic oligonucleotide
  Antisense strand to SEQ ID NO: 2371254
cuuugacuaaggaugauac

SEQ ID NO: 2371256 - RNA, 19 nt, Artificial Sequence
  Description of Artificial Sequence: Synthetic oligonucleotide
  Sense strand starting at position 804 of SEQ ID NO: 1885837
auaauaauacagugaagug

SEQ ID NO: 2371257 - RNA, 19 nt, Artificial Sequence
  Description of Artificial Sequence: Synthetic oligonucleotide
  Antisense strand to SEQ ID NO: 2371256
cacuucacuguauuauuau

SEQ ID NO: 2371258 - RNA, 19 nt, Artificial Sequence
  Description of Artificial Sequence: Synthetic oligonucleotide
  Sense strand starting at position 998 of SEQ ID NO: 1885837
uucuaccuugucuauugau

SEQ ID NO: 2371259 - RNA, 19 nt, Artificial Sequence
  Description of Artificial Sequence: Synthetic oligonucleotide
  Antisense strand to SEQ ID NO: 2371258
aucaauagacaagguagaa

SEQ ID NO: 2371260 - RNA, 19 nt, Artificial Sequence
  Description of Artificial Sequence: Synthetic oligonucleotide
  Sense strand starting at position 1005 of SEQ ID NO: 1885837
uugucuauugauuauguca

SEQ ID NO: 2371261 - RNA, 19 nt, Artificial Sequence
  Description of Artificial Sequence: Synthetic oligonucleotide
  Antisense strand to SEQ ID NO: 2371260
ugacauaaucaauagacaa

SEQ ID NO: 2371262 - RNA, 19 nt, Artificial Sequence
  Description of Artificial Sequence: Synthetic oligonucleotide
  Sense strand starting at position 1078 of SEQ ID NO: 1885837
cuugauauucccuaucagu

SEQ ID NO: 2371263 - RNA, 19 nt, Artificial Sequence
  Description of Artificial Sequence: Synthetic oligonucleotide
  Antisense strand to SEQ ID NO: 2371262
acugauagggaauaucaag

SEQ ID NO: 2371264 - RNA, 19 nt, Artificial Sequence
  Description of Artificial Sequence: Synthetic oligonucleotide
  Sense strand starting at position 1204 of SEQ ID NO: 1885837
gccaucuuugacuguauuu

SEQ ID NO: 2371265 - RNA, 19 nt, Artificial Sequence
  Description of Artificial Sequence: Synthetic oligonucleotide
  Antisense strand to SEQ ID NO: 2371264
aaauacagucaaagauggc

SEQ ID NO: 2371266 - RNA, 19 nt, Artificial Sequence
  Description of Artificial Sequence: Synthetic oligonucleotide
  Sense strand starting at position 1237 of SEQ ID NO: 1885837
auacguugauuacucuuaa

SEQ ID NO: 2371267 - RNA, 19 nt, Artificial Sequence
  Description of Artificial Sequence: Synthetic oligonucleotide
  Antisense strand to SEQ ID NO: 2371266
uuaagaguaaucaacguau

SEQ ID NO: 2371268 - RNA, 19 nt, Artificial Sequence
  Description of Artificial Sequence: Synthetic oligonucleotide
  Sense strand starting at position 1273 of SEQ ID NO: 1885837
agguaaggacuuugacuau

SEQ ID NO: 2371269 - RNA, 19 nt, Artificial Sequence
  Description of Artificial Sequence: Synthetic oligonucleotide
  Antisense strand to SEQ ID NO: 2371268
auagucaaaguccuuaccu

SEQ ID NO: 2371270 - RNA, 19 nt, Artificial Sequence
  Description of Artificial Sequence: Synthetic oligonucleotide
  Sense strand starting at position 1381 of SEQ ID NO: 1885837
ccauucugaugaguacaga

SEQ ID NO: 2371271 - RNA, 19 nt, Artificial Sequence
  Description of Artificial Sequence: Synthetic oligonucleotide
  Antisense strand to SEQ ID NO: 2371270
ucuguacucaucagaaugg

SEQ ID NO: 2371272 - RNA, 19 nt, Artificial Sequence
  Description of Artificial Sequence: Synthetic oligonucleotide
  Sense strand starting at position 1474 of SEQ ID NO: 1885837
gcaaucguuauuuggacuu

SEQ ID NO: 2371273 - RNA, 19 nt, Artificial Sequence
  Description of Artificial Sequence: Synthetic oligonucleotide
  Antisense strand to SEQ ID NO: 2371272
aaguccaaauaacgauugc

SEQ ID NO: 2371274 - RNA, 19 nt, Artificial Sequence
  Description of Artificial Sequence: Synthetic oligonucleotide
  Sense strand starting at position 1728 of SEQ ID NO: 1885837
uuuaauaauugggcaauga

SEQ ID NO: 2371275 - RNA, 19 nt, Artificial Sequence
  Description of Artificial Sequence: Synthetic oligonucleotide
  Antisense strand to SEQ ID NO: 2371274
ucauugcccaauuauuaaa

SEQ ID NO: 2371276 - RNA, 19 nt, Artificial Sequence
  Description of Artificial Sequence: Synthetic oligonucleotide
  Sense strand starting at position 1732 of SEQ ID NO: 1885837
auaauugggcaaugauuaa

SEQ ID NO: 2371277 - RNA, 19 nt, Artificial Sequence
  Description of Artificial Sequence: Synthetic oligonucleotide
  Antisense strand to SEQ ID NO: 2371276
uuaaucauugcccaauuau

SEQ ID NO: 2371278 - RNA, 19 nt, Artificial Sequence
  Description of Artificial Sequence: Synthetic oligonucleotide
  Sense strand starting at position 1787 of SEQ ID NO: 1885837
auauauagguucucacauu

SEQ ID NO: 2371279 - RNA, 19 nt, Artificial Sequence
  Description of Artificial Sequence: Synthetic oligonucleotide
  Antisense strand to SEQ ID NO: 2371278
aaugugagaaccuauauau

SEQ ID NO: 2371280 - RNA, 19 nt, Artificial Sequence
  Description of Artificial Sequence: Synthetic oligonucleotide
  Sense strand starting at position 1793 of SEQ ID NO: 1885837
agguucucacauugagcaa

SEQ ID NO: 2371281 - RNA, 19 nt, Artificial Sequence
  Description of Artificial Sequence: Synthetic oligonucleotide
  Antisense strand to SEQ ID NO: 2371280
uugcucaaugugagaaccu

SEQ ID NO: 2371282 - RNA, 19 nt, Artificial Sequence
  Description of Artificial Sequence: Synthetic oligonucleotide
  Sense strand starting at position 2062 of SEQ ID NO: 1885837
acuaauaagucucuauggu

SEQ ID NO: 2371283 - RNA, 19 nt, Artificial Sequence
  Description of Artificial Sequence: Synthetic oligonucleotide
  Antisense strand to SEQ ID NO: 2371282
accauagagacuuauuagu

SEQ ID NO: 2371284 - RNA, 19 nt, Artificial Sequence
  Description of Artificial Sequence: Synthetic oligonucleotide
  Sense strand starting at position 2063 of SEQ ID NO: 1885837
cuaauaagucucuaugguu

SEQ ID NO: 2371285 - RNA, 19 nt, Artificial Sequence
  Description of Artificial Sequence: Synthetic oligonucleotide
  Antisense strand to SEQ ID NO: 2371284
aaccauagagacuuauuag

SEQ ID NO: 2371286 - RNA, 19 nt, Artificial Sequence
  Description of Artificial Sequence: Synthetic oligonucleotide
  Sense strand starting at position 2104 of SEQ ID NO: 1885837
cuggauguuccauaucugu

SEQ ID NO: 2371287 - RNA, 19 nt, Artificial Sequence
  Description of Artificial Sequence: Synthetic oligonucleotide
  Antisense strand to SEQ ID NO: 2371286
acagauauggaacauccag

SEQ ID NO: 2371288 - RNA, 19 nt, Artificial Sequence
  Description of Artificial Sequence: Synthetic oligonucleotide
  Sense strand starting at position 2110 of SEQ ID NO: 1885837
guuccauaucuguaucuag

SEQ ID NO: 2371289 - RNA, 19 nt, Artificial Sequence
  Description of Artificial Sequence: Synthetic oligonucleotide
  Antisense strand to SEQ ID NO: 2371288
cuagauacagauauggaac

SEQ ID NO: 2371290 - RNA, 19 nt, Artificial Sequence
  Description of Artificial Sequence: Synthetic oligonucleotide
  Sense strand starting at position 2177 of SEQ ID NO: 1885837
ucaucuaugcauuaucagu

SEQ ID NO: 2371291 - RNA, 19 nt, Artificial Sequence
  Description of Artificial Sequence: Synthetic oligonucleotide
  Antisense strand to SEQ ID NO: 2371290
acugauaaugcauagauga

SEQ ID NO: 2371292 - RNA, 19 nt, Artificial Sequence
  Description of Artificial Sequence: Synthetic oligonucleotide
  Sense strand starting at position 2179 of SEQ ID NO: 1885837
aucuaugcauuaucaguau

SEQ ID NO: 2371293 - RNA, 19 nt, Artificial Sequence
  Description of Artificial Sequence: Synthetic oligonucleotide
  Antisense strand to SEQ ID NO: 2371292
auacugauaaugcauagau

SEQ ID NO: 2371294 - RNA, 19 nt, Artificial Sequence
  Description of Artificial Sequence: Synthetic oligonucleotide
  Sense strand starting at position 2215 of SEQ ID NO: 1885837
ucauaucuaucauugggau

SEQ ID NO: 2371295 - RNA, 19 nt, Artificial Sequence
  Description of Artificial Sequence: Synthetic oligonucleotide
  Antisense strand to SEQ ID NO: 2371294
aucccaaugauagauauga

SEQ ID NO: 2371296 - RNA, 19 nt, Artificial Sequence
  Description of Artificial Sequence: Synthetic oligonucleotide
  Sense strand starting at position 2910 of SEQ ID NO: 1885837
cuaacuaugucaucauugu

SEQ ID NO: 2371297 - RNA, 19 nt, Artificial Sequence
  Description of Artificial Sequence: Synthetic oligonucleotide
  Antisense strand to SEQ ID NO: 2371296
acaaugaugacauaguuag

SEQ ID NO: 2371298 - RNA, 19 nt, Artificial Sequence
  Description of Artificial Sequence: Synthetic oligonucleotide
  Sense strand starting at position 2916 of SEQ ID NO: 1885837
augucaucauuguccaaag

SEQ ID NO: 2371299 - RNA, 19 nt, Artificial Sequence
  Description of Artificial Sequence: Synthetic oligonucleotide
  Antisense strand to SEQ ID NO: 2371298
cuuuggacaaugaugacau

SEQ ID NO: 2371300 - RNA, 19 nt, Artificial Sequence
  Description of Artificial Sequence: Synthetic oligonucleotide
  Sense strand starting at position 2917 of SEQ ID NO: 1885837
ugucaucauuguccaaaga

SEQ ID NO: 2371301 - RNA, 19 nt, Artificial Sequence
  Description of Artificial Sequence: Synthetic oligonucleotide
  Antisense strand to SEQ ID NO: 2371300
ucuuuggacaaugaugaca

SEQ ID NO: 2371302 - RNA, 19 nt, Artificial Sequence
  Description of Artificial Sequence: Synthetic oligonucleotide
  Sense strand starting at position 2918 of SEQ ID NO: 1885837
gucaucauuguccaaagag

SEQ ID NO: 2371303 - RNA, 19 nt, Artificial Sequence
  Description of Artificial Sequence: Synthetic oligonucleotide
  Antisense strand to SEQ ID NO: 2371302
cucuuuggacaaugaugac

SEQ ID NO: 2371304 - RNA, 19 nt, Artificial Sequence
  Description of Artificial Sequence: Synthetic oligonucleotide
  Sense strand starting at position 2937 of SEQ ID NO: 1885837
gugacaggcauguaccauu

SEQ ID NO: 2371305 - RNA, 19 nt, Artificial Sequence
  Description of Artificial Sequence: Synthetic oligonucleotide
  Antisense strand to SEQ ID NO: 2371304
aaugguacaugccugucac

SEQ ID NO: 2371306 - RNA, 19 nt, Artificial Sequence
  Description of Artificial Sequence: Synthetic oligonucleotide
  Sense strand starting at position 3153 of SEQ ID NO: 1885837
gagaaugggccauguaucu

SEQ ID NO: 2371307 - RNA, 19 nt, Artificial Sequence
  Description of Artificial Sequence: Synthetic oligonucleotide
  Antisense strand to SEQ ID NO: 2371306
agauacauggcccauucuc

SEQ ID NO: 2371308 - RNA, 19 nt, Artificial Sequence
  Description of Artificial Sequence: Synthetic oligonucleotide
  Sense strand starting at position 3352 of SEQ ID NO: 1885837
ggagaaacuugauauuucu

SEQ ID NO: 2371309 - RNA, 19 nt, Artificial Sequence
  Description of Artificial Sequence: Synthetic oligonucleotide
  Antisense strand to SEQ ID NO: 2371308
agaaauaucaaguuucucc

SEQ ID NO: 2371310 - RNA, 19 nt, Artificial Sequence
  Description of Artificial Sequence: Synthetic oligonucleotide
  Sense strand starting at position 3482 of SEQ ID NO: 1885837
auuggucuucuuugauuau

SEQ ID NO: 2371311 - RNA, 19 nt, Artificial Sequence
  Description of Artificial Sequence: Synthetic oligonucleotide
  Antisense strand to SEQ ID NO: 2371310
auaaucaaagaagaccaau

SEQ ID NO: 2371312 - RNA, 19 nt, Artificial Sequence
  Description of Artificial Sequence: Synthetic oligonucleotide
  Sense strand starting at position 3485 of SEQ ID NO: 1885837
ggucuucuuugauuauaau

SEQ ID NO: 2371313 - RNA, 19 nt, Artificial Sequence
  Description of Artificial Sequence: Synthetic oligonucleotide
  Antisense strand to SEQ ID NO: 2371312
auuauaaucaaagaagacc

SEQ ID NO: 2371314 - RNA, 19 nt, Artificial Sequence
  Description of Artificial Sequence: Synthetic oligonucleotide
  Sense strand starting at position 3565 of SEQ ID NO: 1885837
agaagcaaacuuugaugau

SEQ ID NO: 2371315 - RNA, 19 nt, Artificial Sequence
  Description of Artificial Sequence: Synthetic oligonucleotide
  Antisense strand to SEQ ID NO: 2371314
aucaucaaaguuugcuucu

SEQ ID NO: 2371316 - RNA, 19 nt, Artificial Sequence
  Description of Artificial Sequence: Synthetic oligonucleotide
  Sense strand starting at position 3569 of SEQ ID NO: 1885837
gcaaacuuugaugauuacu

SEQ ID NO: 2371317 - RNA, 19 nt, Artificial Sequence
  Description of Artificial Sequence: Synthetic oligonucleotide
  Antisense strand to SEQ ID NO: 2371316
aguaaucaucaaaguuugc

SEQ ID NO: 2371318 - RNA, 19 nt, Artificial Sequence
  Description of Artificial Sequence: Synthetic oligonucleotide
  Sense strand starting at position 3658 of SEQ ID NO: 1885837
ucaguuuaagagcauccau

SEQ ID NO: 2371319 - RNA, 19 nt, Artificial Sequence
  Description of Artificial Sequence: Synthetic oligonucleotide
  Antisense strand to SEQ ID NO: 2371318
auggaugcucuuaaacuga

SEQ ID NO: 2371320 - RNA, 19 nt, Artificial Sequence
  Description of Artificial Sequence: Synthetic oligonucleotide
  Sense strand starting at position 3713 of SEQ ID NO: 1885837
ugaagaccuuaucuguauu

SEQ ID NO: 2371321 - RNA, 19 nt, Artificial Sequence
  Description of Artificial Sequence: Synthetic oligonucleotide
  Antisense strand to SEQ ID NO: 2371320
aauacagauaaggucuuca

SEQ ID NO: 2371322 - RNA, 19 nt, Artificial Sequence
  Description of Artificial Sequence: Synthetic oligonucleotide
  Sense strand starting at position 3933 of SEQ ID NO: 1885837
ugcauuuggcccuguuuga

SEQ ID NO: 2371323 - RNA, 19 nt, Artificial Sequence
  Description of Artificial Sequence: Synthetic oligonucleotide
  Antisense strand to SEQ ID NO: 2371322
ucaaacagggccaaaugca

SEQ ID NO: 2371324 - RNA, 19 nt, Artificial Sequence
  Description of Artificial Sequence: Synthetic oligonucleotide
  Sense strand starting at position 12 of SEQ ID NO: 1885838
agagaaauauacgcaugga

SEQ ID NO: 2371325 - RNA, 19 nt, Artificial Sequence
  Description of Artificial Sequence: Synthetic oligonucleotide
  Antisense strand to SEQ ID NO: 2371324
uccaugcguauauuucucu

SEQ ID NO: 2371326 - RNA, 19 nt, Artificial Sequence
  Description of Artificial Sequence: Synthetic oligonucleotide
  Sense strand starting at position 15 of SEQ ID NO: 1885838
gaaauauacgcauggauuc

SEQ ID NO: 2371327 - RNA, 19 nt, Artificial Sequence
  Description of Artificial Sequence: Synthetic oligonucleotide
  Antisense strand to SEQ ID NO: 2371326
gaauccaugcguauauuuc

SEQ ID NO: 2371328 - RNA, 19 nt, Artificial Sequence
  Description of Artificial Sequence: Synthetic oligonucleotide
  Sense strand starting at position 60 of SEQ ID NO: 1885838
gagcauuuaccguaugcuu

SEQ ID NO: 2371329 - RNA, 19 nt, Artificial Sequence
  Description of Artificial Sequence: Synthetic oligonucleotide
  Antisense strand to SEQ ID NO: 2371328
aagcauacgguaaaugcuc

SEQ ID NO: 2371330 - RNA, 19 nt, Artificial Sequence
  Description of Artificial Sequence: Synthetic oligonucleotide
  Sense strand starting at position 62 of SEQ ID NO: 1885838
gcauuuaccguaugcuuua

SEQ ID NO: 2371331 - RNA, 19 nt, Artificial Sequence
  Description of Artificial Sequence: Synthetic oligonucleotide
  Antisense strand to SEQ ID NO: 2371330
uaaagcauacgguaaaugc

SEQ ID NO: 2371332 - RNA, 19 nt, Artificial Sequence
  Description of Artificial Sequence: Synthetic oligonucleotide
  Sense strand starting at position 160 of SEQ ID NO: 1885838
agacauagauauuaggaaa

SEQ ID NO: 2371333 - RNA, 19 nt, Artificial Sequence
  Description of Artificial Sequence: Synthetic oligonucleotide
  Antisense strand to SEQ ID NO: 2371332
uuuccuaauaucuaugucu

SEQ ID NO: 2371334 - RNA, 19 nt, Artificial Sequence
  Description of Artificial Sequence: Synthetic oligonucleotide
  Sense strand starting at position 190 of SEQ ID NO: 1885838
ugcauaacuggugaaguga

SEQ ID NO: 2371335 - RNA, 19 nt, Artificial Sequence
  Description of Artificial Sequence: Synthetic oligonucleotide
  Antisense strand to SEQ ID NO: 2371334
ucacuucaccaguuaugca

SEQ ID NO: 2371336 - RNA, 19 nt, Artificial Sequence
  Description of Artificial Sequence: Synthetic oligonucleotide
  Sense strand starting at position 987 of SEQ ID NO: 1885838
acguaagccuuaccauaaa

SEQ ID NO: 2371337 - RNA, 19 nt, Artificial Sequence
  Description of Artificial Sequence: Synthetic oligonucleotide
  Antisense strand to SEQ ID NO: 2371336
uuuaugguaaggcuuacgu

SEQ ID NO: 2371338 - RNA, 19 nt, Artificial Sequence
  Description of Artificial Sequence: Synthetic oligonucleotide
  Sense strand starting at position 1016 of SEQ ID NO: 1885838
aguacucaucuacaguaua

SEQ ID NO: 2371339 - RNA, 19 nt, Artificial Sequence
  Description of Artificial Sequence: Synthetic oligonucleotide
  Antisense strand to SEQ ID NO: 2371338
uauacuguagaugaguacu

SEQ ID NO: 2371340 - RNA, 19 nt, Artificial Sequence
  Description of Artificial Sequence: Synthetic oligonucleotide
  Sense strand starting at position 1170 of SEQ ID NO: 1885838
uuguuuguauuuccuguau

SEQ ID NO: 2371341 - RNA, 19 nt, Artificial Sequence
  Description of Artificial Sequence: Synthetic oligonucleotide
  Antisense strand to SEQ ID NO: 2371340
auacaggaaauacaaacaa

SEQ ID NO: 2371342 - RNA, 19 nt, Artificial Sequence
  Description of Artificial Sequence: Synthetic oligonucleotide
  Sense strand starting at position 1239 of SEQ ID NO: 1885838
agaauauaagcuuguccua

SEQ ID NO: 2371343 - RNA, 19 nt, Artificial Sequence
  Description of Artificial Sequence: Synthetic oligonucleotide
  Antisense strand to SEQ ID NO: 2371342
uaggacaagcuuauauucu

SEQ ID NO: 2371344 - RNA, 19 nt, Artificial Sequence
  Description of Artificial Sequence: Synthetic oligonucleotide
  Sense strand starting at position 1539 of SEQ ID NO: 1885838
uaguguuguaccguauagu

SEQ ID NO: 2371345 - RNA, 19 nt, Artificial Sequence
  Description of Artificial Sequence: Synthetic oligonucleotide
  Antisense strand to SEQ ID NO: 2371344
acuauacgguacaacacua

SEQ ID NO: 2371346 - RNA, 19 nt, Artificial Sequence
  Description of Artificial Sequence: Synthetic oligonucleotide
  Sense strand starting at position 1583 of SEQ ID NO: 1885838
cuguguuuccuuuaaucua

SEQ ID NO: 2371347 - RNA, 19 nt, Artificial Sequence
  Description of Artificial Sequence: Synthetic oligonucleotide
  Antisense strand to SEQ ID NO: 2371346
uagauuaaaggaaacacag

SEQ ID NO: 2371348 - RNA, 19 nt, Artificial Sequence
  Description of Artificial Sequence: Synthetic oligonucleotide
  Sense strand starting at position 1643 of SEQ ID NO: 1885838
aggcuaaauugccuauaga

SEQ ID NO: 2371349 - RNA, 19 nt, Artificial Sequence
  Description of Artificial Sequence: Synthetic oligonucleotide
  Antisense strand to SEQ ID NO: 2371348
ucuauaggcaauuuagccu

SEQ ID NO: 2371350 - RNA, 19 nt, Artificial Sequence
  Description of Artificial Sequence: Synthetic oligonucleotide
  Sense strand starting at position 1644 of SEQ ID NO: 1885838
ggcuaaauugccuauagaa

SEQ ID NO: 2371351 - RNA, 19 nt, Artificial Sequence
  Description of Artificial Sequence: Synthetic oligonucleotide
  Antisense strand to SEQ ID NO: 2371350
uucuauaggcaauuuagcc

SEQ ID NO: 2371352 - RNA, 19 nt, Artificial Sequence
  Description of Artificial Sequence: Synthetic oligonucleotide
  Sense strand starting at position 1919 of SEQ ID NO: 1885838
cagagcauguguuuaauca

SEQ ID NO: 2371353 - RNA, 19 nt, Artificial Sequence
  Description of Artificial Sequence: Synthetic oligonucleotide
  Antisense strand to SEQ ID NO: 2371352
ugauuaaacacaugcucug

SEQ ID NO: 2371354 - RNA, 19 nt, Artificial Sequence
  Description of Artificial Sequence: Synthetic oligonucleotide
  Sense strand starting at position 1920 of SEQ ID NO: 1885838
agagcauguguuuaaucag

SEQ ID NO: 2371355 - RNA, 19 nt, Artificial Sequence
  Description of Artificial Sequence: Synthetic oligonucleotide
  Antisense strand to SEQ ID NO: 2371354
cugauuaaacacaugcucu

SEQ ID NO: 2371356 - RNA, 19 nt, Artificial Sequence
  Description of Artificial Sequence: Synthetic oligonucleotide
  Sense strand starting at position 1929 of SEQ ID NO: 1885838
guuuaaucaggcugaucag

SEQ ID NO: 2371357 - RNA, 19 nt, Artificial Sequence
  Description of Artificial Sequence: Synthetic oligonucleotide
  Antisense strand to SEQ ID NO: 2371356
cugaucagccugauuaaac

SEQ ID NO: 2371358 - RNA, 19 nt, Artificial Sequence
  Description of Artificial Sequence: Synthetic oligonucleotide
  Sense strand starting at position 1935 of SEQ ID NO: 1885838
ucaggcugaucagcugaaa

SEQ ID NO: 2371359 - RNA, 19 nt, Artificial Sequence
  Description of Artificial Sequence: Synthetic oligonucleotide
  Antisense strand to SEQ ID NO: 2371358
uuucagcugaucagccuga

SEQ ID NO: 2371360 - RNA, 19 nt, Artificial Sequence
  Description of Artificial Sequence: Synthetic oligonucleotide
  Sense strand starting at position 2113 of SEQ ID NO: 1885838
aagucuugcuaagugauua

SEQ ID NO: 2371361 - RNA, 19 nt, Artificial Sequence
  Description of Artificial Sequence: Synthetic oligonucleotide
  Antisense strand to SEQ ID NO: 2371360
uaaucacuuagcaagacuu

SEQ ID NO: 2371362 - RNA, 19 nt, Artificial Sequence
  Description of Artificial Sequence: Synthetic oligonucleotide
  Sense strand starting at position 2117 of SEQ ID NO: 1885838
cuugcuaagugauuagaaa

SEQ ID NO: 2371363 - RNA, 19 nt, Artificial Sequence
  Description of Artificial Sequence: Synthetic oligonucleotide
  Antisense strand to SEQ ID NO: 2371362
uuucuaaucacuuagcaag

SEQ ID NO: 2371364 - RNA, 19 nt, Artificial Sequence
  Description of Artificial Sequence: Synthetic oligonucleotide
  Sense strand starting at position 2118 of SEQ ID NO: 1885838
uugcuaagugauuagaaau

SEQ ID NO: 2371365 - RNA, 19 nt, Artificial Sequence
  Description of Artificial Sequence: Synthetic oligonucleotide
  Antisense strand to SEQ ID NO: 2371364
auuucuaaucacuuagcaa

SEQ ID NO: 2371366 - RNA, 19 nt, Artificial Sequence
  Description of Artificial Sequence: Synthetic oligonucleotide
  Sense strand starting at position 2402 of SEQ ID NO: 1885838
acucaucuauuuggagaau

SEQ ID NO: 2371367 - RNA, 19 nt, Artificial Sequence
  Description of Artificial Sequence: Synthetic oligonucleotide
  Antisense strand to SEQ ID NO: 2371366
auucuccaaauagaugagu

SEQ ID NO: 2371368 - RNA, 19 nt, Artificial Sequence
  Description of Artificial Sequence: Synthetic oligonucleotide
  Sense strand starting at position 2403 of SEQ ID NO: 1885838
cucaucuauuuggagaaug

SEQ ID NO: 2371369 - RNA, 19 nt, Artificial Sequence
  Description of Artificial Sequence: Synthetic oligonucleotide
  Antisense strand to SEQ ID NO: 2371368
cauucuccaaauagaugag

SEQ ID NO: 2371370 - RNA, 19 nt, Artificial Sequence
  Description of Artificial Sequence: Synthetic oligonucleotide
  Sense strand starting at position 2799 of SEQ ID NO: 1885838
gagccaaugccggauugua

SEQ ID NO: 2371371 - RNA, 19 nt, Artificial Sequence
  Description of Artificial Sequence: Synthetic oligonucleotide
  Antisense strand to SEQ ID NO: 2371370
uacaauccggcauuggcuc

SEQ ID NO: 2371372 - RNA, 19 nt, Artificial Sequence
  Description of Artificial Sequence: Synthetic oligonucleotide
  Sense strand starting at position 2807 of SEQ ID NO: 1885838
gccggauuguauuuaaccu

SEQ ID NO: 2371373 - RNA, 19 nt, Artificial Sequence
  Description of Artificial Sequence: Synthetic oligonucleotide
  Antisense strand to SEQ ID NO: 2371372
agguuaaauacaauccggc

SEQ ID NO: 2371374 - RNA, 19 nt, Artificial Sequence
  Description of Artificial Sequence: Synthetic oligonucleotide
  Sense strand starting at position 2920 of SEQ ID NO: 1885838
acaagauggcaguguaaga

SEQ ID NO: 2371375 - RNA, 19 nt, Artificial Sequence
  Description of Artificial Sequence: Synthetic oligonucleotide
  Antisense strand to SEQ ID NO: 2371374
ucuuacacugccaucuugu

SEQ ID NO: 2371376 - RNA, 19 nt, Artificial Sequence
  Description of Artificial Sequence: Synthetic oligonucleotide
  Sense strand starting at position 3219 of SEQ ID NO: 1885838
agacaagacucacagaaau

SEQ ID NO: 2371377 - RNA, 19 nt, Artificial Sequence
  Description of Artificial Sequence: Synthetic oligonucleotide
  Antisense strand to SEQ ID NO: 2371376
auuucugugagucuugucu

SEQ ID NO: 2371378 - RNA, 19 nt, Artificial Sequence
  Description of Artificial Sequence: Synthetic oligonucleotide
  Sense strand starting at position 3259 of SEQ ID NO: 1885838
guagaaagcaaguaagguu

SEQ ID NO: 2371379 - RNA, 19 nt, Artificial Sequence
  Description of Artificial Sequence: Synthetic oligonucleotide
  Antisense strand to SEQ ID NO: 2371378
aaccuuacuugcuuucuac

SEQ ID NO: 2371380 - RNA, 19 nt, Artificial Sequence
  Description of Artificial Sequence: Synthetic oligonucleotide
  Sense strand starting at position 3350 of SEQ ID NO: 1885838
uugcauguccaauaaguaa

SEQ ID NO: 2371381 - RNA, 19 nt, Artificial Sequence
  Description of Artificial Sequence: Synthetic oligonucleotide
  Antisense strand to SEQ ID NO: 2371380
uuacuuauuggacaugcaa

SEQ ID NO: 2371382 - RNA, 19 nt, Artificial Sequence
  Description of Artificial Sequence: Synthetic oligonucleotide
  Sense strand starting at position 3365 of SEQ ID NO: 1885838
guaaccacuuaauuagagu

SEQ ID NO: 2371383 - RNA, 19 nt, Artificial Sequence
  Description of Artificial Sequence: Synthetic oligonucleotide
  Antisense strand to SEQ ID NO: 2371382
acucuaauuaagugguuac

SEQ ID NO: 2371384 - RNA, 19 nt, Artificial Sequence
  Description of Artificial Sequence: Synthetic oligonucleotide
  Sense strand starting at position 3488 of SEQ ID NO: 1885838
ggacaucagugccuuuaag

SEQ ID NO: 2371385 - RNA, 19 nt, Artificial Sequence
  Description of Artificial Sequence: Synthetic oligonucleotide
  Antisense strand to SEQ ID NO: 2371384
cuuaaaggcacugaugucc

SEQ ID NO: 2371386 - RNA, 19 nt, Artificial Sequence
  Description of Artificial Sequence: Synthetic oligonucleotide
  Sense strand starting at position 3498 of SEQ ID NO: 1885838
gccuuuaagaaugggucua

SEQ ID NO: 2371387 - RNA, 19 nt, Artificial Sequence
  Description of Artificial Sequence: Synthetic oligonucleotide
  Antisense strand to SEQ ID NO: 2371386
uagacccauucuuaaaggc

SEQ ID NO: 2371388 - RNA, 19 nt, Artificial Sequence
  Description of Artificial Sequence: Synthetic oligonucleotide
  Sense strand starting at position 3500 of SEQ ID NO: 1885838
cuuuaagaaugggucuaaa

SEQ ID NO: 2371389 - RNA, 19 nt, Artificial Sequence
  Description of Artificial Sequence: Synthetic oligonucleotide
  Antisense strand to SEQ ID NO: 2371388
uuuagacccauucuuaaag

SEQ ID NO: 2371390 - RNA, 19 nt, Artificial Sequence
  Description of Artificial Sequence: Synthetic oligonucleotide
  Sense strand starting at position 3535 of SEQ ID NO: 1885838
gaaagcaguggcuaucauu

SEQ ID NO: 2371391 - RNA, 19 nt, Artificial Sequence
  Description of Artificial Sequence: Synthetic oligonucleotide
  Antisense strand to SEQ ID NO: 2371390
aaugauagccacugcuuuc

SEQ ID NO: 2371392 - RNA, 19 nt, Artificial Sequence
  Description of Artificial Sequence: Synthetic oligonucleotide
  Sense strand starting at position 3543 of SEQ ID NO: 1885838
uggcuaucauucuuuagaa

SEQ ID NO: 2371393 - RNA, 19 nt, Artificial Sequence
  Description of Artificial Sequence: Synthetic oligonucleotide
  Antisense strand to SEQ ID NO: 2371392
uucuaaagaaugauagcca

SEQ ID NO: 2371394 - RNA, 19 nt, Artificial Sequence
  Description of Artificial Sequence: Synthetic oligonucleotide
  Sense strand starting at position 3544 of SEQ ID NO: 1885838
ggcuaucauucuuuagaaa

SEQ ID NO: 2371395 - RNA, 19 nt, Artificial Sequence
  Description of Artificial Sequence: Synthetic oligonucleotide
  Antisense strand to SEQ ID NO: 2371394
uuucuaaagaaugauagcc

SEQ ID NO: 2371396 - RNA, 19 nt, Artificial Sequence
  Description of Artificial Sequence: Synthetic oligonucleotide
  Sense strand starting at position 3568 of SEQ ID NO: 1885838
ucugucaagcuguauagaa

SEQ ID NO: 2371397 - RNA, 19 nt, Artificial Sequence
  Description of Artificial Sequence: Synthetic oligonucleotide
  Antisense strand to SEQ ID NO: 2371396
uucuauacagcuugacaga

SEQ ID NO: 2371398 - RNA, 19 nt, Artificial Sequence
  Description of Artificial Sequence: Synthetic oligonucleotide
  Sense strand starting at position 3570 of SEQ ID NO: 1885838
ugucaagcuguauagaauu

SEQ ID NO: 2371399 - RNA, 19 nt, Artificial Sequence
  Description of Artificial Sequence: Synthetic oligonucleotide
  Antisense strand to SEQ ID NO: 2371398
aauucuauacagcuugaca

SEQ ID NO: 2371400 - RNA, 19 nt, Artificial Sequence
  Description of Artificial Sequence: Synthetic oligonucleotide
  Sense strand starting at position 3777 of SEQ ID NO: 1885838
aauguaaugcagugacaug

SEQ ID NO: 2371401 - RNA, 19 nt, Artificial Sequence
  Description of Artificial Sequence: Synthetic oligonucleotide
  Antisense strand to SEQ ID NO: 2371400
caugucacugcauuacauu

SEQ ID NO: 2371402 - RNA, 19 nt, Artificial Sequence
  Description of Artificial Sequence: Synthetic oligonucleotide
  Sense strand starting at position 3839 of SEQ ID NO: 1885838
ucagacagauaugaucaaa

SEQ ID NO: 2371403 - RNA, 19 nt, Artificial Sequence
  Description of Artificial Sequence: Synthetic oligonucleotide
  Antisense strand to SEQ ID NO: 2371402
uuugaucauaucugucuga

SEQ ID NO: 2371404 - RNA, 19 nt, Artificial Sequence
  Description of Artificial Sequence: Synthetic oligonucleotide
  Sense strand starting at position 7 of SEQ ID NO: 1885839
ggagauuaaucccauccau

SEQ ID NO: 2371405 - RNA, 19 nt, Artificial Sequence
  Description of Artificial Sequence: Synthetic oligonucleotide
  Antisense strand to SEQ ID NO: 2371404
auggaugggauuaaucucc

SEQ ID NO: 2371406 - RNA, 19 nt, Artificial Sequence
  Description of Artificial Sequence: Synthetic oligonucleotide
  Sense strand starting at position 121 of SEQ ID NO: 1885839
ucagucaugguuuaaauug

SEQ ID NO: 2371407 - RNA, 19 nt, Artificial Sequence
  Description of Artificial Sequence: Synthetic oligonucleotide
  Antisense strand to SEQ ID NO: 2371406
caauuuaaaccaugacuga

SEQ ID NO: 2371408 - RNA, 19 nt, Artificial Sequence
  Description of Artificial Sequence: Synthetic oligonucleotide
  Sense strand starting at position 128 of SEQ ID NO: 1885839
ugguuuaaauugucauucu

SEQ ID NO: 2371409 - RNA, 19 nt, Artificial Sequence
  Description of Artificial Sequence: Synthetic oligonucleotide
  Antisense strand to SEQ ID NO: 2371408
agaaugacaauuuaaacca

SEQ ID NO: 2371410 - RNA, 19 nt, Artificial Sequence
  Description of Artificial Sequence: Synthetic oligonucleotide
  Sense strand starting at position 188 of SEQ ID NO: 1885839
ccuuccuguuaaguacaua

SEQ ID NO: 2371411 - RNA, 19 nt, Artificial Sequence
  Description of Artificial Sequence: Synthetic oligonucleotide
  Antisense strand to SEQ ID NO: 2371410
uauguacuuaacaggaagg

SEQ ID NO: 2371412 - RNA, 19 nt, Artificial Sequence
  Description of Artificial Sequence: Synthetic oligonucleotide
  Sense strand starting at position 547 of SEQ ID NO: 1885839
cuuuguguucuccugugua

SEQ ID NO: 2371413 - RNA, 19 nt, Artificial Sequence
  Description of Artificial Sequence: Synthetic oligonucleotide
  Antisense strand to SEQ ID NO: 2371412
uacacaggagaacacaaag

SEQ ID NO: 2371414 - RNA, 19 nt, Artificial Sequence
  Description of Artificial Sequence: Synthetic oligonucleotide
  Sense strand starting at position 815 of SEQ ID NO: 1885839
ucuauagccuaucuuguau

SEQ ID NO: 2371415 - RNA, 19 nt, Artificial Sequence
  Description of Artificial Sequence: Synthetic oligonucleotide
  Antisense strand to SEQ ID NO: 2371414
auacaagauaggcuauaga

SEQ ID NO: 2371416 - RNA, 19 nt, Artificial Sequence
  Description of Artificial Sequence: Synthetic oligonucleotide
  Sense strand starting at position 826 of SEQ ID NO: 1885839
ucuuguauuuaguaugaca

SEQ ID NO: 2371417 - RNA, 19 nt, Artificial Sequence
  Description of Artificial Sequence: Synthetic oligonucleotide
  Antisense strand to SEQ ID NO: 2371416
ugucauacuaaauacaaga

SEQ ID NO: 2371418 - RNA, 19 nt, Artificial Sequence
  Description of Artificial Sequence: Synthetic oligonucleotide
  Sense strand starting at position 829 of SEQ ID NO: 1885839
uguauuuaguaugacauga

SEQ ID NO: 2371419 - RNA, 19 nt, Artificial Sequence
  Description of Artificial Sequence: Synthetic oligonucleotide
  Antisense strand to SEQ ID NO: 2371418
ucaugucauacuaaauaca

SEQ ID NO: 2371420 - RNA, 19 nt, Artificial Sequence
  Description of Artificial Sequence: Synthetic oligonucleotide
  Sense strand starting at position 1343 of SEQ ID NO: 1885839
auaguaaacugugucuacu

SEQ ID NO: 2371421 - RNA, 19 nt, Artificial Sequence
  Description of Artificial Sequence: Synthetic oligonucleotide
  Antisense strand to SEQ ID NO: 2371420
aguagacacaguuuacuau

SEQ ID NO: 2371422 - RNA, 19 nt, Artificial Sequence
  Description of Artificial Sequence: Synthetic oligonucleotide
  Sense strand starting at position 1345 of SEQ ID NO: 1885839
aguaaacugugucuacuaa

SEQ ID NO: 2371423 - RNA, 19 nt, Artificial Sequence
  Description of Artificial Sequence: Synthetic oligonucleotide
  Antisense strand to SEQ ID NO: 2371422
uuaguagacacaguuuacu

SEQ ID NO: 2371424 - RNA, 19 nt, Artificial Sequence
  Description of Artificial Sequence: Synthetic oligonucleotide
  Sense strand starting at position 1346 of SEQ ID NO: 1885839
guaaacugugucuacuaaa

SEQ ID NO: 2371425 - RNA, 19 nt, Artificial Sequence
  Description of Artificial Sequence: Synthetic oligonucleotide
  Antisense strand to SEQ ID NO: 2371424
uuuaguagacacaguuuac

SEQ ID NO: 2371426 - RNA, 19 nt, Artificial Sequence
  Description of Artificial Sequence: Synthetic oligonucleotide
  Sense strand starting at position 1667 of SEQ ID NO: 1885839
aaaguacucuauggagaag

SEQ ID NO: 2371427 - RNA, 19 nt, Artificial Sequence
  Description of Artificial Sequence: Synthetic oligonucleotide
  Antisense strand to SEQ ID NO: 2371426
cuucuccauagaguacuuu

SEQ ID NO: 2371428 - RNA, 19 nt, Artificial Sequence
  Description of Artificial Sequence: Synthetic oligonucleotide
  Sense strand starting at position 1766 of SEQ ID NO: 1885839
cuguucuacuuaguaauca

SEQ ID NO: 2371429 - RNA, 19 nt, Artificial Sequence
  Description of Artificial Sequence: Synthetic oligonucleotide
  Antisense strand to SEQ ID NO: 2371428
ugauuacuaaguagaacag

SEQ ID NO: 2371430 - RNA, 19 nt, Artificial Sequence
  Description of Artificial Sequence: Synthetic oligonucleotide
  Sense strand starting at position 1770 of SEQ ID NO: 1885839
ucuacuuaguaaucaguaa

SEQ ID NO: 2371431 - RNA, 19 nt, Artificial Sequence
  Description of Artificial Sequence: Synthetic oligonucleotide
  Antisense strand to SEQ ID NO: 2371430
uuacugauuacuaaguaga

SEQ ID NO: 2371432 - RNA, 19 nt, Artificial Sequence
  Description of Artificial Sequence: Synthetic oligonucleotide
  Sense strand starting at position 2345 of SEQ ID NO: 1885839
auguuuaugcuuugguuua

SEQ ID NO: 2371433 - RNA, 19 nt, Artificial Sequence
  Description of Artificial Sequence: Synthetic oligonucleotide
  Antisense strand to SEQ ID NO: 2371432
uaaaccaaagcauaaacau

SEQ ID NO: 2371434 - RNA, 19 nt, Artificial Sequence
  Description of Artificial Sequence: Synthetic oligonucleotide
  Sense strand starting at position 2378 of SEQ ID NO: 1885839
cguuuauaaccagauacug

SEQ ID NO: 2371435 - RNA, 19 nt, Artificial Sequence
  Description of Artificial Sequence: Synthetic oligonucleotide
  Antisense strand to SEQ ID NO: 2371434
caguaucugguuauaaacg

SEQ ID NO: 2371436 - RNA, 19 nt, Artificial Sequence
  Description of Artificial Sequence: Synthetic oligonucleotide
  Sense strand starting at position 2386 of SEQ ID NO: 1885839
accagauacuggcaacaau

SEQ ID NO: 2371437 - RNA, 19 nt, Artificial Sequence
  Description of Artificial Sequence: Synthetic oligonucleotide
  Antisense strand to SEQ ID NO: 2371436
auuguugccaguaucuggu

SEQ ID NO: 2371438 - RNA, 19 nt, Artificial Sequence
  Description of Artificial Sequence: Synthetic oligonucleotide
  Sense strand starting at position 2413 of SEQ ID NO: 1885839
ggcuaaauccagcaacuaa

SEQ ID NO: 2371439 - RNA, 19 nt, Artificial Sequence
  Description of Artificial Sequence: Synthetic oligonucleotide
  Antisense strand to SEQ ID NO: 2371438
uuaguugcuggauuuagcc

SEQ ID NO: 2371440 - RNA, 19 nt, Artificial Sequence
  Description of Artificial Sequence: Synthetic oligonucleotide
  Sense strand starting at position 2423 of SEQ ID NO: 1885839
agcaacuaauaaugggaaa

SEQ ID NO: 2371441 - RNA, 19 nt, Artificial Sequence
  Description of Artificial Sequence: Synthetic oligonucleotide
  Antisense strand to SEQ ID NO: 2371440
uuucccauuauuaguugcu

SEQ ID NO: 2371442 - RNA, 19 nt, Artificial Sequence
  Description of Artificial Sequence: Synthetic oligonucleotide
  Sense strand starting at position 2436 of SEQ ID NO: 1885839
gggaaacagccaugcauau

SEQ ID NO: 2371443 - RNA, 19 nt, Artificial Sequence
  Description of Artificial Sequence: Synthetic oligonucleotide
  Antisense strand to SEQ ID NO: 2371442
auaugcauggcuguuuccc

SEQ ID NO: 2371444 - RNA, 19 nt, Artificial Sequence
  Description of Artificial Sequence: Synthetic oligonucleotide
  Sense strand starting at position 2482 of SEQ ID NO: 1885839
gcuacaauggcuuacaaag

SEQ ID NO: 2371445 - RNA, 19 nt, Artificial Sequence
  Description of Artificial Sequence: Synthetic oligonucleotide
  Antisense strand to SEQ ID NO: 2371444
cuuuguaagccauuguagc

SEQ ID NO: 2371446 - RNA, 19 nt, Artificial Sequence
  Description of Artificial Sequence: Synthetic oligonucleotide
  Sense strand starting at position 2491 of SEQ ID NO: 1885839
gcuuacaaagccugaaagu

SEQ ID NO: 2371447 - RNA, 19 nt, Artificial Sequence
  Description of Artificial Sequence: Synthetic oligonucleotide
  Antisense strand to SEQ ID NO: 2371446
acuuucaggcuuuguaagc

SEQ ID NO: 2371448 - RNA, 19 nt, Artificial Sequence
  Description of Artificial Sequence: Synthetic oligonucleotide
  Sense strand starting at position 2593 of SEQ ID NO: 1885839
ugucacuguuuccugaaau

SEQ ID NO: 2371449 - RNA, 19 nt, Artificial Sequence
  Description of Artificial Sequence: Synthetic oligonucleotide
  Antisense strand to SEQ ID NO: 2371448
auuucaggaaacagugaca

SEQ ID NO: 2371450 - RNA, 19 nt, Artificial Sequence
  Description of Artificial Sequence: Synthetic oligonucleotide
  Sense strand starting at position 2806 of SEQ ID NO: 1885839
cugaauaauuuacaguuga

SEQ ID NO: 2371451 - RNA, 19 nt, Artificial Sequence
  Description of Artificial Sequence: Synthetic oligonucleotide
  Antisense strand to SEQ ID NO: 2371450
ucaacuguaaauuauucag

SEQ ID NO: 2371452 - RNA, 19 nt, Artificial Sequence
  Description of Artificial Sequence: Synthetic oligonucleotide
  Sense strand starting at position 2830 of SEQ ID NO: 1885839
ccauuaaauuugugacaga

SEQ ID NO: 2371453 - RNA, 19 nt, Artificial Sequence
  Description of Artificial Sequence: Synthetic oligonucleotide
  Antisense strand to SEQ ID NO: 2371452
ucugucacaaauuuaaugg

SEQ ID NO: 2371454 - RNA, 19 nt, Artificial Sequence
  Description of Artificial Sequence: Synthetic oligonucleotide
  Sense strand starting at position 2898 of SEQ ID NO: 1885839
agacuaguuucuguaagga

SEQ ID NO: 2371455 - RNA, 19 nt, Artificial Sequence
  Description of Artificial Sequence: Synthetic oligonucleotide
  Antisense strand to SEQ ID NO: 2371454
uccuuacagaaacuagucu

SEQ ID NO: 2371456 - RNA, 19 nt, Artificial Sequence
  Description of Artificial Sequence: Synthetic oligonucleotide
  Sense strand starting at position 2953 of SEQ ID NO: 1885839
agucaaaucugguugcaag

SEQ ID NO: 2371457 - RNA, 19 nt, Artificial Sequence
  Description of Artificial Sequence: Synthetic oligonucleotide
  Antisense strand to SEQ ID NO: 2371456
cuugcaaccagauuugacu

SEQ ID NO: 2371458 - RNA, 19 nt, Artificial Sequence
  Description of Artificial Sequence: Synthetic oligonucleotide
  Sense strand starting at position 3032 of SEQ ID NO: 1885839
aaagguuagucacuagauc

SEQ ID NO: 2371459 - RNA, 19 nt, Artificial Sequence
  Description of Artificial Sequence: Synthetic oligonucleotide
  Antisense strand to SEQ ID NO: 2371458
gaucuagugacuaaccuuu

SEQ ID NO: 2371460 - RNA, 19 nt, Artificial Sequence
  Description of Artificial Sequence: Synthetic oligonucleotide
  Sense strand starting at position 3070 of SEQ ID NO: 1885839
aguuuaagagcacaugauu

SEQ ID NO: 2371461 - RNA, 19 nt, Artificial Sequence
  Description of Artificial Sequence: Synthetic oligonucleotide
  Antisense strand to SEQ ID NO: 2371460
aaucaugugcucuuaaacu

SEQ ID NO: 2371462 - RNA, 19 nt, Artificial Sequence
  Description of Artificial Sequence: Synthetic oligonucleotide
  Sense strand starting at position 3274 of SEQ ID NO: 1885839
guaacaugccaaugaaagu

SEQ ID NO: 2371463 - RNA, 19 nt, Artificial Sequence
  Description of Artificial Sequence: Synthetic oligonucleotide
  Antisense strand to SEQ ID NO: 2371462
acuuucauuggcauguuac

SEQ ID NO: 2371464 - RNA, 19 nt, Artificial Sequence
  Description of Artificial Sequence: Synthetic oligonucleotide
  Sense strand starting at position 3314 of SEQ ID NO: 1885839
gcacauguacaguguuaau

SEQ ID NO: 2371465 - RNA, 19 nt, Artificial Sequence
  Description of Artificial Sequence: Synthetic oligonucleotide
  Antisense strand to SEQ ID NO: 2371464
auuaacacuguacaugugc

SEQ ID NO: 2371466 - RNA, 19 nt, Artificial Sequence
  Description of Artificial Sequence: Synthetic oligonucleotide
  Sense strand starting at position 3618 of SEQ ID NO: 1885839
ggaccuuuggagugcuaaa

SEQ ID NO: 2371467 - RNA, 19 nt, Artificial Sequence
  Description of Artificial Sequence: Synthetic oligonucleotide
  Antisense strand to SEQ ID NO: 2371466
uuuagcacuccaaaggucc

SEQ ID NO: 2371468 - RNA, 19 nt, Artificial Sequence
  Description of Artificial Sequence: Synthetic oligonucleotide
  Sense strand starting at position 3645 of SEQ ID NO: 1885839
guaucuugauugcugugau

SEQ ID NO: 2371469 - RNA, 19 nt, Artificial Sequence
  Description of Artificial Sequence: Synthetic oligonucleotide
  Antisense strand to SEQ ID NO: 2371468
aucacagcaaucaagauac

SEQ ID NO: 2371470 - RNA, 19 nt, Artificial Sequence
  Description of Artificial Sequence: Synthetic oligonucleotide
  Sense strand starting at position 3648 of SEQ ID NO: 1885839
ucuugauugcugugaugac

SEQ ID NO: 2371471 - RNA, 19 nt, Artificial Sequence
  Description of Artificial Sequence: Synthetic oligonucleotide
  Antisense strand to SEQ ID NO: 2371470
gucaucacagcaaucaaga

SEQ ID NO: 2371472 - RNA, 19 nt, Artificial Sequence
  Description of Artificial Sequence: Synthetic oligonucleotide
  Sense strand starting at position 3652 of SEQ ID NO: 1885839
gauugcugugaugacuaca

SEQ ID NO: 2371473 - RNA, 19 nt, Artificial Sequence
  Description of Artificial Sequence: Synthetic oligonucleotide
  Antisense strand to SEQ ID NO: 2371472
uguagucaucacagcaauc

SEQ ID NO: 2371474 - RNA, 19 nt, Artificial Sequence
  Description of Artificial Sequence: Synthetic oligonucleotide
  Sense strand starting at position 3655 of SEQ ID NO: 1885839
ugcugugaugacuacaaug

SEQ ID NO: 2371475 - RNA, 19 nt, Artificial Sequence
  Description of Artificial Sequence: Synthetic oligonucleotide
  Antisense strand to SEQ ID NO: 2371474
cauuguagucaucacagca

SEQ ID NO: 2371476 - RNA, 19 nt, Artificial Sequence
  Description of Artificial Sequence: Synthetic oligonucleotide
  Sense strand starting at position 3657 of SEQ ID NO: 1885839
cugugaugacuacaaugua

SEQ ID NO: 2371477 - RNA, 19 nt, Artificial Sequence
  Description of Artificial Sequence: Synthetic oligonucleotide
  Antisense strand to SEQ ID NO: 2371476
uacauuguagucaucacag

SEQ ID NO: 2371478 - RNA, 19 nt, Artificial Sequence
  Description of Artificial Sequence: Synthetic oligonucleotide
  Sense strand starting at position 3660 of SEQ ID NO: 1885839
ugaugacuacaauguauau

SEQ ID NO: 2371479 - RNA, 19 nt, Artificial Sequence
  Description of Artificial Sequence: Synthetic oligonucleotide
  Antisense strand to SEQ ID NO: 2371478
auauacauuguagucauca

SEQ ID NO: 2371480 - RNA, 19 nt, Artificial Sequence
  Description of Artificial Sequence: Synthetic oligonucleotide
  Sense strand starting at position 3679 of SEQ ID NO: 1885839
acauauaucugugaaauga

SEQ ID NO: 2371481 - RNA, 19 nt, Artificial Sequence
  Description of Artificial Sequence: Synthetic oligonucleotide
  Antisense strand to SEQ ID NO: 2371480
ucauuucacagauauaugu

SEQ ID NO: 2371482 - RNA, 19 nt, Artificial Sequence
  Description of Artificial Sequence: Synthetic oligonucleotide
  Sense strand starting at position 3849 of SEQ ID NO: 1885839
ugagguggugauuauguuu

SEQ ID NO: 2371483 - RNA, 19 nt, Artificial Sequence
  Description of Artificial Sequence: Synthetic oligonucleotide
  Antisense strand to SEQ ID NO: 2371482
aaacauaaucaccaccuca

SEQ ID NO: 2371484 - RNA, 19 nt, Artificial Sequence
  Description of Artificial Sequence: Synthetic oligonucleotide
  Sense strand starting at position 396 of SEQ ID NO: 1885840
uagagauuaggcuagccaa

SEQ ID NO: 2371485 - RNA, 19 nt, Artificial Sequence
  Description of Artificial Sequence: Synthetic oligonucleotide
  Antisense strand to SEQ ID NO: 2371484
uuggcuagccuaaucucua

SEQ ID NO: 2371486 - RNA, 19 nt, Artificial Sequence
  Description of Artificial Sequence: Synthetic oligonucleotide
  Sense strand starting at position 399 of SEQ ID NO: 1885840
agauuaggcuagccaacau

SEQ ID NO: 2371487 - RNA, 19 nt, Artificial Sequence
  Description of Artificial Sequence: Synthetic oligonucleotide
  Antisense strand to SEQ ID NO: 2371486
auguuggcuagccuaaucu

SEQ ID NO: 2371488 - RNA, 19 nt, Artificial Sequence
  Description of Artificial Sequence: Synthetic oligonucleotide
  Sense strand starting at position 664 of SEQ ID NO: 1885840
gcacuuugggagcagagaa

SEQ ID NO: 2371489 - RNA, 19 nt, Artificial Sequence
  Description of Artificial Sequence: Synthetic oligonucleotide
  Antisense strand to SEQ ID NO: 2371488
uucucugcucccaaagugc

SEQ ID NO: 2371490 - RNA, 19 nt, Artificial Sequence
  Description of Artificial Sequence: Synthetic oligonucleotide
  Sense strand starting at position 815 of SEQ ID NO: 1885840
uuaagaugucaggauugcu

SEQ ID NO: 2371491 - RNA, 19 nt, Artificial Sequence
  Description of Artificial Sequence: Synthetic oligonucleotide
  Antisense strand to SEQ ID NO: 2371490
agcaauccugacaucuuaa

SEQ ID NO: 2371492 - RNA, 19 nt, Artificial Sequence
  Description of Artificial Sequence: Synthetic oligonucleotide
  Sense strand starting at position 852 of SEQ ID NO: 1885840
guuauagugagcuacgaua

SEQ ID NO: 2371493 - RNA, 19 nt, Artificial Sequence
  Description of Artificial Sequence: Synthetic oligonucleotide
  Antisense strand to SEQ ID NO: 2371492
uaucguagcucacuauaac

SEQ ID NO: 2371494 - RNA, 19 nt, Artificial Sequence
  Description of Artificial Sequence: Synthetic oligonucleotide
  Sense strand starting at position 1024 of SEQ ID NO: 1885840
ggaaacugcucucauuuac

SEQ ID NO: 2371495 - RNA, 19 nt, Artificial Sequence
  Description of Artificial Sequence: Synthetic oligonucleotide
  Antisense strand to SEQ ID NO: 2371494
guaaaugagagcaguuucc

SEQ ID NO: 2371496 - RNA, 19 nt, Artificial Sequence
  Description of Artificial Sequence: Synthetic oligonucleotide
  Sense strand starting at position 1030 of SEQ ID NO: 1885840
ugcucucauuuacaggaaa

SEQ ID NO: 2371497 - RNA, 19 nt, Artificial Sequence
  Description of Artificial Sequence: Synthetic oligonucleotide
  Antisense strand to SEQ ID NO: 2371496
uuuccuguaaaugagagca

SEQ ID NO: 2371498 - RNA, 19 nt, Artificial Sequence
  Description of Artificial Sequence: Synthetic oligonucleotide
  Sense strand starting at position 1170 of SEQ ID NO: 1885840
ggacuugaauaugcaucaa

SEQ ID NO: 2371499 - RNA, 19 nt, Artificial Sequence
  Description of Artificial Sequence: Synthetic oligonucleotide
  Antisense strand to SEQ ID NO: 2371498
uugaugcauauucaagucc

SEQ ID NO: 2371500 - RNA, 19 nt, Artificial Sequence
  Description of Artificial Sequence: Synthetic oligonucleotide
  Sense strand starting at position 1192 of SEQ ID NO: 1885840
acauguuaugagcaucaua

SEQ ID NO: 2371501 - RNA, 19 nt, Artificial Sequence
  Description of Artificial Sequence: Synthetic oligonucleotide
  Antisense strand to SEQ ID NO: 2371500
uaugaugcucauaacaugu

SEQ ID NO: 2371502 - RNA, 19 nt, Artificial Sequence
  Description of Artificial Sequence: Synthetic oligonucleotide
  Sense strand starting at position 1280 of SEQ ID NO: 1885840
guugccacuccucaaugaa

SEQ ID NO: 2371503 - RNA, 19 nt, Artificial Sequence
  Description of Artificial Sequence: Synthetic oligonucleotide
  Antisense strand to SEQ ID NO: 2371502
uucauugaggaguggcaac

SEQ ID NO: 2371504 - RNA, 19 nt, Artificial Sequence
  Description of Artificial Sequence: Synthetic oligonucleotide
  Sense strand starting at position 1709 of SEQ ID NO: 1885840
cagucauuccgagauuaca

SEQ ID NO: 2371505 - RNA, 19 nt, Artificial Sequence
  Description of Artificial Sequence: Synthetic oligonucleotide
  Antisense strand to SEQ ID NO: 2371504
uguaaucucggaaugacug

SEQ ID NO: 2371506 - RNA, 19 nt, Artificial Sequence
  Description of Artificial Sequence: Synthetic oligonucleotide
  Sense strand starting at position 1792 of SEQ ID NO: 1885840
acugcucauguguaacuau

SEQ ID NO: 2371507 - RNA, 19 nt, Artificial Sequence
  Description of Artificial Sequence: Synthetic oligonucleotide
  Antisense strand to SEQ ID NO: 2371506
auaguuacacaugagcagu

SEQ ID NO: 2371508 - RNA, 19 nt, Artificial Sequence
  Description of Artificial Sequence: Synthetic oligonucleotide
  Sense strand starting at position 1799 of SEQ ID NO: 1885840
auguguaacuaucuacuuu

SEQ ID NO: 2371509 - RNA, 19 nt, Artificial Sequence
  Description of Artificial Sequence: Synthetic oligonucleotide
  Antisense strand to SEQ ID NO: 2371508
aaaguagauaguuacacau

SEQ ID NO: 2371510 - RNA, 19 nt, Artificial Sequence
  Description of Artificial Sequence: Synthetic oligonucleotide
  Sense strand starting at position 1842 of SEQ ID NO: 1885840
gaaugaaacuuggaggacu

SEQ ID NO: 2371511 - RNA, 19 nt, Artificial Sequence
  Description of Artificial Sequence: Synthetic oligonucleotide
  Antisense strand to SEQ ID NO: 2371510
aguccuccaaguuucauuc

SEQ ID NO: 2371512 - RNA, 19 nt, Artificial Sequence
  Description of Artificial Sequence: Synthetic oligonucleotide
  Sense strand starting at position 1854 of SEQ ID NO: 1885840
gaggacuuguaguucuauc

SEQ ID NO: 2371513 - RNA, 19 nt, Artificial Sequence
  Description of Artificial Sequence: Synthetic oligonucleotide
  Antisense strand to SEQ ID NO: 2371512
gauagaacuacaaguccuc

SEQ ID NO: 2371514 - RNA, 19 nt, Artificial Sequence
  Description of Artificial Sequence: Synthetic oligonucleotide
  Sense strand starting at position 1864 of SEQ ID NO: 1885840
aguucuaucagguaguuua

SEQ ID NO: 2371515 - RNA, 19 nt, Artificial Sequence
  Description of Artificial Sequence: Synthetic oligonucleotide
  Antisense strand to SEQ ID NO: 2371514
uaaacuaccugauagaacu

SEQ ID NO: 2371516 - RNA, 19 nt, Artificial Sequence
  Description of Artificial Sequence: Synthetic oligonucleotide
  Sense strand starting at position 1867 of SEQ ID NO: 1885840
ucuaucagguaguuuaagu

SEQ ID NO: 2371517 - RNA, 19 nt, Artificial Sequence
  Description of Artificial Sequence: Synthetic oligonucleotide
  Antisense strand to SEQ ID NO: 2371516
acuuaaacuaccugauaga

SEQ ID NO: 2371518 - RNA, 19 nt, Artificial Sequence
  Description of Artificial Sequence: Synthetic oligonucleotide
  Sense strand starting at position 1872 of SEQ ID NO: 1885840
cagguaguuuaagugagua

SEQ ID NO: 2371519 - RNA, 19 nt, Artificial Sequence
  Description of Artificial Sequence: Synthetic oligonucleotide
  Antisense strand to SEQ ID NO: 2371518
uacucacuuaaacuaccug

SEQ ID NO: 2371520 - RNA, 19 nt, Artificial Sequence
  Description of Artificial Sequence: Synthetic oligonucleotide
  Sense strand starting at position 1877 of SEQ ID NO: 1885840
aguuuaagugaguacggua

SEQ ID NO: 2371521 - RNA, 19 nt, Artificial Sequence
  Description of Artificial Sequence: Synthetic oligonucleotide
  Antisense strand to SEQ ID NO: 2371520
uaccguacucacuuaaacu

SEQ ID NO: 2371522 - RNA, 19 nt, Artificial Sequence
  Description of Artificial Sequence: Synthetic oligonucleotide
  Sense strand starting at position 2110 of SEQ ID NO: 1885840
uuaugcuaacacggugaaa

SEQ ID NO: 2371523 - RNA, 19 nt, Artificial Sequence
  Description of Artificial Sequence: Synthetic oligonucleotide
  Antisense strand to SEQ ID NO: 2371522
uuucaccguguuagcauaa

SEQ ID NO: 2371524 - RNA, 19 nt, Artificial Sequence
  Description of Artificial Sequence: Synthetic oligonucleotide
  Sense strand starting at position 2381 of SEQ ID NO: 1885840
aaagaaacucuguguggga

SEQ ID NO: 2371525 - RNA, 19 nt, Artificial Sequence
  Description of Artificial Sequence: Synthetic oligonucleotide
  Antisense strand to SEQ ID NO: 2371524
ucccacacagaguuucuuu

SEQ ID NO: 2371526 - RNA, 19 nt, Artificial Sequence
  Description of Artificial Sequence: Synthetic oligonucleotide
  Sense strand starting at position 2382 of SEQ ID NO: 1885840
aagaaacucugugugggaa

SEQ ID NO: 2371527 - RNA, 19 nt, Artificial Sequence
  Description of Artificial Sequence: Synthetic oligonucleotide
  Antisense strand to SEQ ID NO: 2371526
uucccacacagaguuucuu

SEQ ID NO: 2371528 - RNA, 19 nt, Artificial Sequence
  Description of Artificial Sequence: Synthetic oligonucleotide
  Sense strand starting at position 2383 of SEQ ID NO: 1885840
agaaacucugugugggaau

SEQ ID NO: 2371529 - RNA, 19 nt, Artificial Sequence
  Description of Artificial Sequence: Synthetic oligonucleotide
  Antisense strand to SEQ ID NO: 2371528
auucccacacagaguuucu

SEQ ID NO: 2371530 - RNA, 19 nt, Artificial Sequence
  Description of Artificial Sequence: Synthetic oligonucleotide
  Sense strand starting at position 2396 of SEQ ID NO: 1885840
gggaauuugucacaucuua

SEQ ID NO: 2371531 - RNA, 19 nt, Artificial Sequence
  Description of Artificial Sequence: Synthetic oligonucleotide
  Antisense strand to SEQ ID NO: 2371530
uaagaugugacaaauuccc

SEQ ID NO: 2371532 - RNA, 19 nt, Artificial Sequence
  Description of Artificial Sequence: Synthetic oligonucleotide
  Sense strand starting at position 2547 of SEQ ID NO: 1885840
gucugaauacuuggcaaau

SEQ ID NO: 2371533 - RNA, 19 nt, Artificial Sequence
  Description of Artificial Sequence: Synthetic oligonucleotide
  Antisense strand to SEQ ID NO: 2371532
auuugccaaguauucagac

SEQ ID NO: 2371534 - RNA, 19 nt, Artificial Sequence
  Description of Artificial Sequence: Synthetic oligonucleotide
  Sense strand starting at position 2548 of SEQ ID NO: 1885840
ucugaauacuuggcaaaua

SEQ ID NO: 2371535 - RNA, 19 nt, Artificial Sequence
  Description of Artificial Sequence: Synthetic oligonucleotide
  Antisense strand to SEQ ID NO: 2371534
uauuugccaaguauucaga

SEQ ID NO: 2371536 - RNA, 19 nt, Artificial Sequence
  Description of Artificial Sequence: Synthetic oligonucleotide
  Sense strand starting at position 2709 of SEQ ID NO: 1885840
ugcucaggagcuuaacuua

SEQ ID NO: 2371537 - RNA, 19 nt, Artificial Sequence
  Description of Artificial Sequence: Synthetic oligonucleotide
  Antisense strand to SEQ ID NO: 2371536
uaaguuaagcuccugagca

SEQ ID NO: 2371538 - RNA, 19 nt, Artificial Sequence
  Description of Artificial Sequence: Synthetic oligonucleotide
  Sense strand starting at position 2944 of SEQ ID NO: 1885840
uuaauaagauugcugcaau

SEQ ID NO: 2371539 - RNA, 19 nt, Artificial Sequence
  Description of Artificial Sequence: Synthetic oligonucleotide
  Antisense strand to SEQ ID NO: 2371538
auugcagcaaucuuauuaa

SEQ ID NO: 2371540 - RNA, 19 nt, Artificial Sequence
  Description of Artificial Sequence: Synthetic oligonucleotide
  Sense strand starting at position 2970 of SEQ ID NO: 1885840
gugagacaugacugggauc

SEQ ID NO: 2371541 - RNA, 19 nt, Artificial Sequence
  Description of Artificial Sequence: Synthetic oligonucleotide
  Antisense strand to SEQ ID NO: 2371540
gaucccagucaugucucac

SEQ ID NO: 2371542 - RNA, 19 nt, Artificial Sequence
  Description of Artificial Sequence: Synthetic oligonucleotide
  Sense strand starting at position 3112 of SEQ ID NO: 1885840
aaauccuuggcuugaagga

SEQ ID NO: 2371543 - RNA, 19 nt, Artificial Sequence
  Description of Artificial Sequence: Synthetic oligonucleotide
  Antisense strand to SEQ ID NO: 2371542
uccuucaagccaaggauuu

SEQ ID NO: 2371544 - RNA, 19 nt, Artificial Sequence
  Description of Artificial Sequence: Synthetic oligonucleotide
  Sense strand starting at position 3132 of SEQ ID NO: 1885840
uggagaagauggcuauacu

SEQ ID NO: 2371545 - RNA, 19 nt, Artificial Sequence
  Description of Artificial Sequence: Synthetic oligonucleotide
  Antisense strand to SEQ ID NO: 2371544
aguauagccaucuucucca

SEQ ID NO: 2371546 - RNA, 19 nt, Artificial Sequence
  Description of Artificial Sequence: Synthetic oligonucleotide
  Sense strand starting at position 3135 of SEQ ID NO: 1885840
agaagauggcuauacuguu

SEQ ID NO: 2371547 - RNA, 19 nt, Artificial Sequence
  Description of Artificial Sequence: Synthetic oligonucleotide
  Antisense strand to SEQ ID NO: 2371546
aacaguauagccaucuucu

SEQ ID NO: 2371548 - RNA, 19 nt, Artificial Sequence
  Description of Artificial Sequence: Synthetic oligonucleotide
  Sense strand starting at position 3144 of SEQ ID NO: 1885840
cuauacuguuguccaaaga

SEQ ID NO: 2371549 - RNA, 19 nt, Artificial Sequence
  Description of Artificial Sequence: Synthetic oligonucleotide
  Antisense strand to SEQ ID NO: 2371548
ucuuuggacaacaguauag

SEQ ID NO: 2371550 - RNA, 19 nt, Artificial Sequence
  Description of Artificial Sequence: Synthetic oligonucleotide
  Sense strand starting at position 3229 of SEQ ID NO: 1885840
ucaacugaccuuugaaguu

SEQ ID NO: 2371551 - RNA, 19 nt, Artificial Sequence
  Description of Artificial Sequence: Synthetic oligonucleotide
  Antisense strand to SEQ ID NO: 2371550
aacuucaaaggucaguuga

SEQ ID NO: 2371552 - RNA, 19 nt, Artificial Sequence
  Description of Artificial Sequence: Synthetic oligonucleotide
  Sense strand starting at position 3640 of SEQ ID NO: 1885840
auagauacacaacguaauu

SEQ ID NO: 2371553 - RNA, 19 nt, Artificial Sequence
  Description of Artificial Sequence: Synthetic oligonucleotide
  Antisense strand to SEQ ID NO: 2371552
aauuacguuguguaucuau

SEQ ID NO: 2371554 - RNA, 19 nt, Artificial Sequence
  Description of Artificial Sequence: Synthetic oligonucleotide
  Sense strand starting at position 3658 of SEQ ID NO: 1885840
uaggguuaaugcuuaagag

SEQ ID NO: 2371555 - RNA, 19 nt, Artificial Sequence
  Description of Artificial Sequence: Synthetic oligonucleotide
  Antisense strand to SEQ ID NO: 2371554
cucuuaagcauuaacccua

SEQ ID NO: 2371556 - RNA, 19 nt, Artificial Sequence
  Description of Artificial Sequence: Synthetic oligonucleotide
  Sense strand starting at position 3796 of SEQ ID NO: 1885840
agauuaacggacugaucuu

SEQ ID NO: 2371557 - RNA, 19 nt, Artificial Sequence
  Description of Artificial Sequence: Synthetic oligonucleotide
  Antisense strand to SEQ ID NO: 2371556
aagaucaguccguuaaucu

SEQ ID NO: 2371558 - RNA, 19 nt, Artificial Sequence
  Description of Artificial Sequence: Synthetic oligonucleotide
  Sense strand starting at position 3885 of SEQ ID NO: 1885840
aauaguuggccaggagcau

SEQ ID NO: 2371559 - RNA, 19 nt, Artificial Sequence
  Description of Artificial Sequence: Synthetic oligonucleotide
  Antisense strand to SEQ ID NO: 2371558
augcuccuggccaacuauu

SEQ ID NO: 2371560 - RNA, 19 nt, Artificial Sequence
  Description of Artificial Sequence: Synthetic oligonucleotide
  Sense strand starting at position 3886 of SEQ ID NO: 1885840
auaguuggccaggagcaua

SEQ ID NO: 2371561 - RNA, 19 nt, Artificial Sequence
  Description of Artificial Sequence: Synthetic oligonucleotide
  Antisense strand to SEQ ID NO: 2371560
uaugcuccuggccaacuau

SEQ ID NO: 2371562 - RNA, 19 nt, Artificial Sequence
  Description of Artificial Sequence: Synthetic oligonucleotide
  Sense strand starting at position 3950 of SEQ ID NO: 1885840
gagggucugcuagaagucu

SEQ ID NO: 2371563 - RNA, 19 nt, Artificial Sequence
  Description of Artificial Sequence: Synthetic oligonucleotide
  Antisense strand to SEQ ID NO: 2371562
agacuucuagcagacccuc

SEQ ID NO: 2371564 - RNA, 19 nt, Artificial Sequence
  Description of Artificial Sequence: Synthetic oligonucleotide
  Sense strand starting at position 133 of SEQ ID NO: 1885841
ccugaaaggucaguuccua

SEQ ID NO: 2371565 - RNA, 19 nt, Artificial Sequence
  Description of Artificial Sequence: Synthetic oligonucleotide
  Antisense strand to SEQ ID NO: 2371564
uaggaacugaccuuucagg

SEQ ID NO: 2371566 - RNA, 19 nt, Artificial Sequence
  Description of Artificial Sequence: Synthetic oligonucleotide
  Sense strand starting at position 176 of SEQ ID NO: 1885841
ucaggaauuuauuagucaa

SEQ ID NO: 2371567 - RNA, 19 nt, Artificial Sequence
  Description of Artificial Sequence: Synthetic oligonucleotide
  Antisense strand to SEQ ID NO: 2371566
uugacuaauaaauuccuga

SEQ ID NO: 2371568 - RNA, 19 nt, Artificial Sequence
  Description of Artificial Sequence: Synthetic oligonucleotide
  Sense strand starting at position 437 of SEQ ID NO: 1885841
gggaccuuggagugguuua

SEQ ID NO: 2371569 - RNA, 19 nt, Artificial Sequence
  Description of Artificial Sequence: Synthetic oligonucleotide
  Antisense strand to SEQ ID NO: 2371568
uaaaccacuccaagguccc

SEQ ID NO: 2371570 - RNA, 19 nt, Artificial Sequence
  Description of Artificial Sequence: Synthetic oligonucleotide
  Sense strand starting at position 438 of SEQ ID NO: 1885841
ggaccuuggagugguuuau

SEQ ID NO: 2371571 - RNA, 19 nt, Artificial Sequence
  Description of Artificial Sequence: Synthetic oligonucleotide
  Antisense strand to SEQ ID NO: 2371570
auaaaccacuccaaggucc

SEQ ID NO: 2371572 - RNA, 19 nt, Artificial Sequence
  Description of Artificial Sequence: Synthetic oligonucleotide
  Sense strand starting at position 442 of SEQ ID NO: 1885841
cuuggagugguuuauauuc

SEQ ID NO: 2371573 - RNA, 19 nt, Artificial Sequence
  Description of Artificial Sequence: Synthetic oligonucleotide
  Antisense strand to SEQ ID NO: 2371572
gaauauaaaccacuccaag

SEQ ID NO: 2371574 - RNA, 19 nt, Artificial Sequence
  Description of Artificial Sequence: Synthetic oligonucleotide
  Sense strand starting at position 1033 of SEQ ID NO: 1885841
guagcugggaucuacacau

SEQ ID NO: 2371575 - RNA, 19 nt, Artificial Sequence
  Description of Artificial Sequence: Synthetic oligonucleotide
  Antisense strand to SEQ ID NO: 2371574
auguguagaucccagcuac

SEQ ID NO: 2371576 - RNA, 19 nt, Artificial Sequence
  Description of Artificial Sequence: Synthetic oligonucleotide
  Sense strand starting at position 1533 of SEQ ID NO: 1885841
ugguauagcauccaaugga

SEQ ID NO: 2371577 - RNA, 19 nt, Artificial Sequence
  Description of Artificial Sequence: Synthetic oligonucleotide
  Antisense strand to SEQ ID NO: 2371576
uccauuggaugcuauacca

SEQ ID NO: 2371578 - RNA, 19 nt, Artificial Sequence
  Description of Artificial Sequence: Synthetic oligonucleotide
  Sense strand starting at position 1586 of SEQ ID NO: 1885841
uucguaauugcuugaauuu

SEQ ID NO: 2371579 - RNA, 19 nt, Artificial Sequence
  Description of Artificial Sequence: Synthetic oligonucleotide
  Antisense strand to SEQ ID NO: 2371578
aaauucaagcaauuacgaa

SEQ ID NO: 2371580 - RNA, 19 nt, Artificial Sequence
  Description of Artificial Sequence: Synthetic oligonucleotide
  Sense strand starting at position 1752 of SEQ ID NO: 1885841
auaaacgauuugcaaugaa

SEQ ID NO: 2371581 - RNA, 19 nt, Artificial Sequence
  Description of Artificial Sequence: Synthetic oligonucleotide
  Antisense strand to SEQ ID NO: 2371580
uucauugcaaaucguuuau

SEQ ID NO: 2371582 - RNA, 19 nt, Artificial Sequence
  Description of Artificial Sequence: Synthetic oligonucleotide
  Sense strand starting at position 1816 of SEQ ID NO: 1885841
gggugugaucgucaaagag

SEQ ID NO: 2371583 - RNA, 19 nt, Artificial Sequence
  Description of Artificial Sequence: Synthetic oligonucleotide
  Antisense strand to SEQ ID NO: 2371582
cucuuugacgaucacaccc

SEQ ID NO: 2371584 - RNA, 19 nt, Artificial Sequence
  Description of Artificial Sequence: Synthetic oligonucleotide
  Sense strand starting at position 1831 of SEQ ID NO: 1885841
agagaaauuucucagucau

SEQ ID NO: 2371585 - RNA, 19 nt, Artificial Sequence
  Description of Artificial Sequence: Synthetic oligonucleotide
  Antisense strand to SEQ ID NO: 2371584
augacugagaaauuucucu

SEQ ID NO: 2371586 - RNA, 19 nt, Artificial Sequence
  Description of Artificial Sequence: Synthetic oligonucleotide
  Sense strand starting at position 1984 of SEQ ID NO: 1885841
gcaacucaucauugggaca

SEQ ID NO: 2371587 - RNA, 19 nt, Artificial Sequence
  Description of Artificial Sequence: Synthetic oligonucleotide
  Antisense strand to SEQ ID NO: 2371586
ugucccaaugaugaguugc

SEQ ID NO: 2371588 - RNA, 19 nt, Artificial Sequence
  Description of Artificial Sequence: Synthetic oligonucleotide
  Sense strand starting at position 1989 of SEQ ID NO: 1885841
ucaucauugggacauguuu

SEQ ID NO: 2371589 - RNA, 19 nt, Artificial Sequence
  Description of Artificial Sequence: Synthetic oligonucleotide
  Antisense strand to SEQ ID NO: 2371588
aaacaugucccaaugauga

SEQ ID NO: 2371590 - RNA, 19 nt, Artificial Sequence
  Description of Artificial Sequence: Synthetic oligonucleotide
  Sense strand starting at position 2027 of SEQ ID NO: 1885841
uuaugugucagguaccauu

SEQ ID NO: 2371591 - RNA, 19 nt, Artificial Sequence
  Description of Artificial Sequence: Synthetic oligonucleotide
  Antisense strand to SEQ ID NO: 2371590
aaugguaccugacacauaa

SEQ ID NO: 2371592 - RNA, 19 nt, Artificial Sequence
  Description of Artificial Sequence: Synthetic oligonucleotide
  Sense strand starting at position 2034 of SEQ ID NO: 1885841
ucagguaccauugggagau

SEQ ID NO: 2371593 - RNA, 19 nt, Artificial Sequence
  Description of Artificial Sequence: Synthetic oligonucleotide
  Antisense strand to SEQ ID NO: 2371592
aucucccaaugguaccuga

SEQ ID NO: 2371594 - RNA, 19 nt, Artificial Sequence
  Description of Artificial Sequence: Synthetic oligonucleotide
  Sense strand starting at position 2338 of SEQ ID NO: 1885841
uaagaaucccauuggguuc

SEQ ID NO: 2371595 - RNA, 19 nt, Artificial Sequence
  Description of Artificial Sequence: Synthetic oligonucleotide
  Antisense strand to SEQ ID NO: 2371594
gaacccaaugggauucuua

SEQ ID NO: 2371596 - RNA, 19 nt, Artificial Sequence
  Description of Artificial Sequence: Synthetic oligonucleotide
  Sense strand starting at position 2356 of SEQ ID NO: 1885841
cagucaaggcuagaguuau

SEQ ID NO: 2371597 - RNA, 19 nt, Artificial Sequence
  Description of Artificial Sequence: Synthetic oligonucleotide
  Antisense strand to SEQ ID NO: 2371596
auaacucuagccuugacug

SEQ ID NO: 2371598 - RNA, 19 nt, Artificial Sequence
  Description of Artificial Sequence: Synthetic oligonucleotide
  Sense strand starting at position 2420 of SEQ ID NO: 1885841
acccuucuacuaugucaga

SEQ ID NO: 2371599 - RNA, 19 nt, Artificial Sequence
  Description of Artificial Sequence: Synthetic oligonucleotide
  Antisense strand to SEQ ID NO: 2371598
ucugacauaguagaagggu

SEQ ID NO: 2371600 - RNA, 19 nt, Artificial Sequence
  Description of Artificial Sequence: Synthetic oligonucleotide
  Sense strand starting at position 2439 of SEQ ID NO: 1885841
gaaguuauccaacacucga

SEQ ID NO: 2371601 - RNA, 19 nt, Artificial Sequence
  Description of Artificial Sequence: Synthetic oligonucleotide
  Antisense strand to SEQ ID NO: 2371600
ucgaguguuggauaacuuc

SEQ ID NO: 2371602 - RNA, 19 nt, Artificial Sequence
  Description of Artificial Sequence: Synthetic oligonucleotide
  Sense strand starting at position 2453 of SEQ ID NO: 1885841
cucgauguucugcugcaau

SEQ ID NO: 2371603 - RNA, 19 nt, Artificial Sequence
  Description of Artificial Sequence: Synthetic oligonucleotide
  Antisense strand to SEQ ID NO: 2371602
auugcagcagaacaucgag

SEQ ID NO: 2371604 - RNA, 19 nt, Artificial Sequence
  Description of Artificial Sequence: Synthetic oligonucleotide
  Sense strand starting at position 2464 of SEQ ID NO: 1885841
gcugcaauugcuuugucau

SEQ ID NO: 2371605 - RNA, 19 nt, Artificial Sequence
  Description of Artificial Sequence: Synthetic oligonucleotide
  Antisense strand to SEQ ID NO: 2371604
augacaaagcaauugcagc

SEQ ID NO: 2371606 - RNA, 19 nt, Artificial Sequence
  Description of Artificial Sequence: Synthetic oligonucleotide
  Sense strand starting at position 2541 of SEQ ID NO: 1885841
uuucucauagccuagaaga

SEQ ID NO: 2371607 - RNA, 19 nt, Artificial Sequence
  Description of Artificial Sequence: Synthetic oligonucleotide
  Antisense strand to SEQ ID NO: 2371606
ucuucuaggcuaugagaaa

SEQ ID NO: 2371608 - RNA, 19 nt, Artificial Sequence
  Description of Artificial Sequence: Synthetic oligonucleotide
  Sense strand starting at position 2668 of SEQ ID NO: 1885841
guuagaauguuaucuugga

SEQ ID NO: 2371609 - RNA, 19 nt, Artificial Sequence
  Description of Artificial Sequence: Synthetic oligonucleotide
  Antisense strand to SEQ ID NO: 2371608
uccaagauaacauucuaac

SEQ ID NO: 2371610 - RNA, 19 nt, Artificial Sequence
  Description of Artificial Sequence: Synthetic oligonucleotide
  Sense strand starting at position 2669 of SEQ ID NO: 1885841
uuagaauguuaucuuggac

SEQ ID NO: 2371611 - RNA, 19 nt, Artificial Sequence
  Description of Artificial Sequence: Synthetic oligonucleotide
  Antisense strand to SEQ ID NO: 2371610
guccaagauaacauucuaa

SEQ ID NO: 2371612 - RNA, 19 nt, Artificial Sequence
  Description of Artificial Sequence: Synthetic oligonucleotide
  Sense strand starting at position 2672 of SEQ ID NO: 1885841
gaauguuaucuuggacaac

SEQ ID NO: 2371613 - RNA, 19 nt, Artificial Sequence
  Description of Artificial Sequence: Synthetic oligonucleotide
  Antisense strand to SEQ ID NO: 2371612
guuguccaagauaacauuc

SEQ ID NO: 2371614 - RNA, 19 nt, Artificial Sequence
  Description of Artificial Sequence: Synthetic oligonucleotide
  Sense strand starting at position 2683 of SEQ ID NO: 1885841
uggacaacuacuggguuua

SEQ ID NO: 2371615 - RNA, 19 nt, Artificial Sequence
  Description of Artificial Sequence: Synthetic oligonucleotide
  Antisense strand to SEQ ID NO: 2371614
uaaacccaguaguugucca

SEQ ID NO: 2371616 - RNA, 19 nt, Artificial Sequence
  Description of Artificial Sequence: Synthetic oligonucleotide
  Sense strand starting at position 2684 of SEQ ID NO: 1885841
ggacaacuacuggguuuau

SEQ ID NO: 2371617 - RNA, 19 nt, Artificial Sequence
  Description of Artificial Sequence: Synthetic oligonucleotide
  Antisense strand to SEQ ID NO: 2371616
auaaacccaguaguugucc

SEQ ID NO: 2371618 - RNA, 19 nt, Artificial Sequence
  Description of Artificial Sequence: Synthetic oligonucleotide
  Sense strand starting at position 2685 of SEQ ID NO: 1885841
gacaacuacuggguuuauu

SEQ ID NO: 2371619 - RNA, 19 nt, Artificial Sequence
  Description of Artificial Sequence: Synthetic oligonucleotide
  Antisense strand to SEQ ID NO: 2371618
aauaaacccaguaguuguc

SEQ ID NO: 2371620 - RNA, 19 nt, Artificial Sequence
  Description of Artificial Sequence: Synthetic oligonucleotide
  Sense strand starting at position 2693 of SEQ ID NO: 1885841
cuggguuuauuacuauauu

SEQ ID NO: 2371621 - RNA, 19 nt, Artificial Sequence
  Description of Artificial Sequence: Synthetic oligonucleotide
  Antisense strand to SEQ ID NO: 2371620
aauauaguaauaaacccag

SEQ ID NO: 2371622 - RNA, 19 nt, Artificial Sequence
  Description of Artificial Sequence: Synthetic oligonucleotide
  Sense strand starting at position 2758 of SEQ ID NO: 1885841
gacugauagccuuaggcuc

SEQ ID NO: 2371623 - RNA, 19 nt, Artificial Sequence
  Description of Artificial Sequence: Synthetic oligonucleotide
  Antisense strand to SEQ ID NO: 2371622
gagccuaaggcuaucaguc

SEQ ID NO: 2371624 - RNA, 19 nt, Artificial Sequence
  Description of Artificial Sequence: Synthetic oligonucleotide
  Sense strand starting at position 3244 of SEQ ID NO: 1885841
caaagucacuuggcugaaa

SEQ ID NO: 2371625 - RNA, 19 nt, Artificial Sequence
  Description of Artificial Sequence: Synthetic oligonucleotide
  Antisense strand to SEQ ID NO: 2371624
uuucagccaagugacuuug

SEQ ID NO: 2371626 - RNA, 19 nt, Artificial Sequence
  Description of Artificial Sequence: Synthetic oligonucleotide
  Sense strand starting at position 3247 of SEQ ID NO: 1885841
agucacuuggcugaaaguu

SEQ ID NO: 2371627 - RNA, 19 nt, Artificial Sequence
  Description of Artificial Sequence: Synthetic oligonucleotide
  Antisense strand to SEQ ID NO: 2371626
aacuuucagccaagugacu

SEQ ID NO: 2371628 - RNA, 19 nt, Artificial Sequence
  Description of Artificial Sequence: Synthetic oligonucleotide
  Sense strand starting at position 3437 of SEQ ID NO: 1885841
gcugaacauuuagacaaau

SEQ ID NO: 2371629 - RNA, 19 nt, Artificial Sequence
  Description of Artificial Sequence: Synthetic oligonucleotide
  Antisense strand to SEQ ID NO: 2371628
auuugucuaaauguucagc

SEQ ID NO: 2371630 - RNA, 19 nt, Artificial Sequence
  Description of Artificial Sequence: Synthetic oligonucleotide
  Sense strand starting at position 3513 of SEQ ID NO: 1885841
cugacauagagaugcagau

SEQ ID NO: 2371631 - RNA, 19 nt, Artificial Sequence
  Description of Artificial Sequence: Synthetic oligonucleotide
  Antisense strand to SEQ ID NO: 2371630
aucugcaucucuaugucag

SEQ ID NO: 2371632 - RNA, 19 nt, Artificial Sequence
  Description of Artificial Sequence: Synthetic oligonucleotide
  Sense strand starting at position 3522 of SEQ ID NO: 1885841
agaugcagaucucuguaaa

SEQ ID NO: 2371633 - RNA, 19 nt, Artificial Sequence
  Description of Artificial Sequence: Synthetic oligonucleotide
  Antisense strand to SEQ ID NO: 2371632
uuuacagagaucugcaucu

SEQ ID NO: 2371634 - RNA, 19 nt, Artificial Sequence
  Description of Artificial Sequence: Synthetic oligonucleotide
  Sense strand starting at position 3523 of SEQ ID NO: 1885841
gaugcagaucucuguaaag

SEQ ID NO: 2371635 - RNA, 19 nt, Artificial Sequence
  Description of Artificial Sequence: Synthetic oligonucleotide
  Antisense strand to SEQ ID NO: 2371634
cuuuacagagaucugcauc

SEQ ID NO: 2371636 - RNA, 19 nt, Artificial Sequence
  Description of Artificial Sequence: Synthetic oligonucleotide
  Sense strand starting at position 3525 of SEQ ID NO: 1885841
ugcagaucucuguaaagac

SEQ ID NO: 2371637 - RNA, 19 nt, Artificial Sequence
  Description of Artificial Sequence: Synthetic oligonucleotide
  Antisense strand to SEQ ID NO: 2371636
gucuuuacagagaucugca

SEQ ID NO: 2371638 - RNA, 19 nt, Artificial Sequence
  Description of Artificial Sequence: Synthetic oligonucleotide
  Sense strand starting at position 3649 of SEQ ID NO: 1885841
ucugauauuugugaacaaa

SEQ ID NO: 2371639 - RNA, 19 nt, Artificial Sequence
  Description of Artificial Sequence: Synthetic oligonucleotide
  Antisense strand to SEQ ID NO: 2371638
uuuguucacaaauaucaga

SEQ ID NO: 2371640 - RNA, 19 nt, Artificial Sequence
  Description of Artificial Sequence: Synthetic oligonucleotide
  Sense strand starting at position 3730 of SEQ ID NO: 1885841
ggugcuuugccucugaggu

SEQ ID NO: 2371641 - RNA, 19 nt, Artificial Sequence
  Description of Artificial Sequence: Synthetic oligonucleotide
  Antisense strand to SEQ ID NO: 2371640
accucagaggcaaagcacc

SEQ ID NO: 2371642 - RNA, 19 nt, Artificial Sequence
  Description of Artificial Sequence: Synthetic oligonucleotide
  Sense strand starting at position 3950 of SEQ ID NO: 1885841
ugcuaacagugauuagaga

SEQ ID NO: 2371643 - RNA, 19 nt, Artificial Sequence
  Description of Artificial Sequence: Synthetic oligonucleotide
  Antisense strand to SEQ ID NO: 2371642
ucucuaaucacuguuagca

SEQ ID NO: 2371644 - RNA, 19 nt, Artificial Sequence
  Description of Artificial Sequence: Synthetic oligonucleotide
  Sense strand starting at position 97 of SEQ ID NO: 1885842
guaagaucugaauguucuc

SEQ ID NO: 2371645 - RNA, 19 nt, Artificial Sequence
  Description of Artificial Sequence: Synthetic oligonucleotide
  Antisense strand to SEQ ID NO: 2371644
gagaacauucagaucuuac

SEQ ID NO: 2371646 - RNA, 19 nt, Artificial Sequence
  Description of Artificial Sequence: Synthetic oligonucleotide
  Sense strand starting at position 183 of SEQ ID NO: 1885842
uaugcucuccuagagauga

SEQ ID NO: 2371647 - RNA, 19 nt, Artificial Sequence
  Description of Artificial Sequence: Synthetic oligonucleotide
  Antisense strand to SEQ ID NO: 2371646
ucaucucuaggagagcaua

SEQ ID NO: 2371648 - RNA, 19 nt, Artificial Sequence
  Description of Artificial Sequence: Synthetic oligonucleotide
  Sense strand starting at position 549 of SEQ ID NO: 1885842
uuccuuauuggugaacuca

SEQ ID NO: 2371649 - RNA, 19 nt, Artificial Sequence
  Description of Artificial Sequence: Synthetic oligonucleotide
  Antisense strand to SEQ ID NO: 2371648
ugaguucaccaauaaggaa

SEQ ID NO: 2371650 - RNA, 19 nt, Artificial Sequence
  Description of Artificial Sequence: Synthetic oligonucleotide
  Sense strand starting at position 647 of SEQ ID NO: 1885842
ucacaucuagugugggaau

SEQ ID NO: 2371651 - RNA, 19 nt, Artificial Sequence
  Description of Artificial Sequence: Synthetic oligonucleotide
  Antisense strand to SEQ ID NO: 2371650
auucccacacuagauguga

SEQ ID NO: 2371652 - RNA, 19 nt, Artificial Sequence
  Description of Artificial Sequence: Synthetic oligonucleotide
  Sense strand starting at position 658 of SEQ ID NO: 1885842
gugggaauagagugguaau

SEQ ID NO: 2371653 - RNA, 19 nt, Artificial Sequence
  Description of Artificial Sequence: Synthetic oligonucleotide
  Antisense strand to SEQ ID NO: 2371652
auuaccacucuauucccac

SEQ ID NO: 2371654 - RNA, 19 nt, Artificial Sequence
  Description of Artificial Sequence: Synthetic oligonucleotide
  Sense strand starting at position 659 of SEQ ID NO: 1885842
ugggaauagagugguaaug

SEQ ID NO: 2371655 - RNA, 19 nt, Artificial Sequence
  Description of Artificial Sequence: Synthetic oligonucleotide
  Antisense strand to SEQ ID NO: 2371654
cauuaccacucuauuccca

SEQ ID NO: 2371656 - RNA, 19 nt, Artificial Sequence
  Description of Artificial Sequence: Synthetic oligonucleotide
  Sense strand starting at position 669 of SEQ ID NO: 1885842
gugguaaugcugcaauuuc

SEQ ID NO: 2371657 - RNA, 19 nt, Artificial Sequence
  Description of Artificial Sequence: Synthetic oligonucleotide
  Antisense strand to SEQ ID NO: 2371656
gaaauugcagcauuaccac

SEQ ID NO: 2371658 - RNA, 19 nt, Artificial Sequence
  Description of Artificial Sequence: Synthetic oligonucleotide
  Sense strand starting at position 844 of SEQ ID NO: 1885842
uagaaaucuucucuggagu

SEQ ID NO: 2371659 - RNA, 19 nt, Artificial Sequence
  Description of Artificial Sequence: Synthetic oligonucleotide
  Antisense strand to SEQ ID NO: 2371658
acuccagagaagauuucua

SEQ ID NO: 2371660 - RNA, 19 nt, Artificial Sequence
  Description of Artificial Sequence: Synthetic oligonucleotide
  Sense strand starting at position 845 of SEQ ID NO: 1885842
agaaaucuucucuggagua

SEQ ID NO: 2371661 - RNA, 19 nt, Artificial Sequence
  Description of Artificial Sequence: Synthetic oligonucleotide
  Antisense strand to SEQ ID NO: 2371660
uacuccagagaagauuucu

SEQ ID NO: 2371662 - RNA, 19 nt, Artificial Sequence
  Description of Artificial Sequence: Synthetic oligonucleotide
  Sense strand starting at position 850 of SEQ ID NO: 1885842
ucuucucuggaguaauuau

SEQ ID NO: 2371663 - RNA, 19 nt, Artificial Sequence
  Description of Artificial Sequence: Synthetic oligonucleotide
  Antisense strand to SEQ ID NO: 2371662
auaauuacuccagagaaga

SEQ ID NO: 2371664 - RNA, 19 nt, Artificial Sequence
  Description of Artificial Sequence: Synthetic oligonucleotide
  Sense strand starting at position 998 of SEQ ID NO: 1885842
guaaauauuugccuagcac

SEQ ID NO: 2371665 - RNA, 19 nt, Artificial Sequence
  Description of Artificial Sequence: Synthetic oligonucleotide
  Antisense strand to SEQ ID NO: 2371664
gugcuaggcaaauauuuac

SEQ ID NO: 2371666 - RNA, 19 nt, Artificial Sequence
  Description of Artificial Sequence: Synthetic oligonucleotide
  Sense strand starting at position 1066 of SEQ ID NO: 1885842
guuggaagacuggguauua

SEQ ID NO: 2371667 - RNA, 19 nt, Artificial Sequence
  Description of Artificial Sequence: Synthetic oligonucleotide
  Antisense strand to SEQ ID NO: 2371666
uaauacccagucuuccaac

SEQ ID NO: 2371668 - RNA, 19 nt, Artificial Sequence
  Description of Artificial Sequence: Synthetic oligonucleotide
  Sense strand starting at position 1067 of SEQ ID NO: 1885842
uuggaagacuggguauuau

SEQ ID NO: 2371669 - RNA, 19 nt, Artificial Sequence
  Description of Artificial Sequence: Synthetic oligonucleotide
  Antisense strand to SEQ ID NO: 2371668
auaauacccagucuuccaa

SEQ ID NO: 2371670 - RNA, 19 nt, Artificial Sequence
  Description of Artificial Sequence: Synthetic oligonucleotide
  Sense strand starting at position 1177 of SEQ ID NO: 1885842
cuuuaaaucuugcuggaug

SEQ ID NO: 2371671 - RNA, 19 nt, Artificial Sequence
  Description of Artificial Sequence: Synthetic oligonucleotide
  Antisense strand to SEQ ID NO: 2371670
cauccagcaagauuuaaag

SEQ ID NO: 2371672 - RNA, 19 nt, Artificial Sequence
  Description of Artificial Sequence: Synthetic oligonucleotide
  Sense strand starting at position 1344 of SEQ ID NO: 1885842
gguccacaucaaggugauu

SEQ ID NO: 2371673 - RNA, 19 nt, Artificial Sequence
  Description of Artificial Sequence: Synthetic oligonucleotide
  Antisense strand to SEQ ID NO: 2371672
aaucaccuugauguggacc

SEQ ID NO: 2371674 - RNA, 19 nt, Artificial Sequence
  Description of Artificial Sequence: Synthetic oligonucleotide
  Sense strand starting at position 1458 of SEQ ID NO: 1885842
gccaaugguagucaugaaa

SEQ ID NO: 2371675 - RNA, 19 nt, Artificial Sequence
  Description of Artificial Sequence: Synthetic oligonucleotide
  Antisense strand to SEQ ID NO: 2371674
uuucaugacuaccauuggc

SEQ ID NO: 2371676 - RNA, 19 nt, Artificial Sequence
  Description of Artificial Sequence: Synthetic oligonucleotide
  Sense strand starting at position 1540 of SEQ ID NO: 1885842
caaucuaaucgucagguua

SEQ ID NO: 2371677 - RNA, 19 nt, Artificial Sequence
  Description of Artificial Sequence: Synthetic oligonucleotide
  Antisense strand to SEQ ID NO: 2371676
uaaccugacgauuagauug

SEQ ID NO: 2371678 - RNA, 19 nt, Artificial Sequence
  Description of Artificial Sequence: Synthetic oligonucleotide
  Sense strand starting at position 1623 of SEQ ID NO: 1885842
ggauguccaucucccauua

SEQ ID NO: 2371679 - RNA, 19 nt, Artificial Sequence
  Description of Artificial Sequence: Synthetic oligonucleotide
  Antisense strand to SEQ ID NO: 2371678
uaaugggagauggacaucc

SEQ ID NO: 2371680 - RNA, 19 nt, Artificial Sequence
  Description of Artificial Sequence: Synthetic oligonucleotide
  Sense strand starting at position 1745 of SEQ ID NO: 1885842
aguaaagauuaagcuuuga

SEQ ID NO: 2371681 - RNA, 19 nt, Artificial Sequence
  Description of Artificial Sequence: Synthetic oligonucleotide
  Antisense strand to SEQ ID NO: 2371680
ucaaagcuuaaucuuuacu

SEQ ID NO: 2371682 - RNA, 19 nt, Artificial Sequence
  Description of Artificial Sequence: Synthetic oligonucleotide
  Sense strand starting at position 1765 of SEQ ID NO: 1885842
ggaugugggcuauagguca

SEQ ID NO: 2371683 - RNA, 19 nt, Artificial Sequence
  Description of Artificial Sequence: Synthetic oligonucleotide
  Antisense strand to SEQ ID NO: 2371682
ugaccuauagcccacaucc

SEQ ID NO: 2371684 - RNA, 19 nt, Artificial Sequence
  Description of Artificial Sequence: Synthetic oligonucleotide
  Sense strand starting at position 1964 of SEQ ID NO: 1885842
ggugucuccguauuagcau

SEQ ID NO: 2371685 - RNA, 19 nt, Artificial Sequence
  Description of Artificial Sequence: Synthetic oligonucleotide
  Antisense strand to SEQ ID NO: 2371684
augcuaauacggagacacc

SEQ ID NO: 2371686 - RNA, 19 nt, Artificial Sequence
  Description of Artificial Sequence: Synthetic oligonucleotide
  Sense strand starting at position 2113 of SEQ ID NO: 1885842
cuaaauggaucuuuguaag

SEQ ID NO: 2371687 - RNA, 19 nt, Artificial Sequence
  Description of Artificial Sequence: Synthetic oligonucleotide
  Antisense strand to SEQ ID NO: 2371686
cuuacaaagauccauuuag

SEQ ID NO: 2371688 - RNA, 19 nt, Artificial Sequence
  Description of Artificial Sequence: Synthetic oligonucleotide
  Sense strand starting at position 2167 of SEQ ID NO: 1885842
ugaguuuaguaaccuauua

SEQ ID NO: 2371689 - RNA, 19 nt, Artificial Sequence
  Description of Artificial Sequence: Synthetic oligonucleotide
  Antisense strand to SEQ ID NO: 2371688
uaauagguuacuaaacuca

SEQ ID NO: 2371690 - RNA, 19 nt, Artificial Sequence
  Description of Artificial Sequence: Synthetic oligonucleotide
  Sense strand starting at position 2387 of SEQ ID NO: 1885842
acuggagagucaccauauu

SEQ ID NO: 2371691 - RNA, 19 nt, Artificial Sequence
  Description of Artificial Sequence: Synthetic oligonucleotide
  Antisense strand to SEQ ID NO: 2371690
aauauggugacucuccagu

SEQ ID NO: 2371692 - RNA, 19 nt, Artificial Sequence
  Description of Artificial Sequence: Synthetic oligonucleotide
  Sense strand starting at position 2399 of SEQ ID NO: 1885842
ccauauucuccaggaguca

SEQ ID NO: 2371693 - RNA, 19 nt, Artificial Sequence
  Description of Artificial Sequence: Synthetic oligonucleotide
  Antisense strand to SEQ ID NO: 2371692
ugacuccuggagaauaugg

SEQ ID NO: 2371694 - RNA, 19 nt, Artificial Sequence
  Description of Artificial Sequence: Synthetic oligonucleotide
  Sense strand starting at position 2495 of SEQ ID NO: 1885842
ggccacuucccugagagua

SEQ ID NO: 2371695 - RNA, 19 nt, Artificial Sequence
  Description of Artificial Sequence: Synthetic oligonucleotide
  Antisense strand to SEQ ID NO: 2371694
uacucucagggaaguggcc

SEQ ID NO: 2371696 - RNA, 19 nt, Artificial Sequence
  Description of Artificial Sequence: Synthetic oligonucleotide
  Sense strand starting at position 2536 of SEQ ID NO: 1885842
acgguuuaucaggacacga

SEQ ID NO: 2371697 - RNA, 19 nt, Artificial Sequence
  Description of Artificial Sequence: Synthetic oligonucleotide
  Antisense strand to SEQ ID NO: 2371696
ucguguccugauaaaccgu

SEQ ID NO: 2371698 - RNA, 19 nt, Artificial Sequence
  Description of Artificial Sequence: Synthetic oligonucleotide
  Sense strand starting at position 2538 of SEQ ID NO: 1885842
gguuuaucaggacacgauc

SEQ ID NO: 2371699 - RNA, 19 nt, Artificial Sequence
  Description of Artificial Sequence: Synthetic oligonucleotide
  Antisense strand to SEQ ID NO: 2371698
gaucguguccugauaaacc

SEQ ID NO: 2371700 - RNA, 19 nt, Artificial Sequence
  Description of Artificial Sequence: Synthetic oligonucleotide
  Sense strand starting at position 2585 of SEQ ID NO: 1885842
uuaagagucugaguacuag

SEQ ID NO: 2371701 - RNA, 19 nt, Artificial Sequence
  Description of Artificial Sequence: Synthetic oligonucleotide
  Antisense strand to SEQ ID NO: 2371700
cuaguacucagacucuuaa

SEQ ID NO: 2371702 - RNA, 19 nt, Artificial Sequence
  Description of Artificial Sequence: Synthetic oligonucleotide
  Sense strand starting at position 2697 of SEQ ID NO: 1885842
cuaagucaacugggaaguu

SEQ ID NO: 2371703 - RNA, 19 nt, Artificial Sequence
  Description of Artificial Sequence: Synthetic oligonucleotide
  Antisense strand to SEQ ID NO: 2371702
aacuucccaguugacuuag

SEQ ID NO: 2371704 - RNA, 19 nt, Artificial Sequence
  Description of Artificial Sequence: Synthetic oligonucleotide
  Sense strand starting at position 2904 of SEQ ID NO: 1885842
ggucauuuguucuccaucu

SEQ ID NO: 2371705 - RNA, 19 nt, Artificial Sequence
  Description of Artificial Sequence: Synthetic oligonucleotide
  Antisense strand to SEQ ID NO: 2371704
agauggagaacaaaugacc

SEQ ID NO: 2371706 - RNA, 19 nt, Artificial Sequence
  Description of Artificial Sequence: Synthetic oligonucleotide
  Sense strand starting at position 2905 of SEQ ID NO: 1885842
gucauuuguucuccaucuu

SEQ ID NO: 2371707 - RNA, 19 nt, Artificial Sequence
  Description of Artificial Sequence: Synthetic oligonucleotide
  Antisense strand to SEQ ID NO: 2371706
aagauggagaacaaaugac

SEQ ID NO: 2371708 - RNA, 19 nt, Artificial Sequence
  Description of Artificial Sequence: Synthetic oligonucleotide
  Sense strand starting at position 3014 of SEQ ID NO: 1885842
cccauagaaugugugagaa

SEQ ID NO: 2371709 - RNA, 19 nt, Artificial Sequence
  Description of Artificial Sequence: Synthetic oligonucleotide
  Antisense strand to SEQ ID NO: 2371708
uucucacacauucuauggg

SEQ ID NO: 2371710 - RNA, 19 nt, Artificial Sequence
  Description of Artificial Sequence: Synthetic oligonucleotide
  Sense strand starting at position 3066 of SEQ ID NO: 1885842
uuauaugggcuuugaauaa

SEQ ID NO: 2371711 - RNA, 19 nt, Artificial Sequence
  Description of Artificial Sequence: Synthetic oligonucleotide
  Antisense strand to SEQ ID NO: 2371710
uuauucaaagcccauauaa

SEQ ID NO: 2371712 - RNA, 19 nt, Artificial Sequence
  Description of Artificial Sequence: Synthetic oligonucleotide
  Sense strand starting at position 3363 of SEQ ID NO: 1885842
gguggaacacuccgggaaa

SEQ ID NO: 2371713 - RNA, 19 nt, Artificial Sequence
  Description of Artificial Sequence: Synthetic oligonucleotide
  Antisense strand to SEQ ID NO: 2371712
uuucccggaguguuccacc

SEQ ID NO: 2371714 - RNA, 19 nt, Artificial Sequence
  Description of Artificial Sequence: Synthetic oligonucleotide
  Sense strand starting at position 3454 of SEQ ID NO: 1885842
ccucgugcucuagcuuuaa

SEQ ID NO: 2371715 - RNA, 19 nt, Artificial Sequence
  Description of Artificial Sequence: Synthetic oligonucleotide
  Antisense strand to SEQ ID NO: 2371714
uuaaagcuagagcacgagg

SEQ ID NO: 2371716 - RNA, 19 nt, Artificial Sequence
  Description of Artificial Sequence: Synthetic oligonucleotide
  Sense strand starting at position 3457 of SEQ ID NO: 1885842
cgugcucuagcuuuaaagu

SEQ ID NO: 2371717 - RNA, 19 nt, Artificial Sequence
  Description of Artificial Sequence: Synthetic oligonucleotide
  Antisense strand to SEQ ID NO: 2371716
acuuuaaagcuagagcacg

SEQ ID NO: 2371718 - RNA, 19 nt, Artificial Sequence
  Description of Artificial Sequence: Synthetic oligonucleotide
  Sense strand starting at position 3621 of SEQ ID NO: 1885842
gcuggugcuccugcuugau

SEQ ID NO: 2371719 - RNA, 19 nt, Artificial Sequence
  Description of Artificial Sequence: Synthetic oligonucleotide
  Antisense strand to SEQ ID NO: 2371718
aucaagcaggagcaccagc

SEQ ID NO: 2371720 - RNA, 19 nt, Artificial Sequence
  Description of Artificial Sequence: Synthetic oligonucleotide
  Sense strand starting at position 3637 of SEQ ID NO: 1885842
gaugguucugcauauaauu

SEQ ID NO: 2371721 - RNA, 19 nt, Artificial Sequence
  Description of Artificial Sequence: Synthetic oligonucleotide
  Antisense strand to SEQ ID NO: 2371720
aauuauaugcagaaccauc

SEQ ID NO: 2371722 - RNA, 19 nt, Artificial Sequence
  Description of Artificial Sequence: Synthetic oligonucleotide
  Sense strand starting at position 3862 of SEQ ID NO: 1885842
gaagcaauucuauacggua

SEQ ID NO: 2371723 - RNA, 19 nt, Artificial Sequence
  Description of Artificial Sequence: Synthetic oligonucleotide
  Antisense strand to SEQ ID NO: 2371722
uaccguauagaauugcuuc

SEQ ID NO: 2371724 - RNA, 19 nt, Artificial Sequence
  Description of Artificial Sequence: Synthetic oligonucleotide
  Sense strand starting at position 68 of SEQ ID NO: 1885843
gguaucguccaucagggua

SEQ ID NO: 2371725 - RNA, 19 nt, Artificial Sequence
  Description of Artificial Sequence: Synthetic oligonucleotide
  Antisense strand to SEQ ID NO: 2371724
uacccugauggacgauacc

SEQ ID NO: 2371726 - RNA, 19 nt, Artificial Sequence
  Description of Artificial Sequence: Synthetic oligonucleotide
  Sense strand starting at position 317 of SEQ ID NO: 1885843
gugugaaaugauggucauc

SEQ ID NO: 2371727 - RNA, 19 nt, Artificial Sequence
  Description of Artificial Sequence: Synthetic oligonucleotide
  Antisense strand to SEQ ID NO: 2371726
gaugaccaucauuucacac

SEQ ID NO: 2371728 - RNA, 19 nt, Artificial Sequence
  Description of Artificial Sequence: Synthetic oligonucleotide
  Sense strand starting at position 319 of SEQ ID NO: 1885843
gugaaaugauggucaucac

SEQ ID NO: 2371729 - RNA, 19 nt, Artificial Sequence
  Description of Artificial Sequence: Synthetic oligonucleotide
  Antisense strand to SEQ ID NO: 2371728
gugaugaccaucauuucac

SEQ ID NO: 2371730 - RNA, 19 nt, Artificial Sequence
  Description of Artificial Sequence: Synthetic oligonucleotide
  Sense strand starting at position 322 of SEQ ID NO: 1885843
aaaugauggucaucacugu

SEQ ID NO: 2371731 - RNA, 19 nt, Artificial Sequence
  Description of Artificial Sequence: Synthetic oligonucleotide
  Antisense strand to SEQ ID NO: 2371730
acagugaugaccaucauuu

SEQ ID NO: 2371732 - RNA, 19 nt, Artificial Sequence
  Description of Artificial Sequence: Synthetic oligonucleotide
  Sense strand starting at position 329 of SEQ ID NO: 1885843
ggucaucacuguucccuga

SEQ ID NO: 2371733 - RNA, 19 nt, Artificial Sequence
  Description of Artificial Sequence: Synthetic oligonucleotide
  Antisense strand to SEQ ID NO: 2371732
ucagggaacagugaugacc

SEQ ID NO: 2371734 - RNA, 19 nt, Artificial Sequence
  Description of Artificial Sequence: Synthetic oligonucleotide
  Sense strand starting at position 333 of SEQ ID NO: 1885843
aucacuguucccugaagcu

SEQ ID NO: 2371735 - RNA, 19 nt, Artificial Sequence
  Description of Artificial Sequence: Synthetic oligonucleotide
  Antisense strand to SEQ ID NO: 2371734
agcuucagggaacagugau

SEQ ID NO: 2371736 - RNA, 19 nt, Artificial Sequence
  Description of Artificial Sequence: Synthetic oligonucleotide
  Sense strand starting at position 738 of SEQ ID NO: 1885843
ggugucacguugaagaaga

SEQ ID NO: 2371737 - RNA, 19 nt, Artificial Sequence
  Description of Artificial Sequence: Synthetic oligonucleotide
  Antisense strand to SEQ ID NO: 2371736
ucuucuucaacgugacacc

SEQ ID NO: 2371738 - RNA, 19 nt, Artificial Sequence
  Description of Artificial Sequence: Synthetic oligonucleotide
  Sense strand starting at position 907 of SEQ ID NO: 1885843
ugguuaagagccuagaauu

SEQ ID NO: 2371739 - RNA, 19 nt, Artificial Sequence
  Description of Artificial Sequence: Synthetic oligonucleotide
  Antisense strand to SEQ ID NO: 2371738
aauucuaggcucuuaacca

SEQ ID NO: 2371740 - RNA, 19 nt, Artificial Sequence
  Description of Artificial Sequence: Synthetic oligonucleotide
  Sense strand starting at position 945 of SEQ ID NO: 1885843
gcaaucuuaccucggacaa

SEQ ID NO: 2371741 - RNA, 19 nt, Artificial Sequence
  Description of Artificial Sequence: Synthetic oligonucleotide
  Antisense strand to SEQ ID NO: 2371740
uuguccgagguaagauugc

SEQ ID NO: 2371742 - RNA, 19 nt, Artificial Sequence
  Description of Artificial Sequence: Synthetic oligonucleotide
  Sense strand starting at position 983 of SEQ ID NO: 1885843
aguuucccaucuguagaga

SEQ ID NO: 2371743 - RNA, 19 nt, Artificial Sequence
  Description of Artificial Sequence: Synthetic oligonucleotide
  Antisense strand to SEQ ID NO: 2371742
ucucuacagaugggaaacu

SEQ ID NO: 2371744 - RNA, 19 nt, Artificial Sequence
  Description of Artificial Sequence: Synthetic oligonucleotide
  Sense strand starting at position 1033 of SEQ ID NO: 1885843
acuggacauacguguucua

SEQ ID NO: 2371745 - RNA, 19 nt, Artificial Sequence
  Description of Artificial Sequence: Synthetic oligonucleotide
  Antisense strand to SEQ ID NO: 2371744
uagaacacguauguccagu

SEQ ID NO: 2371746 - RNA, 19 nt, Artificial Sequence
  Description of Artificial Sequence: Synthetic oligonucleotide
  Sense strand starting at position 1036 of SEQ ID NO: 1885843
ggacauacguguucuaaua

SEQ ID NO: 2371747 - RNA, 19 nt, Artificial Sequence
  Description of Artificial Sequence: Synthetic oligonucleotide
  Antisense strand to SEQ ID NO: 2371746
uauuagaacacguaugucc

SEQ ID NO: 2371748 - RNA, 19 nt, Artificial Sequence
  Description of Artificial Sequence: Synthetic oligonucleotide
  Sense strand starting at position 1078 of SEQ ID NO: 1885843
uucaguguauguuuggaga

SEQ ID NO: 2371749 - RNA, 19 nt, Artificial Sequence
  Description of Artificial Sequence: Synthetic oligonucleotide
  Antisense strand to SEQ ID NO: 2371748
ucuccaaacauacacugaa

SEQ ID NO: 2371750 - RNA, 19 nt, Artificial Sequence
  Description of Artificial Sequence: Synthetic oligonucleotide
  Sense strand starting at position 1257 of SEQ ID NO: 1885843
cgacaucacuuguuaaauu

SEQ ID NO: 2371751 - RNA, 19 nt, Artificial Sequence
  Description of Artificial Sequence: Synthetic oligonucleotide
  Antisense strand to SEQ ID NO: 2371750
aauuuaacaagugaugucg

SEQ ID NO: 2371752 - RNA, 19 nt, Artificial Sequence
  Description of Artificial Sequence: Synthetic oligonucleotide
  Sense strand starting at position 1413 of SEQ ID NO: 1885843
gauaaucggccauauggau

SEQ ID NO: 2371753 - RNA, 19 nt, Artificial Sequence
  Description of Artificial Sequence: Synthetic oligonucleotide
  Antisense strand to SEQ ID NO: 2371752
auccauauggccgauuauc

SEQ ID NO: 2371754 - RNA, 19 nt, Artificial Sequence
  Description of Artificial Sequence: Synthetic oligonucleotide
  Sense strand starting at position 1419 of SEQ ID NO: 1885843
cggccauauggaugaguca

SEQ ID NO: 2371755 - RNA, 19 nt, Artificial Sequence
  Description of Artificial Sequence: Synthetic oligonucleotide
  Antisense strand to SEQ ID NO: 2371754
ugacucauccauauggccg

SEQ ID NO: 2371756 - RNA, 19 nt, Artificial Sequence
  Description of Artificial Sequence: Synthetic oligonucleotide
  Sense strand starting at position 1489 of SEQ ID NO: 1885843
ugcuguagucaacauuaua

SEQ ID NO: 2371757 - RNA, 19 nt, Artificial Sequence
  Description of Artificial Sequence: Synthetic oligonucleotide
  Antisense strand to SEQ ID NO: 2371756
uauaauguugacuacagca

SEQ ID NO: 2371758 - RNA, 19 nt, Artificial Sequence
  Description of Artificial Sequence: Synthetic oligonucleotide
  Sense strand starting at position 2266 of SEQ ID NO: 1885843
gcccuuucuucuucuggaa

SEQ ID NO: 2371759 - RNA, 19 nt, Artificial Sequence
  Description of Artificial Sequence: Synthetic oligonucleotide
  Antisense strand to SEQ ID NO: 2371758
uuccagaagaagaaagggc

SEQ ID NO: 2371760 - RNA, 19 nt, Artificial Sequence
  Description of Artificial Sequence: Synthetic oligonucleotide
  Sense strand starting at position 2561 of SEQ ID NO: 1885843
augugcuguggacaucuaa

SEQ ID NO: 2371761 - RNA, 19 nt, Artificial Sequence
  Description of Artificial Sequence: Synthetic oligonucleotide
  Antisense strand to SEQ ID NO: 2371760
uuagauguccacagcacau

SEQ ID NO: 2371762 - RNA, 19 nt, Artificial Sequence
  Description of Artificial Sequence: Synthetic oligonucleotide
  Sense strand starting at position 2619 of SEQ ID NO: 1885843
gggcuuugaguuuacuagu

SEQ ID NO: 2371763 - RNA, 19 nt, Artificial Sequence
  Description of Artificial Sequence: Synthetic oligonucleotide
  Antisense strand to SEQ ID NO: 2371762
acuaguaaacucaaagccc

SEQ ID NO: 2371764 - RNA, 19 nt, Artificial Sequence
  Description of Artificial Sequence: Synthetic oligonucleotide
  Sense strand starting at position 2636 of SEQ ID NO: 1885843
gugaaagcauaguucgaaa

SEQ ID NO: 2371765 - RNA, 19 nt, Artificial Sequence
  Description of Artificial Sequence: Synthetic oligonucleotide
  Antisense strand to SEQ ID NO: 2371764
uuucgaacuaugcuuucac

SEQ ID NO: 2371766 - RNA, 19 nt, Artificial Sequence
  Description of Artificial Sequence: Synthetic oligonucleotide
  Sense strand starting at position 2638 of SEQ ID NO: 1885843
gaaagcauaguucgaaaug

SEQ ID NO: 2371767 - RNA, 19 nt, Artificial Sequence
  Description of Artificial Sequence: Synthetic oligonucleotide
  Antisense strand to SEQ ID NO: 2371766
cauuucgaacuaugcuuuc

SEQ ID NO: 2371768 - RNA, 19 nt, Artificial Sequence
  Description of Artificial Sequence: Synthetic oligonucleotide
  Sense strand starting at position 3025 of SEQ ID NO: 1885843
cucuuugccuauccagaga

SEQ ID NO: 2371769 - RNA, 19 nt, Artificial Sequence
  Description of Artificial Sequence: Synthetic oligonucleotide
  Antisense strand to SEQ ID NO: 2371768
ucucuggauaggcaaagag

SEQ ID NO: 2371770 - RNA, 19 nt, Artificial Sequence
  Description of Artificial Sequence: Synthetic oligonucleotide
  Sense strand starting at position 3041 of SEQ ID NO: 1885843
agagccuaauucccaagaa

SEQ ID NO: 2371771 - RNA, 19 nt, Artificial Sequence
  Description of Artificial Sequence: Synthetic oligonucleotide
  Antisense strand to SEQ ID NO: 2371770
uucuugggaauuaggcucu

SEQ ID NO: 2371772 - RNA, 19 nt, Artificial Sequence
  Description of Artificial Sequence: Synthetic oligonucleotide
  Sense strand starting at position 3156 of SEQ ID NO: 1885843
ggcccuugagcucagcaaa

SEQ ID NO: 2371773 - RNA, 19 nt, Artificial Sequence
  Description of Artificial Sequence: Synthetic oligonucleotide
  Antisense strand to SEQ ID NO: 2371772
uuugcugagcucaagggcc

SEQ ID NO: 2371774 - RNA, 19 nt, Artificial Sequence
  Description of Artificial Sequence: Synthetic oligonucleotide
  Sense strand starting at position 3290 of SEQ ID NO: 1885843
agaugacaagcucgcuaau

SEQ ID NO: 2371775 - RNA, 19 nt, Artificial Sequence
  Description of Artificial Sequence: Synthetic oligonucleotide
  Antisense strand to SEQ ID NO: 2371774
auuagcgagcuugucaucu

SEQ ID NO: 2371776 - RNA, 19 nt, Artificial Sequence
  Description of Artificial Sequence: Synthetic oligonucleotide
  Sense strand starting at position 3292 of SEQ ID NO: 1885843
augacaagcucgcuaauaa

SEQ ID NO: 2371777 - RNA, 19 nt, Artificial Sequence
  Description of Artificial Sequence: Synthetic oligonucleotide
  Antisense strand to SEQ ID NO: 2371776
uuauuagcgagcuugucau

SEQ ID NO: 2371778 - RNA, 19 nt, Artificial Sequence
  Description of Artificial Sequence: Synthetic oligonucleotide
  Sense strand starting at position 3293 of SEQ ID NO: 1885843
ugacaagcucgcuaauaag

SEQ ID NO: 2371779 - RNA, 19 nt, Artificial Sequence
  Description of Artificial Sequence: Synthetic oligonucleotide
  Antisense strand to SEQ ID NO: 2371778
cuuauuagcgagcuuguca

SEQ ID NO: 2371780 - RNA, 19 nt, Artificial Sequence
  Description of Artificial Sequence: Synthetic oligonucleotide
  Sense strand starting at position 3340 of SEQ ID NO: 1885843
agagcugugaagugagaaa

SEQ ID NO: 2371781 - RNA, 19 nt, Artificial Sequence
  Description of Artificial Sequence: Synthetic oligonucleotide
  Antisense strand to SEQ ID NO: 2371780
uuucucacuucacagcucu

SEQ ID NO: 2371782 - RNA, 19 nt, Artificial Sequence
  Description of Artificial Sequence: Synthetic oligonucleotide
  Sense strand starting at position 3491 of SEQ ID NO: 1885843
gaaucagaucugugugucu

SEQ ID NO: 2371783 - RNA, 19 nt, Artificial Sequence
  Description of Artificial Sequence: Synthetic oligonucleotide
  Antisense strand to SEQ ID NO: 2371782
agacacacagaucugauuc

SEQ ID NO: 2371784 - RNA, 19 nt, Artificial Sequence
  Description of Artificial Sequence: Synthetic oligonucleotide
  Sense strand starting at position 3513 of SEQ ID NO: 1885843
uaagcagaauguucugaga

SEQ ID NO: 2371785 - RNA, 19 nt, Artificial Sequence
  Description of Artificial Sequence: Synthetic oligonucleotide
  Antisense strand to SEQ ID NO: 2371784
ucucagaacauucugcuua

SEQ ID NO: 2371786 - RNA, 19 nt, Artificial Sequence
  Description of Artificial Sequence: Synthetic oligonucleotide
  Sense strand starting at position 3594 of SEQ ID NO: 1885843
ucuuaauauugagcaagaa

SEQ ID NO: 2371787 - RNA, 19 nt, Artificial Sequence
  Description of Artificial Sequence: Synthetic oligonucleotide
  Antisense strand to SEQ ID NO: 2371786
uucuugcucaauauuaaga

SEQ ID NO: 2371788 - RNA, 19 nt, Artificial Sequence
  Description of Artificial Sequence: Synthetic oligonucleotide
  Sense strand starting at position 3617 of SEQ ID NO: 1885843
caucauuauugcgugagau

SEQ ID NO: 2371789 - RNA, 19 nt, Artificial Sequence
  Description of Artificial Sequence: Synthetic oligonucleotide
  Antisense strand to SEQ ID NO: 2371788
aucucacgcaauaaugaug

SEQ ID NO: 2371790 - RNA, 19 nt, Artificial Sequence
  Description of Artificial Sequence: Synthetic oligonucleotide
  Sense strand starting at position 3650 of SEQ ID NO: 1885843
gagagaggguuccaauaaa

SEQ ID NO: 2371791 - RNA, 19 nt, Artificial Sequence
  Description of Artificial Sequence: Synthetic oligonucleotide
  Antisense strand to SEQ ID NO: 2371790
uuuauuggaacccucucuc

SEQ ID NO: 2371792 - RNA, 19 nt, Artificial Sequence
  Description of Artificial Sequence: Synthetic oligonucleotide
  Sense strand starting at position 3674 of SEQ ID NO: 1885843
augaauuaaggaugucugu

SEQ ID NO: 2371793 - RNA, 19 nt, Artificial Sequence
  Description of Artificial Sequence: Synthetic oligonucleotide
  Antisense strand to SEQ ID NO: 2371792
acagacauccuuaauucau

SEQ ID NO: 2371794 - RNA, 19 nt, Artificial Sequence
  Description of Artificial Sequence: Synthetic oligonucleotide
  Sense strand starting at position 3680 of SEQ ID NO: 1885843
uaaggaugucuguggaguu

SEQ ID NO: 2371795 - RNA, 19 nt, Artificial Sequence
  Description of Artificial Sequence: Synthetic oligonucleotide
  Antisense strand to SEQ ID NO: 2371794
aacuccacagacauccuua

SEQ ID NO: 2371796 - RNA, 19 nt, Artificial Sequence
  Description of Artificial Sequence: Synthetic oligonucleotide
  Sense strand starting at position 3690 of SEQ ID NO: 1885843
uguggaguucauugggcaa

SEQ ID NO: 2371797 - RNA, 19 nt, Artificial Sequence
  Description of Artificial Sequence: Synthetic oligonucleotide
  Antisense strand to SEQ ID NO: 2371796
uugcccaaugaacuccaca

SEQ ID NO: 2371798 - RNA, 19 nt, Artificial Sequence
  Description of Artificial Sequence: Synthetic oligonucleotide
  Sense strand starting at position 3693 of SEQ ID NO: 1885843
ggaguucauugggcaacuu

SEQ ID NO: 2371799 - RNA, 19 nt, Artificial Sequence
  Description of Artificial Sequence: Synthetic oligonucleotide
  Antisense strand to SEQ ID NO: 2371798
aaguugcccaaugaacucc

SEQ ID NO: 2371800 - RNA, 19 nt, Artificial Sequence
  Description of Artificial Sequence: Synthetic oligonucleotide
  Sense strand starting at position 3837 of SEQ ID NO: 1885843
ccauaagccuagcuuuaga

SEQ ID NO: 2371801 - RNA, 19 nt, Artificial Sequence
  Description of Artificial Sequence: Synthetic oligonucleotide
  Antisense strand to SEQ ID NO: 2371800
ucuaaagcuaggcuuaugg

SEQ ID NO: 2371802 - RNA, 19 nt, Artificial Sequence
  Description of Artificial Sequence: Synthetic oligonucleotide
  Sense strand starting at position 3888 of SEQ ID NO: 1885843
ugauuucccugaggauaag

SEQ ID NO: 2371803 - RNA, 19 nt, Artificial Sequence
  Description of Artificial Sequence: Synthetic oligonucleotide
  Antisense strand to SEQ ID NO: 2371802
cuuauccucagggaaauca

SEQ ID NO: 2371804 - RNA, 19 nt, Artificial Sequence
  Description of Artificial Sequence: Synthetic oligonucleotide
  Sense strand starting at position 74 of SEQ ID NO: 1885844
ucuaaagaucugggcucaa

SEQ ID NO: 2371805 - RNA, 19 nt, Artificial Sequence
  Description of Artificial Sequence: Synthetic oligonucleotide
  Antisense strand to SEQ ID NO: 2371804
uugagcccagaucuuuaga

SEQ ID NO: 2371806 - RNA, 19 nt, Artificial Sequence
  Description of Artificial Sequence: Synthetic oligonucleotide
  Sense strand starting at position 211 of SEQ ID NO: 1885844
gagguauaaugaguccugu

SEQ ID NO: 2371807 - RNA, 19 nt, Artificial Sequence
  Description of Artificial Sequence: Synthetic oligonucleotide
  Antisense strand to SEQ ID NO: 2371806
acaggacucauuauaccuc

SEQ ID NO: 2371808 - RNA, 19 nt, Artificial Sequence
  Description of Artificial Sequence: Synthetic oligonucleotide
  Sense strand starting at position 658 of SEQ ID NO: 1885844
gucgauauuugaugagacu

SEQ ID NO: 2371809 - RNA, 19 nt, Artificial Sequence
  Description of Artificial Sequence: Synthetic oligonucleotide
  Antisense strand to SEQ ID NO: 2371808
agucucaucaaauaucgac

SEQ ID NO: 2371810 - RNA, 19 nt, Artificial Sequence
  Description of Artificial Sequence: Synthetic oligonucleotide
  Sense strand starting at position 661 of SEQ ID NO: 1885844
gauauuugaugagacuaua

SEQ ID NO: 2371811 - RNA, 19 nt, Artificial Sequence
  Description of Artificial Sequence: Synthetic oligonucleotide
  Antisense strand to SEQ ID NO: 2371810
uauagucucaucaaauauc

SEQ ID NO: 2371812 - RNA, 19 nt, Artificial Sequence
  Description of Artificial Sequence: Synthetic oligonucleotide
  Sense strand starting at position 675 of SEQ ID NO: 1885844
cuauaaaucgcuugccucu

SEQ ID NO: 2371813 - RNA, 19 nt, Artificial Sequence
  Description of Artificial Sequence: Synthetic oligonucleotide
  Antisense strand to SEQ ID NO: 2371812
agaggcaagcgauuuauag

SEQ ID NO: 2371814 - RNA, 19 nt, Artificial Sequence
  Description of Artificial Sequence: Synthetic oligonucleotide
  Sense strand starting at position 865 of SEQ ID NO: 1885844
ggaauuugaucaugggacc

SEQ ID NO: 2371815 - RNA, 19 nt, Artificial Sequence
  Description of Artificial Sequence: Synthetic oligonucleotide
  Antisense strand to SEQ ID NO: 2371814
ggucccaugaucaaauucc

SEQ ID NO: 2371816 - RNA, 19 nt, Artificial Sequence
  Description of Artificial Sequence: Synthetic oligonucleotide
  Sense strand starting at position 945 of SEQ ID NO: 1885844
uuacuuacauuguugugua

SEQ ID NO: 2371817 - RNA, 19 nt, Artificial Sequence
  Description of Artificial Sequence: Synthetic oligonucleotide
  Antisense strand to SEQ ID NO: 2371816
uacacaacaauguaaguaa

SEQ ID NO: 2371818 - RNA, 19 nt, Artificial Sequence
  Description of Artificial Sequence: Synthetic oligonucleotide
  Sense strand starting at position 1992 of SEQ ID NO: 1885844
ggcuguugacuugggaaga

SEQ ID NO: 2371819 - RNA, 19 nt, Artificial Sequence
  Description of Artificial Sequence: Synthetic oligonucleotide
  Antisense strand to SEQ ID NO: 2371818
ucuucccaagucaacagcc

SEQ ID NO: 2371820 - RNA, 19 nt, Artificial Sequence
  Description of Artificial Sequence: Synthetic oligonucleotide
  Sense strand starting at position 2005 of SEQ ID NO: 1885844
ggaagaguccguuggguag

SEQ ID NO: 2371821 - RNA, 19 nt, Artificial Sequence
  Description of Artificial Sequence: Synthetic oligonucleotide
  Antisense strand to SEQ ID NO: 2371820
cuacccaacggacucuucc

SEQ ID NO: 2371822 - RNA, 19 nt, Artificial Sequence
  Description of Artificial Sequence: Synthetic oligonucleotide
  Sense strand starting at position 2016 of SEQ ID NO: 1885844
uuggguagucaagggcuaa

SEQ ID NO: 2371823 - RNA, 19 nt, Artificial Sequence
  Description of Artificial Sequence: Synthetic oligonucleotide
  Antisense strand to SEQ ID NO: 2371822
uuagcccuugacuacccaa

SEQ ID NO: 2371824 - RNA, 19 nt, Artificial Sequence
  Description of Artificial Sequence: Synthetic oligonucleotide
  Sense strand starting at position 2041 of SEQ ID NO: 1885844
gguugacaugaaggcaaau

SEQ ID NO: 2371825 - RNA, 19 nt, Artificial Sequence
  Description of Artificial Sequence: Synthetic oligonucleotide
  Antisense strand to SEQ ID NO: 2371824
auuugccuucaugucaacc

SEQ ID NO: 2371826 - RNA, 19 nt, Artificial Sequence
  Description of Artificial Sequence: Synthetic oligonucleotide
  Sense strand starting at position 2060 of SEQ ID NO: 1885844
uuuccaugcccuggugaga

SEQ ID NO: 2371827 - RNA, 19 nt, Artificial Sequence
  Description of Artificial Sequence: Synthetic oligonucleotide
  Antisense strand to SEQ ID NO: 2371826
ucucaccagggcauggaaa

SEQ ID NO: 2371828 - RNA, 19 nt, Artificial Sequence
  Description of Artificial Sequence: Synthetic oligonucleotide
  Sense strand starting at position 2081 of SEQ ID NO: 1885844
uuggaauccuugcugugaa

SEQ ID NO: 2371829 - RNA, 19 nt, Artificial Sequence
  Description of Artificial Sequence: Synthetic oligonucleotide
  Antisense strand to SEQ ID NO: 2371828
uucacagcaaggauuccaa

SEQ ID NO: 2371830 - RNA, 19 nt, Artificial Sequence
  Description of Artificial Sequence: Synthetic oligonucleotide
  Sense strand starting at position 2084 of SEQ ID NO: 1885844
gaauccuugcugugaacgu

SEQ ID NO: 2371831 - RNA, 19 nt, Artificial Sequence
  Description of Artificial Sequence: Synthetic oligonucleotide
  Antisense strand to SEQ ID NO: 2371830
acguucacagcaaggauuc

SEQ ID NO: 2371832 - RNA, 19 nt, Artificial Sequence
  Description of Artificial Sequence: Synthetic oligonucleotide
  Sense strand starting at position 2121 of SEQ ID NO: 1885844
ggaccauuugcuuggcuau

SEQ ID NO: 2371833 - RNA, 19 nt, Artificial Sequence
  Description of Artificial Sequence: Synthetic oligonucleotide
  Antisense strand to SEQ ID NO: 2371832
auagccaagcaaauggucc

SEQ ID NO: 2371834 - RNA, 19 nt, Artificial Sequence
  Description of Artificial Sequence: Synthetic oligonucleotide
  Sense strand starting at position 2122 of SEQ ID NO: 1885844
gaccauuugcuuggcuauu

SEQ ID NO: 2371835 - RNA, 19 nt, Artificial Sequence
  Description of Artificial Sequence: Synthetic oligonucleotide
  Antisense strand to SEQ ID NO: 2371834
aauagccaagcaaaugguc

SEQ ID NO: 2371836 - RNA, 19 nt, Artificial Sequence
  Description of Artificial Sequence: Synthetic oligonucleotide
  Sense strand starting at position 2181 of SEQ ID NO: 1885844
ggccuucccuccugauuua

SEQ ID NO: 2371837 - RNA, 19 nt, Artificial Sequence
  Description of Artificial Sequence: Synthetic oligonucleotide
  Antisense strand to SEQ ID NO: 2371836
uaaaucaggagggaaggcc

SEQ ID NO: 2371838 - RNA, 19 nt, Artificial Sequence
  Description of Artificial Sequence: Synthetic oligonucleotide
  Sense strand starting at position 2275 of SEQ ID NO: 1885844
gcaugauucucagcacugu

SEQ ID NO: 2371839 - RNA, 19 nt, Artificial Sequence
  Description of Artificial Sequence: Synthetic oligonucleotide
  Antisense strand to SEQ ID NO: 2371838
acagugcugagaaucaugc

SEQ ID NO: 2371840 - RNA, 19 nt, Artificial Sequence
  Description of Artificial Sequence: Synthetic oligonucleotide
  Sense strand starting at position 2284 of SEQ ID NO: 1885844
ucagcacuguguccggaau

SEQ ID NO: 2371841 - RNA, 19 nt, Artificial Sequence
  Description of Artificial Sequence: Synthetic oligonucleotide
  Antisense strand to SEQ ID NO: 2371840
auuccggacacagugcuga

SEQ ID NO: 2371842 - RNA, 19 nt, Artificial Sequence
  Description of Artificial Sequence: Synthetic oligonucleotide
  Sense strand starting at position 2285 of SEQ ID NO: 1885844
cagcacuguguccggaauu

SEQ ID NO: 2371843 - RNA, 19 nt, Artificial Sequence
  Description of Artificial Sequence: Synthetic oligonucleotide
  Antisense strand to SEQ ID NO: 2371842
aauuccggacacagugcug

SEQ ID NO: 2371844 - RNA, 19 nt, Artificial Sequence
  Description of Artificial Sequence: Synthetic oligonucleotide
  Sense strand starting at position 2761 of SEQ ID NO: 1885844
ugcugauugguauagggau

SEQ ID NO: 2371845 - RNA, 19 nt, Artificial Sequence
  Description of Artificial Sequence: Synthetic oligonucleotide
  Antisense strand to SEQ ID NO: 2371844
aucccuauaccaaucagca

SEQ ID NO: 2371846 - RNA, 19 nt, Artificial Sequence
  Description of Artificial Sequence: Synthetic oligonucleotide
  Sense strand starting at position 3057 of SEQ ID NO: 1885844
cuggccaugcaguaagaau

SEQ ID NO: 2371847 - RNA, 19 nt, Artificial Sequence
  Description of Artificial Sequence: Synthetic oligonucleotide
  Antisense strand to SEQ ID NO: 2371846
auucuuacugcauggccag

SEQ ID NO: 2371848 - RNA, 19 nt, Artificial Sequence
  Description of Artificial Sequence: Synthetic oligonucleotide
  Sense strand starting at position 3118 of SEQ ID NO: 1885844
ggacaaaucagauguggcu

SEQ ID NO: 2371849 - RNA, 19 nt, Artificial Sequence
  Description of Artificial Sequence: Synthetic oligonucleotide
  Antisense strand to SEQ ID NO: 2371848
agccacaucugauuugucc

SEQ ID NO: 2371850 - RNA, 19 nt, Artificial Sequence
  Description of Artificial Sequence: Synthetic oligonucleotide
  Sense strand starting at position 3503 of SEQ ID NO: 1885844
guuccuugaaugggucaca

SEQ ID NO: 2371851 - RNA, 19 nt, Artificial Sequence
  Description of Artificial Sequence: Synthetic oligonucleotide
  Antisense strand to SEQ ID NO: 2371850
ugugacccauucaaggaac

SEQ ID NO: 2371852 - RNA, 19 nt, Artificial Sequence
  Description of Artificial Sequence: Synthetic oligonucleotide
  Sense strand starting at position 3551 of SEQ ID NO: 1885844
ggccuugugccaugaaugu

SEQ ID NO: 2371853 - RNA, 19 nt, Artificial Sequence
  Description of Artificial Sequence: Synthetic oligonucleotide
  Antisense strand to SEQ ID NO: 2371852
acauucauggcacaaggcc

SEQ ID NO: 2371854 - RNA, 19 nt, Artificial Sequence
  Description of Artificial Sequence: Synthetic oligonucleotide
  Sense strand starting at position 3584 of SEQ ID NO: 1885844
cauggugccuuggucagau

SEQ ID NO: 2371855 - RNA, 19 nt, Artificial Sequence
  Description of Artificial Sequence: Synthetic oligonucleotide
  Antisense strand to SEQ ID NO: 2371854
aucugaccaaggcaccaug

SEQ ID NO: 2371856 - RNA, 19 nt, Artificial Sequence
  Description of Artificial Sequence: Synthetic oligonucleotide
  Sense strand starting at position 3607 of SEQ ID NO: 1885844
uucgacuugucucccauau

SEQ ID NO: 2371857 - RNA, 19 nt, Artificial Sequence
  Description of Artificial Sequence: Synthetic oligonucleotide
  Antisense strand to SEQ ID NO: 2371856
auaugggagacaagucgaa

SEQ ID NO: 2371858 - RNA, 19 nt, Artificial Sequence
  Description of Artificial Sequence: Synthetic oligonucleotide
  Sense strand starting at position 3609 of SEQ ID NO: 1885844
cgacuugucucccauauuu

SEQ ID NO: 2371859 - RNA, 19 nt, Artificial Sequence
  Description of Artificial Sequence: Synthetic oligonucleotide
  Antisense strand to SEQ ID NO: 2371858
aaauaugggagacaagucg

SEQ ID NO: 2371860 - RNA, 19 nt, Artificial Sequence
  Description of Artificial Sequence: Synthetic oligonucleotide
  Sense strand starting at position 3712 of SEQ ID NO: 1885844
caucguacugaaugguaaa

SEQ ID NO: 2371861 - RNA, 19 nt, Artificial Sequence
  Description of Artificial Sequence: Synthetic oligonucleotide
  Antisense strand to SEQ ID NO: 2371860
uuuaccauucaguacgaug

SEQ ID NO: 2371862 - RNA, 19 nt, Artificial Sequence
  Description of Artificial Sequence: Synthetic oligonucleotide
  Sense strand starting at position 3713 of SEQ ID NO: 1885844
aucguacugaaugguaaau

SEQ ID NO: 2371863 - RNA, 19 nt, Artificial Sequence
  Description of Artificial Sequence: Synthetic oligonucleotide
  Antisense strand to SEQ ID NO: 2371862
auuuaccauucaguacgau

SEQ ID NO: 2371864 - RNA, 19 nt, Artificial Sequence
  Description of Artificial Sequence: Synthetic oligonucleotide
  Sense strand starting at position 3715 of SEQ ID NO: 1885844
cguacugaaugguaaauau

SEQ ID NO: 2371865 - RNA, 19 nt, Artificial Sequence
  Description of Artificial Sequence: Synthetic oligonucleotide
  Antisense strand to SEQ ID NO: 2371864
auauuuaccauucaguacg

SEQ ID NO: 2371866 - RNA, 19 nt, Artificial Sequence
  Description of Artificial Sequence: Synthetic oligonucleotide
  Sense strand starting at position 3739 of SEQ ID NO: 1885844
gucugucuucuacacuaga

SEQ ID NO: 2371867 - RNA, 19 nt, Artificial Sequence
  Description of Artificial Sequence: Synthetic oligonucleotide
  Antisense strand to SEQ ID NO: 2371866
ucuaguguagaagacagac

SEQ ID NO: 2371868 - RNA, 19 nt, Artificial Sequence
  Description of Artificial Sequence: Synthetic oligonucleotide
  Sense strand starting at position 3819 of SEQ ID NO: 1885844
cccagcacucaguauauau

SEQ ID NO: 2371869 - RNA, 19 nt, Artificial Sequence
  Description of Artificial Sequence: Synthetic oligonucleotide
  Antisense strand to SEQ ID NO: 2371868
auauauacugagugcuggg

SEQ ID NO: 2371870 - RNA, 19 nt, Artificial Sequence
  Description of Artificial Sequence: Synthetic oligonucleotide
  Sense strand starting at position 3830 of SEQ ID NO: 1885844
guauauauguaccugguga

SEQ ID NO: 2371871 - RNA, 19 nt, Artificial Sequence
  Description of Artificial Sequence: Synthetic oligonucleotide
  Antisense strand to SEQ ID NO: 2371870
ucaccagguacauauauac

SEQ ID NO: 2371872 - RNA, 19 nt, Artificial Sequence
  Description of Artificial Sequence: Synthetic oligonucleotide
  Sense strand starting at position 3832 of SEQ ID NO: 1885844
auauauguaccuggugaau

SEQ ID NO: 2371873 - RNA, 19 nt, Artificial Sequence
  Description of Artificial Sequence: Synthetic oligonucleotide
  Antisense strand to SEQ ID NO: 2371872
auucaccagguacauauau

SEQ ID NO: 2371874 - RNA, 19 nt, Artificial Sequence
  Description of Artificial Sequence: Synthetic oligonucleotide
  Sense strand starting at position 3835 of SEQ ID NO: 1885844
uauguaccuggugaauauu

SEQ ID NO: 2371875 - RNA, 19 nt, Artificial Sequence
  Description of Artificial Sequence: Synthetic oligonucleotide
  Antisense strand to SEQ ID NO: 2371874
aauauucaccagguacaua

SEQ ID NO: 2371876 - RNA, 19 nt, Artificial Sequence
  Description of Artificial Sequence: Synthetic oligonucleotide
  Sense strand starting at position 3878 of SEQ ID NO: 1885844
uaaguaaugugucuagacu

SEQ ID NO: 2371877 - RNA, 19 nt, Artificial Sequence
  Description of Artificial Sequence: Synthetic oligonucleotide
  Antisense strand to SEQ ID NO: 2371876
agucuagacacauuacuua

SEQ ID NO: 2371878 - RNA, 19 nt, Artificial Sequence
  Description of Artificial Sequence: Synthetic oligonucleotide
  Sense strand starting at position 3879 of SEQ ID NO: 1885844
aaguaaugugucuagacuu

SEQ ID NO: 2371879 - RNA, 19 nt, Artificial Sequence
  Description of Artificial Sequence: Synthetic oligonucleotide
  Antisense strand to SEQ ID NO: 2371878
aagucuagacacauuacuu

SEQ ID NO: 2371880 - RNA, 19 nt, Artificial Sequence
  Description of Artificial Sequence: Synthetic oligonucleotide
  Sense strand starting at position 3968 of SEQ ID NO: 1885844
ugacuuggauucccauuaa

SEQ ID NO: 2371881 - RNA, 19 nt, Artificial Sequence
  Description of Artificial Sequence: Synthetic oligonucleotide
  Antisense strand to SEQ ID NO: 2371880
uuaaugggaauccaaguca

SEQ ID NO: 2371882 - RNA, 19 nt, Artificial Sequence
  Description of Artificial Sequence: Synthetic oligonucleotide
  Sense strand starting at position 3979 of SEQ ID NO: 1885844
cccauuaaggacugaaagu

SEQ ID NO: 2371883 - RNA, 19 nt, Artificial Sequence
  Description of Artificial Sequence: Synthetic oligonucleotide
  Antisense strand to SEQ ID NO: 2371882
acuuucaguccuuaauggg

SEQ ID NO: 2371884 - RNA, 19 nt, Artificial Sequence
  Description of Artificial Sequence: Synthetic oligonucleotide
  Sense strand starting at position 2 of SEQ ID NO: 1885845
gcuuuauaaguauagugaa

SEQ ID NO: 2371885 - RNA, 19 nt, Artificial Sequence
  Description of Artificial Sequence: Synthetic oligonucleotide
  Antisense strand to SEQ ID NO: 2371884
uucacuauacuuauaaagc

SEQ ID NO: 2371886 - RNA, 19 nt, Artificial Sequence
  Description of Artificial Sequence: Synthetic oligonucleotide
  Sense strand starting at position 138 of SEQ ID NO: 1885845
ccuggucacuuguuagagu

SEQ ID NO: 2371887 - RNA, 19 nt, Artificial Sequence
  Description of Artificial Sequence: Synthetic oligonucleotide
  Antisense strand to SEQ ID NO: 2371886
acucuaacaagugaccagg

SEQ ID NO: 2371888 - RNA, 19 nt, Artificial Sequence
  Description of Artificial Sequence: Synthetic oligonucleotide
  Sense strand starting at position 192 of SEQ ID NO: 1885845
guggguuuagcagggauaa

SEQ ID NO: 2371889 - RNA, 19 nt, Artificial Sequence
  Description of Artificial Sequence: Synthetic oligonucleotide
  Antisense strand to SEQ ID NO: 2371888
uuaucccugcuaaacccac

SEQ ID NO: 2371890 - RNA, 19 nt, Artificial Sequence
  Description of Artificial Sequence: Synthetic oligonucleotide
  Sense strand starting at position 193 of SEQ ID NO: 1885845
uggguuuagcagggauaag

SEQ ID NO: 2371891 - RNA, 19 nt, Artificial Sequence
  Description of Artificial Sequence: Synthetic oligonucleotide
  Antisense strand to SEQ ID NO: 2371890
cuuaucccugcuaaaccca

SEQ ID NO: 2371892 - RNA, 19 nt, Artificial Sequence
  Description of Artificial Sequence: Synthetic oligonucleotide
  Sense strand starting at position 204 of SEQ ID NO: 1885845
gggauaagcacuugaccua

SEQ ID NO: 2371893 - RNA, 19 nt, Artificial Sequence
  Description of Artificial Sequence: Synthetic oligonucleotide
  Antisense strand to SEQ ID NO: 2371892
uaggucaagugcuuauccc

SEQ ID NO: 2371894 - RNA, 19 nt, Artificial Sequence
  Description of Artificial Sequence: Synthetic oligonucleotide
  Sense strand starting at position 216 of SEQ ID NO: 1885845
ugaccuaaacugggucaau

SEQ ID NO: 2371895 - RNA, 19 nt, Artificial Sequence
  Description of Artificial Sequence: Synthetic oligonucleotide
  Antisense strand to SEQ ID NO: 2371894
auugacccaguuuagguca

SEQ ID NO: 2371896 - RNA, 19 nt, Artificial Sequence
  Description of Artificial Sequence: Synthetic oligonucleotide
  Sense strand starting at position 217 of SEQ ID NO: 1885845
gaccuaaacugggucaaua

SEQ ID NO: 2371897 - RNA, 19 nt, Artificial Sequence
  Description of Artificial Sequence: Synthetic oligonucleotide
  Antisense strand to SEQ ID NO: 2371896
uauugacccaguuuagguc

SEQ ID NO: 2371898 - RNA, 19 nt, Artificial Sequence
  Description of Artificial Sequence: Synthetic oligonucleotide
  Sense strand starting at position 288 of SEQ ID NO: 1885845
caugguugccagugaucau

SEQ ID NO: 2371899 - RNA, 19 nt, Artificial Sequence
  Description of Artificial Sequence: Synthetic oligonucleotide
  Antisense strand to SEQ ID NO: 2371898
augaucacuggcaaccaug

SEQ ID NO: 2371900 - RNA, 19 nt, Artificial Sequence
  Description of Artificial Sequence: Synthetic oligonucleotide
  Sense strand starting at position 289 of SEQ ID NO: 1885845
augguugccagugaucaug

SEQ ID NO: 2371901 - RNA, 19 nt, Artificial Sequence
  Description of Artificial Sequence: Synthetic oligonucleotide
  Antisense strand to SEQ ID NO: 2371900
caugaucacuggcaaccau

SEQ ID NO: 2371902 - RNA, 19 nt, Artificial Sequence
  Description of Artificial Sequence: Synthetic oligonucleotide
  Sense strand starting at position 300 of SEQ ID NO: 1885845
ugaucauguuuccugucau

SEQ ID NO: 2371903 - RNA, 19 nt, Artificial Sequence
  Description of Artificial Sequence: Synthetic oligonucleotide
  Antisense strand to SEQ ID NO: 2371902
augacaggaaacaugauca

SEQ ID NO: 2371904 - RNA, 19 nt, Artificial Sequence
  Description of Artificial Sequence: Synthetic oligonucleotide
  Sense strand starting at position 307 of SEQ ID NO: 1885845
guuuccugucauggagaaa

SEQ ID NO: 2371905 - RNA, 19 nt, Artificial Sequence
  Description of Artificial Sequence: Synthetic oligonucleotide
  Antisense strand to SEQ ID NO: 2371904
uuucuccaugacaggaaac

SEQ ID NO: 2371906 - RNA, 19 nt, Artificial Sequence
  Description of Artificial Sequence: Synthetic oligonucleotide
  Sense strand starting at position 379 of SEQ ID NO: 1885845
ugagaaagggcuuguaggu

SEQ ID NO: 2371907 - RNA, 19 nt, Artificial Sequence
  Description of Artificial Sequence: Synthetic oligonucleotide
  Antisense strand to SEQ ID NO: 2371906
accuacaagcccuuucuca

SEQ ID NO: 2371908 - RNA, 19 nt, Artificial Sequence
  Description of Artificial Sequence: Synthetic oligonucleotide
  Sense strand starting at position 442 of SEQ ID NO: 1885845
gagguuagguuguuuaacu

SEQ ID NO: 2371909 - RNA, 19 nt, Artificial Sequence
  Description of Artificial Sequence: Synthetic oligonucleotide
  Antisense strand to SEQ ID NO: 2371908
aguuaaacaaccuaaccuc

SEQ ID NO: 2371910 - RNA, 19 nt, Artificial Sequence
  Description of Artificial Sequence: Synthetic oligonucleotide
  Sense strand starting at position 447 of SEQ ID NO: 1885845
uagguuguuuaacucauga

SEQ ID NO: 2371911 - RNA, 19 nt, Artificial Sequence
  Description of Artificial Sequence: Synthetic oligonucleotide
  Antisense strand to SEQ ID NO: 2371910
ucaugaguuaaacaaccua

SEQ ID NO: 2371912 - RNA, 19 nt, Artificial Sequence
  Description of Artificial Sequence: Synthetic oligonucleotide
  Sense strand starting at position 576 of SEQ ID NO: 1885845
uguucuuguccugauacuu

SEQ ID NO: 2371913 - RNA, 19 nt, Artificial Sequence
  Description of Artificial Sequence: Synthetic oligonucleotide
  Antisense strand to SEQ ID NO: 2371912
aaguaucaggacaagaaca

SEQ ID NO: 2371914 - RNA, 19 nt, Artificial Sequence
  Description of Artificial Sequence: Synthetic oligonucleotide
  Sense strand starting at position 683 of SEQ ID NO: 1885845
cucugcagagucuaaugua

SEQ ID NO: 2371915 - RNA, 19 nt, Artificial Sequence
  Description of Artificial Sequence: Synthetic oligonucleotide
  Antisense strand to SEQ ID NO: 2371914
uacauuagacucugcagag

SEQ ID NO: 2371916 - RNA, 19 nt, Artificial Sequence
  Description of Artificial Sequence: Synthetic oligonucleotide
  Sense strand starting at position 849 of SEQ ID NO: 1885845
ggaaauaacuaggauuaga

SEQ ID NO: 2371917 - RNA, 19 nt, Artificial Sequence
  Description of Artificial Sequence: Synthetic oligonucleotide
  Antisense strand to SEQ ID NO: 2371916
ucuaauccuaguuauuucc

SEQ ID NO: 2371918 - RNA, 19 nt, Artificial Sequence
  Description of Artificial Sequence: Synthetic oligonucleotide
  Sense strand starting at position 990 of SEQ ID NO: 1885845
ccaugaucgugcucaucaa

SEQ ID NO: 2371919 - RNA, 19 nt, Artificial Sequence
  Description of Artificial Sequence: Synthetic oligonucleotide
  Antisense strand to SEQ ID NO: 2371918
uugaugagcacgaucaugg

SEQ ID NO: 2371920 - RNA, 19 nt, Artificial Sequence
  Description of Artificial Sequence: Synthetic oligonucleotide
  Sense strand starting at position 991 of SEQ ID NO: 1885845
caugaucgugcucaucaau

SEQ ID NO: 2371921 - RNA, 19 nt, Artificial Sequence
  Description of Artificial Sequence: Synthetic oligonucleotide
  Antisense strand to SEQ ID NO: 2371920
auugaugagcacgaucaug

SEQ ID NO: 2371922 - RNA, 19 nt, Artificial Sequence
  Description of Artificial Sequence: Synthetic oligonucleotide
  Sense strand starting at position 994 of SEQ ID NO: 1885845
gaucgugcucaucaauaac

SEQ ID NO: 2371923 - RNA, 19 nt, Artificial Sequence
  Description of Artificial Sequence: Synthetic oligonucleotide
  Antisense strand to SEQ ID NO: 2371922
guuauugaugagcacgauc

SEQ ID NO: 2371924 - RNA, 19 nt, Artificial Sequence
  Description of Artificial Sequence: Synthetic oligonucleotide
  Sense strand starting at position 997 of SEQ ID NO: 1885845
cgugcucaucaauaacuau

SEQ ID NO: 2371925 - RNA, 19 nt, Artificial Sequence
  Description of Artificial Sequence: Synthetic oligonucleotide
  Antisense strand to SEQ ID NO: 2371924
auaguuauugaugagcacg

SEQ ID NO: 2371926 - RNA, 19 nt, Artificial Sequence
  Description of Artificial Sequence: Synthetic oligonucleotide
  Sense strand starting at position 1159 of SEQ ID NO: 1885845
gauaaacuggcauaucagu

SEQ ID NO: 2371927 - RNA, 19 nt, Artificial Sequence
  Description of Artificial Sequence: Synthetic oligonucleotide
  Antisense strand to SEQ ID NO: 2371926
acugauaugccaguuuauc

SEQ ID NO: 2371928 - RNA, 19 nt, Artificial Sequence
  Description of Artificial Sequence: Synthetic oligonucleotide
  Sense strand starting at position 1166 of SEQ ID NO: 1885845
uggcauaucaguugaucag

SEQ ID NO: 2371929 - RNA, 19 nt, Artificial Sequence
  Description of Artificial Sequence: Synthetic oligonucleotide
  Antisense strand to SEQ ID NO: 2371928
cugaucaacugauaugcca

SEQ ID NO: 2371930 - RNA, 19 nt, Artificial Sequence
  Description of Artificial Sequence: Synthetic oligonucleotide
  Sense strand starting at position 1167 of SEQ ID NO: 1885845
ggcauaucaguugaucagu

SEQ ID NO: 2371931 - RNA, 19 nt, Artificial Sequence
  Description of Artificial Sequence: Synthetic oligonucleotide
  Antisense strand to SEQ ID NO: 2371930
acugaucaacugauaugcc

SEQ ID NO: 2371932 - RNA, 19 nt, Artificial Sequence
  Description of Artificial Sequence: Synthetic oligonucleotide
  Sense strand starting at position 1170 of SEQ ID NO: 1885845
auaucaguugaucaguuau

SEQ ID NO: 2371933 - RNA, 19 nt, Artificial Sequence
  Description of Artificial Sequence: Synthetic oligonucleotide
  Antisense strand to SEQ ID NO: 2371932
auaacugaucaacugauau

SEQ ID NO: 2371934 - RNA, 19 nt, Artificial Sequence
  Description of Artificial Sequence: Synthetic oligonucleotide
  Sense strand starting at position 1650 of SEQ ID NO: 1885845
agggauuuguaauaauaac

SEQ ID NO: 2371935 - RNA, 19 nt, Artificial Sequence
  Description of Artificial Sequence: Synthetic oligonucleotide
  Antisense strand to SEQ ID NO: 2371934
guuauuauuacaaaucccu

SEQ ID NO: 2371936 - RNA, 19 nt, Artificial Sequence
  Description of Artificial Sequence: Synthetic oligonucleotide
  Sense strand starting at position 1866 of SEQ ID NO: 1885845
accaaagcuuuagugaauu

SEQ ID NO: 2371937 - RNA, 19 nt, Artificial Sequence
  Description of Artificial Sequence: Synthetic oligonucleotide
  Antisense strand to SEQ ID NO: 2371936
aauucacuaaagcuuuggu

SEQ ID NO: 2371938 - RNA, 19 nt, Artificial Sequence
  Description of Artificial Sequence: Synthetic oligonucleotide
  Sense strand starting at position 2106 of SEQ ID NO: 1885845
augcuugucuaucugggaa

SEQ ID NO: 2371939 - RNA, 19 nt, Artificial Sequence
  Description of Artificial Sequence: Synthetic oligonucleotide
  Antisense strand to SEQ ID NO: 2371938
uucccagauagacaagcau

SEQ ID NO: 2371940 - RNA, 19 nt, Artificial Sequence
  Description of Artificial Sequence: Synthetic oligonucleotide
  Sense strand starting at position 2120 of SEQ ID NO: 1885845
gggaaugcuuagucccuga

SEQ ID NO: 2371941 - RNA, 19 nt, Artificial Sequence
  Description of Artificial Sequence: Synthetic oligonucleotide
  Antisense strand to SEQ ID NO: 2371940
ucagggacuaagcauuccc

SEQ ID NO: 2371942 - RNA, 19 nt, Artificial Sequence
  Description of Artificial Sequence: Synthetic oligonucleotide
  Sense strand starting at position 2148 of SEQ ID NO: 1885845
ugcagaaaucaacaguauu

SEQ ID NO: 2371943 - RNA, 19 nt, Artificial Sequence
  Description of Artificial Sequence: Synthetic oligonucleotide
  Antisense strand to SEQ ID NO: 2371942
aauacuguugauuucugca

SEQ ID NO: 2371944 - RNA, 19 nt, Artificial Sequence
  Description of Artificial Sequence: Synthetic oligonucleotide
  Sense strand starting at position 2192 of SEQ ID NO: 1885845
guuauuauacacuagcaua

SEQ ID NO: 2371945 - RNA, 19 nt, Artificial Sequence
  Description of Artificial Sequence: Synthetic oligonucleotide
  Antisense strand to SEQ ID NO: 2371944
uaugcuaguguauaauaac

SEQ ID NO: 2371946 - RNA, 19 nt, Artificial Sequence
  Description of Artificial Sequence: Synthetic oligonucleotide
  Sense strand starting at position 2381 of SEQ ID NO: 1885845
caagcaguagcauagauua

SEQ ID NO: 2371947 - RNA, 19 nt, Artificial Sequence
  Description of Artificial Sequence: Synthetic oligonucleotide
  Antisense strand to SEQ ID NO: 2371946
uaaucuaugcuacugcuug

SEQ ID NO: 2371948 - RNA, 19 nt, Artificial Sequence
  Description of Artificial Sequence: Synthetic oligonucleotide
  Sense strand starting at position 2383 of SEQ ID NO: 1885845
agcaguagcauagauuagu

SEQ ID NO: 2371949 - RNA, 19 nt, Artificial Sequence
  Description of Artificial Sequence: Synthetic oligonucleotide
  Antisense strand to SEQ ID NO: 2371948
acuaaucuaugcuacugcu

SEQ ID NO: 2371950 - RNA, 19 nt, Artificial Sequence
  Description of Artificial Sequence: Synthetic oligonucleotide
  Sense strand starting at position 3008 of SEQ ID NO: 1885845
auccaaggugcugguauua

SEQ ID NO: 2371951 - RNA, 19 nt, Artificial Sequence
  Description of Artificial Sequence: Synthetic oligonucleotide
  Antisense strand to SEQ ID NO: 2371950
uaauaccagcaccuuggau

SEQ ID NO: 2371952 - RNA, 19 nt, Artificial Sequence
  Description of Artificial Sequence: Synthetic oligonucleotide
  Sense strand starting at position 3121 of SEQ ID NO: 1885845
uggcauaaucuuggcuaaa

SEQ ID NO: 2371953 - RNA, 19 nt, Artificial Sequence
  Description of Artificial Sequence: Synthetic oligonucleotide
  Antisense strand to SEQ ID NO: 2371952
uuuagccaagauuaugcca

SEQ ID NO: 2371954 - RNA, 19 nt, Artificial Sequence
  Description of Artificial Sequence: Synthetic oligonucleotide
  Sense strand starting at position 3122 of SEQ ID NO: 1885845
ggcauaaucuuggcuaaau

SEQ ID NO: 2371955 - RNA, 19 nt, Artificial Sequence
  Description of Artificial Sequence: Synthetic oligonucleotide
  Antisense strand to SEQ ID NO: 2371954
auuuagccaagauuaugcc

SEQ ID NO: 2371956 - RNA, 19 nt, Artificial Sequence
  Description of Artificial Sequence: Synthetic oligonucleotide
  Sense strand starting at position 3123 of SEQ ID NO: 1885845
gcauaaucuuggcuaaaug

SEQ ID NO: 2371957 - RNA, 19 nt, Artificial Sequence
  Description of Artificial Sequence: Synthetic oligonucleotide
  Antisense strand to SEQ ID NO: 2371956
cauuuagccaagauuaugc

SEQ ID NO: 2371958 - RNA, 19 nt, Artificial Sequence
  Description of Artificial Sequence: Synthetic oligonucleotide
  Sense strand starting at position 3354 of SEQ ID NO: 1885845
gcaccuggcccacaaagau

SEQ ID NO: 2371959 - RNA, 19 nt, Artificial Sequence
  Description of Artificial Sequence: Synthetic oligonucleotide
  Antisense strand to SEQ ID NO: 2371958
aucuuugugggccaggugc

SEQ ID NO: 2371960 - RNA, 19 nt, Artificial Sequence
  Description of Artificial Sequence: Synthetic oligonucleotide
  Sense strand starting at position 3542 of SEQ ID NO: 1885845
uguacaucucaaugaugau

SEQ ID NO: 2371961 - RNA, 19 nt, Artificial Sequence
  Description of Artificial Sequence: Synthetic oligonucleotide
  Antisense strand to SEQ ID NO: 2371960
aucaucauugagauguaca

SEQ ID NO: 2371962 - RNA, 19 nt, Artificial Sequence
  Description of Artificial Sequence: Synthetic oligonucleotide
  Sense strand starting at position 3849 of SEQ ID NO: 1885845
ccuggcuaguucuuaaauu

SEQ ID NO: 2371963 - RNA, 19 nt, Artificial Sequence
  Description of Artificial Sequence: Synthetic oligonucleotide
  Antisense strand to SEQ ID NO: 2371962
aauuuaagaacuagccagg

SEQ ID NO: 2371964 - RNA, 19 nt, Artificial Sequence
  Description of Artificial Sequence: Synthetic oligonucleotide
  Sense strand starting at position 8 of SEQ ID NO: 1885848
auguuauuguccuuuacaa

SEQ ID NO: 2371965 - RNA, 19 nt, Artificial Sequence
  Description of Artificial Sequence: Synthetic oligonucleotide
  Antisense strand to SEQ ID NO: 2371964
uuguaaaggacaauaacau

SEQ ID NO: 2371966 - RNA, 19 nt, Artificial Sequence
  Description of Artificial Sequence: Synthetic oligonucleotide
  Sense strand starting at position 50 of SEQ ID NO: 1885848
ggaucuagguaauuguaaa

SEQ ID NO: 2371967 - RNA, 19 nt, Artificial Sequence
  Description of Artificial Sequence: Synthetic oligonucleotide
  Antisense strand to SEQ ID NO: 2371966
uuuacaauuaccuagaucc

SEQ ID NO: 2371968 - RNA, 19 nt, Artificial Sequence
  Description of Artificial Sequence: Synthetic oligonucleotide
  Sense strand starting at position 279 of SEQ ID NO: 1885848
aggagaucuggcuauaggu

SEQ ID NO: 2371969 - RNA, 19 nt, Artificial Sequence
  Description of Artificial Sequence: Synthetic oligonucleotide
  Antisense strand to SEQ ID NO: 2371968
accuauagccagaucuccu

SEQ ID NO: 2371970 - RNA, 19 nt, Artificial Sequence
  Description of Artificial Sequence: Synthetic oligonucleotide
  Sense strand starting at position 281 of SEQ ID NO: 1885848
gagaucuggcuauagguau

SEQ ID NO: 2371971 - RNA, 19 nt, Artificial Sequence
  Description of Artificial Sequence: Synthetic oligonucleotide
  Antisense strand to SEQ ID NO: 2371970
auaccuauagccagaucuc

SEQ ID NO: 2371972 - RNA, 19 nt, Artificial Sequence
  Description of Artificial Sequence: Synthetic oligonucleotide
  Sense strand starting at position 285 of SEQ ID NO: 1885848
ucuggcuauagguaugaga

SEQ ID NO: 2371973 - RNA, 19 nt, Artificial Sequence
  Description of Artificial Sequence: Synthetic oligonucleotide
  Antisense strand to SEQ ID NO: 2371972
ucucauaccuauagccaga

SEQ ID NO: 2371974 - RNA, 19 nt, Artificial Sequence
  Description of Artificial Sequence: Synthetic oligonucleotide
  Sense strand starting at position 287 of SEQ ID NO: 1885848
uggcuauagguaugagaac

SEQ ID NO: 2371975 - RNA, 19 nt, Artificial Sequence
  Description of Artificial Sequence: Synthetic oligonucleotide
  Antisense strand to SEQ ID NO: 2371974
guucucauaccuauagcca

SEQ ID NO: 2371976 - RNA, 19 nt, Artificial Sequence
  Description of Artificial Sequence: Synthetic oligonucleotide
  Sense strand starting at position 324 of SEQ ID NO: 1885848
uggaauuagacacguggaa

SEQ ID NO: 2371977 - RNA, 19 nt, Artificial Sequence
  Description of Artificial Sequence: Synthetic oligonucleotide
  Antisense strand to SEQ ID NO: 2371976
uuccacgugucuaauucca

SEQ ID NO: 2371978 - RNA, 19 nt, Artificial Sequence
  Description of Artificial Sequence: Synthetic oligonucleotide
  Sense strand starting at position 2041 of SEQ ID NO: 1885848
ucgcuauggcgacaggaaa

SEQ ID NO: 2371979 - RNA, 19 nt, Artificial Sequence
  Description of Artificial Sequence: Synthetic oligonucleotide
  Antisense strand to SEQ ID NO: 2371978
uuuccugucgccauagcga

SEQ ID NO: 2371980 - RNA, 19 nt, Artificial Sequence
  Description of Artificial Sequence: Synthetic oligonucleotide
  Sense strand starting at position 2188 of SEQ ID NO: 1885848
ggcagaugggccuggaaua

SEQ ID NO: 2371981 - RNA, 19 nt, Artificial Sequence
  Description of Artificial Sequence: Synthetic oligonucleotide
  Antisense strand to SEQ ID NO: 2371980
uauuccaggcccaucugcc

SEQ ID NO: 2371982 - RNA, 19 nt, Artificial Sequence
  Description of Artificial Sequence: Synthetic oligonucleotide
  Sense strand starting at position 2320 of SEQ ID NO: 1885848
cgcguaauaaaguccaguu

SEQ ID NO: 2371983 - RNA, 19 nt, Artificial Sequence
  Description of Artificial Sequence: Synthetic oligonucleotide
  Antisense strand to SEQ ID NO: 2371982
aacuggacuuuauuacgcg

SEQ ID NO: 2371984 - RNA, 19 nt, Artificial Sequence
  Description of Artificial Sequence: Synthetic oligonucleotide
  Sense strand starting at position 2322 of SEQ ID NO: 1885848
cguaauaaaguccaguuua

SEQ ID NO: 2371985 - RNA, 19 nt, Artificial Sequence
  Description of Artificial Sequence: Synthetic oligonucleotide
  Antisense strand to SEQ ID NO: 2371984
uaaacuggacuuuauuacg

SEQ ID NO: 2371986 - RNA, 19 nt, Artificial Sequence
  Description of Artificial Sequence: Synthetic oligonucleotide
  Sense strand starting at position 2383 of SEQ ID NO: 1885848
gaacguugaggguaagagu

SEQ ID NO: 2371987 - RNA, 19 nt, Artificial Sequence
  Description of Artificial Sequence: Synthetic oligonucleotide
  Antisense strand to SEQ ID NO: 2371986
acucuuacccucaacguuc

SEQ ID NO: 2371988 - RNA, 19 nt, Artificial Sequence
  Description of Artificial Sequence: Synthetic oligonucleotide
  Sense strand starting at position 2392 of SEQ ID NO: 1885848
ggguaagagugggugagaa

SEQ ID NO: 2371989 - RNA, 19 nt, Artificial Sequence
  Description of Artificial Sequence: Synthetic oligonucleotide
  Antisense strand to SEQ ID NO: 2371988
uucucacccacucuuaccc

SEQ ID NO: 2371990 - RNA, 19 nt, Artificial Sequence
  Description of Artificial Sequence: Synthetic oligonucleotide
  Sense strand starting at position 2404 of SEQ ID NO: 1885848
gugagaaacuuucugucag

SEQ ID NO: 2371991 - RNA, 19 nt, Artificial Sequence
  Description of Artificial Sequence: Synthetic oligonucleotide
  Antisense strand to SEQ ID NO: 2371990
cugacagaaaguuucucac

SEQ ID NO: 2371992 - RNA, 19 nt, Artificial Sequence
  Description of Artificial Sequence: Synthetic oligonucleotide
  Sense strand starting at position 2406 of SEQ ID NO: 1885848
gagaaacuuucugucagag

SEQ ID NO: 2371993 - RNA, 19 nt, Artificial Sequence
  Description of Artificial Sequence: Synthetic oligonucleotide
  Antisense strand to SEQ ID NO: 2371992
cucugacagaaaguuucuc

SEQ ID NO: 2371994 - RNA, 19 nt, Artificial Sequence
  Description of Artificial Sequence: Synthetic oligonucleotide
  Sense strand starting at position 2448 of SEQ ID NO: 1885848
aacuaaagauaugauggua

SEQ ID NO: 2371995 - RNA, 19 nt, Artificial Sequence
  Description of Artificial Sequence: Synthetic oligonucleotide
  Antisense strand to SEQ ID NO: 2371994
uaccaucauaucuuuaguu

SEQ ID NO: 2371996 - RNA, 19 nt, Artificial Sequence
  Description of Artificial Sequence: Synthetic oligonucleotide
  Sense strand starting at position 2591 of SEQ ID NO: 1885848
gagugcuagacugaggagu

SEQ ID NO: 2371997 - RNA, 19 nt, Artificial Sequence
  Description of Artificial Sequence: Synthetic oligonucleotide
  Antisense strand to SEQ ID NO: 2371996
acuccucagucuagcacuc

SEQ ID NO: 2371998 - RNA, 19 nt, Artificial Sequence
  Description of Artificial Sequence: Synthetic oligonucleotide
  Sense strand starting at position 2599 of SEQ ID NO: 1885848
gacugaggaguuugucaga

SEQ ID NO: 2371999 - RNA, 19 nt, Artificial Sequence
  Description of Artificial Sequence: Synthetic oligonucleotide
  Antisense strand to SEQ ID NO: 2371998
ucugacaaacuccucaguc

SEQ ID NO: 2372000 - RNA, 19 nt, Artificial Sequence
  Description of Artificial Sequence: Synthetic oligonucleotide
  Sense strand starting at position 3017 of SEQ ID NO: 1885848
cccuuugaaugcuuuggga

SEQ ID NO: 2372001 - RNA, 19 nt, Artificial Sequence
  Description of Artificial Sequence: Synthetic oligonucleotide
  Antisense strand to SEQ ID NO: 2372000
ucccaaagcauucaaaggg

SEQ ID NO: 2372002 - RNA, 19 nt, Artificial Sequence
  Description of Artificial Sequence: Synthetic oligonucleotide
  Sense strand starting at position 3019 of SEQ ID NO: 1885848
cuuugaaugcuuugggaga

SEQ ID NO: 2372003 - RNA, 19 nt, Artificial Sequence
  Description of Artificial Sequence: Synthetic oligonucleotide
  Antisense strand to SEQ ID NO: 2372002
ucucccaaagcauucaaag

SEQ ID NO: 2372004 - RNA, 19 nt, Artificial Sequence
  Description of Artificial Sequence: Synthetic oligonucleotide
  Sense strand starting at position 3072 of SEQ ID NO: 1885848
cucugaggacuaugguuau

SEQ ID NO: 2372005 - RNA, 19 nt, Artificial Sequence
  Description of Artificial Sequence: Synthetic oligonucleotide
  Antisense strand to SEQ ID NO: 2372004
auaaccauaguccucagag

SEQ ID NO: 2372006 - RNA, 19 nt, Artificial Sequence
  Description of Artificial Sequence: Synthetic oligonucleotide
  Sense strand starting at position 3078 of SEQ ID NO: 1885848
ggacuaugguuaucuggag

SEQ ID NO: 2372007 - RNA, 19 nt, Artificial Sequence
  Description of Artificial Sequence: Synthetic oligonucleotide
  Antisense strand to SEQ ID NO: 2372006
cuccagauaaccauagucc

SEQ ID NO: 2372008 - RNA, 19 nt, Artificial Sequence
  Description of Artificial Sequence: Synthetic oligonucleotide
  Sense strand starting at position 3079 of SEQ ID NO: 1885848
gacuaugguuaucuggaga

SEQ ID NO: 2372009 - RNA, 19 nt, Artificial Sequence
  Description of Artificial Sequence: Synthetic oligonucleotide
  Antisense strand to SEQ ID NO: 2372008
ucuccagauaaccauaguc

SEQ ID NO: 2372010 - RNA, 19 nt, Artificial Sequence
  Description of Artificial Sequence: Synthetic oligonucleotide
  Sense strand starting at position 3113 of SEQ ID NO: 1885848
ugaccuuccaugugaggaa

SEQ ID NO: 2372011 - RNA, 19 nt, Artificial Sequence
  Description of Artificial Sequence: Synthetic oligonucleotide
  Antisense strand to SEQ ID NO: 2372010
uuccucacauggaagguca

SEQ ID NO: 2372012 - RNA, 19 nt, Artificial Sequence
  Description of Artificial Sequence: Synthetic oligonucleotide
  Sense strand starting at position 3126 of SEQ ID NO: 1885848
gaggaagcucccugaggaa

SEQ ID NO: 2372013 - RNA, 19 nt, Artificial Sequence
  Description of Artificial Sequence: Synthetic oligonucleotide
  Antisense strand to SEQ ID NO: 2372012
uuccucagggagcuuccuc

SEQ ID NO: 2372014 - RNA, 19 nt, Artificial Sequence
  Description of Artificial Sequence: Synthetic oligonucleotide
  Sense strand starting at position 3139 of SEQ ID NO: 1885848
gaggaaccguggcucuuaa

SEQ ID NO: 2372015 - RNA, 19 nt, Artificial Sequence
  Description of Artificial Sequence: Synthetic oligonucleotide
  Antisense strand to SEQ ID NO: 2372014
uuaagagccacgguuccuc

SEQ ID NO: 2372016 - RNA, 19 nt, Artificial Sequence
  Description of Artificial Sequence: Synthetic oligonucleotide
  Sense strand starting at position 3161 of SEQ ID NO: 1885848
cuggacuccuuccuaugau

SEQ ID NO: 2372017 - RNA, 19 nt, Artificial Sequence
  Description of Artificial Sequence: Synthetic oligonucleotide
  Antisense strand to SEQ ID NO: 2372016
aucauaggaaggaguccag

SEQ ID NO: 2372018 - RNA, 19 nt, Artificial Sequence
  Description of Artificial Sequence: Synthetic oligonucleotide
  Sense strand starting at position 3169 of SEQ ID NO: 1885848
cuuccuaugaugggugaga

SEQ ID NO: 2372019 - RNA, 19 nt, Artificial Sequence
  Description of Artificial Sequence: Synthetic oligonucleotide
  Antisense strand to SEQ ID NO: 2372018
ucucacccaucauaggaag

SEQ ID NO: 2372020 - RNA, 19 nt, Artificial Sequence
  Description of Artificial Sequence: Synthetic oligonucleotide
  Sense strand starting at position 3170 of SEQ ID NO: 1885848
uuccuaugaugggugagaa

SEQ ID NO: 2372021 - RNA, 19 nt, Artificial Sequence
  Description of Artificial Sequence: Synthetic oligonucleotide
  Antisense strand to SEQ ID NO: 2372020
uucucacccaucauaggaa

SEQ ID NO: 2372022 - RNA, 19 nt, Artificial Sequence
  Description of Artificial Sequence: Synthetic oligonucleotide
  Sense strand starting at position 3171 of SEQ ID NO: 1885848
uccuaugaugggugagaag

SEQ ID NO: 2372023 - RNA, 19 nt, Artificial Sequence
  Description of Artificial Sequence: Synthetic oligonucleotide
  Antisense strand to SEQ ID NO: 2372022
cuucucacccaucauagga

SEQ ID NO: 2372024 - RNA, 19 nt, Artificial Sequence
  Description of Artificial Sequence: Synthetic oligonucleotide
  Sense strand starting at position 3210 of SEQ ID NO: 1885848
cccucucaccaguauguuu

SEQ ID NO: 2372025 - RNA, 19 nt, Artificial Sequence
  Description of Artificial Sequence: Synthetic oligonucleotide
  Antisense strand to SEQ ID NO: 2372024
aaacauacuggugagaggg

SEQ ID NO: 2372026 - RNA, 19 nt, Artificial Sequence
  Description of Artificial Sequence: Synthetic oligonucleotide
  Sense strand starting at position 3217 of SEQ ID NO: 1885848
accaguauguuucuggaaa

SEQ ID NO: 2372027 - RNA, 19 nt, Artificial Sequence
  Description of Artificial Sequence: Synthetic oligonucleotide
  Antisense strand to SEQ ID NO: 2372026
uuuccagaaacauacuggu

SEQ ID NO: 2372028 - RNA, 19 nt, Artificial Sequence
  Description of Artificial Sequence: Synthetic oligonucleotide
  Sense strand starting at position 3240 of SEQ ID NO: 1885848
ugaccagugagagguauua

SEQ ID NO: 2372029 - RNA, 19 nt, Artificial Sequence
  Description of Artificial Sequence: Synthetic oligonucleotide
  Antisense strand to SEQ ID NO: 2372028
uaauaccucucacugguca

SEQ ID NO: 2372030 - RNA, 19 nt, Artificial Sequence
  Description of Artificial Sequence: Synthetic oligonucleotide
  Sense strand starting at position 3275 of SEQ ID NO: 1885848
gguuuaaagacauggcauu

SEQ ID NO: 2372031 - RNA, 19 nt, Artificial Sequence
  Description of Artificial Sequence: Synthetic oligonucleotide
  Antisense strand to SEQ ID NO: 2372030
aaugccaugucuuuaaacc

SEQ ID NO: 2372032 - RNA, 19 nt, Artificial Sequence
  Description of Artificial Sequence: Synthetic oligonucleotide
  Sense strand starting at position 3576 of SEQ ID NO: 1885848
gcaagacccugugcauaaa

SEQ ID NO: 2372033 - RNA, 19 nt, Artificial Sequence
  Description of Artificial Sequence: Synthetic oligonucleotide
  Antisense strand to SEQ ID NO: 2372032
uuuaugcacagggucuugc

SEQ ID NO: 2372034 - RNA, 19 nt, Artificial Sequence
  Description of Artificial Sequence: Synthetic oligonucleotide
  Sense strand starting at position 3579 of SEQ ID NO: 1885848
agacccugugcauaaauaa

SEQ ID NO: 2372035 - RNA, 19 nt, Artificial Sequence
  Description of Artificial Sequence: Synthetic oligonucleotide
  Antisense strand to SEQ ID NO: 2372034
uuauuuaugcacagggucu

SEQ ID NO: 2372036 - RNA, 19 nt, Artificial Sequence
  Description of Artificial Sequence: Synthetic oligonucleotide
  Sense strand starting at position 3609 of SEQ ID NO: 1885848
gcaucuugaacuuggagua

SEQ ID NO: 2372037 - RNA, 19 nt, Artificial Sequence
  Description of Artificial Sequence: Synthetic oligonucleotide
  Antisense strand to SEQ ID NO: 2372036
uacuccaaguucaagaugc

SEQ ID NO: 2372038 - RNA, 19 nt, Artificial Sequence
  Description of Artificial Sequence: Synthetic oligonucleotide
  Sense strand starting at position 3734 of SEQ ID NO: 1885848
uuuguuaaccugggaugaa

SEQ ID NO: 2372039 - RNA, 19 nt, Artificial Sequence
  Description of Artificial Sequence: Synthetic oligonucleotide
  Antisense strand to SEQ ID NO: 2372038
uucaucccagguuaacaaa

SEQ ID NO: 2372040 - RNA, 19 nt, Artificial Sequence
  Description of Artificial Sequence: Synthetic oligonucleotide
  Sense strand starting at position 3800 of SEQ ID NO: 1885848
gcagcagcuuauuugaaca

SEQ ID NO: 2372041 - RNA, 19 nt, Artificial Sequence
  Description of Artificial Sequence: Synthetic oligonucleotide
  Antisense strand to SEQ ID NO: 2372040
uguucaaauaagcugcugc

SEQ ID NO: 2372042 - RNA, 19 nt, Artificial Sequence
  Description of Artificial Sequence: Synthetic oligonucleotide
  Sense strand starting at position 3802 of SEQ ID NO: 1885848
agcagcuuauuugaacaga

SEQ ID NO: 2372043 - RNA, 19 nt, Artificial Sequence
  Description of Artificial Sequence: Synthetic oligonucleotide
  Antisense strand to SEQ ID NO: 2372042
ucuguucaaauaagcugcu

SEQ ID NO: 2372044 - RNA, 19 nt, Artificial Sequence
  Description of Artificial Sequence: Synthetic oligonucleotide
  Sense strand starting at position 1117 of SEQ ID NO: 1885846
cuggguccucaguaccaau

SEQ ID NO: 2372045 - RNA, 19 nt, Artificial Sequence
  Description of Artificial Sequence: Synthetic oligonucleotide
  Antisense strand to SEQ ID NO: 2372044
auugguacugaggacccag

SEQ ID NO: 2372046 - RNA, 19 nt, Artificial Sequence
  Description of Artificial Sequence: Synthetic oligonucleotide
  Sense strand starting at position 1169 of SEQ ID NO: 1885846
ucagcuggugcccaugaau

SEQ ID NO: 2372047 - RNA, 19 nt, Artificial Sequence
  Description of Artificial Sequence: Synthetic oligonucleotide
  Antisense strand to SEQ ID NO: 2372046
auucaugggcaccagcuga

SEQ ID NO: 2372048 - RNA, 19 nt, Artificial Sequence
  Description of Artificial Sequence: Synthetic oligonucleotide
  Sense strand starting at position 1297 of SEQ ID NO: 1885846
cuucuacuuccggagcaga

SEQ ID NO: 2372049 - RNA, 19 nt, Artificial Sequence
  Description of Artificial Sequence: Synthetic oligonucleotide
  Antisense strand to SEQ ID NO: 2372048
ucugcuccggaaguagaag

SEQ ID NO: 2372050 - RNA, 19 nt, Artificial Sequence
  Description of Artificial Sequence: Synthetic oligonucleotide
  Sense strand starting at position 1619 of SEQ ID NO: 1885846
uaauuaaaucguggaugcu

SEQ ID NO: 2372051 - RNA, 19 nt, Artificial Sequence
  Description of Artificial Sequence: Synthetic oligonucleotide
  Antisense strand to SEQ ID NO: 2372050
agcauccacgauuuaauua

SEQ ID NO: 2372052 - RNA, 19 nt, Artificial Sequence
  Description of Artificial Sequence: Synthetic oligonucleotide
  Sense strand starting at position 1620 of SEQ ID NO: 1885846
aauuaaaucguggaugcua

SEQ ID NO: 2372053 - RNA, 19 nt, Artificial Sequence
  Description of Artificial Sequence: Synthetic oligonucleotide
  Antisense strand to SEQ ID NO: 2372052
uagcauccacgauuuaauu

SEQ ID NO: 2372054 - RNA, 19 nt, Artificial Sequence
  Description of Artificial Sequence: Synthetic oligonucleotide
  Sense strand starting at position 1622 of SEQ ID NO: 1885846
uuaaaucguggaugcuaau

SEQ ID NO: 2372055 - RNA, 19 nt, Artificial Sequence
  Description of Artificial Sequence: Synthetic oligonucleotide
  Antisense strand to SEQ ID NO: 2372054
auuagcauccacgauuuaa

SEQ ID NO: 2372056 - RNA, 19 nt, Artificial Sequence
  Description of Artificial Sequence: Synthetic oligonucleotide
  Sense strand starting at position 1628 of SEQ ID NO: 1885846
cguggaugcuaauuaacau

SEQ ID NO: 2372057 - RNA, 19 nt, Artificial Sequence
  Description of Artificial Sequence: Synthetic oligonucleotide
  Antisense strand to SEQ ID NO: 2372056
auguuaauuagcauccacg

SEQ ID NO: 2372058 - RNA, 19 nt, Artificial Sequence
  Description of Artificial Sequence: Synthetic oligonucleotide
  Sense strand starting at position 1726 of SEQ ID NO: 1885846
gagagccagucuucuuaga

SEQ ID NO: 2372059 - RNA, 19 nt, Artificial Sequence
  Description of Artificial Sequence: Synthetic oligonucleotide
  Antisense strand to SEQ ID NO: 2372058
ucuaagaagacuggcucuc

SEQ ID NO: 2372060 - RNA, 19 nt, Artificial Sequence
  Description of Artificial Sequence: Synthetic oligonucleotide
  Sense strand starting at position 1728 of SEQ ID NO: 1885846
gagccagucuucuuagaag

SEQ ID NO: 2372061 - RNA, 19 nt, Artificial Sequence
  Description of Artificial Sequence: Synthetic oligonucleotide
  Antisense strand to SEQ ID NO: 2372060
cuucuaagaagacuggcuc

SEQ ID NO: 2372062 - RNA, 19 nt, Artificial Sequence
  Description of Artificial Sequence: Synthetic oligonucleotide
  Sense strand starting at position 1791 of SEQ ID NO: 1885846
aagagagcugaguggugau

SEQ ID NO: 2372063 - RNA, 19 nt, Artificial Sequence
  Description of Artificial Sequence: Synthetic oligonucleotide
  Antisense strand to SEQ ID NO: 2372062
aucaccacucagcucucuu

SEQ ID NO: 2372064 - RNA, 19 nt, Artificial Sequence
  Description of Artificial Sequence: Synthetic oligonucleotide
  Sense strand starting at position 1887 of SEQ ID NO: 1885846
cgagccuucuuacccaaau

SEQ ID NO: 2372065 - RNA, 19 nt, Artificial Sequence
  Description of Artificial Sequence: Synthetic oligonucleotide
  Antisense strand to SEQ ID NO: 2372064
auuuggguaagaaggcucg

SEQ ID NO: 2372066 - RNA, 19 nt, Artificial Sequence
  Description of Artificial Sequence: Synthetic oligonucleotide
  Sense strand starting at position 2150 of SEQ ID NO: 1885846
aggagcauucuaggaacau

SEQ ID NO: 2372067 - RNA, 19 nt, Artificial Sequence
  Description of Artificial Sequence: Synthetic oligonucleotide
  Antisense strand to SEQ ID NO: 2372066
auguuccuagaaugcuccu

SEQ ID NO: 2372068 - RNA, 19 nt, Artificial Sequence
  Description of Artificial Sequence: Synthetic oligonucleotide
  Sense strand starting at position 2200 of SEQ ID NO: 1885846
gggaaaugugaggguauca

SEQ ID NO: 2372069 - RNA, 19 nt, Artificial Sequence
  Description of Artificial Sequence: Synthetic oligonucleotide
  Antisense strand to SEQ ID NO: 2372068
ugauacccucacauuuccc

SEQ ID NO: 2372070 - RNA, 19 nt, Artificial Sequence
  Description of Artificial Sequence: Synthetic oligonucleotide
  Sense strand starting at position 2216 of SEQ ID NO: 1885846
ucaaaucaaugggaauuau

SEQ ID NO: 2372071 - RNA, 19 nt, Artificial Sequence
  Description of Artificial Sequence: Synthetic oligonucleotide
  Antisense strand to SEQ ID NO: 2372070
auaauucccauugauuuga

SEQ ID NO: 2372072 - RNA, 19 nt, Artificial Sequence
  Description of Artificial Sequence: Synthetic oligonucleotide
  Sense strand starting at position 2241 of SEQ ID NO: 1885846
cagagaaucgcugacagug

SEQ ID NO: 2372073 - RNA, 19 nt, Artificial Sequence
  Description of Artificial Sequence: Synthetic oligonucleotide
  Antisense strand to SEQ ID NO: 2372072
cacugucagcgauucucug

SEQ ID NO: 2372074 - RNA, 19 nt, Artificial Sequence
  Description of Artificial Sequence: Synthetic oligonucleotide
  Sense strand starting at position 2261 of SEQ ID NO: 1885846
cuguaagacugccuuagga

SEQ ID NO: 2372075 - RNA, 19 nt, Artificial Sequence
  Description of Artificial Sequence: Synthetic oligonucleotide
  Antisense strand to SEQ ID NO: 2372074
uccuaaggcagucuuacag

SEQ ID NO: 2372076 - RNA, 19 nt, Artificial Sequence
  Description of Artificial Sequence: Synthetic oligonucleotide
  Sense strand starting at position 2308 of SEQ ID NO: 1885846
gcaguuccagaguaggaaa

SEQ ID NO: 2372077 - RNA, 19 nt, Artificial Sequence
  Description of Artificial Sequence: Synthetic oligonucleotide
  Antisense strand to SEQ ID NO: 2372076
uuuccuacucuggaacugc

SEQ ID NO: 2372078 - RNA, 19 nt, Artificial Sequence
  Description of Artificial Sequence: Synthetic oligonucleotide
  Sense strand starting at position 2372 of SEQ ID NO: 1885846
gucaguaagggcuaucuaa

SEQ ID NO: 2372079 - RNA, 19 nt, Artificial Sequence
  Description of Artificial Sequence: Synthetic oligonucleotide
  Antisense strand to SEQ ID NO: 2372078
uuagauagcccuuacugac

SEQ ID NO: 2372080 - RNA, 19 nt, Artificial Sequence
  Description of Artificial Sequence: Synthetic oligonucleotide
  Sense strand starting at position 2385 of SEQ ID NO: 1885846
aucuaacuuugaguuguua

SEQ ID NO: 2372081 - RNA, 19 nt, Artificial Sequence
  Description of Artificial Sequence: Synthetic oligonucleotide
  Antisense strand to SEQ ID NO: 2372080
uaacaacucaaaguuagau

SEQ ID NO: 2372082 - RNA, 19 nt, Artificial Sequence
  Description of Artificial Sequence: Synthetic oligonucleotide
  Sense strand starting at position 2419 of SEQ ID NO: 1885846
gagagaugccaguauagug

SEQ ID NO: 2372083 - RNA, 19 nt, Artificial Sequence
  Description of Artificial Sequence: Synthetic oligonucleotide
  Antisense strand to SEQ ID NO: 2372082
cacuauacuggcaucucuc

SEQ ID NO: 2372084 - RNA, 19 nt, Artificial Sequence
  Description of Artificial Sequence: Synthetic oligonucleotide
  Sense strand starting at position 2461 of SEQ ID NO: 1885846
gugaaacauuaaucugaug

SEQ ID NO: 2372085 - RNA, 19 nt, Artificial Sequence
  Description of Artificial Sequence: Synthetic oligonucleotide
  Antisense strand to SEQ ID NO: 2372084
caucagauuaauguuucac

SEQ ID NO: 2372086 - RNA, 19 nt, Artificial Sequence
  Description of Artificial Sequence: Synthetic oligonucleotide
  Sense strand starting at position 2584 of SEQ ID NO: 1885846
cucugaggagcugguuaaa

SEQ ID NO: 2372087 - RNA, 19 nt, Artificial Sequence
  Description of Artificial Sequence: Synthetic oligonucleotide
  Antisense strand to SEQ ID NO: 2372086
uuuaaccagcuccucagag

SEQ ID NO: 2372088 - RNA, 19 nt, Artificial Sequence
  Description of Artificial Sequence: Synthetic oligonucleotide
  Sense strand starting at position 2607 of SEQ ID NO: 1885846
ccaaaugguugaucauguu

SEQ ID NO: 2372089 - RNA, 19 nt, Artificial Sequence
  Description of Artificial Sequence: Synthetic oligonucleotide
  Antisense strand to SEQ ID NO: 2372088
aacaugaucaaccauuugg

SEQ ID NO: 2372090 - RNA, 19 nt, Artificial Sequence
  Description of Artificial Sequence: Synthetic oligonucleotide
  Sense strand starting at position 2614 of SEQ ID NO: 1885846
guugaucauguuuaaccca

SEQ ID NO: 2372091 - RNA, 19 nt, Artificial Sequence
  Description of Artificial Sequence: Synthetic oligonucleotide
  Antisense strand to SEQ ID NO: 2372090
uggguuaaacaugaucaac

SEQ ID NO: 2372092 - RNA, 19 nt, Artificial Sequence
  Description of Artificial Sequence: Synthetic oligonucleotide
  Sense strand starting at position 2923 of SEQ ID NO: 1885846
uguggaaagcccuaucaag

SEQ ID NO: 2372093 - RNA, 19 nt, Artificial Sequence
  Description of Artificial Sequence: Synthetic oligonucleotide
  Antisense strand to SEQ ID NO: 2372092
cuugauagggcuuuccaca

SEQ ID NO: 2372094 - RNA, 19 nt, Artificial Sequence
  Description of Artificial Sequence: Synthetic oligonucleotide
  Sense strand starting at position 2965 of SEQ ID NO: 1885846
gaagcuggcagauggauaa

SEQ ID NO: 2372095 - RNA, 19 nt, Artificial Sequence
  Description of Artificial Sequence: Synthetic oligonucleotide
  Antisense strand to SEQ ID NO: 2372094
uuauccaucugccagcuuc

SEQ ID NO: 2372096 - RNA, 19 nt, Artificial Sequence
  Description of Artificial Sequence: Synthetic oligonucleotide
  Sense strand starting at position 3047 of SEQ ID NO: 1885846
gucuuucuaauguaggagu

SEQ ID NO: 2372097 - RNA, 19 nt, Artificial Sequence
  Description of Artificial Sequence: Synthetic oligonucleotide
  Antisense strand to SEQ ID NO: 2372096
acuccuacauuagaaagac

SEQ ID NO: 2372098 - RNA, 19 nt, Artificial Sequence
  Description of Artificial Sequence: Synthetic oligonucleotide
  Sense strand starting at position 3049 of SEQ ID NO: 1885846
cuuucuaauguaggaguaa

SEQ ID NO: 2372099 - RNA, 19 nt, Artificial Sequence
  Description of Artificial Sequence: Synthetic oligonucleotide
  Antisense strand to SEQ ID NO: 2372098
uuacuccuacauuagaaag

SEQ ID NO: 2372100 - RNA, 19 nt, Artificial Sequence
  Description of Artificial Sequence: Synthetic oligonucleotide
  Sense strand starting at position 3173 of SEQ ID NO: 1885846
uggaaagucuauucuguau

SEQ ID NO: 2372101 - RNA, 19 nt, Artificial Sequence
  Description of Artificial Sequence: Synthetic oligonucleotide
  Antisense strand to SEQ ID NO: 2372100
auacagaauagacuuucca

SEQ ID NO: 2372102 - RNA, 19 nt, Artificial Sequence
  Description of Artificial Sequence: Synthetic oligonucleotide
  Sense strand starting at position 3242 of SEQ ID NO: 1885846
cccucaguguuccugauau

SEQ ID NO: 2372103 - RNA, 19 nt, Artificial Sequence
  Description of Artificial Sequence: Synthetic oligonucleotide
  Antisense strand to SEQ ID NO: 2372102
auaucaggaacacugaggg

SEQ ID NO: 2372104 - RNA, 19 nt, Artificial Sequence
  Description of Artificial Sequence: Synthetic oligonucleotide
  Sense strand starting at position 3244 of SEQ ID NO: 1885846
cucaguguuccugauaucu

SEQ ID NO: 2372105 - RNA, 19 nt, Artificial Sequence
  Description of Artificial Sequence: Synthetic oligonucleotide
  Antisense strand to SEQ ID NO: 2372104
agauaucaggaacacugag

SEQ ID NO: 2372106 - RNA, 19 nt, Artificial Sequence
  Description of Artificial Sequence: Synthetic oligonucleotide
  Sense strand starting at position 3370 of SEQ ID NO: 1885846
aucccauucugguccagaa

SEQ ID NO: 2372107 - RNA, 19 nt, Artificial Sequence
  Description of Artificial Sequence: Synthetic oligonucleotide
  Antisense strand to SEQ ID NO: 2372106
uucuggaccagaaugggau

SEQ ID NO: 2372108 - RNA, 19 nt, Artificial Sequence
  Description of Artificial Sequence: Synthetic oligonucleotide
  Sense strand starting at position 3390 of SEQ ID NO: 1885846
cuacaaaugucuccuggga

SEQ ID NO: 2372109 - RNA, 19 nt, Artificial Sequence
  Description of Artificial Sequence: Synthetic oligonucleotide
  Antisense strand to SEQ ID NO: 2372108
ucccaggagacauuuguag

SEQ ID NO: 2372110 - RNA, 19 nt, Artificial Sequence
  Description of Artificial Sequence: Synthetic oligonucleotide
  Sense strand starting at position 3394 of SEQ ID NO: 1885846
aaaugucuccugggacauc

SEQ ID NO: 2372111 - RNA, 19 nt, Artificial Sequence
  Description of Artificial Sequence: Synthetic oligonucleotide
  Antisense strand to SEQ ID NO: 2372110
gaugucccaggagacauuu

SEQ ID NO: 2372112 - RNA, 19 nt, Artificial Sequence
  Description of Artificial Sequence: Synthetic oligonucleotide
  Sense strand starting at position 3491 of SEQ ID NO: 1885846
cuaucagaguccucaagag

SEQ ID NO: 2372113 - RNA, 19 nt, Artificial Sequence
  Description of Artificial Sequence: Synthetic oligonucleotide
  Antisense strand to SEQ ID NO: 2372112
cucuugaggacucugauag

SEQ ID NO: 2372114 - RNA, 19 nt, Artificial Sequence
  Description of Artificial Sequence: Synthetic oligonucleotide
  Sense strand starting at position 3508 of SEQ ID NO: 1885846
aggauaggcugucugaaac

SEQ ID NO: 2372115 - RNA, 19 nt, Artificial Sequence
  Description of Artificial Sequence: Synthetic oligonucleotide
  Antisense strand to SEQ ID NO: 2372114
guuucagacagccuauccu

SEQ ID NO: 2372116 - RNA, 19 nt, Artificial Sequence
  Description of Artificial Sequence: Synthetic oligonucleotide
  Sense strand starting at position 3577 of SEQ ID NO: 1885846
cagguuccacuuugaggaa

SEQ ID NO: 2372117 - RNA, 19 nt, Artificial Sequence
  Description of Artificial Sequence: Synthetic oligonucleotide
  Antisense strand to SEQ ID NO: 2372116
uuccucaaaguggaaccug

SEQ ID NO: 2372118 - RNA, 19 nt, Artificial Sequence
  Description of Artificial Sequence: Synthetic oligonucleotide
  Sense strand starting at position 3590 of SEQ ID NO: 1885846
gaggaaagcuugucaagug

SEQ ID NO: 2372119 - RNA, 19 nt, Artificial Sequence
  Description of Artificial Sequence: Synthetic oligonucleotide
  Antisense strand to SEQ ID NO: 2372118
cacuugacaagcuuuccuc

SEQ ID NO: 2372120 - RNA, 19 nt, Artificial Sequence
  Description of Artificial Sequence: Synthetic oligonucleotide
  Sense strand starting at position 3717 of SEQ ID NO: 1885846
gcugaagaacaaugguaau

SEQ ID NO: 2372121 - RNA, 19 nt, Artificial Sequence
  Description of Artificial Sequence: Synthetic oligonucleotide
  Antisense strand to SEQ ID NO: 2372120
auuaccauuguucuucagc

SEQ ID NO: 2372122 - RNA, 19 nt, Artificial Sequence
  Description of Artificial Sequence: Synthetic oligonucleotide
  Sense strand starting at position 3951 of SEQ ID NO: 1885846
gugauaaggucccuccaaa

SEQ ID NO: 2372123 - RNA, 19 nt, Artificial Sequence
  Description of Artificial Sequence: Synthetic oligonucleotide
  Antisense strand to SEQ ID NO: 2372122
uuuggagggaccuuaucac

SEQ ID NO: 2372124 - RNA, 19 nt, Artificial Sequence
  Description of Artificial Sequence: Synthetic oligonucleotide
  Sense strand starting at position 823 of SEQ ID NO: 1885847
acaaguucucccuggguac

SEQ ID NO: 2372125 - RNA, 19 nt, Artificial Sequence
  Description of Artificial Sequence: Synthetic oligonucleotide
  Antisense strand to SEQ ID NO: 2372124
guacccagggagaacuugu

SEQ ID NO: 2372126 - RNA, 19 nt, Artificial Sequence
  Description of Artificial Sequence: Synthetic oligonucleotide
  Sense strand starting at position 2167 of SEQ ID NO: 1885847
cuggguccucaguaccaau

SEQ ID NO: 2372127 - RNA, 19 nt, Artificial Sequence
  Description of Artificial Sequence: Synthetic oligonucleotide
  Antisense strand to SEQ ID NO: 2372126
auugguacugaggacccag

SEQ ID NO: 2372128 - RNA, 19 nt, Artificial Sequence
  Description of Artificial Sequence: Synthetic oligonucleotide
  Sense strand starting at position 2219 of SEQ ID NO: 1885847
ucagcuggugcccaugaau

SEQ ID NO: 2372129 - RNA, 19 nt, Artificial Sequence
  Description of Artificial Sequence: Synthetic oligonucleotide
  Antisense strand to SEQ ID NO: 2372128
auucaugggcaccagcuga

SEQ ID NO: 2372130 - RNA, 19 nt, Artificial Sequence
  Description of Artificial Sequence: Synthetic oligonucleotide
  Sense strand starting at position 2347 of SEQ ID NO: 1885847
cuucuacuuccggagcaga

SEQ ID NO: 2372131 - RNA, 19 nt, Artificial Sequence
  Description of Artificial Sequence: Synthetic oligonucleotide
  Antisense strand to SEQ ID NO: 2372130
ucugcuccggaaguagaag

SEQ ID NO: 2372132 - RNA, 19 nt, Artificial Sequence
  Description of Artificial Sequence: Synthetic oligonucleotide
  Sense strand starting at position 2500 of SEQ ID NO: 1885847
cgcgcaaguguguuugcau

SEQ ID NO: 2372133 - RNA, 19 nt, Artificial Sequence
  Description of Artificial Sequence: Synthetic oligonucleotide
  Antisense strand to SEQ ID NO: 2372132
augcaaacacacuugcgcg

SEQ ID NO: 2372134 - RNA, 19 nt, Artificial Sequence
  Description of Artificial Sequence: Synthetic oligonucleotide
  Sense strand starting at position 2669 of SEQ ID NO: 1885847
uaauuaaaucguggaugcu

SEQ ID NO: 2372135 - RNA, 19 nt, Artificial Sequence
  Description of Artificial Sequence: Synthetic oligonucleotide
  Antisense strand to SEQ ID NO: 2372134
agcauccacgauuuaauua

SEQ ID NO: 2372136 - RNA, 19 nt, Artificial Sequence
  Description of Artificial Sequence: Synthetic oligonucleotide
  Sense strand starting at position 2670 of SEQ ID NO: 1885847
aauuaaaucguggaugcua

SEQ ID NO: 2372137 - RNA, 19 nt, Artificial Sequence
  Description of Artificial Sequence: Synthetic oligonucleotide
  Antisense strand to SEQ ID NO: 2372136
uagcauccacgauuuaauu

SEQ ID NO: 2372138 - RNA, 19 nt, Artificial Sequence
  Description of Artificial Sequence: Synthetic oligonucleotide
  Sense strand starting at position 2672 of SEQ ID NO: 1885847
uuaaaucguggaugcuaau

SEQ ID NO: 2372139 - RNA, 19 nt, Artificial Sequence
  Description of Artificial Sequence: Synthetic oligonucleotide
  Antisense strand to SEQ ID NO: 2372138
auuagcauccacgauuuaa

SEQ ID NO: 2372140 - RNA, 19 nt, Artificial Sequence
  Description of Artificial Sequence: Synthetic oligonucleotide
  Sense strand starting at position 2678 of SEQ ID NO: 1885847
cguggaugcuaauuaacau

SEQ ID NO: 2372141 - RNA, 19 nt, Artificial Sequence
  Description of Artificial Sequence: Synthetic oligonucleotide
  Antisense strand to SEQ ID NO: 2372140
auguuaauuagcauccacg

SEQ ID NO: 2372142 - RNA, 19 nt, Artificial Sequence
  Description of Artificial Sequence: Synthetic oligonucleotide
  Sense strand starting at position 2776 of SEQ ID NO: 1885847
gagagccagucuucuuaga

SEQ ID NO: 2372143 - RNA, 19 nt, Artificial Sequence
  Description of Artificial Sequence: Synthetic oligonucleotide
  Antisense strand to SEQ ID NO: 2372142
ucuaagaagacuggcucuc

SEQ ID NO: 2372144 - RNA, 19 nt, Artificial Sequence
  Description of Artificial Sequence: Synthetic oligonucleotide
  Sense strand starting at position 2778 of SEQ ID NO: 1885847
gagccagucuucuuagaag

SEQ ID NO: 2372145 - RNA, 19 nt, Artificial Sequence
  Description of Artificial Sequence: Synthetic oligonucleotide
  Antisense strand to SEQ ID NO: 2372144
cuucuaagaagacuggcuc

SEQ ID NO: 2372146 - RNA, 19 nt, Artificial Sequence
  Description of Artificial Sequence: Synthetic oligonucleotide
  Sense strand starting at position 2781 of SEQ ID NO: 1885847
ccagucuucuuagaagaac

SEQ ID NO: 2372147 - RNA, 19 nt, Artificial Sequence
  Description of Artificial Sequence: Synthetic oligonucleotide
  Antisense strand to SEQ ID NO: 2372146
guucuucuaagaagacugg

SEQ ID NO: 2372148 - RNA, 19 nt, Artificial Sequence
  Description of Artificial Sequence: Synthetic oligonucleotide
  Sense strand starting at position 2841 of SEQ ID NO: 1885847
aagagagcugaguggugau

SEQ ID NO: 2372149 - RNA, 19 nt, Artificial Sequence
  Description of Artificial Sequence: Synthetic oligonucleotide
  Antisense strand to SEQ ID NO: 2372148
aucaccacucagcucucuu

SEQ ID NO: 2372150 - RNA, 19 nt, Artificial Sequence
  Description of Artificial Sequence: Synthetic oligonucleotide
  Sense strand starting at position 2937 of SEQ ID NO: 1885847
cgagccuucuuacccaaau

SEQ ID NO: 2372151 - RNA, 19 nt, Artificial Sequence
  Description of Artificial Sequence: Synthetic oligonucleotide
  Antisense strand to SEQ ID NO: 2372150
auuuggguaagaaggcucg

SEQ ID NO: 2372152 - RNA, 19 nt, Artificial Sequence
  Description of Artificial Sequence: Synthetic oligonucleotide
  Sense strand starting at position 3176 of SEQ ID NO: 1885847
uugucuaccucucugucaa

SEQ ID NO: 2372153 - RNA, 19 nt, Artificial Sequence
  Description of Artificial Sequence: Synthetic oligonucleotide
  Antisense strand to SEQ ID NO: 2372152
uugacagagagguagacaa

SEQ ID NO: 2372154 - RNA, 19 nt, Artificial Sequence
  Description of Artificial Sequence: Synthetic oligonucleotide
  Sense strand starting at position 3198 of SEQ ID NO: 1885847
gaaggagcauucuaggaac

SEQ ID NO: 2372155 - RNA, 19 nt, Artificial Sequence
  Description of Artificial Sequence: Synthetic oligonucleotide
  Antisense strand to SEQ ID NO: 2372154
guuccuagaaugcuccuuc

SEQ ID NO: 2372156 - RNA, 19 nt, Artificial Sequence
  Description of Artificial Sequence: Synthetic oligonucleotide
  Sense strand starting at position 3200 of SEQ ID NO: 1885847
aggagcauucuaggaacau

SEQ ID NO: 2372157 - RNA, 19 nt, Artificial Sequence
  Description of Artificial Sequence: Synthetic oligonucleotide
  Antisense strand to SEQ ID NO: 2372156
auguuccuagaaugcuccu

SEQ ID NO: 2372158 - RNA, 19 nt, Artificial Sequence
  Description of Artificial Sequence: Synthetic oligonucleotide
  Sense strand starting at position 3201 of SEQ ID NO: 1885847
ggagcauucuaggaacauc

SEQ ID NO: 2372159 - RNA, 19 nt, Artificial Sequence
  Description of Artificial Sequence: Synthetic oligonucleotide
  Antisense strand to SEQ ID NO: 2372158
gauguuccuagaaugcucc

SEQ ID NO: 2372160 - RNA, 19 nt, Artificial Sequence
  Description of Artificial Sequence: Synthetic oligonucleotide
  Sense strand starting at position 3239 of SEQ ID NO: 1885847
agaucaauauagggaaaug

SEQ ID NO: 2372161 - RNA, 19 nt, Artificial Sequence
  Description of Artificial Sequence: Synthetic oligonucleotide
  Antisense strand to SEQ ID NO: 2372160
cauuucccuauauugaucu

SEQ ID NO: 2372162 - RNA, 19 nt, Artificial Sequence
  Description of Artificial Sequence: Synthetic oligonucleotide
  Sense strand starting at position 3250 of SEQ ID NO: 1885847
gggaaaugugaggguauca

SEQ ID NO: 2372163 - RNA, 19 nt, Artificial Sequence
  Description of Artificial Sequence: Synthetic oligonucleotide
  Antisense strand to SEQ ID NO: 2372162
ugauacccucacauuuccc

SEQ ID NO: 2372164 - RNA, 19 nt, Artificial Sequence
  Description of Artificial Sequence: Synthetic oligonucleotide
  Sense strand starting at position 3255 of SEQ ID NO: 1885847
augugaggguaucaaauca

SEQ ID NO: 2372165 - RNA, 19 nt, Artificial Sequence
  Description of Artificial Sequence: Synthetic oligonucleotide
  Antisense strand to SEQ ID NO: 2372164
ugauuugauacccucacau

SEQ ID NO: 2372166 - RNA, 19 nt, Artificial Sequence
  Description of Artificial Sequence: Synthetic oligonucleotide
  Sense strand starting at position 3266 of SEQ ID NO: 1885847
ucaaaucaaugggaauuau

SEQ ID NO: 2372167 - RNA, 19 nt, Artificial Sequence
  Description of Artificial Sequence: Synthetic oligonucleotide
  Antisense strand to SEQ ID NO: 2372166
auaauucccauugauuuga

SEQ ID NO: 2372168 - RNA, 19 nt, Artificial Sequence
  Description of Artificial Sequence: Synthetic oligonucleotide
  Sense strand starting at position 3276 of SEQ ID NO: 1885847
gggaauuauuaauagcaga

SEQ ID NO: 2372169 - RNA, 19 nt, Artificial Sequence
  Description of Artificial Sequence: Synthetic oligonucleotide
  Antisense strand to SEQ ID NO: 2372168
ucugcuauuaauaauuccc

SEQ ID NO: 2372170 - RNA, 19 nt, Artificial Sequence
  Description of Artificial Sequence: Synthetic oligonucleotide
  Sense strand starting at position 3291 of SEQ ID NO: 1885847
cagagaaucgcugacagug

SEQ ID NO: 2372171 - RNA, 19 nt, Artificial Sequence
  Description of Artificial Sequence: Synthetic oligonucleotide
  Antisense strand to SEQ ID NO: 2372170
cacugucagcgauucucug

SEQ ID NO: 2372172 - RNA, 19 nt, Artificial Sequence
  Description of Artificial Sequence: Synthetic oligonucleotide
  Sense strand starting at position 3300 of SEQ ID NO: 1885847
gcugacagugccuguaaga

SEQ ID NO: 2372173 - RNA, 19 nt, Artificial Sequence
  Description of Artificial Sequence: Synthetic oligonucleotide
  Antisense strand to SEQ ID NO: 2372172
ucuuacaggcacugucagc

SEQ ID NO: 2372174 - RNA, 19 nt, Artificial Sequence
  Description of Artificial Sequence: Synthetic oligonucleotide
  Sense strand starting at position 3311 of SEQ ID NO: 1885847
cuguaagacugccuuagga

SEQ ID NO: 2372175 - RNA, 19 nt, Artificial Sequence
  Description of Artificial Sequence: Synthetic oligonucleotide
  Antisense strand to SEQ ID NO: 2372174
uccuaaggcagucuuacag

SEQ ID NO: 2372176 - RNA, 19 nt, Artificial Sequence
  Description of Artificial Sequence: Synthetic oligonucleotide
  Sense strand starting at position 3358 of SEQ ID NO: 1885847
gcaguuccagaguaggaaa

SEQ ID NO: 2372177 - RNA, 19 nt, Artificial Sequence
  Description of Artificial Sequence: Synthetic oligonucleotide
  Antisense strand to SEQ ID NO: 2372176
uuuccuacucuggaacugc

SEQ ID NO: 2372178 - RNA, 19 nt, Artificial Sequence
  Description of Artificial Sequence: Synthetic oligonucleotide
  Sense strand starting at position 3422 of SEQ ID NO: 1885847
gucaguaagggcuaucuaa

SEQ ID NO: 2372179 - RNA, 19 nt, Artificial Sequence
  Description of Artificial Sequence: Synthetic oligonucleotide
  Antisense strand to SEQ ID NO: 2372178
uuagauagcccuuacugac

SEQ ID NO: 2372180 - RNA, 19 nt, Artificial Sequence
  Description of Artificial Sequence: Synthetic oligonucleotide
  Sense strand starting at position 3435 of SEQ ID NO: 1885847
aucuaacuuugaguuguua

SEQ ID NO: 2372181 - RNA, 19 nt, Artificial Sequence
  Description of Artificial Sequence: Synthetic oligonucleotide
  Antisense strand to SEQ ID NO: 2372180
uaacaacucaaaguuagau

SEQ ID NO: 2372182 - RNA, 19 nt, Artificial Sequence
  Description of Artificial Sequence: Synthetic oligonucleotide
  Sense strand starting at position 3469 of SEQ ID NO: 1885847
gagagaugccaguauagug

SEQ ID NO: 2372183 - RNA, 19 nt, Artificial Sequence
  Description of Artificial Sequence: Synthetic oligonucleotide
  Antisense strand to SEQ ID NO: 2372182
cacuauacuggcaucucuc

SEQ ID NO: 2372184 - RNA, 19 nt, Artificial Sequence
  Description of Artificial Sequence: Synthetic oligonucleotide
  Sense strand starting at position 3498 of SEQ ID NO: 1885847
cugggugugcucugugaaa

SEQ ID NO: 2372185 - RNA, 19 nt, Artificial Sequence
  Description of Artificial Sequence: Synthetic oligonucleotide
  Antisense strand to SEQ ID NO: 2372184
uuucacagagcacacccag

SEQ ID NO: 2372186 - RNA, 19 nt, Artificial Sequence
  Description of Artificial Sequence: Synthetic oligonucleotide
  Sense strand starting at position 3500 of SEQ ID NO: 1885847
gggugugcucugugaaaca

SEQ ID NO: 2372187 - RNA, 19 nt, Artificial Sequence
  Description of Artificial Sequence: Synthetic oligonucleotide
  Antisense strand to SEQ ID NO: 2372186
uguuucacagagcacaccc

SEQ ID NO: 2372188 - RNA, 19 nt, Artificial Sequence
  Description of Artificial Sequence: Synthetic oligonucleotide
  Sense strand starting at position 3511 of SEQ ID NO: 1885847
gugaaacauuaaucugaug

SEQ ID NO: 2372189 - RNA, 19 nt, Artificial Sequence
  Description of Artificial Sequence: Synthetic oligonucleotide
  Antisense strand to SEQ ID NO: 2372188
caucagauuaauguuucac

SEQ ID NO: 2372190 - RNA, 19 nt, Artificial Sequence
  Description of Artificial Sequence: Synthetic oligonucleotide
  Sense strand starting at position 3516 of SEQ ID NO: 1885847
acauuaaucugaugaaaug

SEQ ID NO: 2372191 - RNA, 19 nt, Artificial Sequence
  Description of Artificial Sequence: Synthetic oligonucleotide
  Antisense strand to SEQ ID NO: 2372190
cauuucaucagauuaaugu

SEQ ID NO: 2372192 - RNA, 19 nt, Artificial Sequence
  Description of Artificial Sequence: Synthetic oligonucleotide
  Sense strand starting at position 3634 of SEQ ID NO: 1885847
cucugaggagcugguuaaa

SEQ ID NO: 2372193 - RNA, 19 nt, Artificial Sequence
  Description of Artificial Sequence: Synthetic oligonucleotide
  Antisense strand to SEQ ID NO: 2372192
uuuaaccagcuccucagag

SEQ ID NO: 2372194 - RNA, 19 nt, Artificial Sequence
  Description of Artificial Sequence: Synthetic oligonucleotide
  Sense strand starting at position 3657 of SEQ ID NO: 1885847
ccaaaugguugaucauguu

SEQ ID NO: 2372195 - RNA, 19 nt, Artificial Sequence
  Description of Artificial Sequence: Synthetic oligonucleotide
  Antisense strand to SEQ ID NO: 2372194
aacaugaucaaccauuugg

SEQ ID NO: 2372196 - RNA, 19 nt, Artificial Sequence
  Description of Artificial Sequence: Synthetic oligonucleotide
  Sense strand starting at position 3664 of SEQ ID NO: 1885847
guugaucauguuuaaccca

SEQ ID NO: 2372197 - RNA, 19 nt, Artificial Sequence
  Description of Artificial Sequence: Synthetic oligonucleotide
  Antisense strand to SEQ ID NO: 2372196
uggguuaaacaugaucaac

SEQ ID NO: 2372198 - RNA, 19 nt, Artificial Sequence
  Description of Artificial Sequence: Synthetic oligonucleotide
  Sense strand starting at position 3961 of SEQ ID NO: 1885847
aguauucugcuuuguggaa

SEQ ID NO: 2372199 - RNA, 19 nt, Artificial Sequence
  Description of Artificial Sequence: Synthetic oligonucleotide
  Antisense strand to SEQ ID NO: 2372198
uuccacaaagcagaauacu

SEQ ID NO: 2372200 - RNA, 19 nt, Artificial Sequence
  Description of Artificial Sequence: Synthetic oligonucleotide
  Sense strand starting at position 3962 of SEQ ID NO: 1885847
guauucugcuuuguggaaa

SEQ ID NO: 2372201 - RNA, 19 nt, Artificial Sequence
  Description of Artificial Sequence: Synthetic oligonucleotide
  Antisense strand to SEQ ID NO: 2372200
uuuccacaaagcagaauac

SEQ ID NO: 2372202 - RNA, 19 nt, Artificial Sequence
  Description of Artificial Sequence: Synthetic oligonucleotide
  Sense strand starting at position 3973 of SEQ ID NO: 1885847
uguggaaagcccuaucaag

SEQ ID NO: 2372203 - RNA, 19 nt, Artificial Sequence
  Description of Artificial Sequence: Synthetic oligonucleotide
  Antisense strand to SEQ ID NO: 2372202
cuugauagggcuuuccaca

SEQ ID NO: 2372204 - RNA, 19 nt, Artificial Sequence
  Description of Artificial Sequence: Synthetic oligonucleotide
  Sense strand starting at position 25 of SEQ ID NO: 1885849
guguuagcccaguaaauaa

SEQ ID NO: 2372205 - RNA, 19 nt, Artificial Sequence
  Description of Artificial Sequence: Synthetic oligonucleotide
  Antisense strand to SEQ ID NO: 2372204
uuauuuacugggcuaacac

SEQ ID NO: 2372206 - RNA, 19 nt, Artificial Sequence
  Description of Artificial Sequence: Synthetic oligonucleotide
  Sense strand starting at position 113 of SEQ ID NO: 1885849
aguccucuucuuggaaauc

SEQ ID NO: 2372207 - RNA, 19 nt, Artificial Sequence
  Description of Artificial Sequence: Synthetic oligonucleotide
  Antisense strand to SEQ ID NO: 2372206
gauuuccaagaagaggacu

SEQ ID NO: 2372208 - RNA, 19 nt, Artificial Sequence
  Description of Artificial Sequence: Synthetic oligonucleotide
  Sense strand starting at position 114 of SEQ ID NO: 1885849
guccucuucuuggaaauca

SEQ ID NO: 2372209 - RNA, 19 nt, Artificial Sequence
  Description of Artificial Sequence: Synthetic oligonucleotide
  Antisense strand to SEQ ID NO: 2372208
ugauuuccaagaagaggac

SEQ ID NO: 2372210 - RNA, 19 nt, Artificial Sequence
  Description of Artificial Sequence: Synthetic oligonucleotide
  Sense strand starting at position 146 of SEQ ID NO: 1885849
uguagaauguucguccaaa

SEQ ID NO: 2372211 - RNA, 19 nt, Artificial Sequence
  Description of Artificial Sequence: Synthetic oligonucleotide
  Antisense strand to SEQ ID NO: 2372210
uuuggacgaacauucuaca

SEQ ID NO: 2372212 - RNA, 19 nt, Artificial Sequence
  Description of Artificial Sequence: Synthetic oligonucleotide
  Sense strand starting at position 147 of SEQ ID NO: 1885849
guagaauguucguccaaau

SEQ ID NO: 2372213 - RNA, 19 nt, Artificial Sequence
  Description of Artificial Sequence: Synthetic oligonucleotide
  Antisense strand to SEQ ID NO: 2372212
auuuggacgaacauucuac

SEQ ID NO: 2372214 - RNA, 19 nt, Artificial Sequence
  Description of Artificial Sequence: Synthetic oligonucleotide
  Sense strand starting at position 157 of SEQ ID NO: 1885849
cguccaaaugacuggacua

SEQ ID NO: 2372215 - RNA, 19 nt, Artificial Sequence
  Description of Artificial Sequence: Synthetic oligonucleotide
  Antisense strand to SEQ ID NO: 2372214
uaguccagucauuuggacg

SEQ ID NO: 2372216 - RNA, 19 nt, Artificial Sequence
  Description of Artificial Sequence: Synthetic oligonucleotide
  Sense strand starting at position 185 of SEQ ID NO: 1885849
agcucaagccuguaacuua

SEQ ID NO: 2372217 - RNA, 19 nt, Artificial Sequence
  Description of Artificial Sequence: Synthetic oligonucleotide
  Antisense strand to SEQ ID NO: 2372216
uaaguuacaggcuugagcu

SEQ ID NO: 2372218 - RNA, 19 nt, Artificial Sequence
  Description of Artificial Sequence: Synthetic oligonucleotide
  Sense strand starting at position 192 of SEQ ID NO: 1885849
gccuguaacuuacuaguuu

SEQ ID NO: 2372219 - RNA, 19 nt, Artificial Sequence
  Description of Artificial Sequence: Synthetic oligonucleotide
  Antisense strand to SEQ ID NO: 2372218
aaacuaguaaguuacaggc

SEQ ID NO: 2372220 - RNA, 19 nt, Artificial Sequence
  Description of Artificial Sequence: Synthetic oligonucleotide
  Sense strand starting at position 267 of SEQ ID NO: 1885849
gcucuuuacuaacagagac

SEQ ID NO: 2372221 - RNA, 19 nt, Artificial Sequence
  Description of Artificial Sequence: Synthetic oligonucleotide
  Antisense strand to SEQ ID NO: 2372220
gucucuguuaguaaagagc

SEQ ID NO: 2372222 - RNA, 19 nt, Artificial Sequence
  Description of Artificial Sequence: Synthetic oligonucleotide
  Sense strand starting at position 306 of SEQ ID NO: 1885849
gggacuuucucugcaccaa

SEQ ID NO: 2372223 - RNA, 19 nt, Artificial Sequence
  Description of Artificial Sequence: Synthetic oligonucleotide
  Antisense strand to SEQ ID NO: 2372222
uuggugcagagaaaguccc

SEQ ID NO: 2372224 - RNA, 19 nt, Artificial Sequence
  Description of Artificial Sequence: Synthetic oligonucleotide
  Sense strand starting at position 324 of SEQ ID NO: 1885849
acacaaauguacguguaga

SEQ ID NO: 2372225 - RNA, 19 nt, Artificial Sequence
  Description of Artificial Sequence: Synthetic oligonucleotide
  Antisense strand to SEQ ID NO: 2372224
ucuacacguacauuugugu

SEQ ID NO: 2372226 - RNA, 19 nt, Artificial Sequence
  Description of Artificial Sequence: Synthetic oligonucleotide
  Sense strand starting at position 533 of SEQ ID NO: 1885849
gcaugcaucaggcaucgua

SEQ ID NO: 2372227 - RNA, 19 nt, Artificial Sequence
  Description of Artificial Sequence: Synthetic oligonucleotide
  Antisense strand to SEQ ID NO: 2372226
uacgaugccugaugcaugc

SEQ ID NO: 2372228 - RNA, 19 nt, Artificial Sequence
  Description of Artificial Sequence: Synthetic oligonucleotide
  Sense strand starting at position 542 of SEQ ID NO: 1885849
aggcaucguaucugcauua

SEQ ID NO: 2372229 - RNA, 19 nt, Artificial Sequence
  Description of Artificial Sequence: Synthetic oligonucleotide
  Antisense strand to SEQ ID NO: 2372228
uaaugcagauacgaugccu

SEQ ID NO: 2372230 - RNA, 19 nt, Artificial Sequence
  Description of Artificial Sequence: Synthetic oligonucleotide
  Sense strand starting at position 543 of SEQ ID NO: 1885849
ggcaucguaucugcauuaa

SEQ ID NO: 2372231 - RNA, 19 nt, Artificial Sequence
  Description of Artificial Sequence: Synthetic oligonucleotide
  Antisense strand to SEQ ID NO: 2372230
uuaaugcagauacgaugcc

SEQ ID NO: 2372232 - RNA, 19 nt, Artificial Sequence
  Description of Artificial Sequence: Synthetic oligonucleotide
  Sense strand starting at position 597 of SEQ ID NO: 1885849
cucagaaguucugcugaca

SEQ ID NO: 2372233 - RNA, 19 nt, Artificial Sequence
  Description of Artificial Sequence: Synthetic oligonucleotide
  Antisense strand to SEQ ID NO: 2372232
ugucagcagaacuucugag

SEQ ID NO: 2372234 - RNA, 19 nt, Artificial Sequence
  Description of Artificial Sequence: Synthetic oligonucleotide
  Sense strand starting at position 962 of SEQ ID NO: 1885849
gugcuugcuacaggcaauu

SEQ ID NO: 2372235 - RNA, 19 nt, Artificial Sequence
  Description of Artificial Sequence: Synthetic oligonucleotide
  Antisense strand to SEQ ID NO: 2372234
aauugccuguagcaagcac

SEQ ID NO: 2372236 - RNA, 19 nt, Artificial Sequence
  Description of Artificial Sequence: Synthetic oligonucleotide
  Sense strand starting at position 993 of SEQ ID NO: 1885849
acagauacucauuggagca

SEQ ID NO: 2372237 - RNA, 19 nt, Artificial Sequence
  Description of Artificial Sequence: Synthetic oligonucleotide
  Antisense strand to SEQ ID NO: 2372236
ugcuccaaugaguaucugu

SEQ ID NO: 2372238 - RNA, 19 nt, Artificial Sequence
  Description of Artificial Sequence: Synthetic oligonucleotide
  Sense strand starting at position 998 of SEQ ID NO: 1885849
uacucauuggagcaaguau

SEQ ID NO: 2372239 - RNA, 19 nt, Artificial Sequence
  Description of Artificial Sequence: Synthetic oligonucleotide
  Antisense strand to SEQ ID NO: 2372238
auacuugcuccaaugagua

SEQ ID NO: 2372240 - RNA, 19 nt, Artificial Sequence
  Description of Artificial Sequence: Synthetic oligonucleotide
  Sense strand starting at position 1043 of SEQ ID NO: 1885849
gacggaagcaguuaguaga

SEQ ID NO: 2372241 - RNA, 19 nt, Artificial Sequence
  Description of Artificial Sequence: Synthetic oligonucleotide
  Antisense strand to SEQ ID NO: 2372240
ucuacuaacugcuuccguc

SEQ ID NO: 2372242 - RNA, 19 nt, Artificial Sequence
  Description of Artificial Sequence: Synthetic oligonucleotide
  Sense strand starting at position 1046 of SEQ ID NO: 1885849
ggaagcaguuaguagaaga

SEQ ID NO: 2372243 - RNA, 19 nt, Artificial Sequence
  Description of Artificial Sequence: Synthetic oligonucleotide
  Antisense strand to SEQ ID NO: 2372242
ucuucuacuaacugcuucc

SEQ ID NO: 2372244 - RNA, 19 nt, Artificial Sequence
  Description of Artificial Sequence: Synthetic oligonucleotide
  Sense strand starting at position 1064 of SEQ ID NO: 1885849
aaaugagacagguguguuu

SEQ ID NO: 2372245 - RNA, 19 nt, Artificial Sequence
  Description of Artificial Sequence: Synthetic oligonucleotide
  Antisense strand to SEQ ID NO: 2372244
aaacacaccugucucauuu

SEQ ID NO: 2372246 - RNA, 19 nt, Artificial Sequence
  Description of Artificial Sequence: Synthetic oligonucleotide
  Sense strand starting at position 1071 of SEQ ID NO: 1885849
acagguguguuuguuacaa

SEQ ID NO: 2372247 - RNA, 19 nt, Artificial Sequence
  Description of Artificial Sequence: Synthetic oligonucleotide
  Antisense strand to SEQ ID NO: 2372246
uuguaacaaacacaccugu

SEQ ID NO: 2372248 - RNA, 19 nt, Artificial Sequence
  Description of Artificial Sequence: Synthetic oligonucleotide
  Sense strand starting at position 1079 of SEQ ID NO: 1885849
guuuguuacaaagggaaca

SEQ ID NO: 2372249 - RNA, 19 nt, Artificial Sequence
  Description of Artificial Sequence: Synthetic oligonucleotide
  Antisense strand to SEQ ID NO: 2372248
uguucccuuuguaacaaac

SEQ ID NO: 2372250 - RNA, 19 nt, Artificial Sequence
  Description of Artificial Sequence: Synthetic oligonucleotide
  Sense strand starting at position 1092 of SEQ ID NO: 1885849
ggaacagucuggcagggaa

SEQ ID NO: 2372251 - RNA, 19 nt, Artificial Sequence
  Description of Artificial Sequence: Synthetic oligonucleotide
  Antisense strand to SEQ ID NO: 2372250
uucccugccagacuguucc

SEQ ID NO: 2372252 - RNA, 19 nt, Artificial Sequence
  Description of Artificial Sequence: Synthetic oligonucleotide
  Sense strand starting at position 1153 of SEQ ID NO: 1885849
ccuugugaccuugauuaag

SEQ ID NO: 2372253 - RNA, 19 nt, Artificial Sequence
  Description of Artificial Sequence: Synthetic oligonucleotide
  Antisense strand to SEQ ID NO: 2372252
cuuaaucaaggucacaagg

SEQ ID NO: 2372254 - RNA, 19 nt, Artificial Sequence
  Description of Artificial Sequence: Synthetic oligonucleotide
  Sense strand starting at position 1155 of SEQ ID NO: 1885849
uugugaccuugauuaaguc

SEQ ID NO: 2372255 - RNA, 19 nt, Artificial Sequence
  Description of Artificial Sequence: Synthetic oligonucleotide
  Antisense strand to SEQ ID NO: 2372254
gacuuaaucaaggucacaa

SEQ ID NO: 2372256 - RNA, 19 nt, Artificial Sequence
  Description of Artificial Sequence: Synthetic oligonucleotide
  Sense strand starting at position 1300 of SEQ ID NO: 1885849
cccaaaugcuaagucugaa

SEQ ID NO: 2372257 - RNA, 19 nt, Artificial Sequence
  Description of Artificial Sequence: Synthetic oligonucleotide
  Antisense strand to SEQ ID NO: 2372256
uucagacuuagcauuuggg

SEQ ID NO: 2372258 - RNA, 19 nt, Artificial Sequence
  Description of Artificial Sequence: Synthetic oligonucleotide
  Sense strand starting at position 1335 of SEQ ID NO: 1885849
ugccguuaucuagaccaga

SEQ ID NO: 2372259 - RNA, 19 nt, Artificial Sequence
  Description of Artificial Sequence: Synthetic oligonucleotide
  Antisense strand to SEQ ID NO: 2372258
ucuggucuagauaacggca

SEQ ID NO: 2372260 - RNA, 19 nt, Artificial Sequence
  Description of Artificial Sequence: Synthetic oligonucleotide
  Sense strand starting at position 3008 of SEQ ID NO: 1885849
ccuuauaucuuccagggaa

SEQ ID NO: 2372261 - RNA, 19 nt, Artificial Sequence
  Description of Artificial Sequence: Synthetic oligonucleotide
  Antisense strand to SEQ ID NO: 2372260
uucccuggaagauauaagg

SEQ ID NO: 2372262 - RNA, 19 nt, Artificial Sequence
  Description of Artificial Sequence: Synthetic oligonucleotide
  Sense strand starting at position 3053 of SEQ ID NO: 1885849
uaguuaagucguggucaaa

SEQ ID NO: 2372263 - RNA, 19 nt, Artificial Sequence
  Description of Artificial Sequence: Synthetic oligonucleotide
  Antisense strand to SEQ ID NO: 2372262
uuugaccacgacuuaacua

SEQ ID NO: 2372264 - RNA, 19 nt, Artificial Sequence
  Description of Artificial Sequence: Synthetic oligonucleotide
  Sense strand starting at position 3171 of SEQ ID NO: 1885849
cuuccacuuucuuggaaga

SEQ ID NO: 2372265 - RNA, 19 nt, Artificial Sequence
  Description of Artificial Sequence: Synthetic oligonucleotide
  Antisense strand to SEQ ID NO: 2372264
ucuuccaagaaaguggaag

SEQ ID NO: 2372266 - RNA, 19 nt, Artificial Sequence
  Description of Artificial Sequence: Synthetic oligonucleotide
  Sense strand starting at position 3173 of SEQ ID NO: 1885849
uccacuuucuuggaagacu

SEQ ID NO: 2372267 - RNA, 19 nt, Artificial Sequence
  Description of Artificial Sequence: Synthetic oligonucleotide
  Antisense strand to SEQ ID NO: 2372266
agucuuccaagaaagugga

SEQ ID NO: 2372268 - RNA, 19 nt, Artificial Sequence
  Description of Artificial Sequence: Synthetic oligonucleotide
  Sense strand starting at position 3278 of SEQ ID NO: 1885849
uggaguccuugucuccaaa

SEQ ID NO: 2372269 - RNA, 19 nt, Artificial Sequence
  Description of Artificial Sequence: Synthetic oligonucleotide
  Antisense strand to SEQ ID NO: 2372268
uuuggagacaaggacucca

SEQ ID NO: 2372270 - RNA, 19 nt, Artificial Sequence
  Description of Artificial Sequence: Synthetic oligonucleotide
  Sense strand starting at position 3281 of SEQ ID NO: 1885849
aguccuugucuccaaaggu

SEQ ID NO: 2372271 - RNA, 19 nt, Artificial Sequence
  Description of Artificial Sequence: Synthetic oligonucleotide
  Antisense strand to SEQ ID NO: 2372270
accuuuggagacaaggacu

SEQ ID NO: 2372272 - RNA, 19 nt, Artificial Sequence
  Description of Artificial Sequence: Synthetic oligonucleotide
  Sense strand starting at position 3290 of SEQ ID NO: 1885849
cuccaaaggucauagcuaa

SEQ ID NO: 2372273 - RNA, 19 nt, Artificial Sequence
  Description of Artificial Sequence: Synthetic oligonucleotide
  Antisense strand to SEQ ID NO: 2372272
uuagcuaugaccuuuggag

SEQ ID NO: 2372274 - RNA, 19 nt, Artificial Sequence
  Description of Artificial Sequence: Synthetic oligonucleotide
  Sense strand starting at position 3320 of SEQ ID NO: 1885849
uaaggccuuccaugaaugu

SEQ ID NO: 2372275 - RNA, 19 nt, Artificial Sequence
  Description of Artificial Sequence: Synthetic oligonucleotide
  Antisense strand to SEQ ID NO: 2372274
acauucauggaaggccuua

SEQ ID NO: 2372276 - RNA, 19 nt, Artificial Sequence
  Description of Artificial Sequence: Synthetic oligonucleotide
  Sense strand starting at position 3436 of SEQ ID NO: 1885849
gaaacauggucagagcaag

SEQ ID NO: 2372277 - RNA, 19 nt, Artificial Sequence
  Description of Artificial Sequence: Synthetic oligonucleotide
  Antisense strand to SEQ ID NO: 2372276
cuugcucugaccauguuuc

SEQ ID NO: 2372278 - RNA, 19 nt, Artificial Sequence
  Description of Artificial Sequence: Synthetic oligonucleotide
  Sense strand starting at position 3888 of SEQ ID NO: 1885849
agcagagucugagugguuu

SEQ ID NO: 2372279 - RNA, 19 nt, Artificial Sequence
  Description of Artificial Sequence: Synthetic oligonucleotide
  Antisense strand to SEQ ID NO: 2372278
aaaccacucagacucugcu

SEQ ID NO: 2372280 - RNA, 19 nt, Artificial Sequence
  Description of Artificial Sequence: Synthetic oligonucleotide
  Sense strand starting at position 3906 of SEQ ID NO: 1885849
uuuguuggcuuagugacaa

SEQ ID NO: 2372281 - RNA, 19 nt, Artificial Sequence
  Description of Artificial Sequence: Synthetic oligonucleotide
  Antisense strand to SEQ ID NO: 2372280
uugucacuaagccaacaaa

SEQ ID NO: 2372282 - RNA, 19 nt, Artificial Sequence
  Description of Artificial Sequence: Synthetic oligonucleotide
  Sense strand starting at position 3958 of SEQ ID NO: 1885849
gccaguaacuccuauugaa

SEQ ID NO: 2372283 - RNA, 19 nt, Artificial Sequence
  Description of Artificial Sequence: Synthetic oligonucleotide
  Antisense strand to SEQ ID NO: 2372282
uucaauaggaguuacuggc

SEQ ID NO: 2372284 - RNA, 19 nt, Artificial Sequence
  Description of Artificial Sequence: Synthetic oligonucleotide
  Sense strand starting at position 262 of SEQ ID NO: 1885850
auauguauaagagguauag

SEQ ID NO: 2372285 - RNA, 19 nt, Artificial Sequence
  Description of Artificial Sequence: Synthetic oligonucleotide
  Antisense strand to SEQ ID NO: 2372284
cuauaccucuuauacauau

SEQ ID NO: 2372286 - RNA, 19 nt, Artificial Sequence
  Description of Artificial Sequence: Synthetic oligonucleotide
  Sense strand starting at position 264 of SEQ ID NO: 1885850
auguauaagagguauaguu

SEQ ID NO: 2372287 - RNA, 19 nt, Artificial Sequence
  Description of Artificial Sequence: Synthetic oligonucleotide
  Antisense strand to SEQ ID NO: 2372286
aacuauaccucuuauacau

SEQ ID NO: 2372288 - RNA, 19 nt, Artificial Sequence
  Description of Artificial Sequence: Synthetic oligonucleotide
  Sense strand starting at position 266 of SEQ ID NO: 1885850
guauaagagguauaguuac

SEQ ID NO: 2372289 - RNA, 19 nt, Artificial Sequence
  Description of Artificial Sequence: Synthetic oligonucleotide
  Antisense strand to SEQ ID NO: 2372288
guaacuauaccucuuauac

SEQ ID NO: 2372290 - RNA, 19 nt, Artificial Sequence
  Description of Artificial Sequence: Synthetic oligonucleotide
  Sense strand starting at position 322 of SEQ ID NO: 1885850
ccgggaugccaguaagguu

SEQ ID NO: 2372291 - RNA, 19 nt, Artificial Sequence
  Description of Artificial Sequence: Synthetic oligonucleotide
  Antisense strand to SEQ ID NO: 2372290
aaccuuacuggcaucccgg

SEQ ID NO: 2372292 - RNA, 19 nt, Artificial Sequence
  Description of Artificial Sequence: Synthetic oligonucleotide
  Sense strand starting at position 330 of SEQ ID NO: 1885850
ccaguaagguucuauuucu

SEQ ID NO: 2372293 - RNA, 19 nt, Artificial Sequence
  Description of Artificial Sequence: Synthetic oligonucleotide
  Antisense strand to SEQ ID NO: 2372292
agaaauagaaccuuacugg

SEQ ID NO: 2372294 - RNA, 19 nt, Artificial Sequence
  Description of Artificial Sequence: Synthetic oligonucleotide
  Sense strand starting at position 449 of SEQ ID NO: 1885850
ucaagcuguguacaugauu

SEQ ID NO: 2372295 - RNA, 19 nt, Artificial Sequence
  Description of Artificial Sequence: Synthetic oligonucleotide
  Antisense strand to SEQ ID NO: 2372294
aaucauguacacagcuuga

SEQ ID NO: 2372296 - RNA, 19 nt, Artificial Sequence
  Description of Artificial Sequence: Synthetic oligonucleotide
  Sense strand starting at position 456 of SEQ ID NO: 1885850
guguacaugauuugugcaa

SEQ ID NO: 2372297 - RNA, 19 nt, Artificial Sequence
  Description of Artificial Sequence: Synthetic oligonucleotide
  Antisense strand to SEQ ID NO: 2372296
uugcacaaaucauguacac

SEQ ID NO: 2372298 - RNA, 19 nt, Artificial Sequence
  Description of Artificial Sequence: Synthetic oligonucleotide
  Sense strand starting at position 647 of SEQ ID NO: 1885850
gggcuaugucuggauacca

SEQ ID NO: 2372299 - RNA, 19 nt, Artificial Sequence
  Description of Artificial Sequence: Synthetic oligonucleotide
  Antisense strand to SEQ ID NO: 2372298
ugguauccagacauagccc

SEQ ID NO: 2372300 - RNA, 19 nt, Artificial Sequence
  Description of Artificial Sequence: Synthetic oligonucleotide
  Sense strand starting at position 683 of SEQ ID NO: 1885850
agcacuuugcaguguaaac

SEQ ID NO: 2372301 - RNA, 19 nt, Artificial Sequence
  Description of Artificial Sequence: Synthetic oligonucleotide
  Antisense strand to SEQ ID NO: 2372300
guuuacacugcaaagugcu

SEQ ID NO: 2372302 - RNA, 19 nt, Artificial Sequence
  Description of Artificial Sequence: Synthetic oligonucleotide
  Sense strand starting at position 696 of SEQ ID NO: 1885850
guaaacuaaccuuggucaa

SEQ ID NO: 2372303 - RNA, 19 nt, Artificial Sequence
  Description of Artificial Sequence: Synthetic oligonucleotide
  Antisense strand to SEQ ID NO: 2372302
uugaccaagguuaguuuac

SEQ ID NO: 2372304 - RNA, 19 nt, Artificial Sequence
  Description of Artificial Sequence: Synthetic oligonucleotide
  Sense strand starting at position 724 of SEQ ID NO: 1885850
cugguauuaugaucucagu

SEQ ID NO: 2372305 - RNA, 19 nt, Artificial Sequence
  Description of Artificial Sequence: Synthetic oligonucleotide
  Antisense strand to SEQ ID NO: 2372304
acugagaucauaauaccag

SEQ ID NO: 2372306 - RNA, 19 nt, Artificial Sequence
  Description of Artificial Sequence: Synthetic oligonucleotide
  Sense strand starting at position 831 of SEQ ID NO: 1885850
auucucauccuuugucagu

SEQ ID NO: 2372307 - RNA, 19 nt, Artificial Sequence
  Description of Artificial Sequence: Synthetic oligonucleotide
  Antisense strand to SEQ ID NO: 2372306
acugacaaaggaugagaau

SEQ ID NO: 2372308 - RNA, 19 nt, Artificial Sequence
  Description of Artificial Sequence: Synthetic oligonucleotide
  Sense strand starting at position 892 of SEQ ID NO: 1885850
uagggugagucacuaaaca

SEQ ID NO: 2372309 - RNA, 19 nt, Artificial Sequence
  Description of Artificial Sequence: Synthetic oligonucleotide
  Antisense strand to SEQ ID NO: 2372308
uguuuagugacucacccua

SEQ ID NO: 2372310 - RNA, 19 nt, Artificial Sequence
  Description of Artificial Sequence: Synthetic oligonucleotide
  Sense strand starting at position 1045 of SEQ ID NO: 1885850
gcagacugcagauagacau

SEQ ID NO: 2372311 - RNA, 19 nt, Artificial Sequence
  Description of Artificial Sequence: Synthetic oligonucleotide
  Antisense strand to SEQ ID NO: 2372310
augucuaucugcagucugc

SEQ ID NO: 2372312 - RNA, 19 nt, Artificial Sequence
  Description of Artificial Sequence: Synthetic oligonucleotide
  Sense strand starting at position 1112 of SEQ ID NO: 1885850
gcuagcacuuguccaacua

SEQ ID NO: 2372313 - RNA, 19 nt, Artificial Sequence
  Description of Artificial Sequence: Synthetic oligonucleotide
  Antisense strand to SEQ ID NO: 2372312
uaguuggacaagugcuagc

SEQ ID NO: 2372314 - RNA, 19 nt, Artificial Sequence
  Description of Artificial Sequence: Synthetic oligonucleotide
  Sense strand starting at position 1137 of SEQ ID NO: 1885850
agaggaacuagcugucaag

SEQ ID NO: 2372315 - RNA, 19 nt, Artificial Sequence
  Description of Artificial Sequence: Synthetic oligonucleotide
  Antisense strand to SEQ ID NO: 2372314
cuugacagcuaguuccucu

SEQ ID NO: 2372316 - RNA, 19 nt, Artificial Sequence
  Description of Artificial Sequence: Synthetic oligonucleotide
  Sense strand starting at position 1152 of SEQ ID NO: 1885850
caaggagcucaccgcaaau

SEQ ID NO: 2372317 - RNA, 19 nt, Artificial Sequence
  Description of Artificial Sequence: Synthetic oligonucleotide
  Antisense strand to SEQ ID NO: 2372316
auuugcggugagcuccuug

SEQ ID NO: 2372318 - RNA, 19 nt, Artificial Sequence
  Description of Artificial Sequence: Synthetic oligonucleotide
  Sense strand starting at position 1162 of SEQ ID NO: 1885850
accgcaaaucccuauggau

SEQ ID NO: 2372319 - RNA, 19 nt, Artificial Sequence
  Description of Artificial Sequence: Synthetic oligonucleotide
  Antisense strand to SEQ ID NO: 2372318
auccauagggauuugcggu

SEQ ID NO: 2372320 - RNA, 19 nt, Artificial Sequence
  Description of Artificial Sequence: Synthetic oligonucleotide
  Sense strand starting at position 1206 of SEQ ID NO: 1885850
cccauucggucccuaauaa

SEQ ID NO: 2372321 - RNA, 19 nt, Artificial Sequence
  Description of Artificial Sequence: Synthetic oligonucleotide
  Antisense strand to SEQ ID NO: 2372320
uuauuagggaccgaauggg

SEQ ID NO: 2372322 - RNA, 19 nt, Artificial Sequence
  Description of Artificial Sequence: Synthetic oligonucleotide
  Sense strand starting at position 1207 of SEQ ID NO: 1885850
ccauucggucccuaauaaa

SEQ ID NO: 2372323 - RNA, 19 nt, Artificial Sequence
  Description of Artificial Sequence: Synthetic oligonucleotide
  Antisense strand to SEQ ID NO: 2372322
uuuauuagggaccgaaugg

SEQ ID NO: 2372324 - RNA, 19 nt, Artificial Sequence
  Description of Artificial Sequence: Synthetic oligonucleotide
  Sense strand starting at position 1235 of SEQ ID NO: 1885850
aaauaaucuuaggauggga

SEQ ID NO: 2372325 - RNA, 19 nt, Artificial Sequence
  Description of Artificial Sequence: Synthetic oligonucleotide
  Antisense strand to SEQ ID NO: 2372324
ucccauccuaagauuauuu

SEQ ID NO: 2372326 - RNA, 19 nt, Artificial Sequence
  Description of Artificial Sequence: Synthetic oligonucleotide
  Sense strand starting at position 1262 of SEQ ID NO: 1885850
gacaaagaugucuggaucu

SEQ ID NO: 2372327 - RNA, 19 nt, Artificial Sequence
  Description of Artificial Sequence: Synthetic oligonucleotide
  Antisense strand to SEQ ID NO: 2372326
agauccagacaucuuuguc

SEQ ID NO: 2372328 - RNA, 19 nt, Artificial Sequence
  Description of Artificial Sequence: Synthetic oligonucleotide
  Sense strand starting at position 2142 of SEQ ID NO: 1885850
ggacaugguaacggaauua

SEQ ID NO: 2372329 - RNA, 19 nt, Artificial Sequence
  Description of Artificial Sequence: Synthetic oligonucleotide
  Antisense strand to SEQ ID NO: 2372328
uaauuccguuaccaugucc

SEQ ID NO: 2372330 - RNA, 19 nt, Artificial Sequence
  Description of Artificial Sequence: Synthetic oligonucleotide
  Sense strand starting at position 2322 of SEQ ID NO: 1885850
caaagugagccucgaggaa

SEQ ID NO: 2372331 - RNA, 19 nt, Artificial Sequence
  Description of Artificial Sequence: Synthetic oligonucleotide
  Antisense strand to SEQ ID NO: 2372330
uuccucgaggcucacuuug

SEQ ID NO: 2372332 - RNA, 19 nt, Artificial Sequence
  Description of Artificial Sequence: Synthetic oligonucleotide
  Sense strand starting at position 2582 of SEQ ID NO: 1885850
caucgcuauuucguuuauu

SEQ ID NO: 2372333 - RNA, 19 nt, Artificial Sequence
  Description of Artificial Sequence: Synthetic oligonucleotide
  Antisense strand to SEQ ID NO: 2372332
aauaaacgaaauagcgaug

SEQ ID NO: 2372334 - RNA, 19 nt, Artificial Sequence
  Description of Artificial Sequence: Synthetic oligonucleotide
  Sense strand starting at position 2659 of SEQ ID NO: 1885850
gaggaagaaugaggugaau

SEQ ID NO: 2372335 - RNA, 19 nt, Artificial Sequence
  Description of Artificial Sequence: Synthetic oligonucleotide
  Antisense strand to SEQ ID NO: 2372334
auucaccucauucuuccuc

SEQ ID NO: 2372336 - RNA, 19 nt, Artificial Sequence
  Description of Artificial Sequence: Synthetic oligonucleotide
  Sense strand starting at position 3177 of SEQ ID NO: 1885850
cagacauacuuggaagagu

SEQ ID NO: 2372337 - RNA, 19 nt, Artificial Sequence
  Description of Artificial Sequence: Synthetic oligonucleotide
  Antisense strand to SEQ ID NO: 2372336
acucuuccaaguaugucug

SEQ ID NO: 2372338 - RNA, 19 nt, Artificial Sequence
  Description of Artificial Sequence: Synthetic oligonucleotide
  Sense strand starting at position 3293 of SEQ ID NO: 1885850
guaggugcaguuugaaagu

SEQ ID NO: 2372339 - RNA, 19 nt, Artificial Sequence
  Description of Artificial Sequence: Synthetic oligonucleotide
  Antisense strand to SEQ ID NO: 2372338
acuuucaaacugcaccuac

SEQ ID NO: 2372340 - RNA, 19 nt, Artificial Sequence
  Description of Artificial Sequence: Synthetic oligonucleotide
  Sense strand starting at position 3299 of SEQ ID NO: 1885850
gcaguuugaaaguagaaac

SEQ ID NO: 2372341 - RNA, 19 nt, Artificial Sequence
  Description of Artificial Sequence: Synthetic oligonucleotide
  Antisense strand to SEQ ID NO: 2372340
guuucuacuuucaaacugc

SEQ ID NO: 2372342 - RNA, 19 nt, Artificial Sequence
  Description of Artificial Sequence: Synthetic oligonucleotide
  Sense strand starting at position 3360 of SEQ ID NO: 1885850
cagaaauaggcagguacuu

SEQ ID NO: 2372343 - RNA, 19 nt, Artificial Sequence
  Description of Artificial Sequence: Synthetic oligonucleotide
  Antisense strand to SEQ ID NO: 2372342
aaguaccugccuauuucug

SEQ ID NO: 2372344 - RNA, 19 nt, Artificial Sequence
  Description of Artificial Sequence: Synthetic oligonucleotide
  Sense strand starting at position 3717 of SEQ ID NO: 1885850
auauuagagucaggauuua

SEQ ID NO: 2372345 - RNA, 19 nt, Artificial Sequence
  Description of Artificial Sequence: Synthetic oligonucleotide
  Antisense strand to SEQ ID NO: 2372344
uaaauccugacucuaauau

SEQ ID NO: 2372346 - RNA, 19 nt, Artificial Sequence
  Description of Artificial Sequence: Synthetic oligonucleotide
  Sense strand starting at position 3767 of SEQ ID NO: 1885850
uccuuccaucuugggaaau

SEQ ID NO: 2372347 - RNA, 19 nt, Artificial Sequence
  Description of Artificial Sequence: Synthetic oligonucleotide
  Antisense strand to SEQ ID NO: 2372346
auuucccaagauggaagga

SEQ ID NO: 2372348 - RNA, 19 nt, Artificial Sequence
  Description of Artificial Sequence: Synthetic oligonucleotide
  Sense strand starting at position 3786 of SEQ ID NO: 1885850
acaucuugauaauauggau

SEQ ID NO: 2372349 - RNA, 19 nt, Artificial Sequence
  Description of Artificial Sequence: Synthetic oligonucleotide
  Antisense strand to SEQ ID NO: 2372348
auccauauuaucaagaugu

SEQ ID NO: 2372350 - RNA, 19 nt, Artificial Sequence
  Description of Artificial Sequence: Synthetic oligonucleotide
  Sense strand starting at position 3798 of SEQ ID NO: 1885850
uauggauguuggcuauaau

SEQ ID NO: 2372351 - RNA, 19 nt, Artificial Sequence
  Description of Artificial Sequence: Synthetic oligonucleotide
  Antisense strand to SEQ ID NO: 2372350
auuauagccaacauccaua

SEQ ID NO: 2372352 - RNA, 19 nt, Artificial Sequence
  Description of Artificial Sequence: Synthetic oligonucleotide
  Sense strand starting at position 3799 of SEQ ID NO: 1885850
auggauguuggcuauaauc

SEQ ID NO: 2372353 - RNA, 19 nt, Artificial Sequence
  Description of Artificial Sequence: Synthetic oligonucleotide
  Antisense strand to SEQ ID NO: 2372352
gauuauagccaacauccau

SEQ ID NO: 2372354 - RNA, 19 nt, Artificial Sequence
  Description of Artificial Sequence: Synthetic oligonucleotide
  Sense strand starting at position 3801 of SEQ ID NO: 1885850
ggauguuggcuauaaucaa

SEQ ID NO: 2372355 - RNA, 19 nt, Artificial Sequence
  Description of Artificial Sequence: Synthetic oligonucleotide
  Antisense strand to SEQ ID NO: 2372354
uugauuauagccaacaucc

SEQ ID NO: 2372356 - RNA, 19 nt, Artificial Sequence
  Description of Artificial Sequence: Synthetic oligonucleotide
  Sense strand starting at position 3829 of SEQ ID NO: 1885850
uaacaaguguuggcuggaa

SEQ ID NO: 2372357 - RNA, 19 nt, Artificial Sequence
  Description of Artificial Sequence: Synthetic oligonucleotide
  Antisense strand to SEQ ID NO: 2372356
uuccagccaacacuuguua

SEQ ID NO: 2372358 - RNA, 19 nt, Artificial Sequence
  Description of Artificial Sequence: Synthetic oligonucleotide
  Sense strand starting at position 3831 of SEQ ID NO: 1885850
acaaguguuggcuggaaug

SEQ ID NO: 2372359 - RNA, 19 nt, Artificial Sequence
  Description of Artificial Sequence: Synthetic oligonucleotide
  Antisense strand to SEQ ID NO: 2372358
cauuccagccaacacuugu

SEQ ID NO: 2372360 - RNA, 19 nt, Artificial Sequence
  Description of Artificial Sequence: Synthetic oligonucleotide
  Sense strand starting at position 3834 of SEQ ID NO: 1885850
aguguuggcuggaauguga

SEQ ID NO: 2372361 - RNA, 19 nt, Artificial Sequence
  Description of Artificial Sequence: Synthetic oligonucleotide
  Antisense strand to SEQ ID NO: 2372360
ucacauuccagccaacacu

SEQ ID NO: 2372362 - RNA, 19 nt, Artificial Sequence
  Description of Artificial Sequence: Synthetic oligonucleotide
  Sense strand starting at position 3894 of SEQ ID NO: 1885850
caguguaaccacugggaaa

SEQ ID NO: 2372363 - RNA, 19 nt, Artificial Sequence
  Description of Artificial Sequence: Synthetic oligonucleotide
  Antisense strand to SEQ ID NO: 2372362
uuucccagugguuacacug

SEQ ID NO: 2372364 - RNA, 19 nt, Artificial Sequence
  Description of Artificial Sequence: Synthetic oligonucleotide
  Sense strand starting at position 26 of SEQ ID NO: 1885851
guggaaagaucgcuugaaa

SEQ ID NO: 2372365 - RNA, 19 nt, Artificial Sequence
  Description of Artificial Sequence: Synthetic oligonucleotide
  Antisense strand to SEQ ID NO: 2372364
uuucaagcgaucuuuccac

SEQ ID NO: 2372366 - RNA, 19 nt, Artificial Sequence
  Description of Artificial Sequence: Synthetic oligonucleotide
  Sense strand starting at position 29 of SEQ ID NO: 1885851
gaaagaucgcuugaaagca

SEQ ID NO: 2372367 - RNA, 19 nt, Artificial Sequence
  Description of Artificial Sequence: Synthetic oligonucleotide
  Antisense strand to SEQ ID NO: 2372366
ugcuuucaagcgaucuuuc

SEQ ID NO: 2372368 - RNA, 19 nt, Artificial Sequence
  Description of Artificial Sequence: Synthetic oligonucleotide
  Sense strand starting at position 37 of SEQ ID NO: 1885851
gcuugaaagcaggaguuga

SEQ ID NO: 2372369 - RNA, 19 nt, Artificial Sequence
  Description of Artificial Sequence: Synthetic oligonucleotide
  Antisense strand to SEQ ID NO: 2372368
ucaacuccugcuuucaagc

SEQ ID NO: 2372370 - RNA, 19 nt, Artificial Sequence
  Description of Artificial Sequence: Synthetic oligonucleotide
  Sense strand starting at position 237 of SEQ ID NO: 1885851
cuacaacaugugugacaga

SEQ ID NO: 2372371 - RNA, 19 nt, Artificial Sequence
  Description of Artificial Sequence: Synthetic oligonucleotide
  Antisense strand to SEQ ID NO: 2372370
ucugucacacauguuguag

SEQ ID NO: 2372372 - RNA, 19 nt, Artificial Sequence
  Description of Artificial Sequence: Synthetic oligonucleotide
  Sense strand starting at position 303 of SEQ ID NO: 1885851
guaacuaaugauuggguaa

SEQ ID NO: 2372373 - RNA, 19 nt, Artificial Sequence
  Description of Artificial Sequence: Synthetic oligonucleotide
  Antisense strand to SEQ ID NO: 2372372
uuacccaaucauuaguuac

SEQ ID NO: 2372374 - RNA, 19 nt, Artificial Sequence
  Description of Artificial Sequence: Synthetic oligonucleotide
  Sense strand starting at position 387 of SEQ ID NO: 1885851
uggaguucucaugggaaac

SEQ ID NO: 2372375 - RNA, 19 nt, Artificial Sequence
  Description of Artificial Sequence: Synthetic oligonucleotide
  Antisense strand to SEQ ID NO: 2372374
guuucccaugagaacucca

SEQ ID NO: 2372376 - RNA, 19 nt, Artificial Sequence
  Description of Artificial Sequence: Synthetic oligonucleotide
  Sense strand starting at position 922 of SEQ ID NO: 1885851
caaugucaugguuaacaug

SEQ ID NO: 2372377 - RNA, 19 nt, Artificial Sequence
  Description of Artificial Sequence: Synthetic oligonucleotide
  Antisense strand to SEQ ID NO: 2372376
cauguuaaccaugacauug

SEQ ID NO: 2372378 - RNA, 19 nt, Artificial Sequence
  Description of Artificial Sequence: Synthetic oligonucleotide
  Sense strand starting at position 936 of SEQ ID NO: 1885851
acauguuccgugggaacaa

SEQ ID NO: 2372379 - RNA, 19 nt, Artificial Sequence
  Description of Artificial Sequence: Synthetic oligonucleotide
  Antisense strand to SEQ ID NO: 2372378
uuguucccacggaacaugu

SEQ ID NO: 2372380 - RNA, 19 nt, Artificial Sequence
  Description of Artificial Sequence: Synthetic oligonucleotide
  Sense strand starting at position 1067 of SEQ ID NO: 1885851
ucaccaggucgguaugaua

SEQ ID NO: 2372381 - RNA, 19 nt, Artificial Sequence
  Description of Artificial Sequence: Synthetic oligonucleotide
  Antisense strand to SEQ ID NO: 2372380
uaucauaccgaccugguga

SEQ ID NO: 2372382 - RNA, 19 nt, Artificial Sequence
  Description of Artificial Sequence: Synthetic oligonucleotide
  Sense strand starting at position 1081 of SEQ ID NO: 1885851
ugauaaugaugagcguaua

SEQ ID NO: 2372383 - RNA, 19 nt, Artificial Sequence
  Description of Artificial Sequence: Synthetic oligonucleotide
  Antisense strand to SEQ ID NO: 2372382
uauacgcucaucauuauca

SEQ ID NO: 2372384 - RNA, 19 nt, Artificial Sequence
  Description of Artificial Sequence: Synthetic oligonucleotide
  Sense strand starting at position 1082 of SEQ ID NO: 1885851
gauaaugaugagcguauau

SEQ ID NO: 2372385 - RNA, 19 nt, Artificial Sequence
  Description of Artificial Sequence: Synthetic oligonucleotide
  Antisense strand to SEQ ID NO: 2372384
auauacgcucaucauuauc

SEQ ID NO: 2372386 - RNA, 19 nt, Artificial Sequence
  Description of Artificial Sequence: Synthetic oligonucleotide
  Sense strand starting at position 1084 of SEQ ID NO: 1885851
uaaugaugagcguauauac

SEQ ID NO: 2372387 - RNA, 19 nt, Artificial Sequence
  Description of Artificial Sequence: Synthetic oligonucleotide
  Antisense strand to SEQ ID NO: 2372386
guauauacgcucaucauua

SEQ ID NO: 2372388 - RNA, 19 nt, Artificial Sequence
  Description of Artificial Sequence: Synthetic oligonucleotide
  Sense strand starting at position 1100 of SEQ ID NO: 1885851
uacauauggucccugguga

SEQ ID NO: 2372389 - RNA, 19 nt, Artificial Sequence
  Description of Artificial Sequence: Synthetic oligonucleotide
  Antisense strand to SEQ ID NO: 2372388
ucaccagggaccauaugua

SEQ ID NO: 2372390 - RNA, 19 nt, Artificial Sequence
  Description of Artificial Sequence: Synthetic oligonucleotide
  Sense strand starting at position 1231 of SEQ ID NO: 1885851
ugaagagacuucgcucacu

SEQ ID NO: 2372391 - RNA, 19 nt, Artificial Sequence
  Description of Artificial Sequence: Synthetic oligonucleotide
  Antisense strand to SEQ ID NO: 2372390
agugagcgaagucucuuca

SEQ ID NO: 2372392 - RNA, 19 nt, Artificial Sequence
  Description of Artificial Sequence: Synthetic oligonucleotide
  Sense strand starting at position 1236 of SEQ ID NO: 1885851
agacuucgcucacuggaua

SEQ ID NO: 2372393 - RNA, 19 nt, Artificial Sequence
  Description of Artificial Sequence: Synthetic oligonucleotide
  Antisense strand to SEQ ID NO: 2372392
uauccagugagcgaagucu

SEQ ID NO: 2372394 - RNA, 19 nt, Artificial Sequence
  Description of Artificial Sequence: Synthetic oligonucleotide
  Sense strand starting at position 1290 of SEQ ID NO: 1885851
uaugaagucggguggagaa

SEQ ID NO: 2372395 - RNA, 19 nt, Artificial Sequence
  Description of Artificial Sequence: Synthetic oligonucleotide
  Antisense strand to SEQ ID NO: 2372394
uucuccacccgacuucaua

SEQ ID NO: 2372396 - RNA, 19 nt, Artificial Sequence
  Description of Artificial Sequence: Synthetic oligonucleotide
  Sense strand starting at position 1566 of SEQ ID NO: 1885851
gcaauuccucaagaucggu

SEQ ID NO: 2372397 - RNA, 19 nt, Artificial Sequence
  Description of Artificial Sequence: Synthetic oligonucleotide
  Antisense strand to SEQ ID NO: 2372396
accgaucuugaggaauugc

SEQ ID NO: 2372398 - RNA, 19 nt, Artificial Sequence
  Description of Artificial Sequence: Synthetic oligonucleotide
  Sense strand starting at position 1571 of SEQ ID NO: 1885851
uccucaagaucggugacua

SEQ ID NO: 2372399 - RNA, 19 nt, Artificial Sequence
  Description of Artificial Sequence: Synthetic oligonucleotide
  Antisense strand to SEQ ID NO: 2372398
uagucaccgaucuugagga

SEQ ID NO: 2372400 - RNA, 19 nt, Artificial Sequence
  Description of Artificial Sequence: Synthetic oligonucleotide
  Sense strand starting at position 1698 of SEQ ID NO: 1885851
cagcucuuacccgagggua

SEQ ID NO: 2372401 - RNA, 19 nt, Artificial Sequence
  Description of Artificial Sequence: Synthetic oligonucleotide
  Antisense strand to SEQ ID NO: 2372400
uacccucggguaagagcug

SEQ ID NO: 2372402 - RNA, 19 nt, Artificial Sequence
  Description of Artificial Sequence: Synthetic oligonucleotide
  Sense strand starting at position 2287 of SEQ ID NO: 1885851
acacuugauuuacauagua

SEQ ID NO: 2372403 - RNA, 19 nt, Artificial Sequence
  Description of Artificial Sequence: Synthetic oligonucleotide
  Antisense strand to SEQ ID NO: 2372402
uacuauguaaaucaagugu

SEQ ID NO: 2372404 - RNA, 19 nt, Artificial Sequence
  Description of Artificial Sequence: Synthetic oligonucleotide
  Sense strand starting at position 2586 of SEQ ID NO: 1885851
uguuaagaacucugauaca

SEQ ID NO: 2372405 - RNA, 19 nt, Artificial Sequence
  Description of Artificial Sequence: Synthetic oligonucleotide
  Antisense strand to SEQ ID NO: 2372404
uguaucagaguucuuaaca

SEQ ID NO: 2372406 - RNA, 19 nt, Artificial Sequence
  Description of Artificial Sequence: Synthetic oligonucleotide
  Sense strand starting at position 2692 of SEQ ID NO: 1885851
acucuaucacuuugaacga

SEQ ID NO: 2372407 - RNA, 19 nt, Artificial Sequence
  Description of Artificial Sequence: Synthetic oligonucleotide
  Antisense strand to SEQ ID NO: 2372406
ucguucaaagugauagagu

SEQ ID NO: 2372408 - RNA, 19 nt, Artificial Sequence
  Description of Artificial Sequence: Synthetic oligonucleotide
  Sense strand starting at position 2774 of SEQ ID NO: 1885851
uaaguauuugcugguuuaa

SEQ ID NO: 2372409 - RNA, 19 nt, Artificial Sequence
  Description of Artificial Sequence: Synthetic oligonucleotide
  Antisense strand to SEQ ID NO: 2372408
uuaaaccagcaaauacuua

SEQ ID NO: 2372410 - RNA, 19 nt, Artificial Sequence
  Description of Artificial Sequence: Synthetic oligonucleotide
  Sense strand starting at position 2776 of SEQ ID NO: 1885851
aguauuugcugguuuaaau

SEQ ID NO: 2372411 - RNA, 19 nt, Artificial Sequence
  Description of Artificial Sequence: Synthetic oligonucleotide
  Antisense strand to SEQ ID NO: 2372410
auuuaaaccagcaaauacu

SEQ ID NO: 2372412 - RNA, 19 nt, Artificial Sequence
  Description of Artificial Sequence: Synthetic oligonucleotide
  Sense strand starting at position 2836 of SEQ ID NO: 1885851
acacgagauuuauagagaa

SEQ ID NO: 2372413 - RNA, 19 nt, Artificial Sequence
  Description of Artificial Sequence: Synthetic oligonucleotide
  Antisense strand to SEQ ID NO: 2372412
uucucuauaaaucucgugu

SEQ ID NO: 2372414 - RNA, 19 nt, Artificial Sequence
  Description of Artificial Sequence: Synthetic oligonucleotide
  Sense strand starting at position 2852 of SEQ ID NO: 1885851
gaaaguuacuaggucuuga

SEQ ID NO: 2372415 - RNA, 19 nt, Artificial Sequence
  Description of Artificial Sequence: Synthetic oligonucleotide
  Antisense strand to SEQ ID NO: 2372414
ucaagaccuaguaacuuuc

SEQ ID NO: 2372416 - RNA, 19 nt, Artificial Sequence
  Description of Artificial Sequence: Synthetic oligonucleotide
  Sense strand starting at position 2885 of SEQ ID NO: 1885851
guuccuaugccauagaauu

SEQ ID NO: 2372417 - RNA, 19 nt, Artificial Sequence
  Description of Artificial Sequence: Synthetic oligonucleotide
  Antisense strand to SEQ ID NO: 2372416
aauucuauggcauaggaac

SEQ ID NO: 2372418 - RNA, 19 nt, Artificial Sequence
  Description of Artificial Sequence: Synthetic oligonucleotide
  Sense strand starting at position 2923 of SEQ ID NO: 1885851
aguaaaguagcagauugua

SEQ ID NO: 2372419 - RNA, 19 nt, Artificial Sequence
  Description of Artificial Sequence: Synthetic oligonucleotide
  Antisense strand to SEQ ID NO: 2372418
uacaaucugcuacuuuacu

SEQ ID NO: 2372420 - RNA, 19 nt, Artificial Sequence
  Description of Artificial Sequence: Synthetic oligonucleotide
  Sense strand starting at position 2926 of SEQ ID NO: 1885851
aaaguagcagauuguauua

SEQ ID NO: 2372421 - RNA, 19 nt, Artificial Sequence
  Description of Artificial Sequence: Synthetic oligonucleotide
  Antisense strand to SEQ ID NO: 2372420
uaauacaaucugcuacuuu

SEQ ID NO: 2372422 - RNA, 19 nt, Artificial Sequence
  Description of Artificial Sequence: Synthetic oligonucleotide
  Sense strand starting at position 2936 of SEQ ID NO: 1885851
auuguauuauaggccucaa

SEQ ID NO: 2372423 - RNA, 19 nt, Artificial Sequence
  Description of Artificial Sequence: Synthetic oligonucleotide
  Antisense strand to SEQ ID NO: 2372422
uugaggccuauaauacaau

SEQ ID NO: 2372424 - RNA, 19 nt, Artificial Sequence
  Description of Artificial Sequence: Synthetic oligonucleotide
  Sense strand starting at position 2947 of SEQ ID NO: 1885851
ggccucaagucacuuaaau

SEQ ID NO: 2372425 - RNA, 19 nt, Artificial Sequence
  Description of Artificial Sequence: Synthetic oligonucleotide
  Antisense strand to SEQ ID NO: 2372424
auuuaagugacuugaggcc

SEQ ID NO: 2372426 - RNA, 19 nt, Artificial Sequence
  Description of Artificial Sequence: Synthetic oligonucleotide
  Sense strand starting at position 3096 of SEQ ID NO: 1885851
ggcacaucugaaugagaua

SEQ ID NO: 2372427 - RNA, 19 nt, Artificial Sequence
  Description of Artificial Sequence: Synthetic oligonucleotide
  Antisense strand to SEQ ID NO: 2372426
uaucucauucagaugugcc

SEQ ID NO: 2372428 - RNA, 19 nt, Artificial Sequence
  Description of Artificial Sequence: Synthetic oligonucleotide
  Sense strand starting at position 3131 of SEQ ID NO: 1885851
ccaucauuggguuauguag

SEQ ID NO: 2372429 - RNA, 19 nt, Artificial Sequence
  Description of Artificial Sequence: Synthetic oligonucleotide
  Antisense strand to SEQ ID NO: 2372428
cuacauaacccaaugaugg

SEQ ID NO: 2372430 - RNA, 19 nt, Artificial Sequence
  Description of Artificial Sequence: Synthetic oligonucleotide
  Sense strand starting at position 3271 of SEQ ID NO: 1885851
uuaagaacaguugguguua

SEQ ID NO: 2372431 - RNA, 19 nt, Artificial Sequence
  Description of Artificial Sequence: Synthetic oligonucleotide
  Antisense strand to SEQ ID NO: 2372430
uaacaccaacuguucuuaa

SEQ ID NO: 2372432 - RNA, 19 nt, Artificial Sequence
  Description of Artificial Sequence: Synthetic oligonucleotide
  Sense strand starting at position 3272 of SEQ ID NO: 1885851
uaagaacaguugguguuau

SEQ ID NO: 2372433 - RNA, 19 nt, Artificial Sequence
  Description of Artificial Sequence: Synthetic oligonucleotide
  Antisense strand to SEQ ID NO: 2372432
auaacaccaacuguucuua

SEQ ID NO: 2372434 - RNA, 19 nt, Artificial Sequence
  Description of Artificial Sequence: Synthetic oligonucleotide
  Sense strand starting at position 3495 of SEQ ID NO: 1885851
gaguuuacagugcaaauau

SEQ ID NO: 2372435 - RNA, 19 nt, Artificial Sequence
  Description of Artificial Sequence: Synthetic oligonucleotide
  Antisense strand to SEQ ID NO: 2372434
auauuugcacuguaaacuc

SEQ ID NO: 2372436 - RNA, 19 nt, Artificial Sequence
  Description of Artificial Sequence: Synthetic oligonucleotide
  Sense strand starting at position 3728 of SEQ ID NO: 1885851
auaccauuccagugucaau

SEQ ID NO: 2372437 - RNA, 19 nt, Artificial Sequence
  Description of Artificial Sequence: Synthetic oligonucleotide
  Antisense strand to SEQ ID NO: 2372436
auugacacuggaaugguau

SEQ ID NO: 2372438 - RNA, 19 nt, Artificial Sequence
  Description of Artificial Sequence: Synthetic oligonucleotide
  Sense strand starting at position 3738 of SEQ ID NO: 1885851
agugucaaugacuacauau

SEQ ID NO: 2372439 - RNA, 19 nt, Artificial Sequence
  Description of Artificial Sequence: Synthetic oligonucleotide
  Antisense strand to SEQ ID NO: 2372438
auauguagucauugacacu

SEQ ID NO: 2372440 - RNA, 19 nt, Artificial Sequence
  Description of Artificial Sequence: Synthetic oligonucleotide
  Sense strand starting at position 3818 of SEQ ID NO: 1885851
gcgaaagcucccguuugua

SEQ ID NO: 2372441 - RNA, 19 nt, Artificial Sequence
  Description of Artificial Sequence: Synthetic oligonucleotide
  Antisense strand to SEQ ID NO: 2372440
uacaaacgggagcuuucgc

SEQ ID NO: 2372442 - RNA, 19 nt, Artificial Sequence
  Description of Artificial Sequence: Synthetic oligonucleotide
  Sense strand starting at position 3871 of SEQ ID NO: 1885851
gaauucugccuugguggaa

SEQ ID NO: 2372443 - RNA, 19 nt, Artificial Sequence
  Description of Artificial Sequence: Synthetic oligonucleotide
  Antisense strand to SEQ ID NO: 2372442
uuccaccaaggcagaauuc

SEQ ID NO: 2372444 - RNA, 19 nt, Artificial Sequence
  Description of Artificial Sequence: Synthetic oligonucleotide
  Sense strand starting at position 76 of SEQ ID NO: 1885852
ucugauuaucaaugucaag

SEQ ID NO: 2372445 - RNA, 19 nt, Artificial Sequence
  Description of Artificial Sequence: Synthetic oligonucleotide
  Antisense strand to SEQ ID NO: 2372444
cuugacauugauaaucaga

SEQ ID NO: 2372446 - RNA, 19 nt, Artificial Sequence
  Description of Artificial Sequence: Synthetic oligonucleotide
  Sense strand starting at position 95 of SEQ ID NO: 1885852
acagcagcuucuuauuuga

SEQ ID NO: 2372447 - RNA, 19 nt, Artificial Sequence
  Description of Artificial Sequence: Synthetic oligonucleotide
  Antisense strand to SEQ ID NO: 2372446
ucaaauaagaagcugcugu

SEQ ID NO: 2372448 - RNA, 19 nt, Artificial Sequence
  Description of Artificial Sequence: Synthetic oligonucleotide
  Sense strand starting at position 195 of SEQ ID NO: 1885852
caacgugcacuguaacauu

SEQ ID NO: 2372449 - RNA, 19 nt, Artificial Sequence
  Description of Artificial Sequence: Synthetic oligonucleotide
  Antisense strand to SEQ ID NO: 2372448
aauguuacagugcacguug

SEQ ID NO: 2372450 - RNA, 19 nt, Artificial Sequence
  Description of Artificial Sequence: Synthetic oligonucleotide
  Sense strand starting at position 264 of SEQ ID NO: 1885852
ccaaacaagucagugacaa

SEQ ID NO: 2372451 - RNA, 19 nt, Artificial Sequence
  Description of Artificial Sequence: Synthetic oligonucleotide
  Antisense strand to SEQ ID NO: 2372450
uugucacugacuuguuugg

SEQ ID NO: 2372452 - RNA, 19 nt, Artificial Sequence
  Description of Artificial Sequence: Synthetic oligonucleotide
  Sense strand starting at position 318 of SEQ ID NO: 1885852
ugaagacuacuucgagcuu

SEQ ID NO: 2372453 - RNA, 19 nt, Artificial Sequence
  Description of Artificial Sequence: Synthetic oligonucleotide
  Antisense strand to SEQ ID NO: 2372452
aagcucgaaguagucuuca

SEQ ID NO: 2372454 - RNA, 19 nt, Artificial Sequence
  Description of Artificial Sequence: Synthetic oligonucleotide
  Sense strand starting at position 403 of SEQ ID NO: 1885852
cccuaaauacagugguaca

SEQ ID NO: 2372455 - RNA, 19 nt, Artificial Sequence
  Description of Artificial Sequence: Synthetic oligonucleotide
  Antisense strand to SEQ ID NO: 2372454
uguaccacuguauuuaggg

SEQ ID NO: 2372456 - RNA, 19 nt, Artificial Sequence
  Description of Artificial Sequence: Synthetic oligonucleotide
  Sense strand starting at position 414 of SEQ ID NO: 1885852
gugguacacuuauuaucau

SEQ ID NO: 2372457 - RNA, 19 nt, Artificial Sequence
  Description of Artificial Sequence: Synthetic oligonucleotide
  Antisense strand to SEQ ID NO: 2372456
augauaauaaguguaccac

SEQ ID NO: 2372458 - RNA, 19 nt, Artificial Sequence
  Description of Artificial Sequence: Synthetic oligonucleotide
  Sense strand starting at position 485 of SEQ ID NO: 1885852
uuuagauaccacugucauu

SEQ ID NO: 2372459 - RNA, 19 nt, Artificial Sequence
  Description of Artificial Sequence: Synthetic oligonucleotide
  Antisense strand to SEQ ID NO: 2372458
aaugacagugguaucuaaa

SEQ ID NO: 2372460 - RNA, 19 nt, Artificial Sequence
  Description of Artificial Sequence: Synthetic oligonucleotide
  Sense strand starting at position 496 of SEQ ID NO: 1885852
cugucauuucccuagcucu

SEQ ID NO: 2372461 - RNA, 19 nt, Artificial Sequence
  Description of Artificial Sequence: Synthetic oligonucleotide
  Antisense strand to SEQ ID NO: 2372460
agagcuagggaaaugacag

SEQ ID NO: 2372462 - RNA, 19 nt, Artificial Sequence
  Description of Artificial Sequence: Synthetic oligonucleotide
  Sense strand starting at position 536 of SEQ ID NO: 1885852
acuggaucuggcuauauua

SEQ ID NO: 2372463 - RNA, 19 nt, Artificial Sequence
  Description of Artificial Sequence: Synthetic oligonucleotide
  Antisense strand to SEQ ID NO: 2372462
uaauauagccagauccagu

SEQ ID NO: 2372464 - RNA, 19 nt, Artificial Sequence
  Description of Artificial Sequence: Synthetic oligonucleotide
  Sense strand starting at position 605 of SEQ ID NO: 1885852
acaugcauuuacgacuuaa

SEQ ID NO: 2372465 - RNA, 19 nt, Artificial Sequence
  Description of Artificial Sequence: Synthetic oligonucleotide
  Antisense strand to SEQ ID NO: 2372464
uuaagucguaaaugcaugu

SEQ ID NO: 2372466 - RNA, 19 nt, Artificial Sequence
  Description of Artificial Sequence: Synthetic oligonucleotide
  Sense strand starting at position 652 of SEQ ID NO: 1885852
ugcugugggaugcauuaau

SEQ ID NO: 2372467 - RNA, 19 nt, Artificial Sequence
  Description of Artificial Sequence: Synthetic oligonucleotide
  Antisense strand to SEQ ID NO: 2372466
auuaaugcaucccacagca

SEQ ID NO: 2372468 - RNA, 19 nt, Artificial Sequence
  Description of Artificial Sequence: Synthetic oligonucleotide
  Sense strand starting at position 849 of SEQ ID NO: 1885852
gaaggauggucccuuuaaa

SEQ ID NO: 2372469 - RNA, 19 nt, Artificial Sequence
  Description of Artificial Sequence: Synthetic oligonucleotide
  Antisense strand to SEQ ID NO: 2372468
uuuaaagggaccauccuuc

SEQ ID NO: 2372470 - RNA, 19 nt, Artificial Sequence
  Description of Artificial Sequence: Synthetic oligonucleotide
  Sense strand starting at position 904 of SEQ ID NO: 1885852
cagucugacuuguuggaca

SEQ ID NO: 2372471 - RNA, 19 nt, Artificial Sequence
  Description of Artificial Sequence: Synthetic oligonucleotide
  Antisense strand to SEQ ID NO: 2372470
uguccaacaagucagacug

SEQ ID NO: 2372472 - RNA, 19 nt, Artificial Sequence
  Description of Artificial Sequence: Synthetic oligonucleotide
  Sense strand starting at position 906 of SEQ ID NO: 1885852
gucugacuuguuggacaag

SEQ ID NO: 2372473 - RNA, 19 nt, Artificial Sequence
  Description of Artificial Sequence: Synthetic oligonucleotide
  Antisense strand to SEQ ID NO: 2372472
cuuguccaacaagucagac

SEQ ID NO: 2372474 - RNA, 19 nt, Artificial Sequence
  Description of Artificial Sequence: Synthetic oligonucleotide
  Sense strand starting at position 923 of SEQ ID NO: 1885852
agauuaaucugggcacucu

SEQ ID NO: 2372475 - RNA, 19 nt, Artificial Sequence
  Description of Artificial Sequence: Synthetic oligonucleotide
  Antisense strand to SEQ ID NO: 2372474
agagugcccagauuaaucu

SEQ ID NO: 2372476 - RNA, 19 nt, Artificial Sequence
  Description of Artificial Sequence: Synthetic oligonucleotide
  Sense strand starting at position 1131 of SEQ ID NO: 1885852
gcuccuaggaagugucagu

SEQ ID NO: 2372477 - RNA, 19 nt, Artificial Sequence
  Description of Artificial Sequence: Synthetic oligonucleotide
  Antisense strand to SEQ ID NO: 2372476
acugacacuuccuaggagc

SEQ ID NO: 2372478 - RNA, 19 nt, Artificial Sequence
  Description of Artificial Sequence: Synthetic oligonucleotide
  Sense strand starting at position 2296 of SEQ ID NO: 1885852
ugucaugagccugagguga

SEQ ID NO: 2372479 - RNA, 19 nt, Artificial Sequence
  Description of Artificial Sequence: Synthetic oligonucleotide
  Antisense strand to SEQ ID NO: 2372478
ucaccucaggcucaugaca

SEQ ID NO: 2372480 - RNA, 19 nt, Artificial Sequence
  Description of Artificial Sequence: Synthetic oligonucleotide
  Sense strand starting at position 2666 of SEQ ID NO: 1885852
aagaaugugguacagcaua

SEQ ID NO: 2372481 - RNA, 19 nt, Artificial Sequence
  Description of Artificial Sequence: Synthetic oligonucleotide
  Antisense strand to SEQ ID NO: 2372480
uaugcuguaccacauucuu

SEQ ID NO: 2372482 - RNA, 19 nt, Artificial Sequence
  Description of Artificial Sequence: Synthetic oligonucleotide
  Sense strand starting at position 2678 of SEQ ID NO: 1885852
cagcauagguguucucaag

SEQ ID NO: 2372483 - RNA, 19 nt, Artificial Sequence
  Description of Artificial Sequence: Synthetic oligonucleotide
  Antisense strand to SEQ ID NO: 2372482
cuugagaacaccuaugcug

SEQ ID NO: 2372484 - RNA, 19 nt, Artificial Sequence
  Description of Artificial Sequence: Synthetic oligonucleotide
  Sense strand starting at position 2751 of SEQ ID NO: 1885852
ggagguuuguccucuccag

SEQ ID NO: 2372485 - RNA, 19 nt, Artificial Sequence
  Description of Artificial Sequence: Synthetic oligonucleotide
  Antisense strand to SEQ ID NO: 2372484
cuggagaggacaaaccucc

SEQ ID NO: 2372486 - RNA, 19 nt, Artificial Sequence
  Description of Artificial Sequence: Synthetic oligonucleotide
  Sense strand starting at position 2832 of SEQ ID NO: 1885852
cacugaucuugcucaguag

SEQ ID NO: 2372487 - RNA, 19 nt, Artificial Sequence
  Description of Artificial Sequence: Synthetic oligonucleotide
  Antisense strand to SEQ ID NO: 2372486
cuacugagcaagaucagug

SEQ ID NO: 2372488 - RNA, 19 nt, Artificial Sequence
  Description of Artificial Sequence: Synthetic oligonucleotide
  Sense strand starting at position 2835 of SEQ ID NO: 1885852
ugaucuugcucaguagguu

SEQ ID NO: 2372489 - RNA, 19 nt, Artificial Sequence
  Description of Artificial Sequence: Synthetic oligonucleotide
  Antisense strand to SEQ ID NO: 2372488
aaccuacugagcaagauca

SEQ ID NO: 2372490 - RNA, 19 nt, Artificial Sequence
  Description of Artificial Sequence: Synthetic oligonucleotide
  Sense strand starting at position 2836 of SEQ ID NO: 1885852
gaucuugcucaguagguua

SEQ ID NO: 2372491 - RNA, 19 nt, Artificial Sequence
  Description of Artificial Sequence: Synthetic oligonucleotide
  Antisense strand to SEQ ID NO: 2372490
uaaccuacugagcaagauc

SEQ ID NO: 2372492 - RNA, 19 nt, Artificial Sequence
  Description of Artificial Sequence: Synthetic oligonucleotide
  Sense strand starting at position 2905 of SEQ ID NO: 1885852
ucagguggagucugugaga

SEQ ID NO: 2372493 - RNA, 19 nt, Artificial Sequence
  Description of Artificial Sequence: Synthetic oligonucleotide
  Antisense strand to SEQ ID NO: 2372492
ucucacagacuccaccuga

SEQ ID NO: 2372494 - RNA, 19 nt, Artificial Sequence
  Description of Artificial Sequence: Synthetic oligonucleotide
  Sense strand starting at position 2920 of SEQ ID NO: 1885852
gagauuauuuacuaguaga

SEQ ID NO: 2372495 - RNA, 19 nt, Artificial Sequence
  Description of Artificial Sequence: Synthetic oligonucleotide
  Antisense strand to SEQ ID NO: 2372494
ucuacuaguaaauaaucuc

SEQ ID NO: 2372496 - RNA, 19 nt, Artificial Sequence
  Description of Artificial Sequence: Synthetic oligonucleotide
  Sense strand starting at position 2937 of SEQ ID NO: 1885852
gauccauagggauaguugu

SEQ ID NO: 2372497 - RNA, 19 nt, Artificial Sequence
  Description of Artificial Sequence: Synthetic oligonucleotide
  Antisense strand to SEQ ID NO: 2372496
acaacuaucccuauggauc

SEQ ID NO: 2372498 - RNA, 19 nt, Artificial Sequence
  Description of Artificial Sequence: Synthetic oligonucleotide
  Sense strand starting at position 2945 of SEQ ID NO: 1885852
gggauaguuguaugcaugu

SEQ ID NO: 2372499 - RNA, 19 nt, Artificial Sequence
  Description of Artificial Sequence: Synthetic oligonucleotide
  Antisense strand to SEQ ID NO: 2372498
acaugcauacaacuauccc

SEQ ID NO: 2372500 - RNA, 19 nt, Artificial Sequence
  Description of Artificial Sequence: Synthetic oligonucleotide
  Sense strand starting at position 2951 of SEQ ID NO: 1885852
guuguaugcauguaaugua

SEQ ID NO: 2372501 - RNA, 19 nt, Artificial Sequence
  Description of Artificial Sequence: Synthetic oligonucleotide
  Antisense strand to SEQ ID NO: 2372500
uacauuacaugcauacaac

SEQ ID NO: 2372502 - RNA, 19 nt, Artificial Sequence
  Description of Artificial Sequence: Synthetic oligonucleotide
  Sense strand starting at position 2960 of SEQ ID NO: 1885852
auguaauguacagggucua

SEQ ID NO: 2372503 - RNA, 19 nt, Artificial Sequence
  Description of Artificial Sequence: Synthetic oligonucleotide
  Antisense strand to SEQ ID NO: 2372502
uagacccuguacauuacau

SEQ ID NO: 2372504 - RNA, 19 nt, Artificial Sequence
  Description of Artificial Sequence: Synthetic oligonucleotide
  Sense strand starting at position 2973 of SEQ ID NO: 1885852
ggucuagauuuauaaggac

SEQ ID NO: 2372505 - RNA, 19 nt, Artificial Sequence
  Description of Artificial Sequence: Synthetic oligonucleotide
  Antisense strand to SEQ ID NO: 2372504
guccuuauaaaucuagacc

SEQ ID NO: 2372506 - RNA, 19 nt, Artificial Sequence
  Description of Artificial Sequence: Synthetic oligonucleotide
  Sense strand starting at position 3039 of SEQ ID NO: 1885852
gguuucuuggcauguuaca

SEQ ID NO: 2372507 - RNA, 19 nt, Artificial Sequence
  Description of Artificial Sequence: Synthetic oligonucleotide
  Antisense strand to SEQ ID NO: 2372506
uguaacaugccaagaaacc

SEQ ID NO: 2372508 - RNA, 19 nt, Artificial Sequence
  Description of Artificial Sequence: Synthetic oligonucleotide
  Sense strand starting at position 3143 of SEQ ID NO: 1885852
ugaucuauuccuggaaguu

SEQ ID NO: 2372509 - RNA, 19 nt, Artificial Sequence
  Description of Artificial Sequence: Synthetic oligonucleotide
  Antisense strand to SEQ ID NO: 2372508
aacuuccaggaauagauca

SEQ ID NO: 2372510 - RNA, 19 nt, Artificial Sequence
  Description of Artificial Sequence: Synthetic oligonucleotide
  Sense strand starting at position 3144 of SEQ ID NO: 1885852
gaucuauuccuggaaguuc

SEQ ID NO: 2372511 - RNA, 19 nt, Artificial Sequence
  Description of Artificial Sequence: Synthetic oligonucleotide
  Antisense strand to SEQ ID NO: 2372510
gaacuuccaggaauagauc

SEQ ID NO: 2372512 - RNA, 19 nt, Artificial Sequence
  Description of Artificial Sequence: Synthetic oligonucleotide
  Sense strand starting at position 3454 of SEQ ID NO: 1885852
ggguauguucugucguuac

SEQ ID NO: 2372513 - RNA, 19 nt, Artificial Sequence
  Description of Artificial Sequence: Synthetic oligonucleotide
  Antisense strand to SEQ ID NO: 2372512
guaacgacagaacauaccc

SEQ ID NO: 2372514 - RNA, 19 nt, Artificial Sequence
  Description of Artificial Sequence: Synthetic oligonucleotide
  Sense strand starting at position 3456 of SEQ ID NO: 1885852
guauguucugucguuacca

SEQ ID NO: 2372515 - RNA, 19 nt, Artificial Sequence
  Description of Artificial Sequence: Synthetic oligonucleotide
  Antisense strand to SEQ ID NO: 2372514
ugguaacgacagaacauac

SEQ ID NO: 2372516 - RNA, 19 nt, Artificial Sequence
  Description of Artificial Sequence: Synthetic oligonucleotide
  Sense strand starting at position 3489 of SEQ ID NO: 1885852
acuccauaacuguguuauu

SEQ ID NO: 2372517 - RNA, 19 nt, Artificial Sequence
  Description of Artificial Sequence: Synthetic oligonucleotide
  Antisense strand to SEQ ID NO: 2372516
aauaacacaguuauggagu

SEQ ID NO: 2372518 - RNA, 19 nt, Artificial Sequence
  Description of Artificial Sequence: Synthetic oligonucleotide
  Sense strand starting at position 3580 of SEQ ID NO: 1885852
uuaucuguguuuccuaauu

SEQ ID NO: 2372519 - RNA, 19 nt, Artificial Sequence
  Description of Artificial Sequence: Synthetic oligonucleotide
  Antisense strand to SEQ ID NO: 2372518
aauuaggaaacacagauaa

SEQ ID NO: 2372520 - RNA, 19 nt, Artificial Sequence
  Description of Artificial Sequence: Synthetic oligonucleotide
  Sense strand starting at position 3585 of SEQ ID NO: 1885852
uguguuuccuaauuaucaa

SEQ ID NO: 2372521 - RNA, 19 nt, Artificial Sequence
  Description of Artificial Sequence: Synthetic oligonucleotide
  Antisense strand to SEQ ID NO: 2372520
uugauaauuaggaaacaca

SEQ ID NO: 2372522 - RNA, 19 nt, Artificial Sequence
  Description of Artificial Sequence: Synthetic oligonucleotide
  Sense strand starting at position 3805 of SEQ ID NO: 1885852
augcauagccuuugguuua

SEQ ID NO: 2372523 - RNA, 19 nt, Artificial Sequence
  Description of Artificial Sequence: Synthetic oligonucleotide
  Antisense strand to SEQ ID NO: 2372522
uaaaccaaaggcuaugcau

SEQ ID NO: 2372524 - RNA, 19 nt, Artificial Sequence
  Description of Artificial Sequence: Synthetic oligonucleotide
  Sense strand starting at position 1048 of SEQ ID NO: 1885853
acgggaagaguuugucuga

SEQ ID NO: 2372525 - RNA, 19 nt, Artificial Sequence
  Description of Artificial Sequence: Synthetic oligonucleotide
  Antisense strand to SEQ ID NO: 2372524
ucagacaaacucuucccgu

SEQ ID NO: 2372526 - RNA, 19 nt, Artificial Sequence
  Description of Artificial Sequence: Synthetic oligonucleotide
  Sense strand starting at position 1051 of SEQ ID NO: 1885853
ggaagaguuugucugaggu

SEQ ID NO: 2372527 - RNA, 19 nt, Artificial Sequence
  Description of Artificial Sequence: Synthetic oligonucleotide
  Antisense strand to SEQ ID NO: 2372526
accucagacaaacucuucc

SEQ ID NO: 2372528 - RNA, 19 nt, Artificial Sequence
  Description of Artificial Sequence: Synthetic oligonucleotide
  Sense strand starting at position 1053 of SEQ ID NO: 1885853
aagaguuugucugagguuc

SEQ ID NO: 2372529 - RNA, 19 nt, Artificial Sequence
  Description of Artificial Sequence: Synthetic oligonucleotide
  Antisense strand to SEQ ID NO: 2372528
gaaccucagacaaacucuu

SEQ ID NO: 2372530 - RNA, 19 nt, Artificial Sequence
  Description of Artificial Sequence: Synthetic oligonucleotide
  Sense strand starting at position 1181 of SEQ ID NO: 1885853
uuuggugagugauuaugca

SEQ ID NO: 2372531 - RNA, 19 nt, Artificial Sequence
  Description of Artificial Sequence: Synthetic oligonucleotide
  Antisense strand to SEQ ID NO: 2372530
ugcauaaucacucaccaaa

SEQ ID NO: 2372532 - RNA, 19 nt, Artificial Sequence
  Description of Artificial Sequence: Synthetic oligonucleotide
  Sense strand starting at position 1185 of SEQ ID NO: 1885853
gugagugauuaugcacaag

SEQ ID NO: 2372533 - RNA, 19 nt, Artificial Sequence
  Description of Artificial Sequence: Synthetic oligonucleotide
  Antisense strand to SEQ ID NO: 2372532
cuugugcauaaucacucac

SEQ ID NO: 2372534 - RNA, 19 nt, Artificial Sequence
  Description of Artificial Sequence: Synthetic oligonucleotide
  Sense strand starting at position 1196 of SEQ ID NO: 1885853
ugcacaagacacuguguua

SEQ ID NO: 2372535 - RNA, 19 nt, Artificial Sequence
  Description of Artificial Sequence: Synthetic oligonucleotide
  Antisense strand to SEQ ID NO: 2372534
uaacacagugucuugugca

SEQ ID NO: 2372536 - RNA, 19 nt, Artificial Sequence
  Description of Artificial Sequence: Synthetic oligonucleotide
  Sense strand starting at position 1209 of SEQ ID NO: 1885853
guguuaggcccugagggua

SEQ ID NO: 2372537 - RNA, 19 nt, Artificial Sequence
  Description of Artificial Sequence: Synthetic oligonucleotide
  Antisense strand to SEQ ID NO: 2372536
uacccucagggccuaacac

SEQ ID NO: 2372538 - RNA, 19 nt, Artificial Sequence
  Description of Artificial Sequence: Synthetic oligonucleotide
  Sense strand starting at position 1306 of SEQ ID NO: 1885853
acucuauaguagguggaaa

SEQ ID NO: 2372539 - RNA, 19 nt, Artificial Sequence
  Description of Artificial Sequence: Synthetic oligonucleotide
  Antisense strand to SEQ ID NO: 2372538
uuuccaccuacuauagagu

SEQ ID NO: 2372540 - RNA, 19 nt, Artificial Sequence
  Description of Artificial Sequence: Synthetic oligonucleotide
  Sense strand starting at position 1334 of SEQ ID NO: 1885853
acuagaaagucagguucua

SEQ ID NO: 2372541 - RNA, 19 nt, Artificial Sequence
  Description of Artificial Sequence: Synthetic oligonucleotide
  Antisense strand to SEQ ID NO: 2372540
uagaaccugacuuucuagu

SEQ ID NO: 2372542 - RNA, 19 nt, Artificial Sequence
  Description of Artificial Sequence: Synthetic oligonucleotide
  Sense strand starting at position 1345 of SEQ ID NO: 1885853
agguucuaggccuguaaca

SEQ ID NO: 2372543 - RNA, 19 nt, Artificial Sequence
  Description of Artificial Sequence: Synthetic oligonucleotide
  Antisense strand to SEQ ID NO: 2372542
uguuacaggccuagaaccu

SEQ ID NO: 2372544 - RNA, 19 nt, Artificial Sequence
  Description of Artificial Sequence: Synthetic oligonucleotide
  Sense strand starting at position 1470 of SEQ ID NO: 1885853
gagguagugacuggcacaa

SEQ ID NO: 2372545 - RNA, 19 nt, Artificial Sequence
  Description of Artificial Sequence: Synthetic oligonucleotide
  Antisense strand to SEQ ID NO: 2372544
uugugccagucacuaccuc

SEQ ID NO: 2372546 - RNA, 19 nt, Artificial Sequence
  Description of Artificial Sequence: Synthetic oligonucleotide
  Sense strand starting at position 1517 of SEQ ID NO: 1885853
aaccgugcuugauuccaaa

SEQ ID NO: 2372547 - RNA, 19 nt, Artificial Sequence
  Description of Artificial Sequence: Synthetic oligonucleotide
  Antisense strand to SEQ ID NO: 2372546
uuuggaaucaagcacgguu

SEQ ID NO: 2372548 - RNA, 19 nt, Artificial Sequence
  Description of Artificial Sequence: Synthetic oligonucleotide
  Sense strand starting at position 1520 of SEQ ID NO: 1885853
cgugcuugauuccaaagag

SEQ ID NO: 2372549 - RNA, 19 nt, Artificial Sequence
  Description of Artificial Sequence: Synthetic oligonucleotide
  Antisense strand to SEQ ID NO: 2372548
cucuuuggaaucaagcacg

SEQ ID NO: 2372550 - RNA, 19 nt, Artificial Sequence
  Description of Artificial Sequence: Synthetic oligonucleotide
  Sense strand starting at position 2442 of SEQ ID NO: 1885853
gcaguaucuuuccguggua

SEQ ID NO: 2372551 - RNA, 19 nt, Artificial Sequence
  Description of Artificial Sequence: Synthetic oligonucleotide
  Antisense strand to SEQ ID NO: 2372550
uaccacggaaagauacugc

SEQ ID NO: 2372552 - RNA, 19 nt, Artificial Sequence
  Description of Artificial Sequence: Synthetic oligonucleotide
  Sense strand starting at position 2444 of SEQ ID NO: 1885853
aguaucuuuccgugguagu

SEQ ID NO: 2372553 - RNA, 19 nt, Artificial Sequence
  Description of Artificial Sequence: Synthetic oligonucleotide
  Antisense strand to SEQ ID NO: 2372552
acuaccacggaaagauacu

SEQ ID NO: 2372554 - RNA, 19 nt, Artificial Sequence
  Description of Artificial Sequence: Synthetic oligonucleotide
  Sense strand starting at position 2445 of SEQ ID NO: 1885853
guaucuuuccgugguaguu

SEQ ID NO: 2372555 - RNA, 19 nt, Artificial Sequence
  Description of Artificial Sequence: Synthetic oligonucleotide
  Antisense strand to SEQ ID NO: 2372554
aacuaccacggaaagauac

SEQ ID NO: 2372556 - RNA, 19 nt, Artificial Sequence
  Description of Artificial Sequence: Synthetic oligonucleotide
  Sense strand starting at position 2509 of SEQ ID NO: 1885853
gugguaauucuagccgucu

SEQ ID NO: 2372557 - RNA, 19 nt, Artificial Sequence
  Description of Artificial Sequence: Synthetic oligonucleotide
  Antisense strand to SEQ ID NO: 2372556
agacggcuagaauuaccac

SEQ ID NO: 2372558 - RNA, 19 nt, Artificial Sequence
  Description of Artificial Sequence: Synthetic oligonucleotide
  Sense strand starting at position 2511 of SEQ ID NO: 1885853
gguaauucuagccgucucu

SEQ ID NO: 2372559 - RNA, 19 nt, Artificial Sequence
  Description of Artificial Sequence: Synthetic oligonucleotide
  Antisense strand to SEQ ID NO: 2372558
agagacggcuagaauuacc

SEQ ID NO: 2372560 - RNA, 19 nt, Artificial Sequence
  Description of Artificial Sequence: Synthetic oligonucleotide
  Sense strand starting at position 2552 of SEQ ID NO: 1885853
agccaaauguaaugaugau

SEQ ID NO: 2372561 - RNA, 19 nt, Artificial Sequence
  Description of Artificial Sequence: Synthetic oligonucleotide
  Antisense strand to SEQ ID NO: 2372560
aucaucauuacauuuggcu

SEQ ID NO: 2372562 - RNA, 19 nt, Artificial Sequence
  Description of Artificial Sequence: Synthetic oligonucleotide
  Sense strand starting at position 2628 of SEQ ID NO: 1885853
acucuaucuuguugacauc

SEQ ID NO: 2372563 - RNA, 19 nt, Artificial Sequence
  Description of Artificial Sequence: Synthetic oligonucleotide
  Antisense strand to SEQ ID NO: 2372562
gaugucaacaagauagagu

SEQ ID NO: 2372564 - RNA, 19 nt, Artificial Sequence
  Description of Artificial Sequence: Synthetic oligonucleotide
  Sense strand starting at position 2686 of SEQ ID NO: 1885853
guguaagccguuuggaaca

SEQ ID NO: 2372565 - RNA, 19 nt, Artificial Sequence
  Description of Artificial Sequence: Synthetic oligonucleotide
  Antisense strand to SEQ ID NO: 2372564
uguuccaaacggcuuacac

SEQ ID NO: 2372566 - RNA, 19 nt, Artificial Sequence
  Description of Artificial Sequence: Synthetic oligonucleotide
  Sense strand starting at position 2763 of SEQ ID NO: 1885853
agcagucaucaguguuaau

SEQ ID NO: 2372567 - RNA, 19 nt, Artificial Sequence
  Description of Artificial Sequence: Synthetic oligonucleotide
  Antisense strand to SEQ ID NO: 2372566
auuaacacugaugacugcu

SEQ ID NO: 2372568 - RNA, 19 nt, Artificial Sequence
  Description of Artificial Sequence: Synthetic oligonucleotide
  Sense strand starting at position 2766 of SEQ ID NO: 1885853
agucaucaguguuaauacu

SEQ ID NO: 2372569 - RNA, 19 nt, Artificial Sequence
  Description of Artificial Sequence: Synthetic oligonucleotide
  Antisense strand to SEQ ID NO: 2372568
aguauuaacacugaugacu

SEQ ID NO: 2372570 - RNA, 19 nt, Artificial Sequence
  Description of Artificial Sequence: Synthetic oligonucleotide
  Sense strand starting at position 2819 of SEQ ID NO: 1885853
aggaaauuccuugguggac

SEQ ID NO: 2372571 - RNA, 19 nt, Artificial Sequence
  Description of Artificial Sequence: Synthetic oligonucleotide
  Antisense strand to SEQ ID NO: 2372570
guccaccaaggaauuuccu

SEQ ID NO: 2372572 - RNA, 19 nt, Artificial Sequence
  Description of Artificial Sequence: Synthetic oligonucleotide
  Sense strand starting at position 2936 of SEQ ID NO: 1885853
cacucagggucccgauuau

SEQ ID NO: 2372573 - RNA, 19 nt, Artificial Sequence
  Description of Artificial Sequence: Synthetic oligonucleotide
  Antisense strand to SEQ ID NO: 2372572
auaaucgggacccugagug

SEQ ID NO: 2372574 - RNA, 19 nt, Artificial Sequence
  Description of Artificial Sequence: Synthetic oligonucleotide
  Sense strand starting at position 2965 of SEQ ID NO: 1885853
agcuucccucagcagaauu

SEQ ID NO: 2372575 - RNA, 19 nt, Artificial Sequence
  Description of Artificial Sequence: Synthetic oligonucleotide
  Antisense strand to SEQ ID NO: 2372574
aauucugcugagggaagcu

SEQ ID NO: 2372576 - RNA, 19 nt, Artificial Sequence
  Description of Artificial Sequence: Synthetic oligonucleotide
  Sense strand starting at position 2975 of SEQ ID NO: 1885853
agcagaauuuaccggcuuu

SEQ ID NO: 2372577 - RNA, 19 nt, Artificial Sequence
  Description of Artificial Sequence: Synthetic oligonucleotide
  Antisense strand to SEQ ID NO: 2372576
aaagccgguaaauucugcu

SEQ ID NO: 2372578 - RNA, 19 nt, Artificial Sequence
  Description of Artificial Sequence: Synthetic oligonucleotide
  Sense strand starting at position 2976 of SEQ ID NO: 1885853
gcagaauuuaccggcuuuc

SEQ ID NO: 2372579 - RNA, 19 nt, Artificial Sequence
  Description of Artificial Sequence: Synthetic oligonucleotide
  Antisense strand to SEQ ID NO: 2372578
gaaagccgguaaauucugc

SEQ ID NO: 2372580 - RNA, 19 nt, Artificial Sequence
  Description of Artificial Sequence: Synthetic oligonucleotide
  Sense strand starting at position 3103 of SEQ ID NO: 1885853
ucuccucuaugagaaagaa

SEQ ID NO: 2372581 - RNA, 19 nt, Artificial Sequence
  Description of Artificial Sequence: Synthetic oligonucleotide
  Antisense strand to SEQ ID NO: 2372580
uucuuucucauagaggaga

SEQ ID NO: 2372582 - RNA, 19 nt, Artificial Sequence
  Description of Artificial Sequence: Synthetic oligonucleotide
  Sense strand starting at position 3124 of SEQ ID NO: 1885853
gcgacuuuccauugaguuc

SEQ ID NO: 2372583 - RNA, 19 nt, Artificial Sequence
  Description of Artificial Sequence: Synthetic oligonucleotide
  Antisense strand to SEQ ID NO: 2372582
gaacucaauggaaagucgc

SEQ ID NO: 2372584 - RNA, 19 nt, Artificial Sequence
  Description of Artificial Sequence: Synthetic oligonucleotide
  Sense strand starting at position 3141 of SEQ ID NO: 1885853
uccauugaguucucuugaa

SEQ ID NO: 2372585 - RNA, 19 nt, Artificial Sequence
  Description of Artificial Sequence: Synthetic oligonucleotide
  Antisense strand to SEQ ID NO: 2372584
uucaagagaacucaaugga

SEQ ID NO: 2372586 - RNA, 19 nt, Artificial Sequence
  Description of Artificial Sequence: Synthetic oligonucleotide
  Sense strand starting at position 3145 of SEQ ID NO: 1885853
uugaguucucuugaauuag

SEQ ID NO: 2372587 - RNA, 19 nt, Artificial Sequence
  Description of Artificial Sequence: Synthetic oligonucleotide
  Antisense strand to SEQ ID NO: 2372586
cuaauucaagagaacucaa

SEQ ID NO: 2372588 - RNA, 19 nt, Artificial Sequence
  Description of Artificial Sequence: Synthetic oligonucleotide
  Sense strand starting at position 3170 of SEQ ID NO: 1885853
ucaguacccuccgggaauu

SEQ ID NO: 2372589 - RNA, 19 nt, Artificial Sequence
  Description of Artificial Sequence: Synthetic oligonucleotide
  Antisense strand to SEQ ID NO: 2372588
aauucccggaggguacuga

SEQ ID NO: 2372590 - RNA, 19 nt, Artificial Sequence
  Description of Artificial Sequence: Synthetic oligonucleotide
  Sense strand starting at position 3816 of SEQ ID NO: 1885853
gccucagucucacaaagua

SEQ ID NO: 2372591 - RNA, 19 nt, Artificial Sequence
  Description of Artificial Sequence: Synthetic oligonucleotide
  Antisense strand to SEQ ID NO: 2372590
uacuuugugagacugaggc

SEQ ID NO: 2372592 - RNA, 19 nt, Artificial Sequence
  Description of Artificial Sequence: Synthetic oligonucleotide
  Sense strand starting at position 3864 of SEQ ID NO: 1885853
cugucugcaucuuguuaac

SEQ ID NO: 2372593 - RNA, 19 nt, Artificial Sequence
  Description of Artificial Sequence: Synthetic oligonucleotide
  Antisense strand to SEQ ID NO: 2372592
guuaacaagaugcagacag

SEQ ID NO: 2372594 - RNA, 19 nt, Artificial Sequence
  Description of Artificial Sequence: Synthetic oligonucleotide
  Sense strand starting at position 3866 of SEQ ID NO: 1885853
gucugcaucuuguuaacuu

SEQ ID NO: 2372595 - RNA, 19 nt, Artificial Sequence
  Description of Artificial Sequence: Synthetic oligonucleotide
  Antisense strand to SEQ ID NO: 2372594
aaguuaacaagaugcagac

SEQ ID NO: 2372596 - RNA, 19 nt, Artificial Sequence
  Description of Artificial Sequence: Synthetic oligonucleotide
  Sense strand starting at position 138 of SEQ ID NO: 1885854
cuucuaauguguuuacuau

SEQ ID NO: 2372597 - RNA, 19 nt, Artificial Sequence
  Description of Artificial Sequence: Synthetic oligonucleotide
  Antisense strand to SEQ ID NO: 2372596
auaguaaacacauuagaag

SEQ ID NO: 2372598 - RNA, 19 nt, Artificial Sequence
  Description of Artificial Sequence: Synthetic oligonucleotide
  Sense strand starting at position 139 of SEQ ID NO: 1885854
uucuaauguguuuacuaug

SEQ ID NO: 2372599 - RNA, 19 nt, Artificial Sequence
  Description of Artificial Sequence: Synthetic oligonucleotide
  Antisense strand to SEQ ID NO: 2372598
cauaguaaacacauuagaa

SEQ ID NO: 2372600 - RNA, 19 nt, Artificial Sequence
  Description of Artificial Sequence: Synthetic oligonucleotide
  Sense strand starting at position 147 of SEQ ID NO: 1885854
uguuuacuaugagcuuaaa

SEQ ID NO: 2372601 - RNA, 19 nt, Artificial Sequence
  Description of Artificial Sequence: Synthetic oligonucleotide
  Antisense strand to SEQ ID NO: 2372600
uuuaagcucauaguaaaca

SEQ ID NO: 2372602 - RNA, 19 nt, Artificial Sequence
  Description of Artificial Sequence: Synthetic oligonucleotide
  Sense strand starting at position 192 of SEQ ID NO: 1885854
gcaacugguagguacuaaa

SEQ ID NO: 2372603 - RNA, 19 nt, Artificial Sequence
  Description of Artificial Sequence: Synthetic oligonucleotide
  Antisense strand to SEQ ID NO: 2372602
uuuaguaccuaccaguugc

SEQ ID NO: 2372604 - RNA, 19 nt, Artificial Sequence
  Description of Artificial Sequence: Synthetic oligonucleotide
  Sense strand starting at position 441 of SEQ ID NO: 1885854
cugcaaauucuaggucuuu

SEQ ID NO: 2372605 - RNA, 19 nt, Artificial Sequence
  Description of Artificial Sequence: Synthetic oligonucleotide
  Antisense strand to SEQ ID NO: 2372604
aaagaccuagaauuugcag

SEQ ID NO: 2372606 - RNA, 19 nt, Artificial Sequence
  Description of Artificial Sequence: Synthetic oligonucleotide
  Sense strand starting at position 442 of SEQ ID NO: 1885854
ugcaaauucuaggucuuua

SEQ ID NO: 2372607 - RNA, 19 nt, Artificial Sequence
  Description of Artificial Sequence: Synthetic oligonucleotide
  Antisense strand to SEQ ID NO: 2372606
uaaagaccuagaauuugca

SEQ ID NO: 2372608 - RNA, 19 nt, Artificial Sequence
  Description of Artificial Sequence: Synthetic oligonucleotide
  Sense strand starting at position 481 of SEQ ID NO: 1885854
uuuaaauaauucccgugau

SEQ ID NO: 2372609 - RNA, 19 nt, Artificial Sequence
  Description of Artificial Sequence: Synthetic oligonucleotide
  Antisense strand to SEQ ID NO: 2372608
aucacgggaauuauuuaaa

SEQ ID NO: 2372610 - RNA, 19 nt, Artificial Sequence
  Description of Artificial Sequence: Synthetic oligonucleotide
  Sense strand starting at position 495 of SEQ ID NO: 1885854
gugauucucuguucccaga

SEQ ID NO: 2372611 - RNA, 19 nt, Artificial Sequence
  Description of Artificial Sequence: Synthetic oligonucleotide
  Antisense strand to SEQ ID NO: 2372610
ucugggaacagagaaucac

SEQ ID NO: 2372612 - RNA, 19 nt, Artificial Sequence
  Description of Artificial Sequence: Synthetic oligonucleotide
  Sense strand starting at position 508 of SEQ ID NO: 1885854
cccagaauguucucuguuc

SEQ ID NO: 2372613 - RNA, 19 nt, Artificial Sequence
  Description of Artificial Sequence: Synthetic oligonucleotide
  Antisense strand to SEQ ID NO: 2372612
gaacagagaacauucuggg

SEQ ID NO: 2372614 - RNA, 19 nt, Artificial Sequence
  Description of Artificial Sequence: Synthetic oligonucleotide
  Sense strand starting at position 517 of SEQ ID NO: 1885854
uucucuguucccuacugua

SEQ ID NO: 2372615 - RNA, 19 nt, Artificial Sequence
  Description of Artificial Sequence: Synthetic oligonucleotide
  Antisense strand to SEQ ID NO: 2372614
uacaguagggaacagagaa

SEQ ID NO: 2372616 - RNA, 19 nt, Artificial Sequence
  Description of Artificial Sequence: Synthetic oligonucleotide
  Sense strand starting at position 541 of SEQ ID NO: 1885854
cuguuuaggucucucagua

SEQ ID NO: 2372617 - RNA, 19 nt, Artificial Sequence
  Description of Artificial Sequence: Synthetic oligonucleotide
  Antisense strand to SEQ ID NO: 2372616
uacugagagaccuaaacag

SEQ ID NO: 2372618 - RNA, 19 nt, Artificial Sequence
  Description of Artificial Sequence: Synthetic oligonucleotide
  Sense strand starting at position 545 of SEQ ID NO: 1885854
uuaggucucucaguaacuu

SEQ ID NO: 2372619 - RNA, 19 nt, Artificial Sequence
  Description of Artificial Sequence: Synthetic oligonucleotide
  Antisense strand to SEQ ID NO: 2372618
aaguuacugagagaccuaa

SEQ ID NO: 2372620 - RNA, 19 nt, Artificial Sequence
  Description of Artificial Sequence: Synthetic oligonucleotide
  Sense strand starting at position 669 of SEQ ID NO: 1885854
agaaaugcuuaugucacuu

SEQ ID NO: 2372621 - RNA, 19 nt, Artificial Sequence
  Description of Artificial Sequence: Synthetic oligonucleotide
  Antisense strand to SEQ ID NO: 2372620
aagugacauaagcauuucu

SEQ ID NO: 2372622 - RNA, 19 nt, Artificial Sequence
  Description of Artificial Sequence: Synthetic oligonucleotide
  Sense strand starting at position 680 of SEQ ID NO: 1885854
ugucacuucuacucaaagu

SEQ ID NO: 2372623 - RNA, 19 nt, Artificial Sequence
  Description of Artificial Sequence: Synthetic oligonucleotide
  Antisense strand to SEQ ID NO: 2372622
acuuugaguagaagugaca

SEQ ID NO: 2372624 - RNA, 19 nt, Artificial Sequence
  Description of Artificial Sequence: Synthetic oligonucleotide
  Sense strand starting at position 716 of SEQ ID NO: 1885854
uugucauagcccuaaaggu

SEQ ID NO: 2372625 - RNA, 19 nt, Artificial Sequence
  Description of Artificial Sequence: Synthetic oligonucleotide
  Antisense strand to SEQ ID NO: 2372624
accuuuagggcuaugacaa

SEQ ID NO: 2372626 - RNA, 19 nt, Artificial Sequence
  Description of Artificial Sequence: Synthetic oligonucleotide
  Sense strand starting at position 926 of SEQ ID NO: 1885854
cgacuuuauuuccaaaugu

SEQ ID NO: 2372627 - RNA, 19 nt, Artificial Sequence
  Description of Artificial Sequence: Synthetic oligonucleotide
  Antisense strand to SEQ ID NO: 2372626
acauuuggaaauaaagucg

SEQ ID NO: 2372628 - RNA, 19 nt, Artificial Sequence
  Description of Artificial Sequence: Synthetic oligonucleotide
  Sense strand starting at position 956 of SEQ ID NO: 1885854
ugcaaauaugcugcguuga

SEQ ID NO: 2372629 - RNA, 19 nt, Artificial Sequence
  Description of Artificial Sequence: Synthetic oligonucleotide
  Antisense strand to SEQ ID NO: 2372628
ucaacgcagcauauuugca

SEQ ID NO: 2372630 - RNA, 19 nt, Artificial Sequence
  Description of Artificial Sequence: Synthetic oligonucleotide
  Sense strand starting at position 1119 of SEQ ID NO: 1885854
uaaauucgacacgaaaugu

SEQ ID NO: 2372631 - RNA, 19 nt, Artificial Sequence
  Description of Artificial Sequence: Synthetic oligonucleotide
  Antisense strand to SEQ ID NO: 2372630
acauuucgugucgaauuua

SEQ ID NO: 2372632 - RNA, 19 nt, Artificial Sequence
  Description of Artificial Sequence: Synthetic oligonucleotide
  Sense strand starting at position 1136 of SEQ ID NO: 1885854
guaugaaggccguaaacaa

SEQ ID NO: 2372633 - RNA, 19 nt, Artificial Sequence
  Description of Artificial Sequence: Synthetic oligonucleotide
  Antisense strand to SEQ ID NO: 2372632
uuguuuacggccuucauac

SEQ ID NO: 2372634 - RNA, 19 nt, Artificial Sequence
  Description of Artificial Sequence: Synthetic oligonucleotide
  Sense strand starting at position 1242 of SEQ ID NO: 1885854
cccagaaaguaagugguau

SEQ ID NO: 2372635 - RNA, 19 nt, Artificial Sequence
  Description of Artificial Sequence: Synthetic oligonucleotide
  Antisense strand to SEQ ID NO: 2372634
auaccacuuacuuucuggg

SEQ ID NO: 2372636 - RNA, 19 nt, Artificial Sequence
  Description of Artificial Sequence: Synthetic oligonucleotide
  Sense strand starting at position 1269 of SEQ ID NO: 1885854
aggguagcucuggacugaa

SEQ ID NO: 2372637 - RNA, 19 nt, Artificial Sequence
  Description of Artificial Sequence: Synthetic oligonucleotide
  Antisense strand to SEQ ID NO: 2372636
uucaguccagagcuacccu

SEQ ID NO: 2372638 - RNA, 19 nt, Artificial Sequence
  Description of Artificial Sequence: Synthetic oligonucleotide
  Sense strand starting at position 1272 of SEQ ID NO: 1885854
guagcucuggacugaaaca

SEQ ID NO: 2372639 - RNA, 19 nt, Artificial Sequence
  Description of Artificial Sequence: Synthetic oligonucleotide
  Antisense strand to SEQ ID NO: 2372638
uguuucaguccagagcuac

SEQ ID NO: 2372640 - RNA, 19 nt, Artificial Sequence
  Description of Artificial Sequence: Synthetic oligonucleotide
  Sense strand starting at position 1430 of SEQ ID NO: 1885854
ucaggacagucuguuccua

SEQ ID NO: 2372641 - RNA, 19 nt, Artificial Sequence
  Description of Artificial Sequence: Synthetic oligonucleotide
  Antisense strand to SEQ ID NO: 2372640
uaggaacagacuguccuga

SEQ ID NO: 2372642 - RNA, 19 nt, Artificial Sequence
  Description of Artificial Sequence: Synthetic oligonucleotide
  Sense strand starting at position 1432 of SEQ ID NO: 1885854
aggacagucuguuccuaua

SEQ ID NO: 2372643 - RNA, 19 nt, Artificial Sequence
  Description of Artificial Sequence: Synthetic oligonucleotide
  Antisense strand to SEQ ID NO: 2372642
uauaggaacagacuguccu

SEQ ID NO: 2372644 - RNA, 19 nt, Artificial Sequence
  Description of Artificial Sequence: Synthetic oligonucleotide
  Sense strand starting at position 2143 of SEQ ID NO: 1885854
uaucaaaggucuccaugga

SEQ ID NO: 2372645 - RNA, 19 nt, Artificial Sequence
  Description of Artificial Sequence: Synthetic oligonucleotide
  Antisense strand to SEQ ID NO: 2372644
uccauggagaccuuugaua

SEQ ID NO: 2372646 - RNA, 19 nt, Artificial Sequence
  Description of Artificial Sequence: Synthetic oligonucleotide
  Sense strand starting at position 2247 of SEQ ID NO: 1885854
cuggguuccguguuguaau

SEQ ID NO: 2372647 - RNA, 19 nt, Artificial Sequence
  Description of Artificial Sequence: Synthetic oligonucleotide
  Antisense strand to SEQ ID NO: 2372646
auuacaacacggaacccag

SEQ ID NO: 2372648 - RNA, 19 nt, Artificial Sequence
  Description of Artificial Sequence: Synthetic oligonucleotide
  Sense strand starting at position 2254 of SEQ ID NO: 1885854
ccguguuguaauuaggaug

SEQ ID NO: 2372649 - RNA, 19 nt, Artificial Sequence
  Description of Artificial Sequence: Synthetic oligonucleotide
  Antisense strand to SEQ ID NO: 2372648
cauccuaauuacaacacgg

SEQ ID NO: 2372650 - RNA, 19 nt, Artificial Sequence
  Description of Artificial Sequence: Synthetic oligonucleotide
  Sense strand starting at position 2259 of SEQ ID NO: 1885854
uuguaauuaggauguaaag

SEQ ID NO: 2372651 - RNA, 19 nt, Artificial Sequence
  Description of Artificial Sequence: Synthetic oligonucleotide
  Antisense strand to SEQ ID NO: 2372650
cuuuacauccuaauuacaa

SEQ ID NO: 2372652 - RNA, 19 nt, Artificial Sequence
  Description of Artificial Sequence: Synthetic oligonucleotide
  Sense strand starting at position 2349 of SEQ ID NO: 1885854
gugaguuugacugacuucu

SEQ ID NO: 2372653 - RNA, 19 nt, Artificial Sequence
  Description of Artificial Sequence: Synthetic oligonucleotide
  Antisense strand to SEQ ID NO: 2372652
agaagucagucaaacucac

SEQ ID NO: 2372654 - RNA, 19 nt, Artificial Sequence
  Description of Artificial Sequence: Synthetic oligonucleotide
  Sense strand starting at position 2351 of SEQ ID NO: 1885854
gaguuugacugacuucuug

SEQ ID NO: 2372655 - RNA, 19 nt, Artificial Sequence
  Description of Artificial Sequence: Synthetic oligonucleotide
  Antisense strand to SEQ ID NO: 2372654
caagaagucagucaaacuc

SEQ ID NO: 2372656 - RNA, 19 nt, Artificial Sequence
  Description of Artificial Sequence: Synthetic oligonucleotide
  Sense strand starting at position 2355 of SEQ ID NO: 1885854
uugacugacuucuugaaau

SEQ ID NO: 2372657 - RNA, 19 nt, Artificial Sequence
  Description of Artificial Sequence: Synthetic oligonucleotide
  Antisense strand to SEQ ID NO: 2372656
auuucaagaagucagucaa

SEQ ID NO: 2372658 - RNA, 19 nt, Artificial Sequence
  Description of Artificial Sequence: Synthetic oligonucleotide
  Sense strand starting at position 2386 of SEQ ID NO: 1885854
aauauuugcgugcggaaga

SEQ ID NO: 2372659 - RNA, 19 nt, Artificial Sequence
  Description of Artificial Sequence: Synthetic oligonucleotide
  Antisense strand to SEQ ID NO: 2372658
ucuuccgcacgcaaauauu

SEQ ID NO: 2372660 - RNA, 19 nt, Artificial Sequence
  Description of Artificial Sequence: Synthetic oligonucleotide
  Sense strand starting at position 2409 of SEQ ID NO: 1885854
gagacucaaccgugggaau

SEQ ID NO: 2372661 - RNA, 19 nt, Artificial Sequence
  Description of Artificial Sequence: Synthetic oligonucleotide
  Antisense strand to SEQ ID NO: 2372660
auucccacgguugagucuc

SEQ ID NO: 2372662 - RNA, 19 nt, Artificial Sequence
  Description of Artificial Sequence: Synthetic oligonucleotide
  Sense strand starting at position 2410 of SEQ ID NO: 1885854
agacucaaccgugggaauu

SEQ ID NO: 2372663 - RNA, 19 nt, Artificial Sequence
  Description of Artificial Sequence: Synthetic oligonucleotide
  Antisense strand to SEQ ID NO: 2372662
aauucccacgguugagucu

SEQ ID NO: 2372664 - RNA, 19 nt, Artificial Sequence
  Description of Artificial Sequence: Synthetic oligonucleotide
  Sense strand starting at position 2411 of SEQ ID NO: 1885854
gacucaaccgugggaauua

SEQ ID NO: 2372665 - RNA, 19 nt, Artificial Sequence
  Description of Artificial Sequence: Synthetic oligonucleotide
  Antisense strand to SEQ ID NO: 2372664
uaauucccacgguugaguc

SEQ ID NO: 2372666 - RNA, 19 nt, Artificial Sequence
  Description of Artificial Sequence: Synthetic oligonucleotide
  Sense strand starting at position 2884 of SEQ ID NO: 1885854
gcaauccagaguugaggau

SEQ ID NO: 2372667 - RNA, 19 nt, Artificial Sequence
  Description of Artificial Sequence: Synthetic oligonucleotide
  Antisense strand to SEQ ID NO: 2372666
auccucaacucuggauugc

SEQ ID NO: 2372668 - RNA, 19 nt, Artificial Sequence
  Description of Artificial Sequence: Synthetic oligonucleotide
  Sense strand starting at position 2900 of SEQ ID NO: 1885854
gauauuuacuuggagguaa

SEQ ID NO: 2372669 - RNA, 19 nt, Artificial Sequence
  Description of Artificial Sequence: Synthetic oligonucleotide
  Antisense strand to SEQ ID NO: 2372668
uuaccuccaaguaaauauc

SEQ ID NO: 2372670 - RNA, 19 nt, Artificial Sequence
  Description of Artificial Sequence: Synthetic oligonucleotide
  Sense strand starting at position 2918 of SEQ ID NO: 1885854
aagguccagugcucaagaa

SEQ ID NO: 2372671 - RNA, 19 nt, Artificial Sequence
  Description of Artificial Sequence: Synthetic oligonucleotide
  Antisense strand to SEQ ID NO: 2372670
uucuugagcacuggaccuu

SEQ ID NO: 2372672 - RNA, 19 nt, Artificial Sequence
  Description of Artificial Sequence: Synthetic oligonucleotide
  Sense strand starting at position 2919 of SEQ ID NO: 1885854
agguccagugcucaagaaa

SEQ ID NO: 2372673 - RNA, 19 nt, Artificial Sequence
  Description of Artificial Sequence: Synthetic oligonucleotide
  Antisense strand to SEQ ID NO: 2372672
uuucuugagcacuggaccu

SEQ ID NO: 2372674 - RNA, 19 nt, Artificial Sequence
  Description of Artificial Sequence: Synthetic oligonucleotide
  Sense strand starting at position 3061 of SEQ ID NO: 1885854
gcugauuaccaacacaguu

SEQ ID NO: 2372675 - RNA, 19 nt, Artificial Sequence
  Description of Artificial Sequence: Synthetic oligonucleotide
  Antisense strand to SEQ ID NO: 2372674
aacuguguugguaaucagc

SEQ ID NO: 2372676 - RNA, 19 nt, Artificial Sequence
  Description of Artificial Sequence: Synthetic oligonucleotide
  Sense strand starting at position 56 of SEQ ID NO: 1885855
uuuguucuauugguaacaa

SEQ ID NO: 2372677 - RNA, 19 nt, Artificial Sequence
  Description of Artificial Sequence: Synthetic oligonucleotide
  Antisense strand to SEQ ID NO: 2372676
uuguuaccaauagaacaaa

SEQ ID NO: 2372678 - RNA, 19 nt, Artificial Sequence
  Description of Artificial Sequence: Synthetic oligonucleotide
  Sense strand starting at position 85 of SEQ ID NO: 1885855
gcuguugggauuugcuaau

SEQ ID NO: 2372679 - RNA, 19 nt, Artificial Sequence
  Description of Artificial Sequence: Synthetic oligonucleotide
  Antisense strand to SEQ ID NO: 2372678
auuagcaaaucccaacagc

SEQ ID NO: 2372680 - RNA, 19 nt, Artificial Sequence
  Description of Artificial Sequence: Synthetic oligonucleotide
  Sense strand starting at position 91 of SEQ ID NO: 1885855
gggauuugcuaauaauauu

SEQ ID NO: 2372681 - RNA, 19 nt, Artificial Sequence
  Description of Artificial Sequence: Synthetic oligonucleotide
  Antisense strand to SEQ ID NO: 2372680
aauauuauuagcaaauccc

SEQ ID NO: 2372682 - RNA, 19 nt, Artificial Sequence
  Description of Artificial Sequence: Synthetic oligonucleotide
  Sense strand starting at position 255 of SEQ ID NO: 1885855
gacugcuuccuaggugaga

SEQ ID NO: 2372683 - RNA, 19 nt, Artificial Sequence
  Description of Artificial Sequence: Synthetic oligonucleotide
  Antisense strand to SEQ ID NO: 2372682
ucucaccuaggaagcaguc

SEQ ID NO: 2372684 - RNA, 19 nt, Artificial Sequence
  Description of Artificial Sequence: Synthetic oligonucleotide
  Sense strand starting at position 257 of SEQ ID NO: 1885855
cugcuuccuaggugagaga

SEQ ID NO: 2372685 - RNA, 19 nt, Artificial Sequence
  Description of Artificial Sequence: Synthetic oligonucleotide
  Antisense strand to SEQ ID NO: 2372684
ucucucaccuaggaagcag

SEQ ID NO: 2372686 - RNA, 19 nt, Artificial Sequence
  Description of Artificial Sequence: Synthetic oligonucleotide
  Sense strand starting at position 446 of SEQ ID NO: 1885855
guuaaugugaaagaguuga

SEQ ID NO: 2372687 - RNA, 19 nt, Artificial Sequence
  Description of Artificial Sequence: Synthetic oligonucleotide
  Antisense strand to SEQ ID NO: 2372686
ucaacucuuucacauuaac

SEQ ID NO: 2372688 - RNA, 19 nt, Artificial Sequence
  Description of Artificial Sequence: Synthetic oligonucleotide
  Sense strand starting at position 450 of SEQ ID NO: 1885855
augugaaagaguugaauua

SEQ ID NO: 2372689 - RNA, 19 nt, Artificial Sequence
  Description of Artificial Sequence: Synthetic oligonucleotide
  Antisense strand to SEQ ID NO: 2372688
uaauucaacucuuucacau

SEQ ID NO: 2372690 - RNA, 19 nt, Artificial Sequence
  Description of Artificial Sequence: Synthetic oligonucleotide
  Sense strand starting at position 460 of SEQ ID NO: 1885855
guugaauuagaucacguuu

SEQ ID NO: 2372691 - RNA, 19 nt, Artificial Sequence
  Description of Artificial Sequence: Synthetic oligonucleotide
  Antisense strand to SEQ ID NO: 2372690
aaacgugaucuaauucaac

SEQ ID NO: 2372692 - RNA, 19 nt, Artificial Sequence
  Description of Artificial Sequence: Synthetic oligonucleotide
  Sense strand starting at position 468 of SEQ ID NO: 1885855
agaucacguuucucaaauc

SEQ ID NO: 2372693 - RNA, 19 nt, Artificial Sequence
  Description of Artificial Sequence: Synthetic oligonucleotide
  Antisense strand to SEQ ID NO: 2372692
gauuugagaaacgugaucu

SEQ ID NO: 2372694 - RNA, 19 nt, Artificial Sequence
  Description of Artificial Sequence: Synthetic oligonucleotide
  Sense strand starting at position 631 of SEQ ID NO: 1885855
uuucucgauuggguuuaua

SEQ ID NO: 2372695 - RNA, 19 nt, Artificial Sequence
  Description of Artificial Sequence: Synthetic oligonucleotide
  Antisense strand to SEQ ID NO: 2372694
uauaaacccaaucgagaaa

SEQ ID NO: 2372696 - RNA, 19 nt, Artificial Sequence
  Description of Artificial Sequence: Synthetic oligonucleotide
  Sense strand starting at position 668 of SEQ ID NO: 1885855
ggcuguucacgacaauaga

SEQ ID NO: 2372697 - RNA, 19 nt, Artificial Sequence
  Description of Artificial Sequence: Synthetic oligonucleotide
  Antisense strand to SEQ ID NO: 2372696
ucuauugucgugaacagcc

SEQ ID NO: 2372698 - RNA, 19 nt, Artificial Sequence
  Description of Artificial Sequence: Synthetic oligonucleotide
  Sense strand starting at position 913 of SEQ ID NO: 1885855
aagagcuuucucugagagu

SEQ ID NO: 2372699 - RNA, 19 nt, Artificial Sequence
  Description of Artificial Sequence: Synthetic oligonucleotide
  Antisense strand to SEQ ID NO: 2372698
acucucagagaaagcucuu

SEQ ID NO: 2372700 - RNA, 19 nt, Artificial Sequence
  Description of Artificial Sequence: Synthetic oligonucleotide
  Sense strand starting at position 1150 of SEQ ID NO: 1885855
agcugugauccucaggaaa

SEQ ID NO: 2372701 - RNA, 19 nt, Artificial Sequence
  Description of Artificial Sequence: Synthetic oligonucleotide
  Antisense strand to SEQ ID NO: 2372700
uuuccugaggaucacagcu

SEQ ID NO: 2372702 - RNA, 19 nt, Artificial Sequence
  Description of Artificial Sequence: Synthetic oligonucleotide
  Sense strand starting at position 1153 of SEQ ID NO: 1885855
ugugauccucaggaaaguu

SEQ ID NO: 2372703 - RNA, 19 nt, Artificial Sequence
  Description of Artificial Sequence: Synthetic oligonucleotide
  Antisense strand to SEQ ID NO: 2372702
aacuuuccugaggaucaca

SEQ ID NO: 2372704 - RNA, 19 nt, Artificial Sequence
  Description of Artificial Sequence: Synthetic oligonucleotide
  Sense strand starting at position 1294 of SEQ ID NO: 1885855
ggcccuagaauguguauuu

SEQ ID NO: 2372705 - RNA, 19 nt, Artificial Sequence
  Description of Artificial Sequence: Synthetic oligonucleotide
  Antisense strand to SEQ ID NO: 2372704
aaauacacauucuagggcc

SEQ ID NO: 2372706 - RNA, 19 nt, Artificial Sequence
  Description of Artificial Sequence: Synthetic oligonucleotide
  Sense strand starting at position 1462 of SEQ ID NO: 1885855
ugcagauuugcuuguguug

SEQ ID NO: 2372707 - RNA, 19 nt, Artificial Sequence
  Description of Artificial Sequence: Synthetic oligonucleotide
  Antisense strand to SEQ ID NO: 2372706
caacacaagcaaaucugca

SEQ ID NO: 2372708 - RNA, 19 nt, Artificial Sequence
  Description of Artificial Sequence: Synthetic oligonucleotide
  Sense strand starting at position 1465 of SEQ ID NO: 1885855
agauuugcuuguguugauc

SEQ ID NO: 2372709 - RNA, 19 nt, Artificial Sequence
  Description of Artificial Sequence: Synthetic oligonucleotide
  Antisense strand to SEQ ID NO: 2372708
gaucaacacaagcaaaucu

SEQ ID NO: 2372710 - RNA, 19 nt, Artificial Sequence
  Description of Artificial Sequence: Synthetic oligonucleotide
  Sense strand starting at position 1542 of SEQ ID NO: 1885855
auugccaauguuuaggaau

SEQ ID NO: 2372711 - RNA, 19 nt, Artificial Sequence
  Description of Artificial Sequence: Synthetic oligonucleotide
  Antisense strand to SEQ ID NO: 2372710
auuccuaaacauuggcaau

SEQ ID NO: 2372712 - RNA, 19 nt, Artificial Sequence
  Description of Artificial Sequence: Synthetic oligonucleotide
  Sense strand starting at position 1556 of SEQ ID NO: 1885855
ggaaucacaugaucuugua

SEQ ID NO: 2372713 - RNA, 19 nt, Artificial Sequence
  Description of Artificial Sequence: Synthetic oligonucleotide
  Antisense strand to SEQ ID NO: 2372712
uacaagaucaugugauucc

SEQ ID NO: 2372714 - RNA, 19 nt, Artificial Sequence
  Description of Artificial Sequence: Synthetic oligonucleotide
  Sense strand starting at position 1621 of SEQ ID NO: 1885855
ccaugucaggcuuaaauug

SEQ ID NO: 2372715 - RNA, 19 nt, Artificial Sequence
  Description of Artificial Sequence: Synthetic oligonucleotide
  Antisense strand to SEQ ID NO: 2372714
caauuuaagccugacaugg

SEQ ID NO: 2372716 - RNA, 19 nt, Artificial Sequence
  Description of Artificial Sequence: Synthetic oligonucleotide
  Sense strand starting at position 1670 of SEQ ID NO: 1885855
gugaguucccuuuaggaag

SEQ ID NO: 2372717 - RNA, 19 nt, Artificial Sequence
  Description of Artificial Sequence: Synthetic oligonucleotide
  Antisense strand to SEQ ID NO: 2372716
cuuccuaaagggaacucac

SEQ ID NO: 2372718 - RNA, 19 nt, Artificial Sequence
  Description of Artificial Sequence: Synthetic oligonucleotide
  Sense strand starting at position 1907 of SEQ ID NO: 1885855
ugccuaguccauggcauuu

SEQ ID NO: 2372719 - RNA, 19 nt, Artificial Sequence
  Description of Artificial Sequence: Synthetic oligonucleotide
  Antisense strand to SEQ ID NO: 2372718
aaaugccauggacuaggca

SEQ ID NO: 2372720 - RNA, 19 nt, Artificial Sequence
  Description of Artificial Sequence: Synthetic oligonucleotide
  Sense strand starting at position 2409 of SEQ ID NO: 1885855
ccuuaugaaugcguuggaa

SEQ ID NO: 2372721 - RNA, 19 nt, Artificial Sequence
  Description of Artificial Sequence: Synthetic oligonucleotide
  Antisense strand to SEQ ID NO: 2372720
uuccaacgcauucauaagg

SEQ ID NO: 2372722 - RNA, 19 nt, Artificial Sequence
  Description of Artificial Sequence: Synthetic oligonucleotide
  Sense strand starting at position 2411 of SEQ ID NO: 1885855
uuaugaaugcguuggaaug

SEQ ID NO: 2372723 - RNA, 19 nt, Artificial Sequence
  Description of Artificial Sequence: Synthetic oligonucleotide
  Antisense strand to SEQ ID NO: 2372722
cauuccaacgcauucauaa

SEQ ID NO: 2372724 - RNA, 19 nt, Artificial Sequence
  Description of Artificial Sequence: Synthetic oligonucleotide
  Sense strand starting at position 2412 of SEQ ID NO: 1885855
uaugaaugcguuggaauga

SEQ ID NO: 2372725 - RNA, 19 nt, Artificial Sequence
  Description of Artificial Sequence: Synthetic oligonucleotide
  Antisense strand to SEQ ID NO: 2372724
ucauuccaacgcauucaua

SEQ ID NO: 2372726 - RNA, 19 nt, Artificial Sequence
  Description of Artificial Sequence: Synthetic oligonucleotide
  Sense strand starting at position 2448 of SEQ ID NO: 1885855
gaggaugcauuugagaugu

SEQ ID NO: 2372727 - RNA, 19 nt, Artificial Sequence
  Description of Artificial Sequence: Synthetic oligonucleotide
  Antisense strand to SEQ ID NO: 2372726
acaucucaaaugcauccuc

SEQ ID NO: 2372728 - RNA, 19 nt, Artificial Sequence
  Description of Artificial Sequence: Synthetic oligonucleotide
  Sense strand starting at position 2711 of SEQ ID NO: 1885855
auaguuguauaaucugagu

SEQ ID NO: 2372729 - RNA, 19 nt, Artificial Sequence
  Description of Artificial Sequence: Synthetic oligonucleotide
  Antisense strand to SEQ ID NO: 2372728
acucagauuauacaacuau

SEQ ID NO: 2372730 - RNA, 19 nt, Artificial Sequence
  Description of Artificial Sequence: Synthetic oligonucleotide
  Sense strand starting at position 2713 of SEQ ID NO: 1885855
aguuguauaaucugaguca

SEQ ID NO: 2372731 - RNA, 19 nt, Artificial Sequence
  Description of Artificial Sequence: Synthetic oligonucleotide
  Antisense strand to SEQ ID NO: 2372730
ugacucagauuauacaacu

SEQ ID NO: 2372732 - RNA, 19 nt, Artificial Sequence
  Description of Artificial Sequence: Synthetic oligonucleotide
  Sense strand starting at position 2716 of SEQ ID NO: 1885855
uguauaaucugagucacug

SEQ ID NO: 2372733 - RNA, 19 nt, Artificial Sequence
  Description of Artificial Sequence: Synthetic oligonucleotide
  Antisense strand to SEQ ID NO: 2372732
cagugacucagauuauaca

SEQ ID NO: 2372734 - RNA, 19 nt, Artificial Sequence
  Description of Artificial Sequence: Synthetic oligonucleotide
  Sense strand starting at position 3236 of SEQ ID NO: 1885855
ugaccuacuuuggauuuaa

SEQ ID NO: 2372735 - RNA, 19 nt, Artificial Sequence
  Description of Artificial Sequence: Synthetic oligonucleotide
  Antisense strand to SEQ ID NO: 2372734
uuaaauccaaaguagguca

SEQ ID NO: 2372736 - RNA, 19 nt, Artificial Sequence
  Description of Artificial Sequence: Synthetic oligonucleotide
  Sense strand starting at position 3575 of SEQ ID NO: 1885855
uuaauuccacuguggcaua

SEQ ID NO: 2372737 - RNA, 19 nt, Artificial Sequence
  Description of Artificial Sequence: Synthetic oligonucleotide
  Antisense strand to SEQ ID NO: 2372736
uaugccacaguggaauuaa

SEQ ID NO: 2372738 - RNA, 19 nt, Artificial Sequence
  Description of Artificial Sequence: Synthetic oligonucleotide
  Sense strand starting at position 3706 of SEQ ID NO: 1885855
ucugcuauugugggaugaa

SEQ ID NO: 2372739 - RNA, 19 nt, Artificial Sequence
  Description of Artificial Sequence: Synthetic oligonucleotide
  Antisense strand to SEQ ID NO: 2372738
uucaucccacaauagcaga

SEQ ID NO: 2372740 - RNA, 19 nt, Artificial Sequence
  Description of Artificial Sequence: Synthetic oligonucleotide
  Sense strand starting at position 3709 of SEQ ID NO: 1885855
gcuauugugggaugaaguu

SEQ ID NO: 2372741 - RNA, 19 nt, Artificial Sequence
  Description of Artificial Sequence: Synthetic oligonucleotide
  Antisense strand to SEQ ID NO: 2372740
aacuucaucccacaauagc

SEQ ID NO: 2372742 - RNA, 19 nt, Artificial Sequence
  Description of Artificial Sequence: Synthetic oligonucleotide
  Sense strand starting at position 3715 of SEQ ID NO: 1885855
gugggaugaaguugucuau

SEQ ID NO: 2372743 - RNA, 19 nt, Artificial Sequence
  Description of Artificial Sequence: Synthetic oligonucleotide
  Antisense strand to SEQ ID NO: 2372742
auagacaacuucaucccac

SEQ ID NO: 2372744 - RNA, 19 nt, Artificial Sequence
  Description of Artificial Sequence: Synthetic oligonucleotide
  Sense strand starting at position 3718 of SEQ ID NO: 1885855
ggaugaaguugucuauaga

SEQ ID NO: 2372745 - RNA, 19 nt, Artificial Sequence
  Description of Artificial Sequence: Synthetic oligonucleotide
  Antisense strand to SEQ ID NO: 2372744
ucuauagacaacuucaucc

SEQ ID NO: 2372746 - RNA, 19 nt, Artificial Sequence
  Description of Artificial Sequence: Synthetic oligonucleotide
  Sense strand starting at position 3721 of SEQ ID NO: 1885855
ugaaguugucuauagacau

SEQ ID NO: 2372747 - RNA, 19 nt, Artificial Sequence
  Description of Artificial Sequence: Synthetic oligonucleotide
  Antisense strand to SEQ ID NO: 2372746
augucuauagacaacuuca

SEQ ID NO: 2372748 - RNA, 19 nt, Artificial Sequence
  Description of Artificial Sequence: Synthetic oligonucleotide
  Sense strand starting at position 3803 of SEQ ID NO: 1885855
guccauuucugauagagac

SEQ ID NO: 2372749 - RNA, 19 nt, Artificial Sequence
  Description of Artificial Sequence: Synthetic oligonucleotide
  Antisense strand to SEQ ID NO: 2372748
gucucuaucagaaauggac

SEQ ID NO: 2372750 - RNA, 19 nt, Artificial Sequence
  Description of Artificial Sequence: Synthetic oligonucleotide
  Sense strand starting at position 3811 of SEQ ID NO: 1885855
cugauagagacguguugaa

SEQ ID NO: 2372751 - RNA, 19 nt, Artificial Sequence
  Description of Artificial Sequence: Synthetic oligonucleotide
  Antisense strand to SEQ ID NO: 2372750
uucaacacgucucuaucag

SEQ ID NO: 2372752 - RNA, 19 nt, Artificial Sequence
  Description of Artificial Sequence: Synthetic oligonucleotide
  Sense strand starting at position 3948 of SEQ ID NO: 1885855
gagaauggauucccauugu

SEQ ID NO: 2372753 - RNA, 19 nt, Artificial Sequence
  Description of Artificial Sequence: Synthetic oligonucleotide
  Antisense strand to SEQ ID NO: 2372752
acaaugggaauccauucuc

SEQ ID NO: 2372754 - RNA, 19 nt, Artificial Sequence
  Description of Artificial Sequence: Synthetic oligonucleotide
  Sense strand starting at position 3952 of SEQ ID NO: 1885855
auggauucccauugucauu

SEQ ID NO: 2372755 - RNA, 19 nt, Artificial Sequence
  Description of Artificial Sequence: Synthetic oligonucleotide
  Antisense strand to SEQ ID NO: 2372754
aaugacaaugggaauccau

SEQ ID NO: 2372756 - RNA, 19 nt, Artificial Sequence
  Description of Artificial Sequence: Synthetic oligonucleotide
  Sense strand starting at position 26 of SEQ ID NO: 1885856
gugacuauauuuggacgua

SEQ ID NO: 2372757 - RNA, 19 nt, Artificial Sequence
  Description of Artificial Sequence: Synthetic oligonucleotide
  Antisense strand to SEQ ID NO: 2372756
uacguccaaauauagucac

SEQ ID NO: 2372758 - RNA, 19 nt, Artificial Sequence
  Description of Artificial Sequence: Synthetic oligonucleotide
  Sense strand starting at position 83 of SEQ ID NO: 1885856
acgggugagcccuauucca

SEQ ID NO: 2372759 - RNA, 19 nt, Artificial Sequence
  Description of Artificial Sequence: Synthetic oligonucleotide
  Antisense strand to SEQ ID NO: 2372758
uggaauagggcucacccgu

SEQ ID NO: 2372760 - RNA, 19 nt, Artificial Sequence
  Description of Artificial Sequence: Synthetic oligonucleotide
  Sense strand starting at position 104 of SEQ ID NO: 1885856
aggaccuaguguccacaua

SEQ ID NO: 2372761 - RNA, 19 nt, Artificial Sequence
  Description of Artificial Sequence: Synthetic oligonucleotide
  Antisense strand to SEQ ID NO: 2372760
uauguggacacuagguccu

SEQ ID NO: 2372762 - RNA, 19 nt, Artificial Sequence
  Description of Artificial Sequence: Synthetic oligonucleotide
  Sense strand starting at position 105 of SEQ ID NO: 1885856
ggaccuaguguccacauaa

SEQ ID NO: 2372763 - RNA, 19 nt, Artificial Sequence
  Description of Artificial Sequence: Synthetic oligonucleotide
  Antisense strand to SEQ ID NO: 2372762
uuauguggacacuaggucc

SEQ ID NO: 2372764 - RNA, 19 nt, Artificial Sequence
  Description of Artificial Sequence: Synthetic oligonucleotide
  Sense strand starting at position 112 of SEQ ID NO: 1885856
guguccacauaagaagaau

SEQ ID NO: 2372765 - RNA, 19 nt, Artificial Sequence
  Description of Artificial Sequence: Synthetic oligonucleotide
  Antisense strand to SEQ ID NO: 2372764
auucuucuuauguggacac

SEQ ID NO: 2372766 - RNA, 19 nt, Artificial Sequence
  Description of Artificial Sequence: Synthetic oligonucleotide
  Sense strand starting at position 247 of SEQ ID NO: 1885856
ccuccagauccacgagaaa

SEQ ID NO: 2372767 - RNA, 19 nt, Artificial Sequence
  Description of Artificial Sequence: Synthetic oligonucleotide
  Antisense strand to SEQ ID NO: 2372766
uuucucguggaucuggagg

SEQ ID NO: 2372768 - RNA, 19 nt, Artificial Sequence
  Description of Artificial Sequence: Synthetic oligonucleotide
  Sense strand starting at position 313 of SEQ ID NO: 1885856
agcccaaaugacugauaca

SEQ ID NO: 2372769 - RNA, 19 nt, Artificial Sequence
  Description of Artificial Sequence: Synthetic oligonucleotide
  Antisense strand to SEQ ID NO: 2372768
uguaucagucauuugggcu

SEQ ID NO: 2372770 - RNA, 19 nt, Artificial Sequence
  Description of Artificial Sequence: Synthetic oligonucleotide
  Sense strand starting at position 335 of SEQ ID NO: 1885856
auauguuuccaacaaguga

SEQ ID NO: 2372771 - RNA, 19 nt, Artificial Sequence
  Description of Artificial Sequence: Synthetic oligonucleotide
  Antisense strand to SEQ ID NO: 2372770
ucacuuguuggaaacauau

SEQ ID NO: 2372772 - RNA, 19 nt, Artificial Sequence
  Description of Artificial Sequence: Synthetic oligonucleotide
  Sense strand starting at position 406 of SEQ ID NO: 1885856
ugacacuaaccauguaguu

SEQ ID NO: 2372773 - RNA, 19 nt, Artificial Sequence
  Description of Artificial Sequence: Synthetic oligonucleotide
  Antisense strand to SEQ ID NO: 2372772
aacuacaugguuaguguca

SEQ ID NO: 2372774 - RNA, 19 nt, Artificial Sequence
  Description of Artificial Sequence: Synthetic oligonucleotide
  Sense strand starting at position 413 of SEQ ID NO: 1885856
aaccauguaguuggugaau

SEQ ID NO: 2372775 - RNA, 19 nt, Artificial Sequence
  Description of Artificial Sequence: Synthetic oligonucleotide
  Antisense strand to SEQ ID NO: 2372774
auucaccaacuacaugguu

SEQ ID NO: 2372776 - RNA, 19 nt, Artificial Sequence
  Description of Artificial Sequence: Synthetic oligonucleotide
  Sense strand starting at position 416 of SEQ ID NO: 1885856
cauguaguuggugaauauc

SEQ ID NO: 2372777 - RNA, 19 nt, Artificial Sequence
  Description of Artificial Sequence: Synthetic oligonucleotide
  Antisense strand to SEQ ID NO: 2372776
gauauucaccaacuacaug

SEQ ID NO: 2372778 - RNA, 19 nt, Artificial Sequence
  Description of Artificial Sequence: Synthetic oligonucleotide
  Sense strand starting at position 424 of SEQ ID NO: 1885856
uggugaauaucugcugaau

SEQ ID NO: 2372779 - RNA, 19 nt, Artificial Sequence
  Description of Artificial Sequence: Synthetic oligonucleotide
  Antisense strand to SEQ ID NO: 2372778
auucagcagauauucacca

SEQ ID NO: 2372780 - RNA, 19 nt, Artificial Sequence
  Description of Artificial Sequence: Synthetic oligonucleotide
  Sense strand starting at position 426 of SEQ ID NO: 1885856
gugaauaucugcugaauga

SEQ ID NO: 2372781 - RNA, 19 nt, Artificial Sequence
  Description of Artificial Sequence: Synthetic oligonucleotide
  Antisense strand to SEQ ID NO: 2372780
ucauucagcagauauucac

SEQ ID NO: 2372782 - RNA, 19 nt, Artificial Sequence
  Description of Artificial Sequence: Synthetic oligonucleotide
  Sense strand starting at position 436 of SEQ ID NO: 1885856
gcugaaugaacgcgcauaa

SEQ ID NO: 2372783 - RNA, 19 nt, Artificial Sequence
  Description of Artificial Sequence: Synthetic oligonucleotide
  Antisense strand to SEQ ID NO: 2372782
uuaugcgcguucauucagc

SEQ ID NO: 2372784 - RNA, 19 nt, Artificial Sequence
  Description of Artificial Sequence: Synthetic oligonucleotide
  Sense strand starting at position 803 of SEQ ID NO: 1885856
ggcacuaugcuagagagau

SEQ ID NO: 2372785 - RNA, 19 nt, Artificial Sequence
  Description of Artificial Sequence: Synthetic oligonucleotide
  Antisense strand to SEQ ID NO: 2372784
aucucucuagcauagugcc

SEQ ID NO: 2372786 - RNA, 19 nt, Artificial Sequence
  Description of Artificial Sequence: Synthetic oligonucleotide
  Sense strand starting at position 849 of SEQ ID NO: 1885856
ggccaaguuugcucuacuu

SEQ ID NO: 2372787 - RNA, 19 nt, Artificial Sequence
  Description of Artificial Sequence: Synthetic oligonucleotide
  Antisense strand to SEQ ID NO: 2372786
aaguagagcaaacuuggcc

SEQ ID NO: 2372788 - RNA, 19 nt, Artificial Sequence
  Description of Artificial Sequence: Synthetic oligonucleotide
  Sense strand starting at position 891 of SEQ ID NO: 1885856
cacagaaaguagugagcua

SEQ ID NO: 2372789 - RNA, 19 nt, Artificial Sequence
  Description of Artificial Sequence: Synthetic oligonucleotide
  Antisense strand to SEQ ID NO: 2372788
uagcucacuacuuucugug

SEQ ID NO: 2372790 - RNA, 19 nt, Artificial Sequence
  Description of Artificial Sequence: Synthetic oligonucleotide
  Sense strand starting at position 898 of SEQ ID NO: 1885856
aguagugagcuacauggua

SEQ ID NO: 2372791 - RNA, 19 nt, Artificial Sequence
  Description of Artificial Sequence: Synthetic oligonucleotide
  Antisense strand to SEQ ID NO: 2372790
uaccauguagcucacuacu

SEQ ID NO: 2372792 - RNA, 19 nt, Artificial Sequence
  Description of Artificial Sequence: Synthetic oligonucleotide
  Sense strand starting at position 900 of SEQ ID NO: 1885856
uagugagcuacaugguaga

SEQ ID NO: 2372793 - RNA, 19 nt, Artificial Sequence
  Description of Artificial Sequence: Synthetic oligonucleotide
  Antisense strand to SEQ ID NO: 2372792
ucuaccauguagcucacua

SEQ ID NO: 2372794 - RNA, 19 nt, Artificial Sequence
  Description of Artificial Sequence: Synthetic oligonucleotide
  Sense strand starting at position 929 of SEQ ID NO: 1885856
uuauguggugguuauacau

SEQ ID NO: 2372795 - RNA, 19 nt, Artificial Sequence
  Description of Artificial Sequence: Synthetic oligonucleotide
  Antisense strand to SEQ ID NO: 2372794
auguauaaccaccacauaa

SEQ ID NO: 2372796 - RNA, 19 nt, Artificial Sequence
  Description of Artificial Sequence: Synthetic oligonucleotide
  Sense strand starting at position 971 of SEQ ID NO: 1885856
gucaaaucgaacugagaca

SEQ ID NO: 2372797 - RNA, 19 nt, Artificial Sequence
  Description of Artificial Sequence: Synthetic oligonucleotide
  Antisense strand to SEQ ID NO: 2372796
ugucucaguucgauuugac

SEQ ID NO: 2372798 - RNA, 19 nt, Artificial Sequence
  Description of Artificial Sequence: Synthetic oligonucleotide
  Sense strand starting at position 991 of SEQ ID NO: 1885856
ggacuaaaguuaguguuua

SEQ ID NO: 2372799 - RNA, 19 nt, Artificial Sequence
  Description of Artificial Sequence: Synthetic oligonucleotide
  Antisense strand to SEQ ID NO: 2372798
uaaacacuaacuuuagucc

SEQ ID NO: 2372800 - RNA, 19 nt, Artificial Sequence
  Description of Artificial Sequence: Synthetic oligonucleotide
  Sense strand starting at position 995 of SEQ ID NO: 1885856
uaaaguuaguguuuacagu

SEQ ID NO: 2372801 - RNA, 19 nt, Artificial Sequence
  Description of Artificial Sequence: Synthetic oligonucleotide
  Antisense strand to SEQ ID NO: 2372800
acuguaaacacuaacuuua

SEQ ID NO: 2372802 - RNA, 19 nt, Artificial Sequence
  Description of Artificial Sequence: Synthetic oligonucleotide
  Sense strand starting at position 996 of SEQ ID NO: 1885856
aaaguuaguguuuacagua

SEQ ID NO: 2372803 - RNA, 19 nt, Artificial Sequence
  Description of Artificial Sequence: Synthetic oligonucleotide
  Antisense strand to SEQ ID NO: 2372802
uacuguaaacacuaacuuu

SEQ ID NO: 2372804 - RNA, 19 nt, Artificial Sequence
  Description of Artificial Sequence: Synthetic oligonucleotide
  Sense strand starting at position 1004 of SEQ ID NO: 1885856
uguuuacaguaucaauacu

SEQ ID NO: 2372805 - RNA, 19 nt, Artificial Sequence
  Description of Artificial Sequence: Synthetic oligonucleotide
  Antisense strand to SEQ ID NO: 2372804
aguauugauacuguaaaca

SEQ ID NO: 2372806 - RNA, 19 nt, Artificial Sequence
  Description of Artificial Sequence: Synthetic oligonucleotide
  Sense strand starting at position 3419 of SEQ ID NO: 1885856
ccaguuaaauauguuucca

SEQ ID NO: 2372807 - RNA, 19 nt, Artificial Sequence
  Description of Artificial Sequence: Synthetic oligonucleotide
  Antisense strand to SEQ ID NO: 2372806
uggaaacauauuuaacugg

SEQ ID NO: 2372808 - RNA, 19 nt, Artificial Sequence
  Description of Artificial Sequence: Synthetic oligonucleotide
  Sense strand starting at position 3421 of SEQ ID NO: 1885856
aguuaaauauguuuccaag

SEQ ID NO: 2372809 - RNA, 19 nt, Artificial Sequence
  Description of Artificial Sequence: Synthetic oligonucleotide
  Antisense strand to SEQ ID NO: 2372808
cuuggaaacauauuuaacu

SEQ ID NO: 2372810 - RNA, 19 nt, Artificial Sequence
  Description of Artificial Sequence: Synthetic oligonucleotide
  Sense strand starting at position 3423 of SEQ ID NO: 1885856
uuaaauauguuuccaaggu

SEQ ID NO: 2372811 - RNA, 19 nt, Artificial Sequence
  Description of Artificial Sequence: Synthetic oligonucleotide
  Antisense strand to SEQ ID NO: 2372810
accuuggaaacauauuuaa

SEQ ID NO: 2372812 - RNA, 19 nt, Artificial Sequence
  Description of Artificial Sequence: Synthetic oligonucleotide
  Sense strand starting at position 3424 of SEQ ID NO: 1885856
uaaauauguuuccaaggug

SEQ ID NO: 2372813 - RNA, 19 nt, Artificial Sequence
  Description of Artificial Sequence: Synthetic oligonucleotide
  Antisense strand to SEQ ID NO: 2372812
caccuuggaaacauauuua

SEQ ID NO: 2372814 - RNA, 19 nt, Artificial Sequence
  Description of Artificial Sequence: Synthetic oligonucleotide
  Sense strand starting at position 3427 of SEQ ID NO: 1885856
auauguuuccaaggugaag

SEQ ID NO: 2372815 - RNA, 19 nt, Artificial Sequence
  Description of Artificial Sequence: Synthetic oligonucleotide
  Antisense strand to SEQ ID NO: 2372814
cuucaccuuggaaacauau

SEQ ID NO: 2372816 - RNA, 19 nt, Artificial Sequence
  Description of Artificial Sequence: Synthetic oligonucleotide
  Sense strand starting at position 3429 of SEQ ID NO: 1885856
auguuuccaaggugaaguu

SEQ ID NO: 2372817 - RNA, 19 nt, Artificial Sequence
  Description of Artificial Sequence: Synthetic oligonucleotide
  Antisense strand to SEQ ID NO: 2372816
aacuucaccuuggaaacau

SEQ ID NO: 2372818 - RNA, 19 nt, Artificial Sequence
  Description of Artificial Sequence: Synthetic oligonucleotide
  Sense strand starting at position 3472 of SEQ ID NO: 1885856
gugggaaggugauagaaca

SEQ ID NO: 2372819 - RNA, 19 nt, Artificial Sequence
  Description of Artificial Sequence: Synthetic oligonucleotide
  Antisense strand to SEQ ID NO: 2372818
uguucuaucaccuucccac

SEQ ID NO: 2372820 - RNA, 19 nt, Artificial Sequence
  Description of Artificial Sequence: Synthetic oligonucleotide
  Sense strand starting at position 3506 of SEQ ID NO: 1885856
cuaggagagugcuccacau

SEQ ID NO: 2372821 - RNA, 19 nt, Artificial Sequence
  Description of Artificial Sequence: Synthetic oligonucleotide
  Antisense strand to SEQ ID NO: 2372820
auguggagcacucuccuag

SEQ ID NO: 2372822 - RNA, 19 nt, Artificial Sequence
  Description of Artificial Sequence: Synthetic oligonucleotide
  Sense strand starting at position 3508 of SEQ ID NO: 1885856
aggagagugcuccacauua

SEQ ID NO: 2372823 - RNA, 19 nt, Artificial Sequence
  Description of Artificial Sequence: Synthetic oligonucleotide
  Antisense strand to SEQ ID NO: 2372822
uaauguggagcacucuccu

SEQ ID NO: 2372824 - RNA, 19 nt, Artificial Sequence
  Description of Artificial Sequence: Synthetic oligonucleotide
  Sense strand starting at position 3510 of SEQ ID NO: 1885856
gagagugcuccacauuaaa

SEQ ID NO: 2372825 - RNA, 19 nt, Artificial Sequence
  Description of Artificial Sequence: Synthetic oligonucleotide
  Antisense strand to SEQ ID NO: 2372824
uuuaauguggagcacucuc

SEQ ID NO: 2372826 - RNA, 19 nt, Artificial Sequence
  Description of Artificial Sequence: Synthetic oligonucleotide
  Sense strand starting at position 3521 of SEQ ID NO: 1885856
acauuaaagugauguggac

SEQ ID NO: 2372827 - RNA, 19 nt, Artificial Sequence
  Description of Artificial Sequence: Synthetic oligonucleotide
  Antisense strand to SEQ ID NO: 2372826
guccacaucacuuuaaugu

SEQ ID NO: 2372828 - RNA, 19 nt, Artificial Sequence
  Description of Artificial Sequence: Synthetic oligonucleotide
  Sense strand starting at position 3639 of SEQ ID NO: 1885856
uugauuuagucacagagac

SEQ ID NO: 2372829 - RNA, 19 nt, Artificial Sequence
  Description of Artificial Sequence: Synthetic oligonucleotide
  Antisense strand to SEQ ID NO: 2372828
gucucugugacuaaaucaa

SEQ ID NO: 2372830 - RNA, 19 nt, Artificial Sequence
  Description of Artificial Sequence: Synthetic oligonucleotide
  Sense strand starting at position 3783 of SEQ ID NO: 1885856
gccucuugcugguuaguca

SEQ ID NO: 2372831 - RNA, 19 nt, Artificial Sequence
  Description of Artificial Sequence: Synthetic oligonucleotide
  Antisense strand to SEQ ID NO: 2372830
ugacuaaccagcaagaggc

SEQ ID NO: 2372832 - RNA, 19 nt, Artificial Sequence
  Description of Artificial Sequence: Synthetic oligonucleotide
  Sense strand starting at position 3814 of SEQ ID NO: 1885856
uugcauuguggguggugaa

SEQ ID NO: 2372833 - RNA, 19 nt, Artificial Sequence
  Description of Artificial Sequence: Synthetic oligonucleotide
  Antisense strand to SEQ ID NO: 2372832
uucaccacccacaaugcaa

SEQ ID NO: 2372834 - RNA, 19 nt, Artificial Sequence
  Description of Artificial Sequence: Synthetic oligonucleotide
  Sense strand starting at position 3954 of SEQ ID NO: 1885856
uguggcuucuggucacaua

SEQ ID NO: 2372835 - RNA, 19 nt, Artificial Sequence
  Description of Artificial Sequence: Synthetic oligonucleotide
  Antisense strand to SEQ ID NO: 2372834
uaugugaccagaagccaca

SEQ ID NO: 2372836 - RNA, 19 nt, Artificial Sequence
  Description of Artificial Sequence: Synthetic oligonucleotide
  Sense strand starting at position 1999 of SEQ ID NO: 1885857
uuuccuugggaauguaauu

SEQ ID NO: 2372837 - RNA, 19 nt, Artificial Sequence
  Description of Artificial Sequence: Synthetic oligonucleotide
  Antisense strand to SEQ ID NO: 2372836
aauuacauucccaaggaaa

SEQ ID NO: 2372838 - RNA, 19 nt, Artificial Sequence
  Description of Artificial Sequence: Synthetic oligonucleotide
  Sense strand starting at position 2146 of SEQ ID NO: 1885857
ucacuacuuucuguggagu

SEQ ID NO: 2372839 - RNA, 19 nt, Artificial Sequence
  Description of Artificial Sequence: Synthetic oligonucleotide
  Antisense strand to SEQ ID NO: 2372838
acuccacagaaaguaguga

SEQ ID NO: 2372840 - RNA, 19 nt, Artificial Sequence
  Description of Artificial Sequence: Synthetic oligonucleotide
  Sense strand starting at position 2149 of SEQ ID NO: 1885857
cuacuuucuguggaguguu

SEQ ID NO: 2372841 - RNA, 19 nt, Artificial Sequence
  Description of Artificial Sequence: Synthetic oligonucleotide
  Antisense strand to SEQ ID NO: 2372840
aacacuccacagaaaguag

SEQ ID NO: 2372842 - RNA, 19 nt, Artificial Sequence
  Description of Artificial Sequence: Synthetic oligonucleotide
  Sense strand starting at position 2180 of SEQ ID NO: 1885857
gguaaaguagagcaaacuu

SEQ ID NO: 2372843 - RNA, 19 nt, Artificial Sequence
  Description of Artificial Sequence: Synthetic oligonucleotide
  Antisense strand to SEQ ID NO: 2372842
aaguuugcucuacuuuacc

SEQ ID NO: 2372844 - RNA, 19 nt, Artificial Sequence
  Description of Artificial Sequence: Synthetic oligonucleotide
  Sense strand starting at position 2191 of SEQ ID NO: 1885857
gcaaacuuggccugaagau

SEQ ID NO: 2372845 - RNA, 19 nt, Artificial Sequence
  Description of Artificial Sequence: Synthetic oligonucleotide
  Antisense strand to SEQ ID NO: 2372844
aucuucaggccaaguuugc

SEQ ID NO: 2372846 - RNA, 19 nt, Artificial Sequence
  Description of Artificial Sequence: Synthetic oligonucleotide
  Sense strand starting at position 2574 of SEQ ID NO: 1885857
ggauuaaauuguccuuccu

SEQ ID NO: 2372847 - RNA, 19 nt, Artificial Sequence
  Description of Artificial Sequence: Synthetic oligonucleotide
  Antisense strand to SEQ ID NO: 2372846
aggaaggacaauuuaaucc

SEQ ID NO: 2372848 - RNA, 19 nt, Artificial Sequence
  Description of Artificial Sequence: Synthetic oligonucleotide
  Sense strand starting at position 2593 of SEQ ID NO: 1885857
ugcuuuaugcgcguucauu

SEQ ID NO: 2372849 - RNA, 19 nt, Artificial Sequence
  Description of Artificial Sequence: Synthetic oligonucleotide
  Antisense strand to SEQ ID NO: 2372848
aaugaacgcgcauaaagca

SEQ ID NO: 2372850 - RNA, 19 nt, Artificial Sequence
  Description of Artificial Sequence: Synthetic oligonucleotide
  Sense strand starting at position 2594 of SEQ ID NO: 1885857
gcuuuaugcgcguucauuc

SEQ ID NO: 2372851 - RNA, 19 nt, Artificial Sequence
  Description of Artificial Sequence: Synthetic oligonucleotide
  Antisense strand to SEQ ID NO: 2372850
gaaugaacgcgcauaaagc

SEQ ID NO: 2372852 - RNA, 19 nt, Artificial Sequence
  Description of Artificial Sequence: Synthetic oligonucleotide
  Sense strand starting at position 2650 of SEQ ID NO: 1885857
ugugcuagguucuuaagau

SEQ ID NO: 2372853 - RNA, 19 nt, Artificial Sequence
  Description of Artificial Sequence: Synthetic oligonucleotide
  Antisense strand to SEQ ID NO: 2372852
aucuuaagaaccuagcaca

SEQ ID NO: 2372854 - RNA, 19 nt, Artificial Sequence
  Description of Artificial Sequence: Synthetic oligonucleotide
  Sense strand starting at position 2693 of SEQ ID NO: 1885857
cugucucacuuguuggaaa

SEQ ID NO: 2372855 - RNA, 19 nt, Artificial Sequence
  Description of Artificial Sequence: Synthetic oligonucleotide
  Antisense strand to SEQ ID NO: 2372854
uuuccaacaagugagacag

SEQ ID NO: 2372856 - RNA, 19 nt, Artificial Sequence
  Description of Artificial Sequence: Synthetic oligonucleotide
  Sense strand starting at position 2695 of SEQ ID NO: 1885857
gucucacuuguuggaaaca

SEQ ID NO: 2372857 - RNA, 19 nt, Artificial Sequence
  Description of Artificial Sequence: Synthetic oligonucleotide
  Antisense strand to SEQ ID NO: 2372856
uguuuccaacaagugagac

SEQ ID NO: 2372858 - RNA, 19 nt, Artificial Sequence
  Description of Artificial Sequence: Synthetic oligonucleotide
  Sense strand starting at position 2724 of SEQ ID NO: 1885857
ucagucauuugggcugcua

SEQ ID NO: 2372859 - RNA, 19 nt, Artificial Sequence
  Description of Artificial Sequence: Synthetic oligonucleotide
  Antisense strand to SEQ ID NO: 2372858
uagcagcccaaaugacuga

SEQ ID NO: 2372860 - RNA, 19 nt, Artificial Sequence
  Description of Artificial Sequence: Synthetic oligonucleotide
  Sense strand starting at position 2726 of SEQ ID NO: 1885857
agucauuugggcugcuaga

SEQ ID NO: 2372861 - RNA, 19 nt, Artificial Sequence
  Description of Artificial Sequence: Synthetic oligonucleotide
  Antisense strand to SEQ ID NO: 2372860
ucuagcagcccaaaugacu

SEQ ID NO: 2372862 - RNA, 19 nt, Artificial Sequence
  Description of Artificial Sequence: Synthetic oligonucleotide
  Sense strand starting at position 3414 of SEQ ID NO: 1885857
guacaugguuuguuuggga

SEQ ID NO: 2372863 - RNA, 19 nt, Artificial Sequence
  Description of Artificial Sequence: Synthetic oligonucleotide
  Antisense strand to SEQ ID NO: 2372862
ucccaaacaaaccauguac

SEQ ID NO: 2372864 - RNA, 19 nt, Artificial Sequence
  Description of Artificial Sequence: Synthetic oligonucleotide
  Sense strand starting at position 3454 of SEQ ID NO: 1885857
gcgagaauccuaugguaga

SEQ ID NO: 2372865 - RNA, 19 nt, Artificial Sequence
  Description of Artificial Sequence: Synthetic oligonucleotide
  Antisense strand to SEQ ID NO: 2372864
ucuaccauaggauucucgc

SEQ ID NO: 2372866 - RNA, 19 nt, Artificial Sequence
  Description of Artificial Sequence: Synthetic oligonucleotide
  Sense strand starting at position 3465 of SEQ ID NO: 1885857
augguagaggguuguaaag

SEQ ID NO: 2372867 - RNA, 19 nt, Artificial Sequence
  Description of Artificial Sequence: Synthetic oligonucleotide
  Antisense strand to SEQ ID NO: 2372866
cuuuacaacccucuaccau

SEQ ID NO: 2372868 - RNA, 19 nt, Artificial Sequence
  Description of Artificial Sequence: Synthetic oligonucleotide
  Sense strand starting at position 3475 of SEQ ID NO: 1885857
guuguaaagagaugaugcu

SEQ ID NO: 2372869 - RNA, 19 nt, Artificial Sequence
  Description of Artificial Sequence: Synthetic oligonucleotide
  Antisense strand to SEQ ID NO: 2372868
agcaucaucucuuuacaac

SEQ ID NO: 2372870 - RNA, 19 nt, Artificial Sequence
  Description of Artificial Sequence: Synthetic oligonucleotide
  Sense strand starting at position 3545 of SEQ ID NO: 1885857
aaagguuuguaaguaguua

SEQ ID NO: 2372871 - RNA, 19 nt, Artificial Sequence
  Description of Artificial Sequence: Synthetic oligonucleotide
  Antisense strand to SEQ ID NO: 2372870
uaacuacuuacaaaccuuu

SEQ ID NO: 2372872 - RNA, 19 nt, Artificial Sequence
  Description of Artificial Sequence: Synthetic oligonucleotide
  Sense strand starting at position 3553 of SEQ ID NO: 1885857
guaaguaguuaacugauga

SEQ ID NO: 2372873 - RNA, 19 nt, Artificial Sequence
  Description of Artificial Sequence: Synthetic oligonucleotide
  Antisense strand to SEQ ID NO: 2372872
ucaucaguuaacuacuuac

SEQ ID NO: 2372874 - RNA, 19 nt, Artificial Sequence
  Description of Artificial Sequence: Synthetic oligonucleotide
  Sense strand starting at position 3568 of SEQ ID NO: 1885857
augacaaguucuuuguuga

SEQ ID NO: 2372875 - RNA, 19 nt, Artificial Sequence
  Description of Artificial Sequence: Synthetic oligonucleotide
  Antisense strand to SEQ ID NO: 2372874
ucaacaaagaacuugucau

SEQ ID NO: 2372876 - RNA, 19 nt, Artificial Sequence
  Description of Artificial Sequence: Synthetic oligonucleotide
  Sense strand starting at position 3569 of SEQ ID NO: 1885857
ugacaaguucuuuguugag

SEQ ID NO: 2372877 - RNA, 19 nt, Artificial Sequence
  Description of Artificial Sequence: Synthetic oligonucleotide
  Antisense strand to SEQ ID NO: 2372876
cucaacaaagaacuuguca

SEQ ID NO: 2372878 - RNA, 19 nt, Artificial Sequence
  Description of Artificial Sequence: Synthetic oligonucleotide
  Sense strand starting at position 3571 of SEQ ID NO: 1885857
acaaguucuuuguugagaa

SEQ ID NO: 2372879 - RNA, 19 nt, Artificial Sequence
  Description of Artificial Sequence: Synthetic oligonucleotide
  Antisense strand to SEQ ID NO: 2372878
uucucaacaaagaacuugu

SEQ ID NO: 2372880 - RNA, 19 nt, Artificial Sequence
  Description of Artificial Sequence: Synthetic oligonucleotide
  Sense strand starting at position 3573 of SEQ ID NO: 1885857
aaguucuuuguugagaauu

SEQ ID NO: 2372881 - RNA, 19 nt, Artificial Sequence
  Description of Artificial Sequence: Synthetic oligonucleotide
  Antisense strand to SEQ ID NO: 2372880
aauucucaacaaagaacuu

SEQ ID NO: 2372882 - RNA, 19 nt, Artificial Sequence
  Description of Artificial Sequence: Synthetic oligonucleotide
  Sense strand starting at position 3581 of SEQ ID NO: 1885857
uguugagaauuggugggaa

SEQ ID NO: 2372883 - RNA, 19 nt, Artificial Sequence
  Description of Artificial Sequence: Synthetic oligonucleotide
  Antisense strand to SEQ ID NO: 2372882
uucccaccaauucucaaca

SEQ ID NO: 2372884 - RNA, 19 nt, Artificial Sequence
  Description of Artificial Sequence: Synthetic oligonucleotide
  Sense strand starting at position 3584 of SEQ ID NO: 1885857
ugagaauuggugggaaugu

SEQ ID NO: 2372885 - RNA, 19 nt, Artificial Sequence
  Description of Artificial Sequence: Synthetic oligonucleotide
  Antisense strand to SEQ ID NO: 2372884
acauucccaccaauucuca

SEQ ID NO: 2372886 - RNA, 19 nt, Artificial Sequence
  Description of Artificial Sequence: Synthetic oligonucleotide
  Sense strand starting at position 3717 of SEQ ID NO: 1885857
agguguaguacuuguauca

SEQ ID NO: 2372887 - RNA, 19 nt, Artificial Sequence
  Description of Artificial Sequence: Synthetic oligonucleotide
  Antisense strand to SEQ ID NO: 2372886
ugauacaaguacuacaccu

SEQ ID NO: 2372888 - RNA, 19 nt, Artificial Sequence
  Description of Artificial Sequence: Synthetic oligonucleotide
  Sense strand starting at position 3757 of SEQ ID NO: 1885857
guuugacuucucuagagac

SEQ ID NO: 2372889 - RNA, 19 nt, Artificial Sequence
  Description of Artificial Sequence: Synthetic oligonucleotide
  Antisense strand to SEQ ID NO: 2372888
gucucuagagaagucaaac

SEQ ID NO: 2372890 - RNA, 19 nt, Artificial Sequence
  Description of Artificial Sequence: Synthetic oligonucleotide
  Sense strand starting at position 3843 of SEQ ID NO: 1885857
ggaauaucuugacauccug

SEQ ID NO: 2372891 - RNA, 19 nt, Artificial Sequence
  Description of Artificial Sequence: Synthetic oligonucleotide
  Antisense strand to SEQ ID NO: 2372890
caggaugucaagauauucc

SEQ ID NO: 2372892 - RNA, 19 nt, Artificial Sequence
  Description of Artificial Sequence: Synthetic oligonucleotide
  Sense strand starting at position 3857 of SEQ ID NO: 1885857
uccugacacugguuuaaga

SEQ ID NO: 2372893 - RNA, 19 nt, Artificial Sequence
  Description of Artificial Sequence: Synthetic oligonucleotide
  Antisense strand to SEQ ID NO: 2372892
ucuuaaaccagugucagga

SEQ ID NO: 2372894 - RNA, 19 nt, Artificial Sequence
  Description of Artificial Sequence: Synthetic oligonucleotide
  Sense strand starting at position 3864 of SEQ ID NO: 1885857
acugguuuaagaggccauu

SEQ ID NO: 2372895 - RNA, 19 nt, Artificial Sequence
  Description of Artificial Sequence: Synthetic oligonucleotide
  Antisense strand to SEQ ID NO: 2372894
aauggccucuuaaaccagu

SEQ ID NO: 2372896 - RNA, 19 nt, Artificial Sequence
  Description of Artificial Sequence: Synthetic oligonucleotide
  Sense strand starting at position 3867 of SEQ ID NO: 1885857
gguuuaagaggccauugua

SEQ ID NO: 2372897 - RNA, 19 nt, Artificial Sequence
  Description of Artificial Sequence: Synthetic oligonucleotide
  Antisense strand to SEQ ID NO: 2372896
uacaauggccucuuaaacc

SEQ ID NO: 2372898 - RNA, 19 nt, Artificial Sequence
  Description of Artificial Sequence: Synthetic oligonucleotide
  Sense strand starting at position 3879 of SEQ ID NO: 1885857
cauuguaggguuuguguaa

SEQ ID NO: 2372899 - RNA, 19 nt, Artificial Sequence
  Description of Artificial Sequence: Synthetic oligonucleotide
  Antisense strand to SEQ ID NO: 2372898
uuacacaaacccuacaaug

SEQ ID NO: 2372900 - RNA, 19 nt, Artificial Sequence
  Description of Artificial Sequence: Synthetic oligonucleotide
  Sense strand starting at position 3880 of SEQ ID NO: 1885857
auuguaggguuuguguaaa

SEQ ID NO: 2372901 - RNA, 19 nt, Artificial Sequence
  Description of Artificial Sequence: Synthetic oligonucleotide
  Antisense strand to SEQ ID NO: 2372900
uuuacacaaacccuacaau

SEQ ID NO: 2372902 - RNA, 19 nt, Artificial Sequence
  Description of Artificial Sequence: Synthetic oligonucleotide
  Sense strand starting at position 3886 of SEQ ID NO: 1885857
ggguuuguguaaagggaga

SEQ ID NO: 2372903 - RNA, 19 nt, Artificial Sequence
  Description of Artificial Sequence: Synthetic oligonucleotide
  Antisense strand to SEQ ID NO: 2372902
ucucccuuuacacaaaccc

SEQ ID NO: 2372904 - RNA, 19 nt, Artificial Sequence
  Description of Artificial Sequence: Synthetic oligonucleotide
  Sense strand starting at position 3888 of SEQ ID NO: 1885857
guuuguguaaagggagaaa

SEQ ID NO: 2372905 - RNA, 19 nt, Artificial Sequence
  Description of Artificial Sequence: Synthetic oligonucleotide
  Antisense strand to SEQ ID NO: 2372904
uuucucccuuuacacaaac

SEQ ID NO: 2372906 - RNA, 19 nt, Artificial Sequence
  Description of Artificial Sequence: Synthetic oligonucleotide
  Sense strand starting at position 3918 of SEQ ID NO: 1885857
caaacucggcaaugaugua

SEQ ID NO: 2372907 - RNA, 19 nt, Artificial Sequence
  Description of Artificial Sequence: Synthetic oligonucleotide
  Antisense strand to SEQ ID NO: 2372906
uacaucauugccgaguuug

SEQ ID NO: 2372908 - RNA, 19 nt, Artificial Sequence
  Description of Artificial Sequence: Synthetic oligonucleotide
  Sense strand starting at position 3923 of SEQ ID NO: 1885857
ucggcaaugauguagaaga

SEQ ID NO: 2372909 - RNA, 19 nt, Artificial Sequence
  Description of Artificial Sequence: Synthetic oligonucleotide
  Antisense strand to SEQ ID NO: 2372908
ucuucuacaucauugccga

SEQ ID NO: 2372910 - RNA, 19 nt, Artificial Sequence
  Description of Artificial Sequence: Synthetic oligonucleotide
  Sense strand starting at position 3961 of SEQ ID NO: 1885857
ccugaauaauaguuuggau

SEQ ID NO: 2372911 - RNA, 19 nt, Artificial Sequence
  Description of Artificial Sequence: Synthetic oligonucleotide
  Antisense strand to SEQ ID NO: 2372910
auccaaacuauuauucagg

SEQ ID NO: 2372912 - RNA, 19 nt, Artificial Sequence
  Description of Artificial Sequence: Synthetic oligonucleotide
  Sense strand starting at position 3963 of SEQ ID NO: 1885857
ugaauaauaguuuggaugu

SEQ ID NO: 2372913 - RNA, 19 nt, Artificial Sequence
  Description of Artificial Sequence: Synthetic oligonucleotide
  Antisense strand to SEQ ID NO: 2372912
acauccaaacuauuauuca

SEQ ID NO: 2372914 - RNA, 19 nt, Artificial Sequence
  Description of Artificial Sequence: Synthetic oligonucleotide
  Sense strand starting at position 3973 of SEQ ID NO: 1885857
uuuggaugugguggaguaa

SEQ ID NO: 2372915 - RNA, 19 nt, Artificial Sequence
  Description of Artificial Sequence: Synthetic oligonucleotide
  Antisense strand to SEQ ID NO: 2372914
uuacuccaccacauccaaa

SEQ ID NO: 2372916 - RNA, 19 nt, Artificial Sequence
  Description of Artificial Sequence: Synthetic oligonucleotide
  Sense strand starting at position 15 of SEQ ID NO: 1885858
gggauaauauucccaccuu

SEQ ID NO: 2372917 - RNA, 19 nt, Artificial Sequence
  Description of Artificial Sequence: Synthetic oligonucleotide
  Antisense strand to SEQ ID NO: 2372916
aaggugggaauauuauccc

SEQ ID NO: 2372918 - RNA, 19 nt, Artificial Sequence
  Description of Artificial Sequence: Synthetic oligonucleotide
  Sense strand starting at position 39 of SEQ ID NO: 1885858
gguuguggugaggauuaau

SEQ ID NO: 2372919 - RNA, 19 nt, Artificial Sequence
  Description of Artificial Sequence: Synthetic oligonucleotide
  Antisense strand to SEQ ID NO: 2372918
auuaauccucaccacaacc

SEQ ID NO: 2372920 - RNA, 19 nt, Artificial Sequence
  Description of Artificial Sequence: Synthetic oligonucleotide
  Sense strand starting at position 258 of SEQ ID NO: 1885858
auguaaugucaagaguuau

SEQ ID NO: 2372921 - RNA, 19 nt, Artificial Sequence
  Description of Artificial Sequence: Synthetic oligonucleotide
  Antisense strand to SEQ ID NO: 2372920
auaacucuugacauuacau

SEQ ID NO: 2372922 - RNA, 19 nt, Artificial Sequence
  Description of Artificial Sequence: Synthetic oligonucleotide
  Sense strand starting at position 335 of SEQ ID NO: 1885858
agaguagcuagguagacuu

SEQ ID NO: 2372923 - RNA, 19 nt, Artificial Sequence
  Description of Artificial Sequence: Synthetic oligonucleotide
  Antisense strand to SEQ ID NO: 2372922
aagucuaccuagcuacucu

SEQ ID NO: 2372924 - RNA, 19 nt, Artificial Sequence
  Description of Artificial Sequence: Synthetic oligonucleotide
  Sense strand starting at position 410 of SEQ ID NO: 1885858
augaaauaccuguaguauu

SEQ ID NO: 2372925 - RNA, 19 nt, Artificial Sequence
  Description of Artificial Sequence: Synthetic oligonucleotide
  Antisense strand to SEQ ID NO: 2372924
aauacuacagguauuucau

SEQ ID NO: 2372926 - RNA, 19 nt, Artificial Sequence
  Description of Artificial Sequence: Synthetic oligonucleotide
  Sense strand starting at position 848 of SEQ ID NO: 1885858
ggaauacuauagcuagcau

SEQ ID NO: 2372927 - RNA, 19 nt, Artificial Sequence
  Description of Artificial Sequence: Synthetic oligonucleotide
  Antisense strand to SEQ ID NO: 2372926
augcuagcuauaguauucc

SEQ ID NO: 2372928 - RNA, 19 nt, Artificial Sequence
  Description of Artificial Sequence: Synthetic oligonucleotide
  Sense strand starting at position 1269 of SEQ ID NO: 1885858
uguuuccgaguugaaauaa

SEQ ID NO: 2372929 - RNA, 19 nt, Artificial Sequence
  Description of Artificial Sequence: Synthetic oligonucleotide
  Antisense strand to SEQ ID NO: 2372928
uuauuucaacucggaaaca

SEQ ID NO: 2372930 - RNA, 19 nt, Artificial Sequence
  Description of Artificial Sequence: Synthetic oligonucleotide
  Sense strand starting at position 1291 of SEQ ID NO: 1885858
ccaacucaucuuggaguga

SEQ ID NO: 2372931 - RNA, 19 nt, Artificial Sequence
  Description of Artificial Sequence: Synthetic oligonucleotide
  Antisense strand to SEQ ID NO: 2372930
ucacuccaagaugaguugg

SEQ ID NO: 2372932 - RNA, 19 nt, Artificial Sequence
  Description of Artificial Sequence: Synthetic oligonucleotide
  Sense strand starting at position 1306 of SEQ ID NO: 1885858
gugaaaggcucuuccagag

SEQ ID NO: 2372933 - RNA, 19 nt, Artificial Sequence
  Description of Artificial Sequence: Synthetic oligonucleotide
  Antisense strand to SEQ ID NO: 2372932
cucuggaagagccuuucac

SEQ ID NO: 2372934 - RNA, 19 nt, Artificial Sequence
  Description of Artificial Sequence: Synthetic oligonucleotide
  Sense strand starting at position 1565 of SEQ ID NO: 1885858
agaggucagucauugugga

SEQ ID NO: 2372935 - RNA, 19 nt, Artificial Sequence
  Description of Artificial Sequence: Synthetic oligonucleotide
  Antisense strand to SEQ ID NO: 2372934
uccacaaugacugaccucu

SEQ ID NO: 2372936 - RNA, 19 nt, Artificial Sequence
  Description of Artificial Sequence: Synthetic oligonucleotide
  Sense strand starting at position 1570 of SEQ ID NO: 1885858
ucagucauuguggagguga

SEQ ID NO: 2372937 - RNA, 19 nt, Artificial Sequence
  Description of Artificial Sequence: Synthetic oligonucleotide
  Antisense strand to SEQ ID NO: 2372936
ucaccuccacaaugacuga

SEQ ID NO: 2372938 - RNA, 19 nt, Artificial Sequence
  Description of Artificial Sequence: Synthetic oligonucleotide
  Sense strand starting at position 1823 of SEQ ID NO: 1885858
uccagugauuuggccaagu

SEQ ID NO: 2372939 - RNA, 19 nt, Artificial Sequence
  Description of Artificial Sequence: Synthetic oligonucleotide
  Antisense strand to SEQ ID NO: 2372938
acuuggccaaaucacugga

SEQ ID NO: 2372940 - RNA, 19 nt, Artificial Sequence
  Description of Artificial Sequence: Synthetic oligonucleotide
  Sense strand starting at position 1974 of SEQ ID NO: 1885858
ggaugauuguggaagcuug

SEQ ID NO: 2372941 - RNA, 19 nt, Artificial Sequence
  Description of Artificial Sequence: Synthetic oligonucleotide
  Antisense strand to SEQ ID NO: 2372940
caagcuuccacaaucaucc

SEQ ID NO: 2372942 - RNA, 19 nt, Artificial Sequence
  Description of Artificial Sequence: Synthetic oligonucleotide
  Sense strand starting at position 2118 of SEQ ID NO: 1885858
gguauuuccugccucucau

SEQ ID NO: 2372943 - RNA, 19 nt, Artificial Sequence
  Description of Artificial Sequence: Synthetic oligonucleotide
  Antisense strand to SEQ ID NO: 2372942
augagaggcaggaaauacc

SEQ ID NO: 2372944 - RNA, 19 nt, Artificial Sequence
  Description of Artificial Sequence: Synthetic oligonucleotide
  Sense strand starting at position 2272 of SEQ ID NO: 1885858
gcaaccaaucaugauguca

SEQ ID NO: 2372945 - RNA, 19 nt, Artificial Sequence
  Description of Artificial Sequence: Synthetic oligonucleotide
  Antisense strand to SEQ ID NO: 2372944
ugacaucaugauugguugc

SEQ ID NO: 2372946 - RNA, 19 nt, Artificial Sequence
  Description of Artificial Sequence: Synthetic oligonucleotide
  Sense strand starting at position 2304 of SEQ ID NO: 1885858
augacuugaggugggaauu

SEQ ID NO: 2372947 - RNA, 19 nt, Artificial Sequence
  Description of Artificial Sequence: Synthetic oligonucleotide
  Antisense strand to SEQ ID NO: 2372946
aauucccaccucaagucau

SEQ ID NO: 2372948 - RNA, 19 nt, Artificial Sequence
  Description of Artificial Sequence: Synthetic oligonucleotide
  Sense strand starting at position 2305 of SEQ ID NO: 1885858
ugacuugaggugggaauua

SEQ ID NO: 2372949 - RNA, 19 nt, Artificial Sequence
  Description of Artificial Sequence: Synthetic oligonucleotide
  Antisense strand to SEQ ID NO: 2372948
uaauucccaccucaaguca

SEQ ID NO: 2372950 - RNA, 19 nt, Artificial Sequence
  Description of Artificial Sequence: Synthetic oligonucleotide
  Sense strand starting at position 2315 of SEQ ID NO: 1885858
ugggaauuagguggcaaga

SEQ ID NO: 2372951 - RNA, 19 nt, Artificial Sequence
  Description of Artificial Sequence: Synthetic oligonucleotide
  Antisense strand to SEQ ID NO: 2372950
ucuugccaccuaauuccca

SEQ ID NO: 2372952 - RNA, 19 nt, Artificial Sequence
  Description of Artificial Sequence: Synthetic oligonucleotide
  Sense strand starting at position 2374 of SEQ ID NO: 1885858
auccuauccgcacagagau

SEQ ID NO: 2372953 - RNA, 19 nt, Artificial Sequence
  Description of Artificial Sequence: Synthetic oligonucleotide
  Antisense strand to SEQ ID NO: 2372952
aucucugugcggauaggau

SEQ ID NO: 2372954 - RNA, 19 nt, Artificial Sequence
  Description of Artificial Sequence: Synthetic oligonucleotide
  Sense strand starting at position 2389 of SEQ ID NO: 1885858
agauuuccuugguaauaaa

SEQ ID NO: 2372955 - RNA, 19 nt, Artificial Sequence
  Description of Artificial Sequence: Synthetic oligonucleotide
  Antisense strand to SEQ ID NO: 2372954
uuuauuaccaaggaaaucu

SEQ ID NO: 2372956 - RNA, 19 nt, Artificial Sequence
  Description of Artificial Sequence: Synthetic oligonucleotide
  Sense strand starting at position 2501 of SEQ ID NO: 1885858
uugcgagcaauguuuguuu

SEQ ID NO: 2372957 - RNA, 19 nt, Artificial Sequence
  Description of Artificial Sequence: Synthetic oligonucleotide
  Antisense strand to SEQ ID NO: 2372956
aaacaaacauugcucgcaa

SEQ ID NO: 2372958 - RNA, 19 nt, Artificial Sequence
  Description of Artificial Sequence: Synthetic oligonucleotide
  Sense strand starting at position 2595 of SEQ ID NO: 1885858
aacuuugagaggcgaaaga

SEQ ID NO: 2372959 - RNA, 19 nt, Artificial Sequence
  Description of Artificial Sequence: Synthetic oligonucleotide
  Antisense strand to SEQ ID NO: 2372958
ucuuucgccucucaaaguu

SEQ ID NO: 2372960 - RNA, 19 nt, Artificial Sequence
  Description of Artificial Sequence: Synthetic oligonucleotide
  Sense strand starting at position 2656 of SEQ ID NO: 1885858
ggaggauugagucgauauu

SEQ ID NO: 2372961 - RNA, 19 nt, Artificial Sequence
  Description of Artificial Sequence: Synthetic oligonucleotide
  Antisense strand to SEQ ID NO: 2372960
aauaucgacucaauccucc

SEQ ID NO: 2372962 - RNA, 19 nt, Artificial Sequence
  Description of Artificial Sequence: Synthetic oligonucleotide
  Sense strand starting at position 2876 of SEQ ID NO: 1885858
agauguggcccaugaaauu

SEQ ID NO: 2372963 - RNA, 19 nt, Artificial Sequence
  Description of Artificial Sequence: Synthetic oligonucleotide
  Antisense strand to SEQ ID NO: 2372962
aauuucaugggccacaucu

SEQ ID NO: 2372964 - RNA, 19 nt, Artificial Sequence
  Description of Artificial Sequence: Synthetic oligonucleotide
  Sense strand starting at position 2936 of SEQ ID NO: 1885858
uggaaagguccuugauagu

SEQ ID NO: 2372965 - RNA, 19 nt, Artificial Sequence
  Description of Artificial Sequence: Synthetic oligonucleotide
  Antisense strand to SEQ ID NO: 2372964
acuaucaaggaccuuucca

SEQ ID NO: 2372966 - RNA, 19 nt, Artificial Sequence
  Description of Artificial Sequence: Synthetic oligonucleotide
  Sense strand starting at position 2967 of SEQ ID NO: 1885858
agaugcacuccugagacuu

SEQ ID NO: 2372967 - RNA, 19 nt, Artificial Sequence
  Description of Artificial Sequence: Synthetic oligonucleotide
  Antisense strand to SEQ ID NO: 2372966
aagucucaggagugcaucu

SEQ ID NO: 2372968 - RNA, 19 nt, Artificial Sequence
  Description of Artificial Sequence: Synthetic oligonucleotide
  Sense strand starting at position 3085 of SEQ ID NO: 1885858
ugaaauauucugggcauug

SEQ ID NO: 2372969 - RNA, 19 nt, Artificial Sequence
  Description of Artificial Sequence: Synthetic oligonucleotide
  Antisense strand to SEQ ID NO: 2372968
caaugcccagaauauuuca

SEQ ID NO: 2372970 - RNA, 19 nt, Artificial Sequence
  Description of Artificial Sequence: Synthetic oligonucleotide
  Sense strand starting at position 3489 of SEQ ID NO: 1885858
aguacuauccuuugacaua

SEQ ID NO: 2372971 - RNA, 19 nt, Artificial Sequence
  Description of Artificial Sequence: Synthetic oligonucleotide
  Antisense strand to SEQ ID NO: 2372970
uaugucaaaggauaguacu

SEQ ID NO: 2372972 - RNA, 19 nt, Artificial Sequence
  Description of Artificial Sequence: Synthetic oligonucleotide
  Sense strand starting at position 3594 of SEQ ID NO: 1885858
gagccagauguguagucaa

SEQ ID NO: 2372973 - RNA, 19 nt, Artificial Sequence
  Description of Artificial Sequence: Synthetic oligonucleotide
  Antisense strand to SEQ ID NO: 2372972
uugacuacacaucuggcuc

SEQ ID NO: 2372974 - RNA, 19 nt, Artificial Sequence
  Description of Artificial Sequence: Synthetic oligonucleotide
  Sense strand starting at position 3597 of SEQ ID NO: 1885858
ccagauguguagucaaaca

SEQ ID NO: 2372975 - RNA, 19 nt, Artificial Sequence
  Description of Artificial Sequence: Synthetic oligonucleotide
  Antisense strand to SEQ ID NO: 2372974
uguuugacuacacaucugg

SEQ ID NO: 2372976 - RNA, 19 nt, Artificial Sequence
  Description of Artificial Sequence: Synthetic oligonucleotide
  Sense strand starting at position 3616 of SEQ ID NO: 1885858
auguuagaguuauuaacug

SEQ ID NO: 2372977 - RNA, 19 nt, Artificial Sequence
  Description of Artificial Sequence: Synthetic oligonucleotide
  Antisense strand to SEQ ID NO: 2372976
caguuaauaacucuaacau

SEQ ID NO: 2372978 - RNA, 19 nt, Artificial Sequence
  Description of Artificial Sequence: Synthetic oligonucleotide
  Sense strand starting at position 3678 of SEQ ID NO: 1885858
ggaguuaugggaggguauu

SEQ ID NO: 2372979 - RNA, 19 nt, Artificial Sequence
  Description of Artificial Sequence: Synthetic oligonucleotide
  Antisense strand to SEQ ID NO: 2372978
aauacccucccauaacucc

SEQ ID NO: 2372980 - RNA, 19 nt, Artificial Sequence
  Description of Artificial Sequence: Synthetic oligonucleotide
  Sense strand starting at position 3713 of SEQ ID NO: 1885858
uagaguugaucauagauuu

SEQ ID NO: 2372981 - RNA, 19 nt, Artificial Sequence
  Description of Artificial Sequence: Synthetic oligonucleotide
  Antisense strand to SEQ ID NO: 2372980
aaaucuaugaucaacucua

SEQ ID NO: 2372982 - RNA, 19 nt, Artificial Sequence
  Description of Artificial Sequence: Synthetic oligonucleotide
  Sense strand starting at position 3781 of SEQ ID NO: 1885858
cagagaguugcuggaauug

SEQ ID NO: 2372983 - RNA, 19 nt, Artificial Sequence
  Description of Artificial Sequence: Synthetic oligonucleotide
  Antisense strand to SEQ ID NO: 2372982
caauuccagcaacucucug

SEQ ID NO: 2372984 - RNA, 19 nt, Artificial Sequence
  Description of Artificial Sequence: Synthetic oligonucleotide
  Sense strand starting at position 3792 of SEQ ID NO: 1885858
uggaauugucaauggguuu

SEQ ID NO: 2372985 - RNA, 19 nt, Artificial Sequence
  Description of Artificial Sequence: Synthetic oligonucleotide
  Antisense strand to SEQ ID NO: 2372984
aaacccauugacaauucca

SEQ ID NO: 2372986 - RNA, 19 nt, Artificial Sequence
  Description of Artificial Sequence: Synthetic oligonucleotide
  Sense strand starting at position 3793 of SEQ ID NO: 1885858
ggaauugucaauggguuua

SEQ ID NO: 2372987 - RNA, 19 nt, Artificial Sequence
  Description of Artificial Sequence: Synthetic oligonucleotide
  Antisense strand to SEQ ID NO: 2372986
uaaacccauugacaauucc

SEQ ID NO: 2372988 - RNA, 19 nt, Artificial Sequence
  Description of Artificial Sequence: Synthetic oligonucleotide
  Sense strand starting at position 3798 of SEQ ID NO: 1885858
ugucaauggguuuaucuuu

SEQ ID NO: 2372989 - RNA, 19 nt, Artificial Sequence
  Description of Artificial Sequence: Synthetic oligonucleotide
  Antisense strand to SEQ ID NO: 2372988
aaagauaaacccauugaca

SEQ ID NO: 2372990 - RNA, 19 nt, Artificial Sequence
  Description of Artificial Sequence: Synthetic oligonucleotide
  Sense strand starting at position 3803 of SEQ ID NO: 1885858
auggguuuaucuuuagaau

SEQ ID NO: 2372991 - RNA, 19 nt, Artificial Sequence
  Description of Artificial Sequence: Synthetic oligonucleotide
  Antisense strand to SEQ ID NO: 2372990
auucuaaagauaaacccau

SEQ ID NO: 2372992 - RNA, 19 nt, Artificial Sequence
  Description of Artificial Sequence: Synthetic oligonucleotide
  Sense strand starting at position 3809 of SEQ ID NO: 1885858
uuaucuuuagaaugcauga

SEQ ID NO: 2372993 - RNA, 19 nt, Artificial Sequence
  Description of Artificial Sequence: Synthetic oligonucleotide
  Antisense strand to SEQ ID NO: 2372992
ucaugcauucuaaagauaa

SEQ ID NO: 2372994 - RNA, 19 nt, Artificial Sequence
  Description of Artificial Sequence: Synthetic oligonucleotide
  Sense strand starting at position 3888 of SEQ ID NO: 1885858
auuauuauauggucuguga

SEQ ID NO: 2372995 - RNA, 19 nt, Artificial Sequence
  Description of Artificial Sequence: Synthetic oligonucleotide
  Antisense strand to SEQ ID NO: 2372994
ucacagaccauauaauaau

SEQ ID NO: 2372996 - RNA, 19 nt, Artificial Sequence
  Description of Artificial Sequence: Synthetic oligonucleotide
  Sense strand starting at position 1498 of SEQ ID NO: 1885859
uggauucuuguaggaaaug

SEQ ID NO: 2372997 - RNA, 19 nt, Artificial Sequence
  Description of Artificial Sequence: Synthetic oligonucleotide
  Antisense strand to SEQ ID NO: 2372996
cauuuccuacaagaaucca

SEQ ID NO: 2372998 - RNA, 19 nt, Artificial Sequence
  Description of Artificial Sequence: Synthetic oligonucleotide
  Sense strand starting at position 1534 of SEQ ID NO: 1885859
ggugauaggugucuggauu

SEQ ID NO: 2372999 - RNA, 19 nt, Artificial Sequence
  Description of Artificial Sequence: Synthetic oligonucleotide
  Antisense strand to SEQ ID NO: 2372998
aauccagacaccuaucacc

SEQ ID NO: 2373000 - RNA, 19 nt, Artificial Sequence
  Description of Artificial Sequence: Synthetic oligonucleotide
  Sense strand starting at position 1569 of SEQ ID NO: 1885859
gggaagaaaggucgucagu

SEQ ID NO: 2373001 - RNA, 19 nt, Artificial Sequence
  Description of Artificial Sequence: Synthetic oligonucleotide
  Antisense strand to SEQ ID NO: 2373000
acugacgaccuuucuuccc

SEQ ID NO: 2373002 - RNA, 19 nt, Artificial Sequence
  Description of Artificial Sequence: Synthetic oligonucleotide
  Sense strand starting at position 1591 of SEQ ID NO: 1885859
ugcagaaaccugugaggaa

SEQ ID NO: 2373003 - RNA, 19 nt, Artificial Sequence
  Description of Artificial Sequence: Synthetic oligonucleotide
  Antisense strand to SEQ ID NO: 2373002
uuccucacagguuucugca

SEQ ID NO: 2373004 - RNA, 19 nt, Artificial Sequence
  Description of Artificial Sequence: Synthetic oligonucleotide
  Sense strand starting at position 1969 of SEQ ID NO: 1885859
aagcaaacguguucgauuu

SEQ ID NO: 2373005 - RNA, 19 nt, Artificial Sequence
  Description of Artificial Sequence: Synthetic oligonucleotide
  Antisense strand to SEQ ID NO: 2373004
aaaucgaacacguuugcuu

SEQ ID NO: 2373006 - RNA, 19 nt, Artificial Sequence
  Description of Artificial Sequence: Synthetic oligonucleotide
  Sense strand starting at position 1980 of SEQ ID NO: 1885859
uucgauuucugaucugcuu

SEQ ID NO: 2373007 - RNA, 19 nt, Artificial Sequence
  Description of Artificial Sequence: Synthetic oligonucleotide
  Antisense strand to SEQ ID NO: 2373006
aagcagaucagaaaucgaa

SEQ ID NO: 2373008 - RNA, 19 nt, Artificial Sequence
  Description of Artificial Sequence: Synthetic oligonucleotide
  Sense strand starting at position 2036 of SEQ ID NO: 1885859
guguaaagauaucucccaa

SEQ ID NO: 2373009 - RNA, 19 nt, Artificial Sequence
  Description of Artificial Sequence: Synthetic oligonucleotide
  Antisense strand to SEQ ID NO: 2373008
uugggagauaucuuuacac

SEQ ID NO: 2373010 - RNA, 19 nt, Artificial Sequence
  Description of Artificial Sequence: Synthetic oligonucleotide
  Sense strand starting at position 2132 of SEQ ID NO: 1885859
agcauuuauuaagcgcuua

SEQ ID NO: 2373011 - RNA, 19 nt, Artificial Sequence
  Description of Artificial Sequence: Synthetic oligonucleotide
  Antisense strand to SEQ ID NO: 2373010
uaagcgcuuaauaaaugcu

SEQ ID NO: 2373012 - RNA, 19 nt, Artificial Sequence
  Description of Artificial Sequence: Synthetic oligonucleotide
  Sense strand starting at position 2190 of SEQ ID NO: 1885859
auuuguguccuaugaguau

SEQ ID NO: 2373013 - RNA, 19 nt, Artificial Sequence
  Description of Artificial Sequence: Synthetic oligonucleotide
  Antisense strand to SEQ ID NO: 2373012
auacucauaggacacaaau

SEQ ID NO: 2373014 - RNA, 19 nt, Artificial Sequence
  Description of Artificial Sequence: Synthetic oligonucleotide
  Sense strand starting at position 2248 of SEQ ID NO: 1885859
gaguaacuuguccagguuu

SEQ ID NO: 2373015 - RNA, 19 nt, Artificial Sequence
  Description of Artificial Sequence: Synthetic oligonucleotide
  Antisense strand to SEQ ID NO: 2373014
aaaccuggacaaguuacuc

SEQ ID NO: 2373016 - RNA, 19 nt, Artificial Sequence
  Description of Artificial Sequence: Synthetic oligonucleotide
  Sense strand starting at position 2326 of SEQ ID NO: 1885859
ggaugugcuugaguggaau

SEQ ID NO: 2373017 - RNA, 19 nt, Artificial Sequence
  Description of Artificial Sequence: Synthetic oligonucleotide
  Antisense strand to SEQ ID NO: 2373016
auuccacucaagcacaucc

SEQ ID NO: 2373018 - RNA, 19 nt, Artificial Sequence
  Description of Artificial Sequence: Synthetic oligonucleotide
  Sense strand starting at position 2352 of SEQ ID NO: 1885859
gugaaauagcucugaacuu

SEQ ID NO: 2373019 - RNA, 19 nt, Artificial Sequence
  Description of Artificial Sequence: Synthetic oligonucleotide
  Antisense strand to SEQ ID NO: 2373018
aaguucagagcuauuucac

SEQ ID NO: 2373020 - RNA, 19 nt, Artificial Sequence
  Description of Artificial Sequence: Synthetic oligonucleotide
  Sense strand starting at position 2435 of SEQ ID NO: 1885859
auuacuaaaugugucugaa

SEQ ID NO: 2373021 - RNA, 19 nt, Artificial Sequence
  Description of Artificial Sequence: Synthetic oligonucleotide
  Antisense strand to SEQ ID NO: 2373020
uucagacacauuuaguaau

SEQ ID NO: 2373022 - RNA, 19 nt, Artificial Sequence
  Description of Artificial Sequence: Synthetic oligonucleotide
  Sense strand starting at position 2438 of SEQ ID NO: 1885859
acuaaaugugucugaacuu

SEQ ID NO: 2373023 - RNA, 19 nt, Artificial Sequence
  Description of Artificial Sequence: Synthetic oligonucleotide
  Antisense strand to SEQ ID NO: 2373022
aaguucagacacauuuagu

SEQ ID NO: 2373024 - RNA, 19 nt, Artificial Sequence
  Description of Artificial Sequence: Synthetic oligonucleotide
  Sense strand starting at position 2524 of SEQ ID NO: 1885859
aggagaucauaugugugga

SEQ ID NO: 2373025 - RNA, 19 nt, Artificial Sequence
  Description of Artificial Sequence: Synthetic oligonucleotide
  Antisense strand to SEQ ID NO: 2373024
uccacacauaugaucuccu

SEQ ID NO: 2373026 - RNA, 19 nt, Artificial Sequence
  Description of Artificial Sequence: Synthetic oligonucleotide
  Sense strand starting at position 2525 of SEQ ID NO: 1885859
ggagaucauauguguggaa

SEQ ID NO: 2373027 - RNA, 19 nt, Artificial Sequence
  Description of Artificial Sequence: Synthetic oligonucleotide
  Antisense strand to SEQ ID NO: 2373026
uuccacacauaugaucucc

SEQ ID NO: 2373028 - RNA, 19 nt, Artificial Sequence
  Description of Artificial Sequence: Synthetic oligonucleotide
  Sense strand starting at position 2526 of SEQ ID NO: 1885859
gagaucauauguguggaaa

SEQ ID NO: 2373029 - RNA, 19 nt, Artificial Sequence
  Description of Artificial Sequence: Synthetic oligonucleotide
  Antisense strand to SEQ ID NO: 2373028
uuuccacacauaugaucuc

SEQ ID NO: 2373030 - RNA, 19 nt, Artificial Sequence
  Description of Artificial Sequence: Synthetic oligonucleotide
  Sense strand starting at position 2527 of SEQ ID NO: 1885859
agaucauauguguggaaag

SEQ ID NO: 2373031 - RNA, 19 nt, Artificial Sequence
  Description of Artificial Sequence: Synthetic oligonucleotide
  Antisense strand to SEQ ID NO: 2373030
cuuuccacacauaugaucu

SEQ ID NO: 2373032 - RNA, 19 nt, Artificial Sequence
  Description of Artificial Sequence: Synthetic oligonucleotide
  Sense strand starting at position 2613 of SEQ ID NO: 1885859
aggagaauugguggugaac

SEQ ID NO: 2373033 - RNA, 19 nt, Artificial Sequence
  Description of Artificial Sequence: Synthetic oligonucleotide
  Antisense strand to SEQ ID NO: 2373032
guucaccaccaauucuccu

SEQ ID NO: 2373034 - RNA, 19 nt, Artificial Sequence
  Description of Artificial Sequence: Synthetic oligonucleotide
  Sense strand starting at position 2684 of SEQ ID NO: 1885859
aggaauucuggaugagcuu

SEQ ID NO: 2373035 - RNA, 19 nt, Artificial Sequence
  Description of Artificial Sequence: Synthetic oligonucleotide
  Antisense strand to SEQ ID NO: 2373034
aagcucauccagaauuccu

SEQ ID NO: 2373036 - RNA, 19 nt, Artificial Sequence
  Description of Artificial Sequence: Synthetic oligonucleotide
  Sense strand starting at position 2756 of SEQ ID NO: 1885859
uggacauauugccuaccau

SEQ ID NO: 2373037 - RNA, 19 nt, Artificial Sequence
  Description of Artificial Sequence: Synthetic oligonucleotide
  Antisense strand to SEQ ID NO: 2373036
augguaggcaauaugucca

SEQ ID NO: 2373038 - RNA, 19 nt, Artificial Sequence
  Description of Artificial Sequence: Synthetic oligonucleotide
  Sense strand starting at position 2757 of SEQ ID NO: 1885859
ggacauauugccuaccauu

SEQ ID NO: 2373039 - RNA, 19 nt, Artificial Sequence
  Description of Artificial Sequence: Synthetic oligonucleotide
  Antisense strand to SEQ ID NO: 2373038
aaugguaggcaauaugucc

SEQ ID NO: 2373040 - RNA, 19 nt, Artificial Sequence
  Description of Artificial Sequence: Synthetic oligonucleotide
  Sense strand starting at position 2941 of SEQ ID NO: 1885859
uccucaggagcuugaauua

SEQ ID NO: 2373041 - RNA, 19 nt, Artificial Sequence
  Description of Artificial Sequence: Synthetic oligonucleotide
  Antisense strand to SEQ ID NO: 2373040
uaauucaagcuccugagga

SEQ ID NO: 2373042 - RNA, 19 nt, Artificial Sequence
  Description of Artificial Sequence: Synthetic oligonucleotide
  Sense strand starting at position 3152 of SEQ ID NO: 1885859
auucgaaguagucgagaaa

SEQ ID NO: 2373043 - RNA, 19 nt, Artificial Sequence
  Description of Artificial Sequence: Synthetic oligonucleotide
  Antisense strand to SEQ ID NO: 2373042
uuucucgacuacuucgaau

SEQ ID NO: 2373044 - RNA, 19 nt, Artificial Sequence
  Description of Artificial Sequence: Synthetic oligonucleotide
  Sense strand starting at position 3191 of SEQ ID NO: 1885859
aggcuauagccacagauaa

SEQ ID NO: 2373045 - RNA, 19 nt, Artificial Sequence
  Description of Artificial Sequence: Synthetic oligonucleotide
  Antisense strand to SEQ ID NO: 2373044
uuaucuguggcuauagccu

SEQ ID NO: 2373046 - RNA, 19 nt, Artificial Sequence
  Description of Artificial Sequence: Synthetic oligonucleotide
  Sense strand starting at position 3294 of SEQ ID NO: 1885859
cuuggaggucuaggaacuu

SEQ ID NO: 2373047 - RNA, 19 nt, Artificial Sequence
  Description of Artificial Sequence: Synthetic oligonucleotide
  Antisense strand to SEQ ID NO: 2373046
aaguuccuagaccuccaag

SEQ ID NO: 2373048 - RNA, 19 nt, Artificial Sequence
  Description of Artificial Sequence: Synthetic oligonucleotide
  Sense strand starting at position 3401 of SEQ ID NO: 1885859
ggauguuuaacuggaaauc

SEQ ID NO: 2373049 - RNA, 19 nt, Artificial Sequence
  Description of Artificial Sequence: Synthetic oligonucleotide
  Antisense strand to SEQ ID NO: 2373048
gauuuccaguuaaacaucc

SEQ ID NO: 2373050 - RNA, 19 nt, Artificial Sequence
  Description of Artificial Sequence: Synthetic oligonucleotide
  Sense strand starting at position 3411 of SEQ ID NO: 1885859
cuggaaauccaaugucagu

SEQ ID NO: 2373051 - RNA, 19 nt, Artificial Sequence
  Description of Artificial Sequence: Synthetic oligonucleotide
  Antisense strand to SEQ ID NO: 2373050
acugacauuggauuuccag

SEQ ID NO: 2373052 - RNA, 19 nt, Artificial Sequence
  Description of Artificial Sequence: Synthetic oligonucleotide
  Sense strand starting at position 3424 of SEQ ID NO: 1885859
gucagugugacuugaagaa

SEQ ID NO: 2373053 - RNA, 19 nt, Artificial Sequence
  Description of Artificial Sequence: Synthetic oligonucleotide
  Antisense strand to SEQ ID NO: 2373052
uucuucaagucacacugac

SEQ ID NO: 2373054 - RNA, 19 nt, Artificial Sequence
  Description of Artificial Sequence: Synthetic oligonucleotide
  Sense strand starting at position 3697 of SEQ ID NO: 1885859
ccaguuaaguaaccugaau

SEQ ID NO: 2373055 - RNA, 19 nt, Artificial Sequence
  Description of Artificial Sequence: Synthetic oligonucleotide
  Antisense strand to SEQ ID NO: 2373054
auucagguuacuuaacugg

SEQ ID NO: 2373056 - RNA, 19 nt, Artificial Sequence
  Description of Artificial Sequence: Synthetic oligonucleotide
  Sense strand starting at position 3703 of SEQ ID NO: 1885859
aaguaaccugaauguguga

SEQ ID NO: 2373057 - RNA, 19 nt, Artificial Sequence
  Description of Artificial Sequence: Synthetic oligonucleotide
  Antisense strand to SEQ ID NO: 2373056
ucacacauucagguuacuu

SEQ ID NO: 2373058 - RNA, 19 nt, Artificial Sequence
  Description of Artificial Sequence: Synthetic oligonucleotide
  Sense strand starting at position 3705 of SEQ ID NO: 1885859
guaaccugaaugugugaau

SEQ ID NO: 2373059 - RNA, 19 nt, Artificial Sequence
  Description of Artificial Sequence: Synthetic oligonucleotide
  Antisense strand to SEQ ID NO: 2373058
auucacacauucagguuac

SEQ ID NO: 2373060 - RNA, 19 nt, Artificial Sequence
  Description of Artificial Sequence: Synthetic oligonucleotide
  Sense strand starting at position 3731 of SEQ ID NO: 1885859
auuguaagacuacggagaa

SEQ ID NO: 2373061 - RNA, 19 nt, Artificial Sequence
  Description of Artificial Sequence: Synthetic oligonucleotide
  Antisense strand to SEQ ID NO: 2373060
uucuccguagucuuacaau

SEQ ID NO: 2373062 - RNA, 19 nt, Artificial Sequence
  Description of Artificial Sequence: Synthetic oligonucleotide
  Sense strand starting at position 3857 of SEQ ID NO: 1885859
cugucagaccuuuaauaug

SEQ ID NO: 2373063 - RNA, 19 nt, Artificial Sequence
  Description of Artificial Sequence: Synthetic oligonucleotide
  Antisense strand to SEQ ID NO: 2373062
cauauuaaaggucugacag

SEQ ID NO: 2373064 - RNA, 19 nt, Artificial Sequence
  Description of Artificial Sequence: Synthetic oligonucleotide
  Sense strand starting at position 3871 of SEQ ID NO: 1885859
auauguaaucuuggucuaa

SEQ ID NO: 2373065 - RNA, 19 nt, Artificial Sequence
  Description of Artificial Sequence: Synthetic oligonucleotide
  Antisense strand to SEQ ID NO: 2373064
uuagaccaagauuacauau

SEQ ID NO: 2373066 - RNA, 19 nt, Artificial Sequence
  Description of Artificial Sequence: Synthetic oligonucleotide
  Sense strand starting at position 3873 of SEQ ID NO: 1885859
auguaaucuuggucuaaac

SEQ ID NO: 2373067 - RNA, 19 nt, Artificial Sequence
  Description of Artificial Sequence: Synthetic oligonucleotide
  Antisense strand to SEQ ID NO: 2373066
guuuagaccaagauuacau

SEQ ID NO: 2373068 - RNA, 19 nt, Artificial Sequence
  Description of Artificial Sequence: Synthetic oligonucleotide
  Sense strand starting at position 3875 of SEQ ID NO: 1885859
guaaucuuggucuaaacua

SEQ ID NO: 2373069 - RNA, 19 nt, Artificial Sequence
  Description of Artificial Sequence: Synthetic oligonucleotide
  Antisense strand to SEQ ID NO: 2373068
uaguuuagaccaagauuac

SEQ ID NO: 2373070 - RNA, 19 nt, Artificial Sequence
  Description of Artificial Sequence: Synthetic oligonucleotide
  Sense strand starting at position 3923 of SEQ ID NO: 1885859
agugaaagacccuggauuc

SEQ ID NO: 2373071 - RNA, 19 nt, Artificial Sequence
  Description of Artificial Sequence: Synthetic oligonucleotide
  Antisense strand to SEQ ID NO: 2373070
gaauccagggucuuucacu

SEQ ID NO: 2373072 - RNA, 19 nt, Artificial Sequence
  Description of Artificial Sequence: Synthetic oligonucleotide
  Sense strand starting at position 3966 of SEQ ID NO: 1885859
guauuuaaguuuccuguuu

SEQ ID NO: 2373073 - RNA, 19 nt, Artificial Sequence
  Description of Artificial Sequence: Synthetic oligonucleotide
  Antisense strand to SEQ ID NO: 2373072
aaacaggaaacuuaaauac

SEQ ID NO: 2373074 - RNA, 19 nt, Artificial Sequence
  Description of Artificial Sequence: Synthetic oligonucleotide
  Sense strand starting at position 3981 of SEQ ID NO: 1885859
guuucuaaacauggaagau

SEQ ID NO: 2373075 - RNA, 19 nt, Artificial Sequence
  Description of Artificial Sequence: Synthetic oligonucleotide
  Antisense strand to SEQ ID NO: 2373074
aucuuccauguuuagaaac

SEQ ID NO: 2373076 - RNA, 19 nt, Artificial Sequence
  Description of Artificial Sequence: Synthetic oligonucleotide
  Sense strand starting at position 256 of SEQ ID NO: 1885860
cugaucaaccgucacaaau

SEQ ID NO: 2373077 - RNA, 19 nt, Artificial Sequence
  Description of Artificial Sequence: Synthetic oligonucleotide
  Antisense strand to SEQ ID NO: 2373076
auuugugacgguugaucag

SEQ ID NO: 2373078 - RNA, 19 nt, Artificial Sequence
  Description of Artificial Sequence: Synthetic oligonucleotide
  Sense strand starting at position 470 of SEQ ID NO: 1885860
uguccuucuuggguuuaau

SEQ ID NO: 2373079 - RNA, 19 nt, Artificial Sequence
  Description of Artificial Sequence: Synthetic oligonucleotide
  Antisense strand to SEQ ID NO: 2373078
auuaaacccaagaaggaca

SEQ ID NO: 2373080 - RNA, 19 nt, Artificial Sequence
  Description of Artificial Sequence: Synthetic oligonucleotide
  Sense strand starting at position 542 of SEQ ID NO: 1885860
uuagcuuguuuauugggaa

SEQ ID NO: 2373081 - RNA, 19 nt, Artificial Sequence
  Description of Artificial Sequence: Synthetic oligonucleotide
  Antisense strand to SEQ ID NO: 2373080
uucccaauaaacaagcuaa

SEQ ID NO: 2373082 - RNA, 19 nt, Artificial Sequence
  Description of Artificial Sequence: Synthetic oligonucleotide
  Sense strand starting at position 562 of SEQ ID NO: 1885860
aggacuucuagagguacuu

SEQ ID NO: 2373083 - RNA, 19 nt, Artificial Sequence
  Description of Artificial Sequence: Synthetic oligonucleotide
  Antisense strand to SEQ ID NO: 2373082
aaguaccucuagaaguccu

SEQ ID NO: 2373084 - RNA, 19 nt, Artificial Sequence
  Description of Artificial Sequence: Synthetic oligonucleotide
  Sense strand starting at position 612 of SEQ ID NO: 1885860
gggucagaaguccagugua

SEQ ID NO: 2373085 - RNA, 19 nt, Artificial Sequence
  Description of Artificial Sequence: Synthetic oligonucleotide
  Antisense strand to SEQ ID NO: 2373084
uacacuggacuucugaccc

SEQ ID NO: 2373086 - RNA, 19 nt, Artificial Sequence
  Description of Artificial Sequence: Synthetic oligonucleotide
  Sense strand starting at position 615 of SEQ ID NO: 1885860
ucagaaguccaguguaagg

SEQ ID NO: 2373087 - RNA, 19 nt, Artificial Sequence
  Description of Artificial Sequence: Synthetic oligonucleotide
  Antisense strand to SEQ ID NO: 2373086
ccuuacacuggacuucuga

SEQ ID NO: 2373088 - RNA, 19 nt, Artificial Sequence
  Description of Artificial Sequence: Synthetic oligonucleotide
  Sense strand starting at position 633 of SEQ ID NO: 1885860
gcacuugagugcucaaaug

SEQ ID NO: 2373089 - RNA, 19 nt, Artificial Sequence
  Description of Artificial Sequence: Synthetic oligonucleotide
  Antisense strand to SEQ ID NO: 2373088
cauuugagcacucaagugc

SEQ ID NO: 2373090 - RNA, 19 nt, Artificial Sequence
  Description of Artificial Sequence: Synthetic oligonucleotide
  Sense strand starting at position 991 of SEQ ID NO: 1885860
aguauuguguauuugcaga

SEQ ID NO: 2373091 - RNA, 19 nt, Artificial Sequence
  Description of Artificial Sequence: Synthetic oligonucleotide
  Antisense strand to SEQ ID NO: 2373090
ucugcaaauacacaauacu

SEQ ID NO: 2373092 - RNA, 19 nt, Artificial Sequence
  Description of Artificial Sequence: Synthetic oligonucleotide
  Sense strand starting at position 1029 of SEQ ID NO: 1885860
guuaacaucagacaguagu

SEQ ID NO: 2373093 - RNA, 19 nt, Artificial Sequence
  Description of Artificial Sequence: Synthetic oligonucleotide
  Antisense strand to SEQ ID NO: 2373092
acuacugucugauguuaac

SEQ ID NO: 2373094 - RNA, 19 nt, Artificial Sequence
  Description of Artificial Sequence: Synthetic oligonucleotide
  Sense strand starting at position 1103 of SEQ ID NO: 1885860
cuaauaagccauuggucga

SEQ ID NO: 2373095 - RNA, 19 nt, Artificial Sequence
  Description of Artificial Sequence: Synthetic oligonucleotide
  Antisense strand to SEQ ID NO: 2373094
ucgaccaauggcuuauuag

SEQ ID NO: 2373096 - RNA, 19 nt, Artificial Sequence
  Description of Artificial Sequence: Synthetic oligonucleotide
  Sense strand starting at position 1107 of SEQ ID NO: 1885860
uaagccauuggucgauaca

SEQ ID NO: 2373097 - RNA, 19 nt, Artificial Sequence
  Description of Artificial Sequence: Synthetic oligonucleotide
  Antisense strand to SEQ ID NO: 2373096
uguaucgaccaauggcuua

SEQ ID NO: 2373098 - RNA, 19 nt, Artificial Sequence
  Description of Artificial Sequence: Synthetic oligonucleotide
  Sense strand starting at position 1108 of SEQ ID NO: 1885860
aagccauuggucgauacaa

SEQ ID NO: 2373099 - RNA, 19 nt, Artificial Sequence
  Description of Artificial Sequence: Synthetic oligonucleotide
  Antisense strand to SEQ ID NO: 2373098
uuguaucgaccaauggcuu

SEQ ID NO: 2373100 - RNA, 19 nt, Artificial Sequence
  Description of Artificial Sequence: Synthetic oligonucleotide
  Sense strand starting at position 1110 of SEQ ID NO: 1885860
gccauuggucgauacaagu

SEQ ID NO: 2373101 - RNA, 19 nt, Artificial Sequence
  Description of Artificial Sequence: Synthetic oligonucleotide
  Antisense strand to SEQ ID NO: 2373100
acuuguaucgaccaauggc

SEQ ID NO: 2373102 - RNA, 19 nt, Artificial Sequence
  Description of Artificial Sequence: Synthetic oligonucleotide
  Sense strand starting at position 1276 of SEQ ID NO: 1885860
gaagacuccugagugccua

SEQ ID NO: 2373103 - RNA, 19 nt, Artificial Sequence
  Description of Artificial Sequence: Synthetic oligonucleotide
  Antisense strand to SEQ ID NO: 2373102
uaggcacucaggagucuuc

SEQ ID NO: 2373104 - RNA, 19 nt, Artificial Sequence
  Description of Artificial Sequence: Synthetic oligonucleotide
  Sense strand starting at position 1484 of SEQ ID NO: 1885860
aaggcaugucugcaacaga

SEQ ID NO: 2373105 - RNA, 19 nt, Artificial Sequence
  Description of Artificial Sequence: Synthetic oligonucleotide
  Antisense strand to SEQ ID NO: 2373104
ucuguugcagacaugccuu

SEQ ID NO: 2373106 - RNA, 19 nt, Artificial Sequence
  Description of Artificial Sequence: Synthetic oligonucleotide
  Sense strand starting at position 1554 of SEQ ID NO: 1885860
aggccaaccucugcagaua

SEQ ID NO: 2373107 - RNA, 19 nt, Artificial Sequence
  Description of Artificial Sequence: Synthetic oligonucleotide
  Antisense strand to SEQ ID NO: 2373106
uaucugcagagguuggccu

SEQ ID NO: 2373108 - RNA, 19 nt, Artificial Sequence
  Description of Artificial Sequence: Synthetic oligonucleotide
  Sense strand starting at position 1956 of SEQ ID NO: 1885860
acaccuaagugagugcuau

SEQ ID NO: 2373109 - RNA, 19 nt, Artificial Sequence
  Description of Artificial Sequence: Synthetic oligonucleotide
  Antisense strand to SEQ ID NO: 2373108
auagcacucacuuaggugu

SEQ ID NO: 2373110 - RNA, 19 nt, Artificial Sequence
  Description of Artificial Sequence: Synthetic oligonucleotide
  Sense strand starting at position 1957 of SEQ ID NO: 1885860
caccuaagugagugcuauu

SEQ ID NO: 2373111 - RNA, 19 nt, Artificial Sequence
  Description of Artificial Sequence: Synthetic oligonucleotide
  Antisense strand to SEQ ID NO: 2373110
aauagcacucacuuaggug

SEQ ID NO: 2373112 - RNA, 19 nt, Artificial Sequence
  Description of Artificial Sequence: Synthetic oligonucleotide
  Sense strand starting at position 2031 of SEQ ID NO: 1885860
accuuuaugucaccuaggu

SEQ ID NO: 2373113 - RNA, 19 nt, Artificial Sequence
  Description of Artificial Sequence: Synthetic oligonucleotide
  Antisense strand to SEQ ID NO: 2373112
accuaggugacauaaaggu

SEQ ID NO: 2373114 - RNA, 19 nt, Artificial Sequence
  Description of Artificial Sequence: Synthetic oligonucleotide
  Sense strand starting at position 2108 of SEQ ID NO: 1885860
ccucucaggagcuguauga

SEQ ID NO: 2373115 - RNA, 19 nt, Artificial Sequence
  Description of Artificial Sequence: Synthetic oligonucleotide
  Antisense strand to SEQ ID NO: 2373114
ucauacagcuccugagagg

SEQ ID NO: 2373116 - RNA, 19 nt, Artificial Sequence
  Description of Artificial Sequence: Synthetic oligonucleotide
  Sense strand starting at position 2112 of SEQ ID NO: 1885860
ucaggagcuguaugaauga

SEQ ID NO: 2373117 - RNA, 19 nt, Artificial Sequence
  Description of Artificial Sequence: Synthetic oligonucleotide
  Antisense strand to SEQ ID NO: 2373116
ucauucauacagcuccuga

SEQ ID NO: 2373118 - RNA, 19 nt, Artificial Sequence
  Description of Artificial Sequence: Synthetic oligonucleotide
  Sense strand starting at position 2417 of SEQ ID NO: 1885860
cgagacagcucuucucaga

SEQ ID NO: 2373119 - RNA, 19 nt, Artificial Sequence
  Description of Artificial Sequence: Synthetic oligonucleotide
  Antisense strand to SEQ ID NO: 2373118
ucugagaagagcugucucg

SEQ ID NO: 2373120 - RNA, 19 nt, Artificial Sequence
  Description of Artificial Sequence: Synthetic oligonucleotide
  Sense strand starting at position 2523 of SEQ ID NO: 1885860
acggguagaaucuaaccuu

SEQ ID NO: 2373121 - RNA, 19 nt, Artificial Sequence
  Description of Artificial Sequence: Synthetic oligonucleotide
  Antisense strand to SEQ ID NO: 2373120
aagguuagauucuacccgu

SEQ ID NO: 2373122 - RNA, 19 nt, Artificial Sequence
  Description of Artificial Sequence: Synthetic oligonucleotide
  Sense strand starting at position 2572 of SEQ ID NO: 1885860
aaacgauauuucuuuccgu

SEQ ID NO: 2373123 - RNA, 19 nt, Artificial Sequence
  Description of Artificial Sequence: Synthetic oligonucleotide
  Antisense strand to SEQ ID NO: 2373122
acggaaagaaauaucguuu

SEQ ID NO: 2373124 - RNA, 19 nt, Artificial Sequence
  Description of Artificial Sequence: Synthetic oligonucleotide
  Sense strand starting at position 2577 of SEQ ID NO: 1885860
auauuucuuuccgugcuaa

SEQ ID NO: 2373125 - RNA, 19 nt, Artificial Sequence
  Description of Artificial Sequence: Synthetic oligonucleotide
  Antisense strand to SEQ ID NO: 2373124
uuagcacggaaagaaauau

SEQ ID NO: 2373126 - RNA, 19 nt, Artificial Sequence
  Description of Artificial Sequence: Synthetic oligonucleotide
  Sense strand starting at position 2803 of SEQ ID NO: 1885860
ccagucuugaucgguaaug

SEQ ID NO: 2373127 - RNA, 19 nt, Artificial Sequence
  Description of Artificial Sequence: Synthetic oligonucleotide
  Antisense strand to SEQ ID NO: 2373126
cauuaccgaucaagacugg

SEQ ID NO: 2373128 - RNA, 19 nt, Artificial Sequence
  Description of Artificial Sequence: Synthetic oligonucleotide
  Sense strand starting at position 2904 of SEQ ID NO: 1885860
ugaacaaucccaugguggu

SEQ ID NO: 2373129 - RNA, 19 nt, Artificial Sequence
  Description of Artificial Sequence: Synthetic oligonucleotide
  Antisense strand to SEQ ID NO: 2373128
accaccaugggauuguuca

SEQ ID NO: 2373130 - RNA, 19 nt, Artificial Sequence
  Description of Artificial Sequence: Synthetic oligonucleotide
  Sense strand starting at position 3001 of SEQ ID NO: 1885860
ugguuucucugcuccauuu

SEQ ID NO: 2373131 - RNA, 19 nt, Artificial Sequence
  Description of Artificial Sequence: Synthetic oligonucleotide
  Antisense strand to SEQ ID NO: 2373130
aaauggagcagagaaacca

SEQ ID NO: 2373132 - RNA, 19 nt, Artificial Sequence
  Description of Artificial Sequence: Synthetic oligonucleotide
  Sense strand starting at position 3233 of SEQ ID NO: 1885860
ugaaaucggcuuuacuaac

SEQ ID NO: 2373133 - RNA, 19 nt, Artificial Sequence
  Description of Artificial Sequence: Synthetic oligonucleotide
  Antisense strand to SEQ ID NO: 2373132
guuaguaaagccgauuuca

SEQ ID NO: 2373134 - RNA, 19 nt, Artificial Sequence
  Description of Artificial Sequence: Synthetic oligonucleotide
  Sense strand starting at position 3239 of SEQ ID NO: 1885860
cggcuuuacuaaccacaca

SEQ ID NO: 2373135 - RNA, 19 nt, Artificial Sequence
  Description of Artificial Sequence: Synthetic oligonucleotide
  Antisense strand to SEQ ID NO: 2373134
ugugugguuaguaaagccg

SEQ ID NO: 2373136 - RNA, 19 nt, Artificial Sequence
  Description of Artificial Sequence: Synthetic oligonucleotide
  Sense strand starting at position 3535 of SEQ ID NO: 1885860
aggugacaguugguuacau

SEQ ID NO: 2373137 - RNA, 19 nt, Artificial Sequence
  Description of Artificial Sequence: Synthetic oligonucleotide
  Antisense strand to SEQ ID NO: 2373136
auguaaccaacugucaccu

SEQ ID NO: 2373138 - RNA, 19 nt, Artificial Sequence
  Description of Artificial Sequence: Synthetic oligonucleotide
  Sense strand starting at position 3536 of SEQ ID NO: 1885860
ggugacaguugguuacaua

SEQ ID NO: 2373139 - RNA, 19 nt, Artificial Sequence
  Description of Artificial Sequence: Synthetic oligonucleotide
  Antisense strand to SEQ ID NO: 2373138
uauguaaccaacugucacc

SEQ ID NO: 2373140 - RNA, 19 nt, Artificial Sequence
  Description of Artificial Sequence: Synthetic oligonucleotide
  Sense strand starting at position 3537 of SEQ ID NO: 1885860
gugacaguugguuacauaa

SEQ ID NO: 2373141 - RNA, 19 nt, Artificial Sequence
  Description of Artificial Sequence: Synthetic oligonucleotide
  Antisense strand to SEQ ID NO: 2373140
uuauguaaccaacugucac

SEQ ID NO: 2373142 - RNA, 19 nt, Artificial Sequence
  Description of Artificial Sequence: Synthetic oligonucleotide
  Sense strand starting at position 3563 of SEQ ID NO: 1885860
augagucccuccuccagau

SEQ ID NO: 2373143 - RNA, 19 nt, Artificial Sequence
  Description of Artificial Sequence: Synthetic oligonucleotide
  Antisense strand to SEQ ID NO: 2373142
aucuggaggagggacucau

SEQ ID NO: 2373144 - RNA, 19 nt, Artificial Sequence
  Description of Artificial Sequence: Synthetic oligonucleotide
  Sense strand starting at position 3579 of SEQ ID NO: 1885860
gaugcauggucccugaaga

SEQ ID NO: 2373145 - RNA, 19 nt, Artificial Sequence
  Description of Artificial Sequence: Synthetic oligonucleotide
  Antisense strand to SEQ ID NO: 2373144
ucuucagggaccaugcauc

SEQ ID NO: 2373146 - RNA, 19 nt, Artificial Sequence
  Description of Artificial Sequence: Synthetic oligonucleotide
  Sense strand starting at position 3580 of SEQ ID NO: 1885860
augcauggucccugaagaa

SEQ ID NO: 2373147 - RNA, 19 nt, Artificial Sequence
  Description of Artificial Sequence: Synthetic oligonucleotide
  Antisense strand to SEQ ID NO: 2373146
uucuucagggaccaugcau

SEQ ID NO: 2373148 - RNA, 19 nt, Artificial Sequence
  Description of Artificial Sequence: Synthetic oligonucleotide
  Sense strand starting at position 3692 of SEQ ID NO: 1885860
acgaauucuacaggaggca

SEQ ID NO: 2373149 - RNA, 19 nt, Artificial Sequence
  Description of Artificial Sequence: Synthetic oligonucleotide
  Antisense strand to SEQ ID NO: 2373148
ugccuccuguagaauucgu

SEQ ID NO: 2373150 - RNA, 19 nt, Artificial Sequence
  Description of Artificial Sequence: Synthetic oligonucleotide
  Sense strand starting at position 3758 of SEQ ID NO: 1885860
agcacaacuuugcugaaau

SEQ ID NO: 2373151 - RNA, 19 nt, Artificial Sequence
  Description of Artificial Sequence: Synthetic oligonucleotide
  Antisense strand to SEQ ID NO: 2373150
auuucagcaaaguugugcu

SEQ ID NO: 2373152 - RNA, 19 nt, Artificial Sequence
  Description of Artificial Sequence: Synthetic oligonucleotide
  Sense strand starting at position 3920 of SEQ ID NO: 1885860
ugagucuauggcugaugga

SEQ ID NO: 2373153 - RNA, 19 nt, Artificial Sequence
  Description of Artificial Sequence: Synthetic oligonucleotide
  Antisense strand to SEQ ID NO: 2373152
uccaucagccauagacuca

SEQ ID NO: 2373154 - RNA, 19 nt, Artificial Sequence
  Description of Artificial Sequence: Synthetic oligonucleotide
  Sense strand starting at position 3921 of SEQ ID NO: 1885860
gagucuauggcugauggaa

SEQ ID NO: 2373155 - RNA, 19 nt, Artificial Sequence
  Description of Artificial Sequence: Synthetic oligonucleotide
  Antisense strand to SEQ ID NO: 2373154
uuccaucagccauagacuc

SEQ ID NO: 2373156 - RNA, 19 nt, Artificial Sequence
  Description of Artificial Sequence: Synthetic oligonucleotide
  Sense strand starting at position 24 of SEQ ID NO: 1885861
gggagugauugaaguguag

SEQ ID NO: 2373157 - RNA, 19 nt, Artificial Sequence
  Description of Artificial Sequence: Synthetic oligonucleotide
  Antisense strand to SEQ ID NO: 2373156
cuacacuucaaucacuccc

SEQ ID NO: 2373158 - RNA, 19 nt, Artificial Sequence
  Description of Artificial Sequence: Synthetic oligonucleotide
  Sense strand starting at position 695 of SEQ ID NO: 1885861
gacaguauuaagugacgga

SEQ ID NO: 2373159 - RNA, 19 nt, Artificial Sequence
  Description of Artificial Sequence: Synthetic oligonucleotide
  Antisense strand to SEQ ID NO: 2373158
uccgucacuuaauacuguc

SEQ ID NO: 2373160 - RNA, 19 nt, Artificial Sequence
  Description of Artificial Sequence: Synthetic oligonucleotide
  Sense strand starting at position 699 of SEQ ID NO: 1885861
guauuaagugacggaauug

SEQ ID NO: 2373161 - RNA, 19 nt, Artificial Sequence
  Description of Artificial Sequence: Synthetic oligonucleotide
  Antisense strand to SEQ ID NO: 2373160
caauuccgucacuuaauac

SEQ ID NO: 2373162 - RNA, 19 nt, Artificial Sequence
  Description of Artificial Sequence: Synthetic oligonucleotide
  Sense strand starting at position 708 of SEQ ID NO: 1885861
gacggaauugcauaggcaa

SEQ ID NO: 2373163 - RNA, 19 nt, Artificial Sequence
  Description of Artificial Sequence: Synthetic oligonucleotide
  Antisense strand to SEQ ID NO: 2373162
uugccuaugcaauuccguc

SEQ ID NO: 2373164 - RNA, 19 nt, Artificial Sequence
  Description of Artificial Sequence: Synthetic oligonucleotide
  Sense strand starting at position 773 of SEQ ID NO: 1885861
acaugaaagcuuugcccaa

SEQ ID NO: 2373165 - RNA, 19 nt, Artificial Sequence
  Description of Artificial Sequence: Synthetic oligonucleotide
  Antisense strand to SEQ ID NO: 2373164
uugggcaaagcuuucaugu

SEQ ID NO: 2373166 - RNA, 19 nt, Artificial Sequence
  Description of Artificial Sequence: Synthetic oligonucleotide
  Sense strand starting at position 805 of SEQ ID NO: 1885861
cuaaauuguagauguggga

SEQ ID NO: 2373167 - RNA, 19 nt, Artificial Sequence
  Description of Artificial Sequence: Synthetic oligonucleotide
  Antisense strand to SEQ ID NO: 2373166
ucccacaucuacaauuuag

SEQ ID NO: 2373168 - RNA, 19 nt, Artificial Sequence
  Description of Artificial Sequence: Synthetic oligonucleotide
  Sense strand starting at position 843 of SEQ ID NO: 1885861
cuggguucucaguagcauu

SEQ ID NO: 2373169 - RNA, 19 nt, Artificial Sequence
  Description of Artificial Sequence: Synthetic oligonucleotide
  Antisense strand to SEQ ID NO: 2373168
aaugcuacugagaacccag

SEQ ID NO: 2373170 - RNA, 19 nt, Artificial Sequence
  Description of Artificial Sequence: Synthetic oligonucleotide
  Sense strand starting at position 853 of SEQ ID NO: 1885861
aguagcauuugcuccugaa

SEQ ID NO: 2373171 - RNA, 19 nt, Artificial Sequence
  Description of Artificial Sequence: Synthetic oligonucleotide
  Antisense strand to SEQ ID NO: 2373170
uucaggagcaaaugcuacu

SEQ ID NO: 2373172 - RNA, 19 nt, Artificial Sequence
  Description of Artificial Sequence: Synthetic oligonucleotide
  Sense strand starting at position 986 of SEQ ID NO: 1885861
aggaaauaguucuugccau

SEQ ID NO: 2373173 - RNA, 19 nt, Artificial Sequence
  Description of Artificial Sequence: Synthetic oligonucleotide
  Antisense strand to SEQ ID NO: 2373172
auggcaagaacuauuuccu

SEQ ID NO: 2373174 - RNA, 19 nt, Artificial Sequence
  Description of Artificial Sequence: Synthetic oligonucleotide
  Sense strand starting at position 2128 of SEQ ID NO: 1885861
cgcuaaccucaauggucau

SEQ ID NO: 2373175 - RNA, 19 nt, Artificial Sequence
  Description of Artificial Sequence: Synthetic oligonucleotide
  Antisense strand to SEQ ID NO: 2373174
augaccauugagguuagcg

SEQ ID NO: 2373176 - RNA, 19 nt, Artificial Sequence
  Description of Artificial Sequence: Synthetic oligonucleotide
  Sense strand starting at position 2192 of SEQ ID NO: 1885861
uguaaagauuaccaucaag

SEQ ID NO: 2373177 - RNA, 19 nt, Artificial Sequence
  Description of Artificial Sequence: Synthetic oligonucleotide
  Antisense strand to SEQ ID NO: 2373176
cuugaugguaaucuuuaca

SEQ ID NO: 2373178 - RNA, 19 nt, Artificial Sequence
  Description of Artificial Sequence: Synthetic oligonucleotide
  Sense strand starting at position 2282 of SEQ ID NO: 1885861
acagucaugauguacagua

SEQ ID NO: 2373179 - RNA, 19 nt, Artificial Sequence
  Description of Artificial Sequence: Synthetic oligonucleotide
  Antisense strand to SEQ ID NO: 2373178
uacuguacaucaugacugu

SEQ ID NO: 2373180 - RNA, 19 nt, Artificial Sequence
  Description of Artificial Sequence: Synthetic oligonucleotide
  Sense strand starting at position 2284 of SEQ ID NO: 1885861
agucaugauguacaguaua

SEQ ID NO: 2373181 - RNA, 19 nt, Artificial Sequence
  Description of Artificial Sequence: Synthetic oligonucleotide
  Antisense strand to SEQ ID NO: 2373180
uauacuguacaucaugacu

SEQ ID NO: 2373182 - RNA, 19 nt, Artificial Sequence
  Description of Artificial Sequence: Synthetic oligonucleotide
  Sense strand starting at position 2440 of SEQ ID NO: 1885861
uagaaagcaguauguaaga

SEQ ID NO: 2373183 - RNA, 19 nt, Artificial Sequence
  Description of Artificial Sequence: Synthetic oligonucleotide
  Antisense strand to SEQ ID NO: 2373182
ucuuacauacugcuuucua

SEQ ID NO: 2373184 - RNA, 19 nt, Artificial Sequence
  Description of Artificial Sequence: Synthetic oligonucleotide
  Sense strand starting at position 2553 of SEQ ID NO: 1885861
agaucauacugguuuacag

SEQ ID NO: 2373185 - RNA, 19 nt, Artificial Sequence
  Description of Artificial Sequence: Synthetic oligonucleotide
  Antisense strand to SEQ ID NO: 2373184
cuguaaaccaguaugaucu

SEQ ID NO: 2373186 - RNA, 19 nt, Artificial Sequence
  Description of Artificial Sequence: Synthetic oligonucleotide
  Sense strand starting at position 2629 of SEQ ID NO: 1885861
guagauaccugauuaccaa

SEQ ID NO: 2373187 - RNA, 19 nt, Artificial Sequence
  Description of Artificial Sequence: Synthetic oligonucleotide
  Antisense strand to SEQ ID NO: 2373186
uugguaaucagguaucuac

SEQ ID NO: 2373188 - RNA, 19 nt, Artificial Sequence
  Description of Artificial Sequence: Synthetic oligonucleotide
  Sense strand starting at position 3031 of SEQ ID NO: 1885861
ggccuauacuuguuacuuu

SEQ ID NO: 2373189 - RNA, 19 nt, Artificial Sequence
  Description of Artificial Sequence: Synthetic oligonucleotide
  Antisense strand to SEQ ID NO: 2373188
aaaguaacaaguauaggcc

SEQ ID NO: 2373190 - RNA, 19 nt, Artificial Sequence
  Description of Artificial Sequence: Synthetic oligonucleotide
  Sense strand starting at position 3097 of SEQ ID NO: 1885861
guuugaugcuucuuacuuu

SEQ ID NO: 2373191 - RNA, 19 nt, Artificial Sequence
  Description of Artificial Sequence: Synthetic oligonucleotide
  Antisense strand to SEQ ID NO: 2373190
aaaguaagaagcaucaaac

SEQ ID NO: 2373192 - RNA, 19 nt, Artificial Sequence
  Description of Artificial Sequence: Synthetic oligonucleotide
  Sense strand starting at position 3130 of SEQ ID NO: 1885861
ggaccuagauaucaacuuu

SEQ ID NO: 2373193 - RNA, 19 nt, Artificial Sequence
  Description of Artificial Sequence: Synthetic oligonucleotide
  Antisense strand to SEQ ID NO: 2373192
aaaguugauaucuaggucc

SEQ ID NO: 2373194 - RNA, 19 nt, Artificial Sequence
  Description of Artificial Sequence: Synthetic oligonucleotide
  Sense strand starting at position 3177 of SEQ ID NO: 1885861
guauauaaugcugacuuaa

SEQ ID NO: 2373195 - RNA, 19 nt, Artificial Sequence
  Description of Artificial Sequence: Synthetic oligonucleotide
  Antisense strand to SEQ ID NO: 2373194
uuaagucagcauuauauac

SEQ ID NO: 2373196 - RNA, 19 nt, Artificial Sequence
  Description of Artificial Sequence: Synthetic oligonucleotide
  Sense strand starting at position 3186 of SEQ ID NO: 1885861
gcugacuuaauauggcaga

SEQ ID NO: 2373197 - RNA, 19 nt, Artificial Sequence
  Description of Artificial Sequence: Synthetic oligonucleotide
  Antisense strand to SEQ ID NO: 2373196
ucugccauauuaagucagc

SEQ ID NO: 2373198 - RNA, 19 nt, Artificial Sequence
  Description of Artificial Sequence: Synthetic oligonucleotide
  Sense strand starting at position 3191 of SEQ ID NO: 1885861
cuuaauauggcagauaucu

SEQ ID NO: 2373199 - RNA, 19 nt, Artificial Sequence
  Description of Artificial Sequence: Synthetic oligonucleotide
  Antisense strand to SEQ ID NO: 2373198
agauaucugccauauuaag

SEQ ID NO: 2373200 - RNA, 19 nt, Artificial Sequence
  Description of Artificial Sequence: Synthetic oligonucleotide
  Sense strand starting at position 3207 of SEQ ID NO: 1885861
ucugguaccucauauuuau

SEQ ID NO: 2373201 - RNA, 19 nt, Artificial Sequence
  Description of Artificial Sequence: Synthetic oligonucleotide
  Antisense strand to SEQ ID NO: 2373200
auaaauaugagguaccaga

SEQ ID NO: 2373202 - RNA, 19 nt, Artificial Sequence
  Description of Artificial Sequence: Synthetic oligonucleotide
  Sense strand starting at position 3220 of SEQ ID NO: 1885861
auuuaugcauaugagagua

SEQ ID NO: 2373203 - RNA, 19 nt, Artificial Sequence
  Description of Artificial Sequence: Synthetic oligonucleotide
  Antisense strand to SEQ ID NO: 2373202
uacucucauaugcauaaau

SEQ ID NO: 2373204 - RNA, 19 nt, Artificial Sequence
  Description of Artificial Sequence: Synthetic oligonucleotide
  Sense strand starting at position 3228 of SEQ ID NO: 1885861
auaugagaguaagaacaua

SEQ ID NO: 2373205 - RNA, 19 nt, Artificial Sequence
  Description of Artificial Sequence: Synthetic oligonucleotide
  Antisense strand to SEQ ID NO: 2373204
uauguucuuacucucauau

SEQ ID NO: 2373206 - RNA, 19 nt, Artificial Sequence
  Description of Artificial Sequence: Synthetic oligonucleotide
  Sense strand starting at position 3256 of SEQ ID NO: 1885861
gccagaaacaugcaugguu

SEQ ID NO: 2373207 - RNA, 19 nt, Artificial Sequence
  Description of Artificial Sequence: Synthetic oligonucleotide
  Antisense strand to SEQ ID NO: 2373206
aaccaugcauguuucuggc

SEQ ID NO: 2373208 - RNA, 19 nt, Artificial Sequence
  Description of Artificial Sequence: Synthetic oligonucleotide
  Sense strand starting at position 3259 of SEQ ID NO: 1885861
agaaacaugcaugguucua

SEQ ID NO: 2373209 - RNA, 19 nt, Artificial Sequence
  Description of Artificial Sequence: Synthetic oligonucleotide
  Antisense strand to SEQ ID NO: 2373208
uagaaccaugcauguuucu

SEQ ID NO: 2373210 - RNA, 19 nt, Artificial Sequence
  Description of Artificial Sequence: Synthetic oligonucleotide
  Sense strand starting at position 3291 of SEQ ID NO: 1885861
uuagaaagcucuuuguucu

SEQ ID NO: 2373211 - RNA, 19 nt, Artificial Sequence
  Description of Artificial Sequence: Synthetic oligonucleotide
  Antisense strand to SEQ ID NO: 2373210
agaacaaagagcuuucuaa

SEQ ID NO: 2373212 - RNA, 19 nt, Artificial Sequence
  Description of Artificial Sequence: Synthetic oligonucleotide
  Sense strand starting at position 3337 of SEQ ID NO: 1885861
uaaacaugugguggcauua

SEQ ID NO: 2373213 - RNA, 19 nt, Artificial Sequence
  Description of Artificial Sequence: Synthetic oligonucleotide
  Antisense strand to SEQ ID NO: 2373212
uaaugccaccacauguuua

SEQ ID NO: 2373214 - RNA, 19 nt, Artificial Sequence
  Description of Artificial Sequence: Synthetic oligonucleotide
  Sense strand starting at position 3458 of SEQ ID NO: 1885861
guugaauauucuccaacug

SEQ ID NO: 2373215 - RNA, 19 nt, Artificial Sequence
  Description of Artificial Sequence: Synthetic oligonucleotide
  Antisense strand to SEQ ID NO: 2373214
caguuggagaauauucaac

SEQ ID NO: 2373216 - RNA, 19 nt, Artificial Sequence
  Description of Artificial Sequence: Synthetic oligonucleotide
  Sense strand starting at position 3543 of SEQ ID NO: 1885861
auaauauuguaagcagaga

SEQ ID NO: 2373217 - RNA, 19 nt, Artificial Sequence
  Description of Artificial Sequence: Synthetic oligonucleotide
  Antisense strand to SEQ ID NO: 2373216
ucucugcuuacaauauuau

SEQ ID NO: 2373218 - RNA, 19 nt, Artificial Sequence
  Description of Artificial Sequence: Synthetic oligonucleotide
  Sense strand starting at position 3556 of SEQ ID NO: 1885861
cagagaccuugauauauag

SEQ ID NO: 2373219 - RNA, 19 nt, Artificial Sequence
  Description of Artificial Sequence: Synthetic oligonucleotide
  Antisense strand to SEQ ID NO: 2373218
cuauauaucaaggucucug

SEQ ID NO: 2373220 - RNA, 19 nt, Artificial Sequence
  Description of Artificial Sequence: Synthetic oligonucleotide
  Sense strand starting at position 3579 of SEQ ID NO: 1885861
ucaaguauuugagaaagaa

SEQ ID NO: 2373221 - RNA, 19 nt, Artificial Sequence
  Description of Artificial Sequence: Synthetic oligonucleotide
  Antisense strand to SEQ ID NO: 2373220
uucuuucucaaauacuuga

SEQ ID NO: 2373222 - RNA, 19 nt, Artificial Sequence
  Description of Artificial Sequence: Synthetic oligonucleotide
  Sense strand starting at position 3705 of SEQ ID NO: 1885861
guaggaagagccugaaacu

SEQ ID NO: 2373223 - RNA, 19 nt, Artificial Sequence
  Description of Artificial Sequence: Synthetic oligonucleotide
  Antisense strand to SEQ ID NO: 2373222
aguuucaggcucuuccuac

SEQ ID NO: 2373224 - RNA, 19 nt, Artificial Sequence
  Description of Artificial Sequence: Synthetic oligonucleotide
  Sense strand starting at position 3752 of SEQ ID NO: 1885861
ucuggauuacauugaauac

SEQ ID NO: 2373225 - RNA, 19 nt, Artificial Sequence
  Description of Artificial Sequence: Synthetic oligonucleotide
  Antisense strand to SEQ ID NO: 2373224
guauucaauguaauccaga

SEQ ID NO: 2373226 - RNA, 19 nt, Artificial Sequence
  Description of Artificial Sequence: Synthetic oligonucleotide
  Sense strand starting at position 3898 of SEQ ID NO: 1885861
cauugaggagacugucuua

SEQ ID NO: 2373227 - RNA, 19 nt, Artificial Sequence
  Description of Artificial Sequence: Synthetic oligonucleotide
  Antisense strand to SEQ ID NO: 2373226
uaagacagucuccucaaug

SEQ ID NO: 2373228 - RNA, 19 nt, Artificial Sequence
  Description of Artificial Sequence: Synthetic oligonucleotide
  Sense strand starting at position 3908 of SEQ ID NO: 1885861
acugucuuaagcuaggaga

SEQ ID NO: 2373229 - RNA, 19 nt, Artificial Sequence
  Description of Artificial Sequence: Synthetic oligonucleotide
  Antisense strand to SEQ ID NO: 2373228
ucuccuagcuuaagacagu

SEQ ID NO: 2373230 - RNA, 19 nt, Artificial Sequence
  Description of Artificial Sequence: Synthetic oligonucleotide
  Sense strand starting at position 3910 of SEQ ID NO: 1885861
ugucuuaagcuaggagaug

SEQ ID NO: 2373231 - RNA, 19 nt, Artificial Sequence
  Description of Artificial Sequence: Synthetic oligonucleotide
  Antisense strand to SEQ ID NO: 2373230
caucuccuagcuuaagaca

SEQ ID NO: 2373232 - RNA, 19 nt, Artificial Sequence
  Description of Artificial Sequence: Synthetic oligonucleotide
  Sense strand starting at position 3927 of SEQ ID NO: 1885861
ugaagacuuguaugcaagu

SEQ ID NO: 2373233 - RNA, 19 nt, Artificial Sequence
  Description of Artificial Sequence: Synthetic oligonucleotide
  Antisense strand to SEQ ID NO: 2373232
acuugcauacaagucuuca

SEQ ID NO: 2373234 - RNA, 19 nt, Artificial Sequence
  Description of Artificial Sequence: Synthetic oligonucleotide
  Sense strand starting at position 3943 of SEQ ID NO: 1885861
aguguuuauaaacgaaggu

SEQ ID NO: 2373235 - RNA, 19 nt, Artificial Sequence
  Description of Artificial Sequence: Synthetic oligonucleotide
  Antisense strand to SEQ ID NO: 2373234
accuucguuuauaaacacu

SEQ ID NO: 2373236 - RNA, 19 nt, Artificial Sequence
  Description of Artificial Sequence: Synthetic oligonucleotide
  Sense strand starting at position 114 of SEQ ID NO: 1885862
ccgucucuauaaguaaaua

SEQ ID NO: 2373237 - RNA, 19 nt, Artificial Sequence
  Description of Artificial Sequence: Synthetic oligonucleotide
  Antisense strand to SEQ ID NO: 2373236
uauuuacuuauagagacgg

SEQ ID NO: 2373238 - RNA, 19 nt, Artificial Sequence
  Description of Artificial Sequence: Synthetic oligonucleotide
  Sense strand starting at position 234 of SEQ ID NO: 1885862
acaaauaguuacgcugaau

SEQ ID NO: 2373239 - RNA, 19 nt, Artificial Sequence
  Description of Artificial Sequence: Synthetic oligonucleotide
  Antisense strand to SEQ ID NO: 2373238
auucagcguaacuauuugu

SEQ ID NO: 2373240 - RNA, 19 nt, Artificial Sequence
  Description of Artificial Sequence: Synthetic oligonucleotide
  Sense strand starting at position 237 of SEQ ID NO: 1885862
aauaguuacgcugaauacu

SEQ ID NO: 2373241 - RNA, 19 nt, Artificial Sequence
  Description of Artificial Sequence: Synthetic oligonucleotide
  Antisense strand to SEQ ID NO: 2373240
aguauucagcguaacuauu

SEQ ID NO: 2373242 - RNA, 19 nt, Artificial Sequence
  Description of Artificial Sequence: Synthetic oligonucleotide
  Sense strand starting at position 574 of SEQ ID NO: 1885862
cggccugaauacucauauu

SEQ ID NO: 2373243 - RNA, 19 nt, Artificial Sequence
  Description of Artificial Sequence: Synthetic oligonucleotide
  Antisense strand to SEQ ID NO: 2373242
aauaugaguauucaggccg

SEQ ID NO: 2373244 - RNA, 19 nt, Artificial Sequence
  Description of Artificial Sequence: Synthetic oligonucleotide
  Sense strand starting at position 704 of SEQ ID NO: 1885862
aggguuuauuaacuuguca

SEQ ID NO: 2373245 - RNA, 19 nt, Artificial Sequence
  Description of Artificial Sequence: Synthetic oligonucleotide
  Antisense strand to SEQ ID NO: 2373244
ugacaaguuaauaaacccu

SEQ ID NO: 2373246 - RNA, 19 nt, Artificial Sequence
  Description of Artificial Sequence: Synthetic oligonucleotide
  Sense strand starting at position 942 of SEQ ID NO: 1885862
ugcggcagcauuuauaauu

SEQ ID NO: 2373247 - RNA, 19 nt, Artificial Sequence
  Description of Artificial Sequence: Synthetic oligonucleotide
  Antisense strand to SEQ ID NO: 2373246
aauuauaaaugcugccgca

SEQ ID NO: 2373248 - RNA, 19 nt, Artificial Sequence
  Description of Artificial Sequence: Synthetic oligonucleotide
  Sense strand starting at position 1013 of SEQ ID NO: 1885862
gguaucuagucucuggaaa

SEQ ID NO: 2373249 - RNA, 19 nt, Artificial Sequence
  Description of Artificial Sequence: Synthetic oligonucleotide
  Antisense strand to SEQ ID NO: 2373248
uuuccagagacuagauacc

SEQ ID NO: 2373250 - RNA, 19 nt, Artificial Sequence
  Description of Artificial Sequence: Synthetic oligonucleotide
  Sense strand starting at position 1014 of SEQ ID NO: 1885862
guaucuagucucuggaaag

SEQ ID NO: 2373251 - RNA, 19 nt, Artificial Sequence
  Description of Artificial Sequence: Synthetic oligonucleotide
  Antisense strand to SEQ ID NO: 2373250
cuuuccagagacuagauac

SEQ ID NO: 2373252 - RNA, 19 nt, Artificial Sequence
  Description of Artificial Sequence: Synthetic oligonucleotide
  Sense strand starting at position 1080 of SEQ ID NO: 1885862
uccaguucuggcuauaaca

SEQ ID NO: 2373253 - RNA, 19 nt, Artificial Sequence
  Description of Artificial Sequence: Synthetic oligonucleotide
  Antisense strand to SEQ ID NO: 2373252
uguuauagccagaacugga

SEQ ID NO: 2373254 - RNA, 19 nt, Artificial Sequence
  Description of Artificial Sequence: Synthetic oligonucleotide
  Sense strand starting at position 1130 of SEQ ID NO: 1885862
augaaacuguggucaacaa

SEQ ID NO: 2373255 - RNA, 19 nt, Artificial Sequence
  Description of Artificial Sequence: Synthetic oligonucleotide
  Antisense strand to SEQ ID NO: 2373254
uuguugaccacaguuucau

SEQ ID NO: 2373256 - RNA, 19 nt, Artificial Sequence
  Description of Artificial Sequence: Synthetic oligonucleotide
  Sense strand starting at position 1217 of SEQ ID NO: 1885862
ucuaucucguucccagaga

SEQ ID NO: 2373257 - RNA, 19 nt, Artificial Sequence
  Description of Artificial Sequence: Synthetic oligonucleotide
  Antisense strand to SEQ ID NO: 2373256
ucucugggaacgagauaga

SEQ ID NO: 2373258 - RNA, 19 nt, Artificial Sequence
  Description of Artificial Sequence: Synthetic oligonucleotide
  Sense strand starting at position 1492 of SEQ ID NO: 1885862
ucacgaaacgcugguagaa

SEQ ID NO: 2373259 - RNA, 19 nt, Artificial Sequence
  Description of Artificial Sequence: Synthetic oligonucleotide
  Antisense strand to SEQ ID NO: 2373258
uucuaccagcguuucguga

SEQ ID NO: 2373260 - RNA, 19 nt, Artificial Sequence
  Description of Artificial Sequence: Synthetic oligonucleotide
  Sense strand starting at position 1545 of SEQ ID NO: 1885862
accagaaucgccugaauca

SEQ ID NO: 2373261 - RNA, 19 nt, Artificial Sequence
  Description of Artificial Sequence: Synthetic oligonucleotide
  Antisense strand to SEQ ID NO: 2373260
ugauucaggcgauucuggu

SEQ ID NO: 2373262 - RNA, 19 nt, Artificial Sequence
  Description of Artificial Sequence: Synthetic oligonucleotide
  Sense strand starting at position 1546 of SEQ ID NO: 1885862
ccagaaucgccugaaucau

SEQ ID NO: 2373263 - RNA, 19 nt, Artificial Sequence
  Description of Artificial Sequence: Synthetic oligonucleotide
  Antisense strand to SEQ ID NO: 2373262
augauucaggcgauucugg

SEQ ID NO: 2373264 - RNA, 19 nt, Artificial Sequence
  Description of Artificial Sequence: Synthetic oligonucleotide
  Sense strand starting at position 1592 of SEQ ID NO: 1885862
cggcuacucccagaaagcu

SEQ ID NO: 2373265 - RNA, 19 nt, Artificial Sequence
  Description of Artificial Sequence: Synthetic oligonucleotide
  Antisense strand to SEQ ID NO: 2373264
agcuuucugggaguagccg

SEQ ID NO: 2373266 - RNA, 19 nt, Artificial Sequence
  Description of Artificial Sequence: Synthetic oligonucleotide
  Sense strand starting at position 1986 of SEQ ID NO: 1885862
gccguucgucgguuaugga

SEQ ID NO: 2373267 - RNA, 19 nt, Artificial Sequence
  Description of Artificial Sequence: Synthetic oligonucleotide
  Antisense strand to SEQ ID NO: 2373266
uccauaaccgacgaacggc

SEQ ID NO: 2373268 - RNA, 19 nt, Artificial Sequence
  Description of Artificial Sequence: Synthetic oligonucleotide
  Sense strand starting at position 2032 of SEQ ID NO: 1885862
auuauaaugcugcagugaa

SEQ ID NO: 2373269 - RNA, 19 nt, Artificial Sequence
  Description of Artificial Sequence: Synthetic oligonucleotide
  Antisense strand to SEQ ID NO: 2373268
uucacugcagcauuauaau

SEQ ID NO: 2373270 - RNA, 19 nt, Artificial Sequence
  Description of Artificial Sequence: Synthetic oligonucleotide
  Sense strand starting at position 2098 of SEQ ID NO: 1885862
cggugaaugguggaauuaa

SEQ ID NO: 2373271 - RNA, 19 nt, Artificial Sequence
  Description of Artificial Sequence: Synthetic oligonucleotide
  Antisense strand to SEQ ID NO: 2373270
uuaauuccaccauucaccg

SEQ ID NO: 2373272 - RNA, 19 nt, Artificial Sequence
  Description of Artificial Sequence: Synthetic oligonucleotide
  Sense strand starting at position 2099 of SEQ ID NO: 1885862
ggugaaugguggaauuaag

SEQ ID NO: 2373273 - RNA, 19 nt, Artificial Sequence
  Description of Artificial Sequence: Synthetic oligonucleotide
  Antisense strand to SEQ ID NO: 2373272
cuuaauuccaccauucacc

SEQ ID NO: 2373274 - RNA, 19 nt, Artificial Sequence
  Description of Artificial Sequence: Synthetic oligonucleotide
  Sense strand starting at position 2206 of SEQ ID NO: 1885862
ggagcauguccguauacug

SEQ ID NO: 2373275 - RNA, 19 nt, Artificial Sequence
  Description of Artificial Sequence: Synthetic oligonucleotide
  Antisense strand to SEQ ID NO: 2373274
caguauacggacaugcucc

SEQ ID NO: 2373276 - RNA, 19 nt, Artificial Sequence
  Description of Artificial Sequence: Synthetic oligonucleotide
  Sense strand starting at position 2235 of SEQ ID NO: 1885862
agcggauacagaugcaaau

SEQ ID NO: 2373277 - RNA, 19 nt, Artificial Sequence
  Description of Artificial Sequence: Synthetic oligonucleotide
  Antisense strand to SEQ ID NO: 2373276
auuugcaucuguauccgcu

SEQ ID NO: 2373278 - RNA, 19 nt, Artificial Sequence
  Description of Artificial Sequence: Synthetic oligonucleotide
  Sense strand starting at position 2261 of SEQ ID NO: 1885862
gaggacuguuuggcgauau

SEQ ID NO: 2373279 - RNA, 19 nt, Artificial Sequence
  Description of Artificial Sequence: Synthetic oligonucleotide
  Antisense strand to SEQ ID NO: 2373278
auaucgccaaacaguccuc

SEQ ID NO: 2373280 - RNA, 19 nt, Artificial Sequence
  Description of Artificial Sequence: Synthetic oligonucleotide
  Sense strand starting at position 2265 of SEQ ID NO: 1885862
acuguuuggcgauauggau

SEQ ID NO: 2373281 - RNA, 19 nt, Artificial Sequence
  Description of Artificial Sequence: Synthetic oligonucleotide
  Antisense strand to SEQ ID NO: 2373280
auccauaucgccaaacagu

SEQ ID NO: 2373282 - RNA, 19 nt, Artificial Sequence
  Description of Artificial Sequence: Synthetic oligonucleotide
  Sense strand starting at position 2619 of SEQ ID NO: 1885862
cguuuccagcucuagaauu

SEQ ID NO: 2373283 - RNA, 19 nt, Artificial Sequence
  Description of Artificial Sequence: Synthetic oligonucleotide
  Antisense strand to SEQ ID NO: 2373282
aauucuagagcuggaaacg

SEQ ID NO: 2373284 - RNA, 19 nt, Artificial Sequence
  Description of Artificial Sequence: Synthetic oligonucleotide
  Sense strand starting at position 2646 of SEQ ID NO: 1885862
aaugauuguggauguguga

SEQ ID NO: 2373285 - RNA, 19 nt, Artificial Sequence
  Description of Artificial Sequence: Synthetic oligonucleotide
  Antisense strand to SEQ ID NO: 2373284
ucacacauccacaaucauu

SEQ ID NO: 2373286 - RNA, 19 nt, Artificial Sequence
  Description of Artificial Sequence: Synthetic oligonucleotide
  Sense strand starting at position 2668 of SEQ ID NO: 1885862
gauuuagccugaggaacau

SEQ ID NO: 2373287 - RNA, 19 nt, Artificial Sequence
  Description of Artificial Sequence: Synthetic oligonucleotide
  Antisense strand to SEQ ID NO: 2373286
auguuccucaggcuaaauc

SEQ ID NO: 2373288 - RNA, 19 nt, Artificial Sequence
  Description of Artificial Sequence: Synthetic oligonucleotide
  Sense strand starting at position 2791 of SEQ ID NO: 1885862
augagaaauugguuaagug

SEQ ID NO: 2373289 - RNA, 19 nt, Artificial Sequence
  Description of Artificial Sequence: Synthetic oligonucleotide
  Antisense strand to SEQ ID NO: 2373288
cacuuaaccaauuucucau

SEQ ID NO: 2373290 - RNA, 19 nt, Artificial Sequence
  Description of Artificial Sequence: Synthetic oligonucleotide
  Sense strand starting at position 2795 of SEQ ID NO: 1885862
gaaauugguuaagugcauu

SEQ ID NO: 2373291 - RNA, 19 nt, Artificial Sequence
  Description of Artificial Sequence: Synthetic oligonucleotide
  Antisense strand to SEQ ID NO: 2373290
aaugcacuuaaccaauuuc

SEQ ID NO: 2373292 - RNA, 19 nt, Artificial Sequence
  Description of Artificial Sequence: Synthetic oligonucleotide
  Sense strand starting at position 2808 of SEQ ID NO: 1885862
ugcauuguucuacauugaa

SEQ ID NO: 2373293 - RNA, 19 nt, Artificial Sequence
  Description of Artificial Sequence: Synthetic oligonucleotide
  Antisense strand to SEQ ID NO: 2373292
uucaauguagaacaaugca

SEQ ID NO: 2373294 - RNA, 19 nt, Artificial Sequence
  Description of Artificial Sequence: Synthetic oligonucleotide
  Sense strand starting at position 2863 of SEQ ID NO: 1885862
gggaaagauuuaugauacg

SEQ ID NO: 2373295 - RNA, 19 nt, Artificial Sequence
  Description of Artificial Sequence: Synthetic oligonucleotide
  Antisense strand to SEQ ID NO: 2373294
cguaucauaaaucuuuccc

SEQ ID NO: 2373296 - RNA, 19 nt, Artificial Sequence
  Description of Artificial Sequence: Synthetic oligonucleotide
  Sense strand starting at position 2866 of SEQ ID NO: 1885862
aaagauuuaugauacggaa

SEQ ID NO: 2373297 - RNA, 19 nt, Artificial Sequence
  Description of Artificial Sequence: Synthetic oligonucleotide
  Antisense strand to SEQ ID NO: 2373296
uuccguaucauaaaucuuu

SEQ ID NO: 2373298 - RNA, 19 nt, Artificial Sequence
  Description of Artificial Sequence: Synthetic oligonucleotide
  Sense strand starting at position 2869 of SEQ ID NO: 1885862
gauuuaugauacggaagug

SEQ ID NO: 2373299 - RNA, 19 nt, Artificial Sequence
  Description of Artificial Sequence: Synthetic oligonucleotide
  Antisense strand to SEQ ID NO: 2373298
cacuuccguaucauaaauc

SEQ ID NO: 2373300 - RNA, 19 nt, Artificial Sequence
  Description of Artificial Sequence: Synthetic oligonucleotide
  Sense strand starting at position 3004 of SEQ ID NO: 1885862
gagucaggguguuugaucu

SEQ ID NO: 2373301 - RNA, 19 nt, Artificial Sequence
  Description of Artificial Sequence: Synthetic oligonucleotide
  Antisense strand to SEQ ID NO: 2373300
agaucaaacacccugacuc

SEQ ID NO: 2373302 - RNA, 19 nt, Artificial Sequence
  Description of Artificial Sequence: Synthetic oligonucleotide
  Sense strand starting at position 3010 of SEQ ID NO: 1885862
ggguguuugaucuguacag

SEQ ID NO: 2373303 - RNA, 19 nt, Artificial Sequence
  Description of Artificial Sequence: Synthetic oligonucleotide
  Antisense strand to SEQ ID NO: 2373302
cuguacagaucaaacaccc

SEQ ID NO: 2373304 - RNA, 19 nt, Artificial Sequence
  Description of Artificial Sequence: Synthetic oligonucleotide
  Sense strand starting at position 3012 of SEQ ID NO: 1885862
guguuugaucuguacagga

SEQ ID NO: 2373305 - RNA, 19 nt, Artificial Sequence
  Description of Artificial Sequence: Synthetic oligonucleotide
  Antisense strand to SEQ ID NO: 2373304
uccuguacagaucaaacac

SEQ ID NO: 2373306 - RNA, 19 nt, Artificial Sequence
  Description of Artificial Sequence: Synthetic oligonucleotide
  Sense strand starting at position 3115 of SEQ ID NO: 1885862
gguguaauaucaguuuccu

SEQ ID NO: 2373307 - RNA, 19 nt, Artificial Sequence
  Description of Artificial Sequence: Synthetic oligonucleotide
  Antisense strand to SEQ ID NO: 2373306
aggaaacugauauuacacc

SEQ ID NO: 2373308 - RNA, 19 nt, Artificial Sequence
  Description of Artificial Sequence: Synthetic oligonucleotide
  Sense strand starting at position 3266 of SEQ ID NO: 1885862
acaucuuugggugguagga

SEQ ID NO: 2373309 - RNA, 19 nt, Artificial Sequence
  Description of Artificial Sequence: Synthetic oligonucleotide
  Antisense strand to SEQ ID NO: 2373308
uccuaccacccaaagaugu

SEQ ID NO: 2373310 - RNA, 19 nt, Artificial Sequence
  Description of Artificial Sequence: Synthetic oligonucleotide
  Sense strand starting at position 3276 of SEQ ID NO: 1885862
gugguaggauuaucaaguu

SEQ ID NO: 2373311 - RNA, 19 nt, Artificial Sequence
  Description of Artificial Sequence: Synthetic oligonucleotide
  Antisense strand to SEQ ID NO: 2373310
aacuugauaauccuaccac

SEQ ID NO: 2373312 - RNA, 19 nt, Artificial Sequence
  Description of Artificial Sequence: Synthetic oligonucleotide
  Sense strand starting at position 3375 of SEQ ID NO: 1885862
gggucuuacccagguugga

SEQ ID NO: 2373313 - RNA, 19 nt, Artificial Sequence
  Description of Artificial Sequence: Synthetic oligonucleotide
  Antisense strand to SEQ ID NO: 2373312
uccaaccuggguaagaccc

SEQ ID NO: 2373314 - RNA, 19 nt, Artificial Sequence
  Description of Artificial Sequence: Synthetic oligonucleotide
  Sense strand starting at position 3875 of SEQ ID NO: 1885862
gaggaagaauaucaaagaa

SEQ ID NO: 2373315 - RNA, 19 nt, Artificial Sequence
  Description of Artificial Sequence: Synthetic oligonucleotide
  Antisense strand to SEQ ID NO: 2373314
uucuuugauauucuuccuc

SEQ ID NO: 2373316 - RNA, 19 nt, Artificial Sequence
  Description of Artificial Sequence: Synthetic oligonucleotide
  Sense strand starting at position 143 of SEQ ID NO: 1885863
cugccaucuaguggugacu

SEQ ID NO: 2373317 - RNA, 19 nt, Artificial Sequence
  Description of Artificial Sequence: Synthetic oligonucleotide
  Antisense strand to SEQ ID NO: 2373316
agucaccacuagauggcag

SEQ ID NO: 2373318 - RNA, 19 nt, Artificial Sequence
  Description of Artificial Sequence: Synthetic oligonucleotide
  Sense strand starting at position 145 of SEQ ID NO: 1885863
gccaucuaguggugacuga

SEQ ID NO: 2373319 - RNA, 19 nt, Artificial Sequence
  Description of Artificial Sequence: Synthetic oligonucleotide
  Antisense strand to SEQ ID NO: 2373318
ucagucaccacuagauggc

SEQ ID NO: 2373320 - RNA, 19 nt, Artificial Sequence
  Description of Artificial Sequence: Synthetic oligonucleotide
  Sense strand starting at position 149 of SEQ ID NO: 1885863
ucuaguggugacugauguu

SEQ ID NO: 2373321 - RNA, 19 nt, Artificial Sequence
  Description of Artificial Sequence: Synthetic oligonucleotide
  Antisense strand to SEQ ID NO: 2373320
aacaucagucaccacuaga

SEQ ID NO: 2373322 - RNA, 19 nt, Artificial Sequence
  Description of Artificial Sequence: Synthetic oligonucleotide
  Sense strand starting at position 152 of SEQ ID NO: 1885863
aguggugacugauguuauu

SEQ ID NO: 2373323 - RNA, 19 nt, Artificial Sequence
  Description of Artificial Sequence: Synthetic oligonucleotide
  Antisense strand to SEQ ID NO: 2373322
aauaacaucagucaccacu

SEQ ID NO: 2373324 - RNA, 19 nt, Artificial Sequence
  Description of Artificial Sequence: Synthetic oligonucleotide
  Sense strand starting at position 155 of SEQ ID NO: 1885863
ggugacugauguuauuaua

SEQ ID NO: 2373325 - RNA, 19 nt, Artificial Sequence
  Description of Artificial Sequence: Synthetic oligonucleotide
  Antisense strand to SEQ ID NO: 2373324
uauaauaacaucagucacc

SEQ ID NO: 2373326 - RNA, 19 nt, Artificial Sequence
  Description of Artificial Sequence: Synthetic oligonucleotide
  Sense strand starting at position 158 of SEQ ID NO: 1885863
gacugauguuauuauacug

SEQ ID NO: 2373327 - RNA, 19 nt, Artificial Sequence
  Description of Artificial Sequence: Synthetic oligonucleotide
  Antisense strand to SEQ ID NO: 2373326
caguauaauaacaucaguc

SEQ ID NO: 2373328 - RNA, 19 nt, Artificial Sequence
  Description of Artificial Sequence: Synthetic oligonucleotide
  Sense strand starting at position 178 of SEQ ID NO: 1885863
uggguccauucucaaugau

SEQ ID NO: 2373329 - RNA, 19 nt, Artificial Sequence
  Description of Artificial Sequence: Synthetic oligonucleotide
  Antisense strand to SEQ ID NO: 2373328
aucauugagaauggaccca

SEQ ID NO: 2373330 - RNA, 19 nt, Artificial Sequence
  Description of Artificial Sequence: Synthetic oligonucleotide
  Sense strand starting at position 181 of SEQ ID NO: 1885863
guccauucucaaugauguu

SEQ ID NO: 2373331 - RNA, 19 nt, Artificial Sequence
  Description of Artificial Sequence: Synthetic oligonucleotide
  Antisense strand to SEQ ID NO: 2373330
aacaucauugagaauggac

SEQ ID NO: 2373332 - RNA, 19 nt, Artificial Sequence
  Description of Artificial Sequence: Synthetic oligonucleotide
  Sense strand starting at position 187 of SEQ ID NO: 1885863
ucucaaugauguuacugua

SEQ ID NO: 2373333 - RNA, 19 nt, Artificial Sequence
  Description of Artificial Sequence: Synthetic oligonucleotide
  Antisense strand to SEQ ID NO: 2373332
uacaguaacaucauugaga

SEQ ID NO: 2373334 - RNA, 19 nt, Artificial Sequence
  Description of Artificial Sequence: Synthetic oligonucleotide
  Sense strand starting at position 228 of SEQ ID NO: 1885863
uaugcaagauaucuguuga

SEQ ID NO: 2373335 - RNA, 19 nt, Artificial Sequence
  Description of Artificial Sequence: Synthetic oligonucleotide
  Antisense strand to SEQ ID NO: 2373334
ucaacagauaucuugcaua

SEQ ID NO: 2373336 - RNA, 19 nt, Artificial Sequence
  Description of Artificial Sequence: Synthetic oligonucleotide
  Sense strand starting at position 229 of SEQ ID NO: 1885863
augcaagauaucuguugag

SEQ ID NO: 2373337 - RNA, 19 nt, Artificial Sequence
  Description of Artificial Sequence: Synthetic oligonucleotide
  Antisense strand to SEQ ID NO: 2373336
cucaacagauaucuugcau

SEQ ID NO: 2373338 - RNA, 19 nt, Artificial Sequence
  Description of Artificial Sequence: Synthetic oligonucleotide
  Sense strand starting at position 232 of SEQ ID NO: 1885863
caagauaucuguugagugu

SEQ ID NO: 2373339 - RNA, 19 nt, Artificial Sequence
  Description of Artificial Sequence: Synthetic oligonucleotide
  Antisense strand to SEQ ID NO: 2373338
acacucaacagauaucuug

SEQ ID NO: 2373340 - RNA, 19 nt, Artificial Sequence
  Description of Artificial Sequence: Synthetic oligonucleotide
  Sense strand starting at position 233 of SEQ ID NO: 1885863
aagauaucuguugaguguu

SEQ ID NO: 2373341 - RNA, 19 nt, Artificial Sequence
  Description of Artificial Sequence: Synthetic oligonucleotide
  Antisense strand to SEQ ID NO: 2373340
aacacucaacagauaucuu

SEQ ID NO: 2373342 - RNA, 19 nt, Artificial Sequence
  Description of Artificial Sequence: Synthetic oligonucleotide
  Sense strand starting at position 262 of SEQ ID NO: 1885863
cagguauuguaccaggaag

SEQ ID NO: 2373343 - RNA, 19 nt, Artificial Sequence
  Description of Artificial Sequence: Synthetic oligonucleotide
  Antisense strand to SEQ ID NO: 2373342
cuuccugguacaauaccug

SEQ ID NO: 2373344 - RNA, 19 nt, Artificial Sequence
  Description of Artificial Sequence: Synthetic oligonucleotide
  Sense strand starting at position 264 of SEQ ID NO: 1885863
gguauuguaccaggaaguu

SEQ ID NO: 2373345 - RNA, 19 nt, Artificial Sequence
  Description of Artificial Sequence: Synthetic oligonucleotide
  Antisense strand to SEQ ID NO: 2373344
aacuuccugguacaauacc

SEQ ID NO: 2373346 - RNA, 19 nt, Artificial Sequence
  Description of Artificial Sequence: Synthetic oligonucleotide
  Sense strand starting at position 318 of SEQ ID NO: 1885863
guguaagcugcuuucccau

SEQ ID NO: 2373347 - RNA, 19 nt, Artificial Sequence
  Description of Artificial Sequence: Synthetic oligonucleotide
  Antisense strand to SEQ ID NO: 2373346
augggaaagcagcuuacac

SEQ ID NO: 2373348 - RNA, 19 nt, Artificial Sequence
  Description of Artificial Sequence: Synthetic oligonucleotide
  Sense strand starting at position 2532 of SEQ ID NO: 1885863
gggcucaaguaguuggaga

SEQ ID NO: 2373349 - RNA, 19 nt, Artificial Sequence
  Description of Artificial Sequence: Synthetic oligonucleotide
  Antisense strand to SEQ ID NO: 2373348
ucuccaacuacuugagccc

SEQ ID NO: 2373350 - RNA, 19 nt, Artificial Sequence
  Description of Artificial Sequence: Synthetic oligonucleotide
  Sense strand starting at position 2566 of SEQ ID NO: 1885863
gcuccuuaauggcaacaga

SEQ ID NO: 2373351 - RNA, 19 nt, Artificial Sequence
  Description of Artificial Sequence: Synthetic oligonucleotide
  Antisense strand to SEQ ID NO: 2373350
ucuguugccauuaaggagc

SEQ ID NO: 2373352 - RNA, 19 nt, Artificial Sequence
  Description of Artificial Sequence: Synthetic oligonucleotide
  Sense strand starting at position 2611 of SEQ ID NO: 1885863
gagacagagucuuucgcua

SEQ ID NO: 2373353 - RNA, 19 nt, Artificial Sequence
  Description of Artificial Sequence: Synthetic oligonucleotide
  Antisense strand to SEQ ID NO: 2373352
uagcgaaagacucugucuc

SEQ ID NO: 2373354 - RNA, 19 nt, Artificial Sequence
  Description of Artificial Sequence: Synthetic oligonucleotide
  Sense strand starting at position 2613 of SEQ ID NO: 1885863
gacagagucuuucgcuauc

SEQ ID NO: 2373355 - RNA, 19 nt, Artificial Sequence
  Description of Artificial Sequence: Synthetic oligonucleotide
  Antisense strand to SEQ ID NO: 2373354
gauagcgaaagacucuguc

SEQ ID NO: 2373356 - RNA, 19 nt, Artificial Sequence
  Description of Artificial Sequence: Synthetic oligonucleotide
  Sense strand starting at position 2734 of SEQ ID NO: 1885863
aggcgugugccgugacuaa

SEQ ID NO: 2373357 - RNA, 19 nt, Artificial Sequence
  Description of Artificial Sequence: Synthetic oligonucleotide
  Antisense strand to SEQ ID NO: 2373356
uuagucacggcacacgccu

SEQ ID NO: 2373358 - RNA, 19 nt, Artificial Sequence
  Description of Artificial Sequence: Synthetic oligonucleotide
  Sense strand starting at position 2735 of SEQ ID NO: 1885863
ggcgugugccgugacuaau

SEQ ID NO: 2373359 - RNA, 19 nt, Artificial Sequence
  Description of Artificial Sequence: Synthetic oligonucleotide
  Antisense strand to SEQ ID NO: 2373358
auuagucacggcacacgcc

SEQ ID NO: 2373360 - RNA, 19 nt, Artificial Sequence
  Description of Artificial Sequence: Synthetic oligonucleotide
  Sense strand starting at position 3027 of SEQ ID NO: 1885863
cuguauggcuucuuuauuu

SEQ ID NO: 2373361 - RNA, 19 nt, Artificial Sequence
  Description of Artificial Sequence: Synthetic oligonucleotide
  Antisense strand to SEQ ID NO: 2373360
aaauaaagaagccauacag

SEQ ID NO: 2373362 - RNA, 19 nt, Artificial Sequence
  Description of Artificial Sequence: Synthetic oligonucleotide
  Sense strand starting at position 3343 of SEQ ID NO: 1885863
cugccuggcuucuuauaga

SEQ ID NO: 2373363 - RNA, 19 nt, Artificial Sequence
  Description of Artificial Sequence: Synthetic oligonucleotide
  Antisense strand to SEQ ID NO: 2373362
ucuauaagaagccaggcag

SEQ ID NO: 2373364 - RNA, 19 nt, Artificial Sequence
  Description of Artificial Sequence: Synthetic oligonucleotide
  Sense strand starting at position 3348 of SEQ ID NO: 1885863
uggcuucuuauagaugguu

SEQ ID NO: 2373365 - RNA, 19 nt, Artificial Sequence
  Description of Artificial Sequence: Synthetic oligonucleotide
  Antisense strand to SEQ ID NO: 2373364
aaccaucuauaagaagcca

SEQ ID NO: 2373366 - RNA, 19 nt, Artificial Sequence
  Description of Artificial Sequence: Synthetic oligonucleotide
  Sense strand starting at position 3360 of SEQ ID NO: 1885863
gaugguuucucuuggugua

SEQ ID NO: 2373367 - RNA, 19 nt, Artificial Sequence
  Description of Artificial Sequence: Synthetic oligonucleotide
  Antisense strand to SEQ ID NO: 2373366
uacaccaagagaaaccauc

SEQ ID NO: 2373368 - RNA, 19 nt, Artificial Sequence
  Description of Artificial Sequence: Synthetic oligonucleotide
  Sense strand starting at position 3361 of SEQ ID NO: 1885863
augguuucucuugguguau

SEQ ID NO: 2373369 - RNA, 19 nt, Artificial Sequence
  Description of Artificial Sequence: Synthetic oligonucleotide
  Antisense strand to SEQ ID NO: 2373368
auacaccaagagaaaccau

SEQ ID NO: 2373370 - RNA, 19 nt, Artificial Sequence
  Description of Artificial Sequence: Synthetic oligonucleotide
  Sense strand starting at position 3363 of SEQ ID NO: 1885863
gguuucucuugguguaugu

SEQ ID NO: 2373371 - RNA, 19 nt, Artificial Sequence
  Description of Artificial Sequence: Synthetic oligonucleotide
  Antisense strand to SEQ ID NO: 2373370
acauacaccaagagaaacc

SEQ ID NO: 2373372 - RNA, 19 nt, Artificial Sequence
  Description of Artificial Sequence: Synthetic oligonucleotide
  Sense strand starting at position 3373 of SEQ ID NO: 1885863
gguguauguuuccuaggcu

SEQ ID NO: 2373373 - RNA, 19 nt, Artificial Sequence
  Description of Artificial Sequence: Synthetic oligonucleotide
  Antisense strand to SEQ ID NO: 2373372
agccuaggaaacauacacc

SEQ ID NO: 2373374 - RNA, 19 nt, Artificial Sequence
  Description of Artificial Sequence: Synthetic oligonucleotide
  Sense strand starting at position 3374 of SEQ ID NO: 1885863
guguauguuuccuaggcuu

SEQ ID NO: 2373375 - RNA, 19 nt, Artificial Sequence
  Description of Artificial Sequence: Synthetic oligonucleotide
  Antisense strand to SEQ ID NO: 2373374
aagccuaggaaacauacac

SEQ ID NO: 2373376 - RNA, 19 nt, Artificial Sequence
  Description of Artificial Sequence: Synthetic oligonucleotide
  Sense strand starting at position 3489 of SEQ ID NO: 1885863
uuugaaaucuaagguaaac

SEQ ID NO: 2373377 - RNA, 19 nt, Artificial Sequence
  Description of Artificial Sequence: Synthetic oligonucleotide
  Antisense strand to SEQ ID NO: 2373376
guuuaccuuagauuucaaa

SEQ ID NO: 2373378 - RNA, 19 nt, Artificial Sequence
  Description of Artificial Sequence: Synthetic oligonucleotide
  Sense strand starting at position 3579 of SEQ ID NO: 1885863
acagguguacuuugcuuua

SEQ ID NO: 2373379 - RNA, 19 nt, Artificial Sequence
  Description of Artificial Sequence: Synthetic oligonucleotide
  Antisense strand to SEQ ID NO: 2373378
uaaagcaaaguacaccugu

SEQ ID NO: 2373380 - RNA, 19 nt, Artificial Sequence
  Description of Artificial Sequence: Synthetic oligonucleotide
  Sense strand starting at position 3582 of SEQ ID NO: 1885863
gguguacuuugcuuuaugu

SEQ ID NO: 2373381 - RNA, 19 nt, Artificial Sequence
  Description of Artificial Sequence: Synthetic oligonucleotide
  Antisense strand to SEQ ID NO: 2373380
acauaaagcaaaguacacc

SEQ ID NO: 2373382 - RNA, 19 nt, Artificial Sequence
  Description of Artificial Sequence: Synthetic oligonucleotide
  Sense strand starting at position 3591 of SEQ ID NO: 1885863
ugcuuuauguguuugugac

SEQ ID NO: 2373383 - RNA, 19 nt, Artificial Sequence
  Description of Artificial Sequence: Synthetic oligonucleotide
  Antisense strand to SEQ ID NO: 2373382
gucacaaacacauaaagca

SEQ ID NO: 2373384 - RNA, 19 nt, Artificial Sequence
  Description of Artificial Sequence: Synthetic oligonucleotide
  Sense strand starting at position 3592 of SEQ ID NO: 1885863
gcuuuauguguuugugaca

SEQ ID NO: 2373385 - RNA, 19 nt, Artificial Sequence
  Description of Artificial Sequence: Synthetic oligonucleotide
  Antisense strand to SEQ ID NO: 2373384
ugucacaaacacauaaagc

SEQ ID NO: 2373386 - RNA, 19 nt, Artificial Sequence
  Description of Artificial Sequence: Synthetic oligonucleotide
  Sense strand starting at position 3595 of SEQ ID NO: 1885863
uuauguguuugugacacgu

SEQ ID NO: 2373387 - RNA, 19 nt, Artificial Sequence
  Description of Artificial Sequence: Synthetic oligonucleotide
  Antisense strand to SEQ ID NO: 2373386
acgugucacaaacacauaa

SEQ ID NO: 2373388 - RNA, 19 nt, Artificial Sequence
  Description of Artificial Sequence: Synthetic oligonucleotide
  Sense strand starting at position 3645 of SEQ ID NO: 1885863
ggagauaaauuuggcaauu

SEQ ID NO: 2373389 - RNA, 19 nt, Artificial Sequence
  Description of Artificial Sequence: Synthetic oligonucleotide
  Antisense strand to SEQ ID NO: 2373388
aauugccaaauuuaucucc

SEQ ID NO: 2373390 - RNA, 19 nt, Artificial Sequence
  Description of Artificial Sequence: Synthetic oligonucleotide
  Sense strand starting at position 3719 of SEQ ID NO: 1885863
gaucucugcucgccgcaau

SEQ ID NO: 2373391 - RNA, 19 nt, Artificial Sequence
  Description of Artificial Sequence: Synthetic oligonucleotide
  Antisense strand to SEQ ID NO: 2373390
auugcggcgagcagagauc

SEQ ID NO: 2373392 - RNA, 19 nt, Artificial Sequence
  Description of Artificial Sequence: Synthetic oligonucleotide
  Sense strand starting at position 178 of SEQ ID NO: 1885865
uuuagaugguuaguuaacu

SEQ ID NO: 2373393 - RNA, 19 nt, Artificial Sequence
  Description of Artificial Sequence: Synthetic oligonucleotide
  Antisense strand to SEQ ID NO: 2373392
aguuaacuaaccaucuaaa

SEQ ID NO: 2373394 - RNA, 19 nt, Artificial Sequence
  Description of Artificial Sequence: Synthetic oligonucleotide
  Sense strand starting at position 533 of SEQ ID NO: 1885865
auuucuucuugaggaauaa

SEQ ID NO: 2373395 - RNA, 19 nt, Artificial Sequence
  Description of Artificial Sequence: Synthetic oligonucleotide
  Antisense strand to SEQ ID NO: 2373394
uuauuccucaagaagaaau

SEQ ID NO: 2373396 - RNA, 19 nt, Artificial Sequence
  Description of Artificial Sequence: Synthetic oligonucleotide
  Sense strand starting at position 699 of SEQ ID NO: 1885865
uccucugucauauguggga

SEQ ID NO: 2373397 - RNA, 19 nt, Artificial Sequence
  Description of Artificial Sequence: Synthetic oligonucleotide
  Antisense strand to SEQ ID NO: 2373396
ucccacauaugacagagga

SEQ ID NO: 2373398 - RNA, 19 nt, Artificial Sequence
  Description of Artificial Sequence: Synthetic oligonucleotide
  Sense strand starting at position 856 of SEQ ID NO: 1885865
aguauuugauaacacggua

SEQ ID NO: 2373399 - RNA, 19 nt, Artificial Sequence
  Description of Artificial Sequence: Synthetic oligonucleotide
  Antisense strand to SEQ ID NO: 2373398
uaccguguuaucaaauacu

SEQ ID NO: 2373400 - RNA, 19 nt, Artificial Sequence
  Description of Artificial Sequence: Synthetic oligonucleotide
  Sense strand starting at position 984 of SEQ ID NO: 1885865
cuagcagauuuggaauguu

SEQ ID NO: 2373401 - RNA, 19 nt, Artificial Sequence
  Description of Artificial Sequence: Synthetic oligonucleotide
  Antisense strand to SEQ ID NO: 2373400
aacauuccaaaucugcuag

SEQ ID NO: 2373402 - RNA, 19 nt, Artificial Sequence
  Description of Artificial Sequence: Synthetic oligonucleotide
  Sense strand starting at position 1153 of SEQ ID NO: 1885865
cugaaaucacucugaguuu

SEQ ID NO: 2373403 - RNA, 19 nt, Artificial Sequence
  Description of Artificial Sequence: Synthetic oligonucleotide
  Antisense strand to SEQ ID NO: 2373402
aaacucagagugauuucag

SEQ ID NO: 2373404 - RNA, 19 nt, Artificial Sequence
  Description of Artificial Sequence: Synthetic oligonucleotide
  Sense strand starting at position 1196 of SEQ ID NO: 1885865
ggagcaacagcugaguaaa

SEQ ID NO: 2373405 - RNA, 19 nt, Artificial Sequence
  Description of Artificial Sequence: Synthetic oligonucleotide
  Antisense strand to SEQ ID NO: 2373404
uuuacucagcuguugcucc

SEQ ID NO: 2373406 - RNA, 19 nt, Artificial Sequence
  Description of Artificial Sequence: Synthetic oligonucleotide
  Sense strand starting at position 1235 of SEQ ID NO: 1885865
agguguugguaaucccaca

SEQ ID NO: 2373407 - RNA, 19 nt, Artificial Sequence
  Description of Artificial Sequence: Synthetic oligonucleotide
  Antisense strand to SEQ ID NO: 2373406
ugugggauuaccaacaccu

SEQ ID NO: 2373408 - RNA, 19 nt, Artificial Sequence
  Description of Artificial Sequence: Synthetic oligonucleotide
  Sense strand starting at position 1259 of SEQ ID NO: 1885865
accuguguuuccucauuua

SEQ ID NO: 2373409 - RNA, 19 nt, Artificial Sequence
  Description of Artificial Sequence: Synthetic oligonucleotide
  Antisense strand to SEQ ID NO: 2373408
uaaaugaggaaacacaggu

SEQ ID NO: 2373410 - RNA, 19 nt, Artificial Sequence
  Description of Artificial Sequence: Synthetic oligonucleotide
  Sense strand starting at position 1262 of SEQ ID NO: 1885865
uguguuuccucauuuacuu

SEQ ID NO: 2373411 - RNA, 19 nt, Artificial Sequence
  Description of Artificial Sequence: Synthetic oligonucleotide
  Antisense strand to SEQ ID NO: 2373410
aaguaaaugaggaaacaca

SEQ ID NO: 2373412 - RNA, 19 nt, Artificial Sequence
  Description of Artificial Sequence: Synthetic oligonucleotide
  Sense strand starting at position 1340 of SEQ ID NO: 1885865
gcuaauuguuaaccaggga

SEQ ID NO: 2373413 - RNA, 19 nt, Artificial Sequence
  Description of Artificial Sequence: Synthetic oligonucleotide
  Antisense strand to SEQ ID NO: 2373412
ucccugguuaacaauuagc

SEQ ID NO: 2373414 - RNA, 19 nt, Artificial Sequence
  Description of Artificial Sequence: Synthetic oligonucleotide
  Sense strand starting at position 1457 of SEQ ID NO: 1885865
agggauagcucagugcaaa

SEQ ID NO: 2373415 - RNA, 19 nt, Artificial Sequence
  Description of Artificial Sequence: Synthetic oligonucleotide
  Antisense strand to SEQ ID NO: 2373414
uuugcacugagcuaucccu

SEQ ID NO: 2373416 - RNA, 19 nt, Artificial Sequence
  Description of Artificial Sequence: Synthetic oligonucleotide
  Sense strand starting at position 1458 of SEQ ID NO: 1885865
gggauagcucagugcaaac

SEQ ID NO: 2373417 - RNA, 19 nt, Artificial Sequence
  Description of Artificial Sequence: Synthetic oligonucleotide
  Antisense strand to SEQ ID NO: 2373416
guuugcacugagcuauccc

SEQ ID NO: 2373418 - RNA, 19 nt, Artificial Sequence
  Description of Artificial Sequence: Synthetic oligonucleotide
  Sense strand starting at position 1520 of SEQ ID NO: 1885865
auaggugcacuguauacaa

SEQ ID NO: 2373419 - RNA, 19 nt, Artificial Sequence
  Description of Artificial Sequence: Synthetic oligonucleotide
  Antisense strand to SEQ ID NO: 2373418
uuguauacagugcaccuau

SEQ ID NO: 2373420 - RNA, 19 nt, Artificial Sequence
  Description of Artificial Sequence: Synthetic oligonucleotide
  Sense strand starting at position 1600 of SEQ ID NO: 1885865
gaagaaauguaccuuuaug

SEQ ID NO: 2373421 - RNA, 19 nt, Artificial Sequence
  Description of Artificial Sequence: Synthetic oligonucleotide
  Antisense strand to SEQ ID NO: 2373420
cauaaagguacauuucuuc

SEQ ID NO: 2373422 - RNA, 19 nt, Artificial Sequence
  Description of Artificial Sequence: Synthetic oligonucleotide
  Sense strand starting at position 1616 of SEQ ID NO: 1885865
augcuacuaucauugguca

SEQ ID NO: 2373423 - RNA, 19 nt, Artificial Sequence
  Description of Artificial Sequence: Synthetic oligonucleotide
  Antisense strand to SEQ ID NO: 2373422
ugaccaaugauaguagcau

SEQ ID NO: 2373424 - RNA, 19 nt, Artificial Sequence
  Description of Artificial Sequence: Synthetic oligonucleotide
  Sense strand starting at position 1617 of SEQ ID NO: 1885865
ugcuacuaucauuggucau

SEQ ID NO: 2373425 - RNA, 19 nt, Artificial Sequence
  Description of Artificial Sequence: Synthetic oligonucleotide
  Antisense strand to SEQ ID NO: 2373424
augaccaaugauaguagca

SEQ ID NO: 2373426 - RNA, 19 nt, Artificial Sequence
  Description of Artificial Sequence: Synthetic oligonucleotide
  Sense strand starting at position 1764 of SEQ ID NO: 1885865
ugugaaaccuuagucacca

SEQ ID NO: 2373427 - RNA, 19 nt, Artificial Sequence
  Description of Artificial Sequence: Synthetic oligonucleotide
  Antisense strand to SEQ ID NO: 2373426
uggugacuaagguuucaca

SEQ ID NO: 2373428 - RNA, 19 nt, Artificial Sequence
  Description of Artificial Sequence: Synthetic oligonucleotide
  Sense strand starting at position 1765 of SEQ ID NO: 1885865
gugaaaccuuagucaccaa

SEQ ID NO: 2373429 - RNA, 19 nt, Artificial Sequence
  Description of Artificial Sequence: Synthetic oligonucleotide
  Antisense strand to SEQ ID NO: 2373428
uuggugacuaagguuucac

SEQ ID NO: 2373430 - RNA, 19 nt, Artificial Sequence
  Description of Artificial Sequence: Synthetic oligonucleotide
  Sense strand starting at position 2185 of SEQ ID NO: 1885865
gcuucacugucagugagga

SEQ ID NO: 2373431 - RNA, 19 nt, Artificial Sequence
  Description of Artificial Sequence: Synthetic oligonucleotide
  Antisense strand to SEQ ID NO: 2373430
uccucacugacagugaagc

SEQ ID NO: 2373432 - RNA, 19 nt, Artificial Sequence
  Description of Artificial Sequence: Synthetic oligonucleotide
  Sense strand starting at position 2347 of SEQ ID NO: 1885865
gauggcuuccucuguggga

SEQ ID NO: 2373433 - RNA, 19 nt, Artificial Sequence
  Description of Artificial Sequence: Synthetic oligonucleotide
  Antisense strand to SEQ ID NO: 2373432
ucccacagaggaagccauc

SEQ ID NO: 2373434 - RNA, 19 nt, Artificial Sequence
  Description of Artificial Sequence: Synthetic oligonucleotide
  Sense strand starting at position 2348 of SEQ ID NO: 1885865
auggcuuccucugugggaa

SEQ ID NO: 2373435 - RNA, 19 nt, Artificial Sequence
  Description of Artificial Sequence: Synthetic oligonucleotide
  Antisense strand to SEQ ID NO: 2373434
uucccacagaggaagccau

SEQ ID NO: 2373436 - RNA, 19 nt, Artificial Sequence
  Description of Artificial Sequence: Synthetic oligonucleotide
  Sense strand starting at position 2349 of SEQ ID NO: 1885865
uggcuuccucugugggaau

SEQ ID NO: 2373437 - RNA, 19 nt, Artificial Sequence
  Description of Artificial Sequence: Synthetic oligonucleotide
  Antisense strand to SEQ ID NO: 2373436
auucccacagaggaagcca

SEQ ID NO: 2373438 - RNA, 19 nt, Artificial Sequence
  Description of Artificial Sequence: Synthetic oligonucleotide
  Sense strand starting at position 2351 of SEQ ID NO: 1885865
gcuuccucugugggaauca

SEQ ID NO: 2373439 - RNA, 19 nt, Artificial Sequence
  Description of Artificial Sequence: Synthetic oligonucleotide
  Antisense strand to SEQ ID NO: 2373438
ugauucccacagaggaagc

SEQ ID NO: 2373440 - RNA, 19 nt, Artificial Sequence
  Description of Artificial Sequence: Synthetic oligonucleotide
  Sense strand starting at position 2574 of SEQ ID NO: 1885865
ucucuuauggaugaaagcu

SEQ ID NO: 2373441 - RNA, 19 nt, Artificial Sequence
  Description of Artificial Sequence: Synthetic oligonucleotide
  Antisense strand to SEQ ID NO: 2373440
agcuuucauccauaagaga

SEQ ID NO: 2373442 - RNA, 19 nt, Artificial Sequence
  Description of Artificial Sequence: Synthetic oligonucleotide
  Sense strand starting at position 2604 of SEQ ID NO: 1885865
agugacauuuaguaggcaa

SEQ ID NO: 2373443 - RNA, 19 nt, Artificial Sequence
  Description of Artificial Sequence: Synthetic oligonucleotide
  Antisense strand to SEQ ID NO: 2373442
uugccuacuaaaugucacu

SEQ ID NO: 2373444 - RNA, 19 nt, Artificial Sequence
  Description of Artificial Sequence: Synthetic oligonucleotide
  Sense strand starting at position 2761 of SEQ ID NO: 1885865
gguuguuaaagcgggauua

SEQ ID NO: 2373445 - RNA, 19 nt, Artificial Sequence
  Description of Artificial Sequence: Synthetic oligonucleotide
  Antisense strand to SEQ ID NO: 2373444
uaaucccgcuuuaacaacc

SEQ ID NO: 2373446 - RNA, 19 nt, Artificial Sequence
  Description of Artificial Sequence: Synthetic oligonucleotide
  Sense strand starting at position 2763 of SEQ ID NO: 1885865
uuguuaaagcgggauuaga

SEQ ID NO: 2373447 - RNA, 19 nt, Artificial Sequence
  Description of Artificial Sequence: Synthetic oligonucleotide
  Antisense strand to SEQ ID NO: 2373446
ucuaaucccgcuuuaacaa

SEQ ID NO: 2373448 - RNA, 19 nt, Artificial Sequence
  Description of Artificial Sequence: Synthetic oligonucleotide
  Sense strand starting at position 2878 of SEQ ID NO: 1885865
gcaucagauuugccaguua

SEQ ID NO: 2373449 - RNA, 19 nt, Artificial Sequence
  Description of Artificial Sequence: Synthetic oligonucleotide
  Antisense strand to SEQ ID NO: 2373448
uaacuggcaaaucugaugc

SEQ ID NO: 2373450 - RNA, 19 nt, Artificial Sequence
  Description of Artificial Sequence: Synthetic oligonucleotide
  Sense strand starting at position 3080 of SEQ ID NO: 1885865
agagauggcuuucuuucuu

SEQ ID NO: 2373451 - RNA, 19 nt, Artificial Sequence
  Description of Artificial Sequence: Synthetic oligonucleotide
  Antisense strand to SEQ ID NO: 2373450
aagaaagaaagccaucucu

SEQ ID NO: 2373452 - RNA, 19 nt, Artificial Sequence
  Description of Artificial Sequence: Synthetic oligonucleotide
  Sense strand starting at position 3250 of SEQ ID NO: 1885865
gguaauucccuuuguuaaa

SEQ ID NO: 2373453 - RNA, 19 nt, Artificial Sequence
  Description of Artificial Sequence: Synthetic oligonucleotide
  Antisense strand to SEQ ID NO: 2373452
uuuaacaaagggaauuacc

SEQ ID NO: 2373454 - RNA, 19 nt, Artificial Sequence
  Description of Artificial Sequence: Synthetic oligonucleotide
  Sense strand starting at position 3251 of SEQ ID NO: 1885865
guaauucccuuuguuaaag

SEQ ID NO: 2373455 - RNA, 19 nt, Artificial Sequence
  Description of Artificial Sequence: Synthetic oligonucleotide
  Antisense strand to SEQ ID NO: 2373454
cuuuaacaaagggaauuac

SEQ ID NO: 2373456 - RNA, 19 nt, Artificial Sequence
  Description of Artificial Sequence: Synthetic oligonucleotide
  Sense strand starting at position 3302 of SEQ ID NO: 1885865
ccuauacuguuagugggaa

SEQ ID NO: 2373457 - RNA, 19 nt, Artificial Sequence
  Description of Artificial Sequence: Synthetic oligonucleotide
  Antisense strand to SEQ ID NO: 2373456
uucccacuaacaguauagg

SEQ ID NO: 2373458 - RNA, 19 nt, Artificial Sequence
  Description of Artificial Sequence: Synthetic oligonucleotide
  Sense strand starting at position 3347 of SEQ ID NO: 1885865
ggaaacugaguauaguagu

SEQ ID NO: 2373459 - RNA, 19 nt, Artificial Sequence
  Description of Artificial Sequence: Synthetic oligonucleotide
  Antisense strand to SEQ ID NO: 2373458
acuacuauacucaguuucc

SEQ ID NO: 2373460 - RNA, 19 nt, Artificial Sequence
  Description of Artificial Sequence: Synthetic oligonucleotide
  Sense strand starting at position 3357 of SEQ ID NO: 1885865
uauaguagugccuaucaag

SEQ ID NO: 2373461 - RNA, 19 nt, Artificial Sequence
  Description of Artificial Sequence: Synthetic oligonucleotide
  Antisense strand to SEQ ID NO: 2373460
cuugauaggcacuacuaua

SEQ ID NO: 2373462 - RNA, 19 nt, Artificial Sequence
  Description of Artificial Sequence: Synthetic oligonucleotide
  Sense strand starting at position 3599 of SEQ ID NO: 1885865
ggaaucaggucaucugagu

SEQ ID NO: 2373463 - RNA, 19 nt, Artificial Sequence
  Description of Artificial Sequence: Synthetic oligonucleotide
  Antisense strand to SEQ ID NO: 2373462
acucagaugaccugauucc

SEQ ID NO: 2373464 - RNA, 19 nt, Artificial Sequence
  Description of Artificial Sequence: Synthetic oligonucleotide
  Sense strand starting at position 3604 of SEQ ID NO: 1885865
caggucaucugaguuuagu

SEQ ID NO: 2373465 - RNA, 19 nt, Artificial Sequence
  Description of Artificial Sequence: Synthetic oligonucleotide
  Antisense strand to SEQ ID NO: 2373464
acuaaacucagaugaccug

SEQ ID NO: 2373466 - RNA, 19 nt, Artificial Sequence
  Description of Artificial Sequence: Synthetic oligonucleotide
  Sense strand starting at position 3691 of SEQ ID NO: 1885865
agaugaucauuauagaacu

SEQ ID NO: 2373467 - RNA, 19 nt, Artificial Sequence
  Description of Artificial Sequence: Synthetic oligonucleotide
  Antisense strand to SEQ ID NO: 2373466
aguucuauaaugaucaucu

SEQ ID NO: 2373468 - RNA, 19 nt, Artificial Sequence
  Description of Artificial Sequence: Synthetic oligonucleotide
  Sense strand starting at position 3901 of SEQ ID NO: 1885865
uuaaaugugcucgcuguuu

SEQ ID NO: 2373469 - RNA, 19 nt, Artificial Sequence
  Description of Artificial Sequence: Synthetic oligonucleotide
  Antisense strand to SEQ ID NO: 2373468
aaacagcgagcacauuuaa

SEQ ID NO: 2373470 - RNA, 19 nt, Artificial Sequence
  Description of Artificial Sequence: Synthetic oligonucleotide
  Sense strand starting at position 3981 of SEQ ID NO: 1885865
acuccugguguccauaaua

SEQ ID NO: 2373471 - RNA, 19 nt, Artificial Sequence
  Description of Artificial Sequence: Synthetic oligonucleotide
  Antisense strand to SEQ ID NO: 2373470
uauuauggacaccaggagu

SEQ ID NO: 2373472 - RNA, 19 nt, Artificial Sequence
  Description of Artificial Sequence: Synthetic oligonucleotide
  Sense strand starting at position 21 of SEQ ID NO: 1885864
acuugucaugcugaaguga

SEQ ID NO: 2373473 - RNA, 19 nt, Artificial Sequence
  Description of Artificial Sequence: Synthetic oligonucleotide
  Antisense strand to SEQ ID NO: 2373472
ucacuucagcaugacaagu

SEQ ID NO: 2373474 - RNA, 19 nt, Artificial Sequence
  Description of Artificial Sequence: Synthetic oligonucleotide
  Sense strand starting at position 44 of SEQ ID NO: 1885864
ucugguucuccugacaguu

SEQ ID NO: 2373475 - RNA, 19 nt, Artificial Sequence
  Description of Artificial Sequence: Synthetic oligonucleotide
  Antisense strand to SEQ ID NO: 2373474
aacugucaggagaaccaga

SEQ ID NO: 2373476 - RNA, 19 nt, Artificial Sequence
  Description of Artificial Sequence: Synthetic oligonucleotide
  Sense strand starting at position 110 of SEQ ID NO: 1885864
ucaguuuccugagcuacua

SEQ ID NO: 2373477 - RNA, 19 nt, Artificial Sequence
  Description of Artificial Sequence: Synthetic oligonucleotide
  Antisense strand to SEQ ID NO: 2373476
uaguagcucaggaaacuga

SEQ ID NO: 2373478 - RNA, 19 nt, Artificial Sequence
  Description of Artificial Sequence: Synthetic oligonucleotide
  Sense strand starting at position 157 of SEQ ID NO: 1885864
gggugugcuauugaauuau

SEQ ID NO: 2373479 - RNA, 19 nt, Artificial Sequence
  Description of Artificial Sequence: Synthetic oligonucleotide
  Antisense strand to SEQ ID NO: 2373478
auaauucaauagcacaccc

SEQ ID NO: 2373480 - RNA, 19 nt, Artificial Sequence
  Description of Artificial Sequence: Synthetic oligonucleotide
  Sense strand starting at position 161 of SEQ ID NO: 1885864
gugcuauugaauuaugguc

SEQ ID NO: 2373481 - RNA, 19 nt, Artificial Sequence
  Description of Artificial Sequence: Synthetic oligonucleotide
  Antisense strand to SEQ ID NO: 2373480
gaccauaauucaauagcac

SEQ ID NO: 2373482 - RNA, 19 nt, Artificial Sequence
  Description of Artificial Sequence: Synthetic oligonucleotide
  Sense strand starting at position 166 of SEQ ID NO: 1885864
auugaauuaugguccaaag

SEQ ID NO: 2373483 - RNA, 19 nt, Artificial Sequence
  Description of Artificial Sequence: Synthetic oligonucleotide
  Antisense strand to SEQ ID NO: 2373482
cuuuggaccauaauucaau

SEQ ID NO: 2373484 - RNA, 19 nt, Artificial Sequence
  Description of Artificial Sequence: Synthetic oligonucleotide
  Sense strand starting at position 168 of SEQ ID NO: 1885864
ugaauuaugguccaaaguc

SEQ ID NO: 2373485 - RNA, 19 nt, Artificial Sequence
  Description of Artificial Sequence: Synthetic oligonucleotide
  Antisense strand to SEQ ID NO: 2373484
gacuuuggaccauaauuca

SEQ ID NO: 2373486 - RNA, 19 nt, Artificial Sequence
  Description of Artificial Sequence: Synthetic oligonucleotide
  Sense strand starting at position 202 of SEQ ID NO: 1885864
ccacucuggccauaguaaa

SEQ ID NO: 2373487 - RNA, 19 nt, Artificial Sequence
  Description of Artificial Sequence: Synthetic oligonucleotide
  Antisense strand to SEQ ID NO: 2373486
uuuacuauggccagagugg

SEQ ID NO: 2373488 - RNA, 19 nt, Artificial Sequence
  Description of Artificial Sequence: Synthetic oligonucleotide
  Sense strand starting at position 365 of SEQ ID NO: 1885864
gcaaauaagcucuguaaac

SEQ ID NO: 2373489 - RNA, 19 nt, Artificial Sequence
  Description of Artificial Sequence: Synthetic oligonucleotide
  Antisense strand to SEQ ID NO: 2373488
guuuacagagcuuauuugc

SEQ ID NO: 2373490 - RNA, 19 nt, Artificial Sequence
  Description of Artificial Sequence: Synthetic oligonucleotide
  Sense strand starting at position 420 of SEQ ID NO: 1885864
acauaaugagaguguacau

SEQ ID NO: 2373491 - RNA, 19 nt, Artificial Sequence
  Description of Artificial Sequence: Synthetic oligonucleotide
  Antisense strand to SEQ ID NO: 2373490
auguacacucucauuaugu

SEQ ID NO: 2373492 - RNA, 19 nt, Artificial Sequence
  Description of Artificial Sequence: Synthetic oligonucleotide
  Sense strand starting at position 429 of SEQ ID NO: 1885864
gaguguacauuugauauua

SEQ ID NO: 2373493 - RNA, 19 nt, Artificial Sequence
  Description of Artificial Sequence: Synthetic oligonucleotide
  Antisense strand to SEQ ID NO: 2373492
uaauaucaaauguacacuc

SEQ ID NO: 2373494 - RNA, 19 nt, Artificial Sequence
  Description of Artificial Sequence: Synthetic oligonucleotide
  Sense strand starting at position 467 of SEQ ID NO: 1885864
auugaugucucuuugucaa

SEQ ID NO: 2373495 - RNA, 19 nt, Artificial Sequence
  Description of Artificial Sequence: Synthetic oligonucleotide
  Antisense strand to SEQ ID NO: 2373494
uugacaaagagacaucaau

SEQ ID NO: 2373496 - RNA, 19 nt, Artificial Sequence
  Description of Artificial Sequence: Synthetic oligonucleotide
  Sense strand starting at position 469 of SEQ ID NO: 1885864
ugaugucucuuugucaaca

SEQ ID NO: 2373497 - RNA, 19 nt, Artificial Sequence
  Description of Artificial Sequence: Synthetic oligonucleotide
  Antisense strand to SEQ ID NO: 2373496
uguugacaaagagacauca

SEQ ID NO: 2373498 - RNA, 19 nt, Artificial Sequence
  Description of Artificial Sequence: Synthetic oligonucleotide
  Sense strand starting at position 523 of SEQ ID NO: 1885864
gaguguaacuccuuuaaga

SEQ ID NO: 2373499 - RNA, 19 nt, Artificial Sequence
  Description of Artificial Sequence: Synthetic oligonucleotide
  Antisense strand to SEQ ID NO: 2373498
ucuuaaaggaguuacacuc

SEQ ID NO: 2373500 - RNA, 19 nt, Artificial Sequence
  Description of Artificial Sequence: Synthetic oligonucleotide
  Sense strand starting at position 657 of SEQ ID NO: 1885864
gccugagcaaauugugaga

SEQ ID NO: 2373501 - RNA, 19 nt, Artificial Sequence
  Description of Artificial Sequence: Synthetic oligonucleotide
  Antisense strand to SEQ ID NO: 2373500
ucucacaauuugcucaggc

SEQ ID NO: 2373502 - RNA, 19 nt, Artificial Sequence
  Description of Artificial Sequence: Synthetic oligonucleotide
  Sense strand starting at position 737 of SEQ ID NO: 1885864
aagagaagcucuguuugca

SEQ ID NO: 2373503 - RNA, 19 nt, Artificial Sequence
  Description of Artificial Sequence: Synthetic oligonucleotide
  Antisense strand to SEQ ID NO: 2373502
ugcaaacagagcuucucuu

SEQ ID NO: 2373504 - RNA, 19 nt, Artificial Sequence
  Description of Artificial Sequence: Synthetic oligonucleotide
  Sense strand starting at position 745 of SEQ ID NO: 1885864
cucuguuugcagugaggag

SEQ ID NO: 2373505 - RNA, 19 nt, Artificial Sequence
  Description of Artificial Sequence: Synthetic oligonucleotide
  Antisense strand to SEQ ID NO: 2373504
cuccucacugcaaacagag

SEQ ID NO: 2373506 - RNA, 19 nt, Artificial Sequence
  Description of Artificial Sequence: Synthetic oligonucleotide
  Sense strand starting at position 1052 of SEQ ID NO: 1885864
gggaucuucuacuuccuuu

SEQ ID NO: 2373507 - RNA, 19 nt, Artificial Sequence
  Description of Artificial Sequence: Synthetic oligonucleotide
  Antisense strand to SEQ ID NO: 2373506
aaaggaaguagaagauccc

SEQ ID NO: 2373508 - RNA, 19 nt, Artificial Sequence
  Description of Artificial Sequence: Synthetic oligonucleotide
  Sense strand starting at position 1082 of SEQ ID NO: 1885864
cucuccaguucucugaaga

SEQ ID NO: 2373509 - RNA, 19 nt, Artificial Sequence
  Description of Artificial Sequence: Synthetic oligonucleotide
  Antisense strand to SEQ ID NO: 2373508
ucuucagagaacuggagag

SEQ ID NO: 2373510 - RNA, 19 nt, Artificial Sequence
  Description of Artificial Sequence: Synthetic oligonucleotide
  Sense strand starting at position 1083 of SEQ ID NO: 1885864
ucuccaguucucugaagac

SEQ ID NO: 2373511 - RNA, 19 nt, Artificial Sequence
  Description of Artificial Sequence: Synthetic oligonucleotide
  Antisense strand to SEQ ID NO: 2373510
gucuucagagaacuggaga

SEQ ID NO: 2373512 - RNA, 19 nt, Artificial Sequence
  Description of Artificial Sequence: Synthetic oligonucleotide
  Sense strand starting at position 1248 of SEQ ID NO: 1885864
gaguguuacacaggagaga

SEQ ID NO: 2373513 - RNA, 19 nt, Artificial Sequence
  Description of Artificial Sequence: Synthetic oligonucleotide
  Antisense strand to SEQ ID NO: 2373512
ucucuccuguguaacacuc

SEQ ID NO: 2373514 - RNA, 19 nt, Artificial Sequence
  Description of Artificial Sequence: Synthetic oligonucleotide
  Sense strand starting at position 1312 of SEQ ID NO: 1885864
cuagcauuacuuugagcaa

SEQ ID NO: 2373515 - RNA, 19 nt, Artificial Sequence
  Description of Artificial Sequence: Synthetic oligonucleotide
  Antisense strand to SEQ ID NO: 2373514
uugcucaaaguaaugcuag

SEQ ID NO: 2373516 - RNA, 19 nt, Artificial Sequence
  Description of Artificial Sequence: Synthetic oligonucleotide
  Sense strand starting at position 1315 of SEQ ID NO: 1885864
gcauuacuuugagcaaguc

SEQ ID NO: 2373517 - RNA, 19 nt, Artificial Sequence
  Description of Artificial Sequence: Synthetic oligonucleotide
  Antisense strand to SEQ ID NO: 2373516
gacuugcucaaaguaaugc

SEQ ID NO: 2373518 - RNA, 19 nt, Artificial Sequence
  Description of Artificial Sequence: Synthetic oligonucleotide
  Sense strand starting at position 1401 of SEQ ID NO: 1885864
gugugagguuaaguacaca

SEQ ID NO: 2373519 - RNA, 19 nt, Artificial Sequence
  Description of Artificial Sequence: Synthetic oligonucleotide
  Antisense strand to SEQ ID NO: 2373518
uguguacuuaaccucacac

SEQ ID NO: 2373520 - RNA, 19 nt, Artificial Sequence
  Description of Artificial Sequence: Synthetic oligonucleotide
  Sense strand starting at position 1445 of SEQ ID NO: 1885864
guguguucccuccaucuca

SEQ ID NO: 2373521 - RNA, 19 nt, Artificial Sequence
  Description of Artificial Sequence: Synthetic oligonucleotide
  Antisense strand to SEQ ID NO: 2373520
ugagauggagggaacacac

SEQ ID NO: 2373522 - RNA, 19 nt, Artificial Sequence
  Description of Artificial Sequence: Synthetic oligonucleotide
  Sense strand starting at position 1958 of SEQ ID NO: 1885864
gggcgauccagaugaagca

SEQ ID NO: 2373523 - RNA, 19 nt, Artificial Sequence
  Description of Artificial Sequence: Synthetic oligonucleotide
  Antisense strand to SEQ ID NO: 2373522
ugcuucaucuggaucgccc

SEQ ID NO: 2373524 - RNA, 19 nt, Artificial Sequence
  Description of Artificial Sequence: Synthetic oligonucleotide
  Sense strand starting at position 2121 of SEQ ID NO: 1885864
agccacagugcuuguagau

SEQ ID NO: 2373525 - RNA, 19 nt, Artificial Sequence
  Description of Artificial Sequence: Synthetic oligonucleotide
  Antisense strand to SEQ ID NO: 2373524
aucuacaagcacuguggcu

SEQ ID NO: 2373526 - RNA, 19 nt, Artificial Sequence
  Description of Artificial Sequence: Synthetic oligonucleotide
  Sense strand starting at position 2128 of SEQ ID NO: 1885864
gugcuuguagauuguagga

SEQ ID NO: 2373527 - RNA, 19 nt, Artificial Sequence
  Description of Artificial Sequence: Synthetic oligonucleotide
  Antisense strand to SEQ ID NO: 2373526
uccuacaaucuacaagcac

SEQ ID NO: 2373528 - RNA, 19 nt, Artificial Sequence
  Description of Artificial Sequence: Synthetic oligonucleotide
  Sense strand starting at position 2557 of SEQ ID NO: 1885864
uuauaaauggcuugcaacu

SEQ ID NO: 2373529 - RNA, 19 nt, Artificial Sequence
  Description of Artificial Sequence: Synthetic oligonucleotide
  Antisense strand to SEQ ID NO: 2373528
aguugcaagccauuuauaa

SEQ ID NO: 2373530 - RNA, 19 nt, Artificial Sequence
  Description of Artificial Sequence: Synthetic oligonucleotide
  Sense strand starting at position 2648 of SEQ ID NO: 1885864
auuguugugaguugucaug

SEQ ID NO: 2373531 - RNA, 19 nt, Artificial Sequence
  Description of Artificial Sequence: Synthetic oligonucleotide
  Antisense strand to SEQ ID NO: 2373530
caugacaacucacaacaau

SEQ ID NO: 2373532 - RNA, 19 nt, Artificial Sequence
  Description of Artificial Sequence: Synthetic oligonucleotide
  Sense strand starting at position 2659 of SEQ ID NO: 1885864
uugucauguccauacagga

SEQ ID NO: 2373533 - RNA, 19 nt, Artificial Sequence
  Description of Artificial Sequence: Synthetic oligonucleotide
  Antisense strand to SEQ ID NO: 2373532
uccuguauggacaugacaa

SEQ ID NO: 2373534 - RNA, 19 nt, Artificial Sequence
  Description of Artificial Sequence: Synthetic oligonucleotide
  Sense strand starting at position 2672 of SEQ ID NO: 1885864
acaggagucucuuuauauu

SEQ ID NO: 2373535 - RNA, 19 nt, Artificial Sequence
  Description of Artificial Sequence: Synthetic oligonucleotide
  Antisense strand to SEQ ID NO: 2373534
aauauaaagagacuccugu

SEQ ID NO: 2373536 - RNA, 19 nt, Artificial Sequence
  Description of Artificial Sequence: Synthetic oligonucleotide
  Sense strand starting at position 2683 of SEQ ID NO: 1885864
uuuauauucuagucaugca

SEQ ID NO: 2373537 - RNA, 19 nt, Artificial Sequence
  Description of Artificial Sequence: Synthetic oligonucleotide
  Antisense strand to SEQ ID NO: 2373536
ugcaugacuagaauauaaa

SEQ ID NO: 2373538 - RNA, 19 nt, Artificial Sequence
  Description of Artificial Sequence: Synthetic oligonucleotide
  Sense strand starting at position 2831 of SEQ ID NO: 1885864
ggaaacaguuugguuacau

SEQ ID NO: 2373539 - RNA, 19 nt, Artificial Sequence
  Description of Artificial Sequence: Synthetic oligonucleotide
  Antisense strand to SEQ ID NO: 2373538
auguaaccaaacuguuucc

SEQ ID NO: 2373540 - RNA, 19 nt, Artificial Sequence
  Description of Artificial Sequence: Synthetic oligonucleotide
  Sense strand starting at position 3169 of SEQ ID NO: 1885864
gcuggucucuuucucauuu

SEQ ID NO: 2373541 - RNA, 19 nt, Artificial Sequence
  Description of Artificial Sequence: Synthetic oligonucleotide
  Antisense strand to SEQ ID NO: 2373540
aaaugagaaagagaccagc

SEQ ID NO: 2373542 - RNA, 19 nt, Artificial Sequence
  Description of Artificial Sequence: Synthetic oligonucleotide
  Sense strand starting at position 3375 of SEQ ID NO: 1885864
cagaguaacucauaggauc

SEQ ID NO: 2373543 - RNA, 19 nt, Artificial Sequence
  Description of Artificial Sequence: Synthetic oligonucleotide
  Antisense strand to SEQ ID NO: 2373542
gauccuaugaguuacucug

SEQ ID NO: 2373544 - RNA, 19 nt, Artificial Sequence
  Description of Artificial Sequence: Synthetic oligonucleotide
  Sense strand starting at position 3469 of SEQ ID NO: 1885864
aagggaaagcgaugauuau

SEQ ID NO: 2373545 - RNA, 19 nt, Artificial Sequence
  Description of Artificial Sequence: Synthetic oligonucleotide
  Antisense strand to SEQ ID NO: 2373544
auaaucaucgcuuucccuu

SEQ ID NO: 2373546 - RNA, 19 nt, Artificial Sequence
  Description of Artificial Sequence: Synthetic oligonucleotide
  Sense strand starting at position 3601 of SEQ ID NO: 1885864
gugccuacucuauagcuaa

SEQ ID NO: 2373547 - RNA, 19 nt, Artificial Sequence
  Description of Artificial Sequence: Synthetic oligonucleotide
  Antisense strand to SEQ ID NO: 2373546
uuagcuauagaguaggcac

SEQ ID NO: 2373548 - RNA, 19 nt, Artificial Sequence
  Description of Artificial Sequence: Synthetic oligonucleotide
  Sense strand starting at position 3711 of SEQ ID NO: 1885864
gaccauucgaaucgugagu

SEQ ID NO: 2373549 - RNA, 19 nt, Artificial Sequence
  Description of Artificial Sequence: Synthetic oligonucleotide
  Antisense strand to SEQ ID NO: 2373548
acucacgauucgaaugguc

SEQ ID NO: 2373550 - RNA, 19 nt, Artificial Sequence
  Description of Artificial Sequence: Synthetic oligonucleotide
  Sense strand starting at position 3715 of SEQ ID NO: 1885864
auucgaaucgugaguguag

SEQ ID NO: 2373551 - RNA, 19 nt, Artificial Sequence
  Description of Artificial Sequence: Synthetic oligonucleotide
  Antisense strand to SEQ ID NO: 2373550
cuacacucacgauucgaau

SEQ ID NO: 2373552 - RNA, 19 nt, Artificial Sequence
  Description of Artificial Sequence: Synthetic oligonucleotide
  Sense strand starting at position 48 of SEQ ID NO: 1885866
ucugaaacagccugaguuu

SEQ ID NO: 2373553 - RNA, 19 nt, Artificial Sequence
  Description of Artificial Sequence: Synthetic oligonucleotide
  Antisense strand to SEQ ID NO: 2373552
aaacucaggcuguuucaga

SEQ ID NO: 2373554 - RNA, 19 nt, Artificial Sequence
  Description of Artificial Sequence: Synthetic oligonucleotide
  Sense strand starting at position 61 of SEQ ID NO: 1885866
gaguuucccuguccuuaug

SEQ ID NO: 2373555 - RNA, 19 nt, Artificial Sequence
  Description of Artificial Sequence: Synthetic oligonucleotide
  Antisense strand to SEQ ID NO: 2373554
cauaaggacagggaaacuc

SEQ ID NO: 2373556 - RNA, 19 nt, Artificial Sequence
  Description of Artificial Sequence: Synthetic oligonucleotide
  Sense strand starting at position 63 of SEQ ID NO: 1885866
guuucccuguccuuaugau

SEQ ID NO: 2373557 - RNA, 19 nt, Artificial Sequence
  Description of Artificial Sequence: Synthetic oligonucleotide
  Antisense strand to SEQ ID NO: 2373556
aucauaaggacagggaaac

SEQ ID NO: 2373558 - RNA, 19 nt, Artificial Sequence
  Description of Artificial Sequence: Synthetic oligonucleotide
  Sense strand starting at position 123 of SEQ ID NO: 1885866
gggagcucugaaugaguuu

SEQ ID NO: 2373559 - RNA, 19 nt, Artificial Sequence
  Description of Artificial Sequence: Synthetic oligonucleotide
  Antisense strand to SEQ ID NO: 2373558
aaacucauucagagcuccc

SEQ ID NO: 2373560 - RNA, 19 nt, Artificial Sequence
  Description of Artificial Sequence: Synthetic oligonucleotide
  Sense strand starting at position 211 of SEQ ID NO: 1885866
gccagugguuccuaagcau

SEQ ID NO: 2373561 - RNA, 19 nt, Artificial Sequence
  Description of Artificial Sequence: Synthetic oligonucleotide
  Antisense strand to SEQ ID NO: 2373560
augcuuaggaaccacuggc

SEQ ID NO: 2373562 - RNA, 19 nt, Artificial Sequence
  Description of Artificial Sequence: Synthetic oligonucleotide
  Sense strand starting at position 335 of SEQ ID NO: 1885866
gaaagucucagguggcaca

SEQ ID NO: 2373563 - RNA, 19 nt, Artificial Sequence
  Description of Artificial Sequence: Synthetic oligonucleotide
  Antisense strand to SEQ ID NO: 2373562
ugugccaccugagacuuuc

SEQ ID NO: 2373564 - RNA, 19 nt, Artificial Sequence
  Description of Artificial Sequence: Synthetic oligonucleotide
  Sense strand starting at position 388 of SEQ ID NO: 1885866
uuaaauuccugccuggauu

SEQ ID NO: 2373565 - RNA, 19 nt, Artificial Sequence
  Description of Artificial Sequence: Synthetic oligonucleotide
  Antisense strand to SEQ ID NO: 2373564
aauccaggcaggaauuuaa

SEQ ID NO: 2373566 - RNA, 19 nt, Artificial Sequence
  Description of Artificial Sequence: Synthetic oligonucleotide
  Sense strand starting at position 438 of SEQ ID NO: 1885866
guaccuuuguggcuaagga

SEQ ID NO: 2373567 - RNA, 19 nt, Artificial Sequence
  Description of Artificial Sequence: Synthetic oligonucleotide
  Antisense strand to SEQ ID NO: 2373566
uccuuagccacaaagguac

SEQ ID NO: 2373568 - RNA, 19 nt, Artificial Sequence
  Description of Artificial Sequence: Synthetic oligonucleotide
  Sense strand starting at position 439 of SEQ ID NO: 1885866
uaccuuuguggcuaaggaa

SEQ ID NO: 2373569 - RNA, 19 nt, Artificial Sequence
  Description of Artificial Sequence: Synthetic oligonucleotide
  Antisense strand to SEQ ID NO: 2373568
uuccuuagccacaaaggua

SEQ ID NO: 2373570 - RNA, 19 nt, Artificial Sequence
  Description of Artificial Sequence: Synthetic oligonucleotide
  Sense strand starting at position 504 of SEQ ID NO: 1885866
gggugucucuuguccuaau

SEQ ID NO: 2373571 - RNA, 19 nt, Artificial Sequence
  Description of Artificial Sequence: Synthetic oligonucleotide
  Antisense strand to SEQ ID NO: 2373570
auuaggacaagagacaccc

SEQ ID NO: 2373572 - RNA, 19 nt, Artificial Sequence
  Description of Artificial Sequence: Synthetic oligonucleotide
  Sense strand starting at position 541 of SEQ ID NO: 1885866
uucuaacacugucgacaau

SEQ ID NO: 2373573 - RNA, 19 nt, Artificial Sequence
  Description of Artificial Sequence: Synthetic oligonucleotide
  Antisense strand to SEQ ID NO: 2373572
auugucgacaguguuagaa

SEQ ID NO: 2373574 - RNA, 19 nt, Artificial Sequence
  Description of Artificial Sequence: Synthetic oligonucleotide
  Sense strand starting at position 585 of SEQ ID NO: 1885866
ggguuagacuucugccugu

SEQ ID NO: 2373575 - RNA, 19 nt, Artificial Sequence
  Description of Artificial Sequence: Synthetic oligonucleotide
  Antisense strand to SEQ ID NO: 2373574
acaggcagaagucuaaccc

SEQ ID NO: 2373576 - RNA, 19 nt, Artificial Sequence
  Description of Artificial Sequence: Synthetic oligonucleotide
  Sense strand starting at position 605 of SEQ ID NO: 1885866
ggcagacucugcuuguuga

SEQ ID NO: 2373577 - RNA, 19 nt, Artificial Sequence
  Description of Artificial Sequence: Synthetic oligonucleotide
  Antisense strand to SEQ ID NO: 2373576
ucaacaagcagagucugcc

SEQ ID NO: 2373578 - RNA, 19 nt, Artificial Sequence
  Description of Artificial Sequence: Synthetic oligonucleotide
  Sense strand starting at position 606 of SEQ ID NO: 1885866
gcagacucugcuuguugaa

SEQ ID NO: 2373579 - RNA, 19 nt, Artificial Sequence
  Description of Artificial Sequence: Synthetic oligonucleotide
  Antisense strand to SEQ ID NO: 2373578
uucaacaagcagagucugc

SEQ ID NO: 2373580 - RNA, 19 nt, Artificial Sequence
  Description of Artificial Sequence: Synthetic oligonucleotide
  Sense strand starting at position 3029 of SEQ ID NO: 1885866
gucugugaguccuugacac

SEQ ID NO: 2373581 - RNA, 19 nt, Artificial Sequence
  Description of Artificial Sequence: Synthetic oligonucleotide
  Antisense strand to SEQ ID NO: 2373580
gugucaaggacucacagac

SEQ ID NO: 2373582 - RNA, 19 nt, Artificial Sequence
  Description of Artificial Sequence: Synthetic oligonucleotide
  Sense strand starting at position 3416 of SEQ ID NO: 1885866
guagguucucgagaaaugc

SEQ ID NO: 2373583 - RNA, 19 nt, Artificial Sequence
  Description of Artificial Sequence: Synthetic oligonucleotide
  Antisense strand to SEQ ID NO: 2373582
gcauuucucgagaaccuac

SEQ ID NO: 2373584 - RNA, 19 nt, Artificial Sequence
  Description of Artificial Sequence: Synthetic oligonucleotide
  Sense strand starting at position 3424 of SEQ ID NO: 1885866
ucgagaaaugcugaguuca

SEQ ID NO: 2373585 - RNA, 19 nt, Artificial Sequence
  Description of Artificial Sequence: Synthetic oligonucleotide
  Antisense strand to SEQ ID NO: 2373584
ugaacucagcauuucucga

SEQ ID NO: 2373586 - RNA, 19 nt, Artificial Sequence
  Description of Artificial Sequence: Synthetic oligonucleotide
  Sense strand starting at position 3764 of SEQ ID NO: 1885866
agccaauauggcugggaaa

SEQ ID NO: 2373587 - RNA, 19 nt, Artificial Sequence
  Description of Artificial Sequence: Synthetic oligonucleotide
  Antisense strand to SEQ ID NO: 2373586
uuucccagccauauuggcu

SEQ ID NO: 2373588 - RNA, 19 nt, Artificial Sequence
  Description of Artificial Sequence: Synthetic oligonucleotide
  Sense strand starting at position 3765 of SEQ ID NO: 1885866
gccaauauggcugggaaac

SEQ ID NO: 2373589 - RNA, 19 nt, Artificial Sequence
  Description of Artificial Sequence: Synthetic oligonucleotide
  Antisense strand to SEQ ID NO: 2373588
guuucccagccauauuggc

SEQ ID NO: 2373590 - RNA, 19 nt, Artificial Sequence
  Description of Artificial Sequence: Synthetic oligonucleotide
  Sense strand starting at position 3766 of SEQ ID NO: 1885866
ccaauauggcugggaaaca

SEQ ID NO: 2373591 - RNA, 19 nt, Artificial Sequence
  Description of Artificial Sequence: Synthetic oligonucleotide
  Antisense strand to SEQ ID NO: 2373590
uguuucccagccauauugg

SEQ ID NO: 2373592 - RNA, 19 nt, Artificial Sequence
  Description of Artificial Sequence: Synthetic oligonucleotide
  Sense strand starting at position 3767 of SEQ ID NO: 1885866
caauauggcugggaaacaa

SEQ ID NO: 2373593 - RNA, 19 nt, Artificial Sequence
  Description of Artificial Sequence: Synthetic oligonucleotide
  Antisense strand to SEQ ID NO: 2373592
uuguuucccagccauauug

SEQ ID NO: 2373594 - RNA, 19 nt, Artificial Sequence
  Description of Artificial Sequence: Synthetic oligonucleotide
  Sense strand starting at position 3890 of SEQ ID NO: 1885866
gggaaagugugugaaugga

SEQ ID NO: 2373595 - RNA, 19 nt, Artificial Sequence
  Description of Artificial Sequence: Synthetic oligonucleotide
  Antisense strand to SEQ ID NO: 2373594
uccauucacacacuuuccc

SEQ ID NO: 2373596 - RNA, 19 nt, Artificial Sequence
  Description of Artificial Sequence: Synthetic oligonucleotide
  Sense strand starting at position 3931 of SEQ ID NO: 1885866
acggaaaugucucgaaggu

SEQ ID NO: 2373597 - RNA, 19 nt, Artificial Sequence
  Description of Artificial Sequence: Synthetic oligonucleotide
  Antisense strand to SEQ ID NO: 2373596
accuucgagacauuuccgu

SEQ ID NO: 2373598 - RNA, 19 nt, Artificial Sequence
  Description of Artificial Sequence: Synthetic oligonucleotide
  Sense strand starting at position 3932 of SEQ ID NO: 1885866
cggaaaugucucgaagguc

SEQ ID NO: 2373599 - RNA, 19 nt, Artificial Sequence
  Description of Artificial Sequence: Synthetic oligonucleotide
  Antisense strand to SEQ ID NO: 2373598
gaccuucgagacauuuccg

SEQ ID NO: 2373600 - RNA, 19 nt, Artificial Sequence
  Description of Artificial Sequence: Synthetic oligonucleotide
  Sense strand starting at position 18 of SEQ ID NO: 1885867
acuugugaugagcacuaga

SEQ ID NO: 2373601 - RNA, 19 nt, Artificial Sequence
  Description of Artificial Sequence: Synthetic oligonucleotide
  Antisense strand to SEQ ID NO: 2373600
ucuagugcucaucacaagu

SEQ ID NO: 2373602 - RNA, 19 nt, Artificial Sequence
  Description of Artificial Sequence: Synthetic oligonucleotide
  Sense strand starting at position 44 of SEQ ID NO: 1885867
cuauauuuguagcaauguu

SEQ ID NO: 2373603 - RNA, 19 nt, Artificial Sequence
  Description of Artificial Sequence: Synthetic oligonucleotide
  Antisense strand to SEQ ID NO: 2373602
aacauugcuacaaauauag

SEQ ID NO: 2373604 - RNA, 19 nt, Artificial Sequence
  Description of Artificial Sequence: Synthetic oligonucleotide
  Sense strand starting at position 58 of SEQ ID NO: 1885867
auguuauguuacccauuau

SEQ ID NO: 2373605 - RNA, 19 nt, Artificial Sequence
  Description of Artificial Sequence: Synthetic oligonucleotide
  Antisense strand to SEQ ID NO: 2373604
auaauggguaacauaacau

SEQ ID NO: 2373606 - RNA, 19 nt, Artificial Sequence
  Description of Artificial Sequence: Synthetic oligonucleotide
  Sense strand starting at position 1082 of SEQ ID NO: 1885867
agacuagaauaauaugacu

SEQ ID NO: 2373607 - RNA, 19 nt, Artificial Sequence
  Description of Artificial Sequence: Synthetic oligonucleotide
  Antisense strand to SEQ ID NO: 2373606
agucauauuauucuagucu

SEQ ID NO: 2373608 - RNA, 19 nt, Artificial Sequence
  Description of Artificial Sequence: Synthetic oligonucleotide
  Sense strand starting at position 1380 of SEQ ID NO: 1885867
gcgacuaggucauccugaa

SEQ ID NO: 2373609 - RNA, 19 nt, Artificial Sequence
  Description of Artificial Sequence: Synthetic oligonucleotide
  Antisense strand to SEQ ID NO: 2373608
uucaggaugaccuagucgc

SEQ ID NO: 2373610 - RNA, 19 nt, Artificial Sequence
  Description of Artificial Sequence: Synthetic oligonucleotide
  Sense strand starting at position 1420 of SEQ ID NO: 1885867
agcaguucuguggagugaa

SEQ ID NO: 2373611 - RNA, 19 nt, Artificial Sequence
  Description of Artificial Sequence: Synthetic oligonucleotide
  Antisense strand to SEQ ID NO: 2373610
uucacuccacagaacugcu

SEQ ID NO: 2373612 - RNA, 19 nt, Artificial Sequence
  Description of Artificial Sequence: Synthetic oligonucleotide
  Sense strand starting at position 1545 of SEQ ID NO: 1885867
agcuuccaggcauguuaaa

SEQ ID NO: 2373613 - RNA, 19 nt, Artificial Sequence
  Description of Artificial Sequence: Synthetic oligonucleotide
  Antisense strand to SEQ ID NO: 2373612
uuuaacaugccuggaagcu

SEQ ID NO: 2373614 - RNA, 19 nt, Artificial Sequence
  Description of Artificial Sequence: Synthetic oligonucleotide
  Sense strand starting at position 2057 of SEQ ID NO: 1885867
gaaguaaaucgccgaguga

SEQ ID NO: 2373615 - RNA, 19 nt, Artificial Sequence
  Description of Artificial Sequence: Synthetic oligonucleotide
  Antisense strand to SEQ ID NO: 2373614
ucacucggcgauuuacuuc

SEQ ID NO: 2373616 - RNA, 19 nt, Artificial Sequence
  Description of Artificial Sequence: Synthetic oligonucleotide
  Sense strand starting at position 2058 of SEQ ID NO: 1885867
aaguaaaucgccgagugac

SEQ ID NO: 2373617 - RNA, 19 nt, Artificial Sequence
  Description of Artificial Sequence: Synthetic oligonucleotide
  Antisense strand to SEQ ID NO: 2373616
gucacucggcgauuuacuu

SEQ ID NO: 2373618 - RNA, 19 nt, Artificial Sequence
  Description of Artificial Sequence: Synthetic oligonucleotide
  Sense strand starting at position 2066 of SEQ ID NO: 1885867
cgccgagugaccuaaggaa

SEQ ID NO: 2373619 - RNA, 19 nt, Artificial Sequence
  Description of Artificial Sequence: Synthetic oligonucleotide
  Antisense strand to SEQ ID NO: 2373618
uuccuuaggucacucggcg

SEQ ID NO: 2373620 - RNA, 19 nt, Artificial Sequence
  Description of Artificial Sequence: Synthetic oligonucleotide
  Sense strand starting at position 2098 of SEQ ID NO: 1885867
uagggucugcuccacagaa

SEQ ID NO: 2373621 - RNA, 19 nt, Artificial Sequence
  Description of Artificial Sequence: Synthetic oligonucleotide
  Antisense strand to SEQ ID NO: 2373620
uucuguggagcagacccua

SEQ ID NO: 2373622 - RNA, 19 nt, Artificial Sequence
  Description of Artificial Sequence: Synthetic oligonucleotide
  Sense strand starting at position 2116 of SEQ ID NO: 1885867
aggcuuaccucugaaagag

SEQ ID NO: 2373623 - RNA, 19 nt, Artificial Sequence
  Description of Artificial Sequence: Synthetic oligonucleotide
  Antisense strand to SEQ ID NO: 2373622
cucuuucagagguaagccu

SEQ ID NO: 2373624 - RNA, 19 nt, Artificial Sequence
  Description of Artificial Sequence: Synthetic oligonucleotide
  Sense strand starting at position 2315 of SEQ ID NO: 1885867
aguccuucuuccgggagau

SEQ ID NO: 2373625 - RNA, 19 nt, Artificial Sequence
  Description of Artificial Sequence: Synthetic oligonucleotide
  Antisense strand to SEQ ID NO: 2373624
aucucccggaagaaggacu

SEQ ID NO: 2373626 - RNA, 19 nt, Artificial Sequence
  Description of Artificial Sequence: Synthetic oligonucleotide
  Sense strand starting at position 2316 of SEQ ID NO: 1885867
guccuucuuccgggagauu

SEQ ID NO: 2373627 - RNA, 19 nt, Artificial Sequence
  Description of Artificial Sequence: Synthetic oligonucleotide
  Antisense strand to SEQ ID NO: 2373626
aaucucccggaagaaggac

SEQ ID NO: 2373628 - RNA, 19 nt, Artificial Sequence
  Description of Artificial Sequence: Synthetic oligonucleotide
  Sense strand starting at position 2376 of SEQ ID NO: 1885867
cguuucuuggcugucacua

SEQ ID NO: 2373629 - RNA, 19 nt, Artificial Sequence
  Description of Artificial Sequence: Synthetic oligonucleotide
  Antisense strand to SEQ ID NO: 2373628
uagugacagccaagaaacg

SEQ ID NO: 2373630 - RNA, 19 nt, Artificial Sequence
  Description of Artificial Sequence: Synthetic oligonucleotide
  Sense strand starting at position 2381 of SEQ ID NO: 1885867
cuuggcugucacuaucgaa

SEQ ID NO: 2373631 - RNA, 19 nt, Artificial Sequence
  Description of Artificial Sequence: Synthetic oligonucleotide
  Antisense strand to SEQ ID NO: 2373630
uucgauagugacagccaag

SEQ ID NO: 2373632 - RNA, 19 nt, Artificial Sequence
  Description of Artificial Sequence: Synthetic oligonucleotide
  Sense strand starting at position 2389 of SEQ ID NO: 1885867
ucacuaucgaacugaggua

SEQ ID NO: 2373633 - RNA, 19 nt, Artificial Sequence
  Description of Artificial Sequence: Synthetic oligonucleotide
  Antisense strand to SEQ ID NO: 2373632
uaccucaguucgauaguga

SEQ ID NO: 2373634 - RNA, 19 nt, Artificial Sequence
  Description of Artificial Sequence: Synthetic oligonucleotide
  Sense strand starting at position 2429 of SEQ ID NO: 1885867
ucuuguuuacuccagaguu

SEQ ID NO: 2373635 - RNA, 19 nt, Artificial Sequence
  Description of Artificial Sequence: Synthetic oligonucleotide
  Antisense strand to SEQ ID NO: 2373634
aacucuggaguaaacaaga

SEQ ID NO: 2373636 - RNA, 19 nt, Artificial Sequence
  Description of Artificial Sequence: Synthetic oligonucleotide
  Sense strand starting at position 2431 of SEQ ID NO: 1885867
uuguuuacuccagaguuug

SEQ ID NO: 2373637 - RNA, 19 nt, Artificial Sequence
  Description of Artificial Sequence: Synthetic oligonucleotide
  Antisense strand to SEQ ID NO: 2373636
caaacucuggaguaaacaa

SEQ ID NO: 2373638 - RNA, 19 nt, Artificial Sequence
  Description of Artificial Sequence: Synthetic oligonucleotide
  Sense strand starting at position 2526 of SEQ ID NO: 1885867
agaaaucggccaugggaua

SEQ ID NO: 2373639 - RNA, 19 nt, Artificial Sequence
  Description of Artificial Sequence: Synthetic oligonucleotide
  Antisense strand to SEQ ID NO: 2373638
uaucccauggccgauuucu

SEQ ID NO: 2373640 - RNA, 19 nt, Artificial Sequence
  Description of Artificial Sequence: Synthetic oligonucleotide
  Sense strand starting at position 2527 of SEQ ID NO: 1885867
gaaaucggccaugggauaa

SEQ ID NO: 2373641 - RNA, 19 nt, Artificial Sequence
  Description of Artificial Sequence: Synthetic oligonucleotide
  Antisense strand to SEQ ID NO: 2373640
uuaucccauggccgauuuc

SEQ ID NO: 2373642 - RNA, 19 nt, Artificial Sequence
  Description of Artificial Sequence: Synthetic oligonucleotide
  Sense strand starting at position 2566 of SEQ ID NO: 1885867
ucugcaaggcagugaaaua

SEQ ID NO: 2373643 - RNA, 19 nt, Artificial Sequence
  Description of Artificial Sequence: Synthetic oligonucleotide
  Antisense strand to SEQ ID NO: 2373642
uauuucacugccuugcaga

SEQ ID NO: 2373644 - RNA, 19 nt, Artificial Sequence
  Description of Artificial Sequence: Synthetic oligonucleotide
  Sense strand starting at position 2595 of SEQ ID NO: 1885867
gcggcugcgacuguagaua

SEQ ID NO: 2373645 - RNA, 19 nt, Artificial Sequence
  Description of Artificial Sequence: Synthetic oligonucleotide
  Antisense strand to SEQ ID NO: 2373644
uaucuacagucgcagccgc

SEQ ID NO: 2373646 - RNA, 19 nt, Artificial Sequence
  Description of Artificial Sequence: Synthetic oligonucleotide
  Sense strand starting at position 2669 of SEQ ID NO: 1885867
cggugaauuaaauguuuag

SEQ ID NO: 2373647 - RNA, 19 nt, Artificial Sequence
  Description of Artificial Sequence: Synthetic oligonucleotide
  Antisense strand to SEQ ID NO: 2373646
cuaaacauuuaauucaccg

SEQ ID NO: 2373648 - RNA, 19 nt, Artificial Sequence
  Description of Artificial Sequence: Synthetic oligonucleotide
  Sense strand starting at position 2681 of SEQ ID NO: 1885867
uguuuaguguuucuaaacu

SEQ ID NO: 2373649 - RNA, 19 nt, Artificial Sequence
  Description of Artificial Sequence: Synthetic oligonucleotide
  Antisense strand to SEQ ID NO: 2373648
aguuuagaaacacuaaaca

SEQ ID NO: 2373650 - RNA, 19 nt, Artificial Sequence
  Description of Artificial Sequence: Synthetic oligonucleotide
  Sense strand starting at position 2742 of SEQ ID NO: 1885867
uugacuacugcaugaccua

SEQ ID NO: 2373651 - RNA, 19 nt, Artificial Sequence
  Description of Artificial Sequence: Synthetic oligonucleotide
  Antisense strand to SEQ ID NO: 2373650
uaggucaugcaguagucaa

SEQ ID NO: 2373652 - RNA, 19 nt, Artificial Sequence
  Description of Artificial Sequence: Synthetic oligonucleotide
  Sense strand starting at position 2797 of SEQ ID NO: 1885867
ccgggagcugugugaugaa

SEQ ID NO: 2373653 - RNA, 19 nt, Artificial Sequence
  Description of Artificial Sequence: Synthetic oligonucleotide
  Antisense strand to SEQ ID NO: 2373652
uucaucacacagcucccgg

SEQ ID NO: 2373654 - RNA, 19 nt, Artificial Sequence
  Description of Artificial Sequence: Synthetic oligonucleotide
  Sense strand starting at position 2822 of SEQ ID NO: 1885867
ggaggaucccugcaccuga

SEQ ID NO: 2373655 - RNA, 19 nt, Artificial Sequence
  Description of Artificial Sequence: Synthetic oligonucleotide
  Antisense strand to SEQ ID NO: 2373654
ucaggugcagggauccucc

SEQ ID NO: 2373656 - RNA, 19 nt, Artificial Sequence
  Description of Artificial Sequence: Synthetic oligonucleotide
  Sense strand starting at position 2833 of SEQ ID NO: 1885867
gcaccugagcacugacauu

SEQ ID NO: 2373657 - RNA, 19 nt, Artificial Sequence
  Description of Artificial Sequence: Synthetic oligonucleotide
  Antisense strand to SEQ ID NO: 2373656
aaugucagugcucaggugc

SEQ ID NO: 2373658 - RNA, 19 nt, Artificial Sequence
  Description of Artificial Sequence: Synthetic oligonucleotide
  Sense strand starting at position 2871 of SEQ ID NO: 1885867
aagucucgcccuuguaauu

SEQ ID NO: 2373659 - RNA, 19 nt, Artificial Sequence
  Description of Artificial Sequence: Synthetic oligonucleotide
  Antisense strand to SEQ ID NO: 2373658
aauuacaagggcgagacuu

SEQ ID NO: 2373660 - RNA, 19 nt, Artificial Sequence
  Description of Artificial Sequence: Synthetic oligonucleotide
  Sense strand starting at position 2947 of SEQ ID NO: 1885867
ucuccaggccucuaagaga

SEQ ID NO: 2373661 - RNA, 19 nt, Artificial Sequence
  Description of Artificial Sequence: Synthetic oligonucleotide
  Antisense strand to SEQ ID NO: 2373660
ucucuuagaggccuggaga

SEQ ID NO: 2373662 - RNA, 19 nt, Artificial Sequence
  Description of Artificial Sequence: Synthetic oligonucleotide
  Sense strand starting at position 3002 of SEQ ID NO: 1885867
aaacaaguacgguaaucua

SEQ ID NO: 2373663 - RNA, 19 nt, Artificial Sequence
  Description of Artificial Sequence: Synthetic oligonucleotide
  Antisense strand to SEQ ID NO: 2373662
uagauuaccguacuuguuu

SEQ ID NO: 2373664 - RNA, 19 nt, Artificial Sequence
  Description of Artificial Sequence: Synthetic oligonucleotide
  Sense strand starting at position 3010 of SEQ ID NO: 1885867
acgguaaucuauccaaaua

SEQ ID NO: 2373665 - RNA, 19 nt, Artificial Sequence
  Description of Artificial Sequence: Synthetic oligonucleotide
  Antisense strand to SEQ ID NO: 2373664
uauuuggauagauuaccgu

SEQ ID NO: 2373666 - RNA, 19 nt, Artificial Sequence
  Description of Artificial Sequence: Synthetic oligonucleotide
  Sense strand starting at position 3745 of SEQ ID NO: 1885867
aaguaauccuccugaggca

SEQ ID NO: 2373667 - RNA, 19 nt, Artificial Sequence
  Description of Artificial Sequence: Synthetic oligonucleotide
  Antisense strand to SEQ ID NO: 2373666
ugccucaggaggauuacuu

SEQ ID NO: 2373668 - RNA, 19 nt, Artificial Sequence
  Description of Artificial Sequence: Synthetic oligonucleotide
  Sense strand starting at position 3820 of SEQ ID NO: 1885867
agguaauauucuguccaua

SEQ ID NO: 2373669 - RNA, 19 nt, Artificial Sequence
  Description of Artificial Sequence: Synthetic oligonucleotide
  Antisense strand to SEQ ID NO: 2373668
uauggacagaauauuaccu

SEQ ID NO: 2373670 - RNA, 19 nt, Artificial Sequence
  Description of Artificial Sequence: Synthetic oligonucleotide
  Sense strand starting at position 3822 of SEQ ID NO: 1885867
guaauauucuguccauagg

SEQ ID NO: 2373671 - RNA, 19 nt, Artificial Sequence
  Description of Artificial Sequence: Synthetic oligonucleotide
  Antisense strand to SEQ ID NO: 2373670
ccuauggacagaauauuac

SEQ ID NO: 2373672 - RNA, 19 nt, Artificial Sequence
  Description of Artificial Sequence: Synthetic oligonucleotide
  Sense strand starting at position 3839 of SEQ ID NO: 1885867
gggcauaggccauaaaugu

SEQ ID NO: 2373673 - RNA, 19 nt, Artificial Sequence
  Description of Artificial Sequence: Synthetic oligonucleotide
  Antisense strand to SEQ ID NO: 2373672
acauuuauggccuaugccc

SEQ ID NO: 2373674 - RNA, 19 nt, Artificial Sequence
  Description of Artificial Sequence: Synthetic oligonucleotide
  Sense strand starting at position 3846 of SEQ ID NO: 1885867
ggccauaaaugucuuugua

SEQ ID NO: 2373675 - RNA, 19 nt, Artificial Sequence
  Description of Artificial Sequence: Synthetic oligonucleotide
  Antisense strand to SEQ ID NO: 2373674
uacaaagacauuuauggcc

SEQ ID NO: 2373676 - RNA, 19 nt, Artificial Sequence
  Description of Artificial Sequence: Synthetic oligonucleotide
  Sense strand starting at position 3848 of SEQ ID NO: 1885867
ccauaaaugucuuuguaac

SEQ ID NO: 2373677 - RNA, 19 nt, Artificial Sequence
  Description of Artificial Sequence: Synthetic oligonucleotide
  Antisense strand to SEQ ID NO: 2373676
guuacaaagacauuuaugg

SEQ ID NO: 2373678 - RNA, 19 nt, Artificial Sequence
  Description of Artificial Sequence: Synthetic oligonucleotide
  Sense strand starting at position 3891 of SEQ ID NO: 1885867
uaaggcauacccgaaguaa

SEQ ID NO: 2373679 - RNA, 19 nt, Artificial Sequence
  Description of Artificial Sequence: Synthetic oligonucleotide
  Antisense strand to SEQ ID NO: 2373678
uuacuucggguaugccuua

SEQ ID NO: 2373680 - RNA, 19 nt, Artificial Sequence
  Description of Artificial Sequence: Synthetic oligonucleotide
  Sense strand starting at position 39 of SEQ ID NO: 1885868
gcccaaagcugauuccuga

SEQ ID NO: 2373681 - RNA, 19 nt, Artificial Sequence
  Description of Artificial Sequence: Synthetic oligonucleotide
  Antisense strand to SEQ ID NO: 2373680
ucaggaaucagcuuugggc

SEQ ID NO: 2373682 - RNA, 19 nt, Artificial Sequence
  Description of Artificial Sequence: Synthetic oligonucleotide
  Sense strand starting at position 224 of SEQ ID NO: 1885868
uccuuaggccagugaucau

SEQ ID NO: 2373683 - RNA, 19 nt, Artificial Sequence
  Description of Artificial Sequence: Synthetic oligonucleotide
  Antisense strand to SEQ ID NO: 2373682
augaucacuggccuaagga

SEQ ID NO: 2373684 - RNA, 19 nt, Artificial Sequence
  Description of Artificial Sequence: Synthetic oligonucleotide
  Sense strand starting at position 227 of SEQ ID NO: 1885868
uuaggccagugaucauuaa

SEQ ID NO: 2373685 - RNA, 19 nt, Artificial Sequence
  Description of Artificial Sequence: Synthetic oligonucleotide
  Antisense strand to SEQ ID NO: 2373684
uuaaugaucacuggccuaa

SEQ ID NO: 2373686 - RNA, 19 nt, Artificial Sequence
  Description of Artificial Sequence: Synthetic oligonucleotide
  Sense strand starting at position 228 of SEQ ID NO: 1885868
uaggccagugaucauuaaa

SEQ ID NO: 2373687 - RNA, 19 nt, Artificial Sequence
  Description of Artificial Sequence: Synthetic oligonucleotide
  Antisense strand to SEQ ID NO: 2373686
uuuaaugaucacuggccua

SEQ ID NO: 2373688 - RNA, 19 nt, Artificial Sequence
  Description of Artificial Sequence: Synthetic oligonucleotide
  Sense strand starting at position 231 of SEQ ID NO: 1885868
gccagugaucauuaaacua

SEQ ID NO: 2373689 - RNA, 19 nt, Artificial Sequence
  Description of Artificial Sequence: Synthetic oligonucleotide
  Antisense strand to SEQ ID NO: 2373688
uaguuuaaugaucacuggc

SEQ ID NO: 2373690 - RNA, 19 nt, Artificial Sequence
  Description of Artificial Sequence: Synthetic oligonucleotide
  Sense strand starting at position 298 of SEQ ID NO: 1885868
aggacaaacuaagaauaau

SEQ ID NO: 2373691 - RNA, 19 nt, Artificial Sequence
  Description of Artificial Sequence: Synthetic oligonucleotide
  Antisense strand to SEQ ID NO: 2373690
auuauucuuaguuuguccu

SEQ ID NO: 2373692 - RNA, 19 nt, Artificial Sequence
  Description of Artificial Sequence: Synthetic oligonucleotide
  Sense strand starting at position 474 of SEQ ID NO: 1885868
ccucuaacugcagauguga

SEQ ID NO: 2373693 - RNA, 19 nt, Artificial Sequence
  Description of Artificial Sequence: Synthetic oligonucleotide
  Antisense strand to SEQ ID NO: 2373692
ucacaucugcaguuagagg

SEQ ID NO: 2373694 - RNA, 19 nt, Artificial Sequence
  Description of Artificial Sequence: Synthetic oligonucleotide
  Sense strand starting at position 841 of SEQ ID NO: 1885868
agggacuucuggccaccua

SEQ ID NO: 2373695 - RNA, 19 nt, Artificial Sequence
  Description of Artificial Sequence: Synthetic oligonucleotide
  Antisense strand to SEQ ID NO: 2373694
uagguggccagaagucccu

SEQ ID NO: 2373696 - RNA, 19 nt, Artificial Sequence
  Description of Artificial Sequence: Synthetic oligonucleotide
  Sense strand starting at position 1055 of SEQ ID NO: 1885868
ugcagucggagcuaauaaa

SEQ ID NO: 2373697 - RNA, 19 nt, Artificial Sequence
  Description of Artificial Sequence: Synthetic oligonucleotide
  Antisense strand to SEQ ID NO: 2373696
uuuauuagcuccgacugca

SEQ ID NO: 2373698 - RNA, 19 nt, Artificial Sequence
  Description of Artificial Sequence: Synthetic oligonucleotide
  Sense strand starting at position 1066 of SEQ ID NO: 1885868
cuaauaaauguuggugaaa

SEQ ID NO: 2373699 - RNA, 19 nt, Artificial Sequence
  Description of Artificial Sequence: Synthetic oligonucleotide
  Antisense strand to SEQ ID NO: 2373698
uuucaccaacauuuauuag

SEQ ID NO: 2373700 - RNA, 19 nt, Artificial Sequence
  Description of Artificial Sequence: Synthetic oligonucleotide
  Sense strand starting at position 1067 of SEQ ID NO: 1885868
uaauaaauguuggugaaag

SEQ ID NO: 2373701 - RNA, 19 nt, Artificial Sequence
  Description of Artificial Sequence: Synthetic oligonucleotide
  Antisense strand to SEQ ID NO: 2373700
cuuucaccaacauuuauua

SEQ ID NO: 2373702 - RNA, 19 nt, Artificial Sequence
  Description of Artificial Sequence: Synthetic oligonucleotide
  Sense strand starting at position 1191 of SEQ ID NO: 1885868
auauguaggcaauggauau

SEQ ID NO: 2373703 - RNA, 19 nt, Artificial Sequence
  Description of Artificial Sequence: Synthetic oligonucleotide
  Antisense strand to SEQ ID NO: 2373702
auauccauugccuacauau

SEQ ID NO: 2373704 - RNA, 19 nt, Artificial Sequence
  Description of Artificial Sequence: Synthetic oligonucleotide
  Sense strand starting at position 1195 of SEQ ID NO: 1885868
guaggcaauggauauguaa

SEQ ID NO: 2373705 - RNA, 19 nt, Artificial Sequence
  Description of Artificial Sequence: Synthetic oligonucleotide
  Antisense strand to SEQ ID NO: 2373704
uuacauauccauugccuac

SEQ ID NO: 2373706 - RNA, 19 nt, Artificial Sequence
  Description of Artificial Sequence: Synthetic oligonucleotide
  Sense strand starting at position 1197 of SEQ ID NO: 1885868
aggcaauggauauguaaag

SEQ ID NO: 2373707 - RNA, 19 nt, Artificial Sequence
  Description of Artificial Sequence: Synthetic oligonucleotide
  Antisense strand to SEQ ID NO: 2373706
cuuuacauauccauugccu

SEQ ID NO: 2373708 - RNA, 19 nt, Artificial Sequence
  Description of Artificial Sequence: Synthetic oligonucleotide
  Sense strand starting at position 1198 of SEQ ID NO: 1885868
ggcaauggauauguaaaga

SEQ ID NO: 2373709 - RNA, 19 nt, Artificial Sequence
  Description of Artificial Sequence: Synthetic oligonucleotide
  Antisense strand to SEQ ID NO: 2373708
ucuuuacauauccauugcc

SEQ ID NO: 2373710 - RNA, 19 nt, Artificial Sequence
  Description of Artificial Sequence: Synthetic oligonucleotide
  Sense strand starting at position 1390 of SEQ ID NO: 1885868
uugagcugagucugagaaa

SEQ ID NO: 2373711 - RNA, 19 nt, Artificial Sequence
  Description of Artificial Sequence: Synthetic oligonucleotide
  Antisense strand to SEQ ID NO: 2373710
uuucucagacucagcucaa

SEQ ID NO: 2373712 - RNA, 19 nt, Artificial Sequence
  Description of Artificial Sequence: Synthetic oligonucleotide
  Sense strand starting at position 1437 of SEQ ID NO: 1885868
uggaaaugggagugcugua

SEQ ID NO: 2373713 - RNA, 19 nt, Artificial Sequence
  Description of Artificial Sequence: Synthetic oligonucleotide
  Antisense strand to SEQ ID NO: 2373712
uacagcacucccauuucca

SEQ ID NO: 2373714 - RNA, 19 nt, Artificial Sequence
  Description of Artificial Sequence: Synthetic oligonucleotide
  Sense strand starting at position 1442 of SEQ ID NO: 1885868
augggagugcuguauucuu

SEQ ID NO: 2373715 - RNA, 19 nt, Artificial Sequence
  Description of Artificial Sequence: Synthetic oligonucleotide
  Antisense strand to SEQ ID NO: 2373714
aagaauacagcacucccau

SEQ ID NO: 2373716 - RNA, 19 nt, Artificial Sequence
  Description of Artificial Sequence: Synthetic oligonucleotide
  Sense strand starting at position 1449 of SEQ ID NO: 1885868
ugcuguauucuugacagaa

SEQ ID NO: 2373717 - RNA, 19 nt, Artificial Sequence
  Description of Artificial Sequence: Synthetic oligonucleotide
  Antisense strand to SEQ ID NO: 2373716
uucugucaagaauacagca

SEQ ID NO: 2373718 - RNA, 19 nt, Artificial Sequence
  Description of Artificial Sequence: Synthetic oligonucleotide
  Sense strand starting at position 2298 of SEQ ID NO: 1885868
gugucuucucgcucccaca

SEQ ID NO: 2373719 - RNA, 19 nt, Artificial Sequence
  Description of Artificial Sequence: Synthetic oligonucleotide
  Antisense strand to SEQ ID NO: 2373718
ugugggagcgagaagacac

SEQ ID NO: 2373720 - RNA, 19 nt, Artificial Sequence
  Description of Artificial Sequence: Synthetic oligonucleotide
  Sense strand starting at position 2353 of SEQ ID NO: 1885868
uggccaucaagucgauaua

SEQ ID NO: 2373721 - RNA, 19 nt, Artificial Sequence
  Description of Artificial Sequence: Synthetic oligonucleotide
  Antisense strand to SEQ ID NO: 2373720
uauaucgacuugauggcca

SEQ ID NO: 2373722 - RNA, 19 nt, Artificial Sequence
  Description of Artificial Sequence: Synthetic oligonucleotide
  Sense strand starting at position 2382 of SEQ ID NO: 1885868
gcggcuuggcccuugugaa

SEQ ID NO: 2373723 - RNA, 19 nt, Artificial Sequence
  Description of Artificial Sequence: Synthetic oligonucleotide
  Antisense strand to SEQ ID NO: 2373722
uucacaagggccaagccgc

SEQ ID NO: 2373724 - RNA, 19 nt, Artificial Sequence
  Description of Artificial Sequence: Synthetic oligonucleotide
  Sense strand starting at position 2780 of SEQ ID NO: 1885868
caaggaaaugcccagguuu

SEQ ID NO: 2373725 - RNA, 19 nt, Artificial Sequence
  Description of Artificial Sequence: Synthetic oligonucleotide
  Antisense strand to SEQ ID NO: 2373724
aaaccugggcauuuccuug

SEQ ID NO: 2373726 - RNA, 19 nt, Artificial Sequence
  Description of Artificial Sequence: Synthetic oligonucleotide
  Sense strand starting at position 2828 of SEQ ID NO: 1885868
aggugaggaguucagcuuu

SEQ ID NO: 2373727 - RNA, 19 nt, Artificial Sequence
  Description of Artificial Sequence: Synthetic oligonucleotide
  Antisense strand to SEQ ID NO: 2373726
aaagcugaacuccucaccu

SEQ ID NO: 2373728 - RNA, 19 nt, Artificial Sequence
  Description of Artificial Sequence: Synthetic oligonucleotide
  Sense strand starting at position 2834 of SEQ ID NO: 1885868
ggaguucagcuuuggacau

SEQ ID NO: 2373729 - RNA, 19 nt, Artificial Sequence
  Description of Artificial Sequence: Synthetic oligonucleotide
  Antisense strand to SEQ ID NO: 2373728
auguccaaagcugaacucc

SEQ ID NO: 2373730 - RNA, 19 nt, Artificial Sequence
  Description of Artificial Sequence: Synthetic oligonucleotide
  Sense strand starting at position 2907 of SEQ ID NO: 1885868
gaauauaugugacuggagu

SEQ ID NO: 2373731 - RNA, 19 nt, Artificial Sequence
  Description of Artificial Sequence: Synthetic oligonucleotide
  Antisense strand to SEQ ID NO: 2373730
acuccagucacauauauuc

SEQ ID NO: 2373732 - RNA, 19 nt, Artificial Sequence
  Description of Artificial Sequence: Synthetic oligonucleotide
  Sense strand starting at position 2908 of SEQ ID NO: 1885868
aauauaugugacuggaguu

SEQ ID NO: 2373733 - RNA, 19 nt, Artificial Sequence
  Description of Artificial Sequence: Synthetic oligonucleotide
  Antisense strand to SEQ ID NO: 2373732
aacuccagucacauauauu

SEQ ID NO: 2373734 - RNA, 19 nt, Artificial Sequence
  Description of Artificial Sequence: Synthetic oligonucleotide
  Sense strand starting at position 2909 of SEQ ID NO: 1885868
auauaugugacuggaguuu

SEQ ID NO: 2373735 - RNA, 19 nt, Artificial Sequence
  Description of Artificial Sequence: Synthetic oligonucleotide
  Antisense strand to SEQ ID NO: 2373734
aaacuccagucacauauau

SEQ ID NO: 2373736 - RNA, 19 nt, Artificial Sequence
  Description of Artificial Sequence: Synthetic oligonucleotide
  Sense strand starting at position 2930 of SEQ ID NO: 1885868
gaaaucaaggcuggugaua

SEQ ID NO: 2373737 - RNA, 19 nt, Artificial Sequence
  Description of Artificial Sequence: Synthetic oligonucleotide
  Antisense strand to SEQ ID NO: 2373736
uaucaccagccuugauuuc

SEQ ID NO: 2373738 - RNA, 19 nt, Artificial Sequence
  Description of Artificial Sequence: Synthetic oligonucleotide
  Sense strand starting at position 3000 of SEQ ID NO: 1885868
augagagaguguguaaaga

SEQ ID NO: 2373739 - RNA, 19 nt, Artificial Sequence
  Description of Artificial Sequence: Synthetic oligonucleotide
  Antisense strand to SEQ ID NO: 2373738
ucuuuacacacucucucau

SEQ ID NO: 2373740 - RNA, 19 nt, Artificial Sequence
  Description of Artificial Sequence: Synthetic oligonucleotide
  Sense strand starting at position 3091 of SEQ ID NO: 1885868
cgguguaacggcagcuaaa

SEQ ID NO: 2373741 - RNA, 19 nt, Artificial Sequence
  Description of Artificial Sequence: Synthetic oligonucleotide
  Antisense strand to SEQ ID NO: 2373740
uuuagcugccguuacaccg

SEQ ID NO: 2373742 - RNA, 19 nt, Artificial Sequence
  Description of Artificial Sequence: Synthetic oligonucleotide
  Sense strand starting at position 3167 of SEQ ID NO: 1885868
acauguaacgacugagaag

SEQ ID NO: 2373743 - RNA, 19 nt, Artificial Sequence
  Description of Artificial Sequence: Synthetic oligonucleotide
  Antisense strand to SEQ ID NO: 2373742
cuucucagucguuacaugu

SEQ ID NO: 2373744 - RNA, 19 nt, Artificial Sequence
  Description of Artificial Sequence: Synthetic oligonucleotide
  Sense strand starting at position 3273 of SEQ ID NO: 1885868
agaauaauccagugacuuc

SEQ ID NO: 2373745 - RNA, 19 nt, Artificial Sequence
  Description of Artificial Sequence: Synthetic oligonucleotide
  Antisense strand to SEQ ID NO: 2373744
gaagucacuggauuauucu

SEQ ID NO: 2373746 - RNA, 19 nt, Artificial Sequence
  Description of Artificial Sequence: Synthetic oligonucleotide
  Sense strand starting at position 3399 of SEQ ID NO: 1885868
agaggacgguuccugaaga

SEQ ID NO: 2373747 - RNA, 19 nt, Artificial Sequence
  Description of Artificial Sequence: Synthetic oligonucleotide
  Antisense strand to SEQ ID NO: 2373746
ucuucaggaaccguccucu

SEQ ID NO: 2373748 - RNA, 19 nt, Artificial Sequence
  Description of Artificial Sequence: Synthetic oligonucleotide
  Sense strand starting at position 3435 of SEQ ID NO: 1885868
aguagagauugaguucucu

SEQ ID NO: 2373749 - RNA, 19 nt, Artificial Sequence
  Description of Artificial Sequence: Synthetic oligonucleotide
  Antisense strand to SEQ ID NO: 2373748
agagaacucaaucucuacu

SEQ ID NO: 2373750 - RNA, 19 nt, Artificial Sequence
  Description of Artificial Sequence: Synthetic oligonucleotide
  Sense strand starting at position 3439 of SEQ ID NO: 1885868
gagauugaguucucuacag

SEQ ID NO: 2373751 - RNA, 19 nt, Artificial Sequence
  Description of Artificial Sequence: Synthetic oligonucleotide
  Antisense strand to SEQ ID NO: 2373750
cuguagagaacucaaucuc

SEQ ID NO: 2373752 - RNA, 19 nt, Artificial Sequence
  Description of Artificial Sequence: Synthetic oligonucleotide
  Sense strand starting at position 3517 of SEQ ID NO: 1885868
uguagguuuggugauggga

SEQ ID NO: 2373753 - RNA, 19 nt, Artificial Sequence
  Description of Artificial Sequence: Synthetic oligonucleotide
  Antisense strand to SEQ ID NO: 2373752
ucccaucaccaaaccuaca

SEQ ID NO: 2373754 - RNA, 19 nt, Artificial Sequence
  Description of Artificial Sequence: Synthetic oligonucleotide
  Sense strand starting at position 3566 of SEQ ID NO: 1885868
ggagguguugaagguauau

SEQ ID NO: 2373755 - RNA, 19 nt, Artificial Sequence
  Description of Artificial Sequence: Synthetic oligonucleotide
  Antisense strand to SEQ ID NO: 2373754
auauaccuucaacaccucc

SEQ ID NO: 2373756 - RNA, 19 nt, Artificial Sequence
  Description of Artificial Sequence: Synthetic oligonucleotide
  Sense strand starting at position 3588 of SEQ ID NO: 1885868
gacucuugagaauggcaaa

SEQ ID NO: 2373757 - RNA, 19 nt, Artificial Sequence
  Description of Artificial Sequence: Synthetic oligonucleotide
  Antisense strand to SEQ ID NO: 2373756
uuugccauucucaagaguc

SEQ ID NO: 2373758 - RNA, 19 nt, Artificial Sequence
  Description of Artificial Sequence: Synthetic oligonucleotide
  Sense strand starting at position 3600 of SEQ ID NO: 1885868
uggcaaagggcugacuauu

SEQ ID NO: 2373759 - RNA, 19 nt, Artificial Sequence
  Description of Artificial Sequence: Synthetic oligonucleotide
  Antisense strand to SEQ ID NO: 2373758
aauagucagcccuuugcca

SEQ ID NO: 2373760 - RNA, 19 nt, Artificial Sequence
  Description of Artificial Sequence: Synthetic oligonucleotide
  Sense strand starting at position 72 of SEQ ID NO: 1885870
acaucuuucugggcuggua

SEQ ID NO: 2373761 - RNA, 19 nt, Artificial Sequence
  Description of Artificial Sequence: Synthetic oligonucleotide
  Antisense strand to SEQ ID NO: 2373760
uaccagcccagaaagaugu

SEQ ID NO: 2373762 - RNA, 19 nt, Artificial Sequence
  Description of Artificial Sequence: Synthetic oligonucleotide
  Sense strand starting at position 276 of SEQ ID NO: 1885870
ggagaacugucauccacug

SEQ ID NO: 2373763 - RNA, 19 nt, Artificial Sequence
  Description of Artificial Sequence: Synthetic oligonucleotide
  Antisense strand to SEQ ID NO: 2373762
caguggaugacaguucucc

SEQ ID NO: 2373764 - RNA, 19 nt, Artificial Sequence
  Description of Artificial Sequence: Synthetic oligonucleotide
  Sense strand starting at position 315 of SEQ ID NO: 1885870
cgagauuccagcuaagugu

SEQ ID NO: 2373765 - RNA, 19 nt, Artificial Sequence
  Description of Artificial Sequence: Synthetic oligonucleotide
  Antisense strand to SEQ ID NO: 2373764
acacuuagcuggaaucucg

SEQ ID NO: 2373766 - RNA, 19 nt, Artificial Sequence
  Description of Artificial Sequence: Synthetic oligonucleotide
  Sense strand starting at position 324 of SEQ ID NO: 1885870
agcuaagugucgcugaaca

SEQ ID NO: 2373767 - RNA, 19 nt, Artificial Sequence
  Description of Artificial Sequence: Synthetic oligonucleotide
  Antisense strand to SEQ ID NO: 2373766
uguucagcgacacuuagcu

SEQ ID NO: 2373768 - RNA, 19 nt, Artificial Sequence
  Description of Artificial Sequence: Synthetic oligonucleotide
  Sense strand starting at position 326 of SEQ ID NO: 1885870
cuaagugucgcugaacauc

SEQ ID NO: 2373769 - RNA, 19 nt, Artificial Sequence
  Description of Artificial Sequence: Synthetic oligonucleotide
  Antisense strand to SEQ ID NO: 2373768
gauguucagcgacacuuag

SEQ ID NO: 2373770 - RNA, 19 nt, Artificial Sequence
  Description of Artificial Sequence: Synthetic oligonucleotide
  Sense strand starting at position 742 of SEQ ID NO: 1885870
ccaucugcaugagaagaaa

SEQ ID NO: 2373771 - RNA, 19 nt, Artificial Sequence
  Description of Artificial Sequence: Synthetic oligonucleotide
  Antisense strand to SEQ ID NO: 2373770
uuucuucucaugcagaugg

SEQ ID NO: 2373772 - RNA, 19 nt, Artificial Sequence
  Description of Artificial Sequence: Synthetic oligonucleotide
  Sense strand starting at position 972 of SEQ ID NO: 1885870
auaagauguugccauuuac

SEQ ID NO: 2373773 - RNA, 19 nt, Artificial Sequence
  Description of Artificial Sequence: Synthetic oligonucleotide
  Antisense strand to SEQ ID NO: 2373772
guaaauggcaacaucuuau

SEQ ID NO: 2373774 - RNA, 19 nt, Artificial Sequence
  Description of Artificial Sequence: Synthetic oligonucleotide
  Sense strand starting at position 1017 of SEQ ID NO: 1885870
uggagcuuccaugguagaa

SEQ ID NO: 2373775 - RNA, 19 nt, Artificial Sequence
  Description of Artificial Sequence: Synthetic oligonucleotide
  Antisense strand to SEQ ID NO: 2373774
uucuaccauggaagcucca

SEQ ID NO: 2373776 - RNA, 19 nt, Artificial Sequence
  Description of Artificial Sequence: Synthetic oligonucleotide
  Sense strand starting at position 1042 of SEQ ID NO: 1885870
gacaauauguaggaguaca

SEQ ID NO: 2373777 - RNA, 19 nt, Artificial Sequence
  Description of Artificial Sequence: Synthetic oligonucleotide
  Antisense strand to SEQ ID NO: 2373776
uguacuccuacauauuguc

SEQ ID NO: 2373778 - RNA, 19 nt, Artificial Sequence
  Description of Artificial Sequence: Synthetic oligonucleotide
  Sense strand starting at position 1072 of SEQ ID NO: 1885870
auugaauuaugugaggauc

SEQ ID NO: 2373779 - RNA, 19 nt, Artificial Sequence
  Description of Artificial Sequence: Synthetic oligonucleotide
  Antisense strand to SEQ ID NO: 2373778
gauccucacauaauucaau

SEQ ID NO: 2373780 - RNA, 19 nt, Artificial Sequence
  Description of Artificial Sequence: Synthetic oligonucleotide
  Sense strand starting at position 1074 of SEQ ID NO: 1885870
ugaauuaugugaggaucaa

SEQ ID NO: 2373781 - RNA, 19 nt, Artificial Sequence
  Description of Artificial Sequence: Synthetic oligonucleotide
  Antisense strand to SEQ ID NO: 2373780
uugauccucacauaauuca

SEQ ID NO: 2373782 - RNA, 19 nt, Artificial Sequence
  Description of Artificial Sequence: Synthetic oligonucleotide
  Sense strand starting at position 1228 of SEQ ID NO: 1885870
ucccaagaaucugggauaa

SEQ ID NO: 2373783 - RNA, 19 nt, Artificial Sequence
  Description of Artificial Sequence: Synthetic oligonucleotide
  Antisense strand to SEQ ID NO: 2373782
uuaucccagauucuuggga

SEQ ID NO: 2373784 - RNA, 19 nt, Artificial Sequence
  Description of Artificial Sequence: Synthetic oligonucleotide
  Sense strand starting at position 1230 of SEQ ID NO: 1885870
ccaagaaucugggauaaca

SEQ ID NO: 2373785 - RNA, 19 nt, Artificial Sequence
  Description of Artificial Sequence: Synthetic oligonucleotide
  Antisense strand to SEQ ID NO: 2373784
uguuaucccagauucuugg

SEQ ID NO: 2373786 - RNA, 19 nt, Artificial Sequence
  Description of Artificial Sequence: Synthetic oligonucleotide
  Sense strand starting at position 1295 of SEQ ID NO: 1885870
gaggcuuuaccauguaggu

SEQ ID NO: 2373787 - RNA, 19 nt, Artificial Sequence
  Description of Artificial Sequence: Synthetic oligonucleotide
  Antisense strand to SEQ ID NO: 2373786
accuacaugguaaagccuc

SEQ ID NO: 2373788 - RNA, 19 nt, Artificial Sequence
  Description of Artificial Sequence: Synthetic oligonucleotide
  Sense strand starting at position 1297 of SEQ ID NO: 1885870
ggcuuuaccauguagguga

SEQ ID NO: 2373789 - RNA, 19 nt, Artificial Sequence
  Description of Artificial Sequence: Synthetic oligonucleotide
  Antisense strand to SEQ ID NO: 2373788
ucaccuacaugguaaagcc

SEQ ID NO: 2373790 - RNA, 19 nt, Artificial Sequence
  Description of Artificial Sequence: Synthetic oligonucleotide
  Sense strand starting at position 1310 of SEQ ID NO: 1885870
aggugaggcuggucacaaa

SEQ ID NO: 2373791 - RNA, 19 nt, Artificial Sequence
  Description of Artificial Sequence: Synthetic oligonucleotide
  Antisense strand to SEQ ID NO: 2373790
uuugugaccagccucaccu

SEQ ID NO: 2373792 - RNA, 19 nt, Artificial Sequence
  Description of Artificial Sequence: Synthetic oligonucleotide
  Sense strand starting at position 1619 of SEQ ID NO: 1885870
ccaugauccuguguuccca

SEQ ID NO: 2373793 - RNA, 19 nt, Artificial Sequence
  Description of Artificial Sequence: Synthetic oligonucleotide
  Antisense strand to SEQ ID NO: 2373792
ugggaacacaggaucaugg

SEQ ID NO: 2373794 - RNA, 19 nt, Artificial Sequence
  Description of Artificial Sequence: Synthetic oligonucleotide
  Sense strand starting at position 2120 of SEQ ID NO: 1885870
uggucuugucaccauggaa

SEQ ID NO: 2373795 - RNA, 19 nt, Artificial Sequence
  Description of Artificial Sequence: Synthetic oligonucleotide
  Antisense strand to SEQ ID NO: 2373794
uuccauggugacaagacca

SEQ ID NO: 2373796 - RNA, 19 nt, Artificial Sequence
  Description of Artificial Sequence: Synthetic oligonucleotide
  Sense strand starting at position 2300 of SEQ ID NO: 1885870
ccuugaugcccagaugaug

SEQ ID NO: 2373797 - RNA, 19 nt, Artificial Sequence
  Description of Artificial Sequence: Synthetic oligonucleotide
  Antisense strand to SEQ ID NO: 2373796
caucaucugggcaucaagg

SEQ ID NO: 2373798 - RNA, 19 nt, Artificial Sequence
  Description of Artificial Sequence: Synthetic oligonucleotide
  Sense strand starting at position 2312 of SEQ ID NO: 1885870
gaugauggcugcucagacu

SEQ ID NO: 2373799 - RNA, 19 nt, Artificial Sequence
  Description of Artificial Sequence: Synthetic oligonucleotide
  Antisense strand to SEQ ID NO: 2373798
agucugagcagccaucauc

SEQ ID NO: 2373800 - RNA, 19 nt, Artificial Sequence
  Description of Artificial Sequence: Synthetic oligonucleotide
  Sense strand starting at position 2345 of SEQ ID NO: 1885870
cucugaaguuucucaggca

SEQ ID NO: 2373801 - RNA, 19 nt, Artificial Sequence
  Description of Artificial Sequence: Synthetic oligonucleotide
  Antisense strand to SEQ ID NO: 2373800
ugccugagaaacuucagag

SEQ ID NO: 2373802 - RNA, 19 nt, Artificial Sequence
  Description of Artificial Sequence: Synthetic oligonucleotide
  Sense strand starting at position 2378 of SEQ ID NO: 1885870
gagugaauccugcagcuuu

SEQ ID NO: 2373803 - RNA, 19 nt, Artificial Sequence
  Description of Artificial Sequence: Synthetic oligonucleotide
  Antisense strand to SEQ ID NO: 2373802
aaagcugcaggauucacuc

SEQ ID NO: 2373804 - RNA, 19 nt, Artificial Sequence
  Description of Artificial Sequence: Synthetic oligonucleotide
  Sense strand starting at position 2418 of SEQ ID NO: 1885870
augcuauaccuggaaaggu

SEQ ID NO: 2373805 - RNA, 19 nt, Artificial Sequence
  Description of Artificial Sequence: Synthetic oligonucleotide
  Antisense strand to SEQ ID NO: 2373804
accuuuccagguauagcau

SEQ ID NO: 2373806 - RNA, 19 nt, Artificial Sequence
  Description of Artificial Sequence: Synthetic oligonucleotide
  Sense strand starting at position 2976 of SEQ ID NO: 1885870
gggucuccucacuguucua

SEQ ID NO: 2373807 - RNA, 19 nt, Artificial Sequence
  Description of Artificial Sequence: Synthetic oligonucleotide
  Antisense strand to SEQ ID NO: 2373806
uagaacagugaggagaccc

SEQ ID NO: 2373808 - RNA, 19 nt, Artificial Sequence
  Description of Artificial Sequence: Synthetic oligonucleotide
  Sense strand starting at position 2987 of SEQ ID NO: 1885870
cuguucuaggucuagaaua

SEQ ID NO: 2373809 - RNA, 19 nt, Artificial Sequence
  Description of Artificial Sequence: Synthetic oligonucleotide
  Antisense strand to SEQ ID NO: 2373808
uauucuagaccuagaacag

SEQ ID NO: 2373810 - RNA, 19 nt, Artificial Sequence
  Description of Artificial Sequence: Synthetic oligonucleotide
  Sense strand starting at position 2989 of SEQ ID NO: 1885870
guucuaggucuagaauaug

SEQ ID NO: 2373811 - RNA, 19 nt, Artificial Sequence
  Description of Artificial Sequence: Synthetic oligonucleotide
  Antisense strand to SEQ ID NO: 2373810
cauauucuagaccuagaac

SEQ ID NO: 2373812 - RNA, 19 nt, Artificial Sequence
  Description of Artificial Sequence: Synthetic oligonucleotide
  Sense strand starting at position 3000 of SEQ ID NO: 1885870
agaauaugcugcuuccuuu

SEQ ID NO: 2373813 - RNA, 19 nt, Artificial Sequence
  Description of Artificial Sequence: Synthetic oligonucleotide
  Antisense strand to SEQ ID NO: 2373812
aaaggaagcagcauauucu

SEQ ID NO: 2373814 - RNA, 19 nt, Artificial Sequence
  Description of Artificial Sequence: Synthetic oligonucleotide
  Sense strand starting at position 3400 of SEQ ID NO: 1885870
cucccuuaucagugcugaa

SEQ ID NO: 2373815 - RNA, 19 nt, Artificial Sequence
  Description of Artificial Sequence: Synthetic oligonucleotide
  Antisense strand to SEQ ID NO: 2373814
uucagcacugauaagggag

SEQ ID NO: 2373816 - RNA, 19 nt, Artificial Sequence
  Description of Artificial Sequence: Synthetic oligonucleotide
  Sense strand starting at position 3674 of SEQ ID NO: 1885870
caccaucauuuggagggaa

SEQ ID NO: 2373817 - RNA, 19 nt, Artificial Sequence
  Description of Artificial Sequence: Synthetic oligonucleotide
  Antisense strand to SEQ ID NO: 2373816
uucccuccaaaugauggug

SEQ ID NO: 2373818 - RNA, 19 nt, Artificial Sequence
  Description of Artificial Sequence: Synthetic oligonucleotide
  Sense strand starting at position 3687 of SEQ ID NO: 1885870
agggaaauaauguguuccu

SEQ ID NO: 2373819 - RNA, 19 nt, Artificial Sequence
  Description of Artificial Sequence: Synthetic oligonucleotide
  Antisense strand to SEQ ID NO: 2373818
aggaacacauuauuucccu

SEQ ID NO: 2373820 - RNA, 19 nt, Artificial Sequence
  Description of Artificial Sequence: Synthetic oligonucleotide
  Sense strand starting at position 3688 of SEQ ID NO: 1885870
gggaaauaauguguuccuu

SEQ ID NO: 2373821 - RNA, 19 nt, Artificial Sequence
  Description of Artificial Sequence: Synthetic oligonucleotide
  Antisense strand to SEQ ID NO: 2373820
aaggaacacauuauuuccc

SEQ ID NO: 2373822 - RNA, 19 nt, Artificial Sequence
  Description of Artificial Sequence: Synthetic oligonucleotide
  Sense strand starting at position 3798 of SEQ ID NO: 1885870
cauucuugcucccugggau

SEQ ID NO: 2373823 - RNA, 19 nt, Artificial Sequence
  Description of Artificial Sequence: Synthetic oligonucleotide
  Antisense strand to SEQ ID NO: 2373822
aucccagggagcaagaaug

SEQ ID NO: 2373824 - RNA, 19 nt, Artificial Sequence
  Description of Artificial Sequence: Synthetic oligonucleotide
  Sense strand starting at position 3799 of SEQ ID NO: 1885870
auucuugcucccugggauu

SEQ ID NO: 2373825 - RNA, 19 nt, Artificial Sequence
  Description of Artificial Sequence: Synthetic oligonucleotide
  Antisense strand to SEQ ID NO: 2373824
aaucccagggagcaagaau

SEQ ID NO: 2373826 - RNA, 19 nt, Artificial Sequence
  Description of Artificial Sequence: Synthetic oligonucleotide
  Sense strand starting at position 3875 of SEQ ID NO: 1885870
aggagcucuuucuuuaaca

SEQ ID NO: 2373827 - RNA, 19 nt, Artificial Sequence
  Description of Artificial Sequence: Synthetic oligonucleotide
  Antisense strand to SEQ ID NO: 2373826
uguuaaagaaagagcuccu

SEQ ID NO: 2373828 - RNA, 19 nt, Artificial Sequence
  Description of Artificial Sequence: Synthetic oligonucleotide
  Sense strand starting at position 3876 of SEQ ID NO: 1885870
ggagcucuuucuuuaacac

SEQ ID NO: 2373829 - RNA, 19 nt, Artificial Sequence
  Description of Artificial Sequence: Synthetic oligonucleotide
  Antisense strand to SEQ ID NO: 2373828
guguuaaagaaagagcucc

SEQ ID NO: 2373830 - RNA, 19 nt, Artificial Sequence
  Description of Artificial Sequence: Synthetic oligonucleotide
  Sense strand starting at position 3928 of SEQ ID NO: 1885870
cauaguaagugggacaaua

SEQ ID NO: 2373831 - RNA, 19 nt, Artificial Sequence
  Description of Artificial Sequence: Synthetic oligonucleotide
  Antisense strand to SEQ ID NO: 2373830
uauugucccacuuacuaug

SEQ ID NO: 2373832 - RNA, 19 nt, Artificial Sequence
  Description of Artificial Sequence: Synthetic oligonucleotide
  Sense strand starting at position 3936 of SEQ ID NO: 1885870
gugggacaauaauauuaaa

SEQ ID NO: 2373833 - RNA, 19 nt, Artificial Sequence
  Description of Artificial Sequence: Synthetic oligonucleotide
  Antisense strand to SEQ ID NO: 2373832
uuuaauauuauugucccac

SEQ ID NO: 2373834 - RNA, 19 nt, Artificial Sequence
  Description of Artificial Sequence: Synthetic oligonucleotide
  Sense strand starting at position 3950 of SEQ ID NO: 1885870
uuaaacaacugaugagagu

SEQ ID NO: 2373835 - RNA, 19 nt, Artificial Sequence
  Description of Artificial Sequence: Synthetic oligonucleotide
  Antisense strand to SEQ ID NO: 2373834
acucucaucaguuguuuaa

SEQ ID NO: 2373836 - RNA, 19 nt, Artificial Sequence
  Description of Artificial Sequence: Synthetic oligonucleotide
  Sense strand starting at position 3953 of SEQ ID NO: 1885870
aacaacugaugagaguaua

SEQ ID NO: 2373837 - RNA, 19 nt, Artificial Sequence
  Description of Artificial Sequence: Synthetic oligonucleotide
  Antisense strand to SEQ ID NO: 2373836
uauacucucaucaguuguu

SEQ ID NO: 2373838 - RNA, 19 nt, Artificial Sequence
  Description of Artificial Sequence: Synthetic oligonucleotide
  Sense strand starting at position 3978 of SEQ ID NO: 1885870
cacgaacuuccugaagagu

SEQ ID NO: 2373839 - RNA, 19 nt, Artificial Sequence
  Description of Artificial Sequence: Synthetic oligonucleotide
  Antisense strand to SEQ ID NO: 2373838
acucuucaggaaguucgug

SEQ ID NO: 2373840 - RNA, 19 nt, Artificial Sequence
  Description of Artificial Sequence: Synthetic oligonucleotide
  Sense strand starting at position 148 of SEQ ID NO: 1885869
ggagaacugucauccacug

SEQ ID NO: 2373841 - RNA, 19 nt, Artificial Sequence
  Description of Artificial Sequence: Synthetic oligonucleotide
  Antisense strand to SEQ ID NO: 2373840
caguggaugacaguucucc

SEQ ID NO: 2373842 - RNA, 19 nt, Artificial Sequence
  Description of Artificial Sequence: Synthetic oligonucleotide
  Sense strand starting at position 187 of SEQ ID NO: 1885869
cgagauuccagcuaagugu

SEQ ID NO: 2373843 - RNA, 19 nt, Artificial Sequence
  Description of Artificial Sequence: Synthetic oligonucleotide
  Antisense strand to SEQ ID NO: 2373842
acacuuagcuggaaucucg

SEQ ID NO: 2373844 - RNA, 19 nt, Artificial Sequence
  Description of Artificial Sequence: Synthetic oligonucleotide
  Sense strand starting at position 196 of SEQ ID NO: 1885869
agcuaagugucgcugaaca

SEQ ID NO: 2373845 - RNA, 19 nt, Artificial Sequence
  Description of Artificial Sequence: Synthetic oligonucleotide
  Antisense strand to SEQ ID NO: 2373844
uguucagcgacacuuagcu

SEQ ID NO: 2373846 - RNA, 19 nt, Artificial Sequence
  Description of Artificial Sequence: Synthetic oligonucleotide
  Sense strand starting at position 198 of SEQ ID NO: 1885869
cuaagugucgcugaacauc

SEQ ID NO: 2373847 - RNA, 19 nt, Artificial Sequence
  Description of Artificial Sequence: Synthetic oligonucleotide
  Antisense strand to SEQ ID NO: 2373846
gauguucagcgacacuuag

SEQ ID NO: 2373848 - RNA, 19 nt, Artificial Sequence
  Description of Artificial Sequence: Synthetic oligonucleotide
  Sense strand starting at position 614 of SEQ ID NO: 1885869
ccaucugcaugagaagaaa

SEQ ID NO: 2373849 - RNA, 19 nt, Artificial Sequence
  Description of Artificial Sequence: Synthetic oligonucleotide
  Antisense strand to SEQ ID NO: 2373848
uuucuucucaugcagaugg

SEQ ID NO: 2373850 - RNA, 19 nt, Artificial Sequence
  Description of Artificial Sequence: Synthetic oligonucleotide
  Sense strand starting at position 844 of SEQ ID NO: 1885869
auaagauguugccauuuac

SEQ ID NO: 2373851 - RNA, 19 nt, Artificial Sequence
  Description of Artificial Sequence: Synthetic oligonucleotide
  Antisense strand to SEQ ID NO: 2373850
guaaauggcaacaucuuau

SEQ ID NO: 2373852 - RNA, 19 nt, Artificial Sequence
  Description of Artificial Sequence: Synthetic oligonucleotide
  Sense strand starting at position 889 of SEQ ID NO: 1885869
uggagcuuccaugguagaa

SEQ ID NO: 2373853 - RNA, 19 nt, Artificial Sequence
  Description of Artificial Sequence: Synthetic oligonucleotide
  Antisense strand to SEQ ID NO: 2373852
uucuaccauggaagcucca

SEQ ID NO: 2373854 - RNA, 19 nt, Artificial Sequence
  Description of Artificial Sequence: Synthetic oligonucleotide
  Sense strand starting at position 914 of SEQ ID NO: 1885869
gacaauauguaggaguaca

SEQ ID NO: 2373855 - RNA, 19 nt, Artificial Sequence
  Description of Artificial Sequence: Synthetic oligonucleotide
  Antisense strand to SEQ ID NO: 2373854
uguacuccuacauauuguc

SEQ ID NO: 2373856 - RNA, 19 nt, Artificial Sequence
  Description of Artificial Sequence: Synthetic oligonucleotide
  Sense strand starting at position 944 of SEQ ID NO: 1885869
auugaauuaugugaggauc

SEQ ID NO: 2373857 - RNA, 19 nt, Artificial Sequence
  Description of Artificial Sequence: Synthetic oligonucleotide
  Antisense strand to SEQ ID NO: 2373856
gauccucacauaauucaau

SEQ ID NO: 2373858 - RNA, 19 nt, Artificial Sequence
  Description of Artificial Sequence: Synthetic oligonucleotide
  Sense strand starting at position 1100 of SEQ ID NO: 1885869
ucccaagaaucugggauaa

SEQ ID NO: 2373859 - RNA, 19 nt, Artificial Sequence
  Description of Artificial Sequence: Synthetic oligonucleotide
  Antisense strand to SEQ ID NO: 2373858
uuaucccagauucuuggga

SEQ ID NO: 2373860 - RNA, 19 nt, Artificial Sequence
  Description of Artificial Sequence: Synthetic oligonucleotide
  Sense strand starting at position 1102 of SEQ ID NO: 1885869
ccaagaaucugggauaaca

SEQ ID NO: 2373861 - RNA, 19 nt, Artificial Sequence
  Description of Artificial Sequence: Synthetic oligonucleotide
  Antisense strand to SEQ ID NO: 2373860
uguuaucccagauucuugg

SEQ ID NO: 2373862 - RNA, 19 nt, Artificial Sequence
  Description of Artificial Sequence: Synthetic oligonucleotide
  Sense strand starting at position 1167 of SEQ ID NO: 1885869
gaggcuuuaccauguaggu

SEQ ID NO: 2373863 - RNA, 19 nt, Artificial Sequence
  Description of Artificial Sequence: Synthetic oligonucleotide
  Antisense strand to SEQ ID NO: 2373862
accuacaugguaaagccuc

SEQ ID NO: 2373864 - RNA, 19 nt, Artificial Sequence
  Description of Artificial Sequence: Synthetic oligonucleotide
  Sense strand starting at position 1169 of SEQ ID NO: 1885869
ggcuuuaccauguagguga

SEQ ID NO: 2373865 - RNA, 19 nt, Artificial Sequence
  Description of Artificial Sequence: Synthetic oligonucleotide
  Antisense strand to SEQ ID NO: 2373864
ucaccuacaugguaaagcc

SEQ ID NO: 2373866 - RNA, 19 nt, Artificial Sequence
  Description of Artificial Sequence: Synthetic oligonucleotide
  Sense strand starting at position 1182 of SEQ ID NO: 1885869
aggugaggcuggucacaaa

SEQ ID NO: 2373867 - RNA, 19 nt, Artificial Sequence
  Description of Artificial Sequence: Synthetic oligonucleotide
  Antisense strand to SEQ ID NO: 2373866
uuugugaccagccucaccu

SEQ ID NO: 2373868 - RNA, 19 nt, Artificial Sequence
  Description of Artificial Sequence: Synthetic oligonucleotide
  Sense strand starting at position 1491 of SEQ ID NO: 1885869
ccaugauccuguguuccca

SEQ ID NO: 2373869 - RNA, 19 nt, Artificial Sequence
  Description of Artificial Sequence: Synthetic oligonucleotide
  Antisense strand to SEQ ID NO: 2373868
ugggaacacaggaucaugg

SEQ ID NO: 2373870 - RNA, 19 nt, Artificial Sequence
  Description of Artificial Sequence: Synthetic oligonucleotide
  Sense strand starting at position 1992 of SEQ ID NO: 1885869
uggucuugucaccauggaa

SEQ ID NO: 2373871 - RNA, 19 nt, Artificial Sequence
  Description of Artificial Sequence: Synthetic oligonucleotide
  Antisense strand to SEQ ID NO: 2373870
uuccauggugacaagacca

SEQ ID NO: 2373872 - RNA, 19 nt, Artificial Sequence
  Description of Artificial Sequence: Synthetic oligonucleotide
  Sense strand starting at position 2172 of SEQ ID NO: 1885869
ccuugaugcccagaugaug

SEQ ID NO: 2373873 - RNA, 19 nt, Artificial Sequence
  Description of Artificial Sequence: Synthetic oligonucleotide
  Antisense strand to SEQ ID NO: 2373872
caucaucugggcaucaagg

SEQ ID NO: 2373874 - RNA, 19 nt, Artificial Sequence
  Description of Artificial Sequence: Synthetic oligonucleotide
  Sense strand starting at position 2184 of SEQ ID NO: 1885869
gaugauggcugcucagacu

SEQ ID NO: 2373875 - RNA, 19 nt, Artificial Sequence
  Description of Artificial Sequence: Synthetic oligonucleotide
  Antisense strand to SEQ ID NO: 2373874
agucugagcagccaucauc

SEQ ID NO: 2373876 - RNA, 19 nt, Artificial Sequence
  Description of Artificial Sequence: Synthetic oligonucleotide
  Sense strand starting at position 2217 of SEQ ID NO: 1885869
cucugaaguuucucaggca

SEQ ID NO: 2373877 - RNA, 19 nt, Artificial Sequence
  Description of Artificial Sequence: Synthetic oligonucleotide
  Antisense strand to SEQ ID NO: 2373876
ugccugagaaacuucagag

SEQ ID NO: 2373878 - RNA, 19 nt, Artificial Sequence
  Description of Artificial Sequence: Synthetic oligonucleotide
  Sense strand starting at position 2250 of SEQ ID NO: 1885869
gagugaauccugcagcuuu

SEQ ID NO: 2373879 - RNA, 19 nt, Artificial Sequence
  Description of Artificial Sequence: Synthetic oligonucleotide
  Antisense strand to SEQ ID NO: 2373878
aaagcugcaggauucacuc

SEQ ID NO: 2373880 - RNA, 19 nt, Artificial Sequence
  Description of Artificial Sequence: Synthetic oligonucleotide
  Sense strand starting at position 2290 of SEQ ID NO: 1885869
augcuauaccuggaaaggu

SEQ ID NO: 2373881 - RNA, 19 nt, Artificial Sequence
  Description of Artificial Sequence: Synthetic oligonucleotide
  Antisense strand to SEQ ID NO: 2373880
accuuuccagguauagcau

SEQ ID NO: 2373882 - RNA, 19 nt, Artificial Sequence
  Description of Artificial Sequence: Synthetic oligonucleotide
  Sense strand starting at position 2848 of SEQ ID NO: 1885869
gggucuccucacuguucua

SEQ ID NO: 2373883 - RNA, 19 nt, Artificial Sequence
  Description of Artificial Sequence: Synthetic oligonucleotide
  Antisense strand to SEQ ID NO: 2373882
uagaacagugaggagaccc

SEQ ID NO: 2373884 - RNA, 19 nt, Artificial Sequence
  Description of Artificial Sequence: Synthetic oligonucleotide
  Sense strand starting at position 2859 of SEQ ID NO: 1885869
cuguucuaggucuagaaua

SEQ ID NO: 2373885 - RNA, 19 nt, Artificial Sequence
  Description of Artificial Sequence: Synthetic oligonucleotide
  Antisense strand to SEQ ID NO: 2373884
uauucuagaccuagaacag

SEQ ID NO: 2373886 - RNA, 19 nt, Artificial Sequence
  Description of Artificial Sequence: Synthetic oligonucleotide
  Sense strand starting at position 2861 of SEQ ID NO: 1885869
guucuaggucuagaauaug

SEQ ID NO: 2373887 - RNA, 19 nt, Artificial Sequence
  Description of Artificial Sequence: Synthetic oligonucleotide
  Antisense strand to SEQ ID NO: 2373886
cauauucuagaccuagaac

SEQ ID NO: 2373888 - RNA, 19 nt, Artificial Sequence
  Description of Artificial Sequence: Synthetic oligonucleotide
  Sense strand starting at position 2872 of SEQ ID NO: 1885869
agaauaugcugcuuccuuu

SEQ ID NO: 2373889 - RNA, 19 nt, Artificial Sequence
  Description of Artificial Sequence: Synthetic oligonucleotide
  Antisense strand to SEQ ID NO: 2373888
aaaggaagcagcauauucu

SEQ ID NO: 2373890 - RNA, 19 nt, Artificial Sequence
  Description of Artificial Sequence: Synthetic oligonucleotide
  Sense strand starting at position 3272 of SEQ ID NO: 1885869
cucccuuaucagugcugaa

SEQ ID NO: 2373891 - RNA, 19 nt, Artificial Sequence
  Description of Artificial Sequence: Synthetic oligonucleotide
  Antisense strand to SEQ ID NO: 2373890
uucagcacugauaagggag

SEQ ID NO: 2373892 - RNA, 19 nt, Artificial Sequence
  Description of Artificial Sequence: Synthetic oligonucleotide
  Sense strand starting at position 3546 of SEQ ID NO: 1885869
caccaucauuuggagggaa

SEQ ID NO: 2373893 - RNA, 19 nt, Artificial Sequence
  Description of Artificial Sequence: Synthetic oligonucleotide
  Antisense strand to SEQ ID NO: 2373892
uucccuccaaaugauggug

SEQ ID NO: 2373894 - RNA, 19 nt, Artificial Sequence
  Description of Artificial Sequence: Synthetic oligonucleotide
  Sense strand starting at position 3559 of SEQ ID NO: 1885869
agggaaauaauguguuccu

SEQ ID NO: 2373895 - RNA, 19 nt, Artificial Sequence
  Description of Artificial Sequence: Synthetic oligonucleotide
  Antisense strand to SEQ ID NO: 2373894
aggaacacauuauuucccu

SEQ ID NO: 2373896 - RNA, 19 nt, Artificial Sequence
  Description of Artificial Sequence: Synthetic oligonucleotide
  Sense strand starting at position 3560 of SEQ ID NO: 1885869
gggaaauaauguguuccuu

SEQ ID NO: 2373897 - RNA, 19 nt, Artificial Sequence
  Description of Artificial Sequence: Synthetic oligonucleotide
  Antisense strand to SEQ ID NO: 2373896
aaggaacacauuauuuccc

SEQ ID NO: 2373898 - RNA, 19 nt, Artificial Sequence
  Description of Artificial Sequence: Synthetic oligonucleotide
  Sense strand starting at position 3670 of SEQ ID NO: 1885869
cauucuugcucccugggau

SEQ ID NO: 2373899 - RNA, 19 nt, Artificial Sequence
  Description of Artificial Sequence: Synthetic oligonucleotide
  Antisense strand to SEQ ID NO: 2373898
aucccagggagcaagaaug

SEQ ID NO: 2373900 - RNA, 19 nt, Artificial Sequence
  Description of Artificial Sequence: Synthetic oligonucleotide
  Sense strand starting at position 3671 of SEQ ID NO: 1885869
auucuugcucccugggauu

SEQ ID NO: 2373901 - RNA, 19 nt, Artificial Sequence
  Description of Artificial Sequence: Synthetic oligonucleotide
  Antisense strand to SEQ ID NO: 2373900
aaucccagggagcaagaau

SEQ ID NO: 2373902 - RNA, 19 nt, Artificial Sequence
  Description of Artificial Sequence: Synthetic oligonucleotide
  Sense strand starting at position 3747 of SEQ ID NO: 1885869
aggagcucuuucuuuaaca

SEQ ID NO: 2373903 - RNA, 19 nt, Artificial Sequence
  Description of Artificial Sequence: Synthetic oligonucleotide
  Antisense strand to SEQ ID NO: 2373902
uguuaaagaaagagcuccu

SEQ ID NO: 2373904 - RNA, 19 nt, Artificial Sequence
  Description of Artificial Sequence: Synthetic oligonucleotide
  Sense strand starting at position 3748 of SEQ ID NO: 1885869
ggagcucuuucuuuaacac

SEQ ID NO: 2373905 - RNA, 19 nt, Artificial Sequence
  Description of Artificial Sequence: Synthetic oligonucleotide
  Antisense strand to SEQ ID NO: 2373904
guguuaaagaaagagcucc

SEQ ID NO: 2373906 - RNA, 19 nt, Artificial Sequence
  Description of Artificial Sequence: Synthetic oligonucleotide
  Sense strand starting at position 3800 of SEQ ID NO: 1885869
cauaguaagugggacaaua

SEQ ID NO: 2373907 - RNA, 19 nt, Artificial Sequence
  Description of Artificial Sequence: Synthetic oligonucleotide
  Antisense strand to SEQ ID NO: 2373906
uauugucccacuuacuaug

SEQ ID NO: 2373908 - RNA, 19 nt, Artificial Sequence
  Description of Artificial Sequence: Synthetic oligonucleotide
  Sense strand starting at position 3808 of SEQ ID NO: 1885869
gugggacaauaauauuaaa

SEQ ID NO: 2373909 - RNA, 19 nt, Artificial Sequence
  Description of Artificial Sequence: Synthetic oligonucleotide
  Antisense strand to SEQ ID NO: 2373908
uuuaauauuauugucccac

SEQ ID NO: 2373910 - RNA, 19 nt, Artificial Sequence
  Description of Artificial Sequence: Synthetic oligonucleotide
  Sense strand starting at position 3822 of SEQ ID NO: 1885869
uuaaacaacugaugagagu

SEQ ID NO: 2373911 - RNA, 19 nt, Artificial Sequence
  Description of Artificial Sequence: Synthetic oligonucleotide
  Antisense strand to SEQ ID NO: 2373910
acucucaucaguuguuuaa

SEQ ID NO: 2373912 - RNA, 19 nt, Artificial Sequence
  Description of Artificial Sequence: Synthetic oligonucleotide
  Sense strand starting at position 3825 of SEQ ID NO: 1885869
aacaacugaugagaguaua

SEQ ID NO: 2373913 - RNA, 19 nt, Artificial Sequence
  Description of Artificial Sequence: Synthetic oligonucleotide
  Antisense strand to SEQ ID NO: 2373912
uauacucucaucaguuguu

SEQ ID NO: 2373914 - RNA, 19 nt, Artificial Sequence
  Description of Artificial Sequence: Synthetic oligonucleotide
  Sense strand starting at position 3850 of SEQ ID NO: 1885869
cacgaacuuccugaagagu

SEQ ID NO: 2373915 - RNA, 19 nt, Artificial Sequence
  Description of Artificial Sequence: Synthetic oligonucleotide
  Antisense strand to SEQ ID NO: 2373914
acucuucaggaaguucgug

SEQ ID NO: 2373916 - RNA, 19 nt, Artificial Sequence
  Description of Artificial Sequence: Synthetic oligonucleotide
  Sense strand starting at position 3923 of SEQ ID NO: 1885869
cuaagaaguuaucauaagg

SEQ ID NO: 2373917 - RNA, 19 nt, Artificial Sequence
  Description of Artificial Sequence: Synthetic oligonucleotide
  Antisense strand to SEQ ID NO: 2373916
ccuuaugauaacuucuuag

SEQ ID NO: 2373918 - RNA, 19 nt, Artificial Sequence
  Description of Artificial Sequence: Synthetic oligonucleotide
  Sense strand starting at position 3964 of SEQ ID NO: 1885869
agaugauguguggauguua

SEQ ID NO: 2373919 - RNA, 19 nt, Artificial Sequence
  Description of Artificial Sequence: Synthetic oligonucleotide
  Antisense strand to SEQ ID NO: 2373918
uaacauccacacaucaucu

SEQ ID NO: 2373920 - RNA, 19 nt, Artificial Sequence
  Description of Artificial Sequence: Synthetic oligonucleotide
  Sense strand starting at position 155 of SEQ ID NO: 1885871
ggcccaaggugccuguaau

SEQ ID NO: 2373921 - RNA, 19 nt, Artificial Sequence
  Description of Artificial Sequence: Synthetic oligonucleotide
  Antisense strand to SEQ ID NO: 2373920
auuacaggcaccuugggcc

SEQ ID NO: 2373922 - RNA, 19 nt, Artificial Sequence
  Description of Artificial Sequence: Synthetic oligonucleotide
  Sense strand starting at position 156 of SEQ ID NO: 1885871
gcccaaggugccuguaauu

SEQ ID NO: 2373923 - RNA, 19 nt, Artificial Sequence
  Description of Artificial Sequence: Synthetic oligonucleotide
  Antisense strand to SEQ ID NO: 2373922
aauuacaggcaccuugggc

SEQ ID NO: 2373924 - RNA, 19 nt, Artificial Sequence
  Description of Artificial Sequence: Synthetic oligonucleotide
  Sense strand starting at position 180 of SEQ ID NO: 1885871
uccaguggucagcgaagga

SEQ ID NO: 2373925 - RNA, 19 nt, Artificial Sequence
  Description of Artificial Sequence: Synthetic oligonucleotide
  Antisense strand to SEQ ID NO: 2373924
uccuucgcugaccacugga

SEQ ID NO: 2373926 - RNA, 19 nt, Artificial Sequence
  Description of Artificial Sequence: Synthetic oligonucleotide
  Sense strand starting at position 201 of SEQ ID NO: 1885871
cacugagaaggcgauguuu

SEQ ID NO: 2373927 - RNA, 19 nt, Artificial Sequence
  Description of Artificial Sequence: Synthetic oligonucleotide
  Antisense strand to SEQ ID NO: 2373926
aaacaucgccuucucagug

SEQ ID NO: 2373928 - RNA, 19 nt, Artificial Sequence
  Description of Artificial Sequence: Synthetic oligonucleotide
  Sense strand starting at position 203 of SEQ ID NO: 1885871
cugagaaggcgauguuuca

SEQ ID NO: 2373929 - RNA, 19 nt, Artificial Sequence
  Description of Artificial Sequence: Synthetic oligonucleotide
  Antisense strand to SEQ ID NO: 2373928
ugaaacaucgccuucucag

SEQ ID NO: 2373930 - RNA, 19 nt, Artificial Sequence
  Description of Artificial Sequence: Synthetic oligonucleotide
  Sense strand starting at position 210 of SEQ ID NO: 1885871
ggcgauguuucagcaaaga

SEQ ID NO: 2373931 - RNA, 19 nt, Artificial Sequence
  Description of Artificial Sequence: Synthetic oligonucleotide
  Antisense strand to SEQ ID NO: 2373930
ucuuugcugaaacaucgcc

SEQ ID NO: 2373932 - RNA, 19 nt, Artificial Sequence
  Description of Artificial Sequence: Synthetic oligonucleotide
  Sense strand starting at position 446 of SEQ ID NO: 1885871
aacccugcacggugugaaa

SEQ ID NO: 2373933 - RNA, 19 nt, Artificial Sequence
  Description of Artificial Sequence: Synthetic oligonucleotide
  Antisense strand to SEQ ID NO: 2373932
uuucacaccgugcaggguu

SEQ ID NO: 2373934 - RNA, 19 nt, Artificial Sequence
  Description of Artificial Sequence: Synthetic oligonucleotide
  Sense strand starting at position 632 of SEQ ID NO: 1885871
ggccucuguucugucucaa

SEQ ID NO: 2373935 - RNA, 19 nt, Artificial Sequence
  Description of Artificial Sequence: Synthetic oligonucleotide
  Antisense strand to SEQ ID NO: 2373934
uugagacagaacagaggcc

SEQ ID NO: 2373936 - RNA, 19 nt, Artificial Sequence
  Description of Artificial Sequence: Synthetic oligonucleotide
  Sense strand starting at position 754 of SEQ ID NO: 1885871
agggaaaccuaguaaguuc

SEQ ID NO: 2373937 - RNA, 19 nt, Artificial Sequence
  Description of Artificial Sequence: Synthetic oligonucleotide
  Antisense strand to SEQ ID NO: 2373936
gaacuuacuagguuucccu

SEQ ID NO: 2373938 - RNA, 19 nt, Artificial Sequence
  Description of Artificial Sequence: Synthetic oligonucleotide
  Sense strand starting at position 762 of SEQ ID NO: 1885871
cuaguaaguucugucuuag

SEQ ID NO: 2373939 - RNA, 19 nt, Artificial Sequence
  Description of Artificial Sequence: Synthetic oligonucleotide
  Antisense strand to SEQ ID NO: 2373938
cuaagacagaacuuacuag

SEQ ID NO: 2373940 - RNA, 19 nt, Artificial Sequence
  Description of Artificial Sequence: Synthetic oligonucleotide
  Sense strand starting at position 808 of SEQ ID NO: 1885871
aguauaaagccacaugucu

SEQ ID NO: 2373941 - RNA, 19 nt, Artificial Sequence
  Description of Artificial Sequence: Synthetic oligonucleotide
  Antisense strand to SEQ ID NO: 2373940
agacauguggcuuuauacu

SEQ ID NO: 2373942 - RNA, 19 nt, Artificial Sequence
  Description of Artificial Sequence: Synthetic oligonucleotide
  Sense strand starting at position 945 of SEQ ID NO: 1885871
agagcaaauugccuaauga

SEQ ID NO: 2373943 - RNA, 19 nt, Artificial Sequence
  Description of Artificial Sequence: Synthetic oligonucleotide
  Antisense strand to SEQ ID NO: 2373942
ucauuaggcaauuugcucu

SEQ ID NO: 2373944 - RNA, 19 nt, Artificial Sequence
  Description of Artificial Sequence: Synthetic oligonucleotide
  Sense strand starting at position 946 of SEQ ID NO: 1885871
gagcaaauugccuaaugag

SEQ ID NO: 2373945 - RNA, 19 nt, Artificial Sequence
  Description of Artificial Sequence: Synthetic oligonucleotide
  Antisense strand to SEQ ID NO: 2373944
cucauuaggcaauuugcuc

SEQ ID NO: 2373946 - RNA, 19 nt, Artificial Sequence
  Description of Artificial Sequence: Synthetic oligonucleotide
  Sense strand starting at position 977 of SEQ ID NO: 1885871
cugaguugcuaaucaaaga

SEQ ID NO: 2373947 - RNA, 19 nt, Artificial Sequence
  Description of Artificial Sequence: Synthetic oligonucleotide
  Antisense strand to SEQ ID NO: 2373946
ucuuugauuagcaacucag

SEQ ID NO: 2373948 - RNA, 19 nt, Artificial Sequence
  Description of Artificial Sequence: Synthetic oligonucleotide
  Sense strand starting at position 1013 of SEQ ID NO: 1885871
uuaauuuggucuugggaaa

SEQ ID NO: 2373949 - RNA, 19 nt, Artificial Sequence
  Description of Artificial Sequence: Synthetic oligonucleotide
  Antisense strand to SEQ ID NO: 2373948
uuucccaagaccaaauuaa

SEQ ID NO: 2373950 - RNA, 19 nt, Artificial Sequence
  Description of Artificial Sequence: Synthetic oligonucleotide
  Sense strand starting at position 1174 of SEQ ID NO: 1885871
cccagaaccgcguucaguu

SEQ ID NO: 2373951 - RNA, 19 nt, Artificial Sequence
  Description of Artificial Sequence: Synthetic oligonucleotide
  Antisense strand to SEQ ID NO: 2373950
aacugaacgcgguucuggg

SEQ ID NO: 2373952 - RNA, 19 nt, Artificial Sequence
  Description of Artificial Sequence: Synthetic oligonucleotide
  Sense strand starting at position 1232 of SEQ ID NO: 1885871
gguggaggcccggguaaua

SEQ ID NO: 2373953 - RNA, 19 nt, Artificial Sequence
  Description of Artificial Sequence: Synthetic oligonucleotide
  Antisense strand to SEQ ID NO: 2373952
uauuacccgggccuccacc

SEQ ID NO: 2373954 - RNA, 19 nt, Artificial Sequence
  Description of Artificial Sequence: Synthetic oligonucleotide
  Sense strand starting at position 1420 of SEQ ID NO: 1885871
gacaaaugccaguguuucu

SEQ ID NO: 2373955 - RNA, 19 nt, Artificial Sequence
  Description of Artificial Sequence: Synthetic oligonucleotide
  Antisense strand to SEQ ID NO: 2373954
agaaacacuggcauuuguc

SEQ ID NO: 2373956 - RNA, 19 nt, Artificial Sequence
  Description of Artificial Sequence: Synthetic oligonucleotide
  Sense strand starting at position 1513 of SEQ ID NO: 1885871
cuacuagaguuggacacuu

SEQ ID NO: 2373957 - RNA, 19 nt, Artificial Sequence
  Description of Artificial Sequence: Synthetic oligonucleotide
  Antisense strand to SEQ ID NO: 2373956
aaguguccaacucuaguag

SEQ ID NO: 2373958 - RNA, 19 nt, Artificial Sequence
  Description of Artificial Sequence: Synthetic oligonucleotide
  Sense strand starting at position 1643 of SEQ ID NO: 1885871
ucgguauugcagggauaca

SEQ ID NO: 2373959 - RNA, 19 nt, Artificial Sequence
  Description of Artificial Sequence: Synthetic oligonucleotide
  Antisense strand to SEQ ID NO: 2373958
uguaucccugcaauaccga

SEQ ID NO: 2373960 - RNA, 19 nt, Artificial Sequence
  Description of Artificial Sequence: Synthetic oligonucleotide
  Sense strand starting at position 1644 of SEQ ID NO: 1885871
cgguauugcagggauacaa

SEQ ID NO: 2373961 - RNA, 19 nt, Artificial Sequence
  Description of Artificial Sequence: Synthetic oligonucleotide
  Antisense strand to SEQ ID NO: 2373960
uuguaucccugcaauaccg

SEQ ID NO: 2373962 - RNA, 19 nt, Artificial Sequence
  Description of Artificial Sequence: Synthetic oligonucleotide
  Sense strand starting at position 1669 of SEQ ID NO: 1885871
gugcucucaggcugggauu

SEQ ID NO: 2373963 - RNA, 19 nt, Artificial Sequence
  Description of Artificial Sequence: Synthetic oligonucleotide
  Antisense strand to SEQ ID NO: 2373962
aaucccagccugagagcac

SEQ ID NO: 2373964 - RNA, 19 nt, Artificial Sequence
  Description of Artificial Sequence: Synthetic oligonucleotide
  Sense strand starting at position 1710 of SEQ ID NO: 1885871
ugcugagugacuggcgaau

SEQ ID NO: 2373965 - RNA, 19 nt, Artificial Sequence
  Description of Artificial Sequence: Synthetic oligonucleotide
  Antisense strand to SEQ ID NO: 2373964
auucgccagucacucagca

SEQ ID NO: 2373966 - RNA, 19 nt, Artificial Sequence
  Description of Artificial Sequence: Synthetic oligonucleotide
  Sense strand starting at position 1850 of SEQ ID NO: 1885871
ggacuuuaaggguggugga

SEQ ID NO: 2373967 - RNA, 19 nt, Artificial Sequence
  Description of Artificial Sequence: Synthetic oligonucleotide
  Antisense strand to SEQ ID NO: 2373966
uccaccacccuuaaagucc

SEQ ID NO: 2373968 - RNA, 19 nt, Artificial Sequence
  Description of Artificial Sequence: Synthetic oligonucleotide
  Sense strand starting at position 2197 of SEQ ID NO: 1885871
acaggugugcccuacacaa

SEQ ID NO: 2373969 - RNA, 19 nt, Artificial Sequence
  Description of Artificial Sequence: Synthetic oligonucleotide
  Antisense strand to SEQ ID NO: 2373968
uuguguagggcacaccugu

SEQ ID NO: 2373970 - RNA, 19 nt, Artificial Sequence
  Description of Artificial Sequence: Synthetic oligonucleotide
  Sense strand starting at position 2402 of SEQ ID NO: 1885871
ccagaaucgcuuuacaccu

SEQ ID NO: 2373971 - RNA, 19 nt, Artificial Sequence
  Description of Artificial Sequence: Synthetic oligonucleotide
  Antisense strand to SEQ ID NO: 2373970
agguguaaagcgauucugg

SEQ ID NO: 2373972 - RNA, 19 nt, Artificial Sequence
  Description of Artificial Sequence: Synthetic oligonucleotide
  Sense strand starting at position 2411 of SEQ ID NO: 1885871
cuuuacaccuguuucuaga

SEQ ID NO: 2373973 - RNA, 19 nt, Artificial Sequence
  Description of Artificial Sequence: Synthetic oligonucleotide
  Antisense strand to SEQ ID NO: 2373972
ucuagaaacagguguaaag

SEQ ID NO: 2373974 - RNA, 19 nt, Artificial Sequence
  Description of Artificial Sequence: Synthetic oligonucleotide
  Sense strand starting at position 2454 of SEQ ID NO: 1885871
ccgacuccucccugucaga

SEQ ID NO: 2373975 - RNA, 19 nt, Artificial Sequence
  Description of Artificial Sequence: Synthetic oligonucleotide
  Antisense strand to SEQ ID NO: 2373974
ucugacagggaggagucgg

SEQ ID NO: 2373976 - RNA, 19 nt, Artificial Sequence
  Description of Artificial Sequence: Synthetic oligonucleotide
  Sense strand starting at position 2656 of SEQ ID NO: 1885871
aggugccuccuuggaguua

SEQ ID NO: 2373977 - RNA, 19 nt, Artificial Sequence
  Description of Artificial Sequence: Synthetic oligonucleotide
  Antisense strand to SEQ ID NO: 2373976
uaacuccaaggaggcaccu

SEQ ID NO: 2373978 - RNA, 19 nt, Artificial Sequence
  Description of Artificial Sequence: Synthetic oligonucleotide
  Sense strand starting at position 2667 of SEQ ID NO: 1885871
uggaguuaggccagugugu

SEQ ID NO: 2373979 - RNA, 19 nt, Artificial Sequence
  Description of Artificial Sequence: Synthetic oligonucleotide
  Antisense strand to SEQ ID NO: 2373978
acacacuggccuaacucca

SEQ ID NO: 2373980 - RNA, 19 nt, Artificial Sequence
  Description of Artificial Sequence: Synthetic oligonucleotide
  Sense strand starting at position 3038 of SEQ ID NO: 1885871
gguuccuccucccuugaaa

SEQ ID NO: 2373981 - RNA, 19 nt, Artificial Sequence
  Description of Artificial Sequence: Synthetic oligonucleotide
  Antisense strand to SEQ ID NO: 2373980
uuucaagggaggaggaacc

SEQ ID NO: 2373982 - RNA, 19 nt, Artificial Sequence
  Description of Artificial Sequence: Synthetic oligonucleotide
  Sense strand starting at position 3100 of SEQ ID NO: 1885871
uuguaaaggcuuugaugag

SEQ ID NO: 2373983 - RNA, 19 nt, Artificial Sequence
  Description of Artificial Sequence: Synthetic oligonucleotide
  Antisense strand to SEQ ID NO: 2373982
cucaucaaagccuuuacaa

SEQ ID NO: 2373984 - RNA, 19 nt, Artificial Sequence
  Description of Artificial Sequence: Synthetic oligonucleotide
  Sense strand starting at position 3217 of SEQ ID NO: 1885871
gccgcaguucuucuggagu

SEQ ID NO: 2373985 - RNA, 19 nt, Artificial Sequence
  Description of Artificial Sequence: Synthetic oligonucleotide
  Antisense strand to SEQ ID NO: 2373984
acuccagaagaacugcggc

SEQ ID NO: 2373986 - RNA, 19 nt, Artificial Sequence
  Description of Artificial Sequence: Synthetic oligonucleotide
  Sense strand starting at position 3523 of SEQ ID NO: 1885871
ggagaaaugcuuugcucaa

SEQ ID NO: 2373987 - RNA, 19 nt, Artificial Sequence
  Description of Artificial Sequence: Synthetic oligonucleotide
  Antisense strand to SEQ ID NO: 2373986
uugagcaaagcauuucucc

SEQ ID NO: 2373988 - RNA, 19 nt, Artificial Sequence
  Description of Artificial Sequence: Synthetic oligonucleotide
  Sense strand starting at position 3554 of SEQ ID NO: 1885871
gcugacguaaccuauguaa

SEQ ID NO: 2373989 - RNA, 19 nt, Artificial Sequence
  Description of Artificial Sequence: Synthetic oligonucleotide
  Antisense strand to SEQ ID NO: 2373988
uuacauagguuacgucagc

SEQ ID NO: 2373990 - RNA, 19 nt, Artificial Sequence
  Description of Artificial Sequence: Synthetic oligonucleotide
  Sense strand starting at position 3556 of SEQ ID NO: 1885871
ugacguaaccuauguaaug

SEQ ID NO: 2373991 - RNA, 19 nt, Artificial Sequence
  Description of Artificial Sequence: Synthetic oligonucleotide
  Antisense strand to SEQ ID NO: 2373990
cauuacauagguuacguca

SEQ ID NO: 2373992 - RNA, 19 nt, Artificial Sequence
  Description of Artificial Sequence: Synthetic oligonucleotide
  Sense strand starting at position 3557 of SEQ ID NO: 1885871
gacguaaccuauguaaugu

SEQ ID NO: 2373993 - RNA, 19 nt, Artificial Sequence
  Description of Artificial Sequence: Synthetic oligonucleotide
  Antisense strand to SEQ ID NO: 2373992
acauuacauagguuacguc

SEQ ID NO: 2373994 - RNA, 19 nt, Artificial Sequence
  Description of Artificial Sequence: Synthetic oligonucleotide
  Sense strand starting at position 3781 of SEQ ID NO: 1885871
auccgauccugagaugauc

SEQ ID NO: 2373995 - RNA, 19 nt, Artificial Sequence
  Description of Artificial Sequence: Synthetic oligonucleotide
  Antisense strand to SEQ ID NO: 2373994
gaucaucucaggaucggau

SEQ ID NO: 2373996 - RNA, 19 nt, Artificial Sequence
  Description of Artificial Sequence: Synthetic oligonucleotide
  Sense strand starting at position 3808 of SEQ ID NO: 1885871
acagaaacuugacggaaau

SEQ ID NO: 2373997 - RNA, 19 nt, Artificial Sequence
  Description of Artificial Sequence: Synthetic oligonucleotide
  Antisense strand to SEQ ID NO: 2373996
auuuccgucaaguuucugu

SEQ ID NO: 2373998 - RNA, 19 nt, Artificial Sequence
  Description of Artificial Sequence: Synthetic oligonucleotide
  Sense strand starting at position 3925 of SEQ ID NO: 1885871
cucggucucugguuacaca

SEQ ID NO: 2373999 - RNA, 19 nt, Artificial Sequence
  Description of Artificial Sequence: Synthetic oligonucleotide
  Antisense strand to SEQ ID NO: 2373998
uguguaaccagagaccgag

SEQ ID NO: 2374000 - RNA, 19 nt, Artificial Sequence
  Description of Artificial Sequence: Synthetic oligonucleotide
  Sense strand starting at position 12 of SEQ ID NO: 1885872
auguaaauguuagaucguu

SEQ ID NO: 2374001 - RNA, 19 nt, Artificial Sequence
  Description of Artificial Sequence: Synthetic oligonucleotide
  Antisense strand to SEQ ID NO: 2374000
aacgaucuaacauuuacau

SEQ ID NO: 2374002 - RNA, 19 nt, Artificial Sequence
  Description of Artificial Sequence: Synthetic oligonucleotide
  Sense strand starting at position 134 of SEQ ID NO: 1885872
guggauuuguuauauugcu

SEQ ID NO: 2374003 - RNA, 19 nt, Artificial Sequence
  Description of Artificial Sequence: Synthetic oligonucleotide
  Antisense strand to SEQ ID NO: 2374002
agcaauauaacaaauccac

SEQ ID NO: 2374004 - RNA, 19 nt, Artificial Sequence
  Description of Artificial Sequence: Synthetic oligonucleotide
  Sense strand starting at position 193 of SEQ ID NO: 1885872
cuaguauacucuugagagc

SEQ ID NO: 2374005 - RNA, 19 nt, Artificial Sequence
  Description of Artificial Sequence: Synthetic oligonucleotide
  Antisense strand to SEQ ID NO: 2374004
gcucucaagaguauacuag

SEQ ID NO: 2374006 - RNA, 19 nt, Artificial Sequence
  Description of Artificial Sequence: Synthetic oligonucleotide
  Sense strand starting at position 538 of SEQ ID NO: 1885872
ggaggcuuaauauaauugu

SEQ ID NO: 2374007 - RNA, 19 nt, Artificial Sequence
  Description of Artificial Sequence: Synthetic oligonucleotide
  Antisense strand to SEQ ID NO: 2374006
acaauuauauuaagccucc

SEQ ID NO: 2374008 - RNA, 19 nt, Artificial Sequence
  Description of Artificial Sequence: Synthetic oligonucleotide
  Sense strand starting at position 996 of SEQ ID NO: 1885872
ccaucaauaugaucguauu

SEQ ID NO: 2374009 - RNA, 19 nt, Artificial Sequence
  Description of Artificial Sequence: Synthetic oligonucleotide
  Antisense strand to SEQ ID NO: 2374008
aauacgaucauauugaugg

SEQ ID NO: 2374010 - RNA, 19 nt, Artificial Sequence
  Description of Artificial Sequence: Synthetic oligonucleotide
  Sense strand starting at position 1023 of SEQ ID NO: 1885872
ccaggaagaugaugaaguu

SEQ ID NO: 2374011 - RNA, 19 nt, Artificial Sequence
  Description of Artificial Sequence: Synthetic oligonucleotide
  Antisense strand to SEQ ID NO: 2374010
aacuucaucaucuuccugg

SEQ ID NO: 2374012 - RNA, 19 nt, Artificial Sequence
  Description of Artificial Sequence: Synthetic oligonucleotide
  Sense strand starting at position 1058 of SEQ ID NO: 1885872
guugucucuuaaggaaaug

SEQ ID NO: 2374013 - RNA, 19 nt, Artificial Sequence
  Description of Artificial Sequence: Synthetic oligonucleotide
  Antisense strand to SEQ ID NO: 2374012
cauuuccuuaagagacaac

SEQ ID NO: 2374014 - RNA, 19 nt, Artificial Sequence
  Description of Artificial Sequence: Synthetic oligonucleotide
  Sense strand starting at position 1324 of SEQ ID NO: 1885872
guucuauacgcugaggcuu

SEQ ID NO: 2374015 - RNA, 19 nt, Artificial Sequence
  Description of Artificial Sequence: Synthetic oligonucleotide
  Antisense strand to SEQ ID NO: 2374014
aagccucagcguauagaac

SEQ ID NO: 2374016 - RNA, 19 nt, Artificial Sequence
  Description of Artificial Sequence: Synthetic oligonucleotide
  Sense strand starting at position 1362 of SEQ ID NO: 1885872
ugguguugaucucccaaua

SEQ ID NO: 2374017 - RNA, 19 nt, Artificial Sequence
  Description of Artificial Sequence: Synthetic oligonucleotide
  Antisense strand to SEQ ID NO: 2374016
uauugggagaucaacacca

SEQ ID NO: 2374018 - RNA, 19 nt, Artificial Sequence
  Description of Artificial Sequence: Synthetic oligonucleotide
  Sense strand starting at position 1471 of SEQ ID NO: 1885872
cagggauacuggucaggua

SEQ ID NO: 2374019 - RNA, 19 nt, Artificial Sequence
  Description of Artificial Sequence: Synthetic oligonucleotide
  Antisense strand to SEQ ID NO: 2374018
uaccugaccaguaucccug

SEQ ID NO: 2374020 - RNA, 19 nt, Artificial Sequence
  Description of Artificial Sequence: Synthetic oligonucleotide
  Sense strand starting at position 1474 of SEQ ID NO: 1885872
ggauacuggucagguaaug

SEQ ID NO: 2374021 - RNA, 19 nt, Artificial Sequence
  Description of Artificial Sequence: Synthetic oligonucleotide
  Antisense strand to SEQ ID NO: 2374020
cauuaccugaccaguaucc

SEQ ID NO: 2374022 - RNA, 19 nt, Artificial Sequence
  Description of Artificial Sequence: Synthetic oligonucleotide
  Sense strand starting at position 1853 of SEQ ID NO: 1885872
ccaaguaacucccugauag

SEQ ID NO: 2374023 - RNA, 19 nt, Artificial Sequence
  Description of Artificial Sequence: Synthetic oligonucleotide
  Antisense strand to SEQ ID NO: 2374022
cuaucagggaguuacuugg

SEQ ID NO: 2374024 - RNA, 19 nt, Artificial Sequence
  Description of Artificial Sequence: Synthetic oligonucleotide
  Sense strand starting at position 1855 of SEQ ID NO: 1885872
aaguaacucccugauagug

SEQ ID NO: 2374025 - RNA, 19 nt, Artificial Sequence
  Description of Artificial Sequence: Synthetic oligonucleotide
  Antisense strand to SEQ ID NO: 2374024
cacuaucagggaguuacuu

SEQ ID NO: 2374026 - RNA, 19 nt, Artificial Sequence
  Description of Artificial Sequence: Synthetic oligonucleotide
  Sense strand starting at position 1898 of SEQ ID NO: 1885872
ccuugcaaaugcucaauga

SEQ ID NO: 2374027 - RNA, 19 nt, Artificial Sequence
  Description of Artificial Sequence: Synthetic oligonucleotide
  Antisense strand to SEQ ID NO: 2374026
ucauugagcauuugcaagg

SEQ ID NO: 2374028 - RNA, 19 nt, Artificial Sequence
  Description of Artificial Sequence: Synthetic oligonucleotide
  Sense strand starting at position 1902 of SEQ ID NO: 1885872
gcaaaugcucaaugagaga

SEQ ID NO: 2374029 - RNA, 19 nt, Artificial Sequence
  Description of Artificial Sequence: Synthetic oligonucleotide
  Antisense strand to SEQ ID NO: 2374028
ucucucauugagcauuugc

SEQ ID NO: 2374030 - RNA, 19 nt, Artificial Sequence
  Description of Artificial Sequence: Synthetic oligonucleotide
  Sense strand starting at position 2238 of SEQ ID NO: 1885872
ucacuuugugauggcauuu

SEQ ID NO: 2374031 - RNA, 19 nt, Artificial Sequence
  Description of Artificial Sequence: Synthetic oligonucleotide
  Antisense strand to SEQ ID NO: 2374030
aaaugccaucacaaaguga

SEQ ID NO: 2374032 - RNA, 19 nt, Artificial Sequence
  Description of Artificial Sequence: Synthetic oligonucleotide
  Sense strand starting at position 2361 of SEQ ID NO: 1885872
ccaccugugccugagacaa

SEQ ID NO: 2374033 - RNA, 19 nt, Artificial Sequence
  Description of Artificial Sequence: Synthetic oligonucleotide
  Antisense strand to SEQ ID NO: 2374032
uugucucaggcacaggugg

SEQ ID NO: 2374034 - RNA, 19 nt, Artificial Sequence
  Description of Artificial Sequence: Synthetic oligonucleotide
  Sense strand starting at position 3527 of SEQ ID NO: 1885872
gcuauauuguuucugcaug

SEQ ID NO: 2374035 - RNA, 19 nt, Artificial Sequence
  Description of Artificial Sequence: Synthetic oligonucleotide
  Antisense strand to SEQ ID NO: 2374034
caugcagaaacaauauagc

SEQ ID NO: 2374036 - RNA, 19 nt, Artificial Sequence
  Description of Artificial Sequence: Synthetic oligonucleotide
  Sense strand starting at position 3528 of SEQ ID NO: 1885872
cuauauuguuucugcauga

SEQ ID NO: 2374037 - RNA, 19 nt, Artificial Sequence
  Description of Artificial Sequence: Synthetic oligonucleotide
  Antisense strand to SEQ ID NO: 2374036
ucaugcagaaacaauauag

SEQ ID NO: 2374038 - RNA, 19 nt, Artificial Sequence
  Description of Artificial Sequence: Synthetic oligonucleotide
  Sense strand starting at position 3535 of SEQ ID NO: 1885872
guuucugcaugagucagua

SEQ ID NO: 2374039 - RNA, 19 nt, Artificial Sequence
  Description of Artificial Sequence: Synthetic oligonucleotide
  Antisense strand to SEQ ID NO: 2374038
uacugacucaugcagaaac

SEQ ID NO: 2374040 - RNA, 19 nt, Artificial Sequence
  Description of Artificial Sequence: Synthetic oligonucleotide
  Sense strand starting at position 3539 of SEQ ID NO: 1885872
cugcaugagucaguauuaa

SEQ ID NO: 2374041 - RNA, 19 nt, Artificial Sequence
  Description of Artificial Sequence: Synthetic oligonucleotide
  Antisense strand to SEQ ID NO: 2374040
uuaauacugacucaugcag

SEQ ID NO: 2374042 - RNA, 19 nt, Artificial Sequence
  Description of Artificial Sequence: Synthetic oligonucleotide
  Sense strand starting at position 3543 of SEQ ID NO: 1885872
augagucaguauuaauguu

SEQ ID NO: 2374043 - RNA, 19 nt, Artificial Sequence
  Description of Artificial Sequence: Synthetic oligonucleotide
  Antisense strand to SEQ ID NO: 2374042
aacauuaauacugacucau

SEQ ID NO: 2374044 - RNA, 19 nt, Artificial Sequence
  Description of Artificial Sequence: Synthetic oligonucleotide
  Sense strand starting at position 3551 of SEQ ID NO: 1885872
guauuaauguuacuccagu

SEQ ID NO: 2374045 - RNA, 19 nt, Artificial Sequence
  Description of Artificial Sequence: Synthetic oligonucleotide
  Antisense strand to SEQ ID NO: 2374044
acuggaguaacauuaauac

SEQ ID NO: 2374046 - RNA, 19 nt, Artificial Sequence
  Description of Artificial Sequence: Synthetic oligonucleotide
  Sense strand starting at position 3711 of SEQ ID NO: 1885872
gcagaaugguccuaagugc

SEQ ID NO: 2374047 - RNA, 19 nt, Artificial Sequence
  Description of Artificial Sequence: Synthetic oligonucleotide
  Antisense strand to SEQ ID NO: 2374046
gcacuuaggaccauucugc

SEQ ID NO: 2374048 - RNA, 19 nt, Artificial Sequence
  Description of Artificial Sequence: Synthetic oligonucleotide
  Sense strand starting at position 3728 of SEQ ID NO: 1885872
gcuuucuugaggcaggcaa

SEQ ID NO: 2374049 - RNA, 19 nt, Artificial Sequence
  Description of Artificial Sequence: Synthetic oligonucleotide
  Antisense strand to SEQ ID NO: 2374048
uugccugccucaagaaagc

SEQ ID NO: 2374050 - RNA, 19 nt, Artificial Sequence
  Description of Artificial Sequence: Synthetic oligonucleotide
  Sense strand starting at position 3741 of SEQ ID NO: 1885872
aggcaauuuguccgucaca

SEQ ID NO: 2374051 - RNA, 19 nt, Artificial Sequence
  Description of Artificial Sequence: Synthetic oligonucleotide
  Antisense strand to SEQ ID NO: 2374050
ugugacggacaaauugccu

SEQ ID NO: 2374052 - RNA, 19 nt, Artificial Sequence
  Description of Artificial Sequence: Synthetic oligonucleotide
  Sense strand starting at position 3742 of SEQ ID NO: 1885872
ggcaauuuguccgucacau

SEQ ID NO: 2374053 - RNA, 19 nt, Artificial Sequence
  Description of Artificial Sequence: Synthetic oligonucleotide
  Antisense strand to SEQ ID NO: 2374052
augugacggacaaauugcc

SEQ ID NO: 2374054 - RNA, 19 nt, Artificial Sequence
  Description of Artificial Sequence: Synthetic oligonucleotide
  Sense strand starting at position 3902 of SEQ ID NO: 1885872
augucaauacuccgaauag

SEQ ID NO: 2374055 - RNA, 19 nt, Artificial Sequence
  Description of Artificial Sequence: Synthetic oligonucleotide
  Antisense strand to SEQ ID NO: 2374054
cuauucggaguauugacau

SEQ ID NO: 2374056 - RNA, 19 nt, Artificial Sequence
  Description of Artificial Sequence: Synthetic oligonucleotide
  Sense strand starting at position 3935 of SEQ ID NO: 1885872
gacagcucccagcaugagu

SEQ ID NO: 2374057 - RNA, 19 nt, Artificial Sequence
  Description of Artificial Sequence: Synthetic oligonucleotide
  Antisense strand to SEQ ID NO: 2374056
acucaugcugggagcuguc

SEQ ID NO: 2374058 - RNA, 19 nt, Artificial Sequence
  Description of Artificial Sequence: Synthetic oligonucleotide
  Sense strand starting at position 16 of SEQ ID NO: 1885873
aauggaguuugggaagcaa

SEQ ID NO: 2374059 - RNA, 19 nt, Artificial Sequence
  Description of Artificial Sequence: Synthetic oligonucleotide
  Antisense strand to SEQ ID NO: 2374058
uugcuucccaaacuccauu

SEQ ID NO: 2374060 - RNA, 19 nt, Artificial Sequence
  Description of Artificial Sequence: Synthetic oligonucleotide
  Sense strand starting at position 190 of SEQ ID NO: 1885873
guucuauacguugaggcuu

SEQ ID NO: 2374061 - RNA, 19 nt, Artificial Sequence
  Description of Artificial Sequence: Synthetic oligonucleotide
  Antisense strand to SEQ ID NO: 2374060
aagccucaacguauagaac

SEQ ID NO: 2374062 - RNA, 19 nt, Artificial Sequence
  Description of Artificial Sequence: Synthetic oligonucleotide
  Sense strand starting at position 228 of SEQ ID NO: 1885873
ugguguugaucucccaaca

SEQ ID NO: 2374063 - RNA, 19 nt, Artificial Sequence
  Description of Artificial Sequence: Synthetic oligonucleotide
  Antisense strand to SEQ ID NO: 2374062
uguugggagaucaacacca

SEQ ID NO: 2374064 - RNA, 19 nt, Artificial Sequence
  Description of Artificial Sequence: Synthetic oligonucleotide
  Sense strand starting at position 506 of SEQ ID NO: 1885873
gacagaaacuguuccguau

SEQ ID NO: 2374065 - RNA, 19 nt, Artificial Sequence
  Description of Artificial Sequence: Synthetic oligonucleotide
  Antisense strand to SEQ ID NO: 2374064
auacggaacaguuucuguc

SEQ ID NO: 2374066 - RNA, 19 nt, Artificial Sequence
  Description of Artificial Sequence: Synthetic oligonucleotide
  Sense strand starting at position 509 of SEQ ID NO: 1885873
agaaacuguuccguaucau

SEQ ID NO: 2374067 - RNA, 19 nt, Artificial Sequence
  Description of Artificial Sequence: Synthetic oligonucleotide
  Antisense strand to SEQ ID NO: 2374066
augauacggaacaguuucu

SEQ ID NO: 2374068 - RNA, 19 nt, Artificial Sequence
  Description of Artificial Sequence: Synthetic oligonucleotide
  Sense strand starting at position 510 of SEQ ID NO: 1885873
gaaacuguuccguaucauc

SEQ ID NO: 2374069 - RNA, 19 nt, Artificial Sequence
  Description of Artificial Sequence: Synthetic oligonucleotide
  Antisense strand to SEQ ID NO: 2374068
gaugauacggaacaguuuc

SEQ ID NO: 2374070 - RNA, 19 nt, Artificial Sequence
  Description of Artificial Sequence: Synthetic oligonucleotide
  Sense strand starting at position 566 of SEQ ID NO: 1885873
cguggauucuaucuccuua

SEQ ID NO: 2374071 - RNA, 19 nt, Artificial Sequence
  Description of Artificial Sequence: Synthetic oligonucleotide
  Antisense strand to SEQ ID NO: 2374070
uaaggagauagaauccacg

SEQ ID NO: 2374072 - RNA, 19 nt, Artificial Sequence
  Description of Artificial Sequence: Synthetic oligonucleotide
  Sense strand starting at position 568 of SEQ ID NO: 1885873
uggauucuaucuccuuagu

SEQ ID NO: 2374073 - RNA, 19 nt, Artificial Sequence
  Description of Artificial Sequence: Synthetic oligonucleotide
  Antisense strand to SEQ ID NO: 2374072
acuaaggagauagaaucca

SEQ ID NO: 2374074 - RNA, 19 nt, Artificial Sequence
  Description of Artificial Sequence: Synthetic oligonucleotide
  Sense strand starting at position 724 of SEQ ID NO: 1885873
caaguaacuccugauagug

SEQ ID NO: 2374075 - RNA, 19 nt, Artificial Sequence
  Description of Artificial Sequence: Synthetic oligonucleotide
  Antisense strand to SEQ ID NO: 2374074
cacuaucaggaguuacuug

SEQ ID NO: 2374076 - RNA, 19 nt, Artificial Sequence
  Description of Artificial Sequence: Synthetic oligonucleotide
  Sense strand starting at position 767 of SEQ ID NO: 1885873
ccuugcaaaugcucgauga

SEQ ID NO: 2374077 - RNA, 19 nt, Artificial Sequence
  Description of Artificial Sequence: Synthetic oligonucleotide
  Antisense strand to SEQ ID NO: 2374076
ucaucgagcauuugcaagg

SEQ ID NO: 2374078 - RNA, 19 nt, Artificial Sequence
  Description of Artificial Sequence: Synthetic oligonucleotide
  Sense strand starting at position 769 of SEQ ID NO: 1885873
uugcaaaugcucgaugaga

SEQ ID NO: 2374079 - RNA, 19 nt, Artificial Sequence
  Description of Artificial Sequence: Synthetic oligonucleotide
  Antisense strand to SEQ ID NO: 2374078
ucucaucgagcauuugcaa

SEQ ID NO: 2374080 - RNA, 19 nt, Artificial Sequence
  Description of Artificial Sequence: Synthetic oligonucleotide
  Sense strand starting at position 771 of SEQ ID NO: 1885873
gcaaaugcucgaugagaga

SEQ ID NO: 2374081 - RNA, 19 nt, Artificial Sequence
  Description of Artificial Sequence: Synthetic oligonucleotide
  Antisense strand to SEQ ID NO: 2374080
ucucucaucgagcauuugc

SEQ ID NO: 2374082 - RNA, 19 nt, Artificial Sequence
  Description of Artificial Sequence: Synthetic oligonucleotide
  Sense strand starting at position 1069 of SEQ ID NO: 1885873
gguaaagacauugagcagu

SEQ ID NO: 2374083 - RNA, 19 nt, Artificial Sequence
  Description of Artificial Sequence: Synthetic oligonucleotide
  Antisense strand to SEQ ID NO: 2374082
acugcucaaugucuuuacc

SEQ ID NO: 2374084 - RNA, 19 nt, Artificial Sequence
  Description of Artificial Sequence: Synthetic oligonucleotide
  Sense strand starting at position 2722 of SEQ ID NO: 1885873
uucugcgugagucaguauu

SEQ ID NO: 2374085 - RNA, 19 nt, Artificial Sequence
  Description of Artificial Sequence: Synthetic oligonucleotide
  Antisense strand to SEQ ID NO: 2374084
aauacugacucacgcagaa

SEQ ID NO: 2374086 - RNA, 19 nt, Artificial Sequence
  Description of Artificial Sequence: Synthetic oligonucleotide
  Sense strand starting at position 2904 of SEQ ID NO: 1885873
gucguaagugcuuucuuga

SEQ ID NO: 2374087 - RNA, 19 nt, Artificial Sequence
  Description of Artificial Sequence: Synthetic oligonucleotide
  Antisense strand to SEQ ID NO: 2374086
ucaagaaagcacuuacgac

SEQ ID NO: 2374088 - RNA, 19 nt, Artificial Sequence
  Description of Artificial Sequence: Synthetic oligonucleotide
  Sense strand starting at position 2913 of SEQ ID NO: 1885873
gcuuucuugaggcagguaa

SEQ ID NO: 2374089 - RNA, 19 nt, Artificial Sequence
  Description of Artificial Sequence: Synthetic oligonucleotide
  Antisense strand to SEQ ID NO: 2374088
uuaccugccucaagaaagc

SEQ ID NO: 2374090 - RNA, 19 nt, Artificial Sequence
  Description of Artificial Sequence: Synthetic oligonucleotide
  Sense strand starting at position 2915 of SEQ ID NO: 1885873
uuucuugaggcagguaauu

SEQ ID NO: 2374091 - RNA, 19 nt, Artificial Sequence
  Description of Artificial Sequence: Synthetic oligonucleotide
  Antisense strand to SEQ ID NO: 2374090
aauuaccugccucaagaaa

SEQ ID NO: 2374092 - RNA, 19 nt, Artificial Sequence
  Description of Artificial Sequence: Synthetic oligonucleotide
  Sense strand starting at position 2924 of SEQ ID NO: 1885873
gcagguaauuuguccguca

SEQ ID NO: 2374093 - RNA, 19 nt, Artificial Sequence
  Description of Artificial Sequence: Synthetic oligonucleotide
  Antisense strand to SEQ ID NO: 2374092
ugacggacaaauuaccugc

SEQ ID NO: 2374094 - RNA, 19 nt, Artificial Sequence
  Description of Artificial Sequence: Synthetic oligonucleotide
  Sense strand starting at position 2926 of SEQ ID NO: 1885873
agguaauuuguccgucaca

SEQ ID NO: 2374095 - RNA, 19 nt, Artificial Sequence
  Description of Artificial Sequence: Synthetic oligonucleotide
  Antisense strand to SEQ ID NO: 2374094
ugugacggacaaauuaccu

SEQ ID NO: 2374096 - RNA, 19 nt, Artificial Sequence
  Description of Artificial Sequence: Synthetic oligonucleotide
  Sense strand starting at position 2927 of SEQ ID NO: 1885873
gguaauuuguccgucacau

SEQ ID NO: 2374097 - RNA, 19 nt, Artificial Sequence
  Description of Artificial Sequence: Synthetic oligonucleotide
  Antisense strand to SEQ ID NO: 2374096
augugacggacaaauuacc

SEQ ID NO: 2374098 - RNA, 19 nt, Artificial Sequence
  Description of Artificial Sequence: Synthetic oligonucleotide
  Sense strand starting at position 3042 of SEQ ID NO: 1885873
ucagaaucuguccauauug

SEQ ID NO: 2374099 - RNA, 19 nt, Artificial Sequence
  Description of Artificial Sequence: Synthetic oligonucleotide
  Antisense strand to SEQ ID NO: 2374098
caauauggacagauucuga

SEQ ID NO: 2374100 - RNA, 19 nt, Artificial Sequence
  Description of Artificial Sequence: Synthetic oligonucleotide
  Sense strand starting at position 3138 of SEQ ID NO: 1885873
acuuuagggugacuuaagu

SEQ ID NO: 2374101 - RNA, 19 nt, Artificial Sequence
  Description of Artificial Sequence: Synthetic oligonucleotide
  Antisense strand to SEQ ID NO: 2374100
acuuaagucacccuaaagu

SEQ ID NO: 2374102 - RNA, 19 nt, Artificial Sequence
  Description of Artificial Sequence: Synthetic oligonucleotide
  Sense strand starting at position 3144 of SEQ ID NO: 1885873
gggugacuuaagugaucaa

SEQ ID NO: 2374103 - RNA, 19 nt, Artificial Sequence
  Description of Artificial Sequence: Synthetic oligonucleotide
  Antisense strand to SEQ ID NO: 2374102
uugaucacuuaagucaccc

SEQ ID NO: 2374104 - RNA, 19 nt, Artificial Sequence
  Description of Artificial Sequence: Synthetic oligonucleotide
  Sense strand starting at position 3151 of SEQ ID NO: 1885873
uuaagugaucaagggugua

SEQ ID NO: 2374105 - RNA, 19 nt, Artificial Sequence
  Description of Artificial Sequence: Synthetic oligonucleotide
  Antisense strand to SEQ ID NO: 2374104
uacacccuugaucacuuaa

SEQ ID NO: 2374106 - RNA, 19 nt, Artificial Sequence
  Description of Artificial Sequence: Synthetic oligonucleotide
  Sense strand starting at position 3154 of SEQ ID NO: 1885873
agugaucaaggguguaaau

SEQ ID NO: 2374107 - RNA, 19 nt, Artificial Sequence
  Description of Artificial Sequence: Synthetic oligonucleotide
  Antisense strand to SEQ ID NO: 2374106
auuuacacccuugaucacu

SEQ ID NO: 2374108 - RNA, 19 nt, Artificial Sequence
  Description of Artificial Sequence: Synthetic oligonucleotide
  Sense strand starting at position 3240 of SEQ ID NO: 1885873
cccagucaacuugaguguu

SEQ ID NO: 2374109 - RNA, 19 nt, Artificial Sequence
  Description of Artificial Sequence: Synthetic oligonucleotide
  Antisense strand to SEQ ID NO: 2374108
aacacucaaguugacuggg

SEQ ID NO: 2374110 - RNA, 19 nt, Artificial Sequence
  Description of Artificial Sequence: Synthetic oligonucleotide
  Sense strand starting at position 3243 of SEQ ID NO: 1885873
agucaacuugaguguuugu

SEQ ID NO: 2374111 - RNA, 19 nt, Artificial Sequence
  Description of Artificial Sequence: Synthetic oligonucleotide
  Antisense strand to SEQ ID NO: 2374110
acaaacacucaaguugacu

SEQ ID NO: 2374112 - RNA, 19 nt, Artificial Sequence
  Description of Artificial Sequence: Synthetic oligonucleotide
  Sense strand starting at position 3300 of SEQ ID NO: 1885873
uccagaucauuaccagagu

SEQ ID NO: 2374113 - RNA, 19 nt, Artificial Sequence
  Description of Artificial Sequence: Synthetic oligonucleotide
  Antisense strand to SEQ ID NO: 2374112
acucugguaaugaucugga

SEQ ID NO: 2374114 - RNA, 19 nt, Artificial Sequence
  Description of Artificial Sequence: Synthetic oligonucleotide
  Sense strand starting at position 3301 of SEQ ID NO: 1885873
ccagaucauuaccagagua

SEQ ID NO: 2374115 - RNA, 19 nt, Artificial Sequence
  Description of Artificial Sequence: Synthetic oligonucleotide
  Antisense strand to SEQ ID NO: 2374114
uacucugguaaugaucugg

SEQ ID NO: 2374116 - RNA, 19 nt, Artificial Sequence
  Description of Artificial Sequence: Synthetic oligonucleotide
  Sense strand starting at position 3341 of SEQ ID NO: 1885873
gggauagcucucuauauau

SEQ ID NO: 2374117 - RNA, 19 nt, Artificial Sequence
  Description of Artificial Sequence: Synthetic oligonucleotide
  Antisense strand to SEQ ID NO: 2374116
auauauagagagcuauccc

SEQ ID NO: 2374118 - RNA, 19 nt, Artificial Sequence
  Description of Artificial Sequence: Synthetic oligonucleotide
  Sense strand starting at position 3776 of SEQ ID NO: 1885873
ugucacuaaguuugucaga

SEQ ID NO: 2374119 - RNA, 19 nt, Artificial Sequence
  Description of Artificial Sequence: Synthetic oligonucleotide
  Antisense strand to SEQ ID NO: 2374118
ucugacaaacuuagugaca

SEQ ID NO: 2374120 - RNA, 19 nt, Artificial Sequence
  Description of Artificial Sequence: Synthetic oligonucleotide
  Sense strand starting at position 3777 of SEQ ID NO: 1885873
gucacuaaguuugucagau

SEQ ID NO: 2374121 - RNA, 19 nt, Artificial Sequence
  Description of Artificial Sequence: Synthetic oligonucleotide
  Antisense strand to SEQ ID NO: 2374120
aucugacaaacuuagugac

SEQ ID NO: 2374122 - RNA, 19 nt, Artificial Sequence
  Description of Artificial Sequence: Synthetic oligonucleotide
  Sense strand starting at position 3778 of SEQ ID NO: 1885873
ucacuaaguuugucagauc

SEQ ID NO: 2374123 - RNA, 19 nt, Artificial Sequence
  Description of Artificial Sequence: Synthetic oligonucleotide
  Antisense strand to SEQ ID NO: 2374122
gaucugacaaacuuaguga

SEQ ID NO: 2374124 - RNA, 19 nt, Artificial Sequence
  Description of Artificial Sequence: Synthetic oligonucleotide
  Sense strand starting at position 3785 of SEQ ID NO: 1885873
guuugucagaucugaguga

SEQ ID NO: 2374125 - RNA, 19 nt, Artificial Sequence
  Description of Artificial Sequence: Synthetic oligonucleotide
  Antisense strand to SEQ ID NO: 2374124
ucacucagaucugacaaac

SEQ ID NO: 2374126 - RNA, 19 nt, Artificial Sequence
  Description of Artificial Sequence: Synthetic oligonucleotide
  Sense strand starting at position 3789 of SEQ ID NO: 1885873
gucagaucugagugaugcu

SEQ ID NO: 2374127 - RNA, 19 nt, Artificial Sequence
  Description of Artificial Sequence: Synthetic oligonucleotide
  Antisense strand to SEQ ID NO: 2374126
agcaucacucagaucugac

SEQ ID NO: 2374128 - RNA, 19 nt, Artificial Sequence
  Description of Artificial Sequence: Synthetic oligonucleotide
  Sense strand starting at position 3790 of SEQ ID NO: 1885873
ucagaucugagugaugcuu

SEQ ID NO: 2374129 - RNA, 19 nt, Artificial Sequence
  Description of Artificial Sequence: Synthetic oligonucleotide
  Antisense strand to SEQ ID NO: 2374128
aagcaucacucagaucuga

SEQ ID NO: 2374130 - RNA, 19 nt, Artificial Sequence
  Description of Artificial Sequence: Synthetic oligonucleotide
  Sense strand starting at position 3839 of SEQ ID NO: 1885873
guaggaauuguuggagaau

SEQ ID NO: 2374131 - RNA, 19 nt, Artificial Sequence
  Description of Artificial Sequence: Synthetic oligonucleotide
  Antisense strand to SEQ ID NO: 2374130
auucuccaacaauuccuac

SEQ ID NO: 2374132 - RNA, 19 nt, Artificial Sequence
  Description of Artificial Sequence: Synthetic oligonucleotide
  Sense strand starting at position 3840 of SEQ ID NO: 1885873
uaggaauuguuggagaaua

SEQ ID NO: 2374133 - RNA, 19 nt, Artificial Sequence
  Description of Artificial Sequence: Synthetic oligonucleotide
  Antisense strand to SEQ ID NO: 2374132
uauucuccaacaauuccua

SEQ ID NO: 2374134 - RNA, 19 nt, Artificial Sequence
  Description of Artificial Sequence: Synthetic oligonucleotide
  Sense strand starting at position 3851 of SEQ ID NO: 1885873
ggagaauagugggccacua

SEQ ID NO: 2374135 - RNA, 19 nt, Artificial Sequence
  Description of Artificial Sequence: Synthetic oligonucleotide
  Antisense strand to SEQ ID NO: 2374134
uaguggcccacuauucucc

SEQ ID NO: 2374136 - RNA, 19 nt, Artificial Sequence
  Description of Artificial Sequence: Synthetic oligonucleotide
  Sense strand starting at position 3861 of SEQ ID NO: 1885873
gggccacuagaauauuagu

SEQ ID NO: 2374137 - RNA, 19 nt, Artificial Sequence
  Description of Artificial Sequence: Synthetic oligonucleotide
  Antisense strand to SEQ ID NO: 2374136
acuaauauucuaguggccc

SEQ ID NO: 2374138 - RNA, 19 nt, Artificial Sequence
  Description of Artificial Sequence: Synthetic oligonucleotide
  Sense strand starting at position 19 of SEQ ID NO: 1885874
gagaguuuaucacuguagg

SEQ ID NO: 2374139 - RNA, 19 nt, Artificial Sequence
  Description of Artificial Sequence: Synthetic oligonucleotide
  Antisense strand to SEQ ID NO: 2374138
ccuacagugauaaacucuc

SEQ ID NO: 2374140 - RNA, 19 nt, Artificial Sequence
  Description of Artificial Sequence: Synthetic oligonucleotide
  Sense strand starting at position 22 of SEQ ID NO: 1885874
aguuuaucacuguagguac

SEQ ID NO: 2374141 - RNA, 19 nt, Artificial Sequence
  Description of Artificial Sequence: Synthetic oligonucleotide
  Antisense strand to SEQ ID NO: 2374140
guaccuacagugauaaacu

SEQ ID NO: 2374142 - RNA, 19 nt, Artificial Sequence
  Description of Artificial Sequence: Synthetic oligonucleotide
  Sense strand starting at position 211 of SEQ ID NO: 1885874
ggucauagccaacauguuu

SEQ ID NO: 2374143 - RNA, 19 nt, Artificial Sequence
  Description of Artificial Sequence: Synthetic oligonucleotide
  Antisense strand to SEQ ID NO: 2374142
aaacauguuggcuaugacc

SEQ ID NO: 2374144 - RNA, 19 nt, Artificial Sequence
  Description of Artificial Sequence: Synthetic oligonucleotide
  Sense strand starting at position 363 of SEQ ID NO: 1885874
caguaauucuaaguuggaa

SEQ ID NO: 2374145 - RNA, 19 nt, Artificial Sequence
  Description of Artificial Sequence: Synthetic oligonucleotide
  Antisense strand to SEQ ID NO: 2374144
uuccaacuuagaauuacug

SEQ ID NO: 2374146 - RNA, 19 nt, Artificial Sequence
  Description of Artificial Sequence: Synthetic oligonucleotide
  Sense strand starting at position 386 of SEQ ID NO: 1885874
cagaacaguguuuauguau

SEQ ID NO: 2374147 - RNA, 19 nt, Artificial Sequence
  Description of Artificial Sequence: Synthetic oligonucleotide
  Antisense strand to SEQ ID NO: 2374146
auacauaaacacuguucug

SEQ ID NO: 2374148 - RNA, 19 nt, Artificial Sequence
  Description of Artificial Sequence: Synthetic oligonucleotide
  Sense strand starting at position 395 of SEQ ID NO: 1885874
guuuauguaucauuugugu

SEQ ID NO: 2374149 - RNA, 19 nt, Artificial Sequence
  Description of Artificial Sequence: Synthetic oligonucleotide
  Antisense strand to SEQ ID NO: 2374148
acacaaaugauacauaaac

SEQ ID NO: 2374150 - RNA, 19 nt, Artificial Sequence
  Description of Artificial Sequence: Synthetic oligonucleotide
  Sense strand starting at position 448 of SEQ ID NO: 1885874
gaauguauauaugcacaga

SEQ ID NO: 2374151 - RNA, 19 nt, Artificial Sequence
  Description of Artificial Sequence: Synthetic oligonucleotide
  Antisense strand to SEQ ID NO: 2374150
ucugugcauauauacauuc

SEQ ID NO: 2374152 - RNA, 19 nt, Artificial Sequence
  Description of Artificial Sequence: Synthetic oligonucleotide
  Sense strand starting at position 451 of SEQ ID NO: 1885874
uguauauaugcacagaaua

SEQ ID NO: 2374153 - RNA, 19 nt, Artificial Sequence
  Description of Artificial Sequence: Synthetic oligonucleotide
  Antisense strand to SEQ ID NO: 2374152
uauucugugcauauauaca

SEQ ID NO: 2374154 - RNA, 19 nt, Artificial Sequence
  Description of Artificial Sequence: Synthetic oligonucleotide
  Sense strand starting at position 461 of SEQ ID NO: 1885874
cacagaauauacguggaau

SEQ ID NO: 2374155 - RNA, 19 nt, Artificial Sequence
  Description of Artificial Sequence: Synthetic oligonucleotide
  Antisense strand to SEQ ID NO: 2374154
auuccacguauauucugug

SEQ ID NO: 2374156 - RNA, 19 nt, Artificial Sequence
  Description of Artificial Sequence: Synthetic oligonucleotide
  Sense strand starting at position 462 of SEQ ID NO: 1885874
acagaauauacguggaaua

SEQ ID NO: 2374157 - RNA, 19 nt, Artificial Sequence
  Description of Artificial Sequence: Synthetic oligonucleotide
  Antisense strand to SEQ ID NO: 2374156
uauuccacguauauucugu

SEQ ID NO: 2374158 - RNA, 19 nt, Artificial Sequence
  Description of Artificial Sequence: Synthetic oligonucleotide
  Sense strand starting at position 463 of SEQ ID NO: 1885874
cagaauauacguggaauaa

SEQ ID NO: 2374159 - RNA, 19 nt, Artificial Sequence
  Description of Artificial Sequence: Synthetic oligonucleotide
  Antisense strand to SEQ ID NO: 2374158
uuauuccacguauauucug

SEQ ID NO: 2374160 - RNA, 19 nt, Artificial Sequence
  Description of Artificial Sequence: Synthetic oligonucleotide
  Sense strand starting at position 539 of SEQ ID NO: 1885874
acacuuugauaucuguuga

SEQ ID NO: 2374161 - RNA, 19 nt, Artificial Sequence
  Description of Artificial Sequence: Synthetic oligonucleotide
  Antisense strand to SEQ ID NO: 2374160
ucaacagauaucaaagugu

SEQ ID NO: 2374162 - RNA, 19 nt, Artificial Sequence
  Description of Artificial Sequence: Synthetic oligonucleotide
  Sense strand starting at position 561 of SEQ ID NO: 1885874
uuguacuaucuacauaugu

SEQ ID NO: 2374163 - RNA, 19 nt, Artificial Sequence
  Description of Artificial Sequence: Synthetic oligonucleotide
  Antisense strand to SEQ ID NO: 2374162
acauauguagauaguacaa

SEQ ID NO: 2374164 - RNA, 19 nt, Artificial Sequence
  Description of Artificial Sequence: Synthetic oligonucleotide
  Sense strand starting at position 570 of SEQ ID NO: 1885874
cuacauauguuacugauua

SEQ ID NO: 2374165 - RNA, 19 nt, Artificial Sequence
  Description of Artificial Sequence: Synthetic oligonucleotide
  Antisense strand to SEQ ID NO: 2374164
uaaucaguaacauauguag

SEQ ID NO: 2374166 - RNA, 19 nt, Artificial Sequence
  Description of Artificial Sequence: Synthetic oligonucleotide
  Sense strand starting at position 612 of SEQ ID NO: 1885874
gguauuaugcaguauaaca

SEQ ID NO: 2374167 - RNA, 19 nt, Artificial Sequence
  Description of Artificial Sequence: Synthetic oligonucleotide
  Antisense strand to SEQ ID NO: 2374166
uguuauacugcauaauacc

SEQ ID NO: 2374168 - RNA, 19 nt, Artificial Sequence
  Description of Artificial Sequence: Synthetic oligonucleotide
  Sense strand starting at position 732 of SEQ ID NO: 1885874
ucagauggccaucaaguau

SEQ ID NO: 2374169 - RNA, 19 nt, Artificial Sequence
  Description of Artificial Sequence: Synthetic oligonucleotide
  Antisense strand to SEQ ID NO: 2374168
auacuugauggccaucuga

SEQ ID NO: 2374170 - RNA, 19 nt, Artificial Sequence
  Description of Artificial Sequence: Synthetic oligonucleotide
  Sense strand starting at position 738 of SEQ ID NO: 1885874
ggccaucaaguaugugaaa

SEQ ID NO: 2374171 - RNA, 19 nt, Artificial Sequence
  Description of Artificial Sequence: Synthetic oligonucleotide
  Antisense strand to SEQ ID NO: 2374170
uuucacauacuugauggcc

SEQ ID NO: 2374172 - RNA, 19 nt, Artificial Sequence
  Description of Artificial Sequence: Synthetic oligonucleotide
  Sense strand starting at position 976 of SEQ ID NO: 1885874
auuagaggauuccuaaggu

SEQ ID NO: 2374173 - RNA, 19 nt, Artificial Sequence
  Description of Artificial Sequence: Synthetic oligonucleotide
  Antisense strand to SEQ ID NO: 2374172
accuuaggaauccucuaau

SEQ ID NO: 2374174 - RNA, 19 nt, Artificial Sequence
  Description of Artificial Sequence: Synthetic oligonucleotide
  Sense strand starting at position 982 of SEQ ID NO: 1885874
ggauuccuaagguguaacu

SEQ ID NO: 2374175 - RNA, 19 nt, Artificial Sequence
  Description of Artificial Sequence: Synthetic oligonucleotide
  Antisense strand to SEQ ID NO: 2374174
aguuacaccuuaggaaucc

SEQ ID NO: 2374176 - RNA, 19 nt, Artificial Sequence
  Description of Artificial Sequence: Synthetic oligonucleotide
  Sense strand starting at position 1215 of SEQ ID NO: 1885874
gaaugucgagguuagaauu

SEQ ID NO: 2374177 - RNA, 19 nt, Artificial Sequence
  Description of Artificial Sequence: Synthetic oligonucleotide
  Antisense strand to SEQ ID NO: 2374176
aauucuaaccucgacauuc

SEQ ID NO: 2374178 - RNA, 19 nt, Artificial Sequence
  Description of Artificial Sequence: Synthetic oligonucleotide
  Sense strand starting at position 3049 of SEQ ID NO: 1885874
ggaagaguuuggucuuaau

SEQ ID NO: 2374179 - RNA, 19 nt, Artificial Sequence
  Description of Artificial Sequence: Synthetic oligonucleotide
  Antisense strand to SEQ ID NO: 2374178
auuaagaccaaacucuucc

SEQ ID NO: 2374180 - RNA, 19 nt, Artificial Sequence
  Description of Artificial Sequence: Synthetic oligonucleotide
  Sense strand starting at position 3071 of SEQ ID NO: 1885874
gcauuauuaguggauccua

SEQ ID NO: 2374181 - RNA, 19 nt, Artificial Sequence
  Description of Artificial Sequence: Synthetic oligonucleotide
  Antisense strand to SEQ ID NO: 2374180
uaggauccacuaauaaugc

SEQ ID NO: 2374182 - RNA, 19 nt, Artificial Sequence
  Description of Artificial Sequence: Synthetic oligonucleotide
  Sense strand starting at position 3104 of SEQ ID NO: 1885874
ucugucuuggcguuagcua

SEQ ID NO: 2374183 - RNA, 19 nt, Artificial Sequence
  Description of Artificial Sequence: Synthetic oligonucleotide
  Antisense strand to SEQ ID NO: 2374182
uagcuaacgccaagacaga

SEQ ID NO: 2374184 - RNA, 19 nt, Artificial Sequence
  Description of Artificial Sequence: Synthetic oligonucleotide
  Sense strand starting at position 3109 of SEQ ID NO: 1885874
cuuggcguuagcuaauuua

SEQ ID NO: 2374185 - RNA, 19 nt, Artificial Sequence
  Description of Artificial Sequence: Synthetic oligonucleotide
  Antisense strand to SEQ ID NO: 2374184
uaaauuagcuaacgccaag

SEQ ID NO: 2374186 - RNA, 19 nt, Artificial Sequence
  Description of Artificial Sequence: Synthetic oligonucleotide
  Sense strand starting at position 3112 of SEQ ID NO: 1885874
ggcguuagcuaauuuacuu

SEQ ID NO: 2374187 - RNA, 19 nt, Artificial Sequence
  Description of Artificial Sequence: Synthetic oligonucleotide
  Antisense strand to SEQ ID NO: 2374186
aaguaaauuagcuaacgcc

SEQ ID NO: 2374188 - RNA, 19 nt, Artificial Sequence
  Description of Artificial Sequence: Synthetic oligonucleotide
  Sense strand starting at position 3133 of SEQ ID NO: 1885874
agcacaguugcuuauaaca

SEQ ID NO: 2374189 - RNA, 19 nt, Artificial Sequence
  Description of Artificial Sequence: Synthetic oligonucleotide
  Antisense strand to SEQ ID NO: 2374188
uguuauaagcaacugugcu

SEQ ID NO: 2374190 - RNA, 19 nt, Artificial Sequence
  Description of Artificial Sequence: Synthetic oligonucleotide
  Sense strand starting at position 3199 of SEQ ID NO: 1885874
ucaucuuagaggcagguau

SEQ ID NO: 2374191 - RNA, 19 nt, Artificial Sequence
  Description of Artificial Sequence: Synthetic oligonucleotide
  Antisense strand to SEQ ID NO: 2374190
auaccugccucuaagauga

SEQ ID NO: 2374192 - RNA, 19 nt, Artificial Sequence
  Description of Artificial Sequence: Synthetic oligonucleotide
  Sense strand starting at position 3203 of SEQ ID NO: 1885874
cuuagaggcagguaucauu

SEQ ID NO: 2374193 - RNA, 19 nt, Artificial Sequence
  Description of Artificial Sequence: Synthetic oligonucleotide
  Antisense strand to SEQ ID NO: 2374192
aaugauaccugccucuaag

SEQ ID NO: 2374194 - RNA, 19 nt, Artificial Sequence
  Description of Artificial Sequence: Synthetic oligonucleotide
  Sense strand starting at position 3206 of SEQ ID NO: 1885874
agaggcagguaucauuuaa

SEQ ID NO: 2374195 - RNA, 19 nt, Artificial Sequence
  Description of Artificial Sequence: Synthetic oligonucleotide
  Antisense strand to SEQ ID NO: 2374194
uuaaaugauaccugccucu

SEQ ID NO: 2374196 - RNA, 19 nt, Artificial Sequence
  Description of Artificial Sequence: Synthetic oligonucleotide
  Sense strand starting at position 3243 of SEQ ID NO: 1885874
cuuguaguacaguaucaua

SEQ ID NO: 2374197 - RNA, 19 nt, Artificial Sequence
  Description of Artificial Sequence: Synthetic oligonucleotide
  Antisense strand to SEQ ID NO: 2374196
uaugauacuguacuacaag

SEQ ID NO: 2374198 - RNA, 19 nt, Artificial Sequence
  Description of Artificial Sequence: Synthetic oligonucleotide
  Sense strand starting at position 3281 of SEQ ID NO: 1885874
gguguuaagcuggaauuga

SEQ ID NO: 2374199 - RNA, 19 nt, Artificial Sequence
  Description of Artificial Sequence: Synthetic oligonucleotide
  Antisense strand to SEQ ID NO: 2374198
ucaauuccagcuuaacacc

SEQ ID NO: 2374200 - RNA, 19 nt, Artificial Sequence
  Description of Artificial Sequence: Synthetic oligonucleotide
  Sense strand starting at position 3356 of SEQ ID NO: 1885874
ggaggacuuggcuaucagu

SEQ ID NO: 2374201 - RNA, 19 nt, Artificial Sequence
  Description of Artificial Sequence: Synthetic oligonucleotide
  Antisense strand to SEQ ID NO: 2374200
acugauagccaaguccucc

SEQ ID NO: 2374202 - RNA, 19 nt, Artificial Sequence
  Description of Artificial Sequence: Synthetic oligonucleotide
  Sense strand starting at position 3632 of SEQ ID NO: 1885874
auaauuacagaucgugauu

SEQ ID NO: 2374203 - RNA, 19 nt, Artificial Sequence
  Description of Artificial Sequence: Synthetic oligonucleotide
  Antisense strand to SEQ ID NO: 2374202
aaucacgaucuguaauuau

SEQ ID NO: 2374204 - RNA, 19 nt, Artificial Sequence
  Description of Artificial Sequence: Synthetic oligonucleotide
  Sense strand starting at position 3635 of SEQ ID NO: 1885874
auuacagaucgugauuagu

SEQ ID NO: 2374205 - RNA, 19 nt, Artificial Sequence
  Description of Artificial Sequence: Synthetic oligonucleotide
  Antisense strand to SEQ ID NO: 2374204
acuaaucacgaucuguaau

SEQ ID NO: 2374206 - RNA, 19 nt, Artificial Sequence
  Description of Artificial Sequence: Synthetic oligonucleotide
  Sense strand starting at position 3672 of SEQ ID NO: 1885874
gggucaugagaagguaacu

SEQ ID NO: 2374207 - RNA, 19 nt, Artificial Sequence
  Description of Artificial Sequence: Synthetic oligonucleotide
  Antisense strand to SEQ ID NO: 2374206
aguuaccuucucaugaccc

SEQ ID NO: 2374208 - RNA, 19 nt, Artificial Sequence
  Description of Artificial Sequence: Synthetic oligonucleotide
  Sense strand starting at position 3723 of SEQ ID NO: 1885874
gaaugaaucagcggaggga

SEQ ID NO: 2374209 - RNA, 19 nt, Artificial Sequence
  Description of Artificial Sequence: Synthetic oligonucleotide
  Antisense strand to SEQ ID NO: 2374208
ucccuccgcugauucauuc

SEQ ID NO: 2374210 - RNA, 19 nt, Artificial Sequence
  Description of Artificial Sequence: Synthetic oligonucleotide
  Sense strand starting at position 3822 of SEQ ID NO: 1885874
gcaugagccagguggaaau

SEQ ID NO: 2374211 - RNA, 19 nt, Artificial Sequence
  Description of Artificial Sequence: Synthetic oligonucleotide
  Antisense strand to SEQ ID NO: 2374210
auuuccaccuggcucaugc

SEQ ID NO: 2374212 - RNA, 19 nt, Artificial Sequence
  Description of Artificial Sequence: Synthetic oligonucleotide
  Sense strand starting at position 3901 of SEQ ID NO: 1885874
aagugagcugauuguaaag

SEQ ID NO: 2374213 - RNA, 19 nt, Artificial Sequence
  Description of Artificial Sequence: Synthetic oligonucleotide
  Antisense strand to SEQ ID NO: 2374212
cuuuacaaucagcucacuu

SEQ ID NO: 2374214 - RNA, 19 nt, Artificial Sequence
  Description of Artificial Sequence: Synthetic oligonucleotide
  Sense strand starting at position 3936 of SEQ ID NO: 1885874
cuggaugcucuguauuaag

SEQ ID NO: 2374215 - RNA, 19 nt, Artificial Sequence
  Description of Artificial Sequence: Synthetic oligonucleotide
  Antisense strand to SEQ ID NO: 2374214
cuuaauacagagcauccag

SEQ ID NO: 2374216 - RNA, 19 nt, Artificial Sequence
  Description of Artificial Sequence: Synthetic oligonucleotide
  Sense strand starting at position 3945 of SEQ ID NO: 1885874
cuguauuaagcugagagua

SEQ ID NO: 2374217 - RNA, 19 nt, Artificial Sequence
  Description of Artificial Sequence: Synthetic oligonucleotide
  Antisense strand to SEQ ID NO: 2374216
uacucucagcuuaauacag

SEQ ID NO: 2374218 - RNA, 19 nt, Artificial Sequence
  Description of Artificial Sequence: Synthetic oligonucleotide
  Sense strand starting at position 203 of SEQ ID NO: 1885875
ucuccuauaguuggaauca

SEQ ID NO: 2374219 - RNA, 19 nt, Artificial Sequence
  Description of Artificial Sequence: Synthetic oligonucleotide
  Antisense strand to SEQ ID NO: 2374218
ugauuccaacuauaggaga

SEQ ID NO: 2374220 - RNA, 19 nt, Artificial Sequence
  Description of Artificial Sequence: Synthetic oligonucleotide
  Sense strand starting at position 243 of SEQ ID NO: 1885875
uggcuucuguuauuuaaua

SEQ ID NO: 2374221 - RNA, 19 nt, Artificial Sequence
  Description of Artificial Sequence: Synthetic oligonucleotide
  Antisense strand to SEQ ID NO: 2374220
uauuaaauaacagaagcca

SEQ ID NO: 2374222 - RNA, 19 nt, Artificial Sequence
  Description of Artificial Sequence: Synthetic oligonucleotide
  Sense strand starting at position 317 of SEQ ID NO: 1885875
ggugcuaauaaaggaauua

SEQ ID NO: 2374223 - RNA, 19 nt, Artificial Sequence
  Description of Artificial Sequence: Synthetic oligonucleotide
  Antisense strand to SEQ ID NO: 2374222
uaauuccuuuauuagcacc

SEQ ID NO: 2374224 - RNA, 19 nt, Artificial Sequence
  Description of Artificial Sequence: Synthetic oligonucleotide
  Sense strand starting at position 436 of SEQ ID NO: 1885875
uuuggucccugauucuauu

SEQ ID NO: 2374225 - RNA, 19 nt, Artificial Sequence
  Description of Artificial Sequence: Synthetic oligonucleotide
  Antisense strand to SEQ ID NO: 2374224
aauagaaucagggaccaaa

SEQ ID NO: 2374226 - RNA, 19 nt, Artificial Sequence
  Description of Artificial Sequence: Synthetic oligonucleotide
  Sense strand starting at position 585 of SEQ ID NO: 1885875
gaccaaaugugguccuucu

SEQ ID NO: 2374227 - RNA, 19 nt, Artificial Sequence
  Description of Artificial Sequence: Synthetic oligonucleotide
  Antisense strand to SEQ ID NO: 2374226
agaaggaccacauuugguc

SEQ ID NO: 2374228 - RNA, 19 nt, Artificial Sequence
  Description of Artificial Sequence: Synthetic oligonucleotide
  Sense strand starting at position 603 of SEQ ID NO: 1885875
ugaugagagugcucaggaa

SEQ ID NO: 2374229 - RNA, 19 nt, Artificial Sequence
  Description of Artificial Sequence: Synthetic oligonucleotide
  Antisense strand to SEQ ID NO: 2374228
uuccugagcacucucauca

SEQ ID NO: 2374230 - RNA, 19 nt, Artificial Sequence
  Description of Artificial Sequence: Synthetic oligonucleotide
  Sense strand starting at position 708 of SEQ ID NO: 1885875
uugggcaccucaguguaaa

SEQ ID NO: 2374231 - RNA, 19 nt, Artificial Sequence
  Description of Artificial Sequence: Synthetic oligonucleotide
  Antisense strand to SEQ ID NO: 2374230
uuuacacugaggugcccaa

SEQ ID NO: 2374232 - RNA, 19 nt, Artificial Sequence
  Description of Artificial Sequence: Synthetic oligonucleotide
  Sense strand starting at position 923 of SEQ ID NO: 1885875
uccaguaggucuuucugga

SEQ ID NO: 2374233 - RNA, 19 nt, Artificial Sequence
  Description of Artificial Sequence: Synthetic oligonucleotide
  Antisense strand to SEQ ID NO: 2374232
uccagaaagaccuacugga

SEQ ID NO: 2374234 - RNA, 19 nt, Artificial Sequence
  Description of Artificial Sequence: Synthetic oligonucleotide
  Sense strand starting at position 2076 of SEQ ID NO: 1885875
aucugaguugcacagaucu

SEQ ID NO: 2374235 - RNA, 19 nt, Artificial Sequence
  Description of Artificial Sequence: Synthetic oligonucleotide
  Antisense strand to SEQ ID NO: 2374234
agaucugugcaacucagau

SEQ ID NO: 2374236 - RNA, 19 nt, Artificial Sequence
  Description of Artificial Sequence: Synthetic oligonucleotide
  Sense strand starting at position 2078 of SEQ ID NO: 1885875
cugaguugcacagaucuga

SEQ ID NO: 2374237 - RNA, 19 nt, Artificial Sequence
  Description of Artificial Sequence: Synthetic oligonucleotide
  Antisense strand to SEQ ID NO: 2374236
ucagaucugugcaacucag

SEQ ID NO: 2374238 - RNA, 19 nt, Artificial Sequence
  Description of Artificial Sequence: Synthetic oligonucleotide
  Sense strand starting at position 2082 of SEQ ID NO: 1885875
guugcacagaucugaugua

SEQ ID NO: 2374239 - RNA, 19 nt, Artificial Sequence
  Description of Artificial Sequence: Synthetic oligonucleotide
  Antisense strand to SEQ ID NO: 2374238
uacaucagaucugugcaac

SEQ ID NO: 2374240 - RNA, 19 nt, Artificial Sequence
  Description of Artificial Sequence: Synthetic oligonucleotide
  Sense strand starting at position 2187 of SEQ ID NO: 1885875
cguacucagaguggacaau

SEQ ID NO: 2374241 - RNA, 19 nt, Artificial Sequence
  Description of Artificial Sequence: Synthetic oligonucleotide
  Antisense strand to SEQ ID NO: 2374240
auuguccacucugaguacg

SEQ ID NO: 2374242 - RNA, 19 nt, Artificial Sequence
  Description of Artificial Sequence: Synthetic oligonucleotide
  Sense strand starting at position 2196 of SEQ ID NO: 1885875
aguggacaauuugagaaua

SEQ ID NO: 2374243 - RNA, 19 nt, Artificial Sequence
  Description of Artificial Sequence: Synthetic oligonucleotide
  Antisense strand to SEQ ID NO: 2374242
uauucucaaauuguccacu

SEQ ID NO: 2374244 - RNA, 19 nt, Artificial Sequence
  Description of Artificial Sequence: Synthetic oligonucleotide
  Sense strand starting at position 2227 of SEQ ID NO: 1885875
acaccaacguuucuacaga

SEQ ID NO: 2374245 - RNA, 19 nt, Artificial Sequence
  Description of Artificial Sequence: Synthetic oligonucleotide
  Antisense strand to SEQ ID NO: 2374244
ucuguagaaacguuggugu

SEQ ID NO: 2374246 - RNA, 19 nt, Artificial Sequence
  Description of Artificial Sequence: Synthetic oligonucleotide
  Sense strand starting at position 2240 of SEQ ID NO: 1885875
uacagauguguacguccau

SEQ ID NO: 2374247 - RNA, 19 nt, Artificial Sequence
  Description of Artificial Sequence: Synthetic oligonucleotide
  Antisense strand to SEQ ID NO: 2374246
auggacguacacaucugua

SEQ ID NO: 2374248 - RNA, 19 nt, Artificial Sequence
  Description of Artificial Sequence: Synthetic oligonucleotide
  Sense strand starting at position 2247 of SEQ ID NO: 1885875
guguacguccaugaaauca

SEQ ID NO: 2374249 - RNA, 19 nt, Artificial Sequence
  Description of Artificial Sequence: Synthetic oligonucleotide
  Antisense strand to SEQ ID NO: 2374248
ugauuucauggacguacac

SEQ ID NO: 2374250 - RNA, 19 nt, Artificial Sequence
  Description of Artificial Sequence: Synthetic oligonucleotide
  Sense strand starting at position 2255 of SEQ ID NO: 1885875
ccaugaaaucaucaccgca

SEQ ID NO: 2374251 - RNA, 19 nt, Artificial Sequence
  Description of Artificial Sequence: Synthetic oligonucleotide
  Antisense strand to SEQ ID NO: 2374250
ugcggugaugauuucaugg

SEQ ID NO: 2374252 - RNA, 19 nt, Artificial Sequence
  Description of Artificial Sequence: Synthetic oligonucleotide
  Sense strand starting at position 2257 of SEQ ID NO: 1885875
augaaaucaucaccgcaau

SEQ ID NO: 2374253 - RNA, 19 nt, Artificial Sequence
  Description of Artificial Sequence: Synthetic oligonucleotide
  Antisense strand to SEQ ID NO: 2374252
auugcggugaugauuucau

SEQ ID NO: 2374254 - RNA, 19 nt, Artificial Sequence
  Description of Artificial Sequence: Synthetic oligonucleotide
  Sense strand starting at position 2258 of SEQ ID NO: 1885875
ugaaaucaucaccgcaauc

SEQ ID NO: 2374255 - RNA, 19 nt, Artificial Sequence
  Description of Artificial Sequence: Synthetic oligonucleotide
  Antisense strand to SEQ ID NO: 2374254
gauugcggugaugauuuca

SEQ ID NO: 2374256 - RNA, 19 nt, Artificial Sequence
  Description of Artificial Sequence: Synthetic oligonucleotide
  Sense strand starting at position 2559 of SEQ ID NO: 1885875
ccagguagugaguaguagu

SEQ ID NO: 2374257 - RNA, 19 nt, Artificial Sequence
  Description of Artificial Sequence: Synthetic oligonucleotide
  Antisense strand to SEQ ID NO: 2374256
acuacuacucacuaccugg

SEQ ID NO: 2374258 - RNA, 19 nt, Artificial Sequence
  Description of Artificial Sequence: Synthetic oligonucleotide
  Sense strand starting at position 2706 of SEQ ID NO: 1885875
ugcguuauuugguuuccca

SEQ ID NO: 2374259 - RNA, 19 nt, Artificial Sequence
  Description of Artificial Sequence: Synthetic oligonucleotide
  Antisense strand to SEQ ID NO: 2374258
ugggaaaccaaauaacgca

SEQ ID NO: 2374260 - RNA, 19 nt, Artificial Sequence
  Description of Artificial Sequence: Synthetic oligonucleotide
  Sense strand starting at position 2718 of SEQ ID NO: 1885875
uuucccauucuuggguuaa

SEQ ID NO: 2374261 - RNA, 19 nt, Artificial Sequence
  Description of Artificial Sequence: Synthetic oligonucleotide
  Antisense strand to SEQ ID NO: 2374260
uuaacccaagaaugggaaa

SEQ ID NO: 2374262 - RNA, 19 nt, Artificial Sequence
  Description of Artificial Sequence: Synthetic oligonucleotide
  Sense strand starting at position 2720 of SEQ ID NO: 1885875
ucccauucuuggguuaauu

SEQ ID NO: 2374263 - RNA, 19 nt, Artificial Sequence
  Description of Artificial Sequence: Synthetic oligonucleotide
  Antisense strand to SEQ ID NO: 2374262
aauuaacccaagaauggga

SEQ ID NO: 2374264 - RNA, 19 nt, Artificial Sequence
  Description of Artificial Sequence: Synthetic oligonucleotide
  Sense strand starting at position 2728 of SEQ ID NO: 1885875
uuggguuaauuccuuagga

SEQ ID NO: 2374265 - RNA, 19 nt, Artificial Sequence
  Description of Artificial Sequence: Synthetic oligonucleotide
  Antisense strand to SEQ ID NO: 2374264
uccuaaggaauuaacccaa

SEQ ID NO: 2374266 - RNA, 19 nt, Artificial Sequence
  Description of Artificial Sequence: Synthetic oligonucleotide
  Sense strand starting at position 2729 of SEQ ID NO: 1885875
uggguuaauuccuuaggac

SEQ ID NO: 2374267 - RNA, 19 nt, Artificial Sequence
  Description of Artificial Sequence: Synthetic oligonucleotide
  Antisense strand to SEQ ID NO: 2374266
guccuaaggaauuaaccca

SEQ ID NO: 2374268 - RNA, 19 nt, Artificial Sequence
  Description of Artificial Sequence: Synthetic oligonucleotide
  Sense strand starting at position 2881 of SEQ ID NO: 1885875
auacacuugcugggaauaa

SEQ ID NO: 2374269 - RNA, 19 nt, Artificial Sequence
  Description of Artificial Sequence: Synthetic oligonucleotide
  Antisense strand to SEQ ID NO: 2374268
uuauucccagcaaguguau

SEQ ID NO: 2374270 - RNA, 19 nt, Artificial Sequence
  Description of Artificial Sequence: Synthetic oligonucleotide
  Sense strand starting at position 2928 of SEQ ID NO: 1885875
uuuggagauuucugaaagc

SEQ ID NO: 2374271 - RNA, 19 nt, Artificial Sequence
  Description of Artificial Sequence: Synthetic oligonucleotide
  Antisense strand to SEQ ID NO: 2374270
gcuuucagaaaucuccaaa

SEQ ID NO: 2374272 - RNA, 19 nt, Artificial Sequence
  Description of Artificial Sequence: Synthetic oligonucleotide
  Sense strand starting at position 3044 of SEQ ID NO: 1885875
aucaaagcguuguuuacaa

SEQ ID NO: 2374273 - RNA, 19 nt, Artificial Sequence
  Description of Artificial Sequence: Synthetic oligonucleotide
  Antisense strand to SEQ ID NO: 2374272
uuguaaacaacgcuuugau

SEQ ID NO: 2374274 - RNA, 19 nt, Artificial Sequence
  Description of Artificial Sequence: Synthetic oligonucleotide
  Sense strand starting at position 3046 of SEQ ID NO: 1885875
caaagcguuguuuacaaua

SEQ ID NO: 2374275 - RNA, 19 nt, Artificial Sequence
  Description of Artificial Sequence: Synthetic oligonucleotide
  Antisense strand to SEQ ID NO: 2374274
uauuguaaacaacgcuuug

SEQ ID NO: 2374276 - RNA, 19 nt, Artificial Sequence
  Description of Artificial Sequence: Synthetic oligonucleotide
  Sense strand starting at position 3159 of SEQ ID NO: 1885875
aaaggaacauccguucuuu

SEQ ID NO: 2374277 - RNA, 19 nt, Artificial Sequence
  Description of Artificial Sequence: Synthetic oligonucleotide
  Antisense strand to SEQ ID NO: 2374276
aaagaacggauguuccuuu

SEQ ID NO: 2374278 - RNA, 19 nt, Artificial Sequence
  Description of Artificial Sequence: Synthetic oligonucleotide
  Sense strand starting at position 3199 of SEQ ID NO: 1885875
cucaauaguuauucugaga

SEQ ID NO: 2374279 - RNA, 19 nt, Artificial Sequence
  Description of Artificial Sequence: Synthetic oligonucleotide
  Antisense strand to SEQ ID NO: 2374278
ucucagaauaacuauugag

SEQ ID NO: 2374280 - RNA, 19 nt, Artificial Sequence
  Description of Artificial Sequence: Synthetic oligonucleotide
  Sense strand starting at position 3220 of SEQ ID NO: 1885875
cauuuauaucguugcaggu

SEQ ID NO: 2374281 - RNA, 19 nt, Artificial Sequence
  Description of Artificial Sequence: Synthetic oligonucleotide
  Antisense strand to SEQ ID NO: 2374280
accugcaacgauauaaaug

SEQ ID NO: 2374282 - RNA, 19 nt, Artificial Sequence
  Description of Artificial Sequence: Synthetic oligonucleotide
  Sense strand starting at position 3368 of SEQ ID NO: 1885875
uuuacaagucuuuguauag

SEQ ID NO: 2374283 - RNA, 19 nt, Artificial Sequence
  Description of Artificial Sequence: Synthetic oligonucleotide
  Antisense strand to SEQ ID NO: 2374282
cuauacaaagacuuguaaa

SEQ ID NO: 2374284 - RNA, 19 nt, Artificial Sequence
  Description of Artificial Sequence: Synthetic oligonucleotide
  Sense strand starting at position 3372 of SEQ ID NO: 1885875
caagucuuuguauagguau

SEQ ID NO: 2374285 - RNA, 19 nt, Artificial Sequence
  Description of Artificial Sequence: Synthetic oligonucleotide
  Antisense strand to SEQ ID NO: 2374284
auaccuauacaaagacuug

SEQ ID NO: 2374286 - RNA, 19 nt, Artificial Sequence
  Description of Artificial Sequence: Synthetic oligonucleotide
  Sense strand starting at position 3374 of SEQ ID NO: 1885875
agucuuuguauagguauau

SEQ ID NO: 2374287 - RNA, 19 nt, Artificial Sequence
  Description of Artificial Sequence: Synthetic oligonucleotide
  Antisense strand to SEQ ID NO: 2374286
auauaccuauacaaagacu

SEQ ID NO: 2374288 - RNA, 19 nt, Artificial Sequence
  Description of Artificial Sequence: Synthetic oligonucleotide
  Sense strand starting at position 3395 of SEQ ID NO: 1885875
uggguagguggauguuuaa

SEQ ID NO: 2374289 - RNA, 19 nt, Artificial Sequence
  Description of Artificial Sequence: Synthetic oligonucleotide
  Antisense strand to SEQ ID NO: 2374288
uuaaacauccaccuaccca

SEQ ID NO: 2374290 - RNA, 19 nt, Artificial Sequence
  Description of Artificial Sequence: Synthetic oligonucleotide
  Sense strand starting at position 3402 of SEQ ID NO: 1885875
guggauguuuaacucuuua

SEQ ID NO: 2374291 - RNA, 19 nt, Artificial Sequence
  Description of Artificial Sequence: Synthetic oligonucleotide
  Antisense strand to SEQ ID NO: 2374290
uaaagaguuaaacauccac

SEQ ID NO: 2374292 - RNA, 19 nt, Artificial Sequence
  Description of Artificial Sequence: Synthetic oligonucleotide
  Sense strand starting at position 3450 of SEQ ID NO: 1885875
uuauguucucaccaguaau

SEQ ID NO: 2374293 - RNA, 19 nt, Artificial Sequence
  Description of Artificial Sequence: Synthetic oligonucleotide
  Antisense strand to SEQ ID NO: 2374292
auuacuggugagaacauaa

SEQ ID NO: 2374294 - RNA, 19 nt, Artificial Sequence
  Description of Artificial Sequence: Synthetic oligonucleotide
  Sense strand starting at position 3453 of SEQ ID NO: 1885875
uguucucaccaguaaugua

SEQ ID NO: 2374295 - RNA, 19 nt, Artificial Sequence
  Description of Artificial Sequence: Synthetic oligonucleotide
  Antisense strand to SEQ ID NO: 2374294
uacauuacuggugagaaca

SEQ ID NO: 2374296 - RNA, 19 nt, Artificial Sequence
  Description of Artificial Sequence: Synthetic oligonucleotide
  Sense strand starting at position 3513 of SEQ ID NO: 1885875
gugguuaguuuauuggagu

SEQ ID NO: 2374297 - RNA, 19 nt, Artificial Sequence
  Description of Artificial Sequence: Synthetic oligonucleotide
  Antisense strand to SEQ ID NO: 2374296
acuccaauaaacuaaccac

SEQ ID NO: 2374298 - RNA, 19 nt, Artificial Sequence
  Description of Artificial Sequence: Synthetic oligonucleotide
  Sense strand starting at position 233 of SEQ ID NO: 1885876
gggauuauugagggucccu

SEQ ID NO: 2374299 - RNA, 19 nt, Artificial Sequence
  Description of Artificial Sequence: Synthetic oligonucleotide
  Antisense strand to SEQ ID NO: 2374298
agggacccucaauaauccc

SEQ ID NO: 2374300 - RNA, 19 nt, Artificial Sequence
  Description of Artificial Sequence: Synthetic oligonucleotide
  Sense strand starting at position 238 of SEQ ID NO: 1885876
uauugagggucccuuuaca

SEQ ID NO: 2374301 - RNA, 19 nt, Artificial Sequence
  Description of Artificial Sequence: Synthetic oligonucleotide
  Antisense strand to SEQ ID NO: 2374300
uguaaagggacccucaaua

SEQ ID NO: 2374302 - RNA, 19 nt, Artificial Sequence
  Description of Artificial Sequence: Synthetic oligonucleotide
  Sense strand starting at position 330 of SEQ ID NO: 1885876
cugagugcaugcucuuaau

SEQ ID NO: 2374303 - RNA, 19 nt, Artificial Sequence
  Description of Artificial Sequence: Synthetic oligonucleotide
  Antisense strand to SEQ ID NO: 2374302
auuaagagcaugcacucag

SEQ ID NO: 2374304 - RNA, 19 nt, Artificial Sequence
  Description of Artificial Sequence: Synthetic oligonucleotide
  Sense strand starting at position 362 of SEQ ID NO: 1885876
ucucaaauggugugaaacu

SEQ ID NO: 2374305 - RNA, 19 nt, Artificial Sequence
  Description of Artificial Sequence: Synthetic oligonucleotide
  Antisense strand to SEQ ID NO: 2374304
aguuucacaccauuugaga

SEQ ID NO: 2374306 - RNA, 19 nt, Artificial Sequence
  Description of Artificial Sequence: Synthetic oligonucleotide
  Sense strand starting at position 617 of SEQ ID NO: 1885876
ggcuuaauauugguagaga

SEQ ID NO: 2374307 - RNA, 19 nt, Artificial Sequence
  Description of Artificial Sequence: Synthetic oligonucleotide
  Antisense strand to SEQ ID NO: 2374306
ucucuaccaauauuaagcc

SEQ ID NO: 2374308 - RNA, 19 nt, Artificial Sequence
  Description of Artificial Sequence: Synthetic oligonucleotide
  Sense strand starting at position 657 of SEQ ID NO: 1885876
uggcauucucaguggcauu

SEQ ID NO: 2374309 - RNA, 19 nt, Artificial Sequence
  Description of Artificial Sequence: Synthetic oligonucleotide
  Antisense strand to SEQ ID NO: 2374308
aaugccacugagaaugcca

SEQ ID NO: 2374310 - RNA, 19 nt, Artificial Sequence
  Description of Artificial Sequence: Synthetic oligonucleotide
  Sense strand starting at position 1325 of SEQ ID NO: 1885876
gaagacauguaggcuagau

SEQ ID NO: 2374311 - RNA, 19 nt, Artificial Sequence
  Description of Artificial Sequence: Synthetic oligonucleotide
  Antisense strand to SEQ ID NO: 2374310
aucuagccuacaugucuuc

SEQ ID NO: 2374312 - RNA, 19 nt, Artificial Sequence
  Description of Artificial Sequence: Synthetic oligonucleotide
  Sense strand starting at position 1329 of SEQ ID NO: 1885876
acauguaggcuagaucagu

SEQ ID NO: 2374313 - RNA, 19 nt, Artificial Sequence
  Description of Artificial Sequence: Synthetic oligonucleotide
  Antisense strand to SEQ ID NO: 2374312
acugaucuagccuacaugu

SEQ ID NO: 2374314 - RNA, 19 nt, Artificial Sequence
  Description of Artificial Sequence: Synthetic oligonucleotide
  Sense strand starting at position 1334 of SEQ ID NO: 1885876
uaggcuagaucaguuucua

SEQ ID NO: 2374315 - RNA, 19 nt, Artificial Sequence
  Description of Artificial Sequence: Synthetic oligonucleotide
  Antisense strand to SEQ ID NO: 2374314
uagaaacugaucuagccua

SEQ ID NO: 2374316 - RNA, 19 nt, Artificial Sequence
  Description of Artificial Sequence: Synthetic oligonucleotide
  Sense strand starting at position 1370 of SEQ ID NO: 1885876
gccauuaaucuggaaucua

SEQ ID NO: 2374317 - RNA, 19 nt, Artificial Sequence
  Description of Artificial Sequence: Synthetic oligonucleotide
  Antisense strand to SEQ ID NO: 2374316
uagauuccagauuaauggc

SEQ ID NO: 2374318 - RNA, 19 nt, Artificial Sequence
  Description of Artificial Sequence: Synthetic oligonucleotide
  Sense strand starting at position 1481 of SEQ ID NO: 1885876
aucuauguccucuguaauc

SEQ ID NO: 2374319 - RNA, 19 nt, Artificial Sequence
  Description of Artificial Sequence: Synthetic oligonucleotide
  Antisense strand to SEQ ID NO: 2374318
gauuacagaggacauagau

SEQ ID NO: 2374320 - RNA, 19 nt, Artificial Sequence
  Description of Artificial Sequence: Synthetic oligonucleotide
  Sense strand starting at position 1483 of SEQ ID NO: 1885876
cuauguccucuguaaucuu

SEQ ID NO: 2374321 - RNA, 19 nt, Artificial Sequence
  Description of Artificial Sequence: Synthetic oligonucleotide
  Antisense strand to SEQ ID NO: 2374320
aagauuacagaggacauag

SEQ ID NO: 2374322 - RNA, 19 nt, Artificial Sequence
  Description of Artificial Sequence: Synthetic oligonucleotide
  Sense strand starting at position 1486 of SEQ ID NO: 1885876
uguccucuguaaucuuaca

SEQ ID NO: 2374323 - RNA, 19 nt, Artificial Sequence
  Description of Artificial Sequence: Synthetic oligonucleotide
  Antisense strand to SEQ ID NO: 2374322
uguaagauuacagaggaca

SEQ ID NO: 2374324 - RNA, 19 nt, Artificial Sequence
  Description of Artificial Sequence: Synthetic oligonucleotide
  Sense strand starting at position 1534 of SEQ ID NO: 1885876
ucaggauucucauuaguuc

SEQ ID NO: 2374325 - RNA, 19 nt, Artificial Sequence
  Description of Artificial Sequence: Synthetic oligonucleotide
  Antisense strand to SEQ ID NO: 2374324
gaacuaaugagaauccuga

SEQ ID NO: 2374326 - RNA, 19 nt, Artificial Sequence
  Description of Artificial Sequence: Synthetic oligonucleotide
  Sense strand starting at position 1543 of SEQ ID NO: 1885876
ucauuaguucuacaugguu

SEQ ID NO: 2374327 - RNA, 19 nt, Artificial Sequence
  Description of Artificial Sequence: Synthetic oligonucleotide
  Antisense strand to SEQ ID NO: 2374326
aaccauguagaacuaauga

SEQ ID NO: 2374328 - RNA, 19 nt, Artificial Sequence
  Description of Artificial Sequence: Synthetic oligonucleotide
  Sense strand starting at position 1584 of SEQ ID NO: 1885876
uuggcugugcuauggaaua

SEQ ID NO: 2374329 - RNA, 19 nt, Artificial Sequence
  Description of Artificial Sequence: Synthetic oligonucleotide
  Antisense strand to SEQ ID NO: 2374328
uauuccauagcacagccaa

SEQ ID NO: 2374330 - RNA, 19 nt, Artificial Sequence
  Description of Artificial Sequence: Synthetic oligonucleotide
  Sense strand starting at position 1612 of SEQ ID NO: 1885876
cuuggaaacacgugcuuau

SEQ ID NO: 2374331 - RNA, 19 nt, Artificial Sequence
  Description of Artificial Sequence: Synthetic oligonucleotide
  Antisense strand to SEQ ID NO: 2374330
auaagcacguguuuccaag

SEQ ID NO: 2374332 - RNA, 19 nt, Artificial Sequence
  Description of Artificial Sequence: Synthetic oligonucleotide
  Sense strand starting at position 1656 of SEQ ID NO: 1885876
agguaaagccuagguguca

SEQ ID NO: 2374333 - RNA, 19 nt, Artificial Sequence
  Description of Artificial Sequence: Synthetic oligonucleotide
  Antisense strand to SEQ ID NO: 2374332
ugacaccuaggcuuuaccu

SEQ ID NO: 2374334 - RNA, 19 nt, Artificial Sequence
  Description of Artificial Sequence: Synthetic oligonucleotide
  Sense strand starting at position 1657 of SEQ ID NO: 1885876
gguaaagccuaggugucau

SEQ ID NO: 2374335 - RNA, 19 nt, Artificial Sequence
  Description of Artificial Sequence: Synthetic oligonucleotide
  Antisense strand to SEQ ID NO: 2374334
augacaccuaggcuuuacc

SEQ ID NO: 2374336 - RNA, 19 nt, Artificial Sequence
  Description of Artificial Sequence: Synthetic oligonucleotide
  Sense strand starting at position 1700 of SEQ ID NO: 1885876
ugaugccaggcuugauaaa

SEQ ID NO: 2374337 - RNA, 19 nt, Artificial Sequence
  Description of Artificial Sequence: Synthetic oligonucleotide
  Antisense strand to SEQ ID NO: 2374336
uuuaucaagccuggcauca

SEQ ID NO: 2374338 - RNA, 19 nt, Artificial Sequence
  Description of Artificial Sequence: Synthetic oligonucleotide
  Sense strand starting at position 1729 of SEQ ID NO: 1885876
gagggcaugugauuacacu

SEQ ID NO: 2374339 - RNA, 19 nt, Artificial Sequence
  Description of Artificial Sequence: Synthetic oligonucleotide
  Antisense strand to SEQ ID NO: 2374338
aguguaaucacaugcccuc

SEQ ID NO: 2374340 - RNA, 19 nt, Artificial Sequence
  Description of Artificial Sequence: Synthetic oligonucleotide
  Sense strand starting at position 2370 of SEQ ID NO: 1885876
ugggccaucucuccuauua

SEQ ID NO: 2374341 - RNA, 19 nt, Artificial Sequence
  Description of Artificial Sequence: Synthetic oligonucleotide
  Antisense strand to SEQ ID NO: 2374340
uaauaggagagauggccca

SEQ ID NO: 2374342 - RNA, 19 nt, Artificial Sequence
  Description of Artificial Sequence: Synthetic oligonucleotide
  Sense strand starting at position 2380 of SEQ ID NO: 1885876
cuccuauuaugguuugaaa

SEQ ID NO: 2374343 - RNA, 19 nt, Artificial Sequence
  Description of Artificial Sequence: Synthetic oligonucleotide
  Antisense strand to SEQ ID NO: 2374342
uuucaaaccauaauaggag

SEQ ID NO: 2374344 - RNA, 19 nt, Artificial Sequence
  Description of Artificial Sequence: Synthetic oligonucleotide
  Sense strand starting at position 2382 of SEQ ID NO: 1885876
ccuauuaugguuugaaaug

SEQ ID NO: 2374345 - RNA, 19 nt, Artificial Sequence
  Description of Artificial Sequence: Synthetic oligonucleotide
  Antisense strand to SEQ ID NO: 2374344
cauuucaaaccauaauagg

SEQ ID NO: 2374346 - RNA, 19 nt, Artificial Sequence
  Description of Artificial Sequence: Synthetic oligonucleotide
  Sense strand starting at position 2394 of SEQ ID NO: 1885876
ugaaauguaccauaguguc

SEQ ID NO: 2374347 - RNA, 19 nt, Artificial Sequence
  Description of Artificial Sequence: Synthetic oligonucleotide
  Antisense strand to SEQ ID NO: 2374346
gacacuaugguacauuuca

SEQ ID NO: 2374348 - RNA, 19 nt, Artificial Sequence
  Description of Artificial Sequence: Synthetic oligonucleotide
  Sense strand starting at position 2400 of SEQ ID NO: 1885876
guaccauagugucuuguuu

SEQ ID NO: 2374349 - RNA, 19 nt, Artificial Sequence
  Description of Artificial Sequence: Synthetic oligonucleotide
  Antisense strand to SEQ ID NO: 2374348
aaacaagacacuaugguac

SEQ ID NO: 2374350 - RNA, 19 nt, Artificial Sequence
  Description of Artificial Sequence: Synthetic oligonucleotide
  Sense strand starting at position 2404 of SEQ ID NO: 1885876
cauagugucuuguuuggua

SEQ ID NO: 2374351 - RNA, 19 nt, Artificial Sequence
  Description of Artificial Sequence: Synthetic oligonucleotide
  Antisense strand to SEQ ID NO: 2374350
uaccaaacaagacacuaug

SEQ ID NO: 2374352 - RNA, 19 nt, Artificial Sequence
  Description of Artificial Sequence: Synthetic oligonucleotide
  Sense strand starting at position 2408 of SEQ ID NO: 1885876
gugucuuguuugguaauug

SEQ ID NO: 2374353 - RNA, 19 nt, Artificial Sequence
  Description of Artificial Sequence: Synthetic oligonucleotide
  Antisense strand to SEQ ID NO: 2374352
caauuaccaaacaagacac

SEQ ID NO: 2374354 - RNA, 19 nt, Artificial Sequence
  Description of Artificial Sequence: Synthetic oligonucleotide
  Sense strand starting at position 2412 of SEQ ID NO: 1885876
cuuguuugguaauuguaua

SEQ ID NO: 2374355 - RNA, 19 nt, Artificial Sequence
  Description of Artificial Sequence: Synthetic oligonucleotide
  Antisense strand to SEQ ID NO: 2374354
uauacaauuaccaaacaag

SEQ ID NO: 2374356 - RNA, 19 nt, Artificial Sequence
  Description of Artificial Sequence: Synthetic oligonucleotide
  Sense strand starting at position 2512 of SEQ ID NO: 1885876
gauaucuuugugugcuucu

SEQ ID NO: 2374357 - RNA, 19 nt, Artificial Sequence
  Description of Artificial Sequence: Synthetic oligonucleotide
  Antisense strand to SEQ ID NO: 2374356
agaagcacacaaagauauc

SEQ ID NO: 2374358 - RNA, 19 nt, Artificial Sequence
  Description of Artificial Sequence: Synthetic oligonucleotide
  Sense strand starting at position 2593 of SEQ ID NO: 1885876
caaggaugguguuugcuuu

SEQ ID NO: 2374359 - RNA, 19 nt, Artificial Sequence
  Description of Artificial Sequence: Synthetic oligonucleotide
  Antisense strand to SEQ ID NO: 2374358
aaagcaaacaccauccuug

SEQ ID NO: 2374360 - RNA, 19 nt, Artificial Sequence
  Description of Artificial Sequence: Synthetic oligonucleotide
  Sense strand starting at position 2717 of SEQ ID NO: 1885876
ggcucuuugugguugaauc

SEQ ID NO: 2374361 - RNA, 19 nt, Artificial Sequence
  Description of Artificial Sequence: Synthetic oligonucleotide
  Antisense strand to SEQ ID NO: 2374360
gauucaaccacaaagagcc

SEQ ID NO: 2374362 - RNA, 19 nt, Artificial Sequence
  Description of Artificial Sequence: Synthetic oligonucleotide
  Sense strand starting at position 2724 of SEQ ID NO: 1885876
ugugguugaaucugugagu

SEQ ID NO: 2374363 - RNA, 19 nt, Artificial Sequence
  Description of Artificial Sequence: Synthetic oligonucleotide
  Antisense strand to SEQ ID NO: 2374362
acucacagauucaaccaca

SEQ ID NO: 2374364 - RNA, 19 nt, Artificial Sequence
  Description of Artificial Sequence: Synthetic oligonucleotide
  Sense strand starting at position 2725 of SEQ ID NO: 1885876
gugguugaaucugugaguu

SEQ ID NO: 2374365 - RNA, 19 nt, Artificial Sequence
  Description of Artificial Sequence: Synthetic oligonucleotide
  Antisense strand to SEQ ID NO: 2374364
aacucacagauucaaccac

SEQ ID NO: 2374366 - RNA, 19 nt, Artificial Sequence
  Description of Artificial Sequence: Synthetic oligonucleotide
  Sense strand starting at position 2735 of SEQ ID NO: 1885876
cugugaguuuccuuuccuu

SEQ ID NO: 2374367 - RNA, 19 nt, Artificial Sequence
  Description of Artificial Sequence: Synthetic oligonucleotide
  Antisense strand to SEQ ID NO: 2374366
aaggaaaggaaacucacag

SEQ ID NO: 2374368 - RNA, 19 nt, Artificial Sequence
  Description of Artificial Sequence: Synthetic oligonucleotide
  Sense strand starting at position 2776 of SEQ ID NO: 1885876
gcuaaugaauuccuuguuu

SEQ ID NO: 2374369 - RNA, 19 nt, Artificial Sequence
  Description of Artificial Sequence: Synthetic oligonucleotide
  Antisense strand to SEQ ID NO: 2374368
aaacaaggaauucauuagc

SEQ ID NO: 2374370 - RNA, 19 nt, Artificial Sequence
  Description of Artificial Sequence: Synthetic oligonucleotide
  Sense strand starting at position 2807 of SEQ ID NO: 1885876
caggguuaucucugcuucu

SEQ ID NO: 2374371 - RNA, 19 nt, Artificial Sequence
  Description of Artificial Sequence: Synthetic oligonucleotide
  Antisense strand to SEQ ID NO: 2374370
agaagcagagauaacccug

SEQ ID NO: 2374372 - RNA, 19 nt, Artificial Sequence
  Description of Artificial Sequence: Synthetic oligonucleotide
  Sense strand starting at position 2944 of SEQ ID NO: 1885876
acuugucagguuggcaaau

SEQ ID NO: 2374373 - RNA, 19 nt, Artificial Sequence
  Description of Artificial Sequence: Synthetic oligonucleotide
  Antisense strand to SEQ ID NO: 2374372
auuugccaaccugacaagu

SEQ ID NO: 2374374 - RNA, 19 nt, Artificial Sequence
  Description of Artificial Sequence: Synthetic oligonucleotide
  Sense strand starting at position 3296 of SEQ ID NO: 1885876
uuucgagcccauugcuuaa

SEQ ID NO: 2374375 - RNA, 19 nt, Artificial Sequence
  Description of Artificial Sequence: Synthetic oligonucleotide
  Antisense strand to SEQ ID NO: 2374374
uuaagcaaugggcucgaaa

SEQ ID NO: 2374376 - RNA, 19 nt, Artificial Sequence
  Description of Artificial Sequence: Synthetic oligonucleotide
  Sense strand starting at position 3895 of SEQ ID NO: 1885876
cugaacccucauggugaau

SEQ ID NO: 2374377 - RNA, 19 nt, Artificial Sequence
  Description of Artificial Sequence: Synthetic oligonucleotide
  Antisense strand to SEQ ID NO: 2374376
auucaccaugaggguucag

SEQ ID NO: 2374378 - RNA, 19 nt, Artificial Sequence
  Description of Artificial Sequence: Synthetic oligonucleotide
  Sense strand starting at position 128 of SEQ ID NO: 1885877
cacugcuuccacgauggaa

SEQ ID NO: 2374379 - RNA, 19 nt, Artificial Sequence
  Description of Artificial Sequence: Synthetic oligonucleotide
  Antisense strand to SEQ ID NO: 2374378
uuccaucguggaagcagug

SEQ ID NO: 2374380 - RNA, 19 nt, Artificial Sequence
  Description of Artificial Sequence: Synthetic oligonucleotide
  Sense strand starting at position 132 of SEQ ID NO: 1885877
gcuuccacgauggaaagau

SEQ ID NO: 2374381 - RNA, 19 nt, Artificial Sequence
  Description of Artificial Sequence: Synthetic oligonucleotide
  Antisense strand to SEQ ID NO: 2374380
aucuuuccaucguggaagc

SEQ ID NO: 2374382 - RNA, 19 nt, Artificial Sequence
  Description of Artificial Sequence: Synthetic oligonucleotide
  Sense strand starting at position 452 of SEQ ID NO: 1885877
gucuucugauucccacgua

SEQ ID NO: 2374383 - RNA, 19 nt, Artificial Sequence
  Description of Artificial Sequence: Synthetic oligonucleotide
  Antisense strand to SEQ ID NO: 2374382
uacgugggaaucagaagac

SEQ ID NO: 2374384 - RNA, 19 nt, Artificial Sequence
  Description of Artificial Sequence: Synthetic oligonucleotide
  Sense strand starting at position 502 of SEQ ID NO: 1885877
gagaauccucuaggaaguu

SEQ ID NO: 2374385 - RNA, 19 nt, Artificial Sequence
  Description of Artificial Sequence: Synthetic oligonucleotide
  Antisense strand to SEQ ID NO: 2374384
aacuuccuagaggauucuc

SEQ ID NO: 2374386 - RNA, 19 nt, Artificial Sequence
  Description of Artificial Sequence: Synthetic oligonucleotide
  Sense strand starting at position 618 of SEQ ID NO: 1885877
agcguauggcguucugagu

SEQ ID NO: 2374387 - RNA, 19 nt, Artificial Sequence
  Description of Artificial Sequence: Synthetic oligonucleotide
  Antisense strand to SEQ ID NO: 2374386
acucagaacgccauacgcu

SEQ ID NO: 2374388 - RNA, 19 nt, Artificial Sequence
  Description of Artificial Sequence: Synthetic oligonucleotide
  Sense strand starting at position 619 of SEQ ID NO: 1885877
gcguauggcguucugagua

SEQ ID NO: 2374389 - RNA, 19 nt, Artificial Sequence
  Description of Artificial Sequence: Synthetic oligonucleotide
  Antisense strand to SEQ ID NO: 2374388
uacucagaacgccauacgc

SEQ ID NO: 2374390 - RNA, 19 nt, Artificial Sequence
  Description of Artificial Sequence: Synthetic oligonucleotide
  Sense strand starting at position 991 of SEQ ID NO: 1885877
ucagccaucuccgucaaau

SEQ ID NO: 2374391 - RNA, 19 nt, Artificial Sequence
  Description of Artificial Sequence: Synthetic oligonucleotide
  Antisense strand to SEQ ID NO: 2374390
auuugacggagauggcuga

SEQ ID NO: 2374392 - RNA, 19 nt, Artificial Sequence
  Description of Artificial Sequence: Synthetic oligonucleotide
  Sense strand starting at position 993 of SEQ ID NO: 1885877
agccaucuccgucaaauga

SEQ ID NO: 2374393 - RNA, 19 nt, Artificial Sequence
  Description of Artificial Sequence: Synthetic oligonucleotide
  Antisense strand to SEQ ID NO: 2374392
ucauuugacggagauggcu

SEQ ID NO: 2374394 - RNA, 19 nt, Artificial Sequence
  Description of Artificial Sequence: Synthetic oligonucleotide
  Sense strand starting at position 2401 of SEQ ID NO: 1885877
gguggaaguuaguugaaac

SEQ ID NO: 2374395 - RNA, 19 nt, Artificial Sequence
  Description of Artificial Sequence: Synthetic oligonucleotide
  Antisense strand to SEQ ID NO: 2374394
guuucaacuaacuuccacc

SEQ ID NO: 2374396 - RNA, 19 nt, Artificial Sequence
  Description of Artificial Sequence: Synthetic oligonucleotide
  Sense strand starting at position 2402 of SEQ ID NO: 1885877
guggaaguuaguugaaaca

SEQ ID NO: 2374397 - RNA, 19 nt, Artificial Sequence
  Description of Artificial Sequence: Synthetic oligonucleotide
  Antisense strand to SEQ ID NO: 2374396
uguuucaacuaacuuccac

SEQ ID NO: 2374398 - RNA, 19 nt, Artificial Sequence
  Description of Artificial Sequence: Synthetic oligonucleotide
  Sense strand starting at position 2417 of SEQ ID NO: 1885877
aacaauauuggcuaugagu

SEQ ID NO: 2374399 - RNA, 19 nt, Artificial Sequence
  Description of Artificial Sequence: Synthetic oligonucleotide
  Antisense strand to SEQ ID NO: 2374398
acucauagccaauauuguu

SEQ ID NO: 2374400 - RNA, 19 nt, Artificial Sequence
  Description of Artificial Sequence: Synthetic oligonucleotide
  Sense strand starting at position 2419 of SEQ ID NO: 1885877
caauauuggcuaugaguug

SEQ ID NO: 2374401 - RNA, 19 nt, Artificial Sequence
  Description of Artificial Sequence: Synthetic oligonucleotide
  Antisense strand to SEQ ID NO: 2374400
caacucauagccaauauug

SEQ ID NO: 2374402 - RNA, 19 nt, Artificial Sequence
  Description of Artificial Sequence: Synthetic oligonucleotide
  Sense strand starting at position 2424 of SEQ ID NO: 1885877
uuggcuaugaguugauaau

SEQ ID NO: 2374403 - RNA, 19 nt, Artificial Sequence
  Description of Artificial Sequence: Synthetic oligonucleotide
  Antisense strand to SEQ ID NO: 2374402
auuaucaacucauagccaa

SEQ ID NO: 2374404 - RNA, 19 nt, Artificial Sequence
  Description of Artificial Sequence: Synthetic oligonucleotide
  Sense strand starting at position 2425 of SEQ ID NO: 1885877
uggcuaugaguugauaauu

SEQ ID NO: 2374405 - RNA, 19 nt, Artificial Sequence
  Description of Artificial Sequence: Synthetic oligonucleotide
  Antisense strand to SEQ ID NO: 2374404
aauuaucaacucauagcca

SEQ ID NO: 2374406 - RNA, 19 nt, Artificial Sequence
  Description of Artificial Sequence: Synthetic oligonucleotide
  Sense strand starting at position 2430 of SEQ ID NO: 1885877
augaguugauaauugucga

SEQ ID NO: 2374407 - RNA, 19 nt, Artificial Sequence
  Description of Artificial Sequence: Synthetic oligonucleotide
  Antisense strand to SEQ ID NO: 2374406
ucgacaauuaucaacucau

SEQ ID NO: 2374408 - RNA, 19 nt, Artificial Sequence
  Description of Artificial Sequence: Synthetic oligonucleotide
  Sense strand starting at position 2436 of SEQ ID NO: 1885877
ugauaauugucgaggcagg

SEQ ID NO: 2374409 - RNA, 19 nt, Artificial Sequence
  Description of Artificial Sequence: Synthetic oligonucleotide
  Antisense strand to SEQ ID NO: 2374408
ccugccucgacaauuauca

SEQ ID NO: 2374410 - RNA, 19 nt, Artificial Sequence
  Description of Artificial Sequence: Synthetic oligonucleotide
  Sense strand starting at position 2437 of SEQ ID NO: 1885877
gauaauugucgaggcagga

SEQ ID NO: 2374411 - RNA, 19 nt, Artificial Sequence
  Description of Artificial Sequence: Synthetic oligonucleotide
  Antisense strand to SEQ ID NO: 2374410
uccugccucgacaauuauc

SEQ ID NO: 2374412 - RNA, 19 nt, Artificial Sequence
  Description of Artificial Sequence: Synthetic oligonucleotide
  Sense strand starting at position 2464 of SEQ ID NO: 1885877
ccuggagguuuguuauacu

SEQ ID NO: 2374413 - RNA, 19 nt, Artificial Sequence
  Description of Artificial Sequence: Synthetic oligonucleotide
  Antisense strand to SEQ ID NO: 2374412
aguauaacaaaccuccagg

SEQ ID NO: 2374414 - RNA, 19 nt, Artificial Sequence
  Description of Artificial Sequence: Synthetic oligonucleotide
  Sense strand starting at position 2473 of SEQ ID NO: 1885877
uuguuauacuguucucuua

SEQ ID NO: 2374415 - RNA, 19 nt, Artificial Sequence
  Description of Artificial Sequence: Synthetic oligonucleotide
  Antisense strand to SEQ ID NO: 2374414
uaagagaacaguauaacaa

SEQ ID NO: 2374416 - RNA, 19 nt, Artificial Sequence
  Description of Artificial Sequence: Synthetic oligonucleotide
  Sense strand starting at position 2475 of SEQ ID NO: 1885877
guuauacuguucucuuaac

SEQ ID NO: 2374417 - RNA, 19 nt, Artificial Sequence
  Description of Artificial Sequence: Synthetic oligonucleotide
  Antisense strand to SEQ ID NO: 2374416
guuaagagaacaguauaac

SEQ ID NO: 2374418 - RNA, 19 nt, Artificial Sequence
  Description of Artificial Sequence: Synthetic oligonucleotide
  Sense strand starting at position 2495 of SEQ ID NO: 1885877
uuggaauacguuuggauug

SEQ ID NO: 2374419 - RNA, 19 nt, Artificial Sequence
  Description of Artificial Sequence: Synthetic oligonucleotide
  Antisense strand to SEQ ID NO: 2374418
caauccaaacguauuccaa

SEQ ID NO: 2374420 - RNA, 19 nt, Artificial Sequence
  Description of Artificial Sequence: Synthetic oligonucleotide
  Sense strand starting at position 2502 of SEQ ID NO: 1885877
acguuuggauuguuccuua

SEQ ID NO: 2374421 - RNA, 19 nt, Artificial Sequence
  Description of Artificial Sequence: Synthetic oligonucleotide
  Antisense strand to SEQ ID NO: 2374420
uaaggaacaauccaaacgu

SEQ ID NO: 2374422 - RNA, 19 nt, Artificial Sequence
  Description of Artificial Sequence: Synthetic oligonucleotide
  Sense strand starting at position 2505 of SEQ ID NO: 1885877
uuuggauuguuccuuaaug

SEQ ID NO: 2374423 - RNA, 19 nt, Artificial Sequence
  Description of Artificial Sequence: Synthetic oligonucleotide
  Antisense strand to SEQ ID NO: 2374422
cauuaaggaacaauccaaa

SEQ ID NO: 2374424 - RNA, 19 nt, Artificial Sequence
  Description of Artificial Sequence: Synthetic oligonucleotide
  Sense strand starting at position 2506 of SEQ ID NO: 1885877
uuggauuguuccuuaauga

SEQ ID NO: 2374425 - RNA, 19 nt, Artificial Sequence
  Description of Artificial Sequence: Synthetic oligonucleotide
  Antisense strand to SEQ ID NO: 2374424
ucauuaaggaacaauccaa

SEQ ID NO: 2374426 - RNA, 19 nt, Artificial Sequence
  Description of Artificial Sequence: Synthetic oligonucleotide
  Sense strand starting at position 2828 of SEQ ID NO: 1885877
ugcucuucugauggagcaa

SEQ ID NO: 2374427 - RNA, 19 nt, Artificial Sequence
  Description of Artificial Sequence: Synthetic oligonucleotide
  Antisense strand to SEQ ID NO: 2374426
uugcuccaucagaagagca

SEQ ID NO: 2374428 - RNA, 19 nt, Artificial Sequence
  Description of Artificial Sequence: Synthetic oligonucleotide
  Sense strand starting at position 2829 of SEQ ID NO: 1885877
gcucuucugauggagcaau

SEQ ID NO: 2374429 - RNA, 19 nt, Artificial Sequence
  Description of Artificial Sequence: Synthetic oligonucleotide
  Antisense strand to SEQ ID NO: 2374428
auugcuccaucagaagagc

SEQ ID NO: 2374430 - RNA, 19 nt, Artificial Sequence
  Description of Artificial Sequence: Synthetic oligonucleotide
  Sense strand starting at position 2842 of SEQ ID NO: 1885877
agcaaucugagagggcaau

SEQ ID NO: 2374431 - RNA, 19 nt, Artificial Sequence
  Description of Artificial Sequence: Synthetic oligonucleotide
  Antisense strand to SEQ ID NO: 2374430
auugcccucucagauugcu

SEQ ID NO: 2374432 - RNA, 19 nt, Artificial Sequence
  Description of Artificial Sequence: Synthetic oligonucleotide
  Sense strand starting at position 3005 of SEQ ID NO: 1885877
gauguuggcuucuuugaca

SEQ ID NO: 2374433 - RNA, 19 nt, Artificial Sequence
  Description of Artificial Sequence: Synthetic oligonucleotide
  Antisense strand to SEQ ID NO: 2374432
ugucaaagaagccaacauc

SEQ ID NO: 2374434 - RNA, 19 nt, Artificial Sequence
  Description of Artificial Sequence: Synthetic oligonucleotide
  Sense strand starting at position 3037 of SEQ ID NO: 1885877
ggaggaaguucugucauaa

SEQ ID NO: 2374435 - RNA, 19 nt, Artificial Sequence
  Description of Artificial Sequence: Synthetic oligonucleotide
  Antisense strand to SEQ ID NO: 2374434
uuaugacagaacuuccucc

SEQ ID NO: 2374436 - RNA, 19 nt, Artificial Sequence
  Description of Artificial Sequence: Synthetic oligonucleotide
  Sense strand starting at position 3078 of SEQ ID NO: 1885877
aauggagagucaccuuuau

SEQ ID NO: 2374437 - RNA, 19 nt, Artificial Sequence
  Description of Artificial Sequence: Synthetic oligonucleotide
  Antisense strand to SEQ ID NO: 2374436
auaaaggugacucuccauu

SEQ ID NO: 2374438 - RNA, 19 nt, Artificial Sequence
  Description of Artificial Sequence: Synthetic oligonucleotide
  Sense strand starting at position 3105 of SEQ ID NO: 1885877
gaaugugcuguuuacccau

SEQ ID NO: 2374439 - RNA, 19 nt, Artificial Sequence
  Description of Artificial Sequence: Synthetic oligonucleotide
  Antisense strand to SEQ ID NO: 2374438
auggguaaacagcacauuc

SEQ ID NO: 2374440 - RNA, 19 nt, Artificial Sequence
  Description of Artificial Sequence: Synthetic oligonucleotide
  Sense strand starting at position 3108 of SEQ ID NO: 1885877
ugugcuguuuacccauauu

SEQ ID NO: 2374441 - RNA, 19 nt, Artificial Sequence
  Description of Artificial Sequence: Synthetic oligonucleotide
  Antisense strand to SEQ ID NO: 2374440
aauauggguaaacagcaca

SEQ ID NO: 2374442 - RNA, 19 nt, Artificial Sequence
  Description of Artificial Sequence: Synthetic oligonucleotide
  Sense strand starting at position 3140 of SEQ ID NO: 1885877
aggagacaguuuguggaau

SEQ ID NO: 2374443 - RNA, 19 nt, Artificial Sequence
  Description of Artificial Sequence: Synthetic oligonucleotide
  Antisense strand to SEQ ID NO: 2374442
auuccacaaacugucuccu

SEQ ID NO: 2374444 - RNA, 19 nt, Artificial Sequence
  Description of Artificial Sequence: Synthetic oligonucleotide
  Sense strand starting at position 3208 of SEQ ID NO: 1885877
ucucaacucuuggcaaaug

SEQ ID NO: 2374445 - RNA, 19 nt, Artificial Sequence
  Description of Artificial Sequence: Synthetic oligonucleotide
  Antisense strand to SEQ ID NO: 2374444
cauuugccaagaguugaga

SEQ ID NO: 2374446 - RNA, 19 nt, Artificial Sequence
  Description of Artificial Sequence: Synthetic oligonucleotide
  Sense strand starting at position 3343 of SEQ ID NO: 1885877
gggugaugcagauguucua

SEQ ID NO: 2374447 - RNA, 19 nt, Artificial Sequence
  Description of Artificial Sequence: Synthetic oligonucleotide
  Antisense strand to SEQ ID NO: 2374446
uagaacaucugcaucaccc

SEQ ID NO: 2374448 - RNA, 19 nt, Artificial Sequence
  Description of Artificial Sequence: Synthetic oligonucleotide
  Sense strand starting at position 3386 of SEQ ID NO: 1885877
acgacaacucuuugaauug

SEQ ID NO: 2374449 - RNA, 19 nt, Artificial Sequence
  Description of Artificial Sequence: Synthetic oligonucleotide
  Antisense strand to SEQ ID NO: 2374448
caauucaaagaguugucgu

SEQ ID NO: 2374450 - RNA, 19 nt, Artificial Sequence
  Description of Artificial Sequence: Synthetic oligonucleotide
  Sense strand starting at position 3462 of SEQ ID NO: 1885877
uaaagaaagucucaauggu

SEQ ID NO: 2374451 - RNA, 19 nt, Artificial Sequence
  Description of Artificial Sequence: Synthetic oligonucleotide
  Antisense strand to SEQ ID NO: 2374450
accauugagacuuucuuua

SEQ ID NO: 2374452 - RNA, 19 nt, Artificial Sequence
  Description of Artificial Sequence: Synthetic oligonucleotide
  Sense strand starting at position 3468 of SEQ ID NO: 1885877
aagucucaaugguaagaaa

SEQ ID NO: 2374453 - RNA, 19 nt, Artificial Sequence
  Description of Artificial Sequence: Synthetic oligonucleotide
  Antisense strand to SEQ ID NO: 2374452
uuucuuaccauugagacuu

SEQ ID NO: 2374454 - RNA, 19 nt, Artificial Sequence
  Description of Artificial Sequence: Synthetic oligonucleotide
  Sense strand starting at position 3572 of SEQ ID NO: 1885877
cguggaagauguucaaauc

SEQ ID NO: 2374455 - RNA, 19 nt, Artificial Sequence
  Description of Artificial Sequence: Synthetic oligonucleotide
  Antisense strand to SEQ ID NO: 2374454
gauuugaacaucuuccacg

SEQ ID NO: 2374456 - RNA, 19 nt, Artificial Sequence
  Description of Artificial Sequence: Synthetic oligonucleotide
  Sense strand starting at position 3625 of SEQ ID NO: 1885877
guggaauccaguugcugaa

SEQ ID NO: 2374457 - RNA, 19 nt, Artificial Sequence
  Description of Artificial Sequence: Synthetic oligonucleotide
  Antisense strand to SEQ ID NO: 2374456
uucagcaacuggauuccac

SEQ ID NO: 2374458 - RNA, 19 nt, Artificial Sequence
  Description of Artificial Sequence: Synthetic oligonucleotide
  Sense strand starting at position 7 of SEQ ID NO: 1885878
aguugaucacaaugacuga

SEQ ID NO: 2374459 - RNA, 19 nt, Artificial Sequence
  Description of Artificial Sequence: Synthetic oligonucleotide
  Antisense strand to SEQ ID NO: 2374458
ucagucauugugaucaacu

SEQ ID NO: 2374460 - RNA, 19 nt, Artificial Sequence
  Description of Artificial Sequence: Synthetic oligonucleotide
  Sense strand starting at position 56 of SEQ ID NO: 1885878
ggcucaagaugcuuaagaa

SEQ ID NO: 2374461 - RNA, 19 nt, Artificial Sequence
  Description of Artificial Sequence: Synthetic oligonucleotide
  Antisense strand to SEQ ID NO: 2374460
uucuuaagcaucuugagcc

SEQ ID NO: 2374462 - RNA, 19 nt, Artificial Sequence
  Description of Artificial Sequence: Synthetic oligonucleotide
  Sense strand starting at position 57 of SEQ ID NO: 1885878
gcucaagaugcuuaagaaa

SEQ ID NO: 2374463 - RNA, 19 nt, Artificial Sequence
  Description of Artificial Sequence: Synthetic oligonucleotide
  Antisense strand to SEQ ID NO: 2374462
uuucuuaagcaucuugagc

SEQ ID NO: 2374464 - RNA, 19 nt, Artificial Sequence
  Description of Artificial Sequence: Synthetic oligonucleotide
  Sense strand starting at position 133 of SEQ ID NO: 1885878
aguacaaauccugagcucu

SEQ ID NO: 2374465 - RNA, 19 nt, Artificial Sequence
  Description of Artificial Sequence: Synthetic oligonucleotide
  Antisense strand to SEQ ID NO: 2374464
agagcucaggauuuguacu

SEQ ID NO: 2374466 - RNA, 19 nt, Artificial Sequence
  Description of Artificial Sequence: Synthetic oligonucleotide
  Sense strand starting at position 141 of SEQ ID NO: 1885878
uccugagcucuuuaaagca

SEQ ID NO: 2374467 - RNA, 19 nt, Artificial Sequence
  Description of Artificial Sequence: Synthetic oligonucleotide
  Antisense strand to SEQ ID NO: 2374466
ugcuuuaaagagcucagga

SEQ ID NO: 2374468 - RNA, 19 nt, Artificial Sequence
  Description of Artificial Sequence: Synthetic oligonucleotide
  Sense strand starting at position 289 of SEQ ID NO: 1885878
caugauucugucuguagga

SEQ ID NO: 2374469 - RNA, 19 nt, Artificial Sequence
  Description of Artificial Sequence: Synthetic oligonucleotide
  Antisense strand to SEQ ID NO: 2374468
uccuacagacagaaucaug

SEQ ID NO: 2374470 - RNA, 19 nt, Artificial Sequence
  Description of Artificial Sequence: Synthetic oligonucleotide
  Sense strand starting at position 325 of SEQ ID NO: 1885878
gcgaguguagcguuggaaa

SEQ ID NO: 2374471 - RNA, 19 nt, Artificial Sequence
  Description of Artificial Sequence: Synthetic oligonucleotide
  Antisense strand to SEQ ID NO: 2374470
uuuccaacgcuacacucgc

SEQ ID NO: 2374472 - RNA, 19 nt, Artificial Sequence
  Description of Artificial Sequence: Synthetic oligonucleotide
  Sense strand starting at position 408 of SEQ ID NO: 1885878
gcggguaacuguuuauuug

SEQ ID NO: 2374473 - RNA, 19 nt, Artificial Sequence
  Description of Artificial Sequence: Synthetic oligonucleotide
  Antisense strand to SEQ ID NO: 2374472
caaauaaacaguuacccgc

SEQ ID NO: 2374474 - RNA, 19 nt, Artificial Sequence
  Description of Artificial Sequence: Synthetic oligonucleotide
  Sense strand starting at position 409 of SEQ ID NO: 1885878
cggguaacuguuuauuugu

SEQ ID NO: 2374475 - RNA, 19 nt, Artificial Sequence
  Description of Artificial Sequence: Synthetic oligonucleotide
  Antisense strand to SEQ ID NO: 2374474
acaaauaaacaguuacccg

SEQ ID NO: 2374476 - RNA, 19 nt, Artificial Sequence
  Description of Artificial Sequence: Synthetic oligonucleotide
  Sense strand starting at position 590 of SEQ ID NO: 1885878
cagggugcuccacaauaga

SEQ ID NO: 2374477 - RNA, 19 nt, Artificial Sequence
  Description of Artificial Sequence: Synthetic oligonucleotide
  Antisense strand to SEQ ID NO: 2374476
ucuauuguggagcacccug

SEQ ID NO: 2374478 - RNA, 19 nt, Artificial Sequence
  Description of Artificial Sequence: Synthetic oligonucleotide
  Sense strand starting at position 609 of SEQ ID NO: 1885878
auccgauacuccguauaga

SEQ ID NO: 2374479 - RNA, 19 nt, Artificial Sequence
  Description of Artificial Sequence: Synthetic oligonucleotide
  Antisense strand to SEQ ID NO: 2374478
ucuauacggaguaucggau

SEQ ID NO: 2374480 - RNA, 19 nt, Artificial Sequence
  Description of Artificial Sequence: Synthetic oligonucleotide
  Sense strand starting at position 610 of SEQ ID NO: 1885878
uccgauacuccguauagac

SEQ ID NO: 2374481 - RNA, 19 nt, Artificial Sequence
  Description of Artificial Sequence: Synthetic oligonucleotide
  Antisense strand to SEQ ID NO: 2374480
gucuauacggaguaucgga

SEQ ID NO: 2374482 - RNA, 19 nt, Artificial Sequence
  Description of Artificial Sequence: Synthetic oligonucleotide
  Sense strand starting at position 612 of SEQ ID NO: 1885878
cgauacuccguauagacaa

SEQ ID NO: 2374483 - RNA, 19 nt, Artificial Sequence
  Description of Artificial Sequence: Synthetic oligonucleotide
  Antisense strand to SEQ ID NO: 2374482
uugucuauacggaguaucg

SEQ ID NO: 2374484 - RNA, 19 nt, Artificial Sequence
  Description of Artificial Sequence: Synthetic oligonucleotide
  Sense strand starting at position 656 of SEQ ID NO: 1885878
uaaacacuugugugaagua

SEQ ID NO: 2374485 - RNA, 19 nt, Artificial Sequence
  Description of Artificial Sequence: Synthetic oligonucleotide
  Antisense strand to SEQ ID NO: 2374484
uacuucacacaaguguuua

SEQ ID NO: 2374486 - RNA, 19 nt, Artificial Sequence
  Description of Artificial Sequence: Synthetic oligonucleotide
  Sense strand starting at position 665 of SEQ ID NO: 1885878
gugugaaguauuuguauug

SEQ ID NO: 2374487 - RNA, 19 nt, Artificial Sequence
  Description of Artificial Sequence: Synthetic oligonucleotide
  Antisense strand to SEQ ID NO: 2374486
caauacaaauacuucacac

SEQ ID NO: 2374488 - RNA, 19 nt, Artificial Sequence
  Description of Artificial Sequence: Synthetic oligonucleotide
  Sense strand starting at position 666 of SEQ ID NO: 1885878
ugugaaguauuuguauugu

SEQ ID NO: 2374489 - RNA, 19 nt, Artificial Sequence
  Description of Artificial Sequence: Synthetic oligonucleotide
  Antisense strand to SEQ ID NO: 2374488
acaauacaaauacuucaca

SEQ ID NO: 2374490 - RNA, 19 nt, Artificial Sequence
  Description of Artificial Sequence: Synthetic oligonucleotide
  Sense strand starting at position 826 of SEQ ID NO: 1885878
gggacagacacauguauuc

SEQ ID NO: 2374491 - RNA, 19 nt, Artificial Sequence
  Description of Artificial Sequence: Synthetic oligonucleotide
  Antisense strand to SEQ ID NO: 2374490
gaauacaugugucuguccc

SEQ ID NO: 2374492 - RNA, 19 nt, Artificial Sequence
  Description of Artificial Sequence: Synthetic oligonucleotide
  Sense strand starting at position 962 of SEQ ID NO: 1885878
gcccucugccuggauagau

SEQ ID NO: 2374493 - RNA, 19 nt, Artificial Sequence
  Description of Artificial Sequence: Synthetic oligonucleotide
  Antisense strand to SEQ ID NO: 2374492
aucuauccaggcagagggc

SEQ ID NO: 2374494 - RNA, 19 nt, Artificial Sequence
  Description of Artificial Sequence: Synthetic oligonucleotide
  Sense strand starting at position 1048 of SEQ ID NO: 1885878
ucuagaaguggcuaaauug

SEQ ID NO: 2374495 - RNA, 19 nt, Artificial Sequence
  Description of Artificial Sequence: Synthetic oligonucleotide
  Antisense strand to SEQ ID NO: 2374494
caauuuagccacuucuaga

SEQ ID NO: 2374496 - RNA, 19 nt, Artificial Sequence
  Description of Artificial Sequence: Synthetic oligonucleotide
  Sense strand starting at position 1152 of SEQ ID NO: 1885878
caggaugcuugaguuucua

SEQ ID NO: 2374497 - RNA, 19 nt, Artificial Sequence
  Description of Artificial Sequence: Synthetic oligonucleotide
  Antisense strand to SEQ ID NO: 2374496
uagaaacucaagcauccug

SEQ ID NO: 2374498 - RNA, 19 nt, Artificial Sequence
  Description of Artificial Sequence: Synthetic oligonucleotide
  Sense strand starting at position 1160 of SEQ ID NO: 1885878
uugaguuucuaaccugaga

SEQ ID NO: 2374499 - RNA, 19 nt, Artificial Sequence
  Description of Artificial Sequence: Synthetic oligonucleotide
  Antisense strand to SEQ ID NO: 2374498
ucucagguuagaaacucaa

SEQ ID NO: 2374500 - RNA, 19 nt, Artificial Sequence
  Description of Artificial Sequence: Synthetic oligonucleotide
  Sense strand starting at position 2335 of SEQ ID NO: 1885878
gggagaaagccgggacaau

SEQ ID NO: 2374501 - RNA, 19 nt, Artificial Sequence
  Description of Artificial Sequence: Synthetic oligonucleotide
  Antisense strand to SEQ ID NO: 2374500
auugucccggcuuucuccc

SEQ ID NO: 2374502 - RNA, 19 nt, Artificial Sequence
  Description of Artificial Sequence: Synthetic oligonucleotide
  Sense strand starting at position 2579 of SEQ ID NO: 1885878
gagagaugccgccaaugug

SEQ ID NO: 2374503 - RNA, 19 nt, Artificial Sequence
  Description of Artificial Sequence: Synthetic oligonucleotide
  Antisense strand to SEQ ID NO: 2374502
cacauuggcggcaucucuc

SEQ ID NO: 2374504 - RNA, 19 nt, Artificial Sequence
  Description of Artificial Sequence: Synthetic oligonucleotide
  Sense strand starting at position 2603 of SEQ ID NO: 1885878
ugggauucccagugguuac

SEQ ID NO: 2374505 - RNA, 19 nt, Artificial Sequence
  Description of Artificial Sequence: Synthetic oligonucleotide
  Antisense strand to SEQ ID NO: 2374504
guaaccacugggaauccca

SEQ ID NO: 2374506 - RNA, 19 nt, Artificial Sequence
  Description of Artificial Sequence: Synthetic oligonucleotide
  Sense strand starting at position 2678 of SEQ ID NO: 1885878
uccuaacucuuugcuggaa

SEQ ID NO: 2374507 - RNA, 19 nt, Artificial Sequence
  Description of Artificial Sequence: Synthetic oligonucleotide
  Antisense strand to SEQ ID NO: 2374506
uuccagcaaagaguuagga

SEQ ID NO: 2374508 - RNA, 19 nt, Artificial Sequence
  Description of Artificial Sequence: Synthetic oligonucleotide
  Sense strand starting at position 2681 of SEQ ID NO: 1885878
uaacucuuugcuggaagga

SEQ ID NO: 2374509 - RNA, 19 nt, Artificial Sequence
  Description of Artificial Sequence: Synthetic oligonucleotide
  Antisense strand to SEQ ID NO: 2374508
uccuuccagcaaagaguua

SEQ ID NO: 2374510 - RNA, 19 nt, Artificial Sequence
  Description of Artificial Sequence: Synthetic oligonucleotide
  Sense strand starting at position 2705 of SEQ ID NO: 1885878
agaacuugguguucuuauc

SEQ ID NO: 2374511 - RNA, 19 nt, Artificial Sequence
  Description of Artificial Sequence: Synthetic oligonucleotide
  Antisense strand to SEQ ID NO: 2374510
gauaagaacaccaaguucu

SEQ ID NO: 2374512 - RNA, 19 nt, Artificial Sequence
  Description of Artificial Sequence: Synthetic oligonucleotide
  Sense strand starting at position 2741 of SEQ ID NO: 1885878
gcgcauuggaaagaguaaa

SEQ ID NO: 2374513 - RNA, 19 nt, Artificial Sequence
  Description of Artificial Sequence: Synthetic oligonucleotide
  Antisense strand to SEQ ID NO: 2374512
uuuacucuuuccaaugcgc

SEQ ID NO: 2374514 - RNA, 19 nt, Artificial Sequence
  Description of Artificial Sequence: Synthetic oligonucleotide
  Sense strand starting at position 2791 of SEQ ID NO: 1885878
cggagaguucuugauguug

SEQ ID NO: 2374515 - RNA, 19 nt, Artificial Sequence
  Description of Artificial Sequence: Synthetic oligonucleotide
  Antisense strand to SEQ ID NO: 2374514
caacaucaagaacucuccg

SEQ ID NO: 2374516 - RNA, 19 nt, Artificial Sequence
  Description of Artificial Sequence: Synthetic oligonucleotide
  Sense strand starting at position 3096 of SEQ ID NO: 1885878
gugacugagcuugacugua

SEQ ID NO: 2374517 - RNA, 19 nt, Artificial Sequence
  Description of Artificial Sequence: Synthetic oligonucleotide
  Antisense strand to SEQ ID NO: 2374516
uacagucaagcucagucac

SEQ ID NO: 2374518 - RNA, 19 nt, Artificial Sequence
  Description of Artificial Sequence: Synthetic oligonucleotide
  Sense strand starting at position 3161 of SEQ ID NO: 1885878
agaauaacgcaguauauug

SEQ ID NO: 2374519 - RNA, 19 nt, Artificial Sequence
  Description of Artificial Sequence: Synthetic oligonucleotide
  Antisense strand to SEQ ID NO: 2374518
caauauacugcguuauucu

SEQ ID NO: 2374520 - RNA, 19 nt, Artificial Sequence
  Description of Artificial Sequence: Synthetic oligonucleotide
  Sense strand starting at position 3261 of SEQ ID NO: 1885878
gcgguaagagccuagaaga

SEQ ID NO: 2374521 - RNA, 19 nt, Artificial Sequence
  Description of Artificial Sequence: Synthetic oligonucleotide
  Antisense strand to SEQ ID NO: 2374520
ucuucuaggcucuuaccgc

SEQ ID NO: 2374522 - RNA, 19 nt, Artificial Sequence
  Description of Artificial Sequence: Synthetic oligonucleotide
  Sense strand starting at position 3293 of SEQ ID NO: 1885878
uuuggagagugguuaauag

SEQ ID NO: 2374523 - RNA, 19 nt, Artificial Sequence
  Description of Artificial Sequence: Synthetic oligonucleotide
  Antisense strand to SEQ ID NO: 2374522
cuauuaaccacucuccaaa

SEQ ID NO: 2374524 - RNA, 19 nt, Artificial Sequence
  Description of Artificial Sequence: Synthetic oligonucleotide
  Sense strand starting at position 3353 of SEQ ID NO: 1885878
gucauucugccaggagaaa

SEQ ID NO: 2374525 - RNA, 19 nt, Artificial Sequence
  Description of Artificial Sequence: Synthetic oligonucleotide
  Antisense strand to SEQ ID NO: 2374524
uuucuccuggcagaaugac

SEQ ID NO: 2374526 - RNA, 19 nt, Artificial Sequence
  Description of Artificial Sequence: Synthetic oligonucleotide
  Sense strand starting at position 3466 of SEQ ID NO: 1885878
agagcaggcacuugaugaa

SEQ ID NO: 2374527 - RNA, 19 nt, Artificial Sequence
  Description of Artificial Sequence: Synthetic oligonucleotide
  Antisense strand to SEQ ID NO: 2374526
uucaucaagugccugcucu

SEQ ID NO: 2374528 - RNA, 19 nt, Artificial Sequence
  Description of Artificial Sequence: Synthetic oligonucleotide
  Sense strand starting at position 3500 of SEQ ID NO: 1885878
ggauuaguuguugguaaag

SEQ ID NO: 2374529 - RNA, 19 nt, Artificial Sequence
  Description of Artificial Sequence: Synthetic oligonucleotide
  Antisense strand to SEQ ID NO: 2374528
cuuuaccaacaacuaaucc

SEQ ID NO: 2374530 - RNA, 19 nt, Artificial Sequence
  Description of Artificial Sequence: Synthetic oligonucleotide
  Sense strand starting at position 3505 of SEQ ID NO: 1885878
aguuguugguaaagggaga

SEQ ID NO: 2374531 - RNA, 19 nt, Artificial Sequence
  Description of Artificial Sequence: Synthetic oligonucleotide
  Antisense strand to SEQ ID NO: 2374530
ucucccuuuaccaacaacu

SEQ ID NO: 2374532 - RNA, 19 nt, Artificial Sequence
  Description of Artificial Sequence: Synthetic oligonucleotide
  Sense strand starting at position 3585 of SEQ ID NO: 1885878
aaagauucucaguggcaca

SEQ ID NO: 2374533 - RNA, 19 nt, Artificial Sequence
  Description of Artificial Sequence: Synthetic oligonucleotide
  Antisense strand to SEQ ID NO: 2374532
ugugccacugagaaucuuu

SEQ ID NO: 2374534 - RNA, 19 nt, Artificial Sequence
  Description of Artificial Sequence: Synthetic oligonucleotide
  Sense strand starting at position 3614 of SEQ ID NO: 1885878
uggucaugggacuguaaca

SEQ ID NO: 2374535 - RNA, 19 nt, Artificial Sequence
  Description of Artificial Sequence: Synthetic oligonucleotide
  Antisense strand to SEQ ID NO: 2374534
uguuacagucccaugacca

SEQ ID NO: 2374536 - RNA, 19 nt, Artificial Sequence
  Description of Artificial Sequence: Synthetic oligonucleotide
  Sense strand starting at position 3983 of SEQ ID NO: 1885878
ugaguuuggcuguauugac

SEQ ID NO: 2374537 - RNA, 19 nt, Artificial Sequence
  Description of Artificial Sequence: Synthetic oligonucleotide
  Antisense strand to SEQ ID NO: 2374536
gucaauacagccaaacuca

SEQ ID NO: 2374538 - RNA, 19 nt, Artificial Sequence
  Description of Artificial Sequence: Synthetic oligonucleotide
  Sense strand starting at position 78 of SEQ ID NO: 1885879
ggcugagaaucugcucgaa

SEQ ID NO: 2374539 - RNA, 19 nt, Artificial Sequence
  Description of Artificial Sequence: Synthetic oligonucleotide
  Antisense strand to SEQ ID NO: 2374538
uucgagcagauucucagcc

SEQ ID NO: 2374540 - RNA, 19 nt, Artificial Sequence
  Description of Artificial Sequence: Synthetic oligonucleotide
  Sense strand starting at position 80 of SEQ ID NO: 1885879
cugagaaucugcucgaagg

SEQ ID NO: 2374541 - RNA, 19 nt, Artificial Sequence
  Description of Artificial Sequence: Synthetic oligonucleotide
  Antisense strand to SEQ ID NO: 2374540
ccuucgagcagauucucag

SEQ ID NO: 2374542 - RNA, 19 nt, Artificial Sequence
  Description of Artificial Sequence: Synthetic oligonucleotide
  Sense strand starting at position 345 of SEQ ID NO: 1885879
agccuaggagucuauucuu

SEQ ID NO: 2374543 - RNA, 19 nt, Artificial Sequence
  Description of Artificial Sequence: Synthetic oligonucleotide
  Antisense strand to SEQ ID NO: 2374542
aagaauagacuccuaggcu

SEQ ID NO: 2374544 - RNA, 19 nt, Artificial Sequence
  Description of Artificial Sequence: Synthetic oligonucleotide
  Sense strand starting at position 348 of SEQ ID NO: 1885879
cuaggagucuauucuugca

SEQ ID NO: 2374545 - RNA, 19 nt, Artificial Sequence
  Description of Artificial Sequence: Synthetic oligonucleotide
  Antisense strand to SEQ ID NO: 2374544
ugcaagaauagacuccuag

SEQ ID NO: 2374546 - RNA, 19 nt, Artificial Sequence
  Description of Artificial Sequence: Synthetic oligonucleotide
  Sense strand starting at position 350 of SEQ ID NO: 1885879
aggagucuauucuugcaau

SEQ ID NO: 2374547 - RNA, 19 nt, Artificial Sequence
  Description of Artificial Sequence: Synthetic oligonucleotide
  Antisense strand to SEQ ID NO: 2374546
auugcaagaauagacuccu

SEQ ID NO: 2374548 - RNA, 19 nt, Artificial Sequence
  Description of Artificial Sequence: Synthetic oligonucleotide
  Sense strand starting at position 356 of SEQ ID NO: 1885879
cuauucuugcaaugaguau

SEQ ID NO: 2374549 - RNA, 19 nt, Artificial Sequence
  Description of Artificial Sequence: Synthetic oligonucleotide
  Antisense strand to SEQ ID NO: 2374548
auacucauugcaagaauag

SEQ ID NO: 2374550 - RNA, 19 nt, Artificial Sequence
  Description of Artificial Sequence: Synthetic oligonucleotide
  Sense strand starting at position 380 of SEQ ID NO: 1885879
gagcauuuacuaugugcuu

SEQ ID NO: 2374551 - RNA, 19 nt, Artificial Sequence
  Description of Artificial Sequence: Synthetic oligonucleotide
  Antisense strand to SEQ ID NO: 2374550
aagcacauaguaaaugcuc

SEQ ID NO: 2374552 - RNA, 19 nt, Artificial Sequence
  Description of Artificial Sequence: Synthetic oligonucleotide
  Sense strand starting at position 393 of SEQ ID NO: 1885879
gugcuuggcacugauucua

SEQ ID NO: 2374553 - RNA, 19 nt, Artificial Sequence
  Description of Artificial Sequence: Synthetic oligonucleotide
  Antisense strand to SEQ ID NO: 2374552
uagaaucagugccaagcac

SEQ ID NO: 2374554 - RNA, 19 nt, Artificial Sequence
  Description of Artificial Sequence: Synthetic oligonucleotide
  Sense strand starting at position 446 of SEQ ID NO: 1885879
gccagaaguuggcccuaaa

SEQ ID NO: 2374555 - RNA, 19 nt, Artificial Sequence
  Description of Artificial Sequence: Synthetic oligonucleotide
  Antisense strand to SEQ ID NO: 2374554
uuuagggccaacuucuggc

SEQ ID NO: 2374556 - RNA, 19 nt, Artificial Sequence
  Description of Artificial Sequence: Synthetic oligonucleotide
  Sense strand starting at position 833 of SEQ ID NO: 1885879
agggaucucuuacccucaa

SEQ ID NO: 2374557 - RNA, 19 nt, Artificial Sequence
  Description of Artificial Sequence: Synthetic oligonucleotide
  Antisense strand to SEQ ID NO: 2374556
uugaggguaagagaucccu

SEQ ID NO: 2374558 - RNA, 19 nt, Artificial Sequence
  Description of Artificial Sequence: Synthetic oligonucleotide
  Sense strand starting at position 834 of SEQ ID NO: 1885879
gggaucucuuacccucaaa

SEQ ID NO: 2374559 - RNA, 19 nt, Artificial Sequence
  Description of Artificial Sequence: Synthetic oligonucleotide
  Antisense strand to SEQ ID NO: 2374558
uuugaggguaagagauccc

SEQ ID NO: 2374560 - RNA, 19 nt, Artificial Sequence
  Description of Artificial Sequence: Synthetic oligonucleotide
  Sense strand starting at position 1123 of SEQ ID NO: 1885879
agcgauaacgguuacugua

SEQ ID NO: 2374561 - RNA, 19 nt, Artificial Sequence
  Description of Artificial Sequence: Synthetic oligonucleotide
  Antisense strand to SEQ ID NO: 2374560
uacaguaaccguuaucgcu

SEQ ID NO: 2374562 - RNA, 19 nt, Artificial Sequence
  Description of Artificial Sequence: Synthetic oligonucleotide
  Sense strand starting at position 1458 of SEQ ID NO: 1885879
cgaagcugucucuagagga

SEQ ID NO: 2374563 - RNA, 19 nt, Artificial Sequence
  Description of Artificial Sequence: Synthetic oligonucleotide
  Antisense strand to SEQ ID NO: 2374562
uccucuagagacagcuucg

SEQ ID NO: 2374564 - RNA, 19 nt, Artificial Sequence
  Description of Artificial Sequence: Synthetic oligonucleotide
  Sense strand starting at position 1620 of SEQ ID NO: 1885879
gacccugcucccgagaaga

SEQ ID NO: 2374565 - RNA, 19 nt, Artificial Sequence
  Description of Artificial Sequence: Synthetic oligonucleotide
  Antisense strand to SEQ ID NO: 2374564
ucuucucgggagcaggguc

SEQ ID NO: 2374566 - RNA, 19 nt, Artificial Sequence
  Description of Artificial Sequence: Synthetic oligonucleotide
  Sense strand starting at position 2184 of SEQ ID NO: 1885879
cugagaagucacuggagcu

SEQ ID NO: 2374567 - RNA, 19 nt, Artificial Sequence
  Description of Artificial Sequence: Synthetic oligonucleotide
  Antisense strand to SEQ ID NO: 2374566
agcuccagugacuucucag

SEQ ID NO: 2374568 - RNA, 19 nt, Artificial Sequence
  Description of Artificial Sequence: Synthetic oligonucleotide
  Sense strand starting at position 2185 of SEQ ID NO: 1885879
ugagaagucacuggagcua

SEQ ID NO: 2374569 - RNA, 19 nt, Artificial Sequence
  Description of Artificial Sequence: Synthetic oligonucleotide
  Antisense strand to SEQ ID NO: 2374568
uagcuccagugacuucuca

SEQ ID NO: 2374570 - RNA, 19 nt, Artificial Sequence
  Description of Artificial Sequence: Synthetic oligonucleotide
  Sense strand starting at position 2280 of SEQ ID NO: 1885879
agauguuaucaucaggcaa

SEQ ID NO: 2374571 - RNA, 19 nt, Artificial Sequence
  Description of Artificial Sequence: Synthetic oligonucleotide
  Antisense strand to SEQ ID NO: 2374570
uugccugaugauaacaucu

SEQ ID NO: 2374572 - RNA, 19 nt, Artificial Sequence
  Description of Artificial Sequence: Synthetic oligonucleotide
  Sense strand starting at position 2465 of SEQ ID NO: 1885879
ggaaauacguaaguccaaa

SEQ ID NO: 2374573 - RNA, 19 nt, Artificial Sequence
  Description of Artificial Sequence: Synthetic oligonucleotide
  Antisense strand to SEQ ID NO: 2374572
uuuggacuuacguauuucc

SEQ ID NO: 2374574 - RNA, 19 nt, Artificial Sequence
  Description of Artificial Sequence: Synthetic oligonucleotide
  Sense strand starting at position 2562 of SEQ ID NO: 1885879
ugcuguucucaucauucca

SEQ ID NO: 2374575 - RNA, 19 nt, Artificial Sequence
  Description of Artificial Sequence: Synthetic oligonucleotide
  Antisense strand to SEQ ID NO: 2374574
uggaaugaugagaacagca

SEQ ID NO: 2374576 - RNA, 19 nt, Artificial Sequence
  Description of Artificial Sequence: Synthetic oligonucleotide
  Sense strand starting at position 2655 of SEQ ID NO: 1885879
uaggauaauguuuggcaca

SEQ ID NO: 2374577 - RNA, 19 nt, Artificial Sequence
  Description of Artificial Sequence: Synthetic oligonucleotide
  Antisense strand to SEQ ID NO: 2374576
ugugccaaacauuauccua

SEQ ID NO: 2374578 - RNA, 19 nt, Artificial Sequence
  Description of Artificial Sequence: Synthetic oligonucleotide
  Sense strand starting at position 2657 of SEQ ID NO: 1885879
ggauaauguuuggcacaua

SEQ ID NO: 2374579 - RNA, 19 nt, Artificial Sequence
  Description of Artificial Sequence: Synthetic oligonucleotide
  Antisense strand to SEQ ID NO: 2374578
uaugugccaaacauuaucc

SEQ ID NO: 2374580 - RNA, 19 nt, Artificial Sequence
  Description of Artificial Sequence: Synthetic oligonucleotide
  Sense strand starting at position 2685 of SEQ ID NO: 1885879
caguaaauauuaucgaaug

SEQ ID NO: 2374581 - RNA, 19 nt, Artificial Sequence
  Description of Artificial Sequence: Synthetic oligonucleotide
  Antisense strand to SEQ ID NO: 2374580
cauucgauaauauuuacug

SEQ ID NO: 2374582 - RNA, 19 nt, Artificial Sequence
  Description of Artificial Sequence: Synthetic oligonucleotide
  Sense strand starting at position 2824 of SEQ ID NO: 1885879
acuugcugaucuuuguaaa

SEQ ID NO: 2374583 - RNA, 19 nt, Artificial Sequence
  Description of Artificial Sequence: Synthetic oligonucleotide
  Antisense strand to SEQ ID NO: 2374582
uuuacaaagaucagcaagu

SEQ ID NO: 2374584 - RNA, 19 nt, Artificial Sequence
  Description of Artificial Sequence: Synthetic oligonucleotide
  Sense strand starting at position 2825 of SEQ ID NO: 1885879
cuugcugaucuuuguaaag

SEQ ID NO: 2374585 - RNA, 19 nt, Artificial Sequence
  Description of Artificial Sequence: Synthetic oligonucleotide
  Antisense strand to SEQ ID NO: 2374584
cuuuacaaagaucagcaag

SEQ ID NO: 2374586 - RNA, 19 nt, Artificial Sequence
  Description of Artificial Sequence: Synthetic oligonucleotide
  Sense strand starting at position 2834 of SEQ ID NO: 1885879
cuuuguaaagucuaaaucu

SEQ ID NO: 2374587 - RNA, 19 nt, Artificial Sequence
  Description of Artificial Sequence: Synthetic oligonucleotide
  Antisense strand to SEQ ID NO: 2374586
agauuuagacuuuacaaag

SEQ ID NO: 2374588 - RNA, 19 nt, Artificial Sequence
  Description of Artificial Sequence: Synthetic oligonucleotide
  Sense strand starting at position 2843 of SEQ ID NO: 1885879
gucuaaaucugaguauguu

SEQ ID NO: 2374589 - RNA, 19 nt, Artificial Sequence
  Description of Artificial Sequence: Synthetic oligonucleotide
  Antisense strand to SEQ ID NO: 2374588
aacauacucagauuuagac

SEQ ID NO: 2374590 - RNA, 19 nt, Artificial Sequence
  Description of Artificial Sequence: Synthetic oligonucleotide
  Sense strand starting at position 2844 of SEQ ID NO: 1885879
ucuaaaucugaguauguua

SEQ ID NO: 2374591 - RNA, 19 nt, Artificial Sequence
  Description of Artificial Sequence: Synthetic oligonucleotide
  Antisense strand to SEQ ID NO: 2374590
uaacauacucagauuuaga

SEQ ID NO: 2374592 - RNA, 19 nt, Artificial Sequence
  Description of Artificial Sequence: Synthetic oligonucleotide
  Sense strand starting at position 2846 of SEQ ID NO: 1885879
uaaaucugaguauguuagu

SEQ ID NO: 2374593 - RNA, 19 nt, Artificial Sequence
  Description of Artificial Sequence: Synthetic oligonucleotide
  Antisense strand to SEQ ID NO: 2374592
acuaacauacucagauuua

SEQ ID NO: 2374594 - RNA, 19 nt, Artificial Sequence
  Description of Artificial Sequence: Synthetic oligonucleotide
  Sense strand starting at position 3026 of SEQ ID NO: 1885879
ucuacuuuacacuggaaga

SEQ ID NO: 2374595 - RNA, 19 nt, Artificial Sequence
  Description of Artificial Sequence: Synthetic oligonucleotide
  Antisense strand to SEQ ID NO: 2374594
ucuuccaguguaaaguaga

SEQ ID NO: 2374596 - RNA, 19 nt, Artificial Sequence
  Description of Artificial Sequence: Synthetic oligonucleotide
  Sense strand starting at position 3099 of SEQ ID NO: 1885879
gguacauuccaucauugua

SEQ ID NO: 2374597 - RNA, 19 nt, Artificial Sequence
  Description of Artificial Sequence: Synthetic oligonucleotide
  Antisense strand to SEQ ID NO: 2374596
uacaaugauggaauguacc

SEQ ID NO: 2374598 - RNA, 19 nt, Artificial Sequence
  Description of Artificial Sequence: Synthetic oligonucleotide
  Sense strand starting at position 3262 of SEQ ID NO: 1885879
uuagccagacaugguuaaa

SEQ ID NO: 2374599 - RNA, 19 nt, Artificial Sequence
  Description of Artificial Sequence: Synthetic oligonucleotide
  Antisense strand to SEQ ID NO: 2374598
uuuaaccaugucuggcuaa

SEQ ID NO: 2374600 - RNA, 19 nt, Artificial Sequence
  Description of Artificial Sequence: Synthetic oligonucleotide
  Sense strand starting at position 3265 of SEQ ID NO: 1885879
gccagacaugguuaaaccu

SEQ ID NO: 2374601 - RNA, 19 nt, Artificial Sequence
  Description of Artificial Sequence: Synthetic oligonucleotide
  Antisense strand to SEQ ID NO: 2374600
agguuuaaccaugucuggc

SEQ ID NO: 2374602 - RNA, 19 nt, Artificial Sequence
  Description of Artificial Sequence: Synthetic oligonucleotide
  Sense strand starting at position 3739 of SEQ ID NO: 1885879
cuuucuguccgagaaagag

SEQ ID NO: 2374603 - RNA, 19 nt, Artificial Sequence
  Description of Artificial Sequence: Synthetic oligonucleotide
  Antisense strand to SEQ ID NO: 2374602
cucuuucucggacagaaag

SEQ ID NO: 2374604 - RNA, 19 nt, Artificial Sequence
  Description of Artificial Sequence: Synthetic oligonucleotide
  Sense strand starting at position 3747 of SEQ ID NO: 1885879
ccgagaaagaguuagucuu

SEQ ID NO: 2374605 - RNA, 19 nt, Artificial Sequence
  Description of Artificial Sequence: Synthetic oligonucleotide
  Antisense strand to SEQ ID NO: 2374604
aagacuaacucuuucucgg

SEQ ID NO: 2374606 - RNA, 19 nt, Artificial Sequence
  Description of Artificial Sequence: Synthetic oligonucleotide
  Sense strand starting at position 3749 of SEQ ID NO: 1885879
gagaaagaguuagucuucu

SEQ ID NO: 2374607 - RNA, 19 nt, Artificial Sequence
  Description of Artificial Sequence: Synthetic oligonucleotide
  Antisense strand to SEQ ID NO: 2374606
agaagacuaacucuuucuc

SEQ ID NO: 2374608 - RNA, 19 nt, Artificial Sequence
  Description of Artificial Sequence: Synthetic oligonucleotide
  Sense strand starting at position 3753 of SEQ ID NO: 1885879
aagaguuagucuucuguua

SEQ ID NO: 2374609 - RNA, 19 nt, Artificial Sequence
  Description of Artificial Sequence: Synthetic oligonucleotide
  Antisense strand to SEQ ID NO: 2374608
uaacagaagacuaacucuu

SEQ ID NO: 2374610 - RNA, 19 nt, Artificial Sequence
  Description of Artificial Sequence: Synthetic oligonucleotide
  Sense strand starting at position 3794 of SEQ ID NO: 1885879
agaagcugucauuaugucu

SEQ ID NO: 2374611 - RNA, 19 nt, Artificial Sequence
  Description of Artificial Sequence: Synthetic oligonucleotide
  Antisense strand to SEQ ID NO: 2374610
agacauaaugacagcuucu

SEQ ID NO: 2374612 - RNA, 19 nt, Artificial Sequence
  Description of Artificial Sequence: Synthetic oligonucleotide
  Sense strand starting at position 3860 of SEQ ID NO: 1885879
ccuggacugcaugguaaua

SEQ ID NO: 2374613 - RNA, 19 nt, Artificial Sequence
  Description of Artificial Sequence: Synthetic oligonucleotide
  Antisense strand to SEQ ID NO: 2374612
uauuaccaugcaguccagg

SEQ ID NO: 2374614 - RNA, 19 nt, Artificial Sequence
  Description of Artificial Sequence: Synthetic oligonucleotide
  Sense strand starting at position 3872 of SEQ ID NO: 1885879
gguaauaaguaucugucuu

SEQ ID NO: 2374615 - RNA, 19 nt, Artificial Sequence
  Description of Artificial Sequence: Synthetic oligonucleotide
  Antisense strand to SEQ ID NO: 2374614
aagacagauacuuauuacc

SEQ ID NO: 2374616 - RNA, 19 nt, Artificial Sequence
  Description of Artificial Sequence: Synthetic oligonucleotide
  Sense strand starting at position 3876 of SEQ ID NO: 1885879
auaaguaucugucuucuuu

SEQ ID NO: 2374617 - RNA, 19 nt, Artificial Sequence
  Description of Artificial Sequence: Synthetic oligonucleotide
  Antisense strand to SEQ ID NO: 2374616
aaagaagacagauacuuau

SEQ ID NO: 2374618 - RNA, 19 nt, Artificial Sequence
  Description of Artificial Sequence: Synthetic oligonucleotide
  Sense strand starting at position 24 of SEQ ID NO: 1885880
cuaugagucugguccuacu

SEQ ID NO: 2374619 - RNA, 19 nt, Artificial Sequence
  Description of Artificial Sequence: Synthetic oligonucleotide
  Antisense strand to SEQ ID NO: 2374618
aguaggaccagacucauag

SEQ ID NO: 2374620 - RNA, 19 nt, Artificial Sequence
  Description of Artificial Sequence: Synthetic oligonucleotide
  Sense strand starting at position 289 of SEQ ID NO: 1885880
gcucacuagccguaaguau

SEQ ID NO: 2374621 - RNA, 19 nt, Artificial Sequence
  Description of Artificial Sequence: Synthetic oligonucleotide
  Antisense strand to SEQ ID NO: 2374620
auacuuacggcuagugagc

SEQ ID NO: 2374622 - RNA, 19 nt, Artificial Sequence
  Description of Artificial Sequence: Synthetic oligonucleotide
  Sense strand starting at position 718 of SEQ ID NO: 1885880
auccuuucuguacacuaga

SEQ ID NO: 2374623 - RNA, 19 nt, Artificial Sequence
  Description of Artificial Sequence: Synthetic oligonucleotide
  Antisense strand to SEQ ID NO: 2374622
ucuaguguacagaaaggau

SEQ ID NO: 2374624 - RNA, 19 nt, Artificial Sequence
  Description of Artificial Sequence: Synthetic oligonucleotide
  Sense strand starting at position 729 of SEQ ID NO: 1885880
acacuagacccuggugaua

SEQ ID NO: 2374625 - RNA, 19 nt, Artificial Sequence
  Description of Artificial Sequence: Synthetic oligonucleotide
  Antisense strand to SEQ ID NO: 2374624
uaucaccagggucuagugu

SEQ ID NO: 2374626 - RNA, 19 nt, Artificial Sequence
  Description of Artificial Sequence: Synthetic oligonucleotide
  Sense strand starting at position 734 of SEQ ID NO: 1885880
agacccuggugauagaaau

SEQ ID NO: 2374627 - RNA, 19 nt, Artificial Sequence
  Description of Artificial Sequence: Synthetic oligonucleotide
  Antisense strand to SEQ ID NO: 2374626
auuucuaucaccagggucu

SEQ ID NO: 2374628 - RNA, 19 nt, Artificial Sequence
  Description of Artificial Sequence: Synthetic oligonucleotide
  Sense strand starting at position 740 of SEQ ID NO: 1885880
uggugauagaaauggcaga

SEQ ID NO: 2374629 - RNA, 19 nt, Artificial Sequence
  Description of Artificial Sequence: Synthetic oligonucleotide
  Antisense strand to SEQ ID NO: 2374628
ucugccauuucuaucacca

SEQ ID NO: 2374630 - RNA, 19 nt, Artificial Sequence
  Description of Artificial Sequence: Synthetic oligonucleotide
  Sense strand starting at position 866 of SEQ ID NO: 1885880
uuccucuguguugguaauu

SEQ ID NO: 2374631 - RNA, 19 nt, Artificial Sequence
  Description of Artificial Sequence: Synthetic oligonucleotide
  Antisense strand to SEQ ID NO: 2374630
aauuaccaacacagaggaa

SEQ ID NO: 2374632 - RNA, 19 nt, Artificial Sequence
  Description of Artificial Sequence: Synthetic oligonucleotide
  Sense strand starting at position 877 of SEQ ID NO: 1885880
ugguaauugggccacaguu

SEQ ID NO: 2374633 - RNA, 19 nt, Artificial Sequence
  Description of Artificial Sequence: Synthetic oligonucleotide
  Antisense strand to SEQ ID NO: 2374632
aacuguggcccaauuacca

SEQ ID NO: 2374634 - RNA, 19 nt, Artificial Sequence
  Description of Artificial Sequence: Synthetic oligonucleotide
  Sense strand starting at position 944 of SEQ ID NO: 1885880
ccauguuuccacugcagaa

SEQ ID NO: 2374635 - RNA, 19 nt, Artificial Sequence
  Description of Artificial Sequence: Synthetic oligonucleotide
  Antisense strand to SEQ ID NO: 2374634
uucugcaguggaaacaugg

SEQ ID NO: 2374636 - RNA, 19 nt, Artificial Sequence
  Description of Artificial Sequence: Synthetic oligonucleotide
  Sense strand starting at position 1093 of SEQ ID NO: 1885880
ccuugcccuccaugguaaa

SEQ ID NO: 2374637 - RNA, 19 nt, Artificial Sequence
  Description of Artificial Sequence: Synthetic oligonucleotide
  Antisense strand to SEQ ID NO: 2374636
uuuaccauggagggcaagg

SEQ ID NO: 2374638 - RNA, 19 nt, Artificial Sequence
  Description of Artificial Sequence: Synthetic oligonucleotide
  Sense strand starting at position 1104 of SEQ ID NO: 1885880
augguaaacucugaacaca

SEQ ID NO: 2374639 - RNA, 19 nt, Artificial Sequence
  Description of Artificial Sequence: Synthetic oligonucleotide
  Antisense strand to SEQ ID NO: 2374638
uguguucagaguuuaccau

SEQ ID NO: 2374640 - RNA, 19 nt, Artificial Sequence
  Description of Artificial Sequence: Synthetic oligonucleotide
  Sense strand starting at position 1263 of SEQ ID NO: 1885880
ggcauuaaaucuuugcuaa

SEQ ID NO: 2374641 - RNA, 19 nt, Artificial Sequence
  Description of Artificial Sequence: Synthetic oligonucleotide
  Antisense strand to SEQ ID NO: 2374640
uuagcaaagauuuaaugcc

SEQ ID NO: 2374642 - RNA, 19 nt, Artificial Sequence
  Description of Artificial Sequence: Synthetic oligonucleotide
  Sense strand starting at position 1457 of SEQ ID NO: 1885880
aagccuuagccuggguuua

SEQ ID NO: 2374643 - RNA, 19 nt, Artificial Sequence
  Description of Artificial Sequence: Synthetic oligonucleotide
  Antisense strand to SEQ ID NO: 2374642
uaaacccaggcuaaggcuu

SEQ ID NO: 2374644 - RNA, 19 nt, Artificial Sequence
  Description of Artificial Sequence: Synthetic oligonucleotide
  Sense strand starting at position 1458 of SEQ ID NO: 1885880
agccuuagccuggguuuau

SEQ ID NO: 2374645 - RNA, 19 nt, Artificial Sequence
  Description of Artificial Sequence: Synthetic oligonucleotide
  Antisense strand to SEQ ID NO: 2374644
auaaacccaggcuaaggcu

SEQ ID NO: 2374646 - RNA, 19 nt, Artificial Sequence
  Description of Artificial Sequence: Synthetic oligonucleotide
  Sense strand starting at position 1468 of SEQ ID NO: 1885880
uggguuuaucgcuagguga

SEQ ID NO: 2374647 - RNA, 19 nt, Artificial Sequence
  Description of Artificial Sequence: Synthetic oligonucleotide
  Antisense strand to SEQ ID NO: 2374646
ucaccuagcgauaaaccca

SEQ ID NO: 2374648 - RNA, 19 nt, Artificial Sequence
  Description of Artificial Sequence: Synthetic oligonucleotide
  Sense strand starting at position 1469 of SEQ ID NO: 1885880
ggguuuaucgcuaggugau

SEQ ID NO: 2374649 - RNA, 19 nt, Artificial Sequence
  Description of Artificial Sequence: Synthetic oligonucleotide
  Antisense strand to SEQ ID NO: 2374648
aucaccuagcgauaaaccc

SEQ ID NO: 2374650 - RNA, 19 nt, Artificial Sequence
  Description of Artificial Sequence: Synthetic oligonucleotide
  Sense strand starting at position 1470 of SEQ ID NO: 1885880
gguuuaucgcuaggugaug

SEQ ID NO: 2374651 - RNA, 19 nt, Artificial Sequence
  Description of Artificial Sequence: Synthetic oligonucleotide
  Antisense strand to SEQ ID NO: 2374650
caucaccuagcgauaaacc

SEQ ID NO: 2374652 - RNA, 19 nt, Artificial Sequence
  Description of Artificial Sequence: Synthetic oligonucleotide
  Sense strand starting at position 1576 of SEQ ID NO: 1885880
ugggcugucgccgucagaa

SEQ ID NO: 2374653 - RNA, 19 nt, Artificial Sequence
  Description of Artificial Sequence: Synthetic oligonucleotide
  Antisense strand to SEQ ID NO: 2374652
uucugacggcgacagccca

SEQ ID NO: 2374654 - RNA, 19 nt, Artificial Sequence
  Description of Artificial Sequence: Synthetic oligonucleotide
  Sense strand starting at position 1577 of SEQ ID NO: 1885880
gggcugucgccgucagaag

SEQ ID NO: 2374655 - RNA, 19 nt, Artificial Sequence
  Description of Artificial Sequence: Synthetic oligonucleotide
  Antisense strand to SEQ ID NO: 2374654
cuucugacggcgacagccc

SEQ ID NO: 2374656 - RNA, 19 nt, Artificial Sequence
  Description of Artificial Sequence: Synthetic oligonucleotide
  Sense strand starting at position 1578 of SEQ ID NO: 1885880
ggcugucgccgucagaaga

SEQ ID NO: 2374657 - RNA, 19 nt, Artificial Sequence
  Description of Artificial Sequence: Synthetic oligonucleotide
  Antisense strand to SEQ ID NO: 2374656
ucuucugacggcgacagcc

SEQ ID NO: 2374658 - RNA, 19 nt, Artificial Sequence
  Description of Artificial Sequence: Synthetic oligonucleotide
  Sense strand starting at position 1682 of SEQ ID NO: 1885880
cggaauccguacuuuaauu

SEQ ID NO: 2374659 - RNA, 19 nt, Artificial Sequence
  Description of Artificial Sequence: Synthetic oligonucleotide
  Antisense strand to SEQ ID NO: 2374658
aauuaaaguacggauuccg

SEQ ID NO: 2374660 - RNA, 19 nt, Artificial Sequence
  Description of Artificial Sequence: Synthetic oligonucleotide
  Sense strand starting at position 1687 of SEQ ID NO: 1885880
uccguacuuuaauuaaagu

SEQ ID NO: 2374661 - RNA, 19 nt, Artificial Sequence
  Description of Artificial Sequence: Synthetic oligonucleotide
  Antisense strand to SEQ ID NO: 2374660
acuuuaauuaaaguacgga

SEQ ID NO: 2374662 - RNA, 19 nt, Artificial Sequence
  Description of Artificial Sequence: Synthetic oligonucleotide
  Sense strand starting at position 1830 of SEQ ID NO: 1885880
ccaagugaagcgggaaaua

SEQ ID NO: 2374663 - RNA, 19 nt, Artificial Sequence
  Description of Artificial Sequence: Synthetic oligonucleotide
  Antisense strand to SEQ ID NO: 2374662
uauuucccgcuucacuugg

SEQ ID NO: 2374664 - RNA, 19 nt, Artificial Sequence
  Description of Artificial Sequence: Synthetic oligonucleotide
  Sense strand starting at position 1842 of SEQ ID NO: 1885880
ggaaauaacuugcuacuac

SEQ ID NO: 2374665 - RNA, 19 nt, Artificial Sequence
  Description of Artificial Sequence: Synthetic oligonucleotide
  Antisense strand to SEQ ID NO: 2374664
guaguagcaaguuauuucc

SEQ ID NO: 2374666 - RNA, 19 nt, Artificial Sequence
  Description of Artificial Sequence: Synthetic oligonucleotide
  Sense strand starting at position 2648 of SEQ ID NO: 1885880
caggauaccuuguuuguau

SEQ ID NO: 2374667 - RNA, 19 nt, Artificial Sequence
  Description of Artificial Sequence: Synthetic oligonucleotide
  Antisense strand to SEQ ID NO: 2374666
auacaaacaagguauccug

SEQ ID NO: 2374668 - RNA, 19 nt, Artificial Sequence
  Description of Artificial Sequence: Synthetic oligonucleotide
  Sense strand starting at position 2805 of SEQ ID NO: 1885880
cccugucauuaucuagauu

SEQ ID NO: 2374669 - RNA, 19 nt, Artificial Sequence
  Description of Artificial Sequence: Synthetic oligonucleotide
  Antisense strand to SEQ ID NO: 2374668
aaucuagauaaugacaggg

SEQ ID NO: 2374670 - RNA, 19 nt, Artificial Sequence
  Description of Artificial Sequence: Synthetic oligonucleotide
  Sense strand starting at position 3015 of SEQ ID NO: 1885880
uaguaaaucgcagacauca

SEQ ID NO: 2374671 - RNA, 19 nt, Artificial Sequence
  Description of Artificial Sequence: Synthetic oligonucleotide
  Antisense strand to SEQ ID NO: 2374670
ugaugucugcgauuuacua

SEQ ID NO: 2374672 - RNA, 19 nt, Artificial Sequence
  Description of Artificial Sequence: Synthetic oligonucleotide
  Sense strand starting at position 3045 of SEQ ID NO: 1885880
ccuugaauguagguuguga

SEQ ID NO: 2374673 - RNA, 19 nt, Artificial Sequence
  Description of Artificial Sequence: Synthetic oligonucleotide
  Antisense strand to SEQ ID NO: 2374672
ucacaaccuacauucaagg

SEQ ID NO: 2374674 - RNA, 19 nt, Artificial Sequence
  Description of Artificial Sequence: Synthetic oligonucleotide
  Sense strand starting at position 3085 of SEQ ID NO: 1885880
ggaugcuggugcuuccaua

SEQ ID NO: 2374675 - RNA, 19 nt, Artificial Sequence
  Description of Artificial Sequence: Synthetic oligonucleotide
  Antisense strand to SEQ ID NO: 2374674
uauggaagcaccagcaucc

SEQ ID NO: 2374676 - RNA, 19 nt, Artificial Sequence
  Description of Artificial Sequence: Synthetic oligonucleotide
  Sense strand starting at position 3131 of SEQ ID NO: 1885880
ucuauaauuuaggaaagcu

SEQ ID NO: 2374677 - RNA, 19 nt, Artificial Sequence
  Description of Artificial Sequence: Synthetic oligonucleotide
  Antisense strand to SEQ ID NO: 2374676
agcuuuccuaaauuauaga

SEQ ID NO: 2374678 - RNA, 19 nt, Artificial Sequence
  Description of Artificial Sequence: Synthetic oligonucleotide
  Sense strand starting at position 3222 of SEQ ID NO: 1885880
ugguauacacauugagaau

SEQ ID NO: 2374679 - RNA, 19 nt, Artificial Sequence
  Description of Artificial Sequence: Synthetic oligonucleotide
  Antisense strand to SEQ ID NO: 2374678
auucucaauguguauacca

SEQ ID NO: 2374680 - RNA, 19 nt, Artificial Sequence
  Description of Artificial Sequence: Synthetic oligonucleotide
  Sense strand starting at position 3458 of SEQ ID NO: 1885880
gagauagccucaucauguu

SEQ ID NO: 2374681 - RNA, 19 nt, Artificial Sequence
  Description of Artificial Sequence: Synthetic oligonucleotide
  Antisense strand to SEQ ID NO: 2374680
aacaugaugaggcuaucuc

SEQ ID NO: 2374682 - RNA, 19 nt, Artificial Sequence
  Description of Artificial Sequence: Synthetic oligonucleotide
  Sense strand starting at position 3915 of SEQ ID NO: 1885880
gcauuuaguuggguuguuu

SEQ ID NO: 2374683 - RNA, 19 nt, Artificial Sequence
  Description of Artificial Sequence: Synthetic oligonucleotide
  Antisense strand to SEQ ID NO: 2374682
aaacaacccaacuaaaugc

SEQ ID NO: 2374684 - RNA, 19 nt, Artificial Sequence
  Description of Artificial Sequence: Synthetic oligonucleotide
  Sense strand starting at position 3938 of SEQ ID NO: 1885880
uucuguugcucacuaauag

SEQ ID NO: 2374685 - RNA, 19 nt, Artificial Sequence
  Description of Artificial Sequence: Synthetic oligonucleotide
  Antisense strand to SEQ ID NO: 2374684
cuauuagugagcaacagaa

SEQ ID NO: 2374686 - RNA, 19 nt, Artificial Sequence
  Description of Artificial Sequence: Synthetic oligonucleotide
  Sense strand starting at position 3939 of SEQ ID NO: 1885880
ucuguugcucacuaauagu

SEQ ID NO: 2374687 - RNA, 19 nt, Artificial Sequence
  Description of Artificial Sequence: Synthetic oligonucleotide
  Antisense strand to SEQ ID NO: 2374686
acuauuagugagcaacaga

SEQ ID NO: 2374688 - RNA, 19 nt, Artificial Sequence
  Description of Artificial Sequence: Synthetic oligonucleotide
  Sense strand starting at position 3963 of SEQ ID NO: 1885880
agugaauaacuacguaugu

SEQ ID NO: 2374689 - RNA, 19 nt, Artificial Sequence
  Description of Artificial Sequence: Synthetic oligonucleotide
  Antisense strand to SEQ ID NO: 2374688
acauacguaguuauucacu

SEQ ID NO: 2374690 - RNA, 19 nt, Artificial Sequence
  Description of Artificial Sequence: Synthetic oligonucleotide
  Sense strand starting at position 3965 of SEQ ID NO: 1885880
ugaauaacuacguaugugu

SEQ ID NO: 2374691 - RNA, 19 nt, Artificial Sequence
  Description of Artificial Sequence: Synthetic oligonucleotide
  Antisense strand to SEQ ID NO: 2374690
acacauacguaguuauuca

SEQ ID NO: 2374692 - RNA, 19 nt, Artificial Sequence
  Description of Artificial Sequence: Synthetic oligonucleotide
  Sense strand starting at position 3967 of SEQ ID NO: 1885880
aauaacuacguauguguau

SEQ ID NO: 2374693 - RNA, 19 nt, Artificial Sequence
  Description of Artificial Sequence: Synthetic oligonucleotide
  Antisense strand to SEQ ID NO: 2374692
auacacauacguaguuauu

SEQ ID NO: 2374694 - RNA, 19 nt, Artificial Sequence
  Description of Artificial Sequence: Synthetic oligonucleotide
  Sense strand starting at position 3976 of SEQ ID NO: 1885880
guauguguaucauucugca

SEQ ID NO: 2374695 - RNA, 19 nt, Artificial Sequence
  Description of Artificial Sequence: Synthetic oligonucleotide
  Antisense strand to SEQ ID NO: 2374694
ugcagaaugauacacauac

SEQ ID NO: 2374696 - RNA, 19 nt, Artificial Sequence
  Description of Artificial Sequence: Synthetic oligonucleotide
  Sense strand starting at position 3981 of SEQ ID NO: 1885880
uguaucauucugcauaccu

SEQ ID NO: 2374697 - RNA, 19 nt, Artificial Sequence
  Description of Artificial Sequence: Synthetic oligonucleotide
  Antisense strand to SEQ ID NO: 2374696
agguaugcagaaugauaca

SEQ ID NO: 2374698 - RNA, 19 nt, Artificial Sequence
  Description of Artificial Sequence: Synthetic oligonucleotide
  Sense strand starting at position 167 of SEQ ID NO: 1885881
gacugagugccuugggaac

SEQ ID NO: 2374699 - RNA, 19 nt, Artificial Sequence
  Description of Artificial Sequence: Synthetic oligonucleotide
  Antisense strand to SEQ ID NO: 2374698
guucccaaggcacucaguc

SEQ ID NO: 2374700 - RNA, 19 nt, Artificial Sequence
  Description of Artificial Sequence: Synthetic oligonucleotide
  Sense strand starting at position 239 of SEQ ID NO: 1885881
ggagucaagauucgaaauc

SEQ ID NO: 2374701 - RNA, 19 nt, Artificial Sequence
  Description of Artificial Sequence: Synthetic oligonucleotide
  Antisense strand to SEQ ID NO: 2374700
gauuucgaaucuugacucc

SEQ ID NO: 2374702 - RNA, 19 nt, Artificial Sequence
  Description of Artificial Sequence: Synthetic oligonucleotide
  Sense strand starting at position 319 of SEQ ID NO: 1885881
uccaccucacugugaugau

SEQ ID NO: 2374703 - RNA, 19 nt, Artificial Sequence
  Description of Artificial Sequence: Synthetic oligonucleotide
  Antisense strand to SEQ ID NO: 2374702
aucaucacagugaggugga

SEQ ID NO: 2374704 - RNA, 19 nt, Artificial Sequence
  Description of Artificial Sequence: Synthetic oligonucleotide
  Sense strand starting at position 365 of SEQ ID NO: 1885881
aauuacugugccugguaca

SEQ ID NO: 2374705 - RNA, 19 nt, Artificial Sequence
  Description of Artificial Sequence: Synthetic oligonucleotide
  Antisense strand to SEQ ID NO: 2374704
uguaccaggcacaguaauu

SEQ ID NO: 2374706 - RNA, 19 nt, Artificial Sequence
  Description of Artificial Sequence: Synthetic oligonucleotide
  Sense strand starting at position 863 of SEQ ID NO: 1885881
gagauaagcugagcaauug

SEQ ID NO: 2374707 - RNA, 19 nt, Artificial Sequence
  Description of Artificial Sequence: Synthetic oligonucleotide
  Antisense strand to SEQ ID NO: 2374706
caauugcucagcuuaucuc

SEQ ID NO: 2374708 - RNA, 19 nt, Artificial Sequence
  Description of Artificial Sequence: Synthetic oligonucleotide
  Sense strand starting at position 1081 of SEQ ID NO: 1885881
ugcguucuugcuccaguua

SEQ ID NO: 2374709 - RNA, 19 nt, Artificial Sequence
  Description of Artificial Sequence: Synthetic oligonucleotide
  Antisense strand to SEQ ID NO: 2374708
uaacuggagcaagaacgca

SEQ ID NO: 2374710 - RNA, 19 nt, Artificial Sequence
  Description of Artificial Sequence: Synthetic oligonucleotide
  Sense strand starting at position 1406 of SEQ ID NO: 1885881
cugagagguucuuccaacu

SEQ ID NO: 2374711 - RNA, 19 nt, Artificial Sequence
  Description of Artificial Sequence: Synthetic oligonucleotide
  Antisense strand to SEQ ID NO: 2374710
aguuggaagaaccucucag

SEQ ID NO: 2374712 - RNA, 19 nt, Artificial Sequence
  Description of Artificial Sequence: Synthetic oligonucleotide
  Sense strand starting at position 1412 of SEQ ID NO: 1885881
gguucuuccaacuggaaag

SEQ ID NO: 2374713 - RNA, 19 nt, Artificial Sequence
  Description of Artificial Sequence: Synthetic oligonucleotide
  Antisense strand to SEQ ID NO: 2374712
cuuuccaguuggaagaacc

SEQ ID NO: 2374714 - RNA, 19 nt, Artificial Sequence
  Description of Artificial Sequence: Synthetic oligonucleotide
  Sense strand starting at position 1653 of SEQ ID NO: 1885881
cggugaagauggucugcuu

SEQ ID NO: 2374715 - RNA, 19 nt, Artificial Sequence
  Description of Artificial Sequence: Synthetic oligonucleotide
  Antisense strand to SEQ ID NO: 2374714
aagcagaccaucuucaccg

SEQ ID NO: 2374716 - RNA, 19 nt, Artificial Sequence
  Description of Artificial Sequence: Synthetic oligonucleotide
  Sense strand starting at position 1656 of SEQ ID NO: 1885881
ugaagauggucugcuuguu

SEQ ID NO: 2374717 - RNA, 19 nt, Artificial Sequence
  Description of Artificial Sequence: Synthetic oligonucleotide
  Antisense strand to SEQ ID NO: 2374716
aacaagcagaccaucuuca

SEQ ID NO: 2374718 - RNA, 19 nt, Artificial Sequence
  Description of Artificial Sequence: Synthetic oligonucleotide
  Sense strand starting at position 2426 of SEQ ID NO: 1885881
uucuguguuccuuagggag

SEQ ID NO: 2374719 - RNA, 19 nt, Artificial Sequence
  Description of Artificial Sequence: Synthetic oligonucleotide
  Antisense strand to SEQ ID NO: 2374718
cucccuaaggaacacagaa

SEQ ID NO: 2374720 - RNA, 19 nt, Artificial Sequence
  Description of Artificial Sequence: Synthetic oligonucleotide
  Sense strand starting at position 2455 of SEQ ID NO: 1885881
uuuacuuggcuugguuaca

SEQ ID NO: 2374721 - RNA, 19 nt, Artificial Sequence
  Description of Artificial Sequence: Synthetic oligonucleotide
  Antisense strand to SEQ ID NO: 2374720
uguaaccaagccaaguaaa

SEQ ID NO: 2374722 - RNA, 19 nt, Artificial Sequence
  Description of Artificial Sequence: Synthetic oligonucleotide
  Sense strand starting at position 2456 of SEQ ID NO: 1885881
uuacuuggcuugguuacaa

SEQ ID NO: 2374723 - RNA, 19 nt, Artificial Sequence
  Description of Artificial Sequence: Synthetic oligonucleotide
  Antisense strand to SEQ ID NO: 2374722
uuguaaccaagccaaguaa

SEQ ID NO: 2374724 - RNA, 19 nt, Artificial Sequence
  Description of Artificial Sequence: Synthetic oligonucleotide
  Sense strand starting at position 2464 of SEQ ID NO: 1885881
cuugguuacaaacgugaga

SEQ ID NO: 2374725 - RNA, 19 nt, Artificial Sequence
  Description of Artificial Sequence: Synthetic oligonucleotide
  Antisense strand to SEQ ID NO: 2374724
ucucacguuuguaaccaag

SEQ ID NO: 2374726 - RNA, 19 nt, Artificial Sequence
  Description of Artificial Sequence: Synthetic oligonucleotide
  Sense strand starting at position 2466 of SEQ ID NO: 1885881
ugguuacaaacgugagacu

SEQ ID NO: 2374727 - RNA, 19 nt, Artificial Sequence
  Description of Artificial Sequence: Synthetic oligonucleotide
  Antisense strand to SEQ ID NO: 2374726
agucucacguuuguaacca

SEQ ID NO: 2374728 - RNA, 19 nt, Artificial Sequence
  Description of Artificial Sequence: Synthetic oligonucleotide
  Sense strand starting at position 2467 of SEQ ID NO: 1885881
gguuacaaacgugagacuu

SEQ ID NO: 2374729 - RNA, 19 nt, Artificial Sequence
  Description of Artificial Sequence: Synthetic oligonucleotide
  Antisense strand to SEQ ID NO: 2374728
aagucucacguuuguaacc

SEQ ID NO: 2374730 - RNA, 19 nt, Artificial Sequence
  Description of Artificial Sequence: Synthetic oligonucleotide
  Sense strand starting at position 2475 of SEQ ID NO: 1885881
acgugagacuugagaggau

SEQ ID NO: 2374731 - RNA, 19 nt, Artificial Sequence
  Description of Artificial Sequence: Synthetic oligonucleotide
  Antisense strand to SEQ ID NO: 2374730
auccucucaagucucacgu

SEQ ID NO: 2374732 - RNA, 19 nt, Artificial Sequence
  Description of Artificial Sequence: Synthetic oligonucleotide
  Sense strand starting at position 2499 of SEQ ID NO: 1885881
ggacuugacuguguccaca

SEQ ID NO: 2374733 - RNA, 19 nt, Artificial Sequence
  Description of Artificial Sequence: Synthetic oligonucleotide
  Antisense strand to SEQ ID NO: 2374732
uguggacacagucaagucc

SEQ ID NO: 2374734 - RNA, 19 nt, Artificial Sequence
  Description of Artificial Sequence: Synthetic oligonucleotide
  Sense strand starting at position 2502 of SEQ ID NO: 1885881
cuugacuguguccacagaa

SEQ ID NO: 2374735 - RNA, 19 nt, Artificial Sequence
  Description of Artificial Sequence: Synthetic oligonucleotide
  Antisense strand to SEQ ID NO: 2374734
uucuguggacacagucaag

SEQ ID NO: 2374736 - RNA, 19 nt, Artificial Sequence
  Description of Artificial Sequence: Synthetic oligonucleotide
  Sense strand starting at position 2512 of SEQ ID NO: 1885881
uccacagaagugugacaaa

SEQ ID NO: 2374737 - RNA, 19 nt, Artificial Sequence
  Description of Artificial Sequence: Synthetic oligonucleotide
  Antisense strand to SEQ ID NO: 2374736
uuugucacacuucugugga

SEQ ID NO: 2374738 - RNA, 19 nt, Artificial Sequence
  Description of Artificial Sequence: Synthetic oligonucleotide
  Sense strand starting at position 3096 of SEQ ID NO: 1885881
uuugaauucccaggcucga

SEQ ID NO: 2374739 - RNA, 19 nt, Artificial Sequence
  Description of Artificial Sequence: Synthetic oligonucleotide
  Antisense strand to SEQ ID NO: 2374738
ucgagccugggaauucaaa

SEQ ID NO: 2374740 - RNA, 19 nt, Artificial Sequence
  Description of Artificial Sequence: Synthetic oligonucleotide
  Sense strand starting at position 3149 of SEQ ID NO: 1885881
cugggauuauaggauguga

SEQ ID NO: 2374741 - RNA, 19 nt, Artificial Sequence
  Description of Artificial Sequence: Synthetic oligonucleotide
  Antisense strand to SEQ ID NO: 2374740
ucacauccuauaaucccag

SEQ ID NO: 2374742 - RNA, 19 nt, Artificial Sequence
  Description of Artificial Sequence: Synthetic oligonucleotide
  Sense strand starting at position 3214 of SEQ ID NO: 1885881
gaucaagagugcccuucuu

SEQ ID NO: 2374743 - RNA, 19 nt, Artificial Sequence
  Description of Artificial Sequence: Synthetic oligonucleotide
  Antisense strand to SEQ ID NO: 2374742
aagaagggcacucuugauc

SEQ ID NO: 2374744 - RNA, 19 nt, Artificial Sequence
  Description of Artificial Sequence: Synthetic oligonucleotide
  Sense strand starting at position 3333 of SEQ ID NO: 1885881
uggagucaccgcuaucuuu

SEQ ID NO: 2374745 - RNA, 19 nt, Artificial Sequence
  Description of Artificial Sequence: Synthetic oligonucleotide
  Antisense strand to SEQ ID NO: 2374744
aaagauagcggugacucca

SEQ ID NO: 2374746 - RNA, 19 nt, Artificial Sequence
  Description of Artificial Sequence: Synthetic oligonucleotide
  Sense strand starting at position 3392 of SEQ ID NO: 1885881
acaacugaaucaguaggua

SEQ ID NO: 2374747 - RNA, 19 nt, Artificial Sequence
  Description of Artificial Sequence: Synthetic oligonucleotide
  Antisense strand to SEQ ID NO: 2374746
uaccuacugauucaguugu

SEQ ID NO: 2374748 - RNA, 19 nt, Artificial Sequence
  Description of Artificial Sequence: Synthetic oligonucleotide
  Sense strand starting at position 3395 of SEQ ID NO: 1885881
acugaaucaguagguauua

SEQ ID NO: 2374749 - RNA, 19 nt, Artificial Sequence
  Description of Artificial Sequence: Synthetic oligonucleotide
  Antisense strand to SEQ ID NO: 2374748
uaauaccuacugauucagu

SEQ ID NO: 2374750 - RNA, 19 nt, Artificial Sequence
  Description of Artificial Sequence: Synthetic oligonucleotide
  Sense strand starting at position 3396 of SEQ ID NO: 1885881
cugaaucaguagguauuau

SEQ ID NO: 2374751 - RNA, 19 nt, Artificial Sequence
  Description of Artificial Sequence: Synthetic oligonucleotide
  Antisense strand to SEQ ID NO: 2374750
auaauaccuacugauucag

SEQ ID NO: 2374752 - RNA, 19 nt, Artificial Sequence
  Description of Artificial Sequence: Synthetic oligonucleotide
  Sense strand starting at position 3416 of SEQ ID NO: 1885881
uccauauuauaggcaaaga

SEQ ID NO: 2374753 - RNA, 19 nt, Artificial Sequence
  Description of Artificial Sequence: Synthetic oligonucleotide
  Antisense strand to SEQ ID NO: 2374752
ucuuugccuauaauaugga

SEQ ID NO: 2374754 - RNA, 19 nt, Artificial Sequence
  Description of Artificial Sequence: Synthetic oligonucleotide
  Sense strand starting at position 3469 of SEQ ID NO: 1885881
gucccacagcugggaauua

SEQ ID NO: 2374755 - RNA, 19 nt, Artificial Sequence
  Description of Artificial Sequence: Synthetic oligonucleotide
  Antisense strand to SEQ ID NO: 2374754
uaauucccagcugugggac

SEQ ID NO: 2374756 - RNA, 19 nt, Artificial Sequence
  Description of Artificial Sequence: Synthetic oligonucleotide
  Sense strand starting at position 3714 of SEQ ID NO: 1885881
agaucaagacuuuaugcuu

SEQ ID NO: 2374757 - RNA, 19 nt, Artificial Sequence
  Description of Artificial Sequence: Synthetic oligonucleotide
  Antisense strand to SEQ ID NO: 2374756
aagcauaaagucuugaucu

SEQ ID NO: 2374758 - RNA, 19 nt, Artificial Sequence
  Description of Artificial Sequence: Synthetic oligonucleotide
  Sense strand starting at position 3741 of SEQ ID NO: 1885881
gugguuuguuacuuuagga

SEQ ID NO: 2374759 - RNA, 19 nt, Artificial Sequence
  Description of Artificial Sequence: Synthetic oligonucleotide
  Antisense strand to SEQ ID NO: 2374758
uccuaaaguaacaaaccac

SEQ ID NO: 2374760 - RNA, 19 nt, Artificial Sequence
  Description of Artificial Sequence: Synthetic oligonucleotide
  Sense strand starting at position 3754 of SEQ ID NO: 1885881
uuaggauagugguucugaa

SEQ ID NO: 2374761 - RNA, 19 nt, Artificial Sequence
  Description of Artificial Sequence: Synthetic oligonucleotide
  Antisense strand to SEQ ID NO: 2374760
uucagaaccacuauccuaa

SEQ ID NO: 2374762 - RNA, 19 nt, Artificial Sequence
  Description of Artificial Sequence: Synthetic oligonucleotide
  Sense strand starting at position 3846 of SEQ ID NO: 1885881
uggcuaagaauguggguau

SEQ ID NO: 2374763 - RNA, 19 nt, Artificial Sequence
  Description of Artificial Sequence: Synthetic oligonucleotide
  Antisense strand to SEQ ID NO: 2374762
auacccacauucuuagcca

SEQ ID NO: 2374764 - RNA, 19 nt, Artificial Sequence
  Description of Artificial Sequence: Synthetic oligonucleotide
  Sense strand starting at position 3849 of SEQ ID NO: 1885881
cuaagaauguggguaucga

SEQ ID NO: 2374765 - RNA, 19 nt, Artificial Sequence
  Description of Artificial Sequence: Synthetic oligonucleotide
  Antisense strand to SEQ ID NO: 2374764
ucgauacccacauucuuag

SEQ ID NO: 2374766 - RNA, 19 nt, Artificial Sequence
  Description of Artificial Sequence: Synthetic oligonucleotide
  Sense strand starting at position 3850 of SEQ ID NO: 1885881
uaagaauguggguaucgaa

SEQ ID NO: 2374767 - RNA, 19 nt, Artificial Sequence
  Description of Artificial Sequence: Synthetic oligonucleotide
  Antisense strand to SEQ ID NO: 2374766
uucgauacccacauucuua

SEQ ID NO: 2374768 - RNA, 19 nt, Artificial Sequence
  Description of Artificial Sequence: Synthetic oligonucleotide
  Sense strand starting at position 3903 of SEQ ID NO: 1885881
ggaaccauacuuugagagu

SEQ ID NO: 2374769 - RNA, 19 nt, Artificial Sequence
  Description of Artificial Sequence: Synthetic oligonucleotide
  Antisense strand to SEQ ID NO: 2374768
acucucaaaguaugguucc

SEQ ID NO: 2374770 - RNA, 19 nt, Artificial Sequence
  Description of Artificial Sequence: Synthetic oligonucleotide
  Sense strand starting at position 3912 of SEQ ID NO: 1885881
cuuugagagugcuuaggcu

SEQ ID NO: 2374771 - RNA, 19 nt, Artificial Sequence
  Description of Artificial Sequence: Synthetic oligonucleotide
  Antisense strand to SEQ ID NO: 2374770
agccuaagcacucucaaag

SEQ ID NO: 2374772 - RNA, 19 nt, Artificial Sequence
  Description of Artificial Sequence: Synthetic oligonucleotide
  Sense strand starting at position 3960 of SEQ ID NO: 1885881
gggcuucaaguuuggcaga

SEQ ID NO: 2374773 - RNA, 19 nt, Artificial Sequence
  Description of Artificial Sequence: Synthetic oligonucleotide
  Antisense strand to SEQ ID NO: 2374772
ucugccaaacuugaagccc

SEQ ID NO: 2374774 - RNA, 19 nt, Artificial Sequence
  Description of Artificial Sequence: Synthetic oligonucleotide
  Sense strand starting at position 3962 of SEQ ID NO: 1885881
gcuucaaguuuggcagaug

SEQ ID NO: 2374775 - RNA, 19 nt, Artificial Sequence
  Description of Artificial Sequence: Synthetic oligonucleotide
  Antisense strand to SEQ ID NO: 2374774
caucugccaaacuugaagc

SEQ ID NO: 2374776 - RNA, 19 nt, Artificial Sequence
  Description of Artificial Sequence: Synthetic oligonucleotide
  Sense strand starting at position 3965 of SEQ ID NO: 1885881
ucaaguuuggcagaugauc

SEQ ID NO: 2374777 - RNA, 19 nt, Artificial Sequence
  Description of Artificial Sequence: Synthetic oligonucleotide
  Antisense strand to SEQ ID NO: 2374776
gaucaucugccaaacuuga

SEQ ID NO: 2374778 - RNA, 19 nt, Artificial Sequence
  Description of Artificial Sequence: Synthetic oligonucleotide
  Sense strand starting at position 688 of SEQ ID NO: 1885882
guggcuugcuauccuuuaa

SEQ ID NO: 2374779 - RNA, 19 nt, Artificial Sequence
  Description of Artificial Sequence: Synthetic oligonucleotide
  Antisense strand to SEQ ID NO: 2374778
uuaaaggauagcaagccac

SEQ ID NO: 2374780 - RNA, 19 nt, Artificial Sequence
  Description of Artificial Sequence: Synthetic oligonucleotide
  Sense strand starting at position 887 of SEQ ID NO: 1885882
agaacagccuuucuugauu

SEQ ID NO: 2374781 - RNA, 19 nt, Artificial Sequence
  Description of Artificial Sequence: Synthetic oligonucleotide
  Antisense strand to SEQ ID NO: 2374780
aaucaagaaaggcuguucu

SEQ ID NO: 2374782 - RNA, 19 nt, Artificial Sequence
  Description of Artificial Sequence: Synthetic oligonucleotide
  Sense strand starting at position 934 of SEQ ID NO: 1885882
ggaaauuauggaggccagu

SEQ ID NO: 2374783 - RNA, 19 nt, Artificial Sequence
  Description of Artificial Sequence: Synthetic oligonucleotide
  Antisense strand to SEQ ID NO: 2374782
acuggccuccauaauuucc

SEQ ID NO: 2374784 - RNA, 19 nt, Artificial Sequence
  Description of Artificial Sequence: Synthetic oligonucleotide
  Sense strand starting at position 947 of SEQ ID NO: 1885882
gccaguggauacguucauu

SEQ ID NO: 2374785 - RNA, 19 nt, Artificial Sequence
  Description of Artificial Sequence: Synthetic oligonucleotide
  Antisense strand to SEQ ID NO: 2374784
aaugaacguauccacuggc

SEQ ID NO: 2374786 - RNA, 19 nt, Artificial Sequence
  Description of Artificial Sequence: Synthetic oligonucleotide
  Sense strand starting at position 1029 of SEQ ID NO: 1885882
cccuaaccugcagaugaua

SEQ ID NO: 2374787 - RNA, 19 nt, Artificial Sequence
  Description of Artificial Sequence: Synthetic oligonucleotide
  Antisense strand to SEQ ID NO: 2374786
uaucaucugcagguuaggg

SEQ ID NO: 2374788 - RNA, 19 nt, Artificial Sequence
  Description of Artificial Sequence: Synthetic oligonucleotide
  Sense strand starting at position 1215 of SEQ ID NO: 1885882
gccuuuaaguuugauggca

SEQ ID NO: 2374789 - RNA, 19 nt, Artificial Sequence
  Description of Artificial Sequence: Synthetic oligonucleotide
  Antisense strand to SEQ ID NO: 2374788
ugccaucaaacuuaaaggc

SEQ ID NO: 2374790 - RNA, 19 nt, Artificial Sequence
  Description of Artificial Sequence: Synthetic oligonucleotide
  Sense strand starting at position 1217 of SEQ ID NO: 1885882
cuuuaaguuugauggcauc

SEQ ID NO: 2374791 - RNA, 19 nt, Artificial Sequence
  Description of Artificial Sequence: Synthetic oligonucleotide
  Antisense strand to SEQ ID NO: 2374790
gaugccaucaaacuuaaag

SEQ ID NO: 2374792 - RNA, 19 nt, Artificial Sequence
  Description of Artificial Sequence: Synthetic oligonucleotide
  Sense strand starting at position 1387 of SEQ ID NO: 1885882
gcgcuuagaacguacggau

SEQ ID NO: 2374793 - RNA, 19 nt, Artificial Sequence
  Description of Artificial Sequence: Synthetic oligonucleotide
  Antisense strand to SEQ ID NO: 2374792
auccguacguucuaagcgc

SEQ ID NO: 2374794 - RNA, 19 nt, Artificial Sequence
  Description of Artificial Sequence: Synthetic oligonucleotide
  Sense strand starting at position 1454 of SEQ ID NO: 1885882
cuuucuggcucuggaaaga

SEQ ID NO: 2374795 - RNA, 19 nt, Artificial Sequence
  Description of Artificial Sequence: Synthetic oligonucleotide
  Antisense strand to SEQ ID NO: 2374794
ucuuuccagagccagaaag

SEQ ID NO: 2374796 - RNA, 19 nt, Artificial Sequence
  Description of Artificial Sequence: Synthetic oligonucleotide
  Sense strand starting at position 1481 of SEQ ID NO: 1885882
gcuuccuaacaguguggaa

SEQ ID NO: 2374797 - RNA, 19 nt, Artificial Sequence
  Description of Artificial Sequence: Synthetic oligonucleotide
  Antisense strand to SEQ ID NO: 2374796
uuccacacuguuaggaagc

SEQ ID NO: 2374798 - RNA, 19 nt, Artificial Sequence
  Description of Artificial Sequence: Synthetic oligonucleotide
  Sense strand starting at position 1483 of SEQ ID NO: 1885882
uuccuaacaguguggaaga

SEQ ID NO: 2374799 - RNA, 19 nt, Artificial Sequence
  Description of Artificial Sequence: Synthetic oligonucleotide
  Antisense strand to SEQ ID NO: 2374798
ucuuccacacuguuaggaa

SEQ ID NO: 2374800 - RNA, 19 nt, Artificial Sequence
  Description of Artificial Sequence: Synthetic oligonucleotide
  Sense strand starting at position 1500 of SEQ ID NO: 1885882
gagugagccugauucuaag

SEQ ID NO: 2374801 - RNA, 19 nt, Artificial Sequence
  Description of Artificial Sequence: Synthetic oligonucleotide
  Antisense strand to SEQ ID NO: 2374800
cuuagaaucaggcucacuc

SEQ ID NO: 2374802 - RNA, 19 nt, Artificial Sequence
  Description of Artificial Sequence: Synthetic oligonucleotide
  Sense strand starting at position 1506 of SEQ ID NO: 1885882
gccugauucuaagcaccuu

SEQ ID NO: 2374803 - RNA, 19 nt, Artificial Sequence
  Description of Artificial Sequence: Synthetic oligonucleotide
  Antisense strand to SEQ ID NO: 2374802
aaggugcuuagaaucaggc

SEQ ID NO: 2374804 - RNA, 19 nt, Artificial Sequence
  Description of Artificial Sequence: Synthetic oligonucleotide
  Sense strand starting at position 2307 of SEQ ID NO: 1885882
acuauugacgucuacuaca

SEQ ID NO: 2374805 - RNA, 19 nt, Artificial Sequence
  Description of Artificial Sequence: Synthetic oligonucleotide
  Antisense strand to SEQ ID NO: 2374804
uguaguagacgucaauagu

SEQ ID NO: 2374806 - RNA, 19 nt, Artificial Sequence
  Description of Artificial Sequence: Synthetic oligonucleotide
  Sense strand starting at position 2453 of SEQ ID NO: 1885882
uuugaugaaucaucuaggu

SEQ ID NO: 2374807 - RNA, 19 nt, Artificial Sequence
  Description of Artificial Sequence: Synthetic oligonucleotide
  Antisense strand to SEQ ID NO: 2374806
accuagaugauucaucaaa

SEQ ID NO: 2374808 - RNA, 19 nt, Artificial Sequence
  Description of Artificial Sequence: Synthetic oligonucleotide
  Sense strand starting at position 2458 of SEQ ID NO: 1885882
ugaaucaucuaggugccua

SEQ ID NO: 2374809 - RNA, 19 nt, Artificial Sequence
  Description of Artificial Sequence: Synthetic oligonucleotide
  Antisense strand to SEQ ID NO: 2374808
uaggcaccuagaugauuca

SEQ ID NO: 2374810 - RNA, 19 nt, Artificial Sequence
  Description of Artificial Sequence: Synthetic oligonucleotide
  Sense strand starting at position 2463 of SEQ ID NO: 1885882
caucuaggugccuagcaaa

SEQ ID NO: 2374811 - RNA, 19 nt, Artificial Sequence
  Description of Artificial Sequence: Synthetic oligonucleotide
  Antisense strand to SEQ ID NO: 2374810
uuugcuaggcaccuagaug

SEQ ID NO: 2374812 - RNA, 19 nt, Artificial Sequence
  Description of Artificial Sequence: Synthetic oligonucleotide
  Sense strand starting at position 2492 of SEQ ID NO: 1885882
auaauuacuugcucaggaa

SEQ ID NO: 2374813 - RNA, 19 nt, Artificial Sequence
  Description of Artificial Sequence: Synthetic oligonucleotide
  Antisense strand to SEQ ID NO: 2374812
uuccugagcaaguaauuau

SEQ ID NO: 2374814 - RNA, 19 nt, Artificial Sequence
  Description of Artificial Sequence: Synthetic oligonucleotide
  Sense strand starting at position 2758 of SEQ ID NO: 1885882
uugguaaccucaggauguu

SEQ ID NO: 2374815 - RNA, 19 nt, Artificial Sequence
  Description of Artificial Sequence: Synthetic oligonucleotide
  Antisense strand to SEQ ID NO: 2374814
aacauccugagguuaccaa

SEQ ID NO: 2374816 - RNA, 19 nt, Artificial Sequence
  Description of Artificial Sequence: Synthetic oligonucleotide
  Sense strand starting at position 2847 of SEQ ID NO: 1885882
gcaaauaaccugugcacau

SEQ ID NO: 2374817 - RNA, 19 nt, Artificial Sequence
  Description of Artificial Sequence: Synthetic oligonucleotide
  Antisense strand to SEQ ID NO: 2374816
augugcacagguuauuugc

SEQ ID NO: 2374818 - RNA, 19 nt, Artificial Sequence
  Description of Artificial Sequence: Synthetic oligonucleotide
  Sense strand starting at position 2928 of SEQ ID NO: 1885882
guaaauagcuguuauaaag

SEQ ID NO: 2374819 - RNA, 19 nt, Artificial Sequence
  Description of Artificial Sequence: Synthetic oligonucleotide
  Antisense strand to SEQ ID NO: 2374818
cuuuauaacagcuauuuac

SEQ ID NO: 2374820 - RNA, 19 nt, Artificial Sequence
  Description of Artificial Sequence: Synthetic oligonucleotide
  Sense strand starting at position 3150 of SEQ ID NO: 1885882
cgaugcacaguugguuaaa

SEQ ID NO: 2374821 - RNA, 19 nt, Artificial Sequence
  Description of Artificial Sequence: Synthetic oligonucleotide
  Antisense strand to SEQ ID NO: 2374820
uuuaaccaacugugcaucg

SEQ ID NO: 2374822 - RNA, 19 nt, Artificial Sequence
  Description of Artificial Sequence: Synthetic oligonucleotide
  Sense strand starting at position 3162 of SEQ ID NO: 1885882
gguuaaauccaaggaucca

SEQ ID NO: 2374823 - RNA, 19 nt, Artificial Sequence
  Description of Artificial Sequence: Synthetic oligonucleotide
  Antisense strand to SEQ ID NO: 2374822
uggauccuuggauuuaacc

SEQ ID NO: 2374824 - RNA, 19 nt, Artificial Sequence
  Description of Artificial Sequence: Synthetic oligonucleotide
  Sense strand starting at position 3365 of SEQ ID NO: 1885882
ugagcucauuucugaagag

SEQ ID NO: 2374825 - RNA, 19 nt, Artificial Sequence
  Description of Artificial Sequence: Synthetic oligonucleotide
  Antisense strand to SEQ ID NO: 2374824
cucuucagaaaugagcuca

SEQ ID NO: 2374826 - RNA, 19 nt, Artificial Sequence
  Description of Artificial Sequence: Synthetic oligonucleotide
  Sense strand starting at position 3366 of SEQ ID NO: 1885882
gagcucauuucugaagagu

SEQ ID NO: 2374827 - RNA, 19 nt, Artificial Sequence
  Description of Artificial Sequence: Synthetic oligonucleotide
  Antisense strand to SEQ ID NO: 2374826
acucuucagaaaugagcuc

SEQ ID NO: 2374828 - RNA, 19 nt, Artificial Sequence
  Description of Artificial Sequence: Synthetic oligonucleotide
  Sense strand starting at position 3419 of SEQ ID NO: 1885882
acaacaguacguuaaguua

SEQ ID NO: 2374829 - RNA, 19 nt, Artificial Sequence
  Description of Artificial Sequence: Synthetic oligonucleotide
  Antisense strand to SEQ ID NO: 2374828
uaacuuaacguacuguugu

SEQ ID NO: 2374830 - RNA, 19 nt, Artificial Sequence
  Description of Artificial Sequence: Synthetic oligonucleotide
  Sense strand starting at position 3427 of SEQ ID NO: 1885882
acguuaaguuacuagacua

SEQ ID NO: 2374831 - RNA, 19 nt, Artificial Sequence
  Description of Artificial Sequence: Synthetic oligonucleotide
  Antisense strand to SEQ ID NO: 2374830
uagucuaguaacuuaacgu

SEQ ID NO: 2374832 - RNA, 19 nt, Artificial Sequence
  Description of Artificial Sequence: Synthetic oligonucleotide
  Sense strand starting at position 355 of SEQ ID NO: 1885883
guaggcuacuccuggagaa

SEQ ID NO: 2374833 - RNA, 19 nt, Artificial Sequence
  Description of Artificial Sequence: Synthetic oligonucleotide
  Antisense strand to SEQ ID NO: 2374832
uucuccaggaguagccuac

SEQ ID NO: 2374834 - RNA, 19 nt, Artificial Sequence
  Description of Artificial Sequence: Synthetic oligonucleotide
  Sense strand starting at position 356 of SEQ ID NO: 1885883
uaggcuacuccuggagaaa

SEQ ID NO: 2374835 - RNA, 19 nt, Artificial Sequence
  Description of Artificial Sequence: Synthetic oligonucleotide
  Antisense strand to SEQ ID NO: 2374834
uuucuccaggaguagccua

SEQ ID NO: 2374836 - RNA, 19 nt, Artificial Sequence
  Description of Artificial Sequence: Synthetic oligonucleotide
  Sense strand starting at position 367 of SEQ ID NO: 1885883
uggagaaagcauggcucaa

SEQ ID NO: 2374837 - RNA, 19 nt, Artificial Sequence
  Description of Artificial Sequence: Synthetic oligonucleotide
  Antisense strand to SEQ ID NO: 2374836
uugagccaugcuuucucca

SEQ ID NO: 2374838 - RNA, 19 nt, Artificial Sequence
  Description of Artificial Sequence: Synthetic oligonucleotide
  Sense strand starting at position 369 of SEQ ID NO: 1885883
gagaaagcauggcucaaga

SEQ ID NO: 2374839 - RNA, 19 nt, Artificial Sequence
  Description of Artificial Sequence: Synthetic oligonucleotide
  Antisense strand to SEQ ID NO: 2374838
ucuugagccaugcuuucuc

SEQ ID NO: 2374840 - RNA, 19 nt, Artificial Sequence
  Description of Artificial Sequence: Synthetic oligonucleotide
  Sense strand starting at position 414 of SEQ ID NO: 1885883
ugccuugucccuguaguca

SEQ ID NO: 2374841 - RNA, 19 nt, Artificial Sequence
  Description of Artificial Sequence: Synthetic oligonucleotide
  Antisense strand to SEQ ID NO: 2374840
ugacuacagggacaaggca

SEQ ID NO: 2374842 - RNA, 19 nt, Artificial Sequence
  Description of Artificial Sequence: Synthetic oligonucleotide
  Sense strand starting at position 463 of SEQ ID NO: 1885883
caaagaagcuccuguaagu

SEQ ID NO: 2374843 - RNA, 19 nt, Artificial Sequence
  Description of Artificial Sequence: Synthetic oligonucleotide
  Antisense strand to SEQ ID NO: 2374842
acuuacaggagcuucuuug

SEQ ID NO: 2374844 - RNA, 19 nt, Artificial Sequence
  Description of Artificial Sequence: Synthetic oligonucleotide
  Sense strand starting at position 531 of SEQ ID NO: 1885883
guggacuucuacucuuaug

SEQ ID NO: 2374845 - RNA, 19 nt, Artificial Sequence
  Description of Artificial Sequence: Synthetic oligonucleotide
  Antisense strand to SEQ ID NO: 2374844
cauaagaguagaaguccac

SEQ ID NO: 2374846 - RNA, 19 nt, Artificial Sequence
  Description of Artificial Sequence: Synthetic oligonucleotide
  Sense strand starting at position 722 of SEQ ID NO: 1885883
ggagcauaguuagugcuua

SEQ ID NO: 2374847 - RNA, 19 nt, Artificial Sequence
  Description of Artificial Sequence: Synthetic oligonucleotide
  Antisense strand to SEQ ID NO: 2374846
uaagcacuaacuaugcucc

SEQ ID NO: 2374848 - RNA, 19 nt, Artificial Sequence
  Description of Artificial Sequence: Synthetic oligonucleotide
  Sense strand starting at position 723 of SEQ ID NO: 1885883
gagcauaguuagugcuuau

SEQ ID NO: 2374849 - RNA, 19 nt, Artificial Sequence
  Description of Artificial Sequence: Synthetic oligonucleotide
  Antisense strand to SEQ ID NO: 2374848
auaagcacuaacuaugcuc

SEQ ID NO: 2374850 - RNA, 19 nt, Artificial Sequence
  Description of Artificial Sequence: Synthetic oligonucleotide
  Sense strand starting at position 730 of SEQ ID NO: 1885883
guuagugcuuauuaaauag

SEQ ID NO: 2374851 - RNA, 19 nt, Artificial Sequence
  Description of Artificial Sequence: Synthetic oligonucleotide
  Antisense strand to SEQ ID NO: 2374850
cuauuuaauaagcacuaac

SEQ ID NO: 2374852 - RNA, 19 nt, Artificial Sequence
  Description of Artificial Sequence: Synthetic oligonucleotide
  Sense strand starting at position 745 of SEQ ID NO: 1885883
auaguaucaugauaacaug

SEQ ID NO: 2374853 - RNA, 19 nt, Artificial Sequence
  Description of Artificial Sequence: Synthetic oligonucleotide
  Antisense strand to SEQ ID NO: 2374852
cauguuaucaugauacuau

SEQ ID NO: 2374854 - RNA, 19 nt, Artificial Sequence
  Description of Artificial Sequence: Synthetic oligonucleotide
  Sense strand starting at position 926 of SEQ ID NO: 1885883
uuuccugcugucugcagaa

SEQ ID NO: 2374855 - RNA, 19 nt, Artificial Sequence
  Description of Artificial Sequence: Synthetic oligonucleotide
  Antisense strand to SEQ ID NO: 2374854
uucugcagacagcaggaaa

SEQ ID NO: 2374856 - RNA, 19 nt, Artificial Sequence
  Description of Artificial Sequence: Synthetic oligonucleotide
  Sense strand starting at position 928 of SEQ ID NO: 1885883
uccugcugucugcagaaua

SEQ ID NO: 2374857 - RNA, 19 nt, Artificial Sequence
  Description of Artificial Sequence: Synthetic oligonucleotide
  Antisense strand to SEQ ID NO: 2374856
uauucugcagacagcagga

SEQ ID NO: 2374858 - RNA, 19 nt, Artificial Sequence
  Description of Artificial Sequence: Synthetic oligonucleotide
  Sense strand starting at position 2105 of SEQ ID NO: 1885883
ggagccuccucgugacuca

SEQ ID NO: 2374859 - RNA, 19 nt, Artificial Sequence
  Description of Artificial Sequence: Synthetic oligonucleotide
  Antisense strand to SEQ ID NO: 2374858
ugagucacgaggaggcucc

SEQ ID NO: 2374860 - RNA, 19 nt, Artificial Sequence
  Description of Artificial Sequence: Synthetic oligonucleotide
  Sense strand starting at position 2631 of SEQ ID NO: 1885883
ugagguggguccuggucau

SEQ ID NO: 2374861 - RNA, 19 nt, Artificial Sequence
  Description of Artificial Sequence: Synthetic oligonucleotide
  Antisense strand to SEQ ID NO: 2374860
augaccaggacccaccuca

SEQ ID NO: 2374862 - RNA, 19 nt, Artificial Sequence
  Description of Artificial Sequence: Synthetic oligonucleotide
  Sense strand starting at position 2908 of SEQ ID NO: 1885883
ccuggagucaccugagugu

SEQ ID NO: 2374863 - RNA, 19 nt, Artificial Sequence
  Description of Artificial Sequence: Synthetic oligonucleotide
  Antisense strand to SEQ ID NO: 2374862
acacucaggugacuccagg

SEQ ID NO: 2374864 - RNA, 19 nt, Artificial Sequence
  Description of Artificial Sequence: Synthetic oligonucleotide
  Sense strand starting at position 3039 of SEQ ID NO: 1885883
cugccucauuccuagagga

SEQ ID NO: 2374865 - RNA, 19 nt, Artificial Sequence
  Description of Artificial Sequence: Synthetic oligonucleotide
  Antisense strand to SEQ ID NO: 2374864
uccucuaggaaugaggcag

SEQ ID NO: 2374866 - RNA, 19 nt, Artificial Sequence
  Description of Artificial Sequence: Synthetic oligonucleotide
  Sense strand starting at position 3344 of SEQ ID NO: 1885883
cgccgcauuucucuggcaa

SEQ ID NO: 2374867 - RNA, 19 nt, Artificial Sequence
  Description of Artificial Sequence: Synthetic oligonucleotide
  Antisense strand to SEQ ID NO: 2374866
uugccagagaaaugcggcg

SEQ ID NO: 2374868 - RNA, 19 nt, Artificial Sequence
  Description of Artificial Sequence: Synthetic oligonucleotide
  Sense strand starting at position 3345 of SEQ ID NO: 1885883
gccgcauuucucuggcaac

SEQ ID NO: 2374869 - RNA, 19 nt, Artificial Sequence
  Description of Artificial Sequence: Synthetic oligonucleotide
  Antisense strand to SEQ ID NO: 2374868
guugccagagaaaugcggc

SEQ ID NO: 2374870 - RNA, 19 nt, Artificial Sequence
  Description of Artificial Sequence: Synthetic oligonucleotide
  Sense strand starting at position 3474 of SEQ ID NO: 1885883
guuccuauucuggaaggca

SEQ ID NO: 2374871 - RNA, 19 nt, Artificial Sequence
  Description of Artificial Sequence: Synthetic oligonucleotide
  Antisense strand to SEQ ID NO: 2374870
ugccuuccagaauaggaac

SEQ ID NO: 2374872 - RNA, 19 nt, Artificial Sequence
  Description of Artificial Sequence: Synthetic oligonucleotide
  Sense strand starting at position 3541 of SEQ ID NO: 1885883
ccuugcuagcgggaagagu

SEQ ID NO: 2374873 - RNA, 19 nt, Artificial Sequence
  Description of Artificial Sequence: Synthetic oligonucleotide
  Antisense strand to SEQ ID NO: 2374872
acucuucccgcuagcaagg

SEQ ID NO: 2374874 - RNA, 19 nt, Artificial Sequence
  Description of Artificial Sequence: Synthetic oligonucleotide
  Sense strand starting at position 3550 of SEQ ID NO: 1885883
cgggaagagugucugcuaa

SEQ ID NO: 2374875 - RNA, 19 nt, Artificial Sequence
  Description of Artificial Sequence: Synthetic oligonucleotide
  Antisense strand to SEQ ID NO: 2374874
uuagcagacacucuucccg

SEQ ID NO: 2374876 - RNA, 19 nt, Artificial Sequence
  Description of Artificial Sequence: Synthetic oligonucleotide
  Sense strand starting at position 3552 of SEQ ID NO: 1885883
ggaagagugucugcuaagg

SEQ ID NO: 2374877 - RNA, 19 nt, Artificial Sequence
  Description of Artificial Sequence: Synthetic oligonucleotide
  Antisense strand to SEQ ID NO: 2374876
ccuuagcagacacucuucc

SEQ ID NO: 2374878 - RNA, 19 nt, Artificial Sequence
  Description of Artificial Sequence: Synthetic oligonucleotide
  Sense strand starting at position 3554 of SEQ ID NO: 1885883
aagagugucugcuaaggac

SEQ ID NO: 2374879 - RNA, 19 nt, Artificial Sequence
  Description of Artificial Sequence: Synthetic oligonucleotide
  Antisense strand to SEQ ID NO: 2374878
guccuuagcagacacucuu

SEQ ID NO: 2374880 - RNA, 19 nt, Artificial Sequence
  Description of Artificial Sequence: Synthetic oligonucleotide
  Sense strand starting at position 3590 of SEQ ID NO: 1885883
ucauguucccuuugagucu

SEQ ID NO: 2374881 - RNA, 19 nt, Artificial Sequence
  Description of Artificial Sequence: Synthetic oligonucleotide
  Antisense strand to SEQ ID NO: 2374880
agacucaaagggaacauga

SEQ ID NO: 2374882 - RNA, 19 nt, Artificial Sequence
  Description of Artificial Sequence: Synthetic oligonucleotide
  Sense strand starting at position 3599 of SEQ ID NO: 1885883
cuuugagucuagggacaca

SEQ ID NO: 2374883 - RNA, 19 nt, Artificial Sequence
  Description of Artificial Sequence: Synthetic oligonucleotide
  Antisense strand to SEQ ID NO: 2374882
ugugucccuagacucaaag

SEQ ID NO: 2374884 - RNA, 19 nt, Artificial Sequence
  Description of Artificial Sequence: Synthetic oligonucleotide
  Sense strand starting at position 3610 of SEQ ID NO: 1885883
gggacacaugcuggguuaa

SEQ ID NO: 2374885 - RNA, 19 nt, Artificial Sequence
  Description of Artificial Sequence: Synthetic oligonucleotide
  Antisense strand to SEQ ID NO: 2374884
uuaacccagcauguguccc

SEQ ID NO: 2374886 - RNA, 19 nt, Artificial Sequence
  Description of Artificial Sequence: Synthetic oligonucleotide
  Sense strand starting at position 3611 of SEQ ID NO: 1885883
ggacacaugcuggguuaaa

SEQ ID NO: 2374887 - RNA, 19 nt, Artificial Sequence
  Description of Artificial Sequence: Synthetic oligonucleotide
  Antisense strand to SEQ ID NO: 2374886
uuuaacccagcaugugucc

SEQ ID NO: 2374888 - RNA, 19 nt, Artificial Sequence
  Description of Artificial Sequence: Synthetic oligonucleotide
  Sense strand starting at position 3667 of SEQ ID NO: 1885883
accucaaguuggugauugu

SEQ ID NO: 2374889 - RNA, 19 nt, Artificial Sequence
  Description of Artificial Sequence: Synthetic oligonucleotide
  Antisense strand to SEQ ID NO: 2374888
acaaucaccaacuugaggu

SEQ ID NO: 2374890 - RNA, 19 nt, Artificial Sequence
  Description of Artificial Sequence: Synthetic oligonucleotide
  Sense strand starting at position 3668 of SEQ ID NO: 1885883
ccucaaguuggugauuguu

SEQ ID NO: 2374891 - RNA, 19 nt, Artificial Sequence
  Description of Artificial Sequence: Synthetic oligonucleotide
  Antisense strand to SEQ ID NO: 2374890
aacaaucaccaacuugagg

SEQ ID NO: 2374892 - RNA, 19 nt, Artificial Sequence
  Description of Artificial Sequence: Synthetic oligonucleotide
  Sense strand starting at position 3736 of SEQ ID NO: 1885883
ggcugcuggcugucggaaa

SEQ ID NO: 2374893 - RNA, 19 nt, Artificial Sequence
  Description of Artificial Sequence: Synthetic oligonucleotide
  Antisense strand to SEQ ID NO: 2374892
uuuccgacagccagcagcc

SEQ ID NO: 2374894 - RNA, 19 nt, Artificial Sequence
  Description of Artificial Sequence: Synthetic oligonucleotide
  Sense strand starting at position 3775 of SEQ ID NO: 1885883
gggacucaucacuggucuu

SEQ ID NO: 2374895 - RNA, 19 nt, Artificial Sequence
  Description of Artificial Sequence: Synthetic oligonucleotide
  Antisense strand to SEQ ID NO: 2374894
aagaccagugaugaguccc

SEQ ID NO: 2374896 - RNA, 19 nt, Artificial Sequence
  Description of Artificial Sequence: Synthetic oligonucleotide
  Sense strand starting at position 3822 of SEQ ID NO: 1885883
gcugaacuguauucccaga

SEQ ID NO: 2374897 - RNA, 19 nt, Artificial Sequence
  Description of Artificial Sequence: Synthetic oligonucleotide
  Antisense strand to SEQ ID NO: 2374896
ucugggaauacaguucagc

SEQ ID NO: 2374898 - RNA, 19 nt, Artificial Sequence
  Description of Artificial Sequence: Synthetic oligonucleotide
  Sense strand starting at position 3841 of SEQ ID NO: 1885883
gcacguugcuguaggaguu

SEQ ID NO: 2374899 - RNA, 19 nt, Artificial Sequence
  Description of Artificial Sequence: Synthetic oligonucleotide
  Antisense strand to SEQ ID NO: 2374898
aacuccuacagcaacgugc

SEQ ID NO: 2374900 - RNA, 19 nt, Artificial Sequence
  Description of Artificial Sequence: Synthetic oligonucleotide
  Sense strand starting at position 3936 of SEQ ID NO: 1885883
aaugcagucucgcgaucuu

SEQ ID NO: 2374901 - RNA, 19 nt, Artificial Sequence
  Description of Artificial Sequence: Synthetic oligonucleotide
  Antisense strand to SEQ ID NO: 2374900
aagaucgcgagacugcauu

SEQ ID NO: 2374902 - RNA, 19 nt, Artificial Sequence
  Description of Artificial Sequence: Synthetic oligonucleotide
  Sense strand starting at position 17 of SEQ ID NO: 1885884
gucuuugagcuacagaaca

SEQ ID NO: 2374903 - RNA, 19 nt, Artificial Sequence
  Description of Artificial Sequence: Synthetic oligonucleotide
  Antisense strand to SEQ ID NO: 2374902
uguucuguagcucaaagac

SEQ ID NO: 2374904 - RNA, 19 nt, Artificial Sequence
  Description of Artificial Sequence: Synthetic oligonucleotide
  Sense strand starting at position 50 of SEQ ID NO: 1885884
agacacuucuugucuauag

SEQ ID NO: 2374905 - RNA, 19 nt, Artificial Sequence
  Description of Artificial Sequence: Synthetic oligonucleotide
  Antisense strand to SEQ ID NO: 2374904
cuauagacaagaagugucu

SEQ ID NO: 2374906 - RNA, 19 nt, Artificial Sequence
  Description of Artificial Sequence: Synthetic oligonucleotide
  Sense strand starting at position 414 of SEQ ID NO: 1885884
ugauuacuaagcuguggau

SEQ ID NO: 2374907 - RNA, 19 nt, Artificial Sequence
  Description of Artificial Sequence: Synthetic oligonucleotide
  Antisense strand to SEQ ID NO: 2374906
auccacagcuuaguaauca

SEQ ID NO: 2374908 - RNA, 19 nt, Artificial Sequence
  Description of Artificial Sequence: Synthetic oligonucleotide
  Sense strand starting at position 528 of SEQ ID NO: 1885884
guuguaaucuuucuggaua

SEQ ID NO: 2374909 - RNA, 19 nt, Artificial Sequence
  Description of Artificial Sequence: Synthetic oligonucleotide
  Antisense strand to SEQ ID NO: 2374908
uauccagaaagauuacaac

SEQ ID NO: 2374910 - RNA, 19 nt, Artificial Sequence
  Description of Artificial Sequence: Synthetic oligonucleotide
  Sense strand starting at position 531 of SEQ ID NO: 1885884
guaaucuuucuggauaucu

SEQ ID NO: 2374911 - RNA, 19 nt, Artificial Sequence
  Description of Artificial Sequence: Synthetic oligonucleotide
  Antisense strand to SEQ ID NO: 2374910
agauauccagaaagauuac

SEQ ID NO: 2374912 - RNA, 19 nt, Artificial Sequence
  Description of Artificial Sequence: Synthetic oligonucleotide
  Sense strand starting at position 631 of SEQ ID NO: 1885884
guaguauacaguuauauga

SEQ ID NO: 2374913 - RNA, 19 nt, Artificial Sequence
  Description of Artificial Sequence: Synthetic oligonucleotide
  Antisense strand to SEQ ID NO: 2374912
ucauauaacuguauacuac

SEQ ID NO: 2374914 - RNA, 19 nt, Artificial Sequence
  Description of Artificial Sequence: Synthetic oligonucleotide
  Sense strand starting at position 639 of SEQ ID NO: 1885884
caguuauaugaauaagcug

SEQ ID NO: 2374915 - RNA, 19 nt, Artificial Sequence
  Description of Artificial Sequence: Synthetic oligonucleotide
  Antisense strand to SEQ ID NO: 2374914
cagcuuauucauauaacug

SEQ ID NO: 2374916 - RNA, 19 nt, Artificial Sequence
  Description of Artificial Sequence: Synthetic oligonucleotide
  Sense strand starting at position 818 of SEQ ID NO: 1885884
ucaguagagacugauguuu

SEQ ID NO: 2374917 - RNA, 19 nt, Artificial Sequence
  Description of Artificial Sequence: Synthetic oligonucleotide
  Antisense strand to SEQ ID NO: 2374916
aaacaucagucucuacuga

SEQ ID NO: 2374918 - RNA, 19 nt, Artificial Sequence
  Description of Artificial Sequence: Synthetic oligonucleotide
  Sense strand starting at position 883 of SEQ ID NO: 1885884
gucccauuucugcaucuuu

SEQ ID NO: 2374919 - RNA, 19 nt, Artificial Sequence
  Description of Artificial Sequence: Synthetic oligonucleotide
  Antisense strand to SEQ ID NO: 2374918
aaagaugcagaaaugggac

SEQ ID NO: 2374920 - RNA, 19 nt, Artificial Sequence
  Description of Artificial Sequence: Synthetic oligonucleotide
  Sense strand starting at position 934 of SEQ ID NO: 1885884
agcuauucuauggaguguu

SEQ ID NO: 2374921 - RNA, 19 nt, Artificial Sequence
  Description of Artificial Sequence: Synthetic oligonucleotide
  Antisense strand to SEQ ID NO: 2374920
aacacuccauagaauagcu

SEQ ID NO: 2374922 - RNA, 19 nt, Artificial Sequence
  Description of Artificial Sequence: Synthetic oligonucleotide
  Sense strand starting at position 937 of SEQ ID NO: 1885884
uauucuauggaguguuuaa

SEQ ID NO: 2374923 - RNA, 19 nt, Artificial Sequence
  Description of Artificial Sequence: Synthetic oligonucleotide
  Antisense strand to SEQ ID NO: 2374922
uuaaacacuccauagaaua

SEQ ID NO: 2374924 - RNA, 19 nt, Artificial Sequence
  Description of Artificial Sequence: Synthetic oligonucleotide
  Sense strand starting at position 1046 of SEQ ID NO: 1885884
gcguauuauguggagaaug

SEQ ID NO: 2374925 - RNA, 19 nt, Artificial Sequence
  Description of Artificial Sequence: Synthetic oligonucleotide
  Antisense strand to SEQ ID NO: 2374924
cauucuccacauaauacgc

SEQ ID NO: 2374926 - RNA, 19 nt, Artificial Sequence
  Description of Artificial Sequence: Synthetic oligonucleotide
  Sense strand starting at position 1051 of SEQ ID NO: 1885884
uuauguggagaaugauuau

SEQ ID NO: 2374927 - RNA, 19 nt, Artificial Sequence
  Description of Artificial Sequence: Synthetic oligonucleotide
  Antisense strand to SEQ ID NO: 2374926
auaaucauucuccacauaa

SEQ ID NO: 2374928 - RNA, 19 nt, Artificial Sequence
  Description of Artificial Sequence: Synthetic oligonucleotide
  Sense strand starting at position 1131 of SEQ ID NO: 1885884
auccauuuauauggaugaa

SEQ ID NO: 2374929 - RNA, 19 nt, Artificial Sequence
  Description of Artificial Sequence: Synthetic oligonucleotide
  Antisense strand to SEQ ID NO: 2374928
uucauccauauaaauggau

SEQ ID NO: 2374930 - RNA, 19 nt, Artificial Sequence
  Description of Artificial Sequence: Synthetic oligonucleotide
  Sense strand starting at position 1164 of SEQ ID NO: 1885884
guaguauacauguauaaug

SEQ ID NO: 2374931 - RNA, 19 nt, Artificial Sequence
  Description of Artificial Sequence: Synthetic oligonucleotide
  Antisense strand to SEQ ID NO: 2374930
cauuauacauguauacuac

SEQ ID NO: 2374932 - RNA, 19 nt, Artificial Sequence
  Description of Artificial Sequence: Synthetic oligonucleotide
  Sense strand starting at position 1232 of SEQ ID NO: 1885884
auagaugcuccuugaagac

SEQ ID NO: 2374933 - RNA, 19 nt, Artificial Sequence
  Description of Artificial Sequence: Synthetic oligonucleotide
  Antisense strand to SEQ ID NO: 2374932
gucuucaaggagcaucuau

SEQ ID NO: 2374934 - RNA, 19 nt, Artificial Sequence
  Description of Artificial Sequence: Synthetic oligonucleotide
  Sense strand starting at position 1380 of SEQ ID NO: 1885884
gggaguuacuguguaacag

SEQ ID NO: 2374935 - RNA, 19 nt, Artificial Sequence
  Description of Artificial Sequence: Synthetic oligonucleotide
  Antisense strand to SEQ ID NO: 2374934
cuguuacacaguaacuccc

SEQ ID NO: 2374936 - RNA, 19 nt, Artificial Sequence
  Description of Artificial Sequence: Synthetic oligonucleotide
  Sense strand starting at position 1657 of SEQ ID NO: 1885884
ucagcaauaggcugaaaca

SEQ ID NO: 2374937 - RNA, 19 nt, Artificial Sequence
  Description of Artificial Sequence: Synthetic oligonucleotide
  Antisense strand to SEQ ID NO: 2374936
uguuucagccuauugcuga

SEQ ID NO: 2374938 - RNA, 19 nt, Artificial Sequence
  Description of Artificial Sequence: Synthetic oligonucleotide
  Sense strand starting at position 2013 of SEQ ID NO: 1885884
ccggaagcccgagauguaa

SEQ ID NO: 2374939 - RNA, 19 nt, Artificial Sequence
  Description of Artificial Sequence: Synthetic oligonucleotide
  Antisense strand to SEQ ID NO: 2374938
uuacaucucgggcuuccgg

SEQ ID NO: 2374940 - RNA, 19 nt, Artificial Sequence
  Description of Artificial Sequence: Synthetic oligonucleotide
  Sense strand starting at position 2062 of SEQ ID NO: 1885884
cugauugggcuuuggagau

SEQ ID NO: 2374941 - RNA, 19 nt, Artificial Sequence
  Description of Artificial Sequence: Synthetic oligonucleotide
  Antisense strand to SEQ ID NO: 2374940
aucuccaaagcccaaucag

SEQ ID NO: 2374942 - RNA, 19 nt, Artificial Sequence
  Description of Artificial Sequence: Synthetic oligonucleotide
  Sense strand starting at position 2468 of SEQ ID NO: 1885884
auaaauacguucccaaaug

SEQ ID NO: 2374943 - RNA, 19 nt, Artificial Sequence
  Description of Artificial Sequence: Synthetic oligonucleotide
  Antisense strand to SEQ ID NO: 2374942
cauuugggaacguauuuau

SEQ ID NO: 2374944 - RNA, 19 nt, Artificial Sequence
  Description of Artificial Sequence: Synthetic oligonucleotide
  Sense strand starting at position 2783 of SEQ ID NO: 1885884
guagcuuuacgauauccca

SEQ ID NO: 2374945 - RNA, 19 nt, Artificial Sequence
  Description of Artificial Sequence: Synthetic oligonucleotide
  Antisense strand to SEQ ID NO: 2374944
ugggauaucguaaagcuac

SEQ ID NO: 2374946 - RNA, 19 nt, Artificial Sequence
  Description of Artificial Sequence: Synthetic oligonucleotide
  Sense strand starting at position 2805 of SEQ ID NO: 1885884
aagcgaagugcuuaagaau

SEQ ID NO: 2374947 - RNA, 19 nt, Artificial Sequence
  Description of Artificial Sequence: Synthetic oligonucleotide
  Antisense strand to SEQ ID NO: 2374946
auucuuaagcacuucgcuu

SEQ ID NO: 2374948 - RNA, 19 nt, Artificial Sequence
  Description of Artificial Sequence: Synthetic oligonucleotide
  Sense strand starting at position 2931 of SEQ ID NO: 1885884
gggaaauggucucuucuac

SEQ ID NO: 2374949 - RNA, 19 nt, Artificial Sequence
  Description of Artificial Sequence: Synthetic oligonucleotide
  Antisense strand to SEQ ID NO: 2374948
guagaagagaccauuuccc

SEQ ID NO: 2374950 - RNA, 19 nt, Artificial Sequence
  Description of Artificial Sequence: Synthetic oligonucleotide
  Sense strand starting at position 3035 of SEQ ID NO: 1885884
aggguucuguuaucauuac

SEQ ID NO: 2374951 - RNA, 19 nt, Artificial Sequence
  Description of Artificial Sequence: Synthetic oligonucleotide
  Antisense strand to SEQ ID NO: 2374950
guaaugauaacagaacccu

SEQ ID NO: 2374952 - RNA, 19 nt, Artificial Sequence
  Description of Artificial Sequence: Synthetic oligonucleotide
  Sense strand starting at position 3042 of SEQ ID NO: 1885884
uguuaucauuacccagaga

SEQ ID NO: 2374953 - RNA, 19 nt, Artificial Sequence
  Description of Artificial Sequence: Synthetic oligonucleotide
  Antisense strand to SEQ ID NO: 2374952
ucucuggguaaugauaaca

SEQ ID NO: 2374954 - RNA, 19 nt, Artificial Sequence
  Description of Artificial Sequence: Synthetic oligonucleotide
  Sense strand starting at position 3055 of SEQ ID NO: 1885884
cagagaagcggaugaaauu

SEQ ID NO: 2374955 - RNA, 19 nt, Artificial Sequence
  Description of Artificial Sequence: Synthetic oligonucleotide
  Antisense strand to SEQ ID NO: 2374954
aauuucauccgcuucucug

SEQ ID NO: 2374956 - RNA, 19 nt, Artificial Sequence
  Description of Artificial Sequence: Synthetic oligonucleotide
  Sense strand starting at position 3184 of SEQ ID NO: 1885884
uuuaaaguaugucccacaa

SEQ ID NO: 2374957 - RNA, 19 nt, Artificial Sequence
  Description of Artificial Sequence: Synthetic oligonucleotide
  Antisense strand to SEQ ID NO: 2374956
uugugggacauacuuuaaa

SEQ ID NO: 2374958 - RNA, 19 nt, Artificial Sequence
  Description of Artificial Sequence: Synthetic oligonucleotide
  Sense strand starting at position 3302 of SEQ ID NO: 1885884
gccacccaugcagauaaau

SEQ ID NO: 2374959 - RNA, 19 nt, Artificial Sequence
  Description of Artificial Sequence: Synthetic oligonucleotide
  Antisense strand to SEQ ID NO: 2374958
auuuaucugcauggguggc

SEQ ID NO: 2374960 - RNA, 19 nt, Artificial Sequence
  Description of Artificial Sequence: Synthetic oligonucleotide
  Sense strand starting at position 3331 of SEQ ID NO: 1885884
ugucacugucaagauuaag

SEQ ID NO: 2374961 - RNA, 19 nt, Artificial Sequence
  Description of Artificial Sequence: Synthetic oligonucleotide
  Antisense strand to SEQ ID NO: 2374960
cuuaaucuugacagugaca

SEQ ID NO: 2374962 - RNA, 19 nt, Artificial Sequence
  Description of Artificial Sequence: Synthetic oligonucleotide
  Sense strand starting at position 3478 of SEQ ID NO: 1885884
gucagacaguagcuuauaa

SEQ ID NO: 2374963 - RNA, 19 nt, Artificial Sequence
  Description of Artificial Sequence: Synthetic oligonucleotide
  Antisense strand to SEQ ID NO: 2374962
uuauaagcuacugucugac

SEQ ID NO: 2374964 - RNA, 19 nt, Artificial Sequence
  Description of Artificial Sequence: Synthetic oligonucleotide
  Sense strand starting at position 3493 of SEQ ID NO: 1885884
auaaucuacugggaagaaa

SEQ ID NO: 2374965 - RNA, 19 nt, Artificial Sequence
  Description of Artificial Sequence: Synthetic oligonucleotide
  Antisense strand to SEQ ID NO: 2374964
uuucuucccaguagauuau

SEQ ID NO: 2374966 - RNA, 19 nt, Artificial Sequence
  Description of Artificial Sequence: Synthetic oligonucleotide
  Sense strand starting at position 3604 of SEQ ID NO: 1885884
aguaguuauuuccuucguu

SEQ ID NO: 2374967 - RNA, 19 nt, Artificial Sequence
  Description of Artificial Sequence: Synthetic oligonucleotide
  Antisense strand to SEQ ID NO: 2374966
aacgaaggaaauaacuacu

SEQ ID NO: 2374968 - RNA, 19 nt, Artificial Sequence
  Description of Artificial Sequence: Synthetic oligonucleotide
  Sense strand starting at position 3605 of SEQ ID NO: 1885884
guaguuauuuccuucguuu

SEQ ID NO: 2374969 - RNA, 19 nt, Artificial Sequence
  Description of Artificial Sequence: Synthetic oligonucleotide
  Antisense strand to SEQ ID NO: 2374968
aaacgaaggaaauaacuac

SEQ ID NO: 2374970 - RNA, 19 nt, Artificial Sequence
  Description of Artificial Sequence: Synthetic oligonucleotide
  Sense strand starting at position 3659 of SEQ ID NO: 1885884
guguuagaugugcaguaga

SEQ ID NO: 2374971 - RNA, 19 nt, Artificial Sequence
  Description of Artificial Sequence: Synthetic oligonucleotide
  Antisense strand to SEQ ID NO: 2374970
ucuacugcacaucuaacac

SEQ ID NO: 2374972 - RNA, 19 nt, Artificial Sequence
  Description of Artificial Sequence: Synthetic oligonucleotide
  Sense strand starting at position 3662 of SEQ ID NO: 1885884
uuagaugugcaguagaaca

SEQ ID NO: 2374973 - RNA, 19 nt, Artificial Sequence
  Description of Artificial Sequence: Synthetic oligonucleotide
  Antisense strand to SEQ ID NO: 2374972
uguucuacugcacaucuaa

SEQ ID NO: 2374974 - RNA, 19 nt, Artificial Sequence
  Description of Artificial Sequence: Synthetic oligonucleotide
  Sense strand starting at position 3680 of SEQ ID NO: 1885884
aucaucaugcugggaaguu

SEQ ID NO: 2374975 - RNA, 19 nt, Artificial Sequence
  Description of Artificial Sequence: Synthetic oligonucleotide
  Antisense strand to SEQ ID NO: 2374974
aacuucccagcaugaugau

SEQ ID NO: 2374976 - RNA, 19 nt, Artificial Sequence
  Description of Artificial Sequence: Synthetic oligonucleotide
  Sense strand starting at position 3720 of SEQ ID NO: 1885884
ggugguauuaccuaugagc

SEQ ID NO: 2374977 - RNA, 19 nt, Artificial Sequence
  Description of Artificial Sequence: Synthetic oligonucleotide
  Antisense strand to SEQ ID NO: 2374976
gcucauagguaauaccacc

SEQ ID NO: 2374978 - RNA, 19 nt, Artificial Sequence
  Description of Artificial Sequence: Synthetic oligonucleotide
  Sense strand starting at position 3823 of SEQ ID NO: 1885884
auagucauuccuggaauga

SEQ ID NO: 2374979 - RNA, 19 nt, Artificial Sequence
  Description of Artificial Sequence: Synthetic oligonucleotide
  Antisense strand to SEQ ID NO: 2374978
ucauuccaggaaugacuau

SEQ ID NO: 2374980 - RNA, 19 nt, Artificial Sequence
  Description of Artificial Sequence: Synthetic oligonucleotide
  Sense strand starting at position 3834 of SEQ ID NO: 1885884
uggaaugagugaguuuguu

SEQ ID NO: 2374981 - RNA, 19 nt, Artificial Sequence
  Description of Artificial Sequence: Synthetic oligonucleotide
  Antisense strand to SEQ ID NO: 2374980
aacaaacucacucauucca

SEQ ID NO: 2374982 - RNA, 19 nt, Artificial Sequence
  Description of Artificial Sequence: Synthetic oligonucleotide
  Sense strand starting at position 236 of SEQ ID NO: 1885885
ucacgacauucuuccgaga

SEQ ID NO: 2374983 - RNA, 19 nt, Artificial Sequence
  Description of Artificial Sequence: Synthetic oligonucleotide
  Antisense strand to SEQ ID NO: 2374982
ucucggaagaaugucguga

SEQ ID NO: 2374984 - RNA, 19 nt, Artificial Sequence
  Description of Artificial Sequence: Synthetic oligonucleotide
  Sense strand starting at position 243 of SEQ ID NO: 1885885
auucuuccgagaugagauc

SEQ ID NO: 2374985 - RNA, 19 nt, Artificial Sequence
  Description of Artificial Sequence: Synthetic oligonucleotide
  Antisense strand to SEQ ID NO: 2374984
gaucucaucucggaagaau

SEQ ID NO: 2374986 - RNA, 19 nt, Artificial Sequence
  Description of Artificial Sequence: Synthetic oligonucleotide
  Sense strand starting at position 757 of SEQ ID NO: 1885885
uguagucauauugauggau

SEQ ID NO: 2374987 - RNA, 19 nt, Artificial Sequence
  Description of Artificial Sequence: Synthetic oligonucleotide
  Antisense strand to SEQ ID NO: 2374986
auccaucaauaugacuaca

SEQ ID NO: 2374988 - RNA, 19 nt, Artificial Sequence
  Description of Artificial Sequence: Synthetic oligonucleotide
  Sense strand starting at position 803 of SEQ ID NO: 1885885
cugcgucagauacauguaa

SEQ ID NO: 2374989 - RNA, 19 nt, Artificial Sequence
  Description of Artificial Sequence: Synthetic oligonucleotide
  Antisense strand to SEQ ID NO: 2374988
uuacauguaucugacgcag

SEQ ID NO: 2374990 - RNA, 19 nt, Artificial Sequence
  Description of Artificial Sequence: Synthetic oligonucleotide
  Sense strand starting at position 848 of SEQ ID NO: 1885885
acgacaaggguuuaaguau

SEQ ID NO: 2374991 - RNA, 19 nt, Artificial Sequence
  Description of Artificial Sequence: Synthetic oligonucleotide
  Antisense strand to SEQ ID NO: 2374990
auacuuaaacccuugucgu

SEQ ID NO: 2374992 - RNA, 19 nt, Artificial Sequence
  Description of Artificial Sequence: Synthetic oligonucleotide
  Sense strand starting at position 856 of SEQ ID NO: 1885885
gguuuaaguauauggcaaa

SEQ ID NO: 2374993 - RNA, 19 nt, Artificial Sequence
  Description of Artificial Sequence: Synthetic oligonucleotide
  Antisense strand to SEQ ID NO: 2374992
uuugccauauacuuaaacc

SEQ ID NO: 2374994 - RNA, 19 nt, Artificial Sequence
  Description of Artificial Sequence: Synthetic oligonucleotide
  Sense strand starting at position 868 of SEQ ID NO: 1885885
uggcaaauucugcagcaaa

SEQ ID NO: 2374995 - RNA, 19 nt, Artificial Sequence
  Description of Artificial Sequence: Synthetic oligonucleotide
  Antisense strand to SEQ ID NO: 2374994
uuugcugcagaauuugcca

SEQ ID NO: 2374996 - RNA, 19 nt, Artificial Sequence
  Description of Artificial Sequence: Synthetic oligonucleotide
  Sense strand starting at position 1213 of SEQ ID NO: 1885885
gaaguuaccugguuuaaug

SEQ ID NO: 2374997 - RNA, 19 nt, Artificial Sequence
  Description of Artificial Sequence: Synthetic oligonucleotide
  Antisense strand to SEQ ID NO: 2374996
cauuaaaccagguaacuuc

SEQ ID NO: 2374998 - RNA, 19 nt, Artificial Sequence
  Description of Artificial Sequence: Synthetic oligonucleotide
  Sense strand starting at position 1274 of SEQ ID NO: 1885885
cugaucaucuggucagcua

SEQ ID NO: 2374999 - RNA, 19 nt, Artificial Sequence
  Description of Artificial Sequence: Synthetic oligonucleotide
  Antisense strand to SEQ ID NO: 2374998
uagcugaccagaugaucag

SEQ ID NO: 2375000 - RNA, 19 nt, Artificial Sequence
  Description of Artificial Sequence: Synthetic oligonucleotide
  Sense strand starting at position 1326 of SEQ ID NO: 1885885
aacagaaauuggucuucga

SEQ ID NO: 2375001 - RNA, 19 nt, Artificial Sequence
  Description of Artificial Sequence: Synthetic oligonucleotide
  Antisense strand to SEQ ID NO: 2375000
ucgaagaccaauuucuguu

SEQ ID NO: 2375002 - RNA, 19 nt, Artificial Sequence
  Description of Artificial Sequence: Synthetic oligonucleotide
  Sense strand starting at position 1377 of SEQ ID NO: 1885885
auuauagucuucuuccuga

SEQ ID NO: 2375003 - RNA, 19 nt, Artificial Sequence
  Description of Artificial Sequence: Synthetic oligonucleotide
  Antisense strand to SEQ ID NO: 2375002
ucaggaagaagacuauaau

SEQ ID NO: 2375004 - RNA, 19 nt, Artificial Sequence
  Description of Artificial Sequence: Synthetic oligonucleotide
  Sense strand starting at position 1524 of SEQ ID NO: 1885885
ugcugaucgccagacagau

SEQ ID NO: 2375005 - RNA, 19 nt, Artificial Sequence
  Description of Artificial Sequence: Synthetic oligonucleotide
  Antisense strand to SEQ ID NO: 2375004
aucugucuggcgaucagca

SEQ ID NO: 2375006 - RNA, 19 nt, Artificial Sequence
  Description of Artificial Sequence: Synthetic oligonucleotide
  Sense strand starting at position 1536 of SEQ ID NO: 1885885
gacagaugucuccgaagga

SEQ ID NO: 2375007 - RNA, 19 nt, Artificial Sequence
  Description of Artificial Sequence: Synthetic oligonucleotide
  Antisense strand to SEQ ID NO: 2375006
uccuucggagacaucuguc

SEQ ID NO: 2375008 - RNA, 19 nt, Artificial Sequence
  Description of Artificial Sequence: Synthetic oligonucleotide
  Sense strand starting at position 1540 of SEQ ID NO: 1885885
gaugucuccgaaggagcua

SEQ ID NO: 2375009 - RNA, 19 nt, Artificial Sequence
  Description of Artificial Sequence: Synthetic oligonucleotide
  Antisense strand to SEQ ID NO: 2375008
uagcuccuucggagacauc

SEQ ID NO: 2375010 - RNA, 19 nt, Artificial Sequence
  Description of Artificial Sequence: Synthetic oligonucleotide
  Sense strand starting at position 1578 of SEQ ID NO: 1885885
guuuauauuuccuuccgac

SEQ ID NO: 2375011 - RNA, 19 nt, Artificial Sequence
  Description of Artificial Sequence: Synthetic oligonucleotide
  Antisense strand to SEQ ID NO: 2375010
gucggaaggaaauauaaac

SEQ ID NO: 2375012 - RNA, 19 nt, Artificial Sequence
  Description of Artificial Sequence: Synthetic oligonucleotide
  Sense strand starting at position 1607 of SEQ ID NO: 1885885
gcugcuagccguccugaga

SEQ ID NO: 2375013 - RNA, 19 nt, Artificial Sequence
  Description of Artificial Sequence: Synthetic oligonucleotide
  Antisense strand to SEQ ID NO: 2375012
ucucaggacggcuagcagc

SEQ ID NO: 2375014 - RNA, 19 nt, Artificial Sequence
  Description of Artificial Sequence: Synthetic oligonucleotide
  Sense strand starting at position 1965 of SEQ ID NO: 1885885
cgacgacgccaucuuguua

SEQ ID NO: 2375015 - RNA, 19 nt, Artificial Sequence
  Description of Artificial Sequence: Synthetic oligonucleotide
  Antisense strand to SEQ ID NO: 2375014
uaacaagauggcgucgucg

SEQ ID NO: 2375016 - RNA, 19 nt, Artificial Sequence
  Description of Artificial Sequence: Synthetic oligonucleotide
  Sense strand starting at position 2121 of SEQ ID NO: 1885885
gcgccagaggcuucaguuu

SEQ ID NO: 2375017 - RNA, 19 nt, Artificial Sequence
  Description of Artificial Sequence: Synthetic oligonucleotide
  Antisense strand to SEQ ID NO: 2375016
aaacugaagccucuggcgc

SEQ ID NO: 2375018 - RNA, 19 nt, Artificial Sequence
  Description of Artificial Sequence: Synthetic oligonucleotide
  Sense strand starting at position 2135 of SEQ ID NO: 1885885
aguuuacagaugcgaacau

SEQ ID NO: 2375019 - RNA, 19 nt, Artificial Sequence
  Description of Artificial Sequence: Synthetic oligonucleotide
  Antisense strand to SEQ ID NO: 2375018
auguucgcaucuguaaacu

SEQ ID NO: 2375020 - RNA, 19 nt, Artificial Sequence
  Description of Artificial Sequence: Synthetic oligonucleotide
  Sense strand starting at position 2292 of SEQ ID NO: 1885885
cccauaaguuauguugacu

SEQ ID NO: 2375021 - RNA, 19 nt, Artificial Sequence
  Description of Artificial Sequence: Synthetic oligonucleotide
  Antisense strand to SEQ ID NO: 2375020
agucaacauaacuuauggg

SEQ ID NO: 2375022 - RNA, 19 nt, Artificial Sequence
  Description of Artificial Sequence: Synthetic oligonucleotide
  Sense strand starting at position 2304 of SEQ ID NO: 1885885
guugacuauuuacaaagua

SEQ ID NO: 2375023 - RNA, 19 nt, Artificial Sequence
  Description of Artificial Sequence: Synthetic oligonucleotide
  Antisense strand to SEQ ID NO: 2375022
uacuuuguaaauagucaac

SEQ ID NO: 2375024 - RNA, 19 nt, Artificial Sequence
  Description of Artificial Sequence: Synthetic oligonucleotide
  Sense strand starting at position 2393 of SEQ ID NO: 1885885
guggaaaucagcuaagcau

SEQ ID NO: 2375025 - RNA, 19 nt, Artificial Sequence
  Description of Artificial Sequence: Synthetic oligonucleotide
  Antisense strand to SEQ ID NO: 2375024
augcuuagcugauuuccac

SEQ ID NO: 2375026 - RNA, 19 nt, Artificial Sequence
  Description of Artificial Sequence: Synthetic oligonucleotide
  Sense strand starting at position 2434 of SEQ ID NO: 1885885
uugucaguacuuuacuauc

SEQ ID NO: 2375027 - RNA, 19 nt, Artificial Sequence
  Description of Artificial Sequence: Synthetic oligonucleotide
  Antisense strand to SEQ ID NO: 2375026
gauaguaaaguacugacaa

SEQ ID NO: 2375028 - RNA, 19 nt, Artificial Sequence
  Description of Artificial Sequence: Synthetic oligonucleotide
  Sense strand starting at position 2493 of SEQ ID NO: 1885885
uugccaugagccuaaggau

SEQ ID NO: 2375029 - RNA, 19 nt, Artificial Sequence
  Description of Artificial Sequence: Synthetic oligonucleotide
  Antisense strand to SEQ ID NO: 2375028
auccuuaggcucauggcaa

SEQ ID NO: 2375030 - RNA, 19 nt, Artificial Sequence
  Description of Artificial Sequence: Synthetic oligonucleotide
  Sense strand starting at position 2624 of SEQ ID NO: 1885885
cuucucuuccuguaaggau

SEQ ID NO: 2375031 - RNA, 19 nt, Artificial Sequence
  Description of Artificial Sequence: Synthetic oligonucleotide
  Antisense strand to SEQ ID NO: 2375030
auccuuacaggaagagaag

SEQ ID NO: 2375032 - RNA, 19 nt, Artificial Sequence
  Description of Artificial Sequence: Synthetic oligonucleotide
  Sense strand starting at position 2735 of SEQ ID NO: 1885885
gagccuaguggcuaagaca

SEQ ID NO: 2375033 - RNA, 19 nt, Artificial Sequence
  Description of Artificial Sequence: Synthetic oligonucleotide
  Antisense strand to SEQ ID NO: 2375032
ugucuuagccacuaggcuc

SEQ ID NO: 2375034 - RNA, 19 nt, Artificial Sequence
  Description of Artificial Sequence: Synthetic oligonucleotide
  Sense strand starting at position 2995 of SEQ ID NO: 1885885
auucuacuugaacgauaua

SEQ ID NO: 2375035 - RNA, 19 nt, Artificial Sequence
  Description of Artificial Sequence: Synthetic oligonucleotide
  Antisense strand to SEQ ID NO: 2375034
uauaucguucaaguagaau

SEQ ID NO: 2375036 - RNA, 19 nt, Artificial Sequence
  Description of Artificial Sequence: Synthetic oligonucleotide
  Sense strand starting at position 3162 of SEQ ID NO: 1885885
caggcauauguuuaauuga

SEQ ID NO: 2375037 - RNA, 19 nt, Artificial Sequence
  Description of Artificial Sequence: Synthetic oligonucleotide
  Antisense strand to SEQ ID NO: 2375036
ucaauuaaacauaugccug

SEQ ID NO: 2375038 - RNA, 19 nt, Artificial Sequence
  Description of Artificial Sequence: Synthetic oligonucleotide
  Sense strand starting at position 3165 of SEQ ID NO: 1885885
gcauauguuuaauugauug

SEQ ID NO: 2375039 - RNA, 19 nt, Artificial Sequence
  Description of Artificial Sequence: Synthetic oligonucleotide
  Antisense strand to SEQ ID NO: 2375038
caaucaauuaaacauaugc

SEQ ID NO: 2375040 - RNA, 19 nt, Artificial Sequence
  Description of Artificial Sequence: Synthetic oligonucleotide
  Sense strand starting at position 3190 of SEQ ID NO: 1885885
cagacagaugucugguuua

SEQ ID NO: 2375041 - RNA, 19 nt, Artificial Sequence
  Description of Artificial Sequence: Synthetic oligonucleotide
  Antisense strand to SEQ ID NO: 2375040
uaaaccagacaucugucug

SEQ ID NO: 2375042 - RNA, 19 nt, Artificial Sequence
  Description of Artificial Sequence: Synthetic oligonucleotide
  Sense strand starting at position 3195 of SEQ ID NO: 1885885
agaugucugguuuaacauu

SEQ ID NO: 2375043 - RNA, 19 nt, Artificial Sequence
  Description of Artificial Sequence: Synthetic oligonucleotide
  Antisense strand to SEQ ID NO: 2375042
aauguuaaaccagacaucu

SEQ ID NO: 2375044 - RNA, 19 nt, Artificial Sequence
  Description of Artificial Sequence: Synthetic oligonucleotide
  Sense strand starting at position 3269 of SEQ ID NO: 1885885
acugaagccuuugccauaa

SEQ ID NO: 2375045 - RNA, 19 nt, Artificial Sequence
  Description of Artificial Sequence: Synthetic oligonucleotide
  Antisense strand to SEQ ID NO: 2375044
uuauggcaaaggcuucagu

SEQ ID NO: 2375046 - RNA, 19 nt, Artificial Sequence
  Description of Artificial Sequence: Synthetic oligonucleotide
  Sense strand starting at position 3587 of SEQ ID NO: 1885885
ccuggauucuuccucugau

SEQ ID NO: 2375047 - RNA, 19 nt, Artificial Sequence
  Description of Artificial Sequence: Synthetic oligonucleotide
  Antisense strand to SEQ ID NO: 2375046
aucagaggaagaauccagg

SEQ ID NO: 2375048 - RNA, 19 nt, Artificial Sequence
  Description of Artificial Sequence: Synthetic oligonucleotide
  Sense strand starting at position 3588 of SEQ ID NO: 1885885
cuggauucuuccucugauu

SEQ ID NO: 2375049 - RNA, 19 nt, Artificial Sequence
  Description of Artificial Sequence: Synthetic oligonucleotide
  Antisense strand to SEQ ID NO: 2375048
aaucagaggaagaauccag

SEQ ID NO: 2375050 - RNA, 19 nt, Artificial Sequence
  Description of Artificial Sequence: Synthetic oligonucleotide
  Sense strand starting at position 3590 of SEQ ID NO: 1885885
ggauucuuccucugauuga

SEQ ID NO: 2375051 - RNA, 19 nt, Artificial Sequence
  Description of Artificial Sequence: Synthetic oligonucleotide
  Antisense strand to SEQ ID NO: 2375050
ucaaucagaggaagaaucc

SEQ ID NO: 2375052 - RNA, 19 nt, Artificial Sequence
  Description of Artificial Sequence: Synthetic oligonucleotide
  Sense strand starting at position 3593 of SEQ ID NO: 1885885
uucuuccucugauugauga

SEQ ID NO: 2375053 - RNA, 19 nt, Artificial Sequence
  Description of Artificial Sequence: Synthetic oligonucleotide
  Antisense strand to SEQ ID NO: 2375052
ucaucaaucagaggaagaa

SEQ ID NO: 2375054 - RNA, 19 nt, Artificial Sequence
  Description of Artificial Sequence: Synthetic oligonucleotide
  Sense strand starting at position 3601 of SEQ ID NO: 1885885
cugauugaugacugugaca

SEQ ID NO: 2375055 - RNA, 19 nt, Artificial Sequence
  Description of Artificial Sequence: Synthetic oligonucleotide
  Antisense strand to SEQ ID NO: 2375054
ugucacagucaucaaucag

SEQ ID NO: 2375056 - RNA, 19 nt, Artificial Sequence
  Description of Artificial Sequence: Synthetic oligonucleotide
  Sense strand starting at position 3603 of SEQ ID NO: 1885885
gauugaugacugugacacu

SEQ ID NO: 2375057 - RNA, 19 nt, Artificial Sequence
  Description of Artificial Sequence: Synthetic oligonucleotide
  Antisense strand to SEQ ID NO: 2375056
agugucacagucaucaauc

SEQ ID NO: 2375058 - RNA, 19 nt, Artificial Sequence
  Description of Artificial Sequence: Synthetic oligonucleotide
  Sense strand starting at position 3752 of SEQ ID NO: 1885885
aacacaggccagugauguu

SEQ ID NO: 2375059 - RNA, 19 nt, Artificial Sequence
  Description of Artificial Sequence: Synthetic oligonucleotide
  Antisense strand to SEQ ID NO: 2375058
aacaucacuggccuguguu

SEQ ID NO: 2375060 - RNA, 19 nt, Artificial Sequence
  Description of Artificial Sequence: Synthetic oligonucleotide
  Sense strand starting at position 3762 of SEQ ID NO: 1885885
agugauguuggaggcagau

SEQ ID NO: 2375061 - RNA, 19 nt, Artificial Sequence
  Description of Artificial Sequence: Synthetic oligonucleotide
  Antisense strand to SEQ ID NO: 2375060
aucugccuccaacaucacu

SEQ ID NO: 2375062 - RNA, 19 nt, Artificial Sequence
  Description of Artificial Sequence: Synthetic oligonucleotide
  Sense strand starting at position 260 of SEQ ID NO: 1885886
ucuaaaucacuguaguguu

SEQ ID NO: 2375063 - RNA, 19 nt, Artificial Sequence
  Description of Artificial Sequence: Synthetic oligonucleotide
  Antisense strand to SEQ ID NO: 2375062
aacacuacagugauuuaga

SEQ ID NO: 2375064 - RNA, 19 nt, Artificial Sequence
  Description of Artificial Sequence: Synthetic oligonucleotide
  Sense strand starting at position 644 of SEQ ID NO: 1885886
gcccguaacuauuucgaua

SEQ ID NO: 2375065 - RNA, 19 nt, Artificial Sequence
  Description of Artificial Sequence: Synthetic oligonucleotide
  Antisense strand to SEQ ID NO: 2375064
uaucgaaauaguuacgggc

SEQ ID NO: 2375066 - RNA, 19 nt, Artificial Sequence
  Description of Artificial Sequence: Synthetic oligonucleotide
  Sense strand starting at position 646 of SEQ ID NO: 1885886
ccguaacuauuucgauaua

SEQ ID NO: 2375067 - RNA, 19 nt, Artificial Sequence
  Description of Artificial Sequence: Synthetic oligonucleotide
  Antisense strand to SEQ ID NO: 2375066
uauaucgaaauaguuacgg

SEQ ID NO: 2375068 - RNA, 19 nt, Artificial Sequence
  Description of Artificial Sequence: Synthetic oligonucleotide
  Sense strand starting at position 647 of SEQ ID NO: 1885886
cguaacuauuucgauauaa

SEQ ID NO: 2375069 - RNA, 19 nt, Artificial Sequence
  Description of Artificial Sequence: Synthetic oligonucleotide
  Antisense strand to SEQ ID NO: 2375068
uuauaucgaaauaguuacg

SEQ ID NO: 2375070 - RNA, 19 nt, Artificial Sequence
  Description of Artificial Sequence: Synthetic oligonucleotide
  Sense strand starting at position 720 of SEQ ID NO: 1885886
cugauacauucugaggcua

SEQ ID NO: 2375071 - RNA, 19 nt, Artificial Sequence
  Description of Artificial Sequence: Synthetic oligonucleotide
  Antisense strand to SEQ ID NO: 2375070
uagccucagaauguaucag

SEQ ID NO: 2375072 - RNA, 19 nt, Artificial Sequence
  Description of Artificial Sequence: Synthetic oligonucleotide
  Sense strand starting at position 1004 of SEQ ID NO: 1885886
agauauggaucccagggau

SEQ ID NO: 2375073 - RNA, 19 nt, Artificial Sequence
  Description of Artificial Sequence: Synthetic oligonucleotide
  Antisense strand to SEQ ID NO: 2375072
aucccugggauccauaucu

SEQ ID NO: 2375074 - RNA, 19 nt, Artificial Sequence
  Description of Artificial Sequence: Synthetic oligonucleotide
  Sense strand starting at position 2609 of SEQ ID NO: 1885886
uaugucuguggucaauuga

SEQ ID NO: 2375075 - RNA, 19 nt, Artificial Sequence
  Description of Artificial Sequence: Synthetic oligonucleotide
  Antisense strand to SEQ ID NO: 2375074
ucaauugaccacagacaua

SEQ ID NO: 2375076 - RNA, 19 nt, Artificial Sequence
  Description of Artificial Sequence: Synthetic oligonucleotide
  Sense strand starting at position 2245 of SEQ ID NO: 1885887
cuuucugaguagcaugaua

SEQ ID NO: 2375077 - RNA, 19 nt, Artificial Sequence
  Description of Artificial Sequence: Synthetic oligonucleotide
  Antisense strand to SEQ ID NO: 2375076
uaucaugcuacucagaaag

SEQ ID NO: 2375078 - RNA, 19 nt, Artificial Sequence
  Description of Artificial Sequence: Synthetic oligonucleotide
  Sense strand starting at position 2420 of SEQ ID NO: 1885887
gcauccaauggguguauua

SEQ ID NO: 2375079 - RNA, 19 nt, Artificial Sequence
  Description of Artificial Sequence: Synthetic oligonucleotide
  Antisense strand to SEQ ID NO: 2375078
uaauacacccauuggaugc

SEQ ID NO: 2375080 - RNA, 19 nt, Artificial Sequence
  Description of Artificial Sequence: Synthetic oligonucleotide
  Sense strand starting at position 2427 of SEQ ID NO: 1885887
auggguguauuagaacaua

SEQ ID NO: 2375081 - RNA, 19 nt, Artificial Sequence
  Description of Artificial Sequence: Synthetic oligonucleotide
  Antisense strand to SEQ ID NO: 2375080
uauguucuaauacacccau

SEQ ID NO: 2375082 - RNA, 19 nt, Artificial Sequence
  Description of Artificial Sequence: Synthetic oligonucleotide
  Sense strand starting at position 2430 of SEQ ID NO: 1885887
gguguauuagaacauacuu

SEQ ID NO: 2375083 - RNA, 19 nt, Artificial Sequence
  Description of Artificial Sequence: Synthetic oligonucleotide
  Antisense strand to SEQ ID NO: 2375082
aaguauguucuaauacacc

SEQ ID NO: 2375084 - RNA, 19 nt, Artificial Sequence
  Description of Artificial Sequence: Synthetic oligonucleotide
  Sense strand starting at position 2536 of SEQ ID NO: 1885887
ggaaaugcaugcucuguau

SEQ ID NO: 2375085 - RNA, 19 nt, Artificial Sequence
  Description of Artificial Sequence: Synthetic oligonucleotide
  Antisense strand to SEQ ID NO: 2375084
auacagagcaugcauuucc

SEQ ID NO: 2375086 - RNA, 19 nt, Artificial Sequence
  Description of Artificial Sequence: Synthetic oligonucleotide
  Sense strand starting at position 2542 of SEQ ID NO: 1885887
gcaugcucuguaucuguua

SEQ ID NO: 2375087 - RNA, 19 nt, Artificial Sequence
  Description of Artificial Sequence: Synthetic oligonucleotide
  Antisense strand to SEQ ID NO: 2375086
uaacagauacagagcaugc

SEQ ID NO: 2375088 - RNA, 19 nt, Artificial Sequence
  Description of Artificial Sequence: Synthetic oligonucleotide
  Sense strand starting at position 2545 of SEQ ID NO: 1885887
ugcucuguaucuguuaaag

SEQ ID NO: 2375089 - RNA, 19 nt, Artificial Sequence
  Description of Artificial Sequence: Synthetic oligonucleotide
  Antisense strand to SEQ ID NO: 2375088
cuuuaacagauacagagca

SEQ ID NO: 2375090 - RNA, 19 nt, Artificial Sequence
  Description of Artificial Sequence: Synthetic oligonucleotide
  Sense strand starting at position 2547 of SEQ ID NO: 1885887
cucuguaucuguuaaagca

SEQ ID NO: 2375091 - RNA, 19 nt, Artificial Sequence
  Description of Artificial Sequence: Synthetic oligonucleotide
  Antisense strand to SEQ ID NO: 2375090
ugcuuuaacagauacagag

SEQ ID NO: 2375092 - RNA, 19 nt, Artificial Sequence
  Description of Artificial Sequence: Synthetic oligonucleotide
  Sense strand starting at position 2622 of SEQ ID NO: 1885887
ugucuacacgcagaaauua

SEQ ID NO: 2375093 - RNA, 19 nt, Artificial Sequence
  Description of Artificial Sequence: Synthetic oligonucleotide
  Antisense strand to SEQ ID NO: 2375092
uaauuucugcguguagaca

SEQ ID NO: 2375094 - RNA, 19 nt, Artificial Sequence
  Description of Artificial Sequence: Synthetic oligonucleotide
  Sense strand starting at position 2630 of SEQ ID NO: 1885887
cgcagaaauuaguacaucu

SEQ ID NO: 2375095 - RNA, 19 nt, Artificial Sequence
  Description of Artificial Sequence: Synthetic oligonucleotide
  Antisense strand to SEQ ID NO: 2375094
agauguacuaauuucugcg

SEQ ID NO: 2375096 - RNA, 19 nt, Artificial Sequence
  Description of Artificial Sequence: Synthetic oligonucleotide
  Sense strand starting at position 2801 of SEQ ID NO: 1885887
auguaauaguguucucuca

SEQ ID NO: 2375097 - RNA, 19 nt, Artificial Sequence
  Description of Artificial Sequence: Synthetic oligonucleotide
  Antisense strand to SEQ ID NO: 2375096
ugagagaacacuauuacau

SEQ ID NO: 2375098 - RNA, 19 nt, Artificial Sequence
  Description of Artificial Sequence: Synthetic oligonucleotide
  Sense strand starting at position 2803 of SEQ ID NO: 1885887
guaauaguguucucucaau

SEQ ID NO: 2375099 - RNA, 19 nt, Artificial Sequence
  Description of Artificial Sequence: Synthetic oligonucleotide
  Antisense strand to SEQ ID NO: 2375098
auugagagaacacuauuac

SEQ ID NO: 2375100 - RNA, 19 nt, Artificial Sequence
  Description of Artificial Sequence: Synthetic oligonucleotide
  Sense strand starting at position 2892 of SEQ ID NO: 1885887
uuaagaauguaaucauguc

SEQ ID NO: 2375101 - RNA, 19 nt, Artificial Sequence
  Description of Artificial Sequence: Synthetic oligonucleotide
  Antisense strand to SEQ ID NO: 2375100
gacaugauuacauucuuaa

SEQ ID NO: 2375102 - RNA, 19 nt, Artificial Sequence
  Description of Artificial Sequence: Synthetic oligonucleotide
  Sense strand starting at position 3119 of SEQ ID NO: 1885887
ccaguacuauguuuacuau

SEQ ID NO: 2375103 - RNA, 19 nt, Artificial Sequence
  Description of Artificial Sequence: Synthetic oligonucleotide
  Antisense strand to SEQ ID NO: 2375102
auaguaaacauaguacugg

SEQ ID NO: 2375104 - RNA, 19 nt, Artificial Sequence
  Description of Artificial Sequence: Synthetic oligonucleotide
  Sense strand starting at position 3369 of SEQ ID NO: 1885887
ccaaguagacauugaagca

SEQ ID NO: 2375105 - RNA, 19 nt, Artificial Sequence
  Description of Artificial Sequence: Synthetic oligonucleotide
  Antisense strand to SEQ ID NO: 2375104
ugcuucaaugucuacuugg

SEQ ID NO: 2375106 - RNA, 19 nt, Artificial Sequence
  Description of Artificial Sequence: Synthetic oligonucleotide
  Sense strand starting at position 3529 of SEQ ID NO: 1885887
agacauauaugaugaugau

SEQ ID NO: 2375107 - RNA, 19 nt, Artificial Sequence
  Description of Artificial Sequence: Synthetic oligonucleotide
  Antisense strand to SEQ ID NO: 2375106
aucaucaucauauaugucu

SEQ ID NO: 2375108 - RNA, 19 nt, Artificial Sequence
  Description of Artificial Sequence: Synthetic oligonucleotide
  Sense strand starting at position 3541 of SEQ ID NO: 1885887
ugaugauauuauuaagccu

SEQ ID NO: 2375109 - RNA, 19 nt, Artificial Sequence
  Description of Artificial Sequence: Synthetic oligonucleotide
  Antisense strand to SEQ ID NO: 2375108
aggcuuaauaauaucauca

SEQ ID NO: 2375110 - RNA, 19 nt, Artificial Sequence
  Description of Artificial Sequence: Synthetic oligonucleotide
  Sense strand starting at position 3555 of SEQ ID NO: 1885887
agccuuuccuuccaagaag

SEQ ID NO: 2375111 - RNA, 19 nt, Artificial Sequence
  Description of Artificial Sequence: Synthetic oligonucleotide
  Antisense strand to SEQ ID NO: 2375110
cuucuuggaaggaaaggcu

SEQ ID NO: 2375112 - RNA, 19 nt, Artificial Sequence
  Description of Artificial Sequence: Synthetic oligonucleotide
  Sense strand starting at position 3618 of SEQ ID NO: 1885887
cuaucuauuugguaggaaa

SEQ ID NO: 2375113 - RNA, 19 nt, Artificial Sequence
  Description of Artificial Sequence: Synthetic oligonucleotide
  Antisense strand to SEQ ID NO: 2375112
uuuccuaccaaauagauag

SEQ ID NO: 2375114 - RNA, 19 nt, Artificial Sequence
  Description of Artificial Sequence: Synthetic oligonucleotide
  Sense strand starting at position 3621 of SEQ ID NO: 1885887
ucuauuugguaggaaauua

SEQ ID NO: 2375115 - RNA, 19 nt, Artificial Sequence
  Description of Artificial Sequence: Synthetic oligonucleotide
  Antisense strand to SEQ ID NO: 2375114
uaauuuccuaccaaauaga

SEQ ID NO: 2375116 - RNA, 19 nt, Artificial Sequence
  Description of Artificial Sequence: Synthetic oligonucleotide
  Sense strand starting at position 3717 of SEQ ID NO: 1885887
aggaaauuguacuaauagg

SEQ ID NO: 2375117 - RNA, 19 nt, Artificial Sequence
  Description of Artificial Sequence: Synthetic oligonucleotide
  Antisense strand to SEQ ID NO: 2375116
ccuauuaguacaauuuccu

SEQ ID NO: 2375118 - RNA, 19 nt, Artificial Sequence
  Description of Artificial Sequence: Synthetic oligonucleotide
  Sense strand starting at position 3756 of SEQ ID NO: 1885887
aggacuccuauugguauga

SEQ ID NO: 2375119 - RNA, 19 nt, Artificial Sequence
  Description of Artificial Sequence: Synthetic oligonucleotide
  Antisense strand to SEQ ID NO: 2375118
ucauaccaauaggaguccu

SEQ ID NO: 2375120 - RNA, 19 nt, Artificial Sequence
  Description of Artificial Sequence: Synthetic oligonucleotide
  Sense strand starting at position 3757 of SEQ ID NO: 1885887
ggacuccuauugguaugau

SEQ ID NO: 2375121 - RNA, 19 nt, Artificial Sequence
  Description of Artificial Sequence: Synthetic oligonucleotide
  Antisense strand to SEQ ID NO: 2375120
aucauaccaauaggagucc

SEQ ID NO: 2375122 - RNA, 19 nt, Artificial Sequence
  Description of Artificial Sequence: Synthetic oligonucleotide
  Sense strand starting at position 3760 of SEQ ID NO: 1885887
cuccuauugguaugaugcu

SEQ ID NO: 2375123 - RNA, 19 nt, Artificial Sequence
  Description of Artificial Sequence: Synthetic oligonucleotide
  Antisense strand to SEQ ID NO: 2375122
agcaucauaccaauaggag

SEQ ID NO: 2375124 - RNA, 19 nt, Artificial Sequence
  Description of Artificial Sequence: Synthetic oligonucleotide
  Sense strand starting at position 3766 of SEQ ID NO: 1885887
uugguaugaugcucagauc

SEQ ID NO: 2375125 - RNA, 19 nt, Artificial Sequence
  Description of Artificial Sequence: Synthetic oligonucleotide
  Antisense strand to SEQ ID NO: 2375124
gaucugagcaucauaccaa

SEQ ID NO: 2375126 - RNA, 19 nt, Artificial Sequence
  Description of Artificial Sequence: Synthetic oligonucleotide
  Sense strand starting at position 3769 of SEQ ID NO: 1885887
guaugaugcucagaucgaa

SEQ ID NO: 2375127 - RNA, 19 nt, Artificial Sequence
  Description of Artificial Sequence: Synthetic oligonucleotide
  Antisense strand to SEQ ID NO: 2375126
uucgaucugagcaucauac

SEQ ID NO: 2375128 - RNA, 19 nt, Artificial Sequence
  Description of Artificial Sequence: Synthetic oligonucleotide
  Sense strand starting at position 3772 of SEQ ID NO: 1885887
ugaugcucagaucgaaauu

SEQ ID NO: 2375129 - RNA, 19 nt, Artificial Sequence
  Description of Artificial Sequence: Synthetic oligonucleotide
  Antisense strand to SEQ ID NO: 2375128
aauuucgaucugagcauca

SEQ ID NO: 2375130 - RNA, 19 nt, Artificial Sequence
  Description of Artificial Sequence: Synthetic oligonucleotide
  Sense strand starting at position 3843 of SEQ ID NO: 1885887
uaaagacauuccuguggac

SEQ ID NO: 2375131 - RNA, 19 nt, Artificial Sequence
  Description of Artificial Sequence: Synthetic oligonucleotide
  Antisense strand to SEQ ID NO: 2375130
guccacaggaaugucuuua

SEQ ID NO: 2375132 - RNA, 19 nt, Artificial Sequence
  Description of Artificial Sequence: Synthetic oligonucleotide
  Sense strand starting at position 3845 of SEQ ID NO: 1885887
aagacauuccuguggacac

SEQ ID NO: 2375133 - RNA, 19 nt, Artificial Sequence
  Description of Artificial Sequence: Synthetic oligonucleotide
  Antisense strand to SEQ ID NO: 2375132
guguccacaggaaugucuu

SEQ ID NO: 2375134 - RNA, 19 nt, Artificial Sequence
  Description of Artificial Sequence: Synthetic oligonucleotide
  Sense strand starting at position 3846 of SEQ ID NO: 1885887
agacauuccuguggacacu

SEQ ID NO: 2375135 - RNA, 19 nt, Artificial Sequence
  Description of Artificial Sequence: Synthetic oligonucleotide
  Antisense strand to SEQ ID NO: 2375134
aguguccacaggaaugucu

SEQ ID NO: 2375136 - RNA, 19 nt, Artificial Sequence
  Description of Artificial Sequence: Synthetic oligonucleotide
  Sense strand starting at position 3855 of SEQ ID NO: 1885887
uguggacacugacauagua

SEQ ID NO: 2375137 - RNA, 19 nt, Artificial Sequence
  Description of Artificial Sequence: Synthetic oligonucleotide
  Antisense strand to SEQ ID NO: 2375136
uacuaugucaguguccaca

SEQ ID NO: 2375138 - RNA, 19 nt, Artificial Sequence
  Description of Artificial Sequence: Synthetic oligonucleotide
  Sense strand starting at position 40 of SEQ ID NO: 1885888
ugcucugucucgcuucuaa

SEQ ID NO: 2375139 - RNA, 19 nt, Artificial Sequence
  Description of Artificial Sequence: Synthetic oligonucleotide
  Antisense strand to SEQ ID NO: 2375138
uuagaagcgagacagagca

SEQ ID NO: 2375140 - RNA, 19 nt, Artificial Sequence
  Description of Artificial Sequence: Synthetic oligonucleotide
  Sense strand starting at position 195 of SEQ ID NO: 1885888
caccauuucuucgggauuc

SEQ ID NO: 2375141 - RNA, 19 nt, Artificial Sequence
  Description of Artificial Sequence: Synthetic oligonucleotide
  Antisense strand to SEQ ID NO: 2375140
gaaucccgaagaaauggug

SEQ ID NO: 2375142 - RNA, 19 nt, Artificial Sequence
  Description of Artificial Sequence: Synthetic oligonucleotide
  Sense strand starting at position 1647 of SEQ ID NO: 1885888
uggccuagguugugagaga

SEQ ID NO: 2375143 - RNA, 19 nt, Artificial Sequence
  Description of Artificial Sequence: Synthetic oligonucleotide
  Antisense strand to SEQ ID NO: 2375142
ucucucacaaccuaggcca

SEQ ID NO: 2375144 - RNA, 19 nt, Artificial Sequence
  Description of Artificial Sequence: Synthetic oligonucleotide
  Sense strand starting at position 1648 of SEQ ID NO: 1885888
ggccuagguugugagagaa

SEQ ID NO: 2375145 - RNA, 19 nt, Artificial Sequence
  Description of Artificial Sequence: Synthetic oligonucleotide
  Antisense strand to SEQ ID NO: 2375144
uucucucacaaccuaggcc

SEQ ID NO: 2375146 - RNA, 19 nt, Artificial Sequence
  Description of Artificial Sequence: Synthetic oligonucleotide
  Sense strand starting at position 2401 of SEQ ID NO: 1885888
ucccuauaauccgccagua

SEQ ID NO: 2375147 - RNA, 19 nt, Artificial Sequence
  Description of Artificial Sequence: Synthetic oligonucleotide
  Antisense strand to SEQ ID NO: 2375146
uacuggcggauuauaggga

SEQ ID NO: 2375148 - RNA, 19 nt, Artificial Sequence
  Description of Artificial Sequence: Synthetic oligonucleotide
  Sense strand starting at position 2403 of SEQ ID NO: 1885888
ccuauaauccgccaguacu

SEQ ID NO: 2375149 - RNA, 19 nt, Artificial Sequence
  Description of Artificial Sequence: Synthetic oligonucleotide
  Antisense strand to SEQ ID NO: 2375148
aguacuggcggauuauagg

SEQ ID NO: 2375150 - RNA, 19 nt, Artificial Sequence
  Description of Artificial Sequence: Synthetic oligonucleotide
  Sense strand starting at position 2413 of SEQ ID NO: 1885888
gccaguacuguuggagcaa

SEQ ID NO: 2375151 - RNA, 19 nt, Artificial Sequence
  Description of Artificial Sequence: Synthetic oligonucleotide
  Antisense strand to SEQ ID NO: 2375150
uugcuccaacaguacuggc

SEQ ID NO: 2375152 - RNA, 19 nt, Artificial Sequence
  Description of Artificial Sequence: Synthetic oligonucleotide
  Sense strand starting at position 2723 of SEQ ID NO: 1885888
ucggauuacugagguucua

SEQ ID NO: 2375153 - RNA, 19 nt, Artificial Sequence
  Description of Artificial Sequence: Synthetic oligonucleotide
  Antisense strand to SEQ ID NO: 2375152
uagaaccucaguaauccga

SEQ ID NO: 2375154 - RNA, 19 nt, Artificial Sequence
  Description of Artificial Sequence: Synthetic oligonucleotide
  Sense strand starting at position 3266 of SEQ ID NO: 1885888
gcagaauucuccucagguc

SEQ ID NO: 2375155 - RNA, 19 nt, Artificial Sequence
  Description of Artificial Sequence: Synthetic oligonucleotide
  Antisense strand to SEQ ID NO: 2375154
gaccugaggagaauucugc

SEQ ID NO: 2375156 - RNA, 19 nt, Artificial Sequence
  Description of Artificial Sequence: Synthetic oligonucleotide
  Sense strand starting at position 3269 of SEQ ID NO: 1885888
gaauucuccucaggucaga

SEQ ID NO: 2375157 - RNA, 19 nt, Artificial Sequence
  Description of Artificial Sequence: Synthetic oligonucleotide
  Antisense strand to SEQ ID NO: 2375156
ucugaccugaggagaauuc

SEQ ID NO: 2375158 - RNA, 19 nt, Artificial Sequence
  Description of Artificial Sequence: Synthetic oligonucleotide
  Sense strand starting at position 3467 of SEQ ID NO: 1885888
gugaauaaucaaggucaga

SEQ ID NO: 2375159 - RNA, 19 nt, Artificial Sequence
  Description of Artificial Sequence: Synthetic oligonucleotide
  Antisense strand to SEQ ID NO: 2375158
ucugaccuugauuauucac

SEQ ID NO: 2375160 - RNA, 19 nt, Artificial Sequence
  Description of Artificial Sequence: Synthetic oligonucleotide
  Sense strand starting at position 3548 of SEQ ID NO: 1885888
gcgagauucucccaagcua

SEQ ID NO: 2375161 - RNA, 19 nt, Artificial Sequence
  Description of Artificial Sequence: Synthetic oligonucleotide
  Antisense strand to SEQ ID NO: 2375160
uagcuugggagaaucucgc

SEQ ID NO: 2375162 - RNA, 19 nt, Artificial Sequence
  Description of Artificial Sequence: Synthetic oligonucleotide
  Sense strand starting at position 93 of SEQ ID NO: 1885889
uaagucaggacguguauuu

SEQ ID NO: 2375163 - RNA, 19 nt, Artificial Sequence
  Description of Artificial Sequence: Synthetic oligonucleotide
  Antisense strand to SEQ ID NO: 2375162
aaauacacguccugacuua

SEQ ID NO: 2375164 - RNA, 19 nt, Artificial Sequence
  Description of Artificial Sequence: Synthetic oligonucleotide
  Sense strand starting at position 336 of SEQ ID NO: 1885889
uuaccucuguccugggaau

SEQ ID NO: 2375165 - RNA, 19 nt, Artificial Sequence
  Description of Artificial Sequence: Synthetic oligonucleotide
  Antisense strand to SEQ ID NO: 2375164
auucccaggacagagguaa

SEQ ID NO: 2375166 - RNA, 19 nt, Artificial Sequence
  Description of Artificial Sequence: Synthetic oligonucleotide
  Sense strand starting at position 338 of SEQ ID NO: 1885889
accucuguccugggaauca

SEQ ID NO: 2375167 - RNA, 19 nt, Artificial Sequence
  Description of Artificial Sequence: Synthetic oligonucleotide
  Antisense strand to SEQ ID NO: 2375166
ugauucccaggacagaggu

SEQ ID NO: 2375168 - RNA, 19 nt, Artificial Sequence
  Description of Artificial Sequence: Synthetic oligonucleotide
  Sense strand starting at position 349 of SEQ ID NO: 1885889
gggaaucacccugacgcua

SEQ ID NO: 2375169 - RNA, 19 nt, Artificial Sequence
  Description of Artificial Sequence: Synthetic oligonucleotide
  Antisense strand to SEQ ID NO: 2375168
uagcgucagggugauuccc

SEQ ID NO: 2375170 - RNA, 19 nt, Artificial Sequence
  Description of Artificial Sequence: Synthetic oligonucleotide
  Sense strand starting at position 401 of SEQ ID NO: 1885889
auuggacauguguaaacuu

SEQ ID NO: 2375171 - RNA, 19 nt, Artificial Sequence
  Description of Artificial Sequence: Synthetic oligonucleotide
  Antisense strand to SEQ ID NO: 2375170
aaguuuacacauguccaau

SEQ ID NO: 2375172 - RNA, 19 nt, Artificial Sequence
  Description of Artificial Sequence: Synthetic oligonucleotide
  Sense strand starting at position 410 of SEQ ID NO: 1885889
guguaaacuuagccaccua

SEQ ID NO: 2375173 - RNA, 19 nt, Artificial Sequence
  Description of Artificial Sequence: Synthetic oligonucleotide
  Antisense strand to SEQ ID NO: 2375172
uagguggcuaaguuuacac

SEQ ID NO: 2375174 - RNA, 19 nt, Artificial Sequence
  Description of Artificial Sequence: Synthetic oligonucleotide
  Sense strand starting at position 456 of SEQ ID NO: 1885889
cgguaacucgugcuucuca

SEQ ID NO: 2375175 - RNA, 19 nt, Artificial Sequence
  Description of Artificial Sequence: Synthetic oligonucleotide
  Antisense strand to SEQ ID NO: 2375174
ugagaagcacgaguuaccg

SEQ ID NO: 2375176 - RNA, 19 nt, Artificial Sequence
  Description of Artificial Sequence: Synthetic oligonucleotide
  Sense strand starting at position 457 of SEQ ID NO: 1885889
gguaacucgugcuucucau

SEQ ID NO: 2375177 - RNA, 19 nt, Artificial Sequence
  Description of Artificial Sequence: Synthetic oligonucleotide
  Antisense strand to SEQ ID NO: 2375176
augagaagcacgaguuacc

SEQ ID NO: 2375178 - RNA, 19 nt, Artificial Sequence
  Description of Artificial Sequence: Synthetic oligonucleotide
  Sense strand starting at position 461 of SEQ ID NO: 1885889
acucgugcuucucauccua

SEQ ID NO: 2375179 - RNA, 19 nt, Artificial Sequence
  Description of Artificial Sequence: Synthetic oligonucleotide
  Antisense strand to SEQ ID NO: 2375178
uaggaugagaagcacgagu

SEQ ID NO: 2375180 - RNA, 19 nt, Artificial Sequence
  Description of Artificial Sequence: Synthetic oligonucleotide
  Sense strand starting at position 517 of SEQ ID NO: 1885889
auaauauuacggcauguca

SEQ ID NO: 2375181 - RNA, 19 nt, Artificial Sequence
  Description of Artificial Sequence: Synthetic oligonucleotide
  Antisense strand to SEQ ID NO: 2375180
ugacaugccguaauauuau

SEQ ID NO: 2375182 - RNA, 19 nt, Artificial Sequence
  Description of Artificial Sequence: Synthetic oligonucleotide
  Sense strand starting at position 524 of SEQ ID NO: 1885889
uacggcaugucauggaaau

SEQ ID NO: 2375183 - RNA, 19 nt, Artificial Sequence
  Description of Artificial Sequence: Synthetic oligonucleotide
  Antisense strand to SEQ ID NO: 2375182
auuuccaugacaugccgua

SEQ ID NO: 2375184 - RNA, 19 nt, Artificial Sequence
  Description of Artificial Sequence: Synthetic oligonucleotide
  Sense strand starting at position 525 of SEQ ID NO: 1885889
acggcaugucauggaaauu

SEQ ID NO: 2375185 - RNA, 19 nt, Artificial Sequence
  Description of Artificial Sequence: Synthetic oligonucleotide
  Antisense strand to SEQ ID NO: 2375184
aauuuccaugacaugccgu

SEQ ID NO: 2375186 - RNA, 19 nt, Artificial Sequence
  Description of Artificial Sequence: Synthetic oligonucleotide
  Sense strand starting at position 526 of SEQ ID NO: 1885889
cggcaugucauggaaauua

SEQ ID NO: 2375187 - RNA, 19 nt, Artificial Sequence
  Description of Artificial Sequence: Synthetic oligonucleotide
  Antisense strand to SEQ ID NO: 2375186
uaauuuccaugacaugccg

SEQ ID NO: 2375188 - RNA, 19 nt, Artificial Sequence
  Description of Artificial Sequence: Synthetic oligonucleotide
  Sense strand starting at position 656 of SEQ ID NO: 1885889
gccuuuaacugcucuaggu

SEQ ID NO: 2375189 - RNA, 19 nt, Artificial Sequence
  Description of Artificial Sequence: Synthetic oligonucleotide
  Antisense strand to SEQ ID NO: 2375188
accuagagcaguuaaaggc

SEQ ID NO: 2375190 - RNA, 19 nt, Artificial Sequence
  Description of Artificial Sequence: Synthetic oligonucleotide
  Sense strand starting at position 658 of SEQ ID NO: 1885889
cuuuaacugcucuagguga

SEQ ID NO: 2375191 - RNA, 19 nt, Artificial Sequence
  Description of Artificial Sequence: Synthetic oligonucleotide
  Antisense strand to SEQ ID NO: 2375190
ucaccuagagcaguuaaag

SEQ ID NO: 2375192 - RNA, 19 nt, Artificial Sequence
  Description of Artificial Sequence: Synthetic oligonucleotide
  Sense strand starting at position 759 of SEQ ID NO: 1885889
guucgagaauaucuagaua

SEQ ID NO: 2375193 - RNA, 19 nt, Artificial Sequence
  Description of Artificial Sequence: Synthetic oligonucleotide
  Antisense strand to SEQ ID NO: 2375192
uaucuagauauucucgaac

SEQ ID NO: 2375194 - RNA, 19 nt, Artificial Sequence
  Description of Artificial Sequence: Synthetic oligonucleotide
  Sense strand starting at position 904 of SEQ ID NO: 1885889
uuaggccuuguauauuaaa

SEQ ID NO: 2375195 - RNA, 19 nt, Artificial Sequence
  Description of Artificial Sequence: Synthetic oligonucleotide
  Antisense strand to SEQ ID NO: 2375194
uuuaauauacaaggccuaa

SEQ ID NO: 2375196 - RNA, 19 nt, Artificial Sequence
  Description of Artificial Sequence: Synthetic oligonucleotide
  Sense strand starting at position 1595 of SEQ ID NO: 1885889
ucaguuucccuaugggaga

SEQ ID NO: 2375197 - RNA, 19 nt, Artificial Sequence
  Description of Artificial Sequence: Synthetic oligonucleotide
  Antisense strand to SEQ ID NO: 2375196
ucucccauagggaaacuga

SEQ ID NO: 2375198 - RNA, 19 nt, Artificial Sequence
  Description of Artificial Sequence: Synthetic oligonucleotide
  Sense strand starting at position 1596 of SEQ ID NO: 1885889
caguuucccuaugggagaa

SEQ ID NO: 2375199 - RNA, 19 nt, Artificial Sequence
  Description of Artificial Sequence: Synthetic oligonucleotide
  Antisense strand to SEQ ID NO: 2375198
uucucccauagggaaacug

SEQ ID NO: 2375200 - RNA, 19 nt, Artificial Sequence
  Description of Artificial Sequence: Synthetic oligonucleotide
  Sense strand starting at position 1616 of SEQ ID NO: 1885889
gugcacaugucccucaauu

SEQ ID NO: 2375201 - RNA, 19 nt, Artificial Sequence
  Description of Artificial Sequence: Synthetic oligonucleotide
  Antisense strand to SEQ ID NO: 2375200
aauugagggacaugugcac

SEQ ID NO: 2375202 - RNA, 19 nt, Artificial Sequence
  Description of Artificial Sequence: Synthetic oligonucleotide
  Sense strand starting at position 2073 of SEQ ID NO: 1885889
acccuugugcccggaggaa

SEQ ID NO: 2375203 - RNA, 19 nt, Artificial Sequence
  Description of Artificial Sequence: Synthetic oligonucleotide
  Antisense strand to SEQ ID NO: 2375202
uuccuccgggcacaagggu

SEQ ID NO: 2375204 - RNA, 19 nt, Artificial Sequence
  Description of Artificial Sequence: Synthetic oligonucleotide
  Sense strand starting at position 2148 of SEQ ID NO: 1885889
ccuggcaaucucugugagu

SEQ ID NO: 2375205 - RNA, 19 nt, Artificial Sequence
  Description of Artificial Sequence: Synthetic oligonucleotide
  Antisense strand to SEQ ID NO: 2375204
acucacagagauugccagg

SEQ ID NO: 2375206 - RNA, 19 nt, Artificial Sequence
  Description of Artificial Sequence: Synthetic oligonucleotide
  Sense strand starting at position 2237 of SEQ ID NO: 1885889
uugauuagaugcugagaaa

SEQ ID NO: 2375207 - RNA, 19 nt, Artificial Sequence
  Description of Artificial Sequence: Synthetic oligonucleotide
  Antisense strand to SEQ ID NO: 2375206
uuucucagcaucuaaucaa

SEQ ID NO: 2375208 - RNA, 19 nt, Artificial Sequence
  Description of Artificial Sequence: Synthetic oligonucleotide
  Sense strand starting at position 2240 of SEQ ID NO: 1885889
auuagaugcugagaaacuu

SEQ ID NO: 2375209 - RNA, 19 nt, Artificial Sequence
  Description of Artificial Sequence: Synthetic oligonucleotide
  Antisense strand to SEQ ID NO: 2375208
aaguuucucagcaucuaau

SEQ ID NO: 2375210 - RNA, 19 nt, Artificial Sequence
  Description of Artificial Sequence: Synthetic oligonucleotide
  Sense strand starting at position 2249 of SEQ ID NO: 1885889
ugagaaacuuccuacucug

SEQ ID NO: 2375211 - RNA, 19 nt, Artificial Sequence
  Description of Artificial Sequence: Synthetic oligonucleotide
  Antisense strand to SEQ ID NO: 2375210
cagaguaggaaguuucuca

SEQ ID NO: 2375212 - RNA, 19 nt, Artificial Sequence
  Description of Artificial Sequence: Synthetic oligonucleotide
  Sense strand starting at position 2290 of SEQ ID NO: 1885889
cuugaagacugagauugua

SEQ ID NO: 2375213 - RNA, 19 nt, Artificial Sequence
  Description of Artificial Sequence: Synthetic oligonucleotide
  Antisense strand to SEQ ID NO: 2375212
uacaaucucagucuucaag

SEQ ID NO: 2375214 - RNA, 19 nt, Artificial Sequence
  Description of Artificial Sequence: Synthetic oligonucleotide
  Sense strand starting at position 2298 of SEQ ID NO: 1885889
cugagauuguauugaucau

SEQ ID NO: 2375215 - RNA, 19 nt, Artificial Sequence
  Description of Artificial Sequence: Synthetic oligonucleotide
  Antisense strand to SEQ ID NO: 2375214
augaucaauacaaucucag

SEQ ID NO: 2375216 - RNA, 19 nt, Artificial Sequence
  Description of Artificial Sequence: Synthetic oligonucleotide
  Sense strand starting at position 2304 of SEQ ID NO: 1885889
uuguauugaucaucucuga

SEQ ID NO: 2375217 - RNA, 19 nt, Artificial Sequence
  Description of Artificial Sequence: Synthetic oligonucleotide
  Antisense strand to SEQ ID NO: 2375216
ucagagaugaucaauacaa

SEQ ID NO: 2375218 - RNA, 19 nt, Artificial Sequence
  Description of Artificial Sequence: Synthetic oligonucleotide
  Sense strand starting at position 2329 of SEQ ID NO: 1885889
gggaauuugccuugcuagu

SEQ ID NO: 2375219 - RNA, 19 nt, Artificial Sequence
  Description of Artificial Sequence: Synthetic oligonucleotide
  Antisense strand to SEQ ID NO: 2375218
acuagcaaggcaaauuccc

SEQ ID NO: 2375220 - RNA, 19 nt, Artificial Sequence
  Description of Artificial Sequence: Synthetic oligonucleotide
  Sense strand starting at position 2331 of SEQ ID NO: 1885889
gaauuugccuugcuaguuu

SEQ ID NO: 2375221 - RNA, 19 nt, Artificial Sequence
  Description of Artificial Sequence: Synthetic oligonucleotide
  Antisense strand to SEQ ID NO: 2375220
aaacuagcaaggcaaauuc

SEQ ID NO: 2375222 - RNA, 19 nt, Artificial Sequence
  Description of Artificial Sequence: Synthetic oligonucleotide
  Sense strand starting at position 2480 of SEQ ID NO: 1885889
cccuuaggauggcuauaau

SEQ ID NO: 2375223 - RNA, 19 nt, Artificial Sequence
  Description of Artificial Sequence: Synthetic oligonucleotide
  Antisense strand to SEQ ID NO: 2375222
auuauagccauccuaaggg

SEQ ID NO: 2375224 - RNA, 19 nt, Artificial Sequence
  Description of Artificial Sequence: Synthetic oligonucleotide
  Sense strand starting at position 3465 of SEQ ID NO: 1885889
uggauagcaccuggagaua

SEQ ID NO: 2375225 - RNA, 19 nt, Artificial Sequence
  Description of Artificial Sequence: Synthetic oligonucleotide
  Antisense strand to SEQ ID NO: 2375224
uaucuccaggugcuaucca

SEQ ID NO: 2375226 - RNA, 19 nt, Artificial Sequence
  Description of Artificial Sequence: Synthetic oligonucleotide
  Sense strand starting at position 486 of SEQ ID NO: 1885890
cagaauaagucugacacag

SEQ ID NO: 2375227 - RNA, 19 nt, Artificial Sequence
  Description of Artificial Sequence: Synthetic oligonucleotide
  Antisense strand to SEQ ID NO: 2375226
cugugucagacuuauucug

SEQ ID NO: 2375228 - RNA, 19 nt, Artificial Sequence
  Description of Artificial Sequence: Synthetic oligonucleotide
  Sense strand starting at position 488 of SEQ ID NO: 1885890
gaauaagucugacacagca

SEQ ID NO: 2375229 - RNA, 19 nt, Artificial Sequence
  Description of Artificial Sequence: Synthetic oligonucleotide
  Antisense strand to SEQ ID NO: 2375228
ugcugugucagacuuauuc

SEQ ID NO: 2375230 - RNA, 19 nt, Artificial Sequence
  Description of Artificial Sequence: Synthetic oligonucleotide
  Sense strand starting at position 687 of SEQ ID NO: 1885890
caacuacaguugguaagaa

SEQ ID NO: 2375231 - RNA, 19 nt, Artificial Sequence
  Description of Artificial Sequence: Synthetic oligonucleotide
  Antisense strand to SEQ ID NO: 2375230
uucuuaccaacuguaguug

SEQ ID NO: 2375232 - RNA, 19 nt, Artificial Sequence
  Description of Artificial Sequence: Synthetic oligonucleotide
  Sense strand starting at position 688 of SEQ ID NO: 1885890
aacuacaguugguaagaau

SEQ ID NO: 2375233 - RNA, 19 nt, Artificial Sequence
  Description of Artificial Sequence: Synthetic oligonucleotide
  Antisense strand to SEQ ID NO: 2375232
auucuuaccaacuguaguu

SEQ ID NO: 2375234 - RNA, 19 nt, Artificial Sequence
  Description of Artificial Sequence: Synthetic oligonucleotide
  Sense strand starting at position 727 of SEQ ID NO: 1885890
cuaucuugauggccucuua

SEQ ID NO: 2375235 - RNA, 19 nt, Artificial Sequence
  Description of Artificial Sequence: Synthetic oligonucleotide
  Antisense strand to SEQ ID NO: 2375234
uaagaggccaucaagauag

SEQ ID NO: 2375236 - RNA, 19 nt, Artificial Sequence
  Description of Artificial Sequence: Synthetic oligonucleotide
  Sense strand starting at position 737 of SEQ ID NO: 1885890
ggccucuuacuaugagugu

SEQ ID NO: 2375237 - RNA, 19 nt, Artificial Sequence
  Description of Artificial Sequence: Synthetic oligonucleotide
  Antisense strand to SEQ ID NO: 2375236
acacucauaguaagaggcc

SEQ ID NO: 2375238 - RNA, 19 nt, Artificial Sequence
  Description of Artificial Sequence: Synthetic oligonucleotide
  Sense strand starting at position 740 of SEQ ID NO: 1885890
cucuuacuaugagugugaa

SEQ ID NO: 2375239 - RNA, 19 nt, Artificial Sequence
  Description of Artificial Sequence: Synthetic oligonucleotide
  Antisense strand to SEQ ID NO: 2375238
uucacacucauaguaagag

SEQ ID NO: 2375240 - RNA, 19 nt, Artificial Sequence
  Description of Artificial Sequence: Synthetic oligonucleotide
  Sense strand starting at position 741 of SEQ ID NO: 1885890
ucuuacuaugagugugaaa

SEQ ID NO: 2375241 - RNA, 19 nt, Artificial Sequence
  Description of Artificial Sequence: Synthetic oligonucleotide
  Antisense strand to SEQ ID NO: 2375240
uuucacacucauaguaaga

SEQ ID NO: 2375242 - RNA, 19 nt, Artificial Sequence
  Description of Artificial Sequence: Synthetic oligonucleotide
  Sense strand starting at position 898 of SEQ ID NO: 1885890
ggagcaugggucugcaaac

SEQ ID NO: 2375243 - RNA, 19 nt, Artificial Sequence
  Description of Artificial Sequence: Synthetic oligonucleotide
  Antisense strand to SEQ ID NO: 2375242
guuugcagacccaugcucc

SEQ ID NO: 2375244 - RNA, 19 nt, Artificial Sequence
  Description of Artificial Sequence: Synthetic oligonucleotide
  Sense strand starting at position 953 of SEQ ID NO: 1885890
ucugaagacacuugugaug

SEQ ID NO: 2375245 - RNA, 19 nt, Artificial Sequence
  Description of Artificial Sequence: Synthetic oligonucleotide
  Antisense strand to SEQ ID NO: 2375244
caucacaagugucuucaga

SEQ ID NO: 2375246 - RNA, 19 nt, Artificial Sequence
  Description of Artificial Sequence: Synthetic oligonucleotide
  Sense strand starting at position 956 of SEQ ID NO: 1885890
gaagacacuugugaugguu

SEQ ID NO: 2375247 - RNA, 19 nt, Artificial Sequence
  Description of Artificial Sequence: Synthetic oligonucleotide
  Antisense strand to SEQ ID NO: 2375246
aaccaucacaagugucuuc

SEQ ID NO: 2375248 - RNA, 19 nt, Artificial Sequence
  Description of Artificial Sequence: Synthetic oligonucleotide
  Sense strand starting at position 968 of SEQ ID NO: 1885890
gaugguuaauacucagagu

SEQ ID NO: 2375249 - RNA, 19 nt, Artificial Sequence
  Description of Artificial Sequence: Synthetic oligonucleotide
  Antisense strand to SEQ ID NO: 2375248
acucugaguauuaaccauc

SEQ ID NO: 2375250 - RNA, 19 nt, Artificial Sequence
  Description of Artificial Sequence: Synthetic oligonucleotide
  Sense strand starting at position 971 of SEQ ID NO: 1885890
gguuaauacucagagucaa

SEQ ID NO: 2375251 - RNA, 19 nt, Artificial Sequence
  Description of Artificial Sequence: Synthetic oligonucleotide
  Antisense strand to SEQ ID NO: 2375250
uugacucugaguauuaacc

SEQ ID NO: 2375252 - RNA, 19 nt, Artificial Sequence
  Description of Artificial Sequence: Synthetic oligonucleotide
  Sense strand starting at position 1172 of SEQ ID NO: 1885890
uagcuuuaauccguggacu

SEQ ID NO: 2375253 - RNA, 19 nt, Artificial Sequence
  Description of Artificial Sequence: Synthetic oligonucleotide
  Antisense strand to SEQ ID NO: 2375252
aguccacggauuaaagcua

SEQ ID NO: 2375254 - RNA, 19 nt, Artificial Sequence
  Description of Artificial Sequence: Synthetic oligonucleotide
  Sense strand starting at position 1173 of SEQ ID NO: 1885890
agcuuuaauccguggacug

SEQ ID NO: 2375255 - RNA, 19 nt, Artificial Sequence
  Description of Artificial Sequence: Synthetic oligonucleotide
  Antisense strand to SEQ ID NO: 2375254
caguccacggauuaaagcu

SEQ ID NO: 2375256 - RNA, 19 nt, Artificial Sequence
  Description of Artificial Sequence: Synthetic oligonucleotide
  Sense strand starting at position 1174 of SEQ ID NO: 1885890
gcuuuaauccguggacugu

SEQ ID NO: 2375257 - RNA, 19 nt, Artificial Sequence
  Description of Artificial Sequence: Synthetic oligonucleotide
  Antisense strand to SEQ ID NO: 2375256
acaguccacggauuaaagc

SEQ ID NO: 2375258 - RNA, 19 nt, Artificial Sequence
  Description of Artificial Sequence: Synthetic oligonucleotide
  Sense strand starting at position 1516 of SEQ ID NO: 1885890
gcugguuucgaacaccgaa

SEQ ID NO: 2375259 - RNA, 19 nt, Artificial Sequence
  Description of Artificial Sequence: Synthetic oligonucleotide
  Antisense strand to SEQ ID NO: 2375258
uucgguguucgaaaccagc

SEQ ID NO: 2375260 - RNA, 19 nt, Artificial Sequence
  Description of Artificial Sequence: Synthetic oligonucleotide
  Sense strand starting at position 1993 of SEQ ID NO: 1885890
ucaguuuggccuugaaucu

SEQ ID NO: 2375261 - RNA, 19 nt, Artificial Sequence
  Description of Artificial Sequence: Synthetic oligonucleotide
  Antisense strand to SEQ ID NO: 2375260
agauucaaggccaaacuga

SEQ ID NO: 2375262 - RNA, 19 nt, Artificial Sequence
  Description of Artificial Sequence: Synthetic oligonucleotide
  Sense strand starting at position 1994 of SEQ ID NO: 1885890
caguuuggccuugaaucuu

SEQ ID NO: 2375263 - RNA, 19 nt, Artificial Sequence
  Description of Artificial Sequence: Synthetic oligonucleotide
  Antisense strand to SEQ ID NO: 2375262
aagauucaaggccaaacug

SEQ ID NO: 2375264 - RNA, 19 nt, Artificial Sequence
  Description of Artificial Sequence: Synthetic oligonucleotide
  Sense strand starting at position 2114 of SEQ ID NO: 1885890
gagcucuugugagccuaaa

SEQ ID NO: 2375265 - RNA, 19 nt, Artificial Sequence
  Description of Artificial Sequence: Synthetic oligonucleotide
  Antisense strand to SEQ ID NO: 2375264
uuuaggcucacaagagcuc

SEQ ID NO: 2375266 - RNA, 19 nt, Artificial Sequence
  Description of Artificial Sequence: Synthetic oligonucleotide
  Sense strand starting at position 2530 of SEQ ID NO: 1885890
gggcucaaguuccaacuua

SEQ ID NO: 2375267 - RNA, 19 nt, Artificial Sequence
  Description of Artificial Sequence: Synthetic oligonucleotide
  Antisense strand to SEQ ID NO: 2375266
uaaguuggaacuugagccc

SEQ ID NO: 2375268 - RNA, 19 nt, Artificial Sequence
  Description of Artificial Sequence: Synthetic oligonucleotide
  Sense strand starting at position 2563 of SEQ ID NO: 1885890
gugaaauacuugcuuuaag

SEQ ID NO: 2375269 - RNA, 19 nt, Artificial Sequence
  Description of Artificial Sequence: Synthetic oligonucleotide
  Antisense strand to SEQ ID NO: 2375268
cuuaaagcaaguauuucac

SEQ ID NO: 2375270 - RNA, 19 nt, Artificial Sequence
  Description of Artificial Sequence: Synthetic oligonucleotide
  Sense strand starting at position 2564 of SEQ ID NO: 1885890
ugaaauacuugcuuuaagc

SEQ ID NO: 2375271 - RNA, 19 nt, Artificial Sequence
  Description of Artificial Sequence: Synthetic oligonucleotide
  Antisense strand to SEQ ID NO: 2375270
gcuuaaagcaaguauuuca

SEQ ID NO: 2375272 - RNA, 19 nt, Artificial Sequence
  Description of Artificial Sequence: Synthetic oligonucleotide
  Sense strand starting at position 2638 of SEQ ID NO: 1885890
gugauagucucaguuuguu

SEQ ID NO: 2375273 - RNA, 19 nt, Artificial Sequence
  Description of Artificial Sequence: Synthetic oligonucleotide
  Antisense strand to SEQ ID NO: 2375272
aacaaacugagacuaucac

SEQ ID NO: 2375274 - RNA, 19 nt, Artificial Sequence
  Description of Artificial Sequence: Synthetic oligonucleotide
  Sense strand starting at position 2670 of SEQ ID NO: 1885890
gaaauuauuuagugagagu

SEQ ID NO: 2375275 - RNA, 19 nt, Artificial Sequence
  Description of Artificial Sequence: Synthetic oligonucleotide
  Antisense strand to SEQ ID NO: 2375274
acucucacuaaauaauuuc

SEQ ID NO: 2375276 - RNA, 19 nt, Artificial Sequence
  Description of Artificial Sequence: Synthetic oligonucleotide
  Sense strand starting at position 2673 of SEQ ID NO: 1885890
auuauuuagugagagucua

SEQ ID NO: 2375277 - RNA, 19 nt, Artificial Sequence
  Description of Artificial Sequence: Synthetic oligonucleotide
  Antisense strand to SEQ ID NO: 2375276
uagacucucacuaaauaau

SEQ ID NO: 2375278 - RNA, 19 nt, Artificial Sequence
  Description of Artificial Sequence: Synthetic oligonucleotide
  Sense strand starting at position 2840 of SEQ ID NO: 1885890
uauuauuguguuggcuaca

SEQ ID NO: 2375279 - RNA, 19 nt, Artificial Sequence
  Description of Artificial Sequence: Synthetic oligonucleotide
  Antisense strand to SEQ ID NO: 2375278
uguagccaacacaauaaua

SEQ ID NO: 2375280 - RNA, 19 nt, Artificial Sequence
  Description of Artificial Sequence: Synthetic oligonucleotide
  Sense strand starting at position 2859 of SEQ ID NO: 1885890
cgugcauugaggcaggaaa

SEQ ID NO: 2375281 - RNA, 19 nt, Artificial Sequence
  Description of Artificial Sequence: Synthetic oligonucleotide
  Antisense strand to SEQ ID NO: 2375280
uuuccugccucaaugcacg

SEQ ID NO: 2375282 - RNA, 19 nt, Artificial Sequence
  Description of Artificial Sequence: Synthetic oligonucleotide
  Sense strand starting at position 3112 of SEQ ID NO: 1885890
aaccgugugccucgagcua

SEQ ID NO: 2375283 - RNA, 19 nt, Artificial Sequence
  Description of Artificial Sequence: Synthetic oligonucleotide
  Antisense strand to SEQ ID NO: 2375282
uagcucgaggcacacgguu

SEQ ID NO: 2375284 - RNA, 19 nt, Artificial Sequence
  Description of Artificial Sequence: Synthetic oligonucleotide
  Sense strand starting at position 3124 of SEQ ID NO: 1885890
cgagcuaacugugucaaga

SEQ ID NO: 2375285 - RNA, 19 nt, Artificial Sequence
  Description of Artificial Sequence: Synthetic oligonucleotide
  Antisense strand to SEQ ID NO: 2375284
ucuugacacaguuagcucg

SEQ ID NO: 2375286 - RNA, 19 nt, Artificial Sequence
  Description of Artificial Sequence: Synthetic oligonucleotide
  Sense strand starting at position 3126 of SEQ ID NO: 1885890
agcuaacugugucaagaaa

SEQ ID NO: 2375287 - RNA, 19 nt, Artificial Sequence
  Description of Artificial Sequence: Synthetic oligonucleotide
  Antisense strand to SEQ ID NO: 2375286
uuucuugacacaguuagcu

SEQ ID NO: 2375288 - RNA, 19 nt, Artificial Sequence
  Description of Artificial Sequence: Synthetic oligonucleotide
  Sense strand starting at position 3171 of SEQ ID NO: 1885890
caauuuaacuuguggagga

SEQ ID NO: 2375289 - RNA, 19 nt, Artificial Sequence
  Description of Artificial Sequence: Synthetic oligonucleotide
  Antisense strand to SEQ ID NO: 2375288
uccuccacaaguuaaauug

SEQ ID NO: 2375290 - RNA, 19 nt, Artificial Sequence
  Description of Artificial Sequence: Synthetic oligonucleotide
  Sense strand starting at position 3172 of SEQ ID NO: 1885890
aauuuaacuuguggaggaa

SEQ ID NO: 2375291 - RNA, 19 nt, Artificial Sequence
  Description of Artificial Sequence: Synthetic oligonucleotide
  Antisense strand to SEQ ID NO: 2375290
uuccuccacaaguuaaauu

SEQ ID NO: 2375292 - RNA, 19 nt, Artificial Sequence
  Description of Artificial Sequence: Synthetic oligonucleotide
  Sense strand starting at position 3186 of SEQ ID NO: 1885890
aggaaugagaaacguuagu

SEQ ID NO: 2375293 - RNA, 19 nt, Artificial Sequence
  Description of Artificial Sequence: Synthetic oligonucleotide
  Antisense strand to SEQ ID NO: 2375292
acuaacguuucucauuccu

SEQ ID NO: 2375294 - RNA, 19 nt, Artificial Sequence
  Description of Artificial Sequence: Synthetic oligonucleotide
  Sense strand starting at position 3191 of SEQ ID NO: 1885890
ugagaaacguuaguguuga

SEQ ID NO: 2375295 - RNA, 19 nt, Artificial Sequence
  Description of Artificial Sequence: Synthetic oligonucleotide
  Antisense strand to SEQ ID NO: 2375294
ucaacacuaacguuucuca

SEQ ID NO: 2375296 - RNA, 19 nt, Artificial Sequence
  Description of Artificial Sequence: Synthetic oligonucleotide
  Sense strand starting at position 3196 of SEQ ID NO: 1885890
aacguuaguguugagaaua

SEQ ID NO: 2375297 - RNA, 19 nt, Artificial Sequence
  Description of Artificial Sequence: Synthetic oligonucleotide
  Antisense strand to SEQ ID NO: 2375296
uauucucaacacuaacguu

SEQ ID NO: 2375298 - RNA, 19 nt, Artificial Sequence
  Description of Artificial Sequence: Synthetic oligonucleotide
  Sense strand starting at position 3248 of SEQ ID NO: 1885890
accugagaaccuuggguga

SEQ ID NO: 2375299 - RNA, 19 nt, Artificial Sequence
  Description of Artificial Sequence: Synthetic oligonucleotide
  Antisense strand to SEQ ID NO: 2375298
ucacccaagguucucaggu

SEQ ID NO: 2375300 - RNA, 19 nt, Artificial Sequence
  Description of Artificial Sequence: Synthetic oligonucleotide
  Sense strand starting at position 3512 of SEQ ID NO: 1885890
gugcaagugucacccaauc

SEQ ID NO: 2375301 - RNA, 19 nt, Artificial Sequence
  Description of Artificial Sequence: Synthetic oligonucleotide
  Antisense strand to SEQ ID NO: 2375300
gauugggugacacuugcac

SEQ ID NO: 2375302 - RNA, 19 nt, Artificial Sequence
  Description of Artificial Sequence: Synthetic oligonucleotide
  Sense strand starting at position 3533 of SEQ ID NO: 1885890
uccacaggccaucagaauu

SEQ ID NO: 2375303 - RNA, 19 nt, Artificial Sequence
  Description of Artificial Sequence: Synthetic oligonucleotide
  Antisense strand to SEQ ID NO: 2375302
aauucugauggccugugga

SEQ ID NO: 2375304 - RNA, 19 nt, Artificial Sequence
  Description of Artificial Sequence: Synthetic oligonucleotide
  Sense strand starting at position 3682 of SEQ ID NO: 1885890
ggcagcuuuguauaagguu

SEQ ID NO: 2375305 - RNA, 19 nt, Artificial Sequence
  Description of Artificial Sequence: Synthetic oligonucleotide
  Antisense strand to SEQ ID NO: 2375304
aaccuuauacaaagcugcc

SEQ ID NO: 2375306 - RNA, 19 nt, Artificial Sequence
  Description of Artificial Sequence: Synthetic oligonucleotide
  Sense strand starting at position 469 of SEQ ID NO: 1885891
cagaauaagucugacacag

SEQ ID NO: 2375307 - RNA, 19 nt, Artificial Sequence
  Description of Artificial Sequence: Synthetic oligonucleotide
  Antisense strand to SEQ ID NO: 2375306
cugugucagacuuauucug

SEQ ID NO: 2375308 - RNA, 19 nt, Artificial Sequence
  Description of Artificial Sequence: Synthetic oligonucleotide
  Sense strand starting at position 471 of SEQ ID NO: 1885891
gaauaagucugacacagca

SEQ ID NO: 2375309 - RNA, 19 nt, Artificial Sequence
  Description of Artificial Sequence: Synthetic oligonucleotide
  Antisense strand to SEQ ID NO: 2375308
ugcugugucagacuuauuc

SEQ ID NO: 2375310 - RNA, 19 nt, Artificial Sequence
  Description of Artificial Sequence: Synthetic oligonucleotide
  Sense strand starting at position 670 of SEQ ID NO: 1885891
caacuacaguugguaagaa

SEQ ID NO: 2375311 - RNA, 19 nt, Artificial Sequence
  Description of Artificial Sequence: Synthetic oligonucleotide
  Antisense strand to SEQ ID NO: 2375310
uucuuaccaacuguaguug

SEQ ID NO: 2375312 - RNA, 19 nt, Artificial Sequence
  Description of Artificial Sequence: Synthetic oligonucleotide
  Sense strand starting at position 671 of SEQ ID NO: 1885891
aacuacaguugguaagaau

SEQ ID NO: 2375313 - RNA, 19 nt, Artificial Sequence
  Description of Artificial Sequence: Synthetic oligonucleotide
  Antisense strand to SEQ ID NO: 2375312
auucuuaccaacuguaguu

SEQ ID NO: 2375314 - RNA, 19 nt, Artificial Sequence
  Description of Artificial Sequence: Synthetic oligonucleotide
  Sense strand starting at position 710 of SEQ ID NO: 1885891
cuaucuugauggccucuua

SEQ ID NO: 2375315 - RNA, 19 nt, Artificial Sequence
  Description of Artificial Sequence: Synthetic oligonucleotide
  Antisense strand to SEQ ID NO: 2375314
uaagaggccaucaagauag

SEQ ID NO: 2375316 - RNA, 19 nt, Artificial Sequence
  Description of Artificial Sequence: Synthetic oligonucleotide
  Sense strand starting at position 720 of SEQ ID NO: 1885891
ggccucuuacuaugagugu

SEQ ID NO: 2375317 - RNA, 19 nt, Artificial Sequence
  Description of Artificial Sequence: Synthetic oligonucleotide
  Antisense strand to SEQ ID NO: 2375316
acacucauaguaagaggcc

SEQ ID NO: 2375318 - RNA, 19 nt, Artificial Sequence
  Description of Artificial Sequence: Synthetic oligonucleotide
  Sense strand starting at position 723 of SEQ ID NO: 1885891
cucuuacuaugagugugaa

SEQ ID NO: 2375319 - RNA, 19 nt, Artificial Sequence
  Description of Artificial Sequence: Synthetic oligonucleotide
  Antisense strand to SEQ ID NO: 2375318
uucacacucauaguaagag

SEQ ID NO: 2375320 - RNA, 19 nt, Artificial Sequence
  Description of Artificial Sequence: Synthetic oligonucleotide
  Sense strand starting at position 724 of SEQ ID NO: 1885891
ucuuacuaugagugugaaa

SEQ ID NO: 2375321 - RNA, 19 nt, Artificial Sequence
  Description of Artificial Sequence: Synthetic oligonucleotide
  Antisense strand to SEQ ID NO: 2375320
uuucacacucauaguaaga

SEQ ID NO: 2375322 - RNA, 19 nt, Artificial Sequence
  Description of Artificial Sequence: Synthetic oligonucleotide
  Sense strand starting at position 881 of SEQ ID NO: 1885891
ggagcaugggucugcaaac

SEQ ID NO: 2375323 - RNA, 19 nt, Artificial Sequence
  Description of Artificial Sequence: Synthetic oligonucleotide
  Antisense strand to SEQ ID NO: 2375322
guuugcagacccaugcucc

SEQ ID NO: 2375324 - RNA, 19 nt, Artificial Sequence
  Description of Artificial Sequence: Synthetic oligonucleotide
  Sense strand starting at position 939 of SEQ ID NO: 1885891
gaagacacuugugaugguu

SEQ ID NO: 2375325 - RNA, 19 nt, Artificial Sequence
  Description of Artificial Sequence: Synthetic oligonucleotide
  Antisense strand to SEQ ID NO: 2375324
aaccaucacaagugucuuc

SEQ ID NO: 2375326 - RNA, 19 nt, Artificial Sequence
  Description of Artificial Sequence: Synthetic oligonucleotide
  Sense strand starting at position 942 of SEQ ID NO: 1885891
gacacuugugaugguuaau

SEQ ID NO: 2375327 - RNA, 19 nt, Artificial Sequence
  Description of Artificial Sequence: Synthetic oligonucleotide
  Antisense strand to SEQ ID NO: 2375326
auuaaccaucacaaguguc

SEQ ID NO: 2375328 - RNA, 19 nt, Artificial Sequence
  Description of Artificial Sequence: Synthetic oligonucleotide
  Sense strand starting at position 951 of SEQ ID NO: 1885891
gaugguuaauacucagagu

SEQ ID NO: 2375329 - RNA, 19 nt, Artificial Sequence
  Description of Artificial Sequence: Synthetic oligonucleotide
  Antisense strand to SEQ ID NO: 2375328
acucugaguauuaaccauc

SEQ ID NO: 2375330 - RNA, 19 nt, Artificial Sequence
  Description of Artificial Sequence: Synthetic oligonucleotide
  Sense strand starting at position 954 of SEQ ID NO: 1885891
gguuaauacucagagucaa

SEQ ID NO: 2375331 - RNA, 19 nt, Artificial Sequence
  Description of Artificial Sequence: Synthetic oligonucleotide
  Antisense strand to SEQ ID NO: 2375330
uugacucugaguauuaacc

SEQ ID NO: 2375332 - RNA, 19 nt, Artificial Sequence
  Description of Artificial Sequence: Synthetic oligonucleotide
  Sense strand starting at position 1515 of SEQ ID NO: 1885891
gcugguuucgaacaccgaa

SEQ ID NO: 2375333 - RNA, 19 nt, Artificial Sequence
  Description of Artificial Sequence: Synthetic oligonucleotide
  Antisense strand to SEQ ID NO: 2375332
uucgguguucgaaaccagc

SEQ ID NO: 2375334 - RNA, 19 nt, Artificial Sequence
  Description of Artificial Sequence: Synthetic oligonucleotide
  Sense strand starting at position 1959 of SEQ ID NO: 1885891
ccugguucucguggaagau

SEQ ID NO: 2375335 - RNA, 19 nt, Artificial Sequence
  Description of Artificial Sequence: Synthetic oligonucleotide
  Antisense strand to SEQ ID NO: 2375334
aucuuccacgagaaccagg

SEQ ID NO: 2375336 - RNA, 19 nt, Artificial Sequence
  Description of Artificial Sequence: Synthetic oligonucleotide
  Sense strand starting at position 1960 of SEQ ID NO: 1885891
cugguucucguggaagaua

SEQ ID NO: 2375337 - RNA, 19 nt, Artificial Sequence
  Description of Artificial Sequence: Synthetic oligonucleotide
  Antisense strand to SEQ ID NO: 2375336
uaucuuccacgagaaccag

SEQ ID NO: 2375338 - RNA, 19 nt, Artificial Sequence
  Description of Artificial Sequence: Synthetic oligonucleotide
  Sense strand starting at position 1992 of SEQ ID NO: 1885891
ucaguuuggccuugaaucu

SEQ ID NO: 2375339 - RNA, 19 nt, Artificial Sequence
  Description of Artificial Sequence: Synthetic oligonucleotide
  Antisense strand to SEQ ID NO: 2375338
agauucaaggccaaacuga

SEQ ID NO: 2375340 - RNA, 19 nt, Artificial Sequence
  Description of Artificial Sequence: Synthetic oligonucleotide
  Sense strand starting at position 1993 of SEQ ID NO: 1885891
caguuuggccuugaaucuu

SEQ ID NO: 2375341 - RNA, 19 nt, Artificial Sequence
  Description of Artificial Sequence: Synthetic oligonucleotide
  Antisense strand to SEQ ID NO: 2375340
aagauucaaggccaaacug

SEQ ID NO: 2375342 - RNA, 19 nt, Artificial Sequence
  Description of Artificial Sequence: Synthetic oligonucleotide
  Sense strand starting at position 2113 of SEQ ID NO: 1885891
gagcucuugugagccuaaa

SEQ ID NO: 2375343 - RNA, 19 nt, Artificial Sequence
  Description of Artificial Sequence: Synthetic oligonucleotide
  Antisense strand to SEQ ID NO: 2375342
uuuaggcucacaagagcuc

SEQ ID NO: 2375344 - RNA, 19 nt, Artificial Sequence
  Description of Artificial Sequence: Synthetic oligonucleotide
  Sense strand starting at position 2503 of SEQ ID NO: 1885891
gggcucaaguuccaacuua

SEQ ID NO: 2375345 - RNA, 19 nt, Artificial Sequence
  Description of Artificial Sequence: Synthetic oligonucleotide
  Antisense strand to SEQ ID NO: 2375344
uaaguuggaacuugagccc

SEQ ID NO: 2375346 - RNA, 19 nt, Artificial Sequence
  Description of Artificial Sequence: Synthetic oligonucleotide
  Sense strand starting at position 2536 of SEQ ID NO: 1885891
gugaaauacuugcuuuaag

SEQ ID NO: 2375347 - RNA, 19 nt, Artificial Sequence
  Description of Artificial Sequence: Synthetic oligonucleotide
  Antisense strand to SEQ ID NO: 2375346
cuuaaagcaaguauuucac

SEQ ID NO: 2375348 - RNA, 19 nt, Artificial Sequence
  Description of Artificial Sequence: Synthetic oligonucleotide
  Sense strand starting at position 2537 of SEQ ID NO: 1885891
ugaaauacuugcuuuaagc

SEQ ID NO: 2375349 - RNA, 19 nt, Artificial Sequence
  Description of Artificial Sequence: Synthetic oligonucleotide
  Antisense strand to SEQ ID NO: 2375348
gcuuaaagcaaguauuuca

SEQ ID NO: 2375350 - RNA, 19 nt, Artificial Sequence
  Description of Artificial Sequence: Synthetic oligonucleotide
  Sense strand starting at position 2611 of SEQ ID NO: 1885891
gugauagucucaguuuguu

SEQ ID NO: 2375351 - RNA, 19 nt, Artificial Sequence
  Description of Artificial Sequence: Synthetic oligonucleotide
  Antisense strand to SEQ ID NO: 2375350
aacaaacugagacuaucac

SEQ ID NO: 2375352 - RNA, 19 nt, Artificial Sequence
  Description of Artificial Sequence: Synthetic oligonucleotide
  Sense strand starting at position 2620 of SEQ ID NO: 1885891
ucaguuuguugaucugaaa

SEQ ID NO: 2375353 - RNA, 19 nt, Artificial Sequence
  Description of Artificial Sequence: Synthetic oligonucleotide
  Antisense strand to SEQ ID NO: 2375352
uuucagaucaacaaacuga

SEQ ID NO: 2375354 - RNA, 19 nt, Artificial Sequence
  Description of Artificial Sequence: Synthetic oligonucleotide
  Sense strand starting at position 2643 of SEQ ID NO: 1885891
gaaauuauuuagugagagu

SEQ ID NO: 2375355 - RNA, 19 nt, Artificial Sequence
  Description of Artificial Sequence: Synthetic oligonucleotide
  Antisense strand to SEQ ID NO: 2375354
acucucacuaaauaauuuc

SEQ ID NO: 2375356 - RNA, 19 nt, Artificial Sequence
  Description of Artificial Sequence: Synthetic oligonucleotide
  Sense strand starting at position 2646 of SEQ ID NO: 1885891
auuauuuagugagagucua

SEQ ID NO: 2375357 - RNA, 19 nt, Artificial Sequence
  Description of Artificial Sequence: Synthetic oligonucleotide
  Antisense strand to SEQ ID NO: 2375356
uagacucucacuaaauaau

SEQ ID NO: 2375358 - RNA, 19 nt, Artificial Sequence
  Description of Artificial Sequence: Synthetic oligonucleotide
  Sense strand starting at position 2832 of SEQ ID NO: 1885891
cgugcauugaggcaggaaa

SEQ ID NO: 2375359 - RNA, 19 nt, Artificial Sequence
  Description of Artificial Sequence: Synthetic oligonucleotide
  Antisense strand to SEQ ID NO: 2375358
uuuccugccucaaugcacg

SEQ ID NO: 2375360 - RNA, 19 nt, Artificial Sequence
  Description of Artificial Sequence: Synthetic oligonucleotide
  Sense strand starting at position 3067 of SEQ ID NO: 1885891
aaccgugugccucgagcua

SEQ ID NO: 2375361 - RNA, 19 nt, Artificial Sequence
  Description of Artificial Sequence: Synthetic oligonucleotide
  Antisense strand to SEQ ID NO: 2375360
uagcucgaggcacacgguu

SEQ ID NO: 2375362 - RNA, 19 nt, Artificial Sequence
  Description of Artificial Sequence: Synthetic oligonucleotide
  Sense strand starting at position 3151 of SEQ ID NO: 1885891
aacguuaguguugagaaua

SEQ ID NO: 2375363 - RNA, 19 nt, Artificial Sequence
  Description of Artificial Sequence: Synthetic oligonucleotide
  Antisense strand to SEQ ID NO: 2375362
uauucucaacacuaacguu

SEQ ID NO: 2375364 - RNA, 19 nt, Artificial Sequence
  Description of Artificial Sequence: Synthetic oligonucleotide
  Sense strand starting at position 3203 of SEQ ID NO: 1885891
accugagaaccuuggguga

SEQ ID NO: 2375365 - RNA, 19 nt, Artificial Sequence
  Description of Artificial Sequence: Synthetic oligonucleotide
  Antisense strand to SEQ ID NO: 2375364
ucacccaagguucucaggu

SEQ ID NO: 2375366 - RNA, 19 nt, Artificial Sequence
  Description of Artificial Sequence: Synthetic oligonucleotide
  Sense strand starting at position 3216 of SEQ ID NO: 1885891
gggugagucauccacccuu

SEQ ID NO: 2375367 - RNA, 19 nt, Artificial Sequence
  Description of Artificial Sequence: Synthetic oligonucleotide
  Antisense strand to SEQ ID NO: 2375366
aaggguggaugacucaccc

SEQ ID NO: 2375368 - RNA, 19 nt, Artificial Sequence
  Description of Artificial Sequence: Synthetic oligonucleotide
  Sense strand starting at position 3249 of SEQ ID NO: 1885891
gccucaguggagugaagaa

SEQ ID NO: 2375369 - RNA, 19 nt, Artificial Sequence
  Description of Artificial Sequence: Synthetic oligonucleotide
  Antisense strand to SEQ ID NO: 2375368
uucuucacuccacugaggc

SEQ ID NO: 2375370 - RNA, 19 nt, Artificial Sequence
  Description of Artificial Sequence: Synthetic oligonucleotide
  Sense strand starting at position 3295 of SEQ ID NO: 1885891
ugggaaaguugauaagaau

SEQ ID NO: 2375371 - RNA, 19 nt, Artificial Sequence
  Description of Artificial Sequence: Synthetic oligonucleotide
  Antisense strand to SEQ ID NO: 2375370
auucuuaucaacuuuccca

SEQ ID NO: 2375372 - RNA, 19 nt, Artificial Sequence
  Description of Artificial Sequence: Synthetic oligonucleotide
  Sense strand starting at position 3337 of SEQ ID NO: 1885891
cugucauugucaucccuau

SEQ ID NO: 2375373 - RNA, 19 nt, Artificial Sequence
  Description of Artificial Sequence: Synthetic oligonucleotide
  Antisense strand to SEQ ID NO: 2375372
auagggaugacaaugacag

SEQ ID NO: 2375374 - RNA, 19 nt, Artificial Sequence
  Description of Artificial Sequence: Synthetic oligonucleotide
  Sense strand starting at position 3467 of SEQ ID NO: 1885891
gugcaagugucacccaauc

SEQ ID NO: 2375375 - RNA, 19 nt, Artificial Sequence
  Description of Artificial Sequence: Synthetic oligonucleotide
  Antisense strand to SEQ ID NO: 2375374
gauugggugacacuugcac

SEQ ID NO: 2375376 - RNA, 19 nt, Artificial Sequence
  Description of Artificial Sequence: Synthetic oligonucleotide
  Sense strand starting at position 3488 of SEQ ID NO: 1885891
uccacaggccaucagaauu

SEQ ID NO: 2375377 - RNA, 19 nt, Artificial Sequence
  Description of Artificial Sequence: Synthetic oligonucleotide
  Antisense strand to SEQ ID NO: 2375376
aauucugauggccugugga

SEQ ID NO: 2375378 - RNA, 19 nt, Artificial Sequence
  Description of Artificial Sequence: Synthetic oligonucleotide
  Sense strand starting at position 3637 of SEQ ID NO: 1885891
ggcagcuuuguauaagguu

SEQ ID NO: 2375379 - RNA, 19 nt, Artificial Sequence
  Description of Artificial Sequence: Synthetic oligonucleotide
  Antisense strand to SEQ ID NO: 2375378
aaccuuauacaaagcugcc

SEQ ID NO: 2375380 - RNA, 19 nt, Artificial Sequence
  Description of Artificial Sequence: Synthetic oligonucleotide
  Sense strand starting at position 3737 of SEQ ID NO: 1885891
uccaaucgugaaggcauaa

SEQ ID NO: 2375381 - RNA, 19 nt, Artificial Sequence
  Description of Artificial Sequence: Synthetic oligonucleotide
  Antisense strand to SEQ ID NO: 2375380
uuaugccuucacgauugga

SEQ ID NO: 2375382 - RNA, 19 nt, Artificial Sequence
  Description of Artificial Sequence: Synthetic oligonucleotide
  Sense strand starting at position 3750 of SEQ ID NO: 1885891
gcauaagcuuucccuguca

SEQ ID NO: 2375383 - RNA, 19 nt, Artificial Sequence
  Description of Artificial Sequence: Synthetic oligonucleotide
  Antisense strand to SEQ ID NO: 2375382
ugacagggaaagcuuaugc

SEQ ID NO: 2375384 - RNA, 19 nt, Artificial Sequence
  Description of Artificial Sequence: Synthetic oligonucleotide
  Sense strand starting at position 3752 of SEQ ID NO: 1885891
auaagcuuucccugucaag

SEQ ID NO: 2375385 - RNA, 19 nt, Artificial Sequence
  Description of Artificial Sequence: Synthetic oligonucleotide
  Antisense strand to SEQ ID NO: 2375384
cuugacagggaaagcuuau

SEQ ID NO: 2375386 - RNA, 19 nt, Artificial Sequence
  Description of Artificial Sequence: Synthetic oligonucleotide
  Sense strand starting at position 275 of SEQ ID NO: 1885892
ggcggccucuccugucaua

SEQ ID NO: 2375387 - RNA, 19 nt, Artificial Sequence
  Description of Artificial Sequence: Synthetic oligonucleotide
  Antisense strand to SEQ ID NO: 2375386
uaugacaggagaggccgcc

SEQ ID NO: 2375388 - RNA, 19 nt, Artificial Sequence
  Description of Artificial Sequence: Synthetic oligonucleotide
  Sense strand starting at position 276 of SEQ ID NO: 1885892
gcggccucuccugucauau

SEQ ID NO: 2375389 - RNA, 19 nt, Artificial Sequence
  Description of Artificial Sequence: Synthetic oligonucleotide
  Antisense strand to SEQ ID NO: 2375388
auaugacaggagaggccgc

SEQ ID NO: 2375390 - RNA, 19 nt, Artificial Sequence
  Description of Artificial Sequence: Synthetic oligonucleotide
  Sense strand starting at position 639 of SEQ ID NO: 1885892
ggcggucaccggagcuuaa

SEQ ID NO: 2375391 - RNA, 19 nt, Artificial Sequence
  Description of Artificial Sequence: Synthetic oligonucleotide
  Antisense strand to SEQ ID NO: 2375390
uuaagcuccggugaccgcc

SEQ ID NO: 2375392 - RNA, 19 nt, Artificial Sequence
  Description of Artificial Sequence: Synthetic oligonucleotide
  Sense strand starting at position 924 of SEQ ID NO: 1885892
ugacgauggucgucuugau

SEQ ID NO: 2375393 - RNA, 19 nt, Artificial Sequence
  Description of Artificial Sequence: Synthetic oligonucleotide
  Antisense strand to SEQ ID NO: 2375392
aucaagacgaccaucguca

SEQ ID NO: 2375394 - RNA, 19 nt, Artificial Sequence
  Description of Artificial Sequence: Synthetic oligonucleotide
  Sense strand starting at position 928 of SEQ ID NO: 1885892
gauggucgucuugauguca

SEQ ID NO: 2375395 - RNA, 19 nt, Artificial Sequence
  Description of Artificial Sequence: Synthetic oligonucleotide
  Antisense strand to SEQ ID NO: 2375394
ugacaucaagacgaccauc

SEQ ID NO: 2375396 - RNA, 19 nt, Artificial Sequence
  Description of Artificial Sequence: Synthetic oligonucleotide
  Sense strand starting at position 1243 of SEQ ID NO: 1885892
accgcuuagacucgaagau

SEQ ID NO: 2375397 - RNA, 19 nt, Artificial Sequence
  Description of Artificial Sequence: Synthetic oligonucleotide
  Antisense strand to SEQ ID NO: 2375396
aucuucgagucuaagcggu

SEQ ID NO: 2375398 - RNA, 19 nt, Artificial Sequence
  Description of Artificial Sequence: Synthetic oligonucleotide
  Sense strand starting at position 1244 of SEQ ID NO: 1885892
ccgcuuagacucgaagauc

SEQ ID NO: 2375399 - RNA, 19 nt, Artificial Sequence
  Description of Artificial Sequence: Synthetic oligonucleotide
  Antisense strand to SEQ ID NO: 2375398
gaucuucgagucuaagcgg

SEQ ID NO: 2375400 - RNA, 19 nt, Artificial Sequence
  Description of Artificial Sequence: Synthetic oligonucleotide
  Sense strand starting at position 1448 of SEQ ID NO: 1885892
cgagaucacugcucacuga

SEQ ID NO: 2375401 - RNA, 19 nt, Artificial Sequence
  Description of Artificial Sequence: Synthetic oligonucleotide
  Antisense strand to SEQ ID NO: 2375400
ucagugagcagugaucucg

SEQ ID NO: 2375402 - RNA, 19 nt, Artificial Sequence
  Description of Artificial Sequence: Synthetic oligonucleotide
  Sense strand starting at position 1752 of SEQ ID NO: 1885892
ccauaaggcuggucugcau

SEQ ID NO: 2375403 - RNA, 19 nt, Artificial Sequence
  Description of Artificial Sequence: Synthetic oligonucleotide
  Antisense strand to SEQ ID NO: 2375402
augcagaccagccuuaugg

SEQ ID NO: 2375404 - RNA, 19 nt, Artificial Sequence
  Description of Artificial Sequence: Synthetic oligonucleotide
  Sense strand starting at position 1833 of SEQ ID NO: 1885892
uguugaucaugagguggau

SEQ ID NO: 2375405 - RNA, 19 nt, Artificial Sequence
  Description of Artificial Sequence: Synthetic oligonucleotide
  Antisense strand to SEQ ID NO: 2375404
auccaccucaugaucaaca

SEQ ID NO: 2375406 - RNA, 19 nt, Artificial Sequence
  Description of Artificial Sequence: Synthetic oligonucleotide
  Sense strand starting at position 1836 of SEQ ID NO: 1885892
ugaucaugagguggaugau

SEQ ID NO: 2375407 - RNA, 19 nt, Artificial Sequence
  Description of Artificial Sequence: Synthetic oligonucleotide
  Antisense strand to SEQ ID NO: 2375406
aucauccaccucaugauca

SEQ ID NO: 2375408 - RNA, 19 nt, Artificial Sequence
  Description of Artificial Sequence: Synthetic oligonucleotide
  Sense strand starting at position 1848 of SEQ ID NO: 1885892
ggaugauggucuugggcau

SEQ ID NO: 2375409 - RNA, 19 nt, Artificial Sequence
  Description of Artificial Sequence: Synthetic oligonucleotide
  Antisense strand to SEQ ID NO: 2375408
augcccaagaccaucaucc

SEQ ID NO: 2375410 - RNA, 19 nt, Artificial Sequence
  Description of Artificial Sequence: Synthetic oligonucleotide
  Sense strand starting at position 1875 of SEQ ID NO: 1885892
gcauguucuuguugacaau

SEQ ID NO: 2375411 - RNA, 19 nt, Artificial Sequence
  Description of Artificial Sequence: Synthetic oligonucleotide
  Antisense strand to SEQ ID NO: 2375410
auugucaacaagaacaugc

SEQ ID NO: 2375412 - RNA, 19 nt, Artificial Sequence
  Description of Artificial Sequence: Synthetic oligonucleotide
  Sense strand starting at position 1917 of SEQ ID NO: 1885892
ucugaauggucuccacuug

SEQ ID NO: 2375413 - RNA, 19 nt, Artificial Sequence
  Description of Artificial Sequence: Synthetic oligonucleotide
  Antisense strand to SEQ ID NO: 2375412
caaguggagaccauucaga

SEQ ID NO: 2375414 - RNA, 19 nt, Artificial Sequence
  Description of Artificial Sequence: Synthetic oligonucleotide
  Sense strand starting at position 1995 of SEQ ID NO: 1885892
gcuggccugucaugaagaa

SEQ ID NO: 2375415 - RNA, 19 nt, Artificial Sequence
  Description of Artificial Sequence: Synthetic oligonucleotide
  Antisense strand to SEQ ID NO: 2375414
uucuucaugacaggccagc

SEQ ID NO: 2375416 - RNA, 19 nt, Artificial Sequence
  Description of Artificial Sequence: Synthetic oligonucleotide
  Sense strand starting at position 1999 of SEQ ID NO: 1885892
gccugucaugaagaacaca

SEQ ID NO: 2375417 - RNA, 19 nt, Artificial Sequence
  Description of Artificial Sequence: Synthetic oligonucleotide
  Antisense strand to SEQ ID NO: 2375416
uguguucuucaugacaggc

SEQ ID NO: 2375418 - RNA, 19 nt, Artificial Sequence
  Description of Artificial Sequence: Synthetic oligonucleotide
  Sense strand starting at position 2217 of SEQ ID NO: 1885892
ugacucuacugcccagaau

SEQ ID NO: 2375419 - RNA, 19 nt, Artificial Sequence
  Description of Artificial Sequence: Synthetic oligonucleotide
  Antisense strand to SEQ ID NO: 2375418
auucugggcaguagaguca

SEQ ID NO: 2375420 - RNA, 19 nt, Artificial Sequence
  Description of Artificial Sequence: Synthetic oligonucleotide
  Sense strand starting at position 2276 of SEQ ID NO: 1885892
ugcagauccuuugcuuaaa

SEQ ID NO: 2375421 - RNA, 19 nt, Artificial Sequence
  Description of Artificial Sequence: Synthetic oligonucleotide
  Antisense strand to SEQ ID NO: 2375420
uuuaagcaaaggaucugca

SEQ ID NO: 2375422 - RNA, 19 nt, Artificial Sequence
  Description of Artificial Sequence: Synthetic oligonucleotide
  Sense strand starting at position 2277 of SEQ ID NO: 1885892
gcagauccuuugcuuaaag

SEQ ID NO: 2375423 - RNA, 19 nt, Artificial Sequence
  Description of Artificial Sequence: Synthetic oligonucleotide
  Antisense strand to SEQ ID NO: 2375422
cuuuaagcaaaggaucugc

SEQ ID NO: 2375424 - RNA, 19 nt, Artificial Sequence
  Description of Artificial Sequence: Synthetic oligonucleotide
  Sense strand starting at position 2279 of SEQ ID NO: 1885892
agauccuuugcuuaaagac

SEQ ID NO: 2375425 - RNA, 19 nt, Artificial Sequence
  Description of Artificial Sequence: Synthetic oligonucleotide
  Antisense strand to SEQ ID NO: 2375424
gucuuuaagcaaaggaucu

SEQ ID NO: 2375426 - RNA, 19 nt, Artificial Sequence
  Description of Artificial Sequence: Synthetic oligonucleotide
  Sense strand starting at position 2505 of SEQ ID NO: 1885892
uagacauugccacagugaa

SEQ ID NO: 2375427 - RNA, 19 nt, Artificial Sequence
  Description of Artificial Sequence: Synthetic oligonucleotide
  Antisense strand to SEQ ID NO: 2375426
uucacuguggcaaugucua

SEQ ID NO: 2375428 - RNA, 19 nt, Artificial Sequence
  Description of Artificial Sequence: Synthetic oligonucleotide
  Sense strand starting at position 2692 of SEQ ID NO: 1885892
ccugguuauuucugagcca

SEQ ID NO: 2375429 - RNA, 19 nt, Artificial Sequence
  Description of Artificial Sequence: Synthetic oligonucleotide
  Antisense strand to SEQ ID NO: 2375428
uggcucagaaauaaccagg

SEQ ID NO: 2375430 - RNA, 19 nt, Artificial Sequence
  Description of Artificial Sequence: Synthetic oligonucleotide
  Sense strand starting at position 2693 of SEQ ID NO: 1885892
cugguuauuucugagccaa

SEQ ID NO: 2375431 - RNA, 19 nt, Artificial Sequence
  Description of Artificial Sequence: Synthetic oligonucleotide
  Antisense strand to SEQ ID NO: 2375430
uuggcucagaaauaaccag

SEQ ID NO: 2375432 - RNA, 19 nt, Artificial Sequence
  Description of Artificial Sequence: Synthetic oligonucleotide
  Sense strand starting at position 2878 of SEQ ID NO: 1885892
uccugugucucaugagcca

SEQ ID NO: 2375433 - RNA, 19 nt, Artificial Sequence
  Description of Artificial Sequence: Synthetic oligonucleotide
  Antisense strand to SEQ ID NO: 2375432
uggcucaugagacacagga

SEQ ID NO: 2375434 - RNA, 19 nt, Artificial Sequence
  Description of Artificial Sequence: Synthetic oligonucleotide
  Sense strand starting at position 2905 of SEQ ID NO: 1885892
ugccaauaauccuuguaga

SEQ ID NO: 2375435 - RNA, 19 nt, Artificial Sequence
  Description of Artificial Sequence: Synthetic oligonucleotide
  Antisense strand to SEQ ID NO: 2375434
ucuacaaggauuauuggca

SEQ ID NO: 2375436 - RNA, 19 nt, Artificial Sequence
  Description of Artificial Sequence: Synthetic oligonucleotide
  Sense strand starting at position 2906 of SEQ ID NO: 1885892
gccaauaauccuuguagag

SEQ ID NO: 2375437 - RNA, 19 nt, Artificial Sequence
  Description of Artificial Sequence: Synthetic oligonucleotide
  Antisense strand to SEQ ID NO: 2375436
cucuacaaggauuauuggc

SEQ ID NO: 2375438 - RNA, 19 nt, Artificial Sequence
  Description of Artificial Sequence: Synthetic oligonucleotide
  Sense strand starting at position 3316 of SEQ ID NO: 1885892
gucaucacaucugagucaa

SEQ ID NO: 2375439 - RNA, 19 nt, Artificial Sequence
  Description of Artificial Sequence: Synthetic oligonucleotide
  Antisense strand to SEQ ID NO: 2375438
uugacucagaugugaugac

SEQ ID NO: 2375440 - RNA, 19 nt, Artificial Sequence
  Description of Artificial Sequence: Synthetic oligonucleotide
  Sense strand starting at position 3349 of SEQ ID NO: 1885892
auuucccagcugugugauu

SEQ ID NO: 2375441 - RNA, 19 nt, Artificial Sequence
  Description of Artificial Sequence: Synthetic oligonucleotide
  Antisense strand to SEQ ID NO: 2375440
aaucacacagcugggaaau

SEQ ID NO: 2375442 - RNA, 19 nt, Artificial Sequence
  Description of Artificial Sequence: Synthetic oligonucleotide
  Sense strand starting at position 3393 of SEQ ID NO: 1885892
ucaguuuccugauugggaa

SEQ ID NO: 2375443 - RNA, 19 nt, Artificial Sequence
  Description of Artificial Sequence: Synthetic oligonucleotide
  Antisense strand to SEQ ID NO: 2375442
uucccaaucaggaaacuga

SEQ ID NO: 2375444 - RNA, 19 nt, Artificial Sequence
  Description of Artificial Sequence: Synthetic oligonucleotide
  Sense strand starting at position 3394 of SEQ ID NO: 1885892
caguuuccugauugggaaa

SEQ ID NO: 2375445 - RNA, 19 nt, Artificial Sequence
  Description of Artificial Sequence: Synthetic oligonucleotide
  Antisense strand to SEQ ID NO: 2375444
uuucccaaucaggaaacug

SEQ ID NO: 2375446 - RNA, 19 nt, Artificial Sequence
  Description of Artificial Sequence: Synthetic oligonucleotide
  Sense strand starting at position 3473 of SEQ ID NO: 1885892
cuugaauugugucucucag

SEQ ID NO: 2375447 - RNA, 19 nt, Artificial Sequence
  Description of Artificial Sequence: Synthetic oligonucleotide
  Antisense strand to SEQ ID NO: 2375446
cugagagacacaauucaag

SEQ ID NO: 2375448 - RNA, 19 nt, Artificial Sequence
  Description of Artificial Sequence: Synthetic oligonucleotide
  Sense strand starting at position 3627 of SEQ ID NO: 1885892
ugcugcugccaauguaaga

SEQ ID NO: 2375449 - RNA, 19 nt, Artificial Sequence
  Description of Artificial Sequence: Synthetic oligonucleotide
  Antisense strand to SEQ ID NO: 2375448
ucuuacauuggcagcagca

SEQ ID NO: 2375450 - RNA, 19 nt, Artificial Sequence
  Description of Artificial Sequence: Synthetic oligonucleotide
  Sense strand starting at position 3945 of SEQ ID NO: 1885892
cccgaaugcugauagugau

SEQ ID NO: 2375451 - RNA, 19 nt, Artificial Sequence
  Description of Artificial Sequence: Synthetic oligonucleotide
  Antisense strand to SEQ ID NO: 2375450
aucacuaucagcauucggg

SEQ ID NO: 2375452 - RNA, 19 nt, Artificial Sequence
  Description of Artificial Sequence: Synthetic oligonucleotide
  Sense strand starting at position 825 of SEQ ID NO: 1885893
cucugaugguuccacaacu

SEQ ID NO: 2375453 - RNA, 19 nt, Artificial Sequence
  Description of Artificial Sequence: Synthetic oligonucleotide
  Antisense strand to SEQ ID NO: 2375452
aguuguggaaccaucagag

SEQ ID NO: 2375454 - RNA, 19 nt, Artificial Sequence
  Description of Artificial Sequence: Synthetic oligonucleotide
  Sense strand starting at position 852 of SEQ ID NO: 1885893
gggcauggagccuguugua

SEQ ID NO: 2375455 - RNA, 19 nt, Artificial Sequence
  Description of Artificial Sequence: Synthetic oligonucleotide
  Antisense strand to SEQ ID NO: 2375454
uacaacaggcuccaugccc

SEQ ID NO: 2375456 - RNA, 19 nt, Artificial Sequence
  Description of Artificial Sequence: Synthetic oligonucleotide
  Sense strand starting at position 1992 of SEQ ID NO: 1885893
ugaacucacguuggaaguu

SEQ ID NO: 2375457 - RNA, 19 nt, Artificial Sequence
  Description of Artificial Sequence: Synthetic oligonucleotide
  Antisense strand to SEQ ID NO: 2375456
aacuuccaacgugaguuca

SEQ ID NO: 2375458 - RNA, 19 nt, Artificial Sequence
  Description of Artificial Sequence: Synthetic oligonucleotide
  Sense strand starting at position 1993 of SEQ ID NO: 1885893
gaacucacguuggaaguua

SEQ ID NO: 2375459 - RNA, 19 nt, Artificial Sequence
  Description of Artificial Sequence: Synthetic oligonucleotide
  Antisense strand to SEQ ID NO: 2375458
uaacuuccaacgugaguuc

SEQ ID NO: 2375460 - RNA, 19 nt, Artificial Sequence
  Description of Artificial Sequence: Synthetic oligonucleotide
  Sense strand starting at position 3846 of SEQ ID NO: 1885893
cccuacuccgacuagaguu

SEQ ID NO: 2375461 - RNA, 19 nt, Artificial Sequence
  Description of Artificial Sequence: Synthetic oligonucleotide
  Antisense strand to SEQ ID NO: 2375460
aacucuagucggaguaggg

SEQ ID NO: 2375462 - RNA, 19 nt, Artificial Sequence
  Description of Artificial Sequence: Synthetic oligonucleotide
  Sense strand starting at position 46 of SEQ ID NO: 1885895
aagugaugccuccacugca

SEQ ID NO: 2375463 - RNA, 19 nt, Artificial Sequence
  Description of Artificial Sequence: Synthetic oligonucleotide
  Antisense strand to SEQ ID NO: 2375462
ugcaguggaggcaucacuu

SEQ ID NO: 2375464 - RNA, 19 nt, Artificial Sequence
  Description of Artificial Sequence: Synthetic oligonucleotide
  Sense strand starting at position 116 of SEQ ID NO: 1885895
agcgcucugagcugaaaca

SEQ ID NO: 2375465 - RNA, 19 nt, Artificial Sequence
  Description of Artificial Sequence: Synthetic oligonucleotide
  Antisense strand to SEQ ID NO: 2375464
uguuucagcucagagcgcu

SEQ ID NO: 2375466 - RNA, 19 nt, Artificial Sequence
  Description of Artificial Sequence: Synthetic oligonucleotide
  Sense strand starting at position 117 of SEQ ID NO: 1885895
gcgcucugagcugaaacau

SEQ ID NO: 2375467 - RNA, 19 nt, Artificial Sequence
  Description of Artificial Sequence: Synthetic oligonucleotide
  Antisense strand to SEQ ID NO: 2375466
auguuucagcucagagcgc

SEQ ID NO: 2375468 - RNA, 19 nt, Artificial Sequence
  Description of Artificial Sequence: Synthetic oligonucleotide
  Sense strand starting at position 156 of SEQ ID NO: 1885895
cucucucggucucaugaga

SEQ ID NO: 2375469 - RNA, 19 nt, Artificial Sequence
  Description of Artificial Sequence: Synthetic oligonucleotide
  Antisense strand to SEQ ID NO: 2375468
ucucaugagaccgagagag

SEQ ID NO: 2375470 - RNA, 19 nt, Artificial Sequence
  Description of Artificial Sequence: Synthetic oligonucleotide
  Sense strand starting at position 161 of SEQ ID NO: 1885895
ucggucucaugagauaauc

SEQ ID NO: 2375471 - RNA, 19 nt, Artificial Sequence
  Description of Artificial Sequence: Synthetic oligonucleotide
  Antisense strand to SEQ ID NO: 2375470
gauuaucucaugagaccga

SEQ ID NO: 2375472 - RNA, 19 nt, Artificial Sequence
  Description of Artificial Sequence: Synthetic oligonucleotide
  Sense strand starting at position 421 of SEQ ID NO: 1885895
ggcuuaaaguugucuagua

SEQ ID NO: 2375473 - RNA, 19 nt, Artificial Sequence
  Description of Artificial Sequence: Synthetic oligonucleotide
  Antisense strand to SEQ ID NO: 2375472
uacuagacaacuuuaagcc

SEQ ID NO: 2375474 - RNA, 19 nt, Artificial Sequence
  Description of Artificial Sequence: Synthetic oligonucleotide
  Sense strand starting at position 422 of SEQ ID NO: 1885895
gcuuaaaguugucuaguau

SEQ ID NO: 2375475 - RNA, 19 nt, Artificial Sequence
  Description of Artificial Sequence: Synthetic oligonucleotide
  Antisense strand to SEQ ID NO: 2375474
auacuagacaacuuuaagc

SEQ ID NO: 2375476 - RNA, 19 nt, Artificial Sequence
  Description of Artificial Sequence: Synthetic oligonucleotide
  Sense strand starting at position 423 of SEQ ID NO: 1885895
cuuaaaguugucuaguauu

SEQ ID NO: 2375477 - RNA, 19 nt, Artificial Sequence
  Description of Artificial Sequence: Synthetic oligonucleotide
  Antisense strand to SEQ ID NO: 2375476
aauacuagacaacuuuaag

SEQ ID NO: 2375478 - RNA, 19 nt, Artificial Sequence
  Description of Artificial Sequence: Synthetic oligonucleotide
  Sense strand starting at position 467 of SEQ ID NO: 1885895
gaaauugaaccaggcagua

SEQ ID NO: 2375479 - RNA, 19 nt, Artificial Sequence
  Description of Artificial Sequence: Synthetic oligonucleotide
  Antisense strand to SEQ ID NO: 2375478
uacugccugguucaauuuc

SEQ ID NO: 2375480 - RNA, 19 nt, Artificial Sequence
  Description of Artificial Sequence: Synthetic oligonucleotide
  Sense strand starting at position 491 of SEQ ID NO: 1885895
ccaggauccugugccuuua

SEQ ID NO: 2375481 - RNA, 19 nt, Artificial Sequence
  Description of Artificial Sequence: Synthetic oligonucleotide
  Antisense strand to SEQ ID NO: 2375480
uaaaggcacaggauccugg

SEQ ID NO: 2375482 - RNA, 19 nt, Artificial Sequence
  Description of Artificial Sequence: Synthetic oligonucleotide
  Sense strand starting at position 517 of SEQ ID NO: 1885895
ccuaguguuggcuacacaa

SEQ ID NO: 2375483 - RNA, 19 nt, Artificial Sequence
  Description of Artificial Sequence: Synthetic oligonucleotide
  Antisense strand to SEQ ID NO: 2375482
uuguguagccaacacuagg

SEQ ID NO: 2375484 - RNA, 19 nt, Artificial Sequence
  Description of Artificial Sequence: Synthetic oligonucleotide
  Sense strand starting at position 650 of SEQ ID NO: 1885895
aucuauugagguggauauu

SEQ ID NO: 2375485 - RNA, 19 nt, Artificial Sequence
  Description of Artificial Sequence: Synthetic oligonucleotide
  Antisense strand to SEQ ID NO: 2375484
aauauccaccucaauagau

SEQ ID NO: 2375486 - RNA, 19 nt, Artificial Sequence
  Description of Artificial Sequence: Synthetic oligonucleotide
  Sense strand starting at position 756 of SEQ ID NO: 1885895
gccuucuugugacugcauu

SEQ ID NO: 2375487 - RNA, 19 nt, Artificial Sequence
  Description of Artificial Sequence: Synthetic oligonucleotide
  Antisense strand to SEQ ID NO: 2375486
aaugcagucacaagaaggc

SEQ ID NO: 2375488 - RNA, 19 nt, Artificial Sequence
  Description of Artificial Sequence: Synthetic oligonucleotide
  Sense strand starting at position 817 of SEQ ID NO: 1885895
gugcucuguucccuuggga

SEQ ID NO: 2375489 - RNA, 19 nt, Artificial Sequence
  Description of Artificial Sequence: Synthetic oligonucleotide
  Antisense strand to SEQ ID NO: 2375488
ucccaagggaacagagcac

SEQ ID NO: 2375490 - RNA, 19 nt, Artificial Sequence
  Description of Artificial Sequence: Synthetic oligonucleotide
  Sense strand starting at position 908 of SEQ ID NO: 1885895
ggcgagugugaggaaugua

SEQ ID NO: 2375491 - RNA, 19 nt, Artificial Sequence
  Description of Artificial Sequence: Synthetic oligonucleotide
  Antisense strand to SEQ ID NO: 2375490
uacauuccucacacucgcc

SEQ ID NO: 2375492 - RNA, 19 nt, Artificial Sequence
  Description of Artificial Sequence: Synthetic oligonucleotide
  Sense strand starting at position 2428 of SEQ ID NO: 1885895
uggucaaaccgcguuucua

SEQ ID NO: 2375493 - RNA, 19 nt, Artificial Sequence
  Description of Artificial Sequence: Synthetic oligonucleotide
  Antisense strand to SEQ ID NO: 2375492
uagaaacgcgguuugacca

SEQ ID NO: 2375494 - RNA, 19 nt, Artificial Sequence
  Description of Artificial Sequence: Synthetic oligonucleotide
  Sense strand starting at position 2429 of SEQ ID NO: 1885895
ggucaaaccgcguuucuac

SEQ ID NO: 2375495 - RNA, 19 nt, Artificial Sequence
  Description of Artificial Sequence: Synthetic oligonucleotide
  Antisense strand to SEQ ID NO: 2375494
guagaaacgcgguuugacc

SEQ ID NO: 2375496 - RNA, 19 nt, Artificial Sequence
  Description of Artificial Sequence: Synthetic oligonucleotide
  Sense strand starting at position 2718 of SEQ ID NO: 1885895
gccuaugucccuugacagu

SEQ ID NO: 2375497 - RNA, 19 nt, Artificial Sequence
  Description of Artificial Sequence: Synthetic oligonucleotide
  Antisense strand to SEQ ID NO: 2375496
acugucaagggacauaggc

SEQ ID NO: 2375498 - RNA, 19 nt, Artificial Sequence
  Description of Artificial Sequence: Synthetic oligonucleotide
  Sense strand starting at position 2729 of SEQ ID NO: 1885895
uugacaguccacggguuaa

SEQ ID NO: 2375499 - RNA, 19 nt, Artificial Sequence
  Description of Artificial Sequence: Synthetic oligonucleotide
  Antisense strand to SEQ ID NO: 2375498
uuaacccguggacugucaa

SEQ ID NO: 2375500 - RNA, 19 nt, Artificial Sequence
  Description of Artificial Sequence: Synthetic oligonucleotide
  Sense strand starting at position 3074 of SEQ ID NO: 1885895
uagcaauauguuuaaguag

SEQ ID NO: 2375501 - RNA, 19 nt, Artificial Sequence
  Description of Artificial Sequence: Synthetic oligonucleotide
  Antisense strand to SEQ ID NO: 2375500
cuacuuaaacauauugcua

SEQ ID NO: 2375502 - RNA, 19 nt, Artificial Sequence
  Description of Artificial Sequence: Synthetic oligonucleotide
  Sense strand starting at position 3081 of SEQ ID NO: 1885895
auguuuaaguaguuacaag

SEQ ID NO: 2375503 - RNA, 19 nt, Artificial Sequence
  Description of Artificial Sequence: Synthetic oligonucleotide
  Antisense strand to SEQ ID NO: 2375502
cuuguaacuacuuaaacau

SEQ ID NO: 2375504 - RNA, 19 nt, Artificial Sequence
  Description of Artificial Sequence: Synthetic oligonucleotide
  Sense strand starting at position 3117 of SEQ ID NO: 1885895
gugacaguuuggguugaau

SEQ ID NO: 2375505 - RNA, 19 nt, Artificial Sequence
  Description of Artificial Sequence: Synthetic oligonucleotide
  Antisense strand to SEQ ID NO: 2375504
auucaacccaaacugucac

SEQ ID NO: 2375506 - RNA, 19 nt, Artificial Sequence
  Description of Artificial Sequence: Synthetic oligonucleotide
  Sense strand starting at position 3132 of SEQ ID NO: 1885895
gaauuucuaucguuugcag

SEQ ID NO: 2375507 - RNA, 19 nt, Artificial Sequence
  Description of Artificial Sequence: Synthetic oligonucleotide
  Antisense strand to SEQ ID NO: 2375506
cugcaaacgauagaaauuc

SEQ ID NO: 2375508 - RNA, 19 nt, Artificial Sequence
  Description of Artificial Sequence: Synthetic oligonucleotide
  Sense strand starting at position 3342 of SEQ ID NO: 1885895
ucuggaagggcucauugua

SEQ ID NO: 2375509 - RNA, 19 nt, Artificial Sequence
  Description of Artificial Sequence: Synthetic oligonucleotide
  Antisense strand to SEQ ID NO: 2375508
uacaaugagcccuuccaga

SEQ ID NO: 2375510 - RNA, 19 nt, Artificial Sequence
  Description of Artificial Sequence: Synthetic oligonucleotide
  Sense strand starting at position 3376 of SEQ ID NO: 1885895
guaagagucccguacaggu

SEQ ID NO: 2375511 - RNA, 19 nt, Artificial Sequence
  Description of Artificial Sequence: Synthetic oligonucleotide
  Antisense strand to SEQ ID NO: 2375510
accuguacgggacucuuac

SEQ ID NO: 2375512 - RNA, 19 nt, Artificial Sequence
  Description of Artificial Sequence: Synthetic oligonucleotide
  Sense strand starting at position 3417 of SEQ ID NO: 1885895
gcuucugugugagcuguuu

SEQ ID NO: 2375513 - RNA, 19 nt, Artificial Sequence
  Description of Artificial Sequence: Synthetic oligonucleotide
  Antisense strand to SEQ ID NO: 2375512
aaacagcucacacagaagc

SEQ ID NO: 2375514 - RNA, 19 nt, Artificial Sequence
  Description of Artificial Sequence: Synthetic oligonucleotide
  Sense strand starting at position 3684 of SEQ ID NO: 1885895
gucaguaaaugcuugguaa

SEQ ID NO: 2375515 - RNA, 19 nt, Artificial Sequence
  Description of Artificial Sequence: Synthetic oligonucleotide
  Antisense strand to SEQ ID NO: 2375514
uuaccaagcauuuacugac

SEQ ID NO: 2375516 - RNA, 19 nt, Artificial Sequence
  Description of Artificial Sequence: Synthetic oligonucleotide
  Sense strand starting at position 3685 of SEQ ID NO: 1885895
ucaguaaaugcuugguaaa

SEQ ID NO: 2375517 - RNA, 19 nt, Artificial Sequence
  Description of Artificial Sequence: Synthetic oligonucleotide
  Antisense strand to SEQ ID NO: 2375516
uuuaccaagcauuuacuga

SEQ ID NO: 2375518 - RNA, 19 nt, Artificial Sequence
  Description of Artificial Sequence: Synthetic oligonucleotide
  Sense strand starting at position 3715 of SEQ ID NO: 1885895
uugaguauaugacccuauu

SEQ ID NO: 2375519 - RNA, 19 nt, Artificial Sequence
  Description of Artificial Sequence: Synthetic oligonucleotide
  Antisense strand to SEQ ID NO: 2375518
aauagggucauauacucaa

SEQ ID NO: 2375520 - RNA, 19 nt, Artificial Sequence
  Description of Artificial Sequence: Synthetic oligonucleotide
  Sense strand starting at position 3737 of SEQ ID NO: 1885895
gcuauaucgugcuugaaca

SEQ ID NO: 2375521 - RNA, 19 nt, Artificial Sequence
  Description of Artificial Sequence: Synthetic oligonucleotide
  Antisense strand to SEQ ID NO: 2375520
uguucaagcacgauauagc

SEQ ID NO: 2375522 - RNA, 19 nt, Artificial Sequence
  Description of Artificial Sequence: Synthetic oligonucleotide
  Sense strand starting at position 3738 of SEQ ID NO: 1885895
cuauaucgugcuugaacag

SEQ ID NO: 2375523 - RNA, 19 nt, Artificial Sequence
  Description of Artificial Sequence: Synthetic oligonucleotide
  Antisense strand to SEQ ID NO: 2375522
cuguucaagcacgauauag

SEQ ID NO: 2375524 - RNA, 19 nt, Artificial Sequence
  Description of Artificial Sequence: Synthetic oligonucleotide
  Sense strand starting at position 3739 of SEQ ID NO: 1885895
uauaucgugcuugaacaga

SEQ ID NO: 2375525 - RNA, 19 nt, Artificial Sequence
  Description of Artificial Sequence: Synthetic oligonucleotide
  Antisense strand to SEQ ID NO: 2375524
ucuguucaagcacgauaua

SEQ ID NO: 2375526 - RNA, 19 nt, Artificial Sequence
  Description of Artificial Sequence: Synthetic oligonucleotide
  Sense strand starting at position 3744 of SEQ ID NO: 1885895
cgugcuugaacagaaaucu

SEQ ID NO: 2375527 - RNA, 19 nt, Artificial Sequence
  Description of Artificial Sequence: Synthetic oligonucleotide
  Antisense strand to SEQ ID NO: 2375526
agauuucuguucaagcacg

SEQ ID NO: 2375528 - RNA, 19 nt, Artificial Sequence
  Description of Artificial Sequence: Synthetic oligonucleotide
  Sense strand starting at position 3760 of SEQ ID NO: 1885895
ucuuaacugccuugaaagu

SEQ ID NO: 2375529 - RNA, 19 nt, Artificial Sequence
  Description of Artificial Sequence: Synthetic oligonucleotide
  Antisense strand to SEQ ID NO: 2375528
acuuucaaggcaguuaaga

SEQ ID NO: 2375530 - RNA, 19 nt, Artificial Sequence
  Description of Artificial Sequence: Synthetic oligonucleotide
  Sense strand starting at position 3761 of SEQ ID NO: 1885895
cuuaacugccuugaaaguu

SEQ ID NO: 2375531 - RNA, 19 nt, Artificial Sequence
  Description of Artificial Sequence: Synthetic oligonucleotide
  Antisense strand to SEQ ID NO: 2375530
aacuuucaaggcaguuaag

SEQ ID NO: 2375532 - RNA, 19 nt, Artificial Sequence
  Description of Artificial Sequence: Synthetic oligonucleotide
  Sense strand starting at position 3770 of SEQ ID NO: 1885895
cuugaaaguuaacugcuaa

SEQ ID NO: 2375533 - RNA, 19 nt, Artificial Sequence
  Description of Artificial Sequence: Synthetic oligonucleotide
  Antisense strand to SEQ ID NO: 2375532
uuagcaguuaacuuucaag

SEQ ID NO: 2375534 - RNA, 19 nt, Artificial Sequence
  Description of Artificial Sequence: Synthetic oligonucleotide
  Sense strand starting at position 3846 of SEQ ID NO: 1885895
ucucuaagggcuugaagga

SEQ ID NO: 2375535 - RNA, 19 nt, Artificial Sequence
  Description of Artificial Sequence: Synthetic oligonucleotide
  Antisense strand to SEQ ID NO: 2375534
uccuucaagcccuuagaga

SEQ ID NO: 2375536 - RNA, 19 nt, Artificial Sequence
  Description of Artificial Sequence: Synthetic oligonucleotide
  Sense strand starting at position 3969 of SEQ ID NO: 1885895
uuguaacaguauuauguga

SEQ ID NO: 2375537 - RNA, 19 nt, Artificial Sequence
  Description of Artificial Sequence: Synthetic oligonucleotide
  Antisense strand to SEQ ID NO: 2375536
ucacauaauacuguuacaa

SEQ ID NO: 2375538 - RNA, 19 nt, Artificial Sequence
  Description of Artificial Sequence: Synthetic oligonucleotide
  Sense strand starting at position 3974 of SEQ ID NO: 1885895
acaguauuaugugaucucu

SEQ ID NO: 2375539 - RNA, 19 nt, Artificial Sequence
  Description of Artificial Sequence: Synthetic oligonucleotide
  Antisense strand to SEQ ID NO: 2375538
agagaucacauaauacugu

SEQ ID NO: 2375540 - RNA, 19 nt, Artificial Sequence
  Description of Artificial Sequence: Synthetic oligonucleotide
  Sense strand starting at position 3976 of SEQ ID NO: 1885895
aguauuaugugaucucuuu

SEQ ID NO: 2375541 - RNA, 19 nt, Artificial Sequence
  Description of Artificial Sequence: Synthetic oligonucleotide
  Antisense strand to SEQ ID NO: 2375540
aaagagaucacauaauacu

SEQ ID NO: 2375542 - RNA, 19 nt, Artificial Sequence
  Description of Artificial Sequence: Synthetic oligonucleotide
  Sense strand starting at position 345 of SEQ ID NO: 1885896
uacccaauucggcaugaga

SEQ ID NO: 2375543 - RNA, 19 nt, Artificial Sequence
  Description of Artificial Sequence: Synthetic oligonucleotide
  Antisense strand to SEQ ID NO: 2375542
ucucaugccgaauugggua

SEQ ID NO: 2375544 - RNA, 19 nt, Artificial Sequence
  Description of Artificial Sequence: Synthetic oligonucleotide
  Sense strand starting at position 464 of SEQ ID NO: 1885896
ugacucauuugguaaauau

SEQ ID NO: 2375545 - RNA, 19 nt, Artificial Sequence
  Description of Artificial Sequence: Synthetic oligonucleotide
  Antisense strand to SEQ ID NO: 2375544
auauuuaccaaaugaguca

SEQ ID NO: 2375546 - RNA, 19 nt, Artificial Sequence
  Description of Artificial Sequence: Synthetic oligonucleotide
  Sense strand starting at position 496 of SEQ ID NO: 1885896
aucuuaaagcuguaugauu

SEQ ID NO: 2375547 - RNA, 19 nt, Artificial Sequence
  Description of Artificial Sequence: Synthetic oligonucleotide
  Antisense strand to SEQ ID NO: 2375546
aaucauacagcuuuaagau

SEQ ID NO: 2375548 - RNA, 19 nt, Artificial Sequence
  Description of Artificial Sequence: Synthetic oligonucleotide
  Sense strand starting at position 501 of SEQ ID NO: 1885896
aaagcuguaugauucuaga

SEQ ID NO: 2375549 - RNA, 19 nt, Artificial Sequence
  Description of Artificial Sequence: Synthetic oligonucleotide
  Antisense strand to SEQ ID NO: 2375548
ucuagaaucauacagcuuu

SEQ ID NO: 2375550 - RNA, 19 nt, Artificial Sequence
  Description of Artificial Sequence: Synthetic oligonucleotide
  Sense strand starting at position 529 of SEQ ID NO: 1885896
ugauauguagacugucacu

SEQ ID NO: 2375551 - RNA, 19 nt, Artificial Sequence
  Description of Artificial Sequence: Synthetic oligonucleotide
  Antisense strand to SEQ ID NO: 2375550
agugacagucuacauauca

SEQ ID NO: 2375552 - RNA, 19 nt, Artificial Sequence
  Description of Artificial Sequence: Synthetic oligonucleotide
  Sense strand starting at position 568 of SEQ ID NO: 1885896
uagaguugagaaugucaaa

SEQ ID NO: 2375553 - RNA, 19 nt, Artificial Sequence
  Description of Artificial Sequence: Synthetic oligonucleotide
  Antisense strand to SEQ ID NO: 2375552
uuugacauucucaacucua

SEQ ID NO: 2375554 - RNA, 19 nt, Artificial Sequence
  Description of Artificial Sequence: Synthetic oligonucleotide
  Sense strand starting at position 665 of SEQ ID NO: 1885896
ggcaucaucccucaugacu

SEQ ID NO: 2375555 - RNA, 19 nt, Artificial Sequence
  Description of Artificial Sequence: Synthetic oligonucleotide
  Antisense strand to SEQ ID NO: 2375554
agucaugagggaugaugcc

SEQ ID NO: 2375556 - RNA, 19 nt, Artificial Sequence
  Description of Artificial Sequence: Synthetic oligonucleotide
  Sense strand starting at position 691 of SEQ ID NO: 1885896
ucuuguaucccauaucgaa

SEQ ID NO: 2375557 - RNA, 19 nt, Artificial Sequence
  Description of Artificial Sequence: Synthetic oligonucleotide
  Antisense strand to SEQ ID NO: 2375556
uucgauaugggauacaaga

SEQ ID NO: 2375558 - RNA, 19 nt, Artificial Sequence
  Description of Artificial Sequence: Synthetic oligonucleotide
  Sense strand starting at position 833 of SEQ ID NO: 1885896
guggauucucaacacugca

SEQ ID NO: 2375559 - RNA, 19 nt, Artificial Sequence
  Description of Artificial Sequence: Synthetic oligonucleotide
  Antisense strand to SEQ ID NO: 2375558
ugcaguguugagaauccac

SEQ ID NO: 2375560 - RNA, 19 nt, Artificial Sequence
  Description of Artificial Sequence: Synthetic oligonucleotide
  Sense strand starting at position 983 of SEQ ID NO: 1885896
acggaucugccuuaaucuu

SEQ ID NO: 2375561 - RNA, 19 nt, Artificial Sequence
  Description of Artificial Sequence: Synthetic oligonucleotide
  Antisense strand to SEQ ID NO: 2375560
aagauuaaggcagauccgu

SEQ ID NO: 2375562 - RNA, 19 nt, Artificial Sequence
  Description of Artificial Sequence: Synthetic oligonucleotide
  Sense strand starting at position 1238 of SEQ ID NO: 1885896
ccuuuaagauauguauugu

SEQ ID NO: 2375563 - RNA, 19 nt, Artificial Sequence
  Description of Artificial Sequence: Synthetic oligonucleotide
  Antisense strand to SEQ ID NO: 2375562
acaauacauaucuuaaagg

SEQ ID NO: 2375564 - RNA, 19 nt, Artificial Sequence
  Description of Artificial Sequence: Synthetic oligonucleotide
  Sense strand starting at position 1319 of SEQ ID NO: 1885896
guuguauccacagagucua

SEQ ID NO: 2375565 - RNA, 19 nt, Artificial Sequence
  Description of Artificial Sequence: Synthetic oligonucleotide
  Antisense strand to SEQ ID NO: 2375564
uagacucuguggauacaac

SEQ ID NO: 2375566 - RNA, 19 nt, Artificial Sequence
  Description of Artificial Sequence: Synthetic oligonucleotide
  Sense strand starting at position 1418 of SEQ ID NO: 1885896
cauugcucuuuggugaaga

SEQ ID NO: 2375567 - RNA, 19 nt, Artificial Sequence
  Description of Artificial Sequence: Synthetic oligonucleotide
  Antisense strand to SEQ ID NO: 2375566
ucuucaccaaagagcaaug

SEQ ID NO: 2375568 - RNA, 19 nt, Artificial Sequence
  Description of Artificial Sequence: Synthetic oligonucleotide
  Sense strand starting at position 1693 of SEQ ID NO: 1885896
cagcaauugggacgcuaaa

SEQ ID NO: 2375569 - RNA, 19 nt, Artificial Sequence
  Description of Artificial Sequence: Synthetic oligonucleotide
  Antisense strand to SEQ ID NO: 2375568
uuuagcgucccaauugcug

SEQ ID NO: 2375570 - RNA, 19 nt, Artificial Sequence
  Description of Artificial Sequence: Synthetic oligonucleotide
  Sense strand starting at position 2374 of SEQ ID NO: 1885896
gccagagggauugguuuaa

SEQ ID NO: 2375571 - RNA, 19 nt, Artificial Sequence
  Description of Artificial Sequence: Synthetic oligonucleotide
  Antisense strand to SEQ ID NO: 2375570
uuaaaccaaucccucuggc

SEQ ID NO: 2375572 - RNA, 19 nt, Artificial Sequence
  Description of Artificial Sequence: Synthetic oligonucleotide
  Sense strand starting at position 2627 of SEQ ID NO: 1885896
acagauguggauugcuuau

SEQ ID NO: 2375573 - RNA, 19 nt, Artificial Sequence
  Description of Artificial Sequence: Synthetic oligonucleotide
  Antisense strand to SEQ ID NO: 2375572
auaagcaauccacaucugu

SEQ ID NO: 2375574 - RNA, 19 nt, Artificial Sequence
  Description of Artificial Sequence: Synthetic oligonucleotide
  Sense strand starting at position 2697 of SEQ ID NO: 1885896
gugguagagaccgaauugu

SEQ ID NO: 2375575 - RNA, 19 nt, Artificial Sequence
  Description of Artificial Sequence: Synthetic oligonucleotide
  Antisense strand to SEQ ID NO: 2375574
acaauucggucucuaccac

SEQ ID NO: 2375576 - RNA, 19 nt, Artificial Sequence
  Description of Artificial Sequence: Synthetic oligonucleotide
  Sense strand starting at position 2719 of SEQ ID NO: 1885896
agucuuaugcuagauccag

SEQ ID NO: 2375577 - RNA, 19 nt, Artificial Sequence
  Description of Artificial Sequence: Synthetic oligonucleotide
  Antisense strand to SEQ ID NO: 2375576
cuggaucuagcauaagacu

SEQ ID NO: 2375578 - RNA, 19 nt, Artificial Sequence
  Description of Artificial Sequence: Synthetic oligonucleotide
  Sense strand starting at position 2751 of SEQ ID NO: 1885896
ggacucucaucauugcuuu

SEQ ID NO: 2375579 - RNA, 19 nt, Artificial Sequence
  Description of Artificial Sequence: Synthetic oligonucleotide
  Antisense strand to SEQ ID NO: 2375578
aaagcaaugaugagagucc

SEQ ID NO: 2375580 - RNA, 19 nt, Artificial Sequence
  Description of Artificial Sequence: Synthetic oligonucleotide
  Sense strand starting at position 2757 of SEQ ID NO: 1885896
ucaucauugcuuuagagug

SEQ ID NO: 2375581 - RNA, 19 nt, Artificial Sequence
  Description of Artificial Sequence: Synthetic oligonucleotide
  Antisense strand to SEQ ID NO: 2375580
cacucuaaagcaaugauga

SEQ ID NO: 2375582 - RNA, 19 nt, Artificial Sequence
  Description of Artificial Sequence: Synthetic oligonucleotide
  Sense strand starting at position 2762 of SEQ ID NO: 1885896
auugcuuuagagugaccuu

SEQ ID NO: 2375583 - RNA, 19 nt, Artificial Sequence
  Description of Artificial Sequence: Synthetic oligonucleotide
  Antisense strand to SEQ ID NO: 2375582
aaggucacucuaaagcaau

SEQ ID NO: 2375584 - RNA, 19 nt, Artificial Sequence
  Description of Artificial Sequence: Synthetic oligonucleotide
  Sense strand starting at position 2782 of SEQ ID NO: 1885896
cccuauacuccguauucca

SEQ ID NO: 2375585 - RNA, 19 nt, Artificial Sequence
  Description of Artificial Sequence: Synthetic oligonucleotide
  Antisense strand to SEQ ID NO: 2375584
uggaauacggaguauaggg

SEQ ID NO: 2375586 - RNA, 19 nt, Artificial Sequence
  Description of Artificial Sequence: Synthetic oligonucleotide
  Sense strand starting at position 2807 of SEQ ID NO: 1885896
guuugaugucuguaguaac

SEQ ID NO: 2375587 - RNA, 19 nt, Artificial Sequence
  Description of Artificial Sequence: Synthetic oligonucleotide
  Antisense strand to SEQ ID NO: 2375586
guuacuacagacaucaaac

SEQ ID NO: 2375588 - RNA, 19 nt, Artificial Sequence
  Description of Artificial Sequence: Synthetic oligonucleotide
  Sense strand starting at position 2848 of SEQ ID NO: 1885896
aaauaaguccugugacuga

SEQ ID NO: 2375589 - RNA, 19 nt, Artificial Sequence
  Description of Artificial Sequence: Synthetic oligonucleotide
  Antisense strand to SEQ ID NO: 2375588
ucagucacaggacuuauuu

SEQ ID NO: 2375590 - RNA, 19 nt, Artificial Sequence
  Description of Artificial Sequence: Synthetic oligonucleotide
  Sense strand starting at position 2851 of SEQ ID NO: 1885896
uaaguccugugacugacaa

SEQ ID NO: 2375591 - RNA, 19 nt, Artificial Sequence
  Description of Artificial Sequence: Synthetic oligonucleotide
  Antisense strand to SEQ ID NO: 2375590
uugucagucacaggacuua

SEQ ID NO: 2375592 - RNA, 19 nt, Artificial Sequence
  Description of Artificial Sequence: Synthetic oligonucleotide
  Sense strand starting at position 2852 of SEQ ID NO: 1885896
aaguccugugacugacaaa

SEQ ID NO: 2375593 - RNA, 19 nt, Artificial Sequence
  Description of Artificial Sequence: Synthetic oligonucleotide
  Antisense strand to SEQ ID NO: 2375592
uuugucagucacaggacuu

SEQ ID NO: 2375594 - RNA, 19 nt, Artificial Sequence
  Description of Artificial Sequence: Synthetic oligonucleotide
  Sense strand starting at position 2994 of SEQ ID NO: 1885896
gagugucuuagauacagug

SEQ ID NO: 2375595 - RNA, 19 nt, Artificial Sequence
  Description of Artificial Sequence: Synthetic oligonucleotide
  Antisense strand to SEQ ID NO: 2375594
cacuguaucuaagacacuc

SEQ ID NO: 2375596 - RNA, 19 nt, Artificial Sequence
  Description of Artificial Sequence: Synthetic oligonucleotide
  Sense strand starting at position 3063 of SEQ ID NO: 1885896
cguuaagucccuuagguaa

SEQ ID NO: 2375597 - RNA, 19 nt, Artificial Sequence
  Description of Artificial Sequence: Synthetic oligonucleotide
  Antisense strand to SEQ ID NO: 2375596
uuaccuaagggacuuaacg

SEQ ID NO: 2375598 - RNA, 19 nt, Artificial Sequence
  Description of Artificial Sequence: Synthetic oligonucleotide
  Sense strand starting at position 3080 of SEQ ID NO: 1885896
aauugauacuggcuguaag

SEQ ID NO: 2375599 - RNA, 19 nt, Artificial Sequence
  Description of Artificial Sequence: Synthetic oligonucleotide
  Antisense strand to SEQ ID NO: 2375598
cuuacagccaguaucaauu

SEQ ID NO: 2375600 - RNA, 19 nt, Artificial Sequence
  Description of Artificial Sequence: Synthetic oligonucleotide
  Sense strand starting at position 3112 of SEQ ID NO: 1885896
aggacuugauaugagauuu

SEQ ID NO: 2375601 - RNA, 19 nt, Artificial Sequence
  Description of Artificial Sequence: Synthetic oligonucleotide
  Antisense strand to SEQ ID NO: 2375600
aaaucucauaucaaguccu

SEQ ID NO: 2375602 - RNA, 19 nt, Artificial Sequence
  Description of Artificial Sequence: Synthetic oligonucleotide
  Sense strand starting at position 3137 of SEQ ID NO: 1885896
uacuguagugucuggaaua

SEQ ID NO: 2375603 - RNA, 19 nt, Artificial Sequence
  Description of Artificial Sequence: Synthetic oligonucleotide
  Antisense strand to SEQ ID NO: 2375602
uauuccagacacuacagua

SEQ ID NO: 2375604 - RNA, 19 nt, Artificial Sequence
  Description of Artificial Sequence: Synthetic oligonucleotide
  Sense strand starting at position 3228 of SEQ ID NO: 1885896
guaaauguccucuguaaca

SEQ ID NO: 2375605 - RNA, 19 nt, Artificial Sequence
  Description of Artificial Sequence: Synthetic oligonucleotide
  Antisense strand to SEQ ID NO: 2375604
uguuacagaggacauuuac

SEQ ID NO: 2375606 - RNA, 19 nt, Artificial Sequence
  Description of Artificial Sequence: Synthetic oligonucleotide
  Sense strand starting at position 3318 of SEQ ID NO: 1885896
auuuacaucgcuugccaaa

SEQ ID NO: 2375607 - RNA, 19 nt, Artificial Sequence
  Description of Artificial Sequence: Synthetic oligonucleotide
  Antisense strand to SEQ ID NO: 2375606
uuuggcaagcgauguaaau

SEQ ID NO: 2375608 - RNA, 19 nt, Artificial Sequence
  Description of Artificial Sequence: Synthetic oligonucleotide
  Sense strand starting at position 3405 of SEQ ID NO: 1885896
gguagagucaguuacacua

SEQ ID NO: 2375609 - RNA, 19 nt, Artificial Sequence
  Description of Artificial Sequence: Synthetic oligonucleotide
  Antisense strand to SEQ ID NO: 2375608
uaguguaacugacucuacc

SEQ ID NO: 2375610 - RNA, 19 nt, Artificial Sequence
  Description of Artificial Sequence: Synthetic oligonucleotide
  Sense strand starting at position 3421 of SEQ ID NO: 1885896
cuaaauaaccuguaaugug

SEQ ID NO: 2375611 - RNA, 19 nt, Artificial Sequence
  Description of Artificial Sequence: Synthetic oligonucleotide
  Antisense strand to SEQ ID NO: 2375610
cacauuacagguuauuuag

SEQ ID NO: 2375612 - RNA, 19 nt, Artificial Sequence
  Description of Artificial Sequence: Synthetic oligonucleotide
  Sense strand starting at position 3436 of SEQ ID NO: 1885896
ugugcauauguugcuuuau

SEQ ID NO: 2375613 - RNA, 19 nt, Artificial Sequence
  Description of Artificial Sequence: Synthetic oligonucleotide
  Antisense strand to SEQ ID NO: 2375612
auaaagcaacauaugcaca

SEQ ID NO: 2375614 - RNA, 19 nt, Artificial Sequence
  Description of Artificial Sequence: Synthetic oligonucleotide
  Sense strand starting at position 3518 of SEQ ID NO: 1885896
ggacauaugcuguaaguau

SEQ ID NO: 2375615 - RNA, 19 nt, Artificial Sequence
  Description of Artificial Sequence: Synthetic oligonucleotide
  Antisense strand to SEQ ID NO: 2375614
auacuuacagcauaugucc

SEQ ID NO: 2375616 - RNA, 19 nt, Artificial Sequence
  Description of Artificial Sequence: Synthetic oligonucleotide
  Sense strand starting at position 3546 of SEQ ID NO: 1885896
agcauuuaccuguaugcuu

SEQ ID NO: 2375617 - RNA, 19 nt, Artificial Sequence
  Description of Artificial Sequence: Synthetic oligonucleotide
  Antisense strand to SEQ ID NO: 2375616
aagcauacagguaaaugcu

SEQ ID NO: 2375618 - RNA, 19 nt, Artificial Sequence
  Description of Artificial Sequence: Synthetic oligonucleotide
  Sense strand starting at position 3566 of SEQ ID NO: 1885896
ugauacagaugccuaugua

SEQ ID NO: 2375619 - RNA, 19 nt, Artificial Sequence
  Description of Artificial Sequence: Synthetic oligonucleotide
  Antisense strand to SEQ ID NO: 2375618
uacauaggcaucuguauca

SEQ ID NO: 2375620 - RNA, 19 nt, Artificial Sequence
  Description of Artificial Sequence: Synthetic oligonucleotide
  Sense strand starting at position 3567 of SEQ ID NO: 1885896
gauacagaugccuauguau

SEQ ID NO: 2375621 - RNA, 19 nt, Artificial Sequence
  Description of Artificial Sequence: Synthetic oligonucleotide
  Antisense strand to SEQ ID NO: 2375620
auacauaggcaucuguauc

SEQ ID NO: 2375622 - RNA, 19 nt, Artificial Sequence
  Description of Artificial Sequence: Synthetic oligonucleotide
  Sense strand starting at position 20 of SEQ ID NO: 1885897
gcuauauaucaggagggcu

SEQ ID NO: 2375623 - RNA, 19 nt, Artificial Sequence
  Description of Artificial Sequence: Synthetic oligonucleotide
  Antisense strand to SEQ ID NO: 2375622
agcccuccugauauauagc

SEQ ID NO: 2375624 - RNA, 19 nt, Artificial Sequence
  Description of Artificial Sequence: Synthetic oligonucleotide
  Sense strand starting at position 22 of SEQ ID NO: 1885897
uauauaucaggagggcuua

SEQ ID NO: 2375625 - RNA, 19 nt, Artificial Sequence
  Description of Artificial Sequence: Synthetic oligonucleotide
  Antisense strand to SEQ ID NO: 2375624
uaagcccuccugauauaua

SEQ ID NO: 2375626 - RNA, 19 nt, Artificial Sequence
  Description of Artificial Sequence: Synthetic oligonucleotide
  Sense strand starting at position 693 of SEQ ID NO: 1885897
gcuauugaaccuuggagag

SEQ ID NO: 2375627 - RNA, 19 nt, Artificial Sequence
  Description of Artificial Sequence: Synthetic oligonucleotide
  Antisense strand to SEQ ID NO: 2375626
cucuccaagguucaauagc

SEQ ID NO: 2375628 - RNA, 19 nt, Artificial Sequence
  Description of Artificial Sequence: Synthetic oligonucleotide
  Sense strand starting at position 1137 of SEQ ID NO: 1885897
cagaaagggucucccacau

SEQ ID NO: 2375629 - RNA, 19 nt, Artificial Sequence
  Description of Artificial Sequence: Synthetic oligonucleotide
  Antisense strand to SEQ ID NO: 2375628
augugggagacccuuucug

SEQ ID NO: 2375630 - RNA, 19 nt, Artificial Sequence
  Description of Artificial Sequence: Synthetic oligonucleotide
  Sense strand starting at position 1267 of SEQ ID NO: 1885897
aaaguugaccuaugcagaa

SEQ ID NO: 2375631 - RNA, 19 nt, Artificial Sequence
  Description of Artificial Sequence: Synthetic oligonucleotide
  Antisense strand to SEQ ID NO: 2375630
uucugcauaggucaacuuu

SEQ ID NO: 2375632 - RNA, 19 nt, Artificial Sequence
  Description of Artificial Sequence: Synthetic oligonucleotide
  Sense strand starting at position 1385 of SEQ ID NO: 1885897
augccagguagugaaagau

SEQ ID NO: 2375633 - RNA, 19 nt, Artificial Sequence
  Description of Artificial Sequence: Synthetic oligonucleotide
  Antisense strand to SEQ ID NO: 2375632
aucuuucacuaccuggcau

SEQ ID NO: 2375634 - RNA, 19 nt, Artificial Sequence
  Description of Artificial Sequence: Synthetic oligonucleotide
  Sense strand starting at position 1435 of SEQ ID NO: 1885897
aguagucucugaucugauu

SEQ ID NO: 2375635 - RNA, 19 nt, Artificial Sequence
  Description of Artificial Sequence: Synthetic oligonucleotide
  Antisense strand to SEQ ID NO: 2375634
aaucagaucagagacuacu

SEQ ID NO: 2375636 - RNA, 19 nt, Artificial Sequence
  Description of Artificial Sequence: Synthetic oligonucleotide
  Sense strand starting at position 1441 of SEQ ID NO: 1885897
cucugaucugauuaucugu

SEQ ID NO: 2375637 - RNA, 19 nt, Artificial Sequence
  Description of Artificial Sequence: Synthetic oligonucleotide
  Antisense strand to SEQ ID NO: 2375636
acagauaaucagaucagag

SEQ ID NO: 2375638 - RNA, 19 nt, Artificial Sequence
  Description of Artificial Sequence: Synthetic oligonucleotide
  Sense strand starting at position 1444 of SEQ ID NO: 1885897
ugaucugauuaucugucua

SEQ ID NO: 2375639 - RNA, 19 nt, Artificial Sequence
  Description of Artificial Sequence: Synthetic oligonucleotide
  Antisense strand to SEQ ID NO: 2375638
uagacagauaaucagauca

SEQ ID NO: 2375640 - RNA, 19 nt, Artificial Sequence
  Description of Artificial Sequence: Synthetic oligonucleotide
  Sense strand starting at position 1446 of SEQ ID NO: 1885897
aucugauuaucugucuaca

SEQ ID NO: 2375641 - RNA, 19 nt, Artificial Sequence
  Description of Artificial Sequence: Synthetic oligonucleotide
  Antisense strand to SEQ ID NO: 2375640
uguagacagauaaucagau

SEQ ID NO: 2375642 - RNA, 19 nt, Artificial Sequence
  Description of Artificial Sequence: Synthetic oligonucleotide
  Sense strand starting at position 1448 of SEQ ID NO: 1885897
cugauuaucugucuacaga

SEQ ID NO: 2375643 - RNA, 19 nt, Artificial Sequence
  Description of Artificial Sequence: Synthetic oligonucleotide
  Antisense strand to SEQ ID NO: 2375642
ucuguagacagauaaucag

SEQ ID NO: 2375644 - RNA, 19 nt, Artificial Sequence
  Description of Artificial Sequence: Synthetic oligonucleotide
  Sense strand starting at position 1449 of SEQ ID NO: 1885897
ugauuaucugucuacagau

SEQ ID NO: 2375645 - RNA, 19 nt, Artificial Sequence
  Description of Artificial Sequence: Synthetic oligonucleotide
  Antisense strand to SEQ ID NO: 2375644
aucuguagacagauaauca

SEQ ID NO: 2375646 - RNA, 19 nt, Artificial Sequence
  Description of Artificial Sequence: Synthetic oligonucleotide
  Sense strand starting at position 1469 of SEQ ID NO: 1885897
guguguuaccuguauggga

SEQ ID NO: 2375647 - RNA, 19 nt, Artificial Sequence
  Description of Artificial Sequence: Synthetic oligonucleotide
  Antisense strand to SEQ ID NO: 2375646
ucccauacagguaacacac

SEQ ID NO: 2375648 - RNA, 19 nt, Artificial Sequence
  Description of Artificial Sequence: Synthetic oligonucleotide
  Sense strand starting at position 1518 of SEQ ID NO: 1885897
gacguuuaucggcaaagau

SEQ ID NO: 2375649 - RNA, 19 nt, Artificial Sequence
  Description of Artificial Sequence: Synthetic oligonucleotide
  Antisense strand to SEQ ID NO: 2375648
aucuuugccgauaaacguc

SEQ ID NO: 2375650 - RNA, 19 nt, Artificial Sequence
  Description of Artificial Sequence: Synthetic oligonucleotide
  Sense strand starting at position 1688 of SEQ ID NO: 1885897
acagaaagaccgcagucuu

SEQ ID NO: 2375651 - RNA, 19 nt, Artificial Sequence
  Description of Artificial Sequence: Synthetic oligonucleotide
  Antisense strand to SEQ ID NO: 2375650
aagacugcggucuuucugu

SEQ ID NO: 2375652 - RNA, 19 nt, Artificial Sequence
  Description of Artificial Sequence: Synthetic oligonucleotide
  Sense strand starting at position 1708 of SEQ ID NO: 1885897
gucugcugccagcuguaau

SEQ ID NO: 2375653 - RNA, 19 nt, Artificial Sequence
  Description of Artificial Sequence: Synthetic oligonucleotide
  Antisense strand to SEQ ID NO: 2375652
auuacagcuggcagcagac

SEQ ID NO: 2375654 - RNA, 19 nt, Artificial Sequence
  Description of Artificial Sequence: Synthetic oligonucleotide
  Sense strand starting at position 1931 of SEQ ID NO: 1885897
gagagugaugccgauucuu

SEQ ID NO: 2375655 - RNA, 19 nt, Artificial Sequence
  Description of Artificial Sequence: Synthetic oligonucleotide
  Antisense strand to SEQ ID NO: 2375654
aagaaucggcaucacucuc

SEQ ID NO: 2375656 - RNA, 19 nt, Artificial Sequence
  Description of Artificial Sequence: Synthetic oligonucleotide
  Sense strand starting at position 1960 of SEQ ID NO: 1885897
uacgaucugagcgaauguu

SEQ ID NO: 2375657 - RNA, 19 nt, Artificial Sequence
  Description of Artificial Sequence: Synthetic oligonucleotide
  Antisense strand to SEQ ID NO: 2375656
aacauucgcucagaucgua

SEQ ID NO: 2375658 - RNA, 19 nt, Artificial Sequence
  Description of Artificial Sequence: Synthetic oligonucleotide
  Sense strand starting at position 1994 of SEQ ID NO: 1885897
auacccucugcuugagaaa

SEQ ID NO: 2375659 - RNA, 19 nt, Artificial Sequence
  Description of Artificial Sequence: Synthetic oligonucleotide
  Antisense strand to SEQ ID NO: 2375658
uuucucaagcagaggguau

SEQ ID NO: 2375660 - RNA, 19 nt, Artificial Sequence
  Description of Artificial Sequence: Synthetic oligonucleotide
  Sense strand starting at position 2382 of SEQ ID NO: 1885897
cucauaaugcgauaaugcu

SEQ ID NO: 2375661 - RNA, 19 nt, Artificial Sequence
  Description of Artificial Sequence: Synthetic oligonucleotide
  Antisense strand to SEQ ID NO: 2375660
agcauuaucgcauuaugag

SEQ ID NO: 2375662 - RNA, 19 nt, Artificial Sequence
  Description of Artificial Sequence: Synthetic oligonucleotide
  Sense strand starting at position 2413 of SEQ ID NO: 1885897
gggcauaaggcucgggaaa

SEQ ID NO: 2375663 - RNA, 19 nt, Artificial Sequence
  Description of Artificial Sequence: Synthetic oligonucleotide
  Antisense strand to SEQ ID NO: 2375662
uuucccgagccuuaugccc

SEQ ID NO: 2375664 - RNA, 19 nt, Artificial Sequence
  Description of Artificial Sequence: Synthetic oligonucleotide
  Sense strand starting at position 2477 of SEQ ID NO: 1885897
gugucuugucuguuuauuc

SEQ ID NO: 2375665 - RNA, 19 nt, Artificial Sequence
  Description of Artificial Sequence: Synthetic oligonucleotide
  Antisense strand to SEQ ID NO: 2375664
gaauaaacagacaagacac

SEQ ID NO: 2375666 - RNA, 19 nt, Artificial Sequence
  Description of Artificial Sequence: Synthetic oligonucleotide
  Sense strand starting at position 2512 of SEQ ID NO: 1885897
gaguuagcgcuaguuguuc

SEQ ID NO: 2375667 - RNA, 19 nt, Artificial Sequence
  Description of Artificial Sequence: Synthetic oligonucleotide
  Antisense strand to SEQ ID NO: 2375666
gaacaacuagcgcuaacuc

SEQ ID NO: 2375668 - RNA, 19 nt, Artificial Sequence
  Description of Artificial Sequence: Synthetic oligonucleotide
  Sense strand starting at position 2534 of SEQ ID NO: 1885897
uuugcaaauuucuugguca

SEQ ID NO: 2375669 - RNA, 19 nt, Artificial Sequence
  Description of Artificial Sequence: Synthetic oligonucleotide
  Antisense strand to SEQ ID NO: 2375668
ugaccaagaaauuugcaaa

SEQ ID NO: 2375670 - RNA, 19 nt, Artificial Sequence
  Description of Artificial Sequence: Synthetic oligonucleotide
  Sense strand starting at position 2541 of SEQ ID NO: 1885897
auuucuuggucauacagac

SEQ ID NO: 2375671 - RNA, 19 nt, Artificial Sequence
  Description of Artificial Sequence: Synthetic oligonucleotide
  Antisense strand to SEQ ID NO: 2375670
gucuguaugaccaagaaau

SEQ ID NO: 2375672 - RNA, 19 nt, Artificial Sequence
  Description of Artificial Sequence: Synthetic oligonucleotide
  Sense strand starting at position 2583 of SEQ ID NO: 1885897
gagccaauccgucaacauc

SEQ ID NO: 2375673 - RNA, 19 nt, Artificial Sequence
  Description of Artificial Sequence: Synthetic oligonucleotide
  Antisense strand to SEQ ID NO: 2375672
gauguugacggauuggcuc

SEQ ID NO: 2375674 - RNA, 19 nt, Artificial Sequence
  Description of Artificial Sequence: Synthetic oligonucleotide
  Sense strand starting at position 2630 of SEQ ID NO: 1885897
aauagagacacguggucau

SEQ ID NO: 2375675 - RNA, 19 nt, Artificial Sequence
  Description of Artificial Sequence: Synthetic oligonucleotide
  Antisense strand to SEQ ID NO: 2375674
augaccacgugucucuauu

SEQ ID NO: 2375676 - RNA, 19 nt, Artificial Sequence
  Description of Artificial Sequence: Synthetic oligonucleotide
  Sense strand starting at position 2640 of SEQ ID NO: 1885897
cguggucauuuaccuacua

SEQ ID NO: 2375677 - RNA, 19 nt, Artificial Sequence
  Description of Artificial Sequence: Synthetic oligonucleotide
  Antisense strand to SEQ ID NO: 2375676
uaguagguaaaugaccacg

SEQ ID NO: 2375678 - RNA, 19 nt, Artificial Sequence
  Description of Artificial Sequence: Synthetic oligonucleotide
  Sense strand starting at position 2645 of SEQ ID NO: 1885897
ucauuuaccuacuagaggu

SEQ ID NO: 2375679 - RNA, 19 nt, Artificial Sequence
  Description of Artificial Sequence: Synthetic oligonucleotide
  Antisense strand to SEQ ID NO: 2375678
accucuaguagguaaauga

SEQ ID NO: 2375680 - RNA, 19 nt, Artificial Sequence
  Description of Artificial Sequence: Synthetic oligonucleotide
  Sense strand starting at position 2916 of SEQ ID NO: 1885897
gcaaacuguucccugaaau

SEQ ID NO: 2375681 - RNA, 19 nt, Artificial Sequence
  Description of Artificial Sequence: Synthetic oligonucleotide
  Antisense strand to SEQ ID NO: 2375680
auuucagggaacaguuugc

SEQ ID NO: 2375682 - RNA, 19 nt, Artificial Sequence
  Description of Artificial Sequence: Synthetic oligonucleotide
  Sense strand starting at position 2983 of SEQ ID NO: 1885897
auaccaggagcuugucuaa

SEQ ID NO: 2375683 - RNA, 19 nt, Artificial Sequence
  Description of Artificial Sequence: Synthetic oligonucleotide
  Antisense strand to SEQ ID NO: 2375682
uuagacaagcuccugguau

SEQ ID NO: 2375684 - RNA, 19 nt, Artificial Sequence
  Description of Artificial Sequence: Synthetic oligonucleotide
  Sense strand starting at position 3192 of SEQ ID NO: 1885897
acuuaagugcugcagagaa

SEQ ID NO: 2375685 - RNA, 19 nt, Artificial Sequence
  Description of Artificial Sequence: Synthetic oligonucleotide
  Antisense strand to SEQ ID NO: 2375684
uucucugcagcacuuaagu

SEQ ID NO: 2375686 - RNA, 19 nt, Artificial Sequence
  Description of Artificial Sequence: Synthetic oligonucleotide
  Sense strand starting at position 3202 of SEQ ID NO: 1885897
ugcagagaagcuugaagau

SEQ ID NO: 2375687 - RNA, 19 nt, Artificial Sequence
  Description of Artificial Sequence: Synthetic oligonucleotide
  Antisense strand to SEQ ID NO: 2375686
aucuucaagcuucucugca

SEQ ID NO: 2375688 - RNA, 19 nt, Artificial Sequence
  Description of Artificial Sequence: Synthetic oligonucleotide
  Sense strand starting at position 3288 of SEQ ID NO: 1885897
guagcagaccaucauuaaa

SEQ ID NO: 2375689 - RNA, 19 nt, Artificial Sequence
  Description of Artificial Sequence: Synthetic oligonucleotide
  Antisense strand to SEQ ID NO: 2375688
uuuaaugauggucugcuac

SEQ ID NO: 2375690 - RNA, 19 nt, Artificial Sequence
  Description of Artificial Sequence: Synthetic oligonucleotide
  Sense strand starting at position 3367 of SEQ ID NO: 1885897
guuuauaaauugcugggau

SEQ ID NO: 2375691 - RNA, 19 nt, Artificial Sequence
  Description of Artificial Sequence: Synthetic oligonucleotide
  Antisense strand to SEQ ID NO: 2375690
aucccagcaauuuauaaac

SEQ ID NO: 2375692 - RNA, 19 nt, Artificial Sequence
  Description of Artificial Sequence: Synthetic oligonucleotide
  Sense strand starting at position 3369 of SEQ ID NO: 1885897
uuauaaauugcugggauaa

SEQ ID NO: 2375693 - RNA, 19 nt, Artificial Sequence
  Description of Artificial Sequence: Synthetic oligonucleotide
  Antisense strand to SEQ ID NO: 2375692
uuaucccagcaauuuauaa

SEQ ID NO: 2375694 - RNA, 19 nt, Artificial Sequence
  Description of Artificial Sequence: Synthetic oligonucleotide
  Sense strand starting at position 3701 of SEQ ID NO: 1885897
cuuugaauacugggaguca

SEQ ID NO: 2375695 - RNA, 19 nt, Artificial Sequence
  Description of Artificial Sequence: Synthetic oligonucleotide
  Antisense strand to SEQ ID NO: 2375694
ugacucccaguauucaaag

SEQ ID NO: 2375696 - RNA, 19 nt, Artificial Sequence
  Description of Artificial Sequence: Synthetic oligonucleotide
  Sense strand starting at position 3760 of SEQ ID NO: 1885897
ccacgaaucccauggacuu

SEQ ID NO: 2375697 - RNA, 19 nt, Artificial Sequence
  Description of Artificial Sequence: Synthetic oligonucleotide
  Antisense strand to SEQ ID NO: 2375696
aaguccaugggauucgugg

SEQ ID NO: 2375698 - RNA, 19 nt, Artificial Sequence
  Description of Artificial Sequence: Synthetic oligonucleotide
  Sense strand starting at position 3861 of SEQ ID NO: 1885897
uucuaaagacaggguuuau

SEQ ID NO: 2375699 - RNA, 19 nt, Artificial Sequence
  Description of Artificial Sequence: Synthetic oligonucleotide
  Antisense strand to SEQ ID NO: 2375698
auaaacccugucuuuagaa

SEQ ID NO: 2375700 - RNA, 19 nt, Artificial Sequence
  Description of Artificial Sequence: Synthetic oligonucleotide
  Sense strand starting at position 3925 of SEQ ID NO: 1885897
acagaaauaugugagauuu

SEQ ID NO: 2375701 - RNA, 19 nt, Artificial Sequence
  Description of Artificial Sequence: Synthetic oligonucleotide
  Antisense strand to SEQ ID NO: 2375700
aaaucucacauauuucugu

SEQ ID NO: 2375702 - RNA, 19 nt, Artificial Sequence
  Description of Artificial Sequence: Synthetic oligonucleotide
  Sense strand starting at position 35 of SEQ ID NO: 1885898
ucaccuuuaggaugguaaa

SEQ ID NO: 2375703 - RNA, 19 nt, Artificial Sequence
  Description of Artificial Sequence: Synthetic oligonucleotide
  Antisense strand to SEQ ID NO: 2375702
uuuaccauccuaaagguga

SEQ ID NO: 2375704 - RNA, 19 nt, Artificial Sequence
  Description of Artificial Sequence: Synthetic oligonucleotide
  Sense strand starting at position 36 of SEQ ID NO: 1885898
caccuuuaggaugguaaau

SEQ ID NO: 2375705 - RNA, 19 nt, Artificial Sequence
  Description of Artificial Sequence: Synthetic oligonucleotide
  Antisense strand to SEQ ID NO: 2375704
auuuaccauccuaaaggug

SEQ ID NO: 2375706 - RNA, 19 nt, Artificial Sequence
  Description of Artificial Sequence: Synthetic oligonucleotide
  Sense strand starting at position 85 of SEQ ID NO: 1885898
cuuugcuauggcuaccuaa

SEQ ID NO: 2375707 - RNA, 19 nt, Artificial Sequence
  Description of Artificial Sequence: Synthetic oligonucleotide
  Antisense strand to SEQ ID NO: 2375706
uuagguagccauagcaaag

SEQ ID NO: 2375708 - RNA, 19 nt, Artificial Sequence
  Description of Artificial Sequence: Synthetic oligonucleotide
  Sense strand starting at position 371 of SEQ ID NO: 1885898
ucuaguucucccgacauua

SEQ ID NO: 2375709 - RNA, 19 nt, Artificial Sequence
  Description of Artificial Sequence: Synthetic oligonucleotide
  Antisense strand to SEQ ID NO: 2375708
uaaugucgggagaacuaga

SEQ ID NO: 2375710 - RNA, 19 nt, Artificial Sequence
  Description of Artificial Sequence: Synthetic oligonucleotide
  Sense strand starting at position 373 of SEQ ID NO: 1885898
uaguucucccgacauuaga

SEQ ID NO: 2375711 - RNA, 19 nt, Artificial Sequence
  Description of Artificial Sequence: Synthetic oligonucleotide
  Antisense strand to SEQ ID NO: 2375710
ucuaaugucgggagaacua

SEQ ID NO: 2375712 - RNA, 19 nt, Artificial Sequence
  Description of Artificial Sequence: Synthetic oligonucleotide
  Sense strand starting at position 403 of SEQ ID NO: 1885898
ucucauguuugucucauuu

SEQ ID NO: 2375713 - RNA, 19 nt, Artificial Sequence
  Description of Artificial Sequence: Synthetic oligonucleotide
  Antisense strand to SEQ ID NO: 2375712
aaaugagacaaacaugaga

SEQ ID NO: 2375714 - RNA, 19 nt, Artificial Sequence
  Description of Artificial Sequence: Synthetic oligonucleotide
  Sense strand starting at position 579 of SEQ ID NO: 1885898
uuaacagacguuugauaaa

SEQ ID NO: 2375715 - RNA, 19 nt, Artificial Sequence
  Description of Artificial Sequence: Synthetic oligonucleotide
  Antisense strand to SEQ ID NO: 2375714
uuuaucaaacgucuguuaa

SEQ ID NO: 2375716 - RNA, 19 nt, Artificial Sequence
  Description of Artificial Sequence: Synthetic oligonucleotide
  Sense strand starting at position 633 of SEQ ID NO: 1885898
cucuaaagacguuauguua

SEQ ID NO: 2375717 - RNA, 19 nt, Artificial Sequence
  Description of Artificial Sequence: Synthetic oligonucleotide
  Antisense strand to SEQ ID NO: 2375716
uaacauaacgucuuuagag

SEQ ID NO: 2375718 - RNA, 19 nt, Artificial Sequence
  Description of Artificial Sequence: Synthetic oligonucleotide
  Sense strand starting at position 646 of SEQ ID NO: 1885898
auguuaaggcuacagacau

SEQ ID NO: 2375719 - RNA, 19 nt, Artificial Sequence
  Description of Artificial Sequence: Synthetic oligonucleotide
  Antisense strand to SEQ ID NO: 2375718
augucuguagccuuaacau

SEQ ID NO: 2375720 - RNA, 19 nt, Artificial Sequence
  Description of Artificial Sequence: Synthetic oligonucleotide
  Sense strand starting at position 740 of SEQ ID NO: 1885898
gaaugcuacucacuaggua

SEQ ID NO: 2375721 - RNA, 19 nt, Artificial Sequence
  Description of Artificial Sequence: Synthetic oligonucleotide
  Antisense strand to SEQ ID NO: 2375720
uaccuagugaguagcauuc

SEQ ID NO: 2375722 - RNA, 19 nt, Artificial Sequence
  Description of Artificial Sequence: Synthetic oligonucleotide
  Sense strand starting at position 823 of SEQ ID NO: 1885898
aggaaagacuugcuucuua

SEQ ID NO: 2375723 - RNA, 19 nt, Artificial Sequence
  Description of Artificial Sequence: Synthetic oligonucleotide
  Antisense strand to SEQ ID NO: 2375722
uaagaagcaagucuuuccu

SEQ ID NO: 2375724 - RNA, 19 nt, Artificial Sequence
  Description of Artificial Sequence: Synthetic oligonucleotide
  Sense strand starting at position 930 of SEQ ID NO: 1885898
aaaguauucuuaccacggu

SEQ ID NO: 2375725 - RNA, 19 nt, Artificial Sequence
  Description of Artificial Sequence: Synthetic oligonucleotide
  Antisense strand to SEQ ID NO: 2375724
accgugguaagaauacuuu

SEQ ID NO: 2375726 - RNA, 19 nt, Artificial Sequence
  Description of Artificial Sequence: Synthetic oligonucleotide
  Sense strand starting at position 1030 of SEQ ID NO: 1885898
ccaugauuauuuccugugu

SEQ ID NO: 2375727 - RNA, 19 nt, Artificial Sequence
  Description of Artificial Sequence: Synthetic oligonucleotide
  Antisense strand to SEQ ID NO: 2375726
acacaggaaauaaucaugg

SEQ ID NO: 2375728 - RNA, 19 nt, Artificial Sequence
  Description of Artificial Sequence: Synthetic oligonucleotide
  Sense strand starting at position 1157 of SEQ ID NO: 1885898
ccaagaacccagugaaugu

SEQ ID NO: 2375729 - RNA, 19 nt, Artificial Sequence
  Description of Artificial Sequence: Synthetic oligonucleotide
  Antisense strand to SEQ ID NO: 2375728
acauucacuggguucuugg

SEQ ID NO: 2375730 - RNA, 19 nt, Artificial Sequence
  Description of Artificial Sequence: Synthetic oligonucleotide
  Sense strand starting at position 1161 of SEQ ID NO: 1885898
gaacccagugaauguuuau

SEQ ID NO: 2375731 - RNA, 19 nt, Artificial Sequence
  Description of Artificial Sequence: Synthetic oligonucleotide
  Antisense strand to SEQ ID NO: 2375730
auaaacauucacuggguuc

SEQ ID NO: 2375732 - RNA, 19 nt, Artificial Sequence
  Description of Artificial Sequence: Synthetic oligonucleotide
  Sense strand starting at position 1164 of SEQ ID NO: 1885898
cccagugaauguuuauuga

SEQ ID NO: 2375733 - RNA, 19 nt, Artificial Sequence
  Description of Artificial Sequence: Synthetic oligonucleotide
  Antisense strand to SEQ ID NO: 2375732
ucaauaaacauucacuggg

SEQ ID NO: 2375734 - RNA, 19 nt, Artificial Sequence
  Description of Artificial Sequence: Synthetic oligonucleotide
  Sense strand starting at position 1167 of SEQ ID NO: 1885898
agugaauguuuauugauga

SEQ ID NO: 2375735 - RNA, 19 nt, Artificial Sequence
  Description of Artificial Sequence: Synthetic oligonucleotide
  Antisense strand to SEQ ID NO: 2375734
ucaucaauaaacauucacu

SEQ ID NO: 2375736 - RNA, 19 nt, Artificial Sequence
  Description of Artificial Sequence: Synthetic oligonucleotide
  Sense strand starting at position 1228 of SEQ ID NO: 1885898
aguauccuaccacgauuau

SEQ ID NO: 2375737 - RNA, 19 nt, Artificial Sequence
  Description of Artificial Sequence: Synthetic oligonucleotide
  Antisense strand to SEQ ID NO: 2375736
auaaucgugguaggauacu

SEQ ID NO: 2375738 - RNA, 19 nt, Artificial Sequence
  Description of Artificial Sequence: Synthetic oligonucleotide
  Sense strand starting at position 1229 of SEQ ID NO: 1885898
guauccuaccacgauuaua

SEQ ID NO: 2375739 - RNA, 19 nt, Artificial Sequence
  Description of Artificial Sequence: Synthetic oligonucleotide
  Antisense strand to SEQ ID NO: 2375738
uauaaucgugguaggauac

SEQ ID NO: 2375740 - RNA, 19 nt, Artificial Sequence
  Description of Artificial Sequence: Synthetic oligonucleotide
  Sense strand starting at position 1237 of SEQ ID NO: 1885898
ccacgauuauacuuaagga

SEQ ID NO: 2375741 - RNA, 19 nt, Artificial Sequence
  Description of Artificial Sequence: Synthetic oligonucleotide
  Antisense strand to SEQ ID NO: 2375740
uccuuaaguauaaucgugg

SEQ ID NO: 2375742 - RNA, 19 nt, Artificial Sequence
  Description of Artificial Sequence: Synthetic oligonucleotide
  Sense strand starting at position 1247 of SEQ ID NO: 1885898
acuuaaggaguuugcucau

SEQ ID NO: 2375743 - RNA, 19 nt, Artificial Sequence
  Description of Artificial Sequence: Synthetic oligonucleotide
  Antisense strand to SEQ ID NO: 2375742
augagcaaacuccuuaagu

SEQ ID NO: 2375744 - RNA, 19 nt, Artificial Sequence
  Description of Artificial Sequence: Synthetic oligonucleotide
  Sense strand starting at position 1250 of SEQ ID NO: 1885898
uaaggaguuugcucauccu

SEQ ID NO: 2375745 - RNA, 19 nt, Artificial Sequence
  Description of Artificial Sequence: Synthetic oligonucleotide
  Antisense strand to SEQ ID NO: 2375744
aggaugagcaaacuccuua

SEQ ID NO: 2375746 - RNA, 19 nt, Artificial Sequence
  Description of Artificial Sequence: Synthetic oligonucleotide
  Sense strand starting at position 1575 of SEQ ID NO: 1885898
gugcacugucggucuuuca

SEQ ID NO: 2375747 - RNA, 19 nt, Artificial Sequence
  Description of Artificial Sequence: Synthetic oligonucleotide
  Antisense strand to SEQ ID NO: 2375746
ugaaagaccgacagugcac

SEQ ID NO: 2375748 - RNA, 19 nt, Artificial Sequence
  Description of Artificial Sequence: Synthetic oligonucleotide
  Sense strand starting at position 2133 of SEQ ID NO: 1885898
uguacuugcggguaagaaa

SEQ ID NO: 2375749 - RNA, 19 nt, Artificial Sequence
  Description of Artificial Sequence: Synthetic oligonucleotide
  Antisense strand to SEQ ID NO: 2375748
uuucuuacccgcaaguaca

SEQ ID NO: 2375750 - RNA, 19 nt, Artificial Sequence
  Description of Artificial Sequence: Synthetic oligonucleotide
  Sense strand starting at position 2426 of SEQ ID NO: 1885898
gggauauaacgcuggugag

SEQ ID NO: 2375751 - RNA, 19 nt, Artificial Sequence
  Description of Artificial Sequence: Synthetic oligonucleotide
  Antisense strand to SEQ ID NO: 2375750
cucaccagcguuauauccc

SEQ ID NO: 2375752 - RNA, 19 nt, Artificial Sequence
  Description of Artificial Sequence: Synthetic oligonucleotide
  Sense strand starting at position 2441 of SEQ ID NO: 1885898
ugaguagugggaugugauc

SEQ ID NO: 2375753 - RNA, 19 nt, Artificial Sequence
  Description of Artificial Sequence: Synthetic oligonucleotide
  Antisense strand to SEQ ID NO: 2375752
gaucacaucccacuacuca

SEQ ID NO: 2375754 - RNA, 19 nt, Artificial Sequence
  Description of Artificial Sequence: Synthetic oligonucleotide
  Sense strand starting at position 2452 of SEQ ID NO: 1885898
augugauccgacugggaga

SEQ ID NO: 2375755 - RNA, 19 nt, Artificial Sequence
  Description of Artificial Sequence: Synthetic oligonucleotide
  Antisense strand to SEQ ID NO: 2375754
ucucccagucggaucacau

SEQ ID NO: 2375756 - RNA, 19 nt, Artificial Sequence
  Description of Artificial Sequence: Synthetic oligonucleotide
  Sense strand starting at position 2507 of SEQ ID NO: 1885898
gagaaagaacagugcucaa

SEQ ID NO: 2375757 - RNA, 19 nt, Artificial Sequence
  Description of Artificial Sequence: Synthetic oligonucleotide
  Antisense strand to SEQ ID NO: 2375756
uugagcacuguucuuucuc

SEQ ID NO: 2375758 - RNA, 19 nt, Artificial Sequence
  Description of Artificial Sequence: Synthetic oligonucleotide
  Sense strand starting at position 2624 of SEQ ID NO: 1885898
uugggauccgccugacuga

SEQ ID NO: 2375759 - RNA, 19 nt, Artificial Sequence
  Description of Artificial Sequence: Synthetic oligonucleotide
  Antisense strand to SEQ ID NO: 2375758
ucagucaggcggaucccaa

SEQ ID NO: 2375760 - RNA, 19 nt, Artificial Sequence
  Description of Artificial Sequence: Synthetic oligonucleotide
  Sense strand starting at position 2686 of SEQ ID NO: 1885898
gugaguccugccuaacaac

SEQ ID NO: 2375761 - RNA, 19 nt, Artificial Sequence
  Description of Artificial Sequence: Synthetic oligonucleotide
  Antisense strand to SEQ ID NO: 2375760
guuguuaggcaggacucac

SEQ ID NO: 2375762 - RNA, 19 nt, Artificial Sequence
  Description of Artificial Sequence: Synthetic oligonucleotide
  Sense strand starting at position 2745 of SEQ ID NO: 1885898
ucagcugacccagggauua

SEQ ID NO: 2375763 - RNA, 19 nt, Artificial Sequence
  Description of Artificial Sequence: Synthetic oligonucleotide
  Antisense strand to SEQ ID NO: 2375762
uaaucccugggucagcuga

SEQ ID NO: 2375764 - RNA, 19 nt, Artificial Sequence
  Description of Artificial Sequence: Synthetic oligonucleotide
  Sense strand starting at position 2793 of SEQ ID NO: 1885898
ugucaaucccuuuguauuu

SEQ ID NO: 2375765 - RNA, 19 nt, Artificial Sequence
  Description of Artificial Sequence: Synthetic oligonucleotide
  Antisense strand to SEQ ID NO: 2375764
aaauacaaagggauugaca

SEQ ID NO: 2375766 - RNA, 19 nt, Artificial Sequence
  Description of Artificial Sequence: Synthetic oligonucleotide
  Sense strand starting at position 2804 of SEQ ID NO: 1885898
uuguauuuguaauccucuu

SEQ ID NO: 2375767 - RNA, 19 nt, Artificial Sequence
  Description of Artificial Sequence: Synthetic oligonucleotide
  Antisense strand to SEQ ID NO: 2375766
aagaggauuacaaauacaa

SEQ ID NO: 2375768 - RNA, 19 nt, Artificial Sequence
  Description of Artificial Sequence: Synthetic oligonucleotide
  Sense strand starting at position 2881 of SEQ ID NO: 1885898
acaguuuguaauuagacgu

SEQ ID NO: 2375769 - RNA, 19 nt, Artificial Sequence
  Description of Artificial Sequence: Synthetic oligonucleotide
  Antisense strand to SEQ ID NO: 2375768
acgucuaauuacaaacugu

SEQ ID NO: 2375770 - RNA, 19 nt, Artificial Sequence
  Description of Artificial Sequence: Synthetic oligonucleotide
  Sense strand starting at position 2885 of SEQ ID NO: 1885898
uuuguaauuagacguagau

SEQ ID NO: 2375771 - RNA, 19 nt, Artificial Sequence
  Description of Artificial Sequence: Synthetic oligonucleotide
  Antisense strand to SEQ ID NO: 2375770
aucuacgucuaauuacaaa

SEQ ID NO: 2375772 - RNA, 19 nt, Artificial Sequence
  Description of Artificial Sequence: Synthetic oligonucleotide
  Sense strand starting at position 2887 of SEQ ID NO: 1885898
uguaauuagacguagauua

SEQ ID NO: 2375773 - RNA, 19 nt, Artificial Sequence
  Description of Artificial Sequence: Synthetic oligonucleotide
  Antisense strand to SEQ ID NO: 2375772
uaaucuacgucuaauuaca

SEQ ID NO: 2375774 - RNA, 19 nt, Artificial Sequence
  Description of Artificial Sequence: Synthetic oligonucleotide
  Sense strand starting at position 2918 of SEQ ID NO: 1885898
auuaacuuuggguguauga

SEQ ID NO: 2375775 - RNA, 19 nt, Artificial Sequence
  Description of Artificial Sequence: Synthetic oligonucleotide
  Antisense strand to SEQ ID NO: 2375774
ucauacacccaaaguuaau

SEQ ID NO: 2375776 - RNA, 19 nt, Artificial Sequence
  Description of Artificial Sequence: Synthetic oligonucleotide
  Sense strand starting at position 2920 of SEQ ID NO: 1885898
uaacuuuggguguaugaau

SEQ ID NO: 2375777 - RNA, 19 nt, Artificial Sequence
  Description of Artificial Sequence: Synthetic oligonucleotide
  Antisense strand to SEQ ID NO: 2375776
auucauacacccaaaguua

SEQ ID NO: 2375778 - RNA, 19 nt, Artificial Sequence
  Description of Artificial Sequence: Synthetic oligonucleotide
  Sense strand starting at position 2928 of SEQ ID NO: 1885898
gguguaugaaucugcagac

SEQ ID NO: 2375779 - RNA, 19 nt, Artificial Sequence
  Description of Artificial Sequence: Synthetic oligonucleotide
  Antisense strand to SEQ ID NO: 2375778
gucugcagauucauacacc

SEQ ID NO: 2375780 - RNA, 19 nt, Artificial Sequence
  Description of Artificial Sequence: Synthetic oligonucleotide
  Sense strand starting at position 3602 of SEQ ID NO: 1885898
agaauauucugagcauacu

SEQ ID NO: 2375781 - RNA, 19 nt, Artificial Sequence
  Description of Artificial Sequence: Synthetic oligonucleotide
  Antisense strand to SEQ ID NO: 2375780
aguaugcucagaauauucu

SEQ ID NO: 2375782 - RNA, 19 nt, Artificial Sequence
  Description of Artificial Sequence: Synthetic oligonucleotide
  Sense strand starting at position 2 of SEQ ID NO: 1885899
ggaguuagauccgcuggga

SEQ ID NO: 2375783 - RNA, 19 nt, Artificial Sequence
  Description of Artificial Sequence: Synthetic oligonucleotide
  Antisense strand to SEQ ID NO: 2375782
ucccagcggaucuaacucc

SEQ ID NO: 2375784 - RNA, 19 nt, Artificial Sequence
  Description of Artificial Sequence: Synthetic oligonucleotide
  Sense strand starting at position 5 of SEQ ID NO: 1885899
guuagauccgcugggauuu

SEQ ID NO: 2375785 - RNA, 19 nt, Artificial Sequence
  Description of Artificial Sequence: Synthetic oligonucleotide
  Antisense strand to SEQ ID NO: 2375784
aaaucccagcggaucuaac

SEQ ID NO: 2375786 - RNA, 19 nt, Artificial Sequence
  Description of Artificial Sequence: Synthetic oligonucleotide
  Sense strand starting at position 176 of SEQ ID NO: 1885899
aggacacuucucugaagua

SEQ ID NO: 2375787 - RNA, 19 nt, Artificial Sequence
  Description of Artificial Sequence: Synthetic oligonucleotide
  Antisense strand to SEQ ID NO: 2375786
uacuucagagaaguguccu

SEQ ID NO: 2375788 - RNA, 19 nt, Artificial Sequence
  Description of Artificial Sequence: Synthetic oligonucleotide
  Sense strand starting at position 270 of SEQ ID NO: 1885899
agugcuuaauggguucaga

SEQ ID NO: 2375789 - RNA, 19 nt, Artificial Sequence
  Description of Artificial Sequence: Synthetic oligonucleotide
  Antisense strand to SEQ ID NO: 2375788
ucugaacccauuaagcacu

SEQ ID NO: 2375790 - RNA, 19 nt, Artificial Sequence
  Description of Artificial Sequence: Synthetic oligonucleotide
  Sense strand starting at position 497 of SEQ ID NO: 1885899
gacagaccguccucuuaca

SEQ ID NO: 2375791 - RNA, 19 nt, Artificial Sequence
  Description of Artificial Sequence: Synthetic oligonucleotide
  Antisense strand to SEQ ID NO: 2375790
uguaagaggacggucuguc

SEQ ID NO: 2375792 - RNA, 19 nt, Artificial Sequence
  Description of Artificial Sequence: Synthetic oligonucleotide
  Sense strand starting at position 551 of SEQ ID NO: 1885899
ccuguacuucucgaacuau

SEQ ID NO: 2375793 - RNA, 19 nt, Artificial Sequence
  Description of Artificial Sequence: Synthetic oligonucleotide
  Antisense strand to SEQ ID NO: 2375792
auaguucgagaaguacagg

SEQ ID NO: 2375794 - RNA, 19 nt, Artificial Sequence
  Description of Artificial Sequence: Synthetic oligonucleotide
  Sense strand starting at position 616 of SEQ ID NO: 1885899
ccuguuccuccagacauga

SEQ ID NO: 2375795 - RNA, 19 nt, Artificial Sequence
  Description of Artificial Sequence: Synthetic oligonucleotide
  Antisense strand to SEQ ID NO: 2375794
ucaugucuggaggaacagg

SEQ ID NO: 2375796 - RNA, 19 nt, Artificial Sequence
  Description of Artificial Sequence: Synthetic oligonucleotide
  Sense strand starting at position 696 of SEQ ID NO: 1885899
ucacuauagcauugaaaug

SEQ ID NO: 2375797 - RNA, 19 nt, Artificial Sequence
  Description of Artificial Sequence: Synthetic oligonucleotide
  Antisense strand to SEQ ID NO: 2375796
cauuucaaugcuauaguga

SEQ ID NO: 2375798 - RNA, 19 nt, Artificial Sequence
  Description of Artificial Sequence: Synthetic oligonucleotide
  Sense strand starting at position 896 of SEQ ID NO: 1885899
gcagcagcuguguuucagu

SEQ ID NO: 2375799 - RNA, 19 nt, Artificial Sequence
  Description of Artificial Sequence: Synthetic oligonucleotide
  Antisense strand to SEQ ID NO: 2375798
acugaaacacagcugcugc

SEQ ID NO: 2375800 - RNA, 19 nt, Artificial Sequence
  Description of Artificial Sequence: Synthetic oligonucleotide
  Sense strand starting at position 982 of SEQ ID NO: 1885899
gaggauuguuuaccaauug

SEQ ID NO: 2375801 - RNA, 19 nt, Artificial Sequence
  Description of Artificial Sequence: Synthetic oligonucleotide
  Antisense strand to SEQ ID NO: 2375800
caauugguaaacaauccuc

SEQ ID NO: 2375802 - RNA, 19 nt, Artificial Sequence
  Description of Artificial Sequence: Synthetic oligonucleotide
  Sense strand starting at position 1381 of SEQ ID NO: 1885899
uggagaauuugucacagga

SEQ ID NO: 2375803 - RNA, 19 nt, Artificial Sequence
  Description of Artificial Sequence: Synthetic oligonucleotide
  Antisense strand to SEQ ID NO: 2375802
uccugugacaaauucucca

SEQ ID NO: 2375804 - RNA, 19 nt, Artificial Sequence
  Description of Artificial Sequence: Synthetic oligonucleotide
  Sense strand starting at position 1383 of SEQ ID NO: 1885899
gagaauuugucacaggauu

SEQ ID NO: 2375805 - RNA, 19 nt, Artificial Sequence
  Description of Artificial Sequence: Synthetic oligonucleotide
  Antisense strand to SEQ ID NO: 2375804
aauccugugacaaauucuc

SEQ ID NO: 2375806 - RNA, 19 nt, Artificial Sequence
  Description of Artificial Sequence: Synthetic oligonucleotide
  Sense strand starting at position 1527 of SEQ ID NO: 1885899
ggaagugaaugucuaacuc

SEQ ID NO: 2375807 - RNA, 19 nt, Artificial Sequence
  Description of Artificial Sequence: Synthetic oligonucleotide
  Antisense strand to SEQ ID NO: 2375806
gaguuagacauucacuucc

SEQ ID NO: 2375808 - RNA, 19 nt, Artificial Sequence
  Description of Artificial Sequence: Synthetic oligonucleotide
  Sense strand starting at position 1531 of SEQ ID NO: 1885899
gugaaugucuaacucuaga

SEQ ID NO: 2375809 - RNA, 19 nt, Artificial Sequence
  Description of Artificial Sequence: Synthetic oligonucleotide
  Antisense strand to SEQ ID NO: 2375808
ucuagaguuagacauucac

SEQ ID NO: 2375810 - RNA, 19 nt, Artificial Sequence
  Description of Artificial Sequence: Synthetic oligonucleotide
  Sense strand starting at position 2012 of SEQ ID NO: 1885899
aaaccuugacuauguguga

SEQ ID NO: 2375811 - RNA, 19 nt, Artificial Sequence
  Description of Artificial Sequence: Synthetic oligonucleotide
  Antisense strand to SEQ ID NO: 2375810
ucacacauagucaagguuu

SEQ ID NO: 2375812 - RNA, 19 nt, Artificial Sequence
  Description of Artificial Sequence: Synthetic oligonucleotide
  Sense strand starting at position 2036 of SEQ ID NO: 1885899
ucaguaggucuuugauauu

SEQ ID NO: 2375813 - RNA, 19 nt, Artificial Sequence
  Description of Artificial Sequence: Synthetic oligonucleotide
  Antisense strand to SEQ ID NO: 2375812
aauaucaaagaccuacuga

SEQ ID NO: 2375814 - RNA, 19 nt, Artificial Sequence
  Description of Artificial Sequence: Synthetic oligonucleotide
  Sense strand starting at position 2204 of SEQ ID NO: 1885899
acgcguguggcggcauaaa

SEQ ID NO: 2375815 - RNA, 19 nt, Artificial Sequence
  Description of Artificial Sequence: Synthetic oligonucleotide
  Antisense strand to SEQ ID NO: 2375814
uuuaugccgccacacgcgu

SEQ ID NO: 2375816 - RNA, 19 nt, Artificial Sequence
  Description of Artificial Sequence: Synthetic oligonucleotide
  Sense strand starting at position 2522 of SEQ ID NO: 1885899
guauuugugcuauagucug

SEQ ID NO: 2375817 - RNA, 19 nt, Artificial Sequence
  Description of Artificial Sequence: Synthetic oligonucleotide
  Antisense strand to SEQ ID NO: 2375816
cagacuauagcacaaauac

SEQ ID NO: 2375818 - RNA, 19 nt, Artificial Sequence
  Description of Artificial Sequence: Synthetic oligonucleotide
  Sense strand starting at position 2543 of SEQ ID NO: 1885899
uccacagaugguugaguau

SEQ ID NO: 2375819 - RNA, 19 nt, Artificial Sequence
  Description of Artificial Sequence: Synthetic oligonucleotide
  Antisense strand to SEQ ID NO: 2375818
auacucaaccaucugugga

SEQ ID NO: 2375820 - RNA, 19 nt, Artificial Sequence
  Description of Artificial Sequence: Synthetic oligonucleotide
  Sense strand starting at position 2580 of SEQ ID NO: 1885899
acaugaauguuaucaugcu

SEQ ID NO: 2375821 - RNA, 19 nt, Artificial Sequence
  Description of Artificial Sequence: Synthetic oligonucleotide
  Antisense strand to SEQ ID NO: 2375820
agcaugauaacauucaugu

SEQ ID NO: 2375822 - RNA, 19 nt, Artificial Sequence
  Description of Artificial Sequence: Synthetic oligonucleotide
  Sense strand starting at position 2654 of SEQ ID NO: 1885899
uguguugacaagugaagau

SEQ ID NO: 2375823 - RNA, 19 nt, Artificial Sequence
  Description of Artificial Sequence: Synthetic oligonucleotide
  Antisense strand to SEQ ID NO: 2375822
aucuucacuugucaacaca

SEQ ID NO: 2375824 - RNA, 19 nt, Artificial Sequence
  Description of Artificial Sequence: Synthetic oligonucleotide
  Sense strand starting at position 2780 of SEQ ID NO: 1885899
aauuaugugguagguacau

SEQ ID NO: 2375825 - RNA, 19 nt, Artificial Sequence
  Description of Artificial Sequence: Synthetic oligonucleotide
  Antisense strand to SEQ ID NO: 2375824
auguaccuaccacauaauu

SEQ ID NO: 2375826 - RNA, 19 nt, Artificial Sequence
  Description of Artificial Sequence: Synthetic oligonucleotide
  Sense strand starting at position 2815 of SEQ ID NO: 1885899
acuuacagauguuuaugua

SEQ ID NO: 2375827 - RNA, 19 nt, Artificial Sequence
  Description of Artificial Sequence: Synthetic oligonucleotide
  Antisense strand to SEQ ID NO: 2375826
uacauaaacaucuguaagu

SEQ ID NO: 2375828 - RNA, 19 nt, Artificial Sequence
  Description of Artificial Sequence: Synthetic oligonucleotide
  Sense strand starting at position 2816 of SEQ ID NO: 1885899
cuuacagauguuuauguau

SEQ ID NO: 2375829 - RNA, 19 nt, Artificial Sequence
  Description of Artificial Sequence: Synthetic oligonucleotide
  Antisense strand to SEQ ID NO: 2375828
auacauaaacaucuguaag

SEQ ID NO: 2375830 - RNA, 19 nt, Artificial Sequence
  Description of Artificial Sequence: Synthetic oligonucleotide
  Sense strand starting at position 2825 of SEQ ID NO: 1885899
guuuauguauguuugaaag

SEQ ID NO: 2375831 - RNA, 19 nt, Artificial Sequence
  Description of Artificial Sequence: Synthetic oligonucleotide
  Antisense strand to SEQ ID NO: 2375830
cuuucaaacauacauaaac

SEQ ID NO: 2375832 - RNA, 19 nt, Artificial Sequence
  Description of Artificial Sequence: Synthetic oligonucleotide
  Sense strand starting at position 3044 of SEQ ID NO: 1885899
ugaccuugggcugaagagu

SEQ ID NO: 2375833 - RNA, 19 nt, Artificial Sequence
  Description of Artificial Sequence: Synthetic oligonucleotide
  Antisense strand to SEQ ID NO: 2375832
acucuucagcccaagguca

SEQ ID NO: 2375834 - RNA, 19 nt, Artificial Sequence
  Description of Artificial Sequence: Synthetic oligonucleotide
  Sense strand starting at position 3050 of SEQ ID NO: 1885899
ugggcugaagaguguuuau

SEQ ID NO: 2375835 - RNA, 19 nt, Artificial Sequence
  Description of Artificial Sequence: Synthetic oligonucleotide
  Antisense strand to SEQ ID NO: 2375834
auaaacacucuucagccca

SEQ ID NO: 2375836 - RNA, 19 nt, Artificial Sequence
  Description of Artificial Sequence: Synthetic oligonucleotide
  Sense strand starting at position 3060 of SEQ ID NO: 1885899
aguguuuaugcagcugcau

SEQ ID NO: 2375837 - RNA, 19 nt, Artificial Sequence
  Description of Artificial Sequence: Synthetic oligonucleotide
  Antisense strand to SEQ ID NO: 2375836
augcagcugcauaaacacu

SEQ ID NO: 2375838 - RNA, 19 nt, Artificial Sequence
  Description of Artificial Sequence: Synthetic oligonucleotide
  Sense strand starting at position 3083 of SEQ ID NO: 1885899
uguggagguggucagaaua

SEQ ID NO: 2375839 - RNA, 19 nt, Artificial Sequence
  Description of Artificial Sequence: Synthetic oligonucleotide
  Antisense strand to SEQ ID NO: 2375838
uauucugaccaccuccaca

SEQ ID NO: 2375840 - RNA, 19 nt, Artificial Sequence
  Description of Artificial Sequence: Synthetic oligonucleotide
  Sense strand starting at position 3164 of SEQ ID NO: 1885899
uuacacaauggcugugaua

SEQ ID NO: 2375841 - RNA, 19 nt, Artificial Sequence
  Description of Artificial Sequence: Synthetic oligonucleotide
  Antisense strand to SEQ ID NO: 2375840
uaucacagccauuguguaa

SEQ ID NO: 2375842 - RNA, 19 nt, Artificial Sequence
  Description of Artificial Sequence: Synthetic oligonucleotide
  Sense strand starting at position 3216 of SEQ ID NO: 1885899
aguuauaaauaguccaaag

SEQ ID NO: 2375843 - RNA, 19 nt, Artificial Sequence
  Description of Artificial Sequence: Synthetic oligonucleotide
  Antisense strand to SEQ ID NO: 2375842
cuuuggacuauuuauaacu

SEQ ID NO: 2375844 - RNA, 19 nt, Artificial Sequence
  Description of Artificial Sequence: Synthetic oligonucleotide
  Sense strand starting at position 3287 of SEQ ID NO: 1885899
cuacaaacuuggguuaauu

SEQ ID NO: 2375845 - RNA, 19 nt, Artificial Sequence
  Description of Artificial Sequence: Synthetic oligonucleotide
  Antisense strand to SEQ ID NO: 2375844
aauuaacccaaguuuguag

SEQ ID NO: 2375846 - RNA, 19 nt, Artificial Sequence
  Description of Artificial Sequence: Synthetic oligonucleotide
  Sense strand starting at position 3320 of SEQ ID NO: 1885899
uucuguuaugcuuacugga

SEQ ID NO: 2375847 - RNA, 19 nt, Artificial Sequence
  Description of Artificial Sequence: Synthetic oligonucleotide
  Antisense strand to SEQ ID NO: 2375846
uccaguaagcauaacagaa

SEQ ID NO: 2375848 - RNA, 19 nt, Artificial Sequence
  Description of Artificial Sequence: Synthetic oligonucleotide
  Sense strand starting at position 3322 of SEQ ID NO: 1885899
cuguuaugcuuacuggaua

SEQ ID NO: 2375849 - RNA, 19 nt, Artificial Sequence
  Description of Artificial Sequence: Synthetic oligonucleotide
  Antisense strand to SEQ ID NO: 2375848
uauccaguaagcauaacag

SEQ ID NO: 2375850 - RNA, 19 nt, Artificial Sequence
  Description of Artificial Sequence: Synthetic oligonucleotide
  Sense strand starting at position 3487 of SEQ ID NO: 1885899
gucuguauuaggugaaaua

SEQ ID NO: 2375851 - RNA, 19 nt, Artificial Sequence
  Description of Artificial Sequence: Synthetic oligonucleotide
  Antisense strand to SEQ ID NO: 2375850
uauuucaccuaauacagac

SEQ ID NO: 2375852 - RNA, 19 nt, Artificial Sequence
  Description of Artificial Sequence: Synthetic oligonucleotide
  Sense strand starting at position 3537 of SEQ ID NO: 1885899
auaugaaagucagcaauuc

SEQ ID NO: 2375853 - RNA, 19 nt, Artificial Sequence
  Description of Artificial Sequence: Synthetic oligonucleotide
  Antisense strand to SEQ ID NO: 2375852
gaauugcugacuuucauau

SEQ ID NO: 2375854 - RNA, 19 nt, Artificial Sequence
  Description of Artificial Sequence: Synthetic oligonucleotide
  Sense strand starting at position 3727 of SEQ ID NO: 1885899
uccugagccgcccauuaaa

SEQ ID NO: 2375855 - RNA, 19 nt, Artificial Sequence
  Description of Artificial Sequence: Synthetic oligonucleotide
  Antisense strand to SEQ ID NO: 2375854
uuuaaugggcggcucagga

SEQ ID NO: 2375856 - RNA, 19 nt, Artificial Sequence
  Description of Artificial Sequence: Synthetic oligonucleotide
  Sense strand starting at position 3820 of SEQ ID NO: 1885899
agugguuugccgagagggu

SEQ ID NO: 2375857 - RNA, 19 nt, Artificial Sequence
  Description of Artificial Sequence: Synthetic oligonucleotide
  Antisense strand to SEQ ID NO: 2375856
acccucucggcaaaccacu

SEQ ID NO: 2375858 - RNA, 19 nt, Artificial Sequence
  Description of Artificial Sequence: Synthetic oligonucleotide
  Sense strand starting at position 3844 of SEQ ID NO: 1885899
ggaucauccugcucuuuga

SEQ ID NO: 2375859 - RNA, 19 nt, Artificial Sequence
  Description of Artificial Sequence: Synthetic oligonucleotide
  Antisense strand to SEQ ID NO: 2375858
ucaaagagcaggaugaucc

SEQ ID NO: 2375860 - RNA, 19 nt, Artificial Sequence
  Description of Artificial Sequence: Synthetic oligonucleotide
  Sense strand starting at position 3933 of SEQ ID NO: 1885899
auccgugucgugcugaaca

SEQ ID NO: 2375861 - RNA, 19 nt, Artificial Sequence
  Description of Artificial Sequence: Synthetic oligonucleotide
  Antisense strand to SEQ ID NO: 2375860
uguucagcacgacacggau

SEQ ID NO: 2375862 - RNA, 19 nt, Artificial Sequence
  Description of Artificial Sequence: Synthetic oligonucleotide
  Sense strand starting at position 15 of SEQ ID NO: 1885901
gcuuguguucucguuuaau

SEQ ID NO: 2375863 - RNA, 19 nt, Artificial Sequence
  Description of Artificial Sequence: Synthetic oligonucleotide
  Antisense strand to SEQ ID NO: 2375862
auuaaacgagaacacaagc

SEQ ID NO: 2375864 - RNA, 19 nt, Artificial Sequence
  Description of Artificial Sequence: Synthetic oligonucleotide
  Sense strand starting at position 65 of SEQ ID NO: 1885901
augccaaauguuggagaua

SEQ ID NO: 2375865 - RNA, 19 nt, Artificial Sequence
  Description of Artificial Sequence: Synthetic oligonucleotide
  Antisense strand to SEQ ID NO: 2375864
uaucuccaacauuuggcau

SEQ ID NO: 2375866 - RNA, 19 nt, Artificial Sequence
  Description of Artificial Sequence: Synthetic oligonucleotide
  Sense strand starting at position 81 of SEQ ID NO: 1885901
auacaauugugaguaagau

SEQ ID NO: 2375867 - RNA, 19 nt, Artificial Sequence
  Description of Artificial Sequence: Synthetic oligonucleotide
  Antisense strand to SEQ ID NO: 2375866
aucuuacucacaauuguau

SEQ ID NO: 2375868 - RNA, 19 nt, Artificial Sequence
  Description of Artificial Sequence: Synthetic oligonucleotide
  Sense strand starting at position 91 of SEQ ID NO: 1885901
gaguaagauuguguccuua

SEQ ID NO: 2375869 - RNA, 19 nt, Artificial Sequence
  Description of Artificial Sequence: Synthetic oligonucleotide
  Antisense strand to SEQ ID NO: 2375868
uaaggacacaaucuuacuc

SEQ ID NO: 2375870 - RNA, 19 nt, Artificial Sequence
  Description of Artificial Sequence: Synthetic oligonucleotide
  Sense strand starting at position 95 of SEQ ID NO: 1885901
aagauuguguccuuaggga

SEQ ID NO: 2375871 - RNA, 19 nt, Artificial Sequence
  Description of Artificial Sequence: Synthetic oligonucleotide
  Antisense strand to SEQ ID NO: 2375870
ucccuaaggacacaaucuu

SEQ ID NO: 2375872 - RNA, 19 nt, Artificial Sequence
  Description of Artificial Sequence: Synthetic oligonucleotide
  Sense strand starting at position 292 of SEQ ID NO: 1885901
accacuaugccuggauaua

SEQ ID NO: 2375873 - RNA, 19 nt, Artificial Sequence
  Description of Artificial Sequence: Synthetic oligonucleotide
  Antisense strand to SEQ ID NO: 2375872
uauauccaggcauaguggu

SEQ ID NO: 2375874 - RNA, 19 nt, Artificial Sequence
  Description of Artificial Sequence: Synthetic oligonucleotide
  Sense strand starting at position 293 of SEQ ID NO: 1885901
ccacuaugccuggauauau

SEQ ID NO: 2375875 - RNA, 19 nt, Artificial Sequence
  Description of Artificial Sequence: Synthetic oligonucleotide
  Antisense strand to SEQ ID NO: 2375874
auauauccaggcauagugg

SEQ ID NO: 2375876 - RNA, 19 nt, Artificial Sequence
  Description of Artificial Sequence: Synthetic oligonucleotide
  Sense strand starting at position 455 of SEQ ID NO: 1885901
auaaauggcugucuguaga

SEQ ID NO: 2375877 - RNA, 19 nt, Artificial Sequence
  Description of Artificial Sequence: Synthetic oligonucleotide
  Antisense strand to SEQ ID NO: 2375876
ucuacagacagccauuuau

SEQ ID NO: 2375878 - RNA, 19 nt, Artificial Sequence
  Description of Artificial Sequence: Synthetic oligonucleotide
  Sense strand starting at position 458 of SEQ ID NO: 1885901
aauggcugucuguagauca

SEQ ID NO: 2375879 - RNA, 19 nt, Artificial Sequence
  Description of Artificial Sequence: Synthetic oligonucleotide
  Antisense strand to SEQ ID NO: 2375878
ugaucuacagacagccauu

SEQ ID NO: 2375880 - RNA, 19 nt, Artificial Sequence
  Description of Artificial Sequence: Synthetic oligonucleotide
  Sense strand starting at position 491 of SEQ ID NO: 1885901
uuaacugggcuguagaaua

SEQ ID NO: 2375881 - RNA, 19 nt, Artificial Sequence
  Description of Artificial Sequence: Synthetic oligonucleotide
  Antisense strand to SEQ ID NO: 2375880
uauucuacagcccaguuaa

SEQ ID NO: 2375882 - RNA, 19 nt, Artificial Sequence
  Description of Artificial Sequence: Synthetic oligonucleotide
  Sense strand starting at position 496 of SEQ ID NO: 1885901
ugggcuguagaauauguau

SEQ ID NO: 2375883 - RNA, 19 nt, Artificial Sequence
  Description of Artificial Sequence: Synthetic oligonucleotide
  Antisense strand to SEQ ID NO: 2375882
auacauauucuacagccca

SEQ ID NO: 2375884 - RNA, 19 nt, Artificial Sequence
  Description of Artificial Sequence: Synthetic oligonucleotide
  Sense strand starting at position 499 of SEQ ID NO: 1885901
gcuguagaauauguauuga

SEQ ID NO: 2375885 - RNA, 19 nt, Artificial Sequence
  Description of Artificial Sequence: Synthetic oligonucleotide
  Antisense strand to SEQ ID NO: 2375884
ucaauacauauucuacagc

SEQ ID NO: 2375886 - RNA, 19 nt, Artificial Sequence
  Description of Artificial Sequence: Synthetic oligonucleotide
  Sense strand starting at position 507 of SEQ ID NO: 1885901
auauguauugaaggaucau

SEQ ID NO: 2375887 - RNA, 19 nt, Artificial Sequence
  Description of Artificial Sequence: Synthetic oligonucleotide
  Antisense strand to SEQ ID NO: 2375886
augauccuucaauacauau

SEQ ID NO: 2375888 - RNA, 19 nt, Artificial Sequence
  Description of Artificial Sequence: Synthetic oligonucleotide
  Sense strand starting at position 953 of SEQ ID NO: 1885901
uuaucacaugaauguugua

SEQ ID NO: 2375889 - RNA, 19 nt, Artificial Sequence
  Description of Artificial Sequence: Synthetic oligonucleotide
  Antisense strand to SEQ ID NO: 2375888
uacaacauucaugugauaa

SEQ ID NO: 2375890 - RNA, 19 nt, Artificial Sequence
  Description of Artificial Sequence: Synthetic oligonucleotide
  Sense strand starting at position 978 of SEQ ID NO: 1885901
ucgcguauuacauauuuga

SEQ ID NO: 2375891 - RNA, 19 nt, Artificial Sequence
  Description of Artificial Sequence: Synthetic oligonucleotide
  Antisense strand to SEQ ID NO: 2375890
ucaaauauguaauacgcga

SEQ ID NO: 2375892 - RNA, 19 nt, Artificial Sequence
  Description of Artificial Sequence: Synthetic oligonucleotide
  Sense strand starting at position 1112 of SEQ ID NO: 1885901
caguguaccuguuccauuu

SEQ ID NO: 2375893 - RNA, 19 nt, Artificial Sequence
  Description of Artificial Sequence: Synthetic oligonucleotide
  Antisense strand to SEQ ID NO: 2375892
aaauggaacagguacacug

SEQ ID NO: 2375894 - RNA, 19 nt, Artificial Sequence
  Description of Artificial Sequence: Synthetic oligonucleotide
  Sense strand starting at position 1341 of SEQ ID NO: 1885901
ugucgaaauuuguuuacau

SEQ ID NO: 2375895 - RNA, 19 nt, Artificial Sequence
  Description of Artificial Sequence: Synthetic oligonucleotide
  Antisense strand to SEQ ID NO: 2375894
auguaaacaaauuucgaca

SEQ ID NO: 2375896 - RNA, 19 nt, Artificial Sequence
  Description of Artificial Sequence: Synthetic oligonucleotide
  Sense strand starting at position 1427 of SEQ ID NO: 1885901
gaaauuguucugcgaaaga

SEQ ID NO: 2375897 - RNA, 19 nt, Artificial Sequence
  Description of Artificial Sequence: Synthetic oligonucleotide
  Antisense strand to SEQ ID NO: 2375896
ucuuucgcagaacaauuuc

SEQ ID NO: 2375898 - RNA, 19 nt, Artificial Sequence
  Description of Artificial Sequence: Synthetic oligonucleotide
  Sense strand starting at position 1517 of SEQ ID NO: 1885901
cgauuccuucgugacuaac

SEQ ID NO: 2375899 - RNA, 19 nt, Artificial Sequence
  Description of Artificial Sequence: Synthetic oligonucleotide
  Antisense strand to SEQ ID NO: 2375898
guuagucacgaaggaaucg

SEQ ID NO: 2375900 - RNA, 19 nt, Artificial Sequence
  Description of Artificial Sequence: Synthetic oligonucleotide
  Sense strand starting at position 2383 of SEQ ID NO: 1885901
gcucgcuuucuuccguaga

SEQ ID NO: 2375901 - RNA, 19 nt, Artificial Sequence
  Description of Artificial Sequence: Synthetic oligonucleotide
  Antisense strand to SEQ ID NO: 2375900
ucuacggaagaaagcgagc

SEQ ID NO: 2375902 - RNA, 19 nt, Artificial Sequence
  Description of Artificial Sequence: Synthetic oligonucleotide
  Sense strand starting at position 2850 of SEQ ID NO: 1885901
guagcuuauccauauggaa

SEQ ID NO: 2375903 - RNA, 19 nt, Artificial Sequence
  Description of Artificial Sequence: Synthetic oligonucleotide
  Antisense strand to SEQ ID NO: 2375902
uuccauauggauaagcuac

SEQ ID NO: 2375904 - RNA, 19 nt, Artificial Sequence
  Description of Artificial Sequence: Synthetic oligonucleotide
  Sense strand starting at position 2862 of SEQ ID NO: 1885901
uauggaaagccuugagacu

SEQ ID NO: 2375905 - RNA, 19 nt, Artificial Sequence
  Description of Artificial Sequence: Synthetic oligonucleotide
  Antisense strand to SEQ ID NO: 2375904
agucucaaggcuuuccaua

SEQ ID NO: 2375906 - RNA, 19 nt, Artificial Sequence
  Description of Artificial Sequence: Synthetic oligonucleotide
  Sense strand starting at position 2930 of SEQ ID NO: 1885901
gacccugaggucuacuuau

SEQ ID NO: 2375907 - RNA, 19 nt, Artificial Sequence
  Description of Artificial Sequence: Synthetic oligonucleotide
  Antisense strand to SEQ ID NO: 2375906
auaaguagaccucaggguc

SEQ ID NO: 2375908 - RNA, 19 nt, Artificial Sequence
  Description of Artificial Sequence: Synthetic oligonucleotide
  Sense strand starting at position 2952 of SEQ ID NO: 1885901
guuuguucgagggauuaga

SEQ ID NO: 2375909 - RNA, 19 nt, Artificial Sequence
  Description of Artificial Sequence: Synthetic oligonucleotide
  Antisense strand to SEQ ID NO: 2375908
ucuaaucccucgaacaaac

SEQ ID NO: 2375910 - RNA, 19 nt, Artificial Sequence
  Description of Artificial Sequence: Synthetic oligonucleotide
  Sense strand starting at position 3117 of SEQ ID NO: 1885901
gacagaaacccagguaguu

SEQ ID NO: 2375911 - RNA, 19 nt, Artificial Sequence
  Description of Artificial Sequence: Synthetic oligonucleotide
  Antisense strand to SEQ ID NO: 2375910
aacuaccuggguuucuguc

SEQ ID NO: 2375912 - RNA, 19 nt, Artificial Sequence
  Description of Artificial Sequence: Synthetic oligonucleotide
  Sense strand starting at position 3161 of SEQ ID NO: 1885901
gacgacaguuacucaacua

SEQ ID NO: 2375913 - RNA, 19 nt, Artificial Sequence
  Description of Artificial Sequence: Synthetic oligonucleotide
  Antisense strand to SEQ ID NO: 2375912
uaguugaguaacugucguc

SEQ ID NO: 2375914 - RNA, 19 nt, Artificial Sequence
  Description of Artificial Sequence: Synthetic oligonucleotide
  Sense strand starting at position 3331 of SEQ ID NO: 1885901
auuauacagcuguaaguga

SEQ ID NO: 2375915 - RNA, 19 nt, Artificial Sequence
  Description of Artificial Sequence: Synthetic oligonucleotide
  Antisense strand to SEQ ID NO: 2375914
ucacuuacagcuguauaau

SEQ ID NO: 2375916 - RNA, 19 nt, Artificial Sequence
  Description of Artificial Sequence: Synthetic oligonucleotide
  Sense strand starting at position 3382 of SEQ ID NO: 1885901
acaguaguuacagaagucu

SEQ ID NO: 2375917 - RNA, 19 nt, Artificial Sequence
  Description of Artificial Sequence: Synthetic oligonucleotide
  Antisense strand to SEQ ID NO: 2375916
agacuucuguaacuacugu

SEQ ID NO: 2375918 - RNA, 19 nt, Artificial Sequence
  Description of Artificial Sequence: Synthetic oligonucleotide
  Sense strand starting at position 3445 of SEQ ID NO: 1885901
cuuguuauauuugugcaga

SEQ ID NO: 2375919 - RNA, 19 nt, Artificial Sequence
  Description of Artificial Sequence: Synthetic oligonucleotide
  Antisense strand to SEQ ID NO: 2375918
ucugcacaaauauaacaag

SEQ ID NO: 2375920 - RNA, 19 nt, Artificial Sequence
  Description of Artificial Sequence: Synthetic oligonucleotide
  Sense strand starting at position 3447 of SEQ ID NO: 1885901
uguuauauuugugcagaua

SEQ ID NO: 2375921 - RNA, 19 nt, Artificial Sequence
  Description of Artificial Sequence: Synthetic oligonucleotide
  Antisense strand to SEQ ID NO: 2375920
uaucugcacaaauauaaca

SEQ ID NO: 2375922 - RNA, 19 nt, Artificial Sequence
  Description of Artificial Sequence: Synthetic oligonucleotide
  Sense strand starting at position 3507 of SEQ ID NO: 1885901
ugccuaauuuagugaauuu

SEQ ID NO: 2375923 - RNA, 19 nt, Artificial Sequence
  Description of Artificial Sequence: Synthetic oligonucleotide
  Antisense strand to SEQ ID NO: 2375922
aaauucacuaaauuaggca

SEQ ID NO: 2375924 - RNA, 19 nt, Artificial Sequence
  Description of Artificial Sequence: Synthetic oligonucleotide
  Sense strand starting at position 3587 of SEQ ID NO: 1885901
gcuagauaaucacuaugaa

SEQ ID NO: 2375925 - RNA, 19 nt, Artificial Sequence
  Description of Artificial Sequence: Synthetic oligonucleotide
  Antisense strand to SEQ ID NO: 2375924
uucauagugauuaucuagc

SEQ ID NO: 2375926 - RNA, 19 nt, Artificial Sequence
  Description of Artificial Sequence: Synthetic oligonucleotide
  Sense strand starting at position 3605 of SEQ ID NO: 1885901
acuuaauaggaauguuguu

SEQ ID NO: 2375927 - RNA, 19 nt, Artificial Sequence
  Description of Artificial Sequence: Synthetic oligonucleotide
  Antisense strand to SEQ ID NO: 2375926
aacaacauuccuauuaagu

SEQ ID NO: 2375928 - RNA, 19 nt, Artificial Sequence
  Description of Artificial Sequence: Synthetic oligonucleotide
  Sense strand starting at position 3732 of SEQ ID NO: 1885901
uaauaaaucgacugguuau

SEQ ID NO: 2375929 - RNA, 19 nt, Artificial Sequence
  Description of Artificial Sequence: Synthetic oligonucleotide
  Antisense strand to SEQ ID NO: 2375928
auaaccagucgauuuauua

SEQ ID NO: 2375930 - RNA, 19 nt, Artificial Sequence
  Description of Artificial Sequence: Synthetic oligonucleotide
  Sense strand starting at position 3742 of SEQ ID NO: 1885901
acugguuauuguuugaaga

SEQ ID NO: 2375931 - RNA, 19 nt, Artificial Sequence
  Description of Artificial Sequence: Synthetic oligonucleotide
  Antisense strand to SEQ ID NO: 2375930
ucuucaaacaauaaccagu

SEQ ID NO: 2375932 - RNA, 19 nt, Artificial Sequence
  Description of Artificial Sequence: Synthetic oligonucleotide
  Sense strand starting at position 3743 of SEQ ID NO: 1885901
cugguuauuguuugaagac

SEQ ID NO: 2375933 - RNA, 19 nt, Artificial Sequence
  Description of Artificial Sequence: Synthetic oligonucleotide
  Antisense strand to SEQ ID NO: 2375932
gucuucaaacaauaaccag

SEQ ID NO: 2375934 - RNA, 19 nt, Artificial Sequence
  Description of Artificial Sequence: Synthetic oligonucleotide
  Sense strand starting at position 3775 of SEQ ID NO: 1885901
auuuacauguuguagaaac

SEQ ID NO: 2375935 - RNA, 19 nt, Artificial Sequence
  Description of Artificial Sequence: Synthetic oligonucleotide
  Antisense strand to SEQ ID NO: 2375934
guuucuacaacauguaaau

SEQ ID NO: 2375936 - RNA, 19 nt, Artificial Sequence
  Description of Artificial Sequence: Synthetic oligonucleotide
  Sense strand starting at position 3783 of SEQ ID NO: 1885901
guuguagaaacaugggacu

SEQ ID NO: 2375937 - RNA, 19 nt, Artificial Sequence
  Description of Artificial Sequence: Synthetic oligonucleotide
  Antisense strand to SEQ ID NO: 2375936
agucccauguuucuacaac

SEQ ID NO: 2375938 - RNA, 19 nt, Artificial Sequence
  Description of Artificial Sequence: Synthetic oligonucleotide
  Sense strand starting at position 3816 of SEQ ID NO: 1885901
gccgcauuacaagauauua

SEQ ID NO: 2375939 - RNA, 19 nt, Artificial Sequence
  Description of Artificial Sequence: Synthetic oligonucleotide
  Antisense strand to SEQ ID NO: 2375938
uaauaucuuguaaugcggc

SEQ ID NO: 2375940 - RNA, 19 nt, Artificial Sequence
  Description of Artificial Sequence: Synthetic oligonucleotide
  Sense strand starting at position 3981 of SEQ ID NO: 1885901
uagagauauuaggaaagaa

SEQ ID NO: 2375941 - RNA, 19 nt, Artificial Sequence
  Description of Artificial Sequence: Synthetic oligonucleotide
  Antisense strand to SEQ ID NO: 2375940
uucuuuccuaauaucucua

SEQ ID NO: 2375942 - RNA, 19 nt, Artificial Sequence
  Description of Artificial Sequence: Synthetic oligonucleotide
  Sense strand starting at position 38 of SEQ ID NO: 1885900
gcuuguguucucguuuaau

SEQ ID NO: 2375943 - RNA, 19 nt, Artificial Sequence
  Description of Artificial Sequence: Synthetic oligonucleotide
  Antisense strand to SEQ ID NO: 2375942
auuaaacgagaacacaagc

SEQ ID NO: 2375944 - RNA, 19 nt, Artificial Sequence
  Description of Artificial Sequence: Synthetic oligonucleotide
  Sense strand starting at position 88 of SEQ ID NO: 1885900
augccaaauguuggagaua

SEQ ID NO: 2375945 - RNA, 19 nt, Artificial Sequence
  Description of Artificial Sequence: Synthetic oligonucleotide
  Antisense strand to SEQ ID NO: 2375944
uaucuccaacauuuggcau

SEQ ID NO: 2375946 - RNA, 19 nt, Artificial Sequence
  Description of Artificial Sequence: Synthetic oligonucleotide
  Sense strand starting at position 104 of SEQ ID NO: 1885900
auacaauugugaguaagau

SEQ ID NO: 2375947 - RNA, 19 nt, Artificial Sequence
  Description of Artificial Sequence: Synthetic oligonucleotide
  Antisense strand to SEQ ID NO: 2375946
aucuuacucacaauuguau

SEQ ID NO: 2375948 - RNA, 19 nt, Artificial Sequence
  Description of Artificial Sequence: Synthetic oligonucleotide
  Sense strand starting at position 114 of SEQ ID NO: 1885900
gaguaagauuguguccuua

SEQ ID NO: 2375949 - RNA, 19 nt, Artificial Sequence
  Description of Artificial Sequence: Synthetic oligonucleotide
  Antisense strand to SEQ ID NO: 2375948
uaaggacacaaucuuacuc

SEQ ID NO: 2375950 - RNA, 19 nt, Artificial Sequence
  Description of Artificial Sequence: Synthetic oligonucleotide
  Sense strand starting at position 116 of SEQ ID NO: 1885900
guaagauuguguccuuagg

SEQ ID NO: 2375951 - RNA, 19 nt, Artificial Sequence
  Description of Artificial Sequence: Synthetic oligonucleotide
  Antisense strand to SEQ ID NO: 2375950
ccuaaggacacaaucuuac

SEQ ID NO: 2375952 - RNA, 19 nt, Artificial Sequence
  Description of Artificial Sequence: Synthetic oligonucleotide
  Sense strand starting at position 118 of SEQ ID NO: 1885900
aagauuguguccuuaggga

SEQ ID NO: 2375953 - RNA, 19 nt, Artificial Sequence
  Description of Artificial Sequence: Synthetic oligonucleotide
  Antisense strand to SEQ ID NO: 2375952
ucccuaaggacacaaucuu

SEQ ID NO: 2375954 - RNA, 19 nt, Artificial Sequence
  Description of Artificial Sequence: Synthetic oligonucleotide
  Sense strand starting at position 315 of SEQ ID NO: 1885900
accacuaugccuggauaua

SEQ ID NO: 2375955 - RNA, 19 nt, Artificial Sequence
  Description of Artificial Sequence: Synthetic oligonucleotide
  Antisense strand to SEQ ID NO: 2375954
uauauccaggcauaguggu

SEQ ID NO: 2375956 - RNA, 19 nt, Artificial Sequence
  Description of Artificial Sequence: Synthetic oligonucleotide
  Sense strand starting at position 316 of SEQ ID NO: 1885900
ccacuaugccuggauauau

SEQ ID NO: 2375957 - RNA, 19 nt, Artificial Sequence
  Description of Artificial Sequence: Synthetic oligonucleotide
  Antisense strand to SEQ ID NO: 2375956
auauauccaggcauagugg

SEQ ID NO: 2375958 - RNA, 19 nt, Artificial Sequence
  Description of Artificial Sequence: Synthetic oligonucleotide
  Sense strand starting at position 478 of SEQ ID NO: 1885900
auaaauggcugucuguaga

SEQ ID NO: 2375959 - RNA, 19 nt, Artificial Sequence
  Description of Artificial Sequence: Synthetic oligonucleotide
  Antisense strand to SEQ ID NO: 2375958
ucuacagacagccauuuau

SEQ ID NO: 2375960 - RNA, 19 nt, Artificial Sequence
  Description of Artificial Sequence: Synthetic oligonucleotide
  Sense strand starting at position 481 of SEQ ID NO: 1885900
aauggcugucuguagauca

SEQ ID NO: 2375961 - RNA, 19 nt, Artificial Sequence
  Description of Artificial Sequence: Synthetic oligonucleotide
  Antisense strand to SEQ ID NO: 2375960
ugaucuacagacagccauu

SEQ ID NO: 2375962 - RNA, 19 nt, Artificial Sequence
  Description of Artificial Sequence: Synthetic oligonucleotide
  Sense strand starting at position 514 of SEQ ID NO: 1885900
uuaacugggcuguagaaua

SEQ ID NO: 2375963 - RNA, 19 nt, Artificial Sequence
  Description of Artificial Sequence: Synthetic oligonucleotide
  Antisense strand to SEQ ID NO: 2375962
uauucuacagcccaguuaa

SEQ ID NO: 2375964 - RNA, 19 nt, Artificial Sequence
  Description of Artificial Sequence: Synthetic oligonucleotide
  Sense strand starting at position 519 of SEQ ID NO: 1885900
ugggcuguagaauauguau

SEQ ID NO: 2375965 - RNA, 19 nt, Artificial Sequence
  Description of Artificial Sequence: Synthetic oligonucleotide
  Antisense strand to SEQ ID NO: 2375964
auacauauucuacagccca

SEQ ID NO: 2375966 - RNA, 19 nt, Artificial Sequence
  Description of Artificial Sequence: Synthetic oligonucleotide
  Sense strand starting at position 522 of SEQ ID NO: 1885900
gcuguagaauauguauuga

SEQ ID NO: 2375967 - RNA, 19 nt, Artificial Sequence
  Description of Artificial Sequence: Synthetic oligonucleotide
  Antisense strand to SEQ ID NO: 2375966
ucaauacauauucuacagc

SEQ ID NO: 2375968 - RNA, 19 nt, Artificial Sequence
  Description of Artificial Sequence: Synthetic oligonucleotide
  Sense strand starting at position 530 of SEQ ID NO: 1885900
auauguauugaaggaucau

SEQ ID NO: 2375969 - RNA, 19 nt, Artificial Sequence
  Description of Artificial Sequence: Synthetic oligonucleotide
  Antisense strand to SEQ ID NO: 2375968
augauccuucaauacauau

SEQ ID NO: 2375970 - RNA, 19 nt, Artificial Sequence
  Description of Artificial Sequence: Synthetic oligonucleotide
  Sense strand starting at position 976 of SEQ ID NO: 1885900
uuaucacaugaauguugua

SEQ ID NO: 2375971 - RNA, 19 nt, Artificial Sequence
  Description of Artificial Sequence: Synthetic oligonucleotide
  Antisense strand to SEQ ID NO: 2375970
uacaacauucaugugauaa

SEQ ID NO: 2375972 - RNA, 19 nt, Artificial Sequence
  Description of Artificial Sequence: Synthetic oligonucleotide
  Sense strand starting at position 1001 of SEQ ID NO: 1885900
ucgcguauuacauauuuga

SEQ ID NO: 2375973 - RNA, 19 nt, Artificial Sequence
  Description of Artificial Sequence: Synthetic oligonucleotide
  Antisense strand to SEQ ID NO: 2375972
ucaaauauguaauacgcga

SEQ ID NO: 2375974 - RNA, 19 nt, Artificial Sequence
  Description of Artificial Sequence: Synthetic oligonucleotide
  Sense strand starting at position 1135 of SEQ ID NO: 1885900
caguguaccuguuccauuu

SEQ ID NO: 2375975 - RNA, 19 nt, Artificial Sequence
  Description of Artificial Sequence: Synthetic oligonucleotide
  Antisense strand to SEQ ID NO: 2375974
aaauggaacagguacacug

SEQ ID NO: 2375976 - RNA, 19 nt, Artificial Sequence
  Description of Artificial Sequence: Synthetic oligonucleotide
  Sense strand starting at position 1364 of SEQ ID NO: 1885900
ugucgaaauuuguuuacau

SEQ ID NO: 2375977 - RNA, 19 nt, Artificial Sequence
  Description of Artificial Sequence: Synthetic oligonucleotide
  Antisense strand to SEQ ID NO: 2375976
auguaaacaaauuucgaca

SEQ ID NO: 2375978 - RNA, 19 nt, Artificial Sequence
  Description of Artificial Sequence: Synthetic oligonucleotide
  Sense strand starting at position 1450 of SEQ ID NO: 1885900
gaaauuguucugcgaaaga

SEQ ID NO: 2375979 - RNA, 19 nt, Artificial Sequence
  Description of Artificial Sequence: Synthetic oligonucleotide
  Antisense strand to SEQ ID NO: 2375978
ucuuucgcagaacaauuuc

SEQ ID NO: 2375980 - RNA, 19 nt, Artificial Sequence
  Description of Artificial Sequence: Synthetic oligonucleotide
  Sense strand starting at position 1540 of SEQ ID NO: 1885900
cgauuccuucgugacuaac

SEQ ID NO: 2375981 - RNA, 19 nt, Artificial Sequence
  Description of Artificial Sequence: Synthetic oligonucleotide
  Antisense strand to SEQ ID NO: 2375980
guuagucacgaaggaaucg

SEQ ID NO: 2375982 - RNA, 19 nt, Artificial Sequence
  Description of Artificial Sequence: Synthetic oligonucleotide
  Sense strand starting at position 2406 of SEQ ID NO: 1885900
gcucgcuuucuuccguaga

SEQ ID NO: 2375983 - RNA, 19 nt, Artificial Sequence
  Description of Artificial Sequence: Synthetic oligonucleotide
  Antisense strand to SEQ ID NO: 2375982
ucuacggaagaaagcgagc

SEQ ID NO: 2375984 - RNA, 19 nt, Artificial Sequence
  Description of Artificial Sequence: Synthetic oligonucleotide
  Sense strand starting at position 2873 of SEQ ID NO: 1885900
guagcuuauccauauggaa

SEQ ID NO: 2375985 - RNA, 19 nt, Artificial Sequence
  Description of Artificial Sequence: Synthetic oligonucleotide
  Antisense strand to SEQ ID NO: 2375984
uuccauauggauaagcuac

SEQ ID NO: 2375986 - RNA, 19 nt, Artificial Sequence
  Description of Artificial Sequence: Synthetic oligonucleotide
  Sense strand starting at position 2885 of SEQ ID NO: 1885900
uauggaaagccuugagacu

SEQ ID NO: 2375987 - RNA, 19 nt, Artificial Sequence
  Description of Artificial Sequence: Synthetic oligonucleotide
  Antisense strand to SEQ ID NO: 2375986
agucucaaggcuuuccaua

SEQ ID NO: 2375988 - RNA, 19 nt, Artificial Sequence
  Description of Artificial Sequence: Synthetic oligonucleotide
  Sense strand starting at position 2953 of SEQ ID NO: 1885900
gacccugaggucuacuuau

SEQ ID NO: 2375989 - RNA, 19 nt, Artificial Sequence
  Description of Artificial Sequence: Synthetic oligonucleotide
  Antisense strand to SEQ ID NO: 2375988
auaaguagaccucaggguc

SEQ ID NO: 2375990 - RNA, 19 nt, Artificial Sequence
  Description of Artificial Sequence: Synthetic oligonucleotide
  Sense strand starting at position 2975 of SEQ ID NO: 1885900
guuuguucgagggauuaga

SEQ ID NO: 2375991 - RNA, 19 nt, Artificial Sequence
  Description of Artificial Sequence: Synthetic oligonucleotide
  Antisense strand to SEQ ID NO: 2375990
ucuaaucccucgaacaaac

SEQ ID NO: 2375992 - RNA, 19 nt, Artificial Sequence
  Description of Artificial Sequence: Synthetic oligonucleotide
  Sense strand starting at position 3140 of SEQ ID NO: 1885900
gacagaaacccagguaguu

SEQ ID NO: 2375993 - RNA, 19 nt, Artificial Sequence
  Description of Artificial Sequence: Synthetic oligonucleotide
  Antisense strand to SEQ ID NO: 2375992
aacuaccuggguuucuguc

SEQ ID NO: 2375994 - RNA, 19 nt, Artificial Sequence
  Description of Artificial Sequence: Synthetic oligonucleotide
  Sense strand starting at position 3184 of SEQ ID NO: 1885900
gacgacaguuacucaacua

SEQ ID NO: 2375995 - RNA, 19 nt, Artificial Sequence
  Description of Artificial Sequence: Synthetic oligonucleotide
  Antisense strand to SEQ ID NO: 2375994
uaguugaguaacugucguc

SEQ ID NO: 2375996 - RNA, 19 nt, Artificial Sequence
  Description of Artificial Sequence: Synthetic oligonucleotide
  Sense strand starting at position 3354 of SEQ ID NO: 1885900
auuauacagcuguaaguga

SEQ ID NO: 2375997 - RNA, 19 nt, Artificial Sequence
  Description of Artificial Sequence: Synthetic oligonucleotide
  Antisense strand to SEQ ID NO: 2375996
ucacuuacagcuguauaau

SEQ ID NO: 2375998 - RNA, 19 nt, Artificial Sequence
  Description of Artificial Sequence: Synthetic oligonucleotide
  Sense strand starting at position 3405 of SEQ ID NO: 1885900
acaguaguuacagaagucu

SEQ ID NO: 2375999 - RNA, 19 nt, Artificial Sequence
  Description of Artificial Sequence: Synthetic oligonucleotide
  Antisense strand to SEQ ID NO: 2375998
agacuucuguaacuacugu

SEQ ID NO: 2376000 - RNA, 19 nt, Artificial Sequence
  Description of Artificial Sequence: Synthetic oligonucleotide
  Sense strand starting at position 3468 of SEQ ID NO: 1885900
cuuguuauauuugugcaga

SEQ ID NO: 2376001 - RNA, 19 nt, Artificial Sequence
  Description of Artificial Sequence: Synthetic oligonucleotide
  Antisense strand to SEQ ID NO: 2376000
ucugcacaaauauaacaag

SEQ ID NO: 2376002 - RNA, 19 nt, Artificial Sequence
  Description of Artificial Sequence: Synthetic oligonucleotide
  Sense strand starting at position 3470 of SEQ ID NO: 1885900
uguuauauuugugcagaua

SEQ ID NO: 2376003 - RNA, 19 nt, Artificial Sequence
  Description of Artificial Sequence: Synthetic oligonucleotide
  Antisense strand to SEQ ID NO: 2376002
uaucugcacaaauauaaca

SEQ ID NO: 2376004 - RNA, 19 nt, Artificial Sequence
  Description of Artificial Sequence: Synthetic oligonucleotide
  Sense strand starting at position 3530 of SEQ ID NO: 1885900
ugccuaauuuagugaauuu

SEQ ID NO: 2376005 - RNA, 19 nt, Artificial Sequence
  Description of Artificial Sequence: Synthetic oligonucleotide
  Antisense strand to SEQ ID NO: 2376004
aaauucacuaaauuaggca

SEQ ID NO: 2376006 - RNA, 19 nt, Artificial Sequence
  Description of Artificial Sequence: Synthetic oligonucleotide
  Sense strand starting at position 3610 of SEQ ID NO: 1885900
gcuagauaaucacuaugaa

SEQ ID NO: 2376007 - RNA, 19 nt, Artificial Sequence
  Description of Artificial Sequence: Synthetic oligonucleotide
  Antisense strand to SEQ ID NO: 2376006
uucauagugauuaucuagc

SEQ ID NO: 2376008 - RNA, 19 nt, Artificial Sequence
  Description of Artificial Sequence: Synthetic oligonucleotide
  Sense strand starting at position 3628 of SEQ ID NO: 1885900
acuuaauaggaauguuguu

SEQ ID NO: 2376009 - RNA, 19 nt, Artificial Sequence
  Description of Artificial Sequence: Synthetic oligonucleotide
  Antisense strand to SEQ ID NO: 2376008
aacaacauuccuauuaagu

SEQ ID NO: 2376010 - RNA, 19 nt, Artificial Sequence
  Description of Artificial Sequence: Synthetic oligonucleotide
  Sense strand starting at position 3755 of SEQ ID NO: 1885900
uaauaaaucgacugguuau

SEQ ID NO: 2376011 - RNA, 19 nt, Artificial Sequence
  Description of Artificial Sequence: Synthetic oligonucleotide
  Antisense strand to SEQ ID NO: 2376010
auaaccagucgauuuauua

SEQ ID NO: 2376012 - RNA, 19 nt, Artificial Sequence
  Description of Artificial Sequence: Synthetic oligonucleotide
  Sense strand starting at position 3765 of SEQ ID NO: 1885900
acugguuauuguuugaaga

SEQ ID NO: 2376013 - RNA, 19 nt, Artificial Sequence
  Description of Artificial Sequence: Synthetic oligonucleotide
  Antisense strand to SEQ ID NO: 2376012
ucuucaaacaauaaccagu

SEQ ID NO: 2376014 - RNA, 19 nt, Artificial Sequence
  Description of Artificial Sequence: Synthetic oligonucleotide
  Sense strand starting at position 3766 of SEQ ID NO: 1885900
cugguuauuguuugaagac

SEQ ID NO: 2376015 - RNA, 19 nt, Artificial Sequence
  Description of Artificial Sequence: Synthetic oligonucleotide
  Antisense strand to SEQ ID NO: 2376014
gucuucaaacaauaaccag

SEQ ID NO: 2376016 - RNA, 19 nt, Artificial Sequence
  Description of Artificial Sequence: Synthetic oligonucleotide
  Sense strand starting at position 3798 of SEQ ID NO: 1885900
auuuacauguuguagaaac

SEQ ID NO: 2376017 - RNA, 19 nt, Artificial Sequence
  Description of Artificial Sequence: Synthetic oligonucleotide
  Antisense strand to SEQ ID NO: 2376016
guuucuacaacauguaaau

SEQ ID NO: 2376018 - RNA, 19 nt, Artificial Sequence
  Description of Artificial Sequence: Synthetic oligonucleotide
  Sense strand starting at position 3806 of SEQ ID NO: 1885900
guuguagaaacaugggacu

SEQ ID NO: 2376019 - RNA, 19 nt, Artificial Sequence
  Description of Artificial Sequence: Synthetic oligonucleotide
  Antisense strand to SEQ ID NO: 2376018
agucccauguuucuacaac

SEQ ID NO: 2376020 - RNA, 19 nt, Artificial Sequence
  Description of Artificial Sequence: Synthetic oligonucleotide
  Sense strand starting at position 3839 of SEQ ID NO: 1885900
gccgcauuacaagauauua

SEQ ID NO: 2376021 - RNA, 19 nt, Artificial Sequence
  Description of Artificial Sequence: Synthetic oligonucleotide
  Antisense strand to SEQ ID NO: 2376020
uaauaucuuguaaugcggc

SEQ ID NO: 2376022 - RNA, 19 nt, Artificial Sequence
  Description of Artificial Sequence: Synthetic oligonucleotide
  Sense strand starting at position 17 of SEQ ID NO: 1885902
ugaccuuauuagcccaaga

SEQ ID NO: 2376023 - RNA, 19 nt, Artificial Sequence
  Description of Artificial Sequence: Synthetic oligonucleotide
  Antisense strand to SEQ ID NO: 2376022
ucuugggcuaauaagguca

SEQ ID NO: 2376024 - RNA, 19 nt, Artificial Sequence
  Description of Artificial Sequence: Synthetic oligonucleotide
  Sense strand starting at position 121 of SEQ ID NO: 1885902
cgacucuuguaaucacuca

SEQ ID NO: 2376025 - RNA, 19 nt, Artificial Sequence
  Description of Artificial Sequence: Synthetic oligonucleotide
  Antisense strand to SEQ ID NO: 2376024
ugagugauuacaagagucg

SEQ ID NO: 2376026 - RNA, 19 nt, Artificial Sequence
  Description of Artificial Sequence: Synthetic oligonucleotide
  Sense strand starting at position 338 of SEQ ID NO: 1885902
auacuauuacauuguagag

SEQ ID NO: 2376027 - RNA, 19 nt, Artificial Sequence
  Description of Artificial Sequence: Synthetic oligonucleotide
  Antisense strand to SEQ ID NO: 2376026
cucuacaauguaauaguau

SEQ ID NO: 2376028 - RNA, 19 nt, Artificial Sequence
  Description of Artificial Sequence: Synthetic oligonucleotide
  Sense strand starting at position 360 of SEQ ID NO: 1885902
agccgugguucugugauuu

SEQ ID NO: 2376029 - RNA, 19 nt, Artificial Sequence
  Description of Artificial Sequence: Synthetic oligonucleotide
  Antisense strand to SEQ ID NO: 2376028
aaaucacagaaccacggcu

SEQ ID NO: 2376030 - RNA, 19 nt, Artificial Sequence
  Description of Artificial Sequence: Synthetic oligonucleotide
  Sense strand starting at position 469 of SEQ ID NO: 1885902
gcugguaacuuuccaaaga

SEQ ID NO: 2376031 - RNA, 19 nt, Artificial Sequence
  Description of Artificial Sequence: Synthetic oligonucleotide
  Antisense strand to SEQ ID NO: 2376030
ucuuuggaaaguuaccagc

SEQ ID NO: 2376032 - RNA, 19 nt, Artificial Sequence
  Description of Artificial Sequence: Synthetic oligonucleotide
  Sense strand starting at position 485 of SEQ ID NO: 1885902
agacaucacugauaaggag

SEQ ID NO: 2376033 - RNA, 19 nt, Artificial Sequence
  Description of Artificial Sequence: Synthetic oligonucleotide
  Antisense strand to SEQ ID NO: 2376032
cuccuuaucagugaugucu

SEQ ID NO: 2376034 - RNA, 19 nt, Artificial Sequence
  Description of Artificial Sequence: Synthetic oligonucleotide
  Sense strand starting at position 509 of SEQ ID NO: 1885902
ucuguuagaugauuggaaa

SEQ ID NO: 2376035 - RNA, 19 nt, Artificial Sequence
  Description of Artificial Sequence: Synthetic oligonucleotide
  Antisense strand to SEQ ID NO: 2376034
uuuccaaucaucuaacaga

SEQ ID NO: 2376036 - RNA, 19 nt, Artificial Sequence
  Description of Artificial Sequence: Synthetic oligonucleotide
  Sense strand starting at position 510 of SEQ ID NO: 1885902
cuguuagaugauuggaaau

SEQ ID NO: 2376037 - RNA, 19 nt, Artificial Sequence
  Description of Artificial Sequence: Synthetic oligonucleotide
  Antisense strand to SEQ ID NO: 2376036
auuuccaaucaucuaacag

SEQ ID NO: 2376038 - RNA, 19 nt, Artificial Sequence
  Description of Artificial Sequence: Synthetic oligonucleotide
  Sense strand starting at position 522 of SEQ ID NO: 1885902
uggaaauauugcccugguu

SEQ ID NO: 2376039 - RNA, 19 nt, Artificial Sequence
  Description of Artificial Sequence: Synthetic oligonucleotide
  Antisense strand to SEQ ID NO: 2376038
aaccagggcaauauuucca

SEQ ID NO: 2376040 - RNA, 19 nt, Artificial Sequence
  Description of Artificial Sequence: Synthetic oligonucleotide
  Sense strand starting at position 606 of SEQ ID NO: 1885902
aacauauccuaggaggaga

SEQ ID NO: 2376041 - RNA, 19 nt, Artificial Sequence
  Description of Artificial Sequence: Synthetic oligonucleotide
  Antisense strand to SEQ ID NO: 2376040
ucuccuccuaggauauguu

SEQ ID NO: 2376042 - RNA, 19 nt, Artificial Sequence
  Description of Artificial Sequence: Synthetic oligonucleotide
  Sense strand starting at position 633 of SEQ ID NO: 1885902
cugggucauuguuuccaca

SEQ ID NO: 2376043 - RNA, 19 nt, Artificial Sequence
  Description of Artificial Sequence: Synthetic oligonucleotide
  Antisense strand to SEQ ID NO: 2376042
uguggaaacaaugacccag

SEQ ID NO: 2376044 - RNA, 19 nt, Artificial Sequence
  Description of Artificial Sequence: Synthetic oligonucleotide
  Sense strand starting at position 657 of SEQ ID NO: 1885902
cagucuaucccagggaaca

SEQ ID NO: 2376045 - RNA, 19 nt, Artificial Sequence
  Description of Artificial Sequence: Synthetic oligonucleotide
  Antisense strand to SEQ ID NO: 2376044
uguucccugggauagacug

SEQ ID NO: 2376046 - RNA, 19 nt, Artificial Sequence
  Description of Artificial Sequence: Synthetic oligonucleotide
  Sense strand starting at position 714 of SEQ ID NO: 1885902
uguguuacugcacaagagu

SEQ ID NO: 2376047 - RNA, 19 nt, Artificial Sequence
  Description of Artificial Sequence: Synthetic oligonucleotide
  Antisense strand to SEQ ID NO: 2376046
acucuugugcaguaacaca

SEQ ID NO: 2376048 - RNA, 19 nt, Artificial Sequence
  Description of Artificial Sequence: Synthetic oligonucleotide
  Sense strand starting at position 769 of SEQ ID NO: 1885902
uucugaucaucucugagau

SEQ ID NO: 2376049 - RNA, 19 nt, Artificial Sequence
  Description of Artificial Sequence: Synthetic oligonucleotide
  Antisense strand to SEQ ID NO: 2376048
aucucagagaugaucagaa

SEQ ID NO: 2376050 - RNA, 19 nt, Artificial Sequence
  Description of Artificial Sequence: Synthetic oligonucleotide
  Sense strand starting at position 770 of SEQ ID NO: 1885902
ucugaucaucucugagauu

SEQ ID NO: 2376051 - RNA, 19 nt, Artificial Sequence
  Description of Artificial Sequence: Synthetic oligonucleotide
  Antisense strand to SEQ ID NO: 2376050
aaucucagagaugaucaga

SEQ ID NO: 2376052 - RNA, 19 nt, Artificial Sequence
  Description of Artificial Sequence: Synthetic oligonucleotide
  Sense strand starting at position 838 of SEQ ID NO: 1885902
gccaguacucaggacuuau

SEQ ID NO: 2376053 - RNA, 19 nt, Artificial Sequence
  Description of Artificial Sequence: Synthetic oligonucleotide
  Antisense strand to SEQ ID NO: 2376052
auaaguccugaguacuggc

SEQ ID NO: 2376054 - RNA, 19 nt, Artificial Sequence
  Description of Artificial Sequence: Synthetic oligonucleotide
  Sense strand starting at position 967 of SEQ ID NO: 1885902
ggcagagaguggguucuau

SEQ ID NO: 2376055 - RNA, 19 nt, Artificial Sequence
  Description of Artificial Sequence: Synthetic oligonucleotide
  Antisense strand to SEQ ID NO: 2376054
auagaacccacucucugcc

SEQ ID NO: 2376056 - RNA, 19 nt, Artificial Sequence
  Description of Artificial Sequence: Synthetic oligonucleotide
  Sense strand starting at position 1036 of SEQ ID NO: 1885902
gcaggaaacccugggauau

SEQ ID NO: 2376057 - RNA, 19 nt, Artificial Sequence
  Description of Artificial Sequence: Synthetic oligonucleotide
  Antisense strand to SEQ ID NO: 2376056
auaucccaggguuuccugc

SEQ ID NO: 2376058 - RNA, 19 nt, Artificial Sequence
  Description of Artificial Sequence: Synthetic oligonucleotide
  Sense strand starting at position 1107 of SEQ ID NO: 1885902
ucucaucaucagggagacu

SEQ ID NO: 2376059 - RNA, 19 nt, Artificial Sequence
  Description of Artificial Sequence: Synthetic oligonucleotide
  Antisense strand to SEQ ID NO: 2376058
agucucccugaugaugaga

SEQ ID NO: 2376060 - RNA, 19 nt, Artificial Sequence
  Description of Artificial Sequence: Synthetic oligonucleotide
  Sense strand starting at position 1116 of SEQ ID NO: 1885902
cagggagacuuggagaaua

SEQ ID NO: 2376061 - RNA, 19 nt, Artificial Sequence
  Description of Artificial Sequence: Synthetic oligonucleotide
  Antisense strand to SEQ ID NO: 2376060
uauucuccaagucucccug

SEQ ID NO: 2376062 - RNA, 19 nt, Artificial Sequence
  Description of Artificial Sequence: Synthetic oligonucleotide
  Sense strand starting at position 1126 of SEQ ID NO: 1885902
uggagaauaggccgguaau

SEQ ID NO: 2376063 - RNA, 19 nt, Artificial Sequence
  Description of Artificial Sequence: Synthetic oligonucleotide
  Antisense strand to SEQ ID NO: 2376062
auuaccggccuauucucca

SEQ ID NO: 2376064 - RNA, 19 nt, Artificial Sequence
  Description of Artificial Sequence: Synthetic oligonucleotide
  Sense strand starting at position 1127 of SEQ ID NO: 1885902
ggagaauaggccgguaauu

SEQ ID NO: 2376065 - RNA, 19 nt, Artificial Sequence
  Description of Artificial Sequence: Synthetic oligonucleotide
  Antisense strand to SEQ ID NO: 2376064
aauuaccggccuauucucc

SEQ ID NO: 2376066 - RNA, 19 nt, Artificial Sequence
  Description of Artificial Sequence: Synthetic oligonucleotide
  Sense strand starting at position 1175 of SEQ ID NO: 1885902
ucaggccuucuugaaaguu

SEQ ID NO: 2376067 - RNA, 19 nt, Artificial Sequence
  Description of Artificial Sequence: Synthetic oligonucleotide
  Antisense strand to SEQ ID NO: 2376066
aacuuucaagaaggccuga

SEQ ID NO: 2376068 - RNA, 19 nt, Artificial Sequence
  Description of Artificial Sequence: Synthetic oligonucleotide
  Sense strand starting at position 1387 of SEQ ID NO: 1885902
gcagccagcccugaaauau

SEQ ID NO: 2376069 - RNA, 19 nt, Artificial Sequence
  Description of Artificial Sequence: Synthetic oligonucleotide
  Antisense strand to SEQ ID NO: 2376068
auauuucagggcuggcugc

SEQ ID NO: 2376070 - RNA, 19 nt, Artificial Sequence
  Description of Artificial Sequence: Synthetic oligonucleotide
  Sense strand starting at position 1446 of SEQ ID NO: 1885902
cuaaccagccaguaagauu

SEQ ID NO: 2376071 - RNA, 19 nt, Artificial Sequence
  Description of Artificial Sequence: Synthetic oligonucleotide
  Antisense strand to SEQ ID NO: 2376070
aaucuuacuggcugguuag

SEQ ID NO: 2376072 - RNA, 19 nt, Artificial Sequence
  Description of Artificial Sequence: Synthetic oligonucleotide
  Sense strand starting at position 1466 of SEQ ID NO: 1885902
agcaguuaccucugaaacg

SEQ ID NO: 2376073 - RNA, 19 nt, Artificial Sequence
  Description of Artificial Sequence: Synthetic oligonucleotide
  Antisense strand to SEQ ID NO: 2376072
cguuucagagguaacugcu

SEQ ID NO: 2376074 - RNA, 19 nt, Artificial Sequence
  Description of Artificial Sequence: Synthetic oligonucleotide
  Sense strand starting at position 1990 of SEQ ID NO: 1885902
aggaaauggucuguuucug

SEQ ID NO: 2376075 - RNA, 19 nt, Artificial Sequence
  Description of Artificial Sequence: Synthetic oligonucleotide
  Antisense strand to SEQ ID NO: 2376074
cagaaacagaccauuuccu

SEQ ID NO: 2376076 - RNA, 19 nt, Artificial Sequence
  Description of Artificial Sequence: Synthetic oligonucleotide
  Sense strand starting at position 2045 of SEQ ID NO: 1885902
cuuugccauugguuggaaa

SEQ ID NO: 2376077 - RNA, 19 nt, Artificial Sequence
  Description of Artificial Sequence: Synthetic oligonucleotide
  Antisense strand to SEQ ID NO: 2376076
uuuccaaccaauggcaaag

SEQ ID NO: 2376078 - RNA, 19 nt, Artificial Sequence
  Description of Artificial Sequence: Synthetic oligonucleotide
  Sense strand starting at position 2047 of SEQ ID NO: 1885902
uugccauugguuggaaaga

SEQ ID NO: 2376079 - RNA, 19 nt, Artificial Sequence
  Description of Artificial Sequence: Synthetic oligonucleotide
  Antisense strand to SEQ ID NO: 2376078
ucuuuccaaccaauggcaa

SEQ ID NO: 2376080 - RNA, 19 nt, Artificial Sequence
  Description of Artificial Sequence: Synthetic oligonucleotide
  Sense strand starting at position 2086 of SEQ ID NO: 1885902
acaucaacccugggucaua

SEQ ID NO: 2376081 - RNA, 19 nt, Artificial Sequence
  Description of Artificial Sequence: Synthetic oligonucleotide
  Antisense strand to SEQ ID NO: 2376080
uaugacccaggguugaugu

SEQ ID NO: 2376082 - RNA, 19 nt, Artificial Sequence
  Description of Artificial Sequence: Synthetic oligonucleotide
  Sense strand starting at position 2540 of SEQ ID NO: 1885902
gagagauagugagaggaau

SEQ ID NO: 2376083 - RNA, 19 nt, Artificial Sequence
  Description of Artificial Sequence: Synthetic oligonucleotide
  Antisense strand to SEQ ID NO: 2376082
auuccucucacuaucucuc

SEQ ID NO: 2376084 - RNA, 19 nt, Artificial Sequence
  Description of Artificial Sequence: Synthetic oligonucleotide
  Sense strand starting at position 2642 of SEQ ID NO: 1885902
ugcauuaaauaugucugaa

SEQ ID NO: 2376085 - RNA, 19 nt, Artificial Sequence
  Description of Artificial Sequence: Synthetic oligonucleotide
  Antisense strand to SEQ ID NO: 2376084
uucagacauauuuaaugca

SEQ ID NO: 2376086 - RNA, 19 nt, Artificial Sequence
  Description of Artificial Sequence: Synthetic oligonucleotide
  Sense strand starting at position 3267 of SEQ ID NO: 1885902
ggcuuauuaguagggugau

SEQ ID NO: 2376087 - RNA, 19 nt, Artificial Sequence
  Description of Artificial Sequence: Synthetic oligonucleotide
  Antisense strand to SEQ ID NO: 2376086
aucacccuacuaauaagcc

SEQ ID NO: 2376088 - RNA, 19 nt, Artificial Sequence
  Description of Artificial Sequence: Synthetic oligonucleotide
  Sense strand starting at position 3270 of SEQ ID NO: 1885902
uuauuaguagggugaucau

SEQ ID NO: 2376089 - RNA, 19 nt, Artificial Sequence
  Description of Artificial Sequence: Synthetic oligonucleotide
  Antisense strand to SEQ ID NO: 2376088
augaucacccuacuaauaa

SEQ ID NO: 2376090 - RNA, 19 nt, Artificial Sequence
  Description of Artificial Sequence: Synthetic oligonucleotide
  Sense strand starting at position 3273 of SEQ ID NO: 1885902
uuaguagggugaucauaua

SEQ ID NO: 2376091 - RNA, 19 nt, Artificial Sequence
  Description of Artificial Sequence: Synthetic oligonucleotide
  Antisense strand to SEQ ID NO: 2376090
uauaugaucacccuacuaa

SEQ ID NO: 2376092 - RNA, 19 nt, Artificial Sequence
  Description of Artificial Sequence: Synthetic oligonucleotide
  Sense strand starting at position 3564 of SEQ ID NO: 1885902
gcuuauucuguauauccuu

SEQ ID NO: 2376093 - RNA, 19 nt, Artificial Sequence
  Description of Artificial Sequence: Synthetic oligonucleotide
  Antisense strand to SEQ ID NO: 2376092
aaggauauacagaauaagc

SEQ ID NO: 2376094 - RNA, 19 nt, Artificial Sequence
  Description of Artificial Sequence: Synthetic oligonucleotide
  Sense strand starting at position 3576 of SEQ ID NO: 1885902
uauccuucgugucugauuu

SEQ ID NO: 2376095 - RNA, 19 nt, Artificial Sequence
  Description of Artificial Sequence: Synthetic oligonucleotide
  Antisense strand to SEQ ID NO: 2376094
aaaucagacacgaaggaua

SEQ ID NO: 2376096 - RNA, 19 nt, Artificial Sequence
  Description of Artificial Sequence: Synthetic oligonucleotide
  Sense strand starting at position 3577 of SEQ ID NO: 1885902
auccuucgugucugauuua

SEQ ID NO: 2376097 - RNA, 19 nt, Artificial Sequence
  Description of Artificial Sequence: Synthetic oligonucleotide
  Antisense strand to SEQ ID NO: 2376096
uaaaucagacacgaaggau

SEQ ID NO: 2376098 - RNA, 19 nt, Artificial Sequence
  Description of Artificial Sequence: Synthetic oligonucleotide
  Sense strand starting at position 3580 of SEQ ID NO: 1885902
cuucgugucugauuuaccu

SEQ ID NO: 2376099 - RNA, 19 nt, Artificial Sequence
  Description of Artificial Sequence: Synthetic oligonucleotide
  Antisense strand to SEQ ID NO: 2376098
agguaaaucagacacgaag

SEQ ID NO: 2376100 - RNA, 19 nt, Artificial Sequence
  Description of Artificial Sequence: Synthetic oligonucleotide
  Sense strand starting at position 3584 of SEQ ID NO: 1885902
gugucugauuuaccuuacu

SEQ ID NO: 2376101 - RNA, 19 nt, Artificial Sequence
  Description of Artificial Sequence: Synthetic oligonucleotide
  Antisense strand to SEQ ID NO: 2376100
aguaagguaaaucagacac

SEQ ID NO: 2376102 - RNA, 19 nt, Artificial Sequence
  Description of Artificial Sequence: Synthetic oligonucleotide
  Sense strand starting at position 45 of SEQ ID NO: 1885903
uggguuucagccuaagagu

SEQ ID NO: 2376103 - RNA, 19 nt, Artificial Sequence
  Description of Artificial Sequence: Synthetic oligonucleotide
  Antisense strand to SEQ ID NO: 2376102
acucuuaggcugaaaccca

SEQ ID NO: 2376104 - RNA, 19 nt, Artificial Sequence
  Description of Artificial Sequence: Synthetic oligonucleotide
  Sense strand starting at position 54 of SEQ ID NO: 1885903
gccuaagaguuguaauaug

SEQ ID NO: 2376105 - RNA, 19 nt, Artificial Sequence
  Description of Artificial Sequence: Synthetic oligonucleotide
  Antisense strand to SEQ ID NO: 2376104
cauauuacaacucuuaggc

SEQ ID NO: 2376106 - RNA, 19 nt, Artificial Sequence
  Description of Artificial Sequence: Synthetic oligonucleotide
  Sense strand starting at position 63 of SEQ ID NO: 1885903
uuguaauaugugugcccau

SEQ ID NO: 2376107 - RNA, 19 nt, Artificial Sequence
  Description of Artificial Sequence: Synthetic oligonucleotide
  Antisense strand to SEQ ID NO: 2376106
augggcacacauauuacaa

SEQ ID NO: 2376108 - RNA, 19 nt, Artificial Sequence
  Description of Artificial Sequence: Synthetic oligonucleotide
  Sense strand starting at position 260 of SEQ ID NO: 1885903
agaggaguccuaggauucu

SEQ ID NO: 2376109 - RNA, 19 nt, Artificial Sequence
  Description of Artificial Sequence: Synthetic oligonucleotide
  Antisense strand to SEQ ID NO: 2376108
agaauccuaggacuccucu

SEQ ID NO: 2376110 - RNA, 19 nt, Artificial Sequence
  Description of Artificial Sequence: Synthetic oligonucleotide
  Sense strand starting at position 1608 of SEQ ID NO: 1885903
agaugaggcuccgccagau

SEQ ID NO: 2376111 - RNA, 19 nt, Artificial Sequence
  Description of Artificial Sequence: Synthetic oligonucleotide
  Antisense strand to SEQ ID NO: 2376110
aucuggcggagccucaucu

SEQ ID NO: 2376112 - RNA, 19 nt, Artificial Sequence
  Description of Artificial Sequence: Synthetic oligonucleotide
  Sense strand starting at position 2637 of SEQ ID NO: 1885903
gcagauugacucuguggua

SEQ ID NO: 2376113 - RNA, 19 nt, Artificial Sequence
  Description of Artificial Sequence: Synthetic oligonucleotide
  Antisense strand to SEQ ID NO: 2376112
uaccacagagucaaucugc

SEQ ID NO: 2376114 - RNA, 19 nt, Artificial Sequence
  Description of Artificial Sequence: Synthetic oligonucleotide
  Sense strand starting at position 2640 of SEQ ID NO: 1885903
gauugacucugugguaugu

SEQ ID NO: 2376115 - RNA, 19 nt, Artificial Sequence
  Description of Artificial Sequence: Synthetic oligonucleotide
  Antisense strand to SEQ ID NO: 2376114
acauaccacagagucaauc

SEQ ID NO: 2376116 - RNA, 19 nt, Artificial Sequence
  Description of Artificial Sequence: Synthetic oligonucleotide
  Sense strand starting at position 2642 of SEQ ID NO: 1885903
uugacucugugguauguua

SEQ ID NO: 2376117 - RNA, 19 nt, Artificial Sequence
  Description of Artificial Sequence: Synthetic oligonucleotide
  Antisense strand to SEQ ID NO: 2376116
uaacauaccacagagucaa

SEQ ID NO: 2376118 - RNA, 19 nt, Artificial Sequence
  Description of Artificial Sequence: Synthetic oligonucleotide
  Sense strand starting at position 2644 of SEQ ID NO: 1885903
gacucugugguauguuaau

SEQ ID NO: 2376119 - RNA, 19 nt, Artificial Sequence
  Description of Artificial Sequence: Synthetic oligonucleotide
  Antisense strand to SEQ ID NO: 2376118
auuaacauaccacagaguc

SEQ ID NO: 2376120 - RNA, 19 nt, Artificial Sequence
  Description of Artificial Sequence: Synthetic oligonucleotide
  Sense strand starting at position 2650 of SEQ ID NO: 1885903
gugguauguuaauguuuau

SEQ ID NO: 2376121 - RNA, 19 nt, Artificial Sequence
  Description of Artificial Sequence: Synthetic oligonucleotide
  Antisense strand to SEQ ID NO: 2376120
auaaacauuaacauaccac

SEQ ID NO: 2376122 - RNA, 19 nt, Artificial Sequence
  Description of Artificial Sequence: Synthetic oligonucleotide
  Sense strand starting at position 2653 of SEQ ID NO: 1885903
guauguuaauguuuaugca

SEQ ID NO: 2376123 - RNA, 19 nt, Artificial Sequence
  Description of Artificial Sequence: Synthetic oligonucleotide
  Antisense strand to SEQ ID NO: 2376122
ugcauaaacauuaacauac

SEQ ID NO: 2376124 - RNA, 19 nt, Artificial Sequence
  Description of Artificial Sequence: Synthetic oligonucleotide
  Sense strand starting at position 2656 of SEQ ID NO: 1885903
uguuaauguuuaugcauag

SEQ ID NO: 2376125 - RNA, 19 nt, Artificial Sequence
  Description of Artificial Sequence: Synthetic oligonucleotide
  Antisense strand to SEQ ID NO: 2376124
cuaugcauaaacauuaaca

SEQ ID NO: 2376126 - RNA, 19 nt, Artificial Sequence
  Description of Artificial Sequence: Synthetic oligonucleotide
  Sense strand starting at position 2858 of SEQ ID NO: 1885903
ggugaauucgggcaaccau

SEQ ID NO: 2376127 - RNA, 19 nt, Artificial Sequence
  Description of Artificial Sequence: Synthetic oligonucleotide
  Antisense strand to SEQ ID NO: 2376126
augguugcccgaauucacc

SEQ ID NO: 2376128 - RNA, 19 nt, Artificial Sequence
  Description of Artificial Sequence: Synthetic oligonucleotide
  Sense strand starting at position 2994 of SEQ ID NO: 1885903
uuagguaugugugagacaa

SEQ ID NO: 2376129 - RNA, 19 nt, Artificial Sequence
  Description of Artificial Sequence: Synthetic oligonucleotide
  Antisense strand to SEQ ID NO: 2376128
uugucucacacauaccuaa

SEQ ID NO: 2376130 - RNA, 19 nt, Artificial Sequence
  Description of Artificial Sequence: Synthetic oligonucleotide
  Sense strand starting at position 2996 of SEQ ID NO: 1885903
agguaugugugagacaacu

SEQ ID NO: 2376131 - RNA, 19 nt, Artificial Sequence
  Description of Artificial Sequence: Synthetic oligonucleotide
  Antisense strand to SEQ ID NO: 2376130
aguugucucacacauaccu

SEQ ID NO: 2376132 - RNA, 19 nt, Artificial Sequence
  Description of Artificial Sequence: Synthetic oligonucleotide
  Sense strand starting at position 3049 of SEQ ID NO: 1885903
agugaaaucuaagugcaga

SEQ ID NO: 2376133 - RNA, 19 nt, Artificial Sequence
  Description of Artificial Sequence: Synthetic oligonucleotide
  Antisense strand to SEQ ID NO: 2376132
ucugcacuuagauuucacu

SEQ ID NO: 2376134 - RNA, 19 nt, Artificial Sequence
  Description of Artificial Sequence: Synthetic oligonucleotide
  Sense strand starting at position 3050 of SEQ ID NO: 1885903
gugaaaucuaagugcagau

SEQ ID NO: 2376135 - RNA, 19 nt, Artificial Sequence
  Description of Artificial Sequence: Synthetic oligonucleotide
  Antisense strand to SEQ ID NO: 2376134
aucugcacuuagauuucac

SEQ ID NO: 2376136 - RNA, 19 nt, Artificial Sequence
  Description of Artificial Sequence: Synthetic oligonucleotide
  Sense strand starting at position 3742 of SEQ ID NO: 1885903
acagaagacucuucguuga

SEQ ID NO: 2376137 - RNA, 19 nt, Artificial Sequence
  Description of Artificial Sequence: Synthetic oligonucleotide
  Antisense strand to SEQ ID NO: 2376136
ucaacgaagagucuucugu

SEQ ID NO: 2376138 - RNA, 19 nt, Artificial Sequence
  Description of Artificial Sequence: Synthetic oligonucleotide
  Sense strand starting at position 3744 of SEQ ID NO: 1885903
agaagacucuucguugaua

SEQ ID NO: 2376139 - RNA, 19 nt, Artificial Sequence
  Description of Artificial Sequence: Synthetic oligonucleotide
  Antisense strand to SEQ ID NO: 2376138
uaucaacgaagagucuucu

SEQ ID NO: 2376140 - RNA, 19 nt, Artificial Sequence
  Description of Artificial Sequence: Synthetic oligonucleotide
  Sense strand starting at position 3745 of SEQ ID NO: 1885903
gaagacucuucguugauau

SEQ ID NO: 2376141 - RNA, 19 nt, Artificial Sequence
  Description of Artificial Sequence: Synthetic oligonucleotide
  Antisense strand to SEQ ID NO: 2376140
auaucaacgaagagucuuc

SEQ ID NO: 2376142 - RNA, 19 nt, Artificial Sequence
  Description of Artificial Sequence: Synthetic oligonucleotide
  Sense strand starting at position 3746 of SEQ ID NO: 1885903
aagacucuucguugauauu

SEQ ID NO: 2376143 - RNA, 19 nt, Artificial Sequence
  Description of Artificial Sequence: Synthetic oligonucleotide
  Antisense strand to SEQ ID NO: 2376142
aauaucaacgaagagucuu

SEQ ID NO: 2376144 - RNA, 19 nt, Artificial Sequence
  Description of Artificial Sequence: Synthetic oligonucleotide
  Sense strand starting at position 3947 of SEQ ID NO: 1885903
guguuaguccaguaacaca

SEQ ID NO: 2376145 - RNA, 19 nt, Artificial Sequence
  Description of Artificial Sequence: Synthetic oligonucleotide
  Antisense strand to SEQ ID NO: 2376144
uguguuacuggacuaacac

SEQ ID NO: 2376146 - RNA, 19 nt, Artificial Sequence
  Description of Artificial Sequence: Synthetic oligonucleotide
  Sense strand starting at position 52 of SEQ ID NO: 1885904
ucuauaucaguacguaacu

SEQ ID NO: 2376147 - RNA, 19 nt, Artificial Sequence
  Description of Artificial Sequence: Synthetic oligonucleotide
  Antisense strand to SEQ ID NO: 2376146
aguuacguacugauauaga

SEQ ID NO: 2376148 - RNA, 19 nt, Artificial Sequence
  Description of Artificial Sequence: Synthetic oligonucleotide
  Sense strand starting at position 53 of SEQ ID NO: 1885904
cuauaucaguacguaacua

SEQ ID NO: 2376149 - RNA, 19 nt, Artificial Sequence
  Description of Artificial Sequence: Synthetic oligonucleotide
  Antisense strand to SEQ ID NO: 2376148
uaguuacguacugauauag

SEQ ID NO: 2376150 - RNA, 19 nt, Artificial Sequence
  Description of Artificial Sequence: Synthetic oligonucleotide
  Sense strand starting at position 123 of SEQ ID NO: 1885904
acugcuuaugacuguaaag

SEQ ID NO: 2376151 - RNA, 19 nt, Artificial Sequence
  Description of Artificial Sequence: Synthetic oligonucleotide
  Antisense strand to SEQ ID NO: 2376150
cuuuacagucauaagcagu

SEQ ID NO: 2376152 - RNA, 19 nt, Artificial Sequence
  Description of Artificial Sequence: Synthetic oligonucleotide
  Sense strand starting at position 125 of SEQ ID NO: 1885904
ugcuuaugacuguaaagca

SEQ ID NO: 2376153 - RNA, 19 nt, Artificial Sequence
  Description of Artificial Sequence: Synthetic oligonucleotide
  Antisense strand to SEQ ID NO: 2376152
ugcuuuacagucauaagca

SEQ ID NO: 2376154 - RNA, 19 nt, Artificial Sequence
  Description of Artificial Sequence: Synthetic oligonucleotide
  Sense strand starting at position 187 of SEQ ID NO: 1885904
uugcuuguuuauucugaga

SEQ ID NO: 2376155 - RNA, 19 nt, Artificial Sequence
  Description of Artificial Sequence: Synthetic oligonucleotide
  Antisense strand to SEQ ID NO: 2376154
ucucagaauaaacaagcaa

SEQ ID NO: 2376156 - RNA, 19 nt, Artificial Sequence
  Description of Artificial Sequence: Synthetic oligonucleotide
  Sense strand starting at position 231 of SEQ ID NO: 1885904
uuuccaaagugauugaugu

SEQ ID NO: 2376157 - RNA, 19 nt, Artificial Sequence
  Description of Artificial Sequence: Synthetic oligonucleotide
  Antisense strand to SEQ ID NO: 2376156
acaucaaucacuuuggaaa

SEQ ID NO: 2376158 - RNA, 19 nt, Artificial Sequence
  Description of Artificial Sequence: Synthetic oligonucleotide
  Sense strand starting at position 232 of SEQ ID NO: 1885904
uuccaaagugauugaugua

SEQ ID NO: 2376159 - RNA, 19 nt, Artificial Sequence
  Description of Artificial Sequence: Synthetic oligonucleotide
  Antisense strand to SEQ ID NO: 2376158
uacaucaaucacuuuggaa

SEQ ID NO: 2376160 - RNA, 19 nt, Artificial Sequence
  Description of Artificial Sequence: Synthetic oligonucleotide
  Sense strand starting at position 284 of SEQ ID NO: 1885904
gaaccugcucaggagcaau

SEQ ID NO: 2376161 - RNA, 19 nt, Artificial Sequence
  Description of Artificial Sequence: Synthetic oligonucleotide
  Antisense strand to SEQ ID NO: 2376160
auugcuccugagcagguuc

SEQ ID NO: 2376162 - RNA, 19 nt, Artificial Sequence
  Description of Artificial Sequence: Synthetic oligonucleotide
  Sense strand starting at position 337 of SEQ ID NO: 1885904
gccugauuguauguaauag

SEQ ID NO: 2376163 - RNA, 19 nt, Artificial Sequence
  Description of Artificial Sequence: Synthetic oligonucleotide
  Antisense strand to SEQ ID NO: 2376162
cuauuacauacaaucaggc

SEQ ID NO: 2376164 - RNA, 19 nt, Artificial Sequence
  Description of Artificial Sequence: Synthetic oligonucleotide
  Sense strand starting at position 516 of SEQ ID NO: 1885904
agcaucuaauucguaggau

SEQ ID NO: 2376165 - RNA, 19 nt, Artificial Sequence
  Description of Artificial Sequence: Synthetic oligonucleotide
  Antisense strand to SEQ ID NO: 2376164
auccuacgaauuagaugcu

SEQ ID NO: 2376166 - RNA, 19 nt, Artificial Sequence
  Description of Artificial Sequence: Synthetic oligonucleotide
  Sense strand starting at position 519 of SEQ ID NO: 1885904
aucuaauucguaggauaaa

SEQ ID NO: 2376167 - RNA, 19 nt, Artificial Sequence
  Description of Artificial Sequence: Synthetic oligonucleotide
  Antisense strand to SEQ ID NO: 2376166
uuuauccuacgaauuagau

SEQ ID NO: 2376168 - RNA, 19 nt, Artificial Sequence
  Description of Artificial Sequence: Synthetic oligonucleotide
  Sense strand starting at position 573 of SEQ ID NO: 1885904
ggaaaucugucaucuaguc

SEQ ID NO: 2376169 - RNA, 19 nt, Artificial Sequence
  Description of Artificial Sequence: Synthetic oligonucleotide
  Antisense strand to SEQ ID NO: 2376168
gacuagaugacagauuucc

SEQ ID NO: 2376170 - RNA, 19 nt, Artificial Sequence
  Description of Artificial Sequence: Synthetic oligonucleotide
  Sense strand starting at position 623 of SEQ ID NO: 1885904
ucacaauguuccuuggaau

SEQ ID NO: 2376171 - RNA, 19 nt, Artificial Sequence
  Description of Artificial Sequence: Synthetic oligonucleotide
  Antisense strand to SEQ ID NO: 2376170
auuccaaggaacauuguga

SEQ ID NO: 2376172 - RNA, 19 nt, Artificial Sequence
  Description of Artificial Sequence: Synthetic oligonucleotide
  Sense strand starting at position 707 of SEQ ID NO: 1885904
gguucuugccauuaaucag

SEQ ID NO: 2376173 - RNA, 19 nt, Artificial Sequence
  Description of Artificial Sequence: Synthetic oligonucleotide
  Antisense strand to SEQ ID NO: 2376172
cugauuaauggcaagaacc

SEQ ID NO: 2376174 - RNA, 19 nt, Artificial Sequence
  Description of Artificial Sequence: Synthetic oligonucleotide
  Sense strand starting at position 722 of SEQ ID NO: 1885904
ucagaagacugauaaagaa

SEQ ID NO: 2376175 - RNA, 19 nt, Artificial Sequence
  Description of Artificial Sequence: Synthetic oligonucleotide
  Antisense strand to SEQ ID NO: 2376174
uucuuuaucagucuucuga

SEQ ID NO: 2376176 - RNA, 19 nt, Artificial Sequence
  Description of Artificial Sequence: Synthetic oligonucleotide
  Sense strand starting at position 854 of SEQ ID NO: 1885904
uguccauaugcugguauau

SEQ ID NO: 2376177 - RNA, 19 nt, Artificial Sequence
  Description of Artificial Sequence: Synthetic oligonucleotide
  Antisense strand to SEQ ID NO: 2376176
auauaccagcauauggaca

SEQ ID NO: 2376178 - RNA, 19 nt, Artificial Sequence
  Description of Artificial Sequence: Synthetic oligonucleotide
  Sense strand starting at position 878 of SEQ ID NO: 1885904
acuggaguacucugcaaac

SEQ ID NO: 2376179 - RNA, 19 nt, Artificial Sequence
  Description of Artificial Sequence: Synthetic oligonucleotide
  Antisense strand to SEQ ID NO: 2376178
guuugcagaguacuccagu

SEQ ID NO: 2376180 - RNA, 19 nt, Artificial Sequence
  Description of Artificial Sequence: Synthetic oligonucleotide
  Sense strand starting at position 880 of SEQ ID NO: 1885904
uggaguacucugcaaacuu

SEQ ID NO: 2376181 - RNA, 19 nt, Artificial Sequence
  Description of Artificial Sequence: Synthetic oligonucleotide
  Antisense strand to SEQ ID NO: 2376180
aaguuugcagaguacucca

SEQ ID NO: 2376182 - RNA, 19 nt, Artificial Sequence
  Description of Artificial Sequence: Synthetic oligonucleotide
  Sense strand starting at position 1079 of SEQ ID NO: 1885904
aaaugauaccuguauugug

SEQ ID NO: 2376183 - RNA, 19 nt, Artificial Sequence
  Description of Artificial Sequence: Synthetic oligonucleotide
  Antisense strand to SEQ ID NO: 2376182
cacaauacagguaucauuu

SEQ ID NO: 2376184 - RNA, 19 nt, Artificial Sequence
  Description of Artificial Sequence: Synthetic oligonucleotide
  Sense strand starting at position 1144 of SEQ ID NO: 1885904
agaaucucucuugaagcua

SEQ ID NO: 2376185 - RNA, 19 nt, Artificial Sequence
  Description of Artificial Sequence: Synthetic oligonucleotide
  Antisense strand to SEQ ID NO: 2376184
uagcuucaagagagauucu

SEQ ID NO: 2376186 - RNA, 19 nt, Artificial Sequence
  Description of Artificial Sequence: Synthetic oligonucleotide
  Sense strand starting at position 1270 of SEQ ID NO: 1885904
agaaauaguugauccuacu

SEQ ID NO: 2376187 - RNA, 19 nt, Artificial Sequence
  Description of Artificial Sequence: Synthetic oligonucleotide
  Antisense strand to SEQ ID NO: 2376186
aguaggaucaacuauuucu

SEQ ID NO: 2376188 - RNA, 19 nt, Artificial Sequence
  Description of Artificial Sequence: Synthetic oligonucleotide
  Sense strand starting at position 1278 of SEQ ID NO: 1885904
uugauccuacugcagaauu

SEQ ID NO: 2376189 - RNA, 19 nt, Artificial Sequence
  Description of Artificial Sequence: Synthetic oligonucleotide
  Antisense strand to SEQ ID NO: 2376188
aauucugcaguaggaucaa

SEQ ID NO: 2376190 - RNA, 19 nt, Artificial Sequence
  Description of Artificial Sequence: Synthetic oligonucleotide
  Sense strand starting at position 1289 of SEQ ID NO: 1885904
gcagaauuagguuaacacu

SEQ ID NO: 2376191 - RNA, 19 nt, Artificial Sequence
  Description of Artificial Sequence: Synthetic oligonucleotide
  Antisense strand to SEQ ID NO: 2376190
aguguuaaccuaauucugc

SEQ ID NO: 2376192 - RNA, 19 nt, Artificial Sequence
  Description of Artificial Sequence: Synthetic oligonucleotide
  Sense strand starting at position 1406 of SEQ ID NO: 1885904
cccagagugcugugaaaug

SEQ ID NO: 2376193 - RNA, 19 nt, Artificial Sequence
  Description of Artificial Sequence: Synthetic oligonucleotide
  Antisense strand to SEQ ID NO: 2376192
cauuucacagcacucuggg

SEQ ID NO: 2376194 - RNA, 19 nt, Artificial Sequence
  Description of Artificial Sequence: Synthetic oligonucleotide
  Sense strand starting at position 1417 of SEQ ID NO: 1885904
gugaaaugcaccugugggu

SEQ ID NO: 2376195 - RNA, 19 nt, Artificial Sequence
  Description of Artificial Sequence: Synthetic oligonucleotide
  Antisense strand to SEQ ID NO: 2376194
acccacaggugcauuucac

SEQ ID NO: 2376196 - RNA, 19 nt, Artificial Sequence
  Description of Artificial Sequence: Synthetic oligonucleotide
  Sense strand starting at position 1930 of SEQ ID NO: 1885904
ggccucaccuguguaauua

SEQ ID NO: 2376197 - RNA, 19 nt, Artificial Sequence
  Description of Artificial Sequence: Synthetic oligonucleotide
  Antisense strand to SEQ ID NO: 2376196
uaauuacacaggugaggcc

SEQ ID NO: 2376198 - RNA, 19 nt, Artificial Sequence
  Description of Artificial Sequence: Synthetic oligonucleotide
  Sense strand starting at position 1931 of SEQ ID NO: 1885904
gccucaccuguguaauuac

SEQ ID NO: 2376199 - RNA, 19 nt, Artificial Sequence
  Description of Artificial Sequence: Synthetic oligonucleotide
  Antisense strand to SEQ ID NO: 2376198
guaauuacacaggugaggc

SEQ ID NO: 2376200 - RNA, 19 nt, Artificial Sequence
  Description of Artificial Sequence: Synthetic oligonucleotide
  Sense strand starting at position 3044 of SEQ ID NO: 1885904
gcuauuagagcgcagggua

SEQ ID NO: 2376201 - RNA, 19 nt, Artificial Sequence
  Description of Artificial Sequence: Synthetic oligonucleotide
  Antisense strand to SEQ ID NO: 2376200
uacccugcgcucuaauagc

SEQ ID NO: 2376202 - RNA, 19 nt, Artificial Sequence
  Description of Artificial Sequence: Synthetic oligonucleotide
  Sense strand starting at position 3091 of SEQ ID NO: 1885904
cccagacguggaggauaau

SEQ ID NO: 2376203 - RNA, 19 nt, Artificial Sequence
  Description of Artificial Sequence: Synthetic oligonucleotide
  Antisense strand to SEQ ID NO: 2376202
auuauccuccacgucuggg

SEQ ID NO: 2376204 - RNA, 19 nt, Artificial Sequence
  Description of Artificial Sequence: Synthetic oligonucleotide
  Sense strand starting at position 3097 of SEQ ID NO: 1885904
cguggaggauaauuauagu

SEQ ID NO: 2376205 - RNA, 19 nt, Artificial Sequence
  Description of Artificial Sequence: Synthetic oligonucleotide
  Antisense strand to SEQ ID NO: 2376204
acuauaauuauccuccacg

SEQ ID NO: 2376206 - RNA, 19 nt, Artificial Sequence
  Description of Artificial Sequence: Synthetic oligonucleotide
  Sense strand starting at position 3472 of SEQ ID NO: 1885904
acacuuugacagcauguua

SEQ ID NO: 2376207 - RNA, 19 nt, Artificial Sequence
  Description of Artificial Sequence: Synthetic oligonucleotide
  Antisense strand to SEQ ID NO: 2376206
uaacaugcugucaaagugu

SEQ ID NO: 2376208 - RNA, 19 nt, Artificial Sequence
  Description of Artificial Sequence: Synthetic oligonucleotide
  Sense strand starting at position 3518 of SEQ ID NO: 1885904
gugcuauagcaaugugaca

SEQ ID NO: 2376209 - RNA, 19 nt, Artificial Sequence
  Description of Artificial Sequence: Synthetic oligonucleotide
  Antisense strand to SEQ ID NO: 2376208
ugucacauugcuauagcac

SEQ ID NO: 2376210 - RNA, 19 nt, Artificial Sequence
  Description of Artificial Sequence: Synthetic oligonucleotide
  Sense strand starting at position 3520 of SEQ ID NO: 1885904
gcuauagcaaugugacaug

SEQ ID NO: 2376211 - RNA, 19 nt, Artificial Sequence
  Description of Artificial Sequence: Synthetic oligonucleotide
  Antisense strand to SEQ ID NO: 2376210
caugucacauugcuauagc

SEQ ID NO: 2376212 - RNA, 19 nt, Artificial Sequence
  Description of Artificial Sequence: Synthetic oligonucleotide
  Sense strand starting at position 3589 of SEQ ID NO: 1885904
aggaaucugcuguacuuaa

SEQ ID NO: 2376213 - RNA, 19 nt, Artificial Sequence
  Description of Artificial Sequence: Synthetic oligonucleotide
  Antisense strand to SEQ ID NO: 2376212
uuaaguacagcagauuccu

SEQ ID NO: 2376214 - RNA, 19 nt, Artificial Sequence
  Description of Artificial Sequence: Synthetic oligonucleotide
  Sense strand starting at position 3640 of SEQ ID NO: 1885904
auuagcuacucagucuaua

SEQ ID NO: 2376215 - RNA, 19 nt, Artificial Sequence
  Description of Artificial Sequence: Synthetic oligonucleotide
  Antisense strand to SEQ ID NO: 2376214
uauagacugaguagcuaau

SEQ ID NO: 2376216 - RNA, 19 nt, Artificial Sequence
  Description of Artificial Sequence: Synthetic oligonucleotide
  Sense strand starting at position 3772 of SEQ ID NO: 1885904
acaggaaaguauuaggaca

SEQ ID NO: 2376217 - RNA, 19 nt, Artificial Sequence
  Description of Artificial Sequence: Synthetic oligonucleotide
  Antisense strand to SEQ ID NO: 2376216
uguccuaauacuuuccugu

SEQ ID NO: 2376218 - RNA, 19 nt, Artificial Sequence
  Description of Artificial Sequence: Synthetic oligonucleotide
  Sense strand starting at position 3907 of SEQ ID NO: 1885904
uuuggccucagguaaaguu

SEQ ID NO: 2376219 - RNA, 19 nt, Artificial Sequence
  Description of Artificial Sequence: Synthetic oligonucleotide
  Antisense strand to SEQ ID NO: 2376218
aacuuuaccugaggccaaa

SEQ ID NO: 2376220 - RNA, 19 nt, Artificial Sequence
  Description of Artificial Sequence: Synthetic oligonucleotide
  Sense strand starting at position 3915 of SEQ ID NO: 1885904
cagguaaaguucuuaugaa

SEQ ID NO: 2376221 - RNA, 19 nt, Artificial Sequence
  Description of Artificial Sequence: Synthetic oligonucleotide
  Antisense strand to SEQ ID NO: 2376220
uucauaagaacuuuaccug

SEQ ID NO: 2376222 - RNA, 19 nt, Artificial Sequence
  Description of Artificial Sequence: Synthetic oligonucleotide
  Sense strand starting at position 3968 of SEQ ID NO: 1885904
agugcuuagauauguacag

SEQ ID NO: 2376223 - RNA, 19 nt, Artificial Sequence
  Description of Artificial Sequence: Synthetic oligonucleotide
  Antisense strand to SEQ ID NO: 2376222
cuguacauaucuaagcacu

SEQ ID NO: 2376224 - RNA, 19 nt, Artificial Sequence
  Description of Artificial Sequence: Synthetic oligonucleotide
  Sense strand starting at position 3969 of SEQ ID NO: 1885904
gugcuuagauauguacagu

SEQ ID NO: 2376225 - RNA, 19 nt, Artificial Sequence
  Description of Artificial Sequence: Synthetic oligonucleotide
  Antisense strand to SEQ ID NO: 2376224
acuguacauaucuaagcac

SEQ ID NO: 2376226 - RNA, 19 nt, Artificial Sequence
  Description of Artificial Sequence: Synthetic oligonucleotide
  Sense strand starting at position 27 of SEQ ID NO: 1885905
gccugauuaccagagugag

SEQ ID NO: 2376227 - RNA, 19 nt, Artificial Sequence
  Description of Artificial Sequence: Synthetic oligonucleotide
  Antisense strand to SEQ ID NO: 2376226
cucacucugguaaucaggc

SEQ ID NO: 2376228 - RNA, 19 nt, Artificial Sequence
  Description of Artificial Sequence: Synthetic oligonucleotide
  Sense strand starting at position 523 of SEQ ID NO: 1885905
agacuagagucacucucuu

SEQ ID NO: 2376229 - RNA, 19 nt, Artificial Sequence
  Description of Artificial Sequence: Synthetic oligonucleotide
  Antisense strand to SEQ ID NO: 2376228
aagagagugacucuagucu

SEQ ID NO: 2376230 - RNA, 19 nt, Artificial Sequence
  Description of Artificial Sequence: Synthetic oligonucleotide
  Sense strand starting at position 615 of SEQ ID NO: 1885905
cugcuuuguggagaucauu

SEQ ID NO: 2376231 - RNA, 19 nt, Artificial Sequence
  Description of Artificial Sequence: Synthetic oligonucleotide
  Antisense strand to SEQ ID NO: 2376230
aaugaucuccacaaagcag

SEQ ID NO: 2376232 - RNA, 19 nt, Artificial Sequence
  Description of Artificial Sequence: Synthetic oligonucleotide
  Sense strand starting at position 746 of SEQ ID NO: 1885905
ggccuauaauccuuacuug

SEQ ID NO: 2376233 - RNA, 19 nt, Artificial Sequence
  Description of Artificial Sequence: Synthetic oligonucleotide
  Antisense strand to SEQ ID NO: 2376232
caaguaaggauuauaggcc

SEQ ID NO: 2376234 - RNA, 19 nt, Artificial Sequence
  Description of Artificial Sequence: Synthetic oligonucleotide
  Sense strand starting at position 775 of SEQ ID NO: 1885905
guauucuaugguuagaucu

SEQ ID NO: 2376235 - RNA, 19 nt, Artificial Sequence
  Description of Artificial Sequence: Synthetic oligonucleotide
  Antisense strand to SEQ ID NO: 2376234
agaucuaaccauagaauac

SEQ ID NO: 2376236 - RNA, 19 nt, Artificial Sequence
  Description of Artificial Sequence: Synthetic oligonucleotide
  Sense strand starting at position 782 of SEQ ID NO: 1885905
augguuagaucucucaaua

SEQ ID NO: 2376237 - RNA, 19 nt, Artificial Sequence
  Description of Artificial Sequence: Synthetic oligonucleotide
  Antisense strand to SEQ ID NO: 2376236
uauugagagaucuaaccau

SEQ ID NO: 2376238 - RNA, 19 nt, Artificial Sequence
  Description of Artificial Sequence: Synthetic oligonucleotide
  Sense strand starting at position 984 of SEQ ID NO: 1885905
uuuguuuccucauuuguac

SEQ ID NO: 2376239 - RNA, 19 nt, Artificial Sequence
  Description of Artificial Sequence: Synthetic oligonucleotide
  Antisense strand to SEQ ID NO: 2376238
guacaaaugaggaaacaaa

SEQ ID NO: 2376240 - RNA, 19 nt, Artificial Sequence
  Description of Artificial Sequence: Synthetic oligonucleotide
  Sense strand starting at position 1149 of SEQ ID NO: 1885905
acugacuuugccggauaga

SEQ ID NO: 2376241 - RNA, 19 nt, Artificial Sequence
  Description of Artificial Sequence: Synthetic oligonucleotide
  Antisense strand to SEQ ID NO: 2376240
ucuauccggcaaagucagu

SEQ ID NO: 2376242 - RNA, 19 nt, Artificial Sequence
  Description of Artificial Sequence: Synthetic oligonucleotide
  Sense strand starting at position 1150 of SEQ ID NO: 1885905
cugacuuugccggauagag

SEQ ID NO: 2376243 - RNA, 19 nt, Artificial Sequence
  Description of Artificial Sequence: Synthetic oligonucleotide
  Antisense strand to SEQ ID NO: 2376242
cucuauccggcaaagucag

SEQ ID NO: 2376244 - RNA, 19 nt, Artificial Sequence
  Description of Artificial Sequence: Synthetic oligonucleotide
  Sense strand starting at position 1152 of SEQ ID NO: 1885905
gacuuugccggauagagug

SEQ ID NO: 2376245 - RNA, 19 nt, Artificial Sequence
  Description of Artificial Sequence: Synthetic oligonucleotide
  Antisense strand to SEQ ID NO: 2376244
cacucuauccggcaaaguc

SEQ ID NO: 2376246 - RNA, 19 nt, Artificial Sequence
  Description of Artificial Sequence: Synthetic oligonucleotide
  Sense strand starting at position 1814 of SEQ ID NO: 1885905
cagccucgggauugaucaa

SEQ ID NO: 2376247 - RNA, 19 nt, Artificial Sequence
  Description of Artificial Sequence: Synthetic oligonucleotide
  Antisense strand to SEQ ID NO: 2376246
uugaucaaucccgaggcug

SEQ ID NO: 2376248 - RNA, 19 nt, Artificial Sequence
  Description of Artificial Sequence: Synthetic oligonucleotide
  Sense strand starting at position 1963 of SEQ ID NO: 1885905
cucgauuucggcgggacaa

SEQ ID NO: 2376249 - RNA, 19 nt, Artificial Sequence
  Description of Artificial Sequence: Synthetic oligonucleotide
  Antisense strand to SEQ ID NO: 2376248
uugucccgccgaaaucgag

SEQ ID NO: 2376250 - RNA, 19 nt, Artificial Sequence
  Description of Artificial Sequence: Synthetic oligonucleotide
  Sense strand starting at position 1964 of SEQ ID NO: 1885905
ucgauuucggcgggacaaa

SEQ ID NO: 2376251 - RNA, 19 nt, Artificial Sequence
  Description of Artificial Sequence: Synthetic oligonucleotide
  Antisense strand to SEQ ID NO: 2376250
uuugucccgccgaaaucga

SEQ ID NO: 2376252 - RNA, 19 nt, Artificial Sequence
  Description of Artificial Sequence: Synthetic oligonucleotide
  Sense strand starting at position 2016 of SEQ ID NO: 1885905
cugggaugcgugagcuauu

SEQ ID NO: 2376253 - RNA, 19 nt, Artificial Sequence
  Description of Artificial Sequence: Synthetic oligonucleotide
  Antisense strand to SEQ ID NO: 2376252
aauagcucacgcaucccag

SEQ ID NO: 2376254 - RNA, 19 nt, Artificial Sequence
  Description of Artificial Sequence: Synthetic oligonucleotide
  Sense strand starting at position 2017 of SEQ ID NO: 1885905
ugggaugcgugagcuauuu

SEQ ID NO: 2376255 - RNA, 19 nt, Artificial Sequence
  Description of Artificial Sequence: Synthetic oligonucleotide
  Antisense strand to SEQ ID NO: 2376254
aaauagcucacgcauccca

SEQ ID NO: 2376256 - RNA, 19 nt, Artificial Sequence
  Description of Artificial Sequence: Synthetic oligonucleotide
  Sense strand starting at position 2052 of SEQ ID NO: 1885905
aauuguauucugggacuug

SEQ ID NO: 2376257 - RNA, 19 nt, Artificial Sequence
  Description of Artificial Sequence: Synthetic oligonucleotide
  Antisense strand to SEQ ID NO: 2376256
caagucccagaauacaauu

SEQ ID NO: 2376258 - RNA, 19 nt, Artificial Sequence
  Description of Artificial Sequence: Synthetic oligonucleotide
  Sense strand starting at position 2081 of SEQ ID NO: 1885905
cugguagaaguggauguaa

SEQ ID NO: 2376259 - RNA, 19 nt, Artificial Sequence
  Description of Artificial Sequence: Synthetic oligonucleotide
  Antisense strand to SEQ ID NO: 2376258
uuacauccacuucuaccag

SEQ ID NO: 2376260 - RNA, 19 nt, Artificial Sequence
  Description of Artificial Sequence: Synthetic oligonucleotide
  Sense strand starting at position 2209 of SEQ ID NO: 1885905
caauuauuucuccgcggga

SEQ ID NO: 2376261 - RNA, 19 nt, Artificial Sequence
  Description of Artificial Sequence: Synthetic oligonucleotide
  Antisense strand to SEQ ID NO: 2376260
ucccgcggagaaauaauug

SEQ ID NO: 2376262 - RNA, 19 nt, Artificial Sequence
  Description of Artificial Sequence: Synthetic oligonucleotide
  Sense strand starting at position 2210 of SEQ ID NO: 1885905
aauuauuucuccgcgggau

SEQ ID NO: 2376263 - RNA, 19 nt, Artificial Sequence
  Description of Artificial Sequence: Synthetic oligonucleotide
  Antisense strand to SEQ ID NO: 2376262
aucccgcggagaaauaauu

SEQ ID NO: 2376264 - RNA, 19 nt, Artificial Sequence
  Description of Artificial Sequence: Synthetic oligonucleotide
  Sense strand starting at position 2211 of SEQ ID NO: 1885905
auuauuucuccgcgggauc

SEQ ID NO: 2376265 - RNA, 19 nt, Artificial Sequence
  Description of Artificial Sequence: Synthetic oligonucleotide
  Antisense strand to SEQ ID NO: 2376264
gaucccgcggagaaauaau

SEQ ID NO: 2376266 - RNA, 19 nt, Artificial Sequence
  Description of Artificial Sequence: Synthetic oligonucleotide
  Sense strand starting at position 2248 of SEQ ID NO: 1885905
uucuuacuuccugaucgga

SEQ ID NO: 2376267 - RNA, 19 nt, Artificial Sequence
  Description of Artificial Sequence: Synthetic oligonucleotide
  Antisense strand to SEQ ID NO: 2376266
uccgaucaggaaguaagaa

SEQ ID NO: 2376268 - RNA, 19 nt, Artificial Sequence
  Description of Artificial Sequence: Synthetic oligonucleotide
  Sense strand starting at position 2250 of SEQ ID NO: 1885905
cuuacuuccugaucggaca

SEQ ID NO: 2376269 - RNA, 19 nt, Artificial Sequence
  Description of Artificial Sequence: Synthetic oligonucleotide
  Antisense strand to SEQ ID NO: 2376268
uguccgaucaggaaguaag

SEQ ID NO: 2376270 - RNA, 19 nt, Artificial Sequence
  Description of Artificial Sequence: Synthetic oligonucleotide
  Sense strand starting at position 2313 of SEQ ID NO: 1885905
cagugagguagucagguau

SEQ ID NO: 2376271 - RNA, 19 nt, Artificial Sequence
  Description of Artificial Sequence: Synthetic oligonucleotide
  Antisense strand to SEQ ID NO: 2376270
auaccugacuaccucacug

SEQ ID NO: 2376272 - RNA, 19 nt, Artificial Sequence
  Description of Artificial Sequence: Synthetic oligonucleotide
  Sense strand starting at position 2317 of SEQ ID NO: 1885905
gagguagucagguauggca

SEQ ID NO: 2376273 - RNA, 19 nt, Artificial Sequence
  Description of Artificial Sequence: Synthetic oligonucleotide
  Antisense strand to SEQ ID NO: 2376272
ugccauaccugacuaccuc

SEQ ID NO: 2376274 - RNA, 19 nt, Artificial Sequence
  Description of Artificial Sequence: Synthetic oligonucleotide
  Sense strand starting at position 2391 of SEQ ID NO: 1885905
cccaccuuugaacgaauau

SEQ ID NO: 2376275 - RNA, 19 nt, Artificial Sequence
  Description of Artificial Sequence: Synthetic oligonucleotide
  Antisense strand to SEQ ID NO: 2376274
auauucguucaaagguggg

SEQ ID NO: 2376276 - RNA, 19 nt, Artificial Sequence
  Description of Artificial Sequence: Synthetic oligonucleotide
  Sense strand starting at position 2464 of SEQ ID NO: 1885905
guguacaguggugacauaa

SEQ ID NO: 2376277 - RNA, 19 nt, Artificial Sequence
  Description of Artificial Sequence: Synthetic oligonucleotide
  Antisense strand to SEQ ID NO: 2376276
uuaugucaccacuguacac

SEQ ID NO: 2376278 - RNA, 19 nt, Artificial Sequence
  Description of Artificial Sequence: Synthetic oligonucleotide
  Sense strand starting at position 2481 of SEQ ID NO: 1885905
aauggagaucgccauccuu

SEQ ID NO: 2376279 - RNA, 19 nt, Artificial Sequence
  Description of Artificial Sequence: Synthetic oligonucleotide
  Antisense strand to SEQ ID NO: 2376278
aaggauggcgaucuccauu

SEQ ID NO: 2376280 - RNA, 19 nt, Artificial Sequence
  Description of Artificial Sequence: Synthetic oligonucleotide
  Sense strand starting at position 2926 of SEQ ID NO: 1885905
auaggugauccauaggcau

SEQ ID NO: 2376281 - RNA, 19 nt, Artificial Sequence
  Description of Artificial Sequence: Synthetic oligonucleotide
  Antisense strand to SEQ ID NO: 2376280
augccuauggaucaccuau

SEQ ID NO: 2376282 - RNA, 19 nt, Artificial Sequence
  Description of Artificial Sequence: Synthetic oligonucleotide
  Sense strand starting at position 2933 of SEQ ID NO: 1885905
auccauaggcauggaagau

SEQ ID NO: 2376283 - RNA, 19 nt, Artificial Sequence
  Description of Artificial Sequence: Synthetic oligonucleotide
  Antisense strand to SEQ ID NO: 2376282
aucuuccaugccuauggau

SEQ ID NO: 2376284 - RNA, 19 nt, Artificial Sequence
  Description of Artificial Sequence: Synthetic oligonucleotide
  Sense strand starting at position 2987 of SEQ ID NO: 1885905
ucacaugaccugugaggga

SEQ ID NO: 2376285 - RNA, 19 nt, Artificial Sequence
  Description of Artificial Sequence: Synthetic oligonucleotide
  Antisense strand to SEQ ID NO: 2376284
ucccucacaggucauguga

SEQ ID NO: 2376286 - RNA, 19 nt, Artificial Sequence
  Description of Artificial Sequence: Synthetic oligonucleotide
  Sense strand starting at position 3002 of SEQ ID NO: 1885905
gggaguccaucccugaauu

SEQ ID NO: 2376287 - RNA, 19 nt, Artificial Sequence
  Description of Artificial Sequence: Synthetic oligonucleotide
  Antisense strand to SEQ ID NO: 2376286
aauucagggauggacuccc

SEQ ID NO: 2376288 - RNA, 19 nt, Artificial Sequence
  Description of Artificial Sequence: Synthetic oligonucleotide
  Sense strand starting at position 3041 of SEQ ID NO: 1885905
cuaaaccucuugucaaagu

SEQ ID NO: 2376289 - RNA, 19 nt, Artificial Sequence
  Description of Artificial Sequence: Synthetic oligonucleotide
  Antisense strand to SEQ ID NO: 2376288
acuuugacaagagguuuag

SEQ ID NO: 2376290 - RNA, 19 nt, Artificial Sequence
  Description of Artificial Sequence: Synthetic oligonucleotide
  Sense strand starting at position 3052 of SEQ ID NO: 1885905
gucaaaguuggugacaaau

SEQ ID NO: 2376291 - RNA, 19 nt, Artificial Sequence
  Description of Artificial Sequence: Synthetic oligonucleotide
  Antisense strand to SEQ ID NO: 2376290
auuugucaccaacuuugac

SEQ ID NO: 2376292 - RNA, 19 nt, Artificial Sequence
  Description of Artificial Sequence: Synthetic oligonucleotide
  Sense strand starting at position 3093 of SEQ ID NO: 1885905
gauuaucuugcagaauugu

SEQ ID NO: 2376293 - RNA, 19 nt, Artificial Sequence
  Description of Artificial Sequence: Synthetic oligonucleotide
  Antisense strand to SEQ ID NO: 2376292
acaauucugcaagauaauc

SEQ ID NO: 2376294 - RNA, 19 nt, Artificial Sequence
  Description of Artificial Sequence: Synthetic oligonucleotide
  Sense strand starting at position 3359 of SEQ ID NO: 1885905
agcagaauugauuaucucu

SEQ ID NO: 2376295 - RNA, 19 nt, Artificial Sequence
  Description of Artificial Sequence: Synthetic oligonucleotide
  Antisense strand to SEQ ID NO: 2376294
agagauaaucaauucugcu

SEQ ID NO: 2376296 - RNA, 19 nt, Artificial Sequence
  Description of Artificial Sequence: Synthetic oligonucleotide
  Sense strand starting at position 3397 of SEQ ID NO: 1885905
gcaccauagcauugaacau

SEQ ID NO: 2376297 - RNA, 19 nt, Artificial Sequence
  Description of Artificial Sequence: Synthetic oligonucleotide
  Antisense strand to SEQ ID NO: 2376296
auguucaaugcuauggugc

SEQ ID NO: 2376298 - RNA, 19 nt, Artificial Sequence
  Description of Artificial Sequence: Synthetic oligonucleotide
  Sense strand starting at position 3415 of SEQ ID NO: 1885905
ugucgaacugucgauuaaa

SEQ ID NO: 2376299 - RNA, 19 nt, Artificial Sequence
  Description of Artificial Sequence: Synthetic oligonucleotide
  Antisense strand to SEQ ID NO: 2376298
uuuaaucgacaguucgaca

SEQ ID NO: 2376300 - RNA, 19 nt, Artificial Sequence
  Description of Artificial Sequence: Synthetic oligonucleotide
  Sense strand starting at position 3418 of SEQ ID NO: 1885905
cgaacugucgauuaaauac

SEQ ID NO: 2376301 - RNA, 19 nt, Artificial Sequence
  Description of Artificial Sequence: Synthetic oligonucleotide
  Antisense strand to SEQ ID NO: 2376300
guauuuaaucgacaguucg

SEQ ID NO: 2376302 - RNA, 19 nt, Artificial Sequence
  Description of Artificial Sequence: Synthetic oligonucleotide
  Sense strand starting at position 3516 of SEQ ID NO: 1885905
acugaauguugcucaagga

SEQ ID NO: 2376303 - RNA, 19 nt, Artificial Sequence
  Description of Artificial Sequence: Synthetic oligonucleotide
  Antisense strand to SEQ ID NO: 2376302
uccuugagcaacauucagu

SEQ ID NO: 2376304 - RNA, 19 nt, Artificial Sequence
  Description of Artificial Sequence: Synthetic oligonucleotide
  Sense strand starting at position 3532 of SEQ ID NO: 1885905
ggaauaaguggugaagcuu

SEQ ID NO: 2376305 - RNA, 19 nt, Artificial Sequence
  Description of Artificial Sequence: Synthetic oligonucleotide
  Antisense strand to SEQ ID NO: 2376304
aagcuucaccacuuauucc

SEQ ID NO: 2376306 - RNA, 19 nt, Artificial Sequence
  Description of Artificial Sequence: Synthetic oligonucleotide
  Sense strand starting at position 49 of SEQ ID NO: 1885906
agcaucacuucugugauua

SEQ ID NO: 2376307 - RNA, 19 nt, Artificial Sequence
  Description of Artificial Sequence: Synthetic oligonucleotide
  Antisense strand to SEQ ID NO: 2376306
uaaucacagaagugaugcu

SEQ ID NO: 2376308 - RNA, 19 nt, Artificial Sequence
  Description of Artificial Sequence: Synthetic oligonucleotide
  Sense strand starting at position 59 of SEQ ID NO: 1885906
cugugauuauuuccugcca

SEQ ID NO: 2376309 - RNA, 19 nt, Artificial Sequence
  Description of Artificial Sequence: Synthetic oligonucleotide
  Antisense strand to SEQ ID NO: 2376308
uggcaggaaauaaucacag

SEQ ID NO: 2376310 - RNA, 19 nt, Artificial Sequence
  Description of Artificial Sequence: Synthetic oligonucleotide
  Sense strand starting at position 60 of SEQ ID NO: 1885906
ugugauuauuuccugccaa

SEQ ID NO: 2376311 - RNA, 19 nt, Artificial Sequence
  Description of Artificial Sequence: Synthetic oligonucleotide
  Antisense strand to SEQ ID NO: 2376310
uuggcaggaaauaaucaca

SEQ ID NO: 2376312 - RNA, 19 nt, Artificial Sequence
  Description of Artificial Sequence: Synthetic oligonucleotide
  Sense strand starting at position 80 of SEQ ID NO: 1885906
gacacaauugauggauguu

SEQ ID NO: 2376313 - RNA, 19 nt, Artificial Sequence
  Description of Artificial Sequence: Synthetic oligonucleotide
  Antisense strand to SEQ ID NO: 2376312
aacauccaucaauuguguc

SEQ ID NO: 2376314 - RNA, 19 nt, Artificial Sequence
  Description of Artificial Sequence: Synthetic oligonucleotide
  Sense strand starting at position 83 of SEQ ID NO: 1885906
acaauugauggauguucua

SEQ ID NO: 2376315 - RNA, 19 nt, Artificial Sequence
  Description of Artificial Sequence: Synthetic oligonucleotide
  Antisense strand to SEQ ID NO: 2376314
uagaacauccaucaauugu

SEQ ID NO: 2376316 - RNA, 19 nt, Artificial Sequence
  Description of Artificial Sequence: Synthetic oligonucleotide
  Sense strand starting at position 86 of SEQ ID NO: 1885906
auugauggauguucuacaa

SEQ ID NO: 2376317 - RNA, 19 nt, Artificial Sequence
  Description of Artificial Sequence: Synthetic oligonucleotide
  Antisense strand to SEQ ID NO: 2376316
uuguagaacauccaucaau

SEQ ID NO: 2376318 - RNA, 19 nt, Artificial Sequence
  Description of Artificial Sequence: Synthetic oligonucleotide
  Sense strand starting at position 145 of SEQ ID NO: 1885906
ucaagcaaagcuugagaaa

SEQ ID NO: 2376319 - RNA, 19 nt, Artificial Sequence
  Description of Artificial Sequence: Synthetic oligonucleotide
  Antisense strand to SEQ ID NO: 2376318
uuucucaagcuuugcuuga

SEQ ID NO: 2376320 - RNA, 19 nt, Artificial Sequence
  Description of Artificial Sequence: Synthetic oligonucleotide
  Sense strand starting at position 156 of SEQ ID NO: 1885906
uugagaaacuguuccagau

SEQ ID NO: 2376321 - RNA, 19 nt, Artificial Sequence
  Description of Artificial Sequence: Synthetic oligonucleotide
  Antisense strand to SEQ ID NO: 2376320
aucuggaacaguuucucaa

SEQ ID NO: 2376322 - RNA, 19 nt, Artificial Sequence
  Description of Artificial Sequence: Synthetic oligonucleotide
  Sense strand starting at position 294 of SEQ ID NO: 1885906
augguagaaauguaucagu

SEQ ID NO: 2376323 - RNA, 19 nt, Artificial Sequence
  Description of Artificial Sequence: Synthetic oligonucleotide
  Antisense strand to SEQ ID NO: 2376322
acugauacauuucuaccau

SEQ ID NO: 2376324 - RNA, 19 nt, Artificial Sequence
  Description of Artificial Sequence: Synthetic oligonucleotide
  Sense strand starting at position 303 of SEQ ID NO: 1885906
auguaucagugauaauuuc

SEQ ID NO: 2376325 - RNA, 19 nt, Artificial Sequence
  Description of Artificial Sequence: Synthetic oligonucleotide
  Antisense strand to SEQ ID NO: 2376324
gaaauuaucacugauacau

SEQ ID NO: 2376326 - RNA, 19 nt, Artificial Sequence
  Description of Artificial Sequence: Synthetic oligonucleotide
  Sense strand starting at position 411 of SEQ ID NO: 1885906
gucaaaugguucccuucca

SEQ ID NO: 2376327 - RNA, 19 nt, Artificial Sequence
  Description of Artificial Sequence: Synthetic oligonucleotide
  Antisense strand to SEQ ID NO: 2376326
uggaagggaaccauuugac

SEQ ID NO: 2376328 - RNA, 19 nt, Artificial Sequence
  Description of Artificial Sequence: Synthetic oligonucleotide
  Sense strand starting at position 1195 of SEQ ID NO: 1885906
ugcaaaugacugugcauga

SEQ ID NO: 2376329 - RNA, 19 nt, Artificial Sequence
  Description of Artificial Sequence: Synthetic oligonucleotide
  Antisense strand to SEQ ID NO: 2376328
ucaugcacagucauuugca

SEQ ID NO: 2376330 - RNA, 19 nt, Artificial Sequence
  Description of Artificial Sequence: Synthetic oligonucleotide
  Sense strand starting at position 2058 of SEQ ID NO: 1885906
gcccguacuccgaggugua

SEQ ID NO: 2376331 - RNA, 19 nt, Artificial Sequence
  Description of Artificial Sequence: Synthetic oligonucleotide
  Antisense strand to SEQ ID NO: 2376330
uacaccucggaguacgggc

SEQ ID NO: 2376332 - RNA, 19 nt, Artificial Sequence
  Description of Artificial Sequence: Synthetic oligonucleotide
  Sense strand starting at position 2070 of SEQ ID NO: 1885906
agguguacuccguuccgua

SEQ ID NO: 2376333 - RNA, 19 nt, Artificial Sequence
  Description of Artificial Sequence: Synthetic oligonucleotide
  Antisense strand to SEQ ID NO: 2376332
uacggaacggaguacaccu

SEQ ID NO: 2376334 - RNA, 19 nt, Artificial Sequence
  Description of Artificial Sequence: Synthetic oligonucleotide
  Sense strand starting at position 2071 of SEQ ID NO: 1885906
gguguacuccguuccguaa

SEQ ID NO: 2376335 - RNA, 19 nt, Artificial Sequence
  Description of Artificial Sequence: Synthetic oligonucleotide
  Antisense strand to SEQ ID NO: 2376334
uuacggaacggaguacacc

SEQ ID NO: 2376336 - RNA, 19 nt, Artificial Sequence
  Description of Artificial Sequence: Synthetic oligonucleotide
  Sense strand starting at position 2072 of SEQ ID NO: 1885906
guguacuccguuccguaau

SEQ ID NO: 2376337 - RNA, 19 nt, Artificial Sequence
  Description of Artificial Sequence: Synthetic oligonucleotide
  Antisense strand to SEQ ID NO: 2376336
auuacggaacggaguacac

SEQ ID NO: 2376338 - RNA, 19 nt, Artificial Sequence
  Description of Artificial Sequence: Synthetic oligonucleotide
  Sense strand starting at position 2117 of SEQ ID NO: 1885906
ugagauugggucuaaugcu

SEQ ID NO: 2376339 - RNA, 19 nt, Artificial Sequence
  Description of Artificial Sequence: Synthetic oligonucleotide
  Antisense strand to SEQ ID NO: 2376338
agcauuagacccaaucuca

SEQ ID NO: 2376340 - RNA, 19 nt, Artificial Sequence
  Description of Artificial Sequence: Synthetic oligonucleotide
  Sense strand starting at position 2555 of SEQ ID NO: 1885906
auagcauaagcucgauuua

SEQ ID NO: 2376341 - RNA, 19 nt, Artificial Sequence
  Description of Artificial Sequence: Synthetic oligonucleotide
  Antisense strand to SEQ ID NO: 2376340
uaaaucgagcuuaugcuau

SEQ ID NO: 2376342 - RNA, 19 nt, Artificial Sequence
  Description of Artificial Sequence: Synthetic oligonucleotide
  Sense strand starting at position 2567 of SEQ ID NO: 1885906
cgauuuauaaacggacguu

SEQ ID NO: 2376343 - RNA, 19 nt, Artificial Sequence
  Description of Artificial Sequence: Synthetic oligonucleotide
  Antisense strand to SEQ ID NO: 2376342
aacguccguuuauaaaucg

SEQ ID NO: 2376344 - RNA, 19 nt, Artificial Sequence
  Description of Artificial Sequence: Synthetic oligonucleotide
  Sense strand starting at position 2633 of SEQ ID NO: 1885906
cuuguaaacuuaguuaacu

SEQ ID NO: 2376345 - RNA, 19 nt, Artificial Sequence
  Description of Artificial Sequence: Synthetic oligonucleotide
  Antisense strand to SEQ ID NO: 2376344
aguuaacuaaguuuacaag

SEQ ID NO: 2376346 - RNA, 19 nt, Artificial Sequence
  Description of Artificial Sequence: Synthetic oligonucleotide
  Sense strand starting at position 2670 of SEQ ID NO: 1885906
uaaaguuucgaaugaguaa

SEQ ID NO: 2376347 - RNA, 19 nt, Artificial Sequence
  Description of Artificial Sequence: Synthetic oligonucleotide
  Antisense strand to SEQ ID NO: 2376346
uuacucauucgaaacuuua

SEQ ID NO: 2376348 - RNA, 19 nt, Artificial Sequence
  Description of Artificial Sequence: Synthetic oligonucleotide
  Sense strand starting at position 2715 of SEQ ID NO: 1885906
uaagguagcugagugagau

SEQ ID NO: 2376349 - RNA, 19 nt, Artificial Sequence
  Description of Artificial Sequence: Synthetic oligonucleotide
  Antisense strand to SEQ ID NO: 2376348
aucucacucagcuaccuua

SEQ ID NO: 2376350 - RNA, 19 nt, Artificial Sequence
  Description of Artificial Sequence: Synthetic oligonucleotide
  Sense strand starting at position 2727 of SEQ ID NO: 1885906
gugagaugauugcugugaa

SEQ ID NO: 2376351 - RNA, 19 nt, Artificial Sequence
  Description of Artificial Sequence: Synthetic oligonucleotide
  Antisense strand to SEQ ID NO: 2376350
uucacagcaaucaucucac

SEQ ID NO: 2376352 - RNA, 19 nt, Artificial Sequence
  Description of Artificial Sequence: Synthetic oligonucleotide
  Sense strand starting at position 2730 of SEQ ID NO: 1885906
agaugauugcugugaagca

SEQ ID NO: 2376353 - RNA, 19 nt, Artificial Sequence
  Description of Artificial Sequence: Synthetic oligonucleotide
  Antisense strand to SEQ ID NO: 2376352
ugcuucacagcaaucaucu

SEQ ID NO: 2376354 - RNA, 19 nt, Artificial Sequence
  Description of Artificial Sequence: Synthetic oligonucleotide
  Sense strand starting at position 2902 of SEQ ID NO: 1885906
ucugaugcaugcucaaacu

SEQ ID NO: 2376355 - RNA, 19 nt, Artificial Sequence
  Description of Artificial Sequence: Synthetic oligonucleotide
  Antisense strand to SEQ ID NO: 2376354
aguuugagcaugcaucaga

SEQ ID NO: 2376356 - RNA, 19 nt, Artificial Sequence
  Description of Artificial Sequence: Synthetic oligonucleotide
  Sense strand starting at position 3021 of SEQ ID NO: 1885906
gccagaucuugggcagaaa

SEQ ID NO: 2376357 - RNA, 19 nt, Artificial Sequence
  Description of Artificial Sequence: Synthetic oligonucleotide
  Antisense strand to SEQ ID NO: 2376356
uuucugcccaagaucuggc

SEQ ID NO: 2376358 - RNA, 19 nt, Artificial Sequence
  Description of Artificial Sequence: Synthetic oligonucleotide
  Sense strand starting at position 3030 of SEQ ID NO: 1885906
ugggcagaaacuuggucua

SEQ ID NO: 2376359 - RNA, 19 nt, Artificial Sequence
  Description of Artificial Sequence: Synthetic oligonucleotide
  Antisense strand to SEQ ID NO: 2376358
uagaccaaguuucugccca

SEQ ID NO: 2376360 - RNA, 19 nt, Artificial Sequence
  Description of Artificial Sequence: Synthetic oligonucleotide
  Sense strand starting at position 3032 of SEQ ID NO: 1885906
ggcagaaacuuggucuaaa

SEQ ID NO: 2376361 - RNA, 19 nt, Artificial Sequence
  Description of Artificial Sequence: Synthetic oligonucleotide
  Antisense strand to SEQ ID NO: 2376360
uuuagaccaaguuucugcc

SEQ ID NO: 2376362 - RNA, 19 nt, Artificial Sequence
  Description of Artificial Sequence: Synthetic oligonucleotide
  Sense strand starting at position 3033 of SEQ ID NO: 1885906
gcagaaacuuggucuaaau

SEQ ID NO: 2376363 - RNA, 19 nt, Artificial Sequence
  Description of Artificial Sequence: Synthetic oligonucleotide
  Antisense strand to SEQ ID NO: 2376362
auuuagaccaaguuucugc

SEQ ID NO: 2376364 - RNA, 19 nt, Artificial Sequence
  Description of Artificial Sequence: Synthetic oligonucleotide
  Sense strand starting at position 3095 of SEQ ID NO: 1885906
uauugacacgaccaauagu

SEQ ID NO: 2376365 - RNA, 19 nt, Artificial Sequence
  Description of Artificial Sequence: Synthetic oligonucleotide
  Antisense strand to SEQ ID NO: 2376364
acuauuggucgugucaaua

SEQ ID NO: 2376366 - RNA, 19 nt, Artificial Sequence
  Description of Artificial Sequence: Synthetic oligonucleotide
  Sense strand starting at position 3098 of SEQ ID NO: 1885906
ugacacgaccaauaguuua

SEQ ID NO: 2376367 - RNA, 19 nt, Artificial Sequence
  Description of Artificial Sequence: Synthetic oligonucleotide
  Antisense strand to SEQ ID NO: 2376366
uaaacuauuggucguguca

SEQ ID NO: 2376368 - RNA, 19 nt, Artificial Sequence
  Description of Artificial Sequence: Synthetic oligonucleotide
  Sense strand starting at position 3103 of SEQ ID NO: 1885906
cgaccaauaguuuaugugu

SEQ ID NO: 2376369 - RNA, 19 nt, Artificial Sequence
  Description of Artificial Sequence: Synthetic oligonucleotide
  Antisense strand to SEQ ID NO: 2376368
acacauaaacuauuggucg

SEQ ID NO: 2376370 - RNA, 19 nt, Artificial Sequence
  Description of Artificial Sequence: Synthetic oligonucleotide
  Sense strand starting at position 3118 of SEQ ID NO: 1885906
guguguuaugacuaucaau

SEQ ID NO: 2376371 - RNA, 19 nt, Artificial Sequence
  Description of Artificial Sequence: Synthetic oligonucleotide
  Antisense strand to SEQ ID NO: 2376370
auugauagucauaacacac

SEQ ID NO: 2376372 - RNA, 19 nt, Artificial Sequence
  Description of Artificial Sequence: Synthetic oligonucleotide
  Sense strand starting at position 3267 of SEQ ID NO: 1885906
auaguaugacauugucagu

SEQ ID NO: 2376373 - RNA, 19 nt, Artificial Sequence
  Description of Artificial Sequence: Synthetic oligonucleotide
  Antisense strand to SEQ ID NO: 2376372
acugacaaugucauacuau

SEQ ID NO: 2376374 - RNA, 19 nt, Artificial Sequence
  Description of Artificial Sequence: Synthetic oligonucleotide
  Sense strand starting at position 3273 of SEQ ID NO: 1885906
ugacauugucaguggcaua

SEQ ID NO: 2376375 - RNA, 19 nt, Artificial Sequence
  Description of Artificial Sequence: Synthetic oligonucleotide
  Antisense strand to SEQ ID NO: 2376374
uaugccacugacaauguca

SEQ ID NO: 2376376 - RNA, 19 nt, Artificial Sequence
  Description of Artificial Sequence: Synthetic oligonucleotide
  Sense strand starting at position 3621 of SEQ ID NO: 1885906
gcaucuuacgaacauggau

SEQ ID NO: 2376377 - RNA, 19 nt, Artificial Sequence
  Description of Artificial Sequence: Synthetic oligonucleotide
  Antisense strand to SEQ ID NO: 2376376
auccauguucguaagaugc

SEQ ID NO: 2376378 - RNA, 19 nt, Artificial Sequence
  Description of Artificial Sequence: Synthetic oligonucleotide
  Sense strand starting at position 3747 of SEQ ID NO: 1885906
cucccaucccucugggaga

SEQ ID NO: 2376379 - RNA, 19 nt, Artificial Sequence
  Description of Artificial Sequence: Synthetic oligonucleotide
  Antisense strand to SEQ ID NO: 2376378
ucucccagagggaugggag

SEQ ID NO: 2376380 - RNA, 19 nt, Artificial Sequence
  Description of Artificial Sequence: Synthetic oligonucleotide
  Sense strand starting at position 3760 of SEQ ID NO: 1885906
gggagaaggugccuuuaga

SEQ ID NO: 2376381 - RNA, 19 nt, Artificial Sequence
  Description of Artificial Sequence: Synthetic oligonucleotide
  Antisense strand to SEQ ID NO: 2376380
ucuaaaggcaccuucuccc

SEQ ID NO: 2376382 - RNA, 19 nt, Artificial Sequence
  Description of Artificial Sequence: Synthetic oligonucleotide
  Sense strand starting at position 3796 of SEQ ID NO: 1885906
ccauucucuggcuacugaa

SEQ ID NO: 2376383 - RNA, 19 nt, Artificial Sequence
  Description of Artificial Sequence: Synthetic oligonucleotide
  Antisense strand to SEQ ID NO: 2376382
uucaguagccagagaaugg

SEQ ID NO: 2376384 - RNA, 19 nt, Artificial Sequence
  Description of Artificial Sequence: Synthetic oligonucleotide
  Sense strand starting at position 3848 of SEQ ID NO: 1885906
uucuuuguggcugauauaa

SEQ ID NO: 2376385 - RNA, 19 nt, Artificial Sequence
  Description of Artificial Sequence: Synthetic oligonucleotide
  Antisense strand to SEQ ID NO: 2376384
uuauaucagccacaaagaa

SEQ ID NO: 2376386 - RNA, 19 nt, Artificial Sequence
  Description of Artificial Sequence: Synthetic oligonucleotide
  Sense strand starting at position 5 of SEQ ID NO: 1885907
cggauagggcaauggugau

SEQ ID NO: 2376387 - RNA, 19 nt, Artificial Sequence
  Description of Artificial Sequence: Synthetic oligonucleotide
  Antisense strand to SEQ ID NO: 2376386
aucaccauugcccuauccg

SEQ ID NO: 2376388 - RNA, 19 nt, Artificial Sequence
  Description of Artificial Sequence: Synthetic oligonucleotide
  Sense strand starting at position 31 of SEQ ID NO: 1885907
acaguuuaccuuugaaaug

SEQ ID NO: 2376389 - RNA, 19 nt, Artificial Sequence
  Description of Artificial Sequence: Synthetic oligonucleotide
  Antisense strand to SEQ ID NO: 2376388
cauuucaaagguaaacugu

SEQ ID NO: 2376390 - RNA, 19 nt, Artificial Sequence
  Description of Artificial Sequence: Synthetic oligonucleotide
  Sense strand starting at position 94 of SEQ ID NO: 1885907
aaguguagcuauuuguaua

SEQ ID NO: 2376391 - RNA, 19 nt, Artificial Sequence
  Description of Artificial Sequence: Synthetic oligonucleotide
  Antisense strand to SEQ ID NO: 2376390
uauacaaauagcuacacuu

SEQ ID NO: 2376392 - RNA, 19 nt, Artificial Sequence
  Description of Artificial Sequence: Synthetic oligonucleotide
  Sense strand starting at position 95 of SEQ ID NO: 1885907
aguguagcuauuuguauau

SEQ ID NO: 2376393 - RNA, 19 nt, Artificial Sequence
  Description of Artificial Sequence: Synthetic oligonucleotide
  Antisense strand to SEQ ID NO: 2376392
auauacaaauagcuacacu

SEQ ID NO: 2376394 - RNA, 19 nt, Artificial Sequence
  Description of Artificial Sequence: Synthetic oligonucleotide
  Sense strand starting at position 97 of SEQ ID NO: 1885907
uguagcuauuuguauauca

SEQ ID NO: 2376395 - RNA, 19 nt, Artificial Sequence
  Description of Artificial Sequence: Synthetic oligonucleotide
  Antisense strand to SEQ ID NO: 2376394
ugauauacaaauagcuaca

SEQ ID NO: 2376396 - RNA, 19 nt, Artificial Sequence
  Description of Artificial Sequence: Synthetic oligonucleotide
  Sense strand starting at position 199 of SEQ ID NO: 1885907
cauacucugucagugguua

SEQ ID NO: 2376397 - RNA, 19 nt, Artificial Sequence
  Description of Artificial Sequence: Synthetic oligonucleotide
  Antisense strand to SEQ ID NO: 2376396
uaaccacugacagaguaug

SEQ ID NO: 2376398 - RNA, 19 nt, Artificial Sequence
  Description of Artificial Sequence: Synthetic oligonucleotide
  Sense strand starting at position 200 of SEQ ID NO: 1885907
auacucugucagugguuaa

SEQ ID NO: 2376399 - RNA, 19 nt, Artificial Sequence
  Description of Artificial Sequence: Synthetic oligonucleotide
  Antisense strand to SEQ ID NO: 2376398
uuaaccacugacagaguau

SEQ ID NO: 2376400 - RNA, 19 nt, Artificial Sequence
  Description of Artificial Sequence: Synthetic oligonucleotide
  Sense strand starting at position 203 of SEQ ID NO: 1885907
cucugucagugguuaagag

SEQ ID NO: 2376401 - RNA, 19 nt, Artificial Sequence
  Description of Artificial Sequence: Synthetic oligonucleotide
  Antisense strand to SEQ ID NO: 2376400
cucuuaaccacugacagag

SEQ ID NO: 2376402 - RNA, 19 nt, Artificial Sequence
  Description of Artificial Sequence: Synthetic oligonucleotide
  Sense strand starting at position 204 of SEQ ID NO: 1885907
ucugucagugguuaagaga

SEQ ID NO: 2376403 - RNA, 19 nt, Artificial Sequence
  Description of Artificial Sequence: Synthetic oligonucleotide
  Antisense strand to SEQ ID NO: 2376402
ucucuuaaccacugacaga

SEQ ID NO: 2376404 - RNA, 19 nt, Artificial Sequence
  Description of Artificial Sequence: Synthetic oligonucleotide
  Sense strand starting at position 298 of SEQ ID NO: 1885907
uguauaauucuuugaggca

SEQ ID NO: 2376405 - RNA, 19 nt, Artificial Sequence
  Description of Artificial Sequence: Synthetic oligonucleotide
  Antisense strand to SEQ ID NO: 2376404
ugccucaaagaauuauaca

SEQ ID NO: 2376406 - RNA, 19 nt, Artificial Sequence
  Description of Artificial Sequence: Synthetic oligonucleotide
  Sense strand starting at position 299 of SEQ ID NO: 1885907
guauaauucuuugaggcaa

SEQ ID NO: 2376407 - RNA, 19 nt, Artificial Sequence
  Description of Artificial Sequence: Synthetic oligonucleotide
  Antisense strand to SEQ ID NO: 2376406
uugccucaaagaauuauac

SEQ ID NO: 2376408 - RNA, 19 nt, Artificial Sequence
  Description of Artificial Sequence: Synthetic oligonucleotide
  Sense strand starting at position 301 of SEQ ID NO: 1885907
auaauucuuugaggcaaga

SEQ ID NO: 2376409 - RNA, 19 nt, Artificial Sequence
  Description of Artificial Sequence: Synthetic oligonucleotide
  Antisense strand to SEQ ID NO: 2376408
ucuugccucaaagaauuau

SEQ ID NO: 2376410 - RNA, 19 nt, Artificial Sequence
  Description of Artificial Sequence: Synthetic oligonucleotide
  Sense strand starting at position 312 of SEQ ID NO: 1885907
aggcaagauugacaaugua

SEQ ID NO: 2376411 - RNA, 19 nt, Artificial Sequence
  Description of Artificial Sequence: Synthetic oligonucleotide
  Antisense strand to SEQ ID NO: 2376410
uacauugucaaucuugccu

SEQ ID NO: 2376412 - RNA, 19 nt, Artificial Sequence
  Description of Artificial Sequence: Synthetic oligonucleotide
  Sense strand starting at position 336 of SEQ ID NO: 1885907
acaauucuguaccaaagag

SEQ ID NO: 2376413 - RNA, 19 nt, Artificial Sequence
  Description of Artificial Sequence: Synthetic oligonucleotide
  Antisense strand to SEQ ID NO: 2376412
cucuuugguacagaauugu

SEQ ID NO: 2376414 - RNA, 19 nt, Artificial Sequence
  Description of Artificial Sequence: Synthetic oligonucleotide
  Sense strand starting at position 352 of SEQ ID NO: 1885907
gaggaaaugugauaaaguu

SEQ ID NO: 2376415 - RNA, 19 nt, Artificial Sequence
  Description of Artificial Sequence: Synthetic oligonucleotide
  Antisense strand to SEQ ID NO: 2376414
aacuuuaucacauuuccuc

SEQ ID NO: 2376416 - RNA, 19 nt, Artificial Sequence
  Description of Artificial Sequence: Synthetic oligonucleotide
  Sense strand starting at position 437 of SEQ ID NO: 1885907
gccuuauuacuuuagucac

SEQ ID NO: 2376417 - RNA, 19 nt, Artificial Sequence
  Description of Artificial Sequence: Synthetic oligonucleotide
  Antisense strand to SEQ ID NO: 2376416
gugacuaaaguaauaaggc

SEQ ID NO: 2376418 - RNA, 19 nt, Artificial Sequence
  Description of Artificial Sequence: Synthetic oligonucleotide
  Sense strand starting at position 467 of SEQ ID NO: 1885907
gcgucuuaguuucucacua

SEQ ID NO: 2376419 - RNA, 19 nt, Artificial Sequence
  Description of Artificial Sequence: Synthetic oligonucleotide
  Antisense strand to SEQ ID NO: 2376418
uagugagaaacuaagacgc

SEQ ID NO: 2376420 - RNA, 19 nt, Artificial Sequence
  Description of Artificial Sequence: Synthetic oligonucleotide
  Sense strand starting at position 468 of SEQ ID NO: 1885907
cgucuuaguuucucacuaa

SEQ ID NO: 2376421 - RNA, 19 nt, Artificial Sequence
  Description of Artificial Sequence: Synthetic oligonucleotide
  Antisense strand to SEQ ID NO: 2376420
uuagugagaaacuaagacg

SEQ ID NO: 2376422 - RNA, 19 nt, Artificial Sequence
  Description of Artificial Sequence: Synthetic oligonucleotide
  Sense strand starting at position 469 of SEQ ID NO: 1885907
gucuuaguuucucacuaau

SEQ ID NO: 2376423 - RNA, 19 nt, Artificial Sequence
  Description of Artificial Sequence: Synthetic oligonucleotide
  Antisense strand to SEQ ID NO: 2376422
auuagugagaaacuaagac

SEQ ID NO: 2376424 - RNA, 19 nt, Artificial Sequence
  Description of Artificial Sequence: Synthetic oligonucleotide
  Sense strand starting at position 522 of SEQ ID NO: 1885907
uuggaagcaugauacaaua

SEQ ID NO: 2376425 - RNA, 19 nt, Artificial Sequence
  Description of Artificial Sequence: Synthetic oligonucleotide
  Antisense strand to SEQ ID NO: 2376424
uauuguaucaugcuuccaa

SEQ ID NO: 2376426 - RNA, 19 nt, Artificial Sequence
  Description of Artificial Sequence: Synthetic oligonucleotide
  Sense strand starting at position 998 of SEQ ID NO: 1885907
ugcuuuaucccacgaguuu

SEQ ID NO: 2376427 - RNA, 19 nt, Artificial Sequence
  Description of Artificial Sequence: Synthetic oligonucleotide
  Antisense strand to SEQ ID NO: 2376426
aaacucgugggauaaagca

SEQ ID NO: 2376428 - RNA, 19 nt, Artificial Sequence
  Description of Artificial Sequence: Synthetic oligonucleotide
  Sense strand starting at position 999 of SEQ ID NO: 1885907
gcuuuaucccacgaguuug

SEQ ID NO: 2376429 - RNA, 19 nt, Artificial Sequence
  Description of Artificial Sequence: Synthetic oligonucleotide
  Antisense strand to SEQ ID NO: 2376428
caaacucgugggauaaagc

SEQ ID NO: 2376430 - RNA, 19 nt, Artificial Sequence
  Description of Artificial Sequence: Synthetic oligonucleotide
  Sense strand starting at position 1157 of SEQ ID NO: 1885907
aagagauguuaauguaaac

SEQ ID NO: 2376431 - RNA, 19 nt, Artificial Sequence
  Description of Artificial Sequence: Synthetic oligonucleotide
  Antisense strand to SEQ ID NO: 2376430
guuuacauuaacaucucuu

SEQ ID NO: 2376432 - RNA, 19 nt, Artificial Sequence
  Description of Artificial Sequence: Synthetic oligonucleotide
  Sense strand starting at position 1179 of SEQ ID NO: 1885907
agcagaaggcuucguuuag

SEQ ID NO: 2376433 - RNA, 19 nt, Artificial Sequence
  Description of Artificial Sequence: Synthetic oligonucleotide
  Antisense strand to SEQ ID NO: 2376432
cuaaacgaagccuucugcu

SEQ ID NO: 2376434 - RNA, 19 nt, Artificial Sequence
  Description of Artificial Sequence: Synthetic oligonucleotide
  Sense strand starting at position 1180 of SEQ ID NO: 1885907
gcagaaggcuucguuuagu

SEQ ID NO: 2376435 - RNA, 19 nt, Artificial Sequence
  Description of Artificial Sequence: Synthetic oligonucleotide
  Antisense strand to SEQ ID NO: 2376434
acuaaacgaagccuucugc

SEQ ID NO: 2376436 - RNA, 19 nt, Artificial Sequence
  Description of Artificial Sequence: Synthetic oligonucleotide
  Sense strand starting at position 1183 of SEQ ID NO: 1885907
gaaggcuucguuuagugga

SEQ ID NO: 2376437 - RNA, 19 nt, Artificial Sequence
  Description of Artificial Sequence: Synthetic oligonucleotide
  Antisense strand to SEQ ID NO: 2376436
uccacuaaacgaagccuuc

SEQ ID NO: 2376438 - RNA, 19 nt, Artificial Sequence
  Description of Artificial Sequence: Synthetic oligonucleotide
  Sense strand starting at position 1185 of SEQ ID NO: 1885907
aggcuucguuuaguggaua

SEQ ID NO: 2376439 - RNA, 19 nt, Artificial Sequence
  Description of Artificial Sequence: Synthetic oligonucleotide
  Antisense strand to SEQ ID NO: 2376438
uauccacuaaacgaagccu

SEQ ID NO: 2376440 - RNA, 19 nt, Artificial Sequence
  Description of Artificial Sequence: Synthetic oligonucleotide
  Sense strand starting at position 1188 of SEQ ID NO: 1885907
cuucguuuaguggauaucu

SEQ ID NO: 2376441 - RNA, 19 nt, Artificial Sequence
  Description of Artificial Sequence: Synthetic oligonucleotide
  Antisense strand to SEQ ID NO: 2376440
agauauccacuaaacgaag

SEQ ID NO: 2376442 - RNA, 19 nt, Artificial Sequence
  Description of Artificial Sequence: Synthetic oligonucleotide
  Sense strand starting at position 1190 of SEQ ID NO: 1885907
ucguuuaguggauaucuuu

SEQ ID NO: 2376443 - RNA, 19 nt, Artificial Sequence
  Description of Artificial Sequence: Synthetic oligonucleotide
  Antisense strand to SEQ ID NO: 2376442
aaagauauccacuaaacga

SEQ ID NO: 2376444 - RNA, 19 nt, Artificial Sequence
  Description of Artificial Sequence: Synthetic oligonucleotide
  Sense strand starting at position 1196 of SEQ ID NO: 1885907
aguggauaucuuuguguau

SEQ ID NO: 2376445 - RNA, 19 nt, Artificial Sequence
  Description of Artificial Sequence: Synthetic oligonucleotide
  Antisense strand to SEQ ID NO: 2376444
auacacaaagauauccacu

SEQ ID NO: 2376446 - RNA, 19 nt, Artificial Sequence
  Description of Artificial Sequence: Synthetic oligonucleotide
  Sense strand starting at position 1197 of SEQ ID NO: 1885907
guggauaucuuuguguaua

SEQ ID NO: 2376447 - RNA, 19 nt, Artificial Sequence
  Description of Artificial Sequence: Synthetic oligonucleotide
  Antisense strand to SEQ ID NO: 2376446
uauacacaaagauauccac

SEQ ID NO: 2376448 - RNA, 19 nt, Artificial Sequence
  Description of Artificial Sequence: Synthetic oligonucleotide
  Sense strand starting at position 1269 of SEQ ID NO: 1885907
acuuucuaauaaccggaua

SEQ ID NO: 2376449 - RNA, 19 nt, Artificial Sequence
  Description of Artificial Sequence: Synthetic oligonucleotide
  Antisense strand to SEQ ID NO: 2376448
uauccgguuauuagaaagu

SEQ ID NO: 2376450 - RNA, 19 nt, Artificial Sequence
  Description of Artificial Sequence: Synthetic oligonucleotide
  Sense strand starting at position 1283 of SEQ ID NO: 1885907
ggauauggguuucagaaau

SEQ ID NO: 2376451 - RNA, 19 nt, Artificial Sequence
  Description of Artificial Sequence: Synthetic oligonucleotide
  Antisense strand to SEQ ID NO: 2376450
auuucugaaacccauaucc

SEQ ID NO: 2376452 - RNA, 19 nt, Artificial Sequence
  Description of Artificial Sequence: Synthetic oligonucleotide
  Sense strand starting at position 1299 of SEQ ID NO: 1885907
aaucguuauggaugugcau

SEQ ID NO: 2376453 - RNA, 19 nt, Artificial Sequence
  Description of Artificial Sequence: Synthetic oligonucleotide
  Antisense strand to SEQ ID NO: 2376452
augcacauccauaacgauu

SEQ ID NO: 2376454 - RNA, 19 nt, Artificial Sequence
  Description of Artificial Sequence: Synthetic oligonucleotide
  Sense strand starting at position 1323 of SEQ ID NO: 1885907
cuuuguauuugugacugaa

SEQ ID NO: 2376455 - RNA, 19 nt, Artificial Sequence
  Description of Artificial Sequence: Synthetic oligonucleotide
  Antisense strand to SEQ ID NO: 2376454
uucagucacaaauacaaag

SEQ ID NO: 2376456 - RNA, 19 nt, Artificial Sequence
  Description of Artificial Sequence: Synthetic oligonucleotide
  Sense strand starting at position 1345 of SEQ ID NO: 1885907
aaugguggcuucucuugau

SEQ ID NO: 2376457 - RNA, 19 nt, Artificial Sequence
  Description of Artificial Sequence: Synthetic oligonucleotide
  Antisense strand to SEQ ID NO: 2376456
aucaagagaagccaccauu

SEQ ID NO: 2376458 - RNA, 19 nt, Artificial Sequence
  Description of Artificial Sequence: Synthetic oligonucleotide
  Sense strand starting at position 1423 of SEQ ID NO: 1885907
gagggugagccucagauua

SEQ ID NO: 2376459 - RNA, 19 nt, Artificial Sequence
  Description of Artificial Sequence: Synthetic oligonucleotide
  Antisense strand to SEQ ID NO: 2376458
uaaucugaggcucacccuc

SEQ ID NO: 2376460 - RNA, 19 nt, Artificial Sequence
  Description of Artificial Sequence: Synthetic oligonucleotide
  Sense strand starting at position 1425 of SEQ ID NO: 1885907
gggugagccucagauuaac

SEQ ID NO: 2376461 - RNA, 19 nt, Artificial Sequence
  Description of Artificial Sequence: Synthetic oligonucleotide
  Antisense strand to SEQ ID NO: 2376460
guuaaucugaggcucaccc

SEQ ID NO: 2376462 - RNA, 19 nt, Artificial Sequence
  Description of Artificial Sequence: Synthetic oligonucleotide
  Sense strand starting at position 1472 of SEQ ID NO: 1885907
gucagugaaucaggaggau

SEQ ID NO: 2376463 - RNA, 19 nt, Artificial Sequence
  Description of Artificial Sequence: Synthetic oligonucleotide
  Antisense strand to SEQ ID NO: 2376462
auccuccugauucacugac

SEQ ID NO: 2376464 - RNA, 19 nt, Artificial Sequence
  Description of Artificial Sequence: Synthetic oligonucleotide
  Sense strand starting at position 1551 of SEQ ID NO: 1885907
ccaggaacccucuggauau

SEQ ID NO: 2376465 - RNA, 19 nt, Artificial Sequence
  Description of Artificial Sequence: Synthetic oligonucleotide
  Antisense strand to SEQ ID NO: 2376464
auauccagaggguuccugg

SEQ ID NO: 2376466 - RNA, 19 nt, Artificial Sequence
  Description of Artificial Sequence: Synthetic oligonucleotide
  Sense strand starting at position 4 of SEQ ID NO: 1885908
auugucucccaauaaguau

SEQ ID NO: 2376467 - RNA, 19 nt, Artificial Sequence
  Description of Artificial Sequence: Synthetic oligonucleotide
  Antisense strand to SEQ ID NO: 2376466
auacuuauugggagacaau

SEQ ID NO: 2376468 - RNA, 19 nt, Artificial Sequence
  Description of Artificial Sequence: Synthetic oligonucleotide
  Sense strand starting at position 19 of SEQ ID NO: 1885908
guauaauugucucccaacc

SEQ ID NO: 2376469 - RNA, 19 nt, Artificial Sequence
  Description of Artificial Sequence: Synthetic oligonucleotide
  Antisense strand to SEQ ID NO: 2376468
gguugggagacaauuauac

SEQ ID NO: 2376470 - RNA, 19 nt, Artificial Sequence
  Description of Artificial Sequence: Synthetic oligonucleotide
  Sense strand starting at position 76 of SEQ ID NO: 1885908
aaggauaugucucugcaaa

SEQ ID NO: 2376471 - RNA, 19 nt, Artificial Sequence
  Description of Artificial Sequence: Synthetic oligonucleotide
  Antisense strand to SEQ ID NO: 2376470
uuugcagagacauauccuu

SEQ ID NO: 2376472 - RNA, 19 nt, Artificial Sequence
  Description of Artificial Sequence: Synthetic oligonucleotide
  Sense strand starting at position 77 of SEQ ID NO: 1885908
aggauaugucucugcaaac

SEQ ID NO: 2376473 - RNA, 19 nt, Artificial Sequence
  Description of Artificial Sequence: Synthetic oligonucleotide
  Antisense strand to SEQ ID NO: 2376472
guuugcagagacauauccu

SEQ ID NO: 2376474 - RNA, 19 nt, Artificial Sequence
  Description of Artificial Sequence: Synthetic oligonucleotide
  Sense strand starting at position 78 of SEQ ID NO: 1885908
ggauaugucucugcaaacu

SEQ ID NO: 2376475 - RNA, 19 nt, Artificial Sequence
  Description of Artificial Sequence: Synthetic oligonucleotide
  Antisense strand to SEQ ID NO: 2376474
aguuugcagagacauaucc

SEQ ID NO: 2376476 - RNA, 19 nt, Artificial Sequence
  Description of Artificial Sequence: Synthetic oligonucleotide
  Sense strand starting at position 201 of SEQ ID NO: 1885908
guugauagcauauguggaa

SEQ ID NO: 2376477 - RNA, 19 nt, Artificial Sequence
  Description of Artificial Sequence: Synthetic oligonucleotide
  Antisense strand to SEQ ID NO: 2376476
uuccacauaugcuaucaac

SEQ ID NO: 2376478 - RNA, 19 nt, Artificial Sequence
  Description of Artificial Sequence: Synthetic oligonucleotide
  Sense strand starting at position 202 of SEQ ID NO: 1885908
uugauagcauauguggaau

SEQ ID NO: 2376479 - RNA, 19 nt, Artificial Sequence
  Description of Artificial Sequence: Synthetic oligonucleotide
  Antisense strand to SEQ ID NO: 2376478
auuccacauaugcuaucaa

SEQ ID NO: 2376480 - RNA, 19 nt, Artificial Sequence
  Description of Artificial Sequence: Synthetic oligonucleotide
  Sense strand starting at position 221 of SEQ ID NO: 1885908
ucacguguuacuuguguaa

SEQ ID NO: 2376481 - RNA, 19 nt, Artificial Sequence
  Description of Artificial Sequence: Synthetic oligonucleotide
  Antisense strand to SEQ ID NO: 2376480
uuacacaaguaacacguga

SEQ ID NO: 2376482 - RNA, 19 nt, Artificial Sequence
  Description of Artificial Sequence: Synthetic oligonucleotide
  Sense strand starting at position 224 of SEQ ID NO: 1885908
cguguuacuuguguaaauc

SEQ ID NO: 2376483 - RNA, 19 nt, Artificial Sequence
  Description of Artificial Sequence: Synthetic oligonucleotide
  Antisense strand to SEQ ID NO: 2376482
gauuuacacaaguaacacg

SEQ ID NO: 2376484 - RNA, 19 nt, Artificial Sequence
  Description of Artificial Sequence: Synthetic oligonucleotide
  Sense strand starting at position 278 of SEQ ID NO: 1885908
acuuaagaauaucuucgaa

SEQ ID NO: 2376485 - RNA, 19 nt, Artificial Sequence
  Description of Artificial Sequence: Synthetic oligonucleotide
  Antisense strand to SEQ ID NO: 2376484
uucgaagauauucuuaagu

SEQ ID NO: 2376486 - RNA, 19 nt, Artificial Sequence
  Description of Artificial Sequence: Synthetic oligonucleotide
  Sense strand starting at position 280 of SEQ ID NO: 1885908
uuaagaauaucuucgaaug

SEQ ID NO: 2376487 - RNA, 19 nt, Artificial Sequence
  Description of Artificial Sequence: Synthetic oligonucleotide
  Antisense strand to SEQ ID NO: 2376486
cauucgaagauauucuuaa

SEQ ID NO: 2376488 - RNA, 19 nt, Artificial Sequence
  Description of Artificial Sequence: Synthetic oligonucleotide
  Sense strand starting at position 290 of SEQ ID NO: 1885908
cuucgaauguuccugaguc

SEQ ID NO: 2376489 - RNA, 19 nt, Artificial Sequence
  Description of Artificial Sequence: Synthetic oligonucleotide
  Antisense strand to SEQ ID NO: 2376488
gacucaggaacauucgaag

SEQ ID NO: 2376490 - RNA, 19 nt, Artificial Sequence
  Description of Artificial Sequence: Synthetic oligonucleotide
  Sense strand starting at position 298 of SEQ ID NO: 1885908
guuccugagucuccgagau

SEQ ID NO: 2376491 - RNA, 19 nt, Artificial Sequence
  Description of Artificial Sequence: Synthetic oligonucleotide
  Antisense strand to SEQ ID NO: 2376490
aucucggagacucaggaac

SEQ ID NO: 2376492 - RNA, 19 nt, Artificial Sequence
  Description of Artificial Sequence: Synthetic oligonucleotide
  Sense strand starting at position 300 of SEQ ID NO: 1885908
uccugagucuccgagauca

SEQ ID NO: 2376493 - RNA, 19 nt, Artificial Sequence
  Description of Artificial Sequence: Synthetic oligonucleotide
  Antisense strand to SEQ ID NO: 2376492
ugaucucggagacucagga

SEQ ID NO: 2376494 - RNA, 19 nt, Artificial Sequence
  Description of Artificial Sequence: Synthetic oligonucleotide
  Sense strand starting at position 302 of SEQ ID NO: 1885908
cugagucuccgagaucaua

SEQ ID NO: 2376495 - RNA, 19 nt, Artificial Sequence
  Description of Artificial Sequence: Synthetic oligonucleotide
  Antisense strand to SEQ ID NO: 2376494
uaugaucucggagacucag

SEQ ID NO: 2376496 - RNA, 19 nt, Artificial Sequence
  Description of Artificial Sequence: Synthetic oligonucleotide
  Sense strand starting at position 310 of SEQ ID NO: 1885908
ccgagaucauaggcagauu

SEQ ID NO: 2376497 - RNA, 19 nt, Artificial Sequence
  Description of Artificial Sequence: Synthetic oligonucleotide
  Antisense strand to SEQ ID NO: 2376496
aaucugccuaugaucucgg

SEQ ID NO: 2376498 - RNA, 19 nt, Artificial Sequence
  Description of Artificial Sequence: Synthetic oligonucleotide
  Sense strand starting at position 349 of SEQ ID NO: 1885908
uuuguuuagucaccuaaau

SEQ ID NO: 2376499 - RNA, 19 nt, Artificial Sequence
  Description of Artificial Sequence: Synthetic oligonucleotide
  Antisense strand to SEQ ID NO: 2376498
auuuaggugacuaaacaaa

SEQ ID NO: 2376500 - RNA, 19 nt, Artificial Sequence
  Description of Artificial Sequence: Synthetic oligonucleotide
  Sense strand starting at position 381 of SEQ ID NO: 1885908
aaaguuagagcccaguaaa

SEQ ID NO: 2376501 - RNA, 19 nt, Artificial Sequence
  Description of Artificial Sequence: Synthetic oligonucleotide
  Antisense strand to SEQ ID NO: 2376500
uuuacugggcucuaacuuu

SEQ ID NO: 2376502 - RNA, 19 nt, Artificial Sequence
  Description of Artificial Sequence: Synthetic oligonucleotide
  Sense strand starting at position 473 of SEQ ID NO: 1885908
gugaaagcacgguaagaau

SEQ ID NO: 2376503 - RNA, 19 nt, Artificial Sequence
  Description of Artificial Sequence: Synthetic oligonucleotide
  Antisense strand to SEQ ID NO: 2376502
auucuuaccgugcuuucac

SEQ ID NO: 2376504 - RNA, 19 nt, Artificial Sequence
  Description of Artificial Sequence: Synthetic oligonucleotide
  Sense strand starting at position 482 of SEQ ID NO: 1885908
cgguaagaaugacacauuu

SEQ ID NO: 2376505 - RNA, 19 nt, Artificial Sequence
  Description of Artificial Sequence: Synthetic oligonucleotide
  Antisense strand to SEQ ID NO: 2376504
aaaugugucauucuuaccg

SEQ ID NO: 2376506 - RNA, 19 nt, Artificial Sequence
  Description of Artificial Sequence: Synthetic oligonucleotide
  Sense strand starting at position 542 of SEQ ID NO: 1885908
uggaguguuccagagguua

SEQ ID NO: 2376507 - RNA, 19 nt, Artificial Sequence
  Description of Artificial Sequence: Synthetic oligonucleotide
  Antisense strand to SEQ ID NO: 2376506
uaaccucuggaacacucca

SEQ ID NO: 2376508 - RNA, 19 nt, Artificial Sequence
  Description of Artificial Sequence: Synthetic oligonucleotide
  Sense strand starting at position 544 of SEQ ID NO: 1885908
gaguguuccagagguuaca

SEQ ID NO: 2376509 - RNA, 19 nt, Artificial Sequence
  Description of Artificial Sequence: Synthetic oligonucleotide
  Antisense strand to SEQ ID NO: 2376508
uguaaccucuggaacacuc

SEQ ID NO: 2376510 - RNA, 19 nt, Artificial Sequence
  Description of Artificial Sequence: Synthetic oligonucleotide
  Sense strand starting at position 565 of SEQ ID NO: 1885908
gugugcuaaccacaacagu

SEQ ID NO: 2376511 - RNA, 19 nt, Artificial Sequence
  Description of Artificial Sequence: Synthetic oligonucleotide
  Antisense strand to SEQ ID NO: 2376510
acuguugugguuagcacac

SEQ ID NO: 2376512 - RNA, 19 nt, Artificial Sequence
  Description of Artificial Sequence: Synthetic oligonucleotide
  Sense strand starting at position 585 of SEQ ID NO: 1885908
ugacguagaucugagaauc

SEQ ID NO: 2376513 - RNA, 19 nt, Artificial Sequence
  Description of Artificial Sequence: Synthetic oligonucleotide
  Antisense strand to SEQ ID NO: 2376512
gauucucagaucuacguca

SEQ ID NO: 2376514 - RNA, 19 nt, Artificial Sequence
  Description of Artificial Sequence: Synthetic oligonucleotide
  Sense strand starting at position 779 of SEQ ID NO: 1885908
aucaaagcugaugguuaua

SEQ ID NO: 2376515 - RNA, 19 nt, Artificial Sequence
  Description of Artificial Sequence: Synthetic oligonucleotide
  Antisense strand to SEQ ID NO: 2376514
uauaaccaucagcuuugau

SEQ ID NO: 2376516 - RNA, 19 nt, Artificial Sequence
  Description of Artificial Sequence: Synthetic oligonucleotide
  Sense strand starting at position 791 of SEQ ID NO: 1885908
gguuauacgucagugagaa

SEQ ID NO: 2376517 - RNA, 19 nt, Artificial Sequence
  Description of Artificial Sequence: Synthetic oligonucleotide
  Antisense strand to SEQ ID NO: 2376516
uucucacugacguauaacc

SEQ ID NO: 2376518 - RNA, 19 nt, Artificial Sequence
  Description of Artificial Sequence: Synthetic oligonucleotide
  Sense strand starting at position 792 of SEQ ID NO: 1885908
guuauacgucagugagaaa

SEQ ID NO: 2376519 - RNA, 19 nt, Artificial Sequence
  Description of Artificial Sequence: Synthetic oligonucleotide
  Antisense strand to SEQ ID NO: 2376518
uuucucacugacguauaac

SEQ ID NO: 2376520 - RNA, 19 nt, Artificial Sequence
  Description of Artificial Sequence: Synthetic oligonucleotide
  Sense strand starting at position 831 of SEQ ID NO: 1885908
ugggucuuuacaugagaua

SEQ ID NO: 2376521 - RNA, 19 nt, Artificial Sequence
  Description of Artificial Sequence: Synthetic oligonucleotide
  Antisense strand to SEQ ID NO: 2376520
uaucucauguaaagaccca

SEQ ID NO: 2376522 - RNA, 19 nt, Artificial Sequence
  Description of Artificial Sequence: Synthetic oligonucleotide
  Sense strand starting at position 834 of SEQ ID NO: 1885908
gucuuuacaugagauaaac

SEQ ID NO: 2376523 - RNA, 19 nt, Artificial Sequence
  Description of Artificial Sequence: Synthetic oligonucleotide
  Antisense strand to SEQ ID NO: 2376522
guuuaucucauguaaagac

SEQ ID NO: 2376524 - RNA, 19 nt, Artificial Sequence
  Description of Artificial Sequence: Synthetic oligonucleotide
  Sense strand starting at position 914 of SEQ ID NO: 1885908
cugagauggcaauguacuu

SEQ ID NO: 2376525 - RNA, 19 nt, Artificial Sequence
  Description of Artificial Sequence: Synthetic oligonucleotide
  Antisense strand to SEQ ID NO: 2376524
aaguacauugccaucucag

SEQ ID NO: 2376526 - RNA, 19 nt, Artificial Sequence
  Description of Artificial Sequence: Synthetic oligonucleotide
  Sense strand starting at position 919 of SEQ ID NO: 1885908
auggcaauguacuuuacaa

SEQ ID NO: 2376527 - RNA, 19 nt, Artificial Sequence
  Description of Artificial Sequence: Synthetic oligonucleotide
  Antisense strand to SEQ ID NO: 2376526
uuguaaaguacauugccau

SEQ ID NO: 2376528 - RNA, 19 nt, Artificial Sequence
  Description of Artificial Sequence: Synthetic oligonucleotide
  Sense strand starting at position 987 of SEQ ID NO: 1885908
ucaguaacuugccugaauu

SEQ ID NO: 2376529 - RNA, 19 nt, Artificial Sequence
  Description of Artificial Sequence: Synthetic oligonucleotide
  Antisense strand to SEQ ID NO: 2376528
aauucaggcaaguuacuga

SEQ ID NO: 2376530 - RNA, 19 nt, Artificial Sequence
  Description of Artificial Sequence: Synthetic oligonucleotide
  Sense strand starting at position 988 of SEQ ID NO: 1885908
caguaacuugccugaauug

SEQ ID NO: 2376531 - RNA, 19 nt, Artificial Sequence
  Description of Artificial Sequence: Synthetic oligonucleotide
  Antisense strand to SEQ ID NO: 2376530
caauucaggcaaguuacug

SEQ ID NO: 2376532 - RNA, 19 nt, Artificial Sequence
  Description of Artificial Sequence: Synthetic oligonucleotide
  Sense strand starting at position 989 of SEQ ID NO: 1885908
aguaacuugccugaauuga

SEQ ID NO: 2376533 - RNA, 19 nt, Artificial Sequence
  Description of Artificial Sequence: Synthetic oligonucleotide
  Antisense strand to SEQ ID NO: 2376532
ucaauucaggcaaguuacu

SEQ ID NO: 2376534 - RNA, 19 nt, Artificial Sequence
  Description of Artificial Sequence: Synthetic oligonucleotide
  Sense strand starting at position 993 of SEQ ID NO: 1885908
acuugccugaauugagaga

SEQ ID NO: 2376535 - RNA, 19 nt, Artificial Sequence
  Description of Artificial Sequence: Synthetic oligonucleotide
  Antisense strand to SEQ ID NO: 2376534
ucucucaauucaggcaagu

SEQ ID NO: 2376536 - RNA, 19 nt, Artificial Sequence
  Description of Artificial Sequence: Synthetic oligonucleotide
  Sense strand starting at position 1124 of SEQ ID NO: 1885908
ucagguuuaaagcaagagu

SEQ ID NO: 2376537 - RNA, 19 nt, Artificial Sequence
  Description of Artificial Sequence: Synthetic oligonucleotide
  Antisense strand to SEQ ID NO: 2376536
acucuugcuuuaaaccuga

SEQ ID NO: 2376538 - RNA, 19 nt, Artificial Sequence
  Description of Artificial Sequence: Synthetic oligonucleotide
  Sense strand starting at position 1127 of SEQ ID NO: 1885908
gguuuaaagcaagaguauu

SEQ ID NO: 2376539 - RNA, 19 nt, Artificial Sequence
  Description of Artificial Sequence: Synthetic oligonucleotide
  Antisense strand to SEQ ID NO: 2376538
aauacucuugcuuuaaacc

SEQ ID NO: 2376540 - RNA, 19 nt, Artificial Sequence
  Description of Artificial Sequence: Synthetic oligonucleotide
  Sense strand starting at position 1183 of SEQ ID NO: 1885908
aaagcaggccuguaucauu

SEQ ID NO: 2376541 - RNA, 19 nt, Artificial Sequence
  Description of Artificial Sequence: Synthetic oligonucleotide
  Antisense strand to SEQ ID NO: 2376540
aaugauacaggccugcuuu

SEQ ID NO: 2376542 - RNA, 19 nt, Artificial Sequence
  Description of Artificial Sequence: Synthetic oligonucleotide
  Sense strand starting at position 1192 of SEQ ID NO: 1885908
cuguaucauuccuuugguu

SEQ ID NO: 2376543 - RNA, 19 nt, Artificial Sequence
  Description of Artificial Sequence: Synthetic oligonucleotide
  Antisense strand to SEQ ID NO: 2376542
aaccaaaggaaugauacag

SEQ ID NO: 2376544 - RNA, 19 nt, Artificial Sequence
  Description of Artificial Sequence: Synthetic oligonucleotide
  Sense strand starting at position 1194 of SEQ ID NO: 1885908
guaucauuccuuugguuuc

SEQ ID NO: 2376545 - RNA, 19 nt, Artificial Sequence
  Description of Artificial Sequence: Synthetic oligonucleotide
  Antisense strand to SEQ ID NO: 2376544
gaaaccaaaggaaugauac

SEQ ID NO: 2376546 - RNA, 19 nt, Artificial Sequence
  Description of Artificial Sequence: Synthetic oligonucleotide
  Sense strand starting at position 93 of SEQ ID NO: 1885909
uggugaagauaucaacuca

SEQ ID NO: 2376547 - RNA, 19 nt, Artificial Sequence
  Description of Artificial Sequence: Synthetic oligonucleotide
  Antisense strand to SEQ ID NO: 2376546
ugaguugauaucuucacca

SEQ ID NO: 2376548 - RNA, 19 nt, Artificial Sequence
  Description of Artificial Sequence: Synthetic oligonucleotide
  Sense strand starting at position 161 of SEQ ID NO: 1885909
auggcacaaugauacaaua

SEQ ID NO: 2376549 - RNA, 19 nt, Artificial Sequence
  Description of Artificial Sequence: Synthetic oligonucleotide
  Antisense strand to SEQ ID NO: 2376548
uauuguaucauugugccau

SEQ ID NO: 2376550 - RNA, 19 nt, Artificial Sequence
  Description of Artificial Sequence: Synthetic oligonucleotide
  Sense strand starting at position 270 of SEQ ID NO: 1885909
uggcuagcaucuuuaugac

SEQ ID NO: 2376551 - RNA, 19 nt, Artificial Sequence
  Description of Artificial Sequence: Synthetic oligonucleotide
  Antisense strand to SEQ ID NO: 2376550
gucauaaagaugcuagcca

SEQ ID NO: 2376552 - RNA, 19 nt, Artificial Sequence
  Description of Artificial Sequence: Synthetic oligonucleotide
  Sense strand starting at position 276 of SEQ ID NO: 1885909
gcaucuuuaugacugcuua

SEQ ID NO: 2376553 - RNA, 19 nt, Artificial Sequence
  Description of Artificial Sequence: Synthetic oligonucleotide
  Antisense strand to SEQ ID NO: 2376552
uaagcagucauaaagaugc

SEQ ID NO: 2376554 - RNA, 19 nt, Artificial Sequence
  Description of Artificial Sequence: Synthetic oligonucleotide
  Sense strand starting at position 286 of SEQ ID NO: 1885909
gacugcuuagucuguauuu

SEQ ID NO: 2376555 - RNA, 19 nt, Artificial Sequence
  Description of Artificial Sequence: Synthetic oligonucleotide
  Antisense strand to SEQ ID NO: 2376554
aaauacagacuaagcaguc

SEQ ID NO: 2376556 - RNA, 19 nt, Artificial Sequence
  Description of Artificial Sequence: Synthetic oligonucleotide
  Sense strand starting at position 287 of SEQ ID NO: 1885909
acugcuuagucuguauuua

SEQ ID NO: 2376557 - RNA, 19 nt, Artificial Sequence
  Description of Artificial Sequence: Synthetic oligonucleotide
  Antisense strand to SEQ ID NO: 2376556
uaaauacagacuaagcagu

SEQ ID NO: 2376558 - RNA, 19 nt, Artificial Sequence
  Description of Artificial Sequence: Synthetic oligonucleotide
  Sense strand starting at position 291 of SEQ ID NO: 1885909
cuuagucuguauuuaagua

SEQ ID NO: 2376559 - RNA, 19 nt, Artificial Sequence
  Description of Artificial Sequence: Synthetic oligonucleotide
  Antisense strand to SEQ ID NO: 2376558
uacuuaaauacagacuaag

SEQ ID NO: 2376560 - RNA, 19 nt, Artificial Sequence
  Description of Artificial Sequence: Synthetic oligonucleotide
  Sense strand starting at position 449 of SEQ ID NO: 1885909
gagaccagcugcucucaua

SEQ ID NO: 2376561 - RNA, 19 nt, Artificial Sequence
  Description of Artificial Sequence: Synthetic oligonucleotide
  Antisense strand to SEQ ID NO: 2376560
uaugagagcagcuggucuc

SEQ ID NO: 2376562 - RNA, 19 nt, Artificial Sequence
  Description of Artificial Sequence: Synthetic oligonucleotide
  Sense strand starting at position 595 of SEQ ID NO: 1885909
ugucacaucugagccagaa

SEQ ID NO: 2376563 - RNA, 19 nt, Artificial Sequence
  Description of Artificial Sequence: Synthetic oligonucleotide
  Antisense strand to SEQ ID NO: 2376562
uucuggcucagaugugaca

SEQ ID NO: 2376564 - RNA, 19 nt, Artificial Sequence
  Description of Artificial Sequence: Synthetic oligonucleotide
  Sense strand starting at position 720 of SEQ ID NO: 1885909
gauccuccuggcugaugaa

SEQ ID NO: 2376565 - RNA, 19 nt, Artificial Sequence
  Description of Artificial Sequence: Synthetic oligonucleotide
  Antisense strand to SEQ ID NO: 2376564
uucaucagccaggaggauc

SEQ ID NO: 2376566 - RNA, 19 nt, Artificial Sequence
  Description of Artificial Sequence: Synthetic oligonucleotide
  Sense strand starting at position 745 of SEQ ID NO: 1885909
acgggagcauugucaaugu

SEQ ID NO: 2376567 - RNA, 19 nt, Artificial Sequence
  Description of Artificial Sequence: Synthetic oligonucleotide
  Antisense strand to SEQ ID NO: 2376566
acauugacaaugcucccgu

SEQ ID NO: 2376568 - RNA, 19 nt, Artificial Sequence
  Description of Artificial Sequence: Synthetic oligonucleotide
  Sense strand starting at position 807 of SEQ ID NO: 1885909
acugcauucccgggaaaga

SEQ ID NO: 2376569 - RNA, 19 nt, Artificial Sequence
  Description of Artificial Sequence: Synthetic oligonucleotide
  Antisense strand to SEQ ID NO: 2376568
ucuuucccgggaaugcagu

SEQ ID NO: 2376570 - RNA, 19 nt, Artificial Sequence
  Description of Artificial Sequence: Synthetic oligonucleotide
  Sense strand starting at position 897 of SEQ ID NO: 1885909
auaccagguucugaaagaa

SEQ ID NO: 2376571 - RNA, 19 nt, Artificial Sequence
  Description of Artificial Sequence: Synthetic oligonucleotide
  Antisense strand to SEQ ID NO: 2376570
uucuuucagaaccugguau

SEQ ID NO: 2376572 - RNA, 19 nt, Artificial Sequence
  Description of Artificial Sequence: Synthetic oligonucleotide
  Sense strand starting at position 912 of SEQ ID NO: 1885909
agaaaugcuguugagcauu

SEQ ID NO: 2376573 - RNA, 19 nt, Artificial Sequence
  Description of Artificial Sequence: Synthetic oligonucleotide
  Antisense strand to SEQ ID NO: 2376572
aaugcucaacagcauuucu

SEQ ID NO: 2376574 - RNA, 19 nt, Artificial Sequence
  Description of Artificial Sequence: Synthetic oligonucleotide
  Sense strand starting at position 918 of SEQ ID NO: 1885909
gcuguugagcauuaccgua

SEQ ID NO: 2376575 - RNA, 19 nt, Artificial Sequence
  Description of Artificial Sequence: Synthetic oligonucleotide
  Antisense strand to SEQ ID NO: 2376574
uacgguaaugcucaacagc

SEQ ID NO: 2376576 - RNA, 19 nt, Artificial Sequence
  Description of Artificial Sequence: Synthetic oligonucleotide
  Sense strand starting at position 920 of SEQ ID NO: 1885909
uguugagcauuaccguauu

SEQ ID NO: 2376577 - RNA, 19 nt, Artificial Sequence
  Description of Artificial Sequence: Synthetic oligonucleotide
  Antisense strand to SEQ ID NO: 2376576
aauacgguaaugcucaaca

SEQ ID NO: 2376578 - RNA, 19 nt, Artificial Sequence
  Description of Artificial Sequence: Synthetic oligonucleotide
  Sense strand starting at position 923 of SEQ ID NO: 1885909
ugagcauuaccguauuguu

SEQ ID NO: 2376579 - RNA, 19 nt, Artificial Sequence
  Description of Artificial Sequence: Synthetic oligonucleotide
  Antisense strand to SEQ ID NO: 2376578
aacaauacgguaaugcuca

SEQ ID NO: 2376580 - RNA, 19 nt, Artificial Sequence
  Description of Artificial Sequence: Synthetic oligonucleotide
  Sense strand starting at position 950 of SEQ ID NO: 1885909
uccuaagucgccgauucuu

SEQ ID NO: 2376581 - RNA, 19 nt, Artificial Sequence
  Description of Artificial Sequence: Synthetic oligonucleotide
  Antisense strand to SEQ ID NO: 2376580
aagaaucggcgacuuagga

SEQ ID NO: 2376582 - RNA, 19 nt, Artificial Sequence
  Description of Artificial Sequence: Synthetic oligonucleotide
  Sense strand starting at position 996 of SEQ ID NO: 1885909
ugggacuuguugcuaaauc

SEQ ID NO: 2376583 - RNA, 19 nt, Artificial Sequence
  Description of Artificial Sequence: Synthetic oligonucleotide
  Antisense strand to SEQ ID NO: 2376582
gauuuagcaacaaguccca

SEQ ID NO: 2376584 - RNA, 19 nt, Artificial Sequence
  Description of Artificial Sequence: Synthetic oligonucleotide
  Sense strand starting at position 1139 of SEQ ID NO: 1885909
gcgcguucaguucuaccuu

SEQ ID NO: 2376585 - RNA, 19 nt, Artificial Sequence
  Description of Artificial Sequence: Synthetic oligonucleotide
  Antisense strand to SEQ ID NO: 2376584
aagguagaacugaacgcgc

SEQ ID NO: 2376586 - RNA, 19 nt, Artificial Sequence
  Description of Artificial Sequence: Synthetic oligonucleotide
  Sense strand starting at position 2081 of SEQ ID NO: 1885909
agccaaucgagauagagua

SEQ ID NO: 2376587 - RNA, 19 nt, Artificial Sequence
  Description of Artificial Sequence: Synthetic oligonucleotide
  Antisense strand to SEQ ID NO: 2376586
uacucuaucucgauuggcu

SEQ ID NO: 2376588 - RNA, 19 nt, Artificial Sequence
  Description of Artificial Sequence: Synthetic oligonucleotide
  Sense strand starting at position 2102 of SEQ ID NO: 1885909
gggaugaugggcgggauaa

SEQ ID NO: 2376589 - RNA, 19 nt, Artificial Sequence
  Description of Artificial Sequence: Synthetic oligonucleotide
  Antisense strand to SEQ ID NO: 2376588
uuaucccgcccaucauccc

SEQ ID NO: 2376590 - RNA, 19 nt, Artificial Sequence
  Description of Artificial Sequence: Synthetic oligonucleotide
  Sense strand starting at position 2103 of SEQ ID NO: 1885909
ggaugaugggcgggauaaa

SEQ ID NO: 2376591 - RNA, 19 nt, Artificial Sequence
  Description of Artificial Sequence: Synthetic oligonucleotide
  Antisense strand to SEQ ID NO: 2376590
uuuaucccgcccaucaucc

SEQ ID NO: 2376592 - RNA, 19 nt, Artificial Sequence
  Description of Artificial Sequence: Synthetic oligonucleotide
  Sense strand starting at position 2408 of SEQ ID NO: 1885909
ggauaccucucgcuccaga

SEQ ID NO: 2376593 - RNA, 19 nt, Artificial Sequence
  Description of Artificial Sequence: Synthetic oligonucleotide
  Antisense strand to SEQ ID NO: 2376592
ucuggagcgagagguaucc

SEQ ID NO: 2376594 - RNA, 19 nt, Artificial Sequence
  Description of Artificial Sequence: Synthetic oligonucleotide
  Sense strand starting at position 2732 of SEQ ID NO: 1885909
auaguaugucaggagguau

SEQ ID NO: 2376595 - RNA, 19 nt, Artificial Sequence
  Description of Artificial Sequence: Synthetic oligonucleotide
  Antisense strand to SEQ ID NO: 2376594
auaccuccugacauacuau

SEQ ID NO: 2376596 - RNA, 19 nt, Artificial Sequence
  Description of Artificial Sequence: Synthetic oligonucleotide
  Sense strand starting at position 2745 of SEQ ID NO: 1885909
agguauacaucacaaagaa

SEQ ID NO: 2376597 - RNA, 19 nt, Artificial Sequence
  Description of Artificial Sequence: Synthetic oligonucleotide
  Antisense strand to SEQ ID NO: 2376596
uucuuugugauguauaccu

SEQ ID NO: 2376598 - RNA, 19 nt, Artificial Sequence
  Description of Artificial Sequence: Synthetic oligonucleotide
  Sense strand starting at position 3288 of SEQ ID NO: 1885909
uagguauaauguguaacaa

SEQ ID NO: 2376599 - RNA, 19 nt, Artificial Sequence
  Description of Artificial Sequence: Synthetic oligonucleotide
  Antisense strand to SEQ ID NO: 2376598
uuguuacacauuauaccua

SEQ ID NO: 2376600 - RNA, 19 nt, Artificial Sequence
  Description of Artificial Sequence: Synthetic oligonucleotide
  Sense strand starting at position 3335 of SEQ ID NO: 1885909
cuaucccgccuuuaaagua

SEQ ID NO: 2376601 - RNA, 19 nt, Artificial Sequence
  Description of Artificial Sequence: Synthetic oligonucleotide
  Antisense strand to SEQ ID NO: 2376600
uacuuuaaaggcgggauag

SEQ ID NO: 2376602 - RNA, 19 nt, Artificial Sequence
  Description of Artificial Sequence: Synthetic oligonucleotide
  Sense strand starting at position 3361 of SEQ ID NO: 1885909
ucccuagugucuuuggauu

SEQ ID NO: 2376603 - RNA, 19 nt, Artificial Sequence
  Description of Artificial Sequence: Synthetic oligonucleotide
  Antisense strand to SEQ ID NO: 2376602
aauccaaagacacuaggga

SEQ ID NO: 2376604 - RNA, 19 nt, Artificial Sequence
  Description of Artificial Sequence: Synthetic oligonucleotide
  Sense strand starting at position 3535 of SEQ ID NO: 1885909
gcucuuaauugguugcauu

SEQ ID NO: 2376605 - RNA, 19 nt, Artificial Sequence
  Description of Artificial Sequence: Synthetic oligonucleotide
  Antisense strand to SEQ ID NO: 2376604
aaugcaaccaauuaagagc

SEQ ID NO: 2376606 - RNA, 19 nt, Artificial Sequence
  Description of Artificial Sequence: Synthetic oligonucleotide
  Sense strand starting at position 3606 of SEQ ID NO: 1885909
uuuggauggaguuaguuau

SEQ ID NO: 2376607 - RNA, 19 nt, Artificial Sequence
  Description of Artificial Sequence: Synthetic oligonucleotide
  Antisense strand to SEQ ID NO: 2376606
auaacuaacuccauccaaa

SEQ ID NO: 2376608 - RNA, 19 nt, Artificial Sequence
  Description of Artificial Sequence: Synthetic oligonucleotide
  Sense strand starting at position 3610 of SEQ ID NO: 1885909
gauggaguuaguuaugagu

SEQ ID NO: 2376609 - RNA, 19 nt, Artificial Sequence
  Description of Artificial Sequence: Synthetic oligonucleotide
  Antisense strand to SEQ ID NO: 2376608
acucauaacuaacuccauc

SEQ ID NO: 2376610 - RNA, 19 nt, Artificial Sequence
  Description of Artificial Sequence: Synthetic oligonucleotide
  Sense strand starting at position 3618 of SEQ ID NO: 1885909
uaguuaugagucuagaacu

SEQ ID NO: 2376611 - RNA, 19 nt, Artificial Sequence
  Description of Artificial Sequence: Synthetic oligonucleotide
  Antisense strand to SEQ ID NO: 2376610
aguucuagacucauaacua

SEQ ID NO: 2376612 - RNA, 19 nt, Artificial Sequence
  Description of Artificial Sequence: Synthetic oligonucleotide
  Sense strand starting at position 3643 of SEQ ID NO: 1885909
ucaaguguuccaggcauaa

SEQ ID NO: 2376613 - RNA, 19 nt, Artificial Sequence
  Description of Artificial Sequence: Synthetic oligonucleotide
  Antisense strand to SEQ ID NO: 2376612
uuaugccuggaacacuuga

SEQ ID NO: 2376614 - RNA, 19 nt, Artificial Sequence
  Description of Artificial Sequence: Synthetic oligonucleotide
  Sense strand starting at position 3700 of SEQ ID NO: 1885909
guagucugaugccugaaac

SEQ ID NO: 2376615 - RNA, 19 nt, Artificial Sequence
  Description of Artificial Sequence: Synthetic oligonucleotide
  Antisense strand to SEQ ID NO: 2376614
guuucaggcaucagacuac

SEQ ID NO: 2376616 - RNA, 19 nt, Artificial Sequence
  Description of Artificial Sequence: Synthetic oligonucleotide
  Sense strand starting at position 3701 of SEQ ID NO: 1885909
uagucugaugccugaaaca

SEQ ID NO: 2376617 - RNA, 19 nt, Artificial Sequence
  Description of Artificial Sequence: Synthetic oligonucleotide
  Antisense strand to SEQ ID NO: 2376616
uguuucaggcaucagacua

SEQ ID NO: 2376618 - RNA, 19 nt, Artificial Sequence
  Description of Artificial Sequence: Synthetic oligonucleotide
  Sense strand starting at position 3711 of SEQ ID NO: 1885909
ccugaaacauaauagguau

SEQ ID NO: 2376619 - RNA, 19 nt, Artificial Sequence
  Description of Artificial Sequence: Synthetic oligonucleotide
  Antisense strand to SEQ ID NO: 2376618
auaccuauuauguuucagg

SEQ ID NO: 2376620 - RNA, 19 nt, Artificial Sequence
  Description of Artificial Sequence: Synthetic oligonucleotide
  Sense strand starting at position 3938 of SEQ ID NO: 1885909
ggaauugacagguguucua

SEQ ID NO: 2376621 - RNA, 19 nt, Artificial Sequence
  Description of Artificial Sequence: Synthetic oligonucleotide
  Antisense strand to SEQ ID NO: 2376620
uagaacaccugucaauucc

SEQ ID NO: 2376622 - RNA, 19 nt, Artificial Sequence
  Description of Artificial Sequence: Synthetic oligonucleotide
  Sense strand starting at position 3945 of SEQ ID NO: 1885909
acagguguucuacagcacu

SEQ ID NO: 2376623 - RNA, 19 nt, Artificial Sequence
  Description of Artificial Sequence: Synthetic oligonucleotide
  Antisense strand to SEQ ID NO: 2376622
agugcuguagaacaccugu

SEQ ID NO: 2376624 - RNA, 19 nt, Artificial Sequence
  Description of Artificial Sequence: Synthetic oligonucleotide
  Sense strand starting at position 3948 of SEQ ID NO: 1885909
gguguucuacagcacuuaa

SEQ ID NO: 2376625 - RNA, 19 nt, Artificial Sequence
  Description of Artificial Sequence: Synthetic oligonucleotide
  Antisense strand to SEQ ID NO: 2376624
uuaagugcuguagaacacc

SEQ ID NO: 2376626 - RNA, 19 nt, Artificial Sequence
  Description of Artificial Sequence: Synthetic oligonucleotide
  Sense strand starting at position 171 of SEQ ID NO: 1885910
agaacuugcagcugacaga

SEQ ID NO: 2376627 - RNA, 19 nt, Artificial Sequence
  Description of Artificial Sequence: Synthetic oligonucleotide
  Antisense strand to SEQ ID NO: 2376626
ucugucagcugcaaguucu

SEQ ID NO: 2376628 - RNA, 19 nt, Artificial Sequence
  Description of Artificial Sequence: Synthetic oligonucleotide
  Sense strand starting at position 529 of SEQ ID NO: 1885910
agacaucucuguccugaua

SEQ ID NO: 2376629 - RNA, 19 nt, Artificial Sequence
  Description of Artificial Sequence: Synthetic oligonucleotide
  Antisense strand to SEQ ID NO: 2376628
uaucaggacagagaugucu

SEQ ID NO: 2376630 - RNA, 19 nt, Artificial Sequence
  Description of Artificial Sequence: Synthetic oligonucleotide
  Sense strand starting at position 593 of SEQ ID NO: 1885910
auuggaaaugccugaagcu

SEQ ID NO: 2376631 - RNA, 19 nt, Artificial Sequence
  Description of Artificial Sequence: Synthetic oligonucleotide
  Antisense strand to SEQ ID NO: 2376630
agcuucaggcauuuccaau

SEQ ID NO: 2376632 - RNA, 19 nt, Artificial Sequence
  Description of Artificial Sequence: Synthetic oligonucleotide
  Sense strand starting at position 594 of SEQ ID NO: 1885910
uuggaaaugccugaagcuu

SEQ ID NO: 2376633 - RNA, 19 nt, Artificial Sequence
  Description of Artificial Sequence: Synthetic oligonucleotide
  Antisense strand to SEQ ID NO: 2376632
aagcuucaggcauuuccaa

SEQ ID NO: 2376634 - RNA, 19 nt, Artificial Sequence
  Description of Artificial Sequence: Synthetic oligonucleotide
  Sense strand starting at position 600 of SEQ ID NO: 1885910
augccugaagcuuauuaaa

SEQ ID NO: 2376635 - RNA, 19 nt, Artificial Sequence
  Description of Artificial Sequence: Synthetic oligonucleotide
  Antisense strand to SEQ ID NO: 2376634
uuuaauaagcuucaggcau

SEQ ID NO: 2376636 - RNA, 19 nt, Artificial Sequence
  Description of Artificial Sequence: Synthetic oligonucleotide
  Sense strand starting at position 664 of SEQ ID NO: 1885910
guuagacagagaugcucaa

SEQ ID NO: 2376637 - RNA, 19 nt, Artificial Sequence
  Description of Artificial Sequence: Synthetic oligonucleotide
  Antisense strand to SEQ ID NO: 2376636
uugagcaucucugucuaac

SEQ ID NO: 2376638 - RNA, 19 nt, Artificial Sequence
  Description of Artificial Sequence: Synthetic oligonucleotide
  Sense strand starting at position 775 of SEQ ID NO: 1885910
auaagagaucccugucuaa

SEQ ID NO: 2376639 - RNA, 19 nt, Artificial Sequence
  Description of Artificial Sequence: Synthetic oligonucleotide
  Antisense strand to SEQ ID NO: 2376638
uuagacagggaucucuuau

SEQ ID NO: 2376640 - RNA, 19 nt, Artificial Sequence
  Description of Artificial Sequence: Synthetic oligonucleotide
  Sense strand starting at position 778 of SEQ ID NO: 1885910
agagaucccugucuaaauu

SEQ ID NO: 2376641 - RNA, 19 nt, Artificial Sequence
  Description of Artificial Sequence: Synthetic oligonucleotide
  Antisense strand to SEQ ID NO: 2376640
aauuuagacagggaucucu

SEQ ID NO: 2376642 - RNA, 19 nt, Artificial Sequence
  Description of Artificial Sequence: Synthetic oligonucleotide
  Sense strand starting at position 836 of SEQ ID NO: 1885910
ugauguuugugagugagau

SEQ ID NO: 2376643 - RNA, 19 nt, Artificial Sequence
  Description of Artificial Sequence: Synthetic oligonucleotide
  Antisense strand to SEQ ID NO: 2376642
aucucacucacaaacauca

SEQ ID NO: 2376644 - RNA, 19 nt, Artificial Sequence
  Description of Artificial Sequence: Synthetic oligonucleotide
  Sense strand starting at position 837 of SEQ ID NO: 1885910
gauguuugugagugagauu

SEQ ID NO: 2376645 - RNA, 19 nt, Artificial Sequence
  Description of Artificial Sequence: Synthetic oligonucleotide
  Antisense strand to SEQ ID NO: 2376644
aaucucacucacaaacauc

SEQ ID NO: 2376646 - RNA, 19 nt, Artificial Sequence
  Description of Artificial Sequence: Synthetic oligonucleotide
  Sense strand starting at position 838 of SEQ ID NO: 1885910
auguuugugagugagauug

SEQ ID NO: 2376647 - RNA, 19 nt, Artificial Sequence
  Description of Artificial Sequence: Synthetic oligonucleotide
  Antisense strand to SEQ ID NO: 2376646
caaucucacucacaaacau

SEQ ID NO: 2376648 - RNA, 19 nt, Artificial Sequence
  Description of Artificial Sequence: Synthetic oligonucleotide
  Sense strand starting at position 1086 of SEQ ID NO: 1885910
ccgaccuuucuaugaaacu

SEQ ID NO: 2376649 - RNA, 19 nt, Artificial Sequence
  Description of Artificial Sequence: Synthetic oligonucleotide
  Antisense strand to SEQ ID NO: 2376648
aguuucauagaaaggucgg

SEQ ID NO: 2376650 - RNA, 19 nt, Artificial Sequence
  Description of Artificial Sequence: Synthetic oligonucleotide
  Sense strand starting at position 1226 of SEQ ID NO: 1885910
aucaguugagcaugugaaa

SEQ ID NO: 2376651 - RNA, 19 nt, Artificial Sequence
  Description of Artificial Sequence: Synthetic oligonucleotide
  Antisense strand to SEQ ID NO: 2376650
uuucacaugcucaacugau

SEQ ID NO: 2376652 - RNA, 19 nt, Artificial Sequence
  Description of Artificial Sequence: Synthetic oligonucleotide
  Sense strand starting at position 1253 of SEQ ID NO: 1885910
acggugugugcgguguaaa

SEQ ID NO: 2376653 - RNA, 19 nt, Artificial Sequence
  Description of Artificial Sequence: Synthetic oligonucleotide
  Antisense strand to SEQ ID NO: 2376652
uuuacaccgcacacaccgu

SEQ ID NO: 2376654 - RNA, 19 nt, Artificial Sequence
  Description of Artificial Sequence: Synthetic oligonucleotide
  Sense strand starting at position 1255 of SEQ ID NO: 1885910
ggugugugcgguguaaagu

SEQ ID NO: 2376655 - RNA, 19 nt, Artificial Sequence
  Description of Artificial Sequence: Synthetic oligonucleotide
  Antisense strand to SEQ ID NO: 2376654
acuuuacaccgcacacacc

SEQ ID NO: 2376656 - RNA, 19 nt, Artificial Sequence
  Description of Artificial Sequence: Synthetic oligonucleotide
  Sense strand starting at position 1450 of SEQ ID NO: 1885910
ccucaugacuguccucaua

SEQ ID NO: 2376657 - RNA, 19 nt, Artificial Sequence
  Description of Artificial Sequence: Synthetic oligonucleotide
  Antisense strand to SEQ ID NO: 2376656
uaugaggacagucaugagg

SEQ ID NO: 2376658 - RNA, 19 nt, Artificial Sequence
  Description of Artificial Sequence: Synthetic oligonucleotide
  Sense strand starting at position 1452 of SEQ ID NO: 1885910
ucaugacuguccucauaua

SEQ ID NO: 2376659 - RNA, 19 nt, Artificial Sequence
  Description of Artificial Sequence: Synthetic oligonucleotide
  Antisense strand to SEQ ID NO: 2376658
uauaugaggacagucauga

SEQ ID NO: 2376660 - RNA, 19 nt, Artificial Sequence
  Description of Artificial Sequence: Synthetic oligonucleotide
  Sense strand starting at position 1497 of SEQ ID NO: 1885910
gggauaguguuguugacaa

SEQ ID NO: 2376661 - RNA, 19 nt, Artificial Sequence
  Description of Artificial Sequence: Synthetic oligonucleotide
  Antisense strand to SEQ ID NO: 2376660
uugucaacaacacuauccc

SEQ ID NO: 2376662 - RNA, 19 nt, Artificial Sequence
  Description of Artificial Sequence: Synthetic oligonucleotide
  Sense strand starting at position 1499 of SEQ ID NO: 1885910
gauaguguuguugacaaag

SEQ ID NO: 2376663 - RNA, 19 nt, Artificial Sequence
  Description of Artificial Sequence: Synthetic oligonucleotide
  Antisense strand to SEQ ID NO: 2376662
cuuugucaacaacacuauc

SEQ ID NO: 2376664 - RNA, 19 nt, Artificial Sequence
  Description of Artificial Sequence: Synthetic oligonucleotide
  Sense strand starting at position 1638 of SEQ ID NO: 1885910
uuuggagccuucucuacaa

SEQ ID NO: 2376665 - RNA, 19 nt, Artificial Sequence
  Description of Artificial Sequence: Synthetic oligonucleotide
  Antisense strand to SEQ ID NO: 2376664
uuguagagaaggcuccaaa

SEQ ID NO: 2376666 - RNA, 19 nt, Artificial Sequence
  Description of Artificial Sequence: Synthetic oligonucleotide
  Sense strand starting at position 1831 of SEQ ID NO: 1885910
cgccgacgugugcuuagaa

SEQ ID NO: 2376667 - RNA, 19 nt, Artificial Sequence
  Description of Artificial Sequence: Synthetic oligonucleotide
  Antisense strand to SEQ ID NO: 2376666
uucuaagcacacgucggcg

SEQ ID NO: 2376668 - RNA, 19 nt, Artificial Sequence
  Description of Artificial Sequence: Synthetic oligonucleotide
  Sense strand starting at position 1834 of SEQ ID NO: 1885910
cgacgugugcuuagaauag

SEQ ID NO: 2376669 - RNA, 19 nt, Artificial Sequence
  Description of Artificial Sequence: Synthetic oligonucleotide
  Antisense strand to SEQ ID NO: 2376668
cuauucuaagcacacgucg

SEQ ID NO: 2376670 - RNA, 19 nt, Artificial Sequence
  Description of Artificial Sequence: Synthetic oligonucleotide
  Sense strand starting at position 1844 of SEQ ID NO: 1885910
uuagaauagcugcagaaau

SEQ ID NO: 2376671 - RNA, 19 nt, Artificial Sequence
  Description of Artificial Sequence: Synthetic oligonucleotide
  Antisense strand to SEQ ID NO: 2376670
auuucugcagcuauucuaa

SEQ ID NO: 2376672 - RNA, 19 nt, Artificial Sequence
  Description of Artificial Sequence: Synthetic oligonucleotide
  Sense strand starting at position 1846 of SEQ ID NO: 1885910
agaauagcugcagaaaugu

SEQ ID NO: 2376673 - RNA, 19 nt, Artificial Sequence
  Description of Artificial Sequence: Synthetic oligonucleotide
  Antisense strand to SEQ ID NO: 2376672
acauuucugcagcuauucu

SEQ ID NO: 2376674 - RNA, 19 nt, Artificial Sequence
  Description of Artificial Sequence: Synthetic oligonucleotide
  Sense strand starting at position 2545 of SEQ ID NO: 1885910
agguaaugauccucucuuc

SEQ ID NO: 2376675 - RNA, 19 nt, Artificial Sequence
  Description of Artificial Sequence: Synthetic oligonucleotide
  Antisense strand to SEQ ID NO: 2376674
gaagagaggaucauuaccu

SEQ ID NO: 2376676 - RNA, 19 nt, Artificial Sequence
  Description of Artificial Sequence: Synthetic oligonucleotide
  Sense strand starting at position 2648 of SEQ ID NO: 1885910
acaccugaucauugugaac

SEQ ID NO: 2376677 - RNA, 19 nt, Artificial Sequence
  Description of Artificial Sequence: Synthetic oligonucleotide
  Antisense strand to SEQ ID NO: 2376676
guucacaaugaucaggugu

SEQ ID NO: 2376678 - RNA, 19 nt, Artificial Sequence
  Description of Artificial Sequence: Synthetic oligonucleotide
  Sense strand starting at position 2896 of SEQ ID NO: 1885910
acuggcaaucccuagguuu

SEQ ID NO: 2376679 - RNA, 19 nt, Artificial Sequence
  Description of Artificial Sequence: Synthetic oligonucleotide
  Antisense strand to SEQ ID NO: 2376678
aaaccuagggauugccagu

SEQ ID NO: 2376680 - RNA, 19 nt, Artificial Sequence
  Description of Artificial Sequence: Synthetic oligonucleotide
  Sense strand starting at position 2933 of SEQ ID NO: 1885910
acugaccuccucugagauu

SEQ ID NO: 2376681 - RNA, 19 nt, Artificial Sequence
  Description of Artificial Sequence: Synthetic oligonucleotide
  Antisense strand to SEQ ID NO: 2376680
aaucucagaggaggucagu

SEQ ID NO: 2376682 - RNA, 19 nt, Artificial Sequence
  Description of Artificial Sequence: Synthetic oligonucleotide
  Sense strand starting at position 3019 of SEQ ID NO: 1885910
guucauagucgacagaguu

SEQ ID NO: 2376683 - RNA, 19 nt, Artificial Sequence
  Description of Artificial Sequence: Synthetic oligonucleotide
  Antisense strand to SEQ ID NO: 2376682
aacucugucgacuaugaac

SEQ ID NO: 2376684 - RNA, 19 nt, Artificial Sequence
  Description of Artificial Sequence: Synthetic oligonucleotide
  Sense strand starting at position 3059 of SEQ ID NO: 1885910
ccuugcagaugacuauaau

SEQ ID NO: 2376685 - RNA, 19 nt, Artificial Sequence
  Description of Artificial Sequence: Synthetic oligonucleotide
  Antisense strand to SEQ ID NO: 2376684
auuauagucaucugcaagg

SEQ ID NO: 2376686 - RNA, 19 nt, Artificial Sequence
  Description of Artificial Sequence: Synthetic oligonucleotide
  Sense strand starting at position 3060 of SEQ ID NO: 1885910
cuugcagaugacuauaauu

SEQ ID NO: 2376687 - RNA, 19 nt, Artificial Sequence
  Description of Artificial Sequence: Synthetic oligonucleotide
  Antisense strand to SEQ ID NO: 2376686
aauuauagucaucugcaag

SEQ ID NO: 2376688 - RNA, 19 nt, Artificial Sequence
  Description of Artificial Sequence: Synthetic oligonucleotide
  Sense strand starting at position 3062 of SEQ ID NO: 1885910
ugcagaugacuauaauugu

SEQ ID NO: 2376689 - RNA, 19 nt, Artificial Sequence
  Description of Artificial Sequence: Synthetic oligonucleotide
  Antisense strand to SEQ ID NO: 2376688
acaauuauagucaucugca

SEQ ID NO: 2376690 - RNA, 19 nt, Artificial Sequence
  Description of Artificial Sequence: Synthetic oligonucleotide
  Sense strand starting at position 3065 of SEQ ID NO: 1885910
agaugacuauaauugugua

SEQ ID NO: 2376691 - RNA, 19 nt, Artificial Sequence
  Description of Artificial Sequence: Synthetic oligonucleotide
  Antisense strand to SEQ ID NO: 2376690
uacacaauuauagucaucu

SEQ ID NO: 2376692 - RNA, 19 nt, Artificial Sequence
  Description of Artificial Sequence: Synthetic oligonucleotide
  Sense strand starting at position 3069 of SEQ ID NO: 1885910
gacuauaauuguguagcaa

SEQ ID NO: 2376693 - RNA, 19 nt, Artificial Sequence
  Description of Artificial Sequence: Synthetic oligonucleotide
  Antisense strand to SEQ ID NO: 2376692
uugcuacacaauuauaguc

SEQ ID NO: 2376694 - RNA, 19 nt, Artificial Sequence
  Description of Artificial Sequence: Synthetic oligonucleotide
  Sense strand starting at position 3070 of SEQ ID NO: 1885910
acuauaauuguguagcaaa

SEQ ID NO: 2376695 - RNA, 19 nt, Artificial Sequence
  Description of Artificial Sequence: Synthetic oligonucleotide
  Antisense strand to SEQ ID NO: 2376694
uuugcuacacaauuauagu

SEQ ID NO: 2376696 - RNA, 19 nt, Artificial Sequence
  Description of Artificial Sequence: Synthetic oligonucleotide
  Sense strand starting at position 3184 of SEQ ID NO: 1885910
gaagguaaugguuauguau

SEQ ID NO: 2376697 - RNA, 19 nt, Artificial Sequence
  Description of Artificial Sequence: Synthetic oligonucleotide
  Antisense strand to SEQ ID NO: 2376696
auacauaaccauuaccuuc

SEQ ID NO: 2376698 - RNA, 19 nt, Artificial Sequence
  Description of Artificial Sequence: Synthetic oligonucleotide
  Sense strand starting at position 3187 of SEQ ID NO: 1885910
gguaaugguuauguaugau

SEQ ID NO: 2376699 - RNA, 19 nt, Artificial Sequence
  Description of Artificial Sequence: Synthetic oligonucleotide
  Antisense strand to SEQ ID NO: 2376698
aucauacauaaccauuacc

SEQ ID NO: 2376700 - RNA, 19 nt, Artificial Sequence
  Description of Artificial Sequence: Synthetic oligonucleotide
  Sense strand starting at position 3201 of SEQ ID NO: 1885910
augauucccgaguaaucac

SEQ ID NO: 2376701 - RNA, 19 nt, Artificial Sequence
  Description of Artificial Sequence: Synthetic oligonucleotide
  Antisense strand to SEQ ID NO: 2376700
gugauuacucgggaaucau

SEQ ID NO: 2376702 - RNA, 19 nt, Artificial Sequence
  Description of Artificial Sequence: Synthetic oligonucleotide
  Sense strand starting at position 3961 of SEQ ID NO: 1885910
aaacucuauggcugguaau

SEQ ID NO: 2376703 - RNA, 19 nt, Artificial Sequence
  Description of Artificial Sequence: Synthetic oligonucleotide
  Antisense strand to SEQ ID NO: 2376702
auuaccagccauagaguuu

SEQ ID NO: 2376704 - RNA, 19 nt, Artificial Sequence
  Description of Artificial Sequence: Synthetic oligonucleotide
  Sense strand starting at position 3962 of SEQ ID NO: 1885910
aacucuauggcugguaauu

SEQ ID NO: 2376705 - RNA, 19 nt, Artificial Sequence
  Description of Artificial Sequence: Synthetic oligonucleotide
  Antisense strand to SEQ ID NO: 2376704
aauuaccagccauagaguu

SEQ ID NO: 2376706 - RNA, 19 nt, Artificial Sequence
  Description of Artificial Sequence: Synthetic oligonucleotide
  Sense strand starting at position 2006 of SEQ ID NO: 1885911
guguuuaguguguuucggu

SEQ ID NO: 2376707 - RNA, 19 nt, Artificial Sequence
  Description of Artificial Sequence: Synthetic oligonucleotide
  Antisense strand to SEQ ID NO: 2376706
accgaaacacacuaaacac

SEQ ID NO: 2376708 - RNA, 19 nt, Artificial Sequence
  Description of Artificial Sequence: Synthetic oligonucleotide
  Sense strand starting at position 2008 of SEQ ID NO: 1885911
guuuaguguguuucgguga

SEQ ID NO: 2376709 - RNA, 19 nt, Artificial Sequence
  Description of Artificial Sequence: Synthetic oligonucleotide
  Antisense strand to SEQ ID NO: 2376708
ucaccgaaacacacuaaac

SEQ ID NO: 2376710 - RNA, 19 nt, Artificial Sequence
  Description of Artificial Sequence: Synthetic oligonucleotide
  Sense strand starting at position 2040 of SEQ ID NO: 1885911
uguugaaucagcgugccua

SEQ ID NO: 2376711 - RNA, 19 nt, Artificial Sequence
  Description of Artificial Sequence: Synthetic oligonucleotide
  Antisense strand to SEQ ID NO: 2376710
uaggcacgcugauucaaca

SEQ ID NO: 2376712 - RNA, 19 nt, Artificial Sequence
  Description of Artificial Sequence: Synthetic oligonucleotide
  Sense strand starting at position 2159 of SEQ ID NO: 1885911
ugcuuuaaaccugauugga

SEQ ID NO: 2376713 - RNA, 19 nt, Artificial Sequence
  Description of Artificial Sequence: Synthetic oligonucleotide
  Antisense strand to SEQ ID NO: 2376712
uccaaucagguuuaaagca

SEQ ID NO: 2376714 - RNA, 19 nt, Artificial Sequence
  Description of Artificial Sequence: Synthetic oligonucleotide
  Sense strand starting at position 2161 of SEQ ID NO: 1885911
cuuuaaaccugauuggacu

SEQ ID NO: 2376715 - RNA, 19 nt, Artificial Sequence
  Description of Artificial Sequence: Synthetic oligonucleotide
  Antisense strand to SEQ ID NO: 2376714
aguccaaucagguuuaaag

SEQ ID NO: 2376716 - RNA, 19 nt, Artificial Sequence
  Description of Artificial Sequence: Synthetic oligonucleotide
  Sense strand starting at position 2337 of SEQ ID NO: 1885911
ugauguagucuguaaaugg

SEQ ID NO: 2376717 - RNA, 19 nt, Artificial Sequence
  Description of Artificial Sequence: Synthetic oligonucleotide
  Antisense strand to SEQ ID NO: 2376716
ccauuuacagacuacauca

SEQ ID NO: 2376718 - RNA, 19 nt, Artificial Sequence
  Description of Artificial Sequence: Synthetic oligonucleotide
  Sense strand starting at position 2347 of SEQ ID NO: 1885911
uguaaaugguccuuguaaa

SEQ ID NO: 2376719 - RNA, 19 nt, Artificial Sequence
  Description of Artificial Sequence: Synthetic oligonucleotide
  Antisense strand to SEQ ID NO: 2376718
uuuacaaggaccauuuaca

SEQ ID NO: 2376720 - RNA, 19 nt, Artificial Sequence
  Description of Artificial Sequence: Synthetic oligonucleotide
  Sense strand starting at position 2348 of SEQ ID NO: 1885911
guaaaugguccuuguaaag

SEQ ID NO: 2376721 - RNA, 19 nt, Artificial Sequence
  Description of Artificial Sequence: Synthetic oligonucleotide
  Antisense strand to SEQ ID NO: 2376720
cuuuacaaggaccauuuac

SEQ ID NO: 2376722 - RNA, 19 nt, Artificial Sequence
  Description of Artificial Sequence: Synthetic oligonucleotide
  Sense strand starting at position 2413 of SEQ ID NO: 1885911
agaaguuaguggucauucu

SEQ ID NO: 2376723 - RNA, 19 nt, Artificial Sequence
  Description of Artificial Sequence: Synthetic oligonucleotide
  Antisense strand to SEQ ID NO: 2376722
agaaugaccacuaacuucu

SEQ ID NO: 2376724 - RNA, 19 nt, Artificial Sequence
  Description of Artificial Sequence: Synthetic oligonucleotide
  Sense strand starting at position 2414 of SEQ ID NO: 1885911
gaaguuaguggucauucuu

SEQ ID NO: 2376725 - RNA, 19 nt, Artificial Sequence
  Description of Artificial Sequence: Synthetic oligonucleotide
  Antisense strand to SEQ ID NO: 2376724
aagaaugaccacuaacuuc

SEQ ID NO: 2376726 - RNA, 19 nt, Artificial Sequence
  Description of Artificial Sequence: Synthetic oligonucleotide
  Sense strand starting at position 2428 of SEQ ID NO: 1885911
uucuuuccuguagauaguu

SEQ ID NO: 2376727 - RNA, 19 nt, Artificial Sequence
  Description of Artificial Sequence: Synthetic oligonucleotide
  Antisense strand to SEQ ID NO: 2376726
aacuaucuacaggaaagaa

SEQ ID NO: 2376728 - RNA, 19 nt, Artificial Sequence
  Description of Artificial Sequence: Synthetic oligonucleotide
  Sense strand starting at position 2437 of SEQ ID NO: 1885911
guagauaguuuaucucaug

SEQ ID NO: 2376729 - RNA, 19 nt, Artificial Sequence
  Description of Artificial Sequence: Synthetic oligonucleotide
  Antisense strand to SEQ ID NO: 2376728
caugagauaaacuaucuac

SEQ ID NO: 2376730 - RNA, 19 nt, Artificial Sequence
  Description of Artificial Sequence: Synthetic oligonucleotide
  Sense strand starting at position 2463 of SEQ ID NO: 1885911
ccacccagcuugguuuaaa

SEQ ID NO: 2376731 - RNA, 19 nt, Artificial Sequence
  Description of Artificial Sequence: Synthetic oligonucleotide
  Antisense strand to SEQ ID NO: 2376730
uuuaaaccaagcugggugg

SEQ ID NO: 2376732 - RNA, 19 nt, Artificial Sequence
  Description of Artificial Sequence: Synthetic oligonucleotide
  Sense strand starting at position 2496 of SEQ ID NO: 1885911
acguauaaccaucagcuuu

SEQ ID NO: 2376733 - RNA, 19 nt, Artificial Sequence
  Description of Artificial Sequence: Synthetic oligonucleotide
  Antisense strand to SEQ ID NO: 2376732
aaagcugaugguuauacgu

SEQ ID NO: 2376734 - RNA, 19 nt, Artificial Sequence
  Description of Artificial Sequence: Synthetic oligonucleotide
  Sense strand starting at position 2531 of SEQ ID NO: 1885911
ggcucagacuuugaauuua

SEQ ID NO: 2376735 - RNA, 19 nt, Artificial Sequence
  Description of Artificial Sequence: Synthetic oligonucleotide
  Antisense strand to SEQ ID NO: 2376734
uaaauucaaagucugagcc

SEQ ID NO: 2376736 - RNA, 19 nt, Artificial Sequence
  Description of Artificial Sequence: Synthetic oligonucleotide
  Sense strand starting at position 2539 of SEQ ID NO: 1885911
cuuugaauuuaaggaaacu

SEQ ID NO: 2376737 - RNA, 19 nt, Artificial Sequence
  Description of Artificial Sequence: Synthetic oligonucleotide
  Antisense strand to SEQ ID NO: 2376736
aguuuccuuaaauucaaag

SEQ ID NO: 2376738 - RNA, 19 nt, Artificial Sequence
  Description of Artificial Sequence: Synthetic oligonucleotide
  Sense strand starting at position 2695 of SEQ ID NO: 1885911
uucucagaucuacgucaga

SEQ ID NO: 2376739 - RNA, 19 nt, Artificial Sequence
  Description of Artificial Sequence: Synthetic oligonucleotide
  Antisense strand to SEQ ID NO: 2376738
ucugacguagaucugagaa

SEQ ID NO: 2376740 - RNA, 19 nt, Artificial Sequence
  Description of Artificial Sequence: Synthetic oligonucleotide
  Sense strand starting at position 2731 of SEQ ID NO: 1885911
ccauguaaccucuggaaca

SEQ ID NO: 2376741 - RNA, 19 nt, Artificial Sequence
  Description of Artificial Sequence: Synthetic oligonucleotide
  Antisense strand to SEQ ID NO: 2376740
uguuccagagguuacaugg

SEQ ID NO: 2376742 - RNA, 19 nt, Artificial Sequence
  Description of Artificial Sequence: Synthetic oligonucleotide
  Sense strand starting at position 2794 of SEQ ID NO: 1885911
agaaaugugucauucuuac

SEQ ID NO: 2376743 - RNA, 19 nt, Artificial Sequence
  Description of Artificial Sequence: Synthetic oligonucleotide
  Antisense strand to SEQ ID NO: 2376742
guaagaaugacacauuucu

SEQ ID NO: 2376744 - RNA, 19 nt, Artificial Sequence
  Description of Artificial Sequence: Synthetic oligonucleotide
  Sense strand starting at position 2841 of SEQ ID NO: 1885911
gcuguuaugcaagacacau

SEQ ID NO: 2376745 - RNA, 19 nt, Artificial Sequence
  Description of Artificial Sequence: Synthetic oligonucleotide
  Antisense strand to SEQ ID NO: 2376744
augugucuugcauaacagc

SEQ ID NO: 2376746 - RNA, 19 nt, Artificial Sequence
  Description of Artificial Sequence: Synthetic oligonucleotide
  Sense strand starting at position 2964 of SEQ ID NO: 1885911
gcauaaucugccuaugauc

SEQ ID NO: 2376747 - RNA, 19 nt, Artificial Sequence
  Description of Artificial Sequence: Synthetic oligonucleotide
  Antisense strand to SEQ ID NO: 2376746
gaucauaggcagauuaugc

SEQ ID NO: 2376748 - RNA, 19 nt, Artificial Sequence
  Description of Artificial Sequence: Synthetic oligonucleotide
  Sense strand starting at position 2973 of SEQ ID NO: 1885911
gccuaugaucucggagacu

SEQ ID NO: 2376749 - RNA, 19 nt, Artificial Sequence
  Description of Artificial Sequence: Synthetic oligonucleotide
  Antisense strand to SEQ ID NO: 2376748
agucuccgagaucauaggc

SEQ ID NO: 2376750 - RNA, 19 nt, Artificial Sequence
  Description of Artificial Sequence: Synthetic oligonucleotide
  Sense strand starting at position 2999 of SEQ ID NO: 1885911
auucgaagauauucuuaag

SEQ ID NO: 2376751 - RNA, 19 nt, Artificial Sequence
  Description of Artificial Sequence: Synthetic oligonucleotide
  Antisense strand to SEQ ID NO: 2376750
cuuaagaauaucuucgaau

SEQ ID NO: 2376752 - RNA, 19 nt, Artificial Sequence
  Description of Artificial Sequence: Synthetic oligonucleotide
  Sense strand starting at position 3070 of SEQ ID NO: 1885911
acgugaauuccacauaugc

SEQ ID NO: 2376753 - RNA, 19 nt, Artificial Sequence
  Description of Artificial Sequence: Synthetic oligonucleotide
  Antisense strand to SEQ ID NO: 2376752
gcauauguggaauucacgu

SEQ ID NO: 2376754 - RNA, 19 nt, Artificial Sequence
  Description of Artificial Sequence: Synthetic oligonucleotide
  Sense strand starting at position 3091 of SEQ ID NO: 1885911
ucaacacuuguguaaaugu

SEQ ID NO: 2376755 - RNA, 19 nt, Artificial Sequence
  Description of Artificial Sequence: Synthetic oligonucleotide
  Antisense strand to SEQ ID NO: 2376754
acauuuacacaaguguuga

SEQ ID NO: 2376756 - RNA, 19 nt, Artificial Sequence
  Description of Artificial Sequence: Synthetic oligonucleotide
  Sense strand starting at position 3175 of SEQ ID NO: 1885911
cagugaauccuuuggugaa

SEQ ID NO: 2376757 - RNA, 19 nt, Artificial Sequence
  Description of Artificial Sequence: Synthetic oligonucleotide
  Antisense strand to SEQ ID NO: 2376756
uucaccaaaggauucacug

SEQ ID NO: 2376758 - RNA, 19 nt, Artificial Sequence
  Description of Artificial Sequence: Synthetic oligonucleotide
  Sense strand starting at position 3177 of SEQ ID NO: 1885911
gugaauccuuuggugaaac

SEQ ID NO: 2376759 - RNA, 19 nt, Artificial Sequence
  Description of Artificial Sequence: Synthetic oligonucleotide
  Antisense strand to SEQ ID NO: 2376758
guuucaccaaaggauucac

SEQ ID NO: 2376760 - RNA, 19 nt, Artificial Sequence
  Description of Artificial Sequence: Synthetic oligonucleotide
  Sense strand starting at position 3207 of SEQ ID NO: 1885911
agagacauauccuuagagu

SEQ ID NO: 2376761 - RNA, 19 nt, Artificial Sequence
  Description of Artificial Sequence: Synthetic oligonucleotide
  Antisense strand to SEQ ID NO: 2376760
acucuaaggauaugucucu

SEQ ID NO: 2376762 - RNA, 19 nt, Artificial Sequence
  Description of Artificial Sequence: Synthetic oligonucleotide
  Sense strand starting at position 3358 of SEQ ID NO: 1885911
guuuguuuccaguuguuuc

SEQ ID NO: 2376763 - RNA, 19 nt, Artificial Sequence
  Description of Artificial Sequence: Synthetic oligonucleotide
  Antisense strand to SEQ ID NO: 2376762
gaaacaacuggaaacaaac

SEQ ID NO: 2376764 - RNA, 19 nt, Artificial Sequence
  Description of Artificial Sequence: Synthetic oligonucleotide
  Sense strand starting at position 3377 of SEQ ID NO: 1885911
ugugaacuguagucugaau

SEQ ID NO: 2376765 - RNA, 19 nt, Artificial Sequence
  Description of Artificial Sequence: Synthetic oligonucleotide
  Antisense strand to SEQ ID NO: 2376764
auucagacuacaguucaca

SEQ ID NO: 2376766 - RNA, 19 nt, Artificial Sequence
  Description of Artificial Sequence: Synthetic oligonucleotide
  Sense strand starting at position 3379 of SEQ ID NO: 1885911
ugaacuguagucugaaucu

SEQ ID NO: 2376767 - RNA, 19 nt, Artificial Sequence
  Description of Artificial Sequence: Synthetic oligonucleotide
  Antisense strand to SEQ ID NO: 2376766
agauucagacuacaguuca

SEQ ID NO: 2376768 - RNA, 19 nt, Artificial Sequence
  Description of Artificial Sequence: Synthetic oligonucleotide
  Sense strand starting at position 3390 of SEQ ID NO: 1885911
cugaaucugucagucuaua

SEQ ID NO: 2376769 - RNA, 19 nt, Artificial Sequence
  Description of Artificial Sequence: Synthetic oligonucleotide
  Antisense strand to SEQ ID NO: 2376768
uauagacugacagauucag

SEQ ID NO: 2376770 - RNA, 19 nt, Artificial Sequence
  Description of Artificial Sequence: Synthetic oligonucleotide
  Sense strand starting at position 3403 of SEQ ID NO: 1885911
ucuauaguucucuacuguu

SEQ ID NO: 2376771 - RNA, 19 nt, Artificial Sequence
  Description of Artificial Sequence: Synthetic oligonucleotide
  Antisense strand to SEQ ID NO: 2376770
aacaguagagaacuauaga

SEQ ID NO: 2376772 - RNA, 19 nt, Artificial Sequence
  Description of Artificial Sequence: Synthetic oligonucleotide
  Sense strand starting at position 3428 of SEQ ID NO: 1885911
acaggaagcaucuggucau

SEQ ID NO: 2376773 - RNA, 19 nt, Artificial Sequence
  Description of Artificial Sequence: Synthetic oligonucleotide
  Antisense strand to SEQ ID NO: 2376772
augaccagaugcuuccugu

SEQ ID NO: 2376774 - RNA, 19 nt, Artificial Sequence
  Description of Artificial Sequence: Synthetic oligonucleotide
  Sense strand starting at position 3431 of SEQ ID NO: 1885911
ggaagcaucuggucauucu

SEQ ID NO: 2376775 - RNA, 19 nt, Artificial Sequence
  Description of Artificial Sequence: Synthetic oligonucleotide
  Antisense strand to SEQ ID NO: 2376774
agaaugaccagaugcuucc

SEQ ID NO: 2376776 - RNA, 19 nt, Artificial Sequence
  Description of Artificial Sequence: Synthetic oligonucleotide
  Sense strand starting at position 3432 of SEQ ID NO: 1885911
gaagcaucuggucauucuu

SEQ ID NO: 2376777 - RNA, 19 nt, Artificial Sequence
  Description of Artificial Sequence: Synthetic oligonucleotide
  Antisense strand to SEQ ID NO: 2376776
aagaaugaccagaugcuuc

SEQ ID NO: 2376778 - RNA, 19 nt, Artificial Sequence
  Description of Artificial Sequence: Synthetic oligonucleotide
  Sense strand starting at position 3511 of SEQ ID NO: 1885911
auuggaucuugguuaaguu

SEQ ID NO: 2376779 - RNA, 19 nt, Artificial Sequence
  Description of Artificial Sequence: Synthetic oligonucleotide
  Antisense strand to SEQ ID NO: 2376778
aacuuaaccaagauccaau

SEQ ID NO: 2376780 - RNA, 19 nt, Artificial Sequence
  Description of Artificial Sequence: Synthetic oligonucleotide
  Sense strand starting at position 3864 of SEQ ID NO: 1885911
uucccauaacauuguguca

SEQ ID NO: 2376781 - RNA, 19 nt, Artificial Sequence
  Description of Artificial Sequence: Synthetic oligonucleotide
  Antisense strand to SEQ ID NO: 2376780
ugacacaauguuaugggaa

SEQ ID NO: 2376782 - RNA, 19 nt, Artificial Sequence
  Description of Artificial Sequence: Synthetic oligonucleotide
  Sense strand starting at position 3974 of SEQ ID NO: 1885911
agugcacgucaugaggaau

SEQ ID NO: 2376783 - RNA, 19 nt, Artificial Sequence
  Description of Artificial Sequence: Synthetic oligonucleotide
  Antisense strand to SEQ ID NO: 2376782
auuccucaugacgugcacu

SEQ ID NO: 2376784 - RNA, 19 nt, Artificial Sequence
  Description of Artificial Sequence: Synthetic oligonucleotide
  Sense strand starting at position 3977 of SEQ ID NO: 1885911
gcacgucaugaggaauuca

SEQ ID NO: 2376785 - RNA, 19 nt, Artificial Sequence
  Description of Artificial Sequence: Synthetic oligonucleotide
  Antisense strand to SEQ ID NO: 2376784
ugaauuccucaugacgugc

SEQ ID NO: 2376786 - RNA, 19 nt, Artificial Sequence
  Description of Artificial Sequence: Synthetic oligonucleotide
  Sense strand starting at position 252 of SEQ ID NO: 1885912
uacggaucugggcaaagua

SEQ ID NO: 2376787 - RNA, 19 nt, Artificial Sequence
  Description of Artificial Sequence: Synthetic oligonucleotide
  Antisense strand to SEQ ID NO: 2376786
uacuuugcccagauccgua

SEQ ID NO: 2376788 - RNA, 19 nt, Artificial Sequence
  Description of Artificial Sequence: Synthetic oligonucleotide
  Sense strand starting at position 297 of SEQ ID NO: 1885912
gaugucauucuagauguca

SEQ ID NO: 2376789 - RNA, 19 nt, Artificial Sequence
  Description of Artificial Sequence: Synthetic oligonucleotide
  Antisense strand to SEQ ID NO: 2376788
ugacaucuagaaugacauc

SEQ ID NO: 2376790 - RNA, 19 nt, Artificial Sequence
  Description of Artificial Sequence: Synthetic oligonucleotide
  Sense strand starting at position 367 of SEQ ID NO: 1885912
gaguuuggaagauguggau

SEQ ID NO: 2376791 - RNA, 19 nt, Artificial Sequence
  Description of Artificial Sequence: Synthetic oligonucleotide
  Antisense strand to SEQ ID NO: 2376790
auccacaucuuccaaacuc

SEQ ID NO: 2376792 - RNA, 19 nt, Artificial Sequence
  Description of Artificial Sequence: Synthetic oligonucleotide
  Sense strand starting at position 411 of SEQ ID NO: 1885912
ggguucaagucauugcaga

SEQ ID NO: 2376793 - RNA, 19 nt, Artificial Sequence
  Description of Artificial Sequence: Synthetic oligonucleotide
  Antisense strand to SEQ ID NO: 2376792
ucugcaaugacuugaaccc

SEQ ID NO: 2376794 - RNA, 19 nt, Artificial Sequence
  Description of Artificial Sequence: Synthetic oligonucleotide
  Sense strand starting at position 578 of SEQ ID NO: 1885912
ggauguugugaacauuguu

SEQ ID NO: 2376795 - RNA, 19 nt, Artificial Sequence
  Description of Artificial Sequence: Synthetic oligonucleotide
  Antisense strand to SEQ ID NO: 2376794
aacaauguucacaacaucc

SEQ ID NO: 2376796 - RNA, 19 nt, Artificial Sequence
  Description of Artificial Sequence: Synthetic oligonucleotide
  Sense strand starting at position 950 of SEQ ID NO: 1885912
gacauaauguuauuggaca

SEQ ID NO: 2376797 - RNA, 19 nt, Artificial Sequence
  Description of Artificial Sequence: Synthetic oligonucleotide
  Antisense strand to SEQ ID NO: 2376796
uguccaauaacauuauguc

SEQ ID NO: 2376798 - RNA, 19 nt, Artificial Sequence
  Description of Artificial Sequence: Synthetic oligonucleotide
  Sense strand starting at position 1002 of SEQ ID NO: 1885912
uuuauauaucuugggaaac

SEQ ID NO: 2376799 - RNA, 19 nt, Artificial Sequence
  Description of Artificial Sequence: Synthetic oligonucleotide
  Antisense strand to SEQ ID NO: 2376798
guuucccaagauauauaaa

SEQ ID NO: 2376800 - RNA, 19 nt, Artificial Sequence
  Description of Artificial Sequence: Synthetic oligonucleotide
  Sense strand starting at position 1057 of SEQ ID NO: 1885912
acagcaauggucuggaaca

SEQ ID NO: 2376801 - RNA, 19 nt, Artificial Sequence
  Description of Artificial Sequence: Synthetic oligonucleotide
  Antisense strand to SEQ ID NO: 2376800
uguuccagaccauugcugu

SEQ ID NO: 2376802 - RNA, 19 nt, Artificial Sequence
  Description of Artificial Sequence: Synthetic oligonucleotide
  Sense strand starting at position 1101 of SEQ ID NO: 1885912
gccuguauuuacucaguua

SEQ ID NO: 2376803 - RNA, 19 nt, Artificial Sequence
  Description of Artificial Sequence: Synthetic oligonucleotide
  Antisense strand to SEQ ID NO: 2376802
uaacugaguaaauacaggc

SEQ ID NO: 2376804 - RNA, 19 nt, Artificial Sequence
  Description of Artificial Sequence: Synthetic oligonucleotide
  Sense strand starting at position 1137 of SEQ ID NO: 1885912
gagugcuuaccgccugcua

SEQ ID NO: 2376805 - RNA, 19 nt, Artificial Sequence
  Description of Artificial Sequence: Synthetic oligonucleotide
  Antisense strand to SEQ ID NO: 2376804
uagcaggcgguaagcacuc

SEQ ID NO: 2376806 - RNA, 19 nt, Artificial Sequence
  Description of Artificial Sequence: Synthetic oligonucleotide
  Sense strand starting at position 1252 of SEQ ID NO: 1885912
aaagcaaucuagguuaagu

SEQ ID NO: 2376807 - RNA, 19 nt, Artificial Sequence
  Description of Artificial Sequence: Synthetic oligonucleotide
  Antisense strand to SEQ ID NO: 2376806
acuuaaccuagauugcuuu

SEQ ID NO: 2376808 - RNA, 19 nt, Artificial Sequence
  Description of Artificial Sequence: Synthetic oligonucleotide
  Sense strand starting at position 1263 of SEQ ID NO: 1885912
gguuaagugcuauacuaaa

SEQ ID NO: 2376809 - RNA, 19 nt, Artificial Sequence
  Description of Artificial Sequence: Synthetic oligonucleotide
  Antisense strand to SEQ ID NO: 2376808
uuuaguauagcacuuaacc

SEQ ID NO: 2376810 - RNA, 19 nt, Artificial Sequence
  Description of Artificial Sequence: Synthetic oligonucleotide
  Sense strand starting at position 1439 of SEQ ID NO: 1885912
uggacaucuggucgaagca

SEQ ID NO: 2376811 - RNA, 19 nt, Artificial Sequence
  Description of Artificial Sequence: Synthetic oligonucleotide
  Antisense strand to SEQ ID NO: 2376810
ugcuucgaccagaugucca

SEQ ID NO: 2376812 - RNA, 19 nt, Artificial Sequence
  Description of Artificial Sequence: Synthetic oligonucleotide
  Sense strand starting at position 1696 of SEQ ID NO: 1885912
gcucucaggccuuggaaau

SEQ ID NO: 2376813 - RNA, 19 nt, Artificial Sequence
  Description of Artificial Sequence: Synthetic oligonucleotide
  Antisense strand to SEQ ID NO: 2376812
auuuccaaggccugagagc

SEQ ID NO: 2376814 - RNA, 19 nt, Artificial Sequence
  Description of Artificial Sequence: Synthetic oligonucleotide
  Sense strand starting at position 1697 of SEQ ID NO: 1885912
cucucaggccuuggaaauc

SEQ ID NO: 2376815 - RNA, 19 nt, Artificial Sequence
  Description of Artificial Sequence: Synthetic oligonucleotide
  Antisense strand to SEQ ID NO: 2376814
gauuuccaaggccugagag

SEQ ID NO: 2376816 - RNA, 19 nt, Artificial Sequence
  Description of Artificial Sequence: Synthetic oligonucleotide
  Sense strand starting at position 2218 of SEQ ID NO: 1885912
gccugauuagauuagcaca

SEQ ID NO: 2376817 - RNA, 19 nt, Artificial Sequence
  Description of Artificial Sequence: Synthetic oligonucleotide
  Antisense strand to SEQ ID NO: 2376816
ugugcuaaucuaaucaggc

SEQ ID NO: 2376818 - RNA, 19 nt, Artificial Sequence
  Description of Artificial Sequence: Synthetic oligonucleotide
  Sense strand starting at position 2339 of SEQ ID NO: 1885912
gguauugguggagagguca

SEQ ID NO: 2376819 - RNA, 19 nt, Artificial Sequence
  Description of Artificial Sequence: Synthetic oligonucleotide
  Antisense strand to SEQ ID NO: 2376818
ugaccucuccaccaauacc

SEQ ID NO: 2376820 - RNA, 19 nt, Artificial Sequence
  Description of Artificial Sequence: Synthetic oligonucleotide
  Sense strand starting at position 2540 of SEQ ID NO: 1885912
ucugguuguaauuagaugu

SEQ ID NO: 2376821 - RNA, 19 nt, Artificial Sequence
  Description of Artificial Sequence: Synthetic oligonucleotide
  Antisense strand to SEQ ID NO: 2376820
acaucuaauuacaaccaga

SEQ ID NO: 2376822 - RNA, 19 nt, Artificial Sequence
  Description of Artificial Sequence: Synthetic oligonucleotide
  Sense strand starting at position 2554 of SEQ ID NO: 1885912
gauguaaccugacuuuaga

SEQ ID NO: 2376823 - RNA, 19 nt, Artificial Sequence
  Description of Artificial Sequence: Synthetic oligonucleotide
  Antisense strand to SEQ ID NO: 2376822
ucuaaagucagguuacauc

SEQ ID NO: 2376824 - RNA, 19 nt, Artificial Sequence
  Description of Artificial Sequence: Synthetic oligonucleotide
  Sense strand starting at position 2577 of SEQ ID NO: 1885912
uacagucuuagugggaguu

SEQ ID NO: 2376825 - RNA, 19 nt, Artificial Sequence
  Description of Artificial Sequence: Synthetic oligonucleotide
  Antisense strand to SEQ ID NO: 2376824
aacucccacuaagacugua

SEQ ID NO: 2376826 - RNA, 19 nt, Artificial Sequence
  Description of Artificial Sequence: Synthetic oligonucleotide
  Sense strand starting at position 2583 of SEQ ID NO: 1885912
cuuagugggaguugagauu

SEQ ID NO: 2376827 - RNA, 19 nt, Artificial Sequence
  Description of Artificial Sequence: Synthetic oligonucleotide
  Antisense strand to SEQ ID NO: 2376826
aaucucaacucccacuaag

SEQ ID NO: 2376828 - RNA, 19 nt, Artificial Sequence
  Description of Artificial Sequence: Synthetic oligonucleotide
  Sense strand starting at position 2592 of SEQ ID NO: 1885912
aguugagauuuauagccau

SEQ ID NO: 2376829 - RNA, 19 nt, Artificial Sequence
  Description of Artificial Sequence: Synthetic oligonucleotide
  Antisense strand to SEQ ID NO: 2376828
auggcuauaaaucucaacu

SEQ ID NO: 2376830 - RNA, 19 nt, Artificial Sequence
  Description of Artificial Sequence: Synthetic oligonucleotide
  Sense strand starting at position 2674 of SEQ ID NO: 1885912
caauacugacucgaacgua

SEQ ID NO: 2376831 - RNA, 19 nt, Artificial Sequence
  Description of Artificial Sequence: Synthetic oligonucleotide
  Antisense strand to SEQ ID NO: 2376830
uacguucgagucaguauug

SEQ ID NO: 2376832 - RNA, 19 nt, Artificial Sequence
  Description of Artificial Sequence: Synthetic oligonucleotide
  Sense strand starting at position 2677 of SEQ ID NO: 1885912
uacugacucgaacguauuu

SEQ ID NO: 2376833 - RNA, 19 nt, Artificial Sequence
  Description of Artificial Sequence: Synthetic oligonucleotide
  Antisense strand to SEQ ID NO: 2376832
aaauacguucgagucagua

SEQ ID NO: 2376834 - RNA, 19 nt, Artificial Sequence
  Description of Artificial Sequence: Synthetic oligonucleotide
  Sense strand starting at position 2801 of SEQ ID NO: 1885912
cuuagaaggcuguagguaa

SEQ ID NO: 2376835 - RNA, 19 nt, Artificial Sequence
  Description of Artificial Sequence: Synthetic oligonucleotide
  Antisense strand to SEQ ID NO: 2376834
uuaccuacagccuucuaag

SEQ ID NO: 2376836 - RNA, 19 nt, Artificial Sequence
  Description of Artificial Sequence: Synthetic oligonucleotide
  Sense strand starting at position 2924 of SEQ ID NO: 1885912
gcccuuguggagcaauuau

SEQ ID NO: 2376837 - RNA, 19 nt, Artificial Sequence
  Description of Artificial Sequence: Synthetic oligonucleotide
  Antisense strand to SEQ ID NO: 2376836
auaauugcuccacaagggc

SEQ ID NO: 2376838 - RNA, 19 nt, Artificial Sequence
  Description of Artificial Sequence: Synthetic oligonucleotide
  Sense strand starting at position 2934 of SEQ ID NO: 1885912
agcaauuauccuuggacuc

SEQ ID NO: 2376839 - RNA, 19 nt, Artificial Sequence
  Description of Artificial Sequence: Synthetic oligonucleotide
  Antisense strand to SEQ ID NO: 2376838
gaguccaaggauaauugcu

SEQ ID NO: 2376840 - RNA, 19 nt, Artificial Sequence
  Description of Artificial Sequence: Synthetic oligonucleotide
  Sense strand starting at position 3106 of SEQ ID NO: 1885912
ugguuauaccgugacaggu

SEQ ID NO: 2376841 - RNA, 19 nt, Artificial Sequence
  Description of Artificial Sequence: Synthetic oligonucleotide
  Antisense strand to SEQ ID NO: 2376840
accugucacgguauaacca

SEQ ID NO: 2376842 - RNA, 19 nt, Artificial Sequence
  Description of Artificial Sequence: Synthetic oligonucleotide
  Sense strand starting at position 3134 of SEQ ID NO: 1885912
cauugcagcccugggauau

SEQ ID NO: 2376843 - RNA, 19 nt, Artificial Sequence
  Description of Artificial Sequence: Synthetic oligonucleotide
  Antisense strand to SEQ ID NO: 2376842
auaucccagggcugcaaug

SEQ ID NO: 2376844 - RNA, 19 nt, Artificial Sequence
  Description of Artificial Sequence: Synthetic oligonucleotide
  Sense strand starting at position 3162 of SEQ ID NO: 1885912
uggagagugcucaggcagu

SEQ ID NO: 2376845 - RNA, 19 nt, Artificial Sequence
  Description of Artificial Sequence: Synthetic oligonucleotide
  Antisense strand to SEQ ID NO: 2376844
acugccugagcacucucca

SEQ ID NO: 2376846 - RNA, 19 nt, Artificial Sequence
  Description of Artificial Sequence: Synthetic oligonucleotide
  Sense strand starting at position 3220 of SEQ ID NO: 1885912
acuggaacucucuggagua

SEQ ID NO: 2376847 - RNA, 19 nt, Artificial Sequence
  Description of Artificial Sequence: Synthetic oligonucleotide
  Antisense strand to SEQ ID NO: 2376846
uacuccagagaguuccagu

SEQ ID NO: 2376848 - RNA, 19 nt, Artificial Sequence
  Description of Artificial Sequence: Synthetic oligonucleotide
  Sense strand starting at position 3267 of SEQ ID NO: 1885912
cugaauuauagugguuuga

SEQ ID NO: 2376849 - RNA, 19 nt, Artificial Sequence
  Description of Artificial Sequence: Synthetic oligonucleotide
  Antisense strand to SEQ ID NO: 2376848
ucaaaccacuauaauucag

SEQ ID NO: 2376850 - RNA, 19 nt, Artificial Sequence
  Description of Artificial Sequence: Synthetic oligonucleotide
  Sense strand starting at position 3269 of SEQ ID NO: 1885912
gaauuauagugguuugaac

SEQ ID NO: 2376851 - RNA, 19 nt, Artificial Sequence
  Description of Artificial Sequence: Synthetic oligonucleotide
  Antisense strand to SEQ ID NO: 2376850
guucaaaccacuauaauuc

SEQ ID NO: 2376852 - RNA, 19 nt, Artificial Sequence
  Description of Artificial Sequence: Synthetic oligonucleotide
  Sense strand starting at position 3271 of SEQ ID NO: 1885912
auuauagugguuugaacua

SEQ ID NO: 2376853 - RNA, 19 nt, Artificial Sequence
  Description of Artificial Sequence: Synthetic oligonucleotide
  Antisense strand to SEQ ID NO: 2376852
uaguucaaaccacuauaau

SEQ ID NO: 2376854 - RNA, 19 nt, Artificial Sequence
  Description of Artificial Sequence: Synthetic oligonucleotide
  Sense strand starting at position 3310 of SEQ ID NO: 1885912
uagauaagaugucuugaau

SEQ ID NO: 2376855 - RNA, 19 nt, Artificial Sequence
  Description of Artificial Sequence: Synthetic oligonucleotide
  Antisense strand to SEQ ID NO: 2376854
auucaagacaucuuaucua

SEQ ID NO: 2376856 - RNA, 19 nt, Artificial Sequence
  Description of Artificial Sequence: Synthetic oligonucleotide
  Sense strand starting at position 3376 of SEQ ID NO: 1885912
ugaagaaauauucgaguaa

SEQ ID NO: 2376857 - RNA, 19 nt, Artificial Sequence
  Description of Artificial Sequence: Synthetic oligonucleotide
  Antisense strand to SEQ ID NO: 2376856
uuacucgaauauuucuuca

SEQ ID NO: 2376858 - RNA, 19 nt, Artificial Sequence
  Description of Artificial Sequence: Synthetic oligonucleotide
  Sense strand starting at position 3535 of SEQ ID NO: 1885912
gcccuuugauaaucuaaug

SEQ ID NO: 2376859 - RNA, 19 nt, Artificial Sequence
  Description of Artificial Sequence: Synthetic oligonucleotide
  Antisense strand to SEQ ID NO: 2376858
cauuagauuaucaaagggc

SEQ ID NO: 2376860 - RNA, 19 nt, Artificial Sequence
  Description of Artificial Sequence: Synthetic oligonucleotide
  Sense strand starting at position 3602 of SEQ ID NO: 1885912
guguguaucaaucaguuag

SEQ ID NO: 2376861 - RNA, 19 nt, Artificial Sequence
  Description of Artificial Sequence: Synthetic oligonucleotide
  Antisense strand to SEQ ID NO: 2376860
cuaacugauugauacacac

SEQ ID NO: 2376862 - RNA, 19 nt, Artificial Sequence
  Description of Artificial Sequence: Synthetic oligonucleotide
  Sense strand starting at position 3890 of SEQ ID NO: 1885912
gaaaguauugcuggaccua

SEQ ID NO: 2376863 - RNA, 19 nt, Artificial Sequence
  Description of Artificial Sequence: Synthetic oligonucleotide
  Antisense strand to SEQ ID NO: 2376862
uagguccagcaauacuuuc

SEQ ID NO: 2376864 - RNA, 19 nt, Artificial Sequence
  Description of Artificial Sequence: Synthetic oligonucleotide
  Sense strand starting at position 3940 of SEQ ID NO: 1885912
gcaggcauucuggaauaug

SEQ ID NO: 2376865 - RNA, 19 nt, Artificial Sequence
  Description of Artificial Sequence: Synthetic oligonucleotide
  Antisense strand to SEQ ID NO: 2376864
cauauuccagaaugccugc

SEQ ID NO: 2376866 - RNA, 19 nt, Artificial Sequence
  Description of Artificial Sequence: Synthetic oligonucleotide
  Sense strand starting at position 400 of SEQ ID NO: 1885913
aagauuuggucagauacac

SEQ ID NO: 2376867 - RNA, 19 nt, Artificial Sequence
  Description of Artificial Sequence: Synthetic oligonucleotide
  Antisense strand to SEQ ID NO: 2376866
guguaucugaccaaaucuu

SEQ ID NO: 2376868 - RNA, 19 nt, Artificial Sequence
  Description of Artificial Sequence: Synthetic oligonucleotide
  Sense strand starting at position 438 of SEQ ID NO: 1885913
acagucauguaauuacuga

SEQ ID NO: 2376869 - RNA, 19 nt, Artificial Sequence
  Description of Artificial Sequence: Synthetic oligonucleotide
  Antisense strand to SEQ ID NO: 2376868
ucaguaauuacaugacugu

SEQ ID NO: 2376870 - RNA, 19 nt, Artificial Sequence
  Description of Artificial Sequence: Synthetic oligonucleotide
  Sense strand starting at position 449 of SEQ ID NO: 1885913
auuacugaacuuugcagaa

SEQ ID NO: 2376871 - RNA, 19 nt, Artificial Sequence
  Description of Artificial Sequence: Synthetic oligonucleotide
  Antisense strand to SEQ ID NO: 2376870
uucugcaaaguucaguaau

SEQ ID NO: 2376872 - RNA, 19 nt, Artificial Sequence
  Description of Artificial Sequence: Synthetic oligonucleotide
  Sense strand starting at position 500 of SEQ ID NO: 1885913
ggaggucgcauagauuaug

SEQ ID NO: 2376873 - RNA, 19 nt, Artificial Sequence
  Description of Artificial Sequence: Synthetic oligonucleotide
  Antisense strand to SEQ ID NO: 2376872
cauaaucuaugcgaccucc

SEQ ID NO: 2376874 - RNA, 19 nt, Artificial Sequence
  Description of Artificial Sequence: Synthetic oligonucleotide
  Sense strand starting at position 511 of SEQ ID NO: 1885913
agauuauguuuguccagaa

SEQ ID NO: 2376875 - RNA, 19 nt, Artificial Sequence
  Description of Artificial Sequence: Synthetic oligonucleotide
  Antisense strand to SEQ ID NO: 2376874
uucuggacaaacauaaucu

SEQ ID NO: 2376876 - RNA, 19 nt, Artificial Sequence
  Description of Artificial Sequence: Synthetic oligonucleotide
  Sense strand starting at position 512 of SEQ ID NO: 1885913
gauuauguuuguccagaag

SEQ ID NO: 2376877 - RNA, 19 nt, Artificial Sequence
  Description of Artificial Sequence: Synthetic oligonucleotide
  Antisense strand to SEQ ID NO: 2376876
cuucuggacaaacauaauc

SEQ ID NO: 2376878 - RNA, 19 nt, Artificial Sequence
  Description of Artificial Sequence: Synthetic oligonucleotide
  Sense strand starting at position 813 of SEQ ID NO: 1885913
ccuuacuuugguggagaau

SEQ ID NO: 2376879 - RNA, 19 nt, Artificial Sequence
  Description of Artificial Sequence: Synthetic oligonucleotide
  Antisense strand to SEQ ID NO: 2376878
auucuccaccaaaguaagg

SEQ ID NO: 2376880 - RNA, 19 nt, Artificial Sequence
  Description of Artificial Sequence: Synthetic oligonucleotide
  Sense strand starting at position 853 of SEQ ID NO: 1885913
gaauguugcauggaaggua

SEQ ID NO: 2376881 - RNA, 19 nt, Artificial Sequence
  Description of Artificial Sequence: Synthetic oligonucleotide
  Antisense strand to SEQ ID NO: 2376880
uaccuuccaugcaacauuc

SEQ ID NO: 2376882 - RNA, 19 nt, Artificial Sequence
  Description of Artificial Sequence: Synthetic oligonucleotide
  Sense strand starting at position 865 of SEQ ID NO: 1885913
gaagguaacuuugugaaug

SEQ ID NO: 2376883 - RNA, 19 nt, Artificial Sequence
  Description of Artificial Sequence: Synthetic oligonucleotide
  Antisense strand to SEQ ID NO: 2376882
cauucacaaaguuaccuuc

SEQ ID NO: 2376884 - RNA, 19 nt, Artificial Sequence
  Description of Artificial Sequence: Synthetic oligonucleotide
  Sense strand starting at position 873 of SEQ ID NO: 1885913
cuuugugaauggguagaaa

SEQ ID NO: 2376885 - RNA, 19 nt, Artificial Sequence
  Description of Artificial Sequence: Synthetic oligonucleotide
  Antisense strand to SEQ ID NO: 2376884
uuucuacccauucacaaag

SEQ ID NO: 2376886 - RNA, 19 nt, Artificial Sequence
  Description of Artificial Sequence: Synthetic oligonucleotide
  Sense strand starting at position 902 of SEQ ID NO: 1885913
cugagaguugugcaaacau

SEQ ID NO: 2376887 - RNA, 19 nt, Artificial Sequence
  Description of Artificial Sequence: Synthetic oligonucleotide
  Antisense strand to SEQ ID NO: 2376886
auguuugcacaacucucag

SEQ ID NO: 2376888 - RNA, 19 nt, Artificial Sequence
  Description of Artificial Sequence: Synthetic oligonucleotide
  Sense strand starting at position 1269 of SEQ ID NO: 1885913
ucugaaggaucuuucuaau

SEQ ID NO: 2376889 - RNA, 19 nt, Artificial Sequence
  Description of Artificial Sequence: Synthetic oligonucleotide
  Antisense strand to SEQ ID NO: 2376888
auuagaaagauccuucaga

SEQ ID NO: 2376890 - RNA, 19 nt, Artificial Sequence
  Description of Artificial Sequence: Synthetic oligonucleotide
  Sense strand starting at position 1359 of SEQ ID NO: 1885913
ggaggaucuuaaccauagu

SEQ ID NO: 2376891 - RNA, 19 nt, Artificial Sequence
  Description of Artificial Sequence: Synthetic oligonucleotide
  Antisense strand to SEQ ID NO: 2376890
acuaugguuaagauccucc

SEQ ID NO: 2376892 - RNA, 19 nt, Artificial Sequence
  Description of Artificial Sequence: Synthetic oligonucleotide
  Sense strand starting at position 1362 of SEQ ID NO: 1885913
ggaucuuaaccauaguuuc

SEQ ID NO: 2376893 - RNA, 19 nt, Artificial Sequence
  Description of Artificial Sequence: Synthetic oligonucleotide
  Antisense strand to SEQ ID NO: 2376892
gaaacuaugguuaagaucc

SEQ ID NO: 2376894 - RNA, 19 nt, Artificial Sequence
  Description of Artificial Sequence: Synthetic oligonucleotide
  Sense strand starting at position 1507 of SEQ ID NO: 1885913
cucuaugggccucauauua

SEQ ID NO: 2376895 - RNA, 19 nt, Artificial Sequence
  Description of Artificial Sequence: Synthetic oligonucleotide
  Antisense strand to SEQ ID NO: 2376894
uaauaugaggcccauagag

SEQ ID NO: 2376896 - RNA, 19 nt, Artificial Sequence
  Description of Artificial Sequence: Synthetic oligonucleotide
  Sense strand starting at position 1562 of SEQ ID NO: 1885913
uuaguauuuccaggucuuu

SEQ ID NO: 2376897 - RNA, 19 nt, Artificial Sequence
  Description of Artificial Sequence: Synthetic oligonucleotide
  Antisense strand to SEQ ID NO: 2376896
aaagaccuggaaauacuaa

SEQ ID NO: 2376898 - RNA, 19 nt, Artificial Sequence
  Description of Artificial Sequence: Synthetic oligonucleotide
  Sense strand starting at position 1589 of SEQ ID NO: 1885913
gcuuguuaauuuccucaga

SEQ ID NO: 2376899 - RNA, 19 nt, Artificial Sequence
  Description of Artificial Sequence: Synthetic oligonucleotide
  Antisense strand to SEQ ID NO: 2376898
ucugaggaaauuaacaagc

SEQ ID NO: 2376900 - RNA, 19 nt, Artificial Sequence
  Description of Artificial Sequence: Synthetic oligonucleotide
  Sense strand starting at position 1594 of SEQ ID NO: 1885913
uuaauuuccucagauggaa

SEQ ID NO: 2376901 - RNA, 19 nt, Artificial Sequence
  Description of Artificial Sequence: Synthetic oligonucleotide
  Antisense strand to SEQ ID NO: 2376900
uuccaucugaggaaauuaa

SEQ ID NO: 2376902 - RNA, 19 nt, Artificial Sequence
  Description of Artificial Sequence: Synthetic oligonucleotide
  Sense strand starting at position 1720 of SEQ ID NO: 1885913
cacugaauccaggguuucu

SEQ ID NO: 2376903 - RNA, 19 nt, Artificial Sequence
  Description of Artificial Sequence: Synthetic oligonucleotide
  Antisense strand to SEQ ID NO: 2376902
agaaacccuggauucagug

SEQ ID NO: 2376904 - RNA, 19 nt, Artificial Sequence
  Description of Artificial Sequence: Synthetic oligonucleotide
  Sense strand starting at position 1740 of SEQ ID NO: 1885913
ugagucagccuccaaucaa

SEQ ID NO: 2376905 - RNA, 19 nt, Artificial Sequence
  Description of Artificial Sequence: Synthetic oligonucleotide
  Antisense strand to SEQ ID NO: 2376904
uugauuggaggcugacuca

SEQ ID NO: 2376906 - RNA, 19 nt, Artificial Sequence
  Description of Artificial Sequence: Synthetic oligonucleotide
  Sense strand starting at position 1879 of SEQ ID NO: 1885913
aaccuaugauggucugaga

SEQ ID NO: 2376907 - RNA, 19 nt, Artificial Sequence
  Description of Artificial Sequence: Synthetic oligonucleotide
  Antisense strand to SEQ ID NO: 2376906
ucucagaccaucauagguu

SEQ ID NO: 2376908 - RNA, 19 nt, Artificial Sequence
  Description of Artificial Sequence: Synthetic oligonucleotide
  Sense strand starting at position 1897 of SEQ ID NO: 1885913
auguuaccuuacuugaaag

SEQ ID NO: 2376909 - RNA, 19 nt, Artificial Sequence
  Description of Artificial Sequence: Synthetic oligonucleotide
  Antisense strand to SEQ ID NO: 2376908
cuuucaaguaagguaacau

SEQ ID NO: 2376910 - RNA, 19 nt, Artificial Sequence
  Description of Artificial Sequence: Synthetic oligonucleotide
  Sense strand starting at position 1959 of SEQ ID NO: 1885913
acaagagaugccuggguca

SEQ ID NO: 2376911 - RNA, 19 nt, Artificial Sequence
  Description of Artificial Sequence: Synthetic oligonucleotide
  Antisense strand to SEQ ID NO: 2376910
ugacccaggcaucucuugu

SEQ ID NO: 2376912 - RNA, 19 nt, Artificial Sequence
  Description of Artificial Sequence: Synthetic oligonucleotide
  Sense strand starting at position 1961 of SEQ ID NO: 1885913
aagagaugccugggucaga

SEQ ID NO: 2376913 - RNA, 19 nt, Artificial Sequence
  Description of Artificial Sequence: Synthetic oligonucleotide
  Antisense strand to SEQ ID NO: 2376912
ucugacccaggcaucucuu

SEQ ID NO: 2376914 - RNA, 19 nt, Artificial Sequence
  Description of Artificial Sequence: Synthetic oligonucleotide
  Sense strand starting at position 2204 of SEQ ID NO: 1885913
aguuaaauuugcuugccaa

SEQ ID NO: 2376915 - RNA, 19 nt, Artificial Sequence
  Description of Artificial Sequence: Synthetic oligonucleotide
  Antisense strand to SEQ ID NO: 2376914
uuggcaagcaaauuuaacu

SEQ ID NO: 2376916 - RNA, 19 nt, Artificial Sequence
  Description of Artificial Sequence: Synthetic oligonucleotide
  Sense strand starting at position 2205 of SEQ ID NO: 1885913
guuaaauuugcuugccaau

SEQ ID NO: 2376917 - RNA, 19 nt, Artificial Sequence
  Description of Artificial Sequence: Synthetic oligonucleotide
  Antisense strand to SEQ ID NO: 2376916
auuggcaagcaaauuuaac

SEQ ID NO: 2376918 - RNA, 19 nt, Artificial Sequence
  Description of Artificial Sequence: Synthetic oligonucleotide
  Sense strand starting at position 2395 of SEQ ID NO: 1885913
ugugguaugagguaggagu

SEQ ID NO: 2376919 - RNA, 19 nt, Artificial Sequence
  Description of Artificial Sequence: Synthetic oligonucleotide
  Antisense strand to SEQ ID NO: 2376918
acuccuaccucauaccaca

SEQ ID NO: 2376920 - RNA, 19 nt, Artificial Sequence
  Description of Artificial Sequence: Synthetic oligonucleotide
  Sense strand starting at position 2403 of SEQ ID NO: 1885913
gagguaggaguucaagguu

SEQ ID NO: 2376921 - RNA, 19 nt, Artificial Sequence
  Description of Artificial Sequence: Synthetic oligonucleotide
  Antisense strand to SEQ ID NO: 2376920
aaccuugaacuccuaccuc

SEQ ID NO: 2376922 - RNA, 19 nt, Artificial Sequence
  Description of Artificial Sequence: Synthetic oligonucleotide
  Sense strand starting at position 2485 of SEQ ID NO: 1885913
aaagcaugugcagaaucuu

SEQ ID NO: 2376923 - RNA, 19 nt, Artificial Sequence
  Description of Artificial Sequence: Synthetic oligonucleotide
  Antisense strand to SEQ ID NO: 2376922
aagauucugcacaugcuuu

SEQ ID NO: 2376924 - RNA, 19 nt, Artificial Sequence
  Description of Artificial Sequence: Synthetic oligonucleotide
  Sense strand starting at position 2639 of SEQ ID NO: 1885913
ccucccugucuuuaaggaa

SEQ ID NO: 2376925 - RNA, 19 nt, Artificial Sequence
  Description of Artificial Sequence: Synthetic oligonucleotide
  Antisense strand to SEQ ID NO: 2376924
uuccuuaaagacagggagg

SEQ ID NO: 2376926 - RNA, 19 nt, Artificial Sequence
  Description of Artificial Sequence: Synthetic oligonucleotide
  Sense strand starting at position 2859 of SEQ ID NO: 1885913
augacauauugaggaauuu

SEQ ID NO: 2376927 - RNA, 19 nt, Artificial Sequence
  Description of Artificial Sequence: Synthetic oligonucleotide
  Antisense strand to SEQ ID NO: 2376926
aaauuccucaauaugucau

SEQ ID NO: 2376928 - RNA, 19 nt, Artificial Sequence
  Description of Artificial Sequence: Synthetic oligonucleotide
  Sense strand starting at position 2957 of SEQ ID NO: 1885913
gaguguagcauuugguacu

SEQ ID NO: 2376929 - RNA, 19 nt, Artificial Sequence
  Description of Artificial Sequence: Synthetic oligonucleotide
  Antisense strand to SEQ ID NO: 2376928
aguaccaaaugcuacacuc

SEQ ID NO: 2376930 - RNA, 19 nt, Artificial Sequence
  Description of Artificial Sequence: Synthetic oligonucleotide
  Sense strand starting at position 3049 of SEQ ID NO: 1885913
agguauugacaugguaaag

SEQ ID NO: 2376931 - RNA, 19 nt, Artificial Sequence
  Description of Artificial Sequence: Synthetic oligonucleotide
  Antisense strand to SEQ ID NO: 2376930
cuuuaccaugucaauaccu

SEQ ID NO: 2376932 - RNA, 19 nt, Artificial Sequence
  Description of Artificial Sequence: Synthetic oligonucleotide
  Sense strand starting at position 3081 of SEQ ID NO: 1885913
ggccuucuuagauaugggu

SEQ ID NO: 2376933 - RNA, 19 nt, Artificial Sequence
  Description of Artificial Sequence: Synthetic oligonucleotide
  Antisense strand to SEQ ID NO: 2376932
acccauaucuaagaaggcc

SEQ ID NO: 2376934 - RNA, 19 nt, Artificial Sequence
  Description of Artificial Sequence: Synthetic oligonucleotide
  Sense strand starting at position 3089 of SEQ ID NO: 1885913
uagauaugggucuguacaa

SEQ ID NO: 2376935 - RNA, 19 nt, Artificial Sequence
  Description of Artificial Sequence: Synthetic oligonucleotide
  Antisense strand to SEQ ID NO: 2376934
uuguacagacccauaucua

SEQ ID NO: 2376936 - RNA, 19 nt, Artificial Sequence
  Description of Artificial Sequence: Synthetic oligonucleotide
  Sense strand starting at position 3090 of SEQ ID NO: 1885913
agauaugggucuguacaaa

SEQ ID NO: 2376937 - RNA, 19 nt, Artificial Sequence
  Description of Artificial Sequence: Synthetic oligonucleotide
  Antisense strand to SEQ ID NO: 2376936
uuuguacagacccauaucu

SEQ ID NO: 2376938 - RNA, 19 nt, Artificial Sequence
  Description of Artificial Sequence: Synthetic oligonucleotide
  Sense strand starting at position 3242 of SEQ ID NO: 1885913
aauggauaucaaugguauc

SEQ ID NO: 2376939 - RNA, 19 nt, Artificial Sequence
  Description of Artificial Sequence: Synthetic oligonucleotide
  Antisense strand to SEQ ID NO: 2376938
gauaccauugauauccauu

SEQ ID NO: 2376940 - RNA, 19 nt, Artificial Sequence
  Description of Artificial Sequence: Synthetic oligonucleotide
  Sense strand starting at position 3406 of SEQ ID NO: 1885913
ccuagauauagcugaugag

SEQ ID NO: 2376941 - RNA, 19 nt, Artificial Sequence
  Description of Artificial Sequence: Synthetic oligonucleotide
  Antisense strand to SEQ ID NO: 2376940
cucaucagcuauaucuagg

SEQ ID NO: 2376942 - RNA, 19 nt, Artificial Sequence
  Description of Artificial Sequence: Synthetic oligonucleotide
  Sense strand starting at position 3430 of SEQ ID NO: 1885913
gaaacauuggcaggaggua

SEQ ID NO: 2376943 - RNA, 19 nt, Artificial Sequence
  Description of Artificial Sequence: Synthetic oligonucleotide
  Antisense strand to SEQ ID NO: 2376942
uaccuccugccaauguuuc

SEQ ID NO: 2376944 - RNA, 19 nt, Artificial Sequence
  Description of Artificial Sequence: Synthetic oligonucleotide
  Sense strand starting at position 3808 of SEQ ID NO: 1885913
ccagaugaacucugcugaa

SEQ ID NO: 2376945 - RNA, 19 nt, Artificial Sequence
  Description of Artificial Sequence: Synthetic oligonucleotide
  Antisense strand to SEQ ID NO: 2376944
uucagcagaguucaucugg

SEQ ID NO: 2376946 - RNA, 19 nt, Artificial Sequence
  Description of Artificial Sequence: Synthetic oligonucleotide
  Sense strand starting at position 59 of SEQ ID NO: 1885914
ucugcaaaucaugagcaga

SEQ ID NO: 2376947 - RNA, 19 nt, Artificial Sequence
  Description of Artificial Sequence: Synthetic oligonucleotide
  Antisense strand to SEQ ID NO: 2376946
ucugcucaugauuugcaga

SEQ ID NO: 2376948 - RNA, 19 nt, Artificial Sequence
  Description of Artificial Sequence: Synthetic oligonucleotide
  Sense strand starting at position 183 of SEQ ID NO: 1885914
cccugaguucuccagucca

SEQ ID NO: 2376949 - RNA, 19 nt, Artificial Sequence
  Description of Artificial Sequence: Synthetic oligonucleotide
  Antisense strand to SEQ ID NO: 2376948
uggacuggagaacucaggg

SEQ ID NO: 2376950 - RNA, 19 nt, Artificial Sequence
  Description of Artificial Sequence: Synthetic oligonucleotide
  Sense strand starting at position 252 of SEQ ID NO: 1885914
caauguguccgacagcaaa

SEQ ID NO: 2376951 - RNA, 19 nt, Artificial Sequence
  Description of Artificial Sequence: Synthetic oligonucleotide
  Antisense strand to SEQ ID NO: 2376950
uuugcugucggacacauug

SEQ ID NO: 2376952 - RNA, 19 nt, Artificial Sequence
  Description of Artificial Sequence: Synthetic oligonucleotide
  Sense strand starting at position 296 of SEQ ID NO: 1885914
aaaggaaacguuugaccca

SEQ ID NO: 2376953 - RNA, 19 nt, Artificial Sequence
  Description of Artificial Sequence: Synthetic oligonucleotide
  Antisense strand to SEQ ID NO: 2376952
ugggucaaacguuuccuuu

SEQ ID NO: 2376954 - RNA, 19 nt, Artificial Sequence
  Description of Artificial Sequence: Synthetic oligonucleotide
  Sense strand starting at position 333 of SEQ ID NO: 1885914
uuuguauacuagucacauu

SEQ ID NO: 2376955 - RNA, 19 nt, Artificial Sequence
  Description of Artificial Sequence: Synthetic oligonucleotide
  Antisense strand to SEQ ID NO: 2376954
aaugugacuaguauacaaa

SEQ ID NO: 2376956 - RNA, 19 nt, Artificial Sequence
  Description of Artificial Sequence: Synthetic oligonucleotide
  Sense strand starting at position 336 of SEQ ID NO: 1885914
guauacuagucacauuugu

SEQ ID NO: 2376957 - RNA, 19 nt, Artificial Sequence
  Description of Artificial Sequence: Synthetic oligonucleotide
  Antisense strand to SEQ ID NO: 2376956
acaaaugugacuaguauac

SEQ ID NO: 2376958 - RNA, 19 nt, Artificial Sequence
  Description of Artificial Sequence: Synthetic oligonucleotide
  Sense strand starting at position 353 of SEQ ID NO: 1885914
guaucaacccaccguauua

SEQ ID NO: 2376959 - RNA, 19 nt, Artificial Sequence
  Description of Artificial Sequence: Synthetic oligonucleotide
  Antisense strand to SEQ ID NO: 2376958
uaauacgguggguugauac

SEQ ID NO: 2376960 - RNA, 19 nt, Artificial Sequence
  Description of Artificial Sequence: Synthetic oligonucleotide
  Sense strand starting at position 434 of SEQ ID NO: 1885914
caugcagucuggucacaca

SEQ ID NO: 2376961 - RNA, 19 nt, Artificial Sequence
  Description of Artificial Sequence: Synthetic oligonucleotide
  Antisense strand to SEQ ID NO: 2376960
ugugugaccagacugcaug

SEQ ID NO: 2376962 - RNA, 19 nt, Artificial Sequence
  Description of Artificial Sequence: Synthetic oligonucleotide
  Sense strand starting at position 573 of SEQ ID NO: 1885914
ccaggacugugguuggaaa

SEQ ID NO: 2376963 - RNA, 19 nt, Artificial Sequence
  Description of Artificial Sequence: Synthetic oligonucleotide
  Antisense strand to SEQ ID NO: 2376962
uuuccaaccacaguccugg

SEQ ID NO: 2376964 - RNA, 19 nt, Artificial Sequence
  Description of Artificial Sequence: Synthetic oligonucleotide
  Sense strand starting at position 607 of SEQ ID NO: 1885914
uguagaucuuacucuauga

SEQ ID NO: 2376965 - RNA, 19 nt, Artificial Sequence
  Description of Artificial Sequence: Synthetic oligonucleotide
  Antisense strand to SEQ ID NO: 2376964
ucauagaguaagaucuaca

SEQ ID NO: 2376966 - RNA, 19 nt, Artificial Sequence
  Description of Artificial Sequence: Synthetic oligonucleotide
  Sense strand starting at position 623 of SEQ ID NO: 1885914
ugaugcuaaugauuggaca

SEQ ID NO: 2376967 - RNA, 19 nt, Artificial Sequence
  Description of Artificial Sequence: Synthetic oligonucleotide
  Antisense strand to SEQ ID NO: 2376966
uguccaaucauuagcauca

SEQ ID NO: 2376968 - RNA, 19 nt, Artificial Sequence
  Description of Artificial Sequence: Synthetic oligonucleotide
  Sense strand starting at position 624 of SEQ ID NO: 1885914
gaugcuaaugauuggacaa

SEQ ID NO: 2376969 - RNA, 19 nt, Artificial Sequence
  Description of Artificial Sequence: Synthetic oligonucleotide
  Antisense strand to SEQ ID NO: 2376968
uuguccaaucauuagcauc

SEQ ID NO: 2376970 - RNA, 19 nt, Artificial Sequence
  Description of Artificial Sequence: Synthetic oligonucleotide
  Sense strand starting at position 1253 of SEQ ID NO: 1885914
agaagaaagugguuuacau

SEQ ID NO: 2376971 - RNA, 19 nt, Artificial Sequence
  Description of Artificial Sequence: Synthetic oligonucleotide
  Antisense strand to SEQ ID NO: 2376970
auguaaaccacuuucuucu

SEQ ID NO: 2376972 - RNA, 19 nt, Artificial Sequence
  Description of Artificial Sequence: Synthetic oligonucleotide
  Sense strand starting at position 1520 of SEQ ID NO: 1885914
gccaauaaacucggcuuga

SEQ ID NO: 2376973 - RNA, 19 nt, Artificial Sequence
  Description of Artificial Sequence: Synthetic oligonucleotide
  Antisense strand to SEQ ID NO: 2376972
ucaagccgaguuuauuggc

SEQ ID NO: 2376974 - RNA, 19 nt, Artificial Sequence
  Description of Artificial Sequence: Synthetic oligonucleotide
  Sense strand starting at position 1524 of SEQ ID NO: 1885914
auaaacucggcuugacaga

SEQ ID NO: 2376975 - RNA, 19 nt, Artificial Sequence
  Description of Artificial Sequence: Synthetic oligonucleotide
  Antisense strand to SEQ ID NO: 2376974
ucugucaagccgaguuuau

SEQ ID NO: 2376976 - RNA, 19 nt, Artificial Sequence
  Description of Artificial Sequence: Synthetic oligonucleotide
  Sense strand starting at position 2493 of SEQ ID NO: 1885914
ggugaugacuaagcuaaga

SEQ ID NO: 2376977 - RNA, 19 nt, Artificial Sequence
  Description of Artificial Sequence: Synthetic oligonucleotide
  Antisense strand to SEQ ID NO: 2376976
ucuuagcuuagucaucacc

SEQ ID NO: 2376978 - RNA, 19 nt, Artificial Sequence
  Description of Artificial Sequence: Synthetic oligonucleotide
  Sense strand starting at position 2513 of SEQ ID NO: 1885914
cugaaaugcaaguaggagu

SEQ ID NO: 2376979 - RNA, 19 nt, Artificial Sequence
  Description of Artificial Sequence: Synthetic oligonucleotide
  Antisense strand to SEQ ID NO: 2376978
acuccuacuugcauuucag

SEQ ID NO: 2376980 - RNA, 19 nt, Artificial Sequence
  Description of Artificial Sequence: Synthetic oligonucleotide
  Sense strand starting at position 2632 of SEQ ID NO: 1885914
gagucacuguuguuaccuu

SEQ ID NO: 2376981 - RNA, 19 nt, Artificial Sequence
  Description of Artificial Sequence: Synthetic oligonucleotide
  Antisense strand to SEQ ID NO: 2376980
aagguaacaacagugacuc

SEQ ID NO: 2376982 - RNA, 19 nt, Artificial Sequence
  Description of Artificial Sequence: Synthetic oligonucleotide
  Sense strand starting at position 2675 of SEQ ID NO: 1885914
cgcugacucaccuagggau

SEQ ID NO: 2376983 - RNA, 19 nt, Artificial Sequence
  Description of Artificial Sequence: Synthetic oligonucleotide
  Antisense strand to SEQ ID NO: 2376982
aucccuaggugagucagcg

SEQ ID NO: 2376984 - RNA, 19 nt, Artificial Sequence
  Description of Artificial Sequence: Synthetic oligonucleotide
  Sense strand starting at position 2682 of SEQ ID NO: 1885914
ucaccuagggauugagcaa

SEQ ID NO: 2376985 - RNA, 19 nt, Artificial Sequence
  Description of Artificial Sequence: Synthetic oligonucleotide
  Antisense strand to SEQ ID NO: 2376984
uugcucaaucccuagguga

SEQ ID NO: 2376986 - RNA, 19 nt, Artificial Sequence
  Description of Artificial Sequence: Synthetic oligonucleotide
  Sense strand starting at position 2808 of SEQ ID NO: 1885914
gagggagucccaggucaaa

SEQ ID NO: 2376987 - RNA, 19 nt, Artificial Sequence
  Description of Artificial Sequence: Synthetic oligonucleotide
  Antisense strand to SEQ ID NO: 2376986
uuugaccugggacucccuc

SEQ ID NO: 2376988 - RNA, 19 nt, Artificial Sequence
  Description of Artificial Sequence: Synthetic oligonucleotide
  Sense strand starting at position 2952 of SEQ ID NO: 1885914
ugaggaaccugugugcuua

SEQ ID NO: 2376989 - RNA, 19 nt, Artificial Sequence
  Description of Artificial Sequence: Synthetic oligonucleotide
  Antisense strand to SEQ ID NO: 2376988
uaagcacacagguuccuca

SEQ ID NO: 2376990 - RNA, 19 nt, Artificial Sequence
  Description of Artificial Sequence: Synthetic oligonucleotide
  Sense strand starting at position 2960 of SEQ ID NO: 1885914
cugugugcuuagcuggaaa

SEQ ID NO: 2376991 - RNA, 19 nt, Artificial Sequence
  Description of Artificial Sequence: Synthetic oligonucleotide
  Antisense strand to SEQ ID NO: 2376990
uuuccagcuaagcacacag

SEQ ID NO: 2376992 - RNA, 19 nt, Artificial Sequence
  Description of Artificial Sequence: Synthetic oligonucleotide
  Sense strand starting at position 2982 of SEQ ID NO: 1885914
ggccuuuaucuugaggaca

SEQ ID NO: 2376993 - RNA, 19 nt, Artificial Sequence
  Description of Artificial Sequence: Synthetic oligonucleotide
  Antisense strand to SEQ ID NO: 2376992
uguccucaagauaaaggcc

SEQ ID NO: 2376994 - RNA, 19 nt, Artificial Sequence
  Description of Artificial Sequence: Synthetic oligonucleotide
  Sense strand starting at position 3098 of SEQ ID NO: 1885914
acgcaugcucaggaacuua

SEQ ID NO: 2376995 - RNA, 19 nt, Artificial Sequence
  Description of Artificial Sequence: Synthetic oligonucleotide
  Antisense strand to SEQ ID NO: 2376994
uaaguuccugagcaugcgu

SEQ ID NO: 2376996 - RNA, 19 nt, Artificial Sequence
  Description of Artificial Sequence: Synthetic oligonucleotide
  Sense strand starting at position 3127 of SEQ ID NO: 1885914
gggacccugucuucuguua

SEQ ID NO: 2376997 - RNA, 19 nt, Artificial Sequence
  Description of Artificial Sequence: Synthetic oligonucleotide
  Antisense strand to SEQ ID NO: 2376996
uaacagaagacaggguccc

SEQ ID NO: 2376998 - RNA, 19 nt, Artificial Sequence
  Description of Artificial Sequence: Synthetic oligonucleotide
  Sense strand starting at position 3140 of SEQ ID NO: 1885914
cuguuagaguuaucuaugu

SEQ ID NO: 2376999 - RNA, 19 nt, Artificial Sequence
  Description of Artificial Sequence: Synthetic oligonucleotide
  Antisense strand to SEQ ID NO: 2376998
acauagauaacucuaacag

SEQ ID NO: 2377000 - RNA, 19 nt, Artificial Sequence
  Description of Artificial Sequence: Synthetic oligonucleotide
  Sense strand starting at position 3142 of SEQ ID NO: 1885914
guuagaguuaucuaugugu

SEQ ID NO: 2377001 - RNA, 19 nt, Artificial Sequence
  Description of Artificial Sequence: Synthetic oligonucleotide
  Antisense strand to SEQ ID NO: 2377000
acacauagauaacucuaac

SEQ ID NO: 2377002 - RNA, 19 nt, Artificial Sequence
  Description of Artificial Sequence: Synthetic oligonucleotide
  Sense strand starting at position 3144 of SEQ ID NO: 1885914
uagaguuaucuaugugugu

SEQ ID NO: 2377003 - RNA, 19 nt, Artificial Sequence
  Description of Artificial Sequence: Synthetic oligonucleotide
  Antisense strand to SEQ ID NO: 2377002
acacacauagauaacucua

SEQ ID NO: 2377004 - RNA, 19 nt, Artificial Sequence
  Description of Artificial Sequence: Synthetic oligonucleotide
  Sense strand starting at position 3323 of SEQ ID NO: 1885914
gguguauacaagugacuuu

SEQ ID NO: 2377005 - RNA, 19 nt, Artificial Sequence
  Description of Artificial Sequence: Synthetic oligonucleotide
  Antisense strand to SEQ ID NO: 2377004
aaagucacuuguauacacc

SEQ ID NO: 2377006 - RNA, 19 nt, Artificial Sequence
  Description of Artificial Sequence: Synthetic oligonucleotide
  Sense strand starting at position 3330 of SEQ ID NO: 1885914
acaagugacuuucccaaag

SEQ ID NO: 2377007 - RNA, 19 nt, Artificial Sequence
  Description of Artificial Sequence: Synthetic oligonucleotide
  Antisense strand to SEQ ID NO: 2377006
cuuugggaaagucacuugu

SEQ ID NO: 2377008 - RNA, 19 nt, Artificial Sequence
  Description of Artificial Sequence: Synthetic oligonucleotide
  Sense strand starting at position 3506 of SEQ ID NO: 1885914
cagagacauuagguuaauu

SEQ ID NO: 2377009 - RNA, 19 nt, Artificial Sequence
  Description of Artificial Sequence: Synthetic oligonucleotide
  Antisense strand to SEQ ID NO: 2377008
aauuaaccuaaugucucug

SEQ ID NO: 2377010 - RNA, 19 nt, Artificial Sequence
  Description of Artificial Sequence: Synthetic oligonucleotide
  Sense strand starting at position 3514 of SEQ ID NO: 1885914
uuagguuaauuggugaaca

SEQ ID NO: 2377011 - RNA, 19 nt, Artificial Sequence
  Description of Artificial Sequence: Synthetic oligonucleotide
  Antisense strand to SEQ ID NO: 2377010
uguucaccaauuaaccuaa

SEQ ID NO: 2377012 - RNA, 19 nt, Artificial Sequence
  Description of Artificial Sequence: Synthetic oligonucleotide
  Sense strand starting at position 3548 of SEQ ID NO: 1885914
cuagucuucuaacccaagu

SEQ ID NO: 2377013 - RNA, 19 nt, Artificial Sequence
  Description of Artificial Sequence: Synthetic oligonucleotide
  Antisense strand to SEQ ID NO: 2377012
acuuggguuagaagacuag

SEQ ID NO: 2377014 - RNA, 19 nt, Artificial Sequence
  Description of Artificial Sequence: Synthetic oligonucleotide
  Sense strand starting at position 3784 of SEQ ID NO: 1885914
gcuggaucuuguuuacauc

SEQ ID NO: 2377015 - RNA, 19 nt, Artificial Sequence
  Description of Artificial Sequence: Synthetic oligonucleotide
  Antisense strand to SEQ ID NO: 2377014
gauguaaacaagauccagc

SEQ ID NO: 2377016 - RNA, 19 nt, Artificial Sequence
  Description of Artificial Sequence: Synthetic oligonucleotide
  Sense strand starting at position 3815 of SEQ ID NO: 1885914
auaucuagagcagguaauu

SEQ ID NO: 2377017 - RNA, 19 nt, Artificial Sequence
  Description of Artificial Sequence: Synthetic oligonucleotide
  Antisense strand to SEQ ID NO: 2377016
aauuaccugcucuagauau

SEQ ID NO: 2377018 - RNA, 19 nt, Artificial Sequence
  Description of Artificial Sequence: Synthetic oligonucleotide
  Sense strand starting at position 3826 of SEQ ID NO: 1885914
agguaauugacguguggua

SEQ ID NO: 2377019 - RNA, 19 nt, Artificial Sequence
  Description of Artificial Sequence: Synthetic oligonucleotide
  Antisense strand to SEQ ID NO: 2377018
uaccacacgucaauuaccu

SEQ ID NO: 2377020 - RNA, 19 nt, Artificial Sequence
  Description of Artificial Sequence: Synthetic oligonucleotide
  Sense strand starting at position 3835 of SEQ ID NO: 1885914
acgugugguagugcaagua

SEQ ID NO: 2377021 - RNA, 19 nt, Artificial Sequence
  Description of Artificial Sequence: Synthetic oligonucleotide
  Antisense strand to SEQ ID NO: 2377020
uacuugcacuaccacacgu

SEQ ID NO: 2377022 - RNA, 19 nt, Artificial Sequence
  Description of Artificial Sequence: Synthetic oligonucleotide
  Sense strand starting at position 3869 of SEQ ID NO: 1885914
aagaaauguuauuacagag

SEQ ID NO: 2377023 - RNA, 19 nt, Artificial Sequence
  Description of Artificial Sequence: Synthetic oligonucleotide
  Antisense strand to SEQ ID NO: 2377022
cucuguaauaacauuucuu

SEQ ID NO: 2377024 - RNA, 19 nt, Artificial Sequence
  Description of Artificial Sequence: Synthetic oligonucleotide
  Sense strand starting at position 3898 of SEQ ID NO: 1885914
acucacucauggucaugaa

SEQ ID NO: 2377025 - RNA, 19 nt, Artificial Sequence
  Description of Artificial Sequence: Synthetic oligonucleotide
  Antisense strand to SEQ ID NO: 2377024
uucaugaccaugagugagu

SEQ ID NO: 2377026 - RNA, 19 nt, Artificial Sequence
  Description of Artificial Sequence: Synthetic oligonucleotide
  Sense strand starting at position 766 of SEQ ID NO: 1885915
gcaauaaauucuccaacga

SEQ ID NO: 2377027 - RNA, 19 nt, Artificial Sequence
  Description of Artificial Sequence: Synthetic oligonucleotide
  Antisense strand to SEQ ID NO: 2377026
ucguuggagaauuuauugc

SEQ ID NO: 2377028 - RNA, 19 nt, Artificial Sequence
  Description of Artificial Sequence: Synthetic oligonucleotide
  Sense strand starting at position 2751 of SEQ ID NO: 1885915
aauaguaguugacagugau

SEQ ID NO: 2377029 - RNA, 19 nt, Artificial Sequence
  Description of Artificial Sequence: Synthetic oligonucleotide
  Antisense strand to SEQ ID NO: 2377028
aucacugucaacuacuauu

SEQ ID NO: 2377030 - RNA, 19 nt, Artificial Sequence
  Description of Artificial Sequence: Synthetic oligonucleotide
  Sense strand starting at position 2754 of SEQ ID NO: 1885915
aguaguugacagugauuga

SEQ ID NO: 2377031 - RNA, 19 nt, Artificial Sequence
  Description of Artificial Sequence: Synthetic oligonucleotide
  Antisense strand to SEQ ID NO: 2377030
ucaaucacugucaacuacu

SEQ ID NO: 2377032 - RNA, 19 nt, Artificial Sequence
  Description of Artificial Sequence: Synthetic oligonucleotide
  Sense strand starting at position 2755 of SEQ ID NO: 1885915
guaguugacagugauugaa

SEQ ID NO: 2377033 - RNA, 19 nt, Artificial Sequence
  Description of Artificial Sequence: Synthetic oligonucleotide
  Antisense strand to SEQ ID NO: 2377032
uucaaucacugucaacuac

SEQ ID NO: 2377034 - RNA, 19 nt, Artificial Sequence
  Description of Artificial Sequence: Synthetic oligonucleotide
  Sense strand starting at position 1324 of SEQ ID NO: 1885917
gcgcgauguccgagucgcu

SEQ ID NO: 2377035 - RNA, 19 nt, Artificial Sequence
  Description of Artificial Sequence: Synthetic oligonucleotide
  Antisense strand to SEQ ID NO: 2377034
agcgacucggacaucgcgc

SEQ ID NO: 2377036 - RNA, 19 nt, Artificial Sequence
  Description of Artificial Sequence: Synthetic oligonucleotide
  Sense strand starting at position 2403 of SEQ ID NO: 1885918
gcacaagaauuacaaguau

SEQ ID NO: 2377037 - RNA, 19 nt, Artificial Sequence
  Description of Artificial Sequence: Synthetic oligonucleotide
  Antisense strand to SEQ ID NO: 2377036
auacuuguaauucuugugc

SEQ ID NO: 2377038 - RNA, 19 nt, Artificial Sequence
  Description of Artificial Sequence: Synthetic oligonucleotide
  Sense strand starting at position 2465 of SEQ ID NO: 1885918
agcauucuugaugauuaau

SEQ ID NO: 2377039 - RNA, 19 nt, Artificial Sequence
  Description of Artificial Sequence: Synthetic oligonucleotide
  Antisense strand to SEQ ID NO: 2377038
auuaaucaucaagaaugcu

SEQ ID NO: 2377040 - RNA, 19 nt, Artificial Sequence
  Description of Artificial Sequence: Synthetic oligonucleotide
  Sense strand starting at position 2998 of SEQ ID NO: 1885918
agcucuuuauugguuuaaa

SEQ ID NO: 2377041 - RNA, 19 nt, Artificial Sequence
  Description of Artificial Sequence: Synthetic oligonucleotide
  Antisense strand to SEQ ID NO: 2377040
uuuaaaccaauaaagagcu

SEQ ID NO: 2377042 - RNA, 19 nt, Artificial Sequence
  Description of Artificial Sequence: Synthetic oligonucleotide
  Sense strand starting at position 3053 of SEQ ID NO: 1885918
cucucuaggccuugcaaau

SEQ ID NO: 2377043 - RNA, 19 nt, Artificial Sequence
  Description of Artificial Sequence: Synthetic oligonucleotide
  Antisense strand to SEQ ID NO: 2377042
auuugcaaggccuagagag

SEQ ID NO: 2377044 - RNA, 19 nt, Artificial Sequence
  Description of Artificial Sequence: Synthetic oligonucleotide
  Sense strand starting at position 3098 of SEQ ID NO: 1885918
ggcuaugacuugcagucau

SEQ ID NO: 2377045 - RNA, 19 nt, Artificial Sequence
  Description of Artificial Sequence: Synthetic oligonucleotide
  Antisense strand to SEQ ID NO: 2377044
augacugcaagucauagcc

SEQ ID NO: 2377046 - RNA, 19 nt, Artificial Sequence
  Description of Artificial Sequence: Synthetic oligonucleotide
  Sense strand starting at position 3602 of SEQ ID NO: 1885918
uuguaugaguuccauaaga

SEQ ID NO: 2377047 - RNA, 19 nt, Artificial Sequence
  Description of Artificial Sequence: Synthetic oligonucleotide
  Antisense strand to SEQ ID NO: 2377046
ucuuauggaacucauacaa

SEQ ID NO: 2377048 - RNA, 19 nt, Artificial Sequence
  Description of Artificial Sequence: Synthetic oligonucleotide
  Sense strand starting at position 3923 of SEQ ID NO: 1885918
accagaauacgccauucuu

SEQ ID NO: 2377049 - RNA, 19 nt, Artificial Sequence
  Description of Artificial Sequence: Synthetic oligonucleotide
  Antisense strand to SEQ ID NO: 2377048
aagaauggcguauucuggu

SEQ ID NO: 2377050 - RNA, 19 nt, Artificial Sequence
  Description of Artificial Sequence: Synthetic oligonucleotide
  Sense strand starting at position 208 of SEQ ID NO: 1885919
gcccaaagagcucgagcaa

SEQ ID NO: 2377051 - RNA, 19 nt, Artificial Sequence
  Description of Artificial Sequence: Synthetic oligonucleotide
  Antisense strand to SEQ ID NO: 2377050
uugcucgagcucuuugggc

SEQ ID NO: 2377052 - RNA, 19 nt, Artificial Sequence
  Description of Artificial Sequence: Synthetic oligonucleotide
  Sense strand starting at position 209 of SEQ ID NO: 1885919
cccaaagagcucgagcaau

SEQ ID NO: 2377053 - RNA, 19 nt, Artificial Sequence
  Description of Artificial Sequence: Synthetic oligonucleotide
  Antisense strand to SEQ ID NO: 2377052
auugcucgagcucuuuggg

SEQ ID NO: 2377054 - RNA, 19 nt, Artificial Sequence
  Description of Artificial Sequence: Synthetic oligonucleotide
  Sense strand starting at position 300 of SEQ ID NO: 1885919
agcaguucuuccuuccaca

SEQ ID NO: 2377055 - RNA, 19 nt, Artificial Sequence
  Description of Artificial Sequence: Synthetic oligonucleotide
  Antisense strand to SEQ ID NO: 2377054
uguggaaggaagaacugcu

SEQ ID NO: 2377056 - RNA, 19 nt, Artificial Sequence
  Description of Artificial Sequence: Synthetic oligonucleotide
  Sense strand starting at position 427 of SEQ ID NO: 1885919
caggguuagcgccaugauu

SEQ ID NO: 2377057 - RNA, 19 nt, Artificial Sequence
  Description of Artificial Sequence: Synthetic oligonucleotide
  Antisense strand to SEQ ID NO: 2377056
aaucauggcgcuaacccug

SEQ ID NO: 2377058 - RNA, 19 nt, Artificial Sequence
  Description of Artificial Sequence: Synthetic oligonucleotide
  Sense strand starting at position 429 of SEQ ID NO: 1885919
ggguuagcgccaugauuua

SEQ ID NO: 2377059 - RNA, 19 nt, Artificial Sequence
  Description of Artificial Sequence: Synthetic oligonucleotide
  Antisense strand to SEQ ID NO: 2377058
uaaaucauggcgcuaaccc

SEQ ID NO: 2377060 - RNA, 19 nt, Artificial Sequence
  Description of Artificial Sequence: Synthetic oligonucleotide
  Sense strand starting at position 498 of SEQ ID NO: 1885919
cacugaugauagucuguaa

SEQ ID NO: 2377061 - RNA, 19 nt, Artificial Sequence
  Description of Artificial Sequence: Synthetic oligonucleotide
  Antisense strand to SEQ ID NO: 2377060
uuacagacuaucaucagug

SEQ ID NO: 2377062 - RNA, 19 nt, Artificial Sequence
  Description of Artificial Sequence: Synthetic oligonucleotide
  Sense strand starting at position 501 of SEQ ID NO: 1885919
ugaugauagucuguaaacu

SEQ ID NO: 2377063 - RNA, 19 nt, Artificial Sequence
  Description of Artificial Sequence: Synthetic oligonucleotide
  Antisense strand to SEQ ID NO: 2377062
aguuuacagacuaucauca

SEQ ID NO: 2377064 - RNA, 19 nt, Artificial Sequence
  Description of Artificial Sequence: Synthetic oligonucleotide
  Sense strand starting at position 953 of SEQ ID NO: 1885919
cuuugaaaucuaugugacu

SEQ ID NO: 2377065 - RNA, 19 nt, Artificial Sequence
  Description of Artificial Sequence: Synthetic oligonucleotide
  Antisense strand to SEQ ID NO: 2377064
agucacauagauuucaaag

SEQ ID NO: 2377066 - RNA, 19 nt, Artificial Sequence
  Description of Artificial Sequence: Synthetic oligonucleotide
  Sense strand starting at position 954 of SEQ ID NO: 1885919
uuugaaaucuaugugacua

SEQ ID NO: 2377067 - RNA, 19 nt, Artificial Sequence
  Description of Artificial Sequence: Synthetic oligonucleotide
  Antisense strand to SEQ ID NO: 2377066
uagucacauagauuucaaa

SEQ ID NO: 2377068 - RNA, 19 nt, Artificial Sequence
  Description of Artificial Sequence: Synthetic oligonucleotide
  Sense strand starting at position 956 of SEQ ID NO: 1885919
ugaaaucuaugugacuauc

SEQ ID NO: 2377069 - RNA, 19 nt, Artificial Sequence
  Description of Artificial Sequence: Synthetic oligonucleotide
  Antisense strand to SEQ ID NO: 2377068
gauagucacauagauuuca

SEQ ID NO: 2377070 - RNA, 19 nt, Artificial Sequence
  Description of Artificial Sequence: Synthetic oligonucleotide
  Sense strand starting at position 996 of SEQ ID NO: 1885919
uugugucucccacgagaau

SEQ ID NO: 2377071 - RNA, 19 nt, Artificial Sequence
  Description of Artificial Sequence: Synthetic oligonucleotide
  Antisense strand to SEQ ID NO: 2377070
auucucgugggagacacaa

SEQ ID NO: 2377072 - RNA, 19 nt, Artificial Sequence
  Description of Artificial Sequence: Synthetic oligonucleotide
  Sense strand starting at position 1802 of SEQ ID NO: 1885919
gcugcaauccgaugcguuu

SEQ ID NO: 2377073 - RNA, 19 nt, Artificial Sequence
  Description of Artificial Sequence: Synthetic oligonucleotide
  Antisense strand to SEQ ID NO: 2377072
aaacgcaucggauugcagc

SEQ ID NO: 2377074 - RNA, 19 nt, Artificial Sequence
  Description of Artificial Sequence: Synthetic oligonucleotide
  Sense strand starting at position 2282 of SEQ ID NO: 1885919
uuaauugaucauugggugu

SEQ ID NO: 2377075 - RNA, 19 nt, Artificial Sequence
  Description of Artificial Sequence: Synthetic oligonucleotide
  Antisense strand to SEQ ID NO: 2377074
acacccaaugaucaauuaa

SEQ ID NO: 2377076 - RNA, 19 nt, Artificial Sequence
  Description of Artificial Sequence: Synthetic oligonucleotide
  Sense strand starting at position 2284 of SEQ ID NO: 1885919
aauugaucauuggguguuu

SEQ ID NO: 2377077 - RNA, 19 nt, Artificial Sequence
  Description of Artificial Sequence: Synthetic oligonucleotide
  Antisense strand to SEQ ID NO: 2377076
aaacacccaaugaucaauu

SEQ ID NO: 2377078 - RNA, 19 nt, Artificial Sequence
  Description of Artificial Sequence: Synthetic oligonucleotide
  Sense strand starting at position 29 of SEQ ID NO: 1885920
aguuuagaguuacuuaaga

SEQ ID NO: 2377079 - RNA, 19 nt, Artificial Sequence
  Description of Artificial Sequence: Synthetic oligonucleotide
  Antisense strand to SEQ ID NO: 2377078
ucuuaaguaacucuaaacu

SEQ ID NO: 2377080 - RNA, 19 nt, Artificial Sequence
  Description of Artificial Sequence: Synthetic oligonucleotide
  Sense strand starting at position 34 of SEQ ID NO: 1885920
agaguuacuuaagaagguu

SEQ ID NO: 2377081 - RNA, 19 nt, Artificial Sequence
  Description of Artificial Sequence: Synthetic oligonucleotide
  Antisense strand to SEQ ID NO: 2377080
aaccuucuuaaguaacucu

SEQ ID NO: 2377082 - RNA, 19 nt, Artificial Sequence
  Description of Artificial Sequence: Synthetic oligonucleotide
  Sense strand starting at position 87 of SEQ ID NO: 1885920
gucugcggugucagagaaa

SEQ ID NO: 2377083 - RNA, 19 nt, Artificial Sequence
  Description of Artificial Sequence: Synthetic oligonucleotide
  Antisense strand to SEQ ID NO: 2377082
uuucucugacaccgcagac

SEQ ID NO: 2377084 - RNA, 19 nt, Artificial Sequence
  Description of Artificial Sequence: Synthetic oligonucleotide
  Sense strand starting at position 994 of SEQ ID NO: 1885920
cugccaggucguuaucuga

SEQ ID NO: 2377085 - RNA, 19 nt, Artificial Sequence
  Description of Artificial Sequence: Synthetic oligonucleotide
  Antisense strand to SEQ ID NO: 2377084
ucagauaacgaccuggcag

SEQ ID NO: 2377086 - RNA, 19 nt, Artificial Sequence
  Description of Artificial Sequence: Synthetic oligonucleotide
  Sense strand starting at position 997 of SEQ ID NO: 1885920
ccaggucguuaucugaaga

SEQ ID NO: 2377087 - RNA, 19 nt, Artificial Sequence
  Description of Artificial Sequence: Synthetic oligonucleotide
  Antisense strand to SEQ ID NO: 2377086
ucuucagauaacgaccugg

SEQ ID NO: 2377088 - RNA, 19 nt, Artificial Sequence
  Description of Artificial Sequence: Synthetic oligonucleotide
  Sense strand starting at position 1002 of SEQ ID NO: 1885920
ucguuaucugaagagaucu

SEQ ID NO: 2377089 - RNA, 19 nt, Artificial Sequence
  Description of Artificial Sequence: Synthetic oligonucleotide
  Antisense strand to SEQ ID NO: 2377088
agaucucuucagauaacga

SEQ ID NO: 2377090 - RNA, 19 nt, Artificial Sequence
  Description of Artificial Sequence: Synthetic oligonucleotide
  Sense strand starting at position 1030 of SEQ ID NO: 1885920
agccuuucuucugccagua

SEQ ID NO: 2377091 - RNA, 19 nt, Artificial Sequence
  Description of Artificial Sequence: Synthetic oligonucleotide
  Antisense strand to SEQ ID NO: 2377090
uacuggcagaagaaaggcu

SEQ ID NO: 2377092 - RNA, 19 nt, Artificial Sequence
  Description of Artificial Sequence: Synthetic oligonucleotide
  Sense strand starting at position 1404 of SEQ ID NO: 1885920
cccucugggccuuauuaua

SEQ ID NO: 2377093 - RNA, 19 nt, Artificial Sequence
  Description of Artificial Sequence: Synthetic oligonucleotide
  Antisense strand to SEQ ID NO: 2377092
uauaauaaggcccagaggg

SEQ ID NO: 2377094 - RNA, 19 nt, Artificial Sequence
  Description of Artificial Sequence: Synthetic oligonucleotide
  Sense strand starting at position 1454 of SEQ ID NO: 1885920
cgaguucucccagggaagu

SEQ ID NO: 2377095 - RNA, 19 nt, Artificial Sequence
  Description of Artificial Sequence: Synthetic oligonucleotide
  Antisense strand to SEQ ID NO: 2377094
acuucccugggagaacucg

SEQ ID NO: 2377096 - RNA, 19 nt, Artificial Sequence
  Description of Artificial Sequence: Synthetic oligonucleotide
  Sense strand starting at position 1455 of SEQ ID NO: 1885920
gaguucucccagggaagug

SEQ ID NO: 2377097 - RNA, 19 nt, Artificial Sequence
  Description of Artificial Sequence: Synthetic oligonucleotide
  Antisense strand to SEQ ID NO: 2377096
cacuucccugggagaacuc

SEQ ID NO: 2377098 - RNA, 19 nt, Artificial Sequence
  Description of Artificial Sequence: Synthetic oligonucleotide
  Sense strand starting at position 2412 of SEQ ID NO: 1885920
gcugcauaccuaggugaca

SEQ ID NO: 2377099 - RNA, 19 nt, Artificial Sequence
  Description of Artificial Sequence: Synthetic oligonucleotide
  Antisense strand to SEQ ID NO: 2377098
ugucaccuagguaugcagc

SEQ ID NO: 2377100 - RNA, 19 nt, Artificial Sequence
  Description of Artificial Sequence: Synthetic oligonucleotide
  Sense strand starting at position 2413 of SEQ ID NO: 1885920
cugcauaccuaggugacaa

SEQ ID NO: 2377101 - RNA, 19 nt, Artificial Sequence
  Description of Artificial Sequence: Synthetic oligonucleotide
  Antisense strand to SEQ ID NO: 2377100
uugucaccuagguaugcag

SEQ ID NO: 2377102 - RNA, 19 nt, Artificial Sequence
  Description of Artificial Sequence: Synthetic oligonucleotide
  Sense strand starting at position 2500 of SEQ ID NO: 1885920
ugccauuauuaggaacaau

SEQ ID NO: 2377103 - RNA, 19 nt, Artificial Sequence
  Description of Artificial Sequence: Synthetic oligonucleotide
  Antisense strand to SEQ ID NO: 2377102
auuguuccuaauaauggca

SEQ ID NO: 2377104 - RNA, 19 nt, Artificial Sequence
  Description of Artificial Sequence: Synthetic oligonucleotide
  Sense strand starting at position 2548 of SEQ ID NO: 1885920
ggcuucuggugucucaauu

SEQ ID NO: 2377105 - RNA, 19 nt, Artificial Sequence
  Description of Artificial Sequence: Synthetic oligonucleotide
  Antisense strand to SEQ ID NO: 2377104
aauugagacaccagaagcc

SEQ ID NO: 2377106 - RNA, 19 nt, Artificial Sequence
  Description of Artificial Sequence: Synthetic oligonucleotide
  Sense strand starting at position 2560 of SEQ ID NO: 1885920
cucaauuuguccugggaaa

SEQ ID NO: 2377107 - RNA, 19 nt, Artificial Sequence
  Description of Artificial Sequence: Synthetic oligonucleotide
  Antisense strand to SEQ ID NO: 2377106
uuucccaggacaaauugag

SEQ ID NO: 2377108 - RNA, 19 nt, Artificial Sequence
  Description of Artificial Sequence: Synthetic oligonucleotide
  Sense strand starting at position 2582 of SEQ ID NO: 1885920
guuguaaagcaauaguaug

SEQ ID NO: 2377109 - RNA, 19 nt, Artificial Sequence
  Description of Artificial Sequence: Synthetic oligonucleotide
  Antisense strand to SEQ ID NO: 2377108
cauacuauugcuuuacaac

SEQ ID NO: 2377110 - RNA, 19 nt, Artificial Sequence
  Description of Artificial Sequence: Synthetic oligonucleotide
  Sense strand starting at position 2587 of SEQ ID NO: 1885920
aaagcaauaguaugucagu

SEQ ID NO: 2377111 - RNA, 19 nt, Artificial Sequence
  Description of Artificial Sequence: Synthetic oligonucleotide
  Antisense strand to SEQ ID NO: 2377110
acugacauacuauugcuuu

SEQ ID NO: 2377112 - RNA, 19 nt, Artificial Sequence
  Description of Artificial Sequence: Synthetic oligonucleotide
  Sense strand starting at position 2596 of SEQ ID NO: 1885920
guaugucaguccuuauaua

SEQ ID NO: 2377113 - RNA, 19 nt, Artificial Sequence
  Description of Artificial Sequence: Synthetic oligonucleotide
  Antisense strand to SEQ ID NO: 2377112
uauauaaggacugacauac

SEQ ID NO: 2377114 - RNA, 19 nt, Artificial Sequence
  Description of Artificial Sequence: Synthetic oligonucleotide
  Sense strand starting at position 2692 of SEQ ID NO: 1885920
uccaguuggcaguauuaaa

SEQ ID NO: 2377115 - RNA, 19 nt, Artificial Sequence
  Description of Artificial Sequence: Synthetic oligonucleotide
  Antisense strand to SEQ ID NO: 2377114
uuuaauacugccaacugga

SEQ ID NO: 2377116 - RNA, 19 nt, Artificial Sequence
  Description of Artificial Sequence: Synthetic oligonucleotide
  Sense strand starting at position 2826 of SEQ ID NO: 1885920
ggguuuggaguaugaaaca

SEQ ID NO: 2377117 - RNA, 19 nt, Artificial Sequence
  Description of Artificial Sequence: Synthetic oligonucleotide
  Antisense strand to SEQ ID NO: 2377116
uguuucauacuccaaaccc

SEQ ID NO: 2377118 - RNA, 19 nt, Artificial Sequence
  Description of Artificial Sequence: Synthetic oligonucleotide
  Sense strand starting at position 2862 of SEQ ID NO: 1885920
auacacuaucugugacguu

SEQ ID NO: 2377119 - RNA, 19 nt, Artificial Sequence
  Description of Artificial Sequence: Synthetic oligonucleotide
  Antisense strand to SEQ ID NO: 2377118
aacgucacagauaguguau

SEQ ID NO: 2377120 - RNA, 19 nt, Artificial Sequence
  Description of Artificial Sequence: Synthetic oligonucleotide
  Sense strand starting at position 3055 of SEQ ID NO: 1885920
acaguagaagccugcuuua

SEQ ID NO: 2377121 - RNA, 19 nt, Artificial Sequence
  Description of Artificial Sequence: Synthetic oligonucleotide
  Antisense strand to SEQ ID NO: 2377120
uaaagcaggcuucuacugu

SEQ ID NO: 2377122 - RNA, 19 nt, Artificial Sequence
  Description of Artificial Sequence: Synthetic oligonucleotide
  Sense strand starting at position 3081 of SEQ ID NO: 1885920
uuaagugugcgauaucaua

SEQ ID NO: 2377123 - RNA, 19 nt, Artificial Sequence
  Description of Artificial Sequence: Synthetic oligonucleotide
  Antisense strand to SEQ ID NO: 2377122
uaugauaucgcacacuuaa

SEQ ID NO: 2377124 - RNA, 19 nt, Artificial Sequence
  Description of Artificial Sequence: Synthetic oligonucleotide
  Sense strand starting at position 3106 of SEQ ID NO: 1885920
cucauuuacucuuugcguu

SEQ ID NO: 2377125 - RNA, 19 nt, Artificial Sequence
  Description of Artificial Sequence: Synthetic oligonucleotide
  Antisense strand to SEQ ID NO: 2377124
aacgcaaagaguaaaugag

SEQ ID NO: 2377126 - RNA, 19 nt, Artificial Sequence
  Description of Artificial Sequence: Synthetic oligonucleotide
  Sense strand starting at position 3107 of SEQ ID NO: 1885920
ucauuuacucuuugcguuu

SEQ ID NO: 2377127 - RNA, 19 nt, Artificial Sequence
  Description of Artificial Sequence: Synthetic oligonucleotide
  Antisense strand to SEQ ID NO: 2377126
aaacgcaaagaguaaauga

SEQ ID NO: 2377128 - RNA, 19 nt, Artificial Sequence
  Description of Artificial Sequence: Synthetic oligonucleotide
  Sense strand starting at position 3114 of SEQ ID NO: 1885920
cucuuugcguuucuagaga

SEQ ID NO: 2377129 - RNA, 19 nt, Artificial Sequence
  Description of Artificial Sequence: Synthetic oligonucleotide
  Antisense strand to SEQ ID NO: 2377128
ucucuagaaacgcaaagag

SEQ ID NO: 2377130 - RNA, 19 nt, Artificial Sequence
  Description of Artificial Sequence: Synthetic oligonucleotide
  Sense strand starting at position 3119 of SEQ ID NO: 1885920
ugcguuucuagagagccaa

SEQ ID NO: 2377131 - RNA, 19 nt, Artificial Sequence
  Description of Artificial Sequence: Synthetic oligonucleotide
  Antisense strand to SEQ ID NO: 2377130
uuggcucucuagaaacgca

SEQ ID NO: 2377132 - RNA, 19 nt, Artificial Sequence
  Description of Artificial Sequence: Synthetic oligonucleotide
  Sense strand starting at position 3285 of SEQ ID NO: 1885920
ccuaaauauuugggccaua

SEQ ID NO: 2377133 - RNA, 19 nt, Artificial Sequence
  Description of Artificial Sequence: Synthetic oligonucleotide
  Antisense strand to SEQ ID NO: 2377132
uauggcccaaauauuuagg

SEQ ID NO: 2377134 - RNA, 19 nt, Artificial Sequence
  Description of Artificial Sequence: Synthetic oligonucleotide
  Sense strand starting at position 3327 of SEQ ID NO: 1885920
auauauucucuguauguca

SEQ ID NO: 2377135 - RNA, 19 nt, Artificial Sequence
  Description of Artificial Sequence: Synthetic oligonucleotide
  Antisense strand to SEQ ID NO: 2377134
ugacauacagagaauauau

SEQ ID NO: 2377136 - RNA, 19 nt, Artificial Sequence
  Description of Artificial Sequence: Synthetic oligonucleotide
  Sense strand starting at position 3329 of SEQ ID NO: 1885920
auauucucuguaugucaaa

SEQ ID NO: 2377137 - RNA, 19 nt, Artificial Sequence
  Description of Artificial Sequence: Synthetic oligonucleotide
  Antisense strand to SEQ ID NO: 2377136
uuugacauacagagaauau

SEQ ID NO: 2377138 - RNA, 19 nt, Artificial Sequence
  Description of Artificial Sequence: Synthetic oligonucleotide
  Sense strand starting at position 3367 of SEQ ID NO: 1885920
cguaguuauuagguuagua

SEQ ID NO: 2377139 - RNA, 19 nt, Artificial Sequence
  Description of Artificial Sequence: Synthetic oligonucleotide
  Antisense strand to SEQ ID NO: 2377138
uacuaaccuaauaacuacg

SEQ ID NO: 2377140 - RNA, 19 nt, Artificial Sequence
  Description of Artificial Sequence: Synthetic oligonucleotide
  Sense strand starting at position 3369 of SEQ ID NO: 1885920
uaguuauuagguuaguaca

SEQ ID NO: 2377141 - RNA, 19 nt, Artificial Sequence
  Description of Artificial Sequence: Synthetic oligonucleotide
  Antisense strand to SEQ ID NO: 2377140
uguacuaaccuaauaacua

SEQ ID NO: 2377142 - RNA, 19 nt, Artificial Sequence
  Description of Artificial Sequence: Synthetic oligonucleotide
  Sense strand starting at position 3371 of SEQ ID NO: 1885920
guuauuagguuaguacaaa

SEQ ID NO: 2377143 - RNA, 19 nt, Artificial Sequence
  Description of Artificial Sequence: Synthetic oligonucleotide
  Antisense strand to SEQ ID NO: 2377142
uuuguacuaaccuaauaac

SEQ ID NO: 2377144 - RNA, 19 nt, Artificial Sequence
  Description of Artificial Sequence: Synthetic oligonucleotide
  Sense strand starting at position 3399 of SEQ ID NO: 1885920
aguauucgccauugccaaa

SEQ ID NO: 2377145 - RNA, 19 nt, Artificial Sequence
  Description of Artificial Sequence: Synthetic oligonucleotide
  Antisense strand to SEQ ID NO: 2377144
uuuggcaauggcgaauacu

SEQ ID NO: 2377146 - RNA, 19 nt, Artificial Sequence
  Description of Artificial Sequence: Synthetic oligonucleotide
  Sense strand starting at position 3470 of SEQ ID NO: 1885920
guagaauuccggcaaagga

SEQ ID NO: 2377147 - RNA, 19 nt, Artificial Sequence
  Description of Artificial Sequence: Synthetic oligonucleotide
  Antisense strand to SEQ ID NO: 2377146
uccuuugccggaauucuac

SEQ ID NO: 2377148 - RNA, 19 nt, Artificial Sequence
  Description of Artificial Sequence: Synthetic oligonucleotide
  Sense strand starting at position 3544 of SEQ ID NO: 1885920
cccauaugaugccucaagu

SEQ ID NO: 2377149 - RNA, 19 nt, Artificial Sequence
  Description of Artificial Sequence: Synthetic oligonucleotide
  Antisense strand to SEQ ID NO: 2377148
acuugaggcaucauauggg

SEQ ID NO: 2377150 - RNA, 19 nt, Artificial Sequence
  Description of Artificial Sequence: Synthetic oligonucleotide
  Sense strand starting at position 3824 of SEQ ID NO: 1885920
ggaagcaguucccucuaga

SEQ ID NO: 2377151 - RNA, 19 nt, Artificial Sequence
  Description of Artificial Sequence: Synthetic oligonucleotide
  Antisense strand to SEQ ID NO: 2377150
ucuagagggaacugcuucc

SEQ ID NO: 2377152 - RNA, 19 nt, Artificial Sequence
  Description of Artificial Sequence: Synthetic oligonucleotide
  Sense strand starting at position 3827 of SEQ ID NO: 1885920
agcaguucccucuagauag

SEQ ID NO: 2377153 - RNA, 19 nt, Artificial Sequence
  Description of Artificial Sequence: Synthetic oligonucleotide
  Antisense strand to SEQ ID NO: 2377152
cuaucuagagggaacugcu

SEQ ID NO: 2377154 - RNA, 19 nt, Artificial Sequence
  Description of Artificial Sequence: Synthetic oligonucleotide
  Sense strand starting at position 3844 of SEQ ID NO: 1885920
agauuaaacuggccuaaca

SEQ ID NO: 2377155 - RNA, 19 nt, Artificial Sequence
  Description of Artificial Sequence: Synthetic oligonucleotide
  Antisense strand to SEQ ID NO: 2377154
uguuaggccaguuuaaucu

SEQ ID NO: 2377156 - RNA, 19 nt, Artificial Sequence
  Description of Artificial Sequence: Synthetic oligonucleotide
  Sense strand starting at position 3875 of SEQ ID NO: 1885920
uguugcuggaguugagaaa

SEQ ID NO: 2377157 - RNA, 19 nt, Artificial Sequence
  Description of Artificial Sequence: Synthetic oligonucleotide
  Antisense strand to SEQ ID NO: 2377156
uuucucaacuccagcaaca

SEQ ID NO: 2377158 - RNA, 19 nt, Artificial Sequence
  Description of Artificial Sequence: Synthetic oligonucleotide
  Sense strand starting at position 247 of SEQ ID NO: 1885921
cgcacuuccuaacaaauga

SEQ ID NO: 2377159 - RNA, 19 nt, Artificial Sequence
  Description of Artificial Sequence: Synthetic oligonucleotide
  Antisense strand to SEQ ID NO: 2377158
ucauuuguuaggaagugcg

SEQ ID NO: 2377160 - RNA, 19 nt, Artificial Sequence
  Description of Artificial Sequence: Synthetic oligonucleotide
  Sense strand starting at position 438 of SEQ ID NO: 1885921
gcaaguuccacguguccuu

SEQ ID NO: 2377161 - RNA, 19 nt, Artificial Sequence
  Description of Artificial Sequence: Synthetic oligonucleotide
  Antisense strand to SEQ ID NO: 2377160
aaggacacguggaacuugc

SEQ ID NO: 2377162 - RNA, 19 nt, Artificial Sequence
  Description of Artificial Sequence: Synthetic oligonucleotide
  Sense strand starting at position 758 of SEQ ID NO: 1885921
cugcaaagcucucagauca

SEQ ID NO: 2377163 - RNA, 19 nt, Artificial Sequence
  Description of Artificial Sequence: Synthetic oligonucleotide
  Antisense strand to SEQ ID NO: 2377162
ugaucugagagcuuugcag

SEQ ID NO: 2377164 - RNA, 19 nt, Artificial Sequence
  Description of Artificial Sequence: Synthetic oligonucleotide
  Sense strand starting at position 794 of SEQ ID NO: 1885921
guccuuucucaacgaggaa

SEQ ID NO: 2377165 - RNA, 19 nt, Artificial Sequence
  Description of Artificial Sequence: Synthetic oligonucleotide
  Antisense strand to SEQ ID NO: 2377164
uuccucguugagaaaggac

SEQ ID NO: 2377166 - RNA, 19 nt, Artificial Sequence
  Description of Artificial Sequence: Synthetic oligonucleotide
  Sense strand starting at position 797 of SEQ ID NO: 1885921
cuuucucaacgaggaagaa

SEQ ID NO: 2377167 - RNA, 19 nt, Artificial Sequence
  Description of Artificial Sequence: Synthetic oligonucleotide
  Antisense strand to SEQ ID NO: 2377166
uucuuccucguugagaaag

SEQ ID NO: 2377168 - RNA, 19 nt, Artificial Sequence
  Description of Artificial Sequence: Synthetic oligonucleotide
  Sense strand starting at position 899 of SEQ ID NO: 1885921
gacgcaagaugcgaaguuu

SEQ ID NO: 2377169 - RNA, 19 nt, Artificial Sequence
  Description of Artificial Sequence: Synthetic oligonucleotide
  Antisense strand to SEQ ID NO: 2377168
aaacuucgcaucuugcguc

SEQ ID NO: 2377170 - RNA, 19 nt, Artificial Sequence
  Description of Artificial Sequence: Synthetic oligonucleotide
  Sense strand starting at position 932 of SEQ ID NO: 1885921
accgcaugcccguuuaaga

SEQ ID NO: 2377171 - RNA, 19 nt, Artificial Sequence
  Description of Artificial Sequence: Synthetic oligonucleotide
  Antisense strand to SEQ ID NO: 2377170
ucuuaaacgggcaugcggu

SEQ ID NO: 2377172 - RNA, 19 nt, Artificial Sequence
  Description of Artificial Sequence: Synthetic oligonucleotide
  Sense strand starting at position 991 of SEQ ID NO: 1885921
caggucguaucucaagaga

SEQ ID NO: 2377173 - RNA, 19 nt, Artificial Sequence
  Description of Artificial Sequence: Synthetic oligonucleotide
  Antisense strand to SEQ ID NO: 2377172
ucucuugagauacgaccug

SEQ ID NO: 2377174 - RNA, 19 nt, Artificial Sequence
  Description of Artificial Sequence: Synthetic oligonucleotide
  Sense strand starting at position 994 of SEQ ID NO: 1885921
gucguaucucaagagaucu

SEQ ID NO: 2377175 - RNA, 19 nt, Artificial Sequence
  Description of Artificial Sequence: Synthetic oligonucleotide
  Antisense strand to SEQ ID NO: 2377174
agaucucuugagauacgac

SEQ ID NO: 2377176 - RNA, 19 nt, Artificial Sequence
  Description of Artificial Sequence: Synthetic oligonucleotide
  Sense strand starting at position 996 of SEQ ID NO: 1885921
cguaucucaagagaucuga

SEQ ID NO: 2377177 - RNA, 19 nt, Artificial Sequence
  Description of Artificial Sequence: Synthetic oligonucleotide
  Antisense strand to SEQ ID NO: 2377176
ucagaucucuugagauacg

SEQ ID NO: 2377178 - RNA, 19 nt, Artificial Sequence
  Description of Artificial Sequence: Synthetic oligonucleotide
  Sense strand starting at position 1419 of SEQ ID NO: 1885921
cucucugggccuuauuaua

SEQ ID NO: 2377179 - RNA, 19 nt, Artificial Sequence
  Description of Artificial Sequence: Synthetic oligonucleotide
  Antisense strand to SEQ ID NO: 2377178
uauaauaaggcccagagag

SEQ ID NO: 2377180 - RNA, 19 nt, Artificial Sequence
  Description of Artificial Sequence: Synthetic oligonucleotide
  Sense strand starting at position 2059 of SEQ ID NO: 1885921
gcuaauuagcccggaagcu

SEQ ID NO: 2377181 - RNA, 19 nt, Artificial Sequence
  Description of Artificial Sequence: Synthetic oligonucleotide
  Antisense strand to SEQ ID NO: 2377180
agcuuccgggcuaauuagc

SEQ ID NO: 2377182 - RNA, 19 nt, Artificial Sequence
  Description of Artificial Sequence: Synthetic oligonucleotide
  Sense strand starting at position 2502 of SEQ ID NO: 1885921
ggucuggucucgcggguaa

SEQ ID NO: 2377183 - RNA, 19 nt, Artificial Sequence
  Description of Artificial Sequence: Synthetic oligonucleotide
  Antisense strand to SEQ ID NO: 2377182
uuacccgcgagaccagacc

SEQ ID NO: 2377184 - RNA, 19 nt, Artificial Sequence
  Description of Artificial Sequence: Synthetic oligonucleotide
  Sense strand starting at position 2503 of SEQ ID NO: 1885921
gucuggucucgcggguaaa

SEQ ID NO: 2377185 - RNA, 19 nt, Artificial Sequence
  Description of Artificial Sequence: Synthetic oligonucleotide
  Antisense strand to SEQ ID NO: 2377184
uuuacccgcgagaccagac

SEQ ID NO: 2377186 - RNA, 19 nt, Artificial Sequence
  Description of Artificial Sequence: Synthetic oligonucleotide
  Sense strand starting at position 2504 of SEQ ID NO: 1885921
ucuggucucgcggguaaag

SEQ ID NO: 2377187 - RNA, 19 nt, Artificial Sequence
  Description of Artificial Sequence: Synthetic oligonucleotide
  Antisense strand to SEQ ID NO: 2377186
cuuuacccgcgagaccaga

SEQ ID NO: 2377188 - RNA, 19 nt, Artificial Sequence
  Description of Artificial Sequence: Synthetic oligonucleotide
  Sense strand starting at position 2760 of SEQ ID NO: 1885921
cugauacucugcugcuuua

SEQ ID NO: 2377189 - RNA, 19 nt, Artificial Sequence
  Description of Artificial Sequence: Synthetic oligonucleotide
  Antisense strand to SEQ ID NO: 2377188
uaaagcagcagaguaucag

SEQ ID NO: 2377190 - RNA, 19 nt, Artificial Sequence
  Description of Artificial Sequence: Synthetic oligonucleotide
  Sense strand starting at position 2813 of SEQ ID NO: 1885921
ucuccuugcuguccugaau

SEQ ID NO: 2377191 - RNA, 19 nt, Artificial Sequence
  Description of Artificial Sequence: Synthetic oligonucleotide
  Antisense strand to SEQ ID NO: 2377190
auucaggacagcaaggaga

SEQ ID NO: 2377192 - RNA, 19 nt, Artificial Sequence
  Description of Artificial Sequence: Synthetic oligonucleotide
  Sense strand starting at position 2816 of SEQ ID NO: 1885921
ccuugcuguccugaaugga

SEQ ID NO: 2377193 - RNA, 19 nt, Artificial Sequence
  Description of Artificial Sequence: Synthetic oligonucleotide
  Antisense strand to SEQ ID NO: 2377192
uccauucaggacagcaagg

SEQ ID NO: 2377194 - RNA, 19 nt, Artificial Sequence
  Description of Artificial Sequence: Synthetic oligonucleotide
  Sense strand starting at position 3008 of SEQ ID NO: 1885921
cauugagucccaggcagau

SEQ ID NO: 2377195 - RNA, 19 nt, Artificial Sequence
  Description of Artificial Sequence: Synthetic oligonucleotide
  Antisense strand to SEQ ID NO: 2377194
aucugccugggacucaaug

SEQ ID NO: 2377196 - RNA, 19 nt, Artificial Sequence
  Description of Artificial Sequence: Synthetic oligonucleotide
  Sense strand starting at position 3026 of SEQ ID NO: 1885921
ugugguaagccgugggaga

SEQ ID NO: 2377197 - RNA, 19 nt, Artificial Sequence
  Description of Artificial Sequence: Synthetic oligonucleotide
  Antisense strand to SEQ ID NO: 2377196
ucucccacggcuuaccaca

SEQ ID NO: 2377198 - RNA, 19 nt, Artificial Sequence
  Description of Artificial Sequence: Synthetic oligonucleotide
  Sense strand starting at position 3054 of SEQ ID NO: 1885921
ugccuagucugugcagagu

SEQ ID NO: 2377199 - RNA, 19 nt, Artificial Sequence
  Description of Artificial Sequence: Synthetic oligonucleotide
  Antisense strand to SEQ ID NO: 2377198
acucugcacagacuaggca

SEQ ID NO: 2377200 - RNA, 19 nt, Artificial Sequence
  Description of Artificial Sequence: Synthetic oligonucleotide
  Sense strand starting at position 3095 of SEQ ID NO: 1885921
cccaaauccuggugauuug

SEQ ID NO: 2377201 - RNA, 19 nt, Artificial Sequence
  Description of Artificial Sequence: Synthetic oligonucleotide
  Antisense strand to SEQ ID NO: 2377200
caaaucaccaggauuuggg

SEQ ID NO: 2377202 - RNA, 19 nt, Artificial Sequence
  Description of Artificial Sequence: Synthetic oligonucleotide
  Sense strand starting at position 3374 of SEQ ID NO: 1885921
gacagcagcugugaaauga

SEQ ID NO: 2377203 - RNA, 19 nt, Artificial Sequence
  Description of Artificial Sequence: Synthetic oligonucleotide
  Antisense strand to SEQ ID NO: 2377202
ucauuucacagcugcuguc

SEQ ID NO: 2377204 - RNA, 19 nt, Artificial Sequence
  Description of Artificial Sequence: Synthetic oligonucleotide
  Sense strand starting at position 3446 of SEQ ID NO: 1885921
caacuaauggaucaguguu

SEQ ID NO: 2377205 - RNA, 19 nt, Artificial Sequence
  Description of Artificial Sequence: Synthetic oligonucleotide
  Antisense strand to SEQ ID NO: 2377204
aacacugauccauuaguug

SEQ ID NO: 2377206 - RNA, 19 nt, Artificial Sequence
  Description of Artificial Sequence: Synthetic oligonucleotide
  Sense strand starting at position 3498 of SEQ ID NO: 1885921
gaaggaagucguuagcaga

SEQ ID NO: 2377207 - RNA, 19 nt, Artificial Sequence
  Description of Artificial Sequence: Synthetic oligonucleotide
  Antisense strand to SEQ ID NO: 2377206
ucugcuaacgacuuccuuc

SEQ ID NO: 2377208 - RNA, 19 nt, Artificial Sequence
  Description of Artificial Sequence: Synthetic oligonucleotide
  Sense strand starting at position 3501 of SEQ ID NO: 1885921
ggaagucguuagcagauga

SEQ ID NO: 2377209 - RNA, 19 nt, Artificial Sequence
  Description of Artificial Sequence: Synthetic oligonucleotide
  Antisense strand to SEQ ID NO: 2377208
ucaucugcuaacgacuucc

SEQ ID NO: 2377210 - RNA, 19 nt, Artificial Sequence
  Description of Artificial Sequence: Synthetic oligonucleotide
  Sense strand starting at position 3505 of SEQ ID NO: 1885921
gucguuagcagaugaauga

SEQ ID NO: 2377211 - RNA, 19 nt, Artificial Sequence
  Description of Artificial Sequence: Synthetic oligonucleotide
  Antisense strand to SEQ ID NO: 2377210
ucauucaucugcuaacgac

SEQ ID NO: 2377212 - RNA, 19 nt, Artificial Sequence
  Description of Artificial Sequence: Synthetic oligonucleotide
  Sense strand starting at position 3506 of SEQ ID NO: 1885921
ucguuagcagaugaaugau

SEQ ID NO: 2377213 - RNA, 19 nt, Artificial Sequence
  Description of Artificial Sequence: Synthetic oligonucleotide
  Antisense strand to SEQ ID NO: 2377212
aucauucaucugcuaacga

SEQ ID NO: 2377214 - RNA, 19 nt, Artificial Sequence
  Description of Artificial Sequence: Synthetic oligonucleotide
  Sense strand starting at position 3550 of SEQ ID NO: 1885921
agagaucuaugggauagau

SEQ ID NO: 2377215 - RNA, 19 nt, Artificial Sequence
  Description of Artificial Sequence: Synthetic oligonucleotide
  Antisense strand to SEQ ID NO: 2377214
aucuaucccauagaucucu

SEQ ID NO: 2377216 - RNA, 19 nt, Artificial Sequence
  Description of Artificial Sequence: Synthetic oligonucleotide
  Sense strand starting at position 3562 of SEQ ID NO: 1885921
gauagauucgagggcacaa

SEQ ID NO: 2377217 - RNA, 19 nt, Artificial Sequence
  Description of Artificial Sequence: Synthetic oligonucleotide
  Antisense strand to SEQ ID NO: 2377216
uugugcccucgaaucuauc

SEQ ID NO: 2377218 - RNA, 19 nt, Artificial Sequence
  Description of Artificial Sequence: Synthetic oligonucleotide
  Sense strand starting at position 3629 of SEQ ID NO: 1885921
acccguccgucugugagaa

SEQ ID NO: 2377219 - RNA, 19 nt, Artificial Sequence
  Description of Artificial Sequence: Synthetic oligonucleotide
  Antisense strand to SEQ ID NO: 2377218
uucucacagacggacgggu

SEQ ID NO: 2377220 - RNA, 19 nt, Artificial Sequence
  Description of Artificial Sequence: Synthetic oligonucleotide
  Sense strand starting at position 3678 of SEQ ID NO: 1885921
gcagguaucacagagggca

SEQ ID NO: 2377221 - RNA, 19 nt, Artificial Sequence
  Description of Artificial Sequence: Synthetic oligonucleotide
  Antisense strand to SEQ ID NO: 2377220
ugcccucugugauaccugc

SEQ ID NO: 2377222 - RNA, 19 nt, Artificial Sequence
  Description of Artificial Sequence: Synthetic oligonucleotide
  Sense strand starting at position 3820 of SEQ ID NO: 1885921
uccaaagagaguuguguac

SEQ ID NO: 2377223 - RNA, 19 nt, Artificial Sequence
  Description of Artificial Sequence: Synthetic oligonucleotide
  Antisense strand to SEQ ID NO: 2377222
guacacaacucucuuugga

SEQ ID NO: 2377224 - RNA, 19 nt, Artificial Sequence
  Description of Artificial Sequence: Synthetic oligonucleotide
  Sense strand starting at position 3822 of SEQ ID NO: 1885921
caaagagaguuguguacac

SEQ ID NO: 2377225 - RNA, 19 nt, Artificial Sequence
  Description of Artificial Sequence: Synthetic oligonucleotide
  Antisense strand to SEQ ID NO: 2377224
guguacacaacucucuuug

SEQ ID NO: 2377226 - RNA, 19 nt, Artificial Sequence
  Description of Artificial Sequence: Synthetic oligonucleotide
  Sense strand starting at position 1053 of SEQ ID NO: 1885922
ucccgcugucaguguuuau

SEQ ID NO: 2377227 - RNA, 19 nt, Artificial Sequence
  Description of Artificial Sequence: Synthetic oligonucleotide
  Antisense strand to SEQ ID NO: 2377226
auaaacacugacagcggga

SEQ ID NO: 2377228 - RNA, 19 nt, Artificial Sequence
  Description of Artificial Sequence: Synthetic oligonucleotide
  Sense strand starting at position 1056 of SEQ ID NO: 1885922
cgcugucaguguuuauguu

SEQ ID NO: 2377229 - RNA, 19 nt, Artificial Sequence
  Description of Artificial Sequence: Synthetic oligonucleotide
  Antisense strand to SEQ ID NO: 2377228
aacauaaacacugacagcg

SEQ ID NO: 2377230 - RNA, 19 nt, Artificial Sequence
  Description of Artificial Sequence: Synthetic oligonucleotide
  Sense strand starting at position 1057 of SEQ ID NO: 1885922
gcugucaguguuuauguua

SEQ ID NO: 2377231 - RNA, 19 nt, Artificial Sequence
  Description of Artificial Sequence: Synthetic oligonucleotide
  Antisense strand to SEQ ID NO: 2377230
uaacauaaacacugacagc

SEQ ID NO: 2377232 - RNA, 19 nt, Artificial Sequence
  Description of Artificial Sequence: Synthetic oligonucleotide
  Sense strand starting at position 1062 of SEQ ID NO: 1885922
caguguuuauguuaaggga

SEQ ID NO: 2377233 - RNA, 19 nt, Artificial Sequence
  Description of Artificial Sequence: Synthetic oligonucleotide
  Antisense strand to SEQ ID NO: 2377232
ucccuuaacauaaacacug

SEQ ID NO: 2377234 - RNA, 19 nt, Artificial Sequence
  Description of Artificial Sequence: Synthetic oligonucleotide
  Sense strand starting at position 1064 of SEQ ID NO: 1885922
guguuuauguuaagggagu

SEQ ID NO: 2377235 - RNA, 19 nt, Artificial Sequence
  Description of Artificial Sequence: Synthetic oligonucleotide
  Antisense strand to SEQ ID NO: 2377234
acucccuuaacauaaacac

SEQ ID NO: 2377236 - RNA, 19 nt, Artificial Sequence
  Description of Artificial Sequence: Synthetic oligonucleotide
  Sense strand starting at position 1066 of SEQ ID NO: 1885922
guuuauguuaagggaguga

SEQ ID NO: 2377237 - RNA, 19 nt, Artificial Sequence
  Description of Artificial Sequence: Synthetic oligonucleotide
  Antisense strand to SEQ ID NO: 2377236
ucacucccuuaacauaaac

SEQ ID NO: 2377238 - RNA, 19 nt, Artificial Sequence
  Description of Artificial Sequence: Synthetic oligonucleotide
  Sense strand starting at position 1305 of SEQ ID NO: 1885922
guccgagucaucgcuccau

SEQ ID NO: 2377239 - RNA, 19 nt, Artificial Sequence
  Description of Artificial Sequence: Synthetic oligonucleotide
  Antisense strand to SEQ ID NO: 2377238
auggagcgaugacucggac

SEQ ID NO: 2377240 - RNA, 19 nt, Artificial Sequence
  Description of Artificial Sequence: Synthetic oligonucleotide
  Sense strand starting at position 1309 of SEQ ID NO: 1885922
gagucaucgcuccaugaua

SEQ ID NO: 2377241 - RNA, 19 nt, Artificial Sequence
  Description of Artificial Sequence: Synthetic oligonucleotide
  Antisense strand to SEQ ID NO: 2377240
uaucauggagcgaugacuc

SEQ ID NO: 2377242 - RNA, 19 nt, Artificial Sequence
  Description of Artificial Sequence: Synthetic oligonucleotide
  Sense strand starting at position 2037 of SEQ ID NO: 1885922
cuccaagaccauugguuaa

SEQ ID NO: 2377243 - RNA, 19 nt, Artificial Sequence
  Description of Artificial Sequence: Synthetic oligonucleotide
  Antisense strand to SEQ ID NO: 2377242
uuaaccaauggucuuggag

SEQ ID NO: 2377244 - RNA, 19 nt, Artificial Sequence
  Description of Artificial Sequence: Synthetic oligonucleotide
  Sense strand starting at position 2040 of SEQ ID NO: 1885922
caagaccauugguuaauga

SEQ ID NO: 2377245 - RNA, 19 nt, Artificial Sequence
  Description of Artificial Sequence: Synthetic oligonucleotide
  Antisense strand to SEQ ID NO: 2377244
ucauuaaccaauggucuug

SEQ ID NO: 2377246 - RNA, 19 nt, Artificial Sequence
  Description of Artificial Sequence: Synthetic oligonucleotide
  Sense strand starting at position 2044 of SEQ ID NO: 1885922
accauugguuaaugagaaa

SEQ ID NO: 2377247 - RNA, 19 nt, Artificial Sequence
  Description of Artificial Sequence: Synthetic oligonucleotide
  Antisense strand to SEQ ID NO: 2377246
uuucucauuaaccaauggu

SEQ ID NO: 2377248 - RNA, 19 nt, Artificial Sequence
  Description of Artificial Sequence: Synthetic oligonucleotide
  Sense strand starting at position 2109 of SEQ ID NO: 1885922
accuuuggcucacgaggaa

SEQ ID NO: 2377249 - RNA, 19 nt, Artificial Sequence
  Description of Artificial Sequence: Synthetic oligonucleotide
  Antisense strand to SEQ ID NO: 2377248
uuccucgugagccaaaggu

SEQ ID NO: 2377250 - RNA, 19 nt, Artificial Sequence
  Description of Artificial Sequence: Synthetic oligonucleotide
  Sense strand starting at position 2554 of SEQ ID NO: 1885922
acaagaaacguguguaaua

SEQ ID NO: 2377251 - RNA, 19 nt, Artificial Sequence
  Description of Artificial Sequence: Synthetic oligonucleotide
  Antisense strand to SEQ ID NO: 2377250
uauuacacacguuucuugu

SEQ ID NO: 2377252 - RNA, 19 nt, Artificial Sequence
  Description of Artificial Sequence: Synthetic oligonucleotide
  Sense strand starting at position 2555 of SEQ ID NO: 1885922
caagaaacguguguaauau

SEQ ID NO: 2377253 - RNA, 19 nt, Artificial Sequence
  Description of Artificial Sequence: Synthetic oligonucleotide
  Antisense strand to SEQ ID NO: 2377252
auauuacacacguuucuug

SEQ ID NO: 2377254 - RNA, 19 nt, Artificial Sequence
  Description of Artificial Sequence: Synthetic oligonucleotide
  Sense strand starting at position 2556 of SEQ ID NO: 1885922
aagaaacguguguaauauu

SEQ ID NO: 2377255 - RNA, 19 nt, Artificial Sequence
  Description of Artificial Sequence: Synthetic oligonucleotide
  Antisense strand to SEQ ID NO: 2377254
aauauuacacacguuucuu

SEQ ID NO: 2377256 - RNA, 19 nt, Artificial Sequence
  Description of Artificial Sequence: Synthetic oligonucleotide
  Sense strand starting at position 3069 of SEQ ID NO: 1885922
uuuggagagaaucgucuaa

SEQ ID NO: 2377257 - RNA, 19 nt, Artificial Sequence
  Description of Artificial Sequence: Synthetic oligonucleotide
  Antisense strand to SEQ ID NO: 2377256
uuagacgauucucuccaaa

SEQ ID NO: 2377258 - RNA, 19 nt, Artificial Sequence
  Description of Artificial Sequence: Synthetic oligonucleotide
  Sense strand starting at position 3071 of SEQ ID NO: 1885922
uggagagaaucgucuaaac

SEQ ID NO: 2377259 - RNA, 19 nt, Artificial Sequence
  Description of Artificial Sequence: Synthetic oligonucleotide
  Antisense strand to SEQ ID NO: 2377258
guuuagacgauucucucca

SEQ ID NO: 2377260 - RNA, 19 nt, Artificial Sequence
  Description of Artificial Sequence: Synthetic oligonucleotide
  Sense strand starting at position 210 of SEQ ID NO: 1885923
acucuuauacgccaucuga

SEQ ID NO: 2377261 - RNA, 19 nt, Artificial Sequence
  Description of Artificial Sequence: Synthetic oligonucleotide
  Antisense strand to SEQ ID NO: 2377260
ucagauggcguauaagagu

SEQ ID NO: 2377262 - RNA, 19 nt, Artificial Sequence
  Description of Artificial Sequence: Synthetic oligonucleotide
  Sense strand starting at position 1055 of SEQ ID NO: 1885923
cgcugucaauguuuauguu

SEQ ID NO: 2377263 - RNA, 19 nt, Artificial Sequence
  Description of Artificial Sequence: Synthetic oligonucleotide
  Antisense strand to SEQ ID NO: 2377262
aacauaaacauugacagcg

SEQ ID NO: 2377264 - RNA, 19 nt, Artificial Sequence
  Description of Artificial Sequence: Synthetic oligonucleotide
  Sense strand starting at position 1058 of SEQ ID NO: 1885923
ugucaauguuuauguuaag

SEQ ID NO: 2377265 - RNA, 19 nt, Artificial Sequence
  Description of Artificial Sequence: Synthetic oligonucleotide
  Antisense strand to SEQ ID NO: 2377264
cuuaacauaaacauugaca

SEQ ID NO: 2377266 - RNA, 19 nt, Artificial Sequence
  Description of Artificial Sequence: Synthetic oligonucleotide
  Sense strand starting at position 1061 of SEQ ID NO: 1885923
caauguuuauguuaaggga

SEQ ID NO: 2377267 - RNA, 19 nt, Artificial Sequence
  Description of Artificial Sequence: Synthetic oligonucleotide
  Antisense strand to SEQ ID NO: 2377266
ucccuuaacauaaacauug

SEQ ID NO: 2377268 - RNA, 19 nt, Artificial Sequence
  Description of Artificial Sequence: Synthetic oligonucleotide
  Sense strand starting at position 1065 of SEQ ID NO: 1885923
guuuauguuaagggaguga

SEQ ID NO: 2377269 - RNA, 19 nt, Artificial Sequence
  Description of Artificial Sequence: Synthetic oligonucleotide
  Antisense strand to SEQ ID NO: 2377268
ucacucccuuaacauaaac

SEQ ID NO: 2377270 - RNA, 19 nt, Artificial Sequence
  Description of Artificial Sequence: Synthetic oligonucleotide
  Sense strand starting at position 1730 of SEQ ID NO: 1885923
uccggugaaccucgggauu

SEQ ID NO: 2377271 - RNA, 19 nt, Artificial Sequence
  Description of Artificial Sequence: Synthetic oligonucleotide
  Antisense strand to SEQ ID NO: 2377270
aaucccgagguucaccgga

SEQ ID NO: 2377272 - RNA, 19 nt, Artificial Sequence
  Description of Artificial Sequence: Synthetic oligonucleotide
  Sense strand starting at position 2386 of SEQ ID NO: 1885923
agauacagauccuaugaaa

SEQ ID NO: 2377273 - RNA, 19 nt, Artificial Sequence
  Description of Artificial Sequence: Synthetic oligonucleotide
  Antisense strand to SEQ ID NO: 2377272
uuucauaggaucuguaucu

SEQ ID NO: 2377274 - RNA, 19 nt, Artificial Sequence
  Description of Artificial Sequence: Synthetic oligonucleotide
  Sense strand starting at position 2553 of SEQ ID NO: 1885923
acaagaaacguguaauauu

SEQ ID NO: 2377275 - RNA, 19 nt, Artificial Sequence
  Description of Artificial Sequence: Synthetic oligonucleotide
  Antisense strand to SEQ ID NO: 2377274
aauauuacacguuucuugu

SEQ ID NO: 2377276 - RNA, 19 nt, Artificial Sequence
  Description of Artificial Sequence: Synthetic oligonucleotide
  Sense strand starting at position 3066 of SEQ ID NO: 1885923
uuuggagagaaucgucuaa

SEQ ID NO: 2377277 - RNA, 19 nt, Artificial Sequence
  Description of Artificial Sequence: Synthetic oligonucleotide
  Antisense strand to SEQ ID NO: 2377276
uuagacgauucucuccaaa

SEQ ID NO: 2377278 - RNA, 19 nt, Artificial Sequence
  Description of Artificial Sequence: Synthetic oligonucleotide
  Sense strand starting at position 3068 of SEQ ID NO: 1885923
uggagagaaucgucuaaac

SEQ ID NO: 2377279 - RNA, 19 nt, Artificial Sequence
  Description of Artificial Sequence: Synthetic oligonucleotide
  Antisense strand to SEQ ID NO: 2377278
guuuagacgauucucucca

SEQ ID NO: 2377280 - RNA, 19 nt, Artificial Sequence
  Description of Artificial Sequence: Synthetic oligonucleotide
  Sense strand starting at position 3945 of SEQ ID NO: 1885923
uguauuugcugaggaaauc

SEQ ID NO: 2377281 - RNA, 19 nt, Artificial Sequence
  Description of Artificial Sequence: Synthetic oligonucleotide
  Antisense strand to SEQ ID NO: 2377280
gauuuccucagcaaauaca

SEQ ID NO: 2377282 - RNA, 19 nt, Artificial Sequence
  Description of Artificial Sequence: Synthetic oligonucleotide
  Sense strand starting at position 1731 of SEQ ID NO: 1885924
uccggugaaccucgggauu

SEQ ID NO: 2377283 - RNA, 19 nt, Artificial Sequence
  Description of Artificial Sequence: Synthetic oligonucleotide
  Antisense strand to SEQ ID NO: 2377282
aaucccgagguucaccgga

SEQ ID NO: 2377284 - RNA, 19 nt, Artificial Sequence
  Description of Artificial Sequence: Synthetic oligonucleotide
  Sense strand starting at position 210 of SEQ ID NO: 1885925
acucuuauacgccaucuga

SEQ ID NO: 2377285 - RNA, 19 nt, Artificial Sequence
  Description of Artificial Sequence: Synthetic oligonucleotide
  Antisense strand to SEQ ID NO: 2377284
ucagauggcguauaagagu

SEQ ID NO: 2377286 - RNA, 19 nt, Artificial Sequence
  Description of Artificial Sequence: Synthetic oligonucleotide
  Sense strand starting at position 1055 of SEQ ID NO: 1885925
cgcugucaauguuuauguu

SEQ ID NO: 2377287 - RNA, 19 nt, Artificial Sequence
  Description of Artificial Sequence: Synthetic oligonucleotide
  Antisense strand to SEQ ID NO: 2377286
aacauaaacauugacagcg

SEQ ID NO: 2377288 - RNA, 19 nt, Artificial Sequence
  Description of Artificial Sequence: Synthetic oligonucleotide
  Sense strand starting at position 1058 of SEQ ID NO: 1885925
ugucaauguuuauguuaag

SEQ ID NO: 2377289 - RNA, 19 nt, Artificial Sequence
  Description of Artificial Sequence: Synthetic oligonucleotide
  Antisense strand to SEQ ID NO: 2377288
cuuaacauaaacauugaca

SEQ ID NO: 2377290 - RNA, 19 nt, Artificial Sequence
  Description of Artificial Sequence: Synthetic oligonucleotide
  Sense strand starting at position 1061 of SEQ ID NO: 1885925
caauguuuauguuaaggga

SEQ ID NO: 2377291 - RNA, 19 nt, Artificial Sequence
  Description of Artificial Sequence: Synthetic oligonucleotide
  Antisense strand to SEQ ID NO: 2377290
ucccuuaacauaaacauug

SEQ ID NO: 2377292 - RNA, 19 nt, Artificial Sequence
  Description of Artificial Sequence: Synthetic oligonucleotide
  Sense strand starting at position 1065 of SEQ ID NO: 1885925
guuuauguuaagggaguga

SEQ ID NO: 2377293 - RNA, 19 nt, Artificial Sequence
  Description of Artificial Sequence: Synthetic oligonucleotide
  Antisense strand to SEQ ID NO: 2377292
ucacucccuuaacauaaac

SEQ ID NO: 2377294 - RNA, 19 nt, Artificial Sequence
  Description of Artificial Sequence: Synthetic oligonucleotide
  Sense strand starting at position 1730 of SEQ ID NO: 1885925
uccggugaaccucgggauu

SEQ ID NO: 2377295 - RNA, 19 nt, Artificial Sequence
  Description of Artificial Sequence: Synthetic oligonucleotide
  Antisense strand to SEQ ID NO: 2377294
aaucccgagguucaccgga

SEQ ID NO: 2377296 - RNA, 19 nt, Artificial Sequence
  Description of Artificial Sequence: Synthetic oligonucleotide
  Sense strand starting at position 2386 of SEQ ID NO: 1885925
agauacagauccuaugaaa

SEQ ID NO: 2377297 - RNA, 19 nt, Artificial Sequence
  Description of Artificial Sequence: Synthetic oligonucleotide
  Antisense strand to SEQ ID NO: 2377296
uuucauaggaucuguaucu

SEQ ID NO: 2377298 - RNA, 19 nt, Artificial Sequence
  Description of Artificial Sequence: Synthetic oligonucleotide
  Sense strand starting at position 2553 of SEQ ID NO: 1885925
acaagaaacguguaauauu

SEQ ID NO: 2377299 - RNA, 19 nt, Artificial Sequence
  Description of Artificial Sequence: Synthetic oligonucleotide
  Antisense strand to SEQ ID NO: 2377298
aauauuacacguuucuugu

SEQ ID NO: 2377300 - RNA, 19 nt, Artificial Sequence
  Description of Artificial Sequence: Synthetic oligonucleotide
  Sense strand starting at position 3066 of SEQ ID NO: 1885925
uuuggagagaaucgucuaa

SEQ ID NO: 2377301 - RNA, 19 nt, Artificial Sequence
  Description of Artificial Sequence: Synthetic oligonucleotide
  Antisense strand to SEQ ID NO: 2377300
uuagacgauucucuccaaa

SEQ ID NO: 2377302 - RNA, 19 nt, Artificial Sequence
  Description of Artificial Sequence: Synthetic oligonucleotide
  Sense strand starting at position 3068 of SEQ ID NO: 1885925
uggagagaaucgucuaaac

SEQ ID NO: 2377303 - RNA, 19 nt, Artificial Sequence
  Description of Artificial Sequence: Synthetic oligonucleotide
  Antisense strand to SEQ ID NO: 2377302
guuuagacgauucucucca

SEQ ID NO: 2377304 - RNA, 19 nt, Artificial Sequence
  Description of Artificial Sequence: Synthetic oligonucleotide
  Sense strand starting at position 3945 of SEQ ID NO: 1885925
uguauuugcugaggaaauc

SEQ ID NO: 2377305 - RNA, 19 nt, Artificial Sequence
  Description of Artificial Sequence: Synthetic oligonucleotide
  Antisense strand to SEQ ID NO: 2377304
gauuuccucagcaaauaca

SEQ ID NO: 2377306 - RNA, 19 nt, Artificial Sequence
  Description of Artificial Sequence: Synthetic oligonucleotide
  Sense strand starting at position 1053 of SEQ ID NO: 1885926
ucccgcugucaauguuuau

SEQ ID NO: 2377307 - RNA, 19 nt, Artificial Sequence
  Description of Artificial Sequence: Synthetic oligonucleotide
  Antisense strand to SEQ ID NO: 2377306
auaaacauugacagcggga

SEQ ID NO: 2377308 - RNA, 19 nt, Artificial Sequence
  Description of Artificial Sequence: Synthetic oligonucleotide
  Sense strand starting at position 1057 of SEQ ID NO: 1885926
gcugucaauguuuaugcua

SEQ ID NO: 2377309 - RNA, 19 nt, Artificial Sequence
  Description of Artificial Sequence: Synthetic oligonucleotide
  Antisense strand to SEQ ID NO: 2377308
uagcauaaacauugacagc

SEQ ID NO: 2377310 - RNA, 19 nt, Artificial Sequence
  Description of Artificial Sequence: Synthetic oligonucleotide
  Sense strand starting at position 1059 of SEQ ID NO: 1885926
ugucaauguuuaugcuaag

SEQ ID NO: 2377311 - RNA, 19 nt, Artificial Sequence
  Description of Artificial Sequence: Synthetic oligonucleotide
  Antisense strand to SEQ ID NO: 2377310
cuuagcauaaacauugaca

SEQ ID NO: 2377312 - RNA, 19 nt, Artificial Sequence
  Description of Artificial Sequence: Synthetic oligonucleotide
  Sense strand starting at position 2387 of SEQ ID NO: 1885926
agauacagauccuaugaag

SEQ ID NO: 2377313 - RNA, 19 nt, Artificial Sequence
  Description of Artificial Sequence: Synthetic oligonucleotide
  Antisense strand to SEQ ID NO: 2377312
cuucauaggaucuguaucu

SEQ ID NO: 2377314 - RNA, 19 nt, Artificial Sequence
  Description of Artificial Sequence: Synthetic oligonucleotide
  Sense strand starting at position 621 of SEQ ID NO: 1885927
agagaagucugguauacug

SEQ ID NO: 2377315 - RNA, 19 nt, Artificial Sequence
  Description of Artificial Sequence: Synthetic oligonucleotide
  Antisense strand to SEQ ID NO: 2377314
caguauaccagacuucucu

SEQ ID NO: 2377316 - RNA, 19 nt, Artificial Sequence
  Description of Artificial Sequence: Synthetic oligonucleotide
  Sense strand starting at position 623 of SEQ ID NO: 1885927
agaagucugguauacuguu

SEQ ID NO: 2377317 - RNA, 19 nt, Artificial Sequence
  Description of Artificial Sequence: Synthetic oligonucleotide
  Antisense strand to SEQ ID NO: 2377316
aacaguauaccagacuucu

SEQ ID NO: 2377318 - RNA, 19 nt, Artificial Sequence
  Description of Artificial Sequence: Synthetic oligonucleotide
  Sense strand starting at position 629 of SEQ ID NO: 1885927
cugguauacuguuagaaac

SEQ ID NO: 2377319 - RNA, 19 nt, Artificial Sequence
  Description of Artificial Sequence: Synthetic oligonucleotide
  Antisense strand to SEQ ID NO: 2377318
guuucuaacaguauaccag

SEQ ID NO: 2377320 - RNA, 19 nt, Artificial Sequence
  Description of Artificial Sequence: Synthetic oligonucleotide
  Sense strand starting at position 631 of SEQ ID NO: 1885927
gguauacuguuagaaaccu

SEQ ID NO: 2377321 - RNA, 19 nt, Artificial Sequence
  Description of Artificial Sequence: Synthetic oligonucleotide
  Antisense strand to SEQ ID NO: 2377320
agguuucuaacaguauacc

SEQ ID NO: 2377322 - RNA, 19 nt, Artificial Sequence
  Description of Artificial Sequence: Synthetic oligonucleotide
  Sense strand starting at position 639 of SEQ ID NO: 1885927
guuagaaaccuaugugacu

SEQ ID NO: 2377323 - RNA, 19 nt, Artificial Sequence
  Description of Artificial Sequence: Synthetic oligonucleotide
  Antisense strand to SEQ ID NO: 2377322
agucacauagguuucuaac

SEQ ID NO: 2377324 - RNA, 19 nt, Artificial Sequence
  Description of Artificial Sequence: Synthetic oligonucleotide
  Sense strand starting at position 1056 of SEQ ID NO: 1885927
gcugucaauguuuaugcua

SEQ ID NO: 2377325 - RNA, 19 nt, Artificial Sequence
  Description of Artificial Sequence: Synthetic oligonucleotide
  Antisense strand to SEQ ID NO: 2377324
uagcauaaacauugacagc

SEQ ID NO: 2377326 - RNA, 19 nt, Artificial Sequence
  Description of Artificial Sequence: Synthetic oligonucleotide
  Sense strand starting at position 1058 of SEQ ID NO: 1885927
ugucaauguuuaugcuaag

SEQ ID NO: 2377327 - RNA, 19 nt, Artificial Sequence
  Description of Artificial Sequence: Synthetic oligonucleotide
  Antisense strand to SEQ ID NO: 2377326
cuuagcauaaacauugaca

SEQ ID NO: 2377328 - RNA, 19 nt, Artificial Sequence
  Description of Artificial Sequence: Synthetic oligonucleotide
  Sense strand starting at position 1061 of SEQ ID NO: 1885927
caauguuuaugcuaaggga

SEQ ID NO: 2377329 - RNA, 19 nt, Artificial Sequence
  Description of Artificial Sequence: Synthetic oligonucleotide
  Antisense strand to SEQ ID NO: 2377328
ucccuuagcauaaacauug

SEQ ID NO: 2377330 - RNA, 19 nt, Artificial Sequence
  Description of Artificial Sequence: Synthetic oligonucleotide
  Sense strand starting at position 2387 of SEQ ID NO: 1885927
agauacagauccuaugaac

SEQ ID NO: 2377331 - RNA, 19 nt, Artificial Sequence
  Description of Artificial Sequence: Synthetic oligonucleotide
  Antisense strand to SEQ ID NO: 2377330
guucauaggaucuguaucu

SEQ ID NO: 2377332 - RNA, 19 nt, Artificial Sequence
  Description of Artificial Sequence: Synthetic oligonucleotide
  Sense strand starting at position 3944 of SEQ ID NO: 1885927
uguauuugcugaggaaauu

SEQ ID NO: 2377333 - RNA, 19 nt, Artificial Sequence
  Description of Artificial Sequence: Synthetic oligonucleotide
  Antisense strand to SEQ ID NO: 2377332
aauuuccucagcaaauaca

SEQ ID NO: 2377334 - RNA, 19 nt, Artificial Sequence
  Description of Artificial Sequence: Synthetic oligonucleotide
  Sense strand starting at position 1053 of SEQ ID NO: 1885928
ucccgcugucaauguuuau

SEQ ID NO: 2377335 - RNA, 19 nt, Artificial Sequence
  Description of Artificial Sequence: Synthetic oligonucleotide
  Antisense strand to SEQ ID NO: 2377334
auaaacauugacagcggga

SEQ ID NO: 2377336 - RNA, 19 nt, Artificial Sequence
  Description of Artificial Sequence: Synthetic oligonucleotide
  Sense strand starting at position 1057 of SEQ ID NO: 1885928
gcugucaauguuuaugcua

SEQ ID NO: 2377337 - RNA, 19 nt, Artificial Sequence
  Description of Artificial Sequence: Synthetic oligonucleotide
  Antisense strand to SEQ ID NO: 2377336
uagcauaaacauugacagc

SEQ ID NO: 2377338 - RNA, 19 nt, Artificial Sequence
  Description of Artificial Sequence: Synthetic oligonucleotide
  Sense strand starting at position 1059 of SEQ ID NO: 1885928
ugucaauguuuaugcuaag

SEQ ID NO: 2377339 - RNA, 19 nt, Artificial Sequence
  Description of Artificial Sequence: Synthetic oligonucleotide
  Antisense strand to SEQ ID NO: 2377338
cuuagcauaaacauugaca

SEQ ID NO: 2377340 - RNA, 19 nt, Artificial Sequence
  Description of Artificial Sequence: Synthetic oligonucleotide
  Sense strand starting at position 2387 of SEQ ID NO: 1885928
agauacagauccuaugaag

SEQ ID NO: 2377341 - RNA, 19 nt, Artificial Sequence
  Description of Artificial Sequence: Synthetic oligonucleotide
  Antisense strand to SEQ ID NO: 2377340
cuucauaggaucuguaucu

SEQ ID NO: 2377342 - RNA, 19 nt, Artificial Sequence
  Description of Artificial Sequence: Synthetic oligonucleotide
  Sense strand starting at position 621 of SEQ ID NO: 1885929
agagaagucugguauacug

SEQ ID NO: 2377343 - RNA, 19 nt, Artificial Sequence
  Description of Artificial Sequence: Synthetic oligonucleotide
  Antisense strand to SEQ ID NO: 2377342
caguauaccagacuucucu

SEQ ID NO: 2377344 - RNA, 19 nt, Artificial Sequence
  Description of Artificial Sequence: Synthetic oligonucleotide
  Sense strand starting at position 623 of SEQ ID NO: 1885929
agaagucugguauacuguu

SEQ ID NO: 2377345 - RNA, 19 nt, Artificial Sequence
  Description of Artificial Sequence: Synthetic oligonucleotide
  Antisense strand to SEQ ID NO: 2377344
aacaguauaccagacuucu

SEQ ID NO: 2377346 - RNA, 19 nt, Artificial Sequence
  Description of Artificial Sequence: Synthetic oligonucleotide
  Sense strand starting at position 629 of SEQ ID NO: 1885929
cugguauacuguuagaaac

SEQ ID NO: 2377347 - RNA, 19 nt, Artificial Sequence
  Description of Artificial Sequence: Synthetic oligonucleotide
  Antisense strand to SEQ ID NO: 2377346
guuucuaacaguauaccag

SEQ ID NO: 2377348 - RNA, 19 nt, Artificial Sequence
  Description of Artificial Sequence: Synthetic oligonucleotide
  Sense strand starting at position 631 of SEQ ID NO: 1885929
gguauacuguuagaaaccu

SEQ ID NO: 2377349 - RNA, 19 nt, Artificial Sequence
  Description of Artificial Sequence: Synthetic oligonucleotide
  Antisense strand to SEQ ID NO: 2377348
agguuucuaacaguauacc

SEQ ID NO: 2377350 - RNA, 19 nt, Artificial Sequence
  Description of Artificial Sequence: Synthetic oligonucleotide
  Sense strand starting at position 639 of SEQ ID NO: 1885929
guuagaaaccuaugugacu

SEQ ID NO: 2377351 - RNA, 19 nt, Artificial Sequence
  Description of Artificial Sequence: Synthetic oligonucleotide
  Antisense strand to SEQ ID NO: 2377350
agucacauagguuucuaac

SEQ ID NO: 2377352 - RNA, 19 nt, Artificial Sequence
  Description of Artificial Sequence: Synthetic oligonucleotide
  Sense strand starting at position 1056 of SEQ ID NO: 1885929
gcugucaauguuuaugcua

SEQ ID NO: 2377353 - RNA, 19 nt, Artificial Sequence
  Description of Artificial Sequence: Synthetic oligonucleotide
  Antisense strand to SEQ ID NO: 2377352
uagcauaaacauugacagc

SEQ ID NO: 2377354 - RNA, 19 nt, Artificial Sequence
  Description of Artificial Sequence: Synthetic oligonucleotide
  Sense strand starting at position 1058 of SEQ ID NO: 1885929
ugucaauguuuaugcuaag

SEQ ID NO: 2377355 - RNA, 19 nt, Artificial Sequence
  Description of Artificial Sequence: Synthetic oligonucleotide
  Antisense strand to SEQ ID NO: 2377354
cuuagcauaaacauugaca

SEQ ID NO: 2377356 - RNA, 19 nt, Artificial Sequence
  Description of Artificial Sequence: Synthetic oligonucleotide
  Sense strand starting at position 1061 of SEQ ID NO: 1885929
caauguuuaugcuaaggga

SEQ ID NO: 2377357 - RNA, 19 nt, Artificial Sequence
  Description of Artificial Sequence: Synthetic oligonucleotide
  Antisense strand to SEQ ID NO: 2377356
ucccuuagcauaaacauug

SEQ ID NO: 2377358 - RNA, 19 nt, Artificial Sequence
  Description of Artificial Sequence: Synthetic oligonucleotide
  Sense strand starting at position 2387 of SEQ ID NO: 1885929
agauacagauccuaugaac

SEQ ID NO: 2377359 - RNA, 19 nt, Artificial Sequence
  Description of Artificial Sequence: Synthetic oligonucleotide
  Antisense strand to SEQ ID NO: 2377358
guucauaggaucuguaucu

SEQ ID NO: 2377360 - RNA, 19 nt, Artificial Sequence
  Description of Artificial Sequence: Synthetic oligonucleotide
  Sense strand starting at position 3944 of SEQ ID NO: 1885929
uguauuugcugaggaaauu

SEQ ID NO: 2377361 - RNA, 19 nt, Artificial Sequence
  Description of Artificial Sequence: Synthetic oligonucleotide
  Antisense strand to SEQ ID NO: 2377360
aauuuccucagcaaauaca

SEQ ID NO: 2377362 - RNA, 19 nt, Artificial Sequence
  Description of Artificial Sequence: Synthetic oligonucleotide
  Sense strand starting at position 1332 of SEQ ID NO: 1885930
gugucagcaccaugucuaa

SEQ ID NO: 2377363 - RNA, 19 nt, Artificial Sequence
  Description of Artificial Sequence: Synthetic oligonucleotide
  Antisense strand to SEQ ID NO: 2377362
uuagacauggugcugacac

SEQ ID NO: 2377364 - RNA, 19 nt, Artificial Sequence
  Description of Artificial Sequence: Synthetic oligonucleotide
  Sense strand starting at position 3261 of SEQ ID NO: 1885930
agucaaaccucugauaagu

SEQ ID NO: 2377365 - RNA, 19 nt, Artificial Sequence
  Description of Artificial Sequence: Synthetic oligonucleotide
  Antisense strand to SEQ ID NO: 2377364
acuuaucagagguuugacu

SEQ ID NO: 2377366 - RNA, 19 nt, Artificial Sequence
  Description of Artificial Sequence: Synthetic oligonucleotide
  Sense strand starting at position 306 of SEQ ID NO: 1885931
cguacaagguguugucaca

SEQ ID NO: 2377367 - RNA, 19 nt, Artificial Sequence
  Description of Artificial Sequence: Synthetic oligonucleotide
  Antisense strand to SEQ ID NO: 2377366
ugugacaacaccuuguacg

SEQ ID NO: 2377368 - RNA, 19 nt, Artificial Sequence
  Description of Artificial Sequence: Synthetic oligonucleotide
  Sense strand starting at position 2558 of SEQ ID NO: 1885931
cucuuauucuccugcguuu

SEQ ID NO: 2377369 - RNA, 19 nt, Artificial Sequence
  Description of Artificial Sequence: Synthetic oligonucleotide
  Antisense strand to SEQ ID NO: 2377368
aaacgcaggagaauaagag

SEQ ID NO: 2377370 - RNA, 19 nt, Artificial Sequence
  Description of Artificial Sequence: Synthetic oligonucleotide
  Sense strand starting at position 3078 of SEQ ID NO: 1885931
uguauacccuuauauguuu

SEQ ID NO: 2377371 - RNA, 19 nt, Artificial Sequence
  Description of Artificial Sequence: Synthetic oligonucleotide
  Antisense strand to SEQ ID NO: 2377370
aaacauauaaggguauaca

SEQ ID NO: 2377372 - RNA, 19 nt, Artificial Sequence
  Description of Artificial Sequence: Synthetic oligonucleotide
  Sense strand starting at position 3083 of SEQ ID NO: 1885931
acccuuauauguuuguuua

SEQ ID NO: 2377373 - RNA, 19 nt, Artificial Sequence
  Description of Artificial Sequence: Synthetic oligonucleotide
  Antisense strand to SEQ ID NO: 2377372
uaaacaaacauauaagggu

SEQ ID NO: 2377374 - RNA, 19 nt, Artificial Sequence
  Description of Artificial Sequence: Synthetic oligonucleotide
  Sense strand starting at position 3084 of SEQ ID NO: 1885931
cccuuauauguuuguuuaa

SEQ ID NO: 2377375 - RNA, 19 nt, Artificial Sequence
  Description of Artificial Sequence: Synthetic oligonucleotide
  Antisense strand to SEQ ID NO: 2377374
uuaaacaaacauauaaggg

SEQ ID NO: 2377376 - RNA, 19 nt, Artificial Sequence
  Description of Artificial Sequence: Synthetic oligonucleotide
  Sense strand starting at position 648 of SEQ ID NO: 1885932
agagaagucugguauacug

SEQ ID NO: 2377377 - RNA, 19 nt, Artificial Sequence
  Description of Artificial Sequence: Synthetic oligonucleotide
  Antisense strand to SEQ ID NO: 2377376
caguauaccagacuucucu

SEQ ID NO: 2377378 - RNA, 19 nt, Artificial Sequence
  Description of Artificial Sequence: Synthetic oligonucleotide
  Sense strand starting at position 650 of SEQ ID NO: 1885932
agaagucugguauacuguu

SEQ ID NO: 2377379 - RNA, 19 nt, Artificial Sequence
  Description of Artificial Sequence: Synthetic oligonucleotide
  Antisense strand to SEQ ID NO: 2377378
aacaguauaccagacuucu

SEQ ID NO: 2377380 - RNA, 19 nt, Artificial Sequence
  Description of Artificial Sequence: Synthetic oligonucleotide
  Sense strand starting at position 656 of SEQ ID NO: 1885932
cugguauacuguuagaaac

SEQ ID NO: 2377381 - RNA, 19 nt, Artificial Sequence
  Description of Artificial Sequence: Synthetic oligonucleotide
  Antisense strand to SEQ ID NO: 2377380
guuucuaacaguauaccag

SEQ ID NO: 2377382 - RNA, 19 nt, Artificial Sequence
  Description of Artificial Sequence: Synthetic oligonucleotide
  Sense strand starting at position 658 of SEQ ID NO: 1885932
gguauacuguuagaaaccu

SEQ ID NO: 2377383 - RNA, 19 nt, Artificial Sequence
  Description of Artificial Sequence: Synthetic oligonucleotide
  Antisense strand to SEQ ID NO: 2377382
agguuucuaacaguauacc

SEQ ID NO: 2377384 - RNA, 19 nt, Artificial Sequence
  Description of Artificial Sequence: Synthetic oligonucleotide
  Sense strand starting at position 666 of SEQ ID NO: 1885932
guuagaaaccuaugugacu

SEQ ID NO: 2377385 - RNA, 19 nt, Artificial Sequence
  Description of Artificial Sequence: Synthetic oligonucleotide
  Antisense strand to SEQ ID NO: 2377384
agucacauagguuucuaac

SEQ ID NO: 2377386 - RNA, 19 nt, Artificial Sequence
  Description of Artificial Sequence: Synthetic oligonucleotide
  Sense strand starting at position 170 of SEQ ID NO: 1885933
aaaccauauccuggguguu

SEQ ID NO: 2377387 - RNA, 19 nt, Artificial Sequence
  Description of Artificial Sequence: Synthetic oligonucleotide
  Antisense strand to SEQ ID NO: 2377386
aacacccaggauaugguuu

SEQ ID NO: 2377388 - RNA, 19 nt, Artificial Sequence
  Description of Artificial Sequence: Synthetic oligonucleotide
  Sense strand starting at position 180 of SEQ ID NO: 1885933
cuggguguucugaguguuu

SEQ ID NO: 2377389 - RNA, 19 nt, Artificial Sequence
  Description of Artificial Sequence: Synthetic oligonucleotide
  Antisense strand to SEQ ID NO: 2377388
aaacacucagaacacccag

SEQ ID NO: 2377390 - RNA, 19 nt, Artificial Sequence
  Description of Artificial Sequence: Synthetic oligonucleotide
  Sense strand starting at position 182 of SEQ ID NO: 1885933
ggguguucugaguguuuac

SEQ ID NO: 2377391 - RNA, 19 nt, Artificial Sequence
  Description of Artificial Sequence: Synthetic oligonucleotide
  Antisense strand to SEQ ID NO: 2377390
guaaacacucagaacaccc

SEQ ID NO: 2377392 - RNA, 19 nt, Artificial Sequence
  Description of Artificial Sequence: Synthetic oligonucleotide
  Sense strand starting at position 828 of SEQ ID NO: 1885934
guggcuuucucagggauac

SEQ ID NO: 2377393 - RNA, 19 nt, Artificial Sequence
  Description of Artificial Sequence: Synthetic oligonucleotide
  Antisense strand to SEQ ID NO: 2377392
guaucccugagaaagccac

SEQ ID NO: 2377394 - RNA, 19 nt, Artificial Sequence
  Description of Artificial Sequence: Synthetic oligonucleotide
  Sense strand starting at position 829 of SEQ ID NO: 1885934
uggcuuucucagggauacu

SEQ ID NO: 2377395 - RNA, 19 nt, Artificial Sequence
  Description of Artificial Sequence: Synthetic oligonucleotide
  Antisense strand to SEQ ID NO: 2377394
aguaucccugagaaagcca

SEQ ID NO: 2377396 - RNA, 19 nt, Artificial Sequence
  Description of Artificial Sequence: Synthetic oligonucleotide
  Sense strand starting at position 830 of SEQ ID NO: 1885934
ggcuuucucagggauacug

SEQ ID NO: 2377397 - RNA, 19 nt, Artificial Sequence
  Description of Artificial Sequence: Synthetic oligonucleotide
  Antisense strand to SEQ ID NO: 2377396
caguaucccugagaaagcc

SEQ ID NO: 2377398 - RNA, 19 nt, Artificial Sequence
  Description of Artificial Sequence: Synthetic oligonucleotide
  Sense strand starting at position 1964 of SEQ ID NO: 1885934
gggacugggucguaagauc

SEQ ID NO: 2377399 - RNA, 19 nt, Artificial Sequence
  Description of Artificial Sequence: Synthetic oligonucleotide
  Antisense strand to SEQ ID NO: 2377398
gaucuuacgacccaguccc

SEQ ID NO: 2377400 - RNA, 19 nt, Artificial Sequence
  Description of Artificial Sequence: Synthetic oligonucleotide
  Sense strand starting at position 173 of SEQ ID NO: 1885935
gucacagucuaaccugaua

SEQ ID NO: 2377401 - RNA, 19 nt, Artificial Sequence
  Description of Artificial Sequence: Synthetic oligonucleotide
  Antisense strand to SEQ ID NO: 2377400
uaucagguuagacugugac

SEQ ID NO: 2377402 - RNA, 19 nt, Artificial Sequence
  Description of Artificial Sequence: Synthetic oligonucleotide
  Sense strand starting at position 283 of SEQ ID NO: 1885935
uccugcuuugcugaaggaa

SEQ ID NO: 2377403 - RNA, 19 nt, Artificial Sequence
  Description of Artificial Sequence: Synthetic oligonucleotide
  Antisense strand to SEQ ID NO: 2377402
uuccuucagcaaagcagga

SEQ ID NO: 2377404 - RNA, 19 nt, Artificial Sequence
  Description of Artificial Sequence: Synthetic oligonucleotide
  Sense strand starting at position 386 of SEQ ID NO: 1885935
cguguuaggaacuaguacu

SEQ ID NO: 2377405 - RNA, 19 nt, Artificial Sequence
  Description of Artificial Sequence: Synthetic oligonucleotide
  Antisense strand to SEQ ID NO: 2377404
aguacuaguuccuaacacg

SEQ ID NO: 2377406 - RNA, 19 nt, Artificial Sequence
  Description of Artificial Sequence: Synthetic oligonucleotide
  Sense strand starting at position 480 of SEQ ID NO: 1885935
ggcggugagugcaucagaa

SEQ ID NO: 2377407 - RNA, 19 nt, Artificial Sequence
  Description of Artificial Sequence: Synthetic oligonucleotide
  Antisense strand to SEQ ID NO: 2377406
uucugaugcacucaccgcc

SEQ ID NO: 2377408 - RNA, 19 nt, Artificial Sequence
  Description of Artificial Sequence: Synthetic oligonucleotide
  Sense strand starting at position 482 of SEQ ID NO: 1885935
cggugagugcaucagaaau

SEQ ID NO: 2377409 - RNA, 19 nt, Artificial Sequence
  Description of Artificial Sequence: Synthetic oligonucleotide
  Antisense strand to SEQ ID NO: 2377408
auuucugaugcacucaccg

SEQ ID NO: 2377410 - RNA, 19 nt, Artificial Sequence
  Description of Artificial Sequence: Synthetic oligonucleotide
  Sense strand starting at position 588 of SEQ ID NO: 1885935
ggccucuaauaucugggaa

SEQ ID NO: 2377411 - RNA, 19 nt, Artificial Sequence
  Description of Artificial Sequence: Synthetic oligonucleotide
  Antisense strand to SEQ ID NO: 2377410
uucccagauauuagaggcc

SEQ ID NO: 2377412 - RNA, 19 nt, Artificial Sequence
  Description of Artificial Sequence: Synthetic oligonucleotide
  Sense strand starting at position 805 of SEQ ID NO: 1885935
gaaguauuccuggacucga

SEQ ID NO: 2377413 - RNA, 19 nt, Artificial Sequence
  Description of Artificial Sequence: Synthetic oligonucleotide
  Antisense strand to SEQ ID NO: 2377412
ucgaguccaggaauacuuc

SEQ ID NO: 2377414 - RNA, 19 nt, Artificial Sequence
  Description of Artificial Sequence: Synthetic oligonucleotide
  Sense strand starting at position 828 of SEQ ID NO: 1885935
cugaccauccugcauaaga

SEQ ID NO: 2377415 - RNA, 19 nt, Artificial Sequence
  Description of Artificial Sequence: Synthetic oligonucleotide
  Antisense strand to SEQ ID NO: 2377414
ucuuaugcaggauggucag

SEQ ID NO: 2377416 - RNA, 19 nt, Artificial Sequence
  Description of Artificial Sequence: Synthetic oligonucleotide
  Sense strand starting at position 830 of SEQ ID NO: 1885935
gaccauccugcauaagagu

SEQ ID NO: 2377417 - RNA, 19 nt, Artificial Sequence
  Description of Artificial Sequence: Synthetic oligonucleotide
  Antisense strand to SEQ ID NO: 2377416
acucuuaugcaggaugguc

SEQ ID NO: 2377418 - RNA, 19 nt, Artificial Sequence
  Description of Artificial Sequence: Synthetic oligonucleotide
  Sense strand starting at position 837 of SEQ ID NO: 1885935
cugcauaagagucgacaga

SEQ ID NO: 2377419 - RNA, 19 nt, Artificial Sequence
  Description of Artificial Sequence: Synthetic oligonucleotide
  Antisense strand to SEQ ID NO: 2377418
ucugucgacucuuaugcag

SEQ ID NO: 2377420 - RNA, 19 nt, Artificial Sequence
  Description of Artificial Sequence: Synthetic oligonucleotide
  Sense strand starting at position 838 of SEQ ID NO: 1885935
ugcauaagagucgacagaa

SEQ ID NO: 2377421 - RNA, 19 nt, Artificial Sequence
  Description of Artificial Sequence: Synthetic oligonucleotide
  Antisense strand to SEQ ID NO: 2377420
uucugucgacucuuaugca

SEQ ID NO: 2377422 - RNA, 19 nt, Artificial Sequence
  Description of Artificial Sequence: Synthetic oligonucleotide
  Sense strand starting at position 866 of SEQ ID NO: 1885935
cgugaugucaaggaaagca

SEQ ID NO: 2377423 - RNA, 19 nt, Artificial Sequence
  Description of Artificial Sequence: Synthetic oligonucleotide
  Antisense strand to SEQ ID NO: 2377422
ugcuuuccuugacaucacg

SEQ ID NO: 2377424 - RNA, 19 nt, Artificial Sequence
  Description of Artificial Sequence: Synthetic oligonucleotide
  Sense strand starting at position 926 of SEQ ID NO: 1885935
ugaguuccugauggaauga

SEQ ID NO: 2377425 - RNA, 19 nt, Artificial Sequence
  Description of Artificial Sequence: Synthetic oligonucleotide
  Antisense strand to SEQ ID NO: 2377424
ucauuccaucaggaacuca

SEQ ID NO: 2377426 - RNA, 19 nt, Artificial Sequence
  Description of Artificial Sequence: Synthetic oligonucleotide
  Sense strand starting at position 1002 of SEQ ID NO: 1885935
aucaaagagugguccagua

SEQ ID NO: 2377427 - RNA, 19 nt, Artificial Sequence
  Description of Artificial Sequence: Synthetic oligonucleotide
  Antisense strand to SEQ ID NO: 2377426
uacuggaccacucuuugau

SEQ ID NO: 2377428 - RNA, 19 nt, Artificial Sequence
  Description of Artificial Sequence: Synthetic oligonucleotide
  Sense strand starting at position 1009 of SEQ ID NO: 1885935
agugguccaguaggauuaa

SEQ ID NO: 2377429 - RNA, 19 nt, Artificial Sequence
  Description of Artificial Sequence: Synthetic oligonucleotide
  Antisense strand to SEQ ID NO: 2377428
uuaauccuacuggaccacu

SEQ ID NO: 2377430 - RNA, 19 nt, Artificial Sequence
  Description of Artificial Sequence: Synthetic oligonucleotide
  Sense strand starting at position 1019 of SEQ ID NO: 1885935
uaggauuaauuugggaauu

SEQ ID NO: 2377431 - RNA, 19 nt, Artificial Sequence
  Description of Artificial Sequence: Synthetic oligonucleotide
  Antisense strand to SEQ ID NO: 2377430
aauucccaaauuaauccua

SEQ ID NO: 2377432 - RNA, 19 nt, Artificial Sequence
  Description of Artificial Sequence: Synthetic oligonucleotide
  Sense strand starting at position 1020 of SEQ ID NO: 1885935
aggauuaauuugggaauua

SEQ ID NO: 2377433 - RNA, 19 nt, Artificial Sequence
  Description of Artificial Sequence: Synthetic oligonucleotide
  Antisense strand to SEQ ID NO: 2377432
uaauucccaaauuaauccu

SEQ ID NO: 2377434 - RNA, 19 nt, Artificial Sequence
  Description of Artificial Sequence: Synthetic oligonucleotide
  Sense strand starting at position 1401 of SEQ ID NO: 1885935
ugagaugucagccaagggu

SEQ ID NO: 2377435 - RNA, 19 nt, Artificial Sequence
  Description of Artificial Sequence: Synthetic oligonucleotide
  Antisense strand to SEQ ID NO: 2377434
acccuuggcugacaucuca

SEQ ID NO: 2377436 - RNA, 19 nt, Artificial Sequence
  Description of Artificial Sequence: Synthetic oligonucleotide
  Sense strand starting at position 1475 of SEQ ID NO: 1885935
gggaaaguuaccuguaaca

SEQ ID NO: 2377437 - RNA, 19 nt, Artificial Sequence
  Description of Artificial Sequence: Synthetic oligonucleotide
  Antisense strand to SEQ ID NO: 2377436
uguuacagguaacuuuccc

SEQ ID NO: 2377438 - RNA, 19 nt, Artificial Sequence
  Description of Artificial Sequence: Synthetic oligonucleotide
  Sense strand starting at position 1493 of SEQ ID NO: 1885935
accacaaugucagugauuc

SEQ ID NO: 2377439 - RNA, 19 nt, Artificial Sequence
  Description of Artificial Sequence: Synthetic oligonucleotide
  Antisense strand to SEQ ID NO: 2377438
gaaucacugacauuguggu

SEQ ID NO: 2377440 - RNA, 19 nt, Artificial Sequence
  Description of Artificial Sequence: Synthetic oligonucleotide
  Sense strand starting at position 1738 of SEQ ID NO: 1885935
cgguauaucgcacuaagcu

SEQ ID NO: 2377441 - RNA, 19 nt, Artificial Sequence
  Description of Artificial Sequence: Synthetic oligonucleotide
  Antisense strand to SEQ ID NO: 2377440
agcuuagugcgauauaccg

SEQ ID NO: 2377442 - RNA, 19 nt, Artificial Sequence
  Description of Artificial Sequence: Synthetic oligonucleotide
  Sense strand starting at position 2094 of SEQ ID NO: 1885935
ccagaugaauuccucugga

SEQ ID NO: 2377443 - RNA, 19 nt, Artificial Sequence
  Description of Artificial Sequence: Synthetic oligonucleotide
  Antisense strand to SEQ ID NO: 2377442
uccagaggaauucaucugg

SEQ ID NO: 2377444 - RNA, 19 nt, Artificial Sequence
  Description of Artificial Sequence: Synthetic oligonucleotide
  Sense strand starting at position 2097 of SEQ ID NO: 1885935
gaugaauuccucuggagcu

SEQ ID NO: 2377445 - RNA, 19 nt, Artificial Sequence
  Description of Artificial Sequence: Synthetic oligonucleotide
  Antisense strand to SEQ ID NO: 2377444
agcuccagaggaauucauc

SEQ ID NO: 2377446 - RNA, 19 nt, Artificial Sequence
  Description of Artificial Sequence: Synthetic oligonucleotide
  Sense strand starting at position 2099 of SEQ ID NO: 1885935
ugaauuccucuggagcuga

SEQ ID NO: 2377447 - RNA, 19 nt, Artificial Sequence
  Description of Artificial Sequence: Synthetic oligonucleotide
  Antisense strand to SEQ ID NO: 2377446
ucagcuccagaggaauuca

SEQ ID NO: 2377448 - RNA, 19 nt, Artificial Sequence
  Description of Artificial Sequence: Synthetic oligonucleotide
  Sense strand starting at position 2628 of SEQ ID NO: 1885935
cucaguguugcagaugaaa

SEQ ID NO: 2377449 - RNA, 19 nt, Artificial Sequence
  Description of Artificial Sequence: Synthetic oligonucleotide
  Antisense strand to SEQ ID NO: 2377448
uuucaucugcaacacugag

SEQ ID NO: 2377450 - RNA, 19 nt, Artificial Sequence
  Description of Artificial Sequence: Synthetic oligonucleotide
  Sense strand starting at position 2763 of SEQ ID NO: 1885935
cuggguaggcacuggaaua

SEQ ID NO: 2377451 - RNA, 19 nt, Artificial Sequence
  Description of Artificial Sequence: Synthetic oligonucleotide
  Antisense strand to SEQ ID NO: 2377450
uauuccagugccuacccag

SEQ ID NO: 2377452 - RNA, 19 nt, Artificial Sequence
  Description of Artificial Sequence: Synthetic oligonucleotide
  Sense strand starting at position 2764 of SEQ ID NO: 1885935
uggguaggcacuggaauaa

SEQ ID NO: 2377453 - RNA, 19 nt, Artificial Sequence
  Description of Artificial Sequence: Synthetic oligonucleotide
  Antisense strand to SEQ ID NO: 2377452
uuauuccagugccuaccca

SEQ ID NO: 2377454 - RNA, 19 nt, Artificial Sequence
  Description of Artificial Sequence: Synthetic oligonucleotide
  Sense strand starting at position 2801 of SEQ ID NO: 1885935
gguggccuucuggagaaau

SEQ ID NO: 2377455 - RNA, 19 nt, Artificial Sequence
  Description of Artificial Sequence: Synthetic oligonucleotide
  Antisense strand to SEQ ID NO: 2377454
auuucuccagaaggccacc

SEQ ID NO: 2377456 - RNA, 19 nt, Artificial Sequence
  Description of Artificial Sequence: Synthetic oligonucleotide
  Sense strand starting at position 2803 of SEQ ID NO: 1885935
uggccuucuggagaaauuc

SEQ ID NO: 2377457 - RNA, 19 nt, Artificial Sequence
  Description of Artificial Sequence: Synthetic oligonucleotide
  Antisense strand to SEQ ID NO: 2377456
gaauuucuccagaaggcca

SEQ ID NO: 2377458 - RNA, 19 nt, Artificial Sequence
  Description of Artificial Sequence: Synthetic oligonucleotide
  Sense strand starting at position 2845 of SEQ ID NO: 1885935
guaagagagaccuggugau

SEQ ID NO: 2377459 - RNA, 19 nt, Artificial Sequence
  Description of Artificial Sequence: Synthetic oligonucleotide
  Antisense strand to SEQ ID NO: 2377458
aucaccaggucucucuuac

SEQ ID NO: 2377460 - RNA, 19 nt, Artificial Sequence
  Description of Artificial Sequence: Synthetic oligonucleotide
  Sense strand starting at position 2867 of SEQ ID NO: 1885935
cauagaacuucucugugag

SEQ ID NO: 2377461 - RNA, 19 nt, Artificial Sequence
  Description of Artificial Sequence: Synthetic oligonucleotide
  Antisense strand to SEQ ID NO: 2377460
cucacagagaaguucuaug

SEQ ID NO: 2377462 - RNA, 19 nt, Artificial Sequence
  Description of Artificial Sequence: Synthetic oligonucleotide
  Sense strand starting at position 2868 of SEQ ID NO: 1885935
auagaacuucucugugaga

SEQ ID NO: 2377463 - RNA, 19 nt, Artificial Sequence
  Description of Artificial Sequence: Synthetic oligonucleotide
  Antisense strand to SEQ ID NO: 2377462
ucucacagagaaguucuau

SEQ ID NO: 2377464 - RNA, 19 nt, Artificial Sequence
  Description of Artificial Sequence: Synthetic oligonucleotide
  Sense strand starting at position 2869 of SEQ ID NO: 1885935
uagaacuucucugugagag

SEQ ID NO: 2377465 - RNA, 19 nt, Artificial Sequence
  Description of Artificial Sequence: Synthetic oligonucleotide
  Antisense strand to SEQ ID NO: 2377464
cucucacagagaaguucua

SEQ ID NO: 2377466 - RNA, 19 nt, Artificial Sequence
  Description of Artificial Sequence: Synthetic oligonucleotide
  Sense strand starting at position 2870 of SEQ ID NO: 1885935
agaacuucucugugagagg

SEQ ID NO: 2377467 - RNA, 19 nt, Artificial Sequence
  Description of Artificial Sequence: Synthetic oligonucleotide
  Antisense strand to SEQ ID NO: 2377466
ccucucacagagaaguucu

SEQ ID NO: 2377468 - RNA, 19 nt, Artificial Sequence
  Description of Artificial Sequence: Synthetic oligonucleotide
  Sense strand starting at position 3072 of SEQ ID NO: 1885935
gucucugggaccugaaaua

SEQ ID NO: 2377469 - RNA, 19 nt, Artificial Sequence
  Description of Artificial Sequence: Synthetic oligonucleotide
  Antisense strand to SEQ ID NO: 2377468
uauuucaggucccagagac

SEQ ID NO: 2377470 - RNA, 19 nt, Artificial Sequence
  Description of Artificial Sequence: Synthetic oligonucleotide
  Sense strand starting at position 3097 of SEQ ID NO: 1885935
ucagaauucccagagcuuc

SEQ ID NO: 2377471 - RNA, 19 nt, Artificial Sequence
  Description of Artificial Sequence: Synthetic oligonucleotide
  Antisense strand to SEQ ID NO: 2377470
gaagcucugggaauucuga

SEQ ID NO: 2377472 - RNA, 19 nt, Artificial Sequence
  Description of Artificial Sequence: Synthetic oligonucleotide
  Sense strand starting at position 3324 of SEQ ID NO: 1885935
gccugugauagagaagcuu

SEQ ID NO: 2377473 - RNA, 19 nt, Artificial Sequence
  Description of Artificial Sequence: Synthetic oligonucleotide
  Antisense strand to SEQ ID NO: 2377472
aagcuucucuaucacaggc

SEQ ID NO: 2377474 - RNA, 19 nt, Artificial Sequence
  Description of Artificial Sequence: Synthetic oligonucleotide
  Sense strand starting at position 3616 of SEQ ID NO: 1885935
ugggcuauuccugggaacu

SEQ ID NO: 2377475 - RNA, 19 nt, Artificial Sequence
  Description of Artificial Sequence: Synthetic oligonucleotide
  Antisense strand to SEQ ID NO: 2377474
aguucccaggaauagccca

SEQ ID NO: 2377476 - RNA, 19 nt, Artificial Sequence
  Description of Artificial Sequence: Synthetic oligonucleotide
  Sense strand starting at position 3617 of SEQ ID NO: 1885935
gggcuauuccugggaacug

SEQ ID NO: 2377477 - RNA, 19 nt, Artificial Sequence
  Description of Artificial Sequence: Synthetic oligonucleotide
  Antisense strand to SEQ ID NO: 2377476
caguucccaggaauagccc

SEQ ID NO: 2377478 - RNA, 19 nt, Artificial Sequence
  Description of Artificial Sequence: Synthetic oligonucleotide
  Sense strand starting at position 3709 of SEQ ID NO: 1885935
uggagugagcuguggaaag

SEQ ID NO: 2377479 - RNA, 19 nt, Artificial Sequence
  Description of Artificial Sequence: Synthetic oligonucleotide
  Antisense strand to SEQ ID NO: 2377478
cuuuccacagcucacucca

SEQ ID NO: 2377480 - RNA, 19 nt, Artificial Sequence
  Description of Artificial Sequence: Synthetic oligonucleotide
  Sense strand starting at position 129 of SEQ ID NO: 1885936
uuaaucaacuggucauaga

SEQ ID NO: 2377481 - RNA, 19 nt, Artificial Sequence
  Description of Artificial Sequence: Synthetic oligonucleotide
  Antisense strand to SEQ ID NO: 2377480
ucuaugaccaguugauuaa

SEQ ID NO: 2377482 - RNA, 19 nt, Artificial Sequence
  Description of Artificial Sequence: Synthetic oligonucleotide
  Sense strand starting at position 199 of SEQ ID NO: 1885936
cuuuauaaucuugaggcaa

SEQ ID NO: 2377483 - RNA, 19 nt, Artificial Sequence
  Description of Artificial Sequence: Synthetic oligonucleotide
  Antisense strand to SEQ ID NO: 2377482
uugccucaagauuauaaag

SEQ ID NO: 2377484 - RNA, 19 nt, Artificial Sequence
  Description of Artificial Sequence: Synthetic oligonucleotide
  Sense strand starting at position 498 of SEQ ID NO: 1885936
guaaauaagcaagaugcuu

SEQ ID NO: 2377485 - RNA, 19 nt, Artificial Sequence
  Description of Artificial Sequence: Synthetic oligonucleotide
  Antisense strand to SEQ ID NO: 2377484
aagcaucuugcuuauuuac

SEQ ID NO: 2377486 - RNA, 19 nt, Artificial Sequence
  Description of Artificial Sequence: Synthetic oligonucleotide
  Sense strand starting at position 503 of SEQ ID NO: 1885936
uaagcaagaugcuugagau

SEQ ID NO: 2377487 - RNA, 19 nt, Artificial Sequence
  Description of Artificial Sequence: Synthetic oligonucleotide
  Antisense strand to SEQ ID NO: 2377486
aucucaagcaucuugcuua

SEQ ID NO: 2377488 - RNA, 19 nt, Artificial Sequence
  Description of Artificial Sequence: Synthetic oligonucleotide
  Sense strand starting at position 504 of SEQ ID NO: 1885936
aagcaagaugcuugagauc

SEQ ID NO: 2377489 - RNA, 19 nt, Artificial Sequence
  Description of Artificial Sequence: Synthetic oligonucleotide
  Antisense strand to SEQ ID NO: 2377488
gaucucaagcaucuugcuu

SEQ ID NO: 2377490 - RNA, 19 nt, Artificial Sequence
  Description of Artificial Sequence: Synthetic oligonucleotide
  Sense strand starting at position 510 of SEQ ID NO: 1885936
gaugcuugagaucauuagu

SEQ ID NO: 2377491 - RNA, 19 nt, Artificial Sequence
  Description of Artificial Sequence: Synthetic oligonucleotide
  Antisense strand to SEQ ID NO: 2377490
acuaaugaucucaagcauc

SEQ ID NO: 2377492 - RNA, 19 nt, Artificial Sequence
  Description of Artificial Sequence: Synthetic oligonucleotide
  Sense strand starting at position 513 of SEQ ID NO: 1885936
gcuugagaucauuaguuau

SEQ ID NO: 2377493 - RNA, 19 nt, Artificial Sequence
  Description of Artificial Sequence: Synthetic oligonucleotide
  Antisense strand to SEQ ID NO: 2377492
auaacuaaugaucucaagc

SEQ ID NO: 2377494 - RNA, 19 nt, Artificial Sequence
  Description of Artificial Sequence: Synthetic oligonucleotide
  Sense strand starting at position 516 of SEQ ID NO: 1885936
ugagaucauuaguuauuag

SEQ ID NO: 2377495 - RNA, 19 nt, Artificial Sequence
  Description of Artificial Sequence: Synthetic oligonucleotide
  Antisense strand to SEQ ID NO: 2377494
cuaauaacuaaugaucuca

SEQ ID NO: 2377496 - RNA, 19 nt, Artificial Sequence
  Description of Artificial Sequence: Synthetic oligonucleotide
  Sense strand starting at position 519 of SEQ ID NO: 1885936
gaucauuaguuauuaggga

SEQ ID NO: 2377497 - RNA, 19 nt, Artificial Sequence
  Description of Artificial Sequence: Synthetic oligonucleotide
  Antisense strand to SEQ ID NO: 2377496
ucccuaauaacuaaugauc

SEQ ID NO: 2377498 - RNA, 19 nt, Artificial Sequence
  Description of Artificial Sequence: Synthetic oligonucleotide
  Sense strand starting at position 606 of SEQ ID NO: 1885936
cguaucaaggguugacaaa

SEQ ID NO: 2377499 - RNA, 19 nt, Artificial Sequence
  Description of Artificial Sequence: Synthetic oligonucleotide
  Antisense strand to SEQ ID NO: 2377498
uuugucaacccuugauacg

SEQ ID NO: 2377500 - RNA, 19 nt, Artificial Sequence
  Description of Artificial Sequence: Synthetic oligonucleotide
  Sense strand starting at position 666 of SEQ ID NO: 1885936
acaguauguagugaucuua

SEQ ID NO: 2377501 - RNA, 19 nt, Artificial Sequence
  Description of Artificial Sequence: Synthetic oligonucleotide
  Antisense strand to SEQ ID NO: 2377500
uaagaucacuacauacugu

SEQ ID NO: 2377502 - RNA, 19 nt, Artificial Sequence
  Description of Artificial Sequence: Synthetic oligonucleotide
  Sense strand starting at position 728 of SEQ ID NO: 1885936
cuuagaaguuuacccaaga

SEQ ID NO: 2377503 - RNA, 19 nt, Artificial Sequence
  Description of Artificial Sequence: Synthetic oligonucleotide
  Antisense strand to SEQ ID NO: 2377502
ucuuggguaaacuucuaag

SEQ ID NO: 2377504 - RNA, 19 nt, Artificial Sequence
  Description of Artificial Sequence: Synthetic oligonucleotide
  Sense strand starting at position 769 of SEQ ID NO: 1885936
cacaaacuuguacggaaau

SEQ ID NO: 2377505 - RNA, 19 nt, Artificial Sequence
  Description of Artificial Sequence: Synthetic oligonucleotide
  Antisense strand to SEQ ID NO: 2377504
auuuccguacaaguuugug

SEQ ID NO: 2377506 - RNA, 19 nt, Artificial Sequence
  Description of Artificial Sequence: Synthetic oligonucleotide
  Sense strand starting at position 782 of SEQ ID NO: 1885936
ggaaauguccauuagcaau

SEQ ID NO: 2377507 - RNA, 19 nt, Artificial Sequence
  Description of Artificial Sequence: Synthetic oligonucleotide
  Antisense strand to SEQ ID NO: 2377506
auugcuaauggacauuucc

SEQ ID NO: 2377508 - RNA, 19 nt, Artificial Sequence
  Description of Artificial Sequence: Synthetic oligonucleotide
  Sense strand starting at position 986 of SEQ ID NO: 1885936
gaguauaugcuguaugagu

SEQ ID NO: 2377509 - RNA, 19 nt, Artificial Sequence
  Description of Artificial Sequence: Synthetic oligonucleotide
  Antisense strand to SEQ ID NO: 2377508
acucauacagcauauacuc

SEQ ID NO: 2377510 - RNA, 19 nt, Artificial Sequence
  Description of Artificial Sequence: Synthetic oligonucleotide
  Sense strand starting at position 1390 of SEQ ID NO: 1885936
gcaaacugaucucuaguga

SEQ ID NO: 2377511 - RNA, 19 nt, Artificial Sequence
  Description of Artificial Sequence: Synthetic oligonucleotide
  Antisense strand to SEQ ID NO: 2377510
ucacuagagaucaguuugc

SEQ ID NO: 2377512 - RNA, 19 nt, Artificial Sequence
  Description of Artificial Sequence: Synthetic oligonucleotide
  Sense strand starting at position 1411 of SEQ ID NO: 1885936
gaaauuaaauuggugcaua

SEQ ID NO: 2377513 - RNA, 19 nt, Artificial Sequence
  Description of Artificial Sequence: Synthetic oligonucleotide
  Antisense strand to SEQ ID NO: 2377512
uaugcaccaauuuaauuuc

SEQ ID NO: 2377514 - RNA, 19 nt, Artificial Sequence
  Description of Artificial Sequence: Synthetic oligonucleotide
  Sense strand starting at position 1580 of SEQ ID NO: 1885936
auaggugcaguuuauuaua

SEQ ID NO: 2377515 - RNA, 19 nt, Artificial Sequence
  Description of Artificial Sequence: Synthetic oligonucleotide
  Antisense strand to SEQ ID NO: 2377514
uauaauaaacugcaccuau

SEQ ID NO: 2377516 - RNA, 19 nt, Artificial Sequence
  Description of Artificial Sequence: Synthetic oligonucleotide
  Sense strand starting at position 1706 of SEQ ID NO: 1885936
cugugaguuuaccugauca

SEQ ID NO: 2377517 - RNA, 19 nt, Artificial Sequence
  Description of Artificial Sequence: Synthetic oligonucleotide
  Antisense strand to SEQ ID NO: 2377516
ugaucagguaaacucacag

SEQ ID NO: 2377518 - RNA, 19 nt, Artificial Sequence
  Description of Artificial Sequence: Synthetic oligonucleotide
  Sense strand starting at position 1708 of SEQ ID NO: 1885936
gugaguuuaccugaucaua

SEQ ID NO: 2377519 - RNA, 19 nt, Artificial Sequence
  Description of Artificial Sequence: Synthetic oligonucleotide
  Antisense strand to SEQ ID NO: 2377518
uaugaucagguaaacucac

SEQ ID NO: 2377520 - RNA, 19 nt, Artificial Sequence
  Description of Artificial Sequence: Synthetic oligonucleotide
  Sense strand starting at position 1776 of SEQ ID NO: 1885936
guauaaaucgcaugagagc

SEQ ID NO: 2377521 - RNA, 19 nt, Artificial Sequence
  Description of Artificial Sequence: Synthetic oligonucleotide
  Antisense strand to SEQ ID NO: 2377520
gcucucaugcgauuuauac

SEQ ID NO: 2377522 - RNA, 19 nt, Artificial Sequence
  Description of Artificial Sequence: Synthetic oligonucleotide
  Sense strand starting at position 1777 of SEQ ID NO: 1885936
uauaaaucgcaugagagca

SEQ ID NO: 2377523 - RNA, 19 nt, Artificial Sequence
  Description of Artificial Sequence: Synthetic oligonucleotide
  Antisense strand to SEQ ID NO: 2377522
ugcucucaugcgauuuaua

SEQ ID NO: 2377524 - RNA, 19 nt, Artificial Sequence
  Description of Artificial Sequence: Synthetic oligonucleotide
  Sense strand starting at position 1803 of SEQ ID NO: 1885936
auucuucugugucuuuaga

SEQ ID NO: 2377525 - RNA, 19 nt, Artificial Sequence
  Description of Artificial Sequence: Synthetic oligonucleotide
  Antisense strand to SEQ ID NO: 2377524
ucuaaagacacagaagaau

SEQ ID NO: 2377526 - RNA, 19 nt, Artificial Sequence
  Description of Artificial Sequence: Synthetic oligonucleotide
  Sense strand starting at position 1852 of SEQ ID NO: 1885936
cucuaauguguuggcacaa

SEQ ID NO: 2377527 - RNA, 19 nt, Artificial Sequence
  Description of Artificial Sequence: Synthetic oligonucleotide
  Antisense strand to SEQ ID NO: 2377526
uugugccaacacauuagag

SEQ ID NO: 2377528 - RNA, 19 nt, Artificial Sequence
  Description of Artificial Sequence: Synthetic oligonucleotide
  Sense strand starting at position 1853 of SEQ ID NO: 1885936
ucuaauguguuggcacaau

SEQ ID NO: 2377529 - RNA, 19 nt, Artificial Sequence
  Description of Artificial Sequence: Synthetic oligonucleotide
  Antisense strand to SEQ ID NO: 2377528
auugugccaacacauuaga

SEQ ID NO: 2377530 - RNA, 19 nt, Artificial Sequence
  Description of Artificial Sequence: Synthetic oligonucleotide
  Sense strand starting at position 1876 of SEQ ID NO: 1885936
uaaauauaagguugcugua

SEQ ID NO: 2377531 - RNA, 19 nt, Artificial Sequence
  Description of Artificial Sequence: Synthetic oligonucleotide
  Antisense strand to SEQ ID NO: 2377530
uacagcaaccuuauauuua

SEQ ID NO: 2377532 - RNA, 19 nt, Artificial Sequence
  Description of Artificial Sequence: Synthetic oligonucleotide
  Sense strand starting at position 2252 of SEQ ID NO: 1885936
ugccaugguaguugaaaga

SEQ ID NO: 2377533 - RNA, 19 nt, Artificial Sequence
  Description of Artificial Sequence: Synthetic oligonucleotide
  Antisense strand to SEQ ID NO: 2377532
ucuuucaacuaccauggca

SEQ ID NO: 2377534 - RNA, 19 nt, Artificial Sequence
  Description of Artificial Sequence: Synthetic oligonucleotide
  Sense strand starting at position 2261 of SEQ ID NO: 1885936
aguugaaagaauugaguuc

SEQ ID NO: 2377535 - RNA, 19 nt, Artificial Sequence
  Description of Artificial Sequence: Synthetic oligonucleotide
  Antisense strand to SEQ ID NO: 2377534
gaacucaauucuuucaacu

SEQ ID NO: 2377536 - RNA, 19 nt, Artificial Sequence
  Description of Artificial Sequence: Synthetic oligonucleotide
  Sense strand starting at position 2317 of SEQ ID NO: 1885936
auggcaucaguguacuaca

SEQ ID NO: 2377537 - RNA, 19 nt, Artificial Sequence
  Description of Artificial Sequence: Synthetic oligonucleotide
  Antisense strand to SEQ ID NO: 2377536
uguaguacacugaugccau

SEQ ID NO: 2377538 - RNA, 19 nt, Artificial Sequence
  Description of Artificial Sequence: Synthetic oligonucleotide
  Sense strand starting at position 2533 of SEQ ID NO: 1885936
gcuccuuggccuuauagaa

SEQ ID NO: 2377539 - RNA, 19 nt, Artificial Sequence
  Description of Artificial Sequence: Synthetic oligonucleotide
  Antisense strand to SEQ ID NO: 2377538
uucuauaaggccaaggagc

SEQ ID NO: 2377540 - RNA, 19 nt, Artificial Sequence
  Description of Artificial Sequence: Synthetic oligonucleotide
  Sense strand starting at position 2671 of SEQ ID NO: 1885936
gaguguaacacuugucagg

SEQ ID NO: 2377541 - RNA, 19 nt, Artificial Sequence
  Description of Artificial Sequence: Synthetic oligonucleotide
  Antisense strand to SEQ ID NO: 2377540
ccugacaaguguuacacuc

SEQ ID NO: 2377542 - RNA, 19 nt, Artificial Sequence
  Description of Artificial Sequence: Synthetic oligonucleotide
  Sense strand starting at position 2749 of SEQ ID NO: 1885936
agcaaagucuugcuaauac

SEQ ID NO: 2377543 - RNA, 19 nt, Artificial Sequence
  Description of Artificial Sequence: Synthetic oligonucleotide
  Antisense strand to SEQ ID NO: 2377542
guauuagcaagacuuugcu

SEQ ID NO: 2377544 - RNA, 19 nt, Artificial Sequence
  Description of Artificial Sequence: Synthetic oligonucleotide
  Sense strand starting at position 3241 of SEQ ID NO: 1885936
agcaguaagacucggcuga

SEQ ID NO: 2377545 - RNA, 19 nt, Artificial Sequence
  Description of Artificial Sequence: Synthetic oligonucleotide
  Antisense strand to SEQ ID NO: 2377544
ucagccgagucuuacugcu

SEQ ID NO: 2377546 - RNA, 19 nt, Artificial Sequence
  Description of Artificial Sequence: Synthetic oligonucleotide
  Sense strand starting at position 3243 of SEQ ID NO: 1885936
caguaagacucggcugauu

SEQ ID NO: 2377547 - RNA, 19 nt, Artificial Sequence
  Description of Artificial Sequence: Synthetic oligonucleotide
  Antisense strand to SEQ ID NO: 2377546
aaucagccgagucuuacug

SEQ ID NO: 2377548 - RNA, 19 nt, Artificial Sequence
  Description of Artificial Sequence: Synthetic oligonucleotide
  Sense strand starting at position 3245 of SEQ ID NO: 1885936
guaagacucggcugauuuc

SEQ ID NO: 2377549 - RNA, 19 nt, Artificial Sequence
  Description of Artificial Sequence: Synthetic oligonucleotide
  Antisense strand to SEQ ID NO: 2377548
gaaaucagccgagucuuac

SEQ ID NO: 2377550 - RNA, 19 nt, Artificial Sequence
  Description of Artificial Sequence: Synthetic oligonucleotide
  Sense strand starting at position 3529 of SEQ ID NO: 1885936
aguguuacaauacgguuau

SEQ ID NO: 2377551 - RNA, 19 nt, Artificial Sequence
  Description of Artificial Sequence: Synthetic oligonucleotide
  Antisense strand to SEQ ID NO: 2377550
auaaccguauuguaacacu

SEQ ID NO: 2377552 - RNA, 19 nt, Artificial Sequence
  Description of Artificial Sequence: Synthetic oligonucleotide
  Sense strand starting at position 3546 of SEQ ID NO: 1885936
auggucuuaccaugcgaua

SEQ ID NO: 2377553 - RNA, 19 nt, Artificial Sequence
  Description of Artificial Sequence: Synthetic oligonucleotide
  Antisense strand to SEQ ID NO: 2377552
uaucgcaugguaagaccau

SEQ ID NO: 2377554 - RNA, 19 nt, Artificial Sequence
  Description of Artificial Sequence: Synthetic oligonucleotide
  Sense strand starting at position 3548 of SEQ ID NO: 1885936
ggucuuaccaugcgauaca

SEQ ID NO: 2377555 - RNA, 19 nt, Artificial Sequence
  Description of Artificial Sequence: Synthetic oligonucleotide
  Antisense strand to SEQ ID NO: 2377554
uguaucgcaugguaagacc

SEQ ID NO: 2377556 - RNA, 19 nt, Artificial Sequence
  Description of Artificial Sequence: Synthetic oligonucleotide
  Sense strand starting at position 3624 of SEQ ID NO: 1885936
acccaaggucuucgaacuu

SEQ ID NO: 2377557 - RNA, 19 nt, Artificial Sequence
  Description of Artificial Sequence: Synthetic oligonucleotide
  Antisense strand to SEQ ID NO: 2377556
aaguucgaagaccuugggu

SEQ ID NO: 2377558 - RNA, 19 nt, Artificial Sequence
  Description of Artificial Sequence: Synthetic oligonucleotide
  Sense strand starting at position 3677 of SEQ ID NO: 1885936
cuuauuaagucagcuggga

SEQ ID NO: 2377559 - RNA, 19 nt, Artificial Sequence
  Description of Artificial Sequence: Synthetic oligonucleotide
  Antisense strand to SEQ ID NO: 2377558
ucccagcugacuuaauaag

SEQ ID NO: 2377560 - RNA, 19 nt, Artificial Sequence
  Description of Artificial Sequence: Synthetic oligonucleotide
  Sense strand starting at position 754 of SEQ ID NO: 1885937
gggaaugagugaguuucua

SEQ ID NO: 2377561 - RNA, 19 nt, Artificial Sequence
  Description of Artificial Sequence: Synthetic oligonucleotide
  Antisense strand to SEQ ID NO: 2377560
uagaaacucacucauuccc

SEQ ID NO: 2377562 - RNA, 19 nt, Artificial Sequence
  Description of Artificial Sequence: Synthetic oligonucleotide
  Sense strand starting at position 1456 of SEQ ID NO: 1885937
gggaaagccugcuuccaag

SEQ ID NO: 2377563 - RNA, 19 nt, Artificial Sequence
  Description of Artificial Sequence: Synthetic oligonucleotide
  Antisense strand to SEQ ID NO: 2377562
cuuggaagcaggcuuuccc

SEQ ID NO: 2377564 - RNA, 19 nt, Artificial Sequence
  Description of Artificial Sequence: Synthetic oligonucleotide
  Sense strand starting at position 2533 of SEQ ID NO: 1885937
uggcucacguauguaauuu

SEQ ID NO: 2377565 - RNA, 19 nt, Artificial Sequence
  Description of Artificial Sequence: Synthetic oligonucleotide
  Antisense strand to SEQ ID NO: 2377564
aaauuacauacgugagcca

SEQ ID NO: 2377566 - RNA, 19 nt, Artificial Sequence
  Description of Artificial Sequence: Synthetic oligonucleotide
  Sense strand starting at position 566 of SEQ ID NO: 1885938
gguguaaagaacugucuau

SEQ ID NO: 2377567 - RNA, 19 nt, Artificial Sequence
  Description of Artificial Sequence: Synthetic oligonucleotide
  Antisense strand to SEQ ID NO: 2377566
auagacaguucuuuacacc

SEQ ID NO: 2377568 - RNA, 19 nt, Artificial Sequence
  Description of Artificial Sequence: Synthetic oligonucleotide
  Sense strand starting at position 573 of SEQ ID NO: 1885938
agaacugucuaucgaaaua

SEQ ID NO: 2377569 - RNA, 19 nt, Artificial Sequence
  Description of Artificial Sequence: Synthetic oligonucleotide
  Antisense strand to SEQ ID NO: 2377568
uauuucgauagacaguucu

SEQ ID NO: 2377570 - RNA, 19 nt, Artificial Sequence
  Description of Artificial Sequence: Synthetic oligonucleotide
  Sense strand starting at position 583 of SEQ ID NO: 1885938
aucgaaauauuaccguuau

SEQ ID NO: 2377571 - RNA, 19 nt, Artificial Sequence
  Description of Artificial Sequence: Synthetic oligonucleotide
  Antisense strand to SEQ ID NO: 2377570
auaacgguaauauuucgau

SEQ ID NO: 2377572 - RNA, 19 nt, Artificial Sequence
  Description of Artificial Sequence: Synthetic oligonucleotide
  Sense strand starting at position 584 of SEQ ID NO: 1885938
ucgaaauauuaccguuauu

SEQ ID NO: 2377573 - RNA, 19 nt, Artificial Sequence
  Description of Artificial Sequence: Synthetic oligonucleotide
  Antisense strand to SEQ ID NO: 2377572
aauaacgguaauauuucga

SEQ ID NO: 2377574 - RNA, 19 nt, Artificial Sequence
  Description of Artificial Sequence: Synthetic oligonucleotide
  Sense strand starting at position 618 of SEQ ID NO: 1885938
uccugacaagcuugcaauu

SEQ ID NO: 2377575 - RNA, 19 nt, Artificial Sequence
  Description of Artificial Sequence: Synthetic oligonucleotide
  Antisense strand to SEQ ID NO: 2377574
aauugcaagcuugucagga

SEQ ID NO: 2377576 - RNA, 19 nt, Artificial Sequence
  Description of Artificial Sequence: Synthetic oligonucleotide
  Sense strand starting at position 620 of SEQ ID NO: 1885938
cugacaagcuugcaauuau

SEQ ID NO: 2377577 - RNA, 19 nt, Artificial Sequence
  Description of Artificial Sequence: Synthetic oligonucleotide
  Antisense strand to SEQ ID NO: 2377576
auaauugcaagcuugucag

SEQ ID NO: 2377578 - RNA, 19 nt, Artificial Sequence
  Description of Artificial Sequence: Synthetic oligonucleotide
  Sense strand starting at position 681 of SEQ ID NO: 1885938
ccucauauucuugauguga

SEQ ID NO: 2377579 - RNA, 19 nt, Artificial Sequence
  Description of Artificial Sequence: Synthetic oligonucleotide
  Antisense strand to SEQ ID NO: 2377578
ucacaucaagaauaugagg

SEQ ID NO: 2377580 - RNA, 19 nt, Artificial Sequence
  Description of Artificial Sequence: Synthetic oligonucleotide
  Sense strand starting at position 683 of SEQ ID NO: 1885938
ucauauucuugaugugaaa

SEQ ID NO: 2377581 - RNA, 19 nt, Artificial Sequence
  Description of Artificial Sequence: Synthetic oligonucleotide
  Antisense strand to SEQ ID NO: 2377580
uuucacaucaagaauauga

SEQ ID NO: 2377582 - RNA, 19 nt, Artificial Sequence
  Description of Artificial Sequence: Synthetic oligonucleotide
  Sense strand starting at position 1142 of SEQ ID NO: 1885938
aaagccuuacacgggaaau

SEQ ID NO: 2377583 - RNA, 19 nt, Artificial Sequence
  Description of Artificial Sequence: Synthetic oligonucleotide
  Antisense strand to SEQ ID NO: 2377582
auuucccguguaaggcuuu

SEQ ID NO: 2377584 - RNA, 19 nt, Artificial Sequence
  Description of Artificial Sequence: Synthetic oligonucleotide
  Sense strand starting at position 1707 of SEQ ID NO: 1885938
gcgcgugcgugaaacaaau

SEQ ID NO: 2377585 - RNA, 19 nt, Artificial Sequence
  Description of Artificial Sequence: Synthetic oligonucleotide
  Antisense strand to SEQ ID NO: 2377584
auuuguuucacgcacgcgc

SEQ ID NO: 2377586 - RNA, 19 nt, Artificial Sequence
  Description of Artificial Sequence: Synthetic oligonucleotide
  Sense strand starting at position 1709 of SEQ ID NO: 1885938
gcgugcgugaaacaaauua

SEQ ID NO: 2377587 - RNA, 19 nt, Artificial Sequence
  Description of Artificial Sequence: Synthetic oligonucleotide
  Antisense strand to SEQ ID NO: 2377586
uaauuuguuucacgcacgc

SEQ ID NO: 2377588 - RNA, 19 nt, Artificial Sequence
  Description of Artificial Sequence: Synthetic oligonucleotide
  Sense strand starting at position 232 of SEQ ID NO: 1885939
uguauccuguaauugacaa

SEQ ID NO: 2377589 - RNA, 19 nt, Artificial Sequence
  Description of Artificial Sequence: Synthetic oligonucleotide
  Antisense strand to SEQ ID NO: 2377588
uugucaauuacaggauaca

SEQ ID NO: 2377590 - RNA, 19 nt, Artificial Sequence
  Description of Artificial Sequence: Synthetic oligonucleotide
  Sense strand starting at position 395 of SEQ ID NO: 1885939
ccaacucaucugugcaguu

SEQ ID NO: 2377591 - RNA, 19 nt, Artificial Sequence
  Description of Artificial Sequence: Synthetic oligonucleotide
  Antisense strand to SEQ ID NO: 2377590
aacugcacagaugaguugg

SEQ ID NO: 2377592 - RNA, 19 nt, Artificial Sequence
  Description of Artificial Sequence: Synthetic oligonucleotide
  Sense strand starting at position 976 of SEQ ID NO: 1885939
auuugaaccuaggaguaca

SEQ ID NO: 2377593 - RNA, 19 nt, Artificial Sequence
  Description of Artificial Sequence: Synthetic oligonucleotide
  Antisense strand to SEQ ID NO: 2377592
uguacuccuagguucaaau

SEQ ID NO: 2377594 - RNA, 19 nt, Artificial Sequence
  Description of Artificial Sequence: Synthetic oligonucleotide
  Sense strand starting at position 2832 of SEQ ID NO: 1885939
acucgagcuuccugcagaa

SEQ ID NO: 2377595 - RNA, 19 nt, Artificial Sequence
  Description of Artificial Sequence: Synthetic oligonucleotide
  Antisense strand to SEQ ID NO: 2377594
uucugcaggaagcucgagu

SEQ ID NO: 2377596 - RNA, 19 nt, Artificial Sequence
  Description of Artificial Sequence: Synthetic oligonucleotide
  Sense strand starting at position 3600 of SEQ ID NO: 1885939
gguauugcuuugggagcca

SEQ ID NO: 2377597 - RNA, 19 nt, Artificial Sequence
  Description of Artificial Sequence: Synthetic oligonucleotide
  Antisense strand to SEQ ID NO: 2377596
uggcucccaaagcaauacc

SEQ ID NO: 2377598 - RNA, 19 nt, Artificial Sequence
  Description of Artificial Sequence: Synthetic oligonucleotide
  Sense strand starting at position 3613 of SEQ ID NO: 1885939
gagccaagcuuacugagua

SEQ ID NO: 2377599 - RNA, 19 nt, Artificial Sequence
  Description of Artificial Sequence: Synthetic oligonucleotide
  Antisense strand to SEQ ID NO: 2377598
uacucaguaagcuuggcuc

SEQ ID NO: 2377600 - RNA, 19 nt, Artificial Sequence
  Description of Artificial Sequence: Synthetic oligonucleotide
  Sense strand starting at position 3617 of SEQ ID NO: 1885939
caagcuuacugaguagauc

SEQ ID NO: 2377601 - RNA, 19 nt, Artificial Sequence
  Description of Artificial Sequence: Synthetic oligonucleotide
  Antisense strand to SEQ ID NO: 2377600
gaucuacucaguaagcuug

SEQ ID NO: 2377602 - RNA, 19 nt, Artificial Sequence
  Description of Artificial Sequence: Synthetic oligonucleotide
  Sense strand starting at position 3618 of SEQ ID NO: 1885939
aagcuuacugaguagauca

SEQ ID NO: 2377603 - RNA, 19 nt, Artificial Sequence
  Description of Artificial Sequence: Synthetic oligonucleotide
  Antisense strand to SEQ ID NO: 2377602
ugaucuacucaguaagcuu

SEQ ID NO: 2377604 - RNA, 19 nt, Artificial Sequence
  Description of Artificial Sequence: Synthetic oligonucleotide
  Sense strand starting at position 1014 of SEQ ID NO: 1885940
gccacucaccucugaguaa

SEQ ID NO: 2377605 - RNA, 19 nt, Artificial Sequence
  Description of Artificial Sequence: Synthetic oligonucleotide
  Antisense strand to SEQ ID NO: 2377604
uuacucagaggugaguggc

SEQ ID NO: 2377606 - RNA, 19 nt, Artificial Sequence
  Description of Artificial Sequence: Synthetic oligonucleotide
  Sense strand starting at position 1885 of SEQ ID NO: 1885940
uucugcacucguuacugaa

SEQ ID NO: 2377607 - RNA, 19 nt, Artificial Sequence
  Description of Artificial Sequence: Synthetic oligonucleotide
  Antisense strand to SEQ ID NO: 2377606
uucaguaacgagugcagaa

SEQ ID NO: 2377608 - RNA, 19 nt, Artificial Sequence
  Description of Artificial Sequence: Synthetic oligonucleotide
  Sense strand starting at position 1887 of SEQ ID NO: 1885940
cugcacucguuacugaaua

SEQ ID NO: 2377609 - RNA, 19 nt, Artificial Sequence
  Description of Artificial Sequence: Synthetic oligonucleotide
  Antisense strand to SEQ ID NO: 2377608
uauucaguaacgagugcag

SEQ ID NO: 2377610 - RNA, 19 nt, Artificial Sequence
  Description of Artificial Sequence: Synthetic oligonucleotide
  Sense strand starting at position 1888 of SEQ ID NO: 1885940
ugcacucguuacugaauaa

SEQ ID NO: 2377611 - RNA, 19 nt, Artificial Sequence
  Description of Artificial Sequence: Synthetic oligonucleotide
  Antisense strand to SEQ ID NO: 2377610
uuauucaguaacgagugca

SEQ ID NO: 2377612 - RNA, 19 nt, Artificial Sequence
  Description of Artificial Sequence: Synthetic oligonucleotide
  Sense strand starting at position 2500 of SEQ ID NO: 1885940
cuucuaaauaugugucgua

SEQ ID NO: 2377613 - RNA, 19 nt, Artificial Sequence
  Description of Artificial Sequence: Synthetic oligonucleotide
  Antisense strand to SEQ ID NO: 2377612
uacgacacauauuuagaag

SEQ ID NO: 2377614 - RNA, 19 nt, Artificial Sequence
  Description of Artificial Sequence: Synthetic oligonucleotide
  Sense strand starting at position 2501 of SEQ ID NO: 1885940
uucuaaauaugugucguaa

SEQ ID NO: 2377615 - RNA, 19 nt, Artificial Sequence
  Description of Artificial Sequence: Synthetic oligonucleotide
  Antisense strand to SEQ ID NO: 2377614
uuacgacacauauuuagaa

SEQ ID NO: 2377616 - RNA, 19 nt, Artificial Sequence
  Description of Artificial Sequence: Synthetic oligonucleotide
  Sense strand starting at position 2545 of SEQ ID NO: 1885940
uauuguuucuaggcaauag

SEQ ID NO: 2377617 - RNA, 19 nt, Artificial Sequence
  Description of Artificial Sequence: Synthetic oligonucleotide
  Antisense strand to SEQ ID NO: 2377616
cuauugccuagaaacaaua

SEQ ID NO: 2377618 - RNA, 19 nt, Artificial Sequence
  Description of Artificial Sequence: Synthetic oligonucleotide
  Sense strand starting at position 2767 of SEQ ID NO: 1885940
acuggauucuagcaccagu

SEQ ID NO: 2377619 - RNA, 19 nt, Artificial Sequence
  Description of Artificial Sequence: Synthetic oligonucleotide
  Antisense strand to SEQ ID NO: 2377618
acuggugcuagaauccagu

SEQ ID NO: 2377620 - RNA, 19 nt, Artificial Sequence
  Description of Artificial Sequence: Synthetic oligonucleotide
  Sense strand starting at position 3255 of SEQ ID NO: 1885940
cuaguaacgaccgauuacu

SEQ ID NO: 2377621 - RNA, 19 nt, Artificial Sequence
  Description of Artificial Sequence: Synthetic oligonucleotide
  Antisense strand to SEQ ID NO: 2377620
aguaaucggucguuacuag

SEQ ID NO: 2377622 - RNA, 19 nt, Artificial Sequence
  Description of Artificial Sequence: Synthetic oligonucleotide
  Sense strand starting at position 2050 of SEQ ID NO: 1885941
ucacgugauucgccgauaa

SEQ ID NO: 2377623 - RNA, 19 nt, Artificial Sequence
  Description of Artificial Sequence: Synthetic oligonucleotide
  Antisense strand to SEQ ID NO: 2377622
uuaucggcgaaucacguga

SEQ ID NO: 2377624 - RNA, 19 nt, Artificial Sequence
  Description of Artificial Sequence: Synthetic oligonucleotide
  Sense strand starting at position 2052 of SEQ ID NO: 1885941
acgugauucgccgauaagu

SEQ ID NO: 2377625 - RNA, 19 nt, Artificial Sequence
  Description of Artificial Sequence: Synthetic oligonucleotide
  Antisense strand to SEQ ID NO: 2377624
acuuaucggcgaaucacgu

SEQ ID NO: 2377626 - RNA, 19 nt, Artificial Sequence
  Description of Artificial Sequence: Synthetic oligonucleotide
  Sense strand starting at position 2054 of SEQ ID NO: 1885941
gugauucgccgauaaguca

SEQ ID NO: 2377627 - RNA, 19 nt, Artificial Sequence
  Description of Artificial Sequence: Synthetic oligonucleotide
  Antisense strand to SEQ ID NO: 2377626
ugacuuaucggcgaaucac

SEQ ID NO: 2377628 - RNA, 19 nt, Artificial Sequence
  Description of Artificial Sequence: Synthetic oligonucleotide
  Sense strand starting at position 2402 of SEQ ID NO: 1885941
ggacuugucccgcccuguu

SEQ ID NO: 2377629 - RNA, 19 nt, Artificial Sequence
  Description of Artificial Sequence: Synthetic oligonucleotide
  Antisense strand to SEQ ID NO: 2377628
aacagggcgggacaagucc

SEQ ID NO: 2377630 - RNA, 19 nt, Artificial Sequence
  Description of Artificial Sequence: Synthetic oligonucleotide
  Sense strand starting at position 2570 of SEQ ID NO: 1885941
acgguucaaucaggagauu

SEQ ID NO: 2377631 - RNA, 19 nt, Artificial Sequence
  Description of Artificial Sequence: Synthetic oligonucleotide
  Antisense strand to SEQ ID NO: 2377630
aaucuccugauugaaccgu

SEQ ID NO: 2377632 - RNA, 19 nt, Artificial Sequence
  Description of Artificial Sequence: Synthetic oligonucleotide
  Sense strand starting at position 2612 of SEQ ID NO: 1885941
gcagaaaucuaaggugauc

SEQ ID NO: 2377633 - RNA, 19 nt, Artificial Sequence
  Description of Artificial Sequence: Synthetic oligonucleotide
  Antisense strand to SEQ ID NO: 2377632
gaucaccuuagauuucugc

SEQ ID NO: 2377634 - RNA, 19 nt, Artificial Sequence
  Description of Artificial Sequence: Synthetic oligonucleotide
  Sense strand starting at position 2755 of SEQ ID NO: 1885941
guuucuggcacauagaaug

SEQ ID NO: 2377635 - RNA, 19 nt, Artificial Sequence
  Description of Artificial Sequence: Synthetic oligonucleotide
  Antisense strand to SEQ ID NO: 2377634
cauucuaugugccagaaac

SEQ ID NO: 2377636 - RNA, 19 nt, Artificial Sequence
  Description of Artificial Sequence: Synthetic oligonucleotide
  Sense strand starting at position 2769 of SEQ ID NO: 1885941
gaauguuuggcgggcggau

SEQ ID NO: 2377637 - RNA, 19 nt, Artificial Sequence
  Description of Artificial Sequence: Synthetic oligonucleotide
  Antisense strand to SEQ ID NO: 2377636
auccgcccgccaaacauuc

SEQ ID NO: 2377638 - RNA, 19 nt, Artificial Sequence
  Description of Artificial Sequence: Synthetic oligonucleotide
  Sense strand starting at position 3053 of SEQ ID NO: 1885941
aaguguaaauugugaaaga

SEQ ID NO: 2377639 - RNA, 19 nt, Artificial Sequence
  Description of Artificial Sequence: Synthetic oligonucleotide
  Antisense strand to SEQ ID NO: 2377638
ucuuucacaauuuacacuu

SEQ ID NO: 2377640 - RNA, 19 nt, Artificial Sequence
  Description of Artificial Sequence: Synthetic oligonucleotide
  Sense strand starting at position 3054 of SEQ ID NO: 1885941
aguguaaauugugaaagaa

SEQ ID NO: 2377641 - RNA, 19 nt, Artificial Sequence
  Description of Artificial Sequence: Synthetic oligonucleotide
  Antisense strand to SEQ ID NO: 2377640
uucuuucacaauuuacacu

SEQ ID NO: 2377642 - RNA, 19 nt, Artificial Sequence
  Description of Artificial Sequence: Synthetic oligonucleotide
  Sense strand starting at position 3126 of SEQ ID NO: 1885941
gauguaauuagccgggacu

SEQ ID NO: 2377643 - RNA, 19 nt, Artificial Sequence
  Description of Artificial Sequence: Synthetic oligonucleotide
  Antisense strand to SEQ ID NO: 2377642
agucccggcuaauuacauc

SEQ ID NO: 2377644 - RNA, 19 nt, Artificial Sequence
  Description of Artificial Sequence: Synthetic oligonucleotide
  Sense strand starting at position 3128 of SEQ ID NO: 1885941
uguaauuagccgggacuga

SEQ ID NO: 2377645 - RNA, 19 nt, Artificial Sequence
  Description of Artificial Sequence: Synthetic oligonucleotide
  Antisense strand to SEQ ID NO: 2377644
ucagucccggcuaauuaca

SEQ ID NO: 2377646 - RNA, 19 nt, Artificial Sequence
  Description of Artificial Sequence: Synthetic oligonucleotide
  Sense strand starting at position 3129 of SEQ ID NO: 1885941
guaauuagccgggacugaa

SEQ ID NO: 2377647 - RNA, 19 nt, Artificial Sequence
  Description of Artificial Sequence: Synthetic oligonucleotide
  Antisense strand to SEQ ID NO: 2377646
uucagucccggcuaauuac

SEQ ID NO: 2377648 - RNA, 19 nt, Artificial Sequence
  Description of Artificial Sequence: Synthetic oligonucleotide
  Sense strand starting at position 3150 of SEQ ID NO: 1885941
gaggguauuccaggcagga

SEQ ID NO: 2377649 - RNA, 19 nt, Artificial Sequence
  Description of Artificial Sequence: Synthetic oligonucleotide
  Antisense strand to SEQ ID NO: 2377648
uccugccuggaauacccuc

SEQ ID NO: 2377650 - RNA, 19 nt, Artificial Sequence
  Description of Artificial Sequence: Synthetic oligonucleotide
  Sense strand starting at position 3288 of SEQ ID NO: 1885941
aagagucaagagcgcuuua

SEQ ID NO: 2377651 - RNA, 19 nt, Artificial Sequence
  Description of Artificial Sequence: Synthetic oligonucleotide
  Antisense strand to SEQ ID NO: 2377650
uaaagcgcucuugacucuu

SEQ ID NO: 2377652 - RNA, 19 nt, Artificial Sequence
  Description of Artificial Sequence: Synthetic oligonucleotide
  Sense strand starting at position 3293 of SEQ ID NO: 1885941
ucaagagcgcuuuagacau

SEQ ID NO: 2377653 - RNA, 19 nt, Artificial Sequence
  Description of Artificial Sequence: Synthetic oligonucleotide
  Antisense strand to SEQ ID NO: 2377652
augucuaaagcgcucuuga

SEQ ID NO: 2377654 - RNA, 19 nt, Artificial Sequence
  Description of Artificial Sequence: Synthetic oligonucleotide
  Sense strand starting at position 3354 of SEQ ID NO: 1885941
gcagcuauguaaucaguac

SEQ ID NO: 2377655 - RNA, 19 nt, Artificial Sequence
  Description of Artificial Sequence: Synthetic oligonucleotide
  Antisense strand to SEQ ID NO: 2377654
guacugauuacauagcugc

SEQ ID NO: 2377656 - RNA, 19 nt, Artificial Sequence
  Description of Artificial Sequence: Synthetic oligonucleotide
  Sense strand starting at position 3358 of SEQ ID NO: 1885941
cuauguaaucaguacugaa

SEQ ID NO: 2377657 - RNA, 19 nt, Artificial Sequence
  Description of Artificial Sequence: Synthetic oligonucleotide
  Antisense strand to SEQ ID NO: 2377656
uucaguacugauuacauag

SEQ ID NO: 2377658 - RNA, 19 nt, Artificial Sequence
  Description of Artificial Sequence: Synthetic oligonucleotide
  Sense strand starting at position 3389 of SEQ ID NO: 1885941
ggauaauuauuccacagca

SEQ ID NO: 2377659 - RNA, 19 nt, Artificial Sequence
  Description of Artificial Sequence: Synthetic oligonucleotide
  Antisense strand to SEQ ID NO: 2377658
ugcuguggaauaauuaucc

SEQ ID NO: 2377660 - RNA, 19 nt, Artificial Sequence
  Description of Artificial Sequence: Synthetic oligonucleotide
  Sense strand starting at position 3470 of SEQ ID NO: 1885941
gaaguuucuugauaaucug

SEQ ID NO: 2377661 - RNA, 19 nt, Artificial Sequence
  Description of Artificial Sequence: Synthetic oligonucleotide
  Antisense strand to SEQ ID NO: 2377660
cagauuaucaagaaacuuc

SEQ ID NO: 2377662 - RNA, 19 nt, Artificial Sequence
  Description of Artificial Sequence: Synthetic oligonucleotide
  Sense strand starting at position 3473 of SEQ ID NO: 1885941
guuucuugauaaucuggaa

SEQ ID NO: 2377663 - RNA, 19 nt, Artificial Sequence
  Description of Artificial Sequence: Synthetic oligonucleotide
  Antisense strand to SEQ ID NO: 2377662
uuccagauuaucaagaaac

SEQ ID NO: 2377664 - RNA, 19 nt, Artificial Sequence
  Description of Artificial Sequence: Synthetic oligonucleotide
  Sense strand starting at position 3476 of SEQ ID NO: 1885941
ucuugauaaucuggaaucu

SEQ ID NO: 2377665 - RNA, 19 nt, Artificial Sequence
  Description of Artificial Sequence: Synthetic oligonucleotide
  Antisense strand to SEQ ID NO: 2377664
agauuccagauuaucaaga

SEQ ID NO: 2377666 - RNA, 19 nt, Artificial Sequence
  Description of Artificial Sequence: Synthetic oligonucleotide
  Sense strand starting at position 3489 of SEQ ID NO: 1885941
gaaucuagcucuuugguua

SEQ ID NO: 2377667 - RNA, 19 nt, Artificial Sequence
  Description of Artificial Sequence: Synthetic oligonucleotide
  Antisense strand to SEQ ID NO: 2377666
uaaccaaagagcuagauuc

SEQ ID NO: 2377668 - RNA, 19 nt, Artificial Sequence
  Description of Artificial Sequence: Synthetic oligonucleotide
  Sense strand starting at position 3492 of SEQ ID NO: 1885941
ucuagcucuuugguuauau

SEQ ID NO: 2377669 - RNA, 19 nt, Artificial Sequence
  Description of Artificial Sequence: Synthetic oligonucleotide
  Antisense strand to SEQ ID NO: 2377668
auauaaccaaagagcuaga

SEQ ID NO: 2377670 - RNA, 19 nt, Artificial Sequence
  Description of Artificial Sequence: Synthetic oligonucleotide
  Sense strand starting at position 3493 of SEQ ID NO: 1885941
cuagcucuuugguuauauu

SEQ ID NO: 2377671 - RNA, 19 nt, Artificial Sequence
  Description of Artificial Sequence: Synthetic oligonucleotide
  Antisense strand to SEQ ID NO: 2377670
aauauaaccaaagagcuag

SEQ ID NO: 2377672 - RNA, 19 nt, Artificial Sequence
  Description of Artificial Sequence: Synthetic oligonucleotide
  Sense strand starting at position 3503 of SEQ ID NO: 1885941
gguuauauuguauagaugu

SEQ ID NO: 2377673 - RNA, 19 nt, Artificial Sequence
  Description of Artificial Sequence: Synthetic oligonucleotide
  Antisense strand to SEQ ID NO: 2377672
acaucuauacaauauaacc

SEQ ID NO: 2377674 - RNA, 19 nt, Artificial Sequence
  Description of Artificial Sequence: Synthetic oligonucleotide
  Sense strand starting at position 3546 of SEQ ID NO: 1885941
gguuaagucuuguaguaau

SEQ ID NO: 2377675 - RNA, 19 nt, Artificial Sequence
  Description of Artificial Sequence: Synthetic oligonucleotide
  Antisense strand to SEQ ID NO: 2377674
auuacuacaagacuuaacc

SEQ ID NO: 2377676 - RNA, 19 nt, Artificial Sequence
  Description of Artificial Sequence: Synthetic oligonucleotide
  Sense strand starting at position 3655 of SEQ ID NO: 1885941
acccuuagagagugacauu

SEQ ID NO: 2377677 - RNA, 19 nt, Artificial Sequence
  Description of Artificial Sequence: Synthetic oligonucleotide
  Antisense strand to SEQ ID NO: 2377676
aaugucacucucuaagggu

SEQ ID NO: 2377678 - RNA, 19 nt, Artificial Sequence
  Description of Artificial Sequence: Synthetic oligonucleotide
  Sense strand starting at position 3701 of SEQ ID NO: 1885941
gcaucaggguaguccuuaa

SEQ ID NO: 2377679 - RNA, 19 nt, Artificial Sequence
  Description of Artificial Sequence: Synthetic oligonucleotide
  Antisense strand to SEQ ID NO: 2377678
uuaaggacuacccugaugc

SEQ ID NO: 2377680 - RNA, 19 nt, Artificial Sequence
  Description of Artificial Sequence: Synthetic oligonucleotide
  Sense strand starting at position 3708 of SEQ ID NO: 1885941
gguaguccuuaacugguaa

SEQ ID NO: 2377681 - RNA, 19 nt, Artificial Sequence
  Description of Artificial Sequence: Synthetic oligonucleotide
  Antisense strand to SEQ ID NO: 2377680
uuaccaguuaaggacuacc

SEQ ID NO: 2377682 - RNA, 19 nt, Artificial Sequence
  Description of Artificial Sequence: Synthetic oligonucleotide
  Sense strand starting at position 3745 of SEQ ID NO: 1885941
ggauaagaggccugcuguu

SEQ ID NO: 2377683 - RNA, 19 nt, Artificial Sequence
  Description of Artificial Sequence: Synthetic oligonucleotide
  Antisense strand to SEQ ID NO: 2377682
aacagcaggccucuuaucc

SEQ ID NO: 2377684 - RNA, 19 nt, Artificial Sequence
  Description of Artificial Sequence: Synthetic oligonucleotide
  Sense strand starting at position 3757 of SEQ ID NO: 1885941
ugcuguugagugugguaga

SEQ ID NO: 2377685 - RNA, 19 nt, Artificial Sequence
  Description of Artificial Sequence: Synthetic oligonucleotide
  Antisense strand to SEQ ID NO: 2377684
ucuaccacacucaacagca

SEQ ID NO: 2377686 - RNA, 19 nt, Artificial Sequence
  Description of Artificial Sequence: Synthetic oligonucleotide
  Sense strand starting at position 3760 of SEQ ID NO: 1885941
uguugagugugguagauca

SEQ ID NO: 2377687 - RNA, 19 nt, Artificial Sequence
  Description of Artificial Sequence: Synthetic oligonucleotide
  Antisense strand to SEQ ID NO: 2377686
ugaucuaccacacucaaca

SEQ ID NO: 2377688 - RNA, 19 nt, Artificial Sequence
  Description of Artificial Sequence: Synthetic oligonucleotide
  Sense strand starting at position 3762 of SEQ ID NO: 1885941
uugagugugguagaucaca

SEQ ID NO: 2377689 - RNA, 19 nt, Artificial Sequence
  Description of Artificial Sequence: Synthetic oligonucleotide
  Antisense strand to SEQ ID NO: 2377688
ugugaucuaccacacucaa

SEQ ID NO: 2377690 - RNA, 19 nt, Artificial Sequence
  Description of Artificial Sequence: Synthetic oligonucleotide
  Sense strand starting at position 3862 of SEQ ID NO: 1885941
agaguuugagccugguuua

SEQ ID NO: 2377691 - RNA, 19 nt, Artificial Sequence
  Description of Artificial Sequence: Synthetic oligonucleotide
  Antisense strand to SEQ ID NO: 2377690
uaaaccaggcucaaacucu

SEQ ID NO: 2377692 - RNA, 19 nt, Artificial Sequence
  Description of Artificial Sequence: Synthetic oligonucleotide
  Sense strand starting at position 3863 of SEQ ID NO: 1885941
gaguuugagccugguuuau

SEQ ID NO: 2377693 - RNA, 19 nt, Artificial Sequence
  Description of Artificial Sequence: Synthetic oligonucleotide
  Antisense strand to SEQ ID NO: 2377692
auaaaccaggcucaaacuc

SEQ ID NO: 2377694 - RNA, 19 nt, Artificial Sequence
  Description of Artificial Sequence: Synthetic oligonucleotide
  Sense strand starting at position 3896 of SEQ ID NO: 1885941
gucuaacugguauauguca

SEQ ID NO: 2377695 - RNA, 19 nt, Artificial Sequence
  Description of Artificial Sequence: Synthetic oligonucleotide
  Antisense strand to SEQ ID NO: 2377694
ugacauauaccaguuagac

SEQ ID NO: 2377696 - RNA, 19 nt, Artificial Sequence
  Description of Artificial Sequence: Synthetic oligonucleotide
  Sense strand starting at position 3926 of SEQ ID NO: 1885941
gggcacucugaagguuaca

SEQ ID NO: 2377697 - RNA, 19 nt, Artificial Sequence
  Description of Artificial Sequence: Synthetic oligonucleotide
  Antisense strand to SEQ ID NO: 2377696
uguaaccuucagagugccc

SEQ ID NO: 2377698 - RNA, 19 nt, Artificial Sequence
  Description of Artificial Sequence: Synthetic oligonucleotide
  Sense strand starting at position 3931 of SEQ ID NO: 1885941
cucugaagguuacaagaaa

SEQ ID NO: 2377699 - RNA, 19 nt, Artificial Sequence
  Description of Artificial Sequence: Synthetic oligonucleotide
  Antisense strand to SEQ ID NO: 2377698
uuucuuguaaccuucagag

SEQ ID NO: 2377700 - RNA, 19 nt, Artificial Sequence
  Description of Artificial Sequence: Synthetic oligonucleotide
  Sense strand starting at position 3963 of SEQ ID NO: 1885941
aggccuaggcucuauaguu

SEQ ID NO: 2377701 - RNA, 19 nt, Artificial Sequence
  Description of Artificial Sequence: Synthetic oligonucleotide
  Antisense strand to SEQ ID NO: 2377700
aacuauagagccuaggccu

SEQ ID NO: 2377702 - RNA, 19 nt, Artificial Sequence
  Description of Artificial Sequence: Synthetic oligonucleotide
  Sense strand starting at position 108 of SEQ ID NO: 1885942
agaggauuccaugguuacu

SEQ ID NO: 2377703 - RNA, 19 nt, Artificial Sequence
  Description of Artificial Sequence: Synthetic oligonucleotide
  Antisense strand to SEQ ID NO: 2377702
aguaaccauggaauccucu

SEQ ID NO: 2377704 - RNA, 19 nt, Artificial Sequence
  Description of Artificial Sequence: Synthetic oligonucleotide
  Sense strand starting at position 127 of SEQ ID NO: 1885942
ucggguaugccuuauguaa

SEQ ID NO: 2377705 - RNA, 19 nt, Artificial Sequence
  Description of Artificial Sequence: Synthetic oligonucleotide
  Antisense strand to SEQ ID NO: 2377704
uuacauaaggcauacccga

SEQ ID NO: 2377706 - RNA, 19 nt, Artificial Sequence
  Description of Artificial Sequence: Synthetic oligonucleotide
  Sense strand starting at position 208 of SEQ ID NO: 1885942
accuguuauagcugaagug

SEQ ID NO: 2377707 - RNA, 19 nt, Artificial Sequence
  Description of Artificial Sequence: Synthetic oligonucleotide
  Antisense strand to SEQ ID NO: 2377706
cacuucagcuauaacaggu

SEQ ID NO: 2377708 - RNA, 19 nt, Artificial Sequence
  Description of Artificial Sequence: Synthetic oligonucleotide
  Sense strand starting at position 306 of SEQ ID NO: 1885942
cagucuggacaucaauagu

SEQ ID NO: 2377709 - RNA, 19 nt, Artificial Sequence
  Description of Artificial Sequence: Synthetic oligonucleotide
  Antisense strand to SEQ ID NO: 2377708
acuauugauguccagacug

SEQ ID NO: 2377710 - RNA, 19 nt, Artificial Sequence
  Description of Artificial Sequence: Synthetic oligonucleotide
  Sense strand starting at position 914 of SEQ ID NO: 1885942
gucucaugggauuguuaua

SEQ ID NO: 2377711 - RNA, 19 nt, Artificial Sequence
  Description of Artificial Sequence: Synthetic oligonucleotide
  Antisense strand to SEQ ID NO: 2377710
uauaacaaucccaugagac

SEQ ID NO: 2377712 - RNA, 19 nt, Artificial Sequence
  Description of Artificial Sequence: Synthetic oligonucleotide
  Sense strand starting at position 943 of SEQ ID NO: 1885942
gagagaguguuacugaaau

SEQ ID NO: 2377713 - RNA, 19 nt, Artificial Sequence
  Description of Artificial Sequence: Synthetic oligonucleotide
  Antisense strand to SEQ ID NO: 2377712
auuucaguaacacucucuc

SEQ ID NO: 2377714 - RNA, 19 nt, Artificial Sequence
  Description of Artificial Sequence: Synthetic oligonucleotide
  Sense strand starting at position 1009 of SEQ ID NO: 1885942
gauagauuaccguacuugu

SEQ ID NO: 2377715 - RNA, 19 nt, Artificial Sequence
  Description of Artificial Sequence: Synthetic oligonucleotide
  Antisense strand to SEQ ID NO: 2377714
acaaguacgguaaucuauc

SEQ ID NO: 2377716 - RNA, 19 nt, Artificial Sequence
  Description of Artificial Sequence: Synthetic oligonucleotide
  Sense strand starting at position 1067 of SEQ ID NO: 1885942
cucuuagaggccuggagaa

SEQ ID NO: 2377717 - RNA, 19 nt, Artificial Sequence
  Description of Artificial Sequence: Synthetic oligonucleotide
  Antisense strand to SEQ ID NO: 2377716
uucuccaggccucuaagag

SEQ ID NO: 2377718 - RNA, 19 nt, Artificial Sequence
  Description of Artificial Sequence: Synthetic oligonucleotide
  Sense strand starting at position 1079 of SEQ ID NO: 1885942
uggagaaacuugucuuaaa

SEQ ID NO: 2377719 - RNA, 19 nt, Artificial Sequence
  Description of Artificial Sequence: Synthetic oligonucleotide
  Antisense strand to SEQ ID NO: 2377718
uuuaagacaaguuucucca

SEQ ID NO: 2377720 - RNA, 19 nt, Artificial Sequence
  Description of Artificial Sequence: Synthetic oligonucleotide
  Sense strand starting at position 1080 of SEQ ID NO: 1885942
ggagaaacuugucuuaaau

SEQ ID NO: 2377721 - RNA, 19 nt, Artificial Sequence
  Description of Artificial Sequence: Synthetic oligonucleotide
  Antisense strand to SEQ ID NO: 2377720
auuuaagacaaguuucucc

SEQ ID NO: 2377722 - RNA, 19 nt, Artificial Sequence
  Description of Artificial Sequence: Synthetic oligonucleotide
  Sense strand starting at position 1271 of SEQ ID NO: 1885942
uaggucaugcaguagucaa

SEQ ID NO: 2377723 - RNA, 19 nt, Artificial Sequence
  Description of Artificial Sequence: Synthetic oligonucleotide
  Antisense strand to SEQ ID NO: 2377722
uugacuacugcaugaccua

SEQ ID NO: 2377724 - RNA, 19 nt, Artificial Sequence
  Description of Artificial Sequence: Synthetic oligonucleotide
  Sense strand starting at position 1384 of SEQ ID NO: 1885942
uggagaacgccuuaaguau

SEQ ID NO: 2377725 - RNA, 19 nt, Artificial Sequence
  Description of Artificial Sequence: Synthetic oligonucleotide
  Antisense strand to SEQ ID NO: 2377724
auacuuaaggcguucucca

SEQ ID NO: 2377726 - RNA, 19 nt, Artificial Sequence
  Description of Artificial Sequence: Synthetic oligonucleotide
  Sense strand starting at position 1399 of SEQ ID NO: 1885942
guauguuaggaagggaagu

SEQ ID NO: 2377727 - RNA, 19 nt, Artificial Sequence
  Description of Artificial Sequence: Synthetic oligonucleotide
  Antisense strand to SEQ ID NO: 2377726
acuucccuuccuaacauac

SEQ ID NO: 2377728 - RNA, 19 nt, Artificial Sequence
  Description of Artificial Sequence: Synthetic oligonucleotide
  Sense strand starting at position 1409 of SEQ ID NO: 1885942
aagggaaguuaucuacagu

SEQ ID NO: 2377729 - RNA, 19 nt, Artificial Sequence
  Description of Artificial Sequence: Synthetic oligonucleotide
  Antisense strand to SEQ ID NO: 2377728
acuguagauaacuucccuu

SEQ ID NO: 2377730 - RNA, 19 nt, Artificial Sequence
  Description of Artificial Sequence: Synthetic oligonucleotide
  Sense strand starting at position 1470 of SEQ ID NO: 1885942
gccgacugucgucucuuua

SEQ ID NO: 2377731 - RNA, 19 nt, Artificial Sequence
  Description of Artificial Sequence: Synthetic oligonucleotide
  Antisense strand to SEQ ID NO: 2377730
uaaagagacgacagucggc

SEQ ID NO: 2377732 - RNA, 19 nt, Artificial Sequence
  Description of Artificial Sequence: Synthetic oligonucleotide
  Sense strand starting at position 1471 of SEQ ID NO: 1885942
ccgacugucgucucuuuau

SEQ ID NO: 2377733 - RNA, 19 nt, Artificial Sequence
  Description of Artificial Sequence: Synthetic oligonucleotide
  Antisense strand to SEQ ID NO: 2377732
auaaagagacgacagucgg

SEQ ID NO: 2377734 - RNA, 19 nt, Artificial Sequence
  Description of Artificial Sequence: Synthetic oligonucleotide
  Sense strand starting at position 1493 of SEQ ID NO: 1885942
auggccgauuucuugugaa

SEQ ID NO: 2377735 - RNA, 19 nt, Artificial Sequence
  Description of Artificial Sequence: Synthetic oligonucleotide
  Antisense strand to SEQ ID NO: 2377734
uucacaagaaaucggccau

SEQ ID NO: 2377736 - RNA, 19 nt, Artificial Sequence
  Description of Artificial Sequence: Synthetic oligonucleotide
  Sense strand starting at position 1567 of SEQ ID NO: 1885942
ccaggagcauguuugcaaa

SEQ ID NO: 2377737 - RNA, 19 nt, Artificial Sequence
  Description of Artificial Sequence: Synthetic oligonucleotide
  Antisense strand to SEQ ID NO: 2377736
uuugcaaacaugcuccugg

SEQ ID NO: 2377738 - RNA, 19 nt, Artificial Sequence
  Description of Artificial Sequence: Synthetic oligonucleotide
  Sense strand starting at position 1577 of SEQ ID NO: 1885942
guuugcaaacucuggagua

SEQ ID NO: 2377739 - RNA, 19 nt, Artificial Sequence
  Description of Artificial Sequence: Synthetic oligonucleotide
  Antisense strand to SEQ ID NO: 2377738
uacuccagaguuugcaaac

SEQ ID NO: 2377740 - RNA, 19 nt, Artificial Sequence
  Description of Artificial Sequence: Synthetic oligonucleotide
  Sense strand starting at position 1579 of SEQ ID NO: 1885942
uugcaaacucuggaguaaa

SEQ ID NO: 2377741 - RNA, 19 nt, Artificial Sequence
  Description of Artificial Sequence: Synthetic oligonucleotide
  Antisense strand to SEQ ID NO: 2377740
uuuacuccagaguuugcaa

SEQ ID NO: 2377742 - RNA, 19 nt, Artificial Sequence
  Description of Artificial Sequence: Synthetic oligonucleotide
  Sense strand starting at position 1625 of SEQ ID NO: 1885942
accucaguucgauagugac

SEQ ID NO: 2377743 - RNA, 19 nt, Artificial Sequence
  Description of Artificial Sequence: Synthetic oligonucleotide
  Antisense strand to SEQ ID NO: 2377742
gucacuaucgaacugaggu

SEQ ID NO: 2377744 - RNA, 19 nt, Artificial Sequence
  Description of Artificial Sequence: Synthetic oligonucleotide
  Sense strand starting at position 1678 of SEQ ID NO: 1885942
gaaagaaauucuccgccga

SEQ ID NO: 2377745 - RNA, 19 nt, Artificial Sequence
  Description of Artificial Sequence: Synthetic oligonucleotide
  Antisense strand to SEQ ID NO: 2377744
ucggcggagaauuucuuuc

SEQ ID NO: 2377746 - RNA, 19 nt, Artificial Sequence
  Description of Artificial Sequence: Synthetic oligonucleotide
  Sense strand starting at position 1679 of SEQ ID NO: 1885942
aaagaaauucuccgccgaa

SEQ ID NO: 2377747 - RNA, 19 nt, Artificial Sequence
  Description of Artificial Sequence: Synthetic oligonucleotide
  Antisense strand to SEQ ID NO: 2377746
uucggcggagaauuucuuu

SEQ ID NO: 2377748 - RNA, 19 nt, Artificial Sequence
  Description of Artificial Sequence: Synthetic oligonucleotide
  Sense strand starting at position 1680 of SEQ ID NO: 1885942
aagaaauucuccgccgaaa

SEQ ID NO: 2377749 - RNA, 19 nt, Artificial Sequence
  Description of Artificial Sequence: Synthetic oligonucleotide
  Antisense strand to SEQ ID NO: 2377748
uuucggcggagaauuucuu

SEQ ID NO: 2377750 - RNA, 19 nt, Artificial Sequence
  Description of Artificial Sequence: Synthetic oligonucleotide
  Sense strand starting at position 1693 of SEQ ID NO: 1885942
ccgaaaucucccggaagaa

SEQ ID NO: 2377751 - RNA, 19 nt, Artificial Sequence
  Description of Artificial Sequence: Synthetic oligonucleotide
  Antisense strand to SEQ ID NO: 2377750
uucuuccgggagauuucgg

SEQ ID NO: 2377752 - RNA, 19 nt, Artificial Sequence
  Description of Artificial Sequence: Synthetic oligonucleotide
  Sense strand starting at position 1910 of SEQ ID NO: 1885942
aagccuucuguggagcaga

SEQ ID NO: 2377753 - RNA, 19 nt, Artificial Sequence
  Description of Artificial Sequence: Synthetic oligonucleotide
  Antisense strand to SEQ ID NO: 2377752
ucugcuccacagaaggcuu

SEQ ID NO: 2377754 - RNA, 19 nt, Artificial Sequence
  Description of Artificial Sequence: Synthetic oligonucleotide
  Sense strand starting at position 1951 of SEQ ID NO: 1885942
uuaggucacucggcgauuu

SEQ ID NO: 2377755 - RNA, 19 nt, Artificial Sequence
  Description of Artificial Sequence: Synthetic oligonucleotide
  Antisense strand to SEQ ID NO: 2377754
aaaucgccgagugaccuaa

SEQ ID NO: 2377756 - RNA, 19 nt, Artificial Sequence
  Description of Artificial Sequence: Synthetic oligonucleotide
  Sense strand starting at position 1952 of SEQ ID NO: 1885942
uaggucacucggcgauuua

SEQ ID NO: 2377757 - RNA, 19 nt, Artificial Sequence
  Description of Artificial Sequence: Synthetic oligonucleotide
  Antisense strand to SEQ ID NO: 2377756
uaaaucgccgagugaccua

SEQ ID NO: 2377758 - RNA, 19 nt, Artificial Sequence
  Description of Artificial Sequence: Synthetic oligonucleotide
  Sense strand starting at position 2433 of SEQ ID NO: 1885942
uguagacaguuccuguuaa

SEQ ID NO: 2377759 - RNA, 19 nt, Artificial Sequence
  Description of Artificial Sequence: Synthetic oligonucleotide
  Antisense strand to SEQ ID NO: 2377758
uuaacaggaacugucuaca

SEQ ID NO: 2377760 - RNA, 19 nt, Artificial Sequence
  Description of Artificial Sequence: Synthetic oligonucleotide
  Sense strand starting at position 2469 of SEQ ID NO: 1885942
uuaacaugccuggaagcuu

SEQ ID NO: 2377761 - RNA, 19 nt, Artificial Sequence
  Description of Artificial Sequence: Synthetic oligonucleotide
  Antisense strand to SEQ ID NO: 2377760
aagcuuccaggcauguuaa

SEQ ID NO: 2377762 - RNA, 19 nt, Artificial Sequence
  Description of Artificial Sequence: Synthetic oligonucleotide
  Sense strand starting at position 2530 of SEQ ID NO: 1885942
uucuguggugauuaaguuu

SEQ ID NO: 2377763 - RNA, 19 nt, Artificial Sequence
  Description of Artificial Sequence: Synthetic oligonucleotide
  Antisense strand to SEQ ID NO: 2377762
aaacuuaaucaccacagaa

SEQ ID NO: 2377764 - RNA, 19 nt, Artificial Sequence
  Description of Artificial Sequence: Synthetic oligonucleotide
  Sense strand starting at position 2588 of SEQ ID NO: 1885942
gggcguucacuccacagaa

SEQ ID NO: 2377765 - RNA, 19 nt, Artificial Sequence
  Description of Artificial Sequence: Synthetic oligonucleotide
  Antisense strand to SEQ ID NO: 2377764
uucuguggagugaacgccc

SEQ ID NO: 2377766 - RNA, 19 nt, Artificial Sequence
  Description of Artificial Sequence: Synthetic oligonucleotide
  Sense strand starting at position 2659 of SEQ ID NO: 1885942
ugaggcauauaucuauaau

SEQ ID NO: 2377767 - RNA, 19 nt, Artificial Sequence
  Description of Artificial Sequence: Synthetic oligonucleotide
  Antisense strand to SEQ ID NO: 2377766
auuauagauauaugccuca

SEQ ID NO: 2377768 - RNA, 19 nt, Artificial Sequence
  Description of Artificial Sequence: Synthetic oligonucleotide
  Sense strand starting at position 2746 of SEQ ID NO: 1885942
gccuguucuguccauuugu

SEQ ID NO: 2377769 - RNA, 19 nt, Artificial Sequence
  Description of Artificial Sequence: Synthetic oligonucleotide
  Antisense strand to SEQ ID NO: 2377768
acaaauggacagaacaggc

SEQ ID NO: 2377770 - RNA, 19 nt, Artificial Sequence
  Description of Artificial Sequence: Synthetic oligonucleotide
  Sense strand starting at position 2755 of SEQ ID NO: 1885942
guccauuuguuagaaugau

SEQ ID NO: 2377771 - RNA, 19 nt, Artificial Sequence
  Description of Artificial Sequence: Synthetic oligonucleotide
  Antisense strand to SEQ ID NO: 2377770
aucauucuaacaaauggac

SEQ ID NO: 2377772 - RNA, 19 nt, Artificial Sequence
  Description of Artificial Sequence: Synthetic oligonucleotide
  Sense strand starting at position 3091 of SEQ ID NO: 1885942
uccggauuagcugagaaua

SEQ ID NO: 2377773 - RNA, 19 nt, Artificial Sequence
  Description of Artificial Sequence: Synthetic oligonucleotide
  Antisense strand to SEQ ID NO: 2377772
uauucucagcuaauccgga

SEQ ID NO: 2377774 - RNA, 19 nt, Artificial Sequence
  Description of Artificial Sequence: Synthetic oligonucleotide
  Sense strand starting at position 3797 of SEQ ID NO: 1885942
aaguaaauagcaugguuaa

SEQ ID NO: 2377775 - RNA, 19 nt, Artificial Sequence
  Description of Artificial Sequence: Synthetic oligonucleotide
  Antisense strand to SEQ ID NO: 2377774
uuaaccaugcuauuuacuu

SEQ ID NO: 2377776 - RNA, 19 nt, Artificial Sequence
  Description of Artificial Sequence: Synthetic oligonucleotide
  Sense strand starting at position 3798 of SEQ ID NO: 1885942
aguaaauagcaugguuaau

SEQ ID NO: 2377777 - RNA, 19 nt, Artificial Sequence
  Description of Artificial Sequence: Synthetic oligonucleotide
  Antisense strand to SEQ ID NO: 2377776
auuaaccaugcuauuuacu

SEQ ID NO: 2377778 - RNA, 19 nt, Artificial Sequence
  Description of Artificial Sequence: Synthetic oligonucleotide
  Sense strand starting at position 3800 of SEQ ID NO: 1885942
uaaauagcaugguuaaugu

SEQ ID NO: 2377779 - RNA, 19 nt, Artificial Sequence
  Description of Artificial Sequence: Synthetic oligonucleotide
  Antisense strand to SEQ ID NO: 2377778
acauuaaccaugcuauuua

SEQ ID NO: 2377780 - RNA, 19 nt, Artificial Sequence
  Description of Artificial Sequence: Synthetic oligonucleotide
  Sense strand starting at position 3809 of SEQ ID NO: 1885942
ugguuaauguuacuggguu

SEQ ID NO: 2377781 - RNA, 19 nt, Artificial Sequence
  Description of Artificial Sequence: Synthetic oligonucleotide
  Antisense strand to SEQ ID NO: 2377780
aacccaguaacauuaacca

SEQ ID NO: 2377782 - RNA, 19 nt, Artificial Sequence
  Description of Artificial Sequence: Synthetic oligonucleotide
  Sense strand starting at position 585 of SEQ ID NO: 1885943
gguaaauggaugugacuaa

SEQ ID NO: 2377783 - RNA, 19 nt, Artificial Sequence
  Description of Artificial Sequence: Synthetic oligonucleotide
  Antisense strand to SEQ ID NO: 2377782
uuagucacauccauuuacc

SEQ ID NO: 2377784 - RNA, 19 nt, Artificial Sequence
  Description of Artificial Sequence: Synthetic oligonucleotide
  Sense strand starting at position 695 of SEQ ID NO: 1885943
ugcaguucugcuguacauu

SEQ ID NO: 2377785 - RNA, 19 nt, Artificial Sequence
  Description of Artificial Sequence: Synthetic oligonucleotide
  Antisense strand to SEQ ID NO: 2377784
aauguacagcagaacugca

SEQ ID NO: 2377786 - RNA, 19 nt, Artificial Sequence
  Description of Artificial Sequence: Synthetic oligonucleotide
  Sense strand starting at position 696 of SEQ ID NO: 1885943
gcaguucugcuguacauua

SEQ ID NO: 2377787 - RNA, 19 nt, Artificial Sequence
  Description of Artificial Sequence: Synthetic oligonucleotide
  Antisense strand to SEQ ID NO: 2377786
uaauguacagcagaacugc

SEQ ID NO: 2377788 - RNA, 19 nt, Artificial Sequence
  Description of Artificial Sequence: Synthetic oligonucleotide
  Sense strand starting at position 698 of SEQ ID NO: 1885943
aguucugcuguacauuaua

SEQ ID NO: 2377789 - RNA, 19 nt, Artificial Sequence
  Description of Artificial Sequence: Synthetic oligonucleotide
  Antisense strand to SEQ ID NO: 2377788
uauaauguacagcagaacu

SEQ ID NO: 2377790 - RNA, 19 nt, Artificial Sequence
  Description of Artificial Sequence: Synthetic oligonucleotide
  Sense strand starting at position 726 of SEQ ID NO: 1885943
cucgaagugugguuccaag

SEQ ID NO: 2377791 - RNA, 19 nt, Artificial Sequence
  Description of Artificial Sequence: Synthetic oligonucleotide
  Antisense strand to SEQ ID NO: 2377790
cuuggaaccacacuucgag

SEQ ID NO: 2377792 - RNA, 19 nt, Artificial Sequence
  Description of Artificial Sequence: Synthetic oligonucleotide
  Sense strand starting at position 736 of SEQ ID NO: 1885943
gguuccaagacuugaagca

SEQ ID NO: 2377793 - RNA, 19 nt, Artificial Sequence
  Description of Artificial Sequence: Synthetic oligonucleotide
  Antisense strand to SEQ ID NO: 2377792
ugcuucaagucuuggaacc

SEQ ID NO: 2377794 - RNA, 19 nt, Artificial Sequence
  Description of Artificial Sequence: Synthetic oligonucleotide
  Sense strand starting at position 737 of SEQ ID NO: 1885943
guuccaagacuugaagcau

SEQ ID NO: 2377795 - RNA, 19 nt, Artificial Sequence
  Description of Artificial Sequence: Synthetic oligonucleotide
  Antisense strand to SEQ ID NO: 2377794
augcuucaagucuuggaac

SEQ ID NO: 2377796 - RNA, 19 nt, Artificial Sequence
  Description of Artificial Sequence: Synthetic oligonucleotide
  Sense strand starting at position 756 of SEQ ID NO: 1885943
cagcauuaccugggagcau

SEQ ID NO: 2377797 - RNA, 19 nt, Artificial Sequence
  Description of Artificial Sequence: Synthetic oligonucleotide
  Antisense strand to SEQ ID NO: 2377796
augcucccagguaaugcug

SEQ ID NO: 2377798 - RNA, 19 nt, Artificial Sequence
  Description of Artificial Sequence: Synthetic oligonucleotide
  Sense strand starting at position 771 of SEQ ID NO: 1885943
gcauguuagcaauauacau

SEQ ID NO: 2377799 - RNA, 19 nt, Artificial Sequence
  Description of Artificial Sequence: Synthetic oligonucleotide
  Antisense strand to SEQ ID NO: 2377798
auguauauugcuaacaugc

SEQ ID NO: 2377800 - RNA, 19 nt, Artificial Sequence
  Description of Artificial Sequence: Synthetic oligonucleotide
  Sense strand starting at position 831 of SEQ ID NO: 1885943
cagaaauucugggaguaga

SEQ ID NO: 2377801 - RNA, 19 nt, Artificial Sequence
  Description of Artificial Sequence: Synthetic oligonucleotide
  Antisense strand to SEQ ID NO: 2377800
ucuacucccagaauuucug

SEQ ID NO: 2377802 - RNA, 19 nt, Artificial Sequence
  Description of Artificial Sequence: Synthetic oligonucleotide
  Sense strand starting at position 854 of SEQ ID NO: 1885943
agcaguuuguaguuuaaca

SEQ ID NO: 2377803 - RNA, 19 nt, Artificial Sequence
  Description of Artificial Sequence: Synthetic oligonucleotide
  Antisense strand to SEQ ID NO: 2377802
uguuaaacuacaaacugcu

SEQ ID NO: 2377804 - RNA, 19 nt, Artificial Sequence
  Description of Artificial Sequence: Synthetic oligonucleotide
  Sense strand starting at position 932 of SEQ ID NO: 1885943
uugguuguccauuauggga

SEQ ID NO: 2377805 - RNA, 19 nt, Artificial Sequence
  Description of Artificial Sequence: Synthetic oligonucleotide
  Antisense strand to SEQ ID NO: 2377804
ucccauaauggacaaccaa

SEQ ID NO: 2377806 - RNA, 19 nt, Artificial Sequence
  Description of Artificial Sequence: Synthetic oligonucleotide
  Sense strand starting at position 1056 of SEQ ID NO: 1885943
agauguugcuaagugaauc

SEQ ID NO: 2377807 - RNA, 19 nt, Artificial Sequence
  Description of Artificial Sequence: Synthetic oligonucleotide
  Antisense strand to SEQ ID NO: 2377806
gauucacuuagcaacaucu

SEQ ID NO: 2377808 - RNA, 19 nt, Artificial Sequence
  Description of Artificial Sequence: Synthetic oligonucleotide
  Sense strand starting at position 1064 of SEQ ID NO: 1885943
cuaagugaaucaguuaauu

SEQ ID NO: 2377809 - RNA, 19 nt, Artificial Sequence
  Description of Artificial Sequence: Synthetic oligonucleotide
  Antisense strand to SEQ ID NO: 2377808
aauuaacugauucacuuag

SEQ ID NO: 2377810 - RNA, 19 nt, Artificial Sequence
  Description of Artificial Sequence: Synthetic oligonucleotide
  Sense strand starting at position 1277 of SEQ ID NO: 1885943
auauauuugccuugugguu

SEQ ID NO: 2377811 - RNA, 19 nt, Artificial Sequence
  Description of Artificial Sequence: Synthetic oligonucleotide
  Antisense strand to SEQ ID NO: 2377810
aaccacaaggcaaauauau

SEQ ID NO: 2377812 - RNA, 19 nt, Artificial Sequence
  Description of Artificial Sequence: Synthetic oligonucleotide
  Sense strand starting at position 1289 of SEQ ID NO: 1885943
ugugguucuuaacuuucua

SEQ ID NO: 2377813 - RNA, 19 nt, Artificial Sequence
  Description of Artificial Sequence: Synthetic oligonucleotide
  Antisense strand to SEQ ID NO: 2377812
uagaaaguuaagaaccaca

SEQ ID NO: 2377814 - RNA, 19 nt, Artificial Sequence
  Description of Artificial Sequence: Synthetic oligonucleotide
  Sense strand starting at position 1326 of SEQ ID NO: 1885943
cagcauguguuacuagaaa

SEQ ID NO: 2377815 - RNA, 19 nt, Artificial Sequence
  Description of Artificial Sequence: Synthetic oligonucleotide
  Antisense strand to SEQ ID NO: 2377814
uuucuaguaacacaugcug

SEQ ID NO: 2377816 - RNA, 19 nt, Artificial Sequence
  Description of Artificial Sequence: Synthetic oligonucleotide
  Sense strand starting at position 1345 of SEQ ID NO: 1885943
uggauauucuggcuggaca

SEQ ID NO: 2377817 - RNA, 19 nt, Artificial Sequence
  Description of Artificial Sequence: Synthetic oligonucleotide
  Antisense strand to SEQ ID NO: 2377816
uguccagccagaauaucca

SEQ ID NO: 2377818 - RNA, 19 nt, Artificial Sequence
  Description of Artificial Sequence: Synthetic oligonucleotide
  Sense strand starting at position 1346 of SEQ ID NO: 1885943
ggauauucuggcuggacac

SEQ ID NO: 2377819 - RNA, 19 nt, Artificial Sequence
  Description of Artificial Sequence: Synthetic oligonucleotide
  Antisense strand to SEQ ID NO: 2377818
guguccagccagaauaucc

SEQ ID NO: 2377820 - RNA, 19 nt, Artificial Sequence
  Description of Artificial Sequence: Synthetic oligonucleotide
  Sense strand starting at position 1347 of SEQ ID NO: 1885943
gauauucuggcuggacaca

SEQ ID NO: 2377821 - RNA, 19 nt, Artificial Sequence
  Description of Artificial Sequence: Synthetic oligonucleotide
  Antisense strand to SEQ ID NO: 2377820
uguguccagccagaauauc

SEQ ID NO: 2377822 - RNA, 19 nt, Artificial Sequence
  Description of Artificial Sequence: Synthetic oligonucleotide
  Sense strand starting at position 1742 of SEQ ID NO: 1885943
aagauuuaguuagaaguuc

SEQ ID NO: 2377823 - RNA, 19 nt, Artificial Sequence
  Description of Artificial Sequence: Synthetic oligonucleotide
  Antisense strand to SEQ ID NO: 2377822
gaacuucuaacuaaaucuu

SEQ ID NO: 2377824 - RNA, 19 nt, Artificial Sequence
  Description of Artificial Sequence: Synthetic oligonucleotide
  Sense strand starting at position 1778 of SEQ ID NO: 1885943
gcauauuucuaguuugauu

SEQ ID NO: 2377825 - RNA, 19 nt, Artificial Sequence
  Description of Artificial Sequence: Synthetic oligonucleotide
  Antisense strand to SEQ ID NO: 2377824
aaucaaacuagaaauaugc

SEQ ID NO: 2377826 - RNA, 19 nt, Artificial Sequence
  Description of Artificial Sequence: Synthetic oligonucleotide
  Sense strand starting at position 1862 of SEQ ID NO: 1885943
uugcaaauagccuagcaau

SEQ ID NO: 2377827 - RNA, 19 nt, Artificial Sequence
  Description of Artificial Sequence: Synthetic oligonucleotide
  Antisense strand to SEQ ID NO: 2377826
auugcuaggcuauuugcaa

SEQ ID NO: 2377828 - RNA, 19 nt, Artificial Sequence
  Description of Artificial Sequence: Synthetic oligonucleotide
  Sense strand starting at position 1908 of SEQ ID NO: 1885943
ugaccuaagcgccaucaua

SEQ ID NO: 2377829 - RNA, 19 nt, Artificial Sequence
  Description of Artificial Sequence: Synthetic oligonucleotide
  Antisense strand to SEQ ID NO: 2377828
uaugauggcgcuuagguca

SEQ ID NO: 2377830 - RNA, 19 nt, Artificial Sequence
  Description of Artificial Sequence: Synthetic oligonucleotide
  Sense strand starting at position 2085 of SEQ ID NO: 1885943
agugauaucuuguuugaac

SEQ ID NO: 2377831 - RNA, 19 nt, Artificial Sequence
  Description of Artificial Sequence: Synthetic oligonucleotide
  Antisense strand to SEQ ID NO: 2377830
guucaaacaagauaucacu

SEQ ID NO: 2377832 - RNA, 19 nt, Artificial Sequence
  Description of Artificial Sequence: Synthetic oligonucleotide
  Sense strand starting at position 2086 of SEQ ID NO: 1885943
gugauaucuuguuugaaca

SEQ ID NO: 2377833 - RNA, 19 nt, Artificial Sequence
  Description of Artificial Sequence: Synthetic oligonucleotide
  Antisense strand to SEQ ID NO: 2377832
uguucaaacaagauaucac

SEQ ID NO: 2377834 - RNA, 19 nt, Artificial Sequence
  Description of Artificial Sequence: Synthetic oligonucleotide
  Sense strand starting at position 2087 of SEQ ID NO: 1885943
ugauaucuuguuugaacaa

SEQ ID NO: 2377835 - RNA, 19 nt, Artificial Sequence
  Description of Artificial Sequence: Synthetic oligonucleotide
  Antisense strand to SEQ ID NO: 2377834
uuguucaaacaagauauca

SEQ ID NO: 2377836 - RNA, 19 nt, Artificial Sequence
  Description of Artificial Sequence: Synthetic oligonucleotide
  Sense strand starting at position 2230 of SEQ ID NO: 1885943
ucccuauguccugaagaua

SEQ ID NO: 2377837 - RNA, 19 nt, Artificial Sequence
  Description of Artificial Sequence: Synthetic oligonucleotide
  Antisense strand to SEQ ID NO: 2377836
uaucuucaggacauaggga

SEQ ID NO: 2377838 - RNA, 19 nt, Artificial Sequence
  Description of Artificial Sequence: Synthetic oligonucleotide
  Sense strand starting at position 2238 of SEQ ID NO: 1885943
uccugaagauaucaucaga

SEQ ID NO: 2377839 - RNA, 19 nt, Artificial Sequence
  Description of Artificial Sequence: Synthetic oligonucleotide
  Antisense strand to SEQ ID NO: 2377838
ucugaugauaucuucagga

SEQ ID NO: 2377840 - RNA, 19 nt, Artificial Sequence
  Description of Artificial Sequence: Synthetic oligonucleotide
  Sense strand starting at position 2297 of SEQ ID NO: 1885943
auggguuuaacccguuaau

SEQ ID NO: 2377841 - RNA, 19 nt, Artificial Sequence
  Description of Artificial Sequence: Synthetic oligonucleotide
  Antisense strand to SEQ ID NO: 2377840
auuaacggguuaaacccau

SEQ ID NO: 2377842 - RNA, 19 nt, Artificial Sequence
  Description of Artificial Sequence: Synthetic oligonucleotide
  Sense strand starting at position 2300 of SEQ ID NO: 1885943
gguuuaacccguuaaugag

SEQ ID NO: 2377843 - RNA, 19 nt, Artificial Sequence
  Description of Artificial Sequence: Synthetic oligonucleotide
  Antisense strand to SEQ ID NO: 2377842
cucauuaacggguuaaacc

SEQ ID NO: 2377844 - RNA, 19 nt, Artificial Sequence
  Description of Artificial Sequence: Synthetic oligonucleotide
  Sense strand starting at position 2386 of SEQ ID NO: 1885943
cuaucacagguauaaugua

SEQ ID NO: 2377845 - RNA, 19 nt, Artificial Sequence
  Description of Artificial Sequence: Synthetic oligonucleotide
  Antisense strand to SEQ ID NO: 2377844
uacauuauaccugugauag

SEQ ID NO: 2377846 - RNA, 19 nt, Artificial Sequence
  Description of Artificial Sequence: Synthetic oligonucleotide
  Sense strand starting at position 2544 of SEQ ID NO: 1885943
ugcuucuuacuguauuacu

SEQ ID NO: 2377847 - RNA, 19 nt, Artificial Sequence
  Description of Artificial Sequence: Synthetic oligonucleotide
  Antisense strand to SEQ ID NO: 2377846
aguaauacaguaagaagca

SEQ ID NO: 2377848 - RNA, 19 nt, Artificial Sequence
  Description of Artificial Sequence: Synthetic oligonucleotide
  Sense strand starting at position 2748 of SEQ ID NO: 1885943
acugaugcuccuggcuaau

SEQ ID NO: 2377849 - RNA, 19 nt, Artificial Sequence
  Description of Artificial Sequence: Synthetic oligonucleotide
  Antisense strand to SEQ ID NO: 2377848
auuagccaggagcaucagu

SEQ ID NO: 2377850 - RNA, 19 nt, Artificial Sequence
  Description of Artificial Sequence: Synthetic oligonucleotide
  Sense strand starting at position 2750 of SEQ ID NO: 1885943
ugaugcuccuggcuaauau

SEQ ID NO: 2377851 - RNA, 19 nt, Artificial Sequence
  Description of Artificial Sequence: Synthetic oligonucleotide
  Antisense strand to SEQ ID NO: 2377850
auauuagccaggagcauca

SEQ ID NO: 2377852 - RNA, 19 nt, Artificial Sequence
  Description of Artificial Sequence: Synthetic oligonucleotide
  Sense strand starting at position 2914 of SEQ ID NO: 1885943
gcuggagugcaguaaacuu

SEQ ID NO: 2377853 - RNA, 19 nt, Artificial Sequence
  Description of Artificial Sequence: Synthetic oligonucleotide
  Antisense strand to SEQ ID NO: 2377852
aaguuuacugcacuccagc

SEQ ID NO: 2377854 - RNA, 19 nt, Artificial Sequence
  Description of Artificial Sequence: Synthetic oligonucleotide
  Sense strand starting at position 3371 of SEQ ID NO: 1885943
aggaccucuuacuuaguga

SEQ ID NO: 2377855 - RNA, 19 nt, Artificial Sequence
  Description of Artificial Sequence: Synthetic oligonucleotide
  Antisense strand to SEQ ID NO: 2377854
ucacuaaguaagagguccu

SEQ ID NO: 2377856 - RNA, 19 nt, Artificial Sequence
  Description of Artificial Sequence: Synthetic oligonucleotide
  Sense strand starting at position 3557 of SEQ ID NO: 1885943
cugcauaaugcaugugaau

SEQ ID NO: 2377857 - RNA, 19 nt, Artificial Sequence
  Description of Artificial Sequence: Synthetic oligonucleotide
  Antisense strand to SEQ ID NO: 2377856
auucacaugcauuaugcag

SEQ ID NO: 2377858 - RNA, 19 nt, Artificial Sequence
  Description of Artificial Sequence: Synthetic oligonucleotide
  Sense strand starting at position 3851 of SEQ ID NO: 1885943
guaagacucuugucucucu

SEQ ID NO: 2377859 - RNA, 19 nt, Artificial Sequence
  Description of Artificial Sequence: Synthetic oligonucleotide
  Antisense strand to SEQ ID NO: 2377858
agagagacaagagucuuac

SEQ ID NO: 2377860 - RNA, 19 nt, Artificial Sequence
  Description of Artificial Sequence: Synthetic oligonucleotide
  Sense strand starting at position 3887 of SEQ ID NO: 1885943
aagaauguguuccuaaagg

SEQ ID NO: 2377861 - RNA, 19 nt, Artificial Sequence
  Description of Artificial Sequence: Synthetic oligonucleotide
  Antisense strand to SEQ ID NO: 2377860
ccuuuaggaacacauucuu

SEQ ID NO: 2377862 - RNA, 19 nt, Artificial Sequence
  Description of Artificial Sequence: Synthetic oligonucleotide
  Sense strand starting at position 696 of SEQ ID NO: 1885944
cacacucuuccugggugau

SEQ ID NO: 2377863 - RNA, 19 nt, Artificial Sequence
  Description of Artificial Sequence: Synthetic oligonucleotide
  Antisense strand to SEQ ID NO: 2377862
aucacccaggaagagugug

SEQ ID NO: 2377864 - RNA, 19 nt, Artificial Sequence
  Description of Artificial Sequence: Synthetic oligonucleotide
  Sense strand starting at position 708 of SEQ ID NO: 1885944
gggugaugucaucaggguu

SEQ ID NO: 2377865 - RNA, 19 nt, Artificial Sequence
  Description of Artificial Sequence: Synthetic oligonucleotide
  Antisense strand to SEQ ID NO: 2377864
aacccugaugacaucaccc

SEQ ID NO: 2377866 - RNA, 19 nt, Artificial Sequence
  Description of Artificial Sequence: Synthetic oligonucleotide
  Sense strand starting at position 711 of SEQ ID NO: 1885944
ugaugucaucaggguuucu

SEQ ID NO: 2377867 - RNA, 19 nt, Artificial Sequence
  Description of Artificial Sequence: Synthetic oligonucleotide
  Antisense strand to SEQ ID NO: 2377866
agaaacccugaugacauca

SEQ ID NO: 2377868 - RNA, 19 nt, Artificial Sequence
  Description of Artificial Sequence: Synthetic oligonucleotide
  Sense strand starting at position 720 of SEQ ID NO: 1885944
caggguuucugguccaaau

SEQ ID NO: 2377869 - RNA, 19 nt, Artificial Sequence
  Description of Artificial Sequence: Synthetic oligonucleotide
  Antisense strand to SEQ ID NO: 2377868
auuuggaccagaaacccug

SEQ ID NO: 2377870 - RNA, 19 nt, Artificial Sequence
  Description of Artificial Sequence: Synthetic oligonucleotide
  Sense strand starting at position 739 of SEQ ID NO: 1885944
cggcuuggucugguuuagu

SEQ ID NO: 2377871 - RNA, 19 nt, Artificial Sequence
  Description of Artificial Sequence: Synthetic oligonucleotide
  Antisense strand to SEQ ID NO: 2377870
acuaaaccagaccaagccg

SEQ ID NO: 2377872 - RNA, 19 nt, Artificial Sequence
  Description of Artificial Sequence: Synthetic oligonucleotide
  Sense strand starting at position 753 of SEQ ID NO: 1885944
uuaguucuucccgaucagu

SEQ ID NO: 2377873 - RNA, 19 nt, Artificial Sequence
  Description of Artificial Sequence: Synthetic oligonucleotide
  Antisense strand to SEQ ID NO: 2377872
acugaucgggaagaacuaa

SEQ ID NO: 2377874 - RNA, 19 nt, Artificial Sequence
  Description of Artificial Sequence: Synthetic oligonucleotide
  Sense strand starting at position 756 of SEQ ID NO: 1885944
guucuucccgaucagugua

SEQ ID NO: 2377875 - RNA, 19 nt, Artificial Sequence
  Description of Artificial Sequence: Synthetic oligonucleotide
  Antisense strand to SEQ ID NO: 2377874
uacacugaucgggaagaac

SEQ ID NO: 2377876 - RNA, 19 nt, Artificial Sequence
  Description of Artificial Sequence: Synthetic oligonucleotide
  Sense strand starting at position 759 of SEQ ID NO: 1885944
cuucccgaucaguguauuu

SEQ ID NO: 2377877 - RNA, 19 nt, Artificial Sequence
  Description of Artificial Sequence: Synthetic oligonucleotide
  Antisense strand to SEQ ID NO: 2377876
aaauacacugaucgggaag

SEQ ID NO: 2377878 - RNA, 19 nt, Artificial Sequence
  Description of Artificial Sequence: Synthetic oligonucleotide
  Sense strand starting at position 770 of SEQ ID NO: 1885944
guguauuucuccuugaucu

SEQ ID NO: 2377879 - RNA, 19 nt, Artificial Sequence
  Description of Artificial Sequence: Synthetic oligonucleotide
  Antisense strand to SEQ ID NO: 2377878
agaucaaggagaaauacac

SEQ ID NO: 2377880 - RNA, 19 nt, Artificial Sequence
  Description of Artificial Sequence: Synthetic oligonucleotide
  Sense strand starting at position 771 of SEQ ID NO: 1885944
uguauuucuccuugaucuu

SEQ ID NO: 2377881 - RNA, 19 nt, Artificial Sequence
  Description of Artificial Sequence: Synthetic oligonucleotide
  Antisense strand to SEQ ID NO: 2377880
aagaucaaggagaaauaca

SEQ ID NO: 2377882 - RNA, 19 nt, Artificial Sequence
  Description of Artificial Sequence: Synthetic oligonucleotide
  Sense strand starting at position 806 of SEQ ID NO: 1885944
uuauucuuaucagugucau

SEQ ID NO: 2377883 - RNA, 19 nt, Artificial Sequence
  Description of Artificial Sequence: Synthetic oligonucleotide
  Antisense strand to SEQ ID NO: 2377882
augacacugauaagaauaa

SEQ ID NO: 2377884 - RNA, 19 nt, Artificial Sequence
  Description of Artificial Sequence: Synthetic oligonucleotide
  Sense strand starting at position 1012 of SEQ ID NO: 1885944
uucuaaguacucugucuga

SEQ ID NO: 2377885 - RNA, 19 nt, Artificial Sequence
  Description of Artificial Sequence: Synthetic oligonucleotide
  Antisense strand to SEQ ID NO: 2377884
ucagacagaguacuuagaa

SEQ ID NO: 2377886 - RNA, 19 nt, Artificial Sequence
  Description of Artificial Sequence: Synthetic oligonucleotide
  Sense strand starting at position 1025 of SEQ ID NO: 1885944
gucugaucuucuuuaaggu

SEQ ID NO: 2377887 - RNA, 19 nt, Artificial Sequence
  Description of Artificial Sequence: Synthetic oligonucleotide
  Antisense strand to SEQ ID NO: 2377886
accuuaaagaagaucagac

SEQ ID NO: 2377888 - RNA, 19 nt, Artificial Sequence
  Description of Artificial Sequence: Synthetic oligonucleotide
  Sense strand starting at position 1031 of SEQ ID NO: 1885944
ucuucuuuaaggugaagga

SEQ ID NO: 2377889 - RNA, 19 nt, Artificial Sequence
  Description of Artificial Sequence: Synthetic oligonucleotide
  Antisense strand to SEQ ID NO: 2377888
uccuucaccuuaaagaaga

SEQ ID NO: 2377890 - RNA, 19 nt, Artificial Sequence
  Description of Artificial Sequence: Synthetic oligonucleotide
  Sense strand starting at position 1044 of SEQ ID NO: 1885944
gaaggaucacuuugguauc

SEQ ID NO: 2377891 - RNA, 19 nt, Artificial Sequence
  Description of Artificial Sequence: Synthetic oligonucleotide
  Antisense strand to SEQ ID NO: 2377890
gauaccaaagugauccuuc

SEQ ID NO: 2377892 - RNA, 19 nt, Artificial Sequence
  Description of Artificial Sequence: Synthetic oligonucleotide
  Sense strand starting at position 1124 of SEQ ID NO: 1885944
caggaauacuguucuucgu

SEQ ID NO: 2377893 - RNA, 19 nt, Artificial Sequence
  Description of Artificial Sequence: Synthetic oligonucleotide
  Antisense strand to SEQ ID NO: 2377892
acgaagaacaguauuccug

SEQ ID NO: 2377894 - RNA, 19 nt, Artificial Sequence
  Description of Artificial Sequence: Synthetic oligonucleotide
  Sense strand starting at position 1126 of SEQ ID NO: 1885944
ggaauacuguucuucguca

SEQ ID NO: 2377895 - RNA, 19 nt, Artificial Sequence
  Description of Artificial Sequence: Synthetic oligonucleotide
  Antisense strand to SEQ ID NO: 2377894
ugacgaagaacaguauucc

SEQ ID NO: 2377896 - RNA, 19 nt, Artificial Sequence
  Description of Artificial Sequence: Synthetic oligonucleotide
  Sense strand starting at position 1127 of SEQ ID NO: 1885944
gaauacuguucuucgucau

SEQ ID NO: 2377897 - RNA, 19 nt, Artificial Sequence
  Description of Artificial Sequence: Synthetic oligonucleotide
  Antisense strand to SEQ ID NO: 2377896
augacgaagaacaguauuc

SEQ ID NO: 2377898 - RNA, 19 nt, Artificial Sequence
  Description of Artificial Sequence: Synthetic oligonucleotide
  Sense strand starting at position 1140 of SEQ ID NO: 1885944
cgucauugugcuuugugau

SEQ ID NO: 2377899 - RNA, 19 nt, Artificial Sequence
  Description of Artificial Sequence: Synthetic oligonucleotide
  Antisense strand to SEQ ID NO: 2377898
aucacaaagcacaaugacg

SEQ ID NO: 2377900 - RNA, 19 nt, Artificial Sequence
  Description of Artificial Sequence: Synthetic oligonucleotide
  Sense strand starting at position 1207 of SEQ ID NO: 1885944
uugcccaaucauggagauu

SEQ ID NO: 2377901 - RNA, 19 nt, Artificial Sequence
  Description of Artificial Sequence: Synthetic oligonucleotide
  Antisense strand to SEQ ID NO: 2377900
aaucuccaugauugggcaa

SEQ ID NO: 2377902 - RNA, 19 nt, Artificial Sequence
  Description of Artificial Sequence: Synthetic oligonucleotide
  Sense strand starting at position 1296 of SEQ ID NO: 1885944
ugagaucagccuuggucau

SEQ ID NO: 2377903 - RNA, 19 nt, Artificial Sequence
  Description of Artificial Sequence: Synthetic oligonucleotide
  Antisense strand to SEQ ID NO: 2377902
augaccaaggcugaucuca

SEQ ID NO: 2377904 - RNA, 19 nt, Artificial Sequence
  Description of Artificial Sequence: Synthetic oligonucleotide
  Sense strand starting at position 1341 of SEQ ID NO: 1885944
ggaugcauucccgaggguu

SEQ ID NO: 2377905 - RNA, 19 nt, Artificial Sequence
  Description of Artificial Sequence: Synthetic oligonucleotide
  Antisense strand to SEQ ID NO: 2377904
aacccucgggaaugcaucc

SEQ ID NO: 2377906 - RNA, 19 nt, Artificial Sequence
  Description of Artificial Sequence: Synthetic oligonucleotide
  Sense strand starting at position 1416 of SEQ ID NO: 1885944
ggcucucauagcgaaucuu

SEQ ID NO: 2377907 - RNA, 19 nt, Artificial Sequence
  Description of Artificial Sequence: Synthetic oligonucleotide
  Antisense strand to SEQ ID NO: 2377906
aagauucgcuaugagagcc

SEQ ID NO: 2377908 - RNA, 19 nt, Artificial Sequence
  Description of Artificial Sequence: Synthetic oligonucleotide
  Sense strand starting at position 1424 of SEQ ID NO: 1885944
uagcgaaucuugucuaagg

SEQ ID NO: 2377909 - RNA, 19 nt, Artificial Sequence
  Description of Artificial Sequence: Synthetic oligonucleotide
  Antisense strand to SEQ ID NO: 2377908
ccuuagacaagauucgcua

SEQ ID NO: 2377910 - RNA, 19 nt, Artificial Sequence
  Description of Artificial Sequence: Synthetic oligonucleotide
  Sense strand starting at position 1426 of SEQ ID NO: 1885944
gcgaaucuugucuaaggca

SEQ ID NO: 2377911 - RNA, 19 nt, Artificial Sequence
  Description of Artificial Sequence: Synthetic oligonucleotide
  Antisense strand to SEQ ID NO: 2377910
ugccuuagacaagauucgc

SEQ ID NO: 2377912 - RNA, 19 nt, Artificial Sequence
  Description of Artificial Sequence: Synthetic oligonucleotide
  Sense strand starting at position 1500 of SEQ ID NO: 1885944
uauugauuaugagagacau

SEQ ID NO: 2377913 - RNA, 19 nt, Artificial Sequence
  Description of Artificial Sequence: Synthetic oligonucleotide
  Antisense strand to SEQ ID NO: 2377912
augucucucauaaucaaua

SEQ ID NO: 2377914 - RNA, 19 nt, Artificial Sequence
  Description of Artificial Sequence: Synthetic oligonucleotide
  Sense strand starting at position 2050 of SEQ ID NO: 1885944
agucaaugcuaccuuaaga

SEQ ID NO: 2377915 - RNA, 19 nt, Artificial Sequence
  Description of Artificial Sequence: Synthetic oligonucleotide
  Antisense strand to SEQ ID NO: 2377914
ucuuaagguagcauugacu

SEQ ID NO: 2377916 - RNA, 19 nt, Artificial Sequence
  Description of Artificial Sequence: Synthetic oligonucleotide
  Sense strand starting at position 2440 of SEQ ID NO: 1885944
caaauauuaguaggguguu

SEQ ID NO: 2377917 - RNA, 19 nt, Artificial Sequence
  Description of Artificial Sequence: Synthetic oligonucleotide
  Antisense strand to SEQ ID NO: 2377916
aacacccuacuaauauuug

SEQ ID NO: 2377918 - RNA, 19 nt, Artificial Sequence
  Description of Artificial Sequence: Synthetic oligonucleotide
  Sense strand starting at position 3196 of SEQ ID NO: 1885944
ugcagagucuaauuccauu

SEQ ID NO: 2377919 - RNA, 19 nt, Artificial Sequence
  Description of Artificial Sequence: Synthetic oligonucleotide
  Antisense strand to SEQ ID NO: 2377918
aauggaauuagacucugca

SEQ ID NO: 2377920 - RNA, 19 nt, Artificial Sequence
  Description of Artificial Sequence: Synthetic oligonucleotide
  Sense strand starting at position 3202 of SEQ ID NO: 1885944
gucuaauuccauugauaug

SEQ ID NO: 2377921 - RNA, 19 nt, Artificial Sequence
  Description of Artificial Sequence: Synthetic oligonucleotide
  Antisense strand to SEQ ID NO: 2377920
cauaucaauggaauuagac

SEQ ID NO: 2377922 - RNA, 19 nt, Artificial Sequence
  Description of Artificial Sequence: Synthetic oligonucleotide
  Sense strand starting at position 3212 of SEQ ID NO: 1885944
auugauauguaauucugga

SEQ ID NO: 2377923 - RNA, 19 nt, Artificial Sequence
  Description of Artificial Sequence: Synthetic oligonucleotide
  Antisense strand to SEQ ID NO: 2377922
uccagaauuacauaucaau

SEQ ID NO: 2377924 - RNA, 19 nt, Artificial Sequence
  Description of Artificial Sequence: Synthetic oligonucleotide
  Sense strand starting at position 3217 of SEQ ID NO: 1885944
uauguaauucuggaacagu

SEQ ID NO: 2377925 - RNA, 19 nt, Artificial Sequence
  Description of Artificial Sequence: Synthetic oligonucleotide
  Antisense strand to SEQ ID NO: 2377924
acuguuccagaauuacaua

SEQ ID NO: 2377926 - RNA, 19 nt, Artificial Sequence
  Description of Artificial Sequence: Synthetic oligonucleotide
  Sense strand starting at position 3354 of SEQ ID NO: 1885944
auggcaguugccuaaguau

SEQ ID NO: 2377927 - RNA, 19 nt, Artificial Sequence
  Description of Artificial Sequence: Synthetic oligonucleotide
  Antisense strand to SEQ ID NO: 2377926
auacuuaggcaacugccau

SEQ ID NO: 2377928 - RNA, 19 nt, Artificial Sequence
  Description of Artificial Sequence: Synthetic oligonucleotide
  Sense strand starting at position 3577 of SEQ ID NO: 1885944
cagggcuucccagguacaa

SEQ ID NO: 2377929 - RNA, 19 nt, Artificial Sequence
  Description of Artificial Sequence: Synthetic oligonucleotide
  Antisense strand to SEQ ID NO: 2377928
uuguaccugggaagcccug

SEQ ID NO: 2377930 - RNA, 19 nt, Artificial Sequence
  Description of Artificial Sequence: Synthetic oligonucleotide
  Sense strand starting at position 3579 of SEQ ID NO: 1885944
gggcuucccagguacaaga

SEQ ID NO: 2377931 - RNA, 19 nt, Artificial Sequence
  Description of Artificial Sequence: Synthetic oligonucleotide
  Antisense strand to SEQ ID NO: 2377930
ucuuguaccugggaagccc

SEQ ID NO: 2377932 - RNA, 19 nt, Artificial Sequence
  Description of Artificial Sequence: Synthetic oligonucleotide
  Sense strand starting at position 3640 of SEQ ID NO: 1885944
gcuguuaaguaaucaacaa

SEQ ID NO: 2377933 - RNA, 19 nt, Artificial Sequence
  Description of Artificial Sequence: Synthetic oligonucleotide
  Antisense strand to SEQ ID NO: 2377932
uuguugauuacuuaacagc

SEQ ID NO: 2377934 - RNA, 19 nt, Artificial Sequence
  Description of Artificial Sequence: Synthetic oligonucleotide
  Sense strand starting at position 3786 of SEQ ID NO: 1885944
aggaaauucuaggccauau

SEQ ID NO: 2377935 - RNA, 19 nt, Artificial Sequence
  Description of Artificial Sequence: Synthetic oligonucleotide
  Antisense strand to SEQ ID NO: 2377934
auauggccuagaauuuccu

SEQ ID NO: 2377936 - RNA, 19 nt, Artificial Sequence
  Description of Artificial Sequence: Synthetic oligonucleotide
  Sense strand starting at position 3796 of SEQ ID NO: 1885944
aggccauauaugugacugu

SEQ ID NO: 2377937 - RNA, 19 nt, Artificial Sequence
  Description of Artificial Sequence: Synthetic oligonucleotide
  Antisense strand to SEQ ID NO: 2377936
acagucacauauauggccu

SEQ ID NO: 2377938 - RNA, 19 nt, Artificial Sequence
  Description of Artificial Sequence: Synthetic oligonucleotide
  Sense strand starting at position 3799 of SEQ ID NO: 1885944
ccauauaugugacuguaaa

SEQ ID NO: 2377939 - RNA, 19 nt, Artificial Sequence
  Description of Artificial Sequence: Synthetic oligonucleotide
  Antisense strand to SEQ ID NO: 2377938
uuuacagucacauauaugg

SEQ ID NO: 2377940 - RNA, 19 nt, Artificial Sequence
  Description of Artificial Sequence: Synthetic oligonucleotide
  Sense strand starting at position 3976 of SEQ ID NO: 1885944
acuaguauucuauauggua

SEQ ID NO: 2377941 - RNA, 19 nt, Artificial Sequence
  Description of Artificial Sequence: Synthetic oligonucleotide
  Antisense strand to SEQ ID NO: 2377940
uaccauauagaauacuagu

SEQ ID NO: 2377942 - RNA, 19 nt, Artificial Sequence
  Description of Artificial Sequence: Synthetic oligonucleotide
  Sense strand starting at position 2023 of SEQ ID NO: 1885945
aggucaauucucugaacaa

SEQ ID NO: 2377943 - RNA, 19 nt, Artificial Sequence
  Description of Artificial Sequence: Synthetic oligonucleotide
  Antisense strand to SEQ ID NO: 2377942
uuguucagagaauugaccu

SEQ ID NO: 2377944 - RNA, 19 nt, Artificial Sequence
  Description of Artificial Sequence: Synthetic oligonucleotide
  Sense strand starting at position 2024 of SEQ ID NO: 1885945
ggucaauucucugaacaaa

SEQ ID NO: 2377945 - RNA, 19 nt, Artificial Sequence
  Description of Artificial Sequence: Synthetic oligonucleotide
  Antisense strand to SEQ ID NO: 2377944
uuuguucagagaauugacc

SEQ ID NO: 2377946 - RNA, 19 nt, Artificial Sequence
  Description of Artificial Sequence: Synthetic oligonucleotide
  Sense strand starting at position 2054 of SEQ ID NO: 1885945
ugggcuauggcagauaguu

SEQ ID NO: 2377947 - RNA, 19 nt, Artificial Sequence
  Description of Artificial Sequence: Synthetic oligonucleotide
  Antisense strand to SEQ ID NO: 2377946
aacuaucugccauagccca

SEQ ID NO: 2377948 - RNA, 19 nt, Artificial Sequence
  Description of Artificial Sequence: Synthetic oligonucleotide
  Sense strand starting at position 2056 of SEQ ID NO: 1885945
ggcuauggcagauaguuaa

SEQ ID NO: 2377949 - RNA, 19 nt, Artificial Sequence
  Description of Artificial Sequence: Synthetic oligonucleotide
  Antisense strand to SEQ ID NO: 2377948
uuaacuaucugccauagcc

SEQ ID NO: 2377950 - RNA, 19 nt, Artificial Sequence
  Description of Artificial Sequence: Synthetic oligonucleotide
  Sense strand starting at position 2059 of SEQ ID NO: 1885945
uauggcagauaguuaauaa

SEQ ID NO: 2377951 - RNA, 19 nt, Artificial Sequence
  Description of Artificial Sequence: Synthetic oligonucleotide
  Antisense strand to SEQ ID NO: 2377950
uuauuaacuaucugccaua

SEQ ID NO: 2377952 - RNA, 19 nt, Artificial Sequence
  Description of Artificial Sequence: Synthetic oligonucleotide
  Sense strand starting at position 2063 of SEQ ID NO: 1885945
gcagauaguuaauaaguaa

SEQ ID NO: 2377953 - RNA, 19 nt, Artificial Sequence
  Description of Artificial Sequence: Synthetic oligonucleotide
  Antisense strand to SEQ ID NO: 2377952
uuacuuauuaacuaucugc

SEQ ID NO: 2377954 - RNA, 19 nt, Artificial Sequence
  Description of Artificial Sequence: Synthetic oligonucleotide
  Sense strand starting at position 2132 of SEQ ID NO: 1885945
aggcuauaauccuugucaa

SEQ ID NO: 2377955 - RNA, 19 nt, Artificial Sequence
  Description of Artificial Sequence: Synthetic oligonucleotide
  Antisense strand to SEQ ID NO: 2377954
uugacaaggauuauagccu

SEQ ID NO: 2377956 - RNA, 19 nt, Artificial Sequence
  Description of Artificial Sequence: Synthetic oligonucleotide
  Sense strand starting at position 2133 of SEQ ID NO: 1885945
ggcuauaauccuugucaaa

SEQ ID NO: 2377957 - RNA, 19 nt, Artificial Sequence
  Description of Artificial Sequence: Synthetic oligonucleotide
  Antisense strand to SEQ ID NO: 2377956
uuugacaaggauuauagcc

SEQ ID NO: 2377958 - RNA, 19 nt, Artificial Sequence
  Description of Artificial Sequence: Synthetic oligonucleotide
  Sense strand starting at position 2200 of SEQ ID NO: 1885945
guuucauagcacgggauga

SEQ ID NO: 2377959 - RNA, 19 nt, Artificial Sequence
  Description of Artificial Sequence: Synthetic oligonucleotide
  Antisense strand to SEQ ID NO: 2377958
ucaucccgugcuaugaaac

SEQ ID NO: 2377960 - RNA, 19 nt, Artificial Sequence
  Description of Artificial Sequence: Synthetic oligonucleotide
  Sense strand starting at position 2234 of SEQ ID NO: 1885945
ggauuccuauaacugcaaa

SEQ ID NO: 2377961 - RNA, 19 nt, Artificial Sequence
  Description of Artificial Sequence: Synthetic oligonucleotide
  Antisense strand to SEQ ID NO: 2377960
uuugcaguuauaggaaucc

SEQ ID NO: 2377962 - RNA, 19 nt, Artificial Sequence
  Description of Artificial Sequence: Synthetic oligonucleotide
  Sense strand starting at position 2415 of SEQ ID NO: 1885945
auaggcauuguacauagau

SEQ ID NO: 2377963 - RNA, 19 nt, Artificial Sequence
  Description of Artificial Sequence: Synthetic oligonucleotide
  Antisense strand to SEQ ID NO: 2377962
aucuauguacaaugccuau

SEQ ID NO: 2377964 - RNA, 19 nt, Artificial Sequence
  Description of Artificial Sequence: Synthetic oligonucleotide
  Sense strand starting at position 2492 of SEQ ID NO: 1885945
ccagauauuuagcaaaguc

SEQ ID NO: 2377965 - RNA, 19 nt, Artificial Sequence
  Description of Artificial Sequence: Synthetic oligonucleotide
  Antisense strand to SEQ ID NO: 2377964
gacuuugcuaaauaucugg

SEQ ID NO: 2377966 - RNA, 19 nt, Artificial Sequence
  Description of Artificial Sequence: Synthetic oligonucleotide
  Sense strand starting at position 2709 of SEQ ID NO: 1885945
uuuggacauucucuugaaa

SEQ ID NO: 2377967 - RNA, 19 nt, Artificial Sequence
  Description of Artificial Sequence: Synthetic oligonucleotide
  Antisense strand to SEQ ID NO: 2377966
uuucaagagaauguccaaa

SEQ ID NO: 2377968 - RNA, 19 nt, Artificial Sequence
  Description of Artificial Sequence: Synthetic oligonucleotide
  Sense strand starting at position 2776 of SEQ ID NO: 1885945
cuacgugcuuauucuuaga

SEQ ID NO: 2377969 - RNA, 19 nt, Artificial Sequence
  Description of Artificial Sequence: Synthetic oligonucleotide
  Antisense strand to SEQ ID NO: 2377968
ucuaagaauaagcacguag

SEQ ID NO: 2377970 - RNA, 19 nt, Artificial Sequence
  Description of Artificial Sequence: Synthetic oligonucleotide
  Sense strand starting at position 2778 of SEQ ID NO: 1885945
acgugcuuauucuuagaac

SEQ ID NO: 2377971 - RNA, 19 nt, Artificial Sequence
  Description of Artificial Sequence: Synthetic oligonucleotide
  Antisense strand to SEQ ID NO: 2377970
guucuaagaauaagcacgu

SEQ ID NO: 2377972 - RNA, 19 nt, Artificial Sequence
  Description of Artificial Sequence: Synthetic oligonucleotide
  Sense strand starting at position 2813 of SEQ ID NO: 1885945
aaauguugccuuuguggca

SEQ ID NO: 2377973 - RNA, 19 nt, Artificial Sequence
  Description of Artificial Sequence: Synthetic oligonucleotide
  Antisense strand to SEQ ID NO: 2377972
ugccacaaaggcaacauuu

SEQ ID NO: 2377974 - RNA, 19 nt, Artificial Sequence
  Description of Artificial Sequence: Synthetic oligonucleotide
  Sense strand starting at position 2848 of SEQ ID NO: 1885945
auuguaugcuagcccaauu

SEQ ID NO: 2377975 - RNA, 19 nt, Artificial Sequence
  Description of Artificial Sequence: Synthetic oligonucleotide
  Antisense strand to SEQ ID NO: 2377974
aauugggcuagcauacaau

SEQ ID NO: 2377976 - RNA, 19 nt, Artificial Sequence
  Description of Artificial Sequence: Synthetic oligonucleotide
  Sense strand starting at position 2941 of SEQ ID NO: 1885945
ccaagugcaucucuuaaug

SEQ ID NO: 2377977 - RNA, 19 nt, Artificial Sequence
  Description of Artificial Sequence: Synthetic oligonucleotide
  Antisense strand to SEQ ID NO: 2377976
cauuaagagaugcacuugg

SEQ ID NO: 2377978 - RNA, 19 nt, Artificial Sequence
  Description of Artificial Sequence: Synthetic oligonucleotide
  Sense strand starting at position 3012 of SEQ ID NO: 1885945
uggucuuucucguuuacuu

SEQ ID NO: 2377979 - RNA, 19 nt, Artificial Sequence
  Description of Artificial Sequence: Synthetic oligonucleotide
  Antisense strand to SEQ ID NO: 2377978
aaguaaacgagaaagacca

SEQ ID NO: 2377980 - RNA, 19 nt, Artificial Sequence
  Description of Artificial Sequence: Synthetic oligonucleotide
  Sense strand starting at position 3042 of SEQ ID NO: 1885945
uggugaaugcuguaauauu

SEQ ID NO: 2377981 - RNA, 19 nt, Artificial Sequence
  Description of Artificial Sequence: Synthetic oligonucleotide
  Antisense strand to SEQ ID NO: 2377980
aauauuacagcauucacca

SEQ ID NO: 2377982 - RNA, 19 nt, Artificial Sequence
  Description of Artificial Sequence: Synthetic oligonucleotide
  Sense strand starting at position 3134 of SEQ ID NO: 1885945
gguuucugaauggguacua

SEQ ID NO: 2377983 - RNA, 19 nt, Artificial Sequence
  Description of Artificial Sequence: Synthetic oligonucleotide
  Antisense strand to SEQ ID NO: 2377982
uaguacccauucagaaacc

SEQ ID NO: 2377984 - RNA, 19 nt, Artificial Sequence
  Description of Artificial Sequence: Synthetic oligonucleotide
  Sense strand starting at position 3135 of SEQ ID NO: 1885945
guuucugaauggguacuaa

SEQ ID NO: 2377985 - RNA, 19 nt, Artificial Sequence
  Description of Artificial Sequence: Synthetic oligonucleotide
  Antisense strand to SEQ ID NO: 2377984
uuaguacccauucagaaac

SEQ ID NO: 2377986 - RNA, 19 nt, Artificial Sequence
  Description of Artificial Sequence: Synthetic oligonucleotide
  Sense strand starting at position 3145 of SEQ ID NO: 1885945
ggguacuaacuuuauaagu

SEQ ID NO: 2377987 - RNA, 19 nt, Artificial Sequence
  Description of Artificial Sequence: Synthetic oligonucleotide
  Antisense strand to SEQ ID NO: 2377986
acuuauaaaguuaguaccc

SEQ ID NO: 2377988 - RNA, 19 nt, Artificial Sequence
  Description of Artificial Sequence: Synthetic oligonucleotide
  Sense strand starting at position 3147 of SEQ ID NO: 1885945
guacuaacuuuauaaguca

SEQ ID NO: 2377989 - RNA, 19 nt, Artificial Sequence
  Description of Artificial Sequence: Synthetic oligonucleotide
  Antisense strand to SEQ ID NO: 2377988
ugacuuauaaaguuaguac

SEQ ID NO: 2377990 - RNA, 19 nt, Artificial Sequence
  Description of Artificial Sequence: Synthetic oligonucleotide
  Sense strand starting at position 3161 of SEQ ID NO: 1885945
agucauacaucagugagua

SEQ ID NO: 2377991 - RNA, 19 nt, Artificial Sequence
  Description of Artificial Sequence: Synthetic oligonucleotide
  Antisense strand to SEQ ID NO: 2377990
uacucacugauguaugacu

SEQ ID NO: 2377992 - RNA, 19 nt, Artificial Sequence
  Description of Artificial Sequence: Synthetic oligonucleotide
  Sense strand starting at position 3162 of SEQ ID NO: 1885945
gucauacaucagugaguau

SEQ ID NO: 2377993 - RNA, 19 nt, Artificial Sequence
  Description of Artificial Sequence: Synthetic oligonucleotide
  Antisense strand to SEQ ID NO: 2377992
auacucacugauguaugac

SEQ ID NO: 2377994 - RNA, 19 nt, Artificial Sequence
  Description of Artificial Sequence: Synthetic oligonucleotide
  Sense strand starting at position 3211 of SEQ ID NO: 1885945
cucauaacugcacgaacuu

SEQ ID NO: 2377995 - RNA, 19 nt, Artificial Sequence
  Description of Artificial Sequence: Synthetic oligonucleotide
  Antisense strand to SEQ ID NO: 2377994
aaguucgugcaguuaugag

SEQ ID NO: 2377996 - RNA, 19 nt, Artificial Sequence
  Description of Artificial Sequence: Synthetic oligonucleotide
  Sense strand starting at position 3302 of SEQ ID NO: 1885945
gauauaagucuuggucuga

SEQ ID NO: 2377997 - RNA, 19 nt, Artificial Sequence
  Description of Artificial Sequence: Synthetic oligonucleotide
  Antisense strand to SEQ ID NO: 2377996
ucagaccaagacuuauauc

SEQ ID NO: 2377998 - RNA, 19 nt, Artificial Sequence
  Description of Artificial Sequence: Synthetic oligonucleotide
  Sense strand starting at position 3303 of SEQ ID NO: 1885945
auauaagucuuggucugaa

SEQ ID NO: 2377999 - RNA, 19 nt, Artificial Sequence
  Description of Artificial Sequence: Synthetic oligonucleotide
  Antisense strand to SEQ ID NO: 2377998
uucagaccaagacuuauau

SEQ ID NO: 2378000 - RNA, 19 nt, Artificial Sequence
  Description of Artificial Sequence: Synthetic oligonucleotide
  Sense strand starting at position 3306 of SEQ ID NO: 1885945
uaagucuuggucugaauac

SEQ ID NO: 2378001 - RNA, 19 nt, Artificial Sequence
  Description of Artificial Sequence: Synthetic oligonucleotide
  Antisense strand to SEQ ID NO: 2378000
guauucagaccaagacuua

SEQ ID NO: 2378002 - RNA, 19 nt, Artificial Sequence
  Description of Artificial Sequence: Synthetic oligonucleotide
  Sense strand starting at position 3315 of SEQ ID NO: 1885945
gucugaauaccuuagggua

SEQ ID NO: 2378003 - RNA, 19 nt, Artificial Sequence
  Description of Artificial Sequence: Synthetic oligonucleotide
  Antisense strand to SEQ ID NO: 2378002
uacccuaagguauucagac

SEQ ID NO: 2378004 - RNA, 19 nt, Artificial Sequence
  Description of Artificial Sequence: Synthetic oligonucleotide
  Sense strand starting at position 3322 of SEQ ID NO: 1885945
uaccuuaggguauguaaau

SEQ ID NO: 2378005 - RNA, 19 nt, Artificial Sequence
  Description of Artificial Sequence: Synthetic oligonucleotide
  Antisense strand to SEQ ID NO: 2378004
auuuacauacccuaaggua

SEQ ID NO: 2378006 - RNA, 19 nt, Artificial Sequence
  Description of Artificial Sequence: Synthetic oligonucleotide
  Sense strand starting at position 3328 of SEQ ID NO: 1885945
aggguauguaaauguaucu

SEQ ID NO: 2378007 - RNA, 19 nt, Artificial Sequence
  Description of Artificial Sequence: Synthetic oligonucleotide
  Antisense strand to SEQ ID NO: 2378006
agauacauuuacauacccu

SEQ ID NO: 2378008 - RNA, 19 nt, Artificial Sequence
  Description of Artificial Sequence: Synthetic oligonucleotide
  Sense strand starting at position 3333 of SEQ ID NO: 1885945
auguaaauguaucuugauc

SEQ ID NO: 2378009 - RNA, 19 nt, Artificial Sequence
  Description of Artificial Sequence: Synthetic oligonucleotide
  Antisense strand to SEQ ID NO: 2378008
gaucaagauacauuuacau

SEQ ID NO: 2378010 - RNA, 19 nt, Artificial Sequence
  Description of Artificial Sequence: Synthetic oligonucleotide
  Sense strand starting at position 3338 of SEQ ID NO: 1885945
aauguaucuugaucaggac

SEQ ID NO: 2378011 - RNA, 19 nt, Artificial Sequence
  Description of Artificial Sequence: Synthetic oligonucleotide
  Antisense strand to SEQ ID NO: 2378010
guccugaucaagauacauu

SEQ ID NO: 2378012 - RNA, 19 nt, Artificial Sequence
  Description of Artificial Sequence: Synthetic oligonucleotide
  Sense strand starting at position 3384 of SEQ ID NO: 1885945
guaauauaauacuguacca

SEQ ID NO: 2378013 - RNA, 19 nt, Artificial Sequence
  Description of Artificial Sequence: Synthetic oligonucleotide
  Antisense strand to SEQ ID NO: 2378012
ugguacaguauuauauuac

SEQ ID NO: 2378014 - RNA, 19 nt, Artificial Sequence
  Description of Artificial Sequence: Synthetic oligonucleotide
  Sense strand starting at position 3389 of SEQ ID NO: 1885945
auaauacuguaccaaggau

SEQ ID NO: 2378015 - RNA, 19 nt, Artificial Sequence
  Description of Artificial Sequence: Synthetic oligonucleotide
  Antisense strand to SEQ ID NO: 2378014
auccuugguacaguauuau

SEQ ID NO: 2378016 - RNA, 19 nt, Artificial Sequence
  Description of Artificial Sequence: Synthetic oligonucleotide
  Sense strand starting at position 3854 of SEQ ID NO: 1885945
uagaaauaguccuaaugga

SEQ ID NO: 2378017 - RNA, 19 nt, Artificial Sequence
  Description of Artificial Sequence: Synthetic oligonucleotide
  Antisense strand to SEQ ID NO: 2378016
uccauuaggacuauuucua

SEQ ID NO: 2378018 - RNA, 19 nt, Artificial Sequence
  Description of Artificial Sequence: Synthetic oligonucleotide
  Sense strand starting at position 3897 of SEQ ID NO: 1885945
uaggaaaccuuguguaaga

SEQ ID NO: 2378019 - RNA, 19 nt, Artificial Sequence
  Description of Artificial Sequence: Synthetic oligonucleotide
  Antisense strand to SEQ ID NO: 2378018
ucuuacacaagguuuccua

SEQ ID NO: 2378020 - RNA, 19 nt, Artificial Sequence
  Description of Artificial Sequence: Synthetic oligonucleotide
  Sense strand starting at position 3898 of SEQ ID NO: 1885945
aggaaaccuuguguaagaa

SEQ ID NO: 2378021 - RNA, 19 nt, Artificial Sequence
  Description of Artificial Sequence: Synthetic oligonucleotide
  Antisense strand to SEQ ID NO: 2378020
uucuuacacaagguuuccu

SEQ ID NO: 2378022 - RNA, 19 nt, Artificial Sequence
  Description of Artificial Sequence: Synthetic oligonucleotide
  Sense strand starting at position 55 of SEQ ID NO: 1885946
ucuagaagguaugcaacuu

SEQ ID NO: 2378023 - RNA, 19 nt, Artificial Sequence
  Description of Artificial Sequence: Synthetic oligonucleotide
  Antisense strand to SEQ ID NO: 2378022
aaguugcauaccuucuaga

SEQ ID NO: 2378024 - RNA, 19 nt, Artificial Sequence
  Description of Artificial Sequence: Synthetic oligonucleotide
  Sense strand starting at position 694 of SEQ ID NO: 1885946
agugguugauggcuacaga

SEQ ID NO: 2378025 - RNA, 19 nt, Artificial Sequence
  Description of Artificial Sequence: Synthetic oligonucleotide
  Antisense strand to SEQ ID NO: 2378024
ucuguagccaucaaccacu

SEQ ID NO: 2378026 - RNA, 19 nt, Artificial Sequence
  Description of Artificial Sequence: Synthetic oligonucleotide
  Sense strand starting at position 695 of SEQ ID NO: 1885946
gugguugauggcuacagaa

SEQ ID NO: 2378027 - RNA, 19 nt, Artificial Sequence
  Description of Artificial Sequence: Synthetic oligonucleotide
  Antisense strand to SEQ ID NO: 2378026
uucuguagccaucaaccac

SEQ ID NO: 2378028 - RNA, 19 nt, Artificial Sequence
  Description of Artificial Sequence: Synthetic oligonucleotide
  Sense strand starting at position 697 of SEQ ID NO: 1885946
gguugauggcuacagaauu

SEQ ID NO: 2378029 - RNA, 19 nt, Artificial Sequence
  Description of Artificial Sequence: Synthetic oligonucleotide
  Antisense strand to SEQ ID NO: 2378028
aauucuguagccaucaacc

SEQ ID NO: 2378030 - RNA, 19 nt, Artificial Sequence
  Description of Artificial Sequence: Synthetic oligonucleotide
  Sense strand starting at position 751 of SEQ ID NO: 1885946
cgcuuuagaaagcggaauu

SEQ ID NO: 2378031 - RNA, 19 nt, Artificial Sequence
  Description of Artificial Sequence: Synthetic oligonucleotide
  Antisense strand to SEQ ID NO: 2378030
aauuccgcuuucuaaagcg

SEQ ID NO: 2378032 - RNA, 19 nt, Artificial Sequence
  Description of Artificial Sequence: Synthetic oligonucleotide
  Sense strand starting at position 978 of SEQ ID NO: 1885946
ggcacaguuggcuguuaac

SEQ ID NO: 2378033 - RNA, 19 nt, Artificial Sequence
  Description of Artificial Sequence: Synthetic oligonucleotide
  Antisense strand to SEQ ID NO: 2378032
guuaacagccaacugugcc

SEQ ID NO: 2378034 - RNA, 19 nt, Artificial Sequence
  Description of Artificial Sequence: Synthetic oligonucleotide
  Sense strand starting at position 984 of SEQ ID NO: 1885946
guuggcuguuaacuagaau

SEQ ID NO: 2378035 - RNA, 19 nt, Artificial Sequence
  Description of Artificial Sequence: Synthetic oligonucleotide
  Antisense strand to SEQ ID NO: 2378034
auucuaguuaacagccaac

SEQ ID NO: 2378036 - RNA, 19 nt, Artificial Sequence
  Description of Artificial Sequence: Synthetic oligonucleotide
  Sense strand starting at position 987 of SEQ ID NO: 1885946
ggcuguuaacuagaauagu

SEQ ID NO: 2378037 - RNA, 19 nt, Artificial Sequence
  Description of Artificial Sequence: Synthetic oligonucleotide
  Antisense strand to SEQ ID NO: 2378036
acuauucuaguuaacagcc

SEQ ID NO: 2378038 - RNA, 19 nt, Artificial Sequence
  Description of Artificial Sequence: Synthetic oligonucleotide
  Sense strand starting at position 1045 of SEQ ID NO: 1885946
ggcuucuagccucggagau

SEQ ID NO: 2378039 - RNA, 19 nt, Artificial Sequence
  Description of Artificial Sequence: Synthetic oligonucleotide
  Antisense strand to SEQ ID NO: 2378038
aucuccgaggcuagaagcc

SEQ ID NO: 2378040 - RNA, 19 nt, Artificial Sequence
  Description of Artificial Sequence: Synthetic oligonucleotide
  Sense strand starting at position 1046 of SEQ ID NO: 1885946
gcuucuagccucggagauu

SEQ ID NO: 2378041 - RNA, 19 nt, Artificial Sequence
  Description of Artificial Sequence: Synthetic oligonucleotide
  Antisense strand to SEQ ID NO: 2378040
aaucuccgaggcuagaagc

SEQ ID NO: 2378042 - RNA, 19 nt, Artificial Sequence
  Description of Artificial Sequence: Synthetic oligonucleotide
  Sense strand starting at position 1114 of SEQ ID NO: 1885946
ggaugacacuuuccuaguc

SEQ ID NO: 2378043 - RNA, 19 nt, Artificial Sequence
  Description of Artificial Sequence: Synthetic oligonucleotide
  Antisense strand to SEQ ID NO: 2378042
gacuaggaaagugucaucc

SEQ ID NO: 2378044 - RNA, 19 nt, Artificial Sequence
  Description of Artificial Sequence: Synthetic oligonucleotide
  Sense strand starting at position 1123 of SEQ ID NO: 1885946
uuuccuagucgcuauguaa

SEQ ID NO: 2378045 - RNA, 19 nt, Artificial Sequence
  Description of Artificial Sequence: Synthetic oligonucleotide
  Antisense strand to SEQ ID NO: 2378044
uuacauagcgacuaggaaa

SEQ ID NO: 2378046 - RNA, 19 nt, Artificial Sequence
  Description of Artificial Sequence: Synthetic oligonucleotide
  Sense strand starting at position 1504 of SEQ ID NO: 1885946
cgggucuccagagauauga

SEQ ID NO: 2378047 - RNA, 19 nt, Artificial Sequence
  Description of Artificial Sequence: Synthetic oligonucleotide
  Antisense strand to SEQ ID NO: 2378046
ucauaucucuggagacccg

SEQ ID NO: 2378048 - RNA, 19 nt, Artificial Sequence
  Description of Artificial Sequence: Synthetic oligonucleotide
  Sense strand starting at position 1644 of SEQ ID NO: 1885946
cccaguugucgcccgcaga

SEQ ID NO: 2378049 - RNA, 19 nt, Artificial Sequence
  Description of Artificial Sequence: Synthetic oligonucleotide
  Antisense strand to SEQ ID NO: 2378048
ucugcgggcgacaacuggg

SEQ ID NO: 2378050 - RNA, 19 nt, Artificial Sequence
  Description of Artificial Sequence: Synthetic oligonucleotide
  Sense strand starting at position 2287 of SEQ ID NO: 1885946
ggaggaugucaucgcuaca

SEQ ID NO: 2378051 - RNA, 19 nt, Artificial Sequence
  Description of Artificial Sequence: Synthetic oligonucleotide
  Antisense strand to SEQ ID NO: 2378050
uguagcgaugacauccucc

SEQ ID NO: 2378052 - RNA, 19 nt, Artificial Sequence
  Description of Artificial Sequence: Synthetic oligonucleotide
  Sense strand starting at position 2290 of SEQ ID NO: 1885946
ggaugucaucgcuacagug

SEQ ID NO: 2378053 - RNA, 19 nt, Artificial Sequence
  Description of Artificial Sequence: Synthetic oligonucleotide
  Antisense strand to SEQ ID NO: 2378052
cacuguagcgaugacaucc

SEQ ID NO: 2378054 - RNA, 19 nt, Artificial Sequence
  Description of Artificial Sequence: Synthetic oligonucleotide
  Sense strand starting at position 2314 of SEQ ID NO: 1885946
gcagaucucgcaggagaaa

SEQ ID NO: 2378055 - RNA, 19 nt, Artificial Sequence
  Description of Artificial Sequence: Synthetic oligonucleotide
  Antisense strand to SEQ ID NO: 2378054
uuucuccugcgagaucugc

SEQ ID NO: 2378056 - RNA, 19 nt, Artificial Sequence
  Description of Artificial Sequence: Synthetic oligonucleotide
  Sense strand starting at position 2410 of SEQ ID NO: 1885946
ccgggauccugggauauuu

SEQ ID NO: 2378057 - RNA, 19 nt, Artificial Sequence
  Description of Artificial Sequence: Synthetic oligonucleotide
  Antisense strand to SEQ ID NO: 2378056
aaauaucccaggaucccgg

SEQ ID NO: 2378058 - RNA, 19 nt, Artificial Sequence
  Description of Artificial Sequence: Synthetic oligonucleotide
  Sense strand starting at position 2419 of SEQ ID NO: 1885946
ugggauauuuguucccgca

SEQ ID NO: 2378059 - RNA, 19 nt, Artificial Sequence
  Description of Artificial Sequence: Synthetic oligonucleotide
  Antisense strand to SEQ ID NO: 2378058
ugcgggaacaaauauccca

SEQ ID NO: 2378060 - RNA, 19 nt, Artificial Sequence
  Description of Artificial Sequence: Synthetic oligonucleotide
  Sense strand starting at position 2465 of SEQ ID NO: 1885946
uugauaagaucucuuuagg

SEQ ID NO: 2378061 - RNA, 19 nt, Artificial Sequence
  Description of Artificial Sequence: Synthetic oligonucleotide
  Antisense strand to SEQ ID NO: 2378060
ccuaaagagaucuuaucaa

SEQ ID NO: 2378062 - RNA, 19 nt, Artificial Sequence
  Description of Artificial Sequence: Synthetic oligonucleotide
  Sense strand starting at position 2574 of SEQ ID NO: 1885946
guucgacuacuauacagua

SEQ ID NO: 2378063 - RNA, 19 nt, Artificial Sequence
  Description of Artificial Sequence: Synthetic oligonucleotide
  Antisense strand to SEQ ID NO: 2378062
uacuguauaguagucgaac

SEQ ID NO: 2378064 - RNA, 19 nt, Artificial Sequence
  Description of Artificial Sequence: Synthetic oligonucleotide
  Sense strand starting at position 2625 of SEQ ID NO: 1885946
gcaagaacgcuauagguug

SEQ ID NO: 2378065 - RNA, 19 nt, Artificial Sequence
  Description of Artificial Sequence: Synthetic oligonucleotide
  Antisense strand to SEQ ID NO: 2378064
caaccuauagcguucuugc

SEQ ID NO: 2378066 - RNA, 19 nt, Artificial Sequence
  Description of Artificial Sequence: Synthetic oligonucleotide
  Sense strand starting at position 2647 of SEQ ID NO: 1885946
aggacagcauaguuagaua

SEQ ID NO: 2378067 - RNA, 19 nt, Artificial Sequence
  Description of Artificial Sequence: Synthetic oligonucleotide
  Antisense strand to SEQ ID NO: 2378066
uaucuaacuaugcuguccu

SEQ ID NO: 2378068 - RNA, 19 nt, Artificial Sequence
  Description of Artificial Sequence: Synthetic oligonucleotide
  Sense strand starting at position 2650 of SEQ ID NO: 1885946
acagcauaguuagauaaga

SEQ ID NO: 2378069 - RNA, 19 nt, Artificial Sequence
  Description of Artificial Sequence: Synthetic oligonucleotide
  Antisense strand to SEQ ID NO: 2378068
ucuuaucuaacuaugcugu

SEQ ID NO: 2378070 - RNA, 19 nt, Artificial Sequence
  Description of Artificial Sequence: Synthetic oligonucleotide
  Sense strand starting at position 2661 of SEQ ID NO: 1885946
agauaagaugucuacguga

SEQ ID NO: 2378071 - RNA, 19 nt, Artificial Sequence
  Description of Artificial Sequence: Synthetic oligonucleotide
  Antisense strand to SEQ ID NO: 2378070
ucacguagacaucuuaucu

SEQ ID NO: 2378072 - RNA, 19 nt, Artificial Sequence
  Description of Artificial Sequence: Synthetic oligonucleotide
  Sense strand starting at position 2663 of SEQ ID NO: 1885946
auaagaugucuacgugaag

SEQ ID NO: 2378073 - RNA, 19 nt, Artificial Sequence
  Description of Artificial Sequence: Synthetic oligonucleotide
  Antisense strand to SEQ ID NO: 2378072
cuucacguagacaucuuau

SEQ ID NO: 2378074 - RNA, 19 nt, Artificial Sequence
  Description of Artificial Sequence: Synthetic oligonucleotide
  Sense strand starting at position 2666 of SEQ ID NO: 1885946
agaugucuacgugaagguu

SEQ ID NO: 2378075 - RNA, 19 nt, Artificial Sequence
  Description of Artificial Sequence: Synthetic oligonucleotide
  Antisense strand to SEQ ID NO: 2378074
aaccuucacguagacaucu

SEQ ID NO: 2378076 - RNA, 19 nt, Artificial Sequence
  Description of Artificial Sequence: Synthetic oligonucleotide
  Sense strand starting at position 2710 of SEQ ID NO: 1885946
gcagaccuguuaucggaaa

SEQ ID NO: 2378077 - RNA, 19 nt, Artificial Sequence
  Description of Artificial Sequence: Synthetic oligonucleotide
  Antisense strand to SEQ ID NO: 2378076
uuuccgauaacaggucugc

SEQ ID NO: 2378078 - RNA, 19 nt, Artificial Sequence
  Description of Artificial Sequence: Synthetic oligonucleotide
  Sense strand starting at position 2712 of SEQ ID NO: 1885946
agaccuguuaucggaaaug

SEQ ID NO: 2378079 - RNA, 19 nt, Artificial Sequence
  Description of Artificial Sequence: Synthetic oligonucleotide
  Antisense strand to SEQ ID NO: 2378078
cauuuccgauaacaggucu

SEQ ID NO: 2378080 - RNA, 19 nt, Artificial Sequence
  Description of Artificial Sequence: Synthetic oligonucleotide
  Sense strand starting at position 2935 of SEQ ID NO: 1885946
cucagagcaguccauuaga

SEQ ID NO: 2378081 - RNA, 19 nt, Artificial Sequence
  Description of Artificial Sequence: Synthetic oligonucleotide
  Antisense strand to SEQ ID NO: 2378080
ucuaauggacugcucugag

SEQ ID NO: 2378082 - RNA, 19 nt, Artificial Sequence
  Description of Artificial Sequence: Synthetic oligonucleotide
  Sense strand starting at position 2943 of SEQ ID NO: 1885946
aguccauuagacuggucaa

SEQ ID NO: 2378083 - RNA, 19 nt, Artificial Sequence
  Description of Artificial Sequence: Synthetic oligonucleotide
  Antisense strand to SEQ ID NO: 2378082
uugaccagucuaauggacu

SEQ ID NO: 2378084 - RNA, 19 nt, Artificial Sequence
  Description of Artificial Sequence: Synthetic oligonucleotide
  Sense strand starting at position 2946 of SEQ ID NO: 1885946
ccauuagacuggucaacau

SEQ ID NO: 2378085 - RNA, 19 nt, Artificial Sequence
  Description of Artificial Sequence: Synthetic oligonucleotide
  Antisense strand to SEQ ID NO: 2378084
auguugaccagucuaaugg

SEQ ID NO: 2378086 - RNA, 19 nt, Artificial Sequence
  Description of Artificial Sequence: Synthetic oligonucleotide
  Sense strand starting at position 3033 of SEQ ID NO: 1885946
gugagaauugccuagggua

SEQ ID NO: 2378087 - RNA, 19 nt, Artificial Sequence
  Description of Artificial Sequence: Synthetic oligonucleotide
  Antisense strand to SEQ ID NO: 2378086
uacccuaggcaauucucac

SEQ ID NO: 2378088 - RNA, 19 nt, Artificial Sequence
  Description of Artificial Sequence: Synthetic oligonucleotide
  Sense strand starting at position 3035 of SEQ ID NO: 1885946
gagaauugccuaggguaag

SEQ ID NO: 2378089 - RNA, 19 nt, Artificial Sequence
  Description of Artificial Sequence: Synthetic oligonucleotide
  Antisense strand to SEQ ID NO: 2378088
cuuacccuaggcaauucuc

SEQ ID NO: 2378090 - RNA, 19 nt, Artificial Sequence
  Description of Artificial Sequence: Synthetic oligonucleotide
  Sense strand starting at position 3053 of SEQ ID NO: 1885946
ggccuagguguagauaaga

SEQ ID NO: 2378091 - RNA, 19 nt, Artificial Sequence
  Description of Artificial Sequence: Synthetic oligonucleotide
  Antisense strand to SEQ ID NO: 2378090
ucuuaucuacaccuaggcc

SEQ ID NO: 2378092 - RNA, 19 nt, Artificial Sequence
  Description of Artificial Sequence: Synthetic oligonucleotide
  Sense strand starting at position 3175 of SEQ ID NO: 1885946
uuauuaaggucaucaagua

SEQ ID NO: 2378093 - RNA, 19 nt, Artificial Sequence
  Description of Artificial Sequence: Synthetic oligonucleotide
  Antisense strand to SEQ ID NO: 2378092
uacuugaugaccuuaauaa

SEQ ID NO: 2378094 - RNA, 19 nt, Artificial Sequence
  Description of Artificial Sequence: Synthetic oligonucleotide
  Sense strand starting at position 3193 of SEQ ID NO: 1885946
agccuucuugugcugaguu

SEQ ID NO: 2378095 - RNA, 19 nt, Artificial Sequence
  Description of Artificial Sequence: Synthetic oligonucleotide
  Antisense strand to SEQ ID NO: 2378094
aacucagcacaagaaggcu

SEQ ID NO: 2378096 - RNA, 19 nt, Artificial Sequence
  Description of Artificial Sequence: Synthetic oligonucleotide
  Sense strand starting at position 3195 of SEQ ID NO: 1885946
ccuucuugugcugaguuaa

SEQ ID NO: 2378097 - RNA, 19 nt, Artificial Sequence
  Description of Artificial Sequence: Synthetic oligonucleotide
  Antisense strand to SEQ ID NO: 2378096
uuaacucagcacaagaagg

SEQ ID NO: 2378098 - RNA, 19 nt, Artificial Sequence
  Description of Artificial Sequence: Synthetic oligonucleotide
  Sense strand starting at position 3206 of SEQ ID NO: 1885946
ugaguuaacugaccuuuaa

SEQ ID NO: 2378099 - RNA, 19 nt, Artificial Sequence
  Description of Artificial Sequence: Synthetic oligonucleotide
  Antisense strand to SEQ ID NO: 2378098
uuaaaggucaguuaacuca

SEQ ID NO: 2378100 - RNA, 19 nt, Artificial Sequence
  Description of Artificial Sequence: Synthetic oligonucleotide
  Sense strand starting at position 3890 of SEQ ID NO: 1885946
guuaaauuugcuugaaugc

SEQ ID NO: 2378101 - RNA, 19 nt, Artificial Sequence
  Description of Artificial Sequence: Synthetic oligonucleotide
  Antisense strand to SEQ ID NO: 2378100
gcauucaagcaaauuuaac

SEQ ID NO: 2378102 - RNA, 19 nt, Artificial Sequence
  Description of Artificial Sequence: Synthetic oligonucleotide
  Sense strand starting at position 120 of SEQ ID NO: 1885947
uggcuucucccagaaagca

SEQ ID NO: 2378103 - RNA, 19 nt, Artificial Sequence
  Description of Artificial Sequence: Synthetic oligonucleotide
  Antisense strand to SEQ ID NO: 2378102
ugcuuucugggagaagcca

SEQ ID NO: 2378104 - RNA, 19 nt, Artificial Sequence
  Description of Artificial Sequence: Synthetic oligonucleotide
  Sense strand starting at position 357 of SEQ ID NO: 1885947
gcagcuggaaucuggaaau

SEQ ID NO: 2378105 - RNA, 19 nt, Artificial Sequence
  Description of Artificial Sequence: Synthetic oligonucleotide
  Antisense strand to SEQ ID NO: 2378104
auuuccagauuccagcugc

SEQ ID NO: 2378106 - RNA, 19 nt, Artificial Sequence
  Description of Artificial Sequence: Synthetic oligonucleotide
  Sense strand starting at position 524 of SEQ ID NO: 1885947
ccgacuagaucaccugaau

SEQ ID NO: 2378107 - RNA, 19 nt, Artificial Sequence
  Description of Artificial Sequence: Synthetic oligonucleotide
  Antisense strand to SEQ ID NO: 2378106
auucaggugaucuagucgg

SEQ ID NO: 2378108 - RNA, 19 nt, Artificial Sequence
  Description of Artificial Sequence: Synthetic oligonucleotide
  Sense strand starting at position 536 of SEQ ID NO: 1885947
ccugaaucccacugaaagu

SEQ ID NO: 2378109 - RNA, 19 nt, Artificial Sequence
  Description of Artificial Sequence: Synthetic oligonucleotide
  Antisense strand to SEQ ID NO: 2378108
acuuucagugggauucagg

SEQ ID NO: 2378110 - RNA, 19 nt, Artificial Sequence
  Description of Artificial Sequence: Synthetic oligonucleotide
  Sense strand starting at position 546 of SEQ ID NO: 1885947
acugaaaguuaugucucuu

SEQ ID NO: 2378111 - RNA, 19 nt, Artificial Sequence
  Description of Artificial Sequence: Synthetic oligonucleotide
  Antisense strand to SEQ ID NO: 2378110
aagagacauaacuuucagu

SEQ ID NO: 2378112 - RNA, 19 nt, Artificial Sequence
  Description of Artificial Sequence: Synthetic oligonucleotide
  Sense strand starting at position 592 of SEQ ID NO: 1885947
ugcuuaguuggucagguua

SEQ ID NO: 2378113 - RNA, 19 nt, Artificial Sequence
  Description of Artificial Sequence: Synthetic oligonucleotide
  Antisense strand to SEQ ID NO: 2378112
uaaccugaccaacuaagca

SEQ ID NO: 2378114 - RNA, 19 nt, Artificial Sequence
  Description of Artificial Sequence: Synthetic oligonucleotide
  Sense strand starting at position 666 of SEQ ID NO: 1885947
uugagaaccuguucuauga

SEQ ID NO: 2378115 - RNA, 19 nt, Artificial Sequence
  Description of Artificial Sequence: Synthetic oligonucleotide
  Antisense strand to SEQ ID NO: 2378114
ucauagaacagguucucaa

SEQ ID NO: 2378116 - RNA, 19 nt, Artificial Sequence
  Description of Artificial Sequence: Synthetic oligonucleotide
  Sense strand starting at position 693 of SEQ ID NO: 1885947
ccacaaggugcuuguauca

SEQ ID NO: 2378117 - RNA, 19 nt, Artificial Sequence
  Description of Artificial Sequence: Synthetic oligonucleotide
  Antisense strand to SEQ ID NO: 2378116
ugauacaagcaccuugugg

SEQ ID NO: 2378118 - RNA, 19 nt, Artificial Sequence
  Description of Artificial Sequence: Synthetic oligonucleotide
  Sense strand starting at position 792 of SEQ ID NO: 1885947
gacacauaauggucuuaug

SEQ ID NO: 2378119 - RNA, 19 nt, Artificial Sequence
  Description of Artificial Sequence: Synthetic oligonucleotide
  Antisense strand to SEQ ID NO: 2378118
cauaagaccauuauguguc

SEQ ID NO: 2378120 - RNA, 19 nt, Artificial Sequence
  Description of Artificial Sequence: Synthetic oligonucleotide
  Sense strand starting at position 795 of SEQ ID NO: 1885947
acauaauggucuuauggag

SEQ ID NO: 2378121 - RNA, 19 nt, Artificial Sequence
  Description of Artificial Sequence: Synthetic oligonucleotide
  Antisense strand to SEQ ID NO: 2378120
cuccauaagaccauuaugu

SEQ ID NO: 2378122 - RNA, 19 nt, Artificial Sequence
  Description of Artificial Sequence: Synthetic oligonucleotide
  Sense strand starting at position 801 of SEQ ID NO: 1885947
uggucuuauggaggcagau

SEQ ID NO: 2378123 - RNA, 19 nt, Artificial Sequence
  Description of Artificial Sequence: Synthetic oligonucleotide
  Antisense strand to SEQ ID NO: 2378122
aucugccuccauaagacca

SEQ ID NO: 2378124 - RNA, 19 nt, Artificial Sequence
  Description of Artificial Sequence: Synthetic oligonucleotide
  Sense strand starting at position 855 of SEQ ID NO: 1885947
ugugaccacucgucuuuaa

SEQ ID NO: 2378125 - RNA, 19 nt, Artificial Sequence
  Description of Artificial Sequence: Synthetic oligonucleotide
  Antisense strand to SEQ ID NO: 2378124
uuaaagacgaguggucaca

SEQ ID NO: 2378126 - RNA, 19 nt, Artificial Sequence
  Description of Artificial Sequence: Synthetic oligonucleotide
  Sense strand starting at position 934 of SEQ ID NO: 1885947
ggaaacaaaugucaucaaa

SEQ ID NO: 2378127 - RNA, 19 nt, Artificial Sequence
  Description of Artificial Sequence: Synthetic oligonucleotide
  Antisense strand to SEQ ID NO: 2378126
uuugaugacauuuguuucc

SEQ ID NO: 2378128 - RNA, 19 nt, Artificial Sequence
  Description of Artificial Sequence: Synthetic oligonucleotide
  Sense strand starting at position 988 of SEQ ID NO: 1885947
cuaggccuguuuccuauaa

SEQ ID NO: 2378129 - RNA, 19 nt, Artificial Sequence
  Description of Artificial Sequence: Synthetic oligonucleotide
  Antisense strand to SEQ ID NO: 2378128
uuauaggaaacaggccuag

SEQ ID NO: 2378130 - RNA, 19 nt, Artificial Sequence
  Description of Artificial Sequence: Synthetic oligonucleotide
  Sense strand starting at position 1988 of SEQ ID NO: 1885947
gaucuaugauuuggaagaa

SEQ ID NO: 2378131 - RNA, 19 nt, Artificial Sequence
  Description of Artificial Sequence: Synthetic oligonucleotide
  Antisense strand to SEQ ID NO: 2378130
uucuuccaaaucauagauc

SEQ ID NO: 2378132 - RNA, 19 nt, Artificial Sequence
  Description of Artificial Sequence: Synthetic oligonucleotide
  Sense strand starting at position 2093 of SEQ ID NO: 1885947
gccucauaacaguggcuua

SEQ ID NO: 2378133 - RNA, 19 nt, Artificial Sequence
  Description of Artificial Sequence: Synthetic oligonucleotide
  Antisense strand to SEQ ID NO: 2378132
uaagccacuguuaugaggc

SEQ ID NO: 2378134 - RNA, 19 nt, Artificial Sequence
  Description of Artificial Sequence: Synthetic oligonucleotide
  Sense strand starting at position 2104 of SEQ ID NO: 1885947
guggcuuacaugugauuua

SEQ ID NO: 2378135 - RNA, 19 nt, Artificial Sequence
  Description of Artificial Sequence: Synthetic oligonucleotide
  Antisense strand to SEQ ID NO: 2378134
uaaaucacauguaagccac

SEQ ID NO: 2378136 - RNA, 19 nt, Artificial Sequence
  Description of Artificial Sequence: Synthetic oligonucleotide
  Sense strand starting at position 2131 of SEQ ID NO: 1885947
agcccuguugauuaccuaa

SEQ ID NO: 2378137 - RNA, 19 nt, Artificial Sequence
  Description of Artificial Sequence: Synthetic oligonucleotide
  Antisense strand to SEQ ID NO: 2378136
uuagguaaucaacagggcu

SEQ ID NO: 2378138 - RNA, 19 nt, Artificial Sequence
  Description of Artificial Sequence: Synthetic oligonucleotide
  Sense strand starting at position 2176 of SEQ ID NO: 1885947
ucaaacagaugugcuaaua

SEQ ID NO: 2378139 - RNA, 19 nt, Artificial Sequence
  Description of Artificial Sequence: Synthetic oligonucleotide
  Antisense strand to SEQ ID NO: 2378138
uauuagcacaucuguuuga

SEQ ID NO: 2378140 - RNA, 19 nt, Artificial Sequence
  Description of Artificial Sequence: Synthetic oligonucleotide
  Sense strand starting at position 2373 of SEQ ID NO: 1885947
acgugcauuugucuucuga

SEQ ID NO: 2378141 - RNA, 19 nt, Artificial Sequence
  Description of Artificial Sequence: Synthetic oligonucleotide
  Antisense strand to SEQ ID NO: 2378140
ucagaagacaaaugcacgu

SEQ ID NO: 2378142 - RNA, 19 nt, Artificial Sequence
  Description of Artificial Sequence: Synthetic oligonucleotide
  Sense strand starting at position 2375 of SEQ ID NO: 1885947
gugcauuugucuucugaau

SEQ ID NO: 2378143 - RNA, 19 nt, Artificial Sequence
  Description of Artificial Sequence: Synthetic oligonucleotide
  Antisense strand to SEQ ID NO: 2378142
auucagaagacaaaugcac

SEQ ID NO: 2378144 - RNA, 19 nt, Artificial Sequence
  Description of Artificial Sequence: Synthetic oligonucleotide
  Sense strand starting at position 2609 of SEQ ID NO: 1885947
guaguagcucuagauaauc

SEQ ID NO: 2378145 - RNA, 19 nt, Artificial Sequence
  Description of Artificial Sequence: Synthetic oligonucleotide
  Antisense strand to SEQ ID NO: 2378144
gauuaucuagagcuacuac

SEQ ID NO: 2378146 - RNA, 19 nt, Artificial Sequence
  Description of Artificial Sequence: Synthetic oligonucleotide
  Sense strand starting at position 2614 of SEQ ID NO: 1885947
agcucuagauaaucugagu

SEQ ID NO: 2378147 - RNA, 19 nt, Artificial Sequence
  Description of Artificial Sequence: Synthetic oligonucleotide
  Antisense strand to SEQ ID NO: 2378146
acucagauuaucuagagcu

SEQ ID NO: 2378148 - RNA, 19 nt, Artificial Sequence
  Description of Artificial Sequence: Synthetic oligonucleotide
  Sense strand starting at position 2636 of SEQ ID NO: 1885947
auagaacuuucuguggcaa

SEQ ID NO: 2378149 - RNA, 19 nt, Artificial Sequence
  Description of Artificial Sequence: Synthetic oligonucleotide
  Antisense strand to SEQ ID NO: 2378148
uugccacagaaaguucuau

SEQ ID NO: 2378150 - RNA, 19 nt, Artificial Sequence
  Description of Artificial Sequence: Synthetic oligonucleotide
  Sense strand starting at position 2637 of SEQ ID NO: 1885947
uagaacuuucuguggcaaa

SEQ ID NO: 2378151 - RNA, 19 nt, Artificial Sequence
  Description of Artificial Sequence: Synthetic oligonucleotide
  Antisense strand to SEQ ID NO: 2378150
uuugccacagaaaguucua

SEQ ID NO: 2378152 - RNA, 19 nt, Artificial Sequence
  Description of Artificial Sequence: Synthetic oligonucleotide
  Sense strand starting at position 2694 of SEQ ID NO: 1885947
guugauaauacauggugua

SEQ ID NO: 2378153 - RNA, 19 nt, Artificial Sequence
  Description of Artificial Sequence: Synthetic oligonucleotide
  Antisense strand to SEQ ID NO: 2378152
uacaccauguauuaucaac

SEQ ID NO: 2378154 - RNA, 19 nt, Artificial Sequence
  Description of Artificial Sequence: Synthetic oligonucleotide
  Sense strand starting at position 2699 of SEQ ID NO: 1885947
uaauacaugguguagagua

SEQ ID NO: 2378155 - RNA, 19 nt, Artificial Sequence
  Description of Artificial Sequence: Synthetic oligonucleotide
  Antisense strand to SEQ ID NO: 2378154
uacucuacaccauguauua

SEQ ID NO: 2378156 - RNA, 19 nt, Artificial Sequence
  Description of Artificial Sequence: Synthetic oligonucleotide
  Sense strand starting at position 2707 of SEQ ID NO: 1885947
gguguagaguaacuugaga

SEQ ID NO: 2378157 - RNA, 19 nt, Artificial Sequence
  Description of Artificial Sequence: Synthetic oligonucleotide
  Antisense strand to SEQ ID NO: 2378156
ucucaaguuacucuacacc

SEQ ID NO: 2378158 - RNA, 19 nt, Artificial Sequence
  Description of Artificial Sequence: Synthetic oligonucleotide
  Sense strand starting at position 2709 of SEQ ID NO: 1885947
uguagaguaacuugagaaa

SEQ ID NO: 2378159 - RNA, 19 nt, Artificial Sequence
  Description of Artificial Sequence: Synthetic oligonucleotide
  Antisense strand to SEQ ID NO: 2378158
uuucucaaguuacucuaca

SEQ ID NO: 2378160 - RNA, 19 nt, Artificial Sequence
  Description of Artificial Sequence: Synthetic oligonucleotide
  Sense strand starting at position 2777 of SEQ ID NO: 1885947
aacuguguuagggacaagu

SEQ ID NO: 2378161 - RNA, 19 nt, Artificial Sequence
  Description of Artificial Sequence: Synthetic oligonucleotide
  Antisense strand to SEQ ID NO: 2378160
acuugucccuaacacaguu

SEQ ID NO: 2378162 - RNA, 19 nt, Artificial Sequence
  Description of Artificial Sequence: Synthetic oligonucleotide
  Sense strand starting at position 3012 of SEQ ID NO: 1885947
cccuuauugggucaagggu

SEQ ID NO: 2378163 - RNA, 19 nt, Artificial Sequence
  Description of Artificial Sequence: Synthetic oligonucleotide
  Antisense strand to SEQ ID NO: 2378162
acccuugacccaauaaggg

SEQ ID NO: 2378164 - RNA, 19 nt, Artificial Sequence
  Description of Artificial Sequence: Synthetic oligonucleotide
  Sense strand starting at position 3158 of SEQ ID NO: 1885947
ggucuugucaaguagauug

SEQ ID NO: 2378165 - RNA, 19 nt, Artificial Sequence
  Description of Artificial Sequence: Synthetic oligonucleotide
  Antisense strand to SEQ ID NO: 2378164
caaucuacuugacaagacc

SEQ ID NO: 2378166 - RNA, 19 nt, Artificial Sequence
  Description of Artificial Sequence: Synthetic oligonucleotide
  Sense strand starting at position 3180 of SEQ ID NO: 1885947
caagcugucccaugaugaa

SEQ ID NO: 2378167 - RNA, 19 nt, Artificial Sequence
  Description of Artificial Sequence: Synthetic oligonucleotide
  Antisense strand to SEQ ID NO: 2378166
uucaucaugggacagcuug

SEQ ID NO: 2378168 - RNA, 19 nt, Artificial Sequence
  Description of Artificial Sequence: Synthetic oligonucleotide
  Sense strand starting at position 3189 of SEQ ID NO: 1885947
ccaugaugaagugguccaa

SEQ ID NO: 2378169 - RNA, 19 nt, Artificial Sequence
  Description of Artificial Sequence: Synthetic oligonucleotide
  Antisense strand to SEQ ID NO: 2378168
uuggaccacuucaucaugg

SEQ ID NO: 2378170 - RNA, 19 nt, Artificial Sequence
  Description of Artificial Sequence: Synthetic oligonucleotide
  Sense strand starting at position 3225 of SEQ ID NO: 1885947
ggcagcuaucuggaccaau

SEQ ID NO: 2378171 - RNA, 19 nt, Artificial Sequence
  Description of Artificial Sequence: Synthetic oligonucleotide
  Antisense strand to SEQ ID NO: 2378170
auugguccagauagcugcc

SEQ ID NO: 2378172 - RNA, 19 nt, Artificial Sequence
  Description of Artificial Sequence: Synthetic oligonucleotide
  Sense strand starting at position 3255 of SEQ ID NO: 1885947
acgagaaggagguguagaa

SEQ ID NO: 2378173 - RNA, 19 nt, Artificial Sequence
  Description of Artificial Sequence: Synthetic oligonucleotide
  Antisense strand to SEQ ID NO: 2378172
uucuacaccuccuucucgu

SEQ ID NO: 2378174 - RNA, 19 nt, Artificial Sequence
  Description of Artificial Sequence: Synthetic oligonucleotide
  Sense strand starting at position 3302 of SEQ ID NO: 1885947
uugcuucugguauaacaaa

SEQ ID NO: 2378175 - RNA, 19 nt, Artificial Sequence
  Description of Artificial Sequence: Synthetic oligonucleotide
  Antisense strand to SEQ ID NO: 2378174
uuuguuauaccagaagcaa

SEQ ID NO: 2378176 - RNA, 19 nt, Artificial Sequence
  Description of Artificial Sequence: Synthetic oligonucleotide
  Sense strand starting at position 3584 of SEQ ID NO: 1885947
gaggacucaccaugugauu

SEQ ID NO: 2378177 - RNA, 19 nt, Artificial Sequence
  Description of Artificial Sequence: Synthetic oligonucleotide
  Antisense strand to SEQ ID NO: 2378176
aaucacauggugaguccuc

SEQ ID NO: 2378178 - RNA, 19 nt, Artificial Sequence
  Description of Artificial Sequence: Synthetic oligonucleotide
  Sense strand starting at position 3589 of SEQ ID NO: 1885947
cucaccaugugauuaaugu

SEQ ID NO: 2378179 - RNA, 19 nt, Artificial Sequence
  Description of Artificial Sequence: Synthetic oligonucleotide
  Antisense strand to SEQ ID NO: 2378178
acauuaaucacauggugag

SEQ ID NO: 2378180 - RNA, 19 nt, Artificial Sequence
  Description of Artificial Sequence: Synthetic oligonucleotide
  Sense strand starting at position 3590 of SEQ ID NO: 1885947
ucaccaugugauuaauguu

SEQ ID NO: 2378181 - RNA, 19 nt, Artificial Sequence
  Description of Artificial Sequence: Synthetic oligonucleotide
  Antisense strand to SEQ ID NO: 2378180
aacauuaaucacaugguga

SEQ ID NO: 2378182 - RNA, 19 nt, Artificial Sequence
  Description of Artificial Sequence: Synthetic oligonucleotide
  Sense strand starting at position 91 of SEQ ID NO: 1885950
caagauucggcauauguug

SEQ ID NO: 2378183 - RNA, 19 nt, Artificial Sequence
  Description of Artificial Sequence: Synthetic oligonucleotide
  Antisense strand to SEQ ID NO: 2378182
caacauaugccgaaucuug

SEQ ID NO: 2378184 - RNA, 19 nt, Artificial Sequence
  Description of Artificial Sequence: Synthetic oligonucleotide
  Sense strand starting at position 712 of SEQ ID NO: 1885950
aaaguaauggauugguaau

SEQ ID NO: 2378185 - RNA, 19 nt, Artificial Sequence
  Description of Artificial Sequence: Synthetic oligonucleotide
  Antisense strand to SEQ ID NO: 2378184
auuaccaauccauuacuuu

SEQ ID NO: 2378186 - RNA, 19 nt, Artificial Sequence
  Description of Artificial Sequence: Synthetic oligonucleotide
  Sense strand starting at position 722 of SEQ ID NO: 1885950
auugguaaugggugacuga

SEQ ID NO: 2378187 - RNA, 19 nt, Artificial Sequence
  Description of Artificial Sequence: Synthetic oligonucleotide
  Antisense strand to SEQ ID NO: 2378186
ucagucacccauuaccaau

SEQ ID NO: 2378188 - RNA, 19 nt, Artificial Sequence
  Description of Artificial Sequence: Synthetic oligonucleotide
  Sense strand starting at position 735 of SEQ ID NO: 1885950
gacugagguccacaaagcu

SEQ ID NO: 2378189 - RNA, 19 nt, Artificial Sequence
  Description of Artificial Sequence: Synthetic oligonucleotide
  Antisense strand to SEQ ID NO: 2378188
agcuuuguggaccucaguc

SEQ ID NO: 2378190 - RNA, 19 nt, Artificial Sequence
  Description of Artificial Sequence: Synthetic oligonucleotide
  Sense strand starting at position 743 of SEQ ID NO: 1885950
uccacaaagcucgauaaga

SEQ ID NO: 2378191 - RNA, 19 nt, Artificial Sequence
  Description of Artificial Sequence: Synthetic oligonucleotide
  Antisense strand to SEQ ID NO: 2378190
ucuuaucgagcuuugugga

SEQ ID NO: 2378192 - RNA, 19 nt, Artificial Sequence
  Description of Artificial Sequence: Synthetic oligonucleotide
  Sense strand starting at position 2076 of SEQ ID NO: 1885950
ccuagaaaguggcucugaa

SEQ ID NO: 2378193 - RNA, 19 nt, Artificial Sequence
  Description of Artificial Sequence: Synthetic oligonucleotide
  Antisense strand to SEQ ID NO: 2378192
uucagagccacuuucuagg

SEQ ID NO: 2378194 - RNA, 19 nt, Artificial Sequence
  Description of Artificial Sequence: Synthetic oligonucleotide
  Sense strand starting at position 2123 of SEQ ID NO: 1885950
acucauucccgugaacauc

SEQ ID NO: 2378195 - RNA, 19 nt, Artificial Sequence
  Description of Artificial Sequence: Synthetic oligonucleotide
  Antisense strand to SEQ ID NO: 2378194
gauguucacgggaaugagu

SEQ ID NO: 2378196 - RNA, 19 nt, Artificial Sequence
  Description of Artificial Sequence: Synthetic oligonucleotide
  Sense strand starting at position 2152 of SEQ ID NO: 1885950
ugcguuuauguugcaauaa

SEQ ID NO: 2378197 - RNA, 19 nt, Artificial Sequence
  Description of Artificial Sequence: Synthetic oligonucleotide
  Antisense strand to SEQ ID NO: 2378196
uuauugcaacauaaacgca

SEQ ID NO: 2378198 - RNA, 19 nt, Artificial Sequence
  Description of Artificial Sequence: Synthetic oligonucleotide
  Sense strand starting at position 2408 of SEQ ID NO: 1885950
uggacauggguguaucuuu

SEQ ID NO: 2378199 - RNA, 19 nt, Artificial Sequence
  Description of Artificial Sequence: Synthetic oligonucleotide
  Antisense strand to SEQ ID NO: 2378198
aaagauacacccaugucca

SEQ ID NO: 2378200 - RNA, 19 nt, Artificial Sequence
  Description of Artificial Sequence: Synthetic oligonucleotide
  Sense strand starting at position 2613 of SEQ ID NO: 1885950
auaaucugaucguccauua

SEQ ID NO: 2378201 - RNA, 19 nt, Artificial Sequence
  Description of Artificial Sequence: Synthetic oligonucleotide
  Antisense strand to SEQ ID NO: 2378200
uaauggacgaucagauuau

SEQ ID NO: 2378202 - RNA, 19 nt, Artificial Sequence
  Description of Artificial Sequence: Synthetic oligonucleotide
  Sense strand starting at position 2646 of SEQ ID NO: 1885950
cuguguauuugugcuuaua

SEQ ID NO: 2378203 - RNA, 19 nt, Artificial Sequence
  Description of Artificial Sequence: Synthetic oligonucleotide
  Antisense strand to SEQ ID NO: 2378202
uauaagcacaaauacacag

SEQ ID NO: 2378204 - RNA, 19 nt, Artificial Sequence
  Description of Artificial Sequence: Synthetic oligonucleotide
  Sense strand starting at position 2648 of SEQ ID NO: 1885950
guguauuugugcuuauaau

SEQ ID NO: 2378205 - RNA, 19 nt, Artificial Sequence
  Description of Artificial Sequence: Synthetic oligonucleotide
  Antisense strand to SEQ ID NO: 2378204
auuauaagcacaaauacac

SEQ ID NO: 2378206 - RNA, 19 nt, Artificial Sequence
  Description of Artificial Sequence: Synthetic oligonucleotide
  Sense strand starting at position 2709 of SEQ ID NO: 1885950
uggacuguccuguaaggag

SEQ ID NO: 2378207 - RNA, 19 nt, Artificial Sequence
  Description of Artificial Sequence: Synthetic oligonucleotide
  Antisense strand to SEQ ID NO: 2378206
cuccuuacaggacagucca

SEQ ID NO: 2378208 - RNA, 19 nt, Artificial Sequence
  Description of Artificial Sequence: Synthetic oligonucleotide
  Sense strand starting at position 2723 of SEQ ID NO: 1885950
aggagauaauuguuuagca

SEQ ID NO: 2378209 - RNA, 19 nt, Artificial Sequence
  Description of Artificial Sequence: Synthetic oligonucleotide
  Antisense strand to SEQ ID NO: 2378208
ugcuaaacaauuaucuccu

SEQ ID NO: 2378210 - RNA, 19 nt, Artificial Sequence
  Description of Artificial Sequence: Synthetic oligonucleotide
  Sense strand starting at position 2724 of SEQ ID NO: 1885950
ggagauaauuguuuagcaa

SEQ ID NO: 2378211 - RNA, 19 nt, Artificial Sequence
  Description of Artificial Sequence: Synthetic oligonucleotide
  Antisense strand to SEQ ID NO: 2378210
uugcuaaacaauuaucucc

SEQ ID NO: 2378212 - RNA, 19 nt, Artificial Sequence
  Description of Artificial Sequence: Synthetic oligonucleotide
  Sense strand starting at position 2725 of SEQ ID NO: 1885950
gagauaauuguuuagcaac

SEQ ID NO: 2378213 - RNA, 19 nt, Artificial Sequence
  Description of Artificial Sequence: Synthetic oligonucleotide
  Antisense strand to SEQ ID NO: 2378212
guugcuaaacaauuaucuc

SEQ ID NO: 2378214 - RNA, 19 nt, Artificial Sequence
  Description of Artificial Sequence: Synthetic oligonucleotide
  Sense strand starting at position 2732 of SEQ ID NO: 1885950
uuguuuagcaacguguuau

SEQ ID NO: 2378215 - RNA, 19 nt, Artificial Sequence
  Description of Artificial Sequence: Synthetic oligonucleotide
  Antisense strand to SEQ ID NO: 2378214
auaacacguugcuaaacaa

SEQ ID NO: 2378216 - RNA, 19 nt, Artificial Sequence
  Description of Artificial Sequence: Synthetic oligonucleotide
  Sense strand starting at position 2857 of SEQ ID NO: 1885950
ucgaaauuauuuggaaaga

SEQ ID NO: 2378217 - RNA, 19 nt, Artificial Sequence
  Description of Artificial Sequence: Synthetic oligonucleotide
  Antisense strand to SEQ ID NO: 2378216
ucuuuccaaauaauuucga

SEQ ID NO: 2378218 - RNA, 19 nt, Artificial Sequence
  Description of Artificial Sequence: Synthetic oligonucleotide
  Sense strand starting at position 2858 of SEQ ID NO: 1885950
cgaaauuauuuggaaagac

SEQ ID NO: 2378219 - RNA, 19 nt, Artificial Sequence
  Description of Artificial Sequence: Synthetic oligonucleotide
  Antisense strand to SEQ ID NO: 2378218
gucuuuccaaauaauuucg

SEQ ID NO: 2378220 - RNA, 19 nt, Artificial Sequence
  Description of Artificial Sequence: Synthetic oligonucleotide
  Sense strand starting at position 2870 of SEQ ID NO: 1885950
gaaagacuggaguguuaac

SEQ ID NO: 2378221 - RNA, 19 nt, Artificial Sequence
  Description of Artificial Sequence: Synthetic oligonucleotide
  Antisense strand to SEQ ID NO: 2378220
guuaacacuccagucuuuc

SEQ ID NO: 2378222 - RNA, 19 nt, Artificial Sequence
  Description of Artificial Sequence: Synthetic oligonucleotide
  Sense strand starting at position 2877 of SEQ ID NO: 1885950
uggaguguuaacuagauuc

SEQ ID NO: 2378223 - RNA, 19 nt, Artificial Sequence
  Description of Artificial Sequence: Synthetic oligonucleotide
  Antisense strand to SEQ ID NO: 2378222
gaaucuaguuaacacucca

SEQ ID NO: 2378224 - RNA, 19 nt, Artificial Sequence
  Description of Artificial Sequence: Synthetic oligonucleotide
  Sense strand starting at position 2879 of SEQ ID NO: 1885950
gaguguuaacuagauucga

SEQ ID NO: 2378225 - RNA, 19 nt, Artificial Sequence
  Description of Artificial Sequence: Synthetic oligonucleotide
  Antisense strand to SEQ ID NO: 2378224
ucgaaucuaguuaacacuc

SEQ ID NO: 2378226 - RNA, 19 nt, Artificial Sequence
  Description of Artificial Sequence: Synthetic oligonucleotide
  Sense strand starting at position 2883 of SEQ ID NO: 1885950
guuaacuagauucgagaag

SEQ ID NO: 2378227 - RNA, 19 nt, Artificial Sequence
  Description of Artificial Sequence: Synthetic oligonucleotide
  Antisense strand to SEQ ID NO: 2378226
cuucucgaaucuaguuaac

SEQ ID NO: 2378228 - RNA, 19 nt, Artificial Sequence
  Description of Artificial Sequence: Synthetic oligonucleotide
  Sense strand starting at position 2892 of SEQ ID NO: 1885950
auucgagaaguauaaguuu

SEQ ID NO: 2378229 - RNA, 19 nt, Artificial Sequence
  Description of Artificial Sequence: Synthetic oligonucleotide
  Antisense strand to SEQ ID NO: 2378228
aaacuuauacuucucgaau

SEQ ID NO: 2378230 - RNA, 19 nt, Artificial Sequence
  Description of Artificial Sequence: Synthetic oligonucleotide
  Sense strand starting at position 2895 of SEQ ID NO: 1885950
cgagaaguauaaguuuauu

SEQ ID NO: 2378231 - RNA, 19 nt, Artificial Sequence
  Description of Artificial Sequence: Synthetic oligonucleotide
  Antisense strand to SEQ ID NO: 2378230
aauaaacuuauacuucucg

SEQ ID NO: 2378232 - RNA, 19 nt, Artificial Sequence
  Description of Artificial Sequence: Synthetic oligonucleotide
  Sense strand starting at position 2971 of SEQ ID NO: 1885950
agcauaacgggagaguuau

SEQ ID NO: 2378233 - RNA, 19 nt, Artificial Sequence
  Description of Artificial Sequence: Synthetic oligonucleotide
  Antisense strand to SEQ ID NO: 2378232
auaacucucccguuaugcu

SEQ ID NO: 2378234 - RNA, 19 nt, Artificial Sequence
  Description of Artificial Sequence: Synthetic oligonucleotide
  Sense strand starting at position 2979 of SEQ ID NO: 1885950
gggagaguuauagguaaac

SEQ ID NO: 2378235 - RNA, 19 nt, Artificial Sequence
  Description of Artificial Sequence: Synthetic oligonucleotide
  Antisense strand to SEQ ID NO: 2378234
guuuaccuauaacucuccc

SEQ ID NO: 2378236 - RNA, 19 nt, Artificial Sequence
  Description of Artificial Sequence: Synthetic oligonucleotide
  Sense strand starting at position 2988 of SEQ ID NO: 1885950
auagguaaaccaugagcca

SEQ ID NO: 2378237 - RNA, 19 nt, Artificial Sequence
  Description of Artificial Sequence: Synthetic oligonucleotide
  Antisense strand to SEQ ID NO: 2378236
uggcucaugguuuaccuau

SEQ ID NO: 2378238 - RNA, 19 nt, Artificial Sequence
  Description of Artificial Sequence: Synthetic oligonucleotide
  Sense strand starting at position 2991 of SEQ ID NO: 1885950
gguaaaccaugagccaaau

SEQ ID NO: 2378239 - RNA, 19 nt, Artificial Sequence
  Description of Artificial Sequence: Synthetic oligonucleotide
  Antisense strand to SEQ ID NO: 2378238
auuuggcucaugguuuacc

SEQ ID NO: 2378240 - RNA, 19 nt, Artificial Sequence
  Description of Artificial Sequence: Synthetic oligonucleotide
  Sense strand starting at position 3206 of SEQ ID NO: 1885950
uguuuauuaaugugggaga

SEQ ID NO: 2378241 - RNA, 19 nt, Artificial Sequence
  Description of Artificial Sequence: Synthetic oligonucleotide
  Antisense strand to SEQ ID NO: 2378240
ucucccacauuaauaaaca

SEQ ID NO: 2378242 - RNA, 19 nt, Artificial Sequence
  Description of Artificial Sequence: Synthetic oligonucleotide
  Sense strand starting at position 3208 of SEQ ID NO: 1885950
uuuauuaaugugggagagu

SEQ ID NO: 2378243 - RNA, 19 nt, Artificial Sequence
  Description of Artificial Sequence: Synthetic oligonucleotide
  Antisense strand to SEQ ID NO: 2378242
acucucccacauuaauaaa

SEQ ID NO: 2378244 - RNA, 19 nt, Artificial Sequence
  Description of Artificial Sequence: Synthetic oligonucleotide
  Sense strand starting at position 3384 of SEQ ID NO: 1885950
ggugaacacaucugguaac

SEQ ID NO: 2378245 - RNA, 19 nt, Artificial Sequence
  Description of Artificial Sequence: Synthetic oligonucleotide
  Antisense strand to SEQ ID NO: 2378244
guuaccagauguguucacc

SEQ ID NO: 2378246 - RNA, 19 nt, Artificial Sequence
  Description of Artificial Sequence: Synthetic oligonucleotide
  Sense strand starting at position 3483 of SEQ ID NO: 1885950
gucucucugggugauaaag

SEQ ID NO: 2378247 - RNA, 19 nt, Artificial Sequence
  Description of Artificial Sequence: Synthetic oligonucleotide
  Antisense strand to SEQ ID NO: 2378246
cuuuaucacccagagagac

SEQ ID NO: 2378248 - RNA, 19 nt, Artificial Sequence
  Description of Artificial Sequence: Synthetic oligonucleotide
  Sense strand starting at position 3655 of SEQ ID NO: 1885950
gguuuaccagucuagguau

SEQ ID NO: 2378249 - RNA, 19 nt, Artificial Sequence
  Description of Artificial Sequence: Synthetic oligonucleotide
  Antisense strand to SEQ ID NO: 2378248
auaccuagacugguaaacc

SEQ ID NO: 2378250 - RNA, 19 nt, Artificial Sequence
  Description of Artificial Sequence: Synthetic oligonucleotide
  Sense strand starting at position 3668 of SEQ ID NO: 1885950
agguauccugcugagaagu

SEQ ID NO: 2378251 - RNA, 19 nt, Artificial Sequence
  Description of Artificial Sequence: Synthetic oligonucleotide
  Antisense strand to SEQ ID NO: 2378250
acuucucagcaggauaccu

SEQ ID NO: 2378252 - RNA, 19 nt, Artificial Sequence
  Description of Artificial Sequence: Synthetic oligonucleotide
  Sense strand starting at position 3706 of SEQ ID NO: 1885950
gcaacuuaccauuggaaug

SEQ ID NO: 2378253 - RNA, 19 nt, Artificial Sequence
  Description of Artificial Sequence: Synthetic oligonucleotide
  Antisense strand to SEQ ID NO: 2378252
cauuccaaugguaaguugc

SEQ ID NO: 2378254 - RNA, 19 nt, Artificial Sequence
  Description of Artificial Sequence: Synthetic oligonucleotide
  Sense strand starting at position 3728 of SEQ ID NO: 1885950
gagauuuacugaggaauuc

SEQ ID NO: 2378255 - RNA, 19 nt, Artificial Sequence
  Description of Artificial Sequence: Synthetic oligonucleotide
  Antisense strand to SEQ ID NO: 2378254
gaauuccucaguaaaucuc

SEQ ID NO: 2378256 - RNA, 19 nt, Artificial Sequence
  Description of Artificial Sequence: Synthetic oligonucleotide
  Sense strand starting at position 3804 of SEQ ID NO: 1885950
gugaauuauuaugcaaaga

SEQ ID NO: 2378257 - RNA, 19 nt, Artificial Sequence
  Description of Artificial Sequence: Synthetic oligonucleotide
  Antisense strand to SEQ ID NO: 2378256
ucuuugcauaauaauucac

SEQ ID NO: 2378258 - RNA, 19 nt, Artificial Sequence
  Description of Artificial Sequence: Synthetic oligonucleotide
  Sense strand starting at position 3948 of SEQ ID NO: 1885950
auaaguuauauagguggca

SEQ ID NO: 2378259 - RNA, 19 nt, Artificial Sequence
  Description of Artificial Sequence: Synthetic oligonucleotide
  Antisense strand to SEQ ID NO: 2378258
ugccaccuauauaacuuau

SEQ ID NO: 2378260 - RNA, 19 nt, Artificial Sequence
  Description of Artificial Sequence: Synthetic oligonucleotide
  Sense strand starting at position 3949 of SEQ ID NO: 1885950
uaaguuauauagguggcaa

SEQ ID NO: 2378261 - RNA, 19 nt, Artificial Sequence
  Description of Artificial Sequence: Synthetic oligonucleotide
  Antisense strand to SEQ ID NO: 2378260
uugccaccuauauaacuua

SEQ ID NO: 2378262 - RNA, 19 nt, Artificial Sequence
  Description of Artificial Sequence: Synthetic oligonucleotide
  Sense strand starting at position 74 of SEQ ID NO: 1885948
gugagagacuggcuugagu

SEQ ID NO: 2378263 - RNA, 19 nt, Artificial Sequence
  Description of Artificial Sequence: Synthetic oligonucleotide
  Antisense strand to SEQ ID NO: 2378262
acucaagccagucucucac

SEQ ID NO: 2378264 - RNA, 19 nt, Artificial Sequence
  Description of Artificial Sequence: Synthetic oligonucleotide
  Sense strand starting at position 76 of SEQ ID NO: 1885948
gagagacuggcuugaguuc

SEQ ID NO: 2378265 - RNA, 19 nt, Artificial Sequence
  Description of Artificial Sequence: Synthetic oligonucleotide
  Antisense strand to SEQ ID NO: 2378264
gaacucaagccagucucuc

SEQ ID NO: 2378266 - RNA, 19 nt, Artificial Sequence
  Description of Artificial Sequence: Synthetic oligonucleotide
  Sense strand starting at position 88 of SEQ ID NO: 1885948
ugaguucuggaccagcuua

SEQ ID NO: 2378267 - RNA, 19 nt, Artificial Sequence
  Description of Artificial Sequence: Synthetic oligonucleotide
  Antisense strand to SEQ ID NO: 2378266
uaagcugguccagaacuca

SEQ ID NO: 2378268 - RNA, 19 nt, Artificial Sequence
  Description of Artificial Sequence: Synthetic oligonucleotide
  Sense strand starting at position 165 of SEQ ID NO: 1885948
uugaacuuaugcuuaguaa

SEQ ID NO: 2378269 - RNA, 19 nt, Artificial Sequence
  Description of Artificial Sequence: Synthetic oligonucleotide
  Antisense strand to SEQ ID NO: 2378268
uuacuaagcauaaguucaa

SEQ ID NO: 2378270 - RNA, 19 nt, Artificial Sequence
  Description of Artificial Sequence: Synthetic oligonucleotide
  Sense strand starting at position 166 of SEQ ID NO: 1885948
ugaacuuaugcuuaguaau

SEQ ID NO: 2378271 - RNA, 19 nt, Artificial Sequence
  Description of Artificial Sequence: Synthetic oligonucleotide
  Antisense strand to SEQ ID NO: 2378270
auuacuaagcauaaguuca

SEQ ID NO: 2378272 - RNA, 19 nt, Artificial Sequence
  Description of Artificial Sequence: Synthetic oligonucleotide
  Sense strand starting at position 962 of SEQ ID NO: 1885948
caagauucggcauauguug

SEQ ID NO: 2378273 - RNA, 19 nt, Artificial Sequence
  Description of Artificial Sequence: Synthetic oligonucleotide
  Antisense strand to SEQ ID NO: 2378272
caacauaugccgaaucuug

SEQ ID NO: 2378274 - RNA, 19 nt, Artificial Sequence
  Description of Artificial Sequence: Synthetic oligonucleotide
  Sense strand starting at position 1378 of SEQ ID NO: 1885948
caacgauaguaauuguuau

SEQ ID NO: 2378275 - RNA, 19 nt, Artificial Sequence
  Description of Artificial Sequence: Synthetic oligonucleotide
  Antisense strand to SEQ ID NO: 2378274
auaacaauuacuaucguug

SEQ ID NO: 2378276 - RNA, 19 nt, Artificial Sequence
  Description of Artificial Sequence: Synthetic oligonucleotide
  Sense strand starting at position 1583 of SEQ ID NO: 1885948
aaaguaauggauugguaau

SEQ ID NO: 2378277 - RNA, 19 nt, Artificial Sequence
  Description of Artificial Sequence: Synthetic oligonucleotide
  Antisense strand to SEQ ID NO: 2378276
auuaccaauccauuacuuu

SEQ ID NO: 2378278 - RNA, 19 nt, Artificial Sequence
  Description of Artificial Sequence: Synthetic oligonucleotide
  Sense strand starting at position 1593 of SEQ ID NO: 1885948
auugguaaugggugacuga

SEQ ID NO: 2378279 - RNA, 19 nt, Artificial Sequence
  Description of Artificial Sequence: Synthetic oligonucleotide
  Antisense strand to SEQ ID NO: 2378278
ucagucacccauuaccaau

SEQ ID NO: 2378280 - RNA, 19 nt, Artificial Sequence
  Description of Artificial Sequence: Synthetic oligonucleotide
  Sense strand starting at position 1606 of SEQ ID NO: 1885948
gacugagguccacaaagcu

SEQ ID NO: 2378281 - RNA, 19 nt, Artificial Sequence
  Description of Artificial Sequence: Synthetic oligonucleotide
  Antisense strand to SEQ ID NO: 2378280
agcuuuguggaccucaguc

SEQ ID NO: 2378282 - RNA, 19 nt, Artificial Sequence
  Description of Artificial Sequence: Synthetic oligonucleotide
  Sense strand starting at position 1614 of SEQ ID NO: 1885948
uccacaaagcucgauaaga

SEQ ID NO: 2378283 - RNA, 19 nt, Artificial Sequence
  Description of Artificial Sequence: Synthetic oligonucleotide
  Antisense strand to SEQ ID NO: 2378282
ucuuaucgagcuuugugga

SEQ ID NO: 2378284 - RNA, 19 nt, Artificial Sequence
  Description of Artificial Sequence: Synthetic oligonucleotide
  Sense strand starting at position 1692 of SEQ ID NO: 1885948
cacugagacacgugagguu

SEQ ID NO: 2378285 - RNA, 19 nt, Artificial Sequence
  Description of Artificial Sequence: Synthetic oligonucleotide
  Antisense strand to SEQ ID NO: 2378284
aaccucacgugucucagug

SEQ ID NO: 2378286 - RNA, 19 nt, Artificial Sequence
  Description of Artificial Sequence: Synthetic oligonucleotide
  Sense strand starting at position 2947 of SEQ ID NO: 1885948
ccuagaaaguggcucugaa

SEQ ID NO: 2378287 - RNA, 19 nt, Artificial Sequence
  Description of Artificial Sequence: Synthetic oligonucleotide
  Antisense strand to SEQ ID NO: 2378286
uucagagccacuuucuagg

SEQ ID NO: 2378288 - RNA, 19 nt, Artificial Sequence
  Description of Artificial Sequence: Synthetic oligonucleotide
  Sense strand starting at position 2993 of SEQ ID NO: 1885948
gacucauucccgugaacau

SEQ ID NO: 2378289 - RNA, 19 nt, Artificial Sequence
  Description of Artificial Sequence: Synthetic oligonucleotide
  Antisense strand to SEQ ID NO: 2378288
auguucacgggaaugaguc

SEQ ID NO: 2378290 - RNA, 19 nt, Artificial Sequence
  Description of Artificial Sequence: Synthetic oligonucleotide
  Sense strand starting at position 2994 of SEQ ID NO: 1885948
acucauucccgugaacauc

SEQ ID NO: 2378291 - RNA, 19 nt, Artificial Sequence
  Description of Artificial Sequence: Synthetic oligonucleotide
  Antisense strand to SEQ ID NO: 2378290
gauguucacgggaaugagu

SEQ ID NO: 2378292 - RNA, 19 nt, Artificial Sequence
  Description of Artificial Sequence: Synthetic oligonucleotide
  Sense strand starting at position 3023 of SEQ ID NO: 1885948
ugcguuuauguugcaauaa

SEQ ID NO: 2378293 - RNA, 19 nt, Artificial Sequence
  Description of Artificial Sequence: Synthetic oligonucleotide
  Antisense strand to SEQ ID NO: 2378292
uuauugcaacauaaacgca

SEQ ID NO: 2378294 - RNA, 19 nt, Artificial Sequence
  Description of Artificial Sequence: Synthetic oligonucleotide
  Sense strand starting at position 3279 of SEQ ID NO: 1885948
uggacauggguguaucuuu

SEQ ID NO: 2378295 - RNA, 19 nt, Artificial Sequence
  Description of Artificial Sequence: Synthetic oligonucleotide
  Antisense strand to SEQ ID NO: 2378294
aaagauacacccaugucca

SEQ ID NO: 2378296 - RNA, 19 nt, Artificial Sequence
  Description of Artificial Sequence: Synthetic oligonucleotide
  Sense strand starting at position 3340 of SEQ ID NO: 1885948
uuacuaauagcuggcauaa

SEQ ID NO: 2378297 - RNA, 19 nt, Artificial Sequence
  Description of Artificial Sequence: Synthetic oligonucleotide
  Antisense strand to SEQ ID NO: 2378296
uuaugccagcuauuaguaa

SEQ ID NO: 2378298 - RNA, 19 nt, Artificial Sequence
  Description of Artificial Sequence: Synthetic oligonucleotide
  Sense strand starting at position 3482 of SEQ ID NO: 1885948
acauaaucugaucguccau

SEQ ID NO: 2378299 - RNA, 19 nt, Artificial Sequence
  Description of Artificial Sequence: Synthetic oligonucleotide
  Antisense strand to SEQ ID NO: 2378298
auggacgaucagauuaugu

SEQ ID NO: 2378300 - RNA, 19 nt, Artificial Sequence
  Description of Artificial Sequence: Synthetic oligonucleotide
  Sense strand starting at position 3484 of SEQ ID NO: 1885948
auaaucugaucguccauua

SEQ ID NO: 2378301 - RNA, 19 nt, Artificial Sequence
  Description of Artificial Sequence: Synthetic oligonucleotide
  Antisense strand to SEQ ID NO: 2378300
uaauggacgaucagauuau

SEQ ID NO: 2378302 - RNA, 19 nt, Artificial Sequence
  Description of Artificial Sequence: Synthetic oligonucleotide
  Sense strand starting at position 3489 of SEQ ID NO: 1885948
cugaucguccauuaagguu

SEQ ID NO: 2378303 - RNA, 19 nt, Artificial Sequence
  Description of Artificial Sequence: Synthetic oligonucleotide
  Antisense strand to SEQ ID NO: 2378302
aaccuuaauggacgaucag

SEQ ID NO: 2378304 - RNA, 19 nt, Artificial Sequence
  Description of Artificial Sequence: Synthetic oligonucleotide
  Sense strand starting at position 3517 of SEQ ID NO: 1885948
cuguguauuugugcuuaua

SEQ ID NO: 2378305 - RNA, 19 nt, Artificial Sequence
  Description of Artificial Sequence: Synthetic oligonucleotide
  Antisense strand to SEQ ID NO: 2378304
uauaagcacaaauacacag

SEQ ID NO: 2378306 - RNA, 19 nt, Artificial Sequence
  Description of Artificial Sequence: Synthetic oligonucleotide
  Sense strand starting at position 3519 of SEQ ID NO: 1885948
guguauuugugcuuauaau

SEQ ID NO: 2378307 - RNA, 19 nt, Artificial Sequence
  Description of Artificial Sequence: Synthetic oligonucleotide
  Antisense strand to SEQ ID NO: 2378306
auuauaagcacaaauacac

SEQ ID NO: 2378308 - RNA, 19 nt, Artificial Sequence
  Description of Artificial Sequence: Synthetic oligonucleotide
  Sense strand starting at position 3580 of SEQ ID NO: 1885948
uggacuguccuguaaggag

SEQ ID NO: 2378309 - RNA, 19 nt, Artificial Sequence
  Description of Artificial Sequence: Synthetic oligonucleotide
  Antisense strand to SEQ ID NO: 2378308
cuccuuacaggacagucca

SEQ ID NO: 2378310 - RNA, 19 nt, Artificial Sequence
  Description of Artificial Sequence: Synthetic oligonucleotide
  Sense strand starting at position 3594 of SEQ ID NO: 1885948
aggagauaauuguuuagca

SEQ ID NO: 2378311 - RNA, 19 nt, Artificial Sequence
  Description of Artificial Sequence: Synthetic oligonucleotide
  Antisense strand to SEQ ID NO: 2378310
ugcuaaacaauuaucuccu

SEQ ID NO: 2378312 - RNA, 19 nt, Artificial Sequence
  Description of Artificial Sequence: Synthetic oligonucleotide
  Sense strand starting at position 3595 of SEQ ID NO: 1885948
ggagauaauuguuuagcaa

SEQ ID NO: 2378313 - RNA, 19 nt, Artificial Sequence
  Description of Artificial Sequence: Synthetic oligonucleotide
  Antisense strand to SEQ ID NO: 2378312
uugcuaaacaauuaucucc

SEQ ID NO: 2378314 - RNA, 19 nt, Artificial Sequence
  Description of Artificial Sequence: Synthetic oligonucleotide
  Sense strand starting at position 3596 of SEQ ID NO: 1885948
gagauaauuguuuagcaac

SEQ ID NO: 2378315 - RNA, 19 nt, Artificial Sequence
  Description of Artificial Sequence: Synthetic oligonucleotide
  Antisense strand to SEQ ID NO: 2378314
guugcuaaacaauuaucuc

SEQ ID NO: 2378316 - RNA, 19 nt, Artificial Sequence
  Description of Artificial Sequence: Synthetic oligonucleotide
  Sense strand starting at position 3603 of SEQ ID NO: 1885948
uuguuuagcaacguguuau

SEQ ID NO: 2378317 - RNA, 19 nt, Artificial Sequence
  Description of Artificial Sequence: Synthetic oligonucleotide
  Antisense strand to SEQ ID NO: 2378316
auaacacguugcuaaacaa

SEQ ID NO: 2378318 - RNA, 19 nt, Artificial Sequence
  Description of Artificial Sequence: Synthetic oligonucleotide
  Sense strand starting at position 3728 of SEQ ID NO: 1885948
ucgaaauuauuuggaaaga

SEQ ID NO: 2378319 - RNA, 19 nt, Artificial Sequence
  Description of Artificial Sequence: Synthetic oligonucleotide
  Antisense strand to SEQ ID NO: 2378318
ucuuuccaaauaauuucga

SEQ ID NO: 2378320 - RNA, 19 nt, Artificial Sequence
  Description of Artificial Sequence: Synthetic oligonucleotide
  Sense strand starting at position 3729 of SEQ ID NO: 1885948
cgaaauuauuuggaaagac

SEQ ID NO: 2378321 - RNA, 19 nt, Artificial Sequence
  Description of Artificial Sequence: Synthetic oligonucleotide
  Antisense strand to SEQ ID NO: 2378320
gucuuuccaaauaauuucg

SEQ ID NO: 2378322 - RNA, 19 nt, Artificial Sequence
  Description of Artificial Sequence: Synthetic oligonucleotide
  Sense strand starting at position 3741 of SEQ ID NO: 1885948
gaaagacuggaguguuaac

SEQ ID NO: 2378323 - RNA, 19 nt, Artificial Sequence
  Description of Artificial Sequence: Synthetic oligonucleotide
  Antisense strand to SEQ ID NO: 2378322
guuaacacuccagucuuuc

SEQ ID NO: 2378324 - RNA, 19 nt, Artificial Sequence
  Description of Artificial Sequence: Synthetic oligonucleotide
  Sense strand starting at position 3748 of SEQ ID NO: 1885948
uggaguguuaacuagauuc

SEQ ID NO: 2378325 - RNA, 19 nt, Artificial Sequence
  Description of Artificial Sequence: Synthetic oligonucleotide
  Antisense strand to SEQ ID NO: 2378324
gaaucuaguuaacacucca

SEQ ID NO: 2378326 - RNA, 19 nt, Artificial Sequence
  Description of Artificial Sequence: Synthetic oligonucleotide
  Sense strand starting at position 3750 of SEQ ID NO: 1885948
gaguguuaacuagauucga

SEQ ID NO: 2378327 - RNA, 19 nt, Artificial Sequence
  Description of Artificial Sequence: Synthetic oligonucleotide
  Antisense strand to SEQ ID NO: 2378326
ucgaaucuaguuaacacuc

SEQ ID NO: 2378328 - RNA, 19 nt, Artificial Sequence
  Description of Artificial Sequence: Synthetic oligonucleotide
  Sense strand starting at position 3754 of SEQ ID NO: 1885948
guuaacuagauucgagaag

SEQ ID NO: 2378329 - RNA, 19 nt, Artificial Sequence
  Description of Artificial Sequence: Synthetic oligonucleotide
  Antisense strand to SEQ ID NO: 2378328
cuucucgaaucuaguuaac

SEQ ID NO: 2378330 - RNA, 19 nt, Artificial Sequence
  Description of Artificial Sequence: Synthetic oligonucleotide
  Sense strand starting at position 3763 of SEQ ID NO: 1885948
auucgagaaguauaaguuu

SEQ ID NO: 2378331 - RNA, 19 nt, Artificial Sequence
  Description of Artificial Sequence: Synthetic oligonucleotide
  Antisense strand to SEQ ID NO: 2378330
aaacuuauacuucucgaau

SEQ ID NO: 2378332 - RNA, 19 nt, Artificial Sequence
  Description of Artificial Sequence: Synthetic oligonucleotide
  Sense strand starting at position 3766 of SEQ ID NO: 1885948
cgagaaguauaaguuuauu

SEQ ID NO: 2378333 - RNA, 19 nt, Artificial Sequence
  Description of Artificial Sequence: Synthetic oligonucleotide
  Antisense strand to SEQ ID NO: 2378332
aauaaacuuauacuucucg

SEQ ID NO: 2378334 - RNA, 19 nt, Artificial Sequence
  Description of Artificial Sequence: Synthetic oligonucleotide
  Sense strand starting at position 3842 of SEQ ID NO: 1885948
agcauaacgggagaguuau

SEQ ID NO: 2378335 - RNA, 19 nt, Artificial Sequence
  Description of Artificial Sequence: Synthetic oligonucleotide
  Antisense strand to SEQ ID NO: 2378334
auaacucucccguuaugcu

SEQ ID NO: 2378336 - RNA, 19 nt, Artificial Sequence
  Description of Artificial Sequence: Synthetic oligonucleotide
  Sense strand starting at position 3850 of SEQ ID NO: 1885948
gggagaguuauagguaaac

SEQ ID NO: 2378337 - RNA, 19 nt, Artificial Sequence
  Description of Artificial Sequence: Synthetic oligonucleotide
  Antisense strand to SEQ ID NO: 2378336
guuuaccuauaacucuccc

SEQ ID NO: 2378338 - RNA, 19 nt, Artificial Sequence
  Description of Artificial Sequence: Synthetic oligonucleotide
  Sense strand starting at position 3859 of SEQ ID NO: 1885948
auagguaaaccaugagcca

SEQ ID NO: 2378339 - RNA, 19 nt, Artificial Sequence
  Description of Artificial Sequence: Synthetic oligonucleotide
  Antisense strand to SEQ ID NO: 2378338
uggcucaugguuuaccuau

SEQ ID NO: 2378340 - RNA, 19 nt, Artificial Sequence
  Description of Artificial Sequence: Synthetic oligonucleotide
  Sense strand starting at position 3862 of SEQ ID NO: 1885948
gguaaaccaugagccaaau

SEQ ID NO: 2378341 - RNA, 19 nt, Artificial Sequence
  Description of Artificial Sequence: Synthetic oligonucleotide
  Antisense strand to SEQ ID NO: 2378340
auuuggcucaugguuuacc

SEQ ID NO: 2378342 - RNA, 19 nt, Artificial Sequence
  Description of Artificial Sequence: Synthetic oligonucleotide
  Sense strand starting at position 76 of SEQ ID NO: 1885949
uugaacuuaugcuuaguaa

SEQ ID NO: 2378343 - RNA, 19 nt, Artificial Sequence
  Description of Artificial Sequence: Synthetic oligonucleotide
  Antisense strand to SEQ ID NO: 2378342
uuacuaagcauaaguucaa

SEQ ID NO: 2378344 - RNA, 19 nt, Artificial Sequence
  Description of Artificial Sequence: Synthetic oligonucleotide
  Sense strand starting at position 77 of SEQ ID NO: 1885949
ugaacuuaugcuuaguaau

SEQ ID NO: 2378345 - RNA, 19 nt, Artificial Sequence
  Description of Artificial Sequence: Synthetic oligonucleotide
  Antisense strand to SEQ ID NO: 2378344
auuacuaagcauaaguuca

SEQ ID NO: 2378346 - RNA, 19 nt, Artificial Sequence
  Description of Artificial Sequence: Synthetic oligonucleotide
  Sense strand starting at position 410 of SEQ ID NO: 1885949
cggccuaaagcauaaguuu

SEQ ID NO: 2378347 - RNA, 19 nt, Artificial Sequence
  Description of Artificial Sequence: Synthetic oligonucleotide
  Antisense strand to SEQ ID NO: 2378346
aaacuuaugcuuuaggccg

SEQ ID NO: 2378348 - RNA, 19 nt, Artificial Sequence
  Description of Artificial Sequence: Synthetic oligonucleotide
  Sense strand starting at position 870 of SEQ ID NO: 1885949
guucaagauucggcauaug

SEQ ID NO: 2378349 - RNA, 19 nt, Artificial Sequence
  Description of Artificial Sequence: Synthetic oligonucleotide
  Antisense strand to SEQ ID NO: 2378348
cauaugccgaaucuugaac

SEQ ID NO: 2378350 - RNA, 19 nt, Artificial Sequence
  Description of Artificial Sequence: Synthetic oligonucleotide
  Sense strand starting at position 873 of SEQ ID NO: 1885949
caagauucggcauauguug

SEQ ID NO: 2378351 - RNA, 19 nt, Artificial Sequence
  Description of Artificial Sequence: Synthetic oligonucleotide
  Antisense strand to SEQ ID NO: 2378350
caacauaugccgaaucuug

SEQ ID NO: 2378352 - RNA, 19 nt, Artificial Sequence
  Description of Artificial Sequence: Synthetic oligonucleotide
  Sense strand starting at position 1289 of SEQ ID NO: 1885949
caacgauaguaauuguuau

SEQ ID NO: 2378353 - RNA, 19 nt, Artificial Sequence
  Description of Artificial Sequence: Synthetic oligonucleotide
  Antisense strand to SEQ ID NO: 2378352
auaacaauuacuaucguug

SEQ ID NO: 2378354 - RNA, 19 nt, Artificial Sequence
  Description of Artificial Sequence: Synthetic oligonucleotide
  Sense strand starting at position 1446 of SEQ ID NO: 1885949
guaaguuacugccucaaga

SEQ ID NO: 2378355 - RNA, 19 nt, Artificial Sequence
  Description of Artificial Sequence: Synthetic oligonucleotide
  Antisense strand to SEQ ID NO: 2378354
ucuugaggcaguaacuuac

SEQ ID NO: 2378356 - RNA, 19 nt, Artificial Sequence
  Description of Artificial Sequence: Synthetic oligonucleotide
  Sense strand starting at position 1494 of SEQ ID NO: 1885949
aaaguaauggauugguaau

SEQ ID NO: 2378357 - RNA, 19 nt, Artificial Sequence
  Description of Artificial Sequence: Synthetic oligonucleotide
  Antisense strand to SEQ ID NO: 2378356
auuaccaauccauuacuuu

SEQ ID NO: 2378358 - RNA, 19 nt, Artificial Sequence
  Description of Artificial Sequence: Synthetic oligonucleotide
  Sense strand starting at position 1504 of SEQ ID NO: 1885949
auugguaaugggugacuga

SEQ ID NO: 2378359 - RNA, 19 nt, Artificial Sequence
  Description of Artificial Sequence: Synthetic oligonucleotide
  Antisense strand to SEQ ID NO: 2378358
ucagucacccauuaccaau

SEQ ID NO: 2378360 - RNA, 19 nt, Artificial Sequence
  Description of Artificial Sequence: Synthetic oligonucleotide
  Sense strand starting at position 1517 of SEQ ID NO: 1885949
gacugagguccacaaagcu

SEQ ID NO: 2378361 - RNA, 19 nt, Artificial Sequence
  Description of Artificial Sequence: Synthetic oligonucleotide
  Antisense strand to SEQ ID NO: 2378360
agcuuuguggaccucaguc

SEQ ID NO: 2378362 - RNA, 19 nt, Artificial Sequence
  Description of Artificial Sequence: Synthetic oligonucleotide
  Sense strand starting at position 1525 of SEQ ID NO: 1885949
uccacaaagcucgauaaga

SEQ ID NO: 2378363 - RNA, 19 nt, Artificial Sequence
  Description of Artificial Sequence: Synthetic oligonucleotide
  Antisense strand to SEQ ID NO: 2378362
ucuuaucgagcuuugugga

SEQ ID NO: 2378364 - RNA, 19 nt, Artificial Sequence
  Description of Artificial Sequence: Synthetic oligonucleotide
  Sense strand starting at position 1603 of SEQ ID NO: 1885949
cacugagacacgugagguu

SEQ ID NO: 2378365 - RNA, 19 nt, Artificial Sequence
  Description of Artificial Sequence: Synthetic oligonucleotide
  Antisense strand to SEQ ID NO: 2378364
aaccucacgugucucagug

SEQ ID NO: 2378366 - RNA, 19 nt, Artificial Sequence
  Description of Artificial Sequence: Synthetic oligonucleotide
  Sense strand starting at position 2858 of SEQ ID NO: 1885949
ccuagaaaguggcucugaa

SEQ ID NO: 2378367 - RNA, 19 nt, Artificial Sequence
  Description of Artificial Sequence: Synthetic oligonucleotide
  Antisense strand to SEQ ID NO: 2378366
uucagagccacuuucuagg

SEQ ID NO: 2378368 - RNA, 19 nt, Artificial Sequence
  Description of Artificial Sequence: Synthetic oligonucleotide
  Sense strand starting at position 2904 of SEQ ID NO: 1885949
gacucauucccgugaacau

SEQ ID NO: 2378369 - RNA, 19 nt, Artificial Sequence
  Description of Artificial Sequence: Synthetic oligonucleotide
  Antisense strand to SEQ ID NO: 2378368
auguucacgggaaugaguc

SEQ ID NO: 2378370 - RNA, 19 nt, Artificial Sequence
  Description of Artificial Sequence: Synthetic oligonucleotide
  Sense strand starting at position 2905 of SEQ ID NO: 1885949
acucauucccgugaacauc

SEQ ID NO: 2378371 - RNA, 19 nt, Artificial Sequence
  Description of Artificial Sequence: Synthetic oligonucleotide
  Antisense strand to SEQ ID NO: 2378370
gauguucacgggaaugagu

SEQ ID NO: 2378372 - RNA, 19 nt, Artificial Sequence
  Description of Artificial Sequence: Synthetic oligonucleotide
  Sense strand starting at position 2934 of SEQ ID NO: 1885949
ugcguuuauguugcaauaa

SEQ ID NO: 2378373 - RNA, 19 nt, Artificial Sequence
  Description of Artificial Sequence: Synthetic oligonucleotide
  Antisense strand to SEQ ID NO: 2378372
uuauugcaacauaaacgca

SEQ ID NO: 2378374 - RNA, 19 nt, Artificial Sequence
  Description of Artificial Sequence: Synthetic oligonucleotide
  Sense strand starting at position 3190 of SEQ ID NO: 1885949
uggacauggguguaucuuu

SEQ ID NO: 2378375 - RNA, 19 nt, Artificial Sequence
  Description of Artificial Sequence: Synthetic oligonucleotide
  Antisense strand to SEQ ID NO: 2378374
aaagauacacccaugucca

SEQ ID NO: 2378376 - RNA, 19 nt, Artificial Sequence
  Description of Artificial Sequence: Synthetic oligonucleotide
  Sense strand starting at position 3251 of SEQ ID NO: 1885949
uuacuaauagcuggcauaa

SEQ ID NO: 2378377 - RNA, 19 nt, Artificial Sequence
  Description of Artificial Sequence: Synthetic oligonucleotide
  Antisense strand to SEQ ID NO: 2378376
uuaugccagcuauuaguaa

SEQ ID NO: 2378378 - RNA, 19 nt, Artificial Sequence
  Description of Artificial Sequence: Synthetic oligonucleotide
  Sense strand starting at position 3393 of SEQ ID NO: 1885949
acauaaucugaucguccau

SEQ ID NO: 2378379 - RNA, 19 nt, Artificial Sequence
  Description of Artificial Sequence: Synthetic oligonucleotide
  Antisense strand to SEQ ID NO: 2378378
auggacgaucagauuaugu

SEQ ID NO: 2378380 - RNA, 19 nt, Artificial Sequence
  Description of Artificial Sequence: Synthetic oligonucleotide
  Sense strand starting at position 3395 of SEQ ID NO: 1885949
auaaucugaucguccauua

SEQ ID NO: 2378381 - RNA, 19 nt, Artificial Sequence
  Description of Artificial Sequence: Synthetic oligonucleotide
  Antisense strand to SEQ ID NO: 2378380
uaauggacgaucagauuau

SEQ ID NO: 2378382 - RNA, 19 nt, Artificial Sequence
  Description of Artificial Sequence: Synthetic oligonucleotide
  Sense strand starting at position 3400 of SEQ ID NO: 1885949
cugaucguccauuaagguu

SEQ ID NO: 2378383 - RNA, 19 nt, Artificial Sequence
  Description of Artificial Sequence: Synthetic oligonucleotide
  Antisense strand to SEQ ID NO: 2378382
aaccuuaauggacgaucag

SEQ ID NO: 2378384 - RNA, 19 nt, Artificial Sequence
  Description of Artificial Sequence: Synthetic oligonucleotide
  Sense strand starting at position 3428 of SEQ ID NO: 1885949
cuguguauuugugcuuaua

SEQ ID NO: 2378385 - RNA, 19 nt, Artificial Sequence
  Description of Artificial Sequence: Synthetic oligonucleotide
  Antisense strand to SEQ ID NO: 2378384
uauaagcacaaauacacag

SEQ ID NO: 2378386 - RNA, 19 nt, Artificial Sequence
  Description of Artificial Sequence: Synthetic oligonucleotide
  Sense strand starting at position 3430 of SEQ ID NO: 1885949
guguauuugugcuuauaau

SEQ ID NO: 2378387 - RNA, 19 nt, Artificial Sequence
  Description of Artificial Sequence: Synthetic oligonucleotide
  Antisense strand to SEQ ID NO: 2378386
auuauaagcacaaauacac

SEQ ID NO: 2378388 - RNA, 19 nt, Artificial Sequence
  Description of Artificial Sequence: Synthetic oligonucleotide
  Sense strand starting at position 3491 of SEQ ID NO: 1885949
uggacuguccuguaaggag

SEQ ID NO: 2378389 - RNA, 19 nt, Artificial Sequence
  Description of Artificial Sequence: Synthetic oligonucleotide
  Antisense strand to SEQ ID NO: 2378388
cuccuuacaggacagucca

SEQ ID NO: 2378390 - RNA, 19 nt, Artificial Sequence
  Description of Artificial Sequence: Synthetic oligonucleotide
  Sense strand starting at position 3505 of SEQ ID NO: 1885949
aggagauaauuguuuagca

SEQ ID NO: 2378391 - RNA, 19 nt, Artificial Sequence
  Description of Artificial Sequence: Synthetic oligonucleotide
  Antisense strand to SEQ ID NO: 2378390
ugcuaaacaauuaucuccu

SEQ ID NO: 2378392 - RNA, 19 nt, Artificial Sequence
  Description of Artificial Sequence: Synthetic oligonucleotide
  Sense strand starting at position 3506 of SEQ ID NO: 1885949
ggagauaauuguuuagcaa

SEQ ID NO: 2378393 - RNA, 19 nt, Artificial Sequence
  Description of Artificial Sequence: Synthetic oligonucleotide
  Antisense strand to SEQ ID NO: 2378392
uugcuaaacaauuaucucc

SEQ ID NO: 2378394 - RNA, 19 nt, Artificial Sequence
  Description of Artificial Sequence: Synthetic oligonucleotide
  Sense strand starting at position 3507 of SEQ ID NO: 1885949
gagauaauuguuuagcaac

SEQ ID NO: 2378395 - RNA, 19 nt, Artificial Sequence
  Description of Artificial Sequence: Synthetic oligonucleotide
  Antisense strand to SEQ ID NO: 2378394
guugcuaaacaauuaucuc

SEQ ID NO: 2378396 - RNA, 19 nt, Artificial Sequence
  Description of Artificial Sequence: Synthetic oligonucleotide
  Sense strand starting at position 3514 of SEQ ID NO: 1885949
uuguuuagcaacguguuau

SEQ ID NO: 2378397 - RNA, 19 nt, Artificial Sequence
  Description of Artificial Sequence: Synthetic oligonucleotide
  Antisense strand to SEQ ID NO: 2378396
auaacacguugcuaaacaa

SEQ ID NO: 2378398 - RNA, 19 nt, Artificial Sequence
  Description of Artificial Sequence: Synthetic oligonucleotide
  Sense strand starting at position 3639 of SEQ ID NO: 1885949
ucgaaauuauuuggaaaga

SEQ ID NO: 2378399 - RNA, 19 nt, Artificial Sequence
  Description of Artificial Sequence: Synthetic oligonucleotide
  Antisense strand to SEQ ID NO: 2378398
ucuuuccaaauaauuucga

SEQ ID NO: 2378400 - RNA, 19 nt, Artificial Sequence
  Description of Artificial Sequence: Synthetic oligonucleotide
  Sense strand starting at position 3640 of SEQ ID NO: 1885949
cgaaauuauuuggaaagac

SEQ ID NO: 2378401 - RNA, 19 nt, Artificial Sequence
  Description of Artificial Sequence: Synthetic oligonucleotide
  Antisense strand to SEQ ID NO: 2378400
gucuuuccaaauaauuucg

SEQ ID NO: 2378402 - RNA, 19 nt, Artificial Sequence
  Description of Artificial Sequence: Synthetic oligonucleotide
  Sense strand starting at position 3652 of SEQ ID NO: 1885949
gaaagacuggaguguuaac

SEQ ID NO: 2378403 - RNA, 19 nt, Artificial Sequence
  Description of Artificial Sequence: Synthetic oligonucleotide
  Antisense strand to SEQ ID NO: 2378402
guuaacacuccagucuuuc

SEQ ID NO: 2378404 - RNA, 19 nt, Artificial Sequence
  Description of Artificial Sequence: Synthetic oligonucleotide
  Sense strand starting at position 3659 of SEQ ID NO: 1885949
uggaguguuaacuagauuc

SEQ ID NO: 2378405 - RNA, 19 nt, Artificial Sequence
  Description of Artificial Sequence: Synthetic oligonucleotide
  Antisense strand to SEQ ID NO: 2378404
gaaucuaguuaacacucca

SEQ ID NO: 2378406 - RNA, 19 nt, Artificial Sequence
  Description of Artificial Sequence: Synthetic oligonucleotide
  Sense strand starting at position 3661 of SEQ ID NO: 1885949
gaguguuaacuagauucga

SEQ ID NO: 2378407 - RNA, 19 nt, Artificial Sequence
  Description of Artificial Sequence: Synthetic oligonucleotide
  Antisense strand to SEQ ID NO: 2378406
ucgaaucuaguuaacacuc

SEQ ID NO: 2378408 - RNA, 19 nt, Artificial Sequence
  Description of Artificial Sequence: Synthetic oligonucleotide
  Sense strand starting at position 3665 of SEQ ID NO: 1885949
guuaacuagauucgagaag

SEQ ID NO: 2378409 - RNA, 19 nt, Artificial Sequence
  Description of Artificial Sequence: Synthetic oligonucleotide
  Antisense strand to SEQ ID NO: 2378408
cuucucgaaucuaguuaac

SEQ ID NO: 2378410 - RNA, 19 nt, Artificial Sequence
  Description of Artificial Sequence: Synthetic oligonucleotide
  Sense strand starting at position 3674 of SEQ ID NO: 1885949
auucgagaaguauaaguuu

SEQ ID NO: 2378411 - RNA, 19 nt, Artificial Sequence
  Description of Artificial Sequence: Synthetic oligonucleotide
  Antisense strand to SEQ ID NO: 2378410
aaacuuauacuucucgaau

SEQ ID NO: 2378412 - RNA, 19 nt, Artificial Sequence
  Description of Artificial Sequence: Synthetic oligonucleotide
  Sense strand starting at position 3677 of SEQ ID NO: 1885949
cgagaaguauaaguuuauu

SEQ ID NO: 2378413 - RNA, 19 nt, Artificial Sequence
  Description of Artificial Sequence: Synthetic oligonucleotide
  Antisense strand to SEQ ID NO: 2378412
aauaaacuuauacuucucg

SEQ ID NO: 2378414 - RNA, 19 nt, Artificial Sequence
  Description of Artificial Sequence: Synthetic oligonucleotide
  Sense strand starting at position 3753 of SEQ ID NO: 1885949
agcauaacgggagaguuau

SEQ ID NO: 2378415 - RNA, 19 nt, Artificial Sequence
  Description of Artificial Sequence: Synthetic oligonucleotide
  Antisense strand to SEQ ID NO: 2378414
auaacucucccguuaugcu

SEQ ID NO: 2378416 - RNA, 19 nt, Artificial Sequence
  Description of Artificial Sequence: Synthetic oligonucleotide
  Sense strand starting at position 3761 of SEQ ID NO: 1885949
gggagaguuauagguaaac

SEQ ID NO: 2378417 - RNA, 19 nt, Artificial Sequence
  Description of Artificial Sequence: Synthetic oligonucleotide
  Antisense strand to SEQ ID NO: 2378416
guuuaccuauaacucuccc

SEQ ID NO: 2378418 - RNA, 19 nt, Artificial Sequence
  Description of Artificial Sequence: Synthetic oligonucleotide
  Sense strand starting at position 3770 of SEQ ID NO: 1885949
auagguaaaccaugagcca

SEQ ID NO: 2378419 - RNA, 19 nt, Artificial Sequence
  Description of Artificial Sequence: Synthetic oligonucleotide
  Antisense strand to SEQ ID NO: 2378418
uggcucaugguuuaccuau

SEQ ID NO: 2378420 - RNA, 19 nt, Artificial Sequence
  Description of Artificial Sequence: Synthetic oligonucleotide
  Sense strand starting at position 3773 of SEQ ID NO: 1885949
gguaaaccaugagccaaau

SEQ ID NO: 2378421 - RNA, 19 nt, Artificial Sequence
  Description of Artificial Sequence: Synthetic oligonucleotide
  Antisense strand to SEQ ID NO: 2378420
auuuggcucaugguuuacc

SEQ ID NO: 2378422 - RNA, 19 nt, Artificial Sequence
  Description of Artificial Sequence: Synthetic oligonucleotide
  Sense strand starting at position 740 of SEQ ID NO: 1885951
gcgaggacucgguagggaa

SEQ ID NO: 2378423 - RNA, 19 nt, Artificial Sequence
  Description of Artificial Sequence: Synthetic oligonucleotide
  Antisense strand to SEQ ID NO: 2378422
uucccuaccgaguccucgc

SEQ ID NO: 2378424 - RNA, 19 nt, Artificial Sequence
  Description of Artificial Sequence: Synthetic oligonucleotide
  Sense strand starting at position 1597 of SEQ ID NO: 1885951
agcagugucgcuccacauu

SEQ ID NO: 2378425 - RNA, 19 nt, Artificial Sequence
  Description of Artificial Sequence: Synthetic oligonucleotide
  Antisense strand to SEQ ID NO: 2378424
aauguggagcgacacugcu

SEQ ID NO: 2378426 - RNA, 19 nt, Artificial Sequence
  Description of Artificial Sequence: Synthetic oligonucleotide
  Sense strand starting at position 1991 of SEQ ID NO: 1885951
cagaaaggcuguuucuaua

SEQ ID NO: 2378427 - RNA, 19 nt, Artificial Sequence
  Description of Artificial Sequence: Synthetic oligonucleotide
  Antisense strand to SEQ ID NO: 2378426
uauagaaacagccuuucug

SEQ ID NO: 2378428 - RNA, 19 nt, Artificial Sequence
  Description of Artificial Sequence: Synthetic oligonucleotide
  Sense strand starting at position 2035 of SEQ ID NO: 1885951
aaaugaguccgcgacggaa

SEQ ID NO: 2378429 - RNA, 19 nt, Artificial Sequence
  Description of Artificial Sequence: Synthetic oligonucleotide
  Antisense strand to SEQ ID NO: 2378428
uuccgucgcggacucauuu

SEQ ID NO: 2378430 - RNA, 19 nt, Artificial Sequence
  Description of Artificial Sequence: Synthetic oligonucleotide
  Sense strand starting at position 2076 of SEQ ID NO: 1885951
uguuuacugccgaguggga

SEQ ID NO: 2378431 - RNA, 19 nt, Artificial Sequence
  Description of Artificial Sequence: Synthetic oligonucleotide
  Antisense strand to SEQ ID NO: 2378430
ucccacucggcaguaaaca

SEQ ID NO: 2378432 - RNA, 19 nt, Artificial Sequence
  Description of Artificial Sequence: Synthetic oligonucleotide
  Sense strand starting at position 2424 of SEQ ID NO: 1885951
agcguucuucuugaaggau

SEQ ID NO: 2378433 - RNA, 19 nt, Artificial Sequence
  Description of Artificial Sequence: Synthetic oligonucleotide
  Antisense strand to SEQ ID NO: 2378432
auccuucaagaagaacgcu

SEQ ID NO: 2378434 - RNA, 19 nt, Artificial Sequence
  Description of Artificial Sequence: Synthetic oligonucleotide
  Sense strand starting at position 2427 of SEQ ID NO: 1885951
guucuucuugaaggauauu

SEQ ID NO: 2378435 - RNA, 19 nt, Artificial Sequence
  Description of Artificial Sequence: Synthetic oligonucleotide
  Antisense strand to SEQ ID NO: 2378434
aauauccuucaagaagaac

SEQ ID NO: 2378436 - RNA, 19 nt, Artificial Sequence
  Description of Artificial Sequence: Synthetic oligonucleotide
  Sense strand starting at position 2436 of SEQ ID NO: 1885951
gaaggauauucuuugugca

SEQ ID NO: 2378437 - RNA, 19 nt, Artificial Sequence
  Description of Artificial Sequence: Synthetic oligonucleotide
  Antisense strand to SEQ ID NO: 2378436
ugcacaaagaauauccuuc

SEQ ID NO: 2378438 - RNA, 19 nt, Artificial Sequence
  Description of Artificial Sequence: Synthetic oligonucleotide
  Sense strand starting at position 2437 of SEQ ID NO: 1885951
aaggauauucuuugugcaa

SEQ ID NO: 2378439 - RNA, 19 nt, Artificial Sequence
  Description of Artificial Sequence: Synthetic oligonucleotide
  Antisense strand to SEQ ID NO: 2378438
uugcacaaagaauauccuu

SEQ ID NO: 2378440 - RNA, 19 nt, Artificial Sequence
  Description of Artificial Sequence: Synthetic oligonucleotide
  Sense strand starting at position 2438 of SEQ ID NO: 1885951
aggauauucuuugugcaag

SEQ ID NO: 2378441 - RNA, 19 nt, Artificial Sequence
  Description of Artificial Sequence: Synthetic oligonucleotide
  Antisense strand to SEQ ID NO: 2378440
cuugcacaaagaauauccu

SEQ ID NO: 2378442 - RNA, 19 nt, Artificial Sequence
  Description of Artificial Sequence: Synthetic oligonucleotide
  Sense strand starting at position 2440 of SEQ ID NO: 1885951
gauauucuuugugcaagac

SEQ ID NO: 2378443 - RNA, 19 nt, Artificial Sequence
  Description of Artificial Sequence: Synthetic oligonucleotide
  Antisense strand to SEQ ID NO: 2378442
gucuugcacaaagaauauc

SEQ ID NO: 2378444 - RNA, 19 nt, Artificial Sequence
  Description of Artificial Sequence: Synthetic oligonucleotide
  Sense strand starting at position 2552 of SEQ ID NO: 1885951
agugguuaguuccuggaaa

SEQ ID NO: 2378445 - RNA, 19 nt, Artificial Sequence
  Description of Artificial Sequence: Synthetic oligonucleotide
  Antisense strand to SEQ ID NO: 2378444
uuuccaggaacuaaccacu

SEQ ID NO: 2378446 - RNA, 19 nt, Artificial Sequence
  Description of Artificial Sequence: Synthetic oligonucleotide
  Sense strand starting at position 2554 of SEQ ID NO: 1885951
ugguuaguuccuggaaacc

SEQ ID NO: 2378447 - RNA, 19 nt, Artificial Sequence
  Description of Artificial Sequence: Synthetic oligonucleotide
  Antisense strand to SEQ ID NO: 2378446
gguuuccaggaacuaacca

SEQ ID NO: 2378448 - RNA, 19 nt, Artificial Sequence
  Description of Artificial Sequence: Synthetic oligonucleotide
  Sense strand starting at position 2595 of SEQ ID NO: 1885951
ccaaaucucgauuaugguu

SEQ ID NO: 2378449 - RNA, 19 nt, Artificial Sequence
  Description of Artificial Sequence: Synthetic oligonucleotide
  Antisense strand to SEQ ID NO: 2378448
aaccauaaucgagauuugg

SEQ ID NO: 2378450 - RNA, 19 nt, Artificial Sequence
  Description of Artificial Sequence: Synthetic oligonucleotide
  Sense strand starting at position 2620 of SEQ ID NO: 1885951
agucuugacugacucagua

SEQ ID NO: 2378451 - RNA, 19 nt, Artificial Sequence
  Description of Artificial Sequence: Synthetic oligonucleotide
  Antisense strand to SEQ ID NO: 2378450
uacugagucagucaagacu

SEQ ID NO: 2378452 - RNA, 19 nt, Artificial Sequence
  Description of Artificial Sequence: Synthetic oligonucleotide
  Sense strand starting at position 2786 of SEQ ID NO: 1885951
uguugucugguggagaaau

SEQ ID NO: 2378453 - RNA, 19 nt, Artificial Sequence
  Description of Artificial Sequence: Synthetic oligonucleotide
  Antisense strand to SEQ ID NO: 2378452
auuucuccaccagacaaca

SEQ ID NO: 2378454 - RNA, 19 nt, Artificial Sequence
  Description of Artificial Sequence: Synthetic oligonucleotide
  Sense strand starting at position 2819 of SEQ ID NO: 1885951
gguucaguugcagguauuu

SEQ ID NO: 2378455 - RNA, 19 nt, Artificial Sequence
  Description of Artificial Sequence: Synthetic oligonucleotide
  Antisense strand to SEQ ID NO: 2378454
aaauaccugcaacugaacc

SEQ ID NO: 2378456 - RNA, 19 nt, Artificial Sequence
  Description of Artificial Sequence: Synthetic oligonucleotide
  Sense strand starting at position 2842 of SEQ ID NO: 1885951
ggcguauugagagauuaga

SEQ ID NO: 2378457 - RNA, 19 nt, Artificial Sequence
  Description of Artificial Sequence: Synthetic oligonucleotide
  Antisense strand to SEQ ID NO: 2378456
ucuaaucucucaauacgcc

SEQ ID NO: 2378458 - RNA, 19 nt, Artificial Sequence
  Description of Artificial Sequence: Synthetic oligonucleotide
  Sense strand starting at position 2853 of SEQ ID NO: 1885951
agauuagaguuuccucuuu

SEQ ID NO: 2378459 - RNA, 19 nt, Artificial Sequence
  Description of Artificial Sequence: Synthetic oligonucleotide
  Antisense strand to SEQ ID NO: 2378458
aaagaggaaacucuaaucu

SEQ ID NO: 2378460 - RNA, 19 nt, Artificial Sequence
  Description of Artificial Sequence: Synthetic oligonucleotide
  Sense strand starting at position 2855 of SEQ ID NO: 1885951
auuagaguuuccucuuuga

SEQ ID NO: 2378461 - RNA, 19 nt, Artificial Sequence
  Description of Artificial Sequence: Synthetic oligonucleotide
  Antisense strand to SEQ ID NO: 2378460
ucaaagaggaaacucuaau

SEQ ID NO: 2378462 - RNA, 19 nt, Artificial Sequence
  Description of Artificial Sequence: Synthetic oligonucleotide
  Sense strand starting at position 2874 of SEQ ID NO: 1885951
gugugauggcaguagaaag

SEQ ID NO: 2378463 - RNA, 19 nt, Artificial Sequence
  Description of Artificial Sequence: Synthetic oligonucleotide
  Antisense strand to SEQ ID NO: 2378462
cuuucuacugccaucacac

SEQ ID NO: 2378464 - RNA, 19 nt, Artificial Sequence
  Description of Artificial Sequence: Synthetic oligonucleotide
  Sense strand starting at position 2888 of SEQ ID NO: 1885951
gaaagaguguuguuuaucu

SEQ ID NO: 2378465 - RNA, 19 nt, Artificial Sequence
  Description of Artificial Sequence: Synthetic oligonucleotide
  Antisense strand to SEQ ID NO: 2378464
agauaaacaacacucuuuc

SEQ ID NO: 2378466 - RNA, 19 nt, Artificial Sequence
  Description of Artificial Sequence: Synthetic oligonucleotide
  Sense strand starting at position 2890 of SEQ ID NO: 1885951
aagaguguuguuuaucuua

SEQ ID NO: 2378467 - RNA, 19 nt, Artificial Sequence
  Description of Artificial Sequence: Synthetic oligonucleotide
  Antisense strand to SEQ ID NO: 2378466
uaagauaaacaacacucuu

SEQ ID NO: 2378468 - RNA, 19 nt, Artificial Sequence
  Description of Artificial Sequence: Synthetic oligonucleotide
  Sense strand starting at position 2930 of SEQ ID NO: 1885951
gaggcagucauauggaugu

SEQ ID NO: 2378469 - RNA, 19 nt, Artificial Sequence
  Description of Artificial Sequence: Synthetic oligonucleotide
  Antisense strand to SEQ ID NO: 2378468
acauccauaugacugccuc

SEQ ID NO: 2378470 - RNA, 19 nt, Artificial Sequence
  Description of Artificial Sequence: Synthetic oligonucleotide
  Sense strand starting at position 2932 of SEQ ID NO: 1885951
ggcagucauauggaugugu

SEQ ID NO: 2378471 - RNA, 19 nt, Artificial Sequence
  Description of Artificial Sequence: Synthetic oligonucleotide
  Antisense strand to SEQ ID NO: 2378470
acacauccauaugacugcc

SEQ ID NO: 2378472 - RNA, 19 nt, Artificial Sequence
  Description of Artificial Sequence: Synthetic oligonucleotide
  Sense strand starting at position 3000 of SEQ ID NO: 1885951
cggagguucugagugauag

SEQ ID NO: 2378473 - RNA, 19 nt, Artificial Sequence
  Description of Artificial Sequence: Synthetic oligonucleotide
  Antisense strand to SEQ ID NO: 2378472
cuaucacucagaaccuccg

SEQ ID NO: 2378474 - RNA, 19 nt, Artificial Sequence
  Description of Artificial Sequence: Synthetic oligonucleotide
  Sense strand starting at position 3001 of SEQ ID NO: 1885951
ggagguucugagugauagc

SEQ ID NO: 2378475 - RNA, 19 nt, Artificial Sequence
  Description of Artificial Sequence: Synthetic oligonucleotide
  Antisense strand to SEQ ID NO: 2378474
gcuaucacucagaaccucc

SEQ ID NO: 2378476 - RNA, 19 nt, Artificial Sequence
  Description of Artificial Sequence: Synthetic oligonucleotide
  Sense strand starting at position 3012 of SEQ ID NO: 1885951
gugauagccagauaaucug

SEQ ID NO: 2378477 - RNA, 19 nt, Artificial Sequence
  Description of Artificial Sequence: Synthetic oligonucleotide
  Antisense strand to SEQ ID NO: 2378476
cagauuaucuggcuaucac

SEQ ID NO: 2378478 - RNA, 19 nt, Artificial Sequence
  Description of Artificial Sequence: Synthetic oligonucleotide
  Sense strand starting at position 3021 of SEQ ID NO: 1885951
agauaaucugagggcuauu

SEQ ID NO: 2378479 - RNA, 19 nt, Artificial Sequence
  Description of Artificial Sequence: Synthetic oligonucleotide
  Antisense strand to SEQ ID NO: 2378478
aauagcccucagauuaucu

SEQ ID NO: 2378480 - RNA, 19 nt, Artificial Sequence
  Description of Artificial Sequence: Synthetic oligonucleotide
  Sense strand starting at position 3130 of SEQ ID NO: 1885951
gucacagaaauguagguau

SEQ ID NO: 2378481 - RNA, 19 nt, Artificial Sequence
  Description of Artificial Sequence: Synthetic oligonucleotide
  Antisense strand to SEQ ID NO: 2378480
auaccuacauuucugugac

SEQ ID NO: 2378482 - RNA, 19 nt, Artificial Sequence
  Description of Artificial Sequence: Synthetic oligonucleotide
  Sense strand starting at position 3132 of SEQ ID NO: 1885951
cacagaaauguagguaugu

SEQ ID NO: 2378483 - RNA, 19 nt, Artificial Sequence
  Description of Artificial Sequence: Synthetic oligonucleotide
  Antisense strand to SEQ ID NO: 2378482
acauaccuacauuucugug

SEQ ID NO: 2378484 - RNA, 19 nt, Artificial Sequence
  Description of Artificial Sequence: Synthetic oligonucleotide
  Sense strand starting at position 3134 of SEQ ID NO: 1885951
cagaaauguagguauguga

SEQ ID NO: 2378485 - RNA, 19 nt, Artificial Sequence
  Description of Artificial Sequence: Synthetic oligonucleotide
  Antisense strand to SEQ ID NO: 2378484
ucacauaccuacauuucug

SEQ ID NO: 2378486 - RNA, 19 nt, Artificial Sequence
  Description of Artificial Sequence: Synthetic oligonucleotide
  Sense strand starting at position 3137 of SEQ ID NO: 1885951
aaauguagguaugugaaau

SEQ ID NO: 2378487 - RNA, 19 nt, Artificial Sequence
  Description of Artificial Sequence: Synthetic oligonucleotide
  Antisense strand to SEQ ID NO: 2378486
auuucacauaccuacauuu

SEQ ID NO: 2378488 - RNA, 19 nt, Artificial Sequence
  Description of Artificial Sequence: Synthetic oligonucleotide
  Sense strand starting at position 3138 of SEQ ID NO: 1885951
aauguagguaugugaaaug

SEQ ID NO: 2378489 - RNA, 19 nt, Artificial Sequence
  Description of Artificial Sequence: Synthetic oligonucleotide
  Antisense strand to SEQ ID NO: 2378488
cauuucacauaccuacauu

SEQ ID NO: 2378490 - RNA, 19 nt, Artificial Sequence
  Description of Artificial Sequence: Synthetic oligonucleotide
  Sense strand starting at position 3153 of SEQ ID NO: 1885951
aauguugguguuuaaagaa

SEQ ID NO: 2378491 - RNA, 19 nt, Artificial Sequence
  Description of Artificial Sequence: Synthetic oligonucleotide
  Antisense strand to SEQ ID NO: 2378490
uucuuuaaacaccaacauu

SEQ ID NO: 2378492 - RNA, 19 nt, Artificial Sequence
  Description of Artificial Sequence: Synthetic oligonucleotide
  Sense strand starting at position 3678 of SEQ ID NO: 1885951
acuuuaaugguaugugaau

SEQ ID NO: 2378493 - RNA, 19 nt, Artificial Sequence
  Description of Artificial Sequence: Synthetic oligonucleotide
  Antisense strand to SEQ ID NO: 2378492
auucacauaccauuaaagu

SEQ ID NO: 2378494 - RNA, 19 nt, Artificial Sequence
  Description of Artificial Sequence: Synthetic oligonucleotide
  Sense strand starting at position 3679 of SEQ ID NO: 1885951
cuuuaaugguaugugaauu

SEQ ID NO: 2378495 - RNA, 19 nt, Artificial Sequence
  Description of Artificial Sequence: Synthetic oligonucleotide
  Antisense strand to SEQ ID NO: 2378494
aauucacauaccauuaaag

SEQ ID NO: 2378496 - RNA, 19 nt, Artificial Sequence
  Description of Artificial Sequence: Synthetic oligonucleotide
  Sense strand starting at position 3728 of SEQ ID NO: 1885951
aaagaaaugugaucagguu

SEQ ID NO: 2378497 - RNA, 19 nt, Artificial Sequence
  Description of Artificial Sequence: Synthetic oligonucleotide
  Antisense strand to SEQ ID NO: 2378496
aaccugaucacauuucuuu

SEQ ID NO: 2378498 - RNA, 19 nt, Artificial Sequence
  Description of Artificial Sequence: Synthetic oligonucleotide
  Sense strand starting at position 3899 of SEQ ID NO: 1885951
ucaaucccgcaguagaaau

SEQ ID NO: 2378499 - RNA, 19 nt, Artificial Sequence
  Description of Artificial Sequence: Synthetic oligonucleotide
  Antisense strand to SEQ ID NO: 2378498
auuucuacugcgggauuga

SEQ ID NO: 2378500 - RNA, 19 nt, Artificial Sequence
  Description of Artificial Sequence: Synthetic oligonucleotide
  Sense strand starting at position 3933 of SEQ ID NO: 1885951
aaagaaucuugguucuaug

SEQ ID NO: 2378501 - RNA, 19 nt, Artificial Sequence
  Description of Artificial Sequence: Synthetic oligonucleotide
  Antisense strand to SEQ ID NO: 2378500
cauagaaccaagauucuuu

SEQ ID NO: 2378502 - RNA, 19 nt, Artificial Sequence
  Description of Artificial Sequence: Synthetic oligonucleotide
  Sense strand starting at position 158 of SEQ ID NO: 1885952
cugagacacucuucucaga

SEQ ID NO: 2378503 - RNA, 19 nt, Artificial Sequence
  Description of Artificial Sequence: Synthetic oligonucleotide
  Antisense strand to SEQ ID NO: 2378502
ucugagaagagugucucag

SEQ ID NO: 2378504 - RNA, 19 nt, Artificial Sequence
  Description of Artificial Sequence: Synthetic oligonucleotide
  Sense strand starting at position 172 of SEQ ID NO: 1885952
ucagacuucugcucccaga

SEQ ID NO: 2378505 - RNA, 19 nt, Artificial Sequence
  Description of Artificial Sequence: Synthetic oligonucleotide
  Antisense strand to SEQ ID NO: 2378504
ucugggagcagaagucuga

SEQ ID NO: 2378506 - RNA, 19 nt, Artificial Sequence
  Description of Artificial Sequence: Synthetic oligonucleotide
  Sense strand starting at position 369 of SEQ ID NO: 1885952
ucuguuaucuauccuauug

SEQ ID NO: 2378507 - RNA, 19 nt, Artificial Sequence
  Description of Artificial Sequence: Synthetic oligonucleotide
  Antisense strand to SEQ ID NO: 2378506
caauaggauagauaacaga

SEQ ID NO: 2378508 - RNA, 19 nt, Artificial Sequence
  Description of Artificial Sequence: Synthetic oligonucleotide
  Sense strand starting at position 431 of SEQ ID NO: 1885952
acagguaaaugacuuugau

SEQ ID NO: 2378509 - RNA, 19 nt, Artificial Sequence
  Description of Artificial Sequence: Synthetic oligonucleotide
  Antisense strand to SEQ ID NO: 2378508
aucaaagucauuuaccugu

SEQ ID NO: 2378510 - RNA, 19 nt, Artificial Sequence
  Description of Artificial Sequence: Synthetic oligonucleotide
  Sense strand starting at position 434 of SEQ ID NO: 1885952
gguaaaugacuuugauacc

SEQ ID NO: 2378511 - RNA, 19 nt, Artificial Sequence
  Description of Artificial Sequence: Synthetic oligonucleotide
  Antisense strand to SEQ ID NO: 2378510
gguaucaaagucauuuacc

SEQ ID NO: 2378512 - RNA, 19 nt, Artificial Sequence
  Description of Artificial Sequence: Synthetic oligonucleotide
  Sense strand starting at position 464 of SEQ ID NO: 1885952
auuaaauguaguggaguuu

SEQ ID NO: 2378513 - RNA, 19 nt, Artificial Sequence
  Description of Artificial Sequence: Synthetic oligonucleotide
  Antisense strand to SEQ ID NO: 2378512
aaacuccacuacauuuaau

SEQ ID NO: 2378514 - RNA, 19 nt, Artificial Sequence
  Description of Artificial Sequence: Synthetic oligonucleotide
  Sense strand starting at position 819 of SEQ ID NO: 1885952
agaugaggauucuccuuau

SEQ ID NO: 2378515 - RNA, 19 nt, Artificial Sequence
  Description of Artificial Sequence: Synthetic oligonucleotide
  Antisense strand to SEQ ID NO: 2378514
auaaggagaauccucaucu

SEQ ID NO: 2378516 - RNA, 19 nt, Artificial Sequence
  Description of Artificial Sequence: Synthetic oligonucleotide
  Sense strand starting at position 822 of SEQ ID NO: 1885952
ugaggauucuccuuaugcu

SEQ ID NO: 2378517 - RNA, 19 nt, Artificial Sequence
  Description of Artificial Sequence: Synthetic oligonucleotide
  Antisense strand to SEQ ID NO: 2378516
agcauaaggagaauccuca

SEQ ID NO: 2378518 - RNA, 19 nt, Artificial Sequence
  Description of Artificial Sequence: Synthetic oligonucleotide
  Sense strand starting at position 823 of SEQ ID NO: 1885952
gaggauucuccuuaugcug

SEQ ID NO: 2378519 - RNA, 19 nt, Artificial Sequence
  Description of Artificial Sequence: Synthetic oligonucleotide
  Antisense strand to SEQ ID NO: 2378518
cagcauaaggagaauccuc

SEQ ID NO: 2378520 - RNA, 19 nt, Artificial Sequence
  Description of Artificial Sequence: Synthetic oligonucleotide
  Sense strand starting at position 1130 of SEQ ID NO: 1885952
ugugaccacuuagucuaaa

SEQ ID NO: 2378521 - RNA, 19 nt, Artificial Sequence
  Description of Artificial Sequence: Synthetic oligonucleotide
  Antisense strand to SEQ ID NO: 2378520
uuuagacuaaguggucaca

SEQ ID NO: 2378522 - RNA, 19 nt, Artificial Sequence
  Description of Artificial Sequence: Synthetic oligonucleotide
  Sense strand starting at position 1393 of SEQ ID NO: 1885952
ugucuuggcucuccuggaa

SEQ ID NO: 2378523 - RNA, 19 nt, Artificial Sequence
  Description of Artificial Sequence: Synthetic oligonucleotide
  Antisense strand to SEQ ID NO: 2378522
uuccaggagagccaagaca

SEQ ID NO: 2378524 - RNA, 19 nt, Artificial Sequence
  Description of Artificial Sequence: Synthetic oligonucleotide
  Sense strand starting at position 1452 of SEQ ID NO: 1885952
ugaaucuaguagucgacua

SEQ ID NO: 2378525 - RNA, 19 nt, Artificial Sequence
  Description of Artificial Sequence: Synthetic oligonucleotide
  Antisense strand to SEQ ID NO: 2378524
uagucgacuacuagauuca

SEQ ID NO: 2378526 - RNA, 19 nt, Artificial Sequence
  Description of Artificial Sequence: Synthetic oligonucleotide
  Sense strand starting at position 1754 of SEQ ID NO: 1885952
acuuacagcgcuuacaaua

SEQ ID NO: 2378527 - RNA, 19 nt, Artificial Sequence
  Description of Artificial Sequence: Synthetic oligonucleotide
  Antisense strand to SEQ ID NO: 2378526
uauuguaagcgcuguaagu

SEQ ID NO: 2378528 - RNA, 19 nt, Artificial Sequence
  Description of Artificial Sequence: Synthetic oligonucleotide
  Sense strand starting at position 1888 of SEQ ID NO: 1885952
acugucuucuuagcagaau

SEQ ID NO: 2378529 - RNA, 19 nt, Artificial Sequence
  Description of Artificial Sequence: Synthetic oligonucleotide
  Antisense strand to SEQ ID NO: 2378528
auucugcuaagaagacagu

SEQ ID NO: 2378530 - RNA, 19 nt, Artificial Sequence
  Description of Artificial Sequence: Synthetic oligonucleotide
  Sense strand starting at position 1924 of SEQ ID NO: 1885952
gaguccuacguuuagcgau

SEQ ID NO: 2378531 - RNA, 19 nt, Artificial Sequence
  Description of Artificial Sequence: Synthetic oligonucleotide
  Antisense strand to SEQ ID NO: 2378530
aucgcuaaacguaggacuc

SEQ ID NO: 2378532 - RNA, 19 nt, Artificial Sequence
  Description of Artificial Sequence: Synthetic oligonucleotide
  Sense strand starting at position 1937 of SEQ ID NO: 1885952
agcgauuggcaagaaucau

SEQ ID NO: 2378533 - RNA, 19 nt, Artificial Sequence
  Description of Artificial Sequence: Synthetic oligonucleotide
  Antisense strand to SEQ ID NO: 2378532
augauucuugccaaucgcu

SEQ ID NO: 2378534 - RNA, 19 nt, Artificial Sequence
  Description of Artificial Sequence: Synthetic oligonucleotide
  Sense strand starting at position 1948 of SEQ ID NO: 1885952
agaaucaugcacugacaga

SEQ ID NO: 2378535 - RNA, 19 nt, Artificial Sequence
  Description of Artificial Sequence: Synthetic oligonucleotide
  Antisense strand to SEQ ID NO: 2378534
ucugucagugcaugauucu

SEQ ID NO: 2378536 - RNA, 19 nt, Artificial Sequence
  Description of Artificial Sequence: Synthetic oligonucleotide
  Sense strand starting at position 2400 of SEQ ID NO: 1885952
gucuguaggcgucgaauuu

SEQ ID NO: 2378537 - RNA, 19 nt, Artificial Sequence
  Description of Artificial Sequence: Synthetic oligonucleotide
  Antisense strand to SEQ ID NO: 2378536
aaauucgacgccuacagac

SEQ ID NO: 2378538 - RNA, 19 nt, Artificial Sequence
  Description of Artificial Sequence: Synthetic oligonucleotide
  Sense strand starting at position 2433 of SEQ ID NO: 1885952
guaguuuaguuucuggaau

SEQ ID NO: 2378539 - RNA, 19 nt, Artificial Sequence
  Description of Artificial Sequence: Synthetic oligonucleotide
  Antisense strand to SEQ ID NO: 2378538
auuccagaaacuaaacuac

SEQ ID NO: 2378540 - RNA, 19 nt, Artificial Sequence
  Description of Artificial Sequence: Synthetic oligonucleotide
  Sense strand starting at position 2500 of SEQ ID NO: 1885952
acgcccaaucuguaauaau

SEQ ID NO: 2378541 - RNA, 19 nt, Artificial Sequence
  Description of Artificial Sequence: Synthetic oligonucleotide
  Antisense strand to SEQ ID NO: 2378540
auuauuacagauugggcgu

SEQ ID NO: 2378542 - RNA, 19 nt, Artificial Sequence
  Description of Artificial Sequence: Synthetic oligonucleotide
  Sense strand starting at position 2540 of SEQ ID NO: 1885952
ggagccaguuuccuuucua

SEQ ID NO: 2378543 - RNA, 19 nt, Artificial Sequence
  Description of Artificial Sequence: Synthetic oligonucleotide
  Antisense strand to SEQ ID NO: 2378542
uagaaaggaaacuggcucc

SEQ ID NO: 2378544 - RNA, 19 nt, Artificial Sequence
  Description of Artificial Sequence: Synthetic oligonucleotide
  Sense strand starting at position 2541 of SEQ ID NO: 1885952
gagccaguuuccuuucuag

SEQ ID NO: 2378545 - RNA, 19 nt, Artificial Sequence
  Description of Artificial Sequence: Synthetic oligonucleotide
  Antisense strand to SEQ ID NO: 2378544
cuagaaaggaaacuggcuc

SEQ ID NO: 2378546 - RNA, 19 nt, Artificial Sequence
  Description of Artificial Sequence: Synthetic oligonucleotide
  Sense strand starting at position 2544 of SEQ ID NO: 1885952
ccaguuuccuuucuagaga

SEQ ID NO: 2378547 - RNA, 19 nt, Artificial Sequence
  Description of Artificial Sequence: Synthetic oligonucleotide
  Antisense strand to SEQ ID NO: 2378546
ucucuagaaaggaaacugg

SEQ ID NO: 2378548 - RNA, 19 nt, Artificial Sequence
  Description of Artificial Sequence: Synthetic oligonucleotide
  Sense strand starting at position 2944 of SEQ ID NO: 1885952
cccaaucugaguuguguca

SEQ ID NO: 2378549 - RNA, 19 nt, Artificial Sequence
  Description of Artificial Sequence: Synthetic oligonucleotide
  Antisense strand to SEQ ID NO: 2378548
ugacacaacucagauuggg

SEQ ID NO: 2378550 - RNA, 19 nt, Artificial Sequence
  Description of Artificial Sequence: Synthetic oligonucleotide
  Sense strand starting at position 2973 of SEQ ID NO: 1885952
cagggucagcugugucaau

SEQ ID NO: 2378551 - RNA, 19 nt, Artificial Sequence
  Description of Artificial Sequence: Synthetic oligonucleotide
  Antisense strand to SEQ ID NO: 2378550
auugacacagcugacccug

SEQ ID NO: 2378552 - RNA, 19 nt, Artificial Sequence
  Description of Artificial Sequence: Synthetic oligonucleotide
  Sense strand starting at position 2974 of SEQ ID NO: 1885952
agggucagcugugucaaua

SEQ ID NO: 2378553 - RNA, 19 nt, Artificial Sequence
  Description of Artificial Sequence: Synthetic oligonucleotide
  Antisense strand to SEQ ID NO: 2378552
uauugacacagcugacccu

SEQ ID NO: 2378554 - RNA, 19 nt, Artificial Sequence
  Description of Artificial Sequence: Synthetic oligonucleotide
  Sense strand starting at position 3151 of SEQ ID NO: 1885952
auuaguagagcuuaucaug

SEQ ID NO: 2378555 - RNA, 19 nt, Artificial Sequence
  Description of Artificial Sequence: Synthetic oligonucleotide
  Antisense strand to SEQ ID NO: 2378554
caugauaagcucuacuaau

SEQ ID NO: 2378556 - RNA, 19 nt, Artificial Sequence
  Description of Artificial Sequence: Synthetic oligonucleotide
  Sense strand starting at position 3159 of SEQ ID NO: 1885952
agcuuaucaugcuuuauga

SEQ ID NO: 2378557 - RNA, 19 nt, Artificial Sequence
  Description of Artificial Sequence: Synthetic oligonucleotide
  Antisense strand to SEQ ID NO: 2378556
ucauaaagcaugauaagcu

SEQ ID NO: 2378558 - RNA, 19 nt, Artificial Sequence
  Description of Artificial Sequence: Synthetic oligonucleotide
  Sense strand starting at position 3172 of SEQ ID NO: 1885952
uuaugacuccuaugaaaug

SEQ ID NO: 2378559 - RNA, 19 nt, Artificial Sequence
  Description of Artificial Sequence: Synthetic oligonucleotide
  Antisense strand to SEQ ID NO: 2378558
cauuucauaggagucauaa

SEQ ID NO: 2378560 - RNA, 19 nt, Artificial Sequence
  Description of Artificial Sequence: Synthetic oligonucleotide
  Sense strand starting at position 3183 of SEQ ID NO: 1885952
augaaauggagauggugua

SEQ ID NO: 2378561 - RNA, 19 nt, Artificial Sequence
  Description of Artificial Sequence: Synthetic oligonucleotide
  Antisense strand to SEQ ID NO: 2378560
uacaccaucuccauuucau

SEQ ID NO: 2378562 - RNA, 19 nt, Artificial Sequence
  Description of Artificial Sequence: Synthetic oligonucleotide
  Sense strand starting at position 3195 of SEQ ID NO: 1885952
ugguguacaugacuuaaua

SEQ ID NO: 2378563 - RNA, 19 nt, Artificial Sequence
  Description of Artificial Sequence: Synthetic oligonucleotide
  Antisense strand to SEQ ID NO: 2378562
uauuaagucauguacacca

SEQ ID NO: 2378564 - RNA, 19 nt, Artificial Sequence
  Description of Artificial Sequence: Synthetic oligonucleotide
  Sense strand starting at position 3385 of SEQ ID NO: 1885952
ucggaagguuuauuggaaa

SEQ ID NO: 2378565 - RNA, 19 nt, Artificial Sequence
  Description of Artificial Sequence: Synthetic oligonucleotide
  Antisense strand to SEQ ID NO: 2378564
uuuccaauaaaccuuccga

SEQ ID NO: 2378566 - RNA, 19 nt, Artificial Sequence
  Description of Artificial Sequence: Synthetic oligonucleotide
  Sense strand starting at position 3446 of SEQ ID NO: 1885952
gguccaaaguguucaggca

SEQ ID NO: 2378567 - RNA, 19 nt, Artificial Sequence
  Description of Artificial Sequence: Synthetic oligonucleotide
  Antisense strand to SEQ ID NO: 2378566
ugccugaacacuuuggacc

SEQ ID NO: 2378568 - RNA, 19 nt, Artificial Sequence
  Description of Artificial Sequence: Synthetic oligonucleotide
  Sense strand starting at position 3520 of SEQ ID NO: 1885952
uugauuccuuggucacuga

SEQ ID NO: 2378569 - RNA, 19 nt, Artificial Sequence
  Description of Artificial Sequence: Synthetic oligonucleotide
  Antisense strand to SEQ ID NO: 2378568
ucagugaccaaggaaucaa

SEQ ID NO: 2378570 - RNA, 19 nt, Artificial Sequence
  Description of Artificial Sequence: Synthetic oligonucleotide
  Sense strand starting at position 3521 of SEQ ID NO: 1885952
ugauuccuuggucacugau

SEQ ID NO: 2378571 - RNA, 19 nt, Artificial Sequence
  Description of Artificial Sequence: Synthetic oligonucleotide
  Antisense strand to SEQ ID NO: 2378570
aucagugaccaaggaauca

SEQ ID NO: 2378572 - RNA, 19 nt, Artificial Sequence
  Description of Artificial Sequence: Synthetic oligonucleotide
  Sense strand starting at position 3524 of SEQ ID NO: 1885952
uuccuuggucacugauguu

SEQ ID NO: 2378573 - RNA, 19 nt, Artificial Sequence
  Description of Artificial Sequence: Synthetic oligonucleotide
  Antisense strand to SEQ ID NO: 2378572
aacaucagugaccaaggaa

SEQ ID NO: 2378574 - RNA, 19 nt, Artificial Sequence
  Description of Artificial Sequence: Synthetic oligonucleotide
  Sense strand starting at position 3580 of SEQ ID NO: 1885952
uaagaugaguuucugaguu

SEQ ID NO: 2378575 - RNA, 19 nt, Artificial Sequence
  Description of Artificial Sequence: Synthetic oligonucleotide
  Antisense strand to SEQ ID NO: 2378574
aacucagaaacucaucuua

SEQ ID NO: 2378576 - RNA, 19 nt, Artificial Sequence
  Description of Artificial Sequence: Synthetic oligonucleotide
  Sense strand starting at position 3854 of SEQ ID NO: 1885952
gaaaucuuaugguuuggcu

SEQ ID NO: 2378577 - RNA, 19 nt, Artificial Sequence
  Description of Artificial Sequence: Synthetic oligonucleotide
  Antisense strand to SEQ ID NO: 2378576
agccaaaccauaagauuuc

SEQ ID NO: 2378578 - RNA, 19 nt, Artificial Sequence
  Description of Artificial Sequence: Synthetic oligonucleotide
  Sense strand starting at position 3870 of SEQ ID NO: 1885952
gcuuuacccuugcuugaac

SEQ ID NO: 2378579 - RNA, 19 nt, Artificial Sequence
  Description of Artificial Sequence: Synthetic oligonucleotide
  Antisense strand to SEQ ID NO: 2378578
guucaagcaaggguaaagc

SEQ ID NO: 2378580 - RNA, 19 nt, Artificial Sequence
  Description of Artificial Sequence: Synthetic oligonucleotide
  Sense strand starting at position 3882 of SEQ ID NO: 1885952
cuugaacgcagucagauua

SEQ ID NO: 2378581 - RNA, 19 nt, Artificial Sequence
  Description of Artificial Sequence: Synthetic oligonucleotide
  Antisense strand to SEQ ID NO: 2378580
uaaucugacugcguucaag

SEQ ID NO: 2378582 - RNA, 19 nt, Artificial Sequence
  Description of Artificial Sequence: Synthetic oligonucleotide
  Sense strand starting at position 117 of SEQ ID NO: 1885953
gcuguuagugggcaaggaa

SEQ ID NO: 2378583 - RNA, 19 nt, Artificial Sequence
  Description of Artificial Sequence: Synthetic oligonucleotide
  Antisense strand to SEQ ID NO: 2378582
uuccuugcccacuaacagc

SEQ ID NO: 2378584 - RNA, 19 nt, Artificial Sequence
  Description of Artificial Sequence: Synthetic oligonucleotide
  Sense strand starting at position 132 of SEQ ID NO: 1885953
ggaagaaccugcuuccuca

SEQ ID NO: 2378585 - RNA, 19 nt, Artificial Sequence
  Description of Artificial Sequence: Synthetic oligonucleotide
  Antisense strand to SEQ ID NO: 2378584
ugaggaagcagguucuucc

SEQ ID NO: 2378586 - RNA, 19 nt, Artificial Sequence
  Description of Artificial Sequence: Synthetic oligonucleotide
  Sense strand starting at position 258 of SEQ ID NO: 1885953
ccuaguaaaccugggugau

SEQ ID NO: 2378587 - RNA, 19 nt, Artificial Sequence
  Description of Artificial Sequence: Synthetic oligonucleotide
  Antisense strand to SEQ ID NO: 2378586
aucacccagguuuacuagg

SEQ ID NO: 2378588 - RNA, 19 nt, Artificial Sequence
  Description of Artificial Sequence: Synthetic oligonucleotide
  Sense strand starting at position 259 of SEQ ID NO: 1885953
cuaguaaaccugggugaug

SEQ ID NO: 2378589 - RNA, 19 nt, Artificial Sequence
  Description of Artificial Sequence: Synthetic oligonucleotide
  Antisense strand to SEQ ID NO: 2378588
caucacccagguuuacuag

SEQ ID NO: 2378590 - RNA, 19 nt, Artificial Sequence
  Description of Artificial Sequence: Synthetic oligonucleotide
  Sense strand starting at position 260 of SEQ ID NO: 1885953
uaguaaaccugggugauga

SEQ ID NO: 2378591 - RNA, 19 nt, Artificial Sequence
  Description of Artificial Sequence: Synthetic oligonucleotide
  Antisense strand to SEQ ID NO: 2378590
ucaucacccagguuuacua

SEQ ID NO: 2378592 - RNA, 19 nt, Artificial Sequence
  Description of Artificial Sequence: Synthetic oligonucleotide
  Sense strand starting at position 271 of SEQ ID NO: 1885953
ggugaugaguuccucaaga

SEQ ID NO: 2378593 - RNA, 19 nt, Artificial Sequence
  Description of Artificial Sequence: Synthetic oligonucleotide
  Antisense strand to SEQ ID NO: 2378592
ucuugaggaacucaucacc

SEQ ID NO: 2378594 - RNA, 19 nt, Artificial Sequence
  Description of Artificial Sequence: Synthetic oligonucleotide
  Sense strand starting at position 582 of SEQ ID NO: 1885953
ggaugacauugucaucaga

SEQ ID NO: 2378595 - RNA, 19 nt, Artificial Sequence
  Description of Artificial Sequence: Synthetic oligonucleotide
  Antisense strand to SEQ ID NO: 2378594
ucugaugacaaugucaucc

SEQ ID NO: 2378596 - RNA, 19 nt, Artificial Sequence
  Description of Artificial Sequence: Synthetic oligonucleotide
  Sense strand starting at position 584 of SEQ ID NO: 1885953
augacauugucaucagagc

SEQ ID NO: 2378597 - RNA, 19 nt, Artificial Sequence
  Description of Artificial Sequence: Synthetic oligonucleotide
  Antisense strand to SEQ ID NO: 2378596
gcucugaugacaaugucau

SEQ ID NO: 2378598 - RNA, 19 nt, Artificial Sequence
  Description of Artificial Sequence: Synthetic oligonucleotide
  Sense strand starting at position 585 of SEQ ID NO: 1885953
ugacauugucaucagagcu

SEQ ID NO: 2378599 - RNA, 19 nt, Artificial Sequence
  Description of Artificial Sequence: Synthetic oligonucleotide
  Antisense strand to SEQ ID NO: 2378598
agcucugaugacaauguca

SEQ ID NO: 2378600 - RNA, 19 nt, Artificial Sequence
  Description of Artificial Sequence: Synthetic oligonucleotide
  Sense strand starting at position 702 of SEQ ID NO: 1885953
ccuuguaguagccgucaca

SEQ ID NO: 2378601 - RNA, 19 nt, Artificial Sequence
  Description of Artificial Sequence: Synthetic oligonucleotide
  Antisense strand to SEQ ID NO: 2378600
ugugacggcuacuacaagg

SEQ ID NO: 2378602 - RNA, 19 nt, Artificial Sequence
  Description of Artificial Sequence: Synthetic oligonucleotide
  Sense strand starting at position 722 of SEQ ID NO: 1885953
gcuacaucugccgucucau

SEQ ID NO: 2378603 - RNA, 19 nt, Artificial Sequence
  Description of Artificial Sequence: Synthetic oligonucleotide
  Antisense strand to SEQ ID NO: 2378602
augagacggcagauguagc

SEQ ID NO: 2378604 - RNA, 19 nt, Artificial Sequence
  Description of Artificial Sequence: Synthetic oligonucleotide
  Sense strand starting at position 772 of SEQ ID NO: 1885953
gaagacgucccagaugcua

SEQ ID NO: 2378605 - RNA, 19 nt, Artificial Sequence
  Description of Artificial Sequence: Synthetic oligonucleotide
  Antisense strand to SEQ ID NO: 2378604
uagcaucugggacgucuuc

SEQ ID NO: 2378606 - RNA, 19 nt, Artificial Sequence
  Description of Artificial Sequence: Synthetic oligonucleotide
  Sense strand starting at position 989 of SEQ ID NO: 1885953
cuugucuuccuaggagugu

SEQ ID NO: 2378607 - RNA, 19 nt, Artificial Sequence
  Description of Artificial Sequence: Synthetic oligonucleotide
  Antisense strand to SEQ ID NO: 2378606
acacuccuaggaagacaag

SEQ ID NO: 2378608 - RNA, 19 nt, Artificial Sequence
  Description of Artificial Sequence: Synthetic oligonucleotide
  Sense strand starting at position 1061 of SEQ ID NO: 1885953
uuuagcucugauuagcaua

SEQ ID NO: 2378609 - RNA, 19 nt, Artificial Sequence
  Description of Artificial Sequence: Synthetic oligonucleotide
  Antisense strand to SEQ ID NO: 2378608
uaugcuaaucagagcuaaa

SEQ ID NO: 2378610 - RNA, 19 nt, Artificial Sequence
  Description of Artificial Sequence: Synthetic oligonucleotide
  Sense strand starting at position 1064 of SEQ ID NO: 1885953
agcucugauuagcauacau

SEQ ID NO: 2378611 - RNA, 19 nt, Artificial Sequence
  Description of Artificial Sequence: Synthetic oligonucleotide
  Antisense strand to SEQ ID NO: 2378610
auguaugcuaaucagagcu

SEQ ID NO: 2378612 - RNA, 19 nt, Artificial Sequence
  Description of Artificial Sequence: Synthetic oligonucleotide
  Sense strand starting at position 1074 of SEQ ID NO: 1885953
agcauacauuaucugugua

SEQ ID NO: 2378613 - RNA, 19 nt, Artificial Sequence
  Description of Artificial Sequence: Synthetic oligonucleotide
  Antisense strand to SEQ ID NO: 2378612
uacacagauaauguaugcu

SEQ ID NO: 2378614 - RNA, 19 nt, Artificial Sequence
  Description of Artificial Sequence: Synthetic oligonucleotide
  Sense strand starting at position 1115 of SEQ ID NO: 1885953
aaauaucuguuaggagcuu

SEQ ID NO: 2378615 - RNA, 19 nt, Artificial Sequence
  Description of Artificial Sequence: Synthetic oligonucleotide
  Antisense strand to SEQ ID NO: 2378614
aagcuccuaacagauauuu

SEQ ID NO: 2378616 - RNA, 19 nt, Artificial Sequence
  Description of Artificial Sequence: Synthetic oligonucleotide
  Sense strand starting at position 1272 of SEQ ID NO: 1885953
gagggaagguuccauagua

SEQ ID NO: 2378617 - RNA, 19 nt, Artificial Sequence
  Description of Artificial Sequence: Synthetic oligonucleotide
  Antisense strand to SEQ ID NO: 2378616
uacuauggaaccuucccuc

SEQ ID NO: 2378618 - RNA, 19 nt, Artificial Sequence
  Description of Artificial Sequence: Synthetic oligonucleotide
  Sense strand starting at position 1577 of SEQ ID NO: 1885953
cucugagacugaugggcaa

SEQ ID NO: 2378619 - RNA, 19 nt, Artificial Sequence
  Description of Artificial Sequence: Synthetic oligonucleotide
  Antisense strand to SEQ ID NO: 2378618
uugcccaucagucucagag

SEQ ID NO: 2378620 - RNA, 19 nt, Artificial Sequence
  Description of Artificial Sequence: Synthetic oligonucleotide
  Sense strand starting at position 1661 of SEQ ID NO: 1885953
cugaguggccucuaucuaa

SEQ ID NO: 2378621 - RNA, 19 nt, Artificial Sequence
  Description of Artificial Sequence: Synthetic oligonucleotide
  Antisense strand to SEQ ID NO: 2378620
uuagauagaggccacucag

SEQ ID NO: 2378622 - RNA, 19 nt, Artificial Sequence
  Description of Artificial Sequence: Synthetic oligonucleotide
  Sense strand starting at position 1882 of SEQ ID NO: 1885953
gaucguccuugaucgcaga

SEQ ID NO: 2378623 - RNA, 19 nt, Artificial Sequence
  Description of Artificial Sequence: Synthetic oligonucleotide
  Antisense strand to SEQ ID NO: 2378622
ucugcgaucaaggacgauc

SEQ ID NO: 2378624 - RNA, 19 nt, Artificial Sequence
  Description of Artificial Sequence: Synthetic oligonucleotide
  Sense strand starting at position 2010 of SEQ ID NO: 1885953
uguggucuguggcuacaga

SEQ ID NO: 2378625 - RNA, 19 nt, Artificial Sequence
  Description of Artificial Sequence: Synthetic oligonucleotide
  Antisense strand to SEQ ID NO: 2378624
ucuguagccacagaccaca

SEQ ID NO: 2378626 - RNA, 19 nt, Artificial Sequence
  Description of Artificial Sequence: Synthetic oligonucleotide
  Sense strand starting at position 2296 of SEQ ID NO: 1885953
ugccaugugucucugucua

SEQ ID NO: 2378627 - RNA, 19 nt, Artificial Sequence
  Description of Artificial Sequence: Synthetic oligonucleotide
  Antisense strand to SEQ ID NO: 2378626
uagacagagacacauggca

SEQ ID NO: 2378628 - RNA, 19 nt, Artificial Sequence
  Description of Artificial Sequence: Synthetic oligonucleotide
  Sense strand starting at position 2610 of SEQ ID NO: 1885953
gccuuauggcuuuguuguu

SEQ ID NO: 2378629 - RNA, 19 nt, Artificial Sequence
  Description of Artificial Sequence: Synthetic oligonucleotide
  Antisense strand to SEQ ID NO: 2378628
aacaacaaagccauaaggc

SEQ ID NO: 2378630 - RNA, 19 nt, Artificial Sequence
  Description of Artificial Sequence: Synthetic oligonucleotide
  Sense strand starting at position 2617 of SEQ ID NO: 1885953
ggcuuuguuguugguuaau

SEQ ID NO: 2378631 - RNA, 19 nt, Artificial Sequence
  Description of Artificial Sequence: Synthetic oligonucleotide
  Antisense strand to SEQ ID NO: 2378630
auuaaccaacaacaaagcc

SEQ ID NO: 2378632 - RNA, 19 nt, Artificial Sequence
  Description of Artificial Sequence: Synthetic oligonucleotide
  Sense strand starting at position 2628 of SEQ ID NO: 1885953
ugguuaauuucuuuguacu

SEQ ID NO: 2378633 - RNA, 19 nt, Artificial Sequence
  Description of Artificial Sequence: Synthetic oligonucleotide
  Antisense strand to SEQ ID NO: 2378632
aguacaaagaaauuaacca

SEQ ID NO: 2378634 - RNA, 19 nt, Artificial Sequence
  Description of Artificial Sequence: Synthetic oligonucleotide
  Sense strand starting at position 2629 of SEQ ID NO: 1885953
gguuaauuucuuuguacuc

SEQ ID NO: 2378635 - RNA, 19 nt, Artificial Sequence
  Description of Artificial Sequence: Synthetic oligonucleotide
  Antisense strand to SEQ ID NO: 2378634
gaguacaaagaaauuaacc

SEQ ID NO: 2378636 - RNA, 19 nt, Artificial Sequence
  Description of Artificial Sequence: Synthetic oligonucleotide
  Sense strand starting at position 2630 of SEQ ID NO: 1885953
guuaauuucuuuguacucu

SEQ ID NO: 2378637 - RNA, 19 nt, Artificial Sequence
  Description of Artificial Sequence: Synthetic oligonucleotide
  Antisense strand to SEQ ID NO: 2378636
agaguacaaagaaauuaac

SEQ ID NO: 2378638 - RNA, 19 nt, Artificial Sequence
  Description of Artificial Sequence: Synthetic oligonucleotide
  Sense strand starting at position 2716 of SEQ ID NO: 1885953
agacuagguucucuggauu

SEQ ID NO: 2378639 - RNA, 19 nt, Artificial Sequence
  Description of Artificial Sequence: Synthetic oligonucleotide
  Antisense strand to SEQ ID NO: 2378638
aauccagagaaccuagucu

SEQ ID NO: 2378640 - RNA, 19 nt, Artificial Sequence
  Description of Artificial Sequence: Synthetic oligonucleotide
  Sense strand starting at position 3135 of SEQ ID NO: 1885953
acaucagcuguuuauguau

SEQ ID NO: 2378641 - RNA, 19 nt, Artificial Sequence
  Description of Artificial Sequence: Synthetic oligonucleotide
  Antisense strand to SEQ ID NO: 2378640
auacauaaacagcugaugu

SEQ ID NO: 2378642 - RNA, 19 nt, Artificial Sequence
  Description of Artificial Sequence: Synthetic oligonucleotide
  Sense strand starting at position 3244 of SEQ ID NO: 1885953
gacgcuuaauaaugugagu

SEQ ID NO: 2378643 - RNA, 19 nt, Artificial Sequence
  Description of Artificial Sequence: Synthetic oligonucleotide
  Antisense strand to SEQ ID NO: 2378642
acucacauuauuaagcguc

SEQ ID NO: 2378644 - RNA, 19 nt, Artificial Sequence
  Description of Artificial Sequence: Synthetic oligonucleotide
  Sense strand starting at position 3246 of SEQ ID NO: 1885953
cgcuuaauaaugugaguaa

SEQ ID NO: 2378645 - RNA, 19 nt, Artificial Sequence
  Description of Artificial Sequence: Synthetic oligonucleotide
  Antisense strand to SEQ ID NO: 2378644
uuacucacauuauuaagcg

SEQ ID NO: 2378646 - RNA, 19 nt, Artificial Sequence
  Description of Artificial Sequence: Synthetic oligonucleotide
  Sense strand starting at position 3247 of SEQ ID NO: 1885953
gcuuaauaaugugaguaaa

SEQ ID NO: 2378647 - RNA, 19 nt, Artificial Sequence
  Description of Artificial Sequence: Synthetic oligonucleotide
  Antisense strand to SEQ ID NO: 2378646
uuuacucacauuauuaagc

SEQ ID NO: 2378648 - RNA, 19 nt, Artificial Sequence
  Description of Artificial Sequence: Synthetic oligonucleotide
  Sense strand starting at position 3505 of SEQ ID NO: 1885953
gugcuauuacuggaaccgu

SEQ ID NO: 2378649 - RNA, 19 nt, Artificial Sequence
  Description of Artificial Sequence: Synthetic oligonucleotide
  Antisense strand to SEQ ID NO: 2378648
acgguuccaguaauagcac

SEQ ID NO: 2378650 - RNA, 19 nt, Artificial Sequence
  Description of Artificial Sequence: Synthetic oligonucleotide
  Sense strand starting at position 3519 of SEQ ID NO: 1885953
accguuagagguugaggaa

SEQ ID NO: 2378651 - RNA, 19 nt, Artificial Sequence
  Description of Artificial Sequence: Synthetic oligonucleotide
  Antisense strand to SEQ ID NO: 2378650
uuccucaaccucuaacggu

SEQ ID NO: 2378652 - RNA, 19 nt, Artificial Sequence
  Description of Artificial Sequence: Synthetic oligonucleotide
  Sense strand starting at position 3520 of SEQ ID NO: 1885953
ccguuagagguugaggaaa

SEQ ID NO: 2378653 - RNA, 19 nt, Artificial Sequence
  Description of Artificial Sequence: Synthetic oligonucleotide
  Antisense strand to SEQ ID NO: 2378652
uuuccucaaccucuaacgg

SEQ ID NO: 2378654 - RNA, 19 nt, Artificial Sequence
  Description of Artificial Sequence: Synthetic oligonucleotide
  Sense strand starting at position 3522 of SEQ ID NO: 1885953
guuagagguugaggaaacu

SEQ ID NO: 2378655 - RNA, 19 nt, Artificial Sequence
  Description of Artificial Sequence: Synthetic oligonucleotide
  Antisense strand to SEQ ID NO: 2378654
aguuuccucaaccucuaac

SEQ ID NO: 2378656 - RNA, 19 nt, Artificial Sequence
  Description of Artificial Sequence: Synthetic oligonucleotide
  Sense strand starting at position 3568 of SEQ ID NO: 1885953
agcaauugugcggagguuu

SEQ ID NO: 2378657 - RNA, 19 nt, Artificial Sequence
  Description of Artificial Sequence: Synthetic oligonucleotide
  Antisense strand to SEQ ID NO: 2378656
aaaccuccgcacaauugcu

SEQ ID NO: 2378658 - RNA, 19 nt, Artificial Sequence
  Description of Artificial Sequence: Synthetic oligonucleotide
  Sense strand starting at position 3714 of SEQ ID NO: 1885953
uggugaugccuguggugaa

SEQ ID NO: 2378659 - RNA, 19 nt, Artificial Sequence
  Description of Artificial Sequence: Synthetic oligonucleotide
  Antisense strand to SEQ ID NO: 2378658
uucaccacaggcaucacca

SEQ ID NO: 2378660 - RNA, 19 nt, Artificial Sequence
  Description of Artificial Sequence: Synthetic oligonucleotide
  Sense strand starting at position 3854 of SEQ ID NO: 1885953
gugugucaauaaggauauu

SEQ ID NO: 2378661 - RNA, 19 nt, Artificial Sequence
  Description of Artificial Sequence: Synthetic oligonucleotide
  Antisense strand to SEQ ID NO: 2378660
aauauccuuauugacacac

SEQ ID NO: 2378662 - RNA, 19 nt, Artificial Sequence
  Description of Artificial Sequence: Synthetic oligonucleotide
  Sense strand starting at position 845 of SEQ ID NO: 1885954
auuguuaugaucuguggga

SEQ ID NO: 2378663 - RNA, 19 nt, Artificial Sequence
  Description of Artificial Sequence: Synthetic oligonucleotide
  Antisense strand to SEQ ID NO: 2378662
ucccacagaucauaacaau

SEQ ID NO: 2378664 - RNA, 19 nt, Artificial Sequence
  Description of Artificial Sequence: Synthetic oligonucleotide
  Sense strand starting at position 846 of SEQ ID NO: 1885954
uuguuaugaucugugggaa

SEQ ID NO: 2378665 - RNA, 19 nt, Artificial Sequence
  Description of Artificial Sequence: Synthetic oligonucleotide
  Antisense strand to SEQ ID NO: 2378664
uucccacagaucauaacaa

SEQ ID NO: 2378666 - RNA, 19 nt, Artificial Sequence
  Description of Artificial Sequence: Synthetic oligonucleotide
  Sense strand starting at position 847 of SEQ ID NO: 1885954
uguuaugaucugugggaag

SEQ ID NO: 2378667 - RNA, 19 nt, Artificial Sequence
  Description of Artificial Sequence: Synthetic oligonucleotide
  Antisense strand to SEQ ID NO: 2378666
cuucccacagaucauaaca

SEQ ID NO: 2378668 - RNA, 19 nt, Artificial Sequence
  Description of Artificial Sequence: Synthetic oligonucleotide
  Sense strand starting at position 866 of SEQ ID NO: 1885954
gcaggauuaugucuuagaa

SEQ ID NO: 2378669 - RNA, 19 nt, Artificial Sequence
  Description of Artificial Sequence: Synthetic oligonucleotide
  Antisense strand to SEQ ID NO: 2378668
uucuaagacauaauccugc

SEQ ID NO: 2378670 - RNA, 19 nt, Artificial Sequence
  Description of Artificial Sequence: Synthetic oligonucleotide
  Sense strand starting at position 875 of SEQ ID NO: 1885954
ugucuuagaacaugaggca

SEQ ID NO: 2378671 - RNA, 19 nt, Artificial Sequence
  Description of Artificial Sequence: Synthetic oligonucleotide
  Antisense strand to SEQ ID NO: 2378670
ugccucauguucuaagaca

SEQ ID NO: 2378672 - RNA, 19 nt, Artificial Sequence
  Description of Artificial Sequence: Synthetic oligonucleotide
  Sense strand starting at position 910 of SEQ ID NO: 1885954
gaaugacauuucuauugug

SEQ ID NO: 2378673 - RNA, 19 nt, Artificial Sequence
  Description of Artificial Sequence: Synthetic oligonucleotide
  Antisense strand to SEQ ID NO: 2378672
cacaauagaaaugucauuc
